(19) United States
(12) Patent Application Publication
(10) Pub. No.: US 2004/0110668 A1
(43) Pub. Date: Jun. 10, 2004

(54) Nucleic acid sequences differentially expressed in cancer tissue

(76) Inventors: Christopher C. Burgess, Westwood, MA (US); Jon H. Astle, Taunton, MA (US); Eddie Carroll III, Norwood, MA (US); Theodore J. Catino, Attleboro, MA (US); Poornima Dwivedi, Alamo, CA (US); Gary A. Molino, Norfolk, MA (US); Arunthathi Thiagalingam, Lexington, MA (US); Marcia E. Lewis, Cohasset, MA (US)

Correspondence Address: PALMER & DODGE, LLP, PAULA CAMPBELL EVANS, 111 HUNTINGTON AVENUE, BOSTON, MA, 02199, US

(21) Appl. No.: 09/969,034

(22) Filed: Oct. 2, 2001

Related U.S. Application Data
(60) Provisional application No. 60/237,271, filed on Oct. 2, 2000.

(51) Int. Cl. A61K 38/17; C07K 14/705; C12Q 1/68; A01K 67/00; C07H 21/04

(52) U.S. Cl. 514/12; 435/6; 435/69.1; 435/320.1; 435/325; 530/350; 800/8; 536/23.5

(57) ABSTRACT

This invention relates to novel nucleic acid sequences which are differentially expressed in cancer cells. The invention also relates to proteins and peptides encoded by the sequences, to diagnostic assays and therapeutic agents based on the sequences and proteins, and to probes, antisense constructs, and antibodies derived from the sequences and proteins or peptides. The subject nucleic acids have been found to be differentially expressed by tumor cells, particularly in colon cancer tissue.

[0001] This application claims priority Under 35 U.S.C. §119(e) from U.S. application No. 60/237,271, filed Oct. 2, 2000.

### FIELD OF THE INVENTION

[0002] The present invention provides nucleic acid sequences and proteins encoded thereby which are differentially expressed in cancer tissues, as well as probes derived from the nucleic acid sequences, antibodies directed to the encoded proteins, and diagnostic methods for determining the presence and state of cancerous cells, especially colon cancer cells.

### BACKGROUND OF THE INVENTION

[0003] Colorectal carcinoma is a malignant neoplastic disease. There is a high incidence of colorectal carcinoma in the Western world, particularly in the United States. Tumors of this type often metastasize through lymphatic and vascular channels. Many patients with colorectal carcinoma eventually die from this disease. In fact, it is estimated that 62,000 persons in the United States alone die of colorectal carcinoma annually.

[0004] However, if diagnosed early, colon cancer may be treated effectively by surgical removal of the cancerous tissue. Colorectal cancers originate in the colorectal epithelium and typically are not extensively vascularized (and therefore not invasive) during the early stages of development. Colorectal cancer is thought to result from the clonal expansion of a single mutant cell in the epithelial lining of the colon or rectum. The transition to a highly vascularized, invasive and ultimately metastatic cancer which spreads throughout the body commonly takes ten years or longer. If the cancer is detected prior to invasion, surgical removal of the cancerous tissue is an effective cure. However, colorectal cancer is often detected only upon manifestation of clinical symptoms, such as pain and black tarry stool. Generally, such symptoms are present only when the disease is well established, often after metastasis has occurred, and the prognosis for the patient is poor, even after surgical resection of the cancerous tissue. Early detection of colorectal cancer therefore is important in that detection may significantly reduce its morbidity.

[0005] Invasive diagnostic methods such as endoscopic examination allow for direct visual identification, removal, and biopsy of potentially cancerous growths such as polyps. Endoscopy is expensive, uncomfortable, inherently risky, and therefore not a practical tool for screening populations to identify those with colorectal cancer. Non-invasive analysis of stool samples for characteristics indicative of the presence of colorectal cancer or precancer is a preferred alternative for early diagnosis, but no known diagnostic method is available which reliably achieves this goal.

### SUMMARY OF THE INVENTION

[0006] The present invention provides nucleic acid sequences and proteins encoded thereby, as well as probes derived from the nucleic acid sequences, antibodies directed to the encoded proteins, and diagnostic methods for detecting cancerous cells, especially colon cancer cells. The sequences disclosed herein have been found to be differentially expressed in colon cancer cell lines and/or colon cancer tissue.

[0007] In one aspect, the invention provides an isolated nucleic acid sequence comprising SEQ ID Nos 1-503, or a sequence complementary thereto.

[0008] In another aspect, the invention provides an isolated nucleic acid comprising a nucleotide sequence which hybridizes under stringent conditions to a sequence of SEQ ID Nos. 1-4470, 4472, 4474, 4476, 4478, 4480, 4482, 4484, 4486, 4488, 4490, 4492, and 4494 or a sequence complementary thereto.

[0009] In another embodiment, the nucleic acid is at least about 80% to about 100% identical to a sequence corresponding to at least about 12, at least about 15, at least about 25, or at least about 40 consecutive nucleotides up to the full length of one of SEQ ID Nos. 1-4470, 4472, 4474, 4476, 4478, 4480, 4482, 4484, 4486, 4488, 4490, 4492, and 4494 or a sequence complementary thereto.

[0010] In another aspect, the invention provides an isolated nucleic acid comprising a nucleotide sequence which hybridizes under stringent conditions to a sequence of SEQ ID Nos. 1-1103, preferably SEQ ID Nos. 1-503, or a sequence complementary thereto. In a related embodiment, the nucleic acid is at least about 80% or about 100% identical to a sequence corresponding to at least about 12, at least about 15, at least about 25, or at least about 40 consecutive nucleotides up to the full length of one of SEQ ID Nos. 1-1103, preferably SEQ ID Nos. 1-503 or a sequence complementary thereto.

[0011] In one embodiment, the invention provides a nucleic acid comprising a nucleotide sequence which hybridizes under stringent conditions to a sequence of SEQ ID Nos. 1-1103, preferably SEQ ID Nos. 1-503, or a sequence complementary thereto, and a transcriptional regulatory sequence operably linked to the nucleotide sequence to render the nucleotide sequence suitable for use as an expression vector. In another embodiment, the nucleic acid may be included in an expression vector capable of replicating in a prokaryotic or eukaryotic cell. In a related embodiment, the invention provides a host cell transfected with the expression vector.

[0012] In another embodiment, the invention provides a transgenic animal having a transgene of a nucleic acid comprising a nucleotide sequence which hybridizes under stringent conditions to a sequence of SEQ ID Nos. 1-1103, preferably SEQ ID Nos 1-503, or a sequence complementary thereto incorporated in cells thereof. The transgene modifies the level of expression of the nucleic acid, the stability of a mRNA transcript of the nucleic acid, or the activity of the encoded product of the nucleic acid.

[0013] In yet another embodiment, the invention provides a substantially pure nucleic acid comprising the nucleotide sequence of SEQ ID Nos 1-1103, or a sequence complementary thereto.

[0014] In yet another embodiment, the invention provides a substantially pure nucleic acid which hybridizes under stringent conditions to a nucleic acid probe corresponding to at least about 12, at least about 15, at least about 25, or at least about 40 consecutive nucleotides up to the full length of one of SEQ ID Nos. 1-1103, preferably SEQ ID Nos 1-503, or a sequence complementary thereto.

[0015] The invention also provides an antisense oligonucleotide analog which hybridizes under stringent conditions to at least 12, at least 25, or at least 50 consecutive nucleotides of one of SEQ ID Nos. 1-4470, 4472, 4474, 4476, 4478, 4480, 4482, 4484, 4486, 4488, 4490, 4492, and 4494 up to the full length of one of SEQ ID Nos. 1-4470, 4472, 4474, 4476, 4478, 4480, 4482, 4484, 4486, 4488, 4490, 4492, and 4494 or a sequence complementary thereto, and which is resistant to cleavage by a nuclease, preferably an endogenous endonuclease or exonuclease.

[0016] In another embodiment, the invention provides a probe/primer comprising a substantially purified oligonucleotide comprising at least about 12, at least about 15, at least about 25, or at least about 40 consecutive nucleotides of SEQ ID Nos 1-1103, or a sequence complementary thereto.

[0017] In another embodiment, the invention provides a probe/primer comprising a substantially purified oligonucleotide, said oligonucleotide containing a region of nucleotide sequence which hybridizes under stringent conditions to at least about 12, at least about 15, at least about 25, or at least about 40 consecutive nucleotides of sense or antisense sequence selected from SEQ ID Nos. 1-1103 up to the full length of one of SEQ ID Nos. 1-1103 or a sequence complementary thereto. In preferred embodiments, the probe selectively hybridizes with a target nucleic acid. In another embodiment, the probe may include a label group attached thereto and able to be detected. The label group may be selected from radioisotopes, fluorescent compounds, enzymes, and enzyme co-factors. The invention further provides arrays of at least about 10, at least about 25, at least about 50, or at least about 100 different probes as described above attached to a solid support.

[0018] In yet another embodiment, the invention pertains to a method of determining the phenotype of a cell comprising detecting the differential expression, relative to a normal cell, of at least one nucleic acid of SEQ ID Nos. 1-4470, 4472, 4474, 4476, 4478, 4480, 4482, 4484, 4486, 4488, 4490, 4492, and 4494, wherein the nucleic acid is differentially expressed by at least a factor of two, at least a factor of five, at least a factor of twenty, or at least a factor of fifty.

[0019] In a still further embodiment, the invention pertains to a method of determining the phenotype of cell, comprising detecting the differential expression, relative to a normal cell, of at least one protein encoded by a nucleic acid which hybridizes under stringent conditions to a sequence selected from the group consisting of SEQ ID Nos. 4472, 4474, 4476, 4478, 4480, 4482, 4484, 4486, 4488, 4490, 4492, and 4494, wherein the protein is differentially expressed by at least a factor of two, at least a factor of five, at least a factor of twenty, an up to at least a factor of 50.

[0020] The invention further provides a method of determining the phenotype of cell, comprising detecting the differential expression, relative to a normal cell, of at least one polypeptide selected from the group of polypeptides of SEQ ID Nos. 4471, 4473, 4475, 4477, 4479, 4481, 4483, 4485, 4487, 4489, 4491, and 4493, wherein the polypeptide is differentially expressed by at least a factor of two, at least a factor of five, at least a factor of twenty, an up to at least a factor of 50.

[0021] In yet another embodiment, the invention pertains to a method of determining the phenotype of a cell comprising detecting the differential expression, relative to a normal cell, of at least one nucleic acid which hybridizes under stringent conditions to one of SEQ ID Nos. 1-4470, 4472, 4474, 4476, 4478, 4480, 4482, 4484, 4486, 4488, 4490, 4492, and 4494, wherein the nucleic acid is differentially expressed by at least a factor of two, at least a factor of five, at least a factor of twenty, or at least a factor of fifty.

[0022] In another aspect, the invention provides polypeptides encoded by the subject nucleic acids. In one embodiment, the invention pertains to a polypeptide including an amino acid sequence encoded by a nucleic acid comprising a nucleotide sequence which hybridizes under stringent conditions to a sequence of SEQ ID Nos. 1-1103 or a sequence complementary thereto, or a fragment comprising at least about 25, or at least about 40 amino acids thereof. Further provided are antibodies immunoreactive with these polypeptides.

[0023] In a further aspect the invention pertains to a polypeptide encoded by one or more of the sequences of SEQ ID Nos. 4472, 4474, 4476, 4478, 4480, 4482, 4484, 4486, 4488, 4490, 4492, and 4494.

[0024] In a still further aspect the invention pertains to a polypeptide having the sequence of one or SEQ ID Nos. 4471, 4473, 4475, 4477, 4479, 4481, 4483, 4485, 44857, 4489, 4491, and 4493.

[0025] In still another aspect, the invention provides diagnostic methods. In one embodiment, the invention pertains to a method for determining the phenotype of cells from a patient by providing a nucleic acid probe comprising a nucleotide sequence having at least 10, at least about 15, at least about 25, or at least about 40 consecutive nucleotides represented in a sequence of SEQ ID Nos. 1-4470, 4472, 4474, 4476, 4478, 4480, 4482, 4484, 4486, 4488, 4490, 4492, and 4494 up to the full length of one of SEQ ID Nos. 1-4470, 4472, 4474, 4476, 4478, 4480, 4482, 4484, 4486, 4488, 4490, 4492, and 4494 or a sequence complementary thereto, obtaining a sample of cells from a patient, optionally providing a second sample of cells substantially all of which are non-cancerous, contacting the nucleic acid probe under stringent conditions with mRNA of each of said first and second cell samples, and comparing (a) the amount of hybridization of the probe with mRNA of the first cell sample, with (b) the amount of hybridization of the probe with mRNA of the second cell sample, wherein a difference of at least a factor of two, at least a factor of five, at least a factor of twenty, or at least a factor of fifty in the amount of hybridization with the mRNA of the first cell sample as compared to the amount of hybridization with the mRNA of the second cell sample is indicative of the phenotype of cells in the first cell sample. Determining the phenotype includes determining the genotype, as the term is used herein.

[0026] In another embodiment, the invention provides a test kit for identifying the presence of cancerous cells or tissues, comprising a probe/primer as described above, for measuring a level of a nucleic acid which hybridizes under stringent conditions to a nucleic acid of SEQ ID Nos. 1-4470, 4472, 4474, 4476, 4478, 4480,4482, 4484, 4486, 4488, 4490, 4492, and 4494 in a sample of cells isolated from a patient. In certain embodiments, the kit may further include instructions for using the kit, solutions for suspending or fixing the cells, detectable tags or labels, solutions for rendering a nucleic acid susceptible to hybridization, solutions for lysing cells, or solutions for the purification of nucleic acids.

[0027] In another embodiment, the invention provides a method of determining the phenotype of a cell, comprising detecting the differential expression, relative to a normal or control cell, of at least one protein encoded by a nucleic acid which hybridizes under stringent conditions to one of SEQ ID Nos. 1-4470, 4472, 4474, 4476, 4478, 4480, 4482, 4484, 4486, 4488, 4490, 4492, and 4494, or a sequence complementary thereto, wherein the protein is differentially expressed by at least a factor of two, at least a factor of five, at least a factor of twenty, or at least a factor of fifty. In one embodiment, the level of the protein is detected in an immunoassay. The invention also pertains to a method for determining the presence or absence of a nucleic acid, such as mRNA, which hybridizes under stringent conditions to one of SEQ ID Nos. 1-1103 in a cell, comprising contacting the cell with a probe as described above. The invention further provides a method for determining the presence or absence of a subject polypeptide encoded by a nucleic acid which hybridizes under stringent conditions to one of SEQ ID Nos. 1-1103 in a cell, comprising contacting the cell with an antibody as described above.

[0028] In yet another embodiment, the invention provides a method for determining the presence of an aberrant mutation (e.g., deletion, insertion, or substitution of nucleic acids) or aberrant methylation in a sequence which hybridizes under stringent conditions to a sequence of SEQ ID Nos. 1-1103 or a sequence complementary thereto, comprising collecting a sample of cells from a patient, isolating nucleic acid from the cells of the sample, contacting the nucleic acid sample with one or more probe/primers which specifically hybridize to a nucleic acid sequence of SEQ ID Nos. 1-4470, 4472, 4474, 4476, 4478, 4480, 4482, 4484, 4486, 4488, 4490, 4492, and 4494, or a sequence complementary thereto, under conditions such that hybridization and/or amplification of the nucleic acid occurs, and comparing the presence, absence, or size of an amplification product to the amplification product of a normal cell.

[0029] In one embodiment, the invention provides a test kit for identifying the presence of cancer cells, comprising an antibody specific for a protein encoded by a nucleic acid which hybridizes under stringent conditions to any one of SEQ ID Nos. 1-4470, 4472, 4474, 4476, 4478, 4480, 4482, 4484, 4486, 4488, 4490, 4492, and 4494, or a sequence complementary thereto. In certain embodiments, the kit further includes instructions for using the kit. In certain embodiments, the kit may further include solutions for suspending or fixing the cells, detectable tags or labels, solutions for rendering a polypeptide susceptible to the binding of an antibody, solutions for lysing cells, or solutions for the purification of polypeptides.

[0030] In yet another aspect, the invention provides pharmaceutical compositions including the subject nucleic acids. In one embodiment, an agent which alters the level of expression in a cell of a nucleic acid which hybridizes under stringent conditions to one of SEQ ID Nos. 1-4470, 4472, 4474, 4476, 4478, 4480, 4482, 4484, 4486, 4488, 4490, 4492, and 4494 or a sequence complementary thereto is identified by providing a cell, treating the cell with a test agent, determining the level of expression in the cell of a nucleic acid which hybridizes under stringent conditions to one of SEQ ID Nos. 1-4470, 4472, 4474, 4476, 4478, 4480, 4482, 4484, 4486, 4488, 4490, 4492, and 4494 or a sequence complementary thereto, and comparing the level of expression of the nucleic acid in the treated cell with the level of expression of the nucleic acid in an untreated cell, wherein a change in the level of expression of the nucleic acid in the treated cell relative to the level of expression of the nucleic acid in the untreated cell is indicative of an agent which alters the level of expression of the nucleic acid in a cell. The invention further provides a pharmaceutical composition comprising an agent identified by this method. In another embodiment, the invention provides a pharmaceutical composition which includes a polypeptide encoded by a nucleic acid having a nucleotide sequence that hybridizes under stringent conditions to one of SEQ ID Nos. 1-4470, 4472, 4474, 4476, 4478, 4480, 4482, 4484, 4486, 4488, 4490, 4492, and 4494 or a sequence complementary thereto. In one embodiment, the invention pertains to a pharmaceutical composition comprising a nucleic acid including a sequence which hybridizes under stringent conditions to one of SEQ ID Nos. 1-4470, 4472, 4474, 4476, 4478, 4480, 4482, 4484, 4486, 4488, 4490, 4492, and 4494 or a sequence complementary thereto.

[0031] In yet another aspect, the invention provides pharmaceutical compositions including the subject nucleic acids. In one embodiment, an agent which alters the level of expression in a cell of a nucleic acid which hybridizes under stringent conditions to one of SEQ ID Nos. 4472, 4474, 4476, 4478, 4480, 4482, 4484, 4486, 4488, 4490, 4492, and 4494 or a sequence complementary thereto is identified by providing a cell, treating the cell with a test agent, determining the level of expression in the cell of a nucleic acid which hybridizes under stringent conditions to one of SEQ ID Nos. 4472, 4474, 4476, 4478, 4480, 4482, 4484, 4486, 4488, 4490, 4492, and 4494 or a sequence complementary thereto, and comparing the level of expression of the nucleic acid in the treated cell with the level of expression of the nucleic acid in an untreated cell, wherein a change in the level of expression of the nucleic acid in the treated cell relative to the level of expression of the nucleic acid in the untreated cell is indicative of an agent which alters the level of expression of the nucleic acid in a cell.

[0032] The invention further provides a method for identifying an agent which alters the level of expression in a cell of a polypeptide having a sequence of SEQ ID Nos. 4471, 4473, 4475, 4477, 4479, 4481, 4483, 4485, 4487, 4489, 4491, and 4493 comprising providing a cell; treating the cell with the test agent; determining the level of expression of one or more polypeptides of SEQ ID Nos. 4471, 4473, 4475, 4477, 4479, 4481, 4483, 4485, 4487, 4489, 4491, and 4493 in the cell by reacting the cell with an antibody specific for one or more of the polypeptides of SEQ ID Nos. 4471, 4473, 4475, 4477, 4479, 4481, 4483, 4485, 4487, 4489, 4491, and 4493; and comparing the level of expression of the polypeptide in the treated cell with the level of expression of the same polypeptide in an untreated cell, wherein a change in the level of expression of the nucleic acid in the treated cell relative to the level of expression of the nucleic acid in the untreated cell is indicative of an agent which alters the level of expression of the polypeptide in a cell.

[0033] The invention further provides a pharmaceutical composition comprising an agent identified by the above methods. In another embodiment, the invention provides a pharmaceutical composition which includes a polypeptide encoded by a nucleic acid having a nucleotide sequence that hybridizes under stringent conditions to one of SEQ ID Nos. 4472, 4474, 4476, 4478, 4480, 4482, 4484, 4486, 4488, 4490, 4492, and 4494 or a sequence complementary thereto. In a further embodiment the invention provides a pharmaceutical composition comprising one or more antibodies which bind to a polypeptide encoded by one or more of SEQ ID Nos. 4472, 4474, 4476, 4478, 4480, 4482, 4484, 4486, 4488, 4490, 4492, and 4494. In a still further embodiment, the invention provides a pharmaceutical composition comprising one or more antibodies which binds to a polypeptide of one or more of SEQ ID Nos. 4471, 4473, 4475, 4477, 4479, 4481, 4483, 4485, 4487, 4489, 4491, and 4493. In one embodiment, the invention pertains to a pharmaceutical composition comprising a nucleic acid including a sequence which hybridizes under stringent conditions to one of SEQ ID Nos. 1-4470, 4472, 4474, 4476, 4478, 4480, 4482, 4484, 4486, 4488, 4490, 4492, and 4494 or a sequence complementary thereto.

[0034] In one embodiment the invention relates to a method for detecting cancer in a patient sample in which an antibody to a protein encoded by SEQ ID Nos 1-4470 is used to react with proteins in the patient sample. In a further embodiment, the invention relates to a method for detecting cancer in a patient sample in which an antibody to a protein encoded by one or more of SEQ ID Nos. 4472, 4474, 4476, 4478, 4480, 4482, 4484, 4486, 4488, 4490, 4492, and 4494 is used to react with proteins in the patient sample. In a still further embodiment, the invention provides a method for detecting cancer in a patient sample in which an antibody to a protein having the sequence of SEQ ID Nos. 4471, 4473, 4475, 4477, 4479, 4481, 4483, 4485, 4487, 4489, 4491, and 4493 is used to react with protein in the patient sample.

### BRIEF DESCRIPTION OF THE FIGURE

[0035] FIG. 1 depicts the nucleic acid sequence of SEQ ID Nos: 1-4470.

[0036] FIG. 2 depicts the nucleic acid sequence of SEQ ID Nos. 4472, 4474, 4476, 4478, 4480, 4482, 4484, 4486, 4488, 4490, 4492, and 4494.

[0037] FIG. 3 depicts the amino acid sequence of SEQ ID Nos. 4471, 4473, 4475, 4477, 4479, 4481, 4483, 4485, 4487, 4489, 4491, and 4493.

### DETAILED DESCRIPTION OF THE INVENTION

[0038] The invention relates to nucleic acids having the disclosed nucleotide sequences (SEQ ID Nos. 1-4470, 4472, 4474, 4476, 4478, 4480, 4482, 4484, 4486, 4488, 4490, 4492, and 4494), as well as full length cDNA, mRNA, and genes corresponding to these sequences, and to polypeptides and proteins encoded by these nucleic acids and genes, and portions thereof. In particular the invention relats to the full length cDNA sequence of SEQ ID Nos. 4472,4474, 4476, 4478, 4480, 4482, 4484, 4486, 4488, 4490, 4492, and 4494 and the polypeptide sequence encoded thereby and shown in SEQ ID Nos. 4471, 4473, 4475, 4477, 4479, 4481, 4483, 4485, 4487, 4489, 4491, and 4493, respectively. The 4494 sequences disclosed herein were analyzed by comparing the sequences to those disclosed in publicly available databases. Based upon the search results, it was found that SEQ ID Nos: 1-503 contained novel sequences, SEQ ID Nos: 504-1103 contained known EST sequences, and SEQ ID Nos: 1104-4494 contained known sequences.

[0039] Also included in the present invention are polypeptides and proteins encoded by the nucleic acids of SEQ ID Nos. 1-4470, 4472, 4474, 4476, 4478, 4480, 4482, 4484, 4486, 4488, 4490, 4492, and 4494, and in particular the polypeptide sequences of SEQ ID Nos. 4471, 4473, 4475, 4477, 4479, 4481, 4483, 4485, 4487, 4489, 4491, and 4493. The various nucleic acids that can encode these polypeptides and proteins differ because of the degeneracy of the genetic code, in that most amino acids are encoded by more than one triplet codon. The identity of such codons is well known in this art, and this information can be used for the construction of the nucleic acids within the scope of the invention. In one embodiment, the polypeptide sequences of SEQ ID Nos. 4471, 4473, 4475, 4477, 4479, 4481, 4483, 4485, 4487, 4489, 4491, and 4493 are encoded by the full length cDNA sequences of SEQ ID Nos. 4472, 4474, 4476, 4478, 4480, 4482, 4484, 4486, 4488, 4490, 4492, and 4494, respectively.

[0040] Nucleic acids encoding polypeptides and proteins that are variants of the polypeptides and proteins encoded by the present nucleic acids and related cDNA and genes are also within the scope of the invention. The variants differ from wild-type protein in having one or more amino acid substitutions that either enhance, add, or diminish a biological activity of the wild-type protein. Once the amino acid change is selected, a nucleic acid encoding that variant is constructed according to the invention.

[0041] The following detailed description discloses how to obtain or make full-length cDNA and human genes corresponding to the nucleic acids, how to express these nucleic acids and genes, how to identify structural motifs of the genes, how to identify the function of a protein encoded by a gene corresponding to an nucleic acid, how to use nucleic acids as probes in mapping and in tissue profiling, how to use the corresponding polypeptides and proteins to raise antibodies, and how to use the nucleic acids, polypeptides, and proteins for diagnostic purposes.

[0042] The sequences disclosed herein have been found to be differentially expressed in colon cancer cell lines and/or colon cancer tissue, and thus are useful for determining the presence of colon cancer in a cell or tissue sample. The present sequences also have utility for determining the presence or state of other types of cancer.

[0043] Accordingly, a preferred aspect of the present invention relates to nucleic acids differentially expressed in tumor cells or tissue, especially colon cancer tissue or cells, polypeptides encoded by such nucleic acids, and antibodies immunoreactive with these polypeptides, and preparations of such compositions. Moreover, the present invention provides diagnostic and therapeutic assays and reagents for detecting and treating disorders involving, for example, expression of the subject nucleic acids.

### I. GENERAL

[0044] This invention relates to compositions and methods for identifying and/or classifying cancerous cells present in a human tumors, particularly in solid tumors, e.g., carcinomas and sarcomas, such as, for example, breast or colon cancers. In its broadest aspect, the method uses nucleic acids that are differentially expressed in cancer cell lines and/or cancer tissue, compared with related normal cells or tissue, and using them to identify or classify tumor cells by the upregulation and/or downregulation of expression of particular genes, an event which is implicated in tumorigenesis.

[0045] Upregulation or increased expression of certain genes such as oncogenes, act to promote malignant growth. Downregulation or decreased expression of genes, such as tumor suppressor genes, also promotes malignant growth. Thus, alteration in the expression of either type of gene is a potential diagnostic indicator for determining whether a subject is at risk of developing or has cancer, e.g., colon cancer.

[0046] Accordingly, in one aspect, the invention also provides biomarkers, such as nucleic acid markers, for human tumor cells and tissue, particularly for colon cancer cells and tissue. The invention also provides proteins encoded by these nucleic acid markers. The invention also features methods for identifying drugs useful for treatment of such cancer cells, and for treatment of a cancerous condition, such as colon cancer. Unlike prior methods, the invention provides a means for identifying cancer cells at an early stage of development, so that premalignant cells can be identified prior to their spreading throughout the human body. This allows early detection of potentially cancerous conditions, and treatment of those cancerous conditions prior to spread of the cancerous cells throughout the body, or prior to development of an irreversible cancerous condition.

### II. DEFINITIONS

[0047] For convenience, the meaning of certain terms and phrases used in the specification, examples, and appended claims, are provided below.

[0048] The term “an aberrant expression”, as applied to a nucleic acid of the present invention, refers to level of expression of that nucleic acid which differs from the level of expression of that nucleic acid in healthy tissue, or which differs from the activity of the polypeptide present in a healthy subject. An activity of a polypeptide can be aberrant because it is stronger than the activity of its native counterpart. Alternatively, an activity can be aberrant because it is weaker or absent relative to the activity of its native counterpart. An aberrant activity can also be a change in the activity; for example, an aberrant polypeptide can interact with a different target peptide. A cell can have an aberrant expression level of a gene due to overexpression or underexpression of that gene.

[0049] The term “agonist”, as used herein, is meant to refer to an agent that mimics or upregulates (e.g., potentiates or supplements) the bioactivity of a protein. An agonist can be a wild-type protein or derivative thereof having at least one bioactivity of the wild-type protein. An agonist can also be a compound that upregulates expression of a gene or which increases at least one bioactivity of a protein. An agonist can also be a compound which increases the interaction of a polypeptide with another molecule, e.g., a target peptide or nucleic acid.

[0050] The term “allele”, which is used interchangeably herein with “allelic variant”, refers to alternative forms of a gene or portions thereof. Alleles occupy the same locus or position on homologous chromosomes. When a subject has two identical alleles of a gene, the subject is said to be homozygous for that gene or allele. When a subject has two different alleles of a gene, the subject is said to be heterozygous for the gene. Alleles of a specific gene can differ from each other in a single nucleotide, or several nucleotides, and can include substitutions, deletions, and/or insertions of nucleotides. An allele of a gene can also be a form of a gene containing mutations.

[0051] The term “allelic variant of a polymorphic region of a gene” refers to a region of a gene having one of several nucleotide sequences found in that region of the gene in other individuals.

[0052] The term “antagonist” as used herein is meant to refer to an agent that downregulates (e.g., suppresses or inhibits) at least one bioactivity of a protein. An antagonist can be a compound which inhibits or decreases the interaction between a protein and another molecule, e.g., a target peptide or enzyme substrate. An antagonist can also be a compound that downregulates expression of a gene or which reduces the amount of expressed protein present.

[0053] The term “antibody” as used herein is intended to include whole antibodies, e.g., of any isotype (IgG, IgA, IgM, IgE, etc), and includes fragments thereof which are also specifically reactive with a vertebrate, e.g., mammalian, protein. Antibodies can be fragmented using conventional techniques and the fragments screened for utility in the same manner as described above for whole antibodies. Thus, the term includes segments of proteolytically-cleaved or recombinantly-prepared portions of an antibody molecule that are capable of selectively reacting with a certain protein. Nonlimiting examples of such proteolytic and/or recombinant fragments include Fab, F(ab′)2, Fab′, Fv, and single chain antibodies (scFv) containing a V[L] and/or V[H] domain joined by a peptide linker. The scFv's may be covalently or non-covalently linked to form antibodies having two or more binding sites. The subject invention includes polyclonal, monoclonal, or other purified preparations of antibodies and recombinant antibodies.

[0054] The phenomenon of “apoptosis” is well known, and can be described as a programmed death of cells. As is known, apoptosis is contrasted with “necrosis”, a phenomenon when cells die as a result of being killed by a toxic material, or other external effect. Apoptosis involves chromatic condensation, membrane blebbing, and fragmentation of DNA, all of which are generally visible upon microscopic examination.

[0055] A disease, disorder, or condition “associated with” or “characterized by” an aberrant expression of a nucleic acid refers to a disease, disorder, or condition in a subject which can be statistically correlated with the expression of a nucleic acid.

[0056] As used herein the term “bioactive fragment of a polypeptide” refers to a fragment of a full-length polypeptide, wherein the fragment specifically agonizes (mimics) or antagonizes (inhibits) the activity of a wild-type polypeptide. The bioactive fragment preferably is a fragment capable of interacting with at least one other molecule, e.g., protein, small molecule, or DNA, which a full length protein can bind.

[0057] “Biological activity” or “bioactivity” or “activity” or “biological function”, which are used interchangeably, herein mean an effector or antigenic function that is directly or indirectly performed by a polypeptide (whether in its native or denatured conformation), or by any subsequence thereof. Biological activities include binding to polypeptides, binding to other proteins or molecules, activity as a DNA binding protein, as a transcription regulator, ability to bind damaged DNA, etc. A bioactivity can be modulated by directly affecting the subject polypeptide. Alternatively, a bioactivity can be altered by modulating the level of the polypeptide, such as by modulating expression of the corresponding gene.

[0058] The term “biomarker” refers a biological molecule, e.g., a nucleic acid, including DNA, cDNA, RNA, mRNA, tRNA, or rRNA, peptide, polypeptide, protein, hormone, etc., whose presence or concentration can be detected and correlated with a known condition, such as a disease state.

[0059] “Cells,” “host cells”, or “recombinant host cells” are terms used interchangeably herein. It is understood that such terms refer not only to the particular subject cell but to the progeny or potential progeny of such a cell. Because certain modifications may occur in succeeding generations due to either mutation or environmental influences, such progeny may not, in fact, be identical to the parent cell, but are still included within the scope of the term as used herein.

[0060] A “chimeric polypeptide” or “fusion polypeptide” is a fusion of a first amino acid sequence encoding one of the subject polypeptides with a second amino acid sequence defining a domain (e.g., polypeptide portion) foreign to and not substantially homologous with any domain of the subject polypeptide. A chimeric polypeptide may present a foreign domain which is found (albeit in a different polypeptide) in an organism which also expresses the first polypeptide, or it may be an “interspecies,” “intergenic,” etc., fusion of polypeptide structures expressed by different kinds of organisms. In general, a fusion polypeptide can be represented by the general formula (X)ₙ—(Y)ₘ—(Z)ₙ, wherein Y represents a portion of the subject polypeptide, and X and Z are each independently absent or represent amino acid sequences which are not related to the native sequence found in an organism, or which are not found as a polypeptide chain contiguous with the subject sequence, where m is an integer greater than or equal to one, and each occurrence of n is, independently, 0 or an integer greater than or equal to 1 (n and m are preferably no greater than 5 or 10).

[0061] A “delivery complex” shall mean a targeting means (e.g., a molecule that results in higher affinity binding of a nucleic acid, protein, polypeptide or peptide to a target cell surface and/or increased cellular or nuclear uptake by a target cell). Examples of targeting means include: sterols (e.g., cholesterol), lipids (e.g., a cationic lipid, virosome or liposome), viruses (e.g., adenovirus, adeno-associated virus, and retrovirus), or target cell-specific binding agents (e.g., ligands recognized by target cell specific receptors). Preferred complexes are sufficiently stable in vivo to prevent significant uncoupling prior to internalization by the target cell. However, the complex is cleavable under appropriate conditions within the cell so that the nucleic acid, protein, polypeptide or peptide is released in a functional form.

[0062] As is well known, genes or a particular polypeptide may exist in single or multiple copies within the genome of an individual. Such duplicate genes may be identical or may have certain modifications, including nucleotide substitutions, additions or deletions, which all still code for polypeptides having substantially the same activity. The term “DNA sequence encoding a polypeptide” may thus refer to one or more genes within a particular individual. Moreover, certain differences in nucleotide sequences may exist between individual organisms, which are called alleles. Such allelic differences may or may not result in differences in amino acid sequence of the encoded polypeptide yet still encode a polypeptide with the same biological activity.

[0063] The term “equivalent” is understood to include nucleotide sequences encoding functionally equivalent polypeptides. Equivalent nucleotide sequences will include sequences that differ by one or more nucleotide substitutions, additions or deletions, such as allelic variants; and will, therefore, include sequences that differ from the nucleotide sequence of the nucleic acids shown in SEQ ID NOs: 1-4494 due to the degeneracy of the genetic code.

[0064] As used herein, the terms “gene”, “recombinant gene”, and “gene construct” refer to a nucleic acid of the present invention associated with an open reading frame, including both exon and, optionally, intron sequences.

[0065] A “recombinant gene” refers to nucleic acid encoding a polypeptide and comprising exon sequences, though it may optionally include intron sequences which are derived from, for example, a related or unrelated chromosomal gene. The term “intron” refers to a DNA sequence present in a given gene which is not translated into protein and is generally found between exons.

[0066] The term “growth” or “growth state” of a cell refers to the proliferative state of a cell as well as to its differentiative state. Accordingly, the term refers to the phase of the cell cycle in which the cell is, e.g., G₀, G₁, G₂, or prophase, metaphase, or telophase, or anaphase, as well as to its state of differentiation, e.g., undifferentiated, partially differentiated, or fully differentiated. Without wanting to be limited, differentiation of a cell is usually accompanied by a decrease in the proliferative rate of a cell.

[0067] “Homology” or “identity” or “similarity” refers to sequence similarity between two peptides or between two nucleic acid molecules, with identity being a more strict comparison. Homology and identity can each be determined by comparing a position in each sequence which may be aligned for purposes of comparison. When a position in the compared sequence is occupied by the same base or amino acid, then the molecules are identical at that position. A degree of homology or similarity or identity between nucleic acid sequences is a function of the number of identical or matching nucleotides at positions shared by the nucleic acid sequences. A degree of identity of amino acid sequences is a function of the number of identical amino acids at positions shared by the amino acid sequences. A degree of homology or similarity of amino acid sequences is a function of the number of amino acids, i.e., structurally related, at positions shared by the amino acid sequences. An “unrelated” or “non-homologous” sequence shares less than 40% identity, though preferably less than 25% identity, with one of the sequences of the present invention.

[0068] The term “percent identical” refers to sequence identity between two amino acid sequences or between two nucleotide sequences. Identity can each be determined by comparing a position in each sequence which may be aligned for purposes of comparison. When an equivalent position in the compared sequences is occupied by the same base or amino acid, then the molecules are identical at that position; when the equivalent site occupied by the same or a similar amino acid residue (e.g., similar in steric and/or electronic nature), then the molecules can be referred to as homologous (similar) at that position. Expression as a percentage of homology, similarity, or identity refers to a function of the number of identical or similar amino acids at positions shared by the compared sequences. Various alignment algorithms and/or programs may be used, including FASTA, BLAST, or ENTREZ. FASTA and BLAST are available as a part of the GCG sequence analysis package (University of Wisconsin, Madison, Wis.), and can be used with, e.g., default settings. ENTREZ is available through the National Center for Biotechnology Information, National Library of Medicine, National Institutes of Health, Bethesda, Md. In one embodiment, the percent identity of two sequences can be determined by the GCG program with a gap weight of 1, e.g., each amino acid gap is weighted as if it were a single amino acid or nucleotide mismatch between the two sequences.

[0069] Other techniques for alignment are described in Methods in Enzymology, vol. 266: Computer Methods for Macromolecular Sequence Analysis (1996), ed. Doolittle, Academic Press, Inc., a division of Harcourt Brace & Co., San Diego, Calif., USA. Preferably, an alignment program that permits gaps in the sequence is utilized to align the sequences. The Smith-Waterman is one type of algorithm that permits gaps in sequence alignments. See Meth. Mol. 70-187 (1997). Also, the GAP program using the Needleman and Wunsch alignment method can be utilized to align sequences. An alternative search strategy uses MPSRCH software, which runs on a MASPAR computer. MPSRCH uses a Smith-Waterman algorithm to score sequences on a massively parallel computer. This approach improves ability to pick up distantly related matches, and is especially tolerant of small gaps and nucleotide sequence errors. Nucleic acid-encoded amino acid sequences can be used to search both protein and DNA databases.

[0070] Databases with individual sequences are described in Methods in Enzymologv. ed. Doolittle, supra. Databases include, for example, Genbank, EMBL, and DNA Database of Japan (DDBJ).

[0071] Preferred nucleic acids have a sequence at least 70%, and more preferably 80% identical and more preferably 90% and even more preferably at least 95% identical to an nucleic acid sequence of a sequence shown in one of SEQ ID NOS: 1-4494. Nucleic acids at least 90%, more preferably 95%, and most preferably at least about 98-99% identical with a nucleic sequence represented in one of SEQ ID NOS: 1-4494 are of course also within the scope of the invention. In preferred embodiments, the nucleic acid is mammalian.

[0072] The term “interact” as used herein is meant to include detectable interactions (e.g., biochemical interactions) between molecules, such as interaction between protein-protein, protein-nucleic acid, nucleic acid-nucleic acid, and protein-small molecule or nucleic acid-small molecule in nature. Examples of interactions between protein-protein, protein-nucleic acid, nucleic acid-nucleic acid, and protein-small molecule or nucleic acid-small molecule can include binding, modifying, cleaving, processing, or catalyzing.

[0073] The term “isolated” as used herein with respect to nucleic acids, such as DNA or RNA, refers to molecules separated from other DNAS, or RNAs, respectively, that are present in the natural source of the macromolecule. The term isolated as used herein also refers to a nucleic acid or peptide that is substantially free of cellular material, viral material, or culture medium when produced by recombinant DNA techniques, or chemical precursors or other chemicals when chemically synthesized. Moreover, an “isolated nucleic acid” is meant to include nucleic acid fragments which are not naturally occurring as fragments and would not be found in the natural state. The term “isolated” is also used herein to refer to polypeptides which are isolated from other cellular proteins and is meant to encompass both purified and recombinant polypeptides.

[0074] The terms “modulated” and “differentially regulated” as used herein refer to both upregulation (i.e., activation or stimulation e.g., by agonizing or potentiating) and downregulation (i.e., inhibition or suppression e.g., by antagonizing, decreasing or inhibiting).

[0075] The term “mutated gene” refers to an allelic form of a gene, which is capable of altering the phenotype of a subject having the mutated gene relative to a subject which does not have the mutated gene. If a subject must be homozygous for this mutation to have an altered phenotype, the mutation is said to be recessive. If one copy of the mutated gene is sufficient to alter the genotype of the subject, the mutation is said to be dominant. If a subject has one copy of the mutated gene and has a phenotype that is intermediate between that of a homozygous and that of a heterozygous subject (for that gene), the mutation is said to be co-dominant.

[0076] The designation “N”, where it appears in the accompanying Sequence Listing, indicates that the identity of the corresponding nucleotide is unknown. “N” should therefore not necessarily be interpreted as permitting substitution with any nucleotide, e.g., A, T, C, or G, but rather as holding the place of a nucleotide whose identity has not been conclusively determined.

[0077] The “non-human animals” of the invention include mammalians such as rodents, non-human primates, sheep, dog, cow, pigs, chickens, amphibians, reptiles, etc. Preferred non-human animals are selected from the rodent family including rat and mouse, most preferably mouse, though transgenic amphibians, such as members of the Xenopus genus, and transgenic chickens can also provide important tools for understanding and identifying agents which can affect, for example, embryogenesis and tissue formation. The term “chimeric animal” is used herein to refer to animals in which the recombinant gene is found, or in which the recombinant gene is expressed in some but not all cells of the animal. The term “tissue-specific chimeric animal” indicates that one of the recombinant genes is present and/or expressed or disrupted in some tissues but not others.

[0078] As used herein, the term “nucleic acid” refers to polynucleotides such as deoxyribonucleic acid (DNA), and, where appropriate, ribonucleic acid (RNA). The term should also be understood to include, as equivalents, analogs of either RNA or DNA made from nucleotide analogs, and, as applicable to the embodiment being described, single (sense or antisense) and double-stranded polynucleotides. ESTs, chromosomes, cDNAs, mRNAs, and rRNAs are representative examples of molecules that may be referred to as nucleic acids.

[0079] The term “nucleotide sequence complementary to the nucleotide sequence of SEQ ID NO. x” refers to the nucleotide sequence of the complementary strand of a nucleic acid strand having SEQ ID NO. x. The term “complementary strand” is used herein interchangeably with the term “complement”. The complement of a nucleic acid strand can be the complement of a coding strand or the complement of a non-coding strand. As used herein, a “complementary strand” to SEQ ID NO. x is a nucleic acid sequence which hybridizes under stringent conditions to SEQ ID NO. x.

[0080] The term “polymorphism” refers to the coexistence of more than one form of a gene or portion (e.g., allelic variant) thereof. A portion of a gene of which there are at least two different forms, i.e., two different nucleotide sequences, is referred to as a “polymorphic region of a gene”. A polymorphic region can be a single nucleotide, the identity of which differs in different alleles. A polymorphic region can also be several nucleotides long.

[0081] A “polymorphic gene” refers to a gene having at least one polymorphic region.

[0082] As used herein, the term “promoter” means a DNA sequence that regulates expression of a selected DNA sequence operably linked to the promoter, and which effects expression of the selected DNA sequence in cells. The term encompasses “tissue specific” promoters, i.e., promoters which effect expression of the selected DNA sequence only in specific cells (e.g., cells of a specific tissue). The term also covers so-called “leaky” promoters, which regulate expression of a selected DNA primarily in one tissue, but cause expression in other tissues as well. The term also encompasses non-tissue specific promoters and promoters that constitutively expressed or that are inducible (i.e., expression levels can be controlled).

[0083] The terms “protein”, “polypeptide”, and “peptide” are used interchangeably herein when referring to a gene product.

[0084] The term “recombinant protein” refers to a polypeptide of the present invention which is produced by recombinant DNA techniques, wherein generally, DNA encoding a polypeptide is inserted into a suitable expression vector which is in turn used to transform a host cell to produce the heterologous protein. Moreover, the phrase “derived from”, with respect to a recombinant gene, is meant to include within the meaning of “recombinant protein” those proteins having an amino acid sequence of a native polypeptide, or an amino acid sequence similar thereto which is generated by mutations including substitutions and deletions (including truncation) of a naturally occurring form of the polypeptide.

[0085] “Small molecule” as used herein, is meant to refer to a composition, which has a molecular weight of less than about 5 kD and most preferably less than about 4 kD. Small molecules can be nucleic acids, peptides, polypeptides, peptidomimetics, carbohydrates, lipids or other organic (carbon-containing) or inorganic molecules. Many pharmaceutical companies have extensive libraries of chemical and/or biological mixtures, often fungal, bacterial, or algal extracts, which can be screened with any of the assays of the invention to identify compounds that modulate a bioactivity.

[0086] As used herein, the term “specifically hybridizes” or “specifically detects” refers to the ability of a nucleic acid molecule of the invention to hybridize to at least a portion of, for example approximately 6, 12, 15, 20, 30, 50, 100, 150, 200, 300, 350, 400, 500, 750, or 1000 contiguous nucleotides of a nucleic acid designated in any one of SEQ ID Nos: 1-4494, or a sequence complementary thereto, or naturally occurring mutants thereof, such that it has less than 15%, preferably less than 10%, and more preferably less than 5% background hybridization to a cellular nucleic acid (e.g., mRNA or genomic DNA) encoding a different protein. In preferred embodiments, the oligonucleotide probe detects only a specific nucleic acid, e.g., it does not substantially hybridize to similar or related nucleic acids, or complements thereof.

[0087] “Transcriptional regulatory sequence” is a generic term used throughout the specification to refer to DNA sequences, such as initiation signals, enhancers, and promoters, which induce or control transcription of protein coding sequences with which they are operably linked. In preferred embodiments, transcription of one of the genes is under the control of a promoter sequence (or other transcriptional regulatory sequence) which controls the expression of the recombinant gene in a cell-type in which expression is intended. It will also be understood that the recombinant gene can be under the control of transcriptional regulatory sequences which are the same or which are different from those sequences which control transcription of the naturally occurring forms of the polypeptide.

[0088] As used herein, the term “transfection” means the introduction of a nucleic acid, e.g., via an expression vector, into a recipient cell by nucleic acid-mediated gene transfer. “Transformation”, as used herein, refers to a process in which a cell's genotype is changed as a result of the cellular uptake of exogenous DNA or RNA, and, for example, the transformed cell expresses a recombinant form of a polypeptide or, in the case of anti-sense expression from the transferred gene, the expression of the target gene is disrupted.

[0089] The term “treating” as used herein is intended to encompass curing as well as ameliorating at least one symptom of the condition or disease.

[0090] The term “vector” refers to a nucleic acid molecule capable of transporting another nucleic acid to which it has been linked. One type of preferred vector is an episome, i.e., a nucleic acid capable of extra-chromosomal replication. Preferred vectors are those capable of autonomous replication and/or expression of nucleic acids to which they are linked. Vectors capable of directing the expression of genes to which they are operatively linked are referred to herein as “expression vectors”. In general, expression vectors of utility in recombinant DNA techniques are often in the form of “plasmids” which refer generally to circular double stranded DNA loops which, in their vector form are not bound to the chromosome. In the present specification, “plasmid” and “vector” are used interchangeably as the plasmid is the most commonly used form of vector. However, the invention is intended to include such other forms of expression vectors which serve equivalent functions and which become known in the art subsequently hereto.

[0091] The term “wild-type allele” refers to an allele of a gene which, when present in two copies in a subject results in a wild-type phenotype. There can be several different wild-type alleles of a specific gene, since certain nucleotide changes in a gene may not affect the phenotype of a subject having two copies of the gene with the nucleotide changes.

### III. NUCLEIC ACIDS OF THE PRESENT INVENTION

[0092] As described below, one aspect of the invention pertains to isolated nucleic acids, variants, and/or equivalents of such nucleic acids.

[0093] Nucleic acids of the present invention have been identified as differentially expressed in tumor cells, e.g., colon cancer-derived cell lines and colon cancer tissue (relative to the expression levels in normal cells or tissue, e.g., normal colon tissue and/or normal non-colon tissue). The present differentially expressed sequences comprise SEQ ID Nos. 1-4470, 4472, 4474, 4476, 4478, 4480, 4482, 4484, 4486, 4488, 4490, 4492, and 4494, preferably SEQ ID Nos. 1-1103, even more preferably SEQ ID Nos. 1-503, or sequence complementary thereto. In another embodiment, the invention comprises sequences which hybridize under stringent conditions with any of the sequences of SEQ ID Nos 1-4494. In a preferred aspect, sequences of the invention hybridize to SEQ ID Nos 1-4494 with about 50% identity, preferably about 70% identity, more preferably about 90% identity, and still more preferably about 100% identity. In preferred embodiments, the subject nucleic acids are differentially expressed by at least a factor of two, preferably at least a factor of five, even more preferably at least a factor of twenty, still more preferably at least a factor of fifty. Preferred nucleic acids are those sequences identified as differentially expressed both in colon cancer tissue and colon cancer cell lines. In preferred embodiments, nucleic acids of the present invention are upregulated in tumor cells, especially colon cancer tissue and/or colon cancer-derived cell lines. In another embodiment, nucleic acids of the present invention are downregulated in tumor cells, especially colon cancer tissue and/or colon cancer-derived cell lines.

[0094] Genes which are upregulated, such as oncogenes, or downregulated, such as tumor suppressors, in aberrantly proliferating cells can be used as targets for diagnostic or therapeutic applications. For example, upregulation of the cdc2 gene induces mitosis. Overexpression of the myt1 gene, a mitotic deactivator, negatively regulates the activity of cdc2. Aberrant proliferation may thus be induced either by upregulating cdc2 or by downregulating myt1. Similarly, downregulation of tumor suppressors such as p53 and Rb have been implicated in tumorigenesis.

[0095] Particularly preferred polypeptides are those that are encoded by nucleic acid sequences at least about 70%, 75%, 80%, 90%, 95%, 97%, or 98% similar to a nucleic acid sequence of SEQ ID Nos. 1-4470,4472, 4474, 4476, 4478, 4480, 4482, 4484, 4486,4488, 4490, 4492, and 4494. Preferably, the nucleic acid includes all or a portion (e g, at least about 10, at least about 15, at least about 25, or at least about 40 nucleotides) of the nucleotide sequence corresponding to the nucleic acid of SEQ ID Nos. 1-1103, most preferably SEQ ID Nos. 1-503, or a sequence complementary thereto.

[0096] Still other preferred nucleic acids of the present invention encode a polypeptide comprising at least a portion of a polypeptide encoded by one of SEQ ID Nos. 1-4470, 4472, 4474, 4476, 4478, 4480, 4482, 4484, 4486, 4488, 4490, 4492, and 4494. For example, preferred nucleic acid molecules for use as probes/primers or antisense molecules (i.e., noncoding nucleic acid molecules) can comprise at least about 10, 20, 30, 50, 60, 70, 80, 90, or 100 base pairs in length up to the length of the complete sequence of any of SEQ ID Nos 1-4494. Coding nucleic acid molecules can comprise, for example, from about 50, 60, 70, 80, 90, or 100 base pairs up to the full length of the entire sequence of any of SEQ ID Nos 1-4494.

[0097] Another aspect of the invention provides a nucleic acid which hybridizes under low, medium, or high stringency conditions to a nucleic acid sequence represented by one of SEQ ID Nos. 1-1103, preferably SEQ ID Nos. 1-503, or a sequence complementary thereto. Appropriate stringency conditions which promote DNA hybridization, for example, about 6.0×sodium chloride/sodium citrate (SSC) at about 45° C., followed by a wash of about 2.0×SSC at about 50° C., are known to those skilled in the art or can be found in Current Protocols in Molecular Biology, John Wiley & Sons, N.Y. (1989), 6.3.1-12.3.6. For example, the salt concentration in the wash step can be selected from a low stringency of about 2.0×SSC at about 50° C. to a high stringency of about 0.2×SSC at about 50° C. In addition, the temperature in the wash step can be increased from low stringency conditions at room temperature, about 22° C., to high stringency conditions at about 65° C. Both temperature and salt may be varied, or temperature or salt concentration may be held constant while the other variable is changed. In a preferred embodiment, a nucleic acid of the present invention will bind to one of SEQ ID Nos. 1-1103, preferably SEQ ID Nos. 1-503, or a sequence complementary thereto, under moderately stringent conditions, for example at about 2.0×SSC and about 40° C. In a particularly preferred embodiment, a nucleic acid of the present invention will bind to one of SEQ ID Nos. 1-1103, preferably SEQ ID Nos. 1-503, or a sequence complementary thereto, under high stringency conditions.

[0098] In one embodiment, the invention provides nucleic acids which hybridize under low stringency conditions of about 6×SSC at about room temperature followed by a wash at about 2×SSC at about room temperature.

[0099] In another embodiment, the invention provides nucleic acids which hybridize under high stringency conditions of about 2×SSC at about 65° C. followed by a wash at about 0.2×SSC at about 65° C.

[0100] Nucleic acids having a sequence that differs from the nucleotide sequences shown in one of SEQ ID Nos. 1-1103, preferably SEQ ID Nos. 1-503, or a sequence complementary thereto, due to degeneracy in the genetic code, are also within the scope of the invention. Such nucleic acids encode functionally equivalent peptides (i.e., a peptide having equivalent or similar biological activity) but differ in sequence from the sequence shown in the sequence listing due to degeneracy in the genetic code. For example, a number of amino acids are designated by more than one triplet. Codons that specify the same amino acid, or synonyms (for example, CAU and CAC each encode histidine) may result in “silent” mutations which do not affect the amino acid sequence of a polypeptide. However, it is expected that DNA sequence polymorphisms that do lead to changes in the amino acid sequences of the subject polypeptides will exist among mammals. One skilled in the art will appreciate that these variations in one or more nucleotides (e.g., up to about 3-5% of the nucleotides) of the nucleic acids encoding polypeptides having an activity of a polypeptide may exist among individuals of a given species due to natural allelic variation.

[0101] Also within the scope of the invention are nucleic acids encoding splicing variants of proteins encoded by a nucleic acid of SEQ ID Nos. 1-4470, 4472, 4474, 4476, 4478, 4480, 4482, 4484, 4486, 4488, 4490, 4492, and 4494, preferably SEQ ID Nos. 1-1103, even more preferably SEQ ID Nos. 1-503, or a sequence complementary thereto, or natural homologs of such proteins. Such homologs can be cloned by hybridization or PCR, as further described herein.

[0102] The polynucleotide sequence may also encode for a leader sequence, e.g., the natural leader sequence or a heterologous leader sequence, for a subject polypeptide. For example, the desired DNA sequence may be fused in the same reading frame to a DNA sequence which aids in expression and secretion of the polypeptide from the host cell, for example, a leader sequence which functions as a secretory sequence for controlling transport of the polypeptide from the cell. The protein having a leader sequence is a preprotein and may have the leader sequence cleaved by the host cell to form the mature form of the protein.

[0103] The polynucleotide of the present invention may also be fused in frame to a marker sequence, also referred to herein as “Tag sequence” encoding a “Tag peptide”, which allows for marking and/or purification of the present invention. In a preferred embodiment, the market sequence is a hexahistidine tag, e g, supplied by a PQE-9 vector. Numerous other Tag peptides are available commercially Other frequently used Tags include myc-epitopes (e g, see Ellison et al. (1991) J Biol hem 266:21150-2 1157) which includes a 10-residue sequence from c-myc, the pFLAG system (International Biotechnologies, Inc.), the pEZZ-protein A system (Pharmacia, NJ), and a 16 amino acid portion of the Haemophilus influenza hemagglutinin protein. Furthermore, any polypeptide can be used as a Tag so long as a reagent, e.g., an antibody interacting specifically with the Tag polypeptide is available or can be prepared or identified.

[0104] As indicated by the examples set out below, nucleic acids can be obtained from mRNA present in any of a number of eukaryotic cells or tissue, e.g., and are preferably obtained from metazoan cells or tissue, more preferably from vertebrate cells or tissue, and even more preferably from mammalian cells and tissue, and most preferably from human cells or tissue. It also is possible to obtain nucleic acids of the present invention from genomic DNA from both adults and embryos. For example, a gene can be cloned from either a cDNA or a genomic library in accordance with protocols generally known to persons skilled in the art. cDNA can be obtained by isolating total mRNA from a cell, e.g., a vertebrate cell, a mammalian cell, or a human cell, including embryonic cells. Double stranded cDNAs can then be prepared from the total mRNA, and subsequently inserted into a suitable plasmid or bacteriophage vector using any one of a number of known techniques. The gene can also be cloned using established polymerase chain reaction techniques in accordance with the nucleotide sequence information provided by the invention.

[0105] The invention includes within its scope a polynucleotide having the nucleotide sequence of nucleic acid obtained from this biological material, wherein the nucleic acid hybridizes under stringent conditions (at least about 4×SSC at 65° C., or at least about 4×SSC at 42° C.; see, for example, U.S. Pat. No. 5,707,829, incorporated herein by reference) with at least 15 contiguous nucleotides of at least one of SEQ ID Nos. 1-4470, 4472, 4474, 4476, 4478, 4480, 4482, 4484, 4486, 4488, 4490, 4492, and 4494. By this is intended that when at least 15 contiguous nucleotides of one of SEQ ID Nos. 1-4470, 4472, 4474, 4476, 4478, 4480, 4482, 4484, 4486, 4488, 4490, 4492, and 4494 is used as a probe, the probe will preferentially hybridize with a gene or mRNA (of the biological material) comprising the complementary sequence, allowing the identification and retrieval of the nucleic acids of the biological material that uniquely hybridize to the selected probe. Probes from more than one of SEQ ID Nos. 1-4470, 4472, 4474, 4476, 4478, 4480, 4482, 4484, 4486, 4488, 4490, 4492, and 4494 will hybridize with the same gene or mRNA if the cDNA from which they were derived corresponds to one mRNA. Probes of more than 15 nucleotides can be used, but 15 nucleotides represents enough sequence for unique identification.

[0106] Because the present nucleic acids are cDNAs which represent partial mRNA transcripts, two or more nucleic acids of the invention may represent different regions of the same mRNA transcript and the same gene. Thus, if two or more of SEQ ID Nos. 1-4470, 4472, 4474, 4476, 4478, 4480, 4482, 4484, 4486, 4488, 4490, 4492, and 4494 are identified as belonging to the same clone, then either sequence can be used to obtain the full-length mRNA or gene. Nucleic acid-related polynucleotides can also be isolated from cDNA libraries. These libraries are preferably prepared from mRNA of human colon cells, more preferably, human colon cancer specific tissue, designated as the 100-101, and 103-112 clones in Table 1. In another embodiment the nucleic acids are isolated from libraries prepared from normal colon specific tissue, designated herein as the 102 clones in Table 1. Alignment of SEQ ID Nos. 1-4470, 4472, 4474, 4476, 4478, 4480, 4482, 4484, 4486, 4488, 4490, 4492, and 4494, as described above, indicated that a cell line or tissue source of a related protein or polynucleotide can also be used as a source of the nucleic acid-related cDNA.

[0107] Techniques for producing and probing nucleic acid sequence libraries are described, for example, in Sambrook et al., “Molecular Cloning: A Laboratory Manual” (New York, Cold Spring Harbor Laboratory, 1989). The cDNA can be prepared by using primers based on a sequence from SEQ ID Nos. 1-4470, 4472, 4474, 4476, 4478, 4480, 4482, 4484, 4486, 4488, 4490, 4492, and 4494. In one embodiment, the cDNA library can be made from only poly-adenylated mRNA. Thus, poly-T primers can be used to prepare cDNA from the MRNA. Alignment of SEQ ID Nos. 1-4470, 4472, 4474, 4476, 4478, 4480, 4482, 4484, 4486, 4488, 4490, 4492, and 4494 can result in identification of a related polypeptide or polynucleotide. Some of the polynucleotides disclosed herein contains repetitive regions that were subject to masking during the search procedures. The information about the repetitive regions is discussed below.

[0108] Constructs of polynucleotides having sequences of SEQ ID Nos. 1-4470, 4472, 4474, 4476, 4478, 4480, 4482, 4484, 4486, 4488, 4490, 4492, and 4494 can be generated synthetically. Alternatively, single-step assembly of a gene and entire plasmid from large numbers of oligodeoxyribonucleotides is described by Stemmer et at, Gene (Amsterdam) (1995) 164(i):49-53. In this method, assembly PCR (the synthesis of long DNA sequences from large numbers of oligodeoxyribonucleotides (oligos)) is described. The method is derived from DNA shuffling (Stemmer, Nature (1994) 370:389-391), and does not rely on DNA ligase, but instead relies on DNA polymerase to build increasingly longer DNA fragments during the assembly process. For example, a 1.1-kb fragment containing the TEM-1 beta-lactamase-encoding gene (bla) can be assembled in a single reaction from a total of 56 oligos, each 40 nucleotides (nt) in length. The synthetic gene can be PCR amplified and cloned in a vector containing the tetracycline-resistance gene (Tc-R) as the sole selectable marker. Without relying on ampicillin (Ap) selection, 76% of the Tc-R colonies were Ap-R, making this approach a general method for the rapid and cost-effective synthesis of any gene.

### IV. IDENTIFICATION OF FUNCTIONAL AND STRUCTURAL MOTIFS OF NOVEL GENES USING ART-RECOGNIZED METHODS

[0109] Translations of the nucleotide sequence of the nucleic acids, cDNAs, or full genes can be aligned with individual known sequences. Similarity with individual sequences can be used to determine the activity of the polypeptides encoded by the polynucleotides of the invention. For example, sequences that show similarity with a chemokine sequence may exhibit chemokine activities. Also, sequences exhibiting similarity with more than one individual sequence may exhibit activities that are characteristic of either or both individual sequences.

[0110] The full length sequences and fragments of the polynucleotide sequences of the nearest neighbors can be used as probes and primers to identify and isolate the fall length sequence of the nucleic acid. The nearest neighbors can indicate a tissue or cell type to be used to construct a library for the full-length sequences of the nucleic acid.

[0111] Typically, the nucleic acids are translated in all six frames to determine the best alignment with the individual sequences. The sequences disclosed herein in the Sequence Listing are in a 5′ to 3′ orientation and translation in three frames can be sufficient (with a few specific exceptions as described in the Examples). These amino acid sequences are referred to, generally, as query sequences, which will be aligned with the individual sequences.

[0112] Nucleic acid sequences can be compared with known genes by any of the methods disclosed above. Results of individual and query sequence alignments can be divided into three categories: high similarity, weak similarity, and no similarity. Individual alignment results ranging from high similarity to weak similarity provide a basis for determining polypeptide activity and/or structure.

[0113] Parameters for categorizing individual results include: percentage of the alignment region length where the strongest alignment is found, percent sequence identity, and p value.

[0114] The percentage of the alignment region length is calculated by counting the number of residues of the individual sequence found in the region of strongest alignment. This number is divided by the total residue length of the query sequence to find a percentage.

[0115] Percent sequence identity is calculated by counting the number of amino acid matches between the query and individual sequence and dividing total number of matches by the number of residues of the individual sequence found in the region of strongest alignment. For the example above, the percent identity would be 10 matches divided by 11 amino acids, or approximately 90.9%.

[0116] P value is the probability that the alignment was produced by chance. For a single alignment, the p value can be calculated according to Karlin et al., Proc. Natl. Acad. Sci. 87: 2264 (1990) and Karlin et al., Proc. Natl. Acad. Sci. 90: (1993). The p value of multiple alignments using the same query sequence can be calculated using an heuristic approach described in Altschul et al., Genet. 6:119(1994). Alignment programs such as BLAST program can calculate the p value.

[0117] The boundaries of the region where the sequences align can be determined according to Doolittle, Methods in Enzymology, supra; BLAST or FASTA programs; or by determining the area where the sequence identity is highest.

[0118] Another factor to consider for determining identity or similarity is the location of the similarity or identity. Strong local alignment can indicate similarity even if the length of alignment is short. Sequence identity scattered throughout the length of the query sequence also can indicate a similarity between the query and profile sequences.

[0119] High Similarity

[0120] For the alignment results to be considered high similarity, the percent of the alignment region length, typically, is at least about 55% of total length query sequence; more typically, at least about 58%; even more typically; at least about 60% of the total residue length of the query sequence. Usually, percent length of the alignment region can be as much as about 62%; more usually, as much as about 64%; even more usually, as much as about 66%.

[0121] Further, for high similarity, the region of alignment, typically, exhibits at least about 75% of sequence identity; more typically, at least about 78%; even more typically; at least about 80% sequence identity. Usually, percent sequence identity can be as much as about 82%; more usually, as much as about 84%; even more usually, as much as about 86%.

[0122] The p value is used in conjunction with these methods. If high similarity is found, the query sequence is considered to have high similarity with a profile sequence when the p value is less than or equal to about 10⁻²; more usually; less than or equal to about 10⁻³ even more usually; less than or equal to about 10⁻⁴. More typically, the p value is no more than about 10⁻⁵ more typically; no more than or equal to about 10⁻¹⁰; even more typically; no more than or equal to about 10⁻¹⁵ for the query sequence to be considered high similarity.

[0123] Weak Similarity

[0124] For the alignment results to be considered weak there is no minimum percent length of the alignment region no minimum length of alignment. A better showing of weak similarity is considered when the region of alignment is, typically, at least about 15 amino acid residues in length; more typically, at least about 20; even more typically; at least about 25 amino acid residues in length. Usually, length of the alignment region can be as much as about 30 amino acid residues; more usually, as much as about 40; even more usually, as much as about 60 amino acid residues.

[0125] Further, for weak similarity, the region of alignment, typically, exhibits at least about 35% of sequence identity; more typically, at least about 40%; even more typically; at least about 45% sequence identity. Usually, percent sequence identity can be as much as about 50%; more usually, as much as about 55%; even more usually, as much as about 60%.

[0126] If low similarity is found, the query sequence is considered to have weak similarity with a profile sequence when the p value is usually less than or equal to about 10⁻²; more usually; less than or equal to about 10⁻³ even more usually; less than or equal to about 10⁻⁴. More typically, the p value is no more than about 10⁻⁵ more usually; no more than or equal to about 10⁻¹⁰; even more usually; no more than or equal to about 10⁻¹⁵ for the query sequence to be considered weak similarity.

[0127] Similarity Determined by Sequence Identity

[0128] Sequence identity alone can be used to determine similarity of a query sequence to an individual sequence and can indicate the activity of the sequence. Such an alignment, preferably, permits gaps to align sequences. Typically, the query sequence is related to the profile sequence if the sequence identity over the entire query sequence is at least about 15%; more typically, at least about 20%; even more typically, at least about 25%; even more typically, at least about 50%. Sequence identity alone as a measure of similarity is most useful when the query sequence is usually, at least 80 residues in length; more usually, 90 residues; even more usually, at least 95 amino acid residues in length. More typically, similarity can be concluded based on sequence identity alone when the query sequence is preferably 100 residues in length; more preferably, 120 residues in length; even more preferably, 150 amino acid residues in length.

[0129] Determining Activity from Alignments with Profile and Multiple Aligned Sequences

[0130] Translations of the nucleic acids can be aligned with amino acid profiles that define either protein families or common motifs. Also, translations of the nucleic acids can be aligned to multiple sequence alignments (MSA) comprising the polypeptide sequences of members of protein families or motifs. Similarity or identity with profile sequences or MSAs can be used to determine the activity of the polypeptides encoded by nucleic acids or corresponding cDNA or genes. For example, sequences that show an identity or similarity with a chemokine profile or MSA can exhibit chemokine activities.

[0131] Profiles can designed manually by (1) creating a MSA, which is an alignment of the amino acid sequence of members that belong to the family and (2) constructing a statistical representation of the alignment. Such methods are described, for example, in Birney et al., Nucl. Acid Res. 25(14): 2730-2739 (1996).

[0132] MSAs of some protein families and motifs are publicly available. For example, these include MSAs of 547 different families and motifs. These MSAs are described also in Sonnhammer et al., Proteins 28: 405-420 (1997). Other sources are also available in the world wide web. A brief description of these MSAs is reported in Pascarella et al., Prot. Eng. 9(3): 249-251 (1996).

[0133] Techniques for building profiles from MSAs are described in Sonnhammer et al., supra; Bimey et al., supra; and Methods in Enzymology, vol. 266: “Computer Methods for Macromolecular Sequence Analysis,” 1996, ed. Doolittle, Academic Press, Inc., a division of Harcourt Brace & Co., San Diego, Calif., USA.

[0134] Similarity between a query sequence and a protein family or motif can be determined by (a) comparing the query sequence against the profile and/or (b) aligning the query sequence with the members of the family or motif.

[0135] Typically, a program such as Searchwise can be used to compare the query sequence to the statistical representation of the multiple alignment, also known as a profile. The program is described in Birney et al., supra. Other techniques to compare the sequence and profile are described in Sonnhammer et al., supra and Doolittle, supra.

[0136] Next, methods described by Feng et al., J. Mol. Evol. 25:351-360 (1987) and Higgins et al., CABIOS 5:151-153 (1989) can be used align the query sequence with the members of a family or motif, also known as a MSA. Computer programs, such as PILEUP, can be used. See Feng et al., infra.

[0137] The following factors are used to determine if a similarity between a query sequence and a profile or MSA exists: (1) number of conserved residues found in the query sequence, (2) percentage of conserved residues found in the query sequence, (3) number of frameshifts, and (4) spacing between conserved residues.

[0138] Some alignment programs that both translate and align sequences can make any number of frameshifts when translating the nucleotide sequence to produce the best alignment. The fewer frameshifts needed to produce an alignment, the stronger the similarity or identity between the query and profile or MSAs. For example, a weak similarity resulting from no frameshifts can be a better indication of activity or structure of a query sequence, than a strong similarity resulting from two frameshifts.

[0139] Preferably, three or fewer frameshifts are found in an alignment; more preferably two or fewer frameshifts; even more preferably, one or fewer frameshifts; even more preferably, no frameshifts are found in an alignment of query and profile or MSAs.

[0140] Conserved residues are those amino acids that are found at a particular position in all or some of the family or motif members. For example, most known chemokines contain four conserved cysteines. Alternatively, a position is considered conserved if only a certain class of amino acids is found in a particular position in all or some of the family members. For example, the N-terminal position may contain a positively charged amino acid, such as lysine, arginine, or histidine.

[0141] Typically, a residue of a polypeptide is conserved when a class of amino acids or a single amino acid is found at a particular position in at least about 40% of all class members; more typically, at least about 50%; even more typically, at least about 60% of the members. Usually, a residue is conserved when a class or single amino acid is found in at least about 70% of the members of a family or motif; more usually, at least about 80%; even more usually, at least about 90%; even more usually, at least about 95%.

[0142] A residue is considered conserved when three unrelated amino acids are found at a particular position in the some or all of the members; more usually, two unrelated amino acids. These residues are conserved when the unrelated amino acids are found at particular positions in at least about 40% of all class member, more typically, at least about 50%; even more typically, at least about 60% of the members. Usually, a residue is conserved when a class or single amino acid is found in at least about 70% of the members of a family or motif more usually, at least about 80%; even more usually, at least about 90%; even more usually, at least about 95%.

[0143] A query sequence has similarity to a profile or MSA when the query sequence comprises at least about 25% of the conserved residues of the profile or MSA; more usually, at least about 30%; even more usually; at least about 40%. Typically, the query sequence has a stronger similarity to a profile sequence or MSA when the query sequence comprises at least about 45% of the conserved residues of the profile or MSA more typically, at least about 50%; even more typically; at least about 55%.

### V. PROBES AND PRIMERS

[0144] The nucleotide sequences determined from the cloning of genes from tumor cells, especially colon cancer cell lines and tissues will further allow for the generation of probes and primers designed for identifying and/or cloning homologs in other cell types, e.g., from other tissues, as well as homologs from other mammalian organisms. Nucleotide sequences useful as probes/primers may include all or a portion of the sequences listed in SEQ ID Nos. 1-4470, 4472, 4474, 4476, 4478, 4480, 4482, 4484, 4486, 4488, 4490, 4492, and 4494 or sequences complementary thereto or sequences which hybridize under stringent conditions to all or a portion of SEQ ID Nos. 1-4470, 4472, 4474, 4476, 4478, 4480, 4482, 4484, 4486, 4488, 4490, 4492, and 4494. For instance, the present invention also provides a probe/primer comprising a substantially purified oligonucleotide, which oligonucleotide comprising a nucleotide sequence that hybridizes under stringent conditions to at least approximately 12, preferably 25, more preferably 40, 50, or 75 consecutive nucleotides up to the full length of the sense or anti-sense sequence selected from the group consisting of SEQ ID Nos. 1-4470, 4472, 4474, 4476, 4478, 4480, 4482, 4484, 4486, 4488, 4490, 4492, and 4494, preferably SEQ ID Nos. 1-1103, even more preferably SEQ ID Nos. 1-503, or a sequence complementary thereto, or naturally occurring mutants thereof. For instance, primers based on a nucleic acid represented in SEQ ID Nos. 1-4470, 4472, 4474, 4476, 4478, 4480, 4482, 4484, 4486, 4488, 4490, 4492, and 4494, preferably SEQ ID Nos. 1-1103, even more preferably SEQ ID Nos. 1-503, and even still more preferred SEQ ID Nos. 4472, 4474, 4476, 4478, 4480, 4482, 4484, 4486, 4488, 4490, 4492, and 4494, or a sequence complementary thereto, can be used in PCR reactions to clone homologs of that sequence.

[0145] In yet another embodiment, the invention provides probes/primers comprising a nucleotide sequence that hybridizes under moderately stringent conditions to at least approximately 12, 16, 25, 40, 50 or 75 consecutive nucleotides up to the full length of the sense or antisense sequence selected from the group consisting of SEQ ID Nos. 1-4470, 4472, 4474, 4476, 4478, 4480, 4482, 4484, 4486, 4488, 4490, 4492, and 4494, preferably SEQ ID Nos. 1-1103, even more preferably SEQ ID Nos. 1-503, or naturally occurring mutants thereof.

[0146] In particular, these probes are useful because they provide a method for detecting mutations in wild-type genes of the present invention. Nucleic acid probes which are complementary to a wild-type gene of the present invention and can form mismatches with mutant genes are provided, allowing for detection by enzymatic or chemical cleavage or by shifts in electrophoretic mobility. Likewise, probes based on the subject sequences can be used to detect transcripts or genomic sequences encoding the same or homologous proteins, for use, for example, in prognostic or diagnostic assays. In preferred embodiments, the probe further comprises a label group attached thereto and able to be detected, e.g., the label group is selected from radioisotopes, fluorescent compounds, chemiluminescent compounds, enzymes, and enzyme co-factors.

[0147] Full-length cDNA molecules comprising the disclosed nucleic acids are obtained as follows. In a preferred embodiment, the invention provides the full length cDNA sequence of SEQ ID Nos. 4472, 4474, 4476, 4478, 4480, 4482, 4484, 4486, 4488, 4490, 4492, and 4494. A subject nucleic acid or a portion thereof comprising at least about 12, 15, 18, or 20 nucleotides up to the full length of a sequence represented in SEQ ID Nos. 1-4470, 4472, 4474, 4476, 4478, 4480, 4482, 4484, 4486, 4488, 4490, 4492, and 4494, preferably SEQ ID Nos. 1-1103, even more preferably SEQ ID Nos. 1-503, or a sequence complementary thereto, may be used as a hybridization probe to detect hybridizing members of a cDNA library using probe design methods, cloning methods, and clone selection techniques as described in U.S. Pat. No. 5,654,173, “Secreted Proteins and Polynucleotides Encoding Them,” incorporated herein by reference. Libraries of cDNA may be made from selected tissues, such as normal or tumor tissue, or from tissues of a mammal treated with, for example, a pharmaceutical agent. Preferably, the tissue is the same as that used to generate the nucleic acids, as both the nucleic acid and the cDNA represent expressed genes. Most preferably, the cDNA library is made from the biological material described herein in the Examples. Alternatively, many cDNA libraries are available commercially. (Sambrook et al., Molecular Cloning: A Laboratory Manual, 2nd Ed. (Cold Spring Harbor Press, Cold Spring Harbor, N.Y. 1989). The choice of cell type for library construction may be made after the identity of the protein encoded by the nucleic acid-related gene is known. This will indicate which tissue and cell types are likely to express the related gene, thereby containing the mRNA for generating the cDNA.

[0148] Members of the library that are larger than the nucleic acid, and preferably that contain the whole sequence of the native message, may be obtained. To confirm that the entire cDNA has been obtained, RNA protection experiments may be performed as follows. Hybridization of a full-length cDNA to an mRNA may protect the RNA from RNase degradation. If the cDNA is not full length, then the portions of the mRNA that arc not hybridized may be subject to RNase degradation. This may be assayed, as is known in the art, by changes in electrophoretic mobility on polyacrylamide gels, or by detection of released monoribonucleotides. Sambrook et al., Molecular Cloning: A Laboratory Manual, 2nd Ed. (Cold Spring Harbor Press, Cold Spring Harbor, N.Y. 1989). In order to obtain additional sequences 5′ to the end of a partial cDNA, 5′RACE (PCR Protocols: A Guide to Methods and Applications (Academic Press, Inc. 1990)) may be performed.

[0149] Genomic DNA may be isolated using nucleic acids in a manner similar to the isolation of full-length cDNAs. Briefly, the nucleic acids, or portions thereof, may be used as probes to libraries of genomic DNA. Preferably, the library is obtained from the cell type that was used to generate the nucleic acids. Most preferably, the genomic DNA is obtained from the biological material described herein in the Example. Such libraries may be in vectors suitable for carrying large segments of a genome, such as P1 or YAC, as described in detail in Sambrook et al., 9.4-9.30. In addition, genomic sequences can be isolated from human BAC libraries, which are commercially available from Research Genetics, Inc., Huntville, Ala., USA, for example. In order to obtain additional 5′ or 3′ sequences, chromosome walking may be performed, as described in Sambrook et al., such that adjacent and overlapping fragments of genomic DNA are isolated. These may be mapped and pieced together, as is known in the art, using restriction digestion enzymes and DNA ligase.

[0150] Using the nucleic acids of the invention, corresponding full length genes can be isolated using both classical and PCR methods to construct and probe cDNA libraries. Using either method, Northern blots, preferably, may be performed on a number of cell types to determine which cell lines express the gene of interest at the highest rate.

[0151] Classical methods of constructing cDNA libraries in Sambrook et al., supra. With these methods, cDNA can be produced from mRNA and inserted into viral or expression vectors. Typically, libraries of mRNA comprising poly(A) tails can be produced with poly(T) primers. Similarly, cDNA libraries can be produced using the instant sequences as primers.

[0152] PCR methods may be used to amplify the members of a cDNA library that comprise the desired insert. In this case, the desired insert may contain sequence from the full length cDNA that corresponds to the instant nucleic acids. Such PCR methods include gene trapping and RACE methods.

[0153] Gene trapping may entail inserting a member of a cDNA library into a vector. The vector then may be denatured to produce single stranded molecules. Next, a substrate-bound probe, such a biotinylated oligo, may be used to trap cDNA inserts of interest. Biotinylated probes can be linked to an avidin-bound solid substrate. PCR methods can be used to amplify the trapped cDNA. To trap sequences corresponding to the full length genes, the labeled probe sequence may be based on the nucleic acids of the invention, e.g., SEQ ID Nos. 1-1103, preferably SEQ ID Nos. 1-503, or a sequence complementary thereto. Random primers or primers specific to the library vector can be used to amplify the trapped cDNA. Such gene trapping techniques are described in Gruber et al., PCT WO 95/04745 and Gruber et a!., U.S. Pat. No. 5,500,356. Kits are commercially available to perform gene trapping experiments from, for example, Life Technologies, Gaithersburg, Md., USA.

[0154] “Rapid amplification of cDNA ends,” or RACE, is a PCR method of amplifying cDNAs from a number of different RNAs. The cDNAs may be ligated to an oligonucleotide linker and amplified by PCR using two primers. One primer may be based on sequence from the instant nucleic acids, for which full length sequence is desired, and a second primer may comprise a sequence that hybridizes to the oligonucleotide linker to amplify the cDNA. A description of this method is reported, for example, in PCT Pub. No. WO 97/19110.

[0155] In preferred embodiments of RACE, a common primer may be designed to anneal to an arbitrary adaptor sequence ligated to cDNA ends (Apte and Siebert, Biotechniques, 15:890-893, 1993; Edwards et al., Nuc. Acids Res., 19:5227-5232, 1991). When a single gene-specific RACE primer is paired with the common primer, preferential amplification of sequences between the single gene specific primer and the common primer occurs. Commercial cDNA pools modified for use in RACE are available.

[0156] Another PCR-based method generates full-length cDNA library with anchored ends without specific knowledge of the cDNA sequence. The method uses lock-docking primers (1-VI), where one primer, poly TV (I-Ill) locks over the polyA tail of eukaryotic mRNA producing first strand synthesis and a second primer, polyGH (IV-VI) locks onto the polyC tail added by terminal deoxynucleotidyl transferase (TdT). This method is described, for example, in PCT Pub. No. WO 96/40998.

[0157] The promoter region of a gene generally is located 5′ to the initiation site for RNA polymerase IL Hundreds of promoter regions contain the “TATA” box, a sequence such as TATTA or TATAA, which is sensitive to mutations. The promoter region can be obtained by performing 5′ RACE using a primer from the coding region of the gene. Alternatively, the cDNA can be used as a probe for the genomic sequence, and the region 5′ to the coding region is identified by “walking up.”

[0158] If the gene is highly expressed or differentially expressed, the promoter from the gene may be of use in a regulatory construct for a heterologous gene.

[0159] Once the full-length cDNA or gene is obtained, DNA encoding variants can be prepared by site-directed mutagenesis, described in detail in Sambrook 15.3-15.63. The choice of codon or nucleotide to be replaced can be based on the disclosure herein on optional changes in amino acids to achieve altered protein structure and/or function.

[0160] As an alternative method to obtaining DNA or RNA from a biological material, nucleic acid comprising nucleotides having the sequence of one or more nucleic acids of the invention can be synthesized. Thus, the invention encompasses nucleic acid molecules ranging in length from 12 nucleotides (corresponding to at least 12 contiguous nucleotides which hybridize under stringent conditions to or are at least 80% identical to a nucleic acid represented by one of SEQ ID Nos. 1-4470, 4472, 4474, 4476, 4478, 4480, 4482, 4484, 4486, 4488, 4490, 4492, and 4494, preferably SEQ ID Nos. 1-1103, even more preferably SEQ ID Nos. 1-503, or a sequence complementary thereto) up to a maximum length suitable for one or more biological manipulations, including replication and expression, of the nucleic acid molecule. The invention includes but is not limited to (a) nucleic acid having the size of a full gene, and comprising at least one of SEQ ID Nos. 1-4470, 4472, 4474, 4476, 4478, 4480, 4482, 4484, 4486, 4488, 4490, 4492, and 4494, preferably SEQ ID Nos. 1-1103, even more preferably SEQ ID Nos. 1-503, or a sequence complementary thereto; (b) the nucleic acid of (a) also comprising at least one additional gene, operably linked to permit expression of a fusion protein; (c) an expression vector comprising (a) or (b); (d) a plasmid comprising (a) or (b); and (e) a recombinant viral particle comprising (a) or (b). Construction of (c) can be accomplished as described below in part VI.

[0161] The sequence of a nucleic acid of the present invention is not limited and can be any sequence of A, T, G, and/or C (for DNA) and A, U, G, and/or C (for RNA) or modified bases thereof, including inosine and pseudouridine. The choice of sequence will depend on the desired function and can be dictated by coding regions desired, the intron-like regions desired, and the regulatory regions desired.

### VI. VECTORS CARRYING NUCLEIC ACIDS OF THE PRESENT INVENTION

[0162] The invention further provides plasmids and vectors, which can be used to express a gene in a host cell. The host cell may be any prokaryotic or eukaryotic cell. Thus, a nucleotide sequence derived from any one of SEQ ID Nos. 1-4470, 4472, 4474, 4476, 4478, 4480, 4482, 4484, 4486, 4488, 4490, 4492, and 4494, preferably SEQ ID Nos. 1-1103, even more preferably SEQ ID Nos. 1-503, and still more preferably SEQ ID Nos. 4472, 4474, 4476, 4478, 4480, 4482, 4484, 4486, 4488, 4490, 4492, and 4494, or a sequence complementary thereto, encoding all or a selected portion of a protein, can be used to produce a recombinant form of an polypeptide via microbial or eukaryotic cellular processes. Ligating the polynucleotide sequence into a gene construct, such as an expression vector, and transforming or transfecting into hosts, either eukaryotic (yeast, avian, insect or mammalian) or prokaryotic (bacterial cells), are standard procedures well known in the art.

[0163] Vectors that allow expression of a nucleic acid in a cell are referred to as expression vectors. Typically, expression vectors contain a nucleic acid operably linked to at least one transcriptional regulatory sequence. Regulatory sequences are art-recognized and are selected to direct expression of the subject nucleic acids. Transcriptional regulatory sequences are described in Goeddel; Gene Expression Technology: Methods in Enzymology 185, Academic Press, San Diego, Calif. (1990). In one embodiment, the expression vector includes a recombinant gene encoding a peptide having an agonistic activity of a subject polyp eptide, or alternatively, encoding a peptide which is an antagonistic form of a subject polypeptide.

[0164] The choice of plasmid will depend on the type of cell in which propagation is desired and the purpose of propagation. Certain vectors are useful for amplifying and making large amounts of the desired DNA sequence. Other vectors are suitable for expression in cells in culture. Still other vectors are suitable for transfer and expression in cells in a whole animal or person. The choice of appropriate vector is well within the skill of the art. Many such vectors are available commercially. The nucleic acid or full-length gene is inserted into a vector typically by means of DNA ligase attachment to a cleaved restriction enzyme site in the vector. Alternatively, the desired nucleotide sequence may be inserted by homologous recombination in vivo. Typically this is accomplished by attaching regions of homology to the vector on the flanks of the desired nucleotide sequence. Regions of homology are added by ligation of oligonucleotides, or by polymerase chain reaction using primers comprising both the region of homology and a portion of the desired nucleotide sequence.

[0165] Nucleic acids or full-length genes are linked to regulatory sequences as appropriate to obtain the desired expression properties. These may include promoters (attached either at the 5′ end of the sense strand or at the 3′ end of the antisense strand), enhancers, terminators, operators, repressors, and inducers. The promoters may be regulated or constitutive. In some situations it may be desirable to use conditionally active promoters, such as tissue-specific or developmental stage-specific promoters. These are linked to the desired nucleotide sequence using the techniques described above for linkage to vectors. Any techniques known in the art may be used.

[0166] When any of the above host cells, or other appropriate host cells or organisms, are used to replicate and/or express the polynucleotides or nucleic acids of the invention, the resulting replicated nucleic acid, RNA, expressed protein or polypeptide, is within the scope of the invention as a product of the host cell or organism. The product is recovered by any appropriate means known in the art.

[0167] Once the gene corresponding to the nucleic acid is identified, its expression can be regulated in the cell to which the gene is native. For example, an endogenous gene of a cell can be regulated by an exogenous regulatory sequence as disclosed in U.S. Pat. No. 5,641,670, “Protein Production and Protein Delivery.”

[0168] A number of vectors exist for the expression of recombinant proteins in yeast (see, for example, Broach et al (1983) in Experimental Manipulation of Gene Expression, ed. M. Inouye, Academic Press, p. 83, incorporated by reference herein). In addition, drug resistance markers such as ampicillin can be used. In an illustrative embodiment, a polypeptide is produced recombinantly utilizing an expression vector generated by sub-cloning one of the nucleic acids represented in one of SEQ ID Nos. 1-4470, 4472, 4474, 4476, 4478, 4480, 4482, 4484, 4486, 4488, 4490, 4492, and 4494, preferably SEQ ID Nos. 1-1103, even more preferably SEQ ID Nos. 1-503, or a sequence complementary thereto.

[0169] The preferred mammalian expression vectors contain both prokaryotic sequences, to facilitate the propagation of the vector in bacteria, and one or more eukaryotic transcription units that are expressed in eukaryotic cells. The various methods employed in the preparation of plasmids and transformation of host organisms are well known in the art. For other suitable expression systems for both prokaryotic and eukaryotic cells, as well as general recombinant procedures, see Molecular Cloning: A Laboratory Manual, 2′ Ed., ed. by Sambrook, Fritsch and Maniatis (Cold Spring Harbor Laboratory Press: 1989) Chapters 16 and 17.

[0170] When it is desirable to express only a portion of a gene, e.g., a truncation mutant, it may be necessary to add a start codon (ATG) to the oligonucleotide fragment containing the desired sequence to be expressed. It is well known in the art that a methionine at the N-terminal position can be enzymatically cleaved by the use of the enzyme methionine aminopeptidase (MAP). MAP has been cloned from E. coli (Ben-Bassat et al., (1987) J. Bacteriol. 169:751-757) and Salmonella typhimurium and its in vitro activity has been demonstrated on recombinant proteins (Miller et al. (1987) PNAS 84:2718-1722). Therefore, removal of an N-terminal methionine, if desired, can be achieved either in vivo by expressing polypeptides in a host which produces MAP (e.g., E. coli or CM89 or S. cerevisiae), or in vitro by use of purified MAP (e.g., procedure of Miller et al., supra).

[0171] Moreover, the nucleic acid constructs of the present invention can also be used as part of a gene therapy protocol to deliver nucleic acids such as antisense nucleic acids. Thus, another aspect of the invention features expression vectors for in vivo or in vitro transfection with an antisense oligonucleotide.

[0172] In addition to viral transfer methods, non-viral methods can also be employed to introduce a subject nucleic acid, e.g., a sequence represented by one of SEQ ID Nos. 1-4470, 4472, 4474, 4476, 4478, 4480, 4482, 4484, 4486, 4488, 4490, 4492, and 4494, preferably SEQ ID Nos. 1-1103, even more preferably SEQ ID Nos. 1-503, or a sequence complementary thereto, into the tissue of an animal. Most nonviral methods of gene transfer rely on normal mechanisms used by mammalian cells for the uptake and intracellular transport of macromolecules. In preferred embodiments, non-viral targeting means of the present invention rely on endocytic pathways for the uptake of the subject nucleic acid by the targeted cell. Exemplary targeting means of this type include liposomal derived systems, polylysine conjugates, and artificial viral envelopes.

[0173] A nucleic acid of any of SEQ ID Nos. 1-4470, 4472, 4474, 4476, 4478, 4480, 4482, 4484, 4486, 4488, 4490, 4492, and 4494, preferably SEQ ID Nos. 1-1103, even more preferably SEQ ID Nos. 1-503, or a sequence complementary thereto, the corresponding cDNA, or the full-length gene may be used to express the partial or complete gene product. Appropriate nucleic acid constructs are purified using standard recombinant DNA techniques as described in, for example, Sambrook et al., (1989) Molecular Cloning: A Laboratory Manual, 2nd ed. (Cold Spring Harbor Press, Cold Spring Harbor, N.Y.), and under current regulations described in United States Dept. of HHS, National Institute of Health (NIH) Guidelines for Recombinant DNA research. The polypeptides encoded by the nucleic acid may be expressed in any expression system, including, for example, bacterial, yeast, insect, amphibian and mammalian systems. Suitable vectors and host cells are described, for example, in U.S. Pat. No. 5,654,173.

[0174] Bacteria. Expression systems in bacteria include those described in Chang et al., Nature (1978) 275:615, Goeddel et al., Nature (1979) 281:544, Goeddel et al., Nucleic Acids Rec. (1980) 8:4057; EP 0 036,776, U.S. Pat. No. 4,551,433, DeBoer et al., Proc. Natl. Acad. Sci. (USA) (1983) 80:2125, and Siebenlist et al., Cell (1980) 20:269.

[0175] Yeast. Expression systems in yeast include those described in Hinnen et al., Proc. Natl. Acad. Sci. (USA) (1978) 75:1929; Ito et al., J. Bacteriol. (1983) 153:163; Kurtz et al., Mol. Cell. Biol. (1986) 6:142; Kunze et al., J. Basic Microbiol. (1985) 25:141; Gleeson et al., J. Gen. Microbiol. (1986) 132:3459, Roggenkamp et al., Mol. Gen. Genet. (1986) 202:302) Das et al., J. Bacteriol. (1984) 158:1165; De Louvencourt et al., J. Bacteriol. (1983) 154:737, Van den Berg et al., Bio/Technology (1990) 8:135; Kunze et al., J. Basic Microbiol. (1985) 25:141; Cregg et al., Mol. Cell. Biol. (1985) 5:3376, U.S. Pat. Nos. 4,837,148 and 4,929,555; Beach and Nurse, Nature (1981) 300:706; Davidow et al., Curr. Genet. (1985) 10:380, Gaillardin et al., Curr. Genet. (1985) 10:49, Ballance et al., Biochem. Biophys. Res. Commun. (1983) 112:284289; Tilbum et al., Gene (1983) 26:205221, Yelton et al., Proc. Natl. Acad. Sci. (USA) (1984) 81:14701474, Kelly and Hynes, EMBO J. (1985) 4:475479; EP 0 244,234, and WO 91/00357.

[0176] Insect Cells. Expression of heterologous genes in insects is accomplished as described in U.S. Pat. No. 4,745,051, Friesen et al., (1986) “The Regulation of Baculovirus Gene Expression” in: The Molecular Biology Of Baculoviruses (W. Doerfler, ed.), EP 0 127,839, EP 0 155,476, and Vlak et al., J. Gen. Virol. (1988) 69:765776, Miller et al., Ann. Rev. Microbiol. (1988) 42:177, Carbonell et al., Gene (1988) 73:409, Maeda et al., Nature (1985) 315:592594, Lebacq Verheyden et at., Mol. Cell. Biol. (1988) 8:3129; Smith et al., Proc. Natl. Acad. Sci. (USA) (1985) 82:8404, Miyajima et al., Gene (1987) 58:273; and Martinet al., DNA (1988) 7:99. Numerous baculoviral strains and variants and corresponding permissive insect host cells from hosts are described in Luckow et al., Bio/Technology (1988) 6:4755, Miller et al., Generic Engineering (Setlow, J. K. et al. eds.), Vol. 8 (Plenum Publishing, 1986), pp. 277279, and Maeda et al., Nature, (1985) 315:592-594.

[0177] Mammalian Cells. Mammalian expression is accomplished as described in Dijkema et al., EMBO J. (1985) 4:761, Gorman et al., Proc. Natl. Acad. Sci. (USA) (1982) 79:6777, Boshart et al., Cell (1985) 41:52 1 and U.S. Pat. No. 4,399,216. Other features of mammalian expression are facilitated as described in Ham and Wallace, Meth. Enz. (1979) 58:44, Barnes and Sato, Anal. Biochem. (1980) 102:255, U.S. Pat. Nos. 4,767,704, 4,657,866, 4,927,762, 4,560,655, WO 90/103430, WO 87/00195, and U.S. RE 30,985.

### VII. THERAPEUTIC NUCLEIC ACID CONSTRUCTS

[0178] One aspect of the invention relates to the use of the isolated nucleic acid, e.g., SEQ ID Nos. 1-4470, 4472, 4474, 4476, 4478, 4480, 4482, 4484, 4486, 4488, 4490, 4492, and 4494, preferably SEQ ID Nos. 1-1103, even more preferably SEQ ID Nos. 1-503, or a sequence complementary thereto, in antisense therapy. As used herein, antisense therapy refers to administration or in situ generation of oligonucleotide molecules or their derivatives which specifically hybridize (e.g., bind) under cellular conditions with the cellular mRNA and/or genomic DNA, thereby inhibiting transcription and/or translation of that gene. The binding may be by conventional base pair complementarity, or, for example, in the case of binding to DNA duplexes, through specific interactions in the major groove of the double helix. In general, antisense therapy refers to the range of techniques generally employed in the art, and includes any therapy which relies on specific binding to oligonucleotide sequences.

[0179] An antisense construct of the present invention can be delivered, for example, as an expression plasmid which, when transcribed in the cell, produces RNA which is complementary to at least a unique portion of the cellular mRNA. Alternatively, the antisense construct is an oligonucleotide probe which is generated ex vivo and which, when introduced into the cell, causes inhibition of expression by hybridizing with the mRNA and/or genomic sequences of a subject nucleic acid. Such oligonucleotide probes are preferably modified oligonucleotides which are resistant to endogenous nucleases, e.g., exonucleases and/or endonucleases, and are therefore stable in vivo. Exemplary nucleic acid molecules for use as antisense oligonucleotides are phosphoramidate, phosphorothioate and methylphosphonate analogs of DNA (see also U.S. Pat. Nos. 5,176,996; 5,264,564; and 5,256,775). Additionally, general approaches to constructing oligomers useful in antisense therapy have been reviewed, for example, by Van der Krol et al. (1988) BioTechniques 6:958-976; and Stein et al. (1988) Cancer Res 48:2659-2668. With respect to antisense DNA, oligodeoxyribonucleotides derived from the translation initiation site, e.g., between the −10 and +10 regions of the nucleotide sequence of interest, are preferred.

[0180] Antisense approaches involve the design of oligonucleotides (either DNA or RNA) that are complementary to mRNA. The antisense oligonucleotides will bind to the mRNA transcripts and prevent translation. Absolute complementarity, although preferred, is not required. In the case of double-stranded antisense nucleic acids, a single strand of the duplex DNA may thus be tested, or triplex formation may be assayed. The ability to hybridize will depend on both the degree of complementarity and the length of the antisense nucleic acid. Generally, the longer the hybridizing nucleic acid, the more base mismatches with an RNA it may contain and still form a stable duplex (or triplex, as the case may be). One skilled in the art can ascertain a tolerable degree of mismatch by use of standard procedures to determine the melting point of the hybridized complex.

[0181] Oligonucleotides that are complementary to the 5′ end of the mRNA, e.g., the 5′ untranslated sequence up to and including the AUG initiation codon, should work most efficiently at inhibiting translation. However, sequences complementary to the 3′ untranslated sequences of mRNAs have recently been shown to be effective at inhibiting translation of mRNAs as well. (Wagner, R. 1994. Nature 372:333). Therefore, oligonucleotides complementary to either the 5′ or 3′ untranslated, non-coding regions of a gene could be used in an antisense approach to inhibit translation of endogenous mRNA. Oligonucleotides complementary to the 5′ untranslated region of the mRNA should include the complement of the AUG start codon. Antisense oligonucleotides complementary to mRNA coding regions are typically less efficient inhibitors of translation but could also be used in accordance with the invention. Whether designed to hybridize to the 5′, 3′, or coding region of subject mRNA, antisense nucleic acids should be at least six nucleotides in length, and are preferably less that about 100 and more preferably less than about 50,25, 17 or 10 nucleotides in length.

[0182] Regardless of the choice of target sequence, it is preferred that in vitro studies are first performed to quantitate the ability of the antisense oligonucleotide to quantitate the ability of the antisense oligonucleotide to inhibit gene expression. It is preferred that these studies utilize controls that distinguish between antisense gene inhibition and nonspecific biological effects of oligonucleotides. It is also preferred that these studies compare levels of the target RNA or protein with that of an internal control RNA or protein. Additionally, it is envisioned that results obtained using the antisense oligonucleotide are compared with those obtained using a control oligonucleotide. It is preferred that the control oligonucleotide is of approximately the same length as the test oligonucleotide and that the nucleotide sequence of the oligonucleotide differs from the antisense sequence no more than is necessary to prevent specific hybridization to the target sequence.

[0183] The oligonucleotides can be DNA or RNA or chimeric mixtures or derivatives or modified versions thereof, single-stranded or double-stranded. The oligonucleotide can be modified at the base moiety, sugar moiety, or phosphate backbone, for example, to improve stability of the molecule, hybridization, etc. The oligonucleotide may include other appended groups such as peptides (e.g., for targeting host cell receptors), or agents facilitating transport across the cell membrane (see, e.g., Letsinger et al., 1989, Proc. Natl. Acad. Sci. U.S.A. 86:6553-6556; Lemaitre et al., 1987, Proc. Natl. Acad. Sci. 84:648-652; PCT Publication No. WO 88/098 10, published Dec. 15, 1988) or the blood-brain barrier (see, e.g., PCT Publication No. WO 89/10 134, published Apr. 25, 1988), hybridization-triggered cleavage agents (See, e.g., Krol et al., 1988, BioTechniques 6:958-976), or intercalating agents (See, e.g., Zon, 1988, Pharm. Res. 5:539-549). To this end, the oligonucleotide may be conjugated to another molecule, e.g., a peptide, hybridization triggered cross-linking agent, transport agent, hybridization-triggered cleavage agent, etc.

[0184] The antisense oligonucleotide may comprise at least one modified base moiety which is selected from the group including but not limited to 5-fluorouracil, 5-bromouracil, 5-chlorouracil, 5-iodouracil, hypoxanthine, xantine, 4-acetylcytosine, 5-(carboxyhydroxytriethyl) uracil, 5-carboxymethylaminomethyl-2-thiouridine, 5-carboxymethylaminomethyluracil, dihydrouracil, beta-D-galactosylqueosine, inosine, N6-isopentenyladenine, 1-methylguanine, 1-methylinosine, 2,2-dimethylguanine, 2-methyladenine, 2-methylguanine, 3-methylcytosine, 5-methylcytosine, N6-adenine, 7-methylguanine, 5-methylaminomethyluracil, 5-methoxyaminomethyl-2-thiouracil, beta-D-mannosylqueosine, 5-methoxycarboxymethyluracil, 5-methoxyuracil, 2-methylthio-N6-isopentenyladenine, uracil-5-oxyacetic acid (v), wybutoxosine, pseudouracil, queosine, 2-thiocytosine, 5-methyl-2-thiouracil, 2-thiouracil, 4-thiouracil, 5-methyluracil, uracil-5- oxyacetic acid methylester, uracil-5-oxyacetic acid (v), 5-methyl-2-thiouracil, 3-(3-amino-3-N-2-carboxypropyl) uracil, (acp3)w, and 2,6-diaminopurine.

[0185] The antisense oligonucleotide may also comprise at least one modified sugar moiety selected from the group including but not limited to arabinose, 2-fluoroarabinose, xylulose, and hexose.

[0186] The antisense oligonucleotide can also contain a neutral peptide-like backbone. Such molecules are termed peptide nucleic acid (PNA)-oligomers and are described, e.g., in Peny-O'Keefe et al. (1996) Proc. Natl. Acad. Sci. U.S.A. 93:14670 and in Eglom et al. (1993) Nature 365:566. One advantage of PNA oligomers is their capability to bind to complementary DNA essentially independently from the ionic strength of the medium due to the neutral backbone of the DNA. In yet another embodiment, the antisense oligonucleotide comprises at least one modified phosphate backbone selected from the group consisting of a phosphorothioate, a phosphorodithioate, a phosphoramidothioate, a phosphoramidate, a phosphordiamidate, a methyiphosphonate, an alkyl phosphotriester, and a formacetal or analog thereof.

[0187] In yet a further embodiment, the antisense oligonucleotide is an α-anomeric oligonucleotide. An α-anomeric oligonucleotide forms specific double-stranded hybrids with complementary RNA in which, contrary to the usual β-units, the strands run parallel to each other (Gautier et al, 1987, Nucl. Acids Res. 15:6625-6641). The oligonucleotide is a 2′-O-methylribonucleotide (Inoue et al., 1987, Nucl. Acids Res. 15:6131-12148), or a chimeric RNA-DNA analogue (Jnoue et al., 1987, FEBS Lett. 215:327-330).

[0188] Oligonucleotides of the invention may be synthesized by standard methods known in the art, e.g., by use of an automated DNA synthesizer (such as are commercially available from Biosearch, Applied Biosystems, etc.). As examples, phosphorothioate oligonucleotides may be synthesized by the method of Stein et al. (1988, Nucl. Acids Res. 16:3209), methylphosphonate olgonucleotides can be prepared by use of controlled pore glass polymer supports (Sarin et al., 1988, Proc. Natl. Acad. Sci. U.S.A. 85:7448-7451), etc.

[0189] While antisense nucleotides complementary to a coding region sequence can be used, those complementary to the transcribed untranslated region and to the region comprising the initiating methionine are most preferred.

[0190] The antisense molecules can be delivered to cells which express the target nucleic acid in vivo. A number of methods have been developed for delivering antisense DNA or RNA to cells; e.g., antisense molecules can be injected directly into the tissue site, or modified antisense molecules, designed to target the desired cells (e.g., antisense linked to peptides or antibodies that specifically bind receptors or antigens expressed on the target cell surface) can be administered systemically.

[0191] However, it is often difficult to achieve intracellular concentrations of the antisense sufficient to suppress translation on endogenous mRNAs. Therefore, a preferred approach utilizes a recombinant DNA construct in which the antisense oligonucleotide is placed under the control of a strong pol Ill or pot II promoter. The use of such a construct to transfect target cells in the patient will result in the transcription of sufficient amounts of single stranded RNAs that will form complementary base pairs with the endogenous transcripts and thereby prevent translation of the target mRNA. For example, a vector can be introduced in vivo such that it is taken up by a cell and directs the transcription of an antisense RNA. Such a vector can remain episomal or become chromosomally integrated, as long as it can be transcribed to produce the desired antisense RNA. Such vectors can be constructed by recombinant DNA technology methods standard in the art. Vectors can be plasmid, viral, or others known in the art for replication and expression in mammalian cells. Expression of the sequence encoding the antisense RNA can be by any promoter known in the art to act in mammalian, preferably human cells. Such promoters can be inducible or constitutive. Such promoters include but are not limited to: the SV40 early promoter region (Bernoist and Chambon, 1981, Nature 290:304-3 10), the promoter contained in the 3′ long terminal repeat of Rous sarcoma virus (Yamamoto et al., 1980, Cell 22:787-797), the herpes thymidine kinase promoter (Wagner et al., 1981, Proc. Natl. Acad. Sci. U.S.A. 78:1441-1445), the regulatory sequences of the metallothionein gene (Brinster et at, 1982, Nature 296:39-42), etc. Any type of plasmid, cosmid, YAC or viral vector can be used to prepare the recombinant DNA construct which can be introduced directly into the tissue site; e.g., the choroid plexus or hypothalamus. Alternatively, viral vectors can be used which selectively infect the desired tissue (e.g., for brain, herpesvirus vectors may be used), in which case administration may be accomplished by another route (e.g., systemically).

[0192] In another aspect of the invention, ribozyme molecules designed to catalytically cleave target mRNA transcripts can be used to prevent translation of target mRNA and expression of a target protein (See, e.g., PCT International Publication W090/11364, published Oct. 4, 1990; Sarver et al., 1990, Science 247:1222-1225 and U.S. Pat. No. 5,093,246). While ribozymes that cleave mRNA at site specific recognition sequences can be used to destroy target mRNAs, the use of hammerhead ribozymes is preferred. Hammerhead ribozymes cleave mRNAs at locations dictated by flanking regions that form complementary base pairs with the target mRNA. The sole requirement is that the target mRNA have the following sequence of two bases: 5′-UG-3′. The construction and production of hammerhead ribozymes is well known in the art and is described more fully in Haseloff and Gerlach, 1988, Nature, 334:585-591. Preferably the ribozyme is engineered so that the cleavage recognition site is located near the 5′ end of the target MRNA; i.e., to increase efficiency and minimize the intracellular accumulation of non-functional mRNA transcripts.

[0193] The ribozymes of the present invention also include RNA endoribonucleases (hereinafter “Cech-type ribozymes”) such as the one which occurs naturally in Tetrahymena thermophila (known as the IVS, or L-19 IVS RNA) and which has been extensively described by Thomas Cech and collaborators (Zaug, et al., 1984, Science, 224:574-578; Zaug and Cech, 1986, Science, 231:470-475; Zaug, et al., 1986, Nature, 324:429-433; published International patent application No. W088/04300 by University Patents Inc.; Been and Cech, 1986, Cell, 47:207-216). The Cech-type ribozymes have an eight base pair active site which hybridizes to a target RNA sequence whereafter cleavage of the target RNA takes place. The invention encompasses those Cech-type ribozymes which target eight base-pair active site sequences that are present in a target gene.

[0194] As in the antisense approach, the ribozymes can be composed of modified oligonucleotides (e.g., for improved stability, targeting, etc.) and should be delivered to cells which express the target gene in vivo. A preferred method of delivery involves using a DNA construct “encoding” the ribozyme under the control of a strong constitutive pol III or pol II promoter, so that transfected cells will produce sufficient quantities of the ribozyme to destroy endogenous messages and inhibit translation. Because ribozymes, unlike antisense molecules, are catalytic, a lower intracellular concentration is required for efficiency.

[0195] Antisense RNA, DNA, and ribozyme molecules of the invention may be prepared by any method known in the art for the synthesis of DNA and RNA molecules. These include techniques for chemically synthesizing oligodeoxyribonucleotides and oligoribonucleotides well known in the art such as for example solid phase phosphoramidite chemical synthesis. Alternatively, RNA molecules may be generated by in vitro and in vivo transcription of DNA sequences encoding the antisense RNA molecule. Such DNA sequences may be incorporated into a wide variety of vectors which incorporate suitable RNA polymerase promoters such as the T7 or SP6 polymerase promoters. Alternatively, antisense cDNA constructs that synthesize antisense RNA constitutively or inducibly, depending on the promoter used, can be introduced stably into cell lines.

[0196] Moreover, various well-known modifications to nucleic acid molecules may be introduced as a means of increasing intracellular stability and half-life. Possible modifications include but are not limited to the addition of flanking sequences of ribonucleotides or deoxyribonucleotides to the 5′ and/or 3′ ends of the molecule or the use of phosphorothioate or 2′ 0-methyl rather than phosphodiesterase linkages within the oligodeoxyribonucleotide backbone.

### VIII. FULL-LENGTH cDNA SEQUENCES OF THE PRESENT INVENTION

[0197] The present invention also relates to full length cDNA sequences corresponding to one or more of the partial sequences of SEQ ID Nos. 1-4470. In particular the invention provides the full length cDNA sequences of SEQ ID Nos. 4472, 4474, 4476, 4478, 4480, 4482, 4484, 4486, 4488, 4490, 4492, and 4494. The full length sequences may be obtained as described above. These sequences are shown in FIG. 2, and summarized below in Table 2. Also shown in Table 2 are the SEQ ID Nos and GenBank accession numbers for the polypeptides which are encoded by the full length cDNA sequences and which correspond to SEQ ID Nos. 4471, 4473, 4475, 4477, 4479, 4481, 4483, 4485, 4487, 4489, 4491, and 4493.

| cDNA | | GenBank | | GenBank |
|---|---|---|---|---|
| SEQ ID | | Accession | Protein | Accession |
| NO. | Gene Name | No. | SEQ ID NO. | No. |
| 4472 | Reg IV | NM 032044 | 4471 | NP 114433 |
| 4474 | XAG-2 | NM 006408 | 4473 | NP 006399 |
| 4476 | SPARC/Osteonectin | NM 003118 | 4475 | NP 003109 |
| 4478 | GW112 protein | NM 006418 | 4477 | NP 006409 |
| 4480 | HSBP1 | NM 001540 | 4479 | NP 001531 |
| 4482 | SKD1 Homolog | NP 004869 | 4481 | NP 004860 |
| 4484 | 9-27 | NM 003641 | 4483 | NP 003632 |
| 4486 | Defensin 5 | NM 021010 | 4485 | NP 066290 |
| 4488 | p0071 | NM 003628 | 4487 | NP 003619 |
| 4490 | UBE2I | NM 003345 | 4489 | NP 003336 |
| 4492 | Cytoplasmic dynein | NM 003746 | 4491 | NP 003737 |
| | light chain | | | |
| 4494 | 10Ckshs1 | NM 001798 | 4493 | NP 001789 |

### IX. POLYPEPTIDES OF THE PRESENT INVENTION

[0198] The present invention makes available isolated polypeptides which are isolated from, or otherwise substantially free of other cellular proteins, especially other signal transduction factors and/or trans cription factors which may normally be associated with the polypeptide. Subject polypeptides of the present invention include polypeptides encoded by the nucleic acids of SEQ ID Nos. 1-4470, 4472, 4474, 4476, 4478, 4480, 4482, 4484, 4486, 4488, 4490, 4492, and 4494, preferably SEQ ID Nos. 1-1103, even more preferably SEQ ID Nos. 1-503, and still more preferably SEQ ID Nos. 4472, 4474, 4476, 4478, 4480, 4482, 4484, 4486, 4488, 4490, 4492, and 4494, or a sequence complementary thereto, or polypeptides encoded by genes of which a sequence in SEQ ID Nos. 1-4470, 4472, 4474, 4476, 4478, 4480, 4482, 4484, 4486, 4488, 4490, 4492, and 4494, preferably SEQ ID Nos. 1-1103, even more preferably SEQ ID Nos. 1-503, or a sequence complementary thereto, is a fragment. In a preferred embodiment, polypeptides, useful in the present invention have the amino acid sequence of one or more of SEQ ID Nos. 4471, 4473, 4475, 4477, 4479, 4481, 4483, 4485, 4487, 4489, 4491, and 4493. Polypeptides of the present invention include those proteins which are differentially regulated in tumor cells, especially colon cancer-derived cell lines (relative to normal cells, e.g., normal colon tissue and non-colon tissue). In a preferred embodiment the differentially regulated polypeptides are one or more of the polypeptides having the sequence set forth in SEQ ID Nos. 4471, 4473, 4475, 4477, 4479, 4481, 4483, 4485, 4487, 4489, 4491, and 4493. In preferred embodiments, the polypeptides are upregulated in tumor cells, especially colon cancer cancer-derived cell lines. In other embodiments, the polypeptides are downregulated in tumor cells, especially colon cancer-derived cell lines. Proteins which are upregulated, such as oncogenes, or downregulated, such as tumor suppressors, in aberrantly proliferating cells may be targets for diagnostic or therapeutic techniques. For example, upregulation of the cdc2 gene induces mitosis. Overexpression of the mytl gene, a mitotic deactivator, negatively regulates the activity of cdc2. Aberrant proliferation may thus be induced either by upregulating cdc2 or by downregulating mytl.

[0199] The term “substantially free of other cellular proteins” (also referred to herein as “contaminating proteins”) or “substantially pure or purified preparations” are defined as encompassing preparations of polypeptides having less than about 20% (by dry weight) contaminating protein, and preferably having less than about 5% contaminating protein. Functional forms of the subject polypeptides can be prepared, for the first time, as purified preparations by using a cloned nucleic acid as described herein. Full length proteins or fragments corresponding to one or more particular motifs and/or domains or to arbitrary sizes, for example, at least about 5, 10, 25, 50, 75, or 100 amino acids in length are within the scope of the present invention.

[0200] For example, isolated polypeptides can be encoded by all or a portion of a nucleic acid sequence shown in any of SEQ ID Nos. 1-4470, 4472, 4474, 4476, 4478, 4480, 4482, 4484, 4486, 4488, 4490, 4492, and 4494, preferably SEQ ID Nos. 1-1103, even more preferably SEQ ID Nos. 1-503 and most preferably SEQ ID Nos. 4472, 4474, 4476, 4478, 4480, 4482, 4484, 4486, 4488, 4490, 4492, and 4494, or a sequence complementary thereto. Isolated peptidyl portions of proteins can be obtained by screening peptides recombinantly produced from the corresponding fragment of the nucleic acid encoding such peptides. In addition, fragments can be chemically synthesized using techniques known in the art such as conventional Merrifield solid phase f-Moc or t-Boc chemistry. For example, a polypeptide of the present invention may be arbitrarily divided into fragments of desired length with no overlap of the fragments, or preferably divided into overlapping fragments of a desired length. The fragments can be produced (recombinantly or by chemical synthesis) and tested to identify those peptidyl fragments which can function as either agonists or antagonists of a wild-type (e.g., “authentic”) protein.

[0201] Another aspect of the present invention concerns recombinant forms of the subject proteins. Recombinant polypeptides preferred by the present invention, in addition to native proteins, as described above are encoded by a nucleic acid, which is at least 60%, more preferably at least 80%, and more preferably 85%, and more preferably 90%, and more preferably 95% identical to an amino acid sequence encoded by SEQ ID Nos. 1-4470, 4472, 4474, 4476, 4478, 4480, 4482, 4484, 4486, 4488, 4490, 4492, and 4494. Polypeptides which are encoded by a nucleic acid that is at least about 98-99% identical with the sequence of SEQ ID Nos. 1-4470, 4472, 4474, 4476,4478, 4480, 4482, 4484, 4486, 4488, 4490, 4492, and 4494 are also within the scope of the invention. Also included in the present invention are peptide fragments comprising at least a portion of such a protein.

[0202] In a preferred embodiment, a polypeptide of the present invention is a mammalian polypeptide and even more preferably a human polypeptide. In particularly preferred embodiment, the polypeptide retains wild-type bioactivity. It will be understood that certain post-translational modifications, e.g., phosphorylation and the like, can increase the apparent molecular weight of the polypeptide relative to the unmodified polypeptide chain.

[0203] The present invention further pertains to recombinant forms of one of the subject polypeptides. Such recombinant polypeptides preferably are capable of functioning in one of either role of agonist or antagonist of at least one biological activity of a wild-type (“authentic”) polypeptide of the appended sequence listing. The term “evolutionarily related to”, with respect to amino acid sequences of proteins, refers to both polypeptides having amino acid sequences which have arisen naturally, and also to mutational variants of human polypeptides which are derived, for example, by combinatorial mutagenesis.

[0204] In general, polypeptides referred to herein as having an activity (e.g., are “bioactive”) of a protein are defined as polypeptides which include an amino acid sequence encoded by all or a portion of the nucleic acid sequences shown in one of SEQ ID Nos. 1-4470, 4472, 4474, 4476, 4478, 4480, 4482, 4484, 4486, 4488, 4490, 4492, and 4494, preferably SEQ ID Nos. 1-1103, even more preferably SEQ ID Nos. 1-503, and most preferably SEQ ID Nos. 4471, 4473, 4475, 4477, 4479, 4481, 4483, 4485, 4487, 4489, 4491, and 4493, or a sequence complementary thereto, and which mimic or antagonize all or a portion of the biological/biochemical activities of a naturally occurring protein. According to the present invention, a polypeptide has biological activity if it is a specific agonist or antagonist of a naturally occurring form of a protein.

[0205] Assays for determining whether a compound, e.g, a protein or variant thereof, has one or more of the above biological activities are well known in the art. In certain embodiments, the polypeptides of the present invention have activities such as those outlined above.

[0206] In another embodiment, the coding sequences for the polypeptide can be incorporated as a part of a fusion gene including a nucleotide sequence encoding a different polypeptide. This type of expression system can be useful under conditions where it is desirable to produce an immunogenic fragment of a polypeptide (see, for example, EP Publication No: 0259149; and Evans et al. (1989) Nature 339:3 85; Huang et at. (1988) J. Virol. 62:3 855; and Schlienger et al., (1992) J. Virol. 66:2). In addition to utilizing fusion proteins to enhance immunogenicity, it is widely appreciated that fusion proteins can also facilitate the expression of proteins, and, accordingly, can be used in the expression of the polypeptides of the present invention (see, for example, Current Protocols in Molecular Biology, eds. Ausubel et at. (N.Y. John Wiley & Sons, 1991)). In another embodiment, a fusion gene coding for a purification leader sequence, such as a poly-(His)/enterokinase cleavage site sequence at the N-terminus of the desired portion of the recombinant protein, can allow purification of the expressed fusion protein by affinity chromatography using a Ni²⁺metal resin. The purification leader sequence can then be subsequently removed by treatment with enterokinase to provide the purified protein (e.g., see Hochuli et al. (1987)J. Chromatography 411:177; and Janknecht et al. PNAS 88:8972).

[0207] Techniques for making fusion genes are known to those skilled in the art. Essentially, the joining of various DNA fragments coding for different polypeptide sequences is performed in accordance with conventional techniques, employing blunt-ended or stagger-ended termini for ligation, restriction enzyme digestion to provide for appropriate termini, filling-in of cohesive ends as appropriate, alkaline phosphatase treatment to avoid undesirable joining, and enzymatic ligation. In another embodiment, the fusion gene can be synthesized by conventional techniques including automated DNA synthesizers. Alternatively, PCR amplification of nucleic acid fragments can be carried out using anchor primers which give rise to complementary overhangs between two consecutive nucleic acid fragments which can subsequently be annealed to generate a chimeric nucleic acid sequence (see, for example, Current Protocols in Molecular Biology, eds. Ausubel et al. John Wiley & Sons: 1992).

[0208] The present invention further pertains to methods of producing the subject polypeptides. For example, a host cell transfected with a nucleic acid vector directing expression of a nucleotide sequence encoding the subject polypeptides can be cultured under appropriate conditions to allow expression of the peptide to occur. Suitable media for cell culture are well known in the art. The recombinant polypeptide can be isolated from cell culture medium, host cells, or both using techniques known in the art for purifying proteins including ion-exchange chromatography, gel filtration chromatography, ultrafiltration, electrophoresis, and immunoaffinity purification with antibodies specific for such peptide. In a preferred embodiment, the recombinant polypeptide is a fusion protein containing a domain which facilitates its purification, such as GST fusion protein.

[0209] Moreover, it will be generally appreciated that, under certain circumstances, it may be advantageous to provide homologs of one of the subject polypeptides which function in a limited capacity as one of either an agonist (mimetic) or an antagonist, in order to promote or inhibit only a subset of the biological activities of the naturally occurring form of the protein. Thus, specific biological effects can be elicited by treatment with a homolog of limited function, and with fewer side effects relative to treatment with agonists or antagonists which are directed to all of the biological activities of naturally occurring forms of subject proteins.

[0210] Homologs of each of the subject polypeptide can be generated by mutagenesis, such as by discrete point mutation(s), or by truncation. For instance, mutation can give rise to homologs which retain substantially the same, or merely a subset, of the biological activity of the polypeptide from which it was derived. Alternatively, antagonistic forms of the polypeptide can be generated which are able to inhibit the function of the naturally occurring form of the protein, such as by competitively binding to a receptor.

[0211] The recombinant polypeptides of the present invention also include homologs of the wild-type proteins, such as versions of those proteins which are resistant to proteolytic cleavage, for example, due to mutations which alter ubiquitination or other enzymatic targeting associated with the protein.

[0212] Polypeptides may also be chemically modified to create derivatives by forming covalent or aggregate conjugates with other chemical moieties, such as glycosyl groups, lipids, phosphate, acetyl groups and the like. Covalent derivatives of proteins can be prepared by linking the chemical moieties to functional groups on amino acid sidechains of the protein or at the N-terminus or at the C-terminus of the polypeptide.

[0213] Modification of the structure of the subject polypeptides can be for such purposes as enhancing therapeutic or prophylactic efficacy, stability (e.g., ex vivo shelf life and resistance to proteolytic degradation), or post-translational modifications (e.g., to alter phosphorylation pattern of protein). Such modified peptides, when designed to retain at least one activity of the naturally occurring form of the protein, or to produce specific antagonists thereof, are considered functional equivalents of the polypeptides described in more detail herein. Such modified peptides can be produced, for instance, by amino acid substitution, deletion, or addition. The substitutional variant may be a substituted conserved amino acid or a substituted non-conserved amino acid.

[0214] For example, it is reasonable to expect that an isolated replacement of a leucine with an isoleucine or valine, an aspartate with a glutamate, a threonine with a serine, or a similar replacement of an amino acid with a structurally related amino acid (i.e., isosteric and/or isoelectric mutations) will not have a major effect on the biological activity of the resulting molecule. Conservative replacements are those that take place within a family of amino acids that are related in their side chains. Genetically encoded amino acids can be divided into four families: (1) acidic=aspartate, glutamate; (2) basic=lysine, arginine, histidine; (3) nonpolar alanine, valine, leucine, isoleucine, proline, phenylalanine, methionine, tryptophan; and (4) uncharged polar=glycine, asparagine, glutamine, cysteine, serine, threonine, tyrosine. In similar fashion, the amino acid repertoire can be grouped as (1) acidic=aspartate, glutamate; (2) basic=lysine, arginine histidine, (3) aliphatic=glycine, alanine, valine, leucine, isoleucine, serine, threonine, with serine and threonine optionally be grouped separately as aliphatic-hydroxyl; (4) aromatic=phenylalanine, tyrosine, tiyptophan; (5) amide=asparagine, glutamine; and (6) sulfur -containing=cysteine and methionine. (see, for example, Biochemistry, 2 ed., Ed. by L. Stryer, WH Freeman and Co.: 1981). Whether a change in the amino acid sequence of a peptide results in a functional homolog (e.g., finctional in the sense that the resulting polypeptide mimics or antagonizes the wild-type form) can be readily determined by assessing the ability of the variant peptide to produce a response in cells in a fashion similar to the wild-type protein, or competitively inhibit such a response.

[0215] Polypeptides in which more than one replacement has taken place can readily be tested in the same manner. The variant may be designed so as to retain biological activity of a particular region of the protein. In a non-limiting example, Osawa et al., 1994, Biochemistry and Molecular International 34:1003-1009, discusses the actin binding region of a protein from several different species. The actin binding regions of the these species are considered homologous based on the fact that they have amino acids that fall within “homologous residue groups.” Homologous residues are judged according to the following groups (using single letter amino acid designations): STAG; ILVMF; HRK; DEQN; and FYW. For example, an S, a T, an A or a G can be in a position and the function (in this case actin binding) is retained.

[0216] Additional guidance on amino acid substitution is available from studies of protein evolution. Go et al., 1980, Int. J. Peptide Protein Res. 15: 211-224, classified amino acid residue sites as interior or exterior depending on their accessibility. More frequent substitution on exterior sites was confirmed to be general in eight sets of homologous protein families regardless of their biological functions and the presence or absence of a prosthetic group. Virtually all types of amino acid residues had higher mutabilities on the exterior than in the interior. No correlation between mutability and polarity was observed of amino acid residues in the interior and exterior, respectively. Amino acid residues were classified into one of three groups depending on their polarity: polar (Arg, Lys, His, Gln, Asn, Asp, and Glu); weak polar (Ala, Pro, Gly, Thr, and Ser), and nonpolar (Cys, Val, Met, Ile, Leu, Phe, Tyr, and Trp). Amino acid replacements during protein evolution were very conservative: 88% and 76% of them in the interior or exterior, respectively, were within the same group of the three. Intergroup replacements are such that weak polar residues are replaced more often by nonpolar residues in the interior and more often by polar residues on the exterior.

[0217] Querol et al., 1996, Prot. Eng. 9:265-271, provides general rules for amino acid substitutions to enhance protein thermostability. New glycosylation sites can be introduced as discussed in Olsen and Thomsen, 1991, J. Gen. Microbiol. 137 :579-585. An additional disulfide bridge can be introduced, as discussed by Perry and Wetzel, 1984, Science 226:555-557; Pantoliano et al., 1987, Biochemistry 26:2077-2082; Matsumura et al., 1989, Nature 342:291-293; Nishikawa et al., 1990, Protein Eng. 3:443-448; Takagi et al., 1990, J. Biol. Chem, 265:6874-6878; Clarke et al., 1993, Biochemistry 32:4322-43299; and Wakarchuk et al., 1994, Protein Eng. 7:1379-1386.

[0218] An additional metal binding site can be introduced, according to Toma et al., 1991, Biochemistry 30:97-106, and Haezerbrouck et al., 1993, Protein Eng. 6:643-649. Substitutions with prolines in loops can be made according to Masul et al., 1994, Appl Env. Microbiol. 60:3579-3584; and Hardy et al., FEBS Lett. 317:89-92.

[0219] Cysteine-depleted muteins are considered variants within the scope of the invention. These variants can be constructed according to methods disclosed in U.S. Pat. No. 4,959,314, which discloses how to substitute other amino acids for cysteines, and how to determine biological activity and effect of the substitution. Such methods are suitable for proteins according to this invention that have cysteine residues suitable for such substitutions, for example to eliminate disulfide bond formation.

[0220] To learn the identity and function of the gene that correlates with an nucleic acid, the nucleic acids or corresponding amino acid sequences can be screened against profiles of protein families. Such profiles focus on common structural motifs among proteins of each family. Publicly available profiles are described above.

[0221] In comparing a new nucleic acid with known sequences, several alignment tools are available. Examples include PileUp, which creates a multiple sequence alignment, and is described in Feng et al., J. Mol. Evol. (1987) 25:35 1-360. Another method, GAP, uses the alignment method of Needleman et al., J. Mol. Biol. (1970) 48:443-453. GAP is best suited for global alignment of sequences. A third method, BestFit, functions by inserting gaps to maximize the number of matches using the local homology algorithm of Smith and Waterman, Adv. Appl. Math. (1981) 2:482-489.

### X. DIAGNOSTIC & PROGNOSTIC ASSAYS AND DRUG SCREENING METHODS

[0222] The present invention provides method for determining whether a subject is at risk for developing a disease or condition characterized by unwanted cell proliferation by detecting the disclosed biomarkers, i.e., the present nucleic acids (SEQ ID Nos: 1-4494) and/or polypeptide markers (preferably SEQ ID Nos. 4471, 4473, 4475, 4477, 4479, 4481, 4483, 4485, 4487, 4489, 4491, and 4493) for colon cancer encoded thereby.

[0223] In clinical applications, human tissue samples can be screened for the presence and/or absence of the biomarkers identified herein. Such samples could consist of needle biopsy cores, surgical resection samples, lymph node tissue, or serum. For example, these methods include obtaining a biopsy, which is optionally fractionated by cryostat sectioning to enrich tumor cells to about 80% of the total cell population. In certain embodiments, nucleic acids extracted from these samples may be amplified using techniques well known in the art. The levels of selected markers detected would be compared with statistically valid groups of metastatic, non-metastatic malignant, benign, or normal colon tissue samples.

[0224] In one embodiment, the diagnostic method comprises determining whether a subject has an abnormal mRNA and/or protein level of the disclosed markers, such as by Northern blot analysis, reverse transcription-polymerase chain reaction (RT-PCR), in situ hybridization, immunoprecipitation, Western blot hybridization, or immunohistochemistry. According to the method, cells are obtained from a subject and the levels of the disclosed biomarkers, protein or mRNA level, is determined and compared to the level of these markers in a healthy subject. An abnormal level of the biomarker polypeptide or mRNA levels is likely to be indicative of cancer such as colon cancer.

[0225] Accordingly, in one aspect, the invention provides probes and primers that are specific to the unique nucleic acid markers disclosed herein. Accordingly, the nucleic acid probes comprise a nucleotide sequence at least 10 nucleotides in length, preferably at least 15 nucleotides, more preferably, 25 nucleotides, and most preferably at least 40 nucleotides, and up to all or nearly all of the coding sequence which is complementary to a portion of the coding sequence of a marker nucleic acid sequence, which nucleic acid sequence is represented by SEQ ID Nos: 1-4494 or a sequence complementary thereto.

[0226] In one embodiment, the method comprises using a nucleic acid probe to determine the presence of cancerous cells in a tissue from a patient. Specifically, the method comprises:

[0227] 1. providing a nucleic acid probe comprising a nucleotide sequence at least 10 nucleotides in length, preferably at least 15 nucleotides, more preferably, 25 nucleotides, and most preferably at least 40 nucleotides, and up to all or nearly all of the coding sequence which is complementary to a portion of the coding sequence of a nucleic acid sequence represented by SEQ ID Nos: 1-4494 or a sequence complementary thereto and is differentially expressed in tumors cells, such as colon cancer cells;

[0228] 2. obtaining a tissue sample from a patient potentially comprising cancerous cells;

[0229] 3. providing a second tissue sample containing cells substantially all of which are non-cancerous;

[0230] 4. contacting the nucleic acid probe under stringent conditions with RNA of each of said first and second tissue samples (e.g., in a Northern blot or in situ hybridization assay); and

[0231] 5 . comparing (a) the amount of hybridization of the probe with RNA of the first tissue sample, with (b) the amount of hybridization of the probe with RNA of the second tissue sample; wherein a statistically significant difference in the amount of hybridization with the RNA of the first tissue sample as compared to the amount of hybridization with the RNA of the second tissue sample is indicative of the presence of cancerous cells in the first tissue sample.

[0232] In one aspect, the method comprises in situ hybridization with a probe derived from a given marker nucleic acid sequence, which nucleic acid sequence is represented by SEQ ID Nos: 1-4494 or a sequence complementary thereto. The method comprises contacting the labeled hybridization probe with a sample of a given type of tissue potentially containing cancerous or pre-cancerous cells as well as normal cells, and determining whether the probe labels some cells of the given tissue type to a degree significantly different (e.g., by at least a factor of two, or at least a factor of five, or at least a factor of twenty, or at least a factor of fifty) than the degree to which it labels other cells of the same tissue type.

[0233] Also within the invention is a method of determining the phenotype of a test cell from a given human tissue, e.g., whether the cell is (a) normal, or (b) cancerous or precancerous, by contacting the mRNA of a test cell with a nucleic acid probe at least 12 nucleotides in length, preferably at least 15 nucleotides, more preferably at least 25 nucleotides, and most preferably at least 40 nucleotides, and up to all or nearly all of a sequence which is complementary to a portion of the coding sequence of a nucleic acid sequence represented by SEQ ID Nos: 1-4494 or a sequence complementary thereto, and which is differentially expressed in tumor cells as compared to normal cells of the given tissue type; and determining the approximate amount of hybridization of the probe to the mRNA, an amount of hybridization either more or less than that seen with the MRNA of a normal cell of that tissue type being indicative that the test cell is cancerous or pre-cancerous.

[0234] Alternatively, the above diagnostic assays may be carried out using antibodies to detect the protein product encoded by the marker nucleic acid sequence, which nucleic acid sequence is represented by SEQ ID Nos: 1-4494 or a sequence complementary thereto. Accordingly, in one embodiment, the assay would include contacting the proteins of the test cell with an antibody specific for the gene product of a nucleic acid represented by SEQ ID Nos: 1-4494, preferably SEQ ID Nos. 4472, 4474, 4476, 4478, 4480, 4482, 4484, 4486, 4488, 4490, 4492, and 4494, or a sequence complementary thereto, the marker nucleic acid being one which is expressed at a given control level in normal cells of the same tissue type as the test cell, and determining the approximate amount of immunocomplex formation by the antibody and the proteins of the test cell, wherein a statistically significant difference in the amount of the immunocomplex formed with the proteins of a test cell as compared to a normal cell of the same tissue type is an indication that the test cell is cancerous or pre-cancerous. Preferably, the antibody is specific for one of SEQ ID Nos. 4471, 4473, 4475, 4477, 4479, 4481, 4483, 4485, 4487, 4489, 4491, and 4493.

[0235] The method for producing polyclonal and/or monoclonal antibodies which specifically bind to polypeptides useful in the present invention is known to those of skill in the art and can be found in, for example Dymecki et al., 1992, J. Biol. Chem., 267:4815; Boersma & Van Leeuwen, 1994, J. Neurosci. Methods, 51:317; Green et al., 1982, Cell, 28:477; and Arnheiter et al., 1981, Nature, 294:278.

[0236] Another such method includes the steps of: providing an antibody specific for the gene product of a marker nucleic acid sequence represented by SEQ ID Nos 1-4494, the gene product being present in cancerous tissue of a given tissue type (e.g., colon tissue) at a level more or less than the level of the gene product in non-cancerous tissue of the same tissue type; obtaining from a patient a first sample of tissue of the given tissue type, which sample potentially includes cancerous cells; providing a second sample of tissue of the same tissue type (which may be from the same patient or from a normal control, e.g. another individual or cultured cells), this second sample containing normal cells and essentially no cancerous cells; contacting the antibody with protein (which may be partially purified, in lysed but unfractionated cells, or in situ) of the first and second samples under conditions permitting immunocomplex formation between the antibody and the marker nucleic acid sequence product present in the samples; and comparing (a) the amount of immunocomplex formation in the first sample, with (b) the amount of immunocomplex formation in the second sample, wherein a statistically significant difference in the amount of immunocomplex formation in the first sample less as compared to the amount of immunocomplex formation in the second sample is indicative of the presence of cancerous cells in the first sample of tissue.

[0237] The subject invention further provides a method of determining whether a cell sample obtained from a subject possesses an abnormal amount of marker polypeptide which comprises (a) obtaining a cell sample from the subject, (b) quantitatively determining the amount of the marker polypeptide in the sample so obtained, and (c) comparing the amount of the marker polypeptide so determined with a known standard, so as to thereby determine whether the cell sample obtained from the subject possesses an abnormal amount of the marker polypeptide. Such marker polypeptides may be detected by immunohistochemical assays, dot-blot assays, ELISA and the like.

[0238] Immunoassays are commonly used to quantitate the levels of proteins in cell samples, and many other immunoassay techniques are known in the art. The invention is not limited to a particular assay procedure, and therefore is intended to include both homogeneous and heterogeneous procedures. Exemplary immunoassays which can be conducted according to the invention include fluorescence polarization immunoassay (FPIA), fluorescence immunoassay (FIA), enzyme immunoassay (EIA), nephelometric inhibition immunoassay (NIA), enzyme linked immunosorbent assay (ELISA), and radioimmunoassay (RIA). An indicator moiety, or label group, can be attached to the subject antibodies and is selected so as to meet the needs of various uses of the method which are often dictated by the availability of assay equipment and compatible immunoassay procedures. General techniques to be used in performing the various immunoassays noted above are known to those of ordinary skill in the art.

[0239] In another embodiment, the level of the encoded product, i.e., the product encoded by SEQ ID Nos 1-4494 or a sequence complementary thereto, or alternatively the level of the polypeptide of SEQ ID Nos. 4471, 4473, 4475, 4477, 4479, 4481, 4483, 4485, 4487, 4489, 4491, and 4493, in a biological fluid (e.g., blood or urine) of a patient may be determined as a way of monitoring the level of expression of the marker nucleic acid sequence in cells of that patient. Such a method would include the steps of obtaining a sample of a biological fluid from the patient, contacting the sample (or proteins from the sample) with an antibody specific for a encoded marker polypeptide, and determining the amount of immune complex formation by the antibody, with the amount of immune complex formation being indicative of the level of the marker encoded product in the sample. This determination is particularly instructive when compared to the amount of immune complex formation by the same antibody in a control sample taken from a normal individual or in one or more samples previously or subsequently obtained from the same person.

[0240] In another embodiment, the method can be used to determine the amount of marker polypeptide present in a cell, which in turn can be correlated with progression of a hyperproliferative disorder, e.g., colon cancer. The level of the marker polypeptide can be used predictively to evaluate whether a sample of cells contains cells which are, or are predisposed towards becoming, transformed cells. Moreover, the subject method can be used to assess the phenotype of cells which are known to be transformed, the phenotyping results being useful in planning a particular therapeutic regimen. For instance, very high levels of the marker polypeptide in sample cells is a powerful diagnostic and prognostic marker for a cancer, such as colon cancer. The observation of marker polypeptide level can be utilized in decisions regarding, e.g., the use of more aggressive therapies.

[0241] As set out above, one aspect of the present invention relates to diagnostic assays for determining, in the context of cells isolated from a patient, if the level of a marker polypeptide is significantly reduced in the sample cells. The term “significantly reduced” refers to a cell phenotype wherein the cell possesses a reduced cellular amount of the marker polypeptide relative to a normal cell of similar tissue origin. For example, a cell may have less than about 50%, 25%, 10%, or 5% of the marker polypeptide that a normal control cell. In particular, the assay evaluates the level of marker polypeptide in the test cells, and, preferably, compares the measured level with marker polypeptide detected in at least one control cell, e.g., a normal cell and/or a transformed cell of known phenotype.

[0242] Of particular importance to the subject invention is the ability to quantitate the level of marker polypeptide as determined by the number of cells associated with a normal or abnormal marker polypeptide level. The number of cells with a particular marker polypeptide phenotype may then be correlated with patient prognosis. In one embodiment of the invention, the marker polypeptide phenotype of the lesion is determined as a percentage of cells in a biopsy which are found to have abnormally high/low levels of the marker polypeptide. Such expression may be detected by immunohistochemical assays, dot-blot assays, ELISA and the like.

[0243] Where tissue samples are employed, immunohistochemical staining may be used to determine the number of cells having the marker polypeptide phenotype. For such staining, a multiblock of tissue is taken from the biopsy or other tissue sample and subjected to proteolytic hydrolysis, employing such agents as protease K or pepsin. In certain embodiments, it may be desirable to isolate a nuclear fraction from the sample cells and detect the level of the marker polypeptide in the nuclear fraction.

[0244] The tissue samples are fixed by treatment with a reagent such as formalin, glutaraldehyde, methanol, or the like. The samples are then incubated with an antibody, preferably a monoclonal antibody, with binding specificity for the marker polypeptides. This antibody may be conjugated to a label for subsequent detection of binding. Samples are incubated for a time sufficient for formation of the immunocomplexes. Binding of the antibody is then detected by virtue of a label conjugated to this antibody. Where the antibody is unlabeled, a second labeled antibody may be employed, e.g., which is specific for the isotype of the anti-marker polypeptide antibody. Examples of labels which may be employed include radionuclides, fluorescers, chemiluminescers, enzymes and the like.

[0245] Where enzymes are employed, the substrate for the enzyme may be added to the samples to provide a colored or fluorescent product. Examples of suitable enzymes for use in conjugates include horseradish peroxidase, alkaline phosphatase, malate dehydrogenase and the like. Where not commercially available, such antibody-enzyme conjugates are readily produced by techniques known to those skilled in the art.

[0246] In one embodiment, the assay is performed as a dot blot assay. The dot blot assay finds particular application where tissue samples are employed as it allows determination of the average amount of the marker polypeptide associated with a single cell by correlating the amount of marker polypeptide in a cell-free extract produced from a predetermined number of cells.

[0247] It is well established in the cancer literature that tumor cells of the same type (e.g., breast and/or colon tumor cells) may not show uniformly increased expression of individual oncogenes or uniformly decreased expression of individual tumor suppressor genes. There may also be varying levels of expression of a given marker gene even between cells of a given type of cancer, further emphasizing the need for reliance on a battery of tests rather than a single test. Accordingly, in one aspect, the invention provides for a battery of tests utilizing a number of probes of the invention, in order to improve the reliability and/or accuracy of the diagnostic test.

[0248] In one embodiment, the present invention also provides a method wherein nucleic acid probes are immobilized on a DNA chip in an organized array. Oligonucleotides can be bound to a solid support by a variety of processes, including lithography. For example a chip can hold up to 250,000 oligonucleotides (GeneChip, Affymetrix). These nucleic acid probes comprise a nucleotide sequence at least about 12 nucleotides in length, preferably at least about 15 nucleotides, more preferably at least about 25 nucleotides, and most preferably at least about 40 nucleotides, and up to all or nearly all of a sequence which is complementary to a portion of the coding sequence of a marker nucleic acid sequence represented by SEQ ID Nos: 1-4494 and is differentially expressed in tumor cells, such as colon cancer cells. The present invention provides significant advantages over the available tests for various cancers, such as colon cancer, because it increases the reliability of the test by providing an array of nucleic acid markers on a single chip.

[0249] The method includes obtaining a biopsy, which is optionally fractionated by cryostat sectioning to enrich tumor cells to about 80% of the total cell population. The DNA or RNA is then extracted, amplified, and analyzed with a DNA chip to determine the presence of absence of the marker nucleic acid sequences.

[0250] In one embodiment, the nucleic acid probes are spotted onto a substrate in a two-dimensional matrix or array. Samples of nucleic acids can be labeled and then hybridized to the probes. Double-stranded nucleic acids, comprising the labeled sample nucleic acids bound to probe nucleic acids, can be detected once the unbound portion of the sample is washed away.

[0251] The probe nucleic acids can be spotted on substrates including glass, nitrocellulose, etc. The probes can be bound to the substrate by either covalent bonds or by non-specific interactions, such as hydrophobic interactions. The sample nucleic acids can be labeled using radioactive labels, fluorophores, chromophores, etc.

[0252] Techniques for constructing arrays and methods of using these arrays are described, for example, in EP No. 0 799 897; PCT No. WO 97/292 12; PCT No. WO 97127317; EP No. 0 785 280; PCT No. WO 97/02357; U.S. Pat. No. 5,593,839; U.S. Pat. No. 5,578,832; EP No. 0 728 520; U.S. Pat. No. 5,599,695; EP No. 0 721 016; U.S. Pat. No. 5,556,752; PCT No. WO 95/22058; and U.S. Pat. No. 5,631,734.

[0253] Further, arrays can be used to examine differential expression of genes and can be used to determine gene function. For example, arrays of the instant nucleic acid sequences can be used to determine if any of the nucleic acid sequences are differentially expressed between normal cells and cancer cells, for example. High expression of a particular message in a cancer cell, which is not observed in a corresponding normal cell, can indicate a cancer specific protein.

[0254] In one embodiment nucleic acid molecules useful in the present invention, such as those of SEQ ID Nos 1-4494, preferably those of SEQ ID Nos 4472, 4474, 4476, 4478, 4480, 4482, 4484, 4486, 4488, 4490, 4492, and 4494, may be used to generate macroarrays on a solid surface such as a membrane such that the arrayed nucleic acid molecules can be used to determine if any of the nucleic acids are differentially expressed between normal cells or tissue and cancerous cells or tissue. In one embodiment, the nucleic acid molecules of the invention are either cDNA or may be used to generate cDNA molecules to be subsequently amplified by PCR and spotted on nylon membranes. The membranes are then reacted with radiolabeled target nucleic acid molecules obtained from equivalent samples of cancerous and normal tissue or cells. Methods of cDNA generation and macroarray preparation are known to those of skill in the art and may be found, for example in Bertucci et al., 1999 Hum. Mol. Genet. 8:2129; Nguyen et al., 1995, Genomics, 29: 207; Zhao et al., Gene, 156:207; Gress et al., 1992, Mammalian Genome, 3:609; Zhumabayeva et al., 2001, Biotechniques, 30:158; and Lennon et al., 1991, Trends Genet. 7:314.

[0255] In yet another embodiment, the invention contemplates using a panel of antibodies which are generated against the marker polypeptides of this invention, which polypeptides are encoded by one or more of SEQ ID Nos: 1-4494, preferably SEQ ID Nos. 4472, 4474, 4476, 4478, 4480, 4482, 4484, 4486, 4488, 4490, 4492, and 4494. Preferably, the antibodies are generated against one or more polypeptides having the sequence of SEQ ID Nos. 4471, 4473, 4475, 4477, 4479, 4481, 4483, 4485, 4487, 4489, 4491, and 4493. Such a panel of antibodies may be used as a reliable diagnostic probe for colon cancer. The assay of the present invention comprises contacting a biopsy sample containing cells, e.g., colon cells, with a panel of antibodies to one or more of the encoded products to determine the presence or absence of the marker polypeptides.

[0256] The diagnostic methods of the subject invention may also be employed as follow-up to treatment, e.g., quantitation of the level of marker polypeptides may be indicative of the effectiveness of current or previously employed cancer therapies as well as the effect of these therapies upon patient prognosis.

[0257] Accordingly, the present invention makes available diagnostic assays and reagents for detecting gain and/or loss of marker polypeptides from a cell in order to aid in the diagnosis and phenotyping of proliferative disorders arising from, for example, tumorigenic transformation of cells.

[0258] The diagnostic assays described above can be adapted to be used as prognostic assays, as well. Such an application takes advantage of the sensitivity of the assays of the invention to events which take place at characteristic stages in the progression of a tumor. For example, a given marker gene may be up- or downregulated at a very early stage, perhaps before the cell is irreversibly committed to developing into a malignancy, while another marker gene may be characteristically up or down regulated only at a much later stage. Such a method could involve the steps of contacting the mRNA of a test cell with a nucleic acid probe derived from a given marker nucleic acid which is expressed at different characteristic levels in cancerous or precancerous cells at different stages of tumor progression, and determining the approximate amount of hybridization of the probe to the mRNA of the cell, such amount being an indication of the level of expression of the gene in the cell, and thus an indication of the stage of tumor progression of the cell; alternatively, the assay can be carried out with an antibody specific for the gene product of the given marker nucleic acid, contacted with the proteins of the test cell. A battery of such tests will disclose not only the existence and location of a tumor, but also will allow the clinician to select the mode of treatment most appropriate for the tumor, and to predict the likelihood of success of that treatment.

[0259] The methods of the invention can also be used to follow the clinical course of a tumor. For example, the assay of the invention can be applied to a tissue sample from a patient; following treatment of the patient for the cancer, another tissue sample is taken and the test repeated. Successful treatment will result in either removal of all cells which demonstrate differential expression characteristic of the cancerous or precancerous cells, or a substantial increase in expression of the gene in those cells, perhaps approaching or even surpassing normal levels.

[0260] In yet another embodiment, the invention provides methods for determining whether a subject is at risk for developing a disease, such as a predisposition to develop cancer, for example colon cancer, associated with an aberrant activity of any one of the polypeptides encoded by nucleic acids of SEQ ID Nos: 1-4494, preferably, any one of the polypeptides of SEQ ID Nos. 4471, 4473, 4475, 4477, 4479, 4481, 4483, 4485, 4487, 4489, 4491, and 4493, wherein the aberrant activity of the polypeptide is characterized by detecting the presence or absence of a genetic lesion characterized by at least one of (i) an alteration affecting the integrity of a gene encoding a marker polypeptides, or (ii) the mis-expression of the encoding nucleic acid. To illustrate, such genetic lesions can be detected by ascertaining the existence of at least one of(i) a deletion of one or more nucleotides from the nucleic acid sequence, (ii) an addition of one or more nucleotides to the nucleic acid sequence, (iii) a substitution of one or more nucleotides of the nucleic acid sequence, (iv) a gross chromosomal rearrangement of the nucleic acid sequence, (v) a gross alteration in the level of a messenger RNA transcript of the nucleic acid sequence, (vii) aberrant modification of the nucleic acid sequence, such as of the methylation pattern of the genomic DNA, (vii) the presence of a non-wild type splicing pattern of a messenger RNA transcript of the gene, (viii) a non-wild type level of the marker polypeptide, (ix) allelic loss of the gene, and/or (x) inappropriate post-translational modification of the marker polypeptide.

[0261] The present invention provides assay techniques for detecting lesions in the encoding nucleic acid sequence. These methods include, but are not limited to, methods involving sequence analysis, Southern blot hybridization, restriction enzyme site mapping, and methods involving detection of absence of nucleotide pairing between the nucleic acid to be analyzed and a probe.

[0262] Specific diseases or disorders, e.g., genetic diseases or disorders, are associated with specific allelic variants of polymorphic regions of certain genes, which do not necessarily encode a mutated protein. Thus, the presence of a specific allelic variant of a polymorphic region of a gene in a subject can render the subject susceptible to developing a specific disease or disorder. Polymorphic regions in genes, can be identified, by determining the nucleotide sequence of genes in populations of individuals. If a polymorphic region is identified, then the link with a specific disease can be determined by studying specific populations of individuals, e.g, individuals which developed a specific disease, such as colon cancer. A polymorphic region can be located in any region of a gene, e.g., exons, in coding or non coding regions of exons, introns, and promoter region.

[0263] In an exemplary embodiment, there is provided a nucleic acid composition comprising a nucleic acid probe including a region of nucleotide sequence which is capable of hybridizing to a sense or antisense sequence of a gene or naturally occurring mutants thereof, or 5′ or 3′ flanking sequences or intronic sequences naturally associated with the subject genes or naturally occurring mutants thereof. The nucleic acid of a cell is rendered accessible for hybridization, the probe is contacted with the nucleic acid of the sample, and the hybridization of the probe to the sample nucleic acid is detected. Such techniques can be used to detect lesions or allelic variants at either the genomic or mRNA level, including deletions, substitutions, etc., as well as to determine mRNA transcript levels.

[0264] A preferred detection method is allele specific hybridization using probes overlapping the mutation or polymorphic site and having about 5, 10, 20, 25, or 30 nucleotides around the mutation or polymorphic region. In a preferred embodiment of the invention, several probes capable of hybridizing specifically to allelic variants are attached to a solid phase support, e.g., a “chip”. Mutation detection analysis using these chips comprising oligonucleotides, also termed “DNA probe arrays” is described e.g., in Cronin et al. (1996) Human Mutation 7:244. In one embodiment, a chip comprises all the allelic variants of at least one polymorphic region of a gene. The solid phase support is then contacted with a test nucleic acid and hybridization to the specific probes is detected. Accordingly, the identity of numerous allelic variants of one or more genes can be identified in a simple hybridization experiment.

[0265] In certain embodiments, detection of the lesion comprises utilizing the probe/primer in a polymerase chain reaction (PCR) (see, e.g. U.S. Pat. Nos. 4,683,195 and 4,683,202), such as anchor PCR or RACE PCR, or, alternatively, in a ligase chain reaction (LCR) (see, e.g., Landegran et al. (1988) Science 241:1077-1080; and Nakazawa et al (1994) PNAS 91:360-364), the latter of which can be particularly useful for detecting point mutations in the gene (sec Abravaya et al. (1995) Nuc Acid Res 23:675-682). In a merely illustrative embodiment, the method includes the steps of (i) collecting a sample of cells from a patient, (ii) isolating nucleic acid (e.g., genomic, mRNA or both) from the cells of the sample, (iii) contacting the nucleic acid sample with one or more primers which specifically hybridize to a nucleic acid sequence under conditions such that hybridization and amplification of the nucleic acid (if present) occurs, and (iv) detecting the presence or absence of an amplification product, or detecting the size of the amplification product and comparing the length to a control sample. It is anticipated that PCR and/or LCR may be desirable to use as a preliminary amplification step in conjunction with any of the techniques used for detecting mutations described herein.

[0266] Alternative amplification methods include: self sustained sequence replication (Guatelli, J. C. et al., 1990, Proc. Natl. Acad. Sci. USA 87:1874-1878), transcriptional amplification system (Kwoh, D. Y. et al., 1989, Proc. Natl. Acad. Sci. USA 86:1173-1177), Q-Beta Replicase (Lizardi, P. M. et al., 1988, Bio/Technology 6:1197), or any other nucleic acid amplification method, followed by the detection of the amplified molecules using techniques well known to those of skill in the art. These detection schemes are especially useful for the detection of nucleic acid molecules if such molecules are present in very low numbers.

[0267] In a preferred embodiment of the subject assay, mutations in, or allelic variants, of a gene from a sample cell are identified by alterations in restriction enzyme cleavage patterns. For example, sample and control DNA is isolated, amplified (optionally), digested with one or more restriction endonucleases, and fragment length sizes are determined by gel electrophoresis. Moreover, the use of sequence specific ribozymes (see, for example, U.S. Pat. No. 5,498,531) can be used to score for the presence of specific mutations by development or loss of a ribozyme cleavage site.

[0268] Another aspect of the invention is directed to the identification of agents capable of modulating the differentiation and proliferation of cells characterized by aberrant proliferation. In this regard, the invention provides assays for determining compounds that modulate the expression of the marker nucleic acids (SEQ ID Nos: 1-4494, preferably SEQ ID Nos 4472, 4474, 4476, 4478, 4480, 4482, 4484, 4486, 4488, 4490, 4492, and 4494) and/or alter for example, inhibit the bioactivity of the encoded polypeptide such as those of SEQ ID Nos. 4471, 4473, 4475, 4477, 4479, 4481, 4483, 4485, 4487, 4489, 4491, and 4493.

[0269] Several in vivo methods can be used to identify compounds that modulate expression of the marker nucleic acids (SEQ ID Nos: 1-4494) and/or alter for example, inhibit the bioactivity of the encoded polypeptide.

[0270] Drug screening is performed by adding a test compound to a sample of cells, and monitoring the effect. A parallel sample which does not receive the test compound is also monitored as a control. The treated and untreated cells are then compared by any suitable phenotypic criteria, including but not limited to microscopic analysis, viability testing, ability to replicate, histological examination, the level of a particular RNA or polypeptide associated with the cells, the level of enzymatic activity expressed by the cells or cell lysates, and the ability of the cells to interact with other cells or compounds. Differences between treated and untreated cells indicates effects attributable to the test compound.

[0271] Desirable effects of a test compound include an effect on any phenotype that was conferred by the cancer-associated marker nucleic acid sequence. Examples include a test compound that limits the overabundance of mRNA, limits production of the encoded protein, or limits the functional effect of the protein. The effect of the test compound would be apparent when comparing results between treated and untreated cells.

[0272] The invention thus also encompasses methods of screening for agents which inhibit expression of the nucleic acid markers (SEQ ID Nos: 1-4494, preferably SEQ ID Nos. 4472, 4474, 4476, 4478, 4480, 4482, 4484, 4486, 4488, 4490, 4492, and 4494) in vitro, comprising exposing a cell or tissue in which the marker nucleic acid mRNA is detectable in cultured cells to an agent in order to determine whether the agent is capable of inhibiting production of the mRNA; and determining the level of MRNA in the exposed cells or tissue, wherein a decrease in the level of the mRNA after exposure of the cell line to the agent is indicative of inhibition of the marker nucleic acid mRNA production.

[0273] Alternatively, the screening method may include in vitro screening of a cell or tissue in which marker protein is detectable in cultured cells to an agent suspected of inhibiting production of the marker protein; and determining the level of the marker protein in the cells or tissue, wherein a decrease in the level of marker protein after exposure of the cells or tissue to the agent is indicative of inhibition of marker protein production.

[0274] The invention also encompasses in vivo methods of screening for agents which inhibit expression of the marker nucleic acids, comprising exposing a mammal having tumor cells in which marker mRNA or protein is detectable to an agent suspected of inhibiting production of marker mRNA or protein; and determining the level of marker mRNA or protein in tumor cells of the exposed mammal. A decrease in the level of marker mRNA or protein after exposure of the mammal to the agent is indicative of inhibition of marker nucleic acid expression.

[0275] Accordingly, the invention provides a method comprising incubating a cell expressing the marker nucleic acids (SEQ ID Nos: 1-4494) with a test compound and measuring the mRNA or protein level. The invention further provides a method for quantitatively determining the level of expression of the marker nucleic acids in a cell population, and a method for determining whether an agent is capable of increasing or decreasing the level of expression of the marker nucleic acids in a cell population. The method for determining whether an agent is capable of increasing or decreasing the level of expression of the marker nucleic acids in a cell population comprises the steps of (a) preparing cell extracts from control and agent-treated cell populations, (b) isolating the marker polypeptides from the cell extracts, (c) quantifying (e.g., in parallel) the amount of an immunocomplex formed between the marker polypeptide and an antibody specific to said polypeptide. The marker polypeptides of this invention may also be quantified by assaying for its bioactivity. Agents that induce increased the marker nucleic acid expression may be identified by their ability to increase the amount of immunocomplex formed in the treated cell as compared with the amount of the immunocomplex formed in the control cell. In a similar manner, agents that decrease expression of the marker nucleic acid may be identified by their ability to decrease the amount of the immunocomplex formed in the treated cell extract as compared to the control cell.

[0276] MRNA levels can be determined by Northern blot hybridization. mRNA levels can also be determined by methods involving PCR. Other sensitive methods for measuring mRNA, which can be used in high throughput assays, e.g., a method using a DELFIA endpoint detection and quantification method, are described, e.g., in Webb and Hurskainen (1996) Journal of Biomolecular Screening 1:119. Marker protein levels can be determined by immunoprecipitations or immunohistochemistiy using an antibody that specifically recognizes the protein product encoded by SEQ ID Nos: 1-4494, and preferably one or more of the proteins having the sequence of SEQ ID Nos. 4471, 4473, 4475, 4477, 4479, 4481, 4483, 4485, 4487, 4489, 4491, and 4493.

[0277] Agents that are identified as active in the drug screening assay are candidates to be tested for their capacity to block cell proliferation activity. These agents would be useful for treating a disorder involving aberrant growth of cells, especially colon cells.

[0278] A variety of assay formats will suffice and, in light of the present disclosure, those not expressly described herein will nevertheless be comprehended by one of ordinary skill in the art. For instance, the assay can be generated in many different formats, and include assays based on cell-free systems, e.g., purified proteins or cell lysates, as well as cell-based assays which utilize intact cells.

[0279] In many drug screening programs which test libraries of compounds and natural extracts, high throughput assays are desirable in order to maximize the number of compounds surveyed in a given period of time. Assays of the present invention which are performed in cell-free systems, such as may be derived with purified or semi-purified proteins or with lysates, are often preferred as “primary” screens in that they can be generated to permit rapid development and relatively easy detection of an alteration in a molecular target which is mediated by a test compound. Moreover, the effects of cellular toxicity and/or bioavailability of the test compound can be generally ignored in the in vitro system, the assay instead being focused primarily on the effect of the drug on the molecular target as may be manifest in an alteration of binding affinity with other proteins or changes in enzymatic properties of the molecular target.

[0280] A. Use of Nucleic Acids as Probes in Mapping and in Tissue Profiling Probes

[0281] Polynucleotide probes as described above, e g, comprising at least 12 contiguous nucleotides selected from the nucleotide SEQ ID Nos. 1-4470, 4472, 4474, 4476, 4478, 4480, 4482, 4484, 4486, 4488, 4490, 4492, and 4494, preferably SEQ ID Nos. 1-1103, even more preferably SEQ ID Nos. 1-503, and still more preferably SEQ ID Nos. 4472, 4474, 4476, 4478, 4480, 4482, 4484, 4486, 4488, 4490, 4492, and 4494, or a sequence complementary thereto, are used for a variety of purposes, including identification of human chromosomes and determining transcription levels. Additional disclosure about preferred regions of the nucleic acid sequences is found in the accompanying tables.

[0282] The nucleotide probes are labeled, for example, with a radioactive, fluorescent, biotinylated, or chemiluminescent label, and detected by well known methods appropriate for the particular label selected. Protocols for hybridizing nucleotide probes to preparations of metaphase chromosomes are also well known in the art. A nucleotide probe will hybridize specifically to nucleotide sequences in the chromosome preparations which are complementary to the nucleotide sequence of the probe. A probe that hybridizes specifically to a nucleic acid should provide a detection signal at least 5-, 10-, or 20-fold higher than the background hybridization provided with other unrelated sequences.

[0283] In a non-limiting example, commercial programs are available for identifying regions of chromosomes commonly associated with disease, such as cancer. Nucleic acids of the invention can be used to probe these regions. For example, if, through profile searching, a nucleic acid is identified as corresponding to a gene encoding a kinase, its ability to bind to a cancer-related chromosomal region will suggest its role as a kinase in one or more stages of tumor cell development/growth. Although some experimentation would be required to elucidate the role, the nucleic acid constitutes a new material for isolating a specific protein that has potential for developing a cancer diagnostic or therapeutic.

[0284] Nucleotide probes are used to detect expression of a gene corresponding to the nucleic acid. For example, in Northern blots, mRNA is separated electrophoretically and contacted with a probe. A probe is detected as hybridizing to an mRNA species of a particular size. The amount of hybridization is quantitated to determine relative amounts of expression, for example under a particular condition. Probes are also used to detect products of amplification by polymerase chain reaction. The products of the reaction are hybridized to the probe and hybrids are detected. Probes are used for in situ hybridization to cells to detect expression. Probes can also be used in vivo for diagnostic detection of hybridizing sequences. Probes are typically labeled with a radioactive isotope. Other types of detectable labels may be used such as chromophores, fluorophores, and enzymes.

[0285] Expression of specific mRNA can vary in different cell types and can be tissue specific. This variation of mRNA levels in different cell types can be exploited with nucleic acid probe assays to determine tissue types. For example, PCR, branched DNA probe assays, or blotting techniques utilizing nucleic acid probes substantially identical or complementary to nucleic acids of SEQ ID Nos. 1-4470, 4472, 4474, 4476, 4478, 4480, 4482, 4484, 4486, 4488, 4490, 4492, and 4494, preferably SEQ ID Nos. 1-1103, even more preferably SEQ ID Nos. 1-503, and still more preferably SEQ ID Nos. 4472, 4474, 4476, 4478, 4480, 4482, 4484, 4486, 4488, 4490, 4492, and 4494, or a sequence complementary thereto, can determine the presence or absence of target cDNA or MRNA.

[0286] Examples of a nucleotide hybridization assay are described in Urdea et al., PCT W092/02526 and Urdea et al., U.S. Pat. No. 5,124,246, both incorporated herein by reference. The references describe an example of a sandwich nucleotide hybridization assay.

[0287] Alternatively, the Polymerase Chain Reaction (PCR) is another means for detecting small amounts of target nucleic acids, as described in Mullis et al., Met/i. Enzymol. (1987) 155:335-350; U.S. Pat. No. 4,683,195; and U.S. Pat. No. 4,683,202, all incorporated herein by reference. Two primer polynucleotides nucleotides hybridize with the target nucleic acids and are used to prime the reaction. The primers may be composed of sequence within or 3′ and 5′ to the polynucleotides of the Sequence Listing. Alternatively, if the primers are 3′ and 5′ to these polynucleotides, they need not hybridize to them or the complements. A thermostable polymerase creates copies of target nucleic acids from the primers using the original target nucleic acids as a template. After a large amount of target nucleic acids is generated by the polymerase, it is detected by methods such as Southern blots. When using the Southern blot method, the labeled probe will hybridize to a polynucleotide of the Sequence Listing or complement.

[0288] Furthermore, mRNA or cDNA can be detected by traditional blotting techniques described in Sambrook et al., “Molecular Cloning: A Laboratory Manual” (New York, Cold Spring Harbor Laboratory, 1989). mRNA or cDNA generated from mRNA using a polymerase enzyme can be purified and separated using gel electrophoresis. The nucleic acids on the gel are then blotted onto a solid support, such as nitrocellulose. The solid support is exposed to a labeled probe and then washed to remove any unhybridized probe. Next, the duplexes containing the labeled probe are detected. Typically, the probe is labeled with radioactivity.

[0289] Mapping

[0290] Nucleic acids of the present invention are used to identify a chromosome on which the corresponding gene resides. Using fluorescence in situ hybridization (FISH) on normal metaphase spreads, comparative genomic hybridization allows total genome assessment of changes in relative copy number of DNA sequences. See Schwartz and Samad, Current Opinions in Biotechnology (1994) 8:70-74; Kallioniemi et al., Seminars in Cancer Biology (1993) 4:41-46; Valdes and Tagle, Methods in Molecular Biology (1997) 68:1, Boultwood, ed., Human Press, Totowa, N.J.

[0291] Preparations of human metaphase chromosomes are prepared using standard cytogenetic techniques from human primary tissues or cell lines. Nucleotide probes comprising at least 12 contiguous nucleotides selected from the nucleotide sequence of SEQ ID Nos. 1-4470, 4472, 4474, 4476, 4478, 4480, 4482, 4484, 4486, 4488, 4490, 4492, and 4494, preferably SEQ ID Nos. 1-1103, even more preferably SEQ ID Nos. 1-503, and still more preferably SEQ ID Nos. 4472, 4474, 4476, 4478, 4480, 4482, 4484, 4486, 4488, 4490, 4492, and 4494, or a sequence complementary thereto, are used to identify the corresponding chromosome. The nucleotide probes are labeled, for example, with a radioactive, fluorescent, biotinylated, or chemiluminescent label, and detected by well known methods appropriate for the particular label selected. Protocols for hybridizing nucleotide probes to preparations of metaphase chromosomes are also well known in the art. A nucleotide probe will hybridize specifically to nucleotide sequences in the chromosome preparations that are complementary to the nucleotide sequence of the probe. A probe that hybridizes specifically to a target gene provides a detection signal at least 5-, 10-, or 20-fold higher than the background hybridization provided with unrelated coding sequences.

[0292] Nucleic acids are mapped to particular chromosomes using, for example, radiation hybrids or chromosome-specific hybrid panels. See Leach et al., Advances in Genetics, (1995) 33:63-99; Walter et al., Nature Genetics (1994) 7:22-28; Walter and Goodfellow, Trends in Genetics (1992) 9:352. Panels for radiation hybrid mapping are available from Research Genetics, Inc., Huntsville, Ala., USA. Databases for markers using various panels are available via the world wide web at http:/F/shgc-www.stanford.edu, and other locations. The statistical program RHMAP can be used to construct a map based on the data from radiation hybridization with a measure of the relative likelihood of one order versus another, RHMAP is available via the world wide web at http://www.sph.umich.edu/group/statgen/software.

[0293] Such mapping can be useful in identifying the function of the target gene by its proximity to other genes with known function. Function can also be assigned to the target gene when particular syndromes or diseases map to the same chromosome.

[0294] Tissue Profiling

[0295] The nucleic acids of the present invention can be used to determine the tissue type from which a given sample is derived. For example, a metastatic lesion is identified by its developmental organ or tissue source by identifying the expression of a particular marker of that organ or tissue. If a nucleic acid is expressed only in a specific tissue type, and a metastatic lesion is found to express that nucleic acid, then the developmental source of the lesion has been identified. Expression of a particular nucleic acid is assayed by detection of either the corresponding mRNA or the protein product. Immunological methods, such as antibody staining, are used to detect a particular protein product. Hybridization methods may be used to detect particular mRNA species, including but not limited to in situ hybridization and Northern blotting.

[0296] Use of Polymorphisms

[0297] A nucleic acid will be useful in forensics, genetic analysis, mapping, and diagnostic applications if the corresponding region of a gene is polymorphic in the human population. A particular polymorphic form of the nucleic acid may be used to either identify a sample as deriving from a suspect or rule out the possibility that the sample derives from the suspect. Any means for detecting a polymorphism in a gene are used, including but not limited to electrophoresis of protein polymorphic variants, differential sensitivity to restriction enzyme cleavage, and hybridization to an allele-specific probe.

[0298] B. Use of Nucleic Acids and Encoded Polypeptides to Raise Antibodies Expression products of a nucleic acid, the corresponding mRNA or cDNA, or the corresponding complete gene are prepared and used for raising antibodies for experimental, diagnostic, and therapeutic purposes. For nucleic acids to which a corresponding gene has not been assigned, this provides an additional method of identifying the corresponding gene. The nucleic acid or related cDNA is expressed as described above, and antibodies are prepared. These antibodies are specific to an epitope on the encoded polypeptide, and can precipitate or bind to the corresponding native protein in a cell or tissue preparation or in a cell-free extract of an in vitro expression system.

[0299] Immunogens for raising antibodies are prepared by mixing the polypeptides encoded by the nucleic acids of the present invention with adjuvants. Alternatively, polypeptides are made as fusion proteins to larger immunogenic proteins. Polypeptides are also covalently linked to other larger immunogenic proteins, such as keyhole limpet hemocyanin. Immunogens are typically administered intradermally, subcutaneously, or intramuscularly. Immunogens are administered to experimental animals such as rabbits, sheep, and mice, to generate antibodies. Optionally, the animal spleen cells are isolated and fused with myeloma cells to form hybridomas which secrete monoclonal antibodies. Such methods are well known in the art. According to another method known in the art, the nucleic acid is administered directly, such as by intramuscular injection, and expressed in vivo. The expressed protein generates a variety of protein-specific immune responses, including production of antibodies, comparable to administration of the protein.

[0300] Preparations of polyclonal and monoclonal antibodies specific for nucleic acid-encoded proteins and polypeptides are made using standard methods known in the art. The antibodies specifically bind to epitopes present in the polypeptides encoded by a nucleic acid of SEQ ID Nos. 1-4470, 4472, 4474, 4476, 4478, 4480, 4482, 4484, 4486, 4488, 4490, 4492, and 4494, preferably SEQ ID Nos. 1-1103, even more preferably SEQ ID Nos. 1-503, and still more preferably SEQ ID Nos. 4472, 4474, 4476, 4478, 4480, 4482, 4484, 4486, 4488, 4490, 4492, and 4494, or a sequence complementary thereto. In a preferred embodiment the antibodies bind to epitopes on the polypeptides of SEQ ID Nos. 4471, 4473, 4475, 4479, 4481, 4483, 4485, 4487, 4489, 4491, and 4493. Typically, at least about 6, 8, 10, or 12 contiguous amino acids are required to form an epitope. However, epitopes which involve noncontiguous amino acids may require more, for example, at least about 15, 25, or 50 amino acids. A short sequence of a nucleic acid may then be unsuitable for use as an epitope to raise antibodies for identifying the corresponding novel protein, because of the potential for cross-reactivity with a known protein. However, the antibodies may be useful for other purposes, particularly if they identify common structural features of a known protein and a novel polypeptide encoded by a nucleic acid of the invention.

[0301] Antibodies that specifically bind to human nucleic acid-encoded polypeptides should provide a detection signal at least about 5-, 10-, or 20-fold higher than a detection signal provided with other proteins when used in Western blots or other immunochemical assays. Preferably, antibodies that specifically bind nucleic acid T-encoded polypeptides do not detect other proteins in immunochemical assays and can inununoprecipitate nucleic acid-encoded proteins from solution.

[0302] To test for the presence of serum antibodies to the nucleic acid-encoded polypeptide in a human population, human antibodies are purified by methods well known in the art. Preferably, the antibodies are affinity purified by passing antiserum over a column to which a nucleic acid-encoded protein, polypeptide, or fusion protein is bound. The bound antibodies can then be eluted from the column, for example using a buffer with a high salt concentration.

[0303] In addition to the antibodies discussed above, genetically engineered antibody derivatives are made, such as single chain antibodies.

[0304] Antibodies may be made by using standard protocols known in the art (See, for example, Antibodies: A Laboratory Manual ed. by Harlow and Lane (Cold Spring Harbor Press: 1988)). A mammal, such as a mouse, hamster, or rabbit can be immunized with an immunogenic form of the peptide (e.g., a mammalian polypeptide or an antigenic fragment which is capable of eliciting an antibody response, or a fusion protein as described above).

[0305] In one aspect, this invention includes monoclonal antibodies that show a subject polypeptide is highly expressed in colorectal tissue or tumor tissue, especially colon cancer tissue or colon cancer-derived cell lines. Therefore, in one embodiment, this invention provides a diagnostic tool for the analysis of expression of a subject polypeptide in general, and in particular, as a diagnostic for colon cancer.

[0306] Techniques for conferring immunogenicity on a protein or peptide include conjugation to carriers or other techniques well known in the art. An immunogenic portion of a protein can be administered in the presence of adjuvant. The progress of immunization can be monitored by detection of antibody titers in plasma or serum. Standard ELISA or other immunoassays can be used with the immunogen as antigen to assess the levels of antibodies. In a preferred embodiment, the subject antibodies are immunospecific for antigenic determinants of a protein of a mammal, e.g., antigenic determinants of a protein encoded by one of SEQ ID Nos. 1-4470, 4472, 4474, 4476, 4478, 4480, 4482, 4484, 4486, 4488, 4490, 4492, and 4494 or closely related homologs (e.g., at least 90% identical, and more preferably at least 95% identical).

[0307] Following immunization of an animal with an antigenic preparation of a polypeptide, antisera can be obtained and, if desired, polyclonal antibodies isolated from the serum. To produce monoclonal antibodies, antibody-producing cells (lymphocytes) can be harvested from an immunized animal and fused by standard somatic cell fusion procedures with immortalizing cells such as myeloma cells to yield hybridoma cells. Such techniques are well known in the art, and include, for example, the hybridoma technique (originally developed by Kohler and Milstein, (1975) Nature, 256: 495-497), the human B cell hybridoma technique (Kozbar et al., (1983) Immunology Today, 4: 72), and the EBV-hybridoma technique to produce human monoclonal antibodies (Cole et al., (1985) Monoclonal Antibodies and Cancer Therapy, Alan R. Liss, Inc. pp. 77-96). Hybridoma cells can be screened immunochemically for production of antibodies specifically reactive with a polypeptide of the present invention and monoclonal antibodies isolated from a culture comprising such hybridoma cells.

[0308] The term antibody as used herein is intended to include fragments thereof which are also specifically reactive with one of the subject polypeptides. Antibodies can be fragmented using conventional techniques and the fragments screened for utility in the same manner as described above for whole antibodies. For example, F(ab)₂ fragments can be generated by treating antibody with pepsin. The resulting F(ab)₂ fragment can be treated to reduce disulfide bridges to produce Fab fragments. The antibody of the present invention is further intended to include bispecific, single-chain, and chimeric and humanized molecules having affinity for a polypeptide conferred by at least one CDR region of the antibody. In preferred embodiments, the antibodies, the antibody further comprises a label attached thereto and able to be detected, (e.g., the label can be a radioisotope, fluorescent compound, chemiluminescent compound, enzyme, or enzyme co-factor).

[0309] Antibodies can be used, e.g., to monitor protein levels in an individual for determining, e.g., whether a subject has a disease or condition, such as colon cancer, associated with an aberrant protein level, or allowing determination of the efficacy of a given treatment regimen for an individual afflicted with such a disorder. The level of polypeptides may be measured from cells in bodily fluid, such as in blood samples.

[0310] Another application of antibodies of the present invention is in the immunological screening of cDNA libraries constructed in expression vectors such as gt11, gt18-23, ZAP, and ORF8. Messenger libraries of this type, having coding sequences inserted in the correct reading frame and orientation, can produce fusion proteins. For instance, gt11 will produce fusion proteins whose amino termini consist of β-galactosidase amino acid sequences and whose carboxyl termini consist of a foreign polypeptide. Antigenic epitopes of a protein, e.g., other orthologs of a particular protein or other paralogs from the same species, can then be detected with antibodies, as, for example, reacting nitrocellulose filters lifted from infected plates with antibodies. Positive phage detected by this assay can then be isolated from the infected plate. Thus, the presence of homologs can be detected and cloned from other animals, as can alternate isoforms (including splicing variants) from humans.

[0311] In another embodiment, a panel of monoclonal antibodies may be used, wherein each of the epitope's involved functions are represented by a monoclonal antibody. Loss or perturbation of binding of a monoclonal antibody in the panel would be indicative of a mutational attention of the protein and thus of the corresponding gene.

[0312] C. Differential Expression

[0313] The present invention also provides a method to identify abnormal or diseased tissue in a human. For nucleic acids corresponding to profiles of protein families as described above, the choice of tissue may be dictated by the putative biological function. The expression of a gene corresponding to a specific nucleic acid is compared between a first tissue that is suspected of being diseased and a second, normal tissue of the human. The normal tissue is any tissue of the human, especially those that express the target gene including, but not limited to, brain, thymus, testis, heart, prostate, placenta, spleen, small intestine, skeletal muscle, pancreas, and the mucosal lining of the colon.

[0314] The tissue suspected of being abnormal or diseased can be derived from a different tissue type of the human, but preferably it is derived from the same tissue type; for example an intestinal polyp or other abnormal growth should be compared with normal intestinal tissue. A difference between the target gene, mRNA, or protein in the two tissues which are compared, for example in molecular weight, amino acid or nucleotide sequence, or relative abundance, indicates a change in the gene, or a gene which regulates it, in the tissue of the human that was suspected of being diseased.

[0315] The target genes in the two tissues are compared by any means known in the art. For example, the two genes are sequenced, and the sequence of the gene in the tissue suspected of being diseased is compared with the gene sequence in the normal tissue. The target genes, or portions thereof, in the two tissues are amplified, for example using nucleotide primers based on the nucleotide sequence shown in the Sequence Listing, using the polymerase chain reaction. The amplified genes or portions of genes are hybridized to nucleotide probes selected from a corresponding nucleotide sequence shown SEQ ID No. 1-4494. A difference in the nucleotide sequence of the target gene in the tissue suspected of being diseased compared with the normal nucleotide sequence suggests a role of the nucleic acid-encoded proteins in the disease, and provides a lead for preparing a therapeutic agent. The nucleotide probes are labeled by a variety of methods, such as radiolabeling, biotinylation, or labeling with fluorescent or chemiluminescent tags, and detected by standard methods known in the art.

[0316] Alternatively, target mRNA in the two tissues is compared. PolyA⁺RNA is isolated from the two tissues as is known in the art. For example, one of skill in the art can readily determine differences in the size or amount of target mRNA transcripts between the two tissues using Northern blots and nucleotide probes selected from the nucleotide sequence shown in the Sequence Listing. Increased or decreased expression of a target mRNA in a tissue sample suspected of being diseased, compared with the expression of the same target mRNA in a normal tissue, suggests that the expressed protein has a role in the disease, and also provides a lead for preparing a therapeutic agent.

[0317] Any method for analyzing proteins is used to compare two nucleic acid-encoded proteins from matched samples. The sizes of the proteins in the two tissues are compared, for example, using antibodies of the present invention to detect nucleic acid-encoded proteins in Western blots of protein extracts from the two tissues. Other changes, such as expression levels and subcellular localization, can also be detected immunologically, using antibodies to the corresponding protein. A higher or lower level of nucleic acid-encoded protein expression in a tissue suspected of being diseased, compared with the same nucleic acid-encoded protein expression level in a normal tissue, is indicative that the expressed protein has a role in the disease, and provides another lead for preparing a therapeutic agent.

[0318] Similarly, comparison of gene sequences or of gene expression products, e.g., mRNA and protein, between a human tissue that is suspected of being diseased and a normal tissue of a human, are used to follow disease progression or remission in the human. Such comparisons of genes, mRNA, or protein are made as described above.

[0319] For example, increased or decreased expression of the target gene in the tissue suspected of being neoplastic can indicate the presence of neoplastic cells in the tissue. The degree of increased expression of the target gene in the neoplastic tissue relative to expression of the gene in normal tissue, or differences in the amount of increased expression of the target gene in the neoplastic tissue over time, is used to assess the progression of the neoplasia in that tissue or to monitor the response of the neoplastic tissue to a therapeutic protocol over time.

[0320] The expression pattern of any two cell types can be compared, such as low and high metastatic tumor cell lines, or cells from tissue which have and have not been exposed to a therapeutic agent. A genetic predisposition to disease in a human is detected by comparing an target gene, mRNA, or protein in a fetal tissue with a normal target gene, mRNA, or protein. Fetal tissues that are used for this purpose include, but are not limited to, amniotic fluid, chorionic villi, blood, and the blastomere of an in vitro-fertilized embryo. The comparable normal target gene is obtained from any tissue. The mRNA or protein is obtained from a normal tissue of a human in which the target gene is expressed. Differences such as alterations in the nucleotide sequence or size of the fetal target gene or mRNA, or alterations in the molecular weight, amino acid sequence, or relative abundance of fetal target protein, can indicate a germline mutation in the target gene of the fetus, which indicates a genetic predisposition to disease.

[0321] In a preferred embodiment nucleic acid macroarrays comprising the one or more of the sequences of SEQ ID Nos. 1-4470, 4472, 4474, 4476, 4478, 4480, 4482, 4484, 4486, 4488, 4490, 4492, and 4494 may be used to evaluate differential expression of nucleic acid sequences in cancerous cells or tissue relative to the expression of the same sequences in normal cells or tissue as described above. Preferably, such sequences are differentially expressed by at least 3 fold in cancerous cells or tissue relative to normal cells or tissue. More specifically, the present invention provides the full length sequences of SEQ ID Nos. 4472, 4474, 4476, 4478, 4480, 4482, 4484, 4486, 4488, 4490, 4492, and 4494 which are differentially expressed in cancerous colonic cells/tissue by at least 3 fold relative to normal patient samples. Thus, the sequences of SEQ ID Nos. 4472, 4474, 4476, 4478, 4480, 4482, 4484, 4486, 4488, 4490, 4492, and 4494, as well as the encoded polypeptides (SEQ ID Nos. 4471, 4473, 4475, 4477, 4479, 4481, 4483, 4485, 4487, 4489, 4491, and 4493, respectively) serve as valuable diagnostic markers for identifying and screening for colon cancer in a patient.

[0322] D. Use of Nucleic Acids, and Encoded Polypeptides to Screen for Peptide Analogs and Antagonists

[0323] Polypeptides encoded by the instant nucleic acids, e.g., SEQ ID Nos. 1-4470, 4472, 4474, 4476, 4478, 4480, 4482, 4484, 4486, 4488, 4490, 4492, and 4494, preferably SEQ ID Nos. 1-1103, even more preferably SEQ ID Nos. 1-503, and most preferably SEQ ID Nos. 4472, 4474, 4476, 4478, 4480, 4482, 4484, 4486, 4488, 4490, 4492, and 4494, or a sequence complementary thereto, and corresponding full length genes can be used to screen peptide libraries to identify binding partners, such as receptors, from among the encoded polypeptides. Preferably, the polypeptides of SEQ ID Nos. 4471, 4473, 4475, 4477, 4479, 4481, 4483, 4485, 4487, 4489, 4491, and 4493 may be used screen for binding partners.

[0324] A library of peptides may be synthesized following the methods disclosed in U.S. Pat. No. 5,010,175, and in PCT WO 91/17823. As described below in brief, one prepares a mixture of peptides, which is then screened to identify the peptides exhibiting the desired signal transduction and receptor binding activity. In the ′175 method, a suitable peptide synthesis support (e.g., a resin) is coupled to a mixture of appropriately protected, activated amino acids. The concentration of each amino acid in the reaction mixture is balanced or adjusted in inverse proportion to its coupling reaction rate so that the product is an equimolar mixture of amino acids coupled to the starting resin. The bound amino acids are then deprotected, and reacted with another balanced amino acid mixture to form an equimolar mixture of all possible dipeptides. This process is repeated until a mixture of peptides of the desired length (e.g., hexamers) is formed. Note that one need not include all amino acids in each step: one may include only one or two amino acids in some steps (e.g., where it is known that a particular amino acid is essential in a given position), thus reducing the complexity of the mixture. After the synthesis of the peptide library is completed, the mixture of peptides is screened for binding to the selected polypeptide. The peptides are then tested for their ability to inhibit or enhance activity. Peptides exhibiting the desired activity are then isolated and sequenced.

[0325] The method described in WO 91/17823 is similar. However, instead of reacting the synthesis resin with a mixture of activated amino acids, the resin is divided into twenty equal portions (or into a number of portions corresponding to the number of different amino acids to be added in that step), and each amino acid is coupled individually to its portion of resin. The resin portions are then combined, mixed, and again divided into a number of equal portions for reaction with the second amino acid. In this manner, each reaction may be easily driven to completion. Additionally, one may maintain separate “subpools” by treating portions in parallel, rather than combining all resins at each step. This simplifies the process of determining which peptides are responsible for any observed receptor binding or signal transduction activity.

[0326] In such cases, the subpools containing, e.g., 1-2,000 candidates each are exposed to one or more polypeptides of the invention. Each subpool that produces a positive result is then resynthesized as a group of smaller subpools (sub-subpools) containing, e.g., 20-100 candidates, and reassayed. Positive sub-subpools may be resynthesized as individual compounds, and assayed finally to determine the peptides that exhibit a high binding constant. These peptides can be tested for their ability to inhibit or enhance the native activity. The methods described in WO 91/7823 and U.S. Pat. No. 5,194,392 (herein incorporated by reference) enable the preparation of such pools and subpools by automated techniques in parallel, such that all synthesis and resynthesis may be performed in a matter of days.

[0327] Peptide agonists or antagonists are screened using any available method, such as signal transduction, antibody binding, receptor binding, mitogenic assays, chemotaxis assays, etc. The methods described herein are presently preferred. The assay conditions ideally should resemble the conditions under which the native activity is exhibited in vivo, that is, under physiologic pH, temperature, and ionic strength. Suitable agonists or antagonists will exhibit strong inhibition or enhancement of the native activity at concentrations that do not cause toxic side effects in the subject. Agonists or antagonists that compete for binding to the native polypeptide may require concentrations equal to or greater than the native concentration, while inhibitors capable of binding irreversibly to the polypeptide may be added in concentrations on the order of the native concentration.

[0328] The end results of such screening and experimentation will be at least one novel polypeptide binding partner, such as a receptor, encoded by a nucleic acid of the invention, and at least one peptide agonist or antagonist of the novel binding partner. Such agonists and antagonists can be used to modulate, enhance, or inhibit receptor function in cells to which the receptor is native, or in cells that possess the receptor as a result of genetic engineering. Further, if the novel receptor shares biologically important characteristics with a known receptor, information about agonist/antagonist binding may help in developing improved agonists/antagonists of the known receptor.

[0329] The practice of the present invention will employ, unless otherwise indicated, conventional techniques of cell biology, cell culture, molecular biology, transgenic biology, microbiology, recombinant DNA, and immunology, which are within the skill of the art. Such techniques are explained fully in the literature. See, for example, Molecular Cloning A Laboratory Manual, 2nd Ed., ed. by Sambrook, Fritsch and Maniatis (Cold Spring Harbor Laboratory Press: 1989); DNA Cloning, Volumes I and II (D. N. Glover ed., 1985); Oligonucleotide Synthesis (M. J. Gait ed., 1984); Mullis et al. U.S. Pat. No. 4,683,195; Nucleic Acid Hybridization (B. D. Hames & S. J. Higgins eds. 1984); Transcription And Translation (B. D. Hames & S. J. Higgins eds. 1984); Culture Of Animal Cells (R. I. Freshney, Alan R. Liss, Inc., 1987); Immobilized Cells And Enzymes (IRL Press, 1986); B. Perbal, A Practical Guide To Molecular Cloning (1984); the treatise, Methods in Enzymology (Academic Press, Inc., N.Y.); Gene Transfer Vectors For Mammalian Cells (J. H. Miller and M. P. Calos eds., 1987, Cold Spring Harbor Laboratory); Methods In Enzymology, Vols. 154 and 155 (Wu et al. eds.), Immunochemical Methods In Cell And Molecular Biology (Mayer and Walker, eds., Academic Press, London, 1987); Handbook Of Experimental Immunology, Volumes I-IV (D. M. Weir and C. C. Blackwell, eds., 1986); Manipulating the Mouse Embryo, (Cold Spring Harbor Laboratory Press, Cold Spring Harbor, N.Y., 1986).

[0330] As mentioned above, the sequences described herein are believed to have particular utility in regards to colon cancer. However, they may also be useful with other types of cancers and other disease states.

[0331] The present invention will now be illustrated by reference to the following examples which set forth particularly advantageous embodiments. However, it should be noted that these embodiments are illustrative and are not to be construed as restricting the invention in any way.

### XI. EXAMPLES

[0332] A. Identification of Differentially Expressed Sequences.

[0333] Description of the Libraries

[0334] SEQ ID Nos: 1-4470 were derived from libraries designated as 101, 102, 103, 104, 109, 110, 111, and 112 as described below briefly and in the accompanying table (Table 1). For example, the 101 library is a normalized, colon cancer specific, subtracted cDNA library. It is specific for sequences expressed in colon cancer [proximal and distal Dukes′ B, microsatellite instability negative (MSI-)] but not expressed in normal tissues, including normal colon tissue. The 102 library is a normalized, colon specific, subtracted cDNA library. It is specific for sequences expressed in normal colon tissue but not expressed in other normal tissues. Characteristics of the remaining libraries are described in Table 1.

TABLE 1
Library designation and description

| Library | |
|---|---|
| Designation | Description |
| 101 | Specific for sequences expressed in colon cancer (proximal and distal |
| | Dukes' B, MSI−) but not expressed in normal tissues⁴, including colon² |
| 102 | Specific for sequences expressed in normal colon (normal tissue from |
| | proximal and distal Dukes' B, MSI-matrix patients)³, but not expressed in |
| | other normal tissues⁴ |
| 103 | Specific for sequences expressed in proximal Dukes' B, MSI− colon cancer, |
| | but not expressed in normal colon tissue³ |
| 104 | Specific for sequences expressed in distal Dukes' B, MSI− colon cancer, but |
| | not expressed in normal colon tissue³ |
| 109 | Specific for sequences expressed in proximal Dukes' B, MSI+ colon cancer, |
| | but not expressed in normal colon tissue³ |
| 110 | Specific for sequences expressed in proximal Dukes' B, MSI+ colon cancer, |
| | but not expressed in other normal tissues⁴, including colon² |
| 111 | Specific for sequences expressed in distal, Dukes' D, MSI− colon cancer, but |
| | not expressed in normal colon tissue³ |
| 112 | Specific for sequences expressed in distal, Dukes' D, MSI− colon cancer, but |
| | not expressed in normal tissues⁴, including colon² |

¹cDNA synthesized from SW480 poly A+ RNA obtained form Clontech, Palo Alto, CA
²cDNA synthesized from normal colon tissue total RNA obtained from OriGene Technologies, Inc.; Rockville, MD
³Corresponding normal colon epithelium from colon cancer patients.
⁴A pool of cDNAs synthesized from the following normal tissue RNAs (poly A+ or total) obtained from OriGene Technologies, Inc.: heart, kidney, spleen, liver, peripheral blood lymphocytes, small intestine, skeletal muscle, lung and prostate.

[0335] Construction of the Normalized and Subtracted cDNA Libraries

[0336] The normalized and subtracted cDNA libraries were constructed according to published procedures (Daitchenko et al., 1996 PNAS 93:6025-6030, Gurskaya et al., 1996 Analytical Biochemistry 240:90-97). Commercially available kits from Clontech Laboratories, Inc., Palo Alto, Calif. were utilized (Clontech SMART cDNA synthesis kit, catalog number K1052-1, and Clontech PCR-Select cDNA Subtraction kit, catalog number K1804-1). For each subtracted library, the specific or “tester” cDNA was comprised of amplified cDNA from four similar sample types that were pooled together. Likewise, the reference or “driver” cDNA was comprised of a pool of sample types as illustrated in Table 1. During the subtraction process, the genes or transcripts unique to the tester are retained, and the genes or transcripts common to both the tester and driver are removed. Thus, in principle, the clones present in the subtracted libraries indicate those genes or transcripts that are expressed (or overexpressed) in the tester, but not expressed (or underexpressed) in the driver. Reverse-subtracted libraries were also constructed in which the tester and driver materials were reversed. These libraries were only utilized to prepare labeled targets (see below).

[0337] To construct the libraries, one microgram of total RNA from each sample was representatively amplified using the Clontech SMART cDNA synthesis kit. The amplified cDNA was purified and pooled to create the individual tester and driver samples that were used for the subsequent library construction. To construct the normalized and subtracted libraries, the Clontech PCR-Select cDNA Subtraction kit was utilized. A forty-five fold mass excess of driver cDNA (450 nanograms) was used for each subtraction experiment. Subtractive hybridization of tester with driver cDNAs was performed twice, each time for about 8-12 hours. Subtracted cancer specific cDNA was ligated into the pCR2.1-TOPO plasmid vector (Invitrogen Corporation, Carlsbad Calif.) and chemically transformed into ultracompetent Epicurian E. coli XL1O-Gold cells (Stratagene, La Jolla, Calif.). The transformed cells were plated onto LB-ampicillin plates containing IPTG and X-gal. Individual white colonies, representing those with cloned inserts, were picked and grown overnight in LB-ampicillin broth. Plasmid DNA was purified using QIAprep 96 Turbo kits from Qiagen (Valencia, Calif.).

[0338] Sequencing of the Clones

[0339] The nucleotide sequence of the inserts from clones was determined by single-pass sequencing from either the T7 or M13 promoter sites using fluorescently labeled dideoxynucleotides via the Sanger sequencing method. The nucleotide sequences of the individual clones were compared to those in public databases (GenBank, dbEST, Geneseq) via Blast 2 homology searches according to methods described in the text.

[0340] The sequences derived from individual clones from the libraries described above represents a sequence from a partial mRNA transcript, since the cDNA used for making the subtracted library was restricted with RsaI, a four base cutter restriction endonuclease that generates fragments with an average size of about 600 base pairs.

[0341] The nucleic acids of the invention were assigned a sequence identification number (see FIG. 1). The nucleic acid sequences are provided in the attached Sequence Listing.

[0342] Validation of Differential Expression in Colon Cancer

[0343] To validate that the differentially expressed sequences found in this library were specific to colon cancer, the inserts from the plasmid DNA were amplified by PCR using vector-specific primers. The amplification products were arrayed onto nylon membranes and hybridized with ³³P-labeled cDNAs prepared from both the subtracted library cDNA as well as the corresponding reverse-subtracted cDNA library. Each membrane array comprises approximately 3,456 clones. Four such membranes where generated comprising the clone libraries shown in Table 1 as indicated below in Table 3.

| Membrane ID Number | Library Clones |
|---|---|
| 101-1 | Clones from subtracted library 101 |
| 101-2 | Clones from subtracted library 101 and 102 |
| 103104109 | Clones form subtracted libraries 103, 104, and |
| | 109 |
| 110111112 | Clones from subtracted libraries 110, 111, and |
| | 112 |

[0344] The set of four membranes is hybridized, using techinques known to those of skill in the art and further described above, with ³²P-labeled target nucleic acid molecules obtained from human colon cancer tissue. A second, identical set of membranes is hybridized with ³²P-labeled target nucleic acid molecules obtained from normal human colon tissue. The signals of the hybridization produces on the cancer membrane are subsequently compared to those on the normal membrane. A difference in hybridization, indicative of a difference in expression of the sequence in colon cancer vs. normal, of at least 3 fold is considered to be indicative of differential expression.

[0345] Using this validation technique, the full length cDNA sequences of SEQ ID Nos. 4472, 4474, 4476, 4478, 4480, 4482, 4484, 4486, 4488, 4490, 4492, and 4494 have been identified as significantly differentially expressed in colon cancer relative to normal colon tissue.

[0346] Those skilled in the art will recognize, or be able to ascertain, using not more than routine experimentation, many equivalents to the specific embodiments of the invention described herein. Such specific embodiments and equivalents are intended to be encompassed by the following claims.

[0347] All patents, published patent applications, and publications cited herein are incorporated by reference as if set forth fully herein.

What is claimed is:

1. An isolated nucleic acid comprising SEQ ID Nos 1-503 or a sequence complementary thereto.

2. An isolated nucleic acid comprising a nucleotide sequence which hybridizes under stringent conditions to a sequence of SEQ ID Nos. 1-503 or a sequence complementary thereto.

3. An isolated nucleic acid comprising a nucleotide sequence at least 80% identical to a sequence corresponding to at least about 15 consecutive nucleotides of one of SEQ ID Nos. 1-503 or a sequence complementary thereto.

4. A nucleic acid according to claim 1, further comprising a transcriptional regulatory sequence operably linked to said nucleotide sequence so as to render said nucleotide sequence suitable for use as an expression vector.

5. An expression vector, capable of replicating in at least one of a prokaryotic cell and eukaryotic cell, comprising the nucleic acid of claim 4.

6. A host cell transfected with the expression vector of claim 5.

7. A transgenic animal having a transgene of the nucleic acid of claim 1 incorporated in cells thereof, which transgene modifies the level of expression of the nucleic acid, the stability of an mRNA transcript of the nucleic acid, or the activity of the encoded product of the nucleic acid.

8. A substantially pure nucleic acid which hybridizes under stringent conditions to a nucleic acid probe corresponding to at least 12 consecutive nucleotides of one of SEQ ID Nos. 1-1103 or a sequence complementary thereto.

9. A polypeptide including an amino acid sequence encoded by a nucleic acid of claim 1 or a fragment comprising at least 25 amino acids thereof.

10. A probe/primer comprising a substantially purified oligonucleotide, said oligonucleotide containing a region of nucleotide sequence which hybridizes under stringent conditions to at least 12 consecutive nucleotides of sense or antisense sequence selected from SEQ ID Nos. 1-1103.

11. An array including at least 10 different probes of claim 10 attached to a solid support.

12. The probe/primer of claim 10, further comprising a label group attached thereto and able to be detected.

13. The probe/primer of claim 12, wherein said label group being selected from radioisotopes, fluorescent compounds, enzymes, and enzyme co-factors.

14. An antibody immunoreactive with a polypeptide of claim 9.

15. An antisense oligonucleotide analog which hybridizes under stringent conditions to at least 12 consecutive nucleotides of one of SEQ ID Nos. 1-503 or a sequence complementary thereto, and which is resistant to cleavage by a nuclease.

16. A test kit for determining the phenotype of transformed cells, comprising the probe/primer of claim 12, for measuring a level of a nucleic acid which hybridizes under stringent conditions to a nucleic acid of SEQ ID Nos. 1-4470 in a sample of cells isolated from a patient.

17. A test kit for determining the phenotype of transformed cells, comprising an antibody specific for a protein encoded by a nucleic acid which hybridizes under stringent conditions to any one of SEQ Nos. 1-4470.

18. A method of determining the phenotype of a cell, comprising detecting the differential expression, relative to a normal cell, of at least one nucleic acid which hybridizes under stringent conditions to one of SEQ ID Nos. 1-4470, 4472, 4474, 4476, 4478, 4480, 4482, 4484, 4486, 4488, 4490, 4492, and 4494, wherein the nucleic acid is differentially expressed by at least a factor of two.

19. A method for determining the phenotype of cells in a sample of cells from a patient, comprising:
(a) providing a nucleic acid probe comprising a nucleotide sequence having at least 12 consecutive nucleotides of any of SEQ ID Nos. 1-4470, 4472, 4474, 4476, 4478, 4480, 4482, 4484, 4486, 4488, 4490, 4492, and 4494;
(b) obtaining a sample of cells from a patient;
(c) providing a second sample of cells substantially all of which are non-cancerous;
(d) contacting the nucleic acid probe under stringent conditions with mRNA of each of said first and second cell samples; and comparing (a) the amount of hybridization of the probe with mRNA of the first cell sample, with (b) the amount of hybridization of the probe with mRNA of the second cell sample, wherein a difference of at least a factor of two in the amount of hybridization with the mRNA of the first cell sample as compared to the amount of hybridization with the mRNA of the second cell sample is indicative of the phenotype of cells in the first cell sample.

20. A method of determining the phenotype of cell, comprising detecting the differential expression, relative to a normal cell, of at least one polypeptide encoded by a nucleic acid which hybridizes under stringent conditions to one of SEQ ID Nos. 1-4470, wherein the polypeptide is differentially expressed by at least a factor of two.

21. A method of determining the phenotype of cell, comprising detecting the differential expression, relative to a normal cell, of at least one polypeptide encoded by a nucleic acid which hybridizes under stringent conditions to a sequence selected from the group consisting of SEQ ID Nos. 4472, 4474, 4476, 4478, 4480, 4482, 4484, 4486, 4488, 4490, 4492, and 4494, wherein the polypeptide is differentially expressed by at least a factor of two.

22. A method of determining the phenotype of cell, comprising detecting the differential expression, relative to a normal cell, of at least one polypeptide selected from the group of polypeptides of SEQ ID Nos. 4471, 4473, 4475, 4477, 4479, 4481, 4483, 4485, 4487, 4489, 4491, and 4493, wherein the polypeptide is differentially expressed by at least a factor of two.

23. The method of claim 20, 21, or 22, wherein the level of said polypeptide is detected in an immunoassay.

24. A method for determining the presence or absence of a nucleic acid which hybridizes under stringent conditions to one of SEQ ED Nos. 1-1103 in a cell, comprising contacting the cell with a probe of claim 10.

25. A method for determining the presence of absence of a polypeptide encoded by a nucleic acid which hybridizes under stringent conditions to one of SEQ ID Nos. 1-503 in a cell, comprising contacting the cell with an antibody of claim 14.

26. A method for detecting a mutation in a test nucleic acid which hybridizes under stringent conditions to a nucleic acid of SEQ ID Nos. 1-4470 or a sequence complementary thereto, comprising
(a) collecting a sample of cells from a patient,
(b) isolating nucleic acid from the cells of the sample,
(c) contacting the nucleic acid sample with one or more primers which specifically hybridize to a nucleic acid sequence of SEQ ID Nos. 1-4470 under conditions such that hybridization and amplification of the nucleic acid occurs, and
(d) comparing the presence, absence, or size of an amplification product to the amplification product of a normal cell.

27. A method for identifying an agent which alters the level of expression in a cell of a nucleic acid which hybridizes under stringent conditions to one of SEQ ID Nos. 1-4470 or a sequence complementary thereto, comprising
(a) providing a cell;
(b) treating the cell with a test agent;
(c) determining the level of expression in the cell of a nucleic acid which hybridizes under stringent conditions to one of SEQ ID Nos. 1-4470 or a sequence complementary thereto; and
(d) comparing the level of expression of the nucleic acid in the treated cell with the level of expression of the nucleic acid in an untreated cell, wherein a change in the level of expression of the nucleic acid in the treated cell relative to the level of expression of the nucleic acid in the untreated cell is indicative of an agent which alters the level of expression of the nucleic acid in a cell.

28. A method for identifying an agent which alters the level of expression in a cell of a nucleic acid which hybridizes under stringent conditions to one of SEQ ID Nos. 4472, 4474, 4476, 4478, 4480, 4482, 4484, 4486, 4488, 4490, 4492, or 4494 or a sequence complementary thereto, comprising
(a) providing a cell;
(b) treating the cell with a test agent;
(c) determining the level of expression in the cell of a nucleic acid which hybridizes under stringent conditions to one of SEQ ID Nos. 4472, 4474, 4476, 4478, 4480, 4482, 4484, 4486, 4488, 4490, 4492, or 4494 or a sequence complementary thereto; and
(d) comparing the level of expression of the nucleic acid in the treated cell with the level of expression of the nucleic acid in an untreated cell, wherein a change in the level of expression of the nucleic acid in the treated cell relative to the level of expression of the nucleic acid in the untreated cell is indicative of an agent which alters the level of expression of the nucleic acid in a cell.

29. A method for identifying an agent which alters the level of expression in a cell of a polypeptide of one or more of SEQ ID Nos. 4471, 4473, 4475, 4477, 4479, 4481, 4483, 4485, 4487, 4489, 4491, or 4493 comprising
(a) providing a cell;
(b) treating the cell with a test agent;
(c) determining the level of expression of one or more polypeptides of SEQ ID Nos. 4471, 4473, 4475, 4477, 4479, 4481, 4483, 4485, 4487, 4489, 4491, or 4493 in said cell by reacting said cell with an antibody specific for one or more of the polypeptides of SEQ ID Nos. 4471, 4473, 4475, 4477, 4479, 4481, 4483, 4485, 4487, 4489, 4491, or 4493; and
(d) comparing the level of expression of said one or more polypeptides in the treated cell with the level of expression of said one or more polypeptides in an untreated cell, wherein a change in the level of expression of the nucleic acid in the treated cell relative to the level of expression of the nucleic acid in the untreated cell is indicative of an agent which alters the level of expression of the polypeptide in a cell.

30. A pharmaceutical composition comprising an agent identified by the method of claim 27, 28, or 29.

31. A pharmaceutical composition comprising a nucleic acid which includes a nucleotide sequence which hybridizes under stringent conditions to one of SEQ ID Nos. 1-4470 or a sequence complementary thereto.

32. A pharmaceutical composition comprising a polypeptide encoded by a nucleic acid which includes a nucleotide sequence that hybridizes under stringent conditions to one of SEQ ID Nos. 1-4470 or a sequence complementary thereto.

33. A pharmaceutical composition comprising a polypeptide having the sequence of one of SEQ ID Nos. 4471, 4473, 4475, 4477, 4479, 4481, 4483, 4485, 4487, 4489, 4491, or 4493.

34. A pharmaceutical composition comprising an antibody which binds to one or more polypeptides having the sequence of SEQ ID Nos. 4471, 4473, 4475, 4477, 4479, 4481, 4483, 4485, 4487, 4489, 4491, or 4493.

35. An isolated nucleic acid comprising a portion of a nucleotide sequence of SEQ ID Nos. 504-1103 or a sequence complementary thereto.

36. A gene which hybridizes to one of SEQ ID Nos. 1-503.

37. A method for detecting cancer in which one or more of SEQ ID Nos. 1-4470, 4472, 4474, 4476, 4478, 4480, 4482, 4484, 4486, 4488, 4490, 4492, and 4494 are used as probes, said method comprising:
(a) collecting a sample of cells from a patient,
(b) isolating nucleic acid from the cells of the sample,
(c) contacting the nucleic acid sample with one or more primers which specifically hybridize to a nucleic acid sequence of SEQ ID Nos. 1-4470, 4472, 4474, 4476, 4478, 4480, 4482, 4484, 4486, 4488, 4490, 4492, and 4494 under conditions such that hybridization and amplification of the nucleic acid occurs, and
(d) comparing the presence, absence, or size of an amplification product to the amplification product of a normal cell.

38. A method of claim 37 in which said cancer is colon cancer.

39. A method for detecting cancer in a patient sample in which an antibody to a protein encoded by SEQ ID Nos. 1-4470 is used to react with proteins in said sample.

40. A method for detecting cancer in a patient sample in which an antibody to a protein encoded by one or more of SEQ ID Nos. 4472, 4474, 4476, 4478, 4480, 4482, 4484, 4486, 4488, 4490, 4492, or 4494 is used to react with proteins in said sample.

41. A method for detecting cancer in a patient sample in which an antibody to a protein having the sequence of SEQ ID Nos. 4471, 4473, 4475, 4477, 4479, 4481, 4483, 4485, 4487, 4489, 4491, or 4493 is used to react with proteins in said sample.

42. The method of claim 39, 40, or 41, wherein said cancer is colon cancer.

The application's sequence listing, which the Patent Office published only in electronic form, follows.

SEQUENCE LISTING (4494 sequences)

SEQ ID NO: 1 - DNA, 537 bp, Homo sapiens
  misc_feature 379, 397, 399, 403, 407, 409, 412, 414, 416, 418, 426, 437,448, 467, 486, 490, 496, 504, 508, 511, 523, 532, 534, 537: n = A,T,C or G
ggtacattgaattacaaaaggatccaagaatattgaaatagttaccaaaaaaatttgatatagaaatatatatggtttattaatgaataagatctagcagtggccttactataatttcaacacagtagcgtggtgagcataaatatttcaacttatctgcaacaattgtaatgtgatatggaaataatcagtttaattgtgacagtcacatttactgctaactactgtgattgattggctatgtttacattttattagaagttattgaaagtagatgccaggcatggtggctcatgcctgtaatcctagcactttgggaggccaaagtgggcagatcatttgagcccacgagttcgagaccagcctggccaacatgatnaagccctgtctctacaananaaantacnanttngnananaaatgttncctgccccggnccggccgttcnaaagggcgaaattccaacnacacttggcggggcgtttntaantggttncgaacttnggtnccnagctttggcgtnaatcatggntnatn

SEQ ID NO: 2 - DNA, 593 bp, Homo sapiens
  misc_feature 410, 413, 437, 444, 449, 457, 458, 459, 467, 472, 477, 479,481, 489, 493, 497, 506, 507, 508, 509, 513, 514, 515, 516,518, 519, 520, 523, 526, 529, 534, 544, 545, 547, 550, 551,552, 553, 557, 558, 559, 560, 561, 562, 563, 564, 565: n = A,T,C or G
  misc_feature 567, 568, 569, 570, 572, 577, 582, 586, 587, 590, 591, 592: n = A,T,C or G
ggtactcagtatcttgactgacttgttggaaatacactttagattatttacgtggaatatattcagttaattgagcaaaagtatatgtattgctgtggagattattttgcttttttcttgattatatttataacttagtgaaaaggtagagaaagtattactgaaaaaattacatatttttaggttgacttgtatttgacttttgcatttctaatttaattcttgtttagatggctgaccacattctaaaaaattgccatcctctttatctctgtttcttatacaaacattttctttcaaaattgtttctagaggtttgggaaaagaagcataagtaattaaaggagcaaaattctgggcctaatattattgctcctttataagctataatctttttatttaaatttttntgnggccctggatttttaacctttgantcatttnttagnggctttannntatcattnccccnggctncntnaaggttcncccngatnaaaaaggtnnnntggnnnntnnncanaanctnttaanattccccctnntnggnnnntttnnnnnnnnntnnnnanggttnaaatncctnnctnnnc

SEQ ID NO: 3 - DNA, 510 bp, Homo sapiens
  misc_feature 403, 423, 425, 455, 458, 471, 510: n = A,T,C or G
ggtacaattgtcttttctgggacactcacttctgaaaagaaggcaggaattggaagggctgaaaaaggcatcgtgatgaaatccacgtcctgccaagttgtactgtaaagttttagtcccggcagtcaaggccacaatagacaaaaataaagtcaggagggaagcccactggatccagtttagacgcctcttcagcactatcctgaatagaagagctgttgttataatgctaaaatttgagaagataacagccatggctggttgaagataggacaggacatagaagacaatcaagttatccaggaaataaagaaaggcaggaatggaccacttcatgaaatcagagaattccttccaggaagcatatttcaaatttctactttgatgatctttctttattacncagaatggccccagcccccngnaaactaactttaaccagttttgaccccccnttncagtagttggaanaaaacaaacctggtttcttcattggcgaatccttccttn

SEQ ID NO: 4 - DNA, 508 bp, Homo sapiens
  misc_feature 41, 44, 58, 63, 81, 84, 108, 131, 142, 170, 176, 197, 207,208, 212, 242, 245, 251, 263, 290, 384, 389, 419, 422, 427,438, 449, 450, 451, 457, 468, 473, 477, 482, 496, 508: n = A,T,C or G
acttttttttttttttttttttttttttttttttttttttnganacacaatttcactntgtcncccaggctggagtgcagnggngtgatctcagctcactgcaacttntgcctcctgggttcaagcaattntcatgccccancctcccaagtagctgggaatacagttgngtgccnccacactggcttattttttgnatttttttannaaanatggggtttcaccatgttggccaggctggnctntaactnttatcctcaagngatctgcctgccttggcctcccaaagngctgggattacaggcatgagccaccgcacctggcctacttatcctgttaatgaaaatatttgattggacaaaacatcttattccttaactctgntatgngcttttggaaaatggttttacctactgganaantttgntggtcccaaangccccaaaatnnnttgaanagttccccccnttctnaaanggganaaaaaaaaattttntttaataggggn

SEQ ID NO: 5 - DNA, 638 bp, Homo sapiens
  misc_feature 286, 415, 424, 475, 484, 494, 505, 533, 534, 535, 568, 571,579, 599, 603, 623, 638: n = A,T,C or G
acgcgggcccggtgatgccatcctcacagtgttaagtgacttggaagatgagaccatgaaaagaacaagtgctggtggcactcccaggcaaagatccccaggctggaggagttggcgcctgaagaaaaccagagcaaaacctcaagggtcagagggcctgggcatcggtgcagggctcacttgagactgaacacgttccccagggaagatctgtatgcttctaaagaacacttttggccaggcacagtgaatcatgcctgtaatcccagcactttgagaggctgangcaggtggaatgcttgagctcaggagttcgagaccagcctgggcaacatagcaaaaccttgtctctactaaaaatcaaaaaaattagcccagatgtggtgggtgcctggctgtagtcccagctacttangaaactgangtaggaagatcactttgagtctgggaaaatgaagcttcaatgaaccttgantacacccgnttgacttcancctgagtgacngaaggagaccttgtttgaaaaaaaaaannnaaaaaaaaagtcccttggccggaacacccttanggngaattccncccactgggggccgtctaangganccacttggaccaacttgggnaaaatgggataattn

SEQ ID NO: 6 - DNA, 490 bp, Homo sapiens
  misc_feature 128, 146, 165, 201, 204, 240, 242, 289, 296, 316, 319, 323,330, 334, 341, 354, 355, 357, 361, 370, 382, 387, 396, 408,411, 414, 415, 422, 443, 449, 459, 467, 475, 479: n = A,T,C or G
ggtactgggattacaggcgtgagccaccgcgcccggcctgacttttgattttctcactgtgttcttttggtattgtaaaaatagtaaatgttaaaaaaaaaaaaaaaaggaaaaagaaaaagaaaatntactttacaaaaagtaanttacaaaggactactactnatctttatgttcaaatttataacaaaatgggaaacncanttaggatgcttccatagccagggaaaggcaatggtnanaattttccagctgaggttttgatctgctattttccacattaaaagtnaaaaaantcaaaacaatgtctcaacanaancaanaaaatantccntcattcnttttgattatatnnanaagngattaaccnaaagtatgttantttantaaataatnaaaaacattttnaanagnnggaaccnttcttaattaaccatattctngggcanaacttatganatattttntcttattngaantaaacccacaa

SEQ ID NO: 7 - DNA, 586 bp, Homo sapiens
  misc_feature 63, 97, 101, 109, 158, 217, 246, 273, 289, 300, 304, 330,388, 459, 528, 531, 532, 540, 544, 572, 573, 578, 583: n = A,T,C or G
ggtactttttttttttttttttttttttttttttcggggttctgaggactcacaatttactgnggcatacagcaatttttatccattgtcctaagcnctanataacctntttcaaactaaaaactcaagtttttcaagcatggaaaactttttgaagnaattctttgattatttctttgctttctctctgttttctctttttgaatataatataganaattgagatgtcaaaaacaaaaaggcttntgaagggttagtttcttcccatttganatggatgcttaaacanatcactggggncttnagtctttattcttttttgaaaatacncattaaaggccataaattaccttccaagaaccttagctatcatcttatatattttganacatagtatttattcttggcaacttgttcaaaactagtttccatttctctaatttccattatgaatatctnctttgaaaattgagttagtaggccatatttcttattttattttttcttaacttttaagtccaggggaanatnngtggatgngcanggttttgttatattaaaaaaaacagtgnnccctngcccnggg

SEQ ID NO: 8 - DNA, 552 bp, Homo sapiens
  misc_feature 444, 446, 499, 504, 541, 544, 550: n = A,T,C or G
ggtacgcgggttttcttcagttaataataaaaagatggcattgacatggttaaattcccaggatccacaattatttagaaatggactaaatggctgctttcattgcttacaaaagtgtgttgaatttgatggagtttacattgagaaacaaagtttatattttttatctgttaattccatttttccacaaactttttgaagttccttcatattttgaatattaactacttatctgatgaatgacctgaatttttttcaattctctgggttgtctcctcattttgttaattgttttccttactatgcagaagctttttcagttgatgtaagtgccacttgtctagttttgcttccattgcctgtgattttggagtcatgtccaaaaaattattgcccaaaccaatgtcaaagaagcatttttccctatgtttttcttctggtagngntacaatttcaggtcttacatttaaagtctttattttcagttgatttgtgtaanataangttctaattttctttcttccctgtgtggatatccagntgncccacncc

SEQ ID NO: 9 - DNA, 148 bp, Homo sapiens
  misc_feature 43, 56, 79, 81, 82, 86, 91, 100, 102, 110, 130: n = A,T,C or G
ttccagcacactggcggccgttactagtggatccgagctcggnaccaagcttggcnaaatcatggtcataactgtcccngnntganattgnaatccgcgncncaattccncacaccatacgaaccggaancataaaggttaaagcctg

SEQ ID NO: 10 - DNA, 702 bp, Homo sapiens
  misc_feature 34, 44, 51, 54, 59, 89, 98, 101, 106, 113, 119, 132, 143,148, 154, 165, 184, 243, 249, 270, 295, 303, 312, 332, 346,365, 369, 390, 418, 447, 467, 483, 506, 538, 559, 560, 570,576, 588, 629, 633, 636, 676, 700: n = A,T,C or G
acttttttttttttttttttttttttttttttcnattcttcatnaatattnatngggcncctattatgtgcaaggcactacactaggcnctggggaanatncaaanataaatntgacanactgccctcaaanagcttacagtntagtntaggancatacagtctntggaaaaaatattttaagngtaactaacctcccccatcccacccccacaaaaaaaaaaaaaaaaaacctactaaactnggtttnttccatttacttttagtttancagcttcacgtaaaaagcataaatntgaaagtnttttaaaangcatacttttactggtaaanaaaattcattttcnttaaaaaaaatgctgaatntttnttgcaattaaaaaaaattttnagccgggcacgggggctcacacctgttntcctaacactttgggaggccgaggcaggnggatcacttgaggtcaggantttgaaaccaccctgnccaacataacaaaaccccgtttntactgaaaatacaaaaattacccggacgtggnggcgggcccctgtaatcccanntactccggangctggngcaggaaaatcnctttgaacctggggggggggagggttgcataagccaaaaancgcnccnctttactttacctgggcgtaaaaacaaatttcctttttanaaaaaaaaaaaaaaattttaaaangg

SEQ ID NO: 11 - DNA, 711 bp, Homo sapiens
  misc_feature 168, 170, 172, 182, 185, 187, 194, 221, 233, 270, 315, 379,411, 449, 513, 516, 533, 585, 593, 613, 624, 636, 672, 676,678, 683, 700: n = A,T,C or G
acttttttttttttttttttttttttttggggagaaataaaattagcgagataatgaataggacaactgaattgctctatttttaatttctctttaaaggggttaaaaatgcttcttctgtaatattatcagtaaggactttgtttcctttggccattgggagttaanancncagccgtcanaananattcttntgggatactcccctctgacctccacanaagtaaattttntccttgaggaggctacttgcaaattcagctaatgcanaacatggggttcatttgtttaaaggcttgcagccctagggcacanatgtaacgtatctgttcttccaattaatttctgacaagctcaggtgatgactttgatatgtcanactgtatatggtataggccttggttaccttanaaaccatctcttttcttaggtttctgcttaggaattgnagttcccacaggcagttctgcagaatattttcaaaaactgaatttggaaatggaggaccctgtnttntttaaaaaaaacacagnctcaatttcttctatcaattcatttagctatcatccttgaatatctctgggnatgggtanaatccctatgaaagggtttnctcaactgcangtaaaattctanaatattttttttatccccacgtaccttgggccgggnaccncncttangggggaaattccaaccnacctggggggg

SEQ ID NO: 12 - DNA, 175 bp, Homo sapiens
  misc_feature 7, 14, 20, 33, 38, 40, 46, 53, 56, 67, 70, 80, 114, 130,155, 161, 162: n = A,T,C or G
ggtaccnagcctgnaacccntttcgctccaagntagcngnagcaancctgggnggngtggaccatanccncatcaaaccnggggctaatagttctctacctatggggctgcctngggcaccacgggtctnccatgtctttgacatagctggtccngatggnntaaactatgcaat

SEQ ID NO: 13 - DNA, 622 bp, Homo sapiens
  misc_feature 84, 92, 460, 463, 480, 486, 528, 536, 550, 573: n = A,T,C or G
ggtactttttctttctttcttttctttcttttcctttttttccttccttccttccctcctctctccctcccttgcccccttccnttctctgncctttctttttttctctttcctttctttctttctctctttcctttcttttctttctttctttctttctttctttctttctttctttctttctttctttctttttctttctctcttccttccttcctctttccctccctccctccattcctttctctctttctttctttttttcccttccttcctttttgagacagggtcttgctctgttgcccaggctggagtgcaatggtgccgtcatagctcacagcagcctccaactcctgtgctccagcaattctcccgcctcagcctccggagtagctgggactacaaggcatgcaccaacatgtctggctattttttttttttccttttttagtagaggtanggncttactctggtgctcangctggncttcacctttggcccccactggattcttcccctttcggcctncccaaaanggctggggatttanacgaagtggagccactgggcccnacccaacatttttgtttggtaacaagggggaaacaaataaaccactttt

SEQ ID NO: 14 - DNA, 497 bp, Homo sapiens
  misc_feature 91, 126, 199, 232, 369, 393, 473: n = A,T,C or G
acttttttttttttttttttttttgggtttgtgtgtgtgtgtgtgtgtgtgtgtgtgtgtgtgtgtgggacaaggtctcactgctgcccanactgagtgctgtggcacagtcacagctcactgtancatcaacctcctgggctcaagcgatcctcctacctcagcctcctgagtagctgggaccacaggtatgcaccantatgctcggctaatatttttatattttgtaganacagggctttgccatgttgtccaaactggtcttgaattcctggacacaagtaatcttcctgtcttggcctcccaaagtgctgggattacaggtgtgagccaccgtgcccagccagaattggagatttttaaatacanaaattctcaagtgctttgcccaanaagggctacattttgtcaacttttctggctgctggagcaggtcaaaaagggctaatattcctgtcaagaggtggtaaatnccgcgtacctcgggcgcaccacgc

SEQ ID NO: 15 - DNA, 555 bp, Homo sapiens
  misc_feature 219, 376, 415, 416, 421, 442, 462, 489, 508, 511, 515, 533,543, 546: n = A,T,C or G
ggtacatttctattcccttctgaagtttattaacttcagttgtaagttcacttattttacttctaagaagcccaagatagtaagatttgtctaaaatttgcctctggggacctctcgtcccagttttcattccagtcaaaccttgttgtgttacagggcgatgggcaactttgatttgagaagacagaactccaccagtccccatgggacaaccacganaacctggtcttgctgtcccaggtggcattgcagttgccactcgaatatttcctgataggggtcgtatcccagaaggaggccttcctgttaacccaactccacctcttgaaacagggcgagctgctgaagatttgtgattgctggccattgtttcttnactttaatcgctccgcccggcgccggaaggagggcattnnccctnactcgcgggtgccttaccttntttctgagcccacgctcaantttttctcggctttcaggcctccccgngtacctgccccgggcgggncgntcgnaaaggggcgaattccacnacacttgtcnggncgttactta

SEQ ID NO: 16 - DNA, 381 bp, Homo sapiens
acgcggggggacgaggatatttcatgcaagattttcattgcccaagatccaagcagtcacgaaagtgactattcttttcatcctcctgtgaaggctttttgctgttgctgttgggaaggatgtttttcattgcatgggtgtgacaacataaccttttcccatctgaacaacaccctggcttccatgctatgggtcttttcgttgtgctaggaagatcacgaaagcaggtgtcagcaggaatcctgcagagccatcagtatctttcatgggaccataaatacatttaatgggtttgaaaaactcaagtaataatcgctggaaaatggattgattccctatttgtcaccatttgtttatgtatttattgatgtcaaggaaaac

SEQ ID NO: 17 - DNA, 175 bp, Homo sapiens
  misc_feature 4, 5, 9, 11, 20, 30, 34, 51, 77, 85, 87, 108, 113, 131, 147,153, 164: n = A,T,C or G
actnnacancncattcaaanggtttaattntttnaaaactgctggcattangaactttaaataaatttaactttctnccattgantntgtcaggacaagagacttaangtaancagatgctagtcctacantgagctatgccctgantgacanacaccatattnacaggcaaaat

SEQ ID NO: 18 - DNA, 212 bp, Homo sapiens
  misc_feature 92, 103, 107, 119, 121, 122, 142, 147, 151, 163, 170, 176,186, 197, 209: n = A,T,C or G
ggtactttttttttttttttttttttttttttattttttttttttttttttttttttttgggccgtttccacacctgccctttattggtctnttttaacaaangggntccaggcccttnannccttttaaacaccacccatnagggnttangaaggggccatnatttttngaaggnccaaaacttncccaaattttngagcccaaattnaat

SEQ ID NO: 19 - DNA, 522 bp, Homo sapiens
  misc_feature 418, 427, 428, 436, 438, 496, 498, 502: n = A,T,C or G
ggtactcgggttgattccattccattccattccaatccatgccattccactcgtgttgattccattctttccatttcattcaagttgaatccattcctttgcattccattccattccattcccctgcagtcgggttgtttccattccattccattccattcccctgctgtcgggttgtttccattccattccattcctttccattccattccattccattccattccattccgttccattccattccattccattctattcgggttaattccattccattccattccattccattccattccattccaatcgagttgattccattccattccattccattccattccactccattccagtcctttccattccattccactcgggttgattccaatgtattcctttccattccattccnttccattgnnattagaantngattccattgcttttgcattccattccaattcattccattccggatgaatgccattcncnttgnattccattcccatttccatt

SEQ ID NO: 20 - DNA, 710 bp, Homo sapiens
  misc_feature 483, 499, 539, 573, 641, 651, 679, 692: n = A,T,C or G
accaccaggcacacctcagtcttcttgacccagagcctgaaaactgttttcactgggttccaccagtcccagcaaaatcctctttgtatttattttgctaagttattggtggttttgcttacatctcatgattgatataataccaaagttctatagccttctcttgcagtatttggatttgcttgaaaccgggaaaactgttcccattaggcttgttaatgtcagagtgacactattatgaatctttctctccctttcctctgcctgtttcttctctctttctccttcaaacttgctctgcagctaaggaaggtgagtctactttccctgaggctttggggtcagagtatatgttgtttggagaaagagggcaatcaggactcttctgggacccagatgagttcttcactagcccttctgaaccccttgctccataattggtcttttatcctggctctgaatgaccctgcaggtcatcatggntttctttttttattgntttttttttttctgagacagagtctcactctgtcacccangctggagtgcagtggcgcgatctcagctcactgnaacctctgcctcccggatttaagcgattcttctgcctcagcctcccgagtagctggggactacaggtngtgccccacncctggctgatttttggatttttaagaanaaaatggggtttnaccatactggctaggctg

SEQ ID NO: 21 - DNA, 210 bp, Homo sapiens
  misc_feature 37, 38, 41, 49, 69, 94, 108, 113, 129, 133, 150, 157, 160,168, 170, 172, 174, 176, 201: n = A,T,C or G
actttttttttttttttttttttttttttttttcccnnaancaacaagngtttattgatcacctactgngtgcctggcactgttacaaatagtntgggggatacaaanaggtntaggatatggcccccncccnccgaagggtttacaatntacttgnganatcggacncncncncncaaataacgatcaatcaaaaattgngaatgctaa

SEQ ID NO: 22 - DNA, 278 bp, Homo sapiens
  misc_feature 58, 64, 68, 93, 108, 127, 133, 155, 157, 162, 170, 172, 178,183, 196, 214, 221, 231, 236, 237, 254, 256, 266, 277: n = A,T,C or G
aattcgcccttagcgtggtcgcggccgaggtacttttttttttttttttttttttttntttttnaaanaggggaaacatgtttatttttattntttagggttccaaanactggggtaggtaaaactnttgaanattaacaaggcaaactcaccananaaaanagtgtccngnttaganttganttggaaagatggnccggctttatttttgacncccgttngtattgctgnatcanntcttatacatgtatttntncaacttgccntcttttttttna

SEQ ID NO: 23 - DNA, 187 bp, Homo sapiens
  misc_feature 2, 21, 44, 62, 66, 71, 92, 104, 117, 124, 163, 173: n = A,T,C or G
anttcgcccttagcgtggccncgggcgaagtacaaatcacttgntaggcctcagtttctgcnactntgaanatcactagattgcactagctngtctctaaaatngctgcgactccanatacttngcactgaacagaatctagggtgtatgatatctgtttcanctaaaggctnacgggaaatgtcta

SEQ ID NO: 24 - DNA, 157 bp, Homo sapiens
  misc_feature 69, 73, 83, 127, 136, 141, 147: n = A,T,C or G
ggtacgcgggacaccagctccgaaatcaccaccaaggacttaaaggagaagaaggaagttgtggaagangcanaaaatggaanagacgcccctgctaacgggaatgctaatgacgaaaatggggagncacgatgcntgacnatgagngtttaccaaa

SEQ ID NO: 25 - DNA, 413 bp, Homo sapiens
  misc_feature 17, 19, 23, 54, 58, 73, 83, 103, 112, 127, 135, 136, 158,159, 167, 208, 220, 248, 277, 284, 287, 294, 298, 304, 310,320, 329, 330, 343, 361, 384, 387, 391, 405: n = A,T,C or G
cacccttaccgtggtcncngccnaggtactggatgaagctgaccaaatgttaanccgnggattcaaggaccanatctatgacntattccaaaagctcaacagnaacacccangtagttttgctgtcncccacacnnccttctgatgtgctggaggggnncaagaatnagctgactggaccccattgcgattcttctcactgaaccgantttcagaccctnaacggtgtcctgccagctgtacttaatnaatcgaaccaacggcgacgtggaagaggngggcacnctntattgangctntcttanactttntccatcactngactcagtnntcttcggtcaacncccgtgaggaagagcggncatgcactctcactcaaagagcngtngctnccgggatttccacngtattcag

SEQ ID NO: 26 - DNA, 627 bp, Homo sapiens
  misc_feature 218, 445, 448, 475, 521, 526, 530, 550, 611, 613, 619: n = A,T,C or G
acggaatagaatggaatggaacgaattgtaatggaatggaatggaatgcaatggaatggaatggaatcaacgtgagtgcaggggaatgtaatggaacggaatgcaatggaatggaatcatccggattggaatggaatggaatggaatggaatggaatggaatggaatggaatcaacccgagtgcaatggaatggagtggaatggaatggaacaaccanaatggaatgaaatgtaatggagagtaagggagttgaatagaatcaatcggaatgtaatggaatggaatgcaacggaatggaatggaatggaatggaatggaatggaatggaatggaatggaatgatacggaatagaatggaatggaacgaaatggaatggaatggaatggaatggaatggaatggaatggaatcgttccgagtggaataggagggaatgtattccantgnaattggaaaggaatggaatcaacccanagtggaatggaagggaatgggaatggaatggaacctaatagaatanaatcncccnacaggaatttaattggaaangactggatggaaatggaatgggaatggaatcaaactccattggaattggaaatggattccncntccctngggcccct

SEQ ID NO: 27 - DNA, 389 bp, Homo sapiens
  misc_feature 34, 70, 87, 98, 121, 124, 132, 136, 161, 199, 215, 233, 248,268, 327, 331, 337, 339, 351, 358, 360: n = A,T,C or G
actttttttttttttttttttttttttttgcganatggagtcttgctctgttgcccaggctggagtgcancaaagtgatctcagctnaccgcaacctntgcctcccgggttcaagcaattnttntgcctcancctnttgagtagctgggactacaggcgcnccccccatgcctggctaatttttgtatttttagtaaanaaggagtttcaccatnttagccaggatgatctcnatctcctgaccttgngatccacctgcctccccggncaatggcatgatcactgcttactgcaacctgaaacctcctgggctaagcgatcctttcncgantggctnanactacaggagcncacccancnggcccagttaatttttaaattatttataa

SEQ ID NO: 28 - DNA, 381 bp, Homo sapiens
  misc_feature 177, 293, 305, 306, 307, 325, 327, 339, 344, 345, 346, 356,357, 372: n = A,T,C or G
aattcgcccttagcgtggtcgcggccgaggtactggaggatttcatatatcagctattgactaattccaatcagtgaattagcttagcctaggtagatccaattagccagttatctaaatagcaactgctgattcatcaaggctgttccaaaatagtggatgtgagcagcacatgcntacaccaagaaggagagcagggccctgaaatactaacctggacagaaagcatcacgtggctttaccatcagcttaaactctccactatcagggtttagttttgcctgcttctaagncctaaactggcnnnaaccttaactcagatcancntttactttttanaggtnnngagtggagcnnggggtaaattcgaanatgaaccta

SEQ ID NO: 29 - DNA, 283 bp, Homo sapiens
  misc_feature 2, 103, 111, 123, 142, 146, 149, 151, 154, 165, 172, 175,188, 196, 202, 205, 208, 212, 227, 233, 239, 245, 247, 259,262, 279: n = A,T,C or G
cngggcgattgggccctctatatgcatgctcgagcgggcgccagtgtgatggatatctgcagaattcgcccttgtggtcgcggccgaggttctttggcctctntgggatanaagttattcagnaggcacacaaacagaggcntttncananttnaactgctcatnatatggnggnaagatgaagacangatggtgngccacngtncgnattnatttccaccttggtnccttgncacganctttcntnggtttgtataanctnatcatcgctttaataanccct

SEQ ID NO: 30 - DNA, 316 bp, Homo sapiens
  misc_feature 1, 24, 27, 142, 210, 220, 239, 282, 306, 309: n = A,T,C or G
ngcatgctcgacggccgccagggngangggtgatggatatctgcagaattcgcccttagcgtggtcgcggccgaggtacttcattataagtaaggtgtctctaaaagggacagatctcctagacccctccttaaccaagtanccagtcctgatatcattaatgggtgatggacaaactaataccttctctgcccgcagatgggctgaggntggaaactcncaccattgtcttcttgcangtggtccccggccaaacgtttaaggctggatttttaatccatnggaagacatttttcagacaacttncanaaattgt

SEQ ID NO: 31 - DNA, 461 bp, Homo sapiens
  misc_feature 27, 30, 184, 237, 320, 327, 341, 356, 363, 364, 366, 371,382, 398, 405, 407, 410, 411, 423, 428, 432, 440, 443, 456,457: n = A,T,C or G
acttttttttttttttttttttttttnganacggagtcacctaggctggcatgcagggatttgatactggctcactgtaacctcagcctcctaggctcaagcgattctcctgcttcagcctcttgaatagctgggatttcaggcatctgccaccactcgtggctaaattttggattttcagtanagaccggatttctccatcatggccaggctggtctcaaactcctgatctctggngatctgcccacttcggcctcccaaagtgctgggattacaggcatgagtcaccgcccccggcctcattgaaaaatttatttttnaataccnaactggattggttnttttggggcaaaaancgttttnncnaatgngcttttttttncaaagtattttttttnaattcananaanntttaaatttttngatanattngaaaaaantanatttggttagttnnaata

SEQ ID NO: 32 - DNA, 366 bp, Homo sapiens
  misc_feature 250, 305, 310, 311, 322, 325, 335, 337, 339, 353, 358, 359: n = A,T,C or G
acgcgggactcaaagagactaacagtattgtaaattctaagctctgtaaagaaattccaagttagtttaactacagagctacaaaaatgtcacagaaaattgttcctagtggcaatattaaagaaataaaaattattaggccaggcacggtggctcacacctgtaatccttgcactttgggaggctgaggtgggcggatcacctgtggtcaggagttcaaacccagtctctactaaaatacaaaaattanccaggtgtggtggccatgcctgtaatccagctacttgaggggctgaagtatgganaatcnntttgaacccangangtggaggctngnantaagcccaaaatgnggccnnttgtatt

SEQ ID NO: 33 - DNA, 164 bp, Homo sapiens
  misc_feature 6, 22, 30, 68, 73, 93, 96, 98, 102, 122, 126, 127, 130, 137,147: n = A,T,C or G
aattgngccctctagatgccangctcgagncggggcgaattcgagctcggtacccggggatcctctanagtcnacctgcaggcatgcaagctnacntnttcnattgagaagcccaaacagcnttgnnggncatcatngacctggctncctcctgcactgaaaaa

SEQ ID NO: 34 - DNA, 162 bp, Homo sapiens
  misc_feature 11, 37, 46, 52, 55, 79, 117, 127, 133, 140, 150: n = A,T,C or G
acgcgggggcngtgctgttgggagttgcttggaggtnggcggcgcngggctnaangctagcaaaccgagcgatcatgtngcacaaacaaatttactattcggacaaatacaactacnaggagtttgngtatcnacatgtnatgctgcccnaggacatatcca

SEQ ID NO: 35 - DNA, 292 bp, Homo sapiens
  misc_feature 87, 134, 148, 154, 156, 170, 176, 180, 198, 209, 211, 213,222, 224, 230, 234, 241, 246, 248, 252, 256, 258, 265, 270,272, 278: n = A,T,C or G
acagcactccatttacacagagtaaccccactcttgattaatctgttctaaagtgccagtattatttacacttttttttttttttanccaaaagtctggccagttgtggcatcaggtgaagattgtcattccanctctattatcattnacattnancaagggaaattctnataatncagntctatgtccctggtcccngaaggtttacntngncattggcancnctaaantggngaacttnttccngntctnggancntgaaagnggagncnaggtantggctgttcaaagg

SEQ ID NO: 36 - DNA, 336 bp, Homo sapiens
  misc_feature 7, 134, 142, 144, 152, 157, 172, 175, 180, 193, 207, 209,230, 243, 246, 247, 253, 260, 266, 271, 273, 275, 291, 293,307, 308, 313, 332: n = A,T,C or G
accattntatttagtgttgtaggaaatgttgggttacttcttaaaaacgaaaccaaagaaattcaaaagtcccaaagaaagaaaacaggaaataataattctataatccaaaaacgttgggcgatccttcaatnggaggaananggcgtcanttaantagctcacactgtanatntgganacaccatatgganatacggagttaagntngggtggatactaggaattaanttctccccctaangcnntaaatntttcagncttganagatnantngtagttctagaaaaananataaagtttactgnnagaangtgggagggaaggacggcntggc

SEQ ID NO: 37 - DNA, 312 bp, Homo sapiens
  misc_feature 31, 34, 38, 79, 112, 154, 195, 270, 281, 286: n = A,T,C or G
acttttttttttttttttttttttttttttnganacanagtcttgctcagttgctcggttgcccaggctggaatgcagnggcacaatcgcagctcactgcagccttaacctntgcggctcaaacgatcctcccatctgtttttattctgtaaanatggtgtctcaccatgttgcctgggctgatctcaaactccngggctcaagtaatccttcctccttggcttccctaaatggttggattacaggtgggagtcactctgcctgccctgncaagtcttttnccatnaaaaactttttatgttttttttaaat

SEQ ID NO: 38 - DNA, 545 bp, Homo sapiens
  misc_feature 543: n = A,T,C or G
tgagaggaagttccatcgcctaggttctgggagaagcaatacgtcacaatccccactaaggagagggctcaggcaaaagaggagagtgacattgcctagggcatgggcccagagttatatcacaatgaacatgtggacagggccaacgcagaagtgttaaatgacctgtgtgctgggcccagagatatgtcacagttactttaatgggcaaagcccacatcagataaaagaggcatctcaaatatgttgtaagttgatgagccctgagatatgtcacaatgtcccccccgaacagattcaaggcaggagattcacatcacctcggtgctgagcccaatgaaatggcacagtgtctcctgagtgcagggccaaggcaaaagagcaacaccaacttggtattgaggccaaccatatgccacaatccactctgggagcagttgtcaggcaggagaaaagagtcacaacacctgggttatggcccaatacatatgttacaatcttgcccatgggcaaagcccaggttgagacaggagaatcacattnaa

SEQ ID NO: 39 - DNA, 565 bp, Homo sapiens
  misc_feature 546: n = A,T,C or G
acttcagcctggtgacagagggagagtccatctcaaaaaagaaaaaaaaaaatgagtaaggccttgtcaggagctcaattcttatcctttttcccctaatggttgtggatgtagagttgtgctcattaccatcttcctactcaatttttttttttctcatccatagtgaaatcttaatcttcaaatatcatgaacctagtttttccacactggccagcccatctttgccttttcctctcacgctttcaactaatgtaaacaattagtctggctatggtctagtttaaggaagtaatttgaacacgaatcctccaaagtggctacatttgttctttctactgtcacatataagagtgatgaagtgcattgattttaaaagctggtgaaatttgggggcatagttccatgtcagtaaaaaaaaatccatgactaagtagattaaaattatgaataagaaaaatagcaacaccgtattttaaaatctacttcctatgcctcattgctcattaatcagggaaattatcagtagatatttataagtgaggnatcttatattggttactta

SEQ ID NO: 40 - DNA, 560 bp, Homo sapiens
  misc_feature 457, 486, 520: n = A,T,C or G
acgcgggcaactacgctaaagaattttgagaacaccagtgtgtctacattcagtttgctgtcgtggttaggattcttttcagcaataattctgccttgactagccagtctacctttcctgtgcttgcagtcttaatgctttgtttttttgtttttaaaggaggaaggctaaaatgtcaattactttatccctaccaaagttcatcttatgcctcttcaaatctacatagcttatgtctccaacttatgttctcccattcaactaattaactattaaataagcattttgtttccctttagctaatttaagttttcaaataaggccacaacaacaggtctctgacaatctccaaatatccttgggtttatcacatcatcctatattttccaacagggacttgggctctaccaagtattcagtataaatctttgtaaagtaaaacatggccgggtgcagnggctcatgccttgtaatcccagcattttnggaggctgatatgggcagatcgcttgagcccacngagtcaagaccagcctgggcaaaatgggtgaaaccccatt

SEQ ID NO: 41 - DNA, 560 bp, Homo sapiens
  misc_feature 473, 506, 509, 519, 524, 532: n = A,T,C or G
actaaggttacagctgttctgttggtcctaggctctgagtagacagagccaagatactgcagtcactgggatggaaagatggagtgcctccttggcagtttgtttccatggggttagaagttgtagctgctcagctgcagaatggtgtgctgccattagtaggtgtggtgtagtggcagtgaagcctagggtatgggaagatacagtggctatagacccccaaatgagaaggcaccctagcagtggcttcagtctcaagatgccattacacagcagcagcttggataatagggcaggaggagacacaatgtgggctccttgtttggagtaacatagtcatgtgaactccaggcaacccctcaggctgggcctaaggacctgtgaggactacagtgatctccatgagccaaagattgtgggtgtccacattttaattttgatttgctgaaaggccttcctgcataccttttctnttgtaaggagagtccgccttggctcttgacctnatnccactagganagacnagatggtnaaagcaaattgttcattcccttttttat

SEQ ID NO: 42 - DNA, 170 bp, Homo sapiens
  misc_feature 77, 79, 96, 103, 108, 144, 147, 165: n = A,T,C or G
gaattgggccctctagatgcatgctcgagcggccgccagtgtgatggatatctagcataatttccccttagcgtggncncggccgatgtactgaantatactngtccnatgctacaggaattctttggaattttattactatgnttnttctaagaagaggtatgnaccaa

SEQ ID NO: 43 - DNA, 437 bp, Homo sapiens
  misc_feature 369, 385, 415, 424: n = A,T,C or G
acgcgggggactgagaacagggacaggcgacccgacccccagggcccggtgctcaggacagagtaaaaggccaagctatgatagcaactggtggagtgataactggcctggccgccttgaaaaggcaagactctgccagatcacagcagcatgtcaacctcagcccgtctcctgctacccaagagaagaagcccatcaggcgccggccccgggcagatgttgtggttgttcgtggcaaaatccggctttattccccatctggtttttttcttattttaggagtgctcatctccattataggaattgctatggccgttcttggatattggcccaaaaagaacattttattgatgctgaaacaacactgtnaacaaatgaaactcangtcattcggaatgaagcggtgtggtggttncttttttanatatttgcattct

SEQ ID NO: 44 - DNA, 442 bp, Homo sapiens
  misc_feature 327, 386, 394, 407, 411, 426: n = A,T,C or G
actggtgtggagtgaagcagggccacttctatggagagactgcagccgtctatgtggcagttgaagagaggaaggcagcgggtgagtctccaaggacagggcctgcacccctcagacccagaggcaggacttcctgaaggcccctgcctgagagcttctcaatcagtgctggcccctatgtttggctgtaagaggctgaaagtggagagtgggaagggaggggacatttaggtcctatatagcctcgttgagcccttcaaagggacatctcatataaacataccaactaattaaaaatagtgggtttgctatttaacctcggcattnagacaactcccactgaatgagtggctcacacctgtatcccatcactttgggaggccgangtaggcanatcacttaggccngganttcaacacatcctgntgacatggagaaaact

SEQ ID NO: 45 - DNA, 143 bp, Homo sapiens
  misc_feature 30, 143: n = A,T,C or G
actttttttttttttttttttttttttggntagtttctatgactatgtctaacagtttagtaatcttttcttctgcaatgcctaattgcctttaatcccatctggtggtggttttgttgttgttgttgttgtagatgaaaaan

SEQ ID NO: 46 - DNA, 331 bp, Homo sapiens
  misc_feature 165, 244, 246, 256, 264, 269, 275, 285, 291, 301, 302, 306,328: n = A,T,C or G
acgcgggatatgcttgcaaattcaatttagttaaattaacacagtctttaaaatctctaaatattgatctccaggtttgaaaactttctctaaataatatttatgccagaattttgggcagccaattcatagtcatgatatcttcaaatatcctaaccttatcancaaaatcttttgttcttccaaatttagctacttatttaaaactacataatgtcttttttttccttttttctttgcaagntnacataatgtntttttttncttgngctacnaagatgtttncctatntatgaaaggnnctanattattgccagttgcgggtggntta

SEQ ID NO: 47 - DNA, 299 bp, Homo sapiens
  misc_feature 4, 59, 83, 119, 158, 164, 166, 169, 173, 179, 188, 200, 204,240, 250, 254, 269, 279, 297: n = A,T,C or G
atgnggattgggccctctagatgcatgctcgagcggccgccagtgtgatggatatctgntggaatatccgcctttcgagcggncgcccgggcaggtacaaaaggaacttgcacatttcncaaaaagcatttcacttgaacctctgcttaaaaaactgnttcctnancancgtnatgaanacaaaccantaaatgttaatnaaanctacaagatttatggctctgagagaaatatactgantgatgcatcntaantatccacaaataccnattaaattgnaatgtttaatactatatnat

SEQ ID NO: 48 - DNA, 632 bp, Homo sapiens
  misc_feature 502, 552, 567, 592: n = A,T,C or G
acaagtagagaatgtctttactttttccaaccactgccatctcttactctgatggatttttcttcccagccctcagatggaaatgcagaaatcacctgtcttctgcttcgctcacgctgggagctgtagaccggagctgttcctgttcggccatcttggctcctccctgccagatagctcttattttgagctctgaaggctgagaacttcaagatcaaggcaccagtagactcagtgtcttatgagtgctactatttgcttcaaagacgatgccttcttgctaaatcctctgcagagagtaacagtgcaatttgacataaacagctccttgcctatctggctgcccagccaagctgggtcctacacaagttgctataagagctttctacaacaagatctgactactgaaagattcagatcacttgacttttagcttgaagagaacattttattagtggatagcgttgttggaattcaaaaacaacatattgcatagaaatgngtgaagattgcattaccttatggatgataacaaaatgcaaatctcaaggnattttaaacagtgtnaatccaaattgtactgaactcaggngtttctaatgttctatggattacttgcgcagtgaaggagg

SEQ ID NO: 49 - DNA, 485 bp, Homo sapiens
  misc_feature 86, 125, 172, 230, 264, 273, 358, 398, 458, 462, 485: n = A,T,C or G
acttttttttttttttttttttttttttttttgccaatatttaaaaatataattgatatttgtatgttgaccttgcatcctgcatntttgctaaactcactttagttccaatagttttcctatanattttagggggattttctatgcaaacaatcatgttgtctgtgaatanacatggcttcatttattttcaatctgtatgtcttttatttcttttgtcttactgcaanggctaggacctgtagtgcaattttgaatatgagnggggaaagnggacatcctcagtttgttcttaatcttacaaggggagcatttagtcattcacctttgaatataaagttagctgcagcttttttgnggatcccattatgaggttgaggaaatttccttctaaattngtaagagttttgatcatcaacaaatgtaaattctatcaaatggttttctgatctattganagancaaatgcttttcttcttatctgn

SEQ ID NO: 50 - DNA, 148 bp, Homo sapiens
acatttacattctgtaagagattgagcctgaactctcttagtcataaaaacatcaaatggccacatgtccactaccaagcttcttctatgttaaaaaaataataataaagcagttttaacctgaaaaaaaaaaaaaaaaaaaaaaaaa

SEQ ID NO: 51 - DNA, 491 bp, Homo sapiens
  misc_feature 215, 287, 362, 385, 398, 407, 412, 425, 454, 469, 470, 484: n = A,T,C or G
acgcggggtatggggtttctttttgaggtgatggaaatgttctggaattagataatggtaatggttgtgctatttcatgattatactaaaaactgacttttaataatccactaaagtgaattgtatactttaaaatgttgaattttatgctatgtgaattatatctcaacttttttaaaaaagaggcaacatcagaatcctagaattggaagagncccctgagaattgtgtggcccaaacttcaagtcttggcagttgagaaattttaagggtattgccaagaaatntgtctttaaaaataaatttgaagcaggtttctctcttgcttagaacccaaagagacttgagaaggacagctggcnttaaaaaccttatgatccccaanacagggtggccanaccatgcancagtngcctgtcaacatntgagacccttcttcataaattgaaagaanaatacctgacatggnncaactgcctatatnccgctct

SEQ ID NO: 52 - DNA, 503 bp, Homo sapiens
acgcggacacaggcagtcactaaagggatggcaaagacagaaagaaatcttactgttttatgtaactaaatggttacaatccattacatccatattttcaagataaaattgctaattttttttcacatttttatgactagaggtaggttttacattttggagtcaggtgacagattaggcccatctcctcctaggaaaccaggcgattgagtgttatttcccatttcagagatggctttcaggtccttaggaaacatagccaagttataagactagagacttaaatttatatacattgaaagggagggagaaataaaatctggaaaagaaaaggggaaagggacctcttcccttttattttcagcagggagaactatgcctcttatttttaatttgatttgccttacgtcaacagcagtattttgatctataccatggctgcctaagtgatgtagcgtgattgcagtaaaatatgccttgatctcacatacactttgtctagg

SEQ ID NO: 53 - DNA, 177 bp, Homo sapiens
  misc_feature 4, 36, 70, 76, 90, 95, 102, 121, 134, 147, 157, 168: n = A,T,C or G
actntgtgatcttgctgaagactacaggcagccaantggttccagatacttcagctttgtgtatcttctnaacttnatattaatataagnttctnaagaaancccaagtttttaatcgttnttgatttaagganaaaaaataatcanaatgaatttnttgcataaacnttaaagtca

SEQ ID NO: 54 - DNA, 255 bp, Homo sapiens
  misc_feature 166, 179, 182, 189, 212, 214, 227, 232, 233, 241, 247, 249: n = A,T,C or G
acgcggggaggctagccaggtgtggtggctcatgcctgtaatcccagcactttgggaggccagggtgggtggatcacttgaggtcaggagtttgagaccagcctggctaacaaggtgtaaccccatgtctacaaaaaaaaaaaaattagccaggtgtggtggtggncacctgtaatccnagntactganaaagctgaggcaagagaattgtntngaactggggaggnggctnnaccagggnaggcanangttgaa

SEQ ID NO: 55 - DNA, 393 bp, Homo sapiens
  misc_feature 66, 72, 123, 128, 130, 132, 134, 141, 143, 145, 150, 153,157, 161, 172, 184, 186, 207, 214, 246, 247, 249, 256, 257,261, 288, 302, 324, 349, 352, 360, 363, 367, 373, 381, 383,390: n = A,T,C or G
accactttggaaatgcactgactctttaaaagccacataaatgttcagccattaaattcaaaattnttatgncttaataaaaatgattccctcccatctcaaatcattattttctttcaactntcatntncngnaacctgntncncaaanccntacnttgnttatgggaagntttttgaaaccntntttttatcttcattcttggtnggaaaanaaaaatctattattgaattctttcacacactnncnttaaacnntttngatttttccttatccctttactttcanaattttattaaacngggttatccctacattgggatnataccaccccttgggaagggggggngcnttggccanccnaaancaaccncatggggnangggcagncta

SEQ ID NO: 56 - DNA, 351 bp, Homo sapiens
  misc_feature 15, 204, 218, 238, 248, 254, 264, 276, 279, 291, 314, 321,324, 329, 331, 334: n = A,T,C or G
accagcggatcgcancgttgccatgaaatctgtgcatttcaaggcccgtttgggatgtgggttaactcagtggttctcaggtgggggaggtatcatgatttaccctccagggaatacttggccatgtttggagaccttttttggttgtcacagctaggggaggggtgctattggcatctggtgggtcaaggctagggatgccgntgaatattctacantccacaggaccaccccgccncaaagaaggntcccanctgatatgtnaggcttgccacnggnggggaaaccctnattaaagtattaaaaatttgaanctacatnttntttantnccncggggcttttgttttta

SEQ ID NO: 57 - DNA, 517 bp, Homo sapiens
  misc_feature 418, 432, 440, 448, 479, 485, 511: n = A,T,C or G
acaaccactatggggaatagtttggaggtttctcaaaaaactaaaaatagagctaccataagatccagcaatcccactgctgggtatacacccaaaagaaaggaaatcagtttatctaagagatatctgcactcccatgtttattgccaacactattcacaatagccaagatatggaagcaacctaagtgtccatcaacacatgaacagataaaggatatgtggtatatatacgcaatgaagtattattcaaccataaaaaagaatgagatcctgacatgaggtcattatgttaagcaaaataagccaggcacagaaagacaaacatcacatgctctcacttatctgtgggagctaaaattaaacaattgaaatcatggaaatagagagtagaaggatagttctagaggttaaaagtnctcggccggacccnttaaggcnattccacncctgcgccgtactatggtccactcggacaantggggnatatggatactgttcctgggaatgtntccgtc

SEQ ID NO: 58 - DNA, 210 bp, Homo sapiens
  misc_feature 17, 86, 90, 97, 117, 118, 120, 129, 134, 143, 158, 162, 170,171, 186, 205: n = A,T,C or G
acggccagggctatttnttgaatgagtaggctgatggtttcgataataactagtatggggataaggggtgtaggtgtccttgtggnaaanaagtggnctagggcattttaaatcttnnancggaaagcntatantcacttgcncccgctcataagggnttgnccttggcnnggtttatatatagtnggggggttgcgtgtaattnaatga

SEQ ID NO: 59 - DNA, 178 bp, Homo sapiens
  misc_feature 17, 48, 49, 54, 66, 72, 73, 76, 92, 103, 104, 123, 151, 169: n = A,T,C or G
acctagaagagaggcgnttcaaagaagtagtgaagaagcattctcagnncatangctatcccatcncccttnnttnggagaaggaacgaganaaggaaattanngatgatgaggctgaggaanagaaaggtgagaaaaatgaggtaaatcnttattgattgatgaaaanccaaaaatc

SEQ ID NO: 60 - DNA, 198 bp, Homo sapiens
  misc_feature 15, 24, 37, 100, 122, 137, 171, 176, 179, 189, 194: n = A,T,C or G
cgcggcgagctatcntttgaatantgagacagaaatnaatcaatatagaggctgtgcacggtggatcacgcctgtaatcccagcacttttgggaggccanaggcaggtggatcgagaccatnctggctaacatggtnaaacccggtctttactaaaaaatacaaaaatttnctgcntgngggtaccggncaccngtat

SEQ ID NO: 61 - DNA, 567 bp, Homo sapiens
  misc_feature 295, 367, 409, 411, 417, 443, 445, 446, 450, 451, 457, 458,467, 468, 469, 483, 484, 487, 488, 494, 519, 520, 553, 565: n = A,T,C or G
acgcgggatatcaataatgggtctgatatagactgaggattcatattaactccacatgcctccaaaaaggcaacctagagtcatgactaatacatggaaattggtgcctccacccgcagctgaccctttggtctcttaagaaaagaaactagaactttttaaggtctgagatcaagatcttactttttttgtttagtaagtatttagcaaatatttttgaaataattttccatgagaagcatgaacatgagctacatgtttgagtaaggatgtaattgtagcttccacttgcctntcaacatggaaatgctagaagttttacttacagggttcaaaaacatgtatacagtcatccctctgtatctgngaaggattgattccaggacccttcacggataccaaaatctgnanatgctnaaagtctttgacataaaattggcatntnntttnncatatnnacttatgcnnntctcctatattacnntannattttntctacattacttatttttaccaaanncaatgtaaatagttcttttaactggcatttggnttaaggggaacnac

SEQ ID NO: 62 - DNA, 456 bp, Homo sapiens
  misc_feature 21, 84, 108, 143, 179, 195, 202, 217, 222, 239, 296, 313,326, 343, 357, 410, 433, 443, 454: n = A,T,C or G
acgggggagactgtggagcanttattcaaaactcggagggagtcggcatgggaggatccatataatttcacgctaaattgtgcncgtctgtttgtgaaatgtgaaggngcacatttgttttcctggaaggcaaatttcatttnttataccaccttgccagaaagatctgtgatcccaangaactgctgttgttanaaacaangacaatcattttgangcaanaaatgatggttccaacnagggagggagtaaccatggatattgctgaaatgcagttggtgccagggatttattangacatgattagttctgnaatcatccctaangtagcgatgaagtctcnctatgttgcccagnctgatctcaaacttccggctctaagtgatcctcccacctcatcactcccaaangtgctgggaattaaaggcctgancccatttgtngcccaaacctnac

SEQ ID NO: 63 - DNA, 608 bp, Homo sapiens
  misc_feature 397: n = A,T,C or G
ggggactgagaacagggacaggcgacccgacccccagggcccggtgctcaggacagagtaaaaggccaagctatgatagcaactggtggagtgataactggcctggccgccttgaaaaggcaagactctgccagatcacagcagcatgtcaacctcagcccgtctcctgctacccaagagaagaagcccatcaggcgccggccccgggcagatgttgtggttgttcgtggcaaaatccggctttattccccatctggtttttttcttattttaggagtgctcatctccattataggaattgctatggccgttcttggatattggccccaaaaagaacattttattgatgctgaaacaacactgtcaacaaatgaaactcaggtcattcggaatgaangcggtgtggtgggttcgcttctttgagcacatttgcattctgataagatgaaaatgcttgcccattcaccatggggattggcattttcattttcatttgtgctaatgccatcttcatgaaaaccgtgacaaagagaccaaaatcataccatgagggatatctttcccagtcattgacattcacacgctaagaataaggagcaaagcaaatg

SEQ ID NO: 64 - DNA, 534 bp, Homo sapiens
  misc_feature 202, 272, 303, 338, 348, 361, 362, 364, 367, 373, 374, 397,402, 407, 409, 413, 451, 456, 462, 482, 486, 500, 507, 511,523: n = A,T,C or G
acgcggggcggtcgaaaaagagataaagttgaaggaaataaaattggcacggagtctgggaaagtagtttccctaaaggagtcttagaaatagggttggtctggaacctaaggggcggagccgacgcgtagagccgctttgcgcgtgcgcatcacctaggcggttagatttgaatacttcactgaggcgagccgggcgttgngagcggactgctagaggcggctgtctgtttccgctctaaggaaactcagagcgtgtggaccccaaacaantctgcgcaaaatttgtcgaggaggtttgccncggcagaaaagatttcttcaaaaatggatggggtngccttcagangcttattaagaanntnctntttatnnagaccccgttgaagacggctttnttcantattnancccnaaggagttctctcatgacctctaaggtggaatgaacanttcangaaccnatgcttgagaaaaagaaaantctntcgagcagctttcngatctanaagnttccaacgagtncttataaatac

SEQ ID NO: 65 - DNA, 554 bp, Homo sapiens
  misc_feature 208, 218, 254, 276, 295, 434, 440, 445, 456, 466, 472, 475,479, 484, 493, 506, 507, 513, 520, 523, 524, 541: n = A,T,C or G
acgcgggcaccacgatgaaagggcactggcaatgggaatggcatctatagtgttggcattctatatttactttcattatcatttagaaggatccttctaatcaatttaatagacaaatatttgctgaacacatagtagatacaaggtattgtgctgtgggggttgtgagggtaacagcgtgtcttctccttaataacaagcttaatancattaatagngtgaattactatttagaaggattagaaatattaacncaatgggaggctgagacacaanaatcacttgaacccagcanacggaggtggcagtgagctgagatctgcactccagcctgggcaacaagagcaaaactctgtctccaaaaaaaaaaaaaaaaaagtcctgccgggcggcccgctcgaaagggcgaaattccatccacactggcgggccgntactantggantccaagcttcngtaccaaacntttggntanatanatggnccatagctngtttccctgtggnnaaattngtatccnccnnaaatttcctcacaacantactagcccggaa

SEQ ID NO: 66 - DNA, 564 bp, Homo sapiens
  misc_feature 37, 41, 51, 66, 74, 85, 95, 105, 152, 191, 201, 203, 219,228, 243, 254, 264, 268, 270, 281, 319, 370, 391, 393, 400,403, 410, 463, 471, 479, 504, 511, 515, 518, 549, 558, 561,562: n = A,T,C or G
gggactttttttttttttttttttttttttttttganacanagtctcactntgttgcccaggctanagtgcagnggcgtggtttntgctcactgnaacctccatntcccaggttcaagcaattctcctgcctcagcctcccaagtagctganattacaggcacctgccaccacgcctggccaatttttgtntttttagtananacagcgtttcactatnttggccacnctggtcatgaacgtntgccctcaggngatctgcccncctnancctcccaatgngctgggattataggcgtgagccaccgcacctggcccanttaacttctaaaaatgataatgatcatggctcaatttggggtgatacttgngtcggggctcattgacatttntnggtaacncangctttgntgtgacagcctggaaatgatactgcaatttggccccacacaggaaaatatttnctattttncacaaaanacttttgtttgtttggttttttganaaaaaancctngcntttattggtcttgactgggagtgcaaggggnaatgatctnaanntt

SEQ ID NO: 67 - DNA, 560 bp, Homo sapiens
  misc_feature 519, 539, 553, 559: n = A,T,C or G
actgaagtcaaaaacagcacatgggccttgcagcatctggggtgcagcaagcagggtgaagggggagactgccttagaatggagggtggcagctccaaggaatgggaaagcttctcaatccctttggtctaagtgggaaaacaaaagagctggcagcaatctggggtgagttagggcccaggagctaaaaagcaggccggtttcatgataacgagcttcttttttgtgtaggatgactgtagcaagtttatctgcaagacccacagggacctcagcaatgacacattgtgggatagattgggaagccagattaggtaatcacagagctggagcacctctctaagaaccagctggggctctgcaggggtgtgacaagtgctcatccggatgagggactcacagagacaactggcacattaaacagattgcactgtcatcttcctgacagcacgcccacaaaggaccatgctcagctgtcatcttcaaagtgtgggagcagcttccccccaaccctggcangaggccacaagatccaagtngggacccagcctcnacaagng

SEQ ID NO: 68 - DNA, 562 bp, Homo sapiens
  misc_feature 29, 85, 129, 162, 185, 194, 196, 216, 243, 297, 340, 342,348, 355, 356, 360, 364, 376, 379, 385, 389, 403, 404, 412,416, 420, 443, 446, 459, 470, 481, 495, 497, 500, 501, 505,506, 510, 512, 524, 528, 536, 546, 549: n = A,T,C or G
acttttttttttttttttttttttttttngggacggagtctcaccgtgttgcccaggctggagtgcagtgacacgatctcagctnactgcaacctccgcctcccggttcaagcgattctcctgcctcancctcccgagtagctgggaccacaggcgcacatnaccatgcccggctaatttttgtnttttcgtananacggggattcaccgtgttanccaggatggtcttgaactcctgacatnacgcagtccacccgccttgggctcccaaagtgctgggattacaggctggagccnctgcacttggccattttttttttttttttcctgaaacaaagtntnaccctnttgcccnngctngagngcagtgacaatnatntcgggnttantgcaacctttggcnnctgggttnaaancganttttcctgcctaaccccttgaantanctggggattacangctcaatgccnccacccccagntaacttttgttttntnccnnccanntttngntcaaggctggtntttnaactcctngccctggaanttnccccacctttggc

SEQ ID NO: 69 - DNA, 179 bp, Homo sapiens
  misc_feature 77, 119, 125, 131, 146, 148, 152, 177: n = A,T,C or G
acttaaagtaatggtgatccttattccagggcttcgccgccaggatttcttgctgctgtttcttgtcgtatttgtanatttcatcgatactctgagcttcctgcatgttgttggccagntcccanggttantctgggccataccgntncacngacgccgtcttcgatcgaggaaacnga

SEQ ID NO: 70 - DNA, 710 bp, Homo sapiens
  misc_feature 607, 689: n = A,T,C or G
accaccttcttaacacaaatgatttaatttaaccattaagtcaagtctgcaatatcaatatcatcttgctcattttacaagtcacaaaaatgaagttcagcaaccttagttttggagctggtattaaaacctgaggctcgtcaacgttaagtctgtgttcctgcccaacaggcagtatagtcttacaaagacattctttctcttccagtctctgaatattctgaattatcacaagttaagtgactttgatgtggtcttctctcccttcctcctttcatccatctatccatcttttcattcatttagtgatgtcccctttatgcactgcagtgaaaataaaaatgacttttactcccaccatactgcagggagctatgactcatatttttagaaactgatcttcctgggacttttccacctgtatatatttctcccaaccagcttggattttgaataaggaaccaaggttttttggctttactattgaacattttaaatcataaacattggattcctctacataatggattctaattatttaaataaaagcctgggccgattatttggatgaaaacatatttctattttatttttcccaaggaatggnaaagaatatactggaataaaaaacaaaaatcccctaagggaataatagcagggtaaattttattggaggggacatgccgaanaaggtgttatttgggcttcca

SEQ ID NO: 71 - DNA, 220 bp, Homo sapiens
  misc_feature 10, 22, 40, 54, 68, 92, 121, 122, 124, 142, 174, 175, 179,182, 189, 196, 198, 209: n = A,T,C or G
ggcatgctcnagcggccgccanagtgatggatatctgcanaattcgccctttcnagcggccgcccggncaggtacgcggggccaggtctctnacttctggcttgttcgctggtggcggtcnnanccgagccggactggtcanagatgatcacggacgttcagttcgccatcttnnccancangctgggnagtgtgntnttcttgcttgncgttctctatc

SEQ ID NO: 72 - DNA, 271 bp, Homo sapiens
  misc_feature 29, 159, 189, 216, 219, 231, 233, 241, 247, 255: n = A,T,C or G
actttttttttttttttttttttgaaaanatgaggttttgccatattgcccaggctggtctcaaactcccgagctcaagtgatcagcttgccttggcctcccaaagtgctagcattataggaatgaccatggcacccagcggtaaatgtttcttttcanacttttaaaggtgtcaaacttggctgggcngtggtggctcatgcctagtaatcccancantttgggaggcanangtgggcanatctgntccccttnctccttccaagttttt

SEQ ID NO: 73 - DNA, 396 bp, Homo sapiens
  misc_feature 16, 110, 165, 200, 208, 216, 231, 325, 340, 344, 345, 347,348, 353, 360, 366, 369, 386: n = A,T,C or G
atctttatattatttncttaaattgattgggccctctagatgcatgctcgagcggccgccagtgtgatggatatctgcagaattcgcccttagcgtggtcgcggcacgangtacgcgggggtagggagggggaccagtggcagagggaccttaggtgatccttanaaataaaggctagtttctgttcgaccttggagtanggcggaanaggtgtanacaggtctggagaancgaggtaaaacctgagtaaaagcaagaagttggagaatatgagatacatctcatctctttaaatacttaaatgacttcccctcctcccggagtntatcacaatttcggngatnnanntgacngacgtangtgaanacnctgttgggaacttacanactaaacttg

SEQ ID NO: 74 - DNA, 550 bp, Homo sapiens
  misc_feature 428, 521, 530: n = A,T,C or G
accagcccagagaggctctctgctacctgactttcactactctatggtaatgtgcaatttctcccgcaactgaactacaacagaagtttaaatgtctagcctacagatagatgtttccacatgcctaaactccacaggaatgagttgtcttttactatgtgagaagtcaaatgtaatgttggcaaataccagtgtgagagctacaagtttcaacaaaagcagcacactgtatattggcagtcaaaatcacttcgctctattctgcattaggtcagccaaacgcttcctgtcaagactcagtaactctcaccatacatttttgtctattcattggtctatgggcaggaatgtcttataaagcacacattactaagtgctttatatacatcaccctattccttaaaaaaattctataagaagtattattntcatttagagattaaaaattgaagctcccaggccttaccaattttcaactaataactaattaacagggctgggatttgaattcaggctacctnctttaaatntggttttttcattggttagg

SEQ ID NO: 75 - DNA, 543 bp, Homo sapiens
  misc_feature 4, 56, 61, 128, 137, 171, 178, 240, 245, 267, 287, 294, 330,340, 342, 366, 368, 374, 387, 431, 440, 453, 461, 462, 464,466, 468, 472, 474, 480, 497, 499, 506, 540: n = A,T,C or G
actnttttttttttttttttttttttttttgggggttgttgtttcactttcttggnattgncttttgatgcataatcattttcaattttgaggaagtccaatatatatactttttctttggtgcttgngcttttggngtcatatctaaaaaaccattgtctattccaaggncatgaanatttatactcatgttttcttcggagttttatacctttagcttacatttaagtttttgatgcntttanagttaatttttacacatgatanaaagtagggattcaagtttnttctttngcaaatgaatatccacgttgcccaacatcatttggngaaaaccatncntttttcatttgagtgagcggggcncncttgtngaaaccagaaaancatatatctatggggtaatttcttggacttttgctttattccantgatctacngggctattctttncaaaaatnncncngntttntnctggancttactaagtttaaaancngaagggnaaacctccactttgttttcaattaaaagaaaatntgg

SEQ ID NO: 76 - DNA, 433 bp, Homo sapiens
  misc_feature 14, 92, 122, 125, 133, 158, 182, 243, 254, 255, 267, 272,277, 282, 290, 291, 297, 309, 310, 333, 334, 346, 354, 375,384, 393, 398, 399, 405, 406, 425: n = A,T,C or G
tttcatttttgtangcattgggccctctaaagcatgctcgagcggccgccagcgggatggatatctgcagaaattcgcccttagcgtggtcncggccgaggtactcaatttctgtggaactntgntatcctgnggaacacacaacattacagtggaancttctgtgaaagatgccaatggtntagtatggaagactggtcccagaactaccatatttgtaaaatccctggaagaccttattcncagcaaattcnnttacaacagctngtaancccancatgncattacanngagcancagctacggccnntgcctacacacggttttaaccannggaatgaatgcncttgctgnacttcttaagagatcaaatcnaatttgccntaaaacaantttgnnattttnntatggaaataaggttttanagtttaca

SEQ ID NO: 77 - DNA, 552 bp, Homo sapiens
  misc_feature 329, 362, 389, 479, 492, 499, 534: n = A,T,C or G
acttaaaatgtagtagattctatgcctatgcatatttcccaaaattgtaagtgagaattggaaatgcaactcccaaatcttcaaatctgaaaaattattcaatctcaaaactcatattcatactatatataataacttatacctcttccctcctgcgactttcacatatcagctggagttgggggagaggagactaaagcaccctccaggcacaatttaccacaagttcccaaataaacctttcaccaactcactatgacaaagcatagatgagagaaataacagcatgccaggttcaaccgagtccataggtgagtgtagctgctcantaagtgttggttgattaaaattaagggtgactnaatccatgcccaaactgagtccttacnaaatgccccataaaatttaaattttagaagagttagtaaaagacttcttgaatactaactgcatggagatactacacaaaaccagtcatnttaattcctacanccttcanaacaaaagagtccaactgaaagtaagatccctgtnattatgttgatcctggct

SEQ ID NO: 78 - DNA, 511 bp, Homo sapiens
  misc_feature 146, 148, 271, 277, 324, 326, 330, 339, 345, 362, 366, 367,381, 390, 396, 401, 403, 411, 412, 430, 434, 448, 457, 464,467, 471, 488, 497, 503: n = A,T,C or G
accttttttttcttatttaaagcacaagaggcccataaatcttgagttactttaaattcttttttttgatacaagttttcagagcaagagaataaaaatcatgtgttattaaacccctacaaaaaaaaaaaaaaaaaaaaaaagtncncggggtctttgaaataaaactccttgttttggccgtgtttctgaatgtattggtgattcacccccaagctaattttttaaagtcatttttgaagtttgggaagtctcatgagagatgttgaantatgtntttaatcaagagtcatgatttcaaactagttttacatattaagcagntngggntctaatttnatgggnaaatggggggtttggtnaaanntctgaaaaattttntcccttaangatatnataantnatttgccnntaatatgtcttaaagctntttnaaacaagggtgttnattgagccnaaaacanttnattnattaaaaacagtcctgnccgggcggncgttcnaaagggcg

SEQ ID NO: 79 - DNA, 562 bp, Homo sapiens
  misc_feature 27, 30, 113, 129, 155, 158, 202, 327, 345, 357, 369, 381,409, 462, 464, 475, 501, 506, 523, 530, 532: n = A,T,C or G
acttttttttttttttttttttttttnganacatggtcccgttctgtcacccaggctggagcatagtggcacaaccacggttcactgtaaccttaaccctcccaggctcaggngatcctcccacctcancctcccaagtagctgggactacaggngcncaccaccatgcctggctaaccttttcaaacccctggcctcaagngacccactcaccttggcctcccaaagtgctgggattacaggcgtgacccatggcgcccagtcaagaactttttttaaacaagccatttaagagtgcctgctgcttaaaacaaaaaaaaaagggcntacaatttcaattatgancaaattttgagncctaagtaaaanaagtaatttttngtttttttaaaccagcttacattgtttntttagaacaatgacttatttcaaaccttgtttaaaaaacaaaaactttgaganantagaaaaaatnttttttaaaggattagctttaaaagntaatnataaagaaaaaagttcnctttgtntnaaactttgaggaatggattataggggagaa

SEQ ID NO: 80 - DNA, 431 bp, Homo sapiens
  misc_feature 390, 392: n = A,T,C or G
acgcggggattcctgaagctggcagcattcgggccgagatgtctcgctccgtggccttagctgtgctcgcgctactctctctttctggcctggaggctatccagcgtactcgggttgattccattccaatccattccaatccatgccattccactcgtgttgattccattctttccattccattcaagttgaattctttccattgcattccattccattccattcccctgcagtcgggttgattccattccattccattccattccattccattccattccattccattcctttccgtccgtttcattccattccattccattctattcgggttaaatccattcattccattccattccattccatttccaattccattcaattacattncnttccattctattccgaacctcggcgcgaccacgctaagg

SEQ ID NO: 81 - DNA, 205 bp, Homo sapiens
  misc_feature 75, 101, 106, 190, 193, 205: n = A,T,C or G
acagttcccatcacgtatgtcagttttgttgtatgcagcagaaatgatacctaaactaaaaacaaggacacatanaacaggaggtgctgaccaaagtcttnaacanggagagggaagtaaaaaagggaaaggaaagaaaaagaagtaacctattatcagcatcaaagtatgtggtacctgcccgggcggncgntccaaagggcan

SEQ ID NO: 82 - DNA, 434 bp, Homo sapiens
  misc_feature 18, 20, 53, 222, 274, 324, 325, 349, 362, 384, 410: n = A,T,C or G
acgcggggacataaaatntnctttaacgcatttaaataaacagaaatcatacnaagtatgttttcagacagtagcgttaaattagaaataagtaacaaaaatatagctggaaaactccaaatatttggaaataaatatatctaaataactcatgggccaaagagggagctagatgtaaaaacagaaaatcttttgaactgaatgaaaataagtgaaacttanattataccttgggaaacttgagaaagaagagaaaatttaagcctaaagcaangcagaagaaggggaataataaaaattagagcagaaataaatggaaattgnnaacagaaaaaatagagaaaataanatggaaattaaangttaggtatttataaagatcancagactggtaaacctgtagccaggcnccaaaaaaaaaaaaaaaaaaaaag

SEQ ID NO: 83 - DNA, 545 bp, Homo sapiens
  misc_feature 243, 259, 338, 371, 509, 539: n = A,T,C or G
acaaggaaaactacaaaatatgtatgaaagaaattggagatgacacaaacaaatggaaagacatcttatgctcacagatcagaataattaacattgttaaaattgtcataatacccaaagaaatttgccgattaaatgctattcctatcaaaatatcaacagcatctttcccagaattaggaaaaatgatactaaaattcctgtggaaccaaaaaggagcccaaatagccaaagcaatttgancaaaaagaacaaaacnagaggcattactttccttatttcaaatttttcagattctatagtaccaaaacagcgtggtttggatttaaaaacagacncttcccatggaacagaatagatacccagaaatnatcctttatttcagccaaactgattttcacaaaggcatgaagacatacattagggaaaagacccctcttcaataaacggtgttaggaaactagatttccttatccagaagaatgaactgaactcctatcttcactatntacaaaagccaactcaagatgagattaaangcttat

SEQ ID NO: 84 - DNA, 127 bp, Homo sapiens
  misc_feature 12, 17, 74, 96, 110, 112: n = A,T,C or G
accgccgggcangtacncgggaccataccatatcccaccagagagtgactcctgattgcctcctcaagtcgcanacactatgctgcctcccatggncctgcccatgagtntnttgaatgctgctttc

SEQ ID NO: 85 - DNA, 451 bp, Homo sapiens
  misc_feature 217, 224, 301, 311, 321, 331, 338, 359, 393, 397, 404, 411,415, 420, 423, 431, 450: n = A,T,C or G
acgcgggaggcgtgagccaccgagcccggccacaatgtgtttatatacacaaaggaatattattctgccttaaaaaaataaagaaatcctgacatatgtgacaatatggatgaacccggaggacattatgttaagtgaaataaagaaggcacagaaatacaaatactgcattatttcatttacaccgtagaatctaaaatagtcaaaatcatagaanaaagtancatggtgatttccctgcgtgttaattaccaatcttcccatataggtaattccatatggcacaactgcccttacttgnagagccaccncaccctgtgncatgaactgnaggtgtncttccatggttgcttgcccantcagggcctgtatctctttcacactaccttacanttcncaactgngctttgntttntttgnttnggtgttgngtagttatttattaaaaang

SEQ ID NO: 86 - DNA, 523 bp, Homo sapiens
  misc_feature 134, 199, 200, 205, 240, 313, 315, 322, 330, 348, 349, 350,355, 358, 366, 378, 390, 398, 402, 404, 411, 419, 423, 434,435, 436, 441, 443, 444, 446, 447, 449, 452, 456, 463, 465,472, 475, 486, 491, 496, 501, 502, 516: n = A,T,C or G
acgcgggggaaaatggggagcaggaggctgacaatgaggtagacgaagaagaggaagaaggtggggaggaagaggaggaggaagaagaaggtgatggtgaggaagaggatggagatgaagatgaggaagctgantcagctacgggcaagcgggcagctgaagatgatgaggatgacgatgtcgataccaataagcagannaccgncgaggatgactagacagcaaaaaaggaaaagttanactaaaaaaaaaaaggccgccgtgacctattcccctccacttcccgtctcatatcttaacgtggtcaccttcnantagagangccccccnccccgtggctgtcccccnnntttanacncgctttcnccaccacccaancttgatatttcncaggggangaananaccaaantttcaggncttntttttttaaannncttgncnnanncnctntgcnatttctncnttgcgcnttnttttggttccnacttntccancttgnnttattgttattttnttttttt

SEQ ID NO: 87 - DNA, 422 bp, Homo sapiens
  misc_feature 334, 370, 381, 382, 392, 395, 396, 412, 413, 417, 421: n = A,T,C or G
actctgtatacacacatgagaatgacagtgacaaaggcaaataatgtcttagtattaaaacctgatcactcaacataatttattttgactttttttcttttacagcaaggggaggctccctattgcaactgttctgaccactatattttagaggttttgggatattaggcttatacactaataaatacagggaaatatttatttttcataaagtattagatggtagctttagaaaggggtgtttttgtgcagagggtaaggcagagtaggtagttgctctattatgacttttccttggttcaagcaaaataaaaccgcaaatgtttatttaagntgttttttgaagagaatcataacctggatcaaactntatttcaaagnnttggagaagnttnntgtgcaaaggaatttnnaacntagnc

SEQ ID NO: 88 - DNA, 544 bp, Homo sapiens
  misc_feature 44, 48, 58, 80, 116, 122, 156, 175, 198, 221, 258, 262, 307,331, 336, 340, 348, 356, 367, 369, 371, 372, 398, 404, 410,433, 447, 455, 469, 475, 476, 485, 489, 494, 498, 502: n = A,T,C or G
actttttttttttttttttttttttttttttgggttgttttganacanagtctcactntgttgcctaggctggagtgcantagcatgatctcggcccactgcaacctccgcctccnaagttnaagtgattcccctgcctcagcctcccgaataggngggattacaggtgagcatnatcatgcccagctgatttttgtntttttaagtaaaaacagggtttnaccatattggccaggctggtcttgaactcctgacctnaggngatccgcctgctcggcctcccaaaggctgggattacaggcatgcnccccatgcccggttatttgtttgnaatanaaanactttggngcctcctntccgaatccantnanngaacaagaagggggctccatgctctnaataanaccttntttcctccctattttaacctttncagggtacaaaaangtttattngggccatttcaaanggaccnngacctcaangaangaatncttnatanaaaacaaattgatgtccccctttctttcttggtttttttaat

SEQ ID NO: 89 - DNA, 283 bp, Homo sapiens
  misc_feature 30, 35, 37, 47, 70, 71, 84, 108, 109, 110, 133, 135, 141,171, 176, 180, 206, 207, 217, 218, 222, 224, 227, 235, 256,258, 260, 279: n = A,T,C or G
actttttttttttttttttttttttttttnagaananatggggtttntccatgttggtcaggctggtctnnaactccctacctnaggttatccacccgccttggtatnnnaaagtgctgggattaaaggcgtnanccacantgcccggccttttttttttttaaaaaaaanaaacngacnaatattttacaagggaaacaaaattnnaattccatgnnaccntnagnataccctncacagggaggaaaggacaaantntntaggatctggacctgaaanccaa

SEQ ID NO: 90 - DNA, 504 bp, Homo sapiens
  misc_feature 147, 321, 376, 382, 385, 392, 393, 431, 435, 437, 439, 442,445, 450, 452, 459, 466, 467, 469, 471, 480, 500: n = A,T,C or G
acgcgggaaagggacatttcaaagcctattgatgcttgtagtaaaaaccctaatatcccatgataaacactagaaaccagctctcagtgaaaatgctttgcaatgtgtgggtttgtcccacagagtttacttcttcttttgattcanaatgttggaaatacttcttttttgtagaatctatgtggggaaatttcggagaccattgaggcctatagtaaaaaactgagtatcttgcaataaaaactggaaacatgcgatctgtgaagatacatcttcacagattcatctgtggattcatctacagagtaaaagctttgtttnattcagctggttggaaacactcttgttgaagaatatatgagcagacatttaaagncccaangangccttannaaaaacaggatttcctgaaaaaaaaaaaaaaaaaaggncaanantnctnttntggancntctgctntcccatnncngntaatggtgntttttgaaaacttggctaanctaa

SEQ ID NO: 91 - DNA, 214 bp, Homo sapiens
  misc_feature 60, 71, 74, 100, 158, 161, 170, 188, 191, 199, 208, 213: n = A,T,C or G
gagtctagctcccaccagcagtcgggcctgcctcctgcaaaagaggggaaagagaagaangagaaacccangancaaaacagcccatcatattgccaaanacatggaacgctgggctaatatgtttgaataatcacaaaagaaaactttaaaaatagnctntcatcctgncaattcctttgatggaanaanaaaagganaagaatctntttgna

SEQ ID NO: 92 - DNA, 234 bp, Homo sapiens
  misc_feature 149, 152, 203, 205, 217, 218, 227: n = A,T,C or G
cgtggcgcggccgaggtacttttgaccaaaaattgaccaaagtaagaaaaatgcaagttctaaaaatagactaaggatgcctttgcagaacaccaaagcttcccaaaggaactggtagggaaagtggccccctgtctcctggaagtggnaanaagccctgctccctggcctttgggtttgcttgggggccacaataaaataantntttggccccccnnttccagggncaaaaaa

SEQ ID NO: 93 - DNA, 441 bp, Homo sapiens
  misc_feature 30, 61, 67, 113, 131, 199, 209, 232, 335, 344, 394, 397,414, 420, 430: n = A,T,C or G
acttttttttttttttttttttttttcaanatggagtcttgctctgtcacctaggctgganttggantgcaatggtgcaatctgacttactgcaacctttgtctcccgggttnaagcaattctcctgcctnagttcctgagtagctgggattacaggtgtgcaccaccactcctggcatattttgtatttttgataaanacactgtttnaccatgttggccaggctggtctnaaactcctgaccttaggtgatccacccgcctcggcctcccaaagtgctgggattacaggcatgagccaccatgcctggccaaagtttactctttatacttttntttattggngacattttctccacgaagtaggaattatcaaaagtctcatatctgtatanatnaaaaaatggaaactganacccgngtaccttggncgggaccaccc

SEQ ID NO: 94 - DNA, 328 bp, Homo sapiens
  misc_feature 15, 19, 44, 60, 65, 75, 83, 94, 96, 112, 117, 151, 152, 155,167, 180, 183, 199, 201, 220, 226, 243, 246, 251, 255, 256,275, 283, 293, 300, 323: n = A,T,C or G
actccgaggctttanattnattttgggtctttgggggggacctntatcattacgcctatnatcantccgaaagtnatcatttnttgaacctcancnaccaacatcccgttgncatantcggctttataagcggccccgcttcctttgaatnnatnatccttgcaaanacccattgccaantgnttttttgccacttgcntntccggggaaatcataaccntttatnatagtctttgttgcctnggncattnatanngaatcccggccaccatttnaaaccatntcccgggggngggccantcccgatacccatcccgaatccnatccc

SEQ ID NO: 95 - DNA, 212 bp, Homo sapiens
  misc_feature 102, 138, 157, 167, 177, 179, 182: n = A,T,C or G
gccgtggcgcggccgaggtacttttgatattaaaagctaatttttaaaaacccttctaataaattcattcaggtttaacgagcttggccacacatgaaggtnccttttcaaaatttaaaccggctataccttctaatntcaatttaagttgggcctnactcttcctntttccatggnanaanatttaatcctttaatttaggcaaaaaataa

SEQ ID NO: 96 - DNA, 356 bp, Homo sapiens
  misc_feature 6, 24, 165, 181, 219, 222, 229, 238, 247, 262, 285, 330,334, 335, 347: n = A,T,C or G
actttntttttttttttttttttnggacaattgttatttagtttttatttcataatcataaacttaactcttgcaatccagctaggcatggggaggggaacaagggaaaaacatggaacccaaagggaactgcagcgaaaacccaaaaatttttaggaaacctgncaacaaatgggggggngggggtgctctcctgaacctcaaaaaggattaactggnggntaaaaanaaacccaantcaaacttnttcgagttgccccangtcaacaatggggatctttttgntgggcttgccattcctggacccaaaaccctccatggctcacaatnttcnngccttttttcanttttccaaa

SEQ ID NO: 97 - DNA, 610 bp, Homo sapiens
  misc_feature 227, 255, 262, 283, 288, 289, 292, 317, 348, 357, 369, 378,389, 402, 418, 426, 431, 472, 491, 527, 540, 544, 554, 555,573, 581, 597: n = A,T,C or G
acaatcttactatctttcttttcagtttgtgcctttaatttcctctgcatactcctggttcttctagttgcaattccagagaaatgaaatgtctgacttgatgtctcaagcatcagatatagcttctggatgaaaatcttggctttggaatctgtcaaaagattaacccttacttttttctggctccctggtagttttttctgggggaaacccaattctaaaaattncctgaaacatgaaaatctggttcaaaanccttttnttcaaggtaaaaactctttgntgganntantttccggtttttcctaacactgganactggggagcatgcaattaaaaactgccttntcctagtanccttaaaatggnatcatgggngctcaaaccanaataatttgactntgccttaaaagtcttnccatccgnaaatnggtcaatcccctttggtaagtgacctggaattccgctcttnctttttctaactttaaganttctagggattaaacttttgcttcccaatgggctgngatttaacaatanttcnggcattaaanncaatacctggcccgggcnggccgttnaaaagggccaaattcnaccacacttggcg

SEQ ID NO: 98 - DNA, 354 bp, Homo sapiens
  misc_feature 6, 19, 26, 95, 119, 155, 159, 216, 227, 235, 239, 249, 265,274, 282, 298, 303, 310, 313, 315, 321, 327, 333, 350: n = A,T,C or G
actttnttttttttttttnttttttngcggtgcctctaatactgggtgatgctagaggtgatgtttttgggtaaacaggcgggggtaagatttgnccgagttcccttttactttttttnaccctttcctttatgaaccatgccttgtgtttgggnttgncagttgaggggaaataatgactttggttgggttgaattggaaaatatttgggcctgntaaattgcaantccagtgntttnaatcctgacnccagcttattgcgganggaaaatgnttttcatngttacttatactaaanattantttcttnctntnaggggngaatanattggncccaattggggtggganggaa

SEQ ID NO: 99 - DNA, 468 bp, Homo sapiens
  misc_feature 111, 216, 218, 227, 250, 279, 306, 312, 317, 380, 405, 407,416, 418, 420, 445, 448, 458: n = A,T,C or G
acgtgtctaagttctagagcctcctgacgtgagcatggctgagagtgagggaccgctccctgaaggatcgttctgggtaggggaaaactgggaaagtgggaaaaagtgcanaagcgaaacaccattctttggaagaaggaaaatcttttgatttcttaaattggctggccaaagcttgttaccaaaaacttgtaaaaaaccattcccgggaattgnangggaaaaanctttttgtttggaaacacttcangggtttttgaaaccaagggaaacctgganaccaccttgaaggaaattaagcggttnattatnttctnctggccaaggccccatgctattggcctaattctgctgctgggccccttcacataggaggacanaaaaccggtgcattgatcaagggtntntttgggaantnantcatgaaccatggtcatttggtcantcncaaaaaaaantggaagggca

SEQ ID NO: 100 - DNA, 327 bp, Homo sapiens
  misc_feature 104, 124, 136, 178, 193, 195, 204, 228, 234, 235, 243, 250,255, 256, 261, 268, 301, 310, 315, 318, 324: n = A,T,C or G
actacctgggggggtttgctttcctgccttttctctggttggtcaacatcttctggttcttccgagaggccttccttgtcccacctacacagaacagagcccanatcaaagggctatgtctggncgctcacttgtngggcttcctttttggggtggatgggtgctcaccttcctggantcaccatttttcaanantttaccggnccccgctgggggtgccccttgggngactannctctcctncaccatnacccnntgggnaccccantgaacaactttcttcacatactgggggcccttncttattccnccaanganaatccntct

SEQ ID NO: 101 - DNA, 543 bp, Homo sapiens
  misc_feature 100, 163, 176, 243, 245, 255, 264, 273, 287, 289, 299, 301,313, 324, 325, 326, 330, 340, 373, 376, 397, 404, 438, 454,469, 471, 504, 521, 529, 533, 542: n = A,T,C or G
acgagtggtggacaacagtgccctggggaacagcccataccatcgggctcctcgctgcatccatgtctataagaaagaatggagtgggcaaggtggggcnaaccagatactactggccttcaagggacagaagaaaaaggcgctcatttggggggcactggcntgcctgccccccnatgaaccccaaaattcgactccacaaccgtggtcttatttgagacaacgggaacccttgtggggacncnatttaaaacnccattcccnaccaccttncccagccggaaagncnatattccaangngcttgccattgnttaaaactttnnntganttgaacccangccttttgttgcaagacttgtgaatggaacaanttntgaaaaccaccttttgcttanggacttnggaaccacattgctgctccctttcacactgggtnacaatttatatcctgngaagaaaataaattntnttcattcaaaaaaaaaaaaaaaaaaaaaaaaantcctgccgggcgggccntttaaaanggcnaatttcaana

SEQ ID NO: 102 - DNA, 643 bp, Homo sapiens
  misc_feature 213, 223, 251, 287, 312, 328, 346, 380, 415, 419, 423, 430,488, 507, 509, 516, 529, 536, 541, 555, 558, 561, 565, 569,576, 581, 605, 614, 617: n = A,T,C or G
acacccgcacgaggagcggggacggcgggcgcagaagtgggccaccatatctggaaactacagtctatgctttgaagcgcaaaagggaataaacatttaaagactcccccggggacctggaggatggacttttccatggtggccggacagcagcttacaatgaaaaatcagagactggtgctcttggagaaaactatagttggcaaattcccnttaaccacantgacttcaaaattttaaaaaataatgancgtcagctgtgtgaagtcctccaaattaagttgggntgtttctctaccttgtcttttcaanttaaggaaggcaacancaattttttgcaggtgtnaaaaaaatgctgctcctagggataaagttttaanctgggaaagatgacctcacacaattgctgttgttnctgnggtnaatgcanccaatgaaaaatcttttgcttggggaaggcctggccctggcccttgttaaaagctggnggatttgaattccaaaaananagcaacnagtttgttgccanatttggnaaagngtcacttgtgaaantanctntccnggancagggangcttnccttgaaaaaaatattcattcctnttgggcctnggnggatggaatggggataaacaggggtt

SEQ ID NO: 103 - DNA, 267 bp, Homo sapiens
  misc_feature 2, 74, 203, 243, 262: n = A,T,C or G
tngattgggccctctagatgcatgctcgagcggccgccagtgtgatggatatctgcagaattccccccttgaancggcgccgggcaggtacaggaagcatggctggggaggcctcaggaaactggcaatcacggcagaaggcgaaggggaagcaggcaccgtttcttcttaatattccttttgaaattctttatggtgcacangtagccgtaaaaaataactgcttcacactgacttgtcatnccttttggggtgggggtanggggt

SEQ ID NO: 104 - DNA, 408 bp, Homo sapiens
  misc_feature 3, 98, 159, 246, 274, 317, 335, 340, 350, 354, 396: n = A,T,C or G
acncgggcactcacagacatgacacactcacagacatgacacgctcacagacatgacacgcccagacatgatgaactcacagacgtgacacacagacntgacgcactcagacatgacacgctcacagacatgatgcactcacagacaggacacgcccanatgctacgcactcacagacgtgatgcactcacagacaggacatgtgtggctccactcagcacccatacttagtcacctgtgcccagnagcacgcatgtctacacagatcacattnacagacactgtgacacaaagttacacagtcatgtgcacatgcncacacacacttggtcttntgctngactgcctgngcangacacacagaaggccaaaaaaaaaaaaaaaaaaaaaaaagtnctttggccgaac

SEQ ID NO: 105 - DNA, 182 bp, Homo sapiens
  misc_feature 6, 7, 13, 14, 47, 56, 70, 80, 87, 104, 115, 135, 156, 157,160, 176: n = A,T,C or G
actttnntttttnntttttttctttttaaaatttgaacacatatttnataatttgngataatggttttgnggctaactcnaaaaaangaacggccccaatcttnaaaagtctacnctgaaatatttacaatcacntatttaacaggtttctaaaannatnaccatatttgggattngctttc

SEQ ID NO: 106 - DNA, 167 bp, Homo sapiens
  misc_feature 12, 31, 55, 62, 79, 83, 101, 102, 105, 118, 125, 164: n = A,T,C or G
actttctatganaagcgtatggccacagaanttgctgctgactctctgggtgaanaatggangggttatgtggtccgantcangggtgggaactacaaacnnggnttccccatgaaanagggtgncttgcccatggccgagtctcctgttactgattaaggggnact

SEQ ID NO: 107 - DNA, 126 bp, Homo sapiens
  misc_feature 11, 45, 46, 57, 60, 67, 81, 85, 91, 103, 106, 126: n = A,T,C or G
acaaacaatgnttatttgtttgtaaagtgccaggtttatatttanntaaacattaanatntgcgttnaagcagtaaggccncatnttttancttggctgtgcnggntaagtgacttgtttaatctn

SEQ ID NO: 108 - DNA, 144 bp, Homo sapiens
  misc_feature 52, 53, 83, 84, 85, 107, 109, 135: n = A,T,C or G
acgcggggcctctttttccggctggaaccatggagggtgtagaagagaagannaaggaggttcctgctgtgccataaaccctnnngaaaaagcagatggaatttcgnanagctgaaagatcaacacgcctgaganagatgtttg

SEQ ID NO: 109 - DNA, 205 bp, Homo sapiens
  misc_feature 17, 22, 73, 91, 94, 107, 118, 168, 182, 191, 195: n = A,T,C or G
gcgttgggccctctatngcatnaatcgagcggccgccagtgtgatggatatctgcagaattcgcccttagctnatccggccgaggtacaanacnctacgggaacagnttgcctccctnccagcctcaaccacaattcttccatgctggggctgatgtgggctagtaanactccagttcttanaggcgctgnagtntttttttttt

SEQ ID NO: 110 - DNA, 175 bp, Homo sapiens
  misc_feature 12, 19, 35, 50, 51, 52, 67, 89, 90, 117, 118, 122, 129, 133,144, 163: n = A,T,C or G
tgggccctctanagcatgntcgagcggccgccagngtgatggatatctgnnnaattcgcccttaccntttgcgcggccgacgtactcgnnatgaccccaatacacaaaattaacccnntaanaaaattnattnaccactcactnattcgaccacccctccccntccaacatctcc

SEQ ID NO: 111 - DNA, 309 bp, Homo sapiens
  misc_feature 24, 129, 130, 153, 182, 185, 188, 203, 211, 218, 222, 232,236, 238, 242, 254, 257, 259, 274, 275, 282, 285, 293, 297,300: n = A,T,C or G
accctccagaaattggtgactttncttttgtgactgacaacacttatactaagcaccaaatcagacagatggaaatgaagattcttaagagctttaaactttggtctggggtcggcctctacctttgannttccttcggagaagcttcttaanattggagaaggttggatgtcaaccaacantanttnggccaattacttganggacctanttatgtngganctttaacaangggncntttncttctttttaanatngnacaaaggaccttttnnctaaccnttnaaaatttngggntantggggggat

SEQ ID NO: 112 - DNA, 216 bp, Homo sapiens
  misc_feature 143, 148, 165, 170, 174, 178, 186, 192, 205: n = A,T,C or G
actttttgggttttttttttttttttgttataatctattcatggatctccactttgatttaatttttaaatgtttaaatctcctttacaaaaagtatacgttaatatacccgtcctcaagggggaactggcactgtgaccttncattnagttttctagaggatgngatcnaatntctntcttcctnaatatnaaaaaggaaattngcttaacgacc

SEQ ID NO: 113 - DNA, 280 bp, Homo sapiens
  misc_feature 69, 104, 132, 133, 138, 139, 148, 153, 164, 170, 172, 179,187, 192, 203, 205, 211, 226, 229, 232, 240, 246, 254, 256,259, 265: n = A,T,C or G
acttgccccttccccagaaaagcgggacttgctgctaagggtgaaaggaccaaggcagtttgtccctgntggtctgaccccttgaaaacgtgggtgtataaatnagaaaagcattcccttcaatgattaaannccaannggaaggctngcttnccaattctttnaacaancnccggaantttttttngttcnacgattaaaancngttttnttttggcctttccanaanatnaaatggantttgtnattaaatnanaangtgacntattttaaattttat

SEQ ID NO: 114 - DNA, 349 bp, Homo sapiens
  misc_feature 183, 198, 201, 203, 212, 224, 245, 249, 260, 279, 286, 302,311, 348: n = A,T,C or G
acgcgggcagtcaagctggttgctctgaaagtaacccagcttgttgctctaaaatacctcagtagcctgagtgttatactagagatctaaaggggttaacagggataggggtgggaaaggttagagactcctagaaaatctctgggtaccgtgatcttcggcctcattctaatacctgtcttngaacagcttttttcnttngngctctcttngccttagctacnttttttattattgtatgcctncatnacttaataagngatgggaatgggttttganaatccgnaatttatttaaaaagntgggtgggnttttaaatacctttttttcaaataaaaattaagcccna

SEQ ID NO: 115 - DNA, 651 bp, Homo sapiens
  misc_feature 101, 109, 120, 125, 126, 138, 139, 142, 161, 174, 175, 179,198, 204, 228, 270, 295, 302, 305, 311, 360, 425, 431, 433,449, 452, 476, 480, 500, 521, 533, 538, 544, 556, 577, 578,624, 630, 631, 635, 651: n = A,T,C or G
actttttttttttttttttttaaagcaaccacatttttaatcaataaatatgaacatttgttttttaaccagttactattagggcagaaaaaaacaggccntttttcanaatttcaaaanatacnnccttttggaaannaangggccaaaaattttggccntaaactttccctnntttntgaacctaaaggtaccaanttttanctaaaataagggttggaattatcnaaaaaggtccagaatttttttaaagctttaacagattttgcnattaagcccaaacagattggtttanccattcntanactatntgccacccaatggaataatgattggatgggaaaattggtgagcattagngaatacctatggtcacttatgggcccggcttaccttcatttcttggtctttttccggcttactgnccttgntntttccaaggccttggnganggggcttccaaaaagcctgggcantaangggctggtggaaaatgtgangggcaggataggggaacccanggttttcttttntttgnctaacntactccttttancaaggggtttggtcttggcannggttccttttccccaatcctttggggggcctaactcccctagggancccccnncatnggttccagctcccttn

SEQ ID NO: 116 - DNA, 653 bp, Homo sapiens
  misc_feature 160, 186, 213, 234, 241, 259, 265, 298, 324, 339, 345, 351,352, 407, 429, 441, 455, 464, 500, 518, 519, 522, 523, 533,539, 544, 553, 561, 562, 571, 575, 580, 592, 594, 611, 616,618, 626, 630, 640, 645, 647: n = A,T,C or G
acttctttgtgttaagtattcagccactgtttttagatctagttaataggttctatttaatttgctcaacatttactggaatgggtggagtgaaaaaaactgatgcatactggggaaatatctaccattttttaaagataatggttaattaggaaaagancccttttaaggaatttataccagggntgaaatggaatccagtttttcagaatncaccaacctggtggatgggtnttaaaangtggcctccaaggtaagnattccngattatattaatggataactgggttggttttanaatatgtaagccggttctaatctacnaggttcacatatcgncggttnctctgnnataatagaaaggttaggggatggatcacttggggggttgtggataaaggccctgngtttggttccctcctctggatnccaatagggggnatgctacttttttnggggacctnattccttggaagattgggcttgctatcaggggtttnatcctttttctccaaaannaannaacctcctgnctgctnccatnttaaagctnaaaatttnncttttgccngaanaatcncctaattcaggnantccaaatttttgggggnaaaancntctggganaatntattggaccncattnangttggg

SEQ ID NO: 117 - DNA, 244 bp, Homo sapiens
  misc_feature 21, 22, 31, 123, 157, 171, 180, 192, 196, 205, 208, 216,217, 223, 227, 232, 240: n = A,T,C or G
acttttttttttttttttttnnttttttttngcatcaaaaagctttatttccatttggtccaaggcttgttaggatagttaaaaaagctgcctattggctggagggagaggcttaggcaaaanccctattactttgcaaggggcccttaaaagtcgntgggctcaaaaggncttttaatnctcctttaaaanttangcctttcgnaanaaattctnngccaancaangcttngggccacncaaa

SEQ ID NO: 118 - DNA, 160 bp, Homo sapiens
  misc_feature 23, 25, 47, 63, 66, 77, 86, 102, 108, 111, 116, 117, 135,158: n = A,T,C or G
accacttgaagccagaatagttngnttatgtggaaaccacgggaccnggaaaatttcatcttnatngaagattcganggtttgganatttaaattttaagtnacccanatnccatnnagctacggtctttatccncagagccggtggctaaaataaanac

SEQ ID NO: 119 - DNA, 574 bp, Homo sapiens
  misc_feature 275, 355, 398, 431, 494, 499, 522, 545, 566: n = A,T,C or G
acacttgattcagattccacctgggattcgacaaatttttctttttttgtttttctattttctttgggatcttctcttgttttcgtctttaaatctcttatttcaccctttttaactttctttaattcttttgtttcttttacttcatcttttttgggctttttggactcctttagttcttctttggcttcagaaattcttttctttgtccttaaatcaaaaactaaactttccaaggagctctccaggtctggtttggacttgtcttttagctncccggcctttgcttttttctttttcagatcatctggggcttttctcttctctctgcctcaatttttctttttcttctttnggggaagatcttcttttgtctcactttgctgatccgctatcanagttcgcctaaaatatgtcgtatttaaggatangcctctgaatatccttcctgactgctttggctttgttctctgcaatttctccctaaattcaanaagcncttctttacaagtcctccagggngaatctcgggcctccaaggcccngcgtcctgggcccggaccacncttaaggg

SEQ ID NO: 120 - DNA, 188 bp, Homo sapiens
  misc_feature 128, 167, 178: n = A,T,C or G
gtacctcaaggttctcaggacctcctttccccagatcttagggtcctgccctgtgggtctcctgtgtccaggggagaggatctggggagtaaaaattgtgaagtggcaaatccctgtacccggttttnttggattttccaatgaagggctgtctcacatcccacctnccactagggtnaatgagagga

SEQ ID NO: 121 - DNA, 423 bp, Homo sapiens
  misc_feature 87, 88, 91, 109, 120, 152, 179, 220, 231, 234, 251, 253,269, 274, 286, 288, 298, 302, 303, 310, 311, 319, 320, 323,324, 328, 348, 357, 360, 362, 379, 385, 405: n = A,T,C or G
actttttttttttttttttttttttttttttaattttttttttttttttttttaaaccttcttccagtttcttgtattttttaaggnnttnaaatacatttattttaanatttttctatntatacatttgctacggaaaattgaaatccgcncactgaaatatccttttattgcaactnaaattttcaaaaaccaaaaaatcaaattatttatgctctanccaaattatgnaanggtttctttttcttttntntgtccccaagctggantgtantggaacaatcananttcactggancatnngcctccnnggctcaanngannttanttgcttaacccccccgagtngcttggaantancnggtgaacaaaaccacanccaagnttatttttttatgtttttgntaaaaccggggctttgct

SEQ ID NO: 122 - DNA, 370 bp, Homo sapiens
  misc_feature 245, 275, 329, 339, 345, 354, 358, 364: n = A,T,C or G
acgcgggtgccattccctcctcttctggattttttttctttgaccatatcaagctgaagagatgaacttgttttctcaaacctttgcatcaaattaagagtaaaaacaataaaagtaatatcaaatgaggcaggccaactaaaacaagaaataggttagagaatattgactctccgccgggcatggtggctcatgcctgtaatcccaacagtttaggaggctgagatgggcagatcacttgaggncaggagttcaagaccatgcctggccaacantggttgaaacccttgtctctactaaaaaatacaaaaattagccaggcgtggtantgggccctgnaatccnagctacttnggangctgangcagga

SEQ ID NO: 123 - DNA, 145 bp, Homo sapiens
  misc_feature 9, 18, 27, 33, 69, 74, 78, 90, 99, 101, 119, 132, 137, 139: n = A,T,C or G
gtactcttntttatactntaatctggnggatanctattttaatttatgttattcaattccatatcttcngttgnttcncaaaaaactgantttactacnangtatatatttaataaacntattaattataanttttngnatttaa

SEQ ID NO: 124 - DNA, 325 bp, Homo sapiens
  misc_feature 22, 129, 153, 161, 176, 180, 181, 193, 196, 199, 211, 216,217, 230, 246, 247, 259, 260, 267, 270, 277, 292, 300, 301,304, 314, 318, 319, 322: n = A,T,C or G
actttttttttttttttttttntggggaaaaatccttttctttacaaacttccatcagtttaggagtcagtctgtatgcctttagtgagagagatccttgggcaagtttttattgggatcataaatganaaacgacagattcttcaatgggcntgctggtnactaaaactggagantccnngagtggcccggnttnacnaatgagccatantatgnnggactgaataccnaccccacgtgaaagannatcaatgtttannttggcgnaangctcccnattattttccatctnaatttggnnctnattcaaagtncacnntantcc

SEQ ID NO: 125 - DNA, 278 bp, Homo sapiens
  misc_feature 28, 29, 34, 140, 143, 166, 167, 183, 188, 190, 226, 227,229, 236, 237, 243, 248, 250, 255, 258, 259, 266: n = A,T,C or G
acttttttttttttttttttttgtattnnggctnccttaaaacagttggaccttccattttaatccaatttgttaatctttgatttctaatttgatgctctgaccacttgcatttcatgtaatcaattgaatatgggttnggncttaaacgttactatttggtttnnttgaatccgtgttttntttcnancatttttcctttttttaaagccttatttcgaattgnntntttcttnnaattcnctttnancctcnccnnagggttnggtaccaaaaat

SEQ ID NO: 126 - DNA, 189 bp, Homo sapiens
  misc_feature 23, 118, 131, 134, 148, 152, 153, 160, 169, 184: n = A,T,C or G
acccttgcctttctcacatcatnagatcaagtcactctttgtgcatcccttcctggctgagcgcatcatttccatgttgaactacttcctgcaacacctggttggccccaagatgggngcctaaaaagtanaangacttcagcatatntganntcaaccnaatctgtangtatcagatatctgnactta

SEQ ID NO: 127 - DNA, 310 bp, Homo sapiens
  misc_feature 157, 241, 256, 287, 289, 296, 297, 304, 307, 308: n = A,T,C or G
acagtgtggctcatgcctgtaatcccagcacttcgggaggctgaggtgggacaattacttgagtccaggagtttgagaccaggttgggcaatgtgatgaaaccctgtctctacaaaaaatacaagaattagctgagtgtggtggcacatgcctgtantagccacagctacttgggaggctaaggagggagaaccacttgagcccaggaggtcaaggctgtagtgtgctgtgatcgcgccantgcattccagcctgngtgacagagcaagaccctgtctttaatacantnaaaaatnnaaaaaanatnntt

SEQ ID NO: 128 - DNA, 514 bp, Homo sapiens
  misc_feature 417, 450, 477, 512: n = A,T,C or G
acacggcagtcttagagaagcaaatggctcagatgatgataattaagagtagccaacattaaagttaatttttaaaaatacagttaggtgtttatattatttagttattataattctgcaatcctcttgctcaggaagtgtatacaacttttttaaaaattatacttgttattattctacttctctcttctatgacaactctagtgcaatattagagtttcatttattccacaatatatttttactgtttttttctatttatctggctttactagtaagttcttttagattaacatccagttcattttctggaaatatacctggaatttagtccatttcctaatgaaaaacagctcaaattttagggtaactaatttgtaaagagttaacattatatttggatccaattttcctganatattgaaatagtgaaatcccaaataaatgatntgaattattttactttcaaatgtatanttaattgctaacatgtttttattttcatatattgntg

SEQ ID NO: 129 - DNA, 453 bp, Homo sapiens
  misc_feature 331, 334, 351, 375, 381, 401, 408, 413, 425, 426, 430, 448: n = A,T,C or G
acagtagaaacaagcagagctactgatactctcacagctcatttcagtttgtcttccttatctgtatgaaaggggaccatagagagaggttgaattagtttcaatacagccctaagcacttcttatggtgttttttgaattactgctcaacagttcagtccagttaaagtaaataagcaaattaaacgtaagagaatgaacttggcaacaccttagattataattctgattttaacaaattccattctattaatgcacataatattgatactgcgttgtaaacatttaggcccgtaaaattactgaaggactgtagaatgaaagagaatcncanaataaacttaaggttanagaacacttaatgtttcctgcctnaagtgngatgctatacttgcaaaatnttattgngaggnagaaatattatnntttnagcatataaccattgttntcatt

SEQ ID NO: 130 - DNA, 652 bp, Homo sapiens
  misc_feature 31, 33, 83, 85, 110, 191, 193, 225, 238, 244, 246, 267, 292,308, 317, 337, 354, 356, 359, 384, 415, 447, 448, 452, 467,493, 502, 517, 522, 527, 536, 552, 558, 568, 571, 573, 576,579, 586, 588, 590, 593, 597, 607, 613, 614, 621: n = A,T,C or G
  misc_feature 625, 628, 638: n = A,T,C or G
acttttttttttttttttttttttttgggananacagggtcttgccactttgcccaggttggtctcaaactccttggctcaananatttcctgccttgtgaatcactgancaaaccccagcatgcattcttctaattttttttaatttattttttcttattttttaagtttaaaggaatgttaaattccananattctttttttttttttttttttttttttttngggaaatggagtnttactntnttgcccaggctggaatgcagnggcaaaatctcggctcactgcaatntttgcctcccgggttnaaaacattntcctgcctaagcctcctgantagctgggattacaggngngcnccaccacacccagcgaatttttgtnttttttttagtaaagtcagggtttccccatnttgaccaggctggtctcaaactcctgaccttnngatntgcccccccttattntcccaaagtctgggattacaggcgtnagccaccgncctggccaatatttnccgcnccctnccgggcggncgtttaaaagggcaanttccancacactgggnggncnttnttngtggatncnanctnggtnccaaacttgnggtaannatggggnatanctngttcctgtgngaaattgtttcccc

SEQ ID NO: 131 - DNA, 269 bp, Homo sapiens
  misc_feature 101, 106, 109, 112, 137, 149, 150, 152, 155, 163, 166, 201,209, 219, 221, 234, 235, 238, 245, 250, 263, 266: n = A,T,C or G
acttttttttttttttttttttgggaatgcaacaactttattgaaaggaaagtgcaatgaaatttgttgaaaccttaaaaggggaaacttaaacacccccnctcangcncangaccaagtgcaaaatggactctttntggatgttgtannanacntggtgcantcnttttctaatctgattcctaaaattaaatcaacctntgctgatnaagagggatncnttcatatatttannatntttagtnttgantttttaaatggtnatnatt

SEQ ID NO: 132 - DNA, 256 bp, Homo sapiens
  misc_feature 98, 112, 131, 136, 141, 149, 155, 159, 173, 176, 177, 178,182, 194, 202, 203, 204, 206, 215, 219, 221, 230, 232, 235,254: n = A,T,C or G
acctacatcagatctaaccttgatcccagcaatgtggattccctcttctacgctgcccaggccagccaggccctctcaggatgtagagatctctattncaaatgagaccaangatctgcttctggcagctngtcantgaangactcatnctgttncccngatctaccatccantannngctnttaaggggcttnggcctttnnnanctatctcantaancnctcatgtgncntantctgatcatggttatctanga

SEQ ID NO: 133 - DNA, 320 bp, Homo sapiens
  misc_feature 21, 24, 80, 97, 118, 140, 198, 200, 201, 209, 215, 219, 227,229, 233, 248, 269, 274, 278, 279, 296, 299, 302, 313, 315,317, 318: n = A,T,C or G
acaaatgttttttattcaaangtncaaaataaattatctgtaggcatggacaatgacagcagtaaaccattatatatttngtcaactgaaaccagtnactgatggttatagtgatttnagccgcctttttctttattttntccaactgacttctctgaaagttattggtgaaggaacactgccttggccttcctgcananntcattaantaaagnaaanccctagcnangagnttaaacatgcccacntccattacaacttccatttcnaccantggnnccattccaagggccctnttnttnttaagaatttntngnnac

SEQ ID NO: 134 - DNA, 603 bp, Homo sapiens
  misc_feature 41, 65, 83, 233, 249, 276, 304, 314, 322, 351, 363, 369,399, 446, 453, 456, 465, 491, 493, 505, 508, 511, 522, 540,548, 550, 552, 555, 568, 570, 571, 596: n = A,T,C or G
actttttttttttttttttttttttttttttggggatttantaaaataaatgtatttttaaaatntttttaggaagctgcaanactggcaacgtgattgcttcttgataaagtctgcaatgttaagttctatataggctcccttctgtgcttctgtttttgcaaaaaccttgattaaatttatttccctcagcacctgatccttgccccttgacccactggccattttggatnggaccacgtgatacangttggaccaagttggttgcattaatcnattaaatctctctgaatctggcaatcancaaccatcantctttttnttttttacaaaaataccaccccatttccnccaaatttcttnttgaancgttaaaaggcatattttccaccgtttatnctatttcttaataggccttcttgatgaaacccttgaaataatcttgnggaatcntgnctcaaactngggcaaaaacaaaaaattgagggcantnaacatgccctgngcntgnttatacatatncctaaaaaatttctcccntaaaaaanantnggnggccaaaattttncnnccttttttttgggaaattaaattcngttatat

SEQ ID NO: 135 - DNA, 601 bp, Homo sapiens
  misc_feature 532, 540, 574: n = A,T,C or G
acatagtaaactgtgggtattcagggagataaaagttttttgtttgtttgtttgtttgttttaaaatgaggagtcaataattgttttcagataattatccttggctacaaagatgaataacaggggtaataccagtctgaggttggacagttgttgggcagttgttgggcagacgtcctcacagaagtattgtgtgcctatatgtgtgcgtataaagttgcaatggcctttttgcaaggttgtggtttttgcaccttttgtgcatgagagccctcccttcctgtccttctcagttctacttgtcagggtttttgccacaactccattttgattctgacaactttcagaagccttaggaaactagacagtggaattatgggatttgctctttagccagttgcattttatttgaactggctttagcaatgagcactaatgaaaattagccactgctgctgggtgcagtggctcatgcctatgatcccacactttggatcacctgagtcaggatttcaaccacctgccacatggnaaaccccnctctactaaaaataaaaaattacccggcatgggnggtggaccctataatagccactactgg

SEQ ID NO: 136 - DNA, 271 bp, Homo sapiens
  misc_feature 24, 33, 86, 114, 148, 155, 161, 190, 191, 201, 206, 213,214, 215, 220, 226, 242, 244, 245, 251, 267: n = A,T,C or G
accttttttttttttttttttttnggtaaacanggcggggtaaagatttgccgagttccttttactttttttaacctttccttatnagcatgcctgtgttgggttgacagtganggtaataatgacttgttggttgattggaaatatngggctgnaattgncaatcccagtgtttataatctgaccccanncttattccgnagganaattctnnnattgntacttntacacaaacacaattnanntttatnagcatcataaaatcgnccca

SEQ ID NO: 137 - DNA, 131 bp, Homo sapiens
  misc_feature 20, 69, 72, 80, 92, 94, 95, 98, 99, 105, 107, 111, 124: n = A,T,C or G
acttgaccccacagccgtcngggatgagccgcttctcagccaccatgtcttcaaattcatcatcattgnacntggtgaanccccacttcttngnnaannggatcntntttngcggctattgaanacttgtc

SEQ ID NO: 138 - DNA, 374 bp, Homo sapiens
  misc_feature 42, 52, 60, 67, 71, 82, 86, 93, 96, 100, 106, 107, 112, 115,128, 264, 284, 299, 306, 311, 312, 321, 342, 345, 360, 367: n = A,T,C or G
acacagctgtcagggaaagtcctgatggccacagtgaaaaangtcatggttngacaaaanattcatngcancttagcatggntcanaccagtntcntacntaaatnnctagntcncaatctagttttnaccacatctgcttcaaaaatagcacaccaaactcccttccaaagtgcatcgttacacttgcaccatcgtggaagaaatggaagaacaaggatggattttggctggctggaagtcacatcttggggaagctggccangtttggcattccacaaggcnttgttcttattttcnagccatnagganntattccttngttcccaaagtttctcccagnttntttttaaattatcanggcttgntttcctt

SEQ ID NO: 139 - DNA, 209 bp, Homo sapiens
  misc_feature 110, 132, 147, 153, 158, 171, 172, 177, 183, 185, 188, 195,196, 198: n = A,T,C or G
acgcgggggcgaaggcggggtcggcgctgccgggtgaaatcgtaggacagtgaagatgctgctggaattgtccgaggagcataaggaacacctggccttcctgcctcaantggacagcgcggtggctccaantttgggcggattgcngtgganatttntgaaactctggcnnaaacncaaaantntantgaaggnncntcctgaaaatc

SEQ ID NO: 140 - DNA, 252 bp, Homo sapiens
  misc_feature 74, 79, 116, 117, 121, 125, 132, 142, 145, 170, 189, 194,201, 203, 214, 219, 229, 230, 234, 240, 243: n = A,T,C or G
acttttttttttttttttttttttttccggttttttttttttttttttttttttaaaaaaggaaaacccggtantgatntcggggttgagggataggaggaaaatgggggataggnntttnaacntgagggngttttctcgngtnaatgagggttttatgttgtaaatgnggggggtgagggacccccnttgtntgtggtnanttttttaaggnaattnttgggttgannatantttgtnggntcctttata

SEQ ID NO: 141 - DNA, 260 bp, Homo sapiens
  misc_feature 31, 38, 62, 65, 68, 69, 80, 88, 90, 97, 103, 113, 158, 162,175, 186, 188, 190, 205, 226, 230, 236, 248: n = A,T,C or G
actttttttttttttttttttttttttgganaaggaanaggtttttattcggccgggagccntcngcnnactcccgtctnaagagccnanctccccnaaaaanaaattcctancccttttaagagcttacaactttaaggggtccacgtgaaagggtnatantagatcaagtaancgtgaggaacntnantgggggctacacacnttggcctttttggacaaaaantttnacggtntttctgacacantgtcttgggttt

SEQ ID NO: 142 - DNA, 523 bp, Homo sapiens
  misc_feature 53, 86, 90, 96, 100, 111, 130, 199, 219, 222, 272, 275, 295,303, 309, 316, 320, 330, 339, 344, 349, 352, 354, 360, 371,378, 392, 401, 405, 412, 413, 417, 421, 426, 427, 435, 438,445, 450, 452, 455, 465, 476, 477, 479, 486, 487: n = A,T,C or G
  misc_feature 500, 502, 503, 508: n = A,T,C or G
acttttttttttttttttttttttttttttggctggatttgcctttatagganagtgaagggaaacctcatgtttctaggatcaanctgnggtttnaaanattcatccaantatttctcacatattcctntttcaaaaatcaagtttccaaaacttctgctctgttttctctgttgaccacacacaaaccttccagtanttgaataaaaaaaggcactnttntcactgggaaaaaaaaaggcacccaggccaaaaattacctttcaggattntgntgccaatgattaaaacacanaaggaatntgcccnttggttntatnctgctgcggnaacctaatncttgntttgngtnanatttgnatccaattggngatttangatgagggaaagcnggatttttntccnactcccnnttanctcntaagnnagctggtnaantgggatntttgnangtntgtatcaaanctttctttgannanattgttnnaaatttaattacnanncctantaaaaaaaaatactt

SEQ ID NO: 143 - DNA, 620 bp, Homo sapiens
  misc_feature 183, 442, 469, 501, 511, 530, 532, 535, 546, 583, 602: n = A,T,C or G
accgagtgtggcacctaggacagcaggcagtagtgcagataaggtgtgactctttctagcatagccagggggcatggctaccctcatatatccccaggccttccctagactctaatggttccaaaagccacagaagcagtttatgtagtttagtaaacacagtatctgaccttcctaacttanaccaaatgtttaaattttgaagacatttttattttaccaataatctttaaaactatctttatctcccaaagattaaagtcatgggaactaaaaggcattaaaatttctactttcctgagaaatatttaagtgcttatttttctttaaaccaattaattagagatcttttatataaacattatatacacaacacatataaatatgcacacagatacacagatagaagagcttttttttttttttttttttttaaagacanaatctcactccgtccctaggctggagngggagtgccatgatcttggctcatacagcctnaaccttccanggttcaagcaatttcttgngnttnaacttcccgantagcttgggactacaggcccccgcccccacgttcagntaatttttttatttttagnaaaaaatgggggttttgc

SEQ ID NO: 144 - DNA, 448 bp, Homo sapiens
  misc_feature 7, 13, 15, 20, 293, 298, 308, 329, 333, 355, 359, 377, 393,398, 403, 406: n = A,T,C or G
ctgaagnaactancntcaanaagtagcctctgtatgggaatagagctaaggaggatgctaaggctcaggcgaactgaccccttgacagcctaacatggaggcttttatctttgaatttaacacatttgtcaacttgacagggagcttgggctgcagattcctgcccttgtgagactctgaggcccggcagaaagagcccaggcatgggagtcagactcatgggagggtgtgggggtaaatcctggccatgcaaacttcctgcactaggatctttacttcccctggctagaatnctatnactataaaantggggggaataaatgactggntcancgggggttttaaaagaaaattnaaangggttaaatttatgcaanaaacagggattgtggngaatnaaacnganggaattcaagccaaaaccatggggggaaaaaaaaaccccctt

SEQ ID NO: 145 - DNA, 507 bp, Homo sapiens
  misc_feature 430, 435, 462, 463, 465, 477, 484, 490: n = A,T,C or G
actgttcaataaaatttaattcactataaatcaattttttaaaattaattataaaaatattaagcattttttaattcaacatatatatatatactatgcttaaaaagtcttgtatcatggaggtgatattcaccatattatatctactaatgacacaatgaacttttttgagggatacattttttaaaatgattctgtaaatgactaaagtctttggtaataaaagctggagattggaggttacttttgaaaataaagaatttgaaggagagaatgtagaaatgtgaagcagaaacttagccatgagatgaagactaaattgagaacggaatgttcatataaggtaaaaaaaatatatatacaccgtttaataattgtttagagggggaagggagggcagggagagaaggagacaagggttgaaaaaccngctgntgagtagcatgctcactcctggggggnnanatcatttgtccncggccgnagccangctaagggcaaatttcc

SEQ ID NO: 146 - DNA, 199 bp, Homo sapiens
  misc_feature 61, 65, 67, 73, 85, 97, 126, 127, 132, 134, 136, 152: n = A,T,C or G
actttttttttttttttttttttttttattggcttttaaaataacctttattttttaaaanttantntgtgcnttataggaaatngaaaaacacaancaaaaaacaaagtcattcacaatcacaannatttnanantttgacatattcttcnaaatcctgtgtgtaggcacaacatccaattttatgggactgaaactg

SEQ ID NO: 147 - DNA, 231 bp, Homo sapiens
  misc_feature 27, 35, 45, 61, 79, 93, 107, 131, 134, 149, 157, 192, 194,197, 210, 215: n = A,T,C or G
actttttttttttttttttttaatatnacaaaatnaaaaacttanacactttagggtagcngcttaatacttatctttngaaatctattgctnatgctaggtctaangagcaatgactcaaccagaaaaantantaaaggctgcctttncctttttnaaagtcttattagctttatatacaaaatacaatgntnttnactaatacattantactnaaaggtgcttaaaaat

SEQ ID NO: 148 - DNA, 290 bp, Homo sapiens
  misc_feature 18, 20, 93, 106, 113, 189, 203, 209, 226, 233, 248, 256,258, 265, 267, 274, 289: n = A,T,C or G
acttccggtgctaagggntntccgatttgtagaaggcacaaatattaataggatcacttttagctcttgggaatgtcatcaatgccttagcanattcaaagagaangaatcancatatcccttacaggaaatagtaagcttactcgcttgttaaaggattctcttggaggaaactgtcaaactataatnatagctgctgttantccttnctctgtattctactatnacacatntaacactcttaattngctaaccngncaaaagnanattaaantctctttgaaattgna

SEQ ID NO: 149 - DNA, 149 bp, Homo sapiens
  misc_feature 73, 116, 122, 132, 136: n = A,T,C or G
acgcggggccataccagcctaggtgtggagcaagaggtagggaggccctcgtggatatacacaaacaccccanatacaaaatggagcattgtggtagtggttagggtgttttatgnaaacantttaaattanatanttctattcattga

SEQ ID NO: 150 - DNA, 382 bp, Homo sapiens
  misc_feature 7, 28, 159, 200, 220, 246, 250, 259, 263, 268, 273, 277,281, 283, 298, 299, 303, 311, 322, 323, 331, 335, 346, 352,355, 356, 364, 366, 367, 372, 375, 376: n = A,T,C or G
gtacgcngggacgacgaagatgatgaanatgatgatgatgaagatgatgaggaggaggaagaagaggaggaggaagaggtggggtgggacgacagtgaaatctagagtaaaaccaagctggcccaaggtgtcctgcaggctgtaatgcagtttaatcanagtgccatttttttttttgttcaaatgattttaattattgnaatgcacaatttttttaatntgcaaataaaaagtttaaaaacttanaacncaaaaattnaaanaattntaaantttnaatntncttgcctgggctggnnattngaaagganatttccatcannctgctttntttnttttgtatctnaactcngcnntattttgntnntgatnttnntcttag

SEQ ID NO: 151 - DNA, 204 bp, Homo sapiens
  misc_feature 12, 16, 32, 35, 38, 42, 47, 49, 81, 83, 86, 94, 96, 98, 127,146, 192, 193, 201: n = A,T,C or G
actttttttttnttantttgtttttgacatanatntantctntggtnanggtggctggaatatacctgacccaccattttnanaangacccatntnangtctgaccattgggagcaaagccatgttnacactgacctaatgcaaantatggaaccattgggctggttatacatttctgtttcttaaattatnntccaactntga

SEQ ID NO: 152 - DNA, 287 bp, Homo sapiens
  misc_feature 157, 220, 229, 243, 250, 251, 253, 263, 264, 269: n = A,T,C or G
acgcgggagactgaaaaactgcctcatgcatgtgttctatttattgatatatgcacatatggctgtgattcacgtaaattcatttttaaatgttactgaattcacagtatcttttctcaaccatgtattttctcaataaatgaatactaagatgcanttttgaaagtataaaaataaggagctgctagaaaaactaagttctgcttttttgttttttttnatctgtaantggagaaaaaattnataattnntnaatatggttnnaacancttattgcttttgtatca

SEQ ID NO: 153 - DNA, 129 bp, Homo sapiens
  misc_feature 35, 69, 71, 94, 117: n = A,T,C or G
acttttttttttttttttttttttttggagacagnctcactctattgctgaggctggagtgcattggcncnatcttggctcactgcaacttctnccgcctgggtttaagcgattctnctgcctcaacct

SEQ ID NO: 154 - DNA, 231 bp, Homo sapiens
  misc_feature 104, 107, 117, 148, 164, 167, 174, 183, 184, 187, 189, 196,200, 203, 207, 210, 214, 221, 228: n = A,T,C or G
acgcggggagaaaggaacacagtaaactgaattgatccgtttagaagtttacaatgaagtttcttctaatactgctcctgcaggccactgctttggagctcttnccntgaacagctntacatgcctggaaaataataattgtctattnggtgaaagatacttanaanaaatttnttgcctttnntananttcattntatnaanaganatntttnaatattngtatatnttt

SEQ ID NO: 155 - DNA, 378 bp, Homo sapiens
  misc_feature 135, 138, 311, 315, 325, 339, 348, 357, 372: n = A,T,C or G
acttatgtccatttcagtttccccacctataaacaagagccaatttctcttatttccctgctctccccaggttgaaaaggtcgtggccccttggaaagattgtattgactgtgttggggatctggtgccacctgntgnatgccacaagaaaggcctctcctgactcccaagttgtaacccgtttccaccaaatcgacttccaaataatatttatcaaatcatcatctgtgcttttcttcttgtttcagaccacttttaaggtggaaaaaggcaaagaaggcttatatgtattttcttccataatgagtccntcanaaaaaagttncttcggtgaaattnttgaccacnttatgtttngggggactccctatnggatca

SEQ ID NO: 156 - DNA, 239 bp, Homo sapiens
  misc_feature 8, 18, 26, 33, 135, 148, 160, 200, 216, 219, 221, 228: n = A,T,C or G
accactgnattgattagnggtgtatntaaacanggctcccttcattgcatctgaggacttgttttctttttctttatttttaatcctcttagttttaaatatattgcctagagactcatttactacccagtttgnggttttttggganaaatgtaactgnacagttaccttttcaattaaaaagacacttaccccaaaanaaaaaaattaaaaaanaantnccgtccncttttttgtgt

SEQ ID NO: 157 - DNA, 125 bp, Homo sapiens
  misc_feature 39, 89, 98, 106, 107, 110, 113, 115, 120, 123: n = A,T,C or G
acctggaggctcaacggtttaagcttcaccacaaaagcnaaatgggcacaccacagggagaaaactggttgtcctggatgttcgataanttggtcgtngtcttggnnttnatntnttctnctnat

SEQ ID NO: 158 - DNA, 339 bp, Homo sapiens
  misc_feature 142, 177, 192, 195, 215, 220, 249, 259, 261, 278, 284, 288,291, 303, 309, 313, 333: n = A,T,C or G
actgtaaaagttctgacacaagacagtggcagtggttacttttcatcgactttagcatgtgatctcagggactcaagacatacgctaagttctattctgagttttgggcaacagaagcagtgacagatatttctgaatgaanaaattttaaggtgttttcaagcattttaaaaagtnttggccaacacactnttngttgttgctcacaagtcacntttgntgcccaaagaatttaaagaacctttaaangtctacaacntnttactttaccaaagaantaactnttanttngaaggggttaantttttntttnattaaaaaattcacacttancttttt

SEQ ID NO: 159 - DNA, 275 bp, Homo sapiens
  misc_feature 94, 98, 137, 146, 164, 180, 188, 193, 196, 204, 210, 216,217, 224, 226, 239, 240, 249, 254, 256, 260, 261, 265: n = A,T,C or G
acaactatgatacataaattaaaaatacaaaaaaaaaaggagggggcaggcatggtggcttatgcctgtaatcccagcactttgggaggccaangcanggtgattgcttgaacccaggagttgagaccacctggcancatattaanactccttctctacaaaanttttaaaaaataattntccaggtntgggnggntcaactcnttttanccctanntattttntnatacctttattcnntaattttcnttaangntttnntatnattaaatatc

SEQ ID NO: 160 - DNA, 546 bp, Homo sapiens
  misc_feature 148, 164, 171, 179, 186, 205, 217, 220, 231, 251, 261, 327,376, 385, 396, 401, 405, 406, 410, 431, 436, 442, 446, 447,450, 454, 455, 456, 459, 467, 486, 487, 490, 494, 502, 514,522, 524, 540: n = A,T,C or G
acccccttctcccacgtagccacggcttcccctactatcaacatcctgcactagaatggacatttgttacaattatgaacctacattgacacatcattatcacccaaagtctgtagttaactgttagggttcactcttgggggttggnaagttctgggggcttngataaangcgtaagnggttccngtttttaagggctcaaaangtcttgcttatnagngattattgctngtaggaatctatgaggctanaacttatctnactgccccagcataaatgtcttataccattatcagctttaaaatacccattttaagtatcattganaataagacctttttttttttttttttttttgcaactaaaatttttatgntttttaaanccttaggccgnttganaaanngaanaaactggaatgacagcggggngggangaaccngaannaangatnnnatngggggggncaggtggggggaattaacnnaantttntttttcangggggagtcctnacctggcntnatgccatgaatgagtngcacac

SEQ ID NO: 161 - DNA, 380 bp, Homo sapiens
  misc_feature 198, 213, 219, 227, 228, 242, 248, 256, 278, 283, 286, 288,318, 337, 348, 354, 357, 377: n = A,T,C or G
acgcgggagtgaagaaaaagaaattctgatacgggacaaaaatgctcttcaaaacatcattcttttatcacctgacccaggaagttttcattgggaaaagggatttgaacctggtggttactaaccattttaaaagaccaccaccaagggaaaccaaatcttttcttgaaagaaagtaaaatgaataccttttgggtnaatggaattgaaatncaaaanaattctgnnctttattgacaacnaatggntgtaattnattgttgtagataaacctcctnttatncancnaaacccccctgttgggaaatgaatcaactncttgaaatactttattaantaatccaattncttccnaantttaagtttgtcgtggtacnccc

SEQ ID NO: 162 - DNA, 129 bp, Homo sapiens
  misc_feature 119: n = A,T,C or G
acaaattttgggattaagctgctcccaagacagtcttcatcacctttgtgaactggaaacaccaaatagtcaaggtctgaatttccattgtgtgtggctaagaccagtcgcataggttnataaatgtat

SEQ ID NO: 163 - DNA, 651 bp, Homo sapiens
  misc_feature 495, 550, 606, 609, 619, 623, 632, 641: n = A,T,C or G
acatattggcatttcatcctcaaaggaatcatcaaaagaaaattcactgagtaatctttttaccatgactgttgaagtgaagggtccctatgaatacctcacacttgaagactatcccttgatgatttttttcatggtgatgtgtattgtatatgtcctgtttggtgttctgtggctggcatggtctgcctgctactggagagatctcctgagaattcagttttggattggtgctgtcatcttcctgggaatgcttgagaaagctgtcttctatgcggaatttcagaatatccgatacaaaggagaatctgtccagggtgctttgatccttgcagagctgctttcagcagtgaaacgctcactggctcgaaccctggtcatcatagtcagtctgggatatggcatcgtcaagccacgccttggagtcactcttcataaggttgtagtagcaggagccctctatcttttgttctctggcatggaaggggtcctcanagttactgggtatttttcttatcccttgactctgatagtaaacctgccctctcancaattgacgcctgggttattttatggatatttattagcctgactcaaacaatgaanctnttaaaacttnggangaacattgnaaaactctnttgttcggca

SEQ ID NO: 164 - DNA, 222 bp, Homo sapiens
  misc_feature 100, 133, 138, 143, 145, 150, 159, 161, 166, 167, 169, 173,178, 183, 185, 186, 191, 192, 195, 200, 212: n = A,T,C or G
acatattggcatttcatcctcaaaggaatcatcaaaagaaaattcactgagtaatctttttaccatgactgttgaagtgaagggtccctatgaatacctnacacttgaagactatcccttgatgatttttttnatggngatgngnattgnatatgtccngntaggnntnaaancgttngtttngnncaacnnttnctggngatgaaccctgnattatcgcac

SEQ ID NO: 165 - DNA, 520 bp, Homo sapiens
  misc_feature 34, 37, 39, 72, 151, 202, 265, 391, 417, 423, 439, 486, 488,508, 515, 517: n = A,T,C or G
ggtacttttttttttttttttttttttttttttngananggagtcttgttctgtcaccaggctggagtgcanaggcacaatctcggctcattgcaacctctgcctcccgggttcaagcgattctcctgcctcagcctcctaagtagccaanattataggtgcccgccaccacacccagttaattttggcacttgtagtaaanatggggtttcaccatgttgtccaggatggtctcgacctcctgaccttgtgatccactagtcanagtttgtttttaaatgactacccgcgtacgcttgggagtcctcagcagggggatcattcacagtgaggacagacacaggtgaacctatgggtcgtggaacaaaagttatcctacacctgaaagaanaccaaactgagtacctgcccggcggncgttcnaaagggcgaaattcanccactggcggccgttctaatggatcccaacctcggaccaaacttggngnaaacatggcataactggttnctggggngnaaa

SEQ ID NO: 166 - DNA, 681 bp, Homo sapiens
  misc_feature 427, 456, 486, 489, 508, 557, 559, 594, 596, 597, 599, 605,606, 613, 630, 634, 636, 649, 656, 662, 678, 681: n = A,T,C or G
actttttttttttttttttttttttttgggtatatcctggcaatgggattgctgggtcaaatggtaactctgttttaagttcttcgagaaatctccaaactgctttccacagtggtggaactaatttacattcccaccaactgtgtataagcattcccttttctcaacatcctctacagcttctggtttttgtttgtttgtttgtttttttgacttcttagtaatagccattctgactgttgtgagatggtatctcgttgtggttttgatttgcatttctctcatgattacagatgatgagcctggccatttttgatcatctcattccttgctcatttttaaatccttcttttaaaaactatttaatacaaagtagaatcagtatctgggaattccaacacctgatgtcccttggggtgccaagaantgtctcaatctactggttggtctttctgnttactcttgcttatactgacttggttcttngangggtggataattgaatggngaacctcatgtgaatgaaatgactgccggaatctgaggagctgattctngntgggtccttagaaggatttggttggtcatttgatncnngntgtacnncctggancctaaatactttaactnggantnccctgatgcccgnggtaaanatctanacctggccgaccctanggn

SEQ ID NO: 167 - DNA, 609 bp, Homo sapiens
  misc_feature 200, 428, 439, 446, 460, 499, 525, 531, 534, 551, 557, 575,586: n = A,T,C or G
ggtacttttttttttttttttttttttttttttgagaggagtcttgctctgttgcccgggccggagtgcagtagcatgatctcggctcactgcaacctccgcctcccaggttcaagcaattccctgcctcagccttccgcatacctgggattacaggtgcccgccactacgcccagctattttttttgtatttttagtanagacgggttttatcatgttggccaggctggtctcaaactactgaccttgtgattcacccacctgggcctcccaatgtggtgggattagaggcgtgagccaccgtgcccggccagtgattcttgttagaagtgaaacttcagaacatccatccacatgagtggaacatcatgaagcaagatgctggttcctatcaaaggaatcttacatagcgcagcattcaacatgtnatgagaataanaactcanactcccccatcctnaaaagttggaaattattaaagccctgtatgggtgaaatntgtttcctaaaaattacccggaaagnttaatnccnggaacccctttttggangggggnaaaaaccccttttccaanttaattttttnaaaagggctttcccaaaaaaagg

SEQ ID NO: 168 - DNA, 668 bp, Homo sapiens
  misc_feature 322, 340, 382, 421, 425, 467, 478, 483, 487, 493, 501, 503,514, 522, 523, 525, 526, 540, 543, 546, 550, 557, 562, 566,567, 569, 570, 572, 573, 575, 576, 584, 595, 598, 602, 606,608, 616, 617, 620, 625, 626, 627, 628, 631, 632, 634: n = A,T,C or G
  misc_feature 637, 640, 641, 643, 646, 652, 653, 655, 656, 658, 663, 668: n = A,T,C or G
ggtacatccctgtttatcccattccatccaccgaggcccaacagcatggatgatctgtttgcagggaagcctccctgctcccgtgacagctatctcaccagctgacactttaccatatctggcaacaaactgtttgctctcttcttggatttcaaatccaccagcttttaccagggccagggccaggcctcccccatgcagaagatcttcattggctgcattcaccacagcatcaacagcatgtgtggtgaggtcatctttccagactgataactctatcctaggagtcagcattttctgaacacttgcagagatttgctgntgccttcctgaactgganagaccagggtagagatcagccaaacttattctggaggacttnacacagctgacctcattattttttaaaattttgaagtcnttgngggtaatgggaatttgcccactataggtttcttcaagaacanccatctttgantttcnttgnaactgntgttcggncnccatggaaaantcatctcnngnncccgggggagcttnaanggntatnccctttngcttnaaanntnnanngnnttcaaatnggggccctttnggngcgntttntngggaaaannaanggccnnnnctnncnggnggnntnaangggatnntnnantgggngtttn

SEQ ID NO: 169 - DNA, 617 bp, Homo sapiens
  misc_feature 407, 458, 478, 492, 505, 513, 543, 555, 564, 573, 574, 578,579, 580, 581, 582, 583, 584, 585, 586, 588, 589, 590, 591,592, 593, 594, 595, 597, 599: n = A,T,C or G
ggtacacactcacatctggacctgtgagaacaaaaggagtctgccaggatctaaaataaaggccagggagaaggtgcagtttcagatacagtgcatgggcgccactgtgggcctgggtcaatgagtgtatttggcagtaacatgtatgtaagaacttaatccacagcttgatataaggcaaaggctgataaagtcagaaccgcaatcagaaaaatcataaaagacctgactagcctgggcaatatagcgagaccccgtctctacaaaaaacagaaacaaaatcccccatacattagctgggcatggtgacgcatgtctgtggtcccagctacttgggaggctgaggtgggaggatcgcttgtgcttgggaggttgaggctgcagtaaagtggtgatcacatcgcggnacttccacctgggtgaccttgtgagacccgtcttaaaaaaatgtctggcgncggggctcacacctttaatnccacactttggganggttgaggggggnggttcatntgaagtcaggagtttgaaaccattcttggnccacattggggnaaacccatnttttttttnnaaannnnnnnnntnnnnnnnngntnccttcccggggggccctt

SEQ ID NO: 170 - DNA, 411 bp, Homo sapiens
  misc_feature 411: n = A,T,C or G
cgaggtacacttttcaaccaaatcaaaaaaacaactctaaaagattctattatgtaaattcagtttacataagtatattttttaaaattttgtcctctcaaagcacttttggactctcaaatgtttattaaatatgtttcacacagatgaggttatttccttttaatgttgtatcctatgtgaaaaatgggggtatttgtacacaagtaattcggtttctccacatccttgccaacatttggtttcatgactattttttactttaaccatcctgataggcgtgtgctggtatctcactgtgttttttaagtttgcattttcctgaccactgatgatgttgaacatcttttcacgtgcttatttgccatctgtataacctctctagtgaaatgtctgcccgcgtacctgccn

SEQ ID NO: 171 - DNA, 677 bp, Homo sapiens
  misc_feature 19, 65, 82, 172, 174, 270, 306, 421, 423, 444, 446, 454,473, 504, 517, 520, 531, 534, 565, 566, 584, 588, 593, 602,603, 608, 611, 613, 616, 621, 624, 626, 627, 633, 639, 641,642, 648, 649, 651, 654, 659, 661, 664, 667, 668, 673: n = A,T,C or G
  misc_feature 676: n = A,T,C or G
acttttttttttttttttnttttttttgggggaagtcctatttatcattttaaagaacagattgngcctttggtgtcatatntaagaaatactgtctaacccaaagccaaaataggtttaagttttgtgccttaaatttaggtctaggatccattttagacaattacatacngngcaaaactgaaatgtgtttttaaaaatatgaataaccaattatttaagcactatttgttgaaaaaaatatcattttgaaaatcagttgtccaaatntatgtaggtctgtgtctagatttggttacactaatntatctttatgccattactatattctcttgattattgcagggttttttaaaaagccttgaaatcaggaaaagttatgattcctaactttgtcctttaccaagggttagactatctngncccttagtatttaattatatnancttgttantttctacaaaaaaggtatnttggaatttgatggacatttggctgaatctnttttcaacctttnccnaactggtattnaanatctggaattctttttcctgcaatccggttnntttggccggaccaccttngggnaattnaccccctgnnggcgntantnatnggatncancnnggaccnacttgngnnttatgnnanctnttccngnggnaanntcccnccng

SEQ ID NO: 172 - DNA, 131 bp, Homo sapiens
cgaggtacttttttttttttttttttttttttggggtttgattcctcttcattctcatcatcagaggaaggacctgccaacgttgacactttgctaattacaccaagtctggctagctgatccacccgcgt

SEQ ID NO: 173 - DNA, 676 bp, Homo sapiens
  misc_feature 333, 504, 517, 537, 539, 544, 549, 558, 561, 586, 603, 620,659, 673: n = A,T,C or G
ggtactttttttttttttttttttttttttgggtagagacaatgtttcactatgtttgccaggctggtctcgaactcctgacctcaggcgatccacctgcctcagcctcccaaagtggtgggattacaggcatgagccaccatgcctggcccaactactgagatcttatccggaagttgctgattaccagcttcaggtgtttctgtttattgggagactgttcctgctgctggctgtgaccaattattattttaaaaagacagttaacaactgccggaccatcatctgatggttgcctgacatctgacattcctgttgtgtgtgttttgaggngagggagccctctcctgccctgttcttgtctgactagctacctactgtaacaaaactatatttggattccataacgtgatactcaaatgaaatttcaaaatctttcaagacatttatgaatcatcaactttcggggttggtctgctaggctcactttaatgcaagttctanccagggcacacanaaactattttgaatttcggngngcctnttaanaaggatttnttnacgttcaaacagggcagtctggccnttgaaaaaaaaatttcntaggtaggggttcatcntccaaatactgcacatttggtcaaaaaacatttcatttnttctaaccccctgntat

SEQ ID NO: 174 - DNA, 156 bp, Homo sapiens
  misc_feature 12, 13, 15, 16, 59, 75, 92, 108, 110, 111, 130, 131, 138,153: n = A,T,C or G
acccgggggcanncnngtggtcccatagcacaagctgtgaggggattcacttgtgtgcngaactcctcggaaccntggtgtccctaaacatnttcctgggaacagccntnnctaagaccctgatgactanngagctanctaagatcagctgantta

SEQ ID NO: 175 - DNA, 144 bp, Homo sapiens
  misc_feature 24, 25, 46, 51, 58, 63, 81, 84, 90, 93, 112, 115, 124, 130: n = A,T,C or G
actttttttttttttttttttttnntgagtgaggcaggagtccaangaggntatttgnggcantaaaattgattaaggatnctngtttanganatcaggtacgtcctttagngtngcgtatggntatcantcgaattgaggtta

SEQ ID NO: 176 - DNA, 652 bp, Homo sapiens
  misc_feature 38, 55, 57, 191, 201, 245, 280, 305, 341, 401, 503, 535,563, 581, 615, 623, 626, 647: n = A,T,C or G
actgggattacaggcatgagccactgcgcctggcccanaaatctcttttgaacantnttcaaaaaatacagctagcctcagtggttcatgcctgtaatcctagcactttgggagaccaaggcaggctgatggtttgagggcaggagtttgagaccagcctgggcaacatggcaaaaccccatttctattanaaaaaaaaanaaaaaaaaaaaccttggcatggttgcacgtgtctgtagttccancaacttgggaggctgaggtgagaggatcacctgancccaggaggtggaggctgaactganctgtgattccgcactgcgctccagcctgggcaatanacaagaccctgcctcaccaaccccccaaaataccatttataataacttttaaaaaaagantcgcttaggtgaaatctaaggactcatatagtgaaagctataaaaccctgatggaaaacattaaaggagacctaattaaaaggagagacacactgcatttgnggattggaagactggacggagtaaagacctcnttctctccatattgatatgtaaacttantgcaattcctattcaaanctccagcaagacttttcagatatagacaagattnttctacanttnactgaacgctaagggaactanaataa

SEQ ID NO: 177 - DNA, 228 bp, Homo sapiens
  misc_feature 97, 99, 104, 114, 142, 143, 166, 167, 168, 182, 186, 187,197, 212, 214, 225: n = A,T,C or G
tataccactcactatgggcgaattcgagctcgtacccggggatcctctaagtcacctgcagcatgcaagcttgagtattctatatgtcacctaaatncnccggngaagaaggcngttttgcgttattgggcgcttctttccnncttacctcgatcaacttgactcnnnttgcgctcgggtcnttcnngcctgcggcngaagccggtatacangntcactcaaaangcg

SEQ ID NO: 178 - DNA, 648 bp, Homo sapiens
  misc_feature 56, 62, 80, 85, 89, 116, 122, 140, 148, 158, 179, 189, 210,211, 221, 234, 240, 243, 244, 247, 258, 259, 263, 268, 270,280, 282, 296, 303, 310, 320, 325, 352, 372, 379, 416, 433,439, 447, 449, 453, 491, 498, 510, 513, 520, 521, 547: n = A,T,C or G
  misc_feature 551, 558, 560, 574, 575, 577, 598, 600, 602, 603, 614, 631,644, 646: n = A,T,C or G
acttttttttttttttttttttttgctttttttttttttttttttttttttttttngctggntaaaaaaatttgggtttnattgntttngctaaataatactaaaaaaaaaatttnattttnaaggcagggcttgaattntttaattngatccatttntttaattaaaaaaaaaagganggggaaaganatcatggccaaaaaaattgtnnttaacccccncccccccccaaangttttngcnngtnttggaaccatnncccnttccncncaagggcctnantttcggatgggggnaaccttnccccaanaaactgcctnaaggncggggcaatgggtgccaattttacctntcagcaggttagtcaaccanacaaacnggggggctaaagtccaaaaattctttccaggttttcntgcttatttggcttgancacatncaaactgncntaancctgtaaaatttaaggggagttggggtgggggcgtaanagcaaanggacagccgganaanagaaatnncgggtcccccaagttttttcctgggntagnggctttngntttaaatttaaaannanagggccagagtaaatggcacncncnngtttttttatnaaagaaaaattttcccntaatgagggaacntnaa

SEQ ID NO: 179 - DNA, 349 bp, Homo sapiens
  misc_feature 77, 102, 131, 132, 140, 143, 150, 161, 169, 174, 182, 208,209, 214, 223, 234, 243, 253, 255, 272, 285, 286, 318, 343,348: n = A,T,C or G
acaggcttgaacagaaattggagaatgccttgaaagacaatagaaagtgcccacccaccagacagaccaacttgaanggagctttattggccaagtggtatncccgttgggaaccttttatgaatgcttanncagtggantanagatctncttccgaaacntcccaaanatganttttgatnaggggaaggaaaaccaaccctttcannattgnttggaactnaaaacaatttnggaaaaaangggtttccananaaaccttgggcctccanaaagggcacattnnaccttgggttcaaaactttttttttccctttntttgggccaaggcccctttaacccngcccnt

SEQ ID NO: 180 - DNA, 516 bp, Homo sapiens
  misc_feature 452, 462, 472, 478, 481, 485, 488, 492, 499, 507: n = A,T,C or G
ccccccgcgggcacctggagcagaggggtaatgaccactggaaacacttgcggtattccaggagaacttccccacacatcgcgggcaacagggcacatgctgaaaactaatgcccaaaatctctcgaagagcacctccaaacgctaatcagattcccaagtgaatgaggagacatgtgatggcaccgagagagaactggtcggcttaccctcaaggaagccatcagactaacagccgatctctctggaagaaccctacaacagaaagagtggggccaatattcaacttcttaaaaaagaattttcaacccagaatttcatatcagccgactaagcttataggaaggagatatgtccttttcaacagcaaatgctgagagatttttgtccccaggcctgccctaaaaagagctctgaaaggaacactccttggaggactccgtgtccttgccntcacactggncgggccgttncttagnggntccnganctcngtaccangcttggcngaaatgatt

SEQ ID NO: 181 - DNA, 618 bp, Homo sapiens
  misc_feature 4, 73, 118, 128, 194, 278, 311, 349, 364, 408, 496, 555,582, 605, 615: n = A,T,C or G
actntttttttttttttttttttttttctaaaaaccaccttctgaatttgttgatcttttgaagggttttcgngtctctatcttcttcagttcagctctgattttggttatttgttgncttctgctancttagggatttgtttgctcctggttctcaagttcctttagttgtgattttaggttgttaagttganatctttctaactttttcatgtggccatttagtgctataaacttccctcctaaaactgtgttggctgtgttccaaagattctggnatgttgtatctttttttctgattaatttcaaanaacttcttgatttctgccttaatttcattatttacccnaaagtcattcaagancaggttattcaattttcatgctttattagcatgtggaatatttnggaacaactccaaaaatgctccttttgtgtggggtgttttattttttgcatttttattatgagaaaatatacatgacataaaatatancatttaaaaattactaaatatatatttaaatggcatttaagtaaaattcacaatgttgngcaaccatcaccattatatatttccanacttttacatcattcccaaacanaaacttttgncct

SEQ ID NO: 182 - DNA, 631 bp, Homo sapiens
  misc_feature 535, 583, 584, 599: n = A,T,C or G
acgcggggagaagttaggggctgcagcggcgctggctttaggtgaacgacgtgaaaattacttttcccactgaaacacacccaagtatatgcccagccttcatgaaagtgaacagagaaacgaagcgcctttatgtgggtggccttagccaggacatttctgaggcagacctacaaaatcagttcagcagatttggagaagtttcggatgtggagatcatcacacggaaagatgaccaaggaaacccacagaaagtttttgcatatatcaacatcagtgtagcagaagcggacctgaaaaaatgtatgtctgttttaaataaaacaaaatggaaaggtggaacattacaaattcaactagcaaaagaaagctttctgcacagattggcccaagagagagaagctgcaaaagctaagaaagaagaatcaacaacaggtaacgccaacttgttagaaaagacaggaggagtggatttccatatgaaagctgtgccagggacagaagttccatggcataagatttgggtttgtgagcnaatttgggaagagtcttacctgtttcttcaccttaaaaatcaacatanncgtaaaaatcatctnatatggatccctcaaaattctgccccaacctg

SEQ ID NO: 183 - DNA, 529 bp, Homo sapiens
  misc_feature 301, 313, 325, 334, 393, 415, 420, 489, 523, 524: n = A,T,C or G
acgcgggtggccaacatggtgaaaccctgtctctactaaaaatacaaaaacttagctgggcgtggtggtgtatgcctgtaatcccagctacttgggaggctgaggcagaagaatcagctgaatccatgaagtggaggttgcagtgagctaagatcacaccactgcactccagcctgggtgacagagcaagattccacctcaaaaacaaaaacaaaaaaaaacaaacccaaaaaataaaataagtaaataaataaataaaggtggagtgactatattaacaccaaaggtctttccaggacangtatcaccaganataaagagggtnatttcatanaggcaaagaggtcaagtgatccagaagacaccaatcctaagtgtataagtaactaatancagatcttcaaaatacgtgatntaaangctaatagaactgcaaggataattagacaaatccaaaattaaagttagatatttcaatacccctttctnaattacttatagaataagtaatctgaatatttannattta

SEQ ID NO: 184 - DNA, 459 bp, Homo sapiens
  misc_feature 28, 80, 91, 114, 117, 119, 122, 124, 130, 152, 162, 165,173, 176, 179, 189, 198, 201, 228, 231, 235, 258, 262, 273,312, 320, 323, 332, 340, 348, 350, 354, 366, 371, 373, 375,384, 398, 412, 417, 425, 432, 441, 445, 454: n = A,T,C or G
actttttttttttttttttttttttttnatttttttttttttttttttttttttttttttttttttggcagtttctaagncattacttttnattttgaaggatttgggaaactnttnanatnangggganagtttgtatgattaataaaaancagctttttnatnaaatgctnggnggngaacgagttntcagcctgnganatccgaccatcccattaactttgaagnttntctngattaataaaaaaaaaaaggggngggngaaaaaaaggnggaacatgctaaaaacctaaatgacaatcatccaaatgngaggaaanaanaaccgattnaccaactncctttttntntttnaaaactttctanatctnantntatgatttnggccttcctggctnaaaaagcctgcagncccanagaacccntgaaaanagccatggntctncaaaagaantagga

SEQ ID NO: 185 - DNA, 167 bp, Homo sapiens
  misc_feature 9, 65, 83, 88, 114, 117, 136, 140, 144, 155: n = A,T,C or G
acagtattntgaatgtgagatgatttgtcaggactaactgtctttttaacaaaacattttcagtnttttaaataaaattttgnaaagnaatgtgaattaaaaatcctggaacanatntgaattcattcactattgngtangaanatgctgttaanacataggaaggg

SEQ ID NO: 186 - DNA, 642 bp, Homo sapiens
  misc_feature 128, 212, 234, 247, 268, 313, 318, 321, 332, 349, 360, 376,399, 402, 418, 441, 447, 449, 456, 462, 468, 477, 481, 485,493, 495, 500, 507, 511, 520, 526, 537, 541, 551, 553, 554,561, 566, 574, 576, 578, 582, 588, 589, 590, 597, 598: n = A,T,C or G
  misc_feature 601, 602, 614, 615, 616, 619, 624: n = A,T,C or G
actttttttttttttcttttttgttttttggtgatgtggcttaaatgcaatagtttcttttttgggacatatttctgccaattaaagactagaagggcacaactttttttttaattaccatagagaanatacattaaaaaaaatcttctgatgttttgtagccataactaaattatggtaaaaatgtgcactattgtgaaaaggagcaacgnagttttgggttttttgttgttngtttgctttgctntgtttcataagagattaaaangtttctggataagggattagcttctcgaagtgtccatcattctgngtaanaancttaaatatgnaatgtaccaaactccanaattaaaaaanctctcatgttgttatnctttatacaaagcaatgataacngcntataacactggcattncatggcaaattgctgctaccttngtttananaacaatnttcaancaaaangacttgctntaangtgnttttaaanangcaantggtccnagantttctttanaatganagttttattgnactnccctttttcnanntggtctnatttngcatttgngntncatnccctgnnnggcgttnngannggctaattcatnnnacntgacngccgtatatggtggaccg

SEQ ID NO: 187 - DNA, 359 bp, Homo sapiens
  misc_feature 12, 17, 27, 45, 49, 54, 60, 69, 124, 130, 143, 148, 178,180, 185, 187, 191, 192, 194, 210, 217, 242, 272, 274, 283,289, 292, 300, 312, 320, 331, 341, 346, 357: n = A,T,C or G
actttttttttnttttntttttttttngtaataaacatgtggagngtcntgtantcaaanaaagcgcancagagaggcattgcttgctggaacacttgactccagtcatgtgtcaaatcacctntacatntagctttaccaanaatgnatgctaatgtatcctctttttatttaattnanctgantngagnntntggctaatattaaccnaacatgnaaccaactaaaatgtaacaccatcnccaatttgcaaaacatcactaccaaattcnantatcctaantttcangtnccggcccnggcggcctttcnaaagggcnaatttagcacntttgctgccnatcantagggcctagnta

SEQ ID NO: 188 - DNA, 267 bp, Homo sapiens
  misc_feature 58, 63, 70, 76, 81, 113, 179, 203, 212, 219, 225, 226, 236,238, 242, 247, 249: n = A,T,C or G
accacttcactccagcctggcgacagagtggaactccgtctcaaaaaataaaataaantaaantaaagcnaaaatntaaantgttaaaaaaaacaaaaaaagggaaaaaggangctgattgccttggtgagtcaacactgggtattttctgaccactatttgaaacaaaaaaggaaacnactgatattctatgcaaagatctnttcctgganggcactntgcggnnacaccagtgngnactntgatnancccttcattgatttgaat

SEQ ID NO: 189 - DNA, 483 bp, Homo sapiens
  misc_feature 401, 415, 420, 431, 456, 463, 469, 477: n = A,T,C or G
acctccaaagtggttaaataaattaaattaccactggaagagaataaaaattttagttgatccacattctcaatgacacctgaatttctgttttgttttgttttctaatctggtgggacatagcatggtatttcattgtctgaatttatatttatctgaataccagagtagatggggatctctcatacttttttacatttggcttctttttctgagaataacttttttattatctttgtcagttttggtttaggatttttttttagttaaagggctttttaatagttaccatcagagtgggaacaaaaaaatataagtttacagttcggggctgttattttaaattcctttctttgcacttttctgttctatgcaaagtgttgctgtttgctcacccggtnaaaggaaagtgtanttaancaattactctntactttcacagcctaagaaaatgtnggaggtnagaacnaagctttnattctg

SEQ ID NO: 190 - DNA, 545 bp, Homo sapiens
  misc_feature 450, 467, 480, 504, 532, 533, 543: n = A,T,C or G
accctaccactgttggaccagtggagagcagtggattgagatctcgctaccgttcttcacctaccgtctacaactcacctactgacaaagaagactacatgaccgacctacgaactttggatacttttctcagaagtgaagaggagaaacagcatagggttaagctggggagcccagattctacctctccttccagcagtcctactttctggaactatagtcgttctatgggggattatgcacaaactttaaagaagtttcagtatcagcttgcctgtaggtctcaggccccatgtgctaacaaagatgaagccgatctcagctctaaacaagccgcagaagaggtctgggcaagagtggctatgaatagacaacttcttgatcatatggattcatggacagctaatttagaaattggatcaatgagacaatatagtgccttgttcaaanatgaatctgcacaccanatgaaacaatggntggccaacctaagatggaaaggtngtttctactgaaaagctgcctggtaagnncttttttcantt

SEQ ID NO: 191 - DNA, 663 bp, Homo sapiens
  misc_feature 21, 165, 170, 172, 199, 221, 223, 253, 255, 261, 266, 270,283, 288, 291, 293, 296, 299, 312, 319, 410, 412, 424, 433,436, 445, 469, 472, 477, 479, 487, 498, 515, 528, 540, 550,557, 558, 559, 560, 567, 589, 590, 594, 598, 612, 613: n = A,T,C or G
  misc_feature 627, 628, 649, 650, 653: n = A,T,C or G
acacaatcctttataaaagtngtatatatttttttctgtcaataccttcattacatttataaatacaagatttacacagcaccccatcaaaaaaaaattaaaaccctttacaaatatctacatatatttcataccctataaactttcaaagggggtgctctggtnaaggncnccctagttaatgggccatttactgggngcagcaaaatacatattaatcngnaaagtttttttttggccataaaacattttnanaaaatnagtcnaganactttttcggggnaaacncantnagnctnataaaaaaccttnttttaanaaagggaacttaaatggggcgatttcccctgccgaatcaaaaagttaaaccagatttgggaataaggttgattgggaaccaaatggctctncnaaaccatttaanggcagggantgngaatgggtnggaaaaaaccttgggaaagcgganatnggaananctggggangaaaccaattnttattatgcccttttgngtttgaactgggnttaaacttcccncgtttcaagntactaannnnttattcnccttaaggaatttccaaattgnnaatnaacnttttttaaaaccannctcaattttctttnnggcccccaaaatgcttggaannggntttttttttt

SEQ ID NO: 192 - DNA, 666 bp, Homo sapiens
  misc_feature 293, 303, 304, 316, 327, 330, 376, 382, 416, 449, 451, 491,510, 519, 529, 571, 578, 592, 597, 599, 606, 617, 618, 629,648, 651: n = A,T,C or G
actctggcttgtgcttaatactgtggttaagagaatcacctatattgttgcatacagtttattcattttcattgctgtgaagtattatatccaaatattataattaattgatccattctattacagatgatcatttgggttatttctagtttggggctataatttgtgctgctgtgaatattctcaaacatgttttttaaaaaatatattatgcatttctgtttggcattatgcctagaagtgtaatttctgggtcatagagtagcatttatttctaattctaatgctctcanagggaatacnnggaaattttagnaaagcaaaggnctnttttaaaatctgttaaggaaaactgaatttgacattgtatttctgncccttngacaacatggcaataaacatttaagcacttttcnatattaagacagaaaaagcaatgaatagcagangngaaaatggaatttcccccaatatttaagtaaaaagaagtntgatgaaagaaaagttggntttttaagnggttttattntaggaatttttaaaaatataggatattggaacattcaggtangatgctncttaattttttttnttccngnaattttngggaccccgannttaaaaaattngaaagaccaacttcagggnggncaattagaaaaaggg

SEQ ID NO: 193 - DNA, 564 bp, Homo sapiens
ggtacaaaataaactttgaggcaaaaggcattgctgcagataaaaaacatgcctatataatgacaaaaggctaaatttaccagaaagctatatcaattccaacgtgattatacctgataacacagctttaagaaatatgaagaaacatgacagaattaaggagaaataaacaaatccactgtcatagtttgaaaatttaactaacctttctcagaaccttataaagcaagaaaccactagattatttccaatatcatctcgatttataatcacaataagtttccccttttggaattaaatagcaatttatttagtttatatggataaataaatacccacaaattggttttgaaaaactatttaaaaaaaggagaactgagaagaaatacttgctgtagcagatactgaaacaacattctctaaggccattttactgaactcattctaataactttatgcgatcagtgtaatatagtagaagttccaaaattaaatatgaaaaatacatgtcaaaaatatgagagttcaatttaaaaggaaatagtgactagttaataaatgatg

SEQ ID NO: 194 - DNA, 558 bp, Homo sapiens
  misc_feature 160, 253, 272, 275, 320, 339, 353, 360, 402, 409, 439, 473,475, 517, 527, 539, 557: n = A,T,C or G
ggtactttttttttttttttttttttttttgacagggtctcactctatcacccaggctaaagtgcaatggcgtgatcacggcttactacagcctcggcctcctgggctcaagcaatcctcctgcctcagcctcccatgtagctgggaccacaagcatgcnccaccatgctcagctaattttttaactttttgtagcaacagggtctcactttgttgcccaggctgatctcgaattcctaggctcaagcatttntcccaccttgacctcccanagngctgggattataggcatgagccattgcactgagctcactagccanaattcttaaaaatcttctntcaggagactatanataatgncctacttcttctcctttccagtatcacaaataaatgggctgngggtaancacatttcttttcctttaatctattttggnggggcattgcattttctatgtgggaacttaaaananttatttcttaaatataaaaaggttataaaatttaccaagctnttgggggggngggaattttttntttaaatcaccggctttng

SEQ ID NO: 195 - DNA, 171 bp, Homo sapiens
  misc_feature 8, 9, 43, 64, 84, 93, 115, 125, 142, 145, 149, 164: n = A,T,C or G
acttgatnngattctcagcttggttgctgttggtgtatagcanaactaccgagttgtgtaggtnaatctagtatcctgatactntgctgaatncatttaccagttctaggagctntttagaggantcgttcgggttttctanatntacnccgaaggagggaggnaggacat

SEQ ID NO: 196 - DNA, 408 bp, Homo sapiens
  misc_feature 76, 96, 125, 134, 138, 145, 158, 160, 169, 170, 179, 182,184, 229, 250, 276, 290, 299, 321, 331, 333, 337, 343, 345,358, 373, 375, 387, 401: n = A,T,C or G
actgcggggtccttgatggaccctaaaaggggttggagagaccgattcacagagaatgattccatcaggggaaatnctccatgactggctttgaanatggtgggggccatgtgacaaggagtgangatggcctntagnagctganagtggcccccagncnacagcctgnntgaactagnaancncattatttctctgagcctccagaaaggaggaaagcctagccaacnccttaattttagccttgcaanatgctgagcagaaaacccagaaactnctggttaacgtggngaaaccccntctttactaaaaaatacaaaanattttgcctngnctcnggtggntngtgcgccttgtanttcccatctactttngnaagcttgacggnaatgataaatggcnttaaccc

SEQ ID NO: 197 - DNA, 336 bp, Homo sapiens
  misc_feature 25, 69, 134, 157, 221, 227: n = A,T,C or G
acttttttttttttttttttttttnggccaagcattttttaataaattaaaaaacaaatgaaaccccanatttaattaaaaatttccccatattctggcctactctgtaatttttatgttgctgcctgaaaggnattatgtagttacttaataaganagaggaaggggaagtatttttaattttaaaggatgagaggaaaggaaaaccctttgggtttttntttttntgcgtctggagcccaaacaagcggcagcctgcgtatttctttagcaggtttttcttagagacaactaacaacagcttatcaatttctttacatcctaactctacaatgt

SEQ ID NO: 198 - DNA, 140 bp, Homo sapiens
  misc_feature 8, 74, 90, 92, 110, 115, 118, 122, 125, 133: n = A,T,C or G
ggctgcanaacaaatcaagcacatccttgctaatttcaaaaactaccagttctttattggtgaaaacatgaatncagatggcatgggtgntntattggactacctgtgangatgngtntganccnatttaatnattattt

SEQ ID NO: 199 - DNA, 304 bp, Homo sapiens
  misc_feature 88, 90, 92, 98, 104, 108, 129, 137, 140, 141, 165, 167, 168,174, 175, 178, 198, 214, 239, 250, 253, 256, 266, 276: n = A,T,C or G
ctaatttatatgttgctctgcttattaaataatcagcttaaggataatggggtattattctactcttgtgatccacgcgggtaatgtntntnttttcnaaacanatgntaaaaataagaccaagatganttaatttntannagtccttatttacacaataaacantnncttaanntgncaactgtggccgaacacggnggctcatgcctataancccagcactttgggaggccgtaaangggtggatcangangtnaggagatccnagaccatccnggccaacatgggtgaaaccctgtgctca

SEQ ID NO: 200 - DNA, 521 bp, Homo sapiens
  misc_feature 49, 55, 84, 89, 91, 110, 138, 175, 255, 263, 265, 302, 316,322, 348, 349, 359, 378, 380, 381, 385, 386, 407, 408, 411,416, 422, 426, 428, 440, 449, 455, 469, 477, 480, 491, 504,515: n = A,T,C or G
acttttttttttttttttttttttttttacaagggtagcaaaaaatatntgtaangcaaacattaatcagtaaaaactaggagnggctntntcaatacaagacaagatanacgtcagtggaaaaaaaattacaaggcncattacataatgacaaaaggactaatctgttaaaaanataaagcaattctgaattccaaacagcaaacagcagaacttcaaaatacatgaaatgaaaaccagtaaagctgaagtaanaatagacncntctttattcatagttgagcatgtttacaatccactgncaggcaattgatanaactgnttggcatataaacaagaaagggtttnnaagaactggncaactttattggtccagangnntgtnntaaaatttatgggatacatcnnctncaaanaaaaantttncncctggtcaaganctcagaaanattttnctagatgagaacangatgaccntgngaattttaaanaattgcattatgnagagtttgatntttgct

SEQ ID NO: 201 - DNA, 336 bp, Homo sapiens
  misc_feature 26, 50, 57, 63, 65, 66, 67, 69, 72, 79, 86, 87, 88, 89, 95,103, 106, 109, 111, 115, 118, 119, 120, 141, 143, 171, 202,215, 219, 276, 328, 330: n = A,T,C or G
cgtaccagatcccacctaggggcgcnacttgcttgcataactcctaaaanacctggncacccntnnnanccntaggacnctgactnnnngctggnaaaggggnttnatnanttgngtnnnagagtcaaactataaattacntnccaaggttaggttctacctatgcccagnaatgaacaaggacagcttaataggttataancaagatggagtcntttngggtctgatctctttcactgtcataatttcctcagttacaatttttgtaaaggtggnttcaaatgctttgctgacctcccattaacaaggatgtgccgattggaacttntnttttgc

SEQ ID NO: 202 - DNA, 269 bp, Homo sapiens
  misc_feature 99, 137, 172, 186, 216: n = A,T,C or G
acttgctaggtatcctgggtcagtggcggtgcaaactggtttcctcagctgcctgccatggggctgagtcgtcagggactggtagtggctttggagctnatagcggagattgactgaaaataactgcaatttactgncaagccttcccctgaatgttacaagccttcaatanactccagagttccnaaataattacatcagacaaattctgccagngtaatttttgtctgggtggggtaaagaattcctcgtgctttctactccagcat

SEQ ID NO: 203 - DNA, 661 bp, Homo sapiens
  misc_feature 631, 637: n = A,T,C or G
acagtcattttaatgatgttgattcttccaaacaatgatcatgggatatttttccacttacttctgtcatgtagtatttctttcagcagtgttttatagttcttgttgtggacatcttttacctcattggtctcctttgttaaatatatttctagatattttattttttgtgtctattataaatgaaattgagatttttatttggttctcagtttgagtgttgtcgatctatataaatgaaactgattttcaagcatttattttgtatcctgaaatcttactgaagtagtttatcaggtaaaagaatcttttggaggaaatatcaaggttgtctaggtgtaagattgtcattagcaaacagagataatttgacttcctctttttcaatatggaagacatttatttattttccttgcctgattgctgagagtggccatccttgcttgttacagttcccattcagtatgatattagttgtgggtttgtcatagacggctcttattattttgcagtatgtttttttcaatgcctagtttggtgagggtttttatcatacagacatattggatattattgaatgttttttctgcaggtattggagatgatcatatggctctgtttttaaaattgnttctgnggggaatcacatttattgatttgc

SEQ ID NO: 204 - DNA, 663 bp, Homo sapiens
  misc_feature 608, 632, 635, 649: n = A,T,C or G
acgtgacagagccaggcttaaacgcagatcatctggcttcagactttcatcactttattaaaatagctcataagaatactatgaggctcaaatgaggctggcggaaaccacaacatatgatattagtttcaaaagaagtcataacagaaataacgaaaaccatgaggatgaaaagaaaagccttgtttctttccactgttgagtttttcaaaagcattttctagaaattcgacttctcaagtcatgaatgttgaaatggaggccagaaatttgaagagttgaaggctggtgcaatcactttggaaaatatgaaagtattatacacattctaattatattttttgtgcagtcgtaagattagacaacaatttgaagatgacacaccgctcatattagatagatgtctgtagggggaatactccttcccctgacaagaccacatcgccagtaacgtcactctacacacacagttggcctctgtgtgtctccgtcttaagagtaattcaggactactagccaagtggttgggatttaggaatagagtggaattcagcttaccttgtaaaaactaggacgagataaagccttttctagcatataggcattgntggcataatccagctcactacagnctnaccccccggcttangtgatcctccacct

SEQ ID NO: 205 - DNA, 296 bp, Homo sapiens
  misc_feature 193, 237, 245, 259, 267, 291: n = A,T,C or G
actttttttttttttttttttttttttgggatggagggccgctctgttgtccaggctgaagtgcagtggcatgatcccagcccattgcaacctgtgcctcccgggctcaagccattctcctgcctcagcctcccaagtagctgggattacaggtgcctgacaccatgactggataattttgtatttttagtanagatggggtttcaccatgttggccaggctgggcttgactcttanctcaatgnaggaaattggttgnaatgcaanctttaaaacttaaacccaataaangaatt

SEQ ID NO: 206 - DNA, 127 bp, Homo sapiens
  misc_feature 5, 14, 15, 39, 45, 65, 98, 100, 109, 112: n = A,T,C or G
accgnatgctggcnnggaggtggcatatagctcactggnactgangggctgggcacccaaccctnttccacctgtgctaatcgcctggatctatcatnantgcaaaaanctncttttgttgtactgg

SEQ ID NO: 207 - DNA, 611 bp, Homo sapiens
  misc_feature 372, 380, 445, 454, 456, 460, 462, 464, 472, 473, 474, 477,483, 492, 503, 507, 509, 517, 532, 535, 550, 555, 561, 568,571, 584, 587, 608: n = A,T,C or G
acagagaaacccttaggccaaacttaaaatatgtaaggaggcagctttaggctaaacctgatttaacaaggtgaacaaacagaagactctggagaactatttcaaaggctactgagagaagcaggagtagatttaatcctgtatttctcctttcagaagatgtaagtagtgccaataggcaggaattaaaagaaattagatttttctcaattagaatttcctaaaaattagaactatttgaaaatgaaattaacttgagtgagttccctgtccctggagataaccaaactaagactgatgcctacttttaaaaagaagtctctgaagatctgtgtattcagtagagacttgaattaggtacttctaaggctnctctttgngattctatgaaattacgattccgggagaaccctttccaaaaaaaaaaaaaaaaaaaaaagtcctnggccggacncnctangncnattccacnnntgnggcgtnatatggtcnactcggacaanttgngnacatgganactgtcttgggaatngtntcgtcaaatccccanatccnaccganctaaggnaanccgggggctaagnagnctactacattatggttggctntgc

SEQ ID NO: 208 - DNA, 661 bp, Homo sapiens
  misc_feature 5, 6, 23, 71, 79, 85, 88, 98, 101, 108, 113, 180, 184, 203,214, 248, 257, 270, 275, 276, 302, 307, 310, 312, 320, 326,334, 365, 368, 372, 373, 391, 403, 406, 407, 408, 418, 424,443, 449, 455, 456, 460, 463, 478, 493, 506, 512, 516: n = A,T,C or G
  misc_feature 522, 529, 536, 552, 563, 569, 592, 606, 610, 613, 620, 624,627, 631, 646, 660: n = A,T,C or G
actgnntgcaacaactcatggantttgatggggaagacctggtctcaaataccaaggggggtctggagctncctgtggnttaggnggngaaaaaaaanatngggaganagccnggccaagttttagaacctctgcaagctcatgaaaaaaatcttatataaaaaggtgagaaagtgacantctncataaacttgggtctttcnccttgctgcantttgaccaccacctaccggttggacaacccaatnttggaggcnggttcattgaaanccccnngcacttttgggacaacttccaccatnggctnttntnatgggccnaaaaanccccctgnagaatcaacccttgcccccccctttttgganacncttnnggcaaaaaggtttatggnccacaaaaaatnatnnngccatttaangacctngtgggtgctttcttttttnaaaccnccctgnntttnttntggctttttccttgnggatccccaaacccncttccaacccgtntttttnccantgaaanaaacctnggtttangtttttgaaaaaaaanaaaatggggcnccaaangaacccccatgcttcatttcctngaagaaaacccccntttnganggcaaanaagnatncctntccattggaaaaaanccctttttgtttang

SEQ ID NO: 209 - DNA, 661 bp, Homo sapiens
  misc_feature 89, 132, 167, 240, 241, 253, 274, 275, 285, 325, 329, 382,415, 416, 433, 461, 476, 478, 483, 490, 491, 492, 496, 503,504, 511, 516, 524, 525, 533, 537, 556, 578, 581, 589, 597,599, 601, 605, 608, 609, 610, 627, 634, 640, 643: n = A,T,C or G
acgcgggggaaacggaagtgagcggcggggtcgactgacggtaacggggcagagaggctgttcgcagagctgcggaagatgaatgccanaggacttggatctgagctaaaggacagtattccattactgacntttaaccaaggtggacctttggaaagtcatgatcntctcggaaaggttttcttgggtgaaaaatgacctttgcctagccttcccttggattataaaaaaaaattttcnncctaaccaaganaaaatgaatttttcccactgnnaaacattcanggtctatttgctccctaaaattccgatggaattcaaggcntgcncaggttcacggcttcattttttaaagctcaaattttcctgggattttgagggnaatgataaaacttttggtttagggaatttttannggcctccaaacgaatcntgggaaaaccccctttggggggggaaanaaacctgggttaccngnaaaangggccgnnnaagnaaacccnngggcggnttttnttttaaannattttttncccnggggcggccccccctttgnggggaaatttccccccacatgnggnggcttttntgggggancnancctnggnnnaaagtggggggaaaaanggggganaaaagnttntcccgggggaaaattttt

SEQ ID NO: 210 - DNA, 273 bp, Homo sapiens
  misc_feature 21, 22, 24, 34, 44, 65, 66, 68, 90, 91, 122, 126, 154, 174,195, 206, 210, 216, 252, 267: n = A,T,C or G
actcgggggaaacggaggtgnncnggcggggtcnactgacggtnacggggcatataggctgttcnnanagctgcggatgatgaatgccannaggacttggatctgagctaaaggacagtatnccanttactgaactttcaccaagtggaccttntgaaagcatgatcttcttcngaaaggttttttcttgtggtnaaaaatgaacntttngcttancatcccctagaatttatcaagaaaaaaaatttccanctcaaccaagataanattgaa

SEQ ID NO: 211 - DNA, 440 bp, Homo sapiens
  misc_feature 436: n = A,T,C or G
acaaaatgaaatttaggaccagagaaaatgcaaattaaactgaaagtttaagacagggagaaagttagaatgcaaatgcatagaacataatatgttctacccagatattatattaaaatggctaattttattgactttcctggtagaaaaacaaaggaggtaagctatctatgtagtgatatctcagctagtgcatgtggaaatgtgtgtgggcagtttgggtggtcacaatgactgaatgcctagctggcattaatgtctggaagccagggattccaaatggctatcctggacaggggactgggttgagggggccaatggggaggcactcccatatgcaaagaattgttctgcccaaaatgccataacaccctgctgagaaaggctgagtgaaatgtttgtccttaagtaaaaaaaaaaaaaaaaaaaaaaaaanggtt

SEQ ID NO: 212 - DNA, 660 bp, Homo sapiens
  misc_feature 519, 575, 618: n = A,T,C or G
acgcgggcaggggtagaatggaaggagaggcggctggagaggacaggtggtggagggccttggcttctgctaagtgagatgggaaccactggagggtttgaacagaggagtgccttgattgatttatattttgcaagggtcattctagctgccatattgtgaaaaactttagtggacaagggcagaaggaagagggaagacctgttaggaagctactgcaaggttccaggcttgggcctgggccacagcaacagcagtggtcaaatatctagatttattttgaaaagagccaataggatttgctgagagtttgaatgtggagtgtaagagaaggaagagttaatgatgacattaaggtttttggcctgaatagcaggaaagatggagttaccagttactgaaatagggaaggatgggctgggtaagtaaggaatttggtgcaaagcagctgtctgtggttggaatgggaggttctgcttgcaaatcaaagtggagagttctctcaggtcaggtctgcancaaagctcgagacagggatctgaatgcacttggtttattgttgggggtgctctcanaaggaacctgtgaaagcctttatcagtcatttattgctgtganaagttctcttggaattggggtacctcgccccgaccaccctaa

SEQ ID NO: 213 - DNA, 638 bp, Homo sapiens
  misc_feature 302, 320, 348, 453, 462, 467, 480, 516, 556, 563, 587, 607,615, 629: n = A,T,C or G
acttttaggagagatgggatttcaccatgttggctaggatggtctcgatctcttaacctcgtgatccgcccacctcagcctcccaaagtgctggtattacaggcatgtgccactgctctcggccaattaattttttttttatggagatatggggtccctttctttgcctaaactactgggcctcaagccatcttcccaccttgacctcctaaaatactgagattacaggtatgagtcactgtgtctgaccatcatggaaattaaacgacatgcttctgaatgaccaaagagttatgaagaanttaagaagaaaaataaancaaattctcaagacatgaaaatagaacnacaccataccaaacccctgtaatactgaaaaaccatgtaaggggggaagtcataagattaatggcctacttcaaattagaattttcaaataaagaagcttctttncttgtcagnaactngattaaaaggagnaaccaaaatcaaattgttataggaaagaagaattgngatcaaccgaattaaccaaattaagacttaaaaatccacngaccatngaaccgaaagtggtttttgtaaanataaaaaaagttgaaaaccntctgttcnctaaggaaaaaganggaagaccc

SEQ ID NO: 214 - DNA, 260 bp, Homo sapiens
  misc_feature 172, 196, 222, 238, 240, 241, 250: n = A,T,C or G
acttttttttttttttttttttttttttttggttaattaaagtatataatgtaaatatggtattgaaagtataaaaattaaaggcttctgaaaaactcaagaagggcaaaaggctatacaagcaagtagtatacagattgtttccttaaaagataaattttatatccagaanttaaatcccagatgattttttttnttttcactttcccaaacttgggagcntgaatgcctctaaatntnnccaatgaantttacatttt

SEQ ID NO: 215 - DNA, 130 bp, Homo sapiens
  misc_feature 3, 71, 74, 77, 85, 87, 92, 94, 98, 102, 118: n = A,T,C or G
acncggggtctttcccatcttgcaagatggcgggtgaaaaagttgagaagccagatacttaaatagaaganacncgnaccatagnangttgntncttngtangcatgggaaataattnttaaccttaaat

SEQ ID NO: 216 - DNA, 524 bp, Homo sapiens
  misc_feature 54, 104, 237, 254, 279, 290, 326, 341, 343, 344, 347, 353,355, 356, 357, 362, 392, 398, 405, 419, 436, 487, 507: n = A,T,C or G
acctgtagtcccatctactagggtagctaaggcaggaggatcgcttgagcccanaaggttcaggctgcagtgagctatgatcatgccgctgtaatccagcctangtgacacagtgagaccatgtctctaaaaaaactaaaaaatatttttaaaaaattttaaatagacaatacctaaaaactacctttaaaatatgctatggggcccggatgcattggctcatgcctgtaatcccancactttgggaggcccangtaagaaggatcgcttgaggctaanaaagttcaaanaacagcctgagttgacaagcaatagcttatctctanaaagcctatttaaantnnaanaaattnannntattnatatttttcttgggcatggtcaagagcctntatttncatcttntcaagagggctgangggggaggatcacttgnatccaagaaatccagccttttaggctcattgaacctagctcacccaactgnaccccaacttgggcaaacanagtaagatcccatttct

SEQ ID NO: 217 - DNA, 194 bp, Homo sapiens
  misc_feature 121, 132, 148, 154, 160, 187: n = A,T,C or G
acgcggggagttccaagtaggtaatccttctgagaagtcccacctttctgagcagctgtgtttgaagaaagctagtgggaaaagttccaggattacatgtcaggaaactacaagaggtaanaaacattttgntgatttaccagtgttnttaacnttcctnctgggctgaaaacttgcttgtttcgtnaaaaatg

SEQ ID NO: 218 - DNA, 391 bp, Homo sapiens
  misc_feature 61, 65, 84, 86, 97, 109, 120, 140, 146, 148, 155, 182, 193,206, 227, 228, 248, 250, 251, 261, 270, 275, 276, 281, 296,299, 316, 327, 334, 355, 362, 367, 373, 374, 376, 379, 382: n = A,T,C or G
acttttttttttttttttttttttttgggttttttttttttttttttttttttttttttcnccancccaccaggggtttaattntntgaatcaaaanatcagttcaaanaggacccctgntttgtcctcatgcaggggtnaaaatntncaaaccnccctgggaatgtccaagcccaaaaaanccaggggccantccctgagcaagnggaaaattgggtcctggagtnntaggctgcctcctccttttncnntcctcctaanttttatganactgnnggggnttggggtaacaaacnggncaaaataatttttttgngctggacctcnttcctgnaaactggggctcaactggganttctggntgaanttggcnngnccnggnggtgggttt

SEQ ID NO: 219 - DNA, 180 bp, Homo sapiens
  misc_feature 66, 111, 125, 138, 140, 154, 159, 169, 176: n = A,T,C or G
acaggttttgcccagtctcctatagcatggtatagtgataactgattttttataacaatgactcanaggcattgaagatccataactatcttctgaattatcacagaaagnaagaaagttagatnagtttatgttaantntttaataaatcatntaacnattgttgtanttgtggntctt

SEQ ID NO: 220 - DNA, 643 bp, Homo sapiens
  misc_feature 159, 220, 233, 241, 284, 293, 302, 324, 373, 381, 385, 404,410, 430, 442, 443, 447, 462, 503, 507, 513, 516, 528, 540,547, 554, 558, 562, 603, 610, 617, 621, 642: n = A,T,C or G
actttttttttttttttttttttttttttttgggaaatgtttatggtttttatttttcaatttttattttggttttcttacaaaggttgacattttccataacaggtgtaagagtgttgaaaaaaaaattcaaatttttgggggagcgaggggaagganttaatgaaactgtattgcacaatgctctgatcaatccttctttttcttctttgccccacantttaagcaagtanatgtgccnaaaaaatggaaggattcaacttttcagttaaaaaaagaagaangaagaattngccaaaganaaagttttttcaaatttctttnttttttaaatttaaaatgaagttcattttatttgaaacaaactgggccnatttcccncaanaattccctggtcaagaccnccgatntccaaaggtgccatttaaangaagggcaggcnngatngcctattttttttgnattcaagattgctttccccatcatttgtccttttaaaaccncatntacaanaancgtgtaaggtgnaccctctgttgncctcacnaacaatnttcnacantcattagaaccctgtaaaaatgacacccttttcaggttgcnaatcccnctccatntttncatgctgttcttgcatgggang

SEQ ID NO: 221 - DNA, 405 bp, Homo sapiens
  misc_feature 198, 216, 227, 234, 272, 290, 308, 328, 332, 336, 341, 343,371, 375, 393, 397, 398, 401: n = A,T,C or G
acactctatgtctgcatttgattattaccttaaaacagacttattgggtcacagcatataaatgtttccatccttgaaggacactgtcaggtggcttttaagataaagcttcatttgttaaaaattctaaatgcatttttaaatgactatgcaagaaagttcattaaaatatactttcttttggggaggccgaggcangccggatcaccctgaagncaggagtttcnagaccangcctgaacaacattgggagaaacccccgtcttctactnaaaaatacaaaaattagnccgggccgtaagtggcanaatgcccggaattccaactnctanggangcctnancaaggaaaaactgcttgaaccctgggangccngaagttgcggatagcccntatnntancttt

SEQ ID NO: 222 - DNA, 395 bp, Homo sapiens
  misc_feature 163, 170, 193, 226, 275, 306, 313, 316, 331, 344, 355, 362,367, 369, 379, 384: n = A,T,C or G
acgcgggtaagaatccttgaaataaatgtttttttaaaaatctctgggaagagtaaacttgattatttatttctaagtgaactataattatctttaatttttgtgaactagggactctcctaagaaattatcaaatgcaactcaaatgcaatttttaaaaagnaatccanttaaagctttctttggaaacaantttaagttttatggttatgatttgaataagccnaaattatctatttttgcaagaacccaatttttcatgctctgcaaattgntttctgtttctatgtaaaaattttaattatnctcctanacnttattataaaagatnctgatttgattancattccctttncctgaancaccntnctaagacatngagantaaatcctttt

SEQ ID NO: 223 - DNA, 202 bp, Homo sapiens
  misc_feature 64, 74, 92, 104, 119, 149, 158, 164, 165, 175, 195: n = A,T,C or G
acgcgggactcttgaaatggttatctttgtggatgattttttttttaagctgaaacttacctcntgaataactngtttaaagtggtgggggnttaaattttcantagaatcaattgaancaaaaatttaaacctactcttttgatttcnacttttcantccttnnccattaagcncccttaaaaatgtaagttanttttaaa

SEQ ID NO: 224 - DNA, 602 bp, Homo sapiens
  misc_feature 457, 560, 563, 568, 583, 600: n = A,T,C or G
actatatttgatttttagtctagtaaaatgttagtaacttgttaaatgcgttctaacaagggaaggcaggtattgggtagaaatacatgttttgactgtatcagccatgggtgacttctgcaaatttactatcttccaaagaacgatacactgtcattgtagagactgcacaatctgtccattagagcacaacctcttaatagattaccagttctatcccaatatacaatgattttgatgcttcaaaaacattttaaatacagtataaaatcacttaactaaatattgcatattaactctatggttacatttttgtatattagaagcctcagagaaagagttaagaagtatattttatgcaatactatatgccctgcaataggtaaaatactgaagttaaatctttactctgatcacattaaatatcccaatatttaaaatatttaaagccataaanggaagcttcatattccacagtttattgctcccatgaggtatctgcaagcctacataacataatgattccttggtttgtttccaaacaaatggatttaatttantanttccncctttaacccccggnaacaacatgacactggntt

SEQ ID NO: 225 - DNA, 224 bp, Homo sapiens
  misc_feature 40, 66, 73, 150, 172, 195: n = A,T,C or G
ggtacttttttttttttttttttttttttttttttcttantatctgcttctgcctcccccgccatnttatggnggaagcagtcgctatgatgattatagcagctcacgtgatggatatggtggaagtcgaaacagttactcaagcagccnaagtgatctctactcaagttgngacagggttggcaaacaaaaaanagggcttcccccttctgtaaaaagggggt

SEQ ID NO: 226 - DNA, 591 bp, Homo sapiens
  misc_feature 503, 566, 581: n = A,T,C or G
ggtactcagaggaattttttttgttttgttttgtcttttaagaaaggaaagaaaggatgaaaaaaataaacagaaaactcagctcaggcacaattgtcaccaaggagttaaaagcttcttcttcaatagaggaattgttctgggggtcctggagacttaccattgagccatgcaatctgggaagcacaggaataagtagacactttgaaaatggatttgaatgttctcatcccttttgcagcttttctttttggctctcttatgtccttggcttgctcctctattctacctctctttctccagcaataatatgcaaatgaagacatgtatccataagaaggagtgctcttcatcaactaatagagcacctaccacagtgtcatacctggtagaggtgagcaattcatattcaaaggttgcaaagtgtttgtaatatattcatgaggctggaagtaagaaagaattaaaaatttgcctaattacaatggagaaccattctaggnagtgatcttggacccacatgaataactttcttgaagggcaacccaaatccattttatttctgnctggcttggcacctntggaaaggtt

SEQ ID NO: 227 - DNA, 583 bp, Homo sapiens
  misc_feature 466, 480, 488, 518, 521, 551, 574: n = A,T,C or G
acaaacaaccacttctcagtagaaagttaagaataacatttaaaaacatattcatgttttagagaacgaatgtgccatcgttgtatattaaataaaaataaaagattaaccagctataagaacactacaattacaactagagtggcagtgttttttaactaataaaagtatacatgtttataagtgcagcatacctgaaatcttgatgtttgtcaatacttatggttgcttcaaagataaatttatgtgattatttttgaaagatgtgtattaatttgaataatacccagaaaaattataacttaaaaattgcagttttcaatatgagaatcatttatgtgtgtaaatactcaactaagaaagatcaaaagtgtggtataatattacaagaaaaaatattcaaaatggaaagtccatttatgaatgtattaatattaaaatccaaaggtatgtttttttataatgnctacattataatgnttacaaangccataaaatcatttcagaaaggtctcatnctncagatatggcccataaacttcattttctanaaaaaagaagaaatgttttattntaccaagat

SEQ ID NO: 228 - DNA, 213 bp, Homo sapiens
  misc_feature 109, 114, 119, 153, 162, 174, 184, 186, 193, 205: n = A,T,C or G
gcgtggtccgcggccgaggtactacttctcaaggaggattcatggtctgtcctttgctcactacagatttctcctcttctctgggaaaaaatggtgaatgcttctgctnccttntactnaactagatcccttgattattactacattattggntattccccncgttgacacctncttagaaacncnatcgggngatgtgtgtttnattaggca

SEQ ID NO: 229 - DNA, 150 bp, Homo sapiens
  misc_feature 9, 20, 27, 88, 106, 132: n = A,T,C or G
gcgagcggncgcccgggcangtacagnggccccccgtgaaagacagaattgtggtgaatcctggttgtcacgccctcccagtgtgcanataagggctgctgcttgngacgacaccgtgtcggggggtcccgnggagcttactatcctaat

SEQ ID NO: 230 - DNA, 568 bp, Homo sapiens
  misc_feature 2, 4, 49, 144, 188, 197, 198, 218, 250, 277, 281, 284, 292,307, 321, 340, 346, 382, 391, 392, 394, 395, 422, 429, 433,465, 470, 474, 475, 485, 486, 489, 494, 495, 499, 504, 507,509, 511, 512, 526, 543, 554, 557, 561: n = A,T,C or G
cncnggacactgcgccatttcctgtccaaagctgggcgaatcagggatnccggttcacaatggatgctgataaagagaaagatttgcacaaatttcttaaaaatgtggatgaaatctccaatttaattcatgagatgaattctnatgacccagttgtgcaacatgaaagctgccctggagacagaaangagactacnngttatggaggaagaccatgnaggaggatgaatgcatgaccaccttgaacaanactattatcagtccttcacacaactgntctnaanagtgcagnaatgaaataaactcngaggccttcttggnatctgtggagaaggatgcnaagganctagccaggtgaagaagggaaaacaaagtcttggcngatgccctnnannaaaaagggaatgaaccatttggtgaangggaatnattnaaacaagctatcctgcgctcactgagggtttngagantctnnacgacatgannggnctgtnnctcngcccntcncncnnagggttaattcatntcacttctttcttacangtgggaccganttncgtnccaactt

SEQ ID NO: 231 - DNA, 113 bp, Homo sapiens
  misc_feature 39, 58, 76, 79, 81, 86, 93, 96, 99, 108: n = A,T,C or G
taaagatccagcgtttcccctggaacttcctcgtgcctntctgttccaaccttgccgntaccggatcctgtccgcnttntnccttnggaacgnggngcntttttatanttacc

SEQ ID NO: 232 - DNA, 633 bp, Homo sapiens
  misc_feature 2, 3, 432, 486, 528, 551, 559, 568, 591, 614, 623, 630, 633: n = A,T,C or G
tnnagagagaaagacagggctctgaaaatactgccataggctcaagttccaaagtgctggagttacaaaagtataaaggacaacgcaaaggactttttagccaaagaagaaccagaaaggaagagtcctagggaattggagacgtcgcgaaggaatgttgtaaggagaattcaagcctaaaacggttctgagcactgatttcatcaagccgatggaggcaacaacatattccttagggaaaattaagatgcacagtatgcttcaagatgatggccaagaacaaccaactcaacgagccttcaggaattcatgatttgaatatcatgttcaaggctgccttctagataaagatcaaaccaagaaagtccatgtgtcactgctccgtgaaggctccgggtggaactccctgccccactccacctttaaaatttncagccaagtgtcttcaccttcttcagcgcccctggttacatgtccatctctctntttagaactacagacatcagcaactcgagaaaagaaggttgntctgggagaatctaatgtgaccngttattgnaaatatatntctttactcaagtttttggcttngggctgctaaatataaccttttnactggttgncttgagnggn

SEQ ID NO: 233 - DNA, 627 bp, Homo sapiens
  misc_feature 527, 598, 600, 604, 611, 622, 627: n = A,T,C or G
ggtacaaccttcaaacattccagtttttataaaaaaaggggcacacaatcgtggttttgatccccttttgtttttggacaaatgtttctacaaatacagattcagcaaacccaaaggctgcaaatttacttgcacagtaatctgccagcccatttactccacttaatccagctgaacttgaaatgcaaaccaaatgtccatggtcattagcaatcatagcaggtagaaaggctttataagtccataaatgtgctttgaaattcacatcaaatgacttttccataagctcatctggacagtcaaggaactttttgcctgttacgattccggcattgttgattaggatggaaacatcgccgacttcttttttaacctggtcggctactctatacactccttccttttggctgcaatcgcaggtataggcgtgcactcttggtggctccagcttcccgaaccatcttacatgtttcctcattcccctccttattgatatcccagagaacaagaacagatccaacccggcnaactgcaaggttaaacctttcgagtcactttcacccctgtgatgaagactatttaccacaacgtcttccgngntttnggagtangcaaaatatancctcn

SEQ ID NO: 234 - DNA, 630 bp, Homo sapiens
  misc_feature 389, 404, 424, 460, 476, 481, 486, 515, 533, 540, 552, 572,575, 618, 620, 623, 625: n = A,T,C or G
ggtacgcgggggatgtgtcagctccgcaggggtttggggaaacggccgctgagtgaggcatcggctgtgtttctcaccgcggtcttttcctcccactcttggctggttggaccccactatggaaaagttggcccctgagccagagctccagcagccttgttagggcgtggcctgaggcttggataagtgggatgtaaaacgaagatcaggagcagatttgaagaattacaaagtgaattggtgccagtcagcatgtcagagacagaccacataagcctctacttcctctgataaaaatgttgggaaaacacctgaattaaaggaagactcatgcaacttggtttctggcaatgaaagccacaaattaaaaaatgagtcccaactattgncattaaacactgatnaaactttattgtcaacctantgacattataatcgaattgaacccaagaaaattatnttccaatctggggggnggganggttnttgggccaaaacaaacccaggctaaaaanttttgaacaaatacttanttttctnaggggaaatttnctaactttttcaaaaccatnganccgaccgaaagtccccaatttggggaataaggctttttttccnantantntgaaa

SEQ ID NO: 235 - DNA, 395 bp, Homo sapiens
  misc_feature 351, 388: n = A,T,C or G
ggtactctggacaaggacaatcagcatcttctcccaaggcagctcaggggctggcatgaggcaaatacaacagactatcccgaactccttattagaccacaaaatacaaacagcattttctttttttctcttttttttttttgtcaagacagtgtctcactctatcacccaggctggagtgcagagagagactccgtctcaaaaaacaaaaacaaacaaaaaaacaaaacaaaaacaaaacctgtagtttggtaacaaatattgaatcttctttatttttagtatccactctcttcccactgaaactaagaaacccagagcactttccacgaattctattgagataaaggnggaggaaaatgcaacccccgcgtacctgccgggcggncgctcga

SEQ ID NO: 236 - DNA, 644 bp, Homo sapiens
  misc_feature 40, 72, 114, 125, 130, 137, 145, 155, 160, 173, 239, 245,282, 287, 292, 310, 317, 322, 341, 352, 370, 379, 381, 387,391, 393, 396, 418, 436, 503, 516, 527, 538, 547, 549, 562,564, 571, 590, 595, 617, 625, 632: n = A,T,C or G
ggtactttttttttttttttttttttttttttaagactanggtaactagaggtgtgggtgagatgaaaattnggtaatagggacaaatgaaataagccaaactgttttgccacnaagacttccantcttnaggttanttctggtntgttaaaggnggttntgcagagctcagntctgggaatgaatcccttttcaacttcttgataaaggcgtgacttccaaacttttctgaggtacanaaatcntttggagccattttgagacaaaaagtagaggctctgncaagncaatnctgcattgcatgcttggnccactgnataanccacgcctgagatacaaangatgcactacncttgacccgctttatgtnctcttcctntncccttntttntnatnactttattagggtaaaacaccncatacaggctttttccanatgactcctatttctgggggttgggtaaaatttttgcccccataaaccaaactttgtggctatgctntttggcccttccntacctttggcnttattccaaantttaaaggntnggggaaactttcngntgctggnccaaaccggggaatttcanttaanatttctgaaccttaaaaggaanatgggccncaacttnttggatcctttt

SEQ ID NO: 237 - DNA, 635 bp, Homo sapiens
  misc_feature 286, 299, 345, 372, 393, 399, 416, 417, 419, 421, 439, 456,458, 465, 511, 513, 518, 527, 529, 531, 544, 550, 582, 594,596, 605, 619, 632: n = A,T,C or G
ggtacaagtaaagcctgtggtgggatcaaggagctatcaatatcaagttcaaggatttccgtcttactttttgcagtctgatatgtcaccaccaaatcaaaaacatatctgtgctctctttcttaaagagtgtgaggtctccagtgatgatgttaataaatttttaacatgggtaaaggaggtatcaaactacaaaaacctaaactttgaaaatcttagggaaacactaagaactttccacaaggaaactggaaggaaagatcaaaagcagcctacacagaatggncaggaagagttgntcctaaacaatgagatgagtcttcctctggaaaacacaagtaaggngtgatttttatcatcaagtttcagtgnaattgacatacttaataactncagggnttaaaatggtaccactnncntngtattctttttaaaaatncatttggggaaaaatgngnttattgntgctttttggaggatgcccttggcattttaaggttcttatttggancntgaangggtttatnancngacttttaaaacnttccantcctttcccccttaaacgggaattaaaccccntttacctttggntnccacgaatncctgattttttatnaaaaaaatcagtnggg

SEQ ID NO: 238 - DNA, 650 bp, Homo sapiens
  misc_feature 164, 313, 315, 322, 324, 334, 361, 374, 376, 385, 404, 412,416, 418, 426, 429, 432, 438, 441, 451, 452, 462, 469, 472,476, 478, 481, 483, 489, 490, 494, 501, 503, 504, 505, 520,523, 526, 528, 534, 535, 539, 549, 566, 568, 578, 582: n = A,T,C or G
  misc_feature 584, 587, 591, 598, 600, 603, 606, 613, 617, 618, 619, 620,628, 634, 635, 643, 644: n = A,T,C or G
cgaggtaccctgagccaggcggggacaaaaactgacaaactgcaggatgtggccatactgggaggaaaagtctccacaaatggccttgcccccccgacacccccgcacacacacacaaaacccctgcagacctacttataccccttagcctgtaagcccggtgnctgcctcctcagatttctgtagagcagcccagcaggttaataaatttgcttgccgactttgggtcttcttgtcctttctcttggctaaccttataagcccatgtgcataactccctctaggtcagcggtcccccaacctatttggcatnanggaccangnttcgtggaangtaatttttccacaaaagggttggccnggggttggaaggngngtggccttnaaaattttgggatattggnggaaaaangaantntttgcccnacnaanggttgnganaactggtttnnttggatctgntgggtgnggncctntntgntnactacnntcanaaagttntnnncacaaaaatttcttnaanaananaaaggnnctgnaattggggcnatggttggaatggaagngnttttggaggngggntnttntacntctaaantnggnttnctttttnatannnngacagaanccaggnntgttttannatattt

SEQ ID NO: 239 - DNA, 643 bp, Homo sapiens
  misc_feature 31, 184, 309, 373, 385, 386, 482, 495, 506, 538, 564, 567,581, 592, 609, 610, 615, 618, 633, 637, 642: n = A,T,C or G
acttttttttttttttttttttttttttttngggatgaagtattgctctgttgcccaggctggagtgcggtggcacaattgcagcttccacctccagggttcaagcaattctcctgcctcagtctcctgagtaactgggattacagtcatgggccaccatgcccggttacaagtcttttattanacttgtattgtgcaaatattttcttttagtctttggcttaccttttcattcacttaacagtgtccttcaaagagaagaaagttttaatctactaaagtttattagtttttcctttcttggattgngctttgagtgttgtatcaaaaatcaaatcaccaaacccaagggcatgtagattttctcctgggntttcttctcaannctttataagtttgcttttacatttaaaattatgaaccagcttgagttaatttttgtgaaaagggtaacgtctgggtctggggtcaaattttggacnttttattggtccnacccatgttantaaggggtaaaacacttaaggatcgctttatntcctgggagaaatatccttttttttntanggaacacccttttnaaacccataanttcttacttgaaagctnnttaanccnaaataaaaaaggtanattnttttnt

SEQ ID NO: 240 - DNA, 503 bp, Homo sapiens
  misc_feature 404, 480: n = A,T,C or G
cgaggtacagcaacatggcggcgcccatggactcttagaaaaggagaaagctttttctctgtggactggaaggggcatttttcatgatcactatttagatgggtgctgttttcatgaggagagtctgggaaggcggcgtccgcttttctgacaagggaagaggctactttgtccttttaaggattcaatgacttcctgacttggaggatgtggacctagtggctagacccaaggaccaaagcaagaagtcgtggggggcccaggaagacaggaggatcacattgggattccagacataagatcaggttttaaccccctttggccaaattttggctgaaaatgttgaattatcaactctgaaattaaaaagaaagtttatattaaaacattgcaattttccttanaatttctgtatatattaacatcatgaatgataaattctcttcaatgtgcatgtcaaggttttgtacctgcccggcnggcgctcgaaaaggcgaatttca

SEQ ID NO: 241 - DNA, 445 bp, Homo sapiens
cgaggtacctgggggccagaacgtaagttttgactcctctgctaggagtgagctcaaaaatggatatgattcaaatacatagatgcctgtggccaatattccggatcttcacagtcctcggaatgccctggcagggctaaactccttttagtccagtcctcctcaagctcagacctgcaaactcttcattcttactgtgtattgagggttccctgaactgaaggaagaaagtgtctggagggtgggagagaccgtgtgtggcagagttagaaacatcagtctatctcagggtcctagacaagtgatctccacataatcagcaacagatggtcaggcagcacctccaaatatttgtatccttatcaatcatatttatgtgtgactgccaatccatatgtcatgtgtattaagctttattttaggtttttttattttttttgagcgg

SEQ ID NO: 242 - DNA, 245 bp, Homo sapiens
  misc_feature 31, 33, 78, 94, 101, 112, 123, 128, 144, 157, 177, 185, 190,207, 232, 237: n = A,T,C or G
acttttttttttttttttttttttttttttngntttttttttttttttttttttttccaaactgcaaattgccccaanttttatttgtagtccntacaaangggaaaaaaanttaaggttttntaacnccacctacttgggganatggggaaatggnactgtccccctcaccatcanctaaaacnttatnggtcagcagggacttgnatacataccaactgactgtcccaanagganctcagtct

SEQ ID NO: 243 - DNA, 393 bp, Homo sapiens
  misc_feature 255, 332, 339, 344, 356, 363, 380: n = A,T,C or G
actagcattttcaattaccaaaaaactattagcagtaacattgccattggtagtatttcagtcagtccactatcactaagctaatgggaaatcaatagtaataaagtggtagattataatgtagccatgaaaaatgttgtttaaatcaagttccacagttctttcagaagagagggagattgttttgtatgttcttgatctttctgaagttaaagttcatgtatttttaggatgctaaaaaaaatatcctggacnttaaaaaggtgccaaactgttacacactcattaagaaaacactgctagatgaattattaataccatgtgaatgcagnttattanccaancaatgaatttcngcataancacgtgttatctttaangcactgaagtaaa

SEQ ID NO: 244 - DNA, 133 bp, Homo sapiens
  misc_feature 8, 12, 29, 72, 107, 117, 122, 127: n = A,T,C or G
cgtacatnaaanacacgtccacatcacanttgcccccaaactgcctgtgctcctcgatggtgtctctccctncataaaacgcatgcttattgaccttggttttgatntgcttggccntgtcngtgangatgat

SEQ ID NO: 245 - DNA, 540 bp, Homo sapiens
  misc_feature 326, 386, 442, 520, 523: n = A,T,C or G
acagtcacactgatgaaagacagggaggccatgtggaaccccaggggccacagagccacagtgaagcaccaggctaaggccatgagttaacaccacaaaccagaaaggcaccagacacttgggcttttggttaagtaggttgggcttgctcattaaggaccttttcttgagactcattctttataatttattcatttcacaaacacttcagtagacttcacaaacactaatatagttcctaccatattagtaactcctttaatcctaacaactctatgagggaagggaactattattagccccatttacagaaaaggaaccaggcncaggggagattaaccatttgcccaagatcaggatgtctgaaatgttgatctggatcaacncttcaaggaataatgaccctttgaaagatgcccctttttccttagaaaatccttanaatccctaggaattcttaggagagaatttgtccagaaaatctaggacctgctgataaaaaggaaaagtacacagattntgncccttgccatacactgc

SEQ ID NO: 246 - DNA, 196 bp, Homo sapiens
  misc_feature 6, 57, 64, 86, 87, 96, 106, 124, 143, 150, 155, 156, 161,167, 190, 194: n = A,T,C or G
actttnttttttttttttttttttttttttccgacccatgtggaccaggctggcctnaaactcntgccctggaacccccgcctccnngagggcccnagggcaggcnaaccggcctgagccacantggctcccccgcttacctnggccganaccannctaanggcganttcctcacactggcgggcggtanctantg

SEQ ID NO: 247 - DNA, 501 bp, Homo sapiens
  misc_feature 132, 144, 147, 155, 157, 181, 203, 209, 222, 243, 268, 276,284, 288, 293, 298, 307, 313, 330, 334, 339, 340, 343, 344,355, 359, 364, 396, 401, 412, 420, 429, 443, 447, 453, 456,461, 481, 484, 485, 496: n = A,T,C or G
gtacgcggggttgaaaaatggcgactgtggcagagttgaaggctgttttaaaggacaccttggaaaaaaagggggtattagggcatttaaaagcaaggatccgagctgaagttttcaatgccctaaatgatnaccgataacccntancccgtggncnccatggtaggcacggcaactaccntcaaaagttgatagggcaaacnttcaantgggtcgtccccncccccgcgtactttttttttntttttttttttagggcctttcaatnttttattnaaatgccntganccaanatggnttttaaatnttgttnaaaagcagccacatccntggnctgcnnatnntattttaaaancatngatcngctcctccaacatatttgttccaactttatcntcttnaacatacccantgtttttnaagtttctnaattccgtatcccnctgnaacttnttnaaaanacccccaaactacccgtttnctnnaatgctttctnaccac

SEQ ID NO: 248 - DNA, 653 bp, Homo sapiens
acgcaggggaatggaatggaatggaatgcaatggaatggattcatccggaatggaatcgaatggaatggaatgcaaagcaatggaatcaactcgattgcaatggaatggaatggaatggaaaggaatacattggaatcaacccgagtggaatggaatggaaaggactggaatggagtggaatggaatggaatgcaatggaatggaatggaatggaatcaacttgattggaatggaatggaatggaatggaatggaatggaatggaatggaatcaacccgactgcaggggaatggaatggaatggaatgcaatggaatggattcaacttgaatggaatggaaagaatggaatcaacacgagtggaatggcatggattggaatggaatggaatggaatcaacccgaatacaggggaatggaatggaatggaatgcaatggaatggaatcatccgtaatggaatggaaaggaatggaatggaatggaatggaatggaatggaatggaatggaatagaatcaactcgattgcaatcgaatggaatggaatggaattaacccgaatagaatggaatggaatggaatggacccggacggaatggatggaatggaatggaatggaatggaccgaaaggaatggaatggaatggaatggaa

SEQ ID NO: 249 - DNA, 185 bp, Homo sapiens
  misc_feature 159, 182: n = A,T,C or G
acgcgggggacgcgcgtctgtggagaagcggcttggtcgggggtggtctcgtggggtcctgcctgtttagtcgctttcagggttcttgagccccttcacgaccgtcaccatggaagtgtcaccattgcagcctgtaaatgaaaatatgcaagtcagcanaaaaaaaaaaaaaaaaaaaaaangtt

SEQ ID NO: 250 - DNA, 271 bp, Homo sapiens
  misc_feature 19, 28, 86, 93, 107, 115, 118, 120, 122, 124, 153, 164, 168,174, 187, 200, 222, 234, 245, 251, 268: n = A,T,C or G
actcaggggaggccagganggccttgancttgggccgggcactgaggcgccccacatatgctgagagcagggggaacgcatccagnctgccangggctaggacctcntggatcancancnantncagcaggttgtattcagcataaggatatntggtttccacnattnaaggtnttgcctcacctgntctgggacacagnggtctaaaaaggcttaatattncccggacagggnccttcacatantcattnctttgcccacctctttnttt

SEQ ID NO: 251 - DNA, 366 bp, Homo sapiens
  misc_feature 7, 19, 63, 80, 83, 96, 111, 115, 116, 136, 153, 176, 177,198, 200, 228, 231, 235, 239, 264, 268, 280, 289, 291, 295,303, 314, 320, 326, 330, 333, 342, 354: n = A,T,C or G
gaaacanattaaccacatnctccttctttgggctagcaaggtccagggctgcctggagtctgnctctaccatcaggatanagnaatcttcctgctnggatataaaggagangacnnacatgtgttttcatactttnagaaccatgtggcccgntacctattgtggataataacccnngtaagatgcttgttggaatgnanaaaagtgctgggcatgaatggtactacntgnggcngctntctcaactcagccaattatgaggtntgtnattgcccattgnaagatgctnantggntaaacaangtctggccttnaccttncaaganggcntanccccattgnaagagctcccantgccaaaatata

SEQ ID NO: 252 - DNA, 360 bp, Homo sapiens
  misc_feature 13, 22, 28, 61, 64, 66, 68, 79, 82, 120, 145, 146, 158, 172,183, 187, 195, 198, 209, 216, 231, 234, 257, 261, 271, 283,304, 306, 310, 315, 317, 322, 333, 337, 359: n = A,T,C or G
acttttttttttnttttttttnttgcgnagatgttccttttctttctttcttttccttttncgnananacagggtttcnccntgctgcccaggctggtctcaaagtcctggccttaagcnatccacccaccttggcctcccaaanngctgggattacnggcatgagccaccnctcctgaccanagtnacttttgnaangggcactaatnccacacntgaggctccaccttnacnaccttttcatttcccaaaggctnaacntcctgccccntccccaatgagnccagtggcttaaccttttctntnattnttttngnaaatnattgctcattngggnaaaacctccaaatgctccggtnc

SEQ ID NO: 253 - DNA, 322 bp, Homo sapiens
  misc_feature 80, 87, 114, 121, 163, 169, 179, 208, 234, 248, 264, 270,285, 290, 321: n = A,T,C or G
acccaacaggaggttttttcaacttttgctcttctcccttcctcccacctctcacatccccagagcaaattcaatgtaantatacantttcttctttctttttacaaaatattntgttaanacttacatgaggtccttgaaaattggtctaatatttcgcttntaaaanctagatacanagccggggtgtgggtggctcacgctttgnaatcacagcacttttgggaggccaanactggtggatcacnaggtcaggagatcganaccatnctgcctaataccggngaaanactgtctatactaataattcaaaaatattanc

SEQ ID NO: 254 - DNA, 183 bp, Homo sapiens
  misc_feature 50, 83, 86, 104, 121, 134, 138, 140, 161, 164: n = A,T,C or G
agcggcgaggtacttttttttttttttttttttttttttttgggaaaaanaaaaaggagcattaaccttgactatgtctttanctncagccacctttttaagantaaattgctgggcaggngggggagggctantcangnaacgaaactgtaagccggacnatntgtgaggaggggaggttat

SEQ ID NO: 255 - DNA, 250 bp, Homo sapiens
  misc_feature 63, 80, 102, 109, 117, 131, 145, 154, 156, 157, 161, 167,175, 180, 186, 205, 211, 212, 219, 223, 225, 249: n = A,T,C or G
acttacatgtgtgaacacatataaagtgtcaggtttacagaccctggctcaaggacagtctangatgggaaaggaggtanggcgagaagaatcacatattanactcccnggtgcttnagcctcaccctatncaagggacatgacntatggggtntnnttantccatncccaggtnctatncttcangacttgaagttcctaattngtatgnnggaaccncaanancacgttaactggcggactcctggnt

SEQ ID NO: 256 - DNA, 166 bp, Homo sapiens
  misc_feature 32, 72, 88, 107, 110, 113, 123, 127, 141, 155, 157, 158, 163: n = A,T,C or G
acgcggggaggccccagccatctcaggctacnctatcccaggatcagcatggccgcctccagtggataatcnccctggccttggctgncctccttgtttgtggacanggnagngccttaggcntcangaaagctccctttntcatgaatgcccantnngtgancac

SEQ ID NO: 257 - DNA, 200 bp, Homo sapiens
  misc_feature 28, 38, 54, 62, 64, 66, 70, 81, 162, 170, 171, 180, 187: n = A,T,C or G
cgcgggtttgaaagtctttggcaatganattaaactanagaaaccaaaaggaanagacagtnananagancgagatgcganaacacttttggctaaaaatctccctttcaaagtcactcgcgatgaatcgaaagaagtgtttgaagatgctgcggagatcanattagcannaaggatggnaaaagtnatagggattgcat

SEQ ID NO: 258 - DNA, 194 bp, Homo sapiens
  misc_feature 40, 106, 108, 110, 121, 128, 138, 143, 148, 162, 166, 173,181: n = A,T,C or G
tcgcggcgaggtacaccaagcttcatttttgttttttgcnggctgaagtcatggcatgcaatttttgcatttacgattctcttgggcatgccctgtgatcccaccncncngattgagtgcntagccanttgttgatcntactntccanattgacttcttccntggnctttccnaaattttnacagagttgactg

SEQ ID NO: 259 - DNA, 342 bp, Homo sapiens
  misc_feature 6, 20, 57, 94, 95, 100, 106, 133, 135, 137, 143, 150, 153,164, 168, 189, 198, 203, 205, 219, 228, 230, 244, 250, 263,264, 266, 272, 278, 283, 298, 311, 314, 340: n = A,T,C or G
acgccntttccggccaacanatgatatgcaaaccattgttgctgtggccgaacaaantaacaaaacctcctaccgacactgcaacattgaaacnntggangtgccnataaggctattttctgacctcacctantntntgcaanagtgcanaancccccacaatntctntgctgggcatctcactggaanatggggaantggtngnccctgattccacanccacccatntnatgtcctgggtttntgagcnaaggatcaagctnngncttagnggcctnttaancagcctgtttcaaantgccatatggacnagntgcatatggggaacattgggactctnag

SEQ ID NO: 260 - DNA, 253 bp, Homo sapiens
  misc_feature 51, 52, 56, 70, 82, 86, 118, 142, 162, 168, 175, 179, 186,189, 195, 209, 212, 217, 227, 233, 240: n = A,T,C or G
acttttttttttttttttttttttttttttcttttttttttttttatttgnnaatngtttatttatcaanaggaactatttnttancccacatattcatgtgtcatagttcaggaacncaagtcagggacaaacttctaggnaattcaacccgaaaaaattntttatnttccaanattnctttacnctntgaaanatccagccttcctnatntcctnaaaatctttnatgacntcggtantttctgaaaaaat

SEQ ID NO: 261 - DNA, 240 bp, Homo sapiens
  misc_feature 43, 51, 67, 81, 112, 115, 128, 140, 170, 182, 199, 236: n = A,T,C or G
cgcggcgaggtactttttttttttttttttttttttttttganagaagganccaatgcaatggctantctttactggaaanaagaaactttacagcacattttgagtaattnagnggcaggtgctcantgtgccagctgntggggcaccatcttgtaatgggctccacancagggggcatcnctgggcctcgcctttgngcaccaaaaccatacaacgctggttttgtcctcttanagat

SEQ ID NO: 262 - DNA, 390 bp, Homo sapiens
  misc_feature 91, 117, 129, 140, 147, 153, 160, 165, 168, 175, 177, 189,200, 201, 202, 207, 236, 242, 269, 278, 288, 304, 305, 318,327, 334, 337, 343, 344, 348, 363, 381: n = A,T,C or G
accctggcattgctgacaggatgcagaaggagatcacagccctggtccccagcaccatgaagatcaagattattgctcccccagagcggangtactttatttttttttttatttttncaagggtataancatttaatttnaattganggtagnaccaatncaaantangtttggntntttataagttanagacaatgaannntcccnccttatgtttaaaaattttaaaatatctnacatcnttctgccagatgggttttattaaaagnggaattttncttgacaccntcttttgggaattcanntttttgaatgctngattacccnatacctnttntaaatnntctntttgttttaaaaggnttttccaaaaaaaattgnataaatacg

SEQ ID NO: 263 - DNA, 296 bp, Homo sapiens
  misc_feature 3, 73, 113, 133, 135, 159, 163, 166, 171, 231, 251, 261,264, 265, 271, 273, 291: n = A,T,C or G
acncgggatgtggaactatctttgcatgttctgtccagcaagttctctctccatgaagaccataccacctaangtgaccccatctcagtctgtctgttggtagacctcctgcnatcaactgaaggcctgaatnanacaaaaaactggcttcctcccatncaanaantgaanatttgacatatccccaagactggaactgagtgagctgcattaggaagctgtatgttttgnggaatttaaatttcaaatanaaattgaaangtnnctagantnttaggacgttataccgtntgaac

SEQ ID NO: 264 - DNA, 586 bp, Homo sapiens
  misc_feature 150, 179, 182, 183, 186, 189, 191, 192, 194, 195, 201, 203,206, 211, 231, 232, 257, 261, 266, 269, 272, 277, 292, 310,311, 315, 324, 326, 349, 355, 363, 384, 402, 408, 424, 431,432, 440, 456, 460, 465, 474, 479, 516, 519, 523, 530: n = A,T,C or G
  misc_feature 540, 542, 556, 557, 568, 569, 577: n = A,T,C or G
acaacccttctcaccctgtgggttggagccgagtcaggccactatggggaagcagttgccccacaaaatgtgggtttgctgacctattctaactgttgaatatgctgcccatttgctgaatgaaaaaatgactttggggaaccaaacctngccctttgcccaacttgcaaccccctttnccnnccnttntnntnnttttgntngtngtacnaccattgtggaaaaaaatgnnaaatttggtcttccaacttaatgcnatgngaacnatnaantggtnagaaaaccaaactgnttaaaacccctttctctnnaacnattttattntnatttgtaaaaacacatattaacnaattcntttgcctnaggttctattaaatatttgantttttttttcttattaanaaaatnaaatcccttacacccnatatttnntttattcnaaccgaaaaccctttnggcnttccnaattgaaanggggnttcttccttaactttccttttttcttttttgggttanaangccntcatccngaaaggggcntngggctgttaaaacnnggctggccttnngtttaaanggagcccaa

SEQ ID NO: 265 - DNA, 343 bp, Homo sapiens
  misc_feature 202, 208, 214, 215, 249, 264, 269, 287, 291, 310, 313, 317,326, 332, 340: n = A,T,C or G
actgttaaaatgtttccattgtttattcatccactggcatttaggtatacttctggtcatgaatgagcttttatcataaagtgaaggctaatttttgtattacgtatcaggggttggaaccactgtcttcactccatacctactcccccattggcagttttccatgcaatgttttctctcaagttcagaccactgtactttntttttntttttnnttttttcggggacatttccacatgctttatcccngcaatcaaaataatnaaaanccatctcaaattattatncacntacaaaaatagggtacctnggncggnacccccctnaggggnaaattccncca

SEQ ID NO: 266 - DNA, 658 bp, Homo sapiens
  misc_feature 201, 400, 408, 443, 446, 449, 469, 483, 505, 507, 520, 524,561, 565, 569, 575, 590, 603, 610, 611, 614, 617, 624, 629,648, 655: n = A,T,C or G
acgaagaagtcctggcaaaaatcagctccacatccacagatcggctcacagttctcaagaccaagccacagtctatacaaagggatatcattactgtctgcaaccgacccttacacgttggcccagcagctgactcatatagagctggagaggctcaattatattgggccagaagaatttgttcaggcgttcgtgcagaangaccctttggataatgacaagagttgctacagtgaacggaagaaaacaccgaaacttagaagcttacgttggaatggtttaatcgcctcagctcttggttgctacagaaatctgtatgcctgttaagaaaaaacaccgagcaagaatgattgagtattttcattgacgtagctcgggagtggttttacattggcaactncaactccntgatggcgatatctctggtatgaatatgagcccanctntcnactaaaaaaaacttgggccnaaagtgaagactgnaaaaatttgacattccttgacntncagatggaccctncaancaattttctttaattttcgaaacactcttcgtggggnaacnaaangggtcntttacctggtcatantagtagaaaaaangattggnnatnccntttcttnaattntttaattcaaaaatatttntttcctnaat

SEQ ID NO: 267 - DNA, 494 bp, Homo sapiens
  misc_feature 23, 34, 83, 95, 145, 221, 266, 280, 316, 323, 325, 346, 358,364, 365, 370, 377, 381, 397, 398, 403, 405, 417, 426, 446,456, 473: n = A,T,C or G
gtacgcgggggggatacgccgcngcgcacggcanttagtgggtaggcctgaatagccgaggaaaactgagccgtgggcctcanaaagaagttaangcacccgcaagccgggcaactgccctccttccgcgccggcggagcgattnaagtgaagaaacaatggccagcaatcacaaatcttcagctctcgccctgtttcaagaggtggagttgggttaacangaaggcctccttctgggatacaacccctatcaaggaaaatattcnagttggcaactgcnattgccaccttgggacaggcaagaccaaggttctcntgggttngncccataggggactggtggganttctgccttctnaaaatnnaaagntgccccntcgncctgaaacacaacaanngtttntntggaattgaaancttgggacnataaggtccccatgaggcanaattttaganaaatctttacttatctnggggctttttaaaagtaaaaa

SEQ ID NO: 268 - DNA, 565 bp, Homo sapiens
  misc_feature 411, 413, 414, 419, 421, 422, 425, 470, 471, 475, 479, 488,518, 522, 533, 543, 561: n = A,T,C or G
acgcggggctattgcctaaggactgcttcccctcttcaacagtgaagctgcaggccaaccacatggaaaggaaaaagagacatgaaggggaagcaaatgtgtgttccaatacttgaagcacagtttatgcttttcactttggcatatatcctatctgccaaaccctatgtatatgcccacacataaatttcagggaagctgcaaatgtgttctttaacttgactaacatgtacatttgtcaaaaaacaaaattagccaggcgtggtggcgggcatctgtagtcccagctactcgggaggccgaggcaggagaatgcgtgaactcggaaggtggagcttacagtaagccgagatcacgccactgctctttaacctgggtgacagagcaagaatccatctcaaaaaaaaaaangnnaaaananncantcctaaaaaatttgtacatggcattgttttacaaaattttctaannggangagngaatatttnattttctgatggatccttcactttattaantgangaaggcaaagnaactgatgcnatattttaaaaaaaaaancaga

SEQ ID NO: 269 - DNA, 307 bp, Homo sapiens
  misc_feature 32, 35, 204, 231, 247, 260, 268, 302: n = A,T,C or G
actttttttttttttttttttttgggatgttnggnggttttaactttgttatgtccataaggtccttccagaatctacatgacctgtctccttactgatcatttcttgtcactccttttctcctatactctatccaggccatactgaccttcttgcaacttcccaaataagcctagtgtgttttggctggaggactttactttncagctccccttgctggaatgcttcccntcccaagttgtacctngaaaaatgggaanagtacggnaccacagtttattaccaattctgacggaagtccnccttc

SEQ ID NO: 270 - DNA, 239 bp, Homo sapiens
  misc_feature 18, 27, 43, 48, 71, 74, 76, 135, 142, 147, 149, 150, 152,157, 162, 165, 171, 179, 185, 196, 205, 221: n = A,T,C or G
actttttttttttttttnttttttttntcccaaaatgtgtttnttganatggtttcccactcatcttgacncanantgcttttagtgcttgcttcctcctgaaggaacatccttcttgtaagccttgcttttccncctgtangctgncnnangacantggancanccaacncacaaaantaccgnttgtgcatggntaaaaaccngggtgattttataccntccctgggcatttcacat

SEQ ID NO: 271 - DNA, 523 bp, Homo sapiens
  misc_feature 98, 114, 134, 155, 240, 266, 269, 280, 318, 331, 334, 345,362, 363, 375, 378, 380, 384, 388, 391, 395, 396, 400, 402,406, 407, 413, 421, 426, 433, 434, 444, 451, 456, 463, 470,471, 479, 485, 488, 490, 492, 503, 506, 514, 518: n = A,T,C or G
acttgcacaggaagtgttggccgcttgttgcattccgttgctgctccaaattaaaaaagttggttatttgggacctcaatctcaacacaagtgccttngtcccacccatggganccccgcgttccaagaaaaangggttgtcccgtgtgctaaanaaaacttgggtgtgactggttcgataaactccaaagcttgttcccatcatacccgtaatggctttcttttttcctttattggccnatcttttgaactcatttcaacttcanganaatggaaaaanggcctcttttttgcccctttacttggaaaagggaaagnttattctgggggngtntgggggaaacnttgttaaaatttttgtnnaaaggtgggggnaancntganattnaantaanntgcntncccnnatatantaaaaagngggtnaaagaannttgtcttgcngcctttnttttntcttaanaaggggnnttaaaatnattccntgnangncttccaatttnccnttaaccgncctnaaagc

SEQ ID NO: 272 - DNA, 646 bp, Homo sapiens
  misc_feature 478, 595: n = A,T,C or G
acatttggcatgatctgggcctatgcggtcttacaatccctgtataaaactagacaatgaaaaacagaaaacaaaacaaacaaacaaaaaaacaagaacgaagcacctaccacatgccagctactgaggctatgaaggtattctcccgccttagaaagcccaggattaatgcaggattgcgacatttaaacagaacatttccatacagcatgagtataaatgactttcccaagtttacactgagagtaactgacacagcaaccccagcaaagtctgagctgagtcctgaataattgtataaaaaggggagagaaacagagtgaagaaagggtttcccagactctgtcccaggaaagaaaatgagctcgtggagaggaatagactttctctatgaaaacagagggaacaaagaggaagatgtctgggaaccgaggagtaatagagacctgagtttacatcactactctgccctccctangtacaaaagtggatacaatacaatggaaaaatgcatagaaaagcaggaaagattttgtcaactaaaaaaacaaaattatgttgcttcaacagcaactgggatgatgcttcgcacaanagcttgacaatcaaagaaaaaagcaatacttaatattcaagccagatgtga

SEQ ID NO: 273 - DNA, 442 bp, Homo sapiens
  misc_feature 111, 225, 226, 290, 311, 330, 352, 353, 360, 377, 380, 390,406, 416, 417, 434: n = A,T,C or G
acatgaagtcctatacggtataatgaggcaatcagagatataaggattggaaaggaagaaacaaaattgtgattatctacagattatttgtagattatgtgatttctatanaaaacccaaagagtaaaccttcacattattagacacaacatgggaatttagcaaggtaactgcatataagattaatatacaagattcattgtgttttctctttaaatataggtnntaatggcttgctgctgacgaatagaaacacaccattttaaattctctttccaatcccgattaanctagaccacagagccaaaaanttcattgcaatttaatatnttctttcttttgtctggctttnnagagcanaatctcctaaaacccanctntaaacttcancatgtgatatgttgtntgatatcatnnttaaagacaaaaagttnaaacccca

SEQ ID NO: 274 - DNA, 570 bp, Homo sapiens
  misc_feature 193, 217, 220, 221, 256, 268, 270, 278, 287, 294, 313, 314,344, 375, 385, 386, 388, 390, 409, 416, 418, 419, 434, 440,442, 443, 450, 454, 458, 459, 466, 471, 474, 476, 477, 484,486, 502, 504, 510, 518, 522, 523, 536, 543, 546, 558: n = A,T,C or G
  misc_feature 561, 565: n = A,T,C or G
accttagtgaggctcaaaaggattcttttgagtctattttacgccttatctttgaaattcaccactcgggtgagaaaggtgacattgtagtctttctggcctgtgaacaagatattgagaaagtctgtgaaactgtctatcaaggatctaacctaaacccagatcttggagaactggtggttgttcctttgtntccaaaaaaaaaaaaaaaaaaaanaanngtactgcggggaaacggaagtgagcggcggggtcnacctgacggtancngggcaaanaggctgttncgcaaanctgcggaagataaatgccnnaggacttggatctgagctaaaggcaatttnccatttactgaactttcatcaagcgggaccntttgaaagtnntnantcttgttcggaaatggatnttcttgntnngaaaaatgaacttgngccttntnntcccttnattnccannaaaaaanatttnccncnnatccaanantcaatgatattttccncnctaganaacattcngggnnttttttgctccantaaaatnacntatggaattcanggnctancacca

SEQ ID NO: 275 - DNA, 139 bp, Homo sapiens
  misc_feature 6, 78, 82, 86, 96, 98, 99, 111, 114, 117, 125: n = A,T,C or G
acgcgngggataactaccgatttgcacatacgaatgttgagtctctggtcgaacgagtatgatgataatggacagggnatcntctnatttccggcntnnacatgtgactancangtntgaggacnagactggggcttat

SEQ ID NO: 276 - DNA, 492 bp, Homo sapiens
  misc_feature 6, 30, 52, 55, 64, 67, 70, 74, 85, 99, 173, 174, 184, 220,231, 233, 246, 275, 290, 304, 305, 321, 328, 335, 337, 341,359, 364, 367, 372, 374, 398, 400, 406, 414, 418, 425, 437,438, 439, 442, 451, 452, 453, 459, 461, 467, 472, 486: n = A,T,C or G
actttntttttttttttttttttttttttnggccattcaattaatatttatnganaggctttancgngcncatntcactcaaggnaaacagttgaaaancttattatttaaacagcccaagacaaatacttgagtaatagataatataattacatataaacaggtcacatgtnnaatctcccanagcaaaccttcttttctcgagtttgctgatgtctgnaccttctaaananagagatggacatntaaacacgggccgcttgaaggaggtgaanacactgtgctggaantcttaaaggtggannggggcatggagtttcncccgganccttccngncatngacacatggacttttctnggttnganctttntnaataaggcaaccttgaaaatgatntnaaaatnattgaatncctnaaacctntttaagttggtnnnccntggccatcnnnttgaancntacagnacatncttatatttacctnaggaat

SEQ ID NO: 277 - DNA, 364 bp, Homo sapiens
  misc_feature 9, 28, 33, 37, 62, 125, 126, 150, 161, 174, 177, 179, 190,223, 227, 231, 251, 258, 265, 266, 278, 279, 295, 297, 298,303, 304, 310, 313, 329, 331, 339, 340, 343, 351: n = A,T,C or G
gtaccatcntcatgttatttaaaaaatntaagngcanaagtaaaaaaaccaaggagctctgnaataaagtaacataaaacaccactgtaaggatcacttaaaaaacgattccctcacgggaaatnngggcactgagtgtgtaaacatgtnagctgtacctncataatgagtaancantntggtaatgaantatttctggccaagcttattgctcaagcttgcntatntatntttcctgattccggccattncaatgtntgataannatcagactttgnnaaacttctgggctctngnnattanntgcctnttnactatagcatggcatngntttttaannatngaaacccnaagtgttgatgta

SEQ ID NO: 278 - DNA, 259 bp, Homo sapiens
ggtacctatatggctcccccaattaatcacaattcagcagcatccactccccatatgtggctgagataacttactttgactgtctatttggttatctctcagacaaagcttcaacgaaataaaatggacaggtttgtggactgtgtagagcagcggaaaagtttccacattttcttggactgcttcaccttctgtcagcggctccaaggtgtctgctccaggcatgtctacacaccactctctttctggtaaatcttgt

SEQ ID NO: 279 - DNA, 506 bp, Homo sapiens
  misc_feature 399, 432: n = A,T,C or G
ggtacgcggggaagtaactgtggtgtggaagcagagtagagagaaaacttgttcctcattagagagagagccacacttctcactgctcacaatgagaggccaaagattacccttggacatccagattttctattgtgccagacctgacgaagagccttttgtgaagatcatcactgttggaagaaggcaaagccgtatgaagagcacatgcagctactatgaagacgaggacgaagaggtgctgcctgtcctacggccccacagcgtgctcctggagaatatgcacatcgagccactggcccgacgccttcctgcaagggtgcaaagggtatccatggagactggcctattgcacgttagagcacgggaccagcttaaaagacgctctacccggaaatngggcatcactagacagtcctgtcctattggtcnttcaaagaatatggataatcagatttttggagcatatgccaactcatctttcaaggttcagtgaccactatttt

SEQ ID NO: 280 - DNA, 484 bp, Homo sapiens
  misc_feature 436: n = A,T,C or G
acgcggggccaggaagataggcagctcatctgtgtcctgtgtccagtcattggggctcaccagggccaccaactctccaccctagacgaagcctttgaagaattaagaagcaaagactcaggtggactgaaggccgctatgatcgaattggtggaaaggttgaagttcaagaagctcagaccctaaagtaactcgggaccaaatgaagatgtttatacagcaggaatttaagaaagttcagaaagtgattgctgatgaggagcagaaggcccttcatctagtggacatccaagaggcaatggccacagctcatgtgactgagatactggcagacatccaatcccacatggataggttgatgactcagatggcccaagccaaggaacaacttgatacctctaatgaatcagctgagccaaaggcagagggcgatgangaaggacccagtggtgccagtgaagaagaagacacatgaaggcttgct

SEQ ID NO: 281 - DNA, 507 bp, Homo sapiens
  misc_feature 231, 308, 312, 322, 324, 326, 327, 333, 346, 352, 367, 384,409, 427, 438, 444, 467, 486, 488: n = A,T,C or G
acgcgggaacagtccctttctattgtctattctcctcctccttcagtctttactggatgttttatatgaatgtattgatacaatttggggtcttttgtgactggattccatcacttagcatatttttgaggttcactcatgttacagtgcatatcagtatttcatttctttttatcgctaaataatattccatttttggatgtagaggacattttaaaatttattcattanctgatgggacatttgggttggttctactttttggctattataaataatgctgctatgaacatctgtataaagggttnctgngtactccaancnanntttacnctttttcggggantctttnggttttatgattacnaaacacaccatggcttntgtcacaaataggggacatttaaanccttccataccaattttnttttttacctnggacangggcccccataaaagccttccangccacgttttgaatgtgananacatttggcaaaaaaattt

SEQ ID NO: 282 - DNA, 495 bp, Homo sapiens
acaatttgtgccattaaaacattatctttcatcacaaaccctaggtgaagtatgctggggaagccttgctctgtgtttttgaaattgtaggtggcagcccattactgggtcatatggttcatggccagcatttaaaagagaaacagaataaattaggaaatattatttaaaaacttttagctagagttctgtgtggaaacatgggaatcataatgatccaaatagatgggaaacagaaacatggccagaagaatattaggaaatgagagtaaagtgatactgacagccttattgctctgaaactcaatatgaaatgagaagcaagtaggaacttttacattttgataggtgatgagcagaaagatatctcaagcaattaacacacatccaggtcagaagttggctaacttttcccataaagggccagatagtaaatagtttaaattctgtgggccataaggtgtctgctgaaattatttaactcagagaatggga

SEQ ID NO: 283 - DNA, 589 bp, Homo sapiens
  misc_feature 431, 475, 495, 496, 508, 533, 538, 556, 561, 562, 583: n = A,T,C or G
ctttgcattctgattctttgatatttgaacttggccatctgtgggtgctactctcgtaagactaaaaggcacctactaaatacgaacaaggataaccagttctaccaaaaacattaccaaccaaacctcccctgttcttttttcagactttccttttgctttcaacctcttaaactgtaaaggagagatttaatgtttccctattattctgctttgactcacatactaaaatgaccacatggcactccattgaatcttttcagttgttcacgaattaaaataatgcccatgttttacagtttttcgagtagtctcagcaatggatctgtagtttcaggacctgtttttaaaagatcaagatacttttatgtgtttcagaaagtagctgttttttcattttttgtgggtttggttttttgtgtttgtttggntgggtgggttttggtttttttgctttttaaaagtcacagtgttntgagcctggtgtaaatgccnngaatattatatnggacttaagtatctgcatctcggtnaatgngccaagtccttcattaanggctnncccaggggggtttttgaaaancctttg

SEQ ID NO: 284 - DNA, 590 bp, Homo sapiens
  misc_feature 4, 360, 460, 463, 476, 491, 500, 503, 525, 533, 536, 562,578, 589: n = A,T,C or G
ggtncgcgggagacggtttaacagaaacagcggcagtgtagtatggccagggatacccattctccaagactcaccatgctcctctaggtggctctggcctttgttgactctcatacacagacagaaaagagatatattaaccatgggatggggtcactctgattagagtaaccctatttgctggcctcttccagggtccctgcctgtctgcacccacttgcagtgcaaccacagatgcacaatcagggtccttcccagtggcaactgctatagctccttcactggcagatcctgcctaacaatcagagagcttctgcagaaggggcccctgccagcatacactcaatcacaagcctcctntcaccaatttaaaaacacacacttggctggtggtggtggtgggtcacgactgtcatctcaacactttgggaacccaaggcggtggatcacctgaggtcangangtcgagtcaattntggccaacatggtgnaaccccatnttnctaaaaaaaattttaaaattanccggaggnggnggcacatgcccgtatcctactacttnggcacttagtcagganaattcttgatnc

SEQ ID NO: 285 - DNA, 555 bp, Homo sapiens
  misc_feature 479, 496, 501, 523, 535, 538, 543, 552: n = A,T,C or G
ggtacagtggcgtgatcttggctcactgtagcttctgcctcctgggttcaagccattctcctgtcagcctcccgagtagctgggattatagtcacgtgccaccacgcccggccaacttttgtagttttaattgagatggggttttctatgttggtcaggctggtctcaaagtcctgacctcaggtgatccacccgcctcggcctcccaaagtgctgggattataggcatgagccactgtgcccggcctgctattttaatatttgagagataatgttaccaacatgctcatccacaataattaccaaaattcatataattgtattcaacctgtttttacatataaagggagaagtgcttaattaacctaaacaaaaaacctacctcagtcttaaccatatgacagaattctttaaaattttaatagctcacatttcatgtcatatttagatgaaacaagccatgattattatttaacctngcaaggctcttggactnggtanaaaaaaaattggcttaactttngaaaaaacatanaanccttnttttaacanttt

SEQ ID NO: 286 - DNA, 562 bp, Homo sapiens
  misc_feature 358, 420, 486, 493, 527, 531, 539, 544, 546, 548, 555, 561: n = A,T,C or G
tgtactgaggaagacaccattccttgacggtgtctaagaagccaggtggatgtgtgtggtggctccagtgggtgtttctactctgccagtgagaggcagccccctagaaactcttcaggcgtaatggaaaatcagctcaaatgagatcaggcccccccagggtccacccacagagcactacagagcctctgaaagaccatagcaccaagcgagccccttcagattcccccactgtccatcggaagatgctccagagtggctagagggcatctaagggctccagcatggcatatccatgcccacggtgctgtgtccatgatctgagtgatagctgcactgctgcctgggattgcagctnaaggtgggagtggaaaatggttccaggaagacagtttcacctctaaaggtccgaaaatgttncctttaccctggaagtgggagttgaaggggtcatacaccaaaaggtatttttccctcaccagtctnaggcttnactggctttttgaaaaaatttcagcacacctttnttgnaaccttanttgtnancnagaaaangggccnt

SEQ ID NO: 287 - DNA, 536 bp, Homo sapiens
  misc_feature 364, 438, 481, 520: n = A,T,C or G
accgcgggaaactatatgctatctacaagaaatttacttcacctgtaaggacacaaatagactgaaattgacagatggaaaaaatattccatacaaatggaaaccaaaaagtagcaggagtaactatacttatatcaaataaaatggactttaagtaaaaaaactataaaaagatggaaaagaccacaggtcaatagagaaagaggaaataataaatgtaaaaatacatgtatccaatattgatgcacctaaatacatgaagcaaatgttaatagaccaaatggagagctagaatgcaatgcagtgatagtatgagacttcagcatcccactgttctgcaatggattgatcattcacacagaanctcaacaaagaaatataagaatttaaaatggactctagactaaatggacccaacaggattttaaaaaaacattnctccaacatctgcaggatccgtgaaaattaaccagatagcttngaaatactggatggggcaatcaattaaatttttaaaatnaatttaaaaatttcct

SEQ ID NO: 288 - DNA, 660 bp, Homo sapiens
  misc_feature 128, 294, 310, 363, 380, 403, 409, 423, 430, 434, 437, 441,456, 485, 491, 507, 535, 545, 553, 558, 559, 574, 579, 592,598, 602, 606, 617, 624, 628, 631, 635, 646, 650, 652, 654,656: n = A,T,C or G
ggtacaataagtgccttgcacataagagtccaataaatttcttgaatgatgatatgctgatacattgttcaataatttatttacactgaagtctactaaatcctaaacatctaaaccacaatttaatnacattttgatgaaaattatacatggaatgccttatttgaaaaaatacacatacatataattctccatcaatacttcgagagttcatggattttctgaagcttacctatgaatcccagaagaaaaactctaataagaaaattgtatggggggaaaaagtctaacatnttgctcaataaagtgnctctttgattctgcccctcaacttcagaagctcctaaaacagttctgactganccaaaagtcttcatgcntaaaggatctgaagatgaactcntgagtnaagaaaccggcttnccatttnggcnagngaangagcataaattagantggcccaaaacccgctctccatccatttnctaatnctggagcttcttggtnctatcttccttaattcaaaaggtctatncttgcatttntgcctctngaacnnattctccttcatctnaagtnaatactactttcnatttantttntttntttctaataanccggtanggcnttncttnaaatctatacnctantngntngtta

SEQ ID NO: 289 - DNA, 691 bp, Homo sapiens
  misc_feature 319, 376, 407, 414, 419, 430, 444, 458, 467, 480, 492, 521,525, 527, 544, 546, 549, 555, 567, 570, 577, 586, 587, 588,593, 594, 596, 607, 610, 612, 623, 631, 633, 643, 646, 647,666, 668, 669, 678: n = A,T,C or G
ggtaccgagtgcacctatgtctaatcatgtgtgcatgtgaggaggtgctggctgactgcatcagcggaacccaggcataacggcaatcttttgttttaggtatagtagacggaaatataaaataatggaaagtttttgctgatttaaacaaaaatatttactcttttcattagcaaaacattatttaaaatatatctatttctcccctctgaacatttaactaggaacactgggcaatttttgaaggtttaagtgctgattgtttaatacaataaatatggctgtggagaagcacacagcagcaagtagcttacatacngtccacggataagaaatttacttctcatctgggttaggtgtccagccacccaaaggnaaaggtttggcattccgtgtgcttttttttncgggtangaatnaattctgcttngattttcattcttnggaaagaaaaaatnattcagctngatatccttaaanttttattgaccntgatgccaaaggagcaagggggccaaaantgancntatggtccaaaatgctngnttnggatcntgtcttcagctnatnttccttnttgcaaggnnngctcnnanggctgcccttnaancntgattgaaggnttggggancnggggggggtntcnnttggcaagctttctgtttngnnacccacccngtttattctataa

SEQ ID NO: 290 - DNA, 187 bp, Homo sapiens
  misc_feature 49, 80, 105, 118, 124, 127, 159, 169, 170, 174: n = A,T,C or G
ccagcgtttcccctggaaactccttgggcgctctctgttccacccttgncgttaccggatcctggccgctttctcctttnggaacgtggcgctttttatactacnctgaagatttcantcgggnagncgtcgtcaactggctggggcacaacccccgtnaccgacgtgnncttntccggactttggt

SEQ ID NO: 291 - DNA, 133 bp, Homo sapiens
ccgggcaggacgcatacaatgacaaagccattttggagcagaggaacatgctgacggaagagctctatgggaacacatttcagctttacaagtcagcagatcacccaactctggacaaagtgttagaggtacc

SEQ ID NO: 292 - DNA, 678 bp, Homo sapiens
  misc_feature 301, 418, 437, 451, 452, 470, 481, 511, 538, 543, 548, 551,564, 565, 573, 588, 590, 592, 594, 597, 605, 632, 637, 644,645, 657, 663, 674: n = A,T,C or G
actataagtagatccacgtatagagagaaaattgatttttgaccaatttcagtgaaggaagggaattttttaaaaacagatattcctagagcaactggatatccatttggagaaacacctattttactttattaatatcagataaaattgactttaaagtaaaataattatcagaggtaaaaagtcactgaaagaagaaataagaattcatcaggtagagacaccaattctatattggtatgcacctaatgtatgccaatatatagaaagcaataatataaatgaatgtatataatattgnataccaagctaactttatatatagaattcagagagaaatgatttggctgaatcatagagggagaaaccaaatggcttattaggcacatgactttgatctgtgcccgctacagtttgngttggatggagccaaatcnggtttttcagattnnggaccaacaatccttcangatggttggtncatattaaactggtaccgggattgtgcctngatattctggcctgaataatctctagnggagntattnaancttctcactggannaaaataancttccccaaaaattngncntntgncttaaggntaggattttttctgatgaataaacctnttggngaaaggnnttggataacaantttttngccttgcgggngtgg

SEQ ID NO: 293 - DNA, 684 bp, Homo sapiens
  misc_feature 38, 62, 82, 173, 177, 187, 205, 217, 219, 228, 248, 254,280, 283, 302, 324, 337, 347, 352, 387, 394, 398, 400, 411,432, 435, 440, 441, 450, 461, 497, 509, 510, 517, 519, 529,537, 557, 569, 575, 579, 582, 583, 589, 590, 595, 600: n = A,T,C or G
  misc_feature 602, 613, 627, 638, 640, 648, 653, 660, 671, 672, 679: n = A,T,C or G
acttttttttttttttttttttttttttttttttttcngaaatgaacaaatatttatttatnttttataacaagtaaggcantgttgcttaaaggaagacaaacaaacataaaagattccgttgacaatgcattttttcatctgttcggcacaatgcttttgtcataatgganatgngacagcaaantttccaggacattcagtnttcggcggcagnanttagggcanatgactggccgctcaaattntctatnttgtttcaggacagtggaaaagctgnttntaaatgaggccaaagcacnaggtaggtggaaggttcttggntcgggttgaaccncgacagcgcnccaanagacaacactgaggcaatggggaacaacattgctnttttaantgancnccttgggtgcnagcgtgctgagggttaaaaanggnttaanncccgcgttntcggccggacnactcttaaggcgaatttcaacacctggcgggctgtnactaggggttcnnacttcgnanccaacttggnctaaatcntgggctagctgtttcttggnggaaatggattncgttanattnccnnaaaatnnaaccngaaantnaattgttaaanctgggggcctaatngagggctaacnanataattgnggtgngctcctngccgtttcaannggaaaantgtgg

SEQ ID NO: 294 - DNA, 569 bp, Homo sapiens
  misc_feature 431, 460, 477, 486, 512, 513, 520, 530, 532, 543, 545, 549,567, 569: n = A,T,C or G
accatctcactcaactcttgcaagaactctaacgagactggtattattattcctatcttacaaaagaggaaaccggccaggcgcagtggctcacgcctgtaatcccaacacttcgagaggccgaggtgggtggatcacctgaggtcaggagttggagaccagactggccaacatggtgaaaccccatttctactaaaacaaaaatatacaaaattagccagccatggtggtgtgggcctgtagtcccagctagttgggaggctgagccaggagggtcacttgaacccaggagacagagattgcagtgagccaagatcacgtcactgtacagaagtttttaaaccaaactgaggcataaagcagaaagagcaaaagacacatgaatacccttcttaacaatctcttctacttatgcctcaccgaacctttgnacccaaccctccaatccccaacgcggctnaagtcagactgggcttnagcttttgncccaggcacccccacatttttttttnnatttggntggccacttnanaaaaacttccnanaaanaatttttgctggcagttncn

SEQ ID NO: 295 - DNA, 577 bp, Homo sapiens
  misc_feature 164, 211, 217, 236, 238, 261, 273, 289, 301, 328, 358, 361,371, 389, 409, 412, 428, 430, 436, 439, 455, 457, 462, 485,493, 498, 503, 506, 510, 511, 522, 528, 534, 535, 539, 553,554, 574: n = A,T,C or G
acgcggggcctcctgtcttgtctcagcggctgccaacagatcatgagccatcagctcctctggggccagctataggacaacagaactctcaccaaaggaccagacacagtgggcaccatgggacagtgtcggtcagccaacgcagaggatgctcaggaattcancgatgtggagagggccattgagaccctcatcaagaactttcaccagnactttnttttttttttttttttttntngaggggggtctttttcttcttgntctcaaaaaggncaaagggagcccgacnaggaataaatancaatgccctgaattccaactgaccttntacagaaaagtgcttgactgccaaggggtnttnccaatcattnatgaggctcttggaaaantctccatactcctcttgggnganggcattaagggttttngnccaaanaancttgggcttgtttaantntttcngaacaaaggaatttttctttgancttcttanggganctttnttnttanncttacccggtnggaatnttcctnnttgnaaccccaatttttnnacttgggctttttttattanttt

SEQ ID NO: 296 - DNA, 694 bp, Homo sapiens
  misc_feature 398, 462, 491, 493, 509, 572, 626, 637, 650, 664: n = A,T,C or G
cgaggtacatcattgaaatcttttggtcttgttattggaatattcttcacgtaagtatatcatagctaactgaatttatttctaagtatttttacagttttatttcatattttgacattgtgaattggtttttttcttctcatttgtaattagctatttttgacaatatagacaacctatagatttttgtatttttatcttctgtctaatgagcttatttaatcattgaaattacagtagatttttaagaatataatattttgggttttctagatatgaaattatttcacctgaacatatagatcattttatttcctcttaatgtttatactgattactggtacattagcctggatttttcaaaacaatggtgaagagtgatgacagaccgtgactgncttggtcttaatttcatggaagtaagaatgccaaatattaatagggaatagtattccctattangaatgaccatttacttttgggtattaagnanggagccattaccatgnttaagaagttcccttttcttgtttataggggtaatgctaaaaggggtctggaatttataaaangcctttcagcatctattggtaaatggatgattttttttctttaattggtgaagnaagaataaaangggaggatttgangggaaccaactggnttttggacaaactacttgggcttgggaaaa

SEQ ID NO: 297 - DNA, 673 bp, Homo sapiens
  misc_feature 9, 40, 59, 62, 83, 141, 155, 158, 164, 174, 208, 226, 229,231, 232, 271, 302, 348, 366, 372, 375, 378, 408, 413, 419,425, 427, 432, 443, 455, 473, 474, 483, 484, 492, 512, 516,550, 572, 576, 604, 610, 613, 652, 660, 664: n = A,T,C or G
ggtactttnttttttttttttttttttttttttcaccaanaagtatttattaagcaatnttntgtgctaagtaaaaaaggctnttgccaggcgcgggggctcacacctgtaatcccaacactttgggaggccgaggggggnggatcacttgaggncangagttnggaaccagtntggccaacatggggaaactccattttactactgnttgaggagccggtgacanaancnntacatcatcttcattttctttattatgcccaagagggtncaacaaaaaggcactactatgatttgggggnaacatattcatcgacatgtcatttgactgccatggatactggggancaaggacattttggaaantttctnttnaanggcatcttctgggaaatgggcattcccccntttantggaangattgntnttttnaccaaaacccntttttatttttnaaataaattgggaagggnnttccggggnnccctgganccaggcaaggggaccaaaanaatncttgcactgacctatggcaacctaaatatttttnaaaggaaaaacaccttttttgntttntattgattgaatttccttccttggaaanaacggngcnaaattggccggttccttactggtttggaccggggaaaanaatggttntttnttttttttt

SEQ ID NO: 298 - DNA, 611 bp, Homo sapiens
  misc_feature 524, 535, 572, 581, 593, 601, 605, 610: n = A,T,C or G
ggtacaaccttcaaacattccagtttttataaaaaaaggggcacacaatcgtggttttgatccccttttgtttttggacaaatgtttctacaaatacagattcagcaaacccaaaggctgcaaatttacttgcacagtaatctgccagcccatttactccacttaatccagctgaacttgaaatgcaaaccaaatgtccatggtcattagcaatcatagcaggtagaaaggctttataagtccataaatgtgctttgaaattcacatcaaatgacttttccataagctcatctggacagtcaaggaactttttgcctgttacgattccggcattgttgattaggatggaaacatcgccgacttcttttttaacctggtcggctactctatacactccttccttttggctgcaatcgcaggtataggcgtgcactcttgtggctccagcttcccgagccatcttacatgtttcctcattcccctcttattgatatcccagagaacaagaacagatccacccggcnaactgcaaggntaaaaccttccgaggtcactttcacacctgtgatganggctatttnaccacaacgttnttccgggntttnggagna

SEQ ID NO: 299 - DNA, 190 bp, Homo sapiens
  misc_feature 20, 91, 107, 110, 116, 132, 149, 155, 157, 161, 162, 167,169: n = A,T,C or G
actgttgaatttggttcgcnaatatttgttgaaaatttttacacctacaatcatcagtgatattagtctaaaaattcattttctcatagcntccttacgtggctagnggnatgagntgtaatgctggccccngaaaacgtgttcggaanagttancncccnnttcantnctgttaaagacaacgaagatt

SEQ ID NO: 300 - DNA, 359 bp, Homo sapiens
  misc_feature 236, 242, 307, 321, 330, 331, 357: n = A,T,C or G
acaattgaaagcagaggcatccttgagctttaaagcattgaacaaactggaaaatgcaacataccacataactgaagtgaaaaaagtctgtgtttttgtgtttttttaaataaaaattttcaaaaagttaaaaaaaaagacatataaggttgattaaagggaaaaaaggctccagtttgttttacaggttttaaagttctgctgtgtgttcaattgccttgtgtaaccacttgtcnccttanggccagattcccctctctatcccctttttttaaatgtccattttgcttgcctggaattttaaatntccttccgtctcanaaatcacannaaactttttggtttggtgacatacanag

SEQ ID NO: 301 - DNA, 384 bp, Homo sapiens
acttttataggcaacaccattccagaaattcaggatgaatggggatatgccccatgtccccattactactcttgcggggattgctagtctcacagacctcctgaaccagctgcctcttccatctcctttacctgctacaactacaaagagccttctctttaatgcacgaatagcagaagaggtgaactgccttttggcttgtagggatgacaatttggtttcacagcttgtccatagcctcaaccaggtatcaacagatcacatagagttgaaagataaccttggcagtgatgacccagaaggtgacataccagtcttgttgcaggccgtcctgcaaggagtcctaatgtttttcagggagaaaagcatgcagaacagatatgt

SEQ ID NO: 302 - DNA, 278 bp, Homo sapiens
  misc_feature 10, 27, 37, 39, 59, 68, 89, 94, 121, 142, 143, 145, 153,171, 172, 195, 201, 216, 217, 227, 235, 237, 244, 247, 250,257, 274: n = A,T,C or G
actttttttnttttttttttttttttnaacaagcacntncactttattgaatgacactntaaacaggngtgtgggtataaactgctgtntctangggcaggaccaagggggcaggggcaanaaaccccaacgtgcatggccnncnttgcacantggattgcaaaggttgcnngctattgggcaggctactagtanccccgnttttcctggtttatnntgtaacatantttggtanantgtccanagnccngatcccngaacaggatgattcccnatgg

SEQ ID NO: 303 - DNA, 247 bp, Homo sapiens
  misc_feature 26: n = A,T,C or G
acttctttatacatctagtagacttnggctgtgaatctgtctcatctgatggattttttggtttgtaagttaaattttttattactaatttaattttggaacttgatattgctttgttctgggtttaaatttcttctttattcaatcttgggaaattatctgtttccaggaatttatcaatttcctctagaatttttagtttgtgtgcatagtcataatagtctcataggatcttttgtatttctgt

SEQ ID NO: 304 - DNA, 657 bp, Homo sapiens
  misc_feature 549, 582, 621, 636: n = A,T,C or G
actatatttataggaataaaatatttcccttacagcttagtctttatttttccaaaaaactttctgaaaaattgagatgtatctgatatccccgcgcatttcacatgttggcaaacatggcattttactgcctctggtgcacaaaaagcccttgagcgctcacctaatgcttctgtgaagtcaagggttccgagcacgctgactccatgttgctagggagcctctctaggaggccagcaggccgctgggcggccccgactgggatctgctgtggtatgtggccctctttgctagtgcaggagcctcctccggtcactttacctgcattcctttgagcctggggcccaggcgggggaccctagcaagaggcttacttacgtggtcccctgataccaggcatgggaatggtagcacttgctgattgtgtgggtctctggccacaatggaaatatttaacacacaacaccttaaagtggaggtgggcagatttttctctgaaaaggaccagaaagtaaatatttgattaaattaattaatcaatttatttanagacagagtctggctttgttgcccaagctggantgcagtggtgcaatcttggctcactgcaacctccacctnccaacaattctgtgnctcaacctcccaagtagtttg

SEQ ID NO: 305 - DNA, 323 bp, Homo sapiens
  misc_feature 22, 117, 273, 317: n = A,T,C or G
acaaaatggaaaagctggcctnagacaacaaacgcagctccctcttcaagaagaagaaggtcaaggaagatgaggatgatggtgtgggtgatggggatgaggacactgacagtgccntagggagcttccgatattcttcccgcagtaattcccagaaacctgaaacagacacatgctcctccctggctgtctgtgatcactatgcaagtggcagcagagttggcaaaaaagatggatagcagtattaataagtggctcagtggcctcaggacngaggaaaaacctcctttccaaagtgactggtctggaagttccanagggaa

SEQ ID NO: 306 - DNA, 515 bp, Homo sapiens
  misc_feature 476: n = A,T,C or G
acctactatgtgttagagaccactgtaggggctgggaacagacatggaaacagtgggcagaacactctgctcccaggaactcacactctagagcaggggtcagcaaaccttttctgcaaacagccagataataaatgctttaggctctgtaggccacatggcctctgttgcaatttacttgattttgctgtgagagcacagaagcaatcagagacaaaatgcaagttagcaggagtagctgtgctccaatataactttatttacaaaaataggtggtgggccagagattcatgatcaagtttaccttgtattagtctaatttcatgctgttgataaagacatacccgagactgggtaatctacaaaaacaaagtggtttaatggactcacagttccacatggctggggaggcctcacaatcacggcagaaggagaaaggcacatcttacgtggtggcaggcaagagaggatgagantcaagtgggaagggaaaaccccttatcaaaccatcagct

SEQ ID NO: 307 - DNA, 549 bp, Homo sapiens
  misc_feature 541: n = A,T,C or G
accatctcactcaactcttgcaagaactctaacgagactggtattattattcctatcttacaaaagaggaaaccggccaggcgcagtggctcacgcctgtaatcccaacacttcgagaggccgaggtgggtggatcacctgaggtcaggagttggagaccagactggccaacatggtgaaaccccatttctactaaaacaaaaatatacaaaattagccagccatggtggtgtgggcctgtagtcccagctagttgggaggctgagccaggagggtcacttgaacccaggagacagagattgcagtgagccaagatcacgtcactgtacagaagtttttaaaccaaactgaggcataaagcagaaagagcaaagacacatgaatacccttcttaacaatctcttctacttatgcctccaccgtaacctttgtacccaaaccctcaatccccaacgcggtctcaagttcaaactgggctccagcttctgtccacagccacccccacattttctttttgtattttgtctgccacttcaaaaanaacttcca

SEQ ID NO: 308 - DNA, 462 bp, Homo sapiens
  misc_feature 34, 116, 146, 186, 225, 250, 276, 293, 296, 306, 311, 325,330, 336, 351, 363, 365, 376, 396, 400, 407, 433, 438, 459: n = A,T,C or G
acttttttttttttttttttttttttggagtctnactttaggtaagtggaaagcaaaggtgttctgttaagggtgacggtgggacggtccttccaagctccgtccttgtggccttntccttgtcgcacacacccctgaggcatctntggggaacacccagaacagacatcctataaacattttttnaagctgtctttatattttagcaatcttgggaggaagtcntttgctttacaataaacaacctaanaaacaggttttgtgatagcaatcctnttatataaaagcagtanttnaaacatggcntacangacattgagccttngtggntatganctttgcccattacanttccacactttnanaattgaaaaanatgtggtttcccatgattanggtnacttgangaaattcttaatggagcaaacctttngtttncaaggtctttgtggcactaanttg

SEQ ID NO: 309 - DNA, 651 bp, Homo sapiens
  misc_feature 62, 234, 247, 285: n = A,T,C or G
actttttttttttttttttttttttcagtccctttacctttattaatttacgtaatctgcanaaaaactctatgagatggaaaaacgaaggttcaaggaagttaaacgacctgttcaaattcacacagctaaggagtggcaccaccagcatccgaacccaggctgtcccacttgcaaacaacaaccggaacaatgatgagaaaaccgacaagaaaaataatgacaatgacgaanacctttgtcgcanaccatgctcttttactctacacaaaaaccttctggganagctatgtcatcactcctactttacagatgagcacactgagactgagagaaggttagggacaacagccaaatgccccaggagatggaattcagatggagataatgaacagccaagtcctccgtaaagtgaagtatgtcatacacagtaaggtgttattattaaatccctagaattcatggaaagatgttctccctcaagtggtttcatgttaattcacctacaaacattccagatgcccgcgtacaggtttcactattcaaatatatgatgttaaactaacaaactcatgaccttcaaagatgtcttcgtcccacgcacacacatttggaaatttgtgtccattgctatttcccttcttctataat

SEQ ID NO: 310 - DNA, 183 bp, Homo sapiens
  misc_feature 99, 101, 109, 120, 128, 139, 140, 149, 169, 171: n = A,T,C or G
acctgcaggcctcctacacctacctctctctgggcttctatttcgaccgcgatgatgtggctctggaaggcgtgagccacttcttccgcgaattggccnangagaatcnctagggctacnagcgtttncagaagatgcnnaaccaagantggcttccatactctttttncnaaacattaataa

SEQ ID NO: 311 - DNA, 536 bp, Homo sapiens
  misc_feature 369, 470, 486, 498: n = A,T,C or G
acaatcacatttaaaaatagagagaacaagccaggaacaaaaccccactaactcagtatatctagttcagatgtggctaatgtccctatttagcatcttcaagttgctcacattttcctcagcaaactaagaatgcgtctctagcactgcggagcctgccaagtccaaggacatgggaatgtgaattatcaaacaagctggggatgaaaggtgctgaaatcatctttttagaatattgccaaaaagcagcttgagtttttagggtgctaattgctgaaatatgttttaacttccgaattcattctaagcttgtgacccactaaccaaaaagtaagaaggatgttgtcaaaaaaaaaaaaaaaaaaaaanaatgtacgcgggggctctcgctcggtctttctgccgccatcttggttccgcgttccctgcacaaaatgcccggcgaagcccagaaaccgtccctgctacanacaggagttgccgcanccccaggctganacagggtctggaacagaatctgacagtgatgaatcagt

SEQ ID NO: 312 - DNA, 198 bp, Homo sapiens
  misc_feature 58, 68, 87, 90, 94, 119, 135, 142, 146, 155, 162, 167, 177,184, 191: n = A,T,C or G
acgcggggaggcttgagggaagcatggaggtccatggcaagccccaggctagcccganttgttcgtcncccacccgggattcctcangantccnagtgtccaaggagctgcttgacggngggaaacgccgccccngatgttntggnacaggtttntcatcanctccnaacctaagtncagaaanacttcantcttcaa

SEQ ID NO: 313 - DNA, 461 bp, Homo sapiens
  misc_feature 78, 396, 418, 433, 438: n = A,T,C or G
acttttttttttttttttttttttttttgcggaggcaggatcgccttatattgctcaggctggtttttcttctttaanaagcatttgaaattgtcatatttatgttgaaaattgtgtatttgacaagcaaatacacaagcacaagtttcaattaaggggtagagtccattctttagttttagtttaaaaaaagtgtttaatacacttttaatacttttatatagaccaattaaagagatcaagaaagtaatacatgtatataataattttgtaattgctaggcctacatgggagtgtgttagtccattttgtgttgccataaaggaatacctgagctgggtaatttataaagaggtttattttgctcacggttctgcaggctatacaagaacatgntccaacatctgctcctgctagncttaaggaagcttcnatctngctgaaggtgaagggggccaaat

SEQ ID NO: 314 - DNA, 164 bp, Homo sapiens
  misc_feature 148, 149: n = A,T,C or G
acacactatatttacatcacccaccctgaaaacagcaggttctggcttttccgtgaacccccagatgaatataaattgggagccttgaaacagtttctttcccaaaaccgggaagcggttgcttttgggccctttccgctttcgtatnngctcgtccccttgac

SEQ ID NO: 315 - DNA, 289 bp, Homo sapiens
  misc_feature 163, 177, 188, 197, 201, 205, 238, 241, 245, 247, 253, 270,274, 279: n = A,T,C or G
acgcggggagggcttacgtggtctcatgttgctcccatttttcactacttgttcaaacaacagtgacagaacacctggttcccatgggcagggagttctgctgggcactaggaacgctgagatcaaagggaccctgcgttgtcctgaaggggctgacagtcanagtaggggaggcanacacctaaacnggtgttacncttnatancactgagcaccacagggctcttagagaatgctncangctngnactaanaactgatgcctgatgancaanggacntttgggatgc

SEQ ID NO: 316 - DNA, 471 bp, Homo sapiens
  misc_feature 315, 340, 353, 399, 414, 424, 433, 438, 439, 465: n = A,T,C or G
acgcgggaaaccaggaagatacagaatctctgaacagaccaataacaagcaacaagactgaaatggtaataaaaagaaaatgccaacaaaaaaaagtccaggaccagatggattcacagctgaattctattagacattcaaagaattggcaccaatcctaatgacactattccaaaagatagagaaagagggaatcctcctaaatccttctgtgaagtcactatcaccctaatccaaaaccagagaaggacttaccaccacagcaaaaaaaaaaaaaaaaaaaaaaaagttcgcggggatgtcatccattccganactgatgcctgggcttcaaggaccnttaggaaacatanacttctcccaaatggaggtttggatcacctgctgcccaaaacatantgggagatttcagtnttttaatgtnccaccagangtctnntccttgtcctgcccggcggccgttcnaagggc

SEQ ID NO: 317 - DNA, 242 bp, Homo sapiens
actaaagagaaaatgggactacagatccaccagaatgactaagccaggtgcagtggcatgtgcctgtagtcctggtcattcaggaggctgaggcaggaggatcacccgagccctggagttcaaggctgtagtatactaatggctgtgtctgtgaatagtcattgcacttcagcctggacaacacagtgagaccctgtctctcaaaaaaagaaagactgtccccaaaaaaaaaaaaaaaaaaa

SEQ ID NO: 318 - DNA, 705 bp, Homo sapiens
  misc_feature 289, 448, 497, 555, 652, 658, 661, 665, 674, 686, 690: n = A,T,C or G
acgcgggggggttatacctgtcttgcagccatccgagatcacgcttctgtcttgtctttctcgagaagcaggtggaaacatgagcattcagtttcttggtacgcgggtattattattattagacggagtctcgctctgtcgcccaggctggagtgcagtggcgctatctcggctcacttcactgccacctccgcctcccaggttcaagcgattctcctgcctcagcctcccgagtagctggcattacagatgctcccccacgcccagctaatttttgtattcttagtanagacaaggttcctccatgttggccaggctggtttccgactcctgacctcaagtgatccacccgccttgcctccaaagtgctgggattaacaaggcgtgagccaccctgcaggccgatgctttcagcttattaagagctcaccttgttggatgactgcanaacattttcttggtaatgtaaaccaaaagcttctgtatttcccaaatanccccattaatcaacatttacaaataattgtaaaaataatttcaagaaaatgagaaagntgacccccagactggggaaaaactatttacaaaaaacttatttaataaatgactggttttcaaaatatttaaagaacctctttaaacccaagaattngaaaanttncccngattaaatnatggggcaaaanatcngaacaactccccaaa

SEQ ID NO: 319 - DNA, 444 bp, Homo sapiens
  misc_feature 37, 39, 67, 86, 116, 158, 173, 197, 227, 263, 283, 307, 365: n = A,T,C or G
actttttttttttttttttttttttttttttttttananaacacacatacaacaatcatgtgtcctnttaaagcatgcattgcaanacagcatatttggtatgttggatatcttgngttttttctctaacttcacttaccactctcaccaccctgctntggaaattaggactntgatctacccaagcaggcttcctntgacttctggttgagttggtcaatggggancaccacaggagatcaaaaggaggagggagagagaanacagattatttattgcccangcccttttcttgcaggtggggganaacattttgggtgtgctgcaacccttgacccaaagtcacaaatactgtcaaaaaaaanataaaaacaagtagtgggaaaaaaaatggattcaactctatgtcatttaaaatgctgcttgcatttttaatggaaatgt

SEQ ID NO: 320 - DNA, 438 bp, Homo sapiens
  misc_feature 408: n = A,T,C or G
actcaacaggctccctaatagatacagaatctgtatgttcaattgcatttcaattcaagtcctccttataacttcacacattgtctagcgcatactcctcaaactcttctgtagtttttttccttgagctgcgacaagccagaacatgtgttgcttcattcctaattgctgtttacagattttgcatgctggtatttttaaaaattacactgtcattaacccgaggcagaggtccagttggagcaacagggtgaggaatcttgtgcagttgtctcaatggatttctttgctccacagttgaatgccaattccagatgtgttctttatccacaccactcgtcttgcattcttcgtttcccaaatccattttatttcttcttactcaattaaaagaatccaaatcctttnttacccaaaaaaaaaaaaaaaaaaaaagga

SEQ ID NO: 321 - DNA, 200 bp, Homo sapiens
  misc_feature 54, 81, 88, 98, 154, 158, 192: n = A,T,C or G
actttttttttttttttttttgggttttttgccaacataccatttttaatgganactcaaaacattaaaaaaaaaaatcanaactgancattgccagnaaaggtcaaacttgccataggataaactttctgggtctcatatgaagcctttacanacanaagcgtgtcctatgttcatggcctttatggatgnaaactgga

SEQ ID NO: 322 - DNA, 204 bp, Homo sapiens
  misc_feature 26, 37, 46, 54, 87, 105, 107, 111, 113, 150, 181, 196: n = A,T,C or G
acttttttttttttttttttttttgnttaggatggangggaaattntgcctgtnttctgtgatctaaaaaaaactggtgctgtccancctgctgaaaaatatttnantatnanctattacaatatattattaggcttacaggcttagtgntaatctgtgttaaaattctgaaaatacaatnattattcctttgctntaaggaaa

SEQ ID NO: 323 - DNA, 651 bp, Homo sapiens
  misc_feature 418, 468, 490, 531, 582, 586, 613, 624: n = A,T,C or G
acgcggggggttatacctgtcttgcagccatccgagatcacgcttctgtcttgtctttctcgagaagcaggtggaaacatgagcattcagtttcttggtacttaccattttggaaacatcagcaactgaaaagtgggttacatgatacaatgagtgtagttgcctttctccagacctgttctgtttccttgccctctctggcctctttctggctccatttaccttttccactagtttaccagatgattcatcaactttctggcattttccacttaccatctgtgtccagcatcctggtaaaatccaataaactttctaatatccagcatcccattaactatatccttgtatatagcaaattcactgggagtggatagtcatatgatggcctcaaggcaaagggctctaccactttttngaatacccacttgtgtgccaaagttctgtgctggtttgcatcaactaaantcatctcactttaaagctaaantattaaaagatcctaaaaaagccattttacagaaagattanaatattttcaattattaattcagaataaatatatcttttttctttaaactnctcnaataactaattgaattgcattggtttnaattaaatgcngtcatgtgtatatatagaattaaaatc

SEQ ID NO: 324 - DNA, 557 bp, Homo sapiens
  misc_feature 33, 35, 201, 376, 529, 532: n = A,T,C or G
actttttttttttttttttttttttttttttananacagggtcttgctctgttgcccaggctggagtgcagtgacacaatcatagctcactgcagcctcaacttcctgggctcaagcgatcctcctgcctcagcctccccagtagctgggattacaggtgctcaccaccacacctggctaattttaaatttttttgcaaanacagctatgttgccgagggtggtgtcgacctcttggcctcaagcgatcctcccacccaccttggcctcccagagcactgggattacaggcatgagccaccaggctggtcctggactgtgtttctataaaaagccggaagcacacccaggggtgctccctttgatgactttgcatntttctccccagatccacccacctaccccattagggcttgttagatacaaggacttaacacaaacacaagctggggacagcctgtgagtcttgattcctgcaggcacccaaggaaagtatgggagctttctgctgtctcctccaatcattcctntanccctttcatggcctggtaacacttt

SEQ ID NO: 325 - DNA, 316 bp, Homo sapiens
  misc_feature 244, 289, 302: n = A,T,C or G
actcgggaggctgaggcacgagaatcacttgaacccaggaggcggaggttgcagtgaaccgagattgtgccactgcactccagcctgggtgacagagcgagactccgtctcagaaaaaaaaaaaagaaaaagcatcagaaccaggtcaggaggagaaggcaaagagttgccactgctctccttctgggatcttctcacccagctccagaaaggcaaggggccttggatgctttggagccactgntcagccccgggaaccacatcacctgctcctcgggttttttcatanaaagagacacatnctggaagagtgttg

SEQ ID NO: 326 - DNA, 370 bp, Homo sapiens
  misc_feature 274, 326, 350: n = A,T,C or G
acttttcttttttttttttttccaattttaccttctttaaaataggttgttggagctttcctcaaagggtatggtcatctgttgttaaattatgttcttaactgtaaccagtttttttttatttatctctttaatctttttttattattaaaagcaagtttctttgtattcctcaccctagatttgtataaatgcctttttgtccatcccttttttctttgttgtttttgttgaaaacaaactggaaacttgtttctttttttgtataaatganagattgcaaatgtagtgtatcactgagtcatttgcagtgttttctgccacanacctttgggctgccttatatttgngtgtgtgtgtgggtgtgtgt

SEQ ID NO: 327 - DNA, 483 bp, Homo sapiens
  misc_feature 60, 114, 116, 151, 165, 168, 207, 208, 215, 218, 236, 241,242, 265, 269, 275, 283, 313, 339, 341, 383, 390, 398: n = A,T,C or G
acctagggagtggcagagtagtgatgtaaactcaggtctctattactcctcggttcccanacatcttcctctttgtccctctgttttcataaagaaagtctattcctctccacnanctcattttctttcctgggacacaaactgggaaacnccttctttactctngtntctctcccctttttatacaattattcaagagactcatcnnaaacttngcnggggtggctgtgacatanctccnnagtgaaaacttggaaaagacatntatnctcatnctgtatgnaaatgttctgttaaaatgtcgcaatcctgnattaatcctgggctttctaaggcggnanaataccttcatagcctcagtagctggcatgtggtaggtgctncgttctngttttttngtttgtttgttttggtttctgtttttcattggctagttttatacagggattgtaaaaccgcataggcccaaatcatgccaaatgt

SEQ ID NO: 328 - DNA, 474 bp, Homo sapiens
  misc_feature 21, 27, 67, 81, 91, 98, 102, 103, 107, 113, 115, 120, 128,129, 144, 164, 166, 171, 189, 190, 206, 216, 227, 234, 241,248, 265, 277, 278, 301, 303, 304, 330, 349, 354, 387, 390,398, 411, 437, 440, 468: n = A,T,C or G
acgcgggctactcctctgaancaaganggaattaacaaaagacaggcaaagagacaaaaatattgancaggtgttgcaaanaaaagttaanggcatcntaannggcntctttnanaaagnaaaattcnnttccatttattaatntttattgagactcactgtgntnccatncaatgtctacccctgaannaatttcaattttggcnaagattgtanttttctgttcntaaggcntatattntttttanaaaaaataatatcatantgaataaagggnngaaaaaataaattttaaccactntnngggatactttcaaaaggggctctacnaaaaataggcatttacatnccatnttgaaaactcaaaaaaagttttcttaggatcanctngtatttgngaagaaaaacccncttaccccaaaaaactgacatgggtngcntggacctaataataatttttttaaaaanaaccct

SEQ ID NO: 329 - DNA, 240 bp, Homo sapiens
  misc_feature 3, 21, 33, 41, 55, 71, 83, 84, 86, 104, 105, 109, 119, 125,138, 157, 162, 195, 196, 213, 221: n = A,T,C or G
acnaaatttaaaattaaagcnactttcttccgnattaaaanagattcttcacctncctaaattagaaaccngaaggggtaacnntnctatttaaggatcatacnntaangcttataaanaggccnccaaattaatctnttaaccatttttcctaacnctttnctaggggaccttaacattttaatcccaaacctnnacttgtttggcttggtnttctaaanctaacaatattttttaaaa

SEQ ID NO: 330 - DNA, 300 bp, Homo sapiens
  misc_feature 27, 28, 29, 31, 102, 187, 201, 210, 222, 228, 235, 251, 253,257, 265, 278: n = A,T,C or G
acttttttttttttttttttttttttnnntnggcaagggcaattcacatttatttcctgagcatgctgactaaacatacttcaaacacagcagaaggtaaanagtctgttttgtaagtaaagccgtttcttgccaacagcgaatggtggtccatgaaaagtactttttttttttttttttttttttnaaacaaggacaatngttatttantttttatttcanaatcanaaaactnaactttgcaatccacntnggcntgggaggnaacaaggaaaacntgggaacccaaagggaacttgc

SEQ ID NO: 331 - DNA, 208 bp, Homo sapiens
  misc_feature 141, 186: n = A,T,C or G
acttaaatgaagcatattcatgtaatgtgcttttttttttttttttttgccagcttttctaagcaaatagattgtctgaattagtcacagaataattttgtgaaaattcatgtttaagtagcaactaccctttcttttttnatatatttttaaggtattagtttatcttcttctaactggtgcagncacttaatgttttcattaatct

SEQ ID NO: 332 - DNA, 305 bp, Homo sapiens
  misc_feature 182, 248, 273, 284, 301: n = A,T,C or G
acaagatataattgataaacctgaaaatttaaagacactccgagtgaagaaaactgaagtttattggtcaatggagacaaacacaaaatgctattacaaattcagaaaggtcccaagagtcactaaagattatttttgtgaaaacaggttatacagcaatgagaaaacaatttaatacattntttccctcaaaatgagatcccctccaaactccctgcatcactatttttctaattatcaaactaaanacttgtgagagaagattgaaaatanaacttcagttnaaagctctttaaagaancaca

SEQ ID NO: 333 - DNA, 186 bp, Homo sapiens
  misc_feature 45, 87, 93, 150, 174: n = A,T,C or G
gtacaacactagttggaaaatgacttggtaaagcaattaaatgtnactttcactaataaaagaaagaattcttataaataaaacatngcaaanaaataaaggaattaatacagctgtcattctggctatcttacagcttttttccagtcntatattttacacccactttattangaaagcttcttt

SEQ ID NO: 334 - DNA, 492 bp, Homo sapiens
  misc_feature 242, 448, 459, 472: n = A,T,C or G
acatattactgagaccttatctaacatgtaattgtatctaattaccagacacaaccaaccccaactgtagaaacttgggcaaaacaattaagcacacaacttcttctatatattaaatactttttacgttcttttttataaagaaaaaacctggtttagaaattaggacatctagagccagacttaaaattttatgaaaccaatgggcctgactgatttaatgtcatctcataaattatcangaatttttatgttctcacaaattagattgtatattttgttagttaaaactcggtctaccttcaatttctgatcatttgtctaggaaataataactgggaattcaacaatattttaaaaaggtcaaataatggtcttatcaaaaaataactgagccccaaattcaaatcactggctaacctacctacccccaatgggtagatacttncaaaatttggnatattttaatttncaagatcattttagatgttt

SEQ ID NO: 335 - DNA, 128 bp, Homo sapiens
  misc_feature 85, 110, 119, 121: n = A,T,C or G
accgatcctgagaccttcgtgcaggcaatctctgatgcccgctgtgtttttgacatgggggctgaggttggtttcagcatgtatntgcttgatattggcggtggctttcntggatcatnangatgtta

SEQ ID NO: 336 - DNA, 451 bp, Homo sapiens
  misc_feature 390: n = A,T,C or G
acaaatgagacaaaggcacagaggttagttcacatagctatgaggcacaggcagaattcaaacacaggcagtttggcttcagagaccatgatcttaactgctatgctctgatgtctctccaaaaaagtataaacatgagcagggttaattgtagcagctacttggtttttacgtcaagaatcataaaccacaagaggaaacatgaagtttttgttttttacttttcaagatggagtctcgctctgtcactcaggctggaatgcagtggccctatctcagctcactgcaacctcacctccagggttcaagtgattttcctgcctcagcctcccaagtagctgggattacaggtgtgtgtcacacctggctaatttttgtatttttaagtanaaacagggtttcaccatattggtcagactggtcttgactcctgacctctggtgatccactc

SEQ ID NO: 337 - DNA, 248 bp, Homo sapiens
  misc_feature 29, 80, 100: n = A,T,C or G
acttttttttttttttttttttttttggncaatcaacaagtgtttattgatcacctactgtgtgcctggcactgttacanatagtctgggggatacaganaggtctaggatatggcccccacccaccgaagggtttacaatatacttgtgagatcggacacacacacacaaataacgatcaatcaaaaattgtgaatgctaagcatcaaaaagcaatttatacattgagggttgggggagggaggggt

SEQ ID NO: 338 - DNA, 478 bp, Homo sapiens
  misc_feature 242, 358, 381, 395, 446: n = A,T,C or G
acctagggagtggcagagtagtgatgtaaactcaggtctctattactcctcggttcccagacatcttcctctttgttccctctgttttcatagagaaagtctattcctctccacgagctcattttctttcctgggacagagtctgggaaaccctttcttcactctgtttctctcccctttttatacaattattcaggactcagctcagactttgctggggttgctgtgtcagttactctcantgtaaacttgggaaagtcattatactcatgctgtatggaaatgtctgttaaaatgtccaatcctgcattaatcctgggctttctaaggcgggaaaataccttcatagcctcagtanctggcatgtggtaggtgcttcgntcttggttttttgnttggttggtttggtttctggttttcattggctagttttatacagggattgnaaaaccgcataggcccagatcatgccaaatgt

SEQ ID NO: 339 - DNA, 481 bp, Homo sapiens
acatttggcatgatctgggcctatgcggtcttacaatccctgtataaaactagacaatgaaaaacagaaaacaaaacaaacaaacaaaaaaacaagaacgaagcacctaccacatgccagctactgaggctatgaaggtattctccggccttagaaagcccaggattaatgcaggattgcgatatttaaacagaacatttccatacagcatgagtataaatgactttcccaagtttacactgagagtaactgacacagcaaccccagcaaagtctgagctgagtcctgaataattgtataaaaaggggagagaaacagagtgaagaaagggtttcccagactctgtcccaggaaagaaaatgagctcgtggagaggaatagactttctctatgaaaacagagggaacaaagaggaagatgtctgggaaccgaggagtaatagagacctgagtttacatcactactctgccactccctaggt

SEQ ID NO: 340 - DNA, 652 bp, Homo sapiens
acacagaaagggaggtgtcaacaaaagaagataagcccatacagtgcacacctcagaaagccaagccaatgcgggcagctgctgacctggggagggagaagatcctcaggccaccagtagaaaaatggaagagacaggatgacaaagacttaagagaaaaacgttgttttatttgtggaagagaagggcacattaaaaaggaatgcccacagtttaaagactcttcaggaatgtctaaatcagattgtatgtttggatcgccctcacctgtcccattgaaaccaactggtttatttgttcaggcagtgcttttacatgaagacaaaaagaaacaaaaaacaacaatatttttgagtccccagtcaggtagcctttccagtaaatatatgactcagggaaaagcctcagcgaagaggacccagcaggaatcatgagggaaggaaaatgcagcactctaaatggccactcaggcgttcctattcactcggaaaattaggttcatttcacaggacacagcagtgtagatcaggcttcaacttaacatttaagggaaatgtcagatttttttttaatttaatgaaattgttaatgaggaaaaatttttaatatagtcttatctaccaacatccccatagatttaaggattttaata

SEQ ID NO: 341 - DNA, 183 bp, Homo sapiens
  misc_feature 22, 43, 60, 107, 133, 163, 169: n = A,T,C or G
tcatacagaccatggaatactntgcagccatgaaaaggaacangatcacgttctttgcanagagatggatggagctggaggccattatccttagcaaactaatgcangaaaagaaaaccaaattccacatgtnctcacttataagtgggagctaaatgatganaacacnttgacacatgttgc

SEQ ID NO: 342 - DNA, 431 bp, Homo sapiens
  misc_feature 34, 332, 377: n = A,T,C or G
actttttttttttttttttttttttttggtaganacagggtctcactatgctgcccagtctggtcttgagcctctggactcaagcaaacctcctgctttggctttccaaagtgctggaatcatagacatgagcccccatccttggccaatttttaaatatcatatataaaaattcggacttttgttttagctttctgtttttaaatttctcttcaaattaaggagcagttgagtttgatgactaagagcttggggttgggacatggaagccaactcttccatcctcaaattgtgtctcatatagtttatgaaactaccacagactcaacatnataatatggaaaatgtaaatacaaatacatactatctataaaatnattagccatataaagaaaaacttccactccctctccttcttccttctgctcaaa

SEQ ID NO: 343 - DNA, 140 bp, Homo sapiens
  misc_feature 7, 22, 24, 80: n = A,T,C or G
acctggngggtctgttcgaatntnccaacctgtgtgccatccacgctaagagagtcaccatcatgcccaaagacatccanttggctcgccggatacggggagagagagcttaagtgaaggcagttttatggcgttttgta

SEQ ID NO: 344 - DNA, 577 bp, Homo sapiens
  misc_feature 17, 21, 34, 35, 39, 42, 67, 74, 92, 99, 101, 120, 122, 124,130, 144, 147, 148, 160, 171, 177, 192, 200, 201, 203, 207,217, 222, 232, 235, 237, 239, 245, 247, 249, 251, 253, 268,275, 295, 303, 305, 308, 309, 311, 329, 335, 337, 340: n = A,T,C or G
  misc_feature 342, 353, 356, 360, 361, 364, 368, 370, 379, 381, 395, 397,399, 402, 406, 411, 413, 417, 419, 420, 422, 424, 432, 439,440, 452, 456, 458, 460, 463, 464, 465, 470, 472, 477, 481,482, 488, 496, 510, 514, 519, 520, 524, 536, 541, 548: n = A,T,C or G
  misc_feature 551, 552, 555, 564, 571, 575: n = A,T,C or G
actttttttttttttcngggntttttttaagtanngggngtngagcccgaacgctttcttaattggnggctgcntttaggcctactatgggngttaaangntttactctatctacaaggntntnttctanagcccaaagagctnttnntcttaggactancattttaaatntacaangggatcctaaagggntatgtggnncnaatntatagttcancgtanttattctatnttngntnaaccancntntnancaaaacactggtatngttatgnagccatctacctttaaaatnttctctcntnttnntnctacatattacagattgngctttntntangnctgggcctttnaanaaannttnctangngtttaaatngngtgattaactcttngnanctncttntacananctantnncnantttaattntttaatnncttaaagtaaantgangntnatnnntttantnttatnaatnnatgggnaaaaaatnctctcaaaactatnctanttttnnaaancttttttaattnccacnctaatanggnnctnaattccatnataacantgtngg

SEQ ID NO: 345 - DNA, 641 bp, Homo sapiens
  misc_feature 6, 8, 76, 170, 247, 260, 277, 287, 356, 357, 367, 379, 394,402, 406, 415, 420, 422, 438, 439, 446, 447, 448, 454, 455,457, 467, 473, 483, 485, 487, 488, 499, 500, 501, 506, 511,518, 526, 527, 531, 534, 536, 539, 544, 547, 548, 553: n = A,T,C or G
  misc_feature 554, 555, 556, 560, 563, 567, 576, 579, 587, 589, 592, 593,597, 599, 604, 608, 613, 620, 621, 629, 630, 632, 633, 634,636, 639: n = A,T,C or G
cgaggncncgggggggacctgggctgcagtctttctattgtcaatggcctatatgacctatgaggttagttaatcntttagaatcttagtttcttcacttgtaaaattaggtaattgaaatatgtgatttctaaagctctttttaactctaaaacgtggttctgtcatangaataattctgtgcataggaaatacacattagaatatgaatgtcttctcccacattattctgtaaatcctatttacntcccattatccanagtaaaatatgggattncaatgaagtntattagttacctaacactttaagcctaatggtggcttgattttagaaaccactttgaattttcatgcanntatggtatantctcctgagtcntttcggttctcgctngattagcncctntgtgcactngattntnctgtattggccatttnnatgcctnnntgctgnntnttagcctgtngtgccntctttctttncnannaaaaccgttcnnnatctntaacntcttttnatacgtgnnttanttntntgnatttntcnngttgnnnntttntanaatntgattttcnatntatcgggngntcnncttntntaggntgantcttntttgttnnattattanntnnntntcncg

SEQ ID NO: 346 - DNA, 648 bp, Homo sapiens
  misc_feature 19, 39, 42, 72, 77, 83, 88, 93, 96, 111, 121, 123, 126, 135,146, 166, 171, 175, 177, 179, 182, 185, 186, 189, 192, 200,203, 207, 211, 212, 214, 221, 227, 229, 233, 248, 261, 263,269, 282, 283, 294, 296, 297, 298, 308, 313, 316: n = A,T,C or G
  misc_feature 326, 330, 332, 339, 341, 343, 344, 356, 360, 362, 363, 369,371, 376, 386, 395, 398, 400, 401, 408, 409, 413, 414, 423,424, 425, 436, 448, 456, 458, 461, 466, 468, 475, 477, 483,488, 489, 491, 494, 496, 497, 498, 500, 504, 507, 509: n = A,T,C or G
  misc_feature 517, 519, 520, 522, 523, 526, 534, 537, 542, 546, 547, 549,552, 557, 562, 568, 569, 576, 587, 588, 605, 608, 616, 620,622, 629, 630, 631, 639, 643, 646, 647: n = A,T,C or G
acttttttttttttttttnttttttttttttttttacgnggnttttttttttttttttttttttttttcttnacggnttcaanggacnctttnatngtttactaaatggancatcaatttngnctnactacctanaaatggaattncatctgggttccatgctganttganaaanangnacnaanntantcntaataacntanattnaaannanaactaanctaacncngctnattttcttttaaacnggctaaatttaantntatccnttcataaaatgcnnaattggtttantnnnaaaataattntaaanggnatctttgaanaatntnttgcaantncnnggagctttgaanattnanntttaanancttgncttactgtcntaaagggtnttnanncatatgnntacnntctggccannntctaaattttnatttccctattnaactcttntnttnatttncntttatgntnaagatntgacnnantantnnngntatnacntnactatgtngnntnntanctactttnacntatanttcnntnaantttcngtacntttatnntgttccntttataaaatnnattttcttaattatgtnttnatatccantatntntcctttnnnttattatntgcntcnng

SEQ ID NO: 347 - DNA, 229 bp, Homo sapiens
  misc_feature 14, 33, 37, 43, 51, 54, 59, 60, 67, 72, 89, 91, 97, 103,104, 107, 109, 113, 117, 140, 145, 149, 153, 156, 170, 173,175, 179, 185, 186, 187, 193, 200, 204, 208, 223: n = A,T,C or G
accgggggtagtgncttattgcagataattttnagcntagggnctgggggntangacgnntctctcnttttnagtcggagacctctgcngnatactngctccnncanancatntgcnaggccatgaagcttcccaacttnttccncctntttntanttattgaaactggngcnantcgnagcaannntgcatntcttgcnttgncatntgattactccagatntattac

SEQ ID NO: 348 - DNA, 163 bp, Homo sapiens
  misc_feature 4, 15, 19, 22, 31, 35, 46, 56, 82, 99, 105, 117, 123, 130,140, 141, 143, 163: n = A,T,C or G
aatncgcccttagcncggnccnggccgacgnacancggtaccgcancatgggccanaatgttgcatattacatgctctactnagtggaagaagatgaanatgccnacaagaaacagntcgctnaagtctntgtcgaacannangagcccccgaacgtgactgn

SEQ ID NO: 349 - DNA, 409 bp, Homo sapiens
  misc_feature 4, 24, 27, 30, 45, 46, 48, 50, 67, 93, 97, 99, 100, 108,113, 118, 129, 135, 142, 143, 152, 156, 163, 166, 171, 183,190, 204, 230, 241, 244, 245, 247, 255, 256, 258, 262, 265,267, 268, 277, 280, 285, 286, 290, 303, 308, 310, 312: n = A,T,C or G
  misc_feature 319, 321, 323, 329, 339, 340, 345, 346, 348, 360, 374, 377,378, 381, 382, 386, 388, 391: n = A,T,C or G
actntttttttttttttattaganttnttncagacacacttgctnngntnccaaggttggaatacangggcatgatctcaggtcactgcaacntctncnnccaaggtncaagnaattncctggccttanactccnaaaaagnngggattacnggcntgttccnccncaccnaggtatattctngtatttntatagaaatgaggntttaccatattggcccggctggcctnaaattcctagnctnnancaatatanncnaccntgncnncaccaaagnganggagnntacnggcatttaaccantgccncngncctgaanancngttttntgatttcaannctttnntnggccctggcganttctccttacccgnatnnatnntttncnccnaaaacgaaataaaaaacc

SEQ ID NO: 350 - DNA, 177 bp, Homo sapiens
  misc_feature 6, 12, 15, 20, 34, 36, 38, 49, 53, 60, 62, 107, 108, 111,119, 125, 128, 144, 155, 156, 162, 171, 173: n = A,T,C or G
tcgagnggccgnccnggcangtacattcaaaaancntnaggaaatattntgantgcccangntgatgaaaactggggtgaattaactccacacattttatttcaagnntgntaaagagntttagnggngccaacgcaatggtcnctatgcatgcnnagaagncaaaagagntnctcc

SEQ ID NO: 351 - DNA, 378 bp, Homo sapiens
  misc_feature 22, 28, 30, 31, 33, 34, 37, 44, 49, 72, 74, 81, 86, 87, 88,92, 93, 102, 110, 117, 125, 133, 151, 153, 154, 155, 171,172, 174, 178, 191, 192, 203, 223, 226, 230, 232, 250, 284,286, 298, 300, 303, 305, 311, 319, 322, 331, 333, 336: n = A,T,C or G
  misc_feature 342, 346, 357, 373: n = A,T,C or G
actgcatagattaaagaaatcnactgcngnnannccnctcgtanggaangaacgccattgccaatgataagncnttgcacntaggnnntganngcaaacaantatagtgngcttccnaacaggtnataaccancctgataaacaccattanannncgatgccaagcatgtnncncatntggtgtgaccaannactattcatantgaacaaaagttgtgtatanatncatncnaagggcaaactccctccnatgataataccaggctaagggcttccttagaacngntgttatggaatntnacngngagaanctgttggntcngaactgggngntcnatggtnttcntggtaaaaccnaaatgtgccctaacanactca

SEQ ID NO: 352 - DNA, 145 bp, Homo sapiens
  misc_feature 22, 55, 57, 58, 59, 86, 87, 99, 100, 106, 108, 109, 110,113, 118, 124, 140: n = A,T,C or G
acggttcttcctgtgtcagctnaatagcttgctgctttttaagaaccaagaagcngnnnaactttgcggcagcttgttttctgttnntattactacatnncttatngnnnacngttanatctantccacctccgagcatnggctc

SEQ ID NO: 353 - DNA, 523 bp, Homo sapiens
  misc_feature 17, 18, 74, 87, 93, 99, 101, 103, 110, 118, 121, 123, 126,139, 148, 160, 165, 170, 172, 175, 183, 189, 198, 219, 229,231, 240, 250, 256, 265, 270, 279, 308, 311, 314, 316, 329,330, 335, 339, 340, 344, 345, 347, 366, 368, 370, 387: n = A,T,C or G
  misc_feature 389, 398, 404, 409, 423, 436, 443, 458, 468, 486, 487, 493,496, 497, 522: n = A,T,C or G
acgcgggggctcaaagnnggcgccatccgggaccggcggttgtctgtggccggaggctgatcaggattattgcntcgagcttttagngtcttnttattnancnccgaaantaaccttntgntncancaaaaatcaaatnctaaaattncctttccaggtngtttnacaantnctngttgtatncatccnttaaccaanccacccgccttgaggaaagtnacccccttgnantgaggcaancacaaaaaancggctnaaacctganctagnaattccttngaaaaaggtcctccaaaaaaaattatttnttnacncnaattcccttaaannctaantctnntgtnntntggggggaacataaatttntnanttttttggggagaaaantnaccttttantcaaanccaangaaataaactttgntttttcaaagaanactaaanaacttttaaaaaacnccatttgaanttaaataccttggttaanntttggngcnnttttctttaagggggaaattaaatnt

SEQ ID NO: 354 - DNA, 483 bp, Homo sapiens
  misc_feature 50, 63, 72, 77, 85, 96, 99, 101, 105, 113, 131, 153, 162,167, 202, 210, 214, 227, 248, 252, 256, 259, 260, 263, 265,268, 270, 277, 288, 297, 299, 302, 312, 325, 329, 350, 363,372, 374, 382, 406, 407, 409, 412, 413, 417, 424, 431: n = A,T,C or G
  misc_feature 435, 440, 441, 443, 453, 458, 462, 483: n = A,T,C or G
acagaaatttcacaagatgtcaaacacagtgatgccatttgctatgtttnattttgctagtancttattaancatancatgcaantaatcaaaganaancntccntgacttanagggaaaaataattctanaaaagtttcactaggtaaagtntgcaaatcnttatntaaaaaccttctttaaggccatgaaccttcatgtntttgcaanattnttggcctcaattntcccccctttttttaacccancaantttnganngtntnaananaatttgnggccaagaaantacatcccntngtntttaatccangttttgaggaacnttanattttagggtttataaacttnggctgatttcccngccaccagnanagggtttnccatctttgccagtaaaataaaannanctnntttncaataanctttgantggnggctnncnggatctgggnggccntggnaaaaaaggccccctccctttn

SEQ ID NO: 355 - DNA, 532 bp, Homo sapiens
  misc_feature 58, 68, 95, 109, 123, 129, 132, 135, 139, 150, 153, 156,162, 166, 167, 181, 183, 192, 194, 205, 211, 214, 220, 223,225, 228, 229, 231, 249, 255, 258, 262, 269, 274, 290, 299,306, 309, 313, 319, 320, 322, 329, 347, 348, 352, 359: n = A,T,C or G
  misc_feature 360, 362, 371, 383, 387, 393, 395, 423, 429, 437, 448, 456,460, 468, 472, 479, 496, 499, 530: n = A,T,C or G
actttgcctacggcagcaacctgctgacaaagaggatccacctccgaaacccctcggnggcgttcttntgtgtggcccgcctgcaggattttaancttgactttggcanttcccaaggcaaancaagtnaanctnggcntggagggatanccnccntttttnaaanncctggcaataaagngnggggagtantntggaaaatgancaaaancantttaanttntntgnntnaccaaaaaggggttaaangtggantgntgtngtaatanaagtnaaagttgcaactcaanaaggaaaanaaatacntgnaaantttttnntnacaaatncaaagggctcccctcccnncagntaaaaanntnttgctgggnggcaaaaaaaangttnccttgnanttcaagaaagttaaagcattaaaccatngctttncggaaggntaaaaaattgnaaactttnaaanggggaacncacnttttaanatacaaaattttaaggnttntttggctttaaaatttttaccttgaaccggnat

SEQ ID NO: 356 - DNA, 476 bp, Homo sapiens
  misc_feature 46, 52, 56, 58, 68, 72, 75, 78, 81, 83, 85, 105, 108, 115,120, 135, 137, 143, 151, 170, 203, 206, 225, 235, 241, 266,273, 274, 276, 279, 283, 284, 286, 287, 291, 295, 299, 301,311, 315, 326, 328, 336, 350, 360, 368, 369, 377, 381: n = A,T,C or G
  misc_feature 385, 392, 398, 407, 416, 423, 430, 435, 438, 465: n = A,T,C or G
actctttgttttggcacacttttcctgacaaacagccggtgttctnaacacntaantnctagtccacnttancancantancntntgaaaccgctctccgtaaanatnccaaatnggatncaaatggactggaantncctggnagggtttnacaaaattaagacaaaggncaaaggaactttgccaaaggaaatggaaagcanttntttaaaaatagtgggaggnaggaccaaanacctantaattccatcccttttaaattgganccctttnncntcncccnncnnggtntttncaantnaacttggtgncccnaccagacaccnantttaagtngttgctttcaaagnttaaaagccnttagggtnntccttaangtcncccntctatgnaaaatngggcatggncctttgacngcctctnctaaatngaggncanagacactcttatttctctccaatcacnataagagaaag

SEQ ID NO: 357 - DNA, 485 bp, Homo sapiens
  misc_feature 16, 21, 23, 27, 33, 42, 53, 58, 61, 68, 70, 80, 82, 86, 88,91, 96, 99, 118, 128, 130, 143, 149, 151, 154, 156, 157,160, 161, 163, 166, 168, 173, 174, 176, 177, 186, 195, 197,199, 201, 205, 224, 227, 236, 243, 244, 245, 270, 291: n = A,T,C or G
  misc_feature 321, 329, 339, 345, 347, 349, 354, 357, 359, 361, 369, 376,387, 397, 399, 407, 427, 450, 453, 464, 467, 468: n = A,T,C or G
attcgcccttaccggnggccngnccgncgggcnccttgggtntgaaggggtcnctctngcnctctgcnangggtgcagcngnaacngntgngaagnttncaggctctactataaatantgagcatggncnttaactgaccaanactggnangananngtnngntcntntgacnntnnctgggggcnccccaaaangnancnctgngcttgggacacacaaattnaanaccatcacngggaatnnngctgctgttattaccccattcaagntgacaactgatgcaacagcanactccagtctcgcaataatgaaaccagtgnttgatctnagcagcaaantttgtntnantcccnttnantntgaaccancaccacnggaatgcttanaccatggggncngtctaaanaaaatacttatttaaatcancatgtcaacaaaattaaccttcnacnttaaaacttanggnncaaccccatctccagac

SEQ ID NO: 358 - DNA, 485 bp, Homo sapiens
  misc_feature 12, 19, 41, 44, 47, 48, 50, 58, 59, 65, 68, 71, 72, 73, 87,94, 99, 111, 125, 126, 132, 142, 159, 161, 172, 174, 181,183, 197, 201, 206, 213, 215, 217, 237, 238, 254, 255, 256,259, 261, 273, 281, 288, 290, 294, 313, 315, 316, 321: n = A,T,C or G
  misc_feature 326, 330, 332, 338, 341, 343, 344, 358, 362, 364, 367, 371,374, 380, 387, 390, 391, 396, 399, 407, 416, 421, 423, 424,428, 430, 432, 434, 435, 436, 438, 447, 453, 455, 458, 463,464, 476: n = A,T,C or G
gcgaggtacttnttcttcnctttctttttttttgtttcaangtngcnncnatactttnnccactntgnaannngtaccagttaattnctttgantgttngctaaaaggacnttattgtgtagggnnaagttnttttgatatnagtataactgtgaaatngnaaatggaaatntntccttancnatacaacacaatgntgtnctgcntaaatcngncntgattaaaatctgtgctgtnnaagggcttacccactnnngcngntcactgtgtctntatgctcnattcagncntgtnaagtagatgtgggtttatnannggcangtttncccnancatgtnctntnnttgttacataatangccngntcntcantgnttgganatccctnttnnaattntcngttctagntcccaattncttcncnncatncnancnnncncattacttntttttngncgnctggnnatagaactctgncgtgccaaa

SEQ ID NO: 359 - DNA, 329 bp, Homo sapiens
  misc_feature 6, 31, 42, 46, 47, 50, 60, 70, 76, 113, 131, 133, 137, 140,144, 154, 160, 164, 171, 178, 182, 200, 205, 218, 229, 253,257, 271, 278, 284, 286, 287, 290, 306, 308, 309, 321: n = A,T,C or G
actttnttttttttttttttttttttttttnttgagctgganactnnctntgttgccagnctggagggcnatggcntgatcttggctcactgcaacctttgcctcccgggttnaaactgattttccgcctnancctnccnagtnactgggattntaggcncccnccaccanacccggntaanttttttatttttttttantaganacagggtttcacnttattggcctnctggcctttgaacatcctaacctnaggngaaccaccctcctnggcctgncaaaantnntanggttaaaaggcgggancnnttgtcttcctgnttgggata

SEQ ID NO: 360 - DNA, 271 bp, Homo sapiens
  misc_feature 29, 32, 38, 49, 54, 57, 61, 64, 69, 71, 105, 107, 112, 128,131, 140, 175, 178, 196, 211, 226, 230, 232, 243, 244, 252,265, 270, 271: n = A,T,C or G
acttttttttttttttttttttttttggngcntttttnttaaaagaacnaaatnttnaggnccnaaatncntcaatttttcaaatgaaaacccttcaaacgggtntntcctncattcaacgaaacttnttncaaattacngaataatttaactttttaaaataaaaaaatacaanttnttaaatgcctaaaatttntccccaaataaatgntttcttaattttaangaantntttttatgcannaccttggncgggaccaccctnagggnn

SEQ ID NO: 361 - DNA, 365 bp, Homo sapiens
  misc_feature 20, 23, 30, 50, 56, 75, 76, 78, 89, 95, 102, 123, 125, 127,131, 132, 138, 141, 149, 151, 159, 178, 184, 187, 205, 213,218, 219, 222, 228, 231, 249, 262, 263, 265, 283, 294, 299,307, 309, 311, 326, 327, 334, 335, 339, 343, 347, 360: n = A,T,C or G
tcatttctaccgaagacttnccnccgaacntgtctgccaatgagataaanttgctntaggtaagaactgatgaannantgacccaatangatggnccatttnttggcaaaagttctaaacaancnangaannactggngcnttttcatntngacctcanatttcttgcaaaacccatnaccttnganataaggccttttttcttnaaatcttnatccnngtncatacnttntcaatgatcttgcattcngcccttttgggcnncntaaatatgggaaattaanttttcttccantccanagatctcncntnattgttccattttannaaagttnncatnattngtcntaccggttaaaanaatca

SEQ ID NO: 362 - DNA, 200 bp, Homo sapiens
  misc_feature 6, 7, 36, 43, 62, 80, 83, 90, 121, 122, 132, 148, 149, 150,158, 159, 164, 165, 172, 180, 184: n = A,T,C or G
cccttnncgtaacggcgcccgggcaggtactattanccatggncaaccccaccgtgttcttngacattgccgtccacggngancccttgngccgcgtttcctttgacctgtttgcatgacnnggtcccaaanacagtataaaatttgnnngctctgannactgnntagaaangattttgntttntaagggttactggtct

SEQ ID NO: 363 - DNA, 173 bp, Homo sapiens
  misc_feature 31, 32, 41, 42, 44, 45, 50, 62, 67, 89, 102, 104, 106, 108,117, 119, 121, 123, 124, 126, 134, 137, 141, 145, 147, 150,152, 173: n = A,T,C or G
actcttggtttgtcaatgggacttaccagcnntccacccannannttttnatccccaacatnactgngaataatagtaggatcctatanggagccaaacccngnantnatacactgncntngnnangaccacangancaanaatntnccngnctatgctgagcggcccaagcn

SEQ ID NO: 364 - DNA, 438 bp, Homo sapiens
  misc_feature 2, 5, 16, 17, 20, 41, 106, 136, 154, 171, 172, 175, 179,180, 183, 184, 188, 200, 201, 206, 211, 217, 220, 248, 253,254, 277, 287, 300, 302, 303, 316, 325, 330, 347, 355, 361,362, 364, 365, 377, 379, 386, 392, 394, 395, 399, 410: n = A,T,C or G
  misc_feature 412, 413, 438: n = A,T,C or G
tncgnatgctacttgnncantgatggtaaaagggtagcttnctggttgatctccgattcaggttataatgaggaggtctgcggctaggagtcaataatttcgattnggcttatgcgggctaaatattagactggantcgtttgcatcctactgncgattcgtcgatccatnncangatnnccnntatnaagatacttgtnncccantcgtntcttgnggncctattggctctcttcctttgaaggacntttannggaccccctgtgaattagtaaanttggcttggntggagaactagcnannttacttacttatnaaccaaaancttcnccctgtagggtttttanttcaaaantgtttnnanncctaaacctacncnaataagnttgatnanntaanaccctcgcacncnnggagctgaatttattcaacatgttn

SEQ ID NO: 365 - DNA, 560 bp, Homo sapiens
  misc_feature 12, 15, 17, 25, 26, 29, 36, 51, 55, 60, 62, 63, 65, 68, 75,78, 104, 107, 110, 121, 124, 136, 149, 157, 159, 160, 176,177, 183, 198, 223, 237, 242, 253, 258, 267, 277, 280, 296,309, 315, 325, 334, 336, 339, 347, 354, 356, 359, 367: n = A,T,C or G
  misc_feature 372, 373, 379, 396, 413, 420, 423, 432, 440, 446, 450, 457,462, 465, 468, 469, 477, 492, 508, 514, 518, 521, 528, 533,534, 547: n = A,T,C or G
acgcgggacagnccngnccacagannganggcatantaaacttattcattnccangaacncnngnggnaagtatntgngggatctggctcaggcccacatacancanctnatcgaagctgncgntaaagatgatcnctttttaattagngcctatgnannattataaaaattgaanntcctgngtggaaaacaaaaanaatgttcaaatccatcaaatctttntagaactttacacncaggntattttggacntgacntattttgangataacaagntantagattgaagattttnctaaagacttttntttacngaaatgtaanataactgantnatntttctttnagtaccngnaanttttgttnaaggnnattttnatgcttccaatatttcnatttgtttgggataacnaattggnatntttttttanaaacaaanaccttncatnattttantagtnttnttnnccataaanaaagtggtctttaanaacctattgttaaaantcctanccgnaanactttanggtannttcaacacctgtngcgttatatggat

SEQ ID NO: 366 - DNA, 488 bp, Homo sapiens
  misc_feature 97, 105, 118, 123, 133, 135, 137, 145, 147, 152, 154, 158,161, 172, 175, 176, 183, 186, 189, 196, 203, 205, 207, 211,217, 219, 222, 227, 228, 231, 232, 237, 240, 244, 247, 248,261, 263, 264, 266, 270, 273, 275, 278, 285, 288, 295: n = A,T,C or G
  misc_feature 297, 299, 300, 302, 307, 323, 334, 341, 343, 347, 349, 375,380, 384, 398, 403, 411, 415, 438, 452, 462, 479: n = A,T,C or G
actttttttttttttttttttttttttgctggtgtttcaaatatttattttaggtagtaaaggcttttgtcgttctaaatcctgattacatgtcacntgatcaanaacaactaataanggaanttcaggaccntntnaaaaaaantncagcncnttanaantttccaaaaanggnnggcttcntanttntaacaantttttgntnanggtngggaananttnaaagnnttnnttttnacntttnaannaatttttttttananntnctgnacnanttntccaaanttngaactantnanntntgggnaaaaatcaaaattttngaaataaaatnaaaaccntnaccntntttggttgggcccttgggttaactgnactcnaagnaaatccttaatttnaaaanaactttcntaanaatacctttttccctattttggntgtacccaaaaccnatttccaaanacttttttatttcttcncctaaattt

SEQ ID NO: 367 - DNA, 315 bp, Homo sapiens
  misc_feature 22, 23, 83, 103, 106, 129, 132, 143, 146, 152, 155, 156,177, 187, 190, 198, 200, 202, 204, 212, 215, 225, 229, 234,236, 239, 240, 244, 250, 255, 256, 258, 259, 262, 268, 271,275, 280, 285, 289, 292, 293, 313: n = A,T,C or G
acatcacaacatgctttttaanntcattatgcattgtgctcacattcccttaaatgttgtttccaaaggtgctcactctctancccagctggattctccgggnaanaggcaaagacagttttggctaanaanaaacacatggnaangatggnggnnggggaaaggaaaaaagcattncttccatttnaangatcaagncntnanttaaaagngtnatatttcccntagnctttncntannggcntatatnttggnntnntangaatanaanatcnactcntcttngaanctnnttccttcatacatatttttnat

SEQ ID NO: 368 - DNA, 649 bp, Homo sapiens
  misc_feature 99, 117, 147, 149, 151, 159, 171, 180, 191, 193, 199, 201,207, 211, 213, 226, 238, 241, 244, 260, 263, 265, 273, 283,285, 287, 289, 292, 293, 304, 310, 313, 319, 320, 323, 336,341, 349, 374, 375, 389, 392, 404, 449, 452, 458, 460: n = A,T,C or G
  misc_feature 472, 484, 503, 513, 519, 521, 524, 529, 543, 566, 567, 593,601, 610, 622, 624, 626, 631, 635, 645: n = A,T,C or G
acgcggggcagttccgccatggcctccttggaagtcaagtcgtagtcctcgcaggtctcggcgggaactggaaatgcccaatccacgacagaacaaatnttcggggcttttacctanctcaacgaaccccaaaacctgccgctcatngngnggctgctngtgaaaagcttntccgaaagnggaatcaactntnaaattntnatcatnaatnanggaagcccaaatngaacaagggatnttnctnaacaattggaaaaaanctntnggtcaaanaaaattcttntnanancannaaaaaaaaagntggganttngaactnnatnttttcatggaatnaaacntgccacangaaactggttattattatggatgcnnatctctccaccatnaancaaaaggagggnaattttgatattggctctggaacccgctacaaaagaaatggaggngtntttggntnggatttgaaaanaaaaattattantgatggaattttgccatgntgcccagctnggcacntnctnggctnaagtgatccaaccntttttggccttctgggattacannccggggggcaattttttacttaaatnttggtganaaccaagancctttgattttnananggaantttnaaattttccnaaaa

SEQ ID NO: 369 - DNA, 650 bp, Homo sapiens
  misc_feature 142, 159, 160, 174, 195, 220, 246, 257, 262, 266, 278, 279,288, 296, 298, 303, 325, 326, 344, 351, 355, 356, 384, 387,400, 410, 411, 417, 421, 428, 436, 439, 443, 446, 448, 451,453, 454, 459, 462, 478, 480, 481, 491, 495, 503, 528: n = A,T,C or G
  misc_feature 537, 539, 542, 543, 555, 557, 578, 585, 587, 591, 613, 615,630, 637, 642, 643, 644, 646: n = A,T,C or G
acgcgggtgggaatgacaacttcggtcgtggaggaaacttcagtgggtcgtgggtggctttggtgggcagccgtgggtgggtgggtgggatatggtggccagtggggaatggctataatgggaatttgtaatgaatggaaancatttttgaagggtggnngaaactacaatgantttgggaattaacacaatcantctttaaatttttggacccatgaanggaagaaatttttgaagccaaaactnttgcccctatngcggngganggccatactttnncaaaccacnaaaccaangngggtnttgcggtcccacaacaccattnnctttggcaattgcaaaanatttttnattnngaaaccaaacttaacaagaaaaggaaanccnaaaaaattgacangggaacctcnnggtacnacanatttttnaacctaanccnaacncantngtngnnagggnctnacttcttaaaaaaaananntttttttaancaanaccttatnttttttggccaaaaaaacccgaagnactgttttngngannaaatttttaaanangttttttttaatttttttttngggaaantntaanccttccaaaaaagggttttaangnaaaattttttttttnccccccnttctnnngnttgc

SEQ ID NO: 370 - DNA, 491 bp, Homo sapiens
  misc_feature 50, 111, 126, 129, 133, 140, 148, 153, 158, 159, 165, 168,170, 171, 180, 187, 188, 190, 192, 194, 200, 202, 203, 204,205, 211, 218, 220, 223, 227, 234, 236, 238, 241, 245, 250,252, 257, 262, 271, 275, 277, 279, 285, 287, 291, 299: n = A,T,C or G
  misc_feature 301, 308, 320, 327, 330, 342, 350, 355, 357, 369, 370, 371,389, 391, 393, 403, 420, 424, 431, 441, 448, 449, 457, 458,462, 469, 471, 472, 481, 486: n = A,T,C or G
actgctgggcggcttcttcgcgctcgtggggttggccaaactctcggaangaaatctcggctccagtttccggaaccggatgaatgcccttgttcgtgcaatttgcttgangggttcccccttaanggntttngctaccnacccaatnccctnaactnncaaatnacntnngggctttcnggaactnntngntnggttgntnnnngtcatnggcccancnatncttnaaaaaancnanaanctgntcttnantctgntcatnaagggggcntttntnancttggnancttnttaaaaantnacttaancaccttttcccnacccttnctnccttgggtttcntctggttnttaangncccccacttttnnnccaaaataaaaaaggggntnanaccccttttnaaaaaaaaattttaatncctncccgggnggccctttanaaagggnnaatttcannacantggcggncnntttattatnggatnccaac

SEQ ID NO: 371 - DNA, 213 bp, Homo sapiens
  misc_feature 63, 73, 77, 82, 88, 91, 109, 111, 115, 120, 126, 128, 136,137, 138, 140, 143, 145, 146, 148, 149, 154, 155, 158, 162,164, 167, 169, 185, 186, 188, 192, 204, 208, 211: n = A,T,C or G
acaattcatctaacttccggaaagcactttcagtccaaatgcataaaccgtcccacatgcccnccagaaccancttnaaaangtcaanttngctaactttaaccaaagnanttcnagggntgtttntnaaggcctnnntnatncnntnntcctnnttntaantnatncncggccccttgccctgnntncggnaacggtttttantttngcntt

SEQ ID NO: 372 - DNA, 577 bp, Homo sapiens
  misc_feature 35, 56, 76, 92, 112, 116, 119, 123, 126, 136, 148, 152, 159,165, 169, 180, 181, 183, 197, 202, 205, 207, 214, 223, 226,227, 233, 235, 240, 245, 247, 249, 251, 264, 266, 268, 272,274, 292, 297, 298, 323, 325, 329, 335, 354, 358: n = A,T,C or G
  misc_feature 367, 369, 377, 389, 393, 394, 395, 403, 409, 419, 421, 430,438, 451, 453, 459, 463, 471, 479, 481, 482, 484, 485, 488,491, 494, 496, 502, 506, 509, 512, 514, 521, 537, 546, 570: n = A,T,C or G
acgtcgaccactacagatccctggaggaggaccangaacccattgtttcacaccanaaacctgggaaaggccacancaattcctttcaaganaaacttcggggccaaccaanaacnacncctnggngaaccccatnggaaaggggttnggantcaaaanaaggancacnaattttcccannanggcaaaccccccgnggatnccnanaatgatnaaaaggccnttnnggtgancnaaaanaaatncncnanggccttttcaaanangnaaancnaaggcccccttaaggganaatgnnagggaaaaaccgcccttttttggcntnaaanaaaganaagggccgaaagggccccncctnaaaaaaaantnttttcctnccttaaaggcgntttnnnaacccctntaaaanccctagcccngnagacccctnataagccnaatttggcaaaancnatccanggtnttgaaaancttttacnanngnnaanggnccngngacctnttgnccnaangntaaaaanaaaggttttacccctntaaactccnaaagggaaaggcaaactttttggntataaaa

SEQ ID NO: 373 - DNA, 537 bp, Homo sapiens
  misc_feature 66, 96, 112, 130, 133, 145, 148, 154, 162, 163, 166, 172,174, 176, 177, 183, 187, 189, 192, 198, 205, 211, 217, 219,223, 227, 233, 241, 242, 246, 247, 250, 251, 253, 259, 260,267, 271, 275, 277, 286, 287, 289, 291, 296, 301, 302: n = A,T,C or G
  misc_feature 328, 346, 352, 354, 356, 361, 373, 380, 384, 391, 394, 398,400, 422, 439, 440, 451, 458, 469, 475, 481, 486, 490, 494,497, 498, 499, 500, 507, 510, 511, 514, 517, 522: n = A,T,C or G
accttggccaggtctccaccaggcaccacagtgggaggctggtagttgatgccaaccttgaaccantggggcaccaatccacaaactggatgcttnccttggttttgatggnggcaatggcaacattganatntttgggaaccanctnaccacnggtttacnngcnacaagncntnnttttancatngnganggtcanatttcancatttngttggntngctnaaancaagcnttggtganntttnnttnnanaagctnntcgtggnaagntttntnaacaaaaannancngggcnttttnngcccaaaggaaatggattccggggtnaggtaccaagtttgtctngaattntngnaaggnaacatttaaggnttcattnaatnttaaggnacnatgntnggagaacaaatttggtaataanggggtaaaggttatgtnnggtggcccttntattagnggtttataaanaaatgntataangggcntttntgtnacnnnnaaggcanatnnagnggncaagnggggtgggtgggtaa

SEQ ID NO: 374 - DNA, 666 bp, Homo sapiens
  misc_feature 34, 80, 146, 148, 150, 151, 157, 169, 191, 193, 200, 204,209, 210, 231, 256, 257, 266, 268, 270, 273, 277, 282, 288,292, 296, 304, 312, 329, 333, 336, 338, 344, 353, 358, 360,373, 378, 385, 389, 394, 401, 406, 409, 412, 418, 419: n = A,T,C or G
  misc_feature 434, 454, 466, 485, 494, 502, 506, 514, 519, 533, 536, 543,544, 551, 563, 567, 568, 570, 573, 575, 578, 581, 584, 592,603, 608, 609, 610, 615, 616, 628, 631, 644, 647, 661, 663: n = A,T,C or G
ccgcggcgaggtactttttttttttttttttttntgggagtttgtaagcaaacatttatagccatgattccacagatgtnggtgagtaaaccaacagccattcctaaataaaatacaaaaattcccatcatgcatagttaacaggntngnnaaaaanccggccttttanggggctaaatgcttaaaaattntncaacaancatngaaanntgggcttttttttttttaacncaattgttgggttttacccccctanngataaaacntntncantttntaccngcaggnggantaancttggcancaaaaatngcacccccattcaaaancttnagnantacctntcccccctntaacnanaaaaaaaccattnttttngaattcnaaanatttnatttttnggctnagnttntagccnngttttttgggattcnaagggttttacccaaaaaanggaaaaataaancttttgggaaccttttccnttttttttngattaaanccangggaactntccantttccccctttaanatncaatttnntaaaaanaattccccccangtgnntntgncntanaanccncacttttncccccaacctntttannnccttnnatttcgaaattnccntaaggattaacanccnaaaatgggggcggntnctt

SEQ ID NO: 375 - DNA, 480 bp, Homo sapiens
  misc_feature 49, 101, 107, 108, 115, 134, 169, 171, 174, 180, 186, 209,232, 237, 239, 243, 245, 260, 273, 291, 294, 315, 316, 317,323, 332, 337, 344, 363, 368, 371, 374, 375, 377, 381, 385,388, 389, 397, 400, 407, 415, 416, 418, 425, 426, 428: n = A,T,C or G
  misc_feature 432, 434, 439, 445, 455, 477: n = A,T,C or G
actttggcctctctgggatagaagttattcagcaggcacacaacagaangcagttccagatttcaactgctcatcagatggcggggaagatgaaagacagntggtgnnaccacantttcgtttgatttccaccnttggtcccttggccgaacggtccacgggaacactntnatntttggntgactntaataaaactgcccacaatcttnagcctgcatgctgtttgatggtnaaaantnaaantnttttccaaaacccgnttggcactggaantcggtcaaggggaccccncgnattcccgggtaagattgcccnnnaaaatnaatagtttnagggnggcttgnccctggtttcttggtgatnccaanctnatnnanctcnttanttnntggagggnggntaaaaanactttggnntngaacctnncnattnanagggngggccntcttgaccanaaaaccaagtcagggggttttngga

SEQ ID NO: 376 - DNA, 329 bp, Homo sapiens
  misc_feature 51, 85, 86, 110, 114, 116, 135, 167, 173, 174, 175, 180,191, 192, 203, 204, 213, 216, 219, 221, 228, 238, 244, 253,254, 259, 265, 270, 271, 281, 301, 308, 311, 316, 320: n = A,T,C or G
cgcgcgaggtactgccccatgtgcaacattaagatccacgagacacagccnctgctcaacctcaaaactggaccgggtcattgcnnggaacatcgtgtataagctggggncctngncttggaaagacagtgaaanagaaaccgggtttcggggaatttttacccaantcccgnnngtttnggaaccgggtnnacccaaccccnnttggggaanganccnantacttgnccaaccttcnggcttnccctttcannaaagntttgancactnntaaggcccantacttttggcttatgatgancaagttnaanctgtncccntggaaccgg

SEQ ID NO: 377 - DNA, 264 bp, Homo sapiens
  misc_feature 4, 11, 25, 27, 28, 36, 44, 45, 48, 58, 70, 75, 89, 101, 110,120, 121, 126, 129, 136, 141, 143, 148, 157, 161, 165, 168,172, 175, 180, 185, 189, 190, 202, 204, 209, 210, 216, 217,218, 220, 224, 228, 234, 237, 241, 243, 244, 248: n = A,T,C or G
cgtncctaaantgagtatcaactgntnntgccatancactgtgnnaantgcaatcctntaaaaggcgaangtgtnactgaggagcttgncaaagtgaagcnttcatccancatatggaanntgtcngcnatattantcacnangttantggctgctncaancttnatnacantancttgnttaancctnngactgcttcctnangaaanncctgcnnngncatntctntaaaangtnctantnnacantcgactttatctcctg

SEQ ID NO: 378 - DNA, 291 bp, Homo sapiens
  misc_feature 5, 13, 14, 17, 18, 28, 29, 31, 32, 33, 49, 72, 96, 101, 106,109, 114, 129, 134, 139, 156, 178, 180, 181, 203, 209, 218,219, 225, 232, 233, 240, 248, 250, 253, 255, 259, 260, 265,268, 272, 276, 286: n = A,T,C or G
acagntggacctnntgnnattagaggcnntnnnggtcaccaaggccctnctggccccactggtctatttggncctcctggacctccaggtgtaatncggtnaactnctngactnaagcaatcatggacnttatnctggntgttaccaggggaatanccaactcttttactgtatgcananntgtatgaaaaaaaaaaattatncctttnatgactggnnaaaggnttaaaanntgtatcntctgaaangnaangnttanntaggnggntttnactnattcaaatantttaa

SEQ ID NO: 379 - DNA, 161 bp, Homo sapiens
  misc_feature 37, 43, 48, 49, 66, 82, 89, 93, 99, 104, 109, 113, 116, 118,120, 121, 123, 127, 128, 135, 161: n = A,T,C or G
catgcctcgagcggcccgccattgtcgattgattttngcattntttcnnaccttcttcagcttcanccctaacaatgtaccntattctncatntaaaanttccngggcntccnctncntnncntctnngctctcnggtccgtctctcctctcttttcgatn

SEQ ID NO: 380 - DNA, 425 bp, Homo sapiens
  misc_feature 46, 70, 81, 83, 107, 109, 130, 133, 146, 151, 159, 168, 176,190, 192, 200, 207, 211, 212, 219, 220, 228, 231, 234, 241,244, 247, 259, 265, 269, 283, 293, 296, 298, 303, 307, 309,311, 312, 314, 320, 325, 327, 332, 333, 341, 343: n = A,T,C or G
  misc_feature 344, 348, 354, 355, 357, 358, 375, 378, 388, 392, 398, 409,414, 419, 421, 423: n = A,T,C or G
gtactcttggtttgtcaatgggactttccagcaatccacccaaganctctttatccccaacatcactgtnaaataaatagngngatcctataccgtgccaagcccantnactccagacactgggcctcantangaccaccagtccnatacnatcacatntctattcantaagcccnccctaaaccacttncntcatcatncaaacancttnnaaccccnntgtgaganatngangatgctntanccnttaactggtaancttganattnaataacacaacccnacctgtgggnggntnaaatnaatnananntntcccanttaantnccaanntttctatntnnccanattgannanngggagcctttattatanatnaattgtactnaagntcggantattgaccctncgtanatttnantnta

SEQ ID NO: 381 - DNA, 462 bp, Homo sapiens
  misc_feature 77, 94, 102, 116, 117, 120, 127, 134, 142, 144, 146, 169,170, 177, 181, 197, 201, 206, 208, 220, 233, 234, 247, 264,274, 276, 283, 288, 290, 297, 306, 317, 320, 325, 327, 336,339, 359, 364, 372, 386, 394, 407, 427, 438, 447, 455: n = A,T,C or G
actccttggccgcctcactagcactctccgcctgctttttaaaggcttcattggagccagcagcgtggcctgctgcnaaatgagagtcaccagncgtttaancaggaaggacagcnncanggaaaanccaccantgtaaaantncntttgggcccggaaaaccttattnngaaattnctcnttgcccccggatttgntctngaagntnaactttttcggnaaaaattattatnntttccaattttcncccccggatttgattancaacctcccnanggtttancattnanaaccacnaaaaaaggngtttgccattnganacttnanaaacttcancancccgggacttgaaaattttntgccntttttttngggaaaaaatgaangggaattnccgaaaagccacncaacaaaaacctttcccatnaaagaaaggtncaacttcanatccaatncaaaaat

SEQ ID NO: 382 - DNA, 321 bp, Homo sapiens
  misc_feature 20, 21, 29, 31, 36, 47, 48, 56, 57, 59, 65, 77, 88, 95, 98,102, 109, 112, 114, 115, 118, 120, 122, 125, 127, 128, 144,149, 152, 156, 158, 177, 182, 184, 190, 200, 202, 204, 209,216, 221, 223, 228, 229, 233, 237, 238, 244, 245, 248: n = A,T,C or G
  misc_feature 254, 261, 268, 272, 275, 283, 288, 290, 294, 298, 304, 310,319: n = A,T,C or G
accgttgcactccagcctgnnctagatantnagatnctgtctcaaannaattaatnntnatttantaatcataaaantcttgatctangcctacnatnttanatgcatnttntnnatntntntanannaatattaaattaattnatctntgntacnanttctataattaattaaaanatttntntaattnaatctctatntntnttttnatatttncaatntnacctnnaaanctannaaattnnatntatatnaatttcnttaaatntaanatntaatattntatancnaaantaanaaattntaactnatataatantc

SEQ ID NO: 383 - DNA, 196 bp, Homo sapiens
  misc_feature 12, 34, 43, 72, 90, 92, 107, 111, 115, 118, 123, 127, 130,132, 133, 150, 165, 169, 178, 179, 187, 192: n = A,T,C or G
cgtactaccganatgcccgttcttacaaccggtntcaaatcgnacactgtcaccgaaaaaggtgttgaaatngagggaccattgtctacntnaaaccaactgggatntcgnccanatnaacantggnctntnnaatgaaatacagatgcntctttcagaactganagtngccctactnntaactatnaactnggct

SEQ ID NO: 384 - DNA, 261 bp, Homo sapiens
  misc_feature 50, 58, 59, 66, 74, 81, 90, 93, 99, 110, 123, 129, 142, 150,153, 154, 155, 164, 173, 179, 189, 195, 199, 206, 209, 211,212, 217, 218, 224, 225, 240, 243, 257, 259: n = A,T,C or G
acgcggggaatgtctgaaagtccatgacctgtctttaatagcggattatnaaattgcnnccaaagnaacaagantttttcnttgaacttnatnccatgnatcatctgatntcattcattgcanattggnaacattatatcanagttgtgnttnnntaattatanatatatttncttatnaaattttaangttatnttcntataatnaantnntaatnnttatcnntaattttttttcatntantatatctaatttcntntt

SEQ ID NO: 385 - DNA, 176 bp, Homo sapiens
  misc_feature 70, 76, 79, 86, 96, 98, 108, 111, 120, 129, 151, 152, 154,160, 161, 164, 172, 175: n = A,T,C or G
acgcgggggactggagacactgaagaaggcagaggcccttatagtcttggttgccaaacagatttgcaanatcaanganaacccantgagtttcananaaccgctaantangttataganattctagtnctatcatacatatttaagtatnnantaattnnttntaatatanacnt

SEQ ID NO: 386 - DNA, 370 bp, Homo sapiens
  misc_feature 28, 43, 44, 54, 58, 77, 80, 86, 95, 97, 101, 106, 111, 115,123, 124, 130, 153, 156, 167, 171, 175, 178, 195, 197, 212,226, 232, 240, 241, 250, 251, 258, 260, 281, 283, 284, 286,291, 293, 294, 304, 307, 314, 323, 325, 332, 335, 337: n = A,T,C or G
  misc_feature 342, 346, 356, 364, 368: n = A,T,C or G
acttttttttttttttttttttttttgnctctttattttcaanntttggcttantaanatttttcttattttataangcnattacnacaatttangnaacnaaacnatttnaacnaaaaaatnntaaatngttttttttaaaaaataacttgntgnttgcaaaaaantccntttnatnttattcccccccaaatntnattttattctttgcnctaaaccaaaatancttatngaaaattnnttttaaatnncttaacncnaaaaaccttccgcttttaatnanntnaaatncnntttaactttnatnggatgcntaaacaaancnaactttnatncnatttnaatnaacttcattnattggacnaatncc

SEQ ID NO: 387 - DNA, 159 bp, Homo sapiens
  misc_feature 6, 62, 64, 73, 74, 76, 77, 84, 100, 104, 110, 116, 120, 128,129, 133, 135, 141, 145, 146, 150: n = A,T,C or G
actgcngggacttctccttgctgctgccatgtgaagaaggatgtgtttgcttcttatttttncnataattgcnnanntaggctnctttcattttactaanacantgttgnatttanaaanacttatannccantntttaanacannagtnttttaagta

SEQ ID NO: 388 - DNA, 391 bp, Homo sapiens
  misc_feature 4, 11, 40, 60, 73, 79, 82, 86, 88, 89, 96, 104, 113, 114,122, 129, 130, 131, 136, 137, 143, 146, 148, 149, 151, 164,167, 181, 183, 185, 187, 196, 204, 210, 224, 226, 229, 230,238, 248, 251, 253, 254, 256, 262, 266, 270, 272, 279: n = A,T,C or G
  misc_feature 287, 294, 295, 296, 302, 305, 306, 307, 309, 317, 320, 329,331, 340, 342, 343, 350, 356, 357, 360, 361, 364, 367, 370,373, 375, 376, 378, 386: n = A,T,C or G
tccncgaaccngcccgccagtgttgatggatatcctgcanaattccagtctctactggcngccgttactactngatccnagngggntnncattttnttccactnatatatggnnatacttanctattcnnnctatnntatttngancnncntaattattttcanatnattattaaacccanantncnatgtatttnttagttanattttnacctttaatatttntntannttataaanaataattcantcnanntnaatttnaacntctntnatttatnttataatntaatgannntatttnatnnntnatattatnaantataatacnanctataaaancnnctaaatnataatnnaanncanatntancantnnanaatttctntgaat

SEQ ID NO: 389 - DNA, 641 bp, Homo sapiens
  misc_feature 34, 40, 58, 74, 85, 113, 117, 123, 124, 132, 136, 140, 142,145, 147, 148, 157, 173, 188, 193, 194, 209, 210, 213, 219,234, 235, 247, 251, 256, 262, 263, 265, 273, 277, 280, 284,299, 306, 307, 309, 310, 315, 321, 324, 325, 329, 338: n = A,T,C or G
  misc_feature 342, 343, 347, 351, 354, 361, 363, 373, 375, 393, 394, 399,406, 420, 422, 424, 432, 434, 438, 441, 443, 451, 452, 458,462, 472, 477, 482, 484, 487, 492, 494, 507, 512, 515, 516,517, 529, 530, 531, 532, 540, 541, 547, 549, 550, 561: n = A,T,C or G
  misc_feature 562, 568, 571, 578, 581, 591, 593, 595, 606, 620, 634, 636: n = A,T,C or G
actttgtggataagaaaatggaggaacacatctnatgganagtgggcatttgacattntggaacaggtaaccancatgtataatnaaatttataagtttctttttaatatctnaatngctctnncagatatntttnattnanttntnnttatttatnttttcttctttaattnttttaatataaaatntaatnnatttcttgtaattannttntatttnttttaattatattannaattattctatnaaanatttnattttnnantaatatantttnttnttanattaatttttattanaaatttnnannatttntattanatnngagnatttatttntttnnttanttantantttaaantnttctcttatntntaatttattattttatannaatanttctttnttttatatttttantntnataatttntnaatnttnantatttttnnaattantatnatattttatnaattntttantntantatantntaatatttaattnatatnaannnttacatttttannnntttaatanntaatananntattaatttanntttttnttntatttanatntatttttttntnantagtatttttnattaatttattttntaactgatattttntntattt

SEQ ID NO: 390 - DNA, 446 bp, Homo sapiens
  misc_feature 4, 8, 9, 11, 12, 22, 25, 28, 34, 37, 56, 58, 76, 78, 85,93, 96, 100, 127, 134, 145, 157, 158, 162, 167, 171, 176,177, 182, 189, 190, 191, 193, 197, 198, 204, 209, 217, 223,228, 230, 236, 244, 252, 265, 269, 272, 274, 275, 285, 286: n = A,T,C or G
  misc_feature 299, 304, 315, 316, 318, 320, 331, 351, 352, 365, 367, 383,386, 392, 408, 410, 444: n = A,T,C or G
accngggnncnnctatatcgcnagnctnttcctnccnaagaagcacactttgtgananccaatgggaaggagcctnanctgctgnaacctatnccntatnaattcatggcataataggtgttaaaanaaaaaantaaaggacctntgggctaaaaannaaanataantggnaagannccagnggaatcnnntntaanntttttnaaaancaaattgnctgctnaacantnttacanatttcatnagcactgnaggtttgtgttgnaccnctngnncttattggcnncattagttgtgtntttgnaaacataaacnntntngactcgataancatttacaaaaattcttggnnttgagccatatcngnaaaaagggatttcatntgnatgtanaagattatctttaagnanttctaatttttgccagtgaactgcaaaggctgtntg

SEQ ID NO: 391 - DNA, 556 bp, Homo sapiens
  misc_feature 4, 6, 17, 31, 48, 59, 62, 80, 81, 90, 113, 114, 128, 136,140, 145, 147, 157, 162, 163, 172, 174, 178, 193, 218, 223,244, 247, 264, 275, 276, 279, 281, 335, 346, 355, 357, 371,383, 386, 388, 389, 395, 397, 407, 411, 420, 445, 453: n = A,T,C or G
  misc_feature 470, 479, 482, 487, 490, 494, 500, 504, 512, 519, 531, 535,541: n = A,T,C or G
caantntaaagaccctnaggagttcatggancacatatatgttcccanaggacagtatntancacctgcggcgccggctnngtcacttgnggatggtgtgaaaaatgagaatnnttatatacagactnctgaacantgtnatgtntntttaaaggangatgnntccatttcncntggngaataagaacataantttctaggagaaactaaggttgatnaagtntacatgcgggaaaacaaattnatntgcttgtgcatcatggncacaaaaactnnagnanaggccacctgtgagagcacatgtccatgatggaggttcaacatctcaacatggnaatgacctttngtcagaatncnccattggaaaaatntgattttgctgntgntnnacatcntngtgctttttncctnagggaccanatgaaactccaaatgcttggatgtntgattcangaactggattgccttantggaaactngangaaanggntatncaccantctntacctganactatanagaaaacgttcntttnattgtnttcccagatgtgtca

SEQ ID NO: 392 - DNA, 276 bp, Homo sapiens
  misc_feature 15, 64, 76, 81, 84, 90, 105, 106, 125, 131, 134, 136, 150,153, 157, 160, 161, 163, 189, 195, 199, 214, 221, 229, 233,234, 239, 251, 258, 266: n = A,T,C or G
ttttccgaagccggnccgccccggggcaagggtacaccttggtttgggtgtttaataatggggngaatggggggtnctccnggnaacttntgctttattatttanncttatcaatacgccccaancattanatnantccataaactaccncanttanaanncntcccccctactcacactatcctcctnctcggntgcnagccattccacaccnctaccantccacaanctcnnccatnactccccccttnctacctncccatcanccccctctca

SEQ ID NO: 393 - DNA, 369 bp, Homo sapiens
  misc_feature 120, 126, 135, 137, 148, 149, 154, 157, 167, 182, 197, 198,199, 219, 225, 232, 234, 236, 239, 244, 247, 253, 254, 264,266, 274, 277, 296, 298, 301, 308, 311, 312, 313, 319, 324,326, 332, 336, 340, 342, 345, 346, 355: n = A,T,C or G
acgcggggagttccgtcgcagccgggatttgggtcgcaagttcttggttgtggattgctgggaatcgtactttgacaaatgccaaactttcggtgaaaaactcttgactgggtaaagaanccattnccccttgangnttgaaccccanntggancanccattcggangaattgttcaagggncaaaagattccaaannntaagggaaagggcattcccnttcctngaaccancnanaangcttnatncttttnnttgaaaaacnanctgggaanaantggccgccccccttgtttntnatntccaacntcnnnaaaaanaagtncncccttngcancttngntgnnctccgtctntaaaaagggtggaa

SEQ ID NO: 394 - DNA, 208 bp, Homo sapiens
  misc_feature 13, 26, 31, 34, 46, 49, 66, 67, 71, 85, 88, 90, 91, 94, 98,99, 106, 107, 111, 120, 123, 127, 128, 136, 137, 142, 143,145, 152, 174, 184, 203: n = A,T,C or G
cgtgcactcttgntttgtcaatgggnctttncancaatccaccctnganctctttatccccgcatnnctgngaataattctgganccnannctngccnngcccatnngtcncacactggnctnattnngaccaccnncacgnncnttgacantccttgagcctcccaaaccctncatctcttgnacatctccaaccccttggnggatg

SEQ ID NO: 395 - DNA, 473 bp, Homo sapiens
  misc_feature 126, 127, 131, 142, 154, 169, 193, 196, 199, 202, 205, 207,211, 213, 222, 250, 254, 264, 269, 271, 276, 286, 294, 296,297, 300, 304, 312, 314, 321, 324, 331, 337, 340, 347, 350,353, 357, 394, 396, 399, 401, 403, 407, 408, 409, 432: n = A,T,C or G
  misc_feature 433, 463: n = A,T,C or G
acgcgggttgaaaaagaaacaaaggaatactttgagagttggggagaaagtggagaaaaaaatgtgtttgaagctctttctgagctcataattttaacagctagccattgtttgcatggaaagganntcanaagtcaactcnatgaaaaggtcnacatgctgtttgcanatttgcgatggatgttcccccccnccnctnccnacncnctgngnccattgacnggtgcttctcttgctgatatactggccnagangattcatacncctgnanttatnaaaggctcancgagaacnannctntcanggctgctnanggaagcnaanaaggctnacccangcntctaaanaanacngcantggctgccgcttaaggcccctactagcgccctcctancnaananangggnnncctgggaaagttccatctcccgnntggtggaaaccgcttaacttgcctattctnttctatttat

SEQ ID NO: 396 - DNA, 139 bp, Homo sapiens
  misc_feature 3, 5, 15, 22, 40, 50, 54, 58, 67, 79, 89, 108, 110, 117, 129: n = A,T,C or G
atncnacccttcaanttcatanggtgggggaaaacccgcnggacttttanatantccnggcggtttnccctgggaaacntccttgtgcncttcttcttgttcaaaccntntcctttnaccggatacctntccccccttt

SEQ ID NO: 397 - DNA, 263 bp, Homo sapiens
  misc_feature 28, 53, 62, 64, 78, 80, 95, 130, 133, 158, 159, 168, 169,182, 185, 186, 192, 201, 207, 213, 216, 223, 225, 228, 229,237, 239, 245, 248, 256, 258: n = A,T,C or G
actttttttttttttttttttttttttntagcacttttttttaatctggtaanaacagcatnanaaaacaaacttcantntaaaggagaaccaanagcagggggattggcagccaactattaccaaggcnaancttgttacaaaaggaacctttgggnnatacaaacnntagggctataaantgnnacttantaaaagggntgtgtngggaanttnaattttntnatnncaaagttnantaaatntangttttatntnatgat

SEQ ID NO: 398 - DNA, 183 bp, Homo sapiens
  misc_feature 63, 64, 83, 98, 101, 112, 116, 120, 124, 125, 129, 130, 132,134, 135, 138, 143, 144, 166, 174: n = A,T,C or G
acggggtccctcaccagacattgaatctgccagttccttgatcttgaacttctcaggctccannactgtgagaaatatgtttntatgatatttgaaanccncccaatatatnatcngtgntatnntcanntnanntangactnngataactattgaatttttaaanaattaagntttcatatt

SEQ ID NO: 399 - DNA, 385 bp, Homo sapiens
  misc_feature 35, 49, 52, 54, 84, 90, 108, 116, 118, 123, 135, 144, 148,163, 184, 187, 191, 199, 202, 203, 225, 226, 230, 232, 236,238, 240, 242, 253, 260, 261, 262, 264, 279, 290, 297, 298,302, 307, 314, 315, 333, 339, 343, 346, 348, 351, 359: n = A,T,C or G
  misc_feature 361, 364, 382: n = A,T,C or G
acttttttttttttttttttttttttttttttttnggggacagtgcaanaananaggggtgacctgtgaattggtgctgggganctgctnaggcccaatgtgaggcancactaaananatgantaaatttagggngatctttancctntcctacccaggcaanaagggttggggagcgggggtnccncaanttggcttncanngtatattcaagccattgggctnnaaanangctntntntntttttgctcanatttacnnngnttgctctggggccanaaaacctcacnaaacccnntgtnatttnaaaggannaaggccccttaaaacttntgttanccancananagntccatatnancanaacctttaatccttgganaaa

SEQ ID NO: 400 - DNA, 172 bp, Homo sapiens
  misc_feature 11, 27, 28, 30, 31, 45, 54, 67, 79, 90, 97, 101, 105, 117,124, 127, 137, 140, 144, 145, 149, 151, 152, 171: n = A,T,C or G
acttcacacangatcccaacccccacnnannttcaatgtcgaccntctgatcantcagcttcattgnctgcaaacagcntctctcagganattcatnatanatantctttttgtaanccataanganagctattatnttncttnncatnannactatattattttattttna

SEQ ID NO: 401 - DNA, 201 bp, Homo sapiens
  misc_feature 31, 43, 49, 62, 72, 73, 78, 80, 93, 110, 111, 116, 123, 125,127, 131, 139, 145, 152, 154, 160, 164, 179, 183, 189: n = A,T,C or G
acgcggggagcacggttcgtttttcctttantcaggaaggacnttggtntttaggtttacanacttttcaanntaatnanttattttttatantgttatgatttaaattnnaattnaatatcncntnattntgtttaantttgtntgtttantntattanatantttttatgtttgttntatnatattnattataaatttt

SEQ ID NO: 402 - DNA, 158 bp, Homo sapiens
  misc_feature 23, 60, 76, 88, 94, 97, 101, 111, 116, 123, 128, 130, 133,134, 138, 145, 149, 151, 153: n = A,T,C or G
actgcattttttttttttttttnataaggcttataactatggctggatcttttgctctantcttctaagaagggcnatttttattttntataantcncttntaatgtcatntggantattaantttgnanatnnttangcattangtanantnttata

SEQ ID NO: 403 - DNA, 488 bp, Homo sapiens
  misc_feature 60, 65, 79, 81, 85, 88, 99, 100, 101, 111, 112, 113, 127,147, 150, 157, 160, 161, 168, 179, 188, 189, 193, 199, 203,205, 212, 222, 241, 242, 243, 248, 251, 255, 258, 259, 260,264, 266, 269, 272, 276, 278, 280, 284, 289, 290, 294: n = A,T,C or G
  misc_feature 299, 300, 302, 316, 329, 333, 345, 359, 361, 370, 372, 381,392, 404, 409, 413, 414, 418, 423, 426, 427, 428, 433, 439,443, 451, 454, 459, 462, 466, 467, 469, 474, 478, 480, 482,486: n = A,T,C or G
acggatgctacttgtccaatgatggtaaaagggtagcttactggttgtcctccgattcangttanaatgaggaggtctntntctnttntatatttattnnngactttatannnctattttttctttnttttttaatacaaatatttnttntacttanatnntttgaantaatttcttanataattgtnngctnttaatntatntntattatnaatctttatnattaatttatttctaaatnnntatanttnttantannnggtntncanttntatnantngtantatannattnaaatnnantaaattataaatantttatctattttngttnttttataatatnttttaatatatttnantttataatntnccaaatatnttattcattanttatattttttnttttntttnntaanttttnttnnntatanataatncttncatatttnaanatatnttntatnntntgatnttantntntatntt

SEQ ID NO: 404 - DNA, 397 bp, Homo sapiens
  misc_feature 16, 17, 27, 48, 50, 60, 88, 117, 144, 152, 193, 199, 205,207, 208, 215, 218, 226, 231, 243, 250, 252, 257, 261, 266,270, 275, 278, 281, 282, 290, 299, 312, 316, 325, 336, 337,340, 346, 349, 358, 361, 369, 371, 382, 389, 390: n = A,T,C or G
acttcaagattagganngttgggtttnacataaatgtattctctggtnanggtggctggnatataccttgacccaccatcttcagaangacccatgtcacgtcttgaccatttggancaaagccatgttcacactgacctaatncaagagtntggaagcattgggctggttatacattctatttcttaaattnatcctncccctntnnaggcatnganaacctttnatcanatcatttaaaantggcctntnatttnttcntcaanatanttatnggnctnntctttatnataactctngtattgaaaattncttnccctttccntaatgggggannctnattttngcnattccttcnttncctttatntncaaaattaccnaaatttnncactatt

SEQ ID NO: 405 - DNA, 461 bp, Homo sapiens
  misc_feature 3, 16, 63, 68, 75, 90, 116, 117, 124, 133, 145, 159, 176,187, 211, 221, 226, 228, 231, 250, 254, 259, 271, 273, 274,286, 294, 299, 304, 306, 313, 315, 316, 325, 334, 337, 345,353, 359, 372, 377, 382, 383, 386, 396, 404, 410, 414: n = A,T,C or G
  misc_feature 416, 421, 422, 425, 426, 428, 432, 439, 441, 443, 444, 451,452, 453: n = A,T,C or G
acncggggggtgaagngtacaagctcctcctgttcccaccctgaattaacccctcaaacacanaaccncctccgntgcttgtttacaagnggtgtcaaggcatcaataacctgcannacttgtngaaaactantaaaagcaaatncaatgtcatgctgnaatcccactttgaaaanattatgataanatctacttgactctgcttcaacangctgctcgcnccatntntgnaccacaacataaccaactncatnaacanccaaaaacaacntnntaataaactatnataacatnaaccnttccnanttcattntnngatcattanaaagccttnctntttacctnattcatcntacatnatttattgcctanaattnttttnnttntattgggatntccaccancccagnaaantnctttnnccnntnaaantcaaaantnanntctattnnnttccaaaa

SEQ ID NO: 406 - DNA, 527 bp, Homo sapiens
  misc_feature 3, 22, 25, 30, 31, 33, 38, 40, 41, 52, 60, 61, 62, 66, 68,71, 76, 78, 79, 84, 93, 113, 118, 126, 155, 161, 177, 222,228, 241, 249, 251, 262, 264, 266, 278, 282, 284, 297, 302,303, 306, 313, 316, 317, 319, 321, 334, 352, 355, 361: n = A,T,C or G
  misc_feature 378, 384, 394, 401, 404, 412, 413, 422, 425, 427, 443, 444,451, 453, 457, 459, 461, 464, 467, 468, 472, 474, 479, 485,490, 491, 498, 501, 504, 506, 514, 516, 525: n = A,T,C or G
acncgggtgatcctaatgtggntantactnntntgganannactccctatanggctaacnnnctcnancangacanannataangaacaaaanatattcctcctatgttacangcttngaagggcntacaggatctacgaaccttggaagaaaancatggngctcaggaattcatcntctaacatttcacttccccacccaccccttaatgctcccactttngcaatnatctctctttggntttaaaananaaagggggaantngngcctttgttttncagntntgcaacaacacanctttnngcntctcaancannantnggagaactctaanacaaaaataatttttttnatnaaaatnacgggtttgttatcacntacttnctcatggccnttacaanggnctccttannggttttttntancntacaacatttcccccnnaattcantnaaanangnttnttnnccantngaaanaaaaanctttnncttattntanaantnttaaaatncnatatggctnat

SEQ ID NO: 407 - DNA, 219 bp, Homo sapiens
  misc_feature 3, 29, 46, 57, 71, 88, 89, 90, 91, 98, 102, 103, 112, 126,129, 134, 139, 143, 145, 157, 165, 166, 175, 181, 186, 190,191, 197, 200, 207, 213: n = A,T,C or G
gcntttgaaagatttggggccccttctangattgcatttcttcgangccggcccgcncagtggtggatggnatatcttgcataaattnnnnttcttancgtnntcttctgcnttatacttctcttnganttacnttttnaagngnttttcttattanctaaattnntctaaatcnattatnataanctgnntctcanttncctcaanacattnttctaa

SEQ ID NO: 408 - DNA, 319 bp, Homo sapiens
  misc_feature 23, 72, 74, 75, 96, 101, 104, 109, 116, 128, 129, 144, 146,155, 158, 159, 161, 171, 173, 174, 180, 192, 193, 200, 216,222, 232, 248, 250, 251, 255, 256, 259, 263, 265, 276, 277,309: n = A,T,C or G
cgtacccatctcagatgaatggntacggatcatcacctaccttttcccagacggacagagaacatggttcananncaagtgctaggcccttatgancaaangangaatnatgctcnggacagtgtaannatatgtttattatcncnaaacgggangannanttaactaccntnnttctanatctgaaaatgnnaaaaaantctcgatgtttaaaanacccangggcttgttnttttttttcaaaaaantnnattnnacnaatntnttattgggggnnttcaaacttttcctttttggcccaaaaaatcncccacctttt

SEQ ID NO: 409 - DNA, 213 bp, Homo sapiens
  misc_feature 7, 8, 13, 18, 22, 33, 39, 77, 79, 92, 97, 104, 112, 115,130, 132, 148, 165, 169, 171, 173, 176, 178, 182, 187, 203,205, 207: n = A,T,C or G
acccggnngggtngctcntatnaaaacctcatnacaagncatttatttctgtaaactgccatacaacttacatgttnantattaattgcacnaagtntatcaanacttattnaanaaacacaaaattaantnctattttaacggttcntcttttcattatttaantacntntnctntnttancttgnacatttttgttaatantnanttttat

SEQ ID NO: 410 - DNA, 586 bp, Homo sapiens
  misc_feature 2, 3, 6, 20, 22, 28, 33, 34, 36, 40, 50, 76, 80, 94, 97,115, 116, 125, 147, 169, 172, 174, 179, 180, 181, 182, 183,193, 194, 197, 198, 200, 204, 207, 209, 210, 219, 224, 227,252, 274, 280, 283, 295, 297, 302, 303, 307, 308, 309: n = A,T,C or G
  misc_feature 313, 314, 316, 317, 321, 328, 349, 359, 368, 371, 372, 381,390, 395, 400, 406, 422, 426, 429, 451, 454, 455, 460, 461,462, 470, 473, 475, 481, 502, 508, 514, 516, 519, 530, 533,537, 538, 540, 541, 548, 551, 563, 566, 567, 568, 570: n = A,T,C or G
  misc_feature 576, 585: n = A,T,C or G
gnncgnccgggcacgaaccncngggganagatnnanaatnattgcccagnctagattaccaggtggtaacccctanaccntctgcataatgaantanctataaataactcttcanngggagccanagctaacgaccccctaaaccanacgagctacctaagaacactcngantngcacnnnnnggtatgtaanngannantggnaananntatatgtanaggcnacnaacctaccgctgctggtgatatacngttgtggatacatagaatgttntcttanctnaaaagtcggccncngaacnntgtnnnttcnntnntggngttgacntgttattccaaatgaggaacnggtttttggncactatagnaannccatgttanaccgtgtgnttaangaatngtgctncaaaatttttctcccntttncgngaccccccttaaggctaatttncanncactnnnggggcggnccnanctggtnaccttcattgggacccccccntggganaattancngcnttccgtgttcnctnttgnnannttttctngtnaaaatttccccnccnnngncccgangtttacctnc

SEQ ID NO: 411 - DNA, 628 bp, Homo sapiens
  misc_feature 53, 69, 78, 80, 95, 96, 107, 108, 111, 122, 142, 153, 164,167, 182, 200, 227, 235, 238, 239, 242, 251, 258, 263, 278,279, 286, 296, 310, 313, 318, 321, 328, 333, 334, 347, 357,362, 372, 387, 392, 395, 403, 406, 409, 419, 421, 431: n = A,T,C or G
  misc_feature 432, 456, 461, 463, 465, 480, 483, 486, 487, 490, 492, 493,502, 509, 535, 547, 550, 556, 562, 568, 570, 572, 576, 583,587, 588, 594, 604, 617, 618: n = A,T,C or G
acctaacaaacccacaggtcctaaactaccaaacctgcattaaaaatttcggntggggcgacctcggancagaacccnanctccgagcagtactnngtttttttacnnttnctttttttttnaaggtagtgggcgtggagcntgaacgctttnttaattggtgnccnttgcaatgcctactntgggtgttttagagcttnctttatgtattcatggttcattggatnttttcttntgnnttntcagcttangttactngtttngaatatattttcacnngcatatntggttatttncttgtcacatatgntgncaacnttnaataaanccttnntatcatttattgncatttatganaaaangtgtcttgtntgggtctttttattnttccntgntttattgntgnctnaccttgttgntntcattttttnngattttttttttatttcagccaanacttntncnctatacccttttttnttngtnnccntnnttccacgtnatttaanatttttttaaagggttatgtcttctncttggggaattnttntataancttttntctttntntngggntcctaanctannttgtgngtcccccaanctctttgggaggnntttcgtggcg

SEQ ID NO: 412 - DNA, 626 bp, Homo sapiens
  misc_feature 1, 33, 90, 102, 115, 118, 126, 143, 144, 146, 160, 164, 166,171, 177, 178, 184, 189, 191, 192, 197, 198, 199, 203, 205,212, 227, 229, 236, 238, 245, 257, 262, 271, 277, 281, 288,308, 312, 313, 315, 316, 325, 326, 327, 331, 337: n = A,T,C or G
  misc_feature 359, 370, 374, 394, 396, 399, 407, 414, 420, 448, 451, 464,465, 475, 480, 485, 486, 502, 506, 512, 514, 525, 531, 540,543, 545, 550, 552, 558, 567, 568, 569, 579, 588, 593, 594,595, 601, 603, 612: n = A,T,C or G
ntgtacttttttttttttttttttttttttttngagaggaaaacccggtaatgatgtcggggttgagggataggaggagaatgggggatnggtgtatgaacntgagggtgttttnttntgttaatnaggtctttattttgtcnntntttgtgatttattnattntnttttntttttnntttatnatttntnnttctnnntctntnattcctntttttattttttatntnttttatntntgttttnatttgtatcttntatcntatttcttnatactnttcnttctttntgttatttttttatcttttntctnntnntgtcttttnnntctntttttnttctttatatttttttattttnttcttttattnttcntctttttctttcttttctcntnttntatttttnttttatnactatnttcttttttctttttttttttttatttnatnttctttctttatnntttttttttnatatnctaanntattttgttttctatntttnatatcntntattttttttnttattntattttttnatntntcttntnttcttngtatttttnnnttttttattnattattttnatctnnnattatntngttttttanttcttcttcttttc

SEQ ID NO: 413 - DNA, 613 bp, Homo sapiens
  misc_feature 41, 83, 103, 111, 112, 126, 144, 147, 153, 156, 158, 160,162, 164, 165, 166, 174, 185, 191, 208, 212, 223, 224, 229,231, 245, 247, 249, 263, 267, 275, 281, 284, 285, 287, 303,310, 313, 314, 315, 322, 332, 335, 339, 348, 351, 367: n = A,T,C or G
  misc_feature 368, 378, 382, 384, 385, 391, 399, 404, 416, 417, 418, 421,422, 436, 438, 441, 442, 444, 449, 452, 453, 458, 462, 464,468, 469, 472, 473, 474, 476, 488, 491, 499, 503, 511, 514,518, 520, 525, 535, 546, 547, 550, 552, 559, 569, 570: n = A,T,C or G
  misc_feature 571, 572, 573, 574, 577, 581, 583, 588, 589, 590, 596, 599,606, 607, 610, 611, 612, 613: n = A,T,C or G
ggtacttttttttttttttttttttttttccctccccacanaacccatctcaaatcattctgttaaccaccattccaacaggncgaggagagcttaaacaccntattcctnngccttgattctctnctatttttaaaaggttcncancaaaantanananancnnntactttgnggactaactgntaaatntacaaggggatttacanggtnccgtcggcccnnttaangnagaactaagaatcntntnttggacaaccaagnatcnccaactcnggaggnttnncncccctacctataaaanttccccnatnnngttacantaaacccggngtncccntttacctgntcntaagaaaacccctctnntttccggggncctnanntttggntctccttncaaangtaatttccaannntanncattttcccaaatngnaanngngggtnaannccctncctnantaannccnnngnataaaatattcnaanatttcccntagngggccccnggncccnanccacncttaagggcnaaaatcccaanncantnggggggnccttattttnnnnnnccnaacncntgacnnnaccttngtntaaattnntgnnnn

SEQ ID NO: 414 - DNA, 710 bp, Homo sapiens
  misc_feature 3, 13, 15, 17, 23, 29, 31, 38, 47, 51, 60, 66, 77, 105, 121,127, 137, 140, 150, 195, 196, 203, 204, 211, 224, 225, 226,243, 246, 261, 262, 264, 265, 269, 270, 277, 281, 312, 318,322, 325, 344, 347, 381, 382, 394, 398, 408, 421: n = A,T,C or G
  misc_feature 423, 429, 434, 466, 468, 481, 486, 488, 495, 497, 509, 513,533, 537, 547, 552, 553, 554, 567, 576, 578, 579, 589, 592,595, 596, 599, 601, 604, 606, 607, 617, 618, 626, 627, 643,653, 659, 670, 671, 679, 684, 685, 694, 696, 701, 703: n = A,T,C or G
  misc_feature 706, 709: n = A,T,C or G
tcnagcggccgcncngncgggcnctttananattggcnctcattggntgancgcgagacncttagngccatgaaatnattacacagtaggaacaggttctttatngagactggactgcatngctctnagatgatgtntgnggggtaatcncagactctaacacttactgtattactttatatgcgttagttaacnntctaagnnctaaaanacgtataatgttnnntaggacgctcttccatntantcttggaatacccanntnntggnntactatngatnctaaggggtcaggcttatggcatgccttatngctagngctnaangagcgtaaaatggcatctnttnaaaatctctatgcataatctatgctatccaatgnnagcacaatttcnttcnaagaaagccnttcaacatgaagngnactgcntggangggaaagaacattggtacttttactttaaganancgttaatttttcncaaangnacatggnanaaattgattttnttgnaacataatattgcgctttcnaagntttatcaagnggcannnaaattgtttttangtcctcggncnnggcaccctanggngannccngnccntnnggggcgtacnngggaccannttggtccaatttgggnaaaatggccnggtggncccggggaaannttcggtcngttcnnaatcttcgncnggacntnagntang

SEQ ID NO: 415 - DNA, 677 bp, Homo sapiens
  misc_feature 46, 73, 76, 85, 92, 100, 125, 127, 128, 133, 136, 140, 145,149, 159, 164, 167, 194, 196, 202, 204, 215, 226, 231, 238,253, 257, 261, 265, 282, 289, 291, 294, 300, 302, 307, 322,332, 342, 347, 349, 363, 373, 380, 383, 385, 386, 391: n = A,T,C or G
  misc_feature 396, 404, 408, 411, 413, 420, 425, 429, 438, 442, 445, 449,453, 466, 468, 470, 479, 487, 494, 508, 510, 511, 513, 514,516, 522, 530, 532, 533, 538, 541, 542, 554, 558, 568, 570,571, 572, 574, 577, 578, 583, 587, 588, 589, 590, 591: n = A,T,C or G
  misc_feature 593, 594, 595, 601, 607, 615, 619, 620, 621, 622, 626, 627,628, 636, 637, 638, 644, 648, 650, 652, 653, 655, 658, 661,663, 667: n = A,T,C or G
ggtacttttttttttttttttttttttttttttttttttttttttntttttttttttttttcttctttcccgngtncccgggttntcattgnaatatagngacctgagtccaaagcaaacccacntnntttanaanaggngggcntganttaaaatgtntcctntgngaaaaaatacccaggcctttatggggntncaaaantntcctaactccnggggcataatntgganaaatatntttagtttccatgcntggncccnaaantaaaggaagtgaacccnagggctnanaanctgttntnatttnaaaacaattgactgnccattttttntaggaaaacngggantncttttttggccccnaaaaaaggtnattgaanganannttccngggcnggcttttnaaanggngnatttcancacantggngggcgttantttngantccnatcnttgtccaatcttngngnaaaaatggnaaaaattntttcttngggaaaatgttttncnntnnanttcccntaaatttnanncgaanttnnaatgtaaaccgngggnccaatatgtnannnanttnntttantggnnnnntnnnatgtcncttttnaatgaaancttnnnncccnnntttaaaannnccactnccgnananngnttntantnggcnttcctccctc

SEQ ID NO: 416 - DNA, 639 bp, Homo sapiens
  misc_feature 25, 112, 140, 190, 216, 223, 243, 247, 253, 274, 307, 308,311, 329, 338, 354, 360, 364, 366, 371, 376, 383, 394, 402,403, 408, 424, 425, 426, 427, 430, 437, 439, 440, 445, 453,463, 466, 468, 470, 479, 484, 493, 494, 503, 513, 514: n = A,T,C or G
  misc_feature 520, 522, 524, 528, 530, 531, 532, 534, 535, 542, 558, 563,566, 567, 570, 572, 573, 575, 576, 580, 583, 584, 587, 593,595, 600, 602, 604, 606, 607, 619, 627, 630, 631, 634, 637: n = A,T,C or G
tcgcgggttctcgtgagatctggtngtttaaacgtttttggcacctccccacactgcttggatctgctcctgtcatgtaaggcacctgctcccagtttgccttctgccatgnggaaaagttacctgaggcctcttcagangcagaagccgtcatgctccctgtacagcctgcttaactatgagccaattnagcctctttcccgtataaattacccngtctcangtatttctttattcaatgcntgancagacnactactaagactttattgaanaaattatagttgcaaagacaatattgcttgtgnncanggatacaaaattgagccntttgagaanaaaccgaaacttcagncattanactngngttantttgnggaatcnactgatgtttnttataaanncctantggtggaagtcatacnnnntcnaagtagntnngtttnggggtganatttaactgnatncncnttggggtanaaaanggtttttannggacaaaangcattatatnnttaggngntngganannnanngcctacntaaaatccggaaagcncttgnccnnctntnntnnttanggnnaantttggngnatcgngngngnntttttttgtgtnccgaattntannaanttntg

SEQ ID NO: 417 - DNA, 138 bp, Homo sapiens
  misc_feature 6, 31, 60, 70, 75, 77, 86, 99, 100, 105, 113, 114, 120, 122,135, 136: n = A,T,C or G
ttgaancttccttttgggcctttcttttccnaccttgccgtttaccggatacctgccgcnttttcctttnggaangnggggctttntataactaacctnnagggntttaattnngggggngncttcctccaaacnngg

SEQ ID NO: 418 - DNA, 696 bp, Homo sapiens
  misc_feature 9, 20, 21, 29, 44, 70, 72, 81, 93, 95, 99, 101, 117, 126,128, 131, 133, 139, 144, 146, 147, 148, 150, 153, 155, 169,171, 174, 179, 185, 186, 194, 203, 205, 210, 225, 227, 229,236, 237, 244, 251, 252, 261, 271, 274, 283, 293, 299: n = A,T,C or G
  misc_feature 301, 303, 321, 331, 345, 360, 370, 371, 372, 390, 405, 406,409, 413, 416, 422, 423, 428, 430, 437, 449, 461, 476, 478,480, 481, 483, 485, 487, 501, 507, 517, 518, 527, 528, 543,550, 553, 558, 563, 577, 582, 589, 611, 619, 620, 625: n = A,T,C or G
  misc_feature 628, 644, 645, 647, 650, 653, 657, 665, 669, 671, 672, 675,678, 682, 683, 684, 686, 695: n = A,T,C or G
acaactaanattttattagnnatcgctcngcttacacactccangcaggaagttatttaaatcacctcananaaaacctgngtgacctaaccnantacntnatatgcagatcatgantacttccanantanantcaccncaagntnnnanggncntaggccctacgtgnanganatgtngcttanntgtctcantgtaggganantaaanagcgtgtctagctcncntntctactnngacaacncttactnncatgatgantcgtacatantantccgtgcgncacaaacatngctgangnangtggctttacatttcctntcacacgatntctgcgacccgccngggattaatactccngtatgcttannnctaaagctccacagctanattaacaaaattgcnnggnagancantacaanncttcngnttacaantttaaggacctnggcggggccttntattcctctacaggnancnngncntntattaaataaaccnccgatncaccttaccnnctttgtttnncctttttccggcttntttgtcnaancctgntgaangctccaagtttacnctttnctttccngggcgggcggtgaaagggcgantttaaacnnttggnggnggttttttgggtcccnncntgntcnaccntggagaanaaantnnaantgnttcnnngngaatgtttnc

SEQ ID NO: 419 - DNA, 718 bp, Homo sapiens
  misc_feature 58, 59, 65, 88, 101, 118, 135, 138, 140, 141, 142, 144, 150,154, 164, 167, 168, 178, 188, 190, 210, 211, 219, 221, 229,230, 233, 241, 242, 244, 247, 252, 263, 268, 269, 270, 275,284, 285, 286, 298, 299, 302, 305, 313, 317, 335: n = A,T,C or G
  misc_feature 348, 362, 363, 368, 369, 376, 385, 389, 394, 403, 409, 434,450, 465, 474, 488, 501, 509, 511, 528, 531, 539, 551, 552,553, 558, 564, 586, 588, 589, 590, 596, 597, 601, 606, 607,609, 610, 612, 614, 634, 638, 649, 656, 658, 665, 675: n = A,T,C or G
  misc_feature 676, 677, 695, 699, 704, 711, 715: n = A,T,C or G
gcgtggacgcggccgaggtactagaacgggactcatccagaagtactatgccctcctnngttaangctcaatcatttaagagtaaacncaaggagaagccnttctgtattcatacccntctatgtggattaaaangancnnnantgagantggnctatgatctnccnnggctgtgctnctcttctacnantcctgctgatccggaactanntactatgncnataaaagnntgngagaaagnncncgnctagncaatctataangcggnnnaacanctgcatacnnnaatgctggcacnnatnaantggcactnagtnggtgacctatgcttattntatgcatgattgngtagatttggattnngacgnnaatcaangaagaattntagnatctnccgtatctnatattnagaaagaaaaaatggtgcttcaacntaacaattaatgagtncttcggcccgcgacnaccctaatnggcgatttccaggncactggccggccngtgcctantngattcccaaccttgggnccnaccttggnggaatcatggcnnnagccngtttcnctgggtgaaattggtattcggncnnntttccnncaanaatannanncngntaccattagggtaaacctgngggnccaaagaaggncttaacncnattattnggttggttcnnncccctttaattgggaacntttngcccntttttantaanccc

SEQ ID NO: 420 - DNA, 669 bp, Homo sapiens
  misc_feature 37, 40, 41, 46, 47, 49, 58, 68, 69, 71, 78, 81, 84, 85, 86,103, 106, 108, 110, 113, 115, 123, 125, 126, 133, 144, 146,151, 156, 166, 171, 173, 178, 181, 190, 196, 203, 212, 213,223, 227, 229, 231, 237, 240, 242, 249, 251, 255, 260: n = A,T,C or G
  misc_feature 268, 270, 280, 285, 287, 289, 293, 295, 298, 300, 314, 318,326, 339, 340, 341, 343, 358, 359, 365, 367, 370, 384, 385,399, 401, 424, 425, 429, 438, 468, 479, 485, 492, 494, 506,511, 512, 517, 524, 530, 551, 565, 567, 569, 572, 578: n = A,T,C or G
  misc_feature 586, 588, 592, 594, 603, 611, 634, 635, 645, 647, 648, 653,656, 657, 660, 665, 666: n = A,T,C or G
acttttttttttttttttttttttaaaggaagggggngtnnacctnnanccctttttnaatggggggnngntttaagnccnacnnngggggtaaaatttttanctntntntananggtttttncnnagggccnaaaaacctgtncnttttnggacnaacagtaaantttananggggnttnaaagggttntggggncaaattnaaagttaanntaaaattttntttngnanaaccanttntnaccagcntngganggttngccccctntncctataaatnttccnantntttngntananaaacgggggggctntttnaactgttntaaggaacctcgnnngntttcgggggtttaanntttggntntcnttgcaaagtttttnntagttaattctttntncaaaagggataggggtaaccctnnctanattaggctnggttaaaattttaatttttccttgggggancctgggccggnaccacnttaaggncnaattccaccccnttggnnggccnttttagngaaccnaacctcgggaccaaatttggngaaaaaaaggcaanantnttncttggngaaattgntncccntnaaaattccnaaaaaaanaaccggaacttaaatgtaaaccnnggggcccatngnnggccnccnnttnttggnngcc

SEQ ID NO: 421 - DNA, 644 bp, Homo sapiens
  misc_feature 29, 88, 95, 104, 105, 111, 132, 133, 137, 139, 141, 149,159, 163, 169, 171, 172, 190, 195, 200, 202, 206, 207, 215,218, 227, 231, 233, 234, 235, 240, 244, 253, 261, 269, 270,276, 284, 289, 295, 296, 305, 317, 321, 325, 335, 336: n = A,T,C or G
  misc_feature 337, 350, 355, 356, 363, 372, 386, 423, 424, 425, 433, 448,451, 454, 469, 483, 508, 515, 522, 525, 565, 568, 584, 587,589, 609, 641: n = A,T,C or G
acttttttttttttttttttttttttttnggttttttttttttttttttttttttttttttttttttttttttttttttttttttttnggggggntttttaaannaatttnttagggggggaaaaaaagggnnttantntnttgtccangctggccttnaacncctggncnnaaacaatcctcctgggtnggccncccanangggnngggttaanaanaaaaatttntttntnnnttttntggnaattaaaantcaaaaancaaggggnnggggantttgtttnttttnaaaccnntttttttgnttgcaaaaaacngccntctnactggggccnnncctggctttggcngtgcnnacattgntgggatttnttatgccaaagganccattttggattaaaaaacacctcctttgaaattaannncccttttnaagggcttattttcnaanagnccatttaaaaaaatngggggttggacccnccaaagaaattgggggaacacagtnaccccanccaaggnccnttttagggtttggttaaaaacttggccaaacctcccctanggnaaaaattttttttagnaantnaaattttttaaaggaaaccnccccatttgaaaaaaaaaaaaattttccttgngaa

SEQ ID NO: 422 - DNA, 629 bp, Homo sapiens
  misc_feature 4, 10, 15, 16, 45, 56, 57, 71, 76, 94, 97, 98, 113, 121,125, 128, 156, 158, 163, 165, 168, 171, 172, 175, 188, 196,197, 198, 203, 214, 217, 226, 233, 237, 251, 261, 263, 266,267, 269, 273, 284, 298, 311, 318, 354, 363, 370, 383: n = A,T,C or G
  misc_feature 396, 409, 412, 423, 426, 439, 440, 442, 447, 448, 451, 453,457, 467, 483, 489, 490, 496, 498, 499, 500, 501, 513, 528,530, 531, 533, 546, 549, 561, 563, 571, 580, 586, 598, 600,612, 617, 623: n = A,T,C or G
acantatgtntaatnnttaaaatgttttattatttggaaaataangcgtgtaatannatgccagggactgncaaangacttgatacaggatggntanncttgtcagctaaggncacattgngccnttntgaccttatcttcctggactattgaaancnagctnantgnatnnagngatattactatancgattgannnggcantagttaaagtnatnagcatgatnagagttnctgncaatcatgtattanaacctgattntnagnntnacanaaatgtcaganttgcagctattgcnggaatccaaagtnatggccngctagctaggttaaagattggtttaaatctgggatnttgcttttncctgttngacattgcttgangacattatctganagacaagtttgtngcncagttgcctgntanaaaaaacctttgnnanacttnnttntncaanagccattggnaaaaattccgaggagnttgganngaaaancnnnngctttaaaactngttgccattttaaanannanttaatgtatcgtnaanttttaagcctcnantttacaantcccgcttngataanagacctatcaantnttttgctcaaangcttntttacnctatta

SEQ ID NO: 423 - DNA, 628 bp, Homo sapiens
  misc_feature 9, 11, 12, 18, 19, 25, 26, 36, 40, 41, 43, 46, 58, 60, 65,67, 72, 76, 77, 82, 83, 85, 87, 88, 90, 94, 96, 97, 98,99, 104, 107, 110, 112, 114, 115, 117, 120, 122, 123, 124,126, 129, 130, 133, 136, 141, 146, 154, 169, 181, 186, 187: n = A,T,C or G
  misc_feature 229, 235, 242, 245, 247, 268, 272, 273, 287, 289, 291, 297,302, 304, 307, 318, 326, 327, 329, 332, 339, 342, 347, 380,384, 388, 392, 404, 405, 406, 413, 419, 430, 436, 446, 450,477, 478, 494, 497, 500, 504, 507, 524, 525, 531, 534: n = A,T,C or G
  misc_feature 536, 541, 551, 554, 569, 570, 571, 591, 601, 610, 612, 621: n = A,T,C or G
ggtactgtngnntcatcnntggganngcccacaccnacanncnccngctttctatgcncnacatnantgccnatcnnatggnnancnncnagancnnnngctcngcngcngncnngnttnannncnccnncangangatcncacantatggacntgctcctgtcctttnaactgtggccancgtcnngcatcacgatttggagttgctggccaaggtggctctgataancagccntggtgtntanangatatttcacgaagactggcnttannggaccataccctgnantnttctanctacngnaancccattttatnccatgganntnttnaatcaangtntgctntggtcctgaagccctatatgctggagatggacncctnaatnaatnattaaagggaannnccctatncctgangtggggtgccntttcanagactttacntaantatagacgggctaacctgcaaaccatnntgagaaatgactcttntcnctnttgncanggttttccaagatgtcnntaccanacncntttcnttgagaaggnttnttccccccttaatannncctgttatcttcccttttcncttgaagggnagatctgcntnagggttccntaaaagg

SEQ ID NO: 424 - DNA, 678 bp, Homo sapiens
  misc_feature 18, 20, 44, 86, 94, 96, 101, 116, 119, 121, 129, 139, 144,160, 161, 166, 171, 174, 200, 210, 214, 218, 220, 221, 235,237, 239, 244, 246, 270, 272, 280, 281, 282, 287, 292, 293,295, 303, 317, 323, 327, 332, 336, 340, 342, 352, 363: n = A,T,C or G
  misc_feature 368, 371, 375, 391, 399, 404, 416, 417, 420, 427, 429, 431,445, 446, 454, 455, 460, 465, 479, 493, 494, 499, 501, 511,518, 519, 523, 525, 529, 530, 536, 540, 542, 557, 560, 564,565, 570, 572, 573, 574, 575, 601, 604, 608, 609, 613: n = A,T,C or G
  misc_feature 615, 624, 626, 627, 631, 633, 637, 638, 647, 653, 654, 656,657, 660, 663, 665, 666, 673, 676: n = A,T,C or G
ggtacttttttttttttntnttttttctttgggagactaaaaantttattgcatctttaaagccttaggccgtatgactaaatgantagactgnantgacngcggggaggaagaancanangaaagatnttaatgaggnggtcnggttgggggaaataanncgaanattcnctnccagggtgagtcctcacactggcctnatgcccttgntganttgncnnccaaacacaggctngntnacttncnttctgcactagcagagaacttgcnanattagggnnnacctnacatnncngtgtaaantcctttccccgcanaaatgntgtngcttnttgnaggntnagataagtgntccggggcttnagatnggngganggatttctttcccatngctaaagngaatncatcccatacanntgntatttancntncctaacttttatcnnttgggctnnggtgnccctntgtggggtattggnacccaattcatacnnagttngngtaaatttanccaatgnnactntnatcnngggagnaacnanaaggataccttcatntcncaanntcacntnnnncctggtttccaacagaggccttttcntgntggnnaatnantgttttacncnntatntncggnngatcacatnctgggnntnnctntgngnntctaacnccntt

SEQ ID NO: 425 - DNA, 680 bp, Homo sapiens
  misc_feature 3, 12, 13, 22, 50, 54, 77, 93, 106, 143, 147, 161, 175, 181,195, 200, 201, 213, 219, 221, 224, 228, 230, 231, 250, 258,261, 263, 269, 277, 283, 284, 287, 288, 291, 292, 293, 295,306, 311, 312, 317, 323, 339, 340, 352, 364, 369: n = A,T,C or G
  misc_feature 378, 384, 385, 386, 400, 409, 415, 417, 422, 426, 427, 430,432, 436, 437, 440, 444, 453, 461, 465, 475, 481, 486, 487,490, 499, 502, 513, 516, 517, 518, 519, 520, 521, 524, 536,544, 552, 553, 556, 558, 560, 564, 565, 572, 575, 576: n = A,T,C or G
  misc_feature 578, 579, 583, 593, 594, 596, 598, 606, 613, 616, 619, 629,632, 642, 644, 646, 647, 649, 653, 659, 660, 664, 668, 669,671, 676: n = A,T,C or G
tcnagcggccgnncgggcgggntctttttatgagaagcgtatggccacanaagntgctgctgacgctatgggtgaanaatggaagggttatgnggtccgaatcagnggtgggaaccacaaacatgggtcccccatgatgcaanggtntcttgacccatggngcgtgtccgtctgnttccgngcaaggggctttcntgttnnagaccacgcganaacggntnaanagantnnataatatctccctaggttncacttganagntncatatnagatcgtncttatnnttnnttnnngntaaaaatggtnaagtnngattntcctgnactgactgatacggannttgcctttgccngtctgggccccntaacnagcttgcanaatccnnnggattttcaattcntctttaaanaatatnantgtcngccnntangnttgnnacnaatncccttacanttaagatngggnattaattctntgaccnatgcnntcncatcatttngangttttattcanttnnnnnnctngaactcataccngctgcgtnattttcgnngananantgcnngaatttngtnncnncacnacatatggcnnantncttcccanctggtgnccnacntaattggaanctnacctcggaancntnntnggtnaaagtnnagtngtanntncttcntggg

SEQ ID NO: 426 - DNA, 429 bp, Homo sapiens
  misc_feature 14, 38, 42, 50, 55, 58, 59, 66, 73, 81, 84, 94, 95, 112,117, 134, 140, 147, 150, 152, 153, 158, 164, 169, 194, 198,200, 201, 209, 215, 216, 230, 246, 249, 265, 266, 267, 275,290, 292, 301, 304, 309, 323, 324, 326, 328, 341, 344: n = A,T,C or G
  misc_feature 350, 369, 372, 374, 386, 387, 397, 415, 416, 421, 427: n = A,T,C or G
cacttcagcagcgnggcgggaacctgggggtattgaanaacnggcaaccncaaantannatttatncaggggncagaacgncangctagacttnncttccactggtcacagnataanggcaacctgcaagactnaaaagnaggagangangnngaatnggaagnatcancggaccgacggactgggaaacccanggcngnnaaacgggngaagannaaacaagaaatccnccctgaagaaccgaanganggggacaagaaggggnnnacctgacncacaccccggaagangncgaagggancgncagcnggaaaccggaggannananaaactggggaacnganaacaanaaaacatacgggggccggnaangngccccgcaacannatgcgggggnaaaagaaaccacgcccgnngggcngggagnag

SEQ ID NO: 427 - DNA, 632 bp, Homo sapiens
  misc_feature 14, 16, 22, 27, 31, 40, 50, 55, 61, 66, 80, 82, 83, 84, 86,90, 101, 104, 114, 118, 137, 139, 145, 146, 156, 158, 159,165, 174, 183, 184, 203, 209, 210, 213, 233, 244, 250, 264,266, 269, 271, 274, 276, 277, 281, 288, 292, 294, 295: n = A,T,C or G
  misc_feature 296, 298, 299, 300, 306, 310, 311, 318, 322, 326, 339, 343,346, 354, 360, 361, 368, 369, 387, 389, 391, 401, 402, 405,424, 426, 428, 449, 452, 461, 475, 479, 487, 497, 523, 531,540, 550, 564, 573, 587, 591, 596, 599, 601, 616, 623: n = A,T,C or G
  misc_feature 632: n = A,T,C or G
accgatgatactgncncttgcnctgantatntaaacactncacagtgttnatatngggaanatatngggaaggaaatatntnnntnaaanatgaacgctgnctntatgtttttntctntttaaactggctcacttanantctttnnaggatgggangnntctttnttgctgtanagcgctctnnccttttcatctgatgttcngcggtnncanggaccttagctacctatcanacttttccaanagtatngattactaatgaananttntnacnanncaanacctganaatntnnntnnncgtttntacnntgaagcnacangagngggatcatgggcntttncantaaatctncctgcnntcccctnncgctggacattattatgncntngcttaattgnnttntccctgagctttaaatcantnanagcttaaattgtcatatccgntcnttgcctttncaaggggatttacnaaantttggtgnatacaaaaancctattttggctctctttcactactngagggtcnaccatcctnattaaatgtntgacaccatcaatnaataacagntgctgtttcatgtntaanaaganccnantatttttatttacangcgggtnacctgggcn

SEQ ID NO: 428 - DNA, 408 bp, Homo sapiens
  misc_feature 22, 32, 36, 41, 48, 56, 57, 65, 71, 73, 79, 81, 86, 91, 95,99, 100, 102, 105, 108, 112, 123, 130, 140, 142, 152, 153,172, 174, 175, 182, 195, 196, 217, 226, 261, 276, 279, 282,287, 294, 301, 303, 309, 313, 315, 319, 324, 334, 337: n = A,T,C or G
  misc_feature 354, 357, 359, 367, 374, 378, 381, 384, 385, 396: n = A,T,C or G
atttttggaaaaaaataattcncccccccccncccnttacntgtcggnccctgccnnatggtggnctaatnangaagcngncagantttancgancctnnanaangangganaaggcagctgnagctatnaaaaaaccancnggggatgatnngataccatcagtttcacanannggagatntgaagcattactnnaaaactgggaaaaaaggcccncttcggaangaactggttgactggggcaccacaaattgcacagntgggggatcttgtgnatnccncgaancacaacngaatttntngctccntgcnangccngggcncccagacgcngcngcgcaaaaccggcgaanacncnacctcccnaaacaanctanaanagnngcaggcaaaanacagaaagcctt

SEQ ID NO: 429 - DNA, 662 bp, Homo sapiens
  misc_feature 6, 19, 33, 64, 69, 92, 143, 149, 176, 180, 185, 191, 201,211, 218, 219, 223, 226, 255, 259, 268, 269, 273, 274, 275,293, 294, 312, 324, 325, 334, 335, 340, 343, 351, 372, 374,375, 393, 394, 397, 403, 405, 414, 415, 424, 429, 433: n = A,T,C or G
  misc_feature 440, 442, 449, 450, 453, 454, 487, 488, 490, 493, 494, 495,506, 518, 522, 523, 527, 532, 533, 534, 535, 536, 538, 540,543, 550, 554, 573, 575, 577, 578, 579, 588, 593, 596, 598,601, 602, 607, 611, 626, 628, 629, 634, 637, 661: n = A,T,C or G
agcggnccgccccgggcanggacattcccttgnggatcctgcttgctttcgtaaaaagcaccanttggnacaaccttacccccgagtggccnaaccaaccttttggttataaggaacactttttttccttgggcccttaattntttaanttaactttcccatccttggcctttgantaangaaanttgttnaaaatgctgnttcccatacnaatttannttanccnctttgggcttttttattttggggccaaancccntgggtttanntggnnnaaagggggggtttaaagnnggggggggggctttaaanaaaaaaaagggnnttttttagnngggcnttnttggccantttaaaaaaccaccttttttnannccctttttaaaaaaaaannccnggggananaaaaacccnnggggggggnacccntccnaaaaatnanaaaaccnnccnnttttggggaaaaaagggttttaaaaggggggcnncnttnnnttttaaaaatngaaaaaaaaaangggnnaggnaaaannnnncngnctnttttttncgcncttcaaaaaaaaaaaaaanantnnngccaaaaanaaaanaancnttnnggggngggnaaaaaaaaaaaaacnannccttnaantttttttttttaaaaaaaaaaaanc

SEQ ID NO: 430 - DNA, 651 bp, Homo sapiens
  misc_feature 36, 59, 81, 111, 126, 132, 156, 169, 174, 196, 199, 209,210, 216, 220, 221, 223, 224, 226, 229, 230, 232, 239, 244,246, 249, 262, 265, 271, 274, 287, 303, 305, 316, 317, 319,326, 333, 338, 339, 350, 351, 352, 359, 365, 382, 383: n = A,T,C or G
  misc_feature 385, 391, 396, 397, 401, 403, 411, 414, 417, 419, 420, 427,430, 431, 433, 437, 438, 442, 443, 446, 447, 448, 449, 456,457, 464, 468, 471, 481, 485, 487, 492, 494, 503, 504, 508,510, 511, 517, 519, 523, 525, 529, 536, 538, 540, 546: n = A,T,C or G
  misc_feature 547, 550, 554, 556, 560, 565, 567, 568, 569, 576, 578, 580,582, 586, 590, 594, 595, 599, 600, 603, 607, 609, 611, 615,617, 625, 626, 628, 631, 632, 634, 635, 636, 639, 642, 645: n = A,T,C or G
acagaaagtttatactataaaattacatccctaagngattagggtcctcagtaacacangaattaagaaattgaaaagggncattgctcgggaatccacataactacagantagtagcgcaagctnttgttncgtgatcagaaaagagactttttnaagaacatttttnacatntttcctaacattatgcccctcntanttaaaagggnngcctangacnntnncnttnntnattttgnggaangncanccccttttttttnccncaaaanggnttttttcctgctntaaaaaaaaaaaaaangngtggtttcccnnangaatgtnccctcantggannattttcttcannngaaggtnccaacncttttccattttttcanngngttttnttganngtcncntaggttgnttnagnannaaattcntanncntttnnttgnngannnnccccctnnaaaggangaanttntttttttacnccancncacananatatacggnntggnannggagcngncaananaccncttttanantnagtatnnttnggantntaanatatnannntcccgcncnanantttntttntttnnaatnnctnaaantntntttntnatatgganngnttnncnnntcnccntgntgttaa

SEQ ID NO: 431 - DNA, 661 bp, Homo sapiens
  misc_feature 2, 14, 21, 49, 89, 96, 103, 121, 134, 137, 148, 158, 159,162, 172, 175, 177, 183, 186, 187, 212, 236, 238, 239, 246,249, 259, 263, 269, 277, 287, 291, 297, 308, 312, 327, 329,360, 361, 363, 372, 381, 397, 446, 449, 454, 462, 463: n = A,T,C or G
  misc_feature 464, 475, 484, 490, 503, 510, 513, 524, 541, 548, 554, 560,561, 562, 563, 565, 575, 583, 586, 594, 596, 601, 603, 604,618, 623, 639, 656, 657: n = A,T,C or G
anccgtggtccgcngcccgangtacttttggccttttcttggggatagnaagttatttcagccagggccacaacaacaagaaggcaagnttccaanaattttnaacttgggttcattcaanaattggccggggnaanaattaaaaaancaaaattggnnccnacccccaagnttngntttganggnnccaacccctgtttccttttgggccnaaaaaggggggaaaaaggataaantnntaacctnttnttgaaaaatnaatnaatttnccaaaaanttttaagggnttgnaaactntcttgttgggngganaaggggaaatttttntncccaaaattccctgggggcttgaaatttttnntngggccctcnccttttgcnaaaatggaaacccccntttaatttttggggtttttgggggctttccctggggcttttgttgatanccnatttncaaacttnnngaatagggccntaacttttnccggcnaaaaaaaaagggnaatcccnttnccccaaaaaanccaaaaaggggggggtngggaaanttgggncacccnnnntnttaaattttnggcccccnganaaaaaaangnaaaananngacccccccaaaanttttnaggggggggccccccntatttccccccttggtnnccaa

SEQ ID NO: 432 - DNA, 646 bp, Homo sapiens
  misc_feature 31, 76, 78, 86, 91, 94, 103, 105, 109, 110, 112, 113, 119,128, 143, 148, 158, 171, 181, 194, 207, 212, 218, 222, 228,230, 236, 240, 249, 254, 256, 259, 262, 270, 271, 276, 280,283, 293, 299, 301, 305, 310, 317, 325, 331, 333, 338: n = A,T,C or G
  misc_feature 351, 353, 354, 360, 365, 366, 372, 373, 375, 384, 386, 394,401, 415, 424, 427, 429, 433, 442, 443, 445, 467, 470, 481,484, 487, 490, 502, 512, 515, 519, 526, 531, 534, 539, 541,549, 552, 558, 563, 570, 574, 581, 583, 585, 593, 594: n = A,T,C or G
  misc_feature 610, 614, 616, 623, 630, 631, 633, 635, 641, 643, 646: n = A,T,C or G
acttttttttttttttttttttttttttttnggtttttttttttttttttttttttttttttttttttttttttgnanaaattttnttttnttnaaatagcantntgannanncatggnccaacaacnctcaaataataaatnaaatntaatcaaatnttaaaaattggtnttaaaacatnataaccaatgatnccccgtttgcctntaatntttccnacanaaaacnanttaaancccnaggggccancaaancnttnaanaaaatttnnttaantggnagntgtttaaaantaccantntgancactnttgactntttttttnaggctntnaatanctttagggatctnannaggggngggannaaccanntnaaccttggngnaatacctnggccggnaccaccctaagggnaaattccancanantggnggccgttannangggatccaagcttggtaccaanctnggggaaataanggncanagntgtttcctgggnaaaattgttntcngctnaaaattncaaanaanatacnanccggaaancanaaagtntaaanctggggngccnaaagagngnanctaacccnnattaattggggttggngcanantggccgntttaaanngngnaaaacntngtn

SEQ ID NO: 433 - DNA, 150 bp, Homo sapiens
  misc_feature 15, 43, 55, 65, 73, 74, 77, 84, 88, 94, 100, 123, 124, 134,136, 143, 144: n = A,T,C or G
catatatacccaagngtgcgtatcttgatctgtatgctcttanatgcgctttatntacagctacngcacatanngcncacatancatntttacncacaanggttgaaaacctgtgcatgattnnatatcatcancnagcacgnntgctgg

SEQ ID NO: 434 - DNA, 272 bp, Homo sapiens
  misc_feature 42, 66, 72, 81, 83, 88, 96, 99, 111, 112, 116, 118, 123,125, 132, 141, 143, 176, 181, 183, 189, 190, 193, 198, 209,222, 228, 230, 234, 242, 243, 246, 247, 251, 257, 266: n = A,T,C or G
ggccgaagtacgcgggcctgaacccaagagacagaggttgcngtgagccgagatcgcaccattgcnctccancctgggcancnagcanaaaaactntgnctcaaagaaaannaaanantagancnagacganaatggcttncnggacaggagcattgctcatttgctggcgggacngttcnanaatcannccntggtntggtccttctncttaccctggctngttttntncaanccacgtannttnntaanactttnttggaagcnaaataa

SEQ ID NO: 435 - DNA, 647 bp, Homo sapiens
  misc_feature 25, 29, 45, 57, 65, 82, 89, 111, 126, 142, 143, 173, 175,180, 183, 184, 187, 201, 202, 208, 209, 210, 216, 221, 233,254, 259, 265, 266, 272, 274, 275, 278, 280, 283, 288, 294,300, 304, 311, 316, 319, 321, 323, 326, 327, 328, 333: n = A,T,C or G
  misc_feature 334, 335, 339, 343, 348, 350, 353, 356, 360, 365, 366, 373,374, 388, 402, 404, 406, 412, 419, 433, 438, 445, 454, 456,459, 461, 464, 472, 492, 493, 494, 497, 508, 514, 519, 526,529, 534, 543, 544, 547, 549, 558, 569, 575, 586, 596: n = A,T,C or G
  misc_feature 605, 607, 612, 614, 621, 626, 627, 635, 637, 640, 641: n = A,T,C or G
acttttttttttttttttttttttntgtnttattttttttttttntttttttttttntttttaangctttgttgtttggatntatggangatggggattattgctaggatnaggatggatattaanagggcaaggacccctnntaacttgttagggacggatcggaaaatttntnttggnaannagnaaatatcattccgnnttgatnnngggaangggtnttaaacgggttnggctaagggttaaaattggtntgggncccccnnagaagncnnggnanaanatcgntaatgncattanaggngaaaatnaacanaantnanccnnnaggcnnntttnattntgaananaanggngganagggnnttttatnnggaatgggaggtgnttcctagggggttntntnaacccntttcgtncaaaaaaaggaggnggaantgctttntagggcttnantantnaanggcacatnaaattgaaaggtaaaaaaannntgngagggggggantgtctnctgantaacctnctnaaaantagttaaannaangntgacccaantttttgggatngcaganaaattaaaatnctaattactngggccccananaaatnanattttgngcctnncggcgagnanaannccttta

SEQ ID NO: 436 - DNA, 531 bp, Homo sapiens
  misc_feature 141, 143, 158, 175, 181, 192, 208, 213, 216, 221, 223, 228,237, 243, 254, 272, 282, 284, 288, 290, 295, 297, 299, 300,307, 310, 312, 324, 326, 333, 346, 349, 358, 361, 362, 363,365, 375, 378, 382, 383, 389, 394, 415, 424, 425, 428: n = A,T,C or G
  misc_feature 429, 433, 434, 451, 455, 461, 468, 471, 472, 478, 481, 507,526, 527: n = A,T,C or G
accttgatacacataatcagccttttcaaaaatgcctgacaagaattagtctttcctttgtgctaaaagtcttcccacccatggatggaaacaggctgactcctggagggtcaagcaaggggtggggaaaggggaacacantnctttttgggaaggcnaaagcaaaaaaggggtnttttgnccaaaccaacnttgggccagctcaaanggggnccnaagcntnccccnaaaaaaggntttccnttttttttttntagggccctgcactttanaaatttgaangnttgnanttaanantnnggacccnctnanacttttttccananggaaaantttccggggccantcnccccaaggnaannngngccctttccnaancccnnttttgnaaagnaagggccccggggggttcttnccaaaaaanntcnnggcnnctggggggaaaaaaaancccntggggnaaaccgnccnnctttanaanttgggccccctttgtggggggccccnttttattatgggggggggnntact

SEQ ID NO: 437 - DNA, 526 bp, Homo sapiens
  misc_feature 2, 12, 21, 22, 37, 39, 43, 44, 51, 54, 59, 65, 85, 99, 101,111, 177, 183, 187, 198, 234, 241, 246, 254, 257, 264, 266,270, 278, 279, 281, 291, 295, 296, 301, 314, 316, 322, 332,348, 349, 354, 355, 363, 373, 374, 379, 383, 384, 385: n = A,T,C or G
  misc_feature 393, 401, 404, 408, 411, 413, 416, 418, 419, 420, 428, 430,431, 432, 438, 441, 443, 444, 445, 446, 454, 462, 464, 465,471, 472, 474, 480, 481, 482, 483, 486, 487, 491, 493, 495,497, 498, 501, 505, 518: n = A,T,C or G
cngacgggcccncaggagcannacaggaactactggntnctgnnaacctgnggntgctnatgtgnccactgggcaccttattgcnaacctgaaccaaananacctccttgnttcagcttgggcctgctgtccagcttccgaggtgcagcagggttgtgggaacaagagacgactttnaggatnaaangaccaaagganaaagctgccttacatgatttgattggggcctagganatggaantcacnctttattnttnagagagntntttnactaatgnngnaggctgaggngcannccttngaatatgccttananggccgnacgcggtggntccccctgcaatcccnntactnngtgaggcnaaggtgggcnngccancctnnngctcgaantcaaaganccntccntanantancnnngggtgaancnnntttccntantnnnnatccaatnatttatcntnncatctnnanctcatnnnnctnntaancntnannctngtgnagcatgtggaaanatgaaatt

SEQ ID NO: 438 - DNA, 515 bp, Homo sapiens
  misc_feature 52, 54, 57, 66, 74, 84, 87, 88, 97, 100, 104, 107, 116, 122,123, 137, 167, 174, 175, 178, 183, 193, 195, 202, 207, 210,221, 224, 225, 226, 233, 251, 257, 260, 265, 274, 284, 290,298, 314, 318, 319, 321, 330, 333, 338, 352, 358: n = A,T,C or G
  misc_feature 365, 375, 376, 380, 384, 399, 408, 439, 440, 454, 463, 466,469, 475, 476, 482, 496, 500, 504: n = A,T,C or G
acttttttttttttttttttttttttttttttttttttttttgatttaattntnaancaaaaacancggaaaangggattaatnatnnggttgttanacngggncanaaataaacncaaaannagcccaaaatgtcncaggaccggggcagaggaccaacatgggcnttttgtnnatnaccanggggggaccnanaggggancggcnatnaaagggcaatnaannnctaaatncattgaaacaagctttanacagtntcntgcantcccacatncttgtacctnggtcgnaacccacnctaagggcaaattcanggcnnantggcggccnttnctagnggatccaaactggntcaaanctgggcnaaatcatggnnatanctgnttcctgggtgaaatnggtatccantcacaattccccacaacataccacaccgganncataacgggtaaancctggggtnccnaangagtgnnctaagngagattaattgcgntggntaantggccgctttc

SEQ ID NO: 439 - DNA, 528 bp, Homo sapiens
  misc_feature 23, 30, 137, 150, 184, 202, 208, 211, 215, 226, 228, 234,239, 244, 255, 268, 269, 275, 279, 290, 301, 302, 304, 306,317, 332, 333, 334, 339, 349, 357, 358, 368, 375, 380, 391,393, 394, 401, 406, 415, 420, 429, 435, 437, 440, 450: n = A,T,C or G
  misc_feature 452, 455, 460, 480, 486, 493, 502, 512, 516, 522: n = A,T,C or G
actatgtcgattcgacagaacantttttangattctcggccttgccccttcacgagccgccaccaagcaggcaggtggatttcttggcccaccacctccttctgggaagtctcttgaactcaagacctctttatttnctatcattctttnctagacacacacacaatcaagacctggcaactgnttttgaacaagagccatnaggtanccnttantacttgggccncntttctnagttntgaantatttccaaanccttttgggtatnnaataanagtnaaaaaggcaancccgcaaacanngnangtgactttggncctttaagatctttnnnaaatnagtggattgnatagtaanntcaacgaaanggatatnggaangaaaaaacaananntccctcntgggntcatttacntaaangtttttacntggggnancgnatctaaaagngnctntgtangccctgcaagttggctgggntttgancattttngagatttanaaaaaaaaanttangtttgntaaacc

SEQ ID NO: 440 - DNA, 680 bp, Homo sapiens
  misc_feature 28, 53, 55, 99, 108, 117, 128, 142, 150, 164, 165, 171, 195,209, 213, 216, 219, 223, 235, 242, 268, 273, 276, 277, 289,290, 307, 313, 318, 328, 332, 336, 343, 347, 352, 353, 354,366, 369, 380, 394, 403, 404, 406, 409, 429, 432: n = A,T,C or G
  misc_feature 434, 435, 438, 444, 484, 485, 488, 491, 499, 502, 507, 508,511, 516, 518, 521, 525, 534, 539, 547, 551, 556, 558, 560,566, 569, 571, 577, 580, 587, 596, 604, 623, 627, 635, 638,644, 649, 650, 651, 656, 661, 662, 670, 672, 673, 679: n = A,T,C or G
agccgtggtccggccgaggcactttttntttttttttttttttttttcgtttncngaaatgttcgaagttaactcattttatttctaggattcggattncaacatttnaatttcttnggaatataagncacttttttgcaanctaaaaantagaatcaaactannggtganctagtcctctaggcatccaaggcngatccttggaatcntgancanaangatngacatcctacanggtgctngcaatacggctataaaccttctaaanacttnacnncttacattgttnnattaggaaacagccaanaggccngccgntaaaggaatnaatntgcnaaacatnttgntttannngggacaaaatgntgncaattatttgntggcccacctactngtgaactgnnancanaaatggtcccagggactgtnaancnnaangaaggnttttacatttttgaaaacttgctctgcaggataaaaaaannccnggntgctgtcngtntaaannccngtgananaantttnccggttgancctcnctggactnttgntttgncnangggccnccncntggacntgnagggggnggggatatntgtacctncccggccggcgtttaaaangggnaatttcanccnactggnggtcnnnacttnggggnnccaacccngnntcccanc

SEQ ID NO: 441 - DNA, 355 bp, Homo sapiens
  misc_feature 28, 31, 39, 43, 57, 69, 74, 86, 99, 102, 151, 156, 162, 167,169, 170, 185, 188, 205, 206, 209, 216, 219, 221, 231, 260,262, 269, 284, 291, 295, 296, 298, 304, 306, 317, 321, 323,326, 332, 335, 336, 342, 346, 348: n = A,T,C or G
acacgggggtcggtggccggcagtcatntcncggccgtntcanaattataaggctgnctgcagagattncgaanaaatggcaacanatgaaagcgtcancanctttagttcagcatccttggctggggaatatgtagatttcacttttacnttganaattcntcctnanngaaacaatttactanatngcttggaaactatatgnntgnataaatnatncnaaagttccantattggcaatcattgggggatccccttantngttcaangaagccctattattncttaatnctgnntnacctgngntttttaatttntcantnatnccttantannaaaaanttcnanaattcaa

SEQ ID NO: 442 - DNA, 503 bp, Homo sapiens
  misc_feature 11, 13, 17, 20, 27, 41, 55, 57, 59, 62, 64, 71, 78, 88, 92,94, 96, 97, 100, 106, 110, 118, 120, 126, 128, 131, 136,137, 148, 149, 155, 157, 159, 160, 166, 170, 172, 175, 180,184, 190, 195, 218, 223, 224, 239, 243, 248, 251, 255: n = A,T,C or G
  misc_feature 256, 263, 266, 277, 285, 293, 304, 307, 311, 316, 320, 338,343, 354, 361, 365, 366, 373, 375, 383, 388, 390, 395, 411,413, 429, 432, 434, 438, 439, 446, 456, 472, 482, 487, 500: n = A,T,C or G
cgtggtccggncnaggnacnagaatgnttcatgaaatccgnttttaaaatgaacntntntgngngccacanttcctangactggggcnaggncncnntgncaagtnttgntttgaggntnaatctntnaanaaacnnaattcctgccnnaatgcncncnnaacatnagtnanccnagtgngtcntgccanggatnctttgactttggtttgctgctgntgctnnggatattgggagggntatnctttncangttnnaagaaanggntgtgggttaanggctgtcntaaaaganccctggctgtnacnccanctgantccngattgcgtttgttacccntttgnaactgacccgntaatttnaacnntttttcnancttttttnaagcntntttangaagccttcccgggangnaattttttccaggttnatntncttnnccgggcngggcccgttnaaaagggggaatttcnacccactggngggcntttctaatgggantcc

SEQ ID NO: 443 - DNA, 667 bp, Homo sapiens
  misc_feature 10, 46, 50, 56, 57, 62, 63, 64, 71, 74, 77, 79, 80, 81, 84,86, 92, 94, 99, 107, 121, 129, 131, 136, 138, 139, 141,142, 151, 154, 157, 161, 173, 182, 184, 203, 204, 206, 210,215, 216, 233, 240, 241, 253, 256, 257, 268, 276, 317: n = A,T,C or G
  misc_feature 318, 323, 327, 329, 336, 339, 340, 342, 347, 348, 356, 359,361, 362, 377, 379, 388, 391, 393, 395, 396, 398, 402, 408,418, 419, 422, 433, 434, 442, 455, 461, 464, 470, 474, 479,486, 491, 492, 496, 498, 502, 506, 514, 518, 521, 529: n = A,T,C or G
  misc_feature 530, 531, 535, 536, 542, 549, 555, 564, 565, 567, 568, 569,573, 574, 575, 586, 598, 600, 602, 606, 612, 625, 627, 631,633, 653, 656, 663, 665: n = A,T,C or G
actttttttntttttttttttttttttatttttttttttttttttnttanggccannttcannncctgaantgncanannnaantnaaaatntnaaaanatgcaccntgaaggctttgagncgaagaantnaatcntnncnnggggatctnganctncaangactgtgacggnaaaggatgntnttttttttaccctggcttnncncaanttatnncaaaacaaaatgggaancaacccnncaattttttggnaannagaaaaacacnactagggnaccccaaaaaaaccccatttattttcctttggaaaaagggnnggggnccangntaaaaantgnnanggggnnaaattacnttnanncaaaagatggaaacntncctaaaagnttncncnntnggangaaagngggttaaaannctnaaaatcttttnntgggaaanagggactctaatnggtccnttngggctncttnaaaangggaaanggaannaaanantttncttnaaaagggnggcnttnaaaacccnnnaaannggaaanaaaaaantttccngttgaggtnngnnnacannnttttgaaaccngccaaatttccntntngggnaaattnttctttaaaagcnanaaananatttttaaaaaaaaaatggnttnggggggngncc

SEQ ID NO: 444 - DNA, 279 bp, Homo sapiens
  misc_feature 7, 12, 13, 18, 22, 23, 36, 38, 39, 45, 50, 52, 53, 61, 72,77, 78, 88, 89, 92, 96, 124, 132, 137, 143, 148, 159, 164,176, 183, 200, 205, 258, 270, 274: n = A,T,C or G
acccggngcccnnacggngccnnacagatggctggntnngacatngggcnannctgccagntggagcattgncggcnnccgagatttnnttncatntggggtgtgatgattgttcatgaatatntttgcccngaacncagaanctggnattctcatggntgagntgaggtgactgnatgtcantgagagactgaacacanatcancatacatcttacccatgctctttcaaagactgtgctaagagagaacttgtgcncattcccttccntatnggcac

SEQ ID NO: 445 - DNA, 449 bp, Homo sapiens
  misc_feature 49, 54, 59, 74, 78, 86, 91, 93, 94, 100, 108, 113, 122, 152,153, 155, 168, 191, 199, 200, 203, 210, 230, 231, 241, 243,248, 256, 263, 269, 274, 277, 297, 304, 305, 314, 320, 325,330, 333, 338, 340, 353, 355, 358, 363, 366, 374: n = A,T,C or G
  misc_feature 386, 389, 391, 394, 399, 409, 413, 418, 430, 435, 440: n = A,T,C or G
actttttttttttttttttttttttttttggtttttttttttttttttntaggnttttnttttttttttttttncaancctttcanataantnnattttnttccttcnaccanaataatggnatatccaaattttgtcttaaccggggggtnngnaaacacaggcttntccatcccacttacaggcaaggnaaaggctnnttnttgaaanggccccaccatggacccttnngtaatccaancnaagcnaccccctngccgggnttaatnttaantanacatgggcggccagttaatnaaatctnnacccaaatnttaaanttttncaagnggnttccnantattttggcatgntnttnaaaanaanaagggganagaccctttaantgnanttnccccncctttggggncctnaaccnttttggacaaancctgnaaatnacaaaaggg

SEQ ID NO: 446 - DNA, 317 bp, Homo sapiens
  misc_feature 5, 11, 19, 21, 22, 29, 41, 42, 47, 57, 67, 77, 88, 91, 117,137, 144, 146, 153, 187, 200, 217, 224, 228, 234, 241, 253,257, 259, 261, 267, 269, 275, 280, 292, 294, 300, 301, 308,316: n = A,T,C or G
acttncttttntttttttntnntttttgntcaagattaatnnctatngacaaggttnataagaacanatatttaaantcgaaggccanttnttaggtctcatttagctgcttatttngttcacttgtatttaccttnccctagngnggtgagnaactatcaagaaacaaacctgtgaaaatacctgntaacattcaacanatatttggtatatatancggtctnggangcaaanatatttntcaacacttaantggngnancaaagngngtcatnggganataaacaggatngntttaannttgagantttaatana

SEQ ID NO: 447 - DNA, 174 bp, Homo sapiens
  misc_feature 4, 10, 12, 69, 93, 104, 105, 109, 110, 112, 114, 116, 118,121, 122, 123, 127, 128, 129, 131, 139, 140, 145, 149, 151,154, 156, 160, 165, 169, 170: n = A,T,C or G
gtantcttcntntagatgcatgctcgagcggccgccagtgtgatggatatcttgcagaattcgcccttncgagcggccgcccgggcaggtacncttagaggtanntgtnntnanananagnnntgtnnnanttaaagannctaangtcntnatntntttnatagncaanntaca

SEQ ID NO: 448 - DNA, 586 bp, Homo sapiens
  misc_feature 5, 40, 44, 57, 58, 61, 69, 76, 86, 89, 93, 94, 95, 97, 103,107, 117, 120, 121, 123, 124, 125, 128, 132, 134, 135, 141,142, 143, 152, 166, 170, 183, 189, 190, 191, 203, 208, 210,217, 218, 220, 221, 225, 238, 239, 250, 252, 260, 261: n = A,T,C or G
  misc_feature 266, 275, 278, 280, 281, 295, 298, 299, 332, 340, 345, 359,364, 372, 377, 383, 388, 398, 409, 414, 415, 427, 432, 436,439, 447, 448, 450, 462, 480, 494, 497, 499, 504, 512, 519,530, 533, 538, 544, 547, 575, 585: n = A,T,C or G
ggacntttttttttttttttttttttggagttttatttantatngggagcaaattgnnttntaaaatgnatattgngaataaaacngcntttnnncntttaanggtntagggctgtnaanngnnncangggngnngccgannnaaccatganctgggctgggtttntatntttgatgaaaaanagcctnnncgcttttgattngggananaaaaaanngnncatngaccttgactatnnctttatctccngncacctttnnaacantaaattgcnggncnngggggggagggctnttnncggaactaaactgtgagcccttccattttttangaggggangtganaaaaagattacacngtggnttgagtgnccctnaggaanaattnggacctaacntgcccggaaangaagnnataggtctgatncgttngtanaanacgacaanntncaccctcccccntcctggtgatgcactgangggacaggtggagnganantacgnttattgcnaccagtntctgtcacctnctngggangaccgngtntaaagaattttgaaataagctctttacnttgccttttna

SEQ ID NO: 449 - DNA, 314 bp, Homo sapiens
  misc_feature 7, 15, 25, 36, 51, 60, 65, 66, 71, 82, 89, 95, 110, 111,121, 138, 145, 150, 158, 163, 174, 182, 183, 191, 208, 226,227, 241, 248, 249, 253, 272, 279, 289, 290, 294, 304, 311: n = A,T,C or G
gtactanacacatcngggacaaccnccatttcgganatgatgccgaaaacncaaggccanaagcnnaagcnaggggatgganagtttgnggaagntatttctttacccannaatgacctgntgcaaagacttgatgcnctggtanctgangaacatcntcacngtggacgccanggtctatnnctacgctntagcgctgaaacatgcntaagcaaagccatttganngtgcccttcttganattttanncccnaatatgacacttggccatntattgtnaacgaaaagnnccangccttgttcntaagacnttg

SEQ ID NO: 450 - DNA, 377 bp, Homo sapiens
  misc_feature 76, 95, 99, 100, 103, 105, 110, 113, 115, 117, 121, 122,138, 145, 147, 152, 157, 159, 168, 173, 180, 191, 192, 197,206, 210, 213, 222, 223, 227, 228, 237, 242, 254, 255, 269,275, 279, 282, 283, 286, 290, 291, 294, 296, 300, 301: n = A,T,C or G
  misc_feature 314, 318, 343, 345, 369: n = A,T,C or G
cgcggcgaggtacttttttttttttttttttttttttttttttttttttttttttttttttttttttttttggacncccaaaaccatcctttatnggannatnanttcanggnancngcannaaaaaacatttcaggnggaattnanaattnccggntnaaaaaactngcccnccaacanaaccaatttannaaagncaattcatnaaanggnataaaaccnnttgnngggcatganggcangggacaaagctnnaacttggccctggncctttngaanccnnggnaggnngancntttnnacccaagaacccngaancccccggggcaaaaaagaaaatccncntaaaaaaaaaaaaaaattttagcnaggggggc

SEQ ID NO: 451 - DNA, 291 bp, Homo sapiens
  misc_feature 36, 71, 74, 79, 97, 100, 103, 104, 109, 118, 120, 122, 123,126, 127, 128, 130, 134, 143, 145, 146, 149, 151, 157, 161,162, 167, 168, 170, 173, 176, 180, 183, 194, 196, 203, 205,207, 211, 218, 222, 246, 251, 252, 257, 261: n = A,T,C or G
acgtgccgcaggaaatactccggtagcaatcgcatnatcggtgccaaggaccacccatccttccaaatgancgnggccnaggttgacataggtaacnggnagnntaaanggccaattnananntgnnncnttanggggggccntnncangnatgggngagnnaaatnntnccnttntccnatnggccaaggccnanggcatcntntnaaanaactttngacnggaaagaatcacaaatgtggaatntttgnnataantaantaatgaaacccaaaaaaaaaaaaaaaaaaa

SEQ ID NO: 452 - DNA, 130 bp, Homo sapiens
  misc_feature 2, 19, 30, 45, 50, 53, 55, 65, 72, 74, 77, 78, 79, 99, 125: n = A,T,C or G
cnccttaaccgtggctttnccgacgtacantccaatcgtcttcgnggggnttncncttagccgangagttcncnacnnnttccacaaatttttaaagangaggtagacccacctccatcttaaanacttt

SEQ ID NO: 453 - DNA, 164 bp, Homo sapiens
  misc_feature 24, 30, 55, 61, 67, 68, 77, 82, 98, 101, 114, 118, 119, 124,128, 134, 138, 146, 148, 151: n = A,T,C or G
aactaccatctttcacatcaaatnggggancgtggaggtagtggaaaagctattnggattnaagtgnncagaattcntgtanaccaacagcaactganccnctgtgtaattaanggcnntccangggnaatcanctanttcgagcntnttncgctatttaggct

SEQ ID NO: 454 - DNA, 665 bp, Homo sapiens
  misc_feature 15, 97, 120, 124, 129, 132, 141, 146, 161, 172, 180, 183,187, 198, 203, 207, 212, 232, 249, 260, 263, 266, 283, 289,291, 292, 295, 298, 299, 301, 304, 312, 318, 319, 324, 339,346, 358, 361, 362, 370, 378, 381, 387, 390, 392, 394: n = A,T,C or G
  misc_feature 398, 422, 431, 441, 443, 447, 464, 485, 504, 521, 523, 524,528, 535, 547, 549, 554, 557, 561, 567, 571, 584, 590, 593,598, 600, 606, 610, 616, 633, 648, 650, 652, 657, 660, 663: n = A,T,C or G
gacggagcaatcgangaggcataaccacacttgggggtgggctataggggctgggaaaaaccctgaaaaatgaactggcttttcactggagggccangggtttggaaatatttggccagncttngaaangtntttaaaagncaaantttcctttaagtgantcttttctctnaaaaacancantcancttccattgtnccttnacanaaggnccccctgcgttcttgcttgnattgcttttgcgcactnccttgatgatnaanaanggccccaattattgatngccccncnnaanccnnantcngggcccanggcacnnaccangttctctgtaatctnctggganaaaggctttggnacnntaaaatcnccaatgcnttnagaaanaangntnattncaagccccatgctccaccctgcantcgtaaacntcctcaattnanggcnggaaggggaaaatattnggaacttcgggaaaagggggntttcttgggcaaggaaaantgtctctgcactccttngnngaanggttttnaattttaaaccncntgacnttnaccnctggtngggnggaatttttctanaaacanatnagganantttggntctnttcaanttcacaagggttgtttnttgagcacagtttcntntngaagnaanctncc

SEQ ID NO: 455 - DNA, 648 bp, Homo sapiens
  misc_feature 2, 4, 14, 24, 25, 28, 29, 57, 64, 75, 78, 82, 91, 93, 96,106, 110, 113, 119, 121, 123, 124, 125, 129, 137, 138, 148,149, 151, 152, 153, 155, 159, 169, 175, 183, 186, 189, 195,197, 199, 211, 212, 221, 222, 225, 226, 231, 233, 236: n = A,T,C or G
  misc_feature 245, 258, 259, 263, 274, 275, 280, 288, 299, 303, 306, 307,314, 316, 318, 326, 340, 341, 349, 355, 360, 369, 385, 394,398, 405, 407, 410, 413, 414, 417, 419, 422, 424, 425, 430,432, 436, 440, 441, 446, 448, 463, 468, 479, 499, 506: n = A,T,C or G
  misc_feature 545, 551, 555, 556, 561, 567, 569, 573, 575, 577, 580, 588,594, 595, 596, 597, 610, 611, 614, 626, 631, 633, 636, 637,641: n = A,T,C or G
ancntggccgcggncgaggtactnnctnnactgtgaacgggctccaaaggacatggntctgcantcaaaataatnatnaaanggacaggcntngcnaaaatgcatngggnccnactaancntnnncacnatcaaggnnaccaacactnnannngntttnggccatttangttgcngaggtatntgnggnctgctncntnttttttattcanngatcaaacnntcnnagacntnatngcctatcanatgtggtaatccnnaacnctgctgtctcnntaaantttcatancatgacttacngttngannaaacccngnanttgtagangtccataactggtnngagaacgncggtanacatntcttttttnatagaggtcgctacgntctgatttncgcncaattcncnatnctnntcnanaantnnctttnancttnattnnaatgntngaccatactgggggncgganaccttaggganatacatcttttgttttgcanaaacaanattaatttaaatccttggcctgggggggctctcacactngtgagntttnnattgnaatatncngctngncnatnacggaggnctgggnnnnatcttggttgctnngcnctctgctcttantgtananatnnaggnaggtccg

SEQ ID NO: 456 - DNA, 584 bp, Homo sapiens
  misc_feature 17, 19, 27, 32, 35, 47, 54, 57, 68, 73, 81, 89, 94, 97, 106,117, 118, 123, 126, 129, 143, 148, 150, 158, 162, 167, 173,176, 185, 194, 199, 218, 235, 242, 247, 248, 256, 257, 260,261, 277, 285, 287, 316, 328, 333, 351, 358, 366: n = A,T,C or G
  misc_feature 377, 382, 390, 391, 393, 395, 402, 405, 409, 411, 415, 417,430, 434, 441, 454, 457, 472, 474, 475, 478, 482, 487, 488,489, 490, 491, 492, 499, 509, 510, 514, 515, 528, 530, 531,533, 536, 548, 564, 566, 567, 569, 571, 572, 573, 577: n = A,T,C or G
  misc_feature 580, 583: n = A,T,C or G
acttttttttttttttntnatttttgngggtnttngcatccacaacngtccaanatnttttaaacttnctccngtaaaacnagatgaanaggcngcnatccttatnaacaaattggnnccatnggncanttcggcagggccantgatngnaatgcctntcanttttnttgaanacncacagtttnttcaaattntcctnaatgaataaatctcatccncccttctttcccttttnaaatatntcacnnccattttnnttnnttaaaaccttcttttngctgttcngnaattcctttttttggaaaggaaggcccantggccccttaanagaangggggccatttttctttngaccccnatttcatntttctttgtcnagttnaaaatggnntnanaaatttnccngggnanatgnancaatttctttgantctntgaaaanttaaaattccaanctntcttttttcttaatntnnttnttgntggcnnnnnnactaaancaaagtgctnnttcnnaaatttttatctnanngngtntatggtggtaantcatcagatcttctgnanngngnnntctntanatng

SEQ ID NO: 457 - DNA, 236 bp, Homo sapiens
  misc_feature 50, 67, 72, 105, 111, 117, 128, 132, 136, 140, 144, 166,171, 192, 193, 198, 202, 205, 206, 207, 211, 217, 223, 232: n = A,T,C or G
cgtggtcgcggctcgaggtacactgggaactccaagaaaaagctttgaanagaaaatggaggaagcncgaanccagaaactctaaatcttgagacaagaagactntctatnatgaangagattctttntgancaanaccnaacncacaatgtgtgggagaaatctnatganctaataccatgcctgcgaaannaaaantgcnaannnaatnttcctntccggncggccgctngaaa

SEQ ID NO: 458 - DNA, 612 bp, Homo sapiens
  misc_feature 3, 14, 41, 94, 106, 108, 109, 113, 129, 137, 140, 147, 150,151, 157, 159, 195, 196, 198, 204, 220, 221, 234, 235, 247,251, 255, 280, 281, 283, 284, 285, 294, 309, 310, 332, 336,350, 354, 357, 358, 361, 362, 363, 381, 385, 386, 390: n = A,T,C or G
  misc_feature 405, 418, 420, 422, 432, 435, 439, 454, 463, 467, 471, 482,485, 489, 492, 493, 501, 504, 506, 508, 509, 512, 518, 530,533, 534, 538, 557, 560, 562, 565, 571, 579, 582, 583, 590,593, 594, 597, 603, 605, 610, 611: n = A,T,C or G
ttngtactgatttnaaaaactaatcacttaaatgtgccacnccgcaaaagagaaaaccaagagtggtccacaaacacatgctcctttctcttcngaaggttttacnanncatngtaatacataacccantcttttantantaaactnaannggccantngaaacaaacagttttgagaccgttcttcccaacctnntnaaaatngggggggcagggtatnnggggataatatcnnttatatccgacntgancttnctgggcgaaacttgggtgaccttgnnannntccagcttntctgcttgtccactnncttttgatgacttgcaccaggnattngctgcttcttttgnacgnacnngtnnnttccgccctaggcgtggntagnnttanaaagctttaaacttngaatggggctttntnanggaacccatnatnaacnattgggcggtttttnacgatactntaanatanttaaaagggcnccntttncannttgttttncanantnngtnaaatantttttttctatnatnntttntaaatcttaaacttaaatnctncnccntgtgtnaactcctntannattgggnatnntcngacctntntatgnnt

SEQ ID NO: 459 - DNA, 597 bp, Homo sapiens
  misc_feature 29, 48, 66, 67, 85, 86, 87, 115, 126, 130, 175, 176, 179,180, 181, 183, 192, 194, 196, 198, 213, 220, 224, 229, 235,238, 246, 247, 248, 256, 264, 279, 280, 281, 282, 283, 298,304, 312, 316, 317, 321, 331, 336, 344, 347, 371, 372: n = A,T,C or G
  misc_feature 376, 381, 393, 403, 409, 419, 420, 423, 462, 465, 467, 472,473, 474, 476, 479, 481, 485, 486, 488, 489, 491, 499, 529,532, 535, 538, 547, 558, 562, 567, 568, 573, 576, 580, 583,588, 590: n = A,T,C or G
ggtacgcggggactgcaaggcggctgcanagagaggttgtggcgctantttctctaagccatccanngccatcctcgtcgctgcnnngacacaccgctctcgccgccgccttgantgaccaatatnaccnttcgtggcaccctaaagggccacaacggttgggtaacccaaatcnntannncncggatgttncngnanatgatcctttccgcntttcganatanaaccntcacantgntggaaacnnnccagggtngaaaccanctatggaatatccannnnngtcctttgcggggtnactccnacttgtgngagnnattntggattattnccctnatatggcncanattgcccatctaagggatcctggnnatgnaaccnttgcgcctttgngtattttacnaacttngatcccctcnnaangggattttgtgggccatacctcatgaattgcttgaaagntgncnttttnnntntanantacnngnnanaattgctntctggaatcttaatataaaaccattaaagnttnggngantacctgggngatgtgaaaanacantgctnnggaantanaccnatntaaangngtttttt

SEQ ID NO: 460 - DNA, 607 bp, Homo sapiens
  misc_feature 13, 23, 24, 46, 68, 86, 89, 93, 104, 110, 113, 119, 122,128, 130, 132, 149, 151, 158, 159, 169, 174, 175, 177, 188,190, 201, 210, 237, 238, 253, 256, 257, 263, 312, 334, 336,340, 342, 343, 345, 346, 349, 350, 357, 361, 364, 371: n = A,T,C or G
  misc_feature 392, 397, 405, 414, 426, 428, 430, 431, 432, 434, 445, 457,464, 466, 467, 475, 480, 481, 483, 485, 489, 490, 492, 495,504, 505, 508, 510, 511, 531, 539, 542, 553, 565, 572, 575,581, 592, 593, 594: n = A,T,C or G
accgcggggctgnctctcttttnngactcagcccgcctgcacccangtgaaataaacagccatgtggntcacacaaagccgtgttnggnggtnttttaacatgnacccanatnaaattnggngccatnantnggatcgggggacctccntngggaaannaatcctccgncctcnngntctttgctccntnaaaaaaatccncctacaacntcaggtcctcaaaccgacagagcccannaaacatttaacacanttnnaaaatntggtaagcagcctttttttatttttttttcaaacttccttcattatccntaaaaccatttttctctctttnantctntnncnnttnnacttaantttntcntctcttnttcttaattatacatataccntattnatttttcntggtaaganaaaaaaaagaananannntntttatcccgtngggccccaaaantttcggncnntttggtcnaaagnntngnaaanngnaantcttccctnnggntnncttaaataaatggaagggantgctcttnttnatttatacacnctatgattatanggggtgntantaacantcggggaaaannngttttggattttt

SEQ ID NO: 461 - DNA, 612 bp, Homo sapiens
  misc_feature 3, 16, 19, 36, 66, 86, 92, 95, 102, 103, 132, 140, 145, 154,160, 162, 166, 168, 178, 190, 202, 205, 206, 207, 210, 211,213, 215, 221, 222, 228, 229, 231, 234, 237, 241, 248, 249,263, 265, 275, 294, 301, 302, 305, 312, 316, 336: n = A,T,C or G
  misc_feature 338, 339, 341, 344, 347, 348, 351, 353, 354, 360, 363, 369,372, 373, 380, 385, 390, 403, 407, 409, 415, 420, 425, 431,434, 439, 444, 447, 451, 452, 465, 468, 469, 481, 484, 486,491, 494, 499, 503, 505, 512, 516, 518, 520, 524, 525: n = A,T,C or G
  misc_feature 530, 542, 544, 545, 553, 557, 561, 569, 572, 573, 580, 582,595, 597, 603, 608: n = A,T,C or G
ggnacccccgagtccntgnctggcatactgagaacnaccaaacacacacccaagctcggtctcctnttggtgattctggggagcanatcttnatnaagggcnnccgtcccatgagagggggaaaacatcccntctcttgnaaatntaaggaaanttttcncntatnantctgtaaagnagaatttcctgnatttcagactantgnnnaanntnancccccnnagaganntnatntcntttngggcctnngttcttaccttgananttatataaangaaagtgtttgatatattnattgcannagngttcaanaaanaaacatcttatgttatgtgnanntnaantannctnanntgaggnttnttaatnganngttttgnaatgntattnaatcactaggttntttntnatgcantaaanccttntatttnatnctttnatttnctnttgnnaaatgtgagatantanngttttttttttngcntnctggnatnttggntatnantataacntatntncntatnntgtantattggattttnannggagaatnttcntaantccttttnctnnttatttntntattgattttatncncaacantcttncttt

SEQ ID NO: 462 - DNA, 700 bp, Homo sapiens
  misc_feature 11, 19, 21, 46, 64, 73, 80, 89, 90, 93, 100, 103, 108, 120,121, 124, 126, 127, 132, 142, 144, 157, 161, 170, 171, 177,183, 185, 187, 196, 200, 202, 207, 208, 217, 226, 229, 230,231, 233, 236, 238, 246, 249, 250, 253, 267, 270, 281: n = A,T,C or G
  misc_feature 292, 293, 296, 314, 318, 319, 328, 334, 341, 358, 364, 365,372, 376, 379, 380, 381, 385, 387, 388, 390, 402, 404, 413,414, 418, 426, 427, 430, 435, 442, 457, 469, 477, 481, 491,494, 500, 504, 505, 520, 524, 526, 531, 534, 557, 566: n = A,T,C or G
  misc_feature 572, 577, 579, 606, 609, 611, 621, 631, 632, 640, 643, 646,656, 660, 665, 666, 672, 695: n = A,T,C or G
cgagcggccgnccgggcangnacttgaggcattacctcctctgagncactgaagtcataggggncgtatgaanccccatntttggcatnnggntggcganacntactnctcttgctattnngcncnnggtcntcttggattntntgctcttcatctnctgnctatgaatnnttctanctaaantnantacggttantgtncntcacnntaaccttcnaaaaataancannntntgncngcatccgnaannacnctcttctattctgnagngacacagctantgctcatacgnnggnttctgatgggctgtggcnatgnnaaatcaaangatttntagagtnccggcttgtaacttggngaaganntggtcgncggnacnnnccananncntattccttgccngngcatgtctnnaaancatttttnnaanggtanggggggntcgccttccgttganatgaaacgctanaatatttnaaanccctttggtnacngcgggngctnntgtatggagccctcntttntntaaanttngggggtaaaataacccttttgcnggggcttanccggcntgtcntntattatatttacaccgaaggggccccnctntntttggggcanggcctttttnnttttaaangcnttncctgtctccnctanggcanntttganaactccggcctgtttaaaagccnatttt

SEQ ID NO: 463 - DNA, 1040 bp, Homo sapiens
  misc_feature 28, 37, 46, 52, 54, 60, 69, 72, 96, 112, 118, 120, 126, 128,130, 142, 195, 201, 218, 223, 228, 231, 234, 251, 255, 258,261, 271, 274, 275, 276, 280, 283, 288, 293, 301, 306, 314,315, 321, 322, 332, 333, 336, 341, 347, 349, 350: n = A,T,C or G
  misc_feature 356, 365, 370, 412, 433, 439, 440, 445, 454, 455, 456, 492,508, 509, 513, 527, 535, 542, 547, 561, 564, 585, 590, 601,605, 613, 627, 632, 643, 674, 679, 698, 715, 727, 731, 735,736, 752, 758, 769, 774, 778, 785, 794, 795, 815, 825: n = A,T,C or G
  misc_feature 842, 843, 844, 845, 861, 864, 868, 872, 889, 893, 908, 910,922, 937, 940, 946, 948, 966, 971, 1003, 1005, 1009, 1013,1023, 1032: n = A,T,C or G
acttttttttttttttttttttttttgnacacatttnaagggtttnatttananaaattntatgttaanccnttgaaaatgaggaaaagatggttnacaaaacccaagattnaatgangnttgaancngntaaggcaaagtnttttctttggttccggaacacccggaagagccatatgcatcctctggaaccancctttnttactaatggcatcttncacanacttnggnaanaagcaccacggcacttngaanatnaanttggaaaaanaannntttnaanaggcncattncttggggntgatncccgggtnnccacannttcttagggnnganacctncatgancnnctgatncgacttttnctttnggagggggtggaaacaccaggggacccctatgacactggagncgaaacatgcatccattggcnaaacannggatnctggtgatnnnagggaaaccatagttcggcctgttatgggggctcancctggagcactggaanngggntacaggctttttgngtgactgntcaccantgggnaaccacagggactnggntccatgaaaacttatgtcaangtcanttttcccccgnttancttggccngggaccacgcttangggcnaattccaggcntttggggggccgttctattttggatcccgancctcnggtaccaagccttgggccnaattcttgggcattagnaggaccccctgngttnaaanntggattttcccccttncaattncccccacaaanattanaaancccggtnaacattaannttggtaaaagccttgggggngcccttaaanggaggggggcctttacnnnncttttttattggggtnggncctnactnggccgggtttttccaanaacngggaaaactttgttntngccaaccttggntttttttggaaattnggncaaccntncgggggggaaaaggcccnttttnccttttttggggcgcctctttccccctttggngngaantaantgaaaacccnttggggggnggggggcg

SEQ ID NO: 464 - DNA, 577 bp, Homo sapiens
  misc_feature 11, 15, 16, 20, 21, 26, 27, 31, 34, 37, 39, 50, 53, 61, 62,71, 72, 75, 84, 87, 90, 95, 104, 105, 114, 116, 118, 121,122, 127, 138, 140, 144, 148, 157, 160, 162, 167, 170, 186,200, 216, 225, 227, 232, 245, 248, 250, 257, 268, 273: n = A,T,C or G
  misc_feature 274, 281, 282, 283, 285, 289, 299, 300, 301, 308, 344, 349,351, 364, 368, 374, 379, 384, 385, 386, 397, 401, 404, 406,410, 413, 416, 420, 422, 439, 444, 463, 468, 469, 486, 492,497, 510, 512, 519, 527, 530, 533, 546, 558, 562, 573: n = A,T,C or G
  misc_feature 577: n = A,T,C or G
ggacctcccgntcanngctnntcatnncccntcnccncngcctggtggancangctgaccnnatcctcttnntgnatggaggcnctntcngggangggggaacnnaccatcaantnanggnnaaaanggggtgctaangngccncggngcacgctcntgnanaagcnccntaatgaaaaccttgtnagacctgcgcactnacatctccctcccttntcttctctnangtggnggagaaccacagnttncngagacangcaggctgccnccagnntgagttnnntnaaanttgccttgannntgaaacntccttttcaatctcctcattgatgatgcagtactgncctangnactgtgacccatncacnagtggnctttngaagnnncctgtttcttnttcnctntnttcngangancctntncccttcatttcgccggnccctnataacacggagaaaaaacnaagcnnggtccccagtgtgatgngccttntcagncactaactgttcncntgtaccngacccgcntcnatngaaaggttcaatncaacacactggnggcnattctaatggncccn

SEQ ID NO: 465 - DNA, 585 bp, Homo sapiens
  misc_feature 2, 5, 10, 17, 19, 54, 82, 88, 93, 128, 133, 146, 154, 159,160, 171, 177, 180, 182, 183, 184, 192, 196, 202, 211, 213,224, 233, 259, 278, 291, 295, 298, 303, 305, 308, 324, 330,339, 344, 354, 355, 358, 380, 397, 399, 416, 427, 434: n = A,T,C or G
  misc_feature 451, 476, 486, 488, 508, 515, 516, 531, 535, 547, 554, 555,565, 577: n = A,T,C or G
gnggnggccnggccgangngcacactttggatacactggatgctcatgtcaaanggggtcaactcatcttcactctgagatncaaacntaacncttggcggcatcaaccaaaaaaatcaaactatctnttccngaatatttatagnctccactngcttnnagggtttgttntggttnttncnnngcttcttnatcnccctcngttttgtgntntgactcccacnctgacatgnaggctactgctcactttggtgcatgnaaacgaccaacttggacanaaaacccccgcgntctnccngggcngncgntcgaaagggctaattncaactnactgaaggncgttnctaccggatnnganctcggtgcccccatcggcattnatcatgggcatggctgntnacctgtgtggaaattgnttacggtcatnattgccncaacatactatgcgggnagcataaaatgtctaagccttgggngcctaatgantnaagcttacttagattgaatngcgtagnnctcactgtccggttnccanaggggaaacccnttgtgcnngctgtatttncaatccggtcanccccgggg

SEQ ID NO: 466 - DNA, 555 bp, Homo sapiens
  misc_feature 10, 12, 14, 16, 23, 80, 88, 126, 127, 133, 134, 147, 156,158, 160, 162, 176, 187, 199, 200, 203, 209, 215, 216, 220,221, 227, 232, 235, 236, 239, 240, 245, 253, 262, 287, 293,295, 304, 313, 314, 316, 320, 324, 330, 332, 335, 336: n = A,T,C or G
  misc_feature 338, 340, 354, 364, 375, 388, 391, 394, 399, 401, 405, 407,409, 423, 425, 441, 453, 454, 465, 487, 489, 493, 497, 498,514, 538: n = A,T,C or G
ggtaccaaancnantnacaggangggcgggactaccggaactacaggctgttatcccttcccgaatttggaattttgtangaaattantgtttctatggaagaactgcataaattaacaagaactnnaatatnncacttaattcggncattggatncngngntggatgatagcatntggctgagccncctggtttgctnntanaggaantggatnnctannggcccntgaangannganntcctntcataacncatgccacngtagtcctcactggaattggagcanatgaanancttgcacgntattttcgnnancccnttcngtttcncncanntngnctgtgacagaatgnttatggaaanaatgatggaantgggtccaattanttntcnaaatntnggtngngntgacacagatattntngatcatggataagacnctaatgttcctnnctgggtggacntgtgctgccttattaatctctngnagtnggannaagggactgacttacncccaggattggggaaaaaggcctntcgcttccggggggact

SEQ ID NO: 467 - DNA, 641 bp, Homo sapiens
  misc_feature 2, 9, 10, 11, 15, 23, 27, 30, 44, 54, 59, 60, 61, 64, 66,73, 74, 75, 77, 89, 92, 110, 118, 121, 134, 136, 141, 142,143, 147, 150, 154, 160, 165, 166, 168, 170, 173, 175, 177,178, 189, 190, 192, 204, 218, 237, 242, 246, 251, 252: n = A,T,C or G
  misc_feature 253, 265, 266, 268, 270, 273, 284, 287, 295, 299, 301, 302,303, 306, 310, 318, 321, 326, 328, 329, 330, 331, 339, 341,342, 346, 350, 353, 354, 362, 363, 364, 365, 370, 379, 384,386, 405, 406, 407, 408, 423, 432, 442, 460, 478, 490: n = A,T,C or G
  misc_feature 493, 500, 507, 514, 516, 528, 534, 537, 562, 569, 577, 588,602, 604, 617, 619, 638, 639, 640: n = A,T,C or G
cngcggccnnnccgncgggctcncccnttncccagaaaagcggnacttgctgcnagggnnnaangnccaaagnnntngtgcctgcgtgnacngacacccttgaaacgatntatgtatnatngctacaggcatgncngccannnttanacnccanaggaangctgnntncnctntntnngaccagcgccnnantatccttccacngataaggcgtgcancttttgtctctaccagatnatganctgnttatnnnttgataaaatgnncntntanaagtggatgancancattgaangganannntgnttgngggatatnganggacntnnnntaaaagantnnaaanacgntgnntaccacannnnaaatnggcgagatntgctngngctcgtcctactgatgacnnnntgttaccagtggatntttgtcaangatcaaagantggcgggacgggacgaangatctaccaacgtaggcnccccaccctatnggngaactcnaattcantggcggncnttcaagaggacnccaaancgnttccagctaggcacaagctggtatntccctgntgcggganctttatcccanaaaattcacccccntntactcccaggctnanggttaaagggggggtcccnnna

SEQ ID NO: 468 - DNA, 631 bp, Homo sapiens
  misc_feature 4, 5, 6, 7, 8, 11, 12, 13, 15, 23, 29, 34, 35, 37, 42, 51,52, 55, 60, 61, 62, 66, 68, 73, 75, 76, 81, 82, 86, 88,91, 98, 108, 110, 111, 112, 120, 127, 150, 156, 160, 161,166, 169, 170, 172, 173, 177, 185, 186, 187, 190, 195, 196: n = A,T,C or G
  misc_feature 199, 202, 205, 206, 209, 210, 211, 216, 230, 234, 245, 252,253, 257, 270, 271, 275, 278, 279, 286, 289, 302, 303, 311,314, 315, 323, 326, 327, 333, 342, 348, 360, 368, 372, 387,412, 415, 484, 489, 494, 503, 508, 518, 539, 543, 576: n = A,T,C or G
  misc_feature 586, 609, 612, 614, 620, 631: n = A,T,C or G
cgcnnnnnccnnnangacctatncatgcntatgnngnatgtngttgtgatnntantaccnnntccnancatgngnncgacnngtgngngancatactnggtctttttncnnnctatggancctgganggaaggatccacaccctaagcanggaggngctnngcganttnntnnctanagacctgnnnagnttgcnnctnaanagnnaannnaatgntgccaagcatcaantgtncatggacatgntcgcgannatanataccacactggnntccnttnntaatatngcntcttcggtgcaannatgggtgncannacataatnctnnggacgntgtggcaantaggantactggtgcccnttaggcgnatgntgcacccgagtcgangaagacccactgctctggcaacttntgngattgatttatactccattacactcttttaaaactggctgtttcccactgggttaatctgaagaacaangctcntggtngaatagctnggccnaagtttaaangcacttctttatttggatgtnttcngcttactatggtaataccaaccttccatggggntttgggctanttggagcgaaattcctttgtcanatntnggtaangggaatacagn

SEQ ID NO: 469 - DNA, 654 bp, Homo sapiens
  misc_feature 10, 12, 14, 16, 21, 29, 34, 36, 64, 71, 73, 74, 75, 79, 80,86, 88, 123, 130, 136, 156, 158, 159, 166, 168, 174, 177,179, 202, 220, 230, 243, 245, 253, 254, 256, 257, 264, 270,271, 273, 283, 288, 290, 302, 311, 317, 333, 342, 346: n = A,T,C or G
  misc_feature 348, 354, 359, 371, 375, 379, 386, 389, 390, 391, 401, 407,410, 413, 423, 427, 428, 431, 448, 454, 465, 469, 471, 474,490, 495, 499, 500, 501, 504, 505, 510, 512, 514, 515, 516,517, 522, 528, 531, 536, 539, 552, 553, 554, 564, 585: n = A,T,C or G
  misc_feature 599, 600, 602, 604, 606, 613, 614, 619, 624, 635, 639, 645,654: n = A,T,C or G
tttttttttntngntnctatntttttctngggcngncacgtgcactttattgaatgacactgangacaggngnnngggnntaaacngntgcttctaggggcacgaccaagggggcaggggctncagcccnaacgtncagggcctgcattgcacaangnngatgcanangttgcnagntntgggcaggaactaaggaaccccncttgacccgtattatctnaaacataganttggtaggactgntncataaccnnannccatcancccgannantcccatggtnatgangntgcccaaaatcngggcccatnagttcncgcactttgcggtggnggcattaancccngnccccantaacntttcccaccatntttntgtnccctganttnnntggagaaagngaatgnttnaanatcctaacanaagnntancaaaaatgaatgggtgntaacanggaccaaaatnatgntnggntgacttcgaaggtctnatttnggannnttnntcatngnannnnctttnaaaggntgngcttnggngggaccctcatannnaaaccttaanttttgcctaagactttttctnggctttggggaggnnancntnggataannttaanaaggngatttttgganatanaaggcntcattgttn

SEQ ID NO: 470 - DNA, 646 bp, Homo sapiens
  misc_feature 6, 7, 9, 13, 14, 15, 16, 22, 27, 28, 30, 31, 32, 34, 37,43, 46, 47, 53, 55, 56, 59, 66, 67, 73, 77, 78, 88, 89,92, 94, 103, 106, 115, 116, 117, 126, 128, 132, 134, 142,162, 164, 165, 179, 186, 189, 194, 202, 204, 227, 228, 229: n = A,T,C or G
  misc_feature 255, 260, 272, 291, 300, 305, 309, 311, 312, 314, 316, 318,329, 344, 361, 370, 371, 373, 374, 380, 385, 389, 390, 392,395, 404, 407, 411, 412, 421, 422, 423, 424, 425, 433, 434,439, 446, 449, 450, 451, 452, 453, 460, 466, 469, 475: n = A,T,C or G
  misc_feature 476, 495, 501, 525, 531, 534, 535, 546, 580, 594, 596, 603,604, 609, 610, 611, 613, 617, 623, 631: n = A,T,C or G
ggtacnntntcannnnataagngctgnngnnncncanaatganggnngtcatngnntgnggtgatnnccatcncggnnagctcagtcnnaananattatgganganaggctttgnnnggagtgatnancatnanctgggacnaactgagcatctctactcananntaataccgtgaganaggcacntangcacnagcttgtntnacatatgtccaaggctgtaggannnttgaatctgttgaatcaacgtgaatntgctnaatagtaatganagcttgtgaatattaggcntaaaggtgntggtnaatntnnancncnactgctccatntgaattatctactgngtgttacttactgaagntgaaatgtnncnntatganatatngttnnantgngcgttcgangangatnngcttttgannnnnatgtactnngtgcnactgaanacnnnnntctcacnctgatnttncaaaannggacctgcggaggatcacnctttanactttatctttatggggatcctgngacctngannttggaaaaaanataattacagtccctggcctaggacccatgatanctataatgggttcncncttcttnnccgtnnncnctcnaaggcnaatccatncctggcgggcgttct

SEQ ID NO: 471 - DNA, 722 bp, Homo sapiens
  misc_feature 13, 102, 124, 125, 137, 141, 154, 168, 172, 173, 183, 188,194, 195, 197, 198, 200, 204, 205, 206, 208, 214, 218, 226,230, 236, 244, 245, 249, 251, 258, 260, 262, 264, 270, 278,279, 281, 283, 284, 285, 289, 290, 291, 292, 293, 299: n = A,T,C or G
  misc_feature 300, 301, 309, 313, 317, 326, 327, 336, 338, 359, 362, 365,367, 369, 374, 377, 383, 392, 418, 419, 424, 425, 432, 436,437, 440, 442, 450, 454, 460, 461, 467, 471, 473, 474, 475,478, 490, 491, 494, 495, 504, 506, 513, 514, 516, 518: n = A,T,C or G
  misc_feature 532, 537, 541, 547, 561, 566, 588, 593, 600, 601, 603, 610,622, 625, 641, 643, 646, 648, 649, 661, 668, 673, 682, 689,712, 721: n = A,T,C or G
gcgaggtaccacnatcaccaaccaatacaagtttgaactggacctggggctctccctgcgcagccatcgcggcgttcctaccagaagcgtttccgcgcccgnccgactgaggctggaaagattnnggaagcgccctntacntgcccgggcggcngttcgaatggtctnattnnattacacttngcatnctgttnntnntngatnnnanctttgnactnagttgttntgtnattganggtacatnncttncntctttgngntntnttggtnattcatcnnantnnntctnnnnnttattnnntctttatnattnttantttaattcnntttttttcnanatatttgagttggtattaatngtnatntntnctttnttnaatttnatatttaanttctttattattgttttctatttttnnttttnntttatcntttnnttntnccttcttnaagntttttnnttatangatntnnngtnttactgtttttnnttnntcccactgntngtgcttnntntntatgctgtattttnagttntatnttgtcntctatttttttatnaattnttgttctaatcttgtcgtaatnttttnttaattnntnttcgttntaatttatttanttntattttctacactttntngtntnntatgtatcttantttttcnttgtntattatatnaaatatnatctatattgattgttctatccnctttttttng

SEQ ID NO: 472 - DNA, 377 bp, Homo sapiens
  misc_feature 35, 37, 55, 80, 81, 89, 93, 96, 103, 118, 127, 134, 153,154, 166, 170, 172, 187, 217, 226, 230, 245, 251, 255, 263,266, 268, 273, 276, 281, 286, 287, 296, 303, 310, 311, 318,338, 345, 346, 348, 351, 352, 356, 357, 364, 365, 370: n = A,T,C or G
gtacgcgggggtgggtgggattgaggtgtgccctncntcataaatacagactcanttttgcttgcacactctgaatcttnnaccgcatnctanccnacgactnacacaaagcacgtgngtgaggaantccaganttgccatggaaaaaaatannattgttatcatnattncnccttgtgagcccttncctacactctggccaaaatttccatattanaaaccttanccanaaaggacaaatatgnctctcngacncattctgnccnanacccnctncagangttgnngtgaccaantaatctngactcannacatttnaaaaaaccctctatataaanccaatannancannaaanncctggannatcanttattga

SEQ ID NO: 473 - DNA, 264 bp, Homo sapiens
  misc_feature 8, 33, 34, 48, 51, 60, 63, 98, 109, 117, 123, 125, 134, 135,149, 155, 159, 164, 165, 168, 188, 192, 202, 216, 224, 226,227, 230, 235, 241, 255: n = A,T,C or G
taggtccngccgacgtacactcgaaaccaaatnnctaaaacttggttngcntaaaaaatngtngttgtaacattaaaccataacctaatcagtgtgtncactatgcttncacactanccagtntnctcacactnnttctggtttcaagnctcaangccngacanncanaagggcttggagattttttncttnacagtacaantctatcagcaactntgagagcntnnttnatgtnggtcangcaacagatctgtntctgcaagg

SEQ ID NO: 474 - DNA, 340 bp, Homo sapiens
  misc_feature 6, 13, 16, 17, 34, 47, 55, 70, 76, 88, 95, 108, 115, 118,130, 139, 140, 144, 146, 150, 152, 163, 171, 173, 174, 179,180, 181, 182, 190, 192, 195, 205, 208, 209, 210, 213, 217,218, 220, 232, 238, 240, 255, 259, 260, 266, 269, 274: n = A,T,C or G
  misc_feature 277, 279, 283, 286, 290, 296, 298, 305, 311, 314, 315, 317,335: n = A,T,C or G
ggcggngacgacncgnnccaacgtgtgccctatnaactctccatggnaatccccncgcctaccatggtgnccaccnggtgacggggantaaaggntcattcccgatanggagccntanaaaccgctaccngatcacagnngaangnagtntngcgctcatatnttcccacncnngaccnnnngaggtagntnacnactgagtacntgnnnacntaanntntggctcttttgncttacncncaaatggcgaagtgncacnnactggnggncgttnttntngatncangctnggatcnantcttgcntatatnganntnattgcctttttcttttgnaatat

SEQ ID NO: 475 - DNA, 235 bp, Homo sapiens
  misc_feature 7, 10, 12, 36, 38, 44, 60, 64, 81, 106, 111, 115, 123, 137,141, 147, 161, 170, 185, 192, 193, 196, 199, 200, 201, 211,223: n = A,T,C or G
cgtgcanttnantgcataaaaaggcctctctccatnanactcancactttacagatgtanaatntataagcatgccaaatngtacttatctgccacatacaaagcntcatnccangtgctagngaggggaaaaaaangtangagatntggccctcaaggancaccagatnttaatctacctaacnaagtccnnagngtnnnccaggcatgnaaaaattagtgntgctacatggat

SEQ ID NO: 476 - DNA, 514 bp, Homo sapiens
  misc_feature 3, 21, 26, 33, 35, 36, 37, 47, 50, 53, 54, 59, 66, 70, 72,73, 92, 115, 132, 134, 136, 139, 140, 142, 162, 164, 166,185, 191, 202, 203, 218, 228, 235, 240, 242, 244, 252, 278,280, 295, 297, 303, 314, 315, 318, 319, 321, 340, 349: n = A,T,C or G
  misc_feature 353, 361, 367, 377, 384, 387, 393, 395, 406, 412, 422, 423,430, 436, 438, 443, 445, 448, 458, 460, 462, 475, 476, 477,483, 487, 512: n = A,T,C or G
acntctttgacattttcaaantgaanaacctgncnnntttcatttgnaanggnnccttntgcaccnactngnncaagtgatagaaaggtggngagacaggattggatcacaatangacataacccagaaggntncnttnntnatattccttaaaacaaatancngntaacgccggaatttgttgnttcaanggcttccttcnncggcctggaagttanaggaattctngtaaaangcggnananagaaacancccccaaggaacctcaaaggcctaantntggaaggaacccggncnatggcnggatcaaggcnnttnntnctccgccgcaccacccctntgggggatnattncacctggnggccgnctactggtgntacctcnttncacctngnggaatatggtngtaacngttgcttgcnngaaaaantatccncnccaananccncaacatctancngnaggatcattgtannnctgcgngctnctaatgagctactacattatttgtngg

SEQ ID NO: 477 - DNA, 451 bp, Homo sapiens
  misc_feature 4, 10, 20, 31, 38, 40, 44, 47, 82, 100, 103, 108, 109, 113,117, 120, 134, 138, 156, 180, 183, 191, 209, 211, 215, 221,222, 230, 242, 243, 251, 252, 256, 257, 268, 282, 284, 320,339, 344, 352, 372, 401, 407, 414, 418, 423, 428, 444: n = A,T,C or G
  misc_feature 445, 447, 450: n = A,T,C or G
ccgncgggcnctgccagcancggaccctcanaagaaancncatnacntcagactggttctttctccatagctcctggatgtncagtatgtatcatgattnttnacacnnaatnaatnttnaccaattcaaaatnccgnagctatatgagtattctnataaccaagaatacactacaccanctnatgactgntaaaaaaaaaaaagatgnantccngccttnnttgggacngaaattcatatnntacaaagnnggcnncacccctctanataaaagcgttgangnaggtctgatttaaatgctgcattcccttaatgctcntttaaaatgaaacacacanccccngaatacantatgttttgaaaagaattcnttagcacatctataccattaaaatattancaaagngtattgncatngaatnaatgngtccttatagggcctnngncgna

SEQ ID NO: 478 - DNA, 647 bp, Homo sapiens
  misc_feature 36, 76, 89, 92, 96, 100, 105, 111, 119, 122, 129, 138, 144,145, 163, 173, 178, 191, 194, 196, 203, 224, 231, 241, 248,258, 267, 272, 282, 285, 292, 296, 297, 299, 306, 308, 310,315, 324, 326, 329, 338, 341, 349, 357, 358, 359, 372: n = A,T,C or G
  misc_feature 376, 387, 392, 399, 400, 413, 418, 428, 430, 431, 439, 449,460, 475, 492, 502, 512, 518, 521, 542, 560, 561, 575, 579,581, 587, 600, 603, 607, 610, 612, 622, 644: n = A,T,C or G
acttttttttttttttttttttttttttttttccgntttttttttttttttttttttttttttttttttttaaggntttgctgctttanacncagnaatnatttnttttanatactaancanttacaanattaccctntaaaannaaatccattttttaaggnctcataaggnaaaanaaacttcataatnttntnctttcanattacccagtctgataaaccntaaacancttaaaactntggtaanagtttaaaanaaaatttanaaaanaggccctttnaantcacctnctgnntntaacttnananttaangttacttgnanatntttcatttnatnaaaggttntcccccannnaaccaaattttcntttnatgcaaacccncaaanaaatttnngttccaaacactnttttntggttgaaananntgcaaaanaaaccctaanttaaaaaaatnttttgaaaaaaaatnaaaaacaaaaacccccnaaattgaaancatttacaancccttnaanaaggcctttcaatgtaaaaanaaaggttttaaacccctnnttttttcaggtaanggantnaaaagncccaaaaaaaaantcntctnccnanggggaaaganactggaaggttggcatttacanatt

SEQ ID NO: 479 - DNA, 298 bp, Homo sapiens
  misc_feature 14, 61, 66, 86, 92, 116, 122, 134, 138, 168, 175, 177, 184,185, 187, 189, 206, 209, 216, 224, 241, 252, 254, 258, 259,263, 266, 268, 270, 272, 280, 290: n = A,T,C or G
cgcggcgaggtacncgggggagtgaagggtctgctgctgaaatttgggggcaaataaccgnagtangtttgttcctgtgccttggngagtcnccggcctactgggaacgggacttntaaaangaactatgtctngaangctgtggtcctaggccatttttgctggctntaagcgnangtctccnnancnatttggagcacacatcnctnttttaantggaaggnagttttctcccgaaaanaaacttaattntntttnngctnganantncncttattanatttaataanattagaac

SEQ ID NO: 480 - DNA, 128 bp, Homo sapiens
  misc_feature 17, 48, 49, 53, 61, 65, 70, 72, 75, 93, 98, 101, 105, 120: n = A,T,C or G
actcgggactgtgtcangaatgatggaaaccaaatcatggagagtttnnttgncaatatcnttcngcaananaanaattccggtacagattcnttatnagntganattggcatgtgtttngttacact

SEQ ID NO: 481 - DNA, 160 bp, Homo sapiens
  misc_feature 4, 19, 67, 72, 74, 85, 90, 92, 99, 108, 109, 110, 120, 124,140, 149: n = A,T,C or G
acgnggtcgaggtacacantgggggctcctcatacatggcctcacattgaggcaaccttaactttgnctaananacttcatcttnatacntnctcgccntgagaagannnctgaccttanattngatgatggggcagccngtggggtantaaatcgtgaa

SEQ ID NO: 482 - DNA, 548 bp, Homo sapiens
  misc_feature 42, 56, 70, 71, 107, 114, 132, 142, 149, 157, 166, 169, 178,188, 190, 192, 194, 199, 203, 228, 231, 239, 244, 262, 278,281, 283, 288, 293, 296, 298, 301, 304, 307, 324, 326, 327,331, 336, 337, 339, 347, 348, 350, 358, 365, 369: n = A,T,C or G
  misc_feature 381, 382, 384, 393, 394, 399, 400, 401, 402, 403, 420, 422,423, 428, 429, 437, 440, 445, 448, 451, 452, 463, 465, 475,476, 482, 510, 514, 517, 522, 525, 533: n = A,T,C or G
gtgtgtgtgtgtatgtgtgtggtgtgtgtgttttaagtttanccttttgtttttgntttttggttggcannaaccgattttaatgactagcttttaaaaatacagtncagcaantagctgctgaatattgtntagcatgtcncttgaanctacttgnatctacggnggngctcctaanggaccacaantncntnatttngganagaggtgtggaaatcttgtattgcnacncctggaanactgnttgactttttagagtggnggaaaaaccaatctgngangnacaancttcnttngnccnttnatnaaccatataaatgcttnanntggnctttnnancccaattnngnaaaatgtnggatcanatanaaccttattggnnancttcaatgnnggagnnnnntggccataataaattananngtttnntaaaattnctnaaaanttnttnnttaactttggncncttgaactgnntccatnccaaacattttcaaatggggttggggcnttanctnaaaangtngaaaactnttcctctatggaaaa

SEQ ID NO: 483 - DNA, 408 bp, Homo sapiens
  misc_feature 3, 7, 37, 100, 106, 110, 111, 116, 119, 136, 139, 151, 164,183, 203, 204, 205, 207, 208, 209, 215, 227, 252, 253, 256,267, 273, 274, 278, 292, 309, 321, 329, 331, 341, 346, 349,362, 363, 376, 384, 397: n = A,T,C or G
acntccntcttccaactgcttgccagcaaagatcatnctctgctgatcagggaggaatggcttccttatcctgaatctaggcctttcattttctatcgantccganggtnnaaccncgngggtgatggtcttcccntanggttttcaccanaaatctgcatttngggggggctccacctcaanggccgtatcgaaagggcccnnnannnaaacanttgatacccctncctatccaaaaataagtttaactgnngcnttgaaaaattnccaganntggngggggaactttaanattcctccaaaaagctngaaagaaccaantagatgtnanctggggaaantaacnaancccccaatgccanngaaaacctaaacnccttggcnttaatttaacccngtggggcaacc

SEQ ID NO: 484 - DNA, 648 bp, Homo sapiens
  misc_feature 5, 6, 28, 30, 52, 54, 129, 138, 140, 141, 163, 174, 180,192, 196, 219, 238, 250, 252, 279, 293, 298, 315, 322, 335,343, 353, 361, 365, 374, 388, 400, 414, 417, 426, 427, 431,432, 449, 460, 461, 466, 468, 477, 481, 482, 493, 494: n = A,T,C or G
  misc_feature 495, 514, 519, 523, 531, 534, 535, 537, 539, 540, 554, 567,572, 588, 592, 598, 600, 618, 622, 623, 627, 628, 629, 638: n = A,T,C or G
acttnntttttttttttttttttttttntnaagggtgataacgtcttttcananatcatagcacatgaagaacccatggacactacacagactatgaacagttaccaaaaaaaaactcgtgactaaagnggggattancnncaaaaaaaaaatttccaaaggngaaaaattggnaaatcnggaatttttacnaaangttaaaaaattatttatcttcanccaaaatgaggccccttcncattcccaaaancnttgctttcttctcctttcgttcttgcncgcgtttcttccgntgctnttcctttgtctggaaanggggttntttgtaaattttnttgaaaanttaattctgntgacattntganttaaaaaantattttctttaaantgcccccaaggntttaacttcctttnggngggtcatanntggnngggacaaaaaaactttntttaaaaaaannaaccntngtttttttntttnnaaaccgggatnnnccttcccccaatttggccnccttngagnggggaaanaanncncnnaaaaattcccccgnggagggggttttnaattnggggggccccaaaacnccancctccncnttttgggggggccccccnaaanncggnnnaattttccnaaaatttttg

SEQ ID NO: 485 - DNA, 444 bp, Homo sapiens
  misc_feature 9, 25, 34, 59, 68, 74, 77, 82, 84, 89, 90, 91, 96, 101, 103,110, 115, 123, 129, 135, 143, 147, 150, 162, 164, 174, 176,178, 182, 190, 191, 196, 201, 202, 209, 212, 218, 233, 242,263, 267, 271, 281, 287, 289, 290, 295, 296, 299: n = A,T,C or G
  misc_feature 326, 340, 368, 379, 385, 390, 400, 430, 431, 436, 440: n = A,T,C or G
tgcctaatnacaacatggatgactngcaaaggangggctctttactttaagcaccatanaaaaaatcnaacgcncanatggntnattgnnntcagntatgncnctgaatngaacntttggcantaggantgaaancatttggnaatntgncattaacatgtntnataaaaggcntngngtcnaaggaatnnacccnccatnnttgaaangcngttttncaactaggcttaaancactctacncttttccgtctgtgtccatcnttgnaaanactggcagcngtttgnanntgaannagnatgaagaaaaagatatgggagcttttncccctttttttttnctctggttaaaatcaaacaaaaacaaangtcaattggtntccacnacatnttaaaagccnattggtttggaccttgggccggggaccacnncttangggngaat

SEQ ID NO: 486 - DNA, 268 bp, Homo sapiens
  misc_feature 44, 73, 91, 101, 105, 107, 110, 111, 113, 136, 152, 158,172, 175, 182, 196, 207, 209, 213, 215, 216, 219, 223, 226,232, 233, 238, 241, 243, 244, 250, 266: n = A,T,C or G
acttttaagaaaaaaagcagggccttggaagttttgggttcttntttcctcccctgttgcaaatttctatggnttgggtttgggtggcggnaaaccgccgnttcntnctnnanggtggcactgcccacggtgggcnggcggtccctctctantctaanggggacccaccgtntanattctgnaactggaagtgtgnaaggtgaatangntcangnnggncttnttnttttanntcaanctntnnctcttntcgtgacaaagcatanct

SEQ ID NO: 487 - DNA, 143 bp, Homo sapiens
  misc_feature 4, 7, 8, 11, 13, 14, 21, 29, 33, 49, 56, 80, 99, 103, 113,115, 128: n = A,T,C or G
actnatnntgntnncccaatngatactgnttgnactaacatccactctngtatgtngctgagataacttactttgactgnctatttggatatctctcanacanaccttgaacnanataaaaaggacangtttgtggactgtgt

SEQ ID NO: 488 - DNA, 342 bp, Homo sapiens
  misc_feature 15, 50, 85, 101, 104, 117, 119, 123, 124, 132, 160, 173,188, 190, 195, 209, 212, 215, 218, 237, 238, 243, 245, 251,254, 259, 280, 289, 291, 294, 304, 308, 317, 326, 339: n = A,T,C or G
acccatgctcacacncacacacttccagttttatacagaatttttttaanggaaagaaaccaacccaaagtattgcatttgaggngacactccctgaaganttntatacagaggtantntacnngtttaccncagctgaaggttctttttattcattctntttttaaagtgancccatgatttggtgncnttccnagattatccccttngcnacnacncaagcaatgatatttaacnnaggtnangcatantcnaactncatatagagaaaaaatcgatnacgaaaatncntgnaataagactnaatnacttggccntaacaaggncttagtagatatntaa

SEQ ID NO: 489 - DNA, 165 bp, Homo sapiens
  misc_feature 4, 6, 24, 25, 37, 39, 46, 57, 66, 71, 74, 92, 113, 118, 121,124, 125, 132, 133, 134, 146, 154, 157, 162: n = A,T,C or G
ctcngngaggccccaacgctgctnntgctacactatngncaggatnaatccggtccngtgcggcanatggntantctcctctggccttggcngccctccttgttcgtggacanggganatntcnngtggcannnaggaaagctccntttttcanganctgcncca

SEQ ID NO: 490 - DNA, 490 bp, Homo sapiens
  misc_feature 5, 9, 10, 11, 16, 17, 19, 21, 22, 32, 34, 35, 43, 46, 47,54, 60, 61, 63, 69, 70, 71, 81, 82, 84, 87, 94, 96, 118,135, 152, 176, 191, 224, 233, 247, 250, 259, 266, 282, 285,288, 306, 308, 312, 321, 324, 328, 333, 335, 344, 346, 351: n = A,T,C or G
  misc_feature 355, 361, 377, 385, 389, 393, 396, 398, 403, 406, 407, 409,419, 421, 424, 428, 431, 435, 441, 442, 446, 458, 461, 463,467, 490: n = A,T,C or G
acacncgcnnnctggnntnannacgcaagctnannataggtcnggnnagcggcnctctgnnantgggtnnntggtgcaacnntntcncaggcangngatggtgcattcctcgcacttngctggataatgaaatcnaggatgacgatgccttnttcctgctgttctagggcatccangacaatgccaatcgntgtccttttcaaacctataccttccattttatnactccaagntagtacttgaggtnccnaagtctcancgatgcntggataaacatccacngcnaangaaaaagtaatgccaaananaaangactatgantcntgantacangngaaataaananttttnctcnccaacntgaccaccatagcganctttaaangagnaacnctncnttatnccnncnaaggacgtcntnatngtanagntgcnctcccnnaacnactgtgaacacngancnggancaagaatcctcccaaggatcatn

SEQ ID NO: 491 - DNA, 293 bp, Homo sapiens
  misc_feature 33, 36, 42, 76, 79, 84, 114, 119, 132, 135, 137, 141, 151,153, 158, 163, 164, 170, 186, 187, 193, 194, 212, 214, 220,227, 231, 236, 237, 239, 241, 245, 256, 258, 259, 262, 263,265, 268, 281: n = A,T,C or G
accacaaggatgtgaagcatatgaactctgcangantcctgnccacactgaggaattatgactactatgcatgccnagntccanaatgtattaaaaatgcacttgcttccttanagganagtctcatttggncgnangcgngtggctcatncntgtantcccnngcactntgggaggccgtaagcnngtggtnnatcttttgctcaggagtntnagactntccccgngcantatcnngnanatcncatctttacananntannantanaattgggcatcgngtatgcccccag

SEQ ID NO: 492 - DNA, 516 bp, Homo sapiens
  misc_feature 6, 28, 86, 91, 104, 108, 111, 114, 124, 132, 136, 137, 139,142, 149, 150, 156, 157, 170, 171, 176, 192, 210, 215, 221,223, 227, 230, 231, 239, 240, 244, 267, 280, 290, 294, 303,307, 312, 326, 327, 346, 360, 365, 372, 379, 381, 386: n = A,T,C or G
  misc_feature 392, 401, 407, 416, 430, 433, 443, 444, 454, 458, 459, 463,467, 485, 490, 499, 504, 505, 514: n = A,T,C or G
gtacanagtagccgtgatgtggtcattngtcctgatgccagccttgaagatgcaaaaaaagagggaccatatgatgtggtgggacnaccangaggcgatctggncgcnccngantctatctgantctgctgntgtnnanganatactgnncgaacnngaatacccgaagnngcctngatatccgccatcttntgctggttcctactgctntggtnggctcntnaaantannttttgganncaangtttcaacacacccttttgctanagacaaaatgatnaatggaggtnattncacctactntganaatcntgtggaaaaagacnntcttattcttacactgccnggggcctgggaccntcttntagtttnctctttncnatttnttgaancctctgtantggcanttgaatgtnggcgggtcaaaganaangctccacttnnttccttaaanaacnncacncagngaaattttgactcattcncttantaataaacngggcnnctaatgaancc

SEQ ID NO: 493 - DNA, 560 bp, Homo sapiens
  misc_feature 2, 7, 19, 29, 41, 56, 64, 84, 92, 114, 118, 131, 138, 144,146, 147, 149, 151, 152, 154, 200, 201, 206, 207, 216, 223,230, 241, 242, 244, 246, 251, 260, 270, 276, 280, 289, 295,303, 315, 348, 364, 396, 415, 416, 419, 435, 440, 447: n = A,T,C or G
  misc_feature 448, 450, 460, 462, 481, 484, 490, 492, 494, 505, 508, 513,530, 531, 539, 543, 545, 551, 554, 558: n = A,T,C or G
cngtggncgcggccgaggnacagcatcantgaaaaacacantgtcatgaaacacanatgctgtngcatgatgacagtcacaganccatgctnaattgctcaaagaagctcccancatnctacccaacggcnggagtanaattgntnntntnnanaaatttacaaacttcaatctttttttacatggtattttaccttttnntgaanntcattacanggagttngtataantattaggcggnntntncctgncagctcatnggaacccagnggatgngatnccaccccancgaggnggtttttntgttgtccggcnggatcatattcttggaaataggagcatctccantggccccaattctggngaaaggagaaccccttcaacccccatattttnacaggttgatttggagacnnaangcggggcaccttttcnctctnaaggagnnangcatcccccngngggttgctcatgggatggntanagggcntngngtgaaaactcnatncccanaattccctattgggggnntggccatntttncncatgcnccnaaanaa

SEQ ID NO: 494 - DNA, 719 bp, Homo sapiens
  misc_feature 3, 6, 14, 25, 40, 48, 51, 57, 69, 78, 80, 85, 126, 132, 137,140, 148, 152, 168, 171, 176, 179, 180, 191, 193, 194, 199,221, 228, 235, 246, 256, 265, 273, 275, 276, 280, 283, 292,295, 298, 299, 304, 314, 316, 317, 325, 337, 341: n = A,T,C or G
  misc_feature 351, 363, 367, 370, 376, 380, 381, 384, 389, 390, 407, 411,412, 415, 420, 428, 433, 437, 440, 448, 454, 456, 476, 478,486, 492, 495, 496, 497, 498, 499, 501, 503, 504, 508, 511,513, 514, 515, 520, 523, 525, 528, 531, 535, 538, 542: n = A,T,C or G
  misc_feature 543, 547, 548, 550, 553, 560, 563, 593, 596, 601, 602, 603,604, 620, 621, 626, 634, 639, 640, 641, 643, 647, 650, 653,656, 658, 671, 681, 683, 688, 699, 701, 702, 704, 705, 709,710, 716: n = A,T,C or G
ggntcncggggaanaggagttggantatgggggacgcggnaggcggcntanacaatnagttttctaggntgctttttngntccantttgggagatcgatatttgttcttaacgatggggaaaccantataanggcanaantgaatacntgangacggcttaggggaantgnacttnctnnttttgacgganannccgcntcaaggaaaggtaaacctcgcntttaagncaccttnaaagaggctangaacaccatnggaattagnatctgaantnngcanggntggatcgtnacnttnnagtgncctcgagtcntnncctattgnattaataaaccnattnataagaactngccctaccatgntganctntctccntacnntanttatnnttttaaatttatggctntcanntanggccntattgaancttancgtncgntgtctatntcgcantngatggcatattcgtttaaananatcaattnttaaanatnnnnnantnnattnacncnnntcganatnanctncantggntcntcannctcnncnctnttcttgngtnaaacaactttacttaatatgagattgggcntcnaacannnnttccctatgaaaattnnaactnactacacncacannnanattntanggntcnantgtcgcgtataantatctctacntntgctnaattaaacccncnntnntgannccgcgnccg

SEQ ID NO: 495 - DNA, 675 bp, Homo sapiens
  misc_feature 16, 28, 66, 101, 107, 225, 308, 319, 322, 324, 348, 349,370, 372, 381, 382, 383, 389, 394, 403, 405, 407, 417, 418,429, 432, 442, 445, 449, 455, 461, 464, 467, 468, 479, 480,482, 485, 486, 496, 497, 501, 502, 504, 507, 517, 529: n = A,T,C or G
  misc_feature 531, 533, 537, 547, 548, 557, 558, 567, 570, 573, 576, 578,587, 596, 597, 601, 603, 606, 607, 610, 616, 620, 624, 628,630, 631, 634, 635, 637, 654, 662, 666: n = A,T,C or G
actttttttttttttntttttttttttnggctcagataaattatttattatattctggattatccntggaatttttctggatatgaataaataacaatgtntctcanaaaaacacattttgaaaagccttataaagttaaaactttaaatgcttttcatcaaaatgttatgaccaataaaaatgccattcatgtatctcatctcactttctatacattttggagngatatgtatttatacatactgcagttggaaatagggaatgcttttttggtttcccacggtaggcttgcagggtttaaaagcanaagtcctgaanctntnaaggcaacataatgaaaagtattnnttttgaaaccctggagttttnanaatatatannnattttntgggngagggccantntntgtggctcanncctgtatcccnacnctttaaaagnttnagcnaaagantttttnganaannataagttcgannanaannttgggcatcnnaagnngnccncatcttttcntaaaaaaaaaantncntgancccatgggcnncccctggannccccactcntanagnggntngaggggaanatttgttgnncccncnaanngangcggcnaaancctnaagnannctnntntccaccctggaaaaagnggccttgnttcnaaaaaaaag

SEQ ID NO: 496 - DNA, 699 bp, Homo sapiens
  misc_feature 7, 20, 51, 102, 126, 137, 141, 143, 165, 188, 201, 202, 220,242, 269, 278, 302, 307, 317, 318, 328, 334, 345, 352, 353,362, 375, 376, 377, 386, 390, 392, 393, 399, 410, 412, 421,429, 433, 434, 450, 458, 464, 468, 469, 475, 476: n = A,T,C or G
  misc_feature 480, 485, 486, 487, 494, 508, 526, 529, 537, 554, 558, 563,567, 571, 573, 576, 577, 595, 597, 600, 611, 642, 643, 647,669, 670, 674, 681, 684, 691, 693, 697: n = A,T,C or G
gcgtggncgcggccgaggtncaagatttaccagaaagagagtggtgtgtanacatgcctggagcagacaccttggagccgctgacagaaggtgaagcattcnaagaaaatgtggaaacttttccgntgctctacacngtcnanaaacctgtccatttaatttcgntgaagctttgtctgatagataancaaatagacagtnnaagtaagttatctcagcnacatttggggagtggatgctgntgaattgcgatttatttgggggagccntatatgtanctgagaggtgggaatttttagatntaatntaagccatgnnggccaagttncatgantgcatcaatgntgttatnntgggaacangtgaatttctatnnntgtgggctngttngnngctttnttgataaaaantnaaggccccngtttactntatnngttcaatttgcaatcnttggtttnccttcntttnnaataannatcntcacnnnattcggngctcgtgggatttntcaaccttaataacctgnaanaaataatntgctgtgctaattaatnatcntagcngtgnttantngtnngcagcctaatggactatncntanccatttatctnattagtgttattagtgatctcttttgtgatnntggnatggcccttcgtgctatatttnntatntttaatnctnggttatnantggntt

SEQ ID NO: 497 - DNA, 673 bp, Homo sapiens
  misc_feature 77, 78, 84, 86, 98, 100, 110, 114, 119, 133, 138, 142, 145,150, 162, 168, 172, 174, 178, 181, 185, 200, 202, 211, 219,224, 226, 229, 232, 234, 237, 241, 242, 244, 247, 248, 253,262, 263, 273, 279, 280, 289, 290, 293, 310, 317, 325: n = A,T,C or G
  misc_feature 342, 343, 345, 355, 361, 385, 390, 391, 393, 396, 400, 414,419, 420, 427, 448, 449, 459, 485, 493, 495, 496, 499, 500,504, 520, 530, 537, 539, 543, 544, 556, 567, 568, 571, 572,577, 583, 585, 591, 594, 595, 599, 605, 608, 611, 617: n = A,T,C or G
  misc_feature 627, 634, 635, 644, 664, 671: n = A,T,C or G
ggtactttttttttttttttttttttttggggtttttttttttttttttttttttttttttttttttttttttttgnntccccncntactggtggggntngaactaaaantcangcctntgccttttaagctnaaggncggntgnccatntgctttttacgntgcctncatnancttncangggntttaaaaaccccccntnccaaaaaancccagggngggancnacnctngngangaannanggnnccccncaacttttnntgggtttganggggcnntttggcttnnctnttttaacaccctttttngaaattngcctgttnacttttttaaaggtcanngncaattcctgnggggcnttttttttagaacccgaatttggnctttnncntgngggnataagggtttatcnaaggnntttaaanaaaccccccgcaaggcccttnngggaaaaatntttttccccctttccaaaagggaaanaggtaaangnnggnncttntccgggcggccttttnaaagggcaanttcaacnanctgnnggcgtttttaangggatcccacnnggnnccaancttggngnaataanggnntacntggtcncgnggnaaaatntttccgctcnaattccnnaaatacatncggaaatataaaggtaaccnggggctnag

SEQ ID NO: 498 - DNA, 337 bp, Homo sapiens
  misc_feature 8, 9, 10, 13, 15, 22, 26, 31, 34, 35, 36, 37, 40, 44, 46,49, 55, 72, 74, 75, 76, 81, 83, 86, 92, 100, 101, 104, 106,107, 120, 123, 131, 134, 138, 142, 157, 159, 170, 188, 196,201, 208, 210, 212, 219, 222, 223, 230, 240, 242, 249: n = A,T,C or G
  misc_feature 250, 253, 254, 255, 259, 262, 266, 267: n = A,T,C or G
acgcgggnnngtngnagcctgngggncctantgnnnnatngatngnatnatcaantatacaataacctttgngnnntgtgncnaantggagngaatttgnnttncnnggtatcatatgcnctncagcatanggnaaanctgnaaagagctatgccanangactattagantggcaagcctctgatcanagcgttanagatnacgagananangggtgtnatnngtgcctnggctgtgccntncatgganngannnccanagngganntgtgtttatgacttggcaactcaattgcattggaagcaataaaaccgacttatcaagtcctaaatgtacc

SEQ ID NO: 499 - DNA, 217 bp, Homo sapiens
  misc_feature 7, 22, 61, 76, 85, 105, 113, 121, 126, 134, 150, 153, 164,166, 177, 178, 182, 185, 191, 195, 196, 205: n = A,T,C or G
cattganctccatagagacagngccggggcaagtgagagccggacgggcactgggctgacnctgtgcctcgctgangaagaatantttaatcgtgggcaaagganatcctaanaagccaanaggcntaatgtcntcatctgcttttattngtncaatctgtgtntngagaaaacttnngaanatncgcccntaanncaacgtgangaattttctgaa

SEQ ID NO: 500 - DNA, 254 bp, Homo sapiens
  misc_feature 4, 5, 8, 10, 11, 12, 33, 36, 37, 42, 50, 60, 73, 104, 105,116, 118, 130, 144, 145, 176, 195, 197, 206, 207, 210, 221,229, 232: n = A,T,C or G
accnnggncnnngccgacgtgctaacatgcttnacnnatcantatggagnctcactctgncacgcccagactngagtgcaatggcaccatctgtggctcactgnnagctctggttncncagttcaagccnttctcctgcctcannctcccaagatactaagaccacagccatgtgntaccgacacctaatagttntnttatatagnnagntggggtttcancaatggtnggncagtactgggtctaagactact

SEQ ID NO: 501 - DNA, 239 bp, Homo sapiens
  misc_feature 8, 11, 22, 23, 24, 32, 34, 35, 43, 52, 56, 59, 60, 61, 62,66, 77, 84, 107, 117, 162, 166, 174, 179, 185, 190, 237: n = A,T,C or G
ccggccgncgngctcagtcttnnntattacancnntcattgantataaaaantcanttnnnnttanccaataaaggncacttcnaaaagcaaacattcactcaggcnactaattccnccatatctcaaacatttcacttttgcctgatgccgcaagcctganaggngggtggcnctgtnccctanggacnggtccacatctagaacacatggctctatgctctcctttggggcttanac

SEQ ID NO: 502 - DNA, 233 bp, Homo sapiens
  misc_feature 7, 21, 23, 31, 33, 41, 44, 57, 68, 73, 77, 79, 84, 98, 104,109, 115, 117, 122, 129, 130, 133, 134, 138, 143, 150, 159,162, 167, 170, 182, 189, 194, 196, 211, 229: n = A,T,C or G
aataaanaccttatccgtggncncggccgangnacatgatncanattggttttgcanttattaacganctganctananatgtntaaatgcagcaganttatgnctgtnctgcananatgcngttaggnntcnntatngtatnttgatanaagaacatntgnttgancanatcagatgaatnatctgantaggntnctatttaccttctgnattttaacgaaaaccctnatat

SEQ ID NO: 503 - DNA, 230 bp, Homo sapiens
  misc_feature 25, 33, 43, 62, 69, 89, 93, 102, 117, 121, 130, 134, 142,148, 154, 161, 167, 174, 176, 190, 201, 210, 214: n = A,T,C or G
accccgggggcattccgtgtccttncggtgctnggcaacaaanccgtccaaaccgacacgcntggtatnctcgcggtgtccggcaaganactnccaagacanaccctattgactgangctnatgtgaatncaanggcctatncccttncccatncccactnaacaanaaacttntngaccttgtttaacnaatcattttantattaacancttntgaaaaggaacccatt

SEQ ID NO: 504 - DNA, 558 bp, Homo sapiens
  misc_feature 219, 276, 278, 295, 302, 309, 335, 347, 351, 354, 374, 375,378, 381, 391, 392, 397, 409, 418, 420, 429, 437, 440, 441,448, 457, 461, 477, 485, 491, 493, 501, 512, 517, 521, 523,541, 542, 543, 548, 551, 558: n = A,T,C or G
acgcggggggggtcggaaggggaaaacaactacggctgcggtgtggttggtggtgagatgacgaccttagtgctggataatggagcttacaacgccaaaatcggttacagccatgaaaatgtgtcggttattcctaattgtcagttccggtcaaaaacagcacgtcttaaaacttttactgccaaccagatagatgaaataaaagacccttctggactnttttacatcctcccttttcaaaagggctacttggtgaattgggatgttcatgagacnantttgggattaccttttnggaaaanaaattgnattaagtttgattttttactatactntatattatttantccnctngtaccattacttttaacctnnacnttnaattccatannaattnatgaattgaaanttctatttntnaataaatanccttgttnttnnccttttnttatataantaanattccttggggctttntattgcanttaagntnttttccgnagaataatccntctcncaantnattttgtttcattggttnnnattgnatnttctccn

SEQ ID NO: 505 - DNA, 502 bp, Homo sapiens
  misc_feature 346, 347, 423, 437, 466, 492, 495, 502: n = A,T,C or G
ggtactatattgtttaattactggaacattgtagtaagaatttatatcaggagtgtaagttactgaattttgttatttttcagaattcttgtgtgtttgattttctttatatgtttatatggattttaggaagagcttgtcaatttatattaaagaaaagctacattggaatttgcattgaatctgtagataaatttgttgggtattttgatcttcatattcagtattgctatatttgaatattgagtatatctcagtttattcagctctttgatttctttcagcattttaaataattttcaagtgtatagtatgtgcagttattttgttaagttcatttctaatnncttttttctaggatactattaatgaaattttaaatttaattcttattttgggtattcctataatataaaagtcctncccgggccggccgntcgaaaagggcgaaattcagccactggcngccgttcctaatggattccgaactcngtncccaagn

SEQ ID NO: 506 - DNA, 648 bp, Homo sapiens
  misc_feature 475, 478, 488, 498, 528, 529, 556, 563, 566, 569, 574, 579,607, 610, 630, 636, 639: n = A,T,C or G
actactaaattaataaatttattccacttttgaaatgacagccaaaaatccacctaattgattctcatttggcacgttcttctcaattctgttcactaaattaaaattactaaatttaaactgccaagagccatgatgttgtctgcacaagacaacattttccatcactttcagaaagttatatttggcatgttaaggaaaaaaaatataatcccacagcagcagctatttaaaataagacagccacaggattcatgcagaatattttaaatattcctgttgaacacaatgatttaattgattttttcttcacggatgatgctcccaaacatcctatatgcatccatggaaatttaaagatcctggaatagcgcttccatgtgggacatcttaaaaagatagtattttggcttcagtgagttacacaaatgaatcaccagtccttattaattcaatgggtctggttacagagtgnggnaatttcgtcnttaaattgcngaatttataaagaaagaaaattccggctgnnccccaaaacaagacaattcctccatgnaactggntgnatnaaagnagacntttcccaggtgggaggtggggtaccaangtntttttgtaccttgccggacnccctanggnaaatccccc

SEQ ID NO: 507 - DNA, 633 bp, Homo sapiens
  misc_feature 151, 495, 503, 559, 583, 616, 625, 627: n = A,T,C or G
cgaggtacttttgtattttgatatggacagtttattcatttgcatacagttattgactttttcccagctgattaaaagatagtcaagaaattctgcaatatagctgccaaaatagacagctacatttttatgatattgtcatcttttctgnttttttttcttttttttctttagctattttacttaagcataatagcccaataggacatataaaagattataaatacagagctttattatcctgacgtcttgggtcttttaagtatatacttttctgaaaggtatccattttgtaggcttgggttcttcatgagcatacgattggttatttttgctgctgttctcaacatcatcattgcctgctgatgtgccacgatgctgctccaataaacagcaataagaatgtcttaatttgagcagtaacatgattgcaagaaaccaagtttcacaacttgtaaagtctgtatttgggatcttggcttatttttccgccgngttttctnagaactattctggtgacaattgaatcagagttttcttgctattggggtggtaaccnctggagaactttctaaggaaaatnaaggaaactggacatctttgttaaatggataanaaaacactncntttaat

SEQ ID NO: 508 - DNA, 587 bp, Homo sapiens
  misc_feature 476, 490, 496, 501, 504, 510, 546, 561, 576, 587: n = A,T,C or G
actggttggggatgggaatcgtgcttttctttaaacttcagtttacgagatgctttgagagcgttaggcaaaagcagaaataaatattaggagcaacggggaaagctttataaaagatcatggtggccactgttgcagctttgaagaatgagtgctggcttgaacagttctttgcctgcatcattggtagctgcactgaaaggaaaaaactttcaccttaagaatttgaaaaggaagaaacctgggctctggtcttcatggcatttagactgagatgcttaaacagaacagaagtaatacgcatttcctgccataggatagggaaaatgtaacaagctggttgctcttgaggttagaaaattgctgtttctctgtggatgaagctggatttacttgaaaatgggagaagttggcttattggttgaatattgggacatcaagctatctatacccagtttcagtcgcaaccagttttncctttgtctggggnaaatcnaaccnaangaatcnttttgaatcccgaatcctaaatcacctttttttttnaatcccaaatcccanggggccgccgggganaacccctttgn

SEQ ID NO: 509 - DNA, 585 bp, Homo sapiens
  misc_feature 392, 409, 410, 420, 464, 484, 507, 511, 514, 518, 525, 543,547, 572, 576, 580: n = A,T,C or G
acatcagactagatacaacatgcagaatgttttcctgaacttatccggaaattccaaagaaaacatcatgaaacagcttacaaaaaaaaaaaaaatatatgccctagttattcaccctgcttcaacactgtcaacgtaaaggcagaaataaagcaagctatcaatacctcagaactactgatataagacatcaaatttctaaatcagtgtattaaaaaagtgaacacttcctctttcttctctcttctacatttaactagaatcatgtttaaaaaaaaactgatattaaatgtgacacttcagagctactactggaaggagtaattcataacttccctaccctccttccatccctgctgattcaagagaagggggaaaaaaccaagaaaacnaaacgaaaaaccaaccnnggtctcttgnagaattgctgctattcccaaaatgttggcattgctggcatgccncaatgtgggccctggaatangattttggggaaccggcaccgtngtantcncctntgcagtnccttggcggaccccctangggnattccaccactgggggcggtttaangganccanccggc

SEQ ID NO: 510 - DNA, 576 bp, Homo sapiens
  misc_feature 476, 492, 501, 505, 533, 538, 545, 558: n = A,T,C or G
acttgtaattagcacttggtgaaagctggaaggaagataaataacactaaactatgctatttgatttttcttcttgaaagagtaaggtttacctgttacattttcaagttaattcatgtaaaaaatgatagtgattttgatgtaatttatctcttgtttgaatctgtcattcaaaggccaataatttaagttgctatcagctgatattagtagctttgcaaccctgatagagtaaataaattttatgggtgggtgccaaatactgctgtgaatctatttgtatagtatccatgaatgaatttatggaaatagatatttgtgcagctcaatttatgcagagattaaatgacatcataatactggatgaaaacttgcatagaattctgattaaatagtgggtctgtttcacatgtgcagtttgaagtatttaaataaccactcctttcacagttatttcttctcagccgtttcaaganctaacatgtggatttnaaaaattgnctcnttaccagaatacatttaagggatggtcnaaaanttttgcnattggataggccnaaaaatgggaacattttt

SEQ ID NO: 511 - DNA, 507 bp, Homo sapiens
  misc_feature 24, 384, 385, 386, 393, 394, 395, 397, 398, 405, 409, 415,420, 421, 427, 431, 436, 438, 446, 448, 449, 454, 459, 460,466, 468, 470, 471, 472, 475, 479, 480, 488, 489, 493, 497,500, 502, 504, 505, 506, 507: n = A,T,C or G
acatcagactagatacaacatgcngaatgttttcctgaacttatccggaaattccaaagaaaacatcatgaaacagcttacaaaaaaaaaaaaaatatatgccctagttattcaccctgcttcaacactgtcaacgtaaaggcagaaataaagcaagctatcaatacctcagaactactgatataagacatcaaatttctaaatcagtgtattaaaaaagtgaacacttcctctttcttctctcttctacatttaactagaatcatgtttaaaaaaaaactgatattaaatgtgacacttcagagctactactggaaggagtaattcataacttccctaccctccttccatccctgctgattcaagagaagggggaaaaaaccnnnaaaaccnnncnnaaaaccncccngggctnttggnnaattgntggntttcncnaaaaggtngnntttgnttgcnnggcccnangnnnggncccnngaaaaagnntttngggnaantngnnnn

SEQ ID NO: 512 - DNA, 597 bp, Homo sapiens
  misc_feature 404, 414, 437, 474, 480, 488, 489, 490, 504, 514, 528, 531,550, 552, 553, 557, 564, 567, 570, 571, 584, 594, 595, 597: n = A,T,C or G
acgcggggggccacgttcagcggacacgggagcaagatggcgattccgggcaggcagtatgggcttattttgccaaagaaaacacagcagttgcaccctgttttgcaaaaaccatcagtgtttgggaatgattctgatgatgatgatgagacctctgtgagtgaaagccttcagagggaagctgctaagaagcaggccatgaaacagaccaaactggaaatccagaaggcccttgcagaagatgctactgtgtatgaatatgacagtatttatgatgaaatgcagaaaaaaaaggaggaaaataatcccaaattgcttttggggaaagacagaaagcccaagtatattcacaacttgctaaaagcagttgagatcagaaaaaaggaacagggaaaaagaatggnaaagaaaatnccgagagaccagaaatgggaaanggggagttggtgataaaaaaccttttgtgcctttgcntttaanaaaaactnnnagaaaaacctgaanaaaaaaaaanaaaaaaaagggttnttncttggaaccttttttggtntnncccncccaaanaanttnnggggttttttggnccctttaatnncn

SEQ ID NO: 513 - DNA, 573 bp, Homo sapiens
  misc_feature 462, 465, 473, 496, 507, 526, 573: n = A,T,C or G
acatctctctattaacaggatttgtttacacaattatattacacttcaccaacctttatactgcatttcattaaatacaaaatacatttacaaaaagagtctaccacggtgttccttcacaatgccagcttaaggtcttttaaaacttcctcttctacatatttatagtggttacatcttgattatatcaacattatgagttttatgagtttattttctaatcaaagagaatagtgtcagcctgtttctcaaaccaaataggaaaaacagcatgtgagatgattccctgcacataaccaaggaatccttttcatgcacacaacattggacttttacttgtgcagtcactttaacatacaaatcatctttccttgggatcgttttaaattttcttgaaataccaagtgggtggagagcttcttttcaatgaatccacacatttaaaatccaaacgtgcctcangcntcaggagngtatatttaattatattgagagngaggacggggnaaaaaatttgctgaaaaanaaatttctttggctgacatttttcaaccttaagctaaaaaggggaan

SEQ ID NO: 514 - DNA, 571 bp, Homo sapiens
  misc_feature 1, 5, 6, 7, 8, 339, 387, 459, 463, 468, 481, 486, 505, 507,514, 530, 538, 554, 571: n = A,T,C or G
nactnnnnttttttttttttttttttttttttttaagaaaacttagggactaaaattaatataaaaattggcataatgttggattgaatctacattttggcagaagttaaacattcccacataatgtcaaaattatacatcatgcagttctgtttttttgtttgttttattttgttttgtttttgagtctggctctgtcacccaggctggagtgcagtggcgtgatctgcaacctctgccccccgggttcaagcgattctcctgcctcagcctcccgagtagctgagattacaggtgcgcgccaccacacttggctaatttttgtattattaagtaaanacggggtttcaacatgttggctaggccggtctcttctgacctcagggngatcaaccccctcggcctcacaaaatgctgggattacaagcgtgaaccacttgccagcccacattatacaanttgnaaagnaactttgcacaancagtntttgccgtggcacaccatntntacttgnacctggttgaaaaaangttttttntttttatgaatccgcntttaaaaccttggcccn

SEQ ID NO: 515 - DNA, 578 bp, Homo sapiens
  misc_feature 460, 477, 496, 509, 525, 542, 544, 565, 567, 569, 572: n = A,T,C or G
acgcggggggccacgttcagcggacacgggagcaagatggcgattccgggcaggcagtatgggcttattttgccaaagaaaacacagcagttgcaccctgttttgcaaaaaccatcagtgtttgggaatgattctgatgatgatgatgagacctctgtgagtgaaagccttcagagggaagctgctaagaagcaggccatgaaacagaccaaactggaaatccagaaggcccttgcagaagatgctactgtgtatgaatatgacagtatttatgatgaaatgcagaaaaaaaaggaggaaaataatcccaaattgcttttggggaaagacagaaagcccaagtatattcacaacttgctaaaagcagttgagatcagaaaaaaggaacaggaaaaaagaatggaaaagaaaatacagagagaacgagaaatggaaaagggggagtttgatgataaaaaancattttgacatctgctnttaaaaaaaactgccaganaaaacttgagaanaaaaaagaaaaaaaangcttgttcccttgaacntntttggttttacccacccaaanantnttnggtttt

SEQ ID NO: 516 - DNA, 534 bp, Homo sapiens
  misc_feature 293, 350, 365, 392, 460, 462, 480, 482, 488, 506, 521, 524,533: n = A,T,C or G
ggtactttggtcaccacgggaaacacaaccaaccaagtgttttgccaagagacacagatcggaacgctcatcacaacactgcatggctcattcagtgcaggttgccacaggtctacagtcacatggttaatgaaaatccaaaacaggaccaacaggatgacacattttctgttcttaatgctcattgccattattgctagatctcactctgtagcccaggctggagtgtccgtggccagatctcggctcaatgcagctttgacctccccagctcaagtgatcctcccacctcncctcccgagttgagtaactgggaccacaggtaagggccacaagtctcagaagagtangaagtgcccagcatnacacaggaagcaagttacagaaccaanggctctggtcataaactggtcaacatcttttatcacataagggctcataggtccacttactgaaagcntnaattttgtgggaagaaananaaaccnaggcttgggggacacacncaaacggtgtttacnccnctgaatttnt

SEQ ID NO: 517 - DNA, 628 bp, Homo sapiens
  misc_feature 398, 433, 446, 471, 496, 509, 537, 538, 561, 562, 564, 566,574, 579, 586, 595, 601, 615, 628: n = A,T,C or G
acttggaccatccacagcccagcaaggcagagcaggatgcttctattcctcctggcacccatgaggccctgcttcagacagccctttctcctcctcctcctcccaccaggcctgtgtctcctccccaaaaggcaaaagaggcaccaaacacccaagcccagcccatctctgatgatgaagccagtgatggggaagaaacccaggttagtgcagctgatctggaagccctcatcagtggccactaccccacctcccttgagggagattgtgagcctagcccagcccctgctgtcctggataagtgggtctgtgcacagccctcaagccagaaggcgaccaatcacaacctccatatcacagagaagctggaagttctggccaaagcctacagtgttcanggagacaagtggaagggcctgggctatgccaaggncatcaatgccctnaagagcttcataaacctgtcacctngtacgccgggagtactgcaccactntaaagatggcganccagagccaagaaaaatcctttggttcnnaaaatttctgaaaaaaaggaagnntntnaagccttnaagcncccagcnaacaggccntttgcnaaaaggggtatggngggaaccaaaaan

SEQ ID NO: 518 - DNA, 605 bp, Homo sapiens
  misc_feature 263, 322, 354, 365, 410, 421, 434, 467, 503, 509, 516, 520,522, 529, 554, 597: n = A,T,C or G
accgctgaagacacccagaatgaaggaaaaaagacaaaaaagaataaaacagcttttagtaacgttggaagaaaaattagtcagcgagttattcacttatttgatgagaagggcaatgatttgggaaacatgcaccgagcaaatgtgattagacttatggatgagcgagacctgcgactggttcaaaggaacaccagcacagaacctgcagagtatcagctcatgacaggattgcagatcctccaggagcggcagaggctganggagatggagaaggcgaaccccaaaactggaccaaccctgagaaaggaactgattttgncttcaaatattggacaacatgatttggacacnaagacttaacngattcagcagtggattaaagaaaaaacacctagtccagattaccnttaagaaaggnaaaaatgttgacntgtcagaaaatgaaatggaggagatatttcatnaaatcttcagactttcctggaatactacttctcatntaggcncaactgntcangngggaaantttaagggggcttcggccttggccnaatgagggaaggttttaggaacttcgagaccccgaagagaccnttaccaaa

SEQ ID NO: 519 - DNA, 476 bp, Homo sapiens
  misc_feature 447, 451, 453, 458, 467, 476: n = A,T,C or G
acaaaatgagacaaggggaaatataaattagtggggcaggtcgggctccggtgggtggcaaagcagagaacatctatccagttagcctatgaggcttgaccctcagagttgctgtccttgggctggacttgaccagctgtaacttaagataaaacagtcccacccttaaggtcatcaaatgaaagacacaaggacagcatagcagaggcctagctggcttgtcagaaaaatgcacgggagatttcagttggctaaaacctcaatatgagccactgcatggccaggctgtgcaaaggagtggggctccattaatagtgcacggtgtggccccactgaggaggagagagtcctccgcacacagcactggctgtaccctgactttggtagacacaggcattggcatgaccaaagctgatctcataaataatttggggaaccattggcaantctngnacctnggccgcgancacgcttan

SEQ ID NO: 520 - DNA, 626 bp, Homo sapiens
  misc_feature 287, 402, 434, 438, 442, 496, 498, 511, 538, 556, 568, 574,583, 591, 597, 600, 601, 605: n = A,T,C or G
cgaggtacttcacttggaactgcttggtaagttattgtttttgctggaaatattccatccaaaaatggctgccaagaaacctgccataattctgcatttgatggcacatcatacttgtgcaagatagagccagtataatgccaaattttgtatccattattaacccgtaacctgggggcacatgtagctgttaaaatatgctcaccatccgggcaccaagcaaaatatgtagaatcagaagccaccggtttagaaataagtttgtagtttttcacatcccacacttncatttgcccctcagatttccaaatccagctaatactaatatatgtccatgagggctatagtaggctgcattacgaggaccagttccaaagtcaaatacaggatcacatttcaagntgaaaaatgtcgctttggcaggcattaaaccntatncagnacaaaactcagtagaactagaaattccaactacttataaatgggggcatttttngnaaatgcactcaanactttctcatttggtgccatggaatgnaaaagttggtcttcatantaggaactctgncttggnaaaattggntacttttnccacanagnntacntttttttcccacattgggact

SEQ ID NO: 521 - DNA, 259 bp, Homo sapiens
ggtacatacaaaatctgaaactgacactgtcagttctatactttgcacacgtgaagtgtcagaatattttcttcagtagtacttacaaggtgactatatcagcattggctgcttccacagctatgctcaaagggtctttcccttcttcatcagtggcatgttgattggcacctcgttttaggaataaacatacctgcctgtttaagaacacagcatttttgagatattgtcgaaaaaaaaaaaaaaaaaaaaaaaaagt

SEQ ID NO: 522 - DNA, 657 bp, Homo sapiens
  misc_feature 493, 550: n = A,T,C or G
acctgccggcccactgtgcactgcttgtgagaaaatggattaaaaactattcttacatttgttttgcctttcctcctattttttttttaacctgttaaactctaaagccatagcttttgttttatattgagacatataatgtgtaaacttagttcccaaataaatcaatcctgtctttcccatcttcgatgttgctaatattaaggcttcagggctacttttatcaacatgcctgtcttcaagatcccagtttatgttctgtgtccttcctcatgatttccaaccttaatactattagtaaccacaagttcaagggtcaaagggaccctctgtgccttcttctttgttttgtgataaacataacttgccaacagtctctatgcttatttacatcttctactgttcaaactaagagatttttaaattctgaaaaactgcttacaattcatgttttctagccactccacaaaccactaaaattttaagttttaanctatcactcatgtcaatcatatctatgagacaaatgtctcccgatgctcttctgcgnaaattaaaattgtgtacctcggcccgcgaaccaccctaagggcgaatttccagcaccactggcgggcggttcttagtggatcccaactcggtacccaagccttgggg

SEQ ID NO: 523 - DNA, 507 bp, Homo sapiens
  misc_feature 444, 454, 462, 470, 477, 480, 485: n = A,T,C or G
acgcgggctatgcggagacaaaccctccatctcagctgtcaccgtggagctgagcaaagaaacactggacaccatgttagatggcctgggccgcatccgagaccaactctctgccgtggccagtaaatgatccagccagctgccagggccactgccatgacccagctgctcatgagtgataaatgtctccccatatgcaggctgcccttgcagctgcagctgacaacaggcaggatggtggggacagcagggggctactgccatccagaagttacagttggattgggaagaagcagccagatcccccgctgttctcactcatcttctttctctttctgaagctggagagcagaagcccccatctttgaaaagctcctgagtgcaacttaattaccaccatggcagggtgagggaacatttgcatcgtcagctgcctctggatanatgttttganaaattcangcccaaantcatgcngcnctatncattaagtaaagttattttcaa

SEQ ID NO: 524 - DNA, 711 bp, Homo sapiens
  misc_feature 557, 579, 593, 689, 693: n = A,T,C or G
acagagttaacaagttttgagttttttatataggaaaagcctagtcaattcagatgctttctagaaaaattaacattaaaaaacaaatagaaatccatgactaaagggggaaaataactttcaaaagttaccaaaattcgaatcatatcagagaccattataaatttcaaacagtagatttaccacacatattgcattttcaaattctaatgtagcaaaacgtaaccacataatttggctacagctaatcgtttcagaaaagtttaaaaaattagcaaagttatatctataaaacttttgtagttttctttttgcaaagtaaaaaggcttaaatctttaataaaggaaaacaaaacaatcctcttaaatttcttataaatagctctccagacatatattacaaatctgctgtaagctttctttacctgagagaacttcccaggatcctttatcccaaaggattaccttaaagagttcttccatcattttactcatgtgaatatgattaaactcctatagaagtggattgggacatatgcattcttaatctgcccttncccatttgtttctttctgaaanggattttgcttaangaaaaaaaaaactctttggtaaaaggcaaaatatttcaaccctttcaaaatgactgcctctggggaaagagttggttggggaaagaagaaaagganagangggagagagagaaagggt

SEQ ID NO: 525 - DNA, 540 bp, Homo sapiens
acgcgggaaattagaataagcttttatcaaatagataattgatgcaatttaggattcacgcaagtttcagtgtcaaatggcggtcttatagtttcaattctgaaaatagcaaacttaataaacagccactttaaacttgttctggcaaaccagaccctgctgtagatatagtctaaggtagttaaccatataagccttttcaactcttaatgccctccacatgaatcagcagttaagaaggttctagaacccatgaaagcttttgtatgtattactaggttttgtttttcttatgtttgctgattttacagttctgactaaagctgacctaaatggatcagtttatgtgtaatattctagtgctttaatgactctttttttctttggagggagggtaacattatttggacagatgcagaaggaactgttagtgagtcaagacaaacacatctgaaataaaggaactgtgtattaacatgttaacaattcataactgcactttttatgacattttgaaaatctatttataggtacctcggc

SEQ ID NO: 526 - DNA, 708 bp, Homo sapiens
  misc_feature 547, 554, 567, 572, 576, 579, 586, 595, 627, 642, 655, 664,666, 679, 702, 704: n = A,T,C or G
acacacacgaagagagagggagttagctgagaagcagcatccagggaaagaaaggtctccacaagctgagatgatggccctctgccctctgaactgttcattaacaagtcaccagtcccagttctttgttcaaatcctcaaacttggagaggcactgctccaatgagacagctacagcaaccacagggaggaagtgctttgggctgcaggagagacagtcaaagccaaatcacgtccaggcgggatgaagtaaacctggaccgaggagcctgacccagctgcggagctcacacatgccccatagggacggtcctgccatatacacaaacagcacactcagcatgtgtgcagaggcaggcaactcctgagcttggttctcgcggggtgggggtgaacaatatactttaatggccaagaagatcccagctctctgcatgagacccacatctctcctgggctgtcactcaatcttgggaaatactggttcaaggaagagaaacaagggctccattgtgtgagagcagcaggcaagctccccttctgcatntggacangaccccccccttntcctnaaancangcttcancttaactgnctgacattgctttcctgatggcaaaaggtcanaacccacttttttgncatacaaaaaaantgaccctancnttaaccgtaaaanagaaggtcaagggaacacccccnanaatg

SEQ ID NO: 527 - DNA, 672 bp, Homo sapiens
  misc_feature 552, 586, 630, 642, 645, 658: n = A,T,C or G
acctagtataagccaatcaatctcattttatcatttagttactgactgagatttcaatcttctttaaatgttctaaaacttatcaggctctatctgcattgaataataaaagcaaatcaaatcaaaagtcttgattatattcagctagcatgaacaatgaaagtgagtcaaacgttctccttcaaactgagaaactggattacatcttttggtatgagttcaattaatttcaagtattcatcactggtagaattaaatttcttcctttctcaggtaagaataatcattaaactcaagtgcttaaagaataaaggcaataatagataaatatataattctatatttggattgcaagaattaaagtaaaagcaaaacacatacacacacaaccagagtcgccagtcatttatcttcatataatcagacaataattttgatgatagaatacttggattaaattaccttttttttttctgtgctttaagatagaaattcaaagcactaaaatgccaactaaagtaagcaccgggtatgaaattgtgaagtaaaaanatgaatactggatatttttgtaatagtttggggnctcattcaagaagaaggcctatttcaggaaggataataaatacnatattgcataanganttttggtacctcnggccccggaccccg

SEQ ID NO: 528 - DNA, 652 bp, Homo sapiens
  misc_feature 526, 529, 593, 594, 630, 633, 643: n = A,T,C or G
acacatttaacagtagcgaattacaccaaaatgatttactttgagatttgaataatttgcatagcagtaaaatgtgttttgtgtaacatacaaatagaaaaatgacccagtatcttaattgatacttactggagagtatcagaattacccagcagctcttacagaatgccataaattctttaagactaaatattgaaatcaattatttgaagtaatgtttctgatttactgttaaaagttgctgagctcagtttttggagatatcatttatgcctgcctgttcccttatgacagtgaggccttctttggctccacctagtatgataatcatgggctctgttttagttgatgagaagtggctcctatgaatgcctctgctcaatttctttttattttactttattttatttttaggggtctcgccaactcctgggctcaagtgattctcctgcttccacctccccacagtgctgggattacaggcatgagccaccaccgcctggctctctgttcttttcagtgtctncgngccatcagtcagcagtgcttacatgtttagcatatttgcatgcagtttctcttctgtccccgannatatttttggccaaaaaaattggcaaaaagtccttnggncgcgaccacncctaagggc

SEQ ID NO: 529 - DNA, 512 bp, Homo sapiens
  misc_feature 204, 230, 416, 433, 451, 481, 483, 485, 489, 511: n = A,T,C or G
aattcgcccttagcgtggtcagcggccgaggtactgtgttccccaggcaattcgaatccagactgcattctcctcagtttctctgaagctgactgtcacattttttaatgctctctgaagaattttcttgaacgaatttttaaattgtttcatatcaaaaaggtcaacatcttcacctggtcctttactcatctgaaaaacatnccaaactttctggtgctgatgaaatngcatataaatgatgtctaacagggcagcatcactgatacttgcacgcttttcctcacacagatggatcaagtgctgaactacagattcctttctctgtcggaaatttacagtctgcaggttgattttcagacaaaaaatcccaggccttcaggattgttggcagttcattcatggggattttcaangatggtccctcttgatnaaatcagcaacagtcctntatccactctctttggcaccggcccacatntncntgcngtctcactctcaagaagctggnt

SEQ ID NO: 530 - DNA, 495 bp, Homo sapiens
  misc_feature 124, 189, 191, 289, 317, 344, 364, 438, 444, 462, 466, 471,475, 492: n = A,T,C or G
accatgacataaaaggttaaagaacaggcaacacaatgagcacttaagtttttaacatgtggggaatagggcattttaaaggctggaaccagttcagaggaaacaagggtttgggtagaggtanaaaggtttaattaaccctgaagatctgcaaatggagggaggggtgaaggaggaatcttaagaccnanggagaagagccaaggacaaggtcaggttgaatgagtaggaggtgttcacacatcctcttgtgtgctaagtagtggcgtgcatctgatctgagaggcantaaagcagtgatgaagacaagtgcagcnaaacattgaagtccctgattgcagcantgactctgcaaccttggatnaattattttcaatctttattttgtaaaaacggagataaccggcctatagggatttgttaaaactgaatattttnaaaaanagctttaaatggtgcctnacanatganaccnattaatactgtttattngcc

SEQ ID NO: 531 - DNA, 711 bp, Homo sapiens
  misc_feature 266, 534, 536, 563, 592, 597, 608, 616, 631, 634, 654, 663,664, 672, 676, 678, 679, 682, 687, 699, 700, 704, 708: n = A,T,C or G
acttggagaaagtatagcagcaaacaatgcctatagacaacaggaaacagaacatatacccagaaaaatgccctggcaatcatcaaatcacagttttccaacatcaataaagtgtttaactcctcatttgaaagatggtgttcctggattgaatattgaagaattaatagagaaacttcagtctggaatggtggtaaaggatcagatttgtgatgtgagaatatctgacataatggatgtatatgaaatgaaactatccacattancttccaaagaaagcaggctacaagatcttttggaaacaaaagctctagcccttgcacaggctgatagactgattgctcagcatcgctgtcaaagaactcaagctgaaacagaggcacggacacttgctagtatgttgagagaagttgagagaaaaaatgaagagcttagtgtgttgcttgaaggcgcaccaagttgaatcaaaaagagcgcagagtgatattgagcatctctttcaacataattaggaagttagagtctgtggcttgnanaacattgaaatactgaacaaatccctnctgggacttcttcagagaaatggaaagtncctcnggccgggaccncccttaangggcggaatttccancanacctggcggccgtttcttantggaatccnncctcggtncccnannttnggggnaatcatggggcnntaanctgnttc

SEQ ID NO: 532 - DNA, 708 bp, Homo sapiens
  misc_feature 522, 631, 648, 683, 706: n = A,T,C or G
ggtaccaccgacttttcttgttcccacataagcatttccctttagggctctaagatgaggtcatcatcgtttttaatcctgaagaagggctactgagtgagtgcagattattcggtaaacactcttaggcctaacctagctagtcagtcaagcagtaatctagcacaactctaatgttgagatgatggcctcggtgtgagtggcacagcatataaggcacattcaggaatcaagacttttttttttttggcctactcctctcccttctcaaagaccttacaggcaaggctgaattctaaaatagccttattagttaaaaacaacactggtataactaactcccatttctacttgaaaaaattctttggaataatgcttttttagatcaaataaaaaaatcaagctttttataatgatgataaggaattaattacaatttttaaaattctaatatagtccatacaaggcttatatactttgctctaaacctagctcacctggtctagtagctacaacatttantactacagtcagaaaatctaaattctaattggtaaattcatgtcctcaataaaattggtctgaccaaatgagacaatgaattaaaaagactttgcaaaggttccaagcntcatccaaatatatacntggaatcatttataattttcatgggctcatcctgnccattctattcttaatccccctnca

SEQ ID NO: 533 - DNA, 507 bp, Homo sapiens
  misc_feature 327, 340, 357, 368, 469, 498: n = A,T,C or G
acttacatgtgtgaacacatataaagtgtcaggtttacagaccctggctcaaggacagtctaggatgggaaaggaggtagggcgagaagaagcacatattttctccctggtgcttcagcctcaccctatccaagggacagacatatggggtgtgagaaacccatccccaggtcccagccttcaggactggagtccttttgagtctggtggagtcacagatccagtctttgggggacactgggtctgtctccttttgaaagccctggaaaggtgggaggtaagaagtaaagggagacaggtccctgctagaagaacttgacgcctcgnccatcgctgacantgatgatctcggccttntgctcctgctntaaggcctgcagagcccgcagtaaagtggcttcatccagcccgtggaactcctcatcctctgtgtcttccccattagtcaagttcatacagggtaaagacngagttgttcttggccacttcctggaaacncactgataa

SEQ ID NO: 534 - DNA, 517 bp, Homo sapiens
acatacacaatcactcaactggaacaatcaaaaccatctatgagtgtggttattaaaaaataaaattacgttcatacaatggtagaaaatgaaatgtttttattaatttgattattaatacaaaaccacacatatatgaattatataacctagtgttatatatttaaaaatctttatgcttgcaactgaaatgtctctactccaagggaagtttctgatttttaattttcttattttaaggaatctattatattcacaatgattaaaatgccttacacataggcaaaaagcagacccaatcccagcaaacagaaaaaccataagtctatcatatcaccatatgtttcaccatatagttttgaaaaataatcctatttgcagtttggtatgtcttcatatttatacttattatcaaagtgattgcatattgaggcacagagcttaaagaggaaatatatattacttataggggaaccagacactgaaacaagaatatcaatcaatggcttcaaacaaa

SEQ ID NO: 535 - DNA, 713 bp, Homo sapiens
  misc_feature 93, 549, 566, 576, 601, 603, 611, 629, 632, 638, 667, 672,679, 690, 706, 709, 712: n = A,T,C or G
gtacgcgggtgccgacacctccctcatctctcttatagtggaaggatggtcagcattaggctgatggggactgagaaggataggaagggatanaaattgccatgtgtataaagctttattctttagcccttaaccctaaggctcagggaaataccctatgttattgtgctccctggattcctgcaactcattttccttccactctggagcagggtgaggggaatgttatgggtaacagacatgcaggcatggctctacccatttctttgcacaagtatggggcccatgtggtagtccccatacccctccagttcctatatttttgtcttcttcctttcccctctttgccattcctaccttgcatttttcctgtcagtgccttagccaaggcaaggagataaggatgctcttcttgctttttatatctgcacattcatacctctccaaagaccagcttttccccagccagggccctcagccttcctgctgccccagtgattgattgagagagctgttggggtttcttctgccaatgacccctgggaaganggacctttggtaagggncatgataaantggcgggggtcttggtcctgctcangnttttcatncttcctcctttccttctntgngactgnggatatgggtattaaggggggtgcacccnggganccctganaactgggtgcncaaaattccaaaaaanaanggng

SEQ ID NO: 536 - DNA, 285 bp, Homo sapiens
acctctacgtattgacaactttgagttctgtagataacaagcagatttgggtctcctgtgattggctaatggtctccatctcccagcagacttaattcaggttttgcttctgctacatcccgccagtaaggaagcagcaaaggtagagaagagacctttttctctatcaaaggccagagatgcgagaacaaaaattcattcccctttggagacaaatgtagtccatctgataaataagatgagaagtcctggctgtcctgcatcagggtccacaggtcaagtacc

SEQ ID NO: 537 - DNA, 709 bp, Homo sapiens
  misc_feature 3, 45, 47, 64, 67, 69, 95, 119, 126, 146, 177, 184, 194,197, 200, 204, 222, 230, 231, 234, 237, 268, 282, 287, 333,386, 393, 405, 409, 467, 476, 508, 520, 531, 535, 544, 562,581, 584, 612, 619, 636, 640, 646, 654, 664, 674, 680: n = A,T,C or G
  misc_feature 688, 689, 694, 699, 704: n = A,T,C or G
ggnactttttttttttttttttttttttttttttttttttttacncngaaaaattggaacatanttntnttggctggaggtttggacattcctanagcaatacatatgcctttcaactnttgaaanacctcactaccgcctccttnttgagctttttttggaggagcattcacacanagcattntggcagcttntanttntganatgaggtatgtgagcaanaggaggcnnttnttntgaatgaaaaggcgcttggtcacatccccanatgtcaagtgaaanatacnggcagttcatttcccctagtagcccactcacctcaagctggaattnttcagcttcactcggactgttagttgcttgcaccgttttcctctagtttacanagcactnttaattcaaacnccanccaagcacagagtttggtaaactcgggggaactggctccagcaaagactgcctgaganagcgctccntcttccaacaatgggcccttgtaacctaaatnttccaacgactncaaaatgtcantctncatgagggncacactccatgctactgngggtattcaaattcccagncgncaggctccccctgttcgccgggaacgcntacctgncccgggcgggccgtttnaaangggcgnaattccancccccttggngggccggttncttaangggattcnnagccngggtnccaanctttg

SEQ ID NO: 538 - DNA, 553 bp, Homo sapiens
  misc_feature 547: n = A,T,C or G
actgggattacaggcgtgaaccaccgtgcccggccttccccagatatcttcaaagcaactgctagtcctgcttttgcacattacactctacattctcattgccccacttaactaaccctccctcatgtccttttctaaagatgtagaagactttgaaatagcataacatttaaatggtcacaaatcacctggcttgaaagtgactaataataggaaaatcagacctcaggactgagttcaatttcaagattctcccactccactttgctaagagggaaacagaaaaacattactccagccacacaaatatgatactgtgcaagtatcccactcttactcattcaaatcctacccattttttcccatcgtggaacagagtcttgccaacttatacctctctccaataacccataaagatggtgatttgaatttgggccaagatttaacattttatggaatacaagaggagagttttctgcaaaacacaggatttgcagacaaggagacttaggttcaaattccagttctgccatttattacctcaaanggggat

SEQ ID NO: 539 - DNA, 609 bp, Homo sapiens
  misc_feature 561, 594: n = A,T,C or G
ggtacgcggggagtttagcgtaaaccgggaagcggatcgcgtggagtgaaagtcaccgcagcggagatggacaaaccatgtgggtgccctccaggtgtgtgcgaccatgaaatgggagactagcaggacccacgttggccaaccgtggacctggtccctccagtaggagtcgtgagccagctgaatttgaatgcaaagatggagcaagggccgactggagtcacactgacatccacccccataacatggggacagatcaagaaaacaaagcaggaagctgagaaaatgctggagcgtccatgtgcttggccatgttagcagtagtgtcctgtgaggattgatttccaaaaactcctgttacatgaggaagacaccaagaagagcaaagaaaaggagccagggtggctcttcctcagatggagtctcggtctgtcgcccagcctggagcgtagtgatgcgatcttggctcactgcaacctccacctcctgaggtgggagaatcgcttgaacccaaggaggtggaagtttgcagttgaacccgatagtgccattgcactccanccctgggcaacaagaagtgaaaacttttttctnaaaaaaaaaaaaata

SEQ ID NO: 540 - DNA, 514 bp, Homo sapiens
  misc_feature 505: n = A,T,C or G
ggtacaaagtccagaataacttgtatcaccactgtgtaatcaacaagctcttgtctcatggagtgcctctgcctaattggcttataaacagttacaagaaggttgatgctgctgaattgcttcgtttatacttaaactgtgaccttttagaagaagctgtggatttggtgtcagaatatgtggatgctgtattgggaaaaggacatcaatacttcggaattgagtttccactgtccgcaacagccccaatggtgtggcttccatactcctctattgatcagcttctccaagctctgggagagaacagtgccaacagtcacaacatcgcactgtcccagaaaatacttgacaaattggaggactaccagcaaaaagttgataaggcaacacgggatttattatatcgtcggaccttgtgatttggattgtcacctagcctttgtaaccgcttggtgcctcttaggacttaagactaccctacaggaaccctgtcctgccccgggcnggcgctcga

SEQ ID NO: 541 - DNA, 715 bp, Homo sapiens
  misc_feature 391, 440, 508, 525, 545, 550, 557, 559, 564, 583, 636, 638,652, 674, 695: n = A,T,C or G
ggtacatgaggcttccagcccagccctaggagatccatcccaaagaccccacagagacctgcatgggaggtggggccacaggtctggtatcaggcaaacctaggttggaacactggctccataaagaggaagtcacttaaccttctctggggcatggtttcttcatctgttcccacctctgaagactatcgtaagacagaatgaaagttaagcaacttaacgcaacgcccaggataccagaattattctaaatggcagaatcctacttagtctgtcatcttgggagttctctaggcaggcaggttgccaggggtggggctgagatccagatgtgctctaggtccctgtctgctgcagaatcatgtggctgctggacctgggggtccctcangtccttgcaggagctgagggtaggagactccatttgccaaacaacttanaactttgggcctcagtttccttgtctttaaaaggaacaggtaaagaattcataaaaacaattgacaangggctgcctggaatttncctgtaatctcttccagcanaagangcctcanangtganagtaagaacaggaaaacangggacaggtttcactctgtgccaagtgtggtggcttaaggtctgtaatcccancnctttggggaggctnaaatgggaggaattgattgatncccagaagttcaaaggcttcnattaaacctgtgcctggggg

SEQ ID NO: 542 - DNA, 397 bp, Homo sapiens
acaaagactttgtaaatgtgattcagggcccccagcacccctgtgtctgcagagtgccttcaaaactcagctgttccagccggtgccaacctgtgaacttcccaccatatcccagaatctgctattccccaaaccacttcccagtttcctttcagtaatctttctgaaggagccaggacaatagggcctgttgtttagtgaatttctttattattttcagcctttaaaatgtaatttccatctcttgcaatgaatttgtttcccttttttttgcttcattttgtttaaattttcaggtatttagctcccctttcatattatttttaaattttttaattacctgttgtagggtgttcctccagaagcaaagagcaaaattttactgttgtgatgtacc

SEQ ID NO: 543 - DNA, 637 bp, Homo sapiens
  misc_feature 546, 583, 607, 619, 623, 628: n = A,T,C or G
ggtacgcggaggagggcccatgtgctgaaaatccgaagtgccgcggaaagtggagagctgacaaggaaggtttcgagcgttttgctggcaaagggatttcttacaacctccaggcatgcgtctttctgccctgctggccttggcatccaaggtcactctgcccccccattaccgctatgggatgagccccccaggctctgttgcagacaagaggaagaaccccccatggatcaggcggcgcccagtggttgtggaacccatctctgatgaagactggtatctgttctgtggggacacggtggagatcctagaaggcaaggatgccgggaagcagggcaaagtggttcaagttatccggcagcgaaactgggtggtcgtgggagggctgaacacacattaccgctacattggcaagaccatggattaccggggaaccatgatccctagtgaagcccccttgctccacccgccaggtcaaacttgtggatcctatggacaggaaacccactgagatcgagttggaaaatttactgaaagcaaggaganccgggtacctgcccgggccggccgctcgaaagggccnaatttccaacaacacctggccggncgtttactagtnggantccgnagctccggt

SEQ ID NO: 544 - DNA, 715 bp, Homo sapiens
  misc_feature 476, 491, 554, 670, 697: n = A,T,C or G
ggtacttgtttaacccagagttaactaccctggatagcacaaattgttttggactcagaagtaaatctgaagcctgtatgttggtttactgctaaattctgatagtgctattctaaaagatattactgctgatgcaaagatatttttcttagaggaattatgaaggaagagtgaaagaggatgagggtgtagggagaaggaacaaagattagaaagagggaatatttaggttcttgattaagaggcagagctgatttaaaagataccaatatggaacgagtggctgggtatccacatctatctttcttaatcctaagaataaagccatttcaattagatccaaatagttaataagaaatctgctaattatggattcttttttctttttttttgctaccaaactacagataaccatttctagaaaagaataagactgatccatttctgcctctcatgtggagcctaggattcttcanatagtaaaagacagntggagtctgtcaggacagctaccgccacattcttggcagcatttcttaccagattgctgattncatgacttggattttttttttctttttcttggaggcataatttccgaaagagtaagataaactttcttattaaaaactgggtttaggtccaaattatggaagatgttgaaaaacancctccagtcccctttacattttggaantctttttaaaaaatttca

SEQ ID NO: 545 - DNA, 208 bp, Homo sapiens
actcacaagtaagaaactttctctactgaaggatactgtcacagagtttgttgcagagcatctatatatatatttatttatttattttaaaaaaataaacaacaatgatgaacgaacccaggttcctagaaccaattctcttgattctctacttccacaaaataaagtgtatcatttggccaagactacagatgtgtttttttttttt

SEQ ID NO: 546 - DNA, 677 bp, Homo sapiens
  misc_feature 572, 673: n = A,T,C or G
ggtacgcggggacctcggtgatgtcgtgggttcaagcagcctccttgatccagggccctggagacaaaggggacgtgtttgacgaagaagcagacgagtcgctcctggcgcagcgggaatggcagagtaacatgcaaagacgagtcaaagaaggttatagagatggaatagatgctggcaaagcagttactcttcaacagggcttcaatcaaggttataagaaaggtgcagaagtcattttaaactatggacgactccgaggaacattgagtgctttgctctcctggtgtcaccttcataataataattcaactttgatcaataaaataaacaatcttctggatgcagttggccagtgtgaagagtatgtgctcaaacatctgaaatcaatcactccaccgtcccatgttgtagatttattggactccattgaggatatggacctttgtcatgtagttccagctgagaaaaagattgatgaagctaaagatgaaagactctgtgaaaataatgcttgagtttaacaaaaactgtagcaagagccataatggggatagattggtcatatgtanaaatgttgtagaacacaaggagcatgcacattcagaaaacccaagccccccatggaatttttggaacagacagcccagtttaattaaaccagctgggcctnttca

SEQ ID NO: 547 - DNA, 442 bp, Homo sapiens
  misc_feature 58, 85, 92, 107, 111, 119, 161, 208, 219, 237, 252, 261,309, 325, 361, 368, 370, 380, 399: n = A,T,C or G
ggtactttttttttttttttttttttttttttccgagttttcatattttttatttaanaaaatacttgaattgccttaaacaatnttaaatntttaaacaacatganaaanagtgccanaggtcaaaacatagtatttagttcactgagttgccctgacanataatgaatggggattgatttaatagtgaccaaatacactggccatntttactaaagngctgtaaaatggccaagngaggacaactgcatntaaaatganatcaaatcctcgagtccattccttttagcaaaaatgattaaaaccatnttggcaggaccaagtntttgcaaagcctatcaaatggatggatggcttcaanacagcananaacccacaancttgaaaaggcctccgganagttcactcaggataaacggggtgctggcatcgtcctggtcct

SEQ ID NO: 548 - DNA, 714 bp, Homo sapiens
  misc_feature 9, 31, 50, 81, 87, 89, 98, 115, 118, 129, 159, 164, 176,179, 196, 200, 211, 244, 271, 311, 370, 377, 407, 443, 454,481, 490, 511, 543, 578, 636, 640, 658, 669, 672, 679, 684,687, 691, 696, 708: n = A,T,C or G
tgtactttntttttttttttttttttttttncattggttaaacagtttanttcccaaagctagtaattttagttaaatatncattanancctttttanatggctgctaataaacnctntgtcaaaatgngtagttttaaactcaaactcgaaagccaanataancaactccttcanttnttactctgaccaaggcntaanaattcacttanacaaaaagctttcaaaacctacctaaaaataanatagttcataaattttcaaaactgttnttccctgttgcggacagcccttgatctttgtaaaacttancaaattttggcatgctctcatgttagctttttaagttactgaaaactataaatttagcntcatttntcaaatctgtatagttttctcattccgaangcttaaacatttaggtcaaaaattaaaatccagtanaaaaatattcntctttagccaggttgtatagttaacancatggcaanaaactggtgagaacatttaancattcagagcataaaaatacttcaaagccttncgaaacttgaacttaagccattttcctaaattttnagtagttccaactacagggaaaataaaaactgccctagggactggagaatgatttaancccnccttcaaaattttttccnggttccctganatnaattttntaggnttntttnttggnaaccaaaaaagntggtta

SEQ ID NO: 549 - DNA, 607 bp, Homo sapiens
  misc_feature 185, 410, 468, 499, 546, 591, 602: n = A,T,C or G
ggacccttatatttcacaactttctgttcataagttatagtgacattgctctttggtaaaaatgcctgctttccaatactttgattgcatattagacattcttaacagggcggcagtctagtgttgaaagttttatttttccatttttcttttaagtaaattttttttaaaaaattctgatttanggctaggtgtggtggctcaggcctgtaatcctggcactttgggaggccaaggtgggaagatcgcttgaggccaagagttcaagaccagcctgggcaacatagcgagacccctatctgtattaaaaaaaaatctgatttaattcttttatttatcataaggggtttaattcctgaagtaaaggtttgcacctattaaacttaaaactgccaaatgatttttgttcntttatgtgcgtgataaaaatacaaagaatggtgtggccacctcctccctttcaagctngggcaacaggtagctctttccagcccctgancccagccccttcccaagtggtgcccggacaaaaaactacatgggccntttcgtgtcttgggggtggaaaagggagggatgaattggggtganagaaccctgtngaatt

SEQ ID NO: 550 - DNA, 702 bp, Homo sapiens
  misc_feature 374, 406, 416, 426, 434, 458, 516, 557, 562, 568, 572, 573,586, 625, 640, 664, 665, 674, 678, 701: n = A,T,C or G
ggtaccaaatttgcatatttgaaattaacactttagcatttgctgaactcagccctcgttaactcccttaacaagttcaatctgaaatcgaatttgcattcaaacagtttaatgccaccaagtaggtctgaactaatgtataaactcagcgccgccgccgccacccctactttcagggcagctgctcggggaagccggttttttttttggccattttgcaaacaaaaccaacccacacccgttatcgcagagcacccaaggcccatggcaacttggttccacaagggagagccttccaaggccatattgtcagtctaattaatatgagcttttttttttttttcagtgctgcctatgtttccttgtgctggtanaatgtgggggcatttattaatggttgctgccnaaaaaaaaangaaaggaaangaaaaaangaaaatccgaaacacccctccccngaaccacccccaatactgctgcgtggaaatgaatcggcattgttcctagagtttggcnctcttttttttttctgcattcattctctttttggcaggacntcacntttgtntgannagggcctttattntgtagagtgcaccatttggggaaccttttttgaaaaaanacccaaaccgggaangtttttttgattttaaaaaaaacnngggggatgntctngaaaggaaaatggaaatggaggng

SEQ ID NO: 551 - DNA, 256 bp, Homo sapiens
  misc_feature 17, 25, 134, 138, 215, 234: n = A,T,C or G
acccaagggaggagccnaacctaancggcggaagaaagtgaggaggcccttccaacgttgatgccccttctctttcctcaaatcaatgtcagggagtcaaaagggctgtagcacaggatggagtttgatttatncctnctcccccaacacctaggaactgaatctttttctttttattttttgagatggagtcttgctctgttgcccagctggantgcagtggtgtgatctcanctcactgcaacctctgtctgcc

SEQ ID NO: 552 - DNA, 702 bp, Homo sapiens
  misc_feature 411, 485, 494, 501, 503, 512, 523, 526, 528, 549, 550, 576,577, 626, 630, 655, 664, 669, 688: n = A,T,C or G
acatggctccatggaggttctccagtcggtgttgctgctgctgttttcgagccttatctcgtctgtgctcctcataagtgtcgtcatcagtgggcagctcatagcggcacaagggacaggaatttgtcttgcttagccagggcagaatgcagctggaatggaaaaggtgatggcaaggcatctcaatggcagtctcctcctcctcaaattccaaaagacacacggggcacttgagctcagcctgagagcctctgatgactgtcctggggaggttctcaaccacagtcttggcagctggtggaggcaggtggtggtcccaatctactaccaaccccaagtcttcaaagtccatcctattgaaaagtgaccttgcgagctccagcagcatgttggttcgcgtctcctgctcanggtccgacggctcgcagtccgtgttcatcgaaataggacgccatggctgcccacccttctgacacaaccccccngcgtacctnggccgcnancacgctaangggcgaaattncancnacactggcgggccgttactanntgggatcccgagcttcgggtaccaanntttggcggtaatcatgggcataaacttgttttcctggtgtgaaaattgntatncgcttcacaatttccccacaacatnccagcccgnaagcnttaaagtggtaaaagcccnggggtgccctaaag

SEQ ID NO: 553 - DNA, 237 bp, Homo sapiens
acaaattgggtcaaatggctgcttctcatggctcttggctccaaaagttacagttccagaaagactaatttccattgattttgggaacttctggccaataatccagatcaataagcttttctctcgaaatacttcaagctggccaaaactagttttgtattccaaatgtgtaattggacctctattgtaaaaaggtatatgggcttcacagaattcaaaattatttttcacactttc

SEQ ID NO: 554 - DNA, 525 bp, Homo sapiens
  misc_feature 518: n = A,T,C or G
acatgatgaagcacttacaatagtgtctggcacatacaaatactctgcaaatattgcttattatcataagtctctaatattctgacatctgaagcctttggggttctaaattagctgttttttatgctgcccacttaaggtgttttttatttttcaacgtctctgatctttgattgtgagctcatatttggaggatctttgggaatcctgaggctctaaatttgggaaattttcctccagaccatctgcaatttgagaccacatttactgccatcagttatccctgcttcatgtaggagccctggttcagctcccttgtcttcagtgtgtccaggtttagctccactgccagccttcatataggtctcgacccaagattttagtgtattgctcccagatcatcaccttagtttccactcacagttctgatggttttgttttattttgttttgttttctgagtttctattttctttgtttttggcatttgaggaattctgttgtttcctaagaacctantacctcg

SEQ ID NO: 555 - DNA, 602 bp, Homo sapiens
  misc_feature 368, 381, 389, 401, 434, 496, 519, 533, 549: n = A,T,C or G
acgcggggagcgcagcgggggcgggaaggttgtagtgccgcgagttgagctcctcttgcctaagtggtcgcgccccctttaagagcagcgattgtaaggagaggcggtcccggtgtcctcgggtcccaggtgattgtgaagtgctgaccaattgccactggacatacttgaaacaaaataggaaaatggcagcaaactcttcaggacaaggttttcaaaacaaaaatagagttgcaatcttggcagaactggacaaagagaaaagaaaactacttatgcagaaccagtcttcaacaaatcatcctggagctagcattgcactctcgagaccctctcttaataaggacttccgggatcacgctgagcancagcatattgcancccaacanaaagcagctttncagcatgctcatgcacattcatctggatacttnatcactcaaaactcttgcatttgggaaccttatttttcctgttttacctcgcctttacccanaatgaaaaaaaacatttgcgatngaaaagtgactttntaatatcaaaatgccnaaagcttcctatcattcaatgcttcattgaactggtgacttttaaaaaatttt

SEQ ID NO: 556 - DNA, 431 bp, Homo sapiens
  misc_feature 371: n = A,T,C or G
acgcgggggtttggatccgggtcagtcgggtgccgagatttgggagagacgctctgaactgactgccccgcatcaccggagcgtcccagctgcgaggagtgtaaacaggaacatcgataagtagtgtaaaaacttgcacaatgaaatccgaagccaaggatggagaggaggagagtctacagactgctttcaaaaaattaagagtggatgcatcagggtctgtagcatctctgtctgttggagaaggcacaggtgtcagagcaccagtcagaacagcaacagatgataccaaacctaaaaccacatgtgcatctaaagacagttggcacgggtctacaaggaagtcttcacgaggagcagtgagaactcancgtcgtcgacgttctaagtctcctgtccttcatcctccaaagtttatacattgcagtacc

SEQ ID NO: 557 - DNA, 627 bp, Homo sapiens
  misc_feature 503, 512, 539, 596, 620: n = A,T,C or G
ggtacataaagatatgtaaaccacattaatcttgcagtaatataatgtcaacatcatcatgaacaccttgcagaagcagctctcctggatatgttacaatcttccttcgttttgcagctttaagagttcctaccaatgcttcaaagaggttggcacatttatcatcacggaagaggaccccaaatttcacgcttaactttccatcagcattttttgaacccaaacgatgaatttcctccactaagaggttaacctcgtgatccacattcattgctgccatgcgtaggtcctcttcatggtatcctgccaggcaccaaaaatacaaaaggtgtgtagcacaggatctgccctcggggatctcacattctaaaggcagatgagggcctctctgcgcggttttccttcccgccggagaactggcgccgcgtgggtctggacccggttaccttcttcaatgcactggggagggtgaggcgaaggaaggaaagtggctgaggcaaaanaaaaaaacngctgtgggaggaagaagaccagggtanggggaaaaagtaatgtttcttgcgctcaaagaaaggggccggccaaacttcccccgngtaccttgcccgggccgggcggtncgaaaag

SEQ ID NO: 558 - DNA, 638 bp, Homo sapiens
  misc_feature 2, 525, 544, 597, 617: n = A,T,C or G
gngtactggttgttgtggaggaacctctggcttgctcattaagtcctactgattttcactatcccctgaatttccccacttatttttgtctttcactatcgcaggccttagaagaggtctacctgcctccagtcttacctagtccagtctatcccctggagttagaatggccatcctgaagtgaaaagtaatgtcacattactcccttcagtgatttcttgtagaagtgccaatccctgaatgccaccaagatcttaatcttcacatctttaatcttatctctttgactcctctttacaccggaaaacggctccagctgttctagctctctttcagttctttgaaccttcccaccttagggtctataaggttccctctgcccaaattgttctactctcccctcttcttcaacacatccttcagtttaaagcacttgcttctctcaatttaaactccacttccttagggatgtctctgtgacctccctgtgctggattagcttcctactctatgctcttgtaaaanaactatctacttcctttgncataaactcatcattttcctataaacattaatattggcctcctgctagaatgnaaagctcccgtgagagcaangatccctcctgtttaccctgt

SEQ ID NO: 559 - DNA, 460 bp, Homo sapiens
  misc_feature 421: n = A,T,C or G
ggtacacacacacacactctctctctctctctcacctggctaaggcttttaaaattatgaagataaataatctgtttcaccagctggagtgagttgcaaggaagattgctggagctactcaatctagcgctaatggtttggattcattactgcaaacctacataatttaacatatttgtttactttagtgtgacaactgatgaaaaaaaatggagcaatctgaattgtataaaataacttaagaaggaagaaaagtgatatataaatatattttgcaaatgtcacattaatttaaaaatgagtatgattgattttatttttaaagtgggcattcttcactgtttcgagacctttgtatgtatttgtgtatttttatctttttttttcaggccattattataaggtgttattttggccctcnaatgtagaagttatgtttaaatcaaccaatcaaggccct

SEQ ID NO: 560 - DNA, 688 bp, Homo sapiens
  misc_feature 490, 667: n = A,T,C or G
acttttaatggtgggaatttacagtagaagcatcctttgctgagttatacattcctttatcaatctcttttgatacaacatttaaaacaagtagcttcaagaaaccactggtgttttgaggatagtatttctaaatagcattcaggaacagagtattattgcacagatctgaagatcaaaaaaaagctcaaggaaatacagatcggaagtgctgatgagttatatttattgaaaacccaacttttaaggaagtgctaagatcagtcacccatgtgaataagaagccaggaaaggaaagatggggaagcccagatcaccaggcttctattaaggaggaaagcaacagaggaaacagtgaaggggaacagaagggggtagcaaagtgttacagaaaagcggactggatagacaaaactgcagaaggtgtatgttggggagaactgaaagggaaaacaaaaatacttgacatagtcttaagtagaagaaggcnagttagagaaaaacaaaagtatctactggccttgtcaacatacagacttcaaaatccccttatgagaatccaaagaatgatgtgtgtaagggaaaattttatttgcccttccgggaagaaatcagtatctttgccaaatcttggaaagacgaaatcaaagccccattaatgattcanaatcagtggcttgacctcctg

SEQ ID NO: 561 - DNA, 710 bp, Homo sapiens
  misc_feature 6, 64, 169, 192, 197, 308, 335, 355, 460, 473, 504, 512,551, 610, 627, 631, 637, 647, 694, 696, 703: n = A,T,C or G
actttnttttttttttttttttttttctaaaaaataaaaactttatttttttcaagtttataanatagttcccattacatataacattacggtcacggattctacagccacaaatgcccgcagtcacataaatatatccaatccaatcaatgccttttcctgctaacanaggcatctgaagttcaaaggganagtcncattttgagtaaaagtcgtccttaatgggagggctcctgtcagtgcattaggaactagccaaggagccttgcttgccaaagctgtctgactcaaaggagaggaagggacanatggcctgctgactggggctgaggcanaactagattttctctcttgnggtttaagatattttaaaatctcggaattcaaatcctatagtgtgaatatctggggagttctaacttctggatgaaaaaggaaccaatttagtggtaagaaatanaagcctgcttaanagggaccctaactgcctccttgaggagtaanggagtcanaaggaagaccctaactcaccattccttggcccaaaccanttggttttaccccatactcctttcccctgggggttcagggaccctgacacccatttcangggagtaaaccatttanaaanctcccncttgctgcanctaaaaatttgcaagtcaaaattcttttttggaattttaaaagcttnantttgggntaaaact

SEQ ID NO: 562 - DNA, 451 bp, Homo sapiens
  misc_feature 35, 53, 71, 80, 88, 95, 107, 114, 121, 128, 130, 146, 168,184, 191, 206, 232, 314, 342, 348, 364, 373, 391, 434, 445: n = A,T,C or G
ggtactttttttttttttttttttttttttttttnggaaataaacatttattntaaaaattagttttgacnttttaaagngaatgcanacaaggngttttccaattnaaaaggnccattgnaagctananaagtaaattccaaggntggcaataactgactcacattntttacaagtggcctanacaatanggaacctttcacctnaaattcacagagccatgaatcacctntgcttccccatgaccttttccatatccttcctactctgtcttccaaccatgacacagaactgaaacatactttaaaaatctnattcttggctaggcacggtggtcacatntgtaancccatcactttgggangccaaggcnggcggatcaagaagtcangatatttgaaaccaccccgaccaacatggggaaaccctggttntactaaaaaanacaaaa

SEQ ID NO: 563 - DNA, 715 bp, Homo sapiens
  misc_feature 235, 580, 583, 615, 619, 646, 647, 648, 661, 678, 694, 699,705: n = A,T,C or G
ggtactttctggatatgggatgaatttttaaaagatctgggaaacaacagtaagggggaaaaaaggccagagtatgatttttttaatggcatcaaaaaaatagctatttaaatatttgttattacaactactacatagatccaagaagtgaaaataatacaacaacaaatcagttgacaatgctgatttaagcatgccataggcatctttcaattatgactatgatcaccaaggncactggaccagacaaatatccctgttctctggaacatatgcctcaggttacaaaaactaaggaaactaccacaaagattttgagcagctctattcttggacctgcacaatgctctacaatgaatattatgtgataaaggcaaaagtgtaactgagactttatttatagttacaattctttgcttggatgaatagttggtgggacaacattcttttaaaactatatagtacccattgcaggacattctcactggagatcagcttctttttgaatacaagccagaagtcattgggtgaagccttgaatcagctagttccttaaaaaaacaaaatcttgttttactgnctnggtgctaatgaggggaaaatgtgaacctcaangganaaaatgggttttggaaactcaatatannnatagaaagatatnggaaaactcttggggcntgacctgggggaatangtaantttcgnaatttaaatt

SEQ ID NO: 564 - DNA, 399 bp, Homo sapiens
acatgctcttcaggttctagggctcctgttaggggagggagaaatgttgaatcaagagggaaaacaactactatgatttataaacatattttaatgtaaaaatttgcatttaaaaggagtggccctgttttctgtgttaaaaccccatttggtgctattgagtttgttctttattcttttatcccagtgaaaattgttgatcttgctgtagggaaaaattaaactctttgaatctccaaacaaggaagtttcagcattcccttatggatcagaggaaccttagagacctgaaattgttgcttccagtttagctgcccctcaaattcaagtgaatattttcccttctccctttacccttctccagaaataaagcaggtgacagggttttcagaatcttaa

SEQ ID NO: 565 - DNA, 413 bp, Homo sapiens
  misc_feature 249, 265, 319, 327, 332, 370, 392, 410: n = A,T,C or G
aattcgccctttcgagcggccgcccgggcaggtactgttctaggactggccaaaaatgggcaaaatgtatcactccaaacactactgattcagcattgttttcatgtcttaaaattgccacctgcactttgtttctgcactattatgtagtgcattttaacttaaattttttccagcaacatgttacttatttaagatacattactgatatttcattataattagttcaccttccctgtgaaacaaganaattgtaaaatgttgnggaaaatgatacatatgtggatgctaatgaaatcatagtattttggggtagctnctctgaanacctnaaagacctgcggctttggtttataagtgttggggcctnatcaagccccatctgatccaanatcaatatttttttgaanaaa

SEQ ID NO: 566 - DNA, 462 bp, Homo sapiens
  misc_feature 80, 275, 295, 364, 375, 386, 423, 425, 442, 457: n = A,T,C or G
ggtacacaggcgagggcatggacgagatggagttcaccgaggctgagagcaacatgaacgacctcgtctctgagtatcancagtacagaatttggagctaaggactgtgactgaaatcattttcccatatgagcagaccctgtgtgtcaggcctgtttcccatatgagcagagcctgtgtgcaagtctgtttctggcatgtccctcattgaggaagggaagcaaaagctggttattgccaggcctattaacacttaatatgcaaattctatcatnctgaaactggggcatctgangaaaaggtgaccttgctggatggctttatttgcatggctctgcctgtctgcagtggttgagtcctcatnacctggtattntgtatgagcanatgtgtgctgaacgttgatgcccaggcagatacctcntnaagactgctgcaggcantgctttaaaaatganccagt

SEQ ID NO: 567 - DNA, 375 bp, Homo sapiens
  misc_feature 99, 340, 368: n = A,T,C or G
actctaatttcactaactgccaaaaggttttccagaataatctcagttgcttcattcctttaaagatgaagcccgaagaacgcatggcgattactttanaggaacaattagcagcagaggcagggctgtgctgatcccatctggcatcgctgggagctaacattaaagacatggcactttgggtccgggtccaggtcctggttcagagcagctgccacaccgtggctactagaggatccttttccggctttggaaactgaggctgactgcaccatcatcactaaaggcctgagactgctcgccgtgctcaacaccgactggagtggccattgtcttccanccacgcggccgacctcgaaaaagccccncgtacct

SEQ ID NO: 568 - DNA, 158 bp, Homo sapiens
  misc_feature 91, 133: n = A,T,C or G
gggtaccttcagaagctggatacagcatatgatgaccttggcaattctggccatttcaccatcatttacaaccaaggctttgagattgtgntgaatgactacaagtggtttgccttttttaaggatgtcactnattttatcagccatttgttcatgca

SEQ ID NO: 569 - DNA, 614 bp, Homo sapiens
  misc_feature 69, 127, 187, 276, 309, 351, 361, 362, 377, 391, 404, 410,427, 437, 438, 449, 450, 461, 474, 479, 484, 485, 491, 500,513, 516, 519, 525, 537, 540, 550, 575, 579, 609: n = A,T,C or G
ggtaccaaaggagaatttggagagctggctaaattatttgaagaaagaattgccaacagtggcgttcanagcctcaacaaaaccaaaggataaagggaagataaccaagcgtgtgaaggcaaagaanaatgctgctccattcagaagtgaagtctgctttgggaaagagggcctttggaaacttctnggaggttttcaggaaacttgcagcaaagccattcgggttggagtaattggtttcccaaatgtggggaaaagcagcattatcaatagctnaaaacaagaacagatgtgtaatgttggtgtatncatggggcttcaaggagcatgcaagttgtccccttggacaanacagatcacnntcattagatagtccnatcttcatcgtatnttccacttaattnctcctntgcgctttgctcttgcnaaatccatcnncgtatttgaanntaaattaaaanccgtatgggaggntgccnagtgnnattccntttcccagngcttgattgctcngancangtaagntacctggccccnggnccgggtcgcntcgaaaagggccgaaattaccaacnccanttggcgggccgtcttctatttggaatcccngcctt

SEQ ID NO: 570 - DNA, 346 bp, Homo sapiens
  misc_feature 323, 334: n = A,T,C or G
tcgagcggccgcccgggcaggacgcggggatgatgatgaaacagaaaatggccccaaaccaaaaaaacgacgtccaccaaaagcagagaagaaaaaggctcccaagccagaacgtctgcctccatcaatgaagggaaaaataaaatccaaagccataatttcatcaagtgatgactcttcggatgaggataaacttaaaattgttgatgaaggacatcccaggaacagcaacagcaacagtgactcagacgaggacgaacaacgaaagaaatgtgcctcatcagagagtgattccgatgagaaccagaacaagtctggcagcngaggccggcantccccggaggcc

SEQ ID NO: 571 - DNA, 493 bp, Homo sapiens
  misc_feature 251, 296, 333, 343, 362, 366, 368, 370, 379, 380, 394, 409,410, 411, 417, 426, 446, 450, 453, 454, 456, 464, 469, 483: n = A,T,C or G
acctagctctgaaaacacatctacagaagcaaatgaactcatctgcaaaataaaaagcacatatctttaatttctaatgttttattatagatttttaagatacatatttatttttatattattagcttaaagaaagtaagtcacacaagaataagcttttgcatgtctgctaaggtaaattattatattataagtttgttatgaagttataaataaaacacatattgtgcttatgtgaataaaacccagcntaatcggagtgcatttgaaatgccagagtattctcattgtttcantaagacaaaagaagaacatttccttttagaattaaancttggcttcngttttcctttatcaaaaanaatnantntgaataccnntttgattcaaaacnaaaatttgtaaaaannnaaaggngactaaatnaaacatgttcctgggccttnattnaannanccattttnggaanaactggaggcaaanaccaaagtta

SEQ ID NO: 572 - DNA, 258 bp, Homo sapiens
  misc_feature 117, 149, 184, 185, 187, 214, 253, 254: n = A,T,C or G
actaagtgtatacgtatttttgccactttttcctcagatgattaaagtaagtcaacagcttattttaggaaactgtaaaagtaatagggaaagagatttcactatttgcttcatcantggtaggggggcggtgactgcaactgtgttancagaaattcacagagaatggggattaagggtagcnnanaaacctggaaaagttctgtgttaagancttgctggcagaaataaactttttggaaaagtttattanncaca

SEQ ID NO: 573 - DNA, 356 bp, Homo sapiens
  misc_feature 290, 294, 322, 326, 332, 334, 336, 341, 344, 349: n = A,T,C or G
acggtctcacagacaacgttgagagaatagtagaaaatgagaagattaatgcagaaaagtcatcaaagcagaaggtagatctccagtctttgccaactcgtgcctacctggatcagacagttgtgcctatcttattacagggacttgctgtgcttgcaaaggaaagaccaccaaatcccattgaatttctagcatcttatcttttaaaaaacaaggcacagtttgaagatcgaaactgacttaatgggaagaacagaaaaatttagttgctactgtagatttcatgattnagangcagcctttaatttgccattgatcattncctntttttngntnttaanaanccttnccggcca

SEQ ID NO: 574 - DNA, 390 bp, Homo sapiens
  misc_feature 351, 381: n = A,T,C or G
acgcgggtgtgcttcctttcaaagggttggacctttaaattgctgcaaaaggtaaattgtatttttttttaagtattggtgttctttactctagctaggctaaaatttgctaaatgccttggtttctttaaaagttcatgtaatatttctgatttttcagaatatttgcaataagagtctggattttaaaaaacacatgcatacacacaattaagagctcatgtcttagcaagatctgggaaaccaacattgcgagagtagctattttgaaagaataattctccagaagttaacatctaatatctagtatcaccaaacagtatcgctggtctttttattcatttggaatgnatttatttttttaccttaccattttgtccnattaaattg

SEQ ID NO: 575 - DNA, 561 bp, Homo sapiens
  misc_feature 347, 350, 361, 363, 372, 375, 383, 400, 402, 405, 418, 452,456, 458, 460, 474, 479, 503, 520, 526, 540, 541, 561: n = A,T,C or G
acgcgggatttccgtaactattgtaatttccacttttgtaataattttgatttaaaatataaatttatttatttatttttttaatagtcaaaaatctttgctgttgtagtctgcaacctctaaaatgattgtgttgcttttaggattgatcagaagaaacactccaaaaattgagatgaaatgttggtgcagccagttataagtaatatagttaacaagcaaaaaaagtgctgccaccttttatgatgattttctaaatggagaaacatttggctgcatccacatagacctttatgttttgttttcagttgaaaacttgcctcctttggcaacattctgtaatgaancanaattttttttntntttttttcnaantttgtaanttttggttcttggaaananggntcaatgggtattnggggctggggtattgaacacgaaattttatttancatngngntcaaaatataccantggtnaggttttaaaaaagtattcttgangggtcttttctatttantaattnaaactttcataaanngtccctcgcccgcgaccacn

SEQ ID NO: 576 - DNA, 372 bp, Homo sapiens
  misc_feature 115, 179, 192, 205, 218, 220, 244, 285, 286, 292, 314, 318,319, 337, 345, 348, 349, 356, 359, 362, 369: n = A,T,C or G
acgcggggctttttttcattcccgttgttatggagggccacatctgccaaagcctggagtctgcgaaggccgggacccggttccccggcccacagtgggggtgtgcaaacccganagaactgggttgcaaattcgtgaagaatcagcatcatgtttggcagctgagtattggagccagnagcctgccatgangttttgagaacanagtgctgttttananctggcagcagcatctcagcccaanagaaggttatattcccagaggatgtcagtcccaatgaccannagctgncattagatttggattctgaaantaannggcttaacaattgggtgnataaaacntgnntttcttnttnttnaaagganttg

SEQ ID NO: 577 - DNA, 462 bp, Homo sapiens
  misc_feature 358: n = A,T,C or G
actgcctagcatggtatcttcctcatcatcagaggtgctctatacatcttcagttgaaacgtgaaacagacatccatatgcaaaatattttcaagggctttgttggcttttacatgtttttctttagataactggtaatgatgcacattacaaaggagacttttctaaatctcaagtcctttgctaatttttctttggaacaacggcacattttcaatgccaaaccttctcctacaacatacaaaggggagatgccaaaactctgaattcttgtaacggatcctgcaactagttctatccagaagatggagacaatattccctggagttgactgaacatgtgagaaggcacagctcanaaggagaggaaggctgagggcagtgaaatgagaacctatgcatcacctggcctttttacatgttagtctatcctactatcccaggaattcacttctgctgtacc

SEQ ID NO: 578 - DNA, 396 bp, Homo sapiens
  misc_feature 375, 377: n = A,T,C or G
acgcgggggcgctactgccggagcggggcggttatggcggcggagactgcgggcccgtagctgggctctgcgaggtgcaagaaagcctttgaggtgaaggtgtatgaaagtcatcataacagatgttttccaaaaacttgtagaaggttgtgaaaaaactactaggatcacgcggcatgtattgagcatataggttgctgtagatgaatgttcttagctgtcatgtttaaaaatacttctgcttcgttacctcaagtgtggcatgcagcattttggaaggaaaattgaagacgtgttcaagaaaacatgaacagaagcaaatgatgaaaatgagcattttacttgatgttgataacatcacaataaattatgccnanaaaaaaaaaaaaaaaaaaa

SEQ ID NO: 579 - DNA, 541 bp, Homo sapiens
  misc_feature 7, 46, 87, 412, 484, 512: n = A,T,C or G
actgtanaatgtgatggaaaagcattgatgagaatttattggcagntcagattgtgttttcccaacttagtctctttattaattggntaaggttttctccaaaaagggcatttcaacaatgggaattatttaatgtaacagtgggcacagattacttatcttccttctctgctttgtgactcaccagcagtaacacacacaatccacatcttgtgcacctcaaatgaacagacttggtttccttgctttcttgacatttccatgactgtttcacatacaaactattgggtgaggtttttcagctgttaccgacccacgtcctgctgtctctgtgtggcctacaaaaactgtccattcccacccctttgctttgccatttgcaagagtctggaattgtcaggtctcagcttcnaaaagtcctggttccactgacaggacacattctttagtgggaattagacctcaaagtctagttttgtatgtnggtatgaaggggaattttttaaataaanttgaaaaagctgtgaacagcattagaact

SEQ ID NO: 580 - DNA, 562 bp, Homo sapiens
acgcggggagttgtagctcagcgtggctacaagtaactgtggtgtggaagcagagtagagagaaaacttgttcctcattagagagagagccacacttctcactgctcacaatgagaggccaaagattacccttggacatccagattttctattgtgccagacctgacgaagagccttttgtgaagatcatcactgttgaagaggcaaagcgcaggaagagcacatgcagctactatgaagacgaggacgaagaggtgctgcctgtcctacggccccacagcgcgctcctggagaatatgcacatcgagcagctggcccgacgccttcctgcaagggtgcaagggtatccatggagactggcctatagcacgttagagcacgggaccagcttaaagacgctctaccggaaatcggcatcactagacagtcctgtcctattggtcatcaaagatatggataatcagatttttggagcatatgcaactcatcctttcaagttcagtgaccactattatggcacaggcgaaacttttctctacacattcagccctcattttaaggt

SEQ ID NO: 581 - DNA, 563 bp, Homo sapiens
  misc_feature 468, 485, 524, 554: n = A,T,C or G
acttcatttttctgtggcacaagatactctaggctcatcttgtatagttcatatcccagctctagaatcagttcattttctaaggagccctggttccttttattggaaaccaaaatctgggcaccgggtgtgctcccattctagttgttttctgaccacataactgctaacaaagatgcttcactctggctacactgatgtgaactttgaactttagcagaagagctcagctctagagaacaatgagctcctacattaccttttttcctcaaagaataagtaagtctaagcagaaaaaaaaatatgcaaagaattttcagtatgaatgaaataagacaaaccatcaggcttgctgtattgtaaaccaacacaatatagttataacagatctgtagaaggatccttagaataagagagtcatttgtcgggggtcatcagggagaatactgatagtatcttcggctttgnccgcataacagacacancatgggatactcctgaaattcatccatgatactgaatgnatactctgtctgggctattacatgaaggancaattctta

SEQ ID NO: 582 - DNA, 477 bp, Homo sapiens
accacaaatgcagaatcagagcagtaggaagaaggttagtgcagttatactttcattaaaaaaaattctgaatcactgctatttaaaaacaccttgaagcaagtcttttgtttgagattgttttttaaactaaggtagcaaacattttgccatgtaatggcagtgttatatgccgttatcttgctttgtataaagaaaacaacatgagagatttttaatactggagtttggttacattacatatttaagcttctacacagaatgatggacacttcgagaagctaatccttatccagaaacattttaatctcttaaaaaacaaagcaaaacaaacaaacaacaaaaaacccaaaactacgttgctccttttcacaatagtgcacatttttaccataatttagttatggctacaaaacatcagaagattttttttaatgtatcttctctatggtaattaaaaaaaaaaaaaaaaaaagt

SEQ ID NO: 583 - DNA, 542 bp, Homo sapiens
  misc_feature 437: n = A,T,C or G
acgtgctggacaccacttttaaaaagcaatcactgtgctagaaaagtatattggctttgttaggattaaagttcattaacttcaatgtaatcatgcctcctattactgaagtcagattggaaccactaaagatccaaactttctgtctggtaatagaaagtaaaaatctagacatcatttacatttgagaaagctgtttttaacattattttaaaatgccaaatatgttctttctagaaaaatatttatttttgtttttgttggatagcttttaattacatttcagagaggtgtaattttgggtagatgctcattacatttttgaaaggtttatgattccaaaataaagatttatatgactggtgatactggctttacagaaatttcagagaactaatttttaaaatctttagcatttaaaactttttttgttttgntttctgacatattctgacaaaagagcagcaaaccactgctgtgtggcattcttggaggtgtgctgtgaatgtgctttttaagaaattaaaaaagagatccttctt

SEQ ID NO: 584 - DNA, 528 bp, Homo sapiens
  misc_feature 423, 430, 467, 488, 503, 519, 522, 527: n = A,T,C or G
actgtaggtatttattaataatagcaatgaagatgaaagagtgatgtatcagagaggtggagataaaatcagtaaaacttagacactaaatgataggggaaggtggaggagaggaatgagcctagaaaacttagaatataatggttctaaaattaaccaaagtaagggacacaggcattagagtaggttttgcagagaatgaatgttttaagacacacacaggtgtctctgggacaaccaagaaaagtgcaacaggcagatggattgaggagtctggctaaagataaggatttaggaactgctgaattaaaattacccaagcgtgagaagtggtgttgtgattaagagagaaaaaaaaatggaggtctgaggaataacatttaaggaataaatgaagaggccaaaaggtggggggtggttcangagtgancaaaatgtaagaagtcaagggaataaatctttaaagnaggggttggcaaaaaatgtcnaatccaaaaaaaagncaagtccctcggccgnganccccnc

SEQ ID NO: 585 - DNA, 506 bp, Homo sapiens
  misc_feature 5, 19, 43, 56, 79, 90, 125, 166, 169, 179, 196, 197, 209,210, 229, 238, 245, 246, 258, 262, 284, 319, 333, 368, 394,398, 419, 423, 428, 439, 444, 452, 455, 463, 467, 469, 473,501: n = A,T,C or G
acttntgaaatgccatcancaggcctcctacaggagtgcccancaaggctccaatnatgccaccagccaccaggccacncaggcctacgnttatcctaaaaagacttcccgtgacagctcctgcnattacaaaatggcttaaggcatctttatttcggtatacatncanactagtgttnactgtgttgaatatagnnacaaacactgcnnttctccaaccccagcgccngccataacnaatgaannctcatgtggcancacnatgtgcatattgcacagcatcnaaccggctttgataaatttctgcctggctctgctnaatgtattgttgtntagcatgaataaaagctggtatttcccatacaccnaatcaatgatgcctgctgtagctgcnggcntacacaaaattagcaaggggncctntgaanttctttgctgntatcnatgccaancanctccctgnggcngntccntccatattccggataatagggctttggnacgta

SEQ ID NO: 586 - DNA, 185 bp, Homo sapiens
  misc_feature 12, 14, 73, 94, 97, 103, 108, 109, 128, 130, 135, 149, 152,181: n = A,T,C or G
accaaatagggntncccaccccacccctgcgacaagtgctcttctagaacaggttcctaccagcagcactggngtgaatgaaagagagacccanccncgtctnacacnngtggaattgcacttcttancnaaaangaactttataaaanttngggatttttcttcctaaacataaaaatancccc

SEQ ID NO: 587 - DNA, 575 bp, Homo sapiens
  misc_feature 269, 380, 388, 391, 393, 401, 424, 439, 483, 496, 561: n = A,T,C or G
acatttgccaagacaaaggttcagaattactaattttagatattatgatattctgaaataactatttttatcctgtagttctatgattatatgatttgtaaataagaagcctaaccaatttaaaattcctgactttagtctcatatatcttgtcagactgtctcggttcaaattccaaacctaccatcttcagttgtgcgaccttgggcatgctacctaatctctttgtgcctcaatttcctccttttaaaatggggatgatgatgatnacaataatacctacctcacaagggtgttgtgagcatcaaatgagataacacaagtaaaatgcatagaacagttcccaagcacagagtaattcaaataaatattaactagtnatagtagnggngntaactcgngaatctttttaataacataatangctttgattttattntctctttaagttgttaacttcttttcccttgtataagttttatntcaagtaaggtanggtgtttaagttagttacccatgtcccaatcaagggacctaatgaagatatatattaaataattnccttttttattggg

SEQ ID NO: 588 - DNA, 435 bp, Homo sapiens
  misc_feature 23, 25, 31, 116, 167, 216, 271, 275, 289, 306, 349, 350,356, 357, 358, 368, 376, 377, 397, 398, 404, 411, 412, 415: n = A,T,C or G
gcccactgatgtccacatcccananaaattntcaaaagacggaaatcagggcaaagactccatataacaaagcgcaaggatatgctactaaaagttgctgtccttccatggctaangcagaaataaatattttggaagcagaaaaactacaccatccaataatcccngcagtgagaatgattcctaccattccttgcaaagaaaatatcactgcanagctggaaagtaagatcatgggcagaagacaatatccaaggacacttgccacacnaccnaatgaaacacctgncatactcattaagtttnataaacaaaacattcctagacattcaattgcactgatccccgnntacatnnncaaacttggnttttgcannccagtatcattgtggctccnnatgcangcaaaannccnttggacctgccaaattagtt

SEQ ID NO: 589 - DNA, 481 bp, Homo sapiens
  misc_feature 296, 311, 351, 356, 360, 374, 377, 381, 384, 407, 411, 420,426, 442, 480: n = A,T,C or G
acttgaagatatctcggcaaactgaaacaatggtgacttctgacgtaattcaggagattctgaaacatcaggcctgcatgtgccagaggatacctctggtgtgccaagagcatgttctccagctaacagcagcatactcaggcctcccatttgagtaggatcagccattccaaagttaagctgaggcatttcttcagtctttgctttcttggggcttggcaagtctcttgaagagtcagatgggaaggcccaaagtttctttcgtggattgacagtgggtgttggggatttcacangcttgtttgtggtangacaccatttgtagccaggatttgctttcataaatgcatncttanactncttgccatgtctgngtntttntgntttttctttgggatcaaggaacngccnacccaatcngctagntcttggttgcccctcnggtttcaagcttgggggggttccttacgtacctgcccng

SEQ ID NO: 590 - DNA, 588 bp, Homo sapiens
  misc_feature 495, 579: n = A,T,C or G
acatcttaaacacgacattgacactgcaagtgcttggatgtcctggcacctcagaacacaactttgtgcaaaaggagtgctgtgcatctgaatagtgcaattcatttccaatgcaagaatgccagtttcttagggcccccggtcaggatattacccacttggtttaagttgtgatttcaaatcccattttctatgggagatacactggtggaacaaatctgcagagggccctgcacctgcgctggtggatcaacggtgtcttctcacctccagggctagctgcttgccttccctcgtggggcttaagtggctgggaagcagatagacagtgtagatgaagtcctgggccctgctgctggactgagcagtgagatgactgggctggcatttgttctttctctgctgtgtgtgacctctactatgtgcctggaaactgaattacatgtaattaatgctgcaaacaggattttcttattgcctaagcatgaacttggnatgaaaataatagttaataatttactatgtaacttggatcttataacctggactgtaagtttgtttacctccagtgggagtttncttttaaag

SEQ ID NO: 591 - DNA, 599 bp, Homo sapiens
  misc_feature 307, 509, 555: n = A,T,C or G
acaaagacgcaaattttcatagtgcctagaaatagcacagatctattctactcaagattatttgaattttttcagggtattctacctagagcctgtggttaatcgcctccctgctccccctaccttttattccctaccccctcagggaatttggatacatgtgaggaatagtcctttgtttttcttatgaacctagaaaattacagatcataaaatctggatattaaagtagtttccaaaagcatctcatgggaaatcaaagtgctcggcatttccgagctggagaataaaatcaagaatccttaanagagaaaagaaaatggagatggaaatatgaattttaactgggaaaaataattggaaagctaaccttttcaaatactctaattatgaaagttggaaaaggttgtgatgctcaggattatcctgtaatgtgtgaagatacataaattagcacctaatttataggcaaattttggtaaaacacaaaaaattatggtatgtctaanttcatgaaaagtatgtaaatgcagtggcctaaaacctgtcaactgnaatacagtttaatgtggaacttttctaataatattgagctcttg

SEQ ID NO: 592 - DNA, 567 bp, Homo sapiens
  misc_feature 372, 390, 394, 395, 398, 402, 403, 412, 415, 418, 419, 423,425, 435, 440, 454, 456, 458, 470, 508, 509, 517, 524, 529,542, 544, 545, 550: n = A,T,C or G
acacaccagtctttctttggtgtttaacctaatgggctgaggaagggaggcagccaggaaattatacccattaaagtgtgtggttaatgcctatatatatcatttttactcacagttagtggacttatcttttaaaacagaggtatgtggcagtggggtaagagaacttcccttattatagagaagattccaagaataggttcagacatgatttgaagaaccatgtaactctgctgccttgcacggtcccctttttagcactaataactcctaagtgtctgataatttcaaggttagcagcactcccaaagaagctgtccgggctgggtggtggtggctcatgcctgtaatcccacaatttcagaggctgangcgggcggatcacctgangtannganttcnnagaaccagnctngcnnccangnggaaaccccntttcnctaaaatacaaaantnanccagcgtggggnaggggccctgtattcccagctacttgagagctggaggnnggataatngcttganccagnaggcagagtttgntnngagcnaaatgcgccattgtttc

SEQ ID NO: 593 - DNA, 501 bp, Homo sapiens
  misc_feature 174, 183, 229, 235, 242, 258, 273, 289, 294, 300, 306, 307,309, 312, 335, 341, 343, 345, 346, 354, 358, 363, 368, 374,385, 387, 393, 398, 402, 406, 407, 415, 416, 422, 429, 433,447, 451, 452, 458, 468, 477, 481, 487: n = A,T,C or G
accccaactttgctggacctcatgcagctttagctaataaaagtttctttaaggcagataaagttacaatgctgtggaataaaaaagctactgctgtgttggtaatagctagcacagatgttgacaagacaggagcttcctactatggagaacaaactctacactacattgcancaaatgganaaagtgctgtagtgcaattaccaaaaaatggccccatttatgatgnaagttnggaattntagttctactgagatntgtgctgtatatggntttatgcctgccaaancgacnattttnaacttnnantgngatcctgtatttgacttttgganctgggncncnnatgcaagnctantatanccctnatgganatatttttaantnttaacntggtnttgnaaannccaggggnnaaatgnaatggtngggntggtggaaaaactncaanntttttntaataccggntggttatgnattntacctnatttgcttgtaccc

SEQ ID NO: 594 - DNA, 556 bp, Homo sapiens
  misc_feature 275, 353, 354, 371, 386, 401, 409, 418, 421, 422, 429, 439,440, 444, 452, 456, 470, 480, 488, 495, 499, 511, 515, 518,520, 529, 531, 534, 543, 544, 548: n = A,T,C or G
acatacccaaaagaattaaaagcaaggacttgaacaaacatggtcctagcagcatcaatcacagtagccaagaggtggaagcaacctaaatgtccatcgacagatgaataaatcaacaaaatgtggaatagtcatacaatgaatatcagccttaaaaggatggaaattctgacacattttacaacatcgataaaacttgaggagcttatagtaagtgaaacaggccagatacaaaaagacaaatagtgatagttcccctcagatgaggcacctanaatagtcaaatccacagagacagaaaggagaatggaggtttcagggggcaggagagagaattgaggcgttagtgtttnntgggtgcagattttcanctggggaagatgaanaggttccaggggttncccgcacnacaagtggnatnntactttnaaaatggctnnaganggcaattntatnttagggtatttttnaaacacaganttaaaaanaaaaagntttngtttagggtttngcangancnatacccaananccnggttttccnnttcngcgccctg

SEQ ID NO: 595 - DNA, 560 bp, Homo sapiens
  misc_feature 506, 523, 536: n = A,T,C or G
actccagcagcaggagagcggatttacaacatctcagggaatggcagccctcttgctgacagcaaagagatcttcctcactgtgccagtgggcggcggagagagcctgcgattattggccagtgacttgcagaggcacagcattgcccagctggatccagaggccttgggaaacattaagaagctctccaaccgtctcgcccaaatctgcagcagcatacggacccacaaatgagacaccaaagttgacaggatggacttttaatgggcacttctgggaccctgaagagacttcttcccttcaggcttattgtttgagtgtgaagttccagagcaaggagccatgttcctctaagggaattcaggaattcagacgtgctattcccacaccagttaggtagagctgtctgttcaccctcccatcccagctgatcccagtcactgcttgctggggccatgccatggaagcttccatcagtctccagctgaatcctcctgctctctganctgctggcttttgcctnctgcactaacatnctcttaaccttgcctgccttgcat

SEQ ID NO: 596 - DNA, 563 bp, Homo sapiens
  misc_feature 466, 529, 530: n = A,T,C or G
actgacacattacgactcttgttgttgacaaacatttaagcagggctatccaaagctcacagtcttgaaggcagggaggtgtgtaaattgtaggtttttaattaagcagtaagcaagctgagatttttcttggtaaaatagtttgtttattcatgtagatctaaaaggctggctcagtttgtcagagcacaggagaatgccagaagaggtcaagggcatggggatgtatcgacatgaatccatcccaacttgtggaaaacaaacgacacagcagttaccatcacaaagaactctattagtaggaatagaagacttgaggtccaattcagttctcatttggattctatagtatctctaagaatttggttaaaaaaacaaaacaaacaaaacaaaaaaagggaaatccttactcctttcattaacaactgccacaaggagaagaaataaaagacaactaatatagatnggccttctgattaaaaaatctgtgagcttgaatacattttaatatgttggaatctagagtggnnaaccaatgggttaatatactaccaaaactttta

SEQ ID NO: 597 - DNA, 477 bp, Homo sapiens
  misc_feature 240, 282, 294, 300, 328, 329, 332, 333, 341, 350, 356, 359,366, 375, 383, 395, 398, 400, 403, 412, 421, 430, 431, 436,438, 445, 456, 477: n = A,T,C or G
acttttctttttcttccttttttttggaaattattttcctgagccttttgttttacggtatattgtaaacttttatgttaaagaaaaaatatacatttacaaattgtgagatttttaagagaaattttctacgatgtatactggcttattttttaatttaaaacggggtttccgtcggcactggtggagggggtgcgccgttagtcccctcgctcctggctttgggggttgggacttggnggtccagaaactctgggagcttctagaagaaatctactgagngtatttctgttntttgtnaattccttgctttgtcgactgacctgcnnggnnggtctgangtgaactgngggggntgngcacagncagccgagnggatcccncccagcgctganccntnccnagatggaangcctttctnccaaacccnngcctngnggggcgngtccgccattnaccactcttgccacttgtttn

SEQ ID NO: 598 - DNA, 264 bp, Homo sapiens
  misc_feature 140: n = A,T,C or G
ttcgccctttcgagcggccgcccgggcaggacgcgggaacgacattttttgtaactttacacttttttggttattttattttaaaaaaatgaaaaattaatttaaaaaaatgcaaaaaactgttggattatttattttanaaattcccccctttgtgttggactgcaaattgagtttctttctctttaggcctttcacaactaggactgagaatgtatgtaaaagttctgtgacagtacctcggccgcgaccacgctaagggcg

SEQ ID NO: 599 - DNA, 562 bp, Homo sapiens
  misc_feature 528: n = A,T,C or G
accaagtgagtgggaatacatattctagttaaagcatttgtgtctagctacacaccgctaacaaagttacttagttatcaatgtaggattcttaaggagctttaagctaaggaaaccttttagtgacttagcttattttgtatcttttcacttaggaagattttggaggtgatttttttccataggaggataccatctggcggctgcacattgtaacagtaaaggcagaaagctgtagtgataacctctctcctaaaagagttaactggtctcatccagcagaagctatcttaaatctgtgatgtgtcaggtgcagccaaatatcacaccttctgatcttagccatcccaaaccagtatctgtcccgagaggaaattccccccacccccagaagtttacagaaaactgcctcttcaagtgtttgccttattcagctttttacttgtgccattaaagcaagcactgtagcaaaagcccacttccacatggccctggcagggagcactgctgctccattgctcattctcnctgtacctcggcccgcgaccaccgctaaggggcg

SEQ ID NO: 600 - DNA, 496 bp, Homo sapiens
  misc_feature 392, 397, 411, 413, 425, 436, 440, 441, 444, 470, 473, 477,480, 491, 493: n = A,T,C or G
acaatatgcaataatagtgacatctttcagaaagagatgttgagaatgggaattcatattcctgaaaaagatgcttcctgggaattagaggaaaacgcttatcaagagcttctgcagcactatgagcgttgtgatgttcgaagatgtcgttgcaaagaagggcgagactataatgcacctgatagcaaatgggaaataaagcgctgtcagtgttgtggttccagtggcacacatttagcctgctcctcattacggtcatgggagcaaaattgggagtgtttggaatgtaggggtattatctacaattcaggagagttccaaaaagccaaaaacatgtattacccaattctaataatgtggggattcagattgttttgttggaagagtcatcncctanattacccagacagncncctggatccaanagtaaaatctnctgnngcnaggcagcaaatttagaaaaaaatgtntcnacanctntttatattacntncgg

SEQ ID NO: 601 - DNA, 505 bp, Homo sapiens
accagtgcgaatcatcgggctatccaggtccgagatcctagtctcctgtcggctctgaggaggatggatccttctgcggatacatgggacctcttctcacctttaatatcattatggataaacaggttttacatttatttgggctttgctgttagcattagcctttggatttgtgtccagattgtcatcaagacgcagggcaagaacttacaggaaaaatctgttccaaaagcagctcaggatttgatgacaaatggttatgtctcccttcaagagaaagacatctttgtgtctggagtgaagattttttatggttctcagactggaacagcgaagggattcgcaacagttcttgctgaagcagttacatccctggatctgcctgtggccattattaatctaaaagaatatgatccagatgatcatctgatagaagaggtgactagtaaaaatgtctgtgtcttcctgggtgcgacatacactgacggcctaccaacttgaaagt

SEQ ID NO: 602 - DNA, 558 bp, Homo sapiens
  misc_feature 96, 171, 179, 230, 238, 312, 381, 386, 391, 422, 424, 437,440, 441, 459, 473, 481, 484, 487, 489, 493, 501, 507, 508,511, 521, 523, 538, 543, 547, 555, 556: n = A,T,C or G
accaaaacctgcaacaggctcatggaacagagcctagggatctaggagcataggaggtggtggtgctgggcagggctctgcatcccctttcctcancacagcaccatcttcaccctcctgggaaagcagcattggagcctacaccgcttgtgcttttctcaccagggtaanaaatgcangtatttgcagaggggagtgagtctggaaggtggcagagcacagctagggcnagacttangggaacttgtgggaagagtaactgtggaacctacctatgctctcttgaccccaaactccccaaaacccctcacntgaggactgtctacccccggggctcaaaataaactgcttactggaagatgggtgacttaaaggcaaaanggaangctgncccctgggctccccaatcccctgcttgcaananctggtttgtgatnctnngaaaacccctgcattttnccctttcagccaanctcctcanagnttnanacanaaaggggntggagnnganggtcctattntnactttacccctcaangcccntttncacccttnnac

SEQ ID NO: 603 - DNA, 409 bp, Homo sapiens
  misc_feature 139, 189, 218, 242, 281, 284, 287, 300, 302, 305, 306, 323,329, 333, 347, 348, 354, 357, 375, 384, 388, 394: n = A,T,C or G
actatataaaaagaaaaatattacaagaccttttgaggatcagacatcactggaattcttttcaaagaagtcagattgttctttattcatgtttggctcccataataagaagcggccaaataatctagtaataggtcgnatgtatgactaccatgtgctggatatgattgaattaggtattgagaattntgtctctctaaaagacattaagaacagtnaatgtcctgagggaacaaaacccntgctgatatttgctggcgatgatttcatgtaacagaatnatnatnagaagactaaaangnctnnttattgattttcttcanaggccncacngtataaaatatccnnctgccnggnttagagtatgttctgcantgaactgcnttgnatgggngattcacttcgatct

SEQ ID NO: 604 - DNA, 446 bp, Homo sapiens
  misc_feature 375, 394, 404, 424: n = A,T,C or G
actggaacagggataagttcttggataaggtgccaacatacctataaaagctgatttttgagtaaattatcgattctaacatatgtaatggatttggtgtgataattttctgatctttaactataagtgactttttattctccaccagaaaagataaatgactgagaatgtaagtctgcgctctgattaacacaatggagaaacggaaaaactatctctgttaaaaactgattcctgtcattcttctgatatcaaataagaggaaggaaaataaactttttgtgtgtagatagaaaaacatacctgaggccaggtgcagtggatcacgcctgtaatccagcactttgggaggccaaggcgggcagatcagctgangtcaggagttcgagaccancctgccaacnatggtgaaatcacgtctttnctaaaaattcaaaaattatctg

SEQ ID NO: 605 - DNA, 294 bp, Homo sapiens
  misc_feature 229, 288: n = A,T,C or G
acgcggggctttcacattcgggaagcgtcgggattaggtgaaagaagctgagctgaacacattacgatggatgatggaaacataagactatcaagaaatccaagtggtaatgggcgaagtttattcagcatccggcaatggacttatcgtagttggggaaacgggtgttccgaataatatcctggaagttatcaggacacctattttaaatataggcctgaattttgtnaagtaatatttaaggtggtccgtgataattaaataaaatgcttaattcatgtgactaanaaaaaa

SEQ ID NO: 606 - DNA, 214 bp, Homo sapiens
  misc_feature 107, 159, 161, 167, 175, 192, 194, 209: n = A,T,C or G
acggaaggatgctgcaagctgaccccaataaagtttctgcaagggcgaagaaaagaggccttcctcagttggggaccctgggagcaggcaaccattatgcagaaatncaagttgtggatgagattttcaatgagtatgctgctaaaaaaatgggcatcnancataanggacaggngtgtgtgatgatctcangngtaagcagatgcttngtcca

SEQ ID NO: 607 - DNA, 247 bp, Homo sapiens
  misc_feature 195, 201, 204, 216, 220, 221, 227, 237: n = A,T,C or G
acattcttcaagcacagggggccatcaatagtaaaaatctgcccttcaccattgtttaaatctatgagacgttcaaggcattccaaggaatcggtgctctggagctcctccaaattcgccatgcacatgatatataacttaaatgggaaaggaaaaggtagtggaaacctgttagctctcacttcgttgattctnagtggntanggaatgtccagngatnntttatnatttgccganacatctctat

SEQ ID NO: 608 - DNA, 451 bp, Homo sapiens
  misc_feature 399, 444: n = A,T,C or G
acatgagagtcctgccttaattttgctgtttgccctcggatctctgggtttgatttttgcgttgattttaaacagacataagtatccccttaacctgtacatggtaaagcataaatcgcacttgagattctgaattatttggctcctccatttctggaaattgagactcaagctttatgaatttatcaagaacttaaaaatgaagaaggtcacagattgatcttttataagaccttattttgatgctttgtgcttcaaggagatgatacctgtcatccatataagcaaactttttggcttacaactatttttttaatattagccttctagtctgtaatggaaattgtatattttgatagaagtttttctccattggttaaattagcattacttaaaatntggttctttagaaaataaatgcaggttataaatgtgtgtatattnaagatta

SEQ ID NO: 609 - DNA, 373 bp, Homo sapiens
  misc_feature 153, 217, 248, 251, 300, 336, 363: n = A,T,C or G
acttgttaccaactttgctttcaaaccattttaggtccacaaaaacttcactgaagtgctcccgatcaaaatctgatagtttcacaaggtatttctcaaatcgaggtaagttgaggtgcccactttcattaatataacccccaagttctggcnggatggtaacatatgttccataaagaagaggcagtgcatcatgattaatatgtaaatgaggtanatgagggattaaatcattccaacaagaaacnccntcaaaatccaatcatctattatcctttcaatatcatatttaaatgtgancttttcttttaatactgaaaactcttagtcaatatnctctctcattaaagacaagtgtagaangtgatatgtt

SEQ ID NO: 610 - DNA, 609 bp, Homo sapiens
  misc_feature 468, 478, 491, 501, 505, 574, 576, 577, 604: n = A,T,C or G
acgcggggactacgatggtgatgagtttcgagtggccgtggcagtatcgcttcccacccttctttacgttacaaccgaatgtggacactcggcagaagcagctggccgcctggtgctcgctggtcctgtccttctgccgcctgcacaaacagtccagcatgacggtgatggaagctcaggagagcccgctcttcaacaacgtcaagctacagcgaaagcttcctgtggagtcgatccagattgtattagaggaactgaggaaaaaagggaacctcgagtggttggataagaacaagtccagcttcctgatcatgtggcggagccagaagaatgggggaaactcatctatcagtggtttcaggagtggcagaacactccgtctttaccctgtatgaactgactaatggggaagacacagaggatgaggagttccacgggctggatgaaccactctactgcggctctgangcctacacangagcacaaggccngatatactgnagcntgccgagcgtaagtttttacaggactgctccttacttttactccactttcagggttaaaagaaaaaccntnncccaaatggttttgatccaactaaagnctctc

SEQ ID NO: 611 - DNA, 445 bp, Homo sapiens
  misc_feature 303, 341, 444: n = A,T,C or G
acatcattgggaatggagggaaataaatgactggatggtcgctgctttttaagtttcaaattgacattccagacaagcggtgcctgagcctgtgcctgtcttcagatcttcacagcacagttcctgggaaggtggagccaccagcctctccttgaataactgggagatgaaacaggaagctctatgacacacttgatcgaatatgacagacaccgaaaatcacgactcagccccctccagcacctctacctgttgcccgccgatcacagccggaatgcagctgaaagattccctggggcctgnttccaaccgccactgtggactctgaggcctctgcattncgggtgggctgcctgtgatattttgtcatgggctggtctggtcggtttcccatttgtctggccagtctctatgtgtcttattcctttggcttcattaaaacana

SEQ ID NO: 612 - DNA, 572 bp, Homo sapiens
  misc_feature 382, 432, 506, 510, 532, 538, 543, 544, 554, 561, 564: n = A,T,C or G
acgcgggggaagaggtgaaaattcccctggtaaatatttcactccttccaaaagacgcccagttgagtctcaataccttggatttgcaactggaacatggagacatcactttgaaaggatacaatttgtccaagtcagccttgctgagatcatttctgatgaactcacagcatgctaaaataaaaaatcaagctataataacagatgaaacaaatgacagtttggtggctccacaggaaaaacaggttcataaaagcatcttgcccaaacagcttaggagtgtctgaaagattgcagaggttgacttttctgcagtgagtgtaaagtgaatggcatgaccaggtcagaatccacccctggcttggagacccacaagatttanagtggaaactcacacccaaaaaccataggcggaaatgtgacaaagaaaancccctctctgatgttcactggaagccagacgaaaaaaaaaaaaaaaaaaaaaaaaaagtcccgggggaaccaanctanacccccaaccaacaactcctanaacacntaaanncccccttttncaaaatnggnaattttgg

SEQ ID NO: 613 - DNA, 495 bp, Homo sapiens
  misc_feature 335, 356, 408, 442, 454, 465, 468, 474, 494: n = A,T,C or G
acttcaaatcacatagcttaaaatatggagaaaagacaggtaaaaaaattatcttaacctgtagtagtcttttttctttttaaaatttttataaaatacactaatttcccaaaataaagaatattatgacacattggtgtcaacttacacaaatgaaagctgatgccagctttttcctaactaaagttcatttcaccaaacctttatatattacatgaatatccaagtaaagtattttttttttttaaattcaacacacaggaacataatatacattgtttttttttttaaaaaaaggttaatttaggaatgatttcatcttcaccacataaggntcttttaagaccattgaaccntttgcattgcaagactttcagtcatggttcttttcccagttttattcttaangaaaaaaaaaagagaaaggtttattttttttccngaaaaccggggnaaggactattnttncagctngcttccttcttggttccgant

SEQ ID NO: 614 - DNA, 523 bp, Homo sapiens
  misc_feature 316, 463, 483, 495, 496, 512: n = A,T,C or G
acgcgggggacctttgtagcacctcaacatgaaagggcattagctatgtttcctgtttttacagtgatcaccaaacagatcttgccactttgattgttaaaaatgaaccacattctagccctggtctgggactttggagggagatgaatttcttgttggaaatgtaaatctagtgtccatatttaatactctcacagctttgtgtttattctctttgctcatggaatagcagaacaagataaacatgggttaagacatttaggagaacctgctgtatctaacccagttggattttctttcatgcttaacacagtantgaaaatagaaggtaggccgggcacagtggctcatgcctgtaatcccacactttgggagctgagcaggtagatcacctgagttaggagttcagaccagctgccaacatggcgaaccctgcttacccaaatcagaaaattactggcgntgtggcagcgctgaatgctntcttgggacccnngcaaaaattgttgaantggaacaagtt

SEQ ID NO: 615 - DNA, 548 bp, Homo sapiens
  misc_feature 328, 366, 382, 433, 478, 488, 500, 512, 518, 531, 541, 547: n = A,T,C or G
acgcgggggtcacagaccaagcaaagagacgcaatcagcagctggtctcacccttcctctgaacagtgaccaaacctttcacctgatgagcaacctggctggggatgttatcacagctgcagtgactgcagctatcaaagaccagttagagggtgtgcagcaagcactttctcaggctgcccccatcccagaagaggacacagacactgaagaaggtgatgactttgaactacttgaccagtcagagctggatcaaattgagagtgaattgggacttacacaagaccaggaagcagaagcacagcaaaataagaagtcttcaggtttnctttcaaatctgctgggaggccattaatctaggatcancttgcacagagcacanaaacaccaaaaaaaattcaaacagaaaaaaaaaaaaaaggaaaagaaaaanttgactgtactttatgatacttagatttgtttatttcctctgcangaattaatgntttaatcactgnactgtaattganttttgncgtattttggtanaagcatgaangacttna

SEQ ID NO: 616 - DNA, 486 bp, Homo sapiens
  misc_feature 151, 204, 236, 259, 266, 294, 301, 365, 434, 435, 436, 449,453, 460, 481: n = A,T,C or G
acccaatgggcagggaagatcaggaagagatccatgggacataaggaagttaggttactgcgcatagctcccaggagattgtcccctccatttctcccactcattcttttggctgtgggagtgttccctctaagctgatccactaccagcngctggaacactcccctaaaaagctagcttggcttcctgggcagccagttcttnaggagcaaggcttgttaagttcttgaagctgncactgctgcaggcccccccttancgcacanaggacaatcctcaccaacacgccaccanccactcnaatggaattcctattcccaaggctgacgccaccttctttttccactttgggtggtgaggcttgnagtatctgccaattacttcaatccctcatctattaacttctgtcctcataagtggtgatggaaatcaannnaccaagttaggangaangaccctncccaaatagagcctttgcaanttcat

SEQ ID NO: 617 - DNA, 324 bp, Homo sapiens
  misc_feature 223, 287: n = A,T,C or G
acaggtctggcatggtggccaccacgtgcatctcctgaatgatgtcatttaggtccagctcggattccatgaacttctctggattgtctggaaacttaatccgcaattcttggtttttatatgatctcttttcaaatgtgaggatcattttcttcactgagctttcatccaatggctcctcctcttcctcttcctcttccccatctctgtcaataatctgcancagcctttttttgtcatcatccgcttcctccaccacagtcatttcttcttcccgatagcggcgngttctcgagtacctgccgggcggcgctcgaaagggcg

SEQ ID NO: 618 - DNA, 270 bp, Homo sapiens
  misc_feature 75, 95, 106, 150, 189, 198, 212, 236, 237, 242, 246, 257: n = A,T,C or G
actgcgtttgggcctcaaaaggacatccttgaagtccagtttcacatcgttgtcaatatgaggcatggcgcttancctcggggtagcgatgaatntgagggctcgngcaatcccgctaagccttctgggccacgccaacaggttcctctngttgccggcaagaactactagccgacgaattccagcttnggcggcggnagggcgaggccttnttggataacatagttcacgcactnnccganactntgctttgtacnactgtaaagggca

SEQ ID NO: 619 - DNA, 498 bp, Homo sapiens
  misc_feature 402: n = A,T,C or G
actagtaacaggcaattaacaaactaataagaaaatcagcattttaacaatttaaacgcttcatgacagggtaattcatgtccaacatatcaaaaacatatttatagataactttagaaagaaaatacatacttttttttgataatcacaagtagcaatgagattttctatattattttcagtctcactttagaaatgttttaattgtctaaatttaatcaattcatcgattaaaggaaagacaataaaatagtaaaattacatgtgtttatatataagtgtgtgtgtttcaaataacaaaacgcaggttgtaaactaaaatcactggaaggcaaattgaagacaaaagtgatgctggtttaagttgtttggtcttcacataaattccagttccaagttgtntttcaactctagtaatatccagatagataattcacctgcactttttcttctatcctgtttctcttgtccactgaatttgcttttactgaactgtaa

SEQ ID NO: 620 - DNA, 490 bp, Homo sapiens
  misc_feature 33, 295, 345, 462, 475: n = A,T,C or G
acttttttttttttttttttttttggtccttanactggttaatttcaattgctttatctttcagtttgctgattctttcttctgtctgctcaaatctgccattgcattcctctaatgaatttttcatttcagctgttgtaattttcagctccagaatttcgatttgattcttttttactatttctttattgacgttccctattcattcatacattattctcctgttttccatcagactttttcttggtttcctttacctactgactatatttaagagagttaatttgacatcttnggctagtaattccagtgctgggcttcctcaggagtggtttctgtcaactntttttatcttgtgaaagaccatacttttatgttccttgatgctttgaattctttgtaagactggatattttgcgtttgaatgtggaactttggaatcaattccctcctctcagtgangtgattttgtttngaggctgctgctgcc

SEQ ID NO: 621 - DNA, 396 bp, Homo sapiens
  misc_feature 289, 383: n = A,T,C or G
acagaactcagaggaaaaaagaaattaaattttagctttctggagagcagcccctctctggcaccatcaaacacttctttgtttcccttcaacttggaactcttcaaacatcaggggttgtgagggtttggccattcttttatcttgggtccatgtgagtgacagaaatggtgcggcctgggaaagatctccctcctttacattttctcttctccctcctcctccttattctaaaaactgtgcctccaacagaggggcaggggctcttgtagagagatccctggcccangacaggagatgccaaatctaatttatctcactgagggcctttgagaaaaacgcttcagggccaggctcagtggctcatgcctatataatcccanacttttttttttt

SEQ ID NO: 622 - DNA, 403 bp, Homo sapiens
  misc_feature 245, 270, 312, 353, 376, 383, 403: n = A,T,C or G
acgcgggggccaactgaatggcgtctgtcctgtcatccatatggtgcctggaaatatttaccagtcaaggtcaaggtcagcatctgtggttaaaaatatagcattctgacctaaaaaagttattttgcagatgaatgtgttttcaactcaggacctatccaaatgaggaatttttaaatattctttttttttcctatttttagacatcaattctatagattctgactttttctaacctcttatanacatgccaaatgctggcaaaaagangtgctttttggatatggcagcacttgtaaaaataaagcagtnagcaaaatccttttaaacacagaaatcctgagttcttctcnttggtggctcaacaattctgtancaaatanatcctttgaaagagaattan

SEQ ID NO: 623 - DNA, 416 bp, Homo sapiens
  misc_feature 84, 119, 126, 212, 269, 272, 300, 314, 320, 326, 339, 347,375, 378, 381, 383, 389, 390, 396, 411: n = A,T,C or G
acgcgggcttttacgtcggccttcgcgagcgtctgggcgggtggtaggaacaatggcgctgtcttaagtgacacagtggagcanctctgaagatgcaaagatacacgaaaaaacttccngaacatntgggagaatatttaatggaaaatcgcttggttaaaacctgacacttttaacagtgaacagcgttctgagtgtggacgagtagccantgaagataatgaatgtcgaatgtgactgactagcaacttcattttgaatgagggtcnctngtctgcccatttgatagaggccagatgnttgaaagttcaaanttgcanctattnttgctagtgccanaaggttanttgatgtgggggaaagctgttaagaaanccntcnanaaaaanntctttntttacaacatgaaanaaaaa

SEQ ID NO: 624 - DNA, 617 bp, Homo sapiens
  misc_feature 27, 218, 263, 287, 379, 401, 411, 475, 494, 517, 526, 539,545, 548, 569, 576, 578, 579, 581, 586, 587, 616: n = A,T,C or G
acttttttttttttttttttttttttngaattaaaaaatccattttattgcttgggtttaaaatagttgggggatacaagtatttacaatgctattggagtcaattattggcaacactttgcaacagtaataccatttctagcttttcaattggcaatacttaaaaccttactgtagtgacctgattttaaataccatattatatttactaagttaanagctagtttttactctcttccataatttcattacatgaatgtaanatgatggctcaaaaatgacgactnatagtttgaatttatgtgtatgcaatatacatatgagaaccaaattcaacaagtgcatgatggtactcatgaacattgattgtatggcctgncagttattccttggtcaataanactgaagggncaacccttttctttcaagagttggcctttctctcgattttagaattaattggatattttcctcntgcctctcatatgattagngggaggttcatccacaaacaaanacaggaaanttttgcaaccttnctgganttncctaggggaccaaagggattnattcaananngntttannaaaaaaaagctcttttttaaggaaaaacna

SEQ ID NO: 625 - DNA, 638 bp, Homo sapiens
  misc_feature 201, 285, 294, 323, 510, 547, 561, 570, 571, 572, 578, 581,587, 607, 612, 617, 629: n = A,T,C or G
accaaatggaatgaataggggagaacatgcattagttctgtttgaaaagtgtgtgcaagataaatatttgcagcaggaacatatcataaaaaagttaattaaagaaaataagaagcatcaggagctcttcgtagacatttgttcagaaaaagacaatttaagagaagaactaaagaaaagaacagaaactgagaagcagcntatgaacacaattaaacagttagaatcaagaatagaagaacttaataaagaagttaaagcttcagagataaactaatagctcanacgttacantaaaaatgccagttcagcagttacacaanagatggccccaccggatggaacaggccaacaagaatgtgaagaggccgccaagaaaaagaagcatggtatgaaatatgtaagagggagaaggatctttagatcttcgaaggaaaaagagcacttgagaaaaaccttagagtgcaataggacttgagaaaacactacaattaacacttctcagagaangcggtgcccactgttgaactaggaggcaaccgctagntctcagagaatganttttagggnnnttctcncgncttaangaagggcccaacattaagcnggtgntcccnggaccaaatacnctgaacccc

SEQ ID NO: 626 - DNA, 434 bp, Homo sapiens
  misc_feature 275, 288, 290, 330, 360, 417: n = A,T,C or G
acaatgattcttaaaaaatctttggccttagtggccttttttcttcacttacacattaaaaatgctgctgcagtaaccagtgtttgggaaaggacatcagtcttcaagaaccataaactgacagaatttcaatacagtaggtttccaaattgcaatttgtagtgcacatgacagtaagcgaggttttgggtaaatatagatgaggatgcctattcagacaatctacttcaagtaaaaaaaaaaaaaaaaaaaaaaaattcacagatacccatcanttctactttaggntntaacagtgcttaatctgagaaaacaatgcttcacaaaatntaagttactggggtgataattaaaaaccangtggtaataacaatatctcaaatccaggccatagctgaataataaccagtcctcggncggacccgctaagggcg

SEQ ID NO: 627 - DNA, 615 bp, Homo sapiens
  misc_feature 257, 409, 479, 512, 543, 563, 565, 573, 576, 584, 586, 591,594, 595, 610: n = A,T,C or G
acagaaataaaataatgggaattatcattaacttcaccctggttttctagcttagtagaaccaaacagaagaaatcatggcaataaccattaactatagaaaaaaggtaatggaaaaatggttgcaggtttaatcacaaaatgaacttaatttttgttgattttgttttatctgctaaaacactaatatctataaatatgaactgacagcatcgttctaaatttacttctgaagagctgtcgagacttcaataaaanataagcaagttactggatcatatttatgggctgctgaattaactacccgaaaagtatcagttctttcaaagaacacaaacaaagtgaacgtggaaaaaagcctctttgcaaagtcctttattagtcctatcctctaaaattccagcccagancttgatattcctggattctgtttaagtaccttagtttaaatatgacactgggattgcacatgggaaaggnaggattgtgaccaaaattatttcttttccaagnagcatttcttaatctctatcactttgccctncctgtcctggcggaccctangngatcaccntgngcgtctgngnccacnggnnactgcgatatgctcngtccg

SEQ ID NO: 628 - DNA, 458 bp, Homo sapiens
  misc_feature 285, 294, 353, 379, 380, 385, 387, 389, 397, 401, 409, 418,430, 432, 453: n = A,T,C or G
acgttcccattatattcttgctgtcaatcaatcacaaatttatatcagattaggataaactaagccattttatgtattttattttaaaccttattttggcagagtaattccttagaattggaaaagctgttactttgaaattaccaatttattacaaaacatagaaatgtattgtagctacaaagacaaccaagcattttctgtgttttaatgaatatctaaaaaactacatttagtttattttactcagttttgaatgattttttactggctctattgctttanaaaactaanagattaatgattctttggataatttccttttcttgatcttattttacatttcgcagagntatattatagtttagtaacaatggcnnatgtntncnggataacngaancaactaangtgttgggnattagaatatantngtgagcagatggacactgggnatatg

SEQ ID NO: 629 - DNA, 590 bp, Homo sapiens
  misc_feature 324, 356, 397, 434, 479, 497, 505, 515, 521, 551, 563, 569,576: n = A,T,C or G
acatgacctttagtgaagattatttgtcatcaaattacccatatccaagtttccatgggcctggaatttcctttccacttgatagaagtatatattaggaagtccagttaatagtatttttatttaaaaaaaaaaaaggaaaaaagaatcagcagagtcaagttgtcttagtcttaaggctttctggatttcttccttggaggaggtcaggatcttcccaaggcctgggtcctcgaatattcttccagtctcaaacttggagcttttgatttttcatattccgactctaaagatttttattctctttcagttttttcagctcangaccattttactcttcacagcatcatatcggntttgagaaactccgaagaccaaaagacctcacaatcagcancaacatgggggactcctagccgagagcttgtcttgcnaaagcaccatcaccggggtgcaacatgagtgactctcctcgctanactccacggcctagccanactccaanctacagctcngctctncaaacgatacctgccggcggcgtcgaaagngaattaccacgnggcgtntatggtnccctgtcaactgcg

SEQ ID NO: 630 - DNA, 626 bp, Homo sapiens
  misc_feature 263, 323, 510, 549, 553, 578, 579, 581, 594, 604, 606, 614: n = A,T,C or G
acagagttaacaagttttgagttttttatataggaaaagcctagtcaattcagatgctttctagaaaaattaacattaaaaaacaaatagaaatccatgactaaagggggaaaataactttcaaaagttaccaaaattcgaatcatatcagggaccattataaatttcaaacagtagatttaccacacatattgcattttcaaattctaatgtagcaaaacgtaaccacataatttggctacagctaatcgtttcagaaaagnttaaaaaattagcaaagttatatctataaaacttttggagtttctttttgcaagaaaaangcttaaatctttaataaaggaaacaaacaatcctcttaaattcttataaataactctccagacatatattacaaatctgtgtaagctttctttcctgagagacttccaggatccttatccaaaggataccttaaagagtcttcatcatttctcatgtgatatgattaaactctataaagggatgggnatatgcatcttatctgccttcccattgttcttctgaagnattnttaagaaaaaaacttttgtaaggcnntnttacctcaaatgntgcttggganantgtgaaanaaaaaaaagaag

SEQ ID NO: 631 - DNA, 633 bp, Homo sapiens
  misc_feature 540, 551, 568, 571, 579, 592, 602, 628: n = A,T,C or G
actaaaggagataagtgtaagttctcccatgacttgactctggagagaaaatgtgaaaagcgaagtgtttacattgatgcaagagatgaagaacttgaaaaagatactatggataattgggatgagaaaaagctggaagaagtagtgaacaagaagcacggtgaggcggaaaagaaaaaaccaaaaactcaaatagtgtgcaagcatttcctggaagctattgaaaacaacaagtatggctggttttgggtatgccctggagggggtgatatttgcatgtatcgtcatgcacttcctcctggatttgtgttaaaaaaagataaaaagaaagaagagaagaagatgaaatttcattagaagatctaattgagagagagcgttctgcctagtccaaatgttaccaaatcctctagatcttttcttgcctggaagaaaaggaaagacaagaaagattgataacttgacaagatatggaagaaggaagctgcttcaaagcagggaagcctatgacagggtcggagtgttgattctcctgactgncatgtgatatnagaacaatgtcccctcnccngacagggngtgaggtgtatcnggtgaatgantaatttaccgcctgcggaccctaggngatca

SEQ ID NO: 632 - DNA, 332 bp, Homo sapiens
  misc_feature 170, 208, 216, 234, 239, 267, 276, 281, 289, 291, 298, 304,309, 329: n = A,T,C or G
acgcggggatttaattttttcttttttttaagtggggaggaaggggaagctagatggactaggagagacttgattttggtgctaaagttccccagttcatatgtgacatctttttaaaaaaaataacaacaaaaaaaaatgagagaaaagctaaaaaaaaagtaaggggngagcagttaatggtattcattccacatacaatatctgngtaaaacnattttctggtaaaagtancttcnatggtttttgcttttataataccggtangtctattcntaaancctctcgncnatgcttnctttcntgggntttaaactttatataacttnaga

SEQ ID NO: 633 - DNA, 386 bp, Homo sapiens
  misc_feature 110, 167, 188, 192, 193, 236, 239, 252, 256, 259, 264, 282,298, 304, 307, 312, 313, 329, 335, 340, 341, 345, 372, 380,382, 385: n = A,T,C or G
accttgggtctgaaggggtcactcaagcgctctgctatctcttcagctaaaacgggtgtcaggttttcagctgctactaaagataatgagcataagcgtcactgaccaanactccagccagaaagctgcacatgtgaccgtgtctgggggcaccccaaaaggcgaangctgtgcttgggacacacaanttanngaccatcacggggaattctgctgctgttattaccccattcaanttnacaactgaggcancgcntantccantctccaataataaaccantgtttgatcttaaagnatgtgngtntcgtnncctcaactatgacaanacaaangaaannttanaccatggggggcaatccaaatgaaaanaattatcnanatna

SEQ ID NO: 634 - DNA, 499 bp, Homo sapiens
  misc_feature 49, 53, 60, 98, 104, 124, 138, 217, 225, 240, 243, 249, 277,281, 313, 315, 321, 331, 335, 338, 357, 359, 360, 361, 362,374, 384, 385, 393, 396, 403, 411, 418, 419, 424, 431, 434,446, 447, 453, 454, 457, 465, 477, 487: n = A,T,C or G
acttttttttttttttttttttttttcctttaacatttaatagaaactntatncaataantttttactattttttacataagatagcaaccacagaantttacntaggttaaaagcaagacggntaaggaggacccantcctgtgggctgttttctcagaggataaaaagccaaagttcaccagggaaaggggttaaagactgcccaatttaagtanaggggaanaaaagctaaactgcnggntttcanataaagataaccgattttaggccttcantttntcaaagaccactcacaaagacagtccccctantncttaanggggattctntccntgntggggaaatcccttcaaanannnnctttctttaggntttgcccaannaatccaanaancttgatnggattatnttttttnntttcnttgcctnagnggaagaaacccnngccacnnccnaaatttgntttcgttgactntttcccaacnaaaaaaaacaag

SEQ ID NO: 635 - DNA, 578 bp, Homo sapiens
  misc_feature 366, 372, 445, 511, 528, 536, 537, 546, 547, 554, 563, 566: n = A,T,C or G
acggcagggaagaactggaaactcagagaaagaaactgcccttccatctacaaaagctgagtttacttctcctccttctttgttcaagactgggcttccaccgagcaggagattacctggggcaattgatgttatcggtcagactataactatcagccgagtagaaggcaggcgacgggcaaatgagaacagcaacatacaggtcctttctgaaagatctgctactgaagtagacaacaattttagcaaaccacctccgcttttccctccaggagctcctcccactcaccttccacctcctccatttcttccacctcctccgactgtcagcactgctccacctctgattccaccacccgggttttnctcctncaccaaggcgctccacctccattctcttataccaacaatagaaaagtggacattcctctggttattgaatagnccgttctgcacgtgcatttcatatggcaaagttgcctttccccatcttcctgggtctgctccttcntgggcctaattcttggnggacaccnngccaagccnntgggganctatttatngcntaggaaagagag

SEQ ID NO: 636 - DNA, 559 bp, Homo sapiens
acgcgggggggtttcctgggctactacgatggcgatgagtttcgagtggccgtggcagtatcgcttcccacccttctttacgttacaaccgaatgtggacactcggcagaagcagctggccgcctggtgctcgctggtcctgtccttctgccgcctgcacaaacagtccagcatgacggtgatggaagctcaggagagcccgctcttcaacaacgtcaagctacagcgaaagcttcctgtggagtcgatccagattgttttagaggaactgaggaagaaagggaacctcgagtggttggataagagcaagtccagcttcctgatcatgtggcggaggccagaagaatgggggaaactcatctatcagtgggtttccaggagtggccagaacaactccgtctttaccctgtatgaactgactaatggggaagacacagaggatgaggagttccacgggctggatgaaaccactctactgcgggctctgcaggccctacagcaggagcacaaggccgagatcatcactgtcagcgaatgggccgaaggcgttcaaattctt

SEQ ID NO: 637 - DNA, 563 bp, Homo sapiens
  misc_feature 24, 105, 127, 279, 426, 488, 529, 550, 562: n = A,T,C or G
actttttttttttttttttttttngagttttaggtatttatttacaaagttcttactaatacaattgcttttaaaatgtagcaaagagtcatttactactctcanaagtggcacatacatggcatanaaaacaatctatagtcagttaactattaaaacagaaacttgaaatttaagtgacaaacatttgtagcactccctaaagaaataggaaataaaaatgcatttatccatatgaacttgattattctgaattactgactataaaaaggctattgngaaagatatcacactttgaaacagcaaatgaattttcaattttacatttaattataagaccacaataaaaagttgaacatgcgcatatctatgcatttcacagaagattagtaaaactgatggcaacttcagaatttatttcatgangggtacattttgatagtatttgataggcttttttccaggtcaaattaatttagttgcttgcnaaatataaaatcaagcttgctccagttccacaaggactccnccacagtctttaggatggganaaaaaatcactng

SEQ ID NO: 638 - DNA, 559 bp, Homo sapiens
  misc_feature 3, 5, 6, 39, 68, 70, 74, 105, 114, 133, 146, 149, 157, 219,223, 231, 240, 264, 277, 321, 376, 499, 510, 531: n = A,T,C or G
acntnntttttttttttttttttttttttacattctcancccatgctgctttattgctaaaatatatntntacncaggggcagagcttccaacttttttaacagntcctttttncatcaaaaaattaaatttnttcaaaaaccccnaanatgcatanattaaaaagcaagctgccttttgtaatacttaaaataatattcaatgaaactcttaacgttntacnccaatggngcaatgganaatatggaggacagcaagtaaacncagtgagcaactnttattcttacaaggcagtaggtaaagtataatgtgaaggacagnctaagataatctttctggttataaaaaatgggtcggttttgtgataagtgccaanactgttactgtttaaggattgatgataatgtattaccagaatacctttcttatccctgggagaaaatattttttcactgatggaatgacatatcaccaagggagaaaaaaacctggatactgncagtaactaanatacctattctgactttaaanaaaaattaaggacttcatgggagaaaat

SEQ ID NO: 639 - DNA, 468 bp, Homo sapiens
  misc_feature 464: n = A,T,C or G
acagaaggtagatttagaggtgaggggcaataagtaaatgactcgcacagatggtgttcatgctcaatgtttctcttctgaacaattttcagatttggtgttaaagcaccttctggccaggcgtggtggtttatgcctgtaatcccatcacttcgagaggcggagtcgggtggggattgcttgaggccaggagttcaagactaccctaggcaacatagtgagatgctcgtctctattaaaaaaaaaaagaaaaaaaaaggggacccaaggccatatatctgtttcattcctagaaactctccacagtgtcagatgaagactgcaaatccagtggtcctacattcacagataattcctagcctttggttagtgaggagaatgggatgggaggacacaaaatgagaacttttttgtggtatgctcaattcgtatctggcagtacctcggcccgcgacccccctaanggcg

SEQ ID NO: 640 - DNA, 571 bp, Homo sapiens
  misc_feature 219, 308, 357, 414, 498, 526, 544: n = A,T,C or G
acgcggggacctacctgggataacggcggcgagcggacggctgcatttacggggtctcccggagggccagagtcgtggcttacagaagagacgaaatgtggtctgagggacgatatgaatatgaaagaattccgagagaacgagcacctcctcgaagtcatcccagtgatggctacaatagactagttaatattgtgccaaagaaaccaccactgctanacagacctggtgaaggaagctacaatagatattacagtcatgttgattaccgagactatgacgagggccgcagtttttctcatgatccnagaagtggccacctcacagaggagatgaatctggttatagatggacaanagacgatcattctgcaagcaggcaacctgaatacagggacatgagagatggctttanaaaaaaaagtttctactcttccattatgcgagagagcggctcttataaaagggacaatacttttttcagagaatcacctgttgnccgaaaggatctcccacagcagactggntccttgtcagtagcaganctctctccagaagggcagatcatctct

SEQ ID NO: 641 - DNA, 570 bp, Homo sapiens
  misc_feature 89, 100, 168, 179, 186, 303, 318, 343, 359, 375, 401, 450,471, 480, 498, 509, 516, 558: n = A,T,C or G
ggacttttttttttttttttttttcaacttaatttactttttattaaaaccaacctgctgaaaagaatacaaattttgactaggagganaaagggggagnggatttatgattttatggcaattataacaggagtgtttcaatggagactttaggcaactagaactcancatgaaaccanaaggtanaagctgataaaggcaggggtaaaaaggagaaaatgagttcaaaacaactaactttcggccaggtgtggtggctcacacctgtaatcccagcaatttgtgaggccgaggtgggccggntcacaaggtcagganatggagaccatcctgctaacgtggngaaaccccatctctantaaatacaaaaaattngccgggtgtgacagcatgtgcctgtngtccctctactcaggatgctgaggcaggagaatggtgtgaacccgggangcagacttgcattgagcaaanatcggcccntgcctccaacctgggcgnacagacgaganttttttnaaaacaaaacaaaacactagagggcattttgcatgcaaattntgctagcatatt

SEQ ID NO: 642 - DNA, 567 bp, Homo sapiens
  misc_feature 370, 460, 508: n = A,T,C or G
acttgagtgctgctgagcttcagcccactgagagtttacctctggagttcagtgatgacttggatgttgtgggtgatggtatgcagtgtcctccttcacctttgctttttgatccttcactaacccttgaagatcatttagtcaaagaaattgctgaagacccagtggatattttgggccagatgcagatggctggagatgggtgcagatcccagggatctcgaaattctgagaaagcctctgcaccattgtctcagagtggattggctactgcaaatgggaagccagaacccacttctattagttgatagtttggggaaccattttactttggtggatttaaatttctcgttcttcaaagaagtatttntgatcatctctcacaaaacacaggcaacccagactaccttgtttttcttctggattgagtattatagtcaaacgtaaagccaaattttgnggacgtggaccgtgggttcttcccactcagggcaaggaagagaaaganagatatccctatcaaagctctgggattatttgggactatacctaaaggaagtgacatct

SEQ ID NO: 643 - DNA, 559 bp, Homo sapiens
  misc_feature 38, 108, 118, 151, 179, 195, 215, 262, 276, 285, 315, 347,349, 358, 362, 377, 378, 394, 409, 437, 442, 461, 489, 524,532, 539, 540, 550: n = A,T,C or G
acttttttttttttttttttttttttttttttttattncacttattatttattttatcttccaatttcctcttgccagactcccatccaaagagtcatagcagccttnttccaccttntacatgaaatacatccccacctgaacaaaggcncacgacaggaggaggggaataggacttngcaaactggacacggnatcgttcaaatctggactangttccgttgttactggtttcacagttacaggcttcggatggtctgcncgtgctgtttcaanactaatggnagactctattgcttctgttatgtccttatncaacctggtcagcctgcctctgctcaaatatngngtaatcaantggngaaatctgcctaaanncatcataactgggggngactgttaataatanaccacctgaaatattcatcctctccagnctttnttcatcctcatattcttgnccaagataagtggcacagcaaaaatggnttcaaagaggaatccattctggattttgccttttntggccccncgtcctnngccggacacnctaagggcg

SEQ ID NO: 644 - DNA, 378 bp, Homo sapiens
actctaatttcactaactgccaaaaggttttccagaataatctcagttgcttcattcctttaaagatgaagcccaaagaacgcatggcgattactttagaggaacaattagcagcagaggcagggctgtgctgatcccatctggcatcgctgggagctaacattaaagacatggcactttgggtccgggtccaggtcctggttcagagcagctgccacaccgtggctactagaggatccttttccggctttggaaactgaggctgactgcaccatcatcactaaaggcctgagactgctcgccgtgctcaacaccgactggagtggccatgtcttccagccacgccggccgacctcggccgcgaccacgctaagggcg

SEQ ID NO: 645 - DNA, 553 bp, Homo sapiens
  misc_feature 119, 167, 246, 350, 379, 463, 515, 536, 549: n = A,T,C or G
accctaacctgacaggaattaactactgtttttttgtggggcagaaagcaaaacctggtgttgtgacttttatcctaatggttcttaggcaaggttagtgagaagaaacacaaacccanatgcatgcattgtgcattattttgtagacaagctactttttcttctgnccctttaacaaatttgcagcaattaccctccctttggggtctagagtgaaagctaatttgtgggtagatgagattgcanaagaatggatgtccatggctgtgaacactgcacactgaacattcatctccagtgctcacactgtgcagctaccactccctggctgcgtgccatgctgtcgggtncagatttgcacacataaattcctcaggangagtttgcatgagcatccctcgcaatattctgtaccgcaggggaaagatgaaaaattttaccaagcataatatagcaaggactncccctatccttctgcataatgaattaactagaaataactttgcaggagaacnaagctaagacccccgaaccanacgagctcctaanacag

SEQ ID NO: 646 - DNA, 431 bp, Homo sapiens
  misc_feature 9, 149, 211, 219, 225, 250, 257, 342, 344, 345, 348, 368,372, 391: n = A,T,C or G
cttttgttngcggccgaggtacacaagtaaaatactacagaaattaatttctttcagcattgaagtgtttgctttcctctttatttcaactaagttgtaataatttctggtatcctggtaattgataactaagataatatctacagagnggatgccattaattctcttagcaatcacgtgcagaagggaagggtttgggccaacctagggntgtgctgnctctgncgctagtctaggaaagcacccaggngtcaggnattttggtcccttccaccacacctcagcaaatgtaaaacaagcccacagttaatggcctgtggcaaccctgccctggagaatctnannaanagcatttgaaatgaggaaancaanattcacatttaaatatctngctttggcacacagtggcttttattgattaataagcaaat

SEQ ID NO: 647 - DNA, 565 bp, Homo sapiens
  misc_feature 138, 291, 311, 329, 504, 545, 557, 564: n = A,T,C or G
accactctaccctatactccaggacttcatctttcttactgaaaaacccaaaccatcaaatgtccccttgttctacccaagaattgttctgcaacatacgccacctactttcttgctttctatgaggctgaagactanacaggcaggagtttattatacagacctgccatatacttgaagtagtgtgttaagtcaaccagaggccaagttcttgaatgctttctctgtttggattatttccacgctgctggctgtctgcctggacaggtcctgtctgcacattctcaaggntgagaaaccccaactagggnaactgcccatcagaaggngagttcactgggtaatgggagcaactgctcattgtgaaggtgacatgatgttaaaaggcttgaaaggggctgcatggtggctaacgcctgtaatcccagcactttgggatgctgagcagacggatcacctgagtcacgagttcgaactagcctgccaacaaggaaaactccgctntctaaaatcaaaaaaaaaaaaaaaaaaaaaattagtacctnggccgcgacacnctaaggng

SEQ ID NO: 648 - DNA, 562 bp, Homo sapiens
  misc_feature 525, 526, 531, 535, 560: n = A,T,C or G
actggattctataggtccaccattaaaagctggtatgggacaccaatttatacacataagggttagattaaaattttaattttttggttgatattaaactgaaatttatataactgaggtctgaatcttaaaaaaagtaaatgataaaaatttaatatagttaactgttcactgatatgtctattcacttcatcataacctatatatttaattaaaaatcaaattatgagtctgcaaatcagatgctatcaagcaaattgccatccagggtccataattctttttatatttttatctcagatgaatatatacgattcagtaaattttaatgttccaaattgttctaaaaaaaaaaattatcaaaagcttccagttaacagttggctaattcatttgctcccaacgaactacctgtttgtgttgtgaggtagcatcaaagactattgatcttctgtgacagtagtagccttaattcatacgcattccctcttcataggaagagtatggacaaccaaaaaagggacnnatgangtcnccctttcattaatcatttgcctccngg

SEQ ID NO: 649 - DNA, 562 bp, Homo sapiens
  misc_feature 434, 487, 499: n = A,T,C or G
accggaagaagcagctggcaaagcagctccctgcacatgaccaggacccttcaaagtgccatgagttgtctcccagagaggtgaaggagatggagcagtttgtgaagaaatataagagcgaagctctgggagtaggagatgtcaaacttccctgtgagatggatgcccaaggccccaaacaaatgaacattcctggaggggatagaagcaccccagcagcagtgggggccatggaggacaaatctgctgagcacaaaagaactcaatattcctgctattgctgtaaactgagtatgaaagaaggtgacccagccatctatgccgaaagggctggctatgataaactgtggcacccagcttgttttgtctgcagcacctgccatgaactcctggttgacatgatttatttttggaagaatgagaaactatactgngggcagacattactgtgacagcgagaaaccccgatgtgctggcttgtgaccanctgatttttcancaattgagtatacccaggcagaaaacccagaattggcacctgaaacactttttgctgccttga

SEQ ID NO: 650 - DNA, 560 bp, Homo sapiens
  misc_feature 36, 52, 60, 74, 84, 97, 102, 110, 113, 146, 169, 187, 198,217, 236, 253, 271, 293, 309, 311, 315, 317, 332, 345, 354,362, 370, 383, 403, 448, 481, 531, 539, 546: n = A,T,C or G
acttttttttttttttttttttttttttttttcganaaaaaaaccgccagtnttttattntcatggaaaaacanaacaaacccncaagttggagtcncgganataaaatncanatgaaatggaaaacggtctgttgtcatgaactntcactttcaaataccattttatntggaagttactttactgnggggcaaacanaaggccatgctggagtctnttacttttggaaaatgganaatcaaaaatttgctantcaacaaacaaaaaaggngggaaactccttggtaaagctntacaaacataattatncntttntnttttaccaataaaanatagctagggtanaaaaaacanatggttanaaactggngccaaaccaaagngaaagctttggtgccttctntaaactcctatcctgtttctttaaaaaacaccagtttttctaaanaaagattactctgaattccccagggttctttcnccccaattcatccctccctttcccccccaaaacccgaaaggggccttgtntttttttntccggcnccactttgggaagg

SEQ ID NO: 651 - DNA, 561 bp, Homo sapiens
  misc_feature 382: n = A,T,C or G
actgatataatctaacaaatgaaggtgcacctttacttcctggaacatagacagccaccttgtatggttggggtccaggtgataatacaaaatcattaattttttgcaaatgcaatttatttgcaattgtgttaaaattgttgttttcaaagaagtgaacttcattgttaacattgcgggcacaaagagtttcatcttctgaccaggatggacaccaattttgcatttttttctggatgaaagatttcaaacatgtcccagttttcacatcataaagttgtaggttgggtatcccagctgtgccatctttagaagtagtgtaaggctgccacgttgccaggacagtatttttgggtgagaattcaaggcaaactgccttcangaggtcgaaggagtgcagtagtcccttgttagtgacactgataatatttactttttctccattgccccaggcaaacaaggtcccatccttactaaaagatacagactttgcaattcttcccagattcccttggaaacactgtgctttctgtaaaatgtggtggtccattcaccatgtcc

SEQ ID NO: 652 - DNA, 338 bp, Homo sapiens
actgccaaggacaagttgatttctggccaggcaaagttaactcagttttttagactataaatttgtgtcttatatgctttaggtttatgtatctataaaccattcaccaaagacatgcttaatttttaagagatcaaggtgtaaattatgatgatttattattttggtctacagtgtatgtaaggttagtatgttaagcattgtttaaaaatactagtaagtcataattatgcagaattttcacaaagtttaatgcacagagaaagcatatcatttcagttactgatacatcttaacactactttcttttaaaacagacatttaacatacacaagttt

SEQ ID NO: 653 - DNA, 709 bp, Homo sapiens
  misc_feature 26, 73, 126, 224, 235, 273, 315, 343, 376, 408, 449, 469,471, 489, 492, 505, 576, 618, 621, 624, 662, 670, 671, 675,682, 683, 693, 695: n = A,T,C or G
actttttttttttttttttttttttnggctttcaatcttttatttaaatgccatgatccaggatggattttanatcttgttgaaagcagccacatccatggactgcacatagtcctcaaaagcagngatctgctcctccagcatatctgttccaactttatcatcttcaactacacactgtatttgaagtttcttaattccgtatcccactggaactagtttanatgagccccanactaagccgtctgcttgaatgcttctgacgcactcctntaatttcgccatatctgtctcatcatcccaaggtttcacatntagtaagatggaagacttggcaacaagngcaggttttttggctttctttgattcatattgngcaagacgttcttcccttagcctctttgcttnttcactttcctcctcatcatcagatccaaagaggtcaatgncatcatcatctttactatcngnagctccacttcctgtagngtnttccacatcggcnggaccatatttgcccaaagctttcttcactcctggcaggctgggccttttccttttcgtaaaacttgatgnggatttataccaaacggtagggcattgaacacaaaattcggnctngcnggtggggcctgggacaaccggggtttaaaatactggcnccatttgnnttgnggatggnncaaaaccccntngatgttaacctctt

SEQ ID NO: 654 - DNA, 452 bp, Homo sapiens
actctaatttcactaactgccaaaaggttttccagaataatctcagttgcttcattcctttaaagatgaagcccaaagaacgcatggcgattactttagaggaacaattagcagcagaggcagggctgtgctgatcccatctggcatcgctgggagctaacattaaagacatggcactttgggtccgggtccaggtcctggttcagagcagctgccacaccgtggctactagaggatccttttccggctttggaaactgaggctgactgcaccatttacagaaatttcatcatgaagatccttacacttaacaccttaaggtgatgagttttcacatgactgttttcaaggccacagccaccacctttaatcatcatcactaaaggcctgagactgctcgccgtgctcaacaccgactggagtggccatgtcttccagccacgcggccgacc

SEQ ID NO: 655 - DNA, 755 bp, Homo sapiens
  misc_feature 492, 598, 624, 636, 652, 653, 679, 687, 692, 739, 741, 742,748: n = A,T,C or G
accctaaggcaggcccactggctctttttgatcaaggattctgagaaaagctgcccttggaggcccttgaaataacatagggagcagaatgagtgctcgagtcgtggctgacacagtccagctcacactgccatcacagaggctgagtgagcagtcacccagggagggggctcccagctcattccattcccatggggcaagtgactagaaggtaagagcacccgagtaagccagtgccttcctgtatccacacccaggaataccttccagttgtccaagcagccgtagttgtaaggattcctaaatactctgcccttggcctgtagccgacgtctctccttcttgttgatgtgcctttcgatgctagtctcacctcgactgatgagaacagcatgccatacagttagggcacccagggcaagtgccacagaactgcacaggaaccagaggtagacaagactcttgtgagtcatcctttctcgaaaggagaangtgggtggtggggtcttggtgataagtctgggtggcaacccgcctgtagtttggtcttgtcgagctgtttcatttttctcatggcagcattaagcctcccgaaaanggcccaactttccatactgcagttanacacaaccccanagtcttgaaaaagccnnaaagagaagaaagttcccttggccgngaccaccnctaangggcgaatttccacaacacttggcgggccggttcttatgggattccnannctcggnaccaaac

SEQ ID NO: 656 - DNA, 712 bp, Homo sapiens
acacttcaaatgctgattctgttgaatcttcttattttttttcccccaatgaacttagggcctatgatagagaagatactgaaacatgctaagataataattggtcttagaaagactttacagcaagtatttaatgaaagccactacacttccagctctaaaaagagccagacacaatccctgcttccagagttcaccattcagaatacaggaggtcaagcactgattctgaatcattaatgggctttgatttcgtctttcaagatttgcatagatactgatttcttccggaagggcaaataaaatcttcccttacacacatcattctttggattctcataaggggtattttgaagtctgtatgttgacaaggccagtagatactttgttttctctaactgccttcttctacttaagactatgtcaagtattttgttttccctttcagttctccccaacatacaccttctgcagttttgtctatccagtccgcttttctgtaacactttgctccccattctgttccccttcactgtttctctgttgctttcctccttaatagaagcctggtgatctgggcttcccatcttttctttcctggctccttattccatgggtgactgatcttagcacttccttaaaagttggggttttcaataaatataactcatcagccttccgatcttgtatttccttggacctttttttttgg

SEQ ID NO: 657 - DNA, 214 bp, Homo sapiens
  misc_feature 110, 118, 132, 133, 142, 143, 180, 187, 188, 190, 194, 197,198, 203, 204: n = A,T,C or G
actgtagaatgtgatggaaaagcattgatgagaatttattggcagttcagattgtgttttcccaacttaggctctttattaattggctaaggttttctccaaaaagggcntttcaacnatgggaattatttnntgtaacacnngggcacatattacctatcttccttctctgctttgtgntccaccnncncttnccnnctcanntccacatttt

SEQ ID NO: 658 - DNA, 712 bp, Homo sapiens
  misc_feature 584, 644, 661, 665, 667, 672, 674, 680, 683, 696, 710: n = A,T,C or G
actgcttttatttgagtttatgaacagaaatagaaagtatggtgcttgggttttgccctttcttactcctgaaagttaaatcagaagacactgatttcattttgtgaaatttagctcagagactattgatcttttgtttcattaatatgaacaactattagtaaaaaatagctttaacagcatttctgctgatatctagtaatctattcttttaatgtgaaaataagataaaatgtcctggagctaattctagcttaaatttgccagtatttctgtatgtcattaagtttttttcctctaaggttggtaatagaattttgttaatctttgcatacctgatggcatctatgtcaatgctgattgggtaattataaattctgtgctaatttaaaacttaatttgcctcttaaggtgattgtcctctgagtaatgattgtagttaaatgaagtatagcttgcaactatactatcacatgggtcgttaagtaaaaataaataaaccaaatttgtctgagacaggctaagatcaatcttctcatcaaaccaattttctctaagagcaaatttcctttcagttttagggnggccattcttgaatgcctcaaaattaaaccgttatctatttaaatcttcccggaattagnctgggaccaaaaaggangggngnggatntntttaanggngtaaatattatcnccatatttgggggngg

SEQ ID NO: 659 - DNA, 706 bp, Homo sapiens
  misc_feature 586, 637, 640, 643, 645, 667, 680, 698: n = A,T,C or G
acttctatatataaatttggacgaatagaagtaaatatgtttattggtgaaaaagaattccagaaactaatggcagatcctggaaatccagacttgtatcatgtattaagtgttatctggcaattagcttgtgagattaaggttctgcacatggagccttggtcatcatttgatatatacacccggaaagggccgctggaaaacccaaagcgtagggaattattagaccaattacaacaaaagctgtatcttattcaaatgattcctcgtcaaaatttatttaccaagaacttaacacctatgaactataatatattttttcacttgttaaagcactgttttgggaggcgcagcgccactgtaatagaccacttacgttcattgactccacttgatgcgagagatatattgatgcaaataggaaaacaggaggatgagaaagtagttaacatgcaccctcaagacttcaaaacactttttgaaactatagagcgttccaaagattgtgcttataaatggctgtatgatgaaaccctggaagataggtagcaactagactgtcgtttttggtggagcggttcatttntttggaaacctatgacatgaaaaccaaattttgaaaactccattctttcancanaangntactggtcttgtcttgcccaanccagccagatcantttttcctaagcctgatntcattggc

SEQ ID NO: 660 - DNA, 531 bp, Homo sapiens
  misc_feature 137, 239, 305, 306, 324, 337, 351, 382, 397, 398, 402, 425,427, 438, 443, 455, 459, 484, 502, 523: n = A,T,C or G
agcaaactttctggatgcccaacatgattttcagtaaccaccctttagagtatttgtttactaagttcaccacattttgaacatggtagttttagactgcaataatatttagacttacattatacttactgctaagnaaaatctaaatcctgcaaatgcacagaattcaagctgaaatataatgatttatgtttagctcacattgaagtattggttggttacttatgtattaatgcagngtgcattcacatttaatcaggtttagtctgtttctattttaataattttaaaaaattatacaagcnnattagatattagacatgntagttacaatggnacacatttttaggngtcgaaacacaatttcaaaaatccctaatgnaaggtataaaaatgnnacangaattgaaaaatggccaaagtancnaatatttttcnaagcnaatttttttagnaggnataatttacattttgcttttctagnggggttgaaatgtttatngagattggcttgtatttatanttttattc

SEQ ID NO: 661 - DNA, 468 bp, Homo sapiens
  misc_feature 88, 248, 310, 314, 369, 372, 381, 382, 403, 432, 434, 435,438, 442, 445, 464: n = A,T,C or G
actggattctataggtccaccattaaaagctggtatgggacaccaatttatacacataagggttagattaaaattttaattttttggntgatattaaactgaaatttatataactgaggctgaatcttaaaaaaagtaaatgataaaaatttaatatagttaactgttcactgatatgtctattcacttcatcataacctatatatttaattaaaaatcaaattatgagtctgcaaatcagatgctancaagcaaattgccatccagggtccataattctttttatatttttatctcagatgaatatatncgantcagtaaaattttaatgttccaaaatggtcttaaaaaaaaattatcaaaagcttncangtaacaagnnggctaattcatttgcccccancgaactacctggtttggggtggtgaaggnannatnaaanaantatgaatcttctgggacantagt

SEQ ID NO: 662 - DNA, 505 bp, Homo sapiens
  misc_feature 87, 95, 121, 182, 226, 229, 232, 247, 254, 271, 280, 302,307, 320, 321, 327, 331, 332, 335, 340, 350, 352, 361, 363,374, 396, 406, 412, 418, 430, 434, 438, 439, 441, 450, 451,455, 465, 468, 477, 505: n = A,T,C or G
actttttttttttaaagattactaaacatacaggaagtgataagaagtatcattcatcagaagcatcattcatcaatcaacttgaanaaaaaggngatatattatttctttaaggtgctgnggatgtgttaagagcatattagaaggaatggttttgtctaattttcttcatgagttatggnggctgagacatcgagtctatattttggggcaaaaactaaacggnagnacnaaaggaaatctattntaatagnatatttttgttgaacanaggaggttngataagaactgcaaaccaacanactcngcaaacaaggaannaaacgngttnnccntaaanacatgttcangngaatcgaantncaataactgtngactcctgaagaaaaagtttcnaaaatttatnaaacangccctngtaattactccnccanaaannancttggcctnncccnaatttattanaanatttaccanaccagttggtcccgaagatatttttttn

SEQ ID NO: 663 - DNA, 563 bp, Homo sapiens
  misc_feature 81, 411, 443, 559: n = A,T,C or G
acattaaatgttactttggcattcctatttcctaggcttacaggaattattaagaattcctttgtaatgcaaataatcacnctcttggaaattaaatttaagtagaaaatgttacattttaaggcaagaaaacatttgtaaatatttttataaaggcatttaattcaacaaattaacggaatcatagtaaatggatgcaaataaagaatattactttatgagaaagacaaagttctttggagcttactgtgacagtatggaaaacttgtcttcttttttaaaagataattccattttgatacttaataaacataatgttaaccttcaagaagaaataagcactcttagttgaacaaaaaatgtagggaaattaaaatacaaaaaatgaaattaaaagaaataccaaatgtnaattgcctcaaaatttatcttctttcttctanaaaaaaggatattttctcaggagtgacttaattgaagccctcttataatttacatatggaagtggatggtagagctcatggtggcagggcattccatgattaagtgttaacagggnttac

SEQ ID NO: 664 - DNA, 560 bp, Homo sapiens
  misc_feature 105, 333, 510, 512: n = A,T,C or G
acagtccggcccggtggggaggagggagggaaggcaggcacacgaagacacaggtatgtcgggaagtgcacacaaaccgttgtctttcctttttggttaaagaanaaaaactttgtaatcaatatcctgctcataagtaaaagtggaaaagaagaaacttgattgctttcatctggcgttttggcatctcctctcccatttcatatgcacagtttatttgggtaatgctaccgtcaccagcagaacacctgtaagtaaaaacaaatgtcaggaaggaaaaagtatgaacaacaggaagctccagaggcggctccatgcgggcgctgggctcantagaagcaaacggtgtgcagaaaaggtgccggccactcttctcctcgaactcctgcagcagctcgtcgatctcgttctccatgtcttccgtgtgctggatacactggcagagctcacagatgaaaaacgcccccagggtggcctcctcgtggttgtcctggatgccacattgacacntncacagctggcaggtctcctgttctctggaattaaatttccaccacctg

SEQ ID NO: 665 - DNA, 349 bp, Homo sapiens
  misc_feature 233, 274, 278, 321: n = A,T,C or G
cgtcaagttcttctagcagggacctgtctccctttacttcttacctcccacctttccagggctttcaaaaggagacagacccagtgtcccccaaagactggatctgtgactccaccagactcaaaaggactccagtcctgaaggctgggacctggggatgggtttctcacaccccatatgtctgtcccttggatagggtgaggctgaagcaccagggagaaaatatgtgcttnttctcgccctacctcctttcccatcctagactgtccttganccanggtctgtaaacctgacactttatatgtgttcacacatgtaagncctgcccgggcgggcggtcgaaagggcg

SEQ ID NO: 666 - DNA, 538 bp, Homo sapiens
  misc_feature 77, 79, 89, 116, 122, 136, 170, 180, 191, 205, 208, 234,253, 280, 282, 289, 322, 330, 335, 363, 373, 384, 405, 457,467, 537: n = A,T,C or G
acttttttttttttttttttttttttttttaattattcaaataaaattttaatgatttcagttcctgaaaatgtagngncattaaaggncatttcctgctaaatttcaaattacanatttgngggccattcctgancaaaagcatcatttctactaaatattcagcttgntaactaaggnaactgacagtntcatggcaggaggnganaaggagcaatgatcagctcatagctnaaaaaagggaaaaaaacantaaccaaagcaaaaaacaaaatagctncngatattngtaaaataataatacaatcccaaacatcccctnttaaattnctacnaaaacaatacccattaaggtttagcaantacagcttcnaagatttgagnaactttattgcattttatagngattcttaaggcctatttccaatgaaaccattttaaaagctctatgaggagnggaattttanatgtctattacacttggcttttaaaaaaaaaatgcttaaatttcaaaatgagcaaaaatcacttttggtng

SEQ ID NO: 667 - DNA, 563 bp, Homo sapiens
  misc_feature 338, 351, 356, 368, 376, 407, 485, 491, 513, 522, 526, 528,529: n = A,T,C or G
acctgattttttttttaaatggacagtctatgctttcatgaggcatgcatattgagcaccccgtgtgggatggtcccagctaggggagaaagtatgtgtgtctgtgctcacccggcagcataactacacaactgcccctctgaaggatggagcaaaggacatctcctgagcactgagcatcaagcactgaggctctgggaaaaggaagatcagacagagaggaggtaagtggaaggaactgagcagcttcggttcaatcccaaggcaaaagcctgagcaaggacacactcccaaagtgctcagggtggttccccgggccccaggacgggttgacacangcacaagcacaancaaanccttgaaagctntgagtttnttgcttgagtctaattatctttaaaggaaanagactggatcctcaagtcttccaatccatccattgtagaatacaggacttctgtctgatgtttcaaaggatgaatatnttgaangctgcctcaaaagacttcccantctgggcanacantnngaccttatttctgtaaaaaaaaaaaaaaaaaaaa

SEQ ID NO: 668 - DNA, 338 bp, Homo sapiens
  misc_feature 170, 230, 275, 277, 279, 286, 293, 297, 298, 308, 313, 315,316, 327: n = A,T,C or G
acattggttgggggccatggcgggttccacattcttatgattctaatagtcagggcggggcatgctgctgtgtcttgaatagggattttgcatctggctgtctctggaggccgttatcctgaccttaggaaagacgctcccttctgctccaagattggtgaagcctgtcnaccgcagttttagattttgaaagtcttcgcaatcaagttctcttcttcaatatgcttcgntttgttatttaatcttgcttgtgacaatcaatgcaataatcatgntnanaataacnatgccancganngtgcccacantagtnannatcacatgaantttgccttaca

SEQ ID NO: 669 - DNA, 461 bp, Homo sapiens
  misc_feature 438, 445, 452, 458: n = A,T,C or G
acaaaggagcctaggaaccctcaaagaccctttcccctacttacttcccacaaaaaagagccttgacaaaccaaggttttatttccagcaacattcagctgatacaaacacatagaaatacaatctcaccaaagagctaagaagccctccaacacacgcccaatttcagcatacagctaagactacacaacacacacacaagctcaacaaagagctaagaccactacacacatctccacagcaccacaggcacatctcaaaagggtctgtccagtagttccagccaagggaagggtgatggctaagccaccagctccagctttcttttctttctttttttttgagctggagtttgctttgttgcaaggctcctgacagttggacacatggctgcacacatgctgctacttggatcccagagggttctctggtggcagnttgaccnactctgnctaggnatc

SEQ ID NO: 670 - DNA, 611 bp, Homo sapiens
  misc_feature 392, 393, 394, 403, 428, 429, 442, 454, 459, 477, 497, 517,529, 531, 534, 535, 538, 545, 562, 581, 587, 598: n = A,T,C or G
acccgcctgccatggactggatcttccagtgcatctcctaccatgcccccgaggctctgctgaccgagatgatggaaaggtgtaagaaactaggaaacaatgccttgctgttgaattctgtgatgtctgccttccgggctgagttcatcgccacaaggtctatggatttcattggcatgattaaagagtgtgatgaatctggtttccccaagcatcttctttttcgatcactgggattaaacttggccttggctgatcctcctgagagtgaccgacttcagattctcaacgaagcttggaaagtcatcactaagctgaagaacccacaggactacattaattgtgccgaagtgtgggtggaatacacctgcaagcatttcacgaacgagagnnnatccgtttngcagatgtcatcaacacatgactcnnatcggctttgaanattctaccccanttcantatattaaaagtattgcncttcatgctttcattttttntatgaaaattttgcgtttgnatgtccaaaaananggnnggngaggttnaatgctatggacccttntaaaaaaaaaagccccaangccggntttaagccttntgttgaaaatctg

SEQ ID NO: 671 - DNA, 536 bp, Homo sapiens
  misc_feature 335, 362, 371, 396, 415, 417, 421, 430, 442, 463, 466, 474,479, 488, 494, 505, 512, 525: n = A,T,C or G
acgcggggacaggaacaaaagcaaccaatttttaactttctcttctcattcctgttttcattgatttcccacatgtagtccttttgctcaggaagtctttggggaaattaaggatctttgaagctctgaaataggtgatcaggttagtggtgtctgtcagctgtctaagaggttggaaaatgaactactcaagatagtcacgaaaatactgaaagtttgatttttctttccatatttgaattaattttttctgtttgactggaaggggtttttgtataactaaaacctcagcgcataaaggagatttaaaaggagcacatgatttagtgggtggncatgaaactagaatgggatttgggggngaatttgcnaattctggatttaatccaaactctntgctacaagccttggaaangncttnaatactttnctcttttacaanagaggctgcttaattatttgnaancccttcangcctnattcacaantcctgncggcggccgtnaaagggngaattcaccatgnggctgtattat

SEQ ID NO: 672 - DNA, 541 bp, Homo sapiens
  misc_feature 26, 29, 32, 94, 107, 137, 140, 147, 159, 230, 284, 296, 341,343, 355, 369, 393, 399, 425, 459, 468, 469, 473, 475, 480,484, 530: n = A,T,C or G
actttttttttttttttttttttttnggnganattatttactaaataattgatatacatccaacatcactgaatggaaataatttaaaaataancaaggcttaaatnggggtctttcaaaaaactcaaaacattctnggngactgtntctttaacaaanggaatgacaaaactagttaagtcatattatctcaatcaactccaaaactcaatgttgccaacatgtttttntacttaaaagcaaacaaaaagcaaagcctcataatttagtaattaccatgtttnttggtttctgtnctcaaatgcccagaaagatcctgtgaaaggaagcaaagcacctantntcatcagtcttntaaaaactttaagntgcctccaactccttaaaatttanatcctnctgacaatttcttcctatgggaagangaatgcctcgaaccctagttttctttgcttatcnaagctgttnntaancncttgntttntgctgcacactaaaaaaactattctatctttcaaaaccaaaaaatntaattgaattt

SEQ ID NO: 673 - DNA, 604 bp, Homo sapiens
  misc_feature 328, 371, 446, 456, 461, 479, 491, 508, 511, 516, 517, 518,530, 545, 548, 560, 561, 578, 580, 581, 583, 592: n = A,T,C or G
acaccattactcttctgaagagcctggtaaacagcagatgctttattcagaaaactagaaagagcaaatactcctgccacatcttgatgatttctatatgctaaatgcattgccatgcatcctcccatagagaatcctcctattaatatcctgttcttcttgatgccactttttacttcttcatcaatcaaatcagtaagcacttgacacatgacatcaattgattcaaggtgttctgggcagtcattggttattttaaatctgtcaaaccatacattggagattcctcctttcataggagtatatgatctgggaggagctgttgganaataatttttatgtgtggaatgttaaatcttgattaaacctgntgatccacatcttaatcctggccagatcactgaccatgcaggaagacaaagaggcctttgctcctgcggaaaacntcagcgtganaaccnacccgacgcaccgcatgntgatccccggtnctgccggcgcgttgaangcnattcnnnatgcggcgtatntgatcgactggacanctngggattgggtannttcctgggaatgttccntnnantccacacanaccggagataag

SEQ ID NO: 674 - DNA, 646 bp, Homo sapiens
  misc_feature 216, 252, 255, 286, 326, 349, 386, 387, 391, 396, 399, 400,405, 410, 414, 417, 424, 427, 428, 447, 448, 452, 456, 462,464, 475, 480, 482, 483, 485, 493, 494, 495, 496, 518, 528,533, 535, 540, 541, 548, 559, 562, 570, 571, 578, 586: n = A,T,C or G
  misc_feature 588, 600, 602, 605, 611, 612, 622, 628, 632, 640: n = A,T,C or G
acctcaacataacctgtaaaagtatttctagataaaactttacaagtgaagaaagaaaacccatgatgttacacttacacacacacacacacacacacacacacacaatcattcttaaggaagaacaaaaacatggtaagagtgtgaacaggaagggaatgcatctttttttgtaaagcttatattaaaaaacacagcatgagtaaaataacttcntatgccaagagaagatgcagagagaggaaacagaangcngggatgagactaactcattaataaatagttngagaatgtcattcaaaaacagtaaatttggggagttacanataatccccagttgcaccacttnaaattttttgttccgataactattgaccctaaaaaanncttntatgngtnnttttnggganggtnttngattggnccnnatttattaaagggggcctnngccntttnaagggntnaatccccaaantcacncnnangggttttnnnnggaaccccccaaaaggcccccntttttagccnaattntnacccnngtttatnttgggggggcnctnggggtttnnaaagggnaaaataangnggcccatatttncntgntttggnntttaaaaatnattggntggnaagtttcnggcccc

SEQ ID NO: 675 - DNA, 646 bp, Homo sapiens
  misc_feature 345, 381, 421, 436, 462, 503, 518, 541, 563, 566, 573, 583,587, 619: n = A,T,C or G
accaggctggcgacaggtgctaccaggagtgggctgaggggagaaaaactatctcccactcttttggcccaggcaatgtcaacgacttccacattccctggcccacttcctgagcaaccccaggttcggctctgtataaggaccctcccctcccaaccccaaccccagagtgcagtgcaaatcaaccaacaatttactggtggaatggcaatcaaaggaaacagttaaacaccaaacaatttcttaaagccaaaaaatatttttcatggagttgaacatttttcgagtgtgtttttttcaagtgtaaaaacagtgacattttgttcaaacagaaacagcatctangaattctggcacttgggttctagggggttacaggtntcatcatggattcttctccttggatttaaaaaggcctcgngtttctattcctganttataccaacacctgctagctttccnttttagcggacagtgggtgggcaaccagccttcctggttanatgggcaatgccaancaaaaattccttattcacttgtnggcttggttttttattcaaagnaantcaaatnccaaaaaaanaacnttacaaacccaacccccaaaggcgccttgacngggaccctttcaaactgattggtggaa

SEQ ID NO: 676 - DNA, 643 bp, Homo sapiens
  misc_feature 519, 560, 587, 626, 629: n = A,T,C or G
acaaatttaagactagacaattaaaaaaaaaaaacacaaaattatagccgcaacactatcctagctgcattgtggtgattatattgttccgttagctgtccattatatacaactggattttaatcgtgctattcacagaggggccaaagcactcatctaaaggtaaaggcgctcaggtttaacgtgcactttcatagccccatgaaaacacaaccattatatacactgtaaacaccacggggcatgaaatccacctccagccacaaacatcaatctcacaggatcaagcatacgaggtctaaggtggggtgcctgacttttctttttaagaatacttttcatctaaaagtcctgctattcttttcacaggacaatattcacttatttcaaatatgttgccagtgctcaaaacatttctggaacccatttttgaggactacctgcagcatctgcagtgaactcttctgaatgtcctggatggtggtgagtcttcatcctttgaggatgggtttgatttangaaaacaggcagttattcacagccaacttgaatccaactgnggggatcccccgggttcaaacattganatgccctataaacacaagaccaattttttgtacctcggncgnaccacgctaaggcg

SEQ ID NO: 677 - DNA, 647 bp, Homo sapiens
  misc_feature 18, 20, 123, 232, 364, 379, 389, 400, 470, 561, 609, 613,639: n = A,T,C or G
acgcgggggaggcccgtntntctcatcgaagatggcggcgcgatctgtgtcgggcattaccagaagagtcttcatgtggacagtctcagggacaccatgtagagaattttggtctcgattcanaaaagagaaagagccagtggttgttgagacagtagaagagaaaaaggaacctatcctagtgtgtccacctttacgaagccgagcatacacaccacctgaagatctccanagtcgtttggaatcttacgttaaagaagtttttggttcatctcttcctagtaatttggcaagacatctccctggaaaatagtccgtctaaagttcaatcttctgctcatttaactgatgacttgggtcatgnagtccctaactccanactccaccanatgtgcagggntagaaatgttcttgatttctataatggccctattcaaagatagatctaaatttgatgaactcagtgccantaatctgccccccaatttgaaaatcacttgggagttctaacaatttcggaagaaaaacccatttgaaaatcactgtctttccctgagcaangggggctgctcattaaaatcttttgatactttaccatgggaaattctnccanaactgttctttaaacccacttttttntgtaaaag

SEQ ID NO: 678 - DNA, 646 bp, Homo sapiens
  misc_feature 6, 133, 155, 170, 179, 193, 206, 232, 244, 256, 260, 263,266, 268, 271, 335, 389, 391, 396, 398, 403, 413, 416, 436,454, 484, 489, 496, 510, 512, 519, 527, 554, 573, 591, 592,609, 624, 633: n = A,T,C or G
actttnttttttttttttttttggctttataagagaatttttattgttaattatttaccttaatagtttcagaaagaggaacaaattacctcagtccaaattgattggcagttggctttttctagggaaccangggttctgactgctaaggattnatttgggatattttnaatactaanccttttaacctttnaggcttaccccanaataattgcttcaccttccttttcanttaattaccgcncctacctacttngttntanaantntcnttcattttgattccaaaaggccaagtttcttgaaaatacaggcttgaggacatggccaaaaaanaaaacctcaaaataaacctctggatgataattactagtctaaggaaccaaaccntncattntnttaanaataattccnttncaaatgcccctaataggctntgtgaaaaggttttggtntaataactgaaatgggtggctttttacaanatccnaagcagnttccggggcccctnanccaacantggccctnaaaaccaaaaggggttttttccgtggnggcccattttaaaaatccncttcatctttttccttcnngaaaagcttgcccatanttaggctggacttgngggactgtnttatcccaaacag

SEQ ID NO: 679 - DNA, 357 bp, Homo sapiens
  misc_feature 262, 281, 303, 329, 334, 357: n = A,T,C or G
acctgggtgtatcctgtgtttgccaaactcagcctcttgggtctagcagctttcttctctctcagctacgtcttcatcgccagcatctacctacttggagagaagctcaaccactggaaatggggtgacatgaggcagccacggaagaagaggaagtaattgcacaccattttccaagaaccaagaaagaagaaaacacaagagatttttctcatcttttttttttttttttctggtggagggaggtggtggaggaacttancaaagtaggagggacaganagtgatccttaaatttaataanagttcgtgaaggtagcttaacttganaactnttggttttttgaaaggttgctgn

SEQ ID NO: 680 - DNA, 645 bp, Homo sapiens
  misc_feature 164, 373, 421, 443, 446, 489, 516, 528, 555, 587, 620, 637,642: n = A,T,C or G
acaagatatttgcggttttgttttttataacccactaagccaagatttgtatctctgtatggaactgtttttcaaatggacagaaatggtctttgatctttctgaaccacttgtcttcaaattcttctgaggatacagtcaccaaggcagtcagggctacgganccaacacacttacctctgggtgaactcatcttttattttttctgggatatcttctcccataacctcagctatcaacagcaaagtgtcttctttgaagctgaacccttcattttatctcaattcctgctgagtccttaagttcctctccaaacaaacgatgtttgctgaggttgggtaaactgaagcagaacctggttcgtataaaaaangccatgctttcaactgagtctctatcaacactgttctctcttttctgncatacaagttttggatatttgncanagctttctcatttttctggctattactgctattcgcttcacanaaaataaaagctctcagcaaggttcangaaaaccaaaanacagcttttcctgagtgtggaaaaaangatttgatagttttgtccttgaggtgaactgngctgttttgaaatgacccaagtgctgctgaaanaactggccccaattcangtaancct

SEQ ID NO: 681 - DNA, 648 bp, Homo sapiens
  misc_feature 445, 459, 491, 512, 523, 542, 575, 577, 579, 589, 646: n = A,T,C or G
acaaaattatcatcatttatttttgatttttttcaccagccctgaattttcaaacttgtaatatgctgtttcacaatctttttattaaattacttaatgattccagtctgcaaatgagcatagactttgctctgttgttatagatcattgaattgggggggaaacatagtaagctaaactatccgtcactgctcatgaaagacccacattgttgattatttttcccagcacagaaagaaaaggacaagtgattcatcctgcaatgggcctctgccaatcttttcatatctatgtaaccttttgtagttacctggtgtgattaaccgttgtgctattgtaaatcttggattaattaacaaaacaaccaaaaatctatcacctggaatattgaaaagaaattcagtaaaacaagatgtgtctcatagttaaggagagacataaaaantaaaaatgtcattnaacaggttggatttaggatttactgttaatcnagaaacaccgaggaggcttanctcaccctttnattggagaatgtggggaanggaaaagagagtaaacacattaactttagttancnanaagtgctgcntaaaaaaattccgtgaaaggaaatggttacaagacaaattggcttttatccccttgntt

SEQ ID NO: 682 - DNA, 645 bp, Homo sapiens
  misc_feature 254, 260, 327, 383, 387, 450, 453, 458, 460, 462, 474, 477,480, 522, 532, 534, 556, 565, 566, 569, 579, 630, 631, 644: n = A,T,C or G
acacatgcacatcaaaacacttcaactgaatatagatgccattacattatttagttacgttacaaagcaaacggcaggttcataaacgttgttctattatgtatcaactgaaaaaaatatattcaaaaaaaaagttttttgaaagactcatggggaagtggaatggtgccccacattaggaaataaagcttttaccaggaccaccttgctccagctggctcccaagggaccactgaaaacagctggcttccctnaaaaanacagaatgggtcttggtaataattcaatggactctcaaactcattcctcttggatcacaacgggggncccaacctgataatggccccatgggttggcttggccagaaagtcattatctcgaantcgnaaaccccctttcaagcatccaatctttggtttctttaatgacaatagcgttaataatcctttnctnttacngnanttacaacatcanaanggnacttcatgagttcatttttcaagaaaatgccaatttggctgnattttcaacnanggttttcttcttctaaaacctnaagggctgnnaanggcactcggnaccctatggattggcaccgtttgtggcccatgctccctgcttaatggtcannatgatgcattatnc

SEQ ID NO: 683 - DNA, 493 bp, Homo sapiens
  misc_feature 239, 245, 259, 268, 287, 288, 319, 349, 364, 403, 475, 486,492: n = A,T,C or G
acttttttctttttcttccttttttttggaaattattttcctgagccttttgttttacggtatattgtaaacttttatgttaaagaaaaaatatacatttacaaattgtgagatttttaagagaaattttctacgatgtatactggcttattttttaatttaaaacggggtttccgtcggcactggtggagggggtgcgctgttagtcccctcgctcctggctttgggggttggacttngggggnccagaaactctggnagcttctanaagaaatctactgagtggnnttcctgtttttggttaaatccctggctttgncgactggacctgcttgtaatgtctgagggnaactgtgggggtgcnacagccagcccggtggatccacgcaggcttaaccgaccnataagaagccttctcccaagcaccgtggttcagggcgtttccattgaccagtttgaccctggttgaataaanaaaatgcgttnggtttna

SEQ ID NO: 684 - DNA, 546 bp, Homo sapiens
  misc_feature 70, 148, 168, 192, 207, 222, 227, 279, 292, 306, 308, 313,320, 343, 345, 353, 362, 368, 394, 405, 408, 410, 416, 426,430, 446, 456, 469, 472, 497, 498, 537: n = A,T,C or G
actttttttttttttttttttttttttaaaatttgaacacatatttaataatttgtgataatggttttgnggctaagtttaaaaaatgaaaggccccaatcttcaaaaatctactctgaaatatttacaattacatatttaacaagtntataaaagtataaccatatntgggatttgctttcacttaataanagatggtacctgganagatgtatggatganataanattggccacaagctgatggttactagaactaggggtctgaaagttaaaattntacccaaaaaatntctaaaaattttgngnccaanaattttnaatcccattaaattcaggaaaanantttcaatngcttaatancatttncaaataataaaaagtttttggaaaanaaacctttggntananattttnctgaattcanactntaaagattatgcaatnatggaaaaantattttgattaanaantaacagtttaggaaacccttgatgnntaaagtaatggaaccgtttccttacaggagtataaatangcataatct

SEQ ID NO: 685 - DNA, 230 bp, Homo sapiens
  misc_feature 53, 93, 119, 134, 145, 151, 158, 160, 165, 179, 180, 183,207, 209, 212, 217, 227: n = A,T,C or G
acttttggaggccaaggcaggtggatcacttgagctcaggagtttgagaccancctggccaacatggtgaaatcccatctctactaaacattnaaaaattagctgggcatggtggtgcncacctgtattcccanctactcggaancctgangcatganantcgtntgaacctgggaggnngangctgctattacctaaacattgtcnantgnatatnccctatgcanaga

SEQ ID NO: 686 - DNA, 506 bp, Homo sapiens
  misc_feature 126, 260, 304, 320, 331, 352, 361, 364, 372, 383, 392, 397,404, 407, 408, 434, 436, 437, 440, 443, 444, 445, 459, 460,467, 474, 482, 486, 492, 493, 502, 504: n = A,T,C or G
acgcgggggcttccggttctgacggacgcttcggccgtaacgatgatcggagacatcctgctgttcgggacgttgctgatgaatgccggggcggtgctgaactttaagctgaaaaagaaggacacncagggctttggggaggagtccagggagcccagcacaggtgacaacatccgggaattcttgctgagcctcagatactttcgaatcttcatcgccctgtggaacatcttcatgatgttctgcatgattgtgctganaaaactcaagcatattgcctttccatctagcactggggccatanttctgatactactggnaacgaaattgngagatttgctgtaaatggatntaggaaaanccnaacggganattttgtgatntggcctctngggtncatcctngtnngctacccaaaaaaaagaggctaaaantnnctntcnnnttaatgatattccnntgtggtnggctgcnatttgttnccanccagtnnttttgtaantntt

SEQ ID NO: 687 - DNA, 498 bp, Homo sapiens
  misc_feature 281, 327, 329, 354, 371, 401, 425, 427, 438, 465, 467, 498: n = A,T,C or G
acgcggggggggcgcacccgccgattgtggccatggcggccgcagtctctagtgtggtgagacgagtggaagagctcggggatctggctcaggcccacatacagcaacttagcgaagctgccggtgaagatgatcactttttaattcgggcctctgcagcattagaaaaattgaaactcctgtgtggagaagagaaagaatgttcaaatccatcaaatcttctagaactttacacacaggctttttggacatgacatattttgaggagaacaagctagtanatgaaaatttcctgaaactctttttacagaagtaaaagacttgatnantttttttcaaaaccagaaattttantaaaggaaataatttcntccaaacactgcattttgcttggggatganctctggaatgcttcttttggaacnangaccctgctgntatgtattgcattctttaccaaaaaananagtggctttaaaaaattcatttgcttaaaan

SEQ ID NO: 688 - DNA, 176 bp, Homo sapiens
  misc_feature 163, 164, 170: n = A,T,C or G
acgcgggggagacctggctgctgtgtcccgcggcttgcgctccgtagtggactccgcgggccttcggcagatgcaggcctggggtagtctcctttctggactgagaagagaagaatggataagcccctcttcccattagtgcctttgcattggtttgctttgnntcacancactgg

SEQ ID NO: 689 - DNA, 443 bp, Homo sapiens
  misc_feature 225, 277, 308, 325, 408, 426: n = A,T,C or G
acgcggggtgaagatattatggctgctgccacggagcataatcgcccgagcagcggtgacaggaacctggagcgaagatgcagccccaacctctcccgagaggtgctctacgaaatctttcgctccctacacaccctggttggacagcttgacctcagagatgatgtggtgaaaattacaatcgattggaacaagctccagagcctctcggcattccagcctgcnttgctctttagtgcacttgaacaacacattttatatttacagccttttttancaaaacttcagtctccgattaaagaggagantacaactgctgttgaanagataggaagaacagaattggggaacaaaaatgaagtaaatgacaaattttccattgggcgacctacaagaggaagaaaagcncaaagaaggtgatttaanagatgtgaaaaagacac

SEQ ID NO: 690 - DNA, 650 bp, Homo sapiens
  misc_feature 49, 71, 85, 99, 138, 143, 195, 214, 250, 304, 311, 313, 379,391, 398, 399, 405, 414, 418, 429, 454, 462, 472, 484, 491,506, 508, 524, 561, 576, 585, 592, 599, 603, 633, 635: n = A,T,C or G
actttttttttttttttttttttttttttttttccaaaaaccgccagtnttttattctcatggaaaaacanaacaaacccacaanttggagtcacgganataaaatacagatgaaatggaaaacggtctgttgtcatnaactntcactttcaaataccattttatatggaagttactttactgcggggcaaacanaaggccatgctggagtctnttacttttggaaaatggaaaatcaaaaatttgctantcaacaaacaaaaaaggagggaaactccttggtaaagctttacaaacataattntcatttntnttttaccaataaaaaatagctagggtaaaaaaaacagatggttaaaaactggtgccaaaccaaagngaaagctttggngccttcnntaaacncctatcctntttntttaaaaaacnccatttttttaaaaaaagattactntgaattcncagggttttntcaccccaattnatccctncctttcacccccaananacaaaagggccatgtntttttttgtccggccccttgggaaggggcttggcctnaagggctgggaaaanctcctgttnccctaanttgaaanggangagggggcccacctttttttttttttttcncncccttaaaaaaaaaa

SEQ ID NO: 691 - DNA, 456 bp, Homo sapiens
  misc_feature 256, 272, 275, 318, 369, 392, 395, 412, 419, 424, 441: n = A,T,C or G
acgcgggggggatgcgcttgggctccctgttcgttcccacatgcagggcagcacgaggagaatgggcgtcatgactgatgtccaccggcgcttcctccagttgctgatgacccatggcgtgctagaggaatgggacgtgaagcgcttgcagacgcactgctacaaggtccatgaccgcaatgccaccgtagataagttggaggacttcatcaacaacattaacagtgtcttggagtccttgtatattgaaataaanaaaggagtcacggaanatnatgggagacccatttatgcgttggtgaatcttgctacaacttnaatttccaaaatggctacggattttgcaaaaaatgaactggatttgtttanaaaggctctggaactgattattnacncaaaaaccggctttgcntttttcnaaaanatattgaaccttggttnatcaattaaaggcaa

SEQ ID NO: 692 - DNA, 367 bp, Homo sapiens
  misc_feature 166, 199, 217, 231, 285, 290, 305, 306, 327, 340, 341, 349,361: n = A,T,C or G
accccacaccctgaaggtgtctatgagttcacatggctcaggaatggagttttggggccctagatgtagacagctgtggcgatggaggccaaggttttggcctgctgtgggggttgcattcaccttcccatctccacatgacgataccccagcatttacgaggcancttctgctgacctggccaagcaccgtggtcccnacttcaacgcatctgaancgttgcccaggganccctttaaaaatgcaaatccttgcccatccttgaaaactttaattttgtaggtntgggntaagggggggccttnnaggttttgcctaaaaacaatntaatttggccccnngtttaagnataacatttctnaagcac

SEQ ID NO: 693 - DNA, 300 bp, Homo sapiens
  misc_feature 143, 189, 216, 234, 252, 276, 277, 281, 289, 290, 293: n = A,T,C or G
acatggtaaaaagttgtggcaaagatggcttccatatccgggtgcggctccaccccttccacgtcatccgcatcaacaagatgttgtcctgtgctggggctgacaggcatgcgaggtgcctttggaaagccccaaggcactgnggccaaggttcacattggccaagttattatgtccatccgcaccaanctgcaaaacaaggagcatgttattgangcccttcgcaaggccaantttaaattttctgggccnccaaaaaatcccatttaaaaaaanngggntttaccannttnaaagctt

SEQ ID NO: 694 - DNA, 520 bp, Homo sapiens
  misc_feature 121, 155, 158, 160, 169, 183, 222, 239, 281, 329, 336, 340,342, 348, 351, 382, 386, 398, 401, 447, 449, 468, 475, 483,488, 491, 502: n = A,T,C or G
acgcgggtaggcagagaacaaaaatgttaagcatggtgttgtctatcttattgaagcggttggaaatgaaagcttttaatttgatagatttatcagtataaaattaagggaaaccacgtgnggggaatgaatcaatttaaaacttcgggaattgngangngacttttgnaacttttggtctgngtgtgacctgtgaaccactaggatgtgatctgcccttgngggcaggtccagcatanttaggagttaggctttaacataaatttctagctgcatctgantctcctgggatgggtgctctttggctggttttggctgcggatggtganatcaaancaantnttctgntgntggcccctgcaatcagttgttgggatgccantgcnaatcacttagtngtnaaattttaatcaaacaccaccaggtcccaaatgcaggtcatgaatntnaaattcttaaatttacatnaaaagtnaagttttnaccgnttnacattttggtntttaaggaaaagaaattg

SEQ ID NO: 695 - DNA, 333 bp, Homo sapiens
  misc_feature 182, 222, 224, 263, 265, 269, 271, 274, 283, 295, 298, 299,326: n = A,T,C or G
actaaaggcttttgcatgaattaggaaggagagtcttggggcagaagcaataggggacaactgtgctggtgctgtcttttgcaggatgtgtttaccaaaacatctaatgcaactattttcagactttacagtttgtagtgttaacctctttagaaaaagagcagccatccttttttaggaanactgtatcatccccagtgatgaggagaagctcttctgtananaagaatgacactgtgctggggcaagcgattgcatactgnancggncncangtccccgcntaccttgccttntannggacaaggggccctggacctttcccanccctttg

SEQ ID NO: 696 - DNA, 628 bp, Homo sapiens
  misc_feature 264, 275, 283, 370, 374, 381, 383, 406, 424, 425, 427, 438,439, 445, 451, 475, 494, 498, 520, 529, 536, 550, 555, 556,558, 567, 568, 570, 578, 588, 625: n = A,T,C or G
acgcgggtattgaagaagattttaatattgcactaggagtttttgctttagctggactaacagatttgttggatggatttattgctcgaaactgggccaatcaaagatcagctttggggaagtgctcttgatccacttgctgataaaatacttatcagtatcttatatgttagcttgacctatgcagatcttattccagtctacttacttacatgatcattcgagagatggtaatgttgattgctgctgtttttatgtcagatnccgaactcttncaacaccncgaacacttggccaagtattttaaatccttgctatgccactgctagggtaaaaacccaacattcatcgcaaggggaatccagccagnccanttatctngngggcagcttctttggcagctccngttttcaactatcctganngnctttatcttcnnatcctntggggntttacaagtttcaccccagctggntcaccttttagttcctatnttantgccgggaagactggttcaggngataaaaancctgatnaaagccatcccttnctgtnngnaagggaccnncnttcctttnattggggacnggggcccattggaaatgtccctgcccggggcgggccngtt

SEQ ID NO: 697 - DNA, 652 bp, Homo sapiens
  misc_feature 113, 188, 192, 328, 331, 443, 479, 502, 518, 532, 541, 588,634, 637, 642: n = A,T,C or G
actacaatgttctatgcatttcttcatcctagacattaataaaacacatccctttggtcttagatacttctctttggtctgtgttttcttctttctgaattttaatcttctgngatgtgaggaaatttacgtgaacctttcacatatctattttttccttgggccagttgataatttccctcccttanaatnccagcgtttaccaactccttcgaattcttttgatctttactatcctctgagaggagaaagtatttgaatagagctggcatcaaaatacaaatgccacacaatgaattctgtccttcagccgatggggaatcaatgnagncattgatgaatttaatttgattgattcccatgggattaaaactggtatctatcaccgaatgttgccggtcaagatatagaatatgtcatccctgcacaggccgccttctttntcactcagccccagtgaggcacacagaataaacggnagggatttggccatctttcccgnctctaatagaagatgncctatacttcttanattcccagntggattaaggcccaccaaagcctgatgcgtactgcccttgaaaacancctcatgagttgaaaagctggcttcccactccaattggaccagcancanaattngttttggtgg

SEQ ID NO: 698 - DNA, 386 bp, Homo sapiens
  misc_feature 298, 310, 384: n = A,T,C or G
actagggatacaaagacttggttattcttgttggagtaatgattctcctctatctggggaggtcatcctctgcagttggggactgaaggactgggagatgggagattgaaacttaaagaggtaaaggtatgtcttggaataaaactagttatcagtcaccaccagaccatcatggcggctagaattccagaaacggtgaatagaagttcatcttctattttgtcttcatggaatatatcactctggtaaacagctggtctaaatatgatgggtagactttcaaggtcttcatttttanatgtaattcttncaaggagggtgtctagaaaccgtgtaacaccataccttcctgaaaatgtttctgaatgccaaaattgggggcanta

SEQ ID NO: 699 - DNA, 587 bp, Homo sapiens
  misc_feature 535, 566, 568: n = A,T,C or G
gtcgcggcgaggtacacagtccaggctctccaaacggaactctacaggcagccgccccgtaagtgtcacgtatcggtttggttccgtgggccaggacacacagctctgtttatgggaccttacagaagatatccttttccctcaccaacccctctcaagagcaaggacacacacaaatgtcatgaatgccacgagcctcctgctggaagcaatgggaacagtgttacaacacccgggaactctgtgccgctcctctgccacggtccaacagccttccacattcagcagtctcaaatgctggcagcaaaagcagtgtcatggacggggccattgcttctggggtcagcaaatttgcaacactttcactacatgaccggaaggagaggcaccacgagaaagatcacaagcgaaatcatagcatgggacacatttctagcaagagcagtgacaaactgaatctagttaccaaaaccaaaacggaccctgctaaaactctgggaacgcccctgtgtcctcgaatggaagatgttccctngttagacccgctgatattgtaaaaaagatancncatgagagacttgacttgt

SEQ ID NO: 700 - DNA, 570 bp, Homo sapiens
  misc_feature 374, 403, 410, 442, 445, 446, 471, 475, 479, 480, 497, 504,506, 518, 524, 525, 534, 535, 542, 557: n = A,T,C or G
acaccgatttgggatacttttctttcagagccggccactgaacaatgaagtaatctgagagatgaaacagaatctttccggacatggataacgtttctacacggcagatgctttcaacgtagacaatgatcactttctttattcctagtatcccaaggagaagggcagatacacagataggaacacatgttcctggtccgttacacaacaccaaatctggcttcaccctgtgaattaggggaaaggagagccacatggagtgcaaggtggtgaaaacggtggagggccaggactgctgacctcccggcttcttggaattcggtgaatgtagtatttggtatacatgttactagggtctcttcagctcgatctanttcaaaagaatttatttattggcactcantttcatnatgtcagcaatgacataatgtctaggtgagtnggnntttggacaaagctccaagcagcctnaggntctnngtggtttgcccccgggncccaccntnccaaaattctgnaagacnnccggggcgnnacgtccntggaacgaaccactncccattttcggag

SEQ ID NO: 701 - DNA, 655 bp, Homo sapiens
  misc_feature 108, 285, 287, 333, 383, 395, 477, 483, 499, 513, 529, 552,553, 557, 562, 574, 577, 582, 592, 594, 619, 625, 629, 636,647, 650: n = A,T,C or G
gtacgcctgtaatcccagtgacttgggaggctgaggcaggagaatcgcttgaacccgggaggcggaggttgcagtgagctaagatcgcgccattgcactccagcccanccacagggcaagactccgtctcaaaaaacaaaacaaaacaaaatagatttgtttccccctgcacaatctggaattaccatttcttcagagcacatacaggcatttcatctttcaacctgtaatttctcctaactcatgttttcatgtaaattaaaaacacatgcactaacaaataantntacagcatatatcaagaacacaattataatttgaaagtgtcgaaanaaaatcttatacaaaatttaaataaaagaaatcattttgtccaactctantcatcttattgnctaaacacattatttgcaaaatatttttcaaaagattgtatgatttatgtgcaaagttctttagtgggcttcatccactggntttggnagtttcaagcattttncttacaacaaagtnatttttttttgcaatnttgaacttatttctgattgcagnnactnactangtcataaaaaanatnctttntgaaaaaaantnactacatttacccttaacctgttanatttantttnttaattnaaaaaaacagnttngaacc

SEQ ID NO: 702 - DNA, 413 bp, Homo sapiens
  misc_feature 113, 145, 251, 264, 274, 311, 323, 324, 326, 335, 349, 360,361, 370, 374, 376, 387, 391, 393, 401: n = A,T,C or G
acctgacaaattattggattccagcacagtgactcacttattcaagataactgaaaacattggttgtgtgatgaccggaatgacagctgacagcagatcccaggtacgatctnactcactgcaacctgtgcctcccaggttcatncgatctcctgtctcaacctcccaaatagctgggattacaggcacctgccatcatgcccaagctaatttttgtttttagtagaaatggggtttcaccatgttaaccnggctggtttgaantcccgacctnaagtgatccaactgctttggccttccaaattggtggnaattcagggcgnnanccaccgagnctggcctttttttnttttttttaannccaatcccnggantnaaacctttttnttangnccaatttnagatttttttca

SEQ ID NO: 703 - DNA, 609 bp, Homo sapiens
  misc_feature 359, 385, 405, 435, 441, 460, 495, 503, 510, 512, 520, 529,541, 565, 572, 587, 603: n = A,T,C or G
acatgacctttagtgaagattatttgtcatcaaattacccatatccaagtttccatgggcctggaatttcctttccacttgatagaagtatatattaggaagtccagttaataatatttttatttaaaaaaaaaaaaaaaggaaaaaagaatcagcagagtcaagttgtcttagtcttaaggctttctggatttcttccttggaggaggtcaggatcttcccaaggcctgggtcctcgaatattcttccagtcatcaaacttggagtctttgattttctcatattccgactctaaagatattttattctctttcagttttttttcaagctcaggatccattttactcttcacagcatcntatcagatttgagaaaactcacgaangaccaaaagaacctccaacnatcagcaacaacatggggactccatagccnagagtnttgttctttgcgaaaagcncgcatcaccgcgggtgcaaacattgattggaactnttccatcnggctcanancttcaagngggccttancgcagacctccnaaatttaagagattgacgctctcncaacccncgttcctgcccgggnggccgtttaaagggcnaaattc

SEQ ID NO: 704 - DNA, 617 bp, Homo sapiens
  misc_feature 309, 325, 326, 391, 396, 414, 439, 457, 492, 509, 513, 532,541, 542, 543, 549, 552, 559, 565, 589, 592, 593, 597, 606: n = A,T,C or G
acagactgaacagattaggtctttgtctgaagctatgtcagtggaaaaaattgctgcaatcaaagccaaaattatggctaagaaaagatctactatcaagactgatctagatgatgacataactgcccttaaacagaggagttttgtggatgctgaggtagatgtgacccgagatattgtcagcagagagagagtatggaggacacgaacaactatcttacaaagcacaggaaagaatttttccaagaacatttttgcaattcttcaatctgtaaaagccagagaagaagggcgtgcacctgaacagcnacctgccccaaatgcnncacctgtggatcccactttgcgcaccaaacagcctatcccagctgcctataacagatacgatcangaaangattcaaaggaaaagaanaaacggaaggcttcaaaaattgacnctatgggaacctaccatnggttgacactgaaatctttaaccggaggggtcatnttgcccggaagactcanactncttgcagcccaagccatgnccttggcgnnnaccacnctnaggggcnatttcnacacacttggcgggccgtttctantgnntccnggctccatnccaaacttggc

SEQ ID NO: 705 - DNA, 651 bp, Homo sapiens
  misc_feature 430, 537, 552, 553, 556, 583, 603, 610, 612, 615, 620, 637,640: n = A,T,C or G
actccttggctcttttgagtctccacttttactcactgtctctgggatttttaagatccttttcttctcttataaatcatcctcttaatgaaaattagcctaacaaaagtttggagactggaatcctactttgagccactgacttgaaataactcttttggcaagttgcctgacatcctgtcttaccaaggtggcatatttgcatttttactgcttaaaacattttttttttttaccatctttatccaaatttatcatattgatggtaggactaacaggctttttagaagctggctttaactttgagtctcaagctacaatgctgttgggcagcctggtcttcccacgtgagggtttaactttgtttatttgcctccagttattccaaaatgcttattaaatgaaaggcccaggaacatgtttattttantcacctttgctttttaacaattttgtttgtaatcaatgagtaattcatgatgaattatttttgactaatggatagcccgaaggccaaagcttttaattctaataggnaatgttcttcttttnnctnatggaaacaatgagaatactttgtgcntttaaaattgcactccgatntatgctngnggntttantcacataagcacaattntgnggtttatttta

SEQ ID NO: 706 - DNA, 651 bp, Homo sapiens
  misc_feature 558, 562, 621, 626, 631, 632, 634, 645, 646: n = A,T,C or G
acagttcacattaatattcacatcccactttctgctacttctgtcagctatactctggagaaaaatacaaagaatggacttacacgctgggccaaggaaatagaaaatggtgtttatttgattaattgacaagttaaagatgaagattgtgacctattagaaggacagaaaaaatcttctagaggaaatactcaagcaactagtcattgttttgatgtcagagtgctaacgcagttgctcctgaattcagaccacagatccacagccacagtccagatatgtagcggttctgtaaaccttaagggtgctgtgaaatgcagagcttatatccacagcagtaaacccaaagttaaagatgctgtgcaggcagtaaagagggatatattgaacacagttgctgatcgttgtgaaatgctatttgaggatctgcttttgaatgaaattccagaaaaaaaagattctgaaaaagagttccaccgtcctcccttatcgagtctttgttccccttcctggatccactgtaatgttgtgtgattataaatttggacgatgagtcanctgnaaaaataagggaccattttatgggagatgttggatcccacaattcaaaatagaagattnggaanttgcnnangaaacaaacannctttg

SEQ ID NO: 707 - DNA, 467 bp, Homo sapiens
  misc_feature 238, 318, 346, 362, 382, 383, 390, 399, 407, 420, 422, 425,426, 428, 429, 436, 447, 467: n = A,T,C or G
acttgcttacaggaagagtaattccctagcaaaggtcattagctcctaaggcactgagtcaaagtgacagccctgaaggaaattgcactccagccctcctccaggatgtctaataagatgggaaacttggatgcccagccattttggtgacctgagagtctaactactccagttagacctaagggcacaaatgcagaattcatgaccttgtagttgtggcagggtctaggaagtcctntctccccaagtaaaaaatattctcttgccattcctgaaattccacattcatataatggctgtgcaatacatgcttctcantaagaaaattaactgcatgtttactgtntctgatcacatcaaantttttatgtttaaaaaaaannctcattntggattgantccaaacntagctctaataananaannanngcccttntggggagactntattcttcatttttatttgn

SEQ ID NO: 708 - DNA, 650 bp, Homo sapiens
  misc_feature 23, 79, 301, 329, 544, 557, 576, 609, 633, 640: n = A,T,C or G
acttttttttttttttttttttnggtatctatctaataaaagtttatttgtgtatgtgcaatgcataactctatcttanatatgaatcctaacaggatgaaaatactttcttgcaactactttatgcttatgaaaggtgtgaacttgcaatgtcctcctgtcttaaacccaagttgacagtgccctctcaaaacttttcataaataatgacctaatttcatttaaaaaatggtttcagcaaatatgaaaatagaaagtccgttatttgtccatttgtaatatgagaaaaaaaaagatgatncattcctctacagaaaaagtgggtttanagaacagttctggtaatatttcacatggtaaagtatcaaaagatctaatgagcagcccccttgctcagggaaagacagtgatttcaatgtgtttctcttccgaattgcttaataactccaagtgattttcaaattggggggcaaattctggcactgagttcatcaaatttaaatctatcttgaatagggacattatagaaatcaaagaacatctntaccctgcacatntggtggagtctggagttangggactacatgcccaagtcatcagctaaatganccaaaaattgaactttaaccactntcttcanggagatgtct

SEQ ID NO: 709 - DNA, 638 bp, Homo sapiens
  misc_feature 592: n = A,T,C or G
acgcgggaagcatatgttacttaccttgttattaaatatttcttgaaaagcaaattttaatggtttaattttatgtggacgtatgttaaattatccaactaccctattgttaagcatttggttttaaaatttttatgctaatataaatgctcaagtaatttaaaatattgaaagcatccctgttggtataaatttctgagtaaatgcattggatcagttggactttgaacgcctttgaaatggctttgctaaaatgctcccgccacaaagttgtaggaaatgggaagaggagtcaactagaggcaagggagttgagagagctgcaactgtaaagggcaagaacaggcagaggtaaaaagatgatggaaggtgtggtgactaagggccacgtttattgggtgaaatttgagattgtaggccaactgtattttcaagcttctgaacttaggcaaaatattcatcgcaaagtctctagcgtcatatttttctcacccaaattacgtttcccgagattatttatatatagttggtctatctctgcagtccttgaaggtgaagttgtgtgttactaggctgtgttttgggatgtcancagtggcctgaaatgagttgtgcaataaatgttaagttgaaacctc

SEQ ID NO: 710 - DNA, 363 bp, Homo sapiens
  misc_feature 37, 59, 109, 130, 166, 171, 203, 204, 235, 237, 238, 244,245, 250, 252, 259, 265, 266, 282, 286, 288, 291, 302, 314,324, 325, 327, 330, 335, 338, 341, 344, 348, 349, 355, 356: n = A,T,C or G
actatactcagtatttaaatatgtcccagtatagaancataacttcaattaatttgctnacactaacttcttaaaaacttacaaatattcaaaacaaagggaaaaaatntagatagccaagatttaaaangccattgccttgaacatggagcctccatagcaaaanagganatatacttgtatactcattatattttatttannacccatgtcaggaaacacacactctcttatncnnaatatnnttggnantttaatntcatcnnactcgaaaacccaatntcancnttntatggcaatgnatattcaaattnatttaccaanntnccntattntantanaantcannagcttnnaaatatt

SEQ ID NO: 711 - DNA, 456 bp, Homo sapiens
  misc_feature 133, 148, 174, 191, 212, 219, 237, 241, 245, 253, 287, 288,291, 311, 317, 319, 344, 345, 359, 366, 381, 395, 403, 408,424, 430, 449: n = A,T,C or G
acatggccttttaaaaaccggagacaactggaaattcattggacctgatcaacatcgtaatttctattattccaagttcttcgatttgatttgtctaatggaacaaattgatgttaccttgaagtggtatgangacctgatccttcancctcttttcccacttccaaacaatgnttcattttcttcaagcnttggatgtggcccatccggtnaaaatgnttcctaaaatttgggaanatantaanaattgggnattccttccgcaagtgacctgaaaaaaaaatccnnttnctcatggcaagggacaagcncccacnanacttcaggtggatttggctgactgnnctgctaatatcaantctgcgnttgaaaagcaacccntcaaaacaaactgntaaggatnggccncccctttttaaactgnttactntccttttttaagggctggngaaaccc

SEQ ID NO: 712 - DNA, 655 bp, Homo sapiens
  misc_feature 485, 519, 522, 551, 595, 602, 616, 638: n = A,T,C or G
acgcggggacctgggataacggcggcgagcggacggctgcatttacggggtctcccggagggccagagtcgtggcttacagaagagacgaaatgtggtctgagggacgatatgaatatgaaagaattccgagagaacgagcacctcctcgaagtcatcccagtgatggctacaatagactagttaatattgtgccaaagaaaccaccactgctagacagacctggtgaaggaagctacaatagatattacagtcatgttgattaccgagactatgacgagggccgcagtttttctcatgatcgaagaagtggtccacctcacagaggagatgaatctggttatagatggacaagagacgatcattctgcaagcaggcaacctgaatacagggacatgagagatggctttagaagaaaaagtttctactcttcccattatgcgagagagcggtctccttataaaagggacaatacttttttcaganaatcacctgttggccgaaaggattctccacacancantatctggttccagtgtcagtagcaagaanctactctccaaaagggagcaaatcatctctttccatcattcttnaacatanaaagtcccgtcgtnctggtgcctctacaaacggcanaattgaagggaattcct

SEQ ID NO: 713 - DNA, 407 bp, Homo sapiens
  misc_feature 31, 35, 64, 78, 113, 119, 139, 187, 189, 191, 209, 244, 250,267, 283, 295, 304, 313, 317, 324, 341, 364, 369, 372, 376,387, 391, 392, 395, 400: n = A,T,C or G
acttttttttttttttttttttttttttttnaaanaacctttttattcatcatctaaccaacanaggtggttggctcnaactcaaactaaaatggcctcaaaaggcccacctngttacnacatgacagggcaaaaccanaagtagggacagagtttaccctcagttctctgcaaaaaaaaccaagcntntntttacacacaggtgcctnattaaaaactgattggcaatgttccaccagcacanacccanagtgtgcaaaaatccgngggggctctgtatatntgtaattcaaanaatcctgcnatttcttanccanaaacaanctcttgttttttgggangagggtgatcaaattgttttctntaatnatngcancatttgtcaantctnnaanttttnaagggga

SEQ ID NO: 714 - DNA, 141 bp, Homo sapiens
  misc_feature 138: n = A,T,C or G
actttcactaatttgctcctgctatctaaaaggcagagccaggtatacaggatggaacatgaaagcggactaggagcgtgaccactgaagcacagcatcacagggagacaggcctctggataactgcgggcgggcctnact

SEQ ID NO: 715 - DNA, 649 bp, Homo sapiens
  misc_feature 124, 143, 286, 302, 322, 326, 331, 335, 346, 360, 368, 369,373, 383, 397, 414, 421, 428, 429, 438, 440, 442, 450, 451,453, 461, 463, 466, 472, 477, 481, 482, 492, 504, 505, 519,522, 524, 531, 536, 543, 552, 557, 558, 563, 578, 579: n = A,T,C or G
  misc_feature 590, 594, 604, 606, 614, 623, 625, 626, 627, 628, 637: n = A,T,C or G
acgcggggtgagaaggagaaggagcggctgggaggcggtttgggagtggcgggtggtaacagcacacgagagcggctgctgtctgcgcttgaggacttggaggtcctgtctagggaacttatanaaatgctggcaatttcaanaaaccaaaagttgttacaggctggagaggaaaaccaggtcctggagttgttaattcaccgagatggggaatttcaagaactaatgaaattggcacttaatcagggaaaaattcatcatgaaatgcaatgttttagaaaaagangttagaagagagacantgatattcacagctacaaanacancttanggancataacaaatnctggcaacatcttntttaccanncaangagaaactcngtcataaaaaaagnaagaaaaaggtcttttntcctttnaaaaaannattaatatncncntaggatcnngngcaatttntnctntttgtncctcncttnnccttggttcnaggggaaccccnnggataacctttccnaantnaatttanaaatntaaaaantgggtttantggtnntaatntaaacaattctttcnnttttgggggtnatantggccttttncnaaaaaaantcccttctntnnnngaatatttnccaaatttcctt

SEQ ID NO: 716 - DNA, 547 bp, Homo sapiens
  misc_feature 440, 493, 497, 511, 521, 530, 536, 538, 544: n = A,T,C or G
actaaatctagtaaagacattttcatacacaccaaggggaaaaataggtagcattacagaaatttttgatgcaagaatatattttttcttattttttttatcatggtctacgagaacattgtttgagatgccaaatatttcattaagttgatgttccttttctttctttctttttctttttcgtagagacagggtttcgccatgctgcccaggctggtctcaaagtcctggcctcaagcgatccacccaccttggcctcccaaagtgctgggattataggcatgagccaccttgcctgagctggtatttcttgagtatctactttgcagaaaacaaccaatgagtccagtggcatagcctttctctttcagtatttttgcaaaagttgtctcatttgttgggaagacctccagatgctccggtccactgaagacacggtnaccaatgctggaaaccatccctgatcgcacagggtttctgccccgtgaggaanggcngctctgcttggggntgcccaaaanatgcggctnaaatgngntggtcnact

SEQ ID NO: 717 - DNA, 201 bp, Homo sapiens
  misc_feature 157, 173, 186, 197: n = A,T,C or G
acgcgggggcagatcagggatcgcgattgcgaatcctccgctgaggtgatttggatatccctagaacgttgagggcacgagtcgggtcctgagaccaggtcctcagccagcagagccacgttccttatgagcaccgtgggtttattccattatcctncaccactgacccgaanatgcccggcgccntggggactccngctt

SEQ ID NO: 718 - DNA, 653 bp, Homo sapiens
  misc_feature 43, 107, 110, 159, 198, 257, 328, 412, 428, 440, 474, 525,547, 579, 581, 594, 605, 616, 634, 652: n = A,T,C or G
gctttttttttttttttttttttttttttacttttgggagganataaccagtctctcccttcatatatattcttttttatttcttgttataccttcccaaaacaganacnttcaacagtagttagaatggccatctcccaacattttaaaaaaactgcnccccccaatgggtgaacaaagtaaagagtagtaacctanagttcagctgagtaagccactgtggagccttaagtggtgaggtcttccaatttcagagngatgtgtcttcaacttgtatcatcattttagcggaaaaacataatttaattttggtgaaatgagattcatntcgtaacaggattagtaacagcattcactgaatttcacactctttttttgtgaacaagtgaaaaaaatgaatggtagctaaaanatcaatgggattccanctccagctgcanatggaatgaccatttaccaggacaaaaaaccctntttttttgatttacaaagctaacagcagttttaaatctgcagcttaattcngaccaactacccacaccttttnaaatggcaaaaatacaaaaaagtgttcaaaantntttcaaaaaaagngcatagtctangtgcttgtaantaaacccctgaaaaattnttgctagagggagttcanc

SEQ ID NO: 719 - DNA, 166 bp, Homo sapiens
  misc_feature 20, 117, 124, 130, 132, 141, 165: n = A,T,C or G
acgcgggatgggaatgaggntctaccactctggaaaattcatgcctgcaggtttaattgcaggtgccagtttgctgatggtcgccaaagttggagttagtatgttctacatgacccnattaacnaaagtntnttccacctnaaacatgataaaataattaaaaant

SEQ ID NO: 720 - DNA, 312 bp, Homo sapiens
  misc_feature 159, 268, 273, 287, 308: n = A,T,C or G
acaaataaaagtgatggtgagaacctggctcaggaaatgcagtagcaggccatattgcatccaaaggaattactcacagctgtgctgtgtgcattctctgtgggcctagcagggaaggggacagccctgtggcaatgggcatgacacggatgctcctgnaatgcagtctcagtgacaagttgtgtgtcatccaggaagaagcgggtatgaagtgattatcgtcccaactttgttggtaactatcttcctcatccttctttggggtcantcctngtgctttttatcanagacaaaagaacttaacaccngcgt

SEQ ID NO: 721 - DNA, 370 bp, Homo sapiens
  misc_feature 91, 232, 247, 263, 279, 288, 293, 308, 311, 318, 321, 328,330, 336, 350, 370: n = A,T,C or G
actttttttttttttttcttttgatttcctcaggaccttagagggaaaacaaacagtagcagctaatattctcaagtatattgctgcttanaaagatcctcaggaacaattagcagcaataagcaagcctttgaaaagatctgaattctttttcctgaaatatttacgatacacaggtgctttttatctgaaatctgttgggtcctccttttaggcagtctctgtgggcaanagagtgggacttgcnaggtggacagctgtgngggatcctggggaaanggagttttnaaaangggtggctcagggcntgntaaaaanccnttttggnanggattngtattgaaaaaatnaaaacccctttggtaaggcn

SEQ ID NO: 722 - DNA, 354 bp, Homo sapiens
  misc_feature 218, 221, 316, 354: n = A,T,C or G
accggaagaagcagctggcaaagcagctccctgcacatgaccaggacccttcaaagtgccatgagttgtctcccagagaggtgaaggagatggagcagtttgtgaagaaatataagagcgaagctctgggagtaggagatgtcaaacttccctgtgagatggatgcccaaggccccaaacaaatgaacattcctggaggggatagaagcaccccacancantgggggccatggaggacaaatctgctgagcacaaaagaactcaatattcctgctattgctgcaaactgagcatgaaagaaggtaacccagccatntatgcctaaagggcttggctattataaactgtggcacn

SEQ ID NO: 723 - DNA, 183 bp, Homo sapiens
  misc_feature 85, 112, 116, 133, 135, 141, 145, 150, 169, 174, 182: n = A,T,C or G
acagcgttcacaatgctggtattaatcagctacatattttgaacatctactgttactggataccaaagaaagtgagttatttaanaatcttccattcttgttataagcttcntatnatccagtaacttctcanangctttncaanaagcntaagttcttgctttgaganaattntaattgtnc

SEQ ID NO: 724 - DNA, 204 bp, Homo sapiens
  misc_feature 34, 88, 161, 171, 175, 182, 189, 195: n = A,T,C or G
acgcggggagtgcgtgccgctccgccgaccgaanaggctggacatgacaccagtggcatatcacggccatggggtctcagcattccgntgctgctcgcccctcctcctgcaggcgaaagcaagaagatgacagggacggtttgctggctgaactagagcangaagaagccnttgntcattcntatatgntgaatncccgggaga

SEQ ID NO: 725 - DNA, 636 bp, Homo sapiens
  misc_feature 567, 602, 635: n = A,T,C or G
acctcatcggtatccaaggccccgactatgttcttgtcgcctccgaccgggtggccgccagcaatattgtccagatgaaggacgatcatgacaagatgtttaagatgagtgaaaagatatctccattctctctaaagtagtggttctttttgcccttaaacttaaatttttaaattaattaacctccgcctcccgggcccaagtgatcctcccatctcagcctcctgagtagctgggattacaggcgcacaccaccaatgcccagttagtttttgtgtttttcatagagacagggtctcaccatgtcattcaggttggtcttgaactcctgggctcaagcagtctgcctgccttggcttcccagtgctgggattacaggcgtgagccaccgtgcccggctaaaaagtatttttaagttctgcatattgcttatttcacttaacactatattagagattgttttatatcaatacatatagatatgcttattcttgttgacagttgcataattttccattaaattgatgtatcatgggcagttaaccaagttactcgttttactcttancataactttgggggaacaaatgtggatgttttggnggttaaagctattaaaacaggggtttttgcccng

SEQ ID NO: 726 - DNA, 288 bp, Homo sapiens
  misc_feature 233, 250: n = A,T,C or G
acgcgggtatagagggctaactcaggcattgtcttgtttatttgtagactggattaaaaacaacctgtcctgttttgtcagttcccagcttcttcgtttagaataaattagaccaaaagaagaaacgtgcttgtctctgtatacccgcagaatgaagttactgttgttaaaactggattttttcattttactaggttccgaagagtccagatgcttggtagatgttcaatacntgattttttttttaatngaatgtgttcattttaaaatcctccttaacatttctag

SEQ ID NO: 727 - DNA, 634 bp, Homo sapiens
  misc_feature 577: n = A,T,C or G
acttacatgtgtgaacacatataaagtgccaggtttacagaccctggctcaaggacagtctaggatgggaaaggaggtagggcgagaagaagcacatattttctccctggtgcttcagcctcaccctatccaagggacagacatatggggtgtgagaaacccatccccaggtcccagccttcaggactggagtccttttgagtctggtggagtcacagatccagtctttgggggacactgggtctgtctccttttgaaagccctggaaaggtgggaggtaagaagtaaagggagacaggtccctgctagaagaacttgacgcctcggccatcgctgacagtgatgatctcggccttgtgctcctgctgtagggcctgcagagcccgcagtagagtggcttcatccagcccgtggaactcctcatcctctgtgtcttccccattagtcagttcatacagggtaaagacggagttgttctgccactcctggaaacccactgatagatgagtttcccccattcttctggcctccgccacatgatcaggaagctggacttgctcttatccaaccactcgangttccctttcttcttaattctctaatacaatctggatcgactccacaggaagctttc

SEQ ID NO: 728 - DNA, 195 bp, Homo sapiens
accactgtattgattagcctgtatgtagcagggctcccttcattgcatctgaggacttgttttctttttctttatttttaatcctcttagttttaaatatattgcctagagactcagttactacccagtttgtggttttttgggagaaatgtaactggacagttagcttttcaattaaaaagacacttaacccaa

SEQ ID NO: 729 - DNA, 649 bp, Homo sapiens
  misc_feature 572, 606, 609, 619: n = A,T,C or G
acttcaggattaggaatttgggtttgtcatagatgtattctctggtgagggtggctgggatatacctgacccaccatcttcagaaggacccatgtcaggtctgaccattgggagcaaagccatgttcacactgacctaatgcagagtatggaagcattgggctggttatacatttctgtttcttagatttatcctccgcctctgtaggcatggacaacctttaatcagagcatctagagtggcctcttgtttatcctgaagatactgatgggtcttgttttctgttagtctgttttgtaatattcttttcccttccttcatggggaggcttagtttgtccagtccttccatgcccttctatcccagattacctaaatgttcccttctcaggaattctgtctcatcagttcttcacagtgagaaaagaggctagatgatggtgtggggggttggagttttcttctaataccgagggttcctggctgtgaggaaacagccacatgttcgtcatgattgagctgtgaagtcttcttggacctgttgctgaaaataaagttaatttgtttgaggcntctctcttaagtaggtggaaactattgaagttanctnacaatcacancataggttctgatccttggaaagggggttg

SEQ ID NO: 730 - DNA, 645 bp, Homo sapiens
  misc_feature 8, 29, 62, 95, 156, 184, 186, 192, 198, 291, 308, 309, 314,326, 337, 342, 354, 356, 357, 369, 370, 373, 378, 385, 386,389, 398, 426, 436, 441, 452, 453, 498, 511, 513, 522, 528,539, 540, 542, 548, 555, 556, 583, 584, 586, 596, 598: n = A,T,C or G
  misc_feature 600, 606, 608, 612, 617, 621, 629, 631, 633, 637: n = A,T,C or G
acctcctnttctcttctatttttaggaanaagttataacaagttttaaatatctcaattctnaaaaacaataggcttttaaaaaataagacttgnttaccagaaacaagaaatatgtagttacataaccattttcatatcactactcatttccatnatttaccaattcatctttgatgcaactngngaaacntttaancagtcactagacaccttgttttagaatctgaagaaattattatccaccaacaggaatctaatgatatatatatttgcatatattcaaaaattncatgagggaaaaaggtnntaaantattcctagttnttttataccanatatngatattcctagnannaacaaccaaggnnttnaaatntttttcnnagntgaaactgntgacttatatatgaagcttttttccagnacttttttcnggganattaaaaaatnnattttatttccctgcttgggctaaattaatcaattattttattancaagagaatttcntnaataagganaaattnatttcctttannanaaccantaatatnntttttttaaaaattcttttaaaaatcnntnaaaaatcctnancntttaancntatngcatnaatncccaactngncntaanaaaaataa

SEQ ID NO: 731 - DNA, 624 bp, Homo sapiens
acctcctcttctcttctatttttaggaagaagttataacaagttttaaatatctcaattctgaaaaacaataggcttttaaaaaataagacttgattaccagaaacaagtaatatgtagttacataaccattttcatatcactactcatttccattatttaccaattcatctttgatgcaacttggaaacaattaagcagtcactagacacctgttttagaatctgaagaaattattatccaccacaggaatctaatgatatatatatttgcatatatttaaaatttcatgagggaaaaggtaataaactattctagttattttataccaaatattgatattcctagtcaaaacaacaaggaattaagatctttctccaggtgaactgctgactatatagaagctatttccagcactttcttctggggattaaaaatgatttatttccctgctggctaaaatgataaattatatattacaagtaagtccttcagaagtgaatattaattccttaagagaccataaaatgtatttttaaaaaattctcttaaaaactgaaaacaatccttctctctaaacctatggcttaatccctacttgaccaaagaaaaaaaaaaaagaagt

SEQ ID NO: 732 - DNA, 305 bp, Homo sapiens
  misc_feature 148, 154, 158, 179, 201, 211, 216, 224, 240, 241, 242, 244,259, 262, 280, 302: n = A,T,C or G
acttttttttttttttttttttttttttaaattagttaataaaatcaatacaaatcttttattaaagatctactcataccatggctgaaatcatctattattgttgctagttagcctctcttctatagttgggtaatgttgccttgcnactgtntttnccatctctcccaagtgaaaanaacactttttaaaaaaaattanttgctccaanttttnaggcccangggaggctctcccatnnncntccttaaatagtccnctncaggaagggtgatcttgngtataaaattttcatacttaanttt

SEQ ID NO: 733 - DNA, 651 bp, Homo sapiens
  misc_feature 521, 529, 533, 565, 567, 573, 578, 583, 585, 602, 604, 617,619, 622, 623, 636, 638, 639, 641, 645, 649: n = A,T,C or G
accaggctggcgacaggtgctaccaggagtgggctgaggggagaaaaactatctcccactcttttggcccaggcaatgtcaacgacttccacattccctggcccacttcctgagcaaccccaggttcggctctgtataaggaccctcccctcccaaccccaaccccagagtgcagtgcaaatcaaccaacaatttactggtggaatggcaatcaaaggaaacagttaaacaccaaacaatttcttaaagccaaaaaatatttttcatggagttgaacatttttcgagtgtgtttttttcaagtgtaaaagcagtgacattttgttcaaacagaagcagcatctaggaattctggcacttgggttctagggggttacaggtatgcatcatggattcttctccctcgtatttaaaaaggcctcgtgtttctattcctgagttcataccaacacctgctagctctcccctctagcggacagtgggtgggcagccagcctcctggttagattgggcaatgccaancaaacatncctnattcacctgcttgggcttgctttctgattcanangtaaantcaantgcananaaagaaacttacaaaancncaccaccaaaggnanctnnacggggaccctgncnnantganttgntg

SEQ ID NO: 734 - DNA, 386 bp, Homo sapiens
  misc_feature 111, 123, 125, 189, 204, 219, 245, 251, 256, 277, 279, 282,290, 294, 312, 328, 336, 357, 358, 373: n = A,T,C or G
cagcagagatatatgcctatcgagaagaacaggattttggaattgagatagtgaaagtgaaagcaattggaagacaaaggttcaaagtccttgagctaagaacacagtcanatgggaatccancnagctaaaagtgcaaattcttcccggaatgtgtgttgccttcaaccatgtctgcaagtcaaattngaatccctcaataangttgccagatatttnccttcaaaaccttgtctcaagagaanacccantgttnttttaaatgggtggcagaaantnccnttaagagnaagnttcattgtgcaaattctnactttcatggccttcnctggctgntattcccttatatgatgctgnnaccctttatgggacngaattcaagaaac

SEQ ID NO: 735 - DNA, 630 bp, Homo sapiens
  misc_feature 254, 427, 440, 480, 483, 484, 515, 518, 522, 536, 537, 542,544, 562, 563, 571, 574, 577, 588, 592, 596, 605, 613: n = A,T,C or G
acattgagacagagctaaagaagaggaaagggatcgtggaacatgaggaacagaaagttaagccaaagaatgcagaggactgtctttatgaacttccagaaaacatccgtgtttcctcagcaaagaagaccgaggagatgctttccaaccagatgctgagtggcattcctgaggtggacctgggcatcgatgctaaaataaaaaatatcatttccacggaggatgccaaggcccgtctgctggcagagcagcanaacaagaagaaagacagcgagacctccttcgtgcctaccaacatggctgtgaattattgtgcagcacaacagattttatcattgaggagctcaacgcgcccatacggagaaacaaagaagagcccaaggcccggcccttgagagtaggtgacacggagaagccagagcctgancggtccctcctanccgcaagcgtcctgctaacgagaaggtaactggatgactnttnnttttgagaagttcaagaaaaatgactaggcngtncctncccgggccggtctnnggccnangtccaaaaaaaacctttnnttatttangantgnattcctttacnggcntaantgctatccngttccaantcaaaccagtttctccc

SEQ ID NO: 736 - DNA, 508 bp, Homo sapiens
  misc_feature 506: n = A,T,C or G
acgcgggatagacggaaatggagagctggatttctccacttttctgaccattatgcacatgcaaataaaacaagaagacccaaagaaagaaattcttctagccatgttgatggtggacaaggagaagaaaggttacgtcatggcgtccgacctgcggtcaaaactcacgagtctgggggagaagctcacccacaaggaagtggatgatctcttcagggaagcagatatcgaacccaatggcaaagtgaagtatgatgaatttatccacaagatcacccttcctggacgggactattgaaggaggagaatgggagagcctcccctgggcctgaaaacttggagtaattaattttttttaaaaagtgttcttttcacttgggagagatggcaaacacagtggcaagacaacattacccaactatagaagagaggctaactagcaacaataatagatgatttcaccatggtatgagtagatctttaataaaagatttgtattgattttntt

SEQ ID NO: 737 - DNA, 374 bp, Homo sapiens
acataaacttcaaagagatgctgtagaggattggactgcagtttttcctcatagccaaacagctggaagccagttcccagaagaccaaactgcatgccccaatcgccaaggtaatttattcttattacttgatgtcctaaagcttctttgagatttgctataaaatttcctatgatggtagaacgcaaatgtccaacatgaaattttttggcaacattaggtgaactgaattcaaccacaatcttcttctggggaagtccagagaaaagttcactttttaatccatattttgagccatcttcaattacttgttgtagcactgtctttgttaagagctctctgtttattttgaaatttacagtcctttgaccagt

SEQ ID NO: 738 - DNA, 170 bp, Homo sapiens
  misc_feature 131: n = A,T,C or G
accaagtgagtgggaatacatattctagttaaagcatttgtgtctagctacacaccgctaacaaagttacttagttatcaatgtaggattcttaaggagctttaagctaaggaaaccttttagtgacttancttattttgtatcttttcacttaggaagattttggaggt

SEQ ID NO: 739 - DNA, 517 bp, Homo sapiens
  misc_feature 24, 356, 366, 369, 389, 391, 407, 414, 422, 423, 432, 436,437, 443, 448, 485, 487, 490, 496, 497, 510: n = A,T,C or G
accttcacctgctccagtgatganagcctccagcaacatatagaaaagcacaatgaactgaaaccttacaaatgccagctctgctactatgagaccaagcacacggaggaactggacagccaccttcgggatgagcataaggtaagccgtaactttgagctggttggacgggttaacttggatcagctggaacagatgaaggagaaaatggagagctccagcagcgatgatgaggacaaggaagaagaaatgagcagcaaggctgaagacagagagctgatgagattttctgaccacggggctgctcttaacactgagaagcgttttccatgtgaattttgtggacgggcgttttnacaagggctnttnagtgggaaagacatgtgctnanacacgggatggcattntaatganaccaagcnnggtgagcanatannaaatcncccanaaagagatcatggagaacctgtttaaaatgcccttcntntanggaaanngaagattgactangcccttg

SEQ ID NO: 740 - DNA, 433 bp, Homo sapiens
  misc_feature 30, 89, 93, 101, 179, 183, 194, 215, 219, 226, 230, 297,305, 306, 314, 317, 322, 355, 380, 389, 390, 394, 396, 417,425, 426: n = A,T,C or G
actttttttttttttttttttttttaacanaaaggtataaagtttattaacatctttaaaaaaaaaaaaaaaaaaagatgggccgggcntggnggctcacncctgtgatcccagcactttgggaggccaaggcgggtggatcctttgaggtcaggagtttgaaaccagcctggccaacntggngaaaccccatntttactaaaaatacaaaaaanttanccaggcntggngtcgcacacctgtagtccccagctactcgggaggctgaggcaaaaaaatcgcttgaacctgggaggnggaggttnnagtgaacnaanatcgnccgttgactccaacctgggcaaaaagcaaaaantccatctaaaaaaaaaaaaaaaaangatgggccnnaccncngctactgaatattgatatagntccttttnnacaagtt

SEQ ID NO: 741 - DNA, 567 bp, Homo sapiens
  misc_feature 33, 447, 467, 491, 520, 522, 523, 527, 542, 545, 549, 550,554, 556: n = A,T,C or G
ggtacgcgggtgaagtattgctaatattaccgnggtttatgaactatgttcagaattgaagaaaatcctaactttcagttagaggttagtgacggggttcaggacaccctacacaaaatacagcactttgacatattgaatattttaagctgaaggcatttgaggaaattgcagaagcaggaaggtgactctgaccttctgcctgctgttctccccagaagcagccataaaacctgggaaggattttctgaccttcccctgaagtagatcataagactgtcatgtaagaggtgctctcctggcacccagagaaaaggagcatccttacctcaaaagcacagggacacaaagaggaatctaaacaaacaggcctctcaattttcccccagttattacatttagcttggtcacacttttgcctatgacatttctacatcactggcttgntcttcatcaaacctactatnaaaaacattcaagtcaactgtttntttgggcctttttttcttatggagccccntnnggtngggtaaactttattnaanaaannggcntnctttaaaaaaa

SEQ ID NO: 742 - DNA, 577 bp, Homo sapiens
  misc_feature 39, 435, 450, 476, 517, 519, 528, 540, 550, 566, 568, 572,576: n = A,T,C or G
ggtactgttggttaaatgacaatttatgtggattttgcntgtaatacacagtgagacacagtaattttatctaaattacagtgcagtttagttaatctattaatactgactcagtgtctgcctttaaatataaatgatatgttgaaaacttaaggaagcaaatgctacatatatgcaatataaaatagtaatgtgatgctgatgctgttaaccaaagggcagaataaataagcaaaatgccaaaaggggtcttaattgaaatgaaaatttaattttgtttttaaaatattgtttatctttatttattttgtggtaatatagtaagtttttttagaagacaattttcataacttgataaattatagtttgtttgttaagaaaagttgctcttaaaaagatgtaaatagatgacaaaccgatgtaaataattttgtnaagaagcttcaaaantgtttataccgtggaacacacctacntgaaaagcagaaaatcggtgcctggtttgcttctttttccncnttatttttnggattgggggcnatttcccatncaaaaaatgggggccnanaccngttnt

SEQ ID NO: 743 - DNA, 403 bp, Homo sapiens
  misc_feature 40, 344, 377, 383, 394, 403: n = A,T,C or G
actgggattatataggcatgagccactgagcctggcccanaagcgtttttctcaaaggccctcagtgagataaattagatttggcatctcctgtcctgggccagggatctctctacaagagcccctgcccctctgttggaggcacagttttagaataaggaggaggagggagaagagaaaatgtaaaggagggagatctttcccaggccgcaccatttctgtcactcacatggacccaagataaaagaatggccaaaccctcacaacccctgatgtttgaagagttccaagttgaagggaaacaaagaagtgtttgatggtgccagaaaggggctgctctccanaaagctaaaatttaatttcttttttcctctganttctgnaccttggccgngaccacctn

SEQ ID NO: 744 - DNA, 551 bp, Homo sapiens
  misc_feature 397, 409, 421, 426, 440, 446, 450, 472, 477, 496, 498, 503,507, 515, 522, 523, 524, 525, 535, 536, 541, 542, 543: n = A,T,C or G
acttttctttcttgctggtaattttatggagcaggttaagaaggctgctctgtgttaggataaactgtataccaataatgttgacaacctgtaatgagtgttgcattttacttcttgtatcttttccttcctaccttgatgccagtaatctataagggatctttatagtttgaatgtatttgaataacttcagtatactttagttctacttttttatttgactcacaaccattcttaggtctcaagtattcccatgtgttttaaaagcctgaagtcagtgagatgaaattcaacatcaagaatttgaagtaacttgtaaggaaaaataatataaagataccattggggcagtggctcacgcctgtaatctcagcactttgggaggctgaggtggaangatcacttgaanccagagtttganaccancctgtgcaacaaancaagancccnctttcaaaaacttaaaaaatanctggntgggggggtgctcaccccnanttccnctantcgggaanctgaggnnnnaaaacccttnngcccnnnaggccatc

SEQ ID NO: 745 - DNA, 547 bp, Homo sapiens
  misc_feature 345, 411, 413, 439, 460, 473, 484, 487, 503, 510, 519, 527,528, 544, 546, 547: n = A,T,C or G
ggtactgctataaaactcattcttgtgtggtggctgtgctatagagtctgtgtattgctgttcatattcggagttctggttttgtttttcccttaaaacctgttaacagtttttttgggggtggggggattcagaactcttgtttcccattccatagcacctgacattatttcaagttttctaatatcttaaggtgtatattttattttttttattggcttagttgttttttgttttgttttgtttgagatggagtttcactgttgcccaggctggggtgcaatggtgtgatcttggctcactgcagcctccacctcccgagttcaaatgattctcctgcctcancttcctgagtagctgggattacaggtgcatgccaccatgccccggctaattttatatttttattananaccggatttcccatgttaaccagctngtctcgaaccctgacctcagngaacctgcccccntgcctcccaanggntgggataacagctganccccatnccggccttntggcttannttttaaatatcccccnann

SEQ ID NO: 746 - DNA, 554 bp, Homo sapiens
  misc_feature 23, 44, 343, 388, 394, 405, 428, 433, 438, 443, 453, 459,460, 480, 488, 489, 496, 499, 500, 509, 512, 518, 519, 525,526, 530, 533, 546, 548, 551: n = A,T,C or G
acttttttttttttttttttttngcctggaaatgtttttaatanaattggtctagtaatcgttcaggatttcggtgatgggccctccctgtctggacactgccaacccacagctggaggggcacttaaggcacgtcattttgtgattagaattacacaaaatttgattaatattatagctgcaaaattaacatacacaattttcactcataatttaaaatattttgatgaaattctttgctttcacaataaaagatcaatggtactttttttttttttttttttttttgcgatggagtcttgctctgttgcccgggctggagtgcaatgtcacaaatctcggntcactacaacctttgccttccgggttcaagcgatttttctggttnaacctnctgaaaaactnggactaccggggccccccccccntcggntaaantttgnatttttaagnaaaaannggagtttacaattgttgggnaaactggnnttaaaantcnngacctaaangancccctnncttggnntccnaanggctgggaaaaangnttncct

SEQ ID NO: 747 - DNA, 576 bp, Homo sapiens
  misc_feature 418, 425, 427, 475, 485, 489, 498, 519, 546, 553, 555, 568,575: n = A,T,C or G
actgtgatgtgaagctgttgctggtaaaattagcatttggcctcctgaaaggtctctcaaatgggattttttcaaaggttgccaagacttggactcccattttgtgccaattgcagggattcatgttaccagatgtaatgtggtagactaatgttgacttaggtctgtgaactgcagtataccatcctgcagctagcatgagattgacgactgtatcaactggaattacgtctgccacagccattggagtagcttttatggcccgaggaaaccctttcccagtcgcaataatgattccattaggtccatttatattatcaacccaacctgggaaaggctcctgccaagttgctcccacaatggagggccttatgatggcaatgttcgggttcctgctctcttgctgcaccaccatttnttccaangncttggtgtaagtataaatatttgggcccatctctgatcaaccttgggngtaatctcgncatnaaaaccatngctaacccctcaaggggaatnaaggattttttttggctcccccgggcncgggtananaacttctccaagngctttang

SEQ ID NO: 748 - DNA, 717 bp, Homo sapiens
  misc_feature 452, 481, 482, 505, 521, 536, 540, 594, 599, 607, 635, 641,643, 657, 664, 673, 691, 695, 700: n = A,T,C or G
cgaggtacgggggtcttgagcgcagaaacacttacttttccccctaccctgctcctcctcctccacagccgtctttctctttgcctcagccacttccttccttggcctcaccctccccagtgcactgaagaaggtaaccgggtccagacccacgcggcgccagttctccggcgggaaggaaaaccgcgcagagaggcagcaatgaatgtggatcacgaggttaacctcttagtggaggaaattcatcgtttgggttcaaaaaatgctgatggaaagttaagcgtgaaatttggggtcctcttccgtgatgataaatgtgccaacctctttgaagcattggtaggaactcttaaagctgcaaaacgaaggaagattgtaacatatccaggagagctgcttctacaaggtgttcatgatgatgttgacattatattactgcaaagaataaatgngggttacatatctttatgtaccccggctnnattggatccaatacttgccaacngaaccagttaccctanggatacaacgcaatnctantctagaatccatattaaccatagggttaccaacctcatggtggacaggaatccnatggncaaccctntttaaaggtccttggtcaacaataaagnctaccngncttagttaaaacgngtaatcnaggtgggtntattacttaaatctcctnactncccgnggcctttaagggaatta

SEQ ID NO: 749 - DNA, 691 bp, Homo sapiens
  misc_feature 69, 70, 80, 105, 123, 137, 182, 187, 193, 198, 259, 308,338, 375, 377, 401, 406, 412, 425, 436, 440, 452, 462, 479,489, 493, 496, 536, 541, 543, 545, 551, 556, 558, 562, 569,570, 575, 587, 595, 599, 634, 639, 641, 665, 668, 673: n = A,T,C or G
  misc_feature 677, 682, 689, 690, 691: n = A,T,C or G
acgcgggattgaaaaaaaaaaaaaaaaaaaaaaaaaaaaaaaaaaaaaaaaaaaaaaaaaaaaaaaaannacacggggtnaattacacagttctattaaaacctnatgccttttcattacatntaatttgaactctnaacttcatgttacagaatgctttaaagatgctttaatgaaaagtnttaanaaaatntatanatttgtatgtcagtttatacttcaaaaatccatatatttgtcatattaatttttttagaancctcctaattggataactagatggtatttaaaatgaatgcccaaaaatntcttgtccccgcctgtttaccaaaaacatnacctttagcatcaccagttttagaggcaccggctgcnantgacacatgtttaacggccccggnccttngccggnaccacctagggcnaattcactcantggngggcggtactangggatcccanctcggtccaactttgcntaacattggnatanctngttcctgtgtgaaattggtttccgttccaattcccacaanattcnancncgaacntaaantntaancctgggnncctantaaggactactnctttatgngttncctacttccctttaaatgggaaacttttgcccctnttaananttgccaccccgggaaagcttttgnttngggcntttnttttntactatnnn

SEQ ID NO: 750 - DNA, 594 bp, Homo sapiens
  misc_feature 405, 447, 472, 485, 497, 513, 534, 537, 541, 543, 563, 572: n = A,T,C or G
ggtacgggggtcttgagcgcagaaacacttacttttccccctaccctgctcctcctcctccacagccgtctttctctttgcctcagccacttccttccttggcctcaccctccccagtgcactgaagaaggtaaccgggtccagacccacgcggcgccagttctccggcgggaaggaaaaccgcgcagagaggcagcaatgaatgtggatcacgaggttaacctcttagtggaggaaattcatcgtttgggttcaaaaaatgctgatggaaagttaagcgtgaaatttggggtcctcttccgtgatgataaatgtgccaacctctttgaagcattggtaggaactcttaaagctgcaaaacgaaggaagattgtaacatatccaggagagctgcttctacaaggngttcatgatgatgttgacattatattactgcaagaataatgngggttacatatctttatgtaccccnggctcaattgatnccaatacttggnccacggaacaaggtancctagggataacaacgcaatnctntttntnaaagtccatattaacaatangggtttacnacccccatgtttggatcaagga

SEQ ID NO: 751 - DNA, 585 bp, Homo sapiens
  misc_feature 368, 374, 377, 381, 389, 392, 395, 401, 405, 406, 415, 427,448, 453, 465, 468, 469, 473, 477, 494, 499, 503, 507, 516,526, 541, 545, 557, 564, 571, 572, 581, 582: n = A,T,C or G
ggtacgcgggaactttgtaagatgcaaagaggttggatcaagtttaaatgactgtgctgcccctttcacatcaaagaactactgacaacgaaggccgcgcctgcctttcccatctgtctatctatctggctggcagggaaggaaagaacttgcatgttggtgaaggaagaagtggggtggaagaagtggggtgggacgacagtgaaatctagagtaaaaccaagctggcccaaggtgtcctgcaggctgtaatgcagtttaatcagagtgccatttttttttgttcaaatgattttaattattggaatgcacaatttttttaatatgcaaataaaaagtttaaaaacttttttataaaaaattatttntttttntantttnttttttanttnttnttattnttanntggttcttncccgggcggccnttttaaaagggggaatttcancacanttggcggccttnctnntggntccnagcttgggaccaaactnggggnaatnatgngcaaagctngttccctggnggaaattgttttccnttcnaattcccaaaanattcaanccggganntttatgttnnacc

SEQ ID NO: 752 - DNA, 712 bp, Homo sapiens
  misc_feature 398, 454, 457, 478, 496, 498, 513, 543, 546, 554, 579, 609,610, 615, 623, 634, 640, 647, 649, 650, 659, 666, 667, 690,694: n = A,T,C or G
cgaggtactggatgtggttgcccccatttgtgtgtgtggttgtgtgtgtgtggttgtgtgttggtggccacagctgagcctctgtcaccagagaaggctgaggccccaatggcacacctcagaaacctacaccccgaggctggacggctggactcctgagcacaagctccctctcgcaccctttgccagacagtttgtctccaatttcaaactgacctaaggctcttactcctggattttttgtttttaaaccttctcccagccagtcttcgggagggcatgattagagaagtgctcctttgctgatggaggaggggacctaaggaaagaaaggtggatccaagtgccttctctctaattgatccctcccacccaagtttctttgcctctctttcttntaccaaggcatggtttttactctctgcccttctggcttccaacattttaaaaactngtnaatgcaccccataatggacanttttaagtccaagccctntnaatagcattcaaaangttctggaatcccaagcaccctctgaaaanctnagaaaatngcctttcaactttttgggtgaagcntggttgaacttttggctgttcaaaggtgcnnaattntctttganggttaaacaangcccantttactntnnaaaagactnggacctnnaaggggggggtcctttattcctngacncccaatgaacgattttcc

SEQ ID NO: 753 - DNA, 568 bp, Homo sapiens
  misc_feature 406, 412, 417, 420, 427, 448, 476, 486, 493, 512, 513, 520,524, 530, 537, 538, 554, 557, 568: n = A,T,C or G
acgcggggggtctcattgaactcgcctgcagctcttgggttttttgtggcttccttcgttattggagccaggcctacaccccagcaaccatgtccaagggacctgcagttggtattgatcttggcaccacctactcttgtgtgggtgttttccagcacggaaaagtcgagataattgccaatgatcagggaaaccgaaccactccaagctatgtcgcctttacggacactgaacggttgatcggtgatgccgcaaagaatcaagttgcaatgaaccccaccaacacagtttttgatgccaaacgtctgattggacgcagatttgatgatgctgcttgtccagtctgataaaacattggccctttatggtggtgaatgatgctggcaggcccaaggtccaagttagnatacanggganagnccaaaangcttctattcaagaaggaggnggcttctatggttttgacaaaaatgaanggaatttgcnaaacctnctttgggaagactggtacnnatgcttnggtnacaggnccgcttnntttaatgactttaacnttngggttccaaan

SEQ ID NO: 754 - DNA, 591 bp, Homo sapiens
  misc_feature 419, 450, 459, 471, 475, 512: n = A,T,C or G
ggtaccgaccatagagcaagaatcaagattctgctaactcctgcacagccccgtcctcttcctttctgctagcctggctaaatctgctcattatttcagaggggaaacctagcaaactaagagtgataagggccctactacactggcttttttaggcttagagacagaaactttagcattggcccagtagtggcttctagctctaaatgtttgccccgccatccctttccacagtatccttcttccctcctcccctgtctctggctgtctcgagcagtctagaagagtgcatctccagcctatgaaacagctgggtctttggccataagaagtaaagatttgaagacagaaggaagaaactcaggagtaagcttctagaccccttcagcttctacacccttctgccctctctccattgnctgcaccccaccccagccactcaacttctgnttggttttnctttggccatangaanggttaccagtagaatccttgctagggtggatgggggncatacattcctttaataaaccatggggactgggaatatataggcatgaaccctgagcctgggcctgaaacggtttttta

SEQ ID NO: 755 - DNA, 582 bp, Homo sapiens
  misc_feature 459, 528, 529, 530, 531, 532, 534, 535, 536, 537, 538, 539,540, 541, 542, 543, 544, 545, 546, 547, 548, 549, 550, 551,552, 553, 574, 578: n = A,T,C or G
acgcgggggacgaacacgtgacgcggtcgggcggaccactgcagactgagcggtggaccgaattgggaccgctggcttataagcgatcatgtttctccagtattacctcaacgagcagggagatcgagtctatacgctgaagaaatttgacccgatgggacaacagacctgctcagcccatcctgctcggttctccccagatgacaaatactctcgacaccgaatcaccatcaagaaacgcttcaaggtgctcatgacccagcaaccgcgccctgtcctctgagggtcccttaaactgatgtcttttctgccacctgttacccctcggagactccgtaaccaaactcttcggactgtgagccctgatgcctttttgccagccatactctttggcatccagtctctcgtggcgattgattatgcttgtgtgaggcaatcatggtggcatcacccataaanggaacacatttgacttttttttctcatattttaaattactaccagaatatttaaagataaatgattcgnnnnnannnnnnnnnnnnnnnnnnnnggtaccttgggcgggaacacnctanggga

SEQ ID NO: 756 - DNA, 682 bp, Homo sapiens
  misc_feature 181, 344, 378, 382, 388, 425, 468, 479, 481, 491, 507, 532,536, 540, 556, 570, 573, 576, 583, 601, 612, 618, 623, 637,642, 659, 673, 675: n = A,T,C or G
acttttttttttttttttttttttttttttgcttttcaaagattttactaaatcattttttaaacaaaatatacattaaatctcagatttacagaatatagaaataatttatccaaagaaatttgcatttaaaattggtaatattgcacccaacagtatgtctttgacacatttgcattgncaatctttcccacaatttgcaaaaacaggagagaaatctgaaactaacagaattacacaagctaagttttctgtaaaaaaagaaaaaacttacaattttttatttacaagttaaggaaaagttgtaaacgttcaggattttacttccacagaataaaaagccntacattcttttatcatacctagaaaatgaacatntacncattgngattacctcatagggaattcaacaggactgatattgngaacattcacagcccaatggtaaaaaacagaattctcgaactntgggaactagngnggaaaagacnccgaatgaaaaaaagnctggaaaaaaatcttttcctcttgngagnttcntaatacctaaagtttnttaaatttaaaggnccnccnttcccancttaggaagggggtgcanaaccttttttngaatanacagngaaaaaaagggggnttgtnagccccgaaaaacttgntttgggggccaaantngttccat

SEQ ID NO: 757 - DNA, 439 bp, Homo sapiens
  misc_feature 430: n = A,T,C or G
ggtactataatggtccccatcttaatttgaaagcgtttgagaatcttttaggacaagcactgacgaaggcactcgaagactccagcttcctgaaaagaagtggcagggacagtggctacggtgacatctggtgtcctgaacgtggagaatttcttgctcctccaaggcaccataagagagaagattcctttgaaagcttggactctttgggctcgaggtcattgacaagctgctcctctgatatcacgttgagaggggggcgtgaaggttttgaaagtgacacagattcggaatttacattcaagatgcaggattataataaagatgatatgtcgtatcgaaggatttcggctgttgagccaaagactgcgttacccttcaatcgttttttacccaacaaaagtagacagccatcctatgtacctgcccnggcgggccg

SEQ ID NO: 758 - DNA, 613 bp, Homo sapiens
  misc_feature 429, 433, 454, 480, 500, 516, 531, 538, 559, 560, 576, 582,601, 607, 612, 613: n = A,T,C or G
ggtactataatggtccccatcttaatttgaaagcgtttgagaatcttttaggacaagcactgacgaaggcactcgaagactccagcttcctgaaaagaagtggcagggacagtggctacggtgacatctggtgtcctgaacgtggagaatttcttgctcctccaaggcaccataagagagaagattcctttgaaagcttggactctttgggctcgaggtcattgacaagctgctcctctgatatcacgttgagaggggggcgtgaaggttttgaaagtgacacagattcggaatttacattcaagatgcaggattataataaagatgatatgtcgtatcgaaggatttcggctgttgagccaaagactgcgttacccttcaatcgttttttacccaacaaaagtagacagccatcctatgtacctgccnggcnggccgttaaggccaattccanccactggcggccgttctatggttccnacctggtaccaacttggggnaaacatggcataactngttccgggggaaatntttccgntacaattcccacaacttccannccgaaccttaaagggnaaaccngggggcccaagagggggcncaactncattnn

SEQ ID NO: 759 - DNA, 360 bp, Homo sapiens
  misc_feature 33: n = A,T,C or G
ggtactttttttttttttttttttttttttagntattcttgcttaatcattttaaaattatttctggatttacctactcaccatatgagctggggtttctgacctccctcctgcacatcacgccctccttgtctgttgctttttctagctctgtttccctgcatcttgggttgaggttagcagactggctacccctttcccagagctctgttcccctttctttgccactgaaaggaggtttgctgtccttaccgtagcggacaccgtttgttattaaataatacctctggacacatctccttgttgtaaatcaataagcaaatgcaatacagggaaagacatacggattggaaaagttgt

SEQ ID NO: 760 - DNA, 607 bp, Homo sapiens
  misc_feature 481, 489, 490, 512, 528, 529, 536, 548, 551, 567: n = A,T,C or G
ggtacttttaatggtgggaatttacagtagaagcatcctttgctgagttatacattcctttatcaatctcttttgatacaacatttaaaacaagtagcttcaagaaaccactggtgttttgaggatagtatttctaaatagcattcaagaacagagtattattgcacagatctgaagatcaaaaaaaagctcaaggaaatacagatcggaagtgctgatgagttatatttattgaaaacccaacttttaaggaagtgctaagatcagtcacccatgtgaataagaagccaggaaaggaaagatggggaagcccagatcaccaggcttctattaaggaggaaagcaacagaggaaacagtgaaggggaacagaagggggtagcaaaagtgttacagaaaaaccggactggatagacaaaactgcagaaggggttgttgggggagaactgaaagggaaaccaaatcctgacatgtcttaagtnaagaaggnngttaagaaaacaattttttatngccttgcacattcaannctttaantccccttttganaancccaaaaaattttgtnttaaggaaaatttttttgcccttccgaaaaaaaaattttt

SEQ ID NO: 761 - DNA, 406 bp, Homo sapiens
  misc_feature 398: n = A,T,C or G
ggtactgggattatataggcatgagccactgagcctggcccagaagcgtttttctcaaaggccctcagtgagataaattagatttggcatctcctgtcctgggccagggatctctctacaagagcccctgcccctctgttggaggcacagttttagaataaggaggaggagggagaagagaaaatgtaaaggagggagatctttcccaggccgcaccatttctgtcactcacatggacccaagataaaagaatggccaaaccctcacaacccctgatgtttgaagagttccaagttgaagggaaacaaaaaagtgtttgatggtgctagaaaggggctgctctccagaaagctaaaatttaatttcttttttcctctgagttctgtacctgcccggcnggcgctcg

SEQ ID NO: 762 - DNA, 646 bp, Homo sapiens
  misc_feature 180, 217, 231, 270, 293, 295, 314, 317, 320, 330, 336, 338,344, 356, 386, 387, 393, 405, 425, 441, 445, 472, 491, 495,502, 505, 511, 514, 521, 524, 527, 530, 534, 539, 541, 542,543, 544, 552, 553, 554, 559, 562, 566, 571, 582, 583: n = A,T,C or G
  misc_feature 590, 595, 598, 604, 608, 610, 611, 613, 623, 626, 628, 631,635, 638, 645: n = A,T,C or G
acttttttgttttattctttctctagcttatccctgcacaattattagagtgaatgaaaaaccactttcctgctttccattgttataaattctaagcttaagataaaagtggttctttacatgactgaatcaattacaatttatgggctagagccaaataggttgaagacaatcatccanacagatcaatggaataggaatttcattggaaatgtanaacactttcccaanaatggcatgactttctctgtttttgagaagagtttcatntgctggaccacattttagctttnantgttgtttttttccccatngtnccnaaatttttanctacangnggcccncacttttacgtngcctacaacctgtaggttttgcaaaagaanngtaatntttcctttggtnttcgcttaaagatatctccncattcgatgggtacantttnattttggactatagggggacctcttantaccttttttggttataantagngtttatnaanttcttntgnccaattntcnttnaantgtnatttntnnnnttattgannntttanagnttcnttctnatatttacttnntagtgcntgaanatnttaccnctgngnncntccccctctnggntnaantctnttntctcttng

SEQ ID NO: 763 - DNA, 337 bp, Homo sapiens
ggtaccatagtcccagcacttggcccagggtcctagactgctgggtaggtcctcagaggtatctgaagtcatgtctacattgatacaaagaaacgtatggctcatctgtaacaatacgtagagaaacacaattaagaacaataaggatcacagaactcgaatggatcattataacttcaagactcagtttaagttaccaagaaatgcactgtagcccttttctcacttttatattcagatcagggctaaccctaacatgttcttaaatgaccacttatggtcatttaagtggtcaatgggaatattgcagcagagaactgctggtttgtttaaacgt

SEQ ID NO: 764 - DNA, 450 bp, Homo sapiens
  misc_feature 412, 414, 415, 416, 422, 430, 448, 449: n = A,T,C or G
acaatagatgcaacgccaaaatgagatgaaagagaattcagaataaaattccgtcccttggagcatattccattggctttctctgctcctgcttccgctggtatctggccttctggtagaaaatgatgatggttacagtgactatatttagaagaatgacgagcagtatgagccagaacgagtatccgtaactgtgggtcgttcctttactggtggttgccgggtaaagcatttggaacaactcttcggagagttggttggactgcgtgttcgccacaaacagtatcatggtcacaaaaacgaaggatgctgcaaactttttctttggttctgcaagtccgtgactcaattcttcactactctccccacgaaaaagtcccgtagtgatgaaaatgctcccatttgaagccanannntttaanagaattgncctcggccgcgacccccnnt

SEQ ID NO: 765 - DNA, 629 bp, Homo sapiens
  misc_feature 30, 34, 204, 294, 306, 333, 368, 384, 396, 399, 406, 407,414, 429, 441, 461, 462, 480, 482, 490, 509, 513, 514, 517,524, 525, 540, 549, 551, 558, 575, 584, 587, 593, 598, 611,613, 615, 618, 620, 629: n = A,T,C or G
actttttttttttttttttttttttttttnactngtttgtttggatgctctttccagcagactcatgtcaggaggctaggaagggattccttggggaccactggatgctggtagttaaatgccaggaggctgaatggacctgaagatggaggagactctgcagtctttggtcagccacccttgggtgcttgccaccctgcactntagcaggattgatggtctctggatttgtagctgtgaccggtcatggtggaatgctcggtggtttgcactggagaggcccacatggtggcnactgaggccctntggggtgaggttggctcatgatagctntgaaagttgatggcacaattgaaacaaggacgtgnaagttttggaactttnccagggtccttncanccccganntaaaccntcccaacaattgcancttacttgtttnaaagcttttaggtttttttnnagttgggcttagggactngngggcaaanaaaacttgttttttcttcnttannaancctttgnnaggaacccttttttnttttttggngnaaaattnggaaacccataaacccngtttcctanccngcttgnaaggnattaaaccttttntngnaangnaattttccn

SEQ ID NO: 766 - DNA, 677 bp, Homo sapiens
  misc_feature 250, 367, 386, 456, 459, 464, 466, 473, 508, 510, 513, 519,551, 552, 553, 568, 582, 584, 586, 598, 603, 616, 629, 631,635, 636, 647, 650, 652, 654, 663, 669, 670, 671, 672, 676: n = A,T,C or G
cgaggtactgttacccggacatacctattccttcacaagttctggttcttcagtgctgcttactattttggtaactgggcctttcttggggtatttttgattggattaattgtatcctgttgtaaagggaagaaatcggttattgaaggagtagatgaagattcaagacataagtgatgatgagccctctgtctattctgcttgacagccttctgtcttaaaggttttataatgctgactgaatatctgntatacatttttaaagtattaaactaacattaggatttgctaactagctttcatcaaaaatgggagcatggctataagacaactatattttattatatgtttctgaagtaaccattgnatcatagattaacattttnaataccataattatgctatgttaatataagactacctgcctttgtgagggaatgtttgtgcaaaattttnctnttatngntaatagnggttaaattgaataaaaaatcttccagaattaatntnccnttttgncacttttggaaacataataaatttttggattnnngcaaaaaaaaaaaanaaaaaaaattcctncncnggcggccttctnaaggncaattcccccctngcggccgtttttngntccnnccggccaactngtnantnagggctaantttccnnnnaaang

SEQ ID NO: 767 - DNA, 680 bp, Homo sapiens
  misc_feature 374, 430, 432, 435, 452, 458, 465, 483, 509, 522, 528, 564,568, 570, 574, 584, 589, 606, 616, 618, 620, 623, 658, 661,671: n = A,T,C or G
actctataaatctagtggaaacatttctgcacaaactagattctggacaccagtgtgcggaaatgcttctgctacatttttagggtttgtctacattttttgggctctggataaggaattaaaggagtgcagcaataactgcactgtctaaaagtttgtgcttattttcttgtaaatttgaatattgcatattgaaatttttgtttatgatctatgaatgtttttcttaaaatttacaaagctttgtaaattagattttctttaataaaatgccatttgtgcaagatttctcaaagattaggtatatatttaaatggaagagaaaatatttttatgggagaaaaatcatttgaaccatgaaatttcatcttttnaataacatccagtacttttttttttttttttttttttggatataagggggaagganantgncttacttcattaagttncatggnggatatncaagttgtccccgcactnttagttaaaaaactttctttgccctnaattgtcttgggnccctgnccaaaatcaatttccttccatgggagaaattttttngaantngcancccttccctnaatcnggtattccacctttaanaacaattggntngntcngcctttgtaaaaatttgtaattaggaaattaagtntcnactttttttngtcaaaaag

SEQ ID NO: 768 - DNA, 696 bp, Homo sapiens
  misc_feature 42, 156, 185, 208, 221, 248, 271, 317, 330, 333, 345, 373,380, 387, 392, 397, 398, 403, 411, 431, 432, 433, 434, 440,442, 446, 452, 483, 485, 488, 501, 505, 523, 528, 531, 533,534, 535, 542, 545, 548, 560, 562, 563, 564, 570, 575: n = A,T,C or G
  misc_feature 578, 589, 595, 597, 602, 612, 622, 624, 628, 634, 640, 643,649, 654, 658, 659, 678, 682, 684, 685, 690, 691: n = A,T,C or G
ggtacgcggggatttgtggtgagattctctcccaggccacangacatttcctgctcggaaccttgtttactaatttccactgcttttaaggccctgcactgaaaatgcaagctcaggcgccggtggtcgttgtgacccaacctggagtcggtcccngtccggtcccccagaactccaactggcanacaggcatgtgtgactgtttcancgactgcggagtntgtctctgtggcacattttgtttcccngtgccttgggtgtcaagttgcanctgatatgaatgaatgctgtctgtgtggaacaagccgttgcaatgnggactctctacanganccgatatggcantcctggaactatttgtgatgactatatngcaactntttgctnttctnaattnnacctncccgggcngcccgtttagggcgaatttnnnnacactngncggncgttanttgtgggatcctagctcggttccaagcttgncnttntcaatggtcctancttntttcctgtggtgtaaatngtatncgntnnnaattccnccnatntttttatcccgnannntataantggtnaantcttggggtgncttaangngggangcttccttanattatttcgntngggnaactgntctccnttnaatgtngaaancttnntgtcaatcttttatatganacgncnnacgcnntgggg

SEQ ID NO: 769 - DNA, 378 bp, Homo sapiens
cgaggtacttttaagaaaagtccaatgttacaaaatcaaatgcttatattcagactggcacactttttaaataaaaactccatacacctcagacatatagcacacatggagacaacttactaattgtgtgtaagtatgatacaatgaatgagactgcctgaagtctagtaatcaaagcatgccataaggtgaatgattgtggttaaacacagcaaaataattgtcacaaaactttcaaggcctaacaaattagaattttccaataaaaaatatatattttttcagatgttaataagacatatcagtagagacaaaattaggattttgaagtaatgcaataaaaagatgttggaggcaaaaaaaaaaaaaaaaaaaagt

SEQ ID NO: 770 - DNA, 669 bp, Homo sapiens
  misc_feature 44, 46, 84, 137, 154, 187, 240, 337, 350, 401, 426, 429,439, 456, 476, 477, 507, 513, 524, 530, 546, 548, 557, 567,572, 573, 584, 602, 616, 626, 639, 640, 643, 645, 655, 656: n = A,T,C or G
ggtactttttttttttttttttttttttttttttttccgggttngnctgatttttattatttaaaaaaatggaaaaacaaaagngcatttttcattcaataaatgttccatccttatttagttttgttgccgaaagngaagtccatgactttanaatgatagcaatttatcaaccaaagaatccgtnttcacaccgtttcaataactgcagcaatttccttgaactgtctgtaaaaattntgaaactgtggaatcgtcatttcaaagcacttggtctttacttggcctgaatgatctgccacttttagcatcactgcaacgtaaggatacttaaaanatctgcaagtgtntgagctcacagccatacccagtttccactgaaaatctacaagctggttggngacatcggacttagcatccaacggnggntcgctggacncctccatgggcagcgtntgggacttgcggccggactnnaaaccccccgtcctgcccggcgggcggtcnaaaggngaaatccaccnactggngggcgttctatggaancnaactcgggncaaacttggnggaannatggcaaactngttcctggggaaaaggtntccctccaattccncaaatacaanccggacctaaagnnaancngggggcccannagggacaacccaa

SEQ ID NO: 771 - DNA, 663 bp, Homo sapiens
  misc_feature 442, 495, 496, 503, 520, 532, 542, 607, 608, 626, 638: n = A,T,C or G
ggtaccgctgaagacacccagaatgaaggaaaaaagacaaaaaagaataaaacagcttttagtaacgttggaagaaaaattagtcagcgagttattcacttatttgatgagaagggcaatgatttgggaaacatgcaccgagcaaatgtgattagacttatggatgagcgagacctgcgactggttcaaaggaacaccagcacagaacctgcagagtatcagctcatgacaggattgcagatcctccaggagcggcagaggctgagggagatggagaaggcgaaccccaaaactggaccaaccctgagaaaggaactgattttgtcttcaaatattggacaacatgatttggacacaaagactaaacagattcagcagtggattaagaaaaaacacctagtccagattaccataaagaaagggaaaaatgtagacctgtcanaaaatgaaatggaggagattttcatcaatactccaactatcctggaatactcnntctcatntaggcccagcttgtcangaggaaaccttnatgggggtcntcggccttggccaaaatgggggaaggctttaagaactcagaaacccggaagaaccctttaccaanncctggaatgttagggatnaagtttcctccnaatttataaaaaacctcttttaaaa

SEQ ID NO: 772 - DNA, 660 bp, Homo sapiens
  misc_feature 456, 537, 543, 559, 582, 604, 617, 635, 641, 651: n = A,T,C or G
actgtatatccatatggcacatttatgactttgtaatatgtaattcataatacaggtttaggtgtgtggtatggagctaggaaaaccaaagtagtaggatattatagaaaagatctgatgttaagtataaagtcatatgcctgatttcctcaaaccttttgtttttcctcatgtcttctgtctttatatttttatcacaaaccaagatctaacagggttctttctagaggattattagataagtaacacttgatcattaagcacggatcatgccactcattcatggttgttctatgttccatgaactctaatagcccaacttatacatggcactccaaggggatgcttcagccagaaagtaaagggctgaaaaagtagaacaatacaaaagccctcgtgtggtgggaactgtggcctcactcttatttgccttcattcaaaacagttggccctttncatgacgaggatctctacaggtagggtaaaatcttttctgtgctatcagccagaaatagttttgggcttggatatgatttnaaacanatttggctggcaccangcaaaacatacaaatgctggctnttccaaacccttagaatctccnctttttttaatantttccggacctgggcacnccctangggaatccancctggggcg

SEQ ID NO: 773 - DNA, 355 bp, Homo sapiens
  misc_feature 342, 343: n = A,T,C or G
ggtacgcgggatctgggagaatatttaatggaaaatcgcttggttaaaacctgacacttttaacagtgaacagcgttctgagtgtggacgagtagccagtgaagataatgaatgtcgaatgtgactgactagcagcttcattttgaatgagggtcgctgtctgcccattgatagaggccagattgtcttggaagttccaaagttgcaacgatttctggctagtgccacgaggtttacttgactgttgtgtgaaaagctgataagaaaaccatccagaaaaaagctcttcgttttacaaacatgaaaataaaacatgtaattttccaaaaaaaaaaaaaaaannaaaaaaaaaggt

SEQ ID NO: 774 - DNA, 577 bp, Homo sapiens
  misc_feature 479, 507, 521, 523, 530, 537, 556: n = A,T,C or G
ggtactttatgaatttggggtaggtaaagtttgtattttatcttaaacatgttttctatgatgaaaaggaacaaaattgtaaaaaatgaggatcttccctctaaaggtttcaaagcgttagaggacatgcaattaaatgttgttacaccttgaacaatgagcctcttgagtttgtaggaagggcagaccggctccattaccaacaactttggggtagaaagcacagctctcctcttttacccagcacaaatgcaatcctgattataaaactatttgtgtttctaaatacaaccaaaggaaatcttagagaaacataaattagaaacctcttttattaaggggaaacaacaaaaaaaggtgcttttttaaaaaaaaaaagaaaagaaaagaaaaagaaaaaacaagctgtaaaaccatgaagttaaaagagctgggtctggagcagatgtgcataataactagttaagtgctcccagcangatcagaaacagctttgggggaccagangaatatgggttggngntgttcanaaaagcnccagttatactcttccatnaaaatgatgggcacagtgttc

SEQ ID NO: 775 - DNA, 583 bp, Homo sapiens
  misc_feature 332, 337, 372, 374, 378, 383, 401, 427, 477, 483, 499, 506,514, 525, 529, 532, 540, 541, 549, 554, 556, 570: n = A,T,C or G
ggtacccaatgaggaacctaaagttgcaacagcttatagacccccagctttaagaaataaaccaatcaccaattccaaattgcatgaagaggaaccacctcagaatatgaaaccacaatcaggaaacgataagccattatcaaaaacagctcttaaaaatcaaaggaagcatgaagctaagaaagctgcaaagcaggaagcaagaagtgacaagagtccagatttggcacctactcctgccccacagagcacaccacgaaacactgtctctcagtcaatttctggggaccctgagatagacaaaaaatcaagaacctaaagaagaaaaagcnatcgnacaactgaaagaacaaacagcaactggaaaacagntngaanaaaantcagttgggagaaaattntgaaagaaacagcccttcttcaggangctggaagatttgggaattggggttttttaaaagattcaccggaaagcanggttgntgaccagaaatcagtngcaaacncattcttntggtaaacccnttgngtncccagaannttccttgngcccncnctttaatgtcaatntttaatttaaacc

SEQ ID NO: 776 - DNA, 577 bp, Homo sapiens
  misc_feature 279, 350, 433, 468, 491, 502, 506, 510, 511, 524, 525, 526,529, 530, 535, 537, 538, 543, 545, 547, 551, 552, 554, 556,571, 572: n = A,T,C or G
ggtacgcggggaggctcggaccggcccgcggagctgctgcagtccttcgcgccctcctcgccctccccaccgacatcatgctccagttcctgcttggatttacactgggcaacagtggttggaatgtatctggctcagaactatgatataccaaacctggctaaaacttgaagaaattaaaaaggacttggatgccaagaagaaaccccctagtgcatgagactgcctccagcactgccttcaggatatactgattctactgctcttgagggcctcgtntactatctgaaccaaaagcttttgttttcgtctccagcctcagcacttctcttctttgctagaccctgtgntttttgctttaaagcaagcaaaatggggccccaatttgagaacctacccgacattttccaacatactcacctctttccataanccctttccactgcatgggaggtttaaaactggaantatggtgctagattattaaaacnatgacttttantganattnnaattattacatcnnnccnnaactntnnaacantngntgcnnanantttatttagaaaaannatggg

SEQ ID NO: 777 - DNA, 579 bp, Homo sapiens
  misc_feature 377, 423, 435, 503, 509, 511, 512, 514, 529, 534: n = A,T,C or G
ggtaccttggctggcattattggaatgaggttctaccactctggaaaattcatgcctgcaggtttaattgcaggtgccagtttgctgatggtcgccaaagttggagttagtatgttcaacagaccccattagcagaagtcatgttccagcttagactgatgaagaattaaaaatctgcatcttccactattttcaatatattaagagaaataagtgcagcatttttgcatctgacattttacctaaaaaaaaagacaccaaacttggcagagaggtggaaaatcagtcatgattacaaacctacagaggtggcgagtatgtaacacaagagcttaataagaccctcatagagcttgattcttgtatattgatgttgncttttctttctgcatctgtaggtaaatctcaagggtaaaatggtangggtcaactttnaaggctctgaaaccccatttccctgctctgaggaacagtgggaaaaaaagtcttttaagagatttacnatatcngnncntttgctctcttaaanccaanactgctttggaatttttttaagggaaaatcaatgaaataaggttt

SEQ ID NO: 778 - DNA, 575 bp, Homo sapiens
  misc_feature 76, 131, 242, 249, 373, 382, 396, 440, 492, 546, 554: n = A,T,C or G
cgaggtacaggataatatactcagatatttttaaaataaactacttaataataagaaattagccataccacattgntccatttgctacaagaacaaattggcaatgaagactatttaaaagaaatgctcanctctacagagggtggtggcaggcaacacttttccattacagaataacctctattcttccatgatacatattcctgtggaaaaacttgtcagggcccagggatgaaaaatanagcttgncctaattagctaactgtaggttcacttaacatctttgggaaggacccaaaaaatctggccattattttcttaaacatctgcaagctgcaaaaattccttagtcctcagctatagtttctgctanatatcttanagctgggacagctncactgtgactcctcctcagctatggggtgggtgctagtcatcanagtctgggaatgtctcataagaagtaaccacgggagcctttggatgcataanaagccgatgccccaggtgggaaaatccgggtaggaaccccagaatgccaatggntcagcacngggaacggcccggctggcccc

SEQ ID NO: 779 - DNA, 564 bp, Homo sapiens
  misc_feature 491, 500, 511, 518, 539, 543: n = A,T,C or G
ggtaccaacatttattaatcctcacaacacccctgtgaggtaggtcagtatgtcctttagagtcgagaactgaggcagaggtcaagcaaacctgccctgggccacagagcagcagatgaagggcctagacctggatccagaagctagggctctcggtccagcattcatccactggtggacatcacatgggcttatttttaccagcgaaggttacgtgaaggacaaaacgcactcagccagcaacggaaactcaacagttcaaacagcactggggaacatgtcagttaaagagacgaaacgctgaccagctcatgaatgaggcaagacaacatgcggctgaggaagtgtggaatcatcacgactggggattagaccaagaacgggcgctcaagagggttcaggaaaatgtaaacaaactaggaacccatccaaggggtgacaggcccaaatgcctacggctccaaatggtagaaaaattagaaaaagatagnggaaaaatnccaccccccanccttacntttaactaggaatgccataangggntaaggtcattccccttaaaag

SEQ ID NO: 780 - DNA, 559 bp, Homo sapiens
  misc_feature 498, 515, 542, 558: n = A,T,C or G
acgcgggggctcagagctcgggggcggcgctcagaaaacatctggagaaaatgacccattggtttcataggaacccattaaaagccacagctcctgtgtcttttaattactatggtgtagtcactggcccttctgcttcaaaaatatgcaatgacttgaggtcatccagggcacgactccttgaactgttcactgatttgagctgtaatccagaaatgatgaagaatgcagcagattcatatttctcacttttacaaggtttcataaattctttggatgaatctacccaagaaagcaagttacgatatattcaaaatttcaagtggactgatacattgcaaggacaggttccaagtgcccagcaggatgctgtttttgaattaatttccatgggatttaatgtagctttatggtataccaaatatgcttcaagactggctggaaaagaaaatataacagaagatgaagcaaagaagttcatcgaagcctaaagaatgnagctgggattacaggcnccaccactacacccagataaattttgnattttaatagagacgng

SEQ ID NO: 781 - DNA, 560 bp, Homo sapiens
  misc_feature 476, 510, 535, 556: n = A,T,C or G
acactttaatatctttcccaccaaaggcgcgacagcactctgccagatcttgactggcctctggtgggccatggacgatgatcaactgtcgtggtttcatctgattaatgatttttttaatggaatccccatcagagcgtccttcatagtctatgtaggtaacccgggcttttatttcaatagactctgttgtagaaatacatttagtaggaacatcagataaatcctgatccataggttcatctccatttgtcaaaccagattctaatttgcttttttcttcttcagtagcttgaagctctggcactaagaaatcctctggtttgataatctctccatattcatcccatttaattctttcttctggggcaggaaacataggataggacttttttgcctgtttgaaaaaacttcctttacgactgccttcacctttcatcatcaagtcatgcttcgcttatgagctgatggctggncaatatcttcctcaatatcactctcatcactggnatctatatctggctcttttgactgntcaagcttttttgcaagcttntttt

SEQ ID NO: 782 - DNA, 562 bp, Homo sapiens
  misc_feature 549: n = A,T,C or G
ggtactttaagaaaaatttaagtgacaaatgttagaagatgatggattgaaaaatataagtaatttggcatattgaccctatataaaaaagtgggcattttgtaacattccttcaggaagaatagaattgtatgcttttttctgcatgtttgtgatcactgtgagtctcagatgattattccagttttcaatgatttttcaaaataaaagtcaatcagcattgttatttatcattaaggtattgaacactggattgcatggttgaatgtgtctttaatccactacaaaatgtgcttgttattgataggatcatgttgttaaattgtaaattttcaaaattaattgatgttttaaaaatgttgagaccaaagtagtatagaagtatggacttaatttaattgtaaaattattagaggtatttgttgtagagctttatatattaaagagaggtattggtgcatataaaaacagtaatattattggtatgcttggattcttgcatttcagggtaagtaaaccctgaagaaatcttatttaagtatagctacngctgccgtagctt

SEQ ID NO: 783 - DNA, 562 bp, Homo sapiens
  misc_feature 531, 539: n = A,T,C or G
ggtaccaggaagtaggacaagtaatttcaaaaatataaaggtgtttgctactcagatgaggccgcccctgaccttctggccagagagacattgctgccagccagctctgccttcccatcatctcctttcaggaccgtcccacaccttttacttgctcagtgctgtctgaagatgcagttgctgtttgcaaacaacaggaacaccagttaaactaattaggaaaagagggagatttccaggcctgggtaactatatactgtgaccattggaggtagagacaggtctcaacagttggaaccaggaactctgctgtcaggttgtgagttttgtttctcttccagcttttcactgtgtgggggtcttttctcttatgtcagctctttctatcacatggcagctgacctctcacgctccactctacagcttggacacccagtagaccctgaatttcactctctctaaaaggttctgagggctcatcctgggccaggggccctcctgtgcactgttagctatggccacggaagcctncaagctgnctggaacttcaggttgacctgtt

SEQ ID NO: 784 - DNA, 561 bp, Homo sapiens
  misc_feature 60, 77, 556, 558: n = A,T,C or G
ggtactttttttttttttttttttttttttttgggaataagttatacttttatttttcanaaacaaaaatgacaagnggcaacttgcctttgtaaaagattaaagagtatcagagtaataagctatctctcatagagacagaagcccgagaaacactattatacagctttcaaaggaagtcctattaaataaatctcacaataatatactttaactcaacaaaacaaaaaccacaaaaaattatacagaactcataaaatggtatatgaatgaaaaagagaaatctttaaatccatacactagaagttctctattaaaatcaaggaggctcaaatctgtttcttttaaaaaatatttatggatataattgcgtttttctaaatgtttcattagtaatactcagtcttgtaagtctggttccatagtaatctataatgtaactacttccatctgaaggtccaacaatctgcattgaaataagaatgaaatcaattaggctcccaattccacaaaaccctcagggcaaactttaacaaacccaaagcagggtatccangnaaa

SEQ ID NO: 785 - DNA, 677 bp, Homo sapiens
  misc_feature 395, 443, 456, 513, 553, 555, 556, 558, 562, 565, 586, 610,620, 630, 663: n = A,T,C or G
ggtacacttaagttgaagacacaacacttgatctgaaacaagaagtttgtgcctactcaacagctttgaaagagcacttcccaacgctgctagtagtctttgttttcttcagtgctgtacagtggtgtaaacatagctcactgtagtcttgaattcctagactcaagcaatcctcccacctcagcctcctgaatagctatgactacaaatgtgcaccaccacacccagctaattaaaaaaaaaaaaaaatgtagagatggggtcttgctatgttgaccaggctggtctcaatctcttggcctcaaacagtcttcccaccttggcctttcaaagtgctgggatgacaagcatgagcctctgtgctcagctcttctaatagttttatagtttcaggncttacatttaagtcgttcatccatattgagttcatttttgtatgtggngacagacagaagncaagtttcattcttatgtgtatgaaaatccagttttcctagcacatttattgaagangctggctttccccataaatgttctgggtcttttgtcaaanannantggntgnaaaaccaaattggttctgacncctatcggttcatgggctaggggngggcttaagnccacccgccntttgatttatacttggaggtttttgaagccggnggggggccctactt

SEQ ID NO: 786 - DNA, 680 bp, Homo sapiens
  misc_feature 8, 250, 262, 405, 453, 490, 493, 497, 500, 515, 518, 529,547, 562, 576, 578, 580, 586, 593, 600, 606, 608, 610, 618,622, 631, 641, 646, 649, 650, 654, 656, 657, 670: n = A,T,C or G
ggtacttnttttttttttttttttttttttggaatcattttatctttaataatcttgtagtaatttaaaatatgagaaaaaaaagtcaaatgtgttccctttatgggtgatgccaccatgattgcctcacacaagcataatcaatcgccacgagagactggatgccaaagagtatggctggcaaaaaggcatcagggctcacagtccgaagagtttggttacggagtctccgaggggtaacaggtggcanaaaagacatcantttaagggaccctcataggacagggcgcggttgctgggtcatgagcaccttgaagcgtttcttgatggtgattcggtgtcgagagtatttgtcatctggggagaaccgagcaggatgggctgagcaggtctgttgtcccatcnggtcaaatttcttcagcgtataaactcgatctccctgctcgttgaggnaatactggagaaacatgatcgcttataagccaccggnccnattnggnccaccgttaatctgnagnggtccccccgngtctgcccggcggccgtntaaaggcgaattcanccccttgcggccgnantnatgganccacctngtcccancttggngnantatggcanactnttccggggnaaatgttccntccantcnncaantnnaccggaacaaaantaaacctggg

SEQ ID NO: 787 - DNA, 665 bp, Homo sapiens
  misc_feature 450, 476, 508, 518, 522, 554, 583, 585, 594, 598, 610, 616,630, 651, 658: n = A,T,C or G
ggtacagttccaaaaataattaattttttaagggaatttttcaagacaaaaggcaaatattttgtttcaaacctacaagcaaattcattccaagaagtgaatatagtagtaaaacataaagactattgcaataaaaagtttccaggccagtgacttgtttaattacattcacatttttacattcactttgcctttcaaagcaggagtattttataaaactgaaataaaactttaaattgtcaagctggtgcttaaagttatgtaaaatctgatttaagtttatttcatttccaaggaaaggaccctgaaaggaggggacagggagcttcctaggtctgttgataaactaactgatgctttgtcaagtcttccaagttttcactgtaaataatacaactaacaatgtaattttgctggtttctaatagagaatgaatgaatatattaatgnattacattggttcatgataaaacagntttcctgatactgggaaatctttctctccttntagccctgcnaaanacctctaaataatattttaactggaggccggnggcactggtgaccgttttggcaattttgnanaaatgatanattnctgcccgcggcncaaggngaatcacccctggnggcgtctatggaccacccggnccactgnggatatg

SEQ ID NO: 788 - DNA, 512 bp, Homo sapiens
  misc_feature 364, 500: n = A,T,C or G
acagctttcttcgtcctccatgctaagagatgtaaaagcttaagggtcaaacaataccaattgtataggcttcaaaaaccatctaagttagggcattctctagttttagctaagatacacctggaacactgacaagtcatcacttacatagaataatgtgaagtaaattttttgaaaaataaattttagtggaacaatcctgaaggataacaccagaagaatagcaggttaccagtaaggtgtcagccaatttgttccagtcacttttgaatccatgttctataatctaaaatttattctctttccctaagctgagagcttcctatcatgtcagtatctatgttatgaagaaaaggagacttangtgagatgtttttatttatcgcaactgctgcattaattgcctaggacctcaacagcttcatgaaagtctgggaaatgttcatgcataagggtattgccttagctgacttaaaattggcccatcaatggtcctcggncgcgaacccccc

SEQ ID NO: 789 - DNA, 309 bp, Homo sapiens
  misc_feature 127: n = A,T,C or G
acgcgggcagctaagctaaaggagaaatatgaaaaggatattgctgcatatcgtgccaagggcaaaagtgaagcaggaaagaagggccctggcaggccaacaggctcaaagaagaagaacgaaccanaagatgaggaggaggaggaggaagaagaagatgaagatgaggaggaagaggatgaagatgaagaataaatggctatcctttaatgatgcgtgtggaatgtgtgtgtgtgctcaggcaattattttgctaagaatgtgaattcaagtgcagctcaatactagcttcagtataaaaactgtacc

SEQ ID NO: 790 - DNA, 691 bp, Homo sapiens
  misc_feature 422, 502, 570, 573, 578, 583, 606, 620, 629, 638, 644, 653,655, 666, 679, 684: n = A,T,C or G
acgaagccatcgacagcagagatggagcatcttgtgcagagttggtgtcttttaaacatcctcatgttgcaaacccacgacttcaaatggcctctccagaggagaagtgtcaacaagtcttggaacccccttatgatgaaatgtttgcagctcatttaaggtgcacttatgcagtggggaatcatgacttcatagaggcatacaagtgccagaccgtgatagtccaatcattcttgcgagcattccaggcccacaaagaagaaaactgggctctgcctgtcatgtatgcagtagccgcttgaccttcgagtgtttgccaataatgcagatcaacagttggtaaagaaaggaaaaagcaaagttggggacatgttggaaaaagcagcagagttactgatgagctgtttccgggtctgtgccancgacacccgtgctggtatagaggactctaagaagtggggcatgcttgttctggtgaaccagctggttaaaatctacttcnagaacaacaaactccatttatgtaaacccctaatttgaacaatttgacagctcaaacctgaaagacgnttncagcnctgcncagagagtaacatacaaatactnccttggacccaggntttttttgnaaccatttnaacaanctgaggatncntcgccgcaaanggggaatccaacnctggnggcgtat

SEQ ID NO: 791 - DNA, 645 bp, Homo sapiens
  misc_feature 607: n = A,T,C or G
actaaaggcttttgcatgaattaggaaggagagtcttggggcagaagcaataggggacaactgtgctggtgctgtcttttgcaggatgtgtttaccaaaacatctaatgcaactattttcagactttacagtttgtagtgttaacctctttagaaaaagagcagccatccttttttaggaagaactgtaatcatccccagttgatgaggagaagctcttctgtagagaagaatgacagctgtgctggggcaagcgattgacatactgtagcggacgcaagtacgcgggatagcatactttgacattttaaacatgatagtccataaccattttgaaatgctgggcaaactacatgaagttatttataattaattcacagctaatcaggcattttgaaagcttaattggattcaaaaaccataatgttggaatttggtaaaattttaatgttgatttttactgtgaaaaggtttttataagatatacacaccctagtttaatgttgtgtcttggtgtggatttacagatttactacaggtattctgaaccaggaacacaatcaggtttcaggccagtttgatactggctgccttaattctaatatganagtaggacatcatactaaatgttatgtcagtgggactg

SEQ ID NO: 792 - DNA, 647 bp, Homo sapiens
  misc_feature 558, 599, 602, 631, 645: n = A,T,C or G
acttttgtattttgatatggacagtttattcatttgcatacagttattgactttttcccagctgattaaaagatagtcaagaaattctgcaatatagctgccaaaatagacagctacatttttatgatattgtcatcttttctgttttttttttcttttttttctttagctattttacttaagcataatagccacaataggacatataaaagattataaatacagagctttattatcctgacgtcttgggtcttttaagtatatacttttctgaaaggtatccattttgtaggcttgggttcttcatgagcatacgattgtttatttttgctgctgttctcaacatcatcattgcctgctgatgtgccacgatgctgctccaatagacagcaataagattgtctctaatttgagcagtaacatgattgcaagagaccaagtttcacagcttgtaaagttctgtatttgggattcttgcttatttttccgcctgtgtttttctgagaacttatcctgatgatcaattgaatccagtagttttctatgctatttggtggnggataagctactggaagaaacttatcataagggaaaaatanaanggaaacttgaatcatctcttgattaaaanggaataaagaaagnac

SEQ ID NO: 793 - DNA, 583 bp, Homo sapiens
  misc_feature 33, 309, 559: n = A,T,C or G
gtacaaatgtgcattaacaattcagtgacgtanctgtggatctctggatggctatgtaagctgtgagaaagtcccccactggctttgcacttgctgcgcaccagaggtgaccatccaggcagtatcaacctgaagagggggtgaatcccagcagctgctcgatgggcttaaaccgccactcgtcagcctccagctcttctaccaaaccagctagtttttccatccgagcaacttgctgatcatgtttcacctgtttaagcgtggatgccacttgatagctaaaaacagattcgcagaggaatctctcanagccatcttctaacatctctccagctcctttggggtaggtgaaaagggctttccgtggtggggcaaggtctgagacactgaaaccagatccagtgacagaacttccactgaccccaccagctgaggaggatgatgatgaagcagccatttcctctctagcagagttcttacttcactcagcgggctttagcactttcccctacaagccccacccccaggaccagcctgagtggctgcgctcaccacgacnaggaccgcggcgtgttccccgcgt

SEQ ID NO: 794 - DNA, 438 bp, Homo sapiens
  misc_feature 420, 422: n = A,T,C or G
acatctgatttactgaattttaaagtctgggatgttagtggggaagaggcgaggtgagcattgcgtgacgccgaggactaggcggggcggggactgcacctggctaggcacccccaccctgggcaacttgcccacggaccccagggcagtgagtagtgacaggaggtagcccggggtgagacctctcacagcaagaagatggtgtggttgctggggcctccctggagagtgtcgtccctgcggcccctgggaagtgctccctcacgacggaaggtttcctgtcagtgcggtcccggggcctgatagtggcggtgggcgggtggggtcacgtgtcctcaaggtcctgaatgcccagctctgccccattcctctgattcccagtggctgctagctggacccagctggtgtcctgggcatganangcagggccacccgtcc

SEQ ID NO: 795 - DNA, 460 bp, Homo sapiens
  misc_feature 58: n = A,T,C or G
accatagtgattggggaattccagtttaaagctcataggaatgtgctggcctcctttnttgagtattttggtgcgatctacagaagcacttctgagaacaatgtctttcttgatcagagtcaggtgaaggctgatggatttcagaaactgttggagtttatatacacaggaactttaaatcttgacagttggaatgttaaagaaattcatcaggctgctgactatctcaaagtggaagaggtggtcactaaatgcaaaataaagatggaagattttgcttttattgctaatccttcttctacagagatatctagtattactggaaacattgaattgaatcaacagacttgtcttcttactctgcgagattataataatcgagagaaatcagaagtatctacagatttgattcaggcaaatcctaaacaaggcgcgttagcgaaaaagtcatctcaaatga

SEQ ID NO: 796 - DNA, 653 bp, Homo sapiens
  misc_feature 55, 57, 58, 610, 620: n = A,T,C or G
acgcggggagagtccgtaaggagcagcttccaggatcctgagatccggagcagcntnngtcggagcggctcctcaagagttactgatctatgaaatggcagagaatggaaaaaattgtgaccagagacgtgtagcaatgaacaaggaacatcataatggaaatttcacagacccctcttcagtgaatgaaaagaagaggagggagcgggaagaaaggcagaatattgtcctgtggagacagccgctcattaccttgcagtatttttctctggaaatccttgtaatcttgaaggaatggacctcaaaattatggcatcgtcaaagcattgtggtgtcttttttactgctgcttgctgtgcttatagctacgtattatgttgaaggagtgcatcaacagtatgtgcaacgtatagagaaacagtttcttttgtatgcctactggataggcttaggaattttgtcttctgttgggcttggaacagggctgcacacctttctgctttatctgggtccacatatagcctcagttacattagctgcttatgaatgcaattcagttaattttcccgaaccaccctatcctgatcagattatttgtccagatgaaganggcactgaangaaccatttcttttgtggagtatcatctcaaaa

SEQ ID NO: 797 - DNA, 216 bp, Homo sapiens
  misc_feature 30: n = A,T,C or G
actttttttttttttttttttttggcaggngactgaaactttaatgcacctagggattgaccacaacatttacaaatcagtgttactgcattggtttttcaaagattagctacatttataaactttattttaaaagtttcacaaagttaaatttccttaacacttcaacaggaatctaactctttacagtctatcaaaatggtaatatttaccttt

SEQ ID NO: 798 - DNA, 627 bp, Homo sapiens
  misc_feature 238, 245, 250, 252, 264, 265, 291, 300, 341, 372, 492, 583,596: n = A,T,C or G
acatctatcattatcacaacatgcttatttgatgaagctaaagaaaagccagaagactaatatggctggatgagaatagcattttaaaacattttcagcaaaattctagaaatttgctgtttagttccaaaactgaattttatacaagtgctattattccaatagtttttttcaattgtcactagtgatcttgatccatatactgcattcatattatcccaaaataaaagagtttttnattaatnaccangnggtttcaaaagnntaaatatatttcaaaaaccaatgacngttaaaagnaggggttctaaatttttgcatgtcttattaagctttgttgnatagactaaaattttggtttcatagactcanaaatactaaattgcctattgggttttggggcttcttgcatcagctcctgcaactgtccaatttgttcatcaccgaaagtcattaagttttcttctgggaggaaggtgccaaaacatgctnttccagttgaattttgtctgttttccgttagcctgttgcaataacgctgtgcatacacctcccattcttgcaagaaacgctgtgcctcgtnagaaccaacgggncttatgtctcctaaatttcgtctttcacgtc

SEQ ID NO: 799 - DNA, 648 bp, Homo sapiens
  misc_feature 233, 242, 262: n = A,T,C or G
acaaactatgtatctgaaacacttctatttggcaattttataacaaatcaaattttaaaaagaacaaaagagattgcagattacttcgcagatacagaataaagcaattgatgaagtgcttaagcaaaagaaaacaacaaaaaaagaaaacacactgcttttctttttaaaaataaaatcacattgctatagatcaaatggataatacccttattaaacaaccattccagatngtttaatanaacaagtgcttttatttgcncttcacttaattttataagactcattttcatgtatatagctctttacccccattgttaacgaataaagtccctcataatttttacacttttaaattttttaaagcaaatgagaaatgatttatgtatcgtggaacctttcccattttggaaccaaaggttttaattctatatttttgtctaatatttctttaaaaaatttagtgtaaaaactgctggtttttatatcactgtaggtaaagtgaaaactcctcaaccaggagtattttctgcagtttcactgcatataaccacatactttacaatgtccttccaacagtaaggaaataactgatttcttgatcactgtcagaaatgagtgccataattctattatgggtataggtcc

SEQ ID NO: 800 - DNA, 646 bp, Homo sapiens
  misc_feature 243, 269: n = A,T,C or G
acttcagctgctgatatgaaaattagattatttacttcagatcttcaggataaaaatgaatataaggttttagagggccataccgatttcattaatggtttggtgtttgatcccaaagaaggccaagaaattgcaagtgtgagtgacgatcacacctgcaggatttggaacttggaaggagtgcaaacagctcattttgttcttcattctcctggcatgagtgtgtgctgccttcttgaggancttttaaacttatgggtgcagagaanaatggaacaatccggttttatgatcttttggcccaacaggctattttatctcttgaatcagaacaagtgccattaatgtcagcacactggtgcttaaaaaacaccttcaaagttggagccgttgcaggaaatgattggttaatttgggatattactcggtccagttatcctcaaaataagagacctgttcacatggatcgagcctgcttattcaggtggtccacaattagtgaaaatctgtttgcaaccactggttatcctggcaaaatggcaagccagtttcaaattcatcatttaggacaccctcagcccatcctcatgggttctgtagccgttggatctggactggcctggcatcgactcttccttctgtgtgt

SEQ ID NO: 801 - DNA, 649 bp, Homo sapiens
  misc_feature 238, 252, 326, 337, 347, 547, 623, 641, 643: n = A,T,C or G
actttctttttttacagttttttttttttttacacacatattatatacaacttttaaaataactgcacttctctaaaagtgagatataaaattgtgcagctattttaaaagttgtatataatatgtgtgtaaaaaaaaaactgtaaaaaagaaaggacaaacaggttgttttgttctagttctaatttcttaaaaaccactacatggttcaaaattggaataacatttggggacactnggttacctccaaanaaaaggttttaaaaagaaaatggggtgggattgcccattttggattaattttggcttacagttcccatagctgntagagtctggnttggttttgnttttactctcaaaatcatagtaaagatctctcagtctcctggctaaagattgaaggaaggcaaatctatttctaattatacatatatcagtaagggatgatctcaacataatagtaatgtgtatcttttggtatccagttttatttttggccttctaaaaaagtgtctcataacacagaacattgccattttgctcttgnaggcctcaaatatgaaaagctattagtccatagagcctaggaaaaaagaattggattaatgggcctttattttggnaacccttataaatgctgnanatatta

SEQ ID NO: 802 - DNA, 656 bp, Homo sapiens
  misc_feature 631, 644: n = A,T,C or G
actggattctataggtccaccattaaaagctggtatgggacaccaatttatacacataagggttagattaaaattttaattttttggttgatattaaactgaaatttatataactgaggtctgaatcttaaaaaaagtaaatgataaaaatttaatatagttaactgttcactgatatgtctattcacttcatcataacctatatatttaattaaaaatcaaattatgagtctgcaaatcagatgctatcaagcaaattgccatccagggtccataattctttttatatttttatctcagatgaatatatacgattcagtaaattttaatgttccaaattgttctaaaaaaaaaaaattatcaaaagcttccagttaacagttggctaattcatttgcccccaacgaactacctgtttgtgttgtgaggtagcatcaaagactatgatcttctgtgacagtagtagccttaattcatacgcattccctcttcataggaagagtatggcaacaaaaagggacagatgagtccctttcattaatcattgactcctgggttttcatagtatgttaaatgcccgatttcaattttacaacaacaaaaaatccaatatttattctgaaggcatcgntgtccaaggacanatttaacacttc

SEQ ID NO: 803 - DNA, 623 bp, Homo sapiens
  misc_feature 484, 602, 614: n = A,T,C or G
acctcacaaccaaaagcagttaactatgcctggcataccaccctgtcatgtgggcagatcactgttcccatgctgggtaagagtctccaagaagggaagcccttatgcagtaattctgtaactatattaaatttggtaatctaacattaaactttttcgtgagcagtgaatatacacatggtcatatgaaaactgccctggagaccgggttaattattaaataaactaaaaggggagaaatgctgatagataaaattatgtcaattccagggtgttcaatggaataaagaaacagtagcagctgcttcaaaagtagactatgatcagaaacctcagatggtaacctttaaaaattgtggaatccagagtctcaacctaaacctacataggagctacagccagggagttctttctaagttcctcaagtgattctgatgattggccaagctggaaacttctgaactgggggagaaagccaacctangtaaatgtagagacttttagaattcaacatttgattatcatttactccacattttccccactgtctcaccttctctatttttctaacagtggacaataaaagggcttggcaagtgaanggaaaaagtcantagagtcct

SEQ ID NO: 804 - DNA, 658 bp, Homo sapiens
  misc_feature 446, 518, 545, 555, 557, 580, 613, 615, 618, 628, 639, 640,648, 652: n = A,T,C or G
actgggaacaggtgcttgccttgctatggccacggtttgaactgatcctggagatgaatgttcagagcgtccgaagcactgacccccagcgcctaggggggttggatactcggccccactatatcacacgccgctatgcagagttctcctccgctcttgtcagtatcaaccagacaattcctaatgaacggaccatgcaattgctgggacagctgcaggtggaggtggagaattttgtcctccgagtggcagctgagttctcctcaaggaaggagcagcttgtgtttctgatcaacaactatgacatgatgctgggtgtgctgatggagcgggctgcatatgacagcaaagaggttgagagcttccagcagctgctcaatgctcggacacaggaattcattgaagagttgctgtctcccccttttgggggtttagtggcatttgtnaaggaggctgaggctttgattgacgtggacaggcttgagcgacttcgaggggaagaagcccgggtaactcanctgatccgtggctttggtagttcctgnaaatcatcantngaatctctgatcaggatgtaatngcgagttttaccaaatccagaaatggcacccantnttntttcagggancgctaacccanntgaaccangctntataat

SEQ ID NO: 805 - DNA, 657 bp, Homo sapiens
  misc_feature 562, 634, 636, 638, 646, 647, 649, 652: n = A,T,C or G
actggattctataggtccaccattaaaagctggtatgggacaccaatttatacacataagggttagattaaaattttaattttttggttgatattaaactgaaatttatataactgaggtctgaatcttaaaaaaagtaaatgataaaaatttaatatagttaactgttcactgatatgtctattcacttcatcataacctatatatttaattaaaaatcaaattatgagtctgcaaatcagatgctatcaagcaaattgccatccagggtccataattctttttatatttttatctcagatgaatatatacgattcagtaaattttaatgttccaaattgttctaaaaaaaaaaaaaattatcaaaagcttccagttaacagttggctaattcatttgcccccaacgaactacctgtttgtgttgtgaggtagcatcaaagactatgatcttctgtgacagtagtagccttaattcatacccattccctcttcataggaagagtatgggacaacaaaaagggacagatgaagtccctttcattaatcattgactccctggngtttcatagtatggtaaatgcctgatttcaattttacaccaccaaaaaataccatttttattctgaaggcantngntgttccannancanattta

SEQ ID NO: 806 - DNA, 274 bp, Homo sapiens
  misc_feature 188, 193, 196, 223, 228, 232, 239, 245, 261: n = A,T,C or G
actattgctattagggggtctgttttataaatattttcttatcatacttttattataaacttttttagtatgaaatttgcttcaactgttacaaacagaatcatttcctatggggtcccctccacataaggaagttattcctgtaattactatttttaaatagtcttcttaactgtgggaaaactttnccctnccncagcacgcacactcttactctcctgtnatgangctnaatgctntccaangcactggttcagtcancattctgcccatt

SEQ ID NO: 807 - DNA, 614 bp, Homo sapiens
  misc_feature 523, 576, 587, 592, 608: n = A,T,C or G
accatatggtaatgctgcctgtctttctgaggttgacttttatgccatgtctttcctaagtgtgtaagaatttttctgtttgcttcacatttgactgagaatcattctagggtttgattgagcccctgtcctgtgccactaaaggaactcgaacttttcatcacttagagatttcagaggggaatggaaaaacagttctaatcaataagcaagcaattcaagaaaaatagaattaatcaggcaatggctgcaacatgtcctatctttaatctattttcttattaagcttggacattgacaatagaaccagaagcttgtagctggatcaaaacattctccataggcctggagtttcatgagggtctattcttttgttgttgttgttttggttttttgttttttgtgggtttttttttttttttgagacggagtcttgttctgttgcccaggctggagtgcaatggtgcagtcttggttcactgcaacctctgcctcccaggttcaaacaattctcctgcctcanccgccaagtactgggattacaggtgcatgccacgatgcctggctattttttgnattttaagtanagggnggggtttcaccatgtnggccag

SEQ ID NO: 808 - DNA, 556 bp, Homo sapiens
  misc_feature 31, 56, 59, 62, 68, 82, 111, 125, 146, 151, 165, 166, 171,172, 189, 191, 212, 227, 231, 278, 301, 369, 398, 400, 414,423, 424, 466, 494, 497, 512, 523, 525, 550: n = A,T,C or G
acttttttttttttttttttttttttttggnttttttttttttttttttttttttnaanacncaaaancaaacaagtttatnttaaaaaataccaagtatcacatccatancctattcctaattntaattacttcttaaagcaacntttgnctttgtttacaaanncagcnncaggtgataaaacctantntctcaaactgattgcttacantttataatacaaacntttntatatgtctcaaatcacattttaggcagtttaacttaaaatgcatanacaattacatacattaaatttgncattactggcagtgaaaaatcacaatttcaagaagaaaattacaacaaactcatagagcacacataanaagtcaagttcacttaatggcaacaagtnantatctgctgatcantgacaggcnntgaaagtgcctttatccaggggtaaagtgaaaaggcaaactntcctgttctttgcaacttgaattgtgcnctnatcaacactacaatntttgaaaaacntnaaattcttaaaaaaaaaaaaaaaangcttgc

SEQ ID NO: 809 - DNA, 519 bp, Homo sapiens
  misc_feature 129, 263, 347, 458, 464, 495: n = A,T,C or G
acgcggggtggggggggtcctggtctttggcttctcgactcggtcctgtttcgacagcgaacatgtcgcggcctgtcagaaataggaaggttgttgattactcacagtttcaggaatctgatgatgtanatgaagattatggaagagattcgggccctcccactaagaaaattcaatcatctccccgagaagctaaaaataagaggcgatctggaaagaattcacaggaagatagtgaggactcagaagacaaagatgtgaanaccaagaaggatgattctcactcagcagaggatagtgaagatgaaaaagaagatcataaaaatgtgcgccaacaacggcaggcngcatctaaagcagcttctaaacagagagagatgctcatggaagatgtgggcagtgaggaagaacaagaagaggaggatgaggcaccattccaggagaattcccggcatgcnatgaanatttcctaattggaagatgatgacgatagtnactatggcagttccgaaaaaaaaa

SEQ ID NO: 810 - DNA, 457 bp, Homo sapiens
  misc_feature 169, 180, 246, 291, 302, 323, 378, 449, 455: n = A,T,C or G
accgcgggatttaaagcatttgttccaataaaataaatagaggggaaacttggatgctaaaattacatgaatagggaatcttcctggcacttaagtggttctatggtattggaaaaatggatgttcccagaaagaattacttttttcctcttatttttactgccattgncgacctattgngggacatttttatatattgaatctgagttcttttttgacttttttttttcccaatccaacagcatncttttttttaaaagagagaattagaaaatattaaatcctgcatgnaatatatctgntgcatcttaattggaccaacntcccatttatttatcttaaaactataccgttacctcttaattccatccaaagaanatacagtttgaaacagaagtgtaccttggccgcgacccgctaaggggaaattccccacactggcggggcgntactantg

SEQ ID NO: 811 - DNA, 273 bp, Homo sapiens
  misc_feature 34, 159, 161, 162, 209, 226, 229, 235, 245, 252, 264, 268,272: n = A,T,C or G
acagaatggtatttgtgtatgtgtgtgggcttanagattcacaagtaaatattcctttggtgaaggaatttcaataaaaacatctatcaagtgtcagcggtgagtgtgtttacaccacagaaattggcaaattgacaaatcagagtttgattttgtttntnngtttttactttccataaagttcgtttaccagcatccactaaagattncggtttacaaataaaanccntctcgnttttgagcantactatnctactttttaanattnttcnt

SEQ ID NO: 812 - DNA, 661 bp, Homo sapiens
  misc_feature 304, 309, 349, 462, 481, 527, 535, 581, 594, 607, 617, 619,648: n = A,T,C or G
actgaaaagttgccactttttatttagtaagaaaacaaacattctggctcactagagttcagaaaagtaataatttgagccaaaggaatttgaattaagaaaatagaaactaggtttcatgtatttaaaaaataggaaataaaatagaaactcaaatgccatgaagttatcttcctcttccttatatcccctaagtttgggttgcaaataactttccaattcctaataacctaaattattttgaaatagtgttttcagtgaaatgatgaatgtttgaatgtttgtttggtaatcaacataacantgctnacaaaattcccacttagattttttaacttttaaaagtcancgtggttttgataatttgatattttaaatgcccacacatacacacacacacaccccacacacaagcacatgttaataaacctgataggatggagtgagcaaaattgttttcanggaagatggcccattttanaaaaagacttgcccagatgatcttccatatttgctcccccaatggnatttttcnctcatgcccaatcctcctcttgttacctgtggctatggttaaaatncctttaacaagcnttcattgggtccnagtatttcananactttttaaaaagcttgggcatgacttancggtttgtgctgt

SEQ ID NO: 813 - DNA, 470 bp, Homo sapiens
  misc_feature 141, 144, 145, 243, 275, 335, 356, 379, 388, 426, 433, 439,449, 452: n = A,T,C or G
acaaactatgtatctgaaacacttctatttggcaattttataacaaatcaaattttaaaaagaacaaaagagattgcagattacttcgcagatacagaataaagcaattgatgaagtgcttaagcaaaagaaaacacattnaanngaaaacacactgcttttctttttaaaaataaaatcacattgctatagatcaaatggataatacccttattaaacaaccattccagaatgtcttataantagcatgtgcttttatttgcacttcacttaanttataagactcatttttcatgtatatagctctttacccccaattggttaacgaataaagnccctcataattttacactttnaaattttttaaagcaaatgaganatgatttantgttcgtggaaccttttccattttggaaccaaaggtgntaattcnatatgnttggcttaanatnccttaaaaaatgtagtgt

SEQ ID NO: 814 - DNA, 458 bp, Homo sapiens
  misc_feature 65, 139, 161, 230, 236, 285, 296, 303, 305, 308, 311, 323,338, 349, 369, 371, 388, 411, 416, 422, 423, 430, 451: n = A,T,C or G
actatatagttttaaaagaatgttgtcccaccaactattcatccaagcaaagaattgtaactatnaataaagtctcagttacacttttgcctttatcacataatattcattgtagagcattgcgcaggtccaagaatanagctgctcaaaatctttgtggnagtttcctttagttttttgtaaccctgaggcatatgttccagagaacagggatatttgactggtccagngacctnggtgatcatagtcataattgaagagatgcctatgggcatgcttaaatcncaattgccaantgatatngntgntgnattattttcacnttcttggatctatgnatgtagttggnataacaaatatttaaatagntnttatttttgatgccatnaaaaaaaatcattactctgggcnttttntccccnntactgtngtttcccagaatcttttaaanaattcat

SEQ ID NO: 815 - DNA, 662 bp, Homo sapiens
  misc_feature 436, 474, 478, 576, 585: n = A,T,C or G
acatttttgaatagacctcaaaaatacttcattctgctgctgttcagttggctttttaaacctgtctgcagtaggacactgaaaacagcaagaacttcggggtgaacacccgctgatcctttaacaaggatttctggcaggaaactcacaaaaaggagaactgaaaatttagacatacagttggccattgtaaaaaacatcagttcctctcatacattccaagtaaaccaagtaaaataagtgttgggaagtacacttgcataaaagaatttaagggagtgatagctctttctgttctgccattcccaacattcctggggggaaaggagactcaatgagtaatactatttcactgagcccaagatggaaacttggtttgacctaaacatctgattaatatagctagctgatttcttaaaaattcgttgcattgaangatatttttgcatgtctgtaacacctggcaatacttgnttgnattggattctggatatttcttgcagcttgactacgtgtaatttgggccagatcagctttgcagtaaaattatgctgcatcctcgtggcaaaattcttnattcttagngaatggtaccaaacccctttattgctggcttaagaaagtgaaagattggtgtatttcttttaaaacattttcaatca

SEQ ID NO: 816 - DNA, 519 bp, Homo sapiens
  misc_feature 289, 308, 331, 377, 430, 450, 460, 471, 483, 492, 496, 509: n = A,T,C or G
actgttggttaaatgacaatttatgtggattttgcatgtaatacacagtgagacacagtaattttatctaaattacagtgcagtttagttaatctattaatactgactcagtgtctgcctttaaatataaatgatatgttgaaaacttaaggaagcaaatgctacatatatgcaatataaaatagtaatgtgatgctgatgctgttaaccaaagggcagaataaataagcaaaatgccaaaaggggtcttaattgaaatgaaaatttaattttgtttttaaaatattgnttatctttatttattttgnggtaatatagtaagtttttttanaagacaattttcataacttgataaattatagtttgtttgttagaanaggttgctcttaaaagatgtaaatagatgacaaacgatgtaaataattttggnacagcttaaaatgttatacntgaaaccacntcatgaaagcngaatttggttgngttttgttntttnctctattttgatnggggcatact

SEQ ID NO: 817 - DNA, 536 bp, Homo sapiens
  misc_feature 406, 460, 479, 489, 494, 535: n = A,T,C or G
accccaactttgctggacctcatgcagctttagctaataaaagtttctttaaggcagataaagttacaatgctgtggaataaaaaagctactgctgtgttggtaatagctagcacagatgttgacaagacaggagcttcctactatggagaacaaactctacactacattgcaacaaatggagaaagtgctgtagtgcaattaccaaaaaatggccccatttatgatgtagtttggaattctagttctactgagttttgtgctgtatatggttttatgcctgccaaagcgacaattttcaacttgaaatgtgatcctgtatttgactttggaactggtcctcgtaatgcagcctactatagccctcatggacatatattagtattagctggatttggaaatctgangggcaaatggaagtgtggatgtgaaaactacaacttatttctaaaccggggctntgatctaatatttggttgngcccgatggngacanttttacagctctggctccagttacggtatatgatacaaatng

SEQ ID NO: 818 - DNA, 564 bp, Homo sapiens
  misc_feature 385, 398, 399, 418, 421, 426, 433, 453, 454, 461, 470, 476,484, 485, 521, 525, 534, 537, 538, 559: n = A,T,C or G
acagaatggtatttgtgtatgtgtgtgggcttagagattcacaagtaaatattcctttggtgaaggaatttcaataaaaacatctatcaagtgtcagcggtgagtgtgtttacaccacagaaattggcaaattgacaaatcagagtttgtttttgtttttttgttttttactttccataaagttcgtttaccagcataccactagagatttcggtttacaaataaaagccatcttggtttgagcaagactatgcaactatgaaaatgttcgtttaaaaaaatcttcatgatccttttgtaaatacaaggtggttgccaagcttgttagttttgtttattttattgatagatgtaaaatattattgtaacttatttggataaagtnttcaaaagaacannagcttacaatgagggaggnttngattnttgctangtgaaaattgcaattcaaanntctgctnctctctggnatgcanaagagaannaatcctttaaaattgactgatttgaaatcagactgnttcnattctcgancgnnacttactccttttttttggantaaac

SEQ ID NO: 819 - DNA, 461 bp, Homo sapiens
  misc_feature 259, 270, 290, 327, 343, 360, 387, 390, 397, 402, 403, 411,414, 420, 427, 432, 437, 440, 444, 450: n = A,T,C or G
acattggagaagctgtgcagcagcatccttttctgtggtgggcagggcaggagatgaaccataggagccaaaagtcagacaaacagaagaaggcacaccaagcctgaaccctccggacaacagcagagttaccagctgagggatgtccctggaggtttctgacccatgagaggccccctcaccctccttcaccctcctcctaccaccaagctctccggcagtcatggacttattcctccccattttactggacacctgntttcaggtcantctgtcacctgtatcttggnggatctctacccctactgccagaaggtgggatgtggnttggatggacagccanattctactacatggcantttgacaaacacctccttgaaaccatnttnttttgtnggtanntctttaanaancttttnttttcgntgtcngctanctntggnttgatnattttccactg

SEQ ID NO: 820 - DNA, 525 bp, Homo sapiens
  misc_feature 403, 444, 469, 484, 518: n = A,T,C or G
actcaggggcatcatgttgctgcagaggccacactttccagaagttttctcctcgctgtgatcctcgcacaccgggggcactcggaggactggaagcactgtttgtgaaagcaagccctgcacgctgaacatcttctacatgttgctgtctgaaatgggaagatgacagtcgtattctggcaaaattcacaaataaagccctttccttgacacagctcacagccagccacatgtgcaagggaagctttcagaatgtccttgagtaagggtgccagcagccctttcttgatcctgaccaggtcctcaagggagaacaggtggagctcatcagcaagtgtcccggcacctgctcgaactcctttaatgcctgtagcaaacctacaggtcttcaacaacttcttgnttggaaaactgtcctgaattcctcactttgccactcttggntttccatacaggcttggcgatgctnacaaattaaaatggnttgtccatttctgcaacacttttggaaaattgtnacgaaaa

SEQ ID NO: 821 - DNA, 668 bp, Homo sapiens
  misc_feature 303, 536, 579, 619, 621, 634, 637, 648, 655: n = A,T,C or G
acaaatctttggcctttctcttgacattttcgtatgtcaaaaagcaaaaaaccttcatgtatttcaatctagtgattactttttgcaccataatttgttttttacaccacaaaaggaggcactttcagtatctgtaaaaggtatttaatcctaaaacatacttacctagagaataattaaaacagaattcaatacaatctagtatctattaggaaattaagagttatcacttctaaaagtcatttgaaagtcaatgatgttatctggtcaatggcaggaaatgggaactggaaccaatataanacttatggggatttcctcacggagacaaaaaaagatattcctttatgttgtttaaaaagtggcagctgctctttctttattccattttaatcaatgagtattgattcaaggtttcctttctatttttccttatgataaggttcttacaggagcttattcaacaaccaatagcatagaaaaactactggattcaattgatcatcagggaataagttctcaaaaaaacacaggcnggaaaaataagcaagaatcccaattcagaactttacaagctgnggaacttggtctcttgcatcatggtactggtcaaattaananacaatcttattgntgnctattggagcnccatcgnggcccatcagcag

SEQ ID NO: 822 - DNA, 666 bp, Homo sapiens
  misc_feature 68, 70, 119, 146, 164, 211, 218, 225, 240, 282, 408, 416,487, 515, 523, 525, 526, 561, 577, 588, 594, 600, 607, 612,619, 626, 639, 643, 654, 656, 664: n = A,T,C or G
acttttttttttttttttttttttttcaaaatgagacttggagtttaattaaaaacagaacagggatncnttaaacaaacaaacaaaaattacttttctgattatcaattttttttganactcaaagcatccccaaaacattgganatccagcttattcctganacatcaaccatcacaaaaggttttcactctgaactattcacattttngtggcanaaaacanaacaaagttctgcanacatccttcctctctttctaaaatatattcacaaacagggtnttttcatagtcaaaagaaaaacaaaccaggtttcttttttggccaaatgggcctgttactctcccctgggatctgatttcttaataaaaaagttcagggcaccaaatccaaccagaaattcccagnaccccagnggctacttaactatgaggggatggatgcttttgtcttttctattgaggggaatcattctcccgggattttntgctgctcaacagccccaggacaggtangtgggaangnngggtgaaatgcaaaaccaaaagggtccaaaaaaanaatgagggttttttgnacaaaccatancaaggnaaaatngggccanttttncaaaccnccccttnaaactcaaaactncccncccaaaacttngnggggaaangg

SEQ ID NO: 823 - DNA, 666 bp, Homo sapiens
  misc_feature 304, 366, 368, 430, 459, 501, 502, 517, 525, 540, 548, 551,561, 564, 628, 643, 654, 656, 659, 663: n = A,T,C or G
actatctcctgcagctcaatataaacaacgatgtatttctttgtagcagtatgtggagtcagaatgggttttccaatctgatttaatccctgagcagctatgttaaaagttaactttttaaaaaagcccaataaaaaactaaatactgtattaaaactctaccataatgttacagggataaacttatttctgtacccgattttatttccagttttcatccgaatctactgtggaatgggataattttgcttttgtttcattgccaggaattaatcctcagcctccggagtagctggggactatnagcgcttactagccagcttcagggctagaatagcctttctgtgcaagtggaaaaaacctcangnatttcccaaatcggtagctgcagaggggctctatcctaccagagatcccgcgtacgacgtcncatctgggaaagaatctaaagttggtgancttcaccaacctggagcattcaatggggaatgcactcatacnnactgggcatgaaccncctggganacatgaccagtgaanaaagtggntgnctttgatganttncctggagagttcccaccccggggcagagaaaatatcacattttaggccaacccctaatcggatnttggcctgaatctgngggactgggananaanaaanggg

SEQ ID NO: 824 - DNA, 400 bp, Homo sapiens
  misc_feature 70, 77, 83, 92, 112, 130, 134, 141, 155, 171, 175, 178, 200,203, 206, 216, 217, 220, 231, 234, 250, 258, 261, 271, 277,279, 284, 299, 310, 311, 330, 339, 345, 348, 364, 366, 379,389: n = A,T,C or G
actttttttttttttttttttttttttttttttttttttttttttggggatataaactatttattaacanacaaggnctacanacttatttntttttggacacacccacggngcggccacgggggccagnggtnttggggngctggcctcggacncaaaggccccaaaagngacncanccctttatgggcccgaatcttnttnagncgctccaggnnttnacggagcttgntgnccaaaccattggctangacctggntgnattttccatnctttananccttntggctgggcaaaaancaaatctgggnntttttgtcccgggttattnttaccttanttgggnaanccaacaaagggaatgntnataagggaaaggntaaaaaaagntaaaagggaac

SEQ ID NO: 825 - DNA, 507 bp, Homo sapiens
  misc_feature 448, 452: n = A,T,C or G
acggacttgtgcaaaatgaagagaattattcagcctgttcctaaaagcgataaactctgggatcttctcaaatgcgccatatttgtaagcttgaataatatattctgaggtatctttctggttggagtgaaaaaacctgagtgcgaagttacaggattgggacgcagcagcatactgacctagagattcagcatatcgggtcaaaagataaccaatggtatcatgctggatatgcttagcatcgaggctggaataaagatccaccactggttcaaatgccccagcatacagtagattcgaacaagcagcaatttgaactgagcattggaagggcttttgggttaatccctcttccaacaaagtcaggggcctgccacacaagtggtctcatcacctgtttccctccatacattcaataagcccttggacagcaaggagacagtaatantcanaaaattgcaattcttgttttcaaacaaggtttcccaaattccaatccatgctggt

SEQ ID NO: 826 - DNA, 663 bp, Homo sapiens
  misc_feature 303, 308, 310, 314, 318, 323, 336, 360, 368, 369, 384, 405,415, 419, 423, 438, 444, 450, 452, 463, 466, 467, 468, 482,484, 502, 510, 547, 548, 549, 584, 607, 610, 612, 615, 621,628, 637: n = A,T,C or G
acgcggggcccttacggcgccggagagatggcggagttggacatcgggcagcactgccaggtggagcattgccggcagcgagattttcttccatttgtgtgtgatgattgttcaggaatattttgccttgaacacagaagcagggagtctcatggttgtcctgaggtgactgtaatcaatgagagactgaagacagatcaacatacatcttacccatgctctttcaaagactgtgctgagagagaacttgtggcagttatatgtccttattgtgagaaagaattttttgcctgaaacacccgncattnantcanatcntggangtggaaaaattgnaaattcccaaagccttgaatgggntgccactnngaaacttgttaaaanacaattatttgatttccaagncagggagaanacancaanttaaccatgggaaangtgccnaaaaantngtgaaaacaantgnnnagggttgcattgantnaaattaaagatgcatgcntggtgggngttaatcttttaccccagacagaaagaatttcctttnnnggtttttttaaccttaaagggagcaaagaaaaaancaaacctatgttcttttgccccnttngngcntttggnaaggccnttaactttnccggtttttttgcaaggctttaaaat

SEQ ID NO: 827 - DNA, 665 bp, Homo sapiens
  misc_feature 290, 326, 415, 429, 447, 499, 548, 555, 557, 578, 579, 613,661: n = A,T,C or G
actccaggaagatgccatcttgcactcagaagatagtttaaggaagatggcaataataacaacacatcttcaataccagcaagaagctattcagaagaatgttgaacagtcatcggatctacaggaccagttgaatcatctgttgaaatagaatgacattaactcagaggagatacgtgttttatttgtgatagcaaattcctaaatgaacattaggcaagtggtatcattatcaggccagctgcagcctcttgccttgacctgcattcctagaatttctttgttgctgnaattcttggattaagtgaccttgactttcattttgnaattttgctaatcatcaacaaattcacttgcatgacgttactgccaaatatgaagggcagttgaattattatgagtgattgtggcagangtttgtgccatggngaaaactttgatggttgnctggggtcattggatccatctttttaaatgaccttaccatgagtctggttgncaaacctaaatatctttggttgaatttaaaatgggactcttattggtgnagttcangncttcattgcttaaaaaattgnnagaaatctgccataagaaaattttgtttcctgcnggaataaagaggaagtaacagggaatcccatattggtcatattgggtnttgg

SEQ ID NO: 828 - DNA, 613 bp, Homo sapiens
  misc_feature 31, 58, 144, 214, 311, 410, 412, 475, 498, 520, 526, 539,542, 557, 570, 587: n = A,T,C or G
acttttttttttttttttttttttttttctnagtattcaacactttaatatttatggngtatcacataaaaaacaaagtcatatacttttgcattaatcaaaaaatagcaaatccatataatggcaaaatcaggaaaaaaattntagtatttccacaaaatacataatgtcttacagatgattatgtgaactttaaatgtctgcagccctacanagcttttgttgccaattgaaaaacaaaaaaatcccaacacaggatgttcaaaaagcctaattcataaaaagacaatttattccatgtttaatatagngttttttaggatggtaacataagtcatgcaacagctctgtaaaacaaaacaaaacaagaaactacgatgtcggctgcgggttaaataaaaggaaaaccncncatacaaaaaaaaatgtaaggaatggttagtggtgctgccaattaaaaaaaaaactggaaatnattttaccccccaaaagtgattntggaaaaactgtttggaatctnaacatnggacttgggttgnagncatcttttgggaaantataagtgaaagnggttggggacctcctgnggttccatttttaaaaaaaaattggt

SEQ ID NO: 829 - DNA, 616 bp, Homo sapiens
  misc_feature 569, 570, 572, 575, 595, 599, 607: n = A,T,C or G
ggtactgctagctggaagacacatagtggatctgtatggcgtgtgacatgggcccatcctgaatttgggcaggttttggcttcctgttcttttgaccgaacagctgctgtatgggaagaaatagtaggagaatcaaatgataaactgcgaggacagagccactgggttaaaaggacaactctggtggatagcagaacatctgttactgatgtgaagtttgctcccaagcacatgggtcttatgttagcaacctgttccgcagatggtatagtaagaatctatgaggcaccagatgttatgaatctcagccagtggtctttgcagcatgagatctcatgtaagctaagctgtagttgtatttcttggaacccttcaagctctcgtgctcattcccccatgatcgcccgtaggaagtgatgacagtagccccaacgcaatggccaaggttcagatttttgaatataatgaaaacaccaggaaatatgccaaaagctgaaactcttatgacaagtcactgatcctgttcattgatatttgcattcgctcccaaatttggggaagaactttcnntnttntaccattaccaccaaagatntganaattttcntttaagccg

SEQ ID NO: 830 - DNA, 611 bp, Homo sapiens
  misc_feature 4, 487, 489, 515, 524, 544, 551, 565, 570, 578, 590, 592,603, 604: n = A,T,C or G
ggtncaagtgattgtgacaaatgacgtaaaaatggcattcatgatgtctgaaacaagcctaaatagaattcaagattagactaaatgattttcacaaagcacattcaaggttttacattctatgattgaaaaaaattttttgaaaactttttatttcattctttcctgtaggattttgctacaaataactttgggaatgaataaagtggaatggtaactttccagtggttcagaattgaattagacttcttgtgactgtgatgtttggtttccattgaaatatatgaagtgagatgtcatatcctgaatatagtttgtcttccccaattacttgatagcatgtctgtcagccagtaaagattaagaacagagtttctctaaattcctccgattattccactaaggcacattaaaatacttaattttgggaaaccagacatcacagatttctccatgaagtcctaaatcttctttaaagtcagaatangnatcttagttactgacagtattcaggnttttttctnccttgggggatatgtcattncatcagngaaaaaaaattttnttccncggataanaaaagggttctngngatacatattnncaatcct

SEQ ID NO: 831 - DNA, 589 bp, Homo sapiens
  misc_feature 550, 585: n = A,T,C or G
ggtaccttctttagtagagactgggtttcaccatgttggccaggatggtctctatctcctgaccttgtgatctgcctgcctcagcttcccaaagtgctgagatgacaggtgtgagccatcagacccagcatttttttttttaatttaaatttaaatttttttcatttttttgagaggtttttttgttttgttttgttgttgttgttgttgttgttgttgtttttgagacagtcttggctctgtcacccaggctgggagtgcagtggcatgatctctgcaacctctacctcccaggttcaagcaattcttgtgcctcagcctcccaagtaactgggactacaggtgcacgctaccacacctggctgattttttttatgttttagtagagacagggtttcaaccatgttgcccaggttggtctcaaactcctgagctcaggcaatccacccgccttggcctccaaagtgctaggattacaggtatgagcccccacccagctattttttctttcgttttaatttaaagtggggggggctaattggtatcctgntgactcgaactccggactaacgaatcttggttcanccct

SEQ ID NO: 832 - DNA, 603 bp, Homo sapiens
  misc_feature 522, 525, 538, 551, 560, 568: n = A,T,C or G
ggtaccggaagaagcagctggcaaagcagctccctgcacatgaccaggacccttcaaagtgccatgagttgtctcccagagaggtgaaggagatggagcagtttgtgaagaaatataagagcgaagctctgggagtaggagatgtcaaacttccctgtgagatggatgcccaaggccccaaacaaatgaacattcctggaggggatagaagcaccccagcagcagtgggggccatggaggacaaatctgctgagcacaaaagaactcaatattcctgctattgctgcaaactgagtatgaaagaaggtgacccagccatctatgccgaaagggctggctatgataaactgtggcacccacttgttttgtctgcagcacctgccatgaactcctggttgacatgatttatttttggaagaatgagaagctatactgtggcagacattactgtgacagcgagaaaccccgatgtgctggctgtgacgagctgatattcagcaatgagtataccccgccgaaaancanaaattggccctgnaacacttctgtgntttgactgngataacantcttactggggagaaatcctgatggcaatgacaac

SEQ ID NO: 833 - DNA, 326 bp, Homo sapiens
ggtacgcgggggggcgagaagtaggggagggcggtgctccgccgcggtggcggttgctatcgcttcgcagaacctactcaggcagccagctgagaagagttgagggaaagtgctgctgctgggtctgcagacgcgatggataacgtgtagccgaaaataaaacatcgccccttctgcttcagtgtgaaaggccacgtgaagatgctgcggctggcactaactgtgacatctatgaccttttttatcatcgcacaagcccctgaaccatatattgttatcactggatttgaagtcaccgttatcttatttttcatacttttatatgt

SEQ ID NO: 834 - DNA, 270 bp, Homo sapiens
  misc_feature 189: n = A,T,C or G
acaaagattggtagcttttatatttttttaaaaatgctatactaagagaaaaaacaaaagaccacaacaatattccaaattataggttgagagaatgtgactatgaagaaagtattctaaccaactaaaaaaaatattgaaaccacttttgattgaagcaaaatgaataatgctagatttaaaaacagngtgaaatcacactttggtctgtaaacatatttagctttgcttttcattcagatgtatacataaacttatttcccgcgtacc

SEQ ID NO: 835 - DNA, 558 bp, Homo sapiens
  misc_feature 468, 491, 501, 522, 540, 551: n = A,T,C or G
ggtactatttatttcctcaagtgcttccatgggggaaaaaataaaagtctaatatgccagagaaatcatcattgaaccaataagacacagtaacataattctagtaacctacttctcaatgaacacacatctgagaaaaaaaccgccagtattttattctcatggaaaaacagaacaaacccacaagttggagtcacggagataaaatacagatgaaatggaaaacggtctgttgtcatgaactctcactttcaaataccattttatatggaagttactttactgcggggcaaacagaaggccatgctggagtctcttacttttggaaaatggagaatcaaaaatttgctaatcaacaaacaaaaaaaggagggaaactccttggtaaagctctacaaacataattatcatttatattttaccaataaaagatactagggtagaaaaaacagatgggtagaaactggngcccaaccaaagtgaaagctttngggccttctntaactcctatctgttctttanaaaacccagtttctaaanaaagattcctntgaattc

SEQ ID NO: 836 - DNA, 562 bp, Homo sapiens
  misc_feature 241, 423, 498, 507, 520, 544, 554: n = A,T,C or G
acgtgaaagacgaatttaggagacataagaccgttggttctgacgaggcacagcgtttcttgcaagaatgggaggtgtatgcaacagcgttattgcaacaggctaacgaaaacagacaaaattcaactggaaaagcatgttttggcaccttcctcccagaagaaaaacttaatgactttcgtgatgaacaaattggacagttgcaggagctgatgcaagaagccacaaaacccaataggcnatttagtatttctgagtctatgaaaccaaaattttagtctatacaacaaagcttaataagacatgcaaaaatttagaacccctactttaactgtcattggtttttgaaatatatttaagctttgaaaacacctgttattaatgaaatactcttttattttggatattatgattgcagtatantgggatcaagatcactagtggacaatttgaaaaaaactattggaataatagcacttggtttaaaattcagttttngaacctaancagcaaatttctngaatttttgcctgaaatggttttnaaaatggctnttctcatc

SEQ ID NO: 837 - DNA, 516 bp, Homo sapiens
  misc_feature 137, 330, 365, 382, 384, 424, 440, 453, 454, 465, 473, 481: n = A,T,C or G
acgcgggggctcttctaagatggctgccgctaccggtgcggtggcagcctcggccgcctcgggtcaggcggaaggtaaaaagatcaccgatctgcgggtcatcgatctgaagtccgagctgaagcggcggaacttanacatcaccggagtcaagaccgtgctcatctcccgactcaagcaggctattgaagaggaaggaggcgatccagataatattgaattaactgtttcaactgatactccaaacaagaaaccaactaaaggcaaaggttgttacgagttatgaacatgttttaaaatatattttggttatataacttgcctctgctnttgtgcctcttgccctgttatatagtgctactctntgctattttcctctggnantctgcctttttgggtcaaggaagaaaagttctgttgccangctttgggtgacttgnacccttaagattnngctgaactganttaaaaantgagacanttctttatgttttccgaaaaattacaaagtcaagt

SEQ ID NO: 838 - DNA, 477 bp, Homo sapiens
  misc_feature 278, 366, 375, 380, 385, 390, 400, 414, 424, 428, 435, 437,446, 452: n = A,T,C or G
accaagcactgggtaaggcacttttgtggagcattagacagtaaccctcaaggagctagagaaccggatgggagacatgagcggtaattaactcacttgttccccagagtttctttttgttttgattttctttttctgtgacttattttcctattttctttcctccatgtaattttcactatggcccaactaatataaacacctggaaattacaaggaaaaaaaattcttcctctaataactttccaaatttgtggaatatttatttgtaatagcagntatcagttatgcttatatagcattaaaaattctcctcctttgactacacacacaaccacagtgtgggtctaatcatggagatatcagnaatttttantaacntgaantttgnaggacatttnttttgttacatgtntgcaaactgntttnaaatctnangttccaaantaattnttttttttttttttttgaatggagt

SEQ ID NO: 839 - DNA, 568 bp, Homo sapiens
  misc_feature 453, 455, 518, 529, 543, 551, 552, 559, 562: n = A,T,C or G
acgcggggctgtgacttaaatccattttcacttagagaaatagaaacacaaggaaacctttggacgcttcataactgctgggaaaggggtattatcaattgtgtttgagagtcaaactataaattacttcccaaggttagttctacctatgcccaggaatgaacaaggacagcttaaaggttagaagcaagatggagtcatttgggtctgatctctttcactgtcataatttcctcagttacaatttttgtaaaggtggtttcaaatgctttgctgacctcccataaacaaggatgtgccaattgtaacttcagttctgcaattcaagtctgctcccaaactaaagtccatttgaattgcatactgattgataatgtcattacgagtttatctttccatgtgcagagcaaagacaagaggagatcagccattccttcacctacccagagacgntngcattggaaaggagccgtatcttctaatatggttttgcaaatgtaaaatgtaaaatctatgcncgctccaggangggaaaaaaaaaanaaaaaaanntcctcgncgngaccac

SEQ ID NO: 840 - DNA, 663 bp, Homo sapiens
actatttatttcctcaagtgcttccatgggggaaaaaataaaagtctaatatgccagagaaatcatcattgaaccaataagacacagtaacataattctagtaacctacttctcaatgaacacacatctgagaaaaaaaccgccagtattttattctcatggaaaaacagaacaaacccacaagttggagtcacggagataaaatacagatgaaatggaaaacggtctgttgtcatgaactctcactttcaaataccattttatatggaagttactttactgcggggcaaacagaaggccatgctggagtctcttacttttggaaaatggagaatcaaaaatttgctaatcaacaaacaaaaaaaggagggaaactccttggtaaagctctacaaacataattatacatttatattttaccaataaaagatagctagggtagaaaaaacagatggttagaaactggtgccaaaccaaaagtgaaagctttggtgccttctctaaactcctatcctgtttctttagaaaacaccagttttctaaagaaagattactctgaattcaccagggttctatcccccaattcatccctccctttcacccccaagacacgaaaggccatgtagttttttgtccggcaccacttgggaaggggctggctca

SEQ ID NO: 841 - DNA, 337 bp, Homo sapiens
  misc_feature 210, 229, 291, 314, 324: n = A,T,C or G
actgtcacagaacttttacatacattctcagtcctagttgtgaaaggcctaaagagaaagaaactcaatttgcagtccaacacaaaggggggaatttctaaaataaataatccaacagttttttgcattttttaaattaatttttcatttttttaaaataaaataaccaaaaaagtgtaaagttacaaaaaatgtcgttgaagaataatntattaaaactgtggaaaanaaggaaaaagacacgtcacaaacttttaagattaatatgaagatcataatttaacataaagngaatatattctatggatttgccntcccgataantatgaacaatact

SEQ ID NO: 842 - DNA, 661 bp, Homo sapiens
  misc_feature 592, 638, 644, 649, 654: n = A,T,C or G
actgggacgattccgcggagccgggcagaggttttaggggaatgattaacaaaggcgtccgaagaaatcgttgttggaaggtgaccaaggtggaaagagacgttgctttggccctgcaagtaagaagagagagggaatagcctgaaggagtaacactaaatttaaaatgacacttttttaccaaccagcgaaagcagatgttcaaaggggatattggccagagtctgtcacactaagatgagaaatgtcctttcttcctgaaggtgtctgatgtgtaaaaatatgatatactttgtgctgtttcctcccttcccttttgcatattattctgaaacaacattaactagttactttgcgtcattgaaggtatgcacttcccctctatgttaggagtgaataaaattaaaaatagatccttataacaaagaaaggcagatagaatgattaaaaatgaccaaaacatgttagaaacagtctctcaggtgtatgcagatggtaattacaaaaatactttttcaaaaatgatcttctgtgtcatgtttctgggaacaagtcaagatgaatgagtttgatttttaaagcagaagtagtntgtgttggtgtcatccatgaataccaccaaaaaaaaaaaaaaaaanaaaaantcctngccgngaccacc

SEQ ID NO: 843 - DNA, 662 bp, Homo sapiens
  misc_feature 32, 147, 470, 535, 589, 615, 628, 644, 655: n = A,T,C or G
acttttttttttttttttttttttttttttanaaaggatgacttttatttccatcctgaatgattcacaccattatttaaacatctgaaaaatcctgaaataatttaaactgaaggcacagaacaaaccaaaatatttaactatcanaactaaaaatgagaaaatccaaatagttctatagtaacaataaattatgaacaagtttccgtcaccaaatatcactctgaccaaaaatgactgtcttttgtcataaaagctacagcttaagctgattccaagatttctataaaaatgagagtgaagaaatttcttctttcaaaatactcattatgccaccaggttcaatgtaagtattttgtatataacaaagtagcagtcaggatatttgttgatggatggctactccccaagaaatgacacattcttacaaactttaaaaaaatagcaaagttggttacaaaattctattnggggagcagggaaaaaacttgtccatgtcaattagaatatcaaagcatttcaaaaatcaaactgnttccaaagccaatcatcacacaacagtaatatactgtatgggccattccactgnatcttgttatatgttgatcatacagngtaactaaggggntggaacaagtcagtancaatgattgtngctgtat

SEQ ID NO: 844 - DNA, 370 bp, Homo sapiens
  misc_feature 27, 88, 127, 141, 146, 164, 168, 170, 175, 193, 202, 205,210, 214, 226, 236, 271, 294, 295, 314, 336, 341, 346, 353,358, 364: n = A,T,C or G
actttttttttttttttttttttttanatttgcctgctgctgctaggaggaggcctagtagtggggtgaggcttggattagcgtttanaagggctatttgttgtgggtctcatgagttggagtgtangataaatcatgctnaggcnaggatgaaaccgatatcnccgntncgggntgtataggattggcttgnaatggcttnctngagtngggnatctgctctggncttatcattnatattgataacctgaagtgatatttttccttacgnccttccatgcaaattactcactnnccatagcgaagcacacgcnttaattgaagtgagaagtaaanaaacnctttngtaaccngctcngatttncttatt

SEQ ID NO: 845 - DNA, 450 bp, Homo sapiens
  misc_feature 257, 272, 284, 306, 316, 333, 335, 336, 341, 342, 344, 350,369, 373, 395, 396, 410, 418, 420, 439, 445: n = A,T,C or G
cgcgtcgaggtacccctggcagagcatttgcagattaaagaagcatttgagaaagaagttggaatcataaaagccagcttgagagaaaaggaagaagaaagccaaaacaaaatggaagaagtctccaaacttcagtcggaggttcagaatactaaacaagcattaaaaaaattagagactagagaggtagttgacttgtctaaatataaagcaacaaaaagtgatttggagacacagatttctagcttaaatgaaanattggccaatctgantagaaagttgangaagtatgtgaggaagtttgcntgccataaangaaggaaatttctgcananngatgnnanggaatnactgcatttcagcattgancaanaaattaaggatcagaaggaacnntgtgtaagtccttncaccatcncngagttactaagaatacaanatctgnttaac

SEQ ID NO: 846 - DNA, 316 bp, Homo sapiens
  misc_feature 63, 83, 84, 107, 114, 135, 149, 200, 223, 225, 237, 240,244, 250, 269, 289, 297, 306, 309: n = A,T,C or G
acgcgggggagttgtcctgcgccggtgttcccacgtgcggcctgaacctgagcgcataatgtnatgaggagatgggagcactnntgattcgcggtatcaggaatttnaacctanagaaccgagcggaacgggaantcagcatgatgaanccctctgtcgctcccagacacccctctaccaacagccttctgcgagagcanattagtcgtgagtgtctatccanangttaaaggaganatngctngtaaanatgaatagctgcttgtcgngtctaaaagatgtgtatgtngattccanaaatcctgngtnttacttg

SEQ ID NO: 847 - DNA, 473 bp, Homo sapiens
  misc_feature 396, 410, 416, 430, 471: n = A,T,C or G
accctgacccatgaacacctggccatgacctttgactgctgttactgtccacctcccccgtgccaggaagctatttccaaagaacctatcgtgatgaaaaatttatattggattcagaaaaacgcctattcccataaagaaaaccttcaattaaatcaggagacagaagccataaaggaagaactgttgtattttaaagctaatggtggaggggctttggtggaaaacacaaccactgggattagccgagacacacagacgttgaagaggcttgcagaagagactggcgtccatatcatatctggagccgggttttatgtggatgcaactcactcctcagagaccagggccatgtcagtggagcagcttccgatgtccttatgaatgaaattctcntggagctgatgganccagtntcaagtgtggcatnttggagaaattggttgttctgggctttgatgagagtgaaanaa

SEQ ID NO: 848 - DNA, 599 bp, Homo sapiens
  misc_feature 211, 248, 268, 288, 337, 360, 395, 410, 423, 424, 459, 466,474, 492, 505, 507, 508, 524, 528, 529, 531, 535, 562, 574,587: n = A,T,C or G
tcgcggcgaggtacttttttttttttttatttttttttttttttgcttttataggtatctatctaataaaagtttatttgtgtatgtgcaatgcataactctatcttagatatgaatcctaacaggatgaaaatactttcttgcaactactttatgcttatgaaaggtgtgaacttgcaatgtcctcctgtcttaaacccaagttgacagngccctctcaaaacttttcataaataatgacctaattncatttaaaaaatggtttcancaaatatgaaaatagaaagncccgtatttgccatttgtaatatgagaaaaaaaagatgatacattcctntacaaaaaaaagtgggtttaganaacagttctggtagtatttccatggtaaagaatcnaaagatctaatgacngcccccttgctcnnggaaggacagggaattcatgtgttcttttccgatngcttagnaactccangggatttcaattgggggncaatactggcccngnntcatcaatttaatttntttnntngggncttataaaatcaaaactttttaccctncaattggggggnttgggtaggcctntggccagtctat

SEQ ID NO: 849 - DNA, 499 bp, Homo sapiens
  misc_feature 13, 19, 20, 21, 36, 147, 188, 212, 223, 232, 234, 237, 240,252, 261, 265, 271, 318, 335, 341, 345, 370, 380, 387, 401,405, 413, 418, 419, 421, 426, 441, 446, 450, 461, 464, 473,480, 486, 494: n = A,T,C or G
ccgcggcgaggtncccttnnngaatttgaagtgaangatcctgagctggaggcccagggagatgacatggtttgtgatgatccggaggctggggagatgacatcagaaaacctggtccaaactgctccaaaaaagaagaaaaataangggaaaaaagggttggagccttctcagagcactgctgccanggtgcccaaaaaagcgaagacatngattcctgaanttcatgatncnaantcngatgtgtttggnccatttatnccgngatccnacatcattccctataatgatctgccccgactggagcgtgctcttcangatccaaatgtggctgncgttcntggnaaaccaattcaggggtgatcaagcntttttgttcngatccangttacctatgggantgcnggagcttncacanncnccaantcttttatgctgatnaaatncaanctgattgccanacntggaaatgntgctgtnatttgnaaaatgcngacct

SEQ ID NO: 850 - DNA, 443 bp, Homo sapiens
  misc_feature 302, 314, 328, 337, 340, 362, 365, 389, 400, 420: n = A,T,C or G
actgtgaaaccaccaacttcagttgcctcagactccagtaatacaacggtcaccaccatgaaacctacagcggcatctaatacaacaacaccagggatggtctcaacaaatatgacttctaccaccttaaagtctacacccaaaacaacaagtgtttcacagaacacatctcagatatcaacatccacaatgaccgtaacccacaatagttcagtgacatctgctgcttcatcagtaacaatcacaacaactatgcattctgaagcaaagaaaggatcaaaatttgatactgggagctttgntggtggtattgnattaacgctggganttttatctnttntttacattggatgccaaatggnttnctcaagaagagctttcggggttcnaaccataaatnaacatgatgccttttttaangaatccatggaccaaggatggat

SEQ ID NO: 851 - DNA, 414 bp, Homo sapiens
  misc_feature 13, 19, 21, 188, 214, 225, 230, 236, 239, 250, 253, 262,272, 320, 331, 337, 342, 346, 383, 389, 403, 407: n = A,T,C or G
ccgcggcgaggtncccttngngaatatgaggagtatattactaaacttttcaactaccacaaagttcttcctatgaatacaggagtggaggctggagagactgcctgtaaactagctcgtaagtggggctataccgtgaaaaataaagggaaaaaagggttggagccttctcagagcactgctgccanggtgcccaaaaaagctgaagacatangattcctgaanttcangatccnaantccgatggttnggnccatttatnccgggatccnacattcattccctataatgatctgccccgactggagcgtgctcttcangatccaaatgnggctgngttcntggnaaaccaattcaagggtgaatcaagcgttttttgttcngatcangttacctatgggantgcnggagctt

SEQ ID NO: 852 - DNA, 545 bp, Homo sapiens
  misc_feature 13, 19, 20, 21, 36, 147, 188, 212, 223, 232, 234, 237, 240,252, 261, 265, 271, 318, 335, 341, 345, 370, 380, 387, 401,405, 413, 418, 419, 421, 426, 441, 446, 450, 461, 464, 473,480, 486, 494, 500, 501, 502, 507, 513, 525, 535: n = A,T,C or G
ccgcggcgaggtncccttnnngaatttgaagtgaangatcctgagctggaggcccagggagatgacatggtttgtgatgatccggaggctggggagatgacatcagaaaacctggtccaaactgctccaaaaaagaagaaaaataangggaaaaaagggttggagccttctcagagcactgctgccanggtgcccaaaaaagcgaagacatngattcctgaanttcatgatncnaantcngatgtgtttggnccatttatnccgngatccnacatcattccctataatgatctgccccgactggagcgtgctcttcangatccaaatgtggctgncgttcntggnaaaccaattcaggggtgatcaagcntttttgttcngatccangttacctatgggantgcnggagcttncacanncnccaantcttttatgctgatnaaatncaanctgattgccanacntggaaatgntgctgtnatttgnaaaatgcngacctnnnatagncctctngaaaggccttcngggggctttncttggtttga

SEQ ID NO: 853 - DNA, 208 bp, Homo sapiens
acgcgggaggattgttccactaaaatttatttttcaaaaaatttacttcacattattctatgtaagtgatgacttgtcagtgttccaggtgtatcttagctaaaactagagaatgccctaacttagatggtttttgaagcctatacaattggtattgtttgacccttaagcttttacatctcttagcatggaggacgaagaaagctgt

SEQ ID NO: 854 - DNA, 663 bp, Homo sapiens
  misc_feature 434, 489, 516, 521, 530, 540, 548, 551, 570, 572, 580, 600,606, 617, 619, 632, 633, 658: n = A,T,C or G
actatttatttcctcaagtgcttccatgggggaaaaaataaaagtctaatatgccagagaaatcatcattgaaccaataagacacagtaacataattctagtaacctacttctcaatgaacacacatctgagaaaaaaaccgccagtattttattctcatggaaaaacagaacaaacccacaagttggagtcacggagataaaatacagatgaaatggaaaacggtctgttgtcatgaactctcactttcaaataccattttatatggaagttctttctgcggggcaaacagaaggccatgctggagtctcttacttttggaaaatggagaatcaaaaatttgctaatcaacaaacaaaaaaaggagggaaactccttggtaaagctctacaaacataattatacatttatattttccaataaaagatagctangggtagaaaaaacagatggttagaacctggtgccaaaccaaagtgaaagctttgngccttctctaacctcctatcctgtttntttanaaaccccanttttttaaanaaagattnctntgaattccccagggttttntncccaattnttccctcctttcccccccanaacacnaaagggccttntntttttttgccggnncccttgggaagggcctgggcctcangggcc

SEQ ID NO: 855 - DNA, 660 bp, Homo sapiens
  misc_feature 581, 593: n = A,T,C or G
actactgttaatatctctaagaacaaaacacattgaacatccttccagaaagtctttgagggaggacctatacccataatagaattatggcactcatttctgacagtgatcaagaaatcagttatttccttactgttggaaggacattgtaaagtatgtggttatatgcagtgaaactgcagaaaatactcctggttgaggagttttcactttactacagtgatataaaaaccagcagtttttacactaaattttttaaagaaatattagacaaaaatatagaattaaaacctttggttccaaaatgggaaaggttccacgatacataaatcatttctcatttgctttaaaaaatttaaaagtgtaaaaattatgagagactttattcgttaacaatgggggtaaagagctatatacatgaaaatgagtcttataaaattaagtgaagtgcaaataaaagcactgctactataagacattctggaatggttgttaataaggggattatccatttgatctatagcaatgtgattttatttttaaaaagaaaagcagggggttttctttttttggttggtttncttttgcttaancccttcatcaattgctttatctggatctgcgaagtaatcttcaaatctcttttgttcttttaaaatt

SEQ ID NO: 856 - DNA, 662 bp, Homo sapiens
  misc_feature 306, 406, 471, 486, 559, 611, 623: n = A,T,C or G
acccatcccaactctcaaatcgtttggtttttttttatcttgattgagatcctcttctcactatgctagtggtggagatattgacaaaatcctatttctttcaaagaggaacttttcacaccgaaaaaagagcatggaattattttatattgttataaaaatcccagatgcaaatttttttaatgccaattattagagcttctggggaaaaagtatagttcacggaaataaaactatgttctttcagggttgggtggataggtggctgctagggtgctggctcctggcggctttgccatccatgangcaagggctgggaacacagtgctttgcctatggtagatccatgtgaatgcaggaagccagctcttcagtcttggagatgatttctgctacaattctgtanaaagattaaggatggcagagtaaaaggtaccaagaatgccaggatgtttttcttggccgtaggangtccaaattactttnctttttgatgaaagagtttggaaaactgtccatctctctggcttgaaaaatctctgccattttaacatcctgngaaatagcaattattatcatctgtatttagtttaacattacccacaccttanaaataataggtnaaaatcgcttgcctactcttccaaagatgatcaagtcat

SEQ ID NO: 857 - DNA, 400 bp, Homo sapiens
  misc_feature 282, 369, 397: n = A,T,C or G
actggtgcacctcctacatatcaaggaaaagcaaaacacagaataatttaatatgctgaataaaatttgtttacaccagatactatacatcatactgatggttgtccagtatgaattttaagggtattatgttagattctgcaaaatatattcctattattcacaagtgaggagtcaaagtccaactattcaaatggccataaacaaaaatgttgcagaaggtatagaccattaaaaataaaaaagtcaggagtggggcagctgaccccttaggagcctcangaattccttttaatgcaagatagatggcaagagctggctttttggttaagtcaccagtcggaaacccatcagggaaaagttttcagnttcaacttggtaaggcaatgacttcttnaac

SEQ ID NO: 858 - DNA, 662 bp, Homo sapiens
  misc_feature 626: n = A,T,C or G
acttgaaggagaacagtttacatcgggcgttagccaccttgcaggaggagactactgtgtctctgaatactgtggacagcattgagagttttgtggctgacattaacagtggccattgggatactgtgttgcaggctatacagtctctgaaattgccagacaaaaccctcattgacctctatgaacaggttgttctggaattgatagagctccgtgaattgggtgctgccaggtcacttttgagacagactgatcccatgatcatgttaaaacaaacacagccagagctatatattcatctggagaaccttttggccaggtcttactttgatcctcgtgaggcatacccagatggaagtagcaaagaaaagagaagagcagcaattgcccaggccttagctggcgaagtcagtgtggtgcctccatctcgtctcatggcattgctgggacaggcactgaagtggcagcagcatcagggattgcttcctcctggtatgaccatagatttgtttcgaggcaaggcagcttgtcaaagatgtggaagaagaaaagtttcctacacaactgagcaggcatattaagtttgggtcagaaatcacattgtggagtgtgctcgatttctccanatggtcagtattttggtcactgggtctgttgatgga

SEQ ID NO: 859 - DNA, 454 bp, Homo sapiens
  misc_feature 183, 201, 206, 229, 241, 262, 266, 275, 276, 280, 283, 286,289, 295, 309, 313, 315, 326, 339, 350, 365, 371, 377, 383,385, 388, 390, 397, 401, 404, 411, 423, 438: n = A,T,C or G
acctgccttgaaatttaaatgtctaaggaaaatgggagatgattaagagttggtgtggcctaattcacaccaaaatgtatgcattacatcctgctcctttctagttgacaggaaagaaagctgctgtggggaaaggagggataaatactgaagggatttactaaacaaatgtccatcacagantttccttttttttttttngaganatattctggctctcgtcacccangctggaatgaantggtatgatctcagttgatgngcancctccaccnnctangtncangcnattctnatgcctcacctttnaacngntggaactatangcccatgctaccntgccaggctantttttatatatatantaaagncgggtngtggcnantgntngccaganatgnttngaactcntggcctaagatnaatctgcccaccgtnacctccctaagtgctg

SEQ ID NO: 860 - DNA, 309 bp, Homo sapiens
  misc_feature 145, 146, 169, 170, 178, 179, 248, 251, 266, 271, 280, 291: n = A,T,C or G
actctaagtcaggaaaaattaagacgaccaatagttgcctgtgaacttggcagactttataacaaagatgccgtcattgaatttctctttggacaaatcttgcagaaaaagctctttgggaaagcacattctcacatttaaagcnnttaaaaatggtgacaaacctgannctttctgnntaatcctgcctgggaaggggataaaggaaccactaaaggtgacaagcacaatgacctccaccgggcccnttnattttgcccgttgtnggccntggaaattnaccggccaacncaggtcttgtttctttcg

SEQ ID NO: 861 - DNA, 338 bp, Homo sapiens
  misc_feature 69, 91, 96, 127, 129, 132, 146, 148, 151, 155, 162, 164,165, 168, 184, 193, 196, 208, 242, 245, 254, 259, 262, 264,267, 272, 286, 291, 307, 312, 316, 321, 337: n = A,T,C or G
acttttttttttttttttttttttttttccctttaaaagaatttattaagcctgttataccacacagtntgttttatacactgacatacanctccntattaagataaagcaaagacaaaaaagtttntnttnttagaaacaagatncnccnccanttattgntnnaancattattgcactttancttttttanttngacaaagcattnaaaaaacatttgcaaactagttttaacaaacaantancacctgtanccaanacntnacngcccnaaatggtttattangttgnattttaacaacctttnctttntttnaccgnaaccgggggaacctgna

SEQ ID NO: 862 - DNA, 663 bp, Homo sapiens
  misc_feature 238, 378, 397, 432, 518, 539, 541, 547, 549, 554, 559, 593,601, 603, 606, 613, 636, 652, 654, 655: n = A,T,C or G
acacaaatgcatgagtatgtttatacagtgttagactgatgtgaatttgcatttgttacattacattgccagcgcatatcatttagcaagttggcattaacatttatgctttaattaaatgccagtatacctatgtgtgcagcagtaaaaaattagtgagaaaaagcaactttttgtcactcttaggaaatattttgtcttattaagtgttcttggcacatgtatattactaaagtanataattccaatgagaaatactccagattattggtataaaattaatttacaatgtccctgatattgactactcttaaaaaaaccaaacaaaactcgtatctgatgtaactttgccaatattttaaaagccaaaatattctntggacacaaatttgtttgntcaaggacaggttaccttgcctggtaaaccttccnaacagaaatatactatctatctttgggtttggtttttggttttttggttggttggattaaaaggaattcctcttgtccccaagctngatgtattggcgcatcttaantnactggnanctcanctccngggtcaaggattctccgctaacttctgagtactngaattaangngcnccccccncccccggtaattttgggttttancaaaacagggttcccncnntggccagg

SEQ ID NO: 863 - DNA, 624 bp, Homo sapiens
  misc_feature 301, 344, 379, 384, 419, 427, 446, 459, 465, 494, 498, 534,545, 546, 566, 602, 604, 612, 613: n = A,T,C or G
acaaaggctgcttaaggcagtgcagccccttctcaaagtcagcatgtcaatgagagactgcttgatacttgtccttcggaaagctatgtttgccaaccagcttgatgcccgaaaatctgcagttgctgggtttttgctgctcctgaagaactttaaagttttaggcagcctgtcatcctctcagtggcagtcagtctctcaggtcaagtcaggttcatgtggatgtcacagccattacaattctgtcgccatgaaaccttttgccttgaatcatggatagttgaggagatcttaaacccancagctgatgtccactatgcttatgaagggtttatatgtcttcnaagaactctaactgctatttcaagcatgccaactnttgtnttacagttaaacaattcttgacccaaaccgactgntgcctctntgaaaataaaaacctggantctgaccaagganataaanctcttacaaaaccactggatatctgctgngtgnattcaacattggttggcctggtataaaaatacagcntaccctacccnnggaaaggaggaaaaggagangaaaagctttttccaaaacctaattatttttggagncnttctaatnnaatgattaaaa

SEQ ID NO: 864 - DNA, 662 bp, Homo sapiens
  misc_feature 249, 259, 284, 338, 355, 360, 363, 374, 395, 398, 409, 425,427, 435, 439, 451, 458, 467, 482, 484, 535, 536, 547, 550,554, 569, 570, 576, 583, 593, 601, 606, 618, 630, 635, 638,644, 645, 646, 650, 659: n = A,T,C or G
actttttttttttttttttttttttttttttaaaaattaaatccaaattttattaaggatttcaggttacatacttcaaatttctagaatggaatggaatcattttggaactggaaaaatggcataaacactgacgtcccttaaaacttcaattttataaaaaaaattcttctgcaaaccacatcccctttatgtaacaagactaggtattatctacaccttcactttggcaatagctatttcctaaanaatgaaaaanatgattttgctacttcagttcattnaaaatgggattctatctttgaagttcaaaaaaagcctcatttcgatgaaccatngttaaaaaaaaaaagcncatantgntaatcaaagcnaagggaatctttttgaaaatnaanaaaaaaagctnttattattgggttaangntttccagnagtnagttaaaatctnaggagangaatggatngcccttcaaacaatntnttcacatttcaagaccctaacactacttttcaaaaagggagttttcttccnntaaaaaacaantcnaatntatttttttaaaacnnggaatntaaactncctttattanaattcaantaatncccctcctttgnaaaaaaaagtcnacccnaantaacannntttnccccgggtnttg

SEQ ID NO: 865 - DNA, 660 bp, Homo sapiens
  misc_feature 334, 383, 458, 466, 489, 494, 513, 526, 533, 546, 551, 567,573, 576, 590, 591, 618, 633, 635, 642, 643, 652: n = A,T,C or G
accatgaagaagaataaatgagggtaaggggctagtgtgatagggagaggggtgggatgccatcatatttaggggtggttgggaactgtctactgctttagcatttgtgtcttcaaatttctctcctttggttatataccttgcgtattccgcacattgataaagtttctttcttacagaagttctgatattgaattaaggaatggggtcactacttaagactttatcatttcagctacacataaaaggtttctctcccctatggattttgctaatggttgagtgatacctaaaggccttgttgcattttttacacttggggtttctcttccgntttgaattctctcatgggtaccaaaactcttttaaaaggactttcacangcttaaatgtgtatggctctttcccaatatgaatttttttgatgtaactagcttttaacttaattaaaaaacctnttgctctnctgcattataggggtttgggccnctganaataattgatgcctgattnagggccaatcatnaccaaanactttctttcttnttttnatataaaaaatgaagngaaggnccngggcttaaaccccnnaataactttactttcctacctttacangcttgctgggaattncntggggtnnataaaaggngaacctgg

SEQ ID NO: 866 - DNA, 663 bp, Homo sapiens
  misc_feature 28, 37, 204, 213, 233, 280, 295, 296, 305, 308, 309, 326,353, 364, 368, 391, 393, 401, 419, 420, 435, 453, 457, 473,479, 480, 495, 503, 505, 514, 521, 533, 537, 540, 573, 588,593, 605, 614, 615, 628, 630, 639, 663: n = A,T,C or G
actttttttttttttttttttttttttnaaataaggnctcactctgtcatccaggcttcagtgcggcagtgtgatcatagttctgtaacttaaactcctggcctcaagcaatcctcctgcctcagcctcccaaagcgctggtattacagatgtgagccaccaagcccagcctaaacaagcatttctctattaaacctttttcanaaagactgnatgaattagcccaaaagtgnctttttttttttttgaaaatggaagtctcccctctggttcccagctngaatggaaatggcgnnaatttcggnttnntggaaatctcaaccctnctaaggtcaaacaatttctcctggctnaaccctccgantaanctgggactaaaggggcccacacnanaccccggnttaattttgtatttttannaaaaaaaagggtttnacatatttggccagctantctnaacctccggactttgngaaccnncctggcctaaacctnccaaagtngntgggattanagggggngagccacttggnccanccnaaagtgactttttgtaaaaaaattatttttacnctaaaaaaagataanaatantcttgcaatcanaaatttttnnagaaatcaacaanantgttaaaanaaactggacctttgttttaaaaan

SEQ ID NO: 867 - DNA, 662 bp, Homo sapiens
  misc_feature 147, 148, 174, 199, 207, 327, 341, 393, 407, 429, 431, 481,548, 553, 563, 567, 589, 617, 623, 657, 659: n = A,T,C or G
acatagggtcctgttacaccagttttaggataaagaaactggaagaattcctcagggatcagtccataacgaacttttcctccgtattcaggaagaggtgggtacgcgggggaggcattgaggcaccagcgcaggggcttctgctgnnggggcaggcggagcttgagaaaccgnagataagtttttttctctttgaaanatagagantaatccactcttaaaaaatatagccataaggttacttaagatttgcttaaccgttaatttttaccgtattttaatagcttaagaatttaaaaaaaaattttaagacttaaaaaaagtacntgaagaaaggaaanattaaagggttcttaaacatgacggaggttgagaataaacctcttcctggantaaaaaatgttttnaaagaaaattgaaagaaggctncngaccccgattaattccaatagaaggccatgcttttaaataaaatgaaggngcttaaacagcttaagttaatttaaaagttggaggtgataaaaaaaaaaaaaaaaaaaaaaaaagtnctcgnccgcaccccnctangggcaatttcaacccactggcngccggttcctaggggatccgacctcggncccaanctttggggtattctgggcctacctggttcctggngngaa

SEQ ID NO: 868 - DNA, 316 bp, Homo sapiens
  misc_feature 206, 207, 238, 262, 270, 283, 305, 311: n = A,T,C or G
acctgtcccattcctaaaaggatttgtgggcaatgctggcacttggtggccaggagaatcttctgaccccactctccctcctcttcagtcctgaagaccccaagaacccagttaggatcccctggccagaggtctctgtgactgcctctggactcaacacgtgcagcaacttgggaagaatttgagccagtctcaaaaaacttttnncccccagaatgagaaccagtgaccccaagcnaggaagggctggggaatctggaangggaaganaggggggtccaangggaccctgttggcttaagccnttgatnaccag

SEQ ID NO: 869 - DNA, 573 bp, Homo sapiens
  misc_feature 314, 379, 398, 409, 429, 441, 449, 459, 477, 494, 517, 518,528, 555, 571: n = A,T,C or G
acccactgctattgcctaagggtgtagtcctgaaactgaagccagttgccgaccgtttccccaagaaggcttggagacagaagcgttcatcagtcctgaaacccctccttatccaacccagcccctctctccagcccagcttcaaccctgggaaaacaccagcccaatcaactcattcagaagcccctccgagcaaaatggtgctccggattcctcacccaatacagccagccactgttttacagacagttccaggtgtccctccactgggggtcaagtgggaggtgagagttttgagtctcctgcagcactgnctgctatgccccctgaggccaggacaaagcttccctctgttgagtcccagactttgctctctttntgcccctgtgcccaaggtnatgatgccctnccctgcctctttcatgtttngaaagccatatntgaagacngagaccctcnaaaagaaagggaagccanggctttctgttgtttanaacctgcccctgttatcaccctnnatctgtatcnttactggtcccgctaccactggtgaanaattgtgacccttggncg

SEQ ID NO: 870 - DNA, 577 bp, Homo sapiens
  misc_feature 46, 79, 125, 194, 198, 222, 234, 245, 275, 290, 292, 328,330, 333, 334, 335, 338, 344, 360, 375, 378, 382, 405, 424,443, 444, 450, 470, 477, 492, 499, 510, 523, 524, 534, 535,537, 540, 543, 550, 559, 569, 570, 576: n = A,T,C or G
acaggcttaaatctatgtcatttacactcactgaatcatcaacctnatcaccacctgttccctgggtgtagcgggtatnatctgcttcctcatcatcatcattgaccaggtcaggacgaaattcnaacactttacgaccacatgatcactagtgctttccctgctttgaagtcagctttccttctttccatatnttgntcaagtttatcaatcttttcttgncttttccttttnttccaggcaanaaaagattctagagtgattttggtaacatnttggacctagggcanancgctctctctcaaattaaatcttctaatgaaaattncntcnnnttntctctnctttctttttatctantttcaacacataatncangaangaagtgcatgacgaatacatgcntaatatcaccctctttcangggcatacccctaaacacnncattanttggatgtttttcaatcagntatcagnaaatgcttggcccantttttanagtttttggtntttttcttttccnnctaacccgtnntnttnggntaactanctatttccncttttttctnnatcccng

SEQ ID NO: 871 - DNA, 437 bp, Homo sapiens
acttaccttcacctgaagagcgtaactatgaatttctgcagtggtataaggatgacttatgtgcattggcatttaaagttctccatgacaagcagcgaggaccactggtttttatgcgcatttactcaggcactataaaaccccagttggccattcataatattaatggaaactgcacggagagaataagtcgtctgcttttgccgtttgctgaccaacatgtagaaatcccttcattgactgctggtaacattgctttgactgttgggcttaaacatactgccactggagacaccattgtctcatccaagtccagtgcattagctgcagctcgtagagccgaacgggagggagaaaagaagcacagacaaaacaatgaagcagagagacttttattggctggagtggagattccagaacctgttttcttctgtacc

SEQ ID NO: 872 - DNA, 664 bp, Homo sapiens
  misc_feature 539, 562, 564, 590, 617, 653: n = A,T,C or G
acttatgaactttatgttgctgtttacttcccttttctgattttttaagttcatcatactttgacgaaatatgatgggcatacattggcctagacaggaaaaatgctgcatcatggggtgtatgaaattcattacagagtacgctgggcagaagcagaatgtcagagacaacaattacctgtgacttttgggaataaacaaaaagttctaggaaaagcactttccttaatccggttcccactgatgacaattgaggaatttgcagcaggtcctgctcaatctggaattttgtcagatcgtgaagtggtaaacctctttcttcattttactgtcaaccctaaaccccgagttgaatacattgacccgaccaagatgctgtctcaggggaaaggaatgctgcatcaatagattccagcaagtagaaagcccgctggggttacagtgggacgaagtgatcgaatcaggcaaatataaattatcaaaattgactgaagaagaaaagcctgaatagaccaattaccatggaaggaattaaaagntatcaaagaactgtccttccaangngggttttacagattcacagttaatanaaggactctatagttggatttggctgnatggactatcatggcctacgatatcaagggatatcngatcattgaat

SEQ ID NO: 873 - DNA, 669 bp, Homo sapiens
  misc_feature 479, 498, 503, 524, 527, 545, 557, 563, 583, 586, 590, 592,600, 608, 619, 632, 641, 647, 649, 660: n = A,T,C or G
acgcggggggacaacctggccatccagacccggggtggcccagaaaagcatgaagtaactggctgggtgctggtatctcctctaagtaaggaagatgctggagaatatgagtgccatgcatccaattcccaaggacaggcttcagcatcagcaaaaattacagtggttgatgccttacatgaaataccagtgaaaaaaggtgaaggtgccgagctataaacctccagaatattattagtctgcatggttaaaagtagtcatggataactacattacctgttcttgcctaataagtttcttttaatccaatccactaacactttagttatattcactggttttacacagagaaatacaaaataaagatcacacatcaagactatctacaaaaatttattatatatttacagaagaaaagcatgcatatcattaaacaaataaaatctttttatcccaaaaaaaaaaaaaaaaaaaagaangtccttggccgcgaacacncttanggcgaatttcacacactggcnggncgttctaagtgatccganctcgggacccancttggngtaatcatgggcatagctgnttnctgngngaaaatgntattccgnttacaatttcncacaacattccancccggaagntaaagntnaaacctggggngctaatgag

SEQ ID NO: 874 - DNA, 390 bp, Homo sapiens
acgcggggggttcttggctttgacagcttcaaagaatggacagtgataagttaaaagaaattttgtatattgtcaaggaaagggtcttaaatccgagtcaagtcccttccttggggtaaaaaatgtattcttaaagcattctgatgttaaaaagaaaacttaagttatctaaccaaaacagacgcaagattttgtttctgcagactacttggcaatcaaaagtgatcataaatttaggttatcagttttcagaaagttgctttgtgagaaaattttgttagatatattctcccaagcatgctttttgtggaaggttttcagccattgccactgaatcagatgttaaaaatgaagggaaaattgagtgtgcacacacacaactgttgtacc

SEQ ID NO: 875 - DNA, 449 bp, Homo sapiens
actgtccatatcttttgtatttacttcaaaggattctggatcagcagtataaataagattctcagcatctgctttacaaatggtgttagctacatgtcgacacagcatctttagccagttttcttttggaagttcatctgatgtcatctggaaactgagtagcacatttgcctgctctgttggtggcctcacaagcaaggcaaaagcattatggcaatcttctgtctctcttatgtccaataccttcttaatctgaaaaagaggcattaggtgaatatgcttaagagaagctgggggtcgggtttggccatgaggactcctaaaagtgccaataaccttgtgccgttttcttgctatctctaggcaatcattgaagaggaagagagttacttgttctcctctgtcacagggggtgctcacctagagaaattgtttcaactcgctgtacc

SEQ ID NO: 876 - DNA, 661 bp, Homo sapiens
  misc_feature 615, 619, 627, 642: n = A,T,C or G
acgctggatagcctccaggccagaaagagagagtagcgcgagcacagctaaggccacggagcgagacatctcggcccgaatgctgtcagcttcaggaatccccgcgtacagatgaatcggaatttgtctaatgaggagttaacaaaatcaaagccatctgctccacccaatgaaaaaggaaccagtgatttacttgcttgggaccccctatttggaccatctcttgattcatcttcttcatcttcactaacttcatcatcatcagccaggcccacaactcctctttctgtaggcaccattgtcccacctccgaggcctgcttccagaccaaagcttacttcaggcaaactcagtgggattaatgaaatacccaggccattcagcccacctgtaacttccaacaccagcccacctcctgctgcaccattagcccgggcagaaagttcttcttctatctcatcatctgcttcattgagtgctgccaatactccaacagtaggtgtgtcacggggtcccagccctgtcagcctttggaaatcaggataccttacctgtggcagtgcccttacagaattgttatgcctactttaaaggagcagatccccagtgtattgngaanatactggngatatgacaatgtcntttcaagtggaattattat

SEQ ID NO: 877 - DNA, 597 bp, Homo sapiens
  misc_feature 405, 467, 529, 538, 556, 568: n = A,T,C or G
acgcggggagtgttttctgggatgggaaccacgccgcttcccagtctctgtgcgaggcgtgaagcgcggacctttcaacaagggctttattaattctcacgctgcggccctggaaagcgatggaggtggcggctaattactccctacgggtgaagagacctctgttggatccccgcttcgagggttacaagctctctcttgagccgctgccttgttaccagctggagcttgacgcagctgtggcagaggtaaaacttcgagatgatcaatatacactggaacacatgcatgcttttggaatgtataattacctgcactgtgattcatggtatcaagacagtgtctactatattgatacccttggaagaattatgaatttaacagtaatgctggacactgccttangaaaaccacgagaggtgtttcgacttcctacagatttgacagcatgtgacaacccgctttgncatctatccatttctcatcttctacctgggttaccttgtcagaagggaactggaagattgtntgtcattgnaacaaggggaaccgtggnaaaaaccgcttntgaaaaatgggagaatatgtttaatgaaa

SEQ ID NO: 878 - DNA, 595 bp, Homo sapiens
  misc_feature 465, 479, 487, 493, 504, 530, 559, 576, 584: n = A,T,C or G
acaaccaccactcctgttccttccattttttctggcctagtgtcactgccaggtccttctgccactcctaccgcagccactcctaccccaggacctacaccacggtccactcttggttccagtgaagcatttgcttctacttctgcacctttcactagcctccccttttccaccagctcttctgctgcttctaccagcaacccaaattctgcttcattgtcatcagtttttgcagggctccctttgcccttaccaaccaacatcccaaggcctatccaacccgactcctgtaattgctggtggctctactcccagcgttgccggtccacttggtgtgaacagtcctcttttgtctgcgttaaaaggttttctgacatccaatgacaccaatttaatcaactcctctgctttatcctctgctgtcacaaagtggggctggcttcactatcttctcttactcttcanaactttgactcttntggtttancccctnacaagtggctntgccccatcagccattcctaccccanagaggacttcaatccaagggtggcccttnttccaagcctgtcgttntccggggntaactcaactt

SEQ ID NO: 879 - DNA, 588 bp, Homo sapiens
  misc_feature 516, 578: n = A,T,C or G
accttttgctagcatagcctgggaagaagtcactgaaggagatttaactgaaggtaatacagctgaggaatttgctccagaaacactttcgctgggtttaggcttctttggattaacattatttacttcagaagtagaaggacgttttgataaaaatgaactttcactcatacctgccatagaaagtgttggtcccccttggtaatgtgataatcctgtatcctgggtcaagtcaaacagtaactctgatgacttattagacacaactcgtgatgagtttgttatataaccaggtttagaaaaaggctgaacaataacagaactatctgaagatctagactcaggatgaaaatttattggtgaggcaggcactggatttgatgttggattcgtgtagtgttgacttgtaggcttgaatgcagcagtaatacctcgactgagtgcccattctttaatccccttgaatatgagctggggttaactctgttcaaaatatttgaaatgctggttttgacntgatatctcgcccacaaagattggctcatatcatcgtcatcctcaaattcttttactttttntggcatggtt

SEQ ID NO: 880 - DNA, 418 bp, Homo sapiens
ggtactaatctctctgaatttgtcatgcggaaaattggagacttggcttgtgctaacattcagcatctgagtagtcgctccttagtgaatattgttaaaatgttccgtttcactcacgtggatcacatcaatttcatgaagcagattggagagatagctcctcagcgaattccttccctgggagttcaaggtgtcatgcacctgactctttactgctcggccttacgcttcctgaatgaaggagtaatgaatgcagtggctgcgtctttgcctcctagagtggcacactgtcgaagtaaagatgttgccaagattctgtggtcatttggaactctgaattataagccacccaatgcagaagaattttactccagcctgataagtgagattcacagaaagatgcctgaattcaaccagt

SEQ ID NO: 881 - DNA, 800 bp, Homo sapiens
  misc_feature 643, 664, 744, 747, 771: n = A,T,C or G
actgaggaagacaccattccttgacggtgtctaagaagccaggtggatgtgtgtggtggctccagtgggtgtttctactctgccagtgagaggcagtcccctagaaactcttcaggcgtaatggaaaatcagctcaaatgagatcaggcccccccagggtccacccacagagcactacagagcctctgaaagaccatagcaccaagcgagccccttcagattcccccactgtccatcggaagatgctccagagtggctagagggcatctaagggctccagcatggcatatccatgcccacggtgctgtgtccatgatctgagtgatagctgcactgctgcctgggattgcagctgaggtgggagtggagaatggttcccaggaagacagttccacctctaaggtccgaaaatgttccctttaccctggagtgggagtgaggggtcatacaccaaaggtattttccctcaccagtctaggcatgactggcttctgaaaaattccagcacacctcctcgaacctcattgtcagcagagagggcccatctgttgtctgtaacatgcctttcacatgtccaccttcttgccatgttccagctgctcttccaacctggaaggccgtcttccccttaacccaagtcctnctcaggctttggagaaacttncttaacgtcaccttcttcattgagccttttttgatcacttcattcccttttctaacccttccttccccaacccttaatgnatnaaattgctttttgaagcttaacantcacaaattttgaattggaaccggtaatt

SEQ ID NO: 882 - DNA, 583 bp, Homo sapiens
  misc_feature 37, 40, 49, 103, 109, 110, 116, 121, 141, 207, 213, 214,218, 219, 262, 265, 274, 312, 345, 370, 386, 395, 404, 406,410, 411, 437, 450, 473, 479, 497, 514, 530, 532, 535, 540,541, 548, 549, 575, 577: n = A,T,C or G
ccgggcaggactttttttttttttttttttttttttnggntaaaagganaattgtcatttatttttggttttgtttgtttacattttaataggattgctctancagctnngttganaaaanacaacacagggagacaagcntaaaagccggaaggggaggtagctgcaaaaggcaggaaaaaggtgaggcgggctggtccaggaggnggccannattnnggggtgaggcaatgggagtagcaaaagcagattctggatgctnttnacagtaaancctgtaggacttgctgatggatcaaatgtgggtgtganaagtcaggcaggactcccaaggtttggccctgnggtgatgtttaatattaagtgtccncttgattgaaggattnacagaattnttcctaggngngtcnngagggtgttcccaaaagaaattaacnttttgattcaagngggacccggaaaaggcttacccnccctcnatttgggtgggccccatnttatcggcttccaaagnggcttaaaaaaaacananttntgagnnttttggnnttcattttttggcggaacctggggcntnaccccc

SEQ ID NO: 883 - DNA, 451 bp, Homo sapiens
acagacaaggtctatagaatgtggtaaaaacttgactgcaacacaaggcttataaaatagtaagatagtaaaatagcttatgaagaaactacagagatttaaaattgtgcatgactcatttcagcagcaaaataagaactcctaactgaacagaaatttttctacctagcaatgttattcttgtaaaatagttacctattaaaactgtgaagagtaaagaaaactaaagccaatttattatagtcacacaagtgattatactaaaaattattataaaggttataattttataatgtatttacctgtcctgatatatagctataacccaatatatgaaaatctcaaaaattaagacatcatcatacagaaggcaggattccttaaactgagatccctgatccatctttaatatttcaatttgcacacataaaacaatgcccttttgtgtacc

SEQ ID NO: 884 - DNA, 584 bp, Homo sapiens
  misc_feature 504, 521, 534, 560, 564, 570: n = A,T,C or G
ggtacctccaaacagagatggaagctacactgcagttcccaatactacttcagcatagagcaaaaatgtgaagccaattaacagagaaatcatttttggcattattaggcaatcaaaggggttaactaaagtgaactgtggttcagaaattgagaaattctttttctttttgaataaaaaaaggagatgaaaaacttccacttcttctcagtggttactgtagaagatgtctctttactaaaaaggggttttctacattttaaatgagattcaggctatcttagggaatgagcatttgtcttttcatatgattagtgtctaccccaagaatagttccattgatgaagattttctatattttttcatatctagctatgctatttcctcatgaaagtccaagactttttatgactgtggtaattttagaatatacatgaatgatctttcagagtcacaattttgccatatcgttaaaaaaacttattcccggttcatagcctctgnattagccctctcctggnctatcctaatccntagattagaaagaagaaatctgcttntggngccctncagccaccaacaga

SEQ ID NO: 885 - DNA, 470 bp, Homo sapiens
  misc_feature 389: n = A,T,C or G
acccttttttctttttctttttttttttttttaagtattgttaacaatcctttggaagtcactactggtctttgtgtgctgctttttaataattgagttattttgagcttgccaagtaggatctattgcctggactaaaatttatttcctaatcttctgatgaccaagaaaggaaaaattaagtttgcagatgtgagatgaaatatagccagtgaatatgcatactgattctgaatgaaaggaattaacttttcagtcaagaaacagtctgcatgcagtaaattgaatttttcctgcaactggaatgatttgtttaattcttctttgaacactgccctttctccagtaagaacactaatgatttgctaatattttttaaagaaatctgnttttttaattagttaagctcagacttcctcttattttttatcctaaagaaaactgctaaaagggaatgatatatcagtacc

SEQ ID NO: 886 - DNA, 600 bp, Homo sapiens
  misc_feature 75, 114, 126, 149, 164, 192, 213, 220, 227, 255, 259, 261,269, 276, 279, 314, 319, 322, 327, 355, 363, 375, 380, 403,411, 430, 456, 462, 463, 474, 488, 493, 494, 499, 509, 526,530, 532, 533, 535, 537, 541, 548, 583, 587, 589, 594: n = A,T,C or G
  misc_feature 597, 599: n = A,T,C or G
actttttttttttttttttttttttttagggttataaaagcccttttataaagccatttttaaacaaaacaaaanaaaagtttacaaaagaaaaagagatacagaaaaagaatnacttgcttcatntgtcccaaaaagagaaaaaaatnaaggggacaatgccnacatgctcaacaataaaggcttcttttncttatttttttaatacaaaanacaagcnatggatncacatacttaaaacagagcttaggagcngacncncagtcctngaaaccnttnaataaaagcaaagcaggagtttgttttttctttgnctatncanatgcntacaagagactgggatttgtaaaaattnagtggtcncaaaagaccatnacacnattctaccaatgcatgttgcatntgtaattnccgaacatggtcaacaaanatctttgttcacttttgccccctttnattttnntttaaatgaanaaaacctttaaaanaaagnnggttncattttaaantttaacttccttaatanctangnngngncacngcctaanggcgaatttttatcacacttgcgggccgtttctantggntnccacntcngnc

SEQ ID NO: 887 - DNA, 560 bp, Homo sapiens
  misc_feature 65, 76, 117, 125, 126, 128, 133, 135, 136, 137, 143, 149,150, 151, 162, 164, 171, 178, 185, 192, 194, 200, 248, 261,291, 298, 313, 317, 320, 330, 400, 401, 402, 422, 434, 436,445, 450, 470, 475, 481, 492, 501, 507, 508, 522, 524: n = A,T,C or G
  misc_feature 527, 528, 532: n = A,T,C or G
accaaggagctcttctttatttatttccatatggccctcagcagctttcatctggagaagcgaanccaggatattnctttctgatgagctattttcccatatatactcttccatgtntgcttcanncntactntnnncccatncttcannnttccaagactnanggcatancactggnagaatanacgctcntnatcggnattctgcctccttaaagggcacctatctgttttgatggtgagcacatntgtggtcttgcantatcgctctcctacaaggttaattaatttnttttttncgtgatcatctaaanttanacnggaaagctcnctcttaagactactactcgtggctctggggttccgaacagatggtcctgatgaaacataatcagtgctgnnnatttcaattggaaaatgctncttacatttctngnactgtcagngcggntggccctcaatgcaaaaatntttanaggctncacattggctntataattgncaccgnngtcaaatgcctaanantgnnaatntttaaaaattcgggaatttcctcttggc

SEQ ID NO: 888 - DNA, 568 bp, Homo sapiens
  misc_feature 13, 24, 30, 32, 33, 91, 99, 134, 156, 158, 184, 252, 254,255, 267, 273, 281, 300, 302, 303, 304, 305, 309, 363, 368,371, 385, 392, 403, 404, 409, 416, 428, 474, 500, 513, 527,530, 534, 545, 550, 553, 565, 567: n = A,T,C or G
actttattttttnttttttttttnttttgngnngttaattcacttttaatagtataaacctcatttaggtagtagtattaagccacaacantaatgccncattgaaacagcatttaataaaatgcataaagctnattcatgcactggaatactctntntacaaacacaacaatgcaaattcttnttaagactgaagacattgattagatataaaattcagtttaaaaagaacatgcttttttttaaatgccntnncataaacaaagngatttnacaggganaaaaaagctgtttaaagcngnnnntttnaacaggttttaaacctggcattaaaatgtaatggcaaaaccaatattttttatnttgtnaanggcaaaggtttcanaaacggncccaagaaaanntaacncccaaanttttctttgatngatagatgcctttaaaagggctggtaatgcagttacattttaacanagaagttcaacttcaggtaaaaactngggttgtcccttnggccgtgaccaccnttngggngaatttcaacnccttnggnggcgtttctttngng

SEQ ID NO: 889 - DNA, 560 bp, Homo sapiens
  misc_feature 29, 531, 533, 539, 543, 553, 555: n = A,T,C or G
acttttttttttttttttttttttttggngacagttgtatttatttttttaagttacaataaaatgctctcaagtcctttgaatgttccaacaaattcaaaacttcattttctgaatgttttacataaatgcgaactacctgttcgcattggtaacctgctgctgtatttcatgtcttaacggctattttgaggttcattaacaacatagaaagccttgaactgtataaccagctagattccttaataattagtcactagagacagcccaaagacaaatattgggcaggaaatcagttctcactgagcccggtttccatgtaaaatctctgttgtggtgggcataggtggcaccatctaaagaaaagaggtcttgttttttgtttaaaaaagtttgtggggaggaaagacatctgtgtatcacttcaaaatattgatttactgctaaacatcactctgaatttatgatgtggatctaacttcatacatttatcggcattgtccaaaatatttattctttaatgggaaaagncnttaatnttcnaatgaagggncncatta

SEQ ID NO: 890 - DNA, 645 bp, Homo sapiens
  misc_feature 378, 471, 478, 487, 490, 522, 526, 532, 545, 562, 573, 598,615, 623, 636: n = A,T,C or G
gaagaagccaaaaagaaacgaaatagatgcggagccgccagctaagcggcacgccacagcagaggaggtggaggaagaagagagggaccggatcccaggccccgtttgcaagggaaagtggaaaaataaggaacggattctcatcttttcttccagaggaataaattttagaacaagacatttaatgcaggacttgagaatgttgatgcctcattctaaagcagatactaaaatggatcgtaaggataagctatttgtgattaacgaggtttgtgaaatgaagaactgtaataaatgcatctattttgaagctaagaaaaaacaggatctctatatgtggctttcaaaattcacctccgggaccatcttgctaaattnccttgtcaaaaatattcatcccctcgcttgacctgaagaatgacttggaacctggttggaaaggttttcggcccttttggcttttggaccttnctttggntgaataacncanttttggcttggttaaaagaaccttttatttcnaatntttatncctcggccggacncccttaaggcgaattcnacccacttggnggcggtcttatggttcccacttcgncccaccttggggaacanggccaacngtgttcttggggnaatggtttc

SEQ ID NO: 891 - DNA, 625 bp, Homo sapiens
  misc_feature 428, 436, 506, 509, 541, 566, 590, 593, 600, 620, 625: n = A,T,C or G
ggtaccagcaccagcccctctgaaaggaaaaagtgtagtcatgactgtccatctcttttcaaagcttccagtctttgaagcagtgcgtttccaaatgcttctcggtaggcggggctgagtgtatccaacaaggagtagactgtttcatggtagggagtctgtaaatgatcatctacctggtcaaaagcatagcctaccaccttgagccctgcttcagtgagttctaggcaatatctgtttctttcctttgtttccacattgatataggccacatcatccgcacaccgcaggcttttcgagacaaacatgttgttaacaagcaaagagaacatcatttacaactgcttcagcttcgagcctcatgtctttcatgtcagttccttcaaaaccgttcagctctgaaccttcttcaaatcctgacatactgnttaagctncatgggaatacagctgtttcattcttgatgatgcagaaagacaagaatccagtacctggccggcgggcgntcnaaaggcgaattcacacactggcgggcgtctantggatccggctcggaccaacttggngtaaacatggcaaagttgttccgnggnaatggtntccgtacaattcccccaaanacagn

SEQ ID NO: 892 - DNA, 586 bp, Homo sapiens
  misc_feature 510, 519: n = A,T,C or G
ggtactacgtcagcaatttctccaaacagctgctcgacagcatatggcaccagcccattttcaatttgctgagcatcggccaaagcctgtatgcgaaagccaaggagctggacagagtgaaggaaattcaggagcagctcttccatatcaagaagctgttgaagacctgtaggtttgctaacagtgcattaaaggagttcgagcaggtgccgggacacttgactgatgagctccacctgttctcccttgaggacctggtcaggatcaagaaagggctgctggcacccttactcaaggacattctgaaagcttccttgcacatgtggctggctgtgagctgtgtcaaggaaagggctttatttgtgaattttgccagaatacgactgtcatcttcccatttcagacagcaacatgtaagaaagatgttcaaccgtgccagggctttgcttttacaaacaagtgctttcagtccctccgagtgcccccggtgtgcgaaggatcacaagcgangagaaaacntcttggaagggggggcctctgcagcaacatgatgccctgagtaccttgcccggccggccgttcgaaa

SEQ ID NO: 893 - DNA, 627 bp, Homo sapiens
  misc_feature 460, 485, 487, 513, 558, 594, 622, 625: n = A,T,C or G
ggtacgcggggcatgcgccgtttctctgcatggtgtgcgttctcgttctagctgcggccgcaggagctgtggcggttttcctaatcctgcgaatatgggtagtgcttcgttccatggacgttacgccccgggagtctctcagtatcttggtagtggctgggtccggtgggcataccactgagatcctgaggctgcttgggagcttgtccaatgcctactcacctagacattatgtcattgctgacactgatgaaatgagtgccaataaaataaattcttttgaactagatcgagctgatagagaccctagtaacatgtataccaaatactacattcaccgaattccaagaagccgggaggttcagcagtcctggccctccaccgttttcaccaccttgcacttcatgtggctctcctttccctaattcacagggtgaaccagaattggtggtgtgtaacngaccaagaacatgtgtcctatctgngnatctgcccttctccttgggatactangaataaagaaagtgatcattgctacgttgaaacatctgccggtanaaacgtatccatgtccggaaagatctggttcatctntaaaatacttcattggtcaagggcggtnttnaa

SEQ ID NO: 894 - DNA, 560 bp, Homo sapiens
  misc_feature 526, 548: n = A,T,C or G
acacaatcagataacaaggtttcaagctctagtcaaagacaagatgatattatacctaaataacaatttctaaggaacttgaataacaatctctaaggactcttgtcactatatgaagaacttaagtttatgactccacactcttaattaaaaggacagccacttaatcaattttctgcagtgaattattagactaacttcctagcatctggagattacagtatgttccaccttgaagctatcacaatcaagaccattacctgacatgcattcaacaaatattcgatgacaaacaaagtataaggttaattgttacagaaagttaggtcttctaacacctaagtgttaagtggactcaatgttgaacctttttgagtgccaacatgacactcaaaggaaatgctcatggaacatttcagatttcagatttgggatgcccaactggtaagtataatgcaaatattccaaactttgaaaaaaattatgaaatctgaaatacttcttgtcccaagcatttttggaaaanggatactcaacctgtcctcggncgcgacacctaa

SEQ ID NO: 895 - DNA, 643 bp, Homo sapiens
  misc_feature 360, 418, 500, 509, 531, 542, 544, 568, 570, 587, 615, 623,633, 640: n = A,T,C or G
ggtaccttgcagccaagggaaaactgaagagccaaaacaccaagccttatctaaaatccaagaataattgccagaatcaaccaccttctaaatctactattagacccaaaaatgatgttaccaaccatgttgttttgcctgtcaaacctaaaaggtccatcagcattaaactccagcccagaccacctaatactgcagggtcccagaagccgaagttggagccaccaaaacttctgggcaaaaggctgacttcagaatgtgtttcttctaacccatactctaagccttctagcaagagttttcaacagtgtgaagctggatcgtccacaacaggagaactgtcaagaaaacctgtggggncacttaatatagagcaattgaaaactcaaagcagcagttaacagatcaaggaaatggnaaatgtatagactttatgaataatatcatgttgaaaacgaatctttggatactttcttaaagaaccaaccaagagaacttgnttcgttatnttaacagaacctgagaggaagnccgatcttaantntttacccgaagtaagccaaaactngntttttttattaacccanaacagtttagttctaacaaaccttggcnaaagttanttaatagggnggtttgnaaa

SEQ ID NO: 896 - DNA, 656 bp, Homo sapiens
  misc_feature 10, 227, 332, 375, 396, 469, 474, 493, 518, 527, 545, 590,593, 599, 605, 616, 654, 655: n = A,T,C or G
cgaggtactncttccaaatgacgaattttctgctccaaataatgggacaaagggcatcatcacatggacacagtcaatttcacagtgatggactcacacaggtggatgatctgaggcacaagctgtgattggtcttaagaaaatgaaaggtagagttgggttcaaaatccacatctcacgatttctggtccttattcatccaaaaagttgaactgcttcatatcagngtattagacacattttaaatctttctcaagagttgctctgggtgcagcatgataaggaaaaccaggtatttggcttgatagcagatattcaaggtataggtgccnagcttatggtaaagcttttacccgtaggatatctgagatctgntgccacaaagaggactatggncctatgatgactactatagttcagtttcaacctttttggggattaatttgatcataacctttccttctcgttncattntaagacagggaatttaaangattcactcaagaaggttttcccantaaccaggngatggtcattccatctgnaatgggttcctaaataaactggcttcccctttcaacaactcttgnccnccacantcattngcttttccaantggaacaagtctttggaatttggaaaaactgttttggnng

SEQ ID NO: 897 - DNA, 668 bp, Homo sapiens
  misc_feature 7, 381, 416, 428, 445, 462, 468, 475, 495, 532, 550, 551,555, 561, 570, 573, 575, 576, 579, 585, 594, 606, 609, 610,618, 619, 622, 626, 642, 643, 652, 658, 661, 662: n = A,T,C or G
ggtactngggggacttaagatggcggcgtttgcacggagtgcaatcactgcgtccttacgggggttgcaaggcgtccgaagtatgagtccactaacaaaagtccagaaactcgccagttaatagtattgtgtctcttcaaaatatcggagaataatttctttctcgctgatcgcctaacttctactgacgaagcttggaagttgcagaaggttggaagtgcaatggcgcgatctcggctgactgcaacctccacctcctggattcgggctattctcctgcctcagcctgccgagtagctgggattacaggcatgtgtcaccgcacccagctaattttgtattttttaataaaagatgggggtttcttcatggttggtcaangctgggtctttgaactcctgaccttagggtggatncggcccaccctnaaacttccaaaatgtgnttgggatttcaaggcgntaagcnacccgcnccccgggccagaacaattantttaaactttcctaccctttgggagaaaggcaaaaanactttgatgaaaatcttnntaangacttnaacattttnccncnnaantatatnttaaattanttaatttccttnccnnggcgggcnnctnaaanggggaaattccaacanntgggggctntttatnggnnccaacc

SEQ ID NO: 898 - DNA, 642 bp, Homo sapiens
  misc_feature 8, 386, 455, 462, 501, 505, 507, 523, 537, 549, 561, 570,596, 614, 620, 636, 639: n = A,T,C or G
ggtacgcngggaagatgggaagtaagagtcacatatcaaaactaccctccactttattccctgagcgagggtttatgaagtataaaggggtgggagccccgaggtgagcgggaacggtgctgctttatttgaaatgttttcttacctcattctgtgccccagtagggggtccagcctcatctgtctggcttggccctgtgttcctcctgtcccctgctccactgcctatctggtgccccaggtgctgcttgccactccagctgtcacattgaacagtttcaattcaactcttaatgctcctgcttccgaagcctgcccaatttcttttttcttggcctctggttttttttttctttctttttcccttggttttgtaaaaaactcanaagaaaatctttcttatggcttcctttggtgaaaatggaaatggaaaaaaacttaattttttggatttnaaaaggnagggcatgcctataacatttcttctatataagaactgcnttgntnagggggccctctggtngggcctacctcatnaaggggtggatntttccccctccntttaatctngcgggttggacctaattgaaaaaccntaaggttgttgccccccngggganggagtgggccttgccnttnttc

SEQ ID NO: 899 - DNA, 448 bp, Homo sapiens
acatggctccatggaggttctccagtcggtgttgctgctgctgttttcgagccttatctcgtctgtgctcctcataagtgtcgtcatcagtgggcagctcatagcggcacaagggacaggaatttgtcttgcttagccagggcagaatgcagctggaatggaaaaggtgatggcaaggcatctcaatggcagtctcctcctccagcctgagagcctctgatgactgtcctggggaggttctcaaccacagtcttggcagctggtggaggcaggtggtggtcccaatctactaccaaccccaagtcttcaaagtccatcctattgaaaagtgaccttgcgagctccagcagcatgttggttcgcgtctcctgctcagggtccgacggctcgcagtcgtgttcatcgaaataggacgccatggctgccagccttctgacccccgcgtacc

SEQ ID NO: 900 - DNA, 679 bp, Homo sapiens
  misc_feature 488, 507, 546, 565, 571, 579, 596, 603, 611, 633, 634, 637,641, 647, 669, 678: n = A,T,C or G
ggtacgcgggggggtcggtttccgcggtggccatgactgcggccgtgttcttcggctgcgccttcattgccttcgggcctgcgctcgccctttatgtcttcaccatcgccaccgagccgttgcgtatcatcttcctcatcgccggagctttcttctggttggtgtctctactgatttcgtcccttgtttggttcatggcaagagtcattattgacaacaaagatggaccaacacagaaatatctgctgatctttggagcgtttgtctctgtctatatccaagaaatgttccgatttgcatattataaactcttaaaaaaagccagtgaaggtttgaagagtataaacccaggtgagacagcaccctctatgcgactgctggcctatgtttctggcttgggctttggaatcatgagtggagtattttcctttgtgaataccctatctgactccttggggccaggcacaatgggcattcatggagatctnctcaatctttctttattanctttcatgacgctggcattatcttgctgcatgtattctngggcatggatttttgatgntgtganaaaaaaantggggcatcttcctttngtttttnaccacctntggggtaagccaaacttcatannttntatntggaanaaaccgcgtcgcattttaaacntgggctcang

SEQ ID NO: 901 - DNA, 698 bp, Homo sapiens
  misc_feature 436, 485, 488, 518, 525, 527, 529, 541, 544, 560, 562, 567,586, 605, 621, 640, 651, 659, 662, 667, 694: n = A,T,C or G
cgaggtacagcagcttgggagttcattgctggtctgggactatttgcttgggcacgtgtataatggctgtgaacagcgttgacgttttgattggcacgagacctgcgtcgtgatgtaatgccaatattttcacctgatcattcataacgatcatggtgcgggtgaagagatcatgatgagtaattatgccagtaaaccactgggtggcagagtcttgtctatatactctcactctgtatccatttaaggaataaggacctggtagggctgaaaggcactatcttcagttaaaaaatccagttgcttatctacaaggaattctactgcagtgactgaactgggtatatttctttcaaccaagaggtttgaaagttttgttcttgagaattttaaagtatctttaaatctcaaaaatccacaacaaggctttaaaggncagtaaagtatttgctgaaatttctattttggtctggaagaatatctantgnaaaaacctctttagtcttcaaaaatcacangccaatngntntcaaaccaacanttntgaactccttgccgcngngtcantgttttggaagaaaagccngacccccaacgaagccggncttgtacctaacaagntccaccagccaaagacaantttttgttggnttggtcanccnggcangataaggatacactcctttttcataancctg

SEQ ID NO: 902 - DNA, 663 bp, Homo sapiens
  misc_feature 362, 392, 427, 439, 447, 468, 475, 478, 480, 484, 494, 517,553, 570, 580, 601, 629, 633, 636: n = A,T,C or G
accacatgtccaccaggaaggagctgaggtcatgctgagttttaggcaacgcactgagggagtccacaatatcaagttttgtgtgcttcagcagctccccccgaaggtaggggtccttgagaatttttatattcctgctatccttgaagaacttgcagaagctgctcggggctgagtcctcaggattgaagggaatgctcagggagaagcaggcctcatcgtggtaagcactaaggagaccctgtcgatctccagagtcatagatcaagtaatactgctgcaggaattgcaggaacagattcttcaacatctcagatccaaagaagcttccttacaggttggtaacctcttgtgggcttcantacccgggggggaccccggctggaaggcanggcatcactatggacaacctggcaggatccacctnaaacacgtcatngactcgtnctggaaaagttccagaacagncctacgnggngntttnattgaggccnatgggagaaggaatttgaaaagnccccttttatgacaaagcgccttcaaaattgatccnaggagaatctgacttgnttggttccancaattttttgataagagcgtntcaaaaaaaggccagactttaaataggnctgnttnttaaaaaaaaaaaaaaaaaacctcgcc

SEQ ID NO: 903 - DNA, 271 bp, Homo sapiens
actgctgacatccaaaactatgtcccttttagggtctactcggagaaaattgcggcattcaaaagtcaggtgaccagggtagccacattttttacagcctgctctgacactgtccttgttgcaacctgggactgccatgacggtggtaagaggggtaactcgagcctctggctttcgaaaaggcgcttgcttcccgccagttgtgagaacaaggcacagtcaaagcggcgttttccttcccccagccccgcgtacctcggccggaccacgc

SEQ ID NO: 904 - DNA, 239 bp, Homo sapiens
  misc_feature 163, 215, 236: n = A,T,C or G
actttctgttctttggcacattttgcccagcggatgcaacttctatcctcagtccagttcatatatctcaggcagtgatccattttgtatcagccagtttcccttgttagggccgctagacccggctggcagccaagagcagcactctccccaccttcagcanaacttctcagctcatgtgtgtgtttttaaaagcagtaggcagcttccatcancaatggaagtgtcccccactncag

SEQ ID NO: 905 - DNA, 550 bp, Homo sapiens
  misc_feature 406, 411, 435, 436, 451, 453, 463, 468, 474, 489, 516, 530,544: n = A,T,C or G
acaaagtgacatacaattggaaatccatttttgttgtaaagacattgtttttcagacttttcagatcaattagaaaaatgtcattgctttaaaatcatagctgttctgtttaagaggaattgaatttaaaaatgagagagtattaaaactcatgtggcagtatcctggtcttaatcaggtattgcagtgttcaaacaaggtatggacacatcaacatattcaccttttggaaggactagtgacttggttaaaaactaatgagtgtttgcgtgtggtgtttctatgcgagcacccattctcaattttttttttttttttttttttttgtttgaagccattgattgatattcttgtttcagtgtctggttccctataaagtaatatatatttcctctttaagctctgngcctnaatatgcaatcactttgatataannttaaatatgaagacntnccaaactggnaaatnggattntttttcaaaactttntggggaaacatatgggggatatgatanacttatgggttttntgttgccggggatngggttg

SEQ ID NO: 906 - DNA, 345 bp, Homo sapiens
  misc_feature 339: n = A,T,C or G
actgaagattattgcttctagggcatttttaaacagcaccattgtattgttgaatgtttatgtaactgatggcttttctataatgtaatttttgaatgttcaggtgttacatttccaaagtttaacttttaaaaaaccatcttctgatcccttttattgtctgggccatacaatctatattacataggtgccaacatttaattcttttaaatggaacatttgcagttttccatattggtacaaaagaattactctgatcgatattaaatcgtattgaaaacaaaatggactaaaaagcaaatactactctatgttggggtggaagtgggaggaaaagantgactc

SEQ ID NO: 907 - DNA, 508 bp, Homo sapiens
  misc_feature 36, 59, 128, 152, 198, 262, 320, 325, 392, 403, 442, 456,458, 460, 469, 473, 493: n = A,T,C or G
actttttttttttttttttttttttttgaaacggantcccactcttgtcgcccaactanagtgtagtggcacaatctcggctccccacaacctctgactccagggttcaggtgattattttgcctcancctcccaagcagctgggattatanacacccgccaacacgccaggctaatgtttttgtatttttaataaanatggggttttgccatgttggccaggctggtcttgaactcctgacctcaggtgatccgccgcctnggcctcccaaagtgctgggattacagacgtgagccaccactcccggcccataaaaggnttttngctggataatttgtaacttttctaattgggaaaaaattcctattaatcacttaaaaatttttttttntgaattttggngttatttgattatatacaaaggagacttttttttttganataacactcaaatngntntttcttttntttngaaaaattttattttttatntgaaaataacagttg

SEQ ID NO: 908 - DNA, 250 bp, Homo sapiens
  misc_feature 54, 78, 193, 197, 206, 209, 210, 221, 233, 240, 246: n = A,T,C or G
acaaaggctgcttaaggcagtgcagccccttctcaaagtcagcatgtcaatganagactgcttgatacttgtccttcngaaagctatgtttgccaaccagcttgatgcccgaaaatctgcagttgctgggtttttgctgctcctgaagaactttaaagttttaggcagcctgtcatcctctcagtgcagtcantctntaactgtcngtnnggttcatgtgnatgtacacagcnattacanttctgncgcc

SEQ ID NO: 909 - DNA, 539 bp, Homo sapiens
  misc_feature 50, 60, 77, 79, 81, 85, 88, 91, 92, 93, 107, 109, 114, 115,117, 120, 125, 127, 131, 137, 138, 139, 142, 157, 173, 179,187, 200, 202, 216, 223, 258, 281, 283, 298, 313, 340, 372,380, 442, 444, 451, 461, 464, 467, 481, 484, 502, 507: n = A,T,C or G
  misc_feature 514, 529: n = A,T,C or G
atccacctccgaaacccctcggcggcgttcttctgtgtggcccgcctgcnggattttaancttgactttggcaattncnanggcnaancannncaaacttggcgtgnanggatnncnacnatttntnaaantcctgnnnatnaattgtggggagtantatggaaaatgaacanaagcantttaaatnctctggatgagcnanaaggggttaaaagnggaatgnctgttgtaatataagttaaagttgcaactcatganggaaaagaaataacctgtcgaantnatctgatgacaaatnacgaaagtgctcccncatgcccacagtataaaaagattattngcatgggtgcaaaacaaaatggtttgccgctngagtatcntgataaattttaaagcaatacatccctatgacttacaggaataggtctctaataaatttganantcatcanaaaggggganacncanactttttataaaanacnagatatttctaaggggtnttctntgacctnatattaaaatatttntaacacttga

SEQ ID NO: 910 - DNA, 650 bp, Homo sapiens
  misc_feature 47, 124, 127, 204, 486, 488, 499, 529, 545, 564, 578, 621,623, 628, 633, 643, 649: n = A,T,C or G
gtactgacttaaatttggaatttactaattactggggatactttagngagtctgcatatgtgtattattaatacatgttaaaccatactgcaatataacaaaaaatatactgacatttctcttncanagagtaatgactgtattcaaagtctgagggaatgacaaaacgggatgcacatctaacactgatacacggttcttcanaaaagactagtttcagctgtttccaggtttacataagatgatggaagcagtctctaatatgttaatcaagaaaatatatgcaattgccagctactacatatacagaaaataaagatggtgagtcaaacaaaacatacaaacttggtaacttctcaccctccagatattttgaacatatttaaaaaatttgaagataggatatcactgtgatcttaaaaagagaacttttaaaaataacacattattggaataggaaaactgagctgctaaaaccaaaagtantnaaacagttttnctgatgtccttacactcttactaaaacccnaatttaaaactaccanctaaatttatctaagtgtngactttttaaatgncattctttcaaacctcctttataatattttaaaatttcctaancntaatncattncttaagagtnaacccnt

SEQ ID NO: 911 - DNA, 600 bp, Homo sapiens
  misc_feature 129, 255, 288, 316, 377, 392, 410, 419, 421, 445, 459, 481,511, 517, 553, 554, 566, 567, 570, 585, 586, 588: n = A,T,C or G
acgcggggtggggggggtcctggtctttggcttctcgactcggtcctgtttcgacagcgaacatgtcgcggcctgtcagaaataggaaggttgttgattactcacagtttcaggaatctgatgatgcanatgaagattatggaagagattcgggccctcccactaagaaaattcgatcatctccccgagaagctaaaaataagaggcgatctggaaagaattcacaggaagatagtgaggactcataagacaaanatgtgaagaccaagaaggatgattctcactcancagaggatagtgaagatgaaaaaaaaanatcataaaaatgtgcgccaacaacggcaggcggcatctaaagcagcttctaaacagagaanagatgctcatggaanatgtgggcagtgaggaanaacaagaanangaggatgaggcaccattccagganaaagattccggcancgatgaacatttcctatggaanatgatgaccgatagtgactatggcagttcnaaaaanaaaacaaaaagatggttaaaaagtccaaacctgaannaaaaaaaaaatnntanaagtccctcggcccnnancaccctaaggcg

SEQ ID NO: 912 - DNA, 415 bp, Homo sapiens
  misc_feature 192, 309, 339, 367, 379, 391, 393, 405: n = A,T,C or G
acatagagaagaaaatttggttttagcaaatgacagagccttcaaaaatatttttggaataatgtgaatcaaccgaaaactgggggcaaggcagaggacaggttttctcaggttaagagaaaaacgaaattttaaaaactttaaaaaatactgataaattcggatcaaatttgggggaataaaaaatattanagcaaaggagtttgctggttgtgtcattatttaatgatcaaagtatagcattgtatgccttattacagacttgttgactataggcttaatgtaaaaaggaatctttgcccagatgtngctcttaaggaaaaaagggtttttaataanaaatgaccttttgattagtatggtgccnagtcacagggcntattttcctgantnttggggtgatgncaaaaggtat

SEQ ID NO: 913 - DNA, 647 bp, Homo sapiens
  misc_feature 172, 381, 459, 502, 509, 540, 560, 564, 576, 611, 625: n = A,T,C or G
acgcgggcaagcaagtcatttcccttatttaaccgatgtgtccctcaaacacctgagtgctactccctatttgcatctgttttgataaatgatgttgacaccctccaccgaattctaagtggaatcatgtcgggaagagatacaatccttggcctgtgtatcctcgcattanccttgtctttggccatgatgtttaccttcagattcatcaccacccttctggttcacattttcatttcattggttattttgggattgttgtttgtctgcggtgttttatggtggctgtattatgactataccaacgacctcagcatagaattggacacagaaagggaaaatatgaagtgcgtgctgggggtttgctatcgtatccacaangcatcacggcagtgctgctcgtcttggatttttgttctcagaaagagaataaaattgacagttgagcttttccaaatnacaaataaagcatcagcagtgctcccttccttgctgttccacncactggnggacattttgccatcctattttcttctgggncctctgggtggctgggctgntgancctgggaactgnaggagctgcccatgttatggaaggcggccaaagtngaatataaagcccnttcgggctttcgggaacctcgg

SEQ ID NO: 914 - DNA, 619 bp, Homo sapiens
  misc_feature 322, 410, 418, 471, 473, 496, 498, 510, 520, 524, 527, 547,552, 553, 563, 571, 582, 608: n = A,T,C or G
accagcacatgaagcccttctacaaaattcctgacggactgggaataaaaattcctagtgacagcccactccttctcaggcaggtgtgattgtttgaaatctctcccaatattgagatgaaacctgcttccctgtaacttccctgtaattctgtgggtcccttgtagccacagagaaggcagcaatcagtaggggaagtgctataaaaatatactatcccggccaagcgtggtggctcatgtctgtaatcccagcactttgggaggccaaggcgggcagatcactttaggtcaggagttggaaaccagcctggccaacatantgaaaccccgtctcgctgggtgtgggtggctcatgcctgtaatcccaccactttgggaggctgaggtgggtggatcacaatgtcaaanagatgganacaatcctgccaacatggtgaaaccccatctctactaaaaatacaaaaattantngggcgtggtggcgtgtgcctttnancccactacttgngaaggctganccanganaatttgcttgacccttgggnggcannaaggttgcanttgaaccnaaatatcacancactggactccaagcctgggtgacanattgaaactcc

SEQ ID NO: 915 - DNA, 569 bp, Homo sapiens
  misc_feature 34, 85, 123, 130, 153, 233, 251, 264, 365, 368, 379, 541: n = A,T,C or G
acttttttttttttttttttttttttttttattngagtattgttttattaaccaaaacacaaaaccaaaatgaaaactggcttanaatataaaattctcatttttcaaagtgaaagtttgaanatactanctaaagttgataacttaaatagnggtaaaagtaaataacttaaaattatggcaccaatcacaagaagaaacagaaaacagggggactagggattcggtggtanacttttactttaaaatanagctatgcagcanattctccatgacttggcttacatgcagtatgtcctatggaagtaaaattttcaaatacctccatcaccttcagtaactcatattaataaagtaaaagccangtntataaaacaanaacccagtttataaacatatacatcaattggatccccaggtaaaccaaaaggagtttttaaaaatatccccaccataccttttaagacaacttttccccttccctacagtaggaagtaccaccattcaaattagtttagctataaaaaagtaaaaggggccncaaccttttttaaaattaaatgccacca

SEQ ID NO: 916 - DNA, 540 bp, Homo sapiens
  misc_feature 293, 325, 333, 344, 348, 370, 380, 381, 404, 467, 472, 477,490, 507, 533: n = A,T,C or G
acgcgggggccatggcagcatcttccctgacggtcaccttagggcggctggcgtccgcgtgcagccacagcatcctgagaccttcggggcccggagcagcctccctttggtctgcttctcgaaggttcaattcacagagcacttcatatctaccaggatatgttcctaaaacatccctgagttcaccaccttggccagaagttgttctgccagacccagttgaggagaccagacaccatgcagaggtcgtgaaagaaggtgaatgagatgatcgtcacggggcagtatggcangctctttgcgtggtgcacttttccaccgccantggaaggngacctctgaanactnatcttaattggaaatgaactanacttgcgtgnngagagagaatccactggaaaagncctgctggttggggcagacacttcacgctgttggcaagccactctcgaaaggatcttgtcgantaatncacancattgaaaacaantcttggccaaaatcttntgaatcaggaaaggaaaactcaaaanaaaaaat

SEQ ID NO: 917 - DNA, 528 bp, Homo sapiens
  misc_feature 67, 75, 106, 317, 327, 335, 342, 359, 381, 390, 414, 456,459, 470, 526: n = A,T,C or G
acttttttttttttttttttttttttttgaacacaagggtcagtttcttcaattcatgagcagtcanaacagganatgcttaggaagaaatcgtggctggtgcctnttctccatgctcatcccataccccagtgacaggataccgcttccctgaagttaaaaacatgcaccacacttccggtaaaggctggagccacagagggcacctagcaagcttgctttcaaggtcccatcaacaaatgaaaagggcagccgaggacagattgacagaaaccccactatgttgcttttctttttttttttttcctgaggcagantcttgctttnttgcccangctggantgcaatggcacaatctnaactcactgaacctccaccccntgagttcancaattctcctgcttgcctcccganactggatacagccctgcacatgcctggtaattttgtttttantanaacggatttcncatttgccagctgttttactgtgacctaggtacccctgctacctccaaatgctggnta

SEQ ID NO: 918 - DNA, 533 bp, Homo sapiens
  misc_feature 412, 446, 518: n = A,T,C or G
acaaccttcaaacattccagtttttataaaaaaggggcacacaatcgtggttttgatccccttttgtttttggacaaatgtttctacaaatacagattcagcaaacccaaaggctgcaaatttacttgcacagtaatctgccagcccatttactccacttaatccagctgaacttgaaatgcaaaccaaatgtccatggtcattagcaatcatagcaggtagaaaggctttataagtccataaatgtgctttgaaattcacatcaaatgacttttccataagctcatctggacagtcaaggaactttttgcctgttacgattcggcattgttgattaggatggaaacatcgccgacttctttttaacctggtcggctactctatacactccttcctttggctgcaatcgcangtatagcgtgcactcttgtggctccagcttccanccatcttacatgttctattccctcctattgattccagaaacaaaacagatccagcggcaaactgaagggtanaccttccagtccttc

SEQ ID NO: 919 - DNA, 512 bp, Homo sapiens
  misc_feature 419, 450, 510: n = A,T,C or G
acaagccacaaaaatgctcacacaagcggtggttggaacaagcatacaacacaaatattcaagcttttgtctgatgcacagcctatgagcaaattcagcccatggtttgaatcaacatgccagctactatttggctgctccacagttagctccagactagaattatttaaaaaaacaaaagcaaaaacaagaatgttggtccagtagctcctaaacctgtgaagactatgactactgctgtgtctagtgtgtagtttctattccagctttgtttaggcttccatgaaactaatttccttactttgcttaattaagcataatcagttcatggaagaccattccttctttcctctaagtatggttgaggacaaagaaaaggagaaaaatctttgctgaaatcaaaatggaacttgctcatnaaaaaagaaagtgtgtgtcaggggaacgcanatatctatcctatttcttatctctaccagtgaggaaatgcaaagggcagtgggtcatganaa

SEQ ID NO: 920 - DNA, 535 bp, Homo sapiens
  misc_feature 407, 418, 485, 499, 505, 527: n = A,T,C or G
acaaaagagcccctctacgagaaggacagctctgttgcagccagatttcagcgcatgagggaagaatttgataaaattggaatgaggaggactgtagaaggggttctgattgtacagttcatatcccagttctagaatcagttcattttctaaggagtcctggttccttttattggaaaccaaaatctgggcaccaggtgtgctcccattctagttgttttctgaccacataactgctaacaaagatgcttcactctggctacactgatgtgaactttgaactttagcagaagagctcagctctagagaacaatgagctcctacattaccttttttcctcaaagaataagtaagtctaagcagaaaaaaatatgcaaagaattttcagtatgatgaaataagacaancatcaggcttntgactgtaaccaacacaatatagttatacagatctgtagaagatcctaaaataagaagtcatttgcnggggtatcaggganatctgntgtattcgctttgccgctacanaacacatg

SEQ ID NO: 921 - DNA, 514 bp, Homo sapiens
  misc_feature 296, 312, 347, 353, 380, 394, 402, 403, 409, 411, 418, 421,423, 424, 430, 435, 441, 446, 454, 458, 460, 468, 470, 476,480, 484, 488, 489, 493, 504: n = A,T,C or G
acgcggggcccgagcttggaacttcgttatccgcgatgcgtttcctggcagctacattcctgctcctggcgctcagcaccgctgcccaggccgaaccggtgcagttcaaggactgcggttctgtggatggagttataaaggaagtgaatgtgagcccatgccccacccaaccctgccagctgagcaaaggacagtcttacagcgtcaatgtcaccttcaccagcaatattcagtctaaaagcagcaaggccgtggtgcatggcatcctgatgggcgtcccagttccctttccattnctgacctgatggttgnaagagtggaattaactgcctatccaaaaagacaanactatnactacctgaataactaccaatgaaaancgaatttcctttanaaactggnngtggantngcacttnagntnncaaaancaaantttttntggtngaaattcnattncngggggaantnaggttnattncggnaagnncctnaaaacggttcnattcaagagg

SEQ ID NO: 922 - DNA, 498 bp, Homo sapiens
acataagccttgatattccattttgtggctggtccaaggggcagcctaactcatcttacaagacggactctagggacaggtaggttggatcctcattcctgacagtgcatttgtctgacacacgggactacctccctaatgtatgcttttctttgagaaaaaaaaagtaacagattttctttacatcttggcaccttgtaaagtttttttttttatacaaaagttcaatagttttgacactccccattgttaatcactacttcactgataaacttggaaaagtgtgaccctggaatttcatcatgcaaaatatttactgcagcaggagaaaacattttttaaacaacatttttttttcttttcaaatgtatgaacttgtttaagatagccaggaaggcagtggtaggataaacacaagggataggaatgtatcaaaaaacagattaacacacacgcacgcgcgcacacacacacacacacacacacacaaaaacctgt

SEQ ID NO: 923 - DNA, 304 bp, Homo sapiens
acctttcattgcaggatttctgcttaatataacaagcaaaaacaaacaactgaaaaaatataaaccaaagcaaaccaaaccccccgctcaactacaaatgtcaatattgaatgaagcattaaaagacaaacataaagtaacttcagcttttatctagcaatgcagaatgaatactaaaattagtggcaaaaaaacaaacaacaaacaacaaacaaaacaaaacaaacaaacaaaaaatcccaccaatcttcatgggtaaactttcctgctcagggatgtaagctgactctagacaagatattgt

SEQ ID NO: 924 - DNA, 382 bp, Homo sapiens
  misc_feature 181, 199, 208, 224, 228, 230, 232, 241, 265, 267, 273, 328,336, 337, 342, 375: n = A,T,C or G
actgccgaatgtgttttccatgacatacttcgtaagtccaataagactcaattctgtaggaacaactgctttgtttaaatagtggctccaaaagctctcttggattagggcctttataatccttttcttcttcctcatccccacttgtcacaaggggaagtatgcatttatatttttcttnatgtgcagttgtcatgangacataatnatcttctttatataanactncngntgtgggcangagagaactcggtgccgggccagntnactcgnaaagggatgtcctccctgagttgatgaagggctcggccgcctgcggacgcctccnggaggccnnataanaccctgtaactcccggcccggcccgggacccanactccgt

SEQ ID NO: 925 - DNA, 340 bp, Homo sapiens
  misc_feature 74, 221, 236, 252, 257, 268, 278, 285, 286, 301, 338: n = A,T,C or G
acgcgggggcagtcacgggggagcgaggcctgctgggcttggcaacgagggactcggcctcggaggcgacccanaccacacagacactgggtcaaggagtaagcagaggataaacaactggaaggagagcaagcacaaagtcatcatggcttcagcgtctgctcgtggaaaccaagataaagatgcccattttccaccaccaagcaagcagagcctgttgntttgtccaaaatcanaactgcacatccacanagcanagatctcaaanattatgccanaatgtcnngaataaagtttctgnaagagagctctgcctttttctcttgaaacatgcttgnac

SEQ ID NO: 926 - DNA, 655 bp, Homo sapiens
  misc_feature 93, 118, 132, 145, 148, 153, 158, 175, 204, 223, 244, 252,260, 294, 299, 303, 305, 306, 307, 312, 317, 318, 319, 332,334, 350, 371, 505, 510, 517, 572, 591, 596, 616, 621, 630,641: n = A,T,C or G
gtacgcggggttgaaaaatggcgactgtggcagagttgaaggctgttttaaaggacaccttggaaaaaaagggggtattagggcatttaaaancaaggatccgagctgaagttttcantgccctaaatgatnacctgataacccntancccgnggtcnccatggtaggcacggcnactaccatcaaaagttgatagggcaaacnttcaaatgggtcgtccccncccccgcgtactttttttttntttttttntttagggnctttcaattttttatttaaatgccttgatccaanatggntttnannntttgnctaannnaggaacatgcttngncatggaatgatcttcnactgcataagacaacatggtngaggtctgagattttacacagagtcattcaaaaagttgcttgtggactactatgtgaaagatacaagacacaaatgtaacttcttgaggacaaaaaaggatttttgtgtggatgagggctcggctacagcaaanagtanaggagcngctcaaaaagaaatgtttcacttctgctctgctctatgatcccaattcaaatgcntgaccagtgaaacccgtgnaggcncaaaagggtttggaaactcncaaangtcctggtnggtgaacaacnaccttgccaagatt

SEQ ID NO: 927 - DNA, 650 bp, Homo sapiens
  misc_feature 116, 147, 362, 583, 586, 587, 589, 612, 615, 636: n = A,T,C or G
acctagcttctgatgtatgcaaaacactgcaggaagagagaatgaaagaaagaaaagctctagctatagaaggaattttaaaatcaaggagaagagcaaggcccccgcgtactttnttttttttttttttttttttgggagttgganagtataaccctgacagcatctaacaagttttgggtgggagctttaatctgaataatcatatatttttaaaactagggacaattttcttctattttcaaaaattatttttctaccaccacctatttattcctatttatttgaaagtgtgacctccttaaattctcctctatatctcttaatttttctcccatattttccaaactgttctgtattgngggacatttcctggattggtaggaaactacttgatcatcagcttgttcttatattctgaactctattatatgcctctgaacatcatgtttatctcaggttatacctacttgattgaaggaataaaaaaaaaggaaaactgcttcagttttcaaaaaggatttaacaacccctttgaacagaatttttaacattttcattcaaatattatgttacttaaacnccnntnaaagaatttaaagaaaaatgganacnatgctcatgaatgactttganaatggattttaatc

SEQ ID NO: 928 - DNA, 625 bp, Homo sapiens
  misc_feature 24, 57, 64, 72, 196, 207, 259, 267, 316, 356, 365, 397, 420,435, 462, 469, 474, 477, 483, 489, 491, 501, 506, 512, 529,542, 582, 589, 591, 598, 624: n = A,T,C or G
actttttttttttttttttttttnggaacacaagggtcagtttcttcaattcatgancagtcanaacagganatgcttaggaaggaatcgtggctggtgcctcttctccatgctcatcccataccccagtgacaggataccgcttccctgaagttaaaaacatgcaccacacttccggtaaaggctggagccacanagggcacctancaagcttgctttcaaggtcccatcaacaaatgaaaagggcagccgaggacanattgacanaaaccccactatgttgcttttctttttttttttttttcctgaggcaaantcttgctctgttgcccaggctggagtgcaatggcacaatntaaactcantgcaacctccaccccctgagttcaagcaattntcctgccttggcctcccgagtanctgggattacaggcncctgccaccatgcctggctaatttttntattttnagtanaanacggantttaancnttttggccangcctnattttnaactgttacctcaggtnaaccaccttcctnaacctcccaaaatgctggggattacaggcataaaccactngcccccnancccaaanttttaaaaaaaggtgaaaagcttttnc

SEQ ID NO: 929 - DNA, 563 bp, Homo sapiens
  misc_feature 421, 422, 424, 436, 449, 455, 461, 463, 500, 503, 522, 523,525, 535, 559: n = A,T,C or G
actggtgcacctcctacatatcaaggaaaagcaaaacacagaataatttaatatgctgaataaaatttgtttacaccagatactatacatcatactgatggttgtccagtatgaattttaagggtattatgttagattctgcaaaatatattcctattattcacaagtgaggagtcaaagtccaactattcaaatggccataaacaaaaatgttgcagaaggtatagaccattaaaaataaaaaagtcaggagtggggcagctgaccccttaggagcctcaggaattccttttaatgcaagatagatggcaagagctggctttttggttaagtcagccagttcggaaacccatcagggagaagttatcaggtgtcaacttgtaaggcagatgacattcatcaaaagcatcttaagaagtannantgatcacagaanggaaagcattcangatttncactancnacaaattgcattaaccatgtctaggccatttgacagntgntattcttaacgctccatanncntgaatcacanggccaaatgagccgactaactctnacat

SEQ ID NO: 930 - DNA, 463 bp, Homo sapiens
  misc_feature 411, 413, 419, 425, 429, 436, 443: n = A,T,C or G
actcgatgtgtaatgaaacctgaaataataagataataagaaaagcaataattttctaaagctgtgctgtcggtgatacagagatgatactcaaattataataaaactcttcattttgtgaattatagaagctactttttataaagccattttttttagggaaactaaggagtgacatagaactgatgaatgagcaaaagtaagttttgctggatttttgtagaactctggacgttgaggattcattatgctgtggttaactttaaatatttttgaattccaaatatctgaattaatgagccttgtctttacaaatatgtgccattgtgcaacatcggtggattttctaaaaataatgtaaatgtcttctattaaatgttgagtgcaataaaatacagaagaattctcaananataaantaatantaanaaaagtncctgccngggcggccgtcgaaagggcg

SEQ ID NO: 931 - DNA, 544 bp, Homo sapiens
  misc_feature 420, 532: n = A,T,C or G
acattagaaaactacttgtgacattatttctaagtgcaggagagcagctcctggtgggagagtaatgaagttgtttgtcatagtgtatgccaaggatttacagcactctagaattttcacaactcttccatgttagtgaatgacattaggtaaatgttgtatttgcctactctcagctatcagatgtgggatttcaaactagaaacaaataaagcatacactcaaccaacaagggtagtgcaagtgctaagtaaacagaatgacatggaataaattcatagttgccaactagtgaatgcttcagcagggagaccctgattttatgatgtctgtgacttgcatccctgttctcaaatgaatactgtcactgctccatgtcagctacaatgaccggaaaaggctgctggggtgagggctgantgaatgaggaagatgacaggaactcattttccaaacaagtggttcaatttatctgtcacatctgtatatagtgtaaagtctgatttgttaacaagatctcaaacctctccanaaaaagcaggtc

SEQ ID NO: 932 - DNA, 519 bp, Homo sapiens
  misc_feature 439, 471, 482, 499, 518: n = A,T,C or G
acgcgggggggaactgcaattggtggctttgaaggcgcggcgagcgggaacagctcttgaggagtgagactgcaggagatgtgggccgtgccaaagagatggatgagactgttgctgagttcatcaagaggaccatcttgaaaatccccatgaatgaactgacaacaatcctgaaggcctgggattttttgtctgaaaatcaactgcagactgtaaatttccgacagagaaaggaatctgtagttcagcacttgatccatctgtgtgaggaaaagcgtgcaagtatcagtgatgctgccctgttagacatcatttatatgcaatttcatcagcaccagaaagtttgggatgtttttcagatgagtaaaggaccaggtgaagatgttgacctttttgatatgaaacaatttaaaaattcgttcaagaaaattcttcaganagcattaaaaaatgtgacagtcagcttcaganaaactgagganaatgcagtctggattcnaattgcctggggaacacant

SEQ ID NO: 933 - DNA, 652 bp, Homo sapiens
  misc_feature 27, 139, 166, 185, 276, 302, 378, 468, 523, 573, 611, 622,624, 630, 644: n = A,T,C or G
acttttttttttttttttttttttttngaacccagttacaagaaacaggtctgactttcttgcaaagattctgcttcctcctcaaagttcaatctctctgctgatcaccgccatctgctgttcttctatggtgcctaanaactttccaaactaccaagcccctaanactgtggtttggattccanaaagcccaggtgcctgcctggcaacacacaggccttcgtcctctatttccttgttggacatcataaggatcattttgttgcatcccctcanagcctcccttaggagcgaatatgcanaattctcttgaatgtcttcttgaagttctcattgcacaaggggtaaatgagggggttcagcgtggagttgatgtancccacccagatggtgaacatgtgcaaatgttcattgcaacagttcttgcagaaggcaatgaccatgaagaagatgaaataagggatccancagaggatgaaggctgccatgataaaacccaactgtttggcggccttcctttcgnggttcatgtgcaacccaaatacatactgtcttgaatgcgagcggagcctnttccaagtaaaacttgatgtaatccaggcctgggttanacccactcctnanttgccnttgcctggggctgncttttggg

SEQ ID NO: 934 - DNA, 567 bp, Homo sapiens
  misc_feature 376, 540, 546, 553: n = A,T,C or G
accgagcactttattcagtgcatagctttaagccagtgttggattcactaagtggacagtcagtctcccagctctctgccttccccaaaagggtcgtagtaggtcacccttctacagcagctaactagagtcctaactaatgggatccagcagggccatttctccagagggccagtatcctattaggagactcttggaattcttaggttctactcaagagtggaaggaccaatcacctctgatattctgtggaaggttttggggtcaaattctgccctctgcattctgtgcaacttgtataaaagtcaagttagtattacatgaatttggggtagggttagtgctttgaaaaaatgttgaaccggctgggcgcggnggctcacgtctgtaatcccacactttgggaggccgaggcgggtggatcatgaggtcaggagttcgagaccagcctggccaacatagtgaaaccccatctctgctaaagatataaaaaaattacctggcgtggtggcgcacgcctgtaatccccactctcgggangctgangcagganaaattgcttaacct

SEQ ID NO: 935 - DNA, 650 bp, Homo sapiens
  misc_feature 189, 219, 270, 399, 476, 551, 555, 569, 587, 597, 618, 628,639: n = A,T,C or G
accctggcattgctgacaggatgcagaaggagatcacagccctggtccccagcaccatgaagatcaagattattgctcccccagagcggaagtactttttttttttttttttttttttttggggataaacattttatttcaatttaaggtagtagcaatacaaaataagttttgataattataaagtanagacaatgaaaaatcccaccctatttttanaattttaaaatattgagcatcattctgtcctgatgggtttttatgtaaagngggaatttacatgacaccagtatcttggtaattcactttttttgaatgctacatatcccaatcaccatatattaaattctctattttcttcaaagtgctattgccacaagagactgaacgatacagcantttaaaaaaagacccacaaactaaattgtaatgtcttcaatatctcaattactgttttttaaaaataaaaactgcantagtgaatttctttaagttcttgctacatgattgaatgggagataacctcaacaatttttattcttaggcatgancatnttcatgctaagggnagtctatacttaaaagcnttattttttnataaaacctggggcacaaatntttaaaatcntaaataatgcnaaataaaatca

SEQ ID NO: 936 - DNA, 361 bp, Homo sapiens
acatgagatcaaactgtatacagagctgccataacgtataagttaagccatgtatatacattaatacatacatatatgttccaataacatgttgaagatttcccaggtttttttttctttaagttattgctagacatatcaaaacacagtataaaactggtcatcgcaacacccttctgcagtaatgatgagagtgggctaggaatgtgatgaaaggcacagaattcataagacttgagtaagtagatccaaatttgttatcactaatggctcaaacaatgtggagccactgattttctgaagtgaatataagaaacagtagttaatagtatttatccaggcttctagtataagacattgt

SEQ ID NO: 937 - DNA, 654 bp, Homo sapiens
  misc_feature 629: n = A,T,C or G
acgcgggggaaaatcactgtttagtcttctggaggctatgatttttgccttactcccaaagccacggaagaacgttgctggtgaaatagtcctcatcacaggtgctggaagtggactcggaaggctcttagccttgcagtttgcccggctgggatctgttcttgttctctgggatatcaataaggaggggaatgaggaaacatgtaagatggctcgggaagctggagccacaagagtgcacgcctatacctgcgattgcagccaaaaggaaggagtgtatagagtagcccgaccaggttaaaaaagaagtcggcgattttccatcctaatcaacaatgccggaatcgtaacaggcaaaaagttccttgactgtccagatgagcttatggaaaagtcatttgatgtgaatttcaaagcacatttatggacttataaagcctttctacctgctatgattgctaatgaccatggacatttggtttgcatttcaaagttcagctggattaagtggagtaaatgggctggcagattactgtgcaaagtaaatttgcagcctttgggtttgctgaaatctgtattttgtaaaaacatttgtccaaaaacaaaagggggatcaaaaccacgattgngtgcccctttttttataaaactgga

SEQ ID NO: 938 - DNA, 426 bp, Homo sapiens
  misc_feature 213, 282, 293, 321, 328, 330, 336, 343, 351, 354, 358, 364,394, 399, 405, 413: n = A,T,C or G
cgcggcgaggtacccaagccagagctgagacatggctccccagatggactggctgtggtcaggaaaggcctgtagagggagctgagggctcagaaaatacctgctccgggtgcctgggctcaagttctcattccatttctttgatgccactggccactgtatctgcttttgtaaaaacctccaaaaagttatacatcaggtatctctagtcancttcctccgctgccacctctttgccacagatgagtgatcactgtgaatggtggtgaccaggttgggcanggcaggggctngtcctaagtgccttaacccaggcccctngcccatnanaccttnaaacagnaattttcnctncttnttaatncatttccaattcagtttaactggggggtantgttnatacanaatagctngattagaaaggaa

SEQ ID NO: 939 - DNA, 375 bp, Homo sapiens
  misc_feature 112, 113, 194, 197, 241, 249, 308, 353, 358, 365: n = A,T,C or G
cgcggcgaggtacagtgacctgcagaacttagccaagagtctgggtctccgggccaacctgagggcaaccaagttgttaaaagccttgaaaggctacattaaacatgaggcnngaaaaggaaatgagaatcaggatgaaagtcaaacttctgcatcctcttgtgatgagactgagatacagatcagcaaccagnaanaagctgagagacaagccacttggccatgtcaccaaaacaagganaaggtgcnagactgtccgtgtggaccctgactcacagaatcatgataagcaggaaagccaggatctnaaagcttctgcaaaagttccttctccaccatacgagcccaagaanctgtnaatgctnttccttaagt

SEQ ID NO: 940 - DNA, 269 bp, Homo sapiens
  misc_feature 42, 168, 174, 206, 214, 218, 219, 222, 231, 252, 255, 260: n = A,T,C or G
actgtctctccccagaaggccttcaaggttaacacacaacantgccctgccccttgattactggcctgggcttacaaaggcgaatactcagacagaatcaggaggcactcacgcttaatgaaggggcagggatcttgcagccagcagattgcctggcctatattcctntccctnggactctttctgaattgtcttttgggtgtggntagctgcnaatnncancatacattnctttatattcagtaatgaaanatngattncttattgca

SEQ ID NO: 941 - DNA, 240 bp, Homo sapiens
  misc_feature 90, 130, 169, 188, 191, 195, 206, 209, 220, 233, 238: n = A,T,C or G
actcatcactctgtccatacgcgatcacaatatcctctagttcttccatcacagtctgcgcacatttggtcatcagctggagagcacggntgtcattgggttttgcaaagttgtgcttctcatcaaaccnatggaaattccggccgtccagccgcactaccacccagcngtgtgccagggcaggtgtngtnagcntctaagccctnacntacctcggccngtgaccactctangggcnat

SEQ ID NO: 942 - DNA, 520 bp, Homo sapiens
  misc_feature 138, 164, 214, 222, 233, 283, 329, 334, 351, 391, 397, 400,404, 409, 425, 433, 435, 451, 453, 459, 462, 482, 491, 500,509: n = A,T,C or G
acgcggggacagcgcgcggaagaaaaaccagcaagaaggcggcgggggaagatggcggtcctggggtagagtttgcaagctttctgactaggctagtcgagtaactattcgggtcatggcgtcaaactcaactaagtntttcctggcatatgccggctatggcnaacaggaactggatgccaactctgcccttatggaattggacaaaggcctnagatctgncaaacttggcnaacagtgtgaagcatttgttcgctttcccagactttttcagaagtatccnttccctattcttatcaattctgcattcctaaagttagctgatgttncaganttggaaataatttcctnaggctatgtgttcttaaattacccaacaagttgataaacnttgganganattntaagntgattaatttgtgaanacaatttntntgcattcatataatgncntggggnaanaccatttccctcgattttgnttctggatnattttcttnaatgaaatnttttttaatat

SEQ ID NO: 943 - DNA, 255 bp, Homo sapiens
  misc_feature 127, 134, 158, 209, 211, 230, 232, 239: n = A,T,C or G
ttaaaaaacttcgaaagtcacagacacagaatttaggaagctgaaggctgagagtctcccttctcacttaatccatgctttattttgcattcctcacaggtaaggaggcagtgcctgttatgctgtngaccaanaccagccccacggagctgatcttnaaaaaaatggaatttactctggcatactcctatgtatgatacctttccaangncaaatcccaatagacctgnangtgcaantttgggcaatgatcca

SEQ ID NO: 944 - DNA, 647 bp, Homo sapiens
  misc_feature 147, 271, 273, 284, 291, 296, 314, 315, 319, 321, 325, 327,330, 352, 359, 381, 397, 401, 405, 407, 426, 440, 445, 448,449, 459, 460, 462, 463, 473, 486, 500, 507, 515, 521, 533,539, 554, 562, 568, 586, 596, 607, 613, 623, 639: n = A,T,C or G
acctcttcctgttcgaatgggttatccagtaaaaaagggcgtgcccatgcaaaaggagggaaatctagaacttttaaagattcccaattttctgcatttgactcctgtagcaattaaaaagcactgtgaagcccttaaaagattttngcacttgagtgggccagccgcactggacaagtgacgaagaaatgtgaaaaagcattttccaatttgaaattgacagcacttgattatgtttcatcaagaaccatctgttcggaaccccagaacncnaattttattcntttaaantaaanctttccagtttgaatttnnattnancacncnaanaaaaaaaattaatttaaacttntaggaanaaccaatacttcaaaacccaanattgtgcttaccatcnaaanaaanangtccctttaaggaggggcnaaattaccattatnccagngtnntctactaacnntnnttttaccatnagtctttggaatnctgaaaaaatgggnaaaaaantaagactnaagccngacattgggaanaatttnttatggggaaaaatngcttatcncaaaanaaaatattcttggaaacncttcttccanattaaaagctncttganaaaaatatgngaaattaaataaaganaagctcct

SEQ ID NO: 945 - DNA, 650 bp, Homo sapiens
  misc_feature 474, 494, 512, 517, 521, 536, 544, 589, 611, 632, 649: n = A,T,C or G
actggaaactaaatcatatttcttccctccaaatttcacccattcctgactttgaatcaattgcagaaatgcaggtgtgttactttgttgatcaataactttggaacaattatggatcaattctatggtcactctgaattttcatgtcattaatcacataaaaattgataatacctcattctgtattacaatatgattttattttgccaaaggcaagacacctatagttgagctgtattttgggggattgggtgaggaaggacttctatcttatctcaacaaaaaactggccagtatttttgttaatgtaaagcttccttttctttctaaaaaatagtaacaaaattatttttcattggcctattctgttcttgtgtctaaactaacattacattaatttttaatcttagtttctgataaacacaagccattcctatcaaaaatattatttatttcagtcaaattttaccaaantaacaaaagaccatttattntccgtttttttttattantgaancatnatgattttttgacangcttgttncctcgtccgtataaaattttttccaatcaaacctacttttttccntactctgggcatatttttttgngaaggttatacacatttgaanaacccttaaaaatcccna

SEQ ID NO: 946 - DNA, 253 bp, Homo sapiens
  misc_feature 232, 235, 248: n = A,T,C or G
acgcggggaaatcagcaaactgggaatttctggtgacatagacctcaccagtgcttcatataccatgatataatctgaaaggggcagattaaaaaaaaaagaatctaaaccttacatgtgtaaaggtttcatgttcactgtgagtgaaaatttttacattcatcaatatccctcttgtaagtcatctacttaataaatattacagtgaaaaaaaaaaaaaaaaaaaaaaaantanaataagaaaatanaacac

SEQ ID NO: 947 - DNA, 649 bp, Homo sapiens
  misc_feature 411, 524, 538, 539, 560, 576, 589, 599, 600, 602, 603, 617,632, 639: n = A,T,C or G
actaaggggacaatacaccaaatttgttgagtttacaatcaagtctactaaggttggacttccttatcagtttggcgagtcccagggcagaataatcatccatctacaggtctctgtttcctctccctccacagcagtggagagcatcccagtgtttggggcactgtgttcctcttcgtccctgcaccagaccctggaagccttggccagagacctcaccaaactcgacttgcggcgctgggccagcttcatggatgctggagtggagcacgatgacgtagcagagctgctgcaggagctacaaagcctggcccagtgctaccagggtggtgacagcctcgtggactaaagttcccagtgtgggagaaaggagctagtttgcaataaaaacagctggatgcaggagcccantgtcttcatgcagaggagctcaatgtcgcgggactagctacaccaacatatgcactttttacatttagaaaacactgtgattagaccacagaacaattaatatgtgccatcanaccaaaaaaaagtnngagaaagggagctgaactccntcttcgatgctatttncagaaggacattntgtaaaagtnntnnataaaagaccttgnattgatgccttaggntggcaanaacccctggg

SEQ ID NO: 948 - DNA, 650 bp, Homo sapiens
  misc_feature 123, 340, 373, 475, 490, 613: n = A,T,C or G
actttttttttttttttttttttttttttggatattacaccataggttttattaacgataaatgtttgcattacttttaaaagcttagctcttactaagcattctttaacaaaagctaataancaagaaatcatttgccatacggaaactatattcacaaacaagactttaatccaatattgaaagctaaagaattagaaaaaatacaaaacactgctatgagtcaattgaactgctatcattgaatttgctgcatttagaatgacataaacatactgaacataaaaacaattttatggatttattctataagactagcattaagaatgacatacaattngtgatttcctttaaaaataattttttacaacanaatccatttgaacaaagggtctttttttttcccctcatttgaggggaagacaatctatgtttcccaaacagatcctcctttcatactaaaatagcaaactgnggcctccatctcctnttcccagatgctacttatagatgactttgcataataacttaattaagaattactttttctggtaacagtgtcaacggccataaataatcagtttttaaaaaacaaacatcaaagtgccaaatntaaaaaaacttcctttaaaagaattacccaaccccag

SEQ ID NO: 949 - DNA, 317 bp, Homo sapiens
acacatcaagtcagaatgggctagcccatcagggaagcagcggtagaagaaatctgggcgtggcctccctacgatcagttttattgtgttggtaaagacgccattcagagccagggcaaggctggcagccaggcaggcttgtctgctgtctcttgtgtctgccttaaacatcggcttggtggggaaatactccgcctccacgtaggggttccggtagagccacatctcctccggctggatgagtctctggaacggggggagcagctccgtcaccaggaaggccgcgaacagcgcgagccgcacgcccacccccgcgt

SEQ ID NO: 950 - DNA, 220 bp, Homo sapiens
  misc_feature 188, 193, 200, 210, 211, 219: n = A,T,C or G
acttccagccaacctcgtgagccaggcgccccagataggcaaactttcttgtaggcttcagacgcacgaccttgagggcagcaggaaccaccatccgctttttctcgcacggtccgccagaagatgcggctgggggcccggaagtggtaggggcctcgggaagggttggtgttcatccgcttgcggangaaanccaagtnccttggcccnnaccacgcnt

SEQ ID NO: 951 - DNA, 562 bp, Homo sapiens
  misc_feature 264, 348, 367, 413, 419, 422, 431, 450, 470, 500, 502, 508,517: n = A,T,C or G
acgcgggggccttacagttgctgagaggaggcgagaggcgggggcgctagggccgagatcatgtctgactgggagaggtttccttggcagcagaggacgctaggtttgggatgaaagaagctgggcagatgcaaaatctggagagcgcgagggccgggcggtcagtcagcacccagactggcagcatgaccggtcagataccaaggctttctaaagtcaaccttttcactctgctcagcctctggatggagctctttccagcanaagcccagcggcaaaaatctcagaaaaatgaagaagggaaaagcatggacccttaggagataatgaaagagaagacccagagtntctactgacaaaaagacangtaaagaaaaactggtcttgtggtgggtgaaaaacattaaaattgntgggtntcnactgttctnagtgaaaatttacattccngggccaaattgctttttatnaaacattgggttaagggctgaaaaactgtnanctttantttttccanaaaaccatgttttgctttgtttgaaaaatgattggaaaatggatt

SEQ ID NO: 952 - DNA, 558 bp, Homo sapiens
  misc_feature 45, 125, 133, 145, 159, 183, 207, 212, 215, 222, 232, 237,244, 247, 249, 270, 321, 322, 356, 361, 372, 386, 387, 388,391, 393, 395, 403, 416, 426, 446, 447, 453, 460, 462, 463,479, 481, 484, 485, 486, 491, 495, 496, 500, 513, 519: n = A,T,C or G
  misc_feature 525, 529, 530, 534, 553: n = A,T,C or G
acttttttttttttttttttttttttttttttttaaatggcccangctgccttcctgtcctcccatcctgcatcctgctttctgttccctggataccgtaggatggttttatttcagttcatgcncaaattantctggacactgnggagtcataacaanagtgggatggaggttccagggcantcattttctttggagggaagcttnaaaantangttaaancaatgcccanaaaanccactgnttntnattcccatccccagcaatganctaaaaaccaacctcagccaaaaagagggtctttgatcacagagggtcacnnagtgggatgtgattagtgggtttggggatggagncccanttaaaccaaanggcaaagggatccnnntantncnggcttaangggaatggggttnaaaattaagnggtttgggggacttagggcnngggganccccaangnngaggaaaactaaaaangntgnnntggcnaaanntacnttgggcatttaancctgcntgctgntacnnctancccccatttatgcctttgntaaat

SEQ ID NO: 953 - DNA, 625 bp, Homo sapiens
  misc_feature 374, 442, 463, 519, 524, 557, 566, 571, 577, 583, 590, 594,603, 617: n = A,T,C or G
acagttgaaagcagagtgtaacaagggatatgtcaaggtaaagcaggtaggagtcaatcccaccagcattgactcagtcgtaattgggaaggaccaagaggtgaagctgcagcctggccaggttctccacatggtgaatgaactttatccatatattgtagagtttgaggaagaggcaaagaaccctggcctggaaacacacaggaagagaaagagatcaggcaacagtgattctatagaaagggatgctgctcaggaagctgaggctgggacagggctggaacctgggagcaactctggccaatgctctgtgcccctaaagaagggaaaagatgcacctatcaaaaaggaatccctgggccactggagtcaangcttgaagatttctatgcaggaccccaaaatgcaggtttacaaagatgagcaggtggtggtgataaangataaatacccaaaggccccnttaccattggctggtcttaccgtggacctccatttccagtctgaaggctgtggccnggganaccttgaactcttaagcatatgcacacttgtgnggggaaaangtgantggtanattttnctgggtncaanaaactccgnttccaattggcctnccgccttt

SEQ ID NO: 954 - DNA, 658 bp, Homo sapiens
  misc_feature 315, 372, 374, 423, 437, 457, 467, 470, 490, 509, 514, 520,523, 541, 546, 547, 564, 568, 574, 578, 595, 598, 614, 615,616, 631, 641, 652, 653, 657: n = A,T,C or G
acctaatgaaaagatctccaagaggtttgtctcattctccttgggctgtaaaaaagattaatcctatatgtaatgatcattatcgaagtgtgtatcaaaagagactaatggatgaagctaagattttgaaaagccttcatcatccaaacattgttggttatcgtgcttttactgaagccaatgatggcagtctgtgtcttgctatggaatatggaggtgaaaagtctctaaatgacttaatagaagaacgatataaagccagccaagatccttttccagcagccctaattttaaaagttgctttgaatatggcangagggttaaagtatctgcaccaagaaaagaaactgcttcatggagacataaagtctncnaatgttgtaattaaaggcgatcttgaaacaattaaaatctgtgatgtangagtctctctaccnctggatgaaaatatgactgngacctgaccntgnggcttgttacattggcccanacccatgggaaacccaaanaagcngtgganganaatggtgttattctgacnaggcnnacatatttgcctttggncttncctttngggnaaaatgatgaacttttntcnttcccacacatttaannntacagatgatgatgnatgatgaaanaaaacttttgnngaana

SEQ ID NO: 955 - DNA, 654 bp, Homo sapiens
  misc_feature 396, 426, 435, 437, 441, 484, 526, 539, 566, 569, 572, 573,578, 589, 595, 608, 609, 625, 628, 630: n = A,T,C or G
acaactcttgctaatggaatgctataatgcacaaggtcaaggatttaataaattctaaaagtgtctacatatatcagtgataactgtattattagaaatataaatgtatagaaatataaagtatatggtattaaaaacagaccttgctaatataaacatatataaagtatgtcacttctcctgtaataacagcataaagatcgatctacagtttgcccttcgcctggcactcttaaaccactcctccaatggtcaatgttgaccttgaatcaacagccgctgaacccaggagacccccacagatgtgtagattcagcacctagagggcccccctaccctcttgtgctgtgtgttcccatgactccagaaataattaatcgcaacttgcattttaangtccacaggcaagtttgaaatctaacctanaaaaagtgnangcanaggcaaaatacgcgggaatttgttataaaagcaacaagatttncttaaaatgcttccagttcaaagtcaaaattaaggtgacatnaaggtcccaccancttttacagaagttggggatgttttgntgnttnnctttnaaaaaagaaanaatctncaataaacatgtnnatttgaaaaaaaatcntgngntaacttttttggacccatccccaa

SEQ ID NO: 956 - DNA, 273 bp, Homo sapiens
  misc_feature 126, 175, 190, 241, 255: n = A,T,C or G
tgctgaagcttcacagggcggccaaactaactcgctgatttttgcaagaccacagtgtaaaggtcggatgtccacctgaagaaggggtgggtgcaactctctgggtgctgcacacaccatgaccancctgggcatgcatcaccccagctcccatccattcacactggttgccttngtgaggtccattttnagagggctttcataggcctttttaatgaaaaaaaaaaatatctggtctacnacgaacctaagatncatacacctcctatttat

SEQ ID NO: 957 - DNA, 600 bp, Homo sapiens
  misc_feature 386, 449, 451, 498, 503, 508, 510, 514, 544, 553, 562, 563,566, 572, 582, 589: n = A,T,C or G
accagcacatgaagcccttctacaaaattcctgacggactgggaataaaaattcctagtgacagcccactccttctcaggcaggtgtgattgtttgaaatctctcccaatattgagatgaaacctgcttccctgtaacttccctgtaattctgtgggtcccttgtagccacagagaaggcagcaatcagtaggggaagtgctataaaaatatactatcccggccaagcgtggtggctcatgtctgtaatcccagcactttgggaggccaaggcgggcagatcactttaggtcaggagttggagaccagcctggccaacataatgaaaccccgtctcgctgggtgtggtggctcatgcctgtaatcccagcactttgggaggctgangtgggtggatcacaaggtcaagagatggagacaatcctggccaacatggtgaaaccccatctntntaaaaatacaaaaattagtttgggcgtggtggcgtgtgcctgttaancccancttcntnggangctgaagcatgagaattgctttgaacctgngaggcaganggttgcaanngancccatnatcacaccancttgaanttcacctgggt

SEQ ID NO: 958 - DNA, 647 bp, Homo sapiens
  misc_feature 321, 418, 474, 502, 614, 621: n = A,T,C or G
accacaaagggacccaaattcagcggtctgtgcctacaaacttcattaataactgcttgcagattggcagctatctggtcacttgacatatccaatgttgctattttggtctggagaaagttctccctttcttcatctaccttaatttcatgtccatttttaaataattcaagcattttggggatgtcacggccaatggaatcttgaaaatttaattccatgcactgaaaaatgtgaattatttaaagggtaagaaatagaatgaagactgtgccactgaagagacatcactcccaccatgctcaagcaagtcttccatanatgaatcaatgtgaggaactcattacatagagagcacggcataccctcagcatacattattcctaggattatctcagcagttgttcagttggctcangagcactacagctataagtgaaagccaactacccataggccagttttaaaatttcnagaaaagctttggatattttttattcantttcttccttaatcgattaaagttcaggcattatttctggaacagctacgtaaaaagtctgcaacaatttcatcatcccaaatcttctgtatcagaactagtgcctcctgcnaatgcancttcattttcttccgctattttacct

SEQ ID NO: 959 - DNA, 596 bp, Homo sapiens
  misc_feature 315, 319, 330, 332, 366, 373, 378, 379, 384, 395, 408, 409,437, 438, 444, 463, 475, 495, 500, 506, 525, 535, 543, 553,564, 569, 571, 573, 582: n = A,T,C or G
actggagctatactgacatcagtaatagtgacacccctggatgttgttaaaattagactccaagcccaaaacaacccactccccaaaggaaaatgttttgtatatagtaatggactcatggatcatctatgtgtctgtgaagagggaggcaacaaactatggtataagaagccaggaaatttccagggaacattgagtgatggcagttcctgccacagttatttattttacctgctatgatcaattaagtgctcttctgagatctaagttacgagaaaatgaaacctgcataccaattgttgcctggaattgtanccanatttggtgcantnactgtgataagtccactagaattgattagaaccnacatgcnatccnnagaantttttcttacnttggaactgcatnngatttgtcagcatgaaaagtatcttgannatggtnggatttccctttgggaagnggcctgggctcntactgtttcttatagatgtncctcnggccgngaccactcctaagggcganttccaacacnctggctgncgttactagnggatcccactncggtncnanctttggagnaatcatggggacat

SEQ ID NO: 960 - DNA, 284 bp, Homo sapiens
  misc_feature 216, 282: n = A,T,C or G
acgcgggattaaaaatttcttgtatttcttgtgcattaatctgacgataatttccctgtatattatgttcatttagctgtttgtaatttttgttaattagatcaggttgtctgcatttgttggtgtaagtgaacatcatcacagttatcctgagttgagtttaagccaaatacatgcatagaaaagggtcttcctattaatggaagaaggtaattnttaggatgtgtattatttcagttttgtatgtttaacttttattaaataaagtgtttttaaaaccanat

SEQ ID NO: 961 - DNA, 538 bp, Homo sapiens
  misc_feature 264, 301, 473, 496, 501, 503, 519, 529: n = A,T,C or G
acaaatccagcaaaactggaacagaacagggtaagaaagcacatagcaactgctttttcaacagtaaattttgactattcccctaaatatctacctagtggcttaaaactaaaactatggtctttggctttaaaaagaaagtcaaaaaattttgacttttaatgactgcacaattctaccaaagccagtgtttacctgggtattttttgtcacctgtagtttacattccctgctactgttaaagaaacagaattctacagtatncaattctgtatattgtcttttaaggtttttcaatcangactcactactactgcttgaggagtccgttgacataatctctacatcatcttcattttctttattatgcccaggaggttccaacaaaaaagtcactactatgatttggtggtaacatatttcatcgacatgtcattttgactgccaatggttactgtgggagccaaaggacntctggcaatcttcctgctgcaangtgcntnttcctggtaaatggcnattcacgccntttagtgga

SEQ ID NO: 962 - DNA, 645 bp, Homo sapiens
  misc_feature 289, 489, 490, 492, 508, 525, 530, 532, 542, 544, 569, 571,609, 613, 614, 616, 618, 624, 631: n = A,T,C or G
acgcgggatatacactggaacacatgcatgcttttggaatgtataattacctgcactgtgattcatggtatcaagacagtgtctactatattgatacccttggaagaattatgaatttaacagtaatgctggacactgccttaggaaaaccacgagaggtgtttcgacttcctacagatttgacagcatgtgacaaccgtctttgtgcatctatccatttctcatcttctacctgggttaccttgtcagatggaactggaagattgtatgtcattggaacaggtgaacngtggaaatagcgcttctgaaaaatgggagattatgtttaatgaagaacttggggatccttttattataattcacagtatctcactgctaaatgctgaagaacattctatagctaccctacttcttcgaatagagaaagaggaattggatatgaaaggaagtggtttctatggttcctctggaggggggtcactatcaggnnanaaaaatcaagataatnaaaaaatttgaaaattnttaancngtgatatttntncgttggaaagtcaagtgccacattntngctgctattggaccctgatggaaaatggtctaattganttgnntncntacagngtctttnacattttgttcaag

SEQ ID NO: 963 - DNA, 286 bp, Homo sapiens
  misc_feature 56, 60, 182, 185, 189, 211, 212, 214, 231, 241, 266, 274: n = A,T,C or G
actttgacttactagggtgattcaaagtttcaggaaaaagaaaattcccagtatcntttncttaatcttattaaacccaaacataagaatgccaaaaaatacagagctcacattttgctggcatacatttccaaatttttaatgcctccctgacaggtgaattttaaggataaaaaaagcanacncttncaaaacattccttgtgatgaannanaaaaagccctggataantggccagctncactggatttttgtctaaattcttncattaacntttcagtcttca

SEQ ID NO: 964 - DNA, 648 bp, Homo sapiens
  misc_feature 357, 359, 390, 404, 416, 425, 432, 434, 447, 476, 485, 494,509, 512, 529, 537, 554, 563, 571, 576, 583, 589, 598, 604,606, 612, 615, 617, 635, 636, 637, 641: n = A,T,C or G
acagttgaggaactcagtaaccagatattatctgcacggagttggttgcaacaggaacaagaacggatagaaaaagagcttttacagaaaattgatcagctttccttgattgttaaggaaaacagtggagccagtgaaagggatatggagaagaagctcagccagatgtcagccaggcttgacaaaatagaagagggtcaaaagaagacttttgatggtcagagaacaaggcaagaagaggagaagatgcacgggcgaatcaccaagctggagttacagatgaaccagaacatcaaggaaatgaaagcagaagttaatgctgggtttacagccgtctatgaaagcataggatccctnangcaagttctcgaggccaagatgaagctggcngggaccagctacanaagcaaatccanctgatgcanaatccanancccccatgtgaanggagctgggacaaggtccctaaaagacangttttgccngtaggggcntaggagccgggtacnctntgttgccaaggccttgnttgcattnaggattgtccatccatngggtgcatngtgccaanaaatntgttttnatgggncctaaatgnttaccntngggatnttngnaaattctcttctgttaannntatnaaaatct

SEQ ID NO: 965 - DNA, 212 bp, Homo sapiens
  misc_feature 22, 30, 47, 54, 55, 56, 93, 107, 114, 158, 168, 179, 182,210: n = A,T,C or G
acctatttctaaacaatgattnaaagtctntatcccctaagcggagntgttgtnnntctccctaatctatcacctgcactacttgagaaaatntaaagtgtttctanttaaatnatttccttcttgagcgatctaatgtttcttgtaatattgatgancctactaatnatcctgctgtnctntaattaacgcttaatgaataaaatggcnct

SEQ ID NO: 966 - DNA, 569 bp, Homo sapiens
  misc_feature 285, 286, 292, 315, 317, 462, 466, 467, 471, 479, 480, 494,502, 533, 556, 558: n = A,T,C or G
acgcggggacttgtaaggaggagagaagtcagcctggcagagagactctgaaatgagggattagaggtgttcaaggagcaagagcttcagcctgaagacaagggagcagtccctgaagacgcttctactgagaggtctgccatggcctctcttggcctccaacttgtgggctacatcctaggccttctggggcttttgggcacactggttgccatgctgctccccagctggaaaacaagttcttatgtcggtgccagcattgtgacagcagttggcttctccaannggcctntggatggaatgtgccacacacancncaggcatcacccagtgtgacatctatagcacccttttgggcctgcccgctgacatccaggctgccaaggccatgatggtgacatccaatgcaatctcctccctggcctgcattatctctggtggtgggcatgaatatgcacagtnttcnnccangaatcccnnagccaaaaacagantggtcggnagcaggtggagttctttttcattcttggganggcctcctgagattcattacttntncctgaaaatct

SEQ ID NO: 967 - DNA, 207 bp, Homo sapiens
  misc_feature 28, 78, 91, 93, 109, 116, 119, 120, 139, 146, 159, 183: n = A,T,C or G
acagcgggattaaaaatttcttgtattncttgtgcattaatctgacgataatttccctgtatattatagttcatttanctgtttgtaattntngttaattagatcaggntgtctgnatnngttggtgtaagtgaacatnatcacanttatcctgacttnagtttaagccaaatacatgcatanaaaagggtcttcctattaatggaa

SEQ ID NO: 968 - DNA, 133 bp, Homo sapiens
ggtacttaaagatgggatggagttgtaaagtgcttttataatacaatataattgttaaaggcaagggttgactctttgttttattttgacatggcatgtcctgaaataaatattgattcaatatggcaaaaaa

SEQ ID NO: 969 - DNA, 378 bp, Homo sapiens
  misc_feature 58, 132, 315, 327: n = A,T,C or G
actttttttttttttttttttttgctgtcaaaacgtttattgcaaaatggagtcttanaacaaaggaaagcaaagaaaagttcacatcaaaatgaaatgtatgacaccaacttggatttctgaatacactgnggactttgtgctggaatatcaaattccaactataaaatcagtaactgaaatagtcttaccacacaagagtaaaatttaatcttccatacaaacattatacaagatatttggcataggacttgctcagaataacattgcaatagaataattgagaaaaagtttttgttaaaaaaacaataaagngataatgccatntattcaaagctcacactcaaagaatataaatattttctattatttagtacc

SEQ ID NO: 970 - DNA, 501 bp, Homo sapiens
  misc_feature 126, 257, 258, 269, 284, 315, 324, 339, 349, 350, 360, 365,371, 395, 415, 419, 428, 437, 453, 458, 460, 491, 498: n = A,T,C or G
ggtaccccagttgttgttagtggggactatgatactgtaataatatttttaaaaatttacatcaagagaggcagtcattcacgatggttttgtgccagctctttttagggttttggatcacattanagatatttagaacatattaccctgtgacttacgtaggaaacctaatatgctgagtatctggcacttgaattcctgcttttattgctggaggtccacatctgtggttgacctctgttattgttgaaaaaaannaaaatgagganaaggttctccttctncgatgcctgtgaggagccaccaacatttgangctatgganctcattggtaaaccnaaaccctacnntgagattggngaacnagtctnttataagtgtgaaaaaggatactnctatatacctactattgccncccntctatttgngatcggaancatacatggctacctntttanangacccctgcaatatagaaacatgtgcatatntacgggntct

SEQ ID NO: 971 - DNA, 499 bp, Homo sapiens
  misc_feature 358, 460: n = A,T,C or G
acaacgctcaccctgaacatgaattagctctgacacatcataaaccaaattaggtcaatacaagcttatctaaagagatattaatactttcttcaattaaacatgcttggaggaatagatgatagaaaaaaaaaatcatgcttcctaaaatgctgtatatgagaaagtaacttggcttttaaagaaaaatatctctttaaatacatggtttaataaattacattccaattgactcaacattttggttgactgcactgaaattgtgtaattactatgtttttgctcccagaaatacttcagtttgctcaagaaaatacactctcatggaaagtttttcaaagttgatgtcctccacatnttcaagtcacattaaggctgaacaagcgtgcacatattccccaaattatcaccataacagtttattttccaaacgtatttttccttaaaaaaaaaaaaaatncacgcaaatagttgtctctaagtcttgttcccatagctc

SEQ ID NO: 972 - DNA, 499 bp, Homo sapiens
ggtacaagcaacaaataaaaaatagataaattggaatttatggaagttagaaaattttgtgcatccaaagacatgatcaaaaagtgaaaactcaggacaatggcagaaaatatttgcaaatcctatgtataagagtctagtatgcaaaatatataaagaacactgaaaacaacaaaaaccaaacagcacaattcaaaaatgggcaaaggacctaaatagaaattttccaaagaagacctacaaattgcgaagaagcacatgaaaagatgcttgacgttactagtcaccagagaaataaaaatcatgagatatgactttatactaaccagaataaaaatgtaagagaataacaagtgttggtgaggctgtggagaaattggaactcttgtacattgaaacaacacctcttacgataaaaggaaaaagtgtgaaaatatgtgttccaggaaagaaaaaagcacagaacaaagaggtgaagaaaaagactttagagtcaaag

SEQ ID NO: 973 - DNA, 286 bp, Homo sapiens
  misc_feature 97, 184, 188, 189, 190, 200, 202, 231, 243, 246, 261, 268,279: n = A,T,C or G
acggggaacaggacaaagaaaaggaacgagaaaaagacagatccaaagagatagatgaaaaaagaaagaaggataaaaaatccagaacaccacccangagttacaatgcatcgcgaagatctcgtagttccagcagggaaaggcgtattgaggaggagcaggagttcttccagatcgccaagancatnnnaaaccataananggaaattttctatatctccgtcccccagnagcagaaataanaangattaaaagagaganaaagaangggaccacatnatgaaaa

SEQ ID NO: 974 - DNA, 500 bp, Homo sapiens
ggtacttttcttctgtgcctactcagtaaaattgagaaaataatttttgcccacttctataaaaatatcaccccatttgctacctagcatatgagagagacaagactagcctgtcacgtttgtctctaaaaagaaaaatgataggcctggtggagagcaagctatatggaaacatcagcctttccttttctaagatacgtcactccaattcttccttaaatataaacttcctccttgatttatattaaccccttaggaggcactataataactttatgttcccatggaacatagggtttttcaagaatttcttaaaataaaaaaggtttgaaagctatggagtaaactcagcagctgtgatattccgttcaatctaccacagatgtcaaacggtcacattttacagaagtcaaaggaaaacaaaaccacagttctgcactcttccacagggcaaggaattgatcatattctattttcctttcaggaattcataaaatccc

SEQ ID NO: 975 - DNA, 515 bp, Homo sapiens
  misc_feature 126, 158, 169, 180, 182, 183, 189, 220, 231, 234, 254, 255,269, 278, 281, 287, 293, 294, 298, 299, 309, 334, 337, 358,362, 372, 378, 379, 387, 394, 397, 423, 427, 432, 437, 448,449, 463, 466, 480, 483, 485, 499, 508, 513: n = A,T,C or G
ggtacgcgggggtgcccggttcatccaaggcgcaagatggcgctgctttttgcacgttctttgcgcttgtgccgctggggagccaaacgattgggagttgcctccacagaggcccagagaggcgtnagtttcaaactggaagaaaaaaccgcccacancagcctggcantgtttaagaanannataccnggtgtcaaatatggctttggtgggattggancccaccaaggnggncttgaatgtggagcgcttcnnggagtgggcattgntgctggcanacncagcgntcaccnntggnngacactactnggaagtgacagtgaagcgctcccancanttccggatttgagtggcatangtgnacatgttccnggattnnttcattgntgttgangancagatcttggggtgttcaccttattncccntctcnaagangggacaaatgnnctatttgcgattanttnaagggttaaaaacnttntnaaaagcaatttgtngtgaacaangtttntt

SEQ ID NO: 976 - DNA, 491 bp, Homo sapiens
ggtacagaagataaactttgctatttcctttggcgaatcatccaggatacccttggacataaagtagttcactccctcatctgggttggcattaaaggtgaggctgccttcatccagctgcatatacaattttctaaaagaaaatcctaaaggtgggttcttattggatatgggaacagtgaccccaagtggatttgcacaacccttgccagagaagttcatcattcgcaaggtcctgccaaacacatgaagccaagcaaaggtcagttgcattcaggtaggacaagatggtaaagcttagctcaggaggcaacatttccaaattaatgaatccttcctgttctttcgatttccttgccttcaaaagatgatatatgtcaatgcctccttggacttgtttacgatgattggtgttagaaatgttgctcgcagccattctcctgctctgctctctggggaagtagccttgctcactgtagccttcttgttgc

SEQ ID NO: 977 - DNA, 492 bp, Homo sapiens
  misc_feature 176, 272, 442, 463: n = A,T,C or G
acagatacgctgtcccatacatcaggatcaaattattagtttcagtttcacattgtaggaatttaagattttttttttttttaacacaggaaataatctcatcatttccaaagatgtcttcatgtcccatcaatgacatgctaccagacatatcagattccacaggataatgggcnccaagctacccaagtagatgtttctggtattctagactgccgttcatgcttgtttcctaaagtatacttaaaagtttcaaatacagtttcacttanaaactgcaaccctccaagtaatgttatgtttacttaggtattaatgttatgtttacttaggtatgtatcagaggcaataatttccaaagcagatcttagaatataaccaatttgttagataactaactttatctctatcacatctgtttacaagcaaagtattactttgnctggacttatttcatcttcangggctgggaatcgggggcaacaaaaccag

SEQ ID NO: 978 - DNA, 501 bp, Homo sapiens
  misc_feature 227, 234, 235, 236, 247, 281, 366, 391, 407, 439, 458, 461,462, 472, 474, 483: n = A,T,C or G
ggtactcgccccttttggaagacgcacgcccaaggcacccgtgtgtgcacacgtatccgtgtgtggacctctgtccacacgtgtgtgttttgaaaagcctttctcaccacatgttaggatcacaagtgttcaaaatctaggcacacttttcagaagttatttctggaaaaaatgttgaattctcataacagcaataaaaggaaaataccgcctcagccaactaatanaaaaaannnaaaaaaaaaanaaaaggtcctatgtgactatcattgatgccccangacacagagactttatcaaaaacatgattacagggacatctcaggctgactgtgcctgtcctgattgttgctgctggtgtttggngaatttgaaactggtattcttcaanaatgggcagacccganagcatgccctttttggtttacacacctgggtngtgaaacaactaattgtcngtnnttaaacaaantngatttccanctgagccaccctacagcc

SEQ ID NO: 979 - DNA, 304 bp, Homo sapiens
ggtacatctttggcttgtgaaaaccaaacatcttttcttctgggcaatagtaggcctggtctgaagtcttaggtcaattagctgtccactcagatgttgtcaacttctcgtcctggtttcagggttgaagctgtttggtgaatcagagacagggatctttggtgggagtcatgggccatttcaggaagttgtgccttccaaaagcagcccgttccacgcgcaataatgtccccgaggtgcggagtgcacgccaggccagtccccctcaagcgctccctcctctcaactgccttgtctcccgcgt

SEQ ID NO: 980 - DNA, 499 bp, Homo sapiens
  misc_feature 6, 39, 62, 112, 117, 149, 160, 174, 177, 201, 246, 257, 260,341, 376, 385, 398, 426, 442, 459, 463, 471, 474, 476, 486,490: n = A,T,C or G
actttnttttttttttttttttttttttttttagattanaataaaaatttatttttgtaaanaattatattttgtatttgcaaaagctgaaaatgctcataaaaattaccancccanagcttggatttccaccggatccaccacgtganacaaaagagtntgtcactttttttnttnccagggtttgagggccttttctanaccttggatgtgttttcgagggagctgatactcttcaagcaatanccagccgaggnggnggacctggtttccctggatctgcacctgaaggctgtccttggccccaggggcaggattgacggtggtgctagcctggcatngctgctgaaggatggcagccactgagtatggggtncaaaccatngccttcaaagttncggaccacggtcacctttttattaaacnctctttttgctagggnggatgtcaattggacanattnttcctttnttnanaatggggctntttntcccgggag

SEQ ID NO: 981 - DNA, 502 bp, Homo sapiens
  misc_feature 472: n = A,T,C or G
acgcggggagaaattagacaccttcccactggggacacagacacaggaagtagcaagaagggagatgccaagtgacaatcaccaggaagatgcctctctctagtgacctgggtagtttgcacggtttggctggaaaccacagtccccccatctctgccagaacccccccatgtgggccactgtcctcagacagctcctggagcttgtggataagcactggaatggctccggctccctcctcctcaacaagaagtttctcggaaagtttgaagcaaaaactggtcagagtgctggaggaaaacctcattttgtcagaaaaaattcaacagttggaggaaggtgcttgccatctcaattgtgagtggggcaacagtcacatacttatgatgatcttctgcacaaaaaccaacagctgaccatgcaggtggcttgcctgaaccaggagcttgcccacttgaaaaagctggagaanacagttgccattctccatgaagtcagaaat

SEQ ID NO: 982 - DNA, 495 bp, Homo sapiens
  misc_feature 420, 446, 449, 466: n = A,T,C or G
ggtacttttttttttttttttttttttttgaatgtcccaggctgccttcctgtcctcccatcctgcatcctgctttctgttccctggataccgtaggatggttttatttcagttcatgcacaaattagtctggacactgtggagtcataacaagagtgggatggaggttccaaggccaatcattttctttggagggaagcttgagaagtaggttagagcaatgcccacaaaagccactgcttctccttcccatccccagcaatgagctaagagccaacctcagccagagagagggtctttgatcacagagggtcagtcagtgggatgtgattagtgggtttggggatggagtcccaggtaaaccagagggcaaagggatcctctgagtcctggcttaagggaatggggtttcaagttganggttggggacttaagggcagggggancancaaggtgaggaaaacanaaaggctggcatggcgaagcatccttggc

SEQ ID NO: 983 - DNA, 145 bp, Homo sapiens
acttcctctaacataggtggtcagcatactctttcactccttatccaattttatcaaaaatagagattagggcaatatgacataacagcattaagcactaaaccatttgacagggattcctttcaaaagtgaaaaccagtgtacc

SEQ ID NO: 984 - DNA, 491 bp, Homo sapiens
  misc_feature 147, 191: n = A,T,C or G
acttttttttttttttttttttttttgcatattaaaaaaattgtgcattccaataattaaaatcatttgaacaaaaaaaaaatggcactctgattaaactgcattacagcctgcaggacaccttgggccagcttggttttactctanatttcactgtcgtcccaccccacttttttcccccccacttcttncttcaccaacatgcaagttctttccttccctgccagccagatagatagacagatgggaaaggcaggcgcggccttcgttgtcagtagttctttgatgtgaaaggggcagcacagtcatttaaacttgatccaacctctttgcatcttacaaagttaaacagctaaaagaagtaaaataagaaggcaatgcttgtggaatgtccccggggaaaaaggattctggatgaaattgaagaacatacatcaaaatctatccttacctgatgccgaatcagatgaagatgaagattttaaagaccg

SEQ ID NO: 985 - DNA, 601 bp, Homo sapiens
  misc_feature 172, 292, 300, 428, 511, 524, 529, 535, 555, 557, 559, 560,562, 566, 569, 572, 574, 575, 580: n = A,T,C or G
gcgtggcgcggccgaggtacgcggggaggaaggaaattgacgaacacgtgacgcggtcgggcggaccactgcagactgagcggtggaccgaattgggaccgctggcttataagcgatcatgtttctccagtattacctcaacgagcagggagatcgagtctatacgctgaanaaatttgacccgatgggacaacagacctgctcagcccatcctgctcggttctccccagatgacaaatactctcgacaccgaatcaccatcaagaaacgcttcaaggtgctcatgacccancaaccgcnccctgtcctctgagggtcccttaaactgatgtcttttctgccacctgttacccctcggagactccgtaaccaaactctttggactgtgagccctgatgcctttttaccagccatactctttgggcatncaagtctctctggcgaatgattatcttgtgtgaagcaatcatggtggcatccccataaagggacacatttgactttttttttnatattttaaattncttcncgaatnttaaagataaatgtttctcngnannancctnccnttncnnaaacnttcctccccgggggcctttaa

SEQ ID NO: 986 - DNA, 595 bp, Homo sapiens
  misc_feature 497, 505, 589: n = A,T,C or G
gttcctgaatgctaaactgcctggctcccagctttttcattaaacttttcagggtcttggtttctttatctgtaaaatgacagagttggaccagttaactttaatggccatccttttacaccacacaagttgataaaatttatctgttcagcaaagagattgaacaaaaaagcacgttagtaatatgaagacaggaaaacgaatgaaagtctaacacataactcatattgatttactttatttctgttagattttacactctgaaaatttcacctcatttagtttgtacattatagcaaagtggtatttattccaggaatgcaaggttagttcaacatctgacaatcaaccaatagattaccaacataataaaaacaataaaagtagaatagaataaatattaatagaataaaaaaatcacaggatcatctcaatagatgcagaaaaaatatttgacaaaatcaaatacccctgcttctaaaaagaaaaatattttnggaatagnaatgaacataccttgataaagggctttatttaaaaaaaatccagctaaccgtatacttattggtaaagactggaaagctttttncaagtt

SEQ ID NO: 987 - DNA, 591 bp, Homo sapiens
  misc_feature 431, 484, 495, 513, 562, 568, 578, 582, 583: n = A,T,C or G
tgtacgcggggacagacacttgtaaggaggagagaagtcagcctggcagagagactctgaaatgagggattagaggtgttcaaggagcaagagcttcagcctgaagacaagggagcagtccctgaagacgcttctactgagaggtctgccatggcctctcttggcctccaacttgtgggctacatcctaggtcttctggggcttttgggcacactggttgccatgctgctccccagctggaaaacaagttcttatgtcggtgccagcattgtgacagcagttggcttctccaagggcctctggatggaatgtgccacacacagcacaggcatcacccagtatgacatctatagcaccctttgggcctgcccgctaacatccaggctgcccaggccatgaatggtgacatccagtgcaatctcctccctggnctgcattatctctgtggtgggcatgaagaatgcacagtcttttgccaggaatnccgaaccaaanacagaatggcggtagcanggtggagtctttttattccttggaggcctcctgggattaatcctgtgcnggaatnttatgggganctcnnggacttta

SEQ ID NO: 988 - DNA, 586 bp, Homo sapiens
  misc_feature 423, 455, 478, 496, 527, 529, 535, 551, 579, 585: n = A,T,C or G
ggtacgttttttccccatataggacatacttcgaagtaacaaaataatttttttaatcgactgtagtgtttcttcttcccgttagaagtagtttctttttcccctcatggtaccagacttggcaatggttcccaaattatttatgagatcagctttggtcatgccaatgcctgtgtctaccaaagtcagggtacgcggggattctttcataaaagataattatggactaaatcaggatctagaatcagagtcagttaatcctattttatcccctaatcaatttttaaaagataacatggcatatatgtgcacatctcagcaaacatgtaaagtaccaaatacaatctgtaaataatgggccatttcttcccaagcccacagccaagatgaagtgttaggctaaattcagagccctggctcttnctcagatgaagtggaaaacctgcgcatgacanggccggttccccttctcaaaggntttcttccctcatccatncctaacaaaatcgccgaggggtcacggcccnanaaagcncaacatgggttcgaantccaaaaaaagccgttggtgggcccaanaaaaana

SEQ ID NO: 989 - DNA, 585 bp, Homo sapiens
  misc_feature 479: n = A,T,C or G
ggtactggcttgaacaaaatttgttttgtgtgttagagttataaatcattaatctttatttcgggtggtttacgtttatgccagttcctttatatttaaatttcttgttttatatattttgaatgtctttatagatttctttaaatttccttatagaaccattaatagaaaatcattacatttaaaatataccttacagcaaaagcatccaaataagtatagggtttatgtccttatttttctttcagctgaatacgaatgaacacagtggtggaatttctgaagggaagtgatgaaattatatttatttcagtgggcacttttccattttaccactgtacaagatgtccaaatattgcgaagatctatttggggatctcctgttgaaacaagcacttgaatcacatccacttgaaccaggcagggctttgccatcccccaatgacctcaaaaagaaaaatactcataaaaaacaagcngctgaaacctgaagttgaaaaaaaacagctggaagctttgagaacatgatggaactggagaattgcctcccacaacatttaaaggcgatatgaaaagagatcgaag

SEQ ID NO: 990 - DNA, 558 bp, Homo sapiens
  misc_feature 219, 232, 265, 270, 291, 295, 305, 322, 339, 357, 365, 372,414, 456, 472, 493, 504, 517, 519, 520, 523, 540, 544, 555: n = A,T,C or G
ggtacaaagttgtccagtcttaggtgctgaggccagtatgggtgcaaggggcccgcgttggtagtcatgtctttgtgggctgatggctgcgtgtgtataggcaggaagttaaaaaaaaaaaaaaaaaaggaacagaaaaaccaaggcgcgcgacggcagcggcctcccacgctggctccgggctctctttaggctgggtctcgcccccgcgtactttanttttttttttttntttttttccatatttttctcagcagctttcatntgganaagccgtttccaggatatttntttntgatgagctnttttcccatatatactnttccatgtcggcttcantcttacttttttcccatncttcagtnttccaanacttatgggataacactgttagtagatacactgcataatcgnaattttgcctccttaaaggggcacctttttttttttgatggntaaccccatttggggncttgcagtatcgctctcccancaagttaaaanaaatttttttttngnnggnacattttaaattaaacngggnaagcttttctntta

SEQ ID NO: 991 - DNA, 563 bp, Homo sapiens
  misc_feature 211, 457, 498, 507, 528, 530, 556: n = A,T,C or G
ggtactcacagctgtggagtaggggttatgagctccagtattttcagcccagcagccacatccataaagagcagcctgcccaactctccccggatgtttcaaggccaagcctccactggagacagcagcagcaacattcccttcgtggtccacaaccacagcgcctaccgtgtccaaagtgcctgagtcattttccttctcacttgattgncttcttttctttagttgcataaaatctgtgtccaccctttctgccagctctagtttcctcttgtttcttttaaatgcagctaaactgaatcttgtggtcatgatgttaggagggcaaaaggggtattccatgatctactgcccatctgtaggctccttctccaactaaaaagcaggggaggaattttgccagcccgagagcttgcccttttgcccttcacataaaaagtctgttgggcaacccganactgggtttttgatttccctcagtggctccaactggttccnaaatttaanggattttccttccttatgctngngttacacctcaattttaccttacaanatttaaa

SEQ ID NO: 992 - DNA, 541 bp, Homo sapiens
  misc_feature 433, 441, 454, 522, 524, 527, 528, 531: n = A,T,C or G
acaactcttgctaatggaatgctataatgcacaaggtcaaggatttaataaattctaaaagtgtctacatatatcagtgataactgtattattagaaatataaatgtatagaaatataaagtatatggtattaaaaacagaccttgctaatataaacatatataaagtatgtcacttctcctgtaataacagcataaagatcgatctacagtttgcccttcgcctggcactcttaaaccactcctccaatggtcaatgttgaccttgaatcaacagccgctgaacccaggagaccccacagatgtgtagattcagcacctagagggcccccctaccctctgtgctgtgtgttcccatgactccagaaataattaatcgcaacttgcattattaaagtcccaggcaagtttgaaatctaactagaaaaaagtancagccaangcaaaataccgcnggaatttggtagaaaaaccaccaagaattcttaaaatgctttccagtcaaggcaaaattaaggggaantnagnnccnccccctttcc

SEQ ID NO: 993 - DNA, 658 bp, Homo sapiens
  misc_feature 26, 258, 338, 399, 416, 438, 451, 452, 548, 551, 552, 555,559, 561, 572, 599, 604, 610, 628, 632, 639, 645, 654, 657: n = A,T,C or G
ggtacttttttttttttttttttttngaggtttcaacttaacatttattgcacaactcacttcaggccactgctgacatcccaaaacacagcctagtaacacacaacttcaccttcaaggactgcagagatagaccaactatatataaataatctcgtggaaacgtaatttgggtgagaaaaatatgacgctagagactttgcgatgaatattttgcctaagttcagaagcttgaaaatacagttggcctacaatctnaaatttcacccaataaccgcggcccttagcaccacaccttccatcatctttttacctctgctgttcttgccctttacagntgcagctctctcaactcccttgcctctagttgactcctctttccatttcctacaactttgnggcgggagcattttaanaaaagccatttcaaaggcgttnaaaggccaactgnnccaaggcatttactcaaaaaatttattccaacagggatcttcaattttttaaattcttgaccttttttttgcataaaatttaaaccaaagcttaanatnnggnagtngnaaatttaactncgtcccttaaattaaaccttaaattgnttttnaaaaantttattacagggagtacnttgntttttanatggantttgcctgnggna

SEQ ID NO: 994 - DNA, 672 bp, Homo sapiens
  misc_feature 3, 242, 249, 292, 346, 357, 375, 405, 412, 424, 463, 468,471, 507, 544, 550, 562, 566, 567, 568, 601, 610, 617, 621,623, 630, 631, 636, 638, 642, 656, 657, 661, 663, 665: n = A,T,C or G
acnagcatgtttttatagaacaatgtgctcactttgagaaatgagaaacatgaattgcaaaagaatatctcatatcctccatgtttcaatctgaagcagcacacaaggctacttattttctccattaatgcccagatagaaattaaataaccttctgaaccaaagtggggaaatccaaaactgttgagatgtttgtcatattatgatagaacaaggtaactctggtaggcatttggaatttnacagtangagagtgatgactatacgtaaatggtaagtcaataaattatgntggctgagtatcacttatctaaaaactgcttataacctggtagaaaagtctgcnatttatgtaanatttaaagaaatgtgttnaaaacaggaatgcaacacctgaaagtctgnttgcctnactaccattttnaaagggccttcctttccaagctcacccttaatgctcaanaagangcncattttaaaaactatgctgggtgatgtaaaaacacncgaaaaaaacctttccctggttaaaattgcattaagnttcttnttgaccaaaatnttgnnnagcttcaaaccacttaagaaataaatgcctctntttccaaanaaaaaanccantnctttttnngggancncagncctttttaacttanncgangnanctttttt

SEQ ID NO: 995 - DNA, 673 bp, Homo sapiens
  misc_feature 454, 487, 497, 507, 511, 524, 550, 564, 570, 571, 579, 583,651, 665, 667: n = A,T,C or G
acgcgggggccagggactcgggtgcctggggcagacgaggccggcttctccgcggacagctagggagagtgtcctgggtgtcagccagaacatgtctttcaacctgcaatcatcaaagaaactgttcattttcttaggaaaatcactgtttagtcttctggaggctacgatttttgccttactcccaaagccacggaagaacgttgctggtgaaatagtcctcatcacaggtgctggaagtggactcggaaggctcttagccttgcagtttgcccggctgggatctgttcttgttctctgggatatcaataaggaggggaatgaggaaacatgtaagatggcttcgggaagctggagccacaaaaagtgcacgcctatcctgcgattgcaccaaaaaggaaggagtgtatagaagtagccgaccaggttaaaaaaagaaatccggcgatgtttncattctaatcaacaattgccggaatcgtaacangcaaaaagtnctttgactgnccanatgaacttattgnaaagtctttgatgtgaatttcaaaanccaatttatggacntataannctttctanctgntattattgctaatgaccatggccttttggttgcttttcaagtcaactggataaatggataaatgggtngcaaatattggcangnaattgc

SEQ ID NO: 996 - DNA, 665 bp, Homo sapiens
  misc_feature 268, 320, 359, 377, 393, 425, 459, 467, 470, 514, 521, 554,558, 563, 572, 615, 629, 631, 635, 642, 643, 646, 654, 658,661, 663: n = A,T,C or G
acgcggggttggcaacgagggactcggcctcggaggcgacccagaccacacagacactgggtcaaggagtaagcagaggataaacaactggaaggagagcaagcacaaagtcatcatggcttcagcgtctgctcgtggaaaccaagataaagatgcccattttccaccaccaagcaagcagagcctgttgttttgtccaaaatcaaaactgcacatccacagagcagagatctcaaagattatgcgagaatgtcaggatgaaagtttntggaagagagctctgcctttttctcttgtaagcatgcttgtcacccagggantagtctaccaaggttatttggcagctaattctagatttngatcattgcccaaagtgnacttgctggtctcttnggaatttggccttggaaaggtatcatacatangaagtatgccagaagtaaatccatttttttgaanatcacttncgnggggcttgttttggtccacagcataacaaggacttgcttcttanctggganggatgcaaaattaagcatggatttagtgagaangganctttnacctttaanttcttaaatcgggtttggatttcaaagttttaaacttgaattnatcctggccggacncnttangcgaatnnacnttggcggngtantangngt

SEQ ID NO: 997 - DNA, 682 bp, Homo sapiens
  misc_feature 338, 367, 412, 413, 434, 449, 459, 469, 471, 486, 514, 515,520, 521, 532, 566, 569, 587, 591, 601, 605, 615, 621, 634,641, 649, 654, 660, 663: n = A,T,C or G
actaggtgctgcaatgcaaagggttatgacaaaactgtctgtaaatgtaggatctgaattggtctttgatagttttcctgatttgagaaagaagtctctatttggctaatttagggagctaagagaatggacaaggtctgcttatgtccttctggcagcctagcatagcttttgcctccctcaaatcagttataagtcaaaacaaataaggcacattttttaaaaaaattcccccctttaattgaccaaagtaaagccatgacatttcatttggtaacctgtttagaattataaaaatcatttcatttggccacccatactgcccaagacaaaacttncagacaattctgatgccatccaagtttgntcttacaaactgcatattaaaaaaaaaaaaaaaaaatcttcaccnnctaaatgtgatgtgctcaagngcgaacctattaaanctggacgtgnatttattgtncntgacaagccctcgantattcaaggcctttaccttggatattcnngccannccatggtcttngggatatgctttctccaggaaattaaacctcaangcnttatttccaatttaacantttnggcaccggcnaaanctggaggacncttggnttttggtaaaacncccggancttggcgngaacnccttanggngaatttaaacactgggggg

SEQ ID NO: 998 - DNA, 698 bp, Homo sapiens
  misc_feature 7, 24, 347, 353, 412, 414, 442, 449, 471, 475, 483, 492,510, 523, 524, 525, 541, 542, 545, 549, 561, 593, 598, 603,618, 633, 656, 677, 688, 693, 694: n = A,T,C or G
gcgtggncgcggcgaggtacttcncaagcaagcccctatgatttgtcactatagatggaaccctgacttctgccccatcccttcctgcccaacctagaacccaggcctcaagtctttaccccacccctttcttgttcttccaagaagcagatgcccagttgctcaggcagcagcggtagagacttgaatctgcccaccagtcacaaggcgggtcacagattcctcttcctctcttctcctcgttcctctgaaccctccaccaatgtgcctcagcctgtgtgctgtgtggcaacagcattctggttcccactgccaagatctcccaccactctgctgggatctgcagnggcaanggagtgggggttgtgtaaaggggaagtcatcttttgagatccagatagacatgggttgngnactttacgtccagatggggaagcattcnttcctgnaacccttaaaataatcatgcancctnttcagacngacgccatnggtccaagggcttaaggnggaggaagcaaannnggcaagccctggcttnncgngganctctaacttttngattccttacggtgcaaagaattggggttttnttcangcctngggggccaattgaantgggttcttcttaantgggccatgccaaacgttccaancctgaggaaattcaggggccncctggtctganggggnnctac

SEQ ID NO: 999 - DNA, 671 bp, Homo sapiens
  misc_feature 3, 315, 318, 382, 424, 436, 442, 444, 456, 481, 483, 499,525, 549, 554, 555, 556, 559, 577, 592, 612, 624, 631, 632,633, 651: n = A,T,C or G
acntggcttgcagtttcttcaaaaaacattgacatcacagaacacatagattttgccacccctatacagcagccagcaatggagcctctttgcaatggcaatctccccacgagtatgcataccctggaccacttgcatggggtttccaaccgagccagcctgcactacacaggggagagtcagttaacagaggtattacaaaatctcggcaaagaccaatatccacaacagtcgcttgaacagattggcacccgaattgccaaagttttggaaaagaaccagacgtcctgggtcctctccagcatggcagccctntantggagggtgaaaggccaaggaaagaagcaatcgactgcctccgccaggctctgcactatgcgcnacaccagatgaaggatgtgcccctgattagcctggccacatnttggacaatgcncaactntngaatgacgccgncttagtaaccaccatggcagtaganantcgcaccacactttgntgggaaccactttactctgggcaatngctacgtggcaatggaagaattgnaaaannnctngggtgggatgaaatcacnttgaactttagccgngttgcccaccaaaaccgatncaaccttcaggnacttaannngaagaaggacgggctttntaaggacttttctttttttt

SEQ ID NO: 1000 - DNA, 669 bp, Homo sapiens
  misc_feature 399, 408, 447, 456, 461, 465, 467, 493, 503, 511, 539, 552,585, 599, 604, 624, 639, 650, 660, 664, 665, 666: n = A,T,C or G
actatttaatatatttctccatgaactttttgtgaaattcagatcgcagtgtgtcatttacaaatcttttgtctttcttctggtcatctacaccttttgcacagttcttgaagacaacgtcatcatcccaccttcttttaactttgaagttggcctgaggctgggatgggccagtgagattaaggagagggtttccgctcagaatgttttccatacgaatcctctcttcttcagctttttgttcttgttccttcctggcctgctcttcagctctttcttttttaattttttccagttctgcaagaagagctgcagtatcatcatcatcactttcttcttcaaaatcttcatcttcctcatctggtaagaggggtcatctgcattaaaggttggcggcangaatctggncttacccgtggcttttttgacacttgaagaagaaggtgnatggtctcngggtngacnantcctatttttttctttggcagaactntttttttttnttccactnttttctgaagcacggtaccaaccttttnagggccttccgangaagccggctggatttatctttggtgaaaaggnagggttttcttgantctgntttgaaagtggttaaaaacntttcctttcccttcncttggcgggcnaaggtggccngttnnntgt

SEQ ID NO: 1001 - DNA, 655 bp, Homo sapiens
  misc_feature 358, 361, 397, 409, 416, 421, 435, 441, 444, 451, 452, 462,464, 466, 472, 483, 489, 511, 515, 519, 541, 551, 584, 587,595, 623, 627, 630, 638, 640, 650: n = A,T,C or G
acgcgggggatcaagtttaaatgactgtgctgcccctttcacatcaaagaactactgacaacgaaggccgcgcctgcctttcccatctgtctatctatctggctggcagggaaggaaagaacttgcatgttggtgaaggaagaagtggggtggaagaagtggggtgggacgacagtgaaatctagagtaaaaccaagctggcccaaggtgtcctgcaggctgtaatgcagtttaatcagagtgccatttttttttttttgttcaaatgattttaattattggaatgcacaattttttaatatgcaaataaaaagtttaaaaacttaaaaaaaaaaaaaaaaaaaaaaaaaaagtcctnggncgcgaccccccttaaggcgaattcaacacactggcnggccgtactaanggatccnaactnggacccaacttggngtaatnatnggcatanntggtttctgngngnaaatgntatcccttacnatttcncacaacataccaaccggaaccntaanggtnaaaccttgggggctaatgaagngacttactcnattaattgggtggcctacttgccctttcaaacnggnaaactgcnggccacttgattaagaatcgccaccccngggnagngggtgggntngggcttttcnttctt

SEQ ID NO: 1002 - DNA, 596 bp, Homo sapiens
  misc_feature 417, 426, 435, 494, 506, 515, 519, 531, 540, 570, 574, 595: n = A,T,C or G
cgcggccgaggtacgttgtttttgtttttgtattttttttcttttgaaagggtttgttaatttttctaattttaccaaagtttgcagcctatacctcaataaaacagggatattttaaatcacatacctgcagacaaactggagcaatgttatttttaaagggtttttttcacctccttattcttagattattaatgtattagggaagaatgagacaattttgtgtaggctttttctaaagtccagtacaaacgagtcctggccttgtctgtggagacggattacaccttcccacttgctgaaaaggtcaaggccttcttggctgatccatctgcctttgtggctgctgcccctgtggctgctgccaccacagctgctcctgctgctgctgcagccccagctaaagttgaaaccaangaaaagtcngaggagtcngaccaaggatatgggatttgggctctttgactaatccccaaaaaccacccacttaaccnggtttatttgcnaaacaaggnaaanaaagcttacttntttaaaaanccaaaaaaaaaaaaaaaaaaaaaaaaagtncttncccggcggcccttcaaaaggna

SEQ ID NO: 1003 - DNA, 578 bp, Homo sapiens
  misc_feature 509, 512, 514, 525, 532, 542, 549, 554, 564, 565, 571, 578: n = A,T,C or G
actgacacatccaaagcatgagtgtgtcagaaatcccttgtctattcctgtctgtataaagtgtttcattatgaccagatctctgattgtatggtcactaggtatgcaatcacgcattcaaagaggctctttacaccatcactgtgattgctctgagagttgagggactattgggctttatttggacaaaccaaacttttagcctgaaaccaactttatgccactaagtcatagcctcagttgtcccagttatttgtcctcctgaaaatgcctgaaacatcagacagacattgcttgctttacccaaactgatcaaaatctttaggagcacaaatgaattttttagtctgaaataccaaataatgaattggtataccatatccggaatcacacatgttatcttaaacccaccatcatacctaagcttttggccaaacctcttataagtatatctagctgaacttatttggcatttcaatggggaacaggttctaaacctaaaaaggggncangnttgttttaaanaaatttnttttctttanggccctnggacnttttaatacnnaattcntggaacn

SEQ ID NO: 1004 - DNA, 581 bp, Homo sapiens
  misc_feature 387, 408, 413, 462, 464, 469, 485, 491, 524, 548, 553, 555,556, 569, 581: n = A,T,C or G
acgcgggggtgcgccggtggcgggactctggggaaaatggctgcgtcttcgagtggtgagaaggagaaggagcggctgggaggcggtttgggagtggcgggtggtaacagcacacgagagcggctgctgtctgcgcttgaggacttggaggtcccgtctagggaacttatagaaatgctggcaatttcaagaaaccaaaagttgttacaggctggagaggaaaaccaggtcctggagttgttaattcaccgagatggggaatttcaagaactaatgaaattggcacttaatcagggaaaaattcatcatgaaatgcaagttttagaaaaagaagtagagaagagagacagtgatattcaacagctcaaaaacagctaaaggaaacanaacaaatactggcacagctgnttacnaagcgaaggagaaactcaagtccaatagaaaaagccagaaaaggggctntntcctntgaagaaataattaantttgcncataggatcaaggccaaggaaatgctggattgngcctccactgacctggggttccangggancnnccggaaacccttnccacttgaattn

SEQ ID NO: 1005 - DNA, 575 bp, Homo sapiens
  misc_feature 250, 312, 444, 463, 478, 491, 511, 525, 538, 551, 553, 558,562, 564, 566: n = A,T,C or G
ggtacacaagccatcaattaccactctctgtcctggcctccatgaaaatccaattggtcttaaagcctgtctaagcagagagcaagcagaccacatcatcgtgtttcaacttgaaattcacccccatcccagcacccacacccttccccacacacacacacacacacacaccaaaaaaaaaaaaacaacaatttttttttttttaagaagaaatggccattaaggtctgggccagttgtaaagggttggnttaatcctgcagccagcacttttaaaatagctactggcttcacagcaggccagttggaactnttgaagcatgacaggtagagaacagaggatgtgctaagaacctggccttgttgtgggcctcgaggcctccatgcatgcttacacaccaacataagtatactttccccttcctcctcctaagcaattggtctncattgcctttaaagcctgnacactcaactttttnaatggtattttanagatggacaaaccttaattntaactatgcaaganagcattttttttntaaaaactaaggncnaaagnaaanananggcctttgt

SEQ ID NO: 1006 - DNA, 582 bp, Homo sapiens
  misc_feature 459, 472, 486, 498, 507, 544, 547, 553, 554, 560, 577: n = A,T,C or G
acgcgggggtgcgccggtggcgggactctggggaaaatggctgcgtcttcgagtggtgagaaggagaaggagcggctgggaggcggtttgggagtggcgggtggtaacagcacacgagagcggctgctgtctgcgcttgaggacttggaggtcccgtctagggaacttatagaaatgctggcaatttcaagaaaccaaaagttgttacaggctggagaggaaaaccaggtcctggagttgttaattcaccgagatggggaatttcaagaactaatgaaattggcacttaatcagggaaaaattcatcatgaaatgcaagttttagaaaaagaagtagagaagagagacagtgatattcagcagctacaaaaacagctaaaggaagcaagaacaaatctggcaacagcttgtttaccaagcgaaggagaaactcaagtcaattagaaaaagcaagaaaangggctattttctntgaaaaaataattnaagtttcccctnaggatcagngcaagaatgcttgattgtgcttcactgaccttgggtncangggacnnccgganaccctttcccaacttanttaaa

SEQ ID NO: 1007 - DNA, 690 bp, Homo sapiens
  misc_feature 72, 185, 186, 188, 189, 195, 216, 231, 264, 273, 292, 388,410, 411, 441, 458, 460, 465, 501, 508, 519, 531, 536, 543,565, 577, 579, 585, 588, 636, 641, 651, 684: n = A,T,C or G
acatccggcgagtagctggcggtcccgggtgctgctggttagtgtgctctgagggagggtccgagccagccngctgttttgccggaggagcccctcaggccgtagtaagcattaataatgtctttcatctttgagtggatctacaatggcttcagcagtgtgctccagttcctaggactgtattnntnntttttnttttttttttttttttcgtanagatggggtttcacnatgttggctaggatggtctcgatctctggtcanagtcttttntgtaaatatccttggaaanaagcaattttagactgtactgttgcaaatgctttaaggaaaaaacaaaacaactgcaagtcttctgaaatgaaaaaactcaccagggctgtttttnaaaacaaccccaaccagcactnnaattatgatgcccacaggggccccactganaaaccaagaaaaagttncnaatcnaaaacttgggatgctcttgactatggaaatattgcngcccgancccaagtaaanaccaaacaagcntaggncccgtantatttggggggattttggcaanaaaaaaacttgngngggtgnttngggattccattgatcccccaaaatcttccgggatgggtaaaagcccanggccngaaaagttanggtcctcccaaaggaaaaaaatttggggggaanattggg

SEQ ID NO: 1008 - DNA, 711 bp, Homo sapiens
  misc_feature 8, 33, 412, 441, 460, 521, 539, 557, 574, 582, 597, 607,616, 633, 642, 645, 647, 651, 656, 662, 678, 683, 692, 696,707, 710: n = A,T,C or G
gcgtgggncgcgggccgaggtactacttttctnactttttctggttagccagaatgttccattaagaaacaataaaagttgtatagttctctaagatgaaagattagtatattcaatggctattatattaaccacttagtgaacatacaacaaaaactatccttatattaattgactgaagttataacataagaaataagttacactactactttgtcattcacttaatacttacaagattactcaagaaatcaaaatggcttcccattgcttgacgtttgttgtccaaatacttcacatttcaatctcatatacctacaaagaggaaaaaatccaaacatactttccttacctaaaaatattaaagaaggctaaaaggcattaggaatttttttaaaccttgaaaaacagnggtcacttccaacatgtatttaaagttgnaattcattttctatcctgnggcataacttcaatttaaagtcatcataagttatattaaatgggtcttggctagctggtgnctatttcccaaaagagantaaagggagaaccgaggngggccctcctgtgaacnatggtggnaaaggatgaggtgangggatctcancccgggggngaaccagtaaaattttntttaggccngcncngggntcacnccgggnaatccaccctttggangcccnggggtgacnctgnggcggagtcanacnc

SEQ ID NO: 1009 - DNA, 693 bp, Homo sapiens
  misc_feature 247, 371, 385, 395, 445, 480, 483, 552, 569, 581, 585, 590,620, 643, 659, 669: n = A,T,C or G
acactctcatagagatagagaagatctaaaaagttgagactactcaatccagttaacaacagcaggagcactagagtttgttcatttattctctctgtaaaacaagctgtgctttttttcttctgcctttaaaatgccacccgtgtattcaaaccatggccacttgatacttatgtagaatccatcgtgggctgatgcaagccctttatttaggcttagtgttgtgggcaccaatgtcgagcatcgntgtgacttgtgctgtatgattctcactgaagaatttcctttcagccaagaagcagtgaggtctgggaatattcaaagtcatgtctctgaatatgtgtccttgacatgcaagctttgcaaaaccncatcccgcttaagngcgaggcatnaccttctccaagtggttaagttcttttaacccccaagatcattcttgggngataatataagtttcattctacttaagggattggntanaaaaccaagaaagaacccatttaaatttttaggttttggaaattttatttatatggatacttaaaagangattttaaaccggcganccttaattggcntacnggganggactggatttctggtacactggggggaanaaaaacctctttaacggatttcnctttttccgggacttnctttttaaantttttttaaaaacggaatttttgg

SEQ ID NO: 1010 - DNA, 282 bp, Homo sapiens
cgaggtactactttaggaacagtgttgtagatccatttagaaaaaaggagaatgatgcagcagttaaaatccaaagctggtttcgaggatgtcaagttcgggcatatatcaggcatttaaacaggattgtaacaattattcaaaaatggtggagaagtttcttaggcagaaagcaatatcaactaactgtgcaggtagcatattatactatgatgatgaatctctacaatgcaatggctgtcaggattcagagacgatggcgaggctatagggttcggaagt

SEQ ID NO: 1011 - DNA, 687 bp, Homo sapiens
  misc_feature 377, 446, 451, 458, 460, 491, 501, 502, 536, 542, 552, 555,556, 592, 629, 640, 656, 657, 663, 667, 670, 681, 685: n = A,T,C or G
acaaatgtgcattaacaattcagtgacgtagctgtggatctctggatggctatgtaagctgtgagaaagtcccccactggctttgcacttgctgcgcaccagaggtgaccatccaggcagtatcaacctgaagagggggtgaatcccagcagctgctcgatgggcttaaaccgccactcgtcagcctccagctcttctaccaaaccagctagtttttccatccgagcaacttgctgatcatgtttcacctgtttaagcgtggatgccacttgatagctaaaaacagattcgcagaggaatctctcagagccatcttctaacatctctccagctcctttggggtaggtgaaaaagggctttccgtggtggggcaaggnctgagacactgaaaccagatccagtgacagaactttcactgccccccactgaggaggatgatgatgaancaccnttttctntntaacagagtcttacttcacatgcctggctgnaacctaaggnncttttctcttcttttttttgagacggggttcctnttgtgnccagcttggnaanngggcgaattggttacaaaaacttcgcttccggattnaacgaatttctgcttaaccttcccagagctgggatanaagggtgcccncctgcctggtaatttnnttttanaaanaangggtttctttnggangg

SEQ ID NO: 1012 - DNA, 703 bp, Homo sapiens
  misc_feature 185, 257, 315, 326, 374, 379, 403, 405, 432, 442, 447, 480,490, 492, 494, 497, 515, 518, 523, 556, 562, 563, 568, 593,601, 607, 612, 613, 626, 627, 631, 634, 638, 641, 645, 654,662, 672, 677, 696, 697, 703: n = A,T,C or G
ggtactttttttttttttttttttttttttgtcaatatttattgggcgcctattatgtgcaaggcactacactaggcgctggggaagatacaaagataaatctgacagactgccctcaaagagcttacagtctagtataggagcatacagtctctggagaagatattttaagtgtaactaacctnccccatcccacccccacaaaaaaaaagaaaaaacctactagacttgggttcttccatttacttttaggttancagcttcacgtaaaaagcataaatctgaaagtcttttaaaatgcatacttttactggnaaacaaaattnattttcattagaaaaaatgctgaatatttattgcaattaagaaaaatnttcanccgggcacgggggctcccacctgntntccctaacactttgggaggcccaagcnggtggatccnttgangggcaggagtttgagacccccctggccacatancaaaaacccntntnttnttgaaaaacaaaaattanccnggccntgggggggggcccctggattccacttttccgangggtgnnggganggaaatccttgaaccttgggggggngggtgcgnaaaccnaaaannccccctttctttnncccnggngtanaanaaanttctttttnaaaaatanaaattttaanggaanaaaaactccccttttttanntttttn

SEQ ID NO: 1013 - DNA, 686 bp, Homo sapiens
  misc_feature 294, 322, 326, 344, 389, 406, 421, 462, 484, 504, 520, 524,542, 545, 551, 574, 579, 591, 628, 631, 637, 643, 644, 647,650, 662, 663, 666, 671, 674, 684: n = A,T,C or G
cgaggtactccttgacagttgatagattatatattcttccatccctcaaacttgcattccactatatttattttttggcaaaagatgagctgtatttgtttgaaatctgagacactatgttcaattggatgtatctgttcaaatttattcccacgtgacgtggaagtccttcgttggatgtcacaacactacatttaaggttggtaaggatgacttggaggtccatggttttcattaccaacattttaagattctgaatgtcgatggagtctcactgaaagagtcaccaaaggngcctgcctcccccctgctgggaaagtgncaantggagactgccccaaggngctgaaagaatcaatggcagggggtctggctgcttttcatctgantgtgggatgggaggggnggtcatgaacatttngatatacaatctactcttgaaaatgggaccccaaggggtanccatcactttcacttataattnccaaaagaagactaccaccntgtcctcccagaatcnaacnagtttcctattacttttnggngggaanagaattacaagtttttttaattnggagnacccttacaatncctaaatctttttggagggggggttcttttatttaanccncccccnatcgannttntgnttggtttgtttnnaanctgtnctnactttgtacntc

SEQ ID NO: 1014 - DNA, 615 bp, Homo sapiens
  misc_feature 295, 325, 367, 390, 396, 412, 434, 447, 477, 485, 487, 493,496, 510, 513, 546, 555, 571, 575, 583, 586, 588, 594: n = A,T,C or G
cgaggtactttgattccgtgctcctggcctttggaaacctgctgttcctgacgggcctgtccctcatcattggcctgaggaagaccttttggttcttcttccaacggcacaaactcaagggaaccagcttcctcctggggggtgtggttatcgtgctcctacgctggcccctcctcggcatgttcctggaaacctacggattcttcagcctctttaagggctttttccctgtcgccttcggcttctgggcaatgtctgcaacatccccttcctgggtgcgctgtccggagacttnaaggcactagctcgatggtctgaaaaacanagatgagctccttgaacttggatcattggttgagggggctangagggagaatggggaaccacccnctcagncccctgcactgactcnctcccgacataatccggacctnccaagttccaaangaaggaatgaactgagcaactgacgtcaantcccaaantnacttangangctgccaagaaacnaanattccaaacccaaggagactggcctgggctggnattcacacnctcacttttttttatngganggaaaagnganantaattnccaattgggcgtggggaaaaa

SEQ ID NO: 1015 - DNA, 128 bp, Homo sapiens
ggtacagcagagaccttcctgctttttactggggactccagattttccccaaacttgcttctgttgagatttttccctcaccttgcctctcaggcacaataaatatagttataccactgcccatcaaa

SEQ ID NO: 1016 - DNA, 603 bp, Homo sapiens
  misc_feature 420, 432, 457, 479, 496, 498, 509, 519, 526, 537, 538, 545,550, 556, 562, 566, 573, 574, 575, 580, 582, 584, 585, 586,588, 591, 595, 599: n = A,T,C or G
actttctgttctttggcacattttgcccagcggatgcaacttctatcctcagtccagttcatatatctcaggcagtgatccattttgtatcagccagtttcccttgttagggccgctacccggctggcagccaagagcagcactctccccaccttcagcagaacttctcagctcatgtgtgtgtttttaaaagcagtaggcagcttccatcagcaatggaagtgtcccccactccagtggtggaggtgcagtcgctggacctgaggaagtggggaagcattacaaaccctcctgcagtaagaatggcagagttgggaaggatcttctctcgcaggctgttggcccaactcctcttttctgtgtatgaggggcatcttagttttttatggcgttttcaaagcagcatatgaggattcttancatgcagctaantgacaacccccatggcctatgatgnaatgtttgctctggactaaccntcttgataaataggagngnatgtatcttanggtctttganaacactnttttttttttnnttaaaangcctntgaaancctttnaaangggcctnnnaaggnancnnngnaanggangggnctgg

SEQ ID NO: 1017 - DNA, 610 bp, Homo sapiens
ggtactcaaagacgaatcatgaaaaagaaaaaaaactttatttcaaacaggttcagtgatatatgtgtgtgctacagcaaaggctggttgtggcaaagtttcatttcaaactgtatgatgtgggctgggcaaggtggctcacgcctgtaatcccagcactttgtgaggccgaggtgggctgatcaccctgaggtcaggagagaccggcctagccaacatgctgaaaccccgtctctactaataatacaaaaattagccaagtgtggtggcgcgcacctgcaatctcagctactcgggaggctgaggcaggagaatcgcttgaacccggggggcagaggttgcagatcacgccactgcactccagcctgggtgacagagccagactcaaaaacaaaacaaaataaaacaaacaaaaaaacagaactgcatgatgtataattttgacattatgtgggaatgtttaacttctgcccaaatgtagattcaatccaacattatgccaatttttatattaattttagtcctaagtttcataacccaaaaaaaaaaaaaaaaaaaggaataccctaccgttcctctaagggacgaactgggaataattcccaaattg

SEQ ID NO: 1018 - DNA, 659 bp, Homo sapiens
  misc_feature 155, 158, 221, 362, 455, 473, 487, 488, 538, 554, 581, 582,632, 645, 658: n = A,T,C or G
actttttttttttttttttttttttaatcaatatttattgggcgcctattatgtgcaaggcactacactaggcgctggggaagatacaaagataaatctgacagactgccctcaaagagcttacagtctagtataggagcatacagtctctgganaanatattttaagtgtaactaacctcccccatcccacccccacaaaaaaaagaaaaaacctactanacttggtttcttccatttacttttagtttagcagcttcacgtaaaaagcataaatctgaaagtcttttaaaatgcatacttttactggtaaacaaaattcattttcattagaaaaaatgctgaatatttattgcaattaanaaaaatcttcagccgggcacggtggctcacacctgttatcctaacactttgggaggccgaggcaggtggatcacttgaggtcaggaatttganaccagcctgccaacatancaaaaccccgtctnnctgaaaatacaaaaattaccggacgtggtggcgggcgcctgtaatcccanctactccggagctgangcaggaaaatcgcttgacctggggggnnggaggttcaataagccaaaatcgcccccttccttttaccctggggctaanaccaaatctccgnttcaaaaaaatana

SEQ ID NO: 1019 - DNA, 521 bp, Homo sapiens
  misc_feature 320, 321, 322, 323, 327, 335, 412, 415, 445, 480, 490, 501,519: n = A,T,C or G
acatatatcaatctcccttgcttgtctttaagaaagggccgttcatagcatttggcacaaaccctctatttctgttgcatttgcatgattttaaataagaaggaaaataaacatttgatttatttcatgcttcctaagtttctgggcagggacatgccttactcttttagaaaccaattccaagatgacatctgactgcatttttctgttggtccgaacttctaaacaaacactcataaagtaagtttaaacaatttggagatgtatgaggaaaaagtcttgttctgttcagttcagactttgttaaaaaaaaaaaaaannnnaaanggaaaaantgctcatttcacatgtccatgatcttccatggattttttttaagcttatttgaagtttgattaaagggacaaaaaanaanaggcggcaagttttcctatctctttggagngtttcgctcaggaaattttgctcatcaaagttcanctacattccnagcggacaatnaaggcaaactggggtgcncc

SEQ ID NO: 1020 - DNA, 280 bp, Homo sapiens
  misc_feature 6, 96, 149, 159, 211, 253, 257, 261: n = A,T,C or G
acttanctgtattttcaaataagtaatcttccccccttttgtaggactttaaaactaggcatcaatgaacctgtttttcctattatgcctggaatntagtcatgatatcatgataccttgactcattccatcatatttcaagaggattnagagtgctanaaattattttggtatcctgtaacacacggcaacactggtccttgggcctatnatgacccacagatgactcattatagagttcattgctgatttntaanttantaattgaatctttatgata

SEQ ID NO: 1021 - DNA, 382 bp, Homo sapiens
  misc_feature 254, 274, 296, 338, 348: n = A,T,C or G
acaaaacaccatacttggggctatatgcgatttcaggttggataaacgagtcatgttgaatgacaaaaagttagactggggagatttatggagagaagcaagcacctgtgatttgttggtttggcgttacaataaacactgtaagtgaaaatgagtcacaggcagttagaatggcgttaaggaaaccatttaggtctaaaaatcaggactgaagtgatcaacagttaacagatgaagccatgagaactggcacnctctggaaaggctggtgcanagagcaggacggtgagcctgantgagcctggagttagtcaacagattcctcaacagaaaaggantgaggagcanggtcaaagaaatgaaggtgaatttggggggtggt

SEQ ID NO: 1022 - DNA, 258 bp, Homo sapiens
  misc_feature 172, 243: n = A,T,C or G
acattccacaagcattgccttcttattttacttcttttagctgtttaactttgtaagatgcaaagaggttggatcaagtttaaatgactgtgctgcccctttcacatcaaagaactactgacaacgaaggccgcgcctgcctttcccatctgtctatctatctggctggcanggaaggaaagaacttgcatgttggtgaaggaagaagtggggtggaagaagtggggtgggccactgtgaaantctagatataaacca

SEQ ID NO: 1023 - DNA, 367 bp, Homo sapiens
  misc_feature 362: n = A,T,C or G
actacaccacttttcctcaccaacccccatcctattcttgagttgcaggatacacttgctctctggaagtgtgtccttacccttctgcagagtgaggagcaagctgttagagatgcagccacggaaaccgtgacaactgccatgtcacaagaaaatacctgccagtcaacagagtttgccttctgccaggtggatgcctccatcgctctggccctggccctggccgtcctgtgtgatctgctccagcagtgggaccagttggcccctggactgcccatcctgctgggatggctgttgggagagagtgatgacctcttgcctgtgtggagagcatgcatcaggtggaagaagactacctgttnaaaaa

SEQ ID NO: 1024 - DNA, 358 bp, Homo sapiens
  misc_feature 323: n = A,T,C or G
acaaatttgccacaggttgaacacttaatttgtgttccttaaaaaataatgctgtgcttagtttattgccaggaaacttcttgcttgatgctttggtctgttttgtttttaatgttttaaacaaagaatattccggcctttacttcagagtttcttccaaagatacatatgcattttggatcacagttctggaggttgaaatgtccacgatcagagttcctgcatggtctggttctcgtgacgactcttcctggcttgcagattggggccttgctgtatcctcacgtggcataaagagagctcttgtctcttcattcccttgnaaaggctccaattccatcatgagttccccccgcgt

SEQ ID NO: 1025 - DNA, 317 bp, Homo sapiens
  misc_feature 18, 56, 65, 74, 112, 116, 119, 141, 154, 169, 174, 190, 191,192, 194, 202, 229, 230, 248, 257, 260, 267, 275, 280, 283,287, 300, 308, 313: n = A,T,C or G
gtactctattcgtattangaaagagaggctagataccaaacatcacgagatcatanagatggaanactgtatantaaccaaaaaccaaaacagtgatatttccagaactttntagnatngttgtaaaactgcatgaaacanaagaccatttaantaggtgaattattanaaatntttatgatgggaaagnnnanctaaattntctctaaaattttccccaaagataatnncctcttaggggaacatangagaaatgnttnatcaaangtggggtncttanttnaccntgactatgttttnagttgccnagtcntagt

SEQ ID NO: 1026 - DNA, 651 bp, Homo sapiens
  misc_feature 393, 496, 527, 576, 586, 600, 613, 641: n = A,T,C or G
acgcggggttcctcggctggatttaaggttgccgctagccgcctgggaatttaagggacccacactaccttcccgaagttgaaggcaagcggtgattgtttgtagacggcgctttgtcatgggacctgtgcggttgggaatattgcttttcctttttttggccgtgcacgaggcttgggctgggatgttgaaggaggaggacgatgacacagaacgcttgcccagcaaatgcgaaggtatttgaagggggtagcccctataggcatcgcccggccacacctccttcttctaggccggacatcctagcctgtattgggtgggtcacccgacctccttgaaggcttgagggaggttctggtggagcttggctgaatttggatggggtcaaggaancgaacgtgtagtgccacctcaaactgcatccagagagagcctgcatttttttggctggcttggaaccccccgcccccaatggattgtgggaattgtagttcanggaccatcggcccgggactgccaacttttanagcatcttcagtgagtgtttacctcatgtcaccagaccttaatctgcanaagcttgcangaaccgggtgtgangctcaagccttgnggacattccgttgccttacctacattanaccctcccaa

SEQ ID NO: 1027 - DNA, 568 bp, Homo sapiens
  misc_feature 250, 403, 419, 429, 463, 513, 533, 540, 554, 562, 564: n = A,T,C or G
acatacacaaaaaagttactggaatgctcggaataagattgtttttctgttgtcatttttgctttttttacaaggttttttttctcctttgagattataatgaacatggtcacaccacaagtaaagtcagaagtaggacagagaacgctccgaaggctggtttggtcatccgagatcattaaaaatggctgaccctaacaatatgtactttttttttttttttttttttttttttgggtggattgaacanaatttattggctgtctttgagtgtctttggtatggctttggcagggctgtctgggttcctccgctttgcttgtttttgggctgctgctgcagcctttaaggctcttcttcgcttcttcagcttttgagtctcctggaaaacccgaatgcacanagccttcttggtcacnaatcggcggngggctcttcggtaatacagaggggggaaggtgtncactgttccaaaagatctcaataaattactggctttggtaggtggaatangttctttgggtgggacttgnggagctnctggtttaaaaggnttctgtcnantgtt

SEQ ID NO: 1028 - DNA, 340 bp, Homo sapiens
acagtccctctcctataagcaagaagctctcgtgtgctagtgtcaaaagccaaggcagaccgtcctcctgccctgctgggatggctgtcactggctgtgcttgtggctatggctgtggttcgtgggatgttcagctggaaaccacctgccactgccagtgcagtgtggtggactggaccactgcccgctgctgccacctgacctgacagggaggaggctgagaactcagttttgtgaccatgacagtaatgaaaccagggtcccaaccaagaaatctaactcaaacatcccacttcatttgttccattcctgattcttgggtaataaagacaaactttgt

SEQ ID NO: 1029 - DNA, 651 bp, Homo sapiens
  misc_feature 251, 282, 301, 367, 503, 518, 598, 606: n = A,T,C or G
acaggaaattgacttagcactttccctgtttttctattgcataattttttttttaacccaaagatattttttttgctgagcctgcccagtattcactgttcacaactttgattactggctacaagaaatattttcttgccttccccaaatcccatactccccagaatctgctggcaaagtgagccctggtactttttttttttttttttttttttttacttcacagcaagatttattaatacatccaaaanaaagaaagaaaaatgattttgtcacactatntacagataatacatacagngtttcatacacatattacatcagtttttacacaagaaaaatatacataaaaatgtaaacttttgtntacaaaaacccttaaacaaattaaacaaggaccagataacaaaaggagaccaattcattattatttcatcaaatttttaaaacagtaatacagtaccacctgctcccatgaactcttaaatctgaataatgttcanataattttcataggnggaagtggcaaaacatacaaccaattgtccctcctccccaagtccacatgccaaaatgtttgcatataaactgacaagangaacccanaaggggactaaataccactatgcttttttcttcactaaaaaatag

SEQ ID NO: 1030 - DNA, 650 bp, Homo sapiens
  misc_feature 572, 617, 641: n = A,T,C or G
acacatgcactttgtgcttttacacacacaaaagtatactgtaatccactgagaataacctcagctgggtctgtttcctgggttatgttatatcttgtaaaaaacaaaacaaaacaaaaccaaaaaaaagtttggatttggctgggtctctgctccccactttctgaatcaaaatgcccaactacgtggttctgctgcaagtccatgagcaaagacgactcagaggggtgggcaggtttggtatcaccagaacaggagcatctaccatggaaacaccaccttctctgtggccctcattgtcagaggggcagagttcccgagggatgtgtcctctgggactgtgtggtccttaaagtaaaggtatcctaaaatggtcagaacatgcaatttcctttcaaaggcagttcagtgcattggctcaaggagggtgcaagcccaggatgaagtggagtcctggggagggccgcactcctgaagccaccaagcagagcgaggagctccggggggtcttctctgtcttccatcctgcgtctcagttctcccggacccttgtcctacttcacaagacagangcattcctttccaaaccttccatttgaatgtcgctctaacatganccgcccacgaaatggactggaaanaaccttgtg

SEQ ID NO: 1031 - DNA, 650 bp, Homo sapiens
  misc_feature 143, 146, 228, 348, 350, 353, 361, 369, 378, 388, 395, 397,411, 428, 432, 472, 481, 492, 496, 497, 504, 509, 534, 551,564, 578, 588, 613, 619, 620, 633, 642, 648: n = A,T,C or G
actgtataacatcttgtttattatttaatgttttctaaaataaaaaatgttagtggttttccaaatggcctaataaaaacaattatttgtaaataaaaacactgttagtaataatcaaaaaaaaaaaaaaaaaaaaaaaaaangtncagtcaataacacaatagaaaaatctatatacagtgtgttaaaatggagtatggaggaaaggcaataaataggtcatagtancgaagtaattacaatttagtaaattaacactggaatgatggatgtgcagatgatgatgtgcaagtagaaatacttgtgtgcaaaaaaaaaaaaaaaaaaaaaaaaaggtcctcaaagacnantcntgaaaaanaaaaaaanctttatttnaaacaggttnagtgatntntgtgtgtgctacancaaaggctggttgtggnaaantttcatttcaaactgtatgatgtgggctgggcaaggtggntcacgcctntatccaagcantttnngaggccnaggtngggctgatcaccctgaggtcagganagaccggcctaccaacntgctgaaaccccnttttacttattatncaaaaattanccaagtgtggtggccccccctgtantctcanntactcggaagctnaggcagganaatctntt

SEQ ID NO: 1032 - DNA, 596 bp, Homo sapiens
  misc_feature 32, 35, 95, 111, 261, 284, 389, 396, 425, 462, 467, 551,574, 577, 580, 581, 591: n = A,T,C or G
actttttttttttttttttttttttttttttnggngaaaaatacttatttcatgtgtttaaaaatacatttttagggtgggccctgcaggagganacaggccgtccacatntccttcccaatagtgtgtccaggtcgtttccaaaatctgtgggtccctcacagcttctgatgacagctgctaatgccatttgctgaggaacaaggatggggaggatggcgagggcctggcccccagggcggccacaccaaaaggtcgganaaaggcccaaggcggatgccacncccagcagtggtgactgccccccactccttttctgagtctatcagcattgtttggttttcttcttgttgcttttaaatcctcgagcggcaccctgaccaaagcanatggtanagggtattctatgtctgtaaatccgcctntcacctgccggtgcaggggaggctgccacaggctcanaacanatttccatggcctccccttttgaccgctctccactgtcccctggggcttctgctgagctgggctttgcttttctttggcttatnaaaccggaagtccgggggtcctnggncgnnaccaccttangggcg

SEQ ID NO: 1033 - DNA, 238 bp, Homo sapiens
acgcggggaggcttgagggaagcatggaggtccatggcaagccccaggctagcccgagttgttcgtcgcccacccgggattcctcaggagtcccagtgtccaaggagctgctgacggcgggaagcgacggccgcggaggtatatgggacaggttgctcatcaactcccaacctaagtccagaaagacctccactcttcaaacagttcggatagagaggagtcccttattggaccaggt

SEQ ID NO: 1034 - DNA, 503 bp, Homo sapiens
  misc_feature 297, 298, 330, 332, 367, 379, 391: n = A,T,C or G
actgaagcagcatatcaatcccaataagacattggacccttttgaaaccatgctgaagtcattattaaggtatcaatctggtggtggcagtgtgagtgaaaaccacatgaggaaaaaattgtatgaaaatggtgtgactgattctctgaagagtaactttgccctcctcctaaagctttcagaagaattattagataaatggctctcctacccagagacccagcacgtgcccctcagccagcatatgcttggttttgctatgaagtctgttacacagatggtaatgggtagtacttnntttttttttttttttttttttttttttagtananacaaagtccaccatgttgtccaggctccacacttntttgaaatgaanagatcaaacatnttaatacatacttattaaatgcttacttttttttaacatttaatatttattatttattttgggatggagtttcactcttgttgcctaggctggagtgccagtgggcccgcgt

SEQ ID NO: 1035 - DNA, 154 bp, Homo sapiens
actaggcctatcaagaaaagctgtgaacagcaacatcatagacacaaaagggtcattcctgggtgtcctcacccaagaaaaagatggaggcaagttaacacaagatttttttttaaagatacactaaaatcccgcgtacttttttttttttttt

SEQ ID NO: 1036 - DNA, 188 bp, Homo sapiens
  misc_feature 20, 187: n = A,T,C or G
actttttttttttttttttntttgctaaagcgtttatttccattcaattcactaactgattgctctgcttgggtgtctgtgttggttcacaggagggagtctgtggccagatccctagactgagggcgtccccatggccaagacctttaggcccagcaaaggtctggtggggggaaggaggtgggana

SEQ ID NO: 1037 - DNA, 656 bp, Homo sapiens
  misc_feature 631, 646: n = A,T,C or G
accagcttctaaagccatgatgccataggtccatttgttgatgaaattcctacccactgtcctcgggcatctgactctggtctctgcactggcatcaagagaacgctgctcggtggtttaaggctaacaccttacagggtaacactgtaacactggccctggagccaggtgcttttctccatgaaaacttccaccttggtagctcagccgacatagacaacacacaaagcgcagctccgcacttctgtccttatcttcacacagtgacatccacaccaggtggccaaacagaagagaaggcagaggcccaccaagagctgatgctgcgcagtccttgggggatcatcctccggtctcactggggacgaacccaggttctggagcctctcccctgacagacagcttgtcaccggcacttatgggtcctctgggatttcagacaatacccaacttctgtaggttcagaaagtgctttcaagcaggcaagtggcacccacacccggtgggacacacctcctgggtccgaaaccactccatcatgtggcttggtgtggccaccgtgcccacaggtcaggcagaaattggacgatcccccgcacagccacgttgacagatgggcacactggaacgntgaaagcctttgcanatggcacaac

SEQ ID NO: 1038 - DNA, 239 bp, Homo sapiens
  misc_feature 3, 19, 20, 25, 85, 108, 110, 149, 156, 165, 168, 194, 198,201, 206, 211, 214: n = A,T,C or G
acncgggggtaatatggtnnaaganaacccatatagacagctgccttgtaactgtcatggaagcatgcctggaaagacagcaatngaacttggacctctgtggtcaantnccctttacaatactggattcctcaaaagaatgctatttngaatctnttcaccatnggnttggatgacattcagaccctattaangacnttnatctntgaantcngagtgtacgcggggccttctccccg

SEQ ID NO: 1039 - DNA, 651 bp, Homo sapiens
  misc_feature 527, 598, 599, 607, 614, 626, 636, 643, 648: n = A,T,C or G
actttttaatttttttttttttttttttggatttttagtagagacggagttttaccttgttggccaggctagtctcgaactcgtgacctcaggtgatccgtctgcctcagcatcccaaagtgctgggattacaggcgttagccaccatgcagcccctttcaagccttttaacatcatgtcaccttcacaatgagcagttgctcccattacccagtgaactcaccttctgatgggacagttaccctagttggggcttctcagccttgagagatgtgcagagcagggacctgtccagggcagagcagccagacagcgtggaaataatccaaacagagaaggcattcaagaacttggcctctggttgacttaacacactacttcaagtatatggcaggtctgtataataaactcctgcctgtctagtcttcagcctcatagaaagcaagaaagcaggtgggcgtatgttgcaaaacaattcttgggtagaacaagggggacatttgatgggtttgggttttttcagtaanaaagatgaaagtcctggaagttttagggtaaaagtgggtacttttttttttttttttttttttaaaactcnnggaaggtnttttttntagggattgatncatggggccncatttgnataantgg

SEQ ID NO: 1040 - DNA, 653 bp, Homo sapiens
  misc_feature 452, 466, 507, 561, 597: n = A,T,C or G
acagtaatcctgtgagaaagacaggacagaaaccactgtgcctattttacagatacgaaaactgagacacaggtaaaggggcttgtctgtagtcccatagctagcagatggctggagccaagactgaggctcgttcttcaatgctgagccagggctccttccgctgcaccacaagaacgctagaccactcgccaccagccttctcattccctcttcctccattctaatcatttctagctggctggcctccacagagcataggaaaacagccaaggccgggcacggtggctcatgcctgtaatctcaacactctgggaggccgagccgggtggataacctgaggtcaggaattcgagaccagcctgccaacatggtaaaaccccatctctactaaaaatataaaaattagccaggcatggtggcgcacacctgtaatcccagctactcaagangcttgaggcagganaattgcttaaatctgggaggcggaagttgcagtgagccaanatcgcgccacttgaacttccagccttaggcacaagagcaaaaacttccattctncaaaaaaaagaaaggggaaaaaccaggggccaggtnacccatttgggggaaaagaagccccactttaggaaatcctggggattgttaagtgt

SEQ ID NO: 1041 - DNA, 653 bp, Homo sapiens
  misc_feature 379, 436, 462, 534, 538, 562, 565, 579, 590, 601, 614: n = A,T,C or G
actactagtggactcaagtgatataaaaaaataaaaaataaaatacttccatatacagtgactggactcttaatacaatggaaaaaatactttggtgaaacactgacatttagtgagcccctatcgtgagcctttggggttggaaaggggagacggggagtgagtggaaagataactaagactcagacctcattacagagtcattcacaatccatgttcccacgtagaaggcacacctttgtgtagctgtgcacagttaataataggggcaagatgtgttatagcagaattaccaaatgctataaaagtggcatgaaacaaagaagttcttctaattggggtaacgggagtcaaacttacagaatttgggagagagcantaacatttagcttgaatattttaattttaaacacatttaaagcttctagactcacangtaccaggtgctcaaagatgtttganggttgtcaagcaaagctgttcaacttctgcattttctgtggatatgggcacaatgcccactcagattttctnctangtcctgaatgacagcttatctacncanaatggaaactccanatttgtgacancacatggacanatgctgcaatcanaacaattctggatgtaaacactggtaggctgcactggtc

SEQ ID NO: 1042 - DNA, 653 bp, Homo sapiens
  misc_feature 109, 263, 307, 352, 384, 407, 415, 442, 447, 452, 467, 469,473, 477, 512, 515, 520, 537, 538, 542, 554, 566, 567, 590,605, 606, 612, 615, 632, 638, 641: n = A,T,C or G
acgcgaattggagaaaaagttcagtgggaagcatgtcgtctttatcgctcagaggagaattctgcctaagccaactcgaaaaaaaaaaaaaaaaaaaaaaaaaaaggtncttcaaatgtgattgtaacaatactctgatcaaggtgaggttgtgttcctggcacatgctgaagttttttctgcaaacttattccagagagactatcaaaggcatgaagatctaatacattagagagatcaactcttgatctttgtgttctaanatttgtcctagtccatttatggatctaattgtcggtcttaattnctttacatctttcttctggaaccaaggtctgttttattaatgganaatggcatctgccaaagcaacttgcctagtanctttcattgattaaggccatcanggtttctnttctggttaaatggttttaatccaatnttttngaatnccaccaataggttantnaatncccntcaaagaattaaaattttcacttcccctaaatttnagncattnaaccccaaaaccattannaaanccccccttgcancccagggggtcnntggcttaaattcccagggggggncctttttaaaaccanntttttngtnaaattccaaaaattttncccccnttnttttttggccat

SEQ ID NO: 1043 - DNA, 244 bp, Homo sapiens
acgagcggcgcgccatggagttactgaaggtctccaaggacaaacgggccctcaaatttatcaagaaaagggtggggacgcacatccgcgccaagaggaagcgggaggagctgagcaacgtacttgcacaggaagtgttggcgcttgttgcattcgttgctgctccaagttaaaaagttgttattggagctcatctcagcacagtgcttgttcccacccatggacttgccagaccaggatctgt

SEQ ID NO: 1044 - DNA, 652 bp, Homo sapiens
  misc_feature 569, 640: n = A,T,C or G
actttctgttctttggcacattttgcccagcggatgcaacttctatcctcagtccagttcatatatctcaggcagtgatccattttgtatcagccagtttcccttgttagggccgctagacccggctggcagccaagagcagcactctccccaccttcagcagaacttctcagctcatgtgtgtgtttttaaaagcagtaggcagcttccatcagcaatggaagtgtcccccactccagtggtggaggtgcagtcgctggacctgaggaagtggggaagcattacaaaccctcctgcagtaagaatggcagagttgggaaggatcttctctcgcaggctgttggcccaactcctcttttctgtgtatgagggcatcttagttttttatggcgttttcaaagcagcatatgaggattcttagcatgcagctaagtgacaacccccatggcctatgatgtaatgtttgctctggactagccatcttgataaataggagtgtatgtatcttaggttctttgtagaacagctatttttttttctcattaaaaaaggcctctgaaagccctctnaaaatggacctcacaaaggcaaccagtgtgaatggatgggagctggggtgcctgcatgcccaggctggtcntggggtgggcac

SEQ ID NO: 1045 - DNA, 467 bp, Homo sapiens
acagctttcttcgtcctccatgctaagagatgtaaaagcttaagggtcaaacaataccaattgtataggcttcaaaaaccatctaagttagggcattctctagttttagctaagatacacctggaacactgacaagtcatcacttacatagaataatgtgaagtaaattttttgaaaaataaattttagtggaacaatcctgaaggataacaccagaagaatagcaggttaccagtaaggtgtcagccaatttgttccagtcacttttgaatccatgttctataatctaaaatttattctctttccctaagctgagagcttcctatcatgtcagtatctatgttatgaagaaaaggagacttaggtgagatgtttttatttatcgcaactgctgcattaattgcctaggacctcaacagcttcatgaaagtctgggaaatgttcatgcataaggttattgcccgcgt

SEQ ID NO: 1046 - DNA, 571 bp, Homo sapiens
accagtaaaaacttaaaggcacaaattctccttgaagaccttctcccttttatgtggccccatattttatgttgctttatctttgaaattttgcatgaaaaggaaatgaatggattcgaatgaaattgtcctttagagcatgattacttgttcccatggacaaatatttttctccccttgctcttcctggcctgaaacacgggaaaccagagtcaaaagttatctccctctccctgtgatgccttgagatttttttctgcgttgtttaatgcctgaaatccaagtcttcctccatgggaaaatactgttataccaaataattctagatgagtaacaaagatctttttaggccttcattttatgttttttcttaactgttatattatgattgtgacatagattatactactactaatttttggatgtttcaaaaggtcaagaagtaaaagatgttagaaagcaatgagtgagtccttttgatttttaacttattccccatgtccctatacttcgtgtgcttttccttttttttttttgagacggaggctcactccgtcacctaggctaaagt

SEQ ID NO: 1047 - DNA, 692 bp, Homo sapiens
  misc_feature 135, 190, 364, 375, 385, 472, 509, 569, 570, 574, 595, 630,639, 663, 675: n = A,T,C or G
accccacagctcccacactgtcatcccccagccaagggccatccctagaaaaactggtttactgttcctaaggaaaccattgtctatagcccttagccttgtggtttatgcaagaggccaggtcaggtgccctanagtgaggcaggggcttcagccaaagttgtgatcgcagcttctgaggcagttcctnagtggagtcagagtccgctgccacctgagctttccaccagatcttctttcctttccttgtgctttcctcaagctgcaggcttgatcccatcccacaaatatgagagaattctggaaagtgccctgagaaatgggttctgggtttttttttcatttttatttttttaaatgtccnaggctgccttnctgtcctccnatcctgcatcctgctttctgttccctggataccgtaggatggttttatttcagttcatgcacaaattagtctggacactgtggagtnataacaagagtgggatggaggttccagggccaatcantttctttggagggaagcttgagaagtaggttaaagcaatgcccaaaaaagccactgcttnncttnccatccccacaatgaactaanaccaacctaaccagaaagagggtctttgatcaaanagggtcaancagtgggatgtgattagtgggttnggggatggagtnccaggtaaaccaaaagg

SEQ ID NO: 1048 - DNA, 396 bp, Homo sapiens
acgcggggggcaacgaggagggctgcgaggccatcagcttcctcctgtccctcatcgacaggctggtcctctactgcgggagccggctgggcaaatactacgtcaaggagaggtctaaggcaatggtggcttgctatccgggaaatggaacaggttatgttcgccacgtggacaaccccaacggtgatggtcgctgcatcacctgcatctactatctgaacaagaattgggatgccaagctacatggtgggatcctgcggatatttccagaggggaaatcattcatagcagatgtggagcccatttttgacagactcctgttcttctggtcagatcgtaggaacccacacgaagtgcagccctcttacgcaaccagatatgctatgactgtctggt

SEQ ID NO: 1049 - DNA, 288 bp, Homo sapiens
  misc_feature 187: n = A,T,C or G
acagatgtgtatgggaaaccccaacccctatatattgtaaatagatgggctgggctaaacattgttgccgtttcatacttctaccaactcagcttttacacaataaagctctactgtctctggataaaaaaaaaaaaaaaaaaaaaagtacgcggggatccctgactcggggtcgcctttggagcanagaggaggcaatggccaccatggagaacaaggtgatctgcgccctggtcctggtgtccatgctggccctcggcaccctggccgaggcccaaacagagacgt

SEQ ID NO: 1050 - DNA, 414 bp, Homo sapiens
actacttgattgtttatatccaattcctttccatcatttgattgaatcttttgggtctcttgcttttgttcctctaaaaactggtctgctaactttttaatattttcttcatgctgtgctctcaattccttcatctgctgtccacactgaaaactttcatattctaacctcttcacaaggtaagtattgttcttcctatagtcctgaagctggtcttcttgtcgaagaaattcttgacgaagctcagcaagttgctcctttaaatgatgtatgtctgccatctgatacgatatgttgttctgtagtttaaccttgtcatcctcgcatctcttcccgaggccctctctggcctgcagccggctgctgaggcggccgtagtcggcctccttctggtcgatctgtttcttcccgcgt

SEQ ID NO: 1051 - DNA, 589 bp, Homo sapiens
actctgttgtaatgggaaaacattaatatctgcttcttctgacacgacagtaaaagtatggaatgcacacaagggattttgcatgtcaacattaaggacacataaagattacgtaaaggccttagcatatgccaaggataaagaactagtagcatcagctgggttggacagacaaatattcctttgggatgtgaatactctaacagcattgactgcctcaaataacactgtcacaacttcttctttaagtggaaacaaagattccatttatagcctggccatgaatcaactgggaacaatcattgtatcagggtccactgaaaaggtgttacgggtatgggatccaagaacatgtgcaaaactaatgaagcttaaagggcacacggataatgtgaaggcattgctattaaacagagatggcacgcaatgcctgtcaggcagttctgatgggacaattcgcctttggtcccttggccagcagagatgtatagcaacataccgagtccatgatgaaggtgtttgggcgctgcaagtcaatgatgccttcacacatgtgtattctggtggaagggacaggaagatttattgt

SEQ ID NO: 1052 - DNA, 652 bp, Homo sapiens
  misc_feature 563, 575, 600, 631, 632, 636: n = A,T,C or G
acaaaagaatacaatatgatttgtcaaaaaacatataaaaagacagctgctcttcctcaaatacatgagctaatgataaaagactttttcatgttaatgtctccaagttcttctttttacataaaaaagaacattatggtggcaaatgtgaattatccttttaatattgaacattatattcttttaaaatccatccagatcaaatgcaataattttctttttaactcaacaactgatgctaccaaacgtggactcaatatacttgttaaaacgtgtaaagcgtgtctctagtcttcaaagctttcaggtgaagagaggtgctttttcttgatgcaaatctcaaggcagagaaaatcattttaaagcttataaaaagtggacagagaaatattaaaaacttctctgaaatatacaaatatgtgtaattattaaaattgaagacagtaacatcagttgcaagtgcttggaagtctgcctgaccttttgagtttccacattttcttcagttgcatggtgagcacccagtgctagtaaaacattcaggctgggaaaggagatatagncttcattactgntttttaagaaagaaaattcctatgnttttggcagtcttcagtatcaaagtataggnnttcnattactagaaattcca

SEQ ID NO: 1053 - DNA, 189 bp, Homo sapiens
  misc_feature 20, 25, 26, 27, 32, 104, 150, 153, 188: n = A,T,C or G
actttttttttttttttttnggggnnnccatnaaaaagctttatttccatttggtccaaggcttgttaggatagttaaaaaagctgcctattggctggaggganaggcttaggcaaaacccctattactttgcaaggggcccttcaaaantcnctgggctcaaaaggctcttagtcgtgcttgaaagng

SEQ ID NO: 1054 - DNA, 587 bp, Homo sapiens
  misc_feature 64, 70, 87, 120, 465, 490, 500, 501, 505, 513, 531, 541,542, 552, 586: n = A,T,C or G
acttttttttttttttttttttttttcattctacttttctttattgtctggctaacttacaaanatgcanatgtctagggtagtctntaccctaccacttacactatcctgatgacacanatagcaaaatgtgtctgtttacatagtgcatgatatgaaaaaaaagtttttcttcctctacggtccttgactataaggagggaaaaattaatttcatgccaacatttttggggaactttaacaatcatcccatttctgctactaaaataacaaaactggtattacactttaaaatataaagacctaacagtttttacaaatatgcaaataatctactacttagacataaaaaaaagttgatttcttttaaatcacaaagtaaggcccattggattaaacattctcctgcttttactaaataaaatgcatagtgaaataaatactgaacactgagtttaatactgnatacattcaatataaaataagaggngaatgtaaannctgntactgtgnatcattatctgaaatgtntaaaaaaccnntgtagcttgnttaggaaaaaatatttttattcatattaaatttnc

SEQ ID NO: 1055 - DNA, 379 bp, Homo sapiens
accagaatactctcacattttatttcaaggcactctccagcagaaagtataataagaataaactactttgtaaaatgtgccatttttataaagacaacagtgagatccaaaatgagacaaagtagaattatactgaatgttcattatcccaaagtggcttaatttcatttgcttgctgcaaagacaaagactgtaaaaaggagcaaagaaagtgtgcaaagcacttccttggaagacctcgtccactaacagatcacaagaaaagcaagtgcagcccctccaccgaaaggaaggcaggcatgtaacatcggagacttccagtctccccgacgtctgctcacgctggatgctggcactggcttatcatgatggaaggaga

SEQ ID NO: 1056 - DNA, 247 bp, Homo sapiens
acctctcattttggctctgcccctctggaagatcctctctgtatcctcatcctgcgatgagtggtggcaacgtgtgccctgagccctatgctaacgtgagtggtttctttcagtgttctcagattttccccagctcagtcctccctccttttctgcagcttggtcctggtttcttcttgccggcgtctccaacaagcaatgatggcttcatcgtccatttcttcctcttctcctgtcagtacttttt

SEQ ID NO: 1057 - DNA, 276 bp, Homo sapiens
  misc_feature 121, 191, 210, 217, 236: n = A,T,C or G
acgcggggcaccgtggagagcagagcgcggcggctggaagctgctaagtcagagccgcgatgttccggattgagggcctcgcgccgaagctggacccggaggagatgaaacggaagatgcncgaggatgtgatctcctccatacggaactttctcatctacgtggccctcctgcgagtcactccatttatnttaaagaaattggacagcntatgaanacaggacatcacatatgantgcacgatattaagagcctggttcagtttctactcctctt

SEQ ID NO: 1058 - DNA, 201 bp, Homo sapiens
  misc_feature 80, 123, 125, 134, 172, 181: n = A,T,C or G
acgcgggactctaaaactggtggtttcttactgaaggtgttctccatttgaaattttatcttcaaagtatttataagtantatctttaagacatgacttgttagtaataaaagtgttactagncngaagagtanctctcaaatttctcttaatgtaaatcacctgggaatcnctcaagttntttttgaaattttaaaccac

SEQ ID NO: 1059 - DNA, 480 bp, Homo sapiens
acagagaaaccacaggttgccctttccacagctggatagacttatccaaaacggcaggatggttctgtattaatctttttggaaagcatgtctgtattaagattgcaaaacatacagatagctaccacaaattaggtcaaacgactgatcaagttgtaacatctgtgaggtcaaattccagttataataaagtgcctagatacacatttatacaacagaccataagagctgaattctttacaaatgtctttatgggcatgtaaaattgactctgcatttctgcatgtgtgcattcacataagagagaccagtctgcactgagtcatatatactccaacttgaaaaagtaagtgtaacaactggttaatcatgcaagtctgtttgtaatataacaatgactggtaaaacatgaattctcgcacagtagtaataggtgcactcattaaaaacactacggaaaaacactgtatttgcccgcgt

SEQ ID NO: 1060 - DNA, 237 bp, Homo sapiens
  misc_feature 214: n = A,T,C or G
acatactgctgaatttaactcaaaatatttcaggtaagtgaaagtggtgcttaatgtagactatagaatgactttcaggtgttttcaactgaaagtatatatccagaactgcatccttatagaaatacaagtaagacttaggataatttgccttcaaaacagttttcctaatctcagcagtatccagtgagtgaagaacacttgactgactctngggccacctctgttacttactgt

SEQ ID NO: 1061 - DNA, 648 bp, Homo sapiens
  misc_feature 638: n = A,T,C or G
acataagtggctatcagagaagccagccgatatggattggcctgcacgacccacagaagaggcagcagtggcagtggattgatggggccatgtatctgtacatgctttctcttttattctgtcttctttttttgatcttcttaaatctgattttctcctttttccctctcttgtctccatctttttttccagtctctcgcttctctttatttctccccatatttcactctgttctctcaccccaacccttcccttctgtttctctccctccctctcttcccaccccctgcctggccttccatatatcaagcagagttttatcaccttatgcaggggcagccctgccacctgccataaagttgataggctaatggcattttgtggatattgccatgtcacaagtccaggacagcatcaaaaatagccctgatgtctaaaccacttcagctatcttttttatttttaaaataaatacattcacatgcttttaagaaactataaaaatatataaagtaaaaagatctttctctcacactgcctccacctctcctggtctaccgttgtgcttaggggaaaccattgtgattagtttctcctgtgtccttccagagtgtctttatgcaaatgaaaattattgngataatatat

SEQ ID NO: 1062 - DNA, 652 bp, Homo sapiens
  misc_feature 606, 645: n = A,T,C or G
acagaccagtgagtctggggaattgcggtctccaccaagatctgtgggtgcacttggcatgtttgctgcagaaaaggccccagaatgggctggcttgaactggaaaaacacactttctcatcccttttggaccacgagcttcttgagagcaaagcatgtgtttgatattcctttgctcaccctcaggccttgtttggcaaattgcctgggatacagaaaataaggacaaggtctgggtgtagtggcttatgcctgtaatcccagcactttgggtgaccaaggcaggaggatctcttgaggccaggagttgcagaccagcctgggtaacatagtgagaccttgtctctgcaacaaaatttaaaaattagccagacttggtggttcccacttgcaatcccagctatttgggaggctgaggcgagaggatcacttgagcgcaggaatttaaggctgctgtgagctatgattgtgccactgcactccagcctgggtaacagtgagaggcctcatttcaacaataaaacccagcttgggccggcgcggtggctcatgcctttaatcccagcactttgggaggccaagacgggcagatcacgaggtcagganatagaaaccatcctggttaacacggtgaaaccctgtctnttccaaa

SEQ ID NO: 1063 - DNA, 405 bp, Homo sapiens
  misc_feature 3, 27, 30, 43, 53, 103, 167, 229, 376, 394: n = A,T,C or G
acnctaaacagtggatttgagttccancgnttattcttttttncttttttcanatcaccatctaagttacatctttagctcaggtccatccttccgagatctncttcttagccccccagcccctggtgctgtctgtggtcaggtgaccttactcaggagcagatatntccttggccgccatggagcctcatccatccacacgtgcctgtagcattccagagctcactgnccttctagatgtgccttcccgcttggcttccaacggcttgtgctcactctgtctgccaggtatgagaagaacacgtaagaccgccaccacactcaccctccctcaaggcccttgtgccataggggtggccacccgacctgcccccanaacttttggatactggangcaattgcata

SEQ ID NO: 1064 - DNA, 569 bp, Homo sapiens
  misc_feature 260, 273, 299, 537, 540: n = A,T,C or G
acactaatttatttctttagtctagaaatagtaaattgtttgcaagtcactaataatcattagataaattattttcttggccatagccgataattttgtaatcagtacttttttttttttttttttttttccaagtttttaaactttttatttgcatattaaaaaaattgtgcattccaataattaaaatcatttgaacaaaaaaaaatggcactctgattaaactgcattacagcctgcaggacaccttgggccagctnggttttactctanatttcactgtcgtcccaccccacttnttccaccccacttcttccttcaccaacatgcaagttctttccttccctgccagccagatagatagacagatgggaaaggcaggcgcggccttcgttgtcagtagttctttgatgtgaaaggggcagcacagtcatttaaacttgatccaacctctttgcatcttacaaagttaaacagctaaaagaagtaaaataagaaggcaatgcttgtggaatgtacagaccagagacaaagcanganaagaagcagagactgttggcccgggccga

SEQ ID NO: 1065 - DNA, 236 bp, Homo sapiens
  misc_feature 137, 154, 168, 173, 177, 187, 223, 229: n = A,T,C or G
acttttttttcctttttaattaatactaaatattgtgatttcttatttgaggttcaaaatgacctgcttgaaactttgatacatattggaatacattatgttaataaacttgtagctttttgtgaaaaaaaaaaaanaaaaaaaaaaaataaanaaaaaataaaaaancgtanaagnactcccctanttaaaaaataaaaaaaaaaaaaaatggccccttttngctaangctggga

SEQ ID NO: 1066 - DNA, 653 bp, Homo sapiens
  misc_feature 45, 66, 120, 393, 420, 455, 558, 561, 567, 583, 599, 604,607, 616, 630: n = A,T,C or G
acttttttttttttttttttttttttttagggggacaggaagtanaatttattggtgagtattaanaggggggcagcacattggaagccctcatgagtgcagggcccgccacttgtccanagggccacgactggggatgtacttgtgactacgttttttcaaatatagatagatttaagctgctaattttttttttagtaatcactactatatcatgtcttttactctgtttataatatcaagtattttcttaaagatatagatattaaaccttgtgctcatgcaacttagagtaacatatacagacaaatgattgcatgaggccatgtttatatgtgtgactaataaggcttgtgatgattaacataatccaggtatgtcatttctgaaganaatagtcatcaaatttatatctcgaanattttaattaaggaattgcttattgttgagcttancaaattaataacactatttctggcactaattattttgaggccttttaataccacctacttgccccccaaaaccccctgcatttgggcacaattttaatttaanaanaatttntttaaaacgtgaaatnaatattttaaatgcanacttnaanccaatatanaacatttggtttgngaaaatggcatcattctgctggg

SEQ ID NO: 1067 - DNA, 227 bp, Homo sapiens
  misc_feature 106, 121, 172, 189, 195, 218: n = A,T,C or G
actttttttttttttttttttttttttgggcatcaaaaagctttatttccatttggtccaaggcttgttaggatagttaaaaaagctgcctattggctggaggganaggcttaggcaaaanccctattactttgcaaggggcccttcaaaagtcgctgggctcaaaaggctnttaattcgtgctttganagtgancctttcaaaaagaaacttcccancccaacctc

SEQ ID NO: 1068 - DNA, 406 bp, Homo sapiens
  misc_feature 34, 101, 114, 121, 169, 172, 182, 226, 237, 272, 291, 357,363, 382: n = A,T,C or G
acttttttttttttttttttttttttttccattnaatctaaatgttttctgcaattgtttttcctttaaactttgcttcaaaaactcttcatctacttganatctgggcattgnggttttnggtctcgcattttccctgccttctgatggcttaccaggggaccctttnttntttggctggnggggcttctctggatcagtaatgtccacatgcggcttctgcagnaaggttttctnttttgctgatactgaaactcggggggctctgtttnaaaaggaatgaaaggcctntggttttcaaagcccccctttgcctttgcttaccactcgaggagtgacctttgaaacgtcagcctnatcatnagattcaaaatcaaagganctggacaaggatgaaaacaaaggc

SEQ ID NO: 1069 - DNA, 396 bp, Homo sapiens
  misc_feature 162, 199, 288, 296, 321, 326, 339, 345, 350, 355, 361, 385: n = A,T,C or G
actgtcttctggaagccgtatggttactgtcaaatcatcttcagtctgttgccagtaatacagaggttctttgattttctctgatatgtcttcatccatattttcttcaagatcttgaccagcctgaacaaatgtgaaagacttgtaggatacaatcattanaccatttccatcaggctcaatagcagcataatgtggnactgactttccacggagaatatcacgcttaataattttcatattttttattatcttgatttttcttactgatagtgacccactccaganaaacatanaaaccacttccttttcatatccaanttccnctttctctattcnaaagangtagnggtanctatanaaatgttcttcaagcatttaccantgaaaatactg

SEQ ID NO: 1070 - DNA, 356 bp, Homo sapiens
  misc_feature 316, 337: n = A,T,C or G
acagagggtgcccagcagggtcttctacagtggctgttgaagaggctgaaggcaaagatgccttttgatgccaacaaactgtattgcagtgaagtgctggccatattgctccaggacaatgatgaaaacagggaattgcttggggagctggatggaatcgatgtgcttcttcagcagttatccgtgtttaaaagacacaatcccagcacggctgaggagcaggagatgatggagaatctgtttgattccctctgctcctgtctaatgcttagttccaatcgtgagcgcttctgaagggcgaagggtcttcactganaatctcatgctcatggaaatnaatatcttcccggagcatt

SEQ ID NO: 1071 - DNA, 516 bp, Homo sapiens
  misc_feature 423, 426, 443, 456, 460, 471, 491, 502: n = A,T,C or G
actgcaactgccagaacttggtattgtagctgctgcccgctgactagcagctggactgattttgaataaaaatgaaagcattaaagggtttccctacaaaacatttttctttaaaatacttttgaaatggctataagcagttgactttcacccttggagagcatcacactgtgtgaggttcagtgattgttgaccctccccagcccctcctgcttctttaagttatctgtgtgcgtgcgcttcctctcaatcttctttgcacgctcatttctttttctctgacccatgagaaaggaaaacttactgatgataatttttaaatagtgtaattattcatttatagcatgtcaggataaattaaaaagaacattttgtctggaaatgctgcccgggagcctattgtgtaaaatgtagggattttgnaanaataaccttgaaattgnaaattgacacgtngttnggtcaaattgngtcaaagtttaatttggttntgtttccttgnttccttattttaag

SEQ ID NO: 1072 - DNA, 570 bp, Homo sapiens
  misc_feature 459, 476, 480, 483, 526: n = A,T,C or G
acaattgtctttattatcatatatggtatgtatgtatgatttctttccattcctcatatttagactgtatatttatgtaggtgtgagtgattgcctggtgcttgcttgtgccaaggtgctaggcaccctccaaccctgccaacttttgtggcctcccaaagcattcctgttaccaaagaggcttcaaacctgaccctcacttctcagtggacccgagtttccctcccatgccattattttcagtggggaagttttagaggtgagctgttggccacaatatcaattttaagtgttcatagcagttatgtctcctgcattcttggctcctggatttaccaccaagagtcccaaaatattaatgctcttccctttttctaccctcaaacttatagttgtatcttattttttaaaatgaattttcatggccaggcacaagtggctacccgcctgtaatcccancactttgggaggctgangcanganaattgcttgaaccagaagtttgagaccagcctgggcaatgtantgagaccccctgtctctaaaaaaaaaaaaaaaaaaaaaaaaaag

SEQ ID NO: 1073 - DNA, 653 bp, Homo sapiens
  misc_feature 588, 645: n = A,T,C or G
acaagaagctcagcgcaaagcgtgcggatttgcagtccaccttctctggaggacgaattccaaagaagtttgcccgcagaggcaccagcctcaaagaacggctgtgccaagatggcttttactacggaggggtttcttctgcctcgtatgcagcttcaattgcagcagctgtggctcctaagaagaagattcaaaccactctgagtaatctggttgttaagggcacaaacttgatcatccaggaaacacggcaaaaactcggaataccccagaagagcctgtcttgctctgaggagttcaaggaactgatggacctgccgacgtgtggagccaggaacttaaaacaacatttagccaaagccacagcttcagggattatggggagcccaaaaccagccatcaagtccatctcggcctcagcactcttgaagcaacagaagcagcggatgttggagatgaggagaaggaaatcagaagaaatacagaagcgatttctgcagagctcaagtgaagttgagagcccagctgtgccatcttcatcaagacagccccctgctcacctccacggacaggatccgagttccccangctggagggagccccggccacaatgacgcccaagctggggcgaggtgtcttgggaangaaatgat

SEQ ID NO: 1074 - DNA, 652 bp, Homo sapiens
  misc_feature 518, 522, 572, 641, 643: n = A,T,C or G
acaaatctggagtggctgtaaaattcggttctcagagatgaacttgcagattcggactttcaattgttctgttgttttagtttttcttatcaactggggaactgtttgtgactaagctttgttaaaagtagagaagagcttttcatagttccaacattagttgttaccgggcgcagtggtgtgtgtctgtaatcccaactactcgggaggctgaggcaggagaatcacttgaacccgggaggtggaggttactgtgagccgagatcgcgccattgcaccgcagcctgggcaacagagtaagactcatcagctcccaatccccagattctccagtacaaactcttcatagtttacttgaccatcaccatcaatatctgcttccctgatcatttcatcaacttcttcatctgttaacttctccaaggtttgtcatcacatggcgaagttctgcagcactaatatagccattgccatccttatcaaacacacggaatgcttctctaattcttcttcactgnctgntctttcatttttcttgccatcattggcaaaaattcagggaagtcaattgngccattaccatcagcatctacttcattaatcatgtcctgtaactctgcttctgtgggattctgcccaananatctcattc

SEQ ID NO: 1075 - DNA, 626 bp, Homo sapiens
  misc_feature 449, 479, 506, 576, 622: n = A,T,C or G
acgcggggggatgggaggggtgttcatgatcatttggatatagcaatctactctgagaaatggaacacagggagttacctatcactttcacttataattccaaaagatgactacaaccatgtccatgctcagattcaaacagttttccatatcacttttgggtggtaagatgatttaattacagttttttttttaattggcagcaccactaaccattccttacattcttttttgtatgtgtggttttctttttatttaacccgcagccgacatcgtagtttcttgttttgttttgttttacagagctgttgcatgacttatgttaccatcctaaaaaacactatattaaacatggaataaattgtctttttatgaattaggctttttgaacatcctgtgttgggatttttttgtttttcaattgcaacaaaagctctgtagggctgcanacatttaaagttcacataatcatctgtaanacattatgtattttgtggaaatactanaatttttttcctgatttgccattatatggatttgctattttttgattaatgcaaaagtatatgactttgntttttatgtgataaccataaatattaaaagtgttgaatactaacantgct

SEQ ID NO: 1076 - DNA, 655 bp, Homo sapiens
  misc_feature 410, 474, 626, 650: n = A,T,C or G
acatggaatcctttgaaggtatattcaaagaacagtatgataccatccatcgcttggaaacaaacaagttgcgaaatgttgctaagatgtttgctcaccttttatacactgattcacttccatggagtgttcttgaatgtataaaactgagtgaagaaaccactacatcatccagtagaatttttgtcaaaatatttttccaggaactgtgtgaatacatgggtcttcctaaacttaatgcaagattaaaggatgaaactctgcagccattctttgaaggattattaccccgagataatccaagaaacactcggtttgccatcaacttctttacttctataggtcttggaggtttaacggatgaactgcgggagcatctcaaaaatacaccaaaggtcattgtggcgcanaaaccagatgttgagcaaaataaatcctccccatcctcttcctcttcagcgtcctcctcttcanagtctgactcatccgactctgattctgacagcagtgatagcagttcaaaatcttccagtgaagaaagcgactcttcatccatcagtagtcatagctctgcctcagctaatgatgtaaagaaagaagggcatgggaagaccagaagtaaagangtagataaattgatcagaaaccancaaca

SEQ ID NO: 1077 - DNA, 379 bp, Homo sapiens
acgcgggatttgacaaagatggtgatggaactataacaacaaaggaattgggaactgtaatgagatctcttgggcagaatcccacagaagcagagttacaggacatgattaatgaagtagatgctgatggtaatggcacaattgacttccctgaatttctgacaatgatggcaagaaaaatgaaagacacagacagtgaagaagaaattagagaagcattccgtgtgtttgataaggatggcaatggctatattagtgctgcagaacttcgccatgtgatgacaaaccttggagagaagttaacagatgaagaagttgatgaaatgatcagggaagcagatattgatggtgatggtcaagtaaactatgaagagtttgt

SEQ ID NO: 1078 - DNA, 398 bp, Homo sapiens
  misc_feature 390: n = A,T,C or G
actgtcacttaacccctattaacatacggtgttcaagccttccagtatcagcgccttttgcatagcatcgctgctagtcgtttcactagcatgctggctaggagtcttcttagtcactcttttcttctccttgatagtgtctgtactattttgttttttgctttggttattgtttttttcccttttcttagctatgagctgatcattgctccttctcacctcctgccatgatactgtcagttaccttagttaacaagctgaatatttagtagaaatgatgcttctgctcaggaatggcccacaaatctgtaatttgaaatttagcaggaaatgacctttaatgacactacattttcaggaactgaaatcattaaaattttatttgaatanttaaaaaa

SEQ ID NO: 1079 - DNA, 284 bp, Homo sapiens
  misc_feature 130, 142, 211, 273: n = A,T,C or G
acttttttttttttttttttttttttttttaaaatgtcccaggctgccttcctgtcctcccatcctgcatcctgctttctgttccctggataccgtaggatggttttatttcagttcatgcacaaattantctggacactgnggagtcataacaagagtgggatggaggttccagggccaatcagtttctttggagggaatcttgaaaagnaggttaaagcaatgcccacaaaagccactgcttctccttcccatccccagcaatgagctaanagccaacctca

SEQ ID NO: 1080 - DNA, 650 bp, Homo sapiens
  misc_feature 628, 634: n = A,T,C or G
actgtgaagtcaaaggcccaacattacagagcgcacctctgcctgaaatacaaaactaagttaactagcaagttacaggaaatagccttcagtaaattccacaagccaagtggctactgcattgtccctgaagaaggagggcccagtgttctttctgggtgtgtaaggtcttacttagttcaaggtttgtcccttcttagttgtaggttgggccctctttcgtttccaagaggtataggacactagagtacaattgaatatatgtgcacagtgatgaaaccaccaccacaatcaggataataaagaagtccttcaccccgaaaagttctctcctgcccctggataatccatcccactaattccctataggcaaccacagaactgctttctgtctctgttgattagtttgcattttctagaattttatataaatggaattatacaatatgttctttttttaatctggcttcctttactcagcatgattgtcttgagatttattcaaaatacaagatttgttcaaaatatgctgagtataatgtgttatcaatgctccatcgcattttgttgctgagtagcatctcaatgtatggatgtaatttgtttatccatttgcctgttggtggangaagcnccggggcatttggatt

SEQ ID NO: 1081 - DNA, 500 bp, Homo sapiens
  misc_feature 441, 479: n = A,T,C or G
acctttgtgcatgttgccttcattcctgagcaggtatcatcctcagggaaccagcatggcacctaccaggccaggctctgttcttaggagcaaggagcttcttgcgctaacagttctggcctgagacctggattgagccttggcagacttcttgtctaaatgttggccattcagtctcaggccctctgttccatggaattgggaatctccaggtgacctaatcctcattggtggcttgatgtttgctggtatcttccaaactcagttcccagactagattgatacctggagcccagctgcctactcagcatttccacttgggtgcttcataggcatttcaaacctgatgtgtttaaaacacttgattaggctccggttttcctttggcttctgcttttcagtgaatggcatgactgcctatgtgggtggcaagccacccangtgccgaggaaagagactgagggcacgagctgttccantataataaaatatataaaata

SEQ ID NO: 1082 - DNA, 495 bp, Homo sapiens
  misc_feature 403: n = A,T,C or G
actttttttttttttttttttttttttggtaaggaccagtattgtatttgactttttaaaaaaccatttttaccctggagctaaaatacgaggttatactgttctgcttaatacaatactggcagcctaaaaatgcttcaagaaaccatatccccaacagcggcagagcatcgggaggagaccctctgtctctgaggcttcggtgcacttctgctcaaacggtggcgggagtggaggtcgctgctgaagggtgacggtgtggccatgacacgggcagcacgggaacggaagacgccggagacccagaaggcgcatgactgcctggcctcgagtcactaaaagcagtttgatttcactcttgtcttacttttctagtatggcttcctctactctcttaaacttnttcagttcgacaaccgagttcccagtatttgagatagagccacatgagtctgccattctggcgtttgttggtgttccaaacatcaccacagt

SEQ ID NO: 1083 - DNA, 525 bp, Homo sapiens
  misc_feature 31, 429, 454, 462, 480: n = A,T,C or G
actgtaaaagttctgacacaagacagtgttngtggttacttttcatcgactttagcatgtgatctcagggactcagacatacgtctaagttctattctgagttttggcaacagagcagtgacagatatttctgaatgaacaatttttaggtgttttcagccatttgaaaagtattgccaacacactatttggtgttagctcaacagtcacgttgtgccaagaattaaagaactctaaagtctacaaacatcttacttcaccaagactaactataattgaagggtttactatttgtttaataaaaaatcacacatcaacttttatccaaaacagcaactactacaaaaggaatgacaagaaaaaaaatgacttcacagaaatacactaaaaaaatctgacaatgttatgcaagaacccgcccaaagtttnagtgtttaataatgaatagcacacntgaccaangtccaagatgtgaagatncccatgttcaagaaactgggggggaaatcactctacaaactaact

SEQ ID NO: 1084 - DNA, 439 bp, Homo sapiens
  misc_feature 268, 309, 342, 394: n = A,T,C or G
actgctgccgaagttgccccagttccatggggttcgtgtctttggcatcaacaaatactgagggatgggttttgggacagctccatgggcatggggaaggcactgaaacagaggactataaaacatccttctcttattctccatactgtcttctacacctttaaagcctgagaactatacaacctttcccagactcccaagaagagaagagattggcaaatggggctcctgggcccagtcctgctagtggcaagtttctttgaatcangaaggcaggtgaggttagggccaaatcactctcctccatancaggaagccatttgggcagcttctttggtgatnacatctttccatatcttttacactttaccaccttccagctctgttttgctgngtatttttcttacaataatttttttttcagctatagctgcagttt

SEQ ID NO: 1085 - DNA, 331 bp, Homo sapiens
  misc_feature 184, 216, 224, 318: n = A,T,C or G
acaaccttcaaacattccagtttttataaaaaaaggggcacacaatcgtggttttgatccccttttgtttttggacaaatgtttctacaaatacagattcaacaaacccaaaggctgcaaatttacttgcacagtaatctgccagcccatttactccacttaatccagctgaacttgaaatgcnaaccaaatgtccatggtcattagcaatcatancaggtaanaaaggctttataagtccataaatgtgctttgaaattcacatcaaatgacttttccataaagctcatttggacagtcaaggaactttttgcctgntacgattccggca

SEQ ID NO: 1086 - DNA, 648 bp, Homo sapiens
  misc_feature 205, 216, 287, 313, 326, 354, 358, 360, 370, 379, 388, 402,406, 408, 424, 427, 430, 435, 439, 440, 449, 453, 454, 460,461, 463, 467, 468, 469, 470, 471, 483, 485, 489, 490, 493,504, 506, 507, 516, 520, 523, 531, 533, 535, 538, 543: n = A,T,C or G
  misc_feature 544, 547, 554, 559, 563, 566, 568, 570, 572, 574, 575, 576,579, 580, 582, 584, 590, 591, 595, 598, 602, 607, 622, 625,628, 631, 637, 641: n = A,T,C or G
cgaggtacaaatgttcctgtaagttgtaacagaaaatgaaccccaactctttcagtctttaagacctcagtcacagtcccacactaatagctgccttttagtaaaatagtgacatccagtggacaaatgaaatatttctcaaattcccatatttgaatcataaacaaaagttgcctctttaaatccaacaattttagtatgagtncctacttattntgatggaatctacagattctcatgaatacttcacatcataatttctatgtatcttaaatatatcctctttncttcctatttaaaatcaattatttanattgagctacgtnagaatgtctactcttgaatctagttgangttnanggtttacttnttccttttnttgcttcanttacttcccaccanccanantacctgggtttggctnttnggnatggnacgnncttaatttnttanngggaannanctgnnnnntcttaattattntnattnnttntgttttgaaangnntttctccantatntgnaaacttcnantntgntttgnnttntttaatnttttnatcnctntntngntnnntcnntntnttatgnncgtnttntttnttgantctggtttctcctcntgnttngtnatcttntgtnatctcgg

SEQ ID NO: 1087 - DNA, 376 bp, Homo sapiens
  misc_feature 7, 10, 14, 15, 26, 35, 40, 41, 44, 49, 52, 61, 62, 63, 65,69, 70, 72, 79, 85, 86, 87, 88, 91, 94, 101, 108, 157, 201,301, 359, 367: n = A,T,C or G
ggtactncanctannggctcattggnatgctatcntgaannacntggtnatnctatataannncnaatnngnaaatctnatagcnnnnaanganaaaatgntgattgnattagaccaagttaagcaacaactaatgcatgaaaccagtcgaatcatnagcagataataaactggatatcaacttagaaaggagcagagtancagatatgtttacagatcaagaaaagcaacttatggaaacaactacagaatttacaaaaaaggatactcaaaccaaaagtattatttcagagaccagtantaaaattgacgctgaaattgcttccttaaaaacactgatggaatctaacaaacttganacattcgntatctttgc

SEQ ID NO: 1088 - DNA, 637 bp, Homo sapiens
  misc_feature 19, 74, 84, 164, 197, 200, 207, 236, 264, 272, 287, 290,295, 308, 325, 329, 351, 353, 355, 362, 364, 365, 371, 379,389, 395, 397, 407, 418, 427, 430, 440, 448, 457, 465, 478,480, 484, 487, 492, 503, 525, 530, 531, 535, 542, 547: n = A,T,C or G
  misc_feature 558, 562, 563, 564, 566, 571, 573, 576, 582, 583, 585, 594,595, 598, 601, 604, 606, 608, 617, 618, 623, 626, 630, 631: n = A,T,C or G
acttctgtgagattacggncgctatgacatggctcagcttcggtttaaaaaaggtcagtgtctatctggaaatntctatgtganaggtgatggaaccagagtttacttcttcacacaagaggaactggacacgcttttcaccactgctggactggaaaaagttnaaaaccttggtggaccgccgactgcagttccgncangcacggnggctcacacctgtaatcccagcactttgngaggcccgaggcgggcagatcacctgangtctgganttcgaagaccagcgnggncaacntggtgaaaccccntctttactaaagataanaaanaatcggcctgggtgttgttggngngntgcctgntnntccaanctactcgnggaaggctgngggcananagaaattacntttgaaccccntggaggcangangttgccagtngatgcttnagatttgcnccactggnaccctgccccggncngggncgnttctnaaaaggggctnaatttccatccccacttgggcngttcnnttancttatanggatncccgaaacttntgtnnncncaaancnttnggctgnncntcaatgggnncanttnacntngnctttccctnncggtnganaatnnttaatt

SEQ ID NO: 1089 - DNA, 399 bp, Homo sapiens
  misc_feature 106, 146, 153, 160, 196, 202, 205, 206, 207, 223, 227, 246,251, 258, 266, 272, 285, 288, 290, 291, 297, 302, 308, 312,313, 317, 320, 336, 339, 351, 354, 358, 361, 365, 366, 369,372, 386, 388, 390, 392, 393, 399: n = A,T,C or G
actaaaggagataagtgtaagttttcccatgacttgactctggagagaaaatgtgaaaagcgaagtgtttacattgatgcaagagatgaagaacttgaaaaagatnctatggataattgggatgagaaaaagctggaagaagtatngaacaanaagcacngtgaggcggaaaataaaaaacccaaaaactcaaatngtgtgnaannntttcctgaagctattnaaancaaccaaggtatgggttgnttttngggtatnccctgganggggtnaatttttgcatgntcnanntgcccnttccncctggntttnngttnaanaataaaataaaaatanaantgtccttgcccnggncggnccntttnnaanggntaaatttccatctncntngnngccctn

SEQ ID NO: 1090 - DNA, 650 bp, Homo sapiens
  misc_feature 81, 90, 92, 106, 131, 137, 141, 143, 154, 159, 160, 161,213, 239, 249, 255, 266, 308, 312, 360, 367, 369, 372, 383,406, 412, 426, 427, 430, 438, 441, 443, 453, 475, 484, 490,492, 495, 496, 502, 503, 505, 506, 508, 521, 535, 542: n = A,T,C or G
  misc_feature 545, 550, 551, 554, 555, 561, 567, 568, 571, 572, 588, 592,598, 600, 607, 610, 618, 620, 621, 625, 627, 634, 636, 638,639, 642, 649: n = A,T,C or G
acaaccctgtgactgtgattgggttattcaacagcgtaattcagattcatctcctcctgataatgaacaaggcctccccanagtatgaananaacatgcccagatnccataaggcagccaagctcttccangggaanattntntttattctggnggacnnnggtatgaaagaaaatgggaaggggatttcatttttcaaacttaaggagtctnaactgccagctttggcaatttaccanactctagatnacgagngggatacactncccacagcaaaagtttcccgtagacatgtgcaaaacttttgngatngattcctaagtggaaaattgttgaaagaaaatccgtgaatcacgaagnaagactncnaangtggaactttnacctttcctttggactacatatngccaantttttacctttttnnaanttaaaaangcncnaatcatattntcaatgacacttaacaactggnttactttgncttggnantcnnacacannanncnctttgtacacaanctcggagatcttgncatatanacngcacnncannctaacncaggannttnntttcctgtcttaaaanctcngtttcncntttttcnttnttaaaatntnnatcntnctccctntncnnttnttttttnt

SEQ ID NO: 1091 - DNA, 651 bp, Homo sapiens
  misc_feature 75, 86, 118, 128, 134, 136, 140, 174, 180, 208, 237, 244,257, 290, 305, 310, 330, 333, 352, 354, 357, 395, 404, 405,412, 425, 440, 444, 445, 460, 464, 476, 484, 490, 492, 499,506, 508, 509, 511, 516, 525, 527, 529, 532, 544, 547: n = A,T,C or G
  misc_feature 548, 549, 551, 554, 559, 564, 570, 573, 578, 583, 587, 590,591, 595, 596, 599, 601, 603, 604, 609, 610, 613, 617, 619,620, 621, 622, 627, 628, 649: n = A,T,C or G
acttttttttttttttttttttttttttttttttccttaaaatccatctgactgggttaattcaaaaaacctgtnttccagctctnaaattctttcttctcctttctctaaactagtnttaaagcttncaactntntttngtaattctttcaatgaatttttcatttccaaaanatgttngggtttatttttagtgatatctcctttnatatcccaaactgtttttctgatgtgtgngggtttnaactttctcttgnatctcattgagcttctttaaaaccaacattctnaattctttatcttgnatttnaaaaattttaattttggtanganccatcgctgaaaagttagngnganccttctggaccactgtaacacacttttttcatattttnaaaagtccnngtacctnggccggaaccacnctaagggcaaattcnagcnnacttggcggcctgtnctantggatccaactnggtccaancttggngnaaatctnggcatancnntntcctngggaaattngntnccncaacaatttcanacnnntntcntaccngaaanttatanttntaaancccgngggnccnnatannganancnnactcnnatnattngnnnngcctnnatgccttttcaattaggaaancc

SEQ ID NO: 1092 - DNA, 448 bp, Homo sapiens
  misc_feature 23, 25, 28, 80, 96, 103, 106, 108, 115, 119, 126, 132, 136,154, 159, 161, 172, 187, 196, 201, 203, 211, 215, 227, 236,250, 255, 267, 270, 282, 287, 290, 297, 304, 306, 309, 313,338, 342, 364, 378, 387, 388, 390, 392, 394, 395, 400: n = A,T,C or G
  misc_feature 401, 403, 411, 412, 415, 419, 421, 424, 438: n = A,T,C or G
acttttttttttttttttttttngnttnttttggggcagttcaagtttaatacaaactacaaaagattaatgggttgctntactaatacatcatanaaaccantancntgcccanaacnccaactnaggccnttcntaccaaaggaagaaaggntggtntntccaccccctntaggaaaggcctgcnttgtaaaanaccananttcggttnaatntgaagtcttgtnttttactanttggaaaaaaaaantacanaaaaggtttttnttntaatggttgccnaccgncanccttganctaaaananccnaacnttattttttgtttggaaaaatattntttntttttttgaaaataaggctttnatggtttaaactgncaagttttnnancnanntgggnnanactttccnnatntttngnaanaaacttgaaaagcntaaaattatt

SEQ ID NO: 1093 - DNA, 411 bp, Homo sapiens
  misc_feature 22, 124, 182, 234, 237, 244, 256, 257, 259, 260, 263, 270,271, 273, 275, 280, 288, 289, 308, 309, 311, 313, 314, 315,320, 323, 327, 329, 330, 331, 333, 335, 338, 341, 348, 351,352, 353, 360, 362, 371, 374, 375, 385, 387, 390, 407: n = A,T,C or G
catccttacaaagatttctgcngtgatttgtgtgaagaagagaacgtttgtctttttcaatgaagctttgcagatcaccatgtggttgaaggttttagttgtggacacagtggtccctccttantgatgaagatcctgccttgggcttcatggaaaacatgcccaccctggggctgcgtttnggatttattgtttttattccacacttcctacttggtctcttggatttctaancancatgcanccctatttgttnntnngtnttggaanncncncccantagaaggnngtttttttttttggtcacnncncnnnatttnatngtanannntncnttnttnttcaaanggnnnatccccntntttttaccntannataactttcnanggncttatgcgctgattatnaaaa

SEQ ID NO: 1094 - DNA, 558 bp, Homo sapiens
  misc_feature 8, 11, 36, 54, 98, 106, 115, 124, 133, 136, 137, 153, 156,215, 234, 242, 246, 250, 251, 259, 269, 274, 286, 297, 300,307, 308, 331, 332, 334, 341, 342, 344, 345, 350, 356, 363,365, 369, 370, 378, 380, 388, 390, 410, 411, 430, 439: n = A,T,C or G
  misc_feature 449, 461, 482, 487, 489, 490, 495, 496, 498, 509, 514, 518,532, 535, 548, 552: n = A,T,C or G
acctggtnaancactgtggcaacatacctgtcttcnttattaattatccattancactcaagcctttctacatgagggataatgaagatggccctcancacacggntgctgctgntgatcttcnggttcctgnagnnggggaactctttggangangcctcagataagaacgataccatttcttagaggagcgcttaccagatcgggacttacanaagtctaccaatggtatcnggaccttngtcnattnngatctgtnccacatggangtttngggatgggattncaacgctaccngcnatgcatnntgggtgttgacaatatcaaaaanntnatccctnncnnaaggnttcctnattgatncntttnntagctggnanattggttnangaaaagcaccccccatggcnnaaacactgcacatgattgngcatactancaataatgcntgtttggatttnagaactgcaaatttcaatatntaatngnngtgcnntnggatatcatanaaaanattnggtggcgatttttnttnggaattagagggntatnaaaaat

SEQ ID NO: 1095 - DNA, 138 bp, Homo sapiens
ggtacgcggggattcttcccctctctacaaccctctctcctcagcgcttcttctttcttggtttgatcctgactgctgtcatggcgtgccctctggagaaggccctggatgtgatggtgtccaccttccacaagtact

SEQ ID NO: 1096 - DNA, 297 bp, Homo sapiens
actgcccctttcacatcaaagaactactgacaacgaaggccgcgcctgcctttcccatctgtctatctatctggctggcagggaaggaaagaacttgcatgttggtgaaggaagaagtggggtggaagaagtggggtgggacgacagtgaaatctagagtaaaatcaagctggcccaaggtgtcctgcaggctgtaatgcagtttaatcagagtgccatttttttttttgttcaaatgattttaattattggaatgcacaatttttttaatatgcaaataaaaagtttaaaaactta

SEQ ID NO: 1097 - DNA, 709 bp, Homo sapiens
  misc_feature 1, 15, 30, 33, 44, 52, 74, 84, 87, 99, 105, 138, 139, 143,179, 200, 226, 241, 254, 277, 346, 355, 386, 395, 400, 404,405, 415, 416, 422, 426, 430, 445, 446, 454, 460, 461, 473,480, 490, 494, 503, 509, 518, 536, 542, 548, 549, 555: n = A,T,C or G
  misc_feature 558, 569, 570, 580, 582, 586, 589, 591, 592, 594, 600, 622,627, 631, 634, 640, 645, 648, 655, 660, 668, 680, 695, 698,701, 703, 707: n = A,T,C or G
ngtaccaccatttgnaccttaacgaagaanaanatcttcaagtngaccctanaagagagttttaaaaaacaaancaatgtaagnaanggatatttctgnatcttnaaattcatcccatgtgtgatcataaactcatannaatnattttaagatgtccggaaaaggatactttgattaantaaaaacactcatggatatgntaaaactgtcaaagattaaaatttantactttcatttattngttattttattgnaagaaatagtgatgaacaaagantctttttcatactgatacctggttgtatattaatttgatgccatcagttttctgaaatggatatttcanatttgcttnaagaaaattaaaatcatctatctgagtagtnaaaattccnagttnaggnngagccatatnnacaacntttnggcnaatgtttatgtttcnngtatatgntccctnnccggccggccgnttaaggncgaattcccnctcncttgggcgnccgganttaggggantccgaacttgggcccaancttggngtaatnntggctnaanctgggttcccnngggaaattgngntctngcncnnantcccanaaacatttgaccgggaagctanaaggnaaanccngggggnctaangtnggggccncccantaattggngggcgcccatgnccgtttcagtggganccncgncnactntg

SEQ ID NO: 1098 - DNA, 590 bp, Homo sapiens
  misc_feature 72, 124, 132, 135, 151, 220, 293, 294, 297, 339, 350, 353,354, 377, 380, 391, 411, 414, 418, 423, 426, 428, 429, 431,433, 434, 435, 437, 441, 443, 445, 455, 461, 467, 469, 472,474, 476, 477, 480, 482, 485, 493, 499, 502, 504, 505: n = A,T,C or G
  misc_feature 506, 511, 520, 527, 531, 533, 534, 537, 540, 541, 545, 547,554, 557, 570, 571, 579, 584: n = A,T,C or G
ggtacgcgggatggactctgccactgcccccgacaagatcagaaagctgtatctctatgcggctcatgatgngaccttcataccgctcttaatgaccctggggatttttgaccacaaatggccnccgtttgntgntgacctgaccatgganctttaccagcacctggaatctaaggagtggtttgtgcagctctattaccacgggaaggagcaggtgccnagaggttgccctgatgggctctgcccgctggacatgttcttgaatgccatgtcaggttataccttaagccccnnaanaataccatgcactctgctctcaaactcacgtgatggaaggtngggaaatgaanagnnactgatttataaaagcaggatgngtngattataaaanaaaagtgcctttttttaccnatngggntaaancgnanntntnnngngaangntntcctctcttnatgttngtcttncnacncntnngtncnctncttaatcntgaatntgncnnnacttntccatcaantaatagnttcntnnccnggnncggntngtttttnaangggtataatttanntctccctnggggngggcgg

SEQ ID NO: 1099 - DNA, 734 bp, Homo sapiens
  misc_feature 7, 45, 87, 95, 114, 136, 175, 178, 221, 227, 252, 254, 255,268, 301, 322, 324, 352, 384, 385, 386, 418, 425, 427, 428,443, 449, 458, 465, 466, 475, 482, 497, 498, 499, 500, 511,512, 513, 515, 527, 549, 555, 556, 559, 565, 567, 568: n = A,T,C or G
  misc_feature 582, 583, 584, 595, 597, 603, 604, 614, 621, 628, 637, 638,646, 655, 661, 669, 676, 681, 686, 689, 690, 699, 706, 712,723, 726, 733: n = A,T,C or G
acttgtncctagtttttcaaggtattggctgttctatagatgcantgattgtcccagctagctctgttaccagtcttttggtgtgtntttatgtncatttggagagtcagggcnaaagacaggtgatgtagcactnctgtttttaataattattgcttaaaatacctattaatanttntgggtcatttaaagggacttgaggaagctacccaggattacanaagagngtccacctaacaagatggtctggcngnntcctagttttgtntctggttcaatagaaatatgtgaaagtggtaangtcatcatttgatgcagagancnggttactctataataaatccctttgccnaatgcatgagaatgcagacttgctactggcannnagtgaagcccgtgggtgacataaaaactattntgacggngnnaaccgaattcaaganacgganttttattcnttttcannaagagtccngggcaanaaatttgtaccttcnnnnggaagggaacnnngnattctcctggangggcaccttggcctttccattntggggnngangtttgncnnttttcttgttggcnnnccaggatgccntncccttnnaaaatatttngggggantataccntaccccccnntggggganggtttatgntttaancacaaaangggttcnttggnaaacngannacttttttngggaagnaaaaanctcaaaaaatnttntttgtgna

SEQ ID NO: 1100 - DNA, 657 bp, Homo sapiens
  misc_feature 33, 34, 37, 45, 59, 60, 61, 62, 63, 68, 76, 82, 98, 106,111, 114, 125, 126, 128, 141, 146, 151, 152, 165, 166, 168,171, 172, 177, 191, 195, 206, 212, 220, 227, 229, 231, 241,285, 289, 291, 310, 314, 333, 344, 358, 363, 368, 379: n = A,T,C or G
  misc_feature 386, 392, 397, 406, 413, 429, 450, 462, 511, 514, 518, 548,550, 566, 570, 580, 601, 604, 619, 623, 632, 639, 643: n = A,T,C or G
acttttttttttttttttttttttttttggctnnttntttttttnttttttttttgaannnnnaaaancaaacaantttatnttaaaaaataccaagnatcacatncatanccnattcctaattnnanttacttcttaaancaacntttgnntttgtttacaaanncngcnncaggngataaaacctaatntctnaaactgattgnttacantttataanacaaacntntntatatgtctnaaatcacattttaggcagtttaacttaaaatgcatagacaattncatncnttaaatttgtcattactgncagngaaaaatcacaatttcaanaaaaaaattcnacaaactcatagancacanataanaagtcaagttnacttaanggcaanaagtnattatctgntgatcantgacaggcattgaaantgcctttatccaggggtaaantgaaaaggcaanctatcctgttactttgcacacttgaattgttgcgctgatcaacactacnatnttgnaaaacattaaattcttaaaaaaaaaaaaangntgccacatgtcccctntaanatgcccaaangctggtacaatttccaccaanatnggtcctaacacgttnaggnaaaactaanaatgaangggntttgcaaccaaatc

SEQ ID NO: 1101 - DNA, 591 bp, Homo sapiens
  misc_feature 5, 15, 28, 36, 43, 65, 69, 71, 73, 80, 81, 82, 87, 110, 127,135, 138, 168, 175, 182, 187, 216, 239, 251, 252, 254, 258,264, 266, 270, 297, 302, 303, 310, 315, 317, 320, 326, 328,336, 337, 364, 372, 375, 377, 380, 402, 404, 410: n = A,T,C or G
  misc_feature 413, 419, 420, 422, 424, 432, 437, 440, 446, 447, 450, 460,462, 465, 466, 476, 480, 481, 482, 484, 485, 491, 503, 504,506, 515, 528, 535, 543, 546, 547, 549, 557, 558, 564, 565,567, 576, 577, 579, 587, 590: n = A,T,C or G
gttcncggggagaancttggaccgcatnctagccgncgactcncacaaggcagagttgccatggngaanantncagtggnnncattnttgctccttgtggccctttcctncactcatggccagaganaccacagncanacctggagccatgaaggacacaaaggactnttgaccnaaactgncccanaccctcttcagaggttggggtgaccaacncatttggactcacacatatgaanaatctctatatnnanttcnagacangnaacnaaccctggatgattattcatcacttgnatganngctctanacagntnaanctttananaaaagagnntgcctgataaaaaaattaaattcaganaattggcnatncntgnaggggccttctcaatacttggntnatgaanacnaattgnncnancaaccttntttcnganggccannttntcccctggantnatnntgttggaccntccnnngnntgttantagcccggtttnnanttggaagantttctaacccgtntttatgntttcgtanccnngnatatccannttttgnntngttgacaannantataaaanctng

SEQ ID NO: 1102 - DNA, 617 bp, Homo sapiens
  misc_feature 63, 65, 86, 92, 101, 103, 116, 119, 123, 133, 139, 140, 146,148, 152, 171, 175, 188, 197, 201, 204, 211, 213, 215, 219,225, 231, 256, 258, 266, 272, 276, 306, 316, 320, 328, 340,353, 375, 413, 414, 418, 421, 435, 460, 475, 483: n = A,T,C or G
  misc_feature 486, 491, 492, 494, 496, 500, 503, 505, 528, 537, 549, 559,562, 567, 575, 579, 583, 591, 598, 607, 608, 609, 613: n = A,T,C or G
acttttttttttttttttttttttttttttttttttttttttcccttaattggggggaggatntnttccaacttgggggaagggtnaaggcnttttacctntnaacctcaatcatnacntttntaaaaagttntgcagnncccccncnttgnacaggacaggatggaaaantgtnctggactggctgnattccccantgtnaanctggcancncncctnaggttnttgagngtttatcaactcaccaggtcaaaantntgcaaacnctgggnggancaccattaacccacaaaactaacagttgtnttccactggngcanccctgccnttggcgtttttntcaagggaaaaancttggggtaaacaatggtaaanataggctcactcaccgataacagtgccccaaagggcanngcancanctttaggaaacttntgggtaatgaaattggaaacaaaangttcaaatctttcancaacctgnggnaaggnntnanacanccntnttatacccaattcctgcaaaggnaaggacgtnatcatgctccgnccctttggcnttnacctnaactgggnaggnaaancgggttcntgccttnataaaaaannnaaanacct

SEQ ID NO: 1103 - DNA, 458 bp, Homo sapiens
  misc_feature 83, 130, 144, 152, 165, 187, 194, 196, 202, 209, 219, 222,226, 239, 244, 249, 252, 253, 257, 265, 288, 291, 298, 301,312, 316, 317, 331, 333, 334, 337, 345, 351, 353, 355, 357,363, 367, 376, 380, 383, 384, 389, 392, 396, 397, 410: n = A,T,C or G
  misc_feature 411, 418, 419, 425, 429, 430, 432, 433, 437, 446: n = A,T,C or G
acacttgaaaccaaatttctaaaacttgtttttcttaaaaaatagttgttgtaacattaaaccataacctaatcagtgtgttnactatgcttccacactacccagtcttctcacacttcttctggtttcnaagtctcaaggccntgacaganaagaaagggcttngaaaattttctttacaattcangtctttnangcaacnttgaaancctttctttnatnttgncaagcaaccaganccttntattntgnnaggntccgtaancataaaaaaccgggtttgaattntcnttccaangantttcggctttnactnngcaaaaaaatggtnannaanattattcntggggnantncntgcccntttnagaaaaaanggtnttnncaaanttntttnnttaacccaatttnnggagggnnaaaacngtgnntnncaantttttggantttctttttttt

SEQ ID NO: 1104 - DNA, 540 bp, Homo sapiens
  misc_feature 240, 260, 268, 292, 299, 320, 325, 331, 340, 347, 348, 373,376, 378, 381, 385, 396, 409, 414, 416, 419, 421, 425, 430,432, 433, 436, 440, 441, 443, 450, 454, 465, 468, 471, 473,476, 482, 497, 508, 510, 511, 516, 527, 528, 530, 534: n = A,T,C or G
  misc_feature 536, 538: n = A,T,C or G
actgtttattaaccaaccagcttagaaaaataatcatggtagacaccttagttcattcttctaataagcctgttgatctggtcctccctgttgccagcatctccaccttctacaaaatgggtggtctttttcttcattccacctcgtggagaagacaatttgaagggccacaggaagttatttgcctctttgaagcgttttccaacagtatagatctcatgaatcaaatcctccatgcanatgatgccgtatttaccaanagatctancaatcaaagcgttatctgtcaaancaatttncttcttattgattttgccatnaccangcttgnagattaagntcatttnntgacttcagattggggtacccttgntcntngancacngctaatgggcnaatttcatctatnatttncntgncngttncttancnngancccnnancttggtntctnatctttggtgntanatntntgnatttanctgtttcctcgtgtnaaaattgttantnngttanaatttcataanntnatancnancg

SEQ ID NO: 1105 - DNA, 538 bp, Homo sapiens
  misc_feature 143, 175, 197, 206, 259, 261, 324, 406, 407, 409, 416, 425,427, 430, 435, 444, 447, 448, 453, 456, 457, 469, 473, 475,476, 478, 492, 494, 496, 497, 500, 502, 507, 510, 518, 519,529, 530, 531: n = A,T,C or G
acttttttttttttttttgttttttttttctcagctaagcccatacagaagaaccagactgatgaggaaaaagaacaggaagaaataaaaggaaaaatgaaataagtaagttgagaaagaatcctggaaaaaagtaaaaaatncaaaataaaaaggaaggcagaaggaataggcnctcaaaggaaggaaaaaagaangaaaaattntaggctatttggatagtttagttaagatatactgaaaccttgtgccaacctgnanagaagatcagccaatataaagtcaagcctcccttacctttaccttaccttcctgccatcccantgtcacctgggtctggtccctattattcataacaatttgcattgcttgtgtttcctagaattttcaaactggtcctttatgnnanattgctnttttttttncnttncattnttccctttntanntaatnctnncttttgggcttnaaangnntntgtcctttaaccanangnnttncncaacntgnaatttaanngaattgcttnnnccttttt

SEQ ID NO: 1106 - DNA, 502 bp, Homo sapiens
  misc_feature 47, 323, 438, 448, 449, 459, 461: n = A,T,C or G
actaaatggtatccttagattaaaattttgtgcttgataacagctgntttttctacattagaaataagatgccacacaaggaactacattccagatttaaagaaatgaaaggataccattagtgtgtataacagattattgttcatacttgtaaagcatcttatgtcattgagaatataaagaacagtgccttagaagacagtgaaaggtaagctctagcttaatgtctatgatttgttctttgacattaaggaaggtaaggattggtcagaggatgtaacttgatgtgagcagtagtaaacctgttttagatatcatactgntaatattttattgaaaatttatttcagagcggagaaacttaagctaaagtctgttatacagaattgaaagccttcgtatcttggaccttccaaccattttttcttatggctgttngaaaagtatnnaagctaaatngntttaataccactttcctttgtacctttggccgcgaacacgc

SEQ ID NO: 1107 - DNA, 383 bp, Homo sapiens
  misc_feature 340, 355, 370, 376: n = A,T,C or G
acttcgtgtgctccgacccatggtgacgatgacacaccctggtggcatgcccgtgtatgttggtttagcgttgcctgcattgttctagagtgaaacaggtgtcaggctgtcactgttcacacaaatttttaataagaaacatttaccaagggagcatctttggactctctgtttttaaaaccttctgaaccatgacttggagccggcagagtaggctgtggctgtggacttcagcacaaccatcaacattgctgttcaaagaaattacagtttacgtccattccaagttgtaaatgctagtcttttttttttttttttccaataaaaagaccattaactnaaaaaaaaataaatnaaaaaaaagtacctnggcgtnaccacgc

SEQ ID NO: 1108 - DNA, 525 bp, Homo sapiens
  misc_feature 413, 435, 453, 463, 472, 473, 477, 508, 518: n = A,T,C or G
accagtaaggctggatcttacagagaaagactatgaaatacttttcaaatctattaatggaatccctttccctggaggaagtgttgacctcagacgctcagattatgctaaagtggccaaaatattttataacttgtccatacagagttttgatgatggagactattttcctgtgtggggcacatgcctccggatttgaagagctttcactgctgattagtggagagtgcttattaactgccacagatactgttgacgtggcaatgccgctgaacttcactggaggtcaattgcacagcagaatgttccagaattttcctactgagttgttgctgtcattagcagtagaacctctgactgccaatttccataagtggagcctttccgtgaagaattttacaatgaatgaaaangtttaaagaaagttttttaatngtcttactttccaaattncagaatgggnaagattggnnttantttcaccattggatggatttaaagtatcccngtatatgggngtccaag

SEQ ID NO: 1109 - DNA, 518 bp, Homo sapiens
  misc_feature 47, 295, 354, 388, 397, 398, 405, 406, 409, 411, 416, 434,448, 456, 459, 460, 474, 483, 487, 504, 505, 506, 518: n = A,T,C or G
acgcggggatgccaaggtcatgaaggatgcaaagacgaagaaggtantagagtcaaagaagaaggctgttcagagactggaggaacagttgatgaagctggaagttcaagccacagaccgagaggaaaataaacagattgccctgggaacctccaaactcaattatctggaccctaggatcacagtggcttggtgcaagaagtggggtgtcccaattgagaagatttacaacaaaacccagcgggagaagtttgcctgggccattgacatggctgatgaagactatgagttttanccagtctcaagaggcagagttctgtgaagaggaacagtgtggtttgggaaagatggatnaactgagcctcacttgccctcgtcctgggggatnagaggcatnnaggcttnncantncccancatcttttgcgaaaaggntaaacctggaaatntttttaanggnnaacttaatcagttntctattggnctanctttttaaaaatatttnnnatttcaaatttn

SEQ ID NO: 1110 - DNA, 320 bp, Homo sapiens
ggtactattatactaaaagctcctactgtgatgtgaaatgctcatactttataagtaattctatgcaaaatcatagccaaaactagtatagaaaataatacgaaactttaaaaagcattggagtgtcagtatgttgaatcagtagtttcactttaactgtaaacaatttcttaggacaccatttgggctagtttctgtgtaagtgtaaatactacaaaaacttatttatactgttcttatgtcatttgttatattcatagatttatatgatgatatgacatctggctaaaaagaaattattgcaaaactaaccactatgt

SEQ ID NO: 1111 - DNA, 644 bp, Homo sapiens
  misc_feature 348, 466, 487, 495, 503, 506, 509, 545, 566, 587, 606, 620,623, 632: n = A,T,C or G
ggtactacaagtttagtggcttcacgcagaagttggcaggagcatgggcttcggaggcctatagcccgcagggattaaagcctgtggtttccacagaagcaccacctatcatatttgccacaccaactaaactgacctccgattccacagtgtatgattatgctgggaaaaacaaagttccagagctacaaaagtttttccagaaagctgatggtgtgcccgtctacctgaaacgaggcctgcctgaccaaatgctttaccggaccaccatggcgctgactgtgggagggaccatctactgcctgatcgcctctacatggcttcgcaacccaaaaacaaatgaattangctgcagaggactggtttggttttttggcataaaccctttgaagttccttttcattggtaaattaaaattttttttttacttggatggctaacattttgcaagaaaaataggaagatntgaagaagatgttttggttgntatgaaancatatggntgncanactcattcgacagttaaagccttgttaaagaacggngccttgcttgggttgggctcngattcctgaggttggataagnttgaccagcttgtatgtanctggttaggcctanggnttaggtgcntttgacatgggc

SEQ ID NO: 1112 - DNA, 662 bp, Homo sapiens
  misc_feature 453, 502, 511, 528, 588, 607, 615, 625, 627, 634, 638: n = A,T,C or G
cgaggtacatgctctatctgatgctcgatgtgtgtttgacatggctggagaaattggctttacgatgaacatgttagacattggtggaggattcacgggaactgaatttcaattggaagaggttaatcatgttatcagccctctgttggatatctactttcctgaaggatctggtgttaagataatttcagaacccggaagctactatgtgtcttctgcatttacactcgcagttaatatcatagcaaagaaagttgttgaaaatgataaatttccctctggagtagaaaaaaccggaagtgatgaaccagccttcatgtattatatgaatgatggtgtttatggttcttttgcaaagtaaactgtctgaggacttaaataccattccagaggttcacaagaaatacaaaggaagatgaaccctctggttacaagcaacctttggggtccatnctgtgatgaaccttgatcaaattgtggaaaagcttgtcttcttcctganctgaatgtngggaaaattggcttatntttatacatgggaccaaatcttcatgaaccatttgcttttaatgatttcaggggcccccnttattaatgatgcattcangatggggntaaaaccaantntggaatnctcnacccatgtgaaaacttttttgcct

SEQ ID NO: 1113 - DNA, 426 bp, Homo sapiens
  misc_feature 413, 417: n = A,T,C or G
cgaggacgcgggattgcaacaagaaaagccagatttctgctttttggaagaagatcctggaatatgtcgaggttatattaccaggtatttttataacaatcagacaaaacagtgtgaacgtttcaagtatggtggatgcctgggcaatatgaacaattttgagacactggaagaatgcaagaacatttgtgaagatggtccgaatggtttccaggtggataattatggaacccagctcaatgctgtgaataactccctgactccgcaatcaaccaaggttcccagcctttttgaatttcacggtccctcatggtgtctcactccagcagacagaggattgtgtcgtgccaatgagaacagattctactacaattcaatcattgggaaatgccgcccatttaagtacctgcccnggcngccgctcga

SEQ ID NO: 1114 - DNA, 647 bp, Homo sapiens
  misc_feature 1, 448, 458, 507, 514, 530, 535, 538, 572, 574, 580, 597,632, 633: n = A,T,C or G
ncttttagtaacgacccaatctaaggagccttggaggcttgtgaaaaagacgtccacaaagatgctgcatttctagtgtggggtgaattaaaatacttctgtaagaaggagggaactgaatcacctcagcatgaataaacagcatttttcttttaaacagtaactcataatctgatgactcactttgctttactagttcaaaattaggcaggagaagaactaagctaattggtcagacccagaaacacaaagatttggcaagctgcagtcactcagctcatgatgtgtgataatcagcagaaaggctgctcaactcttgtccattccttcacatctgtagaggagttcgatataaccacttctctttatcaactttaagctgcatacaggcaaagagatcacaaactgcagggaggccataatggtctggggggaagttatgttcctnctgtagaagngaattaagtaatactttctgggccttctttcgaacaaccacttgtcttntcaaaanatactggctgaggtgnccatnttntttctggcaggacccatcagctgggttaaggacncnagaagnttatggggctttaactntgttgcccttttttaatcctggccgacccctaggnnattcacccctgggc

SEQ ID NO: 1115 - DNA, 660 bp, Homo sapiens
  misc_feature 357, 416, 418, 477, 487, 489, 506, 519, 550, 556, 586, 591,605, 638: n = A,T,C or G
acgcgggagaactgcgcgagaagcgagaccttagaaggcagcgcttcccgcgaaggacccggaaaggagcgcctactaaggacgccgtcgaggtccggggcgcctcaactctatagctctaactggctagaagtgcccaacgtggaatgtttcttttttaaaggcggctcttgaagcgacccggaagcggaagtggaagaaagttctagtggcttgagattaagcctgatcaagatgacaacctccaaaagcacccgagacttcgtggcagagcccatgggggagaaaccagtggggagcctggctaggattggtgaagtcctgggcaagaaactggaggaaaggggttttgacaangcctatgtttgtcctttggccaagtttctggtgctaaaagaaagatgaaagacctcttncnggaatggctgaaaagacactttgtggcgccaacgccaagcaatccccgggacttgtttngatgccttcnanagtggtgccaccccttnttttgatgctctnttggaaacttttaatcccaacccttatccanaatttnaacccaatagggactcttcctttctttacnaaggnaaaaatgttttgtntacttggccggaccctagggaattcaccattgngcctttttgatccacttgtcaa

SEQ ID NO: 1116 - DNA, 555 bp, Homo sapiens
  misc_feature 101, 183, 239, 288, 304, 309, 327, 352, 353, 360, 380, 381,390, 393, 397, 409, 410, 411, 414, 429, 433, 434, 436, 441,451, 454, 455, 461, 462, 472, 492, 496, 498, 500, 515, 525,530, 531, 541, 548, 549, 552: n = A,T,C or G
acagccaacggtttcccttgggggctttgaaataacaccaccagcggtcttaaggttgaagtgtggttcagggccagtgcatattagtggacagcacttantagctgtggaggaagatgcagagtcagaagatgaagaggaggaggatgtgaaactcttaagtatatctggaaagcggtctgnccctggaggtggtagcaaggttccacagaaaaaagtaaaacttgctgctgatgaanatgatgacgatgatgatgaagaggatgatgatgaatatgatgatgatgntgattttgatgatgangaaanctgaagaataagctccantgaagaaatctatacgagatactcnngccttanatgctcataagtctattctnnatgggaatngantcanatcccatttttnnnctncctttatccaaatangtcnntnaatcnttctcttaancanntctaannctccctaatntcacccacataggacccttnttcntntngaaatacattttaangctaataatngcatnncctgtttatntaaaatnngtnggg

SEQ ID NO: 1117 - DNA, 640 bp, Homo sapiens
  misc_feature 491, 525, 566, 572, 595, 609, 617, 622, 631, 638, 640: n = A,T,C or G
cgaggtacgggtatcactttccggagctggtgaagatcatcaacgacaatgccacatactgccgtcttgcccagtttattggaaaccgaagggaactgaatgaggacaagctggagaagctggaggagctgacaatggatggggccaaggctaaggctattctggatgcctcacggtcctccatgggcatggacatatctgccattgacttgataaacatcgagagcttctccagtcgtgtggtgtctttatctgaataccgccagagcctacacacttacctgcgctccaagatgaaccaagtagcccccacctgtcagccctaattggggaagcggtaggtgcacgtctcatcgcacatgctggcagcctcaccaacctggccaagtatccagcatccacagtgcagatccttggggctgaaaaggcctgttcagagtctgaagacaagggtacactccaaatatggactcattttccactccaccttnattggccgacaacttgccaaaacaaaggccgatnttcccatcctgcaaacaatcatattgcttacaatcatggtntttagngccacatttttgggaaacttcanacaattaaaacatngcttttanctggnaaacccaanattgttntn

SEQ ID NO: 1118 - DNA, 656 bp, Homo sapiens
  misc_feature 1, 436, 450, 466, 485, 517, 530, 548, 558, 567, 571, 572,577, 585, 589, 591, 592, 600, 620, 635, 654: n = A,T,C or G
nctgaaattagtagaagctaggccaatgatccatgaattgttaactgaagggcggagatcgaagactaacaaagcaaaaacccttgctacatgggcaacaaaagaactgaggaaactgaagaaccaagcttgatctgttaccattgggatgataacctgaggacccccactggaaatctcccatcttttgaaaaacctggaagtgaggagtgtgcacggatgctgaatgtttgggaatgagaggatgagtgagtgaggcttgaaaacacaccacattgaaaatcctgcccagcagcagcccgcagcccgccaacagcagcgctgttagttgagctaagtaaagcactgcttcgtagaaaaccataacatcggccatcttggaaaaaagaaaaacaatggagttacttatttaaaaaaaaaaagaaagaaagttatnccttccaggaaagntagaagtacttttctntcttttggccaatgcccantggaatcctggtttggggaggaggaaggactnggttcactggggngctttgttgtaaaaggcnctggcctttntctgagganaaanntgganctgggttnaaancnncttttttncttggccggacccctagggngaattcacccctggnggcgttctttggaccaccngt

SEQ ID NO: 1119 - DNA, 653 bp, Homo sapiens
  misc_feature 435, 444, 454, 480, 490, 498, 527, 528, 538, 544, 557, 599,618, 620, 627, 633, 644, 653: n = A,T,C or G
acgacagcagactcctccagggctctgtccacttgcaggaaattcagttcatgaagataagaagtttcttgacaaatacatgccccagttcatgaaacatcttcattatagaataattgatgtgagcactgttaaagaactgtgcagacgctggtatccagaagaatatgaatttgcaccaaagaaggctgcttctcatagggcacttgatgacattagtgaaagcatcaaagagcttcagttttaccgaaataacatcttcaagaaaaaaatagatgaaaagaagaggaaaattatagaaaatggggaaaatgagaaaaccgtgagttgatgccagttatcatgctgccactacatcgttatctggaggcacttctggtgggtttttttctcacgctgatggctttggcagaacccttcggttacttgcatctncagaatgantactcaagcngacagcacacgaaatctatttttctnctaatatgcnggttccantatgacacaacacttccttttaagtcctnnggcgcgaccncgctanggcgaattccacnccctggcggccgtcttatggatccacttggaccaacttgggnaacatggctacttgttctngngaatggntccctncaattccccanatcaaccgn

SEQ ID NO: 1120 - DNA, 249 bp, Homo sapiens
  misc_feature 1, 39, 40, 69, 164, 172, 191, 212, 216, 217, 223, 225: n = A,T,C or G
nctgttcaaaaaggaatgccccacaagtgttaccatggnnaaactggaagagtctacaatgttacccancatgctgttggcattgttgtaaacaaacaagttaagggcaagattcttgccaagagaattaatgtgcgtattgagcacattaagcactctaaganccgagatngcttcctgaaacgtgtganggaaaatgatcagaataaganaganncctatnanaaaggtacctcggccgctccacgc

SEQ ID NO: 1121 - DNA, 484 bp, Homo sapiens
  misc_feature 339, 419: n = A,T,C or G
acgcggggctagtggcttgaggtatccgcaggagcggccgggtggcgggaggaaccgttacgggaactgaagttgcggattaagcctgatcaagatgacaacctcccaaaagcaccgagacttcgtggcagagcccatgggggagaagccagtggggagcctggctgggattggtgaagtcctgggtaagaagctggaggaaaggggttttgacaaggcctatgttgtccttggccagtttctggtgctaaagaaagatgaagacctcttccgggaatggctgaaagacacttgtggcgccaacgccaagcagtcccgggactgcttcggatgccttcnagagtggtgcgacgccttcttgtgatgctctctgggaagctctcaatccccaccctcatccagagtttgcagccgagtanggactcctccctgtcctctacgaaggaaaagattgctattgtcgtaccttcggccgcgacccccc

SEQ ID NO: 1122 - DNA, 590 bp, Homo sapiens
  misc_feature 477, 481, 506, 540, 550, 555, 572, 574, 577, 580, 585: n = A,T,C or G
accttgacttaaatccaagagcaaaagttaagactctcctcctctatttttggtaaacaactgcatggtaaacttagatgactcttccccctggattttacctgggagtggcctttttacatttttatttaaaagagggcaggtttggcacttttatactgatgtcaccaatgttaatatttcttgggatctcaggaagattcatattctttacagctgatacagcacgggctggagctcctgctaagccagcctcagatttttccagcttattttgtgcatcaatttgtgtaacaatctcattcatatttgtctccaataccattccccccatcaccatttctgcaagaatattgtgaaccttgtctacatggaaaatcaaatccagctcacagacattttcaaaacatttgtctaatgtttccacaaataccttgaattagatctaaaatgccaagtcactttctgaagaatccncccngaagacaaaatatacgtgctaatgnctattaataaattggtggcagaacctccaataanaatccccctntaggnaatccaacatttctttntnttnaanccaanggaag

SEQ ID NO: 1123 - DNA, 341 bp, Homo sapiens
acatgacctaatttttacatcatagtaaaacaggccctatggagagaggacatgggtttctctgctgaacagccattatttatactcgttccaaggcttctaacatgatgatactatttcctcgtattaccaccattccaatattgttctgttgtccactagtcgccatctccacacattcatctatcacaaggttcataaagggatcaaatccccgcaatattccttggacatgtctgccaccatttaatttcaatgataacttcttgtccataaattttttcaactcgggagggtgagctttgctcatggtgtatactccgcgggctcccccgcgtacc

SEQ ID NO: 1124 - DNA, 599 bp, Homo sapiens
  misc_feature 437, 463, 475, 503, 512, 516, 518, 521, 530, 544, 557, 559,561, 568, 572, 584, 590, 596: n = A,T,C or G
cgaggtacttgccccttccccagaaaagcgggacttgctgctaagggtgaaggaccaaggcagttgtccctgcgtggtctgacacccttgaaacgtgggtgtataatcagagaggcatccctgcaatgattaaacaccaagggaaggctgccttcccagtctgtgaccagcgccggagttttgggtccacggataaaacgtgtctcttttgtctctaccagaaaatgaaaggaattgaaattaagagaagggagagattgaagtgtagtgccaagattgaaaggagaaagtggttgagggatggtgagggaagttggagaagagagtaaaaagaggctgcttaccagatttgaaattggtgagatgtttcttgggctcgtcggtctgaggacctgaggtcgtaggtggatctttctcagggagcaaaaaaccaggangaccgaggattgatcttccaagggangtccccgatccnagtcatggcacccaaattcatgtgcctncatttgaanaaancnccnacagctttntgtgaccacaaggntgtttttttaacntngngcccgcngctnagtcccaaaaanaatacncccccnttc

SEQ ID NO: 1125 - DNA, 586 bp, Homo sapiens
  misc_feature 438, 475, 477, 498, 504, 506, 511, 517, 545, 552, 556, 563,565, 573, 575, 576, 578: n = A,T,C or G
caaaataacaggttatgaggaaatgagcgatatatgaacggcataaaaacagaaattacccagtaaaaaggatgtcagaaattgacatacaaatatttacaatttttatgaatggtggtctttgcaaagagcatttatattttcttttttttttactaaaatgatatagggtttattttatattttcaaaaaaattgttaaacatcattcttatcaatgtaaaatttacgttattaaaaaattacaaatgatagaatctttactcagggatgggcaataaaacagcaaagagctttgtgattgggtttgaaagattttgaattatagacagtgctcttaatagtttttaataagttgatatttttttctgtgtagatttaaataatttctttaaaagccgtaagctttggctgggcatggtggcttatgcctgtaatnccagcactttggggggctacgatgggtggaccctgangncaggagtcaagaacagctggncacatngngaaanccgttnttctaaaaaacaaaaataacttggcctnaagggantgtnttttatncncctctccngnngntggggggg

SEQ ID NO: 1126 - DNA, 604 bp, Homo sapiens
  misc_feature 419, 437, 450, 471, 475, 488, 493, 516, 527, 529, 536, 544,556, 561, 578, 586, 593, 600: n = A,T,C or G
acgcggggactatggcttccagcactgtcccggtgagcgctgctggctcggctaatgaaactcccgaaataccggacaacgtgggagattggcttcggggcgtctaccgctttgccactgataggaatgacttccggaggaacttgatactaaatttgggactctttgctgcgggagtttggctggccaggaacttgagtgacattgacctcatggcacctcagccaggggtgtagccaagtagacaaatggaatcctgtgctgaacccgaatcttccaaaaaacagcctacaatctgtgaccaccacaagatgtgccctgatggcagctgaagtttgattcaaatgggcacttttcttcccttcctgcctagtttccttttgttccttgagtccacgcagaattccattctctggtcngcagacaggcttaagctnaaagtattggctntattctgtaaaagttctgtancttnggccgcgaccacncttanggcgaaattcaacacacttggcnggccgtactantnggatccnagcttggnaccaaacttggnggaanaatgggcaaaatggttnctgggggnaaatgtnttccctnccaa

SEQ ID NO: 1127 - DNA, 592 bp, Homo sapiens
  misc_feature 402, 432, 494, 496, 500, 541, 544, 549, 551, 557, 560, 573,583, 591: n = A,T,C or G
acaattcttcacagacacatgaagcagaacatttgaaaatcaaaacttacttaaatacaagattctaaaagtgaatggcaatttaatggttaaaatttgaccagtggtgaaacaagcagcaagctacaaaatccatcaccaccaacagtttcaatgttagcactaagtattaaaccaaagtaatgcatattctggttttgcttcttcaagaacagcccgtttattctgtttcaatctctctgaacaatactggtaggtaatagttacactgacaattcccacaaaaaaacagtgttggttcttgccatcactgaatttatagtataaatctcccaaggctttaatctagttcatcaagtgcagtttagataagaaagccataaaaacaaatgggcatactgncagttaatgagaaatacaactgcacatgcncaattaatattactctctcttaatctactaagagaacaggttattagtagatttacaaaaancntctnttgaattcaaatagggccctatttccgtgggtctttatatnaanaatangnagccanacnggtatactggatnaacccagtcnaaggctgnt

SEQ ID NO: 1128 - DNA, 593 bp, Homo sapiens
  misc_feature 432, 437, 459, 469, 476, 488, 511, 515, 524, 525, 527, 553,555, 561, 565, 569, 574, 578, 589: n = A,T,C or G
cgcggggctcttcctgctctccatcatggcgcaggatcaaggtgaaaaggagaaccccatgcgggaacttcgcatccgcaaactctgtctcaacatctgtgttggggagagtggagacagactgacgcgagcagccaaggtgttggagcagctcacagggcagacccctgtgttttccaaagctagatacactgtcagatcctttggcatccggagaaatgaaaagattgctgtccactgcacagttcgaggggccaaggcagaagaaatcttggagaagggtctaaaggtgcgggagtatgagttaagaaaaaacaacttctcagatactggaaactttggttttgggatccaggaacacatcgatctgggtatcaaatatgacccaagcattggtatctacggcctggacttctatgtggtgctgggtangccangtttcaacatccaaacaaaaancgcaggacangcttcanttgggcccaacncagaatcaccaaaaaggaggccntgcnctgggtccnncnaaaatttaagggatattcttctggcnanaaaatnccgntttnttccnaaanaaataaaaaanttta

SEQ ID NO: 1129 - DNA, 607 bp, Homo sapiens
  misc_feature 335, 475, 478, 479, 480, 481, 482, 483, 484, 485, 486, 487,488, 489, 490, 491, 492, 493, 494, 495, 496, 497, 498, 499,500, 508, 511, 515, 523, 542, 545, 546, 547, 549, 551, 560,566, 572, 574, 581, 598: n = A,T,C or G
cgaggtacgcgggactcttattctgcgcctgcgcgcggctacagcacggttcgtttttcctttagtcaggaaggacgttggtgttgaggttagcatacgtatcaaggacagtaactaccatggctcccgaagttttgccaaaacctcggatgcgtggccttctggccaggcgtctgcgaaatcatatggctgtagcattcgtgctatccctgggggttgcagctttgtataagtttcgtgtggctgatcaaagaaagaaggcatacgcagatttctacagaaactacgatgtcatgaaagattttgaggagatgaggaaggctggtatctttcanagtgtaaagtaatcttggaatataaagaatttcttcaggttgaattacctaaaagtttgtcactgacttgtgttcctgaactatgacacatgaatatgtgggctaaaaaaatagttcctcttgataaataaaccattacnaannnnnnnnnnnnnnnnnnnnnnngtaccttnccnggcnggcgcttnaaagggcgaaattcaccanttnnngncnttactaatngaaccnaatttngnaccaaanttgggggaaaattgggntaaatgttt

SEQ ID NO: 1130 - DNA, 604 bp, Homo sapiens
  misc_feature 12, 448, 495, 498, 514, 518, 519, 539, 545, 550, 555, 558,576, 578, 579, 591, 592, 594: n = A,T,C or G
acaacatcagtncaataaattcacaaaactatattacagctagttaatcagtttaagaattgttcccgtcagtcacattttttggccctcagaagttcattcctaaagatttcaactactctaaatttctagctaccaagaagttaagaatgattataagaagctttccaaggagttatgaaatctttgtagaccagaggccaactatcatcacctcaagtctgctctcaccaacagcccttgtatttttcagggagaaatctctaggaaaaaagtcagacaccagtgtagtcactatctcccatgtcaaacctaggggactaaaatggtcagtattaccataaaatgataattttgaggtttaccttaaaaggcttattctggtctcaaaaattagataaagaatatcttctactgaaatgaatattgacttaacatagaagactgntgtccttttgccgtcttatagggaaaggcatagacatgagtcttaanctnctggatactatagctnatgnnagctggaaaatctggaaatnaaagcnggctnaaaanctnaaggccatcttttgggananntggttttaaaanncnttaagggttt

SEQ ID NO: 1131 - DNA, 608 bp, Homo sapiens
  misc_feature 414, 417, 435, 440, 492, 545, 551, 580, 586, 604: n = A,T,C or G
ggtactcaaaaatcttcccctactcaaattcagaaatctgttactagatgtgtgtgtctacctgtcctgtgttttagaattagcttctcttggaagttccttagtcctttaaatagttaggtttccaaaggtctgtttgataagttgaccaaatatacatgttgatatggtttggctgtgtccccacccaaatctcatcttaaattgtagctcccataatttccatgtgccatgggagggacccagtgggagataatggaatcatggggacaggtttttcccatgctgttctcatgatagtgaataaatctcatgagatctgatagttttataaaggggaagttcccctgccatgctctcttgcttatcaccatgtaagatgtgactttgctcattctcctttgccataattgngangcctcccaaccatgtggnactgngaatcaaattaaacctctttcctttataaatttctcattccaaatatatatnaaactcaggcccaaagccaggggctcatgcctgtaatcctaacccctttgganggtgangggggccaaacactttagggcaggagttnaaaacnccccgggccacatggggnaaac

SEQ ID NO: 1132 - DNA, 614 bp, Homo sapiens
  misc_feature 13, 188, 318, 340, 347, 356, 432, 455, 473, 506, 511, 514,515, 517, 518, 519, 520, 521, 522, 523, 524, 525, 527, 530,531, 533, 534, 535, 536, 538, 551, 555, 556, 557, 566, 577,579, 580, 584, 585, 586, 593, 594, 595, 599, 606, 613: n = A,T,C or G
  misc_feature 614: n = A,T,C or G
acgcgggattgtnggagtcctgtgcacagattcacaaggacttaatctgggttgccgcgggaccctgtcagatgagcatgctggagtgatatctgttctagcccagcaagcagctaagctaacctctgaccccactgatattcctgtggtgtgtctagaatcagataatgggaacattatgatccaanaaacacgatggcatcacggtggcagtgcacaaaatggcctcttgatgctcatatctgttcttcagcagcctgtcataggaactggatcctacctatgttaatcaccttatagaactactaaagttccagnagttaggccattcatttaatgngcattangcacctttnctggttatttaaaaggcaattgctttctaatgctctatgggcccgactatcaaagatattagtaagaaaaggatcntgtttttgaacaacaaggtccangtcacttttgtatataanaatttggctggatttcaataaaatttgtttggnggggnggnnannnnnnnnnanttnncnnnntncaaaaaatttttnggcnnnaaccccctnggggggaattncnnaaannnggggggnnntttnttggggnccccccnn

SEQ ID NO: 1133 - DNA, 606 bp, Homo sapiens
  misc_feature 340, 394, 454, 468, 493, 497, 502, 507, 510, 519, 540, 559,565, 576, 592, 602: n = A,T,C or G
acctagctcagaactgagggttttactttttggaagaagtcaggagtggatgttgggaaccagcttgcagttgctaccacaggcccagagctctgttgaaaggaagggccttggccgggcatggtggctcacgcctataatcccagccctttgggaggctgaggcaggtggattgcctgaggtcaggagtttgagaccagcctggccaacatggtgaaaccccatctctactaaaaatacaaaaaaaattagtcgggtgtggtggtgggcatctgtaatcccagcttctcaggagactgaggcaggagaattgcttgaatctgtgaagtggaggctgcantgaacccagattaccccattgcacttccaccctcggtgacaaagaacgaaactntgtcttcaaaaaaaagaagaaagggaagagcccttgggttgggccccagtggctcacgtnttgtaatcccaccnctttgggaaggccaaggtaggtgcnttancttangtcanganttcaaaacnagcctggccaacttggggaanccctttttcttaaaatgtnaaaatnaccccgcttgnggggggggcctttatncccctctttnggag

SEQ ID NO: 1134 - DNA, 519 bp, Homo sapiens
  misc_feature 64, 66, 80, 115, 124, 141, 143, 163, 201, 207, 230, 235,241, 250, 266, 299, 307, 312, 334, 339, 341, 348, 379, 394,416, 426, 434, 440, 443, 448, 449, 453, 456, 459, 466, 475,498, 499, 501, 502, 504, 513, 514: n = A,T,C or G
ggtactttttttttttttttttttttttttttttttttttttttaaggattttaaaaatatatntnttttgaaaatattntgaaagtaattaaaatcacctattgggaaggaaanaaatcaacncaatgaaatttaggaananaaatgcaaaagcagctgcanaatcctgccccttccaccccaaggggcacagcccgganatgaancttattttaggatcacaagtgcnccctntggtanacggaggangactttgtcagtcttntggctgaagggccttgtccaaagtcaggatcanaaataggncagcncatcatgcttggctttgttggnctggnangttaaanaagggcaagggcttgttttcatgagggaganattggaacactcccngggtacctgccccggcgggcgnttaaaagggngaatttcnccccantgnggggnngttnctnatnggttccnaacccgggnccaacctgggggaaaaatgggcnnanntngtttccctnnggaaa

SEQ ID NO: 1135 - DNA, 514 bp, Homo sapiens
  misc_feature 38, 42, 69, 90, 187, 210, 212, 216, 268, 352, 360, 382, 386,424, 434, 452, 458, 467, 473, 485, 488, 501, 510: n = A,T,C or G
ggtacttttttttttttttttttttttttttttctttngaanatggtttattttacataaagttactgngaaagggaaagaaaacaatanaaaagttttaatatattttatgttttcacattatactttttaaataaagttaaacgtttgatatgcttcctacttctcttgattagttagcattganaaatcaacttcaaatggttagananattntaccaggtcgtcatcagtccattcttcctcctcatgtttggatttctttganacgtaatcatcatcttcatagcctttcctcttcttcgtgattacgttaagtgcaagctcagcaaaatgacatcgctccaacttntgtttcanaacagcagcttcttcaaaactngggngggtcatacttctttactaaagttctcaagcctttcantatatctaanaaactgggaccaggcaanttttgnttttttttnacaatnaaactttttganaanaacctttccatanaaattcccnccct

SEQ ID NO: 1136 - DNA, 580 bp, Homo sapiens
  misc_feature 479, 487, 489, 491, 495, 501, 523, 532, 537, 545, 548, 553,564, 565, 576: n = A,T,C or G
acgcgggtaagataaactatttaggaaaaaagtctgacgaatttaatgcatgtgggaaattgttactcaatattaagcatgatgaaactcatactcgagagaaaaatgaagttttgaaaaataggaacactctgagtcatcgtgagaacactttgcagcatgagaagattcaaactttagaccacaattttgaatacagtatatgtcaggaaaccctccttgaaaaggcagtattcaatacacggaagagagagaatgcagaagagaataactgtgactataatgaatttgggagaactttctgtgatagttcatccctcttgttccatcagatacctccatcaaaggacagtcactatgaatttagtgattgtgagaagttcttatgtgtgaaagtccaccctttctaaacatgatggggtatctatgaaacactatgattgtggtgaaaggtgggaataatttcaggaggaaaatgngtttgtcncncntcanaaaggngataaaggggaaaaaccctttnatgttatgnatgtngggaagcnttnttggngaagcccattnnctcccattaangggg

SEQ ID NO: 1137 - DNA, 507 bp, Homo sapiens
  misc_feature 53, 66, 74, 105, 127, 154, 173, 174, 180, 204, 242, 250,264, 267, 275, 301, 356, 368, 375, 377, 381, 394, 400, 414,424, 440, 470, 487, 488, 507: n = A,T,C or G
acttttttttttttttttttttttttttggttttttttttttttttttttttngactacaaccagngtttattnttgatttgtcaccactcttttcatgtcttgntttcttccacatgttaaatatntaataaccaaaactttactaacatacnaatgaaaaaaacatgcccnncatgtntgcatggcaggtagtgaggaaatntggccagctgactggttcctttaccaaggtttgcaaantaggttgngtttgaacaccttntgngggtctgngtcatttccaagttgaaaaatttcanccaaagagcaacatgtcacattgattaaaaatgggtaatgacccaaaaacatttntgttaatctaangggaaangngggncctttaattaatnaatttncccggagccccccntttttttttntttgacaaatgtttgnaaattccccgggtaccttggccgggccccnctaagggggaattccanncccttgggggcggttattn

SEQ ID NO: 1138 - DNA, 597 bp, Homo sapiens
  misc_feature 445, 475, 521, 535, 563, 564, 577, 579, 581, 587: n = A,T,C or G
gcgtggtcgcgccgaggtactagtctctacttggggacaagaaaatagaatatgcaactcagaaaggaaagagcccaaagacgagagaacctgcttgttagctcattaacctgtttagtaaagatctgctttaaaatgcctgatgctgtgcagtatcatacaaaacaatcttcagccttcaaagcagctgatgcaccttctcagagatctgtttgtctgattaacagtctgctgccttggtgggccttggtcttggtcactttcggtcatcgatggttttaatgaattctactgctgctgtgaactgcatccaccaataggactcctctccagacagacagctagcataaaagctactgatatactgcacagtagacagcaaacagggtggatttgcctttatcaacacaaacaccaacacaggaacaaagtcattccgctccanggacagagtcctcattggccagctcagganggtcataatcgtaaaacacattctcaggatgcactgcctttgtccnggggggtttataanccttaatggcctgaattctgaatgggcnnatggccttgggcntntncaaaanaacccttggt

SEQ ID NO: 1139 - DNA, 499 bp, Homo sapiens
  misc_feature 125, 185, 189, 259, 295, 421, 430, 443, 452, 460: n = A,T,C or G
actttttttttttttttttttttttttttattttttttttgaatcaaaagcagggtttatttttctatcaaatccccaatccatgttccagccaatggatgaagggtgaatcaagccccacatanactcttggtaaaaacaattctaactttctaaaaaaaaaaaaaagccaacacacttttttntttnttttcaaaaagctcccaggcctttgggaacagctgaaacaaattcatatcctgactaggtctgttttctnttaggtatttggatggtccctctctgctgccacttntgcacagatgaggcactgataatggcctgcaggtcactcacaatcctagctccacatcactccatgggttgataacctaaaaccccgttatgatttccatttataatgcctaaaacagctgaaaanactgtattnaattctgcaaatntttttgggngccactantttcttggccaagcttaggccttattttgtggttttaaa

SEQ ID NO: 1140 - DNA, 587 bp, Homo sapiens
  misc_feature 28, 171, 329, 423, 429, 472, 490, 511, 529, 535, 540, 544,547, 551, 559, 573: n = A,T,C or G
actttttttttttttttttttttttganatggagtttcgctctgttgtccaggctggagtgcaatggcagttgtttcaccgtaacctctgcctcctgacttcaagcaattctcctgcctcagcctcccaaagtgctgggattacaggtgtgagccaccgtgcccggcccanataggttgatcttaatgtaacaacccaaaaataaatgtcatagtcaagatttggtagataaatttaaaattaaaatattctgcagttgggagtgaaatgtgatagcacatacgttgacattatgcatttagagatgttataaaaatgtataggcagtntacacagcactactcaagaagccaaagaaacacttgtgcagtgctaagtgtcacatgtctgcttccccaaaggctaggaatagtgatcctgctntaatgngagaacccaaatcatgtttataaaataaggaccctgggaacanttgcaggccccaatgaantggggtgcttccggcccttanattcctaaaattcccttncctcanacaanaaantgngggntactttanctttggccgggacncccctaaggggaat

SEQ ID NO: 1141 - DNA, 468 bp, Homo sapiens
  misc_feature 344, 433, 450, 453, 468: n = A,T,C or G
acctgagatcctggtgcacaacatagtgatcttcatgcgaacttcagtgaagatttcatacattggcctcatgacccagagctccttggagacacatcactatgtggattgtggaggaaattccacagctatttaacaactgctattggttcttccacacagcgcctgtagaagagagcacagcatatgttcccaaggcctgagttctggacctacccccacgtggtgtaagcagaggaggaattggttcacttaactcccagcaaacatcctcctgccacttagtaggaaacacctccctatggtacgcgggatgaatggctccacgagggttcagctgtctnttacttttaaccagtgaaattgacctgcccgtgaagaggcgggcataacacagcaagacgagaagaccctatggagctttaatttattnatgcaaacaagtacctnggncgcgaccacgcttan

SEQ ID NO: 1142 - DNA, 522 bp, Homo sapiens
  misc_feature 35, 127, 226, 276, 296, 319, 359, 384, 392, 406, 437, 458,475, 477, 509, 514, 521: n = A,T,C or G
ggtactttttttttttttttttttttttttttttngaaattaaatacttttaattatcattctagccaggatcatactaagtaggatctcatgacagtcacatatgcagcgacttcacctaaaccgnggcactgaatgctctgccatgagccgcaagcagcacagtgatcatcacccacaaggacaggttgctgggatgaggcaccctttcctttcatgtttaggntcttctcacctgcatttcactttcctaaaggtcccagccacacagcgttnttttagggattaaagtagtnggaaaaaaataaagagaacacancatccatccttaaagaaaaaaagtaaatccactttatggnggacttcagctatgggacaaatttnggatcagnggttttcaatctgnacataatctttttgttacctgggaaaaaagnggcaaggtaccttgcccgggngggcggtttaaaagggncnaatttccaccccactggggggcggttattaanggganccgaccng

SEQ ID NO: 1143 - DNA, 531 bp, Homo sapiens
  misc_feature 55, 82, 87, 103, 119, 124, 142, 157, 163, 189, 193, 198,207, 211, 229, 231, 247, 261, 267, 304, 350, 386, 393, 395,405, 420, 431, 433, 455, 456, 466, 467, 469, 477, 481, 485,490, 493, 497, 500, 501, 509, 516, 529, 530: n = A,T,C or G
actttttttttttttttttttttttttttggtttttttttttttttttttttttnaaatttctttcttttttaatttaaatngagtncatttatttgaaacanactgggccaatgtccncaaanaattcctggtcagcaccnccgatgtccaaaggngcaatntcaaggaagggcaggcgtgatggctnattngtttnggattcaangatnggctttccccattcattngnctttttaaagcagccntttacaaaaacagngtaagngaacctgctgttgccctcagcaacaagttcaacatcnttaaagccctgtaaaatgacagcctttttcaggttgccagctcctnatccatgtatgcaatgctgttcttgcaggggtaggngatgttntnaaaggcatantttggccaccaggcncctgaaaggcnanttgggaacccttttcttggaannccctcctttnncntttaattnaaantggntgccnccnttgnaanntttcctancaaaaanggttttttgcccnng

SEQ ID NO: 1144 - DNA, 634 bp, Homo sapiens
  misc_feature 391, 518, 528, 553, 562, 581, 583, 595, 611, 629: n = A,T,C or G
ggtactcagaactgtgtaaaagttaaccaccaaaaccatgttttaaagaaaaaagtttaaatgtaagactaatgtcttggggactttactaaatgtatttctaaaaaaacccttctcaaatgtagaagtattggcaattctaatttaaaaattttaaatttttaattattggaaatttaagtagcaatagtttcaagagctaagaatcagattgctttttaaaacagaattttttttttttcctgagggactcatacttgacaactccagttaaacataatactccacccaaatcccaaatttaaatgcattatgtcaccctggaatagtaaaattataaaatggtatttctaaattataatatatatacataatgcaccattttaactgncacatttaccagcagaattatgaaatcaaaaacaaattctacattcaagggacaaaccgataaatgctctttcattggtttaagaatccattccattctttggtggtttctactccatatttaaaantatgcccaanggacctggaaggccaatcaatccanttcctgaanccactggcataggtcaagngnccttgggctatnagcaattcctctgaanactgggccctaaactgcncggaa

SEQ ID NO: 1145 - DNA, 509 bp, Homo sapiens
  misc_feature 348, 405, 409, 412, 436, 443, 448, 461, 464, 466, 477, 483,509: n = A,T,C or G
actaagcggccttggatacctggccgcgggatgctgggcggcgtcaggtgagcggtggtcgctgggcctcaggtaaccatggagaaagagctgcggagcaccattcttttcaatgcctacaaaaaggagatatttaccaccaacaatggctacaaatccatgcagaaaaaacttcggagtaattggaagattcagagcttaaaagatgaaatcacatctgagaagttaaatggagtaaaactgtggattacagctgggccaagggaaaaatttactgcagctgagtttgaaatcctgaagaaatatcttgacactggtggagatgtctttgtgatgctaggaaaaggnggaaaatccagatttgacaccaatattaactttttactaaaaaaatatggaatcatnggtnatnatgatgcctgggggtaaaaaaggnttttacnaatantttcatccttaanaantnttattttcaanggagtnttgaccagggaaataacccaacctgn

SEQ ID NO: 1146 - DNA, 516 bp, Homo sapiens
  misc_feature 31, 40, 166, 254, 345, 376, 378, 398, 399, 408, 409, 413,416, 417, 420, 422, 425, 429, 432, 449, 450, 451, 454, 458,460, 461, 465, 466, 468, 476, 483, 494, 495, 504, 505, 508,509, 512, 514: n = A,T,C or G
acttttttttttttttttttttttttttttngaggcttgngttttattcaaggcttgtcagcctccctccttccccctgcgggtgaggtaggagggatagggttgggggagggaacaggggctaggaaggggcaaactgcagctgccctttgtaaacatattccantgcagtggcaatggtgcgcatgtccagctcgatgctccgagcccagttctccacatccccaatttccttgagtgcctggttgaagttntccaccattccgatccactggcctgtctgcttggcaaattgggcaacctggacctgtagggtcttcacctcatgggccaactttctctggntcatgtaagccctggccacacccccattgangngatccacccaaacttttttnnaggcagggnncttnaannaananccntttnccntcctttttttctgggannnccntggngnnaatnngnttgggccngggggtnttttaagaagnngggaaaaannggnnacntngg

SEQ ID NO: 1147 - DNA, 519 bp, Homo sapiens
  misc_feature 379, 419, 433, 448, 457, 463, 475, 476, 480, 488, 495, 498,499, 503, 515: n = A,T,C or G
acactgttggtgttatatggggatggggttctcggtaattttgtttattatttatgtttattattatgttttatcattaattattcaataaatttttatttaaaaagtcaccctacttagaaatcttctgtgggggtgggagggacaaaagattacaaaccaaaactcaggagatggtaacactggaattgataaaatcacctgggattagttgtataactctgaaccaccaaacctctgctatcaagccttgctacagtcatggctgtccagaaagatttacagttatttttctgagaaaggatccatgggctttaagaacttcagaactttaagaacttcagaagttcttaagttgctgaaactcaagtaaccaaanttgaatgccatccaaaaaaaaataccaagggagtcaaggntttgaaaggcacantcttattcttaaagngactggttnaaaccnggccaaaaccanntaanttcctggngaatccnagnnaccnaatggcaaattnccgc

SEQ ID NO: 1148 - DNA, 624 bp, Homo sapiens
  misc_feature 467, 514, 521, 587, 590, 591, 602, 605, 611, 615: n = A,T,C or G
accatttggcccttttgccttcatgccaggaaaacttgtccatactaatgaagtcactgttttactgggggacaactggtttgcaaagtgctcagcaaagcaggctgtaggtttagttgagcaccggaaagaacatgtaagaaaaacaatagatgacttaaaaaaagtgatgaaaaattttgaatccagagttgaattcacagaagatttgcagaaaatgagcgatgctgcaggtgatattgttgacatacgagaagaaattaaatgtgacttcgaatttaaagcaaaacaccgaattgctcataaaccgcattccaaaccaaaaacttcagatatttttgaagcagatattgcaaatgatgtgaaatccaaggatttgctactgataaagaactgtgggctcgacttgaagaactagagagacaggaagaattgctgggtgaacttgatagtaagcctgatactgngattgcaaatggagaagatccacatcttctgaagaaggaaaaggaantcgtacnccaatgtgaatgcgatgcatcaagtacagactctatactcctggcataaggtgttcagtcaaaccntcnnggcaatgatanccntgactntcangaaggtcct

SEQ ID NO: 1149 - DNA, 524 bp, Homo sapiens
  misc_feature 432, 444, 445, 446, 447, 449, 453, 459, 460, 467, 474, 481,484, 519: n = A,T,C or G
acaaaaaactgtgacatcaagaagggcaggagaaacaaaaggcatttctataacatctatctgatcctaacagagtatgtaggaacagaatagtaagtctttagtgccataagatcttaacatctcacttctactcctgctctcctagttccccccaaaaaagaaatactgaccagtgtctctactttaaaccctacctgaaacttgagactatgtctaatatagaaactcacataactagcccaggtaacacagcaagaccccatctctacaaaaatattaaaaatttagctgggcatggtggcatgtgcctgtaatcccaactactagggacagtgaggcagaaggatggcttgagcccaagagtttgaagctgcagtgagctatgatcaagctgcaatccccctgggtaacacagcaggactctttttnaaaaaaaggaannnnangaantccttnnagttcantccctanaagtatnttncaatgaccatacagccttctatgctttaaactttnaattt

SEQ ID NO: 1150 - DNA, 628 bp, Homo sapiens
  misc_feature 411, 464, 473, 531, 539, 553, 589, 607, 620: n = A,T,C or G
acatgaattagaagcgtgcatctaggattatggccaaactgttttaaaaatgcagaaatgtaaaattacatcttgaaaatatgaagagatggtctacacacttcaaaaatcaaatgttgcttataccagagatgtatgacaatcacgggattcaagtgacaagcagtaagatctcaaaaattaatactggtcaaagataatgggaatatttttgcatttcactgaaaatacattgactactagaatacgaaatctagcaggaactcagggaaaaaaaattacaaaatctaaagccaattacttaatatttcttattacctaaacaacagcatgacattaacagaaaactgccctgcatttcaattgccaatctcacgttaattaaagttcttcaaaaatgaaatgcaaccnaaacgggttcaaacttcaaatgaaagtctgcaaggctcagattaaaacatggnatggttcanatgaaagtaattaaaacactattgggtttggtcttattgaatggaataaatgttgacnttctttgnaacttggactactnaatttcatttttccaatggtctacatttttcttaanggggcaagtgcttaagtncttaggagcattntcaaggcc

SEQ ID NO: 1151 - DNA, 622 bp, Homo sapiens
  misc_feature 225, 280, 385, 425, 499, 537, 543, 545, 570, 586, 589, 592,611, 620: n = A,T,C or G
actaccacagcctttaggtgacattgatttataacttggtcacaattcactgcatttaggaaaaccagcattcttatctggtcagtgctcgcttcttagcaacccctaattaaatttaattcatctctaaatcttagcttcaactttattcaattacatttggctgacggctgttttctaaaacccttaagtgttgaccataaatgcaaaacttccagtatctgntgggttttattagcagatgctgcttttatttaaaaaaaaccgacagtataactgncataattatggaaggcactgcttccgataattatattctattaaaaaaacaccatttatagtgaactctgcactgataaataaacaataaatatctcaagtgccnaaaggacagaaagctctccctaagattaacactttggccnaaattggcagcatattattctttaaagtctgacaactgagtctgcactaaacacctggaactgggctctttcangggccttggaagaaaccaaaattcccagaacttaatgnggcttntnggggaagggcccagggaaagaaaantctaagctttggtttnggnccnctttttaaagaaccggggnacaaattangc

SEQ ID NO: 1152 - DNA, 627 bp, Homo sapiens
  misc_feature 185, 370, 412, 456, 474, 481, 483, 493, 501, 518, 536, 540,547, 561, 570, 572, 577, 579, 626: n = A,T,C or G
accagtgagaagacagctttgcagtcacactggagatcagagttccaggctgcagcatgtcaccaacgccagggaacctggcacttaggcctgttggctgctcagtttaactccggctaagctgccatgcatgggctcagctactccatcagtcatgttgtcaaactgttccccatcctcactgncaattgtgctattctgccactcaatctgggggttagataagcgctcatcattctcagatgcattcttccactgtgactggtccttagaccaaaacccttcaacttttccataggaactattcttccatttcaactgctctctgcaccttgcatggtagccttttttttggcagctggcttactgntccttgcatcttcgctttgggaagactcgtcagaccaagttnctgggttcatttcgcaagtattggcctcaagtctgacactttgntgggatccaagcccactnttaaaangngaaccccgtntttcactnaacaacatcgcttggcnaacctactatcagaagcnttgngcataanttggtgggtcctanccaatgaananttccnantttgaaccatcccttttgggcaacttttcccaaatttgaaaatcctng

SEQ ID NO: 1153 - DNA, 626 bp, Homo sapiens
  misc_feature 1, 429, 451, 499, 517, 540, 546, 554, 573, 580, 593, 601,615, 619: n = A,T,C or G
ngtactcagctctgttctcctactcaggctgggacaccctcaactatgtcactgaagagatcaagaatcctgagaggaacctgcccctctccattggcatctccatgcccattgtcaccatcatctatatcttgaccaatgtggcctattatactgtgctagacatgagagacatcttggccagtgatgctgttgctgtgacttttgcagatcagatatttggaatatttaactggataattccactgtcagttgcattatcctgttttggtggcctcaatgcctccattgtggctgcttctaggcttttctttgtgggctcaagagaaggccatctccctgatgccatctgcatgatccatgttgagcgggtcacaccagtgccttctctgctcttcaatggtatcatggcattgatctacttgtgcntggaaaacatcttccagctcantaactactacagcttcagctactgggtctttgtggggctttctattgnggggcaactttatctgcnctggaaggacctgatcgacttgncccctnaacttaanggttcttcccatggctttngcttggncattttccggggntggtcccnttcaggggactttnactncctattg

SEQ ID NO: 1154 - DNA, 635 bp, Homo sapiens
  misc_feature 404, 506, 509, 525, 549, 563, 582, 583, 596, 610, 627, 634: n = A,T,C or G
ggtacaaatatttaagagtgttgattgggagtaagggaatgtcaactgccaataaagtggaagatgaaagaataggactttacacagagcatatttagttatgggtctctgtctcctccccacacagaaaaactcccagacattcatgacttcatccaccctgcctggcagataggccatatttcctgaccccctggctcttcacctcaaaaggtttatctttccaccacactagcaaagaccctcaggacacacaactcatactgccagctaagcatctaccccgagggacaaggcaagcacacactagggcagctgggccatcctggccctaatccctccagcggtgtccacactgagcattgcagcacttgtagaaggtggtcatcggctcatctgcagancgggtctgaagctgcatgaagtaagcacgaagatgttcgcatttgggacacgacttttgcagtagaatcaacattcttccagcagctgttcaccagcacatnatncacttctttcagtttnggtacctggcccggcggccgttcnaaaggcgaattccncacactggcggccgtctannggacccacttggnaccaactttggggnaacatggcatactggtnctggggna

SEQ ID NO: 1155 - DNA, 634 bp, Homo sapiens
  misc_feature 367, 547, 571, 597, 632, 633, 634: n = A,T,C or G
actgagaacaatttaactctgaacacaaaagtttagtgaatttgctactgttccattacaggacaattaaaaatgagactatatcaacttcactagaatttaattgctaaagctaccttatgcacatctattaaactaaaagaaacgactttaaccccttcagttgtttttaagacagcactcctttacagggagtcaggtttggtaaatataaaggatacataaaaaatacagtataaactgcataagcttaacagtagcaaaaacactgatgaacttttaaaaagtcaaaaatatataaaaatattagcctgaaatggcaaattttcaaacaccgatctgtgtaaaaatgtttaaatattgatgntactccaaaaatatatacttattctattttttttctatttgcaacagtttataaaggcaaacaaacacctgcaattgaggtacaaagcccaattcacaaactttggatcaagaaaaatcccttcctatggtttaacagcatcttctataccatagtgaatgaatctaattggtcccaaantttaattcacatactttaccaaanttatttaaatacggaaaaggttggtnaaaagacagtagtctgacaatatttacattcaaannn

SEQ ID NO: 1156 - DNA, 649 bp, Homo sapiens
  misc_feature 336, 490, 492, 644: n = A,T,C or G
tcgagcgggccgcccggccaggtctgcaaagacccatcttccctccagttaatacactcccaggatgggctgcagagggggagactctgagagaagctggaggcccacaaaagtccactgaccctctttctgtcccagaaatgaataaaggacccagttgtgctttccttccaaaatcctcaacaaagttgtttgtgctccaagaaaatgtgggaataaaaaaatcatgtcccaggtcatctttgtgtgtgtgcgggggaggtggatgggaggaaaaggcatgtattaatagatactgctgctataaaatgacataaattatagcccttgatctgnttctgtaaacaatgccagcttcttcaggttattggcaactacccctaatatacctagcccagatcctttcataaagtcaagtgctatatttccaaaataatcctatgaaatcatgaaaggtgtgaaaggttaatatgaagaccccttcttttgngngcttttttcaccctttataaagaagttgcaatttatcaggaccccaataagtaattaaaccctcaggggtagctcacttatgatccaacctgacactggcccatatttataaatcatgggtacattgaggggaaaaggttgccggcaatagnacctt

SEQ ID NO: 1157 - DNA, 639 bp, Homo sapiens
  misc_feature 415, 430, 494, 498, 518, 547, 570, 575, 579, 586, 617, 629,632, 639: n = A,T,C or G
acctagtggctgctgtcttgttttgctccatttttttcagcttcttatccagtttctcaccctttacttttgctgctaccatcttctctccaggaggatcgtaaggtttgggacgggcagacccacagagaacacctggagatgggaggctcctatttggagagcccctggtagaggggctgtgctgaggagaccccagataggactctgggctcatacagatgccactatcattatctgaaggggtgtcttcctcctttatgcactgagggatcatggcaacgtaagcagtgtagtctggcttctatctccttcagtgatatccacttcactgcccagctctaaactaaaggaatgatctggagtggaggacaggacccctggggaaaggggaagaagttgtaagaaggtgaanggggcaacctggtcnggttttggtaaactttctgggaaatggccaattgggttcaccgtctgggggggctgcttattantctnctggactaagggggccaaanagatcacaagtgtcattcaacgtggtcanaaggcatctgcattgggtttcangcatntttncccacanggcttccaatcgaactccttaaatccatttnttcaacatccanctnggcccgn

SEQ ID NO: 1158 - DNA, 640 bp, Homo sapiens
  misc_feature 399, 457, 470, 551, 553, 556, 573, 609, 615: n = A,T,C or G
acacttgaaaccaaatttctaaaacttgtttttcttaaaaaatagttgttgtaacattaaaccataacctaatcagtgtgttcactatgcttccacactagccagtcttctcacacttcttctggtttcaagtctcaaggcctgacagacagaagggcttggagattttttttctttacaattcaagtcttcagcaacttgagagctttcttcatgttgtcaagcaacagagctgtatctgcaggttcgtaagcatagagacggtttgaatatcttccagtgatatcggctctaactgtcagagatgggtcaacaaacataatcctggggacatactggccatcaggagaaaggtgtttgcaagttggttcataaaccagattgaggaggacaaactgntctgccaatttctggatttctttattttcagcaaacactttctttaaagcttgactgngtgggcactcatncaagtgatgaataatcatcaaggggttggtgcttgcttggattatatagaacttcttcatatgtctgagtcccaataaatngncanccccaacctttggaaanggcttgggcaatttgggccaaaaacccttggggccntttggntccaggtttactgggggactctggc

SEQ ID NO: 1159 - DNA, 622 bp, Homo sapiens
  misc_feature 387, 388, 389, 401, 410, 416, 420, 426, 430, 433, 434, 437,438, 439, 443, 450, 453, 465, 467, 474, 503, 533, 535, 539,555, 575, 577, 585, 604, 607, 615, 622: n = A,T,C or G
accctttaagatatccatctttttctttttaaccctaatctttcacttgaaagattttattgtataaaaagtttcacaggtcaataaacttagaggaaaatgagtatttggtccaaaaaaaggaaaaataatcaagattttagggcttttattttttcttttgtaattgtgtaaaaaatggaaaaaaacataaaaagcagaattttaatgtgaagacattttttgctataatcattagttttagaggcattgttagtttagtgtgtgtgcagagtccatttcccacatctttcctcaagtatcttctatttttatcatgaattcccttttaatcaactgtaggttatttaaaataaattcctacaacttaataaaaaaaaaaaaaannnaaaaaaaaaagncctttggcnggaacncccntaaggncaantcnnccnnntggngccgtcntangggtccaacctngncccaacnttggggaaacatgggcaaactggttcctngggaaatggtttccgttccaattcccccantncaanccggagcctaaaggtnaaacccgggggcccatgagngnctacctcncttaatgggtggcccatgnccntttcaatnggaaacn

SEQ ID NO: 1160 - DNA, 639 bp, Homo sapiens
  misc_feature 506, 510, 540, 558, 559, 565, 568, 579, 581, 586, 596, 598,600, 601, 607, 608, 623, 631: n = A,T,C or G
acacgttcttgttgtctggctcggcaacaaacaccacttcctggccagtcttctggttatggagtcggacaaatgtctggtgaggagtgagttcagcaccagtgttcacatctaccagctggaagaacaaggcgaagttctggtggctgtctgcgatgaatgtgcccttggctttggctgggtatgtcacccgggtagttttgggtgcaatgctctgatccttatccacggtggaaagatcaacatttgtgatgccaacttcagtggagatcttgactctgagctctacggtatttgcaatataccggttgtcaccttcaacttcgacaaggaagtcataataaccactggaaaatttgacgttcatgaaatttaattcaaaaacatcccctacaggggtgaaagatgtcttctggaagacaatggctctggaaaccacaagatttagcatggtctaatttaacaatggcctgaatcaaaagcttgagaccgaacatttggtgacnttcnaaccccaagaaaacctggtcattaatgtcngaaccaaaacccttaggnncaaccncanttggacctggnanccatnttccaaaacncnannactttnnaagcccccttaaagntttgaaanggcttaaa

SEQ ID NO: 1161 - DNA, 501 bp, Homo sapiens
  misc_feature 454, 455, 456, 457, 458, 459, 460, 461, 462, 463, 464, 465,466, 467, 468, 469, 470, 471, 493, 500: n = A,T,C or G
acgcgggacagcacggttcgtttttcctttagtcaggaaggacgttggtgttgaggttggcatacgtatcaaggacagtaactaccatggctcccgaagttttgccaaaacctcggatgcgtggccttctggccaggcgtctgcgaaatcatatggctgtagcattcgtgctatccctgggggttgcagctttgtataagtttcgtgtggctgatcaaagaaagaaggcatacgcagatttctacagaaactatgatgtcatgaaagattttgaggagatgaggaaggctggtatctttcagagtgtaaagtaatcttggaatataaagaatttcttcaggttgaattacctagaagtttgtcactgacttgtgttcctgaactatgacacatgaatatgtgggctaagaaatagttcctcttgataaataaacaattaaccaaaaaaaaaaannnnnnnnnnnnnnnnnnaaaaaaaaaagtccttggccgngaccacnc

SEQ ID NO: 1162 - DNA, 265 bp, Homo sapiens
ggtacagcttttgtcccagtttgtttctccatttactggatgcatttatggaaggcacattacaggtctttgtgggaagaaacagaaagaaatcacaaaagcaattaagagagctcaaataatggggtttatgccagttacatacaaggatcctgcatatctcaaggaccctaaagtttgtaacatcagatatcgggaataaattctatcacgttaccactaataaacttattttacagtaaaaaaaaaaaaaaaaaaaaaaagt

SEQ ID NO: 1163 - DNA, 392 bp, Homo sapiens
  misc_feature 392: n = A,T,C or G
acgcggggggaaatgcgtgttctagctttctgtgtgcttaggtgcccgagctactgagggtctaagtccgggcagccgaagagtgtggtaggtaacggtcctcagcgcaagggtcatttcgtcgctgggaagggacggccctcgcccgcggtgatggtggttagcaagatgaacaaagatgcgcagatgagagcagcgattaaccaaaagttgatagaaactggagaaagagaacgcctcaaagagttgctgagagctaaattaattgaatgtggctggaaggatcagttgaaggcacactgtaaaggtaattaaagaaaaaggactagaacacgttactgttgatgacttggtggctgaaatcactccaaaaggcagagccctggtacctn

SEQ ID NO: 1164 - DNA, 622 bp, Homo sapiens
  misc_feature 414, 458, 489, 503, 552, 561, 566, 568, 584, 587, 591, 602,622: n = A,T,C or G
acatattattagcatagaattcatcattttcagcagataggaccacttctcttaagtctttactgattcccggcactctggaaagatcaatccgattgttgtttatgcctagtagttcgtggaccatggcctgatatgtccactggtttagcaatggggtgatggcatcatcacagcgatctaaaataaggagcaatggaggaacctctgtccgacggaattcaaacagttcatattctttagttatcacttgcttaacgcactctgcaagtctctttgctgcctctgatgagagctgataacgaatcatgggacacttcttcagagataaaaggagagctgtaagcccttgagttggtctaaatagctgggctggatcccaattcgaccctggcagcaacccaaaatattganggaaaacaaatgtggggtcacagcaatgtaatcccataaaattnctgaacttaaccccaactttctggtcattanctttagcccatgcnttacgtactcttgctgacacattctggaataaatgaaatatttaggganttgggcttngaccncngaaaaataatcccatntcnttgnggcgaaaaacnaatgccttaggggttttaan

SEQ ID NO: 1165 - DNA, 257 bp, Homo sapiens
  misc_feature 168, 179: n = A,T,C or G
cgaggtacatgaaaaaaaataaaaaatttgatcatgaatcaaaccctggaacagatgaagacaaaagcggatgagtgagttatataaacttacttccattctgtttcggattttaagtttgagagacttgctaatgaatctcctttatgttgttttccttttcattgnttttggattgntttatgtttgtccttttttttcttaatgtggatttcattgagttgattttttgataatctgcaatctggataatttgt

SEQ ID NO: 1166 - DNA, 616 bp, Homo sapiens
  misc_feature 317, 339, 368, 390, 412, 414, 432, 435, 452, 454, 466, 481,482, 486, 500, 501, 509, 512, 515, 519, 532, 541, 542, 543,544, 554, 558, 564, 565, 566, 569, 577, 583, 588, 595, 596,597, 602, 616: n = A,T,C or G
acgcggggcatcacagtcaacttcacagcgaccaaagttaaaaagagtgatgaaagaaaagaccaaacctcagggtggagagggcaaaggcgctcagtcaactccgatccagcactccttcctcactgatgtctcagatgttcaggagatggagagagggctgctcagtcttttgaatgatttccactctggaaaacttcaagcatttggaaatgaatgttccattgaacagatggaacatgttcggggaatgcaggagaaattagctcgcttgaatttggagctctatggggagttagaggaacttcctgaggatnagagaaaaacagccagtgactncaatctggataggcttctgtcagatttanaagaattgaattcttccatacnaaaactccatttggcagatgcncnagatggtcccaatacttntgntagcttaaatgaaatgnantttctttcttgngaattgaaaaaaacnncagnctttactttttcannccaattcngtnccnaatnatttttcccaccngggatttannnnttaaaggccngttnaggaannnttnccttccgngttaanaaagngaacccnnnaattncccaaatgggggcn

SEQ ID NO: 1167 - DNA, 640 bp, Homo sapiens
  misc_feature 476, 496, 512, 519, 573, 589, 623, 640: n = A,T,C or G
cgaggtacgcgggaaagaggatggtcaggagtatgctcaggtaatcaaaatgttgggaaatggacggctagaagcaatgtgtttcgatggtgtaaagaggttatgtcacatcagaggaaaatttagaaaaaaggtttggataaatacctcggacattattttggttggtctccgagactaccaggataacaaagctgatgtaattttaaaatacaatgcagacgaagctagaagtctgaaggcatacggcgagcttcagagcatgctaaaatcaatgaaactgatacatttggtcctggagatgatgatgaaattcagtttgatgacattggagatgatgatgaagatattgatgacatctaaattgaactcaacattttacattccatcttttctgaagattgcctacaatttggattttgatcatgaccaagaagattaaaatttcattagcatgaatgccatttggttaaacnagactgattggttctaaganatttttgggttttttnaaactgntaataatgctgaaatatcttaagtgagatgttaaccccctttggcctttaatgnaatggagcttttggtnaaaaaccttgttactaattccaaaaaaaaaaaancctccttgtggtttctn

SEQ ID NO: 1168 - DNA, 450 bp, Homo sapiens
  misc_feature 437: n = A,T,C or G
cgaggtacatcttatgtccagtttaaagaagatagccatccttttgatcttggactttacaatgaagctgtgaaaattatccatgacttccctcagttttatcctttagggattgtgcaacatgattgatcttgatggattttcatacgattgtaaatgagctatattaaagtctattaaaggaagcccttcttgtttgagggagagatttctgtgctttctcatatttaatttgctgtttttaagatattccaacctagagtttttgatggaactgatatattgacagttctcaccgaagtccttttataaagaattgctactccaatatatggtcagattagatgcaagaataaagcagttgtccgagtctaagtttctattttattaataaaaactaaaatggtaaaaaaaaaaaaaaaaaaagtacctgcccnggcgggcgctcga

SEQ ID NO: 1169 - DNA, 630 bp, Homo sapiens
  misc_feature 313, 315, 333, 339, 361, 392, 406, 417, 420, 427, 434, 450,453, 472, 487, 499, 521, 523, 535, 537, 539, 547, 576, 578,584, 589, 591, 593, 603, 606, 608, 618: n = A,T,C or G
actttcctgccttttagttcctgtgcacagcccctaagtcaacttagcattttctgcatctccacttggcattagctaaaaccttccatgtcaagattcagctagtggccaagagatgcagtgccaggaacccttaaacagttgcacagcatctcagctcatcttcactgcaccctggatttgcatacattcttcaagatcccatttgaattttttagtgactaaaccattgtgcattctagagtgcatatatttatattttgcctgttaaaaagaaagtgagcagtgttagcttagttctcttttgatgtangntattatgattagctttgncactgnttcactactcagcatggaaacnagatgaaattccatttgtaggtagtgagacnaaattgatgatccnttaagtaaacnatnaaagtgnccattgnaacccaaaaaaaaaanaanaaaaaaaaaagtgccaccnttttcagtggctagnaatttaatgccnggctgggctacccctttttaangnggggttgagccntntnggaaaatngaaaaccaaccggggggccaagggtaatncnttggcnaaccncnanaccaaagggnttnancctttggttnaaaaccttttgc

SEQ ID NO: 1170 - DNA, 627 bp, Homo sapiens
  misc_feature 43, 347, 365, 407, 427, 444, 452, 488, 496, 501, 507, 513,518, 554, 556, 559, 565, 581, 583, 588, 599, 613, 617, 627: n = A,T,C or G
cgaggtactttttttttttttttttttttttttttttgtcagngctttctactttattaaacatcaaagcccaaatagatgttccctgtggaggaggacttaaggacactaggggaggagaaagggacacctgggaagagaatcacaccacagagaccaatcttcacaaaaagggtccaatattgatttctagggaggagcagggcatggtcagctcaaatttggtgataacgtcaggatgaaggaccccaagcttccgacgctttgacccctggcaaagatctctgcacatcgcccggggaagaaagcaggcccttctgatgctttgatcacatatccccccttgncttcaccaggaggccatngagcaactgcataattctgtccagcaacccatgaatgatctnaaacccaggattcttggtgnaataaacagcacaaaanatgtctgnaattttttgccctacatctggattaaaatcttttantacaatgncaganaattcnaaccgnttcantggaaagggcattttaccaattgctgctatggcttnangangccccnaaaaaggtttgcctgncncccgnaattaactggnttaggatcctatgnggcngcctttttgn

SEQ ID NO: 1171 - DNA, 496 bp, Homo sapiens
  misc_feature 451, 478, 479, 480, 481, 482, 483, 484, 485, 486, 496: n = A,T,C or G
cgaggtacgcggggaatactaaatgttaagttctaggcaattatacggggactcagaaggacctggccgctgccttcattgagtttaaagggacaggattgcccttccgtcaagaaagtatgtaagtgttggactgcacaaattaatgtttttcccacaaccgagactttggagattaagaacttatttgaggatttaagaattagggaaataatttggtggaaaccgggaatgagttctattcttaaacagcctttttttttctttttaatgttggatatacggcgaggtagagttggccatatttcagagacttagattgacgtatatgtttctgcattatttttacaacaagtttgtgtatcagaaccgggagtgccgggggaagggaaagaaaacaaacaggtttcagaattgaataggcaaagtgactggtttaaagaataagtantaaagaaggtcttatctaaaaaaaaannnnnnnnnaaaaaaagtn

SEQ ID NO: 1172 - DNA, 621 bp, Homo sapiens
  misc_feature 394, 440, 445, 471, 501, 502, 526, 544, 571, 574, 581, 603,612, 620: n = A,T,C or G
acgcggggaattcgtcaccaggaggaagacggagctggctgcccagcccaaaggcccatgaggggatgcagttatgggctctgtcgccgtggattgttattttgtgtcagtaagtaatccataaagtgccaacatgggaaagaaacggacaaagggaaaaactgttccaatcgatgattcctctgaaactttagaacctgtgtgcagacacattagaaaaggattggaacaaggtaatttgaaaaaggctttagtgaatgtggaatggaatatctgccaagactgtaagactgacaataaagtgaaagataaagctgaagaagaaacagaagaaaagccttcagtttggctgtgtcttaaatgtggccatcaaggctgtggcagaaattctcangagcagcatgccttgaaacactatctgacgcccagatctgaacctnactgnctgggtcttaatttggacaactggantgtatgggggtacctatgtgataatgaagnncaatattgtagttcaaaccaattnggtcaatgggtgaatatntcagaaaacatgcccctttcaaattcnaancccccanaaaaaaatgggaaattaccttnaataaaaantttaaaana

SEQ ID NO: 1173 - DNA, 624 bp, Homo sapiens
  misc_feature 114, 183, 321, 354, 416, 426, 445, 456, 469, 480, 500, 559,560, 561, 562, 564, 565, 571, 574, 576, 584, 587, 591, 599,601, 616, 624: n = A,T,C or G
actttttttttttttttttttttttttttggatatcagaaatgcattttaatttttatttgaaaacaacttaaatttttagacaaatgattttagtatataaatttgcttttgnttttatacagaatataaagatttccctcattaatcttccatgtgaagggtattacaagcctggaggaanatactttctgcacacaagtatgtatcttatgtgtgcagtattggaaaccaatggtgtagtgctcctacacataaatggggtcaagtgacatcacaaattaaaagggggaaagagaaatattctagttaatcagatgcnagaagcaaacaagacgcaaaaactgtgcaaatnagaccaagccagtaactttagttaccacactgcagattacactggaataacagggttgtgangctatagtgngcaccacatttaaacagcnagaaagaactntttatattgaaangctggaatganggattttacttaaagccaantaacttcttgtaactggccaaaccaaaccaaactggaccccccgtaccttttttttttnnnntnnttttcnttnanccatgggnggntttncccggatnangggttttacccgggnaaatttcn

SEQ ID NO: 1174 - DNA, 533 bp, Homo sapiens
  misc_feature 36, 84, 209, 251, 270, 358, 364, 398, 414, 420, 426, 439,450, 457, 465, 503, 506, 529, 533: n = A,T,C or G
acttttttttttttttttttttttttttttttgganatgaggtctcgctatgttgcccaggctggagtgcagttattcacaggngcaaccacagggcactgcagctttaaactcctgggctcaagcgatcctcctgcctcagcctcccaaatagttgggactagatgcacgcaccaccacgcctgactcaggacattattcttaaaggnattatccaggaaacagataagggcattcataaaacacacggntttttttctttagctcagngttaacaatgaaagtagattccactattgaagcacaagttgcaaattggtaacatagtgaacatattgctgtaggaaagggggttcantgtggngtgttatatgagcacttgaactttttcaaggggncataaacccagttttnttggcnccaaanaaatttccttttnagggattcaanttcctcnaaaggaanaacactggggacattttgggggcatgaacttttaaagnggnaacagcccaaacaggtcaatgtntttn

SEQ ID NO: 1175 - DNA, 533 bp, Homo sapiens
  misc_feature 372, 444, 463, 496: n = A,T,C or G
ggtactagtcagttatccagattatcgagtgtttaccacatcatctattttcagaatgctccgaacagtttcagttgcaagagtcagagcactgactgataccaacagaggctggacaaccagttcctccaaaatgttggaaataccaccctttcggacattaatgcccgcagttttttctccctgggcatgccggtttcttagttctgttactgtagaaatgggattcaggccggcattttcagctagtgtagatggaatgacctccatagcatctgcaaaagcacgaacgcagtaggattccataccactcagtgttcgtgaatattcagttaatccgtagggccaactctatttctggagcaccacctnctgcaataagagccctcttctttactaaacaacgaataacacatagggcatcatgaatggagcgctcacttnttcaatcaccagtttgttngaacccccgaaccaacaattggaactggttttncagggctgggacaagccctggaatcttgagcagttgg

SEQ ID NO: 1176 - DNA, 527 bp, Homo sapiens
  misc_feature 384, 397, 485, 510, 513, 516, 517, 526: n = A,T,C or G
ggtacagaaaagcccagatttaaatacatttaatatgtcattttaaaaatgattttaataattcatttcttaaaacactgaatgaattttgaagcttaatgtttttaaaggcatagttttatctttgacatctaatttaccatcaagttgtaaaattatttggaaaaatacagaactcgttttatttgtatacttatatggaatctgcatgtgaggtgtttgagggcatatgtttgaaagagggagcatcaccacaggaatcctttctgtgaggtggaaacagtggtcctgaatcattgtgctcacacctaacttgaaatctggtcttactttcatgctgttatgatttcacctggtgaatcaagtgttttaaataagaaaggnaatagttggtaangcccatggtatttaaatgaaagtagttagaaaaaagctctcctattctaccaaatttttaattctttcttcccttcttgctacccagngatcaagagtttctcataggctttnaanttnnaaatttgtnt

SEQ ID NO: 1177 - DNA, 530 bp, Homo sapiens
  misc_feature 480, 520, 528: n = A,T,C or G
acgcggggaggcgaggcaggttccgaggttggaacacctggcgagtcctcggtgtcggtggccggcagtcatctcgcggccgttcagaattataaggctgtctgcagagatttgaaaaatggcaacaaatgaaagtgtcagcatctttagttcagcatccttggctgtggaatatgtattcacttttacctgagaatcctctgcaagaaccatttaaaaatgcttggaactatatgttgaataattatacaaagttccagattgcaacatggggatcccttatagttcatgaagccctttatttcttattctgtttacctggatttttatttcaatttataccttatatgaaaaaaatacaaaattcaaaaggataagccagagacatgggaaaaccaatggaagtgtttcaaaagttcttctctttaatcacttctggtatccactggcctttgaattgggggaacctattattttccngagtatttcaatattccttatgattgggaaagaatgccangaatggtntt

SEQ ID NO: 1178 - DNA, 715 bp, Homo sapiens
  misc_feature 339, 572, 588, 599, 607, 612, 626, 643, 671, 684, 704: n = A,T,C or G
ggtacacaccagagcaccacctcattcaggctgtgctcctgtgtctgctggatttattccccatcctggagaaaaccctgcactggaaaggggatggagctcgacccaccacccattgtgatgaggtcctgcggctgatcctgacccacatggagccagagcaccgccttcttttacgcaggacctacgcaagaaacctgccggctttcgtgaacaggttggggatcctaactgtccggcacttaaagaggctggagagagtcatcattggttatctggaggtttatgatggacctgaggaggaagctagactgaagatattggaaaccctaaaacttntcatgcaacatacttggcccagagtttcctgcagacttgtggtcttactgaaggccctcttgaaactgattttgtgatgtagcaagggatccaaaccttacacctgagtctgttaagagcgccctgctacaggaggccacagactttctgattctcctggaccgctgttctcaaggacgggtaaaggggtctcctggccaaaattccccaaagctgtgaagacagaaaaagtnggtgaactatatcaanaaaagtgcaancaggtttnttaanggcggcaccccttncaatgggaacttaagancttggtattactttcccaagaagaaaanggattttttcccntcccattttggatgaatggngttatttaaaa

SEQ ID NO: 1179 - DNA, 716 bp, Homo sapiens
  misc_feature 203, 490, 500, 518, 526, 533, 559, 575, 578, 596, 604, 605,610, 615, 620, 633, 634, 637, 641, 642, 644, 651, 673, 674,675, 693: n = A,T,C or G
gggtactttttttttctttttttttttttagatggaatctcactctgtctccaggctggagagcaatggcatgatcatgactcactgcaacctcagcctcctaggttcaagcaattctcctgcctcagcctcccaagtagctgtgactacaggcatgtgccaccatgccaagctaattttttttttttgtatttttggtaganacagggtttcaccatactggccaggatggtcttgatctcttgacctcgtgatccacctgcctcagcctcccaaagttctaggattccaggcgtgagctgtcacacccagcttcagtgagtttcttaattctgagttctaatttaattgcactgtggtctgagagactgttatgatttccgttcctttacatttgctgaggagtgttttatttccaattatgggcaattttagaataagtgctatgtggtgctgtgaagaatgtatattctgctgatttggggtgaanagttctgtanatgtctattaggtccacntggtccanaactgangtcaagtcctgaatatcctttttaanttcctgcttcattganccnaaattggacagggggggngttaaaanntcccnctatnattgngtgggaggctaannctntttnnanggccttnaaaaaaccttggttttatgaannntaacctgcctcctatatnggggggcatgtgtatttttagga

SEQ ID NO: 1180 - DNA, 534 bp, Homo sapiens
  misc_feature 325, 328, 399, 451, 463, 470, 478, 484, 493, 525, 528, 531,533, 534: n = A,T,C or G
actctctgagcccaatatacagagaaaggaggaaaaaagctagaattctatgcattactacacaggggcctagcaccctccagcttccagcagagcgaagggagcaggtttttcttttttcccacagagctcggtggtgttgattccatacagtttttgttcagacaggaagggataaaaatgaacttcgaacagaaaggggtagagactcttttcccattgtattctgctcaaggtatttccccccaaataaattgagaaccatggagtagagaaaagagacctcaagaacagggcgactgagcacaagagggaaaaaaaaaanaanaaaaaaaagactgcaacttgctcccagggactggagaaaatttaaaaaaaggaaggttggaatccatcagnggtctattttaatcatcttctccttcattcctcctttcctttcttccccttnatcatcatcttnatctttnttaccttnatcctnatccccttnttggcaatatcttctaatccttcctcctcttnatnatnann

SEQ ID NO: 1181 - DNA, 621 bp, Homo sapiens
  misc_feature 1, 38, 59, 205, 368, 391, 449, 490, 521, 524, 527, 553, 565,570, 597, 599, 611: n = A,T,C or G
nccgaggtacgcggggagaagcttggaccgcatcctanccgccgactcacacaaggcangtgggtgaggaaatccagagttgccatggagaaaattccagtgtcagcattcttgctccttgtggccctctcctacactctggccagagataccacagtcaaacctggagccaaaaaggacacaaaggactctcgacccaaactgncccagaccctctccagaggttggggtgaccaactcatctggactcagacatatgaagaagctctatataaatccaagacaagcaacaaacccttgatgattattcatcacttggatgagtgcccacacagtcaagctttaaaagaaagtgtttgctgaaaatnaagaaatccagaaattggcagancggttgcctcctcaatctgggttatgaaacaactgacaaacacctttcttctgatggncaatatgtcccaggaatatgtttggtgcccatctttacagntagagcccatatcactggaagaaattcaaancgnctntatgcttacaaactggagatcagctntgtgcttgcacntgaanaaactttaaatgctgaaaccgaatttnanaaaaaattcaanctttttttta

SEQ ID NO: 1182 - DNA, 608 bp, Homo sapiens
  misc_feature 343, 423, 433, 487, 515, 516, 586, 591, 594: n = A,T,C or G
acaagacactacgggaacagtttgcctccctcccagcctcaaccacaattcttccatgctggggctgatgtgggctagtaagactccagttcttagaggcgctgtagtattttttttttttggctcatccttaggatacttcttttaagtgggagtctcaggcaactcaagtttagacccttactctttttgtttgttttttgaaacaggatcttgctctgtcacccaggcttgagtgcagtggtgcgatcacagcccagtgcagcctcgaccacctgtgctcaagcaatcctccatctccatcttccaaagtgctgggatgacaggcgtgaaccacaagctnccaacctaggccttaatcttgctggtattttccatggactaaaggtctggcatctgagctcacgctggcttacacagctntaagggctgntcctttactcacaatgggtttgtgaagctctgtggcccaaacaaaactgctatntgagccaaaattgcaaaagcttttttannccactggcctgaattacctggaagccaattgttggaccccggttccaaaccttttgcctggtaggaaagnttaanacncctaattacttttt

SEQ ID NO: 1183 - DNA, 715 bp, Homo sapiens
  misc_feature 568, 611, 614, 654, 660, 667, 678, 692, 693: n = A,T,C or G
ggtacctgagtgctcttcccatggtctcataattcatatcaggtttgtttttgtgcttcccccacaacctggacactgctttagaatccaccaatttaaaaatgcctttctctcgctgggtccacttgatgtatttaggacaagtagccttgtcctggagcagtgccagtaaaaactcccaaagataaattgtgtttccctttccgtctttgtttttcttcttcacagatatatttggcgtagtggctggggaatctggtcgtggtggtttagtttttcttccttttttcctcttaggctgttctggtgatgaggctcccggtgagtctgcatatttttcttgcacctgctgtgtttccatcacttcaggaatcccatctaatgtgacggacacatgggtgactggggcaacaaccatgtcatcttcaggtgaactaaatatattattatttattcgtttttcatccagcatagggccagggggaatccatattgaggagtgcctcaacagcctcaataagtttcaattgtttcatcccccgtcatggcaagaagcttcaactgtaanggtgatgtcatcatcatcgctatgaattcttcttcaccacatncantgaactctcagtaatcatgtcactgggctctttcccacangcttanaccggcntaaactattgngaaatatcagcccnnggaacatgttccccaattaccg

SEQ ID NO: 1184 - DNA, 710 bp, Homo sapiens
  misc_feature 27, 28, 34, 38, 43, 46, 63, 65, 94, 108, 117, 128, 130, 136,148, 161, 165, 169, 178, 198, 205, 207, 225, 226, 230, 253,258, 261, 265, 272, 274, 285, 291, 308, 310, 317, 319, 339,346, 379, 399, 443, 478, 528, 533, 544, 549, 553: n = A,T,C or G
  misc_feature 578, 580, 591, 596, 600, 643, 644, 651, 687, 697, 698, 704,705, 708: n = A,T,C or G
ggcactttttttttttttttttttttnnatactntttnctcanttnaagtttaataccaactncnaaagattaatgggttgctctactaatacntcatacaaaccagnagcctgccnacaacgccaantnaggccnttcctaccaaangaaaaaaggctgntctntccnccccctgtnggaaaggcctgccttgtaanacaccananttcggctgaatctgaagnnttgngttttactaatggaaaaaaaaantaccnaanaggntttggtntnatggctgcccnccgtancctggcactaaaacagncnagcgctnanttttgcttggaaaaatattntttgctnttttggacatcaggcttgatggtatcactgccnggtttccagccagctgggcncacttccccatgtttgtcattgaactggaaggcctgaactattntcaaagtcttatcccaaaacggccaacagggaggncatttacagtgatctgcccaaaaaatacccttatcatcgatgattaaaangcccntgaaccagatnccttntttnaccctttaaaaccccataatccctnancaatggtgccncttcnggtntgaatccaaaaagaatgttgattgggtccccagcccccttggnntttaagngttttgggcccttgctttattgacaaaaaggggaanaattccccgnngccccnnatncc

SEQ ID NO: 1185 - DNA, 709 bp, Homo sapiens
  misc_feature 171, 491, 540, 590, 593, 597, 620, 625, 630, 634, 664, 685,709: n = A,T,C or G
ggtacttttttttttttttttttttttttggcataaaggaatataaaactatttattaaccactgttcaccagtatttacaataaagtaaacaatatacagttggataacattttgattactacaaagttgttcttcctggcttttgctgaaccagtaaagcaaactcaanattgagcctccatgtaatgaattggggtaaagaaaaaacatgcaggtcaataggttaggttacaaaaggttgttcacacatttatgacagcaggtcctaaactgccaacacctctaaccatctgattaggtttctatgagccaagtcttacatattccattcatcatgaccttttagtcaatgtagcaacagggattccaacattttgctaaggaatggcccgctagggaaacttttaaatgttcatttaacttagttttgtttagctagttaaaacacactaacatttgtctagtttcctcatctggatgaggaaaccngctgtgatggcagtgataaaatttttccttttaggaattttgcaaaatnaacccactgcaatttatagacactttaaaaattttccaatttaaaattgnccntatntaaaattacttattttactttgnaatgnttggnttcnggaaaaatttttcaatttttaccttggaangggattatcctcttattttgnctttgggaaaaatggcaattcccn

SEQ ID NO: 1186 - DNA, 646 bp, Homo sapiens
  misc_feature 629: n = A,T,C or G
acccttaaactggcaggacatttttgaaatcacaaatttgcacataaagaatgtcacgaacagccatgtatccatatacagcaatcaaataaggaacttatgacctaaagcaaaggtaaactttcttgaaacttaacattctataccaactaggcaacctctgcccaggatgagagttggatttttcaaaaacctctaatttaatagtgcagcatttcgttttccctgatggcctgtgtttcacagcagtttttaaagactgcttgttcaactatagctgcagcctatatcccagctatggaaaaaaaagtaaatcttagttcaatttttgccagttgtttctgtatttaaatttaaaaaaaaacacacttccgctgggcaggtttagaggtttattatcagtctgtgcataactaaaagttcaaagcaaattcaattttgcttaagggaacattgtaaagtaacaattcttggtattacatgcctcgtatgatccatttcaaaccatagagaattacacctttgtgtcactgtttcaagagacaaacagattttgaacagctaaaacatcttaaaaatgcaccaagcttatgaaagtctcaaacaaaacttgaattttctgtaccttnggccgggaccacgctta

SEQ ID NO: 1187 - DNA, 716 bp, Homo sapiens
  misc_feature 618, 653, 659, 692, 708: n = A,T,C or G
ggtacacagcttaaagctataggttgcagcttggctctatctgctgtctcaataacagcctttgaactgtccacgtatcttaaaacttctgcatattttttaatagccatctcccagttctgggatttgaaaaaagtatttccaatgttttttaagtcttctgttattaataaaattttatctacatcttttaaatctatatccgcatcctcagggaaatctggatgactgtcgccagagccatcttttgggaatattcccccgtcatctccttccttcaattccccacattctgcaataacgcacaatttagcaggtttttcacctttcacttccacattttccaatatccttgccactcctattcctttaattacttggccaaacaccacatgtttcccatccaaatgaggagttggaactgttgtgataaaaaactgagaaccgtttgtgttgcggcctgcatttgccatgctcagtaaaccctcccgatcatgcttgtaatggaaattttcatcttcaaatttttcaccataaatactttctccacctgtcccattctgatttgagaagtctccaccctgaatcataaacttcttaataaattcgatggaaaanggcatccctttgaaatgggagaaggttcccagtcntgtgtncaatggccctttttctcctgtacctccatgaanaaagccctagtcctgnaaaagggg

SEQ ID NO: 1188 - DNA, 708 bp, Homo sapiens
  misc_feature 367, 380, 509, 560, 584, 604, 609, 630, 638, 658, 662, 663,667, 676, 680, 686, 692, 693, 697: n = A,T,C or G
ggtaccttttgtgttttacttcagtgaggagattggagtctgaatggatctgttttccaagagattctgagaaatttttgtattcagcagttggaaagctctctattctagttgataaaacttcccttttttgatgtagatgcagatattctatacagttctgttgtcttttactaggactgtaaacttttgtgataaaattcaaataagattttatttcttggtaattttggctttcacaatttatctttaaatccttgagcaatctgtatacaattaagagatttctgacatttattcttacactaaatggatcaactctaggatttaggcatgttaacttctgttgtgttttgaatctctccangagttgcatgtanatagcatttatttctgtgcccttaaacccatttagaaaataactaccaaagtaaaaatgtagaggaaataggaaatgtattttttcatgaacattttgatacaaatttcatcatttaatgattcaccantttcttgcatttaatttgaatttaagcatttaattcaaagaggaggggganccatcccattattggataccatgntgggcttttaaaaaacttcnttccntttattaaataggtcaaggtnttgggccncaccaaaagtatattttttntcanngganaaaaattcnaacntccccnagcccnnatgntggaaaaagaa

SEQ ID NO: 1189 - DNA, 375 bp, Homo sapiens
ggtacatgacctaatttttacatcatagtaaaacaggccctatggagagaggacatgggtttctctgctgaacagccattatttatactcgttccaaggcttctaacatgatgatactatttcctcgtattaccaccattccaatattgttctgttgtccactagtcgccatctccacacattcatctatcacaaggttcataaagggatcaaatccccgcaatattccttggacatgtctgccaccatttaatttcaatgataacttcttgtccataaattttttcaactcgggagggtgagctttgctcatggtgtatactccgcgggctcacagatgccttggaacgcaacgcacggctttcctccccgcgt

SEQ ID NO: 1190 - DNA, 713 bp, Homo sapiens
  misc_feature 574, 644, 649, 653, 702: n = A,T,C or G
aggtaccacgctggtctaatgcaaaaatggagattgctacaaaggaccctttaaaccctattaaacaagatgtgaaaaaaggaaaacttcgctatgttgcgaatttgttcccgtataaaggatatatctggaactatggtgccatccctcagacttgggaagacccagggcacaatgataaacatactggctgttgtggtgacaatgacccaattgatgtgtgtgaaattggaagcaaggtatgtgcaagaggtgaaataattggcgtgaaagttctaggcatattggctatgattgacgaaggggaaaccgactggaaagtcattgccattaatgtggatgatcctgatgcagccaattataatgatatcaatgatgtcaaacggctgaaacctggctacttagaagctactgtggactggtttagaaggtataaggttcctgatggaaaaccagaaaatgagtttgcgtttaatgcagaatttaaagataaggactttgccattgatattattaaaagccactcatgaccattggaaaagcattagtgactaaagaaaacgaatgggaaaanggaatcagttgcatgaatacaaactttgtcttgaaaaccccctttcaagtgtgatcctgatgcctgccanaaccntttntggattgctttaccccccccttgtggaatttgccttgcaaattaccctncccggggcggg

SEQ ID NO: 1191 - DNA, 567 bp, Homo sapiens
  misc_feature 551, 557: n = A,T,C or G
acgcgggtggagcatgtgtattatgtggccaatgtcttcactctaacttggttatgagactaaaaccattcctcactgctctaacatgctgaagaaatcatctgagggggagggagatggatgctcagttgtcacatcaaaggatacagcattattctagcagcatccattcttgtttaagccttccactgttagagatttgaggttacatgatatgctttatgctcataactgatgtggctggagaattggtattgaatttatagcatcagcagaacagaaaatgtgatgtattttatgcatgtcaataaaggaatgacctgttcttgttctacagagaatggaaattggaagtcaaacaccctttgtattccaaaatagggtctcaaacattttgtaattttcatttaaattgttaggaggcttggagctattagttaatctatcttccaatacactgtttaatatagcactgaataaatgatgcaagttgtcaatggatgagtgatcaactaatagctctgctagtaattgatttatttttcttcaantaaagntgcataaacc

SEQ ID NO: 1192 - DNA, 702 bp, Homo sapiens
  misc_feature 428, 598, 611, 624, 626, 641, 643, 652, 656, 662, 669, 671: n = A,T,C or G
acaaaagatgttggagtccagtaagcccatacctaaattaactgtaaagcttcaaggactttttgtttatttttatatactagttttcttctgtgacaagttgattttatctccaagacttaaggccattccctggctctttgcacgaattcttatatggccggtaacagcagcatctggtccctggtgaattggcttctcaatgctgacatttgcaagtgcatcttcaccaaatatggaacgagcataaaggttggctgccataaagccacagtaaccagaaagggccttttctggagtcaggcatttcatattggttgactttaatatgtgctgtaagtagtcatttaaatcaaccatgttggtgttaactgtcactttgttttcccattcaaattcggcccacatctgacggaattctgcatcantgcaagttgcaggctggatataagtccatgatgtcgatgtgaatatcactgagaaccacacaatttctgtcacttgctgctccagaaacatcataaactatattaccaaaaattattccatttttctgttgatgctactttgacgttagctttaatatttgcgaaagtcntgaggagcaagantcaaaaggagacngntttttcacaagtttnanatcccctantggnactagnttctaangnggcaattctgcaaaatttcactggtttgggt

SEQ ID NO: 1193 - DNA, 391 bp, Homo sapiens
acgcggggcttgtaaggtgcggctagaaactggggacatggcagcgcctggcccagcgctctgcctcttcgacgtggatgggaccctcaccgccccgcggcagaaaattaccaaagaaatggatgacttcctacaaaaattgaggcagaagatcaaaatcggagtggtaggcggatcggactttgagaaagtgcaggagcaactgggaaatgatgtggttgaaaaatacgattatgtgtttccagaaaatggcttggtagcatacaaagatgggaaactcttgtgtagacagaatattcaaagtcatctgggtgaggccctaatccaagatttaatcaactactgtctgagctacattgcgaaaattaaactcccgaagaagaggggtacc

SEQ ID NO: 1194 - DNA, 320 bp, Homo sapiens
  misc_feature 169, 225, 253, 258, 286, 295, 300, 310: n = A,T,C or G
ggtacttgttgttgctttgtttggagggtgtggtggtctccactcccgccttgacggggctgctatctgccttccaggccactgtcacggctcccgggtagaagtcacttatgagacacaccagtgtggccttgttggcttgaagctcctcagaggagggtgggaacanagtgaccgagggggcagccttgggctgacctatgacggtcaacttcgtccctccgncaaacacccaatgaatggtgcgggtatnataanactgacagtaatagtcagcctcgtcctnagtcttcantccanagatggtaanggaggcaaga

SEQ ID NO: 1195 - DNA, 708 bp, Homo sapiens
  misc_feature 504, 508, 513, 516, 517, 520, 522, 530, 532, 580, 583, 596,625, 629, 634, 637, 655, 662, 663, 667, 689, 695: n = A,T,C or G
acttagcatcggaactgcaatgttaggagcagggttgtgtgttggatttgacatagatgaagacgcattggaaatatttaataggaatgcagaagagtttgagttaacaaatattgacatggttcaatgtgatgtgtgcttattatctaacagaatgtccaagtcattcgatacagtaattatgaatcctccctttgggaccaaaaataataaagggacagatatggcttttctaaagactgctttggaaatggcaagaacagcagtatattccttacacaaatcctcaactagagaacatgttcaaaagaaagctgcagaatggaaaatcaagatagatattatagcagaacttcgatatgacctgccagcatcatacaagtttcacaaaaagaaatcagtggacattgaagtggacctaattcggttttccttttaaaagccccgcaaacaaaagtcgtttaaaaacctatttaaaaatgaataaaaaattggtttaccganaaanatatnttnntantnatataatngntccccgggggcagttcgggcggtcccccgggtctgtctttttgctttnaanaggtgttttggancggaaacaaaatcccggggactttttttncagncttcngancgcccttccgattttccntttcccnnttgnaacctccgggaccatttttttnggcatnctccttgcttttt

SEQ ID NO: 1196 - DNA, 633 bp, Homo sapiens
  misc_feature 348, 394, 426, 454, 460, 483, 508, 518, 520, 542, 555, 566,616, 621, 624: n = A,T,C or G
ggtactttactgaaagaacactagtgttctttcctttccgttgtgaaaaaagttgtttctgaggaattgaaaccccagaagataactacaacaaaaacatgttaatttttttttaaaaatgatgattcaaaggcagatttgaagggaagtaatatttaggtggcagaagaaggcaaatgcagcctctgaagggaactgttctaattattacctaaaaaataaagttacacaactatattcaaggacatgagataaagcactgcttgaaaaccagaatgactgaacagttaggtgaaaaggaacactgaaataggaaggggaaatggactgaagaataattttgaatcngggacaggtgatccatcagtcctagatgccttcttggtatggaaantatcttggaatcacattgttttccttcttctngaaatctcaaaaggagaattcttcacangcactnacattaaggttgccattttggtnaggattcaaaatttcaatccagtanccttcaagantnttgaataaatgccaggcctttnatttttacccatnataagggtttntccacaaaatttggactcccagttttttaaaacctttttacaagccctgntttcnttnaggaaacag

SEQ ID NO: 1197 - DNA, 336 bp, Homo sapiens
ggtactgatttccatcgttgcatttacaactgctacaaaaatgccagcactccatcgacatgaagaagagaaattcttcttaaatgccaaaggccagaaagaaactttacccagcatatgggactcacctaccaaacaactttctgtcgttgtgccttcatacaatgaagaaaaacggttgcctgtgatgatggatgaagctctgagctatctagagaagagacagaaacgagatcctgcgttcacttatgaagtgatagtagttgatgatggcagtaaagatcagacctcaaaggtagcttttaaatattgccagaaatatggaagtgacaaagt

SEQ ID NO: 1198 - DNA, 713 bp, Homo sapiens
  misc_feature 647, 688, 689, 710: n = A,T,C or G
ggtaccaagggatggaagaagtaaatatagctcaggtagcactttatactcaggcagatctcagccctctactgagtcccttagccaagcagtttctttcaaagaagccagcaggcgaaaagcagggactgccactgcatttcatatcacactgttaaaagttgtgttttgaaattttatgtttagttgcacaaattgggccaaagaaacattgccttgaggaagatatgattggaaaatcaagagtgtagaagaataaatactgttttactgtccaaagacatgtttatagtgctctgtaaatgttcctttcctttgtagtctctggcaagatgctttaggaagataaaagtttgaggagaacaaacaggaattctgaattaagcacagagttgaagtttatacccgtttcacatgcttttcaagaatgtcgcaattactaaagaagcagataatggtgttttttagaaacctaattgaaagtatattcaaccaaatactttaatgtataaaataaatattatacaatatacttgtatagcagtttctgcttcacatttgattttttcaaatttaatatttatatttagagatctatatatgtataaaatatgtatttttgtcaaaatttgttacttaaaatatanagagaccaagttttctcttggaagtttggtttaaatgacannaagccgtttttgaatttcaanaaa

SEQ ID NO: 1199 - DNA, 714 bp, Homo sapiens
  misc_feature 44, 61, 63, 150, 167, 183, 305, 344, 445, 467, 565, 570,574, 597, 624, 630, 660, 667, 668, 692, 707: n = A,T,C or G
gggactttttttttttttttttttttttttcttttcagcattgngttttactttttgggananaggctaggaggaggaaggggtgaaaacagcgtctcactggagtctcaaaagtgtatgaatcttctggtagtgcaaggatgggataanatggccagggaagtcanatggaaaatccccaanattctttttgctactgatttctataattaaaatatgacatatgtaagggactagtgcatgatattcaataaatgtcagttgtctttcctaactaggttcctcacaggctaggttatgcctanatatcatcatcctcctttcagggaatgaagctcacctanaaaactagggaactaaaagtgcaatatggtttgggtaatgcggttggttagctgtctccccatcctcccaactcactattccagggaggggctgaaaacanaagtggctcccctgaagtctanttagcatgtcatgacagaatccacatgaagggctgtgggctgcaactttctagtgccacagtcctcttttttggcgatgataattgtagggaaagaanccccncacncatgcttgatttcacgagctgtntttcaggatcttaacaacccttgctgngctcantttttggaaatccccattattcacagcttngaacttnntcccctttccttgcagtcctgctnttttgtgcctcaaantcaagga

SEQ ID NO: 1200 - DNA, 400 bp, Homo sapiens
  misc_feature 68, 93, 100: n = A,T,C or G
acttttttttttttttttttttttttggctaaaattattttattttttataattttctaacacatggngttagaaaatgaattttggcaccgngattaanaatttcttttcaagtttaacctttacattaaaaacagtagctacaataaggatatttcaaccttacttagagaagtgataaaacatcaagtcaacaagtatttttgttggagaatttttttataagcgggatagagggaagttaacatagacactcagaagaataaaatggaaattatgccaggaagataaaaaagcaaataaccctccccccaaaaaaagaataaggagcgagacaaagggcaaaacggaagaagcaaggctcaacaactttgttttcctgatataaaattcaagtacc

SEQ ID NO: 1201 - DNA, 710 bp, Homo sapiens
  misc_feature 581, 662, 680, 685, 693, 702, 705, 706: n = A,T,C or G
acgcggggttttttacttgatataaatgtatttttactgtgatagtccaagtgccctgggggggcaggtgtgctctatgtggttcttcttccattggagagctggcgtagagatctgcagtgttcacaaggatgttggtttggagatgtctgctgctaggacctggggtgtgtgactcagtccatatatagggacatctgggtggaggagtaaattcctgtgctctgaaatgccacttggtagctctggacaatgaaggacaattgactcaagggtgcctgacttctgctgctgctgggaaaaaattcagtttatagcattcctgcacctcccaaagtagataacctggaggtcattcagttaacaactgtccctgaggactcagttttgggggaggggttatctgggagaactttaacctgttctgagccattaggagacattagtgaattggagcactggagaatcctacaaatggcctatgtctcaaaaaaagctgggacctccttccagctgctgcagatgctgaccaggccctgggaggctgctgtgctctggaaaaacttggaccactcattttnttggcctaacctggctgccttaaaaaagaaccagtcaggactttgaagggaagcatcaaaattctatacccataaacctgnagtttgggaagtcaagcnttttngaaatgtncacctttgnccnnttgt

SEQ ID NO: 1202 - DNA, 634 bp, Homo sapiens
  misc_feature 570, 582: n = A,T,C or G
actttagtaaagacattcatctcagtcatttctctctcccagcttgaccttaggttaatatttcatttgggtcaagaaaataatacgtaggagaggtatgttattttaacaaacaggaaaatggacaaaaaattgatagtttgcctacattaaagtaagttaaattcatgtatcgatataattaaatcatgtaagaactaagagttctatatacatttccattgtcttacttgggcttattctaaacttaaatgctagtgaacaaagtgttaggaatatacacaggctgcttctctggagttattaccaactaaaagacctcagcaagcagctaccaccaataaaacagtctgaagctgcctccaaatataatattgtaggagttttcaaggaaatttttatactgtatgcttttgtctgtgactatgcttttaaagatgtgtttaactgtcacattttaaaaaagttcatatacaatacaaaaatcaaaacaaacaccctacaatacacaaatctaacaaagtatatgtggtgagattccaaaaaatgtttgaagatgcattttctttncttcatttcagnatctaaaatgtgccttttcagaagcccattggtcaatatgtacctcgggcgg

SEQ ID NO: 1203 - DNA, 711 bp, Homo sapiens
  misc_feature 557, 612, 621, 634, 676, 692, 693: n = A,T,C or G
actgaacacaatatttgtgtttttattatttatgccacgtcagtggggcaagaaatctggagtgagtgaagaaagctaagttgtgaacaagagtgtttttatagcatatgtgttgaagtaacagcttgtgcccgagaaacttaacagatgagttcttgaatctgggatgagatgacggatgtaaatatttctaaattttaaatactacattacttggtgtccttttttctcccaaactttatttagaaatggaaggagttcaattttttcttgttctactttccctattcttatggaggtaaaaggaaaggaaggaaggaaaaagcagctttcacttacaaagtttcgtgtaaaaatatctttttttcttaaataactccattcatacaaattgggatgggaagaaaatcctttcctcttgggaaagtaatacaagtcttaagttccattgtagggtgcgccttcagaaacctgctgcacttttctgatatagttcaccacttttctgcttcacagctttggggaattttggccaggagaccctgaaacatgaaccnaacagctttgatatttttttttttttaattactttcccctttgcttggattcttnttccttggnatcatattcaaanggaggaaagaatggatgacactttaggggccaggtcactaanccaaaatagggattanntgggtttttttattattt

SEQ ID NO: 1204 - DNA, 258 bp, Homo sapiens
  misc_feature 60: n = A,T,C or G
ggtactcactttttccaaatgatcctagtaattgcctagaaatatctttctcttacctgntatttatcaatttttcccagtatttttatacggaaaaaattgtattgaaaacacttagtatgcagttgataagaggaatttggtataattatggtgggtgattattttttatactgtatgtgccaaagctttactactgtggaaagacaactgttttaataaaagatttacattccaaaaaaaaaaaaaaaaaaaaaa

SEQ ID NO: 1205 - DNA, 709 bp, Homo sapiens
  misc_feature 586, 607, 660, 687, 694: n = A,T,C or G
accaaaggatagctgttctgtttaagtagggacctctcatggcctacaggctttgacatctgagaatcaaactggagaacattccgaagccgttcttataagtgtctccatctctacctgggctgaaatggaatgtgcaaatgtagcccagcctggtccttgggtgttgccagttgattgatgactgggagccaaagtggcatctcctttgacctaaacgggcgatgatgaaataaaactcaacagcctttctctcatcttgcattgtgagatgcgaaatagagcgtgtctctctgcctctcattttaggctgaggccgtccaaagcggccatgccccatgtttccactagatggcgctgacacttcaggcatcaaccctcatggcctctcaaccttgcaaaggcagccacttaaagtcggtgtcctgtgtggggcaccaagctgagctgcagacacccagtatgcgcgaggcaaatgcgtcccattttaaagaagcttgtatttatgaactctttgctttctcccttccactaactttaaagaattgctcttcatctcctttggcaaagttcctttgccctttgncttattttttgtgaaaccctncaaggtattttccagtccattttgcattcaatctggcatttttaccggaagcngggctcatatgctattggtgttaacgnggactantatttatgtgtttga

SEQ ID NO: 1206 - DNA, 700 bp, Homo sapiens
  misc_feature 480, 512, 541, 549, 584, 625, 630, 646, 665, 671, 683, 685: n = A,T,C or G
acgcttttcaccccacccccaagtcctgggagaaatgcaggcaacactgagacatgggagaggccaagatatgcttgacagaaagggtgattttgaggctcagttaatatttcaaaattgtaaccgtagcaaaactgcattggtatttagaaaaataaaaaatttccaatatgtagtgctgtgttatacctgcctctgccatgcagcatcatagcctgtgggaaccgggagggcttcccttaccacccagagcagaggaggaaggtgatggaatatggggtgaggggaggaacctggtggcccctccctgagatggccagaaagcccttggcctcacctgggactgaccaggcagccctagtctaggcacaaggtgccctttcacccttcatggctgtgggaatatttcctcttactctttttctcccatacagctactgccaaaatgcccaaacttgggccaaatgttgcccaaacttnggccaaaaatgttgcccaagagaccaagacangaggaaaacaagtttccaaatctatgtanatcatganccagaaatctgaggcttgaataaaagggcttaaanggcaggaacttttttgggggtgtccaaaacagacgcccatnccaangacttccattggaatngggggggaaagcttggtanggtttnaatttttatcgncnattttaataaattta

SEQ ID NO: 1207 - DNA, 710 bp, Homo sapiens
  misc_feature 38, 85, 89, 116, 125, 129, 212, 215, 217, 219, 221, 239,258, 290, 328, 428, 458, 479, 520, 530, 536, 542, 547, 548,577, 599, 625, 643, 646, 655, 665, 666, 677, 702, 704, 705,708: n = A,T,C or G
ggtacttttttttttttttttttttttttttttctttnaaaaataatatttaaatttattgtttcacattagtttgaataaagcncaanccaagatggtttaaatatcatttgcanatgtccaancttntttacaattacaggtcatgggcatcatcaacctagtccttgacttgcagctaaaaaaggcaaaaggtctgtgtgaagtgacanaanancncnccctactcatgtcatgancaaggaatcaaagtcgaanaacagtaacagtcttgacatcagcactgtaanaattactctgcagtaaactccaacccaaaatggggaanaatactgaattagctgaacacattctggacacaattctgaccaatttcagtctcatgatctctgttggagcaggtttcattctccaattctcttttacanaacagcagaactcgagccttcataaaaagngattaacggcctttccgcttnttcatttttcctccagccaccttgttcctgacaccaattancaccctctgngtcatnattatnttcannatccttttcgcgagcgttttttttttctncatgctcccttaacttccattnggggcaaaccttttgggctttcaacnaacccgttctgtcaacancanaacctcatnatccctgggnntggaaaaaccngggtaggtttctttcccaattaaangnnttntt

SEQ ID NO: 1208 - DNA, 376 bp, Homo sapiens
acccaaatacacaaaaggtgtccctttaaggaaaataaagaattaagttttaaataacattacattttacaatctgacatctggagtatattgaacataggctatttcttgatataacactcatttaattgtggccatccaaatgaatattattgcagaatttatcttgttcataatgatttgtaaatggtgttatagctgaatacctgtgcatgaaaatgggcaatattttcatctgtctacttgtagtgccatagaggccaatatgcacaatattaactaatgccaagacatggctgtttaaaaaatttaatgttcaaacagttatcactgatgcttttgcactatttattaataaaatcatatattgtgtacc

SEQ ID NO: 1209 - DNA, 709 bp, Homo sapiens
  misc_feature 567, 617, 620, 642, 652, 671, 673, 692, 697: n = A,T,C or G
acaagtgtatacaggcacaaacatgtttttaacaaaagaaggaggaaacactcatgacaattacagtccttatttctacagctggtcacgtggtcatagctggtatcgatgactaccttcttctactacccattctgtattcccttagtcttcagtaagcaccccagtaggtcatatgggagagttgaacagggatgtagtgggaatcacctcccgtgcatctttcaagtccttcatggtgacactaatctccgcaaaccctccagaggtgcgatattgcttttgatttacaatttttctaggtagagacagctctaatggcttccatttggcctttcccaccataatagccctcaccctaccagtcagggaaccaatgtgggggttttgtcagctgctaagtatgtctatgccaattatgcattcttgcactggggaaatgaccacaggatgagtatggggacccactggacccattgtaaagtcaagacttaagtaaaactgcattaattacctgacctcacaagcccctattttaactggggaaccacaatgatggtttgagtncctggaaatcagtggcagctcaaaaccagtgtcccttacttcccgaaatngtntgatcatttccctttcccccangcacaagtancctggttaaaaagctggangnattcctttggggaaaaatngtagnaaaaaattaaca

SEQ ID NO: 1210 - DNA, 715 bp, Homo sapiens
  misc_feature 473, 478, 536, 552, 568, 589, 609, 610, 621, 654, 657, 664,676, 707, 709: n = A,T,C or G
ggtacggagatgtcttatggtgaaattgaaggtaaattcttgggacctagagaagaagtaacgagtgagccacgctgtaaaaaattgaagtcaaccacagagtcgtatgtttttcacaatcatagtaatgctgattttcacagaatccaagagaaaactggaaatgattgggtccctgtgaccatcattgatgtcagagggcatagttatttgcaggagaacaaaatcaaaactacagatttgcatagacctttgcatgatgagatgcctggtaatagaccagatgttattgaatccattgattcacaggttttacaggaagcacgtcctccattagtatccgcagacgatgagatatatagcacaagtaaagcatttataggacccatttacaaaccccctgagaaaaagaaacgtaatgaagggaggaatgaggcacatgttctaaatggtataaatgacagaggaggacnaaaangagaaacagaaatttaactctgaaaaatcagagattgacaatgaattattccagtttncaaagaaattgaagancttgaaaaggaaaaanatggtttttgagaacagtgtnaagaaatctgaacctttttnnggaacaatttnttcccttttttatgaagggtcataattaatggnccncttaaancctgattgaaanaaaaaaaaagatctttgtttaataaagcttntncccatc

SEQ ID NO: 1211 - DNA, 694 bp, Homo sapiens
  misc_feature 552, 559, 571, 575, 618, 623, 634, 637, 666, 671, 691: n = A,T,C or G
ggtacgcgggggtggctaccatgctctctcgcgcgggtgtcgctgggctgtcggcctggaccttgcagccgcaatggattcaagttcgaaatatggcaactttgaaagatatcaccaggagactaaagtccatcaaaaacatccagaaaattaccaagtctatgaaaatggtagcggcagcaaaatatgcccgagctgagagagagctgaaaccagctcgaatatatggattgggatctttagctctgtatgaaaaagctgatatcaagggtcctgaagacaagaagaaacacctccttattggtgtgtcctcagatcgaggactgtgtggtgctattcattcctccattgctaaacagatgaaaagcgaggttgctacactaacagcagctgggaaagaagttatgcttgttggaattggtgacaaaatcagaggcatactttataggactcattctgaccagttctggtggcattcaaagaagtggggaagaaagccccccacttttggagatgcgtcaatcattgcccttggaatttactaaatttctngatatgnaatttgatgaangctncatcattttttaaataaattcaaggtctgtcatctcctataanaaaanaaagaaaaagnccntcttttttcccttaataccggttgcaaantgctnaccagcatgaagtatttttngac

SEQ ID NO: 1212 - DNA, 708 bp, Homo sapiens
  misc_feature 488, 521, 522, 531, 559, 596, 606, 632, 641, 651, 693, 705: n = A,T,C or G
actgatacaatggatcaagttcttaaaaattttaaaagaataaatgatgctggaattctggacctgaggatctttagtatttgaacaaatccacagattaaactgaaggtaaattaagacttcagttttggttatttccaacttttctgtgaggatgtatatccattaaagctcaggcttatagccacactgttacttttgtaggtaatcttcaagttttatggtttaaaatccagccaaccagtggctgtaacagccgaattagccataattcactggctcacacagtggagatctggctctcattcataccaaagcatttcttggtaatgacctccatatttagagatcaggggaacaactttagtgagcagcaaccaatccactcaaacagtctgccttgtgctttatgcctgactttttcttgtgcctacctcagcaacccccaatgtaaaactgcttttatctttgaaaaattttttgcaacnttgaaactattttagtaacggattctactccanncattgcttntctgaatccactgggcatcctggaaaanaattctgcgaagaaaagacatttgccttggtcccagngttccatgcnaaaaccattttttttaaaaaatgggncccaatttngttcccgganttctaaaatggctttctttgaaatcttatcttttaaacctgntcatgaattatnccc

SEQ ID NO: 1213 - DNA, 592 bp, Homo sapiens
acgcggggacaaactttcagagacagcagagcacacaagcttctaggacaagagccaggaagaaaccaccggaaggaaccatctcactgtgtgtaaacatgacttccaagctggccgtggctctcttggcagccttcctgatttctgcagctctgtgtgaaggtgcagttttgccaaggagtgctaaagaacttagatgtcagtgcataaagacatactccaaacctttccaccccaaatttatcaaagaactgagagtgattgagagtggaccacactgcgccaacacagaaattattgtaaagctttctgatggaagagagctctgtctggaccccaaggaaaactgggtgcagagggttgtggagaagtttttgaagagggctgagaattcataaaaaaattcattctctgtggtatccaagaatcagtgaagatgccagtgaaacttcaagcaaatctacttcaacacttcatgtattgtgtgggtctgttgtagggttgccagatgcaatacaagattcctggttaaatttgaatttcaagtaaacaatgaatagtttttcattgtacctcgggccgcgaaccacgc

SEQ ID NO: 1214 - DNA, 710 bp, Homo sapiens
  misc_feature 593, 608, 658, 670, 685, 701, 702: n = A,T,C or G
acattttcataaaatatgaagggataactacaaactggagtaaaaatgacggtaattaaaaaaatcctcagtatccctagcttgtctattaactgtgataatctgacttgagtcagattgaatatttggagtgcttccccagaataaccacttatttttgaagctatcatgtgaagtatttttttaaaacaaaacaaaaattatggtcattaaaaaactagagaattagccatattaaggatttttcttgactgcaaattacttctaaagaatcatcagtgtatagattagaagtgctcattacctgcaacttttaaaaaaaattcagttatagctgcttttgaagaggtttccatttttatttaaattactaatggatcaaagaacaattgtttattttttctctttggttttagatattaatgataaccttgttggaatttttttttccaaagaaaatatttttataattaaataatttaatgtttttcttccttttcattacctactcttggcagtgttagggtatctgtttacctttaaaaatgataagtctcactcaagattttttatgtatgtataaaaattttggngtgctacaaaagccnttgcaaattatcagtagtagttttttttttttttttttttttttttaaanaaagagccgatnttggcttaatgcccnctagggggacattccnnagggaagc

SEQ ID NO: 1215 - DNA, 696 bp, Homo sapiens
  misc_feature 578, 579, 584, 594, 602, 613, 665, 666, 673, 681, 694: n = A,T,C or G
ggtaccttcatgaaaacggtattatacaccgtgacttaaagccagagaatgttttactgtcatctcaagaagaggactgtcttataaagattactgattttgggcactccaagattttgggagagacctctctcatgagaaccttatgtggaacccccacctacttggcgcctgaagttcttgtttctgttgggactgctgggtataaccgtgctgtggactgctggagtttaggagttattctttttatctgccttagtgggtatccacctttctctgagcataggactcaagtgtcactgaaggatcagatcaccagtggaaaatacaacttcattcctgaagtctgggcagaagtctcagagaaagctctggaccttgtcaagaagttgttggtagtggatccaaaggcaccgttttacgacagaagaagccttaagacacccgtggctttcaggatgaagacatgaagagaaagtttcaagatcttctgtctgaggaaaaatgaatccacagctttaccccaggttctagcccagcctttctactattcgaaagccggcccctgaaaggggaannccgangggtgccganaccacaanagccgccccanctggtgtggtgctgcttggtttgtgaacctcctgggttttgaacaccaaaannaaatgtncctgcccnggccgggcccttnga

SEQ ID NO: 1216 - DNA, 664 bp, Homo sapiens
  misc_feature 622, 627, 628, 631, 659: n = A,T,C or G
ggacgatcgaagggactatgtcttcattgaattttgtgttgaagacagtaaggatgttaatgtaaattttgaaaaatccaaacttacattcagttgtctcggaggaagtgataattttaagcatttaaatgaaattgatctttttcactgtattgatccaaatgattccaagcataaaagaacggacagatcaattttatgttgtttacgaaaaggagaatctggccagtcatggccaaggttaacaaaagaaagggcaaagcttaattggcttagtgtcgacttcaataattggaaagactgggaagatgattcagatgaagacatgtctaattttgatcgtttctctgagatgatgaacaacatgggtggtgatgaggatgtagatttaccagaagtagatggagcagatgatgattccaagacagtgatgatgaaaaaatgccagatctggagtaaggaatattgtcatcacctggatttttgagaaagaaaaataacttctctgcaagatttcataattgagagaatttcctgagttgatagctcttaaaggcagatttgctgtttttgcctactttaacccatttttcaaccctgtttggttttttaaaaggcttcncttannggnttggttattgtacctggccgggccgggncgctc

SEQ ID NO: 1217 - DNA, 708 bp, Homo sapiens
  misc_feature 492, 515, 547, 561, 581, 617, 622, 627, 639, 666, 682, 705,707: n = A,T,C or G
acgcggggatgtaattttaaaatacaatgcagacgaagctagaagtctgaaggcatacggcgagcttccagagcatgctaaaatcaatgaaactgatacatttggtcctggagatgatgatgaaattcagtttgatgacattggagatgatgatgaagatattgatgacatctaaattgaactcaacattttacattccatcttttctgaagattgtcctacaatttggattttgatcatgacaaagaagattaaaatttcattagcatgaatgcaatttgttaaagcagactgatttgtttctaagatatttttggtttttttaaaactgataataatgctgaattatcttaagtgagatgttaagcccactttgttcttttaatgtaatggagcttatgggtagaaaaccatgtctactaattacaaaaaaaaaaaaccatgcattgctgcttttcctaccacttcagtaagaaaatgggtgttttgaanaaatcatttgccttgtcctcacngaatctgattaaacccctggcctcttgattgnatagaagtcattgngtatattccagttaccctanatattccctttggagattttggattccaattttganggganggcanaaattcttgcantttgaaaaaaaaaaaaataaagtctgnttggccatatttaaantagccctgggggcttttttttantnc

SEQ ID NO: 1218 - DNA, 703 bp, Homo sapiens
  misc_feature 594, 600, 611, 621, 624, 634, 647, 653, 659, 660, 664, 665,680: n = A,T,C or G
acgcgggaaacacaatttcaatgcaagctcagtttcctggtgttcaaaaactgttgatgtgtgttgtcactttaccaatgctgctaataattcagtttggagcccatctatgaagctgaatctggttcctggggaaaacatcacatgccaggatcccgtaataggtgtcggagagccggggaaagtcatccagaagctatgccggttctcaaacgttcccagcagccctgagagtcccattggcgggaccatcacttacaaatgtgtaggctcccagtgggaggagaagagaaatgactgcatctctgccccaataaacagtctgctccagatggctaaggctttgatcaagagcccctctcaggatgagatgctccctacatacctgaaggatctttctattagcatagacaaagcggaacatgaaatcagctcttcttctgggagtctgggagccattattaacatccttgatctgtctcaacagttccaacccaagtaaattcagaaatgatgacgcacgtgctctctacgggtaatggtcatcccttggcaagcccgtctttgaacacctggaagggttttcaacagcanttggancaatcagaagnttataagctnctnacattcaagngggaaaaattttncccaanctttcnnggcnngggaaaaaagccccnccttttgggccttttttcccaaa

SEQ ID NO: 1219 - DNA, 713 bp, Homo sapiens
  misc_feature 628, 651, 661, 662, 666, 681, 683, 685, 691, 706: n = A,T,C or G
ggtactgaaggacaaaaacttggatggcctcaaaaggttcttgaacaccactctgattctccaaggacgaattacgtaaattatactttcatacaaaggagacgataaggcagtaaacatggagacacgggggacagcgtccacactcagagggcctgggccacagccccgatgtttcttttcagaactcagcccctttcctgattttacttctaagaggaaaattattttggggaggaactacacagtcgtgattagaatttaactgatggttttgtattataacttctaagacctgccagaatgctagtcctgagagtgtcagacaaggaagaaatccctgggcctcttcccctcacctggcccttggatttcatggagcagccacttagcattgaattgcactaccctgagctaaacgtgtctgtgctttctaagataaaagcttgatccctttcttctgtcttaagacagcacctcctgaaaagaatcgaagttgtcacaactctcaattattttttaaatactgcatagattgagttttgggttattactaaccctttccaaaattgcatcggatctaaaactactagaatctcattccatttcccatgttaaattaccacanaaccgcaatacctggcccgggcnggccgcttcnnaaangggcgaaattccacnananttggcngggccgtttcttagngggaccc

SEQ ID NO: 1220 - DNA, 709 bp, Homo sapiens
  misc_feature 582, 635, 665, 673, 676, 685: n = A,T,C or G
ggtacatggtgggtgggttataaatattgggacttaaggcagcttgttctatgtatttatctttgctcttgggtgacttagggaatgattttatttgatttaaccttctttctgtttgccccgagaatactcgccagtggcgcttgcagttgtagcatttaccccaagataactttgcctacgaaatatttcgcttttattattttcacatcattctagtatatggactttggaaacaaaagacattgttctatttatagcattcttttttttttttagtagcggtatttccatttacaaaatatagtaactcttgattactgaaaatgtcaaatcctagaaaacgtagcatgcctatacatgatgttaacatcattctcgaacagttgttggccgaagattcatttgatgaatccaattttttgaaatagacaattctgatgttctctttagaaataactcagtttttatcttttttcacattgaaaatcagttagatttgcttaagcctcaaagagaatgtttatgtaaattagcgctggcaatttttttttttttaaacaggaaaagggttaaatgaanggtgataaaatggatgttcaattgtctttctgaaaagtgaagtggcttggaanggatgaataaaaattttcttaatatatttnaaaaaagnccnttgcttttntgggatggaaggttaaaacctaaa

SEQ ID NO: 1221 - DNA, 705 bp, Homo sapiens
  misc_feature 458, 554, 565, 571, 609, 622, 629, 633, 655: n = A,T,C or G
acttccctgagacatggatctgggatttggtggtggtaaactcagcaggtgtggctgaggtaggagtaacagtccctgacaccatcaccgagtggaaggcaggggccttctgcctgtctgaagatgctggacttggtatctcttccactgcctctctccgagccttccagcccttctttgtggagctcacaatgccttactctgtgattcgtggagaggccttcacactcaaggccacggtcctaaactaccttcccaaatgcatccgggtcagtgtgcagctggaagcctctcccgccttcctagctgtcccagtggagaaggaacaagcgcctcactgcatctgtgcaaacgggcggcaaactgtgtcctgggcagtaaccccaaagtcattaggaaatgtgaatttcactgtgagcgcagaggcactagagtctcaagagctgtgtgggactgangtgccttcagttcctgaacacggaaggaaagacacagtcatcaagcctctgttggttgaacctgaaggactagagaaggaaacaaacattcaactncccactttgtncatcangtggtgaaggtttctgaaaaaatatccctgaaaactgncacccaatgtggntagaaanaatntgcccgagccttttgtcttaanttttggggaaaaaatattaaggcttttgccttgccaaaaacaacaaaaat

SEQ ID NO: 1222 - DNA, 665 bp, Homo sapiens
  misc_feature 531, 556, 583, 623, 626, 650, 664: n = A,T,C or G
aataaagaacctctatcagtgagacttctcattttatagcaaatacatttttgcagcttaaattttcttgaattcatatacgcttctgtcatttaaacaaacttccagagaaaactggtctctatatatttaagtaacaaatttgacaaaatacatatttatacatatatagatctctaatataaatattaaatttgaaaaaatcaaatgtgaagcagaaactgctatacaagtatattgtataatatttattttatacattaaagtatttggttgaatatacttcaattaggtttctaaaaaacaccattatctgcttcttagtaattgcgacattcttgaaaagcatgtgaaacgggtataaacttcaactctgtgcttaattcagaattcctgtttgttctcctcaaacttttatcttcctaaagcatcttgccagagactacaaaggaaagggacatttacagagcactataaacatgtctttggacagtaaaaacagtatttattcttctacactcttggattttncaatcatatcttctcaaggcatggnttcttttggcccaattttgggccactnaacattaaaatttcaaaaaccacaactttttaccaggggngantatgaaaatggcaggggggcaggncccctggcttttcnc

SEQ ID NO: 1223 - DNA, 600 bp, Homo sapiens
  misc_feature 400, 446, 496, 548, 569, 583: n = A,T,C or G
acaagttcggctttgagcttcctcaggggcctctgggaacatccttcaaaggaaaatatgggtgtgtagactactgggtgaaggcttttcttgaccgcccgagccagccaactcaagagacaaagaaaaactttgaagtagtggatctggtggatgtcaatacccctgatttaatggcacctgtgtctgctaaaaaagaaaagaaagtttcctgcatgttcattcctgatgggcgggtgtctgtctctctcgaattgacagaaaaggattctgtgaaggtgatgagatttccatccatgctgactttgagaatacatgttcccgaattgtggtccccaaagctgccattgtggcccgccacacttaccttgccaatggccagaccaaggtgctgactcanaagttgtcatcagtcagaggcaatcatattatctcagggacatgcncatcatggcgtggcaagaaccttcgggttcagaaaatcaggccttctatncttgggctgcaacatccttcgagttgaatattccttactgatctatgttaancgttcctggatccaaaaaagncatccttgccctgncctggtaaattggcagc

SEQ ID NO: 1224 - DNA, 715 bp, Homo sapiens
  misc_feature 557, 609, 624, 654, 660, 693, 709, 710: n = A,T,C or G
ggtactatgatccaaacaccaaaagctgtgcaagattctggtatggaggttgtggtggaaacgaaaacaaatttggatcacagaaagaatgtgaaaaggtttgcgctcctgtgctcgccaaacccggagtcatcagtgtgatgggaacctaagcgtgggtggccaacatcatatacctcttgaagaagaaggagtcagccatcgccaacttgtctctgtagaagctccgggtgtagattcccttgcactgtatcatttcatgctttgatttacactcgaactcgggagggaacatcctgctgcatgacctatcagtatggtgctaatgtgtctgtggaccctcgctctctgtctccaggcagttctctcgaatactttgaatgttgtgtaacagttagccactgctggtgtttatgtgaacattcctatcaatccaaattccctctggagttttcatgttatgcctgtttgcaggcaaatgtaaagtctagaaaataatgcaaatgtcacggcttctctatatacttttgcttgggtcattttttttcccttttaanttaaaccatgactttaaatggggaagcctgtgtttcgggggagaaacaaaanaaccaactttttttnttcccttgcccccaatttccccaaacttanaatttnaagcttattttttttttttttgaaaccctttancaaaatgatcttgttnngaaag

SEQ ID NO: 1225 - DNA, 706 bp, Homo sapiens
  misc_feature 38, 94, 105, 110, 127, 141, 149, 190, 206, 216, 225, 267,292, 355, 371, 487, 497, 512, 532, 552, 597, 632, 644, 647,652, 654, 658, 680, 681, 691, 693, 697, 698, 703: n = A,T,C or G
actttttttttttttttttttttttttttttatacaanaacttatgtttattgcaaacaaacaaacaaaaaaaaaaggaaagagaggaaaaganaaaatggtcanaagcncaacatataaggttaanaatttaaaagcatnttacattntgccctaatggcagcataattaatagcaacaaacggccgtnttgctgcctgccgcanccggagggtntttttgcanacctgacgagcaaattttgtgaaatatgtagtatgaaggaanaaagcttggcgggtcttcactgcanactttggactcccagtgtttcggactggcattccctgcatggcctggcgggacacgtgacttntaacacgagggtcctntgtagttgggctaggaaataacttctcttcttctgactgggtgggcattttcaagcctccatatttttttccaataaagccaacaaattgcacataatctacactgcatattaggngggccccaanaataccactggtganactgtgtaacataacaactntcacaggctctccctaaaanaggattctgaggctggacgtggccccacaagcttcatttacaagnaccaggcttcccatttactaaggggaaattttggntgggaatttggnttngctgnanggtngggaaaatataccttggttcanntttaccctcnancttnnggggngtt

SEQ ID NO: 1226 - DNA, 697 bp, Homo sapiens
  misc_feature 511, 527, 567, 587, 608, 620, 629, 643, 662, 672, 697: n = A,T,C or G
actctggatcccaaggtgactggttgtttaatcgtgtgcatagaacgagccactcgcttggtgaagtcacaacagagtgcaggcaaagagtatgtggggattgtccggctgcacaatgctattgaaggggggacccagctttctagggccctagaaactctgacaggtgccttattccagcgacccccacttattgctgcagtaaagaggcagctccgagtgaggaccatctacgagagcaaaatgattgaatacgatcctgaaagaagattaggaatcttttgggtgagttgtgaggctggcacctacattcggacattatgtgtgcaccttggtttgttattgggagttggtggtcagatgcaggagcttcggagggttcgttctggagtcatgagtgaaaaggaccacatggtgacaatgcatgatgtgcttgatgctcagtggctgtatgataaccacaaggatgagagttacctgcggcgagttgtttaccctttggaaaagctgntgacatctcataaacngctggttatgaaagacaagtgcagtaaatgccatctgctntggggccaagaatatgcttncaaggtgttcttcgatatgangaccgcattganggcaatcangaaaattgtggttntcaccccccaaaggaaaanccaatctgcntgggttttggatttaatgaccacan

SEQ ID NO: 1227 - DNA, 267 bp, Homo sapiens
  misc_feature 62, 65, 68, 71, 77, 89, 98, 112, 127, 131, 133, 137, 152,164, 203, 205, 221, 240, 242, 260, 262, 265: n = A,T,C or G
actttttttttttttttttttttttttttttgccggttccacacctgccctttattggtctnttntancanagtggntccaggcccttnacgcctctnaaacaccacccatnagggtttaggaaggngccntnattntgtgaaggcccagancttacccaagtnttggagcccaagttgaatcaccaaccaaagggttggganangaaaaggaaacaggcncaggggaaaggcaaggctntncaatgaaggggactgatntnaangg

SEQ ID NO: 1228 - DNA, 662 bp, Homo sapiens
  misc_feature 509, 581, 629, 655: n = A,T,C or G
actgggacagttgggtgtgttatggatacataacctgaggagccgggggaagctggccttgggtgttttacctcaatcatatatccacacaagtgcttctcttgacatttctcgaaaatgggagaagaagaataaaattgtttatcctccacaactgcctggagaacctcggagaccagcagaaatctaccactgtcgaagacaaataaaatatagcaaagacaagatgtggtatttggcaaaattgatacgaggaatgtctattgaccaggctttggctcagttggaattcaatgacaaaaaaggggccaaaataattaaagaggttctcttagaagcacaagatatggcagtgagagaccataacgtggaattcaggtccaatttatatatagctgagtccacctcaggacgaggccagtgcctgaaacgcatccgctaccatggcagaggtcgctttgggatcatggagaaggtttattgccattattttgtgaagttggtggaanggcccccacctccacctgaccaccaaaagacggcaagttgccctgccaaagaatatattcagcagcttccanccggaccatcgttcacactctatgatgaggagattcagacctccacangtgtatatattttggcctttattttntaaaaat

SEQ ID NO: 1229 - DNA, 547 bp, Homo sapiens
acagacaaagtgggaggttttatttcttggtctcttcctccttggataaagtcttgatgatctcctccttcttggcctggaggcgctcttcacggcgcttgcgtgcttccttggtcttagacctgcgggcctcagcctggtcagccaggagcttcttgcgggccttgtctgccttcagcttgtggatgtgttccatgagaatccgcttgtttttgaacacattccccttcaccttcaggtacgcgggtgtcacgcatctgatgaagcgaattcagagaggcccagtaagaggtatctccatcaagctgcaggaggaggagagagaaaggagagacaattatgttcctgaggtctcagccttggatcaggagattattgaagtagatcctgacactaaggaaatgctgaagcttttggacttcggcagtctgtccaaccttcaggtcactcagcctacagttgggatgaatttcaaaacgcctcggggacctgtttgaattttttctgtagtgctgtattattttcaataaatctgggacaacagctt

SEQ ID NO: 1230 - DNA, 702 bp, Homo sapiens
  misc_feature 554, 588, 617, 640, 648, 682, 700, 701: n = A,T,C or G
acgcggggcttctccaagatggcggcgatcggcggcgttgaggcgggatccgggcgagccgagtgaagattgttttgatggtgatcatacctttgaggacataggacttgcagctggccgaagccaacgagagaaaaaacgttcttacaaagattttttaagggaagaggaagaaattgctgctcaggtcaggaattcttccaagaagaagttgaaggatagtgaactttacttcttggggacggacacacacaagaagaagaggaagcactcctctgatgattactactatggaggacagtggttcttgttctgagtgccgataaaccagtgtgaaggaggagagaggtggagggctggtattttggaggattcagcatagaagaacagtctgcatttgtgatacaccagatatttcgtctttggaatcgtcacagaagaaaaagaaaaagtccagcccacagtctactgatacagctatggacctgttgaaagctatcacttccccactggcagcaggctccaagccctccaaaaagactggggagaaaatnctttggctctttaagccattcggagagtaaaaanggacccccacaggaagaaaagtcagtggnaagcagtggggaactcccctaanaggatggngtcttccacaaatcgaaaaaaaaataaaaccctnttttttttgaaccacagnna

SEQ ID NO: 1231 - DNA, 701 bp, Homo sapiens
  misc_feature 39, 55, 88, 153, 163, 210, 219, 314, 371, 402, 513, 516,557, 568, 585, 589, 590, 612, 615, 617, 622, 627, 649, 672,680, 699: n = A,T,C or G
acttttttttttttttttttttttttttttttgggaaanatggggtttcaccatnttggccaggctgatcttgaactcctgatctcgngacccacccgcctcagcctcccaaaatcctgggattacaggcgtgagccactgcgcctggccaanattttatatnttatcagtagcctgaggtttccccctttctctgactttcattactanagtcaccanaaggaacatttacaacattttaaaaataacaagttgcccagcatactcctatttcctctagtttcaaacataaaggggaacccagcccaaacaanaacaagccttgctgcatgcctgccagctcgtgcatcctcctttttatttcaagaggngccagctccaaacaaagttacaaggttaagngcaactccaagttcctgacacagctaatccctgctcggcttcaaaaaataaaggctgtaattcctttttgaacatgccttcgaagtggaggtctttggccatgagcttttnttngacatcatctaatgcccactggtgatccgtcagcttcaaangcttccacttntgttttgaaagctttgnttgnngtttgcgggcattggccatggntgntnccggnattgntcctgggattaattcgggaatngggcaaggggcattatttttggnccaaaatnaaaaaagaaaatgcttccnaa

SEQ ID NO: 1232 - DNA, 711 bp, Homo sapiens
  misc_feature 429, 504, 529, 539, 541, 593, 634, 664, 680, 706: n = A,T,C or G
accccttaaccccttctccttcacccttagcagcaagtcccacttttctagggggcaagaaaccccaaaccccttccctccgtgtctttacgctctcttttctctgggtttgcttccttcactatgggcaaccttccatcctccattcctccttctcccttagcctgtgtgctcaagaacttaaaacctcttcaactcacacctgacctaaaacctaaatgcctcattttcttctgcaacaccgcttggccccaatacaaacttgacaatggctctaaatggccagaaaatggcactttcgatttctccatcctacaagacctaaataatttttgtcaaaaaatgggcaaatggtctgaggtgcctgatgtccaggcattcttttacacatccgtcccttcctagtctctgtgcccagtgcaactcgtnccaaatcttccttctttccctcccacctgtcccctcagtcccaaccccaggcgttgctgagtgtgtctaatcttncttttctacaaacccatctgacctnttcccttctntncacgccaagctagggcccaattctttctcaggctccacttccttcaccctgnaatctttttatcaccttcccttcttaaaacctgggtccggnttacaagttcgtttccgtgactaagccctnccccacctggccaagnaattttaatctttaaaaaaggggggntgggg

SEQ ID NO: 1233 - DNA, 701 bp, Homo sapiens
  misc_feature 517, 620, 628, 630, 634, 650, 658, 693: n = A,T,C or G
actactgtccagcctcctcaggagaaccaaacatccagtataccttcaccagcaactttgccagtctcagcacttaaacaaccaggtgttgaaggactatgttccaaagaacagaagagagtatggtttgcagatggtatattgcccaatggtgaagttgcagatacaacaaaattatcatctggaagtaaaagatgttctgaagactttagtcctctctcacctgatgtgcctatgacagtaaacacagtggatcattcccattctactacagtggaaaagccaaacaatgagacaggagatattacaagaaatgagataattcagagtcctatttctcaggttccatcagtggaaaaattgtctatgaacacaggaaatgaggggttacctacttctggttcatttacactagatgatgatgtttttgcagaaactgaagaaccatctagtcctactggtgtcttagttaacagcaatttacctattgctagtatttcagattataggttactgngtgatattaacaaagtatgtctgcaataagattagtcttctacctaatgatgaaggacagtttgcccccacttctggttgcatctgggagaaaaagggatcangggcctgnantaanaagaacattccttctnattgagcngaacatttttgcttctttgaaaggggaaggctttnaatcctgg

SEQ ID NO: 1234 - DNA, 715 bp, Homo sapiens
  misc_feature 3, 9, 10, 12, 21, 49, 51, 85, 87, 95, 105, 109, 111, 114,121, 125, 128, 131, 135, 139, 153, 193, 223, 277, 311, 336,339, 401, 508, 519, 559, 580, 601, 606, 612, 616, 618, 645,646, 653, 657, 672, 676, 678, 685, 695, 701, 715: n = A,T,C or G
ggnactttnntnttttttttnttttttttttttagggggtcatcgtcananctgctatctgtgctggtgctactgctactggaananctggaatntgagtctgantcanangangaggaanaggntgnggnggangctnacgatgaggaactncaggagctttcatcactgtcactgtcctctgaggaggaanaggtaaatgtttcttcactctctgatgaanaatcactggcagaactgtcactgctactgctactggaactggttacactcttanacctttttttcttggcctttctttctacattggnttctccaatgctttgttgcaataanaanctgttttctttttcttttaaagctttctttagttctgctgtccttgagggcctatgtgaggnattttctttttcctgtgcattcataaagtccaatgtccaaattccaagcatttctgacatcttacatgttgcttatttgcttcaacttgtctccgggctattaaccnatgcatgggantccccatcttagcccccccgtacctgcccgggcgggccgntcgaaaagggcgaatttccanccacacttgggcggccggttnctaantgggancccnanctcggggacccaacctttggcggtaanncattggncaanaaactggtttccttngggngnaaattgntattcccctncccaanttcccccaaaacan

SEQ ID NO: 1235 - DNA, 709 bp, Homo sapiens
  misc_feature 553, 570, 598, 610, 655, 662, 666, 668: n = A,T,C or G
ggacgtcggggacgtccgcagcgtcacacagaaacatatccaggagtggggcccattcgatctggtgattgggggcagtccctgcaatgacctctccatcgtcaaccctgctcgcaagggcctctacgagggcactggccggctcttctttgagttctaccgcctcctgcatgatgcgcggcccaaggagggagatgatcgccccttcttctggctctttgagaatgtggtggccatgggcgttagtgacaagagggacatctcgcgatttctcgagtccaaccctgtgatgattgatgccaaagaagtgtcagctgcacacagggcccgctacttctggggtaaccttcccggtatgaacaggccgttggcatccactgtgaatgataagctggagctgcaggagtgtctggagcatggcaggatagccaagttcagcaaagtgaggaccattactacgaggtcaaactccataaagcagggcaaagaccagcattttcctgtcttcatgaatgaaaaagaggacatcttatggtggcactgaaatggaaanggtatttggtttcccantccactatactgacgtcttcaacatganccgcttggcgangcaaaaactgctgggcccgtcattggaccgtgccaattcattccncaccttntttngnttccgttgaaggaatattttgctggtgtgttaaggggacat

SEQ ID NO: 1236 - DNA, 540 bp, Homo sapiens
  misc_feature 396, 527: n = A,T,C or G
ggacgcgggggagtcagtcccagtcaggacacagcatggacatgagggtccccgctcagctcctggggctcctgctcctctgtctccgaggtgccagatgtgacatgcaggtgacccagtctccagcctccctgtctgcgtctttgggagacggagtcaccatctcttgccggacaagtcaggccattaccaagtttgttaattggtatcatcagagaccaggggaagcccctaaactcctaatctatgctgcttccattttgcaaactggagtgccatcaagattcagtgccagtggatttgggacagagttcactctcaccatcagtagtctgcagcctgaagattttgggaattactattgtcaacagagttacacttatccttccaccttcncccaagggacacggctggacctcaaacgaactgtggctgcaccatctgtcttcatcttcccgccatctgatgagcagttgaaatctggaactgcctctgttgtgtgccttgctgaataacttctatcccanaagaggccaaagt

SEQ ID NO: 1237 - DNA, 715 bp, Homo sapiens
  misc_feature 549, 583, 592, 639, 654, 669, 688, 698, 713: n = A,T,C or G
ggtaccatccctccatattgccaccaaagatgcgtgaatacaccaggctcattttattgccagtgcagtcctgggtttcaattggcagcaaacaactatacctgcgtagatataaatgaatgtgatgccagcaatcaatgtgctcagcagtgctacaacattcttggttcattcatctgtcagtgcaatcaaggatatgagctaagcagtgacaggctcaactgtgaagacattgatgaatgcagaacctcaagctacctgtgtcaatatcaatgtgtcaatgaacctgggaaattctcatgtatgtgcccccagggataccaagtggtgagaagtagaacatgtcaagatataaatgagtgtgagaccacaaatgaatgccgggaggatgaaatgtgttggaattatcatggcggcttccgttgttatccacgaaatccttgtcaagatccctacattctaacaccagagaaccgatgtgtttgcccagtctcaaatgccatgtgccgagaactgccccagtcaatagtctacaaatacatgagcatncgatctgataggtctgtgccatcagacattcttncagatacangcccacaactatttattgccaacccccatcaatactttttcggattnaaatctgggaaatgnaaaatggagaagttnttacctaccaacaaacaanttcctgtaantggcaatggcttggngc

SEQ ID NO: 1238 - DNA, 706 bp, Homo sapiens
  misc_feature 639, 646, 657, 667, 694, 696: n = A,T,C or G
ggtacttctgtcttccagttttccttcaccaaatcgcactggctcctggactcttttcctatcttcaccacgaactgctgcttgctcgcttgctcctcagtcctagcttcatcaaacactggttcctggaatcctgtctgctgctgtcttcctagattcactgaatccacttctgtgtagcacctgggtcagctgtcaattaatgctagtcctcaggatttaaaaaataatcttaactcaaagtccaatgcaaaaacattaagttggtaattactcttgatcttgaattacttccgttacgaaagtccttcacatttttcaaactaagctactatatttaaggccttccaaattcttctaactcttccaaaagccttctgccttagttttttttaaattacaccagtccttttagtagctttttgatgtgatttttaaccaacttccccttctagcttcaagtattcttctaaattggttctggtctacgtaaacaccctcatcttctcaagctttaccttctaacttctgcaccaccagaaattaaattgatgggcttttaaaaataaaattgggtaccaataatttcctcattttttcagtggtattttatccaatttttggctttatattttttcnatcttcnaaacctctccnatacttggcntaaacttgggttttcattttctattcngnaacccttgga

SEQ ID NO: 1239 - DNA, 673 bp, Homo sapiens
  misc_feature 147, 160, 162, 224, 242, 277, 389, 409, 412, 428, 448, 477,480, 489, 492, 499, 524, 528, 543, 544, 554, 570, 572, 573,577, 578, 581, 582, 587, 592, 602, 611, 623, 633, 636, 642,647, 651, 653, 660: n = A,T,C or G
acatgggtaatctgtccccatgacccaaacatctcccataggctccacctccagcattggggatcaaatttcaacatgaggtttggcatggtcaaacctccaaactacagcagggactttttttttttttttttttttttttttttncttctttcactgntngttctgagtccaaattgactttaaatttattcatagcagcttttccaaaaaagttgctcatnatattccctttccctggngccttgctgcctgctgcaaatgcatttgttacttntttagcctctgttttcgtttccttgttggtttcttgggttttagcagcagctttggaggcaaacattcccataattcctttgggctgctgggaaacctgcttggatgcaggngggccatgaccattgggggncanctcattgttggcttgngtctcacttgacatgtgaanatgtgactgctcaaactttttggaaaacnaanaggattcancanggagctntaggggaccggcagctgcacattgnatancactaaatttgctgnnatttgcaagntggcttttaaaggatngnnatanncannattgnaacanaaggcccccnggccctttnaaaaagggtttnttgggatggntgnaccttnggccnggancncccctangggcggaattcca

SEQ ID NO: 1240 - DNA, 206 bp, Homo sapiens
  misc_feature 55, 59, 113, 127, 128, 204: n = A,T,C or G
tcctcccgccgcccaatatgccgaaaggaaagaaggccaagggaaagaaggtggntccngccccagctgtcgtgaagaagcaggaggctaagaaagtggtgaatcccctgttngagaaaaggcctannaattttggcattggacaggacatccagcccaaaagagacctcacccgctttgtgaaatggccccgctatatcaggntg

SEQ ID NO: 1241 - DNA, 370 bp, Homo sapiens
ccgggcaggtacataggtaaccaaagtatatagcttatttggtgaatcttcatcctcattacgttttctggacagccgcacacggattcggtatggcacattccttattcctttggcccagacagctttgttgagcctggtgtcaatgcgcacatctggagttcccatctccttcatggcaaatttccgaatctctttgagtgcccgaggtgcacgcttcttgaagcccactccatggatgcgcttgtgaatgttgatggtgtattctcgggttaccacttcgttgatggcagaacggccctttttcttctcgccacccttctttgcgggagccattctgcagcgtccaagttggaaagccccgcgtacc

SEQ ID NO: 1242 - DNA, 634 bp, Homo sapiens
  misc_feature 447, 524, 597, 621: n = A,T,C or G
ggtactctggatcccaaggtgactggttgtttaatcgtgtgcatagaacgagccactcgcttggtgaagtcacaacagagtgcaggcaaagagtatgtggggattgtccggctgcacaatgctattgaaggggggacccagctttctagggccctagaaactctgacaggtgccttattccagcgacccccacttattgctgcagtaaagaggcagctccgagtgaggaccatctacgagagcaaaatgattgaatacgatcctgaaagaagattaggaatcttttgggtgagttgtgaggctggcacctacattcggacattatgtgtgcaccttggtttgttattgggagttggtggtcagatgcaggagcttcggagggttcgttctggagtcatgagtgaaaaggaccacatggtgacaatgcatgatgtgcttgatgctcantggctgtatgataaccaccaaggatgagagttacctgcggcgagttgtttaccctttggaaaagctgttgacatctnataaacggctggttatgaaaaacaagtgcagtaaaatgccatctgctatggggccaagaatatgctttccagnggtctttcgatttaaggaccggcnttgaggtcaatca

SEQ ID NO: 1243 - DNA, 711 bp, Homo sapiens
  misc_feature 526, 538, 543, 587, 604, 622, 627, 663, 676, 683, 708: n = A,T,C or G
ggtacatggcaattagaagttgtcatggcaaaagaaaaccacagctggcctgccacagccaacacaagaaccagaaaatggtagatgaaatgaaggaataaaggtggggtttattccttattataaaagaaaaaaaataattcttcagcagtcttaacaaagacatcaagatacaaaattacaagtgttttgactccagccctgtccccatctcctccaagagcagaggtaggagacagttgaagcaaacaagcaattctgtaaaaattacctagaaaccctacaaatttgattaaaatctaaacttctataattttgctttttaaaaaatttaatatcaaaaggcctgctttagtgacatgctattcctaccagaaaataaccccaataccccctctgtcagtaacatgctcaagttgaccagccaactcttatctctaaacctatgtggacaagtgtgtcttttaaaccaaagccacggagatcaagtgactgctagtaacgtgtcgtctgttaactaatccantgcccccttctncaganggtgggcagggcagaaacccaaaaaggtcttggagggcctaatnccagatcaccatctaanaaccacttccttgctctntactnaaaatgagaagctttatttttaatccgactatttgncttaaaatttggngccccgngaacctggatgggttttttcctttncca

SEQ ID NO: 1244 - DNA, 609 bp, Homo sapiens
  misc_feature 585, 590, 605: n = A,T,C or G
acaagacaaaggcgaatgagacttctcttatatctgagtaacattaagatggaaatcaaatttaaatgcagtccactctgctttttgaagaggctttggttcagctcccaaatctcgattgcttgacgcagtctcctatgagaatactcagaaggtgtcttcttaaacaacaaacctatttttagtggtggagccgctcttagtagctgtgtctgcgtgggactgataaccaatcactatctttggaggaagtcctaacctttccttgtataccctccctatatgtgtaacagcttctctgttttcacattcagtagtccatattgctatcttatcacctttagctctaacattaacaacagcgccacatacatcatcactgtagtcatcaaaagattctccaataaggcacagaagtgtctctagccaaaagcgatcgaggtcacttcgtctctgctgtttgttcaatgtaattagccatcgtcctccccgtttgtttttctcatcttcccacataggctcaataccatccttaaaaagtgagtagtcacagccaggcattaaattactagacaactggatatngttgnacctcgggccgcgancacg

SEQ ID NO: 1245 - DNA, 669 bp, Homo sapiens
  misc_feature 533, 605, 614, 618, 649: n = A,T,C or G
actgtcttcaatcctatgcgtgcaggtgtctaccacaggcaaacagttttctccccattttgtagtaatgtgattttcctattagcaaaaagaggtcaccagcccctgtagacttaagggactcaagtcacaggatggggatttcctcttaatattttttattttgttgtttgaactcttgatgcaacattgtagagcagggtgttcaggacctgctgtgcccaagggactgataaaggaaaaagctctatttattctttttgtgatttgatgcacagatgaaaaacttaacacacaataacagaagttggtcgttaataaatcacatcctagtctttcagcgcttccgtaagcagacgacatcttcagttttctagctcttgtagtttcaacactgcaacatcaatgatgcatatgtccagaatcagttacaaagaccatccgattctttttctcttagttcatctatttttcactgtctcttggtcccaagtgtatctgagtgattaccttctggcattctctgctattgnttcgttggggtgctctcgattgcccccgtgttttgtgggctggttgggaaaaggccccttgggaaagatgtnccactggcngganggtgtgagtcacttgggatgcctccagggangatccctttccatgggcccc

SEQ ID NO: 1246 - DNA, 342 bp, Homo sapiens
aattcgcccttagcgtggtcgcggccgaggtacatcatgccgctgatgaaggtgcaggcgagggccacccacgccaggatgtaggagtagccgtagctgccttctctggtcacgggatagaatttcgcgtttttgtcgtgaatgtcttcacgcctgtctgtataaatggaggccgcaatcatgacacacagacatgacattagctggatgatggaggttaggacaaacctctctccctgcttcaggcggaagagctggagcacgaagatgaagaaggcgatgcagcagagaatggtggagaggatcatggtggcctggaccgcctgcagcgtggagtactcc

SEQ ID NO: 1247 - DNA, 711 bp, Homo sapiens
  misc_feature 338, 339, 342, 366, 384, 402, 447, 464, 491, 510, 588, 606,610, 625, 640, 657, 662, 664, 669, 683, 694, 695, 697: n = A,T,C or G
acgcgggcaccagaaaaactaatgagatttctctggaatacaagctgatattgctacatcgtgttcatctggatgtattagaagtaaaagtagtagcttttcaaagctttaaatttgtagaactcatctaactaaagtaaattctgctgtgactaatccaatatactcagaatgttatccatctaaagcatttttcatatctcaactaagataacttttagcacatgcttaaatatcaaagcagttgtcatttggaagtcacttgtgaatagatgtgcaaggggagcacatattggatgtatatgttaccatatgttaggaaataaaattattttgcnnaanaaaaaaaaaaaaaaaaaaaaaaantgtcgcggggacatgtcnggaaactacaagaggtanaaacatttgttgatttaccagtgtttttaacttcctgctgggctnaaaactgcttgtttcgnggaaaagcaaaacttacagcaaacatntaaaatgaagagctcccanacttttgaggaacaaaccggaatgcattgggaaccctctactcatgggctttttgagccccacattgcagggtgccancccggaaccctatgctgngganaagaaagaaaattcngggaaacccttggtntttttggagggggttancatgngngggcncccttcgggttggnggggggccccnntncaccgggaaaattt

SEQ ID NO: 1248 - DNA, 719 bp, Homo sapiens
  misc_feature 9, 113, 160, 545, 569, 573, 626, 632, 636, 640, 642, 649,653, 677, 683, 684, 692, 702, 712: n = A,T,C or G
ggtactttntttttttttttttttttttttttggggggacatgcaaaaagacaatatttattttactcaagctttcctataagaagttaaacagaaacaatccctggttgaanactaccaaaaatgttaacattgtttcacatatcccttcagtgcccanatgaagggaaaaacttaactgaacgaaagaataagaattaccatcctgacactgggtttgcttaggtatgttaggaaaaaatccacataggctagacctaaaacagtaaatgagcctactaatttcccacaggggatgggaaatccactgatacagacacctccaagagctcccaagacctagggatcgcaaccaccacaggtattcccataacttccttttccctcccttttccctcagctattttactgctaaaagaagaggatgggaacaaaagatcacttccccactcccagactgcatgactgtcagcatcaatgtttgttgggaatttcacagcatcctcttcatggccatctaaataggataacagtaaaaatggctngggggaggcatggggttttgcttnccanaattataaaatccctggaaaaggaattaatcttatttctattccagggaaaanccaaantttntttntntagaacncgcngaaccaaagttgaaacattttctncgggtnnttttccanccctcaattntgactttaanaaaaact

SEQ ID NO: 1249 - DNA, 694 bp, Homo sapiens
  misc_feature 533, 620, 669, 671, 678, 681, 685: n = A,T,C or G
acaacactatttcattatctggattgtccatgctagaaataaattcatccttgttaattgtatccaaaccatattcttcagctaaggatcgacatcttaccactcgaagaaatgcagaattgctgcagagtaattttaattctttctctgaaatggactctggtgcctggccaatggactgcagcaatttggcaacatgattacccacagcggcagcatctttctttgctttttcacggtaaacgttttgcagttttatatatttgcctgaatctgcaatcatatcaggaattgtgcctcgaacaggtaaatttccttgaccctctttggccacaaattcctttaaggcacgagctaaaatccaaaatgatggagtctgtttggtgatatttatgcagcgatcatcattaaatatatcttcaatactgcttgggatctgagttgtatttagtgctgtgttcacatttttaatagcttcttcaaaattctcttcatcttctggagccccattttcattttttaaaattccttgnctaatcaaatctctgaagtcctctttttctttatccgtttaaggattcggccatttgtttcactttccactgggctaaatattttanctttgaacccaatccatggagtatgactgggggcccttttttccatttnanccaaatnttngacngaaaatgtt

SEQ ID NO: 1250 - DNA, 445 bp, Homo sapiens
  misc_feature 4, 6, 29, 36, 64, 77, 80, 88, 133, 137, 177, 292, 306, 309,313, 390, 402, 420, 431: n = A,T,C or G
actntnttttttttttttttttttaacancaaagancgggagcacgattgggtaataaaatgtntattgagaataanacngccttttnaccttttagggtctagggctgtaaagtgtctcagggttgctgccnaacnacccatgaactgggctgggtttttatatttgatgaaaaanagcctaaacgcttctgatttgggataaagaaaaaggagcattaaccttgactatgtctttagctccagccacctttttaagagtaaattgctgggcaggtgggggagggctagtnacggaaccaaactntangccngaccaagtgtgaggaggggaggtgataaaaagattacagggtggaggagtggaccctgaggaaaaattgggacctancttggcgtgganaggaggggagaaggtcanatgggtttgtngaaaaggaaaatta

SEQ ID NO: 1251 - DNA, 637 bp, Homo sapiens
  misc_feature 521, 586, 610, 614, 621, 629: n = A,T,C or G
acaacaccatctggcttctctattttgaaactccacaccaggttaatcttgttcatggctgtggcttaaatctaaagtcaggttctggtgttttctggaatccatgcctagctctttgattctgaaaccaaatctggattctggactcttctgcattgattgctaaagcaagtttttgtttggtagcataacctgggtaaggtttttgagtgaaggtattgatgaggattttcaattgatcttctgtgaatttggtgcaattgcacctatgatttgttgctaccatcttgtgtgaagaggggtcttcaactatgcagaaagagagttctggaggctgagctactgtctgggagactgcttacagctcattttttaaaaagaaaggtcacatataatacaatataaaattcacaaatctaaagcttatggttttctgggttttgacaaatgaaaactcctgtgcaacttcaagccttaccaggatatggatgaagggtttctatccaaaagcaccagtattntaacaaacaactttacgttttttgaattgtccagtgccctgtgaggattccttactccaagtttntgacaaacatattcagaaggctangctncaattanggttgggnaagatttc

SEQ ID NO: 1252 - DNA, 624 bp, Homo sapiens
  misc_feature 528: n = A,T,C or G
acatttctaccgaagacttcccgccgaactgtctgccagtgagataagtgttatgggaagaactgatgaagtagtgagccagaggatggtccatttcttggtaaagttctaaacgatctaggaagactggggcgttttcatctgacatcagatatctgcaaaacccatcacttgatataaggccttttttcttcaaatcttcatcaggttcatacatctcaatgatctgcattgcccttttggcatcataaaatggaaataaaatttcattcaatcgaggatctcgttgatgttcatttagaaagctcactaattggtctaccgttaaataatcagttttgtctccattgatttttttgaaaagatcttctatatctgtccgaggacaaatcttttgtgtcagttcatagaacttttcataagaaaatgctgtgggctcaatttcatcattctttccactgggaagacctaactccttgagtgcttgaaagatcaccttttctgtttttcccgatgcaaatgttctantaatactcctaactggaattttaccatttgtgttgggcataaaatgccaatttcattcaatggtttctttgaggcatgtcatttgggactgacctt

SEQ ID NO: 1253 - DNA, 543 bp, Homo sapiens
acgcgggggcaatgcaacagtctcattttcccatgacgcatggcaacaccggattcagtggcattgaatccagctctccagaggtgaaaggctattgggcaggtttggatacatctgctcagactacttctcatgaactcaccattccaaacgatttgattggctgcataatcgggcgtcaaggcgccaaaattaatgagatccgtcagatgtctggggcgcagatcaaaattgcgaacccagtggaaggatctactgataggcaggttaccatcactggatctgctgccagcattagcctggctcaatatctaatcaatgtcaggctttcctcggagacgggtggcatggggagcagctagaacaatgcagattcatccataatccctttctgctgttcaccaccacccatgatccatctgtgtaagtttctgaacagtcagcgattccaggttttaaatagtttgtaaattttcagtttctacacactttatcatccactcgtgattttttaattaaagcgtttaattcctttctctgttc

SEQ ID NO: 1254 - DNA, 652 bp, Homo sapiens
  misc_feature 487, 591, 603: n = A,T,C or G
acccagacacagaaagttttagggtaaatagtaaactacaaataccctcttggttaagttaattcatcaagttaataaaggtcatattatctatcttctgctggtgacaacttgttgtctcagtatagtctgtctcaagaaagaactggttcaggttgggttttggaaaaggaaaaagactttcattaacttcactccagagtggaagaggcaccaagttctctcctacacttaggagcagaatcttaaacttgcataaatcattttcagtgatcaacatctgcatcctcaaactgtccagcaaccgttggtgtggtatccacctccatcccatcttcataatctcttattgaatcttctgtcctgaccccagccatattatactggttgctcacagactgagaaagcattccttctaatctctccagtgtggcttggccttctgctgttagatgggataatccttcttcataggtgtaaaatgtangggatgtccccctgtccttgttcatgtgcttcacatcatattctttttcatcgtagtcatctgaatcctcatcctcaggatctggatgcaaggcctggcattcncacattggcagnggaacattgccttcaacgctgatttattaacccgcgtaccttggggccg

SEQ ID NO: 1255 - DNA, 706 bp, Homo sapiens
  misc_feature 417, 519, 546, 548, 551, 593, 608, 640, 644, 649, 651, 658,671, 700: n = A,T,C or G
ggtaccggattctgtctttaaccctccccttcgtgtttcccccaatgtttaaaatgtttggatggtttgttgttctgcctggagacaaggtgctaacatagatttaagtgaatacattaacggtgctaaaaatgaaaattctaacccaagacatgacattcttagctgtaacttaactattaaggccttttccacacgcattaatagtcccatttttctcttgccatttgtagctttgcccattgtcttattggcacatgggtggacacggatctgctgggctctgccttaaacacacattgcagcttcaacttttctctttagtgttctgtttgaaactaatacttaccgagtcagactttgtgttcatttcatttcagggtcttggctgcctgtgggcttccccaggtggcctgnaggtgggcaaagggaagtaacagacacacgatgttgtcaaggatggttttgggactaaaggctcaatggtgggagagatccctgcagaaccccaccaaccanaacgtggtttgcttgaagctgtaactnanaanaaaaaattctggggctggtcttattgaaaatataacattctnacataaagccccaanttcattcaccatttccttcttttacccttttnaagngcagntntttttcncattaagggctgntgggtccaaactttttggggaacaccggnctgtta

SEQ ID NO: 1256 - DNA, 599 bp, Homo sapiens
  misc_feature 561, 576, 590: n = A,T,C or G
acccactgggagatgattgaattatgggagcgggtctttcccatgctgttctcatgatagtgaggtctttctgttctttcccatgctgtccttgtgatagtgattgggtgtcatgagatgtgatgatttttaaaatgggaaatgccccacacaagctctctctttgcctgttgccatccatggaagatgtgacttcctcctccttgccttccaccatgattgtgaggcttcaccagccatgtggatctgtaagtaccctttacatgattccccagacctcaaatgggctaacacgcttctcttctccagcagtcttcctgtccgtgaagtttccttccagattgttacatggaactgaaaacaaagggagcctcagctggatttaaatctggagcatgccacaaagtcttccacttggcattttcgagaagaacccatcagagatcataagaaatacaagaacagaggttgcataactcgaggtgcttggatattcattctaaggttcttgttcttgagaaaagtggggttagggtgggtgcatgcccaagaatccaagtnggtcaaccctttcanccttaacctactanttttgacat

SEQ ID NO: 1257 - DNA, 703 bp, Homo sapiens
  misc_feature 540, 579, 597, 657, 702: n = A,T,C or G
acctagaagagaggcgggtcaaagaagtagtgaagaagcattctcagttcataggctatcccatcaccctttatttggagaaggaacgagagaaggaaattagtgatgatgaggcagaggaagagaaaggtgagaaagaagaggaagataaagatgatgaagaaaagcccaagatcgaagatgtgggttcagatgaggaggatgacagcggtaaggataagaagaagaaaactaagaagatcaaagagaaatacattgatcaggaagaactaaacaagaccaagcctatttggaccagaaaccctgatgacatcacccaagaggagtatggagaattctacaagagcctcactaatgactgggaagaccacttggcagtcaagcacttttctgtagaaggtcagttggaattcagggcattgctatttattcctcgtcgggctccctttgacctttttgagaacaagaagaaaaagaacaacatcaaactctatgtccgccgtgtgttcatcatggacagcttgtgatgagttgatccanagtatctcaattttattccgtggtgtgggtgactctgangatctgccctgacatctnccgagaaatgctccaccaaaccaaaatctttgaaagtcattcgcaaaaacatttgttaanaaaatgccttgggcttctttttttgaaccttggccggaagacaang

SEQ ID NO: 1258 - DNA, 533 bp, Homo sapiens
acagttggaggtgttcctaggtgggcggattgcttgaggtcaggagttcaagaccagtctggccaacatgacgaaaccccgtctctactaaaaatacaaaattcagccaggtatggtggcatacgcctgtaatcctagctacttgggaggctgaggcatgagaatcaattgaacccggtagaggcggaggttgcagtgagccgagatcgcgccactgcactccagcctaggtgacagagggagactctgcctcaaaaacaaaccatccctgtcgctcccatcctagaccagtctaattgcaagtatctcacagggagcccaagtatcaatgtttttttgaacagctttatggaggtataatctatataccataaaatccacttattttaatatatgattttagtaaatttaaagacttgtgcagcccttaccacatcatacaaaccagaatgttttcatccccaaaaaagaaacttcatgtctatttaagcactcctggttctacttccacttctaggggggcattaatctga

SEQ ID NO: 1259 - DNA, 358 bp, Homo sapiens
acaaagtccaaattcttactttatggatgtaaaatgtccaggttgctacaagatcaccacggttttcagccatgctcagacagtggttctttgtgtaggttgttcaacagtgttgtgccagcctacaggaggaaaggccagactcacagaagggtgttcatttagaagaaagcaacactaatgattcaaacagcttcctgaattttaattttgtgttgtctcacagaaagccttatcataaattccataattctaattaatttaccaagataatgtaattacatttggttttgtaaggtatacagcagtaatctcctattttggtgtcagtttttcaataaagttttgattatgggcc

SEQ ID NO: 1260 - DNA, 702 bp, Homo sapiens
  misc_feature 526, 590, 620, 621, 686: n = A,T,C or G
actttttttttttcaaaccatgctattgaatcaagaaaagtagaaaaactgaatgttaaaattaaggttttaaagctcattctttttggtaaaaaaataaaattgagataccttatggttgaagttttggtagggaatgccaccagattaaaaaacaacaacaacaacaaaaaagaaccttactgttgccagtattttccctcccctcaaagacactggcaaagtgcatctgtttagacaaggttagagccaaaccatatcagttttcaaccatgctattaaattgtttaatggtttctaaagccttagcccaatgagtgacccaacttgttgtgttccaactaaatccctctgccaagaaatgaagtataaaatgcctttctctcaacagaaacagagcagacacagaagcagctacataaggaaaggagctgagaacattagcattattttgatagcggctatttgcagggtaagacaattagctagcattttacactaactggaatgagaacagcatggcatncaaagcaggtgatcagtcatcagtcattggattaaaaaccaggcaccaccaaaaacaaaaacgncaacagcaaccaaaataccctggcttaccnntacataaccaaaccaagggggaattttccagaagtttcaaaatttcttaatggaaggggaaattngagaaaccaattttca

SEQ ID NO: 1261 - DNA, 651 bp, Homo sapiens
  misc_feature 457, 499, 515, 529, 581, 596, 606: n = A,T,C or G
ggtacgcgggggggagtgatcgaaagcatggcgtcggtggtgttggcgctgaggacccggacagccgttacatccttgctaagccccactccggctacagctcttgctgtcagatacgcatccaagaagtcgggtggtagctccaaaaacctcggtggaaagtcatcaggcagacgccaaggcattaagaaaatggaaggtcactatgttcatgctgggaacatcattgcaacacagcgccatttccgctggcacccaggtgcccatgtgagttgctccgttgctgcccccctttttccttttctaggttgacctctccttgcccctaagcatggtaataacagttgcatgtattgagtgcttaccaaatggcaagcattgtgctgattcccatgcctacacgatctcatttcttccttaccacatccctgtaagtaaggtgaaatgccagagaccnagacggggtggaaggacaagtgactgctgggatttgcaccangtctgcctaactccanatcactatgatttnccccggtgttgcattggcctggtattctttggttctcctttctaaccctcanttcttggaggacaanaaaacctggngaatttaaaatattattttaatcttgggaaactaatttcaaattt

SEQ ID NO: 1262 - DNA, 354 bp, Homo sapiens
ggtacagacattttcaaagttgccagtgttactttaattggactgccttcgtaattcattgcctctgcttcaacaatgtgcaactcatcctttgcaccagcccctaaactgaccgttcttaaagataactggtgctcatttttcattatccaccttaaagtgataatctttgtcggcctttagttcacaaccgaaaagatagttctggggcctcagggggctcatgtccatgtccatcgaatcttccatcgggtggcggcacgcacttaggtaggagagaaggcggacggagataaaagaacgctgctccagagaacaaccgcgcaggacggaatcacaccagggaccccgcgt

SEQ ID NO: 1263 - DNA, 696 bp, Homo sapiens
  misc_feature 389, 463, 552, 595, 611, 627, 631, 638, 653, 661, 686, 692: n = A,T,C or G
actgtgtgcagcagctcaaggaatttgatgggaagagcctggtctcagttaccaaggagggtctggagctgcctgaggatgaggaggggaagaagaagatggaagagagcaaggcaaagtttgagaacctctgcaagctcatgaaagaaatcttagataagaaggttgagaaggtgacaatctccaatagacttgtgtcttcaccttgctgcattgtgaccagcacctacggctggacagccaatatggagcggatcatgaaagcccaggcacttcgggacaactccaccatgggctatatgatggccaaaaagcacctggagatcaaccctgaccaccccattgtggagacgctgcggcagaaggctgaggccgacaagaatgataangcagttaaggacctggtggtgctgctgtttgaaacccgcctgctatcttctgcttttcccttgaggatccccanacccactccaaccgcatctatccatgatcaagctaggtttaagtattgatgaaaaatgaagtggcaaccagaagaacccaatgctgcangttcctgatgaagatcccccctcttcaagggcgattaaggatncctctccgcttggaanaaatccattaaggttngganttcatantttggaaaacttgtncccctttntatattgttcccaatgggcttccanctgcanccct

SEQ ID NO: 1264 - DNA, 546 bp, Homo sapiens
  misc_feature 539: n = A,T,C or G
actggctggcctatgtcctgggtcgtccaagagcaataattgttcacaatgacaggtcaagtcacctccagagtgtataactaatgtaaccaagtctgtggtattctgttacagcagcaaaaagcagactgagacagttggtcttcagagagcagaccttttcatattcgaggatatttcatccttcagggatacttctcttattttctccaagagtgggcgaatcgcatggcgttgttgcaagcatcgtctgagaaccaaggtaacgaactgactgctgatccaaggcaggcactcaacggtaggattttaaggtccacagatatgggaatgaagaactccatagaagataatgatggaaactgtaatcccagctacttgggaggctgaggcaggagaatccttgaacccaggaagcagaggtcgcagtgagccgagatcatgccattgtgacaggagagaaactaacaggaagttgggtggaagcagcgcggacccacggcgcaccgaacgcacttccccccgcgtacctcggccgngaccacg

SEQ ID NO: 1265 - DNA, 640 bp, Homo sapiens
  misc_feature 542, 556, 571, 581: n = A,T,C or G
ggtacgcggggagaaggggaagaatatggaggataggagagggtgatgatgctttagcccattaaggaagaaaagttccccttactcttacaaaaggtgattgcaccacttaaaaaaggataggtagaaaatctggccattttatgtgttatttttttcctgcataccagtgccccctggaaagatggggatgctcatttcagagacagcctcttcacctgtcctccgtctctccattacagagccacaagccaagcttgagttactggttaatttccttgaagtcaatagagactctctgggtcctcatccccatgcatatatgtctgggagaagcaagcattctccaaaacagggctgttgctttcttcctggccgcatatgtgactgtcttcccctagactgatggtatacttttgagaggggcggataaaggtttgcaaactttaatgggcataaggatcccctagaagcatatgtaaaatgcagattcctgcaccccaactgcagacactgttaagtgggactggagtggggccccnggtctgcattcttnactggtacctgcccnggccggccgntcgaaagggcgaattccacccacttggcgggccgttacttatggattcccaactcggta

SEQ ID NO: 1266 - DNA, 703 bp, Homo sapiens
  misc_feature 30, 37, 41, 49, 71, 81, 84, 100, 114, 132, 157, 164, 175,186, 220, 236, 257, 269, 306, 309, 349, 355, 376, 385, 494,531, 565, 568, 572, 583, 584, 588, 596, 623, 625, 631, 644,692, 703: n = A,T,C or G
actttttttttttttttttttttttttttnccaaaanatanaatcatanaatttaaaatctggaaaaactntcagggatanacnctgtcacataaccctntgccactgcccaanattccaaagctggggcanagctgggacaactcataagcagcanacacggntacctgtcctnttacctgcctntgtgtcagctgcactcatggaaggagggggtctnaaaggctatcccaaanacaaaaggcttcatgcccagnattccaacactntcattttcaacaatcctatttatttttgatccggganacnccctcaatcaggaacttacatgtccacactgcacgccatntgattntctccaagtaggaagggcaanaggaacggnagcctcgtgctgccctaccaagcccgcgccttaacatctttgcgatgttagaagtcaccaagtctgatcaactggggcttcaggattcttacctggaaacagggaaaantgggagggaaaggaggtgcccctcaaaaaattgttanaaggtttaaaacttccatggtttttttaaaaggnggncccntaaacacctgnntcanaatcctgngggaaaagttactcaaaatggcagggntncaaaancccccccccaaanattcttggaaaaaaaaaaggttttggaaaggggcttgcattttttctntttccaaaaan

SEQ ID NO: 1267 - DNA, 715 bp, Homo sapiens
  misc_feature 498, 524, 528, 554, 601, 639, 681, 684, 692, 697, 710, 712: n = A,T,C or G
ggtacacaaagagggggtgggtgtcggatgcagagtgtgtggcctgatgctccacggcgtgcaggacggggggctaatagtaggtttccttctccacccagccgccagggcgtcgcctgatgatgagttttctgacttcgtcatatacgaagatgagaagagagtaggggaaggcacagaaccaccgggtaggtttgaggggatacatcctaagagcaacacccattccagggcagtaggaaaggaaagcagccagggctgtctcttcaaagaggccaaatatcaagatcttgttcttcatcccctgctggaagaccgaattcctcctggtcttacagatgaccaagtcggcccactgcaccaccacgatactgacgaagaaggctgtgtggcaggtgaactccacgattttcctctgctcataggtccactgctgcccgtaactgtcttccacatcgttgatccacggtcatcccagtccactcggaggcccaacangtgaattgggaggaaaccgttctcanccanaatcacaaagtaagtaaagaagcctnccaaggcctggatcattccaatcttgcccataagccatgctgatcanccgttcattcacaaattttgtctgttttgggaattctnggcctggctctttatgaatgtcactctcaacctactcataanccnagggaaantggcngggaaccattttnantgc

SEQ ID NO: 1268 - DNA, 648 bp, Homo sapiens
  misc_feature 593, 613, 631, 642: n = A,T,C or G
ggtactagccggacttggattttctggaaagatttcagttgaggaacgggaacaaagattatgatagctttccgaccaccaccaacttcaatttccttagctgccgtaatattcagctccctgagctgagccttgaggtccgagttcatctccagctccagaagagcctgggagatgccggactcgaactcgtccggcttctcgccattgggcttcacgatcttggcgctcgaactgaacatggctttctcctgggagaacttgccgagcgccggcttaggaagagccccgcgtactaactttataatcattttcaattaactcttcttctgtttcctgtttcttcaaatcatggaaagaatccagttcatcatctaggcaattcacatttacgtgcttgaataagctgcccaatggtgttctacaatgcttgctttcatcagaatattttaacgatgaaccaactttatctccagagtaagatatccaaatcacctggggaggttagagtttcttctcttatacttagacctgataaaaatttggaaaaatcatactcgtcgggggcaagctgcccccgagtcataagcggntttttgagactctccactanttaaattcttgccccggntggctttgacnaccctt

SEQ ID NO: 1269 - DNA, 715 bp, Homo sapiens
  misc_feature 542, 681, 690, 697, 698, 706: n = A,T,C or G
ggtacccccacgattacacagctttgaacaagtgaaactatggttaccaaacagctatttttattatagcatctacagtgtctggaaaaggatgtaacaataaataactgtagacgcatcacgagacatccatttacttaatcacagaagtggatcttgctacatagttttctcaatgtcttcattcttcagattctccaggcttacgaatgtcatcaatcttcaaaatcattctaaccatttgtgttgcaagagatatctgttgctttttgccaatcaaggtttctatgacatgctgttgcttcatatcatttgtccccttgtgcaaacagtcgatgccaagagcagggttcatctccttcacctgtctggctcggacttcggtcatagtctggatgggattcatgccactgttttcagagagggccatggggatgacctccagtgcgtcggcaaacgctctcatggcatactgttctaaggtggggcacttatcccgctcttggctaactggcagggcacaagatatctaacagcccctncttcatacaccacacgattatcgcggatgaggttccggatgacacacaaagcatcgtgaaagggatcgtttcgcctcctcaatgatcatcttatttcctcctctaaaaaaaatgggtaccacttttggagttcttacanctgctcgangacccannattttatnctttagttt

SEQ ID NO: 1270 - DNA, 715 bp, Homo sapiens
  misc_feature 561, 565, 603, 635, 637, 648, 671, 677, 685, 689, 691, 699,700, 715: n = A,T,C or G
ggtacaagacactacgggaacagtttgcctccctcccagcctcaaccacaattcttccatgctggggctgatgtgggctagtaagactccagttcttagaggcgctgtagtattttttttttttgtctcatcctttggatacttcttttaagtgggagtctcaggcaactcaagtttagacccttactctttttgtttgttttttgaaacaggatcttgctctgtcacccaggcttgagtgcagtggtgcgatcacagcccagtgcagcctcgaccacctgtgctcaagcaatcctcccatctccatctcccaaagtgctgggatgacaggcgtgagccacagctcccagcctaggcccttaatcttgctgttattttccatggactaaaggtctggtcatctgagctcacgctggctcacacagctctaggggcctgctcctctaactcacagtgggttttgtgaggctctgtggcccaaacaaacctgcatatctgagcaaaaatagcaaaagcctctctcaacccactggcctgaatctacactggaagccaacttgntggnacccccggttcccaacccttttttgctgggtaggagangctaaagaacaccctaaaatttacttaatctntntagggctgccntacatttggggccttaacaactncccacnccaatttnaaangncacccctnntttttttgcacttgn

SEQ ID NO: 1271 - DNA, 520 bp, Homo sapiens
  misc_feature 36, 38, 59, 83, 91, 99, 114, 118, 142, 145, 153, 157, 166,175, 213, 226, 232, 243, 279, 309, 320, 341, 342, 344, 383,390, 419, 467: n = A,T,C or G
ggtacttttttttttttttttttttttttttttttncnaaaggttttatgaaatatggnctaatagtatgaaaaaaatcaaancccatgtntgttttanttaacaaggaaaacncagngatttaaatgctgcacataaactnttnttaaaatnatgngggcattgngctcccagnggtccacagcatttacatataaaaatctaaaaagtttntcatagtccaaancactgnggtcagggtancaatcaatacctatatataataatgatctgtttagncaggtaaatggaaagcattacagtcaatcntccaaaatatnttcatccaaattgatatctgnngngtcaatatcttctaattccaaattatccaaatctacttntagttcnagtaaactcttttcttctttgttggctgngggggaggcccaataacccggagtaggaaaagcaggtttcccatcaangttcctgtgtgagctgtaaatcttgagggctgaaagtcttttccctcttccat

SEQ ID NO: 1272 - DNA, 505 bp, Homo sapiens
  misc_feature 491: n = A,T,C or G
ggtacaacttatagaaaaggtaaaggaaaccccaacatgcatgcactgccttggtgaccagggaagtcaccccacggctatggggaaattaacccgaggcttagctttcattatcactgtctcccagggtgtgcttgtcaaagagatattccgccaagccagattcgggcgctcccatcttgcgcaagttggtcacgtggtcacccaattctttgatggctttcacctgctcattcaggtaatgtgtctcaatgaagtcacacaaatgggggtcatttttgtcagtggccagtttgtgcaagttccagtagtgactgattcacatttttttccaaatgtaatgcacactccattgcattcagcccgctctcccagtcatcacagtctggtttcttgatatcctgaaggaagattcggccacctcgttggttctgcagcttcatcagtttctcacatgttcctctcctcatgagattgggtgaagaaaagtntttggcccccgcgt

SEQ ID NO: 1273 - DNA, 715 bp, Homo sapiens; identical to SEQ ID NO: 1224
  misc_feature 557, 609, 624, 654, 660, 693, 709, 710: n = A,T,C or G

SEQ ID NO: 1274 - DNA, 710 bp, Homo sapiens
  misc_feature 649, 671, 673, 696: n = A,T,C or G
acacaggctgctacccaagttgttctgaatgttcctgaaacaagagtaacatgtttagaaagtggactcagagtagcttcggaagactctgggctctcaacatgcacagttggactctggattgatgctggaagtagatacgaaaatgagaagaacaatggaacagcacactttctggagcatatggctttcaagggcaccaagaagagatcccagttagatctggaacttgagattgaaaatatgggtgctcatctcaatgcctatacctccagagagcagactgtatactatgccaaagcattctctaaagacttgccaagagctgtagaaattcttgctgatataatacaaaacagcacattgggagaagcagagattgaacgtgagcgtggagtaatccttagagagatgcaggaagttgaaaccaatttacaagaagttgtttttgattatcttcatgcccagcttatcaaaatacttgcacttggacggacaattttggggaccaactgaaaatatcaaatctataagtcgtaagggacttagtggattattataaccacacatttttaaggggccaagaatagtgcttgctgctgctgggagggggttcccatgatgaattgcttgacttaaccaaagtttnatttcggtgactctttatgccncncccaaaggagaaaataccagctnttgccttccctgca

SEQ ID NO: 1275 - DNA, 535 bp, Homo sapiens
acccttggaagatgggaaaggtgagggaaatatttgaagcagggtcagaacatccactaagaacatagcacctcagtagagcttacattatagtgccagggtagagttattactgaatagcttaggatgatgaacattaaccttcctacaggagtagtagcagctgatttggtgaccatcattggtcaccttttagtgtaactgcaaactaagaacaattatggcttgacatatactccatgtagggaagtgatgggagaggcagcctctgtgtggtccatccttggaagcactgcatcgattttgctcccctctggttttaaggagatcttttagacctttccttgctaactgctttcagtaaattcttgatggccttcgattctggattcagacatctcttctcacccttctttttcattgtagcaatgatctcaacacgtggacaaaattggcttgcaggaataatttcaagtttttctaaagaccttggattaacaggttgattactaatgctgatgcaaggtacctcggc

SEQ ID NO: 1276 - DNA, 522 bp, Homo sapiens
  misc_feature 28, 33, 82, 102, 127, 151, 159, 185, 268, 318, 328, 372,410, 510: n = A,T,C or G
actttttttttttttttttttttttttnggtanaatataaaagaattgagagcataggtttaatttcatttttataaggaanactacatttacctgaaaaanaaatatggcatcacacacaaacacncttcagggaaggagtatatttaanaatatggngtcattctgaatgctaaaggaaaagngatccctgtttactattaaaatatgtagtgtaaaattctttaaaggaaacaactcactaaatctctactaggtaagttattgngaatttagttttcaaatcacagtaatccacataaccattattaacagctntgtttcatanaactgcaacaagccaacaaacatttaaatgcacttcacatcaanagtatgtaaactttattttttcctcttcaagccttcanaaagttaggggctatttcagcagccaatctggtcagaacctctgaaggcaaaatttcagtgcctcacagtgtatatgaccatctgttgcactgccacatnttccgcgtacct

SEQ ID NO: 1277 - DNA, 706 bp, Homo sapiens
  misc_feature 481, 501, 503, 562, 565, 588, 613, 645, 657, 677, 689, 700,703: n = A,T,C or G
acgcgggattgataatagggtgcattgttgcttttactttatttcaccttttggacatggacttaagcccttagatgtggcgtttatgaaggcaatacacaacaaggtgaatattgtgcctgtcattgcaaaagctgacactctcaccctgaaggaacgggagcggctgaagaaaaggattctggatgaaattgaagaacataacatcaaaatctatcacttacctgatgcagaatcagatgaagatgaagattttaaagagcagactagacttctcaaggctagcatcccattctctgtggttggatccaatcagttgattgaagccaaaggaaagaaggtcagaggccgcctctacccctggggtgttgtggaagtggagaacccagagcacaatgactttctgaagctgagaaccatgctcatcacccacatgcaggatctccaggaggtgacccaggaccttcattatgaaaacttncgttctgagagactcaaganangcggcaggaaagtggagaatgaggacatgaattaaagaccagatcttgctggaaaaaanaanctgaactccccgcatgccaaaanatgattgcaaggatgcagggcccanatgcaaatccaaatgcagggccggggatggcnatggcggggctnttcggccccacctgtaaggngatgggcccttntcaagaaatcnganaaa

SEQ ID NO: 1278 - DNA, 392 bp, Homo sapiens
  misc_feature 35, 42, 44, 65, 68, 70, 89, 122, 130, 173, 180, 184, 193,230, 250, 255, 264, 269, 310, 320: n = A,T,C or G
ggtactttttttttttttttttttttttttttttnctcaaananaattttaatctgaaaaattancananattctgccttcacaattanagtttaacatgagtcttccagtgttttaaaaanaactgtantatacataaagcaaaatattttggcatcacctagtgaaaacanacgatgnggtnttttttcanccatctcatatagttaggccccgagttacaatttganataagttgattcctaaacanaatgngctttacanaatgngaccaattttattactcccaaggaccttgtttcaaattatnttaaaaccanagttcactgatctcacattttaaaaagaaaaaagtttgttaactgttttaatcaatatgagtagtaacaaac

SEQ ID NO: 1279 - DNA, 643 bp, Homo sapiens
  misc_feature 403, 478, 483, 522, 561, 588, 606, 617, 638: n = A,T,C or G
ggtacgcatcgaaaggattgacggcgtgagtttactggtgcagagaaccattgcaagacttcgcctaaagaaaatttttagtggtgtctttgtaaaagtcaccccccagaatctaaaaatgctgcgtatagtggaaccttatgtgacctggggatttccaaatctgaagtctgtccgagaactcattttgaaacgtggacaagccaaggtcaagaataagaccatccctctgacagacaatacagtgattgaggagcacctggggaagtttggcgtcatttgcttggaagacctcattcatgaaattgccttcccagggaagcatttccaggagatctcatggttcttgtgccctttccacctctcagtggcccgtcatgctaccaaaaatagagtgggcttnctcaaggagatgggcacacctggctatcggggtgaacgcatcaatcagctcatccgtcagctgaactagacccangtgangcaggggctgaaaactgcccttgggctgacttttgatangccatgcctttgccactttacaagttctttttgcatttnactagtatttaaagagtaacccttganatttgggaaggaataaanggaggctggtncctgcccggggccgggcggtncaaaa

SEQ ID NO: 1280 - DNA, 515 bp, Homo sapiens
  misc_feature 462, 507: n = A,T,C or G
acaattacccaccactggatttgactcagagaggacccccagagggtgtctccatcttccctatttattttcagcccttgagggcttcattgtagatcaaagccaaggcccccaggaaggtgacatactcctggaagttcacctcctggtccttgttccggtccaagtcttccatcagccttgcaatttcagcatcctgcagcttctaatgtgttagaatgtgaaatccatactcagtggtgatgacaaccctggattcttccccttccccctcccaggcaatcctctctgcaagtggctctgtgctccctcatcaccaaggacccatgtcactttggcattgcttctcctcagctacttctcagttactggtcctcatttggagagatggatatccggctggaagcatcccctacccgctgggagagtgggtctacagctcagggtctacatgtggaccanggcctcagaatgtgggtaaatgtgagtcccgcgtacctcggccgngaccacgc

SEQ ID NO: 1281 - DNA, 704 bp, Homo sapiens
  misc_feature 207, 304, 360, 412, 459, 489, 500, 507, 518, 540, 552, 564,567, 571, 575, 586, 592, 594, 597, 608, 619, 639, 642, 643,655, 660, 662, 669, 672, 691: n = A,T,C or G
acttttttttttttttttttttgggctttattttctttggagggagggtcttgcttgtcatccaggctgtagtgaatgggcatgtcataactcactgtatccacaacctcctgggctgaaatgatcctccagcctctgcttcccaagtagctgggactacaggtaagtgccagcacatgtggctaatttttttacatctttgtaganatgaggtctcactattttaccaggctggtctcaaattcgtggcctattgtgatcctaccagctcaacctcccaaatcgctgggattgcagacatganccactgtgcctgactcaaaaatcatactttattcttgagcccattggtcagggtanattcgcacactccctctgcagtgactccaggagcccctctccaagctcaaancggaagctgagctgcaagcctgccatcttctccgcatagtccggatngaagcgctcattctgcgccacggtgaaagnggtctttccantccccanccatgcctttnctcatgaaaggggagatgctgnggtccatgaacncctggggggacnggngggngtanttggtcaatanggttcntnttnattttcctttnaacgaccgggncttgaaccattgaagtccantgnntcctcttggcangggancngcccacnaantccaggatctttttgaaanctcccttttgggg

SEQ ID NO: 1282 - DNA, 397 bp, Homo sapiens
  misc_feature 35, 54, 86, 99, 137, 164, 188, 332, 364, 389: n = A,T,C or G
actttttttttttttttttttttttttttttgganatggagtcttgttctgtancccaagctggagtgcagcggtgcaatctcggntcactgcaacctntgcctcccaggctcaaggaattctcctgcctcaacctntggagtagttgggactgcaggcatgcnccaccacacccagctaatttttgngtttttagtaaaaacaggatttcaccatgttggcaggctggtcttgaactcctgacctcaagtgatctgcccaccttggcctcccaaattgctgggattacaggcctgagccactgcgcctggctgaaatttttgatttttaanacctttaacttccctaatctgcctatctaggngcatattcccgcgtacctcggccgngaccacgc

SEQ ID NO: 1283 - DNA, 591 bp, Homo sapiens
  misc_feature 62, 65, 90, 121, 144, 186, 216, 335, 352, 383, 410, 417,424, 468, 488, 498, 515, 529, 537, 552, 568, 570, 580, 588: n = A,T,C or G
ggtacttttttttttttttttttttttttttgccacacctgccctttattggtctcttctancanagtggctccaggcccttcacgcctntcaaacaccacccatgagggtttaggaaggngccatcattctgtgaaggcccanagcttacccaagtcttggagcccaagttgaatcaccaaccanagggttgggagaggaaaaggaaacaggcanaggggaaaggcaaggctctgcagtgaaggggactgatatcaagggaatgctgaggtccagcagtgtctcctgaaggcatgctacatcctaaggctcctcaggactggatggagtagganatctgtgtgttgagcanttcacatctatatggcaactttaaggaggcncttgatgtcaggctcaatgtttatggntgggaangtgcggntgtaacgtcggaagggctctccctccggccctatgaggaacttntcaaagttccaggccacatnttgaagcggngcacagggcttccaaangattgagccttggngaatcggncatgaagggaaaatngggtcattataagggnangggaactttngccttcangtt

SEQ ID NO: 1284 - DNA, 439 bp, Homo sapiens
acgcggggagcgtcctcgaaaccacgagcaagtgagcagatcctccgaggcaccagggactccagcccatgccatggcggattctgagcgcctctcggctcctggctgctgggccgcctgcaccaacttctcgcgcactcgaaagggaatcctcctgtttgctgagattatattatgcctggtgatcctgatctgcttcagtgcctccacaccaggctactcctccctgtcggtgattgagatgatccttgctgctattttctttgttgtctacatgtgtgacctgcacaccaagataccattcatcaactggccctggagtgatttcttccgaaccctcatagcggcaatcctctacctgatcacctccattgttgtccttgttgggagaggaaaccactccaaaatcgtcgcaggggtcctcggccgcgacacgctt

SEQ ID NO: 1285 - DNA, 408 bp, Homo sapiens
actggaattttgcatatctgtagagtgtatctaaatattcctgcctaaaaccatgcttgtccgccaggtagtcaaagagcatcctaccatccctggttgactgcatttgccttgtagtttctggatcttcaaacatcttcacaattggttctgtttctgcctgaagctgtttcagttgtgcaaccactgtggttcttttctctctcaaagcatgaggaatatcatcagaataaaggtttttgtatacatccatagcaaagtctaccatgttggtatcactaagaaggtccaatttaccttgtaataattccttttcattatatatctcctttacagagagaaattcaagaagcggaaagactagatgccgatccaaaaagtgcgcgatgcgagtagtcaagtcgtacc

SEQ ID NO: 1286 - DNA, 562 bp, Homo sapiens
  misc_feature 357, 482, 485, 542, 558: n = A,T,C or G
ggtacagaccagttattttgtaaaatgttccccagtgtgggtttatctgaggtttcctcatgattagattcagaccatgcatttttcggaggattaccactaaaacaatgttgtgttctcagtgcatcctatttgaggcacatgatgtcaatttgttctcatattgatgaggttaacttttattatttgaataaggtggtatctgccaggtttctccactataaagttactgtttttccctgttaaaattaataagtcatttgtgaggagtttctttgagactatttaaatgttgtgttctccaaaaaaaagaaaaaaaagagagagagatcagaaagatttggtggctaggtgcantggctcacgcctgtaatcccagcactttggaagtccaaggcaggcggatcacctggggtcaggagtttgagaacaacctgccaacatggtgaaactctgtctctactaaaaaataacaaaaattnccnggtgtggtggcgcacacccatatgtcccagctactcttggacgctgaaggcaggaanaattgcttgaccccanaaag

SEQ ID NO: 1287 - DNA, 267 bp, Homo sapiens
acccaaatagctaagtttaaaattttaagaaatccgagaattagtttaaaattgtataaattctccttttaactttctaaaatgtccatatgcactctcattgtgttttaaatccattacattagaaaaacagactgcaggccgagtgcagtggctcatgcctgtaatcccagcagtttgggaggccaagatgggaggatcgcttgaggccaggagttcaagaccagcctggtcaacatagtgagacaccatctcaaaaaaaaaaaa

SEQ ID NO: 1288 - DNA, 715 bp, Homo sapiens
  misc_feature 120, 335, 364, 463, 489, 517, 574, 584, 602, 609, 613, 617,631, 635, 645, 647, 663, 675, 679, 690, 696, 702, 707, 709: n = A,T,C or G
ggtacttttttttttttttttttttttttgggtccttccccaacagcagttggaattttcttttgaacacaaagtaaattaatgtttatactgttttttcacctgagtcatgtaaaaggngactcctttcattttaaaaagttatatttaatttttgggggccttaattaaaatttaacatttaaccatgtgttttttttttgtaaacagtctacatgtcaacaaatggataagggttaacaaaggcaaatactgacttcatttgtgttttaaacacgattatatgaatttttcttttttaattaaaaaaatgacataaaaccattcatataggncctcttctctcaactgctttgagatatanctttaaatatgggtagatcaagacaagtaatgttggtaatctcttatcttgcatagaaaagaaaaaataaaggaacttatttccttcctaaggtctcanctagtttcttaaagtcttttcttcanctccaatggaaatttctcatagcacttnttacagactggcttcatgtcaaactccacaaaacttattcttgaagtgttaatttantggtgcaggnagaacagggcaaagccanttccgcnccangccntttttagagccganaccncatccccttntnttaacacgattgcagngggaagccaacnttcncccaaatagcntgggtntagtgngtttnanaaattt

SEQ ID NO: 1289 - DNA, 719 bp, Homo sapiens
  misc_feature 328, 609, 628, 633, 649, 669, 680, 684, 691: n = A,T,C or G
ggtaccataaggagacacaagaagaaaggtgacactaaggctacagtgcacagaaaacagaccaggtgtggcttcgactgtgcggacctgcccactagcctatgctacagatttgaaatgtctttcactttgacatgacacacggtttatattacacaaaatgaatgaaacgacaatggctaaaaataaatgagacagcctgcacacaaaaagatgatgactgctactttcctcccatcagaaaattactcaaaaagggagtatttaaaggaaactcaaatcaggagaacccggtaggcatcagaggttcagggcaccaaggccttanggcgggaacacttttcaacccaagccaggcttcaggggcaagcccaccaacagaccccaatttccacaggggaggcagatcttctatacctacagtgacagaaaatacactaaagtgcagtataaaatataaaaaggtttgattctgaatagaccaactgctaattttccttaaaaaaatttttaatttggttgagtaaaaaccaaattagttcactgaatctcattttgtaggtaaagaagtcttattttgcaatacgaaaaactggagcttatgactgnttttgattttctcttgtancacangataacccagtattantgggagaacacttacaaaangggggctttgngggngagttcntttgcattagtgggtttttaaaaaacaa

SEQ ID NO: 1290 - DNA, 705 bp, Homo sapiens
  misc_feature 511, 580, 601, 617, 626, 631, 663, 691, 694: n = A,T,C or G
acacacccaggaaatttgtcatccaccctgagagtaacaaccttattatcattgaaacggaccacaatgcctacactgaggccacgaaagctcagagaaagcagcagatggcagaggaaatggtggaagcagcaggggaggatgagcgggagctggccgcagagatggcagcagcattcctcaatgaaaacctccctgaatccatctttggagctcccaaggctggcaatgggcagtgggcctctgtgatccgagtgatgaatcccattcaagggaacacactggaccttgtccagctggaacagaatgaggcagcttttagtgtggctgtgtgcaggttttccaacactggtgaagactggtatgtgctggtgggtgtggccaaggacctgatactaaacccccgatctgtggcagggggcttcgtctatacttacaagcttgtgaacaatggggaaaaactggagtttttgcacaagactcctgtggaagaagtccctgctgctattgncccattccaagggagggtgttgattggtgtgggggaaactgttgcgtgtctatgacctgggaaaagaanaagttactccgaaaatgtganaataaaccttatttgncaattattntcttntgggattccaaaactatttggacataaggggnaatttgtattttgattgtccaaaaaaanttnattctggggtt

SEQ ID NO: 1291 - DNA, 387 bp, Homo sapiens
  misc_feature 180: n = A,T,C or G
acaggggcagtcagtggagggcgagtggtttcggaaaaaaaaaaagaaaaaaagaaaaaaaaagaaaaaaaaaagatttttttcttctcttaatcggaatcgtgatggtgttggattatttcaatggtggggttaatatagcatgttatcctgtctatcttttaaagatttctgtataanactgttgagcagtttttaaaatagtgtaggataatataaaaagcagatagatggcgctatgtttgattcctacaacgaaattatcaccagctttttttcattcttaactctttaaaggattcaaacgcaactcaaatctgtgctggactttaaaaaaacaattcaggaccaaattttttctcagtgtgtgtgtttattccttatagg

SEQ ID NO: 1292 - DNA, 587 bp, Homo sapiens
  misc_feature 539, 581: n = A,T,C or G
ggtacaagcttttgtccaaaatggcacagtgagcacaaatgagttcctgtgtgataaagacaaaacttcaacagtggcacccaccatacacaccactgtgccatctcctactacaacacctactccaaaggaaaaaccagaagctggaacctattcagttaataatggcaatgatacttgtctgctggctaccatggggctgcagctgaacatcactcaggataaggttgcttcagttattaacatcaaccccaatacaactcactccacaggcagctgccgttctcacactgctctacttagactcaatagcagcaccattaagtatctagactttgtctttgctgtgaaaaatgaaaaccgattttatctgaaggaagtgaacatcagcatgtatttggttaatggctccgttttcagcattgcaaataacaatctcagctactgggatgcccccctgggaaagttcttatatgtgcaacaaagagcaaactgtttcagtgtctggagcatttcagataaataccctttgatctaangggttcaagcctttcatgtgacacaagggaaagtttctacangcccaa

SEQ ID NO: 1293 - DNA, 588 bp, Homo sapiens
  misc_feature 59, 153, 155, 232, 269, 277, 298, 305, 398, 452, 454, 524,535, 539, 545, 548, 570, 583: n = A,T,C or G
actttttttttttttttttttttttttgggggaaaagatatatatatatatatattcanaattaggcagctggactcagtttaaatgatcccaattttgttggcaacatccaaagcatcgtaatcaggagccagtcgaacatatgccttcttntntccatcaggccgaatcagggtgttgaccttggccacatcaatgtcatacagcttcttcacagcctgtttaatctggngcttgttggctttaacatccacaatgaacacaagtgngttgttgncttctatcttcttcatggcanactcagnggtcagcggaaacttgatgatagcatagtggtcaagcttgtttctcctgggagcgctcttccgaggatatttgggctgtctccggagtcgcantgtcttcggccgccggaaggtgggtgacgtgcggatcttcttctttttgtggcngngggacacctttcaacactgcctttttggcctttaaaaccttcgctttggcttcaactttaggaggggcangagctttcttntttngttttnggngccatcttttgaaaaggccccncgtacttggccgngacca

SEQ ID NO: 1294 - DNA, 625 bp, Homo sapiens
  misc_feature 77, 83, 97, 242, 261, 312, 360, 522, 529, 551, 565, 616: n = A,T,C or G
actttttttttttttttttttttttttttttaggtatatccatagtcacctttattctgaattaaccatttatcaanagtgcncctgaaaagagtanaaaaaaataaaggagcccatcaaaaaaaagttccctggcaagtgggagggaggacatgatgttaggagccctgtttggggaaggaaatgttatccaggtcatggatgccatttttgtcaatgattcgaacactgaaggttggcanattcaggatgaagcgtttntggagctcctccaaacatttcctaaggagttccactgccctctcacgtganatagtcggtgtgtagtatcggtcgaggatactgagagtcaggaaggcnccatagcccgtgggctgcaaaaggggccttggccaaggctgccaggtagtccatgtaatacagccgctggcccttcatgctcatcataaccagccaggaggaggttcacatgatatggggtcccgactcccaaaacagtcagccaggtttcggcgtgtgaanttaactnctgccgtgggaaaaaattcatnttcatttcgcattnttataaaagttgcccttttttttgaatatatttttgaaaactgggaccttnggcccggga

SEQ ID NO: 1295 - DNA, 581 bp, Homo sapiens
  misc_feature 400, 485, 488, 520, 535, 552, 561, 576: n = A,T,C or G
ggtacgcggggaagtcgcttgtgtatgaacgcagcggcggacctgtgaggggatccgacttgccggcagaacttacgctgcgggaccccgggcactgttgctgctgcgggaggtcaatcatgcgaggctgtgacaacatgtgtagctactgcattgttcctttcacccggggcagggagaggagtcggcctattgcctccattctagaggaagtgaagaagctttctgagcaggggctgaaagaagtgacacttcttggtcagaatgttaatagttttcgggacaattcggaggtccagttcaacagtgcagtgcctaccaatctcagtcgtggctttaccaccaactataaaaccaagcaaggaggacttcgttttgctcatcttctggatcaggtctncagagtagatcctgaaatgaggatccgttttacctcttcccaccccaaggattttcctgatgaggttctgcagctgattcatganaanagataacatctgtaaacagatccccctgccancccaaaatggaaacnatcccgtgtgtttgaangccattgcngaaggggatattcanaaaaa

SEQ ID NO: 1296 - DNA, 418 bp, Homo sapiens
acgtcatagaaatagcagctcccaccttgtcatcaatggtatcaaatttggtaagaacaatgccatcaatgagccgaggtgtctgagccatagaatggtcagccaaggctctgttgaacttgaccagctggtccacggcttcattgcctactaaggcttctcctacaaacagcaccaaatcaggtgtattgacagtaatgagtttggccagggcagtcatcagaggggcattgtcttgcatgcggcctgccgtgtccaccagcaccacgtcaaagccttggttacgtgcaaaagcaatggcttccatggcaatgccagcagcatccttgccatagcccttttcaaacaactgcaccatggtgcggccaccatgcttctctggagggtgtagggcactcaaacgccgggtgtgtgtacc

SEQ ID NO: 1297 - DNA, 524 bp, Homo sapiens
  misc_feature 55, 58, 64, 86, 140, 182, 193, 345, 356, 425, 464, 483, 494: n = A,T,C or G
ggtactttttttttttttttttttttttccacacctgccctttattggtctcttntancaaagnggctccaggcccttcacgcctntcaaacaccacccatgagggtttaggaaggtgccatcattctgtgaaggcccanagcttacccaagtcttggagcccaagttgaatcaccaaccanagggttggganaggaaaaggaaacaggcagaggggaaaggcaaggctctgcagtgaaggggactgatatcaagggaatgctgaggtccagcagtgtctcctgaaggcatgctgcatcctaaggctcctcaggactggatggagtaggaaatctgtgtgttgancagttcacatntatatggcaactttaaggaggcgcttgatgtcaggctcaatgttgatggttgggaaggtgcggctgtancgtcggaagggctctccctccggccctatgaggaacttntcaaagttcaggccacatntgagcgggccncagggctccaaatgatgaacttgggatcgg

SEQ ID NO: 1298 - DNA, 743 bp, Homo sapiens
  misc_feature 440, 577, 601, 623, 638, 655, 657, 660, 665, 694, 722, 723,733: n = A,T,C or G
aattcgcccttaggcgtggtcggcggccgaggtacaaaggcaaaaggaccacagcaccacttaggtgtagcatggattttaaactgcagtcagtatcagatcctgtttgataaataagctgactgttctctcttgagaacctgtggcctcaaccagccaccaagctgatgtggcccaagtccatctcttggtcttctcctttgaggcacagcctatttctgagccaagggttggggaagcctgtctagatgtgggactcattgccccaaaccagggagaggaagagctcccacagggagagcccaggctctctttgcagcctttcccagtttggtgtttaagcagtgccatgttccttgtttgacaacaagacagtctgtaaagtattgctcttaaaaacaattaaaaagaaccctttcatattggcaccattgccttantcctctgtgggttggtcttcagccagcattctggtgggagtgactggcattaacaagactggaaatcgggggtcaaagtaaaatatctttgttttgctttcattccaaaagtaatgaaccagcttgccaattacatnctcccaacaacacttttggtctgnggactgctgggtgaatattcanaaagggaagtaagtnttcaggggggtaaacangnctnccaanatttttgaatggttccaaaccaattaatncacattgccaatttcaaaattaaaacanncccttgcttngattttaccc

SEQ ID NO: 1299 - DNA, 706 bp, Homo sapiens
  misc_feature 493, 500, 527, 554, 566, 579, 582, 601, 617, 631, 640, 642,704: n = A,T,C or G
ggtacaatgtggggcaggcaccagactgggcagggaaaggcctcggataccaccatcatagcagagaccagacgctcatccttggtttgagacatgaagtcacaggaactgagatgggcttcccacataccaaccactgggagggcaaaggtggggaagggcacaggctaaaaattaacaaggtgcccaaggtaaagggcaagcccttgtcagcctgggatactgtctcctactcccaacctttgggcccaacagaggaaccagttgaaaaggagggccaaagacattgcagtaagtaagcaacaggacaatgaactccatgttgcccagatcccactgagagtgaacgtgcagtcatgcccataaccgacacacatcccagtccatgtgggtcagtccttcatcaccctccctgcttctgacaacagcagactccaccattccattatcattcacagcccaacccaaacagtcaagtggcttgaagaaaganaaatcangtatactctatgtccacatataccttnctgccacaaggcttcaccaactggcangattccccccancccccaacttctnctnattcctttgttcccaagcngggtcaattgggaganttgaccaaaaatanaatggcttncngaaagggtattccaaaatgggggagaactccaccagaccttaagggagaagaaatggccttntt

SEQ ID NO: 1300 - DNA, 710 bp, Homo sapiens
  misc_feature 450, 606, 612, 650, 652, 670, 679, 688, 696: n = A,T,C or G
acactccagatataactgggacttcctgtgtagatctgaacgagtgcaaccaggctcccaaaccctgcaattttatctgcaaaaacacagaagggagttaccagtgttcatgcccgaaaggctacattctgcaagaggatggaaggagctgcaaagatcttgatgagtgtgcaaccaagcaacacaactgccagttcctatgtgttaacaccattggcggcttcacatgcaaatgtcctcccggatttacccaacaccatacgtcctgcattgataacaatgaatgcacctctgacatcaatctgtgcgggtctaagggcatttgccaagaacactcctggaagcttcacctgtgaatgccagcggggattctcacttgatcagaccggctccagctgtgaagacgtggacgagtgtgagggtaaccaccgctgccagcatggctgccanaacatcattgggggctacaggtgcagctgcccccaaggctaccttcagcactaccagtggaaccagtgtgttgatgaaaacgaatgcctcaccgctcacatatgcggaggagcctcctgtcacaacaccctggggagctacaaggtgcattgtgtncccccngctttcaaatatgaacagttcagtggaaggatgccaananatcaatgaatgggggttntgaccaagncccctgcancttttggntggttccaataccg

SEQ ID NO: 1301 - DNA, 124 bp, Homo sapiens
  misc_feature 112, 113: n = A,T,C or G
acgcggggctctttccctgccgccgccgagccgcgcggaggcggaggcttgggtgcgttcaaaatttcaactttaacccgtaaacccaccgccttggccgaagaaaggcttnnctgttggaggt

SEQ ID NO: 1302 - DNA, 716 bp, Homo sapiens
  misc_feature 221, 223, 324, 391, 419, 426, 513, 560, 584, 611, 626, 628,631, 635, 670, 672, 702, 707: n = A,T,C or G
ggtactttttttttttttttttttttttttttttaggaaaatcaatgttttctttaatgctgagaatttttgttaatatttctgacatttcataaaacatcttttgttgacattctacaaatgatagcatccaataatgtcccaatactttcttcttgtgaagagagtttatatatctttttgacttctgtaatattcattatttcaggaagatttttcananaaacctgatgaccttctacttgagatattaggtattcttgatttatttgtttttctccctcttcaatgtaaacaattagaattgaagcgtcatttgctganataccaaattttttcaaagcctctgaaatattgttatttggggaaaggttgaaaataatttcagtanatagagttcttgtcttcatttttcccantttgtanaggtgaactgctttgtttgctgccacaagtatctgaaatggatcaacaatcctgtaggatttatcagtgatccatccgatggtgccntccatggcctttcttctcaagtctcccgcatttttacatctttaaanaacagaagggttcccctgctttcngggaaaaaaggccagctgattgtgttnaccgcatttcaccanantanccanggatttttccttcgggccccaagtgcgtccccccngnttccttgccccgggcgggccgctttgaaanggggnaaattccaa

SEQ ID NO: 1303 - DNA, 569 bp, Homo sapiens
  misc_feature 314, 507, 509, 533, 544, 553: n = A,T,C or G
ggtacgggagtttcttggtaaatccagaatcaggatacaatgtctctttgctatatgaccttgaaaatcttccggcatccaaggattccattgtgcatcaagctggcatgttgaagcgaaattgttttgcctctgtctttgaaaaatacttccaattccaagaagagggcaaggaaggagagaacagggcagttatccattatagggatgatgagaccatgtatgttgagtctaaaaaggacagagtcacagtagtcttcagcacagtgtttaaggatgacgacgatgtggtcattggaaaggtgttcatgcangagttcaaagaaggacgcagagccagccacacagccccacaggtcctctttagccacagggaacctcctctggggctgaaagacacagacgccgctgtgggtgacaacattggctacattacctttgtgctgttccctcgtccaccaatgcccagtgctcgagacaacaccatcaaacctgatccacaccgtncngggactaccctgccctaccacatnaagggctctangggcctatnttcacacacgttatgc

SEQ ID NO: 1304 - DNA, 491 bp, Homo sapiens
  misc_feature 473: n = A,T,C or G
actggatggccccacaagatgctgccactttaataaggctgcaatacactgtgtatcttacaggagtattcttatccatcccgtggaaaaggttgcttaacaactgcagtctcagagacgggcgttcaccttcgcgaaatttgaccagcttttcacataggctttcaatcaaagcttcttgcttgtctggttccaggatcaagagtagggataccacactgttcatcacactttcaacatctttatcatcctccttcagacacacatcacaggcttcaataatttgagctaaatcaacatgaagtccaccttccgagttctcttctgaaatctcagctcctttagatttcagataagcacgaagctcagcagcctgatcttcttcactgatgtcgatgaaggccgggacgctcatggtgcaggcccgggcacaagcggacactccactcgcaagaccacgccgaccggaaaanggaactgccccgcgtacc

SEQ ID NO: 1305 - DNA, 435 bp, Homo sapiens
  misc_feature 31, 79, 272, 274, 278, 332, 351, 377, 405, 410, 417, 425: n = A,T,C or G
ggtacttttttttttttttttttttttggtnttaatgatgtttttaattgacaataattgtagatattcatcggatacncagtgatgttttgatacatgggatgtctagtgatcaaatcagggtaatgagcatatcatcatctcaagcgtttattatgtgtgttgagaatgttcaatatcctccttcttgctgcttgaaactatataatatatggtaaggagtttgtttttccgtcgtcatttgtaaccgttaacattaggatctgtgagcngngttntctagttattctgctttattttcctctgctcctgaccgccgttggatagctganatttcctccggatgggcanaagctcccctgccttatggcttccgnagctgaacactgggtctttcactgagcnggatnaaatgantgtgggtngttgcttgga

SEQ ID NO: 1306 - DNA, 483 bp, Homo sapiens
  misc_feature 34, 115, 126, 168, 192, 217, 270, 411, 430, 445, 456, 464: n = A,T,C or G
ggtacttttttttttttttttttttttttttganactgttcttttattctgagtcaataagtaacatgtgatacaaactcaagattttattaaaatcatttgtaagttaaattancatatctcggnggtgaaggaagacttttaataaagcaaaataatgagttaggngaatcaacagaaagagtgaaaagngttaacagtgacatttaaatggttncatgattttaattattcttttgataataagcaaccttgtgatatctattcaanaaaagccagagcccactatggaattcgcagttgaataaaagctttgttccctgcttttggtaatgttaaagaaacaaatggaaatggtttaaagaccttataacaatctcccacctagcaaaagaatctaaaaggtaaggngggaagcattagaaagagngtgaaaagaaaaatnaaaaaggcctnacacgcancattgggttttatttgata

SEQ ID NO: 1307 - DNA, 715 bp, Homo sapiens
  misc_feature 572, 609, 636, 641, 659, 660, 672, 673, 699, 702: n = A,T,C or G
ggtacttgcccacttttcctcttgtgggcctgttcctagaatccattatgttctgtgggtgacatcagcctgctactgcgggaagaaacagaattttatggtgcccaagataaaatcgactatgatgatgcagaatgaagacctggagaggagtcagagattgcaggggataaaaagagagaaatcagagatgctcccacaaacagagaaaaccttcagaagcagcaggaaggacagagtaaatggagaacaaaaactcaagtcaaaatagtcaatggaaataaacagttttgaattccagttataatttggaaaagaagcaaacgtttattttaaattaagaaaaaagtcgcttataatttcctgaagtttagaaaagtgaaaaatagttaaacctcctgttgttagctaagaagtgtctattattataagtttgtcgctggagagaacataaaaatctctatctattgctatttttttttttttttgcataaggggatagataaaagagtggtttattttatttagcctttggcctgtaaagtaagatttattgaaccaaagggccatcnggaaatgataagaattttttccctaatttcctaattntttaagctaaaccttgattgatttctnttcangctagtgccccatattannagcaacagtcanncctttcattttttctttacctggganccnctggcttaaatcc

SEQ ID NO: 1308 - DNA, 710 bp, Homo sapiens
  misc_feature 539, 551, 602, 615, 632, 634, 690: n = A,T,C or G
actaggaaaagatacagttaccaaagataatggcatccgtccttcctcactggagcagatggccaaactaaaacctgcattcatcaagccctacggcacagtgacagctgcaaattcttctttcttgactgatggtgcatctgcaatgttaatcatggcggaggaaaaggctctggccatgggttataagccgaaggcatatttgagggattttatgtatgtgtctcaggatccaaaagatcaactattacttggaccaacatatgctactccaaaagttctagaaaaggcaggattgaccatgaatgatattgatgcttttgaatttcatgaagctttctcgggtcagattttggcaaattttaaagccatggattctgattggtttgcagaaaactacatgggtagaaaaaccaaggttggattgcctcctttggagaagtttaataactggggtggatctctgtccctgggacacccatttggagccactggctgcaggttggtcatggctgctgccaacagattacggaaagaangaggccagtatngcttaaatggctgcgtgtgcaacctggaagggcagggccatgctatgatangtggaagcttatncaaataattagaatccnanaagaaagtgacctgaagtttctgtgcaacactcacactaaggcaatgcctttcatnccttactaaatgacattggt

SEQ ID NO: 1309 - DNA, 710 bp, Homo sapiens
  misc_feature 27, 81, 224, 523, 554, 558, 569, 584, 595, 601, 606, 623,641, 660, 691: n = A,T,C or G
acttttttttttttttttttttttttngctggggtattcatttctgcatgtatagctttattaattgctaatgaaaattanaacttttctgggatcttctgacaagatttttaaaaaatcttaaaatgccttttcttcagtgaagccatctttggagttagtcattactctcaccttatctgtcatcttgacttcaaactgatattcctcttcttttggtccanaccctcaaattttaaaagtagcttcaagttaaggaaaggtcatttttccacagttcagttctctgaaaaacttccatctcccactgaaagtcacagtccaggagtgaagtaatcacatgctagaacatcagggccaattggaaagtcattatgaacacttgcattggtcgatcttatttatcaccacaagcctgaaaatgcaatgtcctgaaaaaggtgacctctctgtgcacaccgtaatttttaaaaaggagagggtaatatgaaggggactgaggcttgatcaccaaaaatcagcncatggaaacaaacaataatgaataatgagcnctanaattcaaattnccagatgtttcaaanaagatgggggngccagnttttnattccgtttggaccccncatttacaaaaaaacctntttttaaaaaataaaaaanggttgggggggaaaggaaaaaaaattaaaangaattttcttaacttgttg

SEQ ID NO: 1310 - DNA, 715 bp, Homo sapiens
  misc_feature 502, 542, 584, 601, 605, 632, 643, 651, 653, 668, 679, 685,694, 701, 710, 715: n = A,T,C or G
ggtacgaaaacagaaccaatctaaaaatggctgatgttactttaggagcctgaaaaaaacaggagatccttgaagacccagccaccccttctagaatgttcaataagggcacctttccaaagctactaagcaggcacttggcatttcaggagtttgtcttatggttgcataaaagtatccctttcacccagacctgacaccctttatggttcaaagttaagaacgggaagaatgggtggcaaggtggctcctggaagagctcacccagcacagctgccctgagctcggggccttggtttctgtccctggggatatttatatttaataaatttttatataaatacacagagaaatagaaaatataaaatctgaggggttggggaagaaacgtgagggactcagcaggaagccagagctggagaggtccattcaggccaacttgacctcctccttgacccctttggcttctggcttcttcctccttggttttctcctcttcggngacttctttcttctcctctgggtctttctcttttttcatnctctgttttgactctcttggctttttttgaagttgggaaganttttttgcgggcccccntttnccttcttttcagaaatcgggagaactntttcctcacangccaattncntttgtcaaaaagganccagaatcganaatgcnccttgtcangggtcgnttttcgtcntcatn

SEQ ID NO: 1311 - DNA, 421 bp, Homo sapiens
  misc_feature 29, 36, 91, 154, 251, 263: n = A,T,C or G
acttttttttttttttttttttttttttnggaaagngtaaatttatttaataccaaatgtttcctaagtttactttttgcacaatgcacanacacttttgggacaatgtatggttaaaaactaatattctaccaacagctccatgctgctctanatcatcctgaaggaaaaagtaatgcaaaggatgctgggtctccaagtcccaggactggccgatagcctctcccagtggatagcaggtcctaattctnttcttcgagcanattctctgatttcagctgggtcttcctgatgctctccaagttcagttgttgatattttcttttaaaaaagccacacttgaacaggatgaccagaatcacgatcaacaccagaagtccaccaacgctgcctttaatgatgataggcaaagaatggtacc

SEQ ID NO: 1312 - DNA, 365 bp, Homo sapiens
  misc_feature 37, 46, 65, 71, 73, 163, 197, 199, 206, 225, 244, 276, 311,315, 341, 355: n = A,T,C or G
ggtactttttttttttttttttttttttttttttttngcattttanactcccacattaacttgtntagcananaaataaaatcttaaactgtatgctaatagttatccaaaatttatgttaaatgactttggtttatggatagaactttaacattaaatgacnctgaaaatactcaggccccatattggccttattntntcaacanactttaatatttttctcanaaattagatgagggcattntattccaaataaaattctcaaataatacagtnaatagaattttctaaaaaataccatttatgacttntctntctatatataacatctcaagcactanaattaacaaatgcngaattaatgt

SEQ ID NO: 1313 - DNA, 627 bp, Homo sapiens
  misc_feature 149, 615, 625: n = A,T,C or G
acaaagtaatgaccataataccttgtctaaatcagtagcagggcttcatggctaggaaacttttttaaacagtaaaatgtcattaggatagatcactctctcaccaacattaaatgtggcagaattaaccaaaaaaaaaaaaaaaaaangaaaaaaagatttacacgtagatatagcagtaacagaaaattacaaggcagagaacacaaaagaatcaagacaacgctataggttcaacagtattccatgaggctagaaaaccggttaactttgaaagccctagcaaaatatcactcttgtttataaatcacttatttatcatatgaccacacgttgaatccttgtctttccacatactgaagaatcctacattcagcctttaagcattctgcatttctttgccaatcttgtagctgagtatcttgttccagtcgattttggtgcgggtaactggaagctgccggcgcaaggccttgaatgtggtatctgacattgtttgatagttttcactaattgctggctgatactcattttctggattctctatgattttaaataaactccttggcagtttggggctttcattcgaaaacagttagtgaatcctgtaccttnggccgcgaanca

SEQ ID NO: 1314 - DNA, 493 bp, Homo sapiens
  misc_feature 34, 54, 144, 191, 193, 247, 255, 258, 299, 312, 368, 371,393, 400, 456, 480, 482: n = A,T,C or G
acttttttttttttttttttttttttttttgggnggtcagggtttattaagtanattcagtcttatatatgatatacagattcaaaaggaaaaggattccacatacttatgaaataagtgcatttagcaagtaataccatgganataacagctcgattaacagctcattggtcttttgttaagtgagggananagggagtcggcctgtgctagtcattccacaaacaaaacagaatttagtcacatnacgtaganaanacacattctaagaattaaaatattaagccacatttactggnaaaactcactatntagaacacaaataatttttatagagagcattgaggaggaagtcctcacctgcttanaanagccccgttaagttgcataggngcatatntgtaaaaatataatttagaggtgaagccattaataagagtccctttaaaagttggngccatccacttgtttgccttaagncntactatctgga

SEQ ID NO: 1315 - DNA, 663 bp, Homo sapiens
  misc_feature 531, 561, 630, 645: n = A,T,C or G
acgcgggatttcgccatggatgaggatggggacgagagcattcacaaactgaaagaaaaagcgaagaaacggaagggtcgcggctttggctccgaagaggggtcccgagcgcggatgcgtgaggattatgacagcgtggagcaggatggcgatgaacccggaccacaacgctctgttgaaggctggattctctttgtaactggagtccatgaggaagccaccgaagaagacatacacgacaaattcgcagaatatggggaaattaaaaacattcatctcaacctcgacaggcgaacaggatatctgaaggggtatactctagttgaatatgaaacatacaaggaagcccaggctgctatggagggactcaatggccaggatttgatgggacagcccatcagcgttgactggtgttttgttcggggtccaccaaaaggcaagaggagaggtggccgaagacgcaccaaaaagtccagaccggagacgtcgcttgacaggtcctctgttgtccaggtgttctcttcaagattncattttgaccatgcacctttggacaaatangactgggggtggaacttgctgggttatatttaatccttttaccggatatgcctagtattttgagttgcnaaataaatgttccantttttgttttaataaaaa

SEQ ID NO: 1316 - DNA, 705 bp, Homo sapiens
  misc_feature 471, 636, 648, 686: n = A,T,C or G
ggtactgccagattcgtctaaatgtctgtcatgtccagatttactttgcttctgttactgccagagttactagagatatcataataggataagaagaccctcatatgacctgcacagctcattttccttctgaaagaaactactacctaggagaatctaagctatagcagggatgatttatgcaaatttgaactagcttctttgttcacaattcagttcctcccaaccaaccagtcttcacttcaagagggccacactgcaacctcagcttaacatgaataacaaagactggctcaggagcagggcttgcccaggcatggtggatcaccggaggtcagtagttcaagaccaagcctggccaacatggtgaaaccccacctctactaaaaattgtgtatatctttgtgtgtcttcctgtttatgtgtgccaagggagtattttcacaaagttcaaaacagcccaataatcanagatggagcaaaaccagtgccatccagtctttatgcaaatgaaatgctgcaaagggaagcagaatctgtatatgttggtaactacccacccaagaacacatggggtagcagggaagaagtaaaaaaagaagaagggagaatactgggaagataatgcacaaaatngaaagggacttntttaaggattaacctagcccctttaagggattaactantttaaggattaatagccaa

SEQ ID NO: 1317 - DNA, 405 bp, Homo sapiens
  misc_feature 310: n = A,T,C or G
actgcaccaaagcctgggccttggccttgagcattccaaagcccacggtctccttggcatacatacacagcagaaggttggccactcgggtgatggctacacggccctccatgcagtccatgaggatgaatttgagattgtcttcattaaacgcttggttcccgttccggtcgtaggcggcccagatgttactggctatggcagcggtgacccgggcgtcagtgtccccgtaaccagagtaggccagcagtgatccctcgttattcagcagcagggtgctctggacgcctccagtgttggcttggcttancacctgggtcaaagccttggggcgcagcatgcctacggttcctaaccctgggcttttgcacccagatctccgaggtgcctcccgccccgcgtacc

SEQ ID NO: 1318 - DNA, 703 bp, Homo sapiens
  misc_feature 38, 56, 58, 63, 69, 131, 156, 169, 171, 179, 183, 198, 231,250, 282, 359, 382, 389, 404, 437, 496, 506, 523, 525, 548,606, 613, 633, 638, 639, 649, 660, 668, 681, 686: n = A,T,C or G
actttttttttttttttttttttttttttcgggagcanattgggtaataaaatgtntnttganaataanacggccttttgaccttttagggtctagggctataaagtgtctcagggttgctgccgaacganccatgaactgggctgggtttttatntttgatgaaaaanancctaaacncttntgatttgggataaanaaaaaggagcattaaccttgactatgtctttanctccagccacctttttaanagtaaattgctgggcaggtgggggagggctantcacggaacgaaactgtaagccggaccaggtgtgaggaggggaggtgataaaaagattacagggtggaggagtggancctgaggaaaaattgggacctancttggcntggaaaggagggganaggtcaaatgggtttgtaaaaaaggaagattanacacactcccaacgcctggggttgggactgaggggacaggtgggagggaaaaaaggaanatttgggacnagttgcactgggcacananactaggaagggaccggatgtgtnaaaaaatgccttggacattaagcccctcaaaccattttccccattttttgacaaaaantatttanggtctttgtagggatggganaaatnnaaaagggccnttttttgcccntttaaaanccaattggcaaanttttnttttggggccaaacccg

SEQ ID NO: 1319 - DNA, 665 bp, Homo sapiens
  misc_feature 456, 534, 550, 567, 571, 580, 607, 618, 620, 626, 633, 662: n = A,T,C or G
ggtacgcggggaggagtgagagagctgctggatatgcggagggactgggcgggtcggcttccgaatggaagaggtctgtgagaagttaacctggtgataccgatccgaagagcctatcaagtgaagccccctgaaatacggagaataagaatcttagaggttgttcagcagaagtcttggagtgcattttcagtggttaaggtgaaaaaatgactactaaaaatttagaaaccaaagtcaccgttacttcatccccaatccgaggagcaggagatggaatggaaactgaggaaccacctaaatctgttgaagttacctccggagtccaatctagaaagcatcatagtcttcagagtccatggaagaaagcagttccatcagagagcccaggagttcttcagctagggaaaatgctcactgaaaaagcaatggaagttaaagctgtaagaatattanttcccaaagctgctataactcatgatatccccaacaaaaaatacaaaaggttaagttctctgggacatcataaagganaatttccttggtccanttcagaagggagttatngaanccttattanggaactctcagaagttaaagaaatgtntttggaaaaancntcaaanaattctnaaagaaagttactaccggaacaaaaaaangtt

SEQ ID NO: 1320 - DNA, 251 bp, Homo sapiens
  misc_feature 116, 128, 150, 168, 187, 189, 199, 213, 226, 229, 243: n = A,T,C or G
ggtactgacaaagtcctgaaactacaatgagaggaaacacattgccctacttcgggataagtcatgaccgagactcaatttcagagacgctctatgaacagaggtgcttgaagccncagtggcagaanggaaagatggggaagtgtgccnaaaagcctccaggcatgncagacagtccctgaccaancncatgtaacangccctttgggtctntgcttctcactgnaanatgatgaagcctanatctgatt

SEQ ID NO: 1321 - DNA, 319 bp, Homo sapiens
  misc_feature 16, 22, 34, 63, 65, 102, 150, 208, 212, 214, 230, 234, 243,246, 256, 269, 283, 286, 313: n = A,T,C or G
aattcgcccttagcgnggtcgnggcggaggtacngcggggctcactctgcgcttcaccatggntntcattgccaagtccttctatgacctcagtgccatcancctggatggggagaagttaaatttcaatacgttccggggcagggccgngctgattgagaatgtggcttccctctgaggcacaaccacccgggacttcacccagctnaacnanctgcaatgccggtttnccangcgcctggnggnacttggcttnccttgcaaccaanttggacatcagganaantgtcagaattgaggaaatcctgaacancctcaa

SEQ ID NO: 1322 - DNA, 661 bp, Homo sapiens
  misc_feature 352, 517, 539, 600, 612, 637, 643: n = A,T,C or G
acgcgggtccttgtccagtgaaacaccctcggctgggaagtcagttcgttctctcctctcctctcttcttgtttgaacatggtgcggactaaagcagacagtgttccaggcacttacagaaaagtggtggctgctcgagcccccagaaaggtgcttggttcttccacctctgccactaattcgacatcagtttcatcgaggaaagctgaaaataaatatgcaggagggaaccccgtttgcgtgcgcccaactcccaagtggcaaaaaggaattggagaattctttaggttgtcccctaaagattctgaaaaagagaatcagattcctgaagaggcaggaagcagtggcttangaaaagcaaagagaaaagcatgtcctttgcaacctgatcacacaaatgatgaaaaagaatagaactttctcattcatctttgaataacgtctccttgtttaccctggtattctagaatgtaaatttacataaatgtgtttgttccaattagctttggttgaacangcatttaattaaaaaaatttangtttaaatttagatgttcaaaagtagttgtgaaatttgagaattttgtaagaactaattantggtaaccttanctttagtattcaatataatgcaatnggtttnggtttctttttaccaaaa

SEQ ID NO: 1323 - DNA, 522 bp, Homo sapiens
  misc_feature 440, 517: n = A,T,C or G
accaaaagaaaaagaaaaggaaaaggtttctactgctgtattatctataactgccaaggctaaaaagaaggaaaaagaaaaggaaaaaaaggaggaggagaaaatggaagtggatgaggcagagaaaaaggaggaaaaagagaagaaaaaagaacctgagccaaacttccagttattggataacccagcccgagttatgcctgcccagcttaaggtcctaaccatgccggagacctgtagataccagcctttcaaaccactctctattggaggcatcatcattctgaaggataccagtgaagacattgaggagctggtggaacctgtggcagcacatggcccaaaaatcgaggaggaggaacaagagccagaacccccagaaccatttgagtatatttgatgattaagggccaaaggatctccttgcttatctgaagaanattgtccagctcatattgggaatgcttttgagggaaattcatgccgagacctgcttttcaatgcatgttttcgttgncctct

SEQ ID NO: 1324 - DNA, 554 bp, Homo sapiens
  misc_feature 496, 517, 531, 536: n = A,T,C or G
ggtacacagtatttttttatatctatgttttctgttctctggcgcaagatattctgcacctgggtgctttcaggccttgaccaaatagcatgaatagtaggaaatgagaactttccctctgtcagatcttcacaaaaacttttgttttcactacattctttggagtgtagattagcataatcatccctaatttggaaaaagagcccaagtgtattaagtagcggttttaaatcttctttgtaatcagagaacaactgcatgagacctactgctaatccaaacagtccacctgttttctgcagcaccatagctttatattcttcttcagtgggacaagtgtaattatccctccagtaaatatctaggccttgtccctgatggagttccaaaagctggcgggtaaaaagcttcactgcatcttgggtgatcaaggggttaagactttctccaagccaaggaaatacaccgtaatttggcagaaattgatggacagatnggattccataagaatgctggngggccactggaaanccacntcggaagtttttgagttg

SEQ ID NO: 1325 - DNA, 524 bp, Homo sapiens
  misc_feature 343, 374, 405, 442, 460, 468, 493, 496, 499, 507, 517: n = A,T,C or G
acgcggggggcagcagtggacctatgagcagaggaaaatcgtggagttcacctgccacacagccttcttcgtcagtatcgtggtggtgcagtgggccgacttggtcatctgtaagaccaggaggaattcggtcttccagcaggggatgaagaacaagatcttgatatttggcctctttgaagagacagccctggctgctttcctttcctactgccctggaatgggtgttgctcttaggatgtatcccctcaaacctacctggtggttctgtgccttcccctactctcttctcatcttcgtatatgacgaagtcagaaaactcatcatcaggcgaccgccctgncggctgggtggagaaggaaacctactattanccccccgtcctgcacgcccgtggagcatcangccacacactctgcattcgacacccaccccctctttntgtaccttgggccgcgancacgcttnaggcgaaattccaacacacttggcnggncgnttacttantggatcccanctcggga

SEQ ID NO: 1326 - DNA, 611 bp, Homo sapiens
  misc_feature 451, 520, 529, 551, 565, 579, 600: n = A,T,C or G
ggtaccaccgcaaagccctgtgagcgtctacagacagctcaccatttttgtcctgtatctgtaaacactttttgttcttagtctttttcttgtaaaattgatgttctttaaaatcgttaatgtataacagggcttatgtttcagtttgttttccgttctgttttaaacagaaaataaaaggagtgtaagctccttttctcatttcaaagttgctaccagtgtatgcagtaattagaacaaagaagaaacattcagtagaacattttattgcctagttgacaacattgcttgaatgctggtggttcctatccctttgacactacacaattttctaatatgtgttaatgctatgtgacaaaacgccctgattcctagtgccaaaggttcaacttaatgtatatacctgaaaacccatgcatttgtgctctttttttttttatggtgcttgaantaaaacagcccatcctctgcaagtccatctatgttgtcttaggcattctatcttttgctcaaattgtgnaaggatggngatttgtttcatgggtttttgnatttgagtctaaangcacgttctaacantgatagaggcaatgcatttanttgtgttgccc

SEQ ID NO: 1327 - DNA, 397 bp, Homo sapiens
  misc_feature 105, 176, 194, 233, 249, 344, 368: n = A,T,C or G
ggtacttttttttttttttttttttttttttctttttcagcaaaataattttatttcctaacatatggtaacatatacatccaatatgtgctccccttgcacatntattcacgagtgacttccaaatgacaactgctttgatatttaagcatgtgctaaaagttatcttagttganatatgaaaaatgctttanatggataacattctgagtatattggattagtcacagcanaatttactttagttanatgagttctacaaatttaaagctttgaaaagctactacttttacttctaatacatccagatgaacacgatgtagcaatatcagcttgtattccanagaaatctcattagtttttctggngatggaaccacttatccacgtttgttggt

SEQ ID NO: 1328 - DNA, 490 bp, Homo sapiens
  misc_feature 365: n = A,T,C or G
accagcacaccggcgccgtcctggactgcgccttctacgatccaacgcatgcctggagtggaggactagatcatcaattgaaaatgcatgatttgaacactgatcaagaaaatcttgttgggacccatgatgcccctatcagatgtgttgaatactgtccagaagtgaatgtgatggtcactggaagttgggatcagacagttaaactgtgggatcccagaactccttgtaatgctgggaccttctctcagcctgaaaaggtatataccctctcagtgtctggagaccggctgattgtgggaacagcaggccgcagagtgttggtgtgggacttacggaacatgggttacgtgcagcagccgcanggagtccagcctgaaataccagactcgctgcatacgagcgtttccaaacaagcagggttatgtattaagctctattgaaggccgagtggcagtttgagtattttggacccaagccctgaggtacc

SEQ ID NO: 1329 - DNA, 230 bp, Homo sapiens
actggccccaaagggagcttcaggcaccagggaagaccctaatttagtcccctccatctccaacaagagaatagtaggctgcatctgtgaagaggacaataccagcgtcgtctggttttggctgcacaaaggcgaggcccagcgatgcccccgctgtggagcccattacaagctggtgccccagcagctggcacactgagcacctgcactaaattactcaaaatgtgctg

SEQ ID NO: 1330 - DNA, 715 bp, Homo sapiens
  misc_feature 518, 614, 630, 638, 661, 684, 689, 693, 704: n = A,T,C or G
ggtaccggaagaagcagctggcaaagcagctccctgcacatgaccaggacccttcaaagtgccatgagttgtctcccagagaggtgaaggagatggagcagtttgtgaagaaatataagagcgaagctctgggagtaggagatgtcaaacttccctgtgagatggatgcccaaggccccaaacaaatgaacattcctggaggggatagaagcaccccagcagcagtgggggccatggaggacaaatctgctgagcacaaaagaactcaatattcctgctattgctgtaaactgagtatgaaagaaggtgacccagccatctatgccgaaagggctggctatgataaactgtggcacccagcttgttttgtctgcagcacctgccatgaactcctggttgacatgatttatttttggaagaatgagaagctatactgtggcagacattactgtgacagcgagaaaccccgatgtgctggctgtgacgagctgatattcagcaatgagtatacccagcanaaaaccagaatttggcacctgaaacacttctgctgccttgactgtgatagcatttctagctggggagatatacctgatggtcaatgacaagccccngtgcaaacccttgctnttttgaanaatcacccttggggtgtgtcaanggatgcccccaatgcccctcgancccanaaantgcagcgggtngacctatacaa

SEQ ID NO: 1331 - DNA, 708 bp, Homo sapiens
  misc_feature 387, 424, 489, 542, 620, 626, 636, 639, 664, 670, 681, 687: n = A,T,C or G
ggtacctggaggctcaacggcagaagcttcaccacaaaagcgaaatgggcacaccacagggagaaaactggttgtcctggatgtttgaaaagttggtcgttgtcatggtgtgttacttcatcctatctatcattaactccatggcacaaagttatgccaaacgaatccagcagcggttgaactcagaggagaaaactaaataagtagagaaagttttaaactgcagaaattggagtggatgggttctgccttaaattgggaggactccaagccgggaaggaaaattcccttttccaacctgtatcaatttttacaacttttttcctgaaagcagtttagtccatactttgcactgacatactttttccttctgtgctaaggtaaggnatccaccctcgatgcaatccaccttgtgttttcttanggtggaatgtgatgttcaacaacaaacttgcaacaaactggccttctgtttgttactttcaaaanggccacatgatacaaattagagaattcccaccgcccaaaaaaaagttcctaantatgtttaaaatatgtcaaagctttttaagctttgtcacaaaaagaatggctttggttttcctaagtcattcaaaaangtattntaaaattatntanaattgggataaaaagcctttgcatngtttantaatgtttacnaatttnaatatttcattcctgcccaaa

SEQ ID NO: 1332 - DNA, 331 bp, Homo sapiens
  misc_feature 207, 214, 217, 246, 255, 257, 261, 264, 276, 287, 296, 302: n = A,T,C or G
acctagaagagaggcgggtcaaagaagtagtgaagaagcattctcagttcataggctatcccatcaccctttatttggagaaggaacgagagaaggaaattagtgatgatgagtcagaggaagagaaaggtgagaaagaagaggaagataaagatgatgaagaaaaacccaagatcgaagatgtgggttcagatgaggaggatgacngcggttnggntttagaagaaagaaaacttagaagatcanagagaaatncnttgntcngggaagaacttnaccagacccancctattttngaccanaaaccccttgttgacatcacccaagaggg

SEQ ID NO: 1333 - DNA, 549 bp, Homo sapiens
  misc_feature 308, 359, 398, 451, 458, 496, 522, 523, 533, 538: n = A,T,C or G
ggtacgagcaactcaagggcgagtggaaccgtaaaagccccaatcttagcaagtgcggggaagagctgggtcgactcaagctagttcttctggagctcaacttcttgccaaccacagggaccaagctgaccaaacagcagctaattctggcccgtgacatactggagatcggggcccaatggagcatcctacgcaaggacatcccctccttcgagcgctacatggcccagctcaaatgctactactttgattacaaggagcagctccccgagtcagcctatatgcaccagctcttgggcctcaacctnctcttcctgctgtcccagaaccgggtggctgagttccacacggagttggancggctgcctgccaaggacatacagaccaatgtctacatnaagcacccagtgtccctggagcaataccttgatggagggcagctacaacaaantgttccntggccaagggtacattcccgccgagaagctacaccttnttcattgacattctggtcgacacttnnaagggatgangatcntggggtgcatc

SEQ ID NO: 1334 - DNA, 628 bp, Homo sapiens
  misc_feature 541, 609: n = A,T,C or G
actttgatgactgcatgcagcttttggcgcagacattcccgtttgtagatgacaatgaggtttcttcggctacgtttcagtcacttgttcctgatattcccggtcacatcgagagcccagtcttcattgctactaatcaggctcagtcacctgaaacttctgttgctcaggtagcccctgttgatttagacggtatgcaacaggacattgagcaagtttgggaggagctattatccattcctgagttacagtgtcttaatattgaaaatgacaagctggttgagactaccatggttccaagtccagaagccaaactgacagaagttgacaattatcatttttactcatctataccctcaatggaaaaagaagtaggtaactgtagtccacattttcttaatgcttttgaggattccttcaacagcatcctcttcacagaaaaacccaaccagttgacagtgaactcattaaatcagatgccacaagtcaacacagaattttggggatgaattttattctgctttcattagcttgagcccantattcagcaaccagcatgcccctacctgcttacttttaagccattcactcttttgaaacttttaaaangggccccatggatgttctg

SEQ ID NO: 1335 - DNA, 710 bp, Homo sapiens
  misc_feature 452, 516, 542, 560, 623, 664, 682, 701: n = A,T,C or G
acgcgggggcccactctgcgcttcaccatggctttcattgccaagtccttctatgacctcagtgccatcagcctggatggggagaaggtagatttcaatacgttccggggcagggccgtgctgattgagaatgtggcttcgctctgaggcacaaccacccgggacttcacccaactcaacgagctgcaatgccgctttcccaggcgcctggcggtccttggcttcccttgcaaccaatttggacatcaggagaactgtcagaatgaggagatcctgaacagtctcaagtatgtccgtcctgggggtggataccagcccaccttcacccttgtccaaaaatgtgaggtgaatgggcagaacgagcatcctgtcttcgcctacctgaaggacaagctcccctacccttatgatgacccattttccctcatgaccgatcccaagctcatcatttngagccctgtgcgccgctcaaatgtggcctggaactttgaaaaagttcctcataagggcccgganggagaagccctttccgacgctacagnccgcaccttccaaccatnaaacatttgagcctgacattcaagcgccctccttaaaagttgccatattagatgtgaaactgnttaaacaaacagaatcttcctactccttcccagtcctgaangaagcctttaggatgcancaatgcccttcaaggaaanacttggttg

SEQ ID NO: 1336 - DNA, 358 bp, Homo sapiens
ggtactgctgctgctgctgctgctgctgctgctgctgctaaagttccagcaaaaaagatcaccgccgcgagtaaaaaggctccagcccagaaggttcctgcccagaaagccacaggccagaaagcagcgcctgctccaaaagctcagaagggtcaaaaagctccagcccagaaagcacctgctccaaaggcatctggcaagaaagcataagtggcaatcataaaaagtaataaaggttctttttgacctgttgacaaatgtatttaagcctttggatttaaagcctgttgaggctggagttaggaggcagattgatagtaggattataataaacattaaataagcaaaaaaaaaaaaa

SEQ ID NO: 1337 - DNA, 509 bp, Homo sapiens
  misc_feature 29, 333, 430, 457, 471: n = A,T,C or G
ggtacagagagatccccgaggggaatganaaagccctgaagagggcagtggcccgagtgggacctgtctctgtggccattgatgcaagcctgacctccttccagttttacagcaaaggtgtgtattatgatgaaagctgcaatagcgataatctgaaccatgcggttttggcagtgggatatggaatccagaagggaaacaagcactggataattaaaaacagctggggagaaaactggggaaacaaaggatatatcctcatggctcgaaataagaacaacgcctgtggcattgccaacctggccagcttccccaagatgtgactccagccanccaaatccatcctgctcttccatttcttccacgatggtgcagtgtaacgatcactttggaagggagttggtgtgctattttttgaagcaaatgtggngatactgaaaattgtctgttcagtttncccatttgttttgngcttcaaaaggatcccttcctacctttgctttttttcc

SEQ ID NO: 1338 - DNA, 544 bp, Homo sapiens
  misc_feature 66, 98, 138, 170, 186, 207, 241, 250, 252, 264, 274, 290,304, 322, 337, 368, 391, 393, 406, 419, 441, 451, 457, 479,491, 495, 525, 531, 533: n = A,T,C or G
gggacttttttttttttttttttttttttttcatgtatacttcatttattttattaataagtaaanccctgtaaggggagcctttgcctaatcctccnactctgattcatcttcatcttgactaatctggaagtaacnaagttcgtaggtctccttgtcaaatgcaaccnctcgaagccaatcacnaaaattgttcttcttaaggtntttcttggtaaggtatttcaaataccttttaaanaactgtttntnaaaaacaactgngattttattnttgaagcgttcaatgngaacaacattcccnaaatttccagttttgccnttgactttaaccttntcccgtaaaaattgctcctattttaaaacanaaaaaaatgcaaaactagggaananaaccctaaatttncctagggaaggtnccttgcccgggcgggccgttcnaaagggcganttccancccactggcgggccgttactantgggatcccaanctcngtaccaaagccttgggcggtattcatgggncataancntgtttcctggg

SEQ ID NO: 1339 - DNA, 601 bp, Homo sapiens
  misc_feature 205, 220, 268, 331, 449, 459, 467, 482, 498, 504, 529, 543,559, 578, 584: n = A,T,C or G
acttttttttttttttttttttttttttttttggggctccaaagatcctttactgagatccacttgaaacacttcggtccttaacttgttaactgagttgacaggctgatggctgatctaggtaaaggtttcacggtagcaaaaacacttcctgcctataatacatcaaaacaggttcctgaatgtgtgtgaatatcatcaaggnctctgtcccatcttnttcagggttcgattaagctcctcaaatttgtggatctgacggatgaanaaatccccataacgcctggcgaccttggtgtccgcgatgtggatcatgtccttatcaatgtanaagtcaacctctgaggctgactgaaattcaccatccagggctgagataccgctggtccacacgaggttcttcatcttgtgtttgaagacaagaagctggatccggaactcctgctctntgaggtccangaagccanccagcttggccccangcatggtggtgtaaancttcangaaactgccggatggttgaaagctnggccttgctgcttnaccctcgggccgggancaccctttagggcgaattncacacnctggcggcccgttctta

SEQ ID NO: 1340 - DNA, 294 bp, Homo sapiens
acgcggggctcttcctaagccggcgctcggcaagttctcccaggagaaagccatgttcagttcgagcgccaagatcgtgaagcccaatggcgagaagccggacgagttcgagtccggcatctcccaggctcttctggagctggagatgaactcggacctcaaggctcagctcagggagctgaatattacggcagctaaggaaattgaagttggtggtggtcggaaagctatcataatctttgttcccgttcctcaactgaaatctttccagaaaatccaagtccggctagtacc

SEQ ID NO: 1341 - DNA, 707 bp, Homo sapiens
  misc_feature 488, 552, 594, 605, 669, 680, 689: n = A,T,C or G
ggtacgaggactggatggaaaggtgatttgtggctcccgagtgagggttgaactatcgacaggcatgcctcggagatcacgttttgatagaccacctgcccgacgtccctttgatccaaatgatagatgctatgagtgtggcgaaaagggacattatgcttatgattgtcatcgttacagccggcgaagaagaagcaggtcacggtctagatcacattctcgatccagaggaaggcgatactctcgctcacgcagcaggagcaggggacgaaggtcaaggtcagcatctcctcgacgatcaagatctatctctcttcgtagatcaagatcagcttcactcagaagatctaggtctggttctataaaaggatcgaggtatttccaatccccgtcgaggtcaagatcaagatccaggtctatttcacgaccaagaagcagccgatcaaagtccagatctccatctccaaaaagaagtcgttccccatcangaagtcctcgcagaagtgccaagtcctgaaagaatggactgaagctctcaagttcaccctttanggaaaagttattttgtttacatttatttataaggggatttgnggatgtctgtnaaagtgtacctaaggaaagataattcaacccttctaattcaaaatgggatctggattactatgntaaattcacancaggtaaanaataatattaaattttgt

SEQ ID NO: 1342 - DNA, 644 bp, Homo sapiens
  misc_feature 36, 245, 424, 548, 625: n = A,T,C or G
ggtacttttttttttttttttttttttctggacagnggttttattggtaaagatataagacatattggctctattaaaaactcaggtaataaagcactaagcttgatttttgtattgctacagtctctttcttctaaggggaagaaaatctccccaagaataggatgctacctgaggaattatgccgaataaagaaaaggaatggatggtcggcagtgaaattttcttcgggcatcaacatgcanaaagttgcgatgcctgctgtggcagctgccgcctctgttccctcttcattcacttccacaaatgacttgtggacaatttttgatataaaaatatctctggctcctgacatgccagacagatcagccttgctactgttaaagagatcctgcacacctaggcgggcgaggtcggagttganagtgtaactctcttccagtttgaacctgggcaagctgacattaacttcaatgaaatcgagattctcaggtttaagtccctcatgcaacttttccaaagtcaactgttcctcaatctttcttcangcccgtggactcgtcctcaatgtcatccggcacaaggatgaccttctgagctcctcgccttgggtaaaggcaagttnccagcacaccggcccttaa

SEQ ID NO: 1343 - DNA, 712 bp, Homo sapiens
  misc_feature 498, 575, 581, 626, 670, 676, 694, 696: n = A,T,C or G
ggtacagttgaaataactggaacaaattatttttggtgtgtgtgacaattctgtttttaatgctatttgaacaagtgggccattagccagatttgtctttttgttgtaaaacaaaatttgactaattttacatgtttataaatcttatgctctcactgtttgtttttatttaaattacaattttatctgtttcctgacattgtctcctatatatttctattattaattgcaaaaacatagaaatggaaattttgctatcaacaataaaatttttttaaagtagtgagtgctattttggagttccaaattttcagtaggaagtatctaaaactttttttaatacgtgccattatctatagaaaacattacttcaggttgtgagattgagttgcatttctggatggactgatgaatttatcccgacatgaagaagattggcatattagctttaaaaatttttaaagattggattttttttagtataagccactttctaangattatagagaaatgtttcacctccaatgcatagcaaaaatagtggtgttagaaaagaaaatagggttacatttaanggaagngcttttaaaaaaccagaaaccagacttttaaaatttaaatttgtnggacaccctttttaaaaatttgaatccaaagatttttattttanattttncaattacccccctttttntngataaagtttttaaac

SEQ ID NO: 1344 - DNA, 710 bp, Homo sapiens
  misc_feature 549, 556, 678, 683, 692: n = A,T,C or G
acgcgggggacgccgagacaaaccggacccgcaaccaccatgaacagcaaaggtcaatatccaacacagccaacctaccctgtgcagcctcctgggaatccagtataccctcagaccttgcatcttcctcaggctccaccctataccgatgctccacctgcctactcagagctctatcgtccgagctttgtgcacccaggggctgccacagtccccaccatgtcagccgcatttcctggagcctctctgtatcttcccatggcccagtctgtggctgttgggcctttaggttccacaatccccatggcttattatccagtcggtcccatctatccacctggctccacagtgctggtggaaggagggtatgatgcaggtgccagatttggagctggggctactgctggcaacattcctcctccacctcctggatgccctcccaatgctgctcagcttgcaagtcatgcagggagccaacgtcctcgtaactcaacggaaggggaacttctttatgggtggttcagatggtggctacaccatcttggtgangaacaangccacctctgtgccgggaaagacatcacatacctttagcgcttcttacaatgtaactgctttaatcatattaacctgaagttgcaagtttaaacacatgttggttgggggggtctttctggngcccnaacttttangcactttttcaaaattta

SEQ ID NO: 1345 - DNA, 710 bp, Homo sapiens
  misc_feature 529, 575, 603, 645, 651, 691, 705: n = A,T,C or G
accacatatcccatttgacttctatttgtgtgaaatggcctttccccgggtcaagccagcacctgatgaaacttccttcagtgaggccttgctgaagaggaatcaggacctggctcccaattctgctgaacaggcatctatcctttctctggtgacaaaaataaacaatgtgattgataatctgattgtggctccagggacatttgaagtgcaaattgaagaagttcgacaggtgggatcctataaaaaggggacaatgactacaggacacaatgtggctgacctggtggtgatactcaagattctgccaacgttggaagctgttgctgccctggggaacaaagtcgtggaaagcctaagagcacaggatccttctgaagttttaaccatgctgaccaacgaaactggctttgaaatcagttcttctgatgctacagtgaagattctcattacaacagtgccacccaatcttcgaaaactggatccagaactccatttggatatcaaaagtatttgcagagtgccttancaagccattccgacatgcccgcttggttcgaaggaaaaatgctttntcaatcccacagttaaagttctcatcanactactgaaaggacttgaggattcgttttcctggcttttgancccctnacacccttggatcctttgacctactaggccattttgctgngatgaacaaccccnccaaa

SEQ ID NO: 1346 - DNA, 571 bp, Homo sapiens
  misc_feature 552, 563: n = A,T,C or G
actcaaaggtgatatttgcttttttcaatgcttcaggggaaaaatccttttctttacaaacttccatcagtttaggagtcagtctgtatgcctttagtgagagagatccttgggcagtttttatgggatcataaatgagaacgacagattcttcaatggcatgctggtaactaaactgagagtccaggagtgcccgggtaacgaatgagccatagtatgtggactgataccagcccacgtgaagatgatcaatgtttacatggcgaaggctccgcatcatttccatctgatattggacttcatcaaagtcagcatcatcctctgtgtgctgagggaaaggaaagcagttggtaatttcaagccgatcttctacaaccagacccaaaagcactccttgaacaacttcagttccttgtccttcttcttgataatgtttgattatctttaataccacaaggccatctatctgcacttgcttcacggctgaatctcccgagcccgcctttgcctttgccttttcctgcttgcgcccgccggtggagctggaaaaangtgggcagtanagcccggt

SEQ ID NO: 1347 - DNA, 310 bp, Homo sapiens
  misc_feature 148, 150, 165, 171, 174, 186, 196, 209, 223, 228, 233, 265,267, 274: n = A,T,C or G
ggtacgttttgccaacctatgaaatggccgtgaaaatgcctgaaaaagaaccaccacctccttacttacctgcctgaagaaattctgcctttgacaataaatcctataccagctttttgtttgtttatgttacagaatgctgcaattnanggctcttcaacttgntttganatnaaatatggtggnttttgttaancaatttattttcnaacactaaagagcnttttnacatntgtttaaacgctttttgtttttttgttaaagncntttacanttttaatagttttttgaagacaaatcttagggtaaa

SEQ ID NO: 1348 - DNA, 339 bp, Homo sapiens
  misc_feature 33, 47, 58, 89, 132, 162, 171, 181, 202, 211, 266, 320: n = A,T,C or G
ggtacttttttttttttttttttttttttgganacggagctttgctnttgttacccangctggagtgcaatggtgtgattttggctcancgcaatctcctccttccaggtttaagcaattctcctgactcancctcctgagtagctgggattaaaagcatgngccattacncctggctaantttttttttttttttttttgnatttttaanaaaaacagggtttctccatgttggtcaggctggtctcaaactcccgacctcaggngatctgcctgccttggcctcccaaagtgctgggattacaggcgtgagccactgngcccgcccaccagcccggt

SEQ ID NO: 1349 - DNA, 707 bp, Homo sapiens
  misc_feature 25, 242, 305, 315, 323, 329, 353, 391, 402, 414, 427, 524,582, 608, 612, 616, 624, 625, 640, 658, 661, 683, 688, 698,706: n = A,T,C or G
ggtacaaatagttactgaaatgacnagacccttgtttgcacagcattaataagaaccttgataagaaccatattctgttgacagccagctcacagtttcttgcctgaagcttggtgcaccctccagtgagacacaagatctctcttttaccaaagttgagaacagagctggtggattaattaatagtcttcgatatctggccatgggtaacctcattgtaactatcatcagaatgggcaganatgatcttgaagtgccacatacactaaagtccaaacctatgtcaagatggggggtaaaatccnttaaagaacnggaaaaantatttntaagatgataagcaaatgtttcancccaatgtcaacccagttaaaaaaaaaattaatgctgngtaaaatggtngaattagtttgnaaactatataaanacatatgcagtaaaaaagtctgttaatgcacatcctgtgggaatggaggtgttctaaccaaattgccttttcttgttatctgagctctcctatattntcatactcagataaccaaattaaaaagaattagaattttgattttttaatacccttanatttaaaactcttttaacttttcttntttntggngataattnngaaaaatagtttatnggatcttcaatggcctcntgngtcattgttttaaaaaaatcanttttnacttttaccntggccttna

SEQ ID NO: 1350 - DNA, 715 bp, Homo sapiens
  misc_feature 33, 36, 132, 200, 241, 252, 265, 437, 446, 487, 500, 514,537, 545, 562, 577, 606, 659, 666, 687, 693, 694, 701: n = A,T,C or G
ggtactttttttttttttttttttttttttttngcngataaacagacatgtttaatgatagcttgctcttcacagagatgtctacagagacttttaatctataatccaggagtatataaccatgcagcacanaccaattagccaaatgcaaaataaactagattcttaccacaactatcctataaacactgcaactattntttccaaaaggaccctaatcttatgtgaaaacacctactgngggggaaccanaaacctagctatntggccaaaaggaaaaaatagcaattcagtggttaattggtgaaagcaggaaatgtatgccctttactgtgctgctgttgctgctgttgttgctgctgttgttgctgctgttgccgctgcggcaggtgctgctgctgctgctgctgctgctgctttggtcttcttagttttgntctttttgnctctcttcttcagcccatccattgttacttctaagggaggnttgaataaaccanctgaaacttattcnccttccttggagctcaaccacantgctgatnttctttttcccatcggnagctcggaacaaaancttgttgtcttgcgggctcaaaacccctnccaaatacctggcccgggccgggccggttctaaaagggcggaattcccaccanacttggngggccggttacttatttgggntcccannctcgggnaccaaaccttgggg

SEQ ID NO: 1351 - DNA, 332 bp, Homo sapiens
  misc_feature 261, 267, 277, 279, 307, 326: n = A,T,C or G
gatacacagagtaaaatgtttttcttttttcaggaccttgaactgaatcttgcactgctttggtttctatctaggaagctcagcgacagtagagtctgtagaggcggccactgatttcacacaccccggagagggactcacgggtagcacaacggccagttcggcaatagcaggtggctcttgcctgagaacctgaggttctaagagcagagagtccatttcctgcaaaggagatagcaaggtcctggttgtcttccccanactgcntctgggttgnancctcatcagctctttcctggagtgactnaagcctggggctgcatggncaccac

SEQ ID NO: 1352 - DNA, 643 bp, Homo sapiens
  misc_feature 484, 491, 553, 554, 564, 574, 580, 597, 608, 614, 626, 640: n = A,T,C or G
ggtacaggagatctcatttgggacaactaaggataaaatgctggtcatcgagcagtgtaagaactccagagctgtaaccatttttattagaggaggaaataagatgatcattgaggaggcgaaacgatcccttcacgatgctttgtgtgtcatccggaacctcatccgcgataatcgtgtggtgtatggaggaggggctgctgagatatcctgtgccctggcagttagccaagaggcggataagtgccccaccttagaacagtatgccatgagagcgtttgccgacgcactggaggtcatccccatggccctctctgaaaacagtggcattgaatcccatccagactatgaccgaagtccgagccagacaggtgaaggagatgaaccctgctctttggcatcgactgttttgccaaggggacaaaatgatattgaagcaacagcatgtcatagaaaaccttgattggcaaaaagcaacaagatntctcttnccacacaaatggttataatgatttttaaagattgatgacattcgtaagccctggagaatctnnaagaatgaanaacatttganaaaaanctttgttccaagatccnctttttgtganttaaantaaaatgggatngcctccgtggtgcntct

SEQ ID NO: 1353 - DNA, 583 bp, Homo sapiens
  misc_feature 485, 525, 570: n = A,T,C or G
acttctcattttcattccttcaaagctttctttcagcataggctccttttgttcatcctcctcctcttcctcagacaatggtgaaaaggcaaacctctggttgtttgcagatggtcgccagagaaccatgatgacaaagaggatcatggagaacagcaagcgccagatggcatcgtctacccacagctcccgccagtccgactgacatgtcactattctgaacttcatggttgtccagatgataaacacaatggatgctgccactgccaaaataagcgtgttggtgaaatgccgatacaaagagagttttacaatgttcctccgaagttttaatagcttcattgtttgagtcaggctaataaatatccataaaataacacaggcgtcaactgctgagagggccaggtttactatcagagtcaaggggataagaaaaatacccagtaactctgaggaccccttccatgccagagaacaaaagatanagggctcctgctactacaaccttatgaagagtgctcccangcgtgggcttgacgatgcccatatcccagaccccgcgtaccttcngcccgggaccacg

SEQ ID NO: 1354 - DNA, 561 bp, Homo sapiens
  misc_feature 447, 532, 549: n = A,T,C or G
actgtgtgcagcagctcaaggaatttgatgggaagagcctggtctcagttaccaaggagggtctggagctgcctgaggatgaggaggagaagaagaagatggaagagagcaaggcaaagtttgagaacctctgcaagctcatgaaagaaatcttagataagaaggttgagaaggtgacaatctccaatagacttgtgtcttcaccttgctgcattgtgaccagcacctacggctggacagccaatatggagcggatcatgaaagcccaggcacttcgggacaactccaccatgggctatatgatggccaaaaagcacctggagatcaaccctgaccaccccattgtggagacgctgcggcagaaggctgaggccgcaagaatgataaggcagttaaggacctggtggtgctgctgtttgaaaccgccctgctatcttctggcttttnccttgaggatccccagacccctccaaccgcatctatcgcatgatcaagctaggtctaggtattgatgaaaatgaagtggcagcanaagaacccaatgctgcngtttctgattga

SEQ ID NO: 1355 - DNA, 544 bp, Homo sapiens
  misc_feature 282, 339, 342, 434, 497, 511, 526, 533: n = A,T,C or G
acacgtcaaataagaaactactcttagcacagaaataacagaaaatatgctcacatcctatggtgtgaggcatggtgggccactctccacatagagcgcattctttgccactggtggctaatgtattgtcactattaggtgcaccagtaagaggaatacaccatgaagacagcttggctttcaacttctggacattgataagtggtaagagaaaaatcagaaattcagcaaaaccatgccagagaagttccctattcatgtattcaaagccaacttcacgtntgttttgaggcttgcaaaatacagaatgaatacctaggagacgttctgtcaaagttngcnaactttcccctctgaaggaaaatcaaaaaattaatcagcccacctaatttcaaaagtccaatcacaaaattcacacactgcttgactttccnaaatgatgctaaatgatggttttcgaaacaaatcattagcatcgttcttctaaccacctgccncaatttgtaccttnggccgggaacccccntaagggngaatttccctc

SEQ ID NO: 1356 - DNA, 443 bp, Homo sapiens
acgcgggggggcctccatcagcaagctccagtgctacgtgtccctggcattttaggtgtcggttgggtaggcagtcatggatcaggtaatgcagtttgttgagccaagtcggcagtttgtaaaggactccattcggctggttaaaagatgcactaaacctgatagaaaagaattccagaagattgccatggcaacagcaataggatttgctataatgggattcattggcttctttgtgaaattgatccatattcctattaataacatcattgttggtggctgaatacattttggaagagagtttttcatcttagagattggtgaacaagtgtgagggtgtgagaaactcacagaatacaaatttgcctgtatgttttgtgggttttttttttcctttcaagatgttttctatttctaaattaaagtaattccaaaaaaaaaaa

SEQ ID NO: 1357 - DNA, 667 bp, Homo sapiens
  misc_feature 662: n = A,T,C or G
accttttggtgccagcgtttcaaggagccctcaccatgaaacaagtcaaccccagcaagcgtctagatcatttgcagcgggctcgagaacactttataaactacttaactcagtgccattgctatcatgtggcagagtttgagctgcccaaaaccatgaacaactctgctgaaaatcacactgccaattcctccatggcttatcctagtctcgttgctatggcatctcaaagacaggctaaaatacagagatacaagcagaagaaggagttggagcataggttgtctgcaatgaaatctgctgtggaaagtggtcaagcagatgatgagcgtgttcgtgaatattatcttcttcaccttcagaggtggattgatatcagcttagaagagattgagagcattgaccaggaaataaagatcctgagagaaagagactcttcaagagaggcatcaacttctaactcatctcgccaggagaggcctccagtgaaacccttcattctcactcggaacatggctcaagccaaagtatttggagctggttatccaagtctgccaacctttgacgggtgagtgactggtatgagcaacatcggaaaatatggagcattaccggatcagggaattacccaaggcagcccccagaaggaattcagaaaaacngctca

SEQ ID NO: 1358 - DNA, 379 bp, Homo sapiens
acgcgggggcagttttcaactgacctctggacgcagaacttcagccatgaaggtaacaggcatctttcttctcagtgccttggccctgttgagtctatctggtaacactggagctgactccctgggaagagaggccaaatgttacaatgaacttaatggatgcaccaagatatatgaccctgtctgtgggactgatggaaatacttatcccaatgaatgcgtgttatgttttgaaaatcggaaacgccagacttgtatcctcattcaaaaatctgggccttgctgagaaccaaggttttgaaatcccatcaggtcaccgcgaggcctgactggccttattgttgaataaatgtatctgaatatcccaaaaaaaaaaaaa

SEQ ID NO: 1359 - DNA, 434 bp, Homo sapiens
acgcgggcaatgatgggctttatgatcctgactgcgatgagagcgggctctttaaggccaagcagtgcaacggcacctccacgtgctggtgtgtgaacactgctggggtcagaagaacagacaaggacactgaaataacctgctctgagcgagtgagaacctactggatcatcattgaactaaaacacaaagcaagagaaaaaccttatgatagtaaaagtttgcggactgcacttcagaaggagatcacaacgcgttatcaactggatccaaaatttatcacgagtattttgtatgagaataatgttatcactattgatctggttcaaaattcttctcaaaaaactcagaatgatgtggacatagctgatgtggcttattattttgaaaaagatgttaaaggtgaatccttgtttcattctaagaaaaaaaaa

SEQ ID NO: 1360 - DNA, 390 bp, Homo sapiens
ggtacaccagactttcttgtaaacttcagccacaggaaggtccaaactaatgattttattgttcactagaagctccatgccactgtcatcttccaggagggccactaagtcacagtcctggcaaatcttgttctttatatccctcatcagcggcccgatgcctggctcattgctgctatacgggttcccaggcatcctgccctgtaagaagtcttcttgttggggatccttctccagggtcacaaagaactcagtgacttcattctcctcaggataaatgatgctgcagagcctctcgaagatgaacaccggggtccggtagtcatccagattgtagcgcttggctgtctcaatgcacacagccatgaaggccttggtttctgattctgt

SEQ ID NO: 1361 - DNA, 226 bp, Homo sapiens
  misc_feature 11, 64, 76, 130, 144, 164, 180, 197: n = A,T,C or G
cgaggtacttntttttttttttttttttttggggtctcactctgtcacccaggctggagggcantggcgggatctnatctcactgcaacctctgcctctcagattcaagcgattctcctgcctcagcctnctgagtagctgaanactacaggcatgtgccaccncacccagctaattttntgaatttttagtaaaanacggggtttcacattgttagccaagatgg

SEQ ID NO: 1362 - DNA, 434 bp, Homo sapiens
  misc_feature 330, 372, 395, 401, 406, 408, 413: n = A,T,C or G
ggtacttgaagctgatgcagaaaaataaaaatttaatataattaaaagcaatttatatatcatcatgaaataaagagagatttgaaactatgtagtcaacagaggacaaaaaaaaatctctcaagcaagagaatttctgatcaaatctgtcatatcactgctgcggaaaaggaccattaaaggcaatacacatcagtgcctttcttaaatgtatagactcaaaataggtgtttttttgaggcactaagaaaaaagattcctctaagcaatcaaaaatcagcatttgagatttaatcactaaatccaaaatgagatcagcaaaaccagatnctagtaaggcactaggctcacaaaattgacctttggagaaanagagatgcccaagagtaatattncttcanaatgngngaaanctgaaaactttatcccctttt

SEQ ID NO: 1363 - DNA, 378 bp, Homo sapiens
  misc_feature 322, 353, 376: n = A,T,C or G
ggtacatagacaagtttcttgtaagacagaaaacagagaaatccacagtaactctaacacatcccttaaggaataagcatgtatttgtaggaagcaaacaaagctttccatagagaaaccactttcacaggatgattaggtggacctgcaatgaagaaaatacatttcaaaagatgggttcagacttacaccaagttttcactgaaatacttaaaaaaaaaagacccttctctgttcaaaagaattaaaaaaaatacatcccggattaaataaatttcaggaaaaggtcaagtcctactcagagacatacatttgcaaattnatataaatttttaaggttggccaccaaaatncctatttgggacctccttaaaanat

SEQ ID NO: 1364 - DNA, 575 bp, Homo sapiens
  misc_feature 403, 411, 472, 498, 511, 515, 523, 557: n = A,T,C or G
ggtactggccacaccaatctcaggaccagcattaatatgaactccacaatctgtctcccgtgatatggaactgccaactgtgtttgtgatccccacagttaaagctcctctctccttacagtaacgaagacccatcaaagtatctgctgtctcacctgattgactaaggaaaaagcaaacatcatctcgaaagactggtgtgtttctgtccaggaagtcacttgctagttccaccatcacaggcaactcagtcagctcctcaagaacttgacgtgttgctacaccagcatggtaacttgttccacaagcaataagaatcaaacgccggcatctctggatctcctttatgtgatccttcaaaccacccaaattcacagtatagcatcaaagttgactcttcctntcattgtntcacgacagactctggctgctcaaatatttccttctgcataaaatgaactgaagttgcccntcatgatctgctgggagtttccatcnggaagtggtttgncagnctcgtccngggggtgatctccttcagttcgtttaaattcgantggatagaaaagaacgtt

SEQ ID NO: 1365 - DNA, 715 bp, Homo sapiens
  misc_feature 512, 593, 637, 647, 695, 700: n = A,T,C or G
ggtactggatgaagctgacgaaatgttaagccgtggattcaaggaccagatctatgacatattccaaaagctcaacagcaacacccaggtagttttgctgtcagccacaatgccttctgatgtgcttgaggtgaccaagaagttcatgagggaccccattcggattcttgtcaagaaggaagagttgaccctggagggtatccgccagttctacatcaacgcggaacgagaggagtggaagctggacacactatgtgacttgtatgaaaccctgaccatcacccaggcagccatcttcatcaacacccggaggaaggtggactggctcaccgagaagatgcatgctcgagatttcaccgtatccgccatgcatggagatatggaccaaaaggaacgagacgtgattatgagggagtttcgttctggctctagcagagttttgattaccactgacctgctggccagaggcattgatgtgcagcaggtttctttagtcatcaactatgaccttnccaccaacaggggaaaactatatccacagaaatcggtcgaggtggacggtttggccgtaaaggtgtggctattaacatggngacagaaagaaagacaagaaggactcttcgagacattgagaccntttacaacanccttccatttgaggaaatgcccctcaatggttgctgacctcatctganggggntggtcctggccaccc

SEQ ID NO: 1366 - DNA, 573 bp, Homo sapiens
  misc_feature 29, 63, 111, 157, 160, 162, 219, 241, 245, 303, 319, 345,348, 374: n = A,T,C or G
acttttttttttttttttttttttttttngccatgcaacaatgtcttttattatgtatgcggntttaaaattatttcttgaatctctccatacacaggcaaaaataagtgngttacttaacatactggaaattgcctaacttaatcattgcctaaanaananaaaattatccccaaaacgtgcttaaccaggaggccaatgcatttgccgacctccaanaacatggagatgaacgtgatanacanactgtccaccatctgaaccttcattcaccaccattcgataacccttattcaggcccanatcagcagcacatttnttgccaacaatcattaagtgtccaanaanactttcatcatcatcttctgccacanaaatctgggatatatgtttcttgggtatcaccaaaaaatgtgttggtgcttgaggggaaatgtcatggaaagcaaggcaccggtcatcctcaaaaatgattttggctggtatttccttgcggatgatcttcccaaaaatcgtgtcgcccccaggccgagcgacctgagccttggcaatcttattttgccattttgggct

SEQ ID NO: 1367 - DNA, 536 bp, Homo sapiens
  misc_feature 121, 286, 369, 461, 472, 473, 495, 502, 503: n = A,T,C or G
ggtacgcgggggagttcgacacaccatgccgactgtcagcgtgaagcgtgatctgctcttccaagccctgggccgcacctacactgacgaagaatttgatgaactatgttttgaatttggnctggagcttgatgaaattacatctgagaaggaaataataagtaaagaacaaggtaatgtaaaggcagcaggagcctctgatgttgttctttacaaaattgacgtccctgccaatagatatgatctcctgtgtctggaaggattggttcgaggacttcaggtcttnaaagaaaggataaaggctccagtgtataaacgggtaatgcctgatggaaaaatccagaaattgattatcacagaagagacagntaagatacgtccttttgcgggtagcagcaagttctccgttatataaagtttacttaaagatcgatatgacagcttcattgaacttcaggganaaattacattnnaatatttgcaggaaaagaagcnctggttnncatttggtcctgcccggcgggccgctttaaagg

SEQ ID NO: 1368 - DNA, 394 bp, Homo sapiens
  misc_feature 309, 316, 330, 375, 377, 385, 387: n = A,T,C or G
ggtacagacattttcaaagttgccagtgttactttaattggactgccttcgtaattcattgcctctgcttcaacaatgtgcaactcatcctttgcaccagcccctaaactgaccgttcttaaagataactggtgctcattttcatcattatccaccttaaagtgataatctttgtcggcctttagttcacaaccgaaaagatagttctggggcctcagggggctcatgtccatgtccatcgaatcttccatcgggtggcggcacgcacttaggtaggagagaaggccgacggagataaaagaacgctgntccaaanaacaacccgcgcangaaggaatcacaccagggccccgcgtacctgccccgggcggccgntnaaaagggncnaattcca

SEQ ID NO: 1369 - DNA, 391 bp, Homo sapiens
  misc_feature 243, 245, 249, 325, 347, 359, 365: n = A,T,C or G
acacacctttgtccactgggtaaattatattcattatgcccactgctgcagcacgcataaaccaacacccctgcatggctgaacagggcctaatctaggactgatgggagaagggcttgcaaaccaagatcaaggtgtttctccgctaatactgtctaccaagctgatccctacaaaaatgcatataaaagcaggcaagtttagctactgtgttgcaagagaaaccaggaccttgttaaatangntctntccattaccatttattctctcaagggaagcttaaaaaaaaaacaacaacacaacatcacattggtctggccacctnatgaattccaacaagcattagngtggcatttcanttgganaaggaaactttggggggaaaaaatac

SEQ ID NO: 1370 - DNA, 695 bp, Homo sapiens
  misc_feature 613, 622, 641, 652, 680, 686, 693: n = A,T,C or G
aagtgtaaaaaggtgaagccaactttggcaacgtatctcagcaaaaactacagctatgttattcatgccaaaataaaagctgtgcagaggagtggctgcaatgaggtcacaacggtggtggatgtaaaagagatcttcaagtcctcatcacccatccctcgaactcaagtcccgctcattacaaattcttcttgccagtgtccacacatcctgccccatcaagatgttctcatcatgtgttacgagtggcgttcaaggatgatgcttcttgaaaattgcttagttgaaaaatggagagatcagcttagtaaaagatccatacagtgggaagagaggctgcaggaacagcggagaacagttcaggacaagaagaaaacagccgggcgcaccagtccgtagtaatccccccaaaccaaagggaaagcctcctgctcccaaaccagccagtcccaagaaagaacattaaaactaggagtgcccagaagagaacaaacccgaaaagagtgtgagctaactagtttccaaagcggagacttccgactttcctttacaggatgaggcttgggcattgccttgggacagccctatgtaaaggccatgtgcccttgccctnaaaaactcntggcagtgctctttataanacacatttttncaacatttttcttaaggctttgcttcantttttntttgtantc

SEQ ID NO: 1371 - DNA, 493 bp, Homo sapiens
acgcgggagatgaatgccagaggacttggatctgagctaaaggacagtattccagttactgaactttcagcaagtggaccttttgaaagtcatgatcttcttcggaaaggtttttcttgtgtgaaaaatgaacttttgcctagtcatccccttgaattatcagaaaaaaaatttccagctcaaccaagataaaatgaatttttccacactgagaaacattcagggtctatttgctccgctaaaattacagatggaattcaaggcagtgcagcaggttcagcgtcttccatttctttcaagctcaaatctttcactggatgttttgaggggtaatgatgagactattggatttgaggatattcttaatgatccatcacaaagcgaagtcatgggagagccacacttgatggtggaatataaacttggtttactgtaatagtgtgctgttcatggaaaccgagggctgcatcttgtttatagtcatctttgtacc

SEQ ID NO: 1372 - DNA, 267 bp, Homo sapiens
  misc_feature 136, 187, 199, 230, 242, 248: n = A,T,C or G
cgaggtacagtttgcagaatatattcagaaaaacgtgcaactttataagatgcgaaatggatatgaattgtctcccacggcagcagctaacttcacacgccgaaacctggctgactgtcttcggagtcggaccccntattcatgtgaacctcctcctggctggctatggtggagcatgaagggccancgctgtattacntggactacctggcagccttggccaaggcccntttttgcagccnacgggntttggtggccttcctgact

SEQ ID NO: 1373 - DNA, 709 bp, Homo sapiens
  misc_feature 602, 629, 677, 688: n = A,T,C or G
acgcgggagatgaccttttgagtcagtgggctgggaaaggcagacccacccttaatctgggtgggcaccatcccctcagctgccagtgcagctagaaaaagcaggcagaagaaggtggaatgagcagaggtgccaagtcttctggccttcatctttctcccatgctgaatgcttcctgccttcaaatatcaggctccatgttcttcggcttttggactcttggacttacaccagtggtttgccagaggctctcgggccctcagcccgagactgaaggctgcactgtcagcttctctacttttgaggttttgggactcggactgatccactactggcttccttgctcctcaacttgcagacggcctatcgtgggacttcaccttgtgatcgcgtgtgtcaattccccttaataaactccctttcatatatacatgtatcctattagttctgtccctctggagaaccctgactaatacagcaggtatggagagaagtttattggggactgacttatggagagacagaaaaagtcacctcacctttctggctgaactcacgaatcacaaaatttttttagtttatgatgaaaactgggaattctntttcctggcatatacacaaaggatctnctttctatttgtgggctgcataagttaggggaacctttttgagaacanaaaaacatcanaacttttcctttattgaaagg

SEQ ID NO: 1374 - DNA, 362 bp, Homo sapiens
  misc_feature 266, 293, 301, 305, 310, 327: n = A,T,C or G
acgtgaggaaaggattccactcaagtataatcagcaatactctattgaatgaaaccataactccacttcactccctatggtaaatactaacattcaccacaggcttgaaattcctgtagcatcagtagaactatttttgaaaatattacaaacatgcttatgatgcataggaggatgaaaaaatttagactgtaaccgcacaccatatgtaatcccagcttttctaatttacaaccagtttaagaattacaatatccaaagaaagnatttttaaaatatatttgctcactggnaaagggantttntactnaaataaataggaaaaanttgcattttaatgtcacaattgaatttcaaaacct

SEQ ID NO: 1375 - DNA, 708 bp, Homo sapiens
  misc_feature 34, 36, 230, 279, 301, 478, 519, 531, 548, 554, 556, 573,580, 623, 631, 650, 660, 674, 681, 695: n = A,T,C or G
ggtacttttttttttttttttttttttttagtananacatggtttcgccatgttggctgggctggtctcgaactcctgacctcaagtgatctgtcctggcctcccaaagtgttgggattacaggcgaaagccaacgctcccggccagggaacaactttagaatgaaggaaatatgcaaaagaacatcacatcaaggatcaattaattaccatctattaattactatatgngggtaattatgactatttcccaagcattctacgttgactacttgagaanatgtttgtcctgcatggtgganagtggagaagggccaggattcttaggttgatctatctgtgggttatgacttcccacaatagccacccccggcccccaccagtccttttattggctctggatggaaaatccctacccatgtgatggtccctggtctctcctatagtttgaccaacagttgaccccaaaaggttatggncttcaccgttttaattatatccacgactaagatactggagncctgtattcttnaaaagtgtggggcttgnctattntnccaagaaccaaaatggnccttcgncttaaaaaaaaagtttgcttacttagggaaaattccctgcccnaccttaangaataaaagcttccttaanggaaaaaatntagaaaagcttganaaaagcntgggtgccctttgnaaaaaaaaaaggg

SEQ ID NO: 1376 - DNA, 715 bp, Homo sapiens
  misc_feature 543, 682, 687, 698, 705, 707, 709, 710: n = A,T,C or G
ggtactaaactagagcctgactgaataagaggaaagaatgtcccatagtgtcatttgggggaattgaagtgtctgatatgatgcctgaacttcagctacttagaataggaaagttagtgctttagaccagtgcatttcaaactttaatgcacatgcaaatcacccagggatcttgttaaaacacaagtcttacacaaaaattaactcaagatggattaaagactaagacctaaaaccataaaaaccctagaagaaaacctaggcaataccattcaggacataggcatgggcaaggacttcatgtctaaaacaccaaaagcaatggcaacaaaagccaaaattgacaaatggcatctaattaaatgaaagagcttctgcacagcaaaagaaactatcatcagaatgagcaggcaacctacagaatgggagaaaattttgcaatctatccatctgacaaagggctaatatccagaatctacaaagaactttaaacaaatttacaagaaaaaacaaaccccatcaaaaagtgggcaaagggatccnaacagacactttctcaaaagaagacatttatattggcccaaaaacattccgaagaaaagctcatcatcactgggtcatcagaagaagtgccaacccaaaaccccaattgagattaccatcttcatgccaggttagaaanggtantcattaaaganggaaacnancnnattct

SEQ ID NO: 1377 - DNA, 457 bp, Homo sapiens
  misc_feature 279, 295, 302, 314, 317, 329, 337, 343, 363, 370, 372, 375,383, 395, 402, 403, 406, 419, 455: n = A,T,C or G
acctatgtttcacctcctggaaatgaagaggaagaatcaaaaatcttcaccactcttgaccctgcttctctggcttggctgactgaggaggagccagaaccagcagaggtcacaagcacctcccagagccctcactctccagattccagtcagagctccctggctcaggaggaagaggaggaagaccaagggagaaccaggaaacggaaacagagtggtcattcccaccccggctggaaagcaccgcatgaaggagaaaagaacacgagaatgaaaggnaaagtggcccacctancctgaanagaatgaacggntcnagcacgaaattnagcgcctnaccccngaaatataaggcgactctcnagctctnanttncccattgngaattttccccnaacattnnaanttgggggcattanttccccactttggggcccactacccaccttttccanaa

SEQ ID NO: 1378 - DNA, 418 bp, Homo sapiens
  misc_feature 34, 227, 229, 266, 324, 340, 370, 378, 387, 402, 410: n = A,T,C or G
ggtacgtgtgcgtaacacccgaaccaggaatctnagctatgaccttttcacttagctacgctaaatgtcagtccaagataaaagaggagattaaagataaaactgaagattaaagagactgtgagtagtgacacattcaagtgaggctgttaatctaggtaagtgacactaagaacctgaagagaccctatgaacttttccctaggaggccgtttccaactggcctntngacaaacagctgatcatcaccgtttataatgatgggntcactccggagcttcgaacttattcatcctacatttaattgatcaccacgaatgggtnggcaagaccgtgtcanaccttcaagggaactctcctttcccacaancccccaanctttttttncaaaagtccctctgntttaaagncaaaaaag

SEQ ID NO: 1379 - DNA, 340 bp, Homo sapiens
  misc_feature 159, 167, 216, 226, 248, 286, 292, 297, 312, 331: n = A,T,C or G
aattcgcccttagcgtggtcgcggccgaggtaccaagaatttcataaatttgttttcagtgaactgctttttgctatggtaggtcattaaacacagcacttactcttaaaaatgaaaatttctgatcatctaggatattgacacatttcaatttgcagnttcttttngactggatatattaacagttcctctgaatggcattgatagatggttcanaagagaaacncaatgaaataaagagaatattnattcatggcgattaattaaattatttgcctaacttaanaaaacnactgngcgtaactctcagtntgtcgcttaactccatttnacatgaggt

SEQ ID NO: 1380 - DNA, 710 bp, Homo sapiens
  misc_feature 542, 612, 659, 700, 701: n = A,T,C or G
actgcagctaaaccagcggcttcaataacaagtaagcctgctacacttacaacaactagtgcaaccagtaagttgatccatccagatgaggatatatccctggaagagagaagggcacagttacctaagtatcaacgtaatcttcctcggccaggacaggcccccatcggtaatccaccagttggaccaattggaggtatgatgccaccacagccaggcatcccacagcaacaaggaatgagacccccaatgccacctcatggtcagtatggtggtcatcatcaaggcatgccaggataccttcctggtgctatgcccccgtatgggcagggaccgccaatggtgcccccttaccagggtgggcctcctcgacctccgatgggaatgagacctcctgtaatgtcgcaaggtggccgttactgatcttacttcatccagtctaataggttttggagattaaaccttttctcaacttgtgctgtttatatagccaagcttccgtcaataaggctttcattgtgactttaacaaacattatcttnccacataccaaggaactattgggacatttattttacattgggaaaaattatttggaattaataaaagcanggaactttttcctggaagtttgccaatttatactgggatggggttcntttttcatggttcatctagggtttttagaaatgaaatttannaaaattggg

SEQ ID NO: 1381 - DNA, 457 bp, Homo sapiens
  misc_feature 351, 389, 395, 428, 442, 455: n = A,T,C or G
acgcgggcctctggaagcatggagactgtggtgattgttgccataggtgtgctggccaccatctttctggcttcgtttgcagccttggtgctggtttgcaggcagcgctactgccggccgcgagacctgctgcagcgctatgattctaagcccattgtggacctcattggtgccatggagacccagtctgagccctctgagttagaactggacgatgtcgttatcaccaacccccacattgaggccattctggagaatgaagactggatcgaagatgcctcgggtctcatgtcccactgcattgccatcttgaagatttgtcacactctgacagagaagcttgttgccatnacaatgggctctggggccaagatgaagacttcagccantgtcancgacatcattgtggtggccaaagccggatcagnccccagggtggatnatgttgttgaaantc

SEQ ID NO: 1382 - DNA, 301 bp, Homo sapiens
  misc_feature 138, 172, 183, 196, 203, 208, 221, 225, 234, 258, 263, 270,274, 283, 286, 289, 291, 298: n = A,T,C or G
aattcgcccttagcgtggtcgcggccgaggtacgcggggtctacatgaaccagcaaggcagatggaataatgtgaagccaattcgtcttaatggaaccaaagattctatgtttggcattgcagtaaaaaatattgganatattaatcaagatggctacccatatattgcatnttggagctccntctgatgacttgngaaaggnttttntctatcatggatntgcnaatggaatnaaataccatacccaacacaggttntttanggggttnatcnccttatttntgnatntncaattgntgg

SEQ ID NO: 1383 - DNA, 355 bp, Homo sapiens
  misc_feature 119, 145, 188, 190, 221, 251, 267, 273, 281, 285, 295, 301,306, 319, 323, 327, 328, 335, 352: n = A,T,C or G
aattcgccctttcgagcggccgcccgggcaggtacttttttttttttttttttttttttttttataaacttttatgcattttattcaaaccaattttctttaagtaaaaacttaacagngtcatcaaaaccacactgatacaaanattccattttcctcttgcttgggggaaaaagggcttggttgantntcaccaggtttgccagggacaacatgatatnctgcttggcgatattaacatacaaatctanctgccctttgtcctgngggganatgtccantcgnccactgaaangggganatggntactgtccggccngacnggcnnagatggnaaatagcgttggtgagncct

SEQ ID NO: 1384 - DNA, 715 bp, Homo sapiens
  misc_feature 506, 532, 575, 578, 585, 598, 604, 613, 618, 628, 637, 645,649, 657, 665, 666, 668, 681, 696, 709: n = A,T,C or G
ggtaccccagctcctccaggacctgccactatgatgccggatggaactttgggattgatcccaccaacaactgaacgctttggtcaggctgctacaatggaaggaattggggcaattggtggaactcctcctgcattcaaccgtgcagctcctggagctgaatttgccccaaacaaacgtcgccgatactaataagttgcagtgtctagtttctcaaaacccttaaaagaaggaccctttttggactagccagaattctaccctggaaaagtgttagggattccttccaatagttagatctaccctgcctgtgctactctagggagtatgctggaggcagagggcaagggaggggtggtattaaacaagtcaattctgtgtggtatattgtttaatcaagttctgtgtggtgcattcctgaagtctctaatgtgactggttgaagggcctggggaaaccatggcaaagtggatccagttagagcccatttaatcttgatcattccngttttttttttttttggccatcttgntttcatttggcttgccccgcccccgaaacggagttttactttntcnccccagncttggaagtgtanatggcnatgatctcnggttnacttgcaatntttttgccntcccgggnttanactttgtncaagttgnntntttaaacttcctnacccttgggatttanccaccttcgggcnccaaaa

SEQ ID NO: 1385 - DNA, 586 bp, Homo sapiens
  misc_feature 39, 67, 106, 401, 404, 419, 428, 474, 497, 534, 540, 567,579, 583: n = A,T,C or G
ggtactttttttttttttttttttttttttttaaaaggncagctttttattgaacatgttataaaanaggtttagtcaaaaagaccaaagcccatgtcatcatcanactcctcggattcttctttctttgcttccactttcttctcctcagctggagcagcagcagtggagggggcaggacctcctgctggtgcagcaccagctgctggagcaggtccaccggcccctacattgcaaatgaggctcccaatgttgacgttggccagggcctttgcaaacaagccaggccaaaaggctcaacatttacaccggctgctttaatgagggcattgatcttatcctccgggactgtcacctcatcgtcgtgcaaaatgagggccgagtagatgcaggcgagctcnganacagaggccatggcnccgggccantgtagggcttggcgctgccggaccccggtgcttattccgccggatnaagtgagggcctcaccccaaccncaaccttatcttttgggaaggacccacccctttggcnggaaancttgaggaaaaagggccccccgctttnctgccccgggcnggcngtt

SEQ ID NO: 1386 - DNA, 531 bp, Homo sapiens
  misc_feature 298, 369, 390, 398, 431, 442, 455, 459, 468, 474, 477, 480,482, 504, 506, 525: n = A,T,C or G
ggtactggatgaagctgacgaaatgttaagccgtggattcaaggaccagatctatgacatattccaaaagctcaacagcaacacccaggtagttttgctgtcagccacaatgccttctgatgtgcttgaggtgaccaagaagttcatgagggaccccattcggattcttgtcaagaaggaagagttgaccctggagggtatccgccagttctacatcaacatggaacgaggggagtggaagctggacacactatgtgacttgtatgaaaccctgaccatcacccaggcagtcatcttnatcaacacccggaggaaggtggactggctcaccgagaagatgcatgctcgagatttcacttgtatccgccntgcatggagatatggaccaanaaggaacnagacgtgatttatgaaggggagtttcttttctngcttctagcanaagtttttgattnccanttgaacctngctggncanaancnatttgatgttgccagcaaggtntnttttaattccatcaacctnttgacc

SEQ ID NO: 1387 - DNA, 716 bp, Homo sapiens
  misc_feature 104, 517, 519, 531, 559, 563, 569, 570, 577, 592, 612, 628,629, 645, 656, 671, 673, 678, 688, 690, 691, 700, 703, 709,712, 713: n = A,T,C or G
ggtacaaagaaagttttaagtcaaggcctcaccaattcctacagtattagtattgtgtctcaattctcaaaactaacttttaaaaagcttaaacttaacctaanggattttaaatgaaaatataaactagaatgaacaaacatgagaaatatttctttgaatcagggagctagcacctttgagttttccaaaaagcacgtctccccagtgtgttcactgtgatgtggtgtaaaagatccacatttaacatacttaaactacttaaacttagataacatcactctgaagtatactaccaaaatgttaattgagaaaagctgaaaatagttttagtttactcattatcacatgctagaagaaaattttgcatgagaaaacactgaagaggtaattttttaatccagattttttccaaactcatggtgcaaaatgggtcccccagcttcctctattataactgctcttaattgcttgttggctgcctgggaaaaatgatttgaagtaacctcaaatgttncntaacaaaacttngtcaatagccccccccgtacctgccccnggcngggccnntcgaaangggcgaatttccaancaccacttggcgggccgttncctagttggaattccnnaccttcggtaccaaanccttggcgttnattcatggggcaatnancctgntttccctggngnnaaaaattgnttnttccgntcnncaa

SEQ ID NO: 1388 - DNA, 286 bp, Homo sapiens
  misc_feature 281: n = A,T,C or G
actacccaggcaggtatggaggggctcccggagggtctgcgtttcccggacaaactcaggatccgctgtatggttactttgctgctgtagctggacaggatgggcagatagatgctgatgaattgcagagatgtctgacacagtctggcattgctggaggatacaaaccttttaacctggagacttgccggcttatggtttcaatgctggatagagatatgtctggcacaatgggtttcaatgaatttaaagaactctgggctgcctttggtttttttttntcctt

SEQ ID NO: 1389 - DNA, 540 bp, Homo sapiens
  misc_feature 227, 424, 492, 522: n = A,T,C or G
ggtacgcgggattcgagtagcggctcttccaagctcaaagaagcagaggccgctgttcgtttcctttaggtctttccactaaagtcggagtatcttcttccaaaatttcacgtcttggtggccgttccaaggagcgcgaggtcgggatggatcttgaaggggaccgcaatggaggagcaaagaagaagaacttttttaaactgaacaataaaagtgaaaaagataanaaggaaaagaaaccaactgtcagtgtattttcaatgtttcgctattcaaattggcttgacaagttgtatatggtggtgggaactttggctgccatcatccatggggctggacttcctctcatgatgctggtgtttggagaaatgacagatatctttgcaaatgcaggaaatttagaagatctgattgtcaaacatcnctaatagaagtgatatcaatgatacagggttcttcatgaatctgggaggaagacattgaccaggtatncctattattacagtgggaattggtgctggnggtgcctggtttgcttgc

SEQ ID NO: 1390 - DNA, 525 bp, Homo sapiens
  misc_feature 384, 455: n = A,T,C or G
ggtacattaacttcaaaagtcttttcaatctgaggatcttgtgtagcaaacaaatctgatgtatagactacaccagcattatttactaaaatactaacatctccaatttctgccttcaccttctttgcagagctgtaaatatcttctcggttgctgcagtctaccacaaaggtatgaaccttggcacccagtcccttgcatttggcagctgtttcctccagtccatgcttatttatatcccagagaaccagcttgcttttaagtttagcaaattcataggcagtcagtctcccaattccatgcccagctcctgtaatcagcaccgatttcgccggtgactgattttctcctcttaggaataaaaagcttcacgaaggactctanggagcagacgatcagtaaccgggagaagcaggaggatgtccagaagaaatttcatcccttttgtggctgcnagcgttttgggtgtgtttttttttttttttaccactctaaactgcttttaagagggtagcttcgatctaa

SEQ ID NO: 1391 - DNA, 483 bp, Homo sapiens
  misc_feature 238, 280, 304, 374, 420, 426, 440, 469: n = A,T,C or G
ggtacctagggatgattgggaagaaaaaaggcactttagaagagatagttttgatgatcgtggtcctagtctcaacccagtgcttgattatgaccatggaagtcgttctcaagaatctggttattatgacagaatggattatgaagatgacagattaagagatggagaaaggtgtagggatgattctttttttggtgagacctcgcataactatcataaatttgacagtgagtatganagaatgggacgtggtcctggccccttacaagagagatctctntttgagaaaaagagaggcgctccnccaagtagcaatattgaagacttccatggactcttaccgaagggttatccccatctgtgctctatatgtnatttgccagttcattctaataaggagtggagtcaacatatcaatgngagcangtcacaagtcgtcnatgcccctttcttcttgaaatctacccanaatggaattctgac

SEQ ID NO: 1392 - DNA, 711 bp, Homo sapiens
  misc_feature 497, 597, 612, 619, 631, 632, 637, 640, 642, 649, 669, 670,675, 678, 681, 700: n = A,T,C or G
ggtacttttcaatccaagaaaaaaaaataaactgagacatggtcatgagttcaggattatatatattacaatttgccttgttataatacatttgtggctttatgataaaaataactcagggacatatggaattcaagctgatttgcgtaactgtcacaagaaaaaaagcattaaatgcatttctgaaataagtattttcattaatttcagaatctcaaaacagcattagaccttgccttgtttaaaaaaaatttagttcaacactaagctagctaaataaccttcttgaaaggtttaaacacaattgatatagaaaatgctttccctctaatctcaactttacataaatggaacaggtgaggaagaaaaggtagacaatttctttagcagcatatatggctaaatccatcaaccaccttaaactagaatgtccattattgaccccattaaaaagaactggggaaatatcaaaaattactgatttcataaaccaaaangacatcaattttaagggttacagttagttaaaatatttttgagacactttaaaaaactttttaacccataaacctataaagaattcatctttttcatttngtaaggaaaggaaangccctanccacgaaaagannttttnaancntaaactngattttttaaattcctcttnngaacnaanccnaaatggaaaaaatttaatngggtggattaa

SEQ ID NO: 1393 - DNA, 715 bp, Homo sapiens
  misc_feature 432, 453, 490, 496, 506, 507, 583, 594, 606, 609, 614, 621,625, 650, 655, 665, 678, 680, 691, 707, 709, 710, 715: n = A,T,C or G
ggtacgaggactggatggaaaggtgatttgtggctcccgagtgagggttgaactatcgacaggcatgcctcggagatcacgttttgatagaccacctgcccgacgtccctttgatccaaatgatagatgctatgagtgtggcgaaaagggacattatgcttatgattgtcatcgttacagccggcgaagaagaagcaggtcacggtctagatcacattctcgatccagaggaaggcgatactctcgctcacgcagcaggagcaggggacgaaggtcaaggtcagcatctcctcgacgatcaagatctatctctcttcgtagatcaagatcagcttcactcagaagatctaggtctggttctataaaaggatcgaggtatttccaatccccgtcgaggtcaagatcaagatccaggtctatttcacgaccaanaagcagccgatcaaagtccanatctccatctccaaaaagaaagtcgttcccccatcangaagtnctcgcagaanntgcaagtcctgaaaagaatggactggaagcttctcaaatttcacccctttatgggaaaaaggttatttttggtttnccatttattantaaggggatttntgntgtcntgtaaangtgntacccttacggaaaagaatatttcnacccnttttaatcanaaaatgggattcntngaatttacctntgtttaaaattccccncnngtaan

SEQ ID NO: 1394 - DNA, 709 bp, Homo sapiens
  misc_feature 357, 490, 495, 507, 517, 521, 537, 563, 570, 581, 587, 590,597, 623, 631, 638, 639, 656, 668, 669, 674, 675, 697, 707: n = A,T,C or G
ggtacgcgggggtccttgtccagtgaaacaccctcggctgggaagtcagttcgttctctcctctcctctcttcttgtttgaacatggtgcggactaaagcagacagtgttccaggcacttacagaaaagtggtggctgctcgagcccccagaaaggtgcttggttcttccacctctgccactaattcgacatcagtttcatcgaggaaagctgaaaataaatatgcaggagggaaccccgtttgcgtgcgcccaactcccaagtggcaaaaaggaattggagaattctttaggttgtcccctaaagattctgaaaaagagaatcagattcctgaagaggcaggaagcagtggcttangaaaagcaaagagaaaagcatgtcctttgcaacctgatcacacaaaatgatgaaaaagaatagaactttctcattcatcttttgaataacggctccttgttaccctggtattctagaatgtaaatttacatanatgtngttggttccaantttagctttngttnaacaggcatttaattnaaaaaattttagggtttaaaatttangatgttnaaaaagtatgnttgtgnaanatttggnaaatttgtaggaactaaattgatggnaaaccttnaccttanntatgtcaaatttaatgncattgttgtggnnttctnnttccccaaaattaagtgtcttnctttctttgntt

SEQ ID NO: 1395 - DNA, 715 bp, Homo sapiens
  misc_feature 32, 45, 64, 146, 268, 292, 432, 494, 501, 509, 532, 536,538, 540, 551, 592, 596, 613, 618, 623, 638, 639, 643, 644,649, 650, 659, 669, 670, 674, 676, 702, 710: n = A,T,C or G
ggtactttttttcttttttttttttttttttnggcttttagtaanaggtgcctatgaaagaggncaattggagatctagaaaaatacaagtgatggttgattccccattgttccagttattaatattagttttaccaacatacaanaaaatcttttttccttcaacacttgtatagcagatgtttataagattccaaaattttcataacataaattaattaccaagaattgtattacatgagatttctccttagcaactaagttctantttctattttgtcaatgtgatacntaataaaatctatacatattttgacttgattctccccgcgtacacaaaggatgctggaccagactctgcttgacctgaatgagatgtagaatgccccagtcccaccctgctgctgctccttcctttgaccctgacttcgnctgaggccagcctgcccgaagctgacctttacctgagggcttgatctttcaattggaaagtntgctttntcctttancaacccccctccttccctgcctntttntnancaaaacttgtntctgccttttcctgggagaattccaagcttggcctaggaangctnaaaaaccctttgcaaanaaccnttttnaaggggaatgggganncccnnatgcnntaatgggtnttttaaaaanncatngntggtggaaaaaaaaaaataccattanccaccttntttga

SEQ ID NO: 1396 - DNA, 712 bp, Homo sapiens
  misc_feature 535, 565, 574, 591, 634, 646, 655, 659, 665, 672, 677, 683,684, 687, 692: n = A,T,C or G
ggacacaagctttgaggaagtgcaaaggactgacctctaggccagaacaagatggaaaactaccaggcccatcaggcctataacccagacaccagcatggacaaaactcagttatactgaattcagagacaaaattcagtgacactcttctaccacttatttagggttctacagcatttcactgagcagacttagttttttgtttttgttttacaaaccttttaaacagaggggatttaaaaaatgcaaactaggactacgatgttaagacaaccactagcagacagctgcggacagttactgggtctgaaggtgaggcttcccaactcaaacagagaagtcattgggataaactctgcctctttcatctttcaccacccatatccttaaaacaggacaagatgggatgaccacaccaggtaacatcaccgaggtctcaaagtagcagctaaaatgtgccagaactcttcaccctgtctaggacctatgttccactctctcagcaaccaaaagggatctataacatgttttcttnaattaaggcttttagttttctcctccagcnttcaaaggnggcccttcactgctcanaaaccaattctacctcttttggctttcttcttcttcttcttcnttctgggggggnatcacctgncccnattttnccaggcntcggncccccnnttnttcanaaaccagcttttggcctttt

SEQ ID NO: 1397 - DNA, 301 bp, Homo sapiens
  misc_feature 226, 231, 233, 249, 258, 262, 270, 273, 275, 286, 287, 288: n = A,T,C or G
accctaaaacctagtatctttttctcttctatggaaaatccgaaggtctaaacttgacttttttgaggtcttctcaacttgactacagttgtgctcataattgtccttgcctttccagcttaattattttaaggaacaaatgaaaactctgggctgggtggagtggctcatacctgtaatcccagcactttgggaggctacggtgggcagatcatctgaggccagnagttngngacctgcatggccaanatggaacancccngtttttanaananttttaaaaatnnncctgcttggtacc

SEQ ID NO: 1398 - DNA, 507 bp, Homo sapiens
  misc_feature 222, 330, 354, 374, 381, 395, 403, 411, 418, 423, 429, 436,440, 446, 448, 453, 458, 466, 467, 482, 505: n = A,T,C or G
acaaagacagcacaagaaaaaaacagatttcataaaaatagtgattctggttcttcaaagacatttccaacaaggaaagttgctaaagaaggtggacctaaagtcacatctaggaactttgagaaaagtatcacaaaacttgggaaaaagggtgtaaagcagttcaagaataagcagcatggggacaaatcaccaaagaacaaattccagccggcaaataanttcaacaagaagagaaaattccagccagatggtagaagcgatgaatcagcagccaagaagcccaaatgggatgacttcaaaaagaagaaagaaagaactgaagcaaancagactacttcagtgttaaaaccnacttttgacatttttggttngggcaanccagatgtgggganattttaanaagaaaanagtgtgnctaanaaaatngagtaantttnacgagngnttttncacangttgttcnngggaaatttataacntatagcattggcccccgattcantt

SEQ ID NO: 1399 - DNA, 523 bp, Homo sapiens
  misc_feature 437, 452, 488: n = A,T,C or G
actcgtatttgagcttcaaagtaaaaataaagcagaggacaaacgcctgtcacagcgtggcagcccggttcatttggtaacagaacaagtctcacacgtcggctgagcccaccggagagaagcacgcaggccagcttccttctgaacacagccaggcacctgttcaaaagcctctctggtggtggcggtggaccccaaaacccacgggttggaagagcctttgggaaagcaaattgatacgctgattgcagtccttgaagaaatcacttagggttagtttaataaacgaacattaaaaaatcttccaaaaattgcattcaaatgtattttacactttaggcagttcttaagaaagggagaagtgcagtttctttaaactttacatttaaaaggtttattggccacattaatcttcctcacaaaagttttaagttatntataagttcttagantgtcaaagaatagaaaaaaaactgactaactttaangggcggggggaagcagcaaaaaaacttggcattaa

SEQ ID NO: 1400 - DNA, 298 bp, Homo sapiens
actggtaaaagaaaaaagaaaaaacccacagaatcacagaattcatgttctcacagtagccagaagctaaaataatgtgcttctttattgcacgtcaaaccaagaaaggtataaaagccaatgattctcaatccaaatgtgaaagtcaggttcacctcaactggattcggaatgtgctgatttccattggactcaagttgatctcacttatattctgagtgccgggaggtgaatgcatcaaggatagtgatgaaggtgtgagactttcgacaataaacttgtttaaaagtttctgtcc

SEQ ID NO: 1401 - DNA, 532 bp, Homo sapiens
  misc_feature 388, 389, 411, 416, 420, 427, 431, 441, 442, 450, 476, 523: n = A,T,C or G
actttgcaaattatctagttaatttgcatcatgaatcaaattcttagcttctaaagggcagacacagtctttaattgcttttagataggcacttaagaaatgcttttgatgaggagaaaaccccaaagattgtgaatcactctattaactccagggaagaatgagactctcaacaaagtagctttccagaactacccttccagtgccaagaaagtaaaactatttgcaagctctttctggtaataagaatgagggaactcaaaacaaaaaatgctctattatgcaattaaaaagtaaacttaggtaaatcaagtttctttttatcaatctctgtcaatttgaattaaccggtatttttcataccttttcaagaatagttccaatcctnnaactagacaatggttgcatttntttcntatnttacctnttcnttatccaccnngcaaaacnggtcctttttaaaaaaaggggagcgntgtggggtgagaaaaatctcataaaccctcagcaaaagttaatattntggttaatt

SEQ ID NO: 1402 - DNA, 326 bp, Homo sapiens
acgcgggctagatacactgtcagatcctttggcatccggagaaatgaaaagattgctgtccactgcacagttcgaggggccaaggcagaagaaatcttggagaagggtctaaaggtgcgggagtatgagttaagaaaaaacaacttctcagatactggaaactttggttttgggatccaggaacacatcgatctgggtatcaaatatgacccaagcattggtatctacggcctggacttctatgtggtgctgggtaggccaggtttcagcatcgcagacaagaagcgcaggacatgctgcattggggccaacacagaatcatcaaa

SEQ ID NO: 1403 - DNA, 348 bp, Homo sapiens
  misc_feature 341, 343: n = A,T,C or G
actgtctcttttggaaaagttcttgatccccaatgctccacaagcagagagcaaagtcttctatttgaaaatgaaaggagattactaccgttacttggctgaggttgccgctggtgatgacaagaaagggattgtcgatcagtcacaacaagcataccaagaagcttttgaaatcagcaaaaaggaaatgcaaccaacacatcctatcagactgggtctggcccttaacttctctgtgttctattatgagattctgaactccccagagaaagcctgctctcttgcaaagacagcttttgatgaagccattgctgaacttgatacattaagtgaagagtcancnaaaga

SEQ ID NO: 1404 - DNA, 412 bp, Homo sapiens
  misc_feature 282, 312, 317, 333, 335, 337, 340, 341, 343, 357, 366, 370,376, 389, 408: n = A,T,C or G
aacgcgggcagcacctccttgattctcagttttgctggaggccgcaaccaggcccgcgccgccaccatgtttcgaaatcagtatgacaatgatgtcactgtttggagcccccagggcaggattcatcaaattgaatatgcaatggaagctgttaaacaaggttcagccacagttggtctgaaatcaaaaactcatgcagttttggttgcattgaaaagggcgcaatcagagcttgcagctcatcagaaaaaaattctccatgttgacaaccatattggtatntcaattgcggggcttacttgctgatgcttnactgntatgtaattttatgcntnanganngnttgggattccaaanttggaatcnatangaccantggcctgggtttngtcatggattctttaattnggaa

SEQ ID NO: 1405 - DNA, 465 bp, Homo sapiens
  misc_feature 273, 295, 298, 305, 324, 341, 357, 366, 368, 376, 386, 387,404, 418, 421, 427, 438, 441, 444, 446: n = A,T,C or G
acataaagtaaaggagaacagctatattgtcctttctataagcttgtcactgcaaaaagttgccttttgcttgtcaggtttggatagaatataattgattggtttgttacttggactaacaaggcagtagatttgcctgtgtggaatttttttcctatttttcttctttttgctttttttgcacttatcagaaatatttgatgcgtgcattgttgaaaaatactggatacatgtcttgtcagaattgtcgtattaaagtaatgcctttccctnttgctttctttggcaaatgttnatncacaagngttttggacttacttgaanaatttactgaagccctntggggacttaattaanaccaaattncnacttcccntgttgggatnngaaccatttccatttancaaaccaggaaaanacnattgcnttcccatttangtntgntntttttgtttccttaaactt

SEQ ID NO: 1406 - DNA, 400 bp, Homo sapiens
  misc_feature 6, 162, 265, 319, 369, 372, 380, 381, 389, 397: n = A,T,C or G
acaatnaaggaatggggaagggggaaatgaaagaatagagaaaactatacggtagtagtcaggatgtggtggaaccaaattgcagttttctaattgagaatgtaatcttggtctttaaagaacagagttctggagtaaagaagcaggttcccttttcagtanacacctcccgtctgctgtttggaacacatcaattgtatcttcatcctccatttccaactgtgccaggtgtgtctgtttcattgattggttgcccgtcaaatcngaatctgatctgcctcattgacaatccctgtcggtcacaataggctttcattantttacttaagggcgaatgccttttaatcttaaaccggacccacataaacntcnttgtcccnncccctttnaatataantat

SEQ ID NO: 1407 - DNA, 337 bp, Homo sapiens
  misc_feature 91, 133, 156, 209, 241, 247, 265, 273, 283, 291, 293, 307,321, 326: n = A,T,C or G
acttttttttttttttttttttttgggaggggttgaataatctttaatattacacataaaccacactaaaatgcctttcaataagtaaaanaaaccattttaaatacagggaattataattagattggcatanttaaggccaaaactatagacatngctaccttatttatcttcaacccttgcctttaagaggcaaatgaacatgaacncaaaacacaggtgaatcttgcttggttctaanacatgngaagcaatttccccagtntttaaatntattcgcatnacctgttntntaaatctaaatatnaaaccaatcttcanttatnttttaaaatgg

SEQ ID NO: 1408 - DNA, 320 bp, Homo sapiens
  misc_feature 163, 167, 280: n = A,T,C or G
actttgaatttgagaagtgggtgatcccctctaggcttcctggaggtcacatttaagctagaccttgacaaattggtaggatttggtcaggcactaggagtggagcatgagctctggggacagacagttatgggttctggtcccactttttatcacttactanttgnttgaccttgggcaagtcatttgaccttctgtgcctcagtttcctcatctgtaaaatggggctaacaatattacctacctcataggatttaatgatgtcaagctcctcactggnggccttattccttcgtggagccccctaggtgccgacccct

SEQ ID NO: 1409 - DNA, 487 bp, Homo sapiens
  misc_feature 181, 218, 229, 233, 239, 241, 302, 313, 324, 340, 354, 360,368, 370, 380, 385, 392, 414, 420, 421, 443, 453, 458, 459,465, 480: n = A,T,C or G
acttttaaactagtaatagaattttctgaagaatatccaaataaaccaccaactgttaggtttttatccaaaatgtttcatccaaatgtgtatgctgatggtagcatatgtttagatatccttcagaatcgatggagtccaacatatgatgtatcttctatcttaacatcaattcagtctntgctggatgaaccgaatcctaacagtccagccaatanccatggcagcncagntttttnangaaaacaaaccgagaatatgagaaaagagtttcggggcattgttgaacaaagctggaatgnttcattattanaccaccgggcntgttaatcctttttcnatcattggcggggntttaantacccctncnttaaaaaggngtaanaaatttnaagtggccccaggttttaaggnttttgnntaaaaaaaaaaaaaaaagtccnttctatttanaaacnnaaaaancttggggtattatgnttaatga

SEQ ID NO: 1410 - DNA, 335 bp, Homo sapiens
  misc_feature 158, 302, 304, 327, 332, 333: n = A,T,C or G
acgcgggattgacatgaatgatatcaaagcattctatcagaagatgtatggtatctccctttgccaagccatcctggatgaaaccaaaggagattatgagaaaatcctggtggctctttgtggaggaaactaaacattcccttgatggtctcaagctntgatcagaagactttaattatatattttcatcctataagcttaaataggaaagtttcttcaacaggattacaagtgtagctacctacatgctgaaaaatatagcctttaaatcatttttatattataacctctgtataatagananaagtccattttttttaataatangtttnncc

SEQ ID NO: 1411 - DNA, 334 bp, Homo sapiens
  misc_feature 3, 122, 137, 241, 242, 261, 267, 312, 317, 327: n = A,T,C or G
acncggggcgcgtcttgttcttgcctggtgtcggtggttagtttctgcgacttgtgttgggactgctgataggaagatgtcttcaggaaatgctaaaattgggcaccctgcccccaacttcnaagccacagctgttntgccagatggtcagtttaaagatatcagcctgtctgactacaaaggaaaatatgttgtgttctttttttaccctcttgacttcacctttgtgtgccccactggnnatcattgctttcagtgatngggcanaagaattttaagaaactcaacctggccaaaggaattgggtgcttnctgtnggattcttcnctttctt

SEQ ID NO: 1412 - DNA, 434 bp, Homo sapiens
  misc_feature 268, 313, 326, 330, 349, 353, 361, 364, 366, 371, 372, 375,377, 382, 383, 390, 392, 395, 407, 414: n = A,T,C or G
actcctcataatcctgataggtatcagaaaaactcagacgtatttccctatgacagtcataccaatcatcttcctgggcttcagtctgcaatctgaaggaagaccgcctgggtaggtttctccggctctgcttagctctctggctagccccctctttaagtcttgtcttcatctggattccaggtagattctcgatatttctctggattgggggtgtcacttccatttggtggttgttccaaagaaatacgatcatccacaggcgttnattcagagtctttcagctgattatcagaagaccttccaaggatgncttattttccttngctntgggaataaggttcttggnctgnaaaattantgncntttcnnagncntccannattggcntncanctttccaaaccnggggacnttttgttcaataactttttt

SEQ ID NO: 1413 - DNA, 337 bp, Homo sapiens
  misc_feature 315, 317, 326, 331, 335: n = A,T,C or G
acgcggggggagtcagtcccaaccaggacacagcacggacatgagggtccctgctcagctcctggggctcctgctgctctggctctcaggtgccagatgtgacatccagatgacccagtctccatcctccctgtcttcatctgtgggagacagagtcaccatcacttgccaggcgagtcaggacgtcggggacgatctaaattggtatcaacagcggccagggaaagcccctaaactcctgatcttcgatgcttccaatttggaaacaggggtccctttcgaggttcgctggaagaagggtttgggacacatttnancgtttcatnattancaangc

SEQ ID NO: 1414 - DNA, 404 bp, Homo sapiens
  misc_feature 325, 348, 354, 360, 362, 367, 369, 374, 376, 381, 386, 390,392, 396, 397, 402: n = A,T,C or G
acattggtgatcggagtatagttggagcgctttgtcatgatttccaggttggctttgtccacagctatgttggccaatgcaccttgagcctcaaagctggcaaatcgtccaaattcttcaagccgccagaccgtctccttctttgccatatccacatggaaaatctcatcaccatcaaagtcaaacataaactcgcctgattggtcaggattcaaatagaactcggcctggatgatcacatgttcttctttgatagcccatgattcctgagcgctcatcagcacagctatgatgaaaaattctagcacagggactcccttatggncatttttttttggggcgctcttngtgggnattaantnaaacncnggggntntggcntaccngacntntttnnatganaa

SEQ ID NO: 1415 - DNA, 413 bp, Homo sapiens
  misc_feature 239, 265, 285, 288, 315, 316, 325, 331, 336, 343, 347, 353,358, 361, 366, 369, 377, 386, 393, 399, 405, 409: n = A,T,C or G
acaacagttgatgatgaagaacacgatgataaggaagaagaggaggaggaagatgatgactgctggcttgaagacttgttgttgtttttgctctttcgaccactccgtgagtcggctgctgatgaactggcattctgtgttaatgttgtcataagtgccgaagatgatgaatagccaactgtttccctggccattgaaaattcttttcccaactgaaagtcattattcttaaatgcttnataactggcttttaaacttgatgttnttcgtccctccttcatctgnctntatcctgaactgtttgatcagctgccnntggttattncccccncccantttcctnaagnttaccnaaccnatngtttnggntcccccanggttggggnggaaatncctttntaggcntttngtaa

SEQ ID NO: 1416 - DNA, 376 bp, Homo sapiens
  misc_feature 322, 355, 357, 360: n = A,T,C or G
acttgattttgaacacagcacgaaaacattttggagctggtggaaatcagcggattcgcttcacactgccacctttggtatttgcagcttaccagctggcttttcgatataaagagaattctaaagtggatgacaaatgggaaaagaaatgccagaagattttttcatttgcccaccagactatcagtgctttgatcaaagcagagctggcagaattgcccttaagactttttcttcaaggagcactagctgctggggaaattggttttgaaaatcatgagacagtcgcatatgaattcatgtcccaggcattttctctgtntgaagatgaaatcagcgattccaaaagcacagntngcntgccatcaacctggtt

SEQ ID NO: 1417 - DNA, 292 bp, Homo sapiens
  misc_feature 71, 122, 175, 179, 201, 218, 227, 228, 258, 260, 263, 269,278: n = A,T,C or G
acagccaacggtttcccttgggggctttgaaataacaccaccagtggtcttaaggttgaagtgtggttcanggccagtgcatattagtggacagcacttagtagctgtggaggaagatgcanagtcataagatgaagaggaggaggatgtgaaactcttaagtatatctggaaancggnctgccctggaggtggtatcaanggttccacagaaaaaantaaaacttnnctgctgatgaagatgatgacgatgatgatnangangatgantattgaaanatgatgattgatga

SEQ ID NO: 1418 - DNA, 356 bp, Homo sapiens
  misc_feature 324, 341, 347, 352: n = A,T,C or G
acagcttaaaccacaatggtataaatcttcattttgtaattaataatttcttgcataacaatgtttgatatttgcaaacaaacaacatttttggaagcattagattcagtccatagattctgtgacaaaattaactacagtcagtctgtgcaatgaaattgatgttgttggagttctatgtgtgtggcatttcatgttgaaaacagatggtagtgctcctagaaatatttcttcttctagcttatgtgctttggaactacacatgtataaccaatgactgactctgaaatatcaagcactgtggggtggctggaaggtaaaggnctaagctttgtgaaacnctatcntatanaatc

SEQ ID NO: 1419 - DNA, 522 bp, Homo sapiens
  misc_feature 26, 40, 55, 195, 210, 216, 237, 296, 301, 308, 311, 315,319, 325, 332, 333, 336, 345, 346, 349, 355, 367, 368, 371,382, 393, 404, 411, 414, 420, 423, 429, 436, 438, 447, 455,465, 468, 469, 477, 484, 492, 499, 513, 517, 518: n = A,T,C or G
acatgtttctgctaaagataaaggcncaggacgtgagcancagattgtaatccantcttctggtggattaagcaaagatgatattgaaaatatggttaaaaatgcagagaaatatgctgaagaagaccggcgaaagaaggaacgagttgaagcagttaatatggctgaaggaatcattcacgacacagaaaccangatggaagaattcanggaccnattacctgctgatgagtgcancaagctgaaagaagagatttccaaaatgagggagctcctggcttgaaaagacagcgaancaggngaaaatnttntcangcanctttcnttcttcnncanggcttattnntanctggtncaaaatggcttnnaanaatattggctncttaccaaganggctctggaantttttgnccntggggnacnaaaggnagatcananggggggaanaacccgtntttatttgcngannttttgaancccatanagacaccntttgaancttaggggtgaagnactnnctga

SEQ ID NO: 1420 - DNA, 389 bp, Homo sapiens
  misc_feature 307, 325, 333, 335, 336, 340, 343, 345, 351, 355, 357, 366,370, 375, 376: n = A,T,C or G
accgttttcaagataaaataacaaaaaagaaatacatatttttgttatgaaatacctatacaaaattttaaaatttacaccatctgagctgccaaaaaaggtttaaaaagtatccatttttccccatacataaaactatctctcatcagtaggtccaagggaacttgggggattcaaaatatcccagcactttacggaagggaggaggataaaaattccccttcctgctttcctttaccccaacataagacaaaaacaaaggtcgtatgtttacagtagtgtattctacttattacaaacaactganattaaaaaaaaaaaaatncaccccgngnncccnttngngccttnactngnttccgggtnaatnaaggnnctttcttgggaaa

SEQ ID NO: 1421 - DNA, 458 bp, Homo sapiens
  misc_feature 332, 333, 375, 411, 438, 440, 441: n = A,T,C or G
acagcagcagcagacacgcatcgcagagctggagaagacgtcagctgaacacaaacaccagctggcggagcagaagcgagacatccagctgctaaaggcatacatgcgtgcaatccgcagtgtcaaccccaaccttcagaacctggaggagacaattgaatacaacgagatcctagagtgggtgaactcccttcaaccagcaagagtgacccgctggggagggatgatctcgactcctgatgctgtgctccaggctgtaatcaagcgctccctggtggagagtggctgtcctgcttctattgtcaacgaagctgattgaaaatgcccacganncgtagctggcccatggtcttggcccactatagaactaaacanatgacccgcgctcttttaagacctactttggccaancgcttccttggcaagcaggctgttgtncnngatggcctgtgataacc

SEQ ID NO: 1422 - DNA, 296 bp, Homo sapiens
  misc_feature 248, 255, 262, 269, 276, 280: n = A,T,C or G
acttgccccttccccagaaaagcgggacttgctgctaagggtgaaggaccaaggcagttgtccctgcgtggtctgacacccttgaaacgtgggtgtataatcagagaggcatccctgcaatgattaaacaccaagggaaggctgccttcccagtctgtgaccagcgccggagttttgggtccacggataaaacgtgtcttttttgtctctaccagaaaatgaaaggaattgaaattaagagaaggganagattgnagtgtantgccaanattgaangganaaagtggttgtgggaa

SEQ ID NO: 1423 - DNA, 561 bp, Homo sapiens
  misc_feature 309, 312, 315, 345, 346, 362, 379, 389, 393, 403, 405, 408,418, 424, 429, 430, 444, 447, 448, 452, 453, 461, 473, 475,476, 511, 527, 529, 531, 533, 561: n = A,T,C or G
acggccaacgccaagtaggggattgcgttccctccagtcgcagaccctatcagatttggatatgtccttcatatttgattggatttacagtggtttcagcagtgtgctacagtttttaggattatataagaaaactggtaaactggtatttcttggattggataatgcaggaaaaacaacattgctacacatgctaaaagatgacagacttggacaacatgtcccaacattacatcccacttccgaagaactgaccattgctggcatgacgtttacaacttttgatctgggtggacatgttcaagctcnaangantgtggaaaaactaccttcctgctattcaanngcatttgttttttggnggattggggccaaaccncaaaaggctnttanagtcaaaaananaantttggttccntatganagatnnaaaccctttgcttnatnngccnntactgatntttggaataaancnnacagacttgaaaccttcattggaaaataggttgcnagagatgttttgtttntntngntcagaacaacaggaaaaggggatttttn

SEQ ID NO: 1424 - DNA, 526 bp, Homo sapiens
  misc_feature 6, 21, 25, 26, 27, 32, 46, 55, 60, 80, 82, 87, 95, 144, 161,182, 209, 211, 231, 245, 261, 264, 275, 299, 316, 350, 352,361, 369, 377, 378, 383, 386, 393, 400, 402, 414, 422, 431,434, 456, 468, 479, 481, 488, 498, 503, 508: n = A,T,C or G
taattncgcccttacgcgctngtcnnnggccncgcacgcgggggcncccatgganagacnaggctaccatgaaggagccnancgcanaccctgantccgtcacccatggatcgcagcgcggagttcaggaaatggaaggcgcantgtttgagcaaagcggncctcaaccggaagggcagtgntgacaaggatgtggtatagcttgtgcngnttctgaacatgcgagatcantttttcaccaccanctcctgcgctggccgnatnctactccttgnccggggtataaatggttttgaggntcataaacaaaacagtngctggctactggttacacacaaactttgtgtaanancatgatgtngattgtanctctgaannaaacnaantgggggngcaactntnaaatttgaaacnttttgttnttcatgtcnggncaacaattgcaggatgcccatntcctcattcctngcaatagattntngtttcangaactctgcntaacngtggnaaagagaggaaaaatttt

SEQ ID NO: 1425 - DNA, 519 bp, Homo sapiens
  misc_feature 312, 334, 357, 358, 359, 363, 398, 405, 433, 439, 451, 456,459, 472, 486, 493, 494, 500, 506, 515: n = A,T,C or G
acagaaaagcccagatttaaatacatttaatatgtcgttttaaaaatgattttaataattcatttcttaaaacactgaatgaattttgaagcttaatgtttttaaaggcatagttttatctttgacatctaatttaccatcaagttgtaaaattatttggaaaaatacagaactcgttttatttgtatacttatatggaatctgcgtgtgaggtgtttgagggcatatgtttgaaagagggagcatcaccacaggaatcctttctgtgaggtggaaacagtggtcctgaatcattgtgctcacacctaactngaaatctggtcttactttcatngctggtattgattccctggtggnnncagngtttaaaataagaatggtaatagttgggtagggcnaatggtntttaaattgaaactatttgaaaaatgcnctcttntctaccaaattntaatntcntttcttccctttnttggctacaccagngatcaannagtttntcatantgctttganagtt

SEQ ID NO: 1426 - DNA, 424 bp, Homo sapiens
  misc_feature 284, 336, 347, 376, 405, 420: n = A,T,C or G
acaagtaagaagctggcgaaacatagagctgcagaggctgccataaacattttgaaagccaatgcaagtatttgctttgcagttcctgaccccttaatgcctgacccttccaagcaaccaaagaaccagcttaatcctattggttcattacaggaattggctattcatcatggctggagacttcctgaatataccctttcccaggagggaggacctgctcataagagagaatatactacaatttgcaggctagagtcatttatggaaactggaaagggggcatnaaaaaaagcaagccaaaaggaatgctgctgagaaatttcttgccaaatttantaatatttctncagagaaccacatttctttacaaatggantaaggaaattctttaggatgtacctcggncgcgaccacgctaanggcg

SEQ ID NO: 1427 - DNA, 580 bp, Homo sapiens
  misc_feature 361, 371, 378, 419, 459, 466, 470, 481, 491, 492, 498, 507,526, 530, 550, 562: n = A,T,C or G
accccttaaccccttctccttcacccttagcagcaagtcccacttttctagggggcaagaaaccccaaaccccttccctccgtgtctttacgctctcttttctctgggtttgcttccttcactatgggcaaccttccatcctccattcctccttctcccttagcctgtgtgctcaagaacttaaaacctcttcaactcacacctgacctaaaacctaaatgcctcattttcttctgcaacaccgcttggcccaatacaaacttgacaatggctctaaatggcagaaaatggcactttcgatttctccatcctacaagaactaaataatttttgtcaaaaaaattgggcaaatggtctgagngcctgatgtncaagcanttcttttacacatccgtaccttcctagtctctgtgcccagncaacttcgtcccaaatcttccttttttcctcccactggtnccttaantccnaaccccagcgntgctgagtgnnctaatnttccttttntacaaacccatttgaactntccnttcttcaacgccaagtaggnccaatttttctnaggcttcactcctcacct

SEQ ID NO: 1428 - DNA, 566 bp, Homo sapiens
  misc_feature 384, 409, 418, 437, 508, 519, 544, 549, 566: n = A,T,C or G
acttctacacatctgcctaacttgggaatgaatgtgggagaaaatcgctgctgctgagatggactccagaagaagaaactgtttctccaggcgactttgaacccattttttggcagtgttcatattattaaactagtcaaaaatgctaaaataatttgggagaaaatattttttaagtagtgttatagtttcatgtttatcttttattatgttttgtgaagttgtgtcttttcactaattacctatactatgccaatatttccttatatctatccataacatttatactacatttgtaagagaatatgcatgtgaaacttaacactttataaggtaaaaatgaggtttccaagatttaataatctgatcaagttcttgttattnccaaatagaatgggacttggtctgntaagggctnaggagaagaggaagataangttaaaagttgttaattgaccaaacattctaaaagaaatgcaaaaaaaaaagtttattttcaaagccttcnaactatttaanggaaagcagaatcatttttcctaantgccntatcattttgggagaan

SEQ ID NO: 1429 - DNA, 589 bp, Homo sapiens
  misc_feature 9, 11, 24, 26, 33, 34, 41, 45, 61, 67, 174, 252, 283, 291,534, 536, 538, 540, 543, 549, 562, 567, 572, 573, 577: n = A,T,C or G
atatccgcntnaattcgccctttngngcggccnnccgggcnggtnccacctacacccaacnagtcantgagggacttctttttaatttggtaggattttgactggttttgcaacaataggtctattattagagtcacctatgacaaaaaaataggggttacctagataatgccnaagtcagcatttgtcctgggttcccttgtgtgatctgtttggactatgttttcttttcttctcccacttgctcagcancttgggcttccattctagttcttttaccaanatttttgngtgaccatgttgacttcatttggattgccctctttcaatttccttgtgaaaacacccttaactttctctttacccttagctgaaatgtttacatagcttctggtgatatcttttcatgattttatatctcttaaaatggtgatggatgtgacacctcataaaagtgagctttgaactgtagataactcttaaaagaaaatgtcattttaaacaattaaaatatttgtgctcaactgctttggncnananttnaaggcnacaatctcaaatnaacanatttnnccgngccctcagggtt

SEQ ID NO: 1430 - DNA, 563 bp, Homo sapiens
  misc_feature 475, 515: n = A,T,C or G
acacagagggctataatcagagatcgagcagctttagagaaacaagaaaaacagctggaattagaaattaagaaaatggccaagattggtaataaggaagcttgcaaagttttagccaaacaacttgtgcatctacggaaacagaagacgagaacttttgctgtaagttcaaaagttacttctatgtctacacaaacaaaagtgatgaattcccaaatgaagatggctggagcaatgtctaccacagcaaaaacaatgcaggcagttaacaagaagatggatccacaaaagacattacaaacaatgcagaatttccagaaggaaaacatgaaaatggaaatgactgaagaaatgatcaatgatacacttgatgacatctttgacggttctgatgacgaagaagaaagccaggatattgtgaatcaagttcttgatgaaattggaattgaaatttctggaaagatggccaaagctncatcagccgctcgaagcttaccatctgcctctcttcaaangctacaatctcagatgaagagattgacggcactcaaaggctttaggag

SEQ ID NO: 1431 - DNA, 556 bp, Homo sapiens
  misc_feature 370, 428, 513, 516, 532, 546, 549, 553: n = A,T,C or G
accaggtggggagaagtgtagcaaatctcagtgccaatttgaggggaagccagtcattccaggagaagagctgaggggaaagagctgttgactttcataatgcagtcttaattatccagtcaccctcctgccacatggcagaagccaggtggcagtgatggtggtgggggaaacaaaacacacagtctctggcaagccccaccgggaaaggagggctcagaaggcgtagcgggtccggatatcctcgagtttcttggacacttcgggtggggttcggtccagttcttcagagacgttcttttgtttgttgggttccatggaattgaactgctcacagaggtctccatcaatcacattcttcacagggaantagtaggagcgaaagctgaggtggtccccccacagagagggggatgttcaaaccgcangtgcattttcacatgctggaagaagtcatggtcctcatgggacgtgaatggccaaggatgcccattccttccaacaaaggtggtntanacaaatgattcttgancctccagggatcancgntggnctt

SEQ ID NO: 1432 - DNA, 523 bp, Homo sapiens
  misc_feature 9, 15, 18, 27, 29, 31, 39, 53, 68, 101, 102, 108, 121, 142,210, 491: n = A,T,C or G
ttaattccnccttancgnggtcgcggncnangtacaaanatgactataaacangatgcatccctcggnttccatgaacagcacactattacagtaaaccanntttatnttccaccatcaantgtggctctcccatgacttcnctttgtgatggatcattaagaatatcctcaaatccaatagtctcatcattacccctcaaaacatccantgaaagatttgagcttgaaagaaatggaagacgctgaacctgctgcactgccttgaattccatctgtaattttagcggagcaaatagaccctgaatgtttctcagtgtggaaaaattcattttatcttggttgagctggaaatttttttctgataattcaaggggatgactaggcaaaagttcatttttcacacaagaaaaacctttccgaagaagatcatgactttcaaaaggtccacttgctgaaagttcagtaactggaatactgtcctttaactcanatccaagtcctctggcattcatctccccgcgt

SEQ ID NO: 1433 - DNA, 555 bp, Homo sapiens
  misc_feature 457, 517, 549: n = A,T,C or G
actatcactttgccttgcctcagtctctccttcctccggggccacagaaggagaaagcccaaagcatacccatcctgccctttaaaaaaaaaagaaagaaagattcgtctctcactttggaaagctcacctactctcctaggtccttctggaggggcatggaggacaatattccatgttgccatttgatgccactaaggatccccaaggcaagaagacacttgaattatgccagagtaggccagcaaaggggagggaagggacagggaagcagccccatggcagggactataggacccctgcccaaacctgaatctagagggaatgccccaccctggctcagagcaggagaggaaaaggcactgtgctgaccggggtgggtccttccccaacccctagggagggcagagaacctgctgattctttccctgggtttcccaaggtgagccaatttctanggaaagggattttagcactaggaaaaggaaaatactgctgctgttttctgaagttctcanctgagattttaaaaaccatatcaggccttttncaggaa

SEQ ID NO: 1434 - DNA, 459 bp, Homo sapiens
  misc_feature 3, 30, 35, 53, 62, 126, 137, 142, 150, 164, 243, 322, 323,324, 325, 384, 396, 409, 411, 436, 442, 443, 450, 453: n = A,T,C or G
acngcgggataataattatctttgaagtanaacanttctgttaactggaaaancacaggatntatccatcatatttttcaggacagatagtttttactgtggggcaaataggttaaaattacactntgttagttgcntttangttttaangcaaagaatctgtngagaaatctatgcaatatatagtttgtccagattagctttcatttggggaatgaagttctgaaatatctaaagcagttnctcatcaattgaaaagtcctccaaaaagagaactattgggaaaccatggtgtggtggtggaaaataaaagctccctcannnntttggagggaataacttaaaaaaatacttaaatggctaagtttacttggtgcagttaanaattaaacttgncaattttaacatntnctgttacatctgaaataaacttgtntgatgnnctggtcngcnaaagga

SEQ ID NO: 1435 - DNA, 559 bp, Homo sapiens
  misc_feature 556: n = A,T,C or G
acgcgggtgagcaaaactactctggataaatctcttctagatataatatcagaccctgatgcaggaactccagaagataaaatgaggttgtttcttatctattatataagcacacagcaagcaccttctgaggctgatttggagcaatataaaaaagctttaactgatgcaggatgcaaccttaatcctttacaatatatcaaacagtggaaggcttttaccaagatggcctcagctccggccagctatggcagcactaccactaaaccaatgggtcttttatcacgagtcatgaatacaggatcacagtttgtgatggaaggagtgaagaacctggttttgaaacagcaaaatctacctgttactcgtattttggacaatcttatggagatgaagtcaaaccccgaaactgatgactatagatattttgatcccaaaatgctgcggggcaatgacagctcagttcccagaaataaaaatccattccaagaggccattgtttttgtggtgggaggaggcactaccttgaatatcagaatcttgttgactcataaanggg

SEQ ID NO: 1436 - DNA, 289 bp, Homo sapiens
  misc_feature 189, 230, 241, 271: n = A,T,C or G
acaaactttattgaaacgcacacgcgcacacacacaaacacccctgtggatagggaaaagcacctggccacagggtccactgaaacggggaggggatggcagcttgtaatgtggcttttgccacaacccccttctgacagggaaggccttatattgaggccccacctcccatggtgatggggagctcanaatggggtccagggagaatttggttagggagaggtgctatnggaggcctgancagagggcaccctccgagtggggtcccganggctgcagagtcttcaat

SEQ ID NO: 1437 - DNA, 508 bp, Homo sapiens
  misc_feature 41, 45, 53, 305, 319, 335, 339, 352, 354, 358, 368, 388,426, 427, 443, 462, 470, 481, 490: n = A,T,C or G
actccagaggagtgtgaggagacgagtgaaaaacccaaaangaanaaaaagcnaaagccccaggaggttcctcaggagaatggaatggaagacccatctatctctttctccaaacccaagaaaaagaaatctttttccaaggaggagttgatgagtaccgatcttgaagagaccgctggcagcaccagtattcccaagaggaagaagtctacacccaaggaggaaacagttaatgaccctgaggaggcaggccacagaagtggctccaagaaaaagaggaaattctccaaagaggagccggtcancattgggcctgaanaggcggctggcaagancaanctccaataagaananaaanttccataaancatcccagggaagattagantgcggctggacattctctgggaggtggggcataccatnncccaaggtgacatttnccaccctgtgcccgtgttncccattanaaacaaatttncacgatganaacgttatggggccaatt

SEQ ID NO: 1438 - DNA, 447 bp, Homo sapiens
  misc_feature 307, 387: n = A,T,C or G
actgtgctatggaccacgcacatacagccatgctgtttcagaagacttgaaatgccattgatagtttaaaaactctacactcgatggagaatcgaggaagacaatttaatgtttcatctgaatccagaggtgcatcaaattaaatgacagctccacttggcaaataatagctgttacttgatggtatccaagaagaaatggttggtgatggataaattcagaaatgcttccccaaaggtgggtggtttttaaaaagtttcaggtcacaacccttgcagaaaacactgatgcccaacacactgattcncggtccaggaaacacgggtcttccaagttccaaaggggctggggttccccaacgatcaagttcctgtgctgtatcaaganggtcctttggactggatagggagcacttgggagctgtaccttgccgggccggccgatcga

SEQ ID NO: 1439 - DNA, 561 bp, Homo sapiens
  misc_feature 531, 537, 543, 546: n = A,T,C or G
acgggggataatagattaaagaatttaccctttagctttacaaagctacagcaattgacagctatgtggctctcagataatcagtccaaacccctgatacctcttcaaaaagaaactgattcagagacccagaaaatggtgcttaccaactacatgttccctcaacagccaaggactgaggatgttatgtttatatcagataatgaaagttttaacccttcattgtgggaggaacagaggaaacagcgggctcaagttgcatttgaatgtgatgaagacaaagatgaaagggaggcacctcccagggagggaaatttaaaaagatatccaacaccatacccagatgagcttaagaatatggtcaaaactgttcaaaccattgtacgagcgagcccgcgtgctgggcacccgagcgctccagattgcgatgtgtgcccctgtgatggtggagctggagggggagacaagatcctctgctcattgccatgaaggaactcaaaggcccgaaagatccccatcatcattcgccgnacctgncagatngtngctatgaagattggg

SEQ ID NO: 1440 - DNA, 545 bp, Homo sapiens
ttatcatcctaatgtagacaagttgggaagaatatgtttagatattttgaaagataagtggtccccagcactgcagatccgcacagttctgctatcgatccaggccttgttaagtgctcccaatccagatgatccattagcaaatgatgtagcggagcagtggaagaccgacgaagcccaagccatagaaacagctagagcatggactaggctatatgccatgaataatatttaaattgatacgatcatcaagtgtgcatcacttctcctgttctgccaagacttcctcctctttgtttgcatttaatggacacagtcttagaaacattacagaataaaaaagcccagacatcttcagtcctttggtgattaaatgcacattagcaaatctatgtcttgtcctgattcactgtcataaagcatgagcagaggctagaagtatcatctggattgttgtgaaacgtttaaaagcagtgggcccctccctgcttttattcatttcccccatcctggtttaagtataaaagcactgtgaatgaaggtag

SEQ ID NO: 1441 - DNA, 550 bp, Homo sapiens
  misc_feature 126, 308, 481, 519: n = A,T,C or G
actaaacgagcaggtgaaggaggctgaaggatcgtctgctgaatacaagaaagaaattgaggaactaaaggaactgctacccgaaattagagagaagatagaagatgcaaaggagtctcagcgtantgggaatgtagctgaactggctctgaaagctactctggtggagagttctacttcaggtttcactcctggtggaggaggctcttcagtctccatgattgccagtagaaagccaacagacggtgcttcctcatcaaattgtgtgactgatatttcccaccttgtcagaaagaagaggaaaccanaggaagagagtccccggaaagatgatgcaaagaaagccaaacaagagccggaggtgaacggaggcagtggggatgctgtccccagtggaaatgaagttttcggaaaacatggaggaggaggcttgagaatcaggctgaaagcccgggcaacaagtggagggggacaagtggangctggagctacaagtttaaagcactgcattgttaaganggggcaccagccctccttccaaagggaaagt

SEQ ID NO: 1442 - DNA, 418 bp, Homo sapiens
actgaattcagtgcttagaactgaagttattgagaggacagctttaaaagatgaatgaactcaaaagttcgagttgtgctcttcacgttggttcgataatggcctttatttgaaagctttttaatttttctttacagtaaatattccattctgatttcataaattaaacatttatgcctcccttttgtgttgacactgtagctcatactggaaaagtcgatcaatgttttgcagtttattgaaagtagttctatatataacaatgttataagcatttctttagaaatggttgaaaatgcttctaaaatgtgattatcgaccatggtatgcatgatcgttgtaattgttgacattccttttagaagttgtgaaatgttacaacttgtgcttatgtagacacaatcttctgtctcagtcc

SEQ ID NO: 1443 - DNA, 474 bp, Homo sapiens
  misc_feature 28, 151, 170, 420: n = A,T,C or G
acaaagcagcaactgcaatactcaaggntaaaacattagaaaagcatttgtgtgacaggtatattacagtattatcaaaatattacattttcagacttacttagcagataatcatccaccagagcttaaatctttaaattatttccatagncttaaaaaatatgtaatgncagaatgcatataaaaagaatgtaaaaggaaacctaaaatacaaatggaataatgtaacaaataaatatttgatttcagtaactgttaataatcagctcaacaccaccattctctctaaactcaatttaattcttataggaataatgaactgtcaaatgccatggcataattatttatttccaagctatcatcaatgattagaactaaaaaaattttggcataaaaaaatcacaattcagcataaataangctatttttaagcttcaacactagctagcatctctaagaattgttgaaataagt

SEQ ID NO: 1444 - DNA, 547 bp, Homo sapiens
  misc_feature 469, 502, 526: n = A,T,C or G
acttgtgcctagtttttcaaggtattggctgttctatagatgcagtgattgtcccagctagctctgttaccagccttttggtgtgtctttatgttcatttggagagtcagggcgaaagacaggtgatgtagcacttctgtttttaataattattgcttaaaatacctattaatagttttgggtcatttaaagggacttgaggaagctacccaggattacagaagagtgtccacctaacaagatggcctggcagtttcctagttttgtatctggttcaatagaaatatgtgaaagtggtaatgtcatcatttgatgcagagtccgggtttctctataataaatccctttgccaaatgcatgagttgcagacttgctactggcaagagtgaagcaagtgggtgagtaaaactattttgacgtgggagcgttttcagataggagtttaatcttgacgaaagtgtccgtgcangaattggactccgaggagggttacagtatcttnctgacgggacctgccactcgcatntgggcaatgttgacatttgag

SEQ ID NO: 1445 - DNA, 552 bp, Homo sapiens
  misc_feature 86, 100, 135, 143, 149, 217, 219, 272, 405, 486, 512, 520,530, 547: n = A,T,C or G
actttttttttttttttttttttttttatcaaagttttagtgtttaataatgaatagcacaactgaccaaggtccaagatgtgaanataccatgttcaanaaactggggggaaatcactctacaaactaactatntactaggngataanaatgcatactttataatataaaacctgtctacacatagtagttagctgcaaaaagccattcgatcttntnttggcttggaaaaatgccagattccagtataaattattagcaaccttcaactnttttgcgtggcaggtatcttgttttcactttccagttcttccaccccagcctgtgtcatgaggtccgcgatattcttttccagatcatcaatgcgactactcatatcatcaattctcccaatgatctggtcanacatggtctgaaatttatcttgcatctgctgcaggagtgtctgcaccaccgaggtgaggtcctgcacggtcttggggtcantctcggccatcttcccgatgcccagnttggcggngatgtcttanaccgtaacctacacttncgttt

SEQ ID NO: 1446 - DNA, 548 bp, Homo sapiens
acaatagcgtcttcttccagcagtcaactcaagcacaaaagccagactgactcacctgatggtagcagtgggctgggaatttcatcccctaaagagttcagtgcaggagaaagctctacttctctcgatgctaatcacacaggggcagtcgttgagcctttgagaacttctgttccaagactcccatcagagagtaagaaggaagactcctctggcgctacccaagtcccccaagcaagtctcaaagccagtgatctctctgactttcaatcagtttccaagctaaaccagggcaagccatgcacatgcataggcaaggaatgccagtgtaagagatggcatgatatggaagtgtattccttttcaggcctgcagagtgtccctcccttggctccagaacgaagatccacacttgaggactactctcagtcgctgcacgccagaactctgtctggctctccccgatcctgttctgagcaagctcgagtcttcgtggatgatgtgaccattgagggacctgtcaggctacatggagtattacttgtata

SEQ ID NO: 1447 - DNA, 549 bp, Homo sapiens
  misc_feature 37, 53, 60, 72, 97, 102, 128, 132, 135, 159, 195, 227, 255,281, 290, 316, 365, 543: n = A,T,C or G
acttttttttttttttttttttttttttttgaacagnggttttattggtaaanatataanacatattggctntattaaaaactcaggtaataaagcnctaancttgatttttgtattgctacagtctntttnttntaaggggaaaaaaatctccccaanaataggatgctacctgaggaattatgccgaataaanaaaaggaatggatggtcggcagtgaaattttnttcgggcatcaacatgcaaaaagttgcnatgcctgctgtggcagctgccgcctntgttccctnttcattcacttccacaaatgacttgnggacaatttttgatataaaaatatctctggctcctgacatgccaaacanatcagccttgctactgttaaaagatcctgcacacctaggcgggcgaggtcggagttgaaagtgtaactctcttccagtttgaacctgggcaagctgacattaacttcaatgaaatcgaagattctcaggtttagtccactcatgcaacttttccaaagtcaactgttcctcaatcttnttcagg

SEQ ID NO: 1448 - DNA, 317 bp, Homo sapiens
  misc_feature 263, 295, 301, 304: n = A,T,C or G
actgatggggaagtgccggcgcttcttggatgaactagatgtggttcagatggactgagcttggatgcttctgaggcaagctgaagctttgggttctgactgacccaccctacaggactgctgaacagagagcccagtgtgactagggatcctgagttttctgggacaattccagctttaatcaatacattttgttaaatgtgccataaaatgagactttttacgcctttataaggccttagatgtaaataaactcaccccancaaaaaaaaaaaaaaaaaaaaaaaagtacctnggccgnaancacgctaagggcg

SEQ ID NO: 1449 - DNA, 566 bp, Homo sapiens
  misc_feature 546, 548: n = A,T,C or G
acacctcttgcattcgctttatgtgccccaatggaagaggtgtcctctggagcgtctgtgctaaaaactcattcaattgatgagaagagagatccttcaggtctgtggcattgaatgaatttaaatcatcttctttggcagtaatccatctttgacttaaggcaatacaagcatttgtcagagtcatatcataattgggctttatgggaggcagtccaggagagtagagccaggcattccaatcaacttgattgagaacatcaaccttatctttaaaataggaatacaggaaatccttccagtcatcagtagttatgctcttataggaaaacttctcaacataagcttttaagaatcctaggaaaatctctggtcctccaagcagttgttcaaggtaaaaaagtaaagcaaagcccttctcatagggaactgaagaataagctacatcagggtctatatctgtcagatcaaccacaaagtttgggtgaaaggatgtgtcttcccaaatgtctttaccgaattctgtagttctccccatcctcccanancattaaaaatgtctgaac

SEQ ID NO: 1450 - DNA, 565 bp, Homo sapiens
  misc_feature 540, 546, 554: n = A,T,C or G
accattttacgaatttctgtcttcataatataagtgaaaatactgtcatttcaattttctgctttaaattgtttttaataagcattccaaagtgatacagacttaagcttttaatcaatcagtcattcagttgatagacaaagttagcgatgctttatgctaggaaacttgttgacagtaacctgtgcgactttatgtagaagacaaatgctagtaattattatgcacagaggaaaaatcattttaagtatgtggtaaagcagcttcatctttcaaaattgatttgctctggtttttctttagtccattagattccagaatgtccttttactgggaatttagttatgtattaagataacctgttttcagttctttttgaaaagaagacattatttatattgaaccaccttattttaaaatttttaacttttatatccacttgtgtgattccagtgtcatgtcttgggtttgatgtcgttggacagaaaagtgatcaattattttaaatgaatttttccccctgtttgaggcttagtctgnaaatgngttgctgnaacagaaaaat

SEQ ID NO: 1451 - DNA, 562 bp, Homo sapiens
  misc_feature 31, 40, 50, 76, 481, 556: n = A,T,C or G
acttttttttttttttttttttttttttttnggggggganagttctgtanatgtctattaggtccgcttggtgcanagctgagttcattccaatcaatagaaaaagagggaatcctccctaactcattttatgaggccagcatcattctgataccaaagctgggcagagacacaaccaaaaaagagaattttagaccaatatccttgatgaacattgatgcaaaaatcctcaataaaatactggcaaaccgaatccagcagcacatcaaaaagcttattcaccatgatcaagttggattcatccctgggatgcaaggctggttcaacatacgcaaatgaataaacataatccagcatataaacagaaccaaagacaaaaaccacatgattatctcaatagatgcagaaaaggcctttgacaaaattcaacaacctacatgctacaaactctcaataaattaagtattgatgggatgtatcncaaaataataggagctatctatgacaaacccacagccagtatcatactgaatggggcaaaaactggaagcatttncctttg

SEQ ID NO: 1452 - DNA, 561 bp, Homo sapiens
  misc_feature 533, 536: n = A,T,C or G
acgcggggagcacctccttgattctcagttttgctggaggccgcaaccaggcccgcgccgccaccatgtttcgaaatcagcatgacaatgatgtcactgtttggagcccccagggcaggattcatcaaattgaatatgcaatggaagctgttaaacaaggttcagccacagttggtctgaaatcaaaaactcatgcagttttggttgcattgaaaagggcgcaatcagagcttgcagctcatcagaaaaaaattctccatgttgacaaccatattggtatctcaattgcggggcttactgctgatgctagactgttatgtaattttatgcgtcaggagtgtttggattccagatttgtattcgatagaccactgcctgtgtctcgtcttgtatctctaattggaagcaagacccagataccaacacaacgatatggccggagaccatatggtgttggtctccttattgctggttatgatgatatgggccctcacattttccaaacctgtccatctgctaactattttgactgnaanagccatgtccatttggaaccccgtt

SEQ ID NO: 1453 - DNA, 549 bp, Homo sapiens
  misc_feature 527: n = A,T,C or G
acaaacaaattatgaccgttggaaacatcccttcttccttgatgatcgcagaacgcctgcaaagatgtgtctgaaccgcaccagccaagagaatatctcatttgaaaccatgtatgatgtcctgtcaacaaaacctgtcctcaacaagctgaccgtatacacaaccttgatagatgttaccaaaggtcaattcgaaacttacctgcgggactgccctgacccttgtataggttggtgagcacacgtctggcctacagaatgcggcctctgagacatgaagacaccatctccatgtgaccgaacactgcagctgtctgaccttccaaagactaagactcgcggcaggttctctttgagtcaatagcttgtcttcgtccacctgttgacaaatgacagatctttttttttccccctatcagttgatttttcttatttacagataacttctttaggggaagtaaaacaagtcatctagaattcactgagttttgtttcactttgacatttggggatctggtgggcagtcnaaccatggtgaactccacctcc

SEQ ID NO: 1454 - DNA, 552 bp, Homo sapiens
  misc_feature 133, 137, 171, 191, 195, 211, 213, 215, 217, 218, 224, 225,228, 229, 237, 245, 247, 263, 264, 273, 275, 286, 287, 297,303, 309, 312, 325, 327, 354, 380, 386, 387, 401, 423, 429,445, 463, 466, 472, 505, 515: n = A,T,C or G
actctaggaacccagggtcacccagatgtccctttgatggccgttgttgaaggccattgggaccaataatctatattagattgaatacttaagttagatgtggtttcccccattgtagcagggagctagcgtnttanccttgtgggcaacatgatgcatgggaaatgaaanatttttgtaaaaagtcagtntttntttccaggaaaagccngncntnntttttnnacnncccaaaantttttaangnaggggttgggggtcannaggggttcntncaatttggganngaaggggaantaaacntccaanaanggcctaaaacaanancttttcatcattaaaaattttcccagngttctgatttgtgactttgaggccantgagtnntaaacaaatataanaaagctgtcaatgagttttttnaaaggngggaaaactttttacnaatctaaaaccatgggcntanaattgnaaaactgggctcatcaaaatcgggactattatngctccataanactgggaaaaaaaaatgatgggggacctttggtggaa

SEQ ID NO: 1455 - DNA, 566 bp, Homo sapiens
  misc_feature 452, 454, 464, 477, 516, 520, 531, 534, 536: n = A,T,C or G
ggacaaagatgactataaacaagatgcagccctcggtttccatgaacagcacactattacagtaaaccaagtttatattccaccatcaagtgtggctctcccatgacttcgctttgtgatggatcattaagaatatcctcaaatccaatagtctcatcattacccctcaaaacatccagtgaaagatttgagcttgaaagaaatggaagacgctgaacctgctgcactgccttgaattccatctgtaattttagcggagcaaatagaccctgaatgtttctcagtgtggaaaaattcattttatcttggttgagctggaaattttttttctgataattcaaggggatgactaggcaaaagttcatttttcacacaagaaaaacctttccgaagaagatcatgactttcaaaaggtccacttgctggaaagttcaagtaactggaatactgtncntttagctcanatccaaggtcctntggctttcatctttccgcagcttttgcgaacagcctctntggncccgttaccgntantngaccccgccgctcacttttcgttttccccc

SEQ ID NO: 1456 - DNA, 560 bp, Homo sapiens
acacataagaaaaggatttagtaacacttgggcaagtaataaactgtagaactttaaaagtagtaaaggcatataccaagcatacgtgactccacacattgtcagaaaggcagtggactggctaacgagtttctgccaagtttcagaagcaaagaatgcactaatgaaaagggtaaggcatccaagcagagtgtctgaattgatggaccacttttgtctaaaactaatttcaacatcttccaatatgcaagcaggcatttgttttaaggtgaaacactttataagagaaaagaaaactcctataaagcttataagatcagaaaaaattaatactgaatttttataatcaatgcatggagcaatgatataaactgaccataacaattttgtgagaacaagtataaaactatccattactaccttaaagagttgaaagttaagccctctaaagtattcaaagtggaataaataacaaggtaggaaatgcaatacctatatattttaaaaagcccacatctagttaatgttctcttagtttggtttaaaccagttgttcatcc

SEQ ID NO: 1457 - DNA, 560 bp, Homo sapiens
  misc_feature 506, 550: n = A,T,C or G
acatttggaggatcatcttcccagggtcttttaagactttctgaaaaagccttttctaccttaaatgtcaagacatctccatgaacaattctcagtttcccaggtgctgcatcagaaagcatctgtaatccaggaataaatcgagtgtccttttcaaccaccagaagttcagcgacgtcggcattaagaatagatcttgtgattccccctggcccagggcccacttcgtaaacataagcatttgtcagattgccagctttccttacaatcttatctgtcagcctcaagtccaggaggaaattctgtgatagctgcttcgctgcttgcagtcttaacaacttaatgatttctcgaatcgtgggcaacggagggagacggcaagtgctgagttttccggaggcagccatgatacgcggcaaggcaccatccacccctacctcacccaggccccgcgtacaaaaggaatgtttcctttataaatcacagaagaaaatgacaatatctgntggatatttgatataatttaatggtgttataaaacctttaagangattcatggg

SEQ ID NO: 1458 - DNA, 557 bp, Homo sapiens
acaagcctcaccaagggcaaccccagaaaagtgaatgagtttgtcttctccaatcatgacttcctcgataagtttgcaacttccaagcttcaccagttctgggtgatcaaaggtagaggcaatttcaccacctgtgacaagagctaggcgttccacacctgcaaaatctgcatgctcaatagccatgacaccagcagcaccaaagagctgttcaggataattataaattaattgcctgttaataaagcaatttattccatgcttaagaatacgttcaactttctccttcattttttccttttccgcatgttctatttctgcaacctttgctgtagagtcaactcttacccgggaaccaaatatctttattttgtctgtatccataccagtatttgcaataagaattttagcattttcaattcgttttggttgatttactccaatttttttatccaacaggaagccttcatctaaataggaatctgccaaacttcctcctagcttcttgataatatgaattgcctccaggttgccagagcctttcagtctgagaactg

SEQ ID NO: 1459 - DNA, 558 bp, Homo sapiens
  misc_feature 503, 555: n = A,T,C or G
acaagatgctgtgtaactgttttaatacagcaaatagtaactctccaaatcctgttgcttttatgttaaataagataacaagaattggagcatgcaaagaatgggacttggataatgacttaagctttatatgtaaagaattttagaagatcttggtgctgctattcctgctggaggaatgaatagatggctgtttcagttaagctattagtaataaaagtgaacattgctactatctgagcctacatacataacttgtgtgatttcaaattaaacttgcattatgtgttaattttcttgcatctaaaaaagcatagaattcctactcacacagctcagcaacaaccattttgatggtaacagttaatttctttcattagttttttaaattcagggttctggatattaaattaaaatggcattcttaaagattttcttcaaaaaagcaatcctaaatgaaagtgtgtaaattataagaagctggcgatcttttgatatgctgnttcacaggacctgccactggagggcagctgcttgtgcattacttggtttccngca

SEQ ID NO: 1460 - DNA, 484 bp, Homo sapiens
  misc_feature 89, 101, 110, 122, 152, 193, 226, 229, 231, 233, 236, 241,248, 251, 257, 266, 279, 314, 315, 335, 339, 341, 344, 348,349, 350, 354, 362, 363, 364, 394, 399, 408, 413, 420, 432,440, 444, 455, 457, 465, 475: n = A,T,C or G
acacttgaaaccaaatttctaaaacttgtttttcttaaaaaatagttgttgtaacattaaaccataacctaatcagtgtgttcactatncttccacactanccagtcttntcacacttcttntggtttcaagtctcaaggcctgacagacanaagggcttggagattttttttctttacaattcagtcttcancaacttgagagctttcttcatgttgtcaagcancanancngtntctgnaggttcntangcatanagacgattngaatatcttccanagatatcggctctaactgtcagagatgggtcaacnnacataatcctggggacatantggncntcntgannnaggngtctgccnnntgttttattaaccaaattgaagaagggcanctgcntttgcaaanttctngatttgnggtattttcagnggaaaaantctntttaaagcttngnctgttggngggcacttcntccacgggg

SEQ ID NO: 1461 - DNA, 557 bp, Homo sapiens
  misc_feature 9, 35, 65, 69, 78, 99, 105, 116, 118, 122, 131, 141, 143,168, 173, 189, 198, 200, 212, 249, 283, 301, 328, 372, 382,386, 387, 394, 397, 408, 431, 442, 449, 450, 461, 465, 499,500, 523, 538: n = A,T,C or G
ggtactttntttttttttttttttttttttttttnccaaattttgttttattttattatggctanaaanacactgttntagccaaaatcggcaatgacnctaaanatatgcaaatntntttnttccaaaanttgccctggngngacttcaaaagttcatgttaacttnttttntggaaacttccttttnttagttgtngnattcttgaaaancctgggccatgaaaagcttgcctaagttttgggcagngaactccttgatgttctggcagtaagtgtttatntggcctgcaatgagcggngagtccatcctggcaggcggctgtggnggtttgaaaagtttggacaggtcctcctcagggagcgggggttntcctcggctntggnnctgcatnttntcctgctggcnaccctgctgaaactgatgtttcngctgctgttgnttactannattcctcatgnatgngtgggatttaactatatctggggctcatttcatnnactctgtccatcaacaactgtanattcttccccaaatnatttgcttgctgggcaagg

SEQ ID NO: 1462 - DNA, 415 bp, Homo sapiens
acgcgggggggcgcagaggcctgcgggaagccaagatggcgcataggggttctccaggctgcagttggcgccttatcagtatctaagcggagtgttttggaaggagttaaggggctgtggcaaacgccctctccgccgtcatggcccggcatcggaatgttcgaggctataactacgatgaagattttgaagatgatgatctctacggccagtctgtagaggatgattattgtatttcgccgtcaacagctgctcagtttatttattcacggcgtgacaaaccttccgttgagcctgtggaagaatatgattatgaagatctgaaagaatcttccaattctgtttcaaaccatcagctcagtggatttgatcaagctcgtctttattcatgccttgatcacatgagagaggtacc

SEQ ID NO: 1463 - DNA, 561 bp, Homo sapiens
  misc_feature 546: n = A,T,C or G
actgggatggccctgaggatcacagtaattctttgtagtcatgaaaatcaccgccaatccaatttctgcttcaggaataggtctaagaccttgcctttggagcatatccattattgactgaatccatttcttctgacagtcaggaattaaggtctgtgagtttgttattcctgtatcaacaacacacgttcccggagccaaaaagaaattatgttcttcttcattctcttctgttatcaacctagcttccccacctccaaagacaactgcggaactcaatttcttatgctgtttggcattcaaaaatataaatgttttccctttgaagatttgttttctttcctgccgtcctgacagatcaacatttttacttccaatagatggttcatcaagaggtgggtaaaaactttcaatttgtggaggctgcttcttggactcaactgctttcaggaattcagtaaaatattctggctttacaattggacgtccacaaatgagtgcacatattggtttaatggtaactttcactgataccatgacaagggngagtgcattcttctg

SEQ ID NO: 1464 - DNA, 402 bp, Homo sapiens
  misc_feature 347, 376: n = A,T,C or G
acaacaatttcaaaaggcatatatatgggtaattagtgttcacatataccaaaccaggaaactaaacaaatctcaaggatgagaaacatgaagaaaacttcactaaagcgtatcataattaaattgtccaaaaccattgataaagagaaaatctaaaagcagccagagacaaaaaaacatattatttacagagaacaaaataagagtgtctgcagatttctcaccagaaataatgcaagtgaaaagccagtggtgcaacatttttaaaagtattaaaataacacacacacacacacacacacacacacacacacacacacacacatgaacctataatcctatacccnaaaaaaaaaaaaaaaaaaaaaaattggtncctcggccgcgaccacgctaagggcg

SEQ ID NO: 1465 - DNA, 513 bp, Homo sapiens
  misc_feature 448: n = A,T,C or G
actggctggccaccaaagcacacggagattctgtcaggcgctgagacaccacagccttttcaatcttgtccttaagggctttatctttcatccaattcagcagaggctcaaattctttctcaactgcttcacgactctccttagttttctcactttcatcgaacttcactccttccttggcaacattctggaacctcttcccatcaaattcgggaagggcctgaatacagtattcatccacaggttctgtgaggtaaataacttcatagccctttttcagaagtcgctcaacaaatggagaagattcagcctcttttctgctggacccagccatgaagtagattttgtcttgtttttccttcattctttccacatactggtctaggctagtaatgtcagttggatgatgagaagactggaacctaagaagtttagcaagacgtgttcnattcgagtggtcttcaatcacaccaagcttgatgttggtaccttgcccgggcgggccgcttcgaa

SEQ ID NO: 1466 - DNA, 559 bp, Homo sapiens
  misc_feature 378, 507, 530: n = A,T,C or G
acgcggggttccggggcagggccgtgctgattgagaatgtggcttcgctctgaggcacaaccacccgggacttcacccagctcaacgagctgcaatgccgctttcccaggcgcctggtggtccttggcttcccttgcaaccaatttggacatcaggagaactgtcagaatgaggagatcctgaacagtctcaagtatgtccgtcctgggggtggataccagcccaccttcacccttgtccaaaaatgtgaggtgaatgggcagaacgagcatcctgtcttcgcctacctgaaggacaagctcccctacccttatgatgacccattttccctcatgaccgatcccaagctcatcatttggagccctgtgcgccgctcanatgtggcctggaacttttgagaagttctcatagggccggagggagagccctttcgacgctacagccgcacctttccaaccattaacattgagcctgacattaaagcgccctcttaaaagttgcatatanatgtgaactgctcaacacacaanatctcttactccatccagtcctgaaggag

SEQ ID NO: 1467 - DNA, 376 bp, Homo sapiens
  misc_feature 376: n = A,T,C or G
acagtaacacaacatcaaaagcaacacagctgtatacagaaacgtaggtcattcttttcagccctaatggagatgtaattaacagtatcgagcactctggaaaatcactctgcaggtttatatggactacatggagatcatatcctgtagtgtagtgaaagctaagtcctcaagagccatatgtatagatacacaatgttttttaataatctttaaaacagagatcaaagttcatttaagtcctgtttgcattaacaaaaataaaaatgaaataaaaatggaaccaaatgatcatctaaagtttaaaattcctaaattgtccaatttatacaactgtgggagacttattcaaggtttttgaaagtccagtgatgcn

SEQ ID NO: 1468 - DNA, 498 bp, Homo sapiens
  misc_feature 458, 468, 486: n = A,T,C or G
acatttatattcactgataatacaagcttctgtggtgtgtggaccagacacaggagccaagggtccctctgtgtctgtccaatagtattttacaggagggtagtgacatagcttataattaagttacattaccatgggggtctcagtgctactaacattatgtaatcaaggagatacgagcattagcaaaacatgaacaagaagtcatataactctttgcagcacatttctgcccaggctttggaggaagagggatttttatgaaatgatattacacatatcacattgtggcaggttgtttgttttgttttatatatgcttttaaaattcattagcaaatgacattctcatgcacacgagtgtttcaaacacaagaagcaagtccatttataggtagtccaagcaatatttgtgtgtgtgtgtgtgtgtgtgtgtgtgtgtgtgtgtgtgtgtgtgtnaatactgcanactgaatggaacattganacttttgtgcca

SEQ ID NO: 1469 - DNA, 558 bp, Homo sapiens
  misc_feature 231, 374, 499, 503, 509, 510, 516, 531, 532, 535, 541: n = A,T,C or G
acgcggggacttaacggtggtggctggttctgcgccggatccgggagaggggcgggcgccattgtgcttcgctgccgactgcatttcctcagtcacgggcctagaactccaaggagaaaggcggcggaattcatgatttgttcctgtagctgaaacatacattgaatgctttctgccctggcatgaacttacatggtcagagctggtttttcctgccctcaaatatatttntctgactctaccggttagactagaaaaatctttaagaatggagtctaaaccttcaaggattccaagaagaatttctgttcaaccttccagctccttaagtgctaggatgatgtctggaagcacaggaagtagtttaaatgatncctatcactcaagagactcttcatttatattgggattctgaatatcagtctacatcagcatcagcatctgcgtcaccatttcaatctgcattggtataagtgaatctgagataactcaagggagncacnctcaanncggcanaaaccagcatctggnntcntgattnaaaaaagaccctaaact

SEQ ID NO: 1470 - DNA, 560 bp, Homo sapiens
  misc_feature 490, 503: n = A,T,C or G
acttctgtttctcagtttatctggatgttatcagatcacagaccatggtctcagggttttgactctgggaggagggctgccttatttggagcaccttaatctctctggttgtcttactataactggtgcaggcctgcaggatttggtttcagcatgtccttctctgaatgatgaatacttttactactgtgacaacattaacggtcctcatgctgataccgccagtggatgccagaatttgcagtgtggttttcgagcctgctgccgctctggcgaatgacccttgacttctgatctttgtctacttcatttagctgagcaggctttctttcatgcactttactcatagcacatttcttgtgttaaccatccctttttgagcgtgacttgttttggccccatttcttacaacttcagaaatcttaatttaccagtgaattgtaatgttgtttctcttgcaaattatacttttggtttagaaagggattangtcttttcaaaanggtgagaacagtcttacatttttcttttaaatgaaatgctttaaagaaatggtggta

SEQ ID NO: 1471 - DNA, 548 bp, Homo sapiens
  misc_feature 519: n = A,T,C or G
acgcgggggttaccgcgattctgagaggtgggcttttagtccctccagacctcggctttagtgctgtctccgcttttctttcaccttcacagaggttcgtgtcttcctaaaagaaggttttattgggaggtaaaggtcaatgcgtaggggtagagtaagatgtcttatggtgaaattgaaggtaaattcttgggacctagagaagaagtaacgagtgagccacgctgtaaaaaattgaagtcaaccacagagtcgtatgtttttcacaatcatagtaatgctgattttcacagaatccaagagaaaactggaaatgattgggtccctgtgaccatcattgatgtcagaggacatagttatttgcaggagaacaaaatcaaaactacagatttgcatagacctttgcatgatgagatgcctggtaataaaccagatgttattgaatccattgattcacaggttttacaggaagcacgtcctcattagtattcgcagacgatgagatatatagcacaagtnaagcatttataggacccatttacaaaccc

SEQ ID NO: 1472 - DNA, 560 bp, Homo sapiens
  misc_feature 436, 473, 557: n = A,T,C or G
acgcgggggagaagaaacggcggagacctgagacccggaggctgaggctgtaggtgggctccgctgggtaaaagttgccgcagcagctgtcccttggccccatcgcgatttattttccccccttgctttccgggtcccgggatcccaagttttttaactaacgggagcgaatccacacccgagcaaaatgtttgcgagtttcaggcgcccttagttgaaaggctgtaattaacaagtccgctgtttgccagccaggcgccgttgcaggcgctttctgtggattgtcatttatttctcacagcaaccctaggaggctgttatccttgacatctgcagcagcccttccaagctgtggagaccaggtcatctggaatgcccatttatgtcaatggaagaaagaaaaaggggtctcctccatcctcactactgcattctnccaccaaccctgctcctgtcccacttccacaacttantttgttgacaatttaacagtgggtttctggaaacagtgctgcctccttgatggtctaactaactaccagagttattcttaacancag

SEQ ID NO: 1473 - DNA, 398 bp, Homo sapiens
  misc_feature 187, 197, 245, 249, 255, 274, 285, 287, 290, 298, 302, 304,313, 319, 327, 343, 345, 357, 358, 365, 371, 375, 386, 387,394: n = A,T,C or G
acgaaaagcggcagaactagctctgaaaactctgagcaaggtctgtgtgaaaatgtgtgaccctgccaaaggagcagctggccagagaaccatcgctgcccttctgccttgccttctggacaaaggaatgatgagcaccgtgacggaagttcgagccctcagcattaacacccttgtgaagatcagnaaaagtgcangagccatgttgaaaccgcatgcaccaaaactcattccagctctgctanagtncttaantgtttggagccccaagttntcaattatttnanccnttcgggcnacanancaagaaaangctgcnatggatangtgctcggcttattgnanccaatattttcnntgatggnaacttnaaantgtgcctgtannccttatntttc

SEQ ID NO: 1474 - DNA, 509 bp, Homo sapiens
  misc_feature 248, 277, 310, 316, 320, 329, 344, 357, 366, 369, 372, 376,388, 409, 411, 416, 424, 433, 443, 447, 450, 460, 461, 466,469, 470, 485, 487, 491: n = A,T,C or G
acactgttggtgttatatggggatggggttctcggtaattttgtttattatttatgtttattattatgttttatcattaattattcaataaatttttatttaaaaagtcaccctacttagaaatcttctgtgggggtgggagggacaaaagattacaaaccaaaactcaggagatggtaacactggaattgataaaatcacctgggattagttgtataactctgaaccaccaaacctctgctatcaanccttgctacagtcatggctgtccagaaanatttacagttatttttctgagaaaggatccatngggctntaanaacttcacnaactttaagaacttnagaagttcttaanttgctgaanctnaantacnaacttgaattcnattaaaaaaaagaatccctgnantcaangctttaanagccaattnttacctaaanggantgntcatacctgnngagancanntaaattctgtatatncnatanaacaaattgcagattacc

SEQ ID NO: 1475 - DNA, 599 bp, Homo sapiens
  misc_feature 3, 27, 63, 66, 83, 103, 118, 125, 128, 282, 288, 292, 296,307, 338, 342, 345, 350, 355, 364, 386, 405, 406, 427, 454,461, 473, 475, 495, 498, 500, 503, 518, 530, 535, 536, 541,548, 553, 562, 564, 572, 575: n = A,T,C or G
acngataccggaaaggctggatacctnggttattagaggattttggagatggaggtgcttttncanagatccatgtggcccantatccactggatatgggacnaaagaaaaaaatgtngaatgcnctngccattcaagtggattctgaaggaaaaattaaatatgatgcaattgctcgacaaggacagccaaaagacaaggtcatttatagcaaatacactgacctggttccaaaggaggttatgaatgcagatgatccatacctgcaaaggcccgatgaanaagctntttnaganataacatgaanatacaagagtagccttataaaaatctgtatnacanaangtcgncacancatgccagntcgagcaggtgacaaattgctncttgctcaatatattcganncacaccatctctgccaaggantggcatttaactcttggagctaaacanagggttnttcgattggtananatgcacaaagatccaatggnccntncangttaagattaataanaaaaattcccgnggacnnttctncttctgncctgnttgattctntntccgaaanatnactgtaaaggacaacaagagtggg

SEQ ID NO: 1476 - DNA, 572 bp, Homo sapiens
  misc_feature 303, 351, 352, 403, 426, 427, 442, 481, 488, 517, 535, 542,550, 572: n = A,T,C or G
acgcgggggctaaagtgttgtcaattttgtttaacttttcaaacaaccaactttttgtttcattgatcttttgtattgttttctttatttcaatttcatttatttctgctctgatcttcattatttcttttcttctactaattttgcatttggtttgctcttgcttttctagttctttaagatgcattaggtgtttttttttttttttttttaacgtaggcacttatagctgtaaacttccctcttagtattgtttcggtatcttgtgtttccattatcatttgtttcaaggaaattttaagnttccttcttaatttcttctttgacctactggcacattcaagagaatgnnggttctttttttttttttttttttcagggcccaagacatctgaaacattgnttaatttctggggatttggatanngccaaaactattctngctataaattctatttttatccattgggggcagaaaatntgcttgnattattcaatttttttttttttttttttngaacaaaatcttgctttncacccangctaaagngcaggggcgcgaatttggttan

SEQ ID NO: 1477 - DNA, 597 bp, Homo sapiens
  misc_feature 232, 233, 320, 367, 397, 408, 477, 478, 489, 496, 504, 526,548, 551, 558, 561, 564, 573, 581: n = A,T,C or G
acatgtttgaagaagtgccgattgtaattaaaaattcacatctgatcaatgtcctaatgtgggaacttgaaaagaagtcagctgttgcagataaacatgaattgctcagccttgccagcagcaatcatttggggaagaatctacagttgctgatggacagagtggatgaaatgagccaagatatagttaaatacaacacatacatgaggaatactagtaaacaacagcagcnnaaacatcagtatcatcagcgtcgccagcaggagaatatgctgcgccagagcccgagaagaacccccgctccctgaggaggacctgtncaaactctttaaccaccacagcccgcctgccaggatggactcgctgntcattgcaggccatataaaccacttactgncagaacatcanggagtttactgcccaaaacttaggcaagctcttctggccaggctcttcatgaatacaaccactaagaannggaagttccanaaaagangtaacatngactcttgaagtccaccagggnaacttttggagaaatatttttnatnttgaaangcncantaggatttntttagtgncttgccgattttggcg

SEQ ID NO: 1478 - DNA, 399 bp, Homo sapiens
  misc_feature 164, 204, 291, 295, 297, 365, 386, 396: n = A,T,C or G
acattgtttgttttcaataggagttcatggaatttgaaatcagaagaaaaatcctcattacaaaacaacagcattttaattgaattttctaagtgatcatttccggctgtttaaatgcacctgttcaaatcaaagttcatcattttgtttggaacaacttttgnttgagaatcaaatggtcacgtaaatgacaaaacaaataancatataatgacagaaaagtaagtggcaaaataactacaaactttgttccactggctactgcagtagaataaacaaaatgacagttanccananacacctttattttcatctgcaaagaagaagctcttttcttctttttccaggataattatgattaactnacaaaaattgggtacctcggncgtgaccacncta

SEQ ID NO: 1479 - DNA, 363 bp, Homo sapiens
  misc_feature 51, 59, 80, 102, 105, 160, 164, 174, 183, 191, 209, 214,228, 263, 288, 320, 337, 345, 354: n = A,T,C or G
actttttttttcttttttttttttttttttttttttttttttttaaggganacaacatntgggactttattaaataaggngaatttgggacaaatgaaaggnganatgaaggcaaactactgtcaagggatgatctgagcctgaacaactcagtgaatgngaanagaaaacaanattacatgngaatatanatgttaactggaaaagcnagganaaaaaaagggagcncaaggaaaaaaaaaaatcaaaatttgtgagccatntcaagccatcaaaaaaacttcattntattgtaggagggaagctggaaacaatggcanagtaattttgtgttaanaattaaantacctcggncgcgaccac

SEQ ID NO: 1480 - DNA, 432 bp, Homo sapiens
  misc_feature 290, 312, 320, 334, 340, 345, 346, 370, 392, 394, 395, 399,400, 401, 407, 410, 420: n = A,T,C or G
aactcattaataatattaataggcgcttgaccccacaggctgtcaaaattcgagcagatattgaagtggcttgttatggttatgaaggcattgatgctgtaaaagaagccctaatagcaggtttgaattgttctacagaaaacatgcccattaagattaatctaatagctcctcctcggtatgtaatgactacgacaaccctggagagaacagaaggcctttctgtcctcagcaagctatggctgttatcaaagagaagattgaggaatagaggggtgtcgttcaatgtncaaatggagcccaaagtggtcncagatacnagattaaacttgtncttgcnaggcnnattggataggctttgaaacacaanatgccctaagaggattgcggantnntcannntaatanaanggattcaaanctgaagattttc

SEQ ID NO: 1481 - DNA, 276 bp, Homo sapiens
  misc_feature 145, 189, 233, 236, 263: n = A,T,C or G
acgtgccgcggaaatgctccgctagcaatcgcatcatcggtgccaaggaccacgcatccatccagatgaacgtggccgaggttgacaaggtcacaggcaggtttaatggccagtttaaaacttatgctatctgcggggccattcntaggatgggtgagtcagatgattccattctccgattggccaaangccgatggcatcgtactcaaagaacttttgactggagagaatcncangatgtggaatatttgtcataaatgaanaatgaaaaacctt

SEQ ID NO: 1482 - DNA, 574 bp, Homo sapiens
  misc_feature 362, 393, 408, 434, 435, 441, 446, 459, 461, 462, 466, 479,487, 494, 495, 521, 522, 536, 546, 551, 552, 572: n = A,T,C or G
acatgtttgaagaagtgccgattgtaattaaaaattcacatctgatcaatgtcctaatgtgggaacttgaaaagaagtcagctgttgcagataaacatgaattgctcagccttgccagcagcaatcatttggggaagaatctacagttgctgatggacagagtggatgaaatgagccaagatatagttaaatacaacacatacatgaggaatactagtaaacaacagcagcagaaacatcagtatcagcagcgtcgccagcaggagaatatgcagcgccagagccgaggagaacccccgctccctgaggaggacctgtccaaactcttaaaccaccacagccgctgccaggatggctcgctnctcattgcaggccagataaaccttactgccnaacatcagggagttncttgccaaaacttaggcaagctcttnntggccnagctnttcaagaatacanannctanaaaaaggaagttnccaaaaanaatgttnncatgaacttttgaagtcacaccaggnnaactttggaaaaantttatttgcntattnnaaagcccagaggatttttangt

SEQ ID NO: 1483 - DNA, 529 bp, Homo sapiens
  misc_feature 317, 331, 345, 352, 367, 379, 403, 407, 408, 419, 420, 439,442, 461, 462, 469, 484, 487, 492, 503, 504, 505, 515: n = A,T,C or G
acagccaacggtttcccttgggggctttgaaataacaccaccagtggtcttaaggttgaagtgtggttcagggccagtgcatattagtggacagcacttagtagctgtggaggaagatgcagagtcagaagatgaagaggaggaggatgtgaaactcttaagtatatccggaaagcggtctgcccctggaggtggtagcaaggttccacagaaaaaagtaaaacttgctgctgatgaagatgatgacgatgatgatgaagaggatgatgatgaagatgatgatgatgatgattttgatgatgaggaaactgaaatanaaagcgccttgaanaaatctatacgagntctccanccaaatttgcacaanagtcaaattaanattggaaaagactcataaccatcnttcnncaccaggatcnnatggacatgaatctttttnganacatgaaaaaactcctaanncaccaantggacctattctgtngangacanaaattattttnnnattaactcanttttttagtaaagc

SEQ ID NO: 1484 - DNA, 594 bp, Homo sapiens
  misc_feature 575: n = A,T,C or G
actttcttattcaactgtgaatctgctcgagaaagacagaaggttacagaaaggactgtttctttatggtcactgataaacagtaataaagaaaaattcaaaaaccccttctatactaaagaaatcaatcgagttttatatccagttgccagtatgcgtcacttggaactctgggtgaattactacattagatggaaccccaggatcaagcaacaacagccgaatccagtggagcagcgttacatggagctcttagccttacgcgacgaatacataaagcggcttgaggaactgcagctcgcaactctgccaagctttctgatcccccaacttcaccttccagtccttcgcaaatgatgccccatgtgcaaactcacttctgaggggggaccctgcaccgcattagagctcgaaataaaggcgatagctgacttcatttggggcatttgtaaaaagtagattaaaatatttgcctccatgtagaacttgactaacataatcttaaactcttgaatatgtgccttctagaataatattacaagaaaactcagggcccaccggcaatcaaaaaaaangagctgagatgaggtttgg

SEQ ID NO: 1485 - DNA, 264 bp, Homo sapiens
  misc_feature 18, 48, 119, 187, 207, 213, 234, 235, 236, 242, 255: n = A,T,C or G
actacacgcgcctgggcnacgacttccacacgaacaagcgcgtgtgcnaggagatcgccattatccccagcaaaaagctccgcaacaagatagcaggttatgtcacgcatctgaggaanccgaattcacagaggcccaggaagaggtatctccatcaagctgcaggaggaggagagagaatggtganacaattttgttccctgaggncttagncttggatcaagagattattgnnngtagantcttgaccctaangaaaatgct

SEQ ID NO: 1486 - DNA, 586 bp, Homo sapiens
  misc_feature 34, 43, 45, 75, 112, 118, 128, 147, 159, 161, 168, 170, 175,247, 285, 315, 355, 369, 370, 431, 440, 449, 465, 513, 529,549, 551, 558, 574: n = A,T,C or G
acttttttttttttttttttttttttttccacanaaatctaancncacttgtcttatattctttctgcaacccgnatttttcctctactggttccagcataaaactaataanacgaancttgcaattntgaaccccttaagtccagngggtttccacananaaacatntntttgngaaaatattctatattgtttactcaaacgaagtctcatgaactgatcccaaaggcaacatgggaaagcacgngataaaaactttacataaacccatcgctctttaaaaanaaacattcactttgggaggctgaggtgggnggatcttgaggtcaagagatggaaaccatcctggccaaantggtgaaaccccgnntctactaaaaatacaaaaattaactgggcatgggggtgcatgcctgtattcccagctcttngggaggctnaggcagganaatcacttgaacctgngaggcggaggttgcagtgagcccaaattgcccattgcctccagcctgngtaacaaaccagactnctttaaaaaaataaaaattnantaataancttcaaggcattttgnttgttttgtatt

SEQ ID NO: 1487 - DNA, 440 bp, Homo sapiens
  misc_feature 246, 309, 317, 371, 389, 414, 416, 434: n = A,T,C or G
acatccaaaaccataaggaaatattctgatgcccagatgatgaagactggggtgaattaagtccacacatttatttcaagttgttaaagagtttgtgggccacgcaatggtccctcgcatgcaagaagtcaaagagctcctccgtgcaatcctcttctgtatgtgatcgagaggatacacgctcatcacagagctctagccgctcccgggcctttacacatttctccaactgctcgcattgctctntcactgttgttaggggatccactaattcctcctcttcctcttcctcctcctcaggatctcccngattcggnaaagcatcttttgctcggcctccaagtcccatgtctggctacgggtctagattnaacacgagcagcaacagnggccctaacccattcaaggatcaananagacttgtaagccccgcntacctc

SEQ ID NO: 1488 - DNA, 593 bp, Homo sapiens
  misc_feature 548, 553, 579: n = A,T,C or G
acagttactcccggaccggcggcgtgaaagtcgtgatatcatcgttgaactattagctttgaagtttaaatccaatggagaagactcaaaaaacagtccaaagaattcttctagaaccctataaatacttacttcagttaccaggtaaacaagtgagaaccaaactttcacaggcatttaatcattggctgaaagttccagaggacaagctacagattattattgaagtgacagaaatgttgcataatgccagtttactcatcgatgatattgaagacaactcaaaactccgacgtggctttccagtggcccacagcatctatggaatcccatctgtcatcaattctgccaattaccgtgtatttccttggcttggagaaagtcttacccttgatcacccagatgcagtgaagctttttacccgccagcttttggactccatcagggacaaggcctagatatttactggagggataattacacttgtccctgaagaagatataaagctatggtgctgagaaaacaggtggactgttggatagcagtanggctntgcagttgttctctgattacaaaaanatttaaaccgtact

SEQ ID NO: 1489 - DNA, 556 bp, Homo sapiens
  misc_feature 444, 514, 522, 523, 528, 552: n = A,T,C or G
acctagaagccgtgacccagggccatggcgcttacctgatgagtcaggatgctccggacgtttttactgtaagtgttggaaacttaccccctaaggctaaggttcttataaaaattacctacatcacagaactcagcatcctgggcactgttggtgtctttttcatgcccgccaccgtagcaccctggcaacaggacaaggctttgaatgaaaaccttcaggatacagtagagaagatttgtataaaagaaataggaacaaagcaaagcttctctttgactatgtctattgagatgccgtatgtgattgaattcattttcagtgatacacatgaactgaaacaaaagcgcacagactgcaaagctgtcattagcaccatggaaggtagctccttagacagcagtgggattttctctccacatcggtttgtctgctggctatctnccaagaatgtgggttgaaaaacatccagaaaaagaaagcgaggcttgcatgcttgtctttcaacccgatntcgatgtnnatctncctgacctagccagtgagagtaantgtt

SEQ ID NO: 1490 - DNA, 396 bp, Homo sapiens
  misc_feature 11, 15, 31, 38, 41, 49, 53, 58, 59, 90, 118, 158, 160, 181,197, 265, 277, 282, 295, 344, 347, 359, 360, 373, 389, 393: n = A,T,C or G
actctggttcnatanactttttttattttanggttgangcngacccatnatanaatanngaataaaaggaatgcttataggaaacaattntgtatggaatgctatatggccaagcctnagcctttggtccagtgcaacccttgcctcgcttgtcaacngngaaaaattagtttggttagangaaccatctggaaacncaccagcttctgctaccttcatgctcattgttaaaaaaagattaaccagtgtgaacattctgatctgntaattccagggnctganttcttatcaatgnactgtttgttggtaaaaataacccccaaaatgctcaaagcttaaatgcntantcattcctagtnngcgagttccttanaaatggattggcggcntggntaa

SEQ ID NO: 1491 - DNA, 588 bp, Homo sapiens
  misc_feature 362, 416, 466, 470, 479, 488, 490, 492, 505, 522, 523, 535,551, 566, 580: n = A,T,C or G
accagagactctcctatctcacggttgaggcagacccaggatagaatagagaataaaaggaatgcttataggaaacaattttgtatggaatgctagatggccaagcctcagcctttggtccagtgcaacccttgcctcgcttgtcaacagtgaaaaattagtttggttagaagaaccatctggaaacacaccagcttctgctaccttcatgctcattgttaaaaaaagattaaccagtgtgaacattctgatctgttaattccagggactgttttctttccaatggactgtttgttggtagaataacccccaaaagctcaaagctaaaatgcatcatcagtcctagtcggcagttccttaanaatggactggcggcgtggttgagctgatatggaaaagctgcccttcctgcagangatcaactgacctgctatcccaccccaaatttcagcctgaggtatatttnagtnaggcaggtnctgtgcttntnanagcatagaaccantttaagagcaaaaaggnngaggaatctagnaagaccgtttgattanatttatccatggggngaagggagggcaangaccatgg

SEQ ID NO: 1492 - DNA, 102 bp, Homo sapiens
  misc_feature 40, 54, 57, 60, 69, 96: n = A,T,C or G
acctgcatcagcattagtgatcaacctgttaatccaaggnctttagaaaaactnganatnattcctgcnagccaattttgtccacctgtttgagancattgc

SEQ ID NO: 1493 - DNA, 384 bp, Homo sapiens
  misc_feature 43, 94, 156, 207, 235, 274, 326, 327, 329, 344, 353, 355,360, 362, 363, 369, 375, 376: n = A,T,C or G
acaagaatcgacctcactgttcacatggaaactctgaccaggncttctctgcaccatgattggctgggaaactgaatgatctgatgttccccangcactgtctcgccattgatcacccaggaatattccttttggtccatctttgctggattcatntgtttcccaaaactttttgcctggcaagagctgctctcccatcagctcttncctccagagcaagtgcttgaaaatcatnattcagttcatccatggaacgcacctgatgttcatgcangaatgttatccccagttcggccatccgatgtttgcttttattataggaccgnntnctgcacttcctcctnccccaagcngntcacnannctgccnctgaannatttagcg

SEQ ID NO: 1494 - DNA, 354 bp, Homo sapiens
  misc_feature 28, 34, 36, 93, 107, 134, 148, 154, 176, 197, 219, 225, 252,254, 267, 273, 285, 291, 301, 303, 308, 312, 318, 319, 323,326, 329, 331, 337: n = A,T,C or G
actttttttttttttttttttttttttngggcgngntcaatcatatgaactagattttcattgtatactttccaggcattacatccatgctgngacattagttccanattctcaattctaactgcttgatgctntaactgggccatanaattgnttacacattcttgccatgcagnaatgtcattttttttgaccanaggagggggctggaagctcatntcgttncatactgagcaaatcaattggttgtcnancaccagtcctttnaaattnattctcattatngtcagntttaaaaggnanaatantccnggctgnntgtngcncangnagttcntaattaggtcggaaatt

SEQ ID NO: 1495 - DNA, 576 bp, Homo sapiens
  misc_feature 164, 219, 239, 262, 294, 309, 325, 327, 349, 372, 380, 396,401, 410, 411, 475, 478, 482, 493, 497, 508, 511, 515, 522,533, 534, 541, 552, 555, 567: n = A,T,C or G
atgctgattctgaagagatcaacagacaagttacatatttcataacaggaggggatcctttaggacagtttgctgttgaaactatacagaatgaatggaaggtatatgtgaagaaacctctagacagggaaaaaagggacaattaccttcttactatcacggcnactgatggcaccttctcatcaaaagcgatagttgaagtgaaagttctggatgcanatgacaacagtccagtttgngaaaaagactttatattcagacnctattcctgaaacgtccttctggaaaaattancatgcagatctctgntacagacgcagacatncngtctaacgcctgaaattacttncacgttattgggttcaggcgctnaaaaattnaaactagatccacacncacgngaactgaanncgtcaacccccttgatcgtgaggagcaagctgtttatcatcttctcgtcaggccacagatggangangaanatcttgccaancagnttgtgctcacnctngaancgtgacnataatgccccnnatttttngcgaccttatnccnttacctggggtngaaacacaa

SEQ ID NO: 1496 - DNA, 565 bp, Homo sapiens
  misc_feature 369, 373, 395, 399, 402, 408, 411, 450, 469, 478, 488, 507,512, 513, 514, 517, 530, 534, 536, 553, 556: n = A,T,C or G
acgaagaaagcatttcccaagcaatgagtctcttaatggaaaaaataaaagagcaatgtaattaaactttccttcaaagaaaggaaagaaacctaaatctgttatggcaaatttggaaagataaatatttcctagtcccataatatgtgtttgttttacaagatatgcttgaatgatgcaaatctatgaagcagggatctgtggcaatccaaattcatccaccagaactccatccttgttttttgtatcagtgggaacaccttctggaattgcaggtgcagatgctgcctcatccaaataagaactgtcttcatcagccagaagctcatcacctagtgcatccaactctgcttctaaatcatctttatncagntcttgggtgccataaactgcgnactnaanggcttnttngaatttcattgcatcttcctcatatccttagctgggctngtaaatcctcaatcttggncggatcttnacttgcttgnatgccttcttatttccttnttccnnntcntacataaccgggncttngngtcctcaaagactgganggntaattggct

SEQ ID NO: 1497 - DNA, 607 bp, Homo sapiens
  misc_feature 469, 546, 564, 576, 586, 605: n = A,T,C or G
acaaccagggcgagaagaagaacgccctggcccaatatcaggagatggagaagaaagtcagcctactcaaggacaatagctctctggaatttgactctgagatggtggagatggctcagaagttgggagctgctctccaggttggggaggcactggtctggaccaaaccagttaaagatcccaaatcaaagcaccagaccacttcaaccagcaaacctgccagtttccagcagcctctgggctctaatcaagctctaggacaggcaatgtcttcagcagctgcatacaggacgctcccctcaggtgctggaggaacatcccagttcacaaagcccccatctcttcctctggagccagagcctgcggtggaatcaagtccaactgaacatcagaacaaataagagagaaataagaatagaatgaatgaccccaaaatagggttttcttgggcgaggatgtgctggattangaaaggtgacatgacacaggcagagcagagtggcacccacccagaatacagtgtgtgttattacgaggagccagcanttgacctaaggccttctnctacctggtatngcttttgagncggaaccctctctgcccanaa

SEQ ID NO: 1498 - DNA, 249 bp, Homo sapiens
  misc_feature 36, 43, 90, 98, 111, 170, 187, 202, 205, 206, 210, 216, 221,225, 236: n = A,T,C or G
actttttttttttttttttttttttttggcccttanaaaaagnagatcttttacatggcttggctcacaatttaagtggttataaatatntatacatntgatatagtggtntaaatagattaataaatatacatcattttttgctacactttgaacaccaacatgtaatntttgggcttagcagaanaaaacgatatgaatnacnnaaantctatnttgcnggancacatttactnggtttctcctcta

SEQ ID NO: 1499 - DNA, 556 bp, Homo sapiens
  misc_feature 308, 337, 356, 370, 376, 410, 423, 424, 430, 435, 436, 441,448, 455, 458, 478, 480, 497, 498, 501, 503, 518, 519, 528,529, 539: n = A,T,C or G
actggagatgtatttgataaccaaggttttaggtaaattttcaccagtattagttctatttgcaaactgaaaaatgttgtaggcttaatgtaaaataaccacattagtgaacattatatctcttagaagaaaggccatattttgctcctgcttctgtaaaaatattatttgtttgaaggggaaataatggtagtgtgacctttcacttaattcctactcccttaatgtgagagagacaaaatgagctgaagaaggaaaattctggagttcactcccaaccttgaacatactgaccggacatcttttgntttgacaacgatttcttcatgcccccatngctaattgccttgtggatnacgggacaaccctntttgcncaagctacagcatcattcgatggtatctttgcancaaacacctgcanngataangacanncattnactgctnctggggnttngccttcattacaccaatagngntattgacttgaatatcnntantntggtttctgctccanntggtatttnnacttgtgctntgtgacccttccctttg

SEQ ID NO: 1500 - DNA, 579 bp, Homo sapiens
  misc_feature 348, 360, 390, 396, 409, 411, 414, 441, 475, 485, 498, 502,504, 505, 521, 522, 531, 535, 548, 553, 554, 556, 570, 572,574, 575: n = A,T,C or G
acaaattccagtgtgcagaccacaacctcaaaacaaaaaagatctatttctactggatctgcagggagacaggtgccttttcctggttcaacaacctgttgacttccctggaacaggagatggaggaattaggcaaagtgggttttctaaactaccgtctcttcctcaccggatgggacagcaatattgttggtcatgcagcattaaactttgacaaggccactgacatcgtgacaggtctgaaacagaaaacctcctttgggagaccaatgtgggacaatgagttttctacaatagctacctcccaccccaagtctgtagtgggagttttcttatgtggcctcggantttggcaaagancctgcgcaaatgccttcaccgatattccanctggancctacaaaagttnanttntacttcaacaaaaaaatttttgagttntaggaataaggacggtaatccgcatttggtcttngatattcagnaatttacttggtntcgnannttgagcagttcttagnntaagaatgngctntaagccttgaaanctggnntnttttttgatgattnantnnttat

SEQ ID NO: 1501 - DNA, 354 bp, Homo sapiens
  misc_feature 271, 284, 294, 344: n = A,T,C or G
acctcaaagtgacggggagaatggaaccaagttggaaaacactgcaggatattatccaggagaacttccccaacctagcaaggcaggccaacattcaaatataggaaacacacagatgccacaaagatactcctcgagaagagcaaccctgagacacataattctcacattgaccaaggttgaaatgaaggaaaaaaaaatcttaaagagcagccagagagaaaggtcaggttaccataaagggaagcacatcagactaacagcagatctntcagcagaaactntacatgccanaagagagtgggtgccaatattcaacattcttaaagaaaaagaattttcancccagtattt

SEQ ID NO: 1502 - DNA, 562 bp, Homo sapiens
  misc_feature 335, 387, 391, 392, 394, 399, 405, 409, 418, 422, 438, 439,443, 452, 476, 480, 493, 501, 502, 531, 534, 537, 550, 557,560: n = A,T,C or G
acaggaaaacgctgccgcggtccacagtgtcgattctggatgaccacattagccactatccacagctagaggatcccatgggcttcttgaatgcatatatgggcttcatcaactccttctgagctggaaagagtagcttccctgtattacctcccctactcccttatctgttgtgtattccacttaggaagaaatgcccaaaagaggtcctggccatcaaacataattctctcacaaagtccactttactcaaattggtgaacagtgtataggaagaagccagcaggagctctgactaaggttgacataatagtccacctcccattactttgatntctgatcaaatgtatagacttgggtttggttttttgtgctatttagaaaatnttgnntnagcanttactnttcnctgttgcanaagnctttttttcataaaannactnttttaacantttgggacttctttgaataattanaagngctaatttctggnccaccccnncaggaattcttattaaggaggaggagaanggnggntccttcctttctngatgacnttntg

SEQ ID NO: 1503 - DNA, 381 bp, Homo sapiens
  misc_feature 177, 348, 351, 352, 358, 362, 368, 369, 379: n = A,T,C or G
acgcgggtgatccatgggatttcattctaatgaccatgtgaagatgtttgagtcctcctttgcctttcctcagaaagaatccttctaaggcacaaatcccttagatggataatgtaaggtattgttaactcactcatattgagatcatttttagagataccaggttttatgtatcangcactagatggttccaccctcatgggataaaactgcttacaagtattttgaaagaaaaactgaccaaaattcttaaattgttactaaggcaatcacgcacaggtgaccgtatgtcttatctgatttgttttaactccttggtgcccaaactcagaatgggaatttcactgncannaatgancatnccctgnnaaagaaaagnta

SEQ ID NO: 1504 - DNA, 432 bp, Homo sapiens
  misc_feature 267, 268, 307, 348, 366, 374, 382, 384, 391, 398, 400, 403,412, 426: n = A,T,C or G
actccccaatggtggatttattactattaaagaaaccagggaaaatattaattttaatattataacaacctgaaaataatggaaaagaggtttttgaatttttttttttaaataaacaccttcttaagtgcatgagatggtttgatggtttgctgcattaaaggtatttgggcaaacaaaattggagggcaagtgactgcagttttgagaatcagttttgaccttgatgattttttgtttccactgtggaaataaatgtttgtaaannagtgtaataaaaatccctttgcattctttctggaccttnaatgggaagaggaaaaggctcgtgaccatttgtttttttgngggtatagttgctatttntaaacctncttcagangntttactnaggaggntnatntacatatanccataatttctctnggaccg

SEQ ID NO: 1505 - DNA, 278 bp, Homo sapiens
  misc_feature 159, 174, 190, 221, 240, 256, 273: n = A,T,C or G
acagtgggcatgcagcgcctcgggacgacacccagcgtttatgggggtgctggaggccggggcatccgcatctccaactccagacacacggtgaactatgggagcgatctcacaggcggcggggacctgtttgttggcaatgagaaaatggccatgcanaacctaaatgaccgnctagcgagctacctanaaaaggtgcggaccctggagcagtccaactncaaacttgaagtgcaaatnaagcagtgggactttnatttttttttttttttntttgt

SEQ ID NO: 1506 - DNA, 225 bp, Homo sapiens
  misc_feature 117, 118, 156, 164, 167, 181, 182, 187, 189, 191, 220: n = A,T,C or G
acccaactaaccacaaagccaggcctgctgggatgaggataaaaatcaaataaacaatcctctcaacgtccaggaaatggctgccaggccttctgacttcatgaaacgccggggccnnctgtgctcttctatgctgggtcctcttcgtccattgcnacatatgntgnttgaattcttcatnngctcngncnattggctctgcatggcataattgcctggngaccg

SEQ ID NO: 1507 - DNA, 361 bp, Homo sapiens
  misc_feature 58, 259, 260, 302, 307, 316, 319, 320, 354: n = A,T,C or G
acccatgatttggacactttgtcgggcccatttacttatactgcaaagcgtccttcanatatcaaattcaagcctctaaataagaccaaggagtatacagcctgtgaactgatgaacatatacaaagactgacaatcacctgaaacattatttacatatcattgaaaacaaacccctgtatccagttatctatgatagcaatggtgtcgtcctttcaatgcctcccatcatcaatggggatcattccagaataacagtnnatactagaaatatttttatttgaatgcacgggaactgctttnctaancaaaaatangtnnttgagattattgtcaccatgttcagggatattgnggagatt

SEQ ID NO: 1508 - DNA, 485 bp, Homo sapiens
  misc_feature 294, 378, 392, 393, 401, 405, 427, 428, 440, 441, 453, 456,465, 484: n = A,T,C or G
acagtttttatactgaagctagtattgagctgcacttgaattcacattcttagcaaaataattgcctgagcacacacacattccacacgcatcattaaaggatagccatttattcttcatcttcatcctcttcctcttcatcttcatcttcttcttcctcctcctcctcctcatcttctggttcgttcttcttctttgagcctgttggcctgccagggcccttctttcctgcttcacttttgcccttggcacgatatgcagcaatatccttttcatatttctcctttagcttanctgctttctgttcatatggttgtttatctttggctgactgctcaaaccacatttacccaattttttgcagatccccaatggatnaggccagggtggtnnccttttgncttntgggcgatgtcaaagcaaaacnngaagaaggcagnnggtggcctttangancattggggncctttttttccccttcttnt

SEQ ID NO: 1509 - DNA, 489 bp, Homo sapiens
  misc_feature 254, 333, 334, 346, 357, 366, 372, 374, 379, 394, 397, 401,402, 410, 413, 416, 422, 424, 430, 432, 442, 472, 479, 482: n = A,T,C or G
actattccttacaactggagtgggtagaagccttatgaaaattatactgacaacctgatctcgtttactccatgttaatcacattcctaccaacctaaatttctgccaagtcagttctctttggaggaagcccattactccataactgactggatggtccagtgtcattttgatctgcttttcagaatggaaatttataatataaatatatgttttaataccacaaacactgtggggcacttgatatttattantggtgtatatggtccactggtttcaggccaaatctagaatttagtgatactggctcagaagaatttaagttctattcanntttcctgggtgnggagaacctanatttaaaantggctngntttgnttcttttggttcacnatntctnntttttctntgnccntccttnangttggnanagggtgtttnaatgttaatctccaggaaaacatggtgtcnttttctncgntcgaata

SEQ ID NO: 1510 - DNA, 427 bp, Homo sapiens
  misc_feature 292, 302, 332, 341, 344, 354, 357, 365, 380, 382, 386, 390,392, 394, 396, 398, 415, 416, 424: n = A,T,C or G
acttggtgaatatgaggagtatattactaaacttttcaactaccacaaagttcttcctatgaatacaggagtggaggctggagagactgcctgtaaactagctcgtaagtggggctataccgtgaagggcattcagaaatacaaagcaaagattgtttttgcagctgggaacttctggggtaggacgttgtctgctatctccagttccacagacccaaccagttacgatggttttggaccatttatgccgggattcgacatcattccctataatgatctgcccgcactggancgtgctcttnaggatccaaatgtgggctgcgttcatggtngaaccaatncanggtgaagcangcngttgttgntcccgatccaggttncntatnggantncnananctctgtccaggcaccannttttcttntgg

SEQ ID NO: 1511 - DNA, 462 bp, Homo sapiens
  misc_feature 204, 208, 240, 279, 317, 323, 340, 345, 346, 354, 358, 361,366, 378, 381, 387, 389, 390, 395, 411, 420, 427, 429, 430,432, 440, 460: n = A,T,C or G
acagacaaaactacagacttagtctggtggactggactaattacttgaaggatttagatagagtatttgcactgctgaagagtcactatgagcaaaataaaacaaataagactcaaactgctcaaagtgacgggttcttggttgtctctgctgagcacgctgtgtcaatggagatggcctctgctgactcagatgaagacccanggcntaaggttgggaaaacacctcatttgaccttgncagctgaccttctaaccctgcattttgaaccgaccaacnttaagtccagagagtaaacttgaatgggaataacgacnttccanaagttaatcttttgaanttctnnacactggngaanaancgaanaaatggaccggngcntggaananncttanttttttggaaaccggntttcttggntatggcncnnanaaatctanacttgggcccagtcccttgntg

SEQ ID NO: 1512 - DNA, 567 bp, Homo sapiens
  misc_feature 348, 370, 384, 388, 401, 415, 419, 422, 452, 459, 467, 479,487, 497, 509, 518, 524, 532, 539, 558: n = A,T,C or G
acctagaattcttcagcataaatgcccaaagaaatgcattagcaattgcagctaattgctgccagagtatcacgccagatgaatttcattttgtggcagattcactcccattgctaacccaaagactaacacatcaggataaaaagtcagtagaaagcacttgcctttgttttgcacgcctagtggacaacttccagcatgaggagaatttactccagcaggttgcttccaaagatctgcttacaaatgttcaacagctgttggtagtgactccacccattttaagttctgggatgtttataatggtggtcgcatgttttctctgatgtgttccaactgtcaactttnactggtcaacttatgaaacaanacattgcataaacncttnactttctcctgtntggggcctccaatngaangtngcaaggacagattgatcttgtttcacgaanccttaanagttgttnaactgacatctntgatttgngaactttgcnatggttaccaanaagaaggcntttttnaatttatncctggtngaagaaggtaatgccctgncacaaatgg

SEQ ID NO: 1513 - DNA, 469 bp, Homo sapiens
  misc_feature 155, 289, 294, 337, 339, 358, 360, 366, 367, 372, 381, 388,391, 392, 395, 396, 407, 419, 422, 424, 426, 429, 430, 440,449, 465: n = A,T,C or G
acagtttttatactgaagctagtattgagctgcacttgaattcacattcttagcaaaataattgcctgagcacacacacacattccacacgcatcattaaaggatagccatttattcttcatcttcatcctcttcctcctcatcttcatcttctncttcctcctcctcctcatcttctggttcgttcttcttctttgagcctgttggcctgccagggcccttctttcctgcttcacttttgcccttggcacgatatgcagcaatatccttttcatattatctcctttancttanctgctttctgttcatatggttgtttatctttggctgactgctnanaccacaatttcacccaatntntttgcnnaatcnccaaagganagggccnggnngtnnaacttttgtcnttgggcgatgtncanancnaannaggaataagncagaatggnggccttttaggacatngggg

SEQ ID NO: 1514 - DNA, 270 bp, Homo sapiens
  misc_feature 120, 175, 191, 202, 208, 218, 225, 259: n = A,T,C or G
acaatgcctgcatcctggagtataaacagagtggcgagagcattgacatcattacgcgagcccatggcaatgtccaggaccgcattggccgcccctcatagaccggcattattggcatcnttgaccctgagtgccggatgattggcctgcgtctctatgacggccttttcaaggntatcttcactagatcncgataataaanaactcnaggccttcancatccgnctggaggagctgcatgtcattagatgtcaaaggnctattttgggt

SEQ ID NO: 1515 - DNA, 247 bp, Homo sapiens
  misc_feature 135, 151, 199, 240: n = A,T,C or G
acagacaaagtgggaggttttatttcttggtctcttcctccttggataaagacttgatgatctcctccttcttggcctggaggcgctcttcacggcgcttgcgtgcttccttggtcttagacctgcgggcctcancctggtcagccaggancttcttgcgggccttgtctgccttcagcttgtggatgtgttccatganaatccgcttgtttttgaacacattccccttcacctacaggnactgtat

SEQ ID NO: 1516 - DNA, 567 bp, Homo sapiens
  misc_feature 290, 373, 390, 391, 396, 397, 399, 407, 408, 412, 415, 416,421, 425, 429, 430, 445, 457, 461, 465, 472, 480, 483, 488,508, 510, 516, 525, 526, 530, 535, 544, 545, 565: n = A,T,C or G
acgcgggggttccttcagtccgctggtcccgagcacgagctgtgaggggattcacttgtgtgcggaactcctcggaaccatggcgtccctttcccttgcacctgttaacatctttaaggcaggagctgatgaagagagagcagagacagctcgtctgacttcttttattggtgccatcgccattggagacttggtaaagagcaccttgggacccaaaggcatggacaaaattcttctaagcagtggacgagatgcctctcttatggtaaccaatgatggtgccactattntaaaaaacattggtgttgacaatccagcagctaaagttttagttgatattgtcaagggttcaaagatgatgaaattggtgatngcacctacctttgtaanngtttnnangcataatnntaanggnnagcanaatntttnntttgataaaagattntcccagaccatnttancggngtggagngaagcccnaangttgnaagagaggctttgttgattntnagttgntcatggttnngatnaggtnaattcgtcnngatttaatgatattggtggnca

SEQ ID NO: 1517 - DNA, 562 bp, Homo sapiens
  misc_feature 338, 388, 393, 407, 416, 421, 432, 436, 516, 522, 525, 528,531, 552: n = A,T,C or G
acttcaagttaaagtgaataaccacttaaaaaatgtccatgatggaatattcccctatctctagaattttaagtgctttgtaatgggaactgcctctttcctgttgttgttaatgaaaatgtcagaaaccagttatgtgaatgatctctctgaatcctaagggctggtctctgctgaaggttgtaagtggtcgcttactttgagtgatcctccaacttcatttgatgctaaataggagataccaggttgaaagaccttctccaaatgagatctaagcctttccataaggaatgtagctggtttcctcattcctgaaagaaacagttaactttcagaanagatgggcttgttttcttgccaatgaggtctgaaatggagggtcctctgntggantaaaaggagggttnaactgttgnttgcnggaataaggcnttantatgttacctcagtggcatttatgaaaagaggggaccagaagccaaagacttagtatattttttttccttgtcccttccnccatanccnccnttnagtctttgtttttttgttttncaaaaacatt

SEQ ID NO: 1518 - DNA, 289 bp, Homo sapiens
  misc_feature 122, 148, 219, 284: n = A,T,C or G
acgcgggggctgtggtctgagctagagggtgaagctggcggagcaggaggatgggcgagcagtctgaatgccagaatggataaccgttttgctacagcatttgtaattgcttgtgtgcttancctcatttccaccatctacatggcancctccattggcacagacttctggtatgaatatcgaagtccagttcaagaaaattccagtgatttgaataanagcatctgggatgaattcattagtgatgaggcatatgaaaagacttataatgattcactttttcnataca

SEQ ID NO: 1519 - DNA, 321 bp, Homo sapiens
  misc_feature 259, 293, 299: n = A,T,C or G
acatgctccatcttccaggaggaccactctctgtggcaccctggactacctgccccctgaaatgattgaaggtcggatgcatgatgagaaggtggatctctggagccttggagttctttgctatgaatttttagttgggaagcctccttttgaggcaaacacataccaagagacctacaaaagaatatcacgggttgaattcacattccctgactttgtaacagagggagccagggacctcatttcaagactgttgaancataatcccagccagaggccaatgctcagagaantacctnggccgcgaccacgctaaaggcg

SEQ ID NO: 1520 - DNA, 545 bp, Homo sapiens
  misc_feature 364, 373, 392, 396, 413, 419, 438, 444, 463, 466, 496, 508,524, 532, 533: n = A,T,C or G
acgcggggattattgtaaatatttgatcttgaatcacttgacagtgtttgtttgaattgtgtttgttttttcctttgatgggcttaaaagaaattatccaaagggagaaagagcagtatgccacttcttaaaacagaacaaaacaaaaaaagaaaattgtgctcttttctaatccaaagggtatatttgcagcatgcttgactttaccaattctgatgacatctttacggacactattatcactaagaccttgttatggtgaagtctttagtctttttcatgtattttcctcatgattttttctctttatgtagtttgactatgccttacctttgtaaatatttttgcttgtgttgccgcaaangggataatntgggaaaaacacccaaatnattnggctcactttataaaangaaagnatttaaaaaccttcagctnggctanacagtatattacctttggnatnaaattcttcatggagtgtcacctcaaatgnatactttgggtngggtacttttcttatnaaaatttnnataaactgaatt

SEQ ID NO: 1521 - DNA, 543 bp, Homo sapiens
  misc_feature 423, 435, 453, 455, 473, 479, 494, 527: n = A,T,C or G
acacaggaccaatgctgcccatccacatggaatttacaaacattctacagcgcaaaaggctccagactttgatgtcagtggatgattctgtggagaggctgtataacatgctcgtggagacgggggagctggagaatacttacatcatttacaccgccgaccatggttaccatattgggcagtttggactggtcaaggggaaatccatgccatatgactttgatattcgtgtgcctttttttattcgtggtccaagtgtagaaccaggatcaatagtcccacagatcgttctcaacattgacttggcccccacgatcctggatattgctgggctcgacacacctcctgatgtggacggcaagtctgtcctcaaacttctggacccagaaaagccaggttacaaggtttcgaacaaacaagaangccaaaatttgncgtgatacattcctagtngnaagagacaaatttttacntaaganggaagaatccagcangaatatccaacagtcaaatcacttgcccaaatntgaacgggtcaaagac

SEQ ID NO: 1522 - DNA, 555 bp, Homo sapiens
  misc_feature 475, 504, 520: n = A,T,C or G
actttttctttccttagactttggcttactggaagatttaattaaaaggtagaggagaagtaaatttgctgtaataattttgctgtaaataaaacaaagagtttattttattagataaagaatgtgaagtaagcatgaagagacaggctttgggagaaataccagaaagggatttttcaaagatggcattgtttaatctccgtgtggccctcggttgtgcaatcacagatgagccagaagagggccagccccctacttgtttgggctccgaaactcttaccaaacatcaatttttattcttgggatagaaaaatagtatgtgctatctctaatacgctacttcgatatttattaaagaagtatttttaatgtagtgtccacaggctcatttcattgaaaacaactgactatgatgatagacagctcctgattggcaaaagttcgatggtatattcagaattaaattttgcctgcnccctaaacactgacacatttaacttaaanggtttccatggagaanagtggtaaaagctgtattagccaaaattggcatcc

SEQ ID NO: 1523 - DNA, 581 bp, Homo sapiens
  misc_feature 7, 8, 10, 12, 18, 19, 21, 23, 28, 43, 48, 88, 369, 426, 538,542, 550, 561, 575: n = A,T,C or G
gcccttnncngnggccgnncngncgggncgcggggaggggcangtgtngcctctgtgcctcgttgtcccctggcgctacccggacatntttcagggtgccggcaccatgaagatctggacttcggagcacgtctttgattcacatcggcagccacccgtgggaaactgttacaacagctgcaatgcagaaatacccaaaccctatgaacccaagtgtggttggagttgatgtgttggacagacatatagatccctctggaaagttgcacagccacagacttctcagcacagagtggggactgccttccattgtgaagtctcttattggtgcagcaagaacgaaaacatatgtgcaagaacattctgtanttgatcctgtagagaaaacaatggaacttaaatctactaatatttcatttacaaacntggtttcaagtagatgagagacttatatacaaaccacatcctcaggatcccagaaaaaacttgtttttgacacagaaagccctaattaccgtgaaaggagttacctcaacangtanctttgaangactgatgggnaagtccttcggccncgacca

SEQ ID NO: 1524 - DNA, 561 bp, Homo sapiens
  misc_feature 43, 61, 98, 106, 130, 141, 153, 171, 222, 244, 299, 313,315, 362, 409, 443, 450, 466, 476, 494, 499, 507, 522, 525,539, 553, 555: n = A,T,C or G
acttttttttttttttttttttttttttggctttgaaatttanaaacaaattttatttaanatctgaaatacaattcctaaaatatcaacttttccanaaaaccgnggctacacaataatgcattgcctntatcatgttanaacgtgcattanactcaaatacaaaaaccntgaaacaaatcaccatccttcaacaatttgagcaaagatagaatgcctaanaacaacatagatggacttgcanaggatgggctgttttacttcaagccccataaaaaaaaaaaaagagcacaaatgcntgggttttcaggtntntacattaaagttgaacctttggcactaggaatcagggcgttttgtcncatagcattaacgcatattaaaaaattgtgtatgtgtcaaagggatnggaaccaccaccattcaagcaatgttgtcaactngggcaanaaaatgttctactggnatggttcttntttgggctaattacctgnatacnctgggggncaacttttgaaaatnaanaaaaggagcctacncttcttttattttntntttaaa

SEQ ID NO: 1525 - DNA, 561 bp, Homo sapiens
  misc_feature 489, 530, 544: n = A,T,C or G
acctacatcagatctaaccttgatcccagcaatgtggattccctcttctacgctgcccaggccagccaggccctctcaggatgtgagatctctatttcaaatgagaccaaagatctgcttctggcagctgtcagtgaggactcatctgttacccagatctaccatgcagttgcagctctaagtggctttggccttcccttggcatcccaagaagcactcagtgcccttactgctcgtctcagcaaggaggagactgtgctggcaacagtccaggctctgcagacagcatcccacctgtcccagcaggctgacctgaggagcatcgtggaggagattgaggaccttgttgctcgcctggatgaactcgggggcgtgtatctccagtttgaagaaggactggaaacaacagcgttatttgtggctgccacctacaagctcatggatcatgtggggactgagccatccattaaggaggatcaggtcatccanctgatgaacgcgatcttcagcaagaagaactttgagtcctnttccgaacctttancgtggcctctgcaactg

SEQ ID NO: 1526 - DNA, 492 bp, Homo sapiens
acgaaaaacctgaaatcacatgcctatgtaaggaaagtgctattcacccagtaaacccaaaaaaagcaaatggataatgctggccattttgcctttctgacatttccttgggaatctgcaagaacctcccctttcccttcccccaataagaccatttaagtgtgtgttaaacaactacagaatactaaataaaaagtttggccaaaaccaaccatgaagctgcaaaggtgcttgctcttactgtttcaaatttttgcaactctgtagtgtctcacttttaaaggaacagcttgattgcaaaggagaaaatagataagcaatgaagttatctccaacttcctaaaggcttatgacttctaaaaagtgaatctatcagcattccacatcagatttaaagcatcaaatgcctgtgaaacagcaaagatggtaagcaaagcaaactagtttttccgtctaaagtcgaaattgaacacttaccttcctcatagtacc

SEQ ID NO: 1527 - DNA, 560 bp, Homo sapiens
  misc_feature 412, 540: n = A,T,C or G
acagacttgtttttgagtgttgagtggcagggacaaaataagggaatgttattttttaagaaaattcattttcattgttgtctccttccttttctgtgaaagtcctcatactgagaaatttgtatattttatattaaatcacttactattgatttttgttgtgattttcaaaggtggattcccacagataaaatcttggctattgcccaaaacatagtaaagggtcacgtgtgactttttataataggaagaaaattctgcctttgtgagtgcacatgtccacatttcatccctccttccctcaaaaccctagagaggggcattaaagaattgttgatgtatatgcaatgtctgttaagcatgcactatgtatttcatcctcatttattgggtctgggactgaagtttttanccagcatggacctaacctactttttgggataaaattctctgttttgttacaggcaaaatctggtatggcgtgaatgccatgggtcattctgaatatatttttttctggaattttatcattaccccganggttgcaataccgtgccttt

SEQ ID NO: 1528 - DNA, 529 bp, Homo sapiens
  misc_feature 373, 502, 517, 521: n = A,T,C or G
acactttgagacgcaggaagcagctgaaagagctattgaaaaaatgaatggaatgctcctaaatgatcgcaaagtatttgttggacgatttaagtctcgtaaagaacgagaagctgaacttggagctagggcaaaagaattcaccaatgtttacatcaagaattttggagaagacatggatgatgagcgccttaaggatctctttggcaagtttgggcctgccttaagtgtgaaagtaatgactgatgaaagtggaaaatccaaaggatttggatttgtaagctttgaaaggcatgaagatgcacagaaagctgtggatgagatgaacggaaaggagctcaatggaaaacaaatttatgttggtcgagctcanaaaaaggtggaacggcagacggaacttaagcgcaaatttgaacagatgaaacaagataggatcaccagataccagggtgttaatctttatgtgaaaaatcttgatgatggtattgatgatgaacgtctncggaaaagagttttntccnttggtacc

SEQ ID NO: 1529 - DNA, 557 bp, Homo sapiens
acgcggggagtcagcctggctcctgttgaatagtctaccccccttgcactctacctgacacagctgcagcctgcaattcactcccactgcctgggattgcactggatccgtgtgctcagaacaaggtgaacgcccagctgcagccatgaagatctgtagcctcaccctgctctccttcctcctactggctgctcaggtgctcctggtggaggggaaaaaaaaagtgaagaatggacttcacagcaaagtggtctcagaacaaaaggacactctgggcaacacccagattaagcagaaaagcaggcccgggaacaaaggcaagtttgtcaccaaagaccaagccaactgcagatgggctgctactgagcaggaggagggcatctctctcaaggttgagtgcactcaattggaccatgaattttcctgtgtctttgctggcaatccaacctcatgcctaaagctcaaggatgaaaagagtctattggaaacaagttgcccggaatctgcgctcacagaaagacattttgtagattttccaagacagcttgtgaaaacca

SEQ ID NO: 1530 - DNA, 560 bp, Homo sapiens
  misc_feature 369: n = A,T,C or G
acgcgggacagagagcatctccgtggccaaaatcagtgtctatgggacactctgagctgtgccactgccacaggggtattctgccttcaggactctgccttcaggaacacgggtctgtagagggtctgctggagacgcctgaaagacagttccatcttcctttagactccagccttggcaaaatcaccttccctttaccagggaaatcacttcctttaggactgaaagctaggcgtcctctcccacaaaaaagtcctgccctcatctgagaatactgtctttccatatggctaagtgtggccccaccaccctctctgccctcccgggacattgattggtcctgtcttgggcaggtctagtgagctgtanaattgaatcaatgtgaactcagggaactggggaaggctgacctcctctttggtgttgcggtaagataaccgacagggctggtgaaaagtcccagatggcaggatatttggtttcagagtaaggactaggtgcaccaccatgattgactatcgatcaaaatggttggaacttaaaaatttttaatgaaagga

SEQ ID NO: 1531 - DNA, 562 bp, Homo sapiens
  misc_feature 427, 432, 464, 482, 508, 534, 550: n = A,T,C or G
acagagtatgtagtgggcatctgttgaatgaatgcttttcccagtagcagtgtattcatacaatattaatataattgtcccctggcttacagataaaaatgaaagcatcaagtgcccagtgagtgagacccaggtgttcttcctccacccctagtggtcccctgggcaggtctttttttttttgtaacactcaccattctgttctgtagtcaatcattgattgacttgtctgtgaacttgcaggaactgtttcatagtttcattagcacagagtaaacatgtttgccatgcaaggttattttgcatctgcatttaagtgataatgttgaatcaatgaaaagttttgattaagcagtagttgtagatatgctaagtttttcaaattactaatatcaagtggagatgttttacttttaagggtattgcntttgngatagcataaatagtggttttccttttttgtnatgtaaattaatttgctngcaactttttgtattcccttagactnggggaagcttattgcctttacaagtnccttcccgggcgggcngttcaaaagggc

SEQ ID NO: 1532 - DNA, 562 bp, Homo sapiens
  misc_feature 436, 448, 515, 537, 540, 557: n = A,T,C or G
acttgtattttcacagatggattatctggggtaattttcttcaaagggagtttgttatacacagtgaaaatgtattatagagtagaatagtaaagctctaggggtttcagaaagctttgatgaacagatgacaaacatctgaaaccccctccacactgttacccagtgtgtatataatgacttgttatagctcagtgtgcccttgaatccatacagtttcttaaaagacaataaaatcttattaataaagttaatgtaacttctaagttctagaaaatgctgattctgtctgccccattcaattgggggctactaattgatttgttgcttggatttcctgagaatttctctatttgtaggaggggttttttctttttacggtctgttgatgacaattactttatgggtgtgatgcaccgatggtagccaaggaatntgttggggaagntcggaaagaaacctttcttttcttttatttcagttaaagtaaacctttatcctggatgtttagaatnaacattaacaagttattttatnggngttcagagaattaaacntgact

SEQ ID NO: 1533 - DNA, 560 bp, Homo sapiens
  misc_feature 448, 551: n = A,T,C or G
acatttctttcgtgttcaaaccacggagttcacaacacagcagcacacacagctgggcgctttgtggtctcggcaccctcggcttccccttcacggggccgctttcgactagtagaaggctgggctagaacctggggtagagctgtggattcattttcctcagacagaagatcttgaaactttctcttcatgtcttcatcctgaagccacgggtgtcttaaggcttcttctgtcgtaaaacgtgcctttggatccactaccaacaacttcttgacaaggtccagagctttctctgagacttctgcccagacttcaggaatgaagttgtattttccactggtgatctgatccttcagtgacacttgagtcctatgctcagagaaaggtggatacccactaaggcagataaaaagaataactcctaaactccagcagtccacagcacggntatacccaacagtcccaacagaaacaagaacttcaggcgccaagtaggggggggtccacataagggtctcatgagagaagtctctccaaaaatcttggagtgncccaaaatc

SEQ ID NO: 1534 - DNA, 465 bp, Homo sapiens
  misc_feature 465: n = A,T,C or G
acttctatttatctttgatttcagtcttggcaattgtttaaaaaaaaaatctagatttgttttattaggttcagagtatgtggggaattatagaatccctctttcatcactttgtgtatgtcttttgttaacatatttgttatgccttattctaaaattgagcctcaaactggaatgcctttgaagacagatgcttctatagaggttctttgacctaaatagttcagcatttgtatttttattctggtatttaatcagattcctaatcatagcccgtaagaaggaatgttactttaatattggactttgctcatgtgctcgtgtccgcatttttttttttcttaaaatcatagccatatggtaaattttctattttgttatggttctcttttattgatgggcatgcaggtgggtgttacttggaaatggccaatttttattaaaatatttctggaagaaaaaaan

SEQ ID NO: 1535 - DNA, 561 bp, Homo sapiens
  misc_feature 372, 397, 458, 497, 501, 504, 505, 516, 519, 532, 533, 538,554, 558: n = A,T,C or G
acgcggggcctttctaactccgctgccgccatggctcctgtgaaaaagcttgtggtgaaggggggcaaaaaaaagaagcaagttctgaagttcactcttgattgcacccaccctgtagaagatggaatcatggatgctgccaattttgagcagtttttgcaagaaaggatcaaagtgaacggaaaagctgggaaccttggtggaggggtggtgaccatcgaaaggagcaagagcaagatcaccgtgacatccgaggtgcctttctccaaaaggtatttgaaatatctcaccaaaaaatatttgaagaagaataatctacgtgactggttgcgcgtagttgctaacagcaaagagagttacgaattaccgttncttcagattaaccaggacgaagaanaggaggaagacgaggattaaatttcatttatctggaaaatttttgtatgagttcttgaatnaaacttgggaaccaaaaatggggggtttatccttcgttntttncanngtggattgaancanaaaattggatatnnttatncaaaaggcttcccttnggtnccc

SEQ ID NO: 1536 - DNA, 560 bp, Homo sapiens
  misc_feature 523, 527, 538: n = A,T,C or G
acagatgtctgcgtgtttgcagcccaagaagatctagagaccatgcaagcatttgctcaggtttttaacaagttaatcaggcgctacaaatacctggagaaaggttttgaagatgaagtaaaaaagctgctgctgttcttgaagggtttttcagagtcggagaggaacaagctagctatgttgactggtgttcttctggctaatggaacacttaatgcatccattcttaatagcctttataatgaaaatttggttaaagaaggagtttcagcagcttttgctgtgaagctctttaaatcatggataaatgaaaaaggtatcaatgcagtagctgcaagtcttcggaaagtcagcatggataacagactgatggaactctttcctgccaataagcaaagtgttgaacacttcacaaaatattttactgaggcaggcttgaaagagctttcagaatatgttcggaatcagcaaccatcggagctcgtaaggagctccagaaagacttcaagaacaaatgtcccgngggngatccatttanggtattaattttatatgtcagg

SEQ ID NO: 1537 - DNA, 560 bp, Homo sapiens
acgggggctttttcctctcttcagcgtggggcgcccacaatttgcgcgctctctttctgctgctccccagctctcggatacagccgacaccatgggtttcggagacctgaaaagccctgccggcctccaggtgctcaacgattacctggcggacaagagctacatcgaggggtatgtgccatcacaagcagatgtggcagtatttgaagccgtgtccagcccaccgcctgccgacttgtgtcatgccctacgttggtataatcacatcaagtcttacgaaaaggaaaaggccagcctgccaggagtgaagaaagctttgggcaaatatggtcctgccgatgtggaagacactacaggaagtggagctacagatagtaaagatgatgatgacattgacctctttggatctgatgatgaggaggaaagtgaagaagcaaagagctaagggaagaacgtctttgcacaatatgaatcaaagaaagccaaaaaaacctgccttgttgccaagtctttcatcttactagatgtgaaaccttgggatgatgagacagatttggcga

SEQ ID NO: 1538 - DNA, 563 bp, Homo sapiens
  misc_feature 400, 404, 422, 445, 463, 475, 491, 500, 509, 536, 541, 546,560, 562: n = A,T,C or G
acgcgggtgaggggattgatttgacgcacaatcctgagttcaccacctgtgagttctacatggcctatgcagactatcacgatctcatggaaatcacggagaagatggtttcagggatggtgaagcatattacaggcagttacaaggtcacctaccacccagatggcccagagggccaagcctacgatgttgacttcaccccacccttccggcgaatcaacatggtagaagagcttgagaaagccctggggatgaagctgccagaaacgaacctctttgaaactgaagaaactcgcaaaattcttgatgatatctgtgtggcaaaaagctgttgaatgccctccacctcggaccacagccaggctccttgacaagcttgttggggaagttcctggaagtnactngcattaatcctacattcntctgtgatcccccagatattgancccctttggcttaatggncccgctctaaanaggggtctgacttggncgctttganctgtttgtnatgaaaaaaagaagatatgcaatgcgntattnctgancttaatggatcccntng

SEQ ID NO: 1539 - DNA, 560 bp, Homo sapiens
  misc_feature 525, 556: n = A,T,C or G
acaaacactgaacgccctgatacacctacaaacacgccaaatgcacctggaaggaaaagttggggaaagggaaaatggaagtcaaagaaatgcaaatattctttcaaatgtgtaaatagtctcaaggaagatcataaccaaccattgtttggagttcagtttaactggcacagtaaagaaggagatccattagtgtttgcaactgtaggaagcaacagagttaccttgtatgaatgtcattcacaaggagaaatccggttgttgcaatcttacgtggatgctgatgctgatgaaaacttttacacttgtgcatggacctatgatagcaatacgagccatcctctgctggctgtagctggatctagaggcataattaggataataaatcctataacaatgcagtgtataaagcactatgttggccatggaaatgctatcaatgagctgaaattccatccaagagatccaaatcttctcttgtcagtaagtaaagatcatgctttacgattatggaatatccagacngacactctggtggcaatatttggaggcgtanaaag

SEQ ID NO: 1540 - DNA, 562 bp, Homo sapiens
  misc_feature 500, 507: n = A,T,C or G
acatattttaaaatagaataaattgttaaacataaaattttaaaagtagtagatgtgcgtaagaaaactttgtaaaatagttatgagtcctacccagtagcaacttctggcattcaagcaggattccactatgtaaatatctgtaatgcatttataataagttgtgtagtttgtcctgcatccatactacactatttgctaaagtctcagtgccatctcctaatgagactgacattttaaaagtctgtatggaatatccttgataattcaaggaaatatccctcctgcctaagttccaaactgggaaacattcaaattatataaatgacatttcaggactttaagtatgaagataatgggaattttattgtttttgctttttaaaatgagagcatttttatttgataattttttttaaatttttaatttttaactaattcattattttaaagtaatcagtttttcaaatcttgatttttgatatcattattctaaggagntatcctnaaaggcacaaaaatttgaattctgcaagaaggctatttttttattgggagtttga

SEQ ID NO: 1541 - DNA, 561 bp, Homo sapiens
  misc_feature 6, 32, 34, 82, 199, 393, 462, 475, 514, 538, 550: n = A,T,C or G
actttnttttttttttttttttttttttttananatgaggtctcgctatgttgcccaggctggagtgcagttattcacaggngcaaccacagggcactgcagctttaaactcctgggctcaagcgatcctcctgcctcagcctcccaaatagttgggactagatgcacgcaccaccacgcctgactcaggacattattnttaaaggtattatccaggaaacagataaggtcattcataaaacacacggctttttttctttagctcagtgttaacaatgaaagtagattccactattgaagcacaagttgcaaattggtaacatagtgaacatattgctgtaggaaagggggttcagtgtggtgtgttatatgagcacttgaacttttcaaggngtcataagccagttatctgcccaaagaatttccatttcaggattcgagtttctcaaaagaaaacactgnggacatttggggncatgaacttttaagtggcaacagcccaaacagggcaagntgtctttaagtccccaacaacggncagcattactgngaattaccatt

SEQ ID NO: 1542 - DNA, 566 bp, Homo sapiens
  misc_feature 35, 72, 114, 148, 150, 189, 191, 199, 236, 362, 454, 487,497, 537, 548, 553, 554: n = A,T,C or G
actttttttttttttttttttttttttttccttcnattcttctcaaaggcatttgaaagggatacttttatnaatattcttgctgtaaaacaatgtaaaaataacttctgggtntaaaacagtaaaaataaaaatattctacctgagngngttaaatcaagtgatttgtaaaacaaaaccttcacaagngngggctttntacatgtaacttgccaggctgaaggcttacaccctcntgttctacaacacagatcactaatgatgataacatgagttaaattgggattcttgcccttctgtgtggcttttggcttctaggttctatgaccaaactattgacatatttgaagtctgtatgcagncattgtgtgataaatctactttacagctttgcttctacctgcagcttacatgataaccatgctgggaagtgctacatatgcttcatacaatntgttgccccatctgataataaaaatacaaaggngctctttaanctaaaccataaaccttattagaaaattctagttaagtggnttgtttttccncatcnntgtaaatccctt

SEQ ID NO: 1543 - DNA, 543 bp, Homo sapiens
  misc_feature 419, 467, 503, 514, 526, 536: n = A,T,C or G
actatttttgcagggtttgcacaggcccgtaactgtctactactttgatataatctgtatacatcctgtatgctgagctggtaaaatacattgtaaattacatattaaatattttatctgcttttacaagcgcaaggtgcaaaaatatatacaatagtctcattgatgactgtaaagtgaattaacatttggtgattatgcctagcttttgactaatataaagatcatagctccccttcacttctgtcttaacttgaacatggcgtgtttaaattttcatacatactttacttgaattattgctgttgtcacatatttttgcctctgtgagttcatctgatgattgagcagtagcatttgccttttgggttttttgtttgttattatagaagagatgacttctgctgattttgctttanaatggttaccttagaagaatttgggtggctcatgtcgaatttcacttntgcaataactttcattttctcatagctttataaaanatgggttcagngggtattgagcngaagaaaganatcccca

SEQ ID NO: 1544 - DNA, 561 bp, Homo sapiens
  misc_feature 478, 486: n = A,T,C or G
acacacctagttcataatcctcataatttatcaacaaacacaaaaaagtgtcttacttgagagtgagtgtgtgtgtgtgcgtgtgcacgtgcacacatgtgcacgtttgtatgtatggaaataaacttataaatggggacgtattggagaaggaaatacatagacctacaactttgagcaaatagcagtgatgttttaggaactgaaatgtcacacttaaagtcttcagcccagctacttccctatttttgtggggagaagagggcctgattagaactgttctggttgtgtttggcgggaggggaataatttttgttcagtccttcttagtgaccaaactttaatttttaagaataatatattgacttactgaactgaagcattctgagttgaaaggagctccagaggagtggagttctgtgttgctcacatgttaaaatcttgctcaccttcagagcagagggaatcctatcttcanatatccgnccattttcatctcttaattggtagtcaaaagtattgacttgagaagtgtgctctggtattctggggtctgaagct

SEQ ID NO: 1545 - DNA, 559 bp, Homo sapiens
acatcactgtgtccctaaaataacccaccccagtgaaaaactccagcccagtgaactggagggtgttctttttggccacggtaaactgagggattatgatgaagctgaagttcaggatgaatgagaaaatgttgaacttcaaaagccatctcagaaagttgaaataggagaggacgctggttccaaacttgcctccaatgatcttcagccgtcttctgccacaggctgatggaattcagaatttccgacaggctgttcttggatctccgataagcccgggaaatggagttcagacactgaatacagcaattgagctgaaggatacgatgggtctgtttgcttttttctttgtcaactattttcctaaggttccttttctcttccatggtccttggctggttcctgatggctttaattctgtctctggatgtcatgggtataagggatgcgattaacttctgtccttggggtgacttgtgccaatcacattcagacaatggtgggtttccataagcatggacagggaccactttcacctacataagccagggttcacata

SEQ ID NO: 1546 - DNA, 561 bp, Homo sapiens
  misc_feature 380, 477, 480, 501, 530, 541, 546, 547, 553: n = A,T,C or G
acactgagcccaaaaaggcccgtagccaacactatgacttggttttaaatggcaatgaaataggaggtggttcaattcgaattcacaatgcagagctgcagcgttatatcctggcaaccttactaaaggaggatgtgaaaatgctctcccatctgctccaggctttagattatggggcaccccctcatggaggaattgccttagggttagacagactgatatgccttgtcactggatctccaagcatcagagatgtcatagccttcccaaagtccttccggggacatgacctcatgagcaataccccagattctgtccctcctgaggaactgaagccctatcatatccaagtctccaagccaacagactccaaagcaganagagctcattgaatcatgcataccatgcagaaagttgagcttttaggttttgcctctttgcttccccaaggctaaagtcagatctagagttctgccncangtctaacaatcaagtcttttngatggaaggaatccaggcaacattttttnccccacgaaanaaacnngattanagataccc

SEQ ID NO: 1547 - DNA, 560 bp, Homo sapiens
  misc_feature 548: n = A,T,C or G
acagtttgctgcaaatgataatttaatttggataatgctttaaatcattgatttctcatgaaattacttttgagtgaaatttgacaagaattttctttatactctcttctttaccaaaacgtattagaagtccccatagtccaaaataaaatgtaaccatagaatggggagataactttagtcaaagaccaagtaaatattaccttctttgcagaactccaggttgtagtcacgtaaaagtgtggccacttgttgcttaactttttggacaatgggaaaaaaaaaacaataaaagctaaaatgtggtccagcatatgaaactcttctcaaaaacagaagaaagtcatgaccattgttgggaaagtgttttacatttccaatgaaattctattccattgatctgtttggatgattgcttcaacctatttggctctagcccataaattgtaattgattcagtcatgtaaagaacccttttatcttaagcttagaatttataaccaatggaaaagcaggaaaggtggtttttcattcactctaataattgngcagggataagc

SEQ ID NO: 1548 - DNA, 562 bp, Homo sapiens
  misc_feature 515, 518: n = A,T,C or G
acaaaatacaactataaaagcaaggaacaattaatgccatgcaagattttaaactaaaaatggcatagaaatgcaatttaaaacagcaaactcaaattcacataacactcaagataaaaaggtcagcagtaagttctactaacgttgcttaacaaggatttagaaaaggaaatacattctctttgctggtataatggtataaatcagatcttcaaatctatgggaacgagtcatcttctctgtcctctatctcaagaaattagctcttttacagttgtttttatgaaatcttttctttcagttaaatcataagtaggataattttcatagacctttttgcaaatctgtttcattgtgacttcttccaagttagcactggccagtaatttctttattgtttcctttaactcttcatctgtagggggtttcttcaactttttaattaaaggttcatcatctgaactatcctcagactcactttcttttttgggaactggttttgattcttcttgggnggngctgctatctgcttttcttaacatttggcacttttcacaagatt

SEQ ID NO: 1549 - DNA, 563 bp, Homo sapiens
  misc_feature 391, 463, 513, 516, 536, 552, 557, 560: n = A,T,C or G
ggacaaagttgtatgacagggcatattctttgcttccaagatttgggttgggggcactaggggttcagagcctggcagaattgtcagctttagtctgacataatctaagggtatggggcaaggatcacatctaatgcttgtgttccttatactctattatatagtgttattcatgattcagctgatcttaacaaaattcgtagcagtggaaccttgaaatgcatgtggctagatttatgctaaaatgattctcaagttagcattttagtaacacttcaaaggttttttttgtttgttttctagacttaataaaagcttaggattaattagaagaagcaatctagttaaatttcccatttgtattttattttcttgaatacttttttcatangttatttgtttaaaaagatttaaaaatcattgcactttggtcagaaaaataataaatatatcttataaatgnttgattcccttccttgctatttttattcagtaattttgtttggcatcatnttnaaacacccgaaaaaataaangattttttaaaaggcntatanagncca

SEQ ID NO: 1550 - DNA, 556 bp, Homo sapiens
  misc_feature 434, 435, 443, 446, 469, 479, 502, 526, 527, 535: n = A,T,C or G
accaataaatgatgtgttagctgaagataagattttggaaggaacagaaacaaccaaatatgtgtttactgatatatcatatagcataccacaccgggagcgttttattgtcgtcagagaaccaagtggcacactacgcaaagcctcttgggaagaacgggaccgaatgatacaagtttatttcccaaaagaaggtcgtaaaattttgacaccaataattttcaaggaagaaaatcttaggactatgtatagccaggacaggcatgttgatgtcctcaatctctgctttgcccagtttgagccagattccacagagtatatcaaggttcatcacaagacctatgaagatatagataaacgtggaaaatatgaccttttacgttcaacaagatactttggtggaatggtgtggtattttggaaataataaaaaannatgatggnttnctgatttgccagatttcagaganatttaatcgntgatgccaccaactttggtccancttgtatcacgtgcttccatccannatggccantccggctcaaggggccaagga

SEQ ID NO: 1551 - DNA, 560 bp, Homo sapiens
  misc_feature 385, 394, 473, 528, 560: n = A,T,C or G
accttcgcagtgtaggagatggagagactgtggagtttgatgttgttgaaggagaaaagggtgcggaggcagcaaatgttacaggtcctggtggtgttccagttcaaggcagtaaatatgcagcagaccgtaaccattatagacgctatccacgtcgtaggggtcctccacgcaattaccagcaaaattaccagaatagtgagagtggggaaaagaacgagggatcggagagtgctcccgaaggccaggcccaacaacgccggccctaccgcaggcgaaggttcccaccttactacatgcggagaccctatgggccgtcgaccacagtattccaaccctcctgtgcagggagaagtgatggagggtgttgacaaccagggtgcangagaacaangtagaccagtgaggcagaatatgtatcggggatataaaccacgattccgcaggggccctcctcgccaaagacagcctanagaaggacggcaattaagaaagataaagaaaattcaagggagatgaaaccccaanggtcgggcagccaccttaaacgtcgggtcctn

SEQ ID NO: 1552 - DNA, 562 bp, Homo sapiens
  misc_feature 560: n = A,T,C or G
actcaaagacgaatcatgaaaaagaaaaaaactttatttcaaacaggttcagtgatatatgtgtgtgctacagcaaaggctggttgtggcaaagtttcatttcaaactgtatgatgtgggctgggcaaggtggctcacgcctgtaatcccagcactttgtgaggccgaggtgggctgatcaccctgaggtcaggagagaccggcctagccaacatgctgaaaccccgtctctactaataatacaaaaattagccaagtgtggtggcgcgcacctgtaatctcagctactcgggaggctgaggcaggagaatcgcttgaacccggggggcagaggttgcagatcacgccactgcactccagcctgggtgacagagccagactcaaaaacaaaacaaaataaaacaaacaaaaaaacagaactgcatgatgtataattttgacattatgtgggaatgtttaacttctgccaaaatgtagattcaatcccacattatgcccatttttatatttaattttagtccctaagttttcattacccaaaaaaaaaaaaaaaaaaaaanga

SEQ ID NO: 1553 - DNA, 559 bp, Homo sapiens
  misc_feature 121, 126, 343, 356, 416, 445, 464, 471, 491, 497, 531, 547,550: n = A,T,C or G
actttttttttttttttttttttttttagtagtctatacatttattgagtaaaaacaaaatcagtgtcagacacgttatatttgattgggttcaaatttggctgatgtccaaatgcggcanaaaanaacggcggggcgaagggacacagtgttgctgacaaggtgacactgaacacaacagttttcctttaattgtaaaagcgggcatcgcacagctggtgtgagtcaattaaccaaggcagggaggggactcaatgttttacaagcagagggaaaaccaaagtaggcagagaactttcaagagaggagagggccagaacactgagagaaaaagctgcagcanaggcctgctgganaacagtggtcggatctgctggctcacttggggaacacagtgaccacttcataaccctcangtggtgtgactcgctcccgggcatgcttntacaatagatttgatcctncacaaanaaatggcccttctgtttcangttggngccccagcagtgcacacctaacactcagggtggngggggaacggccccgnagnttacaaaca

SEQ ID NO: 1554 - DNA, 559 bp, Homo sapiens
  misc_feature 440, 458, 463, 475, 480, 489, 499, 515: n = A,T,C or G
acaccttgaaggcgaggttaattaaatcctgttgtggagtttgagggccggaatttaatttttggagttttatttaatatcgggagcagattgggtaataaaatgtatattgagaataagacggccttttgaccttttagggtctagggctgtaaagcgtctcagggttgctgccgaacgagccatgaactgggctgggtttttatatttgatgaaaaagagcctaaacgcttctgatttgggataaagaaaaaggagcattaaccttgactatgtccttagctccagccacctttttaagagtaaattgctgggcaggtgggggagggctagtcacggaacgaaactgtaagccggaccaggtgtgaggaggggaggtgataaaaagattacagggtggaggagtggagcctgaggaagaattgggacctaacttggcntggaaaggaaggggaaanggcanatgggtttgtanaaaangaagattanacacactcancaacccctggggtttnggactgaagggacaggtggggaagggaaaaaaaggaaaatttgg

SEQ ID NO: 1555 - DNA, 549 bp, Homo sapiens
  misc_feature 305, 351, 352, 368, 395, 400, 435, 442, 448, 481, 489, 501,505, 511, 520, 524, 531, 537, 539: n = A,T,C or G
acgcgggggcgtcttgttcttgcctggtgtcggtggttagtttctgcgacttgtgttgggactgctgataggaagatgtcttcaggaaatgctaaaattgggcaccctgcccccaacttcaaagccacagctgttatgccagatggtcagtttaaagatatcagcctgtctgactacaaaggaaaatatgttgtgttcttcttttaccctcttgacttcacctttgtgtgccccacggagatcattgctttcagtgatagggcagaagaatttaagaaactcaactgccaagtgattggtgcttntgtggattctcacttctgtcatctggcatgggtcaatacacctaannaaacaaggaggactgngacccatgaacattcctttggtatcanacccnaagccgcaccattgctcaagattatgggggtcttnaaagctnatgaangcatttcgttcaggtgcctttttatcattgatnataagggnattctttcggcngatnactttnaatgaactncctnttggccngttctntnggatgatact

SEQ ID NO: 1556 - DNA, 561 bp, Homo sapiens
  misc_feature 484, 495, 533: n = A,T,C or G
actttttaaaagtaaaaaatcagatgattctttttggggaggaggatgtgcgagtggctaatttgaaaccaagaatctcctttaatttctttgtcactgcacctaaaaatgtgtctgatatcattcctagaactgaagttgaaaaggccatcaggatgtcccggagccgtatcaatgatgctttccgtctgaatgacaacagcctagagtttctggggatacagccaacacttggacctcctaaccagccccctgtttccatatggctgattgtttttggagttgtgatgggagtgatagtggttggcattgtcatcctgatcttcactgggatcagagatcggaagaagaaaaataaagcaagaagtggagaaaatccttatgcctccatcgatattagcaaaggagaaaataatccaggattccaaaacactgatgatgttcaaacctccttttagaaaaatctatgttttcctcttgaggngaatttgttgnatgtaaatgttaaattcatgggttagaaaatttagatngataaagattcattaaatgtccaaacta

SEQ ID NO: 1557 - DNA, 531 bp, Homo sapiens
  misc_feature 460, 514: n = A,T,C or G
actttggcctctctgggatagaagttattcagcaggcacacaacagaggcagttccagatttcaactgctcatcagatggcgggaagatgaagacagatggtgcagccacagttcgtttgatctccaccttggtccctccgccgaaagtgcctttctggtgacaataatacactgcaaaatcttcaggctccagtctgctgatggtgagagtgaagtctgtcccagacccactgccactgaacctgtctgggacgccagtggccctgctggatgcaccatagatgaggagcctgggagactggccaggtttctgctgataccaggctaagtagctgctggcaacactctgactggccctgcaggagagggtggctctttcccctggagacaaagacagggtgcctggagactgcgtcaacacaatctctccggtggtatctgggagccagagtacaggangaagaaaaactgcgctggggtttccatggttccctctgggtcctaactgagcanctctttcccgcgtacct

SEQ ID NO: 1558 - DNA, 507 bp, Homo sapiens
  misc_feature 227, 257, 342, 386, 421, 425, 429, 437, 438, 445, 465, 472,475, 477, 481, 496: n = A,T,C or G
acgcgggagttgatgattttcttttaaagaaattagtttatttaaaagcaagatagcctgggttgggagttagtgcatatcatcagccctccatctaatgtgattgctaagatgtgcaggataggacagcttagaatgagtgccttgacacctacatatggctgcattccatacctcagtgaagaagccgaaggatgctgacacacagtgatgtggagggcattccngagaaacttttgcaacaagtgtattaatgngattggttttctttttgttttaagctaaacatctaaaacaaatttcaagttaacagttcatacaactcagatttagtattattgnttatcataaaacatattatgttcctagtttttaaaaagaccccnagttgatttaatataatttattggcattttttgcngaanaggnttaagtcnnattaatngatttttaaaaaaagccaangaaggcnctngngtcnaaatttaaatgtttnataataaaaat

SEQ ID NO: 1559 - DNA, 564 bp, Homo sapiens
  misc_feature 435, 465, 473: n = A,T,C or G
acgcgggatcacctaccactgcaagaacagcattgcatacatggatgaggagactggcaacctgaaaaaggctgtcattctacagggctctaatgatgttgaacttgttgctgagggcaacagcaggttcacttacactgttcttgtagatggctgctctaaaaagacaaatgaatggggaaagacaatcattgaatacaaaacaaataagccatcacgcctgcccttccttgatattgcacctttggacatcggtggtgctgaccaggaattctttgtggacattggcccagtctgtttcaaataaatgaactcaatctaaattaaaaaagaaagaaatttgaaaaaactttctctttgccatttcttcttcttcttttttaactgaaagctgaatccttccatttcttctgcacatctacttgcttaaattgngggcaaaagaaaaaaagaaggattgatcanaacattgngcaatacaagtttcattaacttcttccccgctccccaaaaatttgaatttttttttcaacactcttaccctggtattggaaaatgtcaacc

SEQ ID NO: 1560 - DNA, 553 bp, Homo sapiens
  misc_feature 40, 241, 260, 280, 297, 300, 309, 317, 324, 326, 340, 375,383, 390, 443, 461, 470, 471, 495, 502, 509, 510, 516, 528,530, 533, 540, 544: n = A,T,C or G
acccaccaccttcttctcctacatatcccttccagatggncatccagactcagagctctctctacagagaggaaattctccactgtgcacacccacctttggaaagctctgaccacttgaggcctgatctgcccatcgtgaagaagcctgtaacactcctctgcgtctatcctgtgtagcatactggcttcaccatcaatcctgattcctctctaagtgggcattgccatgtggaaggcangccaggctcactcacagantcaaggcctgctccctgtanggtccaaccagacctgnaanaacaggccnctccattngctcttnanatgccacttctaanaaaagcctaatcacagtttttcctggaattgccanctgacatnttgaatncttccatttcacacagaatgcaaccaagtcacacgcttttgaattatgccttngtagagtgttgcatttcnaaagtgcanncagggaccataccgggtcttgatncagtaanaatggcnnggtttngtgccatcctgnanctnataatgnggantgtttgcct

SEQ ID NO: 1561 - DNA, 436 bp, Homo sapiens
  misc_feature 42, 68, 109, 112, 154, 207, 263, 307, 377, 406, 415, 422,425: n = A,T,C or G
acttttttttttttttttttttttttggggtccaaaaatggngattatttatggctttggagttgganatttttggtccaaatacttcatggaatcctgcacccacttnttnttggggtcggcacaaatatccttggccagtttggtcttgaanatcacagctttctggggacatttgccactggtgattctcctgtagctctctantcgctgaaggggtatcttcctattggccaggttaaagcagcaggtggttgggacanaagctggcccagcgagcccctgggggctgaaggcagctgctatnagcagcagccacagaagtgctgcggagaccttcatgttggaggctgaaggtgtgagctttggcgtgagangtggtggtttctgggttggtctcaacctntcttcccgngtacctnggncgcgaccacgc

SEQ ID NO: 1562 - DNA, 553 bp, Homo sapiens
  misc_feature 499: n = A,T,C or G
acacagattggcttcatatcaattaaagaatgagatacttgactggatttttgtataactgcttcctgcctccttccaaactgactgcaagagagaaatttagctgtttgatttacttaaaaccaaatggattacaatggataattcatcttttgggtatatttttactattattcaaagccaaatgattttcatttaattgtaataataactgacaaaaatcagtatgttgtagctaatatgttttatgcatgagaattattcttaaagtttgttctccctgtttattacacagatcaggaatagatttgttcagttcagtatttattggataccctctattggtcaggcattgtgttaagcatatgtgaatcaaaatgaacacaactttttcctttgagtctgatacagtgaaggagataaacacttctacaacttaaatttaattttaatagcagtagaaagagaacataagggaatagaggttaattttacccanaagcagggatagagaaaatatttacggagaaaatcacatatccatggggctcga

SEQ ID NO: 1563 - DNA, 559 bp, Homo sapiens
  misc_feature 500, 521, 524: n = A,T,C or G
acaagcctcaccaagggcaaccccagaaaagtgaatgagtttgtcttctccaatcatgacttcctcgataagtttgcaacttccaagcttcaccagttctgggtgatcaaaggtagaggcaatttcaccacctgtgacaagagctaggcgttccacacctgcaaaatctgcatgctcaatagccatgacaccagcagcaccaaagagctgttcaggataattataaattaattgcctgttaataaagcaatttattccatgcttaagaatacgttcaactttctccttcattttttccttttccgcatgttctatttctgcaacctttgctgtagagtcaactcttacccgggaaccaaatatctttattttgtctgtatccataccagtatttgcaataagaattttagcattttcaattcgttttggttgatttactccaatttttttatccaacaggaagccttatctaaataggaatctgccaaacttcctcctancttcttgataatatgaattgnctncagggttgccagaacctttcagtctgagaactgct

SEQ ID NO: 1564 - DNA, 467 bp, Homo sapiens
  misc_feature 218, 234, 316, 362, 369, 370, 378, 390, 396, 416, 418, 425,428, 430, 433, 444, 452: n = A,T,C or G
acctattatatagagggatagctgaataaagtctgtctcaaaaccagtgttaaatcactctcagggttgagaagaaaaaaggggagtctaaaatcacaacaagtaaagacatatctaggacccttgtccttctggatccacgcttccttcagggtcttcatcattataaatgttctctgccatttgccacacttgcatgatattgtcttctgatacangaacaaatcacccaangttcattggggttccaggagaaatcagatatcttggcagtatgaccaccatgaataaacaacaactctggtggcccgtcttntgcatcttctggggattgttcctctccaattttacttaaatcccanacattcnntctgcgancagtaccttcgnccgacnttcgccggggaccacgctangngcgaatnttnantcnacacttgggcnggccgttncttgttggataccga

SEQ ID NO: 1565 - DNA, 560 bp, Homo sapiens
  misc_feature 558: n = A,T,C or G
actgcagaggtatgtgcagaaacacccacccatttaagctttcaataaatacaaggcatcattttaaaccatttcagtagaataaattaaaaatattgcatttctattggcctgctttgcttcttgagctggcctggagtgctgtttgtgacacagaagacacagtagttaattagtggctaccccaagctctttagacttcagcacttctcgctcttcaagcctcagcaccttttttgcagcaataatggtattcttcattagcattgccactgtcatggggccaacacctccaggaactggagtgatatacccagctttttgtctgactccttcaaaatccacatctccaaccaacttgggtttggcagttacaggatcgtgaactctatttattcccacatcaatgactgctgctccttccttgatcatatctggctgtgatcaagatttgggaatacctgcagcagatatttacaatatctgcaagaattgtatgtttcttccaactgctctttgggagatatcgatgagatattgtaacaagtgggattaccntc

SEQ ID NO: 1566 - DNA, 560 bp, Homo sapiens
  misc_feature 486, 494, 542, 544: n = A,T,C or G
actcgtcaatgggctcggtcatatataccacctcgaagccccgtttccgcactcgctccacaaaagctgagttggccacctgctctttgctctcaccagtgatgtaatagatggacttctgtgtctccttcatgcgagaaacatactctgacagagatgtcatctcatctccagactgggaggtatgatagcgcagcagctcagacaggcggcggcggttagtggagtcttcgtggattccaagcttgagatttttagagaatgcctcatagaatttcttgtaattctccttgtcttctgccagctcagagaagagctcaaggcacttcttaacaatgtttttgcgaatgactttcaagattttgctctgctggagcatttctcgggagatgttcaggggcagatcctcagagtcaaccacaccacggataaaattgagatactctggtatcaactcatcacagctgtccatgatgaacacacggnggacatanagtttgatgttggtctttttcttcttggtctcaaaaagggcaaagggnanccgaccaaggaataaa

SEQ ID NO: 1567 - DNA, 251 bp, Homo sapiens
acaatgaccaagatgcgaccaggatcagaggttccttggggaagacccaccctacgaagttggaatgagaccatcagatgtgataagaaactcttctagatgtcaacataaccaaccttataaagactaaaattcatgagtagaacaggaaaatcatcctgactcatgtgttgtgttctttatttttaattttcaaagaggctcttgtatagcagtttttgtctattttaacattgtagtcatttgtacct

SEQ ID NO: 1568 - DNA, 543 bp, Homo sapiens
  misc_feature 414, 434, 446, 476, 479, 486, 487, 500, 510, 525, 534, 540: n = A,T,C or G
accggattctctctttaaccctccccttcgtgtttcccccaatgtttaaaatgtttggatggtttgttgttctgcctggagacaaggtgctaacatagatttaagtgaatacattaacggtgctaaaaatgaaaattctaacccaagacatgacattcttagctgtaacttaactattaaggccttttccacacgcattaatagtcccatttttctcttgccatttgtagctttgcccattgtcttattggcacatgggtggacacggatctgctgggctctgccttaaacacacattgcagcttcaacttttctctttagtgttctgtttgaaactaatacttaccgagtcagactttgtgttcatttcatttcagggtcttggctgcctgtgggcttccccaagtggcctgnaggtgggcaaaagggaaatnacagacaccacnatgttgtcaaggatggtttttggggactanganggctcanntgggtgggagaanatccctgcanaaaccccaccaaccnagaaccgtnggtttncct

SEQ ID NO: 1569 - DNA, 548 bp, Homo sapiens
  misc_feature 482, 544: n = A,T,C or G
acaatcatattctcaggtttcatgacagaactaaaaactctaggaaactcatatagtatctccaaaaccttggtatcagtttcaattctgccttccaaatctttgtcttcaaatgcttccccatcaggttcatgcctactgaagtcacagaattccacattttggaatggtttgcttggaacttgagcctcgctgatttctaaacaggcctgtgaaagaagtatcctctcatgtcctgtcacatccgtagtttcaacttccaaacactccaccttctttggtttaaaatgtctctgcaaaggtgcattagttataaccccagcatttggggctccctgctgttgtccttgggataatacttctttggattcagtggttcctctcttagaacaaactctatttgttttttgaaggcatgtgtccattcttaatttttgttgaagatttcttttcttctctacaattatgctcctttctatcanggattgatatttagtcttcgagccctccggtttgtcttttaaaagactttcttttttggganaaga

SEQ ID NO: 1570 - DNA, 512 bp, Homo sapiens
  misc_feature 227, 397, 452, 453, 464, 473, 495, 496: n = A,T,C or G
accgttgtgtgttttctgcaatgtggagttgacttagcttggcattttagatttgttaaaactattttttccataaatactttgaaacatatttatatatttcaatttaaggaatctttttgccatgtgtatgcaaatattattttcttcatacattcattttcttttcaggggaaaattttgggatgggggactcaggaggacctgtgaagcatgtagttatctanatctgggtaatttcatgtttattaaactcgaactttggctagttaaactcatattgaaacttcatctagtctcttaattttttaacactaaattcaagtcatttgttttaagtctctaaaaaagaagattgcagtcatccattcatatgcatggggtctgatcgcaaatncactaaatgtggagtgtatgaaccaaaatggaaacctgctgtatggaaactaccnntcacttatggntcattgggnttttgtaccttgcccgggcggnncgctctgaaagggcca

SEQ ID NO: 1571 - DNA, 544 bp, Homo sapiens
  misc_feature 156, 303, 326, 482, 484, 487, 489, 512, 513, 516, 518, 519,536: n = A,T,C or G
acctacatcagatctaaccttgatcccagcaatgtggattccctcttctacgctgcccaggccagccaggccctctcaggatgtgagatctctatttcaaatgagaccaaagatctgcttctggcagctgtcagtgaggactcatctgttacccanatctaccatgcagttgcagctctaagtggctttggccttcccttggcatcccaagaagcactcagtgcccttactgctcgtctcaacaaggaggagactgtgctggcaacagtccaggctcttcagacagcatcccacctgtcccancaggctgacctgaggagcatcgnggaggagaatgaggaccttgttgctcgccttggatgaactccggggcgtgtatcttccagtttgaagaaagactggaaacaacagcgtttatttgtggggtgccacctacaagctcatggatcatgtgggggactgagccatttcattaaggaggnancangncatcccagctgatgaaccgcgannttnanncaataaaaaaccttganttcctttc

SEQ ID NO: 1572 - DNA, 563 bp, Homo sapiens
  misc_feature 440, 505: n = A,T,C or G
acacttttgttacagttacatatatgaatagttagcagaggagaaactcctccgttgttcctacaccaagggaaaaaatgtaaggactgtatagctcatgaataatattaacatttttctatcacaaaatattgataaaattggaattgtatcaattcatgttatggagcttaacattttagccgaaatattaagataatataaataaggcttttagcttcatatcaagacctatttgaacacttctagaaaagaacattaaaagttttttcctcatttatggtttgatttagtgtagtgcctcaactgttcttaatggtgtcttaagtataatgcataattattagaatataattataaggcattacagaattttatgtggatacttgcaaagatatttcaagtccaaaacttcaaattacacacccaaatatgtttgntgccttaatctatacttggacaaaggcaacattttaatttttgctaagtcttaactttagcccanatggggtggaaatggtaaaattttcatccctcatctttgcattggaaaaaaatacctt

SEQ ID NO: 1573 - DNA, 576 bp, Homo sapiens
  misc_feature 416, 455, 474, 490, 521, 525, 526, 533, 536, 543, 544, 550,556, 557, 559, 568, 570, 576: n = A,T,C or G
cgcccttagcgtggtcgggccgaggtactggcaacagctgatgcgtataaaacccttaaagtctggatcagttatgtatatctggatcttagaatatccatggcacttctgatagcaacaaatggcatctggcactggagggaacttgcattcttcaacaaatttctctaacagcatctttattttttgtggctgagactcttcaataatcacattactcgtgggccaagttaacactccaggaagacgataaatcaaggttcttgctttctcaaagtgattgagagcttctagaaatctgttttttttcaaatatacttttccaattccacagtaggccaagcaatcaaggccctcactggggtagtgttcaataatcctcttaaactggttttcggcttcagataattcctcangctgtcctattccaaggagagaaatgggcaagtccatanacgaccaaaacataagttnatcattggccaggttnaattgcttatttttttgaggatctaaaccgntcannacctctntanaggcctnntgcaanagctgnngnaaacgctgntncaatan

SEQ ID NO: 1574 - DNA, 563 bp, Homo sapiens
  misc_feature 364, 384, 432, 457, 459, 466, 472, 478, 490, 506, 509, 513,528, 539, 544, 560: n = A,T,C or G
acccagtaaaaaccagaatgacccattgccaggacgcatcaaagttgactttgtgatccctaaagaacttccctttggagacaaagatacgaaatccaaggtgaccctgctggaaggtgaccatgttaggtttaatatttcaacagaccgacgtgacaaattagagcgagcaaccaatatagaagttctgtcaaatacatttcagttcactaatgaagcccgagaaatgggtgtgattgctgccatgagagatggttttggtttcatcaaagtgtgtggatcgtgatgttcgtatgttcttccacttcagtgaaattctggatgggaaccagctccatattgcagatgaagtagagtttactgnggttcctgatatgctctctnctcaaagaaaatcatgcttttaggattaaaaaactttcccaaggggcnccggttcatttcttcccttcagatnancgttttntgggcncggttnaaaaaaaaaagncactttttttccaatnctnaaancactagccccaaatnaagggccaaanagaangggaggctgggggatnggc

SEQ ID NO: 1575 - DNA, 559 bp, Homo sapiens
  misc_feature 69, 115, 138, 141, 197, 201, 220, 226, 229, 266, 274, 339,342, 346, 447, 484, 487, 490, 496, 502, 504, 526, 531, 547,554: n = A,T,C or G
actttatttttttttttttttttttttggcagtttttacatttatttaaacagaaaacgtgcacatganctgcctactcattttcttcactgcgcagcctggcattggggttggngactctgatggccagttgggcanctntttccacgatggctttgcggttcttggaggaaacattgtgagcgatctcggcacantaanatttgttgcacatcagcancacttncanctccttgacgttgtggaccaggaacttccggaagccnctgggcancatgtgctttgtttttttgttgcttccataaccaatgttgggcatcaaaatctggcccttgaatnttntacnaaccctgttgtcaatgcctctgggtttccgccagttacgcttaattttgacatatcggtctgactggtgccggatgaacttcttggttctcttttttgacnatcttgggcttcacaaggggtctgaggggcggccatnatnccnagaaangaaatngnttgcccacctcccgtaaggcancgccnaagaaaaaaacccccnggtctcnggcgg

SEQ ID NO: 1576 - DNA, 560 bp, Homo sapiens
  misc_feature 460, 469, 546, 553: n = A,T,C or G
acattcatagggttttttcctagagtgggtcctttcatgtatacgaacatactggggacacgtgaatgcttttccacattccttacattgataagccttctctcccgtgtgaatcctttcatgtctacgatagcatctgggactatgaaatgctttcccacattgctgacattcataaggcttttctccagtgtgagttctttcgtgtattcgaagggtagcagaataactaaaggatttaccacattgtttacattcatatggtttctctccagtgtgaattctttcatggataagatataaactgagacaatggaaggctttcccacaaaatttacatttataaggtccatccccactgtgcattaccacgtgtctttgaatgcttgaatgggaaataaaagtttttccacattctttacaagcatagggtttctctccagtgtgatccctttgtggngttctaaangaggggtgatatctgaaggcttttttaagttggttgacacttacatggcttcggtccatattcctgatactcataangccttgngtccaat

SEQ ID NO: 1577 - DNA, 541 bp, Homo sapiens
  misc_feature 381, 387, 393, 396, 410, 414, 418, 426, 427, 466, 491, 509,514, 517, 519, 521, 526, 532, 534, 541: n = A,T,C or G
acataaagtaactggtatatgtgcacaagcatattgcattttttttttttttaactaaacagccaatggtatgttttgattgacatcaagtggagacgggatggggaaaaatactgattctgtgaaaataccccctttctccattagtggcatgctcattcagctcttatctttatattccagtaagttattttgctctcactgttttaacaaaaaaaaaacaacaacataaaaatccttgcataccttgttcaattggagaattttaatgtttttcatttatcattgtaaaaccaaggacaattttataacttttttggactttcttttttttttttttttttttggaggctcactccgtcacccaaatgggagtgcggnggcatnatctangcncattgcaaccaccncctnccangttcaagnnatttttttgcctcagccccccaaagtagctgggtattanaaagcatgcaccccccatgtccagntatatttgtatttttagnaaaanaanancnttttncccatntngggccan

SEQ ID NO: 1578 - DNA, 561 bp, Homo sapiens
  misc_feature 551: n = A,T,C or G
acttgattggtcatttgaaaacactgcaacagtgaacttttgcatctcaagaaaacattgaaaaattctatgaattgttgtagccggtgaattgagtcgtattctgtcacataatattttgaagaaaacttggctgtcgaaacatttttctctctgactgctgcttgaatgttcttggaggctgtttcttatgtatgggtttttttttaatgtgatcccttcatttgaatattaatggctttttccattaaagaataaaatattttggacaatgccgataaatgtatgaagttagtatccacatcataaattcagagtgatgtttagcagtaaatcaatattttgaagtgatacacagatgtctttcctccccacaaacttttttaaacaaaaaacaagacctcttttctttagatggtgcccctatgcccaccacaacagagattttacatggaaaccgggctcagtgagaactgatttcctgcccaatatttgtctttgggctgtctctagtgactaattattaaggaatctaactggttatacagttnaaggcttctt

SEQ ID NO: 1579 - DNA, 545 bp, Homo sapiens
  misc_feature 294, 495, 497, 522, 526, 533, 544: n = A,T,C or G
acatcttgtctgttactttttgataattctcaaaacatttcaagcatttaaattattatatctgttatggtaatctatgatcagagatctttgatgttactattgtaattgttttgggcttcatgaactacacctatataagatggtaaacttgatcaataaatgttgtatatgttttgagtgcttcactgctgaccactcccagtctctctgcctcttctcaggccttcttatttcctgagacagaacaatattgaaagtaggccaattaataactctacaataacctctaantgttcaagtgaaaggaagagtcgcccatctctcttttaaatccaaagctaggaatgattaagcttagtgaggaaggcatgttgaaagccaagataggctcaaagctttggcctcttgtgccacatggttagctaagtcatgaatgcaaaggaaaaagtcttgaaggaaatttaaaaagtgatacctccaagccaaggcgtngnggctcatgccctgtaacccctactntttnggaagtnaaggcgggcana

SEQ ID NO: 1580 - DNA, 551 bp, Homo sapiens
  misc_feature 102, 450: n = A,T,C or G
tttcaggttcttcctagctcggggcttttaaattttgaaatctaaacattctttcccaccatcctttttgactgttgaccttggttttctcttctaagtttntgtccctctgcttccttactttttttcctttttgaattctatctttatctgtcttttgttcactttttaatgctatatatgggcaggggtgagagacattactgagcaccttggtgagcaagcctggctttaaagattggagaagagcttctggcaccagaaccctgtcttcctccagttctcaacatggtgttgctcttcagtcataccggaatctgaatcaaaaaagtatttttaaatatccatgatttctccctgtattgaggctagccctgatcatgctttttgtgcctgtcaccaggtctcccaagtgcactcatccaggtcaagtgctcagatgtgtttaangagaccctatattcagggaagttgcgtgaacactgcagtgggggagaattgagaatagtcaggcctatcaatctcacagaatcacccctctaacctttgat

SEQ ID NO: 1581 - DNA, 524 bp, Homo sapiens
  misc_feature 150, 177, 188, 222, 227, 297, 312, 324, 340, 349, 360, 365,382, 392, 397, 409, 410, 411, 428, 430, 439, 443, 449, 462,463, 475, 476, 480, 483, 487, 489, 515: n = A,T,C or G
acgcggggagtggcttgaggtatccgcaggagcggccgggtggcgggaggaaccgttacgggaactgaagtttcggattaagcctgatcaagatgacaacctcccaaaagcaccgagacttcgtggcagagcccatgggggagaagccantggggagcctggctgggattggtgaantcctgggcaanaagctggaggaaaggggttttgacaaggcctatnttgtncttggccagtttctggtgctaaagaaagatgaagacctcttccgggaatggctgaaagacacttgtggcngcctacgccaagcantcccgggactgnttttgatgccttccanagtggtgcnacgccttcttntgatnctctttgggaagctctnaattcccaancctcntacaaaagtttnnnaccgaataaggactccntnccctgtccntctncaaaangaaaagaattgtnnttgtcctccctnncccnggncggncnggtttttaaagggctaaattacatcntcaactggg

SEQ ID NO: 1582 - DNA, 545 bp, Homo sapiens
  misc_feature 110, 128, 176, 183, 191, 227, 263, 275, 278, 367, 391, 401,408, 418, 424, 467, 470, 472, 480, 483, 489, 505: n = A,T,C or G
actttttttttttttttttttttttttttggccatttgctatgttttattttgctagtagcttattaaacataacatgcaaataatcaaagagaaacatacatgacttanagtgaaaaataattctanaaaagtttcactaggtaagtatgcaaattcttattctaaaaatacttntttaagngcatgaancttcatgtattttgcaatattcttggcctcaatatntaccacctattttttaaccagacaaatttgaatgtntcaagataattnggngcaagagagtaacatccatatgtatttaatccaagctttgaggaacattaagatttaaggattataaaacttggctgatttccatgcanccacgtaaaaggttttgcacatcntttgacagtngaaatanaaaaacactnaatttncaaataaagcattgagtttggatgggctatttcgggtatatgntgngngttcttgnganggaaanaaggcctgcccttttnatcttttttttaaaaaaaaaaaaaatgtttacaaaaacat

SEQ ID NO: 1583 - DNA, 486 bp, Homo sapiens
  misc_feature 311, 337, 339, 355, 412, 413, 417, 436, 442, 449, 471, 483: n = A,T,C or G
acagccaacggtttcccttgggggctttgaaataacaccaccagtggtcttaaggttgaagtgtggttcagggccagtgcatattagtggacagcacttagtagctgtggaggaagatgcagagtcagaagatgaagaggaggaggatgtgaaactcttaagtatatctggaaagcggtctgcccctggaggtggtagcaaggttccacagaaaaaagtaaaacttgctgctgatgaagatgatgacgatgatgatgaagaggatgatgatgaagatgatgatgatgattttgatgatgaggaagctgaanaaaaagcgccagtgaagaaatctatncnagatactccagccaanaatgcacaaaagtcaaaatcagaattggaaaagactcaaaaccatcatcaacaccannatcnataggacaataatcctttnaagaanacatganaaaacttctaaaacaccaaaangacctaattttntgt

SEQ ID NO: 1584 - DNA, 553 bp, Homo sapiens
  misc_feature 176, 192, 285, 291, 369, 396, 421, 428, 443, 471, 491, 492,496, 499, 515, 516, 531, 532, 544: n = A,T,C or G
acgcggggggggtggtgccagtttggagctcctggaaggtaaagtccttcctggggtggatgctctcaggcaaatgagaattaatcataggggaaactaccgacaacttctggaggagatgctgactagttacaggctagctaaagtagagggagaagaaagccctgctgaaccanctgccacagctacttnttcgaacagtgatgctggaaacccagtgacaatgcaggaaagccatactgaatcagaaagtggtcttgctgaattaaacagctctaattgaanatgcanggacaaagatgagtggtgaaaaaatatgactttcctttttggtaatatttttgtgatctttgatggttcttaacctangaagtgtaatgtatgcatttatataantgttttgttattttgaatcttgganaactaantttattatatttcanaatagcctttgttttttaaaaaaggccntttgccatacacctttttgnnatantgnaaaaattgacctattnnattgttaccttcccnnggcggcccgttntaaaagggc

SEQ ID NO: 1585 - DNA, 562 bp, Homo sapiens
  misc_feature 417, 475, 482, 498, 507, 511, 540: n = A,T,C or G
acaagaccagcaaagcccagcttctcggctgtgagctctgagaacctggggacgatccgccctcctgttgcgatggcaatcagctcaatttcaggtcctcctacccagcgaaccgcaggcaagttgttctgaagaagtaagtgatttgcttcatcatcaaagccccactgacaaattgctaggttagcaccagtctctttaatttgttgaatcatctcttcaaatttctccttttcgtatttctgaagggctttataatcttcgacagaggtcacatccagcttatgctttgtttttggtttgggtggttcaaatggacatgtgagaattgcaatcttcgcatcttccactttttttggcatctgtgggtgactgaaatccttgtccacaatcaccgcccttaatcagtttagtgtnctccagcctgccgcccactttgccttctacttttgataaagctcaaagtcaacgtctntccgctncatatctgctacagtnaggacgggnattnacagcaattctcaaccatcttgtcggtgncaactgttgaccaactttggaa

SEQ ID NO: 1586 - DNA, 561 bp, Homo sapiens
  misc_feature 488, 536: n = A,T,C or G
accaccaagaattcttcaaataagccagctgtcaccaccaagtcacctgcagtgaagccagctgcagcccccaagcaacctgtgggcggtggccagaagcttctgacgagaaaggctgacagcagctccagtgaggaagagagcagctccagtgaggaggagaagacaaagaagatggtggccaccactaagcccaaggcgactgccaaagcagctctatctctgcctgccaagcaggctcctcagggtagtagggacagcagctctgattcagacagctccagcagtgaggaggaggaagagaagacatctaagtctgcagttaagaagaagccacagaaggtagcaggaggtgcagccccttcaagccagcctctgcaaagaaagggaaggctgagagcagcaacagttcttcttctgatgactccagtgaggaagaagaagaaaaactcaagggcaagggctcttcaagaccacaagcccccaangccaatggcaccttctgcactgactgcccagaatggaaaagcacttanaacagtgagggggaggaagaaaaaa

SEQ ID NO: 1587 - DNA, 504 bp, Homo sapiens
  misc_feature 34, 110, 172, 174, 180, 224, 307, 386, 431, 449, 474, 496: n = A,T,C or G
actttttttttttttttttttttttttttggaanaaggtccaaatcaataggtcttttattgcatcatttaaatatcacaagtaggtcttaagtgtcatctggcatcttntttctgtagccaggtaactcttaaatcttattcatcagcctgctgaacagttcctttttcananacatanataccatccaaaaatttcctgatatccttgtttttaactgttgnggcttgctgaatcaaagccgctgaatttgaaacaagctcaatgtcatttccttcaaggattaattcatctttctgggcttganatactgaacaagcaacacctggtctcatccgaaccctgcggatgtatttttcacccaagaaatttcggatttcaacaanagacccattctcctggataacaacgttgatggggaagtgagcatncacagacctcatcttgtnacggaagcccagtgtaacacccttnatcatgttctgtccttggccgngaccacgc

SEQ ID NO: 1588 - DNA, 536 bp, Homo sapiens
  misc_feature 171, 205, 323, 482, 513, 521, 526: n = A,T,C or G
actttttttttttttttttttttttaaaatctgaggaataaatgcaagtttttaaaagtggcaaggacatgtaaacagaaattgcttctatatattttaatacaaaatccacatttattattagcaccaatgatttaacttacaaatatattctgactccctggttttaanagcaatagcttaagttaaatacacagttcatctnttccaaagtcaaaaacaataaaataaaataacaccgacaagcaatagtagcaatggcaatttgaaaacatatactttaagttaatgggacttcaatagctcagtactcccttggcatntcatggtgacgtgacttaaaaggtggtgcaaaggtaggtgcacccctgggggtcatgaaaagtttcctgaagtcttcattggtgagttttgattggtggaaggagtgaggatcatccccatcgtggccatcggggggccaaagggttgggagaacgggntactattctcgctccggcattttgttatcgntcttttcncctgncaccaaccaa

SEQ ID NO: 1589 - DNA, 562 bp, Homo sapiens
  misc_feature 501: n = A,T,C or G
acagtttcccagcccacagtcattgcttcattccttgtctgatcagatggtagttagaaaagaagctctcctacatccatcttctataccaggaaagaggaagagtggcaaaagcagagtcttgtgccttcaaagattcattctggttctgttgtgggctaaggcatcctgttcccagtatacgcattttgagatcagatagagttgctcttccaggagtcagcacccacgctcatgtccgtctttcagttaaatctccttggtttagtaactcttgtggatttactgcagttaagacagaaacttcatatgattgcctccctgactgcatggtcaccaggtgatgtgtcacatcaggcactgaagacagggaacgtggggatccttcagcaagcacctcgtcatcaactcccaggatagaattggtatttggtaggttcaaggactctccaccaaggctgggcttgggaattcatagacaccaggtttttactgggtccncgggattttaaggagaagtaagagtaatgtagtattttatacaaatatttataaaaaatat

SEQ ID NO: 1590 - DNA, 549 bp, Homo sapiens
  misc_feature 287, 445, 464, 474, 482, 522: n = A,T,C or G
actacgacatttctgccaaaagtaactacaactttgaaaagcccttcctctggcttgctaggaagctcattggagaccctaacttggaatttgttgccatgcctgctctcgccccaccagaagttgtcatggacccagctttggcagcacagtatgagcacgacttagaggttgctcagacaactgctctcccggatgaggatgatgacctgtgagaatgaagctggagcccagcgtcagaagtctagttttataggcagctgtcctgtgatgtcagcggtgcagcngtgtgtgccacctcattattatctagctaagcggaacatgtgcttcatctgtgggatgctgaaggagatgagtgggcttcggagtgaatgtggcagtttaaaaaataacttcattgtttggacctgcatatttagctgttttggaacgcaattgattncttgagtttcatatataanactgggtgcngtcacatnacaaatatttcaagtggtgaaaatcttgtttgttactggncatttcccatttcctttttcgtttaga

SEQ ID NO: 1591 - DNA, 547 bp, Homo sapiens
  misc_feature 447, 474, 535: n = A,T,C or G
acagttcactctgcaaaaaatactccttctcagcattcacattccattcagcatagtcctgaaaggtctgggtctggttctgttggaaatggatctagtcgatacagtccttctcagaatagtccaattcatcacatcccttcacgaagaagtcctgcaaagacaatcgcaccacagaatgctccaagagatgagtctaggggccgttcctcgttttatcctgatggtggagatcaggaaactgcaaagactgggaagttcttaaaaaggttcacagatgaagagtctagagtattcctgcttgataggggtaataccagggataaagaggcttcaaaagagaaaggatcagagaaagggagggcagagggagaatgggaagatcaggaagctttagattacttcagtgataaagagtctggaaaaacaaaaagtttaatgattcanaaggggatgacaccagaggagacagangattatagacagttcaggaagtcagtcctcgcagatcagggtaaaaagtttttgctcctgntctcaccggaat

SEQ ID NO: 1592 - DNA, 560 bp, Homo sapiens
  misc_feature 301, 420, 448, 476, 481, 482, 487, 496, 512, 523, 527, 545,552: n = A,T,C or G
acgcttgatcagatttctgatgcagataatatcccaggacttttggttctcaaaagcttggcctatcggaacaaaggttcatttgatgaagctgcaaagattatggaagaccttctctcttcttaccctgacctagctgaagttcatgcccttgaggctttgattcatttcaccaaaaaggactatctacaagcagaaaaatgttttcagagagctcttgagaaagataccgaagttgcagaatatcattaccaacttggattaacatactggttcatgggtgaagagacaagaaaagatnaaacaaaggctcttacccactttctgaaggctgcaagactggatacatatatgggcaaagttttctgctatttaggtcattattatagagacgtagtgggagataaaaacagagctcgnggatgttataggaaagccctttaattanatgacactgatgctgaatctggagctgnagccnnttganccctagtgngggagcttggaaaaantgggaaatggntttnagctttccttaacaacanttactcnaaaaaggc

SEQ ID NO: 1593 - DNA, 562 bp, Homo sapiens
  misc_feature 324, 431, 432, 450, 458, 470, 493, 504, 507, 508, 511, 512,515, 516, 535, 543, 548, 556: n = A,T,C or G
acgcggggtcctgcttttggttcttacagtagtcggcgtaggccttaggtgggttcgtgcgccttctacctcgctgtttcggttttcctggctcctcggcccttttctcccctgttgcagctgggagcggacgaggcgcgaagctgggattttttactgtctcctgaagaatttaacacaaacatggatatcagaccaaatcatacaatttatatcaacaatatgaatgacaaaattaaaaaggaagaattgaagagatccctatatgccctgttttctcagtttggtcatgtggtggacattgtggctttaaagaccatgaanatgagggggcaggcctttgtcatatttaaggaactgggctcatccacaaatgccttgaagacagctacaaggattttccattttatggtaaaaccaatgcgaatacnntatgcaaaaacagattcnggatatanatattcaaaaantgcggtggaacttttgcttgacnaaaagaaaagnaannatnnaanngaaaaataggccaaaactntggaaaanactgnaacaaccnacaaaa

SEQ ID NO: 1594 - DNA, 560 bp, Homo sapiens
  misc_feature 409, 448, 493, 511, 515, 540, 541, 552: n = A,T,C or G
accatctgtggtggctctctgcaagttttaaaactgcctctgctgagctctcatcattttggtggtttctgtgttagatctcgttagtctgcattccacagcttctcagttgccatttgatttcccaacttgtccggaagtgtttccagaatactgatcacttttttttttgaggcatctgacaaagtcacaaagtctcagactagaaataattacccagtatgatcatggcatccaagaccagagtctcagaactcattaagaaacagtttacttggaatggagaatacccatctgtaatacaggtcctgtcatttcattcatctcaaattatttttgaattcttcccaaatggctgctggatttaggtggtaataggggctgtgggccataaatctgaagccttganaaccttgggtctggagaccatgaagagggaaggaaaaanaggggcaagttcctgaacctaaccaatgacctgatgggattgctngaccaagacacaagaagngaangctggtgtctgttgcccttccccannagactggagtnttttgggg

SEQ ID NO: 1595 - DNA, 560 bp, Homo sapiens
  misc_feature 428, 513, 542: n = A,T,C or G
acttgccccttccccagaaaagcgggacttgctgctaagggtgaaggaccaaggcagttgtccctgcgtggtctgacacccttgaaacgtgggtgtataatcagagaggcatccctgcaatgattaaacaccaagggaaggctgccttcccagtctgtgaccagcgccggagttttgggtccacggataaaacgtgtctcttttgtctctaccagaaaatgaaaggaattgaaattaagagaagggagagattgaagtgtagtgccaagattgaaaggagaaagtggttgagggatagtgagggaagttggagaagagagtaaaaagaggctgcttaccagatttgaaattggtgagatgtttcttgggctcgtcggtctgaggacctgaggtccgtaagtggatctttctcagggagcaaagagcanggaggacggaggatttgatctcccaaggggaggtcccccgatccgagtcatggcaccaaatttattgtgccgtccatgtgaaaanaaccacaaacaggcttttgtgtgagcaanatggctgtttattttacc

SEQ ID NO: 1596 - DNA, 547 bp, Homo sapiens
  misc_feature 481, 512, 517: n = A,T,C or G
acgcggggaaaccggacccgcaaccaccatgaacagcaaaggtcaatatccaacacagccaacctaccctgtgcagcctcctgggaatccagtataccctcagaccttgcatcttcctcaggctccaccctataccgatgctccacctgcctactcagagctctatcgtccgagctttgtgcacccaggggctgccacagtccccaccatgtcagccgcatttcctggagcctctctgtatcttcccatggcccagtctgtggctgttgggcctttaggttccacaatccccatggcttattatccagtcggtcccatctatccacctggctccacagtgctggtggaaggagggtatgatgcaggtgccagatttggagctggggctactgctggcaacattcctcctccacctcctggatgccctcccaatgctgctcagcttgcagtcatgcagggagccaacgtcctcgtaactcancggaaggggaacttcttcatgggtggttcanatggnggctacaccatctggtgaggaaccaaggcc

SEQ ID NO: 1597 - DNA, 426 bp, Homo sapiens
  misc_feature 315, 363: n = A,T,C or G
tgtacatgttgtgggtgccgctccgggagtcatagcgcagccagatcccgaagttcttcacccgcaggggggacttctcaaacacctgcccacagtagacaatctcccctgaagacttcttcatcttctttaactgagatacaaagtaccttgttcactgtggcataatagaaccgttgatgaacctcttaactgcaaaagataccaagattattctggttatcctggatgccatttcaaatatctttcaggctgctgagaaactaggtgaaactgagaaacttagtataatgattgaagaatgtggaggcttanacaaaattgaagctctacaaaaccatgaaaatgagtcttgtgtataangcttcgttaagcttaattgagaagtatttctctgtagaggaagaggaagatcaaaaccgttgt

SEQ ID NO: 1598 - DNA, 523 bp, Homo sapiens
  misc_feature 469: n = A,T,C or G
acacctggcttgaggctgtcatcttcctcatcggtatcatcgtagccaatgtgccggaaggtttgctggccactgtcacggtctgtctgacacttactgccaaacgcatggcaaggaaaaactgcttagtgaagaacttagaagctgtggagaccttggggtccacgtccaccatctgctctgataaaactggaactctgactcagaaccggatgacagtggcccacatgtggtttgacaatcaaatccatgaagctgatacgacagagaatcagagtggtgtctcttttgacaagacttcagctacctggcttgctctgtccagaattgcaggtctttgtaacagggcagtgtttcaggctaaccaggaaaacctacctattcttaagcgggcagttgcaggagatgcctctgagtcagcactcttaaagtgcatagagctgtgctgtggttccgtgaaggagatganagaaagataccccaaaatcgtcgagatacccttcaactccaccaacaaagtacc

SEQ ID NO: 1599 - DNA, 549 bp, Homo sapiens
  misc_feature 392, 440, 452, 492, 523: n = A,T,C or G
acaagcctttaaagaagcaagacaaaatgttgctgaagttgagtcatcaaagaatgcttcagaggacaatcattctgagaatactttgtattcaaatgataatggaagtaatttacagcgtgaagcaactgtcatcagtgagcaaaaagtcaaagaaaccaaaatattggcgaagaaaccaatacataattcaaaggaaaaaatagcaaagatggaacatggacctaaagcagtgactattgcaaattctccatcaaagccttcagaaaaggattctgtagtttcccttgagtcccagaagacacctgctgacccaaaactgaaaactctaagtcaaaccaaaaaaaacaaaggatctgatagctcactctctggtaacagtgatggcgganaagaattttgtgaagaggagaaggaatattttgatgatagcacagaanaaaggttttacnagcagtctttcatgtcttgaagatagtgatagcggtgacnacttcttcattgggaaagtcagacggacacnaaagaaagaaagtaggtgtcattctt

SEQ ID NO: 1600 - DNA, 551 bp, Homo sapiens
  misc_feature 38, 50, 73, 79, 86, 93, 135, 167, 169, 186, 188, 229, 241,255, 259, 278, 289, 325, 342, 348, 420, 425, 439, 458, 485,500, 518, 525, 540: n = A,T,C or G
actttttttttttttttttttttttttgggcagaggcncaatcattttanattaaaaaaaattgaacaaaganaccctnttgcganaggtganatgaggccctgccatgcaaaggagtcccagcagaggaggaanaattccatcctggagttcaagtttctgtgcananacaggacctggggacananaacggtcctccacccaatttcagctggtctgtcctcatcanctttgggctgancctggggtgatganaggnggagtctcccctggatggngaccggacttntggccaaacttgcatttgcattttgcactcatgacnatgatgatgcccatggngcacanaaccccagcgcaaatgagcccgccaacctggaggctgtgccagtcatagtagaaaggactgtttttatcttntaggncattggccgtccangacaggaaagcctgccaanaacacaagcaggcccagggtcaccttntgcatgtcaaaaccnctggccttgtgtggtttnccaagcntgagcaaaagttccnggagaaaatcc

SEQ ID NO: 1601 - DNA, 563 bp, Homo sapiens
  misc_feature 400, 407, 411, 428, 435, 445, 453, 458, 460, 467, 477, 488,499, 510, 511, 516, 518, 520, 524, 532, 542, 543, 547, 549,553, 557: n = A,T,C or G
acaatttaaaaataagtctatgttttcacattgattttaaaaaatatagcatgtttgaattacaaatgattaagcaaactctattacttcatagctgaccatcttccagaaaattcccacttaattgaatacttagaaaaaaatggccagtggccgattgaaaggtatattaaaattaagggcagttttaattctgaagacaaatatcttcatggaaatctatttgtaagcttctgagattgctgctgaaagtctacagtctgtgaatataccaattcccctttacaactgatgcagatcattatgaaatactggaaggcataccctacaatttaggaattggtgtggctgccactgctatgctctcaattgcacactcatcagttcctctgcggatccnggaagtngccnttctcaccccatccggngccccanctgttttttntcaatccnagtantncatcccntagggctgantcagtgccatngcccacatgcngaacagcattnnttttntnancctnaaaggggntgaaagggtnncttnanaccntgtngtgggt

SEQ ID NO: 1602 - DNA, 544 bp, Homo sapiens
  misc_feature 415, 416, 438: n = A,T,C or G
acagatggggtcttgctatgttgcccaagctggtcttaaactcctggcctcaagcaatccttctgccttggccccccaaagtgctgggattgtgggcatgagctgctgtgcccagcctccatgttttaatatcaactctcactcctgaattcagttgctttgcccaagataggagttctctgatgcagaaattattgggctcttttagggtaagaagtttgtgtctttgtctggccacatcttgactaggtattgtctactctgaagacctttaatggcttccctctttcatctcctgagtatgtaacttgcaatgggcagctatccagtgacttgttctgagtaagtgtgttcattaatgtttatttagctctgaagcaagagtgatatactccaggacttaaaatagtgcctnnagtgctgcagccaaagacagancggaactatgaaaagtgggcttggagatggcaggaaaagcttgtcattgaccctggcaaatttaacaaactgatgcttgaggatgattgagggtggggtcctaccc

SEQ ID NO: 1603 - DNA, 563 bp, Homo sapiens
  misc_feature 522, 548: n = A,T,C or G
acaaaacccttgctcagaagctgtatcagcatgaaatcaacttattcaaaagtaagacgaatagtcaaaagggagcctcttctacctggatgaaggcaattgtgtcatcggggacactaggtgacaggatggcagccatgattcttcttattcaggatgatgccgttcacacacttcagtttgtagaaactcttgtgaaccttgttaaaaagaagggcagcaaacagcagtgccttatggccttggatactttcaaagagttgcttatcacagaccttttgccagacaatcggaagctgaggattttcagccagcgtccttttgacaaactggaacagttgtccagtggcaacaaggactcaagagatagaagactgatattatggtattttgaacaccagctgaaacacttagtggctgaatttgtgcaggtcttagaaactttaagtcatgatacattagtaaccactaaaactcgagcccttaccggtggctcatgagctgctttgtacaaagcctganggaagaaaagctcttcttggtgcaantggtatataaactgg

SEQ ID NO: 1604 - DNA, 390 bp, Homo sapiens
  misc_feature 6, 150, 153, 172, 175, 224, 298, 382: n = A,T,C or G
actttnttttttttttttttttttttttttttaaaatatttatttttcttaacgacctattacgaatattatttacttaatataatcacagtctaatttctcagttatttattaccatgcttaaacttcccaagctgatgaaaaagtttntanaataagccccatttcacanaanaggagcctgtagttagggaagttaaaaaacttgctcaaagtcacacagngaatggtgcagcaaagattcaaactagacacgactcactccgagtgattagttttatctggatgaaggaattgngcccagtcaaaccaactattgggtaagtaaacagcctgcgtgctggcaggtgccatcccgcgtacctgcccgggcggccgctcnaaagggcg

SEQ ID NO: 1605 - DNA, 296 bp, Homo sapiens
  misc_feature 257: n = A,T,C or G
actgagcaggattaccatggcaacaacacatcatcagtagggtaaaactaacctgtctcacgacggtctaaacccagctcacgttccctattagtgggtgaacaatccaacgcttggtgaattctgcttcacaatgataggaagagccgacatcgaaggatcaaaaagcgacgtcgctatgaacgcttggccgccacaagccagttatccctgtggtaacttttctgacacctcctgcttaaaacccaaaaggtcangaaggatcgtgaggccccgctttcacggtctgtattcgt

SEQ ID NO: 1606 - DNA, 540 bp, Homo sapiens
  misc_feature 452, 469, 521: n = A,T,C or G
acgcggggcttttttcgaggtaggagtcgactcctgtgaggtatggtgctgggtgcaaatgcagtgtggctctggatagcaccttatggacagttgtgtccccaaggaaggatgagaatagctactgaagtcctaaagagcaagcctaactcaagccattggcacacaggcattagacagaaagctggaagttgaaatggtggagtccaacttgcctggaccagcttaatggttctgctcctggtaacgtttttatccatggatgacttgcttgggtatggagagtcggcttgactacactgtgtggagcaagttttaaagaagcaaaggactcagaattcatgattgaagaaatgcaggcagacctgttatcctaaactagggtttttaatgaccacaacaagcaagcatgcagcttactgcttgaaagggtcttgcctcacccaagctanagtgcagtggccctttnaagcttactacacctcaaacttcttgggctcaaagtgatcctcacctcccantgggtcttttgtaaactgg

SEQ ID NO: 1607 - DNA, 460 bp, Homo sapiens
  misc_feature 350, 454: n = A,T,C or G
acgcggggacggttcgtttttcctttagtcaggaaggacgttggtgttgaggttggcatacgtatcaaggacagtaactaccatggctcccgaagttttgccaaaacctcggatgcgtggccttctggccaggcgtctgcgaaatcatatggctgtagcattcgtgctatccctgggggttgcagctttgtataagtttcgtgtggctgatcaaagaaagaaggcatacgcagatttctacagaaactatgatgtcatgaaagattttgaggagatgaggaaggctggtatctttcagagtgtaaagtaatcttggaatataaagaatttcttcaggttgaattacctanaagtttgtcactgacttgtgttcctgaactatgacacatgaatatgtgggctaagaaatagttcctcttgataaataaacaattaacaaatactttggacagtnaaaaaa

SEQ ID NO: 1608 - DNA, 555 bp, Homo sapiens
  misc_feature 484, 488, 496, 500, 508, 551: n = A,T,C or G
acgcggggctcttcctgctctccatcatggcgcaggatcaaggtgaaaaggagaaccccatgcgggaacttcgcatccgcaaactctgtctcaacatctgtgttggggagagtggagacagactgacgcgagcagccaaggtgttggagcagctcacagggcagacccctgtgttttccaaagctagatacactgtcagatcctttggcatccggagaaatgaaaagattgctgtccactgcacagttcgaggggccaaggcagaagaaatcttggagaagggtctaaaggtgcgggagtatgagttaagaaaaaacaacttctcagatactggaaactttggttttgggatccaggaacacatcgatctgggtatcaaatatgacccaagcatttggtatctacggcctggacttctatgtggtgctgggtaggccacgttttcaacatcgcagacaaaaagcccaggacaggccggattggngccnaaccccanaatnatcaaaanaaggaggcccttgccgcttggtttccagcaagaaagtttgatngggg

SEQ ID NO: 1609 - DNA, 537 bp, Homo sapiens
  misc_feature 80, 84, 176, 350, 424, 485, 490, 500, 524: n = A,T,C or G
acttttttttttttttttttttccacacctgccctttattggtctcttctagcaaagtggctccaggcccttcacgcctntcanacaccacccatgagggtttaggaaggtgccatcattctgtgaaggcccaaagcttacccaagtcttggagcccaagttgaatcaccaaccanagggttgggagaggaaaaggaaacaggcagaggggaaaggcaaggctctgcagtgaaggggactgatatcaagggaatgctgaggtccagcagtgtctcctgaaggcatgctgcatcctaaggctcctcaggactggatggagtaggagatctgtgtgttgagcagttcacatntatatggcaactttaaggaggcccttgatgtcaggctcaatgttgatggttgggaaggtgcggctgtagcgtcngaagggctctcctccggccctatgaagaactttcaaaagttccagccacatctgagtggcncacanggctccaaantgatgagcttgggatcggcatgangggaaaatgggtc

SEQ ID NO: 1610 - DNA, 556 bp, Homo sapiens
  misc_feature 510, 553, 555: n = A,T,C or G
acaacagtgaactagaacaaaaggtaaatgaattaacaggaggactagaggagactttaaaagaaaaggatcaaaatgaccaaaaactagaaaaacttatggttcaaatgaaagttctctctgaagacaaagaagtattgtcagctgaagtgaagtctctttatgaggaaaacaataaactcagttcagaaaaaaaacagttgagtagggatttggaggtttttttgtctcaaaaagaagatgttatccttaaagaacatattactcaattagaaaagaaacttcagttaatggttgaagagcaagataatttaaataaactgcttgaaaatgagcaagttcagaagttatttgttaaaactcagttgtatggttttcttaaagaaatgggatcagaagtttcagaagacagtgaagaagaaagatgttgttaatgtcctacaggcagtcgggggaatccttggcaaaaataaatgaggaaaaaatgcacctggcttttcagccgtgatnaaaaaagtattagagttaggaaaaaagagattaagtgccttcnana

SEQ ID NO: 1611 - DNA, 431 bp, Homo sapiens
  misc_feature 195: n = A,T,C or G
acctggtagaaattgtgtcttggaatgaccctttcgagttattgacatggctctgatgaatagaacatgagccccaaaactaaatccaaaaggaattttctatctttcatcccccacatgtggcaagacaagttggccctttcttacccagaggtcttttgtgtgactgcatctttctcctccgttctccattgngtgctttccattttgtctttagtgcctatactgttaggtgttatcttcactggcattcacaaatttaagccattgctgctcattagccttgtattttgtgtgcatatcatatatccagacctgtatgttcgctttaagcattcttatatcacactgctcctcatctaccatatggtaaatgtaaaactccacatttgtctgatcagggaaaagcatgggcacacatcttcctcctc

SEQ ID NO: 1612 - DNA, 441 bp, Homo sapiens
  misc_feature 257: n = A,T,C or G
acagaggggtctgtttctaagtctggaacctcaacacgaggctgggatgcttcacaacgtgctctctcccactgtccagccatctttggtggtcttcccacagtgcttcccccatcctctcacactcctgtggagggaccatgggacgggccaggaggaaacctgggatcactctgacaggaaacggacaagcacagctgccaggagccagttgctctggcctcagtctccaattgttagtctcaggatcaacaganaactggaaagcagcagaatcttggaggagcaggaagagagcccagagggagtgttgtgctgagtgacggttaacatatgaaacagaatttcatggagattctttgttacaaggagaaattgctcagtctcaactcccaaaacgtgaaagttgctgtttaagagactatgttttctttttcagct

SEQ ID NO: 1613 - DNA, 411 bp, Homo sapiens
  misc_feature 31, 38, 52, 90, 93, 172, 184, 206, 213, 215, 228, 240, 243,252, 257, 380, 390, 403: n = A,T,C or G
acttttttttttttttttttttttttttttngggaaanactgctttattggnggcagttactacaagtcaataaatattgatccccaaanaanagctcggttatttatcaaattactggtccataaagagctgaatgaaactgaaccaagcgattgctgggatgactgaagncactcctgcttnttgggaaatgaagccacagccngctcatntntggcatatgctgntccaccaactgnaanaatcatggnggctntatcaggaggacatcagctaccccaccctttaatacaggggaatttcatcatcctcctggaacagtttttgcttctccggaactttatttttaaaatgcctgcgggaagcagtgcttatcgtntctgccaatntgacgaaaaccancaaattcc

SEQ ID NO: 1614 - DNA, 365 bp, Homo sapiens
  misc_feature 120, 156, 163, 167, 171, 194, 211, 217, 220, 228, 229, 264,266, 282, 284, 293, 300, 307, 312, 321, 333, 339, 341, 342,362: n = A,T,C or G
acataggtaaccaaagtatatagcttatttggtgaatcttcatcctcattactgttttctggacagccgcacacggattcggtatggcacattccttattccttttggcccaagacagcntttgttgagcctggtgtcaatgcgcacatctggganttcccantccntcangggcaaatttccgaattctcttngaggggcccgaggtgcncgcttnttnaaagccanntccatgggatggcccttgtgaatgttgatggggtntnttcgggttaccacttngntgatggcanaacgggnccttttnttttnccacctttntttgcgggaccnttctgnanngcccaagtgaaaaggacccnggt

SEQ ID NO: 1615 - DNA, 419 bp, Homo sapiens
  misc_feature 315, 344, 376, 407: n = A,T,C or G
acaggataatatactcagatatttttaaaataaactacttaataataagaaattagccataccacattgttccatttgctacaagaacaaattggcaatgaagactatttaaaagaaatgctcagctctacagagggtggtggcaggcaacacttttccattacagaataacctctattcttccatgatacatattcctgtggaaaaactttgcagggcccagggatgaaaaatagagctttgtcctaattagctaactgtaggttcacttaacatctttgggaaggacccaaaaaatctggccattattttctnaaacatctgcaagctgcagaattccttancctcagctatagtttctgctagatatcttaanctgggacagttccctgtgactcctcctcagntatgggggtggg

SEQ ID NO: 1616 - DNA, 355 bp, Homo sapiens
  misc_feature 35, 37, 97, 126, 154, 164, 178, 184, 189, 237, 242, 276,308, 322, 336, 351, 354: n = A,T,C or G
actttttttttttttttttttttttttttttttgnanattaaggcttgttttattttaatggctgatctatgtaatcacagaggccagtatgtacanacaaagggggaggttttatttcttggtcncttcctccttggataaagtcttgatganctcctccttnttggcctggaggcnctcttnacggngcttgcgtgcttccttggtcttaaacctgcgggcctcagcctggtcanccagnagctttttgcgggccttgtctgccttcagcttgnggatgtgttccatgaaaatccgcttgtttttnacacattccccttnaccttcagggaccntgcccgggcggccgntcna

SEQ ID NO: 1617 - DNA, 431 bp, Homo sapiens
  misc_feature 407: n = A,T,C or G
acctcggggacctgctggagacctgccatttccaggccttctggcaagccctggatgaaaacatggacctcttggaaggtataactggctttgaagactctgtccgaaagtttatctgccatgttgtgggtatcacttaccagcacattgaccgctggctgctggccgagatactcggggatctgtcggacagccagctaaaggtgtggatgagcaaatacggctggagtgccgacgagtcggggcagatcttcatctgtagccaagaagagagcattaaacccaagaacattgtggagaagattgactttgacagtgtgtccagcatcatggcctcctcccagtaacttcaggtgtttaataaagatgtgttgacccaaaaaaaaaaaaaaaaaaaaaaaaaaaantcctcgccgcgaccccctaaggcg

SEQ ID NO: 1618 - DNA, 437 bp, Homo sapiens
accagctggcacaggagcagggggcatggcacctctgttgtttatgcccatagcacctcccatagccatctgacccatccgaatctcctgctctctcgcatcagggaaggttcccttgaatccttcctgctgtcgccgcatcatttcttcttgctgccgccgcatctcttcttcacggcgcctgcgctcttcctcctgcctgagctccagttgctttcgtttttgcacctcttggttgtgcagctcttccatcctccgaagttcttcttggcgcctcatcaaatcctgtctcattagcatgacctggtgctcatggcgtgcagcttcatctccatctccagcttctcacgagcctcttgatgttgcggccacttggcctgctgctgttctccatctcaatgagtgccttcagcgcatggcatattatactcaaggag

SEQ ID NO: 1619 - DNA, 436 bp, Homo sapiens
  misc_feature 197, 225, 249, 293, 330, 331, 332, 339, 390, 393, 394, 405,433: n = A,T,C or G
acttttattctttttttttttttttttttgagacagagtctgtctctgttgcctgggctggagtgcagtggcccaagctacgctcactgcaagctccacctcctgggttcacaccattctcctgcttcagtctcccgagtagctggaattacaagcacccgccaccacgcccaactaatattttgtatttttagtanagacgggggtttcaccgtgttagccagnatggtctcgatctcctgacttcgngatcctcccgcctcggcctcccaaagtgctgggattacaggcgngagccactgcacccagccttttttttttttttgagannnagtttcnttcttgttgcccaggctagagtgcaatggcatgacttggctactgaacctncgnntctaggttcangcgattctcctgccagcctttgagtagntgg

SEQ ID NO: 1620 - DNA, 424 bp, Homo sapiens
  misc_feature 37, 52, 59, 89, 106, 119, 137, 141, 157, 161, 164, 175, 184,198, 216, 234, 240, 249, 256, 268, 272, 292, 294, 306, 322,340, 349, 354, 387, 390, 414: n = A,T,C or G
acttttttttttttttttttttttttttttttttctngtttttttttttttnatatttnattcaactttattaaaaattaaaactacanaaaccaaaccgaatgcncaaataaaaaagnggggaaacaaacagggancaanggcagctgataactgnggcnagnggataatccgnatgactcanatcccacccctgcnactgaggagcccaaaacnctgcgctggcactgtcgngccctnttccaccanaggggcncaaaaacctgcngganactgaaaacgattacaaacntnttcaaccagctntttggccaaaggcagnaaaagcagcctgaatacncaactcacnccaanagggcagcagctctcctgacatccatgtaaganggntaacacctaaaccacacgcaggcntctgaactca

SEQ ID NO: 1621 - DNA, 452 bp, Homo sapiens
  misc_feature 428: n = A,T,C or G
acacactttatttacttcgttttggttaagttggcttctgtttctagttgaggagtttcctaaaagttcataacagtgccattgtctttatatgaacatagactagagaaaccgtcctctttttccatcataattctaatctaacaatggaagatttgcccatttacacttttgagactttttggtggatgtaaataaccccattctttgcttgaacacagtattttcccaatagcactttcattgccagtgtctttctttggtgcctttcctgttcagcattcttagcctgtggcaataaagagaaactttgtgctacatgacgacaaagctgctaaatctcctatttttttaaaatcactaacattatattgcaatgaaggaaataaaaaagtctctatttaaattctttttaattttcttcagtnggtgtgttttgggatgtcttattg

SEQ ID NO: 1622 - DNA, 444 bp, Homo sapiens
  misc_feature 406, 442: n = A,T,C or G
acttctccgttgacaaagaaattctaggtgaaattaagagtcatgatctgaaacctaatggtggcaatattcttgtaacagaagaaaataaagaggaatacatcagaatggtagctgagtggaggttgtctcgaggtgttgaagaacagacacaagctttctttgaaggctttaatgaaattcttccccagcaatatttgcaatactttgatgcaaaggaattagaggtccttttatgtggaatgcaagagattgatttgaatgactggcaaagacatgccatctaccgtcattatgcaaggaccagcaaacaaatcatgtggttttggcagtttgttaaagaaattgataatgagaagagaatgagacttctgcagtttgtactggacctgccgattgccagtangaggatttgctgatctcatggggagcaatggcccanat

SEQ ID NO: 1623 - DNA, 439 bp, Homo sapiens
  misc_feature 358, 371, 437: n = A,T,C or G
acttaaatatatatttattcatttctacatatatagaacttgtaggtaaagtagaaaaagttcccactaggaaggtaattaaaggttgttaatgttctttttatcacttagtagccagaagacatgcttatttctgctctccagaagcaatgttagctactagtttctgaattcaggaaaacgtttatctttcaggaaggtttacgtgagatatttattcagtctttttctcaaacttcttcctcttttcattataggcattatactgagagtctgttccaaaaattcgatcccaccatgtaaatgttgaagcatagtttccaatgaagttcatgtggtggaaatcattgatgccganaaccagcataganagggatcagatttaggggtgagaggaatatctaaccctttggacatcaatagttctaataaacgantg

SEQ ID NO: 1624 - DNA, 436 bp, Homo sapiens
  misc_feature 232, 431: n = A,T,C or G
actgttaaaatgtggatggcaccctcccaaggattgaaaacacacagctggatcatgcatctggaatattttcttttttatccaggaaagtgttttctctgacttcttgatatgtgcacatcaccttacacgtggtgcccgagagccccgccatcgccatccccgccctgcatctgcatctgcatctgcgcctgcatccttgcaatcatctcttgcatgcggcggagctcancttctttttccagcaagatctggtctttattcatgtcctcattctccactttcctgccgcctctcttgagtctctcaaaacggaagttttcataatgaaggtcctgggtcacctcctggagatcctgcatgtgggtgatgagcatggttctcacttcagaaagtcattgtctctgggttctcccttcacaacaccccangggta

SEQ ID NO: 1625 - DNA, 441 bp, Homo sapiens
  misc_feature 378, 397, 435: n = A,T,C or G
accatttatttgtctgccgcttttaaaaaatacccattggctatgccacttgaaaacaatttgagaagtttttttgaagtttttctcactaaaatatggggcaattgttagccttacatgttgtgtagacttactttaagtttgcacccttgaaatgtgtcatatcaatttctggattcataatagcaagattagcaaaggataaatgccgaaggtcacttcattctggacacagttggatcaatactgattaagtagaaaatccaagctttgcttgagaacttttgtaacgtggagagtaaaaagtatcggtttattctttgctgatgccttctgcttgaaataacagtcaccatacagctaaaggagaggactttntttccttctaagtaggcanaaatggatcattatgttgccgtctcaatctcccagagntcgtct

SEQ ID NO: 1626 - DNA, 445 bp, Homo sapiens
acctacagacacttttacagagttaatactaaaattacaaattgatgacactttcgaggcaaagcagggtaactgttccttcagtgttgccatcactgaattgactttcactgttccatcatactgtttggctgaacactgacattccatagtctacaactataaagatacctacctatgtgagtttaaaaagtgatctgcacaaaagaaataaaaaaactttatatacaaccaattgttttttaaaaatacaaaaataacatctgtcacttttgtcatgctgacaatttgacatatatacacatgcaggagaaaagttccaattcagtgatctggacaactgtagcttgtatatttttaatatgatggacacactgccgtgaattttcacactgacagagatgtgtttcaaaatattcatatactaaatctacatctctgatga

SEQ ID NO: 1627 - DNA, 446 bp, Homo sapiens
  misc_feature 142, 205, 267, 269, 290, 302, 315, 326, 330, 357, 359, 384,389, 399, 402, 411, 423, 443: n = A,T,C or G
acgcgggggcgtcttgttcttgcctggtgtcggtggttagtttctgcgacttgtgttgggactgctgataggaagatgtcttcaggaaatgctaaaattgggcaccctgcccccaacttcaaagccacagctgttatgccanatggtcagtttaaagatatcagcctgtctgactacaaaggaaaatatgttgtgttcttctttnaccctcttgacttcacctttgtgtgccccacggagatcatttgctttcagttgatagggcanangaatttaaaaaactcaactgncaagtgattggngcttctgtggatnctacttctaanatcnagcatgggtcaatacacctaaaaaacntngaggactgggacccatgaacattcntttgntatcataccnaancgcaccatnctcatgattatnggggcttaaagctagataangca

SEQ ID NO: 1628 - DNA, 443 bp, Homo sapiens
  misc_feature 249, 303, 371, 411, 429: n = A,T,C or G
acgcggggagtgacggtggcgtttccttgaggaagagtgagggttccaacttttctgcttatctgggaggtgttgggcgcggacagtcgagatgtcagagaaaaagcagccggtagacttaggtctgttagaggaagacgacgagtttgaagagttccctgccgaagactgggctggcttagatgaagatgaagatgcacatgtctgggaggataattgggatgatgacaatgtagaggatgacttctntaatcagttcgagctgaactagagaaacatggttataagatggagacttcatancatccagaagaagtgttgaagtaacctaaacttgacctgcttaatacattctagggcagagaacccangatgggacactaaaaaaatgtgtttattcattatctgctnggatttatttgtgttttntaacacaaaaaata

SEQ ID NO: 1629 - DNA, 445 bp, Homo sapiens
acgcgggtggactgttgcagcaccctcccttggtctcccagtctgaagtctctcctcttgccaatccacccttcatcttcctgccaggttaatttccttaagagcagttttgatgaacagtgtgccaaagactttcattggcttccgtttgcttaaattatcaagaacagattccctagtctagtgttcaaggtctccatcccgtcttttcaggtttatttctcacagctgcccttcacacacctgagactactgctgtgcacctcgccacccgaaggaagtggcactaggagcgtttacatgctatttcctgtctccactttaaaaagctcagaataatcttctcaccgggcgcagtggctcacgcctgtaatcccagcacttcgggaagccaaacaggagaatagcttagcctggagttcgagacagctggacaacacacaag

SEQ ID NO: 1630 - DNA, 446 bp, Homo sapiens
  misc_feature 446: n = A,T,C or G
actccatcccacaaaagaattcttgttctggtctttcagccaggtaaataagggctcaaagtagttgagcagtggccttacattcatgttctttgctcctacaacattttccaatgctagggtccagggttctgattttccaagcctcagcatattgaacagtttctgtccagcttctgtagagtttgagatgtcacatttgtgcagagggccttcatgtttagctgcttgacaaagtgcttcttgaaactggaattggtaaagggccttgtgtaatatcgaatgaatgagtaatcattagaaacatggaacagagatgcggggtcacagtatgtttcatcatggggcacaggttccccaccccaactatctctcgcttcatctccaccacttttcatccactggtctttgggaattccccttaaagaccatccacctcacttctn

SEQ ID NO: 1631 - DNA, 450 bp, Homo sapiens
  misc_feature 324, 348, 359, 367, 395, 403, 447: n = A,T,C or G
acgtgggctatcagtagatctaccattctggggtctggaggatggttgccctcttctcacagctccagcggggattctgtgcggggcctccttccccacattttccttcctcactgccctagcagaagttctctataagtgccttgcctctacagcaaacttctgcctgggcatccaagcatttccatacattttctgaaatttaggcaaaggtttccaaaccccaattcttgacttctgtgcacttgcaggctcaatgccatgtggaagctgcaaggcttgtggcttgcaccctctcaagccatggcctgaactctacattgntcctttaagccacagccagagcanctgggatacanggcaccangtccctagctgcaactcacggggacccngggcctgntccacagagccattttttctagcttctgggcctgtgatgggganggg

SEQ ID NO: 1632 - DNA, 450 bp, Homo sapiens
  misc_feature 365: n = A,T,C or G
tacgcggggacgttgccagccgaggtttggacatacctcatgtagatgtggttgtcaactttgacattcctacccattccaaggattacatccatcgagtaggtcgaacagctagagctgggcgctccggaaaggctattacttttgtcacacagtatgatgtggaactcttccagcgcatagaacacttaattgggaagaaactaccaggttttccaacacaggatgatgaggttatgatgctgacagaacgcgtcgctgaacccaaaggtttgcccgaatggagttaagggagcatggagaaaagaagaaacgctcgcgagaggatgctggagataatgatgacacagagggtgctattggtncaggaacaaggtggctggaggaaaaatgaagaagcggaaaggccgtaatcacttttatgaagctcgattctgctgtctgtaaaaa

SEQ ID NO: 1633 - DNA, 315 bp, Homo sapiens
  misc_feature 75, 105, 124, 131, 165, 173, 210, 226, 233, 238, 240, 265,273, 282, 287, 294, 296, 299, 311: n = A,T,C or G
acgcggggggttccggcgtggccattttcgttggtggtgttcagttgtggcggttgctggtcagtaacagccaanatgctgcggaatctgctggctcttcgtcanattgggcagaggacgatangcactgnttcccgcaggcattttaaaaataaagttccgganaagcaaanactgtccaggaggatgatgaaattccctgtatctaanagggtggggtagctgntgccctnctgananatccaccatgattcttacagttggnggacagtntatgccatnttganctggctncnggnttatttcccaanaaaa

SEQ ID NO: 1634 - DNA, 452 bp, Homo sapiens
  misc_feature 452: n = A,T,C or G
acatggagaggagtatggtgagctatttcctttttaaaggatgagaccttcataaattggcccctcggattctggtgattcccgccgcaagcgcaaatgctccagtgtgttatgaaaatgtttgttaatctgctctgattcttcactggattcaagattcgggaggtcttctcgaatcttttggataagctggtttaaaacctgaattgttaccgcatcattttccttttcataaaaatagatatatctgttcagaatttctataaaaagctgcacttgtagagaggggtccatgcactgatttgctatttttaagagttttttttaggcactccattaccctcttgcttcgtgaagctcctccggacactcaccttcaggaccttaataaaattattcacttggtaagtgttcaagctttctgatcaccccaagtagcatgactgatctgn

SEQ ID NO: 1635 - DNA, 451 bp, Homo sapiens
  misc_feature 324, 348, 367, 370, 425, 449: n = A,T,C or G
acagaagttttcatctatgaacatggcctcatcatcacctgcagccttggccttggcctgttcttcaaaaagctgccgctgccgcatgggatcattcagctcagtatacgcattgcatatctctttcttcatgacaaacagctcaaagcgctcagtcagaccctctttagagcggtgccatttagccaaagggctcattatctgtgggtgatcacagatgaatgtaggattgatgcaagtcacttccaggaactccccaacaagcttgtcaaggagcctggctgtggtccgaggtggagggcattcaacagcttttgcccacanatatcatcaagaattttgcgagtntcttcagtttcaaagaggncgntttggcagcttcatccccagggctttctcaagctcttctaccatgttgattcccngaagggtggggagaaatcaacatnga

SEQ ID NO: 1636 - DNA, 450 bp, Homo sapiens
actttattagtttaaaaagaaattgaggttgttcaaagtttaagcaattcattctctctgaacacacattgctattcccatcccacccccaatgcacagggctgcaacaccacgacttctgcccattctctccagtgtgtgtaacagggtcacaagaattcgacagccggatgctccaagagggtggccaaggctatagcccctccttcaatattgaccttctctgggtttaatccaagttctttaactattgcagcagagacagctgcaaaggcttcattgatttcaaatatgtcaacatcttccagtgaccaacctgcttttgaacagcttgctttatggctggaattggtcctattcccataatggaaggctccacacccacttgggaccaggaaactatccgtgctaaaggtgtaagcccacgttatcacttctgcttcttcataa

SEQ ID NO: 1637 - DNA, 432 bp, Homo sapiens
acccaccaaatccatggagagaaatttctggtgaagcaattgatctgataaacaatctgcttcaagtgaagatgagaaaacgttacagtgttgacaaatctcttagtcatccctggctacaggactatcagactaggcttgaccttagagaatttgaaactcgcattggagaacgttacattacacatgaaagtgatgatgctcgctgggaaatacatgcatacacacataaccttgtatacccaaagcacttcattatggctcctaatccagatgatatggaagaagatccttaatcactgagctaacctaaataaggaaggatttcattttatggactgatattttgctggtaacttgtctttgtagattgtcatctgcagtgctgcaaagatatgaagaaatatgatacgaataagtgacaccagtacc

SEQ ID NO: 1638 - DNA, 331 bp, Homo sapiens
  misc_feature 67, 101, 120, 153, 158, 159, 173, 193, 211, 217, 221, 226,227, 243, 247, 250, 262, 276, 289, 306, 311, 323: n = A,T,C or G
acatgacctaatttttacatcatagtaaaacaggccctatggagagaggacatgggtttctctgctngaacagccattatttatactcgttccaaggcttntaacatgatgatactattncctcgtattaccaccattccaatattgatctgntgtcnnctagacgccatctncacacattcatctatcacanggttcataaagggatcanattccngcantattnnttggacatgtctgccnccanttnatttcaatgatnacttcttgtccatnaattttgtcaacnttgggagggtgagcttngctcntggtgtttactnctggggct

SEQ ID NO: 1639 - DNA, 452 bp, Homo sapiens
acgcgggaatgaaggacttggcagatgaacttgctcttgttgatgtcatcgaagacaaattgaagggagagatgatggatctccaacatggcagccttttccttagaacaccaaagattgtctctggcaaagactataatgtaactgcaaactccaagctggtcattatcacggctggggcacgtcagcaagagggagaaagccgtcttaatttggccagcgtaacgtgaacatctttaaattcatcattcctaatgttgtaaaatacagcccgaactgcaagttgcttattgtttcaaatccagtggatatcttgacctacgtggcttggaagataagtggttttcccaaaaaccgtgttattggaagtggttgctatctggattcagcccgattccgtacctgatgggggaaaggctgggagtcacccattaagctgcatgggtgggccg

SEQ ID NO: 1640 - DNA, 425 bp, Homo sapiens
  misc_feature 240, 267, 286, 308, 316, 336, 340, 345, 361, 366, 372, 382,383, 394, 398, 420: n = A,T,C or G
cgcggggaccgaggcccatgcgaagctttccactatggcttccagcactgtcccggtgagcgctgctggctcggctaatgaaactcccgaaataccggacaacgtgggagattggcttcggggcgtctaccgctttgccactgataggaatgacttccggaggaacttgatactaaatttgggactctttgctgcgggagtttggctggccaggaacttgagtgacattgacctcatggnacctcagccaggggtgtagccaaatanttctaatgccacctgtccncttatcatctgattgcagacanatggaatnctgtgctgaacccgatcttncaanaacanctacatctgtgaccancacangatgtnccctgtggcnnctgaatttgtntatntggcacttttctcccttccagntagta

SEQ ID NO: 1641 - DNA, 449 bp, Homo sapiens
  misc_feature 153, 159, 200, 285, 289, 327, 340, 346, 366, 370, 379, 381,386, 388, 390, 394, 402, 407, 409, 417, 426, 429, 440: n = A,T,C or G
acaacttatagaaaaggtaaaggaaaccccaacatgcatgcactgccttggtgaccagggaagtcaccccacggctatggggaaattagcccgaggcttagctttcattatcactgtctcccagggtgtgcttgtcaaagagatattccgccnagccanattcgggcgctcccatcttgcgcaagttggtcacgtggtcncccaattctttgatggctttcacctgctcattcaggtaatgtgtctcaatgaagtcacacaaatgggggtcatttttgtcagtgnccantttgtgcagtccagtagtgactgattcacatttttttncaaatgtaatgcncactcnattgcattcagcccgctctnccantcatcacantntggtntntngatntcctgaangaagntnggccactngtgtttganctnattagtttctnagcatgttc

SEQ ID NO: 1642 - DNA, 435 bp, Homo sapiens
  misc_feature 67, 87, 109, 146, 161, 204, 370, 379, 430: n = A,T,C or G
acttttttttttttttttttttttttttgagtttctaagtcattactttttattttgaaggatttgngaaactcttcacatcatggngagagtttgtatgattaataanaagcagctttttcatgaaatgcttggaggtgaacganttctcagcctgtganatccgaccatcccattaactttgaagtttctcttgattaatanaagaaaaaaggggagggtgaaaaaaaggaggaacatgctaaaaaccttatgacaatcatccaaatgtgaggaaagaacaaccgattcaccaactccactttttctattttacaactttctacatctcactcttgattttggcttcctggctgaaacagcctggcanaccctaaancccctgaaagagccctggttctcaaaagacagaggaggagaagccctgcangatgc

SEQ ID NO: 1643 - DNA, 455 bp, Homo sapiens
actgtaggagagaattaaataaaataaaatagctgtagataattaaaagctaattagataaatcaagttacagtatcatccttcagattaaagtgctctgatataaccaatgccacggcaaacgaaatcctggaaagagattgcactgccaatgattttgtctcttaacctcaatgtagcaaggacacacataaaagagattcctgatttaataactgctatcatcttcacccccaaccacgctattagcctgtgatattcttcccctaggagagatgtcaagattagatgagattctatcatagccagggaaaaaaatgagaaataccagaaacattctaattccagtcttaagtgagtaacatcaaaattcctgaaaaatctcagctggtgctttagctaagaaggaagcaagtgccctagtaaaaaaaaaaaaagctataaatctagtttaa

SEQ ID NO: 1644 - DNA, 456 bp, Homo sapiens
actgggattacaggcgtgaaccaccgtgcccggccttccccagatatcttcaaagcaactgctagtcctgcttttgcacattacactctacattctcattgccccacttaactaaccctccctcatgtccttttctaaagatgtagaagactttgaaatagcataacatttaaatggtcacaaatcacctggcttgaaagtgactaataataggaaaatcagacctcaggactgagttcaatttcaagattctcccactccactttgctaagagggaaacagaaaaacattactccagccacacaaatatgatactgtgcaagtatcccactcttactcattcaaatcctacccattttttcccatcgtggaacagagtcttgcaacttatacctctctccaataacccataaagatggtgatttgaatttggccaagatttaacattttatgaaa

SEQ ID NO: 1645 - DNA, 408 bp, Homo sapiens
  misc_feature 222, 266, 273, 311, 312, 326, 345, 355, 361, 403: n = A,T,C or G
actttttgcttatgaaaagaaaccagtgagtcctctaaggatagcaaaagggagtattttacagttaagcacatgatttggagtgaagaattccgatgttgctctgctggtccagactgttaatactcttcttgctcctcctgtgggcccccttcatcaggtatcacaaagccttcatctgtggcatacagaatgtctacaatcctctgcaatacagggtcngttttccctctcgttctcctggcaaatcaattcaatgttccgtnctttccnaagtagaaatccctctctttctccaagtcttcaacagnnagtgtcaatacgtngacctgcttgcatcactcngctgctcgtnactccnatgccaaccaaggtacttttgaccacccatggccagcctatnagccg

SEQ ID NO: 1646 - DNA, 454 bp, Homo sapiens
  misc_feature 323, 454: n = A,T,C or G
acaccttgacaccacgtcgtcatcaaatttacaccatttgccatcccctttggggtttagataaaccacataatgtccaccatgattatctccactatgaaccaggactgcatgaagaatataatttgcagggtccttaggatctgttttttgcaaaaattcatcaagtggtaactgctctgggaattcaaacctatcattgatcttgatattttggtccgtctgagggtcatacataaatctcatcagttgtagatgtaacactggtggcaatgttaggaatttcacacctttctctgcttcctgtaagccatgttccccancgtcgtatttattgccccatcgagctgttctactgcacataatccacaaatgattcaaatatatttttctttcctttgatacttagctggatatcataataatcttctcttctatcagaccgatagtctan

SEQ ID NO: 1647 - DNA, 451 bp, Homo sapiens
  misc_feature 415, 447: n = A,T,C or G
acctgaatgtagaaacaatgaggatggacctggtttaataatggaagaacagcacaagtgttcttcgaagagccttgaacataaaacacagacacctcctgtggaggagaatgtaactcagaaaattagtgacctggaaatttgtgctgatgagtttcctggatcctcagccacctaccgaatactggaggttggctgtggtgtgggaaacacagtctttccaattttacaaacgaacaatgacccaggactctttgtttattgctgtgatttttcttccacagctatagaactggtccagacaaattcagaatatgatccttctcggtgttttgcctttgttcacgacctgtgtgatgaagagaagagttacccagtgcccaagggcagtcttgatattatcattctcatattngtcttcagcaattgtccagacaagatgcaganggtt

SEQ ID NO: 1648 - DNA, 446 bp, Homo sapiens
  misc_feature 246, 268, 377, 398: n = A,T,C or G
actgcatttgtttttatatctttaatttctggcaagggtaatgggttgaatggtgagcccttctaaaaaggtgtccatgtcctgaatctggtccctgtgaatgtgacgttatttggaaatagggtttttgcagaggaaatgaaggatcttgagttaagaccaccgcgatcagggcgggccctaaatccaatgactgctgtcctttcaagagaaaggagagggggatttgacacagacacggtgaanaaggtgctgtggggagaggcanggactggagtgattcactcatggggcgaggaacgccaagtgccggagccaccggagctgggagagaggcatgaggcagcttctccctctaagcctccaggaggagcagncctgctggcaccttgatttanactgcctgcagaactgtgggagagtaaatatctctgttaagctgcctg

SEQ ID NO: 1649 - DNA, 392 bp, Homo sapiens
  misc_feature 148, 178, 184, 216, 299, 311, 327, 381: n = A,T,C or G
acttgaactgagttactgtgaagaaagcatgtcatccttgacaatggattaaatgaaagtgagctaatgcatgccattctcaatccttgcagctacaccagttcccaggcactgtccttacaagtgatccatccatattccatacaanatccaacacttgctccaatgatatatcctngttttnaacttcagaaattcaacatacatttacatttngattatccctgaacagcctgtgagaccaaatacacactttccctaatatactctaatacaaaatccttattaaagaaacagancagaagtcaatnccagagactgaaatanatctgaagcaatgtcaatgaagatgctctctccttggctgttgtcttaggcatntttttctgaca

SEQ ID NO: 1650 - DNA, 447 bp, Homo sapiens
acacttgactgtttccaaagggagagaggtgatgtagtcttcatttcaggggagaagaatggactgaattactgtctgctttttaatgtttcaactaaccattccattgcctcatcaaggccggtgcctttggttgctgacgttttgaatatctgccattttcggtccttcaaggcaggtaacccaagtgaatttgccatctctgaggaagtcatggcctgttccatgtcctgtttatttgcaaacaccactaaaatggcttttctcagctcttcttcctccaacatggcaactaactctgatttggaaatgccaattcggtctcggtcacaactgtctactacataaatgactgcatctgtgtttgaatagtaacatctcagtatggcctgatacttgtctgcctcctaaatcccagacttggaatttaaggtttgtacctgcccg

SEQ ID NO: 1651 - DNA, 207 bp, Homo sapiens
  misc_feature 134, 165, 184, 202: n = A,T,C or G
acaaggagaccagcctacacagtccatcaaatacatctgcccctcatagccaaggaggtattccacctcctaccggaatataattaaagggagaaatacactgtatgaagtatatgttgatactatgacatgtngccaacaccttgagaagcattatttgttttntaataaaagtaatggcttntgttaatatattggtggntataa

SEQ ID NO: 1652 - DNA, 439 bp, Homo sapiens
  misc_feature 11, 300, 402, 413, 417, 419, 433: n = A,T,C or G
acgcgggggcngtcttgttcttgcctggtgtcggtggttagtttctgcgacttgtgttgggactgctgataggaagatgtcttcaggaaatgctaaaattgggcaccctgcccccaacttcaaagccacagctgttatgccagatggtcagtttaaagatatcagcctgtctgactacaaaggaaaatatgttgtgttcttcttttaccctcttgacttcacctttgtgtgccccacggagatcattgctttcagtgatagggcaaaagaatttaagaaactcaactgccaagtgattgnagcttctgtggattctcacttctgtcatctagcatgggtcaatacacctaagaaacaaggaggactgggacccatgaacattcctttggatcagacccaaancgcaccattgntcangntaatggggctaaangctgat

SEQ ID NO: 1653 - DNA, 583 bp, Homo sapiens
  misc_feature 49, 383, 385, 396, 407, 408, 423, 428, 443, 465, 470, 479,485, 488, 504, 508, 516, 533, 537, 548, 556, 560, 562, 566: n = A,T,C or G
acatttttgttacagacagaaggctgattttggaaagaaagaaacaatnggatgtataggggctttctatcagcagactagtatgtttaaaaatagtctcatcaagggttctgaataagaaatataaatgttgccaggcagtcccaaactcacatttgatattaactgcagactcatttaaaactgaaaactgctccagcctctctcaatctttactaaggactgggagattatcaaaccctttcaagtctaataatgcttttgaattaagattattgaaaaaggaatctctgttacagtgcaaagaacattttgtagaaattcatgctacaaggagttaatacagatgtccttcattagcagatctatcttgctctaaaagnanaatatcaaacnttgaaataatnnggtcaaaaatatggnaacanattctacgggccctntttaaagcaatctcaagttgtnttganctctccagngagganttnttttgaagacttaccncacntacctttntatccttactttggggngagntctttggatantccttttncaancntgangtaatcaccccccgcgc

SEQ ID NO: 1654 - DNA, 503 bp, Homo sapiens
  misc_feature 272, 305, 307, 321, 322, 374, 392, 407, 431, 432, 435, 457,458, 468, 471, 474, 486, 493, 495: n = A,T,C or G
acagcagttgctcaagaacaaagttattctccttttcatctcgaatactcagaatatgtgattttggattcagtttctggcatttagtatgaacttcatcctgtgttgttgccatatgcctattctttgttattatgaaattgtagcaacagttctgaaatggtatccacggagtatttagaacaggagatggacatttaacactgtcaactggtttgacctctttttcagtctcatttcctgaatagtagcaaatagcacctgttgattgncattgcaatcaactgttttccagaatcatcagngnctaatctacaccannttcgagtttgccattagttcagcccagcgactaaaattgaagacgttccatntgacaacccaaagttgantcatattcttgctgnagagtccgacctaaggaaagttgnnagngccctgccactgagaatgctgnnggaagggccnggngcncacaactgcatntctttananctctttta

SEQ ID NO: 1655 - DNA, 616 bp, Homo sapiens
  misc_feature 334, 368, 372, 373, 378, 387, 390, 433, 437, 439, 468, 475,480, 489, 499, 504, 509, 513, 523, 524, 528, 530, 533, 538,539, 541, 547, 548, 550, 554, 565, 578, 596, 613: n = A,T,C or G
accagtgtggagaaatgggctggttaactgtgtgggcccagacagtcatttgtctatattcctagtgatgagaaattattccccctaaccttccaatgaaacaagtgtccacatagttctcatttttccctattgttgaaacattagtgagagggacccatgcatgttattaaaaattaagttcaaaacacttaaaataattctgtattagaaacttgactctatcataagtctcttcttttggaagcatactgggctggttaaatgctccaattcattgttattaacatttaggaagcagaaactattccagctagttcaaactagaggttanttactacaacactgattcctggtggttgtgtggnttcnnaaagnctactcctnttnctctgcagatttgctctggatttgtggtcattctttggcattnttantntgccatgaattttcattacttcattgatntttaggnatgcncatgataanaactattggnttttnatagnatgncttcctgaannacgntnttntttcnngncgcctnntncganaaactttcatntagcttgttcttnaatttttaccaatttgcnttgcaagaccttattgnata

SEQ ID NO: 1656 - DNA, 539 bp, Homo sapiens
  misc_feature 460, 484, 527: n = A,T,C or G
acatagacaagtttcttgtaagacagaaaacagagaaatccacagtaactctaacacatcccttaaggaataagcatgtatttgtaggaagcaaacaaagctttccatagagaaaccactttcacaggatgattaggtggacctgcaatgaagaaaatacatttcaaaagatgggttcagacttacaccaagttttcactgaaatacttaaaaaaaaaaaagacccttctctgtatcaaaagaattaaaaaaaatacatcacggataaaataaatctcaggaaaggtccaagtcctactcagagacatacatttgcaaattaatataaattttaaagtttgacacaaaaatactatttggactcctagaataggccaagctaagttcgggtctgctttagtgcattcattgaaataatctcattctcctataatttttttcttttaacttatcccacggntggtcactgattggcatagacttntaatgtcaagaattgtaaactcatatggtccaaaatcttaaantaaacaggccaa

SEQ ID NO: 1657 - DNA, 607 bp, Homo sapiens
  misc_feature 298, 350, 447, 455, 491, 519, 533, 535, 537, 539, 554, 563,570, 571, 577, 579, 596: n = A,T,C or G
accagtagtttttatcggtaataagaaaaaggatggcttaatagtgccaataacacaactgtctgcccattcattaggtaactgaatgtaggctctctgcccacatatccagtatagtccagcgagagccatccagtcctgatgagatcctggacaagcccccattatatcaggagctggatcagtgggcaccaactctcaggcttcccaaggccatcggtctctgatagtggttcccccgcatatataacaagaagtaacattaagtaagaaaattacattttctgctaatttgganaaacaaatttttgctttttcagaagttctgctgctggcagattcagctcctnataaaaggtttgaaatactggtttgggagagcacttgtggacctccctctaataaaatggcacttgagggttaaccctgcctattgatcccagggtncacgtttnctttttccacggtgacctaggggatggtaatattantctagtggttacaggaccgcacacagangggtgcttcccctntnananaaacgggcttttgtntttttaganccaatanntggcangncattttacaacctgctngaaaatttttt

SEQ ID NO: 1658 - DNA, 382 bp, Homo sapiens
acaaaaaaaatcatttcaaataactcaggaggatgataatggctggacttttgtaattcacctcaaagactgtgggagagccaactcaactcactgtatagtctgtgcatatggtggcttgtagcatgtaggttttttccaaaagaaggaaatataaaatgtttagattaagaaccataaaactacagggtgcctataaaaggtggcttactccttattgttattatactatccaatttttaaaatgcagtttaaaaaataacactgagtcttgttattacaaggcagcaaatgtttctcctcattttgaaaagactgactgcaatgctttcctgaacatttagaaaagaggcagtaagagtcctcggccgcgacccgctaa

SEQ ID NO: 1659 - DNA, 641 bp, Homo sapiens
  misc_feature 335, 484, 487, 526, 534, 544, 556, 560, 564, 569, 571, 580,584, 585, 587, 588, 590, 600, 608, 613, 618, 641: n = A,T,C or G
actgggataaatgaagaagaaggcataaggacaataaacatggaactccactgcaaatggattttatgcagctgaggaaagtttgggcttattagtatttgctccagcgaacctccaagttttctccattgcggacaacgtaactaccagctccttggctcagtggttcgcctccactcagaagttcccagtaggttctgtcattattgttggcacataggccctgaatacaggtgatatagggcccccatgagcgctcctccattgtgaaaccaaatatagtatcattcattttctggctttctccatcacactgaggaagacagaaccattancacagtgacattggtgaaatatgtttcattgattctcacagagtaattgacggagatatatgattgtgagtcaggaggtgtcacagtatagctcatcagcggaatgttgagttcctgaacagaacgcaagaagagcttgtaatatcaanagnctttccatcaggcagtaaacctggctgcacgttggattntgatgctnctgaaaattncggggcctgttntaantgtngcatncncatttattnatanngnnanaaaaggctgnggtttctngtaangtgtncaagaaccttttttttaaaaaan

SEQ ID NO: 1660 - DNA, 428 bp, Homo sapiens
  misc_feature 140, 271, 284, 306, 320, 336, 359, 365, 373, 376, 377, 385,394, 396, 410: n = A,T,C or G
acaacttatagaaaaggtaaaggaaaccccaacatgcatgcactgccttggtgaccagggaagtcaccccacggctatggggaaattagcccgaggcttagctttcattatcactgtctcccagggtgtgcttgtcaaanagatattccgccaagccagattcgggcgctcccatcttgcgcaagttggtcacgtggtcacccaattctttgatggctttcacctgctcattcaggtaatgtgtctcaatgaaagtcacccaaatgggggncatttttggcaantggccagtttgtgcagtcccantagtactgattcanatttttttttcaaatngaatgccactccatttgattcanccgctntcccagtnttnnaagtatgnttcttgatntnctgaagaaaattcngcccccttggtggtttgg

SEQ ID NO: 1661 - DNA, 365 bp, Homo sapiens
  misc_feature 38, 45, 59, 97, 100, 124, 133, 204, 222, 231, 239, 246, 255,260, 274, 284, 291, 300, 302, 303, 305, 313, 317, 326, 333,339, 349: n = A,T,C or G
acttttttttttttttttttttttttttttttttattnggaaaanactgctttattggnggcagttactacaagtcaataaatattgatccccaaanaanagctcggttatttatcaaattacnggcccatanagagctgaatgaaactgaaccaagcgattgctgggatgactgaagtcactcctgcttcttgggaaatgaanccacagccagctcatatntggcatatnctggtccnccaactntaaaaaacnatggnggctctatacaggngggcttaacntcccccncccttaaanannangggaattncatnaatcctccnggaacanttttgnttttccgganctttttttaaaatgcc

SEQ ID NO: 1662 - DNA, 458 bp, Homo sapiens
  misc_feature 252, 253, 254, 257, 266, 267, 276, 297, 302, 305, 309, 324,338, 344, 348, 354, 367, 369, 380, 384, 386, 400, 407, 408,415, 416, 418, 426, 433, 438, 445: n = A,T,C or G
aactctccatcttaaatgagcagcgcattcggggcattttatgcgatgtcactatcattgtggaagataccaaatttaaagcccatagcaatgttctggcagcttcaagcctgtattttaaaaatatcttttggagccatacaatctgtatttccagccacgtcctggagctggacgatctcaaagctgaagtgtttactgaaatacttaattatatctacagttccacagtcgttgtcaagagacaggaannngtntctgactcnnagctgcagnaaaaagctggaatatcgttcntgaangancttnctggatcgctacttntcatatttccccgntccctntgtntctggnttactgaaaaggnantgttaaagaanaaanantgaaatatgcatgnataaccnnccatacnnantggccggngatcacnttagngtctccntatcgtaacagaa

SEQ ID NO: 1663 - DNA, 623 bp, Homo sapiens
  misc_feature 435, 448, 482, 501, 520, 532, 535, 546, 549, 552, 558, 578,583, 589, 590, 592, 593, 597, 604: n = A,T,C or G
acatcttgcctagatgtcgatgactgcaagtaataatacagtttataatgaaactatctacaattcttgttttagcacatctgttatccgtaaaacacctgtaactagcttttttaatttattatttgaattttaggatagcgaatcactaatttttagttgctgaggttggcattttagtgattattaagcacttctgtcagtctttgaaaaaagaacgtattttttgtgctttgaagatctctgaagaatttcttttataatagaatgggcatgtattgtaacagttttatgtcaaatgatctgtgctgtagaaaaacattaacccttgtcaaaaaagaaatggataaacttgcctttctaagtggtaagaatgacctgtactataatatactgatgtttacatttatttaaattaatctcttatgttagggngatacctccccanaacacagtgatgcgatgttctagaactcttaaangcccattggcagaccttgncggacccctaggcaattcnccctgcggcgtntanggtccaccgtncantgngtatanggcaactgttctgggaatgntcctnattccnnanncagngacttantgaagctgggggcataggg

SEQ ID NO: 1664 - DNA, 529 bp, Homo sapiens
  misc_feature 260, 300, 315, 325, 335, 346, 415, 431, 449, 458, 465, 480,489, 490, 492, 497, 498, 500, 510, 518, 520: n = A,T,C or G
acacggcccctttcacttccttttcagccacagtctgtagttttccatccgaatactgaaagaccacaatgcgaccctgcttgggctctgcctcttcaggatacaccattgctgtgcccacaatgaagtaagtgttggggtctttgcccagcttgcaggaaaccagactgagggcatattcattctgcagaaactggtgggcatgaagcacttcaaaggtgtgttggtcaatgataaagtaagttgtgcacctccacctnttcttcaaaggagggcttatgaagaacagtgctggtgganaacagcttgctggancttacactgntggacaaaanctgggtgctanccttggccttaaaggttgtcggccccactcgtgtttggacttcaatgcggtggagaggacccgaacatnggaccttctggtacanatcttcttggaactatanagggactgngcaatgncactttggatctatnatgggccanngngaggnntnttgtggcacnccgctgcngnacctttatt

SEQ ID NO: 1665 - DNA, 397 bp, Homo sapiens
  misc_feature 228, 289, 359, 372, 377, 391: n = A,T,C or G
actacagcagtcaaagagatctccactagagatcagaaagaagcaccactattttcttctatgacgtgtatgtgttggtcatgagcatgctagtatgaataaggcaatgtgttaagcactggcatacaaatgcagctaaaggtgctgaaggaaggcagtggggtggtgcaggcacacagcagggagctcttccccgtgacacagttagtcatcttctccacagagcancagaagagctttcttatagtccccagatgtattctcccttatcatggaataaaagagaggngcaaaattcttcctaactccttcctgatgttaaacagataaatctcactccttggaaccatgactctganagggttgatcatncctgnccgggcggccgtcnaaggct

SEQ ID NO: 1666 - DNA, 473 bp, Homo sapiens
  misc_feature 328, 370, 427, 438, 449, 463, 467, 473: n = A,T,C or G
acaacttatagaaaaggtaaaggaaaccccaacatgcatgcactgccttggtgaccagggaagtcaccccacggctatggggaaattagcccgaggcttagctttcattatcactgtctcccagggtgtgcttgtcaaagagatattccgccaagccagattcggacgctcccatcttgcgcaagttggtcacgtggtcacccaattctttgatggctttcacctgctcattcaggtaatgtgtctcaatgaaagtcacacaaatgggggccatttttgtcagtggccagtttgtgcagttccagtagtgactgattcacattttttncaaatgtaatgcacactccattgcattcagcccgtcttccantcatcaagtctggtcttgatatctgaaggaagattcggcactcgttggtttgcactncatcagttctnaaccccgcttnctgccgggcggccnttcnaaggcn

SEQ ID NO: 1667 - DNA, 587 bp, Homo sapiens
  misc_feature 37, 54, 71, 90, 116, 134, 139, 147, 155, 173, 193, 196, 236,246, 342, 353, 390, 391, 394, 396, 413, 434, 447, 451, 464,477, 480, 481, 483, 488, 493, 495, 501, 502, 503, 512, 517,519, 525, 526, 528, 529, 531, 539, 556, 559, 562: n = A,T,C or G
  misc_feature 571: n = A,T,C or G
acttttttttttttttttttttttttttttttcagcnaagtttcatttatttgngcaaatacaggcatgancaaaaatgttctaaacaangtaacgatttccagcattgattacanaatttcctctgatcattngattnggttatanatgaattnaaacttcaatttaagctngacttttaaaactccccctntgnttcctgatgaaccaccataattcctaaaattacacctaancaagtctgtnttgcacattggggttgccttaaaaacatttaaaatctatttgggcaaggcggtggaacgaggttgggatggcacatgatttatgctaattctgttngaccctgaacnaaacattgcatttcattttaggggttccaaatgggannatntntctgaacattttggccnccttattggaaaagtttctgnactgggggggccnaagntaaactgggactnaaaattagggganaanngnccttntttgntnagggcnnnatactaacnacccncntagaanncnnanaggtttanccggttgtttttccacnccnatnaaaaaacanttttttggtaaatttt

SEQ ID NO: 1668 - DNA, 420 bp, Homo sapiens
  misc_feature 277, 286, 311, 323, 324, 340, 343, 352, 355, 357, 381, 395,404: n = A,T,C or G
acagagcacatagaccaaggatggcccagtagtaaggcatgctgtgctctccagtggggtcctgaggcagttcaaaataaggcctcctggaagaacggccccttcttcaaggagctcgcctctcagcacgcatggggtgttctgcggagggaactgcccttggctttctcctgcaggcttcttggctgttatggacccgcatggagtttaattatgcttagcatatatttttggcatactaggatttcttcccctaggatttgccaaaagagggganggatcaaantttggcatgctgggggaacaactcnccccactgattnnagaaaaaaacaaacanatngaagtaaanacnanataataccaactaggtagaaaaanaccagataatttgnaaccctttnttggttgttagataaa

SEQ ID NO: 1669 - DNA, 553 bp, Homo sapiens
  misc_feature 332, 361, 368, 443, 471, 481, 497, 523, 529, 533, 542: n = A,T,C or G
acgcgggggtctctggtttctggccccttgtctgcagagatggctcccaatgcttcctgcctctgtgtgcatgtccgttccgaggaatgggatttaatgacctttgatgccaacccatatgacagcgtgaaaaaaatcaaagaacatgtccggtctaagaccaaggttcctgtgcaggaccaggttcttttgctgggctccaagatcttaaagccacggagaagcctctcatcttatggcattgacaaagagaagaccatccaccttaccctgaaagtggtgaagcccagtgatgaggagctgccttgtttcttgtggagtcaggtgatgangcaaagaagccctccttcaggtgcgaagnccagctnatggcacaagtgaaagcaatgatcgagactaaacggtataatcctgagaccaaattgtgacttgcaatggaaganctggaaaatgggaaatatgcaaatacgnttaaaaggcnattactttctgatttntgatggaaggtgacacctgggatggngtgganggtnaaacttttnttaatttttaa

SEQ ID NO: 1670 - DNA, 623 bp, Homo sapiens
  misc_feature 399, 477, 481, 491, 542, 547, 555, 602, 620: n = A,T,C or G
acccttgccaagttgtctacaaatgctttgtcgatttttctactgagttagacaaacttgtgatttttttccctttcttaacacaaatttaaaaagtaggaaacaaaacctagtggataaaatgacatattttcaatatgagttctgtggcagtctcacatggaagtcaggagtaacagcctcaattcctaaatagctgtttaccactgcttttctgagcatatttaagtaatacagaatataaaggagcaaacaaaatatgaagtttataaaagatttcaaacacttttctaaaaatatgaggcccatattttagaggtatttcattccttttctcaaacaatatggagatttataaatatgagaatatatagatatacagaccttaataaatgaagngttcttaaaaattttatatggaaaccagtagctttaattctccaattttatggattatccagatcaggacactcctgngcanttccaaaatnaggctacaggacccaaattggaaataggatatttagcagagaaactcatcntgtgnacataatncagtgattctcaattctaaaaacaagagactttgacttgcaccaggnttgcaagcatcaacttangtg

SEQ ID NO: 1671 - DNA, 624 bp, Homo sapiens
  misc_feature 343, 395, 429, 452, 481, 515, 519, 527, 542, 554, 568, 569,572, 575, 579, 597, 610: n = A,T,C or G
accaagaaccgctttatccagattaatataagtgaaagcctttaaatgcagggacgaaaggtatccctctagccattcagtggcaccaaccgatccaaagtctccagcactccaactggcaaagataatgcttctgctgggctgaaacccatcttttaagaccatatctgagaacatctgggcaagtttcaataggagagctgtgcctacaccggattttgcagctccagggccccatgcatctctctgggccccaactacaacatagtgatctggtctacaaagcctttaataactccaaagatgttaagaatttttatctctttcagcacattgtcacagngagcttcacattcttgtttctgaggttaccatcctacatgtagagctgtttncagcagaggacagctccttcatattcccaacagntttctgcagcagtctggagatgnctgacagtatattagcatctgatgacganaggtggaactgatgtgatgaagaaggatcaggtnttanggcactgnccaatagctgtcaanaagaagtttggntacatgggaattanntgnccngttntaccccatgtttaacttnactttgacttttngaagggatttctgc

SEQ ID NO: 1672 - DNA, 567 bp, Homo sapiens
  misc_feature 444, 474, 475, 476, 486, 488, 490, 492, 512, 535, 540, 544,565: n = A,T,C or G
acccccaaatagaaagaagtgactggatgttggaaaacttaaaaaatgatacatttccattacattggtattctattgtataaacatgccataatttatgtattaataactagccacttcttggtgaatattcagattgtcatattcaattttttactagcaaaaaccactgctgcaaagagaattatttatgtctttgtgcatttttgtaagtatatctgtgagattaatttcaagaagactgtgctggatcagagagtatgtatatttaacattttgatgtagcgccgggcatggtggctcatgcctgtaattcaaaactgagaggctgaggtgggcggatcacttgactcatgattccagaccagcctgggcaacattttttcatgggcaaaacccggggaagaaaatttgaaaaattccaaaaaaaaaaaaaaaaaaagnccttgggcgaaccacctaaggcgattcacnnnctggcgcgtntngngntcggctggaccaactggcgnatatggctgtgttctggggaatntttcngtcnattccacaattcgccggaacnaa

SEQ ID NO: 1673 - DNA, 640 bp, Homo sapiens
  misc_feature 90, 102, 109, 115, 125, 161, 165, 166, 169, 180, 188, 194,242, 265, 268, 269, 274, 276, 282, 283, 299, 301, 304, 324,329, 332, 339, 354, 371, 380, 386, 405, 421, 427, 434, 445,446, 466, 470, 471, 481, 492, 496, 506, 511, 512, 514: n = A,T,C or G
  misc_feature 519, 532, 539, 540, 543, 550, 561, 575, 580, 585, 589, 595,620, 625: n = A,T,C or G
ccagttcttttacaatacaatattttggtatttaaatgacctctaaatggttaatgtgcaatgaatatcttttgttctgaaactcaaccntgaattacgatnccatcantatgantattctaaantcataaagatgttgggaaggtttgagtctgcattgngaannggntagtaccacanactctttnctttanaacccaggatgaccaatccactgaaagtgcttttgaagattgctgatnacttatggctgatcttaaaatcngtnnatcanantcagtnnctttttttttttgaancntcnaaaggcatttaaaaaatctnaaacnttngctttantatctactgaggcanactcaaattgattatcngcatgcaanacactnctgttattttaaatagtgngacaacttatccatgnataaanacgggtnaagaatgcagnntctgatcctgattcacaaangacnngctgtgatantacattaaccnttangcaagctagntattnnanagcanttatttgttattntagcaanngcnccgtttnccttggaaatnaaatgttggcccantattnttgtngttnaaaaancccaaaaaaacctttttccccggtngggantttttctaaaaaccg

SEQ ID NO: 1674 - DNA, 495 bp, Homo sapiens
  misc_feature 345, 390, 391, 395, 407, 408, 438, 446, 463, 467: n = A,T,C or G
acgcggggcaactgatatatctttagggtgagttactgaggctgtttcagctgaggcagcatcacccacagaacacgatgttgaagatactggtttctcattactgagagcgtgttggtcattagtctttttaagtggaaggcaggcagcttctttatctgtcacttgggatatttttctttcccaaataacaatatgtatctctgaagcaggaacttcaaatttcttgtgcctttcagaacatgggccttttaagtcatcacattccagccaacttccatcaacatctaaaatccatggtataaaatgattatttgctcgatactgaattacaaaagtatcttnataaagacagccttcaaaatgaaatgcataggctgcaagcatctnngggnagcctctacaanngcacatgaatatgggagatcttttctaatncatttttntattgggatactggtgnaatngtaatgaccaaatggcaccataagtggg

SEQ ID NO: 1675 - DNA, 606 bp, Homo sapiens
  misc_feature 378, 426, 437, 440, 445, 458, 505, 509, 515, 519, 536, 539,541, 559, 568, 569, 585, 591: n = A,T,C or G
acaaatacgaaacaggattatctgatagtaggcctctgtggatggcatcaattattccaccagatatgattcttactcttttggaagggattacagccattatccattactgtttgttggatccaactacacagtatcaccaacttttggtcagtgtagaccagaaacacttgtttgaagcacgcagtggaatcctctcaatccttcatatgatcatgtcctctgtgacactgctttggagcatactgcatcaagctgattcttcagaaaagatgactattgccgcatccgcatctcttaccactattaatcttggagctacaaagaacttgagacaacagattcttgaattgtggccccatttcaatgaatcatggngtcactttatggctgcattgatttgtgtggatgaaagaagacagaatnaaaccaccccnggncaagncattcctgcagcngtgaaaacagttttattagggaatggtcgtcatcagggctgaaacanaacntttccnactntaaaaagtttaagcgcncancntgccaggcaaaaaatttnttgaagctnngcttagtttttttctnttcaanatcaggccattatgg

SEQ ID NO: 1676 - DNA, 523 bp, Homo sapiens
  misc_feature 360, 427, 457, 462, 489, 493, 498: n = A,T,C or G
acacaattatgaaactatgccagtagcgacctgcatgtttgtctcatctctttagccacttaagttctcaaaacactgccaaagctttccttctctattaaactcccttaagcattactcatactattattcaagtttaagatgtggcaaatctccccaagtgtatatggctggttctcttcttataaatgaatccataagacagtgtcccctaattcatctctattttctctaacctgcttgattttctaaaattggaaaaaagtaattccggtatactaaaaccagagcccaggtttctcaacatcttcagttgaatgacttttaattccccaatcaaggtataacacacaaatgtanctgcgcttacagtatagaactctgagtggtggtgctttggttagggaccattaccagcagtatctgnttgcaccccggtcttctttagctcaaaaanttcanaattgtatgccatggagatttttacanagcncctcnttcaaagacaaaaaatttattggtt

SEQ ID NO: 1677 - DNA, 612 bp, Homo sapiens
  misc_feature 308, 456, 466, 474, 495, 511, 525, 533, 546, 554, 557, 564,588, 609: n = A,T,C or G
acacaaggaaagagcccagaaccaagctcaagatacctattcaaagatccctgccagccaggtgggcagttgagtgcagattcctgcgacccccgccatttttgctgtctacttagaagggaagtcaatggcatacccaggattccttcctgatccctcaaagaaatggggaataaacactttaaacaagttccaggccactcagcagtggtaggaaagggagggagggcatggaggaggatggggcacatagctgacattattaaaaacacatccgaagaagtagggggccctgtggggtgtagaanacaaataaggcatcctgtgaaactacagacatcaggggccagagtccggtagcacctgattaggcaaatgcagatgataggcggtgagccgccaggctccaccaggaatgacgaagtctggttgattctcttccttcggcatagctgntgtaatcacntctactcnagtccttcttgtctgcaaagngcctggtttaggcaancaatgcaaaaccanatccaganatcggtacaaggncgttgccnatnaccccantcgtcaaattctgcccaaattganctggggcctcccttcgcctcnact

SEQ ID NO: 1678 - DNA, 357 bp, Homo sapiens
  misc_feature 270, 284, 299, 301, 302, 314, 317, 326, 342, 350: n = A,T,C or G
acgcggggggatttgctgaattaatgactattgaatttaaaactaattatgagttgacaaataaataaaaggtagtgtttatgtctgagcttattgtgtttgagctaacaccaggttactcagtaaccatgacctgctcctccatttccatttattctcaacattaaatagttttatcttgttgttgccagaaatgcacttgtgccaggtattgtccctgctgtatgaaaagcttcttggcaatgaattctgtaatagtgccctacattntggtttttctgggnggaattgtttaacantnncaacccaagganttnccaatatanttttgttttatttgtnttccaaanattcact

SEQ ID NO: 1679 - DNA, 603 bp, Homo sapiens
  misc_feature 455, 522, 530, 531, 534, 536, 539, 553, 579, 583, 595: n = A,T,C or G
actaaacccagtaaaaattgttgaaaatgttaaaggtcagcatgttctaattgggaatctagatatagcttagatttcctattggcttagagtatttgctataacaaatgaagtgcaatgacaattatatattcctactcggtcatactggactggcttcgttctcttaatatactcagtaatgactcaagcctctggctattaacataccctagttgccgttttttaattgccatgagccaaatacttcttggtatacaattgatccatttattttaatggctgccttttcattttcatcttttcttgctgctacccatctatgtatgtagcattggggggaaaatgtaccacattttttatgggaagactttgtgtaaaagtgacatttgaaggttttactggggaactacctggatatgccccaagactgagtggaatcgccctttgaaggngccttcttatgacccaaagttgctttaaaagtcatttgagggataaatgtattaatttgaataaggnggtacccnnaananatntactgttgtgggangggggaattgtaaaaagacttataantttntgccagcaaagntcctaatt

SEQ ID NO: 1680 - DNA, 281 bp, Homo sapiens
  misc_feature 101, 184, 188, 226, 237, 239, 246, 261, 277: n = A,T,C or G
acggtatatatattttaaatattctcacacacacatgcaatccataaagcaattattttaatgttaagagtgaaagtaaaatgtaagctccatgagtttgntcaatgttgtgtccccagcaactacaacagggcctgattcctagcagagactccaggaatatttgtggaatggttcctcatgntagnctcaaggctatgagggtcttatatgtggaggatgggtnacgaacactananatgtggntgtgctttattttancccgagaacaaataanttta

SEQ ID NO: 1681 - DNA, 505 bp, Homo sapiens
  misc_feature 264, 299, 300, 304, 330, 353, 371, 378, 395, 397, 404, 408,436, 443, 450, 451, 465, 466, 468, 470, 478, 496: n = A,T,C or G
actaaaaaagattttgaggatttatacactcctgtgaatggatctatagtgattgtcagagcagggaaaatcacctttgcagaaaaggttgcaaatgctgaaagcttaaatgcaattggtgtgttgatatacatggaccaggctaaatttcccattgttaacgcagaactttcattctttggacatgctcatctggggacaggtgacccttcacacctggattcccttccttcaatcacactcagtttccccattttcggcatnaggatggctaatatccctgtccagacaatctccannctgntgaaaaaagctgttgggaatatggangagactgtccttgctggaaacanactctcttgtaggatggnaccctanaaagcaagaatgtgaantnctgtgancatnggctgaagagtaaaatcttacctcttgngtttaangctttgnnaccaatcctttttnnantnggccaaanaatcatggggcctgactnaaatcgggg

SEQ ID NO: 1682 - DNA, 374 bp, Homo sapiens
  misc_feature 284, 341, 361: n = A,T,C or G
acgcggggattaaatgtcccaagcaaggatagggaaggggaatggttgagtctctggagatcattgtaaccaatcctgccagacctgtttggggcagtggggagcaaacctagataaggacccgtttggggcagcagggagcaaaatctcctttaacaaccaagcagttcctcattcacatcaacagagcgaggctgtgataacttaggaggcagcaatcctaatagtccttcagttgcattttagtctgtctccaactggacaccattaggcagtgtcagccngatattcggggcagtagataaatgttcatttactgatgcactttagtttttggctgntacctgtttccagaattttnggcctttaggcgg

SEQ ID NO: 1683 - DNA, 526 bp, Homo sapiens
  misc_feature 32, 62, 115, 125, 140, 152, 177, 181, 199, 247, 249, 267,268, 270, 277, 279, 320, 336, 343, 348, 359, 376, 453, 466,474, 502, 526: n = A,T,C or G
actttttttttttttttttttttttttcgcanatttgagtaactttatttgcattttatagngatttcttaaggcctatatccaatgaaaccattttaaaagctctatgaggagnggaattttanatgtctattacactngtcttttaaaanaaaaatgcttaaatttcaaaatgancaanattcacttttgtaggtanaggccctgcttcttcatgatcttcagttttagatctaacaaccacaananaaagaagctggatatctnntnagctttngntcattcataaactccaagtcaccatagatactcagcttctnaaagggaacatactgnccacagntgtancaacagttgcncacaaatccaaagcatncctcccgagaggacaagagttgagttaaaatcccccagagtaagagagaggcttcttaaaagctcctttcccatctncaaaaaatcctgngcgcttgnaattctcattgcagtaggcatttgctanagagatcttaattggagctctgtn

SEQ ID NO: 1684 - DNA, 497 bp, Homo sapiens
  misc_feature 186, 209, 233, 264, 270, 314, 347, 368, 369, 377, 378, 381,396, 399, 400, 401, 404, 406, 422, 434, 437, 441, 443, 445,447, 449, 451, 456, 461, 463, 465, 469, 475, 486: n = A,T,C or G
accgccagctctctgctctccacagggctccccgccccacccggcctgataaagcgcgccgactgggctacaaggccaagcaaggttacgttatatataggattcgtgttcgccgtggtggccgaaaacgcccagttcctaagggtgcaacttacggcaagcctgtccatcatggtgttaaccagntaaagtttgctcgaagccttcangtccgttgcaaaggagcaagctgnacgccactgtggggctctgagagtcctgaanttttanttgggttggtgaagatttccacatacaaatttttttgaggtttnctatttgatccattcattaatgtctttagaaanaaatccttgtcacccagtgannaccaaacnnttnacaagctaaaggganatnnnggntncatttgcaggctaaanatcttagtcttnaanggcnanantntnanacctnttggngntntagngggacntagtaaatggnatactttccaa

SEQ ID NO: 1685 - DNA, 497 bp, Homo sapiens
  misc_feature 308, 312, 336, 357, 392, 411, 451, 452, 455, 468, 472: n = A,T,C or G
gcggtcgcggccgaggtacttgcagccctcggccaaacggccagacgccgacgtcgaccagcagggactggtaagaagtttgatagctgtaggactgggtgttgcagctcttgcatttgcaggtcgctacgcatttcggatctggaaacctctagaacaagttatcacagaaactgcaaagaagatttcaactcctagcttttcatcctactataaaggaggatttgaacagaaaatgagtaggcgagaagctggtcttattttaggtgtaagcccatctgctggcaaggctaagattagaacagctnatangagagtcatgattttgatcacccnataaaggtggattctcttacngtacaccaaaataaatgaagcataagacttgctanaacaaccaccaaacattgntgttaagacccaccaaaaaaaaaaaaaaaaaaaaaaaaanntcntgccgggcggccnttcnaaggctaattcactcctgcggccgt

SEQ ID NO: 1686 - DNA, 576 bp, Homo sapiens
  misc_feature 244, 258, 267, 296, 305, 317, 320, 325, 328, 340, 343, 345,354, 366, 374, 376, 381, 386, 389, 397, 399, 402, 412, 429,438, 445, 452, 473, 479, 484, 490, 505, 511, 517, 518, 522,529, 536, 541, 545, 546, 556, 560: n = A,T,C or G
actgtcggtttcagaaatgccttgcagtggggatgtctcataatgccatcaggtttgggcggatgccacaggccgagaaggagaagctgttggcggagatctccagtgatatcgaccagctgaatccagagtccgctgacctccgggccctgcaaaacatttgtatgactcatacataaagtccttcccgctgaccaaagcaaaggcgagggcaatcttgacaggaaaaacaacagacaaatcnccattcgttatctntgacatganttccttatgatgggagaaaattaaatcangtttaaacncttacccccttnagnaacanacnaaaagggggccntcnanttttaaggnttgccatttctntccggggngntgggnagganacncagatttncnaancttcgggttngaaatttggactgaacnacaaataancttttcnaaatttngggtccacaaaattttaccangtgctnttganaaaaanagggttttttttcgnggcaanttttanngggngttttanaacctcnaaacntttnngattttttgncccnatttttttttgggatt

SEQ ID NO: 1687 - DNA, 622 bp, Homo sapiens
  misc_feature 213, 248, 256, 258, 264, 270, 272, 295, 457, 484, 496, 504,510, 511, 522, 524, 527, 560, 567, 571, 574, 577, 581, 597,602, 615: n = A,T,C or G
accgcgggtccgtcaagctggtgtcattgactaaccacatccacaaagcacaccattaatccactatgatcaagttggggggaatctggtgaagggttctgaatatctccctcttcatccctcccgaaatctggaatacttattctattgagctattacaccagttttaacaccttcctcgtgttatgtttaaaaaaataaattaattttaanaaaaccattttaaataatgcacagttgcagcctgnaaaacttnanggggcncttatntntcaatttaggaactttatttggngcatttacgcactggaatgcaaatccctttgcctgtgtaagtgaaaatatagactgtatcttgtggccctatgaaattctgccttttattatatactctaccttcattaatacttctggcaagatgtctgcttagcactcagttgcattctttccttttctnctgtcattagcttaattctgagacatntgaggaaaattntatttttnaaaatnnaaaattgtttngnaancttttaaaggtggggcaatttaaaggttttttnatttttnaaantgncancccntaaaaaagtggttttnaaggnaatttttccaagnaggtttt

SEQ ID NO: 1688 - DNA, 593 bp, Homo sapiens
  misc_feature 415, 490, 509, 521, 522, 533, 545, 547, 550, 558, 562, 564,573, 589: n = A,T,C or G
actaccagatagaaattctgaaattggaaattggaggccaaagccttaatctggactgcagagagtataacgcagacaaggccatcgtggacagtggcaccacgctgctgcgcctgccccagaaggtgtttgatgcggtggtggaagctgtggcccgcgcatctctgattccagaattctctgatggtttctggactgggtcccagctggcgtgctggacgaattcggaaacaccttggtcttacttccctaaaatctccatctacctgagagacgagaactccacaggtcattccgtatcacaatcctgcctcagaaattgcaggtgctgcagtgctgaaatttccgggcctttctcaacagaggatgtagccagcaactgtgtccccgctcagtcttgagcgagcccatttgnggatgtgtctatgcgctcatgagcgtctgtggaccatctcttgtcttatcgtctgtgctgtgcgtccggtgtcancgtcgcccgtgacctgagncgcaatgatganncttctgtcaantcgtggaatgantnccngcctactnacancntgactcaantttagaaatcctttcnggca

SEQ ID NO: 1689 - DNA, 565 bp, Homo sapiens
  misc_feature 28, 220, 225, 275, 307, 315, 324, 332, 340, 343, 367, 379,396, 398, 431, 434, 442, 452, 453, 460, 466, 477, 481, 487,488, 491, 498, 504, 525, 526, 530, 537, 543, 561: n = A,T,C or G
actttttttttttttttttttttttttngccaatccgttttttaattcttaaattcttgacattacagaactaaactgaaatttattaacattccactcttacatttcttatcgacaaacagaaataaaattcatgagccaaaaaacccaaaacaaaactaaaaacagggaaaagcttataaaactaaatatggatcccagcattaacagctgaacaganaatgngatttttaaattcttagcggatgataaagttgtgtagaaactgaacactnacaaattatttaaaacctggaatcactgccanaaattacncatttggancttggganaacagcanaanggggttattgagggacctacactntctactgccccntgcccttttaaaagccngngtacctgccgggcggccgttaaaagggcgaatncancacactgngccgtactannggattcnactcgnaccaacttggngaantttggnntanctggttnctgtgngaattgttccgtcacattccnnacanacgaccngaacanaaatgaaacctggggccnaagg

SEQ ID NO: 1690 - DNA, 475 bp, Homo sapiens
  misc_feature 205, 225, 241, 274, 364, 366, 379, 392, 394, 401, 472: n = A,T,C or G
acgcggaagatgaatgccagaggacttggatctgagctaaaggacagtattccagttactgaactttcagcaagtggaccttttgaaagtcatgatcttcttcggaaaggtttttcttgtgtgaaaaatgaacttttgcctagtcatccccttgaattatcagaaaaaaaatttccagctcaaccaagataaaatgaatttttcnacacttgagaaaacattcangggctatttgctccgntaaaattacagatggaattcaaggcagtgcagnaggtcaccgcttcctttctttcaagctcaaatctttcctggatgttttgagggtaatgatgaactattggaatttaggattttcttattntncatcccaaaccgnaatcatgggagancncgcttgntggggaatataacttggttactgtatagtggctgtcatggaaccgaggctgatctgttatagcatcttgtnctc

SEQ ID NO: 1691 - DNA, 482 bp, Homo sapiens
  misc_feature 400, 473: n = A,T,C or G
actgggattacaggcatgagtcaatatgcccggcccgcagtctatcttctaaagctgcattaggtgaggtctgacttgctgatgagttcctccccagcctaccctgagctggcctctctctgctcagttgtgccatctcgcctctggcctgaggccaaccaacatgtggagcttcttacccagtgccattttaaaatgacacttcataactaatattaataatagctaaacatatgtaacatttattatgtataaggcactattctaagtgttgtatatatattaactgatttatttactgcaacacttaggttgatgtcttctgcattttacaaatgaggaaactgaccacaggagattaactgacttgccaaagttatacatctgatgatggacccangtctatgtcaccagagtctgtgccttaacactacagatagctgctgaagtagttgtgcctgaggaccagttangaaaattat

SEQ ID NO: 1692 - DNA, 497 bp, Homo sapiens
  misc_feature 497: n = A,T,C or G
acaaagaaagttttaagtcaaggcctcaccaattcctacagtattagtattgtgtctcaattctcaaaactaacttttaaaaagcttaaacttaacctaaaggattttaaatgaaaatataaactagaatgaacaaacatgagaaatatttctttgaatcagggagctagcacctttgagttttccaaaaaagcacgtctccccagtgtgttcactgtgatgtggtgtaaaagatccacatttaacatacttaaactacttaaacttagataacatcactctgaagtatactaccaaaatgttaattgagaaaagctgaaaatagttttagtttactcattatcacatgctagaagaaaattttgcatgagaaaacactgaagaggtaattttttaatccagatttttcacaactcatggtgcaaaatgggccccagcttcctctattataactgctcttaattgcttgtgctgctgtgaaatgttgaagtactcan

SEQ ID NO: 1693 - DNA, 494 bp, Homo sapiens
  misc_feature 354, 452, 488: n = A,T,C or G
acattacactaaattattagcatttgttttagcattacctaatttttttcctgctccatgcagactgttagcttttaccttaaatgcttattttaaaatgacagtggaagttttttttcctcgaagtgccagtattcccagagttttggtttttgaactagcaatgcctgtgaaaaagaaactgaatacctaagatttctgtcttggggtttttggtgcatgcagttgattacttcttatttttcttaccaattgtgaatgttggtgtgaaacaaattaatgaagcttttgaatcatccctattctgtgttttatctagtcacataaatggattaattactaatttcagttganaccttctaattggtttttactgaaacattgagggaacacaaatttatgggcttcctgatgatgattctttaggcatcatgcctatagttgcatccctncgaatgtaagtacactgtccaaaggtttgcttcttncactgg

SEQ ID NO: 1694 - DNA, 499 bp, Homo sapiens
acagtggcatgatctcggctcactacaacctctgcctcccgggttcgagggattctcctgcctcagcctcctgagtagctgggattataggctcctgccaccatgcccagctaatgttttttgtatttttaatagagacagggtttcgccatgttggccaggctggtcttgaactcttgaccttaggtgatccacccacctctgtctcccaaagtgctgggattacaggtgtgggccactgcgcctggcctatcttgcattcttcagagaattcacatactaaggggcaattcgtgatcctcaaataagaaactccaagtaaaacatcttagagttttttatttccagactgcatttttaatatgaaactatgaatatcgcataacatagcatgttctttgtctctaagaattagggaagaattttgaggctattaggacattgtagatctctttataatcactctatgtttcccacgtactgcttcatctctgattgg

SEQ ID NO: 1695 - DNA, 499 bp, Homo sapiens
  misc_feature 389, 417: n = A,T,C or G
actccaactcaagtttacaagttacacctttgccacagccttggctaaatcttgaactagtgcagaattcagctgtggtagagtgctgatcttagcatgcttcgatgtggcatacttgttcttgacagtcatgtgctttgtaagtccttgatttaccatgactacattcttagccaggtgctgcataactggaagaagagattcttcagtatatgacaggtaatgttgtagagttggtgtccattcaccattatccagaattttcagtgctaagcaaaaagctcctgctgcaatttgagaaggaggaaagtgcaccatgtcatagtccaacatagttagttccatcaggtatttggccaaagtatgttgctcgacatcaacctctccantcttagatgctctccgaaggaagtgcanaggtagaggcgcccagaccaaagttaaagctcttataatctcatttcatctgctgattggtgcttagtataagtgttgcagt

SEQ ID NO: 1696 - DNA, 406 bp, Homo sapiens
  misc_feature 177, 196, 207, 220, 245, 255, 261, 263, 264, 270, 279, 288,302, 310, 325, 359, 402: n = A,T,C or G
accgtctaaaggggcacaaggatgccatcacacaagcattgtttctacgagaaaagaacctgctagttactagtgggaaagataccatggtgaaatggtgggaccttgatactcagcactgctttaaaacaatggttggccaccggactgaggtatgggggttggttctgttgtcanaagaaaagcgactcatcantggggcctcanacagtgaactganggtatgggacatagcttatctgcangagattgaanacccgnannaaccanaccccaatnaaaatcatnggatcttctcctgnaatacaanatactcttgaggcanaggatggtgcctttgagacggatgaacccctgangatcgaatcctttctgcataaaagctggtccttattgcggganggaa

SEQ ID NO: 1697 - DNA, 506 bp, Homo sapiens
  misc_feature 506: n = A,T,C or G
acaaaggacggagcaccatcaacccgtccaaggccagcacaaacccagatcgagtgcagggagcaggaggccaaaacatgagggaccgggccaccatccggcgcctgaatatgtataggcaaaaggagcgcaggaacagtcgtggtaaaataattaaacccctgcaatatcaatcaacggtggcttctggcacagtggcaagagtagagccaaatattaaatggtttggaaacacacgtgtgattaagcagtcatcattacaaaaatttcaagaggaaatggatacagttatgaaggatccatacaaagttgtcatgaagcaaagcaagttaccaatgtctcttctccatgatcgaatccggcctcataacttgaaggtgcacattcttgatactgaaagttttgaaactacatttggccctaagtcacagaggaaacgaccaacttatttgcaagtgatatgcagtctcttatcgaaaatgctgaatgtcactgagactatgccn

SEQ ID NO: 1698 - DNA, 503 bp, Homo sapiens
acaaagaagcagaagtgtaattttccttttcccagtatgacgaaaaattggagttctgccatttgagcagcttactggaaagatccagccttacttgtcttaaattgtccaacaaggtgactcattgcccggcaaacacttttaccctcagatgttactcatgatattataaaatatgaggccagtgctcaggtttgcatcataagtgagctatccctgaagggttttaattacttatttggtgtcttgattatatttgcaaacttctttataaaaggtgaaaaaagcacacaaaagagagggtgtcttcatattaaaccttcacaaccttcatgatttcataggattattttggaaatatagcacttgactttatgaaaggatctggctaggtatattaggggtagtgcaataacctgaagaagctggcattgttacagaaacagatcaagggctataatttatgcatttttagcagcagtatctattaatcatgccttttc

SEQ ID NO: 1699 - DNA, 502 bp, Homo sapiens
  misc_feature 382, 487: n = A,T,C or G
acgcgggatccacgggctgcaccggcaccctggtggcagagaagcatgtcctcacagctgcccactgcatacacgatggaaaaacctatgtgaaaggaacccagaagcttcgagtgggcttcctaaagcccaagtttaaagatggtggtcgaggggccaacgactccacttcagccatgcccgagcagatgaaatttcagtggatccgggtgaaacgcacccatgtgcccaagggttggatcaagggcaatgccaatgacatcggcatggattatgattatgccctcctggaactcaaaaagccccacaagagaaaatttatgaagattggggtgagccctcctgctaagcagctgccagggggcagaattcacttctctgntatgacaatgaccgaccaggcaatttggtgtatcgttctgtgacgtcaaagacgagacctatgacttgctctaccagcaatgcgatgccaccaggggccagcggnctgggtctatgtgag

SEQ ID NO: 1700 - DNA, 494 bp, Homo sapiens
  misc_feature 427, 457, 464, 466, 470, 489: n = A,T,C or G
acatgaagtatatgctgtggatgttctcgtcagctcaggagagggcaaggccaaggatgcaggacagagaaccactatttacaaacgagacccctctaaacagtatggactgaaaatgaaaacttcacgtgccttcttcagtgaggtggaaaggcgttttgatgccatgccgtttactttaagagcatttgaagatgagaagaaggctcggatgggtgtggtggagtgcgccaaacatgaactgctgcaaccatttaatgttctctatgagaaggagggtgaatttgttgcccagtttaaatttacagttctgctcatgcccaatggccccatgcggataaccagtggtcccttcgagcctgacctctacaagtctgagatggaggtccaggatgcagagctaaaggccctcctccagagtctgcangcgaaaaacccagaaaaagaataaaaagantgctcanantganagaatgccacagtggggancatta

SEQ ID NO: 1701 - DNA, 464 bp, Homo sapiens
  misc_feature 72, 79, 109, 112, 130, 138, 143, 151, 176, 188, 214, 217,219, 223, 232, 238, 263, 283, 287, 310, 341, 361, 376, 378,386, 395, 401, 408, 416, 429, 432, 434, 437, 443, 456: n = A,T,C or G
acttttttttttttttttttttttgctttttttttttttttttttttttttccagcccatggcagttttatngggggtnctcccttcccatattttacctggagttggnaanggggaaaaaaaaaagggngggacaanaaagngaaactanaatataaatatccgtaaacagcatntgaccattagtntttaacagggaggaggaaccactggngtntnttantttaggacncaggancattataggggtagggccagctggngttaatggcatgcaggcatntgtnatgccaaccatgagggctggaanaaccaaaaccaaagaaaaatatgaccgcatntattctaaagctactggggnggtttctcatgcttnanagtctcgnaagtctccnggtccnggggctnaggcccgngaaacaccatctnatntntanagtggntatagctccttcnccttggat

SEQ ID NO: 1702 - DNA, 494 bp, Homo sapiens
  misc_feature 36, 38, 64, 99, 146, 159, 164, 201, 207, 234, 276, 289, 304,308, 316, 324, 331, 338, 345, 364, 386, 390, 419, 472, 493: n = A,T,C or G
actttttttttttttttttttttttttttggtttananttatttttattgacaaggtttataanaacaaatatttaaaatcgaaggccaattattaggnctcatttagttgcttattttgttcacttgtatttacctttccctagngtctgagtaactntcaanaaacaaacctgtgaaaatacctgttaacattcaacanatattnttatatatttctgtctatgatgcaaanatatttttcaacacttaattggtgcaacaaatgtgtcattgngtcataaacagcntgttttaaaattcanattnaataaacngatttaanacagaantttgaangacaaanttaagtctcattcaggagnggccattatgttgatcatctanaatnacactgattaaccaaactctgaaagccanagccccaactccagagaaacttaaattctttatgaaaaagtaattattttganaccactttgtagatcatcacna

SEQ ID NO: 1703 - DNA, 499 bp, Homo sapiens
  misc_feature 74, 206, 266, 478: n = A,T,C or G
acttttttttttttttttttttttttttgaatctgaagtcttgtgttttactaatggaaaaaaaaatacagaanaggttttgttctcatggctgcccaccgcagcctggcactaaaacagcccagcgctcacttctgcttggaaaaatattctttgctcttttggacatcaggcttgatggtatcactgccaggtttccagccagntgggcacacttccccatgtttgtcagtgaactggaaggcctgaactagtctcaaagtctnatccacagagcggccaacagggaggtcatttacagtgatctgccgaagaatacccttatcatcaatgataaaaaggcccctgaacgagatgccttcatcagcctttaagaccccataatcctgacaatggtgcgcttcgggtctgatccaaaggaatgttcatgggtcccagcctccttgttcttaggtgtattgcccatgctagatgacanaagtgagatcccagaagccca

SEQ ID NO: 1704 - DNA, 504 bp, Homo sapiens
  misc_feature 462: n = A,T,C or G
actgggagatacagccatccaccttcagatgtgtctacgtgcgctctgccattcaactcggaaactataagtaattctcaagaaagccctcatttttataacctggcaaaatcttgttaatgtcattgctaaaaaataaataaaagctagatactggaaacctaactgcaatgtggatgttttacccacatgacttattatgcataaagccaaatttccagtttaagtaattgcctacaataaaaagaaattttgcctgcattttcagaatcatcttttgaagctttctgttgatgttaactgagctactagagatattcttatttcactaaatgtaaaatttggagtaaatatatatgtcaatatttagaaagcttttcttttttaatttccaggaaaaaataaaaagagtatgagtcttctgtaattcattgagcagttagctcatttgagataaagcanatgccaacactactctgatatccccatcatactggtaaagcg

SEQ ID NO: 1705 - DNA, 368 bp, Homo sapiens
acttttatcaaaatccatcataaaagggaaagaagactacaaagttttgcctaaatataacaactagagctagatttgttgtgggggaaggggctctcagagcttatctgccgctctctcctcccaccccccaccgacactgaccactggaatcttcaggttcttgaggagttccaaggctgaggtcagaacgggcatgggaggcagcagacacagcactgcctgctccccctccaatgttgctgcttgctcaatgagcctccaacccaactgctctagaggagagtggatgggctgaaggagaagccagggaagttagagcaaacacattatcatagaaactgtacctcggcgcgaccacgctaagg

SEQ ID NO: 1706 - DNA, 505 bp, Homo sapiens
  misc_feature 373, 494: n = A,T,C or G
acgcgggccagttgcccagagtggtaactcgcttgataatgcaccttttattggctgccttcctctctattgtcccccttctccattcctctatcagtgtttctggaatcaaattcaaattaccatctgcactcaaattctgagttggcttctggaaaactggaaactaagaacagaaatccagtgcatagaccagaagcggtggctcacacctataatcccagcactttgggaggctgaggtgggcagatcacctgaggtcaggagttacagaccagcctgaccaacatggtgaaaccccgtctctactagaaatacaaaaattagccggcatggcggcagtgcctgtaatcccacacttcgggaggctgangcgggcagatcacctgaggtcaggagtttgagaccagcctgaccaacatggtgaaacccctctctactagaaatacaaaaattaccggtgtggtggcaggtgcctgtatcccactactcangaggtgaggaa

SEQ ID NO: 1707 - DNA, 503 bp, Homo sapiens
  misc_feature 473: n = A,T,C or G
acaaatttcgattgttaggaaaccaaatgttctgaacattattttcattagaaaagggaaggtaattttatagttgtttgaggtgttgtaatacatctactgataggcccagctgtttaactaaactggctgtctgttccaaaatccatgtggggcttgggttttctgaatgtgcatgctcctgtgttctacaacattctacatatgaacaatctatcccactatggctcttgctacaagtttttgttaaactcagcattattttcacagagtctttcatctttagcttcatcaatctttttctcagctggaactacatgacaaaggtccatatcctcaatggagtccaataaatctacaacatgggacggtggagtgattgatttcagatgtttgagcacatactcttcacactgccaactgctccagaagattgttattttattgatcaaagttgaattattattatgaangtgcccagaagcaagcctcatgttctcgga

SEQ ID NO: 1708 - DNA, 504 bp, Homo sapiens
acaaatatttaagagtgttgattgggagtaagggaatgtcaactgccaataaagtggaagatgaaagaataggactttacacagagcatatttagttatgggtctctgtctcctccccacacagaaaaactcccagacattcatgacttcatccaccctgcctggcagataggccatatttcctgaccccctggctcttcacctcaaaaggtttatctttccaccacactagcaaagaccctcaggacacacaactcatactgcagctaagcatctaccccgagggacaaggcaagcacacactagggcagctgggccatcctgccctaatccctccagcggtgtccacactgagcattgcagcacttgtagaaggtggtcatcggctcatctgcagagcgggtctgaagctgcatgaagtaagcacgaggatgtcgcatttgggacacgactctgcatagagcaacattctccaggcagtgtcacaagcacatatccattctt

SEQ ID NO: 1709 - DNA, 505 bp, Homo sapiens
  misc_feature 338, 491: n = A,T,C or G
acaaatgttttttattcaaaaatacaaaataaattatctgtaggcatggacaatgacagcagtaaaccattatatattttgtcaactgaaaccagtaactgatggttatagtgattttcagccagcctttttcttcattttccccaactgacttctctgaagttattggtgaggaacactgccttgggcttcctgtcacagttcattaataaaggtaaagcactagtctaggagttagaacatgccacctcccataccacctcccattccacccattgcacccattccagggtccttctcttctttaggaatttctgtgactacaacttctgctgtanttaacagagaggcacaccagcagcatccaataaagcagttctcacaacctttgtgggtcaatgattcctttttccccatattacaaaatctccagcctagcatcataaccaacttctgaggaactttgctaatttctcacttcaaagatcttnacacctgcttctta

SEQ ID NO: 1710 - DNA, 507 bp, Homo sapiens
  misc_feature 241, 448, 458, 467, 472, 476, 483, 485, 487, 494: n = A,T,C or G
acacggggggaaagacaatcattgaatacaaaacaaataagccatcacgcctgcccttccttgatattgcacctttggacatcggtggtgctgaccaggaattctttgtggacattggcccagtctgtttcaaataaatgaactcaatctaaattaaaaaagaaagaaatttgaaaaaactttctctttgccatttcttcttcttcttttttaactgaaagctgaatccttccatttcttntgccatctacttgcttaaattgtgggcaaaagagaaaaagaaggattgatcagagcattgtgcaatacagtttcattaactccttcccccgctcccccaaaaatttgaatttttttttcaacactcttacacctgttatggaaaatgtcaacctttgtaagaaaaccaaaataaaaattgaaaaataaaaacctaaacatttgtaanaaaaatacantttatgatnagatntttnataagtntnangcctcanaaataaaaaaaaa

SEQ ID NO: 1711 - DNA, 468 bp, Homo sapiens
  misc_feature 58, 66, 82, 90, 94, 97, 113, 115, 122, 125, 137, 142, 146,150, 159, 195, 198, 205, 208, 215, 226, 246, 252, 287, 290,303, 311, 321, 333, 336, 347, 351, 384, 403, 446, 449, 465: n = A,T,C or G
acttttttttttttttttttttttttgctttttttttttttttttttttttttttttnaatctttnaatcttttatttaaangccatganccanganggattttaaatcttgntnaaagcanccncatccatggacngcacntagncctnaaaagcagngatctgctcctccagcatatctgttccaactttatnatnttcaacnacncactgtntttgaagtttnttaattccgtatcccactgnaactanttttagaaacccccaactaaccgctgtttgaatgnttntgacccactcctntaatttcnccatatctgntcatcatcccanggnttcacatttantaanatggaagacttggaacaagggcaggtttttggntttctttgattcatattgngcaaaaagttttcccttacctttttgttttactttctcccatnatnaaaccaaagaggcaangca

SEQ ID NO: 1712 - DNA, 496 bp, Homo sapiens
  misc_feature 227, 234, 330, 331, 353, 381, 416, 443, 484: n = A,T,C or G
accagcgaagcacctcagccccctcggaagaaaagggcccgggcagaccccactgttgaaagtgaggaggcgtttaagaatagaatggaggttaaagtgaagattcctgaagaattaaaaccatggcttgttgaggactgggacttagttaccaggcagaagcagctgtttcaactccctgccaagaaaaatgtagatgcaattctggaggagtatgcaaattgcangaaatcncagggaaatgttgataataaggaatatgcggttaatgaagttgtggcaggaataaaagaatatttcaatgtgatgttggcactcagctgctctacnntttgagaggccccagtatgctnaatcctcttgctcaccctgatgctccantgcccatgtttatggagcaccacacctactgaatntttgtaagaattggacattgtggcctntcgccctttgatgagaaagcttgattattgtggcttttcgntgatttctaaat

SEQ ID NO: 1713 - DNA, 503 bp, Homo sapiens
  misc_feature 203, 345, 441, 462: n = A,T,C or G
acgcgggggctcactctgcgcttcaccatggctttcattgccaagtccttctatgacctcagtgccatcagcctggatggggagaaggtagatttcaatacgttccggggcagggccgtgctgattgagaatgtggcttcgctctgaggcacaaccacccgggacttcacccagctcaacgagctgcaatgccgctttcccangcgcctggtggccttggcttcccttgcaaccaatttggacatcagggagaactgtcagaatgaggagatcctgaacagtctcaagtatgtccgtcctgggggtggatccagcccaccttcacccttgtcaaaaatgtgaggngaatgggcagaacgagcatcctgcttcgctacctgaatgacaagctcccctacccttatgatgacccatttccctcatgaccgatcccaactcatnatttggaccctggcccgtcanatgtggcctgaactttgagaagtcctatagggccgagggaa

SEQ ID NO: 1714 - DNA, 510 bp, Homo sapiens
  misc_feature 104, 121, 132, 176, 181, 222, 488, 498: n = A,T,C or G
actttttttttttttttttttttttttttttatggaatgattaaagatgtctttataaagtttttttcaagacttcattctaaatacacagaataaaaaatggngtcagctcacttgtaanacaccaaccanattttccttatactgtctcaaaatttaaagatcaatttccccanagggngtgcaatgcatcataaaatggcccttttttgaggatggganaggaagggttgggcaggatggaatattaaattgtaacatgataaacatgcaagactgttatccaatctagataatttatatacattttgatgacttaggaaaacaaagcaatcatttgtgacaagcctaaaaagcttgacatatttaacatacttaggaacttttttgtgcggtgggaattctctaattgtatcatgtggccttttgaagtaacaaacagaaggccagctgttgaagtttgctgtgaacatcacattccccctaanaaaccaaggnggattgctcgag

SEQ ID NO: 1715 - DNA, 494 bp, Homo sapiens
  misc_feature 40, 68, 81, 84, 96, 102, 105, 107, 169, 204, 212, 285, 335,391, 394, 401, 422, 462, 463, 491: n = A,T,C or G
acttttttttttttttttttttttttttttttttcggganccaaggaagtttatttactctactgggngacaggagggcanagngctccaaagganacccanatncntcaaccaaggacttccctgaaatttggctttgctcttccaggcctgcacatgctgcgtgatnaaatgaggcctgcctaaacatctgtgagggcctcnagggctgntgcctcaactttctccctactaagtccacccgccagggacacagccagggcactgctctgtgctgacttccantgcagccaagggtcaaaatgaacatctgcggaggccaggactccttggcntcggacacagtcaggggaaaagccccctgactctgcaggacagagggtctagggcnttngcagganaacactggtgtccaagggaancaccatgattctggagtggctcatgcatggctggagttannaaactggaagttcccccagtcttattantca

SEQ ID NO: 1716 - DNA, 508 bp, Homo sapiens
  misc_feature 426: n = A,T,C or G
actctggtaagcttgttgttgtccaagtgaagctccctcagatgaggcgtgttggccagagagccattgtcaacagcagagatgctgttgaaactcaatcccaacttagccaaattattcagtcctttcaggctagctgcatcaactctgctgattttgttgccatcaagatgtaattccgtaagggaaggaggaagaccttgaggaatgctggtgatattggtatcagcaatgcggatgtaggagagcttcttcattccctggaaagccccattttcaattcctgagctcttcagcggattggtgcccagttctatgacaatcatctggttcagccattgaaagtaacttttcgcactttggtgatctcattctcatggcacgcagctcctgaagagttttggcatttttctgcaattccttcantgattcttggacagataaagtcgttccaacttcccaaaggtgtaatgctccaggactaactttgtatttattgtgacaagaa

SEQ ID NO: 1717 - DNA, 513 bp, Homo sapiens
  misc_feature 470, 480: n = A,T,C or G
acagccaacggtttcccttgggggctttgaaataacaccaccagtggtcttaaggttgaagtgtggttcagggccagtgcatattagtggacagcacttagtagctgtggaggaagatgcagagtcagaagatgaagaggaggaggatgtgaaactcttaagtatatctggaaagcggtctgcccctggaggtggtagcaaggttccacagaaaaaagtaaaacttgctgctgatgaagatgatgacgatgatgatgaagaggatgatgatgaagatgatgatgatgatgattttgatgatgaggaagctgaagaaaaagcgccagtgaagaaatctatacgagatactccagccaaaaatgcacaaaagtcaaatcagaatggaaaagactcaaaaccatcatcaacaccaagatcaaaaggacaagaatccttcaagaaacaggaaaaactcctaaaacccaaaaggnctattctganaagacttaaagcaaaatgcagcaagttagaaaa

SEQ ID NO: 1718 - DNA, 506 bp, Homo sapiens
  misc_feature 30, 50, 69, 99, 176, 197, 215, 218, 231, 371, 440, 460, 493: n = A,T,C or G
actttttttttttttttttttttttttttngatgcttttcattatcacanaacacaccacctgtaatgngtgcaaaaaggaaatgaggggtggaagganaggaagtctaattgggaaaggctggatggtcacttcatttcttctctttcttcttatccttttcattcatggccagnatcatcatgagttttctgaanacagtaatgaaatctaanaanagatcaatgcagngccagatataatcttgatctccatgttcggccttttcaataatgagttgagtatcaaaaaggacgaagcccacatgaccaccagtcccacatacaggtttgcctggaaaaccaaatggatccaaagaaaacattccccanggaagacaaaagcacaagctcagggctgcatcaagatcctcccaaaagaggtagctcggccctgcatanagtgcctgagggtgaagcangtaaagatcattgcggccctgaaacagtggaangatgctggggttg

SEQ ID NO: 1719 - DNA, 487 bp, Homo sapiens
  misc_feature 127, 224, 414, 439, 455, 458, 459, 484: n = A,T,C or G
acgtgaaccacaaagtgtataccaggcatatgacatggatccccctggggaaccaggctgatctctttccagagggcactatccgaccagtgcatgatgatatcctcatcgctcagctgcggcctgnccaagaaattgacctgctcatgcactgtgtcaagggcattggcaaagatcatgccaagttttcaccagtggcaacagccagttcaggctcctgccanacaccaccctgcttgagcccgtggaaggggaggcagctgaggagttgagcagggtgcttctcacctggtgttattgaggtgcaggaagtccaaggtaaaaaggtgccagagttgccaacccccggctggataccttcagcagagaaatcttccggaatgagaactaaagaaggttgtgaggcttgccggntcgagatcattatatcttctctgtnagtaacggggtgtgcnccnnatgtctggtagtgatccatcaaacncct

SEQ ID NO: 1720 - DNA, 500 bp, Homo sapiens
acgcggggggagggggaaaaacgaaaataaacgaagcttgcagcacactctgcgttcatcactaggtcaccttgctctccgacctgcttgctcatagctctgtgtatcagctatgataggtgcccatcgtctgtcctagaatcacgtagaccctgtcacaagattacaattccccttaactccatagataacaacttgaacattatgaaacgttttcccttggagatattctttcaggtcccgcataccagcataattactgacaccagttgttctgaaggagcccacagaagcaagactcaatggggactgcagtttccatatcctgaggatttcaacccccttaccctgccagtcgatgaccccaattttccagcccctcacccttcacaatgccctttaaaatcccacccggactccttggggaagatggatttgttggctcctgcgttctctagcaccctgctcttaaccttttctgtgaaacctgttcctcagtg

SEQ ID NO: 1721 - DNA, 503 bp, Homo sapiens
acctttgtcacaatcctaacacattatcgggagcagtgtcttccataatgtataaagaacaaggtagtttttacctaccacagtgtctgtatcggagacagtgatctccatatgttacactaagggtgtaagtaattatcgggaacagtgtttcccataattttcttcatgcaatgacatcttcaaagcttgaagatcgttagtatctaacatgtatcccaactcctataattccctatcttttagttttagttgcagaaacattttgtggcattaagcattgggtgggtaaattcaaccactgtaaaatgaaattactacaaaatttgaaatttagcttgggtttttgtacctttatggtttctccaggtcctctacttaatgagatagtagcatacatttataatgttgctattgcaagtcatttacttatcacattatttgatgtacctctataaacttagtgcggcaagtttaatccagattgcctttgcttaaagcag

SEQ ID NO: 1722 - DNA, 449 bp, Homo sapiens
  misc_feature 262, 277, 289, 292, 307, 321, 355, 446: n = A,T,C or G
acgcggggaggttctgggaagatggcgaaggtctcagagctttacgatgtcacttgggaagaaatgagagataaaatgagaaaatggagagaagaaaactcaagaaatagtgagcaaattgtggaagttggagaagaattaattaatgaatatgcttctaagctgggagatgatatttggatcatatatgaacaggtgatgattgcagcactagactatggtcgggatgacttggcattgtttgtcttcaagagctgagaanacagttccctggcantcacagagtcangcnattaacaggcatganatttgaagccatgnaaagatatgatgatgctatacagctatatgatangattttacaagaagatccactaacactggtgaaccccatctctctaaaaagcaataattactgggcgtggtgcatgtcctgaatccccctntca

SEQ ID NO: 1723 - DNA, 471 bp, Homo sapiens
  misc_feature 32, 35, 87, 143, 247, 250, 251, 266, 281, 324, 339, 346,371, 401, 412, 421, 449, 451, 460, 468: n = A,T,C or G
actttttttttttttttttttttttttttttnggntcaagtttaatacaaactacaaaagattaatgggttgctctactaatacatnatacaaaccagtagcctgcccacaacgccaactcaggccattcctaccaaaggaanaaaggctggtctctccaccccctgtaggaaaggcctgccttgtaagacaccacaattcggctgaatctgaagtcttgggtttactaatggaaaaaaaaaatacngannaggttttgttctcanggctgcccaccgcancctgcactaaaacagcccagcgctcacttttgcttggagaaanattctttgctctttnggacatnaggcttgtggttcactgcaggtttncagccagctgggcacacttcccatgttggnagtgactgaancctgactantctcaaagctatccacagacggcaacangnaggcattanagtgattngcg

SEQ ID NO: 1724 - DNA, 497 bp, Homo sapiens
  misc_feature 242, 465, 496: n = A,T,C or G
acaatacttggccgaaatctgtcaggtcagcccaactttccttgtcgtgtcaatgctgtgcctcgtcctataccggagaaaaaatggttcatggagcctgcggttattgtttgcctgggtggaattttaccttttggttcaatctttattgaaatgtatttcatcttcacgtctttctgggcatataagatctattatgtctatggcttcatgatgctggtgctggttatcctgtgcattgngactgtctgtgtgactattgtgtgcacatattttctactaaatgcagaagattaccggtggcaatggacaagttttctctctgctgcatcaactgcaatctatgtttacatgtattccttttactactattttttcaaaacaaagatgtatggttattcaacatcattttactttggatatatggcggattacacaccttgggatatggtggagcgattgttnatgggacaagtcctttgccgaaatctatacng

SEQ ID NO: 1725 - DNA, 500 bp, Homo sapiens
  misc_feature 428, 486: n = A,T,C or G
acacatgatgaaatgaagcagaagctgggagtcggcctttcctctagtaaccaccacatggctcagcatctgtgccaaacataggcgctcctagtctggtcagtgccaagaggctaccagaacatggggcaggtggctggtgttggtgtcccagcctaagagccacctgctgcagttaccatggcatgctgagttgatgcaccaggtggcagcagccatccgttattatttccaatggagacctagcccaggccaaggtaaagttagttaatagcattgggatatagtcactgtaatggtgctattaacaaacagtcaacaccattgtattttttaacttcgtgttctgtatctcctcaccatgtatcttaaatatattttgcatcataatctttctttatggtgggggcagactttgactactgcantgcaacacttgcctttaatttcctccactgctaaattagagcaaatcattggaatacngtgttttgtctgag

SEQ ID NO: 1726 - DNA, 401 bp, Homo sapiens
  misc_feature 211, 307, 344, 394: n = A,T,C or G
actttttaaatcatgttccccctaaacatggctgttaacccactgcatgcagaaacttggatgtcactgcctgacattcacttccagagaggacctatcccaaatgtggaattgactgcctatgccaagtccctggaaaaggagcttcagtattgtggggctcataaaacatgaatcaagcaatccagcctcatgggaagtcctggcacangtttttgtaaagcccttgcacagctggaagaaatggcatcattataagctatgagttgaaatgttctgtcaaatgtgtctcacatctacacgtggnttggaggcttttatggggccctgtccaggtagaaaanaaatggtatgtagagcttagatgtccctattgtgacagacctggtgtgtngtataat

SEQ ID NO: 1727 - DNA, 490 bp, Homo sapiens
  misc_feature 350, 354, 355, 443, 449, 458: n = A,T,C or G
acacttgaaaccaaatttctaaaacttgtttttcttaaaaaatagttgttgtaacattaaaccataacctaatcagtgtgttcactatgcttccacactagccagtcttctcacacttcttctggtttcaagtctcaaggcctgacagacagaagggcttggagattttttttctttacaattcagtcttcagcaacttgagagctttcttcatgttgtcaagcacagagctgtatctgcaaggttcgtaagcatagagacggtttgaatatcttccagtgatatcggctctaactgtcagagatggtcaacaacataatcctggggacatctgcccatcaggagaaggngttnncagttgttcataaccagattgaggaggacaactgctctgccatttctggatttcttatttcacaaacactttctttaaagcttgctgngtggcnctctccaangatgaaaatcatcaagggttgttgttgcttgg

SEQ ID NO: 1728 - DNA, 480 bp, Homo sapiens
  misc_feature 250, 254, 259, 260, 263, 293, 303, 308, 311, 318, 321, 329,330, 340, 341, 350, 361, 371, 374, 375, 382, 383, 397, 403,413, 414, 416, 419, 426, 427, 431, 441, 450, 451, 453, 457,459, 464: n = A,T,C or G
acctattttttaattgagacaggccactttattaaaataggtccaaatgtaacacacgataacattcattttaaataaaaactacaaacatgacttgacttctccaaatatacattctctcaggtagtccatccgagcatcctttgttgacagtaccatagagttccattcaaactggggaaatctgattacacgataccccagatttccaaatgtcgtttttcatagcagaattttcctttattgtganggantattnntanaaagggcttttgaatccaaaattcccaaanaatccttcanccccngtngcaagcntgnttcaactnnttcgatattnnttccaaggnaattctggtanttgccaatgnctnnttattgnntcctccggaaaagntttttnttttttccannanccnaaaattnncttnggggataagngtaaaaccnngntttncnattgnttctcctatcctcggc

SEQ ID NO: 1729 - DNA, 83 bp, Homo sapiens
  misc_feature 82: n = A,T,C or G
actggatggccccacaagatgctgccactttaataaggctgcaatacactgtgtatcttacaggagttttctaatacatccng

SEQ ID NO: 1730 - DNA, 458 bp, Homo sapiens
  misc_feature 136, 286, 313, 353, 354, 356, 357, 366, 370, 374, 391, 392,394, 413, 423, 424, 429, 430, 431, 448: n = A,T,C or G
actggatggccccacaagatgctgccactttaataaggctgcaatacactgtgtatcttacaggagtattcttatccatcccgtggaaaaggttgcttaacaactgcagtctcagagacgggcgttcaccttcgcnaaatttgaccagcttttcacataggctttcaatcaaagcttcttgcttgtctggttccaggatcaagagtaggggataccacactgttcatcacactttcaacatctttatcatcctccttcaaacacacataacaggctttaataattngagctaaatcaacatgaagtcaccttncgagtcttttctgaaatctcagttccgttagatttcaaannannacgaactancaanctgnctttttattgatgccannangccggacccttatggtggnagccggcccnnggtannntcattgtagcccgggtncttggccgga

SEQ ID NO: 1731 - DNA, 527 bp, Homo sapiens
  misc_feature 326, 374, 413, 416, 421, 426, 436, 439, 445, 452, 453, 477,481, 488, 502, 517: n = A,T,C or G
acatcataatcggcgacacaggtgttggtaaatcatgcttattgctacagtttacagacaagaggtttcagccagtgcatgaccttactattggtgtagagttcggtgctcgaatgataactattgatgggaaacagataaaacttcagatatgggatacggcagggcaagaatcctttcgttccatcacaaggtcgcattacagaggtgcagcaggagctttactagtttacgatattacacggagagatacattcaaccacttgacaacctgttagaaaatgcccgcagcattccaattccaacatggtcattatgcttattgnaataaaagtgatttagaatctagaagagaagtaaaaaaagaagaaggngaagcttttgcacgaaacatggctcttttcatggaaccnttngttanactgnttccatgtanaanagcttntttatcnncaaaagaatttttgaaaaattcanaagngttttgnttatatgagcaaangcttaaattgcctanatgtgttcca

SEQ ID NO: 1732 - DNA, 514 bp, Homo sapiens
  misc_feature 311, 314, 321, 358, 383, 446, 448, 472, 502: n = A,T,C or G
actataatgccaacagggcatttcagaagatggacacaaagaagaaggaggaacagttgaagcttcttaaggagaaatatggcatcaacacagatccaccaaaataaatgttttctacattttcatttggactaaatcccacgaatgacaactaccacctttttttcctttttaattaatactaaatattgtgatttcttatttgaggttcaaaatgacctgcttgaaactttgatacatattggaatacattatgttaataaacttgtagctttttgtaaaaaaaaaaaataaaaaaaaaagtactcccnaancctattnccaaacaggcagaaatctttctatattaaattgcacntactaaaaaattttttcacggcctngaaattgatataagatcattgctcatcattaggataaaatactgaattttcctggaaataatntnttcagagaaaaatttctttacaantctagttcttgccagaaaaaggtcttcccnaaaaacatcatg

SEQ ID NO: 1733 - DNA, 594 bp, Homo sapiens
  misc_feature 488, 558, 578: n = A,T,C or G
acatcccaagagatgtagatgaaacaggtattactgtagccagtcttgaaagattcagcacatatacttcagataaagatgaaaacaaattaagtgaagcttctggaggtagggctgaaaatggtgaaagaagtgacttggaagaggacaacgagagggagggaacggaaaatggagccattgatgctgttcctgttgatgaaaatcttttcactggagaggatttggatgaactagaagaagaattaaatacacttgatttagaagaatgacaccaaacacatcgctgaaaaaattaagtcagctcagcacgagttgaaattgctacattaatttctttcccctagaatcaacaggatgtttattcctatgctgattctggaggagtacctcctgcaaaaaaggcatcttgccctcatctttcttctgctttggctcatctatagtaagtcagagtagttcatgataattgaaattatggcatgcanaaatgatgatgttgactgcccccaagaaaagtgatctgccttcatctttggtttattggggctggcttancaaacacaacttttttaaancctctttgcaagttta

SEQ ID NO: 1734 - DNA, 347 bp, Homo sapiens
  misc_feature 74, 233, 238, 263, 277, 282, 316, 317, 323, 329: n = A,T,C or G
acgcggggagttttcaactgacctctggacgcagaacttcagccatgaaggtaacaggcatctttcttctcagngccttggccctgttgagtctatctggtaacactggagctgactccctgggaagagaggccaaatgttacaatgaacttaatggatgcaccaagatatatgaccctgtctgtgggactgatggaaatacttatcccaatgaatgcgtgttatgttttganaatcngaaacgccagactttttcctcattnaaaaattgggcctngctgngaaccaaagtttgaaattccatctaggtaaccgnnaggcanaactgncttattgtgaataaatag

SEQ ID NO: 1735 - DNA, 561 bp, Homo sapiens
  misc_feature 71, 127, 267, 288, 300, 336, 358, 361, 385, 393, 430, 434,435, 447, 451, 467, 490, 496, 516, 517, 519, 521, 556: n = A,T,C or G
acctcaaatctgctctggagtcgattatgccacctgtgtgtcaggatgcacctgaaagccctcggctcggnccttagaccatcttcctacattacctggaagggagctgccatctgtccctctgcanagggataccttccaatagtaaattatctggttcctcactgaaacaagttatttttgcttcatatagtcaagagtcagactgacatgataaaatatcatgttcctaatctgttgtctcagataagtgaccaagacgggacnttcacattttaagtctacatnctaatcttaaangaataaagcactgaattgggactaacattctgatangttgccccttaagagtattcanagncatcaaaaggagcccacacttcancagtgaangattctacacagggaatctgcagtttgtgcagaatgntttnnctcacgttgctnatanactgccaaattcaaanttaagctgattgacacagacctncctttnctgaccaatgttgacacatnntnanatgcagggttcccacatatggaatgcagacaaccntttgt

SEQ ID NO: 1736 - DNA, 607 bp, Homo sapiens
  misc_feature 262, 311, 336, 360, 467, 500, 504, 530, 535, 539, 546, 550,553, 563, 574, 578, 595: n = A,T,C or G
acgcgggaacccaaaacctataagaactaataataatccaccactctttgctgactctctttttggactcagcccacctgcacccaggtgaaataaacagccatgttgctcacacaaagcctgtttggtggtctcttcacacggacgcgcatgaaatttggagacatgactcggatcgggggacctcccttgggagatcaataccctgtcctcttgttctttgctccatgagaaagatccaccaatgacctcaggtcctcanaacaaccagcctgagaaacatctcaccaatttcaaatccgggaagcagnctctttttactttattttcaacctncctcactatccctcaacctctttntctttcaatcttggcccacatttctatctctcccttctttaattcaatcctttcaattcttttggtagagacaaaggaacacgtttatccgtggcccaaaactcttncccggtcacggatgggaagcaccttccttggtnttancattgagggacccttctgatatcccncgttnaagngtagacntgcnggnacctgcttgnctttccttagncagnccatttttgggaggcanactgccggcggc

SEQ ID NO: 1737 - DNA, 574 bp, Homo sapiens
  misc_feature 293, 319, 324, 448, 466, 513, 517, 565: n = A,T,C or G
acagttgatcccactttggaataaatgcccagaaggtaataagcattatcagtgagtgagagctctaggcacaaaataagttctcattcagaaagtggacagagatatgaagcagtgaaacatatagctttaaaaactggaaatcattcatgacatttgttttcaaagtaaacattatctgcatttcaagaactgtaattttcaaaagtagaatcaggcctgattaagtaatatttatgacttacagataaaattacaaaaataaaaatgaaaactcttctgccttgaaaganatagaaaactatatttttttccctgnaatgncacagagattcatcagtatttcatccttatgtcgcttaaaaatgttatttttaattcgctttcctgtctgcacttttaacatagcaaaccgtgttaatatggcatctctgtggtgaaaggatgnttatttactgatgatganagaactcaattacctccatggactatctcccgtgggaaaaaagtaanaccngatttccaaaacaaagaacaacaacaaaaaccccaactcatgttaaantcttctatt

SEQ ID NO: 1738 - DNA, 370 bp, Homo sapiens
  misc_feature 31, 61, 191, 224, 264, 268, 306, 319, 336, 345, 353: n = A,T,C or G
acgcggggctctcgagtcactccggcgcagngttgggactgtctgggtatcggaaagcaancctacgttgctcactattacgtataatccttttcttttcaagatgcctgaggaagtgcaccatggagaggaggaggtggagacttttgcctttcaggcagaaattgcccaactcatgtccctcatcatcnataccttctattccaacaaggagattttccttnaggagttaatctctaatgcttctgatgccttgacaagatncgcnttgacagcctgacaacccttcgaaagttgacagtgggntaagagctgaaanttacatatccccaaccnttaggacgnacctgccnggcggacgtcgaaaggc

SEQ ID NO: 1739 - DNA, 152 bp, Homo sapiens
  misc_feature 114, 129: n = A,T,C or G
acctacagacacttttacagagttaatactaaaattacaaattgatgacactttcgaggcaaagcagggtaactgttccttcagtgttgccatcactgaattgaccttcactgntccatcatactgttnggctgaacactgacattccatat

SEQ ID NO: 1740 - DNA, 427 bp, Homo sapiens
  misc_feature 276, 319, 325, 344, 346, 356, 379, 388, 390, 393, 403, 412: n = A,T,C or G
tcccccaccactgtgatctatgaggataaccaaagaccctctggggtccctgatcggttctctggctccatcgacacctcctccaactctgcctccctcatcatctctggactgaagactgaggacgaggctgactactactgtcactcttatgattccacctatcatgttcgggtgttcggcggagggaccactctgaccgtcctaggtcagcccaaggctgccccctcggtcactctgttcccaccctcctctgaggagcttcaaagccaacanggcccactggtgtggctcataagtgacttttcccgggagccgngacagnggcctggaaggcagatagnanccccgtcaangcgggagtggagaccaccacacnctccaaacnangcnacaacatgtncctcggcgngacacgctaagggcg

SEQ ID NO: 1741 - DNA, 613 bp, Homo sapiens
  misc_feature 447, 460, 477, 535, 543, 553, 560, 564, 573, 577, 586, 602: n = A,T,C or G
acttgtcatcaaagacccaggcagtcctctggaataggctttccagctgctcatccttggtgtattctaacacctcagcaacatgacgaagaatgctataaacagttttggattttgtgaatttgtcttcacatttgattgcttcctctggagaaactcttctttttgacaaatcaatatatcctttttctttgtccaccctaatgacaaccacacactcattcctgccaattcggatgagtttgttgatagaacggatcgccttctgggataattcactaagaaaaatcatgccttcaatgttgttgtattccaacaagctgacataagccccatttcagcaatggatctgcattcaccatcactacatcttccacctcagaaatttgtgtgataaaatctacacttaacccggcattctgaggatgtgtgtgattccgcactgancccagaccgcttntcaatacagagaccagnttgttcccctcacggccgccgtcctctagcgtgcgcttcgtccccgcgtcctggccgngaccctangcgaatcacnctggcgncgtntagtggtcnagtngtccaactngggatatggataattntctgggaatgt

SEQ ID NO: 1742 - DNA, 624 bp, Homo sapiens
  misc_feature 274, 486, 556, 569, 570, 582, 594, 623: n = A,T,C or G
acgcgggggccatattatcagcggttattcggtgagcggtggtggtttattcttccgtggagttaagggctccgtggacatctcaggtcttcagggtcttccatctggaactatataaagttcagaaaacatgtctcgaagatatgactccaggaccactatattttctccagaaggtcgcttataccaagttgaatatgccatggaagctattggacatgcaggcacctgtttgggaattttagcaaatgatggtgttttgcttgcagcaganaaacgcaacatccacaagcttctttgatgaagtctttttttctgaaaaaatttataaactcaatgaggacatggcttgcagtgtgcagcataacttctgatgctaatgttctgactaatgactaagctcattgctcaaaggttttattacagtatcaggaccaataccttgtgagcagttggtacagcgctggtgatatcaacaacttatancaattggaggaaacgtccttgggtttatgctgactcgccggacacctaggcaattcacaactggcggccntctatggaccganntgaccaactggngacatggctacngttcctgggaaatgttcctcaatccacant

SEQ ID NO: 1743 - DNA, 393 bp, Homo sapiens
acgtaactggaagcaaggacggctgcatcaaattatgggatggtgtttcaaatcgatgcatcacaacttttgagaaagcacatgacggtgctgaagtttgttctgccattttttccaaaaattctaaatacattctctcaagtggaaaagactctgtagctaaactttgggaaatatcaacgggacgaacactggtcagatacacgggcgcgggtttaagtggacgccaggtgcaccggacacaggctgtgtttaaccacaccgaggactatgtgttgctgccgacgagaggacgatcagtctttgctgctgggactcgaggacagccgagcggagaacctgctgcgttggggcacaacaatattgtacctcggccgcgaccacgctaaggcg

SEQ ID NO: 1744 - DNA, 123 bp, Homo sapiens
  misc_feature 77, 83, 92, 109, 120: n = A,T,C or G
actgtatccagcaccacagaaacctcagtgtttttcctctgctggtttggggcacaaggaagccttagggtatgggnaaaggntgttattanctagaggttactccatnaggttttgggnttg

SEQ ID NO: 1745 - DNA, 99 bp, Homo sapiens
  misc_feature 94: n = A,T,C or G
actgaactttgtgttgaccatagccttcttgtctttcatcactttatctccatgtatgtatccttaaagaataataaatggattttaactgaanaaaaa

SEQ ID NO: 1746 - DNA, 575 bp, Homo sapiens
  misc_feature 342, 387, 446, 450, 477, 496, 518, 545, 569: n = A,T,C or G
acaaaactaggaacacagaaaaggaccagagaggatgttacactgtaaagtcttaggacctactctaaacttctgtcctcatcaagaccctcacctagagacctgagggttcccaggtccactggagaaagtaagtagtctccgatcatcacccttgcttcaccgaagatggcctcaggtcactcgctgtcaaacttaatagaattgacctggacagagattgagcctccccggtagctgcccgcttcttcttggtttctcatgccgaaaaggacttgcctttggtgaacttcaaaacctgattggctcgctctccccagcctccggctgcacctcgcttgncatcaaaggagttgccgcaactcgtgaatccacctcaatttcctnctcctgacccttcggaatggggatgatgccctttttctcctttcttcttttggaaatgngtangggctgaagcttatcttcttggccgangagcttgctctggagcctntttgttccgttcttatgacctntttggaactaccatgcgcttttctttntctctctctatgtttagtgttttntttggg

SEQ ID NO: 1747 - DNA, 510 bp, Homo sapiens
  misc_feature 269, 461, 478, 508: n = A,T,C or G
actttttccagacacttttttgagtggatgatgtttcgtgaagtatactgtatttttacctttttccttccttatcactgacacaaaaagtagattaagagatgggtttgacaaggttcttcccttttacatactgctgtctatgtggctgtatcttgtttttccactactgctaccacaactatattatcatgcaaatgctgtattcttctttggtggagataaagatttcttgagttttgttttaaaattaaagctaaagtatctgnattgcattaaatataatatgcacacagtgctttccgtggcactgcatacaatctgaggcctcctctctcagttttatatagatggcgagaacctaagttcagttgatttacaattgaaatgactaaaaaacaagaagacaacattaaacaatattgttcaaaaaaaaaaaaaaaaaaaaagtcctcggccgnacccgctaggcaatccncacactgcggccgtctagggtccgactcgncc

SEQ ID NO: 1748 - DNA, 527 bp, Homo sapiens
  misc_feature 250, 263, 285, 297, 314, 438, 452, 466, 475, 478, 505, 517: n = A,T,C or G
acagtgatttggctatagactctcgccccttcagggcagactgtcctcagttcatccttattgagagagaaaagttgtgcaccatttaatactccaagactattgacagtcacagggttgaatccctttgactgtaaccacgtcttcacatcctctggtgtggagtcgtaagtgatattgataactggcacgttctgccgtggcacatggaatttcttctgagcggcactccgaccaatggtcagtctgnggatgaattcatntttgcacttccttcattctganaattcctttggnccacccgaaagtggttnggtctctggctgctcgcagatctgccccactgcactgagctgctgttttgacgtgttatatttgctgggacctttgacacaggaacaggtgcttggagtggaagggggaaggggaacaagacangagctgtgttgaangaggtattggacanggggatatnagntgtcttggccatactcatcctttgttntggatagatganttaaggggat

SEQ ID NO: 1749 - DNA, 541 bp, Homo sapiens
  misc_feature 51, 58, 71, 142, 200, 261, 267, 288, 292, 313, 315, 318,324, 325, 331, 335, 414, 435, 439, 449, 452, 462, 470, 490,496, 501, 535: n = A,T,C or G
acttttttttttttttttttttttttttgaaagcaaatttcttttaatganaactcanaattaaacttcanagggacccaacgtcatacttccattcagggacttgatacaaaaaatttagtttgaactgctattagcaggnggcaggagccaccttcaaatgaatcttcaaattggaaaatactgcttcaccacctgtnggggataagttgcaaatggaataatttagtatggttgtagctattttgaaagaccacctcnctgganaccttcccataacccctctgntggntgctttaatcccatatccatnanagntggtgnncccagngtancatatcctccataccccgaaccttggtgtatatccatagttgcataaccttgatccaatagttctatatcctggtcagntttgatggggccccacctttncaanactcttctgnaancctcttagancccattgntgtgggctgtttgtcctcgnatggcnctttnttccatttactagaccacttgggattctttcatncttttt

SEQ ID NO: 1750 - DNA, 273 bp, Homo sapiens
  misc_feature 201, 213, 216, 225, 230, 232, 248, 251, 252, 253, 261: n = A,T,C or G
acgcggggggaatcaaggatctaattcagcagcatgtaaagttacaaaaacaaatagaagacctacaaggtcgaacagcaaataaggatccaattaaagccttttatgaaaacagggcctacacacctaggagtttatcagcacctatatttactacttcacttaactttgtggagaaggaaagagattgcataaaaattnttcacgaaatgnccnacgggtggnaatcnanatctaaaggtgggctngtnnnagcgttgnacgttgataaat

SEQ ID NO: 1751 - DNA, 276 bp, Homo sapiens
  misc_feature 143, 149, 157, 161, 171, 177, 181, 188, 191, 196, 198, 206,213, 218, 222, 228, 234, 244, 247, 249, 263, 267, 270: n = A,T,C or G
acaacatgacttaaaactttttttttctattaaaacttaaaggggaacaaaacttgaaaaagccctgttcttcagaaggtgagtgggttgagggaggcagtaatatgaagtgactgctgtgtattttatctaccagatttttnatattngccactgntaanttgttggaangggganattntgattangcngatangnggttcatnctatgangcttntttnaaatcntagctnatatttcatntcntntcatttcgacttantctnagngtttcg

SEQ ID NO: 1752 - DNA, 524 bp, Homo sapiens
  misc_feature 269, 303, 304, 326, 387, 430, 439, 467, 474, 519: n = A,T,C or G
acaaagaatccgtgaagagactattaaatgtgacatgaattatggagtagaaaaatctgcttgatttattaattttatgatatatgtgatcagtatctaatttgatataaaattgaaaatgttaaaaaatcattttttttcctcagagttaaaattatttccctcatactaatgcttaatggcaatgattactccagagttttttaatttttacactggggcaatagactaggaggtctctgatttcttcttggtctaaaggtgtttgnttttatttctacctaataagtttgggattcatgnntatacatgcatttaattggganttatcacctttcccattctttcccccaagctggcatttcagtagttgttttgaataatggntttggtcctgggaggcaggcccagacccatttcttgcttgcantccggctgngtccatgctgctgctactgtgcatttcnatttggnactctggtagacaggtctcggatttctctacctgattttctaaanaaaga

SEQ ID NO: 1753 - DNA, 193 bp, Homo sapiens
  misc_feature 126, 127, 137, 170: n = A,T,C or G
actacacgcacctgggcaacgacttccacacgaacaagcgcgtgtgcgaggagatcgccattatccccagcaaaaagctccgcaacaagatagcaggttatgtcacgcatctgatgaagcgaattnngagaggcccngtaagaggtatctttatcaagctgcatgaggangatagagaatggtgagacaatta

SEQ ID NO: 1754 - DNA, 538 bp, Homo sapiens
  misc_feature 168, 276, 284, 289, 296, 304, 328, 331, 332, 368, 373, 374,384, 387, 389, 391, 404, 417, 422, 426, 429, 434, 439, 447,449, 453, 455, 464, 470, 475, 476, 479, 483, 488, 489, 506,524: n = A,T,C or G
acaaagatgactataaacaagatgcagccctcggtttccatgaacagcacactattacagtaaaccaagtttatattccaccatcaagtgtggctctcccatgacttcgctttgtgatggatcattaagaatatcctcaaatccaatagtctcatcattacccctcanaacatccagtgaaagattttgagcttgaaagaaatggaagacgctgaacctgctgcactgccttgaattccatcttgtaattttagcggagcaatagaccctgaatgnttctcagngtggnaaaattnatttaatnttggtgagctggaaatttttttcngannattcaaggggatgactagacaaatgttcattgttcncacannaaaaaccttncanananatcatgactttcnaaaggccacttgntgaangtanagnactgnatctnccttactnanatcnanttctctggnttcatntccgnnctntgcnacagnnctttctgcccgttccgnaggcgcccccccgtgtcntgccggcggcggtc

SEQ ID NO: 1755 - DNA, 600 bp, Homo sapiens
  misc_feature 88, 112, 135, 156, 161, 185, 256, 265, 282, 290, 291, 308,319, 346, 348, 365, 372, 376, 391, 393, 400, 404, 411, 421,422, 432, 444, 469, 492, 503, 506, 512, 533, 537, 542, 556,562, 565, 596: n = A,T,C or G
actttttttttttttttttttttttttttttttataagtatataaaaacatttattcattaaaaaacaaggagattggcaaacatatnttccaaagttgaagcagctcaacncagttcagttaggctaatttaanaaaaagccttgcattttaaanagcgngtaggcatttttttttaatttganatggaggttcgctattgttgcccaagctggagtgcaatggtgtgatttcggctcactacaacctccccctntgggttcangcgattctctgcctcanccccttgnntaactgggatacaggcncacccaatacncccgggcttattttttatttttagtananagggggttctccatgtngggaggntggnctcgaactcctactnangttatcncccncttgggntccgaaaggnngggattacangcgtgacccagncccggctttttttttttaaaaaganacagacaatttttcagggaacanatttaattccngtnccctanagaaccctgccagggggaagnacanacttnaggtttggctgganccatcnttnaaaggagtgttttggggggcgctttggattnggga

SEQ ID NO: 1756 - DNA, 631 bp, Homo sapiens
  misc_feature 252, 298, 441, 518, 520, 538, 548, 556, 562, 564, 567, 576,584, 595, 600, 608, 628: n = A,T,C or G
acaaaatatccccacttcccttgagaaagagtatatctaaaatacactttgatgaacacagaatattaaaacattatatgctatagaagtgaacacaaatacattttctccaaaatttcaatagtctaaggaatatataagcattgataatatgaaggaaaatgtttgaatttatttttaaattcaaaattctcctggttgtagaggtgaaaaaagtaatcaggttaccccaaaagaaatgtgctggcatgntcttgatgtctcctctccagctgagtaaatggattactgcagttanacctggtgaatcaagaaggtggcattcagtagtgagacttttattatcaaatagttctgactgagaaattttagttccccttcttctaagatgctattttgtgaagctgtatttttttcagggctctcatcaaaacatcctgnatgtaattgaagaatcagttccttccttcccaacatctgaaatcctttttttgtagtattaatactctgtctccccncnagagaggcaactcattantcctgataanatcccctnaggtgntnttncacatattnttaataantgggatccggnctganattttttntctctgtttagaaactaaanaag

SEQ ID NO: 1757 - DNA, 609 bp, Homo sapiens
  misc_feature 188, 189, 234, 255, 267, 275, 300, 330, 338, 360, 365, 368,369, 386, 402, 408, 418, 424, 427, 438, 444, 448, 455, 458,468, 471, 472, 474, 477, 481, 489, 491, 494, 495, 506, 525,534, 538, 539, 545, 549, 550, 553, 555, 557, 559, 564: n = A,T,C or G
  misc_feature 566, 572, 574, 575, 579, 580, 581, 584, 602: n = A,T,C or G
acgcgggttctacttcaacaaagaaaatttttgagttataggaataaggacggtaatctgcattttgtctctttgtatcttcagtaatttacttggtctcgtcaggtttgagcagtcactttaggataagaatgtgcctctcaagccttgactccctggtattctttttttgattgcattcaacttcnnttacttgagcttcagcaacttaagaacttctgaagttcttaaagntctgaagttcttaaaacccanggatcctttctnaaaaaaanaactgtaaatctttctggacagccntgactgtagcaaggctttgatagcagaggnttggtggntcagagttatacaactatcccnggtgntgnntcattccagggttaccntcttctgagtttggtngtattntttgccctcncccccngantattttaagcnggtgantttnactaaantgntggataatantgnnanctnctgncccttttntngcnntatccgtaccnatcccattatatcactggnaccttgcgntacnnctaggntttnntcntngngncttcnangggccncnngccnnnttnctataatgtatatttttngtgtaat

SEQ ID NO: 1758 - DNA, 571 bp, Homo sapiens
  misc_feature 88, 161, 169, 271, 283, 293, 320, 323, 505, 509, 539, 547: n = A,T,C or G
actttttttttttttttttttttttttaaaaacttttaacaatttattagtcttattttccagtaaaatattcacataatgtcaaaanaatgaaatgatagcgatatagccaactacctttaattaattccacataaatatttaaaatctaaaaacctcanatcagcanaccgagtcgaaatgtgattcttcaaagcaagtattgctttacccttgcctgaatgcagtccgtcatatgaccactaacttgcatgtgaccaaatgtttgcanagggttttttanatatgctctnggggagccgcatccgcaatccaagaanaanatgttgttgaactgcgttgcacaaagtttcttgacctcttcatttacttcaatcaggttgcatttttttgattcaaaataacatagagctccgcgatcagactttttcacacccagtaatcactcatggccttcacaatgactcctatctctcactctggaaagcctgtgatgcccgagatnttcntaatccggggccggaagtggcgaacctggngttctatnggactggctttttcgggagatatg

SEQ ID NO: 1759 - DNA, 502 bp, Homo sapiens
  misc_feature 38, 42, 60, 67, 71, 75, 78, 90, 97, 102, 114, 118, 124, 133,140, 143, 147, 151, 163, 165, 171, 187, 205, 231, 237, 254,265, 280, 363, 389, 409, 415, 419, 422, 439, 461, 462, 501: n = A,T,C or G
actaggccatgaactggggcactggaagttgggacatncagncaaaaatatcattattanccaaatnaatncttnccngggttttttttnattggcngaatnaatgggccaaanggancttttngctgcattnggttttnatnatanccancccactcttatngnactatngatcatcttccagttnattttttcaccttacaangaggttctttctttttgcctaacagncctaanccgcagatttgagtttnaagctgatgcntttgccaagaaactngggaaggctaaagacttatattctgctttaatcaaacttaacaaagataacttgggatccctgttctgctggttgtctcatgngcattattctatcctcactgtagaanactcagccttgaaactatgnagcaanctgnatnccagatctggactgaanaatttctgatttttctgcctgnnatgtccactttgatttttaacttttttaaaaaaaattant

SEQ ID NO: 1760 - DNA, 491 bp, Homo sapiens
  misc_feature 136, 200, 250, 298, 314, 317, 350, 375, 407, 417, 419, 438,443, 445, 448, 460, 465, 478: n = A,T,C or G
acctgtgttcatatcctgaactgcaccaaggaatagctccatgctaaactgtcttggctaaaatacaaccagtgccatcattcctaatcagactaataaacagaatgtcttttaaggtaatgagttagatggctgngtttaggttttgttcaggatttactttggattctcctgctttaagacccaaagaaagttatatngagtttttatggatgattctatgtgtttttaacagagtgcgataggtganttaaacatattaaaagagtctatagcatctgtccaaaaagattatatnctatacaactatcaantantacaaaaccattttcattgcttcaactgagaanatctatcacaccttctcctctgagnggtcatctgacaagcttgtttcagttttattntctaaaactnanattctttctttcgccagtntagcnancanttttttggtttntgagncactctaaggagnttaaaatccaacc

SEQ ID NO: 1761 - DNA, 494 bp, Homo sapiens
  misc_feature 15, 204, 272, 282, 296, 297, 307, 309, 316, 324, 332, 345,346, 351, 352, 359, 362, 365, 393, 419, 427, 434, 442, 444,451, 473, 493: n = A,T,C or G
acatagtgtcgcganctcaaatcggcatttagatagatccagtggtttaaacgacacgtttttgcttataaaaaaagtgcaaaaaagatgtggtttacaagttaaagctacagaatccctttttgctgtaattgcaccagttttaaagcctctggacagagcagtatttcgtttaaaactttgtttttcttaaaagcttacagngtttggctaattctcctcccctttttacaagacgggggccggagggtggccactggtggcaggttaangggatctgcnctttaagaagcccnnaaattgaagngnaacttgnagaaattnggggccgntttttaacctggnngaganntaaccanccnctntttaaaataggaatccaaccgggtttcncgttaccccctttttttttttacaanaacctganaaataanaacgtttnanccttggntttttgttttaaagggcaaaanctcttaatttaaaaataaant

SEQ ID NO: 1762 - DNA, 383 bp, Homo sapiens
  misc_feature 17, 181, 196, 208, 217, 225, 240, 248, 249, 258, 260, 267,286, 300, 304, 307, 319, 321, 327, 329, 331, 333, 343, 348,361, 363, 367: n = A,T,C or G
actaagtaggtgagaanctgaagtcctcaagtgttcatcttccaacttttcccagtctgtggtctgtctttggatcagcaataattgcctgaacagctactatggcttcgttgatttttgtctgtagctctctgagctcctctatgtgcagcaatcgcagaatttgagcagcttcattaanaactgcatctcctgngtcaaacccaanaatatgttngtctaaancacaggaaagccctntttggttnnatttgcctnancaactgnatcctgtgtcaggccctcntgaaccaaaatccnaatngcnttatgcattacnangtaatnancntnaccctgaatntgaanctggttaccaaancntccnccagcctaaaatcagg

SEQ ID NO: 1763 - DNA, 487 bp, Homo sapiens
  misc_feature 344, 379, 380, 384, 416, 420, 426, 442, 455, 482: n = A,T,C or G
acgcgggctaggtggctttgaccccctgggggattaatggcagtgtcacaagtctggtggcggtagaaggaggatgttattggcatctagtgaagaagaggccaggggcgctgctgaacgtcctacgatgtgcaggacatgtccccacagcacagaactatctggccccacgtgtcaataaggttcaaaaagcctgggggattgccttctgtgcttccacgaacacatatccatgtattatgtcattcttgcggcaatgccacgaggtcaattgagactccctgactagcatacataatgttaggatctagggagttgctaatgtctaccttgccttcccagcntctatgtgtggccttagcttggctctttaaactanncctnttttccgggcctgcactggtttgtgatccatnttanttactnccgtgcaaaaagagantgagaggctggcntgatggttaccctgaatccacactttngagcc

SEQ ID NO: 1764 - DNA, 524 bp, Homo sapiens
  misc_feature 354, 379, 386, 394, 415, 434, 447, 451, 472: n = A,T,C or G
actctttggaagcatttggacttggcttgatcgtaggagaatccggtgtccagttcgctgggcagacttctccatgtgtttctacatactggaacgccttcaccaagcggggggtttcttccacgcttcggcccactgggagattgttgacgctcaaatgcttgatgactccattggggtcaattatgaagagacctcttagtgcaagaccagaaccttctaacagcacaccgtagtctcgggaaatctgcttagttaagtctgacaagagtgcgatgttcatgtggcccaaaccaccattctttcttggtgtatttatccaggcaagatggctaaaagtgggaatccactganctgcacaacttacagttcacatcgngaattcntagctttncactaaacaacaatttctgangacaacaaggggaatcaangataaaaaaagcncaanttttcccttaaagcatcaagnttagtcttgaccttcattgaacggttgactggccgacacctaggcaatccac

SEQ ID NO: 1765 - DNA, 563 bp, Homo sapiens
  misc_feature 435, 438, 485, 490, 496, 497, 501, 511, 512, 514, 523, 524,533, 560: n = A,T,C or G
acgcgggtgtggagaaaagaaagacctctataaagaaatgaagaaccttgctaatcagtggtgagactgtgactaagaccatttctttaagagtttgggtttacagataggggaggagcatggtggatgcgggacagagataggacatgggatttgaaactgaaagacatcattttggccaggtggcttacacctgtaatcctagcactttgggaggctgaggtgggagtatcgctacagcccaggagttcaagaccagcctgggcaacatagtaagaccctgtctctacattttttttttaattagctggcatagtagcatatgcctgtagacccagcaacttaggaggctgaactgggaggattgcttgacctgggagttcaaggaagcagtaagctgaatcatgctactgcctccacctggcacacagtganctnttctcaaaaaaaaaaaaaaaaaaaaaaagtcctcgccggacccctanggcantccacnnctgnggccgtcttnngntccactcgnncaactggcnatatggctagtgttccggggaattgtntcg

SEQ ID NO: 1766 - DNA, 558 bp, Homo sapiens
  misc_feature 330, 399, 407, 434, 439, 448, 452, 466, 483, 484, 492, 495,500, 508, 513, 515, 521, 530, 540, 546: n = A,T,C or G
accaagaaccgctttatccagattaatataagtgaaagcctttaaatgcagggacgaaaggtatccctctagccattcagtggcaccaaccgatccaaagtctccagcactccaactggcaaagataatgcttctgctgggctgaaacccatcttttaagaccatatctgagaacatctgggcaagtttcaataggagagctgtgcctacaccggattttgcagctccagggccccatgcatctctctgggccccaactacaacatagtgatctggttctacaaagcctttaataactccaaagatgttaagaatttttatctctttcancacattgctcacagtgagcttcacattcttgctttctgaggtaccatcctacatgtagagctgtttcancagagganagcttcttcatattcccaacagttttntgcanagtttgaantgcnggacggtttttagnatcctgtgaccaaatgnngaactgantgnatgangaagggancaggntntaggtnctgcccaanactgcaaaangaaagntggttacatgga

SEQ ID NO: 1767 - DNA, 401 bp, Homo sapiens
  misc_feature 208, 246, 267, 298, 310, 314, 320, 357, 361, 381, 389, 397: n = A,T,C or G
acgcggggctctaatcttccattttctgtccctgagtgagtctctggcgtcccaaattgcctgtttttctcgcaggctctattccgttcgctggttcgccacctcaggggaacgatggccatggagtccacagccactgccgccgtcgccgcggagctggtttctgccgacaaaattgaagatgttcctgctccttctacatctgcanataaagtggagagtctggatgtggatagtgaagctaanaaactattgggtttaggacanaaacatctggtgatgggggatattccagcantgcaatgcattncagnaacagnttatccttttaattaaaaagatggaagacagctaaangagngtggagaaccttctttttcnatggaaancactttgnagtg

SEQ ID NO: 1768 - DNA, 544 bp, Homo sapiens
  misc_feature 26, 79, 93, 95, 99, 107, 119, 155, 168, 172, 173, 197, 311,363, 374, 379, 399, 414, 419, 420, 423, 424, 430, 452, 467,472, 481, 483, 498, 509, 512, 513, 516, 522: n = A,T,C or G
actttttttttttttttttttttttnggccatttgctatgttttattttgctagtagcttattaaacataacatgcaantaatcaaagagaancntacntgacttanagtgaaaaatanttctagaaaagtttcactaggtaagtatgcaaattnttattctaaaaanactnntttaagtgcatgaagcttcatgtnttttgcaatattcttggcctcaatatctacccctatttttaaccagacaaatttgaatgtatcaagataatttgggtgcaagagagtaacatccatatgttttaatccagcttngagggacattaagattaaggattataaaacttggctgattcctgcaaccagnaaaaggtttgnacatntttgcagtaaaataaaaacnctaatttacaataancctgnnttnnaggcantcgggattggggggtctggganaaatagcctccttcnttttnttaaaaaanantgttcaaacttcccnaattaaatctngannatnaacgtntaaattggtcttgaactcccct

SEQ ID NO: 1769 - DNA, 557 bp, Homo sapiens
  misc_feature 36, 46, 48, 171, 233, 263, 272, 277, 306, 310, 340, 363,386, 395, 396, 407, 408, 414, 438, 446, 459, 467, 468, 475,477, 480, 486, 498, 499, 504, 505, 509, 511, 528, 549: n = A,T,C or G
actgcaagacccattttccctccagttaatacactnccaggatggncngcagagggggagactctgagagaagctggaggcccacaaaagtccactgaccctctttctgtcccagaaatgaataaaggacccagttgtgctttccttccaaaatcctcaacaaagtggttngtgctccaagaaaaatgtgggaataaaaaaaaatcatgtcccaaggcatctttgtgtgtgtncgggggtggcggtggccgaactcctagcgnacacctcgnggganccggccggaaaaccaaccgaaatgaaggngaanatgctgagccggaatccggacaattattgnccggaaaccaagttggactacanagagtccaagaaactatgatccnctttactcnnttgaggccacnnaaatanggaaaactttaaatgctaccaacnggacgagntttgcaaaacatncctgctcnntgatggncnggnaggagnaatggtggaaanntccannaacngntctgcctttgggcgggnaggaaggaaaattggatcacnacgggatg

SEQ ID NO: 1770 - DNA, 509 bp, Homo sapiens
  misc_feature 181, 186, 189, 194, 198, 221, 350, 361, 380, 402, 414, 425,433, 446, 450, 470, 475, 501: n = A,T,C or G
acatagaacagccacagctgatgacaaaaagcttcagagttctctaaaaaaaactggctgtgaataatatagctggtattgaagaggtgaacatgattaaagatgatgggacagttattcatttcaacaatcccaaagtccaagcttccctttctgctaatacctttgcaattactggtcntgcanaanccaanccantcacagaaatgcttcctggaatnttaagtcagcttggtgctgcagttaacaagccttaggaagttactgaacagtccccggcaagtcttggacagtaaacaccaaaccagaagacattgttgagggaagatgatgatgtccaaatcttgtanaaaatttttgntgagcatcaaagaatgaanctactaaaagttggttttgganctgcatggctanttaacaatcantttgggtncaagtttcagacntganactccctgtctatcaggatnaaaanttttggttttaatatgctggtgtcanattttcgc

SEQ ID NO: 1771 - DNA, 389 bp, Homo sapiens
  misc_feature 204, 268, 273, 280, 337, 339, 360, 364: n = A,T,C or G
acgcggggcctttttcctctcttcagcgtggggcgcccacaatttgcgcgctctctttctgctgctccccagctctcggatacagccgacaccatgggtttcggagacctgaaaagccctgccggcctccaggtgctcaacgattacctggcggacaagagctacatcgaggggtatgtgccatcacaagcagatgtggcagtntttgaagccgtgtccagcccaccgcctgccgacttgtgtcatgccttacgttggtataatcacntcaantcttacnaaaaggaaaagccacctgccaggagtgaataaagctttggcaaatatggtcctgccnangtggaaaacactacaggaagngaanctcagatataaaaatgatgatactt

SEQ ID NO: 1772 - DNA, 586 bp, Homo sapiens
  misc_feature 211, 320, 428, 448, 455, 492, 501, 515, 525, 530, 542, 547,559, 560, 571, 576, 581: n = A,T,C or G
ggcacttacgatggtcacattcatattgggcattggatctatttaagcctagaagtataacagataatcagttccttaagtgtaaatatgttcttaaatgtttggcctttttatctgttattcaaatgtattagtaattctcatattttgcaaacagatccttttgtgtatattataaaatatataccaaatctgtttttccttttgctgnggaagatgtctttatataatattgagacttcccttgcaaatgagagacgggactctggtcaggtatagtgtgtaggcctagccccatatattaggaactcataaactcngaaatccaaggattaaacattttatgtctccttcattcatgcaagtcatgctttcattctacatgtaggtaaaactacaaagtatggaggaaaaaaatagaactttcncattggaaatttttttccantcaaggnaaatgtctttagcaactttggaatcagcacctttaantttgattgncttaccctatcaanagaaccaatnaaccntttcttttttcntgcanggaaaagaaaannggaaacattcnttttnttttnccaaa

SEQ ID NO: 1773 - DNA, 568 bp, Homo sapiens
  misc_feature 432, 434, 471, 508, 510, 519, 524, 525, 534, 547, 555, 566: n = A,T,C or G
actaccagctttcacatcaaatttggaacgtggaggtgtggaaaagctattggatttaagttggacagagtcatgtaaaccaacagcaactgaaccactatttaagaaagtcagtccatgggaaacatctacttctagcttttttcctattttggctccggccgttggttcctatcttcccccgactgcccgcgctcacagtcctgcttccttgtcttttgcctcatatcgtcaggtagctagtttcggttcagctgctcctcccagacagtttgatgcatctcaattcagccaaggccctgtgcctggcacttgtgctgactggatcccacagtcggcgtcttgtcccacaggacctccccagaacccaccttctgcaccctattgtggcattgttttttcagggagctcattaagctctgcacaggctgntncactgcaacatcctggaggctttactaccagcccttntggtggcacctttccctgagcttggattctcccccancntttaatttnttctnnttcctacanacccctgttcccnttaagaanggttttggggnct

SEQ ID NO: 1774 - DNA, 573 bp, Homo sapiens
  misc_feature 237, 441, 458, 480, 484, 508, 514, 526, 533, 544, 552, 572: n = A,T,C or G
acccctttattcactgttggaacaaactcatctcaaagtagaagatgtgagtgcagttgagattgttggaggcgctacacgaattccagctgtgaaggaaagaattgccaaattctttggaaaagatattagcacaacactcaatgcagatgaagcagtagccagaggatgtgcattacagtgtgcaatactttccccggcatttaaagttagagaattttccgtcacagatgcagntccttttccaatatctctgatctggaaccatgattcagaagatactgaaggtgttcatgaagtctttagtcgaaaccatgctgctcctttctccaaagttctcacctttctgagaagggggccttttgagctagaagctttctattctgatccccaaggagttccatatccagaagcaaaaaattagccgctttgtagttccanaaatgtttctgcacagnaaagatggagaaaaaattttanagtnaaagtcaaagtgcggaagtcaacncccatngcattttcaccnatctctncggcatctatnggtgggangaaagtcccaactgaaggana

SEQ ID NO: 1775 - DNA, 580 bp, Homo sapiens
  misc_feature 20, 30, 200, 221, 265, 270, 346, 348, 369, 401, 416, 428,431, 434, 440, 441, 447, 449, 454, 461, 464, 466, 474, 481,494, 501, 508, 511, 514, 524, 527, 532, 535, 542, 543, 557,562, 570, 574, 577: n = A,T,C or G
acccatccaatgagtccccngagcctccanaagctgttgtctcctctctggggacagcagctcctgcctttggaggccaaagccccagatctctccagccccagagctgaaaacaccaagtgcctatttgagggtgtctgtctggagacttagagtttgtcatgtgtgtgtgtgtgtttggttaatgtgggtttatgggntttctttcttttttttctttntttttagtctacattagggggaagtgagcgcctcccatgtgcanacagngtgtctttatagatttttctaaggctttccccaatgatgtcgggtaatttctgatgtttctgaaagttccaggaantnacacacccgttccccattctnacttgcccacccagttgtgacaaccctccggngtggatatacccccngggggactcatnggnttnttcccnnaccccnanttttntataaantgnanggcctaanaataccncttttctggttgnaaaaacntcagctnaanttnctgctttccnccnttgantgnttgaaanntcttatgttaaganggcanggggatgntccntgntaa

SEQ ID NO: 1776 - DNA, 568 bp, Homo sapiens
  misc_feature 3, 296, 334, 395, 426, 432, 434, 447, 452, 461, 464, 466,477, 478, 482, 483, 489, 514, 519, 528, 544, 562, 566: n = A,T,C or G
cangtttcccagcccacagtcattgcttcattccttgtctgatcagatggtagttagaaaagaagctctcctacatccatcttctataccaggaaagaggaagagtggcaaaagcagagtcttgtgccttcaaagattcattctggttctgttgtgggctaaggcatcctgttcccagtatacgcattttgagatcagatagagttgctcttccaggagtcagcacccacgctcatgtccgtctttcagttaaatctccttggtttagtaactcttgtggatttactgcagttaanacagaaacttcatatgattgcctccctgactgcatggncaccaggtgatgtgtcacatcaggcactgaagacagggaacgtgggggaccctttagcaancacctcgtcatcaactcccaagatagaaatnggtatntnggtagggttcaanggctntccaccaanggntnggctgggaatnnatannacccangtttttactgggtaccttggccgcnaaccnccccttaangggcgaattttcaacnacactggcgggccgttantagngg

SEQ ID NO: 1777 - DNA, 348 bp, Homo sapiens
acgcggggacggcaggcgtccgcgtcgctagctagtcgttctgaagcggcggccagagaagagtcaagggcacgagcatcgggtagccatgcctttcttggacatccagaaaaggttcggccttaacatagatcgatggttgacaatccagagtggtgaacagccctacaagatggctggtcgatgccatgcttttgaaaaagaatggatagaatgtgcacatggaatcggttatactcgggcagagaaagagtgcaagatagaatatgatgatttcgtagagtgtttgcttcggcagaaaacgatgagacgtgcaggtacctgcccgggcggccgctcgaaagggcg

SEQ ID NO: 1778 - DNA, 579 bp, Homo sapiens
  misc_feature 210, 229, 410, 411, 470, 487, 490, 501, 528, 546, 562, 563,565, 570: n = A,T,C or G
accactgaaaccctgacccagaaaagtggcttgcttggacacccagctgcctttgtttctgcattaaaccaatattgatcacacatatgacacaggctagtcctataaaagtaatgacttcatagaaatggcattataatttttaagttgatactctacaggtagctattgatataattagttttaataaaacatgctgcaaccatggtntacaacaaaaatacatttntttggtgattgaaattaaggccgtatttacaatgacttaatataagactgacttttatcctgcttcataacttgtatggagaactcaccaagaaagaattcaatactgtgaaatatgcagcaagaagattggtctttacctaggctgtgtttcctaagctcttgagttttaaacaccagtnnatttgtattaaaagaaaaaaaaaatggggccttagcttctggcttttaatttttgccancctaagggacattaaanacntaaattaaacnaacaaataaccaaataggcccctctgnctttcaagcaatcatttnttgtaaaaagaaaaanntnttttnaacccctta

SEQ ID NO: 1779 - DNA, 565 bp, Homo sapiens
  misc_feature 476, 554: n = A,T,C or G
actatttcatggtccaaacctgttgccatagttggtaaggctttcctttaagtgtgaaatatttagatgaaattttctcttttaaagttctttatagggttagggtgtgggaaaatgctatattaataaatctgtagtgttttgtgtttatatgttcagaaccagagtagactggattgaaagatggactgggtctaatttatcatgactgatagatctggttaagttgtgtagtaaagcattaggagggtcattcttgtcacaaaagtgccactaaaacagcctcaggagaataaatgacttgcttttctaaatctcaggtttatctgggctctatcatataagacaggcttctgatagtttgcaactgtaagcagaaacctacatatagttaaaatcctggtctttcttggtaaacagattttaaatgtctgatataaaacatgccacaggagaattcggggatttgggtttcnctgaatagcatatatattgatgcatcggataggtcattatgattttttaccatttcgacttacataatgaaaaccaanttcatttttaa

SEQ ID NO: 1780 - DNA, 561 bp, Homo sapiens
  misc_feature 349, 494, 507, 540, 551: n = A,T,C or G
acgcgggggaggcggcactggtctcgacgtggggcggccagcgatgaagccgcccagttcaatacaaacaagtgagtttgactcatcagatgaagagcctattgaagatgaacagactccaattcatatatcatggctatctttgtcacgagtgaattgttctcagtttctcggtttatgtgctcttccaggttgtaaatttaaagatgttagaagaaatgtccaaaaagatacagaagaactaaagagctgtggcatacaagacatatttgttttctgcaccagaggggaactgtcaaaatatagagtcccaaaccttctggatctctaccagcaatgtggaattatnacccatcatcatccaatcgcagatggagggactcctgacatagccagctgctgtgaaataatggaagagcttacaacctgccttaaaaattacccgaaaaaccttaatacactgctatggaggacttggggagatcttgtcttgnagctgcttgtctnctactatacctgtctgacacaatatcaccagancaagccattanacagcctgcg

SEQ ID NO: 1781 - DNA, 563 bp, Homo sapiens
  misc_feature 421, 447, 459, 465, 497, 513, 525, 531: n = A,T,C or G
actttttttcttaatttcactgacttcagagacgattgcagacttgcagtttaagtattggaatttcacaaaagacataggacttaactggaaaatgaaaaaaaaaaagaaaaagaaaaaactaaacaaaaaatccctctaggtagtttaggtgaaaaatgtcccttttattttggctttggttgtgatttcagagcataatgctatgtttttttgtctttttactatgtttttcggatttttaagtccgtaagtgcatacagttttctctaatttttaaaccctttcctcctcccattttgacatttgcacttggagaacacttgagttgtgaaggttttgggcatccaccccagaaagtgggaatttgattttatccttccgaactggaagaacatttttatgaagaatttttgtctangagaatataacagtgttacccaaggntgtgtctttaanggtggntcattttctctgaccttttgttactcaaaagnaaaagtaccctgcccnggcgggccgctntaaaangggcgaaatttccaccacactgggcggggccg

SEQ ID NO: 1782 - DNA, 562 bp, Homo sapiens
  misc_feature 495, 497, 548: n = A,T,C or G
acgtctgcatcgattatcttacgtggggcaaatgatttcatgtgtgatgagatggagcgctctttacatgatgcactttgtgtagtgaagagagttttggagtcaaaatctgtggttcccggtgggggtgctgtagaagcagccctttccatataccttgaaaactatgcaaccagcatggggtctcgggaacagcttgcgattgcagagtttgcaagatcacttcttgttattcccaatacactagcagttaatgctgcccaggactccacagatctggttgcaaaattaagagcttttcataatgaggcccaggttaacccagaacgtaaaaatctaaaatggattggtcttgatttgagcaatggtaaacctcgagacaacaaacaagcaggggtgtttgaaccaaccatagttaaagttaagagtttgaaatttgcaacagaagctgcaatcaccattcttcgaattgatgatcttattaaattacatccnanaaagtaaagatgataaacattggaaagttatgaagaatgctgttcactctngagccctttaatga

SEQ ID NO: 1783 - DNA, 424 bp, Homo sapiens
  misc_feature 75, 257, 270, 275, 302, 325, 333, 343, 354, 357, 363, 373,378, 380, 393, 397, 410: n = A,T,C or G
actctggatcccaaggtgactggttgtttaatcgtgtgcatagaacgagccactcgcttggtgaagtcacaacanagtgcaggcaaagagtatgtggggattgtccggctgcacaatgctattgaaggggggacccagctttctagggccctagaaactctgacaggttgccttattccagcgacccccacttattgctgcagtaaagaggcagctccgagtgaggaccatctacgagagcaaaatgattgaatacnatcctgaaagaanattangaatcttttgggtgagttgtgaggctngcacctacattcggacattatgngtgcaccnttggttttgntattgggagtnggnggtcanatgcatggancttcngntggttttttcttngaancattagtgaaaangggcccacaatggt

SEQ ID NO: 1784 - DNA, 563 bp, Homo sapiens
  misc_feature 112, 488, 509: n = A,T,C or G
acctcatagccctgtgtcatttagtgttcagcacttttgggaacatcagttggtgaactttaaattttgctgtctactcactgggcacggtggctcacacctgtaatcccancactttgggaggccaaggcaggtgggtcacttgaggccaggagtttgagaccagcctgaccaacatggcaaaaccccatctctactaaaatacaaaaattagctgggcatgatggtgcactcctgtaatcccagctacttggtaggctgaagcatgagaattgcttaaacctgggaggcagaggttgcagtaagccaagatcatgccactgcactccagcctgggcaacagagtaagactctgtcttaataaataaataagaaaataaaacggaactgcagtgctaacagtaatttatacatttttaaatgttctgagtatgttttgactgggctagtgtaacaatatactaccctgaaagtgcagttttgattgntggttggtgtctttgggtcangaaagtgaactgtgccaagaagtattttttcagtgacatgaatggattcctgtt

SEQ ID NO: 1785 - DNA, 561 bp, Homo sapiens
  misc_feature 162, 169, 199, 214, 218, 247, 266, 293, 366, 440, 468, 477,480, 489, 506, 523, 527, 553, 554: n = A,T,C or G
acttttttttttttttttttttttttgagtcaacaaacttctatttttattgacaggagtccaaaatgaatacaaaaaaagcttcctttgcatgttatacttactttccttaaaaagctcctgatagagtcaagtagactgaaaactaaggatgtagttcancttttanagtgaaccttttttaaaaaaggtttaatancataagccaccagtntcanaaaacatacagtcccactatcacttttanagctagaacttatcaaaanaattagatcctgcattgatctgctaanatagaggtttaaaaatggtttaagccattaaaagccatttttataatctgtctgataactctgggcaattaanaaaaggaaaattccaaaacgtagccctctatatcatgtggaatgtgagagaatgccaacttatgaccaagatangtaaaaataaaagtttaaatctatgagntggagctgntgnatcactgcnaaatgtcaaccaacagngcttatcaaagagattntcancttgagcgatggttacttaaacttgnngcgatgt

SEQ ID NO: 1786 - DNA, 556 bp, Homo sapiens
actatgaacaccagaacagaagagattttttactattatgacacaaacacagggaaagagggcaaactagacattgtaatgcataagatgcaggaaaaagtgcagagcattaactataacccttttgaccagaaactttatgtctataacgatggttaccttctgaattatgatctttctgtcttgcagaagccccagtaagctgtttaggagttagggtgaaagagaaaatgtttgttgaaaaaatagtcttctccacttacttagatatctgcaggggtgtctaaaagtgtgttcattttgcagcaatgtttaggtgcatagttctaccacactagagatctaggacatttgtcttgatttggtgagttctcttgggaatcatctgcctcttcaggcgcattttgcaataaagtctgtctagggtgggattgtcagaggtctaggggcactgtgggcctagtgaagcctactgtgaggaggcttcactagaagccttaaattaggaattaaggaacttaaaactcagtatggcgtctaaggattctttggacct

SEQ ID NO: 1787 - DNA, 553 bp, Homo sapiens
  misc_feature 433, 452, 494, 508, 520, 521, 548: n = A,T,C or G
acgcgggataaccatgcacactactataaccaccctaaccctaacttccctaattccccccatccttaccaccctcgttaaccctaacaaaaaaaactcatacccccattatgtaaaatccatagtcgcatccacctttattatcagtctcttccccacaacaatattcatgtgcctagaccaagaagttattatctcgaactgacactgagccacaacccaaacaacccagctctccctaagcttcaaactagactacttctccataatattcatccctgtagcattgttcgttacatggtccatcatagaattctcactgtgatatataaactcagacccaaacattaatcagttcttcaaatatctactcatcttcctaattaccatactaatctttagttaccgctaacaacctattccaactgttcantcggctgaaagggcggtanggaattatatccttcttgctcatcagttgatgataccgcccngagcagatgccaanacaagcaagccnntcaaggccaatcctaataccaacccgngatcg

SEQ ID NO: 1788 - DNA, 560 bp, Homo sapiens
  misc_feature 430, 477, 513, 527: n = A,T,C or G
acaaaagaagcagctcaggaggctgttaaactgtataataatcatgaaattcgttctggaaaacatattggtgtctgcatctcagttgccaacaataggctttttgtgggctctattcctaagagtaaaaccaaggaacagattcttgaagaatttagcaaagtaacagagggtcttacagacgtcattttataccaccaaccggatgacaagaaaaaaaacagaggcttttgctttcttgaatatgaagatcacaaaacagctgcccaggcaaggcgtaggttaatgagtggtaaagtcaaggtctgggggaatgttggaactgttgaatgggctgatcctatagaagatcctgatcctgaggttatggcaaaggtaaaagtgctgtttgcacgcaaccttgccaatactgtaacagaagagattttanaaaaggcatttagtcagtttgggaactggaacgagtgaagaaagttnaaagattatgccgtcattcatttttgatgaaccganatggtgctgtcaangctattggaagaaatgaattgggcaaaagactt

SEQ ID NO: 1789 - DNA, 561 bp, Homo sapiens
accaaaacagacatatagaccaatggaacagaacagagccctcagaaataacaccgcacatctacaaccatctggtcttcgacaaacctgacaaaaacaagcaatggagaaaggattccctatttaataaatggtgctgggaaaactggctagccatacgcagaaaactgaaactggatcctttccttacaccttaaacaaaataccatttgacctagcaatcccattactgggtatatacccaaaggattataaatcattctactataaagacacacacacgtatgtttattgcggcactgttaacaatagcaaagacttggaaccaacccaaatgcccatcaatgataggctggataaagaaaatgtggcacatatacaccatggaatactaagcagccataaaaaaggatgagttcatgtcatttgcagggacatggatgaagctggaaaccatcattctcagcaaactaacacaagaacagaaaaccaaacacctcatgttttcactcataagtgggagtttaacaatgagaacacatggacacagggaggggaaca

SEQ ID NO: 1790 - DNA, 563 bp, Homo sapiens
  misc_feature 419, 487, 508: n = A,T,C or G
acttgcctcatagctggtgaaggattcttctgaacccccaccctaccccctaaaggtatctgtggtattggcaggatagggaatatgcattacagaaatgcaggatttgactctgggcatgaaagatggcagcagccctagggtgaccgtgaactatagacctcgcagtcttttcggtgaaagaagagacaagttgaccctctgcccatttccttatggacctcacccatcatgccagcagggtcataggaccctggccttgttccaaatcatctgggacatgacccactccccactgtcactgtgttgaaaacagagacttgtttgtgtggccccaacacccataaggaaaccaggctttaggcccaggggagcagtggaggtaagggctccaccccatcttaagctctgtcttccgnggcacaaattccaagttctttgacgttagtaattgttaaaggaatggcaaactgttttgtttttgaangatctttctacagtctggtcntacccatgtttccttagcaaccctgagatgattttctttccattttaccaaaagc

SEQ ID NO: 1791 - DNA, 565 bp, Homo sapiens
  misc_feature 275, 540, 550, 556, 559: n = A,T,C or G
actattaagaaaaagaagattgattcttaacctactgaattgtgcagatacaaaagtgcttagcatgacaaaattaccaaaataaaaacattttagaggttatttggttctagcaatattaactattctgtatttctggataatttaacatttgtattttaaattttatataaatttctttttaacaagtttaaaaaagcacacgaaaaatagttcaaactatatataatctgttatttttcatcctggttagctaatcacaaataactcagcanaacaatgcttgaacattcagttctactaaaaaacagtatttgagtagatcccatcaccttacccattgttttgctatgttagaccctaaaacaggctgccgacagatcggacaagtgcaattctctgagagccatccggtcaatacaattgaatgtgaaattcatgcatgcaagggtaattgcctgagcttgtttccaagttaccatagtcactaaataccaaacacctacagattttacctaagttcacttatcaattactggnatgctcatantggctnggnggaaaa

SEQ ID NO: 1792 - DNA, 561 bp, Homo sapiens
  misc_feature 506: n = A,T,C or G
acaaaattgccaccaaaaacgatgttgatgtccaaattgaccaggagtcctacctgcctgaagacatagctggtggagttgagatctataatggagatcgtaaaataaaggtttccaacaccctggaaagccggctggatctcatagcccagcagatgatgccagaagtccggggagccttgtttggtgcaaatgccaacaggaagtttttggactaagccttcaggaggtggagctcgtcgtcagctctcctgctgtgatgtggaagcttctgatatttgaagaaacacgaatgtctctgtagcttcctcttcactgccccagtattgctctgtatttatcagcgatgcccctctgtcactcatgccttgcctaattgttcacaatggtggaaagcttcatgtaatatgatcaggacccacctccagttcttctgaaagtgtgacagtgtccaaccggttctgcagcactaggggagggggcagatggtgggttgcatgggcttncttgggtctccactcttcgtctggcctaaaaggtgatgtatttggtgtttggccc

SEQ ID NO: 1793 - DNA, 233 bp, Homo sapiens
acccacagagactgagagttggtgctggtggttgtggtggcagatgatattacctgaagaagggacgaatgggtgctgggcaggacaaagcatcagctgtccagttcaggcctctcctctttccctggtgtcttcattttcctccgtctccctgctgtcccttaccctctcccaatctctcattactcctggtcttgggagttgccttctgaggatactccactgggggtacc

SEQ ID NO: 1794 - DNA, 561 bp, Homo sapiens
acttgagtcaaagacgacatttagattcttcagctttgaagcatttagtaacatcattgtctagtcaggcagaggaaagaaattcaaaagcactttctttttcttctgtcagttcctttgcagtaagatccatcttctcacgtgagaaatcattaatagggagaccttcaacaaacttccaggtcttattcttgattacaacagggaatgagtagagcagatcatcaggaacaccataggagttgccatcagagataacacccatggacacaaactctccctctggggttccaaaccagatgtccctgacgtggtcacagatggcttttgcagcagacatggcactggatagttttcgagccttgatgacagcagcgccacgctgctgcacagtcgtgacaaattctcccttgagccagctgtcatctttcagagcttcataaacaccaacttcctttccttgcaatttcaccttggcatggttgacatctggatactgagtcgaggaatggtttccccagataatgacattctttacatcattagcagtcacaccaagtt

SEQ ID NO: 1795 - DNA, 291 bp, Homo sapiens
  misc_feature 179, 258, 271, 288: n = A,T,C or G
acatttcaatagcacgttcatcctcctcattaaactcgtcttcatgatcctccagctcttccaaagtcatatcttcatatgttttcaccactgactgctggaggatgcgctgctcctcttctgcctcctcttccaattctttcagactttccttggggggtaagataccctttttgcgnaagatgtcattccattcagtgtctgcgttggggtcctgcatcttgtttccagttcagttgctcaaaccagctgtgccgnccccgaccctcanctttcttttgtccccgngtt

SEQ ID NO: 1796 - DNA, 560 bp, Homo sapiens
  misc_feature 58, 102, 142, 174, 216, 231, 263, 347, 360, 394, 506, 517,519, 539, 544, 548: n = A,T,C or G
actttttttttttttttttttttttttgctgaaaactttttattgctcttttggatanaaacgggaatttatttgccaggaaggatgatcccatcatacttntgctggaaccagcgcatggcctcctctttgctgattctgngtttggccccaatgcagcctgtcctgcgcttnttgtctgcgatgctgaaacctggcctacccagcaccacatanaagtccaggccgtanataccaatgcttgggtcatatttgatacccanatcgatgtgttcctggatcccaaaaccaaagtttccagtatctgagaagttgttttttcttaactcatactcccgcacctttanacccttctccaanatttcttctgccttggcccctcgaactgtgcagnggacaagcaatcttttcatttctccggatgccaaaggatctgacaggtgtatctagctttggaaaacacaggggtctgccctgtgagctgctccaacaccttggctgctcgngtcagtctgtntncactctccccaacacagatnttganacanaagtttggcgga

SEQ ID NO: 1797 - DNA, 365 bp, Homo sapiens
acgcgggagagcaggacagcaaggacagcacctacagcctcagcagcaccctgacgctgagcaaagcagactacgagaaacacaaactctacgcctgcgaagtcacccatcagggcctgagctcgcccgtcacaaagagcttcaacaggggagagtgttagagggagaagtgcccccacctgctcctcagttccagcctgaccccctcccatcctttggcctctgaccctttttccacaggggacctacccctattgcggtcctccagctcatctttcacctcacccccctcctcctccttggctttaattatgctaatgttggaggagaatgaataaataaagtgaatctttgcaaaaaaaaaa

SEQ ID NO: 1798 - DNA, 563 bp, Homo sapiens
  misc_feature 461, 506: n = A,T,C or G
acaaaaggaatgtttcctttataaatcacagaagaaaatgacaatatctgttggatatttgatataatttaatggtgttataaaacctttaagaggattcatggtgaatatatgtgataacatctttatactttgaaaaatgttccacttacccttcagatatttgttgtaagttaattcaattcttaatactttaattttgctccaacaagggctttatgttgctggtaagagaatttatttactaaatgcactatgtataaagtgaaagatagtttacttatctgactttgatattagatggctgacattagtgcacataatgcagagtttaaccttgattcttcaacagagtccagatttaaatgtctacttagttaattagttagctgatattcttccacaattaatatattcaatttcccatcagtatatcactttaaattttatgtttttctaangaaactttccacagaattttaaacaactgatgcatccatactcanggtgtagggagaatactttgcatttaaaaacccctgtccacctgtcacccagcacaa

SEQ ID NO: 1799 - DNA, 580 bp, Homo sapiens
  misc_feature 195, 263, 317, 324, 332, 340, 348, 361, 386, 402, 424, 438,439, 457, 462, 479, 490, 491, 497, 503, 505, 510, 513, 531,534, 537, 552, 557, 562, 566, 567, 571: n = A,T,C or G
acggatcttacttcctggctcccacgcgtcctgctggtgatcctgccgggggagtggggtgttgctgcacaggctttggagtcctgtgggcggaattccagtctccgttttccacttgctggctttggaacctagggaatgatcaccaagacacacaaagtagaccttgggctcccagagaagaaaaagaagaanaaagtggtcaaagaaccagagactcgatactcagttttaaacaatgatgattactttgctgatgtttntcctttaagagctcatccccctctaagagtgtggcccatgggcaggcacctganatgcctntagtgaanaaaaagangaagaaanagaagggtgtcancaccctttgcgaggagcatgtagancctgagaccacgctgncctgctatacggacagaaaaanttcacccagccctnnaggaaaccacggtgtttnggccncttggagtttccttcantgggggaaaannaaaaanaataantnacctntancccattggcccatgcctnttnggngggaaaaacctcccncaganccctnaacnngggngagggagga

SEQ ID NO: 1800 - DNA, 561 bp, Homo sapiens
acttcacccaggcactccaggccgggaccgtgtgggtaaacacctacaacatcgtcacctgccacacgccatttggagggtttaaggaatctggaaacgggagggagctgggtgaggatgggcttaaggcctacacagaggtaaagacggtcaccatcaaggttcctcagaagaactcgtaagagcagctgtcagggaggcccagtcacagtccagcaattccacaaccaccttgacgaatgcttgccaagctgttttaaagccaagaacaccctttctttgttccaaattaactcttagaagaaaccccacaaataaagcaattcaatcaaggctgttctatttaaatcagagatggggaccaggctcagagttctacctatctaacccccaaccacagcccccttggtggcccatgagttgcttcatgaaatcttaggagtctctggaggacagattaaaaaccagtgatctgtaatttgtagctcttcctgctgatccaaggactttcccatgggtgcgcttggtggttaagtggatcgactcaacttaaaacacaag

SEQ ID NO: 1801 - DNA, 563 bp, Homo sapiens
  misc_feature 562: n = A,T,C or G
acttttatatatactatctatgaagaattcactaaagcatgaatcaccttataatgagaagctaaaaatgtatcaaaacgaacataagtataggtaatccacatcaaacatactacatcttccaagtctagaacatacactggtataaactgtattacaacccagattagtttgaaatcttgtttcaaaacattgctcagtattaagtctcagtagacaaataataggaccacatgagaaactgttcggcaggtggctgaggaaaccttaacttccaaaggctcaaagtggtcctccagagactgttacactcccttaggtatttatttcagggaaggacactattaagggacacttttgagtataaagacaggtgaactcacaaagtataggcagatacatgcttgattttatcttctaatctacagataatacattagaataaaaatgtaatgaattctacacctttcaaaagggaaaaactgatgaagtaacaataaaggtattaatggataatggatcagatgaaataatttaaatgaagcttggctgtgtctgaaana

SEQ ID NO: 1802 - DNA, 562 bp, Homo sapiens
acccattggatctctagcatcaagaacttgaactacaacatctgatgaatctatcaccttgtagagctcaccccatattcttttggactgtccctttttatagatctcttcttgagcttcatttctcacaccagtgtcttcagttaccaaatcacgatccttgccctggtcatagctctcagtggacatttcagcattttcgataagagactgcatatcacttgcaaataagtttggtcgtttcctctgtgacttagggccaaatgtagtttcaaaactttcagtatcaagaatgtgcaccttcaagttatgaggctggattcgatcatggagaggagacattggtaacttgctttgcttcatgacaactttgtatggatccttcataactgtatccatttcctcttgaaatttttgtaatgatgactgcttaatcacacgtgtgtttccaaaccatttaatatttggctctactcttgcccctgtgccagaagccaccggttgattgatattgcagggggtttaattattttacccacgactggtcctgcctccttttgcc

SEQ ID NO: 1803 - DNA, 431 bp, Homo sapiens
acgcgggattgcagcattatttcagttcaaaatgaactatatgcctggcaccgccagcctcatcgaggacattgacaaaaagcacttggttctgcttcgagatggaaggacacttataggctttttaagaagcattgatcaatttgcaaacttagtgctacatcagactgtggagcgtattcatgtgggcaaaaaatacggtgatattcctcgagggatttttgtggtcagaggagaaaatgtggtcctactaggagaaatagacttggaaaaggagagtgacacacccctccagcaagtatccattgaagaaattctagaagaacaaagggtggaacagcagaccaagctggaagcagagaagttgaaagtgcaggccctgaaggaccgaggtctttccattcctcgagcagatactcttgatgagtacc

SEQ ID NO: 1804 - DNA, 402 bp, Homo sapiens
actcagtctgaaaagctaacaaatactgcatctaaccactcaatggaccttacaaaaagcaaagacccaccaggagagaaaccagcccaaaatgaaggtgcacagaactctgcaacgtttagtgccagtaagctgttacaaaatttagcacaatgtggaatgcagtcatccatgtcagtggaagagcagagacccagcaaacagctgttaactggaaacacagataaaccgataggtatgattgatagattaaatagccctttgctctcaaataaaacaaatgcagttgaagaaaataaagcatttagtagtcaaccaacaggtcctgaaccagggctttctggttctgaaatagaaaatctgcttgaaagacgtacctcggccgcgaccacgctaagggcg

SEQ ID NO: 1805 - DNA, 566 bp, Homo sapiens
  misc_feature 485, 488, 531, 532: n = A,T,C or G
acagagtcgcatccattctttttgaacaacatgtagcatgtctgcaacagtggatgattcacaaaccatatacagtccccataatcctgtatctgtgtaggaagtgttgaaagactgaaagctatggcaaagattgccatgacaagtgagctgggccagcttgctagataaattcattcctcccccaaaagagcgatcccagttgccaatcagcgtgtttgcaaccatgagacagattgtatctggatgtgcccaaccaacagcttcaacagctattgcaaggtgcgccaaaggcatcttgtcatccctcacacgaatctcacttcctgtgaatttgcagggaggcagagctggtatttctcctttgtgtgtgcataaagagtcaccgaaatgaaactttgctaagtcaagcaattcatcatgggaaacacctccagcagcagcaagcactattcttggccccttataattgtggtggttatatnatncactaagtccttacgacttatagatttgatattttcagttggnncccaaaattggtccgtccaagtgcagtattttga

SEQ ID NO: 1806 - DNA, 415 bp, Homo sapiens
  misc_feature 345: n = A,T,C or G
acctgttgtcacgcgtcctgtttgccctgagccgcctggctgtagagaagggctacatccctgaacccaggtgggacccgttcccgctactcactgcggtggtgtgggggctggtgctgtggctctttgagtatcaccgatccaccctgcagccctcgctgcagtcctccatgacctacctctatgaggacagcaatgtatggcacgacatctcagacttcctcatctataacaagagccgtccctccaattaatgcagccctgaggtgtctggctgtggctcaagatttggccccatgcagaccctcccaaaggatactgccttctcaagatcataggcctcanactccaactggtgttatcccagggttccgtttgctgaagtaaaaacactgattttaaaatcccagtgggt

SEQ ID NO: 1807 - DNA, 561 bp, Homo sapiens
acgcggggcttcaagcaacagcgacgcaagatggcagccaccacgggctcgggagtaaaagtccctcgcaatttccgactgttggaagaactcgaagaaggccagaaaggagtaggagatggcacagttagctggggtctagaagatgacgaagacatgacgcttacaagatggacagggatgataattgggcctccaagaacaatttatgaaaaccgaatatacagccttaaaatagaatgtggacctaaatacccagaagcacccccctttgtaagatttgtaacaaaaattaatatgaatggagtaaatagttctaatggagtggtggacccaagagccatatcagtgctagcaaaatggcagaattcatatagcatcaaagttgtcctgcaagagcttcggcgcctaatgatgtctaaagaaaatatgaaactccctcagcccgcccgaaggacagtgttacagcaattaatcaaaaagaaaaaccacaggccctttcccttccccccaattcgatttaatcagtcttcatttttccacagtagtaaatttttctta

SEQ ID NO: 1808 - DNA, 562 bp, Homo sapiens
  misc_feature 26, 30, 60, 170, 172, 248, 273, 291, 414, 423, 499, 510,559, 561: n = A,T,C or G
actttttttttttttttttttttttngggnggccaccacatctttattgcatactcaggngaataacttattatacaatgaacactcctccattaggagaccatgcccacttacagaatgcagccgtaaatgcggtaaatctatttacagaggttggggtgcaagatgananaagtatcagccccaggaatttgaagtgagaatgatctacaaattctcctgacaaggagcaaccgggcttgtgctantgaggtctgaaagaattcctggcanagcgtagggggagattanatctcggaattgacagcaagtttggggacagtgcaagaagagaggggtgacctgtgaattggtgctggggagctgctgaggcccaatgtgaggcaacactagagagatgagtaaatttagggngatctttancctctcctacccaggcaaaaagggttggggagcgggggtgtcaacaagtttggcttccagtgtagattcaaaccantgggctgaganaggcttttgctttttttgctcaaatatgcaggtctgctctgggccacananc

SEQ ID NO: 1809 - DNA, 559 bp, Homo sapiens
  misc_feature 432, 555, 558: n = A,T,C or G
accaagtccaggtataacattcctattggaagccatacttatattttcttgtaaagtgcttttgaattaataaaatattagcataattgtgtatagtcagttgaacccactgttaccattgttcttatcccatgggaagcagttggttacacgattcttattttataagaaacagctgagaggcactatggattaagtcttctgaagtgaaggaaatatagatgtcacctaaatgatagttaacccattttttttttttttaggcatagaagccagttcagggtccataatatttagtgaccaacattttaaagtatagcagcaacctggttcttaaacacaaagtaagttgcccattaacaaatggcttttatctttagcatgaaaactttccacaggtctaaaaattgcttccattttataatttgaggngttgcatgggaattctaagctgatccatcatgatgtaaaagttcacaatatgggtcaaatgtaacagtgcagaattgaatatggaggcatgcataacccttcctcttaaaaaatggcaggggntgna

SEQ ID NO: 1810 - DNA, 379 bp, Homo sapiens
aaacatgattttgccctaaagaacagctgaactgttgagagaagcaagggcttcctagcggccttccagtgtagcagataatattaccctgtgtaacagagtattacagagttttgcattttccaagtctgtaagtctaaccataaacaaaacaaagacaaacccaaacattaagatatactgacaatcttgttcccatatatgatagaatagttctcatacactgttaagattgatttacttttttattaggagcacttctcaggtttttggcatttcacatgtctacactcagtgtccattggctccttctgagagtatccttgaaggttcggtaaattttgcagtgaacaagtaaaaaagggctggtgtaggtacc

SEQ ID NO: 1811 - DNA, 569 bp, Homo sapiens
  misc_feature 229, 301, 328, 343, 372, 378, 383, 384, 416, 441, 448, 460,469, 543: n = A,T,C or G
actttccttcatcgaatgattatttgcctggaggaagaagttcttccgttcattccatctgcttcagaacatatgctcaaagattgtgaagcaaaagatctccaggagttcattcctcttatcaaccagattacggccaaattcaagatacaggtatccccgtttttacaacagatgttcatgcccctgcttcatgcaatttttgaagtgctgctccggccagcagaanaaaatgaccagtctgctgctttagagaagcagatgttgcggaggagttactttgctttcctgcaaacagtcncaggcagtgggatgagcgaagttatancaaatcaaggtgcanagaatgtagaaagagtgttggttactgtntccaangagcnnttgaatattcatatccaatttgtcagaaaacntgtttatcatcctctcaaagttggnagaactntggggaggtaanatggaccantgggatttgctgattttgttataaacacattgccccgatgtttcctacacctttaaacaaacctttgcctggcngatcacaaacagtttggcttttttga

SEQ ID NO: 1812 - DNA, 458 bp, Homo sapiens
  misc_feature 20, 41, 54, 66, 67, 68, 75, 108, 131, 184, 194, 207, 226,229, 233, 238, 247, 260, 265, 279, 281, 304, 311, 328, 334,337, 343, 352, 365, 380, 388, 413, 419, 444, 448, 453: n = A,T,C or G
acacagtttcagaaaaaacnaggaatgaatactattgatgnctggtggcttttngatgatggaggnnngaccttnttgataccttaccttctgacgaccaagaaaaantggaaagactgtaagatcagagnattcattggtggaaagataaactgaatagaccatgaccggagagcgatggctnctttgcttanaagatccggatanacttttttgattcatggtnctngganatatnagatccaanaccaaagaaaganaattnttataggcttttgngngaaattattgagccatacagacntcattgnagatgataaagagcatngatatntgnagtttnaaatgaaangaagatgaaccantgggcgaataacaanataaatgngctttgaactttttttaagaccaangacttnccgggcgagatttagggttaaatgngttnatttnaaggg

SEQ ID NO: 1813 - DNA, 357 bp, Homo sapiens
  misc_feature 267, 310, 330, 344, 347, 350: n = A,T,C or G
accaacagaaagcaggccaggctcccactctcatcatctatggtgcgtccaccagggccactgatgtcccagccaggttcactgccagtgggtctgcgacagagttcactcttatcatcagcagcctgcagcctgacgattctgcagtttattattgtcagcagtataaagactggcctctgactttcggccccgggaccaaggtggaaatccggcgaactgtggctgcaccatctgtcttcatcttcccgccatctgatgagcagntgaaatctggactgcctctgttgtgtgcctgctgaataacttnatcccagggaggccaaagtnccttgccgggcggncgnttnaagggtg

SEQ ID NO: 1814 - DNA, 281 bp, Homo sapiens
  misc_feature 259: n = A,T,C or G
acgcgggggtttatcgtgtgagcacaccatatatttacagtaggaatagacgtagacacacgagcatatttcacctccgctaccataatcatcgctatccccaccggcgtcaaagtatttagctgactcgccacactccacggaagcaatatgaaatgatctgctgcagtgctctgagccctaggattcatctttcttttcaccgtaggtggcctgactggcattgtattagcaaactcatcactagacatcgtacctnggccgcgaccacgctaagggcg

SEQ ID NO: 1815 - DNA, 406 bp, Homo sapiens
acaggccctttgatggcttgggttacagacaacctcatagctggtgcaccacacacacgagataaaacaggaagcctaaaaaccccaagccacaccaagaaaaatgagagaggggagggcggggtaacaatgcagcatcccgcggagggaacttaatgcacaaggagggagaacagagggtggaaggcaagccagcttcgtcttcgccgcgcagctgctgtgtggtggtcaggggactgagttcaacaggtccttcaggaagctctctggatcggtgatttctgataaaagaccggccacatcgaggaactctgagaaggtcttcaccggcatgaactcctctggaaggttttcagggctttgtcggcagcttcgtagatgggcatgtcgttgtggcggatgtacc

SEQ ID NO: 1816 - DNA, 560 bp, Homo sapiens
acttcaagttaaagtgaataaccacttaaaaaatgtccatgatggaatattcccctatctctagaattttaagtgctttgtaatgggaactgcctctttcctgttgttgttaatgaaaatgtcagaaaccagttatgtgaatgatctctctgaatcctaagggctggtctctgctgaaggttgtaagtggtcgcttactttgagtgatcctccaacttcatttgatgctaaataggagataccaggttgaaagaccttctccaaatgagatctaagcctttccataaggaatgtagctggtttcctcattcctgaaagaaacagttaactttcagaagagatgggcttgtttcttgccaatgaggtctgaaatggaggccttctgctggataaaatgaggttcaactgttgattgcaggaataaggccttaatatgttaacctcagtgtcatttatgaaaagaggggaccagaagccaaagacttagtatattttcttttcctctgcccttccccataacctccatttagtctttgttattttgttcttccaagcacatt

SEQ ID NO: 1817 - DNA, 569 bp, Homo sapiens
  misc_feature 5, 42, 63, 117, 191, 211, 248, 260, 285, 362, 365, 367, 384,438, 439, 493, 509, 548, 561: n = A,T,C or G
acttnttttttttttttttttttttttctggacaggaagtanaatttattggtgagtattaanaggggggcagcacattggaagccctcatgagtgcagggcccgccacttgtccanagggccacgactggggatgtactcacattcatttgtcacatatttcaggccctcatacaccccttttaaattgnctaactcctatcccagtttntttttatagtctaaaaacaaggaatcacccaagtaanatactccttcanagcactgctgaaaatggatcaaacntggagatcccccagatccctgttctcaagtgttaaaaaaattttatattagcacatagaatacccttagatatattntgntntgttctaaagagtttgngtttccccctttttgatgatgtcttcaattttttctgagacctttcctgtatanncatttggtctattgcttttaacttcttttgatactccagtggcaaaccattttntttgccccatgcaaanatcttttttactggggggatgggggagccttcttattgncataaatacttcnacagttat

SEQ ID NO: 1818 - DNA, 542 bp, Homo sapiens
  misc_feature 61, 70, 78, 122, 135, 164, 171, 178, 180, 203, 246, 249,263, 289, 305, 310, 316, 326, 334, 379, 424, 455, 459, 486,512, 526: n = A,T,C or G
acttttttttttttttttttttttttttttccggaattttctttattttttacaaattaanactatgcanatttcatntatttctgaatcaaaaacacctttgtcttcacagtatgagttanaatgcagcctganctgaaaatcaagaaactagaaaagaaagnggtaganataactntnttaaaaatctgttaggtattttntttaaaagtagggggtttttttttttctttctttttttttttnaanatcttggcattctnggcactgtttctaaagaaaaactccnttttcccagcaaaaancacanaaaggnggagtttggnttcaaaanatgttaactcaaaattttaggcctagcagaaaatcaccaaatttntggagagttaacaggggttaacaggaaggaagtgcctttattaanttctcaagccagaggctggaggcagcagctnattnagaggacagcatcctcaggtgaaaggngccattcggggtggcatgcactccangaataaaacacttnaaaacaaatgattcgt

SEQ ID NO: 1819 - DNA, 553 bp, Homo sapiens
  misc_feature 58, 87, 137, 199, 211, 214, 264, 297, 309, 338, 348, 384,390, 460, 463, 475, 480, 512, 513, 518, 532, 549: n = A,T,C or G
acgcggggactctgcgcttcaccatggctttcattgccaagtccttctatgacctcantgccatcagcctggatggggagaaggtanatttcaatacgttccggggcagggccgtgctgattgagaatgtggcttcnctctgaggcacaaccacccgggacttcacccagctcaacgagctgcaatgccgctttcccangcgcctggcggnccntggcttcccttgcaaccaatttggacatcaggagaactgtcagaatgagngagatcctgaacagctcaagcatgtcctcctgngggtggatccancccaccttcacccttgtccaaaaatgtgnggtgaatggnagaacgagcatcctgcttccctacctgaaggacaanctcccntacccttatgatgacccattttccctcatgaccgatcccaagctcatcatttggaccctgtgcccgtcanatntggctggacttnagaantctatagggccgagggagagcttcgacctcanncgacnttctacattaattngctggctaaccctctanagtg

SEQ ID NO: 1820 - DNA, 567 bp, Homo sapiens
  misc_feature 32, 66, 108, 115, 120, 134, 176, 178, 215, 219, 225, 244,257, 268, 284, 288, 306, 360, 362, 376, 414, 494, 525, 547,548, 566: n = A,T,C or G
acttttttttttttttttttttttttctatgnaaactgtccctcatccttcaccatcccaccatanaaagttaactttctcccaagtagccaattttcacttggtganagttganctaanatttgaaagatggngattaaaaaaaaaaaatcaaactgttaaataggaatttggananacaggcttttgtcattttccaatgcacttgggaggcncaanatttcnattgtaaaagggaaaaccnccggaaagcatantgataaagttntattttcagaacaaanaggngagtttatcctcatgctncaatttctactctgaaataatttctatgcctcagtgaacattgagaggatattntnagtagataagggcntcaacatttggttgtgaacacacacttttgcttaattngtctatttaaattagaaagggaggggaaaataatctaaaaaatcccaataagtctggaatcaatatttgaactcccccanatcaaaagatttctagaatctgctcataggngaatcactacagctttgctttnncttgcaatggcacccaang

SEQ ID NO: 1821 - DNA, 561 bp, Homo sapiens
  misc_feature 545: n = A,T,C or G
cgatcgaagggactatgtcttcattgaattttgtgttgaagacagtaaggatgttaatgtaaattttgaaaaatccaaacttacattcagttgtctcggaggaagtgataattttaagcatttaaatgaaattgatctttttcactgtattgatccaaatgattccaagcataaaagaacggacagatcaattttatgttgtttacgaaaaggagaatctggccagtcatggccaaggttaacaaaagaaagggcaaagcttaattggcttagtgtcgcttcaataattggaaagactgggaagatgattcagatgaagacatgtctaattttgatcgtttctctgagatgatgaacaacatgggtggtgatgaggatgtagatttaccagaagtagatggagcagatgatgattcacaagacagtgatgatgaaaaaatgccagatctggagtaaggaatattgtcatccctggattttgagaaagaaaataacttctctgcaagatttcataattgagagaatcctgagttgatagctctaangcagattctgatttgc

SEQ ID NO: 1822 - DNA, 453 bp, Homo sapiens
  misc_feature 250, 349, 377, 417, 439: n = A,T,C or G
acctttgaatctctgttacctgaggaaacagcattctcagcttcttggtgctcgtctggtggagaaggaacttttgcagtagctctgagatcctggctttcctgcttttcatgattctggaattcagtgggattacttatttttatctctgaatgattctgctgtgagtcagggtccacacggacagtcttgcaccttctccttgttttggtgacatggccaagtggctgtctctcagcttcttcctggntgctgatctgaatctcagtctcatcacaagaggatgcagaagtttgactttcatcctgattctcatttccttttcttgcctcatgtttaatgtagcctntcaaggcttttaacaacttgtctgcctnggttggcccggagacccagactcttggctaagttctgcangtcactgtacctgccgggcggnccgtcgaaagggcg

SEQ ID NO: 1823 - DNA, 563 bp, Homo sapiens
  misc_feature 244, 251, 266, 319, 379, 400, 405, 409, 417, 434, 458, 459,474, 488, 492, 505, 514, 519, 534, 542, 546, 550, 557: n = A,T,C or G
acagttatgctcagatgaacactggacccatgtgacagggtcaagcaactagaacatgattcagaaatcagtgaaagatacacttggacaggaccaagaggcatttcactgccatgaaacaaggcaggaagggattctaatacacacaccaggaagcactcctgcccctcagaggtcaaggagctgatcctatattggtatgaggaatggcttattttctgatgaccacatgtgggactatttnaacccgncacaagaaaccccanaagggttattgttttgcattatatatctatacttttttaataaaagtaaattnacacttaacgaaattcaggattgatcccaacctagagccagatcctctggggtcagggangaaacagttgtctcatcaccncgcangttncatttgtnttccccgcgtctctttntgactacaacatccagaaggagtnnccctgtcctggtccntgcgtgtgagaggnggantgcagatcttctngaaaccctnccggnaaaacatcaccctgnaagtggancccnttgnaccatcnaaaatg

SEQ ID NO: 1824 - DNA, 372 bp, Homo sapiens
  misc_feature 101, 170, 299, 320, 340, 348, 369: n = A,T,C or G
actttatgttctttgcaactgtttccattatgagaacgctgtgctatttacaaggttacatttttcttggccaggcgaggtggtcatgcctgtaatcccancactttgggaggccaaggtgggcggatcacttgaggtaaagagttgagaccagcctggctagcatggcngaaacccagtctctactaaaaatacaaaaattagccgggtgaaattagccgggcgtggtggtgtgtgcttgtaatcccagctactcgggaggctgaggcaggagaatcgcttgaatcccggaggcagangttgcagtgagccaagatcangccacttgcactccaacctnggggtaanagcgaaactctgctcaaacanaaa

SEQ ID NO: 1825 - DNA, 565 bp, Homo sapiens
  misc_feature 504: n = A,T,C or G
actgtttaccaaactgaaggtgcagtgcttgcaatattttgtcttgggtgtcagcatcccggacatgaagaacattctcccctgtttctcttccaatctgacgtgttcccaggttgatcacaggtgttccaaaagctccaacttctcgaaccccacagctgctgttcccaatcatacagccagcatgggcaaccaactgtataaactggtcaaatgggacgtgtttaactgcacgaaagttgggatgatgctcaatgcccttcttccgcatcactcgaaccatctctttgctccctgcgtcaatatttggaaacaggactagggtccgcttgttaaatgagataagtgcatccaatgttaattcaaacattttatggaatgcttaatgtcagtggcacagggtgctgtagtgcaacaatgtaatctttagattttacatcatcacctagcccatgcgaatgatgctcatgtagtctttgtcttgactgagagaagtttgcatangaaggcacctgccaaaggatgcgatcatggtcctcacacatggatatcaagtgctgtctga

SEQ ID NO: 1826 - DNA, 567 bp, Homo sapiens
  misc_feature 333, 400, 475, 492, 507, 524, 531: n = A,T,C or G
acacaaaggatgtatgaaatgtgggttttgttgctgaggataacagggtattgcaatgcagtagtgatcctacacatccttccttgtctgattcactgaaatcactccagtgggggagggatgcaggacatgtgggaaaacgaggagcatgcagggcaggactgtcagcaaatcagattactaatgtgatttgactgcaggggttggcgtgttttaggagggacaggaggttacaaaagacagtttgtgacctgaaggcttcaacaatataattctattcaagcttccaggactgacagaggaaaaactggattcagacagagaaagctgatnaaaatcttacctagctattgttccttcctttaaataaaaaataaaattaaattaaaaaaaagtggcngccgtttctgaccagcactctcatgatgcctattcagaatctgcctgatgacgcctcttgagagcacatcccagncagatgtccccagtctnttgcggggcctcctnccgaacgcagccagatnacactgnatgttaaactgttctatctcaaagcactatctcctc

SEQ ID NO: 1827 - DNA, 566 bp, Homo sapiens
  misc_feature 398: n = A,T,C or G
acctgtcttttcttttttctttttttaaatcatagtttgttttacctgaaagttgagaaagaatgcagtataaatatagcttttctctacacgggagcagggggaacagaaccaatccccagcttagccacacccaacatcatggaaattactgtgaacctgttgtctcttgaggacaactaaaaccaaaacgaaatccctaacattattaaaatgttaggaaacttttcaggtaattgctgtaactctggtaaaatacagaaagattacattcactcataataaaaatcaagtgtgcccacgccatctgcaaagggaacttgcaccatcttggtttcactcgcattgttaacagtgccctaaaagtatacacctttttcaggataaaaccattaggnaatatcttgatcatatcctctgcatgatgaactatcactcaaattattctgcatgggttaccttactaacactgacaaagagataataaatgtaattttacagggataggagaagccttgcaaacctttcagtttctttcataactattgtttattattggatatttt

SEQ ID NO: 1828 - DNA, 563 bp, Homo sapiens
  misc_feature 521, 524: n = A,T,C or G
acccggctctgcatcgcgtcgccatgatgggccatcgtccagtgctcgtgctcagccagaacacaaagcgtgaatccggaagaaaagttcaatctggaaacatcaatgctgccaagactattgcagatatcatccgaacatgtttgggacccaagtccatgatgaagatgcttttggacccaatgggaggcattgtgatgaccaatgatggcaatgccattcttcgagagattcaagtccagcatccagcggccaagtccatgatcgaaattagccggacccaggatgaagaggttggagatgggaccacatcagtaattattcttgcaggggaaatgctgtctgtagctgagcacttctggagcagcagatgcacccaacagtggtgatcagtgcttaccgcaaggcattggatgatatgatcagcaccctaaagaaaataagtatcccagtcgacatcagtgacagtgatatgatgctgaacatcatcaacagctctttactaccaaagcctcatcggnggncatctttggcttgcaacattgcctggatgctgcaaatgg

SEQ ID NO: 1829 - DNA, 565 bp, Homo sapiens
  misc_feature 320, 322, 381, 389, 399, 418, 494, 499, 500, 530, 539, 564: n = A,T,C or G
acacttttgttacagttacatatatgaatagttagcagaggagaaactcctccgttgttcctacaccaagggaaaaaatgtaaggactgtatagctcatgaataatattaacatttttctatcacaaaatattgataaaattggaattgtatcaattcatgttatggagcttaacattttagccgaaatattaagataatataaataaggcttttagcttcatatcaagacctatttgaacacttctagaaaagaacattaaaagttttttcctcatttatggtttgatttagtgtagtgcctcaactggtcttaatggngncttagtataatgcataattattagaatataatttaaggctttcagaattttatgtgganacttggcnaagatatttnagtccaaaacttcaaattncacacccaaatatgtttgttggcttaatctatacttggacaaggcaacattttaatttttgctaagcttaacttanccgannggttgaaatgaaaatttcttctctcttgcntggaaaatnctgggtcagtatgttacttgtaagnc

SEQ ID NO: 1830 - DNA, 528 bp, Homo sapiens
  misc_feature 520, 524: n = A,T,C or G
actttatttttttgtttgtttttttcctttttggatcttgattgataactgccatgatattttgctttgatgtgtttctacatgtagttgcacacggttcagtaaaaataatgctgctatcgagtatgcaaatattgaagtatgatggtttgactgtatggcagtgttgtagcagcctcttgtttttttccccattgcctctttttttaaaaaacttataaagtcactttttatttttcctcagcttcaatgacgagagcaatattaagaagacattgctatctaatttttaatctttttaaatgaaaaaattcctatgttcagtagcgtggttgatgctattgtttagccttcccctccaaattgtatacattggcttggaatgttcacaacttgcgtgcgtggcagcggaagacgattcccatattctacattgctactgttttgtataaaataaattggtaaagattgcggctaaaaaaaaaaaaaaaaaaaaaaaaaagtcctcggccgcgacacnctanggcg

SEQ ID NO: 1831 - DNA, 563 bp, Homo sapiens
  misc_feature 160, 190, 254, 261, 262, 267, 274, 275, 316, 415, 433, 436,439, 446, 461, 468, 470, 471, 481, 487, 490, 497, 506, 516,519, 529, 540, 546, 551, 555: n = A,T,C or G
acgtgggtgaggggatggaggaaggcgagttttcagaggcccgtgaggacatggctgcccttgagaaggattatgaggaggttggagcagatagtgctgacggagaggatgagggtgaagagtattaacctgtgtgctgtacatgtgatacatacattanaagaaataaggaaaagaaaagaaatttatntgtaaataaatgaaaataatacttctccctgattataaagaaaattgcattctttttgtactcntttggannacctnctatganngaaaagtctttaattttgccactgaaagcattctggtttgntgctttttatatttttttatgcatatgaacattttaaaaagtagaatcggtaatatatagacttttgtcactatgttttgggcatatttatatggcagnaaatatatccttggcatnatnttnttaaaanctcgatgtatcccgngtacctncnngcggccgctntaaagncgnattcctnacactggcngtcgtactantgnattcgagctngggccaacttncgaatnatggncganctgttcct

SEQ ID NO: 1832 - DNA, 562 bp, Homo sapiens
  misc_feature 137, 329, 424, 434, 509, 513, 528, 540, 551: n = A,T,C or G
acaagcttttgtccaaaatggcacagcgagcacaaatgagttcctgtgtgataaagacaaaacttcaacagtggcacccaccatacacaccactgtgccatctcctactacaacacctactccaaaggaaaaaccanaagctggaacctattcagttaataatggcaatgatacttgtctgctggctaccatggggctgcagctgaacatcactcaggataaggttgcttcagttattaacatcaaccccaatacaactcactccacaggcagctgccgttctcacactgctctacttagactcaatagcagcaccattaagtatctanactttgtctttgctgtgaaaaatgaaaacccgttttatctgaaggaagtgaacatcagcatgtattttggttaatggctccgttttcacattgcnaataacaatntcagctactgatgccccctgggaagttcttatatgtgcaacaaagagcagctgtttcagtgtctggagcatttanatanatcctttgttctaanggctcacctttnatgtgaccaangaaagtttcta

SEQ ID NO: 1833 - DNA, 565 bp, Homo sapiens
  misc_feature 82: n = A,T,C or G
actgcccgacttcctcatcttactgggtccagcataaagcagatgtccactgtcttcctcacatgctgtgatcttggcttanaggtaggcacagtgccgctccagcagcgaggggttcgcgttacttaggaacagcagctcttttttcccttcttctgtaggagctttctcatgttgaagccaattgttttccaaataatactgaatacaactttcaaattcctttgggttatagttggaaaccaggatgggaataaagggatccagggcatcaaatccttcctttcccagcaactcctggggcagataggctttccggggcttaaagagagacccagtctggctcaaagccgacacaatggcgcctccatgccaatcatttttcatcattttcctcaagttgtgaacaagtgctaattcctcgggggcaatcgggcttttatcttctcttttcagagtggttcttccccaaagagcattgattccatccacggccactaggaggtgaaacatacccaaagaactttgctcttactctttcagcacaattccaactgatctgtgc

SEQ ID NO: 1834 - DNA, 253 bp, Homo sapiens
  misc_feature 144, 248: n = A,T,C or G
actatgctatgttggctaaaactggtgtccatcactacagtggcaataatattgaactgggcacagcatgcggaaaatactacagagtgtgcacactggctatcattgatccaggtgactctgacatcattagaagcatgccanaacagactggtgaaaagtaaaccttttcacctacaaaatttcacctgcaaaccttaaacctgcaaaattttcctttaataaaatttgcttgttttaaaaaaaanaaaac

SEQ ID NO: 1835 - DNA, 405 bp, Homo sapiens
actcaatctgaaagatgtagaagaaggagatgagaaatttgaatgacacccatcaatctcttcacctctaaaacactaaagtgtttccgtttccgacggcactgtttcatgtctgtggtctgccaaatacttgcttaaactatttgacattttctatctttgtgttaacagtggacacagcaaggctttcctacataagtataataatgtgggaatgatttggttttaattataaactggggtctaaatcctaaagcaaaattgaaactccaagatgcaaagtccaaagtggcattttgctactctgtctcatgccttgatagctttccaaaatgaaagttacttgaggcagctcttgtgggtgaaaagtatttgtacctgcccgggcgggcgctcgaaagggcg

SEQ ID NO: 1836 - DNA, 560 bp, Homo sapiens
  misc_feature 351, 550: n = A,T,C or G
actacgacatttctgccaaaagtaactacaactttgaaaagcccttcctctggcttgctaggaagctcattggagaccctaacttggaatttgttgccatgcctgctctcgccccaccagaagttgtcatggacccagctttggcagcacagtatgagcacgacttagaggttgctcagacaactgctctcccggatgaggatgatgacctgtgagaatgaagctggagcccagcgtcagaagtctagttttataggcagctgtcctgtgatgtcagcggtgcagccgtgtgtgccacctcattattatctagctaagcggaacatgtgcttcatctgtgggatgctgaangagatgagtgggcttcggagtgaatgtggcagtttaaaaaataacttcattgtttggacctgcatatttagctgttttggaacgcagttgattccttgagtttcatatataagactgctgcagtcacatcacaatattcagtggtgaaatcttgttgtactgcattcccattccttttcgttagaataaaataaagtgnatttcaaata

SEQ ID NO: 1837 - DNA, 563 bp, Homo sapiens
  misc_feature 317, 334, 336, 368, 370, 373, 377, 387, 468, 471, 479, 485,554: n = A,T,C or G
actgtgtggcgccttattctaggcacttgttgggcagaatgtcacacctgccgatgaaactcctgcgtaagaagatcgagaagcggaacctcaaattgcggcagcggaacctaaagtttcagggggcctcaaatctgaccctatcggaaactcaaaatggagatgtatctgaagaaacaatgggaagtagaaaggttaaaaaatcaaaacaaaagcccatgaatgtgggcttatcagaaactcaaaatggaggcatgtctcaagaagcagtgggaaatataaaagttacaaagtctccccagaaatccactgtattnaccaatggagaaagcancnatgcagtcttccaattctaatcaaaaaagaanangangaanaagagaaaantggtgaatgatgctgagcctgatacgaaaaaagcaaaaactgataacaaagggaaatctgaaaaagaaagtgccgagactncanaaaaaaanaaaaanaataaaaaaagtacgttttgtacaggcataaaattttaagaattcttaatctagggacttgctcctgtnttcctgaag

SEQ ID NO: 1838 - DNA, 562 bp, Homo sapiens
  misc_feature 30, 36, 73, 213, 357, 408, 477: n = A,T,C or G
acttttttttttttttttttttttttttanaacctntgcaattattagtttattagtatcatccaggactcanatgttcagtattcctcctgaaattacataaacaaatgcaaatggaaagaatccaagtctaaattatataacaaaacagcactccatcacaaaagcgtgtaaaattacaagaacgctattttaaaatactggcactttaanaaaacgataatctcgaaaaccacaaaattgccaaattgttccctaaactcttaagcagataaacatgactaatgaatgagtttgttttgtaaagaaaaatcattcaaataaattgaataattcatactgagatgcaaaggttgncttctttcttcctatctacttggatttataaaggggcaaaccgtaatatangaaaatataccctattttgaatgtggcatctttgtttgaaaagctggccattaattaaaaatacttgtnatggaaagctcgtttcctgagcagccatatttagataaatgggaaaagacatctataccagcattttctagtcttcctgagacta

SEQ ID NO: 1839 - DNA, 562 bp, Homo sapiens
acagaagttttcatctatgaacatggcctcatcatcacctgcagccttggccttggcctgttcttcaaaaagctgccgctgccgcatgggatcattcagctcagtatacgcattgcatatctctttcttcatgacaaacagctcaaagcgcttagtcagaccctctttagagcggtgccatttagccaaagggctcattatctgtgggtgatcacagatgaatgtaggattgatgcaagtcacttccaggaactccccaacaagcttgtcaaggagcctggctgtggtccgaggtggagggcattcaacagcttttgccacacagatatcatcaagaattttgcgagtttcttcagtttcaaagaggttcgtttctggcagcttcatccccagggctttctcaagctcttctaccatgttgattcccggaagggtggggtgaagtcaacatcgtagcttggccctctgggccatctgggtggaggtgaccttgtaactgcctgtaatatgcttcaccatccctgaaaccatcttctccgtgatttcatgagtcgtgatagtc

SEQ ID NO: 1840 - DNA, 563 bp, Homo sapiens
  misc_feature 256, 316: n = A,T,C or G
gccctttacatcgctgagagccgcctgtcttggttagatggctctggattaggattctcactggaataccccaccattagtttacatgcattatccagggaccgaagtgactgtctaggagagcatttgtatgttatggtgaatgccaaatttgaagaagaatcaaaagaacctgttgctgatgaagaagaggaagacagtgatgatgatgttgaacctattactgaatttagatttgtgcctagtgataaatcanccgttggaggcaatgttcactgcaatgtgcgaatgccaggccttgcatccagatcctggnggatgaggattcagatgactaccatggagaagaatatgatgtggaagcacatgaacaaggacagggggacatccctacattttacacctatgaagaaggattatccctctaacagcagaaggccaagccacactggagagattagaaggaatgctttctcagtctgtgagcaccagtatatatggctggggtcaggacagaagattcataagagattatgaagatgggatggaggtggatccaccca

SEQ ID NO: 1841 - DNA, 562 bp, Homo sapiens
  misc_feature 372, 508, 546: n = A,T,C or G
acgtgcacctcctgtttcaaaaacgcaagcagaaaataggtctggacaagggcaagctgcaactcaatttctgctgcaaccctagctcaggtaagttatgtttattccttcactttgctgatatagtcagtgagtctgttgatgccttcttcctgctgttctagggcatccaggacaatgcccatcggtgtcctcttcaaacctattccttccattttattctccagtttgttcttgaggttccgaagtctcaacgatgcatggataaacatcaacagcaaaggaaaagtaatgccaaacacaaagaccatgactcctccaaacatggagataaggaaatagctcgccaacatgaccaccataacgaacgtngtggggtagcgcttcttcatccggcgaaggacgtctttattgtgggctgccacacaaaccctgtgaacaccagcaccaccacgattcctcccaggatcatgttgaagggactcagaaacccccaatggaaatcatnatggcagccccaccaggtagttggtctggaatagacangtgctcactaccggtg

SEQ ID NO: 1842 - DNA, 549 bp, Homo sapiens
  misc_feature 357, 434, 437, 516: n = A,T,C or G
acgcggggctttttcctctcttcagcgtggggcgcccacaatttgcgcgctctctttctgctgcttcccagctctcggatacagccgacaccatgggtttcggagacctgaaaagccctgccggcctccaggtgctcaacgattacctggcggacaagagctacatcgaggggtatgtgccatcacaagcagatgtggcagtatttgaagccgtgtccagcccaccgcctgccgacttgtgtcatgccctacgttggtataatcacatcaagtcttacgaaaaggaaaaggccagcctgccaggagtgaagaaagctttgggcaaatatggtcctgccgatgtggaagacactacanggaagtggagctacagatagtaaaagatgatgattacattgacctctttggatctgatgatgaggaggaaagtgaanaancaaagagctaagggaagaacgtcttgcacaatatgaatcaaagaaagccaaaaaacctgcacttgttgccaagtcttcntcttactagatgtgaaccttggatgatgaacaa

SEQ ID NO: 1843 - DNA, 549 bp, Homo sapiens
  misc_feature 361, 499: n = A,T,C or G
actaccaggtattggttcgtttacaattattgatggaaatcaggtcagcggagaagatgctggaaacaatttcttccttcaaagaagcagtatcggcaagaaccgagctgaagctgccatggaattcttacaagaattaaatagcgatgtctctggaagttttgtggaagagagtccagaaaaccttctagacaatgatccctcatttttctgtaggtttactgttgtagttgcaactcagcttcctgaaagcacttcactacgcttagcagatgtcctctggaattcccagattcctcttttgatctgtaggacatatggactagttggttatatgaggatcatttataaaaagaacatncagtaatagaatctcatccagataatgcattagaggatctacgactagataagccatttcctgaactgagagaacattttcagtcctatgatttggatcatatggaaaaaaaggccacagtcatactccatggattgngatcatagctaaatatttagcacagtggttagtggaacaaatggacgaat

SEQ ID NO: 1844 - DNA, 488 bp, Homo sapiens
  misc_feature 367, 440: n = A,T,C or G
acatcctacccctctcccattcccagagccacctaagagaagtaaaaaactattgcgatgttgtcactgggagatttttgctgaatcaaacaacaaaacagaaacatgttggagactgatgtctttggtgcaaagaaagaaatcacagaggaggtgaggcccatgctgttgccgttggccccagggatccatggtcagctttgactctcaccaaatgcccaggtgtggaccgatggttgggctggttgtattgatgctttggtaaaatcctttcctcgctctgggccttattcctctctcacccagtggtccctggaatttatgcccgtttgcgcctgccttcaagatttctgaagttgcttggctnagcttcatctcagcaaactggattgagtgttcgtggcccttccagtggaaccagttaacgccctgactgtggntattgtccccatatctccccatcaaggtgacacggtgacagttcctgt

SEQ ID NO: 1845 - DNA, 548 bp, Homo sapiens
  misc_feature 34, 200, 269, 288, 295, 300, 318, 326, 431, 444, 533, 540,546: n = A,T,C or G
actttttttttttttttttttttttaattttganatggaattttgctcttgtcacccaggctgtagtgcaggggcgcgatctcggctcactgcaacctccatctcatggtccaagtgattctcctgcctcaacctcctgagtagctgggatcacaagcacacgccaccacgcctggctaatttttgtatttttagttganacggggtttcactatgtttgccaggttgatcttgaactcctgacctcaggcagtccacccaccttgatntcccaaagtgctggtattntaggcgngagtnactgtgccccggccaaanaaaacttntttaatgctgaaggccacactttttcccatgcatagcactgttaccaatctaaatagatttcacaactgatttggtagcctgacccttggtgtcaagctgttcgncttccactgcttntatcctgggagaagtgaaagctcatttgctttgttcttttacaagtaaagctaataaatgataatgtttggttttgacatttaatctgngctaaanacactntg

SEQ ID NO: 1846 - DNA, 571 bp, Homo sapiens
  misc_feature 6: n = A,T,C or G
gcgtgntttgttgccgaggtacaggtagaagcttgattgctaggcccaggcccacccagaccctccaatcctaacaggtatttaggcttgaggttcactccctcctcagctgcacacgcagccaggtataacactcgccctcagtcacaacggggagggggcaccggttacatctacatcacattatttataaaataagaattacatttcatataacatggccagaaggagctctagtcccccaggaaagctgccggggacagcatttgagcctcttctttgcacaggcataacttaactatacagctaattcctagttaatagcatttatacttaaccacctcaatgaaccaagcttgaaggaatttaaaaggcaatttagcttaaatacaaaaataaatttttgttaaaaaacgtttaaatatttttttcttttaatttagacacacgcattcatacttctcccaaagaggctgggcgtgacagcaaggcgcttgggcctggggtatgtggtttcagaaggacggaaggaaaggatgggctgcagagggcctgtttgggaaaaatagga

SEQ ID NO: 1847 - DNA, 345 bp, Homo sapiens
  misc_feature 35, 110, 135, 181, 185, 186, 198, 214, 222, 236, 240, 249,273, 289, 297, 303, 306, 313, 345: n = A,T,C or G
ttcgcccttttttctttcgcccgggcaggtactgnaattgagcatccggaatatggagaagtaattcagctacagggtgaccaacacaagaacatatgccagttcctcgnagagattggactggctaaggacgancagctgaaggttcatgggttttaagtgcttgtggctcactgaagcntaanngaggatttcctngcaatgaagtagaatnacccttcnctcccttgtcacangggntaaaaaccncacagcttgtataatgtaaccatnttggggtcccgcattntaacttgngacaantgnaactccntcatgcaataaactgaaaagaagcccgtaagn

SEQ ID NO: 1848 - DNA, 510 bp, Homo sapiens
  misc_feature 4, 6, 20, 55, 60, 82, 89, 127, 140, 170, 183, 186, 202, 226,237, 244, 246, 267, 281, 295, 314, 320, 324, 326, 366, 370,377, 381, 384, 391, 397, 401, 429, 453, 458, 460, 461, 463,468, 472, 476, 478, 488, 501: n = A,T,C or G
gcgngntttgttttcgaggnacctcgttttcaggttcatccatctccagtggaangtttncaataaaagatgaagaaaatgngtgtganctttaataacacatccctatagaaagtggataaaaganataccaaaactgnaatacagatatatacaaatataggggcctntttgattactctngtntgtctagtatggcctnggaaagaaaaccaagcaagcaagngtgctgcctantctatangnaatattttattacacatgacngatatttttgtggnagggaagtgggatnctcctcagatattaaaggngatacngatngnatttatctctaaagaattaacaaccttagaaaatgcccgnttcntccatcnattnctngaaaggncttcgngganttatatagaggggagctataataaacantaactctagatgggggatttaaantgccnanngnaaganaaanaatngngaggctggantcactaccaagangaacttcac

SEQ ID NO: 1849 - DNA, 417 bp, Homo sapiens
  misc_feature 17, 107, 159, 196, 202, 210, 211, 212, 222, 225, 227, 233,251, 257, 261, 262, 296, 313, 314, 319, 336, 364, 379, 384,389: n = A,T,C or G
accattttatcactgtncaaagcactgtcaaattcctttcatcctttaatagttaagatctttgaatcttcagtctgatttttaatgtaagcaaaaacagaaccatngagtagtaatttcttgagaacctcaggtgttctataaacagtcctttcctgnatgtcttctattaccctaagaccagagttattttggngtgggnggtatggnnnattttttgtnttngnatccanggctggcactttactcantgcctngagnntattgccccataactaaaggatcaggatgatggnagaacggagatctgggnntaaanagctttccccatttaanaaaaaatagatcttgagaatctgattcntttccaaacagcccngcttncatgnacctgcccggcggcccgtcgaaagggcg

SEQ ID NO: 1850 - DNA, 552 bp, Homo sapiens
  misc_feature 18, 385, 402, 423, 489, 547: n = A,T,C or G
accagcagtgtgtcaggngctgcagagcgttcttggagaaggcccactgaggcaggttcgtgccctgctgcggccagcctgactagaccccaccctgaggtcctgcatttctcagtcggtgtgtaatcacgttccagggcccaaagcccagctctttgttcagttgacttactgtttcttaccttaaaaagtaattgtagatggaaatcagttgtgtttggcaggagaatcaataaaaatctttgattcagacagcttatggggtattttaagcattcttagactagttgaacatctcactttgccccagttacaaaaatagtagaacaagcaacataaaacaatgaaggaaaacctcacttgaaggcccaggtcaacatctaancctgttgagacttaaanaatccgagtctacctcttcantaggtttgtgtggatggcctggagggcaagtgccctctgctccccagtgctcctctctcttcctanggccttttgtggattgacagtagcccctccgtaggactcacagcctaattagaagggnttaaa

SEQ ID NO: 1851 - DNA, 334 bp, Homo sapiens
  misc_feature 74, 84, 99, 121, 130, 225, 261, 273, 276, 287, 304, 309, 321: n = A,T,C or G
accgcgggggcgtggcggcggtggcggctgcggcaacagcggggccgatgtgtagttggtgactgcctctccanatgctgaggngcctgtatcattggnacaggccagtgctgaaccgtangtggagtangctgtgccttctgaagcagtatctattcacaatgaagttgcagtctcccgaattccagtcacttttcacagaaggacttgaagagtctgacaganttatttgtcaaagagaatcaccaaattatgaatagnagggaggagcanganggatttattanatggagtaaagcctcangattntattttcccccnttgggtgcctctt

SEQ ID NO: 1852 - DNA, 562 bp, Homo sapiens
  misc_feature 410, 486: n = A,T,C or G
accttttggtgccagcgtttcaaggagccctcaccatgaaacaagtcaaccccagcaagcgtctagatcatttgcagcgggctcgagaacactttataaactacttaactcagtgccattgctatcatgtggcagagtttgagctgcccaaaaccatgaacaactctgctgaaaatcacactgccaattcctccatggcttatcctagtctcgttgctatggcatctcaaagacaggctaaaatacagagatcaagcagaagaaaggagttgggagcataggttgtctgcaatgaaatctgctgtgggaaagtggtcaagcagatgatgagccgtgttcgtgaatattatcttcttcaccttcagaggtggattgatatcagcttaaaagagattgagagcattgaccangaaataaagatcctgagggaaagagactcttcaagagaggcatcaacttctaactcatctcgccaggagaggcctncagtgaaacccttctttctcactcggaacatggtcaagccaaagttttggagctggtattcaagtctgccactatg

SEQ ID NO: 1853 - DNA, 315 bp, Homo sapiens
  misc_feature 301: n = A,T,C or G
acctgaggaagcggtttggaggccagcggatccaggtctacctttcccttctgtccctgctgctctacattttcaccaagatctcggcagacatcttctcgggggccatattcatcaatctggccttaggcctgaatctgtatttagccatctttctcttattggcaatcactgccctttacacaattacagggggcctggcggcggtgatttacaccggacaccttgcagacggtgatcatgctggtggggtctttaatcctgactgggtttgcttttcacgaagtgggaggctatgacnccttcatggaaaag

SEQ ID NO: 1854 - DNA, 551 bp, Homo sapiens
  misc_feature 173, 213, 277, 278, 287, 288, 290, 307, 309, 314, 319, 345,387, 546: n = A,T,C or G
actccagcaagaggaaatatgacactcccaaaacgaagaagaactgattggggcttccacagccctcctctcccaagaaatccgggctcctctcccaagaaatccaggtgctttccagactccaaagggtatcttaaatgcaatctcttctctcttagcccttggccactttntcctggatcctgccctgctctcagccatagtgaaggaccnccctaggagtctgcgagagcctccttggttccatcgtgaagccataaacaggaatgcctttggnnataaccttnnancctagaggggcctctgntnccccnctgangtgctgtgggtttattgctggcaacntgaattctctcaggggtctatgaggggcattttggagactgnctgacaccatccctatccctgctccccctctcagaagagggtggaagatgaaatgaaagctatgggactcttgaagatacccagtgtctattctgggttagagaagtgcttactaaggggtttctaataaaacaaatgcccaaaaaaaaaaaaaaaaanaaaaa

SEQ ID NO: 1855 - DNA, 563 bp, Homo sapiens
  misc_feature 504, 539, 562: n = A,T,C or G
acaaaaatttgaaagtgtgacaatgacaattatgaaatcctgtgactgaaagtcccctcgagtgcactctgtggtgcacatgcgcccgcccacacaaactctggcatggaaacataaactaatgcaaaccagtgctacccagaagcaccaacacgtgtgttctccattccaccaatcacagaccagtatctactccaaacatccagtaacgaaaactatggcatcttcccaggaacagcaaggcaggcttcttactcacgatgaaccagcacgaataaacccagcaaaaagagaactgcatacttaaatttaggatagtcattcatgaggatcgtcacaattccaatataaggaacaaatcccctggctctccccacaacatcttttttctctagccaatgttgtccttgtttatagaggcctcggtcatcaaccgcattattatctcctttgggtcaaaaacttgatatgcccattttgcttttcatgaatcttcaagactcngtgaactattaggaatctctcttccttctatcctnaaacaacaattttttccactcgnt

SEQ ID NO: 1856 - DNA, 381 bp, Homo sapiens
acagttggagtctgtgtgttttcttgaatgtttgagacagcttcaccttgaactttgaatttctcagcagctgctagttgtgcttgctgggataaatcttcgatcttggcttccccaaaaactatgtaagtatctgaagcagggctcttgtagacatctggttttgtgatgacaaagaggatattcttagatttccggatagtgactctagtaactcctgtagcctgccgaagacccagtttggacatagccttccgtgccttcttttcactccgactctgttttgctttactgactggttcttcatcgatttcagctgctgccgccagctgggcttgttgtgtggttgcctgggtggaatcctgttcttcaagctctggt

SEQ ID NO: 1857 - DNA, 557 bp, Homo sapiens
  misc_feature 435, 439, 455, 473, 514, 521: n = A,T,C or G
acaagttcggctttgagcttcctcaggggcctctgggaacatccttcaaaggaaaatatgggtgtgtagactactgggtgaaggcttttcttgaccgcccgagccagccaactcaagagacaaagaaaaactttgaagtagtggatctggtggatgtcaatacccctgatttaatggcacctgtgtctgctaaaaaagaaaagaaagtttcctgcatgttcattcctgatgggcgggtgtctgtctctgctcgaattgacagaaaaggattctgtgaaggtgatgagatttccatccatgctgactttgagaatacatgttcccgaattgtggtccccaaagctgccattgtggcccgccacacttaccttgccaatggccagaccaaggtgctgactcagaagttgtcatcaagtcagaggcaatcatattatntcanggacatgcccatcatngcgtggcaagagccttcnggttcaaaaagatcaggccttttatcctgggctgcaacatncttcganttgaatattccttactgatcctatgttagcggtccc

SEQ ID NO: 1858 - DNA, 408 bp, Homo sapiens
acgcgggacacttggccaaccatattttattttttatatttttattttatttgatccttgttctgaaaccataaagtgagtttaacatttctggctgggcacagtggctcatgcctgtaattctaacactttaggagaccaaggcaggaggatgccttgagcccaggagtttgagaccatcctggacaacataatgagaaaagaaaatacaaaaattaaggggtgtggtgacacatgcctgtagtctcaactatttgggaggctgaggcaggaggattgcttgagcccgagaggttgaggctacagtgagccaggatcgtgccattacactccagcctgggcgacaagagccaaactcaaaaaaaaaaaaaacaaaaaaaaaaagtacctcggccgcgaccaagggcg

SEQ ID NO: 1859 - DNA, 458 bp, Homo sapiens
  misc_feature 422, 435, 452: n = A,T,C or G
actggatggccccacaagatgctgccactttaataaggctgcaatacactgtgtatcttacaggagtattcttatccatcccgtggaaaaggttgcttaacaactgcagtctcagagacgggcgttcaccttcgcgaaatttgaccagcttttcacataggctttcaatcaaagcttcttgcttgtctggttccaggatcaagagtagggataccacactgttcatcacactttcaacatctttatcatcctccttcagacacacatcacaggcttcaataatttgagctaaatcaacatgaagtccaccttccgagttctcttctgaaatctcagctcctttagatttcagataagcacgaagctcagcagcctgatcttcttcactgatgtcgatgaaggccgggacgctcatggtgcangcccgggcacagnggacactccactcgccnccgcgt

SEQ ID NO: 1860 - DNA, 449 bp, Homo sapiens
  misc_feature 236, 241, 268, 334, 347, 348, 358, 373, 397, 411, 415, 421,426, 449: n = A,T,C or G
actgtttttcagtatttggggagggtggtttgagcagcatttattgacaatttcattagtggggatgtttctattgaaaacagggttaggaagtcataaaatgttcctgcaatataaggtaataataccaccagcgtttatcttactgttttcatgttctaagtgcatgcatctgagtaaaaggatctgggctgcagtccagtctgagagatgccagcaaaggcttcctaggccanttcantccagtaaatccctcttcgatcttctnttccacacagacagcagtgatgagcatgcccatgaactcacatgattattttggggaaaatgaaanagttgtattcttnnttgaggtagnaattccactttcaangggcaaatacatttttgattattnttatcacccttcantgangttgtntttgntctttaatcaaggatgtatgttn

SEQ ID NO: 1861 - DNA, 401 bp, Homo sapiens
  misc_feature 390: n = A,T,C or G
acgcggggaggaaagccgtgcgttgcgttccaaggcatctgtgagcccgcggagtatacaccatgagcaaagctcaccctcccgagttgaaaaaatttatggacaagaagttatcattgaaattaaatggtggcagacatgtccaaggaatattgcggggatttgatccctttatgaaccttgtgatagatgaatgtgtggagatggcgactagtggacaacagaacaatattggaatggtggtaatacgaggaaatagtatcatcatgttagaagccttggaacgagtataaataatggctgttcagcagagaaacccatgtcctctctccatagggcctgttttactatgatgtaaaaattaggtcatgtacctgccccggcgggcgntcgaaagggcg

SEQ ID NO: 1862 - DNA, 563 bp, Homo sapiens
  misc_feature 438, 556: n = A,T,C or G
acatatttaattatgtaaaatattaaaacaccaccattacaaaacttctaaaatatttttaaattcagtaataaatttttaaaatattttttacaattcctacatgcacttattatataagtcttaataagagagcattcaatttgctgctggcatacaaaggaagctactttgaagtataaaagctatacacaagaaatgttcttatctggtttcaggttttttagctttctccccaaacaaatcacataaaacagaagggagagatgagcaaaacagaggtgtattactgaaaattcatactaatctttaggcaaagctcatcaatgccagtatctcataatagacagagattttgcatataataaaaccccaccaccatgtaataataaccaccttaatggctttttcggtaaaaaaatttaagctgaatcagangagagaaagacttttaaaaaataatttaaaaaagaattcatggtgcttcatttaaaaagaatacttggtgttttcacgcagatatggattctctcacattaaggtaccagcaaatggngagcctg

SEQ ID NO: 1863 - DNA, 562 bp, Homo sapiens
  misc_feature 93, 95, 108, 273, 313, 328, 336, 345, 372, 414, 422, 425,441, 447, 452, 454, 455, 458, 462, 469, 473, 483, 485, 489,497, 502, 513, 524, 534, 536, 539, 541, 546, 550: n = A,T,C or G
acgcgggagaggtggtggggaccagggctatgggagtggcaggtattatgacagtcgacctggagggtatggatatggatatggacgttccananactataatggcanaaaccagggtggttatgaccgctactcaggaggaaattacagagacaattatgacaactgaaatgagacatgcacataatatagatacacaaggaataatttctgatccaggatcgtccttccaaatggcttgtatttataaaggtttttggagctgcactgaancatcttattttatagtatatcaacctttttgtttttaaantagacctgccaaggnagctgaanaccttttanacagttcccatctttttttttaaattntttctgcctatttaaagacaaaatttgggaccgttttggatnaacctgantantttttctttttccagntttttnagatngnnccncttnatgttantggnacctagcatnanttgnttcctggnaaatnttggccaaacngacttaaaaanaattaatgtngnatncnggggncatntttaaaaaaccc

SEQ ID NO: 1864 - DNA, 483 bp, Homo sapiens
  misc_feature 219, 268, 286, 289, 376, 401, 414, 415, 422, 427, 432, 444,451, 453, 459, 481: n = A,T,C or G
acaagttcacactcgccccacgggcaagtatatcatagagggaggaagccactgcttcggtcttgattgtggagtgaggttggccccagtgatctagccagccagtatagaattcagaattgatcaagggtcctttgggctcacacttcctctggcttaggaaagcatctgtgatgttgctgcctgttccaaagtccaccgtggtgtagaggccctgcngggccccacatttcaggaatgttttatgtgctccatcagtggtaaacanaaccacatcatcccccanatngtggcgaaagcgcttctgcaggaagcgcatgtagtcaaaatcgcaggcaaagtatctgccatattcattttcaacctgcactgtgtntaactggcccttcattcctgatagnggagagccttatnnttgggcnagaangactnccaaacacttgntccacancntgccangtaaactgggtctgagtgaccngg

SEQ ID NO: 1865 - DNA, 562 bp, Homo sapiens
  misc_feature 224, 556: n = A,T,C or G
acccaaatataaaatacttgtttaaatgtagagtttcatatcctttaaacctcaccataaacatctctgtggaatctttcatagggaacaattatagtgttgataagtccacccccttaatcagcacatacccagaaaagtaattttgatcagagaagttgctcctacagaaataacaatgtgttaatgacaagaaaaagaacccacatctttgagctgcaganatgccagcatctaacaacctgatgccttatgctgggacacatgacttatttttgagtcgattatttatttatttgtttttttaaacaagcgcatgccaccatgtctggctaatttggtttttattttattttatttttttgtagagacaaggtctcactatgttgcccaggctggtgtcaaactcctggcctcaggcaatcctcctgtctcagcctcccaaattgctgggattcaagtgtgagtcaccacacctggccttattttcgagttttaaaggcaattttcttggccagtgagactccatgttgaagtcagtatggtctggggggtngaaaaa

SEQ ID NO: 1866 - DNA, 561 bp, Homo sapiens
  misc_feature 318, 397, 453, 493, 498, 528, 548, 557, 559: n = A,T,C or G
acaccttgaaggcgaggttaattaaatcctgttgtggagtttgagggccggaatttaatttttggagttttatttaatatcgggagcagattgggtaataaaatgtatattgagaataagacggccttttgaccttttagggtctagggctgtaaagtgtctcagggttactgccgaacgagccatgaactgggctgggtttttatatttgatgaaaaagagcctaaacgcttctgatttgggataaagaaaaaggagcattaaccttgactatgtctttagctccagccacctttttaagagtaaattgctgggcangtgggggagggctagtcacggaacgaaactgtaagccggaccaggtgtgaggaggggaggtgataaaaagattacaggntggaggaagtggagcctgaggaagaattggggacctaacttggcgtggagaagganggggagaggtcatatgggtttgtagaaaaaggaagattanacacnctctgcaacgccctggggttgggacttganggggacaaggtggggaaggnaaaagaaananaa

SEQ ID NO: 1867 - DNA, 549 bp, Homo sapiens
  misc_feature 381, 397, 423, 449, 462, 470, 474, 477, 486, 489, 500, 501,508, 511, 512, 518, 522: n = A,T,C or G
acagccaacggtttcccttgggggctttgaaataacaccaccagtggtcttaaggttgaagtgtggttcagggccagtgcatattagtggacagcacttagtagctgtgggggaagatgcagagtcagaagatgaagaggaggaggatgtgaaactcttaagtatatctggaaagcggtctgcccctggaggtggtagcaaggttccacagaaaaaagtaaaacttgctgctgatgaagatgatgacgatgatgatgaagaggatgatgatgaagatgatgatgatgatgattttgatgatgaggaagctgaagaaaaaagcgccagtgaagaaatctatacgagatactccagccaaaaatgcacaaaaagtcaaatcanaatggaaaagactcanaaccattatcaacaccaagatcaaanggacaagaatccttcaatgaaacaangaaaaaactcctnaaacaccnaaanganctatttctnttnaaagacattanngcaaaantgnnagctantttntaaaaagcgcatttgacagtcctgggc

SEQ ID NO: 1868 - DNA, 562 bp, Homo sapiens
  misc_feature 455, 541, 551, 554, 561: n = A,T,C or G
acgcgggtattgaaggtggagtagcaaccgggcattatattatctcttggaaaaggacctcagcaatggagaatatccccatcatcacaactgtcatcactctgccgcacgtgattgtggagaatatccctctccatgtgaatgcagatctgccgtcatttgggcgtgtcagagagtcgttacctgtcaagtatcacctacagaataagaccgacttagttcaagatgtagaaatttctgtggagcccagtgatgccttcatgttctcaggtctcaaacagattcgattacgtatcctccctggcacggagcaggaaatgctatataatttctatcctctgatggctggataccagcagctgccatctctcaacatcaacttgcttagatttcctaacttcacaaatcagctgctcaggcgttttatacctaccagtatttttgtcaagccacanggtcggactcatggatgatacctctattgctgctgcatgatgttcaaaaccggcccttggctgttgttacaaaaatgtttgggcanagctatgcanggngtttcant

SEQ ID NO: 1869 - DNA, 561 bp, Homo sapiens
  misc_feature 505: n = A,T,C or G
accgggggaggcaagatggcggcaaccaagaggaaacggcgtggaggctttgcagttcaggcgaagaagccaaaaagaaacgaaatagatgcggagccgccagctaagcggcacgccacagcagaggaggtggaggaggaagagagggaccggatcccaggccccgtttgcaagggaaagtggaaaaataaggaacggattctcatcttttcttccagaggaataaattttagaacaagacatttaatgcaggacttgagaatgttgatgcctcattctaaagcagatactaaaatggatcgtaaggataagctatttgtgattaacgaggtttgtgaaatgaagaactgtaataaatgcatctattttgaagctaagaaaaaacaggatctctatatgtggctttcaaattcacctcacggaccatctgctaaattccttgttcaaaatattcataccctcgctgaactgaagatgactggaaactgtttgaaaggttctcggncccttttgtctttttgacccctgctttttgatgaattaccacattattgctttgtt

SEQ ID NO: 1870 - DNA, 320 bp, Homo sapiens
  misc_feature 259: n = A,T,C or G
acgcggggctaagtgtttccggtggattcccagggactgtcggaggtgtggactctgcctgcctacctggtctgggaagatattctaccatatctccctagagcacgaaatcctgctgcacccgcactacttcggccccaacttgctcaacacggtgaagcagaagctcttcaccgaggtggaggggacctgcacagggaagtatggctttgtaattgctgtcaccaccattgacaatattggtgctggtgtgatccanccaggccgaggctttgtcctttatccagttaagtacctcggccgcgaccacgctaagggcg

SEQ ID NO: 1871 - DNA, 526 bp, Homo sapiens
  misc_feature 472, 477, 479, 519: n = A,T,C or G
aacagttggagtctgtgtgttttcttgaatgtttgagacagcttcaccttgaactttgaatttctcagcagctgctagttgtgcttgctgggataaatcttcgatcttggcttccccaaaaactatgtaagtactggcttttcaaaaaaacagaacaaaaaaaacccaaaaaaagtctctcacacataagccaggtggacctgaaagagccaaggggcaggaacaatggctgtttcagcagctactcaatagcgaagggtcagcgtcccactcccatgccttggcaccgcatcagatgtcctggagcccttgataccatcctagaaggctttgtttgaggctccttaataaaagagggcaaggcgaagagaaagaagaccaggacagccagaagcaaggaccactggacgccttggccaggtgcctgcatctccacaagcaggacctcatggtggtgggtcgggttctaganggaangntctgcatgtcctcccgcgtacctcgggcgggaccacgctnaagggcg

SEQ ID NO: 1872 - DNA, 526 bp, Homo sapiens
  misc_feature 306, 317, 320, 321, 332, 337, 341, 346, 348, 378, 382, 401,414, 421, 424, 429, 432, 440, 447, 455, 456, 461, 483, 488,489, 490, 516: n = A,T,C or G
acttttttttttttttttttttggtagttctcacagtttaatagaaagaatgcatttttttggtatgcagttccttttagaaataacaaaatagaaaatgagttcaaccattgctttatagaaaacagggaaatgtccttcaattgagcatttcttttcctcacattaataaagtctgcacacacctcctatgttaacaggaaataggaatttcagataacaaatgtgaaaagttgaaataatcctgacaaatttttcaaatcaattgttgaaaatatttatttagaaaaaaatatttagttgganaacagacgaanccnnagaaaaacacncttcntgtnaacancngaacactatgctaagtttagttctacaatnaaangccacacaaatctgtgggnggctaaggatgangattccnagnaaaanganaaaagaanatttganagagaggnngaatntaaccctttgcttactgcaggncttgnnntgggagggagaaccctctggaaaatnattaagttta

SEQ ID NO: 1873 - DNA, 562 bp, Homo sapiens
  misc_feature 270, 385, 418, 505, 531, 534, 552: n = A,T,C or G
acgcgggatccaaccctgaagatatttagagatggtgaagaagcaggtgcttatgatggacctaggactgctgatggaattgtcggccacttgaagaagcaggcaggaccagcttcagtgcctctcaggactgaggaagaatttaagaaattcattagtgataaagatgcctctatagtaggttttttcgatgattcattcagtgaggctcactccgagttcctaaaagcagccagcaacttgagggataactaccgatttgcacatacngaatgttgagtctctggtgaacgagtatgatgataatggagagggtatcatcttatttcgtccttcacatctcactaacaagtttgaggacaagactgtggcatatacagagcanaaaatgaccagtggcaaaattaaaaagtttatncaggaaaacatttttggttctgccctccattgacagaagacaataaagatttgatacagggcaaggacctacttttgcttactatgnatgtgggcttatgaaaagaacgcttnaanggttccaacctactgganaaacaggggt

SEQ ID NO: 1874 - DNA, 175 bp, Homo sapiens
  misc_feature 151: n = A,T,C or G
acgcggggaccgcggggcggacgggagcgagtatgtccgctctgactcggctggcgtctttcgctcgcgttggaggccgccttttcagaagcggctgcgcacggactgctggagatggtggagtccgtcatgccggtggtggtgtactttntttttttttttttttttttttttt

SEQ ID NO: 1875 - DNA, 538 bp, Homo sapiens
  misc_feature 233, 333, 336, 386, 448, 483, 493, 516, 530: n = A,T,C or G
acgcgggaggaactgctcagttaggacccagacggaaccatggaagccccagcgcagcttctcttcctcctgctactctggctcccaggttccactggagaagtagtgatgacgcagtcgccagccaccctgtctgtgtctccaggggaaagggccaccctctcctgcagggccagtcagactattagcaccaacttagcctggtatcagcacaaacctggccaggctcccangctcctcttgtttggaatagacactagggccaccggcatcccagccaggttcagtggcagtgggtctgggacagagttcactctcaccatcagcagtgtncantctgaagactttgcagtttattattgtcaacaagtataataagtggcctngggtcactttcagccctgggaccaaagtggagatcagacgaactgtggctgcaccatctgtnttatcttccgccatctgatgagccaattgaaaatntggaacttgncctctgttgtgggcctgctgaanaacttctatcccanagaagggc

SEQ ID NO: 1876 - DNA, 560 bp, Homo sapiens
  misc_feature 500, 557: n = A,T,C or G
acggatgtggcagcgagaggactagacattcctgaagtcgactggattgttcagtatgaccctccggatgaccctaaggaatatattcatcgtgtgggtagaacagccagaggcctaaatgggagagggcatgccttgctcattttgcgcccagaagaattgggttttcttcgctacttgaaacaatccaaggttccattaagtgaatttgacttttcctggtctaaaatttctgacattcagtctcagcttgagaaattgattgaaaagaattactttcttcataagtcagcccaggaagcatataagtcatacatacgagcctatgattcccattctctgaaacagatctttaatgttaataacctaaatttgcctcaggttgctctgtcatttggtttcaaggtgcctcccttcgttgatctgaaccgtcaacagtaatgaaggcaagcagaaaaagcgaggaggtggtggtggatttggctacccagaaaaccaanaaagttgagaaatccaaaatctttaaacacatttagcaagaaattattctgacagcnggc

SEQ ID NO: 1877 - DNA, 559 bp, Homo sapiens
  misc_feature 339, 361, 368, 378, 400, 435, 459, 483, 485, 490, 497, 506,507, 545, 547, 554: n = A,T,C or G
acgttgaaggactttgctgggttctgagtgtttgtccctcacataggattccagaacagtgctgctgggttatgagcgtttgtccctcacataggattccagaacactgatactaaggtctgaatgtttgtccctcagataagattacagaacacatctacgagggtctgtatgattgtccctcacataggattccagaacacagtggctgggttctgagtgtttgtccctcatatagaatttcagaacactgctacaaatttctgaacgtttgtcgctcacagaggattccaagaacactgtggctgggttgtgtttgccccccacataggattccanaatactgctgctgggttctgantgtttgncctcacgtangattccaaaacactgctatganggtctgaatatttttgcctcttaaaaggattccanaacactgctgctcagttgtgttgnttgtccctcacaagggactccaangnactgntgcaggnttttgaaanntttttccctcacataggaattccagaacactttttacnanggtctgnaatgt

SEQ ID NO: 1878 - DNA, 560 bp, Homo sapiens
  misc_feature 410, 480, 537: n = A,T,C or G
acagatggtgattacagaagcccagaaggttgataccagagccaagaacgctggggttacaatccaagacacactcaacacattagacggcctcctgcatctgatggaccagcctctcagtgtagatgaagaggggctggtcttactggagcagaagctttcccgagccaagacccagatcaacagccaactgcggcccatgatgtcagagctggaagagagggcacgtcagcagaggggccacctccatttgctggagacaagcatagatgggattctggctgatgtgaagaacttggagaacattagggacaacctgcccccaggctgctacaatacccaggctcttgagcaacagtgaagctgccataaatatttctcaactgaggttcttgggatacagatctcanggctcgggagccatgtcatgtaaagtgggtgggatggggacatttgaacatgtttaatgggtatgctcangtcaacttgacctgaccccatttcctgatcccatggccaggttggttgtcttattgnaccatactccttgctttccttga

SEQ ID NO: 1879 - DNA, 560 bp, Homo sapiens
  misc_feature 489, 492, 522, 530, 549, 554: n = A,T,C or G
acgcggggttgcagtgagccgagatcatgccactgcactccagcctggcgagagagcgagagtccatctcaagaaaaataacaaaaaaagaaaaaaaagaaaaaagaaaagctctctgaactgggctcccttctgagagtgaggaggagagccgggcacagtggctcacgcctgtcatcccagcacgttgggaggctgaagcgggaggatcgcttgaggctatgaattcaagaccagcttgggcaacatagtgagaccccatctctacaaaaaatataaaagttagccaggcatggtggcgtgttcctgtagtcctagccacactcaggaggctgaggtgggaggattgcttgaacccgggaggtggaggctgcagttgagccgtgattgcaccccttgcattcaagcctgggtgacagagcaagacccttgctaaaaaaaaaaaaaaaaaaaaaaaaaaaagtaccccgggggatttttgtgaaaaanacnaaaactgaaccggttgtggccgcgtttccnacctccancagaaattgggtttttttncgcanaacccc

SEQ ID NO: 1880 - DNA, 447 bp, Homo sapiens
  misc_feature 225, 439: n = A,T,C or G
acatccataagccaattcttcactaattaaacaagcatcaaaagttccaagtccaagacctccacagttctctggaatgtgtgtgttcattaaaccaagttcccaggctcttctaattagggggactggatattcaccagttttatcatattctgcagccactgggatgatttcctctctggcaaatttacgagcagtagcttgaaattctttctgctgttcggngaactcaaaactaaatcccaatcctggttcacgttgtcgattggcttttgtatgctgtgatctccaatgaaaacgagaaatacttctcaggaccctgcagcatcgcccgaaccccgctgccatgttggctcccgttccggccactcggacaataatacacgggtcacggccttgacatactccccgaacgcgggactcctctggtcccccccgngtacctgc

SEQ ID NO: 1881 - DNA, 561 bp, Homo sapiens
actttgtagagattgacttcctaagctacttaagacaacttgcaccactaagaaaaaaatgtagaaccatttggaaaaatgaaatttagtagttccaagtttcaaagaaatgtcaacattttattccattcaataaagaacaaaaccaatagtgtttttattactttcatctgaaacattccatgttttaatctgagccttgcagactttcatttggagtttgaacccgttttggttgcatttcatttttggagaacttaattaacgtgagattggcaattgaaatgcaggtgcagttttctgttaatgtcatgctgttgtttaggtaataagaaatattaagtaattggctttagattttgtaatttttttccctgagttcctgctagatttcgtattctagtagtcaatgtattttcagtgaaatgcaaaaatattcccgttatctttgaccagtattaatttttgagatcttacccgcttgtcacttgaatcccgtgattgtcatacatctctggtataagcaacattttgatttttgaagtgtgtaagaccatctct

SEQ ID NO: 1882 - DNA, 340 bp, Homo sapiens
  misc_feature 105, 135, 185, 208, 264, 340: n = A,T,C or G
acttttttttttttttttttttttttttggaaaaagtagttagcatttaatgaaactccctccatgtggcttcaagccaccaggacacaggcccccccaacactnttaatcttctcctcagctcttctgctgaanaatttggccttcacgatgacaggctgctttgggagctttccctttcccanaactttgtagtagcccgatcgcnccacatcaatgatgggagcagccccagtcttgtttttagcagcattcacccgtgtntgttcactgaccaaagtccacaatttgtcaaggttgacagttgggcaaaagctctggttcctctttaagtgggggn

SEQ ID NO: 1883 - DNA, 335 bp, Homo sapiens
  misc_feature 180, 261, 298, 309, 322: n = A,T,C or G
actttttttttttttttttttttttgcatttcttttagaatgtttggtcattaacaacttttaaccttatcttcctcttctccttagcccttaacagaccaagtccattctatttggaaataacaagaacttgatcagattattaaatcttggaaacctcatttttaccttataaagggntaagtttcacgtgcatattctcttacaaatgtagtataaatgttatggatagatataaggaaatattggcatagtataggnaattagtgaaaaagacacaacttcccaaaccataatnaaagattaacntgaaacttttacnctacttaaaaaat

SEQ ID NO: 1884 - DNA, 559 bp, Homo sapiens
  misc_feature 344, 373, 416, 445, 454, 479, 484, 487, 501, 504, 533, 534,539, 551: n = A,T,C or G
acacaaagagggggtgggtgtcggatgcagagtgtgtggcctgatgctccacggcgtgcaggacggggggctaatagtaggtttccttctccacccagccgccagggcgtcgcctgatgatgagttttctgacttcgtcatatacgaagatgagaagagagtaggggaaggcacagaaccaccaggtaggtttgaggggatacatcctaagagcaaccgcccattccagggcagtaggaaaggaaagcagccagggctgtctcttcaaagaggccaaatatcaagatcttgttcttcatcccctgctggaagaccgaattcctcctggcttacagatgaccaantcggcccactgcaccaccacgatctgacnaagaaggctgtgtggcaggtgaactccaccgatttttctctgntcatagggtccactggctgcccgtagctntctttccanatcgttgatccaacggtcatcccantccantcngatggcccaaacangtngaaattgggagggaaacccgttttatccnnaattnactaaagttaanttatagaa

SEQ ID NO: 1885 - DNA, 562 bp, Homo sapiens
  misc_feature 387, 406, 487, 488, 516, 546, 550: n = A,T,C or G
acactgttggtgttatatggggatggggttctcggtaattttgtttattatttatgtttattattatgttttatcattaattattcaataaatttttatttaaaaagtcaccctacttagaaatcttctgtgggggtgggagggacaaaagattacaaaccaaaactcaggagatggtaacactggaattgataaaatcacctgggattagttgtataactctgaaccaccaaacctctgctatcaagccttgctacagtcatggctgtccagaaagatttacagttatttttctgagaaaggatccatgggctttaagaacttcagaactttaagaacttcagaagttcttaagttgctgaagctcaagtaacgaagttgaatgcnatcaaaaaaagaataccanggagtcaaaggcttgagaggcacattcttatcctaaagtgactgctcaaacctgccgagaccaagttaattactgaagatnnaaagaagaccaaaatgccagattaccgnccttatttctataactcaaaaaatttttcntttntttgaagtaaga

SEQ ID NO: 1886 - DNA, 560 bp, Homo sapiens
  misc_feature 64, 531: n = A,T,C or G
acgcgggggaacacctggcgagtcctcggtgtcggtggccggcagtcatctcgcggccgttcanaattataaggctgtctgcagagatttgaaaaatggcaacaaatgaaagtgtcagcatctttagttcagcatccttggctgtggaatatgtagattcacttttacctgagaatcctctgcaagaaccatttaaaaatgcttggaactatatgttgaataattatacaaagttccagattgcaacatggggatcccttatagttcatgaagccctttatttcttattctgtttacctggatttttatttcaatttataccttatatgaaaaaatacaaaattcaaaaggataagccagagacatgggaaaaccaatggaagtgttttaaagttcttctctttaatcacttctgtatccagctgcctttgatttgtggaacctattattttacagaagtatttcaatattccttatgattgggaaagaatgccaagatggtattttcttttggcaagatgctttggttgntgccagtcattgaaaaatactttggcact

SEQ ID NO: 1887 - DNA, 564 bp, Homo sapiens
  misc_feature 417, 492, 524, 528, 546: n = A,T,C or G
acagttgaaggttgtgaccggacatttgtatggccagctcactttaaataccacctcaagactcatcgaaatgaccgctccttcatctgtcctgcagaaggttgtgggaaaagcttctatgtgctgcagaggctgaaggtgcacatgaggacccacaatggagagaagccctttatgtgccatgagtctggctgtggtaagcagtttactacagctggaaacctgaagaaccaccggcgcatccacacaggagagaaacctttcctttgtgaagcccaaggatgtggccgttcctttgctgagtattctagcctccgaaaacatctggtggttcactcaggagagaagcctcatcagtgccaagtctgtgggaagaccttctctcagagtggaagcaggaatgtgcatatgagaaancatcacctgcagctgggagcagctgggagtcaagagcagggagcaaactgaggtgcttgctgaaggatccccacngtttcctgtctttcagtgcctgatgtgacacntcancctggtgaccatgccagncaggggaggcaaatcatt

SEQ ID NO: 1888 - DNA, 560 bp, Homo sapiens
  misc_feature 368, 503: n = A,T,C or G
actcgccacgatgagcagcaccttagctaagatcgcggagatagaagcagagatggctcggactcaaaagaacaaggccacagcacaccacttagggctgcttaaggctcgtcttgctaagcttcgtcgagaactcattactccaaagggtggtggtggtggaggtccaggagaaggctttgatgtggccaagacaggtgatgctcgaattggatttgttggttttccatctgtggggaagtcaacactgcttagtaacctggcaggggtatattctgaggtggcagcctatgaattcactactctgaccactgtgcctggtgtcatcagatacaaaggtgccaagatccagctcctggatctcccangtatcattgaaggtgccaaggatgggaaaggtagaggtcgtcaagtcattgcagtggcccgaacctgtaacttgatcttgattgttctggatgtcctgaaacctttgggacataagaaagataattgaaaatganctggaaggctttggcattcgcttgaacaacaaaccccccaacattggctttaaaaaa

SEQ ID NO: 1889 - DNA, 562 bp, Homo sapiens
  misc_feature 390, 418, 423, 425, 430, 436, 438, 441, 442, 447, 451, 460,462, 478, 484, 488, 504, 505, 506, 509, 510, 512, 533, 534,538, 540, 547, 550, 558: n = A,T,C or G
acgcggggagcaagctccagtgctacgtgtccctggcattttaggtgtcggttgggtaggcagtcatggatcaggtaatgcagtttgttgagccaagtcggcagtttgtaaaggactccattcggctggttaaaagatgcactaaacctgatagaaaagaattccagaagattgccatggcaacagcaataggatttgctataatgggattcattggcttctttgtgaaattgatccatattcctattaataacatcattgttggtggctgaatacattttggaagagagtttttcatcttagagattggtgaacaagtgtgagggtgtgagaaactcacagaatacaaatttgcctgtatgttttgtgggttttttttttcctttcaanatgttttctatttctaaattaaagtaantttcnanccccncaaaancntannctttncaanaaacaaaananttccttgcccggggcnggccgnttanaaagggcaaaattccnnnccnncntggccggccgttacttagtgnntccnancttgggnccnaccttggncgaa

SEQ ID NO: 1890 - DNA, 340 bp, Homo sapiens
  misc_feature 236, 326: n = A,T,C or G
acgcggggcagtaagaagccagcagggctggtgctggggcttcttctcctgaaggggctgcaagagggaaggcttagccatgtcgtccttgatcagaagggtgatcagcaccgcgaaagccccaggggccattggaccctgcagtcaagctgtattagtcgacaggaccatttacatttcaggacagataggcatggacccttcaagtggacagcttgtgtcaggaggggtagcanaagaagctaaacaagctcttaaaaacatgggtgaaattctgaaagctgcaggctgtgacttcactaacgtggtgaaaacaactgttcttntggctgacattaaa

SEQ ID NO: 1891 - DNA, 343 bp, Homo sapiens
  misc_feature 147, 150, 171, 191, 211, 341: n = A,T,C or G
actttttttttttttttttttttgatgcattcaaatatttattgagcagctaaggagatacaaaggcgatttaaaacattgtcaggtgaggcaaatgcacaagtaatagaaagcaaagggcaaggttcactgaatcacagcagtcanaanaaagtgctttagggaaccaanagattgtttccagcctgaanaggcatgggtggcaaatcanaaaaggggattgagattaaaatagaagacttcagtctggattgttgatgacactcagtatggactatatttgtctctccttttcctttctccccatctttgggcttaatttacatgtagtgccccagganaa

SEQ ID NO: 1892 - DNA, 712 bp, Homo sapiens
  misc_feature 482, 518, 591, 606, 623, 638, 645, 666, 692: n = A,T,C or G
acttagaagtagaagaacataagatgtatttctgactaaaacaaatggctctttcacatgtgctttattagactctgggagagaaaattaaccaagtgcttcagaacaggtttttagtatttaattcttcacggtaagaaaatgaagttctaatgaactgtttctcccaaggttttaaaattgtcaagagttattctgtttgtttaaaaaataagaaacctctttaagcaatagattttgcttgggttttcttttttaaaaacataatactgtgcaggcaaggcactgtaaaagttttaattccttccagaagaaccagtggaagaatttaaatttggcgctacgatcaaaactactgaattagtagaaataatgatgtctaaagcttaccaacaaaagaaccctcagcagaataacaaaaactttgctcaggacatttgaggtcaaattgaagacggaaaccggaaaccgttttcttgtangcccctagaggcagatcaggtaaagcatacatagtngagggaaagggagagaatggaaataaactcaatattatgcagatttatgccttattttttagccttttttaanggttgggtctttcangctggtttttggtttgnatttaaaacctggtntagtttnaatttaacctggggggattangtttttattttttaaacttacaattnaatctttttttcttttgggg

SEQ ID NO: 1893 - DNA, 609 bp, Homo sapiens
  misc_feature 467, 540, 547, 577, 593: n = A,T,C or G
actggaaaatagcaaggatgctcatgttgggaaagaaaaggtgaaaaaaaaaaaaaacttgatgaataaaaggccagccaaagaagacaggaagtaggctcatcaaccgggaacttggacagcaataaaatcagaaaagcacttaccttttccagggaatcactccgataagataatcatcaatcctttatttggtttattaatagcatcagtctctgaatattttataaggaattataaggaatatttcaagacaaattaggtaaataaagctttcaaacactttatttaaatgtgaaagacttgatgattcaaaaaaagttttttttcaaaaaaaggctcttggaagtgaacatgcaaacataattcatatgtttaggattattccagaatgaacacattatagagttaaaattagttacgcctattacaatttaaactcaagccatataattaaaaattattanacctatgcaacttattatgaaagtaggatttttaaattcctttacaagttcatgtgatgctttttacctcaanaaatggnaaaccacccataattgcattactcaggccncacttccccttttgtnccctgccccgggcggc

SEQ ID NO: 1894 - DNA, 431 bp, Homo sapiens
acgacgtctcatctgggaaaagaatctaaagtttgtgatgcttcacaacctggagcattcaatgggaatgcactcatacgatctgggcatgaaccacctgggagacatgaccagtgaagaagtgatgtctttgatgagttccctgagagttcccagccagtggcagagaaatatcacatataagtcaaaccctaattggatattgcctgattctgtggactggagagagaaagggtgtgttactgaagtgaaatatcaaggttcttgtggtgcttgctgggctttcagtgctgtgggggccctggaagcacagctgaagctgaaaacaggaaagctggtgtctctcagtgcccagaacctggtggattgctcaactgaaaaatatggaaacaaaggctgcaatggtggcttcatgacaacggctttccagt

SEQ ID NO: 1895 - DNA, 715 bp, Homo sapiens
  misc_feature 432, 547, 657, 659, 667, 668, 689, 701, 712: n = A,T,C or G
acgcgggggcccgagcagcggtgacaggaacctggagcgaagatgtagccccaacctctcccgagaggtgctctacgaaatctttcgctccctacacaccctggttggacagcttgacctcagagatgatgtggtgaaaattacaatcgattggaacaagctccagagcctctcggcattccagcctgcattgctctttagtgcacttgaacaacacattttatatttacagccttttttagcaaaacttcagtctccgattaaagaggagaatacaactgctgttgaagagataggaagaacagaaatggggaacaaaaatgaagtaaatgacaaattttccattggcgacctacaagaggaagaaaagcacaaagaaagtgatttaagagatgtgaaaaagacacagatccattttgatccagaagtagntcagataaaggctggaaaagcagaaattgacagacgaatatctgcatttattgaaagaaagcaagctgaaatcaatgaaaacaaccgtcagggaattttgcatgttattgattgnaatcaagaaaataggtggtgcaagaactgatgcgattttttaccccttaccccgggatttaaaaagtcaccgtaaaaagttttctagaagttggtgaataccataccggncncagacttnnaaccttgaagggaatttccangggtcagggtcnataaacctaanagc

SEQ ID NO: 1896 - DNA, 706 bp, Homo sapiens
  misc_feature 560, 609, 648, 650, 654, 665, 692, 705: n = A,T,C or G
actccagttgctggatatccaagcctctcagcttcggagaatggagtcttccatcaatcatatctcacagactgtggatattcataaggagaaagtggcacgaagagagattggtattttgacaacaaataagaatacatcaagaactcacaaaataatagcacctgcgaatatggagcgccctgtaaggtatattcggaaacctatcgattacacagttctggatgatgtgggccatggtgtcaagcatggaaataaccagcctgcaagaactggcacactgtcgagaacaaatcctcctactcagaaaccgccaagtcctcccatgtcaggccggggaacactgggacggaatactccttataaaaccctggaacctgttaaacccccaacagttcctaatgactatatgaccagtcctgctaggcttggaagtcagcatagtccaggcaggacagcatctttaaatcagagaccaaggacacacagtggaagtagtggaggaagtggaagtcgaagaaaacaagtggtagcagtagtattggcattcccattggtgngcctacaccttcgccacccactattggaccagcaagccccgggctcaancttctgggtcccagtatggcacaatgaccaggccagatntnttgnacaacaacttntactacttttttcacattttttttggngggatacaagacna

SEQ ID NO: 1897 - DNA, 711 bp, Homo sapiens
  misc_feature 649, 652, 655, 693, 701, 706: n = A,T,C or G
acgcgggactacactccagcttaggagatagaatgaggcctcatctctaaaaaaataaataaataaaaaatgaaagaaacaacatattttgcaggttgccaccctggggtgaccccttttcactaattaggtgccatgatgtgccatcccaaacttacccctctctctccatagacttctctggtctctacttttctgagactcagaacttccctgccaaagtcacattcttagcaacaagtataattttggctatttgaaaaagaatagaatgcagcccaaagcagatggagggaaatgacagtccgcagtcagccaggcctcaccaaagaatacaggccctctgccaggtccctcctaccctggagaaatctgagtcttcaaattgccaactccctggactggtctaagtatttttctgccagcgttggaatccagcctcacaacaattcccctaagcaatttctcagttcctctcacttcctctggttccttctcaacaagccataattctttatagaaataagtttttgcaaagccttcatgttctgacatgacctagagcctcagactcatgtttaccccattgctgacctcaaacaggccgggggaatcagaaaaaaaaaaaaaaaaaaaaaaaagtaccttnggncgngacccccccttaagggcgaaattcccaacacactgggngccggttnctagngggat

SEQ ID NO: 1898 - DNA, 710 bp, Homo sapiens
  misc_feature 444, 530, 656, 684, 686, 692, 702: n = A,T,C or G
actctggatcccaaggtgactggttgtttaatcgtgtgcatagaacgagccactcgcttggtgaagtcacaacagagtgcaggcaaagagtatgtggggattgtccggctgcacaatgctattgaaggggggacccagctttctagggccctagaaactctgacaggtgccttattccagcgacccccacttattgctgcagtaaagaggcagctccgagtgaggaccatctacgagagcaaaatgattgaatacgatcctgaaagaagattaggaatcttttgggtgagttgtgaggctggcacctacattcggacattatgtgtgcaccttggtttgttattgggagttggtggtcagatgcaggagcttcggagggttcgttctggagtcatgagtgaaaaggaccacatggtgacaatgcatgatgtgcttgatgctcantggctgtattgataaccacaaggatgagagttacctgccggcgagttgtttaccctttggaaaagcttgttgacatctcataaacngcttggttatgaaagacagtgcagtaaatgccatctgctatgggggcccaaaattatgctttccaggtgtttcttcgatattgaggaccggcattggagggcaaatcaaggaaaaattgtgggttntcaccccccaaagggagaaagccaatcntntatggnctttttgcanttaaatga

SEQ ID NO: 1899 - DNA, 706 bp, Homo sapiens
  misc_feature 306, 507, 579, 583, 633, 650, 652, 654, 660, 665, 680, 684: n = A,T,C or G
acagaagaaacagaattggcaaatgttcagttgacaattatgaaagctggataaacaaatacctgcagggtttatttttactacttttctactattgaatatatctgatatttatataataaaaagtttaagttaccaaaatctcttcactgtctttttttttttttttgagatttctcctactcacctcaaaccctctaagactgccaaaagctacgccacaatcaaattctgcaggttctttcaaatatcatttcacttagctcttctacaataaagcctcactactcaaagtatggtccttanaatagcgtcatcataattgtttggaatgttattagaaaaataaaatgtttttcttctgataattgaaaatgttcctcttcaaagcattttaccaaagaagacagtcaaataaccaataaacatatagaaaagtgttcaagttaattacttgtcagggaaatgcaaattataaccacaaagagtgtctctgccatccaccanaatggcttaaatgaaaacacaaaacagacatgtcaagcatcgataatgatatgcagcaatgggagtcatgcnctangaatgggcaaactggtaaaactagaaaactaattggcaatagctactaanggttggacaaatgtgtntntntaccancccancaattcctttcctanaaanttcccccccagaaagggcattt

SEQ ID NO: 1900 - DNA, 361 bp, Homo sapiens
acataggtaaccaaagtatatagcttatttggtgaatcttcatcctcattacgttttctggacagccgcacacggattcggtatggcacattccttattcctttggcccagacagctttgttgagcctggtgtcaatgcgcacatctggagttcccatctccttcatggcaaatttccgaatctctttgagtgcccgaggtgcacgcttcttgaagcccactccatggatgcgcttgtgaatgttgatggtgtattctcgggttaccacttcgttgatggcagaacggccctttttcttctcgccacccttctttgcgggagccattctgcagcgtccaagttggaaaggaagccccgcgt

SEQ ID NO: 1901 - DNA, 520 bp, Homo sapiens
  misc_feature 24, 38, 43, 57, 96, 122, 231, 291, 314, 359, 378, 401, 410,421, 423, 429, 444, 459, 464, 467, 469, 500, 519: n = A,T,C or G
accgcgggggggcgactgagcggncaaacggaagtgtnggttncggtctgagacatnaccgccaagctgggcatcggggagatggccgagactgancccaagaccgtgcaggacctcacctnggtggtgcagacactcctgcagcagatgcaagataaatttcaagaccatgtctgaccagatcattgggagaattgatgatatgagtagcgcattgatgatctggaaaanaatatcgcggacctcatgacacaggctggggtggaagaactggaaagtgaaaacaagatncctgccacgcaaaagagttgaangttgctaataatttatactggaatctggcatttttccaagccaangagaagatcgaatggcttnttgcagctaactactatgtgtanacaaggttntatattataangntatgcnttcttatcaccctantttattaattaagtntgtanagngnatttccccccagtttctttgaacatggtatncttccacattctctgaatng

SEQ ID NO: 1902 - DNA, 712 bp, Homo sapiens
  misc_feature 611, 613, 614, 620, 640, 669, 677, 682: n = A,T,C or G
acctggttggcctggtatcagcagcgaccagggaaagcccctaacctcctgatctataaggcgtctagtttagaaagtggggtcccatcaaggttcagcggcagtggaactgggacagaattcactctcaccatcagcagcctgcagcctgatgattttgcaacttattactgccaacagtataatacctacccctacatttttggccaggggaccaagctggagatcaaacgaactgtggctgcaccatctgtcttcatcttcccgccatctgatgagcagttgaaatctggaactgcctctgttgtgtgcctgctgaataacttctatcccagagaggccaaagtactccacaagaaacagaaggaacttccagtggtagcaaaagcaatgtgaggagtgggaagagagttccaagtggcaggatggtcaacattcgcattttccagcaagaagtcacgtaagaatagacaagagtccattggatttggcaatcctgatgtcagggtaaagctaatgggtgggagattaattcccattaagttctttcttgaccttagtatgtgggggttgcaatttaaaagatttctgcattcaaaagttcagatgantnngaagtntttgggaaggagccttggtnttggagccaacttgcaaatgttctttttncatttaanatggnaaaattcttttgaagccattaagggaaggc

SEQ ID NO: 1903 - DNA, 399 bp, Homo sapiens
actttatagaattcacattcacctgaaggttcacaaaatctgctggtatgtcaacatagcaagcacctggacgaccatagatactgcttctcactgccttttcaataacaaaaggaatagcttctatgctgcttgggcgggcagagaacttggtatataatctacaagcttcaacctgaggaaactcctggaaagctcccattgtttcttggtttctttcagaggaaccaccaatcacaagcaagggccagcagttcatgtttgcatttgccataccgcccaaggcatggatgagacctgggccagaaacaacaaggcagactcctggcctgcttgtcagatatccaatcgcggaggcagcataacaagccgcttgctcattcctcatcccgatgtacc

SEQ ID NO: 1904 - DNA, 479 bp, Homo sapiens
  misc_feature 320, 329, 332, 413, 414, 424, 431, 432, 438, 442, 445, 450,451, 456, 471, 476: n = A,T,C or G
acaccgggtggcattaaggggtgaagatgtcccccttacggagcagaccgtgtctcaggtgctgcagtcagccaaagaacagatcaagtggtcactccttcggtgaagacctcactgttcctggctcttcatcctcttcaaaaaatttgcatgtctgctgtgaattttcatctagttccccaatcgatgctctcagggtcatctcggggatcacagggatccttaaatctccattctgtttgtggttgccccctcaacctcccctacacccttcctattctttttcattcttcttgcagttctgggagtaaagctcccancatatttanatnatagggcaggggaagcaccctctttctttctagactggattatgctcacatgctcccttgccctgacatttttgtaaattnntgtgcccctntgctggnngctacncttncanattannagtangagaaaggaatgtgnattantat

SEQ ID NO: 1905 - DNA, 602 bp, Homo sapiens
  misc_feature 527, 564, 585: n = A,T,C or G
accatcttgacagcatccagggcaatgttgcaagccaaagatgaccaccgactgatggctttggtagtaatagagctgttgatgatgttcagcatcatatcactgtcactgatgtcgactgggatacttattttctttagggtgctgatcatatcatccaatgccttgcggtaagcactgatcaccactgttgggtgcatctgctgctccaggaagtgctcagctacagacagcatttcccctgcaagaataattactgatgtggtcccatctccaacctcttcatcctgggtccggctaatttcgatcatggacttggccgctggatgctggacttgaatctctcgaagaatggcattgccatcattggtcatcacaatgcctcccattgggtccaaaagcatcttcatcatggacttgggtcccaaacatgttcggatgatatctgcaatagtcttggcagcattgatgtttccagattgaacttttcttccggattcacgctttgtgttctggctgagcacgancactggacgatggcccatcatggcgaacgcgatgcanaacccgggtacctctggccgngaccaccgctaaggggc

SEQ ID NO: 1906 - DNA, 536 bp, Homo sapiens
acccgggagaggcatcccgggtatcggtcgccgaccactccctgcacctaagcaaagcgaagatttccaagccagcgccctactgggaaggaacagctgtgatcgatggagaatttaaggagctgaagttaactgattatcgtgggaaatacttggttttcttcttctacccacttgatttcacatttgtgtgtccaactgaaattatcgcttttggcgacagacttgaagaattcagatctataaatactgaagtggtagcatgctctgttgattcacagtttacccatttggcctggattaatacccctcgaagacaaggaggacttgggccaataaggattccacttctttcagatttgacccatcagatctcaaaggactatggtgtatacctagaggactcaggccacactcttagaggtctcttcattattgatgacaaaggaatcctaagacaaattactctgaatgatcttccctgtgggtagatcagtggatgagacactacgttttggttcaagctttccagtacc

SEQ ID NO: 1907 - DNA, 380 bp, Homo sapiens
  misc_feature 372: n = A,T,C or G
acataggtaaccaaagtatatagcttatttggtgaatcttcatcctcattacgttttctggacagccgcacacggattcggtatggcacattccttattcctttggcccagacagctttgttgagcctggtgtcaatgcgcacatctggagttcccatctccttcatggcaaatttccgaatctctttgagtgcccgaggtgcacgcttcttgaagcccactccatggatgcgcttgtgaatgttgatggtgtattctcgggttaccacttcgttgatggcagaacggccctttttcttctcgccacccttctttgcgggagccattctgcagcgtccaagttggaaaggaaagccccgcgtacctcggccngcgaccac

SEQ ID NO: 1908 - DNA, 714 bp, Homo sapiens
  misc_feature 338, 574, 581, 587, 603, 636, 684, 691: n = A,T,C or G
acaaggtgttttccagcgtgcctcagcaaaatggaaagacgatgttcaactttggctctcctatgtggctttttgtaagaagtgggctactaaaactcgacttagcaaggtattctctgccatgttggcgattcattccaacaaaccagctttgtggattatggcagccaaatgggaaatggaagatcgattgtcttcagaaagcgcaaggcaactatttcttcgcgcactgcgctttcatccagagtgcccaaaactttataaagaatactttaggatggagctgatgcatgctgaaaaactgaggaaggagaaggaagaatttgaaaaagccagtntggatgtggagaatcctgattattctgaagaaatccttaagggcgagttggcatggatcatctacaaaaattctgtaagcataattaaaggtgcagaatttcacgtgtcactgctttcgattgcacagctatttgactttgccaaagatctacaaaaagagatttatgatgaccttcaggctctacacacagatgatcctctcacttggggattatgtggcaagggcgagaattanaagattnagtcanagaccggaaagaacancctacaaccgaaaacaagcccaaaccattgganggtcggccccggaaaggaggaaaaggtgcttgtgcttgtgtattaaanaagcaantgaaaactcttcccaccagaaag

SEQ ID NO: 1909 - DNA, 691 bp, Homo sapiens
  misc_feature 15, 34, 68, 105, 129, 139, 167, 173, 190, 211, 216, 250,253, 278, 326, 343, 372, 396, 406, 414, 424, 478, 487, 496,512, 517, 522, 566, 571, 586, 599, 603, 607, 609, 614, 615,626, 640, 647, 651, 654, 657, 660, 662, 681, 682: n = A,T,C or G
acttttttttttttntttttttttttttggatcncatttaacttttttaatgggtctcaaaattctgngacaaatttttggtcaagttgtttccattaaaaagtncacctataacatctgaggtgtcanacaccatggngtgccagtcttcctcaactgtaggtcantcattnagtgaacaacacattanccaacttcaaaaaagcattcnggcanagattccctgtgaagatgaacaagaccaagaacntancggaccactggcaacaaaggaaaanccacggctggaaattttcttgttaatccccttgagccaaaaaatgcanaaaagctcaaggtgaanattgctgaccttggaaatgcttgttgggngcacaaacatttcacttgaaaatnttcaaacaangcaatatnggttccttgnaaagttctaatcggatcttggctttaatcccctgctgacatttggagcacggcnttgcatgancaaaaattntgggaatttcgggaantgccngaaanagatggatcatccctgcatcccatggaattaattgtgggaaaanattangacccctttttttanaggctctttgaanctgnccananggtanntttttggtttnaaccttcatttcangggaaanaaanacnttnggncncggacccacccttaagggnngaatttcca

SEQ ID NO: 1910 - DNA, 592 bp, Homo sapiens
  misc_feature 33, 78, 137, 142, 153, 178, 212, 217, 273, 331, 335, 357,359, 397, 403, 422, 441, 454, 457, 474, 499, 506, 529, 539,540, 547, 553, 556, 564, 569, 570, 592: n = A,T,C or G
actttttttttttttttttttttttttttttcnaggcaaagtcttgctctgtcccccaggctggagtgcagcggcccnatcttggctggctgcatgctccacctcccaggttcatgccattttcctgcttcagcctnacaantagctgggacnacacacgcccgccaccacacccagntaattttttgcatttttagtaaaaaatggtctgngttanccaggatggtctcgatctcctgaccttgtgatccgcctgccttggcctcccaaagngctgggattacaggcgtgagccaccgcacctggcctattcagggaaggtttcaagcanaaanatgaactgagttggctttggananattcacaggactcccacaggcagagtgaaataagggcnttgtanatggacaaaggcacatatnaccaccaatggggacagtntgactgggggacnctnaggggctgctgtggctngaaatgggagggcttgccaccattnatggaanatggccaaatgaggcaaaataangtttggtttnnggagcanttaccnttnaagggggngccanntttttttaaaaacccttctttn

SEQ ID NO: 1911 - DNA, 712 bp, Homo sapiens
  misc_feature 627, 648, 651, 670, 703, 707, 710: n = A,T,C or G
acagtgagcagccttcttcctggaaagacatacagcttcagactacgtgcagctaacaaaatggggtttggaccattttcagaaaaatgtgatattactacagcccctgggccaccagatcagtgcaagccccctcaagtgacatgtagatctgcaacttgtgcacaagtgaattgggaggttcctttgagtaatggaacagatgtcactgaatatcgactggagtggggaggagttgaaggaagtatgcagatatgttactgtgggcctggtctcagttaggaaataaaaggactttcaccagcaactacctattattgtagggtccaggctctgagtgttgtgggtgcaggccctttcagtgaagtagtagcctgtgtgactccaccatcagttcctggcattgtgacctgtcttcaagaaataagcgatgatgagatagaaaatccccattattcaccttctacatgccttgcaataaagctgggaaaagcctttgtgatcatggttcggaaatccttgcctacagcataaactttgggagataaacaatccctacagtgggaaaggttacaagctatattattcaacaatttgcaacccagattccacattccagaaattccnaatttcaagccctttgaatanccnttggagcttggtccctttnaagccatttgattaaaattaaaaaaacttaagncctnttncc

SEQ ID NO: 1912 - DNA, 656 bp, Homo sapiens
  misc_feature 540, 547, 569, 575, 597, 619, 622, 648, 651: n = A,T,C or G
acgcggggacttcctgcgggtgcacaggctgtggtcgtctatctccctgttgttcttcccatcggcgaagatggccctggagacggtgccgaaggacctgcggcatctgcgggcctgtttgctgtgttcgctggtcaagactatagaccagtttgaatatgatggttgtgacaattgtgatgcatatctacaaatgaagggtaaccgagagatggtatatgactgcactagctcttcctttgatggaatcattgcgatgatgagtccagaggacagctgggtctccaagtggcagcgagtcagtaactttaagccaggtgtatatgcggtgtcagtcactggtcgcctgccccaaggaatcgtgccgggacctgaaaagtctaggagtggcctacaaatccagagacacagctataaagacctatcaagatgcaaggcttgcagcatctttgcttctccacctcctgcctctgcttatttcttgttctggaactaaatgaacagaaacttcaaaatactttcttaccctcccaattcaanactcaancttgactggttgaaaagagcanccacantcatttttaatcatttttaacntttctttgggactaccaaggtnggngtgggggaggggattttggggttggnttngattt

SEQ ID NO: 1913 - DNA, 710 bp, Homo sapiens
  misc_feature 444, 460, 486, 488, 514, 526, 545, 553, 555, 557, 559, 586,594, 607, 614, 620, 623, 625, 638, 640, 657, 673, 676, 679,683, 693, 709: n = A,T,C or G
actagtgtccatggcttgagtgagttgcacagcttttcgcaggatgacaactttctcaatcagatcctgaagtgacaaagggtggcttccatcttgagctttagtccaacatgcaactaatttctctacattccctgcacaaatatagcagagacatgcttgagtctgcaggaggctatctccttcattttcaagcctggttcccaaaagatcacaaagggctgaaaattcatccggctttgcataagtcaatactgcagctaaagcctctctccaatttttaagatcacaagactcaacaatctctttccagttcttcatcaccactgcagtgatgagcctggtaattttgctttgggattttgcgaagtattttttctgggttcgagccaagagttcttgtccacctgctatggccaatataatgggcatcggccatgcggntatcatgtaaaacaangggcaacagcctctcaaattgccgtnancaaaagcctgagtaattaaaccattnaatggtcccccnctgacagaaaatattaaangttccctncnanantgaggggttggaaaattccgattcttncttttttngctctttaaaggngccttcntttgcntanancctcctttttctngnatacctaaaaaatttcnaagggtcgttttcccnccnaanattnatccctcaanattttacctttcaaana

SEQ ID NO: 1914 - DNA, 582 bp, Homo sapiens
  misc_feature 436, 457, 492, 494, 499, 501, 513, 518, 528, 540, 541, 551,566, 570, 581: n = A,T,C or G
actccaactcaagtttacaagttacacctttgccacagccttggctaaatcttgaactagtgcagaattcagctgtggtagagtgctgatcttagcatgcttcgatgtggcatacttgttcttgacagtcatgtgctttgtaagtccttgatttaccatgactacattcttagccaggtgctgcataactggaagaagagattcttcagtatatgacaggtaatgttgtagagttggtgtccattcaccattatccagaattttcagtgctaagcaaaaagctcctgctgcaatttgagaaggaggaaagtgcaccatgtcatagtccaacatagttagttccatcaggtatttggccaaagtattgttgctcgacatcaacctctccaatcttagatgctctccgaaggaaagtgcaaaggtagaggccgacccnaccaaaagttaaagctcttanaatctttcatttcccccgcgtacctgccccgggcngncgctncnaaagggcggaanttcancacactggcngcccggttctanngggattccgnagctcgggaccaaancttnggcgtaaatcna

SEQ ID NO: 1915 - DNA, 586 bp, Homo sapiens
  misc_feature 2, 544, 562, 584: n = A,T,C or G
cngtgagacacaagatctctcttttaccaaagttgagaacagagctggtggattaattaatagtcttcgatatctggccatgggtaacctcattgtaactatcatcagaatgggcagagatgatcttgaagtgtcacatacactaaagtccaaacactatgtcagatgggggtaaaatccattaaagaacaggaaaaaataattataagatgataagcaaatgtttcagcccaatgtcaacccagttaaaaaaaaattaatgctgtgtaaaatggttgaattagtttgcaaactatataaagacatatgcagtaaaaagtctgttaatgcacatcctgtgggaatggagtgttctaaccaattgccttttcttgttatctgagctctcctatattatcatactcagataaccaaattaaaagaattagaatatgatttttaatacacttaacattaaactcttctaactttcttctttctgtgataattcaaaagatagttatggatcttcaatgcctctgagtcattgttataaaaaatcagntatcactataccatgctntaggagactgggcaaaaccctngt

SEQ ID NO: 1916 - DNA, 713 bp, Homo sapiens
  misc_feature 487, 587, 588, 589, 645, 667, 693, 701: n = A,T,C or G
accttctttctgtaaatctgaagaacctgattctattaccaaatccattagttcaccatctgtttcctctgaaactatggacaaacctgtagatttgtcaactagaaaggaaattgatacagattctacaagccaaggggaaagcaagatagtttcatttggatttggaagtagcacagggctctcatttgcagacttggcttccagtaattctggagattttgcttttggttctaaagataaaaatttccaatgggcaaatactggagcagctgtgtttggaacacagtcagtcggaacccagtcagccggtaaagttggtgaagatgaagatggtagtgatgaagaagtagttcataatgaagatatccattttgaaccaatagtgtcactaccagaggtagaagtaaaatctggagaagaagatgaagaaattttgtttaaagagagagccaaactttatagatgggatcgggatgtcagtcantggaaggagcgccggtgttggagatataaagattctttggcatacaatgaagaattatttccggatcctaatgagaagaagacccaggttttttaaaggnnngtgcaaaccccgtttttactaaaaacaatgggaattaaagcccttaaaatgtttcnaataatgctttattttgggctnccccaaattttcctgatgggagaaancaaaaagnttgaaccacctt

SEQ ID NO: 1917 - DNA, 635 bp, Homo sapiens
  misc_feature 116, 212, 235, 369, 393, 416, 555, 574, 575, 580, 604, 610: n = A,T,C or G
gggacttttttttttttttttttttttttttggctttaattctgcttttgtaaaagcagtattttgagatggacattgcctcttcattgtatttctcatcaattcattatttttgnggttatagcttgacaagcaattaactttaaaatggtagattccgtaactttaaattggtagctttcatttgcttaaaatttttttggcatatgcanataatgttctcatcagtagtaanaatctcagggttatgcttattccccaatggaggtatggcatataatcttttctgcctttacttatcaattcaccaaggagctgttttctctgcatctaggccatcatactgccaggctggttatgactcaaaanatgttatctgaaaaaagtctatanaaaaaaaaagtttcccctccctnatcaacaaaagcccaccctctaagagacattcaagctgaactatcacaattcttaatcagttacaatttacaaacagataagtttaaaataaacaatttacaaaatttttgaagcataccttaacatcttggttttgcngttaaacaatgggaaaagnnttttntcctaccctaaaaaaaaaacttgntttacncccaacttggaaaattcccccgcgt

SEQ ID NO: 1918 - DNA, 575 bp, Homo sapiens
  misc_feature 511: n = A,T,C or G
cctgctggcatagttctttgacccgttcatatttgggcaagtgatttgactgttggatattcttgctggattcttccttcttacgtagaaatttgcctctttccactaggaatgtatcacgccaaattttggccttcttgtttgttcgaaacctgttacctggcttttctgggtccagaagtttgaggacagacttgccgtccacatcaggaggtgtgtcgagcccagcaatatccaggatcgtgggggccaagtcaatgttgagaacgatctgtgggactattgatcctggttctacacttggaccacgaataaaaaaaggcacacgaatatcaaagtcatatggcatggatttccccttgaccagtccaaactgcccaatatggtaaccatggtcggcggtgtaaatgatgtaagtattctccagctcccccgtctccacgagcatgttatacagcctctccacagaatcatccactgacatcaaagtctggagccttttgcgctgtanaatgtttgtaaattccatgtggatgggcagcattgggtcctgtgtacctcggccgcgatcacgc

SEQ ID NO: 1919 - DNA, 712 bp, Homo sapiens
  misc_feature 546, 551, 557, 619, 644, 682: n = A,T,C or G
acgcggggagctggcaccttggcgctgttggtggcggcggagacagctgtgaagtgtgaggttctttgtctgctggcagctaggggcgacgaggcgggacgtcatggaagtgaaggatgccaattctgcgcttctcagtaactacgaggtatttcagttactaactgatctgaaagagcagcgtaaagaaagtggaaagaataaacacagctctgggcaacagaacttgaacactatcacctatgaaacgttaaaatacatatcaaaaacaccatgcaggcaccagagtcctgaaattgtcagagaatttctcacagcattgaaaagccacaagttgaccaaagctgagaagctccagctgctgaaccaccggcctgtgactgctgtggagatccagctgatggtggaagagagtgaatagcggctcacggaggagcagattgaagctcttctccacaccgtcaccagcattctgcctgcagagccagaggctgagcagaagaagaatacaaacagcaatgtggcaatggacgaaagaggacccancatanaaagancccagctggccccggcgtttcatgaaatcaagaaaggcctggcagcccattttccttggaantttgaaaaggattgtttattttganttttatcctcatcccaacaaggccctggcttttgtggnttagttggggtacctgccccggggcgggcc

SEQ ID NO: 1920 - DNA, 712 bp, Homo sapiens
  misc_feature 514, 563, 570, 582, 590, 610, 620, 621, 645, 674, 679, 694: n = A,T,C or G
acaagaacaaaggcagctacgtcacctatgaacctacagaaggtgagcccagtgccatcgtccagatggagagtgacttggccaagggcagcgagaaagaggaatatttcatctaatgactcccaggccccaaggagcttattcctggctccatcgctaacacgttgactgcttattatgggaaagttttctctgaagccagggagaagcattgattgatgtgggcaaatccaagctccagccaggtcgcagtcccaaatgccgacatcactgactccagggaccagggacatggagaaagctgtttatgatatctttaaccaggccctcttactagagctggtgtttgtgactggccaacaagatgtggctatgccaggggacatctgagtatgtgcccagtcatcttttttcacaggttgaagggagagaaaagattttgagttaaggtcattggctgctctactctgtcccctacctggtcacctagtgatagccccagtggaaatactgnccatacaaaggtcttccccagaggctggatacccacagtaaaaaggccnggcccanggaagggggtanggagactnttgaagaatcttaccctccntgaataaatnnggcctcacccccctaattttgagnccctttccttttccggggttccccaaacnaaccnttaatggcttacggngattttttttttcaaata

SEQ ID NO: 1921 - DNA, 712 bp, Homo sapiens
  misc_feature 551, 580, 605, 623, 633, 646, 654, 708, 710: n = A,T,C or G
acaccaagcacctatttttataacttagcttcccatggagagataatggcttgcgtgcattttatgtatccataacatacatacaaggctcggtcttttcaatgggataacagttcacaactcttcgatttgaattgtaatgaatctggtgacaaggatttttctctaatggattccaaagttagccagaacttttaatgtcaagatgaaaaagggtgtaaggtgttatattttcttcaattcctttaccacaggaggctaactccacaatttccctcatgtttctcattcagaaaaaaaaatattaaatttgtgttcagaattatttgatgattgcttctttgtgctgatgtttcagttcctgaagtcaacttggctctcacaattttctaaggtcaggttattgacttagggttgtataaacatttttttctggtttttggattttcactgagaacgaccttcccttaatcgtcttctagatccttgaacttttttgttggcttgcaacttcctcacgggtgtgtctttcttgtaacaatttcttcaanagtttcttctggtttctcccctccagtanaaaatcctagtgtattttatttcangacctgtaatgattcgtnccttcctcgnggcttttttcaantatttccncaggcactccatcaatgaattttgggggattttttaataaattgggcttattananag

SEQ ID NO: 1922 - DNA, 532 bp, Homo sapiens
  misc_feature 165, 342, 415, 434, 436, 439, 460, 470, 476, 499, 502, 504,511, 521: n = A,T,C or G
actaaatattgctgagagcatccaccccaggaaggactttaccttccaggagctccaaactggcaccacccccagtgctcacatggctgactttatcctccgtgttccatttggcacagcaagtggcagtgtctccaccacctatgatggtgatgcagcccctanaagtggctttcaccacctcatccatgagagctttggttccccgggcaaaagcttcccattcaaatacccccacaggaccattccacacaatctgcttagcccgagtgacagcctcagcatacttcttgctgctttcaggaccacagtccaagcccatccagccagcaggtatgccanaagccacagtggcttggccagtcttggcattctcatcaaacttgtcagcagtgacaaagtcaacaggcaaggnaatcttaacaccattcttntnacntttggacattaggtctttganaatcttgggntccctntttatcaaacaagagaaaggtgncantntccatgntgttgaagcncctttaaggaa

SEQ ID NO: 1923 - DNA, 581 bp, Homo sapiens
  misc_feature 477, 502, 517, 570: n = A,T,C or G
acgcggggggcacctgtggccacacacgggcccagcttctccagggcctgggtttcaacctcactgagaggtctgagactgagatccaccagggtttccagcacctgcaccaactctttgcaaagtcagacaccagcttagaaatgaccatgggcaatgccttgtttcttgatggcagcctggagttgctggagtcattctcagcagacatcaagcactactatgagtcagaggtcttggctatgaatttccaggactgggcaacagccagcagacagatcaacagctatgtcaagaataagacacaggggaaaattgtcgacttgttttcagggctggatagcccagccatcctcgtcctggtcaactatatcttcttcaaaggcacatggacacagccctttgacctggcaagcaccagggaggagaacttctatgtggacgaaacaactgtggtgaaggtgcccatgatgtttncagtcgaacaccattaagttccttnatgacgcggaacctnccctgccagctgggtgcagataactacgtgggcaatgggactggttttctttnatccttccgga

SEQ ID NO: 1924 - DNA, 716 bp, Homo sapiens
  misc_feature 519, 560, 581, 585, 590, 600, 602, 628, 669, 670, 673, 679,702: n = A,T,C or G
acacagtatttttttatatctatgttttctgttctctggcgcaagatattctgcacctgggtgctttcaggccttgaccaaatagcatgaatagtaggaaatgagaactttccctctgtcagatcttcacaaaaacttttgttttcactatattctttggagtgtagattagcataatcatccctaatttggaaaaagagcccaagtgtattaagtagcggttttaaatcttctttgtaatcagagaacaactgcatgagacctactgctaatccaaacagtccacctgttttctgcagcaccatagctttatattcttcttcagtgggacaagtgtaattatccctccagtaaatatctaggccttgtccctgatggagttccaaaagctggcgggtaaaaagcttcactgcatctgggtgatcaagggttaagactttctccaagccaaggaaatacacgtaattggcagaattgatgacagatgggattccatagatgctgtgggccactggaaancacgcggagtttttgagttgtcttcaatatcatcgatgagnaactggcattttgcacattcntgcncttcnaataataatntntagcttggcccttctggaactttcancccaatgattaaatgccctgcgaaagtttggtttttacttnnttnaccctnggtaaactgaaagaaggtatttnttagggggtctaaa

SEQ ID NO: 1925 - DNA, 707 bp, Homo sapiens
  misc_feature 522, 601, 615, 631, 657, 671, 672: n = A,T,C or G
acgcggggttccccagacctgctcgcagcaccctgctgtcttcccggtccggcccgctgcccgcggcgccagcaccatgctcttctattcttttttcaagtcccttgtgggcaaggatgtggtcgtggaactaaagaatgacctgagcatctgtggaaccctccattctgtggatcagtatctcaacatcaaactaactgacatcagtgtcacagaccctgagaaataccctcacatgttatcagtgaagaactgcttcattcggggctcagtggtccgatacgtgcagctgccagcagatgaggtcgacacacagttgctacaggatgcggcaaggaaggaagccctgcagcagaaacagtgatggctcctcctcctcttcccctccctctttcattggtgacccataaccccaagtcccagcccagaacccctaacccccaatacttgaaggggttttgtttttttactaatgatggtttttgtgggttttttttaagggatgagtggatgagaggagtnatagggaacagctatcctctttttgagaaggggaggataagtaggctggggaaacttcaaagcctttcccagtccccancacctgcctttctnacttacttctctgganaatgggaaggaaagtttcctaggtcnttttccaggggcannaggtgatttcattttgggggatgggaaaggaattc

SEQ ID NO: 1926 - DNA, 710 bp, Homo sapiens
  misc_feature 630, 654, 664, 699, 705, 708: n = A,T,C or G
acttaccctatcttttctttaattaacattcgattccatgagcttcttatgtgaaaaaataagatttttctttagagagcagaagcagaagagtaaaatttattgtatagctagcaatatttttttatgccatctgtctcaaatcaaagagtcatcatagtaggaaataacatgttagttgtcatttggcatgagtgtgcattccagtaattcttaattgatatttgattaattccatacctttgattaaaacatgctagttcaaaataagactgctcagtttccaagggttttcaagcctacttacctttataaaggttctctagtctctgattagccatgactgtattggactttgaacattttctgaactaaaaacctctattctaaactaatctcatttggatgtgtaagtcttttgtaaaggcaagaataaataatatccaggacaatttattagttttctcagtattttcccaaatattagaatatttacttcattattggttggctgccaatgaccccatatgttctgtggagaatagtagctttatctttgatataatacataggtctccaaatagggtaatacttcgccaattggattagattttcaaagtaaaatttaanaggttatctggttttcttggggangggtcaaatnttttttggttaatttaaagctcccaaattttgatnaaattnaanaa

SEQ ID NO: 1927 - DNA, 662 bp, Homo sapiens
  misc_feature 544, 594, 659: n = A,T,C or G
actacttcaggtaatcattgttttacttaaagttcagattccagcatatattgagatgaatattccctggttatactttgtcaatagttttctcattgctacagtgtattggtttaattgtcacaagcttaatttaaaagacattggattacctttggatccatttgtcaactggaagtgctgcttcattccacttacaattcctaattttgagcaaattgaaaagcctatatcaataatgatttgttaatattattaattaaaagttacagctgtcataagatcataattttatgaacagaaagaactcaggacatattaaaaaataaactgaactaaaacaacttttgccccctgactgatagcatttcagaatgtgtcttttgaagggctatgataccagttattaaatagtgttttattttaaaaacaaaataattccaagaagtttttatagttattcagggacactatattacaaatattactttgttattaacacaaaaaagtgataagagttaacatttggctatctgatgtttgngttacctcaaaaaaaaactacctggatgcaaactggtatgtaaatctganatttcacctgacacttttaagaaatcaacccaaacattttttatttaaatggttcaaattggaanccc

SEQ ID NO: 1928 - DNA, 710 bp, Homo sapiens
  misc_feature 579, 616, 633, 636, 665, 687, 689, 692, 696, 701, 705: n = A,T,C or G
acctctactaaccataattgcatcactaagcctgttagtttgagagggtcttaaatttgttaaaactggaaaatctttgtatagggactccattcatttgactcaaggttatagacttccaccgtattcagaaattcattgccatcgaatcctcccactgcataaatggtgttccctacagttgcaatcccagcattgctccttggtgaagtcatatttcccatcatcttccattcatttctagttggatcatacatttccacacaactgatggcatgagaaccatcaaagccaccacatacaaacagttttccattaagaacagccactccagctcctcgcctagccacattcatgggtgcaattaaagtccaggtattattttcaggattgtatcgttctactgtgttcagacaattccaagattctgcacctccgattatgtacgcggggccttttttcttttttccggcgttcaagatgtcgaagcgaggacgtggtgggtcctctggtgcgaaattccggatttccttggggtcttccgggtaggagctgtaatcaattgtgctgaccacacanggagccaaaaaccctggttatcatcttcccgtgaaanggggatcaaaggggacnggntgaaccaaacttcccgcttgcttggtggngggtgacattggtggatggccncnagncaanaaaanggcnaaacc

SEQ ID NO: 1929 - DNA, 471 bp, Homo sapiens
acgcggggacctccggcctagccatgtgatttcacttccactccataacgctcctcatactaggcctactaaccaacacactaaccatataccaatgatggcgcgatgtaacacgagaaagcacataccaaggccaccacacaccacctgtccaaaaaggccttcgatacgggataatcctatttattacctcagaagtttttttcttcgcaggatttttctgagccttttaccactccagcctagcccctaccccccaattaggagggcactggcccccaacaggcatcaccccgctaaatcccctagaagtcccactcctaaacacatccgtattactcgcatcaggagtatcaatcacctgagctcaccatagtctaatagaaaacaaccgaaaccaaataattcaagcactgcttattacaattttactgggtctctattttaccctcctacaagcctcagagtacc

SEQ ID NO: 1930 - DNA, 693 bp, Homo sapiens
  misc_feature 508, 643, 657, 689: n = A,T,C or G
acaaaaggtgaggagtgaggagatagggtagttcttccttggctggctggcttcataatccctgggccccgcagataattaaatcgactttttctgtctcaggcatttgtatgacctctttggaggttccctgctgggtagttatctttgtatctgatggacccatctcaatttaaaatactctgccaggttcggaggttcatgcttgtcatcccagcactttgggaggctcagaggtgccattggcttgagcccaagagtttgagaccagcctgggcaacctggtgaaacctcttctccattaaaaatacaaaaaattagccaggcatggtggtatgtgcctgtagtcccagctactcagggagctgaggtggaaggattgcttgagcctgggaggtcaaggctgcagtgaaccttgattgtgccactgcactccagcctggatgacaaagaccctgtctcaagaaaagtctgtaattctttcctaacccttaatatccagcctcantcctgaggttttctttacctctgggggctattttatgccggctctctcctgaatgtcacacatctggtccttcaagaaaacattcttcacatccctggcctgaaaaaaacaattttcaagggagaatcgcatggnaaccagcccctttntggggcttccccaacttaaatgggttgtaccncggg

SEQ ID NO: 1931 - DNA, 708 bp, Homo sapiens
  misc_feature 592, 610, 618, 655, 666: n = A,T,C or G
acccataaaaatccttatcactggggccgggcgcagtggctcttaacataaacactttaatgtcaattaaggcttcaactcaatgttaagtcaaactcaagtcaatgctgaactgactctagtgtcaattaatgcttgatggtttgctatacacattgtatttggaacaactatctccaaaatgaattttctgatatcctgcaaggagtgagctcagactgaagactttggcacactgatgacatttataagatttctgtccagtatgcattctctgatgtctagtgaggtgtgaatgtgaattaaaggctttgccacaatcatcacacttgtgaggtttctctcctgtatgaattctcctatgttttgcatagaatgaagcttgactgagaccttgtcacaatcatgacatttgtaaggtttctctccagcgttgagttcaccgatgaactgcaaggtatgaacaatgtctgaaaaatctgccacatttattaccctagtatgatctctcttccttatggattctccagtgattccaatggttgtagcattactgaagactttgtgacaatcattaccttagtaaagtttncctacccatggattgccntgacggtnaacaaagtgttgacttgcctactaaaaggctttgccncacccctttanccttgggaaaggtttctcttccaagtggggaattcttacctt

SEQ ID NO: 1932 - DNA, 708 bp, Homo sapiens
  misc_feature 417, 504, 528, 548, 615, 618, 638, 647, 651, 670, 673, 676,679, 681, 682, 687, 701: n = A,T,C or G
acgcggggaagaaaaagaagagacatatgatgatattgatggttttgactccccaagttgtggttcccagtgcagacccactatcttgcctgggagtgtggggataaaagagcctacaggagaaagaagaagaagatatttatgaagtcttgccagatgaagagcatgatctagaagaggatgagagtggcactcgacgaaaaggagtagactatgccagttactaccagggcctatgggattgccatggtgaccagccagatgaactgtccttccaacggggtgacctcatccgtattctgagcaaggagtataacatgtatggctggtgggtgggagaactgaacagcctcgttgggattgttccaaaggagtatctcaccactgcctttgaagtggaagaaagatgaaacccangaaatatattttttccctctctcctgcctttatgaggaaactgatcatcaaaagttcccactccctacttctgccaccccaccaacngccttggacttcctctcttttgcntgaaagaagacccaagtctntttgacccccttcagaagagactgttaagctaccaagtaatacaaagtggggaagaaggcacgtttnttnaaaccctgtttcttaaaccnagccctaantcantagcttcatcccccatttnttnaantgngnnccacncaaccccattttgnccttttt

SEQ ID NO: 1933 - DNA, 491 bp, Homo sapiens
  misc_feature 249, 293, 322, 323, 328, 337, 339, 362, 372, 374, 376, 378,381, 409, 413, 414, 416, 418, 432, 436, 468, 469, 471, 491: n = A,T,C or G
accccttaaccccttctccttcacccttagcagcaagtcccacttttctagggggcaagaaaccccaaaccccttccctccgtgtctttacgctctcttttctctgggtttacttccttcactatggcaaccttccatcctccattcctccttctcccttagcctgtgtgctcaagaacttaaaacctcttcaactcacacctgacctaaaacctaaatgcctcattttcttctgcaacaccgcttggncccaatacaaacttgacaatggctctaaatggccagaaaatggntactttcgattttctcatcctacaaaaanntaaanaaatttttntncaataaaatgggcaaatggtctngaggtgcctngntntncangcattttttttacacattcgtccctttncttnntntntggtgccccaaagnaaantcgtcccaaaatattcctttttttcccttccnncngtaccccttatatcccaaan

SEQ ID NO: 1934 - DNA, 480 bp, Homo sapiens
  misc_feature 129, 166, 244, 319, 363, 390, 405, 410, 438, 443, 444, 448,457, 459, 464, 472, 479: n = A,T,C or G
actaaaagacctaatgcatggcctcatcaccttaatgctggattctcggattgaagatcttgaggaaggacaacaggtcatccgctctgtgaacctcttggtggtgaaggttctggagaagtcaaccanaccaacatcctgagtgccctacttgttttgctccaanacagcctgctagcaacagccagttcttccaaattctcggagcttgttatggagtgtctctggagaatggttcgactgntgcctgataccatcaatagcattaacctaaacagaattcttctggatatccacattttcatgaaggtcttccccnaagagaaactggagcaatggcaaaaggggattttccataggganccctaaagacccctgctcacacctttnttgcaaattaaaaanggccnaagaatccttgacccacctaatcgattnatcgnnaacnaaaaaccangnctgancctggaangcccttnt

SEQ ID NO: 1935 - DNA, 467 bp, Homo sapiens
  misc_feature 27, 60, 141, 166, 180, 207, 221, 230, 237, 245, 252, 258,259, 267, 271, 274, 275, 299, 308, 309, 330, 336, 356, 358,363, 367, 375, 379, 380, 386, 388, 391, 408, 412, 413, 414,430, 435, 439, 448, 449, 464: n = A,T,C or G
acttaactggataaaggacaaagcctnggcctggctggatcacaccagcaccaatattgncaatggtggtgacagcaattacaaagccatacttccctgtgcaggtcccctccacctcgtgaaaagcttctgcttcaccgngttgagcaagttggggccgaagtancgcgggtgcaacangatttcgtgctctagggagatatggtngaacatcttcccanaccaggtangcaggcnaagtccanacctccnaccccnncgtacctngggncgnnaaccacgctaagggcgaattccanccactgtcnnggcgttactataggatcctanctcggnaccaagctttggccgtaaanantgganatancttgattnctgnnggaaanantgntatccagtcacaatttncccnnnaacataccgagccggntagcntatnagtggtaannccttggggtgcctantga

SEQ ID NO: 1936 - DNA, 483 bp, Homo sapiens
  misc_feature 178, 334, 343, 352, 370, 384, 402, 423, 432, 440, 452, 475: n = A,T,C or G
acgcggggggggccacttaaccatccgccttgccctgggtggctgcaccaatcggccgttctaccgcattgtggctgctcacaacaagtgtcccagggatggccgtttcgtatagcagctgggctctatgatccattgcccaacagtcatggagaaaaactcgttgccctcaacctanacaggatccgtcattggattggctgcggggcccacctctctaagcctatggaaaagcttctgggtcttgctggctttctccctctgcatcctatgatgatcacaaatgctgagagactgcgaaggaaacgggcacgtgaagtccttgttacttttnagaaaacangatacagangcttcagatactgagctncacgaaaacataantgagctgactttagtgangcattagcaagtgggaaccanggtcaaggnccttttgnaaacacttgaancgatcttaattttggtagaattnggagttca

SEQ ID NO: 1937 - DNA, 479 bp, Homo sapiens
  misc_feature 113, 153, 208, 221, 254, 265, 298, 300, 301, 314, 325, 342,349, 360, 365, 372, 382, 389, 397, 402, 410, 418, 433, 451,456, 457: n = A,T,C or G
acgcgggagaatatcccttctgctctggtagaggaaagctgagtgtagggctgatgttacggaggatgtagtcctcctatgtcttcctggatttttctccctggatcccaganaaatagcattcaacccagcttgctcactcccatttgcatntggatcccagagaagtagcattcaaacccagcttgttcactcccatttgcaactnttctttgctgcangcagttaggctgggataacataggcaattcatnttcctcaatcnctttttggacctgaccgatgaggctgaagaaanannaggttcgagactnggtgcttacanatctccatggaccaacnggctggnatcaggtcctncctcngggattnaaacgagggngcctacnaggccttncctanatggtaancgaagccncttggtggttctaanccctgccctgccttattncaagnnaaccccatttcttgaggaacca

SEQ ID NO: 1938 - DNA, 476 bp, Homo sapiens
  misc_feature 5, 42, 144, 154, 172, 173, 188, 254, 316, 328, 341, 377,379, 383, 391, 394, 397, 409, 433, 440, 442, 468, 475: n = A,T,C or G
acganaacagaaccaatctaaaaatggctgatgttactttangagcctgaaaaaaacaggagatccttgaagacccagccaccccttctagaatggtcaataatgggcacctttccaaagctactaagaggcacttggcatttnaggagtttgncttatggttgcataaaannatccctttcacccanacctggcaccctttatggttcaaagttaagaacgggaagaatgggtggcaaggtggctcctggaanagctcacccagcacagctgccctgagctcggggccttggtttctgaccctggggatatttanatttaataaatnttatattaaattncacagaagaaatagataatataaaatctgatggggntngggnaagaaaancgntantggactcattcngggaatcccaaagctgggagaagntccattnanggcccaacttgacctccctctttgancccattng

SEQ ID NO: 1939 - DNA, 456 bp, Homo sapiens
  misc_feature 397, 398, 452: n = A,T,C or G
acgcggaaacggaccacagttctagagtctgaggggacccgagagtcggccatcaatgtggcagaagggaagaaacaggcccagatcctggcctccgaagcagaaaaggctgaacagaaaatcaggcagcaggagaggccagtgcagttctggcgaaggccaaggctaaagctgaagctattcgaatcctggctgcagctctgacacaacataatggagatgcagcagcttcactgactgtggccgagcagtatgtcagcgcgttctccaaactggccaaggactccaacactatcctactgccctccaaccctggcgatgtcaccagcatggtggctcaggccatgggtgtatatggagccctcaccaaagccccagtgccaggggactccaactnntcttcagtggggagcacataaatgtccatggtcctcggcccgcaccacgctaanggcg

SEQ ID NO: 1940 - DNA, 438 bp, Homo sapiens
  misc_feature 332, 375, 379, 382, 401, 404, 409, 421, 430: n = A,T,C or G
acagctgtctgcattgaaaattcatgcatggagaaagggagtaagcaagggagaaacggtgcgattcacatattccgcgagatcatcaagccagcagagaaatccctccatgaaaagttaaaacaagaaagccgctttagcaccttcctcagcctacttgaagctgcagacttgaaagagctcctgacacaacctggagactggacattatttgtgccaaccaatgatgcttttaagggaatgactaggtgaagaaaaagaaattctgtacgggacaaaaatgctcttcaaaacatcattctttatcacctgacaccaggagttttcattgnaaaaggatttgaacctgggggttctaacattttaaagaccacncaanggnagcaaaatctttctggaanaangtaantgatacccttcntgggggaantgaattgg

SEQ ID NO: 1941 - DNA, 443 bp, Homo sapiens
  misc_feature 248, 267, 340, 358, 381, 387, 394, 396, 401, 406, 410, 431,434: n = A,T,C or G
acatgaattagaagcgtgcatctaggattatggccaaactgttttaaaaatgcagaaatgtaaaattacatcttgaaaatatgaagagatggtctacacacttcaaaaatcaaatgttgctataccagagatgtatgacaatcacgggattcaagtgacaagcagtaagatctcaaaaattaatactggtcaaagataatgggaatatttttgcatttcactgaaaatacattgactactagaatacnaaatctagcaggaactcanggaaaaaaattacaaaatctatagccaattacttaatatttcttattacctaaacaacagcatgacattaacnagaaaactgcacctgcanttttattgccaatgctccacggntaattnagttctncnaaaantgaanatgnaatccaaaactgggttctaanctncaaatgaaa

SEQ ID NO: 1942 - DNA, 534 bp, Homo sapiens
  misc_feature 171, 401, 410, 415, 418, 425, 441, 454, 458, 475, 483, 484,517: n = A,T,C or G
acgcggggccctactgccgatgccaaatatttgagagaagggaacttttgctgaggttttctctgaggtttttttgatgctttataggaaactattttttaaaaaaagccatttcccaccaaggacacagtggatgtgttttccctgactccagcagggcaaggaatgtanccgagaggttgtgtgggctgggctctggtgccctcttccctggccaggacacctctcctcctgattcccttggcaccttgtctttctgtctgtttacctgtctccctgcctgcccatctgcatcttttgcagcccactctgacttccatctgggggctgagaccacccttgctgccccttcttctgcttaagaatgtccttttagctgggcatggtggctcacccctgtnaccccaccnctttnggnggggggngacggcagaaacctgnggcaggattctanaacnacctgacctacatgganaaactccnnctctggtaaaaatacaaaataaccgggcatggngggcacgccttaatccg

SEQ ID NO: 1943 - DNA, 416 bp, Homo sapiens
  misc_feature 16, 123, 169, 197, 217, 223, 231, 237, 241, 254, 255, 258,271, 275, 308, 316, 320, 324, 332, 340, 342, 353, 367, 368,372, 374, 380, 381, 384, 386, 390, 396, 412: n = A,T,C or G
acaaaaccaaatgttngttactataacttctgcatcacaattaaaatccaaacagttttttaaaaacagtcaactcaatcaaaacccactacttcagaatcaatagcttctttgaagccacantaacattaaatatggttaagactcggaatgcagaaatttggttggntggaaagctaattaaacttccaacttgntcaaatagaaattacaaatnaggctnaattgtgngttttnacanaggatacagtccnntgnaatcaccaacacntggncagctatgtgagaattaaaagtcctgagaatancaaggaantttnaggngttccttntatacaananatattgatgtnctgttcttcccaannaganantttaanngcntntagnggaatnacacgcacaacccttncttt

SEQ ID NO: 1944 - DNA, 536 bp, Homo sapiens
  misc_feature 78, 279, 289, 294, 297, 317, 326, 330, 338, 341, 348, 362,370, 385, 390, 391, 400, 403, 405, 412, 419, 421, 424, 429,431, 435, 436, 437, 443, 446, 456, 462, 463, 467, 469, 474,477, 479, 482, 491, 497, 516, 517: n = A,T,C or G
actaaatgcacaatttaaacatcagttatacactgtcattagttttcctcttaaaaaaatcagttcctgggcttttanatgtgttttctttttaaaaaaaaaagcatccttctcatggtccacaattggtccatactgacaccatttggtaacaatcctatcaaagatccacatgttcttgctctctttcaggccactccatggccagcgggagtcttgagtcctctctgcgtgttgttgtggcaggaggccatggtcccgggactctgcctagagcangacggcctgngctanctncttgatggtggacgcagctntctccaggnattnctctgttngtnccaccgngaccacaacccgantgctgggnggagggagacacttnttttnnttttctganttngnccctgangaaagcnanacnttttngngatnnntgggcntanaattacctgnacaatnnggcnanttgtngcnanacnaatggtctntttcanttttatggggaaggttggnnaaaggactccccacacttt

SEQ ID NO: 1945 - DNA, 351 bp, Homo sapiens
  misc_feature 298, 320, 323, 333, 345, 348: n = A,T,C or G
acttggcagggttcttgccacagacacatttggctccaggctgcagttcacagagtggtttgaaggggatgcaaaggcttttagctcccatggatggagcaccaggttcaagatcttgatccctggagtggtctttttgatccagtcctcacagtcaatttccccacagaatggaatctgaacaatctttccagaatctagtatcttctgaaagtcttccattgtattagccacaaccatatgaagtcttaaggtcttcaaaagcccttgtgaaaagggtgacctggatgtcttccanaatagcttgaagtttagatctntgnctcatttttnagcaactgtcanctnttt

SEQ ID NO: 1946 - DNA, 522 bp, Homo sapiens
  misc_feature 388, 414, 418, 422, 440, 445, 456, 458, 467, 473, 484, 494,518: n = A,T,C or G
ggggcaagactgtggatttcacgcaggatagtaattatttgttaaccgggggacaggataaactgttacgcatatatgacttgaacaaacctgaagcagaacctaaggaaattagtggtcatcttctggtataaaaaaagctctgtggtgcagtgaggataaacagattctttctgctgatgacaaaactgttcgactttgggatcatgctactatgacagaagtgaaatctctaaattttaatatgtctgttagtagtatggaatatattcctgagggagagattttggttataacttatggacgatctattgcttttcatagtgcagtaagtttggacccaattaaatcctttgaagctcctgcaaccatcaattcttgatctttnttcctgagaaagatttcttgtgcagncggngaanattttaactttttaagtntgatnttatagtggananattagaatnctccangggcacttggncctatcctgnggaatttagtcctgagggaacctnttgc

SEQ ID NO: 1947 - DNA, 467 bp, Homo sapiens
  misc_feature 89, 286, 290, 319, 396, 406, 428, 431, 459: n = A,T,C or G
acttgttgtgaaccaaaccagtgatactttgcagaattgcacattagaactagctacactaggggatctgaaacttgtggaaaagccgnctcctttgactcttgctcctcatgacttcgcaaatataaagctaacgtcaaagtagcatcaacagaaaatggaataatttttggtaatatagtttatgatgtctctggagcaacaagtgacagaaattgtgtggttctcagtgatattcacatcgacatcatggactatatccagcctgcaacttgcactgatgcanaatnccgtcagatgtgggccgaatttgaatggnaaaacaaagtgacagtttaacaccacatggttgattttaaatgactacttacaggcacatattaaagtcaaccaatntgaaattgcntgacttccaaaaaaaaggcccnttntgggttcttggggctttattggcagccnaccctttt

SEQ ID NO: 1948 - DNA, 548 bp, Homo sapiens
  misc_feature 407, 439, 473, 496, 498, 535: n = A,T,C or G
actcagtataaatgcagatgcttatgacagcgacatagaaggcccatgcaacgaagaagcagctgctcccgaggcaccagaaaatacagtccaaagtgaagctggtcagatagatgacctggagaaagcattgagaaaagtgtgaatgagattctaggactggcagagtctagcccaaacgaacccaaagcagccaccctggctgttcctccaccagaagatgttcaaccttctgcacagcaactggagctgctagaacttgagatgagggcaagagcgattaaagccctaatgaaagctggtgatataaaaaagccagcctaggtatttaacttgattttgaattttaggtatgttttgaacaaagccacatcatttaattttggatctaaaatttatttgggggncttatatgttattttcatggaacccttattanggactcattttagccctaaattacctggtggtgnttctttttattttttgctacttnantttataaatggggtactggctatgaattctggcatangttggtagcctgg

SEQ ID NO: 1949 - DNA, 531 bp, Homo sapiens
  misc_feature 289, 292, 343, 364, 385, 396, 423, 425, 427, 450, 453, 459,462, 468, 484, 490, 494, 497, 500, 510, 527: n = A,T,C or G
acacacctttgtccctgggtaaattatattcattatgcccactgatgcagcacgcataaaccaacacccctgcatggctgaacagggcctaatctaggactgatgggagaagggcttgcaaccaagatcaaggtgtttctccgctaatactgtctaccaagctgatccctacaaaaatgcatataaaagcaggcaagtttagctactgtgttgcaagagaaaccaggaccttgttaaatagttctctccattaccatttattctctcaagggaagcttaaaaaaaaaancancaacaaaacaacacattggtctggccacctcatgaatccaacaagcattantgtggcatttcagtggagaangaaacttggggggaaaatccntcaaggttggnagaaaagctcccaattaactgtcctgncntnttttcctcattcaagaccatccnttnttttanacnctctgncaataaatggggtcangcttanggcntgncangggaccaaangacatataaccgatttnttga

SEQ ID NO: 1950 - DNA, 347 bp, Homo sapiens
  misc_feature 32, 33, 38, 39, 43, 44, 58, 67, 93, 111, 128, 144, 157, 185,192, 194, 221, 240, 253, 263, 269, 280, 285, 300, 307, 309,319, 345: n = A,T,C or G
actttttttttttttttttttttttttttttnnagganngaannggttgacaacttcngcggttgantagttcccattgaacagacacaaggncaaaacgtccaggctganctggtagtagttattcngggagtgccattgggngcttccatatttncaatttctgcttggaatttattttctancttgtcnancagggggtaatcatatattaaggtttncttagcgttacgacttacncccaaatccaggntaatcaaggnaagctntcccgagcttncatcngacaatttgcttttnacattgnantttgatttgntggatcacttttgctcagggttgggnct

SEQ ID NO: 1951 - DNA, 384 bp, Homo sapiens
  misc_feature 6, 26, 67, 78, 81, 98, 121, 138, 158, 204, 220, 246, 303,307, 308, 310, 314, 360, 367: n = A,T,C or G
actttntttttttttttttttttttngagaaatgtaaaactcagtttaatttcaagtttgtataaanaatgtatgccncantttgtattttataaacncaacctatcttattataaatacnaaataaaaaaagtgatncgttagctgttatgaagggngaaaacattatataaacttcaaaaggctgctttctgcatctgcatntatgtaatttcatggntctctaccaatttcatttacagaaanaatctctatagccaaattattgttcactttcatgccccaacatgggaaggggtaggngaanntntgtnggaatacaatttattgtctgctcctccctcaaaagagccctgtgtntggccantctacactcataacttt

SEQ ID NO: 1952 - DNA, 471 bp, Homo sapiens
  misc_feature 155, 164, 288, 360, 365, 388, 425, 429, 436, 439, 443, 451,456, 459, 466, 467, 471: n = A,T,C or G
accatcgcacacactattgacgtcattggaaagaaggaagacgactttgtctgctgccttcttttgagtggcaagccactgcactggacccatctctgctattttctttttctgccactttcaaggatgacctcacttctgcaatggttttgaanaaattcagngaagtaacaaattgtgtgatggaaacatatttcatgatgggtaaaccacaagaaccttaatggggggcagtagtgtggtggtagaaaaggaagtcttcttgatcctttcgtgcctccacattanatagatccctgccaccaacacccatgtggccaccagcaaagacagcaggaggagaggcagccagcctccggntttgnttttgttgtttccacagggaaanggacgccttgtttgtgggcaaaaccacaaattgttcntttntgtccgnatncaanccctgccnccaantanggaaaanntggn

SEQ ID NO: 1953 - DNA, 544 bp, Homo sapiens
  misc_feature 50, 56, 59, 81, 112, 176, 319, 351, 381, 395, 396, 400, 410,421, 473, 474, 477, 481, 485, 487, 488, 504: n = A,T,C or G
actttttttttttttttttttttccacacctgccctttattggtctcttntagcanagnggctccaggcctttcacgcctntcaaacaccacccatgagggtttaggaaggngccatcttctgtgaaggcccaaagcttacccaagtcttggagcccaagttgaatcaccaaccanagggttgggagaggaaaaggaaacaggcagaggggaaaggcaaggctctgcagtgaaggggactgatatcaagggaatgctgaggtccagcagtgtctcctgaaggcatgctgcatcctaaggctcctcaggactggatgaantaggagatctgtgtgttgagcaagttcacatntatatggcaactttaaggaggcgcttgatntcaggctcaatgtnnatgnttgggaaagngccgcttgaancgtcgaaaggctctccttccggcctttgaagaacttttaaaagttccagccnnatntgancggngnnaaggctccaaatgatnagcttgggatcggtcatgaggaaaatgggtcatcataagg

SEQ ID NO: 1954 - DNA, 479 bp, Homo sapiens
  misc_feature 377, 392, 399, 423, 445, 450, 467: n = A,T,C or G
actacttcaggtaatcattgttttacttaaagttcagattccagcatatattgagatgaatattccctggttatactttgtcaatagttttctcattgctacagtgtattggtttaattgtcacaagctaatttaaaagacattggattacctttggatccatttgtcaactggaagtgctgcttcattccacttacaattcctaatcttgagcaaattgaaaagcctatatcaataatgatttgttaatattattaattaaaagttacagctgtcataagatcataattttatgaacagaaagaactcacgacatattaaaaaataaactgaactaaaacaacttttgccccctgactgatagcatttcagaatgngtcttttgaagggcntatgatnccaagttattaaatagaggtgtanttttaaaaacaaaattattccnaagangttttatttgttttttnagggaccctatt

SEQ ID NO: 1955 - DNA, 533 bp, Homo sapiens
  misc_feature 218, 291, 320, 375, 396, 399, 405, 414, 418, 426, 439, 442,452, 453, 459, 467, 473, 479, 483, 488, 508, 510, 513, 518: n = A,T,C or G
caggtactctttaaaaagggactgcagggctgggtgtagtggctcacacctgtaatcccagcactttgggaggccaaagcaggtgggtcacttgaggccaggagtttgagaccagcctgaccacgtggcaaaagcccatctctactaaaatacaaaaattagctggacatgatggtgcactcctgtaatcccagctacttggtaggctgaagcatganaattgcttaaacctgggaggcataggttgcagtaagccaagatcatgccactgcactccagcctgggcaacanagtaagactctgtctcaataaataaatangaaaataatacgggactgcagtgctaacagtaatttatacatttttaaatggtcngagtatgtttagctgggctantgnacaatntactacccngaangtgcagtntttgattggtttnggngctttgggtnnggaagngaactgtncaaaanattttnttgncatgnatggattctgtaatgcattncnganaaatntgttcctttcttact

SEQ ID NO: 1956 - DNA, 529 bp, Homo sapiens
  misc_feature 77, 164, 320, 336, 344, 375, 415, 422, 440, 460, 466, 474,480, 482, 490, 505, 515, 518, 521: n = A,T,C or G
acagtattcatttatgcttgaaattccagtcctagaccaagcttgtggccaccagcattgacgttcttgccatccanaagagctgacagtgtcagtttaatacctggctttagagtctggtgtatcctaaacctatcaggctggagttgttcactttagccganaagcaggcgtcagggtcaatctgatacttggctgctattccgaagcgtgtgttactgtttcctgctgtccaggcaagattgacagcggtctccaacttcttgttcactttctggtaaatggagccgcaaactctgtcccgtcattcacattagtgngaagctggaattcatnagtcttgnagccaactgcaaagttgctctgggtcactcnggattttgcagtctcaaaaattatctggtagccgggcaancagcctngtaacctagcaccaaagnaccccggatgggaagcccanaatgtncaaaatcnttgcgnanccaggtantgtgctcccgcttgnacctcggccnganccnctaaggcg

SEQ ID NO: 1957 - DNA, 485 bp, Homo sapiens
  misc_feature 38, 158, 336, 394, 397, 399, 428, 432, 434, 445, 460, 469,477, 478, 480: n = A,T,C or G
acgcggggaggcattgaggcagccagcgcaggggcttntgctgagggggcaggcggagcttgaggaaaccgcagataagtttttttctctttgaaagatagagattaatacaactacttaaaaaataagtcaataggttactaagatattgcttagcngttaagtttttaacgtaattttaatagcttaagattttaagagaaaatatgaagacttagaagagtagcatgaggaaggaaaagataaaaggtttctaaaacatgacggaggttgagatgaagcttcttcatggagtaaaaaatgtattttaaagaaaattgagagaaaggactcccnagccccgaattaattccaatagaagggcaatgcttttaagattaaaatggagggtganctnancagctttaaagtttagtttaaaaggtggngggngnattaaaattanttttgaaggcgaacnttttaaaangaggattnnanccgaa

SEQ ID NO: 1958 - DNA, 544 bp, Homo sapiens
  misc_feature 472, 475, 501, 514, 539: n = A,T,C or G
acacatacacacctaaagagtcatggccttcttaaacagctttcttaatcctttctggaaatatcctttggttcatttttattgcccctctctaggcaaaacaaagtatgttaacgcaggtatcagtgattatttcctagcacttgtaagcaaatatccttaccaagaggaaccattcaacttttataatatcgtaaagcgtggagttaagatgtgtttttaaaaaatatacaggctttttatatgcttggatctgaaaaaggtaacatccacaatgacattctattacagagttcttacaatcaccctagcctactacactctggtataatactctttcttcaattctgtttaacagaataaaaagtaaccaaaggttaaagcaatgcatttgaacttaaaatatacctgcccacaggaattaagtagtttattcccctcctatacataatttctcaatcccctttacctntgncttaaggggtaagcacatagtctgcncacagattgatgntaccaagtactgtatggattattgnataca

SEQ ID NO: 1959 - DNA, 484 bp, Homo sapiens
  misc_feature 19, 35, 60, 66, 86, 89, 97, 111, 156, 159, 164, 178, 195,202, 216, 220, 251, 259, 271, 277, 285, 299, 316, 327, 338,345, 363, 364, 366, 370, 386, 402, 403, 422, 437, 442, 445,447, 460, 480: n = A,T,C or G
acttttttttttttttttnggttttttttttttcnaagccattactttttattttgaaanatttgngaaactcttcacatcatggnganagtttgtntgattaataaaaancagcttttcatgaaatgcttggaggggaacaagttctcagcctgnganatccnaccatcccattaantttgaagtttctcttgnttaatanaaaaacaaaggggngggngaaaaaaaggaggaacatgctaaaaaccttntgacaatnttccaaatgtgnggaaanaacaaccnattcaccaactccntttttttattttacaanttgtctacatntcactctttgntttgggnctttctggctgaaacagnntngaantccctaaacccctganaagacccctggttttnnaaagacctaggaggaaaangccttgagggatgcntgganctncnaaaaaactagaangcctgggctcccaaattttnaacc

SEQ ID NO: 1960 - DNA, 532 bp, Homo sapiens
  misc_feature 306, 388, 442, 456, 470, 502, 506, 511: n = A,T,C or G
acatagtgtcgcgaactcaaatcggcatttagatagatccagtggtttaaacggcacgtttttgcttataaaaaaagtgcaaaaaagatgtggtttacaagttaaagctacagaatccctttttgctgaattgcaccagttttaaagcctctggacagagcagtatttcgtttaaaactttgtttttcttaaaagcttacagtgtttggctaattctcctcccctttttacaagacgggggccggagggtggacactggtggcaggttaagggatactgtcactttaagaagcctgcaattgaagngtaaacatggagaaattaggggctgattttttaaactgtgtgagatattaaccagccggccctgttataaaatcaggaaatncaaacagcgattacaccgattacaccccctttatatattttttacaaaaattcnctgagaaataatcnaacggtttcatctntttggcttttttgttttttaaaagggtcaaancctnctttnaatataaaaatttaaaggtta

SEQ ID NO: 1961 - DNA, 556 bp, Homo sapiens
  misc_feature 176, 301, 333, 347, 352, 390, 422, 446, 447, 458, 463, 476,479, 487, 490, 495, 522, 523, 534, 547: n = A,T,C or G
acaagacactacgggaacagtttgcctccctcccagcctcaaccacaattcttccatgctggggctgatgtgggctagtaagactccagttcttagaggcgctgtagtatttttttttttttgtctcatctttggatacttcttttaagtgggagtctcaggcaactcaagtttanacccttactctttttgtttgttttttgaaacaggatcttgctctgtcacccaggcttgagtgcagtggtgcgatcacagcccagtgcagcctcgaccacctggctcaagcaaatcctcccatctncatctccaaagtactgggatgacaggcgtganccacaagctcccancctangcccttaatcttgctggtattttccatggactaaaggnctggtcatctgagctcacgctggttacacagntctagggggctgctctctaactcnnagggggttttngtgangctcttgtggccnaancaaactgnatnttgancaaaatacaaaagccttttaaaccacnngcctggatctncactggaagccanttggtgccc

SEQ ID NO: 1962 - DNA, 513 bp, Homo sapiens
  misc_feature 318, 328, 387, 391, 413, 443, 452, 460, 462, 467, 479, 492,504: n = A,T,C or G
accctcagaattgatgtgttgagatcctgacccctaaggtgatggtcctaggaggtggggtcttcaggtgggcggagcctcattcatggcatgagtgcccttgtccaaggggccccaaaggcttctggctgtctcttggccatgtgaggacacagtgggaaggcagccatctacaacccaggaagcagctctcattggaaccctgactgtgctgtcaccgtgatcgcagacttccagcctccagaactgtgaggagtgtctgttgtgtataagccacccaatctctggtgttctgggatagcacccatacacactaanacaggggttnctgagtgcctggagagccagctccttccaagaggctgggtccctccttcttctttctcntttnttttctttattttttttttganatggagttcgctgtgtcacccgagcttganttcagtgtngtgatcananttaantgaagctcattnttggctaaagganccttcccctcancttcccagg

SEQ ID NO: 1963 - DNA, 546 bp, Homo sapiens
  misc_feature 131, 413, 446, 451, 498, 510, 540: n = A,T,C or G
actttctgctgctgaagtaatgcaatggtctcaatctctggaaaaacttcttgccaaccaaactggtcaaaatgtctttggaagtttcctaaagtctgaattcagtgaggagaatattgagttctggctgnttgtgaagactataagaaaacagagtctgatcttttgccctgtaaagcagaagagatatataaagcatttgtgcattcagatgctgctaaacaaatcaatattgacttccgcactcgagaatctacagccaagaagattaaagcaccaccccccgtgttttgatgaagcacaaaaaagcatatatactcttatggaaaaggactcttatcccaggttcctcaaatcagatatttacttaaatcttctaaatgacctgcaggctaatagcctaagtgactggnccctgctgaagggaattaacagatagtttcaancgcanaaggatgtgccagatggctcctggggaacagcttggcctttttgggngcttgacaggcnagaaaaacaaatgactcaaatggttaaccntgaagt

SEQ ID NO: 1964 - DNA, 533 bp, Homo sapiens
  misc_feature 123, 362, 405, 429, 442, 460, 470, 512, 522: n = A,T,C or G
accacgctggtctaatgcaaaaatggagattgctacaaaggaccctttaaaccctattaaacaagatgtgaaaaaaggaaaacttcgctatgttgcgaatttgttcccgtataaaggatatantggaactatggtgccatccctcagacttgggaagacccagggcacaatgataaacatactggctgttgtggtgacaatgacccaattgatgtgtgtgaaattggaagcaaggtatgtgcaagaggtgaaataattggcgtgaaagttctaggcatattggctatgattgacgaaggggaaaccgactggaaagtcattgccattaatgtggtgatcctgatgcaccaattataatgatntcaatgatgtcaaccggctgaacctgctacttagaacctctgnggctggtttaaaaggataaggttnctgatggaaccanaaatgagtttgggtttantgcgaattanagataaggctttcctttgtattattaaaagcctatgaccttnaaagcattantgctaaaaaac

SEQ ID NO: 1965 - DNA, 502 bp, Homo sapiens
  misc_feature 348, 384, 405, 421, 428, 433, 462, 498: n = A,T,C or G
acctgtaaatgtcctgaatccagcattgttgagctgtcatcaacattcttgtgtctgttttactgttacaatattaggtgaatatggaagtaaaggcattccacaggatcatcatttaaaaaaagaattctggtcctgttttctaaaaaaaaaactgttgtagaaattcttaatttggatctatttattagtcagagtttcagctttcttcagctgccagtgtgttactcatctttatcctaaaaatctggaatcagagatttttggtttgtcacatatgatctcttaacacttttatatttgaaaaaaataaaatcttctttggggaaaaattcttgggtattcttnccttaccagattatggtattaacttggagattcagnggttcatacccggttaagttnttgctaatatttccanaagattnttgtnttggtgaaaaaccggttgggatggggggnttttttggtcttgttgtcctcggcccgaccccctanggcg

SEQ ID NO: 1966 - DNA, 525 bp, Homo sapiens
  misc_feature 28, 31, 189, 280, 282, 290, 315, 319, 331, 342, 346, 378,381, 405, 406, 410, 422, 444, 452, 462, 470, 473, 483, 489,515: n = A,T,C or G
acttcattcctttttatggctgagtaanggnaaggaatattccatggaaacattttattaatccactcatcagttgatggacatttgggatgtttgggcttactttacaggtgtaatcatgtaagcatatctttgcctactccttcccacaaattaaggaaaatcagtagcaaaatgaagggcaagcanctaaaacagccagcaactggcacacagacaaggaaaagcacctctggtttttaggtaagccaatgaagagtggggccgagatttaatttcnanctaggttnaaacccctaacactttcaagcttgngttntgagttgagtcnatccacttaancatnaagcgccccatgggaaagtcttggatcagcangangagctccaaattaccgatcactgnntttnatctgtcctccnggactcctagattttttggaancactcatnggccaccaanggggctgnggntgggggttanataggnaaaactcttaacctgtcccatttttnattaaaagaa

SEQ ID NO: 1967 - DNA, 556 bp, Homo sapiens
  misc_feature 302, 314, 346, 360, 398, 418, 438, 444, 474, 475, 509, 512,522, 523, 532, 545: n = A,T,C or G
acgcggggacctcattcatttctaccggtctctagtagtgcagcttcggctggtgtcatcggtgtccttcctccgctgccgcccccgcaaggcttcgccgtcatcgaggccatttccagcgacttgtcgcacgcttttctatatacttcgttccccgccaaccgcaaccattgacgccatgtcgggttattcgagtgaccgagaccgcggccgggaccgagggtttggtgcacctcgatttggaggaagtagggcagggcccttatctggaaagaagtttggaaaccctggggagaaattanttaaaaagaagnggaatcttggatgagctgctaaatttgagaanaatttttatcaaanagcaccctgatttggctaggcgcacagcacaagaaggnggaaacatacagaagaagcnagggaattacagttagaagnccaacntgccccaagccagttctaaattttatgaannccaatttccttgcaaatgcattggatgtttttgnaanaaaaaaattnncttgacccncttgtttttaacncaaggatgggc

SEQ ID NO: 1968 - DNA, 498 bp, Homo sapiens
  misc_feature 10, 177, 197, 199, 319, 355, 379, 384, 391, 394, 401, 427,439, 442, 473, 484, 486: n = A,T,C or G
gcgtggtcgnggccgaggtacgtttcatgaccaaaatttatcatcctaatgtagacaagttgggaagaatatgtttagatattttgaaagataagtggtccccagcactgcagatccgcacagttctgctatcgatccaggccttgttaagtgctcccaatccagatgatccattancaaatgatgtagcggagcangnggaagaccgacgaagcccaagccatagaaacagctagagcatggactaggctatatgccatgaataatatttaaattgatacgatcatcaagtgtgcatcacttctcctgttctgccaanacttcctcctctttgtttgcatttaatgggacacangtctttagaaacattacagaattnaaaangcccagnacnttttcangcctttggtgattaaatgcacattancaaatctattgnctngtcctgattcactgtcttaaagcatgagcanaggcttgaaantntcatctgggatt

SEQ ID NO: 1969 - DNA, 560 bp, Homo sapiens
  misc_feature 438, 503: n = A,T,C or G
acgcggggagcacagttctgtccagagaaggaaggcagaataaacttattcattcccaggaactcttggggtaggtgtgtgtttttcacatcttaaaggctcacagaccctgcgctggacaaatgttccattcctgaaggacctctccagaatccggattgctgaatcttccctgttgcctagaagggctccaaaccaccccttgacaatgggaaactgggtggttaaccactggttttcagttttgtttctggttgtttggttagggctgaatgttttcctgtttgtggatgccttcctgaaatatgagaaggcccgacaaatactactacacaagaaaaatccttgggtcaacattggcctgtgcccgagcgtctgctctctgtttgaattttaacagcacgctgatcctgcttcctgtgtgtcgcaatctgctgncttcctgaggggcacctgctcattttgcaccccacactgagaaagcaattggatcacaaccttanctttcacaagctggtggcctatatgatcttgctacatacagctattcacatatttgc

SEQ ID NO: 1970 - DNA, 559 bp, Homo sapiens
  misc_feature 335, 337, 376, 491, 498, 505, 522, 536, 558: n = A,T,C or G
acaaaatgtggatcacactaaagactctgagccacagtctcctggcatttgaatattggtcatgtttctttattacggtttctttgttcttaagtatggttgttattgcaaaggattttctaagtttctttgtttgctttttaaaacatatcaagaatgagataacattttacatgggagagatctgtgccaaacagaaagagaaaggggacaggccaagcctttatgcctgagaaattgtgggggaaaatagagggacagatgaagtgagtcggtagggtgctggggtctctctcttcacacccattcttttttcaagacaacactttttgcanangtggggcttggcctttaacaacaaccagatgggtatcanggtgcctactaaaactgggccaggaacttggttccctgacataataggggagattgcaagcctctagaaaaagctccatgtggccacttctacattgcacaggagccaaggtgangactgcnaaagcanacaagtggatgggtganctgaaacacggtantagttccatgggccccaaaatnt

SEQ ID NO: 1971 - DNA, 528 bp, Homo sapiens
  misc_feature 276, 303, 314, 317, 320, 328, 355, 366, 397, 415, 465, 500,520: n = A,T,C or G
acttctgatagctcatcactttctgtgtcagaactttgaaaagcaaagacaggacatcgacttccttcgagactgcctactgattcttctagaagacagagatctactggggtagtccgggactgactgcaaagagcctcaggtaaagcagaggccattggcagcctaaggttggcagtcaaagaggctgcggaaggttgaaaatgaaaaggagagtaagcagagggatgataagacccaaaacctctgatgggatcagggtctgtaggaagaganaaatgaagctggggagaatccactcanggaagggccancanaangcctgtantaaagcctccaggatgttgcaatggancaactgtgcanagcttaatgagctccctgaaaaacaatgccncaatagggtgcaaaaggngggttctggggaggcctgtgggacaagacgccgactgtgggatccagtcncacaagtgccagcacagggccttggctgaattganatgcatcaaactgttgggangaacactt

SEQ ID NO: 1972 - DNA, 498 bp, Homo sapiens
  misc_feature 320, 358, 365, 368, 374, 391, 404, 409, 412, 423, 434, 474,481: n = A,T,C or G
acgagaaaagggtccgagcacaagccaagaagtttgcgccctcataagcagcgaccttgtggcatcgtcagaaggaagggattggtttggcaagaacttgtttacaacatttttgcaaatctaaagttgctccatacaatgactagtcacctgggggggttgggcgggcgccatcttccattgccgccgcgggtgtgcggtctcgattcgctgaattgcccgtttccatacagggtctcttccttcggtcttttgtatttttgattgttatgtaaaactcgcttttattttaatattgatgtcagtatttcaactgctgnaaaaatataaaactttttatacttggggaagcccccangggcganttnctcctnttggatgcaaggcatgntttttacccgggnaaaantgnacttggctagntgggtgtaagnaaaaacccccctcctcctgcccttcttttttaaaactttnaaaaacnggggtgggtttttttta

SEQ ID NO: 1973 - DNA, 475 bp, Homo sapiens
  misc_feature 71, 158, 170, 193, 197, 233, 244, 252, 262, 265, 293, 306,323, 324, 332, 345, 346, 369, 370, 371, 373, 374, 383, 384,386, 415, 426, 430, 444, 451, 455, 462, 463, 472: n = A,T,C or G
acacgagaagctccgaggatggctgaagtccaacgtctctgatgcggtggctcagagcacccgtatcattnatggaggctctgtgactggggcaacctgcaaggagctggccagccagcctgatgtggatggcttccttgggggtggtgcttccctcnagcccgaattcntggacatcatcaatgccaaacantganccccatccatcttccctacccttcctgccaagccanggactaatcancccataancccagtaacntgncctttccctgcatatgcttcttgatggngtaaatctgcatncttccttgtggcctcanncaaactgntttcttcctttanntgtttatattttataccccctgnnnanngggttgganncnaagagccaaatccctttgttccactttanttataaatggntggnaacctaaacggtgnacccaanggtnggctttnncctttggcntga

SEQ ID NO: 1974 - DNA, 483 bp, Homo sapiens
  misc_feature 36, 41, 58, 70, 85, 118, 128, 133, 148, 152, 183, 187, 195,203, 211, 217, 247, 289, 301, 303, 315, 324, 331, 342, 346,358, 367, 378, 402, 405, 412, 417, 420, 427, 429, 432, 442,444, 470, 475, 477: n = A,T,C or G
gggactttttttttttttttttttttttttttggancttancttttctgcagcatganatttactggcanaatttttcacaatanattttaaatctgtatctgtaaataagttattgnctgagtttgngtccncaggctcattctcanatanatgctgctccttatttttccacaatgagggngtancaggttgngtttgttntaaaaaanaacaanacgtttctattcttgctgatttgcatgaanacatttcttgattttcttcatccctttccctttttttggtanacggctgaaagnantttctgatgganttggtctgntgctgcntgaaaacccancttncctttattatancttggccantttaatttggngaaagctgatagtttgggatcttnatnttaaccnaagtnttngataccntnctnttattattanancttgtttggcaggactcctttacagnggggngnatcttg

SEQ ID NO: 1975 - DNA, 562 bp, Homo sapiens
  misc_feature 327, 344, 349, 378, 420, 490, 491, 493, 561: n = A,T,C or G
acagaacaccctagacaattcaaggcatcttaatctccatcaagaacaaaaaaaaataatttttgtcatgctgttaaatccatcattatggataaaactggtgcaaattggtcaaacggatccaacaaacactgatgtccaagctggcatattggcaactaatacgttaactggtggtcaatagagagtttaaaagatcttccctttcttcttgttcttttccaaggttcttgaagagttctgttgttctaaaatacgttgttgagcttcccagtttgctttctcatcctcgaactgacgacgtttttcctccaattctttggctgngcttccaaatctttttntttgntcatgggggccggtggagctcaccttcanagtccttctttcttcttccatttgtgccagaagggctcttantcaagctgccctttattctttgttgttatcactccattataagtcacagctgcaaggtttctgcttctgnngntctcatagtggacattattagtaacatctttcaagtcctgcatgtgtgttcttatcacatattcttang

SEQ ID NO: 1976 - DNA, 561 bp, Homo sapiens
  misc_feature 329, 331, 339, 341, 343, 405, 516, 528, 550: n = A,T,C or G
acgcgggatgtgagctcctgaaaaatctggccttgtctggttttagacagattcatgttatagatatggacactatagatgtttccaatctaaataggcagtttttatttaggcctaaagatattggaagacctaaggctgaagttgctgcagaatttctaaatgacagatttcctaattgcaatgtagttccacatttcaacaagattcaagattttaacgacactttctatcgacaatttcatattattgtatgtggactggactctatcatcgccagaagatggataaatggcatgctgatatctcttctaaattatgaagatggngncttaaatncnanctcatttggccccttttgatagaatgggggggacagaaggttttaaaggaaatgccccgggngattctgcctggaatgactgcttgtatcgaatgcccgctggaacttttccaccacaggttaattttcccatggcaccattgcatctatgcccaagctaccagaacactggnttgagtttgaangatgttgcaatggcctaaagancaaccttttgg

SEQ ID NO: 1977 - DNA, 560 bp, Homo sapiens
  misc_feature 265, 271, 294, 343, 355, 374, 400, 415, 419, 437, 465, 482,497, 500, 518, 526, 535: n = A,T,C or G
acaaaaagctgcattggaggatagcagtggcagctccgagttacaagaaattatgagaagacgacaggaaaaaatcagtgctgccgctagtgattcaggagtggaatcttttgatgaaggaagcagtcactaatttgtttgtttgtatttaaactccattgtttttggcattattccaacatgctttgttttaagaagccttgaagggaatgtcagattcatttttcttgatgtaatttatcaccataaaaaaaaaacccatgcnaacctnagtgagcacaggatttgcttctngcccattatttttattaaaactgaaaaaattttaactggattttttggncttggaaaaaantttttcttacttttccaanggggaagtttccttatttagactaantattttatccccatnccanggtataaacaggaattgntttgataggggggggagttattcctgcnacaaagcaacatgttgncctgattcaaaatcnaancagttccaatttgcctgngaaatggngctggattnaggctactcactggaggctaccttg

SEQ ID NO: 1978 - DNA, 561 bp, Homo sapiens
  misc_feature 181, 294, 407, 454: n = A,T,C or G
acttcattccacattcaatcaaagcaagtgcaaccagcacaggtgcccttcccaatcctgcaacacaatgcactgcaacacagcaacctggctcttcacgaaatttggtttttaacaggtttaaccaatcatctactatctgattagggggtggagctccatcatcaaatggccaatctanaacgtggattccttctttttcaactggagctttatcatatgtagcatcacaaactcgaaccaaagtcgtcactccatacttcttaagttcctctgtgaacttgttgagagtancattggtagggttgtgagttatcaaaaaacgcatgttctcataggaaatctccacaggggctgggccggtcattatggcaaataaaaatgtgaacgtgcgtgtgaatgtgatngggaaagtgaaaaaaaaaaaatcaataaatcttgaaatgtttcacangcagaaaacattaaaaagaccactaaaatgcctattatcaatcagtgttttctctattcaacttgttattccttatgaagcttctctcttcaagataagcaaagtat

SEQ ID NO: 1979 - DNA, 486 bp, Homo sapiens
  misc_feature 20, 174, 220, 250, 258, 264, 266, 299, 325, 327, 355, 358,361, 362, 364, 371, 377, 380, 384, 386, 391, 395, 396, 401,406, 408, 421, 423, 430, 445, 446, 447, 459, 486: n = A,T,C or G
acgcgggatcatcaatgccnaacaatgagccccatccatcttccctacccttcctgccaagccagggactaagcagcccagaagcccagtaactgccctttccctgcatatgcttctgatggtgtcatctgctccttcctgtggcctcatccaaactgtatcttcctttactgnttatatcttcaccctgtaatggttgggaccaagccaatcccttctncacttactataatggttggaactaaacgtnaccaaggnggcttntncttggctgagaaattggaaaggcgtggtggganttgcttctgggttccctaagcccttntnagggcagaaaagaaaacattcttttccnttnttnnanccggganggccanaancccntnaaaanggcnngaagngctgncntttttccatggtncnccgggtntctgtgctgtgtatnnnaaccacccatgngagggaataaacctggccctttggaan

SEQ ID NO: 1980 - DNA, 509 bp, Homo sapiens
  misc_feature 329, 369, 440: n = A,T,C or G
acaaggtgaatatcttaaccagacttgccgcagaattgaacaaatttatgctggaaaaagtgactgaggacacaagcagtgttctgcgttccccgatgcccggagtggtggtggccgtctctgtcaggcctggagacgcggtagcagaaggtcaagaaatttgtgtgattgaagccatgaaaatgcagaatagtatgacagctgggaaaactggcacggtgaaatctgtgcactgtcaagctggagacacagttggagaaggggatctgctcgtggagctggaatgaaggatttataacctttcagtcatcacccaatttaattaaccnttttgcatgatgctttacacacaattggattcaagcattntacaggaacacccctgtgcagctacgtttaccgtcgtcatttattccacagagtcaagaccaatattctgncaaaaaatcaccaatgggaaattttcattgatataaatactttgtcctcgccgcgacccgcttagggcg

SEQ ID NO: 1981 - DNA, 455 bp, Homo sapiens
  misc_feature 196, 325, 327, 337, 345, 349, 356, 362, 363, 369, 380, 381,385, 410, 420, 423, 446: n = A,T,C or G
acctcgtctcaaaacctggctgctatcagagaagaagggtgtttggggtgtgttttacaaagccgctgtgattggaaccaggctgcatgctgctgtggcaattgcttgtgttgtaatggccttttacgtcctgtttataaaatgaattccaaagcacccaagtcatcaactgccaaccaaggggacggggatgaanaacctgttggagacctgaacccagtgtaggagagttcagctgaaatcatcggtccccaggatgacaccacagcatctgcccctgctatatgtggggaaaactcatggtcacgaacattatttatgcttnangggactacanaaaggccngctnctttganctattnnggaaantaagcccttgnnaganagcatattatgtccggattaaattncacccctcgntgntaagattcatacctcctttttanaaacctgtc

SEQ ID NO: 1982 - DNA, 563 bp, Homo sapiens
  misc_feature 257, 312, 339, 348, 353, 382, 383, 398, 477: n = A,T,C or G
acctgcatcagcattagtaatcaacctgttaatccaaggtctttagaaaaacttgaaattattcctgcaagccaattttgtccacgtgttgagatcattgctacaatgaaaaagaagggtgagaagagatgtctgaatccagaatcgaaggccatcaagaatttactgaaagcagttagcaaggaaaggtctaaaagatctccttaaaaccagaggggagcaaaatcgatgcagtgcttccaaggatggaccacacngaggctgcctctcccatcacttccctacatggagtatatgtcaagccataattgntcttagtttgcagttacactaaaaggngaccaatcntgggncacccaaattcagctgctactactcctgnngggaaagggtaatgntcatcatcctaagctattcagtaataactctaccctggcactataatgtaaagctctactgaggtgctatgttcttatnggatgttctgaccctgcttcaaatatttccctcacctttcccatcttccaagggtataaggaattttctgctttggggtttatcag

SEQ ID NO: 1983 - DNA, 539 bp, Homo sapiens
  misc_feature 280, 334, 337, 341, 353, 357, 395, 428, 457, 479, 492, 497,500, 505, 507, 510, 533: n = A,T,C or G
acacttctgtttatatttaaacaacaaagaaaaaagcatctacacacttaaaaaattaattcaatattcctaaatctattttaactcattttaaaatactacatacagaagccagaatgcagagttaagaatggaataaggtggggagaagaaggggaccacgaagaaaaacacttagacaattacttgtctgttgtgggtaaagcaacaggaatcctgggagatacaaagaaatcagtaacaactttgctcataactgatattttcccctcatgtttgnttttaataacgtccatatgggtgctctctgtatgctcccttcctggcctaacangangggnctttaaccgacnggcntggtcccattccagtcgtcctggccataagcttataanaatcttggaccctcccctgtccatagtcataantatttctgagtccccttgactctggctgnaataacccttcgtagccttcgnaacttttgttctnggggntgntcatnantanccatattcttctatgtttctggngcaaga

SEQ ID NO: 1984 - DNA, 533 bp, Homo sapiens
  misc_feature 197, 226, 241, 262, 286, 350, 351, 366, 372, 400, 402, 403,404, 409, 410, 414, 434, 440, 443, 456, 472, 480, 488, 497,504, 506, 511, 531: n = A,T,C or G
acgcgggggtggcgctttctgggtaaagatggacgtccacgatctctttcgccggctcggcgcgggggccaaattcgacacgagacgcttctcggcagacgcagctcgattccagataggaaaaaggaaatatgactttgattcttcggaggtgcttcagggactggacttttttggaaacaagaagtctgtcccangtgtgtgtggagcatcacaaacacatcanaagccccaaaatggngagaaaaaagaagagagcctnactgaaaggaagagggaaccaaancatgaaaaaaagggagacgatgacttcagaaattgctttccaagaagaaagtgcttcttattcnnggggatgtcattctntttaanccaataattggatacaaaaaaagttcanannngaaanntacnaacttccggaaagtttgganaatctnaanaaaagaaaaaatnaacttcttgcggaatnaacctaanttcacgtncaaggaccnattttcntnacccnattgtttcatttacacttgncc

SEQ ID NO: 1985 - DNA, 560 bp, Homo sapiens
  misc_feature 287, 302, 331, 349, 361, 366, 367, 378, 381, 391, 394, 395,406, 424, 428, 439, 440, 459, 487, 498, 501, 542, 557: n = A,T,C or G
acggggatgtgatggatgtcttcatccccaagccattcagggcctttgcctttgttacatttgcagatgatcagattgcgcagtctctttgtggagaggacttgatcattaaaggaatcagcgttcatatatccaatgccgaacctaagcacaatagcaatagacagttagaaagaagtggaagatttggtggtaatccaggtggctttgggaatcagggtggatttggtaatagcaaagggggtggagctggtttgggaaacaatcaaggtagtaatatgggtggngggatgaactttggngcgttcaacattaatccagccctgatggnttgcggccaggccacacnacaaaccaattngggtnntgatgggcatntanccaccagcanacnngtcaggcccantcgggttaataaccaaancaangccacatgcanngggagccaacccggccttnggttctggaaataactcttatagtgctntaattctggtncanccaattggttggggatcagcattcatgcaagggccgggcantgggtttaattggangct

SEQ ID NO: 1986 - DNA, 529 bp, Homo sapiens
  misc_feature 320, 334, 365, 371, 373, 375, 379, 390, 395, 401, 405, 408,426, 427, 438, 441, 449, 464, 467, 471, 479, 484, 487, 490,492, 493, 501, 507, 525: n = A,T,C or G
acttgaactggcaggaaatgcatcaaaagacttaaaggtaaagcgtattacccctcgtcacttgcaacttgctattcgtggagatgaagaattggattctctcatcaaggctacaattgctggtggtggtgtcattccacacatccacaaatctctgattgggaagaaaggacaacagaagactgtctaaaggatgcctggattccttgttatctcaggactctaaatactctaacagctgtccagtgttggtgattccagtggactgtatctctgtgaaaaacacaattttgcctttttgtaattctatttgagcaagntggaagtttattancttttcaaaccaaccaaaattttggatttcnaagtcntnancctntttaagtggancttgnggcttnaaanaancttttgattctgaattannaggtttggttnatntgactgtntttaaaaaactgttnggnttcnattgggangcaanaanttntnnttaccatnatttgnttttttcctgcccgggcngcct

SEQ ID NO: 1987 - DNA, 414 bp, Homo sapiens
  misc_feature 189, 280, 332, 367, 369, 377, 387, 391, 392, 405: n = A,T,C or G
acgcgggaccagaaagagtaaacccttttatgacaggggctgcagaacaaatcaagcgcatccttgctaatttcaaaaactaccagttctttattggtgaaaacatgaatccagatggcatggttgctctattggactaccgtgaggatggtgtgaccccatatatgattttctttaaggatggtttanaaatggaaaaatgttaacaaatgtggcaattattttggatctatcacctgtcatcataactggcttctgcttgtcatccacacaacaccanggacttaagacaaatgggactgatgtcatcttgagctcttatttattttggnctgggaattatttgggagtggaggcattgtttttnanaaaaacanggcaaggganggtnnctaaaaataaatngcattttaa

SEQ ID NO: 1988 - DNA, 454 bp, Homo sapiens
  misc_feature 314, 360, 379, 443: n = A,T,C or G
actttctcaaatccctataaagaattacttgttatctattaaaaatctcctttacccaaatctgtattatggtttcgccagacaaatattatgtgatgtagcccagaaaatccacaccttttgtcctttttatgttttaatttgaataatcatgtgcttagtcccttggtttactgccacatcagtttaacacgatatcagcacattcccttgtcatcatcaaggtgttggctcagatttattcttaattggatgtttaaagcatgtacgcggggactgaaaggattcttttctacattatacatgtgtgttgncatatttggcttttgctatatctttaacttcattggtaaaattttnggattgggatagttctttnggggaatctaaaaacctatttttgaaaaaacaaactttggcttgataatcatttgggcagcttngggtaagtacc

SEQ ID NO: 1989 - DNA, 560 bp, Homo sapiens
  misc_feature 309, 333, 367, 387, 415, 428, 542: n = A,T,C or G
acaaatacttgtgccacaatgactcctccccctagctccacggcatgatacatacaaccagtttgtatacactaggcctgctgaggccattttaaactatgaggacttctagtttagtaaactaaagctgcagggtgccgggggagtggggcagcttcatttgcgactgctctttattctctccagtctttttttcaagtcgtctatgttagctgtggaggaggaggaggtcacagttcctgaagagtgagtctggttagaatccaggtctgaatgctggtgctgctcccgtgactccggagctgaaanagtttgcttgtggagcatgtctgnggaaaaagcgacagtaggaactgctggtttgganagcaaagaaggtcaaaggangtcggtcatctttgctttgtgttgccanaccacatcgctgncggaggatctttagccttccaagtagacagatggccccacttcttccccatttgtgttacctatggaggacactgtgcttgtgggcgtgggcacacatgtgacttccatctgangggagatcctgttgaagt

SEQ ID NO: 1990 - DNA, 576 bp, Homo sapiens
  misc_feature 273, 293, 319, 351, 354, 355, 360, 367, 368, 385, 414, 421,455, 463, 475, 496, 504, 509, 531, 542, 544: n = A,T,C or G
acgcgggggctctccatcatggcgcaggatcaaggtgaaaaggagaaccccatgcgggaacttcgcatccgcaaactctgtctcaacatctgtgttggggagagtggagacagactgacgcgagcagccaaggtgttggagcagctcacagggcagacccctgtgttttccaaagctagatacactgtcagatcctttggcatccggagaaatgaaaagattgctgtccactgcacagttcgaggggccaaggcagaagaaatcttggagaanggtctaaaggtgcgggagtntgagttaagaaaaaacaacttctcanatactggaaactttgggttttggatccaaggnacnnatcgnatctggnntttcaaatttgacccangctttggtttctaccggcctggacttttnttgtggngctgggtaggccaggttttcagcatcgcaacaanaatcgcanggacaagctgtnttggggccaaacacagaatcngcaaagangaggncatgcctggttccagcagaatntgatgggatcntncttcttgcaaataaattcccgtttctatccag

SEQ ID NO: 1991 - DNA, 537 bp, Homo sapiens
  misc_feature 320, 332, 345, 347, 348, 355, 358, 362, 363, 373, 389, 390,404, 421, 425, 428, 430, 436, 437, 459, 462, 479, 509, 522: n = A,T,C or G
actgcacggcaattgaagcatagctactacagaataactcaccttccaacaattcctgaaatggtcccttaactggattattacagcaccaaaaaacttctctgaagcctttctccacaaccttgttctatggattccataatgttacaatggatttaagctatgaagcctcaaaacatcacgagataagcatgatggtctcagacttgggaaaactgcctaatattatgctgtagtggaattatgtttagatttgaattcatctgtgaagcattcaaatcaaaagctaaaagcctaaatgtgaaatgctaatgacaagncctgagaaaggnaaactgggaatcntnnttttctntcnttgnncctacctttnaaatatttggatcaannttatttaagggggnttgaaaatgctattggnaggnggncnacctannctatcaactttcagtcttcccncancttcaatcctggcaatnattctaatctactctactttaaattttaangttatgaggttangtaaaagcaacattt

SEQ ID NO: 1992 - DNA, 562 bp, Homo sapiens
  misc_feature 364, 555: n = A,T,C or G
actggtccaggagttatccaggatagattttcacccaccatgggacgtcatcgttcaaatcaactcttcaatggccatgggggacacatcatgcctcccacacaatcgcagtttggagagatgggaggcaagtttatgaaaagccaggggctaagccagctctaccataaccagagtcagggactcttatcccagctgcaaggacagtcgaaggatatgccacctcggttttctaagaaaggacagcttaatgcagatgagattagcctgaggcctgctcagtcgttcctaatgaataaaaatcaagtgccaaagcttcagccccagatactatgattccttctagtgcacaaccaccacgcanttaaacacccacttttgggacagaacaccttaagcttggtctcaaaactaatccaccacttatccaaggaaaagcctgcaagaccagcaaaaagccccaccggtcaaaggaagactccttaaactactgaaactggtgtgactgaatatctaaatagtggaaatgcaatgaggctgtcaatggtgtaaganaaatgaa

SEQ ID NO: 1993 - DNA, 514 bp, Homo sapiens
  misc_feature 29, 60, 85, 87, 108, 143, 147, 177, 185, 209, 219, 231, 233,243, 249, 259, 330, 334, 336, 348, 350, 353, 355, 356, 367,374, 382, 390, 397, 403, 407, 416, 425, 429, 439, 451, 453,454, 459, 467, 472, 474, 483, 487, 488, 509: n = A,T,C or G
acttttttttttttttttttttttttttnggctcgcactaataacttttatttcactcanagcagtaatcttccatacataagtntnttccctgccaataattcaaanaaaaaaatccaaaatgattagtaaagaaaaatatnaganttaacaggccctttaaatttgttttaaatnttttgaanatttaaaaagtgtttaaagtttgnaattcctagnaggaaaacattntntgaatgaatnccctantggcaaaccnctggaaatgcttcagctgcatttgggggagaggggtagggattttctttaaagcaccccactcttttgatnaaangnaagaaggccttngnccncnncccccaagggnaattccngcatcctnggggccgnttattantgggancccnagctcgganccaaacttngggnaaatcatggncattagctgttncnnggggnaaattgtnatccntnacaattccnacannttacgaaccggaagctaatgngttaa

SEQ ID NO: 1994 - DNA, 555 bp, Homo sapiens
  misc_feature 211, 306, 315, 332, 352, 357, 359, 386, 390, 394, 405, 410,414, 430, 446, 463, 494, 504, 514, 520, 524, 546: n = A,T,C or G
acattgtgcccttgatttttatctccaagtggcagtttttaaaattggccttttacctggatataaattaattgtgcctgccaccaccatccaacagacctggtgctctaatgccaagttatacacgggacagttgctggcatgtcttcattggctatataaaatgtggccaagaagataggctctcagtaagaagtctgatggtgagcantaactgtccctgctttctggtataaagctctcaaatgtgaccatgtgaatctgggtgggataatggactcagctctgtctgctcaatgccattgngcagagaancacccttatgcataaanctttttaatgcttgaaaaanatagncngttgaatttaaatgcccctttttcaanaggngaanttaattggacngtctngggnacttcaaaagcttttngatgtataaaacttgntaaatggaactattccntcaataggcaaaagtgtaacaacctatctanatggatagtntgtaatttcngcacangctntgtttataaatacatcactggntaccgtcca

SEQ ID NO: 1995 - DNA, 563 bp, Homo sapiens
  misc_feature 364, 449, 465, 467, 489, 512, 552: n = A,T,C or G
acactcttccagcggagacatttggaccttgttgggaacagtgctttatccattccttgccatctggagattaattagcaatttcttgtttagtaatccgcctcccacacagacttcagtgagagtaacatcgtcagaacccccaaaccctgcatcatctagcaaatcagaaaaaagggaaccagtgagaaaaagagtgctggaaaaacgtggagacgactttaaaaaggaggggaaaatttatagattaaggactcaagatgatggtgaagatgaaaacaacacttggaatggaaattccactcaacagatgtagtgtgcaagtataatatgtgcaataatcattggttcctcttatgaattnaattcacctaaaatcttcttggagaagtggggactgctttatatttccaactggtctataaaatgtctctttattcctgcttagnggggtgtgggttgaangnggtttaactcagaaaagtaaanacaggaaataactctctgctagnccttgcttatatggcaccactgctagaccctaaaagaacnaaaaatctgcc

SEQ ID NO: 1996 - DNA, 563 bp, Homo sapiens
  misc_feature 322, 325, 329, 332, 336, 365, 373, 413, 423, 454, 462, 469,471, 489, 520, 529, 539: n = A,T,C or G
actgctttaaaacacaactccagagcccctccccaagctcccctccccaagctcctgaagacccggtttctgagggagggaaattgctacttggattgagagtagctggaatgtaagtgaccccaggctttgcctcagggcctttagcctatgtcccccccacataaagagagcttctcagagcctgactgaagagctgacgttttgctttttcatatgccaattaaacccggtctaaatccaaatgcttctccagccatccaggagtggctgtccttttcagttttgtcttttatataggtagctgagggggaagatttanaancctngcnctcnctaattagattaaacagaacaaggcttgntttggttnaaattgttccaaaagtccaacagacacacactgagcaggngttttacacncacattccctttttgccccttaaatagaaangtgcaggnaaggttntnccaacaagaaagcacatngaaaataatttgtactctaacaatccattancatgtgtangggttacggngaggacactgtgttgtttcataaa

SEQ ID NO: 1997 - DNA, 562 bp, Homo sapiens
  misc_feature 321, 351, 399, 402, 470, 473, 531, 554: n = A,T,C or G
acgcgggggcctgcagctccgccatggctcctaaaggcagctccaaacagcagtctgaggaggacctgctcctgcaggatttcagccgcaatctctcggccaagtcctccgcgctcttcttcggaaacgcgttcatcgtgtctgccatccccatctggttatactggcgaatatggcatatggatcttattcagtctgctgttttgtatagtgtgatgaccctagtaagcacatatttggtagcctttgcatacaagaatgtgaaatttgttctcaagcacaaagtagcacagaagagggaggatgctgtttccaaagaanggactcgaaaaatttctgagcttgtaatanaaaagaatgtctcggaaaggagaaaagatgaaagaaatcttgtggaanaanaatgaagttgctgattatgaagccacaacattttccatcttttataacaacactctgttcctggtcgnggncattgttgcttccttcttcatattgaaaaacttcaccccacagtgaactacatattgnccataagtgcttatcaggactcncgcctctg

SEQ ID NO: 1998 - DNA, 557 bp, Homo sapiens
  misc_feature 36, 38, 46, 63, 73, 75, 85, 107, 124, 139, 157, 164, 174,187, 193, 194, 200, 212, 218, 268, 273, 280, 302, 340, 343,352, 400, 405, 409, 416, 434, 465, 509, 520, 535, 544: n = A,T,C or G
acttttttttttttttttttttttttttttaggcanantcttactntgtcacccaggctggantgcagtgacncnaccttggctnactacaacctatgcctccccanttcaagtaatcctcccnccttaacctcctgantagctgggattacaggcncctgccnccacacccanctaatttttgggnttttannaaaaanagggtttcaccncattgnccaggctggtcttgaactcctggcctcaaaaaacccacccgccttaggcncccanagggctnggattacaggcatgaacccccntatctggccttttattttttaatttttcaaatgagaangtngggttaggnaattttttaaaaaatcgtttcaagtttcttaactccacaattattttnctganactnttgcaancaactgatctttataggncatgcctcaaattcccaattgatgtcatctnggcaaatcagtccaatgacagccacaagtggtcaaaaagctttnttacagccctntttggtcactaggcnactacctangagtcaactgtga

SEQ ID NO: 1999 - DNA, 558 bp, Homo sapiens
  misc_feature 319, 324, 393, 404, 425, 437, 470, 484, 493, 525, 534: n = A,T,C or G
acgcgggattcgagtagcggctcttccaagctcaaagaagcagaggccgctgttcgtttcctttaggtctttccactaaagtcggagtatcttcttccaaaatttcacgtcttggtggccgttccaaggagcgcgaggtcgggatggatcttgaaggggaccgcaatggaggagcaaagaagaagaacttttttaaactgaacaataaaagtgaaaaagataagaaggaaaagaaaccaactgtcagtgtattttcaatgtttcgctattcaaattggctttgacaagttgtatatgggggtgggaactttggcttgcnttatncatggggctggactttccttttatgatgctgggggtttggaaaaattgcagaattttttgccaaatgcnggaaatttaanaagatctgatgtcaaacatcnctatagaagtgntatcaatgatacagggttcttcatgaatctggngaagacatgaccangtttgcctntttattacaggggaattgggctggggtgctgntgctgtttnctttcaggttcatttggtgccctg

SEQ ID NO: 2000 - DNA, 561 bp, Homo sapiens
  misc_feature 315, 361, 371, 375, 538, 558: n = A,T,C or G
accagttttggtgtcaactagaaaaggtcttattgaagttaaaacagatgagtttcctcgccatgggagcaacatagaagccatgtccaagctaaagccttactttcttactgatggaacgggaacggtcaccccagccaatgcttcaggaataaatgatggtgctgcagctgttgttcttatgaagaagtcagaagctgataaacgtgggcttacacctttagcacggatagtttcctggtcccaagtgggtgtggagccttccattatgggaataggaccaattccagccataaagcaagctgttacaaaaancaggttggtcactggaagaagttggcatattttgaaatcaatgaanccctttgcanctgncttctgttgcaattagttaaaagaacttggattaaacccaaaaaaaggtcaatattgaaggaggggctatagccttgggccaccctcttggagcatctggctgtcgaattcttgtgaccctgttacacacactggagagaatgggcagaagtcgtggtgttgnagccctgtgcattggggggnggg

SEQ ID NO: 2001 - DNA, 557 bp, Homo sapiens
  misc_feature 262, 321, 328, 369, 392, 413, 426, 434, 478, 493, 509, 537,552: n = A,T,C or G
acattatttttaccaaacaacattgtttcccactacatccatggttatgtataaaaaaacgccattgtcaattaagatgttaaaaaattatttccataagagtattaaattctaatctatgattcacttaacttcctactttataaacactaggtaaagtaatctcacaagctgccaaagaacacatcccaagcagtaatcacagacgatgaagcaccttacaggacccctccaccctcaaacgcgcatgtccagagaagtnttaatgccttaatagactactgaaggttaactatttacatcattctaaaaaatattttnaagctgnattacagtgcttttaaattctccttttaaggaaaaaaaggnaatagattggttcctttaccggngtttgaaaggaaaaaaaaaanaatcccttagtanctaatggnctgccgattttttccctgaatttttaaactccaacaaagcattntttttgcaaaaagtnctttacccaaagtcanggtctctgttttgatctctttgtaaaanaactctctgttcatncaatt

SEQ ID NO: 2002 - DNA, 385 bp, Homo sapiens
  misc_feature 174, 198, 297, 337, 362, 366, 369, 379: n = A,T,C or G
acgcgggctttccaacttggacgctgcagaatggctcccgcaaagaagggtggcgagaagaaaaagggccgttctgccatcaacgaagtggtaacccgagaatacaccatcaacattcacaagcgcatccatggagtgggcttcaagaagcgtgcacctcgggcactcaaaganattcggaaatttgccatgaagganatgggaactccagatgtgcgcattgacaccaggctcaacaaagctgtctgggccaaaggaataaggaatgtgccataccgaatcccgtgtgcggctgtncagaaaacgtaatgaggatgaagattcaccaaataagctntatactttgggttcctatgtacctngggncgngaccaccctnagggcg

SEQ ID NO: 2003 - DNA, 485 bp, Homo sapiens
  misc_feature 214, 300, 321, 343, 364, 371, 381, 402, 406, 446, 448, 476: n = A,T,C or G
acgcggggggggtcgactgacggtaacggggcagagaggctgttcgcagagttgcggaagatgaatgccagaggacttggatctgagctaaaggacagtattccagttactgaactttcagcaagtggaccttttgaaagtcatgatcttcttcggaaaggtttttcttgtgtgaaaaatgaacttttgcctagtcatccccttgaattatcanaaaaaaatttccagctcaaccaagataaaatgaatttttccacactgagaaacattcagggtctatttgctctgctaaaattacanatggaattcaaggcagtgcancaggttcagcgtcttccatttntttcaagctcaaattcttttnactggantgtttttgangggtaatgaatgagactattnggantttgaggattttctttaatgatccatcccaaagccgaaancntgggagagccacacttcgatggtggaanttaaacttg

SEQ ID NO: 2004 - DNA, 542 bp, Homo sapiens
  misc_feature 172, 212, 228, 249, 258, 262, 285, 297, 301, 305, 309, 317,320, 330, 339, 342, 346, 373, 379, 383, 384, 385, 393, 396,408, 410, 439, 450, 456, 459, 464, 466, 472, 475, 481, 541: n = A,T,C or G
actaaagatctgaattaagagttcttttaacaaagcataatgtggtaattcatcaaaagcagggtcaaaagacaaaaggggccgagaacctttcaaacagtttccagtcatcttcagttcagcgagggtatgaatattttgaacaaggaatttagcagatggtccgtgaggngaatttgaaagccacatatagagatcctgttttttcttancttcaaaatagatgcntttattacagttcttcatttnacaaacctngttnatcacaaatagcttatccttacngatccattttantatntgcnttanaatgaggnatnaacattcttnagtccctgnatnaatnggcttggtcttaaaatttattcctctnggaaanaaannnggaaaatnccnttcttatttttncnctttcccttgcaaacggggcctggggatncggcccctctntttttnctncaccntnctctgntgngggcgngccgctttaactggcggctccgcattattttgctctttttggcttctttcgcctgaactng

SEQ ID NO: 2005 - DNA, 558 bp, Homo sapiens
  misc_feature 241, 286, 327, 333, 373, 380, 398, 420, 421, 430, 445, 450,451, 453, 454, 472, 490, 517, 521, 525, 526, 556: n = A,T,C or G
acacctgaaatccaggccaatgaagttcggaaagtgaagaaatatgaacagggattcatcacagaccctgtggtcctcagccccaaggatcgcgtgcgggatgtttttgaggccaaggcccggcatggtttctgcggtatcccaatcacagacacaggccggatggggagccgcttggtgggcatcatctcctccagggacattgattttctcaaagaggaggaacatgactgtttcttgnaagagataatgacaaagagggaagacttggtggtagcccctgcangcatcacactgaaggaggcaaatgaaattttgcagcgcagnaagaanggaaaagttgcccatttgttaatgaaaatgatgagcttgnggccatnattgcccggacagactgnagaaaaatcgggactcccactnncctccaaanattccaagaaacaantgctnntnngggcagccattggccttntgaagaatgacaagtatntgctggacttgctccccaagcttgtgnggantgtnntggttttggcctcttcccaggaaattcatntt

SEQ ID NO: 2006 - DNA, 559 bp, Homo sapiens
  misc_feature 174, 207, 228, 254, 289, 293, 306, 307, 325, 332, 338, 351,390, 441, 449, 451, 453, 454, 473, 498, 507, 529, 544: n = A,T,C or G
acgcggggaggtaacagctcttgcacctgtttctcttgcacctgacgtgcagctgctcctacccacctctcctggctgagccttgcctgatacagcagcccggaggcaccacttgcttcccgagtctcaccctcccaggcagctcctacactcaactgcttctctaggaaaggnctcacctccagcctggagcagtcgggattacanaaagccccatccttggcttanggagcgccatgacgactgaaattggntggtggaagctgactttcctccggaaaaagaaatncacncccaaagtgctgnntgagatcccttgacaccntatgccnaaacanaggggagatgcanaaaccccctgaaggcctgacccttggaggccccaacagngactttaacacccgcctggagaagattgtggcaaagagcacaaaagggcangcacgtcnangnntccaactcaggacgcttcnaggagaataagaaagtgagagcccnctggcaganaaccctaacctcttggtgatancgaggaaagacggcnttcaaatgaaaggct

SEQ ID NO: 2007 - DNA, 568 bp, Homo sapiens
  misc_feature 176, 254, 313, 333, 351, 370, 396, 428, 531, 536, 544, 567: n = A,T,C or G
acgcggggtctcttcctcggcgctgcctacggaggtggcagccatctccttctcggcatcatggccgccctcagaccccttgtgaagcccaagatcgtcaaaaagagaaccaagaagttcatccggcaccagtcagaccgatatgtcaaaattaagcgtaactggcggaaacccanaggcattgacaacagggttcgtaagaagattcaagggccagatcttgatgcccaacattggttatggaagcaacaaanaaacaaagcacatgctgccagtggcttccggaagttcctggtccacaacgtcaaagganctgggaagtgctgctgatgntgtaacaaatcttactgngccgagatcgctcacaatnttttctccaagaaccgcaaagtcatngtggaaagagctgcccactggcatcagagtcnccaaccccaatgccaggctgcgcagtgaagaaaatgagtaagcagctcatgtgcaccgtttctgtttaataaatgtaaaaactgccaaaaaaaaaaaaaaaanaaaanatatgtcntgccgggcggccgttcaaaggcng

SEQ ID NO: 2008 - DNA, 553 bp, Homo sapiens
  misc_feature 196, 205, 241, 493, 515, 535, 540: n = A,T,C or G
acaaaaatttaaagcattcctttctttaattttgtaattctttactgtggaatagctcagaatgtcagttctgttttaagtaacagaattgataactgagcaaggaaacgtaatttggattataaaattcttgctttaataaaaattccttaaacagtgaaaaaaaaaaaaaaaaaaaaaaggtctctatttcagngactcttanatttttgtttatttttaaaaagggataagttgtggngaattgcattaggattactaaaataaaagcattaagaaactccccaaaactccaaatacatctggagtcattctttcctaatagggacaatattttattaccaaaaatggtagaaagggttagaagggcctaagtctcaggataaaggatagttcattgcatttaactaattcacattcagaaaaatgtttttcaaattgatcttatttttcttattttgccatggattgataaaactttatcacaaattanaacagagaattaaggaggtctntgtttaaatccagaccctgntgctntttacatccccta

SEQ ID NO: 2009 - DNA, 574 bp, Homo sapiens
  misc_feature 297, 348, 350, 385, 397, 435, 454, 461, 490, 496, 504, 508,510, 514, 520, 523, 528, 542, 547, 548, 550, 553, 574: n = A,T,C or G
acgcggggttccacggaaacactggtggacagattctagtgctgagaagaaacacgtttggtttggagagtccatggatggtggttttcagtttagctacggcaatcccgaacttcctgaagatgtccttgatgtgcagctggcattccttcgacttctctccagccgagcttcccagaacatcacatatcgctgcaaaaatagcattgcatacatggatcaggccagtggaaatgtaaagaaggccctgaagctgatggggtcaaatgaaggtgaattcaaggctgaaggaaatancaaattccctcacagttctggaggatggttgccgaacacactggggaatgnancaaacagctttgaatatcgaaccacaaggctgganactactatgganatttgacctatacttgggggtctgataaaaaattgggngacgtggcctgttgttttntaacaanttttttgaatccaccaaaaattactcctngggtcnttttttanttgnancagnaggggngcnaatanttttttttttattnggaannanttntaaaaaaaaattttttttttn

SEQ ID NO: 2010 - DNA, 376 bp, Homo sapiens
  misc_feature 87, 92, 96, 159, 171, 177, 196, 202, 218, 220, 251, 275,278, 281, 282, 288, 299, 302, 304, 314, 317, 332, 335, 336,344, 346, 357, 359: n = A,T,C or G
cgcggggagttccgtcgcagccgggatttgggtcgcggttcttgtttgtggatcgctgtgatcgacacttgacaatgcagatcttcntgaanactntgactggtaagaccatcaccctctaggttgagcccagtgacaccatcgaaaatgtcaaggcanagattcaagatnaggaangcatccctctgaccagcanaggctnatctttgctggaaaananttggaagatgggcgcacccttttttgacttnaacatccatgaaatattcaccttnacntgnnctccgntaaaaaggtangangnaaatattttnaanacacttactggcaanacnntatccttnanggggacctatnanatcatttatgacgttaa

SEQ ID NO: 2011 - DNA, 558 bp, Homo sapiens
  misc_feature 296, 308, 420, 432, 496, 498, 530, 548: n = A,T,C or G
actaccacttttatgctagttggcatctgcctttctatacaaagctactattaatcgacattgacctatttccagaaatacaattttagatatcatgcaaatttcatgaccagtaaaggctgctgctacaatgtcctaactgaaagatgatcatttgtagttgccttaaaataatgaatacatttccaaaatggtctctaacatttccttacagaactacttcttacttctttgccctgccctctcccaaaaaactacttcttttttcaaaagaaagtcagccatatctccattgncctaagtccagnggttcttttttttttttttttgagacggagtctcactctgtcacccaggctggactgcaatgacgcgatcttggtcactgcaacctccgcatccggggttcaagccattctnctgcccagcctnccaagtaactgggattacaggcatgtgtcaccatgcccactaatttttttgtatttttaagtananatgggggggttcaccatatggccagtctgggnttggaactctgaccttgngatccactcc

SEQ ID NO: 2012 - DNA, 597 bp, Homo sapiens
  misc_feature 387, 449, 471, 480, 495, 498, 501, 507, 540, 546, 554, 555,558, 584: n = A,T,C or G
accactgaaaccctgacccagaaaagtggcttgcttggacacccagctgcctttgtttctgcattaaaccaatattgatcacacatatgacacaggctagtcctataaaagtaatgacttcatagaaatggcattataatttttaagttgatactctacaggtagctattgatataattagttttaataaaacatgctgcaaccatggtatacaacaaaaatacatttctttggtgattgaaattaaggccgtatttacaatgacttaatataagactgacttttatcctgcttcataacttgtatggagaactcaccaagaaagaattcaatactgtgaaatatgcagcaaagaagattgtctttactaggctgtgtttctaactntgatttcagcccagtagattgattaaagaaaaaaatgggccttactttgcttttattttgcngctaggcttaacaaataccacnaaacaatgncttgtttcacatatntgnaanaaattnttaccctaaatagaaaaggactaaaaaaggggntttagngaaaaatnnctncaaaaaaaaaaaaaaaaaaaatctgngccacaaagggat

SEQ ID NO: 2013 - DNA, 400 bp, Homo sapiens
  misc_feature 36, 68, 102, 107, 132, 146, 163, 218, 251, 262, 305, 310,323, 326, 327, 346, 351, 372, 379, 380, 390: n = A,T,C or G
actttttttttttttttttttttttcgatctaaaanattttattttctttatgcaggtaggcagttanaaatttcaaagtctaacaatgacattcttgaagngggcncagccttttaaactcaggctatgtntacagtaaccttgnggaactggttcagccanatcttcactttcatgaaagcacagggtctgtccttttctttccaaaggactcctntcatattccatcgccagtttcaattttatatgnatatatatatnctacttccaacacccgattcatcctggttcaatcaaagcctgnttttnggccaacaataanctnntcaggaaatcgaaggtgtnaatgntgccgtggctctcttggaagncaggggnnactcctttcnaaaatccatt

SEQ ID NO: 2014 - DNA, 396 bp, Homo sapiens
  misc_feature 224, 231, 251, 295, 301, 313, 321, 322, 324, 326, 330, 332,333, 335, 341, 343, 348, 349, 362, 363, 375, 390: n = A,T,C or G
actgcaatgtataaactttggaggatgaaggacaggagacttagaacgtcgacgacgctgagttctcactgctcctcgtgaagacttccttgtagacccgtgccaactgtctttagatgcacatgtggttttaggtttggtatcatctgttgctgttctgactggtgctctgacacctgtgccttctccaacagacagagatgctacagaccctgatgcatccnctcttanttttttgaaagcagactgtngactctcctcctctccatccttggcttcggatatcattgtgcangttttnacgctattatcnatgtcttnntnanctcntnntnaaaggngncactnngtgatgcgggatnntcgtatatagtntttttccaaatttcngagccc

SEQ ID NO: 2015 - DNA, 583 bp, Homo sapiens
  misc_feature 417, 425, 444, 488, 494, 514, 524, 527, 528, 530, 533, 543,549, 555, 557, 558, 570: n = A,T,C or G
acttttcaatccaagaaaaaaaaaataaaccgagacatggtcatgagttcaggattatatatattacaatttgccttgttataatacatttgtggctttatgataaaaataactcagggacatatggaattcaagctgatttgcgtaactgtcacaagaaaaaaagcattaaatgcatttctgaaataagtattttcattaatttcagaatctcaaaacagcattagaccttgccttgtttaaaaaaaatttagttcaacactaagctagctaaataaccttcttgaaaggtttaaacacaattgatatagaaaatgctttccctctaatctcaactttacataaatggaccaggtgaggaaaaaaggtaacatttctttagcacatattggctaatcatcacccctaactagaatncattatgnccttaaaagaacgggaaantcaaaattacgattcataaccaaagaatcatttagggtcagtangaaatntttgaaccttaaaacttacntactaaaaanatnntnttngagaaaaggncccaanaatttntnntgtttttctttnaaaaaaaaaaagg

SEQ ID NO: 2016 - DNA, 535 bp, Homo sapiens
  misc_feature 400, 430, 457, 467, 508, 528: n = A,T,C or G
accagaagtataagtttatggaactcaaccttgctcaaaagaaaagaaggctaaaaggtcagattcctgaaattaaacagactttggaaattctaaaatacatgcagaagaaaaaagagtccaccaactcaatggagaccagattcttgctggcagataacctgtattgcaaagcttcagttcctcctaccgataaagtgtgtctgtggttgggggctaatgtaatgcttgaatatgatattgatgaagctcaggcattgttggaaaagaatttatcgctgcccaaagaatcttgattccccggaggaagaccttgctttcttcgagatcaatttactacccagaagtcatatggccagggtttataattgggatgtaaaaagaagaacaggatgctctncaagacaaagcatatgtggcaataaaatgnggttaatttccaacatgtatctaaatnccttatcttnaggtggctacttgatgtttacacaaaattaaaaaaaaaccntttttttttaacaaatgttnaaatttg

SEQ ID NO: 2017 - DNA, 586 bp, Homo sapiens
  misc_feature 448, 457, 489, 505, 524, 527, 532, 534, 535, 542, 547, 552,553, 554, 558, 559, 578: n = A,T,C or G
ctcagaacatcacctaccactgcaagaacagcattgcatacatggatgaggagactggcaacctgaaaaaggctgtcattctacagggctctaatgatgttgaacttgttgctgagggcaacagcaggttcacttacactgttcttgtagatggctgctctaaaaagacaaatgaatggggaaagacaatcattgaatacaaaacaaataagccatcacgcctgcccttccttgatattgcacctttggacatcggtggtgctgaccaggaattctttgtggacattgcccagtctgtttcaaataaatgaactcaatctaaattaaaaaagaaagaaatttgaaaacttctcttgccattcttctctctttttactgaaactgatccttcatttttctgacattacttgcttaattggggcaaagagaaaaagaaggatgacagagnttgtgcatncagttcattactccttccccgtcccaaaattnaattttttaaacttanctttatgaaatgtaacttnaanaaccnannaattgtnaaatnacccnnntttnnaaaaaaaaaaaaaaaaaantcccgcgg

SEQ ID NO: 2018 - DNA, 528 bp, Homo sapiens
  misc_feature 419, 463, 479, 485, 505, 526: n = A,T,C or G
acaagcctcaccaagggcaaccccagaaaagtgaatgagtttgtcttctccaatcatgacttcctcgataagtttgcaacttccaagcttcaccagttctgggtgatcaaaggtagaggcaatttcaccacctgtgacaagagctaggcgttccacacctgcaaaatctgcatgctcaatagccatgacaccagcagcaccaaagagctgttcaggataattataaattaattgcctgttaataaagcaatttattccatgcttaagaatacgttcaactttctccttcattttttccttttccgcatgttctatttctgcaacctttgctgtagagtcaactcttacccgggaccaaatatcttatttgtctgtatccataccagtatttgcaataagaatttagcattttcaatccntttggtgtttactcaatttttatccaaaggagcctctctaatanggattgcaactcctcngttttntatataatgctcagttgcanaccttatttggaatgtttaanta

SEQ ID NO: 2019 - DNA, 489 bp, Homo sapiens
  misc_feature 66, 344, 365, 369, 395, 400, 427, 428, 431, 436, 445, 461,465, 466, 469, 485: n = A,T,C or G
acgcgggggcaaaccagctctaggcggctctgggtaagttgtcgttctgtgggctgcggaacgcanacttcggctggacttgcctgcggtgacacctgctcccctctgagagcttcaggttctccggcctgccttcactggtttgtgtccagagccggactgattctctcaatttgcgatcttcagcctgttaaacaagaaaacgaaaaaccccttccagaaaacatggatgcatttgaaaaagtgagaacaaaattagaaacacagccacaagaagaatatgaaatcatcaatgtggaagttaaacatggtggttttgtttattaccaagaaggttgttgctnggtcgttccaaagatgaagangcanacaatgttaattattaagctttattnatttngaggacttaagtaaccagcccttattnnttnatcanagttgctcnaatgaaaattttgctnccannaanacttaaatctgaactntact

SEQ ID NO: 2020 - DNA, 504 bp, Homo sapiens
  misc_feature 60, 71, 75, 127, 143, 149, 156, 219, 221, 232, 245, 248,251, 258, 262, 269, 311, 317, 331, 377, 411, 434, 456, 458,464, 474, 476, 478, 493: n = A,T,C or G
actttttttttttttttttttttttttttttcagttcaagtttaatacaaactacaaaanattagggggtngctntactaatacatcatacaaaccagtagcctgcccacaacgccaactcaggccnttcctaccaaaggaanaaaggntggtctntccaccccctgtaggaaaggcctgccttgtaaaacaccacaattcggctgaatctgaagtctngngttttactaanggaaaaaaaaatncanaanaggtttngttntcatggntgcccaccgaagcctgcactaaaacagcccagcgctcacttntgctgnaaaaatttcttgtntttgggacatcaggcttgagggttcactgcaggttccagccagctnggcacacttccctttttgcaataaactgaaggcntactagtttaaagtttttcccangcggccacaggaggctttcagngnttgccnaaaaaccttntntnaagaaaaaaggcctnaaaaaaagctt

SEQ ID NO: 2021 - DNA, 511 bp, Homo sapiens
  misc_feature 399, 405, 411, 433, 435, 440, 443, 444, 451, 462, 465, 466,484, 509: n = A,T,C or G
acgagaaaaacgatttggaaattggctgaaagatgcacgtgactggacaatttccagaaacagatactggggcacccccatcccactgtgggtcagcgatgactttgaggaggtggtatgcattgggtcagtggcggaacttgaagaactgtcaggagcaaagatctcagatctccacagagagagtgttgaccacctgaccattccttcacgctgtgggaagggatccttgcaccgcatctctgaagtgtttgactgttggtttgagagtggcagcatgccctatgctcaggttcattacccgtttgaaaacaagagggagtttgaggatgcttttcctgcaattcattgccgagggcatcaccaaaccagaggatggttttacctgctggtgctgcncggtcntcttgncaccgctttaagacgtaattgnantgggnttnnctgcaangatggcaaaantgnncaaccggaaagattttcnatcattcctcttcaaatttggggtntt

SEQ ID NO: 2022 - DNA, 549 bp, Homo sapiens
  misc_feature 301, 303, 316, 335, 352, 364, 372, 373, 412, 417, 420, 425,444, 448, 451, 454, 459, 461, 463, 468, 470, 477, 481, 482,490, 491, 492, 504, 507, 515, 516, 537: n = A,T,C or G
actttgcctacggcagcaacctgctgacagagaggatccacctccgaaacccctcggcggcgttcttctgtgtggcccgcctgcaggattttaagcttgactttggcaattcccaaggcaaaacaagtcaaacttggcatggagggatagccaccatttttcagagtcctggcgatgaagtgtggggagtagtatggaaaatgaacaaaagcaatttaaattctctggatgagcaagaaggggttaaaagtggaatgtatgttgtaatagaagttaaagttgcaactcaagaaggaaaagnantaacctgtcgaanttatctgatgacaaattcnaaagtgctccccatccnacagtataaaangattattnnatgggtgcaaaagaaatgttttccgttgagttcaaaatnagttnaancatanaccaattgactttctggtnggtntanaanaattnananttatnanaggggancaannttttaaannnacaattttttanggntttttctnnataatttttaaactgagaagngcgggggtttta

SEQ ID NO: 2023 - DNA, 593 bp, Homo sapiens
  misc_feature 420, 426, 437, 457, 459, 481, 484, 485, 487, 500, 506, 507,514, 525, 533, 535, 537, 541, 542, 549, 554, 555, 559, 563,569, 571, 574, 576, 580, 583, 590: n = A,T,C or G
acgcgggagtcagacccagtcaggacacagcatggacatgagggtccccgctcagctcctggggctcctgctgctctggctcccaggtgccaaatgtgacatccagatgacccagtctccttccaccctgtctgcatctctaggagacagagtcaccatcacttgccgggccagtcagggtcttagtagttggatggcctggtatcaacacaaatcggggaaagcccctaaactcctgatctataagacgtctaccttagaaagtggggtcccctcaaggttcagcggcagtggatctgggacagtattcactctcaccatcaataacctgcagcctgatgattcgaactattactgcaacaattaatacttcccttggcctgattactttcggccctgggaccagagtggatgtaagcnacttgngctgacatctntttatcttcccccttttgtnancagttgaatctggaactgtttntgnngnctgttaatatttntcaaanngccaagncttgccggacncctaaggnantnaaannttgggcngtatnntganccanttggananctngngganatngaaaagnttt

SEQ ID NO: 2024 - DNA, 487 bp, Homo sapiens
  misc_feature 380, 394, 397, 428, 436, 451, 456, 465, 485: n = A,T,C or G
acatgcaaaatcactggcaaaggctgtaaagagattgtaggctggggatttccactaggcacctgagtagtagcaactacagtagctgtattgggtgcaggaagaactgacgttgctgtgagggaacccgaagtcactggagtctgcaatttaggttgactactgacaactgctggaggagtgacaagattggttgaagatactgtattcacaggagtttgaaaggatggtggtgcactctcgcttacatttcttttggactccagcatctgtctcactgtgcctgcatttctgtaagacatgttattattgctgttgacatcatttacagtttttcctggtgatctggtgggttgggtggatgtcatgcttttcttaanacttctttggctgnttnaagcgtttggtaacctgctatcttgctgtanttaagganactgttatgctttgntcatnaatttttcnctcggttttattttgcaagntt

SEQ ID NO: 2025 - DNA, 442 bp, Homo sapiens
  misc_feature 337, 361, 393, 416, 440: n = A,T,C or G
acaagacatttcatttctcttaatgtttacaacaagcttgttgccagggctgatcttgaactcctggcctcaaacgatcctcccagctcagtctcacaaagtgttgggatgtctggccaactaatgactatcttaactcttgtgtttcaatgtttatgccttcttttatcttgactgattgtatgactatgtcttctagaacaatgttgaacagaaatggtgagagcagacatccttgctttaatatttcaccattatatatgatgttaggtatagatttttctcacagatgccttttatcagattgaggaatttatattcctactttgccgaaagnttttgtagtatgagggggtgctgnattttgtcaaacacttttcggtaataattganatgattggttctgagcatcgaanggggatttctcttattctgtcgangt

SEQ ID NO: 2026 - DNA, 535 bp, Homo sapiens
  misc_feature 360, 361, 366, 403, 418, 427, 428, 435, 438, 454, 462, 465,466, 476, 482, 484, 487, 505, 507, 509, 518: n = A,T,C or G
acagccaacggtttcccttgggggctttgaaataacaccaccagtggtcttaaggttgaagtgtggttcagggccagtgcatattagtggacagcacttagtagctgtggaggaagatgcagagtcagaagatgaagaggaggaggatgtgaaactcttaagtatatctggaaagcggtctgcccctggaggtggtagcaaggttccacagaaaaaagtaaaacttgctgctgatgaagatgatgacgatgatgatgaagaggatgatgatgaagatgatgatgatgatgattttgatgatgaggaagctgaagaaaaagcgccagtgaagaaatctattcaaatctccaccaaaaattnncaaantcaatcagaatggaaaagactcaaaccatatctcacnaaatcaaaggacaanatccttcannaacgganaantctaaaaccaaaggcntttttgtnaannattaagcaantccgcnanttnaaaaggggtttttccaangnangcaattttnatttttaaaatttccgt

SEQ ID NO: 2027 - DNA, 520 bp, Homo sapiens
  misc_feature 384, 393, 444, 448, 453, 467, 469, 473, 479, 484, 485, 486,519: n = A,T,C or G
actcttgatgaaagaccgtgaaaccaacaaatcaagaggatttgcttttgtcacctttgaaagcccagcagacgctaaggatgcagccagagacatgaatggaaagtcattagatggaaaagccatcaaggtggaacaagccaccaaaccatcatttgaaagtggtagacgtggaccgcctccacctccaagaagtagaggccctccaagaggtcttagaggtggaagaggaggaagtggaggaaccaggggacctccctcacggggaggacacatggatgacggtggatattccatgaatttaacatgagttcttcaggggaccctcccagtaaaaagaggaccccaccaagaagcggggggtccttctctaagagatctgcncttaggccnttcgcagtacagtgaatgggaggaaactcttttcacgtggagaatattttngagntcacntgagggaaccgtgncnttgnaaaatnttttnnnccaaaaatgttgtttttataagaagtttttcanc

SEQ ID NO: 2028 - DNA, 552 bp, Homo sapiens
  misc_feature 302, 307, 308, 365, 405, 411, 436, 456, 465, 469, 475, 480,490, 519, 521, 531, 532, 547: n = A,T,C or G
acacataaatcacctggaaccttgttaaaatgcagatcctgactcaggaggtctgagttagagcccaggatttcatatttctagccagctccatgatgagctgctggtccgcagatcacgcttgcaggttttgaccagagtcagtgttggttagagtaagaggatgaggcagacatctgggaaaagtccagctggggcaagcatttgaagtctgccttcctaccaggtcaaaatcaaggcaacgaccttccatagataactatcaaagcttgagggggtgccttgaacccaactcctaaatncccannacctgcccacctcttgtgtctcctgctaacaaacattccacactcttgcatattgtnaagtaaccttgcttaccagcttctggttaataaagatggntagagngactccttttaagcagtactaggcnctcaaaagaactcaggttantctggtctnaatngcccanctagntgccccattntattgcgaattttaggcctcaaacatttncntagctaaaanncaggggctaaagtcnccctt

SEQ ID NO: 2029 - DNA, 431 bp, Homo sapiens
  misc_feature 320, 359, 367, 370, 404, 427: n = A,T,C or G
acgcggggacactggactcccgtgagctggaaggaacagatttaatatctaggggctgggtatccccacatcactcatttggggggtcaagggacccgggcaatatagtattctgctcagtgtctggagatcatctacccaggctggggcttctgggacaggcgaggacccacggaccctggaagaactggtccaggggactgaactcccggcatctttacagagcagagcatgatcacattcctgccgctgctgctggggctcagcctgggctgcacaggacaggtggcttcgtggccatgtggaaagcacctgctgtnggatgatgctgggactccaaaggatttcacatatgcatntcttcaanaangatctgttgactgctgggatcaaaggagaataanatggcccttgcgatttggggagntaat

SEQ ID NO: 2030 - DNA, 594 bp, Homo sapiens
  misc_feature 279, 367, 381, 382, 383, 400, 411, 440, 453, 458, 464, 472,481, 482, 491, 493, 503, 505, 506, 509, 510, 521, 523, 526,537, 538, 553, 556, 559, 568, 570, 572, 586: n = A,T,C or G
actgtgcaggcagattcacagggtggtggtaaagcatccacaatggctctggcagcatcaggatcacacttgaaggggctctcagacaaagttgtattcatgcaactgattccttttccattcgttttcttagtcactaatgctttccaatggtcatgagtgcttttaataatatcaatggcaaaagtccttatctttaaattctgcattaaacgcaaactcattttctggttttccatcaggaaccttataccttctaaaccagtccacagtagcttntaagtagccaggtttcagccgtttgacatcattgatatcattataattggctgcatcaggatcatcccattaatggcaatgactttcnagcgggttcccttnnnaatcatagccaattgcntagaacttgcncgcaattatttcactcttcacaaccttgnttcaattcacacnattanttggtnttgtaccncacaacctnntttatattntnctgggtctcnannttnngggatggaccntntcnaattatctttnngggacaattccaaanacnaanttcttttantntnttaaaggtaaaggnccttaaca

SEQ ID NO: 2031 - DNA, 440 bp, Homo sapiens
  misc_feature 172, 250, 258, 282, 375, 380, 385, 386, 389, 390, 391, 397,398, 401, 412, 435: n = A,T,C or G
ggccgaggtacgcgggagatgaatgccagaggacttggatctgagctaaaggacagtattccagttactgaactttcagcaagtggaccttttgaaagtcatgatcttcttcggaaaggtttttcttgtgtgaaaaatgaacttttgcctagtcatccccttgaattatcanaaaaaaatttccagctcaaccaagataaaatgaatttttccacactgagaaacattcagggtctatttgctccgctanaattacangatggaattcaaggcagtgcagcnggttcagcgtcttccatttctttcaagctcaatctttcactggatgttttgaggggaatgatgagactattggattgaggattttctaatgancatcnaaagnnaannntgggannccnatttgtggtgnaataaactggttactgtataggngctga

SEQ ID NO: 2032 - DNA, 482 bp, Homo sapiens
  misc_feature 260, 293, 299, 301, 308, 335, 338, 339, 342, 382, 390, 392,393, 395, 412, 414, 417, 426, 429, 438, 440, 443, 444, 451,452, 459, 478: n = A,T,C or G
acggctccatgggattaaaggaagcaatgacatcctgatctgttccttgatctttgggcattggagttggcgagaggtgtcagaacaaagagaacatcttactgaaaacaagttcataagatgagaaaaatctacgagcttcttatttacaacactgctgccccctttcctcccagactctgacatggatgttcatgcaacttaagtgtgttgttcctgaactttctgtaatgtttcattttttaaatctgcaaactaanaagtataacgtctttaaaagattgtcatcaacnccatantntgtaatntccaggagcactgcctgaaatttttanttnnttnagggagtacattggtggtgggggaaattgttactaccttnattttccngnnangcaatggttcctctttnanagnttgtattanaanaagccctcntnttnnggccttnnttattangcctaaatatataatgaanaata

SEQ ID NO: 2033 - DNA, 289 bp, Homo sapiens
  misc_feature 18, 99, 113, 122, 134, 138, 155, 164, 174, 181, 182, 185,214, 227, 236, 238, 242, 247, 251, 267, 269, 280, 286: n = A,T,C or G
gccgtaggtccggccgangtactttttttttttttttttttttgtaaaacaagcaaattttattaaaggaaaattttgcaggtttaaggtttgcaggtnaaattttgtaggtnaaaaggttnacttttcaccantctnttctggcatgcttttantgatgtcanagtcacttgnatcaaanntanccagggtgcacactctgtagtatattccncatactgtcccanttcaatatnantgcnactgnaatnattggacacttgtttnancaaacatagcntaggancct

SEQ ID NO: 2034 - DNA, 480 bp, Homo sapiens
  misc_feature 67, 110, 113, 130, 153, 159, 208, 244, 255, 269, 277, 316,345, 357, 366, 370, 375, 396, 412, 413, 452: n = A,T,C or G
cccttagcgtggcgcggccgaggtacagatccgaagtttcaagggcaaacgtgtgagatgtgtcaanacctgccttggtgtctgtgctgagcataaaaaatgtgttcagngcnaagccttcaattaaggnaaaaagaaagacccctgcccccnggaatngtccttattttaacattccaaggtagaaagtccggacaaattgccccanccggtccaacctgatcctgtgtcccattgtaagganaaggatgttgncactgttggttctntttacttnttcagtgattggaaacaccgaggtcatggttcatgttgnggaaaatccaaagggcccctggccaaacntattccaattgnacctggtgnggtngctgnaattgttcttatggccttgcntactgctgatatggannctttaaatgatattccatgacaaaggggattttgttaanttgaaaaaaaaaaaaaaaaaaaaaaaaa

SEQ ID NO: 2035 - DNA, 308 bp, Homo sapiens
  misc_feature 237, 247, 288: n = A,T,C or G
acctctcccaagaagttcattatatatcagaaattaaaatgaaatataagcatatattgcatgctgcatatttctatcgttcaaaccagccaaccaacaaactaaaaggaatactctccaaaacactgagtattaagtaatttcatctgccttttttgatcctacaatcatttttcaaattttaggtgtttttctttaaattattcatcaaactactacatatacaagctatccaanaatgcaaacnaggggacatttgagatggggtagtgggctgcacataagtanttccaagaaccactcattct

SEQ ID NO: 2036 - DNA, 525 bp, Homo sapiens
  misc_feature 164, 289, 344, 390, 392, 395, 397, 399, 425, 429, 432, 434,437, 440, 444, 451, 456, 481, 482, 485, 502, 505, 517: n = A,T,C or G
acgcggggctcttcctgctctccatcatggcgcaggatcaaggtgaaaaggagaaccccatgcgggaacttcgcatccgcaaactctgtctcaacatctgtgttggggagagtggagacagactgacgcgagcagccaaggtgttggagcagctcacagggcanacccctgtgttttccaaagctagatacactgtcagatcctttggcatccggagaaatgaaaagattgctgtccactgcacagttcgaggggccaaggcagaagaaatcttggagaagggtctaanggtgcggggagtatgaattaagaaaaaacaacttctcagatactggaaactttgnttttggatccaggaacacatggtctgggtataaattgacccaagcntngtntntnggctggactttttttggtgttggtanggcnagntnacntcnaganaaaaacncaganaggttgtttggggccaaccaaatannaanagagcatgcctgttccncanaatttatggatnttcttctg

SEQ ID NO: 2037 - DNA, 282 bp, Homo sapiens
  misc_feature 214, 229, 253, 262, 265, 278, 280: n = A,T,C or G
accaaagaacagataaaaggaggaacaggagacgaaaagaaagcgaaagagaaaattgaaaagaaaggagagaagaaggagaaaaaacagcaatcaatagctggaagtgccgactctaagccaatagatgtttcccgtctggatcttcgaattggttgcatcataactgctagaaaacaccctgatgcagattctttgtatgtggaagaagttnatgtcggagaaatanccccaaggacagttgtcagtggcntgttgaatnatnttcctgttgaacngnac

SEQ ID NO: 2038 - DNA, 586 bp, Homo sapiens
  misc_feature 350, 371, 375, 387, 397, 401, 415, 420, 449, 458, 463, 464,480, 490, 495, 497, 500, 507, 508, 515, 528, 532, 559, 577: n = A,T,C or G
acctggagtgatggatggcgttccctcggctaataactatcagggtggatttagaacaacactcatggctaaggatctgggattggcacaagactctgctaccagcacaaagagcccaatccttcttggcagtctggcccatcagatctacaggatgatgtgtgcaaagggctactcaaagaaagacttctcatccgtgttccagttcctacgagaggaggagaccttctgagtgtgccctttggccacggacactgttgggaaccaaactctgcttgagcctccttttagctcactccacaagtaaatggattaaatcaaagtcacctatctgcttttgattgctaggncacagtaatccctaggatttnaccnttatctttttgntttaacaaantttntccgaatttttttntgaancactgatagttttgctactacttattgancttttaaangttgnncccagctctcactaanatgaatattnaatcngnttntctgttnntttaaanaaacaatttttgncacnggtgaaccctttaaagaaaaaggattntgggagaaaaattaaagnaacccgatt

SEQ ID NO: 2039 - DNA, 321 bp, Homo sapiens
  misc_feature 213, 249, 254, 268, 270, 278, 296, 297, 301, 305, 309, 315: n = A,T,C or G
accaaagaacagataaaaggaggaacaggagacgaaaagaaagcgaaagagaaaattgaaaagaaaggagagaagaaggagaaaaaacagcaatcaatagctggaagtgccgactctaagccaatagatgtttcccgtctggatcttcgaattggttgcatcataactgctagaaaacaccctgatgcagattctttgtatgtggaagaagtngatgtcggagaaatagccccaaggcagttgtcagtngcctngtgaatcatgttcntnttgaacanatgcaaaatcggttgggnntttncttngtanctgaanctgcaa

SEQ ID NO: 2040 - DNA, 471 bp, Homo sapiens
  misc_feature 331, 452, 453: n = A,T,C or G
cccttagccgtggcgcggccgaggtggaccttcaggggatcaaagcaaagttccaagagaagtatcagaagtctctctctgacatggttcgctcagatacctccggggacttccggaaactgctagtaagccctcttgcactgagccaagccagggcaataggaacacagggtggaaccacctttgtcaagagcacattccaaatcaaacttgcaaatgagactcccgcacgaaaacccttaagagtcccggattactttcttggcagcttaagtggcgcagccaggccaagctgtgtaagttaagggcagtaacgttaaagatgcgtggncagggcaccttgaactctgcttagcaagcatctaggctgcctttttactttcttttagcatggtaactggatgttttctaacactaatgaaatcagcagttgatgaaaaactatgcatttnnatgggcacaatttagaag

SEQ ID NO: 2041 - DNA, 589 bp, Homo sapiens
  misc_feature 289, 311, 318, 433, 442, 444, 474, 485, 542, 545, 547, 554,580: n = A,T,C or G
acgcgggcgctgtggaaattgggtcttgggctgggtggcatctggcagtcatgggtaacacttgcttttccagttaatgtggccatgtgattccaagtgtcatgttgctttgtggcaagattgttgtgtgacttgtttttttgtttttgtttttgtttttttaaaggaaactatttgtgggctataggaaactttctgatgcctccggattgtgttagtagtagccatcaggagggtctccaactaaaacacttgttcctgcttgctcctttcccctctcattgttcancatttcttgtcaagttgcccancttgganttgctgcacgcacatgtgtccttgtggttatagctagaaggacaggagtctcctgctgatgcgtgataacttaagcttgggggagaaagtcttttccactgcctaactaaacaantctgggganancatgggatcatttctatgtgtgggggtaanctggcagtaanattgaaacttaatttaaaattccccttggaaattccttaatgttattacctctaacnagngnttggaantcccatccaaaatttggaaatttganttcttcttt

SEQ ID NO: 2042 - DNA, 318 bp, Homo sapiens
  misc_feature 18: n = A,T,C or G
acgcgggactactggaantgcacaaactggccactgacaaaaatgacccccatttgtgtgacttcattgagacacattacctgaatgagcaggtgaaagccatcaaagaattgggtgaccacgtgaccaacttgcgcaagatgggagcgcccgaatctggcttggcggaatatctctttgacaagcacaccctgggagacagtgataatgaaagctaagcctcgggctaatttccccatagccgtggggtgacttcctggtcaccaaggcagtgcatgcatgttgggggtttcctttaccttttctataagttgtacc

SEQ ID NO: 2043 - DNA, 424 bp, Homo sapiens
  misc_feature 374, 389, 391, 393, 415: n = A,T,C or G
acgcggggagtccgctggtcccgagcacgagctgtgaggggattcacttgtgtgcggaactcctcggaaccatggcgtccctttcccttgcacctgttaacatctttaaggcaggagctgatgaagagagagcagagacagctcgtctgacttcttttattggtgccatcgccattggagacttggtaaagagcaccttgggacccaaaggcatggacaaaattcttctaagcagtggacgagatgcctctcttatggtaaccaatgatggtgccactattctaaaaaacattggtgttgacaatccagcagcttaaagttttaattgatatgtcaagggttcaaaatgatgaaattggtgatggcactacctntggtaccgtttagcncnanaattattaagggaagccaaatntttaattgc

SEQ ID NO: 2044 - DNA, 573 bp, Homo sapiens
  misc_feature 377, 381, 404, 436, 443, 457, 461, 483, 487, 493, 502, 504,510, 526, 527, 531, 534, 547, 567: n = A,T,C or G
gcgtggcgcggccgaggtaccccctttccatagaagggggaagccctctttcttgtctgccaacccgatcacgaccacttgagtagagatcacttcggctgcttgagtaactgtctcgacttccaccatatccgtcacgtgagctgctgtaatcatcatagcgactgcttccaccataagatggcgggggccctcgtgtaggtggagcactacgtgagttaccataactctcatatgaatctctgtaggaacctccacttggatgatctgaatagtcacgatcacgaccatatccatctctatcgctatatcctcttgatggataggcatcacgtgaactggaatgaccataatcacggtaaggataatctcgtggngggnggtgcataatctctagtatcacnagaacttgggtaatctctgcttgaatagctgnctttaanaaaaatacccatcntctntttggggacaaataaacttctntacnaaaggncagcggttncnttcaanggggacctccataacnntctnttncacgtgatacagngagctttttctccattccantggttc

SEQ ID NO: 2045 - DNA, 564 bp, Homo sapiens
  misc_feature 179, 419, 451, 464, 466, 471, 476, 506, 516, 527, 528, 538,541, 550: n = A,T,C or G
acagagtgacatcggcagttgcagcagcagcagtagcggcaggaggagggctgtatactggcgcctggctgggatatgtgtttccttgaacggaactgaccattgtatttgggtaagcggctgagtctgctgactaggaagggctgggtttgcggatggtgggaccactgcctgctganagaaaacagctgctccgggggaaaactgtagctctggaggtggctcatctgcgcgttccctgcaaccaggtaggcaccacttggaggaggcctgcatcacctgagaaccaaaaacaccagatgactgcatataatatggctgattcttgtaactttgcatacatggaatacatcggatcttcgtcattaacttggtatataaaggaaagggcctccatcactttcacattaagttctganagttctgaatgttttctatcaatatcttccancttttcatcaatnanaggtnccatnttggtgacacattgctttaaaaaaaaacanctcttggtangtctggctganncatactgggnctntacctcggnccgcgaccccgctt

SEQ ID NO: 2046 - DNA, 519 bp, Homo sapiens
  misc_feature 262, 282, 383, 401, 441, 459, 475, 489, 497, 503, 518: n = A,T,C or G
acgcgggggcagtgagttcgacacaccatgccgactgtcagcgtgaagcgtgatctgctcttccaagccctgggccgcacctacactgacgaagaatttgatgaactatgttttgaatttggtctggagcttgatgaaattacatctgagaaggaaataataagtaaagaacaaggtaatgtaaaggcagcaggagcctctgatgttgttctttacaaaattgacgtccctgccaatagatatgatctcctgtgtctggaangattggttcgaggacttcangtcttcaaagaaaggataaaaggcttcagtgtataaaacgggtaatgcctgatggaaaaatccaaaattgattatcacagaagaaacagctaagatccgtncttttgcggtagcagcanttctccgtaatattaaagtttactaaggatccatttgacngcttcatttgaaccttcnagggagaaattacatntaaaatatttgcanggaaaaanaacacntggtttgccatttgnt

SEQ ID NO: 2047 - DNA, 648 bp, Homo sapiens
  misc_feature 267, 279, 303, 316, 332, 342, 358, 382, 387, 391, 396, 400,406, 411, 414, 418, 419, 420, 432, 445, 450, 451, 493, 498,503, 517, 528, 530, 547, 549, 553, 556, 572, 574, 577, 583,585, 600, 611, 621, 631, 635, 638, 643, 645: n = A,T,C or G
acgcgggggtagccggagccggcgacgtgaggcgggcgttgctcgcgcgacaagtagttgctgggacagcgaaatggaggggtgtgtgtctaacctaatggtctgcaacctgcctacagcgggaagctggaagagttgaaggaaagtattctggccgataaatccctggctctagaactgaccaggacagcagaactgcattgcactgggcatgctcaactggacatacagaaattgttgaatttttgttgcaacttggagtgccantgaatgataaanaccatgcagggtggtctcctcttnatattgcgggttntgctggccgggatganattgtaaaanccttttgggaaaaagngctcaaaatgaatgcttgtcaatnaaaangggnttgtncctntggccnggacnccncttnnnggggaaatttcncacacttgggggncgttnntatttggatcccagctctggccaaattgggggaaaaatgggnataanatgtntcctgtggggaaantttttcccctncnatttccacaacatatangncggnaanataaaatgttaaaccncnggngccccntnaagggggccccctcnctttttgtggngggcccactntcccttttanaagnggnaaaancntgt

SEQ ID NO: 2048 - DNA, 456 bp, Homo sapiens
  misc_feature 181, 244, 250, 284, 303, 321, 344, 369, 378, 381, 397, 399,402, 408, 423, 434, 445, 454: n = A,T,C or G
gccgtggcgcggccgaggtactttggcctctctgggatagaagttattcagcaggcacacaacagaggcagttccagatttcaactgctcatcagatggcgggaagatgaagacagatggtgcagccacagttcgtttgatttccaccttggtccccttggccgaacgtccacgtgggganccactataatattgctgacagtaataaactggccacatcttcagggctgcaaggcttgccganggtganagtgaaatctgcccagacccctgccactgaatcngtcaggggaccccggagtncccgcttaaaatgcccantaaaatgagcagtttaaggaggntgcctggctttctgctgataccaancctaagtanttnttattggttggaaggntntantaaaanactttggctgggacntgcatttgatngtgccctctcncccagatanac

SEQ ID NO: 2049 - DNA, 478 bp, Homo sapiens
  misc_feature 296, 304, 360, 425, 446, 453, 468, 472: n = A,T,C or G
acaagtttgaactggatacctctgaaagaaagattgaatttgactctgcctctggcacctacactctctacttaatcattggagatgccactttgaagaacccaatcctctggaatgtggctgatgtggtcatcaagttccctgaggaagaagctccctcgactgtcttgtcccagaaccttttcactccaaaacaggaaattcagcacctgttccgcgagcctgagaagaggccccccaccgtgggtgtccaatacattcactgccctgatcctctcgccgttgcttctgctctncgctctgnggatccggattggtgccaatgtctccaactttaacttttgctcctaagcacgattntatttcacctggggacattgctgctatgctggggactcatgtatggtctactgggactcacttancattgttccaagaccttgaanttcctgnccgggcgggccgctnaaangggcga

SEQ ID NO: 2050 - DNA, 414 bp, Homo sapiens
  misc_feature 48, 384, 385, 390, 392, 397, 398, 411: n = A,T,C or G
actgaaaacatgaaaaacagcaaaatccaagggtgaactttgacctanattgataaccaaatctagcaaacccacatgtatatataaaatcagagtgaacactagccggggcggtggctcgcccctgtaatcttagcactttgggaggccaaggcaggtggatcacgaggtcaggagatcaagaccatcctggccaacatggtaaaaccatgtctctactaaaatacaaaaaattagccgggcatggtggtgcatgcctgtagtcccagctactcaggcggctgatacaaggggaatcgcttgaatctgcaaggtggaggttgcagtgagctgagattgtgccactgcactccagcctggcaacagaatgagactctatctcannaaaananatatnnaaaaaaaaaaaantcc

SEQ ID NO: 2051 - DNA, 428 bp, Homo sapiens
  misc_feature 294, 318, 333, 362, 368, 376, 385, 387, 394, 401, 421: n = A,T,C or G
actgcaagacccatcttccctccagttaatacactcccaggatgggctgcagagggggagactctgagagaagctggaggcccacaaaagtccactgaccttctttctgtcccagaaatgaataaaggacccagttgtgctttccttccaaaatcctcaacaaagttgtttgtgctccaagaaaatgtgggaataaaaaaatcatgtcccaggtcatctttgtgtgtgtgcgggggaggtggatgggaggaaaaggcattgtattaatagatactgctgctataaaatgacatnaaattatagcccttgatctggttntgtaaacaatgccgnttttttaggttatttggcactccccctantatacntagcccanattcttttntnaagtcangtgcttntttttccaaaaataatcctntgaaatc

SEQ ID NO: 2052 - DNA, 649 bp, Homo sapiens
  misc_feature 96, 105, 119, 130, 139, 159, 161, 183, 191, 205, 217, 220,241, 280, 292, 303, 304, 395, 412, 428, 443, 463, 466, 480,485, 489, 494, 506, 519, 521, 525, 527, 532, 544, 556, 568,576, 608, 619, 631, 634, 635, 637, 648, 649: n = A,T,C or G
accttcttttcagaagtaaagcctgcaggccctactgttgagcagcagggagaaaatgggcgccgatctggaaggaaggatgttgcccacctttgnaccttgacnagaaaccaaaattnttcattatttngcttatctngttgaccggccaacgtgatnanatcctgttagccaacaaaaaanacttggangaagcaaaaggganacttgcagcttnctntgctgaaacgtttaagccttncccacattcaaaattgaacagcctgccatcggtcttgcnacagatcgcaancctcctcccannacaacgtggggacctgtttttgcgccccaccccaaatcgccaaaaacttggaactggaacaaagtgactgtccaattggagttctgctggngatctttgaatcttcgncctgatgctaccccangtgggactttggctntcgcaagtggcaatgggttnttnctcaaagagggaangaggntgcnacagnaacccggttttncacctctgacccnanaagntnttttnatccatggggtnaaaggagggccngccacttggttnaatacccnaaaaaaaattttaaatttttttccccctttanaaaaaagatanaatttgtctttnccnngnggttttcccann

SEQ ID NO: 2053 - DNA, 576 bp, Homo sapiens
  misc_feature 178, 191, 246, 270, 315, 320, 322, 332, 333, 339, 345, 357,367, 370, 372, 379, 406, 415, 444, 449, 465, 477, 488, 497,520, 527, 529, 533, 537, 539, 547, 549, 550, 564, 575: n = A,T,C or G
acacattaagcatccccagttcccctcgcacaccccttttcccagccactagtaaccatccttctactctctatatccatgagttcaattgttttgacttttagatccccgcaaataattgagaacatgcaatggttggctggttctggcttaatgtacttaatatagtgacctctantttcattcatganttcttaactggccctggatttttgacctttatttttaaagattttggaaaactcnaactggtcttatttttaaaccctnatatacaatttcctctaacttataaacttcccttatattatttgnaatgngncataacatannaccttnggccgngaccaccctaangggcaaattncancncactggngggccgttctagtgggatccgagcttnggaccaaancttgggggaaacatgggcaaaactgtttncttgngggaaattgttttccnctcaaaattccncaaaaaatacnagccggaancataaaagtgtaaaacccggggngcctatngngggncccncncccatttntnngggtgcggccaacnggcccttttcna

SEQ ID NO: 2054 - DNA, 649 bp, Homo sapiens
  misc_feature 229, 260, 344, 373, 391, 394, 395, 397, 399, 408, 465, 468,476, 484, 487, 520, 539, 545, 548, 553, 569, 576, 583, 588,609, 626, 643, 646: n = A,T,C or G
actccagatggcgccaaagaataaataggcaggtctctatgataaaagaacaaagggaaagcagtttagctcgattgttgatcaccttcaccaagcgccgtcttgctagaacatatttctgagcagtggagattttatcaacaccagcaggcatcacagactgacacaactcttttatctcatctgggggaagctgctctacattttgtagcttgctgacactctgtcnatgactgcataatagctgaagaaatcattancactctgtttcagcaggtagatgataatgcctaaaccaggcaggcgccagtatggaaccactggaaccttgggtatcttgccgngtccattttattaactggtttctaaaagnttaggagtgaaaaaaacnccnnancntgctggaanggaggggaactctgtacatgagtgactggcaatattccattacattggcacaattgnttnataccagntcaaactnatntttttttggttacttatctccccccattatcgncttgaaatttaactgaccnagcttntcnaaccncccaaacgactttttntcctaancctggcnctggnatcttcaatttttcccttggnctccttaaaaaaccttnttttcataaccgcaagntcntta

SEQ ID NO: 2055 - DNA, 515 bp, Homo sapiens
  misc_feature 17, 18, 21, 26, 41, 45, 114, 124, 130, 140, 154, 158, 191,203, 226, 247, 251, 296, 301, 317, 349, 380, 383, 476, 477,492, 496, 500, 509: n = A,T,C or G
actaaagatgatgattnnttngtggnatgcctgaaggggcnggcnccattcaaaaaagtattggaaaacattaaccaagaaaaaggctccttgtccctcctaatccatatccanatacccccanccaaanatcttaaaanggatagaccagccntatnccaacatgccaggattccaaaagcatgcctcanctaattagggtnttccctacagcaaactggggtanaggggctccatcctgcaatanccanaaagccttacctcgcctaggccaagggtatggaatctaaatgaanactgnccacaaacagtggctntaaaacctgggcttaaataaaataatattttncttcattacatggccaaagggagaggagganatngaaaagattgattttactacctttgggggctgaaaaacttccccttgttggttggaagggggtttaaaggaaaataacaggaaaacctgtctnnaaaaaaacataaatnaaanctcntggaagccncttttt

SEQ ID NO: 2056 - DNA, 648 bp, Homo sapiens
  misc_feature 5, 6, 58, 60, 117, 168, 173, 176, 218, 226, 305, 318, 330,362, 376, 440, 441, 445, 446, 464, 475, 482, 496, 502, 503,504, 511, 518, 534, 544, 550, 558, 559, 580, 595, 596, 598,607, 610, 611, 612, 640, 644, 648: n = A,T,C or G
acttnntttttttttttttttttttttttgggtaagggccgcaaactgctgcaaacanantggtgatagcccctaaacataatgttaaaatttggattaatgggctattttctgctngggggtggaaaccgatgaataaaaaaaatcctgctacactatatgcttgantggantanggctgaaactggggtgggccttctatggctgaggggaatcangggtgganacctaattgggctgatttgcctgctgctgctaagaagaagcctaatagtggggtgaaggcttggattaacgtttaaaanggctatttgttgngggtctcatganttggagtgtaggataaatcatgctaaggggangatgaaaccccatntccccgataccggttgtataagatttccttgaatggcttcttgtgttggccattttctcgggcnntttnnttaactggttgagccaanaaaggtttttnttccttncccccttttacccnttaaannnttggaanaaggttnttaccgggaacttaanatttatttgntatttngaaaaaannattaaatttttgaaaaactcntttaatgtttgggtnngntttttattnccnnnggaaattttttttgggggcctttttaanaaanaaan

SEQ ID NO: 2057 - DNA, 648 bp, Homo sapiens
  misc_feature 192, 221, 253, 266, 290, 301, 323, 332, 335, 343, 350, 378,381, 384, 388, 390, 395, 403, 407, 415, 423, 425, 443, 444,465, 486, 494, 509, 511, 517, 526, 527, 532, 544, 552, 553,554, 556, 562, 563, 566, 573, 575, 596, 599, 605, 606: n = A,T,C or G
  misc_feature 607, 616, 620, 625, 633: n = A,T,C or G
actgtaatccaacacttctttgttagcacagccacccagttcccacacccggggtgcttttttgcccttctcctttggagcatctgacttcgtggacttgttggacttctccatacccctccatgcttctgaatgaactcctcgcgcttctgcggatcaactcctttttggaaagttctactccgttctcangacccactggaagacctgactttctgcanggactggtttgcttggtacccaaaggaccatnaaaaaccttcttntttggcccctttttttttgctatncttgctttttncttggggctttttccccccggngtctcaatnttngacctcanaggtttnttgggccttttcaaaattttaaaatttnttnatngggngngggancccggatnttantgccctcntttttttnanaaaggagaccccaagaannatttttggaaaaaaaaaaaangccatttaataaaacttaaancacttggnttgtggataattttngngggccntgcccgggnngggcngtttaaaagggngaatttcnnnancaatgnnggnccggttntnaattggataccaactctgganccnaacctnnnggaaaaaangggntaaantggttttnggggaaaatgtttcc

SEQ ID NO: 2058 - DNA, 572 bp, Homo sapiens
  misc_feature 105, 138, 142, 191, 216, 231, 303, 309, 373, 375, 391, 403,411, 425, 443, 447, 449, 451, 455, 462, 465, 500, 512, 542: n = A,T,C or G
acaaacatgggtgagcaaagttcaactcaggtaataagtgattaaaaaacaaaacatgtagtgggtcacaacccagactggttttcactgtgcaactttcctcanggaataatacccattcacagaaagaaaggaatntgcntccaagcctttgttcataaagaaaatgcccttcaaacaaattcatcatnaagcttaaaaaaaaaaaaaaggaangaaaaaggggtgaanccgtttggcccaaaaaaaagcttaaatataatggggtatacctacttatagatatgttgccatttaaacccntggatntatacattttgcaattaaatgaattggctcagtaaagtgaaaaagtgttttctataaatatgtngntattgctgatatgccncacattttgctntgcatggngactgtgtaactcnaaattttaagctgccctnttgncngnttanccctcantangcattctgtggacaacatgcctccaattcttgaanaaaaacaaaacncccttctttcaaaaaaaagggttttgcccngccctacatttttggtttttttttttaaaa

SEQ ID NO: 2059 - DNA, 646 bp, Homo sapiens
  misc_feature 308, 551, 644: n = A,T,C or G
accattttatttagtgttgtaggaaatgttgggttacttcttaaaaacgaaaccaaagaaattcaaaagtcccaaagaaagaaagcaggaaataataattctataatccaaaaacgttgggcgatccttcagttggaggaagagggcgtcagttaagtagctcacacagtagatatggagacaccatatggagatacggagttaagtttggtggatactaggaattaagttctccacctaaggcaattaatttttcagccttgagagataattagtagttctagaaaaagaaaaaagttgactggganaagggtgggagggaggatggtgcgtcatttaacattaaattgcctctctctacagtatgtggctgagcatcatggccttcctccctctgccccgttgaactcccactgttagcaaactgagagcacatgcctgtgtcttcttcataccgcatgtgcacacacacctgtatctccttcatcaaggcatatgcagacccctcccaatcgggggtcccagcttgttcaattttggcaaaagggcanagttactccttcatcccactctgctgccttgatgaggtgaacacactggaataagatggagggcaggatacctgccaaagcctgaggaatganat

SEQ ID NO: 2060 - DNA, 645 bp, Homo sapiens
  misc_feature 20, 410, 449, 471, 511, 535, 537, 572, 588, 621, 642: n = A,T,C or G
acccatcattactcccactnagaaagaagaagtaaatgaatgtggtgaaagtattgacagaaataatctgaaacggtcacaaagccatcttccttactttactcctaaaccacctcaagatagtgcggttatcaaagctggatattgtgtaaaacaaggagcagtgatgaaaaactggaagagaagatattttcaattggatgaaaacacaatagggctacttcaaatctgaactggaaaaggaacctcttcgcgtaatacccttaaaagaggtcataaagtccaggaatgtaagcaaagcgacataatgatgagggacaacctcttgaaattgtaacaacgtctcgaactttctatgtgcagctgataccctgaaaaaatgcacagttggattaaagcagtctctggcncattgtacacagcggggtcccggcaaatctgcgtctttntgacatccccccggtccttcanaatcccaaacacgctttccgtcctccaacgcagccggcgncaccttaaatttccacagcctttngnagcaactttttggtcttaaacctttaccatggganaaacgaggattttacnaatcttttgcccaaggtcaagccaggggacttnaaggtccaactgtctttcaanaaa

SEQ ID NO: 2061 - DNA, 481 bp, Homo sapiens
  misc_feature 18, 83, 166, 177, 182, 193, 214, 271, 283, 291, 298, 305,327, 365, 373, 392, 401, 431, 439, 446: n = A,T,C or G
acaagatctaccccggantttggaggcgctacgccaggaccgacgggaaggttttccagtttcttaatgcgaaatgcgagtcnggctttcctttccaagaggaatcctcggcagataaactggactgtcctctacagaaggaagcacaaaaggggacagtcggaanaaattcaaaanaaaanaccccgccgancagtcaatttccagagggccnttactgggcatctcttgctgatataatggccaagaggaatcagaaccctgaagttanaaaggctcaacnagaacaanctatcangggctgntaaggaagcaaaaaaggttaancaagcttctaaaaaactgcattggttgttgttaaggcncttccaanggcgccccctaaccaaaanattgtgaancctgtgaaaagttcacttccccgagttggnggaaaccnctaactngcaattaaattttaaataagaatggattttactcc

SEQ ID NO: 2062 - DNA, 649 bp, Homo sapiens
  misc_feature 397, 581, 583, 584, 595, 601, 603, 649: n = A,T,C or G
acctgtcttttcttttttctttttttaaatcatagtttgttttacctgaaagttgagaaagaatgcagtataaatatagcttttctctacacgggagcagggggaacagaaccaatccccagcttagccacacccaacatcatggaaattactgtgaacctgttgtctcttgaggacaactaaaaccaaaacgaaatccctaacattattaaaatgttaggaacttttcaggtaattgctgtaactctggtaaaatacagaaagattacattcctcataataaaaatcaaagtggcccacgccatctgcaaagggaacttgcaccatcttggtttcactcgcattggttaacagtgccctaaaaagtatacacctttttcaaggataaaaccattanggtaatatcttggatcatatcctctgcatgatgaactatcactcaaattatctgtcatgggttaccttactaacactgccaaagaagataattaatggataattttaacagggataggagaaaccttgcaaacctttcaaggtttctttcataactattggtttattattgcatatttttagangnnttatcatcaancttatncnttataggccaatatagtaccaatggctaatttaactggcccacttn

SEQ ID NO: 2063 - DNA, 481 bp, Homo sapiens
  misc_feature 265, 298, 324, 331, 335, 343, 357, 359, 367, 374, 375, 379,380, 383, 384, 391, 397, 400, 405, 408, 413, 414, 432, 434,450, 451, 457, 461, 471: n = A,T,C or G
actggctccaccccttggtgctggcagtgtttggggacattatgctggaaagagctcctagcatcagaggattaacactagcagattctgttccatctttgcactgttgcttacctgctgattttcttaactgttcttgtgcaatcgacaatgtgctaacctgcttttttctttttgtaaacgtttttgcattacaggctgcattcttgccttactgtatagaaaaagaaaaaaaggctgggttactattgcacatttttaagcntttaatacctttatcttcttggaaatgggcaanaattctgaactggaacagtcaaaacnacaggtnttgnttgtaaanggaattttaaattngnccattttnacccctnnaggnnaannacttaanaatatnccntgtgnttnacagnngtgaggggcctgtttatntnatgttgcataaaattnntttgtnaaangggaaagtgnttcttatggg

SEQ ID NO: 2064 - DNA, 398 bp, Homo sapiens
  misc_feature 208, 211, 254, 285, 286, 289, 297, 354, 360, 362, 365, 366,377, 378, 389: n = A,T,C or G
acatataggtggaatgaattctatccttgacatactgaggccaaattacagccttttcaatagctccaatctcattagacagtcccaagccatagtagcacaatgctccaagaccaacagcagccccttccagcaacaaaccatcttccatctgatcaaatttaaaatatttttttattcgatgggttccaatggctgccttttgaantcnttggcccatttttccacgccggatccaattttttggttttggnggctatttcctggctagggtttaacaagccnnttngatctttnggaatggaattctttacaacaagggaggctttgtgaaaagcttggtggaaaaccctnaaaagnantgnnccggaaacacnnccaccttgcancaacatggt

SEQ ID NO: 2065 - DNA, 607 bp, Homo sapiens
  misc_feature 156, 198, 210, 220, 237, 246, 261, 263, 322, 324, 340, 346,355, 362, 382, 393, 394, 398, 412, 421, 429, 439, 459, 469,474, 475, 482, 496, 512, 515, 523, 541, 573, 580, 601: n = A,T,C or G
actaagtaaatgttcctgctattattttttaattatatttttaaacatctcattcctccttgtgcacctcttgtttcctttctgaattatgttgacactgaagaccaatggggttctgccacgggttaatttaaaaagaaactggggcctcataanggactaaaagaaaattaaactagcctaatggtactaccaatnctttttataaanataatggttngaaacctggggataaangttaaggancaaaacttggttgcnanccaatgggttgtggggaacctgtggtttctgaaggggtgaattaaaaaaccagcttgtntnagttccctggagcctntttttnaaaagtcanatttcanacccccccccgttcctgccnggcgggccgtnnaaanggccaattccaacnactggcggncgttctantggatccganctcggaccaaacttggcgtnatatgggcanagctnnttccttngggaaattggtatnccgttacaattcccanaanattccaanccggaagcattaaagtgntaaagctgggggggcttatgaagggacctacntacattnattgcgttgccccactggccntttcaa

SEQ ID NO: 2066 - DNA, 649 bp, Homo sapiens
  misc_feature 278, 319, 452, 534, 547, 565, 580, 617, 630: n = A,T,C or G
acgaagaaagcatttcccaagcaatgagtctcttaatggaaaaaataaaagagcaatgtaattaaactttccttcaaagaaaggaaagaaacctaaatctgttatggcaaatttggaaagataaatatttcctagtcccataatatgtgtttgttttacaaagatatgcttgaatgatgcaaatctatgaagcagggatctgtggcaatccaaattcatccaccagaactccatccttgtttttttgtatcagtggggaacaccttctggaattgcangtgcagatgctgcctcatccaaataagaactgcttcatcanccagaagctcatcacctagtgcatccaactctgcttctaaatcatcttcatccagttctggggtgccataactgcgactcagtgcttcttggatttcatttgcatcttccatcatatcctctactggtcttgnaaatccctaatctggtcgatcttcactttgctttgtatgccttcttcatttccttaactcccaagtttctagcatcaaccgnggtctttggtgtnccttcaaaagactggatngtataattggcttgntcctgttgaatgaactggtggggcaaaatttgcccgntgctggtcatacntccttttttggtttaaaaa

SEQ ID NO: 2067 - DNA, 556 bp, Homo sapiens
accagctactgaatacaccggatctagatatgcccagttctacaaatcagacagcagcaatggacactcttaatgtttctatgtcagctgccatggcaggccttaacacacacacctctgctgttccgcagactgcagtgaaacaattccagggcatgcccccttgcacatacacaatgccaagtcagtttcttccacaacaggccacttactttcccccgtcaccaccaagctcagagcctggaagtccagatagacaagcagagatgctccagaatttaaccccacctccatcctatgctgctacaattgcttctaaactggcaattcacaatccaaatttacccaccaccctgccagttaactcacaaaacatccaacctgtcagatacaatagaaggagtaaccccgatttggagaaacgacgcatccactactgcgattaccatggttgcacaaaagtttataccaagtcttctcatttaaaagctcacctgaggactcacactggtgaaaagccatacaagtgtacctgcgggcggccgtcgaaagggcg

SEQ ID NO: 2068 - DNA, 560 bp, Homo sapiens
  misc_feature 180, 237, 289, 297, 329, 389, 392, 502, 541, 557: n = A,T,C or G
actgcacggcaattgaagcatagctactacagaataactcaccttccaacaattcctgaaatgggtcccttactgggattattacagcaccaaaaaacttctctgaagcctttctccacaaccttgttctatgggattccataatggtaccaatgggattaaagctatgaaccctcaaancatcacgagaataaccatgatgggtctaagacttgggaaaactggcctaaattatgntggaagggaattatgttaaaattgaattcatctgggaagcattcaaatcaancttaaagnctaatctgaaatgctatgacagcctgaaaggnaactgggaatctcatttctatcattgactaactttaaatgttggatcaatatatttaagnggnattgaaaatgctttggagggagtcacacttatactatcaactattagtcttccacagcttcaatcactggcattattctaatcctctcctcttaaattttaagttatganggttatggcaaaagcaacatttcgcaaatgtccctcggncgcgacccccgttaanggc

SEQ ID NO: 2069 - DNA, 645 bp, Homo sapiens
  misc_feature 6, 183, 185, 240, 246, 251, 262, 278, 284, 313, 347, 366,394, 403, 423, 435, 449, 453, 469, 477, 478, 486, 497, 535,543, 544, 547, 562, 569, 570, 582, 587, 593, 595, 608, 611,613, 630, 634, 636, 641: n = A,T,C or G
actttntttttttttttttttttttttaccatgcaacgaaacctttattaacattttgaacaggttcagctattactgaaacttgtaatttctaaacttaagttggggcaaatggctatagtgcagaataatgccatcactgggcactgcgaatgccatgactgaaaaattaacagccacccntnaggcgcaggaccaggtgcagggtccactctttctggatgttgtatcaaaaaagantgcggncattntttcaagcttntttgccttgaaaaaanaacctntgctggtcgggggggatcctttttttatnttggatcttggcctttacattttcgatggggtcnctgggctccacctccaaantgatggtcttgccggcaaggtcttcacnaaaatcttnattccaccttttaaacgcangaccaggtgcangggtcactcttttngatnttggaatcaaaaaaantgcggccnnttcactgntgcctgcaaanataacctttgttggtccgggaagggatgcctttttttntcctggannttngcctttaaattttcnatggggnntaactgggctcnatttncaaggnanattggtcttgccngtnanggttttttaaaaaaatnttgntntaccncctt

SEQ ID NO: 2070 - DNA, 588 bp, Homo sapiens
  misc_feature 169, 236, 298, 446, 476, 495, 527, 530, 531, 555, 565, 567,568, 576: n = A,T,C or G
acaaactcccaattgcaccattaattatggggtcacatccagttgacaataaatggaccccttccttctcctcaatcaccagtgccaacagtgttgatcttcctgcctgtttcttcttgaaatttccccagccaatcccagtatctagagcatttgtcagaaactgcanaactgcacaggaattccattgttgaaactcaaccaacttatgccccctgtatgaactgatcactcantttgagctatcaaaggaccctgaccccatacctttgaatcacaacatgagattttatgctgntcttcctggcaagaacactgctatttcctcaacaaggatgctcctcttccagatggccgaagtctacagggaacccttgttagcaaaatcacctttcagcaccctggccgagttcctcttatctaaatctgatcaaacccaagtgggnctataacacccctcatttggaagctgggtnaaaaaaactattctgaaanaaaatttttcctgggcttttccaaatttgaantgnncctttttcaaagtctcgtttaacntatttttttnannacccctgntgaatgactccc

SEQ ID NO: 2071 - DNA, 437 bp, Homo sapiens
  misc_feature 152, 202, 217, 246, 254, 264, 316, 352, 353, 354, 355, 359,361, 367, 383, 392, 413, 418, 422, 429, 432, 434, 436: n = A,T,C or G
acttgtgggccagcttaagcagctgagtagctgtttggcggtccagggcctgggtgaactggttaatcgcaggaagcactttcacccgcttatagaggatgggctctctgcccgctgcaaacctgatatagcggggccattttcacaaagcnggtgaagggtctttttttggctggaatggtccttgccaaatgccaaattnttaaggctttttttnaaaaaggggaattcaaccacttttttaancctcctgnttttttaacnaaaagcttgggcccggaacccacctttttttcctttgggccttttttctttncgcattcttgggccggcgggaagaaaaaaacccccnnnntccntnggccgnaacaaccttaagggcnaatttcaanacacttgcgggccgtacttantggantccnaaccttnggnancna

SEQ ID NO: 2072 - DNA, 281 bp, Homo sapiens
  misc_feature 57, 84, 198, 203, 248, 280: n = A,T,C or G
cactacagagcagttggggtatgatgggcatgttagccagccagcagaaccagtcangcccatcgggtaataaccaaaaccaanggcaacatgcagagggagccaaaccaggccttcggttctggaaataactcttatagtggctctaattctggtgcagcaattggttgggggatcagcatccaatgcagggtcggncagtnggttttaatggaggctttggcttcaagcatggtttttaatctttntgctggggaaatgtaacagggggggttgtggnt

SEQ ID NO: 2073 - DNA, 209 bp, Homo sapiens
  misc_feature 9, 63, 122, 126, 164, 171, 180, 186, 197, 205, 207: n = A,T,C or G
acccttccncttacctatgcccatgtgcctgcccttccggcgggccaaggtgtttttccggcntcgagcccggggaatggaccgtcacaggcttgcggatgatcagcccatcttttgatgancttncggatctgctgacggtaagttggcattgggcgatttanattggtntcattggtngtctanccacacctttnttttttgncnac

SEQ ID NO: 2074 - DNA, 569 bp, Homo sapiens
  misc_feature 141, 212, 214, 225, 230, 231, 246, 247, 257, 327, 335, 339,340, 341, 367, 384, 391, 397, 398, 402, 413, 417, 420, 435,443, 469, 472, 474, 483, 489, 495, 516, 520, 523, 529, 536,547, 548, 566: n = A,T,C or G
acttttttttttttttttttttttttcctggccattcttggcactgtttctaaagaaaaactccattatcccaagcaaaaagcacagaaggtggagtttggcttcaagagatgttaactcaaaatcttaggcctagcaganaatcaccaaatttatggagaagttaaaaggggtttaacagggaaggaagtgcctttattaagttctaaacnanaggctgggagncacannttaatcaaaaggaanncttcctcagngaaaggtgaacccattcgggggtggcatgtcacctcaagaattaaccccacttaaaaacaaatgatttcntaggatancacnnngcctggtgcctgtgaaccctgaggcnctttgttaaacttggcnctggttntgaatnngganacccaaaattntttnctnctggtatgaactttnatggctcnatccttttaccttaaactttgtaaancancntaaaacccnaccccntccaanattaccctttttgggggaacntttnttntggcancccaaangaaaggacctnntattcccatttagacttnccc

SEQ ID NO: 2075 - DNA, 208 bp, Homo sapiens
  misc_feature 9, 63, 72, 122, 126, 147, 163, 164, 171, 180, 186, 205, 207: n = A,T,C or G
acccttccncttacctatgcccatgtgcctgcccttccggcgggccaaggtgtttttccggcntcgagcccngggaatggaccgtcacaggcttgcggatgatcagcccatcttttgatgancttncggatctgctgacggtaagtnggcattgggcgatttnnattggtntcattgggngtctanccaaacctttgttttttgncna

SEQ ID NO: 2076 - DNA, 232 bp, Homo sapiens
  misc_feature 100, 106, 145, 147, 156, 162, 167, 172, 184, 198, 203, 219,228: n = A,T,C or G
accctctccttgttctcttcaggaatcaagggtcctgatgcggcaaaggatgaagttttaggaagctctgggtcacaacgctctgccccctggcatttanagatanttgcccagtgggctttgccatacactggcaccagtgtgntnaagtctgangcccanctatncacangtctttctgccngatcctccaaatgnaccangattaatggtcaaatntatggctcntata

SEQ ID NO: 2077 - DNA, 237 bp, Homo sapiens
  misc_feature 26, 27, 62, 68, 76, 104, 133, 136, 154, 162, 163, 174, 201,204, 214, 232: n = A,T,C or G
actttttttttttttttttttttttnnctgggaaaaaatgttttattcctctttgcacagancagttnatgaaggnggttttctcctgactccatgcatctttnacacaaagatgcccccttaaatatgcccngtnatctgccccacctcaggnctggaaanntggcacttagnaaggggggcaaaatgcttaagtctcanganggtttttaanggcatttttgcggagagnaattg

SEQ ID NO: 2078 - DNA, 557 bp, Homo sapiens
  misc_feature 315, 396, 397, 418, 420, 452, 456, 463, 467, 469, 489, 511,512, 515, 523, 556: n = A,T,C or G
acacaatgatataaccagctataagtttaaaagcttaaagcactgtgtgagtgctggagaaccaattacccctgacgtgactgaaaaatggagaaacaagacgggcctggatatctacgaaggatatggacagactgaaacggtgctaatctgtggaaattttaagggaatgaaaattaaacctggctcaatgggaaaaccttctcctgctttcgatgttaagattgtagatgtaaatggcaatgttctcctcctggacaagaagggagatattggcattcaagtctacccaccgccattttggccttttactcnttacgtagatatccttcaaaacagcttccactctacgaggcaatttctatatcactgggacagaggatatatggataaagnngggttttctgtttgttgcaanancagatgattgcatattatccttggctatcganttgnaccattnaggnanaaatgccctgatgactcctnagttgagagtcactgtgtcacnnccnaacccatngaggagaggagaaagctttgcgtttaattctgnt

SEQ ID NO: 2079 - DNA, 552 bp, Homo sapiens
  misc_feature 270, 318, 333, 351, 400, 417, 420, 455, 463, 470, 495, 549: n = A,T,C or G
acaaaccacggatcttgtgtcagaaacacatgttgagactcctccattccttccagaattttcagagatggggtagacccacctcaatcatcctcagcatcagtttgctaaattgccaggctcaatgacaagctctcctgccatctccaagcccacttttcatagttccgctctgtctttggctgcagcactttaggcactattctaagtcctggagtatatcactcttgcttcagagctaaataaacattaatgaacacacttactcanacaagtcctggatagctgccattgcaagtacatactcaggagatgaanaaggaagccttaaanggcttcagaatagacatnctaatcaagatgtggccagacaaagacacaaactttttaccctaaaganccaatatttctggattnaanacctccttcttgggcaaagaactgattcaggaggngagtgatnttaaacntgaggttgggacagagctatgccanaatccacatttgggggcaagcagaagattgttgagcagatttaaaaccgctggnaac

SEQ ID NO: 2080 - DNA, 238 bp, Homo sapiens
  misc_feature 95, 109, 137, 151, 160, 168, 176, 180, 184, 186, 188, 190,196, 199, 204, 208, 216, 218, 220, 221, 236: n = A,T,C or G
acaagcacttaattaaagcagaagagcccaagaagaagaagggaaaagtggaagtgagagccattaatttggggacagattatgaatatggggtnttaaatatgcatcngactgcatatgatatgaccctggcaganagttatgcccagtntggtcacancctctgcnactatctnttcnttanangncnaggaanggntttcnatgncacccagnancnntatatggtgtagttngt

SEQ ID NO: 2081 - DNA, 329 bp, Homo sapiens
  misc_feature 165, 216, 251, 267, 277, 282, 285, 315, 321, 323, 325: n = A,T,C or G
acgcgggggtctctggtttctggccccttgtctgcagagatggctcccaatgcttcctgcctctgtgtgcatgtccgttccgaggaatgggatttaatgacctttgatgccaacccatatgacagcgtgaaaaaaatcaaagaacatgtccggtctaagaccaangttcctgtgcaggaccaggttcttttgctgggctccaagatcttaaagccncggaaaagcctctcatcttatggcatttgacaaanaaaaagaccatccacnttaccctganagtgntgnaagcccagtgatgaggaactgccttgtttnttgggnantntggt

SEQ ID NO: 2082 - DNA, 570 bp, Homo sapiens
  misc_feature 275, 289, 360, 402, 409, 441, 444, 457, 464, 470, 473, 480,511, 513: n = A,T,C or G
acgcggggagagcgccgaggagccggtctaggacgcagcagattggtttatcttggaagctaaagggcattgctcatcctgaagatcagctgaccattgacaatcagccatgtcatccaggcctcttgaaagtccacctccttacaggcctgatgaattcaaaccgaatcattatgcaccaagcaatgacatatatggtggagagatgcatgttcgaccaatgctctctcagccagcctactctttttacccaaaaagatgaaattcttcacttntacaaatggacctnttcttcaggagtgattcggatctggctatgctcattattggggatgtgcattgccatctttgctgtgtggnctccacgcttgcctgggacagagctatggaacttccttttangaggtangtaggtacccttatggaggaagtgcttggtanctncgaagtggtatgntatggtntggttntgntatggcncggaggtatacaaccaaaacacaaaggcttntnttgccatggtgcctttgttcattgcccgtgggacttgtaccaggtaaaaaactaaag

SEQ ID NO: 2083 - DNA, 541 bp, Homo sapiens
  misc_feature 84, 232, 236, 243, 248, 249, 256, 265, 275, 301, 308, 317,329, 330, 334, 345, 362, 376, 380, 385, 387, 390, 400, 405,409, 416, 423, 425, 433, 440, 443, 448, 452, 454, 457, 462,465, 484, 517, 534: n = A,T,C or G
acgcggggagagcgccgaggagccggtctaggacgcagcagattggtttatcttggaagctaaagggcattgctcatcctgaanatcagctgaccattgacaatcagccatgtcatccaggcctcttgaaagtccacctccttacaggcctgatgaattcaaaccgaatcattatgcaccaagcaatgacatatatggtggagagatgcatgttcgaccaatgctctctcanccancctactnttttnnccagaanatgaaattnttcacttttncaatggacctctcctccaggaagtgnattcggncctggcttncttaattattgnnatgngcattgccatntttgctgggtggcctcncccttgcctggaanaaangtatngnaantccctttttnggagnaagngtagttncccttangnagaagagnttttggnatntacanaaangnttnggttngtntgggtatggtttgctacgngggcttacaaacccaaatcataaagggcttaangtggcttgctgcttttnttaatgc

SEQ ID NO: 2084 - DNA, 227 bp, Homo sapiens
  misc_feature 66, 72, 78, 91, 149, 160, 165, 174, 177, 178, 188, 189, 204,209, 215: n = A,T,C or G
acgcggggacgctcgaccccaggattcccccggctcgcctgcccgccatggccgacaaggaagcanccttcnacgacncagtggaagaacnagtgatcaaccaggaatacaaaatatggaaaaagaacaccccttttctttatgattcngtgatgacccntgctntggagttgnccnntctacctgcnnaatttcttcctgatnttccnttccantgggggaaataa

SEQ ID NO: 2085 - DNA, 339 bp, Homo sapiens
  misc_feature 268, 270, 295, 297, 315, 319, 321, 333: n = A,T,C or G
acaaacaatgtttatttgtttgtaaagtgccaggtttatatttaagtaaacattaaaatctgcgttgaagcagtgaggccgcatcttttaactggctgtgctggttaaaggactgtttaatcccgctgtgctaagctcactaaagggtcacccctcactttaaagccaagactgccattgtcactgctatggtaagtcacagccagccaggccttctggcaaaaggtgatactaccagcactataaacagacggactggttgtgaggnanctcacagttttaaaagatgcttgtnangaacattacggacaattnttgngnggctagtttggnaacact

SEQ ID NO: 2086 - DNA, 502 bp, Homo sapiens
  misc_feature 255, 326, 341, 376, 381, 389, 408, 416, 418, 425, 428, 429,436, 463, 501: n = A,T,C or G
accggggacaggtgcagtccctcacctgtgaagtggatgcccttaaaggaaccaatgagtccctggaacgccagatgcgtgaaatggaagagaactttgccgttgaagctgctaactaccaagacactattggccgcctgcaggatgagattcagaatatgaaggaggaaatggctcgtcaccttcgtgaataccaagacctgctcaatgttaagatggcccttgacattgagattgccacctacaggaagctgntggaaggcgaggagagcaggatttctttgctcttccaaacttttcctccctgaacctgagggaaactaatnttggattcactcctntggttgataccaactcaaaaggaccttttgataanacggntggaactngaaatggcaggttataacnaaaatttntngtaatangannacttgantaaaattgacaccctctgtgctgcatntattaccactaaaaaaaaaaaaaaaaagtttcctctgnc

SEQ ID NO: 2087 - DNA, 568 bp, Homo sapiens
  misc_feature 325, 332, 364, 393, 412, 420, 431, 438, 448, 454, 460, 512,514, 528, 538, 568: n = A,T,C or G
actccacagagagatgcagacaaagtaaacaatgaaggttgttttataaaggtgatgaccattatagagtcagaaatgggagtcgttgcaggaatttcctttggagttgcttgcttccaactgattggaatctttctcgcctactgcctctctcgtgccataacaaataaccagtatgagatagtgtaacccaatgtatctgtgggcctattcctctctacctttaaggacatttagggtcccccctgtgaattaaaaagttgtttggctggaaaactgcaacactacttactgatagaccaaaaaactaccccagtagggttgnttcaatnaagatgtatgtagacctaaaactcaccaatangcttgattcatcaaaatccgtgctccagngggctgatcaacaaaattnattgttgntatgttctaanccacctncttcccattnatggtnaaatcntgaaccctgttcctttgaacactggaaaactagtaattggaaataaagaatntnggtcctttgctgtnttttctaaanggggctttgaaggcctggaattctttttan

SEQ ID NO: 2088 - DNA, 336 bp, Homo sapiens
  misc_feature 120, 182, 193, 207, 216, 225, 230, 231, 248, 250, 256, 260,262, 271, 278, 288, 295, 299, 302, 311, 313, 315, 316, 329: n = A,T,C or G
accattcaggacataggcacgggcaaggacttcatgtctaaaataccaaaagcaatggtaacaaaagccaaaattgacaaatgggatctaattaaactaaagagcttctgcacagcaaangaaactaccatcagagtgaacagacaacctacaaaatgggagaaaatttttgcaatctactnatctgacaaanagctattatccatnaatctgcanatgaactcntcatnntttacatgaaaaaaacngncctttnaacnantgggcaatnggtttgnacatattctnttgaaangaanacntttttctcncntnngaccatgataaantgctctc

SEQ ID NO: 2089 - DNA, 403 bp, Homo sapiens
  misc_feature 129, 133, 139, 223, 226, 266, 271, 297, 301, 302, 303, 304,306, 321, 328, 337, 348, 350, 372, 375, 381, 390: n = A,T,C or G
actttttttttttttttttttttttttatcctccaaacagatttattgaatacagcaaaattctatatacaaagtgacctggacctgctgcttcaaaacatgatcctttcttactaatatcttgatagncggnccatanagcattataaagcaattgactcttaaataaacaaaaaagtgcctaatgcacattaaatgaatggcctaactactggaactttantanttctataaggtaattaacataggtaggatccagttcctantgacnggcttgctgaaaaacaaatatgagcntcannnngnctttttgcgcactgncaccggnaagccctcntgtttatggancnaatgtcccattatcgattctanacnaccacnggaattcangggggcaaaggtt

SEQ ID NO: 2090 - DNA, 299 bp, Homo sapiens
  misc_feature 155, 176, 206, 210, 211, 220, 237, 240, 242, 249, 252, 263,277, 283, 288, 291, 297: n = A,T,C or G
actggtccaggagttatccaggatagattttcacccaccatgggacgtcatcgttcaaatcaactcttcaatggccatgggggacacatcatgcctcccacacaatcgcagtttggagagatgggaggcaagtttatgaaaagccaggggctaanccagctctaccataaccagantcagggactcttatcccagctgcaaggacnggcnnaaggatatnccacctcggttttttanganangacagcntantgcagataganatttgcctggaggnctgctnagttnatnccgtanga

SEQ ID NO: 2091 - DNA, 549 bp, Homo sapiens
  misc_feature 245, 325, 326, 362, 371, 404, 426, 488, 494, 496, 509, 520,543: n = A,T,C or G
accccttaaccccctctccttcacccttagcagcaagtcccacttttctagggggcaagaaaccccaaaccccttccctccgtgtctttacgctctcttttctctgggtttgcttccttcactatgggcaaccttccatcctccattcctccttctcccttagcctgtgtgctcaagaacttaaaacctcttcaactcacacctgacctaaaacctaaatgcctcattttcttctgcaacaccgnttggcccaatacaaacttgacaatggctctaaatggcagaaaaatggactttcgatttctccatcctacaagacctaaannattttttgtcaaaaaaatgggcaaaatggtctgagngcctgatgnccaggcattctttacacatccggcccttcctanctctgtgcccaggcaactcgtncaaatcttcttttttccttccactgccctaatccaacccaagcgtgctgagtggtatatttnttttcnanaacccattgactntccttctttcngcaactaggccaattttctcagntcctct

SEQ ID NO: 2092 - DNA, 292 bp, Homo sapiens
  misc_feature 21, 126, 135, 143, 146, 155, 156, 164, 168, 182, 189, 211,239, 248, 251, 261, 263, 288: n = A,T,C or G
acttttttttttttttttttntttttggccagaaaaaataatccgtttaattgaaaaacctggaggatactattccactcccccagatgaggaggctgaggagaccagacccctacatcacctcgnatccacttntgatactnttnacgaggcannaggcaaanacanttcccaaaacctcnacaaaancaattccaagggctgctgcagntaccaccagcacatttttcctcagccancccccaatnttnttcacacagncntccttatgggattgccttctcgtanaaat

SEQ ID NO: 2093 - DNA, 170 bp, Homo sapiens
  misc_feature 55, 87, 104, 109, 133, 140, 148, 168: n = A,T,C or G
acgaggactggatggaaaggtgatttgtggctcccgagtgagggttgaactatcnacaggcatgcctcggagatcacgttttgatanaccacctgcccgacgtnccttngatccaaatgatatatgctatgantgtggcnaaaagggncattatgcttatgattgccntc

SEQ ID NO: 2094 - DNA, 198 bp, Homo sapiens
  misc_feature 79, 109, 122, 138, 143, 149, 191: n = A,T,C or G
acattgacagacttttcagtattgtaagaccaagaagacttctctacatggcaatagatggagtggcaccacgtgctanaatgaaccagcagcgttcaaggaggttcanggcatcaaaaganggaatggaagcagcantcganaagcancaagtcagggaagaaatatttggcaaaaggtggctttctttntccagaa

SEQ ID NO: 2095 - DNA, 545 bp, Homo sapiens
  misc_feature 334, 413, 438, 441, 443, 457, 512, 514, 537: n = A,T,C or G
actggcctgctgctggcccgcaggcttctcaataggtttggcatggacaagatctatgaaggccaagtggaggtgactggtgatgaatacaatgtggaaagcattgatggtcagccaggtgccttcacctgctatttggatgcaggccttgccagaactaccactggcaataaagtttttggtgccctgaagggagctgtggatggaggcttgtctatccctcacagtactgcgattaaaaaaaaagcacttctgcaaaggaaccatgttccaacaccgcaaacaaggtgttctgcttaaacagagtaagatcaccacccccatccatcccttncttcctgttccctccacttgattgtgtcattccaccagtgtctggtggtagggatgctcagccacctaaggcaaggatncttgggaggtggaaggcttgcatgnttnancacaccaaactgancgcaaaaggtcactgctcatctaaatctctggatgttcttccgaaacatcccatnantccaatgcagggcctggttgtcntgtccggt

SEQ ID NO: 2096 - DNA, 229 bp, Homo sapiens
actccctacggcactagtctacagggggaaggacgctctgtgctggcagcggtggctcacatggcctgtctgcactgtaaccacaggctgggatgtagccaggacttggtctccttggaagacaggtctgatgtttggccaatccagtccttcagaccctgcctgaaacttgtatcttacgtgaacttaaagaataaaatgcatttctaccccgatctcgcccccagga

SEQ ID NO: 2097 - DNA, 433 bp, Homo sapiens
  misc_feature 285, 369, 373, 374, 380, 384, 388, 397, 400, 405, 411, 415,419: n = A,T,C or G
acagggaagtgtgaggagagcagcaccccaggaaccaccgcagccagcatgcccccgtctgacgaatgacaggaagattgttgaaggccatgagggaaaaaataaaccccagctctgaatcacctaccttcaccatctgtatatacaaagaattcttcggagcttgtcttatttgctatagaaaacaatacagagcttttgggaatggactcactgattttcagtcttttccatctctttcctcctagactctgtgatctgagggtataaagacatgtccaccangtctgagccctcaaaatgtcctgattacaatgctggctgtccaactgcctgttcaataaaagtaaactcagcagaacacccatntttnnttcttnatgntttnatgtttttnttnaaaantgttcnttgnccgnaccccctaagggcg

SEQ ID NO: 2098 - DNA, 118 bp, Homo sapiens
acgcggggacgtcgctttttgatccttcgatgtcggctcttcctatcattgtgaagcagaattcaccaagcgttggattgttcacccaccactgccctgggaaaaaaaaaaaaaaaaa

SEQ ID NO: 2099 - DNA, 623 bp, Homo sapiens
  misc_feature 206, 227, 229, 276, 282, 295, 306, 323, 383, 401, 413, 416,443, 450, 451, 457, 464, 466, 483, 490, 503, 510, 518, 527,540, 545, 559, 561, 562, 571, 577, 582, 600, 620: n = A,T,C or G
acgcggggaggcattgaggcagccagcgcaggggcttctgctgagggggcaggcggagcttgaggaaaccgcagataagtttttttctctttgaaagatagagattaatacaactacttaaaaaaatatagtcaataggttactaagatattgcttagcgttaagtttttaacgtaattttaatagcttaagattttaagagaaantatgaagacttagaagagtancntgaggaaggaaaagataaaaggtttctaaaacatgacggaggttganatgaancttcttcatggantaaaaaatgtntttaaaagaaaattganagaaaggactacagacccccgaattattcccaatagaagggcattgcttttagataaaantgaaggtgacttaaacancttaaagtttanttnaaaagttgtaggtgattaaataatttngaaggcnncctttnaaaaaananattaacccgaagggtgnttaaaanaaccttgaaatcnattgacncagggaanaattgcgtnatttaaagcctanttacnccttttacttaacncnnaacaaaatnggaaanattanttgggaagtggtaggatnaaacaatttggaaaaaattnaaa

SEQ ID NO: 2100 - DNA, 330 bp, Homo sapiens
  misc_feature 22, 167, 178, 196, 201, 219, 314: n = A,T,C or G
actctctgtccacgatcatggnaaccatccagtccttgaagcggccagtgaagagctccaggcgtgcggtcaggtcccggttaccgtacccttaaaaggggacaaacgagtgcccattgaactacacattacagctgccacaggggaattggacagtatgtgtccanagaccagcggngtgagaagaggagtcccntcctntccaggcacaggtaatanatcctgatccccaaggacgaggcatggcttgctgtcacacaatgagggtaggaggagttcgtgtggaacccatggatccccttgggggccttctntttacccttgtcccat

SEQ ID NO: 2101 - DNA, 387 bp, Homo sapiens
  misc_feature 156, 157, 190, 194, 240, 249, 269, 339, 385: n = A,T,C or G
acattccacattttaataaattaaccacaagaaaataatcccacatatacaaggtcaggggtggggaagagtattaatggtatcttaattatacccagtctggttttttttttttaaatgggggtaaaaatcaaatgcaaccccatcttgttttannaattttgaaaactaataaatgccccttaatggncagngttcctttcaaacatgtgagttctttaacaaaaatgaaataaaccnggtgtctgngatttctaattaatcaccgntggccattacacaggttttgttgtttggggtggggagggggcttttgttcccttttgcataatatagtcnatgcactaacaattatgtatattcaaacttgattattttaaattcnat

SEQ ID NO: 2102 - DNA, 635 bp, Homo sapiens
  misc_feature 184, 186, 197, 232, 239, 261, 272, 297, 303, 328, 333, 349,352, 362, 369, 376, 382, 397, 407, 416, 417, 423, 431, 437,438, 456, 458, 474, 482, 485, 553, 561, 568, 571, 573, 579,592, 612, 633: n = A,T,C or G
acttcaaggagaattcccaccactggagctgggctgtgcagtggctacagaagaagatgtcagaacattactggacaccacagagtaatgtctctaatgaaacatcaactggaaaaacctttcagcgaaccatttcagctcaggacacgttagcgtatgccacagcttttgttgaatgaaaaanancaatcaggaancattattgggtcgggagagtattcctgccaatganaccgganacaggcttctacagcagggttnaaaatctcccntgatgattgttgagttgagaagtgnccttgntgatgttgatccttagaggaatatncccancctgaaaggagtaaanacncattactgantgctcancaccttnttggantcaaaattttcgaanccctttgaanaccctgaannttggantggaaacntgctgnnacttgggccggatcgtgntntttctcaaggaaaccntttttaanccncttaaaaggtttgggaccttttggcagtggggaaaactccgcttttggatcacttgcccgggaccgtnggcttttnttgtggnttncnattttnggggaattttcgnaaataaacccccgtggcaantttttttttccccaacttcanaa

SEQ ID NO: 2103 - DNA, 376 bp, Homo sapiens
  misc_feature 127, 174, 177, 200, 204, 224, 227, 230, 251, 253, 258, 263,272, 280, 290, 301, 307, 310, 330, 336, 340, 344, 364, 369,375: n = A,T,C or G
acgcggggctttttccccggttgctgcttgctgtgagtgtctctagggtgatacgtgggtgagaaaggtcctggtccgcgccagagcccagcgcgtctcgtcgccatgcctcggaaaattgaggaantcaaaggacttccttgctcacagcccgactaaaggatgccaaatctngcnaagatcaaaaaaaataaggacancgtngaattttaaaagttccaatncancanaatacctttacaccctgtccntnactgncaaanagaaggcanagaaactnaaccagtccnttgccccccgntttggncantgaaggacttgaattgaacnaacacnctgnttgnacctgttttattttaaaatnctaanaatccnt

SEQ ID NO: 2104 - DNA, 625 bp, Homo sapiens
  misc_feature 182, 211, 220, 223, 252, 261, 269, 275, 276, 290, 293, 301,303, 311, 312, 313, 315, 321, 331, 346, 352, 357, 366, 372,374, 378, 380, 411, 413, 427, 430, 432, 443, 451, 454, 465,469, 477, 479, 483, 486, 487, 488, 489, 493, 508, 510: n = A,T,C or G
  misc_feature 511, 540, 545, 548, 552, 554, 557, 574, 591, 592, 625: n = A,T,C or G
acttacatatcctacatttgactacattatttccaaaccaagtattccatccaaaggaacatactgctataatagagaccaaggagggactgtttaaggttgccaaggtgaagcgagctgagaggctttgtcctcatgccagtaactctgaaatctctcttaattcctgctgtccaggcagnagattgccatggtttccccaagtaggtanctgcttaancanttaaagcccaattgtctgttctgttgatnaaaggtctntgaatttntgaagnnggtgtttaattccnggnggactgantnaatccttnnnantccttnttggtaaagngtggctaataaaaanaatccnccttnaaaagctgnaaaacnanaccngnccttaaattgaccaacttaactgaatgggcntnaggaaagttttttngcnanctgcccttggnaaaacccntcnttccccccagntggntgccttgnanactnaannnntaanaatggccaaagcctntnntcttaaaaacaggaaatccaagggctggnttaanggnctgngnaanacctgtttggatgaaanttaacttaaaccccttnnataaattgggggaaccccctaaaaaaataaaan

SEQ ID NO: 2105 - DNA, 483 bp, Homo sapiens
  misc_feature 156, 163, 167, 175, 191, 204, 211, 221, 224, 227, 239, 243,246, 248, 257, 260, 262, 290, 291, 297, 301, 311, 340, 343,351, 356, 357, 379, 385, 390, 393, 402, 410, 413, 417, 438,439, 440, 448, 450, 451, 467: n = A,T,C or G
acaagtccttgtagatctcctgcaggagcgggtgaagactcatgtctgtctccgtcttcttgatcacctgcagtagctgcacgtgttccgtgacaatctgtctgaggtctgtcattttctggagcagcttggcaaacaactgtgaggactcagggnggttaancttnagctgganctccagggctggtacnaggttgtcttgantgtcttnaatgggcttnacnttnagcaaacctggncggntcnantgaaaatantgncngcattaaatattgccaagtcgttgcttnnaattcnaggnattgaacttnacagcaaaccaaaacttggctcaataaantcnccaaaagnctttnnaggcttttaaaaactcccttgnataaancctgnccntcgaatttnaaaacccnatntttntattaaaggaggccacattgnnnaaatgatntnngggactcaattttttnaggaaagtacttggtc

SEQ ID NO: 2106 - DNA, 650 bp, Homo sapiens
  misc_feature 161, 168, 224, 230, 308, 323, 362, 372, 379, 410, 418, 429,435, 436, 446, 466, 471, 478, 496, 501, 527, 528, 542, 547,554, 560, 565, 573, 577, 580, 586, 594, 600, 605, 608, 609,610, 615, 616, 619, 620, 622, 626, 632, 633, 635, 649: n = A,T,C or G
  misc_feature 650: n = A,T,C or G
acgcgggtaaagatgtctttttttattttacttttttttaagcaccaaattttgttgtttttttttctcccctccccacagatcccatctcaaatcattctgttaaccaccattccaacaggtcgaggagagcttaaacaccttcttcctctgccttgttnctctttnattttttattttttcgcatcagtattaatgtttttgcatactttgcatctttattnaaaagngtaaactttctttgtcaatctatggacatgcccatatatgaaggagatgggtgggtcaaaaagggatatcaaatgaantgataggggtcacantggggaaattgaagtggtccataacattgccaaaatagngtgccactanaaatggngaaaaggctgtcttttttttttttttaaaanaaaagttnttaccattgtntttggnnaggcaggttnacaaccctacaagtcttganttaanaaggaangagggaaaaaaagaaaanccccntccccatattaaaaaaaaaaaaccanncttgtttaggagtncattnaaccctnaggacntttcnctattctnatgnaantgaacntgggccgnaacccnctaanggnnnattcnnccnnantggnggccgnntntatggaatccaacnn

SEQ ID NO: 2107 - DNA, 354 bp, Homo sapiens
  misc_feature 203, 205, 222, 223, 230, 231, 240, 264, 265, 270, 273, 281,285, 294, 298, 300, 301, 303, 307, 314, 315, 326, 328, 338,341, 343: n = A,T,C or G
accatctcaaagctagatgctcgaatccagcaaaagagagaggagcagcgtcgaagaagggcaagtagtgtcttggcacagagaagagcccagagtatagagcggaagcaagagagtgagccacgtattgttagtagaattttccagtgtttgtgcttgaagtgggtggaagtgttctggtttcagctccttttgttttatcnanttttatttcctggcttnnagtcggnnaacagcccnatttatcgggggaccctcacttcnntgaanatntttggtcntggnttgaaattntccntnncntaanttttaanngttttttgggntnctccctttgnttngngtttacaaaaa

SEQ ID NO: 2108 - DNA, 297 bp, Homo sapiens
  misc_feature 121, 209, 212, 217, 219, 253, 255, 265, 273, 275, 297: n = A,T,C or G
acgcggggagctggagtgcgttctgccgaagcttgtggttgcacgcccatcgtcttaggggctaccttccgtgaccatgtccaagtctctgaagaagttggtggaggagagccgggagaanaaccagcccgaggtggacatgagtgaccggggcatctccaacatgctggatgtcaacggcctctttaccttatcccatatcacacaantgntcctnanccataacaagctaacaatggtgccaccgaacatngnaaaactgatnaattttgnangtgctaaactttttttaataan

SEQ ID NO: 2109 - DNA, 450 bp, Homo sapiens
  misc_feature 222, 234, 235, 265, 343, 349, 363, 395, 396, 400, 423, 426,430, 445: n = A,T,C or G
acctaacccagctagtgtgttttccccaatttcaaagctactcattactgttcagtttccctttcctataacgtttcttcttttttaaactcttaattgctagtgtgctaaatttagcaaaatatctagtaaataagaaaaatgaacagggggtccatatgggaaagtattctggctctgagaacttctaataatgcacaatctttggattatggagacggncctggtaacttnnagagtgaaatatgaaaagaaaggtttattnctcttcccctttcattaaaagctctaaaaaactttttcatttaaaatataaattacaaagagacaacttcgccaaatntgtaanataaattctgccanaagttccacaaaacaaaattattgagtttttnnttgntacctttgaaaccaatcataaanttnttangatttaccccgggtnccttg

SEQ ID NO: 2110 - DNA, 649 bp, Homo sapiens
  misc_feature 261, 344, 380, 383, 438, 450, 468, 469, 471, 494, 505, 511,514, 540, 545, 574, 576, 581, 595, 605, 616, 618, 627, 647: n = A,T,C or G
acccaaggatgtcctggagtatgttgtattcgaaaagcagttgacaaacccctatggaagctggagaatgcataccaagatcgttcccccatgggcaccccctaagcagcccatccttaagacggtgatgatccctggccctcagctgaaaccagaagaagaatatgaagaggcacaagggagaggcccagaagcctcagctagcctgatgacaaaaatgacttctaggggtgaagcctgggtgatgaggctgctggaaancttgaaatctccctttcccttcatgctataaaaagaactaccttttgttctctccatctgctcaggtctttttcaccagtctnatattcagcaccatgactggttgactgggcccttancanggtgggcaggtataacatgggcattggacaatttttcttttttaaattttattgntagcttcttgantctaagatgaaaagacanntntgttttaaaaaaacattggattntaagttttttnccacancangggactgtgagaaacacccagcagcnttctnttttggaatcaacagggcaggggatcaanantttgnaaattgaatgttgncaggggtgtnggaaaattttngntgagttctncacatttccccttggttcangc

SEQ ID NO: 2111 - DNA, 546 bp, Homo sapiens
  misc_feature 312, 318, 349, 363, 373, 381, 402, 404, 408, 432, 435, 439,459, 460, 476, 477, 478, 486, 490, 492, 502, 513, 515, 516,520, 522, 523, 530: n = A,T,C or G
ccggccgaggtacaagcagctttcgttgaagtttagaagataagaaacatgtcatcatatttaaatgttccggtaatgtgatgcctcaggtctgcctttttttctggagaataaatgcagtaatcctctcccaaataagcacacacattttcaattctcatgtttgagtgattttaaaatgttttggtgaatgtgaaaactaaagtttgtgtcatgagaatgtaagtcttttttctactttaaaatttagtaggttcactgagtaactaaaatttagcaaacctgtgtttgcatatttttttggaggcagantattgnaattaatgtcataagtgatttggagctttgntaaagggaccaganagaaggagcncctgcagncttttgtttttttaaaacctnanaacnttaccacttgggttattgattagngangganccattatgaaacatctgggnntttggaaacaagtggnnntttttacnttcntntgctgaactnaacaaaactgntnntccntnnaacaggnacaggtggatgcattc

SEQ ID NO: 2112 - DNA, 652 bp, Homo sapiens
  misc_feature 296, 332, 348, 351, 359, 393, 398, 425, 436, 438, 453, 476,490, 510, 514, 516, 533, 534, 560, 564, 572, 586, 600, 606,625, 627, 638, 641, 651: n = A,T,C or G
acgcaggggtatttgaaaactcaaggttatccagatgttccaggtcctctgaacaatccagactaccccggcaccaggagcaatccatactctgtagcctccagaacacgtccagactatcctgggtctctggcagaaccaaattatcctagatctctgagtaatccaactattctggcaccagaagcaatgcatactctgcagcctctagaacaagcccagaccttcctacctttctaccagagccagaattatagtgaattcagagtcattccttaccaccgagcatcatccanacaaccagactaccctggatctcaacgaattcctgnttttggcaggctccancancaagtggnaactatgcaggctccaaacacatccagatatttnggtcntaaaacccggctaccctggagctcaanaccacttttgntnttctggaccaagaanccatttgaaccttccagatccanaagatctggacatnaagttttaaaatcatccatnccanantctttggaaagctgatnntccaggcgctgacttcaacctaactnttcncctttttnggggagccaaactntccaatgctgaggnaatcanaatttgcaagcccttggananaaccttgtttntcnaatggctgana

SEQ ID NO: 2113 - DNA, 575 bp, Homo sapiens
  misc_feature 224, 343, 387, 424, 446, 469, 475, 484, 488, 504, 520, 532,541, 543, 557, 566: n = A,T,C or G
accgccagctctctgctctccacagggctccccgccccacccggcctgataaagcgcgccgactgggctacaaggccaagcaaggttacgttatatataggattcgtgttcgccgtggtggccgaaaacgcccagttcctaagggtgcaacttacggcaagcctgtccatcatggtgttaaccagctaaagtttgctcgaagccttcagtccgttgcagaggancgagctggacgccactgtggggctctgagagtcctgaattctactggggttggtgaagattccacatacaaattttttgaggttatcctcattgatccattccataaagctatcagaanaaatcctgacacccagtggatcaccaaaccattccacagcacangggagatgcgtgggctgacatctgcaggccgaaaganccgtggccttgaaaagggccanaagttccaccacacttttggtgnctctcnccgggcaanttgnaaaaggcgcaatactnttcagctccaccgttnccgttatataantaaaagttngnaaaattcatacttnataaaacanttaaggaca

SEQ ID NO: 2114 - DNA, 523 bp, Homo sapiens
  misc_feature 63, 64, 358, 388, 417, 440, 441, 446, 448, 451, 453, 472,498, 503, 506, 511, 518: n = A,T,C or G
acagttctttccaatctgtgtcttgaactctgacagtattgtctcgaaaatcacgcagatatnnaaacctccacaggagtgggtcatttgaagcagtaaagaggtcacgacaaaccgcagacaaagacaagacggaacgaacatccagaagtcggaagatccgtagtttcagttccaatgggaggacgatcaacccaaatacatctggtaggttcagtgcttgtcgggtaaaagccaaaagaggatacaccagctggtctttaaagaggcgagagagttctgaagatctttgtatatgttggctacattttcccctagtttctctttgaaataaaaagattctgggtagcaagctggnaatctttttcacacttctaatcttaattgntgatttttaagtgtcccatttacaacaantcaggtttcccaaaggcacccanntgganantancnggatctgccctttcataanaggatgcttgtaccttgtccggggcngcctnttnaaaanggcaaanttcaa

SEQ ID NO: 2115 - DNA, 499 bp, Homo sapiens
  misc_feature 397, 465, 490: n = A,T,C or G
actcagtagtgccctgcttctagggctctgaatacgggcttaaagtcatcttgtcctgctggaatttgctgtgcagagccataagcctcccattttgttagcgtcagctaggccaataggaacagaccgggaccttgtctcacactgatgatacctcacatgttgaccggctatgtgaactgcctatttcctatgctggagttttgatttttaactaacgcaaatctgtagattctctcctctccaatccaagaaaacaaaacaaaataatgcttttcgaaattgtttctaggactttaaaacataatgggtatatccaaaattctttatttcagaatgcaacaatagattccattaatatagactcagatcaaaacagcatacctgctaagctaanatagatggtggttgattccactgggtttggatcaatcaataacaaaccttttcctttgacatactctnaaattttgttgtttggggggagggngtgtgtgtg

SEQ ID NO: 2116 - DNA, 472 bp, Homo sapiens
  misc_feature 297, 402, 415, 421, 422, 423, 435, 438: n = A,T,C or G
acattgacaaacacataactgaggcattaatacctctttataataatgcaagttgaaatgctaacaaagcataaacacttctgcaaaaattccacaaggcacagttgttcattcaacagaaaaagtcaaaaccacttggtttttaaatgaaaatccttcacatccacctgtgttcaaaatattaataataacttatgatattaataacttcctttaaaaagcaattaccacaaaacagctaaatcataagcatgaaaagacttattttcctactatgtaccttagaaagaatagatncccatggtcattatttttttagcataaagctaagctaccagaaaaaactttaacaagttacgtgttttccatttgcaaatggatctcagcttgcttagaccagcncccattaactaanacagannnattgtccttcgnccngaccacctaaggcgattccagccctggcggcgtt

SEQ ID NO: 2117 - DNA, 653 bp, Homo sapiens
  misc_feature 379, 383, 406, 418, 499, 514, 518, 522, 537, 542, 562, 568,576, 583, 599, 605, 617, 619, 622, 623, 627, 629, 632, 642,645: n = A,T,C or G
actagaagtatacaccacccagcccggggtccagttttacacgggcaacttcctggatggcacattaaagggcaagaatggagctgtctatcccaagcactccggtttctgcctggagactcagaactggcctgatgcagtcaatcagccccgcttccctcctgtgctgctgagcctggtgaggagtatgaccacaccacctggttcaagttttctgtggcttaaggaagtgtgaagatatgatccagtccagggctaggctcaccacctgtctcctgtcagaaaaaaggtgaagattaagaagctttcaaatgattctatggattaaaatcatacaaatgggggctgttctgaaaatcagtctggggatttgattccntttncagtgactggctccagccatgtntatgaccagctnaattccctgtgcagttcaaaaaagcaagtgaaccaaccaacatggtcgtcatctaacccttgaccttaccagggactccantgctggtgttggctncatntttncaactggcttttttnttttnaactttttgcctttcttttnttaaanctattctnacattgnttttatttcctcctcnttaacntcaaccattgtnancannactntngantttcaaatgntanatttacct

SEQ ID NO: 2118 - DNA, 506 bp, Homo sapiens
  misc_feature 223, 241, 284, 328, 329, 344, 372, 376, 381, 383, 390, 416,425, 433, 435, 446, 447, 449, 453, 464, 468, 474, 475, 476,480, 481, 482, 489, 494, 499, 502, 503, 504, 505: n = A,T,C or G
acaccttttcagggtcgttaaagaccacctcaaaagacttgatcttcttgaacatcaccatgatggaactgagttggttttaagagttagaaatgacggtggaagaaaaaaaaagctccaaatcgaggaaacccctttgcaaaaaattatttcactttaaggaattaaggtattcttaagcagtttgagcttaaaaataaaataagatttaaacaaatgaatnttaactactaggttttcnaaaaggcgcctaaaaaatatacgccgttggttacactaagccnaattcagagaaaaagccttttttcccccaattgctggaaaaaannatcccgtctcacaancactcctttggagaaaaaagaggggttngttnccccncntacctgnccgggctgtccttttaaatgggcgantttcaacanaccggtgngncggtacttagnngntccnaactttggttncaancttggnnntatnnnggacatncctgnttacntgnnnna

SEQ ID NO: 2119 - DNA, 445 bp, Homo sapiens
  misc_feature 130, 184, 191, 221, 234, 252, 269, 272, 275, 283, 284, 289,314, 329, 334, 335, 338, 339, 350, 352, 364, 367, 374, 375,377, 379, 385, 410, 416, 434: n = A,T,C or G
acaaatttacattcatgaggaatgttaaaaaaaattcaactaaaaaacccactttttcctgtgacccataatcccacattttacagtgcaggggagaaggggattagggggcatccaaaacaagtctctnccaaaaagaaatgatgtaaatttcacattccctctcccacaggatccaaatggngagagtntaatttacaattcatctttttcagctgtanattcctttgctgnttcttcttcttcatctgntccacatccatttcttnatnttngtctttgnntgggncttccgttggggcttctggtggctnttcaaggtctttttngggcnnttnnttcacccttgnancaggggcaatgntcnaacctgnngngnaaacantctttctattctatctccatatgcnttaggnctggtaaaaagaatcccntgacgaaactt

SEQ ID NO: 2120 - DNA, 386 bp, Homo sapiens
  misc_feature 150, 192, 226, 242, 261, 283, 285, 313, 328, 329, 332, 334,346, 348, 359, 363, 376: n = A,T,C or G
acctagaagagaggcgggtcaaagaagtagtgaagaagcattctcagttcataggctatcccatcaccctttatttggagaaggaacgagagaaggaaattagtgatgatgaggcagaggaagagaaaggtgagaaagaagaggaagatnaagatgatgaagaaaagcccaagatcgaagatgtgggttcanatgaggaggatgacagcggtaggattagaagaanaaaacttagaagatcnaagagaaattccttgatcntgaagaactttaccatgaccangncttttttggaccattaacccttgttganattcccccaaaaggnnttntngtgaattctacnangacctcacttnttgncttgggaagaccncttcgcattc

SEQ ID NO: 2121 - DNA, 343 bp, Homo sapiens
  misc_feature 26, 125, 153, 171, 190, 215, 218, 228, 243, 248, 251, 252,271, 273, 284, 295, 301, 302, 305, 306, 311, 327: n = A,T,C or G
actttttttttttttttttttttttnggaatggagtttcactcctgttgcccaggctggagcgcatggcgcaatctcggctcatcgcaacctctgcctcctgggtttaagcgattctcctgcctnaacctcctgagtagctgggattacaggnggctgccaccacccctgnctaattttgtatttttaanaaagggggggtttctccatgttggncangctggtcccnaattcccgaccttanggganccnncaggaacaatttcataacntnattaaattacnggcatataatnaacctnnacnngattnattttttccaaattgncccaaaatgcatttta

SEQ ID NO: 2122 - DNA, 384 bp, Homo sapiens
  misc_feature 81, 89, 112, 130, 147, 153, 160, 184, 185, 219, 223, 230,240, 245, 247, 249, 264, 271, 279, 283, 290, 303, 315, 317,318, 322, 335, 341, 342, 352, 354, 378: n = A,T,C or G
accaagggatggaagaagtaaatatagctcaggtagcactttatactcaggcagatctcagccctctactgagtcccttanccaaacangtttctttcaaaaaagccagcangcgaaaagcagggactgnccctgcatttcatattncactgntaaaagntgggttttgaaattttatgtttanntgcacaaattgggccaaaaaaacattgccttgangaanatttgantggaaaatcnagaangnanaagaataaataccgntttctgnccaaaganatgnttatagngccctggaaatgntcctttctttgnanncttngcagaatgcttanggagannaaagtttgangnaaaccaacaggaatttctgaattnatcaca

SEQ ID NO: 2123 - DNA, 345 bp, Homo sapiens
  misc_feature 46, 143, 161, 164, 168, 178, 191, 200, 203, 210, 223, 228,237, 238, 239, 241, 253, 266, 294, 298, 316, 318, 325, 328,333: n = A,T,C or G
gtacaattcatctaacttccggaaagcactttcagtccaaatgcanaaaccgtcccacatgcccaccaggagcaagcttcaaaatgttcagcttgcttacattaagcaagagtaattccagggatgtttctgaaggcccttgntgataccattatcctcanttntaanatgatgcacnggcccctgcgctngataccggnacngattttnattttgcctttgncagcntctcattcnnntnaaaggcatttanccttttttgatancattccaagctttaagttttcttaaagnagcnaaaacaactttcattggntnttatttnganccttnaactttattttt

SEQ ID NO: 2124 - DNA, 620 bp, Homo sapiens
  misc_feature 135, 170, 198, 215, 247, 341, 346, 382, 389, 392, 408, 481,518, 523, 525, 531, 549, 558, 571, 579, 590, 593: n = A,T,C or G
acgcgggtggctcagagcacccgtatcatttatggaggctctgtgactggggcaacctgcaaggaactggccagccagcctgatgtggatgggttccttgggggtggggcttcccttaaacccgaattcgtgganattattaatgccaaacaatgaaccccatcattttnccttacctttctgcaagccagggactancaacccaaaaacccaanaactgccctttccttcatatgcttttgatggnggcatctgctcttcctgggggccctatccaaactggatcttcccttactggttatatcttcaccttgaatggttgggaccaagccaatcccttnttcanttacttaatgggtgggaactaaacgtcaccaaaggnggctttntcntggctgaaaaaatggnaaggcgtgggggggaatttcttcctgggttcccctaaggcctaatgaagggcaaaaaaaaaaaaccattcctnttccttttttacaaccgggaagggcaaaaatcccttnaaaananaagganttgcttgcccttttccantggggcccngccctttttgctntgtttgtnaaccccccatnttnagggaataaaccctggcacttggacaa

SEQ ID NO: 2125 - DNA, 651 bp, Homo sapiens
  misc_feature 143, 166, 185, 201, 236, 239, 253, 257, 258, 278, 281, 298,308, 318, 319, 325, 328, 338, 347, 348, 351, 352, 360, 362,372, 386, 395, 402, 415, 432, 441, 456, 465, 471, 492, 495,498, 506, 520, 527, 539, 541, 542, 545, 548, 554, 577: n = A,T,C or G
  misc_feature 590, 600, 603, 608, 614, 617, 622, 624, 630, 634, 635, 651: n = A,T,C or G
acagacagtccatctctgttctggccgggtccaccgtggaagatgtcctgaagaagcccatgagttaggaggattcacatatgaaacacaggcctcctttgtaggcccctacttaacctccgtgatggggaaagcggccgganaaagggagttctggcaacttctncgaaaccccaacaccccanttgttgcaagggattnctgactaccaacccaaggatggaaaaaacattganctnaggctggttagctnggtnncccctgacttcttattccanaancttgaacactcctaggntttttccctnccttcttganntccctnganaagaacttgnctgaccctnntgnnacttctgngnactttgaacnatgccccctgggantcaccccanccccaangcccttttggggncctattccattggcccncctttggancaaaaaaaccaagcntttttcctnggaaanttttttgaccaaattttggcnaanctnggcccttnaggttttccattanagccccncccattgggctnannggnatnaaacantttaaaatccttgggaaaaaaanggaatcccaaggnccaagttttntgnaaaanccttcnttntgggngntggggncccnntaaaaaaagccttctn

SEQ ID NO: 2126 - DNA, 248 bp, Homo sapiens
  misc_feature 103, 104, 149, 165, 176, 187, 194, 195, 196, 197, 222, 223,240: n = A,T,C or G
acgcggggagcgacaatattgactcacgcctactccagagtggtcctgagagtcctggaagcagccgtggcggccaagaagcgatttagtgtatacgtcacannagtcacagcctgatttgtcaggtaagaaaatggccaaagcccttntgccaccttaaacgtncctgtcactgnggtgctagatnctgcctnnnngctacattcatggaaaaagcaaatnntgtcataattggtgctnaaagagtt

SEQ ID NO: 2127 - DNA, 379 bp, Homo sapiens
  misc_feature 102, 165, 175, 217, 224, 233, 249, 250, 255, 259, 263, 264,267, 270, 287, 290, 293, 298, 326, 327, 334, 335, 342, 345: n = A,T,C or G
accgcaagggaaagatgaaaaattataaccaagcataatatagcaagggactaacccctataccttctgcataatgaattaactagaaaataactttgcaanggagagcccaaagcttaagacccccgaaaccagacgagctacctaagaacagctaaaagagcncccccgtctnttgtagccaaaatagtgggaagatttataggtaaaggcgacnaaccttnccgaccctngtgatagcctggttgnnccaanatanaatnntanttnaacttttaaatttgccncanaanccttntaaattcccttggtaatttaactggtanncccaaannagggacnacnttttttggaccttaggaaaaaacccttggtgagg

SEQ ID NO: 2128 - DNA, 395 bp, Homo sapiens
  misc_feature 382: n = A,T,C or G
acttgccccttccccagaaaagcgggacttgctgctaagggtgaaggaccaaggcagttgtccctgcgtggtctgacacccttgaaacgtgggtgtataatcagagaggcatccctgcaatgattaaacaccaagggaaggctgccttcccagtctgtgaccagcgccggagttttgggtccacggataaaacgtgtctcttttgtctctaccagaaaatgaaaggaattgaaattaagaggagggagagattgaagtgtaatggccaagattgaaaggagaaagtggttgagggatagtgaagggaagttggagaagagagtaaaaagagctgcttaccaaattgaaatttggtgagatgtttcttgggctcgtcggtctnaggacctgaggtc

SEQ ID NO: 2129 - DNA, 495 bp, Homo sapiens
  misc_feature 32, 44, 73, 113, 124, 150, 155, 175, 216, 263, 270, 282,300, 331, 334, 349, 351, 377, 405, 418, 420, 480, 486, 491: n = A,T,C or G
actttttttttttttttttttttttttttttnccgggaggcaanaggaccaaccctccaagtcccggggcccntgtccacccaccatatcctaaacccaatcttttctacctntttgtcgacanggttacaaacagagaggcaagcaaanaaggntggggcccaacggagggganaaaatttatatcccgggaaacgtggggcaacagcatcatanacttgaatgaacccaagggccaagcagccaagcaaggactaattcanagcactnaaaaacccttanttaaaccggggggccccntgtgctaaggacatggccgggcccaaacccnctnttatagggttcacananagtctggagtccacgtcactaaagtntaaaattctactcgaaaatgaaccccancctcccttttgananatgaatcggttacttcaacacatgaggacagatcatttacataaacccccacactctctntttctnttctntttg

SEQ ID NO: 2130 - DNA, 289 bp, Homo sapiens
  misc_feature 116, 153, 174, 188, 226, 238, 253, 255, 284: n = A,T,C or G
acgcgggaagaagtgttcggagagatggaagaccatgcctgcaaaggagaagtcgaagtttgaagatatggcaaaaagtgacaaagctcgctatgacagggagatgaaaaattacngttcctcccaaaggtgataagaaagggggaagaaaanaggcccccaatgctccttaanaggccaccatctgncttcttcctgtttggctctgaacatcgcccaaagatcnaaaggttgaacnccctggcctatcccntnggggattcttgcaaaagaaactggggtgnaatgt

SEQ ID NO: 2131 - DNA, 515 bp, Homo sapiens
  misc_feature 327, 418, 457, 470, 473, 483, 489, 490, 511: n = A,T,C or G
acctggatgaagcatacccagggaagaagctgttgccggatgacccctatgagaaagcttgccagaagatgatcttagagttgttttctaaggtgccatccttggtaggaagctttattagaagccaaaataaagaagactatgatggcctaaaagaagaatttccgtaaagaatttaccaagctagaggaggttctgactaataagaagacaccttctttggtggcaattctatctctatgattgattacctcatctggccctggttttgaacggctggaagcaatgaagttaaatgagtggtgtagaccacactccaaaactganactgtggatggcagcccatgaaaggaagatccccacatgctcagccctgcttactagtgagaaagactggcaagggtttcctagagctctncttacagaacagcccctgaggcctgtgactatggggctntgaaggggggcangantcaacattanaacttnngctgatattttccttccttancaaa

SEQ ID NO: 2132 - DNA, 615 bp, Homo sapiens
  misc_feature 286, 375, 419, 420, 431, 446, 452, 471, 524, 531, 540, 544,555, 566, 573, 581, 583, 613: n = A,T,C or G
acgcgggtatctctgttgctaaaatagatcctttagcacctttggataaagtctgccttctaggttgtggcatttcaaccggttatggtgctgctgtgaacactgccaagttggagcctggctctgtttgtgccgtctttggtctgggaggagtcggattggcagttatcatgggctgtaaagtggctggtgcttcccggatcattggtgtggacatcaataaagataaatttgcaagggccaaagagtttggagccactgaatgtattaaccctcaggattttantaaacccatccaggaagtgctcattgagatgaccgatggaggagtggactattcctttgaatgtattggtaatgtgaaggtcatgaaancagcacttgaggcatgtcacaagggctgggggcgtcaaccgtcnnggttggagtanctgcttcaggtgaanaaattngccactcgtccattccagntggtacaggtccacatggaaaaggcactgcctttggaggatggaaaagtgtanaaagtgncccaaaacntggngtctgaatatntgccaaaaagnaaaaaanttgagaantngggactcacaatctggcttttgaagaaatnaa

SEQ ID NO: 2133 - DNA, 452 bp, Homo sapiens
  misc_feature 263, 395: n = A,T,C or G
agccggccgccgggcaggacatattaggccttttatgaacactaaaacaatgaggaaatgttggtcatggggcaaagtatcacttaaaattgaattcatccatttttaaaaaacacttcatgaaagcattctggtgtgaattgccatttttttcttactggcttctcaattttcttccttctctgcccctacctaaaacattctcctcggaaattacatgggtgctgaccacaaaagtttctggatgttttattaaatattgnacattttggctagtttttcccgaatttctgtcttaggcactgtcgccttcccggggtgaaggacatcaatgaccatttgttcctctgaagtagtcggttggtcatgaactttctagtgcggatagttacggngtcgttcatgatggcgatctatcttcagacagccaaggaggaaaagagcccccgcgt

SEQ ID NO: 2134 - DNA, 656 bp, Homo sapiens
acaaataaaatcaaaaagagcagtgttctgttgtattcatttctgcatgtatagctttattaattgctaatgaaaattagaacttttctgggatcttctgacaagatttttaaaaaatcttaaaatgccttttcttcagtgaagccatctttggagttagtcattactctcaccttatctgcatcttgacttcaacctgatattcctcttcttttggtccagaccctcaaattttaaaagtagcttcaagttaaggaaaggcatttttccacagttcagttccctgaaaaacttccatctcccactgaaagtcacagtccaggagtgaagtaatcacatgctagaacatcagggccaattggaaagtcattatgaacacttgcattggtcgatcttatttatcaccacaagcctgaaaatgcaatgtcctgaaaaaggtgacctctctgtgcacacgtaatttttaaaaaggagagggtaatatgaaggggactgaggcttgatcaccaaaaatcagcacaatgaaaacaaaccataatgaataatgacactagaattcaaattaccagatgtttcaaagagaagggggtgccagtttttattccgtttgaacaccactttcaaaagaacttttttaaaataaaaagggttgaggg

SEQ ID NO: 2135 - DNA, 653 bp, Homo sapiens
  misc_feature 490, 499, 558: n = A,T,C or G
acttaattcttctgctaggatattctttttcacttgtagttcacagatttcctttcttaatggattcactagctcatagaagcgaacagatacatattcaggaatagaaagctgatcttcaggaaaagcttttaatttaatatattgctcttctgtcaactcaaagtcacgcaggtttcgacgaacatctccagctttttctcttagctgaagatttgtctcttctagttgtttctgtctcaacaaaatggtttccatttcttgtttcattaattcttgatatttgctggcatctttctgttgaaaagccaattggttgctaatctcaatgttagtagctgcttctggtgaagtgcatcattaagtttctcctccaattcttcaatctttgtaagataatccactttcaaattgtcgatcatcatagttttctgggatagctcaatttttagtaactgaatattatgaagtagttcttttcgtcaattanctgcctggngattctgactttgccctctcgctcttctgatgaggaaatatcatccgtaggaactgtgnttctaaactaatatcttcagattccagagaactagagatggtcactttttttggactcctttgaaattttccgagacatttttattattatggat

SEQ ID NO: 2136 - DNA, 497 bp, Homo sapiens
  misc_feature 138, 222, 237, 254, 262, 280, 283, 299, 300, 309, 321, 329,362, 363, 367, 373, 381, 386, 394, 398, 416, 422, 428, 435,437, 441, 445, 448, 450, 459, 464, 466, 472, 476, 487: n = A,T,C or G
gtgggtcgcggcgaggtacgcggggagcacttccttctgagtgggcttctctgggagctctccagtggcactgctggacctgcccacgtttctgtaaaatcaggatacgtggctttagtaagtagaccaagcgcttcntggcagggaaagcagcgtgcggggaagtcactgaaaagtgctgcctaaggaagtttggaaatagtccccgttccagattgcctngaattttaaaacatnatgctttgggaaagtangtcagcancacctaagatcaaggatngcnttccatttttacactnnacagtcatnaaaactgaaaanactgtctncagcgtgaactaaagtcacaggcaaatcactgnnccanaaacanttcaaganctttntgaaacangtcnataagtctttttgaatgngtaccntgcccnggcgggncnctgnaaanagntnaattcctantcacngncgggcngtantattggattangacttggtac

SEQ ID NO: 2137 - DNA, 653 bp, Homo sapiens
  misc_feature 517, 568, 575, 579, 583, 586, 604, 608, 616, 621, 633, 638,641: n = A,T,C or G
acgcggggggcagaagaggaagatttctgaagagtgcagctgcctgaaccgagccctgccgaacagctgagaattgcactgcaaccatgagtgagaacaataagaattccttggagagcagcctacggcaactaaaatgccatttcacctggaacttgatggagggagaaaactccttggatgattttgaagacaaagtattttaccggactgagtttcagaatcgtgaattcaaagccacaatgtgcaacctactgcctatctaaagcacctcaaagggcaaaacgaggcagccctggaatgcttacgtaaagctgaagagttaatccagcaagagcatgctgaccaggcagaaatcagaagtctggtcacctggggaaactatgcctgggtctactatcacatgggcccgctctcagacgttcagatttatgtagacaaggtgaaacatgtctgtgagaagtttccagtccctatagaattgaaagtccagaacttgctgtgaaggaagggtggncacggttaaagtgtggggaaccaaaatgaaagaacgaaggtgtgctttganaaggctnttgnaaanaanccaaaaacccaaaattcncctntggactgncatancaagctaccgtntgganaantggccaccattt

SEQ ID NO: 2138 - DNA, 598 bp, Homo sapiens
  misc_feature 381, 413, 487, 549, 571, 572, 578, 591: n = A,T,C or G
actctagttctatgaggttcctcataattgtaaggcacatggaaaagcagatgaggtgctgactcaagaagtgaataccttggggcctctgaaccccaggcctgcctgactacctcaggggctgaaggatcaataccttcagtgttgatgagtgaaactgggatcttttttttttcttttagctttagaaaaaggcctttgacgggcggatcacgaggtcaagagattgggaccatcctagccaacatggtgaaaccccgtctctactaaaaatacaaaaattagctgggtgtgatggcacacgccttagtcccagctactcaggtggctgaggcaggagaatcgcttgaacctgggaggtggaggttgcagtgagctganatggcccactgcactgcacctgggcaacaganactccatctcaaaaataaataaaaaataaaaactcttcctcaagattttaagagcattctaaaattatgatcanaaaaagcaatcctacaactactggggccaaaacgtggattccaatgacctgccttgacccgnggttgccagaatttggcctgcnntatttnggaagctcacggnctaatcc

SEQ ID NO: 2139 - DNA, 654 bp, Homo sapiens
  misc_feature 463, 470, 527, 536, 547, 558, 567, 575, 597, 599, 606, 633,635, 644, 646, 648: n = A,T,C or G
acaggtggaacaatccaaagttttaatcaaagaaggtggtgttcagttgctgctcacaatagttgataccccaggatttggagatgcagtggataatagtaattgctggcagcctgttatcgactacattgatagtaaatttgaggactacctaaatgcagaatcacgagtgaacagacgtcagatgcctgataacagggtgcagtgttgtttatacttcattgctccttcaggacatggacttaaaccattggatattgagtttatgaagcgtttgcatgaaaaagtgaatatcatcccacttattgccaaagcagacacactcacaccagaggaatgccaacagtttaaaaaacagataatgaaagaaatccaagaacataaaattaaaatatacgaatttccagaaacagatgatgaagaagaaaataaacttgttaaaaagataaaggaccgtttcctnttgctgnggtaggtagtaatactatcattgaagttaatggcaaaagggtcagaggaaggcagtntcttggggngttgcttgaanttgaaatggtnaacatttgngattttcnaatcctaagaaaatatgttggntnagaacanacatgcaggacttggaagatgttcttntnatggccccntntnaaactc

SEQ ID NO: 2140 - DNA, 629 bp, Homo sapiens
  misc_feature 419, 526, 549, 551, 577, 593, 627: n = A,T,C or G
acactgaaacataaatccgcaagtcaccacacatacaacacccggcaggaaaaaacaaaaacagcaagtttacatgatccctgtaacagccatggtctcaaactcagatgcttcctccatctgccaagtgtgttctggatacagagcacatcgtggcttctggggtcacactcagcttaggctgtgggtccacagagcactcatctggctgggttatggtggtggtggctctactcaagaagcaaagcagttaccagcacattcaaacagtgtattgaacatcttttaaatatcaaagtgagaaacaagaaggcaacataataatgttatcagaaagatgttaggaagtaaggacagctgtgtaaagcttgaggctgaaaagtagcttgccagcttcatttctttggtttcttgggtangtgggcgccggaacagcaagatgtgaggttctggttcatggatcatataatggacccatccctgactttgctgacgccagattcctccattcagattcagacatcanatgggttttagggccagcttggntntgtcctttgggcagcatgacatgtcnatctcaaactcctcgncgtctatttgtccgaatagtaattttgttgtgcnac

SEQ ID NO: 2141 - DNA, 635 bp, Homo sapiens
  misc_feature 411, 483, 492, 511, 513, 537, 538, 559, 568, 578, 583, 588,604, 611, 629: n = A,T,C or G
gtcgcggcgaggtacttgccccttccccagaaaagcgggacttgctgctaagggtgaaggaccaaggcagttgtccctgcgtggtctgacacccttgaaacgtgggtgtataatcagagaggcatccctgcaatgattaaacaccaagggaaggctgccttcccagtctgtgaccagcgccggagttttgggtccacggataaaacgtgtctcttttgtctctaccagaaaatgaaaggaattgaaattaagagaagggagagattgaagtgtagtgccaagattgaaaggagaaagtggttaagggatagtgagggaagttggagaagagagtaaaaagaggctgcttaccagatttgaaattggtgagatgtttcttgggctcgtcggtctgaggacctgaggtcgtangtggatctttctcagggagcaaaagagcaggaggacggatgattgatctcccaagggaggtcccccgatccnagtcatggnaccaaatttcatgtgcgtncnatgtgaagagaccaccaaacaggnntttgtgtgagcaacatggttntttatttanctgggtgcangcggnctgantccaaaaaagagttantcccctngttcttgcccggctgacnttttaa

SEQ ID NO: 2142 - DNA, 652 bp, Homo sapiens
  misc_feature 410, 506, 583, 587, 599, 600, 635: n = A,T,C or G
acaagactcttgacagttgtgcttctctaggaggttgggtttttttaaaaaaagaattatctgtgaaccatacgtgattaataaagatttcctttaaggcagaggctggtcgagatgctgctgttatcttctgcctcagacagacagtataagtggtcttgtttctaagattcctaccaccagttactttgggccaagtatccacatccccttgcgtatgggaggtgggtgaagagtgttggatgcaaagtggttattatgggaagtagctcgatggtaaaaggacaaacacctatctatcttagagcttaagcctgtatgtgcttattcccaagggagatagaggtgtttaatcacaaggacagcatgagttagaggacactggcatcaacagctgccacagccgtgcncaccagggccagagcagcccactgacatctgctttggtcttgagatcaaatgcatcccattcttcatacattagaaggtcgacctccttgaagcanaccaagtatagcaagcctttaaaaggactactgagaaacagaatcagaaactcttagaactctagttagggcccttnaagnagggctgcagannctcccttggatacccagccctggggaaagcctgtntggtcttgtcaccccag

SEQ ID NO: 2143 - DNA, 670 bp, Homo sapiens
  misc_feature 462, 468, 473, 475, 476, 532, 545, 575, 592, 599, 622, 627,645, 646, 656, 659, 660, 661, 666, 667, 668: n = A,T,C or G
cggccgccgggcaggacgcggggggagatgatcagaaatcctttcactgtcaaattcagagaagaaacatgctgagaagaggcacttcctatgccaggcctacctgtgccttgaggaatacatgtaggagacactatttgaaaaggtcgccaccttgctggaacaaccaatgcagagataatgctgggccctctaatcagttgaacagtggcttcaaaaagataggtcaaagttataatctcctgcagctgtgcatgtgactttctttggaaataggatcttgcaggtatgatgaaggcctatcttccccaggcctgccaaagggatcctgcaaaaaagcaaatctgatcatatcccagctctcagacctctccactcgatgtccatcactccagggaggtgccttccaaggcctgaaggttgacagatcccccaggatccccagggccagcctactcttgnagcctnacctncnntgctcccttatgccaattctcagcaggtttctcccctgcttcattcctaaatgttnccctccagtgatnttatttgatcaccttcttgagcatgcgatngccttcctgtgactttnccaccantttccctgagtcaggaaatgttnttttngtttgacaacttggcaanntctggttagnttnnnattcnnnta

SEQ ID NO: 2144 - DNA, 532 bp, Homo sapiens
  misc_feature 236, 425, 431, 457, 460, 472, 473, 478, 482, 498, 524: n = A,T,C or G
acctagaagagaggcgggtcaaagaagtagtgaagaagcattctcagttcataggctatcccatcaccctttatttggagaaggaacgagagaaggaaattagtgatgatgaggcagaggaagagaaaggtgagaaagaagaggaagataaagatgatgaagaaaaacccaagatcgaagatgtgggttcagatgaggaggatgacagcggtaaggataagaagaagaaaactaanaagatcaaagagaaatacattgatcaggaagaactaaacaagaccaagcctatttggaccagaaaccctgatgacatcacccaagaggagtatggagaattctacaagagcctcactaatgactgggaagaccacttggcagtcaagcacttttctgtagaaggtcagttggaattcagggcattgctntttttnctcgcgggctccctttgcctttttgngancatgaagaaaanngaacncttnttctttttgtcccgcngtgtgttcatctttggccagctgtgnttgagttg

SEQ ID NO: 2145 - DNA, 244 bp, Homo sapiens
gtcgcggcgaggtaccgcttccttagaacttctacagaagccaagctccctggagccctgttggcagctctagctttgcagtcgtgtaattggcccaagtcattgtttttctcgcctcactttccaccaagtgtctagagtcatgtgagcctcgtgtcatctccggggtggccacaggctagatccccggtggttttgtgctcaaaataaaaagcctcagtgacccatgacaaaaaaaaaaaaa

SEQ ID NO: 2146 - DNA, 469 bp, Homo sapiens
  misc_feature 250, 299, 311, 314, 321, 327, 350, 354, 362, 372, 380, 392,402, 409, 412, 414, 422, 425, 428, 429, 430, 432, 436, 442,446, 447, 455: n = A,T,C or G
actacgacatttctgccaaaagtaactacaactttgaaaagcccttcctctggcttgctaggaagctcattggagaccctaacttggaatttgttgccatgcctgctctcgccccaccagaagctgtcatggacccagctttggcagcacagtatgagcacgacttagaggttgctcagacaactgctctcccggatgaggatgatgacctgtgagaatgaagctggagcccacgtcagaaagtctagtnttataggcagctgtcctgtgatgtcagcgggtgcagcagtgtgtgccanctcattattatntanctaagcnggaacntgtgcttcatctgtgggatgctngaangaaatgantgggctttcngaagtgantggtggcaggtntaaaaaattncttactngtncngaacatgnatnttnnncntganttggantgcnnacgatggnttgagtttatattt

SEQ ID NO: 2147 - DNA, 654 bp, Homo sapiens
  misc_feature 588, 606, 617, 641, 645, 651: n = A,T,C or G
acattttcataaaatatgaagggataactacaaactggagtaaaaatgatggtaattaaaaaaaatcctcagtatccctagcttgtctattaactgtgataatctgacttgagtcagattgaatatttggagtgcttccccagaataaccacttatttttgaagctatcatgtgaagtatttttttaaaacaaaacaaaaattatggtcattaaaaaactagagaattagccatattaaggatttttcttgactgcaaattacttctaaagaatcatcagtgtatagattagaagtgctcattacctgcaacttttaaaaaaaattcagttatagctgcttttgaagaggtttccatttttatttaaattactaatggatcaaagaacaattgtttattttttctctttggttttagatattaatgataaccttgttggaattttttttccaaagaaaatatttttataattaaataatttaatgtttttcttccttttcattacctactcttggcagtgttagggtatctgttacctttaaaatgataagctcctcaagatttttatgtatgtataaatatttgggngtgctacaaaagccttgnaaattatcagnagtagttttttttttttttttttnaaanaatganccg

SEQ ID NO: 2148 - DNA, 489 bp, Homo sapiens
  misc_feature 325, 331, 353, 367, 459, 463, 464, 469, 477: n = A,T,C or G
gtcgcggcgaggtactggcttttcaaaaaaacagaacaaaaaaaacccaaaaaaaagtctctcacacataagccaggtggacctgaaagagccaaggggcaggaacaatggctgtttcagcagctactcaatagcgaagggtcagcgtcccactcccatgccttggcaccgcatcagatgtcctggagcccttgataccatcctggaaggctttgtttgaggctccttaataaaagagggcaaggcgaagagaaagaagaccaggacagccagaagcaaggaccactggacgccttggctcaggtgcctgcatctccacaggcangacctnatggtggtgggtcgggttctanaggaaggttctgcntgtcctggggcctttgatgtaggcaagctgggagtctcaccgctcaggtttcctggccaggaagtgcacacccttttgtcttaacaatcccncgcnntcctncccgggcnggccgcttcgaa

SEQ ID NO: 2149 - DNA, 359 bp, Homo sapiens
  misc_feature 32, 35, 130, 133, 162, 192, 213, 217, 231, 235, 241, 243,244, 249, 263, 272, 277, 299, 307, 337, 350: n = A,T,C or G
actttttttttttttttttttttttttttttnccncaggggaaaataacttttattgagaccccaccaactgcaaaatctgttcctggcattaagctccttcttcctttgcaattcggtctttcttcagnggncccatgaatgctttcttctcctccatggnctggaagcggccatggccaaacttggaggnggggtcaatgaacttaaggtnaatnttttccaaagcccnccgnttcttntnnaccancaaggacttgcggngggtgagcncccgntttttggtttcccaccacacancctttcancatgacaaagtctttggtcccttcaccatnggggacaaagccncccagaggg

SEQ ID NO: 2150 - DNA, 631 bp, Homo sapiens
  misc_feature 522, 556, 563, 588, 599, 605, 611, 621: n = A,T,C or G
accaaaacatttatgaccttataattttatagtgcaagaaaaaggacaaagacaggaatacaaataaattataatctaaagagttacatataaaatgtccttgattatttgttaaaatctgctagaaaagtaacaggaatgttatcaagcctttctagacattttgaacacaatctgacaccgttgcatttcctggttgtatcctcagcttaacaggcactggagacagccagcttcttcaaatggtccatgaacacctgcaggctaacatcatcagttaggatgggtgctccagtttcctgtccccaagcatacaggttattgtgtgtctgagatgggttcactttggacaaaaggaatcgagcctgactgcctccatgctccgtgttgatgtaacgtggcatcgggaagcgtgcttgcagaatttcttgagcatcatccagtggtgcctgcagaaggtgcttgaagttttcatactcgggcattgtcctggtagccagctttacgccactgggctatggnctcaccaagataaatgacaatttgaaagaaagtntcctcancaaaattctgcagctagaatgctgntgctatccaanatcctnggccgngaccacgctnagggcgaatt

SEQ ID NO: 2151 - DNA, 464 bp, Homo sapiens
  misc_feature 363, 396, 397, 418, 419, 425, 432, 437, 454: n = A,T,C or G
acaatcaataagtcttaaatctctcttccatggatttcccccatctccccacttagcagtaaaaggcatttttaggtttatataaacacattctttacaactgccttcttaacagaaaattactgtagtatataaatagcactgagcatttagtaaataagttacaggccaataagttcaattgtgcagttgtgaaatctaatgtcaaagagtttttgaaaccttaagactgggtgatctgcaatgtttccaacatgtcttcgacagccttaagagaatatttggtttccttcttacttcgacctgcaaactgataagctctgtttatttgactagctgcccaactagcatatttcatgttgncctttttcgtttttgcacttgctgttggattannaagcaatatgacttggcgganntataanagtccanacaangctctcatatttctggngttcagtttc

SEQ ID NO: 2152 - DNA, 655 bp, Homo sapiens
  misc_feature 549, 624, 628: n = A,T,C or G
acgcggggactgtcaggtgacgcttccggcgcagaaaaatggcagccgccgctccggactcacgtgtgagtgaggaagaaaacctgaaaaagaccccaaagaagaagatgaaaatggtaactggagccgtagcgtcggtgctggaagacgaggccacagacacttctgatagtgaaggaagctgtggatcggaaaaggaccacttttattctgatgatgacgcaatagaagctgacagtgagggtgatgctgagccctgtgacaaagaaaatgaaaatgatggagaatcaagtgttgggactaatatgggctgggcagatgctatggctaaagtcctcaacaagaaaactcctaaaagtaaacctactattctggtcaaaaataagaagctggaaaaggaaaaagaaaagttaaagcaagaaagactagagaaaataaaacagcgtgataagaggctggagtgggaaatgatgtgcagagtaaagccagatgttgtccaagacaaagagacagagagaaatcttcagagaattgcacaaggggtgtggngcaattatttaatgctggtcagaaacatcaaaagaatgtttgatgaaaaggttaaggaagctggaagtttatganaaancgtgctaagttgatatcaactgtttcc

SEQ ID NO: 2153 - DNA, 654 bp, Homo sapiens
  misc_feature 462, 480, 495, 525, 540, 552, 575, 631: n = A,T,C or G
acgcggggggggctctgcgttctgtagtggcgctgcttgggcccgtggcggattgtaagctgctggttttgcggctgggaagagcggcgagagggttcggcatttttcgtcgggatccccgcaaggatgagtgctgccagagagtctcacccgcatggggtgaagcgttcagcctccccagacgacgatctgggatctagcaattgggaggcagcagacttgggtaatgaagagagaaaacaaaagttcttgagacttatgggtgcaggaaagaaagaacatactggtcgtcttgttataggagatcacaaatcaacatctcacttccgaaccggggaagaagacaagaaaattaatgaagaactggagtctcaatatcagcaaagtatggacagtaaattatcaggaagatatcggcgacattgtggacttgcttcagtgaggtagaagaccataatgganaaggtgatgtggctgganatgatgatgatgacnatgatgattcacctgatcctgaaagtccanatgattctgaaagcnattcaaagtcanaagaaagaagaatctgcttgaanaactccaaccttgcttaacaccctgatgaagtggaggatcccaaaaacaaaaaaanatgcaaaagcaattattaaaatg

SEQ ID NO: 2154 - DNA, 654 bp, Homo sapiens
  misc_feature 528: n = A,T,C or G
acaaaggaggttataatggacttaaccagtgtttgacaactactgacagcaagatatttcagtgtgataaatgtgtgaaagtctttcataaatttccaaatgtaaatagaaataagataagacatactggaaagaaacctttcaaatgtaaaaaccgtggcaaatcattttgcatgctttcacaattaactcaacataagaaaattcatactagagagtattcttacaaatgtgaagaatgtggtaaagcctttaactggtcctcaacccttactaaacataagataattcatactggagaaaaaccctacaaatgtgaagaatgtggcaaagcttttaaccggtcctcaaatcttactaaacataaaataattcatactggagagaaaccctacaaatgtgaagaatgtggcaaagcttttaaccggtcctcacccttactaaacataaaagaattcatacagaagagaaaccctacaaatgtgaagaatgtggcaaggcctttaaccagttctcgattcttaatanacataagagaattcatatggaagataaaccctccaaatgtgaagaatgtggcaaagccttaaagtttctcaattttaaaaaaacataaaataatccatactggggaaaaaccatacaaatgtgaaa

SEQ ID NO: 2155 - DNA, 668 bp, Homo sapiens
gtcgcggcgaggtacatttcattttctaccctatcaatttaaaaaataaatgtctgtgctctgtcatttccatctttacctgagtaatatgaaaatacctaaatttaagtggataacccaaaagggttatgactaatttttcctctcacagtttttaaaaatacatataattatcaaacataataggaaaatgggaaagaagaatgagtggaagagttcagtatctcaatcatgacttaattaaaaagtgacttctgtgacatcctttttacaagtttaccttacctatccctatcctcaaggagaaaagggtctccttaatataaactgctcttaagctatctgagcttgaaagataatttataaaaaatgaaatatggccttcactctttaatttctccacacctattcccacaaagccaaacttacaaacataagaaattaatatataagcatcagatggtatgaattctcaacaggtattacagcgtaattctccagtgacatattaccaaagctgtaatctatgtaaaatatcaagtgtctacaggtaatcataaatttaagcagcctgtagcaaaaattcagaacaccatttttatgaaaatatccatttttaacagcaaaaacctaattgcaaaaacagggttggttggcatggcaagtgc

SEQ ID NO: 2156 - DNA, 385 bp, Homo sapiens
  misc_feature 326, 331, 344, 353, 369, 376, 380: n = A,T,C or G
acgcgggggctgccgtcgccgccgccattttgatggcaggaagagtccggttctgggacagctggagacagtggtggtgactgaaataactttaccaaaggaaagctattttgcgaactatcttctccagcggagatggccaatgtgctttgtaacagagccagactggtttcctatctcccaggattttgctctttagttaaaagggttgcaatcccaaagccttttcgactgcaggatcatcaggttccggatgagtctcatgtggctgctgtcctccagatatatgctctcgaacagtgtggcctgatgaaactatgggaccntttgnacctcaaaatcanaagttccanattcctgggaacatanggttttnatgnctact

SEQ ID NO: 2157 - DNA, 322 bp, Homo sapiens
accttgaaaagacactgaaagcattttggggtgtgaagtaagggtgggcagaggaggtagaaaataattcaattgtcgcatcattcatggttctttaatactgatgctcagtgcattggccttagaatatcccagcctctcttctggtttggtgagtgctgtgtaaataagcatggtagaattgtttggagacatatatagtgatccttggtcactggtgtttcaaacattctggaaagtcacatcgatcaagaatattttttatttttaagaaagcataaccagcaataaaaatactatttttgagtcttaaaaaaaaaaa

SEQ ID NO: 2158 - DNA, 575 bp, Homo sapiens
  misc_feature 489, 512, 555, 567: n = A,T,C or G
acctgaactcagcagtgacatagacagcagcaatttcgatgacattgaagatgacaaaggagatgtagaaaccttcccaattcctaaagcttttgttggaaatcagctgcctttcatcggatttacctactatagagaaaatttattattaagtgactctccatcttgtagagaaactgattccatacaatcaaggaaaaatgaagaaagtcaagagattcagaaaaaactgtatacattagaagaacatcttagcaatgagatgcaagccaaagaggaactggaacagaagtgcaaatctgttaatactcgcctagaaaaaacagcaaaggagctagaagaggagattaccttacggaaaagtgtggaatcagcattaagacagttagaaagagaaaaggcgcttcttcagcacaaaaatgcagaattcagaggaaagctgatcatgaagcagacaaaaaacgaaatttggaaaatgatgttaacagnttaaaagatcaacttgaagattngaaaaaagaaatcaaacctttaaattccctgagaaaaggggantcacctccaganacaactgg

SEQ ID NO: 2159 - DNA, 224 bp, Homo sapiens
  misc_feature 42, 55, 101, 107, 124, 129, 144, 162, 174, 175, 187, 199,220: n = A,T,C or G
actttttttttttttttttttttggtacctgaataatcaggnctttattcaaaanaagctgtccaaaatgatttgacctttatggaataatcaaatttaanagtttntgcagcaggctttcttntcctntgtagtaggtttctnctctgcaggcttcttttnaggggctggttnnttggtagctgcntccttttttccnaccagaggcttcttttgcttnttaa

SEQ ID NO: 2160 - DNA, 463 bp, Homo sapiens
  misc_feature 240, 370, 379, 397, 422, 427, 430, 458: n = A,T,C or G
ggaagccggcgccgggcaggtactcttgatgaaagaccgtgaaaccaacaaatcaagaggatttgcttttgtcacctttgaaagcccagcagacgctaaggatgcagccagagacatgaatggaaagtcattagatggaaaagccatcaaggtggaacaagccaccaaaccatcatttgaaagtggtagacgtggaccgcctccacctccaagaagtagaggccctccaagaggtcttanaggtggaagaggaggaagtggaggaaccaggggacctccctcacggggaggacacatggatgacggtggatattccatgaattttacatgagttcttccaggggaccactcccataaaaagaggaccccnccaagaagngggggtcctcctcctaanaatctgcccttcaggaccagttccnattancantggaattgggaggaaacctctgttcacntggaa

SEQ ID NO: 2161 - DNA, 430 bp, Homo sapiens
  misc_feature 52, 58, 64, 88, 117, 130, 152, 154, 182, 250, 259, 279, 311,325, 329, 337, 338, 348, 357, 359, 363, 401, 412, 427, 429: n = A,T,C or G
actttttttttttttttttttttttttgacacacctgccctttattggtctnttctancaaagnggctccaggcccttcacgcctttnaaacaccacccatgagggtttaggaaggngccatcattctgngaaggcccaaagcttacccaantnttggagcccaagttgaatcaccaaccanagggttgggaaaggaaaaggaaacaggcagaggggaaaggcaaggctctgcattgaaggggactgatntcaagggantgctgaggtccaccagtgtntcctgaaggcatgctgcatcctaaggctcctnaggactggatggantagnaaatctgnntgtttaacanttcacattntntatnggcaactttaaggaggccttgatgtcaggctcaattgnttatggttggnaaggggcggctgtancna

SEQ ID NO: 2162 - DNA, 429 bp, Homo sapiens
  misc_feature 416: n = A,T,C or G
acataagctattcaagatttctccagcactgactgatacaaagcacaattgagatggcacttctagagacagcagcttcaaacccagaaaagggtaatgagatgagtttcacatggctaaatcagtggcaaaaacacagtcttctttctttctttctttcaaggaggcaggaaagcaattaagtggtcacctcaacataagggggacatgatccattctgtaagcagttgtgagggggtagagatgggacaaaattttggtctcagaggtcttaccatcttaatttggtaacttctaattgaaaaaaataaaaaatagaaataacattatccaaagatatcttaaagctgaaaacttgaacagcacattttttgtttttgttgttgtttggctaactcctcctggaatcacctttntggtttagctagt

SEQ ID NO: 2163 - DNA, 313 bp, Homo sapiens
  misc_feature 172, 234, 253, 279, 299, 300, 306: n = A,T,C or G
acagagaggtgggccttgaagccaataaatacaaagcttcctctgccttgtaacaaaggcaggttggcatagggccctggagcctgaatgcccatgcccactttgggatggggagcagctatcactcctctgctggcttcacttgcgtggcggcctctagctggcaaagtanctcatcccactgcacaaattgcttggagagaaacatttgtagtcttgttgtattcctccagnaagccttggactcctaagntgatttccacacactggtcttgctgntgaatgtggatctggccaanncgcttngatgcgg

SEQ ID NO: 2164 - DNA, 572 bp, Homo sapiens
  misc_feature 466, 485, 502, 509, 521, 532, 542: n = A,T,C or G
acatttttgttacagacagaaggctgattttggaaagaaagaaacaataggatgtatagtgctttctatcagcagactagtatgtttaaaaatagtctcatcaagggttctgaataagaaatataaatgttgccaggcagtcccaaactcacatttgatattaactgcagactcatttaaaactgaaaactgctccagcctctctcaatctttactaaggactgggagattatcaaaccctttcaagtctaataatgcttttgaattaagattattgaaaaaaggaatttctgttcagtgcaaagaacattttgatagaaattcatgtctacaaaggagttaaatacagatgtcccttcattacagatactattcttgctctaaaaaggtagaattatcaagacattgtaaataatatgggtcaaaaatatgtgtacagagttctacagggcaccttatataaagntcaatcctcaaagtatgtntttgacactctccaagngaggatnttacttttttgnaaaaacattanacacacagtngccttttattattccattaactattggagg

SEQ ID NO: 2165 - DNA, 598 bp, Homo sapiens
  misc_feature 282, 317, 384, 413, 432, 453, 465, 482, 484, 500, 507, 532,537, 549, 553, 558, 567, 573, 594: n = A,T,C or G
acgcgggggacggcggcagtgcgagaaagccgaagatggcggtccccgcggcgctgatcctacgggagagccccagcatgaagaaagcagtgtcactgataaatgcaatagatacaggaagatttccacggttgctcactcggattcttcaaaaacttcacctgaaggctgagagcagtttcagtgaagaagaggaagaaaaacttcaagcggcattttctctagagaaacaagatcttcacctagttcttgaaacaatatcatttattttagaacaggcantgtatcacaatgtgaagccagcagctttgcagcancaattagagaacattcatcttagacaagacaaaactgaagcatttgcaatacgtggtcttctatggntcaaagaaacagttgaaaagttccggcanaaaattctggctcctgtanctagaaccggttgattggcancttaccttcaantggctcactctgttcancnaaactaaaatctcctnaagctgngttacaactcgagtgaacaatgaanatttnaaagacctgganaaantcttngtggtattnaattcncaaggagttttttattttttntaca

SEQ ID NO: 2166 - DNA, 249 bp, Homo sapiens
  misc_feature 115, 127, 170, 183, 189, 226, 230, 239, 243, 244: n = A,T,C or G
acatcttgaccttcttggtctctgaagtattcagccacagtcagcccagtcagagctacccgggcacgagcaccaggtggttcattcatttgaccatataccagcgctacctaanaggtggcatctnataagttgataacaccagattcaatcatttcatggtataaatnattgccttcacgnggtccntttcaccaacaccagcataacacatagtaaccccttnggcntttggcaanattnntatat

SEQ ID NO: 2167 - DNA, 435 bp, Homo sapiens
  misc_feature 161, 234, 307, 323, 330, 336, 340, 349, 352, 398, 402, 409,415, 424, 428, 433: n = A,T,C or G
accagctgtgggatttcgtcttcggattcatttgttgctttaacttgggcttttcctctgccacgttttttcttcccatgctctggggtctgttccttctttgattcaggtttcttcactgtagtatcaccactttcaggtgccacatcatctttactaanaactgatgcagtcttcctagcctgctgcctcttcttcttcctctccttttgtttttcaaaatttctttctctncgttttctccttgcctcttttttcttcttattaagcaaaaagatcttttggtggcttcatcccaattgctganaaacgaggaaaaagantgggaangtgcancccnatttctcanttnttaaaaaaagggagtttcacgctcttcccacttctcttggcaaatntttntgaaaantctttnggggaaaancaanaatgntt

SEQ ID NO: 2168 - DNA, 485 bp, Homo sapiens
  misc_feature 53, 122, 128, 177, 186, 188, 296, 300, 311, 318, 324, 330,337, 342, 350, 358, 363, 381, 386, 395, 407, 413, 415, 419,421, 428, 433, 440, 458, 459, 462, 465, 473: n = A,T,C or G
acttttttttttttttttttttttttttttcggaaactttttatttatatttnggtcttacaaatgatcacttttaaatggacttttctgtaaaaatgtaaaactcaaaaatttgccaagtntgtatntgatccacacaaatccctaaaaaggttttctgtgtagtcttcattaacncaaatcttngngaatgtttcactcttactgtaggatcttgaatatgttttacaataatgaactcaaagtttttatgcagggcattaattgtaaactataaataacatttgtttaaaaanaaanctgggtaatanaaaaatnggaaanactctnaggagcnggcantctgttgnggctcaanatatnttatttgctttggagccngctgncatcctttnaaagagcacacnggacangnggcntnggaatcntctgnttgtaancttctaatttaaaaatcnngtngtngtaaaacnggaccattatca

SEQ ID NO: 2169 - DNA, 652 bp, Homo sapiens
  misc_feature 411, 418, 421, 434, 504, 528, 539, 556, 565, 572, 578, 586,591, 618, 627, 628, 647: n = A,T,C or G
actccatggcagacttcacagggccttgtccattggaaatagaacgcatcaaaatcgagagtcttctctacagaattgcctcatttttgcaactgaaaaattatgtgcaagctgatgaagattttagacatgtgctgggagaaggactggccaagggagaagatgcctttcgggcagtgctttgctgcatgcagctgaaagggaagctccaacctgtatccaccattcttgccaagtcactcacaggagagtccctgaatgggatggtaacaaaggatttgacaagactaaaaaacacttctctcagaaacagaggtaaggccatttcaagtggatccgtttggaagagtttgactcaatctgtctagtaagcattatgtattaaaatttggaaaaccattgtggcatcanccaaaangcnaggctgtgaaagnggggcattgggacttgccaacccttccttgtaccccataacccacattcccatcgtgggaatgctgcttntcccatgtctcctttgggggccanggcttatcttntgtccctattggacaanaacttggtnttttatnacctgnctctgganaccanatgggaaaaatgaattggaaaatttantttttaacnncttttggctactaaaaaangaaat

SEQ ID NO: 2170 - DNA, 411 bp, Homo sapiens
  misc_feature 161, 228, 257, 258, 262, 267, 269, 286, 292, 295, 304, 307,318, 319, 333, 343, 353, 364, 366, 382, 392, 395: n = A,T,C or G
accgtaagatgggagaaccggaccatgaactgtattgtcaacgtttttgccattgctattgttctttaactgactaaaaatgttgggctaaagccattaacttaagaatttgtcagtgtatcctttccaaaaagagtaatagttgtttactagtgtgctanatgaaaagcgtgcaatatgctttaaagcttcaacaaaaaactgaatattataagcaaagcattatcntagtaattggcagattagctcatattctnntcancatcntnaaataggaaaaatttantgctancanaaaataaanttnaaaaatatggnntgacttgaaaaatnccatcttatnttgacaccanctttttactantntttttgtacctgcccngggcgggcgntcnaaaggggcgaatttcc

SEQ ID NO: 2171 - DNA, 619 bp, Homo sapiens
  misc_feature 199, 361, 370, 419, 422, 435, 448, 472, 498, 512, 523, 530,548, 549, 550, 555, 565, 569, 577, 585, 588, 598, 608: n = A,T,C or G
actgtctcttttggaaaagttcttgatccccaatgcttcacaagcagagagcaaagtcttctatttgaaaatgaaaggagattactaccgttacttggctgaggttgccgctggtgatgacaagaaagggattgtcgatcagtcacaacaagcataccaagaagcttttgaaatcagcaaaaaggaaatacaaccaacncatcctatcagactgggtctggcccttaacttctctgtgttctattatgagattctgactccccagagaaagcctgctctctttgcaaagacagcttttgatgaagccattgctgaactttgatacattaagtgaaagagtcatacaaaagacagcacgctnttaatgcanttactgagagacaacttgacattgtggacatcggatacccaaggagacnaanctgaagcctgganaaggagggggaantttaaccggccttccacttttgtntgcctcattcttaaatttacacagtnacctttgtcatccntgcctgcccanaaatagntttttgtttcattatgannnggttntgtacctttntttnaaatttcntatttccnatntggtttttangttaatattnaggggagtaga

SEQ ID NO: 2172 - DNA, 329 bp, Homo sapiens
  misc_feature 27, 105, 182, 259, 286, 293, 303, 305, 309, 317: n = A,T,C or G
acttttttttttttttttttttttttnaacaaaagcaacaatttttattatcttgctttatatttaatggattagaactataaagattcttaactttgaaagcanaaatataagttggatagtagttgcagatctttaataccattttcaatttcatttatgagctgctcattataaatganatgctctaaaataataatcgcttttgttgttgttgttataaaacaatgaaaattcctgttcggaacacaagttgctntttatatttgcttgtcctcttaaatantattganaaaaagtaangnggancttgtggngaaagccccttc

SEQ ID NO: 2173 - DNA, 210 bp, Homo sapiens
  misc_feature 126, 140, 154, 161, 174, 181, 185, 186, 201, 204: n = A,T,C or G
acgagtctgaggcggagggagtaatggcaggacaagcgtttagaaagtttcttccactctttgaccgagtattggttgaaaggagtgctgctgaaactgtaaccaaaggaggcattatgcttccanaaaaaatctcaatngaaaagtattgcangcaacantagtcctctgttnggatcgnggtnntaaaggaaaggggtnganagattc

SEQ ID NO: 2174 - DNA, 612 bp, Homo sapiens
  misc_feature 431, 452, 495, 511, 522, 534, 545, 550, 551, 577, 579, 586,609: n = A,T,C or G
acagcttttagcaaaactgctttcccagaaaagcaaattaaaataatgcaatcagcagatcaaggagactacagctagacatcagagctacaacttctcatatctgtgtcagaaaatcctatttacccagaatagactaaaatttcaggacaaaacagggactttttaacatttcttactttacccattttaagttctttttatctcccccaccccccaagccactaattcagcaagatccaggagaaagagggctacttttagaattggctactttatttttctttctatggcaagactgcatggagcctggatatttcaggctcatatgcatccatgaccagtgtccactgtggcaaaaaacttagcaatggactttgtgaactcggcttccgctgtgcttgttctcccactgatgaaggcactcaagngttttgcatcaaacctttaanactggaggacagctgccaaattcatcaggatcccattctggangactttccttttgcanaatattccaanaattttttacantggaccatccncttgnnaatttttcaggcttatcatttttttncntttatcnacagcccgtacgggcctttctgnccg

SEQ ID NO: 2175 - DNA, 419 bp, Homo sapiens
  misc_feature 102, 177, 193, 203, 239, 248, 250, 262, 274, 277, 296, 297,303, 304, 309, 319, 324, 334, 348, 369, 370, 372, 417: n = A,T,C or G
acgcgggtgaagataagaagtttcttgacaaatacatgccccagttcatgaaacatcttcattatagaataattgatgtgagcactgttaaagaactgtgcngacgctggtatccagaagaatatgaatttgcaccaaaagaaggcttgcttctcataggggcacttgatgacattnattgaaagcatcaaangagctttcanttttaccgaaataacatcttcaagaaaaaaaattgntgataagangnaggaaaattatngaaaaatggggnaanatgaaaaaccggtgagttnntgccannttttnatggctgccncttcnatttgtattntggaggcaactttntgggtggtttttttttttctnncncctgatggctttggcaaagcacccttcgggttatccttgcatctnaa

SEQ ID NO: 2176 - DNA, 207 bp, Homo sapiens
  misc_feature 196: n = A,T,C or G
actgagaatgccgttcgggggcctttatggcgacgtaagaacgggcttggacttggtctgtgaatccagaatccagaggtgcaggtagcactatggatcagggttagcctcggggggccaaaaacacggcttcagtttctccccactctcacttagtgttaaagagtggcagaggtggggtgtggggagcttcccnaaagacctgct

SEQ ID NO: 2177 - DNA, 648 bp, Homo sapiens
  misc_feature 242, 298, 309, 313, 391, 426, 481, 528, 529, 544, 569, 573,583, 589, 592, 594, 599, 608, 617, 628, 644: n = A,T,C or G
actttttttttttttttttttttttttaaaagttaacgcatatttgtttttatttataggtaactaccacatgaattataaagacaacaaaggatgtcagaatgaacatggataggtgtatgcatactacggctaaggagaaacaatgttcctacatattatgggtagtgagaacattatctgtataacagggaactgtgattatttaaaaatatgcagaacttatttcatctgtgctttanaaataactgtttcagtgttataagttgaaaagaactcaaaatactaataccaaatntacaccttgtnttanaattcaaaaaagctgctttctgtgaagtcaatcagctttattaaaaaatgacacaaatccaaaacaagatgcatgttntatataaaggggacattgtaagttccttgctgcanttaaacccatggttaaatccatgaaattcccttttaattatcatttaaacagaanctgccaatagtctcaggatctcttaaaaacctttcccaaatccactnnttcactccccttttnaagaactaaacaggtattcgggtanctgnttcctctttncataanttngnttgtntaatttttncaagggttngggcaaaccgngcccattcttatttgngggg

SEQ ID NO: 2178 - DNA, 300 bp, Homo sapiens
  misc_feature 89, 171, 245, 255, 261, 271, 275, 283: n = A,T,C or G
gtacaaacagcacttttacctttgccataacctcaggatcaggatcttctataggatcagcccattcaacagttccaacattcccccanaccttgactttaccactcattaacctacgccttgcctgggcagctgttttgtgatcttcatattcaagaaagcaaaagcctntgttttttttcttgtcatccggtggtgggtataaaaatgacgtctggaaagaaccctctgttactttgctaaantctttaagantctgtnccttggtttnctcnttaggaantagaagcccacaaaaag

SEQ ID NO: 2179 - DNA, 290 bp, Homo sapiens
  misc_feature 19, 31, 36, 114, 148, 163, 180, 189, 197, 213, 214, 219,232, 235, 237, 244, 245, 251, 268, 273, 278: n = A,T,C or G
acttttttttttttttttntttgggtttggnatgcnctattttgccttaaaaatttatttactagtctcagtaatacattagtaaaaatcatgtcacttaattaattgtgttanaatcaaagaaacatagagttgggcaatatacttnatccctacccatccnacccaaatcttactctnctcatcttnattctcanttaattttgggaaaanntccanaaagatgtgttcnttnantaaaaannttaaanaaaataagctttttganccctnccaancccccatcccca

SEQ ID NO: 2180 - DNA, 454 bp, Homo sapiens
  misc_feature 47, 301, 334, 350, 353, 370, 375, 378, 392, 397, 401, 404,412, 422, 426, 429, 432, 445: n = A,T,C or G
acgcgggtgcatgcctgtaatcccagctactcaggacactgaggcangagaattgcctgaacccgggaggcagaggttgcggtgagctgagatggcaccactgcactcctgcctgggcaacagcatgagactccatctcaaaaaaaaaaaaaaaaaaaaatggagtttcaggatcgtggagaaatgatgaaccatatcatgtccgctgggtcaaaagcattgacatgaaatgacacccactgtgttatttcaatttctaaaatgccttagaaaaaagaccagaaagaaatctgccaggatntccacaagggttgcctttaatggtgagattatnggaaatactgttggtntanactttgccaaattgcangaaanctntgcaaatccttttngcacnattncanctcccagnaaaaaaaaanaatnaanccngaaaggaaaaagnaccgctctt

SEQ ID NO: 2181 - DNA, 507 bp, Homo sapiens
  misc_feature 198, 260, 295, 311, 315, 331, 343, 356, 364, 367, 374, 388,405, 409, 418, 427, 433, 441, 452, 455, 470, 475, 487, 495,497, 504: n = A,T,C or G
accccctttccatagaagggggaagccctctttcttgtctgccaacccgatcgcgaccacttgagtagagatcacttcggctgcttgagtaactgtctcgacttccaccatatccgtcacgtgagctgctgtaatcatcatagcgactgcttccaccataagatggcgggggccctcgtgtaggtggagcactacgtnagtaccataactcttatatgaatctctgtaggaacctccacttggatgaatctgaatagtcncgatcacgaccatatccatctttatccgctatatnctcttgaatggatagncatnaccgtgaactgggaantgaccattaatnacggtaaagtatnaatctcgnggngggtggngcataatcctctanttttacgaagaaccttngggnaattctttngattgaatngctgtntttataanaataacccatnatntctttggggacaaantaaanatttctaacaanaaggcaantnggttccnttc

SEQ ID NO: 2182 - DNA, 603 bp, Homo sapiens
  misc_feature 156, 167, 244, 252, 253, 309, 312, 333, 344, 350, 357, 366,373, 375, 399, 428, 437, 439, 446, 458, 463, 475, 491, 496,502, 505, 525, 526, 540, 541, 551, 552, 559, 568, 581, 601: n = A,T,C or G
acttcagttggtgcacaaaatactgtcatttgctcaaagctggttgccaaatgtttggtgatgaaggcagaaatgaatggctcaaaacttgggagaagagcaaaacctgaaggggccctccagacaatgatgggctttatgatcctgctgcgatgnagagccggctnttttaaggccaagcagtgcacggcccttcattgtgctggtgtgtgaacactgctggggtcagaagaacatacaaggnccctgganntaacctgctctgagcgagtgaaaacctctggatcatcattgaactaaaacacaaancangagaaaaaccttttgatagtnaaaagtttgcngactgnacttcanaaggagtcncaacccntnttaactggatccaaaatttatccngagtttttgtttaaaatatgttttcactnttgactggntnaaaatcntcccaaaaactnaaatnatgtggacattnctgatgtgggcttatnttttnaaaaanatnttaaaggggaatccttgttnnttctaaaaaaatgnncctgacattnnttggggnacacctggntcctggatcctgncaaacttttaatttattttntt

SEQ ID NO: 2183 - DNA, 654 bp, Homo sapiens
  misc_feature 161, 205, 259, 274, 409, 428, 431, 469, 471, 474, 503, 506,511, 512, 521, 524, 525, 532, 534, 552, 563, 566, 593, 594,607, 610, 612, 614, 617, 618, 623, 626, 633, 639, 648, 649,652: n = A,T,C or G
actggtccaggagttatccaggatagattttcacccaccatgggacgtcatcgttcaaatcaactcttcaatggccatgggggacacatcatgcctcccacacaatcgcagtttggagagatgggaggcaaagtttatgaaaaagccaggggctaagccanctctaccataaccagagtcaagggactcttatcccagctgcaangacagtccaaggatatgccacctcgggtttctaaaaaaggacagcttaatgcanatgaaattagcctgngcctgctcaatccgtcctaatgaataaaaatcaagtgccaaagcttcagccccagataactatgattccttctagtgcacaaccacccacgcacttaaacaccaccttttgggacagacacctcaacttggtctnaaacttatccaccacttantcnaggaaaacctggcaagacccagaaaaagcccccaccgncnaanggaaaaactccttaaactaactgaacttntgngactnnatttctaantannggaaatncnaatgaagcttgtaatggntgtaagaaaantgnaggctctaaaactttctttctgatatnntaaccaaggtatnatncngnccnngatanaanccataanataaanaaaaagcannttntt

SEQ ID NO: 2184 - DNA, 311 bp, Homo sapiens
  misc_feature 29, 54, 131, 193, 222, 229, 242, 246, 251, 261, 269, 282,291, 309: n = A,T,C or G
acagacatgagatgcttccagccagcctnatccaggctcatcgggattacttcngggctcacacctatgaactcttggccaaaccagggcagtttatccacaccaactggacagggccatggtggcaccgngttatcctcatcatacaaatgcctgatcatgctgctcctgtcaccctccacgatttccacanaaccaggacattccatgtgcctcatggcnctgccancctggccctttgncctnttttntgttcagttnttttaaancggttggtaaganacttcttgnagaaaacacacaattttntt

SEQ ID NO: 2185 - DNA, 454 bp, Homo sapiens
  misc_feature 255, 260, 280, 294, 295, 329, 338, 347, 392, 405, 419, 424,428, 433, 434, 447: n = A,T,C or G
acgcgggcacttgatttagaagaatgacaccaaacacatcgctgaaaaaattaagtcagctcagcacgagttgaaattgactacattaatttctttccacctagaatcaacaggatgtttatttctatgctgattctggagggagttaacctcctgcaaaaaaaggcatcttgtccctacatcttcttttctgacttttggcttcatcttaatagtaagttcaagaagtagttcatgaataaatttgaaaatatnatggncatttggaaaaaaatgattnatgtttgaacctgnncaccccaagtaagaaagtggatctgcctttccanctttttggntttcatttngggcctgggctttaccaaaaaccacaaacttatattaaaataccnttcattttgacanagtttttaatgagngattnattnccctnngtatttggtatgnttaagaa

SEQ ID NO: 2186 - DNA, 460 bp, Homo sapiens
  misc_feature 159, 175, 200, 222, 239, 247, 255, 258, 269, 289, 306, 319,334, 343, 347, 356, 379, 381, 386, 399, 401, 419, 429, 431,435, 442, 446, 450: n = A,T,C or G
acgcgggatggcaatgtggagaaggtgaaattcatgaaaagcaagccgggggccgccatggtggagatggctgatggctacgctgtagaccgggccattacccacctcaacaacaacttcatgtttgggcagaagctgaatgtctgtgtctccaaacanccaccattatgcctgntcagtcatacgggttggaagacggntcttgcagttcaaaaacttcantgaatcccggaacaatncggttctncaccccanagnatgcagccaanaaccgcatccagcaccccancaacgtgcttgcacttntttaacgcccctntggaagtgacccgangaaaacttntttnaaatctgcnatgagctgggaattaaaccgccntnttctntgaaaatattctnangccaaaattgagcgcaantccttttgantncttnaatgggnatcnaaanccaatgccct

SEQ ID NO: 2187 - DNA, 309 bp, Homo sapiens
  misc_feature 136, 166, 173, 177, 192, 195, 219, 229, 233, 235, 259, 265,270, 273, 279, 287, 288, 293, 294, 298, 307: n = A,T,C or G
acgcggggattttctcccggaacctctgctcagcctggtgaaccacacaggccagccgctctgacatgcagaaggtgaccctgggcctgcttgtgttcctggcaggcttttcctgtcctggacgccaatgacctanaagataaaaacagtcctttttactatgacnggcacancctncagtttggcaggctnatntgcgctggggttctgtgcgccatnggcatcattnttcntnatgattgctaaaatgcaaatgcantttttngccanaancttcgntaaccatnnagggnnaatngtaaatttnat

SEQ ID NO: 2188 - DNA, 384 bp, Homo sapiens
  misc_feature 68, 118, 160, 209, 219, 226, 228, 243, 260, 282, 294, 301,309, 318, 319, 327, 337, 338, 342, 345, 350, 359, 383: n = A,T,C or G
aataaagaacctctatcagtgagacttctcattttatagcaaatacattttgcagcttaaattttctngaattcatatacgcttctgtcatttaaacaaacttccagagaaaactggnctctatatatttaaattacaaatttggccaaatacatatttntccatatttagatctttaattataaatattaaatttgaaaaaatcaaangtgaaagcanaaactgntnttcaagtttttgganaaatatttatttttatnattaaagttttggttgaatatncctcaatagggnttctaanaaacaccnattatctgnntcttatgnaattgggganntttntgnaaagnatggtgaancggggtttaactttaactctgggnt

SEQ ID NO: 2189 - DNA, 351 bp, Homo sapiens
  misc_feature 131, 142, 160, 164, 174, 184, 203, 213, 219, 221, 231, 238,243, 255, 269, 276, 283, 285, 286, 291, 297, 298, 302, 308,314, 326, 329, 339, 348: n = A,T,C or G
acgcggggctcttcctgctctccatcatggcgcaggatcaaggtgaaaaggagaaccccatgcgggaacttcgcatccgcaaactctgtctcaacatctgtgttggggagagtggagacagactgacgccnagcagccaaangtgttggagcactcacanggcntacccctgtnttttcaaaanctagatacacttgtcaaantcttttggcnttccgnanaaatgaaaanattgctngccantgccaattcgangggccaagcaaaanaaaattnttggaanannggtcnaaaagnnctgnaatttnattaanaaaaaacaactnccntatttctggntaacttttnttt

SEQ ID NO: 2190 - DNA, 616 bp, Homo sapiens
  misc_feature 27, 187, 227, 287, 292, 301, 320, 339, 346, 347, 374, 393,397, 407, 426, 427, 443, 444, 450, 451, 460, 462, 481, 497,510, 511, 531, 532, 533, 536, 538, 547, 556, 558, 560, 579,584, 585, 587, 590, 596, 615: n = A,T,C or G
actttttttttttttttttttttttgngcttcttatgtttctctgtgctgtattctggaagtggtcggataccatcgtctgagctgggactattctgataaaatttctctgctatggaggagcctgactcactttcactgccaaattctggggggtatatgctggtgacttactatggctgggaaanccaccctcatgctttggagtggaaccactgatgagtgganaaccatagtttttaaaaaaaaccatttgaggcctaaacccttcttcactactttccccangtttnttgcaaagncactttggctttaatgctnggggacctcccatcatgcntactgannataattttgccacaccttttctccccnatttttttgacttttaagncctnttaaaaaaantcccctaactcccgggggnngaaaactttgttttgnntttatnnatttttttnanccttccctgaaaatcttcnccctgaaatttttatntttggaagaaaanngattgggttggaaaaatttnnnctnanccccatttnggccgtcantngntttttacccccaaggcccnttggnnanaancccatnccttaatttatttttaaana

SEQ ID NO: 2191 - DNA, 529 bp, Homo sapiens
  misc_feature 318, 338, 363, 396, 410, 434, 441, 444, 457, 471, 492, 504,514, 526: n = A,T,C or G
acctgcatcagcattagtaatcaacctgttaatccaaggtctttagaaaaacttgaaattattcctgcaagccaattttgtccacgtgttgagatcattgctacaatgaaaaagaaggggtgagaagagatgtctgaatccagaatcgaaggccatcaagaatttactgaaagcagttagcaaggaaaggtctaaaagatctccttaaaaccagaggggagcaaaatcgatgcagtgcttccaaggatggaccacacagaggctgcctctcccatcacttccctacatggagtatatgtcaagccataattgtcttantttgcagttcactaaaaggngaccaatgattggtcaccaaatcanctgctactactcctgtaggaaggttatgttcancatcctagctattnagtaataactctaccctgcccctnttaattnaanctctactggaggngctatggtcttaanggatggtctggaccctgcttnaatttttccctnacctttccanttttccagggtncct

SEQ ID NO: 2192 - DNA, 652 bp, Homo sapiens
  misc_feature 624: n = A,T,C or G
acccatgatttggacactttgtcgggcccatttacttatactgcaaagcgtccttcagatatcaaattcaagcctctaaataagaccaaggagtatacagcctgtgaactgatgaacatatacaagactgacaatcacctgaaacattatttacatatcattgaaaacaaacccctgtatccagttatctatgatagcaatggtgtcgtcctttcaatgcctcccatcatcaatggggatcattccagaataacagtaaatactagaaatatttttattgaatgcacgggaactgactttactaaggcaaaaatagttcttgatattattgtcaccatgttcagtgaatattgtgagaatcaatttacggtcgaagctgctgaagtggtttttcctaatggaaaatcacatacctttccagaattagcttaccgaaaggagatggtgagagctgacctaattaacaaaaaagttggaatcagagaaactccagaaaatcttgccaaacttctgaccaggatgtatttaaaatcagaagtcataggtgatgggaatcagattgagattgaaatccctccaaccagagctgcattatccatgcatgtgatattgtagaagatgcanctattggcttatggatataacaacattc

SEQ ID NO: 2193 - DNA, 481 bp, Homo sapiens
  misc_feature 115, 259, 427: n = A,T,C or G
actggatggccccacaagatgctgccactttaataaggctgcaatacactgtgtatcttacaggagtattcttatccatcccgtggaaaaggttgcttaacaactgcagtctcanagacgggcgttcaccttcgcgaaatttgaccagcttttcacataggctttcaatcaaagcttcttgcttgtctggttccaggatcaagagtagggataccacactgttcatcacactttcaacatctttatcatcctccttcanacacacatcacaggcttcaataatttgagctaaatcaacatgaagtccaccttccgagttctcttctgaaatctcagctcctttagatttcagataagcacgaagctcagcagcctgatcttcttcactgatgtcgatgaaggccgggacgctcatggtgcaggcccnggcacagcggacactccactcgcaagaccacgccgaccggaaaagggccccgcg

SEQ ID NO: 2194 - DNA, 600 bp, Homo sapiens
  misc_feature 590, 598: n = A,T,C or G
acagtttaaacaacagctgaaagaactaaagaagcaatgtggtcttcaagctgacagagaagctgacggaacagaaggagtggatgaagatataattgtgacccaaagtcagaccaacttcacctgccccattacaaaggaggaaatgaagaagccagtgaaaaataaagtgtgtggccacacctatgaagaggacgccattggtccaggcaaaagcggaagaaaaaggcctattgccctcaaattggctgtagccacacggatataagaaagtcagatcttatccaggatgaagcacttagaagggcaattgagaaccataacaagaaaggacatcgtcattccgagtaggaaaagccacctgcctgcagggacaccagcagcctacctcctaccccactgtctgttgagagcagtgctgaccccagcagttagggactggctgcatagcatacttgttgggggtaaaacttgttgcttttatgtgtgcttgaaaacatttttcaaagtttcacaacagaaaatgccattcatattgtttatttttaagtgttctataatgtaaaataaaacctttgatcttctgcaanaaaataantt

SEQ ID NO: 2195 - DNA, 650 bp, Homo sapiens
  misc_feature 44, 72, 74, 113, 207, 245, 295, 321, 411, 422, 457, 488,509, 540, 569, 591, 615, 621: n = A,T,C or G
actttttttttttttttttttttttttttttttaaaaacaagtntcacaatgtttattgatagatacaagtntntaaaatcagggcatgaacatggcttgataaattaagtanacttaatttcaatactataataggagggaccaattcaaattctcaccatttgtttcacacccacaaaaaccacttcaagggcattaacgatctntcaaaactgatcagttttgtgcaagtaaaccatgtttnttttaaaaagacttgtgcacttgcccaggctcaaggatattaaaatctancacataaagcccattactagaggtanaaatacaggcaatatactattacggcaacaaccatcaattacagttaaaaatttttctgtaacaaccaaatggataatcaaatattgcancaactcaagtnttactgagcaaagtgcatttctacagtattcaagngttgctattcaagttttctaacttaaaacancctatgataactggcacaaanaaggccttgcaataaactgcctctgcttganaacttatgatggaattattgctgctgctnatatactatctaaacattaaanatcctcctaaaatatttggatggnagactntgattaaactttccctacaaaaaaacctt

SEQ ID NO: 2196 - DNA, 469 bp, Homo sapiens
  misc_feature 178, 201, 213, 223, 227, 233, 235, 254, 265, 271, 280, 295,304, 317, 325, 328, 336, 348, 349, 364, 365, 367, 382, 385,395, 409, 411, 416, 422, 428, 443, 462: n = A,T,C or G
acgcggggtatttatatacttggttttaaattaggtcatatgttcacatggttcaaaattcacaaagaacaaaagagcatatagctaaaagtattcttaccttttagccacacagttttcttcactttgtgttgtcaatttcttgtcaaatctttccagggagattttataaatatanaagcaagtgagttgtaatatatncatgcatacacncacacacacncacncactcncncacactcacacacaccaantaaaaaacccnttaaanaaagacatnttatcctatcactanaagaaaatntcctacatgaaangaagacanggnaattaagngaaggaaaagannattataaacctaaanntnaccattttcaatttngcnggagtaagtntttaattatcattngntagcnttcgantataantggactaaactttcnatcaaaagaaacagactgnctgaata

SEQ ID NO: 2197 - DNA, 649 bp, Homo sapiens
  misc_feature 469, 603, 608, 613, 636: n = A,T,C or G
acgaagaaagcatttcccaagcaatgagtctcttaatggaaaaaataaaagagcaatgtaattaaactttccttcaaagaaaggaaagaaacctaaatctgttatggcaaatttggaaagataaatatttcctagtcccataatatgtgtttgttttacaagatatgcttgaatgatgcaaatctatgaagcagggatctgtggcaatccaaattcatccaccagaactccatccttgttttttgtatcagtgggaacaccttctggaattgcaggtgcagatgctgcctcatccaaataagaactgtcttcatcagccagaagctcatcacctagtgcatccaactctgcttctaaatcatcttcatccagttctggggtgccataactgcgactcagtgcttcttggatttcatttgcatcttccatcatatcctctagctggtcttgtaaatcctcaatctggtcngatcttcacttgcttgtatgccttcttcatttcctttactcccagtttcatagcatcaacccgtggtcttggtgtccttcaaagactggatggtataattgggcttgttccatgttgaatgactgtggggcaanattgncccgntgcttgctcatacttcctctttnctttaaaactcca

SEQ ID NO: 2198 - DNA, 344 bp, Homo sapiens
  misc_feature 108, 167, 200, 214, 220, 235, 255, 263, 269, 278, 291, 297,309, 317, 318, 330, 331, 341: n = A,T,C or G
actttagatacttggcatattctgggtctttccagtaaagcaagtatttaagataattaacaaaagctttgtctttgaagtaacctctttgggcaagaaaattaaggnaatttgggttggctaaacattgcacaaattccaactccaactgaaaccgaagtcgattnccagcatcatctgactccatagcaacagcatcnggccataacaaacnaagacnccaaatcgccgccancctgacagagcaaaacccanaaacgccngccccnagtttcaanataaacctgactnacttanaatgaaacatantaattaanntgttgcatgtcnnattactaaantat

SEQ ID NO: 2199 - DNA, 335 bp, Homo sapiens
  misc_feature 17, 135, 141, 160, 161, 168, 204, 219, 220, 225, 228, 229,239, 265, 278, 296, 302, 310, 313, 319, 321, 332: n = A,T,C or G
acaaactggtgggtcanatcgtctcctctaacatgacgctacactgtcgctgaggaacacatttaataacacttcagaactgaactgaaacgtggcacaaacatgacaacttccaggcatgccttcaagcatctncctcangagggattcgcaacccctnnacttcantgtggggaggattacaattctttggaagaataaatnagttcacactttagnnacttntannaaaaattgtnaggccaaaacataggtgggttcatanctcttaacttatncaggaacaaattttgatncttacntattaacnacnttaatncnttcaatgttgnaat

SEQ ID NO: 2200 - DNA, 264 bp, Homo sapiens
  misc_feature 197, 199, 227, 230, 235, 247, 260: n = A,T,C or G
acgcgggatcagacactggatcagacactaaacgaacttaactgtatataagcaaaacagaagagtcttgttccaacagaaactctggagctccgtgggtctttctcttctcttgtaagaagttccttttgttattgccatcttcgctttgctggaaatgtcaagcaaattatgaatacatgaccaaatattttgtntnggagaagctttgaccaccaataaatttnatnccttncctttttttttngaatggcaccagntttt

SEQ ID NO: 2201 - DNA, 375 bp, Homo sapiens
  misc_feature 163, 177, 198, 229, 245, 247, 287, 299, 302, 331, 334, 335,351, 364, 370: n = A,T,C or G
accccttaaccccttctccttcacccttagcagcaagtcccacttttctagggggcaagaaaccccaaaccccttccctccgtgtctttacgctctcttttctctgggtttgcttccttcactatgggcaaccttccatcctccattcctccttctcccttancctgtgtgctcaanaacttaaaacctcttcaactnacacctgacctaaaacctaaatgcctcattntcttctgcaacaccgntntggccccaatacaaacttgacaatggctctaaatggccanaaaatggcactntcnatttctccatcctacaaggacctaagtanttnnttgtcaaaaaaatggncaaatggactgangtgccnagatg

SEQ ID NO: 2202 - DNA, 651 bp, Homo sapiens
  misc_feature 36, 65, 147, 150, 166, 188, 192, 251, 294, 360, 367, 406,407, 450, 457, 502, 503, 527, 543, 554, 562, 575, 577, 590,596, 599, 607, 614, 616, 621, 629, 636, 641: n = A,T,C or G
acttttttttttttttttttttttttttttcttcanaactttcctcagcatcagatgatgatganccactttgtatttccttagtatttctctttgaacttaaatttcttctttccctcaattctattcttttcagtctcttatcanaanagttacaaccatcttntttcatggaatatttctcagtntcanatgatgaacaatcttgtctcttccttgaactctttccaagcaacttgcaccttttcttntctctaccatatgctccattcttactctttttatcctctgaanagtcacaactatctcccttccctgttgacttctcagcataatcagataattcatccttctttttanaagtttnatctcttatttttttacttttcttttctccatcagttgnnccattcttaatttgttttatgcccttaggaaaatgacaaattncttctcnctcaggtaacttttcagtgccatcagattgaaagattcatactgnnggttccattttaattacttttttnttaaagtctggaaggnttttttttttnttcagttncctttttggctcngntattatcatcttnaaaaanttnaatcgctntggactntnttaangaaatatntttgcanccccngtacctgccc

SEQ ID NO: 2203 - DNA, 225 bp, Homo sapiens
  misc_feature 136, 163, 176, 185, 205, 218: n = A,T,C or G
actccacagagagatgcagacaaagtaaacaatgaaggttgttttataaaggtgatgaccattatagagtcagaaatgggagtcgttgcaggaatttcctttggagttgcttgcttccaactgattggaatctttntcgcctactgcctctctcgtgccttancaaataacctgtntgaaaaagngtaacccaatgtatctgtgngcctattcctctntaccttt

SEQ ID NO: 2204 - DNA, 313 bp, Homo sapiens
  misc_feature 146, 209, 230, 232, 240, 242, 249, 261, 264, 266, 272, 274,291, 293, 298, 304: n = A,T,C or G
accttcatctttacttccaagtaaacccgtggatgatttgatgagggataaatgaacctatttcttttacacacataccaaggacatgcttgtggctaaagtgagttgataatgttgtgcaaaggatagttgtcaccaactcattnctttatggtccataatgaaataaaaattttgtatactgttaattctgtaaacagatgcatgtncaaaagatctatgatggtctngnaatcttantntaatatnttttagatattntanantttttncntcttgaggaacacattntntatangagaanaaaatactt

SEQ ID NO: 2205 - DNA, 652 bp, Homo sapiens
  misc_feature 525, 608, 609, 629, 645: n = A,T,C or G
acatagtgtcgcgaactcaaatcggcatttagatagatccagtggtttaaacggcacgtttttgcttataaaaaaagtgcaaaaaagatgtggtttacaagttaaagctacagaatccctttttgctgtaattgcaccagttttaaagcctccggacagagcagtatttcgtttaaaactttgtttttcttaaaagcttacagtgtttggctaattctcctcccctttttacaagacgggggccggagggtggacactggtggcaggttaagggatactgtcactttaagaagcctgcagattgaagtgtaaacatggagaaattaggggctgattttttaaactgtgtgagatattaaccagccgccctgttataaaatcaggaaatccaaacagcgatttacaccgattaacaccccctttatatattttttacaaaaatacactgagaaaataatcaaacgttttcatctctcttgtctttttttgttttttaaaagtgtcaaaagtctacatttaaatatnaaaaattaaaagtaaaactctagcccttcagtgaaggagacgtaaaatggcgtgagtaacaacaactccaaaaaaataaaaanngaaaaaaaaagaaaaggtcnttggccgcgaccaccnctagggg

SEQ ID NO: 2206 - DNA, 508 bp, Homo sapiens
  misc_feature 230, 245, 334, 353, 398, 424, 437, 459, 473, 491, 500, 502: n = A,T,C or G
acattctgggagaatatcactgacgctcaaaccatttttatttccaatatgtatttcaatacatgtttgtttccacttttcccagtgccacacacacacacacacaaaaacaaaacaaaacaaaaaaaaacagtcacaagttggattacattagaattggtgccacagttaactttttaaaagcattttaataaccacccaactcttagattttgcagtttagggacttnaagttcagaaccaanaagcagagaatcgtttcatgtgacatgatgtttctatagacctcttgctctctaggtgacaatgcagagccagggcaaaggtgtttaanctttgtcaccttccacagntttgtggccacattcatatttagataagctcggaccctgctcccntcttctggagatggggagaggcaagngtgtatgtgttgncatacttactgcattaattctnacttcgaaccgttncatcagcagaataaaccnaattgttcnantgcaaa

SEQ ID NO: 2207 - DNA, 239 bp, Homo sapiens
  misc_feature 61, 196, 198, 202, 216, 233, 238: n = A,T,C or G
acgcgggggtaacggagtggtgcaccaacgtgagaggaaacccgtgcgcggctgcgctttnctgtccccaagccgttctagacgcgggaaaaatgctttctgaaagcagctcctttttgaagggtgtgatgcttggaagcattttctgtgctttgatcactatgctaggacacattaagattggtcatggaaatanantgcnccaccatgagcatnatcacctacaagctccnaacant

SEQ ID NO: 2208 - DNA, 554 bp, Homo sapiens
  misc_feature 180, 266, 330, 335, 353, 404, 410, 416, 421, 430, 431, 442,447, 448, 454, 472, 475, 481, 487, 497, 525, 527, 541: n = A,T,C or G
actgtctcttttggaaaagttcttgatccccaatgcttcacaagcagagagcaaagtcttctatttgaaaatgaaaggagattactaccgttacttggctgaggttgccgctggtgatgacaagaaagggattgtcgatcagtcacaacaagcataccaagaagcttttgaaatcagcanaaaggaaatgcaaccaacacatcctatcagactgggtctggcccttaacttctctgtgttctattatgagattctgaactccccanagaaagcctgctctcttgcaaagacagcttttgatgaaagccattgcgaacttgatacattaantgaanagtcatacaaaagacagnaccgctaataatggcaattactgagagacaacttgacattgtggacatcgnatcccnaggganactanactgaagcnngttaaggaggnggaanntaaacnggccttccaacttttgantgnctaatnctaaantttaccacantaaaccattggtcattcatgctgcccananatagttttttgttncgatttatcgaca

SEQ ID NO: 2209 - DNA, 458 bp, Homo sapiens
acaaaggcatggggctgtccatgggcaccatgatctgtggctgggataagagaggccctgcctctactacgtggacagtgaagggaaccggatttcaggggccaccttctctgtaggttctggctctgtgtatgcatatggggtcatggatcggggctattcctatgacctggaagtggagcaggcctatgatctggcccgtcgagccatctaccaagccacctacagagatgcctactcaggaggtgcagtcaacctctaccacgtgcgggaggatggctggatccgagtctccagtgacaatgtggctgatctacatgagaagtatagtggccctaccccctgaaagagggtggatgcagctgctttgtttcttggggtgactgtcattggtaatacggacacagtgacccatcctccatcctatttatagtggaagggccttcaattgtatcaat

SEQ ID NO: 2210 - DNA, 582 bp, Homo sapiens
  misc_feature 362, 388, 442, 496, 522, 525, 529, 555, 556, 559, 560, 574,581: n = A,T,C or G
actacaagaaagaactttttatatgaaggattctttatgtagagtatcttttttgaaaaatcagattttcttatcctatattacactggttttaattgggcatgctcactttagtggtgtgcctcattacaatgtctcttttgtgttaagaattaacttacaaaagcatttaaaaatcactacatcaaatgggatagagagtaagaagacaggagagagaggagaaaccatgttttttgttttgagtcaagagggtctcactctgtcactcaagctgaagcacagtggcacgatctcggctcactgcaaccttagactcccaggctcaagcgatttctggctaatttttgtatttttagtanagatggggtttcgccatgttacccangctggtctcgaactcctgcctcggcctcccaaagtgctagggttcaggcatganccaccacgcccggccctgacacatatatttagtgccatcttttcctgcataaantgtataattattagggtaaccgtgtncanttcnctgtcttattcccagtgcttaacagnnggnnggcaaatagtttantgatcant

SEQ ID NO: 2211 - DNA, 618 bp, Homo sapiens
  misc_feature 470, 473, 488, 492, 507, 525, 549, 571, 577, 583, 592, 604,608, 609, 611, 615: n = A,T,C or G
acgcgggggactttaccccagtgtgcaccacagagcttggcagagctgcaaagctggcaccagaatttgccaagaggaatgttaagttgattgccctttcaatagacagtgttgaggaccatcttgcctggagcaaggatatcaatgcttacaattgtgaagagcccacagaaaagttaccttttcccatcatcgatgataggaatcgggagcttgccatcctgttgggcatgctggatccagcagagaaggatgaaaagggcatgcctgtgacagctcgtgtggtgtttgtttttggtcctgataaaaagctgaagctgtctatcctctacccactaccactggcaggaactttgatgaaattctcagggtagtcatcttctccagctgacagcaaaaaaaaaggttgccaccccaattgattggaaggatggggatagtgtgatggtccttccaccatccttgaaaanaanccaaaaacttttccnaaanggatcttcaccaaanagcttccattttggcaanaaattccctccgttcacacccaanccttaaattctttttggaaaancttggngctgtnaacccaaangatgtcactccnattnntntttnctt

SEQ ID NO: 2212 - DNA, 653 bp, Homo sapiens
  misc_feature 455, 515, 537, 559, 579, 598, 610, 616, 624, 630, 653: n = A,T,C or G
acaccgggtggcattaaggggtaaagatgtcccccttacggagcagaccgtgtctcaggtgctgcagtcagccaaagaacagatcaagtggtcactccttcggtgaagacctcactgttcctggctcttcatcctcttcaaaaaatttgcatgtctgctgtgaattttcatctagttccccaatcgatgctctcagggtcatctcggggatcacagggatccttaaatctccattctgtttgtggttgccccctcaacctcccctacacccttcctattctttttcattcttcttgcagttctgggagtaaagctcccagcatatttagataatagggcaggggaagcaccctctttctttctagactggattatgctcacatgctcccttgccctgacattttttgtaaattctgtgccctttgctgtagctacacttcagattaaagtagganaaagaatgtgctgaatgttttcctccttttgctctacctggccctcatccaacaacccancaagggggaaaaaagaaagaanaatttcttttctataaaacaantgggggccggggatgggtangggatttatccaatctaanccctaaccccantttagngacctcanggtttnctccattccttcttactgccccn

SEQ ID NO: 2213 - DNA, 653 bp, Homo sapiens
  misc_feature 520, 617: n = A,T,C or G
actctatgcattctatctatacagaaacacctatttattattacagttgatttatgcaggattaacatttttggtgttaaaattgttaaacatcatgcttactgcacatcaactctccataatgaatctgaacttcacaatgatttaccaaacactttacttaaattactaattaaataaatgaaaaatgcaccgagccaaacaaaacttaactgggctataaagaaaaaaacccttcaaaacagtccatatacacatctatttcaaaactacctttgttagctagcccctttcccaaagttttagcctgaaaaaacagtaaaatctacacaaaattttattgcaatcatacaagggttacattaggtcaacaaatactatgatgcaattttacatttattaaactacagttcaaagcacaaatttacacattctaaatacactaaaacgttatctaatgaagtcacactggtcttctaacatttgatatatctgggtgaaagacatgaactttacaaanactttaaacacaaatccttagtataaaaactgtgtcttgtttgtaaccgatttaatgggggacccaattaatgggcttccatctcccttaagtcatncattttggtgcatatttattttaaacgcttaagggg

SEQ ID NO: 2214 - DNA, 371 bp, Homo sapiens
  misc_feature 53, 55, 65, 77, 87, 118, 125, 142, 156, 167, 181, 191, 194,201, 211, 214, 216, 227, 243, 267, 273, 274, 283, 301, 317,320, 337, 348, 355, 358, 360: n = A,T,C or G
actttttttttttttttttttttttttttccactgctgccaccaccatgaaanantggccaccanatttttattgcntactcaggtnaataacttattatacaatgaacactcctccnttagganaccatgcccacttacanaatgcagccgtaantgcggtaaatntatttacagaggtnggggtgcaanatnaaagaantttcaccccnagnantttgaagtganaatgatctacaaattntcctgacaaggaccaaccgggctngtgctnntgaggtctnaaaaaattcctggcaaancgtagggggagattanatntcggaattgacagcaantttggggacantgcaaanaananaggggtgacct

SEQ ID NO: 2215 - DNA, 538 bp, Homo sapiens
  misc_feature 519, 524, 528, 532, 533, 534, 536: n = A,T,C or G
accctgggatagggagcgatctccgagcgaggcggcaagatggacgcgggatttttccgcggaacaagtgcagaacaggataatcggttcagcaacaaacagaagaaactactgaagcagctgaaatttgcagaatgcctagaaaaaaaggtggacatgagcaaagtaaatttggaggttataaagccttggataacaaaaagagtaacggaaatccttgggtttgaagatgatgttgtgattgagtttatattcaaccagctggaagtgaagaatccagactccaaaatgatgcaaatcaacctgactggatttttgaatggaaaaaatgctcgagaatttatgggagaactgtggcccctgctgctaagtgcacaagaaaacatcgcgggaatcccttctgctttcctagaactgaagaaagaagaaataaaacaaagacagattgaacaagaaaaactggcatctatgaaaaagcaagatgaagacaaagataaaagaagatttgggaaaaaatanaaatntatnaatnnntntt

SEQ ID NO: 2216 - DNA, 363 bp, Homo sapiens
  misc_feature 39, 64, 126, 157, 177, 194, 212, 216, 230, 232, 291, 301,306, 312, 352: n = A,T,C or G
actttttttttttttttttttttttttttttttccaaanaattgtaaaatttattgtataagtnttgcagcttttcaaaatgtcatcattgccactaatgattactgatacacaacaagcagtttnttcaggcctgtggattggcatccaaatacanagtcttacccagcggggacntgggtgccccccccgcntgccacggaaagcttacntaantttaacttgaacanancttgggaaatggggctgcaaaggaaagcatttcccacgccaggaaccaacgtgaaagcnttggaatcancacancagccntggaatcaggcaggcaggggaggacgggctgttccttctnagctctatagt

SEQ ID NO: 2217 - DNA, 594 bp, Homo sapiens
  misc_feature 490, 500, 550, 556: n = A,T,C or G
acgcggggcagggaagaatgacagccacagggagatggtggtgggcaagaatgagagtcccaggatccagatttagcctcagatcttccccattcaggaagggttttccatttaacaagagcactagtatgaaaacattagggacaaatctcccatgtctttgaaattcggattctcctcttgagatccccttcctcacctgccaatcaactttataaggccacaagtggtcactggttttccttccacaggtttgaggttctcagctttccttaagcgacccagcagctccgctgttttcagagtgaatatgttaagctttgatgagattctattttcagtaatttagtgcttctgggacacttggagaaagctgtgaaaagtcattgtctacgcaaagaacaacgaagctgatcctaaaagtgatccaatctaagaaaatggtaaaacgagctctggcccagcacaaaattttatgtgaggaactcanatttttgaanacttaacaattgcagaaaaaggttgcagcctgcacaccatagcccacctntctgancaactttggttttgtgtggtgacgtggcacatgtttgt

SEQ ID NO: 2218 - DNA, 463 bp, Homo sapiens
  misc_feature 383, 438, 451: n = A,T,C or G
acaacctgaattgaggcttctccttcactggagtgcacctgcctctacctcatgggtataaagtaggagaactaagagacttaagaggtcgtggttcctatatcgtccaaaaaataggctgttacatatcctaaagactgctcaacagcttcaagttgaaagtggccaaggacagccccttaggtttgggaagggacgagcctgaaggattctgtctttactggggtcaaatcttaaagcacacagctctggactcaagacaggaggtttgcgtcctgatggctttgccacacattcacaggataactgcatagatccctcgctgctgattcacttcttaccatgcactttcctttgatgctgaggagaaatggaagtgggcnaaaaatctcaaggctgcttcatgtggaccttgtcaagctgctcctccccagcgtnaaatttgtatcanggtgccaaaact

SEQ ID NO: 2219 - DNA, 651 bp, Homo sapiens
  misc_feature 569, 574, 597, 603, 608, 623, 648: n = A,T,C or G
actgtgaacatgactttcagatgctctttgccccttgctgtcatcagtgtggtgaattcatcattggccgagttatcaaagccatgaataacagctggcatccggagtgcttccgctgtgacctctgccaggaagttctggcagatatcgggtttgtcaagaatgctgggagacacctgtgtcgcccctgtcataatcgtgagaaagccagaggccttgggaaatacatctgccagaaatgccatgctatcatcgatgagcagcctctgatattcaagaacgacccctaccatccagaccatttcaactgcgccaactgcgggaaggagctgactgccgatgcacgggagctgaaaggggagctatactgcctcccatgccatgataaaatgggggtccccatctgtggtgcttgtcgacggcccatcgaagggcgcgtggtgaacgctatgggcaagcagtggcatgtggagcattttgtttgtgccaagtgtgagaaaccctttcttggacatcgccattatgaaaggaaaggcctgccgtattgtgaaactcactataaccagctnttggngatgtttgcttccctgcaatcgngtatanaaggngatgtggtctctgtnttataaaggcctggtgcgtgactgnttt

SEQ ID NO: 2220 - DNA, 397 bp, Homo sapiens
  misc_feature 392: n = A,T,C or G
acgcgggcgggtaactcccaggagagtgtcacagagcaggacagcaaggacagcacctacagcctcagcagcaccctgacgctgagcaaagcagactacgagaaacacaaagtctacgcctgcgaagtcacccatcagggcctgagctcgcccgtcacaaagagcttcaacaggggagagtgttagagggagaagtgcccccacctgctcctcagttccagcctgaccccctcccatcctttggcctctgaccctttttccacaggggacctacccctattgcggtcctccagctcatctttcacctcacccccctcctcctccttggctttaattatgctaatgttggaggagaatgaataaataaagtgaatctttgccctgtaaaaaanaaaaa

SEQ ID NO: 2221 - DNA, 654 bp, Homo sapiens
  misc_feature 167, 326, 340, 457, 522, 565, 585, 632, 637, 640, 650: n = A,T,C or G
acttttttttttttttttttttttttaagtcaatatagtttccatttttactgtgcatacacatatatacaatgtattttaaaaatgggctttacaatatgtagtttgatcacttggtttacaactaaatatattgtgaacattttgtcttctacaacagttaaaanaattgaatagcttggaggaaacacaatttattaagcaatcttgttggggacattgaggtataatttttttttctaaggaggcttcattctttttataatgcctttgggaaaaaaaggggatttcttgcttatatagctttctatagatgatggaaactngcccttccatttancctttttacttgcttctctaccaccacctaatcaccaatcaagtaacccattttgtttttcaacctctctcttctatttgcttcctctttcctacccagtctccctgccacacgcanatggacttccattccttcaacactctggttcctccccttaaagatgtttctttccttttaaaganactattttaattgattttgatcaactctactcaaaactgtttntaaggccacattaaaattantctccaataatctgaacatttaaattcaatcttttaaaaaaaacttnttaanaanaccttggtanaatt

SEQ ID NO: 2222 - DNA, 620 bp, Homo sapiens
  misc_feature 491, 500, 517, 530, 545, 547, 553, 558, 570, 599, 620: n = A,T,C or G
acagttttctcagaagactcaagatttcgcccacatccctttgagctcccgctagatctgccgcccggctgcatttgtcccactcttcaggacagagttagctgccctctttctttacttcatagtctttgtaagggctcggccaagcgtgggcccgtgggatggagaattccttttggggaggctggttctgcagctgaaaatgtgtggaatagggggcatagagcgtgtcccctgtctcttcaaaaccttgagtgatttcctcttgagagtaggctctgttctccacaccatagctcttcttcacgagttgaggtttacagaaagcatcctcaacaggataatccatggggtttcgttgctttgtgagcagccaaaactcgggactaacataagccaacaggaacacccaccattggcagccaaggcggagctgaggatggtgtcatcccacctgcggcaaagtcaggaacatgagcagggtgatccangccacccanatggcaatggaaaggancatcgtgaggtanatgtggccccatgtntnttccancccgngaaggaccacanaaggtgaaggaggacatgaggaagggcancgccttcaaaaaaaaggactn

SEQ ID NO: 2223 - DNA, 550 bp, Homo sapiens
  misc_feature 380, 438, 500, 513, 549: n = A,T,C or G
actgcctttgggcttcttctctctcctgttttctcctctcgaattcttgtttcttagcagcacgtttggcttgtatctgttcatattcttcttgtgctttttgatttgatgttttctttttatttttctttggaattgtaaaggagtttactgttttaatacattgttcttctggctgaggctggtcaaagctacactgatcttcaaataaaggctcgtcaatgctacactgttcttcaagcaacggctggtgaacttgttctgacaaaggatggtcgacttttcttgcttgcttcctatgtcttcctcttcagctaaatagagatgtttcagattatctgggtatcgatctgtgaattgagattccagtgacgtttganccttcttttccttccgtagcaatttcttgtaactttgctgtattttcaagttttcttngaaaagcaaagccttgtccctcgcgaacgctccccacgaaaggcttgcgggtggttaggccnccatgtcttctgnctcacattcttattcctgtacctcggccgaaccacnc

SEQ ID NO: 2224 - DNA, 651 bp, Homo sapiens
  misc_feature 519, 543, 544, 570, 572, 606, 629, 642: n = A,T,C or G
acctaatgaaaagatctccaagaggtttgtctcattctccttgggctgtaaaaaagattaatcctatatgtaatgatcattatcgaagtgtgtatcaaaagagactaatggatgaagctaagattttgaaaagccttcatcatccaaacattgttggttatcgtgcttttactgaagccaatgatggcagtctgtgtcttgctatggaatatggaggtgaaaagtctctaaatgacttaatagaagaacgatataaagccagccaagatccttttccagcagccataattttaaaagttgttttgaatatggcaagagggttaaagtatctgcaccaagaaaagaaactgcttcatggagacataaagtcttcaaatgttgtaattaaaggcgattttgaaacaattaaaatctgtgatgtaggagtctctctaccactggatgaaaatatgactgtgactgccctgaggcttgttcattggcacagagccatgggaacccaaagaagctgtggagganaatggtgttattactgacaaggcnnacatatttgcctttggccttactttngngggaaatgatgctttatcgatccccacattatcnttcaaatgatgatgatgatgaanataacctttgatnaaagtgttt

SEQ ID NO: 2225 - DNA, 454 bp, Homo sapiens
  misc_feature 25, 27, 117, 185, 188, 220, 247, 344, 442: n = A,T,C or G
acttttttttttttttttttttttngnattgagtttttattgatgattctatgtgtttttaacagagtgtgataggtgaattaaacatattaaaagagttctatagcatctgttcanaaaagattatatactatacaaactattcaagtcatacaaaaccatttttcattgtctttcaaactganaanaatcctattcagcacgcttctcctcctgaggnggttcatactgagcaagctttgctttnagttttttattttcttctacaatagcttcatacttctctttcatttcggccagttctaggcgaagcagctctatttctggattttctggagtagcanctcctaagtgatgctttaaaaaatccaaagcactgttaggtttctctggttcttcatataaggctaccaacaccttggtcagcgtgtccacacccccnacttctccaagt

SEQ ID NO: 2226 - DNA, 424 bp, Homo sapiens
  misc_feature 34, 300, 335, 420: n = A,T,C or G
acatcacaagtgataacttcagctttaccaccanaagcagcttcaatagaaacatcaatttttccatctgacttcttggtagcaccagtaacctttgtattcaatttaaatttaaacccctgtttttgaaggatgcgttgaaagtttttagatatctccatatcaattccaactccacctacatgacctaaaaattcaactgctgtcacatctgcaccaagtctttgccaaactgaacccaattctacacctattactcctgcaccaataacaaccatcttttctggaactttttttaanagataaagcacctgtagatgacactattgtatctncatctatcgtgattccaggaaaaggagtaacttctgaacccgtggctataaagaatgttctttgtatcaataacctgagtgccgncatc

SEQ ID NO: 2227 - DNA, 577 bp, Homo sapiens
  misc_feature 483, 484, 505, 515, 523, 547, 551, 567: n = A,T,C or G
acgcggggccatcaaccgccagatcaacctggagctctacgcctcctacgtttacctgtccatgtcttactactttgaccgcgatgatgtggctttgaagaactttgccaaatactttcttcaccaatctcatgaggagagggaacatgctgagaaactgatgaagctgcagaaccaacgaggtggccgaatcttccttcaggatatcaagaaaccagactgtgatgactgggagagcgggctgaatgcaatggagtgtgcattacatttggaaaaaaatgtgaatcagtcactactggaactgcacaaactggccactgacaaaaatgaccccatttgtgtgacttcattgagacacattacctgaatgagcaggtgaaagccatcaaagaattgggtgaccacgtgaccaacttgcgcaagatgggagcgcccgaatctggcttgcggaatatctctttgcaagcacaccctgggagacanngttatgaaaagctaaacctcnggctaatttnccatagcncgtggggtgacttacctggtcacnaaangcattgcatgcatgtnggggtttctt

SEQ ID NO: 2228 - DNA, 483 bp, Homo sapiens
  misc_feature 414, 419, 442, 448, 455, 478: n = A,T,C or G
actttgtttgctgatacaaggtgagccaaaggggtggtgaaaagaacacacaaaaaaggatctttgtctaacccagaaaggttgagaaatttgcactgatacttaagttctgaactccagagggctgctaatcagagctgggatcattttgcaagacagccttactttttccaaagtaatttatatttagttgttgataaccaaaaaaatgtcacaagagtaatacctactgtaaaagtgaggttagaagattccctgggtcttgtgacctaggttaaatgaagtatataactacaatagattttgtttttgttttgcttttggaagttctgtgcaaaagctaccattcacaggattaacgaatacctttacatatgctagttttttaagtgtctgtttgatttgcaaaattantttanctacataaatcctgtcccttaanccatanttcacanatgtaaaactgcagtttttatanattca

SEQ ID NO: 2229 - DNA, 652 bp, Homo sapiens
  misc_feature 320, 337, 349, 358, 372, 375, 396, 401, 444, 445, 451, 459,461, 464, 465, 469, 470, 485, 492, 495, 510, 516, 548, 552,559, 565, 570, 592, 601, 610, 614, 615, 617, 618, 625, 634,638, 651, 652: n = A,T,C or G
actcattaataatattaataggcgcttgaccccacaggctgtcaaaattcgagcagatattgaagtggcttgttatggttatgaaggcattgatgctgtaaaagaagccctaagagcaggtttgaattgttctacagaaaacatgcccattaagattaatctaatagctcctcctcggtatgtaatgactacgacaaccctggagagaacagaaggcctttctgtcctcagtcaagctatggctgttatcaaagagaagattgaggaaaagaggggtgtgttcaatgttcaaatggagcccaaagtggtcacagatacanatgagactgaacttgcnaggcatatgganaggctttgnaagagaaaatgccnaanttggatggaaatgatgatctnaaganatggaaccaaagctgaagatttactttgtggggaaacatatcnnattaangaacacanancanncttnntggctgtaatcctanactttanagntttccagtttttganaacttnaaagctgaatattattgattttctaagtattnaaangttctancagatnaaaanaatgaaatgccctcctaaattncaattgtgnacacatatncttnntnnatttttncttttttanggantgcctcttgtccnn

SEQ ID NO: 2230 - DNA, 590 bp, Homo sapiens
  misc_feature 451, 470, 475, 525, 530, 532, 538, 546, 553, 569, 572, 573,588: n = A,T,C or G
acagagataacagaggtaactaaaatacaatccttgttcttgaggggccaatctagtggggaaatacatttgtaaggagagatactccaatgaaatttggtgtctccagagaagaatgcacaacctgccatgagaaaccagaggaggaagcagctgatattctaataaaattaaagctggagacattttaaaagtagtatagctcagcttcctcttttacagatgagagaatccaggtccagataagtcatgtgacttattcaaggtcatggcacatttgtggcagagctgggtataaagctcagaactcgatttccagcttcttgttttgtcacacagaatatgcaacagggattgaaacaggaaggaataaagattttgcatcaaacaggacacaaagctggaatgagagtactgcatctagatgctggaagagagtcctggactgcanaaatccagggatggcctgntgcangcagaccttgtgtctgctctgtaattgggagcttgattccattcatgctntgacngncccctncccttcanaaagtangttttctgtccaaaanccnngtttagagggatttntg

SEQ ID NO: 2231 - DNA, 513 bp, Homo sapiens
  misc_feature 409, 456, 459, 469, 470, 471, 492, 512: n = A,T,C or G
actcctcaacagtcacaatccatcctagtatcttaaatagtgatttttttttaatttacaaaagaggtttattggacttacagttccacgtggctgggaaggcctcacaatcatggcggaaggtgaaagccacatctcacatggcagcagataagagaaaaaaaggtagtgatcttttagtaaagaaacctgagactggtagtgggcttggagccagaggatcgcttaagtccgggagttcgagatcagccaggataacaaattgagaccccccccaactttaaaattaaaaaacgaaagaaaaaatagctgggtgtggtggctcatacctgtaatcctagcactttgggaggccaaggcgggtggattgcctgactcaggagtttgagaccaacctgggcaacatggntgaaaccctgtctctactaaaacataaaaaaaatcaccagtgtggtngcntgcacctgtnnncccattacttgggaggctgangcacaaagaattgctttganc

SEQ ID NO: 2232 - DNA, 604 bp, Homo sapiens
  misc_feature 311, 330, 349, 353, 378, 391, 398, 426, 429, 450, 454, 457,466, 469, 470, 473, 521, 526, 530, 531, 537, 542, 554, 559,577, 583, 593, 595, 599: n = A,T,C or G
acgcgggggtttttaaaaggagagcctttctgatgccacttttctgcttgacaggccggacagtggctgtggattgggccgtggcaaaggataaatataaagatacacagtctgtttctgctataggtgaggaaaagagccatgaatctaaacatcaggaatcagttaaaaagaagggcagagaggaagaggatatggaagaggaagaaaacgatgatgatgacgatgatgatgatgaagaagatggggtttttgatgatgaagatgaagaggaagagaatatataatcaaaggtgaccaagcctgtgcanattcagaagaggtaagcanctcatcctgttctgagacngctnaggaagattcatgattgtctccaanaggaaaaattctnctttttntgcctgcatcattgcagaatagacatgnttnatgaaaattgaataggccctnttgncancccacctcnttnnttntgatctgtgccattgcataatcattcttaaaaccagcctctgcaaaantcttntatnnttctgnagganacattgacctanatgtnaaccttttttttgttgtngatatnaactggctcntntttntaact

SEQ ID NO: 2233 - DNA, 651 bp, Homo sapiens
  misc_feature 165, 254, 283, 284, 291, 302, 312, 326, 333, 342, 364, 373,390, 402, 407, 414, 420, 425, 428, 434, 437, 439, 445, 448,449, 461, 463, 473, 474, 500, 511, 514, 520, 521, 525, 528,530, 553, 556, 573, 580, 587, 590, 596, 604, 609, 614: n = A,T,C or G
  misc_feature 620, 623, 624, 626, 627, 630, 642: n = A,T,C or G
actaaatattgctgagagcatccaccccaggaaggactttaccttccaggagctccaaactggcaccacccccagtgctcacatggctgactttatcctccgtgttccatttggcacagcaagtggcagtgtctccaccacctatgatggtgatgcagcccctanaagtggctttcaccacctcatccatgagagctttggttccccgggcaaaagcttcccattcaaatacccccacaggaccattccacacnatctgcttagcccgagtgacatgcctcannatacttnttgctgctttnaggaccacantcaagcccatccanccagcangtttgccanaagccacagtggcttggcagtnttggcattntcatgaaactttgtcancagtggcaaaantcaanaggcaanggtatntcttnacncctttnttntnatcttnggnncattaggtattntnacaatttggnntccttttaatataacatgaaaagtgncaatctccatnttnttgaanntctnaangnaaggtaaaaaccttccacccacnatnattcatcacattgactnagcccancatattnttngataanctgggatnttgtntgaanttttanatnncnnatntagtcaagaaangtttatatg

SEQ ID NO: 2234 - DNA, 431 bp, Homo sapiens
  misc_feature 319, 351, 354, 359, 361, 363, 370, 371, 374, 377, 379, 381,390, 395, 410, 419, 420, 426, 428: n = A,T,C or G
acgagtcccactatgcgctgcccctgggccgcaagaagggagccaagctgactcctgaggaagaagagattttaaacaaaaaacgatctaaaaaaattcagaagaaatatgatgaaaggaaaaagaatgccaaaatcagcagtctcctggaggagcagttccagcagtgcaagcttcttgcgtgcatcgcttcaaggccgggacagtgtggccgagcagatggctatgtgctagagggcaaagagttggagttctatcttaggaaaatcaaggcccgcaaaggcaaataaatccttgttttgtcttcacccatgtaatnaaggtgtttattgttttgttccccccttttantanttttntntntaatttnnatnttngntntattatttnctttnagtaatatataaagntcatgtgtnntttctngnttt

SEQ ID NO: 2235 - DNA, 370 bp, Homo sapiens
  misc_feature 244, 256, 271, 279, 285, 295, 313, 317, 324, 326, 336, 344,349, 354, 358, 363: n = A,T,C or G
acctgcacgtctcatcgttttctgccgaagcaaacactctacgaaatcatcatattctatcttgcactctttctctgcccgagtataaccgattccatgcgcacattctatccattctttttcaaaagcatggcatcgaccagccatcttgtagggctgttcaccactctggattgtcaaccatcgatctatgttaaggccgaaccttttctggatgtccaagaaaggcatggccgatgctcantgcccttgactnttttttggccgccgnttcagaanagactngctagcgacngctggaccgtcttgccgnaaangccccgntntacctgcccngggcaggncgctntaaanggcnaattncaaacac

SEQ ID NO: 2236 - DNA, 559 bp, Homo sapiens
  misc_feature 486, 488, 510, 513, 527, 539, 541: n = A,T,C or G
acttataccccctaaatatataaaacatttttaaaagaaaaaaaggaagaaactattcatacatgcaacaacttggatggatttcaagggaattatgctgaatgaaaaaagatcagccttgtaagattacattctgtatgattccattcatacaacattcttgaaatgacaaaattacagagatggaggacagaacagtggtagccacaggttggggtgagggtataagaaagggatgtggctgcggctgtaaaagggcagtgcaagggatccatgtgacagaactgttctgtctcttgtgatggtggtcacatgaatctacacatgtgataatattgcatagaattaaatacacatacacgaaaaaagttcaagcagttgagcacaaatattttaattgtctaaaatgacattttctttaagagttatctacagttcaaagctcacttttatgaggtgtcacatccatcaccattttaagagatntnaaatcatgaaaagatatccccnaancttgtaaacatttnactaagggtaananaaagttaagggtgtttcc

SEQ ID NO: 2237 - DNA, 601 bp, Homo sapiens
  misc_feature 428, 567, 593: n = A,T,C or G
actaggacagtcagtaattaatgcatcattcagaggattatggctgttccttaagaagtgcaagttcaaacctgtcaacaccagaggtaatcattttatattaatttatacgtaataccatttaaaatctttatctgagtataacatatgaaaacagtctttccacaagcaaaaatgtggaaacatttaaaaaataaggagtcattttttaaagtaactgatcagattccacaggctactcttggacaggatcttgctggatagaatcccttcatttggtggctttttgcatgcacttaactggaccaattcttctgtgtgttgttctaagagctcaccaaaacatagatcatgccatataggtagtaaaaaaatgctagaagataaaaagctaatttgcaccatccttccttctgacaatatgctanaatatctgcattcatgatggttgtagggtcatagagtcctggccctcatcactggtctactcatatacctccaaatatgatatgccaagaggggcatattgagacccagtgtaagccactctgctgcacaaagaaaccntgacacagaaagaaagcgtggatgangtacctgc

SEQ ID NO: 2238 - DNA, 287 bp, Homo sapiens
  misc_feature 61, 64, 67, 73, 91, 97, 136, 151, 161, 163, 169, 202, 221,241, 244, 246, 259, 261: n = A,T,C or G
acttttttttttttttttttttttttttttttttaatccacacctgccctttattggtctnttntancaaagnggctccaggcccttcacncctttnaaacaccacccatgagggtttaggaaggtgccatcattntgtgaaggcccaaancttacccaantnttggancccaagttgaatcaccaaccaaagggttggganaggaaaaggaaacaggcanaggggaaaggcaaggctctnaantnaaggggactgatntnaagggaatgctgaggtccagcagtgt

SEQ ID NO: 2239 - DNA, 649 bp, Homo sapiens
  misc_feature 551, 595, 631, 643, 648: n = A,T,C or G
acctgctatttttggtaatgatcttcaggcagatttggccccatggagtttttgtcagtcatgagggtttgaaaggatggcgtatctttccagctgaaaaaatcctggcaaactacaagctgtccacaagaaagcaaagcaacatgtttgaaggggtatggagtgctaactctgtgccacttttgcaagcaattttgctcagtctgtcattgtattagccttaacaaaactccttgtaattatagacgtttttattcaaaataagatcttactattatacaggtttctctcttttgactatatacagaagtgcaaaaagtcaaccttctccctagacgttccaacatgctaaattgcagcataatcaaccctcaagagtttgcacacacgctataattttcattacgtaaactttgagtatttggattatcaacaaaaagtcccttgttctatttattgattatgcagcttatttataacaaggcctgatactcagggatttcaaaaaatatttaaacaatattttaacattttgaaatggatacagtaanaaaataaattttattctaatatctaggatctaaatcttcttatnattacctaattacaaacaaaataaattatcaaaatnttactcaattgnctgcng

SEQ ID NO: 2240 - DNA, 649 bp, Homo sapiens
  misc_feature 382, 496, 519, 536, 538, 540, 541, 598, 599, 605, 606, 610,612, 615, 643, 645: n = A,T,C or G
actttgaccctggaaaggtatgggtctgcttaaaagaaagaagaaacatacacgtaatcacaataaagcttaacattatgcagggcttataatcattttcagcaacggactgcaagctgcactgtgaagaaaatgcatagcagaggagaaagctggggatctgaggaaataggtaaggaaaacagtgtcaacacacagtggaagaagtgatgaagacatctattccggagctcacgtgccatgccctgctagccgttccttaacaagccacctgctccagaaggccacagcctgaccctcccaagtggaatataaatgcccaagtgccacatgaagccacctcctccactacctaaaaagctgtctgggaactgagctacanaacacacacactttctggtctaacaaacattaaagtgaaagaatttttcttatatatctattttttaatacaacttaaacgcaacttttatatgaatttgggcttctattcagnccctccctcaatttccttaggangaactcaatattggaancnannaaaaacaaagattctaacccaaaatgacttgccttttaaccttattatcatttttgnnggacannagtntnatnttttccattaccaaactttaaaaaaatntnttat

SEQ ID NO: 2241 - DNA, 649 bp, Homo sapiens
  misc_feature 511, 534, 540, 550, 563, 565, 573, 578, 594, 601, 611: n = A,T,C or G
acctcacccatatgctgaagatctttggggccgtagaagaggacagctccctgggattcccggtcggagggcctggaaccagcctcagtctcgaggctacagtcatgccctaccttcaggtgttatcagaattccgagaaggagtgcggaagattgcccgagagcaaaaagtccctgagattctgcagctcagcgatgccctgcgggacaacatcctgcctgagcttggggtgcggtttgaagaccacgaaggactgcccacagtggtgaaactggtagacagaaacaccttattaaaagagagagaagaaaagagacgggttgaagaggagaagaggaagaagaaagaggaggcggccggaggaaacaggaacaagaagcagcaaagctggccaagatgaagattcccccagtgagatgttcttgtcagaaaccgacaaatactccaagttttgattaaaatgtaagcatggtctgcccacacatgacatggagggcaaagagctcagcnaagggcaagccaagaagctgaanaagctnttcgaggctnaggagaactctananggaatatntgcanatggccaaaatggaancttccantgagggggcncaggactgacttttttaaacattggggactattgcctt

SEQ ID NO: 2242 - DNA, 238 bp, Homo sapiens
  misc_feature 146, 155, 159, 175, 177, 182, 227, 230: n = A,T,C or G
acgcggggggagtcgttgctgttgctgtttgtgagcctgtggcgcggcttctgtgggccggaaccttaaagatagccgcaatggctgaaaatggtgataatgaaaagatggctgccctggaggccaaaatctgtcatcaaattgantattatttnggcnacttcaatttgccacngnacaantttctaaaggaacagataaaactggatgaaggctgggtacctcgnccngctaccac

SEQ ID NO: 2243 - DNA, 649 bp, Homo sapiens
  misc_feature 26, 43, 281, 307, 335, 491, 506, 514, 549, 555, 565, 577,600, 625, 626, 629, 630, 631, 638: n = A,T,C or G
actttttttttttttttttttttttnggtttcgttgttttcanaggcttttgaaccttgatcctcactgttattctctttaggactgttacttccttgttcatcatcatcactgaaattcagttgctctgtataatctacttccatctgagcacctgcccaaccttcatcagcttcagcatctaggttatcaaatttatcaagctccttcagttctgatgcactaaaaatggatgggcgttcaggctcaaaggcccatgaaggaggtgggcctcttcctcnaaggcctttgtttgtttcaaataaanaaggtgggaatctcatgggaccatgtanaggaggatatgtcatcctcggatactgttggaacatataaggaggcatcatagctctatactgggaagcgagagcagcctgctgtccattcagtttagcctgtggaggaccacaagctatcctcttttccaccactttgaggatatcattttgctntgatgttccaactgngcttcatnctgccagggagctttttcatcttgatcaaatgacnaaaggngagccatcanccttaccacatntttccaacaagcaaacatttggnggacgtaactggtccaggtccatanntgnnntatttgnttccttttttt

SEQ ID NO: 2244 - DNA, 246 bp, Homo sapiens
  misc_feature 157, 176, 211, 227, 235: n = A,T,C or G
acacaaagagggggtgggtgtcggatgcagagtgtgtggcctgatgctccacggcgtgcaggacggggggctaatagtaggtttccttctccacccagctgccagggcgtcgcctgatgatgagttttctgacttcgtcatatacgaagatgagaanagagtaggggaaggcacanaaccaccaggtaggtttgaggggatacatcctaanacaacacccattccanggcagtangaaaggaaagc

SEQ ID NO: 2245 - DNA, 652 bp, Homo sapiens
  misc_feature 551, 607, 623: n = A,T,C or G
acgcggggaaacaatgaatcagaaaatttcagttctagttcaccattgactttaccagcagatttgaagaacatcttggagaaacagttttctaaatcttccagagctgcacaccaggattttgctaatataatgaaaatgctgagaagcttaattcaagatggctatatggccttattggagcagcgttgccgcagcgctgcacaggcctttacagagttgctgaacggtttagatcctcaaaaaataaagcaattgaacctggccatgattaactatgttttggtcgtctatggacttgccatttctctccttggaataggacagcctgaggaattatctgaagccgaaaaccagtttaagaggattattgaacactaccccagtgagggccttgattgcttggcctactgtggaattggaaaagtatatttgaaaaaaaacagatttctagaagctctcaatcactttgagaaagcaagaaccttgatttatcgtcttcctggagtgttaacttggcccacgagtaatgtgattattgaaaatctcancccaaaaaataaagatgctgttagaaaaatttgttgaagaatgcaagtccctccantgccagatgccatttnttgctatcaaaaagtgccatggattttct

SEQ ID NO: 2246 - DNA, 537 bp, Homo sapiens
  misc_feature 163, 368, 445, 457, 461, 532: n = A,T,C or G
actgggtccttcccaaagggagagagtctcctgctggctctgaagaagtgaactgccttgttgagagagggcctgtgaggggccatgtcacaagcatccaagggtcatgcctagaagccagagcagccctcagctgacagccagcaagaaaacgggccttcanacctatggttacaagaaactgaaagccactaacagccatgtgagctcggaagaggaccccaagcctggccaacctcttgttgcagtcttgtgagactctgaacagtggacttctccccagactcctgctccgtggaaactgtgagaagataaatgaatgttgtgttaaggtgccaagtttgtggtaattggttgtgcagcagtanataactaatgcactcacaaaagccttttttcctgcatcaaagctggatctctgatggcttgctccttacaagggaanatggagcaatancagngcagggggcattcaggctcaattggcccatgtttatcactgggcttgtggtcacatgtattaaattcctgnggagt

SEQ ID NO: 2247 - DNA, 609 bp, Homo sapiens
  misc_feature 465, 469, 489, 510, 532, 546, 558, 560, 562, 569, 584, 588,589, 592: n = A,T,C or G
acactgtatacatcttgtcatgatggtctttaccaatggcccaatgttcttgtcttccacagcacgcttcccctctaaaaatcggctcctatcatttccaaacatcatggactggtcctgcagatcacattcacctccctggtcacaaataggacagtccaatgggtgatttgctaataagaactccatcacaccttccctggcttttttggatttttctgagtttgttaggatattccaacccttcattactggcatggcacaagcagctacaaccttaggggctttctcaatttcaacaaggcacatcctgcagtttccagcaacagacaacctttcatgataacagaatcgagggatctgcatgccaaccttctcacaagcttggaggacggtcgttcccggttccaccatgacagactgaccatcaacaaatacttcaatcaagttgcttgcttgctgtgngcanttgttcgaacacatccttangaaacttagaaagacctactnaggccttcttacaggtatcctnaacatatttgcttntccccggaccangnangctgttntgctaaaactgttgnacannaanaccccttagaaggccgg

SEQ ID NO: 2248 - DNA, 650 bp, Homo sapiens
  misc_feature 611, 612: n = A,T,C or G
acttgatgataacggttttaaaatccttcactcgttctttctcaaatcttcccacttcttttcgaatcgttttagatatctgttcaaaatctctttccccttgttgcactttcgcctcccactctcttatttcatttttagcttgctgtattttatctggtttgttagcaaccatcatttttgcttcagcttcacgttttttgagcaaagtaatttgagcatcttcccatttctgccagcacttcattcgatggtcaaacacacctttcactgcagcaataagacgaatgtagtcactaagtagttctgaaaacatataaaagtcagcaaaagcttgttcttgatgtaactggtctatcttctcctcaacctctgcaagctgagacaaagctctagataaagcagtatgatcctcagaattacctaacatggcagcacttttagcaaaggcagctgtgttggctgaaagttcttttctatgacagaccaaggcttcaacactgacatgaagtttcctaagttgctgatccagattttcaaattgctgctgcttttcttcaaaccatgcatccgattcattcatcttggattgccattttgttgacagcgtnnggcagccttgttcaccatcctcaatatttctgctccac

SEQ ID NO: 2249 - DNA, 649 bp, Homo sapiens
  misc_feature 32, 34, 74, 115, 159, 163, 178, 185, 262, 317, 332, 446,459, 464, 466, 504, 510, 520, 563, 573, 596, 609, 615, 620,628, 647: n = A,T,C or G
acttttttttttttttttttttttttttggananacacttcttttatttaggaaggaggtctttcctactggcnccggctcctgccaaaggtcggggtgacagcaggatcaaaancactgctctcacacacagtgggagtggaggatggcttcccgcancctntttaaaaagcccagnagttctntttatttcaaaaaagggcatttctatacaaaacatcattccattacagtcgtcacttccaactacaggctcaggganacgactcttgatattcatgggtatatatttactttaatcatattttaaaaatcanctcttccacactaanatttacaataaaaataaaataatttgttctgtaaactatagtaaaaagtttcaaatgtcttaaaaactatcttccatacaatggaaaaaggcttttgtgttcttttgggcaaanaaaacccaaatcnctgananaaaacccgtgggccgtgttgctggaatgatgctggaancacttntttgctacanacggttgctaaaaaaacaaatcactttctccccttcaccctgnaagtccactnttttttgcttaaaaatctacctngggatcttccaanaagctnaaggntgctcttntgttgcctggccctggcanca

SEQ ID NO: 2250 - DNA, 615 bp, Homo sapiens
  misc_feature 30, 34, 45, 63, 81, 94, 152, 178, 215, 218, 222, 257, 261,354, 366, 441, 468, 472, 478, 479, 493, 500, 513, 528, 534,544, 557, 570, 573, 575, 576, 579, 583, 585, 588, 596, 601,605, 612: n = A,T,C or G
actttttttttttttttttttttttttttnacanaagggaggganatttaatgttgtccatanaaagacattaaatgtcanactgacaatttanttatggttacaaaccggaaaaccatgccatttggagtaatggaatttgaagttactanaaaacgacaacagatttttgatacanaatgacaaggcttatctataacacgtcaacgttttcnacnactntgaaatttataaatagctggggagttcaccgtttntttnttcaccttcactttctgagttttatccataaaatctttgcgtgtttgaattttctgagcaataacaaacaatttcttctctcgttcaatccgntgtgtcaggcanttatactgcttttgcctttctttaactattcgcttaagtccagtctgattggtaactcctttcactttttctttnttgcaaggtctctatcctgggcctatnaaanactttnncaactatctccggngctgttncaggtgaattgcnacatcaaaactgttnaacttnctttttgggngtaaaaaaaaaanacattgcttgttntgntnnttncccngnaantccaccanaaggncttngatttanctt

SEQ ID NO: 2251 - DNA, 473 bp, Homo sapiens
  misc_feature 298, 349: n = A,T,C or G
acaagatgtgttactatcgctttggacaggtttacacagaagccaagcgtcctccaggctttgaccgtgtccgaaatgctgagattgggaataaagactttgagcttgatgtcctggaggaagcatataccacataacattggctggtcaggatatacaaggtaaaggacctggataatcgaggcttgtcaaggacataaatgtcacgtccagctctgatatgcttcgcactgagcacatcacatttaggacgttgaagatttttttttttttttttttttaatatgcagtttgtaanaacaaaactggatggcatcaaaattgtctggaagttttgtcttgggcagtntgggctgggccaaatgaaatgatttttataattctaaacaggttccaaatgaaatgtcatgactttactttggtcaattaaaggggggaattttttctaaaaaaaaaaaaaaaaaaaaaaaaaa

SEQ ID NO: 2252 - DNA, 650 bp, Homo sapiens
  misc_feature 442, 483, 495, 498, 518, 526, 560, 563, 565, 573, 609, 632,640: n = A,T,C or G
acgcgggtgtggatctaaggggaatgctttattatggctgctgttgtccaacagaacgacctagtatttgaatttgctagtaacgtcatggaggatgaacgacagcttggtgatccagctatttttcctgccgtaattgtggaacatgttcctggtgctgatattctcaatagttatgccggtctagcctgtgtggaagagcccagtgacatgattactgagagttcactggatgttgctgaagaagaaatcatagacgatgatgatgatgacatcacccttacagttgaagcttcttgtcatgacggggatgaaacaattgaaactattgaggctgctgaggcactcctcaatatggattcccctgccctatgctggatgaaaaacgaataaataataatatatttaagttcacctgaagatgacatggttgttgccccantcacccatgtgtccgtcacattagatgggattcctgaagtnatggaaacacancangtgcaagaaaaattttgcanactcaccnggagcctcatcaccagaacacctagagggaaaanggnanaaaaactnaaccaccacgacagatccccttcactacgccaaatnttctgtgaagaagaaaaacaaanacggaaangggaaacaaa

SEQ ID NO: 2253 - DNA, 555 bp, Homo sapiens
  misc_feature 248, 432, 441, 444, 449, 451, 491, 493, 516, 539: n = A,T,C or G
actggtccaggagttatccaggatagattttcacccaccatgggacgtcatcgttcaaatcaactcttcaatggccatgggggacacatcatgcctcccacacaatcgcagtttggagagatgggaggcaagtttatgaaaagccagattagcctgaggcctgctcagtcgttcctaatgaataaaaatcaagtgccaaagcttcagccccagataactatgattcctcctagtgcacaaccaccacncactcaaacaccacctctgggacagacacctcagcttggtctcaaaactaatccaccacttatccaggaaaagcctgccaagaccagcaaaaagccaccaccgtcaaaggaagaactccttaaactaactgaaactgttgtgactgaatatctaaatagtggaaaatgcataatgaggctgtcnatggtgtanganaaatnanggctcctaaacactttcttcctgagatgttaaagcaaaantnatcttcctgtcactagattgaanccgatgaaaaataaagaaaaaancatgttctttcgatca

SEQ ID NO: 2254 - DNA, 616 bp, Homo sapiens
  misc_feature 467, 524, 575, 577, 593, 595, 610: n = A,T,C or G
acgcgggtattattcatccagcatatggggaccaacatgtgatggcctcgatcggattgttgagcgctgtgacctgcctgaaatgcatgtgggtgattggatgctctttgaaaacatgggcgcttacactgttgctgctgcctctacgttcaatggcttccagaggccgacgatctactatgtgatgtcagggcctgcgtggcaactcatgcagcaattccagaaccccgacttcccacccgaagtagaggaacaggatgccagcaccctgcctgtgtcttgtgcctgggagagtgggatgaaacgccacagagcagcctgtgcttcggctagtattaatgtgtaaatagcactctggtagctgttaactgcaagtttagcttgaattaagggatttggggggaccatgtaacttaattactgctagttttgaaatgtctttgtaagagtagggtcccatgatgcanccatatggaagactaggatatgggtcacacttatctgtgttcctatggaaactattngaatatttgttttatatggattttttattcactcttcaagaacgctcttananagtgccccttaactgntnaacaagcatttgtanctttgt

SEQ ID NO: 2255 - DNA, 262 bp, Homo sapiens
acgcggggccttttttcttttttccggcgttcaagatgtcgaagcgaggacgtggtgggtcctctggtgcgaaattccggatttccttgggtcttccggtaggagctgtaatcaattgtgctgacaacacaggagccaaaaacctgtatatcatctccgtgaaggggatcaagggacggctgaacagacttcccgctgctggtgtgggtgacatggtgatggccacagtcaagaaaggcaaaccagagctcagaaaaaaggt

SEQ ID NO: 2256 - DNA, 283 bp, Homo sapiens
  misc_feature 191, 199, 204, 207, 220, 223, 226, 229, 230, 233, 236, 239,241, 243, 244, 248, 250, 251, 254, 258, 261, 266, 269, 271,272, 276, 277, 281: n = A,T,C or G
accaagaggccagtgtgctctgtggacctcaaagttcacctgacttgcttcagaaagtttatttccaaaacttcccagatattttgacaattttcctaagatagccctgccagggtgagtatgagtgtgtgatcagatgggtaatacttgcctggcctggggcccttttctaactggtcaatgttgtttantgtgtgtncatgnatntgtgattatgtanatnaanaanntcnacnctntntnncttnanntangaantancttantantnnatanntgtntt

SEQ ID NO: 2257 - DNA, 520 bp, Homo sapiens
  misc_feature 205, 303, 312, 314, 315, 336, 365, 377, 401, 412, 416, 438,457, 460, 465, 468, 474, 479, 488, 490, 492, 511, 512, 517: n = A,T,C or G
acgcggggacctagtgtctgagcggcacagacgagatctcgatcgaaggcgagatggcggacgtgctagatcttcacgaggctgggggcgaagatttcgccatggatgaggatggggacgagagcattcacaaactgaaagaaaaagcgaagaaacggaagggtcgcggctttggctccgaagaggggtcccgagcgcggatgcntgaggattatgacagcgtggagcaggatggcgatgaacccggaccacaacgctctgttgaaggctggattctctttgtaactggagtccatgaggaanccaccgaanannacatacacgacaaattcgcanaatatggggaaattaaaaacattcatctnaaccttcgacangcgaacaggatatctgaaggggtntactctagttnaatntgaaacatacattgaaccccangctgctatggagggactcnatnggccntgnatttantgggncaccccatnancnttgacttggtgtttttttnngggtncac

SEQ ID NO: 2258 - DNA, 344 bp, Homo sapiens
  misc_feature 234, 284, 296, 301, 304, 307, 315, 334: n = A,T,C or G
acatgttgaaagctttaaataaggatccttggatacaaaatatggtccacatggctgaaaattaattctatgacacaatattattctaaagtcatccttattttgaaagcctaaagattttcttttatggctataaaaataccaccaagctagacattttaattctgttgagatatacaaatagaattaccacagcagcctacaccttctatgatttctaaacacttaaacatnaatggttttgggaagatgctgttgtccttcaaagttcattaaaagttcanatgccttttgtngaaanccnaanttttcttntccctgctaaattggcttntaaaaagtca

SEQ ID NO: 2259 - DNA, 651 bp, Homo sapiens
  misc_feature 144, 226, 241, 248, 296, 320, 331, 411, 522, 546, 577, 602,608, 629, 647: n = A,T,C or G
acgcgggctgaacgtgagaaattgacccagcagatgatcaagtatcagaaagaactgaatgaaatgcaggcacaaatagctgaagagagccagattcgaattgaactgcagatgacattggacagtaaagacagtgacattgancagctgcggtcacaactccaagccttgcatattggtctggatagttccagtataggcagtggaccaggggatgctgaggcanatgatgggtttccanaatcaanattagaaggatggctttcattgcctgtaccatttgaatttcacaggcntctttcactttagaaatagattanccacataatancaactgtagtgtagagtattaactacttaacaaaagaggattgagggtggaagtttaactgttatttcaatgtccattgnaattgaggataatggttatttgaaatttaacagaatttaataagaaaaagatttctttactcatgtgtatcactagcataactatgtaggtgggcataattttatgtggtngggatattcaaaaaatgttccgtntatagaatttttaaaaaaaatttaatacggnttggcgtggtggctcatgcctgtantcccancactttgggaggccgatcacnatccgggggtggatccanggtc

SEQ ID NO: 2260 - DNA, 475 bp, Homo sapiens
  misc_feature 74, 133, 166, 304, 311, 363, 368, 396, 403, 407, 409, 412,420, 421, 423, 431, 432, 435, 437, 443, 454, 467: n = A,T,C or G
actttttttttcttttttttttttttttttttaaaatttatcggttccgacttaaaaccatcaagtctggtcanaatcaactcagtctagctgatgcaaaatcatatgcattcaaaaagcagtctttaccganatgcctttacaaaccttggaatccagcaccttnttaaggcaaagtttcatggcagcagggaagtgaactaataattttcatttaccacatcttggtgtctttgaaaaaatactttatggcacaaacctgtttttgtctctccttatgctccacttccttcaagtagactanaatgctncaggcaatttctcatttatgccaccatgcagtctcaatccattttaacttgntctanatacctaaaattttccactactacacanacctcanacanantgnaatcttcnnancatgtgtnntcnanagcttntgtgctccacnacttccacctggncctgggtt

SEQ ID NO: 2261 - DNA, 415 bp, Homo sapiens
  misc_feature 375, 378, 383, 401: n = A,T,C or G
acagaaattaaaaatcaggaaaaaataagaaaaaaagcattacagtaagatattttgaattaagaaacaaggtgtaaactgtaggaaaatatacaaataaacacaactgaaataaacatggtataaagagaaactttccattaaaaagcacatctctatctggaaatacaaagtcttagacagaatgttaataaaaatctaaaaaataaaaagagagaaagggtaaacagatgtatacaccgtatctataattaaaattcagcaacatgctttagagtatgcaatatataaaaatggtcaggtgtggtggctcatgcctgtaatcccagcactatgggaggccaaggtgggtggatgacctgaggtcaggagttnganaccancctgatcaaaatggtganactccgtctctcta

SEQ ID NO: 2262 - DNA, 649 bp, Homo sapiens
  misc_feature 503, 513, 526, 554, 574, 599, 605, 610, 612, 614, 617, 620,621, 623, 624, 626, 629, 630, 632, 635, 636, 639, 645, 648: n = A,T,C or G
acgcggggggtgtgttacctgcccacagcataatgcgaggcaatgtccagccgttccacccggcatacaagcttatggagcagccccctttgaagatctccaggtggacttcacagagatgtcaaagtgtagaggtgatcgagtgtggatcaagaactggaacgtagcctctttgtgtccactgtggaaaggaccccagactgtcgttctgagccctcccaccgctgtgaaggtagaaggaatcccagcctggatccaccacagccatgtaaaacctgcagcgcgtgaaacctgggaggcaagaccaagcccagacaaccctttcagagtgaccctgaagaagacgacaagccctgctccagtcacacccggaagctgactggtccacgcacggccgaagcctgaggaagctcatcgtgagattcatttttcttaaatttttggacttatacaagtaaagggcttcaactgatcttactcaaactgggggactgttcccagtntattcatcangtcaccgaagtangacagcaaattaaaaacaatctttctgntctatagttattatgaatgnggtggaaacaataaaagaacttgtntgtttntgganananaantanntnnanttnntnttnnatnaatatnttnt

SEQ ID NO: 2263 - DNA, 515 bp, Homo sapiens
  misc_feature 185, 300, 358, 413, 417, 426, 449, 455, 483, 484, 492, 494,507: n = A,T,C or G
acatcctcccaagtctggaatacagaattgatggaggacacttaacttgcttaaaatgtatttgattattctgcatttatgataaaaaatatcatccagggattatattcaagagggtaaatttaggattacatgtttctagaacatataatatgtaacaccatccaaaaacaacaacaacatanagcactggaaccaaagaaccacttaaaatttagaataaattaggaaatttcaatctataagtgtcaaacaacaaatgagttataatatttttctaataagaaaaatatcacctgngaactatgagatactacatccttgatctggctggccaccattttgaagaccaccacanatctcaaggcatgatactactcaccaacaaaatctatccctgctattgcacctantgtnatctcaatntgtggctgacaccaaatgttctnacttantctgatagatgctcttattgcatttaanngggctagntntgttccctattancttgtagc

SEQ ID NO: 2264 - DNA, 501 bp, Homo sapiens
  misc_feature 456, 497: n = A,T,C or G
acaagatctaccccggacacgggaggcgctacgccaggaccgacgggaaggttttccagtttcttaatgcgaaatgcgagtcggctttcctttccaagaggaatcctcggcagataaactggactgtcctctacagaaggaagcacaaaaagggacagtcggaagaaattcaaaagaaaagaacccgccgagcagtcaaattccagagggccattactggtgcatctcttgctgatataatggccaagaggaatcagaaacctgaagttagaaaggctcaacgagaacaagctatcagggctgctaaggaagcaaaaaaggctaagcaagcatctaaaaagactgcaatggctgctgctaaggcacctacaaaggcagcacctaagcaaaagattgtgaagcctgtgaaagtttcagctccccgagttggtggaaaacgctaaactggcagattanatttttaaataaagattggattataactctaaaaaaaaaanaata

SEQ ID NO: 2265 - DNA, 447 bp, Homo sapiens
  misc_feature 45, 93, 97, 155, 187, 225, 233, 278, 279, 293, 313, 320,321, 329, 339, 342, 347, 355, 360, 364, 366, 367, 376, 391,395, 397, 404, 408, 410, 412, 419, 438, 439: n = A,T,C or G
acttggcttggagactggcgcggcgttcgtgtccgaggtcactantttcccggtagttcagctgcacatgaatagaacagcaatgagagccantcanaaggactttgaaaattcaatgaatcaagtgaaactcttgaaaaaggatccaggaaacnaagtgaagctaaaactctacgcgctatataancaggccactgaatgaccttgtaacatgcccaaaccagntgtatttnacttgatcaacaaggcaaatgggacgcatggaatgcccttggcannctgcccaaggaagntaccaggcaaaactttgtgnatttttnntacatatngagtcttatnttnaatcntataatantgacnctancnntgatatcanatattaaatgtattnggtnanctaaatntttnananatattcnaatttttattaatatcatnntatttata

SEQ ID NO: 2266 - DNA, 579 bp, Homo sapiens
  misc_feature 4, 10, 20, 33, 39, 48, 90, 101, 102, 105, 111, 171, 198,234, 266, 296, 322, 328, 392, 405, 421, 424, 426, 427, 431,433, 457, 459, 467, 480, 483, 486, 487, 491, 518, 519, 535,536, 538, 549, 550, 552, 557, 558, 577: n = A,T,C or G
cgcngggganacatcaccgncaacctgggcatngggganatggccganactgaccccaagaccgtgcaggacctcacctgggtggtgcanacactcctgcnncanatgcantataaatttcacaccatgtctgaccagatcattgggagaattgatgatatgagtatgtcncattgatgatctggaaaagaatatccncggacctcatgacacaggctggggtggaagaactgnaaagtgaaaacaagatacctgccacgcaaaanagttgaaggtttgctaataatttatactgnaatctggcatttttccaagccataanatatcnaatggctttttttgcagctaactactattgtgtaaacaggttttatattataaaagttgtgcantcttatcacctantatatagttgggtttngananngatntncccccagtttctttgaacatggtntnttcacatnttggaccttggtnatntgnncttntgcattattaaaaactaaaactttggnngttcttgcataacatnngncaattttttanngnatttnnggggaagcattttttttcntg

SEQ ID NO: 2267 - DNA, 652 bp, Homo sapiens
  misc_feature 645: n = A,T,C or G
actaaatattgctgagagcatccaccccaggaaggactttaccttccaggagctccaaactggcaccacccccagtgctcacatggctgactttatcctccgtgttccatttggcacagcaagtggcagtgtctccaccacctatgatggtgatgcagcccctagaagtggctttcaccacctcatccatgagagctttggttccccgggcaaaagcttcccattcaaatacccccacaggaccattccacacaatctgcttagcccgagtgacagcctcagcatacttcttgctgctttcaggaccacagtccaagcccatccagccagcaggtatgccagaagccacagtggcttggccagtcttggcattctcatcaaacttgtcagcagtgacaaagtcaacaggcaaggtaatcttcacaccattcttctcagctttggacattaggtctttgacaatcttggctccctcttcatcaaacagagaagtgccaatctccatgttgttgagcaccttaagggaaggtaaaaagccattccaccaccaataatcatcttatttgactttgtccagcatattattgatgagctggatcttgtcttgcaactttagcttccgcacaggatggccaggaagggtcnctctggg

SEQ ID NO: 2268 - DNA, 657 bp, Homo sapiens
  misc_feature 331, 436, 451, 453, 485, 500, 512, 516, 535, 560, 572, 576,587, 590, 600, 605, 615, 623, 648, 649, 653, 655: n = A,T,C or G
acatattacatactcacaaacgttctttgaaatgtcagactcctaaccgtatcccacaaagcccctgctcaatagggcccagcctgtctcttcaacctcctcagatgcctttcccttgtcaccacggaccagccacacttcctcaaatgtgccacgctcattcccacctcagggcctttgcctatgctctctccccttggagcattccttccccagttctctgaattggaggcagcttcttagctgttgggtgtcagctcaaacgccaacccctccatgtggaaataacctgtatcttgagctgagtgctggctacatggcatatgccaantggctttcaacagtggcgatttcgcctcccagaagatatatggcaatgtctggggacatttttgatggtcacaactgtgtggggaggaatgttactgacattttngtgggtagagaccantnttgctgcttaacatcctataatacacaagacngggccgagcgcgatnggctcacgcctngaantcccaacacttttggggangctgaggcgggcaaattacaaggtnatggaattctanaccnccctgccctanatngttgataccnctgtnttctaataanaaatacanaaattttgccatggcttggttgganncacntnat

SEQ ID NO: 2269 - DNA, 655 bp, Homo sapiens
  misc_feature 383, 450, 565, 601, 613, 643, 648, 650: n = A,T,C or G
acatgaattagaagcgtgcatctaggattatggccaaactgttttaaaaatgcagaaatgtaaaattacatcttgaaaatatgaagagatggtctacacacttcaaaaatcaaatgttgcttataccagagatgtatgacaatcacgggattcaagtgacaagcagtaagatctcaaaaattaatactggtcaaagataatgggaatattttttgcatttcactgaaaatacattgactactagaatacgaaatctagcaggaactcagggaaaaaaattcaaaatctaaagccaattacttaatatttcttattacctaaacaacagcatgacattaacagaaaactgcacctgcatttcaattgccaatctcacgttaatnaagttctccaaaaatgaaatgcaaccaaaacgggttcaaactccaaatgaaagtctgcaaggctcanattaaaacatggaatgtttcagatgaaagtaataaaaacactattggttttgttctttattggatggaataaaatgttgacatttcttttgaaacttgggaacctactaaatttnattttttccaaatggggtctcatttttttcttaagnggggcaagttgncttaagtagccttaggaagtcaattctctncaaantncctgc

SEQ ID NO: 2270 - DNA, 655 bp, Homo sapiens
  misc_feature 95, 98, 124, 135, 141, 153, 179, 198, 205, 245, 254, 279,299, 312, 320, 326, 328, 336, 363, 366, 371, 414, 421, 442,450, 454, 461, 462, 467, 475, 500, 525, 526, 562, 584, 596,609, 618, 620: n = A,T,C or G
actttttttttttttttttttttttttttttttttttttaagttaaaaaaagctgaatttatttaacttattggatatgtttatgtatactaggnagngacttaaatttcttttatttacttgngcttctgtttnggggcnctttgattgaanaaaaattcaattcacaggattacatnttgctaaagcattccttancattggnccaaacttgaattccctttttgcacatactgatctgcatnactgcatancttatgagggcctcctttaagtctnggttcttttgttctttgaancgttcaatatcancccatgcntttttnanaaattctntgccttccaaatttttaaactttagcnggngttcnccttcatttatttgttcttctagcacctttattctggcttctntctgctntggagtttcttgaccaaaaanctttggtngtcnttccctnnaaaanagaatgtntcacagtcccagttaccagttcctnacactgctgcttcttggatgctaanncctgacagccatctccaagttatactgcataagttnatgtttcctgcacacacccccnatgcttctggcnaaaaaaagatacncttttaacngnacctgcataaagttcttcatcttccaaaatttctc

SEQ ID NO: 2271 - DNA, 655 bp, Homo sapiens
  misc_feature 470, 576, 597, 624: n = A,T,C or G
actgttaaattattgctagccatatctttaaaaatggttttcaggaatatttctaccaaccatctttctgactaaaccaaggtcatgtcacggaggtgccagaaatcctgctgcatcatgaagggggtctatggcatttggcattagaagtatgagatttttgcaaattgtagtggaaaagaaacaaaattgcaaatatatggagccaggagtttgtctatagagaattctaccgaatcttacagcttgtatagaaaggatagaggttttccataaatttggcaagagattaaatgtttacatgaaattaccagtaataggttgtgaaactgaaaggaacatttctaatccataaacaatacaagacaaattttgaccaaccatactaaaggaaaggccaattttttttcctctttgtagacaaagttatgaaattattgtcaagtgaagaagcaatcaagagtgtgcanccaaaacatacaggcagacagggccccatggctcacagctgtaatcccagcactttgggaggccaaggtgggtggatcacctgaggtcaggagtttgagaccaccntggccaacatgacaaaacccntgtttctactaaaaataccaaaaattngcccgagtgtgttggtgggcatcttgaaatc

SEQ ID NO: 2272 - DNA, 605 bp, Homo sapiens
  misc_feature 80, 100, 109, 180, 182, 195, 208, 313, 335, 339, 449, 495,496, 498, 545, 547, 571, 578: n = A,T,C or G
acttttttttttttttttttttttttggctgtcctaaattgtttattaagtatgaattttacaaactttacttatattancggtaacggtggagctgganagtattgcnccttctccaagctgcccggcgagagccaccaatagtgtggtggaacttgtggccctttccaaggccacggntntttcggcctgcanatgtcagcccacncatctccctgtgcttgtggactggtttggtgatccactgggtgtcaggatttcttctgatagctttatggaatggatcaatgaggataacctcaaaaaatttgtntgtggaatcttcaccaacccantaanaattcaggactctcaaagccccacagtggcgtccagctcgctcctctgcaacggactgaaggcttcgagcaaactttagctggttaacaccatgatggacaggcttgccntaagttgcacccttaggaactgggcgttttcggccccacggcgaanncnaatcctatatataacgtaaccttgcttggccttgtacccattcggcncnctttataggccgggtggggcgggnaaccctntggaaacaaaaaacttggcgggacttt

SEQ ID NO: 2273 - DNA, 636 bp, Homo sapiens
  misc_feature 480, 555, 568, 576, 606, 620: n = A,T,C or G
accttgatacacataatcagccttttcaaaaatgcctgacaagaattagtctttcctttgtgctgaagtcttcccacccatggatggaagcaggctgactccctgagggtcagacaaggggtgggaaagggaacacattacttttgtgaaggcaaagcagaaaggtgtgtttgccagaccagcatgggcagctcagagggagcaaagcatccaccagaagaggctctccattttctttgtagggcctgacagttgagatttgaggcttagttaacaatgggaccactgaacttctttccaatggaaaactcacggcccagtcccacaggaactgtgcgcataccaaacaacaatgaggaaggaagggccgggtggctctaccaaacagttcaggtccactgggtgaatgaagcctggtgggaaagcggactcctgaagttggcgccctctgctggtcccacttctcatcgtggcgggtcnctgcctgagtagaggaagagctacagatggggttgacaaaaaagggagtgaggggaaccccaggaagatgaaccnaactccaaaactnttttctgntaatcattttttgatcaaaaattcaaaatnaaggaaccccaaanttccttgcccggcggc

SEQ ID NO: 2274 - DNA, 617 bp, Homo sapiens
acacagcagccagttttcatcggtgatcatgcacagcaatgccattgctgccatgaccagcagcaaccacagagccttttcagacccagctgtcagtcagtccctgaaagatgacagtaagcccgagccagataaagtgggtaggtttgcaagcagacccaaaagcattaaggagaaaaagaaaactacatcacataccaggggagaaataccggaggagtcaaactatgttgctgatcctggaggatcactgagcaaaaccacaaatattgctgaagaaccagcaaaattgaaacctacattgcaaaacctgctctgccgggaacctccacaaatagtaatgttgcacccctttgccaaataacagtgaaaattggaaacgaagccattgtgaaaaggcacattctaggatctaaattgttttataaaagagggagaagacccaagtatcagatgcaggaggagcctttgccacaggggaatgacccagaacccagtggagacagcccactcgggctttgccaatccgagtgcatggagatgagtgaagtgttcgatgacgcaagtgaccaggattccctgacaaaccgtggcgcccttactacaactacaacccc

SEQ ID NO: 2275 - DNA, 656 bp, Homo sapiens
  misc_feature 40, 280, 312, 504, 523, 555, 581, 588, 598, 613, 619, 649,656: n = A,T,C or G
acttttttttttttttttttttttgggatttttagtaaanacatggtttcgccatgttggctgggctggtctcgaactcctgacctcaagtgatctgtcctggcctcccaaagtgttgggattacaggcgaaagccaacgctcccggccagggaacaactttagaatgaaggaaatatgcaaaagaacatcacatcaaggatcaattaattaccatctattaattactatatgtgggtaattatgactatttcccaagcattctacgttgactgcttganaagatgtttgtcctgcatggtggagagtgganaagggccaggattcttaggttgatctatctgtgggttatgacttccacaatagccacccccggcccccaccagtccttttattggctctggatggaaaatccctacccatgtgatggccctggtctctcctatagtttgaccaacagttgacccaaaaggttatggtcttcagcgttttaattatatccacnctagatactggggtctgtntcttcaaagtgtggggctgcctattcttccangaaccaaaatggccccccgtcttaanaaaagtntgcttactangaaataccctgcctnccttangaaataaatgctacttaaggaaaaaattanaaacctn

SEQ ID NO: 2276 - DNA, 491 bp, Homo sapiens
  misc_feature 481, 482, 485, 491: n = A,T,C or G
acaagatctaccccggacacgggaggcgctacgccaggaccgacgggaaggttttccagtttcttaatgcgaaatgcgagtcggctttcctttccaagaggaatcctcggcagataaactggactgtcctctacagaaggaagcacaaaaagggacagtcggaagaaattcaaaagaaaagaacccgccgagcagtcaaattccagagggccattactggtgcatctcttgctgatataatggccaagaggaatcagaaacctgaagttagaaaggctcaacgagaacaagctatcagggctgctaaggaagcaaaaaaggctaagcaagcatctaaaaagactgcaatggctgctgctaaggcacctacaaaggcagcacctaagcaaaagattgtgaagcctgtgaaagtttcagctccccgagttggtggaaaacgctaaactggcagattagatttttaaataaagattggattgtnnaanaaaaan

SEQ ID NO: 2277 - DNA, 474 bp, Homo sapiens
  misc_feature 15, 28, 34, 52, 86, 97, 113, 136, 155, 162, 170, 172, 184,219, 237, 240, 291, 304, 317, 322, 435, 465, 471: n = A,T,C or G
acttttttttttttnttttttttttttnggcttngaaattactttaatttanaaatagaaaacatcttgaaaggaaaaaaaaaaancccacaaaacntacaggcaaatttgtnttctgtgagtttctcacaccctnacacttgttcaccaatctntaaaatnaaaaactntnttccaaaatgtnttcagccaccaacaatgatgttattaataggaatntggatcaatttcacaaanaanccaatgaatcccattatagcaaatcctattgctgttgccatggcaatcttntggaattcttttntatcaggtttagngcatnttttaaccagccgaatggagtcctttacaaactgccgacttggctcaacaaactgcattacctgatccatgactgcctacccaaccgacacctaaaatgccagggacacgtancactggagcttgttgatggaggcccaccgnaccccntgt

SEQ ID NO: 2278 - DNA, 657 bp, Homo sapiens
  misc_feature 552, 558, 587, 614, 635, 639, 648, 653: n = A,T,C or G
acgcgggggcctcggcgatgtcgtgggttcaagcagcctccttgatccagggccctggagacaaaggggacgtgtttgacgaagaagcagacgagtcgctcctggcgcagcgggaatggcagagtaacatgcaaagacgagtcaaagaaggttatagagatggaatagatgctggcaaagcagttactcttcaacagggcttcaatcaaggttataagaaaggtgcagaagtcattttaaactatggacgactccgaggaacattgagtgctttgctctcctggtgtcaccttcataataataattcaactttgatcaataaaataaacaatcttctggatgcagttggccagtgtgaagagtatgtgctcaaacatctgaaatcaatcactccaccgcccatgttgtagatttattggactccattgaggatatggacctttgtcatgtagttccagcttgagaaaaagattgatgaagctaaagatgaaagactctgtgaaaataatgctgagtttaacaaaaactgtagcaagagccatagtgggatanattgtnatatgtagaatgtttgtaaaccaggaccntgcacattcaaaaaaccccatccccanattgattttggaaccagacanccanttttatttnaacangctg

SEQ ID NO: 2279 - DNA, 339 bp, Homo sapiens
  misc_feature 260, 270, 335: n = A,T,C or G
accagctggcacaggagcagggggcatggcacctctgttgtttatgcccatagcacctcccatagccatctgacccatccgaatctcctgctctctcgcatcagggaaggttcccttgaatccttcctgctgtcgccgcatcatttcttcttgctgccgccgcatctcttcttcacggcgcctgcgctcttcctcctgcctgagctccagttgctttcgtttttgcacctcttggttgtgcagctcttccatcctccgangttctttttnggcgcctaatcaaatcctgtctcattagcattgacctgtagctcatggcgtgcatcttcatcttnttct

SEQ ID NO: 2280 - DNA, 656 bp, Homo sapiens
  misc_feature 280, 509, 540, 559, 569, 581, 620, 628, 629, 633, 643: n = A,T,C or G
actgttaaattattgctagccatatctttaaaaatggttttcaggaatatttctaccaaccatctttctgactaaaccaaggtcatgtcacggaggtgccagaaatcctgctgcatcatgaagggggtctatggcatttggcattagaagtatgagatttttgcaaattgtagtggaaaagaaacaaaattgcaaatatatggagccaggagtttgtctatagagaattctaccgaatcttacagcttgtatagaaaggatagaggttttccataaattnggcaagagattaaatgtttacatgaaattaccagtaataggttgtgaaactgaaaggaacatttctaatccataaacaatacaagacaaattttgaccaaccatactaaaggaaaggccaattttttttcctctttgtagacaaagttatgaaattattgtcaagtgaagaagcaatcaagagtgtgcagccaaaacatacaggcagacagggccccatggctcacagnttgtaatcccagcactttgggaggccaaggngggtggatcacctgaggcnggagtttganaccagcctggcnacatgacaaaccctgttttactaaaaatacaaaattaanccaagtgnnttgntgggcatctnaaatccatttcct

SEQ ID NO: 2281 - DNA, 553 bp, Homo sapiens
  misc_feature 414, 502, 512, 524, 548: n = A,T,C or G
acttgttttctgtatgaattcagaacttttgagcaataaaagtgctctgcataagtttataaaatatgctttctggatttaaaatttaacagaaaaatttccaaacaagtcataggtatgattctaaaatattatgtacgtgaaccacaaagtgtataccaggcatatgacatggatccccctggggaaccaggctgatctctttccagagggcactatccgaccagtgcatgatgatatcctcatcgctcagctgcggcctggccaagaaattgacctgctcatgcactgtgtcaagggcattggcaaagatcatgccaagttttcaccagtgacaacagccagttacaggctcctgccagacatcaccctgcttgagcccgtggaaggggaggcagctgaggagttgagcangtgcttctcacctggtgttatttgaggtgcaggaagtccaagggaaaaaaggtggccagagtttgccaaccctcggctggataccttnagcagagaantcttccggaatngagaagctaaagaaggttgtgaangcttg

SEQ ID NO: 2282 - DNA, 614 bp, Homo sapiens
  misc_feature 364, 418, 420, 426, 427, 436, 440, 442, 443, 452, 459, 466,481, 486, 488, 491, 503, 506, 518, 548, 550, 560, 569, 570,573, 577, 580, 585, 588, 594, 597, 601, 603, 605: n = A,T,C or G
actgttaaattattgctagccatatctttaaaaatggttttcaggaatatttctaccaaccatctttctgactaaaccaaggtcatgtcacggaggtgccagaaatcctgctgcatcatgaagggggtctatggcatttggcattagaagtatgagatttttgcaaattgtagtggaaaagaaacaaaattgcaaatatatggagccaggagtttgtctatagagaattctaccgaatcttacagcttgtatagaaaggatagaggttttccataaatttggcaagagattaaatgtttacatgaaattaccagtaataggttgtgaaactgaaaggaacatttctaatccataaacattacangacaaattttgccaaccatactaaaggaaaggccaatttttttttcctctttgnanacaaanntatgaaatnattngnnaagtgaaanaagcaancaatagngtgctgcccaaaaanatacnangcnagacagggcccntgnctcacagctgtnatccctctctttgggaggccaatgtgggcngnatcaccttgnggtcaggannttnaganctncttgnccnttttanaanaccncntnttttactaa

SEQ ID NO: 2283 - DNA, 513 bp, Homo sapiens
  misc_feature 398, 423, 438, 463, 478, 504: n = A,T,C or G
acgcgggatacaaagatatcctagagacccatctgagagagaaaataacagcacagagcattgaggagctttgtgccgtcaacttgtatggccctgacgcgcaagtggacaggagcaggctggctgctgttgtgtctgcctgtaaacagcttcacagagctgggcttctgcataatatattaccgtctcagtccacagatttgcatcattctgttggcacagaacttctttccctggtttataaaggcattgcccctggagatgagagacagtgtctgccttctctagacctcagttgtaagcagctggccagcggacttctggagttagcctttgcttttggaggactgtgtgagcgccttgtgagtcttctcctgaacccagcggtgctgtccacngcgtccttgggcagcttcacagggnagcgtcatccacttntcccatggggagtattttttagctntgttcctcaaaaacnatcaacacggaaattattgaaaaatntggatcttg

SEQ ID NO: 2284 - DNA, 640 bp, Homo sapiens
  misc_feature 461, 524, 531, 564, 570, 578, 589, 594, 598, 615, 622, 624,629: n = A,T,C or G
actgctaagaggtattattagaaacaagatttaaaaatatgtaacaaaatcttaagttcttaagtgaaagccatttaactagtatttaaaacctctgcaattattagtttattagtatcatccaggactcagatgttcagtattcctcctgaaattacataaacaaatgcaaatggaaagaatccaagtctaaattatataacaaaacagcactccatcacaaaagcgtgtaaaattacaagaacgctattttaaaatactagcactttaagaaaacgataatctcgaaaaccacaaaattgccaaattgttccctaaactcctaagcagataaacatgactaatgaatgagtttgttttgtaaagaaaaatcattcaaataaattgaataattcatactgagatgcaaagtttgcttctttcttcctatctacttggatttataaaggggcaaaccgtantataggaaaatataccctattttgaatgtggcatctttgtttgaaaagctggcccaattaatnaaaaatncttgtaattggaaaggtctcgtttcctgagcantccatntttaaatnaatgggaaaangcatntttngccagcatcttcttaancttcctngngactntgtcaacaaaa

SEQ ID NO: 2285 - DNA, 339 bp, Homo sapiens
  misc_feature 7, 191, 204, 214, 259, 273, 283, 296, 298, 300, 308, 311,312, 321, 324, 330: n = A,T,C or G
acaccanatcacgagacatcgtttcatacttcccaaatagttttatattttagctttgaaggtcagttaccagagccaaacttgttcttaacaagcagaattttatgtccattcaaagagtctcttacacctttctgggcctattcacttgcagagaggagtcgaaactgtaaccaggctcttcatatcgngcattcatatgtngatgtcctgntttcatatgctgccaatttctttaagattaatgggagtgactcgncaggagggccacgnagatgagaangttccctatggangngnatagatgnctnncgcattttncgntaaatncttctgggg

SEQ ID NO: 2286 - DNA, 332 bp, Homo sapiens
  misc_feature 134, 248, 254, 273, 277, 280, 289, 300, 313, 317, 323, 325: n = A,T,C or G
accacacaatactaacccttcccctcctctgatgtcttacatcacctcccaggagatgaagtgtattcttcactggtttgccaattggtcaggtccccagcgttgaacgtttcctagaggacctggtagctaangcaagtgccagaaaaattacaaccactgctggatagtctggaagcagcttattgtgtctggggcagaccgaccaccttctatctttaagtgcagctacatctttgggatcagtnggtttntaggctgggctgacatgancacnatnaatttgtcngacagctgganttcagtgagccanactncgtggnanagtttac

SEQ ID NO: 2287 - DNA, 571 bp, Homo sapiens
  misc_feature 227, 264, 276, 333, 442, 447, 493, 495, 520, 556, 563: n = A,T,C or G
actaaatattgctgagagcatccaccccaggaaggactttaccttccaggagctccaaactggcaccacccccagtgctcacatggctgactttatcctccgtgttccatttggcacagcaagtggcagtgtctccaccacctatgatggtgatgcagcccctagaagtggctttcaccacctcatccatgagagctttggttccccgggcaaaagctttccattcnaatacccccacaggaccattccacacaatctgcttanccctagtgacancctcagcatacttcttgctgcttttaggaccacagtccaagcccatccagccagcangtattgccagaagccaccagtggcttggccagtcttgggcattctcatcaaacttgtcagcagtgacaaagtcaacaggcaaggtaatcttcacaacatttcttttaanctttngacattaggtcttggacaaatcttggctcccttttcattaaacaananaagttgccaatcttcatgtttttgnacaccttaaggaatggtaaaagccattcccccaccnataatcnatctcatt

SEQ ID NO: 2288 - DNA, 395 bp, Homo sapiens
  misc_feature 3, 28, 41, 68, 70, 91, 113, 117, 119, 124, 129, 144, 160,162, 163, 179, 210, 211, 214, 226, 241, 247, 256, 273, 295,339, 342, 345, 357, 359, 361, 369, 372, 375, 393: n = A,T,C or G
acncgggggcagtgagttcgacacaccntgccgactgtcancgtgaagcgtgatctgctcttccaagncntgggccgcacctacactgacnaataatttgatgaactatgttntgantntggtntggancttgatgaaattacntctgagaaggaaatantnngtaaagaacaaggtantgtaaaggcactcaggagcctctgatgttgnnttnacaaaattgacntccctggccaataantatganctcctgtgnctggaaggattggttcnaggacttcaggtctttaaaaangggataatggctccattgttaaacggttatgcctgatggaaaanggnagnaatttttttaanananaaaacagntanatncacccttttgcggtacanga

SEQ ID NO: 2289 - DNA, 389 bp, Homo sapiens
  misc_feature 240, 266, 272, 303, 320, 324, 331, 342, 352, 358, 359, 388: n = A,T,C or G
acgatgtctagtgatgagtttgctaatacaatgccagtcaggccacctacggtgaaaagaaagatgaatcctagggctcagagcactgcagcagatcatttcatattgcttccgtggagtgtggcgagtcagctaaatactttgacgccggtggggatagcgatgattatggtagcggaggtgaaatatgctcgtgtgtctacgtctattcctactgtaaatatgtggtgtgctcacacnataaaccctaggaagccaatttgatntcatanctcaaaccatacctatgtatccaaatggttntttttttccggagttantaanttcaatnatgggaaaatnatcccgaaancctggnngataaaaaatattaaactttatgggtganc

SEQ ID NO: 2290 - DNA, 530 bp, Homo sapiens
  misc_feature 19, 22, 91, 108, 157, 173, 241, 250, 266, 281, 301, 325,383, 385, 395, 402, 441, 444, 447, 449, 452, 462, 470, 471,474, 479, 484, 486, 489, 503, 504, 507, 509, 518: n = A,T,C or G
actttttttttttttaaanagnggccaccacatctttattgcatactcaggtgaataacttattatacaatgaacactcctccattagganaccatgcccacttacanaatgcagccgtaaatgcggtaaatctatttacagaggttggggtgcaanatgagaaaagtatcanccccaggaatttgaaagtgagaatgatctacaaattctcctgacaaggagcaaccgggcttgtgctantgaggtctnaaagaattcctggcangagccgtaggggganattagatctcggaattgacngcaagttttgggggacagtgcaanaaaagaggggtgacctgtgaatttggtgctaggggagctgcatgaggcccaatgtgangnacccctaganagatgantaaatttagggtgaacttttaccctctcctacccaatcnaanaangntangggtccgggntatgccannaantttgncttcnanttnaaattcaagccaannggntnaaaaaaggntatttctatttt

SEQ ID NO: 2291 - DNA, 369 bp, Homo sapiens
  misc_feature 24, 184, 198, 215, 263, 264, 269, 283, 287, 292, 295, 300,301, 308, 318, 322, 324, 331, 334, 342, 350, 355, 360, 361: n = A,T,C or G
actgtgtagaattaagcaaacagngtgatgtttcagaagtaacccattactgcttaaaataaagcctacatcaacacttaactcaaacgaggacaattgttatttagtttttatttcataatcataaacttaactctgcaatccagctaggcattgggagggaacaaggaaaacattggaaccnaaagggaactgcancgagagcacaaagattnttaggatactgcgagcaaatggggtggaggggtgcttctcctgaactnnagaangaatgatctggggnttanaatanaanaccanncaaactnattctagttngctnanaatcaanaantggtaatnttcttgtntggtnttgcnnttcttggg

SEQ ID NO: 2292 - DNA, 405 bp, Homo sapiens
  misc_feature 6, 190, 193, 210, 260, 267, 273, 282, 288, 289, 292, 301,309, 311, 316, 322, 341, 345, 360, 361, 366, 368, 376, 380,396, 398, 400: n = A,T,C or G
acaaanatggctataaacaagatgcagccctcggtttccatgaacagcacactattacagtaaaccaagtttatattccaccatcaagtgtggctctcccatgacttcgctttgtgatggatcattaagaatatcctcaaatccaatagtctcatcattacccctcaaaacatccagtgaaagatttganctngaaagaaatggaagacncttgaacctgctgcactgccttgaatttccatctggtaattttagcggancaaatanaccctngaatgtttnttattnntgnaaaaattcntttatctngnttgancttagnaatttatttactgatattnccanaagggataccttggnnaaaantnaatttttnaacncgaagaaaaacctttnantnataaa

SEQ ID NO: 2293 - DNA, 647 bp, Homo sapiens
  misc_feature 209, 245, 276, 277, 278, 294, 305, 341, 351, 363, 376, 396,414, 429, 444, 459, 507, 551, 554, 577, 581, 588, 592, 595,597, 598, 623, 625, 630, 632, 633, 639, 640, 641, 645: n = A,T,C or G
acgcgggggataatcacccagagaaacagttctctactgatgttttgaagcaggccattgagctgagtcctgatagccaatacgtcaaggttctcttgggcctgaaactgcagaaagatgaataaagaagctgaaggagagcagtttgttgaagaaaccttggaaaagtctccttgccaaacaagatgtcctccgcaagtgcaaccaanttttacagaaaaaaagggtgaccctagacaaagctnttgaactggtttaacgggtgttggaattccnnncaaacatggctacctnttcacaagatngggtgctgctccaaggcaaaagtaaaacaaatgcanattcaggganattctgaagctntggaaataaaaantgattgaagcactaaaccantttgctatggactattcnaataaagctcttganaaggactgaatcctntgaatgcatactccnatctcgctgattcctggagacgggaatgttttcaaacccattcaatanggaagtccctgatgctgaaaagcaacatccattagcgcttctgnaanctttaaaaatttaattgggaagntttnaaacctntttngcnannttggtttaaagggttttgtccttancnaaaantnncttggnnngggnaa

SEQ ID NO: 2294 - DNA, 508 bp, Homo sapiens
  misc_feature 310, 314, 315, 327, 335, 338, 340, 346, 348, 351, 354, 361,376, 401, 414, 415, 419, 420, 422, 426, 427, 432, 434, 438,440, 449, 452, 472, 484, 505: n = A,T,C or G
acgcggggagcgccgctcccagccacagcctcccgcgcctcgctcagctccaacatggcaaaaatctccagccctacagagactgagcggtgcatcgagtccctgattgctgtcttccaaagtatgctggaaaggatggttataactacactctctccaagacagagttcctaagcttatgaatacagaactagctgccttcacaaagaaccagaaggaccctgtgtccttgaccgattgataaaaactggacaccaacagtgatggtcagctagatttctcaaatttcttaatctgattgccatgactncttnnttaaggctgtcngcttcaanaancngacctnanganccntttggcncttgccttcaaaccnacccccctttccttccaaccttttntgtaataattttnnaaanncnatcnnattcncntgtncnaacttaccntcnttattccagggcccaactgncaattattaatnaagcatttgtgatttttttanata

SEQ ID NO: 2295 - DNA, 653 bp, Homo sapiens
  misc_feature 123, 251, 293, 309, 327, 401, 421, 425, 442, 454, 464, 467,470, 509, 512, 524, 533, 551, 552, 553, 560, 578, 587, 601,602, 609, 610, 615, 616, 617, 624, 628, 636, 643: n = A,T,C or G
acgcgggggctgccaccacctccgctgctgaggttgcagatggctcttcccccagatctgtttgcatgcgggtgggggagagataggagacagcactcgctctttttttgttgtttttatttnattttattttttgtaagtgctgcgatcctggcatactgtgtagctgcagcccaggaagaaaagccagtgtggcccatcagttaaagcctccaagtcagctcgaactggattaattccatcaagctcantggctaaaagctagctgcgtgaccttgtgccaaaattccttnacctgcccacaccttnacctcctgtctgtataangacataattctaccctgaggtggctctgaagactgtgtatgcacttcaggcaatggattcatgattaataattnggggttctcttgctcctttnggtnaaccttccagccgccantccttttgttantgacctaggnctntgntacttggggcaaaaaaaacccaggccatttttttttggnaanctgccacctttnaacttccgnttcccttggggcccccannncaattanattttttgccttgcaatnaacttgccngggcgggccgtttnnaaagggnntattnnnagcacanttgngggccatnctaattngaatccgaac

SEQ ID NO: 2296 - DNA, 545 bp, Homo sapiens
  misc_feature 42, 124, 154, 181, 196, 215, 229, 236, 243, 288, 310, 317,320, 321, 331, 337, 351, 355, 394, 407, 417, 419, 421, 431,454, 461, 463, 468, 476, 480, 492, 506, 515, 524, 535: n = A,T,C or G
actttttttttttttttttttttttttgggaatggtagtganaaccaacatttattgagtgattatcgcataccaggcactttacaacatattatctacttctcacaactatcctatgaaatanatggtgtaatgaaaaaatcaaggacaaaancagtgagcaagttaaggaatagagatntgaacccaggtcatntaactcaaaccagtgcctntcccatcacacgtnaggcttntctgttnaagtcccttaaccacactcaggttccggtggttttaaccttgtcnggtagaggcccaaataatgacnaatgaanccnnaaaaaatttnaacccnaaactgacaggttnttanggatgaacaaaaagaattgaaaactcagttaaatccaanaaaaatcctttcntaacccaaantntnaagaattaangagatttttgaaatagagccaanatttgcntntttgntttgaatnaaantccaacaattcnaaattttaacttgntttattggntttggaatntaattttcatngaccattttt

SEQ ID NO: 2297 - DNA, 442 bp, Homo sapiens
  misc_feature 32, 88, 126, 143, 152, 239, 277, 286, 312, 338, 381, 384,385, 387, 396, 408, 413, 424, 426, 430: n = A,T,C or G
acttttttttttttttttttttttttaaacanagccttgctctgttgcccaggctggagtgcagtggtgcaatcttagctcactgtancttctgcctcctggattcaagctattctcatgcctcancctcccaagtagctganattataggngggcacaaccacaccccgctaatttttgtatttctagtggaaacaggtttaccatgttggccaggatggtcccaaactcctgacctnaagtgatctacctgcctcggtttcccaatcccctcggntgggattanaggtgtgagccaccacacccagcccntttattttctttatggcatttatcanagtttgaaatttttgccatttatttgatgtccttgcctgtttntgnnanttgtttgcnccagggaaaaanagttnagggaaccctntntttntgccccggcctt

SEQ ID NO: 2298 - DNA, 484 bp, Homo sapiens
  misc_feature 164, 280, 303, 316, 336, 338, 339, 342, 372, 382, 399, 407,419, 420, 424, 436, 441, 445, 456, 461, 472, 479: n = A,T,C or G
actttgcctacggcagcaacctgctgacagagaggatccacctccgaaacccctcggcggcgttcttctgtgtggcccgcctgcaggattttaagcttgactttggcaattcccaaggcaaaacaagtcaaacttggcatggagggatagccaccatttttcanagtcctggcgatgaagtgtggggagtagtatggaaaatgaacaaaagcaatttaaattctctggatgagcaagaaggggttaaaagtggaatgtatgttgtaatagaagttaaatntgcaactcaagaaggaaaaaganataacctgtcaangtatctgatgacaaattacnanngtnctcccccatccccacagtataaaaagattntttgcatggntgcaaaaagaaaattgntttgcccntgggagtattcnngagnatttttaagcantacancctnattgacttatncatgnaaagggtcttntataaanttgga

SEQ ID NO: 2299 - DNA, 344 bp, Homo sapiens
acgcgggttatcagaaaaaaatttccagctcaaccaagataaaatgaatttttccacactgagaaacattcagggtctatttgctccgctaaaattacagatggaattcaaggcagtgcagcaggttcagcgtcttccatttctttcaagctcaaatctttcactggatgttttgaggggtaatgatgagactattggatttgaggatattcttaatgatccatcacaaagcgaagtcatgggagagccacacttgatggtggaatataaacttggtttactgaatagtgtgctgttcatggaaaccgagggctgcatcttgtttatagtcatctttgtacctc

SEQ ID NO: 2300 - DNA, 418 bp, Homo sapiens
  misc_feature 34, 53, 70, 82, 91, 119, 165, 184, 192, 204, 209, 233, 238,242, 244, 246, 251, 252, 265, 269, 279, 280, 283, 295, 312,320, 333, 340, 342, 348, 349, 354, 359, 361, 377, 387, 390,411: n = A,T,C or G
acttttttttttttttttttttgggttttttaanccaaaatgtgtttattganatggtttcccactcatnttgactcaaagngcttttagngctgcttcctcctgaaggaacatccttntgtaagccttgcttttcctcctgtaggctggcaaaggacagtggancaaccaacacacaaaactnccgtttgngcatggctaaanaccgnggtgattttatagcatcctgggcntttcncatncntnaagtnnggaattggggctntgcnccaagcgttnnttnttgtgtttcctntttcctcttctggaaanggatgaangaaatcctttgcnaaaggcntnttctcnngtgcntaggntntcaccgccgaaaaccncgtattcctnccncggggggatttttaaaagggnaattcta

SEQ ID NO: 2301 - DNA, 431 bp, Homo sapiens
  misc_feature 252, 265, 293, 299, 363, 371, 430: n = A,T,C or G
acacagtatgtccctcatttaaccaaaagtgatcccaagttttgttggtcactagattccctgtccagctatgagatatttcatgtgcaatgacattggagagtgacttgtcgcctgccagtagagtaggagttacaaaagtaaggcaaggattctccatgccaccataagggaaggatggtggcaggaccaataggtcatactgtccccatacatacggtcctcccagatcttctgctattttaagcatanattcaagtctcanaaaactcataagcagacttttcccctgntctttntcagaccacaccaaagttcttgggccaatttgcctgctttctaaagctccaacaactaaagcantcaggtancagggtattggaactttttggatgaatttgtatattttcctgcttgggtcttctgggtna

SEQ ID NO: 2302 - DNA, 303 bp, Homo sapiens
  misc_feature 181, 200, 222, 223, 259, 262, 265, 272, 273, 280, 290: n = A,T,C or G
accttcaaaagtgagattcctgaaagcatgagtaaatttgggggtggtaatattttctccattttcaagaaatatcttcagcatatgtccaaagagcaggattccattcaaataggcaagagcaaagtctcgttttgtctaaataaaaaaggaaaatattaaaacgggtccttcaaaaaanaatcttgtcttgagcctanaacaaaaggttgttgggatcannagggttactggaaagttaaagggatatcagggaganttnaanggatgtnngttaaangaaacttttnagaaatattcttc

SEQ ID NO: 2303 - DNA, 358 bp, Homo sapiens
  misc_feature 318: n = A,T,C or G
ggggtacattcaggatccctcggccaaggactggaccagaagaacacttgggaatcttgggtccacttatcaaaggtgaagttggtgatatcctgactgtggtattcaagaataatgccagccgtccctactctgtgcatgctcatggagtgctagaatctactactgtctggccactggctgctgagcctggtgaggtggtcacttatcagtggaacatcccagagaggtctggccctgggcccaatgactctgcttgtgtttcctggatctattattctgcagttggatcccatcaaggacatgttagtggcctgntggggcccttggctatctgccaaaagggcatcctggatcc

SEQ ID NO: 2304 - DNA, 361 bp, Homo sapiens
  misc_feature 297, 306, 318, 333, 350: n = A,T,C or G
actgcgattaaaaaaaaagcacttctgccaaaggaaccatgttccaacaccgcaaacaaggtgttctgcttaaacagagtaagatacaccacccccatccatcccttccttccctgttcccctcccaacttgagttgtgtcattcgcaccagtgtcctgggtggtagggatgctacagccacctaaggcaaggagccctgggaggtgggagggcttgcatggttaagcacaccagaactgaagcgcaaaagggtcagcttgtcttcatctagaatctctggatgttccttccagaangcatccccnatgatatcgcantgccaaggacactgnctttggcctggtccggntcacttgccat

SEQ ID NO: 2305 - DNA, 377 bp, Homo sapiens
  misc_feature 243, 248, 252, 269, 281, 316, 317, 321, 357, 373: n = A,T,C or G
acgatgacatctcaaggagtcactggccctaggtttctgcagtaggatcttaagatctgatctctgccctcaagtgagtgcacgtgcagtaaagctgtcatcgtgccatgacagatgtctgcaaggactttacagtggggtccaaaggatgccaccatcagctccacctggggctcaacaaagcctgaaagaagaaagggatgatgcttccagcagaaacctggaggcctgcagctctgccancccanacancaagcgaggccatttgnccatcaggggcngaaggagggaactcacccaccatcttttcctacanngcanttccattatgaggtttccactttaaaatgctaaatnattaattttttttagngaat

SEQ ID NO: 2306 - DNA, 648 bp, Homo sapiens
  misc_feature 175, 362, 374, 390, 395, 398, 449, 454, 462, 473, 487, 494,508, 514, 516, 518, 541, 549, 552, 554, 562, 564, 569, 572,574, 596, 597, 598, 605, 613, 615, 616, 623, 640, 641, 643,646: n = A,T,C or G
acgcggggctttttcgaggtaggagtcgactcctgtgaggtatggtgctgggtgcagatgcagtgtggctctggatagcaccttatggacagttgtgtccccaaggaaggatgagaatagctactgaagtcctaaagagcaagcctaactcaagccattggcacacaggcattanacagaaagctggaagttgaaatggtggagtccaacttgcctggaccagcttaatggttctgctcctggtaacgtttttatccatggatgacttgcttgggtaaggacatgaagacagttcctgtcataccttttaaaggtatggagagtcggcttgactacactgtgtggagcaagttttaaagaancaaaggactcanaattcatgattgaaanaaatncangcagacctgttatcctaaacttgggttttttaatgaccacaacaagcaacnttcancttactgnttgaaagggtnttgcctcacccaanctaaagngcaatggccttttnagcttntnancctcaaaccttttggggttaagntgatcctnaancncccaatgngnctttnganantgcctaaatggaattttattgnnnaaaaaanataaaacngnngcttccnattttaattaaattttnnancanaa

SEQ ID NO: 2307 - DNA, 252 bp, Homo sapiens
  misc_feature 43, 125, 131, 151, 165, 173, 177, 178, 184, 187, 196, 201,212, 217, 221, 224, 226, 231, 234: n = A,T,C or G
acagtctttcattaaataagaatacttacacatacattttcanatatttctaccttcctgtatgtgtttggaattgtatgtaggtagccactgaaagaatttgggccccttgggaggatggcatntggaantccatgaagtaaagagcatncttttaaaaagcanatttgatngctnncctttnaantatatgaanattcngagaatctctnattanaccncantncatanaanattcctaatacccctagg

SEQ ID NO: 2308 - DNA, 122 bp, Homo sapiens
  misc_feature 67, 98, 104, 110, 117: n = A,T,C or G
actatttcatggtccaaacctgttgccatagttggtaaggctttcctttaagtgtgaaatatttaanatgaaattttctcttttaaagttctttatanggttangattantcaatancaaaa

SEQ ID NO: 2309 - DNA, 507 bp, Homo sapiens
  misc_feature 388, 403, 412, 426, 464, 471, 479, 505: n = A,T,C or G
acccttggacaaattgtttccagcaagaagctaactcgaccactggtgatgaaaactggcagacctgcaggaaaagggagcattacgatttcagctgaagaaataaaagataatagagtggtcttgtttgaaatggaagccagaaaactggataataaggatctatttggaaagtcagacccatacctggaattccacaagcagacatctgatggaaactggctaatggttcatcggacagaggttgttaaaaacaacttgaatcctgtttggaggcctttcaagatctctcttaactcactgtgttacggagatatggacaaaaccattaaggtggagtgttatgattatgacaatgatgggtcacatgatctcattggaacatttnagaccaccatgacanaactgaaanaagcctccaaaaanctcacctgttgaatttgaatgcataaatgaaaaaaaanggcaaangaaaaaanctcaaaaattcagtggttatcagtgnga

SEQ ID NO: 2310 - DNA, 572 bp, Homo sapiens
  misc_feature 450, 456, 498, 552, 570: n = A,T,C or G
acattgagaatatgtgtaagtcattttttaaaaggcttcttgtgattaaaagagaaaattctgaaaaccacagcaacatatctatgctgtttccaagcatacaaagagaattagaacatctgagacaactatggctccaaacaatcagaagaagggttagttttcttttctcctattgataatgtcaaaatgatgtgtcatctattgagccatactatggagtagcaggctctagttagatgccttccccagttaacagcacatatccaaaggacagctagccaagtgggaaggtggtaggtaaatgctcatctgggctaggcaaccaccacagcaagcaggtcccctctcagcctgccttggcaatgagctgcttctgagaagcccagctatctgtggttgagagctcactcccttgaggcattgcagagaacaagagacatgggctgnggggcngcttttcaataaaactgagaggcacatcaacatggcactgtntgtgtccacttaaggatatatgataaacatgcatttcaaaaggtaattattaanataattggccatttttanat

SEQ ID NO: 2311 - DNA, 553 bp, Homo sapiens
  misc_feature 404, 458, 464, 469, 497, 501, 508, 513, 517, 527, 533, 537,544, 545, 551: n = A,T,C or G
acgcgggcaaaccctgttgagataaagctggctgttatctcaacatcttcatcagctccagactgagactcagtgtctaagtcttacaacaattcatcattttataccttcaatgggaacttaaactgttacatgtatcacattccagctacaatacttccatttattagaagcacattaaccatttctatagcatgatttcttcaagtaaaaggcaaaagatataaattttataattgacttgagtacgcggggaggcattgaggcagccagcgcaggggcttctgctgagggggcaggcggagcttgaggaaaccgcagataagtttttttctctttgaaagatagagattaatacaactacttaaaaaatatagtcaataggttactaagatattgcttancgttaagtttttaacgtaattttaatagcttaagatttaagagaagatatgaanacttanaagantccttgagggaaggaaaaagataaaacngttntaaaacntgacngganggttgagaanaagctncttnatggagnnaaaaangt

SEQ ID NO: 2312 - DNA, 419 bp, Homo sapiens
  misc_feature 267, 270, 273, 275, 280, 283, 290, 293, 319, 322, 340, 359,374, 389, 395, 414: n = A,T,C or G
acagaaagagcacaggccagctcagcctgccctggccatctagactcagcctggctccatgggggttctcagtgctgagtccatccaggaaaagctcacctagaccttctgaggctgaatcttcatcctcacaggcagcttctgagagcctgatattcctagccttgatggcctggagtaaagcctcattctgattcctctccttcttttctttcaagtcggctttcctcacatccctctgttcaattcgcttcagcttgtctgctntanccntnatttncanaagcttnttntctttggcatctatttgcagtccctnatnacaccagtttacggcctnggaaagtgtttcagaccanatggcataaggcacntcttttattgttttnagaggncagggatataatctttctnggcaa

SEQ ID NO: 2313 - DNA, 570 bp, Homo sapiens
  misc_feature 3, 133, 401, 447, 453, 455, 463, 480, 482, 488, 497, 501,518, 522, 530, 538, 545, 569: n = A,T,C or G
cgncgaggtactagaagtatacaccacccagcccggggtccagttttacacgggcaacttcctggatggcacattaaagggcaagaatggagctgtctatcccaagcactccggtttctgcctggagactcanaactggcctgatgcagtcaatcagccccgcttccctcctgtgctgctgaggcctggtgaggagtatgaccacaccacctggttcaagttttctgtggcttaaggaagtgtgaagatatgatccagtccagggctaggctcagccacctgtctcctgtccagaaaaaaggtgaagattaagaagctttcagaatgattctatggattaaaatcatacaaatggtggctgttctgaagaatcagtctgggtattgatttccttttccagngactggctccaggccatgtctaatgaccaactcgattccctgtcangttcananagcaagtnaacccaaccaacaattntngtcttntaagccctnaccntacctgggacttccatncttntggtgggntccatttntcaacantgcctttttttttcaacttttttnc

SEQ ID NO: 2314 - DNA, 507 bp, Homo sapiens
acaccaacctgaacagattttgtgccacaatttcattcaaagggtttgtcattcactttatgattgtgctggataatctagatgtaagcaagtctggagattttaaaatacgggtcccctgtatgagagtagcatagtttatagcatacttttaaaaatggcattcggtaattttgccttctggacagaaagatatcttcaaattgcaaacacatctatttccacaaaacaatttggtcaggaaattttatttgaacattctaaagcaataatgctttagatgttcttaagtgtcccagacaggattaacaaaattaagtgtctctaaattacaaatttggctcctgtaggagtctcagaaaataaacagaagaaaacaacccccctcccaaaagaagtatgacacacacattttgaagaaaccccaatgtttcatgcaatggtaggcaagatgtaaaagcccacccaaatcacacatttctacaccaatcatcataagaaaaaagt

SEQ ID NO: 2315 - DNA, 514 bp, Homo sapiens
  misc_feature 457, 504: n = A,T,C or G
actgtggcgctccgtgaaattagacgttatcagaagtccactgaacttctgattcgcaaacttcccttccagcgtctggtgcgagaaattgctcaggactttaaaacagatctgcgcttccagagcgtagctatcggtgctttgcaggaggcaagtgaggcctatctggttggcctttttgaagacaccaacctgtgtgctatccatgccaaacgtgtaacaattatgccaaaagacatccagctagcacgccgcatacgtggagaacgtgcttaagaatccactatgatgggaaacatttcattctcaaaaaaaaaaaagtaccgcgtggcattcaagcatagcagattagaaggattttttttaaagcagtctgaaaatgggacatctgtagagaaattcatttccttcttctcctccggatgtggaatggaagctttgagggaaggaaaagtangaaaagagcgggatgggatgggatgggatgggatgggataggaaganaggctgggga

SEQ ID NO: 2316 - DNA, 123 bp, Homo sapiens
  misc_feature 53, 62, 63, 64, 89, 94, 97, 107: n = A,T,C or G
actattaagccatggtcaaccccaccgtgttcttcgacattgccgtcgacggnaagcccttnnncccgcgtttccttgaacctggttgnaaaancanggcccaaaanacagcaaaaaattttt

SEQ ID NO: 2317 - DNA, 600 bp, Homo sapiens
  misc_feature 437, 479, 509, 555, 569, 597: n = A,T,C or G
acttgattttgaacacagcacgaaaacattttggagctggtggaaatcagcggattcgcttcacactgccacctttggtatttgcagcttaccagctggcttttcgatataaagagaattctaaagtggatgacaaatgggaaaagaaatgccagaagattttttcatttgcccaccagactatcagtgctttgatcaaagcagagctggcagaattgcccttaagactttttcttcaaggagcactagctgctggggaaattggttttgaaaatcatgagacagtcgcatatgaattcatgtcccaggcattttctctgtatgaagatgaaatcagcgattccaaagcacagctagctgccatcaccttgatcattggcacttttgaaaggatgaagtgcttcagtgaagagaatcatgaacctctgaggactcantgtgcccttgctgcatccaaacttctaaagaaacctgatcanggccgagctgtgagcacctgtgcacatctntctggtctggcagaaacacgggacaaaaatggggaggagcttcacngaggcaagagggtnatggagtgcctaaaaaactttaaaatancaa

SEQ ID NO: 2318 - DNA, 450 bp, Homo sapiens
  misc_feature 38, 58, 65, 83, 107, 122, 136, 164, 193, 198, 203, 204, 231,240, 266, 271, 284, 294, 296, 314, 325, 351, 356, 362, 414,420, 423, 425, 444: n = A,T,C or G
actttttttttttttttttttttttttttttgctgccnccaccatgaaagagtggccnccacatntttattgcatactcaggngaataacttattatacaatgaacnctcctccattagganaccatgcccacttncagaatgcagccgtaaatgcggtaaatntatttacagaggttggggtgcaagatganaaaantttcnnccccaggaatttgaagtgagaatgatntacaaattntcctgacaaggagcaaccgggcttgngctantgaggtctgaaanaattcctggnanagcgtagggggagattanatctcggaatngacagcaagtttggggacattgcaanaaaanaggggngacctgtgaattggagctggggagctgctgaggcccattgtgaggcagaacnttgagnatnanttaatttagggtgatcttnattttc

SEQ ID NO: 2319 - DNA, 580 bp, Homo sapiens
  misc_feature 461, 473, 504, 521, 527, 536, 579: n = A,T,C or G
acacaaagagggggtgggtgtcggatgcagagtgtgtggcctgatgctccacggcgtgcaggacggggggctaatagtaggtttccttctccacccagccgccagggcgtcgcctgatgatgagttttctgacttcgccatatacgaagatgagaagagagtaggggaaggcacagaaccaccaggtaggtttgaggggatacatcctaagagcaacacccattccagggcagtaggaaaggaaagcagccagggctgtctcttcaaagaggccaaatatcaagatcttgttcttcatcccctgctggaagaccgaattcctcctggtcttacagatgaccaagtcggcccactgcaccaccacgatactgacgaagaaggctgtgtggcaggtgaactccacgattttcctctgctcataggtccactgctgcccgtactgcttccacatcttgatccancggtcatcccanccactcggaggcccaacaggtgaattgggangaagccgttctcaccanaatcanaaatgtaantaaagaaacctcccagggcctgatcattccatcttgtccttanc

SEQ ID NO: 2320 - DNA, 605 bp, Homo sapiens
  misc_feature 442, 551, 559, 592: n = A,T,C or G
actgtggaggctgaggcaattttcttcaggctaacccagattttctaaagcccaacttaaaaagtctacacctgccaaactaaaaaaaacgcagccacttgaaaataaaccagcagagcattgccatcactccgataaagctgcaggtttcatcacatgcaccagacaaatctacagggctagtttcagttctctccttttaaagaatttattaagcctgttataccacacagtatgttttatacactgacatacaactccctaataagataaagcaaagacaaaaaagtttatcttattagaaacaagatacaccaccacttattgtcttcaaacattattgcactttaactttcttaatttgacaaagcattcaagaaacatctgcagactagttttaacagacaaataacacctgtaagcagacatgactgcctaaatngtttattaagtatgaattttacaaactttacttatattagcggtaacggtggagctggagaagtttgcgccttctccaagctgcccggcgagagccaccataggtgggnggacttgnggcctttcaaaggccgggtttttcggcctgcanatgtcagcccacg

SEQ ID NO: 2321 - DNA, 521 bp, Homo sapiens
  misc_feature 344, 471, 501, 509: n = A,T,C or G
acacctaggacctctagtaaacctcataaacatctgcctcctgcagccctacacctcattgcatactacaaagaaaacaaagacagggaggacaagaggagcgccctgtcctgtgttatctccaaaacagctcgtcttctctctagtgaagatagagctcgtctcccagaagaattgcgaagtcttgttcaaaaacgctatgaacttctagagcacaaaaagaggtgggcttctatgtctgaagaacaacggaaagaatatttgaaaaagaaacgggaggagctgaaaaagaagttgaaggaaaaagccaaagaacgaagagagaaagaaatgcttgagagatnagaaaaacagaagcggtatgaggaccaagagttaactggcaaaaaccttccacattcagattggtggatacccctgaagggctgcccaacacgctgtttggggatgtggccatgggtggtggaattnttgaactgttttctgggctactattaccanatgctcanttcctttaactg

SEQ ID NO: 2322 - DNA, 464 bp, Homo sapiens
  misc_feature 88, 382, 403, 405, 417, 463: n = A,T,C or G
accttgtagcattctgaggacaggcctgatttctgagaagggaaagtggtaaaagtattgtccagtcctttttaagctggtggctgancttggtgaggtgtgtttttaaaagacctttagtccgttctacttttcttgaagaaggaggaccgtaagggatataaaggtttcactgaatactaagagcctgaaaaactgcttggctgatttgactaataaaggctggtctgttatcagactgtatagaggtgggaaggctaaactgaggaattgtgtctgacagaagggaagaaatgactgtggtggccttctcagaccctgtaggaaaggcctttactttattcagtgaaagttgtctatttagactaagaggtttttattncctgactcgggacatgttgantnaaggtaatttgncaatcctgggtggggcaaatcctccaacctgatgtgtacggaaggna

SEQ ID NO: 2323 - DNA, 612 bp, Homo sapiens
  misc_feature 572, 606: n = A,T,C or G
actgtctcttttggaaaagttcttgatccccaatgcttcacaagcagagagcaaagtcttctatttgaaaatgaaaggagattactaccgttacttggctgaggttgccgctggtgatgacaagaaagggattgtcgatcagtcacaacaagcataccaagaagcttttgaaatcagcaaaaaggaaatgcaaccaacacatcctatcagactgggtctggcccttaacttctctgtgttctattatgagattctgaactccccagagaaagcctgctctcttgcaaagacagcttttgatgaagccattgctgaacttgatacattaagtgaagagtcatacaaagacagcaccgctaataatgcaattactgagagacaacttgacattgtggacatcggatacccaaggagacgaagctgaagcaggagaaggaggggaaaattaaccggccttccaacttttgtctgcctcattctaaaatttacacagtagaccatttgtcatccatgctgcccacaaatagtttttgttacgatttatgacaggtttatgtcttctatttgaattnctattttcccatggtggttttatgtttaatattngggagt

SEQ ID NO: 2324 - DNA, 621 bp, Homo sapiens
  misc_feature 111, 140, 155, 160, 164, 168, 205, 207, 215, 225, 298, 324,331, 333, 341, 344, 346, 372, 389, 396, 449, 459, 465, 469,499, 508, 511, 514, 517, 526, 527, 528, 537, 539, 540, 541,553, 558, 560, 569, 575, 576, 581, 585, 592, 600, 605: n = A,T,C or G
acttttttttttttttttttttttttttttgggatttataaatgcattttaataccttgctgataaaatagtaacattccgtctttgcaatctgatacggaatacaggaanatactggtaaaggctttgatgtgcatatntatcataaccaggtnatganaacncccncgaaccacctactttagtgttacaccataccaacttntnaaaaaggncagcttcaanctctactgggtagctgagtaaatagccgtccaatgtttaaagactggggaagcggggagaaagatgaaagganttagcagcacacacttcaaagcccanttttaancncaccgacnttntnaatattaaaaataaaggatgcaaacnaaaaaggccattcatcnttttcanaaagagcatttggcaatattcaacccataaggagactgtgcttggggccatcnctctctccancttctnaaantgtttccggcattgcgaatgttgatcacantggccccanaanggntcnacggattannntgggcaccntnnnttcctgccgggnggccntnaaaaagggntaattnntccanttgnggccgtncttattgnatccnaccggatcaaattttc

SEQ ID NO: 2325 - DNA, 250 bp, Homo sapiens
  misc_feature 247: n = A,T,C or G
acaactaaaggcaactggcatggactcaaatattttggggaagaaaaagactaaaagttctaaggaagaaaatgcgaaccttgatagtttgaaatagttaaaaagacagtgtagaaactgcttaggcagtttgattatggactattagatgatacttgggtctgataatggtataaggagaataaagtatttagggatccaatattacgcctgcagctttttccaaatagttcctgggggagggggntgc

SEQ ID NO: 2326 - DNA, 613 bp, Homo sapiens
  misc_feature 496, 536, 538, 545, 548, 555, 587, 588, 595, 612: n = A,T,C or G
acgcgggggcgggagagaggccgagatggcagatgagattgccaaggctcaggtcgctcggcctggtggcgacacgatctttgggaagatcatccgcaaggaaataccagccaaaatcatttttgaggatgaccggtgccttgctttccatgacatttcccctcaagcaccaacacattttctggtgatacccaagaaacatatatcccagatttctgtggcagaagatgatgatgaaagtcttcttggacacttaatgattgttggcaagaaatgtgctgctgatctgggcctgaataagggttatcgaatggtggtgaatgaaggttcagatggtggacagtctgtctatcacgttcatctccatgttcttggaggtcggcaaatgcattggcctcctggttaagcacgttttggggataattttctcttctttaggcaatgattaagttaggcaatttccagtatgttaagtaacacacttattttttgcctntgtatggagagattcaagaaataattttaaaccgcatacntnataaaanacnttggtcnttggtcaaaaaaaaaaaaaaaaaaaaaaaaannttccttngccggacccgctaaggnc

SEQ ID NO: 2327 - DNA, 490 bp, Homo sapiens
gttggtggaaggagtgcccagtcccagggtgacactggacaagaaagaggccatccaaggtgggatcgtgagggtcaactgttctgtcccaaggaaaaggccccaatacacttcacaattgaaaaacttgaactaaatgaaaaaatggtcaagctgaaaagagagaagaattctcgagaccagaattttgtgatactggaattccccgttgaggaacaggaccgcgttttatccttccgatgtcaagctaggatcatttctgggatccatatgcagacctcaaatctaccaagagtgaactggtcaccgtgacggaatccttctctacacccaagttccgcatcagccccaccggaatgatcatggaaggagctcagctccacattaagtgcaccattcaagtgactcacctgcccaggagtttccagaaatcataattcagaaggacaaggcgattgtggcccacacagacatggcaacaaggctgtgt

SEQ ID NO: 2328 - DNA, 601 bp, Homo sapiens
  misc_feature 450, 479, 506, 518, 545, 554, 592: n = A,T,C or G
actcgtcaatgggctcggtcatatataccacctcgaagccccgtttccgcactcgctccacaaaagctgagttggccacctgctctttgctctcaccagtgatgtaatagatggacttctgtgtctccttcatgcgagaaacatactctgacagagatgtcatctcatctccagactgggaggtatgatagcgcagcagctcagacaggcggcggcggttagtggagtcttcgtggattccaagcttgagatttttagagaatgcctcatagaatttcttgtaattctccttgtcttctgccagctcagagaagagctcaaggcacttcttaacaatgtttttgcgaatgactttcaagattttgctctgctggagcatttctcgggagatgttcaggggcagatcctcagagtcaaccacaccacggataaaattgagatactctggtntcaactcatcacagctgtccatgatgaanacacggcggacatagagttgatgttgncttttcttctgntctcaaaaaggtcaaagggagcccgcnaggaataantagcaatgcctgaattccactgaccttttacagaaaangcttgactg

SEQ ID NO: 2329 - DNA, 495 bp, Homo sapiens
  misc_feature 176, 223, 249, 273, 340, 355, 361, 373, 374, 378, 391, 397,415, 425, 427, 429, 432, 440, 444, 446, 449, 456, 463, 468,474, 480: n = A,T,C or G
actacgcaggccttggcatccctggggttcacctggctgactgggatgttgaggcgggcagcaatgtcttccacggtctcattgccttctgagatgatgcccacacctttggcaatagctttagctgtgattggatggtctcctgtgaccatgatgaccttaattccagcacttcnacatttgcccacggcatcaggaacggccgcccgtggagggtcaatcntggagatgagcccaacaaaagcacanattatcgatagggaaattccatcntcagtgtcaaactggaacccttcatgaaacttgttcatcttggcagaaagaggtggcagaaaccttngactcgttctccgangccccnagctccaaatanngcgnttctgaaaggcgnctttanctctcatccaagggctgntccttgccgngnangangataaaantgancngtntatgatnctttctngggcncccttnatcaanaaacaggtgtttccg

SEQ ID NO: 2330 - DNA, 584 bp, Homo sapiens
  misc_feature 464, 549, 551, 562, 577: n = A,T,C or G
acattacgcaccataacatgcgtctttaaagccttcccaaatattagtaatcttgaccagcaatgacaagaaaaaagaggagcacctttacaagcagttgatatccaatattaaaataattgtggctttaaaaatatttctttaaattcttgcattacacttttctttttaaaccaatcttccaggagattaatcaatgaaatttataagttttatcaacgtataaaatttttttcatcttctgggactcatagaatacaatctgtgtttctgaccagttgaggtagttaaaatagggagggcttttctaatttcgtatttgactatttcagaaagaaaggttatcttttactggtgagcacagtcattgctctgcagatgggctaggattcaaagaatataacacagtgttgttatcataaagagtgtgaagtttatttattatagcaccattgagacatttngaaattggaattggaaaaaaataaaacaaaaagcatttgaattgtatttggtggaacagcaaaaaaagagaagttcattttcttngncaatatactgngccaacatttggaantaataac

SEQ ID NO: 2331 - DNA, 473 bp, Homo sapiens
  misc_feature 347, 373, 382, 390, 395, 413, 418, 426, 429, 448, 449, 459: n = A,T,C or G
accttcactatcactgggcgtttttggagaacatttcttctgggagttacctgacatttggccactgttttcgggttctcagttgaagaactgttgggtggagctgacaatgaggtcttgggagatggggaacggcccatggctgtggacatgccggctcctgcaggagagggaggctgagtctgttcctcggacaccttactccctttgggtccagccttttctttggttgatttttttcttttctgagctccaggagttgcctctgctccttcagttttgacagtgctgcttgtggagggtgcaggtgaagtaccatccacttccttcttcctctttcttgatanggctggtcctttcactattaactttntttttaaanagtttcanccagntctccaagcgttggtatntcttncaaaaatnttnattactttgcccaaactcnncatcacctcngaacttttttcctc

SEQ ID NO: 2332 - DNA, 463 bp, Homo sapiens
  misc_feature 361, 411, 415, 437, 440, 446, 447, 456, 462: n = A,T,C or G
actacttctcaaggaggattcatggtccgtcctttgctcactacagatttctcctcttctctgggaaaaaatggtcaatgcttctgcttccttttaataaactaatttcttgattattatacattattattattccccacttgacaccttcttagaaacttgattgttggatgtgtttttcatttggcaaaaattcaatgtggctttgcgtgggatgtctgaagtgtcagaaacagcactgttgatgttctggttttgagagggaaaatatatatagagatgcatacattccctagaagaacaaatgtaaaagactgaaatagggcgtgcacagagttaagagggctgacagacactactnggtttggaattctgtggctgtcagccatcaaggactgctgtgtaggccanaatntaaatctccttaggaagaattntgntaggcnnaaccactgnaaatgnc

SEQ ID NO: 2333 - DNA, 614 bp, Homo sapiens
  misc_feature 554, 568: n = A,T,C or G
acacatacacacctaaagagtcatggccttcttaaacagctttcttaatcctttctggaaatatcctttggttcatttttattgcccctctctaggcaaaacaaagtatgttaacgcaggtatcagtgagttatttcctagcacttgtaagcaaatatccttaccaagaggaaccattcaacttttataatatcgtaaagcgtggagttaagatgtgtttttaaaaaatatacaggctttttatatgcttggatctgaaaaaggtaacatccacaatgacattctattacagagttcttacaatcaccctagcctactacactctggtataatactctttcttcaattctgtttaacagaataaaagtaaccaaaggttaaagcaatgcatttgaacttaaaatataacctgcccacaggaattaagtagttttattcccactccctattacataatttctcagatccccttttacctattgtcttaagtggataagcacatagtcatgcacacagatttgatgtctaccaagtaactgtatggatttatttgnatcaataaaagggncatgaaaattctgggtgggaatcacatccatgttgcttcacacgaa

SEQ ID NO: 2334 - DNA, 562 bp, Homo sapiens
  misc_feature 60, 508, 553: n = A,T,C or G
actatgccaaacacttataacttgtataaaaattccacatccccatattggccacctcangatgaaaacagataactccctaaatgttaactggctctactcccctaatattaaacataaaaaccacatgggaaatatagaaattcaaatagaagtaacataaacctgtcataaatcgtaaacaaaaaactatttgtgggacagcatggatgacaaatggtctactgtgtaaattttagaatgaggcagacaaaagttggaaggccggttaattttcccctccttctcctgcttcagcttcgtctccttgggtatccgatgtccacaatgtcaaagttgtctctcagtaattgcattattagcgtgctgtctttgtatgactcttcacttaatgtatcaagttcagcaatggcttcatcaaaagctgtctttgcaagaaagcaggctttctctggggagttcagaatctcataatagaacacagagaagttagggccagacccatctngataggatgtgtggttgctttccttttttgctgtttcaaaagctnctggtatgc

SEQ ID NO: 2335 - DNA, 616 bp, Homo sapiens
  misc_feature 427, 444, 482, 515, 537, 539, 563, 567, 612: n = A,T,C or G
acagccaacggtttcccttgggggctttgaaataacaccaccagtggtcttaaggttgaagtgtggttcagggccagtgcatattagtggacagcacttagtagctgtggaggaagatgcagagtcagaagatgaagaggaggaggatgtgaaactcttaagtatatctggaaagcggtctgcccctggaggtggtagcaaggttccacagaaaaaagtaaaacttgctgctgatgaagatgatgacgatgatgatgaagaggatgatgatgaagatgatgatgatgatgattttgatgatgaggaagctgaagaaaaagcgccagtgaagaaatctatacgagatactccagccaaaaatgccaaaaagtcaaatcagaatggaaaagactcaaaaccatcatcaacaccaagatcaaaaggcaanaatccttcaagaaacangaaaaaactcctaaaacaccaaaaggcctagttctgtntaagacattaaagcaaaaatgcaagcaagtttngaaaaaggtggttctcttcccnantggaagccaaattcatcaattttntaanaattcttccggttgactgaccaataggcttttcaaatctctgctntgga

SEQ ID NO: 2336 - DNA, 584 bp, Homo sapiens
  misc_feature 398, 433, 476, 507, 516, 521, 545, 549, 564, 574: n = A,T,C or G
acgcggggggaagggagagagctgtgcgagcgtgggggagagtttttcgttggaatatacgttgcacatttatggcgattctgagtgtgagggcagacttctgccaggctcagcacagcattttcgctgacaagtgagcttggaggttctatgtgccataattaacattgccttgaagactcctggacaccgagactggcctcagaaatagttggcttttttttttttttaattgcaagcatatttcttttaatgactccagtaaaattaagcatcaagtaaacaagtggaaagtgacctacacttttaacttgtctcactagtgcctaaatgtagtaaaggctgcttaagttttgtatgtagttggattttttggagtccgaaggttccatctgcanaaattgaggcccaaattgaatttggattcaagtgnattctaaatactttgcttatcttgaagagagaagcttcataangaataaacaagttgaatagagaaaacactgnttgataaanaggcnttttagtgggctttttaatgtttnctgntgtaaaacatttaanatttatttgntttttttttt

SEQ ID NO: 2337 - DNA, 562 bp, Homo sapiens
  misc_feature 131, 409, 438, 439, 453, 471, 479, 481, 484, 499, 501, 502,503, 525, 534, 536, 545: n = A,T,C or G
acgcggggaggaagaactaaatccaaagatactagctttgcagaatgctcagagaaagcgaaaaatggaacatgatggttcactttttcaagcagtaggaattggaacattattacagcagccagacgatnatgcagctactacatcactttcttggaaacgtgtaaaaggatgcaaatctagtgaacagaatggaatggagcaaaagacaattattttaataccctctgatttagcatgtagactgctggggcaatcaatggatgaaagtggattaccacagctgaccagttatgattgtgaagttaatgctcctatacaaggcagcagaaacctactgcagggtgaagaattactcagagctttggatcaagttaactgagctttttcttaatttcattcctttttntaggacactggtggctcctacctaaagcnngctatttatatttnctacatcctaattcagancccggctncnatncttgccaaacttggntnnncaatttttgatcccctttctantttaattcncnttcaatgcncttttttagatggcctt

SEQ ID NO: 2338 - DNA, 204 bp, Homo sapiens
  misc_feature 163, 192: n = A,T,C or G
accactcacgatgctggtgaccccagctgctgttgccaaaccttgaccagcggtggagagcagcaggcttcctcctcctgttgctggggcaagggctaaacccaggaggctcatcactccaaagatgacagcagtagaggcggccaccatgttaaccttggtnaatttcttgtgggtctttgtcaatatctntatgttagggca

SEQ ID NO: 2339 - DNA, 336 bp, Homo sapiens
  misc_feature 309, 336: n = A,T,C or G
cgccgggcaggacttacttggagagacatatgtctgaatttatggagtgtaatttaaatgaactagttaaacatggtctgcgtgccttaagagagacgcttcctgcagaacaggacctgactacaaagaatgtttccattggaattgttggtaaagacttggagtttacaatctatgatgatgatgatgtgtctccattcctggaaggtcttgaagaaagaccacagagaaaggcacagcctgctcaacctgctgatgaacctgcagaaaaggctgatgaaccaatggaacattaagtgataagccagnctatatattgtattatcaaatatgtan

SEQ ID NO: 2340 - DNA, 598 bp, Homo sapiens
  misc_feature 492, 509, 543, 560, 568, 581: n = A,T,C or G
acgcgggattcactaaaaccatgtgtctgaactgaagaagcttgggctcacttccacaaattaggtagccttgtcagatgatatgcaaatgattcacatcagtgtttgaagttcaaaccaaggaaaactgtggaaaaatgctaatcactgaaagaaaacattttcggtcaggaagaattgcacaaagtatgtctgaagcaaatttgattgacatggaagctggaaaactctcaaaaagttgcaatattacagaatgccaggacccagacttgcttcacaattggccggatgctttcacccttcgtggtaataatgcttccaaagttgcaaatccattctggaatcaactgtctgcttctaacccatttttggatgacataactcaactaagaaataacaggaagagaaataatatttccatcttaaaggaagatccttttcttttctgtagagaaatagaaaatggaaattcttttgattcctccggtgatnaacttgatgcgcatcanttacttaggcaacttcctcaagaaattctggaanatctaaaagtgtttcanaacttctngactttttagacnaccagcccatgcccctt

SEQ ID NO: 2341 - DNA, 402 bp, Homo sapiens
  misc_feature 116, 320, 323, 331, 332, 340, 346, 347, 348, 359, 368, 381,382, 402: n = A,T,C or G
actacctgatggatgctgcctccttgctgcctgttctggccctcggcctgcagcctggggacatcgtgcttgacctatgtgcagctcctgggggaaagacactagcgttgcttcanactggctgttgccgcaatcttgctgccaatgatctctccccgtcccgaatagccagactacagaagatccttcacagctatgtgcctgaagagatcagggatggaaatcaagttcgagttacctcatgggatggcaggaaatggggagaactggagggggacacctatgaccgggtgctggtggatgtgccctgtacttttttnttntttttttnngtatttcnaaaatnnnaacacacctgngaggctgtnaacctcccaaaanngtaagcaaaatatgggggtn

SEQ ID NO: 2342 - DNA, 569 bp, Homo sapiens
  misc_feature 467, 479, 511, 514, 534, 537, 544, 548, 564: n = A,T,C or G
acattagcaccataacatgcgtctttaaagccttcccaaatattaagtaatcttgaccagcaatgacaagaaaaaagaggagcacctttacaagcagttgatatccaatattaaaataattgtggctttaaaaatatttctttaaattcttgcattacacttttctttttaaaccaatcttccaggagattaatcaatgaaatttataagttttatcaaccgtataaaatttttttcatcttctgggactcatagaatacaatctgtgtttctgaccagttgaggtagttaaaatagggagggcttttctaatttcgtatttgactatttcagaaagaaaggttatcttttactggtgagcacagtcattgctctgcagatgggctaggattcaaagaatataacacagtgttgttataataaagagtgttgaagtttatttattatagcaccattggagacatttngaaattggaatnggtaaaaaaataaaacaaaaagcatttgaatnggntttggtggaacagccaaaanaangagaagntcanttttctttgcaaattntactg

SEQ ID NO: 2343 - DNA, 619 bp, Homo sapiens
  misc_feature 462, 521, 524, 525, 543, 554, 556, 579, 586, 594, 612: n = A,T,C or G
acgcgggctatttgaagatatgactgattctgactgtagagataatgcaccccggaccatatttattataagtatgtataaagatagccagcctagaggtatggctgtaactatctctgtgaagtgtgagaaaatttcaactctctcctgtgagaacaaaattatttcctttaaggaaatgaatcctcctgataacatcaaggatacaaaaagtgacatcatattctttcagagaagtgtcccaggacatgataataagatgcaatttgaatcttcatcatacgaaggatactttctagcttgtgaaaaagagagagacctttttaaactcattttgaaaaaagaggatgaattgggggatagatctataatgttcactgttcaaaacgaagactagctattaaaatttcatgccgggcgcagtggctcacgcctgtaatcccagccctttgggaggctgangcgggcagatcaccagaggtcaggtgttcaagaccagcctgccaacatggtgaaacctntcnntactaaaaatacaaaaanttagctgagtntngtgacccatgccctcatcccggntactcangagctgangcaggaaaatcacttgcnctcccgg

SEQ ID NO: 2344 - DNA, 156 bp, Homo sapiens
  misc_feature 3, 18, 120, 154: n = A,T,C or G
acncgggtgatcgaccanagctaacaggtgccaaagtggtggtatctggtggtcgaggcttgaagagtggagagaactttaagttgttatatgacttggcatatcaactacatgctgcanttggtgcttcccgtgctgctgttgatgctggctntg

SEQ ID NO: 2345 - DNA, 326 bp, Homo sapiens
actaacctcattgtaatgaggtttaagagaaggcccagcactaagccaggctctcaggaaaattcaaacaacagttcctctttgcccttcaatatagccccttctcatctgtcatgggctgaagaaccactggacctgtaaaccaagcacacaggtataagtccacagaccaggtgaaggcctagatggcaaaacacatgggctttgtgactccactactgacttccaggctaaggaaggactgacttagtgagctgttccaagaccactgagctcatggttccctgtggctgggacctccatcatgaccggggcttgaagagggt

SEQ ID NO: 2346 - DNA, 554 bp, Homo sapiens
  misc_feature 507, 522, 526, 529, 551: n = A,T,C or G
actgttcaaaaaggaatgccccacaagtgttaccatggcaaaactggaagagtctacaatgttacccagcatgctgttggcattgttgtaaacaaacaagttaagggcaagattcttgccaagagaattaatgtgcgtattgagcacattaagcactctaagagccgagatagcttcctgaaacgtgtgaaggaaaatgatcagaaaaagaaagaagccaaagagaaaggtactaccatgccgggccaattttttttttgtttgtagaaatgaggtcttgctatgttgcccaggctggtctcaaactcctggtctcaagtgatcctcctgcctcagcctcccgaagtgctgggataaaaggtgtgaaccaccatacccagccagtattatcttttcatttcattttccagttgagtttatattggctacatttgcataccgcacaattgttcattttttaaaaaccatattttgttttgttctgttgctacaattaaggagaattcnatgataaacttaccnccantcnggccaagtccacttgaggaatngct

SEQ ID NO: 2347 - DNA, 488 bp, Homo sapiens
  misc_feature 320, 340, 368, 388, 399, 434, 462, 472: n = A,T,C or G
acctgcatcagcattagtaatcaacctgttaatccaaggtctttagaaaaacttgaaattattcctgcaagccaattttgtccacgtgttgagatcattgctacaatgaaaaagaagggtgagaagagatgtctgaatccagaatcgaaggccatcaagaatttactgaaagcagttagcaaggaaaggtctaaaagatctccttaaaaccagaggggagcaaaatcgatgcagtgcttccaaggatggaccacacaagaggctgcctctcccatcacttccctacatggagtatatgtcaagccataattgttcttagnttgcagttacactaaaaggngaccaatcatggtcaccaaatcagctgntactactcctgtaggaaggntaatgttcatnattcctaagctattcagtaataactctaccctgcnatttaatgtaagctctctgaggggcctntggtcttaantggattgttcggccct

SEQ ID NO: 2348 - DNA, 652 bp, Homo sapiens
  misc_feature 182, 235, 321, 341, 365, 397, 419, 448, 462, 497, 502, 505,517, 553, 556, 582, 590, 597, 599, 602, 607, 608, 613, 614,617, 618, 621, 625, 626, 630, 633, 637, 640, 645: n = A,T,C or G
acgcggggcttgtccagtgaaacaccctcggctgggaagtcagttcgttctctcctctcctctcttcttgtttgaacatggtgcggactaaagcagacagtgttccaggcacttacagaaaagtggtggctgctcgagcccccagaaaggtgcttggttcttccacctctgccactaattcnacatcaagttcatcgaggaaagctgaaaataaatatgcaggagggaacccctntttgcgtgcgcccaactcccaagtggcaaaaaggaattggagaattctttaggttgtcccctaaagattctgaaaaagagaatcanattcctgaagaggcaggaanctgtggcttaggaaaaagcaaaanagaaaagcattgtcctttgcaacctgatcacncaaatgatgaaaaaagaatagnactttctcattcatcttggataacgtctncttgtttaccctgntattctagaatgtaaaattacataaatgtgtttgntccantancttttgtgaacnaggctttattaaaaaatttaggtttaattaaaaatnttnaaaaagttattgtgaaatttgaaaantttgtaanactaatntnggnacttnncttannttnnaanatanngatnggntggngtnctttnaccaaat

SEQ ID NO: 2349 - DNA, 651 bp, Homo sapiens
  misc_feature 256, 258, 385, 417, 439, 450, 452, 489, 539, 567, 587, 598,637: n = A,T,C or G
acgcgggattgcagcttcaacttttctctttagtgttctgtttgaaactaatacttaccgagtcagactttgtgttcatttcatttcagggtcttggctgcctgtgggcttccccaggtggcctggaggtgggcaaagggaagtaacagacacacgatgttgtcaaggatggttttgggactagaggctcagtggtgggagagatccctgcagaacccaccaaccagaacgtggtttgcctgaggctgtaactgananaaagattctggggctgtgttatgaaaatatagacattctcacataagcccagttcatcaccatttcctcctttacctttcagtgcagtttcttttcacattaggctgttggttcaaacttttggganacggactgtcagttctctgggaaagtggtcancgcatctgcagggcttctcctnctctgctttgnanaaccagggctcttctcaggggctctagggactaccangctgtttcaacccaggaaggccaaaatcaagaagttgagatgtagaaaanttgtaaaatagaaaaagtggaagttggngaatcggttgttctttcctncatttgggatnattggcataaaggtttttaacattttcctccttttcttnaccctccccttttt

SEQ ID NO: 2350 - DNA, 523 bp, Homo sapiens
  misc_feature 303, 315, 347, 364, 370, 373, 377, 387, 400, 405, 430, 446,451, 458, 460, 479, 485, 486, 503, 506, 512, 514: n = A,T,C or G
accttggcttggctcttgacgtggacagaattaaaaaggaccaagaagaggaagaagaccaaggcccaccatgccccaggctcagcagggagctgctggaggtagtagagcctgaagtcttgcaggactcactggatagatgttattcaactccttccagttgtcttgaacagcctgactcctgccagccctatggaagttcctttatgcattggaggaaaaacatgttggcttttcttcttggacgtgggagaaattgaaaagaaggggaaggggaagaaaagaaggggaagaaagatccantgaaggaaagangaaggggaagaaaagaaggggaagaagatcanaacccaccttgccccangcttancangganctgctggatnaagaaagggcctnaaatnttgcaggactcacttggatagattnttttcaactccttcanggtgncttgaantnctggctcattccaccctanaagaanntgcttttatgtatttgnacnacaccntnttggctttg

SEQ ID NO: 2351 - DNA, 215 bp, Homo sapiens
  misc_feature 18, 60, 157, 166, 168, 172, 174, 183, 193, 210: n = A,T,C or G
acgaagaaagcatttccnaagcaatgagtctcttaatggaaaaaataaaagagcaatgtnattaaactttccctcaaagaaaggaaagaaacctaaatctgttatggcaaatttggaaagataaatatttcctagtcccataatatgtgtttgtctnacaaagatntncctntnatgatgcanattctatgangcaggggatcttgtggnaattc

SEQ ID NO: 2352 - DNA, 599 bp, Homo sapiens
  misc_feature 303, 306, 322, 349, 418, 455, 460, 461, 467, 476, 483, 492,495, 499, 501, 503, 513, 530, 539, 541, 544, 557, 564, 566,573, 577, 584: n = A,T,C or G
acaaaaatacagttgatgacttgacaaaatggctacacctagggcttgaaggtttgagtttctccaacagtaacaagggaaagcatgcttccacctggagccgagtccaagcacacagccagtcctgcacacgcatgcgtgcaaacagggaagctcaagcatgagaagaggaaagaggctgtagaaatttgggaagaagcccacaattattcccaggagaaaaaagggaaaaaacaggctgatatccttggtagggggtagaataactgatttacacttaggatttattgttattgttgttgntgntgtttttaatgataanctacttctgcaattttaaccgttgtanaaaagatgctactagtctcctttcaccactaaggtgagtaaagtgggaggaaatgggaaaagactcaantcttaagtgcgaggagttaacattcaagtggctcaanttttnntgtcanaaggtttantctttanattcattgncangttngncntttaaggtgnaagggaaaaggaaaaanaaattcttncnctntctcgtggatccntaaagtncngaaccancttnttgttangataactcttccaaa

SEQ ID NO: 2353 - DNA, 545 bp, Homo sapiens
  misc_feature 20, 301, 394, 406, 468, 479, 494, 498, 500, 505, 525, 526,532, 533, 536, 543: n = A,T,C or G
acatagacaagtttcttgtnagacagaaaacagagaaatccacagtaactctaacacatcccttaaggaataagcatgtatttgtaggaagcaaacaaagctttccatagagaaaccactttcacaggatgattaggtggacctgcaatgaagaaaatacatttcaaaagatgggttcagacttacaccaagttttcactgaaatacttaaaaaaaaaagacccttctctgtatcaaaagaattaaaaaaaatacatcacggataaaataaatctcaggaaaggtccaagtcctactcagnagacatacatttgcaaattaatataaattttaaagtttgacaacaaaaatactatttggaactacctagaataggccaagctaagttcggtgntctgctttagtngcattacattgaaatgaatctcattctcactataatttttttctttttactttaatcacccngcgggctgggncacctgaaatggacntaananctttntaaatgtcagagaaatatgnnaacctnnttnatgtttnca

SEQ ID NO: 2354 - DNA, 653 bp, Homo sapiens
  misc_feature 377, 413, 425, 440, 481, 486, 523, 553, 561, 571, 573, 591,599, 625, 645, 646, 647: n = A,T,C or G
acgcgggggcgggagaatcgcttgagcccgggaggtggaggttgcagtaagccaacaccgtgccactgcactacagcctgggcgacaggctgataggaagatgtcttcaggaaatgctaaaattgggcaccctgcccccaacttcaaagccacagctgttatgccagatggtcagtttaaagatatcagcctgtctgactacaaaggaaaatatgttgtgttcttcttttaccctcttgacttcacctttgtgtgccccacggagatcattgctttcagtgatagggcaaaagaatttaagaaactcaactgccaagtgattggtgcttctgtggattctcacttctgtcatctacgcatgggtcaatacacctaanaaacaaggaggactgggacccatgaacattcctttngtatcaaacccngaagcgcaccattgntcaggattatggggtcttaaagggctgatgaaggcatctcnttcangggcctttttatcatttgatgataagggtattttcgnaaatcactgtaaatgacctcctggttgccnctcttgtngatgaaactntnaaaatattttcagccttncagttcantgacaaaacatggggaaattgtgccnaccttggcttggaaacctgnnntgatac

SEQ ID NO: 2355 - DNA, 652 bp, Homo sapiens
  misc_feature 409, 456, 556, 567, 569, 573, 580, 595, 606, 607, 623, 626,637, 650, 651: n = A,T,C or G
acccgacctccatcttcaccaagaaatgttatctctaatataaacgagacctcagttatcctggactggagttggcccctggacacaggaggccggaaagatgttaccttcaacatcatatgtaaaaaatgtgggtggaatataaaacagtgtgagccatgcagcccaaatgtccgcttcctccctcgacagtttggactcaccaacaccacggtgacagtgacagaccttctggcacatactaactacacctttgagattgatgccgttaatggggtgtcagagctgagctccccaccaagacagtttgctgcggtcagcatcacaactaatcaggctgctccatcacctgtcctgacgattaagaaaagatcggacctccagaaatagcatctctttgtcctggcangacctgaacatcctaatgggatcatattggactacgaggtcaaattnctatgaaaagcaggaacaagaaacaagttataccattcttgagggcaagaggcacaaattgttaccatcagtagcctcaagcctgacactatataccgtnttctaaatccnancccnaacagcngctggatttgggacnaacagccccanntttgagtttgaaactngtncaaaatttttnttcattttttggnna

SEQ ID NO: 2356 - DNA, 207 bp, Homo sapiens
  misc_feature 98, 168, 192, 195, 200: n = A,T,C or G
acgcggggagtgtgaaatcttcagagaagaatttctctttagttctttgcaagaaggtagagataaagacactttttcaaaaatggcaatggtatcanaattcctcaagcaggcctggtttattgaaaatgaagagcaggaatatgttcaaactgtgaagttatccanaggtggtcccggatcatcggtganccnctatnctacctt

SEQ ID NO: 2357 - DNA, 651 bp, Homo sapiens
  misc_feature 549, 571, 577, 588, 618, 622, 627, 632, 643, 646: n = A,T,C or G
actcttgatgaaagaccgtgaaaccaacaaatcaagaggatttgcttttgtcacctttgaaagcccagcagacgctaaggatgcagccagagacatgaatggaaagtcattagatggaaaagccatcaaggtggaacaagccaccaaaccatcatttgaaagtggtagacgtggaccgcctccacctccaagaagtagaggccctccaagaggtcttagaggtggaagaggaggaagtggaggaaccaggggacctccctcacggggaggacacatggatgacggtggatattccatgaattttaacatgagttcttccaggggaccactcccagtaaaaagaggaccaccaccaagaagtgggggtcctcctcctaagagatctgcaccttcaggaccagttcgcagtacagtggaatgggaggaagagctcctgttcacgttggaaaaaatagttatggaggtcccctcgaagggaaccgctgccctctcgtagagatgtttatttgtccccaaagaaatgatgggttttctacttaaagacagctnttcaagcagaaatttacccaanttctcntgatctaaganattatgccccccccccacgagattttcttncggngattntggtntttccagtttncgntgatg

SEQ ID NO: 2358 - DNA, 276 bp, Homo sapiens
  misc_feature 135, 149, 151, 215, 237, 249, 262, 276: n = A,T,C or G
acgcggggctcttcctgctctccatcatggcgcaggatcaaggtgaaaaggagaaccccatgcgggaacttcgcatccgcaaactctgtctcaacatctgtgttggggagggtggagacagactgacgcgagcanccaaggtgttggancngctcacagggcagacccctgtgtttttcaaagctagatacactgtcagatcctttggcatccgnagaaatgaaaagattgctgtcnctgcacagttcnaggggccaaggcngaagaaatctttgn

SEQ ID NO: 2359 - DNA, 525 bp, Homo sapiens
  misc_feature 476, 502: n = A,T,C or G
actggccctcagtgctggcaaaggtgtagttccactggccgagggaatcaagacatagtggtccttctgctaagccaagggctgccacaatgacacagtagccagatcctgcaattccaatgagagcagccaatacagaagaaagcatcgcacatcgtttgccacagttttcatggccacagcagccacagcagtcatcctgttccagcccaatgaagacaaatgctggcaggagcatcagcaggccacctcctacgatgccagaaaagaaccacacgaagcggctgaggtggttttcggaggcatactttgtttccccattgggaaagtaaagcaaaatattagccgcgatgcacaggagggcgagccccaccagagaatgtccgatgcatcgtgcacacttcccatagcacatggtggtctgctaggttttctccccttctctttgtcttcagctcagtgataccccaaattanatgaaaagtgtgcccttctggtgganaaagcaaacaccactccccgcgt

SEQ ID NO: 2360 - DNA, 218 bp, Homo sapiens
  misc_feature 212: n = A,T,C or G
acatcaagtcagaatgatgttgacatgagttggattcctcaggaaacattgaatcaaatcaataaagcttcaccaagaaggttgcccaggaaacgggcacagaagagatcagtgggatctgatgagtaaatgttcctttgtgcaacaattcgggctttacttaaccctgccctaaatatttttcggcctgatgggattgagtgctagagaanccatgt

SEQ ID NO: 2361 - DNA, 417 bp, Homo sapiens
  misc_feature 298, 308, 341, 398, 411, 415: n = A,T,C or G
accggaaaggaagctcccattcaaaggaaatttatcttaagatactgtaaatgatactaattttttgtccatttgaaatatataagttgtgctataacaaatcatcctgtcaagtgtaaccactgtccacgtagttgaacttctgggatcaagaaagtctatttaaattgattcccatcataactggtggggcacatctaactcaactgtgaaaagacacatcacacaatcaccttgctgctgattacacggcctggggtctctgccttctccctttaccctcccgcctcccaccctncctgcaacancagccctctagcctggggggcttgttagagtanatgtgaaggtttcaggtcgcagcctgtgggactactgctaggtgtgtggggtgttantggcagcaccccnatanct

SEQ ID NO: 2362 - DNA, 653 bp, Homo sapiens
  misc_feature 33, 58, 140, 197, 241, 266, 357, 476, 513, 526, 533, 536,565, 585, 598, 614, 626, 641, 642: n = A,T,C or G
acttttttttttttttttttttttttttaattnaaatcagtagttttattacaatacncactgacacacaattggaaaaggaatgtcctgacattttctgagcatttcacggaaagcaaatgtaaccatccacgcagtanagtcatccacaccttttcctaacaaaaagcaaaagctttcacatgtgataactgaanaaagcaaagttttcttattcttgtctaaaaaacttcagtctcanaaaatagttattgaagtgagctganaaggagcacatttccttcacaatgtccaaaatcctgcctctagattatccccctgaccttctaaatgacttttataatactgcagatggtnttatgttcaggggccaaatgggatctactttaaggccaactactctattgtcactataattgaaaggaaagaataaattaagaaaattaagtcctgctaaaatgcacaaagacttgaanaaaattctgggtgtattaaaagtgagatgctcttttnacgtaactcattngaaaggnttncaattaccataaacattttaactcccttnaaagatcattggcaaaaacnttgtttccttttntgcaaaagggctttgnctttccacaagnttgggaggggaagcnncccaccgggga

SEQ ID NO: 2363 - DNA, 628 bp, Homo sapiens
  misc_feature 269, 463, 506, 530, 550, 566, 583, 585, 592, 597, 598, 613: n = A,T,C or G
acttgccccttccccagaaaagcgggacttgctgctaagggtgaaggaccaaggcagttgtccctgcgtggtctgacacccttgaaacgtgggtgtataatcagagaggcatccctgcaatgattaaacaccaagggaaggctgccttcccagtctgtgaccagcgccggagttttgggtccacggataaaacgtgtctcttttgtctctaccagaaaatgaaaggaattgaaattaagagaagggagagattgaagtgtagtgccaanattgaaaggagaaagtggttgagggatagtgagggaagttggggaagagagtaaaaagaggctgcttccagatttgaaattggtgagatgtttcttgggctcgtcggtctgaggacctgaggtcgtaggtggatctttctcagggaacaaagagcaggaggacggaggattgatctcccaagggaggtcccccnatccgattcatggcccaaatttcatgtgccttcatgtgaaganaccaccaaacaggctttgtgtgancaacatggcttgtttatttnacctggggtgcaggcnggcttaattccgaaaananagttaanccccnngtactttgggccganacacgcttaggggcc

SEQ ID NO: 2364 - DNA, 232 bp, Homo sapiens
  misc_feature 147, 172, 175, 177, 190, 195, 196, 206, 208, 212, 215, 221,222, 230: n = A,T,C or G
acaccttgaaggcgaggttaattaaatcctgttgtggagtttgagggccggaatttaatttttggagttttatttaatatcgggagcagattgggtaataaaatgtatattgagaataagacggccttttgacctttaagggtctanaggctgtaaagtgtctcagggttantancnaacaaaccatganctggnntgggattttntnactnganaaaaannaggcttgntt

SEQ ID NO: 2365 - DNA, 634 bp, Homo sapiens
  misc_feature 384, 442, 504, 507, 510, 553, 590, 594, 600, 605, 613: n = A,T,C or G
acgcgggggaggagactatacaactacaatagaagcatttatatctgctagtggaagagctatccagggaggaacatcacatcatttagggcagaatttttccaaaatgtttgaaatcgtttttgaagatccaaagataccaggagagaagcaatttgcctatcaaaactcctggggcctgacaactcgaactattggtgttatgaccatggttcatggggacaacatgggtttagtattaccaccccgtgtagcatgtgttcaggtggtgattattccttgtggcattaccaatgcactttctgaagaagacaaagaagcgctgattgcaaaatgcaatgattatcgaaggcgattactcagtgttaacatcccgcgttagancttgatttacgagataattattctccaggttgggaaattcaatcactgggagctcaanggagttcccattagacttgaagttggccacgttgatatgaaagagctgtcagtttgtacccntcnacnagatacttggagaaaagctgacagttgcttgaaaatgaggcanaaactaaactttctagcttttttggaagacatccagncacnctttanacaanggcttctnaaaaccttaaacttattggtt

SEQ ID NO: 2366 - DNA, 654 bp, Homo sapiens
  misc_feature 268, 286, 296, 336, 374, 416, 420, 427, 449, 464, 468, 476,497, 502, 504, 508, 517, 518, 533, 534, 539, 541, 543, 551,552, 554, 567, 580, 584, 594, 595, 605, 610, 611, 612, 615,623, 631, 632, 635, 640, 648, 652: n = A,T,C or G
acactagaggctttggtaaaacatcttctctccagagggtgaagataaataaaccttacagagattcagaagtggccactgcagtgaagttttacaggtctagtggttaggggcatccaggggtgtcccttccaatgtgaaagacaaactgttgcatcttgcatcctcatgcaaggaaggaagcacactgcctggtgagcctgtttgagttctgacatcacattctacatgtaggtgtattgctttgcccacactctaggtgacatangaggatgccagctttgantggagcctcncaggaaaggacactgcagccagatccaggccatggcgcantcaccatccttcagaccccctggtgctgaaagtgccantggtggggtaaaatttggggtggacctaaccaaacaccattngganagtccantggagggcctgggattctgganttaggccatgttatnccanagcacaanaattatgcccatccaaaagcngaaanantatntggggaacnnctttttgccttgttnntggangncntgataaannanaatgcttgaccgngggacccaaaacnaccnttgtattccnngttgccctanaattnnnctntggtaatnttgaaatnnttnttggnctggccanaacnat

SEQ ID NO: 2367 - DNA, 502 bp, Homo sapiens
  misc_feature 284, 318, 327, 360, 367, 369, 388, 425, 450, 452, 462, 467,470, 479, 489, 493: n = A,T,C or G
acccaaaggaagaaggtctgccctgccttctataaacacatgcatgtggctccgtcctcccaagacatcattgcagacaagaattagtgcagagttgctcagaggctgtttgctcagcaactaaagccaatctgacggcagccaatccaggtctgggcttactccctggtttggtaactggccaaatagaattcaacccaaattcaactcaacttaaaagcgtctgttgggtctgtgtgccaggcccttgctgatagaagacacaaacaaagagtgtgacaacnatccctgccctcaaggaaacgctctgcgtcttcnccttaagcnacaagacaacccacccgcaaaaaaattacttgnttcccangnatttcttccagggcaaggnttgtaaaatgtgcatgccacacttgttgagtctcaanaagctccagatgcgtgtgtcctggncnagcaatctgntcatnaangggcaatgnggctgatccnttgntttggccct

SEQ ID NO: 2368 - DNA, 433 bp, Homo sapiens
  misc_feature 255, 294, 316, 343, 359, 374, 391, 408, 411, 426: n = A,T,C or G
acgcgggggttgctgtaaggggtcctccctgcgccacacggccgtcgccatggtgaagctgagcaaagaggccaagcagagactacagcagctcttcaaggggagccagtttgccattcgctggggctttatccctcttgtgatttacctgggatttaagaggggtgcagatcccggaatgcctgaaccaactgttttgagcctactttggggataaaggattatttggtcttctggatttggaggcaatcagcnggacagcatggaagatgtgtgctctggctcggataaganatgggacatcatcattcactanttggatggcacaaggctttcaaaaacncatctgtaggcaaaantggaacttgcacctncccgggccggcccctcnaaaggggcgaatttcanccnacttggcggccgttnctaagtg

SEQ ID NO: 2369 - DNA, 341 bp, Homo sapiens
  misc_feature 111, 179, 211, 237, 246, 250, 274, 278, 281, 286, 288, 312,335: n = A,T,C or G
acactaacttttaagtgtgtggcacaaatggaatagagacatgaagtttaatgagatccaagcttccaactaaatgatttcacatttgaaaagctatggaaagatacaatnatttactgttttacaaatcaaatgcttaaaccaagtttaaaagttgagaccgaaaaaaattgatgaanaaaaaatggccaaaaaaattaaacaaaatctnttggtttcctttacaggttacttttnttgcgtttnattnttttttcaaatttgcattttacanttanaantgcanancactttggattagctattggatcnaatacttttggggttcccctgcntctaaa

SEQ ID NO: 2370 - DNA, 654 bp, Homo sapiens
  misc_feature 20, 273, 302, 311, 312, 319, 320, 325, 336, 338, 341, 342,348, 369, 397, 502, 505, 537, 567, 572, 603, 616, 629, 650: n = A,T,C or G
acactgaaaactggacattntaacattaattttattagctctctgggagtgagctacatgatgttgtgcactgaaaattacccaaatgttctcgccttctctttcctggatgagcttcagaaggagttcattactacttataacatgatgaagacaaatactgctgtcagaccatactgtttcattgaatttgataacttcattcagaggaccaagcagcgatataataatcccaggtctctttcaacaaagataaatctttctgacatgcanacgggaatcaagctgaaggcctcctatcnaatttccanngccaacnnggggntcacccattgnantcnntcaccnttttttgttgactgaaaaggngctggtaaaatttcttctgtcaccagcnactggaccagcaactctgtcagggattgtaggatttatccttagtcttttatgtggagctctgaatttaattcgaggctttcatgctatagaaagtctcctgcanagngatgggtgatgattttaatttacatcattgcnttttttccttggaacaacagcctgcctttncaagnggtatttacttgtctactacaccggcttggnggaatggcaaatntttttgacctttnggcttaatctgctattgcaanatgg

SEQ ID NO: 2371 - DNA, 574 bp, Homo sapiens
  misc_feature 311, 346, 392, 416, 466, 468, 498, 536, 559, 564, 567, 572: n = A,T,C or G
actaggctaactagaaggatctcatccccatatgtggtctcatttcaagtctatggatgactaccttcattgctgtgtgcgagatggtttcaccccttgaaaatatggtcacttcagcataaaatagttaaatctttataatgatcaattcatcctacctccttttacatgcagctgaaaaatgacaggctagggacatagaatattgtgaactttatactgttagaatcactgtccattaaatgatcactagctaatggtcactaaatttacaaattaaggaaattatatatagaatactgcaaaacacnagtaaaaagactgaagttcgcccatttctgctcanggaagtctcttcactcctaagcttcatattgttggccttctggctncaaaaattctgctattattactgnttttcctccttttgatcttccttttggttccccagtgccagaacttccananccttcttcgctcaaatgccatctttttgtntccatttcaaaacagcttcaagtgatgccttgtggaanaaaaggatgcttccctgtctaanatttnctncttgntt

SEQ ID NO: 2372 - DNA, 431 bp, Homo sapiens
  misc_feature 276: n = A,T,C or G
acgcggggcttacaagtccttcttgatcctgaactgggttaggtgccgctgttgctgctcgtgttgaatctagaaccgtagccagacatgggactggaggacgagcaaaagatgcttaccgaatccggagatcctgaggaggaggaagaggaagaggaggaattagtggatcccctaacaacagtgagagagcaatgcgagcagttggagaaatgtgtaaaggcccgggagcggctagagctctgtgatgagcgtgtatcctctcgatcacatcanaagaggattgcacggaggagctctttgacttcttgcatgcaagggaccattgcgtggcccacaaactctttacaacttgaaataaatgtgtggacttaattcaccccagtcttcatcatctgggcatcagaatatttccttatggttttggatgt

SEQ ID NO: 2373 - DNA, 482 bp, Homo sapiens
  misc_feature 338, 341, 429, 437, 444, 468: n = A,T,C or G
acaatgcctgccatcatgggtcagaaatttgaaggatgaagaaatctactgtttgaaatcctcacctttcagacgtattttctttattcacatcccaggagcatccattttaaggaactattctttggaaaaaaacaaaaaacaaaaaaaacaacaaaaaaagctaagttataagtgaactgtttggctgcactgtatgtcacttttgcttgttgtcatgtgaacttggaaactaaggttactcgtgtgcataaaaattctaaatgaaagggtgtgggtttccatcaatctgatgctgcccatcgcttgcactggggtctttgtggatcgggcagganttntcagtgtgctggggtgttgctccttcctatgtgtcttttgaatctgaggctgacattttgcttggaaggccaacccttgctccatcanagagggcnagtggcnaaaggccaatgaggcagctgtganttggacagggttca

SEQ ID NO: 2374 - DNA, 312 bp, Homo sapiens
  misc_feature 172, 184, 225, 265, 269, 276, 289, 293, 295, 298, 306: n = A,T,C or G
acagaaactggtatttttggtgctgatacaagagaaatgtatttttaaatatcccacatcctggatctttgttgggtatttagtatattgacatatatttttataaggtgaggtaactcagaacttaatttaaaagtcttaaatattctgatacaattcagctgtcttctcnaccttaccatangccagttgctttcattttaaaccaaagcaagtaacatattnagtgacttgaatcttcataagtttaaaagtaaaaacagcnaaanaacctantctttgtcttttnaacncngancattttcnaggaaa

SEQ ID NO: 2375 - DNA, 348 bp, Homo sapiens
  misc_feature 185, 218, 263, 265, 274, 286, 293, 295, 302, 307, 318, 337,342: n = A,T,C or G
acctgttattgaatcaacagagactatagaggctaaggctgcccttaaacagttgcaggaaatttttgagaactacaaaaaagaaaaagcagaaaatgaaaaaatacaaaatgagcagcttgagaaacttcaagaacaagttacagatttgcgatcacaaaataccaaaatttctacccagctanattttgcttctaaacgttatgaaatgctgcaangataattgttgaaggatatcgtcgataaataacatccttcttganangaaattaanaaactcgctgcnacaactnanaaagcangaacngattatcaatncgatgactcaagatttganagggncaaatg

SEQ ID NO: 2376 - DNA, 215 bp, Homo sapiens
  misc_feature 128, 153, 155, 159, 167, 171, 172, 183, 185, 194, 197, 213: n = A,T,C or G
acactcgagatgaagatcacattgcattgatcatagaacttctggggaaggtgcctcgcaagctcattgtggcaggaaaatattccaaggaatttttcaccaaaaaaggtgacctgaaacatatcacnaatctgaaaccttggggcctttttnangttntagtgganaagnntgagtggtctnangaagaagcnatntggcttcacacattantg

SEQ ID NO: 2377 - DNA, 413 bp, Homo sapiens
  misc_feature 367, 389, 398: n = A,T,C or G
acattagcaccataacatgcgtctttaaagccttcccaaatattagtaatcttgaccagcaatgacaagaaaaaagaggagcacctttacaagcagttgatatccaatattaaaataattgtggctttaaaaatatttctttaaattcctgcattacacttttctttttaaaccaatcttccaggagattaatcaatgaaatttataagttttatcaacgtataaaatttttttcatcttctgggactcatagaatacaatctgtgtttctgaccagttgaggtagttaaaataggggagggcttttctaatttcgtatttgactatttcagaaaagaaaggttatcttttactggtgagcacagtnattggctctggagatgggctanggtttaaanaatatagcacagtgg

SEQ ID NO: 2378 - DNA, 460 bp, Homo sapiens
  misc_feature 427, 429, 431, 434, 454: n = A,T,C or G
acatggctacactgtgctctaaaattacttgcattaatgaggacattaattttagcatttaaaaaaagagatttaaaaataaccatagaaaaacttgaaaaccctgacaagccgactacaaagagaattcctctctgaaaattttcagatgcgacggtatgagggagttgggtgggctgctgactctgagagaagtcccggtgacctgaacctattccagtgaagccagtcagcagtgaatgtggggcaagtgcatgcggctggtctacagctcccattgcctggtgaccaaggagcatcctgaagtttcagagaagagacttgtgtgacagcagcattgttccagctacttgagcaagatccttcagcaggtaagaagtggcagagacagtccctgctgaaggagcgggcagggagttggccgccncncngancctggcctttccgttagggngaccct

SEQ ID NO: 2379 - DNA, 396 bp, Homo sapiens
  misc_feature 274, 288, 298, 358, 393: n = A,T,C or G
acggatgtggcagcgagaggactagatattcctgaagtcgactggattgttcagtatgaccctccggatgaccctaaggaatatattcatcgtgtgggtagaacagccagaggcctaaatgggagagggcatgccttgctcattttgcgcccagaagaattgggttttcttcgttacttgaaacaatccaaggttccattaagtgaatttgacttttcctggtctaaaatttctgacattcagtctcagcttgagaaattgattgaaaagaatnactttcttcataantcagcccagnaagcatataaagtcatacatacgagcctatgattcccattctctgaaacaagatctttantgttaataacctaaatttgcctcaggttgctctgncat

SEQ ID NO: 2380 - DNA, 455 bp, Homo sapiens
  misc_feature 110, 120, 196, 288, 293, 298, 304, 317, 325, 332, 363, 371,378, 393, 398, 408, 418, 421, 425, 438, 441, 446, 448: n = A,T,C or G
acacagctgtcagggaaagtcctgatggccacagtgaaaaaggtcatgggtggagagaagcaaagtaggaaggatcatttgaagcacaaacaaatggggaaactgagcanacaatctcantatcaccacatctgcttcaaaaatagcacaccaactcccttccaaagtgcatcgttacactgcaccatcgtggaanaaatggaagagcaggatggatttggctggctggagtcacatcttggggaagctggccaggttggcaatgccacaggcgttgttcttatttcnagccntgagngatatntactttgtttccncagttttntccccancttgtttttaatttatccagttgctttgttncccttttngattccntatcccactgcaaancccgnatggttcaanattatcgctnttncagntttcattataatncanacctntncttttaa

SEQ ID NO: 2381 - DNA, 516 bp, Homo sapiens
  misc_feature 258, 261, 289, 302, 310, 316, 317, 338, 347, 352, 391, 396,400, 401, 403, 424, 426, 427, 440, 444, 445, 450, 458, 466,470, 481, 482, 486, 487, 489, 492, 494, 511: n = A,T,C or G
acgcggggcaggcaaacctgaggtcctcagaatggcgggcacaggtttggtggctggagaggttgtggtggatgcgctgccgtattttgatcaaggttatgaagcccctggtgtgcgggaagcggctgcagcgctggtggaggaggaaactcgcagataccgacctactaaaaactacctgagctacctgacagccccggattattctgcctttgaaactgacataatgagaaatgaatttgaaagactggctgctcnacnaccaattgaattgctcatatgaaaccantatgagcttcctncccccttntttggnnaaaaaaaatgacattactggnatgcaaganatgtntaaaacaatttcttatggcccatttagagcattaagcanttaanattnnanaaatcttggaactaatgtaanannttggattgtaatncctnnaaatnttacaatnaaattttntttnatattatttgnntacnncnatnanataaaaaaaaaataaanaaaat

SEQ ID NO: 2382 - DNA, 413 bp, Homo sapiens
  misc_feature 247, 343, 352, 368, 383, 396: n = A,T,C or G
accatgaaatatccagaacatacttatatgtaaagtattatttatttgaatctacaaaaaacaacaaataatttttaaatataaggattttcctagatattgcacgggagaatatacaaatagcaaaattgaggccaagggccaagagaatatccgaactttaatttcaggaattgaatgggtttgctagaatgtgatatttgaagcatcacataaaaatgatgggacaataaattttgccataaantcaaatttagctggaaatcctgggatttttttctgttaaattctggcaaccctagtctgttagccagggatccacaaagtccttgttccactgggnctttggttnctccctttattgctanggtgggaaaaaaggntttgcccaccatnttaccttacagtgaatg

SEQ ID NO: 2383 - DNA, 530 bp, Homo sapiens
  misc_feature 148, 326, 361, 363, 400, 404, 410, 417, 418, 419, 421, 433,448, 456, 457, 465, 472, 478, 480, 489, 496, 497, 513: n = A,T,C or G
acgcggggagctctacgcctcctacgtttacctgtccatgtcttactactttgaccgcgatgatgtggctttgaagaactttgccaaatactttcttcaccaatctcatgaggagagggaacatgctgagaaactgatgaagctgtanaaccaacgaggtggccgaatctttcttcaggatatcaagaaaccagactgtgatgactgggagagcgggctgaatgcaatggagtgtgcattcatttggaaaaaaatgtgaatcagtcactactggaactgcacaaaactggccactgacaaaaatgacccccatttgtgtgacttcntttgagacacattacctgaatgagccaggtgaaancnatcaaaagaattgggtgaccacgtgaaccaacttgcncaangatggnagcgccnnnantctggctttggnggaaatattctcttntgacaagnnacaccccnggggagnacagtngntaatgaaangcttaannccttggggctattttncccataaccgtgggggt

SEQ ID NO: 2384 - DNA, 648 bp, Homo sapiens
  misc_feature 162, 216, 277, 437, 447, 449, 467, 468, 510, 513, 527, 547,575, 580, 583, 594, 601, 608, 611, 623, 626, 628, 629, 643,645, 646: n = A,T,C or G
actgttcaaaaaggaatgccccacaagtgttaccatggcaaaactggaagagtctacaatgttacccagcatgctgttggcattgttgtaaacaaacaagttaagggcaagattcttgccaagagaattaatgtgcgtattgagcacattaagcactctaanagccgagatagcttcctgaaacgtgtgaaggaaaatgatcagaaaaagaaaganccaaagagaaaggtacggaaagtggaaattcaacagagactattaattgcacaggattcanaaatcatggaaaagcagctataaggaaagaccagatggatgagaaacttatggaacctctgaaatatcttgaacaacttcctgtagcttcagataatacaccagaaaccgaagctggaaagactggcattcctcctgggggggcttttattctgggattntggggcactnanttatcatgggttttcttnnaaaacttatgggaattaagccttttgaagttcctttttttanacntgaatgatgaatgnaagaatgcatggagggactngcaaactttggataataattttattgtnttatnttnttttaaaaagngtggttnttttggnatngaatttggaaantangnntgaggaatctaaantnngg

SEQ ID NO: 2385 - DNA, 650 bp, Homo sapiens
  misc_feature 128, 260, 455, 470, 498, 553, 578, 581, 590, 593, 598, 614: n = A,T,C or G
acgcggggctcactctgcgcttcaccatggctttcattgccaagtccttctatgacctcagtgccatcagtctggatggggagaaggtagatttcaatacgttccggggcagggccgtgctgattganaatgtggcttcgctctgaggcacaaccacccgggacttcacccagctcaacgagctgcaatgccgctttcccaggcgcctggtggtccttggcttcccttgcaaccaatttggacatcaggagaactgtcanaatgaggagatcctgaacagtctcaagtatgtccgtcctgggggtggataccagcccaccttcacccttgtccaaaaatgtgaggtgaatgggcagaacgagcatcctgtcttcgcctacctgaaggacaagctcccctacccttatgatgacccattttccctcattgacccgatcccaagctcatcattttgnagccctgtgcgccgntcagatgtggcctggaacttttgaaaanttcctcatagggccgggagggagaaccctttccgacgctacagcccgcaccttcnaaccattaaacattggagcctgacntcnaaccgcctnttnaaagnttgccatatagatgtnaactgcttaaacacacaaaatcttcttactccatcc

SEQ ID NO: 2386 - DNA, 379 bp, Homo sapiens
  misc_feature 358, 365: n = A,T,C or G
acttctaattcctctattactgtgcaaatctagaatttcctatgtaaaagacagtgctggcagcatcaaagccctgtaatagtatgaaatagtgattaggatttgaaatgaagagatattatatgaagacatgtgaatgtcttaatgatggtatcatagcaacggcctcagaattcccttactgaaacagaaactaagacaaatcattattcaataatcttctgagccaaaagcctaagttggaagcaagtgataaaaacacaaaaccaaagatgcattttctatgaccatatgcaagaattttaagctttgtatcaacattctgtaccagcaccagcccctctgaaaggaaaaaggngtattcntggactgtccatct

SEQ ID NO: 2387 - DNA, 646 bp, Homo sapiens
  misc_feature 235, 239, 289, 329, 343, 346, 355, 361, 366, 387, 394, 404,405, 419, 420, 426, 428, 442, 453, 455, 462, 468, 472, 480,485, 490, 500, 502, 510, 524, 525, 530, 531, 536, 543, 544,546, 549, 555, 559, 563, 566, 571, 572, 582, 584, 586: n = A,T,C or G
  misc_feature 598, 606, 611, 613, 621, 624, 625, 629, 644, 646: n = A,T,C or G
acgcgggcaaactgtcagtgaacccgccgttattaaacgattgattagtgtcttaaacaaaagcacgggtgaagtcacaaagaaaaagcctaagtttttgactaaaggccagaatgcattggtagagctacagacacaaagaccaatagctcttgagctatataaagacttcaaagagctggggaggttcatgctacgttacggtggttctacaatagctgctggtgttgtcacntganataaaagaatgatgggtcagaaatttctaccacgtttctggatacagtgnaaatagctacctctgtttcaagaattcagtttttaagtcnaaggaacaatgtgncanttgatatgntttttngatgnagaggagaaaaaattaaagcntaaattngcctgcaaannaatttttaataatnnacctcngnaaaatatttttaantttgccaattngngaataanaagttntaantggtaaanaacanctttncctttggaancntttattantgggattttccttnncttanntttgntggggtnngntgncaaagnaagntgtnttnagatnnggactcagtnangnattgtatctctnttttgtgnccacntnccaatganatnntggnggtaagttattgtantn

SEQ ID NO: 2388 - DNA, 287 bp, Homo sapiens
accagggcaagaagccggatgtctgcccttcctcaaccagctccctcaggagtgtttgcttcaagtgatggccggtgagctgcggagagctcatggaaggcgagtgggaacccggctgcctgcctttttttctgatccagaccctcggcacctgctgcttaccaactggaaaattttatgcatcccatgaagcccagatacacaaaattccaccccatgatcaagaatcctgctccactaagaacggtgctaaagtaaaactagtttaataaaaaaaaaaaaaaagt

SEQ ID NO: 2389 - DNA, 442 bp, Homo sapiens
  misc_feature 368, 394, 406, 418, 419: n = A,T,C or G
acacatccaagcctaaagaaaaattagtctatgccatttttcttaaatggcccacatcaggacagctgttccttggccatcccaaagctattctgggggcaacagaggtgaaactactgggccatggacagccacttaactggatttctttggagcaaaatggcattatggtagaactgccacagctaaccattcatcagatgccgtgtaaatggggctgggctctagccctgactaatgtgatctaaagtgcacagagtggctgatgctgcaagttatgtctaaggctaggaactatcagggtgtctataattgtagcacatggagaaagcaaatgtaaaactggattaagaaaatttattttggcnagttcagccctttcccttttttccanttaaattttttnttaaaattaccnntgtaaccatttttaactcttcca

SEQ ID NO: 2390 - DNA, 381 bp, Homo sapiens
  misc_feature 101, 152, 164, 167, 189, 194, 213, 221, 222, 226, 245, 249,253, 265, 273, 286, 289, 292, 299, 301, 307, 310, 316, 329,333, 337, 345, 348, 359, 361, 362, 365, 370, 374, 375: n = A,T,C or G
acacaaagagggggtgggtgtcggatgcagagtgtgtggcctgatgctccacggcgtgcaggacggggggctaatagtaggtttccttctccacccagccnccagggcgtcgcctgatgatgagttttctgacttcgtcatatacgaatatnataagagagtanggnaaggctcataaccaccaggttngtttnaggggatacattctaagancaacaccnnttcnattcattattgaaaggaangcanccanagctgttttttnaaagatgnctcaaatttcatnatnttnttttttntncccttnttntaaganctatttcatcctngttnatanaaattgantanattttatctantnnttnaacantttnntgactg

SEQ ID NO: 2391 - DNA, 322 bp, Homo sapiens
  misc_feature 245, 284, 297, 318: n = A,T,C or G
actcatttacaataaaataaccaagtgaagttacaaaaggcatatattactgtgaaaagaacatacactccacattttgccgattaataatggcaatcataatttaacataataaaagaatatatatctattgcttttcatcatacttgataaatacagtatgaacaaaattttcattgtatacttttcacaagataataaataagttaaatagttttcatattgagttgtggtgcagtggtgcnaatcaactcaaaacagctaaaaaattcacagttattctncaacaattacaangtaagctctgcgcaaggcttncaga

SEQ ID NO: 2392 - DNA, 650 bp, Homo sapiens
  misc_feature 421, 485, 506, 509, 521, 543, 551, 560, 562, 569, 572, 574,602, 609, 613, 620, 635, 643: n = A,T,C or G
acagaggggtctgtttctaagtctggaacctcaacacgaggctgggatgcttcacaacgtgctctctcccactgtccagccatctttggtggtcttcccacagtgcttcccccatcctctcacactcctgtggagggaccatgggacgggccaggaggaaacctgggatcactctgacaggaaacggacaagcacagctgccaggagccagttgctctggcctcagtctccaattgttagtctcaggatcaacagagaactggaaagcagcagaatctggaggagcaggaagagagcccagagggagtgttgtgctgagtgacggttaacagatgaaacagaatttcatggagattctttgttacaaggagaaattgctcagtctcaactcccaaaacgtgaaagttgcctggtttaaganacctatgttttctttttcagctcttcaaacctccgggaaagatcatcaaagtcaatgtcttcanatgctgaggtgctggcaccancanatcagttggtantgtgtctggccaaatggcaacntctggtanggacaaaantngtcatanttntnttgcaggtcttggaaggaaactttgcanaagcttntggnttgggtnccagaaccaacaatnttgtgcanaaaaaat

SEQ ID NO: 2393 - DNA, 362 bp, Homo sapiens
  misc_feature 252, 297, 307, 320, 323, 339, 342, 349: n = A,T,C or G
acagaaaacataaatcatcgaggtggataccatggtggaagttcccgttctcgtagcagtattttccatgcaggaaaaagccaaggactacatgaaaacaacatacctgacaatgaaaccgggaggaaagaagacaagagagaacgcaaacagtttgaagctgaggattttccgtctttaaatcctgagtatgagagagaaccaaatcacaataagtctttagctgcaggtgtgtggggcctacacgcccanacacacacatcccaaccaaaaaaatctcccaagctcctctcttanaatatccttncgaatcctaaatntanagctccaaggatgctnggncattaanaaaaggtaataca

SEQ ID NO: 2394 - DNA, 647 bp, Homo sapiens
  misc_feature 375, 395, 534, 546, 582, 611, 612: n = A,T,C or G
acaaaaccatcgccatcaaaaaaacgctgttctgacaacactgaagtagaagtttctaacttggaaaataaacaaccagttgagtcgacatctgcaaaatcttgttctccaagtcctgtgtctcctcaggtgcagccacaagcagcagataccatcagtgattctgttgctgtcccggcatcactgctgggcatgaggagagggctgaactcaagattggaagcaactgcagcctcctcagttaaaacacgtatgcaaaaacttgcagagcaacggcgccgttgggataatgatgatatgacagatgacattcctgaaagctcactcttctcaccaatgccatcagaggaaaaggctgcttcccctccagacctntgctttcaaatgccatgcanccgtttaaaataattctgcaggtgaatatttattaatgagatgttgcgactatttgttaggagacatagttacaaaacagtatatatccggtttttcaaaaataattctttaaaggtctgcaagatgtatactgattgngatctttccctncttatttttgcttagctttatttaataaagcttttntacaataaacaaatgtttttggaataaannttttactttttaaaagttggcaccaggcttgttct

SEQ ID NO: 2395 - DNA, 556 bp, Homo sapiens
  misc_feature 392, 393, 398, 412, 422, 469, 470, 493, 495, 509, 517, 520,525, 534, 547: n = A,T,C or G
acacttctaagtgtgcagtgcaagagcttgtttatatttcatactttttatactttgaggaaaaaaaagtcaaagaaaaattgtatttgagggaaaaaaccatgaccaagtaaaggataaattcaaaaaatagcctcatgagacttggcatacacactcatgggattccagttattatggagtgcttccatccctctccaccccttccccccaaaaggttttctttgcaagtgcttttggaactaagagctagtatcttggattaactgatgcctgctagtgctttctgattactcgcattctgtttcttgctttaaaagaagagtaaagacaagagtgttggaccagtattgcagttctgtagtgtcatttctttaaaaaacaaaacaccnncaatnatttatcaaaattnggcatatttnaagcctacattctaataaaggcacaaattcttttttaatacttgttnnaccctctttaatctctttataantnactaattaaatctnttttcttncanacttntgcaatagnttctttaaaatcncaacaagtt

SEQ ID NO: 2396 - DNA, 442 bp, Homo sapiens
  misc_feature 184, 308, 314, 321, 365, 374, 388, 406, 416, 436: n = A,T,C or G
acgcggggaagccagctgctcggaaagctctggacagatgcagtgaaggctccttcctgctaaccacatttcctcgtcctgtgactgtggagcccatggaccagttagatgatgaagagggacttccagagaagctggttataaaaaaccagcaatttcacaaggaacgagagcagccacccanatttgcacagcctgctcctttgagtatgaatatgccatgcgctggaaggcactcattgagatggagaagcagcagcaggaccaaagtggaccgcaacatcaaggaggctcgtgagaagctgganatgganatggaanctgcacgccatgagcaccaggtcatgctaatgagacaggatttnattgaggcnccaagaaaaacttnggaggatggaagagcttncacaaccaanaggtgcaaaaacgaaagctnctggga

SEQ ID NO: 2397 - DNA, 329 bp, Homo sapiens
  misc_feature 29, 31, 41, 50, 58, 110, 163, 218, 243, 252, 261, 268, 279,305: n = A,T,C or G
acgcgggaccatggcggcggcggcggacnancggagtccanaggacgganaagacgangaagaggaggagcagttggttctggtggaattatcaggaattattgattcanacttcctctcaaaatgtgaaaataaatgcaaggttttgggcattgacactganaggcccattctgcaagtggacagctgtgtctttgctggggagtatgaagacactntagggacctgtagttatatttgaanaaaatgttnaacatgctnattcaanaggcaataatnaaacagtgctaaaatataaatgcccntccaatgaagaagcttatcttgac

SEQ ID NO: 2398 - DNA, 587 bp, Homo sapiens
  misc_feature 551: n = A,T,C or G
acgcgggcaggagaagagaaggaatttgaagagaaaaaggaaaattaaaattactaattaatttttagattcaatatttatatggagttttgaaaaataatagtggccctgaaggaataaattccagctttaaaaaccaagtctgaggaaatatttggcttcataaagtaaagagacggtttggcatttattattactttttcctgtattttatgcccataaaataagctttataaaaaccaatttcctgatggactattaaattcatcttagaataaattagtgaagaatttaattttagaataaataatccaatctgaaataattataccttctttccttgttaggtagttatgagtaaatctgcaaaaggcaatgaaaatgccttaaattttatcaataacagaattattgtatttaaaaaaaaactaatacttatctttaaaatagtaaataggattttaaacagagaattttatcagtaataggtgtcagtttttaaaaaaattgcttgtaggctgagcgcggggggctcacgcctgtaatcccancctttgggaggccaaggtgggtggaccacattgagg

SEQ ID NO: 2399 - DNA, 358 bp, Homo sapiens
  misc_feature 251, 279, 355: n = A,T,C or G
cggccgaggacgcactgaaggagacaagaaagcagcaaaggttcaaaagctgtctaagaatgaagtgctcatggtgaacataggatccctgtcaacaggagggagagttagtgctgtcaaggccgatttgggtaaaattgttttgaccaatccagtgtgcacagaggtaggagaaaaaattgcccttagccgaagagttgaaaaacactggcgtttaattggttggggtcagataagaagaggagtgacantcaagccaacagtagatgatgactgaanaataccagttaaataatacattcggatggatttggaagttggaattccttttaacaaccaaggggtttattttcanagc

SEQ ID NO: 2400 - DNA, 492 bp, Homo sapiens
  misc_feature 480: n = A,T,C or G
acgcggggatagggagcgatctccgagcgaggcggcaagatggacgcgggatttttccgcggaacaagtgcagaacaggataatcggttcagcaacaaacagaagaaactactgaagcagctgaaatttgcagaatgcctagaaaaaaaggtggacatgagcaaagtaaatttggaggttataaagccttggataacaaaaagagtaacggaaatccttgggtttgaagatgatgttgtgattgagtttatattcaaccagctggaagtgaagaatccagactccaaaatgatgcaaatcaacctgactggatttttgaatggaaaaaatgctcgagaatttatgggagaactgtggcccctgctgctaagtgcacaagaaaacatcgcgggaatcccttctgctttcctagaactgaagaaagaagaaataaaacaaagacagattgaacaagaaaaactggcatctatgaaaaagcangatgaagaccat

SEQ ID NO: 2401 - DNA, 647 bp, Homo sapiens
  misc_feature 558, 566, 569, 576, 595, 606, 609, 620, 630, 647: n = A,T,C or G
acccttggagatactggagcgcttctgcattcaggctggtgctcaccattgatggaacccttcctggacaggcggtagacaacttgtgaagtgactgtgccaggtgaattttggggttattcaccatttgacctacaggatcatgctcttttttcccagcaaatgccaactgtgagaaggcagtctgatatcctggtgtatcttctatgtcaataaaatgttcctcatcaggaatggtatcatcttcgggtaactcaaaaagaccaatcaaagactgtaataatggagtccacagtttggtatactcagtgtccatcattgggggacattctgttagtaatttggttatgccaaccgcacagatctttttctctacatttccagataccttctgaatttcaggaataataattttttccaaaaccattccaaacatttttggttgtataccatcaaatatttcttgtagtgctagtgccccatattttatgcaatacaaattaataaagactaaaaaactcttgataaaacttggttggtttggaattctgaaatctntggaatancanaatgaanatttgtttcctatatgggnaactggattanganggcatgtgctntattttctgnttaaaaaaaaaaaaccn

SEQ ID NO: 2402 - DNA, 463 bp, Homo sapiens
  misc_feature 313, 411, 430, 458: n = A,T,C or G
acggtaaattcactggcagatacaaaagcttatttgggagacagcagatctctctaagcaccgaagagtgtaggttggtttttcaattgcctcaaaaagtgctctgttgtattatacctcaggacgtcgagttcaggatgtagtttagagagcaggacataaagtagtaaattcctcatatatatcacagcaagaaaattaacctaaaaaatttaaagactaaataatctcttaacaggtaaatactaaaaaattaaattggtattcatttaaaaatatacaaactgtgccctttatactaaagtgcattcantcgtaatgtttaagcccctaaattccttctgtatgttctctaattccaaaatagtgtgtaacaatatactactaatcatcttgtctaccttaatattnccttttgggaatacagtanaatctgggctatttatcaaggtggaatntttcc

SEQ ID NO: 2403 - DNA, 590 bp, Homo sapiens
acccataaattctactttccaaaaacaggagctttttaaaagaaaaccacataacaacttttaaaaggcgctgggattcctctgcttctagatcaatgctgggctagaaaagtaaagtctgttctatcaggaatcacaagttggaactgagtattctccaaagtggaaattctagagtgtagtgtcactccaggcaaagattattcagttctcatccccagcatccacaactacctatcagaagggttaaaccaggtcaaaacagtccagcataattaggcttcatcaaacaatgtcattatgctcttctaagatgcaaataaaccaaaacaggaaatactaaaataaaaatatctgacactgccatacaaattgttagttcctttttgtatccccccttctataacattaacaaagggaatattttactgcaaagaatattttattttatacatcactagccatgaatttttgccattagttactatacaaatgctgcctaatgccattatccaaaatagcacaaccattttacgtccacaattcactttctatagttacaagtagaattttcatgatttactttaagt

SEQ ID NO: 2404 - DNA, 614 bp, Homo sapiens
  misc_feature 91, 100, 136, 173, 186, 195, 221, 295, 449, 471, 488, 491,536, 588, 604: n = A,T,C or G
acttttttttttttttttttttttttgggaactattactttatttatattactatgcttaagttacatggaaaaagacaacccagcagttntgtcccatntcaaaaaaagtttccaatcaacaccaattatgtggngacaaataactaggaatggtgacatctttgggccaanactgacaaggaanaatgggctntggtgctacggttcatctccaacaanaatatggcacaccggccagcacaagccatgctaacactgagcctttagcgctgggcacagattcggatctcttntctgaagctagcaaatcaagtgaaataactgggtttaaaaaaaaaaagtttaaaaatgaagcccaagtttaaaaaccatactcctaacattttcctttcacaattgacataaaacacactttttcactctaacagcccagatttttttccttanatagctcaccacatagctgcanacagactttggtgcctnaanaagtaaacatagggtaaaaaattaacgggcttctgcataatattntctctaccactgctgttggatggaaaattccaaattttaaaaaaaaaagaangatagaaaagaagggnttccatttta

SEQ ID NO: 2405 - DNA, 531 bp, Homo sapiens
  misc_feature 367, 399, 420, 421, 423, 433, 444, 462, 473, 481, 482, 489,510, 529: n = A,T,C or G
actcttgcttatatcatcacagagctggatgagagagagcgagaagagttctataggttaaagaaaatacaagagaagaaaacgattctaaaggaaaaatctgagaaggacttggagcaaaggagagcagctggagaggtgttggagcctgctaatcttctggctgaagagaaggacgaggatcttctatttgaataatctttcctgttctggttctttgagaaaccctaacactggcttcattttaattcacagtgtgtaggtttgatttgtgtggctatttattttttggcctaagaatttcactggttgtaaaatttacctagatgtctatttatgggattacttttgcagaatcataatttancaaccatttatcatggatgaaagagatctgtnaaacctgcccaggaacttacnnantttactttgnagaagccgttntcatactccatttacatntgtgttacacngtgatctnnttaccangccatttagggaaataccttnttaggaaagcattagcggnct

SEQ ID NO: 2406 - DNA, 647 bp, Homo sapiens
  misc_feature 543, 599, 622: n = A,T,C or G
acgcgggctgggtgcagtggctcatgcctttaatcctagcactttgggaggctgaggtgggagaattgcttgagtccagaagttcgagaccagccaggggaacatagcaagaccccatctctacaaaaaattagccaggtgtggtggtgcatgcttgtagttccagctactttggaggctgagacaggaggatctcttgagcccaggaggtcaagtctcacctaggtaatgcagcaagacccctatctctaaaaagagacagacagagagagagagtgagagagaggacacaaagcactaatatcagaaatgaaacaggtgataatctctacagattctatagccactgagtagataacaagggaatactgcaaacaactttttacgcagaaacttgacaacttaatgaaatggaccaattcctcaaaaacaacactctaccaaactcatccaagacgaattagaaaatctgcatagttctaaaaccactaaggaaaatgaagtgcataatttaaaaactcccaaaagagaaatcttcagganaaatctccaaaaattgcctggatatttctctttggtgagctttcaaaattattccnttttaacaaaacaaccgctgganaaatttggaccatccataggccaaa

SEQ ID NO: 2407 - DNA, 567 bp, Homo sapiens
  misc_feature 134: n = A,T,C or G
acgcggggcgcacagagctctcagcgccgctcccagccacagcctcccgcgcctcgctcagctccaacatggcaaaaatctccagtcctacagagactgagcggtgcatcgagtccctgattgctgtcttccanaagtatgctggaaaggatggttataactacactctctccaagacagagttcctaagcttcatgaatacagaactagctgccttcacaaagaaccagaaggaccctggtgtccttgaccgcatgatgaagaaactggacaccaacagtgatggtcagctagatttctcagaatttcttaatctgattggtggcctagctatggcttgccatgactccttcctcaaggctgtcgcttcccagaagcggacctgaggaccccttggccctggccttcaaacccaccccctttccttccagcctttctgtcatcatctccacagcccacccatcccctgagcacactaaccacctcatgcaggccccacctgccaatagtaataaagcaatgtcacttttttaaaacacaaaaaaaaaaaaaaaaaaaaaaaaaagt

SEQ ID NO: 2408 - DNA, 532 bp, Homo sapiens
  misc_feature 140, 424, 458, 480, 491, 500, 507, 509, 511: n = A,T,C or G
acagccagtgtggggatgtgatgagggccctgggccagaaccctaccaacgccgaggtgctcaaggtcctggggaaccccaagagtgatgagatgaatgtgaaggtgctggactttgagcactttctgcccatgctgcanacagtggccaagaacaaggaccagggcacctatgaggattatgtcgaaggacttcgggtgtttgacaaggaaggaaatggcaccgtcatgggtgctgaaatccggcatgttcttgtcacactgggtgagaagatgacagaggaagaagtagagatgctggtggcagggcatgaggacagcaatggttgtatcaactatgaagagctcgtcccatggtgctgaatggctgaggaccttcccagtctccccagagtccgtgcctttccctgtgtgaattttgtatntagcctaaagtttccctaggctttctttgtttancaactttccatttttgtctttnttgggatgatntttgccgtnagcattnancnaaattaactttttttttgggg

SEQ ID NO: 2409 - DNA, 648 bp, Homo sapiens
  misc_feature 436, 438, 455, 488, 530, 545, 559, 562, 571, 580, 587, 590,598, 606, 612, 622, 623, 631, 643, 648: n = A,T,C or G
acgcgggaagtcccaattatcccaaaccatatccagagaactcaaggtgtaaataccagatccggttggagaaagggttccaagtggtggtgaccttgcggagagaagattttgatgtggaagcagctgactcagcgggaaactgccttgacagtttagtttttgttgcaggagatcggcaatttggtccttactgtggtcatggattccctgggcctctaaatattgaaaccaagagtaatgctcttgatatcatcttccaaactgatctaacagggcaaaaaaagggctggaaacttcgctatcatggagatccaatgccctgccctaaggaagacactcccaattctgtttgggagcctgcgaaggcaaaatatgtctttagagatgtggtgcaaataacctgtctggatgggtttgaagttgtggagggacntnttggtgcaacatctttntattcgacttgtcaaaacaatggaaaagtggantaattccaaactgaaatgtcaaccctgtggactgtggcattncttgaatccattganaatggtaaaagttnaanaaccaaaanagcctttgnttggttntgncattccgnttaacttngggaantatcacttgnnctggtaancgggagctgggntaatn

SEQ ID NO: 2410 - DNA, 476 bp, Homo sapiens
  misc_feature 280, 284, 321, 337, 412, 427, 451, 453, 467: n = A,T,C or G
acgcggggaggcattgaggcagccagcgcaggggcttctgctgagggggcaggcggagcttgaggaaaccgcagataagtttttttctctttgaaagatagagattaatacaactacttaaaaaatatagtcaataggttactaagatattgcttagcgttaagtttttaacgtaattttaatagcttaagattttaagagaaaatatgaagacttagaagagtacatgaggaaggaaaagataaaaggtttctaaaacatgacggaggttgagatgaancttnttcatggagtaaaaaatgtatttaaaagaaaattganagaaaggactacaganccccgaattaataccaatagaagggcaatgcttttagattaaaatgaagggtgacttaaacagcttaaagtttantttaaaagttgtaangtgattaaaataatttgaaaggcnancttttaaaatatangattaaacc

SEQ ID NO: 2411 - DNA, 612 bp, Homo sapiens
  misc_feature 513, 560, 565, 567, 573, 581, 589, 602: n = A,T,C or G
acctttgtcacaatcctaacacattatcgggagcagtgtcttccataatgtataaagaacaaggtagtttttacctaccacagtgtctgtatcggagacagtgatctccatatgttacactaagggtgtaagtaattatcgggaacagtgtttcccataattttcttcatgcaatgacatcttcaaagcttgaagatcgttagtatctaacatgtatcccaactcctataattccctatcttttagttttagttgcagaaacattttgtggtcattaagcattgggtgggtaaattcaaccactgtaaaatgaaattactacaaaatttgaaatttagcttgggtttttgttacctttatggtttctccaggtcctctacttaatgagatagtagcatacatttataatgtttgctattgacaagtcattttaactttatcacattatttgcatgttacctcctataaacttagtgcggacaagttttaatccagaattgaccttttgacttnaagcagggggacttttgtatagaaaggtttgggggctgtgggggaangaaantnccctgnaggtcttnacacgttntgcctcccattcntggtgatcaa

SEQ ID NO: 2412 - DNA, 648 bp, Homo sapiens
  misc_feature 618, 643: n = A,T,C or G
actgctaaagataaaatacagggagaaaataacttgttagcaatagatccccattgtttatatatataggtcttgttcataatatgtcaattatgtattgttaaaaagtcctactcacttttcaaatatgtgttacatggtaatgtttgtcattgttgttttaaagttgcatttgacatttgttctccaaagagtgtttgaacagattttgataacagtgcatacaccttttgtctttttttgctccagcattttatttttagcacagcagctgtggagcttttgctgataattttattgttggtatcttagaatactgttcgtctgacagtttattcttccatacttgtctcccaagttaaaacagagcaaaacagataaattattttgagaatcatcacaaaagggagttagaacttgtgagactaaaactataatttcctaaatgtgactaatgaaccccaaactgtcactattacattcagtgccatatttatctttcaaaacagtatttgtttcaccctaaccatctttggctgaatgaaaggcagttgaaaaccatcttttggtcatacataatataattatattaaaagtaaagatcggggctgggcgcantggctcacacctgcaatcccaccancactt

SEQ ID NO: 2413 - DNA, 563 bp, Homo sapiens
  misc_feature 251, 314, 386, 440, 483, 522, 530, 559: n = A,T,C or G
acgcgggatgaaaatatagacattctcacataagcccagttcatcaccatttcctcctttacctttcagtgcagtttcttttcacattaggctgttggttcaaacttttgggagcacggactgtcagttctctgggaagtggtcagcgcatcctgcagggcttctcctcctctgtcttttggagaaccagggctcttctcaggggctctagggactgccaggctgtttcagccaggaaggccaaaatcaanagtgagatgtagaaagttgtaaaatagaaaaagtggagttggtgaatcggttgttctttcctnacatttggatgattgtcataaggtttttagcatgttcctccttttcttcaccctccccttttttcttctatnaatcaagagaaacttcaaagttaatgggatggtcggatctcacaggctagaganctcgtttcacctccaagcatttcatgaaaaaagctgcttcttnatttaatcatacaaactctcaccatgatgtgaagagttncacaaatnctttcaaaataaaaagtaattgacttatnaaaa

SEQ ID NO: 2414 - DNA, 266 bp, Homo sapiens
  misc_feature 162, 164, 174, 229, 247, 263: n = A,T,C or G
actttgcctacggcagcagcctgctgacagagaggatccacctccgaaacccctcggcggcgttcttctgtgtggcccgcctgcaggattttaagcttgactttggcaattcccaaggcaaaacaagtcaaacttggcatggagggatagccaccatttttnanagtcctggcnatgaagtgtggggagtagtatggaaaaatgaacaaaagcaatttaaattctctgnatgagcaagaaggggttnaaagtggaatgtatgnctt

SEQ ID NO: 2415 - DNA, 578 bp, Homo sapiens
  misc_feature 478, 480, 486, 490, 515, 519, 543, 577: n = A,T,C or G
acacgttcttgttgtctggctcggcaacaaacaccacttcctggccagtcttctggttatggagtcggacaaatgtctggtgaggagtgagttcagcaccagtgttcacatctaccagctggaagaacaaggcgaagttctggtggctgtctgcgatgaatgtgcccttggctttggctgggtatgtcacccgggtagttttgggtgcaatgctctgatccttatccacggtggaaagatcaacatttgtgatgccaacttcagtggagatcttgactctgagctctacggtatttgcaatataccggttgtcaccttcaacttcgacaaggaagtcataataaccactggaaaatttgacgttcatgaaatttagttcaaaaacatcccctacaggggtgaaggatgtcttctggaggacagtggctctggaagcaacagatttagcatgttctagtttaacagtggcctgagtcanangctganacanaacattggtgacttgcaaccgcaanatancctgttcatgaatgtcggaagcanaaccctaagcacaaccacaactggcacgtggtanc

SEQ ID NO: 2416 - DNA, 648 bp, Homo sapiens
  misc_feature 490, 613: n = A,T,C or G
acgcgggagagaccccggaccccagcgctgtctcttcccgccgcccgaaccaccatgacccacttcaacaagggcccttcctatgggctctcggccgaagtcaagaacaagattgcttccaagtatgatcatcaggcagaagaagatcttcgcaattggatagaagaggtgacaggcatgagcattggccccaacttccagctgggcttaaaggatggcatcatcctctgcgaacttataaacaagctacagccaggctcagtgaaggaggtcaacgagtcctcactgaactggcctcagttggagaatattggcaactttattaaagctattcaggcttatggtatgaagccacatgacatattcgaagcaaatgatctttttgagaatggaaacatgacccaggttcagactactctggtggctctagcaggtctggctaaaacaaaaggattccatacaaccattgacattggagttaagtatgcanaaaaacaaacaagacgttttgatgaaggaaaattaaaagctgccaaagtgtaattggtcttgcagatgggaaccaacaaatgtgccaccaggcaggtatgacagcttacgggactaggaggcntttttatgatcccaaaatgcaaactgacaaacctt

SEQ ID NO: 2417 - DNA, 393 bp, Homo sapiens
  misc_feature 54: n = A,T,C or G
acgcgggggaggtgccgccatttcatctgtcctcattctctgcgcctttcgcanagcttccagcagcggtatgttgggccagagcatccggaggttcacaacctctgtggtccgtaggagccactatgaggagggccctgggaagaatttgccattttcagtggaaaacaagtggtcgttactagctaagatgtgtttgtactttggatctgcatttgctacacccttccttgtagtaagacaccaactgcttaaaacataaggatgtttcagttcctccatttaacagatatgaagagcattttaagaggtgcagcctctggaagtggatcaaactagaactcatatgccatactagatattgtttgtcaataaacttatgacgtgaaaaaa

SEQ ID NO: 2418 - DNA, 648 bp, Homo sapiens
  misc_feature 458, 515, 539, 557, 562, 568, 592, 627: n = A,T,C or G
acgcgggcatctgttacccagatctaccatgcagttgcagctctaagtggctttggccttcccttggcatcccaagaagcactcagtgcccttactgctcgtctcagcaaggaggagactgtgctggcaacagtccaggctctgcagacagcatcccacctgtcccagcaggctgacctgaggagcatcgtggaggagattgaggaccttgttgctcgcctggatgaactcgggggcgtgtatctccagtttgaagaaggactggaaacaacagcgttatttgtggctgccacctacaagctcatggatcatgtggggactgagccatccattaaggaggatcaggtcatccagctgatgaacgcgatcttcagcaagaagaactttgagtccctctccgaaccttcagcgtggcctctgcagctgctgtgctctccataatcgctaccacgtgccanttgtggttgtgcctgagggctctgcttccgacactcatgaacaggctatcttgcggntgcaagtcaccaatgttctgtctnaccctctgactcagccantgttnaactanaacatctaaattctgttgcttcanaaccactgtcctcaaaaaacatccttacccctgtnggggatgtttttgaactaatt

SEQ ID NO: 2419 - DNA, 650 bp, Homo sapiens
  misc_feature 543, 599, 606, 617, 620, 623, 640, 642, 647: n = A,T,C or G
accctccaggtcatggtgatatttacgccagtttctacaactctggattgcttgatacctttataggagaaggcaaagagtatatttttgtgtctaacatagataatctgggtgccacagtggatctgtatattcttaatcatctaatgaacccacccaatggaaaacgctgtgaatttgtcatggaagtcacaaataaaacacgtgcagatgtaaagggcgggacactcactcaatatgaaggcaaactgagactggtggaaattgctcaagtgccaaaagcacatgtagacgagttcaagtctgtatcaaagttcaaaatatttaatacaaacaacctatggatttctcttgcagcagttaaaagactgcaggagcaaaatgccattgacatggaaatcattgtgaatgcaaagactttggatggaggcctgaatgtcattcaattagaaactgcagtaggggctgccatcaaaagttttgagaattctctaggtattaatgtgccaaggaaccgttttctgcctgtcaaaaccacatcanatctcttgctggtgatgtcaaccttatagtcttaatgcaggatctctgacaatgantgaaaancgggaatttcntanagngcccttggttaaattangnaattnttt

SEQ ID NO: 2420 - DNA, 651 bp, Homo sapiens
  misc_feature 602, 604, 616, 625, 629, 641: n = A,T,C or G
acagaaatttcacaagaagtcaaacacagtgatgccatttgctatgttttattttgctagtagcttattaaacataacatgcaaataatcaaagagaaacatacatgacttagagtgaaaaataattctagaaaagtttcactaggtaagtatgcaaattcttattctaaaaatacttctttaagtgcatgaagcttcatgtattttgcaatattcttggcctcaatatctaccacctattttttaaccagacaaatttgaatgtatcaagataatttggtgcaagagagtaacatccatatgtatttaatccaagctttgaggaacattaagatttaaggattataaaacttggctgatttccatgcaaccagtaaaaggttttgcacatcatttgacagtagaaataaaaaaacactaaatttacaaataaagcattgagtttgatgtctattcgtgtatatgtgtgtgtcttgtgatgaaataggcctgcctttcatcttttctttaaaaaaaataaatgtttacaaaacattccctcagattttaaaatcatggaagtaataaacagtaataaaatatggatactatgaaacctgacncncagaaaacatanccttaaatnttgntccaggatccanattttattta

SEQ ID NO: 2421 - DNA, 648 bp, Homo sapiens
  misc_feature 562: n = A,T,C or G
acgcggggaagatgaaggtaagtagaaaccgttgatgggactgagaaaccagagttaaaacctctttggagcttctgaggactcagctggaaccaacgggcacagttggcaacaccatcatgacatcacaacctgttcccaatgagaccatcatagtgctcccatcaaatgtcatcaacttctcccaagcagagaaacccgaacccaccaaccaggggcaggatagcctgaagaaacatctacacgcagaaatcaaagttattgggactatccagatcttgtgtggcatgatggtattgagcttggggatcattttggcatctgcttccttctctccaaattttacccaagtgacttctacactgttgaactctgcttacccattcataggaccctttttttttatcatctctggctctctatcaatcgccacagagaaaaggttgaccaagcttttggtgcatagcagcctggttggaagcattctgagtgctctgtctgccctggtgggtttcattatcctgtctgcaaacaggccgccttaaatcctgcctcactgcantgtgagttggacaaaaataatataccaacaagaagttatgtttcttacttttatcatgattcactttataccacgactggtataca

SEQ ID NO: 2422 - DNA, 194 bp, Homo sapiens
  misc_feature 124, 140, 143, 152, 154, 155, 162, 168, 169, 174, 176, 177,179, 186, 192: n = A,T,C or G
actggatttccatttaaacagggttaatttggaagaatcttcaggagtggaaaactctccagctggtgctagaccaaagagaaaaaacaagaagtcttatgatttaactccggttgataaattntggcaaaaacttaaangangtccttttncnnaatttgnaaattnntcatntnnantatattnttactnat

SEQ ID NO: 2423 - DNA, 491 bp, Homo sapiens
  misc_feature 32, 35, 39, 64, 113, 131, 172, 199, 255, 261, 308, 311, 425,430: n = A,T,C or G
actttttttttttttttttttttttttttttnganacanagtcttgctccatcacccatgctanagtgcagtggagtgatctcggctcactgcaacttccgccttctgggttnaagctattctcctgcctnagccttccaagtaactgggattacaggaatgccccaccacncctggctaattttttttttgtattttnagtaaagacggggtttctccatgttggtcaggctggtctcaaactcccaacctaanatgatntgcctgcctccacctcccaaagtgcttggataacaggtgtgagccgntgntcccggcccccttattttcttttagtgctcagctctcccctttttggctcatgaggtctagatagggcatatgaaccacatccacctgtccccagggactggtaggcacatgtnttaanttagtccaaccagagccaacagacaccaagcccggggctttttgctggacataccccgcgt

SEQ ID NO: 2424 - DNA, 494 bp, Homo sapiens
  misc_feature 487: n = A,T,C or G
acaggcttaaatctatgtcatttacactcactgaatcatcaacctcatcaccacctgttccctgggtgtagcgggtatcatctgcttcctcatcatcatcattgaccagttcaggacgaaattcaaacacttcacgaccactgatcactagtgctttccctgctttgaagtcagctttccttctttccatatcttgttaaagtttatcaatcttttcttgtcttttccttttcttccaggcaagaaaagattctagagtgattttggtaacatttggacctagggcagaacgctctctctcaattagatcttctaatgaaatttcatcttctttctcttctttctttttatcttttttcaacacaaatccaggaggaagtgcatgacgataaatgcaaatatcaccccctccagggcatacccaaaaccagccatacttgttgttttcaatagcttccaggaaatgcttgcacactattgagttttnggttttt

SEQ ID NO: 2425 - DNA, 651 bp, Homo sapiens
  misc_feature 603, 612, 648: n = A,T,C or G
acaaaaaaattcccttgcttgcagagtttttgttactttttacttaaatatttagagttaagaaaaaaatcaaatttaaaatcactattgatggaagcttatattccttatgaatatatacatgtatgcatatatacatctctgtatgaatcactcaaagcaattttaaacatcattcttttttttgtatttaaaattgcccttttaaacatttagaagttccagaggtggaggctttaatggaatttttcccagagtaaatttcttggattgaaattgttccagttcttctactgttagtttatttctgggtgtgaataacacattatctgttgcaatgatgctgcttgaggctgacagagaagtggatatgctgctatttccaaaagtgtcactggatggcttagaaaaagcagtgtgagaatgtgagcccggactaccaaaaccagccacagaactgcaacctccaaaggctcccgcgtacaggtcagagtcttcttttcttttctttttgagatggagtcttgctctgttgccagactggaatgcagtgggtgcgatctgggctcactgcaatctcccctccgggttcaagcgattctnctgcctcancctccgagtactgggactacaggtgcgcgccccaanccc

SEQ ID NO: 2426 - DNA, 527 bp, Homo sapiens
  misc_feature 509: n = A,T,C or G
tacggtctgagacatcaccgccaagctgggcatcggggagatggccgagactgaccccaagaccgtgcaggacctcacctcggtggtgcagacactcctgcagcagatgcaagataaatttcagaccatgtctgaccagatcattgggagaattgatgatatgagtagtcgcattgatgatctggaaaagaatatcgcggacctcatgacacaggctggggtggaagaactggaaggtgaaaacaagatacctgccacgcaaaagagttgaaggttgctaataatttatactggaatctggcatttttccaagccaagagaagatcgaatggctttttgcagctaactactatgtgtagacaggttttatattataaagtatgcattcttatcacctagtatatagttagtttgtagagtgatttccccccagtttcttgaacatggtatcttcacatcttggaccttggtcagttgtgctattcattattaaacactaaaactttggnggttcttacataacattg

SEQ ID NO: 2427 - DNA, 647 bp, Homo sapiens
  misc_feature 425, 535, 568, 572, 599, 614, 617, 631, 633: n = A,T,C or G
acctgtggtatgaagccgacaagcgccgcctgttcccaccctggattaagcccgcagacacagaaccacctccgctgcttgtttacaagtggtgtcaaggcatcaataacctgcaggacgtgtgggagacgagtgaaggcgagtgcaatgtcatgctggaatcccgctttgagaagatgtatgagaagatcgacttgactctgctcaacaggctgctgcgccccatcgtggaccacaacatagccgactacatgacagccaagaacaacgtcgtcatcaactataaggacatgaaccatacgaattcatatgggatcatcagaggcctgcagtttgcctcattcatcgtgcagtattatggcctggtgatggatttgcttgtattgggattgcaccgggccagtgagatggctgggccccctcanatgccaaatgactttctcagtttccaggacatagccactgaggctgccaccccatccgtctcttctgcagatacattgatcgcatcatatttttttcaggttcacagcanatgaggctcgggacctgattcaacgttcctganagancaccctgaccccaataatgaaaacatngttggctataataanaanaaatgctggccccnanatccccattgccct

SEQ ID NO: 2428 - DNA, 605 bp, Homo sapiens
  misc_feature 530, 548, 583, 598: n = A,T,C or G
acaggtggaacaatccaaagttttaatcaaagaaggtggtgttcagttgctgctcacaatagttgataccccaggatttggagatgcagtggataatagtaattgctggcagcctgttatcgactacattgatagtaaatttgaggactacctaaatgcagaatcacgagtgaacagacgtcagatgcctgataacagggtgcagtgttgtttatacttcattgctccttcaggacatggacttaaaccattggatattgagtttatgaagcgtttgcatgaaaaagtgaatatcatcccacttattgccaaagtagacacactcacaccagaggaatgccaacagtttaaaaaacagataatgaaagaaatccaagaacataaaattaaaatatacgaatttccagaaacagatgatgaagaagaaaataaacttgttaaaaagataaaggaccgtttacctcttgctgtggtaggtagtaatactatcattgaagttaatggcaaaagggtcagaggaaggcagtatncttggggtgttgctgaanttgaaatggtgaacattgtgattttcaatcctaanaaatatgttgataanaacacac

SEQ ID NO: 2429 - DNA, 327 bp, Homo sapiens
  misc_feature 2, 26, 35, 54, 115, 132, 138, 150, 205, 208, 216, 222, 262,265, 267, 273, 274, 276, 280, 289, 304, 306, 308, 309, 319,322: n = A,T,C or G
cncggccgacgtactttccactcttnctttaaaancttgccatttgcttatcanttcctctggggctgacccactctaacatgacaaaggattaagaacaaaagatagtcctccnaggttacaggcttgtangggcanataggatctacnaaccttggaagaaaaacaaggtgctcaggaattcattcacctaacatttcacttnccnacccaccncttatntgctcccactttggcaggtgatctctctttggctttaaancanangggggnnantgtnccttgtttntgaaatgtttgcaanancnnatctatgcgnatnttcaa

SEQ ID NO: 2430 - DNA, 649 bp, Homo sapiens
  misc_feature 541, 640: n = A,T,C or G
actttccactcttcctttaaaaacttgccatttgcttatcagttcctctggggctgacccactcaaacaagacaaaggataaagaacaaaagatagtcctccgaggttacaggcttggaagggcagagaggagctacgaaccttggaagaaaaacaaggtgctcaggaattcatcgcctaacatttcacttccccacccaccccttagtgctcccactttggcagtgatctctctttggctttaaagagaaagggggaaatgtgccttgttttgcaggtgtgcaacaacacagctctggcatctcaagcagcaggggagaactctaagacagaagaatttcttcatgaaaatcacggtatgttatcacatactgtctccatggcccatacaaggactccttaaggttctctctaacatacaacatatcccccacaactcagtagagaggttttcttcccactggaatagaaatcctttgcctcatttattacagtctaaaaatccacactggctttttgattctttctagcatgagctcanacactatacgtcaaaagaatgcccagaggcattttcttaggtagagacttacctgcgggctgagacttcggccccacatagctcaaatcaattctgcanctgctcctt

SEQ ID NO: 2431 - DNA, 596 bp, Homo sapiens
  misc_feature 310, 481, 487, 494, 495, 521, 558, 563, 582, 584, 585: n = A,T,C or G
accaattaaagttgaacaaattgaagcagggacaccaggccgactcagagtagtagctcagtccaccaatagtgaggaaatcattgaaggagaatataatacggtgatgctggcaataggaagagatgcttgcacaagaaaaattggcttagaaaccgtatgggtgaagataaatgaaaagactggaaaaatacctgtcacagatgaagaacagaccaatgtgccttacatctatgccattggcgatatattggaggataaggtggagctcaccccagttgcaatccaggcaggaagattgctggctcanaggctctatgcaggttccactgtcaagtgtgactatgaaaatgttccaaccactgtatttactcctttggaatatggtgcttgtggcctttctgaggagaaagctgtggagaagtttggggaagaaaatattgaggtttacaatagttacttttggccattggaatggacnattccntcaagannataacaacaaatgttatgcaaaaatnatctgtattactaaagacaatgaacgtgtttgtgggnctttnacgttccttgccgggcggncnnttaaaagggct

SEQ ID NO: 2432 - DNA, 592 bp, Homo sapiens
  misc_feature 564: n = A,T,C or G
acgcgggccagcagttactcatggaatatattctgcgtttataaaactagtttttaagaagaaattttttttggcctatgaaattgttaaacctggaacatgacattgttaatcatataataatgattcttaaatgctgtatggtttattatttaaatgggtaaagccatttacataatatagaaagatatgcatatatctagaaggtatgtggcatttatttggataaaattctcaattcagagaaatcatctgatgtttctatagtcactttgccagctcaaaagaaaacaataccctatgtagttgtggaagtttatgctaatattgtgtaactgatattaaacctaaatgttctgcctaccctgttggtataaagatattttgagcagactgtaaacaagaaaaaaaaaatcatgcattcttagcaaaattgcctagtatgttaatttgctcaaaatcaatgtttgattttatgcactttgtcgctattaacatcctttttttcatgtagatttcaataattgagtaattttaaaagcattattttaggaatatagttgncacagtaaatatcttggtttttctatgt

SEQ ID NO: 2433 - DNA, 650 bp, Homo sapiens
  misc_feature 606: n = A,T,C or G
actctcccctacttcccttaaactcactcgtatttctgaagaacagtaataactcttatgagcctaatacatcccttcattctattaggtcttttcgtccttaccctacattttgcaacagggctttatgaagccacccccaccacttaggctgagccccaaaaaactagtcatccctactatcttctgtccggtcatactcctattctccattctcaactacttataaatgccctactcctgtttacactgctggtttacactgtttcttcaaaccatcacagctgatatctcttggtgctatccccaaactgccactcttaactccctcttagagtgggtagatgatctttgctggcaaggcactctccaatacttccaccctgatgaagttctattctttactttttactcactcttattctcattcccattcttatgccaccctctacctctccccagctatctccaccacactatcaaccttacccattctctcctagccgcttctaatctctccttggcgaacaactgctggctttgcatgtctccttcttccagtgcctacacagctgccccgcttacagacagactgggcaacacctnccgctccctacaccttttgaactcctttaacagccctcaccttt

SEQ ID NO: 2434 - DNA, 357 bp, Homo sapiens
  misc_feature 316, 325: n = A,T,C or G
acatagtgtcgcgaactcaaatcggcatttagatagatccagtggtttaaacggcacgtttttgcttataaaaaaagtgcaaaaaagatgtggtttacaagttaaagctacagaatccctttttgctgtaattgcaccagttttaaagcctctggacagagcagtatttcgtttaaaactttgtttttcttaaaagcttacagtgtttggctaattctcctcccctttttacaagacgggggccggagggtggacactggtggcaggttaagggatactgcactttaagaagcctgctgattgaagtgtaaacatnggagaaatnaggggctgattttttaaactgtgtgagatatt

SEQ ID NO: 2435 - DNA, 301 bp, Homo sapiens
  misc_feature 298: n = A,T,C or G
acttggcttggagactggcgcggcgttcgtgtccgagttctctgcaggtcactagtttcccggtagttcagctgcacatgaatagaacagcaatgagagccagtcagaaggactttgaaaattcaataaatcaagtgaaactcttgaaaaaggatccaggaaacgaagtgaagctaaaactctacgcgctatataagcaggccactgaaggaccttgtaacatgcccaaaccaggtgtatttgacttgatcaacaaggccaaatgggacgcatggaatgcccttgcaacctgcccaangaa

SEQ ID NO: 2436 - DNA, 287 bp, Homo sapiens
  misc_feature 175, 192, 209, 214, 224, 233, 239, 257, 260, 269, 275: n = A,T,C or G
acttgtattgattatgtagttcagtaagatgtgcccaagtcatttcagaaagaaagacccttcagttttgatgcattttgctgaacacttgggtagtgagtgggatcctatccagttgaggaatgcttgcaatgctcattgaagggatttgctttgggactttgtcatctttcanaaaggaaacatattgtntatttaggcccattgtnattgnttgctttatntttggtaantattanttgaatgggatttctganttnattgacttntgattntaaatcttaatt

SEQ ID NO: 2437 - DNA, 648 bp, Homo sapiens
  misc_feature 334, 567, 583, 585, 591, 600, 607, 630, 641: n = A,T,C or G
acaggatgaatttaaatgtgtttttcctgagagacaaggaagacttgggtatttcccaaaacaggtaaaaatcttaaatgtgcaccaagagcaaaggatcaacttttagtcatgatgttctgtaaagacaacaaatccctttttttttctcaattgacttaactgcatgatttctgttttatctacctctaaagcaaatctgcagtgttccaaagactttggtatggattaagcgctgtccagtaacaaaatgaaatctcaaaacagagctcagctgcaaaaaagcatattttctgtgtttctggactgcactgttgtccttgccctcacatanacactcagacagcctcacaaacacagtagtctatagttaggattaaaataggatctgaacattcaaaagaaagctttggaaaaaaaagagctggctggcctaaaaacctaaatatatgatgaagattgtaggactgtcttccaagccccatgttcatggtggggcaatggttatttggttattttactcaattggttctctcatttgaaatgagggagggacatacagaattnggaacaggtgttgctntnctaaanccttatgcnacccctnaaccacgaggaacatccttgccnggcggccgttnaaagggc

SEQ ID NO: 2438 - DNA, 191 bp, Homo sapiens
  misc_feature 162, 190: n = A,T,C or G
acctagaagagaggcgggtcaaagaagtagtgaagaagcattctcagttcataggctatcccatcaccctttatttggagaaggaacgagagaaggaaattagtgatgatgaggcagaggaagagaaaggtgagaaagaagaggaagataaagatgatgaanaaaagcccaagatcgaagatgtgggttna

SEQ ID NO: 2439 - DNA, 303 bp, Homo sapiens
  misc_feature 275, 293: n = A,T,C or G
acattagcaccataacaggcgtctttaaagccttcccaaatattagtaatcttgaccagcaatgacaagaaaaaagaggagcacctttacaagcagttgatatccaatattaaaataattgtggctttaaaaatatttctttaaattcttgcattacacttttctttttaaaccaatcttccaggagattaatcaatgaaatttataagttttatcaacgtataaaatttttttcatcttctgggactcatagaatcaatctgtgtttctgacanttgaggtagttaaaatanggagggcttt

SEQ ID NO: 2440 - DNA, 648 bp, Homo sapiens
  misc_feature 532, 546, 565, 568, 589, 595, 606, 614, 615, 619, 620: n = A,T,C or G
acgcgggggcacagccagagcctaaaggctagagccggagctgccgcgccagtcgcctagcaggtcctctaccggcttattcctgtgccggatcttcatcggcacaggggccactgagacgtttctgcctccctctttcttcctccgctctttctcttccctctcgtttagtttgcctgggagcttgaaaggagaaagcacggggtcgccccaaaccccttctgcttctgcccatcacaagtgccactaccgcatgggcctcactatctcctcctcttctcccgactatttggcaagaagcagatgcgcattttgatggttggattggatgctgctggcaagacaaccattctgtataaactgaagttaggggagatagtcaccaccattcctaccattggttttaatgtggaaacaagtagaatataaaaacatttgtttcacaagtatgggatgttggtgggtcaagatagaattaggcctctctggaagcattacttcaaaatacccaagggtcttatttttgtggtanatagcaacgatcgngaaagaattcaggaagtancanatgaactgcaaaaaatgcttntggtanatgaaattganaaatgcanngctnntactttttgcaaacaaacaggatttgca

SEQ ID NO: 2441 - DNA, 255 bp, Homo sapiens
  misc_feature 196, 231: n = A,T,C or G
acatttagaatttttggccgggtgcagtggctcacacccgtaatcccagcactttgggaggccaaggtgagcggatggctcgaggtcaggagtttgagaggtcaggagttcaagatcagcctggacaacatggtgaaaccccgtctccactaaaaaaatacaaaaattagccaggcatgagggtgcatgcctgtancccacgctattcaagaggctgaggcaggagaatcncttgaacctgggaggtggaggttg

SEQ ID NO: 2442 - DNA, 448 bp, Homo sapiens
  misc_feature 338, 387, 390, 407, 409, 415, 424, 427, 441: n = A,T,C or G
acacaatgtgtagctcatatgaaaacctcatgacaagtcattgagttctgtaaactgccatacaacttacatgtgtaatattaattgcacaaagtatatcaagacatattgaagaaacacaaaattaagtgctattttaacggttcatctttcagtatgtgaatacgtatacaaatttaactgcacagttttgttgaaaataagtttcaacaataagacttcagttgttaaaattaacccaaaatataactttaattaaattacatcactacaatattaatctcttatcttgtttacatttttggtgttttgggacttttgttaaaaaaaaatccaanttctagaattgcaaaaacttcattgttgccactgagagagcaacatatngtncgcgggggggagaccananatctancgactgaancanattggccaaaccgngtggggt

SEQ ID NO: 2443 - DNA, 442 bp, Homo sapiens
  misc_feature 78, 85, 97, 113, 118, 203, 204, 213, 222, 229, 230, 231,296, 303, 304, 327, 330, 336, 354, 360, 375, 379, 390, 401,403, 428: n = A,T,C or G
gatctaccatgcagttgcagctctaagtggctttggccttcccttggcatcccaagaagcactcattgcccttactgntcgtctnagcaaggagganactgtgctggcaacantccangctctgcaaacagcatcccaccttgtcccaacaggctgacctgatgagcatcttggaggaaattgaggaccttgttgctcggctnnatgaactcngggggcgtntatctcnnntttaaaaaaatgactggaaacaacatcctttttttgtgggcttgccaccctacaaagctcattgnatcattnntgggacttgacccatccattaanggnaggatnaggtcatccaacttgatnaacccnatctttaacaataantaanttttgaattcnctcttactaancntttaaacagggagcctcttgcaacntggtttcctttgaa

SEQ ID NO: 2444 - DNA, 474 bp, Homo sapiens
  misc_feature 22, 24, 34, 46, 89, 154, 158, 190, 280, 283, 288, 310, 314,351, 359, 360, 385, 431, 434, 437, 441, 448, 449, 460: n = A,T,C or G
gtacatacacacacacacacancncagagagaanacagagagaaantcctggtccaaaagatcacatgaccttactagtgtttccccantgactgtaatttataaactaaaaatttttacaaatccactgctatcttcttctgtcctgagtttnggtngactttaatggatgctccagcaataaccagantctaggacatgcaaactcactgtgagcgagaggctagggatctgccctaacataggaacctgtttctatcaagcctgaatgaggcagctntgntaganttaatgacaaatcaatgccagngaantattctgcaaacagggtagcttttgtgctttcttttnattatttnnttttggggagataaaagtttttganccatgggtctactaatttatcactaaaggactgggaccacattctnagnaanacancatggtnnttactgtccanggagggaaaatccc

SEQ ID NO: 2445 - DNA, 338 bp, Homo sapiens
  misc_feature 234, 277, 283, 292, 293, 299, 306, 309, 311, 318, 322: n = A,T,C or G
accttaaaagtgtctcacctagaaggcctctacctgtaatcacattaatttttctaaagacaatttggtgttttgaagataaatgtcattagtctatgataatagcatcataggacaattagccattttagacttgaccatattttctctttttagcatatagccatcttgatatttaggtgggagactactccaatggagcaacagtttcatttttacatgattggatttaanaaatttacaaattttaaactcataagaattcttaaataatttnaaaatngaaacattnnacccanagtctancancntaaatantttntaaaaatacttcattg

SEQ ID NO: 2446 - DNA, 426 bp, Homo sapiens
  misc_feature 214, 215, 236, 256, 261, 282, 328, 329, 341, 343, 345, 348,350, 361, 362, 365, 375, 384, 405, 425: n = A,T,C or G
acgggtatcactttccggagctggtgaagatcatcaacgacaatgccacatactgccgtcttgcccagtttattggaaaccgaagggaactgaatgaggacaagctggagaagctggaggagctgacaatggatggggccaaggctaaggctattctggatgcctacggtcctccatggcatggacatatctgccattgacttgataaacatcnnaagcttttcagtcgtgtgggngtcttttatctgaataccgncagancctacacacttacctgcgctncaagatgagccaagtagcccccaccctggcaccctaattggggaanncggtagggcacntntnatngnacatgctggannctnaccaacctgncaattatcnacatccacagtgcaaatcttngggctgaaaaagccctgttna

SEQ ID NO: 2447 - DNA, 367 bp, Homo sapiens
accaaagctcactactgcggtttgcctgtgcctggacaatgaggcggagccactgttggggcacccccttccctccccgggtttgcaaatagaggctaccgggtgctgtattcagcaacacctgttttactatttgttattaaactatcatctccaccttccttttgattagcaatttgtacactgtgaaacagctaagtcgagctaattaatatgcactgccacacatacttgtcactttttggggtgagacacttaaatctactctcttagtggttttattattatttttttgagacggagtcttgctctgccgccagctggatgcatcgtgcaatctcggttactgcaacctccacctccaggt

SEQ ID NO: 2448 - DNA, 344 bp, Homo sapiens
  misc_feature 226, 271, 281, 282, 287, 290, 291, 296, 297, 306, 313, 316,321, 344: n = A,T,C or G
acttttactttttaaaaatttcaaacttttatagtattctgctaacatatctcctgtgaggaacacttaatactgaattttcccctcaatagccaagtcagaatatacttatttcatttttcacccaagtctttgtttctaaacgcattatgtagaatagatttgatccgtcacagcatcttgagtagctaatgaggtaggagtattcttaagttcttaggcttantgaagcaaagcaaaagacaatcaaattacaaagattttcttttgnagtgggttgnnctttnaannaaaanngctaaaaancactggnaanttgancaaatgctactaacattaaaaan

SEQ ID NO: 2449 - DNA, 467 bp, Homo sapiens
  misc_feature 243, 268, 364, 366, 389, 434, 440, 446, 460: n = A,T,C or G
acagcatcgtagggttcccctaaacttgccctgtttttgtttttttagtttgttatccccttactgagcggcctctactaggtggctgtgattaaatgtcccaagcaaggatagggaaggggaatgggttgacctctggagatcattgtaaccaatcctgccagacctgtttgggcagtgggggagcaaacctagataaggacctgttggggcacagggagcaaaatctctttaacaaccaancaagttcctattcacatcaacagancgaggctgtgataacttaaggaggcacaatcctaatagtccttcagtgcattttaatctgtctccaactggacaccagtaggtagtgtcaagccananattcgggggcagtaaataaatgntcattttactgatgcactttaattttgggcttgttacctgtttcncaaaanttttgnggcctttttaggcngggagtt

SEQ ID NO: 2450 - DNA, 510 bp, Homo sapiens
  misc_feature 13, 85, 104, 106, 134, 143, 165, 167, 199, 260, 263, 284,286, 293, 310, 315, 319, 324, 325, 333, 353, 362, 366, 368,382, 384, 385, 392, 398, 410, 430, 431, 435, 443, 453, 468,480, 481, 484, 485, 486, 491, 498, 501, 505, 506: n = A,T,C or G
aaatttacaaaanaggtttattggacttacagttccacgtggctgggaaggcctcacaatcatggcggaaggtgaaagccacatntcacatggcagcagataananaaaaaaaggtagtgatcttttagtaaanaaacctganactggtagtggcttggagccanangatcgcttaagtccgggagttcgaaccagccngggtacaaattgaacccccccactttaaaattaaaaaacgaaagaaaaaattgctgggtgnggnggctcacacctgtaatcttancntttgggnaggccaaggggggtggnttgcntganctcannattttaanaccacctggcaacatggttnaaacccttntctntntaaaaaaaaaaaantnnccaggcntggtancgtgcacctttntccaattacttgggagggtnnggcnaaaaaatngttgaacctnggagggaaaggttgnaaaaatattgcnnttnnntccanctggggnganaaannaaaa

SEQ ID NO: 2451 - DNA, 386 bp, Homo sapiens
  misc_feature 6, 47, 61, 91, 155, 171, 197, 232, 236, 261, 262, 265, 267,270, 275, 296, 305, 315, 318, 321, 329, 335, 339, 344, 360,365, 368: n = A,T,C or G
tacggnctgagacatcaccgccaagctgggcatcggggagatggccnagactgaccccaanaccgtgcaggacctcacctcggtggtgcanacactcctgcagcagatgcaagataaatttcagaccatgtctgaccagatcattgggagaattnatgatatgagtagtcncattgatgatctggaaaagaatatcncggacctcatgacacaggctggggtggaagaactngaangtgaaaacaagatacctgccacgcnnaananttnaaggntgctaataattttatactggnaatcttgcntttttccaanccnaantaaaatcnaatggntttnttcanctaactacttatgtgnaaacnggntttatattattaaaaatt

SEQ ID NO: 2452 - DNA, 565 bp, Homo sapiens
  misc_feature 16, 18, 48, 56, 145, 181, 196, 201, 206, 214, 239, 243, 265,266, 289, 293, 302, 307, 309, 323, 331, 337, 338, 352, 354,359, 366, 380, 397, 400, 405, 421, 438, 454, 468, 476, 479,480, 486, 488, 489, 496, 504, 508, 516, 521, 532: n = A,T,C or G
  misc_feature 535, 552, 563: n = A,T,C or G
ccgggccatcatttantnatggaatatattctgcgtttataaaactantttttaanaagaaattttttttggcctatgaaattgttaaacctggaacatgacattgttaatcatataataatgattcttaaatgctgtatggttnattatttaaatgggtaaagccatttacataatatanaaagatatgcatatntctanaaggnatgtggcntttatttggataaaattctcaattnaaanaaatcatctgatgtttctatanncactttgccagctcaaaaaaaanacantaccctatntagtngnagaagtttatgctnatatttgngtaacnnatattaaacctaantnttctncctaccntgttggtataaaanattttttaccataactntanacaanaaaaaaaaatctgccnttcttagcaaatttgcntatatgtaatttgctnaaaaataaattgtntatttttnatnncttagncnnattaaanaacatttntttnaattaaantaaanaattggattanttnaaaacctatttttaggnaattatttgcnta

SEQ ID NO: 2453 - DNA, 546 bp, Homo sapiens
  misc_feature 26, 27, 28, 250, 251, 253, 254, 260, 266, 300, 303, 312,320, 334, 337, 348, 384, 392, 398, 403, 425, 432, 434, 453,462, 472, 476, 479, 482, 486, 494, 502, 503, 505, 513, 515,526, 533, 534, 537, 543: n = A,T,C or G
actttttttttttttttttttttttnnnggaatgcgtttattttaacaaccaaaaaattctaacagcctaacaatgcacataagttaaaaattaattatcacttagtgataacaaagatagttgatttacatggaaaaaagaacatttacaatatgttaatccttattcacattgttgataccgcaataaaacacaatttgtttttttcatttcacaaaaaaaaaaaaaaggcgggaaattgtgctttgnnannaggcantacaanaaaaagtttttcttccaaatagattttttgacanatnttgaataantagacatntttgcattgaaatncgnaaagatctggnaaaaccacaggctaaaatgcccacagattcacttanaaccctgnaaactnggcantgaaattaaaaataaaaggcangacttancntttgaaaaaacctaataanttttagttnaaagggaaanaaanccnatntgcngatgcctntatatatnnancccctttntnaaaacttggcnaaatcannttnctttangtg

SEQ ID NO: 2454 - DNA, 649 bp, Homo sapiens
  misc_feature 19, 81, 127, 167, 233, 239, 256, 269, 274, 278, 286, 288,296, 322, 327, 329, 344, 356, 359, 362, 363, 367, 373, 383,386, 405, 426, 463, 473, 478, 488, 492, 500, 526, 537, 540,548, 552, 558, 564, 568, 576, 580, 583, 591, 593, 605: n = A,T,C or G
  misc_feature 619, 623, 633, 634: n = A,T,C or G
acaggatgaatttaaatgngtttttcctgagagacaaggaagacttgggtatttcccaaaacaggtaaaaatcttaaatgngcaccaagagcaaaggatcaacttttagtcatgatgttctgtaaanacaacaaatccctttttttttctcaattgacttaactgcntgatttctgttttatctacctctaaagcaaatctgcagtgttccaaaaactttggtatggattaancgctgnccattaacaaaatgaantctcaaaacaganctcanctgnaaaaaacntntttcttgngtttctggactgcactgttgtccttnccctnanataaacactcaaacngcctcacaaacncanggnntctntatttngattaaaatnggntctgaactttcaaaaaaangcttttgaaaaaaaaagagcnggctggcctaaaaaccttaatattttgatgaagattngggggctgcnttccnaagccccatnttcntggtgggncattgggttttttgggtatttttacncaatttgggtnctntcatttgnaatngggggngggccnttcntatttggnaacnggngtttgttntncttagagccttnttgcacccccttgnaccnggaggaaacnnttccttgcccgggcg

SEQ ID NO: 2455 - DNA, 402 bp, Homo sapiens
  misc_feature 161, 207, 230, 256, 260, 296, 299, 309, 317, 334, 344, 353,355, 361, 382, 396: n = A,T,C or G
actgaggacatggctgtcagctggtttcttatctgctctgaaggcatgctttgcaaatgaggaccaatcggagcatcttctcgagtagcataattcaaatcagatcccaaaactcagggtccgagaagtgtgatcaatacgaaccctggcaagtcgcattnctgcttgcattctactatgggccgttccagtttggaaaagcatcancaaagggaccaaagaagtcaacnaaaaaactcatgcctctgataatctntganacctgctgcaaaaagccgaggatggttgttgttttncanttgtggcaanatactggntgcatttccggttcttntcaggttgtncctaacccnantttaanaacctttgtactcgctcacanagttttaatggggnttaaat

SEQ ID NO: 2456 - DNA, 597 bp, Homo sapiens
  misc_feature 203, 208, 234, 237, 243, 245, 325, 364, 410, 496, 506, 517,536, 565, 571, 573, 576, 597: n = A,T,C or G
actcatttgtattcactgtcactttttctcatgttctaattataaatgaccaaaatcaagattgctcaaaagggtaaatgatagccacagtattgctccctaaaatatgcataaagtagaaattcactgccttcccctcctgtccatgaccttgggcacagggaagttctggggtcataaatatcccgtttgggaaggaaaanctggncttaaaactgcacatgactgggaccnaanatgagngncacctcaaatgggtgaaaatctggcatcatttttggaaagacctgctgaatggttcaaataactaatactggttaggccnaagaaaagttggaatccgaataatctactggaggtttgnccttcatttttctctttctcctctgcctggctgatattatctactntaaatagctatttcatccaagtgcaataatggaagctgaatctttttgggacttctgctggcctgtttatttcttttatataaaangggatttctnaaaaattgatntaaacactatcttatcttntcctgactgtgattttaattaaaaattanggctantnccnaaaaaaaaaaaaaaaaaaagn

SEQ ID NO: 2457 - DNA, 438 bp, Homo sapiens
  misc_feature 426: n = A,T,C or G
acgctggatagcgtccaggccagaaagagagagtagcgcgagcacagctaaggccacggagcgagacatctcggcccgaatgctgtcagcttcaggaatccccgcgtaccaacagaaagctggccaggcccccaagttcctcatctatgatgcctttatcagggcctctggcatcccggacaggttcagtggcagtgggtctgggacagacttcactctcaccatcatcagactggagcctgaagactttgcagtgtattactgtcagcagtatgctacctcaccgctcactttcggcggggggaccaaggtggagatcaagagaactgtggctgcaccatctgtcttcatcttcccgccatctgatgagcagttgaaatctggaactgcctctgttgtgtgcctgctgaataacttctatcccanagaggccaaagt

SEQ ID NO: 2458 - DNA, 317 bp, Homo sapiens
  misc_feature 285, 293, 295, 301, 302, 303, 313: n = A,T,C or G
acagctaagcgaactttaagtaaaaaggaacaggaagaattaaagaaaaaggaggatgaaaaggcagctgctgagatttatgaggagtttcttgctgcttttgaaggaagtgatggtaataaagtgaaaacatttgtgcgagggggtgttgttaatgcagctaaagaagaacatgaaacagatgaaaaaagaggtaaaatctataagccatcttcaagatttgcagatcaaaaaaatcctccaaatcagtcttccaatgaaagaccaccatctcttcttgtgatngaaaaaananaaacannnaaaaaaaaanggtc

SEQ ID NO: 2459 - DNA, 652 bp, Homo sapiens
  misc_feature 549, 552, 569, 578, 584, 594, 614, 626, 628, 630, 636, 640,646: n = A,T,C or G
acgcgggggaagcttggaccgcatcctagccgccgactcacacaaggcaggtgggtgaggaaatccagagttgccatggagaaaattccagtgtcagcattcttgctccttgtggccctctcctacactctggccagagataccacagtcaaacctggagccaaaaaggacacaaaggactctcgacccaaactgccccagaccctctccagaggttggggtgaccaactcatctggactcagacatatgaagaagctctatataaatccaagacaagcaacaaacccttgatgattattcatcacttggatgagtgcccacacagtcaagctttaaagaaagtgtttgctgaaaataaagaaatccagaaattggcagagcagtttgtcctcctcaatctggtttatgaaacaactgacaaacacctttctcctgatggccattatgtccccaggattatgtttgttgacccatctctgacagttagagccgatttcactggaagatattcaaaccgtctctatgcttacgaacctgcaaatcagctntgntgcttgacaacatgaanaaagctctnagttgnttgaaactgnattgtaaagaaaaaaaaatntccaaccccttntntntggcanggcnttgaantttgaa

SEQ ID NO: 2460 - DNA, 299 bp, Homo sapiens
  misc_feature 217, 267, 269, 271, 279, 298: n = A,T,C or G
accttatggatttgacccacctcattctggacaaagcctcaggaggatctcttcagggacatgatgcagttttgagactggtagagattcgaacggttttggaaaagcttcgtcccttggaccaaaagctgaagtatcaaattgacaagctgatcaagactgcagtgacaggcagccttagtgagaatgacccacttcgttttaagcctcatcccancaatatgatgagcaagttgagctctgaggatgaggaggaagatgaagcanananatgaccantctgaggcttcaagggaana

SEQ ID NO: 2461 - DNA, 613 bp, Homo sapiens
  misc_feature 346, 424, 503, 562, 569, 577, 587, 591, 606: n = A,T,C or G
accatcctgtggctccttaaggaggcttctctctttaattctccatgaggcatccagggtgatctgggctatgggaagaacccttcaacttgggagtagacaggtgctccaattcatagtgcccattctcagaggccttgtgtgtgagtttctccttcatgccttccttctggctcttcttgtgctccataatctgctggagctggtgcccagcatagtctggcttggtggtcagcgggccagccggcacagctacaccaaggacatctgacaccatgtaggggcgcagccagcccaccaagggagtgcttccggggctgtagtgggtctgtttgtggtagaaganaagtccatctacctcaaaagggaaatccatagatagcacatcacacaggctttcgggagtgcaagggaagttctttanccccacaaatttaaaaggattaagcttggttttctctcccagtccttcttcttctggtaactttgaatgcatccagtanaatcggaaatcagtctggcaatcataaaaagggtgtccccgccagcacatcacatccanaacgtantaggtctnggtttacctnattngtaaatgcaatctanaatgggg

SEQ ID NO: 2462 - DNA, 653 bp, Homo sapiens
  misc_feature 529, 580, 604, 637: n = A,T,C or G
acaacccataatttctggtccatcaaaagaaaagggatcagaatcatctggttctgacctcatcctgtatgtctttgtcagcacttcatttgtaaaatattcattgggttcaaagtgaaattctaagacaaaactcataggctggccagcatctgagaacttcactttaatatctttcaagtgcttcagaataggttcatcgtgttcctgaaccatatcactgagcaagtcaacattcttaaaaacagttaaccaaaattcaggaattcctttggggtcttctttttcttcatcttttttctcatcttcaatcttggccttttctttcaattcctccgaaatctcatcttcttcatctggtttccattcacattcttcttccgtaggttcataaattgcattaataatttcaaatcgcttatcaaatagaggctgataagagaacagcatacttcctttcaagatcgtgaacttcctcatagaatttggcttctatctgtgcacatttaacttgcaggtttttgagacnattcactcgtcttttaactaccctaggcaggctttcaatggtatcctggtnggtggttctacccaaaccatcaanttctttcttggaaggggctgcaaaaaatctgangattttgcatcatctg

SEQ ID NO: 2463 - DNA, 601 bp, Homo sapiens
  misc_feature 437, 547, 552, 573, 599: n = A,T,C or G
acgttcaatccggggaatgatgacatgttcaatggcatttacacgcctgttggttatcttaatagcttcatccaaagtaacaaaagaagtctgcagagaagctagttccaccagtagttccactgctttggcataattcctctttaatttagccaactgttccccacctctggctaaaccagtcagttcataactgtcagttccttcatggtaatgttcaaatactggcaaagtaacacctgctacattatctttcttcgctcgaatcttcacttgcgctttattgacattttggataactgtagtgctgaagtcacctgctgtgaacttggcttcagttagtgaaaaggcagcttctctcatcacttcgcccatcaacattttagtctctattatcttctttaggatctgtcgaaatcgaagagttaaggcatcanattttttcttcaggaggtttcgacctgtctgtgctccctttaaacgagccttcatgatggtctgtgccattcccgagggaaagatttcaattcggctttgcccgacattntgacnataactttttcggttcgggtncccggccgggcaaccgaggctgcaanta

SEQ ID NO: 2464 - DNA, 323 bp, Homo sapiens
  misc_feature 192, 233, 245, 256, 280, 289, 291, 296, 300, 307, 321: n = A,T,C or G
actactgctgttttctgaagacgcgagggcaagtgcagccagccgtttcttttccttctttaagcgtttcttctcctgtttctccagcttcctagtaatctcagcagccgcttcctctgcctgaaccattgcttccttcatgacatccagattctttcgtggtatctctccagtctcatagaaggacagtcnctcttcaacttgttctcgaagcttctccccgaatacactcntgggcacctcanagaaacaatcnattcgtgaggcaatactgcatttngtttgccantntatcngganatgcggnctttgttattgcanct

SEQ ID NO: 2465 - DNA, 633 bp, Homo sapiens
  misc_feature 503, 517, 550: n = A,T,C or G
acgcgggggaacaccacccagtgtggagcatcccaccctgctcactgaggcacccctgaaccccaaggccaaccgggagaaaatgactcaaattatgtttgagactttcaatgtcccagccatgtatgtggctatccaggcggtgctgtctctctatgcctctggacgcacaactggcatcgtgctggactctggagatggtgtcacccacaatgtccccatctatgagggctatgccttgccccatgccatcatgcgtctggatctggctggccgagatctcactgactacctcatgaagatcctgactgagcgtggctattccttcgttactactgctgagcgtgagattgtccgggacatcaaggagaaactgtgttatgtagctctggactttgaaaatgagatggccactgccgcatcctcatcctcccttgagaagagttacgagttgcctgatgggcaagtgatcaccatcggaaatgaacgtttccgctgcccanaaaccctgttccanccatccttcatcgggatggagtctgctggcatncatgaaaccacctacaacagcattatgaaagtgtgatattgacatcaggaaggacctttttctaacaatgtctatcagggggc

SEQ ID NO: 2466 - DNA, 581 bp, Homo sapiens
  misc_feature 33, 94, 210, 299, 374, 395, 409, 445, 471, 484, 489, 499,510, 517, 540, 543, 563, 571, 578: n = A,T,C or G
actttttttttttttttttttttttttggcttncatttgaacatttaataaaaatgtttaggttgatatcttaaagttgtcagtgaaatctcanatttacataacagtttgcatccagtagtttttttgagtaacacaaacatcagtatagccaaatgttaactcttatcactttttgtgttaataacaaagtaatatttgtaatatagngtccctgaataactataaaaacttcttggaattattttgtttttaaaataaaacactatttaataaatggtatcatagcccttcaaaanacacattctgaaatgctatcagtcagggggcaaaagttgttttagttcagtttattttttaatatgtcctgagtnctttctgttcataaaattatnatcttatgacagcngtaacttttaattaataatattaacaaatcattatngatataggcttttcaatttgctcaanattaggaatttgnaaagngggaatgaancagcccttccnatttganaaattggatccaaaaggtaatcnaantggctttttaaatttaagcntggggganaattaanccc

SEQ ID NO: 2467 - DNA, 654 bp, Homo sapiens
  misc_feature 141, 152, 158, 183, 188, 190, 192, 196, 198, 214, 220, 406,480, 512, 526, 529, 548, 551, 559, 565, 573, 593, 613, 618,643, 645: n = A,T,C or G
acttgttagggaaaaaaaaaagtttgcacccccaaacgtcctgtatcttatgaaaaaaaaaacaaaaccaaaaaaaccccaaaaacccccggaaccaaaaccaaaaaaaagtgcaggtgatttttctaccaaacagcgaancacccttttgnttcccntgcaacttcaaaaaggtttcctatnctatncntntatntncgttctggttggcaanccctgntgatcaaaaaaagtctctgcatgttctagtgttagtaactaatttttatataagttaatgtaggataaagtagagtgcattaagacacaatattgtaatccctacttttaggccttgccttttaactattgttttcagcccttcagaagggtctactctgcctatacaatcaagtactgaaattcntgggaaaaaactttggctcctcatctttctccccaaacaaagggggtttgggtttggttttttttccttaattngcaccaaaaacaaaaaattccatatcaatgtncccttgccctggantancgaatttttgtgggaattnttncacatgcncctttntttgaaanggggtttttccctaatcaancatttggagacactttttgnaaatngggacttttatgtcacccattcggncngttcaacat

SEQ ID NO: 2468 - DNA, 655 bp, Homo sapiens
  misc_feature 526, 541, 568, 582, 583, 608, 626, 636, 637, 645, 650, 655: n = A,T,C or G
actacagacctccacatgttggacagtaggattcagcagagaatgagtcccacatcctcttttcatccataagccactcttcccaactactcttccgccttccattgtccctatgtctactttactgctcaatctggattttggggaacctcctcccaaaaaggcattagaaggaaatgccaagcaccgaaattttgtcaagaagcggaggctcttagaacggagaggctttctgagtaaaaagaaccaaccccctagcaaggcgcctaagttgcactctgaaccttcaaagaaaggggaaactcctacggtcgatggcacttggaagaccccttccttcccaaaaaagaagacagctgcttccagcaatgggtcaggacagcccctggacaagaaagctgcagtgtcttggttgacccctgccccttcaaaaaaggctgattctgttgctgctaaagtagatttgctgggggagttccagagtgcccttccaaagatcaatagccacccaacccgttctcaaaanaagagctcccaaaanaatcctctaaaaaagaaccatccttanaagaatgcccacannaactccacccaagctcattcagaanaataaatgcctccggaancttccaaaannttgccacnggaanaaggn

SEQ ID NO: 2469 - DNA, 331 bp, Homo sapiens
  misc_feature 91, 109, 152, 162, 164, 178, 232, 242, 260, 273, 295, 301,303, 307, 308, 313, 318, 329: n = A,T,C or G
actttttttttttttttttttttttttggaaaaaacttttaacaatttattagtcttattttccagtaaaatattcaaataatgtcaaaanaatgaaatgatagcgatntagccaactacctttaattaattccacataaatatttaaaatntaaaaacctnanatcagcagaccgantcgaaatctgattcttcaaagcaagtattgctttacccttgtcctgaatgcagnccgtcatatnaccactaacttgcatgtnaccaaatgtttgnatagtgttttttaaatttgctntcgggnanccgnnatccntcaanccaagaaaaanat

SEQ ID NO: 2470 - DNA, 652 bp, Homo sapiens
  misc_feature 25, 169, 200, 235, 318, 330, 365, 370, 382, 386, 425, 463,563, 579, 582, 587, 596, 614, 626, 629, 647: n = A,T,C or G
acttttttttttttttttttttccnaaagtggtttatttgcaatttacatggattcctctactttgtgaggtttagtataattgaaatgtattgcaattttcaggaacattacctacaaattgatattaggtggtctacagcttgtaattgatgtgcttcatgataaanatggcagtaatgatgttttaaatattctagngctcactggatttcatttttgcaggcaatttgcanctcctctgagtaaaacatttatattcaattacagagtctgataaataggattcccgccaccccaccccttctaatcactgcanagtattaatagngctttcttatggctgatttcttgcagggagcaaanataanattatagccaantttntttcaaaacctcagcagcatctccttctggtagctattnaaatattttcttccacctctttgacttcaaatgacacnaccttgccatccactacttcttgcacgactgtcttaatcttcctggttttctttatatctctctctccagggggcttaacctgatattctgtagtttttncgtcttctccttccanaangcggnggtaagtancaatttcctgttcagtcnagtctttatgtnaanaaagattggtattcgttnttctg

SEQ ID NO: 2471 - DNA, 551 bp, Homo sapiens
  misc_feature 55, 67, 89, 129, 145, 151, 166, 186, 192, 232, 301, 348,355, 372, 395, 404, 420, 434, 455, 468, 483, 500, 520, 521,534, 538, 544: n = A,T,C or G
acttttttttttttttttttttttttttttaggataaatactatgctttaatganccccttaaatanaaattccactacaaaaatacanaggagatagggtgtttcctgtatccgcctcattcccatanaaaactataagggaanaaatanaacttggaattaaancagcagcaaggcgaggtganaatgcnatttctaggccatcttgttgggactgatgaacagcatctntgatctcatgatttaacatctggttatccaaaagggatgggattggcctaaaaaaaccgatcaatttcnggattggttttgtttcttaatccttcaaatgacaagaagcaaaaatntttgtanaaactaagcaagacaanagttggagcagttaacaccactntctgcagcnagaaactcagaccttnttagtgaacttaanggctgaagtgtgaaagctgangctgcaagtgcanatcaaaaaaaaaaangattttacagaccctcntctaccccaaatccccccgnntacctgcccgggngggncgttcnaaagggc

SEQ ID NO: 2472 - DNA, 654 bp, Homo sapiens
  misc_feature 95, 128, 518, 583, 613, 633, 646: n = A,T,C or G
actttttttttttttttttttctgggactctggagatgccgaagcacacgccttcaagagtcccagcaaagaaaataaaaagaaagacaaagatntgcttgaagataagtttaaaagcaataatttanagagagagcaggagcagcttgaccgcatcgtgaaggaatctggaggaaagctgaccaggcggcttgtgaacagtcagtgcgaatttgaaagaagaaaaccagatggaacaacgacgttgggacttctccatcctgtggatcccattgtaggagagccaggctactgccctgtgagactgggaatgacaactggaagacttcagtctggagtgaatactttgcaggggttcaaagaggataaaaggaacaaagtcactccagtgttatatttgaattatgggccctacagttcttatgcaccgcattatgactccacatttgcaaatatcagcaaggatgattctgatttaatctattcaacctatggggaagactctgatcttccaagtngatttcagcatccatgagtttttggccacgtgccaagattatcccgtatgtcatgggcagatagnttactggatgttttaacaaaagggggggcnttccaggaccctacaaaganatgggagatgtcnttcctgaa

SEQ ID NO: 2473 - DNA, 504 bp, Homo sapiens
actgaagaacattcccatggatatcggttaacttgcctcccacagcatgtaaaataacttctggagcacaagtatcccacttcttacaaccaggacttgcaaatacataagcagaggctttgccttcaatcagctgaataatcttatttcctgctcctcctactcgcagcacagcatcggggttcatagcagcaacacagtcagtaaccaacttgttgctatgggatcgagtagttgtgataatgtgtttcccagcagggacttctttcagctgaaacccaaaggcgcctaaacctaaaactccccagattgtcctccccaacacagcatctggtcctgcctcatagttgtaatatggctggttaataactcctgctatggcttttccttcataagcaattccaataagaactgttacattgtcaagaagaccttcggtatattccttggttccatccagaggatcaacccagaccacgagatcttcttctttaatagcactgt

SEQ ID NO: 2474 - DNA, 191 bp, Homo sapiens
  misc_feature 126, 190: n = A,T,C or G
acgcgggcaacatgactgtcctttaaactccagtggctggccaggcacggtagctcacgcctgtaatcccaacactttgggaggccgaggcaggtggatcacctgaggtcagaagttcaagaccancctggccaacatggggaaaccctgtctttactaaaaatataaaaattagctgggtgtggtggcng

SEQ ID NO: 2475 - DNA, 429 bp, Homo sapiens
  misc_feature 25, 71, 96, 100, 192, 203, 358, 366, 423: n = A,T,C or G
acttttttttttttttttttttttnggtttttttttttccacacctgccctttattggtctcttctagcanagtggctccaggcccttcacgcctntcanacaccacccatgagggtttaggaaggtgccatcattctgtgaaggcccaaagcttacccaagtcttggagcccaagttgaatcaccaaccanagggttggganaggaaaaggaaacaggcagaggggaaaggcaaggctctgcagtgaaggggactgatatcaagggaatgctgaggtccagcagtgtctcctgaaggcatgctgcatcctaaggctcctcaggactggatggagtaggagatctgggtgttgaccanttcacatntatatggcaactttaaggaggcgcttgatgtcaggctcaatgttgatggttgggaangtgcaa

SEQ ID NO: 2476 - DNA, 469 bp, Homo sapiens
  misc_feature 28, 31, 185, 273, 330, 383: n = A,T,C or G
actttttttttttttttttttttttttnggnttcaaaagggtgtttactatttggccaaacaatattttttaattgtcagtcataaagtgaaatacatactaaaatatatattaaatattcaccaaatctgcattgctgctacatgaaaacattttttggtctgttggaaaatgtaattcctganatcattgttgggctttgtcaatcattttcctcaccatcaaatcaccctaagtgacttgggagtgtgaatctaggatgttcaattttanaccaattttctctatcttctaaatgagtaaacaggctctgtcttttataaaaggtanaaaaataaccatggtgtgctaatttttttcaaggtataccatatggaaaagtntaggctgaacacaaaggaagtcttttctgaatggctctcgatcacacataaggaacatatgttttccagttaatctgccttgatgt

SEQ ID NO: 2477 - DNA, 248 bp, Homo sapiens
  misc_feature 214, 223, 244: n = A,T,C or G
accggaccctgcagccgcagagatgttgatgcctaagaagaaccggattgccatttatgaactcctttttaaggagggagtcatggtggccaagaaggatgtccacatgcctaagcacccggagctggcagacaagaatgtgcccaaccttcatgtcatgaaggccatgcagtctctcaagtcccaaggctacgtgaaggaacagttcgcctgnagacatttntactggtactatttttttttnttta

SEQ ID NO: 2478 - DNA, 652 bp, Homo sapiens
  misc_feature 433, 443, 504, 527, 538, 553, 560, 599, 603, 609, 617, 646: n = A,T,C or G
acgggtatcactttccggagctggtgaagatcatcaacgacaatgccacatactgccgtcttgcccagtttattggaaaccgaagggaactgaatgaggacaagctggagaagctggaggagctgacaatggatggggccaaggctaaggctattctggatgcctcacggtcctccatgggcatggacatatctgccattgacttgataaacatcgagagcttctccagtcgtgtggtgtctttatctgaataccgccagagcctacacacttacctgcgctccaagatgagccaagtagcccccagcctgtcagccctaattggggaagcggtaggtgcacgtctcatcgcacatgctggcagcctcaccaacctggccaagtatccagcatccacagtgcagatccttggggctgaaaaggccctgttcanaaccctgaanacaaggggtaacactccaaaatatggactcattttccactccaccttcattggccgagcanctgccaagaacaaaggccgcatntcccgatcctncaaacaaatgcattnttgcctnacgaattcgattgctttctctgaggtgcccacgaatgtnttcngggganaagcttcnaaaacaagttgaagagcgactgtcctttntatgaa

SEQ ID NO: 2479 - DNA, 652 bp, Homo sapiens
  misc_feature 446: n = A,T,C or G
acaggagatctcatttgggacaactaaggataaaatgctggtcatcgagcagtgtaagaactccagagctgtaaccatttttattagaggaggaaataagatgatcattgaggaggcgaaacgatcccttcacgatgctttgtgtgtcatccggaacctcatccgcgataatcgtgtggtgtatggaggaggggctgctgagatatcctgtgccctggcagttagccaagaggcggataagtgccccaccttagaacagtatgccatgagagcgtttgccgacgcactggaggtcatccccatggccctctctgaaaacagtggcatgaatcccatccagactatgaccgaagtccgagccagacaggtgaaggagatgaaccctgctcttggcatcgactgtttgcacaaggggacaaatgatatgaagcaacagcatgtcatanaaaccttgattggcaaaaagcaacagatatctcttgcaacacaaatggttagaatgattttgaagattgatgacattcgtaagcctggagaatctgaagaatgaaacattgagaaactatgtagcaagatccacttctgtgattaagtaaatggatgtctcgtgatgcgtctacagttatttattgtacatccttttccagaccct

SEQ ID NO: 2480 - DNA, 302 bp, Homo sapiens
  misc_feature 132, 139, 166, 198, 205, 209, 217, 227, 230, 241, 247, 259,265, 274, 282, 290: n = A,T,C or G
accataggattttggaagatggtatcatcaattcttctagttagtgatggtgttttctcagtagttcttaccagacactcctcaagtgaatgagttaaatgaatattgtttatatattcttgtcccttctgntctaacncatatttgcaccctggataccatttancatgttgttcccaagggtcttcactgggcttncaatcanatanccctcctnctcactgaangcnctctactatanctcctncacctaaattcnttaatntccacgctnttggcaanctgcttcnattgatatcatc

SEQ ID NO: 2481 - DNA, 653 bp, Homo sapiens
  misc_feature 506, 556, 574, 595, 601, 614, 627, 629, 636, 637: n = A,T,C or G
acgcggggtcttttctcgggacgggagaggccgtgtagcgtcgccgttactccgaggagataccagtcggtagaggagaagtcgaggttagagggaactgggaggcactttgctgtctgcaatcgaggttgagggtgcaaaaatgcagagtaataaaacttttaacttggagaagcaaaaccatactccaagaaagcatcatcaacatcaccaccagcagcagcaccaccagcagcaacagcagcagccgccaccaccgccaatacctgcaaatgggcaacaggccagcagccaaaatgaaggcttgactattgacctgaagaattttagaaaaccaggagagaagaccttcacccaacgaagccgtctttttgtgggaaatcttcctcccgacatcactgaggaagaaatgaggaaactatttgagaaatatggaaaggcaggcgaagtcttcattcataaggataaaggatttgggctttatccgtttggaaacccgaccctancggagattgccaaagtggagctggacatatgccactccgtggaaaagcanctgcggtgtgcccttttnctgccatagtgcatcccttanagttcngaaaccttccttnagtatgtgtccancnaaactgnntggaaaaaaccctttt

SEQ ID NO: 2482 - DNA, 334 bp, Homo sapiens
  misc_feature 277, 288, 289, 296, 314, 330: n = A,T,C or G
acgcggggttctccccagatgacaaatactctcgacaccgaatcaccatcaagaaacgcttcaaggtgctcatgacccagcaaccgcgccctgtcctctgagggtcccttaaactgatgtcttttctgccacctgttacccctcggagactccgtaaccaaactcttcggactgtgagccctgatgcctttttgccagccatactctttggcatccagtctctcgtggcgattgattatgcttgtgtgaagcaatcatggtggcatcacccataaanggaacacattnnacttttntttctcatattttaaatnactacaagattattanagat

SEQ ID NO: 2483 - DNA, 529 bp, Homo sapiens
  misc_feature 23, 87, 173, 223, 380, 392, 437, 494, 507: n = A,T,C or G
acttttttttttttttttttttnggaatcctaactctattaatagtgttgatacatttcttctaaatttgctgccttgcctcagtanatctttactctgggatccaggtgactgtctgggtaatttaggtgatgactcttccaacaaacaatctgtaatccccacattattanaattgggtaatacatgttttttggctttttggaactctcctgaattgtanataatacccctacattccaaacactcccaattttgctcccatgaccgtaatgaggagcaggctaaatgtgtgccactggaaccacaacactgacagcgccttatttcccatttgctatcaggtgcattatagtctcgcccttctttgcaacgacatnttcgaacatcanaacgctcatagtgctgcaaaagctcttgataagcgttttcctctnattcccaggaagcatctttttcaggaattgaattcccattctcaacatctctttctnaaagatgtcactnttattgcatattgtacctcggg

SEQ ID NO: 2484 - DNA, 651 bp, Homo sapiens
  misc_feature 22, 38, 148, 165, 171, 396, 419, 478, 552, 558, 566, 582,596, 613, 635, 639, 642, 644, 646: n = A,T,C or G
actttttttttttttttttttngccaaagacaaactanagcaatgcctatgtaagaacaaggactctcaagatcctgctacacagtattcacaatcaaaagggcccaagattcaggaccacctaaagacaactgacaaaaagtgtcanagccagaggccaacctntgctanatgaagcagcagcacatgactccatttctatctgataaggagacagagaagaggcatctcgaacagatgaaaaaccaaaggctggtgtcctaaaaaaaaacagattggcttcaaagaaaacactaaggaagaccccagagctgtattaattttagtaaaaataatcatatgccaacaggggaattgaaccactttctaaatcatagtatgaactcatctcttcanatcttggtaagtggtcaaagctngtttttataattactttcactgtcttgggcaaaaagtctttcttatctttggtccttangtgtggtatcagtttcttccatttttttatgggttcaaaaaaatctttttttactttgacatcacaaccaaggngcagtntaaacacnaagttgctggatttgntggtttttatacanataaaataaccacattntcccatacatttttataggctntccnaangntntaaaa

SEQ ID NO: 2485 - DNA, 311 bp, Homo sapiens
  misc_feature 269, 274, 280, 282, 283, 308: n = A,T,C or G
accaacctggctactggaatccccagtagtaaagtgaaatattcaaggctctccagcacagacgatggctacattgaccttcagtttaagaaaacccctccaaagatcccttataaggccatcgcgcttgccactgtgctgtttttgattggcgcctttctcattattataggctccctcctgctgtcaggctacatcagcaaagggggggcagaccgggccgttccagtgctgatcattggcattctggtgttcctacccggattttnccacntgcgcntnnttactatgcatccaaaggcttcccnggt

SEQ ID NO: 2486 - DNA, 565 bp, Homo sapiens
  misc_feature 39, 359, 406, 410, 473, 475, 485, 514, 519, 522, 545, 548: n = A,T,C or G
ggtacttatataaaatctagtccagttctctcatttaanaaaatgaagacactgaaatacagacttaaatagctcagatagctaattaggaaatttcaagttggccaataatagcattctctctgacatttaaaaataatttctattcaaaatacatgcataattgattttacacctcattactggtggataatttatgtgatgtggattgctggtgtccagcatgacccataaacaggtcagaagaatgatggaatgttttagaataaactcctgcttatagtatactacacagttcaaaagatgtttaaaatgcttttgtatttactgccatgtaattgaaatatatagattattgnaacctttcaacctgaaaatcaagcagtatgagagtttagttatttgnatgnggcactagtggctaatgaagcttttaaaatctaccatttcttctttaaaaatattattaatgngnatgggatatnacaattcacttaatttccccaccttattntgggnggnaccatggtttcccaattttgaanggngggggttaacctttaat

SEQ ID NO: 2487 - DNA, 565 bp, Homo sapiens
  misc_feature 393, 445, 464, 479, 494, 497, 501, 525, 529, 536, 547: n = A,T,C or G
acttttttttttttttttttttttttgagctgagaccaggagaaataactttatttgaataggacccaagacagcatattgggctaaggaggagaggtaaggttccaaaaccgcagtcaaagctcatcaaccaaatggactctacttcccagcaaccttgcagttagtgcaaccaacaaaaggcctgctggggaatgtatttgccactaaattccccaagtatgccaacattacaaaaaagataggtttttcatcataattgaatttccacaaacctccccaatcacaagtattataagtggaagtaaaaaatcacattttacagatctcaaacttgtcttcaacatttagttcatcatcttcaaaaaatagctcccctgcctaattcattanctatatgatctaaccaagcagcaacaaagatggccaggccatggcaatcctnttccatttccctaccactnagggcttaacaacanggtgaggcttaagtngangtangggggtggggggcaaaagggttantttnccccatnccttgggcggnacccccctaaggggaatt

SEQ ID NO: 2488 - DNA, 562 bp, Homo sapiens
  misc_feature 34, 39, 40, 202, 217, 420, 451, 468, 472, 474, 484, 487,491, 501, 514, 516, 532, 535, 538, 548, 549, 557: n = A,T,C or G
ggtacttttttttttttttttttttttttttggntccanngatcctttactgagatccacttgaaacacttcggtccttaacttgttaactgagttgacaggctgatggctgatctaggtaaaggtttcacggtagcaaaaacacttcctgcctataatacatcaaaacaggttcctgaatgtgtgtgaatatcatcaaggnctctgtcccatcttnttcagggttcgattaagctcctcaaatttgtggatctgacggatgaagaaatccccataacgcctggcgaccttggtgtccgcgatgtggatcatgtccttatcaatgtagaagtcaacctctgaggctgactgaaattcaccatccagggctgaaaaacccgctggccccacgagggtctttatcttgtgtttgaagacaanaagctggatcccgaacttcctgctctgtganggctaagaagccacccncttngncccaggcatnggngggnttaaactttnagaaacctcggtngnttaaaacttggccttntgnttnccttcccggnnggccttcnaaggg

SEQ ID NO: 2489 - DNA, 574 bp, Homo sapiens
  misc_feature 351, 389, 411, 421, 435, 447, 450, 464, 469, 481, 484, 485,486, 492, 498, 506, 508, 514, 515, 516, 535, 538, 546, 548,552, 556, 557, 558, 568, 570, 574: n = A,T,C or G
acaggccctttgatggcttgggttacagacaacctcatagctggtgcaccacacacacgagataaaacaggaagcctaaaaaccccaagccacaccaagaaaaatgagagaggggagggcggggtaacaatgcagcatcccgcggagggaacttaatgcacaaggagggagaacagagggtggaaggcaagccagcttcgtcttcgccgccgcagctgctgtgtggtggtcaggggactgagttccccgcgtacgcgggcaagtttagaaccctagtgtttttcagggggtaactaaatttaaaaagccttaaatgggctgggtgtggtggcttcacacctgtaattccancacttttgggagggccaaggtgggcctgatcaccaaantcatgaagttcaagaacacctngccaacatantgaaaccctttttntttcttaaaatncanaataaaaaaaattntcccngttgttgtggcnggnnnctttanttcccncttttttngnaggccnnngctggaaatttattttaanccngaagtggngntttntttnnntttaattttntncttn

SEQ ID NO: 2490 - DNA, 560 bp, Homo sapiens
  misc_feature 396, 401, 428, 446, 449, 452, 455, 460, 462, 467, 471, 476,489, 494, 501, 503, 506, 517, 518, 519, 522, 524, 530, 531,533, 536, 537, 538, 542, 551, 554: n = A,T,C or G
ggtacctcttggaaaacctcaatgcaagatagggtttcagtgctggcatattttggaattctgcacattcatggagtgcaataatactgtatagctttccccacctcccacaaagtcacccagttaatgtgtgtgtgtgtttttttttaaggtaaacattactacttgtaactttttttcttagtcatatttgaaaaagtagaattgagttacaatttgattttttttccaaagatgtctgttaaatctgttgtgcttttatatgaatatttgttttttatagtttaaaattgatcctttgggaatccaagttgaagttcccaaatactttataagaagtttatcagacatctctaatttggccatgtcagtttatacagtttcaaaatatagcanatgcnagattatgggggaaatcctatattcanaagaccttgcccggcggncgntcnaanggccnanttcancccnctggnggccggttctaanggganccgagcncnggnaccaacctggnnnaanantggcannantgnnncttnggggaaatnggnatcccc

SEQ ID NO: 2491 - DNA, 561 bp, Homo sapiens
  misc_feature 33, 34, 382, 455, 464, 470, 474, 480, 481, 492, 496, 499,501, 509, 518, 519, 521, 522, 529, 535, 542, 551: n = A,T,C or G
ggtacaactgattttttaatggaaatatattannatgacctgtataaattatgagattcaaaacagtggcgccactatactgctaaacctatgcatgaaggtagtgactaggatggaaatctgtcagtgctacaaaaatatgtatgaacaaaataattttcaccctttgataaagctacaagatataaaatttagaatacttatataatttcatactagatatgtgaaaaatatgccatgctagaaccatcttgttccaaagtttgaaacatattctgtcaaaaatactcttcgtacttgatgaacctgtttcaagtttctcgtcctccctgaaaagggttaccccaagcagtctggctatcagtgcagtgggacctccatntatgttgggttatgtaggtggatggatgaaactaggtgggcctatgttcccatcttttttctctcttttaagnagaagacangatttnccangggagnngggggctacanagtnccncnttcttttngtgctgggnnannacttttngccaanttggccnaatctcttnggttaaccct

SEQ ID NO: 2492 - DNA, 558 bp, Homo sapiens
  misc_feature 28, 29, 33, 96, 126, 132, 165, 200, 209, 246, 264, 274, 353,381, 390, 395, 396, 402, 404, 427, 432, 436, 441, 442, 445,449, 451, 458, 460, 467, 482, 486, 492, 499, 500, 504, 509,513, 516, 518, 530, 537, 546, 549, 553: n = A,T,C or G
gggacttttttttttttttttttttttnntacngatacaattggcttttatttgcgattcatgagtcagggcagtttccattctgcaaaatatagngatagctcctactgggcaatacaacagtanaacagngggttttgtaaaatgggaatccaggaacagaanaatataaataaattgatttaaataaactgattggntaatttcanaatacttcatattacttttttctaagagttaaagcanaaaggactttcttactgngctgactcanacagcctggactctcatgtttttaggaaaattttgtctgttctgggatctacctgcttcctcatgtttcaggggggagnatatggcatttaacatgactggctccanttctggagncaccnngcctgncnccctaaatgagagtttgactaancatanggcnttaannctnctgncnggtcccncntttttgnacttccctccttccnaggntatgangcccccnnaccntaccnttanctngnctttttggcttnccccccnaaaacaaanttncacnttgcc

SEQ ID NO: 2493 - DNA, 548 bp, Homo sapiens
  misc_feature 29, 74, 90, 105, 126, 131, 192, 261, 283, 299, 305, 309,310, 315, 318, 319, 325, 334, 350, 353, 362, 365, 373, 421,427, 444, 457, 472, 487, 491, 492, 495, 512, 515, 518, 524,526, 528, 542, 544, 546: n = A,T,C or G
acttttttttttttttttttttttttttntacttttttttttttttttttttttttttttttttttttttttanggggccaattttaaanagttttatttaaaanattgcattttccacttacaanacagngtttataaagggcaatgttatttccttcccctgggcatatgttccatattcaagtattganaatgcccagtaacttactatagcagcttaactttttaaaactgccacaaaatttgctacaaatttaggnccttcaaatgttttaaatgggnggaacaatgctacatntacacntggnnggctnaannaacctnttaaatggngggccctggggaagcnccnccagagggnggngctccccnccaggaaatcccccaggcatttctctgggatgcctctggactttgggnaccttnggccgggacacccttanggcgaaattccancacactggcgggccntactaaggggaaccnaccnnggnccaaacttgggggaaanaanggnaaaacngntncctgggggaaaatntnancc

SEQ ID NO: 2494 - DNA, 577 bp, Homo sapiens
  misc_feature 348, 459, 466, 477, 492, 528, 534, 537, 563, 573: n = A,T,C or G
ggtacacttgaaaccaaatttctaaaacttgtttttcttaaaaaatagttgttgtaacattaaaccataacctaatcagtgtgttcactatgcttccacactagccagtcttctcacacttcttctggtttcaagtctcaaggcctgacagacagaagggcttggagattttttttctttacaattcagtcttcagcaacttgagagctttcttcatgttgtcaagcaacagagctgtatctgcaggttcgtaagcatagagacgatttgaatatcttccagtgatatcggctctaactgtcagagatgggtcaacaaacataatcctggggacatactggccatcangagaaaggtgtttgtcagttgtttcataaaccagattgaggaggacaaactgctctgccaatttctggatttctttattttcagcaaacactttctttaaagcttgactgngtgggcnctcatccaagngatgaatccccgtanctggcccggcgggcggttcaaaagggggaattccanccactnggnggccgtctaatggatccaacccgggnccaacttggngtaa

SEQ ID NO: 2495 - DNA, 691 bp, Homo sapiens
  misc_feature 285, 403, 414, 418, 440, 453, 460, 466, 472, 527, 551, 566,579, 589, 607, 608, 610, 614, 615, 617, 637, 645, 649, 653,655, 660, 662, 665, 666, 669, 670, 682, 685, 691: n = A,T,C or G
acttttttttttttttttttttttttttgagtgtgggtttagtaatggggtttgtggggttttcttctaagccttctcctatttatgggggtttagtattgattgttagcggtgtggtcgggtgtgttattattctgaattttgggggaggttatatgggtttaatagtttttttaatttatttagggggaatgatggttgtctttggatatactacagcgatggctattgaggagtatcctgaggcatgggggtcaggggttgaggtcttggtgagtgttttantggggttagcgatggaggtaggattggtgctgtgggtgaaagagtatgatggggtggtggttgtggtaaactttaatagtgtaggaagctgaataatttatgaaaggaaaagggtcanggttgattccnggangaaccctattggtgccggggcnttgtatgaatatnggccttnattaantataantacctggttgaaaatgttggttggggtatataatgtaattgaaatgctccggggnataggtatttgaataggaataggnttggataatgggaanaaaaagaaggaantaaattaatntccctttgggttaagggnnancccnntncttggcggaacccctaagcnattaacanctgnggcntnaatgnancanntgnncaacttggaaantgnctaacn

SEQ ID NO: 2496 - DNA, 585 bp, Homo sapiens
  misc_feature 457, 480, 488, 493, 497, 499, 539, 543, 547, 548, 569, 572,574: n = A,T,C or G
acattctagctgagaagcaatgggtcactcattaatgaatcacatttttttatgctcttgaaatattcagaaattctccaggattttaatttcaggaaaatgtattgattcaacagggaagaaactttctggtgctgtcttttgttctctgaattttcagagactttttttataatgttattcatttggtgactgtgtaactttctcttaagattaattttctctttgtatgtctgttaccttgttaatagacttaatacatgcaacagaagtgacttctggagaaagctcatggctgtgtccactgcaattggtggtaacagtggtagagtcatgtgtgcacttggcaaaaagaatcccaatgtttgacaaaacacagccaaggggatatttactgctctttattgcagaatgtgggtattggagtgtgatttgaatgatttttcatttggcttanggcaagaattttatgccaaaagntcttcatntgagntttnanggagaaaaaaccttaatggatctgatatggtttccctcanggancccnnctgggaaaaaaaaaacccttnttngngggtttaacaa

SEQ ID NO: 2497 - DNA, 696 bp, Homo sapiens
  misc_feature 465, 528, 536, 554, 555, 556, 557, 558, 559, 560, 570, 588,592, 615, 616, 619, 626, 629, 638, 640, 654, 657, 660, 661,685, 694, 695, 696: n = A,T,C or G
acagccagcaaagggcgctatattcctcctcatttaaggaaccgagaagctactaaaggtttctacgataaagacagttcagggtggagttctagcaaagataaggatgcgtatagcagttttggatctcgtagtgattcaagagggaagtctagcttcttcagtgatcgtggaagtggatcaaggggaaggtttgatgatcgtggacggagtgattacgatggcattggcagccgtggtgacagaagtggctttggcaaatttgaacgtggtggaaacagtcgctggtgtgacaaatcagatgaagatgattggtcaaaaccactcccaccaagtgaacgcttggaacaggaactcttttctggaggcaacactgggattaattttgagaaatacgatgacattccagttgaggcaacaggcaacaactgtccttcacatattgaaaggttcagtgatgttganatgggagaaattatcatgggaaacattgagcttactcgtatctcgccaattcagtgcaaaacnttccattnctattatcaaaaaaaaannnnnnnaaaaaaagtncttggccggacaccttanggcnattcacaaatgggggccgtctannggntccactnggnccaacttgngnaactggcaaactgntcnggnnaatgtttccttcaatcccaatttngcggactannn

SEQ ID NO: 2498 - DNA, 704 bp, Homo sapiens
  misc_feature 411, 472, 501, 515, 523, 566, 579, 587, 589, 596, 600, 608,614, 630, 634, 638, 649, 652, 653, 656, 665, 685, 688, 700: n = A,T,C or G
cgaggtactggctgggatggctctgatatagcagccttggtgtagtttctgcatttcgggaagagtgactggactggattcttctagctccttcaatcccattttctcctgtggcatcactaagtataagacctgctctcttcctgaagacctataagctggaggtggacaactcaatgtaaatttcaaggaaaaaccctcatgcctgagatgtgggccactcagagctaaccaaaatgttcaacaccataactagagacactcaaattgccaaccaggacaagaagttgatgacttcatgctgtggacagtttttcccaagatgtcccaagcctcatcgtgacgaggctcttatcccactccatttttcctgctcatgcctgcctctttaatttggtaagataatgctgnaactagaatttcacaatcagcgccttgtgcaggtaatttgcagaatggtggatgtgcatgncatcatgtcaaacccaatatttgactaanggatccttattctngccaatgnttactttacacatcctaatacactggttattcaatcccggggncctggtaaagtanaccttaantnactggtntacncctggttnaattanccactttggatcccanaaanaatntgccactactnaannggngaatttgcnatgtgaacctttggtgccanaanaaaccgggggcngccg

SEQ ID NO: 2499 - DNA, 586 bp, Homo sapiens
  misc_feature 348, 357, 407, 409, 458, 476, 560, 576, 582, 586: n = A,T,C or G
ggtacacttgaaaccaaatttctaaaacttgtttttcttaaaaaatagttgttgtaacattaaaccataacctaatcagtgtgttcactatgcttccacactagccagtcttctcacacttcttctggtttcaagtctcaaggcctgacagacagaagggcttggagattttttttctttacaattcagtcttcagcaacttgagagctttcttcatgttgtcaagcaacagagctgtatctgcaggttcgtaagcatagagacggtttgaatatcttccagtgatatcggctctaactgtcagagatgggtcaacaaacataatcctggggacatactggccatcangagaaaggngtttgtcaagttgtttcataaaccagattgaggaggacaaactgctctgncnatttctggattctttatttcaacaaacactttcttttaaacttgactgngtgggccctcatccaagngatgaataatcatcaaggggtttggtggttgggcttgggattatataaaacttcttctattgttgaggcccaaagagttggccnccccacccctgggganggggtngggn

SEQ ID NO: 2500 - DNA, 584 bp, Homo sapiens
  misc_feature 156, 452, 485, 489, 519, 535, 538, 555, 573, 576: n = A,T,C or G
ggtactttttttttttttttttttgtagatacaattggcttttatttgtgattcatgagtcagggcagtttccattctgcaaaatatagtgatagctcctactgggcaatacaacagtagaacaagtgggttttgtaaaatgggaatcccggaacngaagaatataaataaattgatttaaataaactgattggttaatttcagaatacttcatattacttttttctaagagttaaagcagaaaggactttcttactgtgctgactcagacagcctggactctcatgtttttaggaaaattttgtctgttctgggatctacctgcttcctcatgtttcagtgtgagtatatggcatttagcatgactggctccattctggagtcaccaggctgtcacctaaatgagagttgactaaacataaggcattaacactctggcaggtacccatcanttttggacttccatcattcataaggtatgaagncccnctaatcatacaatttattttgagtttttgncattcccccccaaaanaanaaatttgacatttgccnaaagggtggttccaaccnttnaagggttt

SEQ ID NO: 2501 - DNA, 600 bp, Homo sapiens
  misc_feature 31, 215, 361, 401, 418, 430, 457, 479, 498, 519, 520, 525,541, 542, 545, 552, 582, 584, 588, 590, 595: n = A,T,C or G
acctgaaaaataaagagaaaaaagcacagangccagtgaaagaaggacagccgagtccagcagatgagaaggggaatgacagtgatggggaaggagaatctgatgatcctgaaaaaaagaaactacagaatcaacttcaaggtgccattgttatagaacgaccaaatgtgaaatggagtgacgttgctggacttgaaggagccaaagaagcactnaaagaggctgtgatactgcctattaaatttcctcatctttttacaggcaagagaacaccttggaggggaatcctattatttgggccgcctggaacaggaaagtcctacttattcaaagctgttgcaccagaagccaacagcctcancatttttttcaatatcttcctcttgatcttgtttctaaantggctagggtgaaagtngaaaactggttnagaatttatttccaacttggccagaanagaacaaggcctttcatttttntttattggatgaaaaattnatttcttttcttttgggttcnnaaatngaaaattaaatttgannccnctccttntaaattaaaaccggatttcttattgccaantncaangnggttngggtt

SEQ ID NO: 2502 - DNA, 713 bp, Homo sapiens
  misc_feature 466, 501, 516, 519, 538, 546, 557, 568, 570, 591, 614, 620,626, 631, 634, 639, 645, 658, 664, 692: n = A,T,C or G
ggtactatagagactcagttgcaaaaattaacaaatatgctgcttgattaaaatgggtaggcttctcatgtggctcattctttaatctattctcttttatttggtttggttcatggggtctctgcctatggatcatacttcaaactcttggtgtgatcctcctgattgtcacaatattagttaccctggtgtgctgtattctctaaaacctttaaatgtttgcatgcagccattcgtcaaatgtcaaatattctctctttggctggaatgacaaaaactcaaataaatgtatgattaggaggacatcataacctatgaatgatggaagtccaaaatgatggtaactgacagtagtggtaatgccttatgtttaagtcaaactctcatttaggtgacagcctggtgactccagaatgggacccagtcatgctaaatgccatatactacactggaacatgaagaaacnaggagatccagaacagaccaaattttctaaaaacntgagaatccagctgnctnagtcagcccagtagaaagnccttctgntttactcttanaaaaaagtatntnaagtttctggaattaaccatncgttatttaaatcaattaattanatctcnggtccnggatncanttacnaaaccntggttaacggtgnttgccnatggactttcttttttgccaaaggaatngcctgcttgaatcaaataaac

SEQ ID NO: 2503 - DNA, 586 bp, Homo sapiens
  misc_feature 500, 516, 530, 537, 548, 551, 569: n = A,T,C or G
acccactgtatttatttatgtgcaacaagaagtgtcagcaactgcacaaactcctccctgttcagctagtaggcagcaattctgttatctggcatcccatagctgggttaaattaaaacagggcgtgagaacaggtgagtctagaggtctaactctaacagggaccaccgtgcatttgaataaacagttgtattagggatgttgttaaagttagccactgggcagaataaaggatcccttaggtcaaatatttgggtttgacatgatgacatgacacatccaacactctgtcaaattacctgcacaaggcgctgattgtgaaattctagttacagtattatcttaccaaattaaagaggcaggcatgagcagggaaaaatggagtgggataagagcctcgtcacgatgaggcttgggacatcttggggaaaaactgtccacagcatgaaagtcatcaacttcttgtcctggttggcaatttgagtggctctagttatggnggtgaacatttttggntagctttgagtggnccacatnttaagcatganggnttttccttgaaattacantgagtgtccccctccac

SEQ ID NO: 2504 - DNA, 565 bp, Homo sapiens
  misc_feature 391, 421, 435, 467, 522, 526, 534, 548, 565: n = A,T,C or G
ggtactatagagactcagttgcaaaaattaacaaatatgctgcttgattaaaatgggtaggcttctcatgtggctcattctttaatctattctcttttatttggtttggttcatggggtctctgcctatggatcatacttcaaactcttggtgtgatcctcctgattgtcacaatattagttaccctggtgtgctgtattctctaaaacctttaaatgtttgcatgcagccattcgtcaaatgtcaaatattctctctttggctggaatgacaaaaactcaaataaatgtatgattaggaggacatcataacctatgaatgatggaagtccaaaatgatggtaactgacagtagtggtaatgccttatgtttaagtcaaactctcatttangtgacacctggtgactccagaatggaaccnggcatgctaaatgncctatctcacactggaacatgaggaacaggtngatcccaaacagaccaaaattttctaaaacatgaaaatccagctggctgatcacncagnaaaaaagnccttttgcttactnttaaaaaagtatttgan

SEQ ID NO: 2505 - DNA, 606 bp, Homo sapiens
  misc_feature 1, 3, 15, 17, 19, 20, 22, 37, 46, 52, 66, 72, 73, 86, 91,111, 116, 119, 129, 136, 154, 236, 239, 252, 258, 271, 288,296, 317, 324, 329, 337, 338, 340, 354, 360, 371, 391, 415,422, 426, 430, 466, 472, 475, 485, 489, 516, 523, 546: n = A,T,C or G
  misc_feature 584, 596, 605: n = A,T,C or G
ncnagcggccgcccngncnngnacgcgggcatgtgcncctatggcncacccnctgcagaacaggangctccnngagcccttggttnctccncgaaaacccccaacattacnaaccnccnagtgtcctgnaccctgncctaaataatcccacccncacttcatgcccactgccgatgcccaatccaggcccggtgaggccaaggtttcccagacgagcctctgcgcctctccactgnttnatgagcccaaacnccctcntggcacaacgctntaccctgcagcttgganaactccantggatggggagactcatgcangacttcnctgcngcctttcnnangactctgcagatantgcctntgcaaactaangagtgactaggtgggttggngaccccttacgaatgtttctcggnaccaggngccntcantgctggaattgagggctaaatcccaaagtgtctctngactgnctnaagaaataanggcnccaacttactcacccccatggccacanggaagcncggaccggaccttaatttggaanttttggttttggggccgggttttttttttttttttggnttgattaagganttaaaaacng

SEQ ID NO: 2506 - DNA, 575 bp, Homo sapiens
  misc_feature 84, 506, 522, 537, 540, 545, 560, 562: n = A,T,C or G
ggtacctgttcctctgttttcagatccccaaattcttgcataaatgttgattcagaaggaaaccttaagggttcaagaaagtgnagaagactaaatagttcttcaactgtattttggagaggggtgccagtcaaaagcaccttgtgttcctacaaaaagtgagaacaattcacatcaaacatcacagtacaaaggtcccagatgggtccatatgaaacagctggggtcctttctcatcaactcctccaaataataatgctactccaaagggacgagacatggcacctggatctgcatcttcttctccaaactgcaaagccagattggacacagcttgggtcacactctccactgtcattgtctcattgtaggtgaaccaagtggttctgtgtctccactctggctttatcaattaaagtcttaacatcagcaattaacccactcatggccaacctatgtgagcatcaatctctacaattttcttcaatgctgctgggcttcatcantggggaagtaattctntttttcacaagctangcncacancctttgatgtctggnancccaaggctggaa

SEQ ID NO: 2507 - DNA, 597 bp, Homo sapiens
  misc_feature 27, 75, 90, 184, 256, 266, 316, 322, 335, 339, 365, 375,402, 422, 434, 441, 448, 453, 463, 469, 470, 478, 483, 484,495, 500, 501, 526, 531, 544, 545, 547, 552, 555, 558, 569,571, 573, 575, 576, 582, 587: n = A,T,C or G
acttttttttaagcaatgggtcacggnattaatgaatcacatttttttatgctcttgaaatattcagaaattctncaggattttaatttnaggaaaatgtattgattcaacagggaagaaactttttggtgctgtcttttgttctctgaattttcagagactttttttataatgttattcattnggtgactgtgtaactttctcttaagaataattttctctttgtatgtctgttaccttgctaatagacttaatncatgcaacanaagtgactttcttgagaaagctcatggctgtgtccctgcaattggtggtnacattnggaaagttttgtntgcnctttggcaaaaaagaatttccaattntttgacaaanacacacgcccagggggatattttactnctctttatatgcagaatttngggatttagtgnggaattngattganttttnatttggcttnagggcnnatttttcnttgcnnaaaagtttttnttttnnttttagggaataaaaagcttttatnattcngaatttgttttcnntnagganacngtntctgtaataananananncatttnttggngtctcaaacc

SEQ ID NO: 2508 - DNA, 559 bp, Homo sapiens
  misc_feature 414, 439, 461, 470, 489, 516, 527, 529: n = A,T,C or G
acgcgggggcagagaggctgttcgcagagctgcggaagatgaatgccagaggacttggatctgagctaaaggacagtattccagttactgaactttcagcaagtggaccttttgaaagtcatgatcttcttcggaaaggtttttcttgtgtgaaaaatgaacttttgcctagtcatccccttgaattatcagaaaaaaatttccagctcaaccaagataaaatgaatttttccacactgagaaacattcagggtctatttgctccgctaaaattacagatggaattcaaggcagtgcagcaggttcagcgtcttccatttctttcaagctcaaatctttcactggatgttttgaggggtaatgatgagactattggatttgaggatattcttaatgatccatcacaaagcgaantcatgggagagccccacttgatggnggaatataacctgggttactgnaataagtgngctggtcatggaaaccganggctgcatcttgttatagccatctttnaccttggccgnancacctaaggcgaattccacaactggcggcg

SEQ ID NO: 2509 - DNA, 564 bp, Homo sapiens
  misc_feature 90, 92, 385, 469, 472, 530: n = A,T,C or G
ggtactatactctgtattctcacaaatagagaagactaatattgcagacctggtgacagctctgattgtccttttggttgtatccattgntnaagaaataaataagcgcttcaaagacaaacttccagtgcccattccaatcgaattcattatgaccgtgattgcagcaggtgtatcctacggctgggactttaaaaacaggtttaaagtggctgtggttggggacatgaatcctggatttcagccccctattacacctgacgtggagactttccaaaacaccgtaggagattgcttcggcatcgcaatggttgcatttgcagtggccttttcagttgccagcgtctattccctcaaatacgaatatccacttgatggcaatcangaagttaatagccttgggactgggtaacatagtctgtggagtattcaaaagattgctggggagtacctgcccggccggccgtcnaanggcgaattccacccactggccggccgtactagtggatccactcggaccaacctggcgnaacatggcatactgttctgggggaaatggtatcc

SEQ ID NO: 2510 - DNA, 386 bp, Homo sapiens
  misc_feature 363, 364, 365, 366, 367, 368, 369, 370, 371, 372, 373, 374,377, 378, 379: n = A,T,C or G
acgcggggactcagaagcttggaccgcatcctagccgccgactcacacaaggcaggtgggtgaggaaatccagagttgccatggagaaaattccagtgtcagcattcttgctccttgtggccctctcctacactctggccagagataccacagtcaaacctggagccaaaaaggacacaaaggactctcgacccaaactgccccagaccctctccagaggttggggtgaccaactcatctggactcagacatatgaagaagctctatataaatccaagacaagcaacaaacccttgatgattattcatcacttggatgagtgcccacacagtcaagctttaaagaaagtgtttgctgaaaaannnnnnnnnnnnaannnaggtacc

SEQ ID NO: 2511 - DNA, 579 bp, Homo sapiens
  misc_feature 464, 524, 531, 535, 541, 545, 550, 551, 561, 567, 570, 579: n = A,T,C or G
acacttgaaaccaaatttctaaaacttgtttttcttaaaaaatagttgttgtaacattaaaccataacctaatcagtgtgttcactatgcttccacactagccagtcttctcacacttcttctggtttcaagtctcaaggcctgacagacagaagggcttggagatttttttctttacaattcagtcttcagcaacttgagagctttcttcatgttgtcaagcaacagagctgtatctgcaggttcgtaagcatagagacggtttgaatatcttccagtgatatcggctctaactgtcagagatgggtcaacaaacataatcctggggacatactggccatcaggagaaaggtgtttgtcagttgtttcataaaccagattgaggaggacaaactgctctgccaatttctggatttctttattttcagcaaacacctttttttaaagcttgactgtgtgggccnctcatccaagtggatgaataatcattcaagggtttggttgcttgggcttgggaatttatntaaaacntttnttcatntgtnttganncccaaatgantttggncanccccaaccn

SEQ ID NO: 2512 - DNA, 575 bp, Homo sapiens
  misc_feature 439, 456, 499, 545, 553: n = A,T,C or G
ggtacttgagttcaaatgataaaacttgaagttgtaggcttggaagagtatcagctcagtatatccttccttgcataaatacaagggaaaggccaaggaataatcagcattaacctgccaggtccaagggtcttctatccctgacttcatctgagtcacaagatttctctaatcccgcgtacctgcagaacccaaattggcgtttgtcatcagaatcagaggtatcaatggagtgagcccaaaggttcgaaaggtgttgcagcttcttcgccttcgtcaaatcttcaatggaacctttgtgaagctcaacaaggcttcgattaacatgctgaggattgtagagccatatattgcatgggggtaccggtagaactgctattattcatcctatgtgggtaattgaggagtatgctaagattttgcgtaacttgggtttggnttaatccacctcactgnctgctatgatggataaaatgaaaaaagtgaggaaaagcttacntcagtgagggaaaaatttggtatatgcccgcgtaccttgcccggcnggccgtcnaaggcgaattccaccccttgcg

SEQ ID NO: 2513 - DNA, 571 bp, Homo sapiens
  misc_feature 431, 460, 499, 542: n = A,T,C or G
acgcgggggccaaacaccttcctgacaccatgagggccagcagcttcttgatcgtggtggtgttcctcatcgctgggacgctggttctagaggcagctgtcacgggagttcctgttaaaggtcaagacactgtcaaaggccgtgttccattcaatggacaagatcccgttaaaggacaagtttcagttaaaggtcaagataaagtcaaagcgcaagagccagtcaaaggtccagtctccactaagcctggctcctgccccattatcttgatccggtgcgccatgttgaatccccctaaccgctgcttgaaagatactgactgcccaggaatcaagaagtgctgtgaaggctcttgcgggatggcctgtttcgttccccagtgagagggaacccggtccttgctgcacctgtgccgtccccaagagctacangccccatcttggtcctaagtccttgccgncctttcctttccacactgtccattctttcttccatttangatgccacgggtggacttgcttttttatcactttcaataaaangtccttttgttccaaaaaaaaaaaaaaaa

SEQ ID NO: 2514 - DNA, 557 bp, Homo sapiens
  misc_feature 405, 418, 438, 500, 501, 502, 503, 504, 505, 506, 507, 508,509, 510, 511, 512, 513, 514, 515, 516, 517, 518, 519, 520,521, 522, 523, 524, 525, 526, 544, 556: n = A,T,C or G
acgcgggggtattctttccccaagtctctatggtagcgtcagcgtcggaggcggtagtgacggtggcgtttccttgaggaagagtgagggttccaacttttctgcttatctgggaggtgttgggcgcggacagtcgagatgtcagagaaaaagcagccggtagacttaggtctgttagaggaagacgacgagtttgaagagttccctgccgaagactgggctggcttagatgaagatgaagatgcacatgtctgggaggataattgggatgatgacaatgtagaggatgacttctctaatcagttacgagctgaactagagaaacatggttataagatggagacttcatagcatccagaagaagtgttgaagtaacctaaacttgacctgcttaatacattctanggcaaaaacccangatgggacctaaaaaaatgngttattcattatctgcttggaattattggggttttggaccccaaaaataatggtttgatgtnnnnnnnnnnnnnnnnnnnnnnnnnnnggtaccttggccggaacncccttaaggggna

SEQ ID NO: 2515 - DNA, 598 bp, Homo sapiens
  misc_feature 479, 536, 583, 586, 587, 590, 597: n = A,T,C or G
acccactgtatttatttatgtgcaacaagaagtgtcagcaactgcacaaactcctccctgttcagctagtaggcagcaattctgttatctggcatcccatagctgggttaaattaaaacagggcgtgagaacaggtgagtctagaggtctaactctaacagggaccaccgtgcatttgaataaacagttgtattagggatgttgttaaagttagccactgggcagaataaaggatcccttaggtcaaatatttgggtttgacatgatgacatgacacatccaacactctgtcaaattacctgcacaaggcactgattgtgaaattctagttacagcattatcttaccaaattaaagaggcaggcatgagcagggaaaaatggagtgggataaagagcctcgtcacgatgaggcttggggacatcttggggaaaaactgtccacagcatgaaagtcatcaacttcttgtcctgggttggnaatttgagtgtctctaagttatgggggttgaacatttttgggtaacttttgagtggnccacatttcaggcattgaagggtttttccttgaaatttacattgggntgnnccncctccant

SEQ ID NO: 2516 - DNA, 587 bp, Homo sapiens
  misc_feature 449, 556, 565: n = A,T,C or G
ggtacatgtgccacattttcttaatctggtctatcattgttggacatttgggttggttccaagtctttgctattgtgaataatgccgcaataaacatacgtgtgcatgtgtctttatagcagcatgatttatagtcatttgggtatatacccagtaatgggatggctgggtcaaatggtatttctagttctagatccctgaggaatcgccacactgacttccacaatggttgaactagtttacagtcccaccaacagtgtaaaagtgttcctatttctccacatcctctccagcacctgttgtttcctgactttttaatcaaaaccactatgagatatcatctcacaccagttagaatggcaatcattatatggttaattttttaaagtttatttttaataaacagttaatttttaaaagtttatgcctttttatatttttaatactgntttaaaaatcctataataaatcagaactgcttaaaaatagaaataaaagacctattactggcctcacatcagtgcactctggcagctttaaagaagtagaatgaagntttaaaaanctgcggccacataaaggggtaa

SEQ ID NO: 2517 - DNA, 589 bp, Homo sapiens
  misc_feature 523, 526, 528, 545, 557: n = A,T,C or G
actgtggtgtgtgagtctcagcagccgcccacacgctcctaactctgctgcatggcagatgcctaggtggaaatagcaaaaacaaggcccaggctggggccagggccagaggggaaggccctggattctcactcatgtgagatcttgaatctctttctttgttctgtttgtttagttagtatcatctggtaaaatagttaaaaaacaacaaaaaactctgtatctgtttctagcatgtgctgcattgactctattaatcacatttcaaattcaccctacattcctctcctcttcactagcctctctgaaggtgtcctggccagccctggagaagcactggtgtctgcagcacccctcagttcctgtgcctcagcccacaggccactgtgataatggtctgtttagcacttctgtatttattgtaagaatgattataatgaagatacacactgtaactacaagaaattataaatgtttttcacacccaaaaaaaaaaaaaaaaaaaaaagaccctttggtccanccntnttttccaaggaaatgcncctttgggcttntttcccaaggaatttaaatcaatatttccaaa

SEQ ID NO: 2518 - DNA, 585 bp, Homo sapiens
  misc_feature 477, 495, 516, 535, 571: n = A,T,C or G
acgcggggacagtaaaagcaaaagcaacagctcaagcagcctccttggagaaaacctgaaaattcaacttgttcaagagaaggtcttgtactatagagactcagttgcaaaaattaacaaatatgctgcttgattaaaatgggtaggcttctcatgtggctcattctttaatctattctcttttatttggtttggttcatggggtctctgcctatggatcatacttcaaactcttggtgtgatcctcctgattgtcacaatattagttaccctggtgtgctgtattctctaaaacctttaaatgtttgcatgcagccattcgtcaaatgtcaaatattctctctttggctggaatgacaaaaactcaaataaatgtatgattaggaggacatcataacctatgaatgatggaagtccaaaatgatggtaactgacagtagtgttaatgccttatgtttaagtcaaactctcatttangtgacagcctggtgactncagaatggagccagcatgctnaatgccatatctcccctgnaacatgaggaagcaggttgatcccaaacaaacaaantttctaaaacatga

SEQ ID NO: 2519 - DNA, 578 bp, Homo sapiens
  misc_feature 332, 333, 344, 356, 358, 360, 366, 372, 405, 431, 446, 465,490, 502, 518, 528, 556, 578: n = A,T,C or G
ggtactaactctggaagaatggcaagacaagtgggtgaacggcaagactgcttttcatcaggaacaaggacatcagctattaaagaagcatttagatactttccttaaaggcaagagtggactgagggtattttttcctctttgcggaaaagcggttgagatgaaatggtttgcagaccggggacacagtgtagttggtgtggaaatcagtgaacttgggatacaagaattttttacagagcagaatctttcttactcagaagaaccaatcaccgaaattcctggaaccaaagtatttaagagttcttcggggaacatttcattgtactttnnttttttttttntttttttttttntnanaagggncgtggngctggagtttaaattgagtagtaggaatgccgnagtagttaggataatataaatagttnaattaaaaatgggtntgttaggggtggcctgccnggcgggccgtttaaaaggcgaaatncacccactgggnggccgtctaatggatnccacccgggnccaacctgggggaacaagggctaactgnttcctggggaaatggtatcccn

SEQ ID NO: 2520 - DNA, 443 bp, Homo sapiens
  misc_feature 443: n = A,T,C or G
acgcgggctggacgccaatgacctagaagataaaaacagtcctttctactatgactggcacagcctccaggttggcgggctcatctgcgctggggttctgtgcgccatgggcatcatcatcgtcatgagtgcaaaatgcaaatgcaagtttggccagaagtccggtcaccatccaggggagactccacctctcatcaccccaggctcagcccaaagctgatgaggacagaccagctgaaattgggtggaggaccgttctctgtccccaggtcctgtctctgcacagaaacttgaactccaggatggaattcttcctcctctgctgggactcctttgcatggcagggcctcatctcacctctcgcaagagggtctctttgttcaatttttttaatctaaaatgattgtgcctctgcccaaaaaaaaaaaaaaaaaaagtacctn

SEQ ID NO: 2521 - DNA, 403 bp, Homo sapiens
ggtacaagatctaccccggacacgggaggcgctacgccaggaccgacgggaaggttttccagtttcttaatgcgaaatgcgagtcggctttcctttccaagaggaatcctcggcagataaactggactgtcctctacagaaggaagcacaaaaagggacagtcggaagaaattcaaaagaaaagaacccgccgagcagtcaaattccagagggccattactggtgcatctcttgctgatataatggccaagaggaatcagaaacctgaagttagaaaggctcaacgagaacaagctatcaggtgaggaatgctttcattatgagcattttacctattcggatggattttaggtttgggtcttcagtaattaaagttaccaaaaaaaaaaaaaaaaaaaaaagt

SEQ ID NO: 2522 - DNA, 585 bp, Homo sapiens
  misc_feature 407, 445, 482, 526, 537, 558, 562, 565, 582, 584: n = A,T,C or G
acgcgggctggacgccaatgacctagaagataaaaacagtcctttctactatgactggcacagcctccaggttggcgggctcatctgcgctggggttctgtgcgccatgggcatcatcatcgtcatgagtgcaaaatgcaaatgcaagtttggccagaagtccggtcaccatccaggggagactccacctctcatcaccccaggctcagcccaaagctgatgaggacagaccagctgaaattgggtggaggaccgttctctgtccccaggtcctgtctctgcacagaaacttgaactccaggatggaattcttcctcctctgctgggactcctttgcatggcagggcctcatctcacctctcgcaagagggtctctttgttcaatttttttaatctaaaatgattgngcctctgcccaaaaaaaaaaaaaaaaaagtacctcggncgcgaccacccttagggcgaaattcaacacactgggnggccgtactaatggatccgacttcggacccaacttgggggaatnatgggcataantggttcctgggggaaatggtntccnttncaattcccccaaataanang

SEQ ID NO: 2523 - DNA, 673 bp, Homo sapiens
  misc_feature 477, 580, 595, 614, 619, 630, 645, 648, 651, 670, 673: n = A,T,C or G
ggtaccctcaattttcttcatccagtaagacaagtatgcatcttaaagggaaagcttttagttcataacaatatgtttggttgcttttctctgctttcggaacatttactgtttttcctttattggctttagtgtttgctgccaaccagataacatgttaacatataatttacaactctctctaggtaggtgattacatagaaaactaatgccagctaagatttatggattcaaaagataactgacacaagttcttgtcctctacacttgagagaactagctgtttaacgcataaatatattgatagtaactacaagttaaataacattcagtgtcactatataacatgctgtcttacttgattctgtttttcagacttcattctagtttctctttgttggaagagtctcagagataatgtgtgctttaatttaaacactcattaccaatatgattttgcccaatggttggtaatgnaaggtaaaaaaatatattggttggatcaagatttatagattacacatactattcatcaaatatatggtgatattaataaatgaatcctaaataagttcacctnttttcaaaaaaaaanaaaaaaaaagtctgccccngcgtnaaagggaatcnccctggggcgtatanggnccncctgggcaactgggaaatnggn

SEQ ID NO: 2524 - DNA, 678 bp, Homo sapiens
  misc_feature 417, 423, 438, 447, 457, 466, 472, 501, 515, 528, 529, 552,554, 555, 563, 565, 575, 579, 596, 607, 614, 631, 633, 636,637, 644, 646, 647, 651, 652, 659, 668, 676, 677, 678: n = A,T,C or G
cgaggtacgaaaccaacgccccgagggctggtcgcgactacagtgcatattacagacaaattgaagagctgcgaagtcagattaaggatgctcaactgcaaaatgctcggtgtgtcctgcaaattgataatgctaaactggctgctgaggacttcagactgaagtatgagactgagagaggaatacgtctaacagtggaagctgatctccaaggcctgaataaggtctttgatgacctaaccctacataaaacagatttggagattcaaattgaagaactgaataaagacctagctctctcaaaaaggagcatcaggaggaaagtcgatggcctacacaagcatctgggcaacactgtcaatgtggaggttgatgctgcttcaaggcctgaaccttggcgtcatcatgaatgaaatnagccanaaatatgaaagcatnggccagaanaacctttcanaggcccaanaacaanttgagagacagcctgaagtttgcagcacnggtcacatggaatnctggagaattaannggactgtggtcactaccgactancnnccttccananccttagatanactnagcccatttacatgaanactttgagccnctttaangaacaaggccttcatancngtnncaactcntnntttnncctttgngccactgtncaaatcgnnn

SEQ ID NO: 2525 - DNA, 595 bp, Homo sapiens
  misc_feature 460, 465, 471, 493, 551, 584, 593: n = A,T,C or G
ggacgagtcaagcacaaactgctgcgccaggaaaagacaaggctaattgggcccaactgccctggagtcatcaatcctggggaatgtaaaattggcatcatgcctggccatattcacaaaaaaggaaggattggcattgtgtccagatctggcaccctgacttatgaagcagttcaccaaacaacgcaagttggattggggcagtctttgtgcgttggcattggaggtgatccttttaatggaacagattttattgactgcctcgaaatctttttgaacgattctgccacagaaggcatcatattgattggtgaaattggtggtaatgcagaagagaatgctgcagaatttttgaagcaacataattcaggtccaaattccaagcctgtagtgtccttcattgctggtttaactgctcctcctgggagaaaaatgggtcatgcccgggcaattattgctngaggnaaaagnggagcttaaagaaaaaaatctnttgccttcaaaatgcaagaagttggggtcagtattgtcttcttgcacagcttgggaanccccatcttccaaggaatttgaaaagaaggaanatccttttnaa

SEQ ID NO: 2526 - DNA, 590 bp, Homo sapiens
  misc_feature 36, 55, 75, 152, 488, 505, 526, 545, 556, 575, 590: n = A,T,C or G
ggtacttttttttttttttttttttttttttttagnttttacacagtttattcanaagtttaaaagttaaaatgngggcattttcccctgaaacaaatcatcccctgccactccccaacacaaagactctcccaacaccgcagttccttctntttacccaggcttaccacacattcttgcaaaacacacaggagtcaacaccccaactatttggtaatacaaagagactacaaagtcacacaaaagaatctcatttacttccttttcactagcaggctatgaatgaaagactgagaggcaaacacatcaccttcatccagagttgacacttccctaaccttttttcttcctctaagaggttaaaatccaaaatagtttcactgacaactgtaactctgatattccatttttctcttctgaatggctaagctaggacatactttcctttcaaagctgatcttcagaacctcaagactggcagaaagcanggctcccactgcagctnggcacaatacttttgcaacanggcaaagttccccataggngcaaatgagcnttaagaagttttctaaacnttttaaaaaaaatgn

SEQ ID NO: 2527 - DNA, 586 bp, Homo sapiens
  misc_feature 448, 487, 520, 525, 527, 558, 571: n = A,T,C or G
acaaattccagtgtgcagaccacaacctcaaaacaaaaaaggttggtcatgcagcattaaactttgacaaggccactgacatcgtgacaggtctgaaacagaaaacctcctttgggagaccaatgtgggacaatgagttttctacaatagctacctcccaccccaagtctgtagtgggagttttcttatgtggccctcggactttggcaaagagcctgcgcaaatgctgtcaccgatattccagtctggatcctagaaaggttcaattctacttcaacaaagaaaatttttgagttataggaataaggacggtaatctgcattttgtctctttgtatcttcagtaatttacttggtctcgtcaggtttgagcagtcactttaggataagaatgtgcctctcaagccttgactccctggtattctttttttgattgcattcaacttcgntacttgagctttagcaacttaagaactttgaagttcttnaaagtcttgaagttcttaaagcccatggatccnttttnanaaaaaaaactgtaaaatttttttggacagcnttactgttaccanggtttgataacaaag

SEQ ID NO: 2528 - DNA, 570 bp, Homo sapiens
  misc_feature 432, 484, 487, 505, 524, 528, 551, 565, 570: n = A,T,C or G
actgatgctgaaaaatcaataagattaacccagaaattggctcaataagaaaccagggactcccaaagggggttttacaattcagaaacaggaaaaaattagaaagtggtttatttgcaatttacatggattcctctactttgtgaggtttagtataattgaaatgtattgcaattttcaggaacattacctacaaattgatattaggtggtctacagcttgtaattgatgtgcttcatgataaagatggcagtaatgatgttttaaatattctagtgctcactggatttcatttttgcaggcaatttgcagctcctctgagtaaaacatttatattcaattacagagtctgataaataggattcccgccaccccaccccttctaatcactgcagagtattaatagtgctttcttatggctgatttcttgcngggagcaaagataagattatagcccaatttttttcaaacctaacagcatctnctntgggagctatttaaaaantttctttcaccttttgacntcanatgacacgaccttgcctccctanttttggccaatggntaatn

SEQ ID NO: 2529 - DNA, 586 bp, Homo sapiens
  misc_feature 454, 470, 518, 563, 578: n = A,T,C or G
ggtacgcggggatttctcccggaacctctgctcagcctggtgaaccacacaggccagcgctctgacatgcagaaggtgaccctgggcctgcttgtgttcctggcaggctttcctgtcctggacgccaatgacctagaagataaaaacagtcctttctactatgactggcacagcctccaggttggcgggctcatctgcgctggggttctgtgcgccatgggcatcatcatcgtcatgagtgcaaaatgcaaatgcaagtttggccagaagtccggtcaccatccaggggagactccacctctcatcaccccaggctcagcccaaagctgatgaggacagaccagctgaaattgggtggaggaccgttctctgtccccaggtcctgtctctgcacagaaacttgaactccaggatggaattcttcctcctctgctgggactcctttgcatggcanggcctcatctcacctntcgcaagaaggtctctttggtcaattttttttaatctaaaatgattgngcctcttgcacaaaaaaaaaaaaaaaaaaaaaaagtccttgcccnggcggccgttcaaanggcgaaat

SEQ ID NO: 2530 - DNA, 698 bp, Homo sapiens
  misc_feature 459, 477, 523, 538, 543, 546, 563, 581, 590, 633, 655, 658,659, 662, 677, 678, 680, 685, 686, 689, 692: n = A,T,C or G
cgaggtacgcgggagctcagtgtgattcaatagtgatatgtaactgccctcaaaaactatgaaaagcttagagtttcagcagaggatggtgtatctgttatgagtgagatgagaagtctctctcttcatggctggtagaatgaatccagaattgtcaacttcacataagtctcagaatatcctcaaccctgcctgttttaggtgaaactaatgcaccaattatttcattcatttacagagaaacttaagctaatatgtacgcgggcttcgcaggatttttctgagccttttaccactccagcctagcccctaccccccaattaggagggcactggccccaacaggcatcaccccgctaaatcccctagaagtcccactcctaaacacatccgtattactcgcatcaggagtatcaatcacctgagctcaccatagtctaatagaaaacaaccgaaaccnaataatttcaagccctgnttattcaattttactggggctctattttaccctctacaagccttanaagacctgcccggcnggcgntcnaaaggcgaaattcaacncactggcgggcgtactantggatccancttggaccaacctggggtatcatggcatactggttcctggggnaaatgtttccgtccaattcccncanntanaaccggaacctaaanntnaaacnnggngcnatgaag

SEQ ID NO: 2531 - DNA, 687 bp, Homo sapiens
  misc_feature 168, 342, 344, 345, 349, 398, 399, 411, 412, 414, 420, 421,427, 428, 430, 437, 441, 446, 449, 456, 459, 462, 469, 480,493, 505, 509, 514, 524, 528, 539, 540, 541, 563, 564, 569,570, 580, 585, 587, 589, 593, 599, 605, 612, 615, 619: n = A,T,C or G
  misc_feature 621, 625, 628, 630, 631, 641, 642, 643, 644, 645, 648, 656,658, 660, 670, 676, 679, 680: n = A,T,C or G
cgaggtactggttttggattaggaattgttttctcacttaccttctttaaaagaagaatgtggccattagccttcggttctggcatgggattaggaatggcttattccaactgtcagcatgatttccaggctccatatcttctacatggaaaatatgtcaaagagcangagcagtgacttcacctgagaacatcccagcgggaggacaagagaaatcatgtttattcctcaggaatactgaagtgccctggagtaagctgccattcttctgtaacaatgttatcaagtaatgctttaaactccagcacctggttatgcatttgaaaccaagtctggttcttngnnttgnattttctctctggaaagttgtaaggaggtggtcttaaataaattaaacnnaaatagtaatannanatattnnatcttnntntaaaaanaagncctgnccnggccggncgntcnaaagggngaatttcaacnaactggcgggccntactattggatnctancttgntcccatcttncgtnatcatgggcannnctgtccctgtgggaaaatgtcnncctcnnaatccctcantttanancnggancttaantttaancctgggntcnaatngnggcnacncnnttattggttnnnnntgnccttttcncngnaactttttcntctttntanntgccccc

SEQ ID NO: 2532 - DNA, 681 bp, Homo sapiens
  misc_feature 332, 412, 449, 467, 477, 480, 487, 514, 531, 540, 556, 557,559, 563, 564, 567, 571, 574, 576, 579, 581, 583, 584, 585,586, 588, 591, 592, 594, 596, 600, 601, 602, 603, 605, 610,611, 612, 618, 626, 627, 631, 632, 634, 636, 638, 640: n = A,T,C or G
  misc_feature 652, 653, 656, 661, 667, 674, 678, 680, 681: n = A,T,C or G
acatattagaagtctaaggagtagcaagtcagtgggaggactttttcacccctggcattagcagcttcgacctcattttccagatgcaccagctcctattaataagttagcaaggaaagtgtatgtcacgtgcaggaacagtgaggcagggacaggggttctgctccttctcacttcaccaccggcacacagcttgcccctgtctttgcccccaaaggtattttgtgtctagtgtcaaattggagctattcttcactggtccttaaccttgggttttaaaaagaaggcttctctgtttgggtagccgtaagagctgagtatagtaagtcctnttcaaagagatggcaatatgctgggcatctactttaaacaaagtgtctgatttttgcaagaaaagttaggattttattgncttatttcctttacaggtctgcagttcatcacagtantttttttaaataactcanggtggatganaanaaattanaaatgaaaattacttatggtggactgnaaatgtttaattggaanaatcttttnataaaccatttttgtnntngtannaanaaanttncnttntntnnnntnttnntnanttannnntnccatnnnaataanataaaatnncctnncntnancnctaggggatttnnctntttgnttattntggctcnatgncnn

SEQ ID NO: 2533 - DNA, 691 bp, Homo sapiens
  misc_feature 406, 455, 491, 545, 572, 586, 598, 613, 621, 623, 624, 630,640, 663, 665, 671, 677, 683, 689: n = A,T,C or G
ggtactggtttttctgagaaacagtccctcgtgaactgacagtagctcagagagtctagtctcaatctgctgtcatgggctggtaaccactgaggcaaccgattttccactgtttgtggaatattgcatgatcttgggtaggtctggatggtttcagatgggagtctctggtcaaacattctatcccgcgtactacttcaggtaatcattgttttacttaaagttcagattccagcatatattgagatgaatattccctggttatactttgtcaatagttttctcattgctacagtgtattggtttaattgtcacaagcttaatttaaaagacattggattacctttggatccatttgtcaactggaagtgctgcttcattccacttacaatcctaatcttgagcnaattgaaaaagcctatatcaataatgatttgttaatattattaattaanaagtacagctggcataagaacataattttatgaacngaaagaactcaggacatattaaaaaattaactgaactaaacacttttgcccctnactgatacatttcagaatgggcttttnaaaggcttgatccngttttaaatagngttatttaaaacaantattccananntttatnttttctgggncttttcaaaattctttgtttacncnaaaggntatagnaacttnggttcngg

SEQ ID NO: 2534 - DNA, 684 bp, Homo sapiens
  misc_feature 345, 410, 488, 509, 529, 553, 567, 573, 575, 586, 598, 613,627, 640, 643, 650, 663, 667, 674, 677, 678, 679: n = A,T,C or G
cgaggtactttgacttactagggtgattcaaagtttcaggaaaaagaaaattcccagtatcattttcttaatcttattaaacccaaacataagaatgccaaaaaatacagagctcacattttgctggcatacatttccaaatttttaatgcctccctgacaggtgaattttaaggataaaaaaagcagacactttcaaaacattccttgtgatgaagtagaaaaagccctggataagtggccagctacactggatttttgtctcaattcttcattaactttacagtcttcagcaaatcccttaactttgagcttctatatgtagtgacatcattataaatgctgnggtattaaaatgtgataaacatagatgaaagcattttgaaatggttgaaatctacataaataccntaataactaaattccacaggataggatctgagagagctaagctgccagtattattaaaaggagcttattacagaaaanccagcctcattcattacaggntatgtctcatatctcttggncaatggtttaatagaatgagtatnttgagaaaaaagtnggaatnanctaggagacanacctgggcagtnaaatgcttctcacgnttttaagggtaagngtaggcaccctcnganatcctantgggggtttaccncaangccaggnccnnngtcct

SEQ ID NO: 2535 - DNA, 701 bp, Homo sapiens
  misc_feature 420, 436, 468, 475, 502, 543, 557, 559, 580, 594, 605, 621,641, 644, 650, 656, 657, 665, 676, 677, 683, 689, 700: n = A,T,C or G
cgaggtaccctccaggtcatggtgatatttacgccagtttctacaactctggattgcttgatacctttataggagaaggcaaagagtatatttttgtgtctaacatagataatctgggtgccacagtggatctgtatattcttaatcatctaatgaacccacccaatggaaaacgctgtgaatttgtcatggaagtcacaaataaaacacgtgcagatgtaaagggcgggacactcactcaatatgaaggcaaactgagactggtggaaattgctcaagtgccaaaagcacatgtagacgagttcaagtctgtatcaaagttcaaaatatttaatacaaacaacctatggatttctcttgcagcaagttaaaagactgcaggagcaaaatgccattgacatggaaatcattgtgaatgcnaagactttggatggancctgaatgtcattcaattagaaactgcagtangggctgncatcaaagttttgagaattctctaagnattaatgtgccaaggagcccgtttctggctgtcaaaccacnttagactcttgctngngatggccaacctctatagtcntaatgcaggatctntgacatgatgnaaaccggaatttctangtgcccttggtaaattagcngtntttacnaaggtnngatttttntaaaatttaannttcccntatctnaatggaccccnt

SEQ ID NO: 2536 - DNA, 690 bp, Homo sapiens
  misc_feature 380, 397, 410, 427, 465, 468, 474, 494, 504, 514, 522, 530,535, 562, 565, 570, 595, 602, 612, 615, 617, 630, 640, 645,649, 657, 664, 666, 671, 675, 678, 684, 685, 686, 687, 688: n = A,T,C or G
acgcggggggagacgtgctagcgcgtcgaaggtagctctatggttttcctcgcgttcttgagtcgggaaatggccgctgtgtggttgcaacggagataaattcccggaaccgcgattcggcgtgtcaggaattcgaatttagagtttaatttctcagagcattctctccaggaagaatttttacagtatctcaaagacttcacttgacttcttgatcctgcataaaaccaaggagaaaagaaatgggtcgctccaattctagatcacattcttcaaggtcaaagtctagatcacaagtctagttctcgatcaagatcaagatctcattctagaaagaagccgatacagttctaggtctcgttccagaacatattcaaggnctcgtagtaaaaatcgnatgtattctaaanaatatcgtccgattacngaaattatagaagaatgagaccaccttatgggtacctnggncgcgancacgcttagggcgaattccncacactggcnggcgtactantggatccnacctcggnccaancttggcgtatcatgggcataactgttnctnggggnaaatgtatcccgttacaatttcccncacatcnaacccgaagnttnantgtaaacctgggngccaaatagngactnactncataatgngtgggcnanttccnttcnatnggaacnnnnnct

SEQ ID NO: 2537 - DNA, 601 bp, Homo sapiens
  misc_feature 433, 481, 485, 513, 536, 540, 543, 559, 571, 572, 599, 600: n = A,T,C or G
acatgcagaggtaaagctgaagctggccaggggatggctacagttcatgatccccaaatctggtgctgatagaggctcacactgaatcacttgacaggttggttctggagatgaccagtttccaaatggtccacaggtggtttcttcaatcccagttaagtttgttccttcagagcagctgaaggcacactgtgagctgaagctgaagtttcccaaagggtgagtacattacacaccagtgaatagtaacagattgttagtatgttcaagctttgtgttgcatgatggtaactatagagtttgcgggtcagttgtttgacagaggaatccagtacaagagatagaaagaccagtccttgctgaaagacaaagtctgaatgctccactttttcaattctctctccattcttcagtaaagtcaacttcaatgtcngatggatgaaacccaaacacatagcaattcaggaaatttgactttccntctntgctggatgacgtgagtaaccctgaatnttggagtaccttggccggacccnctanggngaattcacacactggnggccgttctttnngtccagctttggtccaactttgggtannt

SEQ ID NO: 2538 - DNA, 688 bp, Homo sapiens
  misc_feature 328, 438, 472, 512, 534, 563, 612, 621, 669, 670, 687: n = A,T,C or G
accgtccagcgagttgcagatctacacttggatggatgcaaccttgaaagaactgacaagcttagtaaaagaagtctacccagaagctagaaagaagggcactcacttcaattttgcaatcgtttttacagatgttaaaagacctggctatcgagttaaggagattggcagcaccatgtctggcagaaaggggactgatgattccatgaccctgcagtcgcagaagttccagataggagattacttggacatagcaattacccctccaaatcgggcaccacctccttcagggcgcatgagaccatattaaattctatttactatttgntgaatttatttttccctcagttatgtaaaataaacatactcttcttcctccctgattattggcattaagcctttaaattctaaacaaattataatgcatcatctatttangagttagatttggatgtgctattggatgaatacnaataagctggatggttcaagcccttctgtaaaatatgaanaaaaggctcttacattctgggnaaaaatgtcctttggcgggaacaccctanggcgaattccacacactggggggcggtcttatggatccaacttggtccnacttggggnaacatgggctaactggtcctgggaaaatgtatccgttcaattccccannttcaaccggagcttaang

SEQ ID NO: 2539 - DNA, 694 bp, Homo sapiens
  misc_feature 419, 425, 463, 480, 513, 531, 546, 561, 563, 597, 601, 614,619, 622, 623, 627, 631, 638, 641, 648, 649, 661, 669, 675,677, 689: n = A,T,C or G
acgtgggcacaacctccacctcctggactcaagcaatcctcccacctcagcctctcaagtagttgggactccagggtcacaccaccacatccagctaatttatagagacagagtttcaccatgttgcccaggttggtctcgaactcctggactcaagcaatcctctcatctcggcctcccagagtgctgggattacaggtgtaagccaccacatctggtaacaactagcagttttagctgacaaagaaattcagccctaaatgacctgcctgaagttatttttgacatgtatcttccccactgctgcacaaggggctaaaggaactctctaccgtgatatctatgtcagtgtcttatgctaggattaagagtatttatatgcacaaagggctgcatttttcaaaaacctttctttcttnctctgncattggttcccttcagcttttcaccctgtgcacaaganactgcctggtcaaagangggaaggaaagaatctgtaacaatgcccgtaanaagcaagggcttgtgaantgatggatgctgttngaacaaaacaaagtntngcaggatggacagaaaaagtgggaaccagccttngganggtgggaagggtnaaagntcnnaatnaacnctgaaanganggaaaanntgggcccatgangggggaanccaggntnggggaccccctnaaggg

SEQ ID NO: 2540 - DNA, 617 bp, Homo sapiens
  misc_feature 443, 487, 506, 508, 510, 519, 544, 566, 573, 586, 592, 613: n = A,T,C or G
accattccttctgaaactattccaatcaatagaaaaagagggaatcctccctaactcattttatgaggccagcatcattctgataccaaagccaggcagagacacaaccaaaaaagagaattttagaccaatatccctgatgaacattgatgcaaaaatcctcaataaaatactggcaaactgaatccagcagcacatcaaaaagcttatccaccatgatcaagtgggcttcatccctgggatgcaaggctggttcaacatatgcaaatcaataaacgtaatccagcatatacacagaaccaaagacaaaaaccacatgattatctcaatagatgcagaaaaggcctttgacaaaattcaacaacgcttcatgctagaaactctcaataaatgaggtattgatgggatgtatctcaaaataataagagctttctatgacaaanccccagccatttcatcccgaatggggcaaaaactggaaaccttncctttgaaacagggccaanananggggggccntttttaccattctatttaaaatatngttggaaattttggccgggccntttgccnggaaaggaataangggttncatttggaaaaaggacccaanttgc

SEQ ID NO: 2541 - DNA, 605 bp, Homo sapiens
  misc_feature 382, 410, 460, 471, 472, 485, 505, 512, 532, 533, 542, 544,563, 580, 586, 592, 596: n = A,T,C or G
ggtacccttaaactggcaggacatttttgaaatcacaaatttgcacataaagaatgtcacgaacagccatgtatccatatacagcaatcaaataaggaacttatgacctaaagcaaaggtaaactttcttgaaacttaacattctataccaactaggcaacctctgcccaggatgagagttggatttttcaaaaacctctaatttaatagtgcagcatttcgttttccctgatggcctgtgtttcacagcagtttttaaagactgcttgtcaactatagctgcagcctatatcccactatggaaaaaaaagtaaatcttagttcaatttttggcagttggttctgtatttaaatttaaaaaaaaacacacttcccttggcanggttaaaaggttattatcaatctgtgcntaactaaaaagtcaagcaaatccaattttgcttaaggaacattgtaaagnacaatcttggnnttcctgccctggntgaaccattcaacccttaanaattacncctttgggtccttgttcaannaaaaacccnanttgaccgcttaaccttttnaaatggccccacctttnaaggtntaaccnaacnttatttttt

SEQ ID NO: 2542 - DNA, 625 bp, Homo sapiens
  misc_feature 434, 438, 456, 461, 468, 470, 513, 529, 548, 565, 590, 594,605, 610, 623, 624, 625: n = A,T,C or G
ggtacagtttcccttctccagggtgacagatgagccttttccgaagttctcagctttctcttctatcgaaacttcccatgtcggttaaagtgtttgtagagatagcggatgcgtttattaaggttgtgcaggtcatcagcgaacattctacttccaaccattttcctctttcggatacaacgttgcaattcattccctttccaacctcgaagccatatgggccccctgatcaagttctttggggtgcttttcaaagtttcccaggatcccgatgttgtcatacactccgaacatggcccttttctcgttccaacgatcaaccactttggggggcgggagagtgagccttataccgatcaatctaggcacaccaagaaagaagcttctgcacgccagaagcacccagtcccacaggcgcctacctggcccggatnaganggtccctgccattttttntagtntcccccntnaacaggacacccaaattagcccaaaaaaaatgacaggaaccgnccccggccaactttanaacaattccctgcccgggngggccgtttaaaggggnaattcaaccacctgggggggcgttntatngggacccggcncgggnccaacttgggggnnn

SEQ ID NO: 2543 - DNA, 588 bp, Homo sapiens
  misc_feature 394, 410, 415, 418, 421, 446, 473, 480, 484, 491, 493, 504,516, 519, 545, 569, 574, 579, 588: n = A,T,C or G
actggaagtgctatataatgcagtgttaaaaaaaaaaagaaataaaatgcacatagatttgaaaggatgaaatacaactttgttcacaagtaacatgattgtctttgtagagaattctaaataacaaaaaccctgctgacattaataagcaattacagcaggattgcaggatacagtcctcaggtagatgataaaaaggaattggacatcaagtcattaaaagacacggagaaaccctaaatgcttattgttaagtgaaaaccaatctgaaaaggctttctatttgtatgattgcaattatatgacattttgggagaggcaaaactattgaccagtgaaaggaccaatgggtgctgaaagttgaggggaaaaggagggatggcaggtaaaaagngaattttaaggagtgnaagtnctnggncggacccccctaaggccgaattcanccactggcggccgtattatggatccgnctcggtnccanccttggngnatcatggccanactggttcttgnggnaatttttcccttcaatttccccacanccaaccggagcttaaagggaaacncgggncccantaaaagaan

SEQ ID NO: 2544 - DNA, 474 bp, Homo sapiens
  misc_feature 442, 449, 468: n = A,T,C or G
ggtacaggttagggggcggggtgggccaagaaggcaatcatttgggcagaaaaacagggtcagatgttttcacttagggctggggctccaggcttgaaggtgggagcccagccgttctgtgtcactcataagaagtgacaagagtgcaacctgtctctctccctcccctcatgcacacagaggccacggaagcacacagcaagatgcaggccacccaacaagccaagaaaagtggccttagaatgaaaactatgttactggcaccttgatcttggaattcccaggctctagaatcatgagcaatacatttatgttgtttaagcccccacggccgggcgcagtggttcacgcctgtaatcccagcactttgggaggctgaggtaggaggattgattgaggccaagagttaaagaccagcctggtcaatatacaagaacccctntcttaantaaaaaataatagggccgnccggga

SEQ ID NO: 2545 - DNA, 629 bp, Homo sapiens
  misc_feature 459, 461, 496, 516, 523, 525, 529, 560, 576, 577, 591, 609,616, 621, 622: n = A,T,C or G
cgaggtactgatgctgaaaaatcaataagattaacccagaaattggctcaataagaaaccagggactcccaaagggggttttacaattcagaaacaggaaaaaattagaaagtggtttatttgcaatttacatggattcctctactttgtgaggtttagtataattgaaatgtattgcaattttcaggaacattacctacaaattgatattaggtggtctacagcttgtaattgatgtgcttcatgataaagatggcagtaatgatgttttaaatattctagtgctcactggatttcatttttgcaggcaatttgcagctcctctgagtaaaacatttatattcaattacagagtctgataaataggattcccgccaccccaccccttctaatcactgcagagtattaatagtgctttcttatggctgatttcttgcaggggagccaaagataagattntngcccaatttctttcaaaacctcagcagcttttccntttgggagccttttaaaaantttcttncncctntttgacttaaaatgaaccaaccttgccttcncttatttttggccganngggttaaacttccngggttcttttttttcctntttccanggggnntaactgg

SEQ ID NO: 2546 - DNA, 608 bp, Homo sapiens
  misc_feature 264, 371, 431, 434, 484, 502, 516, 519, 520, 533, 540, 547,550, 555, 557, 561, 577, 582, 593, 605, 607: n = A,T,C or G
acgagcagctgtctgggaagtagggggttagcttggggacctgaactgtcctggaggccccaagccatgttccccagttcagtgttgcatgtataatagatttctcctcttcctgccccccttggcatgggtgagacctgaccagtcagatggtagttgagggtgacttttcctgctgcctggcctttataattttactcactcactctgatttatgttttgatcaaatttgaacttcattttggggggtattttggtactttnttttttttttttttttttttttcgcacactgaaatatccttttattgcaactcaaattttcaaaaaccagaaaatcaaattattatgctctagccaaattatgtaanggtttctttttctttctctgtcacccaggctggactgtagtggaacaatcacagttcaantgnagcatcggcctcctgggctcaagggatcttactggcctaaccttcccgantaacttggaactattggngaacaaccccccanccnnctaattttttaanttttttnaaaaacnggnttttncngttngccaaaggttggtttnaaaanttgggttaaangaacctttcccncnc

SEQ ID NO: 2547 - DNA, 634 bp, Homo sapiens
  misc_feature 10, 80, 119, 145, 148, 183, 212, 273, 307, 324, 346, 364,372, 435, 453, 464, 485, 488, 493, 499, 515, 524, 531, 536,538, 541, 547, 552, 565, 566, 573, 575, 576, 578, 582, 583,589, 596, 619, 622, 623, 625, 626, 631, 632, 634: n = A,T,C or G
ggtactgaanggctggagacaacactttatcacgttttgacactgacaggagtggaacagtagacccacaagaattgcanaaggccctgacaacaatgggatttaggttgagtccccangctgtgaattcaattgcaaaacgatncancaccaatggaaagatcaccttcgacgactacatcncctgctgcgtcaaactgagggctcttacngacagctttcgaagacgggatactgctcaccaaggtgttgtgaatttcccatatgatgatntcattcaatgtgtcatgagtgtttaaatcaagangaagctgcatgaatgtnatcaacattccaactggagctntcctttgcttgtcctctntgccttcngaatatgttaaacttacatcaccactttctcttaacagctggtggcaaagtttattacttttntgtacctgcccgggccgnccgttcaaaanggcgaattccacccactgggnggncgttnctaggnggtttccaactccggncccaacctnggggaancattngncantacctntttcnttggggaaaattnntttcccntnnantttnnccaacnttccaanccgaaaactaaagggtaaacctnggnncnntaaannan

SEQ ID NO: 2548 - DNA, 382 bp, Homo sapiens
  misc_feature 210, 238, 309, 316, 322, 330, 334, 335, 346, 359, 360, 364,371: n = A,T,C or G
actcaagtttataatgtccccaaaccttaagactagaaaatcatcccaagaaaaaggcctatagttggtttaattccaccctgagaatactgtgataaaaatcaatatatttcagagctagtaagtatttaaaaattagtgtctcaaaaaggggacatcataagggaaatacagggtttagaggtctgagctcaagtggtgtaagacagntctttcttcttcctcctttaaactcttnactttgctctaacacggaagatgggggacagtgatcccgaaggtttactaaaatattgcagctttcagtanttatgangaagcncatatatnactnnaaaagaaagcnatcatttggagtnnctcnggccgcnaccacgctaaa

SEQ ID NO: 2549 - DNA, 635 bp, Homo sapiens
  misc_feature 189, 296, 312, 322, 344, 355, 359, 364, 367, 381, 390, 397,398, 400, 403, 408, 450, 453, 455, 463, 466, 467, 468, 471,473, 491, 492, 494, 495, 499, 500, 502, 504, 510, 513, 521,523, 525, 534, 536, 537, 545, 550, 551, 554, 557, 558: n = A,T,C or G
  misc_feature 559, 568, 571, 577, 587, 588, 595, 597, 602, 604, 607, 610,621, 631: n = A,T,C or G
acgcgggagctacgggcatgcagtggacctatgagcagaggaaaatcgtggagttcacctgccacacagccttcttcgtcagtatcgtggtggtgcagtgggccgacttggtcatctgtaagaccaggaggaattcggtcttccagcaggggatgaagaacaagatcttgatatttggcctctttgaanagacagccctggctgctttcctttcctactgccctggaatgggtgttgctcttaggatgtatcccctcaaacctacctggtggttctgtgccttcccctactctctnctcatcttcgtatatnacgaaagtcngaaaactcatcatcaggcgacnccctggctggntggntgganaangaaacctactttanccctccgtnctgcacnncngtngatcntcatggcacacactcttgcatccgaaacccaacccctttttntgntncttgggcnggnnnccncncttaggggggaattccannannctgnncngncggttntanggaatccncntnggtacccancnntggcgaantaatnnganaannnttttcctgnggnaaatgntttccccttnnattcttnancaaanancanccngaatcaaaaangtaaaacccngggg

SEQ ID NO: 2550 - DNA, 619 bp, Homo sapiens
  misc_feature 303, 360, 371, 374, 393, 433, 434, 435, 448, 457, 461, 471,479, 482, 488, 498, 503, 507, 508, 509, 514, 515, 517, 519,527, 528, 531, 535, 540, 541, 545, 547, 548, 553, 570, 585,591, 599, 608, 619: n = A,T,C or G
actggatttaactacctttggcttaattccaatcattgttaaagtaaaaacaattcaaagaatcacctaattaatttcagtaagatcaagctccatcttatttgtcagtgtagatcaactcatgttaattgatagaataaagccttgtgatcactttctgaaattcacaaagttaaacgtgatgtgctcatcagaaacaatttctgtgtcctgtttttattcccttcaatgcaaaatacatgatgatttcagaaacaaagcatttgactttctgtctgtggaggtggagtaggtgaaggcccncctgtaactgtcctttttcttcccttagcaatggtgaactgtcattacagaacctanaggctcacagnctnctggaggaagcagcctccntttggatcaagaaatattaaggaaaaccattgttgggggnnnccggctttgcaancctcaaacnaaantggggacatnttgtggtntgntgcctnaggaatttcntgacncttnnnggccnncngnctttcttnnaanttanggccnnaggntnngctanttgatttttcctctttncctcttttggggggngagggntttactcngtttaaaantggaacctccn

SEQ ID NO: 2551 - DNA, 368 bp, Homo sapiens
  misc_feature 360: n = A,T,C or G
acgcgggaggcattgaggcagccagcgcaggggcttctgctgagggggcaggcggagcttgaggaaaccgcagataagtttttttctctttgaaagatagagattaatacaactacttaaaaaatatagtcaataggttactaagatattgcttagcgttaagtttttaacgtaattttaatagcttaagattttaagagaaaatatgaagacttagaagagtagcatgaggaaggaaaagataaaaggtttctaaaacatgacggaggttgagatgaagcttcttcatggagtaaaaaatgtatttaaaagaaaattgagagaaaggactacagagccccgaattaatccaatttgaanggccaatg

SEQ ID NO: 2552 - DNA, 633 bp, Homo sapiens
  misc_feature 5, 464, 474, 494, 517, 519, 522, 524, 528, 530, 545, 551,556, 569, 576, 577, 591, 610, 612, 616, 626: n = A,T,C or G
acgcngggaacgctgggaaactcccggcctccgccaccatcttgctttcctttaatccggcagtgactgtgtgtcagaacaatcttgaatcatgaagctactaaccagagccggctctttctcgagattttattccctcaaagttgcccccaaagttaaagccacagctgcgcctgcaggagcaccgccacaacctcaggaccttgagtttaccaagttaccaaatggcttggtgattgcttctttggaaaactattctcctgtatcaagaattggtttgttcattaaagcaggcagtagatatgaggacttcagcaatttaggaaccacccatttgctgcgtcttacatccagtctgacgacaaaaggagcttcattctttcaagataacccgtggaattgaagcagttggttggcaaattaagtgtgacccgcaaccaagggaaaacattggcttatactgnggaatgcctnccggggtgatggttgatttntaatgggagtcctggttcaatgncnccncnacancnaaaattttttccttngggaanaaacntaccctttaaccnttacttnnaaattgaaaaaaanttggggcttttaaaaaccngnaacntttttttttnaaaattg

SEQ ID NO: 2553 - DNA, 607 bp, Homo sapiens
  misc_feature 226, 231, 242, 245, 246, 395, 405, 433, 448, 453, 462, 466,472, 476, 484, 488, 493, 498, 504, 506, 509, 519, 522, 523,524, 525, 535, 537, 551, 552, 556, 570, 583, 587, 589, 591,596, 600, 605: n = A,T,C or G
accccatggagctgggctaagtaaataggaattggtttcacgcctgaggcaattagacactttggaagatggcataacctgtctcacctggacttaagcgtctggctctaattcacaagtgctcttttctcctcactgtatccaggttccctcccagaggagccaccagttctcatgggtggcactcagtctctcttctctccagctgactaaactttttttctgnacttnatttttttttnttnntctttttggggttttaaactttttatttgcacattaaaaaaattgtgcattccaataattaaaatcatttgaacaaaaaaaaaaatggcactctgattaaactgcattacagccctgaggacaccttgggccagcttggtttactttanatttcactgncgtccaccccactttttccccccacttntttcttttacaacantgcangtttttttntttncctgcnagcnaaaataantaanacaantgggnaaaggnangcnccggcctttngtnnnntagttttttngnggaaaggggggggnnagcntttaaactggtccnccctttggttttnaagntnanccgcntaanaaatnaa

SEQ ID NO: 2554 - DNA, 626 bp, Homo sapiens
  misc_feature 456, 469, 474, 480, 485, 545, 548, 557, 558, 564, 569, 578,580, 582, 600, 603, 605, 618, 621, 626: n = A,T,C or G
cgaggacaaggcagctggcaacgttcccttcaagacacagaggagaaatccagatcattctcagcttcccaggcagacccactcagtgatcctgatcagatgaacgaggacaagcgccattcacagggcacattcaccagtgactacagcaagtatctggactccaggcgtgcccaagattttgtgcagtggttgatgaataccaagaggaacaggaataacattgccaaacgtcacgatgaatttgagagacatgctgaagggacctttaccagtgatgtaagttcttatttggaaggccaagctgccaaggaattcattgcttggctggtgaaaggcccgaggaaggcgagatttcccagaagaggtcgccattgttgaaaaactttggcccgcagacatgctgatgggtctttctctgatgagatgaacaccattcttgataatctttcccgncagggactttttnaactnggttgnttcanaccaaaatcactggccaggaaattacttttttacttttcaagaacatttttacacattanctnttaccccgnngggttntttgnaaagttaanancntggaatttaaaaggggtnttntngggccctttgttnttntcccn

SEQ ID NO: 2555 - DNA, 673 bp, Homo sapiens
  misc_feature 328, 427, 476, 500, 510, 513, 519, 560, 561, 565, 587, 610,615, 624, 625, 630, 634, 649, 663, 668, 672: n = A,T,C or G
ggtacggatcacgctttccccaggatgacctctgccagtatatcacatcagatgacctcactcagatgctggacaacctagggcttaagtatgagtgctatgaccttttgtccaccatggatatatctgactgctttattgatggtaatgaaaatggagacctgctttgggattttttgactgaaacctgcaactttaatgccacagcaccacctgatctcagagcagagcttgggaaagatctacaagagcctgaatttagtgctaagaaagaggggaaggttctttttaataatactctgagttcatagtgattgaggcataactntcaatcacaaaagtatattcaaaaattatattttgaacaactcgaatcactcatttatttccatattaaaatcacaaactcatccataatgtagataangcactgtttggatatgagatgtagcaaattcaattcattattggacttncatttggaatcatatgggaactgntggcttatcncgnccctcntccaggtagagagaccacaagcggctcacataccttagctnnaaanttgatgacggattttttggctnttgtaaaaaattcatccctttgntgatngctgaattnntgaancttntaaatccttctttgnttctttttgggagntgccntacna

SEQ ID NO: 2556 - DNA, 693 bp, Homo sapiens
  misc_feature 211, 247, 324, 343, 344, 349, 355, 417, 425, 439, 459, 494,495, 499, 508, 521, 524, 534, 538, 542, 549, 560, 564, 566,573, 578, 580, 591, 600, 603, 620, 621, 623, 625, 628, 637,650, 651, 654, 665, 666, 669, 670, 672, 677, 681, 685: n = A,T,C or G
  misc_feature 689, 691, 692: n = A,T,C or G
ggtactttgaaaattgaaactggatcagtgtgtgacgggactgtcaactgaaaaatgaatttgagttgggaaaccaaaacatgaacagcagcagcagtagtgaagccactgatgagggactcagacaggtatatcactacaaatccaatccgcagaatcccaaaagccaactggatgattccagaaagcactgtgactgatgccgcgccgncaccctcaccctctcgtcatccagtagtgaagaatnattcgagttgttaggcaatcccaaagtagttgcattgcgatctgggactgcttttgaaactgctcctgaaactgctngtcccaccatcattactcnnaatcngaaacnggcccccggatattgtgtctggaaagtgccgaagaaaaagtagattatggctgggaaaaaangatgcatncacccatagactgngggaatgtcgaccagcagancaaatgcttaacccttgtatacctgcccggcggcnnttcnaaaggcgantccaactcactgncgnccgttcctantggntccnatcttcngtaccaaactntggngntatcatngtctntnctggtccttgngggaaattngtntccccttccaattcccnnananacnaacccgaancataaatggtaannctngggggccttannggnncnacttnattnttgngggncnng

SEQ ID NO: 2557 - DNA, 696 bp, Homo sapiens
  misc_feature 259, 300, 389, 398, 433, 445, 453, 462, 471, 473, 482, 483,515, 527, 546, 550, 561, 562, 568, 569, 571, 573, 576, 587,588, 592, 598, 613, 616, 628, 631, 636, 647, 648, 650, 655,656, 659, 665, 670, 673, 686, 689, 692, 693: n = A,T,C or G
ggtacagttgatcccactttggaataaatgcccagaaggtaataagcattatcagtgagtgagagctctaggcacaaaataagttctcattcagaaagtggacagagatatgaagcagtgaaacatatagctttaaaaactggaaatcattcatgacatttgttttcaaagtaaacattatctgcatttcaagaactgtaattttcaaaagtagaatcaggcctgattaagtaatatttatgacttacagataaaattncaaaaataaaaatgaaaactcttctgcccttgaaagagatngaaaactatatttttttccctgtaatgtcacagagattcatcagtatttcatccttaccgtcgcttaaaaaatgttatttttaattcgnctttcctgntctgccacttttacatagcaaaaccgtgtttaatntggccctctctnctgagtgnaaggatgtnttatttacngncatgaatgnnaaaaaacttcaattttacctccattggggtcntatttacccacnttaggaaaaaaaagattangaanccggtttttcnntatccnntngnacntaccttcctannaaantccttncccggcgggccgttngangggcgatttcgnccnctggnggcgttttaanngntcgcnnggntctaanttggntantatggcattcttntcntgnngaa

SEQ ID NO: 2558 - DNA, 696 bp, Homo sapiens
  misc_feature 186, 213, 238, 244, 253, 269, 279, 283, 347, 371, 374, 408,413, 425, 442, 456, 462, 464, 468, 472, 504, 511, 513, 527,551, 560, 566, 573, 576, 579, 584, 602, 607, 612, 615, 621,626, 630, 636, 638, 662, 665, 666, 669, 680, 687, 690: n = A,T,C or G
  misc_feature 691, 692: n = A,T,C or G
accaccacgcccagctgattttgtatttttagtagagatgggatttcaccatgacggccaagctggtttcagattcctgacctcaagtgatctgcccacctcggcctcccaaactgctaggattacaggagttagccaccgtgcccagcctactgttgatattttcttaaggccaaagggctcttnaaacagcttgtggtgaatgccacctantcagggattcacccttaagtgcagngggcanccctctctncctgggcaaagttcanaaatgccatncaangagccaagtcttggaattggaaaccccaagaagtctgcttagtgctctacaccctgtggcttanctgctatctaaaagtgaagtcaangtncccttttacttttccctctcttttctcacacaanaaggnagttttaccccntatccacccacaagctnggaaatgtgctgantcttancntgangccncatgtcctaatgttccaacccaaggcccctantggtatntntggatattgtactngcttttaagggccaaaggttttanctatcaagntgatgnaatcttncanganttagnttatttcttcaaggaggnggtantcttnctnctcaangatgngctngaaatntncagaactaaggtttgaaagggggntgnnaanctttccattancgtgttngtnnnaagg

SEQ ID NO: 2559 - DNA, 684 bp, Homo sapiens
  misc_feature 108, 124, 153, 235, 264, 319, 328, 341, 350, 364, 414, 416,439, 442, 446, 448, 463, 470, 473, 480, 505, 506, 514, 522,539, 547, 552, 557, 570, 574, 601, 602, 613, 615, 616, 630,632, 635, 641, 653, 657, 665, 670, 676, 680, 681: n = A,T,C or G
cgaggtactttttttttttttttttttttggtttatgcaactttattgaagaaaaataaatcaattactagcagagctattagttgatcactcatccattgacaactngcatcatttattcagngctatattaaacagtgtattggaagatanattaactaatagctccaagcctcctaacaatttaaatgaaaattacaaaatgtttgagaccctattttggaatacaaagggngtttgacttccaatttccattctctgtanaacaagaacaggtcattcctttattgacatgcataaaatacatcacattttctgntctgctgangctataaaatcantaccaattntccagccacatcanttatgagcataaagcatatcatgtgacctcaaaatctttaacagtggaangnttaaacaagaatggatgctgctnaanaatngngtatccctttgatgnggcaccnganattcatntccctcccctgaaatgattttttcnncatggtanaacatggnggaatgggtttagcctnttaccaanttaanggganacttggcccctanaccnacgcccttttttttttaaaaaattganntttgggaactntnntttgaaactttacngnttnaaaacngtttgcccaagngggnaactaatnttaanaaaccnggannagg

SEQ ID NO: 2560 - DNA, 417 bp, Homo sapiens
  misc_feature 284, 383: n = A,T,C or G
actatactctgtattctcacaaatagagaagactaatattgcagacctggtgacagctctgattgtccttttggttgtatccattgttaaagaaataaatcagcgcttcaaagacaaacttccagtgcccattccaatcgaattcattatgaccgtgattgcagcaggtgtatcctacggctgtgactttaaaaacaggtttaaagtggctgtggttggggacatgaatcctggatttcagccccctattacacctgacgtggagactttccaaaacaccgtangagattgcttcggcatcgcaatggttgcatttgcagtggccttttcaagttgccagcgtctattccctcaaatacgattatccacttgatggcaatcangagttaatatccttgggactgggtaacatattct

SEQ ID NO: 2561 - DNA, 665 bp, Homo sapiens
  misc_feature 283, 355, 399, 408, 449, 461, 471, 511, 513, 517, 520, 522,550, 552, 554, 557, 562, 573, 575, 582, 586, 591, 605, 618,623, 626, 646, 653: n = A,T,C or G
acttttttttttttttttttttttttttttttaccaaacaaacgatgaagtctcaggagtaaaagttgatacacaagtaaattttattggtaatgtttttgtgtggtctttaagcagagggaaaattagtctgcattatggtgtatccagactaaataactgatattaaaatgaaattatccttaggatttacaatcttagagaaaactttttcattttttttgagttacaaattatcttcacttacatttgagaacagtgagtcacagagggattaagtatnttactcaagatcttgcaagtgtttggtttgaacccaatcttttcactctgcagaactcaagagtcactcttntttggaaactttttaactgatgtggatcctctaatatgggcttnctattattnattccggattagtcagaagtttgcaagcaggcagaattcantttgccaatacnggatttttcntcagcccccgtccttttttttttttttttttttttttttnangaanggntnacttgattttttttccctaagggggggnananaangattncttaataaatngnaattacntccnccatntttttaaaagcccnttaaaaaagtttnttttnaantttttgggtccaaatcaaangttgggnaaattaaaaaaa

SEQ ID NO: 2562 - DNA, 418 bp, Homo sapiens
  misc_feature 145, 198, 391: n = A,T,C or G
ggtacttttttttttttttttttttttttggagcagttgattccagttcacgagcgctctcggtagctcaggaaagcgacatagtctctagcacttagtccctctcctacaatgcaaagcaaaaaagactgtggctccaggactntctgtgggcggaatcggcactaaggagttggtgcaattattttgttgcaaggnaggaagccaaaaagcctgcatgcaacagactggcatgaataaatgtatgtttccccctcccttctgcaagaagggagctggtaatggcaggagttcctccagtgcagactcttaaagagcgtgcaagaactagagacccgacagcgaaacaggcctcttcccctcacacacagtttctcttgctgcagcttanaacccccgcgtcctgccgggcgggcgc

SEQ ID NO: 2563 - DNA, 701 bp, Homo sapiens
  misc_feature 15, 241, 299, 339, 397, 446, 483, 485, 489, 495, 510, 517,518, 519, 539, 550, 557, 560, 561, 574, 575, 577, 595, 599,605, 617, 625, 638, 643, 651, 655, 663, 664, 667, 669, 676,686, 692, 699: n = A,T,C or G
ggtacgcgggaacanaatcccaggatgttccatctcttatataaatgtatttgcatataacctatgcacatcctcctgtatactttagaagtctacatgtttggtaccacgatgaccggctatttttttttctttcatagatatgggggtcttgctatgttgcccaagctggtcttaaactcctggcctcaagcaatccttctgccttggccccccaaagtgctgggattgtgggcatganctgctgtgcccagcctccatgttttaatatcaactctcactcctgaattcagttgctnttgcccaagataggagttcctctgatgcagaaattattgnggctcttttagggtaagaagttcgtgtctttgtctggccacatctttgactaggtatngtctacttctgaaacctttaatggccttccctctttcatcttcctgagnttgtaaccttgcaatgggcagctatccagttgactgntntgantaaagngtgttcattaatgtntatttannntctgaaacaagagtgatatncttccaagacntaaaatnatnnctaaagtgctggnngncaaaagacagaagcggantttnaaaatnggtcttggatantgcagganaatttggctatgnacctngcatttancaanttttcctnngananttggagngggtaccttntctttnaaatccngg

SEQ ID NO: 2564 - DNA, 359 bp, Homo sapiens
ggtacttccaactctgggttggccccaaatccaactaatgccaccaccaaggcggctggtggtgccctgcagtcaacagccagtctcttcgtggtctcactctctcttctgcatctctactcttaagagactcaggccaagaaacgtcttctaaatttccccatcttctaaacccaatccaaatggcgtctggaagtccaatgtggcaaggaaaaacaggtcttcattgaatctactaattccacaccttttattgacacagaaaatgttgagaatcccaaatttgattgatttgaagaacatgtgagaggtttgactagatgatggatgccaatattaaatctgctggagtttcatgt

SEQ ID NO: 2565 - DNA, 671 bp, Homo sapiens
  misc_feature 391, 414, 441, 504, 516, 540, 548, 555, 572, 575, 600, 610,652, 662, 669: n = A,T,C or G
acagaaagggtatgttaagtagttcagccagcagctcaccacagggattaacggcatctgccagaaggacatcaaattttgactcttgtagttttctcataagtttcttgttcaaaactgcatcttcacagagctttatattatagtcagaatattcccaacacaattcttgtagttgtgaaaaatatgaccaaaatgtattttttgaaatactatatgtccatctatcgaacattttcataaaaaaatcttccaaatcatttttagttaaagatgtaggataaacttctaatttaatagcagatgatttactggcattgacaagaatagaagccgaagatgtcaacacaatcacctcatgacccctctgaacaagctcttccaggattgncttcatatttatccaatggctgnattctgtgggccacaccagcacctttncacaacttccaaagctaaagtacaactgagctgcatcacagaaagactgacatcctttcaaanacatcctggtcntatgccaagcttcttttccagttntggccccngtacctnggccgggacccccttanggngaattcaaccactggcggcggtctnatggacccgnctcggaccaacttgggggaaaatggcatacttgttcttgggnaatggttccntccaatncc

SEQ ID NO: 2566 - DNA, 679 bp, Homo sapiens
  misc_feature 359, 449, 450, 462, 468, 511, 515, 530, 533, 586, 588, 591,592, 607, 618, 625, 626, 641, 644, 657, 662, 672, 674, 677: n = A,T,C or G
accgcgggcttgccacaccttgaagtgatactggcggggagctcttccctgctcctgggaagactcccccaaagcacatcacagccccttgcatgtcttaggcgctttccaccttctctgtgtctgttttctttccccctatatgcccctcccttacccacttcctggatgaatttacaaatttctccttaatagacctcaatggattagaatcataatctccaattctttgtcaagagtaaggtggggaagagaggccttaaataatccattttggtgttaaaatgtttctttttggctgcccgcgtggtggctcacacctgtaatcccagcactctgggaggcccgtagagggtggntcacctgaccgtcaaagagtttgagaccagcctggtcaacatggtgaaacctcgtctctactaaaaaatataaaaataaccaggtgtggnngtgcacacctgntagttncagctacttaggaaggcaggagaatcgctttgaccttgggagncgangttcattgaccaaanttngccctgaattcaaactattctacagggttgaagaataaaaaacttggattggntnctnngcccggaaccccctnagggcaattcnaaccatnngggcgtttttatggntcnacctgggaccaanttggngaatatggcnanttntt

SEQ ID NO: 2567 - DNA, 427 bp, Homo sapiens
  misc_feature 378, 383, 384, 391, 393, 396, 397, 398, 399, 400, 401, 403,413, 415: n = A,T,C or G
acctggccatcttgggcagtgtgacgtttctggctggcaatcggatgctggcccagcaggcagtcaagagaacagcacattagttccagaagaaagatggaaattctgaaaactgaatgtcaagaaaaggagtcaagaacaattcacagtatgagaagaaaaatggaaaaaaaaactttatttaaaaaagaaaaaagtccagattgtagttatacttttgcttgtttttcagtttccccaacacacagcagatacctggtgagctcagatagtctctttctctgacactgtgtaagaagctgtgaatattcctaacttacccagatgttgcttttgaaaagttgaaatgtgtaattgttttggaataaagagggttcnaaacnnaaaaaangnctnnnnnntnaaagtcctcngncgcgaccccccc

SEQ ID NO: 2568 - DNA, 673 bp, Homo sapiens
  misc_feature 387, 455, 502, 550, 635, 639, 643, 670: n = A,T,C or G
actatagagactcagttgcaaaaattaacaaatatgctgcttgattaaaatgggtaggcttctcatgtggctcattctttaatctattctcttttatttggtttggttcatggggtctctgcctatggatcatacttcaaactcttggtgtgatcctcctgattgtcacaatattagttaccctggtgtgctgtattctctaaaacctttaaatgtttgcatgcagccattcgtcaaatgtcaaatattctctctttggctggaatgacaaaaactcaaataaatgtatgattaggaggacatcataacctatgaatgatggaagtccaaaatgatggtaactgacagtagtgttaatgccttatgtttagtcaaactctcatttangtgacagcctggtgactccagaatggagccagtcatgctaaatgccatatactccactgaaacatgangaagcaggtagatcccagaacagaccaaaattttctaaaaacatganagtcaagctgtctgagtcaacacagtaagaaatccttctggtttactntaaaaaaaagaatttgaagttttcttgaaattaaccatcagttttttaaatcaattattttttctttggtccgggatccctttanaaancccnttttttgttgtttgcccaaggacttcnttt

SEQ ID NO: 2569 - DNA, 662 bp, Homo sapiens
  misc_feature 506, 529, 535, 550, 569, 572, 576, 580, 581, 591, 611, 612,630, 643, 647: n = A,T,C or G
acgccctgctgcttctcctgatctgctttaacgttggaagtggacttcacttacaggtcttaagcacaagaaatgaaaataagctgcttcctaaacatcctcatttagtgcggcaaaagcgcgcctggatcaccgcccccgtggctcttcgggagggagaggatctgtccaagaagaatccaattgccaagatacattctgatcttgcagaagaaagaggactcaaaattacttacaaatacactggaaaagggattacagagccaccttttggtatatttgtctttaacaaagatactggagaactgaatgttaccagcattcttgatcgagaagaaacaccattttttctgctaacaggttacgctttggatgcaagaggaaacaatgtagagaaacccttagagctacgcattaagggtcttgatatcaatgacaaccaaccagtgttcacacaggatgtctttgttgggtctgttgaagagttagtgcacacatactcttgngatgaaatcaatgcacagatgcngatgancccatacctgattcnaaaattcctataaatcgtnttntggncccnntttcctcagngtttcctaataagaccgganntttttccaccctgttccntggaaaaaagaancacnctcctttgccgtaaa

SEQ ID NO: 2570 - DNA, 467 bp, Homo sapiens
  misc_feature 461: n = A,T,C or G
ggtactcccagcaaatcctctgaatactccacagactatgttacccagtcccaaggctattaactcctgattgccatcaagtggataatcgtatttgagggaatagacgctggcaactgaaaaggccactgcaaatgcaaccattgcgatgccgaagcaatctcctacggtgttttggaaagtctccacgtcaggtgtaatagggggctgaaatccaggattcatgtccccaaccacagccactttaaacctgtttttaaagtcacagccgtaggatacacctgctgcaatcacggtcataatgaattcgattggaatgggcactggaagtttgtctttgaagcgctgatttatttctttaacaatggatacaaccaaaaggacaatcagagctgtcaccaggtctgcaatattagtcttctctatttgtgagaatacagagtatagtacctgcccgggcnggccgc

SEQ ID NO: 2571 - DNA, 672 bp, Homo sapiens
  misc_feature 61, 436, 465, 509, 516, 551, 601, 624, 628, 649, 660, 666,672: n = A,T,C or G
ggtactttttttttttttttttttttttttttttacaatagtgttgaggattttttattgngttttccacatagataaaaaaataaggctttttgatgaaaagaatccattacaaagtcaaaaatccattacaattataattgaatcagtaacaaaatttagctttaaatgagtcaagtattctgcatttgaaatttaatatcacaaacattcaagattagtgaattttggtaagaaaaaaatactagaagaaaggaaaaggacaccttttcaacagatagtaatttataaaaatttttttaaaagtgctttgggaaaacacacagtatcattacttaagaaaagtcatttaaggaagacttaagtgcttcaagtgggagtgtattcagactaaaaaatgttttaaaatttgccaagaaatttaagtgttaaaaanctcttctccttattcagttcatgtttaanggaacatttgacaacaagtaaccaaccgccaaaaaaaagtcccngcttttnaactaataaatctggactggaaaactcttggttgnacctgcccggcggccctcgaaagggaattccacccctggggccgtctttnggacccgctcgggcccacctggngaanaagggaaaacgtttcttgggnaatgtttcccnccaatnccccan

SEQ ID NO: 2572 - DNA, 668 bp, Homo sapiens
  misc_feature 447, 453, 505, 515, 517, 572, 578, 591, 607, 619, 628, 632,635, 639, 646, 650: n = A,T,C or G
acggagagggtcaccaagcgtggatcgttggcattgtggaaaagggaaaccgaacggcccggatcattgacaagccgcgagttattgaagtcctgcctcgtggggccacagctgctgttcttgctcctgacagttcaaatgcctcctctgagcctagctcgtgagatgaaagaacagaagttgtttggaccttagagccattgtccacaatcacggatggttctcaagagttgattgtaagaaatttccaaagaaggctgcctgcatagtggttccggctgccctttctaggtgattggaatcagcccatctaaagcagtctttatatgcattccgaggccagagtaacattttgaactttggggggatatttgttcatcacttgggtagaagaagagcaaaaatacctctgttttctcttgccaaagtaagatgaagctattccangttganggatttttcttttgcccggggttgattaatttcttcacagggagtgagattnttaaagtacncnccccccaagtaaattgccaaaaaaaaaaaaaaaaaaaaaagtccttggccggacnccctanggcaattccaccnctggcggccgtttttngaccaactcggnccacttggngaanatngganacttttnctgngaaattttccctcaaatc

SEQ ID NO: 2573 - DNA, 428 bp, Homo sapiens
acccgatttaagtagtgacattgatactagtaattttgatgacttggaagaagataaaggagaggaagaaacattccctattcctaaagctttcgttggcaatcaactaccttttgtaggatttacatattatagcaatcgtagatacttatcttcagcaaatcctaatgataacagaactagctccaatgcagataaaagcttgcaggaaagtttgcaaaaaacaatctataagctggaagaacagctgcataatgaaatgcagttaaaagatgaaatggagcagaagtgcagaacctcaaacataaaactagacaagataatgaaagaattggatgaagagggaaatcaaagaagaaatctagaatctacagtatctcagattgagaaggagaaaatgttgctacagcatagaattaatgagtacc

SEQ ID NO: 2574 - DNA, 347 bp, Homo sapiens
acatcaagtccatctgacaaaatggggcagaagagaaaggactcagtgtgtgatccggtttctttttgctcgcccctgttttttgtagaatctcttcatgcttgacatacctaccagtattattcccgacgacacatatacatatgagaatataccttatttatttttgtgtaggtgtctgccttcacaaatgtcattgtctactcctagaagaaccaaatacctcaatttttgtttttgagtactatactcttcaaacaatgtcagtgtcataaagtcaaagaaagtatttggaaataatccagattaaagaaaactgaattaatacaacagccaaatgtagtacc

SEQ ID NO: 2575 - DNA, 539 bp, Homo sapiens
  misc_feature 458, 498, 531: n = A,T,C or G
actaaaaaaaggagaaattataataaattagccgtcttgcggcccctaggcctaaacttctggtatcttagtgtctcagtatcttagtgtccttcactcggactgtaaacctaagaatgttcattaaccctccattcctgttagattcagtcaggtcttagcaatttttcctgctcgtctccacccccttctctgactcttgtcctttccacttctctattccccatttcctctttcgcctcagttccctccttgcccaaaccttctcagtgcccacataacttggtaaaccactcaaatcaaggcctggggtaaagttgggagggaaagggctatagtggggtctgagggaatgttgacgggcagtttcacacagataaatctctgaaccagccgggcgcggtggtcacgccagtgatcccaacgctttgggaagcccgagatgggcggatcacgangtcaggggattgagaacatcctggcaacgtggtgaaactncatttctgctaagggacctcggccgcgaccacnctaagggc

SEQ ID NO: 2576 - DNA, 681 bp, Homo sapiens
  misc_feature 473, 484, 492, 499, 536, 561, 575, 600, 612, 615, 621, 636,653, 666, 678: n = A,T,C or G
acccactgtatttatttatgtgcaacaagaagtgtcagcaactgcacaaactcctccctgttcagctagtaggcagcaattctgttatctggcatcccatagctgggttaaattaaaacagggcgtgagaacaggtgagtctagaggtctaactctaacagggaccaccgtgcatttgaataaacagttgtattagggatgttgttaaagttagccactgggcagaataaaggatcccttaggtcaaatatttgggtttgacatgatgacatgacacatccaacactctgtcaaattacctgcacaaggcactgattgtgaaattctagttacagcattatcttaccaaattaaagaggcaggcatgagcagggaaaaatggagtgggataagagcctcgtcacgatgaggcttgggacatcttgggaaaaactgccacagcatgaagtcatcaacttcttgtcctggttggnaatttgagtgncttttaantattggnggtgaacattttggttagctcttgaatgggccacatntcaagcattgaagggttttccttgnaaattacaatggantggccccctccaccttataggtttnaggaaaaaacanggnttttcnttttgttcccccggnaaaatgggattgaaggncttaaaaatcccncccccttcgggnggt

SEQ ID NO: 2577 - DNA, 372 bp, Homo sapiens
  misc_feature 74, 75, 85, 95, 101, 120, 158, 178, 181, 186, 192, 203, 240,261, 295, 303, 316, 320, 342, 351, 354, 371: n = A,T,C or G
cgaggtactttttttttttttttttttttttttttgggtttttttttttttttttttttttttcaaaaaactgnnggcttttttnttcagttaanaggtanacaaatgaacatggaaggntgtcccatttaacttgcccaaagttcacattccacttnattcatccatcccacactgncanaaatnttaaanaaataaccaanattgccaacaggctttttctttcttacttcttcttancaataacagtcaataaactgnttgcaaaaaagttactaatttaaattttcactgngttcaaanaacctcatccctntaanaagctcccgaatatgccaatanatcctgccnctnctgacaggagggcaaant

SEQ ID NO: 2578 - DNA, 656 bp, Homo sapiens
  misc_feature 33, 44, 322, 404, 456, 470, 473, 490, 505, 508, 520, 529,545, 564, 569, 572, 573, 578, 587, 597, 610, 623, 624, 625,642, 653: n = A,T,C or G
actttttttttttttttttttttttttttcagngccttcctcanactgctgtggatcttcacttgtagcacaaattgtcacaaaagtaaaaaagctaggtaaaatttgaaatgctttacttaatttaattaatttactttgcttaatttttacataattggcttaccacttctaaaatctgcttcaatcatatgggtgttctatccaaattccataatgttggtaatcatttccacaatgatatataaaatgtcatccagctttactggggcagtattcctataaatttcagcaagttggcaataaaaataacagctcttanaataaccattaatgccatacttgctttggtttcattgatatattactgggcttaattatcagttagcaaaaaatcggcctanttagcaagcagatttcttttaaaattaattcaatctcttaattttttaaaanaattaataaagccnagnatggggataaaatgatntcttattaacagcantcntttgaaacctgntttaaagcnccggtccaaaacattngatggaccttggcggaacncctanggnnattcnaccactggnggcgtctttnggacccacccggnccacctggggaannnggaaaatgttcctgggnaaaggttcccncca

SEQ ID NO: 2579 - DNA, 508 bp, Homo sapiens
  misc_feature 497: n = A,T,C or G
ggtacgcgggatgttttttctgattccatcctgtgtccccttcatccttgactcctttggtatttcactgaatttcaaacatttgtcagagaagaaaaaaagtgaggactcaggaaaaataaataaataaaagaacagccttttcccttagtattaacagaaatgtttctgtgtcattaaccatctttaatcaatgtgacatgttgctctttggctgaaattcttcaacttggaaatgacacagacccacagaaggtgttcaaacacaacctactctgcaaaccttggtaaaggaaccagtcagctggccagatttcctcactacctgccatgcatacatgctgcgcatgttttcttcattcgtatgttaagtaaaggtttggttattatatatttaacatgtggaagaaaacaagacatgaaaagagtggtgacaaatcaagaataaacactgggtgtagcccaaaaaaaaaaaaaaaaaaaagtcctgcccggcnggcgctcgaaa

SEQ ID NO: 2580 - DNA, 665 bp, Homo sapiens
  misc_feature 433, 474, 494, 501, 607, 610, 625, 642, 648: n = A,T,C or G
actatgtcgattcgacagaacattcagaagattctcggccttgccccttcacgagccgccaccaagcaggcaggtggatttcttggcccaccacctccttctgggaagttctcttgaactcaagaactctttattttctatcattctttctagacacacacacatcagactggcaactgttttgtagcaagagccataggtagccttactacttgggcctctttctagttttgaattatttctaagccttttgggtatgattagagtgaaaatggcagccagcaaacttgatagtgcttttggtcctagatgatttttatcaaataagtggattgattagttaagttcaggtaatgtttatgtaatgaaaaacaaatagcatccttcttgtttcatttacataaagtattttctgtgggaccgactctcaagnactgtgtatgccctgcaagttggctgtctatgagcatttanagattagaaaaaaaattaanttggttnacccttggactgttggtttggtggtggtttttttttcaagcccaatccttgacttagacaataagaggccaattttacttgttatttccttggccggaccccctanggngaatccaccactggnggccgtctatggtccancctggncaactgggtatatgggt

SEQ ID NO: 2581 - DNA, 669 bp, Homo sapiens
  misc_feature 407, 436, 443, 507, 524, 538, 561, 573, 574, 595, 610, 619,637, 646, 653, 661, 663, 668: n = A,T,C or G
acatgcttttattctttccataggacatatttccaaataatgatcacagtattatggttaataagatgctggacagatgcgtagccaaagaatattacataacaacaaaatctcatcaatgatatatcaaatgcaaatttactaagacatcaagagaatatctgtttgtagttacatggctaaaaacaagacattattacagtaatcaagtccataaaactagaaaaaaagcactgtataacaaaaaggccttttagaagctattaaatgaacaaacattatagataaaccaattttatatctgaagcagcttatagcaccaacacgttggcaggaccagcagaggggtggggtctttggaccaaggcatctgggaacaggaagggctctcagccatcatctactgnagccacttgttttacaaatggagaaatanaggcccnaaaagatgaaacgccttgtccaaggcccacaacacaagacagactgggaaatgatccagggctntgatccaggccctgacntcagggaatgcttntttacatacagatataaaatctnttggattgatgnntttttcccatacaggcttccntaaaaaaaccttaanccctatggncttggccggaccccctangggaatcancactggnggcgtctntnggtcng

SEQ ID NO: 2582 - DNA, 661 bp, Homo sapiens
  misc_feature 422, 439, 473, 496, 499, 508, 513, 558, 569, 593, 600, 606,623, 624, 629, 635, 642, 643, 646, 660: n = A,T,C or G
acgcgggggtggttggtgtgcgggtttcggttggaggactcgttggggaggtggcctgcgcttgtagagactgcatccccgagacgatggcggagggagataatcgcagcaccaacctgctggctgcagagactgcaagtctggaagaacagctgcaaggatggggagaagtgatgctgatggctgataaagtcctccgatgggaaagagcctggtttccacctgccatcatgggtgtggtttctttggtgtttctgattatctactatctagatccatctgttctgtccggcgtttcctgttttgttatgtttttgtgcttggctgactaccttgttcccattctagcgcctagaatttttggctccaataaatggaccactgaacaacagcaaagattcatgaaatttgcagcaatctantaaaaactcgacgcaancttgtgggttggtggaaaccctcttcaccttaangaagaaaaacctaaaatgtcctnggncgcaacacnctaanggcgaaattcaacacactgcggccgtctaatggatccactcgganccaccttgcgnaatatggcatacttgttctttggnaattgtntccctncaattccccaaatacannccgancttaanttaaacnnggngccaataagaactna

SEQ ID NO: 2583 - DNA, 357 bp, Homo sapiens
  misc_feature 334, 335, 336, 339, 340: n = A,T,C or G
acaatgtagaactctgtccaacactaatttattttgtcttgagttttacttcaagatgagactatggatcccgcatgcctgaattcactaaagccaagggtctgtaagccacgctgctcttccgagacttccattcctttctgattggcacacgtgcagctcatgacaatctgtaggataacaatcagtgtggatttccactcttttcagtccttcatgttaaagatttagacaccacatacaactggtaaaggacgttttcttgagagttttaactatatgtaaacattgtataatgatatggaataaaatgcacattttagaaaaaaaaaannnaannaaaaaaaaggaagttcc

SEQ ID NO: 2584 - DNA, 639 bp, Homo sapiens
  misc_feature 508, 519, 533, 540, 598, 604, 606, 619, 623, 627: n = A,T,C or G
cgaggtacagtgagggtgttcagagggaggcacaaagaatagctctgagattaggcaatggaaatgacaaaaaagagatgaataaatccgatttgaataccaacaatttgctcttcaaacctcctgtagagagccatatacaaaagaataagaaaattcttaaatctgcaaaagatttgcctcctgatgcacttatcattgaatacagagggaagtttatgctgagagaacagtttgaagcaaatgggtatttctttaaaagaccatacccttttgtgttattctactctaaatttcatgggctagaaatgtgtgttgatgcaaggacttttgggaatgaggctcgattcatcaggcggtcttgtacacccaatgcagaggtgaggcatgaaattcaagatggaaccatacatctttatatttattctatacacagtattccaaaggggaactgaaattactattgcctttgattttgactatggaaattgtaagtacctgcccggcnggcgtcgaaanggcgaatttcagcnactggcnggcgtactatggatccgacctcggacccaacctggcgtaatcatgggcatacataaangtaaancngggggccaataanggcnactncattaatgggtg

SEQ ID NO: 2585 - DNA, 656 bp, Homo sapiens
  misc_feature 255, 416, 418, 437, 466, 473, 479, 503, 510, 541, 552, 605,612, 613, 647: n = A,T,C or G
acctgagctaaatgactgaagctttaggggtgcatagaaaccaccataatttgtatgacattttgaagtgaattaaatatttttgaacatgcttcttcgacagccagtgttatatttttcagatcaacacaaagcacaatgattactcgaaattcagtattttcaaatttacatatttaaagtcatgcaagctgtaacttccctgtcaaaattactggctgccaaatttatacctgtttcttcagctgtactttnttttttttttttttttttttagggcagaggcacaatcattttagattaaaaaaaattgaacaaagagaccctcttgcgagaggtgagatgaggccctgccatgcaaaggagtcccagcagaggaggaagaattccatcctggagttcaagtttctgtgcananacaggacctggggacaganaacggcctcccccaatttcaactggctgncctcatnactttnggctgacctggggtgataaaaggnggagctncctggtggggacggactttggccaacttgcnttgcattttgnctcatgacaaaaaaagcctgggccaaaacccacgcaataacccccacctgagntggccanntttaaaagacggttttttttaggcatggggcaanaagaacctc

SEQ ID NO: 2586 - DNA, 674 bp, Homo sapiens
  misc_feature 41, 150, 201, 204, 272, 319, 321, 376, 412, 430, 444, 452,470, 473, 510, 527, 552, 572, 576, 581, 590, 617, 636, 643,644, 650, 670: n = A,T,C or G
ggtactttttttttttttttttttttttttttctacagttnggactgaattctaatttttcttagctacatgtcttcaaaataatgttttcaatttttttccttcttttttttctccatttttccaaatttggagtcactggaaactaanatgtgctttcataaagccctgtgaaatgaagctaaacaacttgagcttcanaanaaaatagcagcgacctatttacatacataagccactttcatacctgcctactgatgtatggacttcanagtaatgtggcatatatctattttccagaattgttcttttgtttgtngntggcctccccctattttctcttcacaggacatgagacttcacaaccttctaaaanggagctttcctaataactcaggacctatctatctangaataaaccatcctaccntgagagatcaaacnaaacctgngggcagaaacccattttnttntaaaatgcgttcttccacaaaatttttaaaaaaaaanggggggaatgggaagtnttttgggccctcaatcttaactaanggaaactttaggtcctgccngggnggcgnttaaaaggngaattccacccctgggggcggtttatnggaccacccggaccaactnggggaanntggganaatggttcctgggaaatgtncccc

SEQ ID NO: 2587 - DNA, 477 bp, Homo sapiens
  misc_feature 462: n = A,T,C or G
ggtactgatacatgctataacagagatgaacttcgaaaacatgctaagtgaaagaagccaaatccaaaaacaataaaaacacatattgtatcctcaccctttttgcattttagtgagcaatcattgcatatgaatgtttatgggaaaaatcaatgtgtgctaaatcattgtattccagtaaatagattggacttaaaacttgatacagaagttgcaaataagtgggattgagtttgattattatatagaaaataattacatgattcatttaagaataataatatccaccatttattgagcacttactatgagcctgtgtgccaaacatttcatgcatttctcatttaattctcacaataatcctgtgaggtagaagctattaggttgaatcatatgaacttgccaatatatgataatttctaaagaagttgggaatttttgaggatgtgaatggacctgccnggcggccgctcaaaa

SEQ ID NO: 2588 - DNA, 658 bp, Homo sapiens
  misc_feature 390, 416, 505, 529, 531, 535, 537, 555, 564, 580, 585, 590,591, 592, 594, 600, 607, 614, 617, 628, 642, 649, 650: n = A,T,C or G
ggtacttactgaagttttttttttttttttgaaaccaagtctcgctctgtcgccaggctggagtgtagtggcatgatctcaccacactgcaacctctgcctcccgggttcaaacgattctcctgcctcagcctctcaagtagctgggactacaggcatgtgccaacacacccagctaatttttgcactttcagtagagatggggtttcactatgttggtcactatggtcttgatctcttgatctcgtgatctacccaccttgggttcccaaaatgttgggattacaggtgtgagccactgcaccaggcaaactgcgatcttttagtggtgcctcttctctcttttgacttaaggatgttgcccttaaggaaacctggaggctactactgngatacactacttgagagatggattgntgctctttcttctacagtctttacaaggagtagattattaagacagaagaagttaccattgcattaatggttggaagctgacagtcttntaaatttgctaccaactggtttangnagangnccgaaagactttcaccanttcattctnttggataaggagtacnttcanaacannngngtgganaattttnggtgggntgntttctaaatgnataaaggttttggntccggtnngggggggg

SEQ ID NO: 2589 - DNA, 666 bp, Homo sapiens
  misc_feature 394, 453, 468, 472, 477, 483, 503, 506, 519, 531, 546, 565,578, 580, 638, 657, 662: n = A,T,C or G
acttgaactggtaggaaatgcatcaaaagacttaaaggtaaagcgtattacccctcgtcacttgcaacttgctattcgtggagatgaagaattggattctctcatcaaggctacaattgctggtggtggtgtcattccacacatccacaaatctctgattgggaagaaaggacaacagaagactgtctaaaggatgcctggattccttgttatctcaggactctaaatactctaacagctgtccagtgttggtgattccagtggactgtatctctgtgaaaaacacaattttgcctttttgtaattctatttgagcaagttggaagtttaattaagctttccaaccaaccaaatttctgcattcgagtcttaaccatatttaaagtgttactgnggcttcaaagaaactattgattctgaaataatgggttttgattgagttgactggttttnaaaaactggttggantttnattgngatgcnaaaagttatagtaccaacanttnggtttgtaccttnggcgcgaccacnctaaggccaaatccncacactggcggccgtcttntggatccacccgngncaacctggggaacatggcaaactggttcctgggaatggtttccgttcaattcccccanatcaaccgaacctaaaatnaaccngggc

SEQ ID NO: 2590 - DNA, 678 bp, Homo sapiens
  misc_feature 509, 533, 582, 605, 610, 621, 647: n = A,T,C or G
ggtacgcggggaactcggtggtggccactgcgcagaccagacttcgctcgtactgactgctcaagagaaacataccccattgtttttcatttgtaagcgttctgtgatcttctacaattggtcacgtcctcttcattttccatcttgaaagagagagccaacaaggactttatttcattctgttttaggtaaacctccttgcccactggctgtatctatactttccttgagaaaaatcccataaagtggatggacctgtgaagaaaatgtatgcttatggcctagccttcatgtctggctgatgtatcctataaggcaagtaagccccttttctagtctctggtaagatgcaagagctcatatccccatcactgacattttagtttggaaataatattgagactgtgctatgaccaacccctgatgttggtttttcttttcaaacttttgcatatgagtagaggaaaagcctaaaagttaagtatttatgtctggggggataccttcangtggcttatctggtttatgccaanaaattatgtggtcatctttattcagtgcaaaaattttttttaaattggntataatggaagggaacattaaanaactnttcctcccaanaaaacccctaaaataaattcctaaanatggtttccttggccttaaaatacccttaag

SEQ ID NO: 2591 - DNA, 651 bp, Homo sapiens
  misc_feature 397, 398, 399, 400, 404, 405, 406, 407, 408, 409, 410, 411,412, 413, 414, 415, 416, 417, 418, 419, 420, 421, 422, 426,427, 433, 438, 439, 444, 455, 463, 476, 484, 488, 495, 521,525, 526, 531, 536, 544, 558, 560, 562, 564, 565, 566: n = A,T,C or G
  misc_feature 577, 581, 582, 583, 601, 603, 606, 607, 608, 609, 612, 615,625, 627, 633, 648: n = A,T,C or G
acttctttttttttttttttttgggtgaggggaccctactctgttatcccaagtgctcttattctggtgagaagaaccttacttccataatttgggaaggaatggaagatggacaccaccggacaccaccagacactaggatgggatggatggttttttgggggatgggttaggggaaataaggcttgctgtttgttctcctggggcgctccctccaacttttgcagattcttgcaacctcctcctgagccgggattgtccaattactaaaatgtaaataatcacgtattgtggggaggggagttccaagtgtgccctcctctcttctcctgcctggattatttaaaaagccatgtgtggaaacccactatttaataaaagtaataagaatccgaannnnaaannnnnnnnnnnnnnnnnnnaaannttcttnggccnnaaccnccctaagggcnaattccancccctggcggccntactattngatncaacccngtccaacctggggttatcatgggccnaccnnttccnggggnaaatgttnccggtaaaatcccncnantnnnaaccggaaccntaannntaaaacccgggggcctangnggnnnnaanttnaattttgggntncctaangccctttccaaaggnaac

SEQ ID NO: 2592 - DNA, 454 bp, Homo sapiens
  misc_feature 405, 407, 408, 415, 416, 417, 418, 419, 420, 421, 422, 423,424, 426, 427, 428, 429, 430, 431, 432: n = A,T,C or G
ggtacagtggaaggtggataacgccctccaatcgggtaactcccaggagagtgtcacagagcaggacagcaaggacagcacctacagcctcagcagcaccctgacgctgagcaaagcagactacgagaaacacaaagtctacgcctgcgaagtcacccatcagggcctgagctcgcccgtcacaaagagcttcaacaggggagagtgttagagggagaagtgcccccacctgctcctcagttccagcctgaccccctcccatcctttggcctctgaccctttttccacaggggacctacccctattgcggtcctccagctcatctttcacctcacccccctcctctcttggctttaattatgctaatgttggaggagaatgaataaataaagtgaatcttttccnannaaaaaannnnnnnnnnannnnnnngttcctgccgggcggccgttca

SEQ ID NO: 2593 - DNA, 662 bp, Homo sapiens
  misc_feature 480, 482, 512, 515, 522, 545, 559, 593, 608, 632, 638, 639,644: n = A,T,C or G
ggtacagtgagggtgttcagagggaggcacaaagaatagctctgagattaggcaatggaaatgacaaaaaagagatgaataaatccgatttgaataccaacaatttgctcttcaaacctcctgtagagagccatatacaaaagaataagaaaattcttaaatctgcaaaagatttgcctcctgatgcacttatcattgaatacagagggaagtttatgctgagagaacagtttgaagcaaatgggtatttctttaaaagaccatacccttttgtgttattctactctaaatttcatgggctagaaatgtgtgttgatgcaaggacttttgggaatgaggctcgattcatcaggcggtcttgtacacccaatgcagaggtgaggcatgaaattcaagatggaaccatacatctttatatttattctatacacagtattccaaagggaactgaaattactattgcctttgattttgactatngnaattgtaagtcctgcccggccggccgttcnaanggcgaantccacacactggcggccgtcttntggatccacctcgnaccaacttggggaatatggcatactggttctggngaaatggtttccgtncaattccccaaatacaaccgaacntaaagnnaaccnggggccaaaaagaacaac

SEQ ID NO: 2594 - DNA, 672 bp, Homo sapiens
  misc_feature 184, 393, 397, 525, 530, 537, 545, 555, 563, 567, 573, 579,592, 598, 614, 618, 626: n = A,T,C or G
cgaggtactgctcggaggttgggttctgctccgaggtcgccccaaccgaaatttttaatgcaggtttggtagtttaggacctgtgggtttgttaggtactttttttttttttttttttttttttttttggggtttctttttaattatctttagtcttgtgatcacacataattttaaaatttgngtatatctccgttactttaatccttttaagttggcaaaagcaccattcccaatcaaatacacagttctacagttttgtttctgaatggctgtttaaagacaatcctaaattataacttagtttgacttaaattgtaaagaattcaagagtgaagtttaacttgctactattttaaaagcatgtgaccttataaatctgtaagatgtganaagngttgaataatctttaatattacacataaaccacactaaaatgcctttcaataaagtaaaaagaaaccattttaaatacagggaattataattaaaatggcataattaaggccaaactataaacattgnttccntattatnttcaaccnttcctttaanaggcaatnaacnttgacncaaacnccggtgaattttntgggtntaaacaggaacaattncccnttttaaantttccttacccgtttttaattaaattaaaccactccctaagttaaa

SEQ ID NO: 2595 - DNA, 428 bp, Homo sapiens
gcgtggtcgggccgaggtacagagaagcacctattgacaaaaaggggaatttcaattacatcgagttcacacgcatcctgaaacatggagccaaagacaaagatgactgaaagaactttagctaaaatcttccagttacattgtcttactctcttttacttctcagacacttcccccaccctcatagaacctgttgcatgcaacttagtttcacagctttgcctcttctttttgatgtatttattccagacctttctgccacttagcacttgtataatcagactggaaatggggatgagggtgtaaattgtattgaaaaagatcgcgaataaaaatcaacaaatgtgaaagcccagaaaaatatattcgtatttctggttttgctggatttttacatttttatataataaaaatgttattttgaaatt

SEQ ID NO: 2596 - DNA, 675 bp, Homo sapiens
  misc_feature 470, 534, 567, 578, 629, 649, 665, 668, 670, 673: n = A,T,C or G
acgcgggatttattttaaatgagacaatcattttaagttttaagataacagaagtgaccaatgtaatttcacaacacctaaggattttttggttgatcaggttactgtagatttttactgattgtcctggatgaatagactgtgctttttctttttctctcccttccttcttggtttcccatagtataataagcatgcatactttaacttctatagttttctcctttagagggtcgtcttcagttttagaggtttacttctcccttgcctttgactcattggactagtgcggaggctttaagtagtttaaaatgggcttttgcttttctaggtcattaacgttttttatttaagtttctttagccaataagtggctgagtttcgcacttgatttcaatattttatagtaaagaaatgacaaactgctttggttcatttcataaacaaactctgcattaagataactattnaaaggttgttaagaagaaaaattactggttctttggtactcgtgggacctcggccgcgaccacnctaaggcgaaattcaacacactggcggccgttntaatggatccnacccggaccaacctgggggaacatggcatagtggttcctggggaaatggtntccgtcccaatcccccaaanacaaccggaacttaangtnanccngg

SEQ ID NO: 2597 - DNA, 639 bp, Homo sapiens
  misc_feature 354, 459, 460, 461, 462, 463, 464, 465, 466, 467, 468, 469,470, 471, 472, 473, 474, 475, 476, 477, 483, 496, 501, 503,540, 562, 581, 634: n = A,T,C or G
actagagccagtcatccttaacaaatcttttcacattttatttctttcacatgtagtcatcttcaaaaaggaaagatttggaattttagaaaaggggcaactcttctttttagcattctcatcagaaagtcacaaaaatcgatggaatcatttccactgggaagattgaccttttgtatttatttgtggggtaaattaataagcattccagatgcttgcagcttcctgcatccaggagatgctgtgttccccgtgatgcagctggaacccaagctgcagcaggagatgcaagtttcaggatgttccccactgagctggaggaatatctacagcagtgatgcttgaaatttttgnatgaattattttgtcgcctacccttttcctccaaacaaaaattagagggattattttaatcttttggatcttccccttttttgagaaataaagtttttatcaaannnnnnnnnnnnnnnnnnnggtccnccgctacgggggntaatntnactctactacttcccatattctaaaccaggcgactgnaatcctgacgtgaaatcaatanactactggcctacccggcntggctgaaactgcctaaaatgccggacggggtcctctgatcccccttggggcnggcgg

SEQ ID NO: 2598 - DNA, 490 bp, Homo sapiens
  misc_feature 466, 486: n = A,T,C or G
ggtactgatacatgctataacagagatgaacttcgaaaacatgctaagtgaaagaagccaaatccaaaaacaataaaaacacatattgtatcctcaccctttttgcattttagtgagcaatcattgcatatgaatgtttatgggaaaaatcaatgtgtgctaaatcattgtattccagtaaatagattggacttaaaacttgatacagaagttgcaaataagtgggattgagtttgattattatatagaaaataattacatgattcatttaagaataataatatccaccatttattgagcacttactatgagcctgtgtgccaaacatttcatgcatttctcatttaattctcacaataatcctgtgaggtagaagctattaggttgaatcatatgaacttgccaatatatgataatttctaagaagttggggaatttttgaggatgtgaatggtcctgcccggcngccgctccaaaggcgaattncacc

SEQ ID NO: 2599 - DNA, 527 bp, Homo sapiens
  misc_feature 441, 444, 467, 472, 513, 516: n = A,T,C or G
actggaacatacaacacacacacttttagtaggagagtcggccaccacatttgctcaaagtatggggtttatcaatgaagacttatctaccagtgcttctcaagctcttcattcagattggcttgctcggaattgccagccaaattattggaggaatgttataccagatccctcaaaatactgcggaccctacaaaccacctggtatcttaaagcaggatattcctatccataaagaaacagaagatgatcgtggtcatgacactattggcatggttgtaatccataagacaggacatattgctgctggtaccagcatccccagcgtctggcattccatgtttctgctcctgtggcctccacggtgcaacaagctagcggtttacttggacctctgcctcatctttcttcttttgcgcttaacctgcgcattcgcttcttnctncacttggctctcatggcgcaaanggttncaaaaaaatggcgctaaggccgaaaccccgcgtccctcggncgngaacacgctaa

SEQ ID NO: 2600 - DNA, 652 bp, Homo sapiens
  misc_feature 472, 531, 570, 583, 588, 608, 638: n = A,T,C or G
actggctgggatggctctgatatagcagccttggtgtagtttctgcatttcgggaagagtgtttttattatccacctgcagactggactggattcttctagctccttcaatcccattttctcctgtggcatcactaagtataagacctgctctcttcctgaagacctataagctggaggtggacaactcaatgtaaatttcaaggaaaaaccctcatgcctgagatgtgggccactcagagctaaccaaaatgttcaacaccataactagagacactcaaattgccaaccaggacaagaagttgatgacttcatgctgtggacagtttttcccaagatgtccaagcctcatcgtgacgaggctcttatccactccatttttcctgctcatgcctgcctctttaatttggtaagataatgctgtactagaatttcacaatcagcgccttgtgcaggtaatttgacagagggtnggatgtgtcatgtatcatgtcaacccaatatttgacctaagggatccttattttgcccntggctacttacaacatcctatacactggttattcaatcncgggggcctgtanaatanaccttaaatacctgtctacncctgtttattaacccctttggagcccaaanaaatgtgctctact

SEQ ID NO: 2601 - DNA, 486 bp, Homo sapiens
acgcgggagatgaatgccagaggacttggatctgagctaaaggacagtattccagttactgaactttcagcaagtggaccttttgaaagtcatgatcttcttcggaaaggtttttcttgtgtgaaaaatgaacttttgcctagtcatccccttgaattatcagaaaaaaatttccagctcaaccaagataaaatgaatttttccacactgagaaacattcagggtctatttgctccgctaaaattacagatggaattcaaggcagtgcagcaggttcagcgtcttccatttctttcaagctcaaatctttcactggatgttttgaggggtaatgatgagactattggatttgaggatattcttaatgatccatccaaagcgaagtcatgggagaaccacacttgatggtggaatataaacttgggttactgtaatagtgtgctgtcatggaaccgaggctgcatcttgttatagcatcttttgacc

SEQ ID NO: 2602 - DNA, 890 bp, Homo sapiens
  misc_feature 624, 705, 731, 740, 745, 751, 757, 778, 789, 806, 828, 840,845, 852, 855, 859, 871, 878: n = A,T,C or G
actcttgataaaagaccgtgaaaccaacaaatcaagaggatttgcttttgtcacctttgaaagcccagcagacgctaaggatgcagccagagacatgaatggaaagtcattagatggaaaagccatcaaggtggaacaagccaccaaaccatcatttgaaagaggtagacatggaccgcccccacctccaagaagtagaggtcctccaagaggttttggagctggaagaggaggaagtggaggaaccaggggacctccttcacgaggaggacacatggatgatggtggatattccatgaattttaacatgagttcttccaggggaccactcccagtaaaaagaggaccaccaccaagaagtgggggtcctcctcctaagagatctgcaccttcaggaccagttcgcagtagcagtggaatgggaggaagagctcctgtatcacgtggaagagatagttatggaggtccacctcgaagggaaccgctgccctctcgtagagatgtttatttgtccccaagagatgatgggtattctactaaagacagctattcaagcagagattacccaagttctcgtgatactagagattatgcacccaccaccacgaagattatacttaccgngattatggtcattccaagttcacgtgatgactattcatcaagaaggatatagcggataggaagatgggatattgggtccgngaatcggggactatttcaaaaatcantcccaaggnggggngggttncttacnggagaattttttattgaagangttattggggnaaccttcaccgttaagnggcttccacccttacaccgaangggcccccccgnccttnttttttnggngggnaagccagtcccnttttgantgaattacccct

SEQ ID NO: 2603 - DNA, 490 bp, Homo sapiens
ggtacaataaaggaatggggaagggggaaatgaaagaatagagaaaactatacggtagtagtcaggatgtggtggaaccaaattgcagttttctaattgagaatgtaatcttggtctttaaagaacagagttctggagtaaagaagcaggttcccttttcagtagacacctcccgtctgctgttggaacacatcaattgtatcttcatcctccatttccaactgtgcaggtgtgtctgtttcattgattggttgcccgtcaaatcggaatctgatctgcctcattgacaatccctgtcgttcacaataggctttcattagtttactaagtggtgtatgcctcttaatcttaaactgcaccacagaaccatcctgccccgccaccttcaaattaatatgatcgttgttctcagtcttgactccttccttgggcttttcgtcggccatggcgagcgccggagtctcctcagctgccgcttcacaaaagaggt

SEQ ID NO: 2604 - DNA, 508 bp, Homo sapiens
  misc_feature 459, 491: n = A,T,C or G
ggtacgcgggatgttttttctgattccatcctgtgtccccttcatccttgactcctttggtatttcactgaatttcaaacatttgtcagagaagaaaaaaagtgaggactcaggaaaaataaataaataaaagaacagccttttcccttagtattaacagaaatgtttctgtgtcattaaccatctttaatcaatgtgacatgttgctctttggctgaaattcttcaacttggaaatgacacagacccacagaaggtgttcaaacacaacctactctgcaaaccttggtaaaggaaccagtcagctggccagatttcctcactacctgccatgcatacatgctgcgcatgttttcttcattcgtatgttaagtaaagttttggttattatatatttaacatgtggaagaaaacaagacatgaaaagagtggtgacaaatcaagaataaacactgggtgnagcccaaaaaaaaaaaaaaaaaaaagtcctgncccggcggccgtcgaaa

SEQ ID NO: 2605 - DNA, 594 bp, Homo sapiens
  misc_feature 30, 114, 119, 187, 200, 299: n = A,T,C or G
acttttttttttttttttttttttggaggnatttgaaatacaactttattctgattctaaacgaaaaggaatgggaatgacagtaacaaacaagatttcaccactgaatattgngatgngactgcagcagtcttatatatgaaactcaaggaatcaactgcgttccaaaacagctaaatatgcaggnccaaacaatgaanttattttttaaactgccacattcactccgaagcccactcatctccttcagcatcccacagatgaagcacatgttccgcttagctagataataatgaggnggcacacacgctgcaccgctgacatcacaggacagctgcctataaaactagacttctgacgctgggctccagcttcattctcacaggtcatcatcctcatccgggagagcagttgtctgagcaacctctaagtcgtgctcatactgtgctgccaaagctgggtccatgacaacttctggtggggcgagagcaggcatggcaacaaattccaagttagggtctccaatgagcttcctagcaagccagaggaagggcttttcaaagttgtagttacttttggcagaaatgtcgtagt

SEQ ID NO: 2606 - DNA, 871 bp, Homo sapiens
  misc_feature 610, 634, 660, 688, 714, 719, 736, 741, 747, 751, 771, 774,778, 810, 813, 842, 859, 864, 865: n = A,T,C or G
acgcggggagcgcggagcacctgcgcccgcggctgacaccttcgctcgcagtttgttcgcagtttactcgcacaccagtttcccccaccgcgctttggattagtgtgatctcagctcaaggcaaaggtgggatatcatggcatctatctgggttggacaccgaggaacagtaagagattatccagactttagcccatcagtggatgctgaagctattcagaaagcaatcagaggaattggaactgatgagaaaatgctcatcagcattctgactgagaggtcaaatgcacagcggcagttgattgttaaggaatatcaagcagcatatggaaaggagctgaaagatgacttgaagggtgatctctctggccactttgagcatctcatggtggccctagtgactccaccagcagtctttgatgcaaagcagctaaagaaatccatgaagggcgcgggaacaaacgaagatgccttgattgaaatcttaactaccaggacaagcaggcaaatgaaggatatcttctcaagcctattatacagcatacaagaagagtcttggagatgacattagtttccgaaacatctggtgacttccggaaaagctctgttnacttttggcagatggcagaaaganaatgaaaagtctgaaaggtggatganccatttggcccaaacaaagatgccccanaaattctcttataaaagctggtgganaacanaaggggggccccgggantgaanacaaanttcnccttggaaaacctgtggttnaanggancttttcctcaatttaaaacctaaccattttgnttngaaatcccggaaaatattcccccccaaanggccctttggggggcancgcannaaaagg

SEQ ID NO: 2607 - DNA, 905 bp, Homo sapiens
  misc_feature 529, 553, 659, 660, 684, 687, 688, 694, 695, 705, 707, 708,710, 712, 714, 717, 718, 719, 720, 725, 727, 728, 729, 736,748, 749, 750, 753, 758, 760, 762, 764, 766, 767, 777, 781,790, 791, 792, 793, 796, 801, 803, 804, 806, 809, 810: n = A,T,C or G
  misc_feature 812, 813, 817, 819, 821, 825, 829, 830, 833, 834, 836, 837,851, 860, 861, 862, 864, 874, 876, 879, 893: n = A,T,C or G
ggtacgcggggctacaacaggcaggcaggggcagcaagatggtgttgcagacccaggtcttcatttctctgttgctctggatcgctggtgcctgcggggacatcgtgatgacccagtctccagactccctggctgtgtctctgggcgagacggccaccatcaactgcaagtccagccagagtgttttatacagctccaacaataagaactacttagcttggtatcagcagaaaccaggacagccccctaagttgctcatttactgggcatctacgcgggaagtcggggtccctgaccgattcagtggcagcgggtctcggacagatttcactctcaccatcagcagcctgcaggctgaagatgtggcagtctattattgtcagcagtattataggagtcagtgcagttttggccaggggaccaagctggagatcaagcgaactgtggctgcaccatctgtcttcatcttcccgccatctgatgagcagttgaaatctggaactgcctctgttgtgtgcctgctgaatancttctatccctctgaccctttttncacagggggacctacccctattggcggtcccttccagctcatcttttcacctttaaccccccttccttcctcctttggcttttaaattaatgcctaatggttgggnnggaagaaatggaaataaaattaanagnngaaaannttttgccccntnnantnanatnnnnctgcncnnnagcgctnactgcccgcgtnnntcnttccntntncncnnccccaaatantttnctctctcannnntcncccananntncanngnnttcntntncccngggnnggnngnntttaaaagggggcnaaatttccnnncnacttgggggngnggntttataatggggancccccccccgcg

SEQ ID NO: 2608 - DNA, 891 bp, Homo sapiens
  misc_feature 134, 651, 657, 700, 723, 741, 748, 807, 815, 824, 861, 868,891: n = A,T,C or G
ggtacagtctttcattaaataagaatacttacacatacattttcagatatttctaccttcctgtatgtgtttggaattgtatgtaggtagccactgaaagaatttgggccccttgggaggatggcagtggaagnccatgaagtaaagagcattctttaaaaagcagatttgattgcataccttttagttatttgagattctgagaattctgataaaccccaaagcagaaagattccttatacccttggaagatgggaaaggtgagggaaatatttgaagcagggtcagaacatccactaagaacatagcacctcagtagagcttacattatagtgccagggtagagttattactgaatagcttaggatgatgaacattaaccttcctacaggagtagtagcagctgatttggtgaccatgattggtcaccttttagtgtaactgcaaactaagaacaattatggcttgacatatactccatgtagggaagtgatgggagaggcagcctctgtgtgggtccatccttggaagcactgcatcgattttgctcccctctggttttaaggagatcttttagacctttccttgctaacctgcttttcagtaaaattcttggatgggcctttcgatttcttggattcagacatcttnttctcnccccttctttttcattgggaggcaatggatcctcaacaccgtnggaccaaaaattgggcttggcanggaaataaatttcaaggntttttcntaaaagacctttgggatttaaccaggggttggattaccttaaaggctggatgccagggnaccctggncccggggcngggccggttcgaaaaaggggcggaaattcccaccacncttgggngggcccggttacttaaggggaan

SEQ ID NO: 2609 - DNA, 857 bp, Homo sapiens
  misc_feature 63, 110, 183, 195, 229, 261, 268, 363, 395, 517, 583, 674,684, 702, 742, 753, 757, 776, 779, 783, 788, 794, 798, 815,848, 850: n = A,T,C or G
ggtactttttttttttttttttttttcgctaaatgccctgtttattctgcaaacaaggcttanaaatgtatagacacaatttgtaggctgagaaatctctgtgtagttgngacttccatacttccgcaaaagtagtaaggacagcgacttctgaacacattaacctaccactgttttgtttanagcgaacacagngagaatggattcctaacggcctgtttctctaagngatcgtcgcagttcgctgctctagtctttaanaacaagnggagccttcacttgagccgccacctccttgccattcagggcttcaacaattgcaagcgcaaactcgaagctggtcccaggcccccggcttgtaanaatcaggccgtctttttccacacgattctcanagtaggtgtaatgacctccattcatcattttgtctttagcaagagggtgtgttgtaactttacttccaaaacccatttcatgagccaacagagcagtaggacctgcacagatggcggctatnaggcccttccggttttcctgctccttcagtatctccttcacagcagcagactcagataaattctgngcgcccagattacctcctggtagaaccaccacatcatatgggccctctttttttgcatcttcaaggctggcatcagggacaaaatggaccncatcacgggntacactggtacctggccnggcgggccgttcgaaagggcgaaattccaacacactgggngggccgttacntaanggaatccgagcttcggganccnaacnttggnggaaancaangggccaaagctgggttnccgggggggaaaatgggttttcccttcccaaantncccccct

SEQ ID NO: 2610 - DNA, 963 bp, Homo sapiens
  misc_feature 2, 258, 431, 461, 472, 548, 568, 569, 601, 612, 628, 637,639, 640, 651, 652, 659, 661, 665, 667, 688, 691, 696, 698,706, 714, 726, 731, 750, 756, 758, 760, 771, 788, 795, 814,822, 827, 832, 837, 843, 858, 861, 869, 872, 889, 890: n = A,T,C or G
  misc_feature 929, 932, 950, 952: n = A,T,C or G
tntaccaatggcaaccagtgctcttttcctgcaaatattctgatgtaatttctcctgaagttcaatgaagctgtcatatcgatctttagtaaactttatattacggagaactgctgctaccgcaaaaggacgtatcttagctgtctcttctgtgataatcaatttctggatttttccatcaggcattacccgtttatacactggagcctttatcctttctttgaagacctgaagtcctcgaaccaatccttccagacncaggagatcatatctattggcagggacgtcaattttgtaaagaacaacatcagaggctcctgctgcctttacattaccttgttctttacttattatttccttctcaagatgtaaatttcatcaagctccagaccaaattcaaaacatagtttcatccaaattcttcgtcagtngtaggtgcggcccagggcttggaagagcanatcaccgcttnacgctgacagtccggcatgggtggtgtcgaactcactggccctccgcgttaccctgccccgggcggccggcttccnaaaaggggcgaaatttccanncacactggggcgggcccggttactaagtgggnatcccggaagnctcgggttacccaagnctttgggcngnnaatcaatgggnnccataancnggcntncccccggggtggaaaatttgnttnttccngncttccccnatttcccncacccaaacatnaccangccggggaagccactaaangtggtnananccccggggggnggccttaatggaggggnagccttnacctccaccaattaaattngcggttgncggcntcaantggcncccgcntttcccacgtccggnganaaaccctngtngtgccccagcctggccnntaaagggaaatgggcccactcccccgggggaaaaaaggncgnttttgggcgaaatggggngnccttttccccg

SEQ ID NO: 2611 - DNA, 576 bp, Homo sapiens
accatgtccactgcatcgcgtcgccatgatgggccatcgtccagtgctcgtgctcagccagaacacaaagcgtgaatccggaagaaaagttcaatctggaaacatcaatgctgccaagactattgcagatatcatccgaacatgtttgggacccaagtccatgatgaagatgcttttggacccaatgggaggcattgtgatgaccaatgatggcaatgccattcttcgagagattcaagtccagcatccagcggccaagtccatgatcgaaattagccggacccaggatgaagaggttggagatgggaccacatcagtaattattcttgcaggggaaatgctgtctgtagctgagcacttcctggagcagcagatgcacccaacagtggtgatcagtgcttaccgcaaggcattggatgatatgatcagcaccctaaagaaaataagtatcccagtcgacatcagtgacagtgatatgatgctgaacatcatcaacagctctattactaccaaagccatcagtcggtggtcatctttggcttgcaacattgccctggatgctgtcaagatggtacc

SEQ ID NO: 2612 - DNA, 585 bp, Homo sapiens
  misc_feature 387, 444, 455, 489, 496, 517, 519, 535, 580: n = A,T,C or G
ggtacgcgggctcgtctgacttcttttattggtgccatcgccattggagacttggtaaagagcaccttgggacccaaaggcatggacaaaattcttctaagcagtggacgagatgcctctcttatggtaaccaatgatggtgccactattctaaaaaacattggtgttgacaatccagcagctaaagttttagttgatatgtcaagggttcaagatgatgaagttggtgatggcactacctctgttaccgttttagcagcagaattattaagggaagcagaatctttaattgcaaaaaagattcatccacagaccatcatagcgggttggagagaagccacgaaggctgcaagagaggcgctgttgagttctgcagttgatcatggntccgatgaagttaaattcccgtcaagaattaatgaatattgcgggcacaacattatnctcaaaacttnttactcatcacaaaagaccactttccaaagttancttgtanaagcagttctcaaactgaaangnttttggcaacctggangcaattcttattttcaagaagctttggaggaagtttggccgattnctatt

SEQ ID NO: 2613 - DNA, 546 bp, Homo sapiens
  misc_feature 487, 495, 527, 532, 544: n = A,T,C or G
ggtactatactggcaattgctggagaagattttgcaattgttgcttctgatactcgattgagtgaagggttttcaattcatacgcgggatagccccaaatgttacaaattaacagacaaaacagtcattggatgcagcggttttcatggagactgtcttacgctgacaaagattattgaagcaagactaaagatgtataagcattccaataataaggccatgactacgggggcaattgctgcaatgctgtctacaatcctgtattcaaggcgcttctttccatactatgtttacaacatcatcggtggacttgatgaagaaggaaagggggctgtatacagctttgatccagtagggtcttaccagagagactccttcaaggctggaggctcaacaagtgccatgctacaagcccctgcttgacaaccaggttggtttttaagaacatgccagaatgtggagcatgttccgctgtccttggacaaancatgcggnttggtgaaagaagtcttcatttctcggttganaaaanatgtgtacctgncc

SEQ ID NO: 2614 - DNA, 579 bp, Homo sapiens
  misc_feature 473, 482, 493, 513, 545, 554, 568, 574: n = A,T,C or G
ggtacttggaaacagttacagccctcaccaagctaggttggggacatgaagtccaacagcatctgaaatgctgtgaaggcaaactttacaaatagcaatgtaagcttacagaacttgcctttactagggtggtatgttcatgtaattccagcgccttcgcaatttaacgaaccaaatttactatacttcacttctaaaaacctagatgaaacatgaaaaagaagccatacagtataaattgcaacttcaggaaaagttcctgctttattattccaaataatttttcccatgtaaaataaatgtccaatagttcctggtatgtgggaagataatgtttgttaaagtcacaatgaagccttattgacggaagcttggctatataaacagcacaagttgagaaaaggtttaatctccaacctattagactggatgaagtaagatcagtaacggccacctttgcgacattacaggangtctcattnccatcggaggncgaggaaggcccccctggtnaggggggcaccattggggggccctggcctacnggggcatangccccaggaaggtnttctgncattc

SEQ ID NO: 2615 - DNA, 593 bp, Homo sapiens
  misc_feature 72, 75, 95, 107, 119, 136, 229, 241, 251, 254, 273, 279,318, 356, 389, 396, 402, 421, 427, 435, 438, 471, 472, 484,488, 489, 519, 522, 527, 528, 532, 537, 540, 543, 562, 576,578, 589, 591: n = A,T,C or G
ggtactttttttttttttttttttttttttttttagaggaccttttctatttttaaaatggaatgattctgnctnaggtcaaatgctttagttgngtctgcttcctnttccaaatccanatatttcaataatttgntgatatcttctactacctccctccgataatttctgatttctgtccggccgcacacatttagagcatccaggtcagcgatcagccccgagagcncacaggataagngcctgcaggnctnattgttgttcacacccatnataagngcaatcaggacccctcgggccttgttcacctcacacatnacgaagttgattttggcaacggaaggatgtgcatcctnggaaagcggcagggaaggctgctttttcatgcngtcttcnattatnttcttgcacccgcacagantttggntaaagtgnganaccttgctttccgcaagggagatttttcctccnnttttaacatggngtcnncctcagaaaggataatcttggaagcccttnttntaacnnattnagttnccnccnggtgcctccttttaaaaangggccaattttttntnttacgaaggantngg

SEQ ID NO: 2616 - DNA, 566 bp, Homo sapiens
  misc_feature 18, 22, 42, 52, 84, 90, 110, 121, 128, 133, 144, 150, 157,159, 161, 163, 179, 205, 240, 262, 266, 311, 356, 357, 375,455, 478, 498, 511, 516, 523, 540, 563: n = A,T,C or G
actttctttttttttttntttntttttggaaactttttattnatattttggncttacaaatgatcacttttaaatggacttttntgtaanaatgtaaaactcaaaaattngccaagtatgnatctganccacncaaatccctanaaaggntttttgngnancnttcattaacgcaaatntttgggaatgtttcactcttactgtnggatcttgaatatgttttacaataatgaagctacnaagtttttatgcagggcattcnttgnaaactataaataacatttgtattaaaaagaaagctgggtaatacnaaaataggagagactttgaggagcaggcaatctgttgaggctcannatatcttatttgctttgnagtctgctgccattccttttaaagagcacacagcacatgaggcatagtaatcatctgtcttgttaacctctctaatttanaaatctgggggtcgtaaaactgngccaattatcacaaactatnatttgcataattnaaccncaagtcnggtacaaaagcattttngtaggggggatcaaccaatgcgngag

SEQ ID NO: 2617 - DNA, 580 bp, Homo sapiens
  misc_feature 399, 455, 478, 541, 543, 546, 549, 556: n = A,T,C or G
ggtacgcgggggctcactctgcgcttcaccatggctttcattgccaagtccttctatgacctcagtgccatcagcctggatggggagaaggtagatttcaatacgttccggggcagggccgtgctgattgagaatgtggcttcgctctgaggcacaaccacccgggacttcacccagctcaacgagctgcaatgccgctttcccaggcgcctggtggtccttggcttcccttgcaaccaatttggacatcaggagaactgtcagaatgaggagatcctgaacagtctcaagtatgtccgtcctgggggtggataccagcccaccttcacccttgtcaaaaatgtgaggtgaatgggcagaacgagcatcctgtcttcgcctacctgaaaggacaagctnccctacctttatgatgacccatttttcctcatgaccgatcccaactcattatttgnagccctgtgcgcccgctcagatntggcctggaactttgaaaaagttcttcattaggggccggaaggaagaagcctttccgacgctncnagncgnacctttnccaacattcaaacatttgagcccg

SEQ ID NO: 2618 - DNA, 565 bp, Homo sapiens
  misc_feature 529, 545, 551, 554, 562, 563: n = A,T,C or G
acgcgggggcagaagtctctctcagtcaggacacagcatggacatgagggtccccgctcagctcctgggactcctgctgctctggctcccagataccagatgtgacatccagatgacccagtctccatctttcctgtctgcatctgtaggagacagagtcaccatcacttgccgggcgagtcagggcattgccaattatttagcctggtatcagcagaaaccagggaaagttccaaaggtcctgatctatgctgcattcactttgcaagctggggtcccatctcggttcagtggcggtgcttctgggacagagttcactctcaccatcagtagcctgcagcctgaagatgctgcgatttattactgtcaaaagtataacagtgcccctcagacgttcggccaggggaccaagttggagatcaaacgaactgtggctgcaccatctgtcttcatcttcccgccatctgatgagcagttgaaatctggaactgcctcttgttggggcctgctgaaataacttctatcccanagaggccaaagtactnggccgngancaccttanngg

SEQ ID NO: 2619 - DNA, 568 bp, Homo sapiens
  misc_feature 383, 412, 555, 568: n = A,T,C or G
acttcaccttccaggaggtgaaagggaatacaaattcacagcagacttccagaggccccaggccaagcaggtagaaagtttccatccaattaaaaagaggtttttcttttctgaataaagtcttcagtgacgaaatactatatatggtgaatagtaacatgagtaagattttaatgggaagttctggtgcagtgaagagcagaggaaagagggaataatgtcctgttgtggtcagaatcagaaaaatcgaagcgtctcctgcttttcccacagacaaaaggctcattgggagaattgctagaagtatggctttttcatgaacatgccacccaaacataaaggagctcaaggcacaaagagttagacatcggagaaagcctctnggcccttggggtttaaaccaaagacaganaatagagggcaatatggcaatcagtgtgcagatgagggttgccaagggagtcactgatggaaggactgtgtgttggaactgcttgaaccaaaccactttgtcattgaggccttgggaatattgttgggatccagaaatttcanttcaaaccgatgn

SEQ ID NO: 2620 - DNA, 595 bp, Homo sapiens
  misc_feature 3, 30, 117, 166, 208, 211, 218, 228, 244, 247, 268, 289,300, 319, 336, 348, 361, 363, 382, 389, 415, 431, 432, 442,445, 463, 490, 498, 529, 533, 538, 545, 548, 553, 558, 562,566, 575, 581, 584, 587: n = A,T,C or G
ggnacttttttttttttttttttttttttnggggcaaagattcactttatttattcattctcctccaacattagcataattaaagccaaggaggaggaggggggtgaggtgaaagangagctggaggaccgcaataggggtaggtcccctgtggaaaaagggtcanaggccaaaggatgggagggggtcaggctggaactgaggagcnggngggggcncttttccctntaacactcccctgttnaanctctttgtgacgggcgagctnatcgccctgatgggtgacttntcaggccgtanactttgtgtttctcgaagnctgcttttgctcaaccntcagggttgctnctgaggcttgtangngctgtcctttgctgtcctnctcctgnggacactctccctgggagttaccccnattggagggcgttatnncaccttttcnctntacaacttttaatgcttntatgaaatttttgcccattttttaacncttggtantgctccgggcatccaccattcccactggggnatantttanttcgggntanttaanttttngttncaantctaacctnggcggnggngcnttttgggt

SEQ ID NO: 2621 - DNA, 557 bp, Homo sapiens
  misc_feature 424, 429, 458, 465, 471, 507, 531: n = A,T,C or G
acaggtttttatgtgaacatacattttcattttctgggataaatgctcaaaagggcaactgttgggttgtatggtaaacacatatatttttgtaagaaactaccctactctttttccagagtggctctactttttacatacagccactcatacaattcagacagcaatgtatgattgatccagtttcttcacatcctcaccagcatttggtattactactattttttatcttaaccattcacatagatgtgtgtaatgataccacatgtggttttaatttgcatttccaatggctaatgatgttgagtatctttttgtgtgctaatttgccatctatgtatcctcttcggggaaatgtcttcatgtcttttgtctattttctatttagggcatttgttctttttactattgagtgttgagaggngtttntatatatcctagataaaattcctctgttngatatgngggtgnttgaattttaacataacttctaccagggaaaaatangttaaatttccaaccttgcatggncagcacttacttaattcctggcttca

SEQ ID NO: 2622 - DNA, 578 bp, Homo sapiens
  misc_feature 58, 234, 264, 307, 380, 401, 423, 436, 444, 447, 459, 471,479, 487, 493, 496, 502, 512, 516, 541, 547, 553, 568: n = A,T,C or G
actttgcctacggcagcaacctgctgacagagaggatccacctccgaaacccctcggnggcgttcttctgtgtggcccgcctgcaggattttaagcttgactttggcaattcccaaggcaaaacaagtcaaacttggcatggagggatagccaccatttttcagagtcctggcgatgaagtgtggggagtattatggaaaatgaacaaaagcaatttaaattctctggatgagnaagaaggggttaaaagtggaatggatgttngtaatataagttaaagttgctactcaagaaggaaaagaaaaancctgtctaagttatctgatgactaattacgaaagtgctcccccatccccacagtataaaaagattattttgcntgggtgcaaaagaaaaatggntttgcccgcttggagtatcaanagaagtttaaaancattaganccnaaatgacctatncaggaaaggtcntcagaagnaattgatnacaatnttntaaaangggggaaacncaancttttttagaacattaacaggaatntttttnaggggnttctatgtgctaatntaaaaatttt

SEQ ID NO: 2623 - DNA, 563 bp, Homo sapiens
  misc_feature 35, 68, 150, 161, 170, 185, 187, 191, 207, 271, 293, 298,332, 343, 383, 388, 401, 412, 419, 441, 443, 445, 478, 482,492, 510, 511, 519, 523, 532: n = A,T,C or G
acttttttttttttttttttttttttttttttcgngttataatccaatctttatttaaaaatctaatntgccagtttagcgttttccaccaactcggggagctgaaactttcacaggcttcacaatcttttgcttaggggctgcctttgnaggtgccttancagcagccnttgcagtctttttanangctngcttagccttttttgnttccttagcagccctgatagcttgttctcgttgagcctttctaacttcaggtttctgattcctnttggccattatatcagcaaganatgcnccagtaatggccctctggaatttgactgctcggngggttcttttnttttgaatttcttccgacggtccctttttgggcttccttntgtanaggacaagtccantttatctgccnaggattncttttggaaaggaaagccgacncncntttcgcatttaagaaactggaaaaccttcccgncggncctggggtancgcctcccgggtccgggnnaatctttntacntcggccggnccaccctaagggcgaaattccaccacactgg

SEQ ID NO: 2624 - DNA, 575 bp, Homo sapiens
  misc_feature 257, 437, 446: n = A,T,C or G
ggtacaggagatctcatttgggacaactaaggataaaatgctggtcatcgaacagtgtaagaactccagagctgtaaccatttttattagaggaggaaataagatgatcattgaggaggcgaaacgatcccttcacgatgctttgtgtgtcatccggaacctcatccgcgataatcgtgtggtgtatggaggaggggctgctgagatatcctgtgccctggcagttagccaagaggcggataagtgccccaccttanaacagtatgccatgagagcgtttgccgacgcactggaggtcatccccatggccctctctgaaaacagtggcatgaatcccatccagactatgaccgaagtccgagccagacaggtgaaggagatgaaccctgctcttggcatcgactgttttgcacaaggggacaaatgatatgaagcancagcatgtnatagaaaccttgttggcaaaaaacaacagatatctctttgcaacacaaatggttagaatgattttgaagattgatgacattcgtaagccctggagaatctggaagaatgaaactttgagaaaactttgt

SEQ ID NO: 2625 - DNA, 573 bp, Homo sapiens
  misc_feature 397, 440, 469, 476, 510: n = A,T,C or G
ggtaccggctctactgccacctcttccagctccaccgccggcgcagcagggaaaggcaaaggcaaaggcggctcgggagattcagccgtgaagcaagtgcagatagatggccttgtggtattaaagataatcaaacattatcaagaagaaggacaaggaactgaagttgttcaaggagtgctcttgggtctggttgtagaagatcggcttgaaattaccaactgctttcctttccctcagcacacagaggatgatgctgactttgatgaagtccaatatcagatggaaatgatgcggagccttcgccatgtaaacattgatcatcttcacgtgggctggtatcagtccacatactatggctcattcgttacccgggcactcctggactctcagttanttaccagcatgccattgaagaatctgtcgttctcatttatgancccataaaaactgcccaaggatctctctnactaaangcatacagactgactcctaaactggatgggaagnttggaaaagaaaaggatttttcccctgaagctttgaaaaaagcaatatcacctttgagtctgc

SEQ ID NO: 2626 - DNA, 574 bp, Homo sapiens
  misc_feature 502, 516, 539, 561, 564: n = A,T,C or G
ggtacaagcttttgtccaaaatggcacagtgagcacaaatgagttcctgtgtgataaagacaaaacttcaacagtggcacccaccatacacaccactgtgccatctcctactacaacacctactccaaaggaaaaaccagaagctggaacctattcagttaataatggcaatgatacttgtctgctggctaccatggggctgcagctgaacatcactcaggataaggttgcttcagttattaacatcaaccccaatacaactcactccacaggcagctgccgttctcacactgctctacttagactcaatagcagcaccattaagtatctagactttgtctttgctgtgaaaaatgaaaaccgattttatctgaaggaagtgaacatcagcatgtatttggttaatggctccgttttcagcattgcaaataacaatctcagctactgggatgcccccctgggaagttcttatatgtgcaacaaagaagcagactgtttcaangtctggagcttttnagataaataccttttgttctaanggtcaacctttcaatggggacncangggaagggtt

SEQ ID NO: 2627 - DNA, 366 bp, Homo sapiens
  misc_feature 116, 237, 279, 293, 365: n = A,T,C or G
acatgctcatggcagcaacaacccattgaccacttcttcaaagtagttcactgccaaggagaatcaaaattcaatttggattcccaatactcagcctaccttcaatttcccatcangcctatattcttagcctttagtttaagtgtgggttatcttaacagctcacttggcctcagttcaaagtgaaatttcctgagtccttgaaagaagtagaaacccaatcaatgagtttttctnttggtctctactttgtgagaaggatacatttctagaaatttnaataccttccaagngtcagaaggaaatataatgtagctgttgaaatttgcgatgtaggataataaggtacctcgggcgcgaccacnc

SEQ ID NO: 2628 - DNA, 413 bp, Homo sapiens
  misc_feature 59, 79, 81, 88, 106, 142, 148, 167, 177, 212, 215, 222, 240,260, 263, 279, 293, 295, 299, 308, 314, 335, 353, 375, 386,404, 406, 409: n = A,T,C or G
ggtactttttttttttttttttttttttttttttatttttttttttttttttttttttngaaggttttagtttattaangntcttgcnaaaaatccacaggggccncagctaacatcattgcagcacctttactccttcggntggganccaatctccagctcacttntttttgccancaccaacattggcctttgcagtccccctgactttnttnattctgntcttgcgttcctttcggngctttcttgagggctttttnttntcatacaggccatgtnttgcaagtctatgntngggntcatttttntttgcntaatccagggaatcataaatnatgccaaagccagttgtnttgccaccaccaaaatgagttntgaatccaaanacaaagatgacatccggngnggncttg

SEQ ID NO: 2629 - DNA, 597 bp, Homo sapiens
  misc_feature 22, 81, 99, 146, 251, 308, 345, 351, 382, 390, 406, 422,429, 432, 433, 437, 439, 462, 476, 477, 494, 497, 511, 514,530, 539, 542, 558, 574, 582, 588, 591, 596, 597: n = A,T,C or G
ggtacttttatataaagtaatnctggatttgacattctcatttagagaaacctattttcttttttctttttctattttagngtttcattaatgtgcggnctccaatttaggacttttccatagtgccaaagccatacatattcagnagaacatcaataaattacatcagaaattcaacactttattataaaacgggcttcgtgttagataattttgctaaacagtaggctactgtaagtgttctgagcatntttaagacaggctagcatttttcaatttacaatatttttcaactgatagtaggtttnttgggatgcaaccctatgataagttgagaaacatctntttttnggtgtgtcaactgtgatttaaggattttttnatcatcancccaagcattgtttgnagtaataaataatganttaatanaanntgtncntgggctttcctggaagggagaanttctttaattggcnnttgacaataaacttccntanggggctaccctagnaanaatcaaatgtttatgnatgttttcnctnggcttcctaggaaatnaattaaacctagggantttctcanttcagnttntactnn

SEQ ID NO: 2630 - DNA, 569 bp, Homo sapiens
  misc_feature 422, 528, 544: n = A,T,C or G
acgatcgaagggactatgtcttcattgaattttgtgttgaagacagtaaggatgttaatgtaaattttgaaaaatccaaacttacattcagttgtctcggaggaagtgataattttaagcatttaaatgaaattgatctttttcactgtattgatccaaatgattccaagcataaaagaacggacagatcaattttatgttgtttacgaaaaggagaatctggccagtcatggccaaggttaacaaaagaaagggcaaagcttaattggcttagtgtcgacttcaataattggaaagactgggaagatgattcagatgaagacatgtctaattttgatcgtttctctgagatgatgaacaacatgggtggtgatgaggatgtagatttaccacaagtagatggagcagatgatgattcacanagacagtgatgatgaaaaaatgccagatctgggagtaaggaatattgtcatcacctggattttgagaaagaaaaaataacttctctgcaagatttcataatttganagaattcctggagttngatagctctaaaagccagatatgct

SEQ ID NO: 2631 - DNA, 490 bp, Homo sapiens
acgcggggctctttttccggctggaaccatggagggtgtagaagagaagaagaaggaggttcctgctgtgccagaaacccttaagaaaaagcgaaggaatttcgcagagctgaagatcaagcgcctgagaaagaagtttgcccaaaagatgcttcgaaaggcaaggaggaagcttatctatgaaaaagcaaagcactatcacaaggaatataggcagatgtacttctctgtaacaaagcttatgataatcgccatttaattaattgttgtgtaattattttcattccatctttatccccaactaaactgctgcttgaaggcaaggattatgttttttggctcaccacagtgtcactggcacctagcataatgcctgtcttacttgcaaggttaaggacttactggcttttggaaagatgagccttgtgagggactaaagatttgagtttgagggtcattcaaacagataaaattatcaaagctttggacc

SEQ ID NO: 2632 - DNA, 573 bp, Homo sapiens
  misc_feature 504, 560, 571, 572: n = A,T,C or G
ggtacactttttttgaatggttttctaacaacttgaagtacaggatcaaggaattagggtggtctacttgaggcagatgggatagtagctgggaactgttccctttctgattaatttcagcagcatcggaatatatttggagcacaccctagtaacctcttgagattaaattacatagtcttaatatttctgttcctccatgcaactgatgtttgttttttaaagggtaagatgctgcctcccaatgggtgatgccatctgactggtttccccatgtcctcccattcacccatctctgctcccacccttgcctgcctctaacccaccactggccagcccccttgccctactctgggctgctgaacactggtgctgtggtggttttcaagggtaattcctaggctaaccgtatggcctatagtttaaaagcacatctatgttcactggcactctgaaaaaggggaattatttctcaagtctttcaaggctttgagactaatatangccattgtgattcaagaagaaacccaagtttggagggtgggaagagggaaaagganaaaaaaagatnnt

SEQ ID NO: 2633 - DNA, 568 bp, Homo sapiens
  misc_feature 444, 546: n = A,T,C or G
ggtactctgtgacggagctgaaggactcttgccgtagattaagccagtcagttgcaatgtgcaagacaggctgcttgccgggccgccctcggaacatctggcccagcaggcccagactgtatccatccaagttcccgttgtatccagagttcttagagcttgtgtctaaagggtaattccccaacccttccttatgagcatttttagaacattggctaagactattttcccccagtagcgcttttttctggatttgcattcaggtgttattcttaatgtttctgtcaaagcttcttaaaaatcttcacttggtttcagccatagttcaccttccctgttccaggtttatttaattccaaaggtgagagttggagtgagatgtcttccatatctatacctttgtgcacagttgaatgggaactgtttgggtttagggcatcttanagttgattgatggaaaaagcagacaggaactggtgggaggtcaagtgggggaagttgggtgaatgtggaataacttacctttggctccacttaaacccaaantggtgcaacttttctgacatgg

SEQ ID NO: 2634 - DNA, 564 bp, Homo sapiens
  misc_feature 51, 134, 208, 291, 428, 500, 521: n = A,T,C or G
ggtacttttttttttttttttttttttttttataggttccatttttactgngcatacacatatatacaatgtattttaaaaatgggctttacaatatgtagtttgatcacttggtttacaactaaatatattgngaacattttgtcttctacaacagttaaaagaattgaatagcttggaggaaacacaatttattaagcaatcttgntggggacattgaggtataattttttttctaaggaggcttcattctttttataatgcctttgggaaaaaaaggggatttcttgncttatatagctttctatagatgatggaaacttgcccttccatttagcctttttacttgcttctctaccaccacctaatcaccaatcaagtaacccattttgtttttcaacctctctcttctatttgcttcctctttnctacccaacctccctgcacacacgcagatggacttccattccttcagcactctgggtcctccccttaaaganggtttcttttcttttaaaganaccaattttaaatggatttggacaaccctactcaaaactgttt

SEQ ID NO: 2635 - DNA, 562 bp, Homo sapiens
  misc_feature 514, 534, 555: n = A,T,C or G
ggtacgcgggggaagtagggcgtgtggcgtcacttccggcttccttcagtccgctggtcccgagcacgagttgtgaggggattcacttgtgtgcggaactcctcggaaccatggcgtccctttcccttgcacctgttaacatctttaaggcaggagctgatgaagagagagcagagacagctcgtctgacttcttttattggtgccatcgccattggagacttggtaaagagcaccttgggacccaaaggcatggacaaaattcttctaagcagtggacgagatgcctctcttatggtaaccaatgatggtgccactattctaaaaaacattggtgttgacaatccagcagctaaagttttagttgatatgtcaagggttcaagatgatgaagttggtgatggcactacctctgttacccgttttagcagcagaattattaagggaagcagaatctttaattgcaaaaaagattcatccccagaccatcataagcgggttggagagaagccacnaagctgcaagaaaagcctgntgaattctgcagtgatatggntccgatg

SEQ ID NO: 2636 - DNA, 422 bp, Homo sapiens
acactgtgtctctatgtgaatatggacagttagcatttaccaacatgtatctgtctactttctcttgtttaaaaaaagaaaaaaaaacttaaaaaaatggggttatagaaggtcagcaaagggtgggtttgagatgtttgggtgggttaagtgggcattttgacaacatggcttctcctttggcatgtttaattgtgatatttgacagacatccttgcagtttaagatgacacttttaaaataaattctctcctaatgatgacttgagccctgccactcaatgggagaatcagcagaacctgtagtatcttatttggaattgacattctctattgtaattttgttcctgtttatttttaaattttctttttgtttcactggaaaggaaagatgatgctcagttttaaacgttaaaagtgtcc

SEQ ID NO: 2637 - DNA, 562 bp, Homo sapiens
  misc_feature 121, 149, 228, 261, 267, 272, 283, 292, 300, 426, 432, 437,447, 448, 455, 457, 461, 477, 499, 513, 529, 531, 539, 543,551: n = A,T,C or G
acttttttttttttttttttttttctaattatgatcaacttttattgattttacataaatagcttatagaatgcctttacaaactatgtttttgcaatatatttgttacaacacacatttncttatgaatgtatttgttaaatcttttngcagaggaagtagggaaaagtgaggggagaagaggaggaataagattttaaaactaatcgtcagcaatgggcctaggtntttggcaattatttcctttacaaaaaaattacnggggtntgtancttcaaacatnaaaagtggnagtgcatnaatttaactaaaaaatcagtagcgcctaatatattatctgggcatcaaatttctttttttaaatatatccagattcacatattttttactcttattaaataatggttttaaataataatcatcacnctgttnagctncataatcccnnatctggntnaaantcatggggatatccgnctttttaattccaatttatttnttaatcagttaaangtaatcgggggaaagngngccccaanaatnaccccctntgtgttgaaga

SEQ ID NO: 2638 - DNA, 556 bp, Homo sapiens
  misc_feature 471, 536: n = A,T,C or G
ggtacagaggatcagacccttataacaaaaagagttatgtttgcttatgaacagtgcctgcttgtgctgggccatcaccctgatatttggtatgaagctgcccagtatcttgagcagtcaagtaaactgctcgcagaaaagggagatatgaataatgccaaattatttagtgatgaagctgctaatatatatgaaagagccataagcactttattgaagaagaatatgcttctttattttgcatatgcagattatgaagagagtcgcatgaagtatgaaaaggttcacagtatatataacagacttctggcaattgaggatattgaccctaccttggtatatatccaatatatgaaatttgcacggagagcagaaggcatcaaatctggaagaatgatatttaaaaaagcaagagaagatccagaacccgcccatgtctatgttactgcagcactcatggaatattactgnagtaaggccaatctggtgcctttaagattttgagctgggcttaaaaaatatggagaccattccanagatgtccgggctatttgac

SEQ ID NO: 2639 - DNA, 558 bp, Homo sapiens
  misc_feature 516, 519, 542, 557: n = A,T,C or G
accatgaaatatccagaacatacttatatgtaaagtattatttatttgaatctacaaaaaacaacaaataatttttaaatataaggattttcctagatattgcacgggagaatatacaaatagcaaaattgaggccaagggccaagagaatatccgaactttaatttcaggaattgaatgggtttgctagaatgtgatatttgaagcatcacataaaaatgatgggacaataaattttgccataaagtcaaatttagctggaaatcctggatttttttctgttaaatctggcaaccctagtctgctagccaggatccacaagtccttgctccactgtgccttggtttctcctttatttctaagtggaaaaagtattagccaccatcttacctcacagtgatgttgtgaggacatgtggaagcactttaagttttttcatcataacataaattattttcaagtgtaacttattaacctatttaataattatggatttatttaagcatcaatatttgngcnagaaatttggaaaaatagaagangaatcttgattggana

SEQ ID NO: 2640 - DNA, 412 bp, Homo sapiens
ggtacatgacctaatttttacatcatagtaaaacaggccctatggagagaggacatgggtttctctgctgaacagccattatttatactcgttccaaggcttctaacatgatgatactatttcctcgtattaccaccattccaatattgttctgttgtccactagtcgccatctccacacattcatctatcacaaggttcataaagggatcaaatccccgcaatattccttggacatgtctgccaccatttaatttcaatgataacttcttgtccataaattttttcaactcgggagggtgagctttgctcatggtgtatactccgcgggctcacagatgccttggaacgcaacgcacggctttcctcacgctcccgctgtaggcccggcgtcttgcgtctggcccccgcgt

SEQ ID NO: 2641 - DNA, 275 bp, Homo sapiens
acgcggggaagacaaagacccgcaaaagatgtatgccaccatctatgagctgaaagaagacaagagctacaatgtcacctccgtcctgtttaggaaaaagaagtgtgactactggatcaggacttttgttccaggttgccagcccggcgagttcacgctgggcaacattaagagttaccctggattaacgagttacctcgtccgagtggtgagcaccaactacaaccagcatgctatggtgttcttcaagaaagtttctcaaaacagggagtacc

SEQ ID NO: 2642 - DNA, 564 bp, Homo sapiens
  misc_feature 33, 59, 66, 72, 107, 108, 110, 154, 165, 177, 202, 223, 231,239, 251, 261, 262, 278, 289, 311, 314, 322, 328, 338, 371,374, 397, 402, 423, 431, 434, 440, 457, 462, 464, 474, 475,476, 478, 481, 486, 506, 530, 535, 542, 555, 557: n = A,T,C or G
  misc_feature 563: n = A,T,C or G
acttttttttttttttttttttttttttccaanattttgttttattttattatggctanaaagacnctgttntagccaaaatcggcaatgacactaaagaaatcctnngngcttttcaatatgcaaatatatttcttccaaaagttgccctggngggacttcaanagttcatgttancttcttttctggaaacttccttttnttagttgttgtattcttgaanagcctggnccatgaanagcttgcctaanttttgggcanngaactccttgatgttntggcaagtaantgtttatctggcctgcaatgancancgagtccntcctgncaggcggctnttggtggttaaaagagtttggacaggtcctccncanggagcgggggttctcctcggctntggcnctgaatattcttctgctggcnacgctgcnganactgangtttctggggttggggngtacnangaattccccnnngnatngggtnggaatttaactatttcttgncttaatttttccactttgtccttnaccanctggtanattctcccccaantntttgtnc

SEQ ID NO: 2643 - DNA, 384 bp, Homo sapiens
ggtacagttggagtctgtgtgttttcttgaatgtttgagacagcttcaccttgaactttgaatttctcagcagctgctagttgtgcttgctgggataaatcttcgatcttggcttccccaaaaactatgtaagtatctgaagcagggctcttgtagacatctggttttgtgatgacaaagaggatattcttagatttccggatagtgactctagtaactcctgtaacctgccgaagacccagtttggacatagccttccgtgccttcttttcactccgactctgttttgctttactgactggttcttcatcgatttcagctgctgccgccagctgggcttgttgtgtggttgcctgggtggaatcctgttcttcaagctctggt

SEQ ID NO: 2644 - DNA, 562 bp, Homo sapiens
  misc_feature 370, 540, 553, 561: n = A,T,C or G
acatattttggttgaagacaccagactgaagtaaacagctgtgcatccaatttattatagttttgtaagtaacaatatgtaatcaaacttctaggtgacttgagagtggaacctcctatatcattatttagcaccgtttgtgacagtaaccatttcagtgtattgtttattataccacttatatcaacttatttttcaccaggttaaaattttaatttctacaaaataacattctgaatcaagcacactgtatgttcagtaggttgaactatgaacactgtcatcaatgttcagttcaaaagcctgaaagtttagatctagaagctggtaaaaatgacaatatcaatcacattaggggaaccattgttgncttcacttaatccatttagcactatttaaaataagcacaccaagttatatgactaatataacttgaaaattttttatactgaggggttggtgataactcttgagggatgtaatgcattaataaaaatcaactcatcattttctacttggtttcaatggggtggaaactgnaaaatgatactgnagaacctng

SEQ ID NO: 2645 - DNA, 559 bp, Homo sapiens
  misc_feature 493, 545, 555, 559: n = A,T,C or G
accttgatacacataatcagccttttcaaaaatgcctgacaagaattagtctttcctttgtgctgaagtcttcccacccatggatggaagcaggctgactccctgagggtcaggcaaggggtgggaaagggaacacattacttttgtgaaggcaaagcagaaaggtgtgtttgccagaccagcatgggcagctcagagggagcaaagcatccaccagaagaggctctccattttctttgtagggcctgacagttgagatttgaggctgagttaacaatgggaccactgaacttctttccaatggaaaactcacggcccagtcccacaggaactgtgcgcataccaaacaacaatgaggaaggaagggccgggtggctctaccaaacagttcaggtccactgggtgaatgaagcctggtgggaaagcggactcctgaagttggcgccctctgctggtcccacttctcatcgtggcgggtcgactgcctgagtanaggaagaggctcagatggggttgacaaaaaaagggagtgaggggaaccccangaagatgaanccan

SEQ ID NO: 2646 - DNA, 562 bp, Homo sapiens
  misc_feature 479, 488, 542, 551: n = A,T,C or G
ggtactggaagcatgctccaaagacctgtaagaactttgctgagtcggctcgtcgaggttactacaatggcacaaaattccacagaattatcaaagacttcatgatccaaggaggtgacccaacagggacaggtcgaggtggtgcatctatctatggcaaacagtttgaagatgaacttcatccagacttgaaattcacgggggctggaattctcgcaatggccaatgcggggccagataccaatggcagccagttctttgtgaccctcgcccccacccagtggcttgacggcaaacacaccatttttggccgagtgtgtcagggcataggaatggtgaatcgcgtgggaatggtagaaacaaactcccaggaccgccctgtggacgacgtgaagatcattaaggcatacccttctgggtagacttgctaccctctttgagcagctcttctgagatggccccagtgaaccagcttctanatgacatanaatgacatgtaatgctaaatcatttttgctttcaagtcatgaagcttaagaagnctggcattntgggtgagtaa

SEQ ID NO: 2647 - DNA, 560 bp, Homo sapiens
  misc_feature 375, 535, 542, 545, 559: n = A,T,C or G
acagatatcttcaaaggaggaagaagaaagggaaagcagatggtggagctgaatatgccacttaccagactaaatcaaccactccagcagagcagagaggctgaatagattccacaacctggtttgccagttcatcttttgactctattaaaatcttcaatagttgttattctgtagtttaactctcatgagtgtaactgtggcttagctaatattgcaatgtggcttgaatgtaggtagcatcctttgatgcttctttgaaacttgtatgaatttgggtatgaacagattgcctgctttcccttaaataacacttagatttattggaccagtcagcacagcatgcctggttgtattaaagcagggatatgctgnattttataaaattggcaaaattagagaaatatagttcacaatgaaattatattttctttgtaaagaaagtggcttgaaatcttttttggtcaaagattaatgcccactcttaagaatattctttccccactatagaatggatttatatatcggtcattgnaaaaagnccntaaaatatgtggtnt

SEQ ID NO: 2648 - DNA, 503 bp, Homo sapiens
  misc_feature 391: n = A,T,C or G
ggtacgcggggagacgaagactgagcggttgtggccgcgttgccgacctccagcagcagtcggcttctctacgcagaacccgggagtaggagactcagaatcgaatctcttctccctccccttcttgtgagatttttttgatcttcagctacattttcggctttgtgagaaaccttaccatcaaacacgatggccagcaacgttaccaacaagacagatcctcgctccatgaactcccgtgtattcattgggaatctcaacactcttgtggtcaagaaatctgatgtggaggcaatcttttcgaagtatggcaaaattgtgggctgctctgttcataagggctttgccttcgttcagtatgttaatgagagaaatgcccgggctgctgtancaggagaggatggcagaatgattgctggccaggttttagatattaacctggctgcagagccaaaagtgaacccgaggaaaagcaggtgtgaaacgatctgcaacggagatgt

SEQ ID NO: 2649 - DNA, 666 bp, Homo sapiens
  misc_feature 489, 515, 574, 597, 619, 640, 645, 653, 658, 666: n = A,T,C or G
acatggtagtaaacctattgatggcaattttgctgactgtggaagtgactcatccaaactccatgccagctgtcaacattcagtatgaagtcatcggtaattactattcgtctgagagaatggctgataatgcctgtgttctttttgccgtctctgttcttatgtttataatcagttcaatgctggtttatggagcaatttcttatcaagtgggttggctgattccattcttctgttaccgactttttgacttcgtcctcagttgcctggttgctattagttctctcacctatttgccaagaatcaaagaatatctggatcaactacctgattttccctacaaagatgacctcctggccttggactccagctgcctcctgttcattgttcttgtgttctttgccttattcatcatttttaaggcttatctaattaactgggttgggaactgctataaatacatcaacaaccgaaacgtgccggagatgntgtgacctcggccgcgaccaccctanggcgaattccacccactgggcggccgtactaatggatccaactcggaccaacctggcgnaatatggcatactggttctgggngaaatgtttccctccaatcccncacatacaaccggaacctaanggaanccggggcnaaagngacaactn

SEQ ID NO: 2650 - DNA, 691 bp, Homo sapiens
  misc_feature 7, 18, 28, 58, 61, 93, 320, 351, 354, 492, 496, 497, 525,526, 530, 534, 561, 574, 579, 592, 618, 622, 623, 632, 640,645, 666, 667, 690: n = A,T,C or G
gcgtggncgcggcccgangtacaacatntgtgcaataaattcacaaaactatattacngcnggttaatcagtttaagaattgttcccgtcagncacattttttgccctcagaagttcattcctaaagatttcaactactctaaatttctagctaccaagaagttaagaatgattataagaagctttccaaggagttatgaaatctttgtagaccagaggccaactatcatcacctcaagtctgctctcaccaacagcccttgtatttttcagggagaaatctctaggaaaaaagtcagacaccagtgtagtcactatctnccatgtcaaacctaggggactaaaatggtcngtnttaccataaaatgataattttgaggtttaccttaaaaggcttattctggtctcaaaaattagataagattatcttctactgaaatgaatattgactaacatagaagactgctgccttttgccagtcttagagcgaagncatnncatgagtcttaacctactgggttctatnntaangcanctgaaaaattgaattaaagcctgcttnaaatctaatgcanctttnggaggtgcttttnaaaggcttaaggattactacttccgnttanngcaggggcnaaacttanccgcnaaattcttttttggcaaaaannaagttctccaatgtagcttccang

SEQ ID NO: 2651 - DNA, 664 bp, Homo sapiens
  misc_feature 522, 550, 559, 564, 565, 605, 609, 616, 638, 639, 640, 643,657, 660: n = A,T,C or G
acaagtataggcagagttattttcctgtttacatttttttttgttttggggaaaaaattggtaggtgtctaattactgtttacttcattgttatattgcagtaaaagttttaaaacaaccattgcatgtttgcttttgatgtatccctttgtgaaattagcacttttggggccaatggagaaatgcagcattcactctccctgtcttttccccttccctcagcagaaacgtgtttatcagcaagttgtgagtcaaactgctgccttttaaaaaacccacaaaatgctgattcagttcaaaattaatgcaaatgtttcaaaactgggtttctgatatttgtaaatgtgtttctttattagataagagtgtattaccattaaagtcattagtataatattgctttcaaaaagaaatggtagacaaaactataatccacatcttttattgcattggaaagactggcaaagtcttttggatgggttggggagatgtggctggaaagacctcggcccgccaccctanggcgaattccacacctgcggccgtctantggatccanctcgnnccaacttggggaatatggcatactgttctggggaaatgtntccntacaatncccaacaacaccggaactaaannnaanccgggggctaagangcnacca

SEQ ID NO: 2652 - DNA, 679 bp, Homo sapiens
  misc_feature 482, 484, 540, 548, 551, 594, 614, 615, 636, 640, 670, 678: n = A,T,C or G
cgaggtacacacacatggggaacacaccacagcttagatgtgacaaagttccttctcatatgactgttccctcaaggtaagactaagatgggagggggagaaaaagaatcctaaaaaagccaatttttaaaaattctgctttggctgattttgtgctataatgggtagctgatttctaaaaatcatatttcttcaaagagttttatatcgaaaggaagactaaatgtaatgtgcctttccttataatccaggaaaacaactgtggtatttcaaaaattctaaaaatatctactttcatgaaatagtaactatttcactacaaacctatttttcactaaatacacacatttcctaatcctggagcctcctgggaaaagcagtgggttctccctgggtcttgcaagactccagtgttcacaggagagtgtggggaatagcttcaccccgtctcctgggatggctttgtcagaagtcacgtgccnanaccctatcaacttccccagcatgtttaagcaataccccatcttgacctgcccggcnggcggtcnaanggcgaatccacacctggcggccgtctaatggatccaactcggnccaacctggcggaacatggnnactggttcctggggaaatgtntccntccaatcccccacatacaaccggacctaangtaaactng

SEQ ID NO: 2653 - DNA, 665 bp, Homo sapiens
  misc_feature 381, 491, 506, 524, 535, 548, 553, 560, 562, 566, 567, 610,612, 617, 627, 645, 651, 661: n = A,T,C or G
actttttttttttttttttttttttttttggcagtttctaagtcattactttttattttgaaggatttgtgaaactcttcacatcatggtgagagtttgtatgattaataagaagcagctttttcatgaaatgcttggaggtgaacgagttctcagcctgtgagatccgaccatcccattaactttgaagtttctcttgattaatagaagaaaaaaggggagggtgaagaaaaggaggaacatgctaaaaaccttatgacaatcatccaaatgtgaggaaagaacaaccgattcaccaactccactttttctattttacaactttctacatctcactcttgattttggccttcctggctgaaacagcctggcagtccctanagcccctgagaagagccctggttctccaaaagacagaggaggagaaccctgcaggatgcgctgccctttccaaaaaactgacagtccgtgctcccaaagtttgaaccacnccctaatgtgaaaanaactccctgaaaggtaangaggaaatggngataactggcttnttganaatgttntntttnntacacagccccaaattttttttaattcagcctaggcaaccccntntggtngggggttggnggattttccccctggccntttccnaacctcttgnacat

SEQ ID NO: 2654 - DNA, 654 bp, Homo sapiens
  misc_feature 390, 421, 490, 498, 530, 585, 597, 602, 603, 604, 607, 612,615, 620, 621, 623, 627, 630, 634, 642, 643, 644, 645, 650,651: n = A,T,C or G
acagatttgctttctcttacaaaaagaaaaaaaaaatcctgttgtattaacatttaaaaacagaattgtgttatgtgatcagttttgggggttaactttgcttaattcctcaggctttgcgatttaaggaggagctgccttaaaaaaaaataaaggccttattttgcaattatgggagtaaacaatagtctagagaagcatttggtaagctttatcgtatatattttttaaagaagagaaaaacaccttgagccttaaaacggtgctgctgggaaacatttgcactcttttagtgcatttcctcctgcctttgcttgttcactgcagtcttaagaaagaggtaaaaggcaagcaaaggagatgaaatctgttctgggaatgtttcaacanccaataagtgcccgagcacactgcccccggntgcctgcctgggccccatgtggaaggcagatcctgctcctctgccctgtgccttcaaaacaccacagtnaccctcangcttcccttgctaaatatttatttgtaggggnggtttaataaacaaaaaatcttttttttttttttccaattacctctttaaaaggngggggcttcctnaaggnnnggnattgnggnaaatnntntaanggncccntttttttnnnnttaannttt

SEQ ID NO: 2655 - DNA, 290 bp, Homo sapiens
cgaggtacagtgtgatcctgtttaaagttacataaattacaatcagggtaactgctattattaggcaaattgaaaaacagcacagaaaggccagtgtgcaactaggacccactaaagctcagaggaaagcaatgcaagattatcagacaggcatgattgcatagaaggaaaatgtggtgtcagagttcaaactggcacacacacacacagttatctaaggcaaagtggtggcaaagaagttatttgttccatgtcacacaaacaagagcagaagattcatgggaacccgt

SEQ ID NO: 2656 - DNA, 353 bp, Homo sapiens
ggtaccaaatttaacttggcaaactttctattgcctgtcccatgtgcatcttatttaaaatttcccccatggaaatcactctcctgttgactatttccagagctctaggtgtttaggcagcgtgtggtgtctgagaggccatagcgccatcatgggctgatttttattaccaggtcccccagaagcaggtgggaggctctgcttcctgctgccgctctgcagcctggacctgtggaccctggttgtaaagagtaaattgtatcttaggaaaccagtgtcacctttttttcaccttttaattttatattatttgcgtcatacatttcctgtaacggaagtgttaattttactgt

SEQ ID NO: 2657 - DNA, 681 bp, Homo sapiens
  misc_feature 419, 503, 517, 518, 533, 540, 568, 569, 598, 604, 605, 608,613, 614, 619, 630, 634, 638, 641, 649, 661, 662, 668: n = A,T,C or G
ggccttgatgcggtactatgccaaacacttataacttgtataaaaattccacatccccatattggccacctcaagatgagaacagataactccctaaatgttaactggctctactcccctaatattaaacataaaaaccacatgggaaatatagaaattcaaatagaagtaacataaacctgtcataaatcgtaaacaaaaaactatttgtgggacagcatggatgacaaatggtctactgtgtaaattttagaatgaggcagacaaaagttggaaggccggttaattttcccctccttctcctgcttcagcttcgtctccttgggtatccgatgtccacaatgtcaagttgtctctcagtaattgcattattagcgtgatgtctttgtatgactcttcacttaatgtatcaagttcancaatggcttcatcaaaagctgctttgcaagagagcaggctttctctggggggtcagaatctcataatagaacacagagaagttnagggcccgacccannctgataggatgggtngggtgcnttcttttgctgattcaaaacctcttggnntcttgtgggctgaacaaaatcctttttgnataccnnggnacctnnccagnacgggggaatncttntttnaanaaaacttntttttttggaannttgggnaaaaatttcaaaa

SEQ ID NO: 2658 - DNA, 668 bp, Homo sapiens
  misc_feature 439, 441, 498, 504, 528, 547, 559, 560, 576, 587, 591, 594,608, 614, 631, 645: n = A,T,C or G
acagcttttagcaaaactgctttcccagaaaagcaaattaaaataatgcaatcagcagatcaaggagactacagctagacatcagagctacaacttctcatatctgtgtcagaaaatcctatttacccagaatagactaaaatttcaggacaaaacagggactttttaacatttcttactttacccattttaagttctttttatctcccccaccccccaagccactaattcagcaagatccaggagaaagagggctacttttagaattggctactttatttttctttctatggcaagactgtcatggagcctggatatttcaggctcatatgcatccatgaccagtgtcccactgtgtcaaaaaacttagcaatgggactttgtgaactcggcttcccgctgctgctttgttctccactgatgaaggcagcttcaaggngnatttgtcatcaaaccttttaagactggaggacagctgccaaatatcatcaggatccntcctgnaggactttctggggccccaaaaanaagctttctcctttttganggttaaagggcnnaatccccccggtcctnggcgggaccanctanggngaatcacccccggnggcgtntaatggatccacccggnccaacttggggaanagggaaaatggtccggggaaagg

SEQ ID NO: 2659 - DNA, 678 bp, Homo sapiens
  misc_feature 444, 458, 472, 500, 523, 541, 547, 579, 589, 591, 621, 623,629, 635, 656, 657, 658, 664, 676, 677: n = A,T,C or G
acttcttctggccaaaggctgttccacattcactacatttaaaaggcttctctccaatatggattttctcatgctcagtaaggttggatttgccactgaaggtttttccacactccttacatacaaagggcttctctcctgtgtgagttctctggtgtctgatgaggtttgacttctgaatgaaagctttcccgcaatctttacactcaaaaggtttttctccagtgtgaattttctggtgcgtaaggaggttttccttctggctaaatgattttccacattcattacattcgaaaagcttctcgccagtatgggtgttctgatgtttaatgacatactgcttttggctaaaggcttttccacactcgttacattcaaaagggttctctctcgtgtgaaaatgctcatgctcaatgagggttgatttgtggctgaagacttttncacataccttacangccaagggggtttncccactgtaaatctctgctggctgaggngtgacatctgaatggaagctttnccacatcacaaggttctntccagnaaaaatttttgatgagtgaggattactttggntgaaaaattncncactttacattataaggttttttggttgancnccaatncaaaangggtaaggttggaggaaagtnnnaccccntattcaagcttnnt

SEQ ID NO: 2660 - DNA, 677 bp, Homo sapiens
  misc_feature 519, 523, 542, 554, 557, 572, 581, 583, 600, 601, 618, 621,633, 639, 644, 645, 655, 657: n = A,T,C or G
cgaggtacagggtccttttgcaataaaactggttatgacttgatccaagtgtttaacaattggggctgttaagtctgaccatacatcactgtgatagaatgtgggctttttcaagggtgaagatacaagtcttaaccacagtgtaacttacagtttcctttaaaaaaaaaaagtaaacctggcagctatagaatacactatgtgcatttataatagctattttatatattgtagtatcaacatttttaaattaaatgttttacattcacaagtggtggggagtcttgtcattaaggtgtgtgtaatttagagtccagttggttttcttctgactgcacttgttctcatagtagtaaaatgctatgcgcatttataccttgcataagtcctcattctaccacatgttaaccctctagctgataatgcaaacactaactgggggattttatttataagggctctagaaaaaacgagttattcacaccaccatcatcttaactaacattctgactagttagngcanctttcatggggtggggggnggctcatactanggngggttttctcctttnttgagaaananacctgcccggcggcgtnnaaaggcgaattccaccnctngggccgtctttngaccancccgnncaactggggnanagggaaactgttcctgggga

SEQ ID NO: 2661 - DNA, 646 bp, Homo sapiens
  misc_feature 441, 454, 489, 508, 521, 536, 621, 626, 635, 642: n = A,T,C or G
acgcggggatgcgcagacaccctcaggcgactggcgggtcgcggcttccaagctctaaatggagagttgtccctactgtgcggcaggcggaggagacctatgtccagggtgctgcagaaggacgcggagcaggagtcacagatgagagcggagatccaggacatgaagcaggagctctccacagtcaacatgatggacgagtttgccagatatgccaggctggaaagaaagatcaacaagatgacggataagctcaaaacccatgtgaaagctcggacagctcaattagccaagataaaatgggtgataagtgtcgctttctacgtattgcaggctgccctgatgatctcactcatttggaagtattattctgtccctgtggctgtcgtgcccgagtaaatggataacccctctagaccgcctggtagcctttcctactanaataacaggtggngtggaattacctgttggattttagtctgtacaaanttgcgctattgtgcttctncgtcactgaacangaggatgatcagccncaggttaaaacgatttctctctacttaaactgattacctgttgttttaaaacaaaggatattaaattttttgtgaatgttgctgntttanaactaaaanacatttnccgt

SEQ ID NO: 2662 - DNA, 691 bp, Homo sapiens
  misc_feature 94, 110, 203, 283, 353, 355, 357, 412, 432, 441, 467, 480,495, 517, 566, 568, 576, 585, 594, 598, 627, 631, 639, 655,657, 677, 680, 687: n = A,T,C or G
actttttttttttttttttttttttttggaaaattatacttttatttgagtcaccaggagaaagattcacttgtggttcaagtcaaatgttcanaatcataacgggccanaaaggtttgatcccgagcacaagcccacgagggaggggaccaaaacagaccaaaatgagacaacaaccccatataaaaagatgaactggcggnttcacacactcacacacatacacatacacacggatgaaatgtttggacagaggcaaatttcacgtggtcatttctgtttntttttaaatacaggtttgtagggtggtattttgttttttccagctataaaaaaaggcccaaaagtgcatntntnaggggggaagggcagaaattaagcaataaagtcattttccctggagggacatganagggagaaaacaggaggcantgcttgganaacccactttcctcccactgggcttntttgtattttaanattgggccccaaaanttatattcacattctaactttnatgcctctttcttgggattaaaagaacttgaaaaacctttttaactgtnanaaaaacanggggttaanccaacccancccnacccttaggggtttgggctttttaaggangganggtttggnaaaaaaaaaaccccananccccgggatttaaaccaggngangtcctcntttt

SEQ ID NO: 2663 - DNA, 583 bp, Homo sapiens
  misc_feature 470, 479, 501, 530, 566, 579, 580: n = A,T,C or G
ggtacgagtcaagcacaaactgctgcgccaggaaaagacaaggctaattgggcccaactgccctggagtcatcaatcctggagaatgtaaaattggcatcatgcctggccatattcacaaaaaaggaaggattggcattgtgtccagatctggcaccctgacttatgaagcagttcaccaaacaacgcaagttggattggggcagtctttgtgcgttggcattggaggtgatccttttaatggaacagattttattgactgcctcgaaatctttttgaacgattctgccacagaaggcatcatattaattggtgaaattggtggtaatgcagaagagaatgctgcagaatttttgaagcaacataattcaggtccaaattccaagcctgtagtgtccttcattgctggtttaactgctcctcctgggagaagaatgggtcatgccggggcaattattgctggaggaaaangtggagctnaaaaaagattctgcccttcaantgcaggattgtggcagtatgtcttctgcncactgggaaccacatctacaaggaatttgaaaagangaagaagcttttnntga

SEQ ID NO: 2664 - DNA, 382 bp, Homo sapiens
acagttggagtctgtgtgttttcttgaatgtttgagacagcttccttgaactttgaatttctcagcagctgctagttgtgcttgctgggataaatcttcgatcttggcttccccaaaaactatgtaagtatctgaagcagggctcttgtagacatctggttttgtgatgacaaagaggatattcttagatttccggatagtgactctagtaactcctgtaacctgccgaagacccagtttggacatagccttccgtgccttcttttcactccgactctgttttgctttactgactggttcttcatcgatttcagctgctgccgccagctgggcttgttgtgtggttgcctgggtggaatcctgttcttcaagctctggtacc

SEQ ID NO: 2665 - DNA, 660 bp, Homo sapiens
  misc_feature 346, 409, 545, 554, 555, 571, 605, 610, 615, 620, 638, 641,644, 648, 657: n = A,T,C or G
actccttccagttctactcaacaaaaatcatgataattgtgataaaataagagcaattctactttatatcttcagtattaatggaactacggaagaaaatttggacaggttgatccagaatgtaaagatagaaaatgagagtgacatgattcgtaactggagttaccttggtgttcccattgttccccaatctcaacaaggcaaaccgttaagaaaggatcggtctgcagaagaaacttttcagctctctcggtggacaccttttatcaaagatattatggaggatgctattgataatagattagattcaaaagaatggccatattgttcccagtgtccagcagtntggaatggttcaggagctgtaagtgctcgccagaaacccagagcttattatttagaagaccgnaaaaatgggtcaaagctgattgtttttgtaattggagggatcacatactctgaagtgccttgtgcttatgaagtttctcagcacataaatcctgggaagtattattggttctacacatgtttaccccaaaagcttntggtgattnnagatgtgataacccangataagctcttattaaaatgaaaccttttttggnggttnagatnttctnttttgaactaaataaaanaantgngctnattaacaantaa

SEQ ID NO: 2666 - DNA, 485 bp, Homo sapiens
  misc_feature 443: n = A,T,C or G
acaagatctaccccggacacgggaggcgctacgccaggaccgacgggaaggttttccagtttcttaatgcgaaatgcgagtcggctttcctttccaagaggaatcctcggcagataaactggactgtcctctacagaaggaagcacaaaaagggacagtcggaagaaattcaaaagaaaagaacccgccgagcagtcaaattccagagggccattactggtgcatctcttgctgatataatggccaagaggaatcagaaacctgaagttagaaaggctcaacgagaacaagctatcagggctgctaaggaagcaaaaaaggctaagcaagcatctaaaaagactgcaatggctgctgctaaggcacctacaaaggcagcacctaagcaaaagattgtgaagcctgtgaaagtttcagctccccgagttggtggaaaacgcccnactggcagattagattttaaataaaagattggattataactc

SEQ ID NO: 2667 - DNA, 692 bp, Homo sapiens
  misc_feature 545, 548, 573, 578, 588, 597, 604, 618, 620, 626, 630, 643,657, 659, 673, 688: n = A,T,C or G
acatggcaattagaagttgtcatggcaaaagaaaaccacagctggcctgccacagccaacacaagaaccagaaaatggtagatgaaatgaaggaataaaggtggggtttattccttattataaaagaaaaaaaataattcttcagcagtcttaacaaagacatcaagatacaaaattacaagtgttttgactccagccctgtccccatctcctccaagagcagaggtaggagacagttgaagcaaacaagcaattctgtaaaaattacctagaaaccctacaaatttgattaaaatctaaacttctataattttgctttttaaaaaatttaatatcaaaaggcctgctttagtgacatgctattcctaccagaaaataaccccaataccccctctgtcagtaacatgctcaagttgaccaagccaactcttatctctaaacctatgtggacaaagtgtgtcttttaaaccaaagccaccggagatcaaatgactgctagtaacgtgtcgtctggtaactaaatccagtggcccccttcttcaaanggngggcagggcagaaaccccaaaaggncttgnggggctaatnccaaatcancattaanaaccacttccttgntntttctnaaangaaatgctttttntatccgcttttgtntnaaattggggccccngactggtggttttcnttca

SEQ ID NO: 2668 - DNA, 696 bp, Homo sapiens
  misc_feature 465, 471, 519, 598, 601, 614, 622, 637, 639, 645, 683, 690,694: n = A,T,C or G
cgaggtacacagttttctgtgaaatatgatgctgtatgtggttgtgattttttttcacctctattgtgaattctttttcactgcaagagtaacaggatttgtagccttgtgcttcttgctaagagaaagaaaaacaaaatcagagggcattaaatgttttgtatgtgacatgatttagaaaaaggtgatgcatcctcctcacataagcatccatatggcttcgtcaagggaggtgaacattgttgctgagttaaattccagggtctcagatggttaggacaaagtggatggatgccgggaagtttaacctgagccttaggatccaatgagtggagaatggggacttccaaaacccaaggttggctataatctctgcataaccacatgacttggaatgcttaaatcagcaagaagaataatggtggggtctttatactcattcaggaatggtttatctgatgccanggctgncttcctttctccctttggatgggtggtgaaatactttaattgccctgnctgctccttctagctattaagaaagaacccaacttgggtctttttttgctccaagtgcctaaaaataaattggaaaaanganacgggggtgtggnaaaggctnaaaaattgctcttgntnccttancccagggtttcaatttgccaatgacattttggccgggngtttttngggngg

SEQ ID NO: 2669 - DNA, 362 bp, Homo sapiens
  misc_feature 321: n = A,T,C or G
acattttttaaagcccgctagcaaagcaaatgtgcaggcatccaaaatgtttccatcgtagtcgaggcaaatgagatcacagtatagaacccagacaagctttcctggagaaatgcataagtcctctttctgaattatctgtgaattttcaatgacatctgcaatgaactggctagccacttgggcctcttctccaggaggtccagaccggaatctcgatgaacacaggggtggtagatccacattaggaacaacgtatcctttatcaggggcatctgttgatggtgctgcaaattctgctttaactccacagattactgnagtatttccaacttcactaaagcagaaccatctgcggtacc

SEQ ID NO: 2670 - DNA, 421 bp, Homo sapiens
actctggtgagtcaccacttcagggctttactccgtaacagattttgttggcatagctctggggtgggcagttttttgaaaatgggctcaaccagaaaagcccaagttcatgcagctgtggcagagttacagttctgtggtttcatgttagttaccttatagttactgtgtaattagtgccacttaatgtatgttaccaaaaataaatatatctaccccagactagatgtagtattttttgtataattggatttcctaatactgtcatcctcaaagaaagtgtattggttttttaaaaaagaaagtgtatttggaaataaagtcagatggaaaattcattttttaaattcccgttttgtcactttttctgataaaagatggccatattaccccttttcggccccatgtatctcaatacctc

SEQ ID NO: 2671 - DNA, 692 bp, Homo sapiens
  misc_feature 515, 555, 601, 607, 616, 642, 646, 667, 670, 673, 678: n = A,T,C or G
actgtttaaggcccaaagtaatagtttttacagatcttttagtttcaactaagcttttacaatagaaaggacttgtattgcattgagtttataaacttttggtttgtgaaatccatacttgatctgttcttttccaaccaaatgtctaggcttgacttttccaccccaatgacatttcactttattaaatattagcagatatactttgataaccaacacagcttgtatgaaaactgagcaagtgtccatcatgacccatagggttctgggtagttgttaccttactgtttagtccacaaaaaataacgacttagataagctgtctgatttgctttcgcttattaaacacgttcaccatgagatgatgtgtgtaacatcagatactgttaaactagactaggatttaatacaaatcctgaaagcttaaaataaataaataaataaatgactgcaaggattccacaacagggcatgactataatttaacaaaaaaaaaaatctgtggccagcatggnggctcatgcctataatcccaccactttgggaagctgaggngggaagacgcttgagtttatccaacctgggcaaaatagggggaatncctctnttccaaaanttaaaactacttggtgccccccggcntganggttacacctttatccccccnttnggnggcgnggggggggactctt

SEQ ID NO: 2672 - DNA, 705 bp, Homo sapiens
  misc_feature 22, 33, 34, 37, 39, 50, 133, 138, 213, 392, 456, 457, 472,481, 493, 512, 521, 526, 528, 530, 545, 551, 564, 567, 576,622, 634, 636, 641, 646, 650, 657, 694, 695, 703: n = A,T,C or G
tcttccatttagtttgtggtancaaagcagcannggngnaattgaatganaaactgagatttctcaataatggtgaatatttcgctctttaaacctaaaactcttcattgagtagcttatatttgaacatganggggnaaacatttgcctctacctctgattttgctttgctgtcaaagtttaacaccttccaattacttatgtgtgtcctgnaacacaggtgattgaacgtatgagagggaaagacaaagaaaaaggaagccagacactaggagaattattaacttctcatacttccccacattgagaagcattcggagtgtatttagcctgtagatgttgtgatatgcaaatatcccattccctggttactggcattcctaagattcttnatggtattttcaaactttgggataaatttacagattagaaagatatctggcagttaaatctctnntttccttacaaaatnccttttgtnctgcttggaaangatcttttggctttggtgngatgactangtttnantnaaaagccctttctcnaaagcnctttcagttgcanccncccccctanggaatcagatttatgctatacctttggataagaacctgttttttgnaaaaccatcatntnttttnttccnggantattggncggtaaacagggtttcatgttctctcccccaatgganntccttcanaa

SEQ ID NO: 2673 - DNA, 679 bp, Homo sapiens
  misc_feature 5, 522, 533, 574, 576, 638, 642, 656, 669: n = A,T,C or G
accangttttggtgtcaactagaagaggtcttattgaagttaaaacagatgagtttcctcgccatgggagcaacatagaagccatgtccaagctaaagccttactttcttactgatggaacgggaacagtcaccccagccaatgcttcaggaataaatgatggtgctgcagctgtcgttcttatgaagaagtcagaagctgataaacgtgggcttacacctttagcacggatagtttcctggtcccaagtgggtgtggagccttccattatgggaataggaccaattccagccataaagcaagctgttacaaaagcaggttggtcactggaagatgttgacatatttgaaatcaatgaagcctttgcagctgtctctgctgcaatagttaaagaacttggattaaacccagagaaggtcaatattgaaggaggggctatagccttgggccccctcttggagcatctggctgtcgaattcttgtgaccctgttacacacactggagagaatgggcagaagtcntggtgttgcanccctgtcattgggggtgggatgggaataccatgtgtgtcananaaaataaatgttaactttgacaacctcaattcttttaactaataaatacctggccggaccanctanggggaattcacccntggcgcgtctatngatccacttg

SEQ ID NO: 2674 - DNA, 533 bp, Homo sapiens
  misc_feature 520: n = A,T,C or G
cgaggtacgcggggttctctttctggtcaaaatggctggtaagcaggccgtttcagcatcaggcaagtggctggatggtattcgaaaatggtattacaatgctgcaggattcaataaactggggttaatgcgagatgatacaatatacgaggatgaagatgtaaaagaagccataaaaagacttcctgagaacctttataatgacaggatgtttcgcattaagagggcactggacctgaacttgaagcatcagatcttgcctaaagagcagtggaccaaatatgaagaggaaaatttctaccttgaaccgtatctgaaagaggttattcgggaaagaaaagaaagagaagaatgggcaaagaagtaatcatgtagttgaagtctgtggatgcagctgttatgaagatggttaaacttgaaacaaacaattttaagaattatttggtctgaagatgttttactttaaataaatgtctattgtaatggctggataaaaaaaaaaaaaaaaaaaaaaagtacntcccggcggccgt

SEQ ID NO: 2675 - DNA, 700 bp, Homo sapiens
  misc_feature 541, 603, 616, 649, 654, 674, 691: n = A,T,C or G
tcgagccggcccgcccggccaggtccttcttgatgggccatatgctttatcttctggggtaatataaacaaaagaactatgcataagtatgaacaggagtctaaaaaggctggcaaagcttcgtttgcatatgcatgggtcttggatgaaactggcgaagaaagggaaaggggagtaaccatggatgttggtatgacaaagtttgaaaccacaaccaaagttattacattaatggatgctccaggccataaggacttcattccaaatatgattacaggagcagcccaggcggatgtagctgttttagttgtagatgccagcaggggagagtttgaagctggatttgagactggaggacaaacacgagagcatggactcttggtcccgttctctgggagtgacgcagcttgcagttgcagttaataaaatggatcaggttaattggcaacaagaaaggttcaagagattactggaaaacttgggcactttcttaagcagcaggttttaaggagaagtgatgtaggttttattcctacaagtnggctcagtggtgaaaatctaatcacaagatctcagtcaaagtgaactcacaaatggtttaangactatgttatanacaaatggttctttaagcctcccacgactttgnaaacnttaatattgttccatgtttnaaacaagattggttttntactggaaa

SEQ ID NO: 2676 - DNA, 701 bp, Homo sapiens
  misc_feature 465, 518, 524, 557, 560, 581, 598, 602, 614, 622, 641, 655,664, 680: n = A,T,C or G
acgcgggggggaatcatggctgctcgcagagctctgcacttcgtattcaaagtgggaaacccgcttccagacggcgcgtttctatcgggacgtcctggggatgaaggttctgcggcatgaggaatttgaagaaggctgcaaagctgcctgtaatgggccttatgatgggaaatggaaaaacaatggtgggatttgggcctgaggatgatcattttgtcgcagaactgacttacaattatggcgtcggagactacaagcttggcaatgactttatgggaatcacgctcgcttctagccaggctgtcagcaacgccaggaagctggagtggccactgacggaagttgcagaaggtgtttttgaaaccgaggccccgggaggatataagttctatttgcagaatcgcagtctgcctcagtcagatcctgtattaaaagtaactctagcagtggctgatcttcaaaagncttgaactactggtgtaatctactgggaatgaaaatttatgaaaaagatgaanaaaaancaagggctttgcttgggctatgctgataaccanggnaacctggacctacagggcggnacgggtggggggggccnttcnaccactttttgnaaaaatgnctttttttgcccccaaaanaattgcccacttanaaaacttgntgaaaaggggaacccnaaaaattttattccctggggg

SEQ ID NO: 2677 - DNA, 689 bp, Homo sapiens
  misc_feature 492, 495, 514, 547, 573, 593, 602, 615, 625, 642, 649, 650,653, 655, 656, 668, 670, 671, 673, 677, 681, 682, 683, 685,688: n = A,T,C or G
actcctctcagtttggtggtggaagtcaatatgcttatttccatgaggaggatgaaagtagcttccagctggtggatacagcgcgcacacagaagacggcctaccagcggaatcgaatgagatttgcccagaggaacctccgcagagacaaagatcgtcggaacatgttgcagttcaacctgcagatcctgcctaagagtgccaaacagaaagagagagaacgcattcgactgcagaaaaagttccagaaacaatttggggttaggcagaaatgggatcagaaatcacagaaaccccgagactcttcagttgaagttcgtagtgattgggaagtgaaagaggaaatggattttcctcagttgatgaagatgcgctacttggaagtatcagagccacaggacattgagtgttgtggggccctagaatactacgacaaagcctttgaccgcatcaccacgaggagtgagaacccttgcggagcattaagccatnttncacactgtcaccaccacanacaacctttcattcgcaagctggcaaaactcangggaatgtgtttgcccttgagccatnctggccccctgataactgtncttggccgnacccccttagggngaattccacncctgggggccgtattanggatccnnctngnnccaacttggggnannangggntaannntnctng

SEQ ID NO: 2678 - DNA, 306 bp, Homo sapiens
  misc_feature 280: n = A,T,C or G
acagaaaagaaaatccccgttgtttttcgattgcaagagggttatgatcatagctactacttcattgcaacctttattactgaccacatcagacatcatgctaaatacctgaatgcatgaaaaaactccaaataagagaatctcttcaggattataaaagttgtaaaatgcaactgtattgctgagcaaaaaaaaaaaattcaaaacattggattttatagtgctaaaagggctttattctatagttgaatcacctctgaataaagatataaaacctacnaaaaaaaaaaaaaaaaaaaaaagtaa

SEQ ID NO: 2679 - DNA, 698 bp, Homo sapiens
  misc_feature 488, 555, 580, 586, 604, 617, 658, 686, 696: n = A,T,C or G
actttttttttttttttttttttttttacagtttttacatttatttaaacagaaaacgtgcacatgagctgcctactcattttcttcactgcgcagcctggcattggggttggtgactctgatggccagttgggcagctctttccacgatggctttgcggttcttggaggaaacattgtgagcgatctcggcacagtaagatttgttgcacatcaacagcacttccagctccttgacgttgtggaccaggaacttcggaagccactgggcagcatgtgctttgtttttttgttgcttccataaccaatgttgggcatcaagatctggcccttgaatcttctacgaaccctgttgtcaatgcctctgggtttcccccagttacgcttaattttgacatatcggtctgcccgcgtacggatgctacttgtccaatgatggtaaaaagggtagcttactgggtggcctccgattcaagttaaaatgaagangtctggcggctaggaatcaataaaagggattggcttaatggggcgaaaaaatatgccttggtggttnggatatattggaggaaggggattanttgttnggatgaaggatggatatnaatagggcagggncccctcttttttttaggggcggatcggaaaatttttaggcnaaaagaaaattattcgccttatttgggngggggttaangg

SEQ ID NO: 2680 - DNA, 655 bp, Homo sapiens
  misc_feature 464, 504, 506, 511, 544, 552, 556, 611, 613, 619, 631, 635,636: n = A,T,C or G
acttttttttttttttttttttttggatcttgtcattcttggcactgtttctaaagaaaaactccattatcccaagcaaaaagcacagaaggtggagtttggcttcaagagatgttaactcaaaatcttaggcctagcagagaatcaccaaatttatggagagttaacaggggtttaacaggaaggaagtgcctttagtaagttctcaagccagaggctggaggcagcagctaaatcagaggacagcatcctcagtgaaagtgagccattcggggtggcatgtcactccaggaataaacacaacttataaacaaatgatttcgtaggatagcacagtgacatggtgcactgtgaacctgaggccactgtgtcaaactgtgcactggttgtgaataggggagagccaaaaattatgtcctactggtaatgagctttcaatggctcgatcctctccactgaagctntgtagagcactcaaaccccaccactcccacattgcccttntnggggnagctgtctgtggcacccacaggaaggactggantcccatangatnccccccccttgaaccccaaactgcgggattgggtctatggttggcgctaactccncnaaagcncaattttgaaanggannacaaactaggctttaatga

SEQ ID NO: 2681 - DNA, 682 bp, Homo sapiens
  misc_feature 462, 484, 498, 501, 505, 556, 564, 572, 583, 592, 613, 628,631, 652, 655, 671: n = A,T,C or G
ggtacctagaagagaggcgggtcaaagaagtagtgaagaagcattctcagttcataggctatcccatcaccctttatttggagaaggaacgagagaaggaaattagtgatgatgaggcagaggaagagaaaggtgagaaagaagaggaagataaagatgatgaagaaaaacccaagatcgaagatgtgggttcagatgaggaggatgacagcggtaaggataagaagaagaaaactaagaagatcaaagagaaatacattgatcaggaagaattaaacaagaccaagcctatttggaccagaaaccctgatgacatcacccaagaggagtatggagaattctacaagagcctcactaatgactgggaagaccacttggcagtcaagcacttttctgtagaaggtcagttggaattcagggcattgctatttattcctcgtcgggctccctttgcctttttgngaacaagaagaaaaagaacacntccaactctatgtncgncggnggtcatcatggacagctgtgatgagttgtacccgagtatctcaattttatncggggggnggtgactnttaggacttgncctgaaatnttccgagaaagctccgccgancaaatcttgaagtcntcncaaaacttgtaaaaggcctgnctntttttgctggcgaaanaggaaataaaa

SEQ ID NO: 2682 - DNA, 684 bp, Homo sapiens
  misc_feature 515, 518, 564, 566, 583, 601, 620, 642, 647, 658, 659, 666,670, 671, 678, 682: n = A,T,C or G
acagtattggaaatggatctgtctttggtaaagatcagcctataattcttgtgctgttggatatcacccccatgatgggtgtcctggacggtgtcctaatggaactgcaagactgtgcccttcccctcctgaaagatgtcatcgcaacagataaagaagacgttgccttcaaagacctggatgtggccattcttgtgggctccatgccaagaagggaaggcatggagagaaaagatttactgaaagcaaatgtgaaaatcttcaaatcccagggtgcagccttagataaatacgccaagaagtcagttaaggttattgttgtgggtaatccagccaataccaactgcctgactgcttccaagtcagctccatccatccccaaggagaacttcagttgcttgactcgtttggatcacaacccgagctaaagctcaaattgctcttaaactttggtgtgactgctaatgatgtaaagaatgtcattatctggggaaaccattcctcgactcagtatncanatgtcaccatgccaaggtgaaattgcaggaaaggaagttggtgttntnaacctttaaaaatacantggttcaaggaaaatttnccactgggcacaacgtggncttctttttaaggttgaaaatntccangcctttttgtnnaaaaacntttnnacccttngggntt

SEQ ID NO: 2683 - DNA, 683 bp, Homo sapiens
  misc_feature 292, 310, 337, 345, 388, 395, 421, 440, 455, 459, 472, 484,517, 520, 539, 562, 568, 569, 573, 576, 580, 585, 588, 603,612, 613, 630, 635, 637, 639, 646, 661, 663, 674: n = A,T,C or G
actcacattcatttgtcacatatttcaggccctcatacaccccttttaaattgtctaactcctatcccagtttctttttatagtctaaaaacaaggaatcacccaagtaagatactccttcagagcactgctgaaaacggatcaaacgtggagatcccccagatccctgttctcaagtgttaaaaatattttatattagcacatataatacccttagatatattctgttatgttctaaagagtttgtgtttccccctttttgatgatgtcttcaatttcttctgagaccttncctgtatagtcatttggntctattgctttaacttctcttgatctncagcggcnaaccatttcttttgcacccatgctaataatctttttatactgnggggatnggggagcactttcctaatttgtcatnagataacttcgacagggtnatttctttttccttnttgngttgcaacttttnacttttattacnaaaacatatcacttttaaccccttcttgtcatncanagaaataaaatgcttttgntcattttcaaactactctcccantctttnncagnacntctnaaaanggnggtttccccctgccnagttgactnntttgccttgggaatgcnaaaancnancttaaantttggtgggggcccnanaaaaacccccnggggtttgg

SEQ ID NO: 2684 - DNA, 706 bp, Homo sapiens
  misc_feature 526, 540, 545, 553, 590, 597, 608, 616, 636, 639, 683, 684,699, 704: n = A,T,C or G
ggtactggagatgtatttgataaccaaggttttaggtaaattttcaccagtattagttctatttgcaaactgaaaaatgttgtaggcttaatataaaataaccacattagtgaacattatatctcttagaagaaaggccatattttgctcctgcttctgtaaaaatattatttgtttgaaggggaaataatggtagtgtgacctttcacttaattcctactcccttaatgtgagagagacaaaatgagctgaagaaggaaaattctggagttacactccacaaccttgaacatactgacggacatctctgttttgacaacgatttctccatgccacccatgctctaatgccttgtggatcacggacaaccctctttgcacaagctacagcatcagcgatgttatcttgcagcaaagcactgcagggataaatgacaggcattaactgctcctggggttttggccatcattaccccagtagcggctattgatctgaaatatcccataatcagtgcttctgtctccancattgtagtttggnagctngggtgttntaaccactcttccatttgggccaaacacatccagttnggttggntggatcccctngagcctcnctttcccaatctttttaaangtntggccactccactttcaaaaacttgccttgaccgtaccaaaagnnggcagcccccaacantgagngc

SEQ ID NO: 2685 - DNA, 682 bp, Homo sapiens
  misc_feature 439, 441, 479, 521, 525, 556, 603, 605, 616, 625, 639, 646: n = A,T,C or G
acaaataaaatcaaaaagagcagtgttctgttgtattcatttctgcatgtatagctttattaattgctaatgaaaattagaacttttctgggatcttctgacaagatttttaaaaaatcttaaaatgccttttcttcagtgaagccatctttggagttagtcattactctcaccttatctgtcatcttgacttcaacctgatattcctcttcttttggtccagaccctcaaattttaaaagtagcttcaagttaaggaaaggtcatttttccacagttcagttctctgaaaaacttccatctcccactgaaagtcacagtccaggagtgaagtaatcacatgctagaacatcagggccaattggaaagtcattatgaacacttgcattggtcgatcttatttatcaccacaagcctgaaaatgcaatgtcctgaaaaangngacctctttgtgcccacgtaatttttaaaaaaggagangggtaatattaaaggggactgaggcttggtcacccaaaaatnagcncaatgaaaccaacaataatgaataatgagcnctaaaatcaaatacccgagtttcaaaaaaagggggccggtttaaatncntttgacccccntttcaaaanaacttttttaaaanaaaaggntgggggaaaaaaaaaaaaaaaaaaaaacctggcccc

SEQ ID NO: 2686 - DNA, 698 bp, Homo sapiens
  misc_feature 571, 573, 576, 587, 605, 607, 618, 620, 623, 625, 669, 682,684, 693, 698: n = A,T,C or G
ggtacgcgggggcgtgctgttgggagttgcttggaggttggcggcgcggggctgaaggctagcaaaccgagcgatcatgtcgcacaaacaaatttactattcggacaaatacgacgacgaggagtttgagtatcgacatgtcatgctgcccaaggacatagccaagctggtccctaaaacccatctgatgtctgaatctgaatggaggaatcttggcgttcagcagagtcagggatgggtccattatatgatccatgaaccagaacctcacatcttgctgttccggcgcccactacccaagaaaccaaagaaatgaagctggcaagctacttttcagcctcaagctttacacagctgtccttacttcctaacatctttctgataacattattatgttgccttcttgtttctcactttgatatttaaaagatgttcaatacactgtttgaatgtgctggtaactgctttgcttcttgagtagagccaccaccccatagcccaaccagatgagtgctcttgtggacccccacctaagctgagtgtgaccccaaaagccacgatgtgctctttntncanaacacacttgncagatggaggaacctctnantttgaaacatngnttntncagggacatgtaaacttgctggtttggtttttcttcccggggtngatgttgggggantncggattatntttcn

SEQ ID NO: 2687 - DNA, 685 bp, Homo sapiens
  misc_feature 3, 177, 238, 243, 251, 332, 374, 388, 392, 410, 416, 427,431, 462, 468, 483, 494, 497, 519, 520, 523, 530, 534, 544,546, 570, 576, 579, 591, 598, 608, 611, 615, 623, 630, 633,637, 638, 652, 658, 663, 668, 677, 683, 684: n = A,T,C or G
ttnatggcaattagaagttgtcatggcaaaagaaaaccacagctggcctgccacagccaacacaagaaccagaaaatggtagatgaaatgaaggaataaaggtggggtttattccttattataaaagaaaaaaaataattcttcagcagtcttaacaaagacatcaagatacaaaantacaagtgttttgactccagccctgtccccatctcctccaagagcataggtaggagacagntgaancaaacaancaattctgtaaaaattacctagaaaccctacaaatttgattaaaatctaaacttctataatttcgctttttaaaaaatttnatatcaaaaggcctgctttagtgacattgctatttctaccanaaaataacccccantacnccctctgtcagtaacatnctcaanttgaccagccncctnttatctctaaacctatggggaacaggtgtgncttttnaaacccaaacccccnatgatcaaccnctngctgttaacctgttgtcttgtnnctnttccatngccnccttttccananggggggctggggcttaaccccatntggttngtngggccaatcccnttacccnttaaaaccanttnctanctttttantaatagngancctnntttaagccccattntctaanttgtnctccncctgcatgntatttnnt

SEQ ID NO: 2688 - DNA, 687 bp, Homo sapiens
  misc_feature 571, 588, 611, 613, 631, 640, 649, 651, 660, 675, 677, 679: n = A,T,C or G
ggtacttttgggataactttggttacagttccttcaaaatgttcaatgctgatatcttcaaaaatgactgttccttgaggcaatagtctgacatctgttgcaacttctttaccatttctgtccttgattgtgaattccacatcatcgccaggctgtaaggtttctaagtcacccttaaattcactatagtgaaagaatatctcttttacaacatcacctctttcaataaagccaaatgcctccttcatggcacaaactactccctgacagcgggcttgtttctttttcaacagcataatgttgcgagcacttacagcaccagtatgtttattgttatcaattacaaagtttattttatctccagtttccagctgaacgttcccttcgacatcttcaggggtgtaagtcagataaaacacttcttgccattcattcgttcttcagggagggatttcttgttttatcttcaccaagtttaacagcaatgggtttccagtccgtcgtccgatgatcttcaaattcacatcatctcctacttttaagcttgcagggtgccatatctgggaacagnggaagaaaagtctaacntgacgtctgaacctgaataaatncngaagaggtaacagttttnataacccantttacccangnttgttaaanactgcccggcgggcncncnaaagggaa

SEQ ID NO: 2689 - DNA, 461 bp, Homo sapiens
  misc_feature 394, 434: n = A,T,C or G
actatgccaaacacttataacttgtataaaaattccacatccccatattggccacctcaagatgaaaacagataactccctaaatgttaactggctctactcccctaatattaaacataaaaaccacatgggaaatatagaaattcaaatagaagtaacataaacctgtcataaatcgtaaacaaaaaactatttgtgggacagcatggatgacaaatggtctaccgtgtaaattttagaatgaggcagacaaaagttggaaggccggttaattttcccctccttctcctgcttcagcttcgtctccttgggtatccgatgtccacaatgtcaagttgtctctcagtaattgcattattagcgtgctgtctttgtatgactcttcacttaatgnatcaagttcagcaatggctttatcaaaagctgtctttgcnagaaagcaagctttctctggggagtca

SEQ ID NO: 2690 - DNA, 597 bp, Homo sapiens
  misc_feature 506, 526, 544, 566, 580: n = A,T,C or G
ggtacgtctgcatcgattatcttacgtggggcaaatgatttcatgtgtgatgagatggagcgctctttacatgatgcactttgtgtagtgaagagagttttggagtcaaaatctgtggttcccggtgggggtgctgtagaagcagccctttccatataccttgaaaactatgcaaccagcatggggtctcgggaacagcttgcgattgcagagtttgcaagatcacttcttgttattcccaatacactagcagttaatgctgcccaggactccacagatctggttgcaaaattaagagcttttcataatgaggcccaggttaacccagaacgtaaaaatctaaaatggattggtcttgatttgagcaatggtaaacctcgagacaacaaacaagcaggggggttgaaccaccatattaaagtaagagtttgaatttgcacagaactgcaatcccattttcgaattgtgatctataaatactcagaagaaatatactggagttaaantgcctctgacctatgtgctntgcttatatacatgtatnatgctgactccggcgcgtcagngatcccctgcgcgntagacactgcactggat

SEQ ID NO: 2691 - DNA, 673 bp, Homo sapiens
  misc_feature 297, 324, 373, 376, 396, 421, 441, 458, 468, 472, 483, 507,509, 514, 529, 535, 542, 550, 552, 564, 583, 588, 591, 604,606, 608, 609, 614, 616, 619, 646, 648, 651, 660, 663: n = A,T,C or G
cgaggtacagcatcgtagggttcccctaaacttgccctgtttttgttttttttagtttgttatccccttactgagcggcctctactaggtggctgtgattaaatgtcccaagcaaggatagggaaggggaatggttgagcctctggagatcattgtaaccaatcctgccagacctgtttggggcagtggggagcaaacctagataaggacctgtttggggcagcagggagcaaaatctcctttaacaaccaagcagttcctcattcacatcaacagagcgaggctgtgataacttangaggcagcaatcctaatagtccttcantgcattttaatctgcctccaactggacacccagtaggtaagtgtcaaanccnaaaaattctggggcagtaanataaaatggttcatttttacctgangccacttttagtttttgggnctgttaaccctgttttncaaaaaaatnttgngggccttttangccggggaagttagggcgacccananccatnggagagcccccaatnccttgnatttttngggcttcnantggtgggtgggncattccctaatgggggatntcaanttncttcctgggggcntncnnaaaananctnccccaaaaagggtcaaatttgggaatngnttngggttttanctntttacaactt

SEQ ID NO: 2692 - DNA, 525 bp, Homo sapiens
  misc_feature 498, 515: n = A,T,C or G
acttcagaccattctcctcccgcatggccttggtgctgaagttggtatggcagcctgcaccattccagttcccaggaatgggcttaggatcaaaggttgctatcactccaaagtcttcacacacacgatgcaagatgaaacgggccacccagagatgatctcccatgctgattccttcacaaggtccaatctgaaattcccactgggcaggcatgacctcggcattagtccccgcaatcttgactccagcatacaagcaggcccggtaatgggcctccacgatgtccctgccataggctctgtctgctcccacaccacagtaatatggaccctggggccctgggaagccgttggaaggccaaccaaaggggtgcccatctgtccccatgaggatatactcctgctccatgccaaaccaggggtgctggttgctcaccatgtcattatcgtttacaggtgtgcctcaaattggtctctgcagcctttgattgtacctcnggcccgaccacgctaanggggaattca

SEQ ID NO: 2693 - DNA, 633 bp, Homo sapiens
  misc_feature 295, 336, 402, 412, 451, 481, 499, 505, 516, 530, 551, 558,564, 575, 576, 588, 591, 593, 595, 599, 601, 606, 614, 625,627, 629: n = A,T,C or G
acgcggggctcggaaacggaagtgagcggcggggtcgactgacggtaacggggcagagaggctgttcgcagagctgcggaagatgaatgccagaggacttggatctgagctaaaggacagtattccagttactgaactttcagcaagtggaccttttgaaagtcatgatcttcttcggaaaggtttttcttgtgtgaaaaatgaacttttgcctagtcatccccttgaattatcagaaaaaaatttccagctcaaccaagataaaatgaatttttccacactgagaaacattcanggtctatttgctccgctaaaatacagatggaattcaaggcngtgcagcaggttcagcgtcttcatttctttcaagctcaaatctttcactggatgtttttgaagggntatgatgagncttttggatttgaggatattcttaatgatccatcacaangcgaattcattgggagaaccccccttgatngtggaatataaacttggnttactntataagggtgntgtcatggaaaccnagggcagcatcttgttattantcatttngtcctngggcccgaacnnccttaggcaatncancncnctgngncgttntatatgantccacttcggncnancttg

SEQ ID NO: 2694 - DNA, 672 bp, Homo sapiens
  misc_feature 153, 187, 192, 203, 206, 217, 220, 228, 230, 233, 244, 248,267, 271, 275, 278, 285, 287, 292, 309, 317, 341, 345, 362,374, 383, 384, 390, 397, 413, 432, 448, 449, 465, 480, 483,490, 502, 506, 507, 509, 520, 532, 537, 539, 543, 544: n = A,T,C or G
  misc_feature 547, 578, 589, 591, 593, 599, 600, 605, 607, 611, 615, 616,621, 624, 638, 641, 658, 660, 664: n = A,T,C or G
ggtaccaacctggctactggaatccccagtagtaaagtgaaatattcaaggctctccatcacagacgatggctacattgaccttcagtttaagaaaacccctcctaagatcccttataaggccatcgcacttgccactgggctgtttttgatnggcgcctttctcattataataggctccctcctgntgtcnggcttcattancanagggggggcanacncgggcctntncantgctgatcatnggcnttctggcgttcctacccgnattntacnacntgcggcntnagttnactaatgcatccaaagnctacccgnggtgtcgtgctatgatgacttttncaancttttgattgacctagnatccctcccccntaatctganngaggangtcacanttggaacttgttccangcttttgaggatcttctgnccaaaaacttatatgnntgctgactaaaagatntactgcatccttgcnacntggtttnaacaaaaaacangggnnanactttgtatgngccccttcccanataangntaannttnaacctccgtacaacgtaattaaggacaaacntttttttcatncntnggcccnntccantntttnccannataantgnatgggcagaatcgnggntttctgcaatggaaaangnggcntccccacc

SEQ ID NO: 2695 - DNA, 679 bp, Homo sapiens
  misc_feature 3, 36, 282, 386, 406, 491, 512, 561, 577, 615, 618, 630,634, 636, 639, 641, 642, 654, 658, 664, 673, 677: n = A,T,C or G
ggnacttttttttttttttttttttttttttcgaanccaaactgtatccagctttattaaagatactttccataaacaatcatggtatttcaggcaggacatgggcagacaatcgttaacagtatacaacaactttcaaactcccttcttcaatggactaccaaaaatcagaaagccactataaaacccaatgaagtcttcatctgatgctctgaacagggaaagtttaaagtgagggttgacatttcacatttagcatgttgtttaacaacttttcacaanccgaccctgactttcaggaagtgaaatgaaaatggcagaatttatctgaagatccacaatctaaaaatgggaaccactgctcttttgacaggtgccatctcagnggcatcactggaaagtccanattgcctgacacactggtaaccaatgactaggggtcaggtctcaacaaatgtctgggcttaagggagttaagtctattctgaaanatggaaagggagaaaaggacntaaaaccaatttttttttttttccccaaagctttttgtgccaagggggncatttttttaaatcanggaatcctctctgggagccagaggaatttttaaactanaanggaaggggtttntccntnatncnntttgggacattntttngatatncccttcccnaaanaa

SEQ ID NO: 2696 - DNA, 594 bp, Homo sapiens
  misc_feature 504, 529, 541, 549, 555, 566, 570, 573: n = A,T,C or G
acggataccggaaaggctggatacctcggttattagaggattttggagatggaggtgcttttccagagatccatgtggcccagtatccactggatatgggacgaaagaaaaaaatgtcgaatgcgctggccattcgggtggattctgaaggaaaaattaaatatgatgcaattgctcgacaaggacagtcaaaagacaaggtcatttatagcaaatacactgacctggttccaaaggaggttatgaatgcagatgatccagacctgcaaaggcccgatgaagaagctattaaagagataacagaaaagacaagagtagccttagaaaaatctgtatcacggaaggtcgccgcagccatgccagttcgagcagctgacaaattggctcctgctcagtatatccgatacacaccatctcagcaaggagtggcattcaactctggagctaaacagagggttattcggatggtagaaatgcagaaagatccaatggagccttcaaggntcaagaataataagaaaatttcccngggaccaccttntcttctgngcctgntattcattctnctanccnaaaaatactgttaaagaacaa

SEQ ID NO: 2697 - DNA, 636 bp, Homo sapiens
  misc_feature 27, 31, 73, 135, 137, 149, 198, 270, 340, 353, 379, 384,399, 401, 421, 424, 443, 454, 456, 463, 486, 490, 521, 527,530, 536, 545, 553, 564, 595, 603, 604, 607, 611, 618, 622,627, 630: n = A,T,C or G
acttttttttttttttttttttttttngagncattactttttattttgaaggatttgtgaaactcttcacatnatggggagagtttgtatgattaataagaagcagctttttcatgaaatgcttggaggtgaacnanttctcagcctgngagatccgaccatcccattaactttgaagtttctcttgattaatagaanaaaaaaggggagggtgaagaaaaggaggaacatgctaaaaaccttatgacaatcatccaaatgtgaggaaanaacaaccgattcaccaactccactttttctattttacaactttctacatctcactcttgattttggcttnctggctgaaacancctggcatgtccctaaagcccctganaaganccctggttctcccananacagaggaggagaagccctncangatgcgctgaccactttcnaaaaaactggncngtcccgngctccccaaaaagttttgaaccnaccngcctaatggtgaaaagaactggccctgaaangtaaangangaaatngggattaantgggcttnttgtgaaatgnctatttttctaacaccaccccagaatttttntttaattnngcntcangcaaccncttnttgtnggngggttt

SEQ ID NO: 2698 - DNA, 636 bp, Homo sapiens
  misc_feature 218, 226, 229, 247, 300, 301, 349, 357, 401, 406, 419, 434,449, 461, 466, 479, 483, 488, 502, 503, 511, 520, 544, 545,563, 564, 571, 576, 579, 586, 588, 595, 600, 611, 614, 618,619, 621, 623, 631, 635: n = A,T,C or G
ggtacaaagctttgcaagggtgtggttttggaatgacgctaaactgaaggtggagagaacagataaaaaggttggaagttgcacactgtactctctatcactgacaaatgcaggctggattcttattatatacagagatggctcaaaaatggggtttcagatctttgtgacgaaatagaatactgtttcatattcgaatcagagggcttcttggtctnagaaatangtncataatcattggaaccangaacaagaataacttattgctatctgtgataacaactgtgttctaaacacaanngattttcttttttattaatgtgcacatagacattgccattttagaatnataaaccncatgttggggttttaaaaatgaaattctggctaattcgagccanttcanctaattttctatncaagtaaatgggtgngttgggtatagaaanaaaaacggggtncaaancccacttttgccncctnccaanctatatggccttgnntgatcatncagctttantaatggtcatttctttgttaaaannacccaaacttgaaatcanntttgccnttctnctnaaaattnanagtcttnttttnggatattaaanttngatnntngntggcccantggnt

SEQ ID NO: 2699 - DNA, 534 bp, Homo sapiens
  misc_feature 452: n = A,T,C or G
ggtacagccgttgtcaatggagagttcaaagacctaagccttgatgactttaaggggaaatatttggtgcttttcttctatcctttggatttcacctttgtgtgtcctacagaaattgttgcttttagtgacaaagctaacgaatttcacgatgtgaactgtgaagttgtcgcagtctcagtggattcccactttagccatcttgtctggataaatacaccaagaaagaatggtggtttgggtcacatgaacatcgcactcttgtcagacttaactaagcagatttcccgagactacggtgtgctgttagaaggttctggtcttgcactaagaggtctcttcataattgaccccaatggaatcatcaagcatttgagccgtcaacgatctcccagtgggcccgaaagcgtggaagaaaccctccgcttggtgaaggcgttcccagtatgtanaaacacatggagaagtctggccaacgaactggacacccggattcttctactatcaaacccaagtcagctgctttccaagagt

SEQ ID NO: 2700 - DNA, 630 bp, Homo sapiens
  misc_feature 267, 273, 423, 425, 439, 441, 458, 480, 482, 488, 506, 509,519, 528, 553, 562, 564, 567, 577, 585, 590, 598, 600, 605,619, 622, 624, 625: n = A,T,C or G
acatgggaaatgtaaacaaatgtgaaggaggaccagaaaaattagttaatatttaaaaaaatgtattgtgcattttggcttcacatgtttaactttttttaagaaaaaagttgcatgaatggaaaaaaaaatctgtatacagtatctgtaaaaactatcttatctgtttcaattccttgctcatatcccatataatctagaactaaatatggtgtgtggccatatttaaacacctgagagtcaagcagttgagactttgatttgaancacctnatccttctttcaatgcgaacactatcatatggcattcttactgaggattttgtctaaccatatgttgccatgaattaactctgccgcctttcttaagggatcaaaaccagtttgattttgggaatcttcccctttccaaaatgaaaatananatgcagttacctcngncgcggaccacccctaanggccgaatttcacccactggcngnccgttntagttggatcccagctcngtnccaagcttgngtaatcatngtcataactggttccctgtgtgaantgttatccntnacnatttccccancatccganccggnagcataanangaaancctgggggcttaangangnnctaac

SEQ ID NO: 2701 - DNA, 641 bp, Homo sapiens
  misc_feature 23, 31, 109, 131, 140, 193, 219, 230, 244, 287, 293, 313,341, 357, 364, 367, 384, 409, 436, 458, 468, 473, 474, 479,480, 481, 485, 486, 487, 498, 500, 508, 542, 549, 563, 567,568, 570, 585, 598, 602, 603, 605, 612, 627, 636, 640: n = A,T,C or G
acttttttttttttttttttttntttggcgnctcaaaaatcagtaaaactttattcgcttccattctttcgccattaacagaaaactggagaaagcaaaaatgtttcgngtttacaaagataaacggcctntttacccanagatcaaaacctcaaacgacaagggggaagataaaaccgccctcccccacatnccctgagctgacccttgtcatcttanacaaagccttnagtccactggccanggaccctgttatggccaattcaagaagagggccaagaaatcanacccanccattcccgtgatttaaagnggaacagaagctacaccaagggtcaaantgtctgttttttcatngacacantanccagggcggctactttntaaaaaaaaacaatatttatttcangccccaaccttttcatttttttttggntcggtttttaaatcagtgaaanaaaccgggtnctaannagctnnngggnnnctagccgcccntngttgggcnatcaatttttttggtttggttaaaaatggtaaantattacncggggggccctttntttnngngaaatttgcccatanttaccaattggtnaaanntncccccanccacaaaaaaaactnctttggaanaaant

SEQ ID NO: 2702 - DNA, 641 bp, Homo sapiens
  misc_feature 32, 41, 107, 111, 128, 150, 180, 209, 242, 289, 311, 323,333, 356, 362, 368, 373, 391, 392, 395, 402, 405, 411, 414,418, 440, 452, 463, 476, 481, 489, 499, 501, 532, 538, 547,549, 560, 563, 577, 583, 592, 598, 612, 618, 620, 627: n = A,T,C or G
acttttttttttttttttttttttttggcttngaaatttanaaacaaattttatttaagatctgaaatacaattcctaaaatatcaacttttccagaaaaccgtggntacncaataatgcattgcctntatcatgttagaacgtgcattngactcaaatacaaaaaccatgaaacaaatnaccatcctttaacaatttgagcaaagatngaatgcctaagaacaacatagatggacttgcanaggatgggctgttttacttcaagcaccataaaaaaaaaaaaagagcncaaatgcctgggttttcaggtntatacattaagntgaacctttngccctaggaatcagggcgttttntccatngctttnacacnttttacaaaattgtgtanngtnaaagggntangaaccnccncccntcaagccaatgttgtcaactangcaataaaatgntctactggaangttcttattttgnttctnattactgnatacccttgngnaacaacctttgaaatgagaaaaaggagcttncccccntttattttntngtttaaaacanacngaaaacaaactggnaacatnaagccctgntatacnttacgattttaaanaacatnanttttccngaaaataactagat

SEQ ID NO: 2703 - DNA, 642 bp, Homo sapiens
  misc_feature 100, 104, 188, 344, 356, 372, 390, 396, 399, 426, 445, 448,453, 484, 485, 497, 499, 502, 561, 584, 588, 599, 603, 607,626, 632, 634, 641: n = A,T,C or G
ggtacattgtgtttaagagaaaaatgaaacccacatgccgccattttcctgaatcaaattctgcagtggaatggagaggaaaatacttctaggcaagcanctanactggtgaattgggggaaatagaaggaactagtaactgagactcctccagcctcttccctattggaatcccaatggctcctggngtaggaaaaaagtttaaactacattcatgttcttgttctgtgtcactcggccctgggtagtctaccatttacttcaccccaagtcctgctgcccatccagttgggaagccatgattttcctaagaatccagggccatggggagatacaatttccanagttctcgcttnctcctttgggcatctnttctgcctcccaatcaangaagcntcncgctcagctctcagctttcggccaatnctttgctctgccagggtangtnaaacntgggagactcctggtcttttaccctcccctnnttccatacctgncntcntgggtggcaacatggtcttggacaattatagaaacaaatgactttttgggaatagcccntgtcttagggcaaactgtggccnccangaaacacttancctncatnccccagaccttttcttgcnttgacnantgacaang

SEQ ID NO: 2704 - DNA, 633 bp, Homo sapiens
  misc_feature 371, 380, 466, 473, 496, 499, 531, 549, 591, 603, 608: n = A,T,C or G
acatagtggtgccccctgataggacattgttagcatagaggtccttcctgatgtcaatatcacacttcatgatgctgttgtaggtggtttcatggatgccagcagactccatcccgatgaaggatggctggaacagggtctctgggcagcggaaacgttcatttccgatggtgatcacttgcccatcaggcaactcgtaactcttctcaagggaggatgaggatgcggcagtggccatctcattttcaaagtccagagctacataacacagtttctccttgatgtcccggacaatctcacgctcagcagtagtaacgaaggaatagccacgctcagtcaggatcttcatgaggtagtcaagtgagatctcngccagccanatccatacgcatgatggcatggggcaaggcatagccctcatagatgggggacattgtgggtgacaccatcttcagagtccagcacngatgccnagttgtgcgtccaagagccatanaanaacaacacccgctggatagccacatcattggntgggacattgaaagtctnaaacattatttgagtcatttctcccggttggccttgggggtnaagggggcctcntgaancaaggtgggatgctcttcagggcaa

SEQ ID NO: 2705 - DNA, 648 bp, Homo sapiens
  misc_feature 169, 247, 270, 298, 305, 310, 370, 388, 394, 403, 407, 425,436, 445, 450, 459, 470, 475, 486, 496, 502, 503, 510, 512,516, 518, 521, 528, 561, 563, 565, 587, 594, 596, 602, 611,637, 642, 645, 647: n = A,T,C or G
ggtactgtattttccgcaaaagaaaattaacatttagtaacacactaatgaattttatctccaaagagattagtgcactggcaaagtattcggattacagtggagagctgtgaacagcagataccgaaaacaccccagcctggcatatcccaaggtaacgatggccttnactgaccactccctttgccagaggtccagaaagaacttgcagcatgatcacctgcctgcttgcacttccaactcttancagctaacttcaaggagccaaanaggagtccccagtgggcaaggggagcanagaaganaaacngtggtaaatgaaaacctaaaggacatgtaaaatgggatacaatccccattcaaatcccanagatgtgggcaagttccnaaagtngtggttagnttanaaaactgggcacaccttncttccccaatnaaatataantacantagaaattnccgggggatancctgnaaaaaataganaaaatgctcnatggannacccaancncttnanctntaacatntcaagggctgaaacacattcctttattttccangnangatgcctcttggcttttaactnggatggnantgggtnaatgacacnaaaatctttgcagggggccttttaangtccnttngng

SEQ ID NO: 2706 - DNA, 630 bp, Homo sapiens
  misc_feature 396, 400, 466, 470, 487, 504, 520, 531, 538, 564, 600, 601: n = A,T,C or G
acctagaagagaggcgggtcaaagaagtagtgaagaagcattctcagttcataggctatcccatcaccctttatttggagaaggaacgagagaaggaaattagtgatgatgaggcagaggaagagaaaggtgagaaagaagaggaagataaagatgatgaagaaaagcccaagatcgaagatgtgggttcagatgaggaggatgacagcggtaaggataagaagaagaaaactaagaagatcaaagagaaatacattgatcaggaagaactaaacaagaccaagcctatttggaccagaaaccctgatgacatcacccaagaggagtatggagaatttctacaagagcctcactaatgactgggaagaccacttggcagtcaagcacttttctgtngaangtcaagttggaattcagggcattgctatttattcctcgtcgggctccctttgcctttttgagaacnagangaaaaagaacatcatcnaactctatgtcccccgntgttcatcatggacanctgggatgaantgatccncaagtatctcaattttatccgggggngggtgactcttgaggatttgccctggacattctccnngaaatgcttcaccagagcaaaattttgaa

SEQ ID NO: 2707 - DNA, 668 bp, Homo sapiens
  misc_feature 4, 12, 72, 74, 662: n = A,T,C or G
ggcncggccgangtactctatgcattctatctatacagaaacacctatttattattacagttgatttatgcntnattaacatttttggtgttaaaattgttaaacatcatgcttactgcacatcaactctccataatgaatctgaacttcacaatgatttaccaaacactttacttaaattactaattaaataaatgaaaaatgcaccgagccaaacaaaacttaactgggctataaagaaaaaaacccttcaaaacagtccatatacacatctatttcaaaactacctttgctagctagcccctttcccaaagttttagcctgaaaaaaacagtaaaatctacacaaaattttattgcaatcatacaagggttacattaggtcaacaaatactatgatgcaattttacatttattaaactacagttcaaagcacaaatttacacattctaaatacactaaacattatctaatgaagtcacactggtcttctaacatttgatatatctgggtgaaagacatgaactttacaagactttaaacacaaatccttagtataaaaactgtgttcttgtatgtaaacgatttaatggggaacccaattaatgggcttccatctccctaagtcatccattttggtgcatatttattttaacgcttaangggtag

SEQ ID NO: 2708 - DNA, 653 bp, Homo sapiens
  misc_feature 57, 58: n = A,T,C or G
acgcgggggatttcaaaatcaacaccgatgagattatgacttcactcaagtctgttnntggacaaatagaaagcctcattagtcctgatggttctcgtaaaaaccccgctagaaactgcagagacctgaaattctgccatcctgaactcaagagtggagaatactgggttgaccctaaccaaggatgcaaattggatgctatcaaggtattctgtaatatggaaactggggaaacatgcataagtgccaatcctttgaatgttccacggaaacactggtggacagattctagtgctgagaagaaacacgtttggtttggagagtccatggatggtggttttcagtttagctacggcaatcctgaacttcctgaagatgtccttgatgtgcagctggcattccttcgacttctctccagccgagcttcccagaacatcacatatcactgcaaaaatagcattgcatacatggatcaggccagtggaaatgtaaagaaggccctgaagctgatggggtcaaatgaaggtgaattcaaggctgaaggaaatagcaaattcacctacacagttcttggaggatggttgcacgaaacacactggggaatggagcaaaacagtctttgaatatcgaacaccccaaggctgggagactac

SEQ ID NO: 2709 - DNA, 651 bp, Homo sapiens
  misc_feature 59, 68, 631, 638, 649: n = A,T,C or G
acaatgttgaacaaaagaccacagggggaccttttgttcaaggtagcaccaatccattncctgattgngtttccaacattaaccttcctgttgactctatcattggcactttgaatggaacttcttctgctttagtgaggattcctacactgactaagcacactgtgttgctaaactctctacaaagtgtggcagcatcaacccgggaaatggcacatttgaaccaggatcgccctgacatgggcttgcctttttgtatgtgttttccccaccccctgacctagctggtatcttgtggatgtttctgtgacagtggtaaaagtaaataaattgcatttaaggggtaagcaggtgtttaaaaacaaaacaaaacaaaacaaaatgaaagaatgtggtcgcagctaaggaggttttcacatgttgtttaactccagtaaagtctgatccagcatctgatgcatactaaggttttcttctttggcatgagccactttctcttctaagtcatcaatgcttttctccaatttagttactgacctctccgcaaactcagcccgagtctcaaccttcttcagcttgtcggaaaggaccttgatctcttcctcatatctgcttccttctgcgagtcctngggccgngacacgctaangg

SEQ ID NO: 2710 - DNA, 650 bp, Homo sapiens
  misc_feature 55, 58, 502: n = A,T,C or G
acacttactgggcctggcctttttaatttttactcttttgccttcctttccaccnatncaagatttttgcttgctctcacctgggagttgagccgatttcacaaatctgctcttggctgtcatgagccaaataccagcacaaccttccctggacctgagggtggcttcatcttagaaggcccacaaggatcctgctgaagcaaatgactctgctccagtcagctcaggcctctatggagcaaagaaactggtgtccttcttggagcgctgccttcatctccttgaactgagccaactggcaggcctcctccagccccagccagcggtaggcttggtgctcatgggagaggcggatctccacgtcatagtccttcacctccgcagccagtaaatgactgttttaggcttgttcctggccacataattgagttcccttttgaacccctcaataatggtcaagctggcctgcttctatgcctgcttcctcttgggtctccctcanggctgtttccaagtcatcctctcctggttccacatggcctttgggaggagtccaagtgatgaatgccatctgatgcctgcacaataaaaactcaattgcattgtgtccactttgggaatgaggcatcttcggaagagatcaaaccaca

SEQ ID NO: 2711 - DNA, 488 bp, Homo sapiens
  misc_feature 56, 59: n = A,T,C or G
acatcaaagattacatgaaatcaatcaaagggaaacttgaagaacagagaccaganttnagtaaaaccttttatgacaggggctgcagaacaaatcaagcacatccttgctaatttcaaaaactaccagttctttattggtgaaaacatgaatccagatggcatggttgctctattggactaccgtgaggatggtgtgaccccatatatgattttctttaaggatggtttagaaatggaaaaatgttaacaaatgtggcaattattttggatctatcacctgtcatcataactggcttctgcttgtcatccacacaacaccaggacttaagacaaatgggactgatgtcatcttgagctcttcatttattttgactgtgatttatttggagtggaggcattgtttttaagaaaaacatgtcatgtaggttgtctaaaaataaaatgcatttaaacacaaaaaaaaaaaaaaaaaaaaaagtcctcggc

SEQ ID NO: 2712 - DNA, 657 bp, Homo sapiens
  misc_feature 2, 8, 39, 44, 48, 60, 63, 85, 87, 90, 92, 119, 130, 147,149, 162, 214: n = A,T,C or G
gnacaggnggaacaatccaaagttttaatcaaagaaggnggtgntcanttgctgctcacnttngttgataccccaggatttgganangcngnggataatagtaattgctggcagcctgntatcgactacnttgatagtaaatttgangnctacctaaatgcnaaatcacgaatgaacaagacctcagaatgcctgataacaggggtgcaagtgntgtttatacttcattgctccttcaggacatggacttaaaccattggatattgagtttatgaagccgtttgcatgaaaaagtgaatatcatcccacttattgccaaagcagacacactcacaccagaggaatgccaacagtttaaaaaacagataatgaaagaaatccaagaacataaaattaaaatatacgaatttccagaaacagatgatgaagaagaaaataaacttgttaaaaagataaaggaccgtttacctcttgctgtggtaggtagtaatactatcattgaagttaatggcaaaagggtcagaggaaggcagtatccttggggtgttgctgaagttgaaaatggtgaacattgtgattttacaatcctaagaaatatgttgataagaacacacatgcaggacttgaaagatgttctaataatggccactatgagaa

SEQ ID NO: 2713 - DNA, 493 bp, Homo sapiens
  misc_feature 22, 61, 245, 296, 379, 442, 447, 463, 465, 475, 482, 490: n = A,T,C or G
actgtcacattcctcttttcanattcttttttttgggataatttctcttcttctagtttancagataacatgtgagaaagggactgtctgcattccttattgaaaatgtcattcattaaaggtgaacattcagacaagaccttgaggcacagggaaattcgatccacatcatcatcagtaattggcttcttaggaagagaggattttcccaaatgcaggatagtagccatgagcaacatagcctnagcaacaaaagaattttgctttttcttctcctgaaccaaagctacatagcncaatgcaatcttggtcagagttgtggcaagggaggcagcaacaaagaaatctccatccagaaggaatcctctaaagggaggantgtcttcctcttcttggggggctagaactgctaagggcactctgagtttgcataggtacctgnccggnctggcgcttgaaaggncnaattccagcntaactgncggcctantac

SEQ ID NO: 2714 - DNA, 287 bp, Homo sapiens
  misc_feature 63, 112: n = A,T,C or G
acgcgggagctctttcctttcgctgctgcggccgcagccatgagtatgctcaggcttcaaaanaggctcgcctctagtgtcctccgctgtggcaagaaaaaggtctggttanaccccaatgaaaccaatgaaatcgccaatgccaactcccgtcagcagatccggaagctcatcaaagatgggctgatcatccgcaagcctgtgacggtccattcccggctcgatgccggaaaaacaccttggcccgccggaagggcaggcacatgggcataggtaagcggaagggt

SEQ ID NO: 2715 - DNA, 656 bp, Homo sapiens
  misc_feature 626, 637, 648: n = A,T,C or G
acgcgggggcagtccgctggtcccgagcacgagctgtgaggggattcacttgtgtgcggaactcctcggaaccatggcgtccctttcccttgcacctgttaacatctttaaggcaggagctgatgaagagagagcagagacagctcgtctgacttcttttattggtgccatcgccattggagacttggtaaagagcaccttgggacccaaaggcatggacaaaattcttctaagcagtggacgagatgcctctcttatggtaaccaatgatggtgccactattctaaaaaacattggtgttgacaatccagcagctaaagttttagttgatatgtcaagggttcaagatgatgaagttggtgatggcactacctctgttaccgttttagcagcagaattattaagggaagcagaatctttaattgcaaaaaagattcatccacagaccatcatagcgggttggagagaagccacgaaggctgcaagagaggcgctgttgagttctgcagttgatcatggttccgatgaagttaaattccgtcaagatttaatgaatattgcggcacaacattatcctcaaaacttcttactcatcacaaagaccactttacaaagttagcttgtanaagcatttctnaaactgaaagnttctggca

SEQ ID NO: 2716 - DNA, 657 bp, Homo sapiens
actcaagtcacttaatgaggaagctgtgaagaaagacaactctgtccattgggagcgccctcagaaacccaaggcaccagtggggcatttttacgaaccccaggctccctctgctgaggtggagatgacatcctatgtgctcctcgcttatctcacggcccagccagccccaacctcggaggacctgacctctgcaaccaacatcgtgaagtggatcacgaagcagcagaatgcccagggcggtttctcctccacccaggacacagtggtggctctccatgctctgtccaaatatggagcagccacatttaccaggactgggaaggctgcacaggtgactatccagtcttcagggacattttccagcaaattccaagtggacaacaacaaccgcctgttactgcagcaggtctcattgccagagctgcctggggaatacagcatgaaagtgacaggagaaggatgtgtctacctccagacatccttgaaatacaatattctcccagaaaaggaagagttcccctttgctttaggagtgcagactctgctcaaacttgtgatgaacccaaagcccacaccagcttccaaaatctccctaagtgtcaagttacacagggagccgctctgcctccaacatggcgatcgttgatgtgaaga

SEQ ID NO: 2717 - DNA, 656 bp, Homo sapiens
  misc_feature 485, 569: n = A,T,C or G
acagtgtattacgtaaatatgtaaagattcttcaaggtaacaagggtttgggttttgaaataaacatctggatcttatagaccgttcatacaatggttttagcaagttcatagtaagacaaacaagtcctatcttttttttttggctggggtgggggcattggtcacatatgaccagtaattgaaagacgtcatcactgaaagacagaatgccatctgggcatacaaataagaagtttgtcacagcactcaggattttgggtatcttttgtagctcacataaagaacttcagtgcttttcagagctggatatatcttaattactaatgccacacagaaattatacaatcaaactagatctgaagcataatttaagaaaaacatcaacattttttgtgctttaaactgtagtagttggtctagaaacaaaatactccaagaaaaagaaaattttcaaataaaacccaaaataatagctttgcttanccctgttagggatccattggagcattaaggagcacatatttttattaacttcttttgagctttcaatgttgatgtaatttttgntctctgtgtaatttaggtaaactgcagtgtttaacataataatggtttaaagacttagtttgccagtataaaataatcctggctttt

SEQ ID NO: 2718 - DNA, 623 bp, Homo sapiens
  misc_feature 609, 618: n = A,T,C or G
accaaacgggcaaggacatctctacaaattactatgcgagtcagaagaaaacatttgaaattaatcccagacacccgctgatcagagacatgcttcgacgaattaaggaagatgaagatgataaaacagttttggatcttgctgtggttttgtttgaaacagcaacgcttcggtcagggtatcttttaccagacactaaagcatatggagatagaatagaaagaatgcttcgcctcagtttgaacattgaccctgatgcaaaggtggaagaagagcccgaagaagaacctgaagagacagcagaagacacaacagaagacacagagcaagacgaagatgaagaaatggatgtgggaacagatgaagaagaagaaacagcaaaggaatctacagctgaaaaagatgaattgtaaattatactctcaccatttggatcctgtgtggagagggaatgtgaaatttacatcatttctttttgggagagacttgttttggatgccccctaatccccttctcccctgcactgtaaaatgtgggattatgggtcacaggaaaaagtgggttttttagttgaattttttttaacattcctcatgaatgtaaatttgnacctgcccngggcg

SEQ ID NO: 2719 - DNA, 657 bp, Homo sapiens
  misc_feature 583, 608, 611, 617, 627, 632, 637: n = A,T,C or G
actgcagtaataggaatctcttccacagaggcagcagagaagtggtttagtgccatggatagggaggaaagataggagcccttgcccagaaggtgactggcttccttaggccttaagcccaggagtttttatattctgtctgcaaggacaaaaatagaattcggggaaaataaggtagtaacatctaaaacacttgtagcaggaaagacgtggagaagagcaattgcaaaggacagggtagactgcttgctggataatatttgcctttaaagagatgcattggtccacagcaactggaaaaggggtgtagcaagaagaatggaaagaagagaagcaaggccctctaattccacttacctcaaaagactgagccctgaggactatgtgaatacacacccctaaaggcaaaggctctcactccaccatccctttctcacaaaagcatctggtgtgccatctctccccacagtagggtattgccctcagcagagaacagaagcccatcatagtaccattggtggccaattgatttgatggtaagggagggatcgttgcctcgtctgttatgtaaaggatgccgtanggatgggagggcgatgaggactagnatnatggcngccaggatanttcanacggnttctatttcctgaccggttg

SEQ ID NO: 2720 - DNA, 655 bp, Homo sapiens
acccagtaaaaaccagaatgacccattgccaggacgcatcaaagttgactttgtgatccctaaagaacttccctttggagacaaagatacgaaatccaaggtgaccctgctggaaggtgaccatgttaggtttaatatttcaacagaccgacgtgacaaattagagcgagcaaccaatatagaagttctgtcaaatacatttcagttcactaatgaagcccgagaaatgggtgtgattgctgccatgagagatggttttggtttcatcaagtgtgtggatcgtgatgttcgtatgttcttccacttcagtgaaattctggatgggaaccagctccatattgcagatgaagtagagtttactgtggttcctgatatgctctctgctcaaagaaatcatgctattaggattaaaaaacttcccaagggcacggtttcatttcattcccattcagatcaccgttttctgggcacggtagaaaaagaagccactttttccaatcctaaaaccactagcccaaataaaggcaaagagaaggaggctgaggatggcattattgcttatgatgactgtggggtgaaactgactattgcttttcaaagccaaggatgtgggaaggatctacttctcctcaataggagataagggtgaattaat

SEQ ID NO: 2721 - DNA, 551 bp, Homo sapiens
acactctataaataaacacatcaattttgctctattactactcttccaaaaacgtctcatataattggaattaacctagcatttacttatcattaaatatattttttttgttagaaaggatatacagcatatgaaattgcaggctttttatgagttaaagacaaaatttagaactctcaaatactatttacaatgtaaacttcacagttattacattagctagaatacatcacaacattcacaacacaatatttttatttggtttggatattgaagttgttttcttgaattacttatgtagaactcaaaatttaattatgttgcgtatcgttttccttcaagaattcactgggaagttgtcatcagctttgctccaaaggtctttttcatcatttttctaactcttctggaaagtcgggagattctccctcactgctcctctttcattcagaattgagttcaaatatttctttacagccatttgttttctaaggcgggtatagttgtcagtgaagactgcatctgagtgaccgtttgactggtacctcggc

SEQ ID NO: 2722 - DNA, 609 bp, Homo sapiens
  misc_feature 355, 536, 565, 578, 604: n = A,T,C or G
actacttggttcccgatatggatgatgaagaaggagaaggagaagaagatgatgatgatgatgaagaggaggaaggattagaagatattgacgaagaaggggatgaggatgaaggtgaagaagatgaagatgatgatgaaggggaggaaggagaggaggatgaaggagaagatgactaaatagaacactgatggattccaaccttcctttttttaaattttctccagtccctgggagcaagttgcagtctttttttttttttttttttttccctcttgtgctcagtcgccctgttcttgaggtctcttttctctactccatggttctcaatttatttggggggaaataccttgancagaatacaatgggaaaagagtctctacccctttctgttcgaagttcatttttatcccttcctgtctgaacaaaaactgtatggaatcaacaccaccgagctctgtgggaaaaaagaaaaacctgctcccttcgctctgctggaactggagggtgctaggcccctgtgtagtagtgcatanaattctagcttttttcctcctttctctgnatattgggctcanagagtacctcggccggaacccgctangggcg

SEQ ID NO: 2723 - DNA, 516 bp, Homo sapiens
  misc_feature 28, 83, 113, 250, 269, 328, 397, 479, 481, 506, 507, 511: n = A,T,C or G
accaagaatgtgctgtcagaggacttgngctctggtctggtagcaaatgccctcagcgctgactccatatccctggctgtcanattctcttctacatctacactatagtccanaccctcaagtagctccttcatccctgtgatgtcaaagtcagctccattcctcggaggcagatggtcaaactctgtattgcatatgatgagagccaggcgtgtgcggttgtttctctcctttattggatagatctctncagctctttctttacatantctcaggaattcttcatgaggacaaagcttgagggcatctgtagattctcctgactcangtggtccagcctccatattcggatgagcttttttattgggggatatttggtctatgttaaaaaaggttngaagaagcatttgtcctgccatacgttgcttctcttgcatagagtctgccatgacccgaactttgtcttcagttttagcatngnaatatttctttttttcctgttcctnncagntcagt

SEQ ID NO: 2724 - DNA, 654 bp, Homo sapiens
  misc_feature 561, 607: n = A,T,C or G
acagacaaaactacagacttagtctggtggactggactaattacttgaaggatttagatagagtatttgcactgctgaagagtcactatgagcaaaataaaacaaataagactcaaactgctcaaagtgacgggttcttggttgtctctgctgagcacgctgtgtcaatggagatggcctctgctgactcagatgaagacccaaggcataaggttgggaaaacacctcatttgaccttgccagctgaccttcaaaccctgcatttgaaccgaccaacattaagtccagagagtaaacttgaatggaataacgacattccagaagttaatcatttgaattctgaacactggagaaaaaccgaaaaatggacggggcatgaagatactaatcatctggaaaccgatttcagtggcgatggcatgacagagctagagctcgggcccagccccaggctgcagcccattcgcaggcacccgaaagaacttccccagtatggtggtcctggaaaggacatttttgaagatcaactatatcttcctgtgcattccgatggaatttcanttcatcagatgttcaccatggccaccgcagaacaccgaagtaattncagcatagcggggaagatgttgaccaaggtggagaagaatcacgaaa

SEQ ID NO: 2725 - DNA, 427 bp, Homo sapiens
  misc_feature 229, 254, 263, 291, 330, 367, 376, 411: n = A,T,C or G
acagacaaaactacagacttagtctggtggactggactaattacttgaaggatttatatagagtatttgcactgctgaagagtcactatgagcaaaataaaacaaataagactcaaactgctcaaagtgacgggttcttggttgtctctgctgagcacgctgtgtcaatggagatggcctctgctgactcaatatgaaaacccaaggcataaggttgggaaaacacctnatttgaccttgccagctgaccttcnaaccctgcntttgaaccgaccaacattaagtccaganagtaaacttgaatggaataactacattccagaaggttantcatttgaattctgaacactggagaaaaaccgtaaantggacgggncatgaagatactaatcatctggaaaccgatgtctntggcggtggcattgac

SEQ ID NO: 2726 - DNA, 655 bp, Homo sapiens
  misc_feature 57, 58, 59, 570, 620, 624, 628, 637: n = A,T,C or G
actgtcacagaacttttacatacattctcagtcctagttgtgaaaggcctaaagagnnntaaactcaatttgcagtccaacacaaaggggggaatttctaaaataaataatccaacagttttttgcatttttttaaattaatttttcatttttttaaaataaaataaccaaaaaagtgtaaagttacaaaaaatgtccgttgaagaataatatattaaaactgtggaaaaaaaggaaaaagacacgtcacaaaattttaagattaatatgaagatcataatttaacataaaagaatatattctatggatttgtcatcccgataaatatgaacaaaattaacaaaaaaaagcatagtttggcaataaatcgttttgataagttaaataagcttttttatattgatgtgcagtgacaagcaaaatttttgctctccaatttctgaaagttatatgaagtttaaaacccagggaagaaaagcatggcgtgagtgctctaaggatagacctacggtattctagagcagaaccattaaagctacttctcaggaaatcgtttacacagatttggtntgtggaatggaaaccattaactgccacccttacttttttttttttagctntctntcantttttttgngggttttttttaaaaaga

SEQ ID NO: 2727 - DNA, 443 bp, Homo sapiens
  misc_feature 56, 57, 58, 59, 60, 61: n = A,T,C or G
actgtgattgaacatcctgaatacggagaggttattcagcttcaaggtgaccaaannnnnnacatctgccagtttctcttggaggttggcattgtaaaggaggaacagcttaaggttcatggattctaaaatgaacctaaatacgtggagaatttcttgaatagttttgttctctaaacccggtttggctgccttgtgaaatgattccctgcagtaaacggacttttcatttatttaatcattcaaacttccattcacatctgcatgattacagaaaacatggggtatgtagactagtaacacataagaaaattgcagtaagatggtaacaaaacctcatattgctttacatgtttccaatggaaaatgttttgagtgtttattgttcagtttattaccgtttcacttgattaaattttttttgttgttgtattaaaccatgt

SEQ ID NO: 2728 - DNA, 655 bp, Homo sapiens
  misc_feature 55, 57, 590, 627: n = A,T,C or G
acaaatacgcaaattttcatagtgcctagaaatagcacagatctattctactcantnttatttgtattttttcagggtattctacctagagcctgtggttaatcgcctccctgctccccctaccttttattccctaccccctcagggaatttggatacatgtgaggaatagtcctttgtttttcttatgaacctagaaaattacagatcataaaatctggatattaaagtagtttccaaaagcatctcatgggaaatcaaagtgctcggcatttccgagctggagaataaaatcaagaatccttaaaaaaaaaaaaaaaaaaaaaaagtcaccctatgagtggaagggtccattttgaagtcagtggagtaagctttatgccagtttgatggtttcacaagttctattgagtgctattcagaataggaacaaggttctaatagaaaaagatggcaatttgaagtagctataaaattagactaatctacattgcttttctcctgcagagctaataccttttatgctttgataattagcagtttgtctacttggtcactaggaatgaaactcatggtaataggctaacaggngtaatagcccacttactcctgaatctttaacatttgngcatttgaaaaatgcttttcgcgatctt

SEQ ID NO: 2729 - DNA, 585 bp, Homo sapiens
cagctgatgggaacgggctccaatggactggattgcattcaaaatattattttggacaggtttggaaaatgtgagggcccatatcatcataaccagcataaggagaccaacaccatatggtcccggcctatctggtggtatctgggtcttgcttccaattagaatacaacgagacacagcagcggtctatcgaatacaaatctggaatccaaacactcctgacgcataaaattacataacagtctagcatcacagtaagccccgcaattgagataccaatatggtgtcaacatggagaatttttttctgatgagctgcaagctctgattgcgcccttttcaatgcaaccaaaactgcatgagtttttgatttcagaccaactgtggctgaaccttgtttaacagcttcattgcatattcaatttgatgaatcctgccctgggggctccaaacagtgacatcattgtcatactgatttcgaaacatggtggcggcgcggcctggttgcggctcacaaaactgagaatcaaggaggtgctgccgaaagtatcgctcaacgatctacaaaaagtctggccccccgcgt

SEQ ID NO: 2730 - DNA, 630 bp, Homo sapiens
  misc_feature 6, 60, 250, 253, 428, 603: n = A,T,C or G
gtaccnggacagtgcatgtcacatatgatttcacaaaagttcatcttcattgcagatacntgcctttctttctaggttgtatctcccacttcacccttctagaccatcccagaagatctataagatttcatctgggaaatcactaggagttcttggaagggaaagaaggaagattgttggttggaataaaaacagggttgaatgagttccagaaagcagggttctcaacctcgtggacagcaatctgcanaanaagagaacttcaaaaaaccaactagaagcaacatgcagagaagtaaaatgagaggggcctcctcaggaaagaagacagctggtccacagcagaaaaatcttgaaccagctctcccaggaagatggggtggtcgctctgcagagaaccccccttcaggatccgtgaggaagaccanaatgaacaagcagaagactcctggaaacggagatggtggcaggtgaagtctctccacagcatgccttgggcctctctgctcaggagaaaaagccccccagttctacatgattcctgaggtcttctgttcttctgcggcctggcgctgggccctgcgccctggaaatagtgggtangactcggacactgcagaggtcctgccc

SEQ ID NO: 2731 - DNA, 656 bp, Homo sapiens
  misc_feature 655: n = A,T,C or G
acacaactgcaactctacataaatgccacagatgcagaatactgttttcttgctctatttacacagctgatatacctattctaacgaaggagggagaggagtaatgcacaagaaactcaggccaatgggggagcaagaagaaaacgaagaagtgcagtgcatgcgtcatcggtgtttaacagtcagaagcgaaacagttcagaacaaggcctgccctgtcaaaagaagagctaaagacagttatataaaaattaaggtgggctttcagactggctaacacaacaacattccatgagtagatggtaatttatttttgtttatccatttcgttgggagcaaggacaaaaatgtaaatctacaccttgcttatcaaaattgccgaaaaaagaatgctctgccttttaaaaaagtatcatgattttgtagaccttgttttccaatttaatatttggaaaaggtgtcattttcatattcctactcagatgccagtgttttgggtttttttccagggggagtttatttaaaacggttttgctcttttttttcgacaaatatcctttcaaacagaaagacccaaagagacacctcaaaatgcctgtaaaattattgcttttctttctctaagtcaggcaggcgaggctacggaaaggaagana

SEQ ID NO: 2732 - DNA, 523 bp, Homo sapiens
acctgggtgttccccaccttgggcatcatgcaccacaacaaacaggccactgagaatgcaaaggaggaagtgaggcgaattctggggctgctggatgcttacttgaagacgaggacttttctggtgggcgaacgagtgacattggctgacatcacagttgtctgcaccctgttgtggctctataagcaggttctagagccttctttccgccaggcctttcccaataccaaccgctggttcctcacctgcattaaccagccccagttccgggctgtcttgggggaagtgaaactgtgtgagaagatggcccagtttgatgctaaaaagtttgcagagacccaacctaaaaaggacacaccacggaaagagaagggttcacgggaagagaagcagaagccccaggctgagcggaaggaggagaaaaaggcggctgccctgctcctgaggaggagatggatgaatgtgagcaggcgctggctgctgagcccaaggccaaggaccccttcgctcacctgccaagagt

SEQ ID NO: 2733 - DNA, 473 bp, Homo sapiens
acttatttcaacaattcttagagatgctagctagtgttgaagctaaaaatagctttatttatgctgaattgtgatttttttatgccaaattttttttagttctaatcattgatgatagcttggaaataaataattatgccatggcatttgacagttcattattcctataagaattaaattgagtttagagagaatggtggtgttgagctgattattaacagttactgaaatcaaatatttatttgttacattattccatttgtattttaggtttccttttacattctttttatatgcattctgacattacatattttttaagactatggaaataatttaaagatttaagctctggtggatgattatctgctaagtaagtctgaaaatgtaatattttgataatactgtaatatacctgcacacaaatgcttttctaatgttttaaccttgagtattgcaagttgctgctttgt

SEQ ID NO: 2734 - DNA, 656 bp, Homo sapiens
actggtccaggagttatccaggatagattttcacccaccatggggcgtcatcgttcaaatcaactcttcaatggccatgggggacacatcatgcctcccacacaatcacagtttggagagatgggaggcaagtttatgaaaagccaggggctaagccagctctaccataaccagagtcagggactcttatcccagctgcaaggacagtcgaaggatatgccacctcggttttctaagaaaggacagcttaatgcagatgagattagcctgaggcctgctcagtcgttcctaatgaataaaaatcaagtgccaaagcttcagccccagataactatgattcctcctagtgcacaaccaccacgcactcaaacaccacctctgggacagacacctcagcttggtctcaaaactaatccaccacttatccaggaaaagcctgccaagaccagcaaaaagccaccaccgtcaaaggaagaactccttaaactaactgaaactgttgtgactgaatatctaaatagtggaaatgcaaatgaggctgtcaatggtgtaagagaaatgagggctcctaaacactttcttctgagatgttaagcaaagtaatcatcctgtcactagatagaagcgatgaagataaagaaaaagcaagttctttg

SEQ ID NO: 2735 - DNA, 656 bp, Homo sapiens
  misc_feature 642: n = A,T,C or G
acaaaatcccctttgttgaaaaataaggggctttctaaactaataaaaaaggaagttttcaaaaattatagtttattaaaacaacttttttggcaaacaaagttacttcaggtgaggaaattttatactgtgaataaaattccaaatgaatcttttcttaaaactttttaaaaaattatgtgccagtgtatactaatgctatagattcttgtcttagaagtttttaaagcattctgttaatgcccactgaaacaatgggactccaaaaatatagtcaataatcatgataaaaaattataatatgattatcaagtgaagcaggtattgagaaataaaaattctcacttgctcactggcaatttctttctaacagatattatggagaaggcctgaagtaattcagacagatagctgtttatggtgaattataataatacttcatgagggcagagctaattaaaactagtaattgcttaaaattcaaagccatttctggacatataaaatgagagatgaatctgaaagtttttcttttgtaaaacctctttccagttcttaaagtccagtttgctacatcccccaatctgatctaccattgcatattaatggatcaacttaaatgtggtatttagatgtgcatgncacattggtataat

SEQ ID NO: 2736 - DNA, 506 bp, Homo sapiens
  misc_feature 4, 10, 11, 24, 31, 38, 46, 54, 56, 57, 58, 67, 68, 74, 76,80, 115, 124, 130, 131, 135, 146, 186, 230, 253, 255, 259,260, 269, 305, 309, 344, 359, 374, 379, 384, 400, 412, 415,424, 447, 459, 461, 494: n = A,T,C or G
acanccaccnnctctgggaggacnttatccnactgaancccgacgnggacattntnnntaagggcanntgagantnagcncagcactaccttatgcgggccaatatcacagccanccgcagagnccggannacanacaataatcgnattgctagagcctgtggggcccggatagtcagccgaccanaggaactgagagaagatgatgttggaacaggagcaggcctgttnggaaatcaagaaaattggagatnantacnntactttcancactgactgcaaagaccccaaggcctgcaccatccncctncggggggctagcaaagagattctgtcgggaagtanaacgcaacctccagnatgccatgcaagtgngtcanactgntctcctggaccctcanctggtgccaggnggngggcctccnagatggctgcaggcccatgcctngacagaaaaacncnatggccatgactgggtgtgggaacaatgggccntacaagggctgt

SEQ ID NO: 2737 - DNA, 526 bp, Homo sapiens
  misc_feature 55: n = A,T,C or G
acatccagcagctctgtgaggacattatccaactgaagcccgatgtggtcatcanttaaaagggcatctcagatttagctcagcactaccttatgcgggccaatatcacagccatccgcagagtccggaagacagacaataatcgcattgctagagcctgtggggcccggatagtcagccgaccagaggaactgagagaagatgatgttggaacaggagcaggcctgttggaaatcaagaaaattggagatgaatactttactttcatcactgactgcaaagaccccaaggcctgcaccattctcctccggggggctagcaaagagattctctcggaagtagaacgcaacctccaggatgccatgcaagtgtgtcgcaatgttctcctggaccctcagctggtgccagggggtggggcctccgagatggctgtggcccatgccttgacagaaaaatccaaggccatgactggtgtggaacaatggccatacagggctgttgcccagccctagaggtcattcctcgt

SEQ ID NO: 2738 - DNA, 652 bp, Homo sapiens
  misc_feature 546, 579: n = A,T,C or G
accatgagaaatgtcggttcagatattgctgtgctaaggagacagcaacgtatgataaaaaatcgagaatccgcttgtcagtctcgcaagaagaagaaagaatatatgctagggttagaggcgagattaaaggctgccctctcagaaaacgagcaactgaagaaagaaaatggaacactgaagcggcagctggatgaagttgtgtcagagaaccagaggcttaaagtccctagtccaaagcgaagagttgtctgtgtgatgatagtattggcatttataatactgaactatggacctatgagcatgttggaacaggattccaggagaatgaaccctagtgtgagccctgcaaatcaaaggaggcaccttctaggattttctgctaaagaggcacaggacacatcagatggtattatccagaaaaacagctacagatatgatcattctgtttcaaatgacaaagccctgatggtgctaactgaagaccattgctttacattcctcccctccttgtcagcccctaattaacacaacagagtctctcangttaaatcatgaacttcgaggatgggttcatancatgaagtagaaaggaccaagtcaagaagaatgacaaatatcaacagaaaacccgtattcttcagggtgctct

SEQ ID NO: 2739 - DNA, 619 bp, Homo sapiens
  misc_feature 57, 94, 123, 126, 202, 204, 205, 214, 221, 222, 227, 236,237, 238, 239, 242, 257, 269, 278, 279, 284, 360, 362, 374,407, 409, 428, 452, 465, 472, 491, 504, 522, 523, 526, 532,558, 559, 565, 574, 578, 592, 612: n = A,T,C or G
acaggatgaatttaaatgtgtttttcctgagagacaaggaagacttgggtattcccnaaaacaggtaaaaatcttaaatgtgcaccaagagcanaggatcaacttttagtcatgatgtgctgnaangacaacaaatccctttttttttctcaattgacttaactgcatgatttctgtttatctacctctaaagcaaatctgnanngttccaaanactttgnnatggntttaagcgnnnnccnagtaaccaaaaatgnaaattcttcaancagagcttnnctggnaaaaagcatattttctgtgtttctggactgcactgttgtccttgccctcacatagacactcagacaccctcacaancncagtattctatntttaggattaaaataggatctgaacattcaaananaaagctttggaaaaaaaanagctggctgggcctaaaacctaantatatggatgaanattggtngactgtctttcccaagccncatgttcatgggnaggggcaatgggttattnnggntatttnactaaattgggttactctcattttcnnaatggncggaggganattnatattttggatcanggtgtttggctgttactaanaaacctt

SEQ ID NO: 2740 - DNA, 653 bp, Homo sapiens
  misc_feature 56, 57: n = A,T,C or G
acggtaactgactccagggtcactcatactgtgtccgtggtaacggtaagtctgcnnctccatcaggatgggccccttcccagatctacaataggcagcagcaaaccttgttgcctctcggacgcacaggatatccattccatccactctcagcccaggaatgaaatcgcctctcttgtagtaatcagtgctggctgccgctctctcaacagacgttcccattccatagcgattattctcacagatgaaaatacaaggtaatttccacaaagctgccatgttgtaagcttcgaatatctggccctggttagcagcaccatcgccatataaagtcaggcagacctcatcttttccattatacttacaggctagagcaatcccagcgcccaggggcacctgcgctcccacgatgccattgcccccgtagaagttcttggcatacatgtgcatcgatcctcctttccctttagcacaacctccttttcgtcctgtaagctctgcgagaatttctcggacggaaaggccccgggtgaaagtaaagccgtgagcccggtaggctgtgatgagatggctgtggggttgatgccggcctccagcccacacagcagcttcctgaccatcacacaagtgacagaaaccacgaataattttct

SEQ ID NO: 2741 - DNA, 657 bp, Homo sapiens
  misc_feature 58, 638: n = A,T,C or G
accagagtcaaggtgccagggtcctgggagcaacaaatgcattcccattgatttattnttgaaaaaccctctgatcagcctacccaaaggccctgccctaccctgccttgcctcacctacatacgttcagtttgtaattctttttccttttgctgcacaataactgcttccgtttacctttttcacggaagactctggcttggaaatctccaaaatgcatactttatctgtgttgtgggtttgtttagtatctcttcaagactcacttgctgacttcctaaccctcagtttctcacagtgtgactgtatttggaggtaggggctttaaagaggtgattaaaatgaagacattagggtgggtcctattccaatatgactgatgtccttatcagaagagtagatttaggacacagacaaaaggaaggccacggaagacagagtgagatatgaccatctgcaaccaaggagagaggcctcagaagaaaccaaccctgctgacatcttgcctccaacttctagcctctagaactgtgagaaaataaatgtctgctgcttgaaccatctggctgtgctactttggtatggcatccctagaaaactaatataatcaagtttgacaaatgcatcccaagcattantaaccagtgagcatctttg

SEQ ID NO: 2742 - DNA, 601 bp, Homo sapiens
actgggagatacagccatccaccttcagatgtgtctacgtgcgctctgccattcaactcggaaactataagtaattctcaagaaagccctcatttttataacctggcaaaatcttgttaatgtcattgctaaaaaataaataaaagctagatactggaaacctaactgcaatgtggatgttttacccacatgacttattatgcataaagccaaatttccagtttaagtaattgcctacaataaaaagaaattttgcctgccattttcagaatcatcttttgaagctttctgttgatgttaactgagctactagagatattcttatttcactaaatgtaaaatttggagtaaatatatatgtcaatatttagtaaagcttttcttttttaatttccaggaaaaaataaaaagagtatgagtcttctgtaattcattgagcagttagctcatttgagataaagtcaaatgccaaacactagctctgtattaatccccatcattactggtaaagcctcatttgaatgtgtgaattcaatacaggctatgtaaaatttttactaatgtcattattttgaaaaaataaatttaaaaatacattaaa

SEQ ID NO: 2743 - DNA, 559 bp, Homo sapiens
  misc_feature 247: n = A,T,C or G
acagcttaaaccacaatggtataaatcttcattttgtaattaataatttcttgcataacaatgtttgatatttgcaaacaaacaacatttttggaagcattagattcagtccatagattctgtgacaaaattaactacagtcagtctgtgcaatgaaattgatgttggagttctatgtgtgtggcatttcatgttgaaaacagatggtagtgctcctagaaatatttcttcttctagctaatgtgcnttggaactcacatgtataaccaatgactgactctgaaatatcaagcactgtggggtggctggaaggtaaaggtctaagctttgtgaaacactatacatatataatctatatttacttatgttggcaattaatataacagtaaaagtcacaatacacctagaacataccagaaaagcaagctttgtcattcctgctttaccggtatgatctcgtctaaacaaacatttcatttcagaaaatctgcatcaatctacacggaccatacacagtgcacaaactgaaaagggctttttttttttttttctcccgcgt

SEQ ID NO: 2744 - DNA, 645 bp, Homo sapiens
  misc_feature 232, 609, 642: n = A,T,C or G
accagcgattcctgcggcaacacgtgcaccctgaggagacaggtggcagtgatcgctactgcaacttgatgatgcaaagacggaagatgactttgtatcactgcaagcgcttcaacaccttcatccatgaagatatctggaacattcgtagtatctgcagcaccaccaatatccaatgcaagaacggcaagatgaactgccatgagggtgtagtgaaggtcacagattgcangggacacagggaagtccaaggcacccaactgcaaatatcgggccatagcgagcactagacgtgttgtcattgcctgtgagggtaacccacaggtgcctgtgcactttgacggttagatgccaccatgtagggattatcgcgagtggttgaccttacacttactccttaaatagcagtgagtaatgcatttgagctgtcccaggctctgtctcctcagctcatttcctactctttttctctatataactcattctattaaatacattgcaccaaagagatatggagacataaacctgtaatgaatgaggctgggcttttctgtaataagcttccttttataatactggtcagcttagctctctcagatcctatcctgnggaatttagttattatggggtatttatgtaagnatt

SEQ ID NO: 2745 - DNA, 644 bp, Homo sapiens
  misc_feature 237, 247, 248, 565, 617, 619, 631: n = A,T,C or G
acaacttatagaaaaggtaaaggaaaccccaacatgcatgcactgccttggtgaccagggaagtcaccccacggctatggggaaattagcccgaggcttagctttcattatcactgtctcccagggtgtgcttgtcaaagagatattccgccaagccagattcgggcgctcccatcttgcgcaagttggtcacgtggtcacccaattctttgatggctttcacctgctcattcaggnaatgtgtctnnatgaagtcacacaaatgggggtcatttttgtcagtggccagtttgtgcagttccagtagtgactgattcacatttttttccaaatgtaatgcacactccattgcattcagcccgctctcccagtcatcacagtctggtttcttgatatcctgaaggaagattcggccacctcgttggttctgcagcttcatcagtttctcagcatgttccctctcctcatgagattggtgaagaaagtatttggcaaagttcttcaaagccacatcatcgcggtcaaagtagtaaagacatggacaggtaaacgtaaggaggcgtanagctccaggttgatctggcggttgatggcggcctctgagtcctgggggtagntnttggcgccctgngaagtggacgccg

SEQ ID NO: 2746 - DNA, 646 bp, Homo sapiens
  misc_feature 479, 492, 496, 500, 524, 533, 560, 569, 580, 583, 592, 607,612, 625, 626: n = A,T,C or G
actgggagatacagccatccaccttcagatgtgtctacgtgcgctctgccattcaactcggaaactataagtaattctcaagaaagccctcatttttataacctggcaaaatcttgttaatgtcattgctaaaaaataaataaaagctagatactggaaacctaactgcaatgtggatgttttacccacatgacttattatgcataaagccaaatttccagtttaagtaattgcctacaataaaaaaaattttgcctgccattttcagaatcatcttttgaagctttctgttgatgttaactgagctactagagatattcttatttcactaaatgtaaaatttggagtaaatatatatgtcaatatttagtaaagcttttcttttttaatttccaggaaaaaataaaaagagtatgagtcttctgtaatcattgagcagttagctcatttgaaataaagcaaatgccaaacactagctntgtattaatcccnatcntacngggaaaagcctaatttgaatgggngaatccaanacaggcttggaaaatttttactaaggncattatttngaaaaaataanttnaaaaatacnttcaaatttactatngtaancaccttaattggnnaatattccctaaacacaatt

SEQ ID NO: 2747 - DNA, 648 bp, Homo sapiens
  misc_feature 619: n = A,T,C or G
accactccagttgtcttcacaatttaatgctacagaaacctaaatgtttctacttcagctacgaaatcattcaattggcaggcaaaacattttttattacctatttataaaaacatgagaaagggaggaaaaataatagaatgtataaactcatgctatcataattctaatgtctagctataaaggcatatggttgtaacaattgctatctaaaattttttattagctgcagtagctgctttcattttcattaccattttttaaagtctttttgcttggtcatctaaagacgtttttcaaatttcaaaagatcagctattattgtcctccttgtgcccctaaggaattaataaaatgcacattcatttccttctttctaaatgttccagttaaaaacgaaacaatgcaaaaatggcaaacattttcttggaccatttttttcactgtaacaacaaaaaatgtgcaaggtaaatagaactcaagttttgttttattttttggctgtttgtattttaataagtcccgccagaataatacaggttacatagctgtaaccatcttaaggaaaatgacattaagtttgcaacaaatacttgctgggtgaaaacacattactagncatttcaaaaatttacaaaaatgtaaaca

SEQ ID NO: 2748 - DNA, 619 bp, Homo sapiens; identical to SEQ ID NO: 2739
  misc_feature 57, 94, 123, 126, 202, 204, 205, 214, 221, 222, 227, 236,237, 238, 239, 242, 257, 269, 278, 279, 284, 360, 362, 374,407, 409, 428, 452, 465, 472, 491, 504, 522, 523, 526, 532,558, 559, 565, 574, 578, 592, 612: n = A,T,C or G

SEQ ID NO: 2749 - DNA, 559 bp, Homo sapiens; identical to SEQ ID NO: 2743
  misc_feature 247: n = A,T,C or G

SEQ ID NO: 2750 - DNA, 645 bp, Homo sapiens; identical to SEQ ID NO: 2744
  misc_feature 232, 609, 642: n = A,T,C or G

SEQ ID NO: 2751 - DNA, 644 bp, Homo sapiens; identical to SEQ ID NO: 2745
  misc_feature 237, 247, 248, 565, 617, 619, 631: n = A,T,C or G

SEQ ID NO: 2752 - DNA, 646 bp, Homo sapiens; identical to SEQ ID NO: 2746
  misc_feature 479, 492, 496, 500, 524, 533, 560, 569, 580, 583, 592, 607,612, 625, 626: n = A,T,C or G

SEQ ID NO: 2753 - DNA, 648 bp, Homo sapiens; identical to SEQ ID NO: 2747
  misc_feature 619: n = A,T,C or G

SEQ ID NO: 2754 - DNA, 650 bp, Homo sapiens
  misc_feature 219, 226, 227, 266, 289, 294, 307, 319, 321, 335, 338, 341,344, 346, 365, 367, 376, 385, 390, 398, 414, 415, 416, 435,437, 447, 448, 451, 464, 467, 473, 477, 483, 492, 495, 502,503, 505, 522, 530, 535, 542, 549, 550, 553, 555, 562: n = A,T,C or G
  misc_feature 563, 570, 573, 575, 578, 591, 597, 601, 603, 608, 614, 615,618, 629, 630: n = A,T,C or G
accctgatgctacagacgaggacatcacctcacacatggaaagcgaggagttgaatggtgcatacaaggccatccccgttgcccaggacctgaacgcgccttctgattgggacagccgtgggaaggacagttatgaaacgagtcagctggatgaccagagtgctgaacccccagccacaagcagtccagattatataacgggaagctattgatgaaaancatggannttccgatgtgaatggatagtcaggaactttccaaaggcngccgggaattccacagccttgantttcnaagccttgaaaantttgctggttgnanacccccaaaaggtnaanaanaanantaacccccccaaaatttcngnttttcaagnaattaaaangggcntttttttnggggccaatttaaagnnnaaaaaaatcccatttttcncntttggttttnnccnaaaaaaaaaaatngtntttttncccnaatggnaaaagaacnccnggaaggnngnttttttccaaattttangggggganggggngtttttntgggggnnggngnaaaaaanntaggggnggnanaanaaaaaataaaagngggggntttnanggaancccccnnganaaaaaaaaacnntgggggggtttttttttttt

SEQ ID NO: 2755 - DNA, 642 bp, Homo sapiens
  misc_feature 183, 186, 210, 222, 226, 228, 232, 249, 282, 290, 292, 295,297, 306, 310, 331, 339, 346, 348, 353, 366, 377, 379, 394,404, 433, 439, 454, 479, 481, 482, 488, 491, 492, 502, 506,517, 518, 524, 528, 538, 541, 555, 593, 596, 606, 614: n = A,T,C or G
  misc_feature 616, 638: n = A,T,C or G
acgcgggggacttccgggtcgcggtgcttgaagggagtgttccgtcgtttccgttgccggctgtttgcagtggggaaaccgaggcagctcctgctccccctagttcttccgctcctgtgaggaaaaaaaatgtttatttctttgtgggagttcttctatgggcacttttttcgattttggatnaantggctattacaacagatgactggnaagtgtgaattngcancnaatnttgatccttatgtaggngcccaaaggaacccccgggataaaaaattcctngacatacncnaanantaaggtttnacanaaggcaacacatgttgttcanagtgaagnggacaantntgtanatgattttatganggaaaagaatntnccccctgagaaggangccattttanaaaaatatgcatgaagatgtgccttctgnaaatanctgtttataaacagnttgtttttggatgaaaaaagggggnannaaaaangcnntattattttnattnccctaccgaanngaaaangctnctcatgaagnttnggaatcttctaatncccacgaaaaaattaaccccctaatattctccaaagcnggnggacttaaanttgttttngnggggtgatgaacccaaaaacanactt

SEQ ID NO: 2756 - DNA, 648 bp, Homo sapiens
  misc_feature 80, 125, 178, 237, 257, 261, 263, 272, 276, 315, 326, 336,348, 366, 374, 376, 379, 383, 384, 386, 387, 389, 403, 416,425, 426, 435, 443, 449, 450, 453, 459, 460, 472, 475, 479,484, 487, 497, 498, 501, 505, 506, 508, 510, 511, 525: n = A,T,C or G
  misc_feature 532, 542, 543, 545, 554, 555, 579, 592, 596, 606, 610, 617,628, 631, 636: n = A,T,C or G
gtacattggaatgtctgccaatcaggaagctccccaagccttcactggccagagtttttatttggggtttctttacatangcagcattgcttaaatcactggccatgttaaaatttgaactcaanttccagccccatcacctccttggagattgggggtgggatggggctgaaaattncaatgctttaaccacatgcttggtctttctggctttggccaactcttcttgaaactaanggcccacatgggtaaccttngttngnttaaccccnagcnttgggtgaaaaagggctttggtattgaatacaaaaaganactcctatcangaaacttttngaatttttgaancctgtgtgcttaggaacnatggcacnanaantccnnanncnttctttattgtatnaccactggggatntgcccacanngataaaaantttaagtnaggggnntgntgaggnnaaaaacacctanacncttnaagtnttntttaaagctnnagncccnngngnnaaaagttctttttnttttggnaaagaaaganncntcctggggnngggggggagaaaaagcacggcttnttaaaaggaaaanaacnacccgccctncttntaaaatnttaccaccagnttntaatnttgagccttttg

SEQ ID NO: 2757 - DNA, 646 bp, Homo sapiens
  misc_feature 224, 228, 248, 403, 465, 472, 504, 505, 534, 539, 542, 558,560, 565, 574, 577, 578, 590, 591, 598, 600, 613, 622, 628: n = A,T,C or G
accagcagtgtgtcaggtgctgcagagcgttcttggagaaggcccactgaggcaggttcgtgccctgctgcggccagcctgactagaccccaccctgaggtcctgcatttctcagtcggtgtgtaatcacgttccagggcccaaagcccagctctttgttcagttgacttactgtttcttaccttaaaaagtaattgtagatggaaatcagttgtgtttggcangganaatcaataaaaaatttttgnttcaaacagctttatggggtattttaagcattcttaaactagttgaacatctcactttgcccagttacaaaaatagtagaacaaagcaacataaaacaatgaaggaaaacctcacttgaaggcccaggtcaacatctaagcctgttgagacttanataatcgagtctacctctttagtagtttgtgtggatggcctggaaggcaaggtgccttttgntccccantggttactttttttttcctaagggccttttgnnggattgacaagtaatccccttcgtaggancttanaantctaaaattagaaagngnttttnattttctanacnncccataagtgcnnacttgtntnttggaaaaaatangggaaaaanaaaaanatttattggaattcagtc

SEQ ID NO: 2758 - DNA, 641 bp, Homo sapiens
  misc_feature 215, 244, 245, 249, 254, 305, 306, 327, 410, 427, 428, 432,436, 446, 450, 454, 467, 469, 477, 491, 494, 495, 527, 543,546, 549, 550, 558, 559, 567, 568, 570, 572, 588, 596, 604,615, 623, 631: n = A,T,C or G
acgcggggagcgtaagacggcgctattccgctgtaacagcttccggcgggtcctggatgttgatgtcctgcatctaacgcggtgtaacccccgaagccgagcgagctccggaggaatttcagtatctgctacggtaacttcatcagcccgccaagatggcgatgcaagcggccaagagggcgaacattcgacttccacctgaagtaaatcggatnttgtatataaaaaattgccataaaaaatnncacntgaanaaatgtttattttttttgggaaaaattgaccctatttcgtcaaaatcagannggggaacacaccctgaaactngaggaacagcttatgttggtctattaaggacattttttgatgcccaagaattgcatgtgatcacctattgggattcaatggtntgtaacaagataccttnntggntttntaccttgccnggcngccngttcgaaaaggcnanttccacanaactggccggccgntanntagttgatccgagcttggtccccaactttggngtaaataaatgggcanatnctnntttctggnngaaatttnntntnccggtcaccaattcancaacttantaacccgnaaactataaantttaaaanctggggtnccctaattaa

SEQ ID NO: 2759 - DNA, 646 bp, Homo sapiens
  misc_feature 231, 246, 256, 288: n = A,T,C or G
acgatttcgttctctgattccagcagagggaacgctatccaaaaagttggcagcaataaaacgtaaaattcatcctgatcagaaaaatattaatgcctatgttgtgtttaaggaggagagtgctgccacgcaagcattgaaaagaaatggggcccagattgcagatggatttcgtattagagttgatctcgcatctgagacctcatctagagacaagagatcggtttttgnggggaatctccttantaaggtgaanaatctgccattgagaagcactttctggactgnggaagtatcatggccgtgaggattgtgagagacaaaatgacaggcatcggcaaagggtttggctatgtgctctttgagaatacagattctgttcatcttgctctgaaattaaataattctgaactcatggggagaaaactcagagtcatgcgttctgttaataaagaaaaatttaaacaacaaaattcaaatccacgattgaagaatgtcaagtaaacctaagcagggacttaattttacttccaaaactgcagaaggacatcctaaaagcttatttattggagaaaaagctgttctccttaaaaccgaagaagaaaggacagaagaaaagtggacgccctagaaacagagaaaacag

SEQ ID NO: 2760 - DNA, 648 bp, Homo sapiens
  misc_feature 241, 248, 250, 289, 614: n = A,T,C or G
accaagggatggaagaagtaaatatagctcaggtagcactttatactcaggcagatctcagccctctactgagtcccttagccaagcagtttctttcaaagaagccagcaggcgaaaagcagggactgccactgcatttcatatcacactgttaaaagttgtgttttgaaattttatgtttagttgcacaaattgggccaaagaaacattgccttgaggaagatatgattggaaattcaanagtgtananaattaatactggtttactggccaaagacatgtttatagngctctggaaatgttcctttcctttgtagtctctggcaagatgctttaggaagataaaagtttgaggagaacaaacaggaattctgaattaagcacagagttgaagtttatacccgtttcacatgcttttcaagaatgtcgtaattactaagaagcagataatggtgttttttagaaacctaattgaagtatattcaaccaaatactttaatgtataaaataaatattatacaatatacttgtatagcagtttctgcttcacatttgattttttcaaaatttaatatttatattagagatctatatatgtataaaatatgtatttngtcaaatttggttacttaaatatataagagacca

SEQ ID NO: 2761 - DNA, 648 bp, Homo sapiens
  misc_feature 245, 254, 262, 538: n = A,T,C or G
acccaactggattgtcatcttctgagaatgcaaactgcagaccccatatctttgaggatcctttcagtatcaactctggaaagaaaatgactacatcaactgaccatctcaaacgaggcacaattctggactgcaatacatgtaaatttgctaccatcacatgtaatctcacttcttctgacatcagccaagtcaatgtttcgcttatcttgtggaaaccaacttttataaaatcatattttccnacttaaatnttactatnaggggaaaacttcggaagtgaaaatgcatctctggttttaagtagcagcaatcaaaaaagagagcttgctattcaaatatccaaagatgggctaccgggcagagtgccattatgggtcatcctgctgagtgcttttgccggattgttgctgttaatgctgctcattttagcactgtggaagattggattcttcaaaagaccactgaaaaagaaaatggagaaatgaaatattttacgaaagaaaataataacaattattcaataatctatcctcangtttgcctcaaatatgtgacaagaaatgtataattcatgacatagtcatgttactatgtaatccatcagggattcattacttgggaaaatgacagggtcatgcattatcc

SEQ ID NO: 2762 - DNA, 649 bp, Homo sapiens
  misc_feature 87, 105, 110, 114, 155, 159, 205, 208, 210, 229, 239, 244,245, 246, 249, 253, 255, 256, 257, 262, 263, 264, 265, 270,275, 279, 284, 294, 330, 378, 418, 457, 478, 503, 509, 514,523, 557, 639, 641: n = A,T,C or G
actttttttttttttttttttttttttttttacaaaagttgttacacaaatacagctgaccagaaggtctaaaaacagcccaaactnttccaaccctcatgcatntgtanatanaaggagagctgtggtcttgctcacacacaggggagcccttnttanaaaaactgcctgtcccttggaaggttcaaagtcttgggtccagcancananaggagcccaacctgcgtgnacaacccttngaggnnnccntggntnnnagctnnnntgggngggcnacangtttnagtttcatanttcacatgttcccaccacacaagtcaaatcaaggcntgaaaataaaagggaaaaaggggaaggctggaaaagggagcctggaanaggttgcaggtaggggaaggagacacagtgggcttccganaagctggcaatttcttgacttggatggagttacgtaatnttcactttaaaattattcttnaaattgtacgtacagcattggcagnggtgcngttanaggtggcanaactatttcacactaaccagtttgaagacctacncaggattaattaccttccagcatcaggattatagctgggggattttacaaaccattcttattttctaactttcagggagttngntgtttttt

SEQ ID NO: 2763 - DNA, 543 bp, Homo sapiens
  misc_feature 255, 256, 261: n = A,T,C or G
acctcaggcctgggcacctctttgcttgaaatatggcaagacttggaaaaatgtttgcccttagaatctatctcactactttagttagttgtctcctttgggcctgggcacagttctggccctgatctggaacagactcccttttctaaaactaaacttgaccacatcaaaagtttgtaaaacaatctccatggtaattaaacttgcattcaacaccatatggtaacagaagatggcaaaggataaaatccaaanntaaanctttccaaggagggcatgttagatgatagaaggattaattgcaagctggatctgagctcaggcttgggcatgaaggaaactgtctcccatgtggtttggaagagttaggggctccctgagctctattgtgaactatacgggtttcatccaaggaatggtatgatgtgggcataaaaccattcttcagacaactgaagatggtccccttctgtagccagaaacactagctgtcctgcattgtccatttcctttagccccaggcggtcctgtgtgtacctcggc

SEQ ID NO: 2764 - DNA, 489 bp, Homo sapiens
  misc_feature 234, 254, 255, 288, 460, 479: n = A,T,C or G
acatcaaagattacatgaaatcaatcaaagggaaacttgaagaacagagaccagaaagagtaaaaccttttatgacaggggctgcagaacaaatcaagcacatccttgctaatttcaaaaactaccagttctttattggtgaaaacatgaatccagatggcatggttgctctattggactaccgtgaggatggtgtgaccccatatatgattttctttaaggatggtttagaantggaaaattgttaccaatgnngcaattattttggatctatcacctgtcatcatnactggcttctgcttgtcatccacacaacaccaggacttaagacaaatgggactgatgtcatcttgagctcttcatttattttgactgtgatttatttggagtggaggcattgtttttaagaaaaacatgtcatgtaggttgtctaaaaataaaatgcatttaaacacataanaaaaaaaaaaaaaaaaaangtacctcggc

SEQ ID NO: 2765 - DNA, 650 bp, Homo sapiens
  misc_feature 246, 248, 255, 256, 262, 274, 280, 288: n = A,T,C or G
acgaagttctcagtttcactttagtagaaagagctctagaaatgaggctgataaacacatctaagaacactggttgctttctaaaatttccaaagctccaccataaatgtaatttttagtgtttcaaatgattgcattttaaagtatataaatatgggttatccaatatcaatgctatagtaacatcctgaaacaaaacaagcacaaaggtataaatgcctaaactggaggaaacttggaaccctnanggtaaannctaaangtagtatttctnacttgngaagacanattggtaggcagccatttttttgtgtcttaaaataactgggggcatagttaaaattttatacatcaagtgattgctattattgaatgttgcaggtgagatgtggttatttttagtttatttgaaatgtttgactggaaaggggggagggggaagcaaatatttgaaatttggaaaaccctaaaccttttggtaagaaattgtaattttcacttaaaattttctttaaggatataagaggtttataattgatgtagttaaattgaacaataaaccattggtgactggagcaggtaattatagcctgcagaaaaaattatctaagaattttaaaaataagaacctgaaagttggtttaaattgc

SEQ ID NO: 2766 - DNA, 470 bp, Homo sapiens
  misc_feature 218, 253, 257, 276, 288: n = A,T,C or G
actaggaaggttattgcacagctccttaactgatcggggtcagggcagagtggtcactttccccacagccaggctctggatttgcctcctgtgaagacaccatgcctagcacaggctgacggggcggctgcagtcgaaccttgcctccagattatgaaccagtataagtagcacaattctcgtggctactttcacttcagagtgcatgtttattgatntggagctttctgataggaaggtaaggcccacctgntgantaaaacaaatatttcttgngtagcgttctanattgagggcagcagtcaatggtaaaataaacttcagtagcatgttcctgtcaggttatatggcagccctggctcaaggatttctccccctgcacgattcctaagactgtttgctagctgattctttgttttggcaatttgatggttttgatgaatttgctgtgatccaggggtgttcaaagt

SEQ ID NO: 2767 - DNA, 650 bp, Homo sapiens
  misc_feature 245, 247, 296, 647: n = A,T,C or G
accaagggatggaagaagtaaatatagctcaggtagcactttatactcaggcagatctcagccctctactgagtcccttagccaagcagtttctttcaaagaagccagcaggcgaaaagcagggactgccactgcatttcatatcacactgttaaaagttgtgttttgaaattttatgtttagttgcacaaattgggccaaagaaacattgccttgaggaagatatgattggaaaatcaagaagngnaaagaattaattctggtttactgccaaagacatgtttatagtgctctgnaaatgttcctttcctttgtaagtctctggcaagatgctttaggaagataaaagtttgaggagaacaaacaggaattctgaattaagcacagagttgaagtttatacccgtttcacatgcttttcaagaatgtcgcaattactaagaagcagataatggtgttttttagaaacctaattgaagtatattcaaccaaatactttaatgtataaaataaatattatacaatatactttgtatagcaagtttctgcttcacatttggatttttcaaatttaatatttatattagagatctatatatgtataaatatgtattttggcaaatttgtacttaaatatatagagaccangtt

SEQ ID NO: 2768 - DNA, 647 bp, Homo sapiens
  misc_feature 184, 216, 219, 235, 239, 240, 241, 247, 249, 253, 506, 546,630: n = A,T,C or G
accttgatacacataatcagccttttcaaaaatgcctgacaagaattagtctttcctttgtgctgaagtcttcccacccatggatggaagcaggctgactccctgagggtcaggcaaggggtgggaaagggaacacattacttttgtgaaggcaaagcagaaaggcgtgtttgccagaccagcntggcagctcagagggagcaaagcttccaccanaanaagcttctcatttttnttgnnnggcctnanagtnaaatttgaagctgagttaacaatgggaccactgaacttctttccaatggaaaactcacggtccagtcccacaggaactgtgcgcataccaaacaacaatgaggaaggaagggccgggtggctctaccaaacagttcaggtccactgggtgaatgaagcctggtgggaaagcggactcctgaagttggcgccctctgctggtcccacttctcatcgtggcgggtcgactgcctgagtagaggaagaggctacangatggggtttgacaaaaaagggagtgagggggaaccccangaagatgaagccaaaactccaaactttattctgctaattcagttttttgatcaaaaaattcaaaaattagaggaaacccacaanagtacccccggcccgcg

SEQ ID NO: 2769 - DNA, 503 bp, Homo sapiens
  misc_feature 244: n = A,T,C or G
acatcagggacctgtgcagtgggctcaagccagacacgcagccacagatgattcaggccaagctcttaaaggcagatcttcacggggctattatttcagtgacaaaatccaaatgcccctcttatgtgggtattacaggaatccttctacaggaaacaaagcacattttcaaaattatcaccaaagaagaccgcctgaaagttatccccaagctaaactgcgtgttcactggggaacccgtggntttatttcctacatttacgggagcaaattccagcttcggtcaagtgaacggtctgcgaagaagttcaaagcgaagggaacgattgacctgtgaattctttgccgtctaaggcagttgtttatgacagctgaaaactggacactccctaaatgtccacctttcagtgaagagatagttaagccaattccatttatagaccacctccagccagtgacgctccgagttgaggatgttgaacaacatgggaaggtcgcagcgt

SEQ ID NO: 2770 - DNA, 645 bp, Homo sapiens
  misc_feature 248, 282, 290: n = A,T,C or G
acttacaaagttacaaccatttgcttccttaacattttccatgttaagttcatacatgtagatatgatcagatttaccatttttagggggaagagggaaaaaaaggtgtatttatcatcagctagatgtgctcactgtatgctccgttatttatatgcaaggcccgggtgactggaagtgcagttgtcaggcattttaataaactggacagccatttgtttctgccgacaaggcttcttacacaggancattcgggaaaaaacaggaaacaaccaagcactntgcactgnaacacgccaccttaacagctaaccagcattactcaactgctacacaactgcgcctagtgcacaaaaatacataagagaagagattagaattgtgtttgataaacaatcctttcaaaaaatcaagtcttttcacctgaaaagtctttatacaaatttgggttcagattaccatttagatctgaaggtaaataacatatacaaatttacaccaacttttgtaggtttttaattttaaggaatgaaggcaatgccgagtcaatatcttgacagctttaggctgtgtgtaatggctgcacacgttttccttaaaagtcagggaggccacaaaattagggtacccaatctggttaatttc

SEQ ID NO: 2771 - DNA, 505 bp, Homo sapiens
  misc_feature 207, 208, 209, 210, 212, 243, 259, 260, 272, 277, 279, 284,285, 290, 292, 299, 300, 303, 306, 326, 342, 353, 356, 361,367, 372, 407, 408, 412, 419, 441, 449, 451, 461, 474, 479,494: n = A,T,C or G
acgcggggtatcttgatgcagtaacttatagttgtgatcctgcacctggaccagatccattttcacttattggagagagcacgatttattgtggtgacaattcagtgtggagtcgtgctgctccagagtgtaaagtggtcaaatgtcgatttccagtagtcgaaaatggaaaacagatatcaggatttggaaaaaaaaaaaaaatannnngngggtccttttttttttttttttttttttttntccgggagggaactgnncttttatggggngcccnangacannaaaancnttagccnnagncanagggccctgcaaccagcaanaaaagaaaaggttttngcagtaattgntanaaccnggcganaaacncaggtggaaaagggttggggtgcccaacccctcanncccnggggagnttttttgccccttcctgccaanaatccggnanctgcccgggngggccgtttaaangggcnaaatttccaacaccncttggggggcc

SEQ ID NO: 2772 - DNA, 646 bp, Homo sapiens
  misc_feature 255, 499, 543, 642, 646: n = A,T,C or G
actctttgttttggcacacttttcctgacaaacagccagtgttctcaacacataaatactagtccacgttaacaacaatagcatatgagaccgctctccgtaaagatgccagattggatgcaaatggactggaaataccttggagggtttcacaaaaataagacaaagggcaaaggaactttgccaaaggagatggagagcaattctttaaagatagtgggaaggaggaaccaaaaacttataaattccagcctnttaaaatgggacgcatttgcctcgcgcctactgggtgtctgcagctcagcttggtgccccacacaggacaccgactttaagtggctgcctttgcaaggctgagaggccatgagggttgatgcctgaagtgtcagcgccatctagtggaaacatggggcatggccgctttggacggcctcagcctaaaatgagaggcagagagacacgctctatttcgcatctcacaatgcaagatgagagaaangcttgttgagtttttatttcatcatcgcccgtttaaggtcaaangagatgccctttggcttccaagtcatcaatcaactggcaacacccaaggaccaggctgggcttcatttgcacattccattttagcccaaggtagaaatnggan

SEQ ID NO: 2773 - DNA, 522 bp, Homo sapiens
  misc_feature 40, 63, 64, 225, 228, 231, 241, 247, 261, 272, 276, 290,337, 352, 377, 390, 402, 405, 413, 414, 428, 448: n = A,T,C or G
acatcttaggtttttcttcctttagtgtgaagaggcgttnccaccaacccacagctctgcgtnnagtttttactagattgctgcaaatttcatggaatctttgctgttgttcaatggtccatttattggagccaaaaattctaggcgctagaatgggaacaaggtagtcagccaagcacaaaaacataacaaaacaggaaacgccggacagacagatggatctanatngtngaataatcanaaacancaaaaaaacccccnccatgatgggnaggnggaaaccaaggctntttccatcggaagactttatcaaccatcagcatcacttctccccatncttgcagctgtcttncaacttgcagtctctgcaccagcanggtggtgcttgcnattatctccctncgncatcgctnnggggatgcaatctntacaaagcgcaggccacctncccaacgaagtccttcaacccaaaaccggacaccaaaccaacaaacccccggcgttaccttgggccgggacacg

SEQ ID NO: 2774 - DNA, 522 bp, Homo sapiens
  misc_feature 61, 84, 98, 104, 106, 142, 149, 150, 170, 217, 227, 251,253, 258, 268, 273, 283, 312, 338, 344, 348, 355, 389, 399,410, 484, 508: n = A,T,C or G
acttttttttttttttttttttttttttttttttttttttttttttttttttttaaaaaanaatttttaaaatttatttttatntttcctaggaaggntttacncncttttataaaaattaatgtttaaaggactgacatangaaagcnncctccagttaaaaatagtgngcccgggctcgggggctcacccctttaatcccaacactttgggaggntgaggggggnggacaacctgaggggaggagttcnanaccancctggccaanatggngaaagccccntccccaataaaaatacaaaaaaaaattanccgggcgtgggggcccatgcctgtantcccanctgnttggganctgaggcaggaaaatcgcttgaacccaaaggcanaggctgcagngagcccaaatntcaccattgcactcctgcctgggcaacacagggagactccatctcaaaaaataaaatataattgctggaggganataacaagactgaaaacagtcctnggccgggaccacgc

SEQ ID NO: 2775 - DNA, 603 bp, Homo sapiens
  misc_feature 294, 386, 431, 587: n = A,T,C or G
actcctggtgtatttatgggacccacaaatataccatttacctcacaagcaccagctgcatttcagggctttccatcgatgggcgtgcctgtgcctgcagctcctggccttataggaaatgtgatgggacagagtccaagcatgatggtgggcatgcccatgcccaatgggtttatgggaaatgcacaaactggtgtgatgccacttcctcagaacgttgttggcccccaaggaggaatggtgggacaaatgggtgcaccccagagtaagtttggcctgccgcaagctcaacanccccagtggagcctctcacagatgaatcagcagatggctggcatgagtatcagtagtgcaacccctactgcaggttttggccagccctccancacaacagcaggatggtctggaagctcatcaggtcagactctcancacacaactgtggaaatgaaaactgcaatacaagtttcatccagaactaccacctgacattccttgctgaaacgcatctagttcccctgttattcatatgcatattttttttctttttacccatttggtcatattaagaatgatctgattgaccgngtttggtcttgtacct

SEQ ID NO: 2776 - DNA, 405 bp, Homo sapiens
  misc_feature 32, 34, 80, 109, 112, 119, 130, 141, 142, 149, 160, 161,164, 172, 177, 181, 206, 214, 235, 276: n = A,T,C or G
actttttttttttttttttttttttttagaananatggggtttcacgatgttggctaggatggtctcgatctctggtcanagtcttttctgtaaatatccttggtaaanaancaatttnatactgaaacngccgcaaatanntatatgnataaacctgcnngangaggaganagaangganaaaacaattatgttcctgaggtctnagccttgnatcaggagattattgaagtanatcctgacactaaggaaatgctgaagcttttggacttcggnagtctgtccaaccttcaggtcactcagcctacagttgggatgaatttcaaaacgcctcggggacctgtttgaattttttctgtagtgctgtattattttcaataaatctgggacaacgaaaaaaattag

SEQ ID NO: 2777 - DNA, 454 bp, Homo sapiens
  misc_feature 49, 195, 207, 215, 217, 232, 237, 246, 251, 259, 268, 271,273, 285, 289, 295, 302, 308, 310, 318, 326, 330, 342, 353,355, 358, 366, 369, 370, 380, 384, 392, 395, 398, 407, 410,416, 424, 426, 431, 432, 440, 443: n = A,T,C or G
accttttattggtataagaacgtaagttccagattaaccatgtcattgnttcattttcaccatggattttttttcacaaactcctttgaaattaaacagacttatatgtaaatgtctttctacattaaaactacttcccaacccacaaagaccccacttactactaatttctggggaatttcgtttactcgtttnatctaatattanaaaatcancnttttgccagcagttnaaaanacaaccttnaaganctcaaatnactttccancantnccggaaaagaanaccncccatntccaaanctttanancaataaanatttctantttnccaaaaagtatntcagactgaantncanactctacnttnncatcaattgnagantattcttngancanactggtganccngggtantaacgtcnantttcnntgcttaantcntaaatgactgg

SEQ ID NO: 2778 - DNA, 656 bp, Homo sapiens
  misc_feature 35, 60, 77, 93, 110, 121, 165, 170, 264, 281, 325, 386, 434,484, 528, 552, 579, 629, 654: n = A,T,C or G
acttttttttttttttttttttttttggataaaanatgtctttataaagtttttttcaanacttcattctaaatacncagaataaaaaatggngtcagctcacttgtaanacaccaaccanattttccttatactgtctcaaaatttaaagatcaatttccccanagggngtgcaatgcatcataaaatggcccttttttgaggatgggaaaggaagggttgggcaggatggaatattaaattgtaacatgataaacatgcaanactgttatccaatctanataatttatatacattttgatgacttaggaaaacaaagcaatcntttgtgacaagcctaaaaagcttgacatatttaacatacttaggaactttttttgtgcggngggaattctctaattgtatcatgtgggccttttgaaagtaacaaacanaaggccagtctgttgcaagtttgctgctgaacatcacattccaccctaanaaaacacaaggtggattgcatcgagggtggataccttaccttancacagaaggaaaaagtatgtcagngcaaagtatggactaaactgctttcangaaaaaagttgtaaaaaattgatacaggttggaaaagggaattttccttnccggcttggagtcctccaatttaangg

SEQ ID NO: 2779 - DNA, 658 bp, Homo sapiens
  misc_feature 565, 624, 636: n = A,T,C or G
acgcgggagcggcagagacattgttcttgccggctccctacggtgccgtgtgtgcgtgagagaagaccagtctttcctctagcatttgacattgtgtagcaaagaaatggttatggagaagcccagtccgctgcttgtagggcgggagtttgtgaggcaatattatactttgctgaataaagctccggaatatttacacaggttttatggcaggaattcttcctatgttcatggtggagtagatgctagtggaaagccccaggaagctgtttatggccaaaatgatatacaccacaaagtattatctctgaacttcagtgaatgtcatactaaaattcgtcatgtggatgctcatgcaaccttgagtgatggagtagttgtccaggtcatgggtttgctgtctaacagtggacaaccagaaagaaagtttatgcaaacctttgttctggctcctgaaggatctgttccaaataaattttatgttcacaatgatatgtttcgttatgaagatgaagtgtttggtgattctgagcctgaacttgatgaagaatcagaagatgaagtnaaagaggaacaagaagaaagacaccatctcctgaacctgtgcaagaaaatgctaccagnggtactatgaanctcacctgtgactaatggcata

SEQ ID NO: 2780 - DNA, 656 bp, Homo sapiens
actgcaagtcaaggggactctttgcaggcgtgtctttagaagggagctgtttgattgaaaggaaagaaactaatagaaaattttattgtcaagatatccgagcttatgacattttatttggagatacaccgcggcctgctcaagccgaagatctttatgaaattcttgattcctttactgaaaagtatgaaaatgaaggacaacgaatcaatgcaagaaaagcagcaagggagcagaggaagtcttctgctaaagaattacctccaaagccattgtcaagaccacagcagtcatctgcaccagtccagctgaactctggctctcaaagtaacagaaatgaatataagctctatcctggactttccagctatcatgagagagttggcaatttgaatcaacccatagaagtgacagcgctgtattcatttgaaggacagcagcctggggatttgaattttcaagctggagacagaatcacagttatatcaaaaacagattcacattttgattggtgggaaggaaaacttcgaggtcaaactggcatttttccaccaactacgtaaccatgaattaaagccgtatactattttcttctttgagaattacaaaaaaattatttctacactgacaggatttactagttaagcatgtttaat

SEQ ID NO: 2781 - DNA, 608 bp, Homo sapiens
aataaagaacctctatcagtgagacttctcattttatagcaaatacatttttgcagcttaaattttcttgaattcatatacgcttctgtcatttaaacaaacttccagagaaaactggtctctatatatttaagtaacaaatttgacaaaatacatatttatacatatatagatctctaatataaatattaaatttgaaaaaatcaaatgtgaagcagaaactgctatacaagtatattgtataatatttattttatacattaaagtatttggttgaatatacttcaattaggtttctaaaaaacaccattatctgcttcttagtaattgcgacattcttgaaaagcatgtgaaacgggtataaacttcaactctgtgcttaattcagaattcctgtttgtctcctcaaacttttatcttcctaaagcatcttgccagagactacaaaggaaaggaacatttacagagcactataaacatgtctttggacagtaaaacagtatttattcttctacactcttgattttccatcatatcttcctcaaggcaatggttctttggcccaatttggccacctaaacataaaattcaaaacacaaccttttaac

SEQ ID NO: 2782 - DNA, 657 bp, Homo sapiens
acacaggtattttcaaaggaaacaagtcatcttaaagtaatatttttctatatgctaattgatacatctttatagcaaattgaaaattctgagtaaactgaaagtatgcttaacgacaaaataaatacagcatatatggttaacatatacatttcttagtgtaaaggcagcagtgaatttgtgtctcacaataaatctgtaaatccagttgctttctttctggaattttatatagtgtctcaccatgttccacaatgctggaaatgtcttttttggcatcaatctatgcacaaatttctgattacgtattttctccaaatgacatgtaactttttttaacttttccagaaaaatatggaaactttatcaaccacttattaactgaacaaaaagttagattactaccaaatgctcttttaattttgctctaacagatgttttaaaggttcagacatcgctgatgtttttgaggataactgcatacaacacactagatgatttcaaacgatgcatcttagtatccgaatcatttggccatccttagtatccaaaataaaatcagtagaaataaaagtaatataattttcaaagaattcatacatactagaagtcttaggaaaagcagcttctaaatgcaaggactaggagggttgccca

SEQ ID NO: 2783 - DNA, 364 bp, Homo sapiens
actataggaatacattaagtaattcaatggaaatataccttgctaatattataatggtatagctctgttaatgaattctcttagaaacattatacttaatgtattctgttgctgtatgtttcattttaattgagcattaagggaatgcagcatttaaatcagaactctgccaatgcttttatctagaggcgtgttgtcatttttgtcttctatgaaatttttgtcccaagaaaggtaggactacatttttttttaacagattaagttggtgtagtgtattcttgtttatcaaaatactaataaagctttgggattttgaattggtaaatattcatgatgtgtcaaaaatcatgatacatactgt

SEQ ID NO: 2784 - DNA, 460 bp, Homo sapiens
  misc_feature 452: n = A,T,C or G
actaaataagaccatggatgttagtaaactctctgctgaaaaagtggaaattgcaacactaacaagagagaatggaaagacagtaatcagagttctcaaacaaaaagaagtggagcagttgatcaaaaaacacgaggaagaagaagccaaagctgagcgtgagaagaaagaaaaagaacagaaagaaaaggataaatagaatcagagattttattactcatttggggcaccatttcagtgtaaaagcagtcctactcttccacactaggaaggctttactttttttaactggtgcagtgggaaaataggacattacatactgaattgggtccttgtcatttctgtccaattgaatactttattgtaacgatgatggttacccttcatggacgtcttaatcttccacacacatcccctttttttggaataaaatttggaaaatggaaatgaangaaaaaaa

SEQ ID NO: 2785 - DNA, 657 bp, Homo sapiens
  misc_feature 501, 590, 652: n = A,T,C or G
accaatattcacaagcaaaactatcactagtatcccattaatttaaattcgccatgaaaatggtgctcaatcatgaattatgccaggaaaagaaaaaggagattgggatcacttattgactaagacatggaaagccctccaggtgacattacacagactgcaatgggtgttaatccatgtgttctgcaactcttgctctatgtggagtctaggtaaggattttgacctaaattctctaaaacaagattagagatgctcctagatatatgtgaaacccttattaaatctctctctcaatttctctctttttttaacattgctgtcacttatttatcaaataaaaatttttagcttataatgtaattgttattttcttcaggggttatttaaaagcttaattataaaaaattttttatgggccatataggtagtaaatgttaaataacaaaatataatttgtataactttttttttttgacagagtctcgctctgtggcccangctggaacgcagtggtgcaatctcagctcactgcaacctccacctcccaggttcaagttatgttaccatctattaagggactaaattgnggcccctctaaaattccatgtgttgaaacactaaccctagggtgaccatatatggacataanctttt

SEQ ID NO: 2786 - DNA, 656 bp, Homo sapiens
  misc_feature 515, 522, 607, 614, 621, 623, 648: n = A,T,C or G
acgcgggtaaaacagggaagaacatcatctgggttctttgcgcagtagcagccactcttgtgtcccacatgatgctggcctttacgatgtggaacccttggattgctatgtgtcttctgggactctcctactcattgcttgcctgtgcattgtggccaatggtggcatttgtagttcctgaacatcagctgggaactgcatatggcttcatgcagtccattcagaatcttgggttggccatcatttccatcattgctggtatgatactggattctcgggggtatttgtttttggaagtgttcttcattgcctgtgtttctttgtcacttttatctgtggtcttactctatttggtgaatcgtgcccagggtgggaacctaaattattctgcaagacaaagggaagaaataaaattttcccatactgaatgagaagttaaaatgaatgtgtcatgagaatgggcttaacacatcgttggtttgaaaacttccatttttaaaaatttagaagtttantcattanaaaaaataatggactggaaagttatatttatatccaaatatacctatttcaaagtgtatttgtgagggcctgttttaacctgggncttttgnattgggngntgctaaagaattctacttttagtangctaattc

SEQ ID NO: 2787 - DNA, 655 bp, Homo sapiens
  misc_feature 596, 636: n = A,T,C or G
acagccaacggtttcccttgggggctttgaaataacaccaccagtggtcttaaggttgaagtgtggttcagggccagtgcatattagtggacagcacttagtagctgtggaggaagatgcagagtcagaagatgaagaggaggaggatgtgaaactcttaagtatatctggaaagcggtctgcccctggaggtggtagcaaggttccacagaaaaaagtaaaacttgctgctgatgaagatgatgacgatgatgatgaagaggatgatgatgaagatgatgatgatgatgattttgatgatgaggaagctgaagaaaaagcgccagtgaagaaatctatacgagatactccagccaaaaatgcacaaaagtcaaatcagaatggaaaagactcaaaaccatcatcaacaccaagatcaaaaggacaagaatccttcaagaaacaggaaaaaactcctaaaacaccaaaaggacctagttctgtagaagacattaaagcaaaaatgcaagcaagtatagaaaaaggtggttctcttcccaaagtggaaccaaattcatcaattatgtgaagaattgcttccggatgactgccaagangctattcaagatctctggcagtggaggaagtctctttaanaaaatagtttaaacaattt

SEQ ID NO: 2788 - DNA, 656 bp, Homo sapiens
  misc_feature 26, 37, 68, 85, 92, 110, 117, 124, 131, 137, 141, 144, 152,154, 156, 170, 224, 230, 250, 267, 281, 289, 301, 329, 335,362, 371, 385, 388, 422, 455, 463, 473, 498, 500, 520, 527,537, 565, 574, 620, 621, 623, 626, 654, 656: n = A,T,C or G
acttttttttttttttttttttttcnaaaggtttttnaatatcctgcaggtaataacactgatttttntaatactcaaaaacatntacttancagttgtgatactaattngcaaaangtaatantgttatncaaatntaanatnctactaantncntagtaaaaataatngcatgattcctgatatttatattcaaggtataaacatgactgatttcgctgatnctacanaataaaaaaaataaagctgntatgtaaaaaattaaanaatatctcaattanatattttngttcccaatctntttcaaacagatctatgaaataatatanaatatnctatcaatatgttctttcatatgaagngaaaaaaangggatttaagtagnganataatttctattttttacttttttaaaaaaatanacagggtcttgctatgttgcccaagctggtctnaaactccngggctccagngtgcttcctgcctcagcctcccaangngctgggattataggcatganccattgncctggcctgngggatcattctatgggttttatatcagnattaattantaagtcaatcaattaattaaccttaattatttttttctaaataaanntnagntggatttaatctcgcccaattgaatgcntn

SEQ ID NO: 2789 - DNA, 432 bp, Homo sapiens
acaagtattcttgatctcagagacaagttcaatgaatctcttcaagtgaatactactgctctcatcccaaaggaagccaactctgaggaagtctttttgtttaaaccagaaaacattacttttgaaaatggcacagatcttttcattgctattcaggctgttgataaggtcgatctgaaatcagaaatatccaacattgcacgagtatctttgtttattcctccacagactccgccagagacacctagtcctgatgaaacgtctgcttcttgtcctaatattcatatcaacagcaccattcctggcattcacattttaaaaattatgtggaagtggataggagaactgcagctgtcaatagcctagggctgaatttttgtcagataaataaaataaatcattcatccaaaaaaaaaaaaaaaaaaaaaaagt

SEQ ID NO: 2790 - DNA, 656 bp, Homo sapiens
acaataggtgagaaaaatctgcagtatagaagaatagaggcagagaaatatgaaggactaaggagaagggtatgagagtaaataggatttgtaatagcaaacccagaagttaagtagaaagcctgtagctgtgcatgcttcatttatccaaccttaataccaggcaactgaagagggaaaagtcagatttgctattgtttggggaaattttcagtaagttgaattaagaaccatctatttttagttctcaggggtaatgactgggatcaagagctcacaacggccaataaatgttattgctatatccaatccaagaggtgggtgcaactagaatacaaaaaggacaaagcacctagtgatgactccttcgaagtcatcattaaaaatcaagtaattgctcattaagtatttcagtatttgaactaaatcatttgagaacattctggcaggtaagagataaaagcaaaggggagtgtgtcaaaacaaagaagatcaaaagtttagtaagtgaaaagagtttaatgaagcctcaagggtttaagggaaattaaatggaacttttaatcctaattgcttttcatctgacatgcttaaaggaatccttttaaactgataagaacatgaataggaaagaaaacctgctaaaatctcttaaa

SEQ ID NO: 2791 - DNA, 658 bp, Homo sapiens
  misc_feature 601, 655: n = A,T,C or G
acaaatgaacacagtttatattctaattcttactgcagctcattttaatttttaggatgcaagcacaatttagtattcaactgagtagcaacatattcaacttgatcccattgtcttcagttactcttgcccatgaaaaatgttcataaataaacagggtatttgaccatatgatattagaaaatacagcacattactttatgagaaactacctactgatatgggcttgaaattttggatgaatcattgagcatttctacactagaagtaatttcaaaattgttggtttttataaacaggaaaaaggttgagtagtgggacttttaagcatctctgaaataaaaaacttctttttacagacaagcattatagtttgagttacagacaacagtgtgtatatatgtaatatatatatagtaaaatgaaatttaaatatgaagccaaactttttaaaattagaaactcaaatggttatactgattagtgtctagcctagagtggtaaccatgctttactaattcagttatgaaatacattatttataatgcattagctgtattagctgttgcttttttgatggtcaggataactatgttacctnatttctggcatttaattaaatagctcgaggtattaaaagccccctcccttcaanaaa

SEQ ID NO: 2792 - DNA, 657 bp, Homo sapiens
  misc_feature 609: n = A,T,C or G
acagatccacttagtcattttctcctttttttaagaaccattttcatctgatttttaaactcacgataccagttatctgttaatcaaaattgcattttacaatttaataatgtgatatttcctatgtctacagcataccttattaggtataaaacctactgcaacttagaaaaaggaaagaaaaaagaaaacttttccaactgctgcattaagatagggtggattttatgtgctttttttttaagagttgaatttcttttcctgacttttaccttttacagcgtattacttagtgaacattacattttcagaatagatcctaatattttattgagggcctatgtgctaaaaactatgcatatctatatattggccaattatctttaataatttaccttttgaaattgcatgtttatcatatatccttaagtggacacatacagtgccatgttgatgtgcctctcagttttattgaaaagctgccccacagcccatgtctcttgtctctgcaatgcctcaagggaagtgagctctcaaccacagatagctgtggcttctcaagaagcagctcattgccaaggccaggctgagaggggacctgcttgctgnggtgggttgcctagcccaaatgagcatttacctaccaccttcccattt

SEQ ID NO: 2793 - DNA, 532 bp, Homo sapiens
  misc_feature 512, 516: n = A,T,C or G
accaggtcccccttcaccatcctgggagaaggatggaggacagaggaaagggagatgcagccagttcagatcttcccgggaaacgtgccttcagcccgttgctcatcccagtctgtgacccaggatgtggggcagagggactggtacataatgtatttatatgttaatttgttatgtatatagatgtgcaagtcttgtcagaattggcctcagtgtagttaaagggcagaaggggaagatactgactagtcatagaaatacctcattcgcctgtgggaagagaagggaagcctcttcagggtgagtgaatggcaaagcggttgcttctggctcctccttcccctgtggtcttggaaagtgtgtggaaggcagggacagagatggaggccgagccaatagactgaagagaccacagcaattggctcctcatctagagattttcttggcagtattccatgggatgttaagcaaaggaaaccaaaggaatcgtttcaaatggactcatggcttanaaanctttattcttagggca

SEQ ID NO: 2794 - DNA, 658 bp, Homo sapiens
  misc_feature 598: n = A,T,C or G
acactgaaacataaatccgcaagtcaccacacatacaacacccggcaggaaaaaacaaaaacagcaagtttacatgatccctgtaacagccatggtctcaaactcagatgcttcctccatctgccaagtgtgttctggatacagagcacatcgtggcttctggggtcacactcagcttaggctgtgggtccacagagcactcatctggctgggctatggtggtggtggctctactcaagaagcaaagcagttaccagcacattcaaacagtgtattgaacatcttttaaatatcaaagtgagaaacaagaaggcaacataataatgttatcagaaagatgttaggaagtaaggacagctgtgtaaagcttgaggctgaaaagtagcttgccagcttcatttctttggtttcttgggtagtgggcgccggaacagcaagatgtgaggttctggttcatggatcatataatggacccatccctgactctgctgaacgccaagattcctccattcagattcagacatcagatgggttttagggaccagcttggctatgtccttgggcagcatgacatgtcgatactcaaactcctcgtcgncgtatttgtcccaatagtaaatttgttggtgcgacatgatcgctcggtttgctagccctt

SEQ ID NO: 2795 - DNA, 536 bp, Homo sapiens
  misc_feature 32, 55, 97, 106, 154: n = A,T,C or G
actttttttttttttttttttttttacatganaaccaaggactttttatacttanaacacatactgaaaaatgaggaggcagtagttaagctacaanaagcaccanatgccttctgggatgagttgccttccttgcctccacaacagcagccanactggacctctggacaacatgataagtgtgacaatcacacttcctagagtaggaccaagggtaggaggccaccaggctcagcttacaagccccaagtaatcgtccatcagggagccaatagcaaaaatgtcattcttgtccacacgggtccccacaatctttaagcggatctcatcgtcctgctgaatcacaatatcctcatccattgtcttgtaacatggtgggttggagttaggatcaaactccatctctgaagggatggaatgtcgagagatgaagcaagacatgggcccaatttctgtgaagagtccaaccttgttgacctgagtgacaacagcatccacgacctcccctttaaatggccggaaaacaatggccttgt

SEQ ID NO: 2796 - DNA, 422 bp, Homo sapiens
acaagggcatatttaacggattctcagttacacttaaagaggatggtgttcgtggtttggctaaaggatgggctccgactttccttggctactccatgcagggactctgcaagtttggcttttatgaagtctttaaagtcttgtatagcaatatgcttggagaggagaatacttatctctggcgcacatcactatatttggctgcctctgccagtgctgaattctttgctgacattgccctggctcctatggaagctgctaaggttcgaattcaaacccagccaggttatgccaacactttgagggatgcagctcccaaaatgtataaggaagaaggcctaaaagcattctacaagggggttgctcctctctggatgagacagataccatacaccatgatgaagttcgcctgctttgaacgt

SEQ ID NO: 2797 - DNA, 572 bp, Homo sapiens
actgccaccagattttttattacatcatttgaaaattagcagtatgcttaatgaaaatttgttcaggtataaatgagcagttaagatataaacaatttatgcatgctgtgacttagtctatggatttattccaaaattgcttagtcaccatgcagtgtctgtatttttatatatgtgttcatatatacataatgattataatacataataagaatgaggtggtattacattattcctaataatagggataatgctgtttattgtcaagaaaaagtaaaatcgttctcttcaattaatggcccttttattttgggaccaggcttttattttccctgatattatttctatttaatactcttttctctcaagaaaaaaaaaaagtttgttttttctttattgtccttcatagcaggccaagtattgcctctctgcaatagacagctactgtcaatacatgctgtaatttgacattctgggtcacagatataaggtatttaaaatctatttatgctttatagagaaaccagacattaaaacttcatgcactacttatttcgaattactgcctcggc

SEQ ID NO: 2798 - DNA, 451 bp, Homo sapiens
acagttgcctgaagttactataaatgaagaaactgctttagcagaagttaatttaaagaagaaaagttatttgaatattagaactcatccagttgcaacttcctttgctgtgtttgatgacactttgcttatagttgaccctactggagaggaggaacatctggcaacaggaaccttaacaatagtaatggatgaggaaggcaaactctgttgtcttcacaaaccaggtggaagtgggctaactggagctaaacttcaggactgtatgagccgagcagttacaagacacaaagaagttaaaaaactgatggatgaagtaattaagagtatgaaacccaaataaacagccaccacattttcaaaacagatttgtaaaaattgtatttgttaacactgtgcacaaacgttttatactaaataaatatcaaactacattcttctgaaaaaaaaa

SEQ ID NO: 2799 - DNA, 485 bp, Homo sapiens
  misc_feature 364, 483: n = A,T,C or G
acaagcttttgtccaaaatggcacagtgagcacaaatgagttcctgtgtgataaagacaaaacttcaacagtggcacccaccatacacaccactgtgccatctcctactacaacacctactccaaaggaaaaaccagaagctggaacctattcagttaataatggcaatgatacttgtctgctggctaccatggggctgcagctgaacatcactcaggataaggttgcttcagttattaacatcaaccccaatacaactcactccacaggcagctgccgttctcacactgctctacttagactcaatagcagcaccattaagtatctagactttgtctttgctgtgaaaaatgaaaaccgattntatctgaaggaagtgaacatcagcatgtatttggttaatggctccgttttcagcattgcaaataacaatctcagctactgggatgccccctgggaagttcttatatgtgcaacaaaganca

SEQ ID NO: 2800 - DNA, 614 bp, Homo sapiens
  misc_feature 477, 507, 537, 542, 569, 586, 590, 608: n = A,T,C or G
acgcggggaggcattgaggcagccagcgcaggggcttctgctgagggggcaggcggagcttgaggaaaccgcagataagtttttttctctttgaaagatagagattaatacaactacttaaaaaatatagtcaataggttactaagatattgcttagcgttaagtttttaacgtaattttaatagcttaagattttaagagaaaatatgaagacttagaagagtagcatgaggaaggaaaagataaaaggtttctaaaacatgacggaggttgagatgaagcttcttcatggagtaaaaaatgtatttaaaagaaaattgagagaaaggactacagagccccgaattaataccaatagaagggcaatgcttttagattaaaatgaaggtgacttaaacagcttaaagtttagtttaaaagttgtaggtgattaaaataatttgaaggccgatcttttaaaaagagattaaaccgaanggtgattaaaagaccttgaaatccatgacncagggagaattgcgtcattttaaagcctanttacncatttacttaacccaaaccaaaatggnaaagattaattgggagnggtnggatgaaacaatttgganaaaata

SEQ ID NO: 2801 - DNA, 658 bp, Homo sapiens
  misc_feature 505, 565, 567, 586, 602, 616, 636, 638, 644: n = A,T,C or G
accatgaccctacataaggctggatggcacctcaggctgagggccccaatgtatgtgtggctgtgggtgtgggtgggagtgtgtctgctgagtaaggaacacgattttcaagattctaaagctcaattcaagtgacacattaatgataaactcagatctgatcaagagtccggatttctaacagtccttgctttggggggtgtgctgacaacttagctcaggtgccttacatcttttctaatcacagtgttgcatatgagcctgccctcactccctctgcagaatccctttgcacctgagaccctactgaagtggctggtagaaaaaggggcctgagtggaggattatcagtatcacgatttgcaggattcccttctgggcttcattctggaaacttttgttagggctgcttttcttaagtgcccacatttgatggagggtggaaataatttgaatgtatttgatttataagttttttttttttttgggttaaaagatggttgancatttaaaatggaaaatttctccttggtttgctagtatcttgggtgtattctctgtaagngnacctcaaataggtcatcantgaaaggttaaaaaanccaaggtggccatnttatgctggtggttaaggcnanggcctntccaccactggccc

SEQ ID NO: 2802 - DNA, 659 bp, Homo sapiens
acgcatactagcaaaggtaatggtgatctagcaaacaaaattggtttctgcagttagaagtgagcaggagcacttgtattatagtatttaaataatcctggttaatctctttttaagccgagtaacccctccagattttgcctttttattattgaggctggctttattttcttctactttttttcccgttttatagcagttaattatttttgtgattattatgcaagaagcattgcccttgagttaaactgttattgtttcataagcagctattaaaataactgagcattgttttatgaacatacactaatctgagatactgaaaagctttgcaactaaaaagcaaaacaacctacattagtcatctagccattgtttggatgttttgagttgattttttatggtgcctcttttagcttggaatattacgtttactttaatccaagtctagaccttttaaagggtccttaaaattaaagttcagaatgtgaatccctttgacatctattacaggtttataggacctttttggttgtgattactgttttcaatacgattgtattaatgaagttaactttgtcagaagttaaaatggaggtcataggagtcccgggagaaatggctctcctgtttctttcattaccccactgaagtcaccc

SEQ ID NO: 2803 - DNA, 511 bp, Homo sapiens
acaaaaccaaatgtttgttactataacttctgcatcacaattaaaatccaaacagttttttaaaaacagtcaactcaatcaaaacccactacttcagaatcaatagcttctttgaagccacagtaacacttaaatatggttaagactcgaatgcagaaatttggttggttggaaagctaattaaacttccaacttgctcaaatagaattacaaaaaggcaaaattgtgtttttcacagagatacagtccactggaatcaccaacactggacagctgttagagtatttagagtcctgagataacaaggaatccaggcatcctttagacagtcttctgttgtcctttcttcccaatcagagatttgtggatgtgtggaatgacaccaccaccagcaattgtagccttgatgagagaatccaattcttcatctccacgaatagcaagttgcaagtgacgaggggtaatacgctttacctttaagtcttttgatgcatttcctgccagttcaagt

SEQ ID NO: 2804 - DNA, 656 bp, Homo sapiens
  misc_feature 54, 141, 278, 543, 613, 615, 616, 622, 640, 645, 654, 656: n = A,T,C or G
acttttttttttttttttttttttttaaaaatctgcctattttatttccattanaaaaatattatctatataacattttgttccactatcttctccttgatctcaaatttaaacactttaattttactcaagtaaaagcanaatcacataacggacatcaaaactaaatagttcacatcattagtttaaattaaatatgttcttgattatttctcaggaatagtaactcttctttcctacctggtatttctcttttgtttactgagtaactatgtaangggtatctctttcctatattcagtaatacaggtgcacacaggtgtaatttaaaaaagtaactggattccttctctaatattcatgttcaactctccctattacatggtatttccataatagcttcagatattttcatcaaactcacactgcatcaattgtgaaaattaaaaggttaattaagatgttcatcaattgtaaaaattaaaatgttaacaattccagactacacagcactgggccccttatagtgatgccgttggcagnggccttgggatagctactggttcaatttcaattcgggtgcctttggggaaaacaaccaacttggggaaancnnctttanccaggaaaattacccttngaaanactggttgnan

SEQ ID NO: 2805 - DNA, 567 bp, Homo sapiens
  misc_feature 528, 556: n = A,T,C or G
accgtccagcgagttgcagatctacacttggatggatgcaactttgaaagaactgacaagcttagtaaaagaagtctacccagaagctagaaagaagggcactcacttcaattttgcaatcgtttttacagatgttaaaagacctggctatcgagttaaggagattggcagcaccatgtctggcagaaaggggactgatgattccatgaccctgcagtcgcagaagttccagataggagattacttggacatagcaattacccctccaaatcgggcaccacctccttcagggcgcatgagaccatattaaattctatttactatttgttgaatttatttttccgtcagttatgtaaaataaacatactcttcttcctcccctgattattgccattaagcctttaaattctaaacaaattataatgcatcatctatttaggagttaagatttggatgtgctattgtatgattacgaatagtctgtatgtttcaagcccttcttgtaaaatatgaagaaagtgctcttancattctgtgtaaaactgacctcggccgngaccacactaa

SEQ ID NO: 2806 - DNA, 658 bp, Homo sapiens
  misc_feature 637, 644, 655: n = A,T,C or G
actgttattaaaagcatattgtattatagagctattcagatattttaaatataaagatgtattgtttccgtaatatagacgtatggaatatatttaggtaatagatgtattacttggaaagttctgctttgacaaactgacaaagtctaaatgagcacatgtatcccagtgagcagtaaatcaatggaacatcccaagaagaggataaggatgcttaaaatggaaatcattctccaacgatatacaaattggacttgttcaactgctggatatatgctaccaataaccccagccccaacttaaaattcttacattcaagctcctaagagttcttaatttataactaattttaaaagagaagtttcttttctggttttagtttgggaataatcattcattaaaaaaaatgtattgtggtttatgcgaacagaccaacctggcattcagttggcctctccttgaggtgggcacagcctggcagtgtggccaggggtggccatgtaagtcccatcaggacgtagtcatgcctcctgcatttcgctacccgagtttagtaacagtgcagattccacgttcttgttccgatactcttgagaagtgcctgatgttgatgtaccggccccggcgggccgctcgnaagggcnaatttcccacncac

SEQ ID NO: 2807 - DNA, 656 bp, Homo sapiens
  misc_feature 568: n = A,T,C or G
acatttacaaagatgcgttcaaatagtgctctaagagttttgttcagtggctcacttcggctaaaatgcagaaatgcatgctgtcagcgttggtatttcacattcaatggagctgaatgttcaggacctcttcccattgaagctataatttatttggaccaaggaagccctgaaatgaattcaacaattaatattcatcgcacttcttctgtggaaggactttgtgaaggaattggtgctggattagtggatgttgctatctgggttggcacttgttcagattacccaaaaggagatgcttctactggatggaattcagtttctcgcatcattattgaagaactaccaaaataaatgctttaattttcatttgctacctcttttttttattatgccttggaatggttcacttaaatgacattttaaataagtttatgtatacatctgaatgaaaagcaaagctaaatatgtttacagaccaaagtgtgatttcacactgtttttaaatctagcattattcattttgcttcaatcaaaagtggtttcaatattttttttagttggttanaatactttcttcatagtccattctctcacctataatttggaatattggtgggggccttttggtttttctcttaaaatagcctttttaa

SEQ ID NO: 2808 - DNA, 603 bp, Homo sapiens
  misc_feature 481, 507, 536, 551, 555, 558, 561, 563, 568, 569, 571, 576,580, 593: n = A,T,C or G
accatcgcacacactgttgacgtcattggaaagaaggaagacgactttgtctgctgccttcttttgagtggcaagccactgcactggacccatctctgctattttctttttctgccacttttcaaggatgacctcacttctgcaatggttttgaagaaattcagtgaagtaacaaattgtgtgatggaaacatatttcagatgggtaaaccacaagaaccttaatggggggcagtagtgtggtggtagaaaaggaagtcttcttgatcctttcgtgcctccacattagatagatccctgccaccagcacccatgtggccaccagcagagacagcaggaggagaggcagccagcctcccggcttgcttttgttgttatccagagggaaagggacgcctgtttgtggcagagcacaactgttcctttatgtcggatgcagtcgctgccacaagtaaggaaaatatggagtcagctgcccgtancaccttcactatccccatcactggantcccacttgaaactagcgtttgtttcttntggtgtggctcaaanaccnganaanancccgnntnatatngctntgttggataatanccatgtatct

SEQ ID NO: 2809 - DNA, 658 bp, Homo sapiens
  misc_feature 577, 656: n = A,T,C or G
acctagaagagaggcgggtcaaagaagtagtgaagaagcattctcagttcataggctatcccatcaccctttatttggagaaggaacgagagaaggaaattagtgatgatgaggcagaggaagagaaaggtgagaaagaagaggaagataaagatgatgaagaaaagcccaagatcgaagatgtgggttcagatgaggaggatgacagcggtaaggataagaagaagaaaactaagaagatcaaagagaaatacattgatcaggaagaactaaacaagaccaagcctatttggaccagaaaccctgatgacatcacccaagaggagtatggagaattctacaagagcctcactaatgactgggaagaccacttggcagtcaagcacttttctgtagaaggtcagttggaattcagggcattgctatttattcctcgtcgggctccctttgacctttttgagaacaagaagaaaaagaacaacatcaaactctatgtccgccgtgtgttcatcatggacagctgtgatgagttgataccagagtatctcaattttatccgtggtgtggttgctctgangatctgcccctgaacatctcccgagaaatgctccaccagagcaaaatcttgaaggtcattcgcaaaaacctttgttaanaa

SEQ ID NO: 2810 - DNA, 659 bp, Homo sapiens
  misc_feature 495, 559, 580, 597, 623, 639, 646, 656: n = A,T,C or G
acaacaattatgacatttgattaggctggactctaacttgcttggatgagatttattttggaatcacagtatccaagcaaagaaaaacagtcagtttataagacacaacaaaaatgaaaaaaagcgagacaaatgtctgcctcagaagtttatcaataacctcttatatacacatatgtattcacaaagtggttgagagtcattttataccatcctttagaagaggtccaatggctgagaactctataatgagacacagtgggacagaaattatcatgactttcaatgatcttttctttcccctaactttaatatcctttagttggggagagaaagaagtccattttcatctgctgtatctaagattttacagatcactggagattcaaccccaagaatatattgacaggagtgaggctctagcatatatacagtaacagcatgaggtgaatctgattctttgcactttagttttacagtcacctgtcttggttngtcagttatatcacaaatatctccatttccataaaaatgtgacaccatcctgactgtctggggnccctgccccgggcggcccgtnggaaagggcgaaattcncagcacactggccggccgttactaantggaatccgagctccngtcccangctgggcgtnatc

SEQ ID NO: 2811 - DNA, 364 bp, Homo sapiens
accccaatctgaagtcagtaaatgaactaatctacaagcgtggttatggcaaaatcaataagaagcgaattgctttgacagataacgctttgattgctcgatctcttggtaaatacggcatcatctgcatggaggatttgattcatgagatctatactgttggaaaacgcttcaaagaggcaaataacttcctgtggcccttcaaattgtcttctccacgaggtggaatgaagaaaaagaccacccattttgtagaaggtggagatgctggcaacagggaggaccagatcaacaggcttattagaagaatgaactaaggtgtctaccatgattatttttctaagctggttggttaataaacagt

SEQ ID NO: 2812 - DNA, 657 bp, Homo sapiens
  misc_feature 3, 4, 6, 12, 15, 21, 23, 63, 69, 72, 73, 78, 92, 119, 125,156, 173, 184, 187, 188, 200, 201, 207, 255, 261, 266, 284,289, 294, 340, 348, 381, 405, 438, 441, 450, 463, 469, 472,485, 501, 502, 528, 584, 592, 597, 604, 614: n = A,T,C or G
acnntnttattntancagatntnaagagtccattttttaaaaagtgagcaataaagaacctantatcantgnnacttntcattttatagcanatacatgtgctgcagcttaaattttcntgaatncatatacccttctgtcatttaaactaactgncagagaaaactggtctntatatattcangtnncaaattgtgacnnaatacntatgtatacatatatagatctctaatataaatattaaatttgaaaaantcaaangtganccagaaactgctatacanctatnttgtntactatttattttatacattaaagtatttggtgaaatatacttcanttaggttnctaaaaaacaccattatctgcttcttagtaatngctgcattcttgaatgagcatgtnaaacgggtataaacttcaactctgtgcttaatncanaattcctgntcgttctcctcanactttnatntacctaaagcatnttgccagagactacannggaaaggaacatttcagagcactatnaacatgtctttggaccagttaaacagtatttattcttctacacttgttgaattttncaatcttntcttnctcaggncaatggtttntttggcccaatttttgcaactaaacataaaatttcaaaacaca

SEQ ID NO: 2813 - DNA, 656 bp, Homo sapiens
  misc_feature 515, 532, 546, 550, 579, 595, 608, 617, 620, 629, 635, 636,649: n = A,T,C or G
accggattctgtctttaaccctccccttcgtgtttcccccaatgtttaaaatgtttggatggtttgttgttctgcctggagacaaggtgctaacatagatttaagtgaatacattaacggtgctaaaaatgaaaattctaacccaagacatgacattcttagctgtaacttaactattaaggccttttccacacgcattaatagtcccatttttctcttgccatttgtagctttgcccattgtcttattggcacatgggtggacacggatctgctgggctctgccttaaacacacattgcagcttcaacttttctctttagtgttctgtttgaaactaatacttaccgagtcagactttgtgttcatttcatttcagggtcttggctgcctgtgggcttccccaggtggcctggaggtgggcaaagggaagtaacagacacacgatgttgtcaaggatggttttgggactagaggctcagtggtgggagagatccctgcaaaacccaccaaccanaacgtggtttgcctgangctgtaactgaaanaaanattctgggggctgtcttatgaaaatatanaacattctcacattanccccagtttaatnacccatttnctncttttaccntttaanngcagtttcttttnacattaa

SEQ ID NO: 2814 - DNA, 319 bp, Homo sapiens
  misc_feature 123, 135, 180, 209, 221, 222, 229, 259, 261, 265, 266, 272,275, 281, 291, 314: n = A,T,C or G
acgcgggagtttataatgaaactatctacaattcttgttttagcacatctgttatccgtaaaacacctgtaactagcttttttaatttattatttgaattttaggatagcgaatcactaattnttagttgctgangttggcattttaactgattattaagcacttctgtcagtctttganaaaaagaacgtattttttgtgctttgaangatcctctgaannaatttcnttttataatagaaatgggccattgtattgnancagnntttatntcnaatganctgtgctgtngaaaaaacattaacccttgttcnaaaaa

SEQ ID NO: 2815 - DNA, 447 bp, Homo sapiens
  misc_feature 25, 136, 139, 166, 184, 294, 352, 358, 384, 407, 415, 418,426, 430, 441: n = A,T,C or G
acaaattccagtgtgcagaccacancctcaaaacaaaaaagatctatttctactggatctgcagggagacaggtgccttttcctggttcaacaacctgttgacttccctggaacaggagatggaggaattaggcanagngggttttctaaacttcggctcttcctnaccggattgggacagcantattgtggacatgcagcattaaactttgacaaggccactgacatcatgacaggtctgaaaacagaaaacctcctttgggagaccaatgggggacaatgagttttctacantagctacctcccacccctagtctgtagtgggagttttcttatgtggcccttggacttntgctanaacctgcgcaaatgctgacacccgtnttccagctgggatcctagaaaangttcaatnctncttcaacnaaanaaaatttttgnttttat

SEQ ID NO: 2816 - DNA, 315 bp, Homo sapiens
  misc_feature 21, 28, 48, 60, 78, 92, 102, 127, 133, 134, 144, 148, 152,167, 170, 178, 180, 211, 243, 250, 253, 258, 268, 274, 305,311: n = A,T,C or G
acaaagatgactataaacaanatgcatncctcggtttccatgaacagnacactattacanaaaaccaaagtttatatnccaccatcaagtgnggctctcccntgactccgctttgtgatggatcatnaatgannatcctcaaanccantagnctcatcattaccccncanaacatccngntgaaagatttgagcttgagaagaaatggaanaacgctgaacctgctgcactggccttggaatnccatccngtnatgtntagcgggaancatatncaaccctgaattgtttctcaggtgtggaaanaatttnattt

SEQ ID NO: 2817 - DNA, 662 bp, Homo sapiens
  misc_feature 202, 249, 278, 296, 306, 313, 319, 358, 400, 434, 437, 442,456, 457, 458, 463, 467, 473, 476, 477, 490, 494, 505, 517,527, 529, 540, 549, 551, 559, 579, 588, 597, 607, 613, 625,626, 636, 639, 641, 644, 657: n = A,T,C or G
acatgaattagaagcgtgcatctaggattatggccaaactgttttaaaaatgcagaaatgtaaaattacatcttgaaaatatgaagagatggtctacacacttcaaaaatcaaatgttgcttataccagagatgtatgacaatcacgggattcaagtgacaagcagtaaggatctcaaaaattaatactggcaaagataacngggaatattttgcatttactggaaatacattggcctactagaatccnaatctaccgggactcagggaaaaaattancaaatctaaagccattanctaaatattncttttancctaancaccagcttggactttaccagaaactggccccggctttnattggccatctcaaggttattaaggttctccaaaattgaatnccacccaaaccgggttcaacctccaatgaaagtntgncaggnttcaaatttaaacnnnggatngttnaaatgnaanntattaaaaccctntggntttggtccttnttggatgggatnaaatggtggncnttcttttgaancttgaactncntaatttcntttttccaaaggggtttccntttttttcnttagggggncaggttggcnttaagntgcctaaggaanncattttttcnaantnctncccggcgggcgtncaaaa

SEQ ID NO: 2818 - DNA, 458 bp, Homo sapiens
  misc_feature 268: n = A,T,C or G
acatgaatttagaaataaaatcgtcgcaggattctgaaatactgataccttaagatctaacacactgatattagtccattccctacaaagcagccacattagcagttcagatttggtctttgttgtagctgttgacattaagttctttaagtgaaatgcccagcagcatttaaataatattttacagcagacatgaactaagtttcaatattccatctttggaacaaattatgcttatttacatgttaacaggtggctatatttactnccctattgtgagtttaatgactgattttaaactacagaagggttttccagctattatttcctttagttctaaaagtaccgacttatattaatgttttataaaagatagtgatgaaaaaaaggtaatgctgaataaaggcgctttagaaatatttaaggacaacataagtattaatattggaaaaaactgt

SEQ ID NO: 2819 - DNA, 667 bp, Homo sapiens
  misc_feature 634: n = A,T,C or G
acctctttgaacgcattgattctcaaaatcgagagatcatgaaacacctgaaggcaatttgttttcttcgacctacaaaggagaatgtggattatattattcaggagctccgaagacccaaatacactatatatttcatttatttcagtaatgtgatcagcaagagtgacgtgaagtcattggctgaagctgatgaacaggaagttgtggctgaggttcaggaattttatggtgattacattgctgtgaacccacatttgttttccctcaatattttgggttgctgccagggtcgaaattgggatccagcccagctatctagaacaactcaagggcttacagctctccttttatctctgaagaagtgtcccatgattcgttatcagctctcatcagaggcagcaaagagacttgcagagtgcgttaagcaagtgataactaaagaatatgaactgtttgaattccgtcggacagaggttcctccattgctccttattttagatcgctgtgatgatgccatcaccccattgctaaaccagtggacatatcaggccatggtccacgaactactaggcataacaaccaatcggattgatctttccagagtgccgggaatcagtaaagacttaagaanaagtggtcctatctgctgaaaatgatgaatcta

SEQ ID NO: 2820 - DNA, 662 bp, Homo sapiens
  misc_feature 51, 127, 216, 234, 235, 240, 289, 315, 338, 362, 365, 390,402, 405, 410, 411, 432, 436, 442, 460, 466, 487, 493, 506,509, 512, 525, 526, 537, 551, 560, 566, 570, 576, 581, 583,588, 609, 611, 621, 632, 636, 649, 657: n = A,T,C or G
acacatgtcatagtgaccacagcttgtggctccttgagggaggagattcancccggctgatattgtcattattgatcagttcattgacaggaccactatgagacctcagtccttctatgatggaagncattcttgtgccagaggagtgtgccatattccaatggctgagccgttttgccccaaaacgagagaggttcttatagagactgctaagangctaggactccggtgccnntcaanggggacaatggtcacaatcgagggacctcgtttagctcccggcagaaangcttcatgttccgcacctggggggcnggatgttatcaacatgaccacantttcagaggtgggttttgctaaangangctggaatttgatacgcaaagtatncgccatgggcanacnggatnnttaactgctggaaaggagctngagnaagcantttccggtggaccgggtnttaaangccctggaaggaaaaccgctnttaaanccataaagcttantgntcnattacaatacctnnagatagggtcnacaaaatggtccanaaaacctcntaaccntganaatatngcccntnttttntggttttttacaacgactttnangttgcattgnttccctagaanaaangaaacacattttnattccagntcttt

SEQ ID NO: 2821 - DNA, 662 bp, Homo sapiens
  misc_feature 120, 247, 263, 329, 420, 454, 474, 530, 560, 567, 607, 616,617, 632, 641, 643, 653, 659: n = A,T,C or G
actcttgcttatatcatcacagagctggatgagagagagcgagaagagttctataggttaaagaaaatacaagagaagaaaaagattctaaaggaaaaatctgagaaggacttggagcanaggagagcagctggagaggtgttggagcctgctaatcttctggctgaagagaaggacgaggatcttctatttgaataatctttcctgttctggttctttgagaaaccctaacactggcttcattttnaattcacagtgtgtangtttgattttgtgtggctatttattttttggcctaagaatttcactggttggaaaaatttacctanatgtctatttattggggattacttttgcagaaatcataatttagcaaccatttatcatggatgaaaagaagatctgtaaaaacctgcccangaacttacagaatttactttgcagaagcggtcancatactccatttcattctgngttcacgtgatctgcttaccaagcattttaggaaatacctcttaaggaagcattanccggcttcatgcctattacctgggggagcnctttcantcctaacccacttgcaaaccttggcgctgttagctgaaanttgcttgcnncccttcttggtaacntgggacctngncgcgaacccntctaangcc

SEQ ID NO: 2822 - DNA, 573 bp, Homo sapiens
  misc_feature 118, 127, 191, 238, 278, 289, 337, 338, 354, 358, 422, 454,489, 508, 509, 533, 552, 564, 569: n = A,T,C or G
acatgatacagattggttttgcagtttttaatgaactgaaatagaaatgtctaaatacagcagtatctgcctgtgcaacaaatatctgtaaggtaaaataaggtatttgatagaagancatctgcangaacaaatcagatgaaaaatctgaaaaggtttctatataccttctggattttaaaaaaacccanaaattaatggctcaagatactacattgctaaagttaggggaaaaaantaaaaaggctgtgagttctgttgcaagagctcatttgtanacttgcaaaanctaactaattttatattatgcttgatggtaagagcagtgctcaaaatnncagaagcttcaaattngttntgtttcacaaaaatttgctacatatgttggcatgaatgtgtgtcagggaattcatacccaggtnaatgacaattacatcagtatagctaatttttnccaccttgggaggaatggaattctggctattttcnaattaatcctacacacttnnctaaaaaactaacagcccatggcnccataattacattttgtgnggtccctctggncgcgncacg

SEQ ID NO: 2823 - DNA, 487 bp, Homo sapiens
  misc_feature 142, 299, 308, 311, 331, 335, 350, 365, 367, 369, 372, 373,377, 381, 386, 394, 401, 412, 417, 423, 441, 446, 457, 459,460, 466, 483: n = A,T,C or G
acagtccctcaactggactaaaatcatgaagaccattgttgatgaccctgagggcttcttcgaacaaggtggctggtctttcctggagcctgagggtgaggggagtgatgctgaagaaggggattcagagtctgaaattgangatgagacttttaatccttcagaagatgactatgaagaggaagaggaggacagtgatgaagattattcatcagaagcagaagagtcagactattctaaggagtcattgggtagtgaagaagagagtggaaaggattgggatgaactggaggaagaanccccgattngcngaccgagaaagtcgtacgangaanataagaacaaagtcngaattatgagccggnananganngttntgtncacantttggccngtgtctnccgtgtttcanacaanttctgncacccaaaaaaaaggaanatctntgacttggccngnntccttntttcttagccacccctnaaat

SEQ ID NO: 2824 - DNA, 509 bp, Homo sapiens
  misc_feature 311, 317, 422, 442, 451, 497: n = A,T,C or G
acgcgggtctctttccggcggtgctcgcaagcgaggcagccatgtcttatcccgctgatgattatgagtctgaggcggcttatgacccctacgcttatcccagcgactatgatatgcacacaggagatccaaagcaggaccttgcttatgaacgtcagtatgaacagcaaacctatcaggtgatccctgaggtgatcaaaaacttcatccagtatttccacaaaactgtctcagatttgattgaccagaaagtgtatgagctacaggccagtcgtgtctccagtgatgtcattgaccagaaggtgtatganatccangacatctatgagaacagttggaccaagctgactgaaagattcttaagaatacaccttgcccgaggctgaaccattgctcacaggttgcattgatgctgcttcctnatttatacaaagattatctnaggcactantgccaaagtagggggggaccttcttggagcaaggttgaatctttanacaccggatttt

SEQ ID NO: 2825 - DNA, 525 bp, Homo sapiens
  misc_feature 395, 446, 454, 470, 475, 495, 496, 511: n = A,T,C or G
acatcttgcctagatgtcgatgactgcaagtaataatacagtttataatgaaactatctacaattcttgttttagcacatctgttatccgtaaaacacctgtaactagcttttttaatttattatttgaattttaggatagcgaatcactaatttttagttgctgaggttggcattttagtgattattaagcacttctgtcagtctttgaaaaaagaacgtattttttgtgctttgaagatctctgaagaatttcttttataatagaatgggcatgtattgtaacagttttatgtcaaatgatctgtgctgtagaaaaacattaacccttgttcaaaaaagaaatggataaacttgcctttctaagtggaagaatgcctgcactataatatctgnatgttacatttattaaatttaatctcttatgatagggtgataccttcccanaacaacangatgcaatgtttctanaactntttaagtgcccatttgcagnnctgccggcggcgtcnaagggcaatcaaca

SEQ ID NO: 2826 - DNA, 638 bp, Homo sapiens
  misc_feature 184, 318, 323, 412, 442, 445, 456, 483, 484, 490, 492, 496,516, 526, 559, 570, 575, 576, 580, 596, 597, 601, 602, 606,608, 611, 614, 615, 618, 623: n = A,T,C or G
actggagggagaggccgggctctcaggaagcagcaggcacgtgccaggtggaagccagctgcaggcaggggaggaaggaggcccttactcttccttcttgtccatgggaccatctactgcagcctgcagctttgcgtgctcctccagcaagcggtcgtactttttttttttttttttttttttngacggaggctcactctgtcacccaggctggagtgtagtggcaccatctcagctcactgcaagctctgcctcctgggttcatgccattctcctgcctcaggctcccgacttccttaattcttccttcctatgaanagganactgacagtttgctcagtcctgggctacatggtcattctgctgtagcatgcatctaggatagagtgagcaccagcaaaaaatgtcttanctgaacatctctttaagtcaaattaaaaanttntataaacaaantgtaaccatgccatgaaaatctcttannattttntntttnttggccaacaggtatttacnaaaaaataanaatccaaagtctccaaaaatggtttaaaaaaanttttgcggttnaattnnagtnttggaaaaaatttttnnttcnngccncnttntannggnatttntttttgaaaaaattt

SEQ ID NO: 2827 - DNA, 533 bp, Homo sapiens
  misc_feature 455, 522: n = A,T,C or G
acaaaaccaaatgtttgttactataacttctgcatcacaattaaaatccaaacagttttttaaaaacagtcaactcaatcaaaacccactacttcagaatcaatagcttctttgaagccacagtaacacttaaatatggttaagactcgaatgcagaaatttggttggttggaaagctaattaaacttccaacttgctcaaatagaattacaaaaaggcaaaattgtgtttttcacagagatacagtccactggaatcaccaacactggacagctgttagagtatttagagtcctgagataacaaggaatccaggcatcctttagacagtcttctgttgcctttcttcccaatcagagatttgtggatgtgtggaatgacaccccccagcaattgtagccttgtgagagaatccattcttctctccacgaatagcaagttgcaagtgacgagggnaatccctttaccttaagctttgatgattctggcagtcagtcctgccggcggcgttaggcaatcacanctggcggcggt

SEQ ID NO: 2828 - DNA, 653 bp, Homo sapiens
  misc_feature 102, 107, 120, 492, 508, 509, 510, 516, 517, 527, 544, 575,576, 581, 585, 587, 588, 610, 629, 633, 638: n = A,T,C or G
acttttttttttttttttttttttttttagggactcataaattctttattttggctaacactgattgcattcattactaccattttatttattacagctcanagganagtcatttactanacattcggttgttattaaacactaaaaattaggcagagactggaggggataaggataagagaacaggataaggagagcagaaagacgctcaggagagtagaaagacactcaggagagaacaagagatcctgcccattcttattatgaggatgaactggctacaggacatgagtagcccaatcagatctaacttaaataccagcctctccaaaaaagttttccaataaagatcccctacaattatttactggacaaaaaagggtgtatttctagaagaatgatctctttgcacaaaagaccacttagacccacttatactaatgcccatgcagactggatccttaaaatgactggaaaatacattttaggacncctgcctccactgatnnntgtttnngccaaaaagngtaaggtctaaaaaatnttttggggggggttttttgcgggcagggaanntattngggngnnctattcccggttccgggggaanaagaacaggatagatttcntttnataanggggggaaaaaatgg

SEQ ID NO: 2829 - DNA, 532 bp, Homo sapiens
  misc_feature 351, 374, 381, 413, 418, 441, 467, 474, 483, 495, 508, 510,515, 517: n = A,T,C or G
acagatgtgcaggaatgctaggtgtggttggttgatgccgattgtaactattatgagtcctagttgacttgaagtggagaaggctacgatttttttgatgtcattttgtgtaagggcgcagactgctgcgaacagagtggtgatagcgcctaagcatagtgttagagtttggattagtgggctattttctgctagggggtggaagcggatgagtaagaagattcctgctacaactatagtgcttgagtggagtagggctgagactggggtggggccttctatggctgaggggagtcaggggtggagacctaattgggctgatttgcctgctgctgctaggaggaggcctantagtggggtgaggcttggattancgtttanaaggctatttgttgtgggtctcataagtggantgtangataatcatgctaagccaggatnaaccgtatccccgttcggttgatagnatgcttnatgggtgcnggttgcttgtcngcgttctcacttnanacaanangtttattctcccctt

SEQ ID NO: 2830 - DNA, 535 bp, Homo sapiens
  misc_feature 309, 349, 402, 427, 435, 453, 461, 464, 485, 489, 498, 502,505, 510, 511, 514, 528: n = A,T,C or G
acatattttggttgaagacaccagactgaagtaaacagctgtgcatccaatttattatagttttgtaagtaacaatatgtaatcaaacttctaggtgacttgagagtggaacctcctatatcattatttagcaccgtttgtgacagtaaccatttcagtgtattgtttattataccacttatatcaacttatttttcaccaggttaaaattttaatttctacaaaataacattctgaatcaagcacactgtatgttcagtaggttgaactatgaacactgtcatcaatgttcagttcaaaagcctgaangtttagatctagaagctggtaaaaatgacaatatcaatcncattaggggaaccattgttgtcttcacttaatccatttagcactatttaaatnagccaccaggtttatgacttatatncttgaaantttttatctgagggttgntataactnttnagatgtaatgcttataaaatnactntcattttancttnttncatgnnagngaactgataagatnctgaaac

SEQ ID NO: 2831 - DNA, 477 bp, Homo sapiens
  misc_feature 385, 390, 394, 461: n = A,T,C or G
acgcggggcctttctaactccgctgccgccatggctcctgtgaaaaagcttgtggtgaaggggggcaaaaaaaagaagcaagttctgaagttcactcttgattgcacccaccctgtagaagatggaatcatggatgctgccaattttgagcagtttttgcaagaaaggatcaaagtgaacggaaaagctgggaaccttggtggaggggtggcgaccatcgaaaggagcaagagcaagatcaccgtgacatccgaggtgcctttctccaaaaggtatttgaaatatctcaccaaaaaatatttgaagaagaataatctacgtgactggttgcgcgtagttgctaacagcaaagagagttacgaattcgttacttcagattaccagncgaanagangaggaagacgaggataaatttcattatctggaaattttgtttaattctggaataaacttgggacccnaaaagaataaaaaata

SEQ ID NO: 2832 - DNA, 493 bp, Homo sapiens
  misc_feature 411, 422, 454, 486: n = A,T,C or G
acgcggggagaagttaggggctgcagcggcgctggctttaggtgaacgacgtggtgaggagtgggtttcgggcatgagaagtcacagggccgtttcctagtctctcttcacttctttgggtcttctcagagaaagaaggctgccgtgggtaggctgggggcggagactatcgggaagagaaaattacttttcccactgaaacacacccaagtatatgcccagccttcatgaaagtgaacagagaaacgaagcgcctttatgtgggtggcttagccaggacatttctgaggcagacctacaaaatcagttcacagatttggagaagtttcggatgtggagatcatcacacggaaagatgaccaaggaaccccagaagtttttgcatatatcacatcagtgtacagaagcggnctgaaaaatgntgctgtttaaataaaacaaatggaaggggacnttacaaatcactagcaaagaagctttctgaanatggcca

SEQ ID NO: 2833 - DNA, 501 bp, Homo sapiens
  misc_feature 413, 433, 454, 459, 469, 470, 495: n = A,T,C or G
acaagttcggctttgagcttcctcaggggcctctgggaacatccttcaaaggaaaatatgggtgtgtagactactgggtgaaggcttttcttgaccgcccgagccagccaactcaagagacaaagaaaaactttgaagtagtggatctggtggatgtcaatacccctgatttaatggcacctgtgtctgctaaaaaagaaaagaaagtttcctgcatgttcattcctgatgggcgggtgtctgtctctgctcgaattgacagaaaaggattctgtgaaggtgatgagatttccatccatgctgactttgagaatacatgttcccgaattgtggtccccaaagctgccattgtggcccgccacacttaccttgcaatggccagacaaggtgctgactcaaagttgcatcatcanagcatcatttatctaagganttgccatatggcgtgcaaganccttnggttaaaaannagcctttttctgggctgaaatcttnagtgaa

SEQ ID NO: 2834 - DNA, 506 bp, Homo sapiens
  misc_feature 27, 70, 171, 279, 281, 283, 289, 300, 339, 362, 366, 371,393, 410, 412, 421, 422, 427, 432, 434, 436, 438, 440, 452,457, 468, 469, 473, 476, 478, 483, 484, 498: n = A,T,C or G
acttttttttttttttttttttttttnattttttaaaacaactttgtgatatttatattccattgcacanatatgggttatacaaattagtaacacaagttatttcttaaattccaaacattttctaaaatattattacagcagatgcctaggatattaaaacataaaggnggaaatcattctctaaatagttaaatatatttgacactgaaaatactgcacattttaattagaggaaaattaaaatgtgtgctcaaatgcactaacaaactaggtagnangncaactnacaactacaantaagtcactgtggccatttttacgtattgcatatatatnatattctctagataatccgactnttgnaaatnctattaaacataaagcccgatnatgattaaagaaattgnantcttcttannctaangggantntncntncgggggccgttnaaggnaaattacaaanntggnggncntatannggatccaacctcgntccaactt

SEQ ID NO: 2835 - DNA, 664 bp, Homo sapiens
  misc_feature 32, 47, 147, 317, 376, 403, 412, 429, 433, 434, 444, 452,455, 463, 473, 475, 484, 493, 501, 510, 517, 519, 529, 530,540, 546, 555, 557, 569, 581, 586, 596, 601, 603, 604, 608,621, 630, 631, 635, 639, 645, 647, 651: n = A,T,C or G
acttttttttttttttttttttttttttttanaatctgaagtcttgngttttactaatggaaaaaaaaatacagaagaggttttgttctcatggctgcccaccgcagcctggcactaaaacagcccagcgctcacttctgcttgganaaatattctttgctcttttggacatcaggcttgatggtatcactgccaggtttccagccagctgggcacacttccccatgtttgtcagtgaactggaaggcctgaactagtctcaaagtctcatccacagagcggccaacagggaggtcatttacagtgatctgccgaanaatacccttatcatcaatgataaaaaggcccctgaacgagatgccttcatcaccttaancccataatcctgagcatggtgcgcttnggtctgaancaaaggaatgtcatggncccnncctcttgttntaagggtntgncctgcctnatgacaaatnanatcccaaancccaatccntggagtgngttttaatntttgccntnctgaacaagnntccgggggcncaaggngaatcaaangngaaaaaaaaacncatttttttttnaaagnggtttttaanacctngnnaaantggttattggggngggccattnntttnaaanttttangnccanaagggaaaatccc

SEQ ID NO: 2836 - DNA, 608 bp, Homo sapiens
  misc_feature 369, 392, 399, 422, 428, 440, 457, 461, 470, 475, 490, 503,511, 520, 527, 533, 534, 537, 540, 558, 560, 566, 572, 579,582, 584, 605: n = A,T,C or G
acatgtttgaagaagtgccgattgtaattaaaaattcacatctgatcaatgtcctaatgtgggaacttgaaaagaagtcagctgttgcagataaacatgaattgctcagccttgccagcagcaatcatttggggaagaatctacagttgctgatggacagagtggatgaaatgagccaagatatagttaaatacaacacatacatgaggaatactagtaaacaacagcagcagaaacatcagtatcagcagcgtcgccagcaggagaatatgcagcgccagagccgaggagaacccccgctccctgaggagacctgtccaactcttcaaaccaccacagccgcttgccaggatggctcgttgttattgnagccagataaaacttactgccanacttaangagtcactggccaaaacttaggnagcttntcatgccagctnttaaaatacaacactanaaanggaggttcngaaanagtacatgactttgnagcccccaggcanttttgganaatttttgntttgaanccaagnnttnttnagcttgccgtttgtttanangttttnccaatnaaaaaanaantngaaaaaaaaaaaaaaaacctnccg

SEQ ID NO: 2837 - DNA, 606 bp, Homo sapiens
  misc_feature 368, 375, 409, 416, 428, 430, 444, 457, 500, 512, 520, 528,533, 535, 542, 548, 554, 571, 583, 586, 603: n = A,T,C or G
gtggtccggccggggtacctttttgatgctatattactgcgattaaaaagttcttgcaggtaatgtttatgatatgttaaacgttgtaatttcctatcgtaattataacattcccattcttttgtagatgaaacttctacatattgaaccacagattttctgagcttctaaatgtagcctttcattgcacatttcagtgatcagaatagatatccttttacacgcacaaaagcaatagattcattcagtggacaagttccttgtttaactacacagctatgatggaatgatatatccaagttccttgcctcagtgaaatatgcatattgtatatcatgaaagtgggatgccaagtaagcttaaaatgnattctcngcaaagagattagactttaatactctataaacangttgcgncattcccagatngnttccttgagttttntaaacaacttatnattttgccgttaaacactacaacggaagccttctaaaattctnccttttattcanttaacctntttggttnagggntngcaaacnggaaantttttncccctttcccaaagganattcaaaaaaanggncctttaaattaacgganatt

SEQ ID NO: 2838 - DNA, 452 bp, Homo sapiens
  misc_feature 260, 318, 378, 402, 407, 408, 435: n = A,T,C or G
acgcgggattctattgagctattacaccagttttaacaccttcctcgtgttatgtttaaaaaaataaataaatttaagaaaaccattttaaataatgcacagttgcagcctggaaaaacttaaggtggcgccttatagtatcaattttaggagctttatttggtgcatttaacgcaactggtaattgcagaatccactttgcctgtgtaagtgaaaaatatagactgttatcttgttggccctatgaaattctgcacttncattatatactctaccttcttaattacttctggcaagatgttctgccttagcactcanttgcattctttccttttcttcctgttcttatgctttaattctgaggacatatgagggtanatatatatcttttaaaaatacaanatttnntaggcaaccatttcttaagttgttgcnaaatttaaaatgttttt

SEQ ID NO: 2839 - DNA, 563 bp, Homo sapiens
  misc_feature 404, 411, 413, 425, 427, 474, 483, 489, 499, 522: n = A,T,C or G
actgtctcttttggaaaagttcttgatccccaatgcttcacaagcagagagcaaagtcttctatttgaaaatgaaaggagattactaccgttacttggctgaggttgccgctggtgatgacaagaaagggattgtcgatcagtcacaacaagcataccaagaagcttttgaaatcagcaaaaaggaaatgcaaccaacacatcctatcagactgggtctggcccttaacttctctgtgttctattatgagattctgaactccccagagaaagcctgctctcttgcaaagacagcttttgatgaaccattgctgaacttgatacattaagtgaagagtcatacaaagacagcacgctataatgcaattctgagagacaacttgcattgtggcatcggatacccanggagacnanctgaagcagganangagggaaattaccggcttccacttttgctgctatctaaattacacanaaacatttnctcatntgccccaaangtttttgtacattatgcaggttngtacttttttgaattttaattcccaggggttttttttattt

SEQ ID NO: 2840 - DNA, 575 bp, Homo sapiens
  misc_feature 238, 393, 394, 403, 405, 421, 423, 424, 463, 477, 494, 495,509, 510, 520, 521, 533, 535, 536, 539, 545, 571: n = A,T,C or G
acgatcgaagggactatgtcttcattgaattttgtgttgaagacagtaaggatgttaatgtaaattttgaaaaatccaaacttacattcagttgtctcggaggaagtgataattttaagcatttaaatgaaattgatctttttcactgtattgatccaaatgattccaagcataaaagaacggacagatcaattttatgttgtttacgaaaaggagaatctggccagtcatggccaangttaacaaaagaaaggcaaagcttaattggcttagtgtcgacttcaataattggaaagactgggaagatgattcagatgaagacatgtctaattttgatcgtttctctgagatgatgaacaacttgggtggtgatgaggatgtagatttccagannttgatggancngatgatgattccaagnanngatgtgaaaaatgccaatctgagtaggaattttggatcncctgattttgaaanaaaaaaactttctgcannattctaatgaaagnntcctgaatgnnactttaagcaantnntgnttgccnttaacttttaccgtttttttaaagtntatt

SEQ ID NO: 2841 - DNA, 508 bp, Homo sapiens
  misc_feature 301, 361, 417, 451, 458, 467, 472, 476, 480, 500: n = A,T,C or G
acacctgtaatctgttcctcttcaacaaaggaagcagaagatgcacctgaaaaactttccagagcatctgatatgaaggacacacagctcctcaagaaaataaaggaagcaattggtaagatccctgctgccaccaaggagccagaggaacaaactgcatgtcatggcccatcaggttgtcttagcaacagccttcaagtgaaaggcaatactgtctgtgatggtagtgttttcacttctgacttgatgtctgactggagcatctcttcgttttcaacgttcacttctcgtgatgaacaanacttcagaaatggccttgcggcattagatgccaacatagctagactccagaagtctttanggactgtcttctgaagaatgaattcagaagaaaatcatcaggtgctcttttaaacnagaacttgctatattgaatgtgattttctttagngaaagangtttatgtntatgnggangaanatatggactgcccggcggcngttagggc

SEQ ID NO: 2842 - DNA, 406 bp, Homo sapiens
  misc_feature 119, 123, 128, 149, 158, 174, 176, 185, 191, 203, 204, 256,278, 288, 291, 298, 305, 324, 342, 349, 352, 364, 373, 380,382, 386, 401: n = A,T,C or G
actacacgcgcctgggcaacgacttccacacgaacaagcgcgtgtgcgaggagatcgccattatccccagcaaaaagctccgcaacaagatagcaggttatgtcacgcatctgatgaancganttcanagaggcccagtaagaggtatntccatcaangctgcaggaggaggananagaatgganagacanttatgttcctgnngtctcatccttggatcaggagattattgaagtagatcctgacactaaggaantgctgaatctttttggacttcngcagtctgtncanccttcangccactnagcctacatttgggatgantttcataaacgccttcgngacctgnttnaatttttattgntgagctgtnttatttntnattnaattctgggacaatntgcat

SEQ ID NO: 2843 - DNA, 498 bp, Homo sapiens
  misc_feature 401, 423, 424, 444, 462, 468, 490: n = A,T,C or G
actgtcggtttcagaaatgccttgcagtggggatgtctcataatgccatcaggtttgggcggatgccacaggccgagaaggagaagctgttggcggagatctccagtgatatcgaccagctgaatccagagtccgctgacctccgggccctggcaaaacatttgtatgactcatacataaagtccttcccgctgaccaaagcaaaggcgagggcgatcttgacaggaaagacaacagacaaatcaccattcgttatctatgacatgaattccttaatgatgggagaagataaaatcaagttcaaacacatcacccccctgcaggagcagagcaaagaggtggcatccgcatctttcagggctgccagtttcgctccgtgaggctggcaggagatcacaganatgccaaaagcatcctggtttnnaaatcttgcttgacgaccantaacttctcaatttggancacganacatttcacatgttgctcttgntataagaa

SEQ ID NO: 2844 - DNA, 461 bp, Homo sapiens
  misc_feature 237, 350, 384, 398, 429, 439, 456: n = A,T,C or G
actaaactgatgggccgggagggggcattcacagttgctgggcagagcagtgacaggtcagagttgtgtttcaaataggcctaagtaggactaagttgtattaactaacttgaatggactcagctgtaacattgtctgtcttgaacactacacactttggggccaaatggttggtgaaccatgtgtactgtttattaaccaaccagcttagaaaaataatcatggtagacaccttanttcattcttctaataagcctgttgatctggtcctccctgttgccagcatctccaccttctacaaaatgggtggtttttttcttcattccacctcgtggagaagacaatttgangggcccaggaagttatttgctctttgaacgtttncaacatttaatctnatgaatcaatcctccatgcaaatgatgccgntttccaaganatcatcatcaaggtttntgcaa

SEQ ID NO: 2845 - DNA, 537 bp, Homo sapiens
  misc_feature 307, 409, 419, 422, 444, 448, 452, 464, 471, 484, 489, 495,498, 505, 513, 530: n = A,T,C or G
acgtatagttaagtgatgaaagaaaggtatttggtttgtgtcgtcaccttatacatcctagtgatgaaactaaccaaactatgcctccatgccttccctgaaaataacctgagtcggctgacgaaacagactgagcagcgtggttctcagtccactttatcagaggttgagctggaaaaccagagggctaatgtagtctaccagcagcttgtgcggataaccaagagttcttggctgttgcagtatccactgtcccaaaggctaagccactgaggtggaaatcaatcgcagcataaagaagactgancttaagctgcataacctgcgagactacctggagaggacaaaagaggatcaggatcctcattcccacaaaatgtggtgcgggttttagtgctctatgcattanctgctcaganaantacattacttcatagttcttantttnattnaatgctacactnaaaatcncccctttgattgnggggntttttntcnatttttnaataaaangccccatcccgtctttntttttaa

SEQ ID NO: 2846 - DNA, 325 bp, Homo sapiens
acgggtagtggcgcacatggtagcattgagcatatggacaaactccaccttgtccatcatcttcttggtttgcccatatcggattcgaagccggcgagcctggtaatccgtgcaattagaacaggagaccaactcacggaaggctcctgagcccggaaaccaggcctccaggtcaagcttcttactggcagcatgattcaaagaacctgagacaatattcacaatgtggtaaggaatccccagggactggtagaactcctctgcggtggtaatcatctcttcaaacatctcccatgacttgttgtcatggggtgatgagtacctg

SEQ ID NO: 2847 - DNA, 455 bp, Homo sapiens
  misc_feature 226, 236, 238, 321, 330, 341, 379, 390, 396, 453: n = A,T,C or G
acctagaagagaggcgggtcaaagaagtagtgaagaagcattctcagttcataggctatcccatcaccctttatttggagaaggaacgagagaaggaaattagtgatgatgaggcagaggaagagaaaggtgagaaagaagaggaagataaagatgatgaagaaaagcccaagatcgaagatgtgggttcagatgagtaggatgacagcggtaaggataagaagangaaaactatnangatcaaagagaattacattgatcaggaagaactatcaagaccaagcctatttggaccagaaccctgatgacatcacccaagangagtatggngatttctacangagcctcactaatgctgggaaagacccttggcatcaancactttctgtnaaggcngttggaattcaggcttgttttattcctcgccggctcctttgactttttgggacctgntg

SEQ ID NO: 2848 - DNA, 545 bp, Homo sapiens
  misc_feature 327, 389, 391, 414, 427, 429, 430, 447, 450, 453, 469, 474,482, 484, 490, 523: n = A,T,C or G
acagatttgctttctcttacaaaaagaaaaaaaaatcctgttgtattaacatttaaaaacagaattgtgttatgtgatcagttttgggggttaactttgcttaattcctcaggctttgcgatttaaggaggagctgccttaaaaaaaaataaaggccttattttgcaattatgggagtaaacaatagtctagagaagcatttggtaagctttatcgtatatattttttaaagaagagaaaaacaccttgagccttaaaacggtgctgctgggaaacatttgcactcttttaagtgcatttcctcctgcctttgcttgttcactgcantctaaaaaagaggtaaaagcaagcaaaggagatgaaatctgttctgggaatgttcagcaccnantaagtgccgagccactgccccgntgctgctggcccntnngaaggaaatgctgttcnttntcncctgtgctttaaaacncaganttaccttnanattccnctgctaaatatttttttggaagggaggtttatnaacaaaaaaatttttttttttt

SEQ ID NO: 2849 - DNA, 436 bp, Homo sapiens
  misc_feature 339, 346, 357, 366, 378, 382, 388, 392, 415, 427: n = A,T,C or G
aataaagaacctctatcagtgagacttctcattttatagcaaatacatttttgcagcttaaattttcttgaattcatatacgcttctgtcatttaaacaaacttccagagaaaactggtctctatatatttaagtaacaaatttgacaaaatacatatttatacatatatagatctctaatataaatattaaatttgaaaaaatcaaatgtgaagcagaaactgctatacaagtatattgtataatatttattttatacattaaagtatttggttgaatatacttcaattaggttctaaaaaacaccattatctgcttcttagtaattgcgacattctnaaaagcntgtgaaacggnttaaactcnactctggctaantcanaattcnggtngtctcttaactttttctctaaanatttgccggagntacaaggaa

SEQ ID NO: 2850 - DNA, 495 bp, Homo sapiens
  misc_feature 189, 412, 423, 426, 430, 431, 447, 459, 462, 467, 469, 472,482, 491: n = A,T,C or G
actactgctgttttctgaagacgcgagggcaagtgcagccagccgtttcttttccttctttaagcgtttcttctcctgtttctccagcttcctagtaatctcagcagccgcttcctctgcctgaaccattgcttccttcatgacatccagattctttcgtggtatctctccagtctcatagaaggacangtcgctcttcaacttgttctcgaagcttctccccgaatacactcgtgggcacctcagagaagcaatcgattcgtgaggcaatactgcatttgtttgccaggtatcgggagatgcggcctttgttcttggcagctgctcggccaatgaaaggtggagtggaaaatgagtccatattttgggagtgttacccttgcttaaggctctgacagggccttttcagccnaaggatctgantgnggtnntgatacttgccagttngtaaggtgcaantgngcgananacntccccaacgntcccaatangggg

SEQ ID NO: 2851 - DNA, 638 bp, Homo sapiens
  misc_feature 30, 34, 36, 43, 46, 66, 129, 131, 186, 189, 259, 303, 378,415, 417, 424, 431, 439, 442, 447, 457, 484, 487, 490, 497,500, 504, 515, 516, 519, 530, 544, 545, 548, 560, 565, 570,589, 593, 600, 601, 603, 608, 609, 625: n = A,T,C or G
actttttttttttttttttttttttttttnggananacaaggnctnactatgttgcccaggctggngtcaaactcctggcctcaggcaatcctcctgtctcagcctcccaaattgctgggattacaagngngagtcaccacacctggccttattttcgagttttaaaggcaattttcttggccagnganactccatgttgagtcagtatggtctgggggttgaaaaatttaaaaaatcctattttgatatgttctgcanagcccatgatataggggatttttttccttttccatgtctctctngttacacagaattaccaaatatttatattcctgatacttttcaaaatcagtatattttacaaactttctgtatanactctgattttctactatttatgattaaaccacacantntgatttntatagcngacagttnatntatcntaaagtaaanaatcttttctcttgtggaggcaaattnacnatnaaaaaangantggnttgttaacaannttnttaaaaaagtnttttattttttttnnaancccaaaaaaagnggggnccctntttttcgggaaaaaaaaanaaangggtttnngnggggnntttaaaaaaaaattangaaaaaataatcc

SEQ ID NO: 2852 - DNA, 620 bp, Homo sapiens
  misc_feature 398, 411, 445, 461, 464, 490, 543, 549, 551, 555, 560, 564,572, 576, 579, 586, 596, 597, 613: n = A,T,C or G
acctgtggaccaagtgtttgggcaggatgagatgatcgacgtcatcggggtgaccaagggcaaaggctacaaaggggtcaccagtcgttggcacaccaagaagctgccccgcaagacccaccgaggcctgcgcaaggtggcctgtattggggcatggcatcctgctcgtgtagccttctctgtggcacgcgctgggcagaaaggctaccatcaccgcactgagatcaacaagaagatttataagattggccagggctaccttatcaaggacggcaagctgatcaagaacaatgcctccactgactatgacctatctgacaagagcatcaaccctctgggtggctttgtccactatggtgaagtgaccaatgactttgcatgctgaaaggctgtgtggnggggaccaaaaancggtctaccctccgaagtccttgctggtgcaacnaagcgcggctctgganaanatgacctaaattcattgcccactcantttgcatggccgttcaacatggagaaaaaagattcttggaccctttaaaaacnattttngnaganaagtnttcnccaaaatntttnggnggggggntaaaattttnnaaaaaaaaaaaaaaanttcggcc

SEQ ID NO: 2853 - DNA, 446 bp, Homo sapiens
  misc_feature 372, 391, 419, 423, 437: n = A,T,C or G
aataaagaacctctatcagtgagacttctcattttatagcaaatacatttttgcagcttaaattttcttgaattcatatacgcttctgtcatttaaacaaacttccagagaaaactggtctctatatatttaagtaacaaatttgacaaaatacatatttatacatatatagatctctaatataaatattaaatttgaaaaaatcaaatgtgaagcagaaactgctatacaagtatattgtataatatttattttatacattaaagtatttggttgaatatacttcaattaggtttctaaaaaacaccattatctgcttcttagtaattgcgacattcttgaaagcatgtgaacgggataacctcactctgngcttaatcagattctgttngtctcccaaactttatctcctaaacatntgcngagctccaaggaanggacattac

SEQ ID NO: 2854 - DNA, 492 bp, Homo sapiens
  misc_feature 286, 404, 413, 453, 458, 467, 469, 486: n = A,T,C or G
acgcggggagtcagtcccagtcaggacacagcatggacatgagggtccccgctcagctcctggggctcctgctcctctgtctccgaggtgccagatgtgacatgcaggtgacccagtctccagcctccctgtctgcgtctttgggagacggagtcaccatctcttgtcggacaagtcaggccattaccaagtttgttaattggtatcatcagagaccaggggaagcccctaaactcctaatctatgctgcttccattttgcaaactggagtgccatcaagattcangtgccagtggatttgggacagagttcactctaccatcaagtagtctgcacctgaagatttgggaattactattgcaacagattacacttatccttcaccttcgccaaggacacggtgnactcaacanctgggctgacatctgcttatttccgcattgatagcagttnaatcnggactgctntntggtgcctgtaatactnatcaaa

SEQ ID NO: 2855 - DNA, 464 bp, Homo sapiens
  misc_feature 269, 273, 285, 296, 297, 328, 344, 377, 399, 402, 410, 421,442, 448, 456: n = A,T,C or G
acactgttggtgttatatggggatggggttctcggtaattttgtttattatttatgtttattattatgttttatcattaattattcaataaatttttatttaaaaagtcaccctacttagaaatcttctgtgggggtgggagggacaaaagattacaaaccaaaactcaggagatggtaacactggaattgataaaatcacctgggattagttgtataactctgaaccaccaaacctctgctatcaagccttgctacagtcatggctgnccanaaagaattaccngtattttttcnnagaaaggatccatggcctttaagaacttcanaactttaagaactcanaagtcttaagttgctgaagctcaagtaacgaantgaatgcaatcaaaaaaaaatncanggagcaangcttggaggcnattctatcctaaggactgtcnaacctnacagacantaattact

SEQ ID NO: 2856 - DNA, 513 bp, Homo sapiens
  misc_feature 407, 432, 436, 453, 476, 480, 488, 511: n = A,T,C or G
actttttttttttttttttagtatttcagcaggatctgctggcagggtttttttgttttatttgtttgcttatttttaaattaactgttttgagctttgaatacttaaggctttagagggagaacccaattttcaattatgttggctttttataaagcttgagttatgtaagatttaaataaaagtttgctaccaagatgattgccttattgaataggtcactattaaattcctttaaatgttgatatctgccatttgtggaaacaaccgtaaattctacttaagtgtaaacaaggcaagcctcagaccagcaataaattactcagtttggataacattattttgtgcagtaatcaaatttgccaaagctttatctgccctttaacaagttgagtaaaaataaaggnattttaatcaatgggtcatgatttngctnaattaatctttaagaanggacttttcaaggcaattaaacnttanaaaactcnaaccttggacttgttaaaaatcntt

SEQ ID NO: 2857 - DNA, 549 bp, Homo sapiens
  misc_feature 413, 417, 460, 485, 487, 493, 500, 501, 506, 513, 529, 548: n = A,T,C or G
acatttaaatttttggtggtggtttgtgttttaaaagaaacagcttccttacgatttgcctcaagttctggtggaaatgcttacaggaactagctaataaacaaaaaacaagagaagcgcattcaaaatactgatttactttggtagcaaatggtttttctttgaagactaatgaagatagacaagacccattaaggtgaagtggactatttcaaatattcaacagtttacataaaaaaaaaatcttttaagagctaagcgtctgtatccacggatagcaatgcaatacctagtttatgatgacttgaaacaaaacaaatgcccataaggaaaaaagctgtattttatctaaatttactttcagcaatagttcagtaacattttcttccaatcaatactcctcttttataagntgtnctgggaccaacaagttaggaataaggagttaaaaagttaccgnttcagtttaaataacaggaccttgntnccttantggcaanntgggnaaaaaantgcattttaaaaaganctggccggcccctaggggng

SEQ ID NO: 2858 - DNA, 528 bp, Homo sapiens
  misc_feature 319, 386, 440, 449, 464, 472, 482, 492, 497, 499, 520: n = A,T,C or G
acgcggggagcggaagtaggagctctcagaggctaagaaggtggagaccggagaagctgtgaggttctttagcgtcacctccctcactgggcagcatgggggagaagtcagagaactgtggggttccagaggatctgttaaatggtttgaaggttacagatactcaggaagccgagtgtgctggccctccagttcctgatcccaaaaatcagcattcccagagtaagctgctcagggatgatgaggcccatctccaggaggaccagggagaagaggagtgttttcatgactgcagtgcctcatttgaggaggagccagnagcggacaaggttgagaacaaatctaatgaagatgtgaattcctctgaactagatgaagaatcctantaaactggaaaaaacatgtcggatgaagagaaccagaaaagaagagaagagagncttactaangaggagggaatgacngttaaaangagatttttnaagctgaaanttttnantcaacctcaaatggccatctnctccaaag

SEQ ID NO: 2859 - DNA, 653 bp, Homo sapiens
  misc_feature 343, 467, 468, 479, 488, 494, 496, 505, 513, 514, 523, 543,552, 555, 558, 572, 574, 578, 579, 581, 582, 584, 593, 599,602, 604, 612, 621, 622, 628, 631: n = A,T,C or G
accaagggatggaagaagtaaatatagctcaggtagcactttatactcaggcagatctcagccctctactgagtcccttagccaagcagtttctttcaaagaagccagcaggcgaaaagcagggactgccactgcatttcatatcacactgttaaaagttgtgttttgaaattttatgtttaagttgcacaaattgggccaaagaaacattgccttgaggaagatatgattggaaaatcaagagtgtagaagaataaatactgttttactgtccaaagacatgtttatagtgctctgtaaatgttcctttcctttgtagtctctggcaagatgctttaggaanataaaagtttgaggagaacaaacaggaatctgattaagcacagagttgaagttatacccgttcacatgctttcaagatgcccaattactaaaagcagatatggtgtttttaaaaactattgaanntttcaccaatncttaattgntaaatnanttataaaantactggtnncagttctgnttaaattgatttttcaattnatttttttnaanacnatttttttaatatngntcgnnanntntgaaaaaanaaaaanccntngtgtggtnttcaaaacnntttttnaanttactcaaagtttgtttataaa

SEQ ID NO: 2860 - DNA, 399 bp, Homo sapiens
  misc_feature 278, 289, 337, 338, 355, 364: n = A,T,C or G
acctgttactgctgctacttcctcgtttgacaccttcctggaatctctcttgatttttgaggaaatacctagtaacaaacatgactgagttctggcttatatctgctcctggggagaaaacctgtcagcaaacatgggagaaattgcatgcggcaacttcaaagaacaataatcttgctgtcacttccaagttcaatattcctgacttaaaggttggcacgttggatgtcttggttggcttgtcagatgaactgctaaactggatgcatttgtagaangagtggttaanaaagtagctcaatacatggctgatgtattggaagatagcaaaacaaanntcaagaaaatctgtggntaatggagnggcttggctattatataacaaggctccaggggact

SEQ ID NO: 2861 - DNA, 589 bp, Homo sapiens
  misc_feature 319, 351, 393, 395, 448, 451, 460, 463, 467, 492, 493, 497,513, 523, 527, 533, 534, 538, 542, 556, 563, 567, 589: n = A,T,C or G
acagccaacggtttcccttgggggctttgaaataacaccaccagtggtcttaaggttgaagtgtggttcagggccagtgcatattagtggacagcacttagtagctgtggaggaagatgcagagtcagaagatgaagaggaggaggatgtgaaactcttaagtatatctggaaagcggtctgccctggaggtggtagcaaggttccacagaaaaaagtaaaacttgctgctgatgaagatgatgacgatgatgatgaagaggatgatgatgaagatgatgatgatgatgattttgatgatgaggaagctgaagaaaaangccagtgaagaaatctatacgagatactccanccaaaatgcacaaagtcaaatcagaatggaaaaactcaaacntntcaccaccagatcaaaggacaagaatccttcagaacaggaaaaactcttaacnccnaaaggaccnttntgtnaaactttaacaaaatcagcagtttnnaaangggtttttttccaaanggagccactnttantttttnnaaanattntcggatacccaagntttttantttnggggggggagctttttaaaaan

SEQ ID NO: 2862 - DNA, 478 bp, Homo sapiens
  misc_feature 226, 266, 319, 334, 349, 366, 391, 396, 417, 458, 471: n = A,T,C or G
actttgcctacggcagcaacctgctgacagagaggatccacctccgaaacccctcggcggcgttcttctgtgtggcccgcctgcaggcaagaaggggttaaaagtggaatgtatgttgtaatagaagttaaagttgcaactcaagaaggaaaagaaataacctgtcgaagttatctgatgacaaattacgaaagtgctcccccatccccacagtataaaaagattntttgcatgggtgcaaaagaaaatggtttgccgctggagtntcaagagaagttaaaagcaatagaaccaaatgactatacaggaaaggtctcanaagaaattgaagacntcatcaaaaaggggnaaacacaaactctttanaacataacaaaatatatctaagggnttctntggctaatataaatttttaancttgaaacagggattggggactcagttgacctttcagcagngcttgaagagatntacttgg

SEQ ID NO: 2863 - DNA, 506 bp, Homo sapiens
  misc_feature 186, 220, 232, 385, 395, 401, 408, 414, 430, 431, 437, 450,461, 468, 471, 474, 484, 485, 487, 491, 494, 501: n = A,T,C or G
actttgaaactcatgttgagattttaccctctcctccaaccattttgggaaaattatggactgggactcttcagaaattctgtcttttcttctggaagaaaatgtccctcccttacccccatccttaactttgtatcctggcttataacaggccatccatttttgtagcacacttttcaaaaacanttatataccctggtcccatctttctagggcctgnatctgcttatanagcaggaagaataaagccaccaacttttacctagcccggctaatcatggaagtgtgtccaggcttcaagtaacttgagttttaattttttttttttcttggcagagtaatgtaaaatttaaatggggaaagatttttaatatttaatactaanctttaaaaanaaaccngctatcnttgctntgatcttgatgcaaannctttgntgtattaaaaaantcctgccgggncggcggnccnaanggcgaattcnncnactnggnggccgtntatga

SEQ ID NO: 2864 - DNA, 668 bp, Homo sapiens
  misc_feature 291, 297, 300, 303, 307, 315, 316, 322, 342, 354, 357, 364,386, 388, 410, 412, 416, 421, 443, 452, 472, 483, 486, 490,503, 513, 543, 547, 552, 562, 563, 571, 586, 632, 639, 658,667: n = A,T,C or G
actattaccaaaggggtattctggcaaaagtggaaggtcagcgcttggtgtatcagtttaaagaaatgccaaaagatcttatatatataaatgatgaggatccaagttccagcatagagtcttcagatccatcgctatcttcatcagccacttcaaataggaatcaaaccagccggtcgagagtatcttcaagtccaggggtaaaaggaggagccacttcagttctaaaaccagggaattctaaagctgcaaaacccaaagatctgtgggaagttgcacaccatcaaaaantttganganagngcanccacgcanntttccntttcttacccagtttttcanactggttaatgntantacctgngggggggaaataactgaacccnanccgggctgagcgtccaaaaatngnggcnacccntgctttcactaaaaaggtttanaaaaacaanttgcgaataacagtccccgnggccttcctgngangggngacgttgcattanccccacctcnttttagttgcctaagcattgcctggccttnctgnctaancttttcctgnnagccaaanaaatggacattccanggagttggaagtgaagcttttgattgtgaaaccttttgcttcttgngtacctngggcgggacccctaagggngaattccanc

SEQ ID NO: 2865 - DNA, 389 bp, Homo sapiens
  misc_feature 22, 23, 143, 217, 224, 246, 266, 293, 308, 310, 316, 325,327, 334, 341, 360, 367, 369, 386: n = A,T,C or G
acacatgcacatcaaaacactnnaactgaatatagatgccattacattatttagttacgttacaaagcaaacggcaggttcataaacgttgttctattatgtatcaactgaaaaaaatatattcaaaaaaaaagtttttgaanactcatgggagtggaatgtgcccacattaggaataaagcttttacaggaccacctgtctccagctggctcccanggaccantgaaaacagctggctccctcanaaagaccaagatgggcttgntaataattttcaattggactttctaancttattcctccttgntnaccaancgggagggncnaaccctnataaatnggcccccatggggttgggnttgggcncnaaagccatttatttggnaag

SEQ ID NO: 2866 - DNA, 667 bp, Homo sapiens
  misc_feature 310, 315, 326, 348, 368, 377, 387, 394, 423, 430, 439, 450,457, 461, 498, 501, 538, 544, 557, 579, 589, 593, 600, 607,612, 626, 637, 639, 645, 659, 662, 666: n = A,T,C or G
acagcaatgaaacaccaaagggacgttttcctccaaattgtgtataagcttgtttgatatcacacagcgctgtaaccaactgctcacaaggtattggctcctgatactgtaataaatacctttgagcaatgagccttagttcattagtcagaacattagcatcagaagttatgcctgccacactgcaagccatgtcctcattgagtttataaattttttcagaaaaaaagacttcatcaagaagcttgtggatgttgcgtctctctgctgcaagcaaaacaccatcatttgcttaaattccaaacaaggngcttnatgttcaatangcttccatggatattcaacttnggataagcgaccttttgganaaatatagngggcctgggngcatatnttcgaaacatggtttctgaactttatttnagttccnaaagggaanaaccctggaanacctggnaatngccacggggccctttacttccccggaaaaataaaccnccnccgtcaccgaatacccgttgatccccggggtaccttnggccgngaacccgcttaangggcgaaattccagccactggnggggcggtantaantgggatnccagccncggancaaactttgggggnatcatgggcananctgttnctgggggaaaattngtncccnc

SEQ ID NO: 2867 - DNA, 668 bp, Homo sapiens
  misc_feature 260, 272, 293, 308, 317, 337, 355, 359, 367, 376, 420, 424,440, 451, 468, 498, 509, 512, 517, 519, 526, 533, 535, 549,559, 565, 586, 595, 601, 604, 623, 628, 634, 637, 641, 644,666: n = A,T,C or G
acatggcaattagaagttgtcatggtaaaagaaaaccacagctggcctgccacagccaacacaagaaccagaaaatggtagatgaaatgaaggaataaaggtggggtttattccttattataaaagaaaaaaaataattcttcagcagtcttaacaaagacatcaagatacaaaattacaagtgttttgactccagccctgtccccatctcctccaagagcagaggtaggagacagttgaagcaaacaagcaattctgtnaaaattacctanaaaccctacaaattttgattnaaatctaaacttctnttattttgnttttttaaaaaattttaatntcaaaaggcctgctttangtgncttgcctnttcctaccnaaaaataacccccatccccccttttggcagtaacatgctcaagntganccccccactctttttnttttaaacctntgtgggacaagtggggnttttttaaacaaagccccggagaatcaagnggctggttgtnacnggttngnttgttantaatccngngccactttttccanaagggggggnggggcnaaaaccccaaaaggggtttgnggggccttntccccnatncccctttaaaaaacacttncttgntttttnctnaaanggngaagctttttttttaatcccanct

SEQ ID NO: 2868 - DNA, 670 bp, Homo sapiens
  misc_feature 222, 300, 321, 323, 326, 340, 341, 349, 362, 382, 397, 428,460, 473, 478, 490, 493, 541, 550, 577, 581, 586, 588, 589,592, 607, 621, 632, 646, 649, 650, 660, 661, 662, 669: n = A,T,C or G
actttttttttttttttttttttttttatatcacaacatcgtttattatgtgaattttttacaatacaaacaaaaaatacagaaatgcaatatatgaatacagctaaatgcagaatggtgacttttttctcttcaagaggccatgattcccatttctagtaaaataaagagactgcatataggtagaaacaggttggtcattagcttcacaattttgcctanaaatgatctataaatgcatttccccccctgctacttaccataaagtgtaaaaagggagttaaaggaaagtttccttgntgggtccttaccatttgaaananctntttcttttttagcnnggcccatnttttgggaaaatntttaaatttaaatggttttncaaaatgaagccgtnatgagattctggtaaaagagggccctaatgngaattatattttttaaagaatccaaaacaacnaacaaaaagaccntgttntaaaaaaagctntanggccccagtagcatataggggtttttttttccatggggtttttttaanaaaggaagnggcaaaaaataggggcaactggggttnaaanaaatnannttnttgggttttgcggcnttgaatgggaaccntttggtttggnattttcaaaaaaangcnnggttgcttcnnnttttggna

SEQ ID NO: 2869 - DNA, 668 bp, Homo sapiens
  misc_feature 276, 313, 323, 430, 442, 456, 461, 468, 514, 517, 523, 542,544, 547, 558, 575, 577, 580, 598, 605, 611, 614, 618, 645,647, 652, 665: n = A,T,C or G
acaaggtgttttccagcgtgcctcagcaaaatggaaagacgatgttcaactttggctctcctatgtggctttttgtaagaagtgggctactaaaactcgacttagcaaggtattctctgccatgttggcgattcattccaacaaaccagctttgtggattatggcagccaaatgggaaatggaagatcgattgtcttcagaaagcgcaaggcaactatttcttcgcgcactgcgctttcatccagagtgcccaaaactttataaagaatactttangatggagctgatgcatgctgaaaaactgaggaagganaaggaaaaanttgaaaaaaccagatggatggggagaatcctgattattctgaaaaatcctaaggccaagttggcatggatcatttcaaaaattctgtaagcataattaaaggggcanaatttccgtgtnctgctttcgattgnacagntatttgnttttgccaaagatctacaaaagaaaattttgatgaccttcaggctnttnacaaanatgatcctttacttgggantntgnggcaagggganaattaaaaattgagtcncnacnagaaaacagccttcaacnaaacagncaaacnatnggangtcggccggaaggaggaaaagggcttngnctttntttaaaaggccantga

SEQ ID NO: 2870 - DNA, 323 bp, Homo sapiens
  misc_feature 10, 20, 34, 35, 89, 104, 114, 132, 135, 141, 142, 144, 145,153, 165, 178, 200, 212, 248, 256, 259, 281, 290, 293, 294,303: n = A,T,C or G
cgcggccgangtacgcattncattttcagtgctnntacaaggaaaaaaggtgatatgtttaattttaaaattttaattggctagctctngcccttatatgactntaatgtctgngagtcattcccagcttanatnaacaanngnnagtattantctcacacatangtgccatacattntatcctcatggatgtgatgcantgaaaagttagntgctctccttttttcttttttttgcgtgcatatttnatttctgnaanttgctggttaactaccctaaantgatttaanaannaacaatgcnttgggggtcctatttggaag

SEQ ID NO: 2871 - DNA, 488 bp, Homo sapiens
  misc_feature 340, 374, 379, 390, 414, 422, 442: n = A,T,C or G
acgcggggagtcgccggcgctgcagagggaggcggcactggtctcgacgtggggcggccagcgatgaagccgcccagttcaatacaaacaagtgagtttgactcatcagatgaagagcctattgaagatgaacagactccaattcatatatcatggctatctttgtcacgagtgaattgttctcagtttctcggtttatgtgctcttccaggttgtaaatttaaagatgttagaagaaatgtccaaaaagatcagaagaactaaagagctgtggtatacaagacatattttgttttctgcccagaaggggaactgcaaaatatagaatccccaaaccttntggatctctaccagcaatgtggaattatcacccnttatnatccaattcgnagatggaggggactcctgacatanccagctgntggggaaataatgggaagancttacaacctgccttaaaaattaccgaaaaacccttaatacacttg

SEQ ID NO: 2872 - DNA, 668 bp, Homo sapiens
  misc_feature 3, 163, 167, 337, 369, 372, 387, 405, 411, 456, 472, 483,486, 509, 516, 521, 525, 535, 551, 562, 565, 570, 579, 588,593, 597, 600, 605, 622, 628, 636, 644, 645, 663: n = A,T,C or G
acncggggctcattgaactcgcctgcagctcttgggttttttgtggcttccttcgttattggagccaggcctacaccccagcaaccatgtccaagggacctgcagttggtattgatcttggcaccacctactcttgtgtgggtgttttccagcacggaaaagnctanataattgccaatgatcagggaaaccgaaccactccaagctatgtcgcctttacggacactgaacggttgatcggtgatgccgcaaagaatcaagttgcaatgaaccccaccaacacaagtttttgatgccaaaccgtctgaattggacccaaattgatgatgctgttgtncagtctgatttgaaacattggccctttatggnggngaatgatgctggcangcccaaggtcaagtagantacaangggaaagaccaaaagcttctatccagaggaaggtgtcttttattnggttttacaaaagatnaaagaaatttncanaaaccctaccttgggaaaactgnaacaatnctggngtcnccaggggccngcttactttaaatggnctttttaacgncanggttnccaaaaatncttgaactnttggntggnttnaatgnaacttgcccgggggggncggttnaaaggggnaaattcannacaatggcgggccgttantattg

SEQ ID NO: 2873 - DNA, 665 bp, Homo sapiens
  misc_feature 336, 338, 373, 409, 438, 449, 461, 463, 476, 488, 494, 514,520, 544, 547, 552, 585, 613, 618, 641, 644, 648, 649, 651,653, 664: n = A,T,C or G
acttgtttgtccttaaatactttatgcctctgaactttcatagaatcctttatgaaagttaacttcatcaatagacggttaatattaatagagccacagtgctaccagtagcaaactaggtagaccattatttgttttgcaacaagatgctaacatggcagactttgaagttgcgtttcatcttaaggaccaagggaggtaactttaaggttgccagtggtggatccagctccgttaggctaagttgtctacagctaatgattgggtctttattctatatccccagcaccctaaaacaggggcacaccaactttcctaaatgttggttgaataaanangtaaccacctaattgaagctttttttcttcctatnttaacatgaagactgcattgtttctctaggaaatgnatgaaatctgaaccttttttgacttgaanaaaaacattcntttttttacaananatttggactttgntgatagggtttnaaaatntattgataaaaattttttgnacctgnccgggccgggcggtcgaaaagggnganttccngacccctggcggggccgtactaagtggatccgngctccgggaccaaacttgggcggaatcntggcntaactgttcctggggtgaaaatngtnttcnntncnaaattcccccna

SEQ ID NO: 2874 - DNA, 667 bp, Homo sapiens
  misc_feature 304, 305, 306, 317, 338, 360, 374, 376, 414, 415, 418, 430,455, 472, 475, 490, 493, 496, 497, 499, 503, 522, 525, 544,552, 562, 566, 568, 581, 589, 604, 606, 607, 611, 623, 624,640, 645, 655, 661: n = A,T,C or G
acagttcactctgcaaaaaatactccttctcagcattcacattccattcagcatagtcctgaaaggtctgggtctggttctgttggaaatggatctagtcgatacagtccttctcagaatagtccaattcatcacatcccttcacgaagaagtcctgcaaagacaatcgcaccacagaatgctccaagagatgagtctaggggccgttcctcgttttatcctgatggtggagatcaggaaactgcaaagactgggaagttcttaaaaaggttcacagatgaaaagtctagagtattctggcttnnnagggggtaatnccaagggattaaagaggcttncaaaagagaaaagggatcaaanaaagggaaggccananggagaatgggaagatcaggaagctctaaattactttanntgntaaaagaggtcntgggaaaaccaaaagtttatgattnaaaagggggatgacccnganggagacagaggattnttngcnngntcanggaaatcagtcctcgccanatnaaggtaaaaatttttgctncttggatnttaccgggantctngngaggaaaggcctnaagtcctngccggggcgggccgntnnaaangggggaattccnncacttgggggccgttncttantggttccganctcggncccaag

SEQ ID NO: 2875 - DNA, 667 bp, Homo sapiens
  misc_feature 301, 302, 360, 388, 419, 427, 513, 541, 559, 593, 607, 634,642, 644, 646, 647, 652: n = A,T,C or G
acatcagtgaatttttaaatgctaaaaatttatgataaaagaatactgaatcaaaacatcaaagaaagaaaatagaggctcagcagcatgatttcaatatattttcctggaaaaagttttttttttttttaaagtgtatgactttttatccaagaacaaaagctttctaaatgcaatgtttagacttgatttttttttaaactaagcccagaaaactggggctcataaaataaaggcacaatgtgggcagcaagagaaaaaaggagaaaaaatggggaaaaaattggttttaatctcacgnntaacataaggtggctggttttggtttttgttttagacaatttaaggcagaattatctnccttgcaacactgcagataaatcctagnggtttagctataagtttcaagagttcagatntccagatnaagcaattttaaaaaagcttttcttattctaaggcttttgatgcattatataaatctttaaaaattcctatcccccacattttaanacatacttctatacctttaataaaggcnctcttaagatataaaacnagttttaaaaacaatgccattcttactttagggnttacccattccttntgccataggggtgggggggaattggtntttttgancnanncaatntttggggccccacaa

SEQ ID NO: 2876 - DNA, 668 bp, Homo sapiens
  misc_feature 531, 559, 598, 614, 620, 634, 637: n = A,T,C or G
accagaagtataagtttatggaactcaaccttgctcaaaagaaaagaaggctaaaaggtcagattcctgaaattaaacagactttggaaattctaaaatacatgcagaagaaaaaagagtccaccaactcaatggagaccagattcttgctggcagataacctgtattgcaaagcttcagttcctcctaccgataaagtgtgtctgtggttgggggctaatgtaatgcttgaatatgatattgatgaagctcaggcattgttggaaaagaatttatcgactgccacaaagaatcttgattccctggaaggaagaccttgactttcttcgagatcaatttactaccacagaagtcaatatggccaggggttatattgggatgtaaaaagaagaacaaggatgactctaccaagaacaaagcataatgctggcattaaaaatgtggtttaattttccaaacattgtttcttaatacccctttatcttacagggttgcataactttggaatgttttaacagcaagaattttaanaaaaagataaacccattttttttttttntaaaaaacaaaatttagtttcaaaatatttttgcattgngattttttttttttcncatttntcagcaaagttaanggnatttaatcattattttttgctgcataaaaaa

SEQ ID NO: 2877 - DNA, 312 bp, Homo sapiens
  misc_feature 291, 299: n = A,T,C or G
actttttttttttttttttttttttgcttgcagaatcctaggacgttttattaattcatgatgcccactatccttgtgggagcaagaatatgcggcgtttcaagctccattcaaagaactacatttgacaaagttttatatcagtccaagagcccccaccccatctccccacacagccttggaagtcaagagccttaatcagaaaacacatgagaaggccaggcatggtagctcatgcctgtaatcccagcactttgggaggctgaggtgcgccggatcacctgaggtcanggagtttngggaccagcctgg

SEQ ID NO: 2878 - DNA, 368 bp, Homo sapiens
  misc_feature 295, 334, 356: n = A,T,C or G
acgcggggactcagggagccggaggggacgcgccggaggaaagatggaagactaccaggctgcggaggagactgcttttgttgttgatgaagtgagcaacattgtaaaagaggctatagaaagcgcaattggtggtaacgcttatcaacacagcaaagtggaccagtggaccacaaatgtagtagaacaaactttaagccaactcaccaagctgggaaaaccatttaaatacatcgtgacctgtgtaattatgcagaagaatggagctggattacacacagcaagttcctgcttntgggacagctttactgacgggagcttgcactgtgcgatngggagaataagaccatgtcctnggccgcgacacg

SEQ ID NO: 2879 - DNA, 539 bp, Homo sapiens
  misc_feature 344, 410, 417, 441, 447, 465, 466, 469, 496, 510, 533: n = A,T,C or G
acgcggggatcaagcctcagtccccttcatattaccctctcctttttaaaaattacgtgtgcacagagaggtcacctttttcaggacattgcattttcaggcttgtggtgataaataagatcgaccaatgcaagtgttcataatgactttccaattggccctgatgttctagcatgtgattacttcactcctggactgtgactttcagtgggagatggaagtttttcagagaactgaactgtggaaaaatgacctttccttaacttgaagctacttttaaaatttgagggtctggaccaaaagaagaggaatatcaggtttgaagtcaagatgacagataaggngagagtaatgactaactccaaaatggcttcctggaagaaaaggcattttaaagatttttaaaaatnttgtcanaagatccagaaaaagtctaatttnatttancaatttaataaagctttnntgncggaaattgaatacaacagaacactgntctttttgattttntttggacctctggccgggaccanccctta

SEQ ID NO: 2880 - DNA, 668 bp, Homo sapiens
  misc_feature 421, 623, 627, 629, 644, 656: n = A,T,C or G
acaaaatcccctttgttgaaaaataaggggctttctaaactaataaaaaaggaagttttcaaaaattatagtttattaaaacaacttttttggcaaacaaagttacttcaggtgaggaaattttatactgtgaataaaattccaaatgaatcttttcttaaaactttttaaaaaattatgtgccagtgtatactaatgctatagattcttgtcttagaagtttttaaagcattctgttaatgcccactgaaacaatgggactccaaaaatatagtcaataatcatgataaaaaattatatatgattatcaagtgaagcaggtattgagaaataaaaattctcacttgctcactggcaatttctttctaacagatattatggagaaggcctggagtaattcagacagatagctggttatggngaattataataatcttcatgagggcagagctaattaaaactagtaattgcttaaaatcaaagccatttctggacatataaaatgaggagatgaatctggaaggttttctttttgtaaacctctttccaggttcttaaaagcccagtttgctacattccccaatcttgatcctccattgcatattaatgatccacttaaatgntggnanttaaaatgggcaatngcccatttgttnttataataattt

SEQ ID NO: 2881 - DNA, 503 bp, Homo sapiens
  misc_feature 29, 174, 187, 190, 194, 222, 297, 327, 394, 428, 482, 486,497: n = A,T,C or G
acttttttttttttttttttttttttttnacagcaagataaaatgaatcaattttattccaattcttcaaaatttatacgtaatatgttgtttccaaaatgtaagtcaccctttatataatagttttattatttcatctttctttgatagttttttttttcatcttttctttanggttcttcagtanaanccanaatcttgagttgcccagttaggagcctntgacctgctattctgattaagtttcttctcaatattcatggccaacatctggcttctaaaggaaaggcttttggncttttcaatccacttgctgataggggaganactgcatttgttcccataccccatgacctaatttaaaatcaatcttgggcatccagtcttgcatttntaatcaaatttacaatccccttttcagcttcttntgggagtcatgttcaatttatcctgcccacatgtaaatgctgaaccctgggggnggcncaagaaaagtntcaaaa

SEQ ID NO: 2882 - DNA, 667 bp, Homo sapiens
  misc_feature 309, 330, 412, 426, 449, 462, 465, 507, 538, 568, 569, 581,595, 626, 628, 637, 639, 647, 658: n = A,T,C or G
acgcgggatccacagcaaaacaaaaataagcttttattttattaataatttcgttcctcttgtgcccaatcaaatcttttaggaacaaactgcaagaaaagctaagaatgttttagagtgaactaaatacagacattgcttacttgttttgaagagggttttggttttggttattgtgtcttttaagttttctgatatgccccctttcaatatttagatatttatttgttgggaagaataccttaaaatgagggttcttattccagattctgggcagtggtctgtgagtaagtttttttcctgggatgnaaagggagcaagcccacttgncactaaaatgaattggggtgaaatgtgctcacttgggactccatcaacaatgtgctgctcccaaattgccatgccagaaggncttcgggattcttncttctatcacctctggctctaanccaatcttgttanaanggcatgccttttgcttagcagattggggaataccattccctncggataaagattttaaaaatgcaataaaggnggcaaatgcattggatgaaaaatttctcannggttaatctganaaatttttgcatgntgggttaattgggggcattcttttaattttnanggttaaacntntaatcttngggggaaaaancttttttta

SEQ ID NO: 2883 - DNA, 400 bp, Homo sapiens
  misc_feature 26, 29, 160, 202, 268, 288, 308, 310, 314, 318, 328, 347,351: n = A,T,C or G
actttttttttttttttttttttttnggnaattttgaatgtatttttaaatttattttttcaaaataatgacattagtaaaaattttacatagcctgtattgaattcacacattcaaatgaggctttaccagtaatgatggggattaatacagagctagngtttggcatttgactttatctcaaatgagctaactgctcaangaattacagaagactcatactctttttattttttcctggaaattaaaaaagaaaagctttactaantattgacatatatatttacnccaaattttacatttagtgnantaanaatntcctctagtngctcagttaacatcaacangaangcttcaaaaagatgattctgaaatggcgggcaaaatttttttttattgg

SEQ ID NO: 2884 - DNA, 621 bp, Homo sapiens
  misc_feature 338, 392, 444, 445, 487, 489, 593, 608, 612, 618: n = A,T,C or G
acatgaattagaagcgtgcatctaggattatggccaaactgttttaaaaatgcagaaatgtaaaattacatcttgaaaatatgaagagatggtctacacacttcaaaaatcaaatgttgcttataccagagatgtatgacaatcacgggattcaagtgacaagcagtaagatctcaaaaattaatactggtcaaagataatgggaatatttttgcatttcactgaaaatacattgactactagaatacgaaatctagcaggaactcagggaaaaaaattacaaaatctaaagccaattacttaatatttcttattacctaaacaccagcatgacattnacagaaaacttgccctgcatttcaattggccaatctcacgttaattaagttctncaaaaatgaaatgcaaccaaaaccggggttcaaactcccaaatgaaaagtcnngcaaggctcaaattaaaacatgggaatgtttcaaatgaaaantnattaaaaacactattggttttggtcttttattgaatgggaataaaatgttggcatttctttgaaactttggaactacttaaatttatttttccaaatgggtctncatttttttcttaangggngccaangtt

SEQ ID NO: 2885 - DNA, 666 bp, Homo sapiens
  misc_feature 457, 470, 482, 489, 523, 529, 535, 538, 559, 566, 578, 581,596, 606, 615, 622, 644: n = A,T,C or G
actgatgccatggatgtattgatgggaagggttattccagtcaaacttggaataattggagtagttaacaggagccagctagatattaacaacaagaagagtgtaactgattcaatccgtgatgagtatgcttttcttcaaaagaaatatccatctctggccaatagaaatggaacaaagtatcttgctaggactctaaacaggttactgatgcatcacatcagagattgtttaccagagttgaaaacaagaataaatgttctagctgctcagtatcaagtctcttctaaatagctaccggtgaacccggggatgataaaagtgctcttttactccaacttattaccaaattttgccacagaatattgtaacactattgaagggactggcaaaattttttgaaacttcggactatgcgggggtgctagaatttgttatatttttcatgaaacttttnggcgaacccttanaatctggtgatnccttggngggctttacactattggaaattttgactgccatnaaaaanctactnggnccctcgggccgctttttttgngcctganggtttatttganttnctgggggaaccggcnaaccaaacgnttagaaaancccaccnccgctttgggggaactgggttnttgggggaatgccaagggtcct

SEQ ID NO: 2886 - DNA, 643 bp, Homo sapiens
  misc_feature 307, 395, 477, 509, 536, 552, 553, 562, 566, 575, 580, 612,624, 635: n = A,T,C or G
acttgcaagtgtcttcatgtggtctttctccaagtttaaccaccaaggactctgagagctggcaggtctgagtaaccccagtgactattctttccaccttataaaaacctgagctaaaaacagtgcattagctgatgacagcagagggtggcagggctgaggacccaatattcatttcccaggctggtggagagtgagtgagtatggttccaaaactaaacaagggaggtcagaggctctttccaaccttacctgatggcttctggccaaagcaaggaagtgtcatggaaggtgttgggtggtgacngtgccaaaaaggaacttgaggaggagggagaaaaacagcacccctcgataaaggtgggggagagaaaattggggaaagccctgaattnctcacccgaggccaatctcagagggggagtggagggggtacaatctatgctttcggcaaaggcgggaagtggaagaaccctngggacaggatgaatggtttggaaaggggcatnacttaagacttaaagaaccaagggggnccagccaaaacacccnncacacctancagnatcccccangctgngacctgaaacctttacatttacttttaacaanccccccaagctnaaaggcttttntttcaagg

SEQ ID NO: 2887 - DNA, 523 bp, Homo sapiens
actgcctctgtaaacagggccaattcacatcattccacagcgtggccatgtcaataggtttcactgcaggttttcaaaaagcagattccacatcacccatctccacacacacagtcttcagctgtgaataatattcgattgtcacacggccgttctctctgccaaatcctgacttcttatatccaccaaagggcaactccactgggctgacgttatagttgttaatgaagcacgtcccagcctgaagctcagctaccactctatgagcccgttggatgtccctggtaaagaccccagctgctagtccaaaagtggtatcattggctctttctaaacctcagcttcagtgtcaaatgataaaatggacataacaggccaaagatctcttcttcacacaggtcatggtcggctctgcaattagttaatcacaaggcttatgtaataatccatcatttaatttgggatcttcagggccctcgggccgcgaaccacccttaaggccgtactaagtgggatccgagct

SEQ ID NO: 2888 - DNA, 619 bp, Homo sapiens
  misc_feature 241, 295, 366, 380, 399, 423, 446, 455, 469, 485, 488, 503,518, 535, 536, 537, 538, 560, 576, 578, 579, 590, 601: n = A,T,C or G
aataaagaacctctatcagtgagacttctcattttatagcaaatacatttttgcagcttaaattttcttgaattcatatacgcttctgtcatttaaacaaacttccagagaaaactggtctctatatatttaagtaacaaatttgacaaaatacatatttatacatatatagatctctaatataaatattaaatttgaaaaaatcaaatgtgaagcagaaactgctatacaagtatattgnataatatttattttatacattaaaagtatttgggttgaatatcttcaattaggnttctaaaaaaacaccattatctgcttcttagtaaattgcgacattcttgaaaagcgtgtgaaacgggtatnaacttcaactctgngcttaaatcagaattctgnttggtcttctcaacttttatcttnctaaagcatcttgccagagactncaagggaanggacatttacaggngcactataaacatgtnttnggcaggaaaaacagnatttattcttctcanctcttggatttcccaannnntctttctcaagggaatgggttntttgggcccaatttgngnnacttaaccttnaaatttcaaanccaacttttaaccagggg

SEQ ID NO: 2889 - DNA, 522 bp, Homo sapiens
  misc_feature 316, 323, 359, 374, 381, 396, 410, 417, 434, 438, 447, 459,464, 465, 470, 476, 480, 509: n = A,T,C or G
actacatatttcagcactaaggcggttgcttcactttatatctatataaaaaaagtggtaaaaatcttttccttttgtgcagttgaacccatcctacattcagattctctcaagcactaataaaatacttatttggttgaggaagatttaaggcaagttcgggcccttccaaaggcactgtgagactccccccccactccccgttattgctacatgtctttatactcgagtatgtcacagtagaactggtggaataagcaaacacttttttactagtttataaaagttggaattagaaaagcatgccacatttaanctgattngcaaaggatgtggcattttttttcttgaagttggangggctacaacctttnatcattntaagaaaacctcatngggatggtttcctnaaactantttcccaagcatcaaantcgntttttttgncaagaaatcatngcatnnttcanaatttncgtnaacaggggaaggaattaatgaaataaaantttacctacaatc

SEQ ID NO: 2890 - DNA, 462 bp, Homo sapiens
  misc_feature 167, 300, 313, 334, 335, 336, 348, 380, 391, 397, 412, 424,434, 436, 458: n = A,T,C or G
accatagaacccccatcactgtctaagcagccagatttggaacatgcgttgaaatgtcttcagcgtgaagatcccagtttgaaagtgaggctagatcctgactctggacaaactgttctgtgtggtatgggggagttacatatagagattattcatgatcgaatcangagggaatatggactggagacctatctcgggcctctccaggtggcatatcgagagaccatcctaaactcagttcgtgccacagataccttagatagaactttaggagacaaaaggcattcttgtgacctgtanaaagtggaaagcnaaggcccatttgaaacattannntgttatgcctgngatttgagtatgctgaaagtattcaatggaangccttttgaanggcttncaagaggccatttgnaaatgggaattnacagcgcatntnttccagggacaatggtttgganccaa

SEQ ID NO: 2891 - DNA, 546 bp, Homo sapiens
  misc_feature 4, 319, 330, 340, 342, 356, 385, 396, 397, 406, 447, 465,485, 493, 502, 506, 507, 517, 529: n = A,T,C or G
cagnggcgccgggcaggtacgcgggggggctggtttccggagtgcgtctctagagggatgcacgttgccttagccgagcttcggagagaagcctgatatgtaacccaggcaggtgggagcctcagtctgtcgggctgaggtctggcatctacaaagcctcttggccgtgttctgaacttgaagcctggaggagttctctgctcagcacagccaaggaacagaattagaagaaaaggaaccctggcctgaggcaggtgacaaacattaccaccccagctgtgcacgatgcagcaaatgccaccagatgttacaagaaagnaaaaggaaatntttttttaangntcccccgtttggcntccccctgttagccaatctcccaaaccgnggaaaaactgnnggccaaaantagacaattgagaatcctggattacaaggatttaacagccnttcccaagggtcaaaggngatttattgacattgacgtncaaaaacnttttacttntganncctttctacnctttggggcttntgatgaaaacagggaga

SEQ ID NO: 2892 - DNA, 313 bp, Homo sapiens
  misc_feature 294, 299, 309: n = A,T,C or G
actggagatgtatttgataaccaaggttttaggtaaattttcaccagtattagttctatttgcaaactgaaaaatgttgtaggcttaatataaaataaccacattagtgaacattatatctcttagaagaaaggccatattttgctcctgcttctgtaaaaatattatttgtttgaaggggaaataatggtagtgtgacctttcacttaattcctactcccttaatgtgagagagacaaaatgagctgaagaaggaaaattctggagttacactccacaaccttgacatcctgnccggncattttttgntttt

SEQ ID NO: 2893 - DNA, 278 bp, Homo sapiens
acattcaggatccctcggccaaggactggaccagaagaacacttgggaatcttgggtccacttatcaaaggtgaagttggtgatatcctgactgtggtattcaagaataatgccagccgcccctactctgtgcatgctcatggagtgctagaatctactactgtctggccactggctgctgagcctgggaaggtggtcacttatcagtggaacatcccagagaggtctggccctggcccaatgactctgcttgtgtttcctggatctattattctgca

SEQ ID NO: 2894 - DNA, 347 bp, Homo sapiens
  misc_feature 304, 307, 313, 325, 339: n = A,T,C or G
actttggcctctctgggatagaagttattcagtaggcacacaacagaggcagttccagatttcaactgctcatcagatggcgggaagatgaagacagatggtgcagccacagttcgtttaatgtccagtcgtgtcccttggccgaaggtgatggggggggcactgtaactctgttgacagtagtaagttgcaaaatcttcaggttgcagactgctgatggtgagagtgaaatctgtcccagatccactgccactgaaccgtgatgggaccccactttgcaaactgggatgctgcataaattcanganctttangggcctttcctngttttcttggtganaccaaaat

SEQ ID NO: 2895 - DNA, 293 bp, Homo sapiens
  misc_feature 6, 31, 123, 138, 276, 287: n = A,T,C or G
actttntttttttttttttttttttttgggnttatgcaactttattgaagaaaaataaatcaattactagcagagctattagttgatcactcatccattgacaacttgcatcatttattcagngctatattaaacagngtattggaagatagattaactaatagctccaagcctcctaacaatttaaatgaaaattacaaaatgtttgagaccctattttggaatacaaagggtgtttgacttccaatttccattctctgtagaacaagaacaggncattccttttnttgggc

SEQ ID NO: 2896 - DNA, 666 bp, Homo sapiens
  misc_feature 275, 283, 285, 288, 291, 293, 296, 323, 325, 328, 329, 330,343, 366, 370, 371, 372, 384, 392, 404, 417, 423, 432, 433,439, 444, 476, 477, 483, 487, 494, 500, 512, 519, 523, 528,530, 551, 553, 559, 564, 566, 578, 579, 582, 589, 601: n = A,T,C or G
  misc_feature 606, 614, 617, 629, 630, 635, 643, 648, 649, 660, 665: n = A,T,C or G
acgcgggggggctggtttccggagtgcgtctctagagggatgcacgttgccttagccgagcttcggagagaagcctgatatgtaacccaggcaggtgggagcctcagtctgtcgggctgaggtctggcatctacaaagcctcttggccgtgttctgaacttgaagcctggaggagttctctgctcagcacagccaaggaacagaattagaagaaaaggaaccctggcctgaggcaggtgacaaacattaccaccccagctgtgcacgatgcagcngatgcccncntgnggntncanaaaaggaaaggaaattttttttttcangntgnnnccgttaggccacnccccatttttccaatctcttaanaccnnnggaaaaactgcnggccaaanagtcccaataantatcctggattanaagggnttaacaaannttccgnaggtnaaggcaatttatgactttggaacgtccaaaannttattncctntgagccnttctanattttgggcttntgatganaaanaggananacagacccttggaaaagtttncnaagaanttttntntcttctcattanncanaaagggntccttcggccgngaacncccttaanggnggaattccaccnnctggngggccgtnttaannggttcccaacntgggnc

SEQ ID NO: 2897 - DNA, 616 bp, Homo sapiens
  misc_feature 397, 403, 462, 518, 530, 546, 549, 560, 566, 568, 570, 572,581, 583, 604, 615: n = A,T,C or G
ggtacagaagatacacaaagtggcaccagcctcactagcactctcatttctcaagagccagaacatggtgaatacagtcaagttcagtgtatttgataatatcaatttgggccccaaatctctctcacagtcttcctgggagtctattcttcttccaaaagtgcaagctaagccttctgaagatggtaaagaacttggccgggtgtggtggctcatgcctgtaatcccagcactttaggaggctgaggctggaagattgcttgagcctaggagtttgaaaccagtctgagcaacatagtaagaccctgtctctattctaaaaaacaaaataagtaaaaaggactgtaggaggccaagacaggtactgattttaaaaactaataacttaaaactgccncacgcnaaaaaagaaaaccaaagtggtccacaaaacattcttcctttctttttgaagggtttacnatgcatttgttatcattaaccaagtcttttactactaaacttaaatgggccattgnaacaaacagttnttagaccggtctttcnccntgattaaaaangggggngncngngtttagggntnatatttcattttcctttttgncctttttgggna

SEQ ID NO: 2898 - DNA, 597 bp, Homo sapiens
  misc_feature 436, 490, 528, 547, 553, 555, 560, 577, 578, 581, 582: n = A,T,C or G
ggtacttttttttttttttttttttttttggagtcttgtgttttactaatggaaaaaaaaatacagaagaggttttgttctcatggctgcccaccgcagcctggcactaaaacagcccagcgctcacttctgcttggagaaatattctttgctcttttggacatcaggcttgatggtatcactgccaggtttccagccagctgggcacacttccccatgtttgtcagtgaactggaaggcctgaactagtctcaaagtctcatccacagagcggccaacagggaggtcatttacagtgatctgccgaagaatacccttatcatcaatgataaaaaggcccctgaacgagatgccttcatcagcctttaagaccccataatcctgagcaatggtgcgcttcgggtctgataccaaaggaatgttcatgggtcccaancctccttgtttcttaggtgtattgcccatgctagatgacagaagtgagaatccncagaagcccaatccttggcggtgagttcttaaattttntgcctatactgaaacaatnatttcngngggcncccaaaggggagtcaannggnnaaaaaaaaaccacat

SEQ ID NO: 2899 - DNA, 586 bp, Homo sapiens
  misc_feature 489, 499, 507, 565: n = A,T,C or G
acttaagtaaatcatgaaaattctacttgtaactatagaagtgaattgtggacgtaaaatggttgtgctatttggataatggcactaggcagcatttgtatagtaactaatggcaaaaattcatggctagtgatgtataaaataaaatattctttgcagtaaaatattccctttgttaatgttatagaaggggggatacaaaaaggaactaacaatttgtatggcagtgtcagatatttttattttagtatttcctgttttggtttatttgcatcttagaagagcataatgacattgtttgatgaagcctaattatgctggactgttttgacctggtttaacccttctgataggtagttgtggatgctggggatgagaactgaataatctttgcctggagtgacactacactctagaatttccactttggagaatactcagttccaacttgtgattcctgatagaacaagactttacttttctacccanattgatctanaagcagangaatccagcccttttaaaagtggtatgtggtttcttttaaaactccggttttggaagnaaattatgggacctcggcgca

SEQ ID NO: 2900 - DNA, 559 bp, Homo sapiens
  misc_feature 418, 422, 462, 506, 527, 531, 537, 557: n = A,T,C or G
ggtacaccttgaaggcgaggttaattaaatcctgttgtggagtttgagggccggaatttaatttttggagttttatttaatatcgggagcagattgggtaataaaatgtatattgagaataagacggccttttgaccttttagggtctagggctgtaaagtgtctcagggttgctgccgaacgagccatgaactgggctgggtttttatatttgatgaaaaagagcctaaacgcttctgatttgggataaagaaaaaggagcattaaccttgactatgtctttagctccagccacctttttaagagtaaattgctgggcaggtgggggaggactagtcacggaacgaaactgtaagccggaccaggtgtgaggaggggaggtgataaaaagattacagggtggaggagtggacctgangaanaattgggacctaacttgcgtggagaagaagggagagtcanatggtttgtagaaaagaagataacaactcacaccctgggttggntagggcagtggaggaaaaganattnacagtnctgccaagcagaggcggttnaa

SEQ ID NO: 2901 - DNA, 580 bp, Homo sapiens
  misc_feature 512, 525, 553, 563, 579: n = A,T,C or G
actgtattttccgcaaaagaaaattaacatttagtaacacactaatgaattttatctccaaagagattagtgcactggcaaagtattcggattacagtggagagctgtgaacagcagataccgaaaacaccccagcctggcagatcccaaggtaacgatggccttcactgaccactccctttgccagaggtccagaaagaacttgcagcatgatcacctgcctgctgcacttccaactctaagcagcaaacttcaaggagccaaagaggagtccccagtgggcaaggggagcagagaagagaaacgtggtaaatgtaaacctaaaagacagtaaaatgggatacaatccccattcaaatcccagagatgtgggcaagtccccaaaagtagttgttagattaaaaaactgggcacacctcacttcccaaaaaatataatacatagaaatttcggggatactggaaaaatagagaaatgctcatgaaaccaactcttcactgtacatttaaggntgaaccatctttntattcagcacgagcctttgtttttactnggtgcatggncatgcaccatactttng

SEQ ID NO: 2902 - DNA, 578 bp, Homo sapiens
  misc_feature 462, 522, 536: n = A,T,C or G
actcttgatgaaagaccgtgaaaccaacaaatcaagaggatttgcttttgtcacctttgaaagcccagcagacgctaaggatgcagccagagacatgaatggaaagtcattagatggaaaagccatcaaggtggaacaagccaccaaaccatcatttgaaagtggtagacgtggaccgcctccacctccaagaagtagaggccctccaagaggtcttagaggtggaagaggaggaagtggaggaaccaggggacctccctcacggggaggacacatggatgacggtggatattccatgaattttaacatgagttcttccaggggaccactcccagtaaaaagaggaccaccaccaagaagtgggggtcctcctcctaagagatctgcaccttcaggaccagttcgcagtagcagtggaatgggaggaaaagctcctgtatcacgtggaagaagatagttatngaggtcccctcgaaggaccgtgcctctctaagatgttattttccccaaaaatatggtttntctaaaacactatnagccagatacccagtctctgtcttgaatatccccccccccga

SEQ ID NO: 2903 - DNA, 605 bp, Homo sapiens
  misc_feature 31, 112, 178, 280, 391, 408, 420, 455, 468, 479, 484, 485,496, 506, 515, 520, 536, 548, 551, 556, 559, 572, 585, 587,593: n = A,T,C or G
ggtactttttttttttttttttttttttttnggccatttgctatgttttattttgctagtagcttattaaacataacatgcaaataatcaaagagaaacatacatgacttanagtgaaaaataattctagaaaagtttcactaggtaagtatgcaaattcttattctaaaaatacttntttaagtgcatgaagcttcatgtattttgcaatattcttggcctcaatatctaccacctattttttaaccagacaaatttgaatgtatcaagataatttggngcaagagagtaacatccatatgtatttaatccaagctttgaggaacattaagatttaaggattataaaacttggctgatttccatgcaaccagtaaaaggttttgcacatnatttgacagtagaaatnaaaaacactaantttacaaataaagcattgagtttgatgtctattcngggatatgtgtgngttcttgtgangaaanngcctcctttancttttttttnaaaaaaatnaatgnttacaaaacatttccncagatttaaaantcntgggnggnttaaccgtgttanaattgggatcctntngaaacngccccccaaaaa

SEQ ID NO: 2904 - DNA, 634 bp, Homo sapiens
  misc_feature 21, 26, 40, 45, 66, 71, 72, 74, 76, 77, 93, 156, 165, 196,205, 233, 257, 264, 308, 343, 353, 404, 411, 413, 429, 433,447, 451, 456, 459, 461, 462, 471, 475, 482, 490, 495, 509,512, 515, 520, 557, 559, 567, 583, 589, 592, 597, 599: n = A,T,C or G
  misc_feature 608, 621, 623, 631: n = A,T,C or G
tcgagcggcgcccgggccggnactgntcctgttggccgantgganactggtgttctcaaacccggnatggnngncnnctttgctccagtcaangttacaacggaagtaaaatctgtcgaaaatgcaccatgaagctttgagtgaagctcttcctgnggacaatgngggcttcaatgtcaagaatgtgtctgtcaangatgatctngcttggcagctgttgctggtgacagcanaaatgactccaccaatggaagcanctggctncactgctcaaggtgattatcctgaaccaatcatagccaaataanccgccggctatgcccctgtattggatgtgctacanggctcacatngcatgcaagttatctgagctagaaggaaaagattgatcgccgtctgtgtanaaagctngnagatgccctaaattcntgangtctggtgatgctnccantggtnatntnntcctggcangccnatgtctnttgagagnttctnaaactatccatctntgngtngcttnctggtccgagatataaagaaaacaggtgcttttgggngntttcaaanaattgacaaaaaaagnttttgnagntggcnanggttccccncttgccccaaagncnaaaggttnatt

SEQ ID NO: 2905 - DNA, 609 bp, Homo sapiens
  misc_feature 442, 485, 527, 560, 563, 569, 586, 588, 594: n = A,T,C or G
ggtaccgcggggctcttcctgctctccatcatggcgcaggatcaaggtgaaaaggagaaccccatgcgggaacttcgcatccgcaaactctgtctcaacatctgtgttggggagagtggagacagactgacgcgagcagccaaggtgttggagcagctcacagggcagacccctgtgttttccaaagctagatacactgtcagatcctttggcatccggagaaatgaaaagattgctgtccactgcacagttcgaggggccaaggcagaagaaatcttggagaagggtctaaaggtgcgggagtatgagttaagaaaaaacaacttctcagatactggaaactttggttttgggatccaggaacacatcgatctgggtatcaaatatgacccaagcattggtatctacggcctggacttctatgtggtgctgggtaggccangtttcaacatcgcagacaagaagcgcaggacaggctgcattgnggccaaacacagaatcagcaaaaaagagccatgcgctggttncagcaaaagtatgatgggatcatccttctggcnaanaaattnccgttttattccaaaanancaatanaaagttttagtggaa

SEQ ID NO: 2906 - DNA, 633 bp, Homo sapiens
  misc_feature 488, 523, 537, 539, 550, 560, 580, 599, 604, 626: n = A,T,C or G
acatagtggtgccccctgataggacattgttagcatagaggtccttcctgatgtcaatatcacacttcatgatgctgttgtaggtggtttcatggatgccagcagactccatcccgatgaaggatggctggaacagggtctctgggcagcggaaacgttcatttccgatggtgatcacttgcccatcaggcaactcgtaactcttctcaagggaggatgaggatgcggcagtggccatctcattttcaaagtccagagctacataacacagtttctccttgatgtcccggacaatctcacgctcagcagtagtaacgaaggaatagccacgctcagtcaggatcttcatgaggtagtcagtgagatctcggccagccagatccagacgcatgatggcatggggcaaggcataaccctcatagatggggacattgtgggtgacaccatcttcagagtccaacaccgatgcccagttgtgccgtccagangcataagaagaagacagcccccgcctgggataagnccacatacattggntngggacaattgnaaagtcttcnaaacataaatttggggtcanttttttttcccgggtgggnccttngggggttaaagggggggccctncccggaa

SEQ ID NO: 2907 - DNA, 613 bp, Homo sapiens
  misc_feature 522, 542, 562, 563, 572, 580, 583, 586, 594, 602: n = A,T,C or G
acacgttcttgttgtctggctcggcaacaaacaccacttcctggccagtcttctggttatggagtcggacaaatgtctggtgaggagtgagttcagcaccagtgttcacatctaccagctggaagaacaaggcgaagttctggtggctgtctgcgatgaatgtgcccttggctttggctgggtatgtcacccgggtagttttgggtgcaatgctctgatccttatccacggtggaaagatcaacatttgtgatgccaacttcagtggagatcttgactctgagctctacggtatttgcaatataccggttgtcaccttcaacttcgacaaggaagtcataataaccactggaaaatttgacgttcatgaaatttagttcaaaaacatcccctacaggggtgaaggatgtcttctggaggacagtggctcttgaagcaacaagatttaacatgttctaatttaacaatggcctgagtcaaaagcttgagacaaaaacaattgtggactttcaacccccaaganaacctgttcattaaatggtnggaagcagaaaccctttggnnccaaccccnaattgggncgnggnggcgaatnttccaaancccaccacctt

SEQ ID NO: 2908 - DNA, 589 bp, Homo sapiens
  misc_feature 456, 463, 481, 541, 545, 572, 576, 586, 589: n = A,T,C or G
ggtacgcggggagaaaggaacacagtaaactgaattgatccgtttagaagtttacaatgaagtttcttctaatactgctcctgcaggccactgcttctggagctcttcccctgaacagctctacaagcctggaaaaaaataatgtgctatttggtgaaagatacttagaaaaattttatggccttgagataaacaaacttccagtgacaaaaatgaaatatagtggaaacttaatgaaggaaaaaatccaagaaatgcagcacttcttgggtctgaaagtgaccgggcaactggacacatctaccctggagatgatgcacgcacctcgatgtggagtccccgatgtccatcatttcaagggaaatgccagggggggcccgtatggaggaaacattatatcacctacagaatcaataattacacacctgacatgaacccgtgaggatgttgactacncaatccngaaagcttttcaagtatngagtaatgtacccccttggaatcagcaagaataccagctggtgacattttgtggttttgnccgngggctatggagacttctggtttatgcnaagnggatctaccntcn

SEQ ID NO: 2909 - DNA, 608 bp, Homo sapiens
  misc_feature 500, 502, 514, 559, 575, 580, 589, 607: n = A,T,C or G
actgggataaatgaagaagaaggcataaggacaataaacatggaactccactgcaaatggattttatgcagctgaggaaagtttgggcttattagtatttgctccagcgaacctccaagttttctccattgcggacaacgtaactaccagctccttggctcagtggttcgcctccactcagaagttcccagtaggttctgtcattattgttggcacataggccctgaatacaggtgatatagggcccccatgagcgctcctccattgtgaaaccaaatatagtatcattcattttctgggctttctccatcacactgaggaagacagaaccatttagcacagtgacattggtgaaatatgtttcattgattctcacagagtaattgacggagatatatgattgtgagtcaggaggtgtcacagttataggctcatcagcggagatgttgaagttacctgaagcagagacgcaagaagagtctttgttaatatacaagaangncttttccatcanggcaggtaaaacctgggctgcaacgtttgggaatgctgaatgctncttgagaaatttccgngagcnctgttttcnaagtttgttggcaattcng

SEQ ID NO: 2910 - DNA, 581 bp, Homo sapiens
  misc_feature 33, 108, 438, 510, 514, 517, 553, 559, 571: n = A,T,C or G
ggtacttttttttttttttttttttttttttgnccagagagcaagtttatttggtgaatgctgacggcaaacatcatccaagagagacaagatgggaaagttgctganacaagaaagcctagggaaactttaggctagatacaaaattcacacagggaaaggcacggactctggggagactgggaaggtcctcagccattcagcaccatgcggacgagctccgccccatgggcccgtcaccccgacaggatatgcctcacaaacgcttcatagttgatacaaccattgctgtcctcatgccctgccaccagcatctctacttcttcctctgtcatcttctcacccagtgtgacaagaacatgccggatttcagcacccatgacggtgccatttcttcttgtcaaacacccgaagtccttcgacataatcctcataggngccctggtccttgttcttggccctgtctgcagcatgggcagaaagtgtcaaagtcacaccttcacattcatntatnctnttggggtcccaagacttaccctcgcgttggagggtntggcangcctataatccnatggtggctg

SEQ ID NO: 2911 - DNA, 613 bp, Homo sapiens
  misc_feature 568, 573, 576, 588: n = A,T,C or G
ggtacagtattggaaatggatctgtctttggtaaagatcagcctataattcttgtgctgttggatatcacccccatgatgggtgtcctggacggtgtcctaatggaactgcaagactgtgcccttcccctcctgaaagatgtcatcgcaacagataaagaagacgttgccttcaaagacctggatgtggccattcttgtgggctccatgccaagaagggaaggcatggagagaaaagatttactgaaagcaaatgtgaaaatcttcaaatcccagggtgcagccttagataaatacgccaagaagtcagttaaggttattgttgtgggtaatccagccaataccaactgcctgactgcttccaagtcagctccatccatccccaaggagaacttcagttgcttgactcgtttggatcacaacccgagctaaagctcaaattgctcttaaacttggtgtgactgctaatgatgtaaagaatgtcattatctgggggaaaccattcctcgactcaatattccagatgtcaccatgcccaggtgaaattgccagggaaaggaaattggtgnttttnaanctcttgaaaaangacactgggttcaagggagaatttt

SEQ ID NO: 2912 - DNA, 585 bp, Homo sapiens
  misc_feature 472, 534, 545, 548, 569, 571, 577, 584, 585: n = A,T,C or G
acccagtaaaaaccagaatgacccattgccaggacgcatcaaagttgactttgtgatccctaaagaacttccctttggagacaaagatacgaaatccaaggtgaccctgctggaaggtgaccatgttaggtttaatatttcaacagaccgacgtgacaaattagagcgagcaaccaatatagaagttctgtcaaatacatttcagttcactaatgaagcccgagaaatgggtgtgattgctgccatgagagatggttttggtttcatcaagtgtgtggatcgtgatgttcgtatgttcttccacttcagtgaaattctggatgggaaccagctccatattgcagatgaagtagagtttactgtggttcctgatatgctctctgctcaaagaaatcatgctattaggattaaaaaacttcccaaggacacggtttcatttcattcccattcagatcaccgttttctgggcacngtagaaaaagaaccacttttttcaatcctaaaccctagtccaataaggcaaagaaaaggagntgggatgcttntgntatatgactggggggaactgntntgtttnagccagnn

SEQ ID NO: 2913 - DNA, 619 bp, Homo sapiens
  misc_feature 507, 510, 523, 543, 568, 603, 605, 607, 608, 617: n = A,T,C or G
ggtacactgaaacataaatccgcaagtcaccacacatacaacacccggcaggaaaaaacaaaaacagcaagtttacatgatccctgtaacagccatggtctcaaactcagatgcttcctccatctgccaagtgtgttctggatacagagcacatcgtggcttctggggtcacactcagcttaggctgtgggtccacagagcactcatctggctgggctatggtggtggtggctctactcaagaagcaaagcagttaccagcacattcaaacagtgtattgaacatcttttaaatatcaaagtgagaaacaagaaggcaacataataatgttatcagaaagatgttaggaagtaaggacagctgtgtaaagcttgaggctgaaaagtagcttgccagcttcatttctttggtttcttgggtagtgggcgccggaacaacaagatgtgagggtctggttcatggatcatataatggacccatcctgactcttgttgaacgcccagaatnctncattcagattcanacattaaaatggggttttanggacccaccttggcttttttccttnggcaacatgaaatgttgatacctcaaacctcctcntngnnggatttttncc

SEQ ID NO: 2914 - DNA, 602 bp, Homo sapiens
  misc_feature 510, 512, 535, 563, 566, 569: n = A,T,C or G
actgaaagaaaatgtcatgctgcagtcacaaaaggcgggctctcctccttcaattgtcttgggccctgcccaggttcagcaggtccttactagcaatgttcagaccatttgcaatggaaccgtcagtgtggcttcctctccatccttcagtgctactgcacctgtggtgaccttttctcctcgcagttcacagctggttgctcacccacctggcactgtaatcacttcagttatcaaaactcaagaaacaaaaactcttacacaggaagtagagaaaaaggaatctgaagatcatttgaaagagaacactgagaaaacggagcagcagccacagccttatgtgatggtagtgtccagttccaatggatttacttctcaggtagctatgaaacaaaacgaactgctggaacccaactctttttagttaatataccaaagcttatgaataattgttggtaattgaacatttcaattatatgcagactggctgattctaaaataaattctaangngggttctaattttgtaattggtnaaaataaaggtaattttgctttgttganganggnggaaaactcactgttctctttgtatctaaaagg

SEQ ID NO: 2915 - DNA, 609 bp, Homo sapiens
  misc_feature 519, 524, 568, 598, 605, 609: n = A,T,C or G
ggtacttgagtcaaagacgacatttagattcttcagctttgaagcatttagtaacatcattgtctagtcaggcagaggaaagaaattcaaaagcactttctttttcttctgtcagttcctttgcagtaagatccatcttctcacgtgagaaatcattaatagggagaccttcaacaaacttccaggtcttattcttgattacaacagggaatgagtagagcagatcatcaggaacaccataggagttgccatcagagataacacccatggacacaaactctccctctggggttccaaaccagatgtccctgacgtggtcacagatggcttttgcagcagacatggcactggatagttttcgagccttgatgacagcagcgccacgctgctgcacagtcgtgacaaattctcccttgagccagctgtcatctttcagagcttcataaacaccaacttcctttccttgcaatttcaccttggcatgggtgacatctggatactgagtcgaggaatgggttnccccnaaaatgacattctttacatcattagccggcccccccaggttaanagcaattgggccttactcgggtgggaacanacaagtnaacn

SEQ ID NO: 2916 - DNA, 592 bp, Homo sapiens
  misc_feature 470, 475, 495, 559, 574, 580, 584, 586: n = A,T,C or G
acggggggactctgcttccgtttctggttttgctctagtgtttgggtttcttcgcggctgctcaagatgaaccgactcttcgggaaagcgaaacccaaggctccgccgcccagcctgactgactgcattggcacggtggacagtagagcagaatccattgacaagaagatttctcgattggatgctgagctagtgaagtataaggatcagatcaagaagatgagagagggtcctgcaaagaatatggtcaagcagaaagccttgcgagttttaaagcaaaagaggatgtatgagcagcgggacaatcttgcccaacagtcattcaacatggaacaagccaattataccatccagtctttgaaggacaccaagaccacggttgatgctatgaaactgggagtaaaggaaatgaagaagcatacaagcaagtgaagatcgaccagattgaggatttacaagaccagcttgangattnatggagatgccaatgaaatncaagaacacttgagtccagtattgcccccaactggtgaagatatttaaaaccaaagttggatcnctaggtgatgacttntgctgntaananagtttt

SEQ ID NO: 2917 - DNA, 625 bp, Homo sapiens
  misc_feature 437, 452, 492, 523, 538, 549, 573, 575, 592, 594, 600, 603,612, 613, 620: n = A,T,C or G
gcgtggcgcggcccgaggtaccggccaagcctggtccccttcttgttgggcactgtgtatgggcggagaaaatccagcttgttcttgctgatgacgcagaggtcaatgttgcttccggagcccaggtcgctgaagatgccagctgcgatggcttcgctcaccagattcttggcttcctcctcctccatgtctggcctaaacttatcttcaaatacagccattgctgccaaggagccagaacccatggtgacataaggcaacttatcagttgatccatgaggatagatgctgtagaggtgaggtccagtaacatctactccccctaaaactagggctgcaccaatgtaaccttgatacctgaaaagcatctgcttcagcatccgattggctgtcacaactctgggaagacggccagtggagaaggagtggagctccangttggaagaaatganctgggttgtcatgtctgtgtctgcagctgtcccagcaccnccacaataaatattaggagatatgaagtgtntttttgaacaagttnttgtagcaacnaccatcccttcaattgctcttgtntntgctccaaaaactattncnttcttntanaccaccccnncgaaggnggggc

SEQ ID NO: 2918 - DNA, 631 bp, Homo sapiens
  misc_feature 278, 482, 485, 532, 565, 568, 604, 608: n = A,T,C or G
gggacacgtaaatctgttcaaggaatcattgtttggcattgaaaataggagagagatcatgagaaattaccaaaatgtccaccaatagaatgagtgaatcacctgtggtatatttataaataaaaatattaaatagaaggtaaaacaaatcagacatacacacattagatagataaatttagaggacaaaataaggaacatgaaaagcaaatagtagatggcaaatgtaatataatatactatgcataaattttaacaacacacaatattatattgcntattgcccaataagcagaagccataaggtctcacacttttcttataatgcaatagaataaaaatgacaacaaagtaaaagggtatcccaaaaaaaaaaaaaaaaaaaaagtacacatttcaatgtttctaatacttaaaagtaattggtaacataatttaaaatagaatatgtcttccaagtcactgaataatatcaaaaggcnttnaaccccattccatatagctttagattggaaaaccaaggaaaaagccnggaagccttaaaaatggggaagccttaaaattnggnggcaaaaaaaaaaaaaaaaaaaaaagttccttgccngggngggccgttttaaaagggggaaat

SEQ ID NO: 2919 - DNA, 597 bp, Homo sapiens
  misc_feature 488, 530, 538, 559, 588, 595: n = A,T,C or G
acatgctcctgcagatctgtattttccaatgttgttaacatcagcaagctggcagtctacaacctgtcttgtataatgttcgaagagaggcatcctccagacacggtcccctgtttcaatgctggcctcgaagagtttgttccagagccaggatgaattggtaaagaccccagtggcacctgatcccaaagctacatccatggcacctgttaaggtggcggcattgaggatgaccttcgggttaaacgtgtgtgcgtaacagagcgcatcagccagtatgagcctcccctcagcatcagtgttatcaacctggatggtcttcccgtttttggctctaacaacatcccccggcttgttggccttgccgctgggcatattttcacaaagaggggccagacctataatattaatgggcaaattaagctttgcagcagacacgatggctgagcatatagttgcagctcctcccatgtcagccctcatgaggnccatatttgcagaaccttgatggagatccacccctgtccaangtaattcntttccaacaaacaccaagggngggtcgtttgcttggggctgccttttagngaaattnca

SEQ ID NO: 2920 - DNA, 589 bp, Homo sapiens
  misc_feature 447, 536, 559, 561, 567: n = A,T,C or G
acttggcatcgtcatccccgcaaacatcactaataattaaagagcagttcccgtcctcatcgtagtctatctggaagtggcgggactccctgattgactggtcatctttgaaccagacaacctcggggtctgggtatccttcaatcttgcagtcaaatctagcagcacttccctccacaacttctaaatcgcgaatggtcttagagaaatagggttttacatgaggcttttcctcagcaacagcctcaaggaaagcttgggacacatcttcttcagattctagtttttctgcattgagcgggctggttggtgaccctgttgaggatttcctgccactgagccctgagatcattgccatagaggacagtcttccaatggctctcacagcattgcccgttttctggaaaatagacaccgagggttggactcaggcgttgtccctggttncagctgggtagtgcgaggggctgcagggagtaaagcccaccccagagaagcagctgttcctggaacaaggacctctgaagccgaggttntgccaaagaacgaaccaaccttntntgttanacttccgggaccttggcgggac

SEQ ID NO: 2921 - DNA, 604 bp, Homo sapiens
  misc_feature 582: n = A,T,C or G
ggtacgcgggggctgactctcttttcggactcagcccgcctgcacccaggtgaaataaacagccatgttgctcacacaaagcctgtttggtggtctcttcacatggacgcacatgaaatttggtgccatgactcggatcgggggacctcctttgggagatcaatcctccgtcctcctgctctttgctccctgagaaagatccacctacgacctcaggtcctcagaccgacgagcccaagaaacatctcaccaatttcaaatctggtaagcagcctctttttactctcttctccaacttccctcactatccctcaaccactttctcctttcaatcttggcactacacttcaatctctcccttctcttaatttcaattcctttcattttctggtagagacaaaagagacacgttttatccgtggacccaaaactccggcgctggtcacagactgggaaggcagccttcccttggtgtttaatcattgcagggatgcctcttgattatacacccacgtttcaagggtgtcagaccacgcagggacaactggcttggtccttccccttacaacaagtccgcttttntggggaaggggcaagtacctgc

SEQ ID NO: 2922 - DNA, 595 bp, Homo sapiens
  misc_feature 512, 528, 534, 573, 578, 592: n = A,T,C or G
acttttttttttttttttttttttttcgcttttctgatgcttttcattatcacagaacacaccacctgtaatgtgtgcaaaaaggaaatgaggggtggaaggagaggaagtctaattgggaaaggctggatggtcacttcatttcttctctttcttcttatccttttcattcatggccaggatcatcatgagttttctgaagacagtaatgaaatctaagaagagatcaatgcagtgccagatataatcttgatctccatgttcggccttttcaataatgagttgagtatcaaaaaggacgaagccacacatgaccaccagtcccacatacaggtttgcctggaaaagccaaatggatccaaagaaaacattccccagggaagacaaaagcaacaagctcagggctgacatcaagatacctcccagaaagaggtagctacggcgcctgcataaagtgcactgagggtgaagcaggtaaaaatcattgccgtgcccatgaaaaccatgggaangatctggggttgacancaatcnaaacttcaggggggggccagccaacttctgtaggaagcnatccnccagaagtccaacnttt

SEQ ID NO: 2923 - DNA, 608 bp, Homo sapiens
  misc_feature 484, 536, 565, 581, 584: n = A,T,C or G
ggtacatagtgtcgcgaactcaaatcggcatttagatagatccagtgatttaaacggcacgtttttgcttataaaaaaagtgcaaaaaagatgtggtttacaagttaaagctacagaatccctttttgctgtaattgcaccagttttaaagcctctggacagagcagtatttcgtttaaaactttgtttttcttaaaagcttacagtgtttggctaattctcctcccctttttacaagacgggggccggagggtggacactggtggcaggttaagggatactgtcactttaagaagcctgcagattgaagtgtaaacatggagaaattaggggctgattttttaaactgtgtgagatattaaccagcccgccctgttataaaatcaggaaatccaaacagcgatttacaccgattaacaccccctttatatattttttacaaaaatacactgagaaaataatcaaacgttttcatctctcttgnctttttttggtttttaaaaaggtcaaaaagtctacatttaaatataaaaaantaaaagttaaactctacccttcagtggangagacgtaaaaggggnggngacacacctccccaaaaaaaaaaa

SEQ ID NO: 2924 - DNA, 604 bp, Homo sapiens
  misc_feature 38, 73, 134, 159, 176, 228, 262, 276, 280, 287, 292, 302,305, 321, 324, 345, 373, 376, 498, 507, 511, 520, 525, 535,578, 590, 601: n = A,T,C or G
cgaggtactttttttttttttttttttttttttcgganggttaaggaattttctttattttttacaaattaanactatgcagatttcatatatttctgaatcaaaaacacctttgtcttcacagtatgagttanaatgcagcctgagctgaaaatcaanaaactagaaaagaaagnggtagagataactatattaaaaatctgttaggtattttctttaaaagtaggngtttttttttttttctttctttttttttttaaanatcttggcattctnggcnctgtttntaaanaaaaactccnttntcccaagcaaaaagcncanaagggggagtttggcttcaanagatgttaactcaaaatcttaggcctancanagaatcaccaaatttatggagagttaacaggggtttaacaggaaggaagtgcctttagtaagttctcaagccagaggctggaggcagcagctaaatcaaaggacagcctcctcagtgaaagngacccttcngggnggcatgtcnctccnggaataaacncaacttaaaaacaaatgattctaggatacccaaggaatgggcnctgggaacctgnggccctgggtnaaa

SEQ ID NO: 2925 - DNA, 626 bp, Homo sapiens
  misc_feature 533, 536, 546, 549, 584, 596, 597, 606, 622: n = A,T,C or G
gcgtgggtcgcggccgaggtacgcgggggcacagccagagcctaaaggctagagccggagctgccgcgccagtcgcctagcaggtcctctaccggcttattcctgtgccggatcttcatcggcacaggggccactgagacgtttctgcctccctctttcttcctccgctctttctcttccctctcgtttagtttgcctgggagcttgaaaggagaaagcacggggtcgccccaaaccccttctgcttctgcccatcacaagtgccactaccgccatgggcctcactatctcctccctcttctcccgactatttggcaagaagcagatgcgcattttgatggttggattggatgctgctggcaagacaaccattctgtataaactgaagttaggggagatagtcaccaccattcctaccattggttttaatgtggaaacagtagaatataagaacatttgtttcacaatatgggatgttcgtggcaaagataaaaataagcctcttctggaagcattactttcagaatacccanggncttattttgnggnagatagcaacgatcgtgaaagaaatcaggaagtanccattagctgcnnaaaagcttntgggagaagaaatganaaaa

SEQ ID NO: 2926 - DNA, 606 bp, Homo sapiens
  misc_feature 517, 548, 574, 591, 593, 595: n = A,T,C or G
acacaatgaattgcttttatttcggtatgcatccacatttcagcatttagtggtcctgaacagcaagtggaaagacgcagcaatttgccaggaggtcaagcccaccaatttcggggatctgctgtgcacaccgggttccttcttaatccctgctgaggatcttgggaagcagcagcagcaccaaaaccaaggcatgcaccggattcaaggttctttttgttccagttgtcagattccaaactagaccccaatggattgcaaggatgaccaaatgaaagccctgtttaaaacttcttcaatttttaaaagcaaaagcagttacaggaaagtaaaacaattcagagggatcatgtgtgcttacaagtatcttcatgcggtctttctccaagttcaaccaccaaggactccgagagctggcaggtctgagtaaccctggtgactattcttttcaccttatcaaaacctgagctaaaaacaatgcatcaactgatgacagcaaaagggtggcagggctgangacccaatattcatttccaagcttggtgganaatgaatgaatatggttcccaaactnaacaagggaggggagangntnttttcaacctt

SEQ ID NO: 2927 - DNA, 368 bp, Homo sapiens
  misc_feature 10, 39, 170, 323: n = A,T,C or G
cgaggtacantgtgatgctcgagcaattggctctgcttnagagggtgcccagagctccttgcaagaagtttaccacaagtctatgactttgaaagaagccatcaagtcttcactcatcatcctcaaacaagtaatggaggagaagctgaatgcaacaaacattgagctanccacagtgcagcctggccagaatttccacatgttcacaaaggaagaacttgaagaggttatcaaggacatttaaggaatcctgatcctcagaacttctctgggacaatttcagttctaataatgtccttaaattttatttccagctcctgttncttggaaaatctccattgtatgtgcattttttaaatgatgtctgt

SEQ ID NO: 2928 - DNA, 603 bp, Homo sapiens
  misc_feature 12, 85, 157, 167, 183, 263, 286, 419, 504, 515, 521, 533,537, 562, 569, 579, 584, 596: n = A,T,C or G
cgaggtactttnttttttttttttttttttttttgttaaagaatgctttattaatacaaatacacacaaactctgaagcactaanaaatttaaatatctatgtcacagcaaacaggtggcaattcaacatccagggtcgacagaatgcttgaagganactgcaacanattggattcccatggnggagagggcatcttcacaggtgaaggggggcccagctgaaacagcttttcaagctctctctcctcgtcaaggatcatganaggcactccactcaaggggaggngcgcaatctggtgctcttcaggcaggtcaaaactctcaaagtctagaggattgaagggaaagaatttttctatttctggataggcatcatctgaggcaggaacagagctttttgctttaacagtcttctcagncatctttttggcaaaaaaacttggctgtttttgtttgaggggcccttggtctttacaaacttttctgtacctctgttgacagttnccaaacctttntaatanctttaagtaagntggnggggcatcaacgttttgccaaaacnggggtgnaacctgaaanctccnttaaggctttantgaaggc

SEQ ID NO: 2929 - DNA, 425 bp, Homo sapiens
  misc_feature 232, 308, 378, 408, 419: n = A,T,C or G
acttttttttttttttttttcctgttgtcccagatttattgaaaataatacagcactacagaaaaaattcaaacaggtccccgaggcgttttgaaattcatcccaactgtaggctgagtgacctgaaggttggacagactgccgaagtccaaaagcttcagcatttccttagtgtcaggatctacttcaataatctcctgatccaaggctgagacctcaggaacataattgnctctcctttctctctcctcctcctgcagcttgatggagatacctcttactgggcctctctgaattcgcttcatcanatgcgtgacataacctgctatcttgttgcggagctttttgctggggataatggcgatctcctcgcacacncgcttgttcgtgtggaagtccgttgcccangcgccgtgtantacctc

SEQ ID NO: 2930 - DNA, 574 bp, Homo sapiens
  misc_feature 35, 67, 70, 73, 76, 79, 101, 105, 132, 155, 197, 226, 245,287, 346, 430, 437, 440, 451, 510, 527, 545, 551, 555, 562,565, 571: n = A,T,C or G
ggtactttttttttttttttttttttttttttttnggccgtttccacacctgccctttattggtctnttntancanagnggctccaggcccttcacgcctntcanacaccacccatgagggtttaggaaggngccatcattctgtgaaggcccanagcttacccaagtcttggagcccaagttgaatcaccaaccanagggttgggagaggaaaaggaaacaggcngaggggaaaggcaaggctntgtagtgaaggggactgatatcaagggaatgctgaggtccancagtgtctcctgaaggcatgctgcatcctaaggctcctcaggactggatggagtagganatctgtgtgttgagcagttcacatctatatggcaactttaaggaggcgcttgatgtcaggctcaatgttgatggttgggaaagngccgctntancctccggaaanggctctcccttccggcctatgaaagaaacttctttaaaagttccaggcccacattttangcggggcacaaaggctncaaaaagaatgaaacttngggaancggncattganggnaaaaanggt

SEQ ID NO: 2931 - DNA, 582 bp, Homo sapiens
  misc_feature 496, 508, 523, 533, 536, 546, 548, 563: n = A,T,C or G
ggtacctgcaggcctcctacacctacctctctctgggcttctatttcgaccgcgatgatgtggctctggaaggcgtgagccacttcttccgcgaactggccgaggagaagcgcgagggctacgagcgtctcctgaagatgcaaaaccagtgtggcggccgcgctctcttccaggacatcaagaagccagctgaagatgagtggggtaaaaccccagacgccatgaaagctgccatggccctggagaaaaagctgaaccaggcccttttggatcttcatgccctgggttctgcccgcacggacccccatctctgtgacttcctggagactcacttcctagatgaggaagtgaagcttatcaagaagatgggtgaccacctgaccaacctccacaggctgggtggcccggaggctgggctgggcgagtatctcttcgaaagggctcactctcaagcaccgacttaaaagccttctgaagcccagcgaactttttgaanggcccctttgcnaaagtaataaggggnttctggcctnaanccctttcccntncaagccaaataaggncagcttttttttaacttat

SEQ ID NO: 2932 - DNA, 515 bp, Homo sapiens
  misc_feature 481, 489: n = A,T,C or G
acgcggggttgtcccctggcgctacccggacatctctcagggtgccggcaccatgaagatctggacttcggagcacgtctttgaccacccgtgggaaactgttacaacagctgcaatgcagaaatacccaaaccctatgaacccaagtgtggttggagttgatgtgttggacagacatatagatccctctggaaagttgcacagccacagacttctcagcacagagtggggactgccttccattgtgaagtctcttattggtgcagcaagaacgaaaacatatgtgcaagaacattctgtagttgatcctgtagagaaaacaatggaacttaaatctactaatatttcatttacaaaacatggtttcagtagatgagagacttatatacaaaccacatcctcaggatccagaaaaaactgttttgacacaagaagccataattaccgtgaaaggagttagcctcaacagttacctttgaangactgatngcaagtccctcgggccgcgaaccccg

SEQ ID NO: 2933 - DNA, 548 bp, Homo sapiens
  misc_feature 102, 112, 250, 344, 414, 502, 506, 540: n = A,T,C or G
actttttttttttttttttttttttttgcctttttatttggccaaatccatagcgactataactaaaccaaaacatgagctaagtaaatgaaaactactttnttctggaggnttattttggataaaatagttgaagacagactacaatgagacattgtaaaataagactagaaaataatttaagagcgtattttaagcaccgggattccgacacactcataaacgtgtttgctcccagctcttacaaaanaaaataagggttttctccatcaaaaacaacccagttacaccagtaaatcttcccagttctgaaaatctgaagcaactgatactccattaaatgnggaaacactgtctactcaaaatatttgtaatattatgcagtgacaaaaatttcccacccctatatagggntaaccatagttttcagcaaaagcaacaagggctttacttattttggctttttcaggttatcagagctccaatttatgaaacatactgngccnacccaggaaataacagcacacttttcgaagcccnccacccaa

SEQ ID NO: 2934 - DNA, 574 bp, Homo sapiens
  misc_feature 3, 15, 19, 22, 35, 36, 38, 41, 47, 66, 86, 94, 103, 108,136, 137, 138, 148, 159, 168, 172, 181, 183, 206, 211, 228,231, 248, 257, 259, 263, 266, 292, 301, 308, 310, 354, 357,370, 378, 388, 425, 432, 468, 470, 478, 487, 500, 505: n = A,T,C or G
  misc_feature 508, 510, 511, 535, 549: n = A,T,C or G
tcnagcggccgcccnggcnggnacgcggggccagnnanaanccagcngggctggtgctggggcttnttctcctgaaggggctgcangagggaangcttaaccntgtcntccttgatcagaagggtgatcagcaccnnnaaagccccangggccattggnccctacagncaanctgtattantngaccaggaccatttacatttcangacanataggcatggacccttnaantggacagcttgtgtcangaggggtancntaanaanctaaacaagctcttaaaaacatgggngaaattctnaaagctncnggctgtgacttcactaacgtggtgaaaacaactgttcttttggntgncataaatgacttnaatactgncaatgaaatntacaaacagtatttcaagagtaattttcctgctaganctgcttnccaagttgctgctttacccaaaggcagccgaatttnanattgatgngtatctatncaaggaccactgncaacnggntnnctttaatgggcccagtgctgcctnctctggaattggtnacatttaatttttacaattgatgta

SEQ ID NO: 2935 - DNA, 557 bp, Homo sapiens
  misc_feature 481, 522, 550: n = A,T,C or G
ggtaccccttaaccccttctccttcacccttagcagcaagtcccacttttctagggggcaagaaaccccaaaccccttccctccgtgtctttacgctctcttttctctgggtttgcttccttcactatgggcaaccttccatcctccattcctccttctcccttagcctgtgtgctcaagaacttaaaacctcttcaactcacacctgacctaaaacctaaatgcctcattttcttctgcaacaccgcttggccccaatacaaacttgacaatggctctaaatggccagaaaatggcactttcgatttctccatcctacaagacctaaataatttttgtcaaaaaatgggcaaatggtctgaggtgcctgatgtccaggcattcttttacacatccgcccttcctagtctctgtgcccagtgcaactcgtcccaaatcttccttctttccctcccacctgtcccctcagtcccaaccccangcgttggtgagtgtgctaatcttccttttttacaacccatntgacctttccctctttcacgccaagtanggccatt

SEQ ID NO: 2936 - DNA, 563 bp, Homo sapiens
  misc_feature 264, 463, 537, 550, 556, 560: n = A,T,C or G
ggtactttttttttttatttttattacgaagtttcattctttttgagcaaaaaagtcgaactttttctgttgaacaaaatattcacaacagggcagttgtgatacgaatagaacaaaaaaaaaaaacacttaaactttgttaggactccgatgagtttgggacttcaggaaaaatcaacccagcaccagcagctaccaaccaccattccatctcttcacttgaacagcattagttaagtccagatgtgggaacccttctcttanaagaagttcctaattgtgtctcagaccggtgtaaacaaaccagccagccaccaccttgctaaacctataagctttttaaaatccaatatattctgccaagaatatgccttgatagttagccctcagcccataggtgttttttgttttttaacagaattatatatgtctgggggtgaaaaaacccttgcattccaaaggnccatactggttacttggttcattgccaccacttagtggatgttcaagtttaaaaccatttgtctggtccctctngaagccttcccanagcttntttntaa

SEQ ID NO: 2937 - DNA, 559 bp, Homo sapiens
  misc_feature 421, 505, 559: n = A,T,C or G
ggtacttctagcaagtgcaccaacagaaaaacaacgcctggaatgggtgggcttggtggaatcaaaaatccgaatcctggttggaagcttggagaagaatgaatttattacactggctcatgtgaatccccagtcatttccagcacccaaagaaaatcccgacaaggaagaatttcgcacgatgtgggtgattgggttagtgtttaaaaaaacagaaaactctgaaaacctcagtgttgatctcacctatgatattcagtctttcacagatacagtttataggcaagcaataaacagcaagatgtttgaggtggatatgaaaattgctgcaatgcatgtaaaaagaaagcaactccatcaactactacctaatcatgtgcttcagaaaaagaaaaagcattcaacagaaggtgtcaaattnacagctctcaatgacagcagccctcgacttgtctatggacagtgataacagcatgtctgtgccttccctactagtgctacgaanccagtcctttgacagtctgcagcttttaaggcaaaaacatcctgctccactgtn

SEQ ID NO: 2938 - DNA, 585 bp, Homo sapiens
  misc_feature 3, 15, 19, 73, 142, 171, 201, 237, 255, 272, 280, 301, 360,399, 409, 422, 426, 432, 511, 514, 534, 553, 555, 558, 561,567, 571, 578: n = A,T,C or G
tcnagcggccgcccnggcnggcactttttttttttttttttttttttttgatgaaaaagagcctaaacgcttntgatttgggataaagaaaaaggagcattaaccttgactatgtctttagctccagccacctttttaagantaaattgctgggcaggtgggggagggctngtcacggaacgaaactgtaagccggaccangtgtgaggaggggaggtgataaaaagattacagggnggaggagtggagcctgangaagaattgggacctancttggcgnggagaggacgggagaggtcanatgggtttgtagaaaaggaagattagacacactcatcaacgcctggggttgggactgangggacaggtgggagggaaagaaggaatatttgggacaanttgcacttgngcacacaaactangaangggacnggatgttgtaaaaaaatgcctggacatcaagcgcctcaaccattttgccatttttttgacaaaaaaatttaaggtcttnttngatggaaaaaatcgaaagcnccctttcttggcccttttnanccnttntaaatnttgntttgggncaaccgt

SEQ ID NO: 2939 - DNA, 559 bp, Homo sapiens
  misc_feature 522, 550, 556: n = A,T,C or G
acctgcatcagcattagtaatcaacctgttaatccaaggtctttagaaaaacttgaaattattcctgcaagccaattttgtccacgtgttgagatcattgctacaatgaaaaagaagggtgagaagagatgtctgaatccagaatcgaaggccatcaagaatttactgaaagcagttagcaaggaaaggtctaaaagatctccttaaaaccagaggggagcaaaatcgatgcagtgcttccaaggatggaccacacagaggctgcctctcccatcacttccctacatggagtatatgtcaagccataattgttcttagtttgcagttacactaaaaggtgaccaatcatggtcaccaaatcagctgctactactcctgtaggaaggttaatgttcatcatcctaagctattcagtaataactctaccctggcactataatgtaagctctactgaggtgctgtgttcttagtggatgttctgaccctgcttcaaatatttccctcacttttccatctttcaanggtataaggaatcttttctgctttgggnttatcnaaa

SEQ ID NO: 2940 - DNA, 557 bp, Homo sapiens
  misc_feature 462, 490, 500, 529, 553: n = A,T,C or G
ggtacttttaagaaaaaaagcagggccttggaagttttggttcttttttcctcccctgttgcaaattctcatggtttgggttgggtggtggagagcgcgtgtcatctgcgggtggcactgcccacggtgggcgggcgggcctctctactcgaaggtgaccacgtttagattctgagacgggaagtggagggtgaataggtcacggcggcctttttttttagtttaacttttccttttttgctgtctagtcatcctcgtcggtcttctgcttcttggtatcgacatcgtcatcctcatcatcttcagctgcccgcttgcccgtagctgactcagcttcctcatcttcatctccatcctcttcctcaccatcaccttcttcttcctcctcctcttcctccccaccttcttcctcttcttcgtctacctcattgtcagcctcctgctccccattttcctcattancattcccgttaacaaggggcgtctcttncattttctgnctcttccacacttctttttctctttaaanccttggggggaatttcgaactggngtct

SEQ ID NO: 2941 - DNA, 544 bp, Homo sapiens
  misc_feature 373, 387, 417, 430, 461, 480, 513, 516, 544: n = A,T,C or G
ggtacaagcatcgtagggttcccctaaacttgccctgtttttgtttttttagtttgttatccccttactgagcggcctctactaggtggctgtgattaaatgtcccaagcaaggatagggaaggggaatggttgagcctctggagatcattgtaaccaatcctgccagacctgtttggggcagtggggagcaaacctagataaggacctgtttggggcagcagggagcaaaatctcctttaacaaccaagcagttcctcattcacatcaacagagcgaggctgtgataacttaggaggcagcaatcctaatagtccttcagtgcattttagtctgtctccaactggacaccagtaggtagtgtcaagccaganattcggggcagtanataaatgttcattttactgatgcactttanttttttggtctgntacctgttttcagaaattgtggcctttagcnggagttaggcgccaaccantgagaccccaatcctgagtttgtgcttcaatgnggngaaagcctatgggactccactcctctgn

SEQ ID NO: 2942 - DNA, 532 bp, Homo sapiens
  misc_feature 449, 487, 511, 515, 525: n = A,T,C or G
ggtacaaagatgactataaacaagatgcagccctcggtttccatgaacagcacactattacagtaaaccaagtttatattccaccatcaagtgtggctctcccatgacttcgctttgtgatggatcattaagaatatcctcaaatccaatagtctcatcattacccctcaaaacatccagtgaaagatttgagcttgaaagaaatggaagacgctgaacctgctgcactgccttgaattccatctgtaattttagcggagcaaatagaccctgaatgtttctcagtgtggaaaaattcattttatcttggttgagctggaaatttttttctgataattcaaggggatgactaggcaaaagttcatttttcacacaagaaaaacctttccgaagaagatcatgactttcaaaaggtccacttgctgaaagttcagtaactggaatactgncctttagctcaaatccaagtcctctggcattcatcttncgcagctctgcgaacccccgcgtnctgnccgggcgggncgttcga

SEQ ID NO: 2943 - DNA, 550 bp, Homo sapiens
  misc_feature 26, 208, 246, 516, 521, 529: n = A,T,C or G
acttttttttttttttttttttttgnatgtaaaacaagtaaactttatttgggagatggggtgaatccatcactggttactggaaccctgagtctgcattttctcctcaggaaggcggtctgaaatggagtgggctgtgtttggcaagggttgtagtggtttggaatctgcttggctcccgagctgggcctcaggcctgtctccccanagtaaatgcccgggatcattgaggaagcgttggctgcnctggcatgttaggcaggtctgtacttcaattctacctggataatctcactattctcaagacttcaaccacagtaaatagtgaccatccctaacacttctatctagagctgtgctttcagctccttactggacatctccgcctgcttgtcttctaggcagttataattcattgtgttacacattaaaatttccctctaccaccgctcttttacatcccccaaaatctggttcatctactgaattctaatcttcacgctgcccatgtttaanacttntccaaccncatactggctaattatcctgg

SEQ ID NO: 2944 - DNA, 563 bp, Homo sapiens
  misc_feature 1, 5, 7, 60, 62, 79, 84, 86, 97, 118, 131, 213, 262, 295,303, 308, 316, 325, 340, 348, 374, 379, 391, 407, 441, 475,492, 500, 538, 558: n = A,T,C or G
ncgcngngacgcaaaacaaattgcaatataatgtgataagttctttaaaagaggtaagancnacgtgctttgggagcanagaananggagaaagcancatcttgcctggatgagccangggacacaggaanagaagcccactatctcatttaatctttacaactctcttgcaaggttccctggttgtgaaaatacatgagataaatcatgaangccactatcatcctccttctgcttgcacaagtttcctgggctggaccgnttcaacagagaggcttatttgactttatgctanaagatgangcttntgggatangcccagaanttcctgatgaccgcnacttcganccctccctagcccactgtgccccttncctgnaatgccatcttncattgggtcaccgttntgatttgggtctggacaaaaagccaaagggatcnttcccctggcacaactcttgtggacctgccaaancaacaaaaataacccgnaatccaanatgggagacctttatgaacctcaaaaaacctttccccnttgaattttttgaacaaatnaaaat

SEQ ID NO: 2945 - DNA, 561 bp, Homo sapiens
  misc_feature 286, 447, 481, 513, 532, 546, 554, 555, 560: n = A,T,C or G
acgcggggcttgtccagtgaaacaccctcggctgggaagtcagttcgttctctcctctcctctcttcttgtttgaacatggtgcggactaaagcagacagtgttccaggcacttacagaaaagtggtggctgctcgagcccccagaaaggtgcttggttcttccacctctgccactaattcgacatcagtttcatcgaggaaagctgaaaataaatatgcaggagggaaccccgtttgcgtgcgcccaactcccaagtggcaaaaaggaattggagaattctttangttgtcccctaaagattctgaaaaagagaatcattattcctgaagaggcaggaagcagtggcttatgaaaagcaaagagaaaagcatgtcctttgcaacctgatcacacaaatgatgaaaaagaatagaactttctcattcatctttgaataacgtctccntgtttaccctgtattctagatgtaaatttacatnaatgtgtttggtccaattaaccttgtgaacangcattaataaaaaaattanggttaaatttaaanttcaaaannaggtng

SEQ ID NO: 2946 - DNA, 556 bp, Homo sapiens
  misc_feature 476, 488, 507, 511, 528, 531, 548, 555: n = A,T,C or G
ggtacctacatcagatctaaccttgatcccagcaatgtggattccctcttctacgctgcccaggccagctaggccctctcaggatgtgagatctctatttcaaatgagaccaaagatctgcttctggcagctgtcagtgaggactcatctgttacccagatctaccatgcagttgcagctctaagtggctttggccttcccttggcatcccaagaagcactcagtgcccttactgctcgtctcagcaaggaggagactgtgctggcaacagtccaggctctgcagacagcatcccacctgtcccagcaggctgacctgaggagcatcgtggaggagattgaggaccttgttgctcgcctggatgaactcgggggcgtgtatctccagtttgaagaaggactggaaacaacagcgttatttgtggctgccacctacaagctcatggatcatgtggggactgaccatccattaaggangatcaggtcatncagctgatgaacgcgatcnttancaagaagaactttaatnctntccgagccttaacgggngccttgna

SEQ ID NO: 2947 - DNA, 561 bp, Homo sapiens
  misc_feature 465, 468, 511, 524, 550: n = A,T,C or G
acctgcatcagcattagtaatcaacctgttaatccaaggtctttagaaaaacttgaaattattcctgcaagccaattttgtccacgtgttgagatcattgctacaatgaaaaagaagggtgagaagagatgtctgaatccagaatcgaaggccattaagaatttactgaaagcagttagcaaggaaaggtctaaaagatctccttaaaaccagaggggagcaaaatcgatgcagtgcttccaaggatggaccacacagaggctgcctctcccatcacttccctacatggagtatatgtcaagccataattgttcttagtttgcagttacactaaaaggtgaccaatcatggtcaccaaatcagctgctactactcctgtaggaaggttaatgttcatcatcctaagctattcagtaataactctccctggcctataatgtaagctctactgaggtgctatgttcntantggatgttctgacccttgctttcaaatatttccctcacctttnccatctttccaangggtataaaggaatctttctgctttnggggttatcaa

SEQ ID NO: 2948 - DNA, 560 bp, Homo sapiens
  misc_feature 1, 529, 549, 560: n = A,T,C or G
ngtacgaagttctcagtttcactttagtagaaagagctctagaaatgaggctgataaacacatctaagaacactggttgctttctaaaatttccaaagctccaccataaatgtaatttttagtgtttcaaatgattgcattttaaagtatataaatatgggttatccaatatcaatgctatagtaacatcctgaaacaaaacaagcacaaaggtataaatgcctaaactggaggaaacttgaaaccctcatgttaaatcttaaatgtagtatttctaacttgtgaagacagattggtaggcagccatttttttgtgtcttaaaataactgggggcatagttaaaattttatacatcaagtgattgctattattgaatgttgcaggtgagatgtggttatttttagtttatttgaaatgtttgactggaaaggggggagggggaagcaaatatttgaaatttggaaaaccctaaaccttttggtaagaaattgtaattttcacttaaaattttctttaagggattaaaangtttataattgttgtagttnaattgacaatn

SEQ ID NO: 2949 - DNA, 561 bp, Homo sapiens
ggtaccctggcccagcagacatgtgtcctacaggctgagcccagaacaaacaaaatgagtcctttttaagcattttgaggtgggaactacatgaagcaggcttacagaagcgagaacaaaaggctgttgtgacacttctgctacatgtcttacatctctgtgagaactcggtttgcagcttatgcttatctgtcttgtgaccttgcagctatgcagggaagaaagaaacaggagtttacagagcctacaaaatatgcagaggatagatatggttaatgtttcttgggacagacagttaatactctcttctaactttaacttcaaggggggctacttaaattcttttcagccttggttaatacagcaattcatcctatgagctattgttatttctctattattacttatgctattattctgttattttctcaatttcccacttcacagctacccctatcaagtccatattttggctaatttttcaatgacttggctggactacccgcgtacaccaatttgttaaaaagcaagaaaccacagtgtctcttcactagcatttag

SEQ ID NO: 2950 - DNA, 560 bp, Homo sapiens
ggtacatcgtgcatggcgtccaggaagacctccgtgtggatggccgtggctgtgaggactaccgatgtgtcgaagtggaaactgatgtggtgtccaacactagtgggtccgccagggtcaagctgggtcacacagacatcttggtgggagtgaaagcagaaatggggacgccgaagctggagaaaccaaatgaaggctacttggagttctttgttgactgttcagccagtgctacccctgaatttgaaggtagaggaggtgatgaccttggcaccgagatcgctaacaccctctatcggatatttaacaataaaagcagtgtcgacttaaagaccctctgcattagtcctcgggagcactgctgggttctctatgtggatgtgctgcttctggaatgtggtggaaatttgtttgatgccatttccattgctgtaaaggctgctctcttcaatacaaggataccaagggttcgagttttggaggatgaaaaggggtcgaaaggacattgaattgtcagatgacccttatgactgcatacgactaagtgtggagaatgtccc

SEQ ID NO: 2951 - DNA, 571 bp, Homo sapiens
  misc_feature 492, 495: n = A,T,C or G
gcgtgggtcgcggccgaggtaccttaaaagtgtctcacctagaaggcctctacctgtaatcacattaatttttctaaagacaatttggtgttttgaagataaatgtcattagtctatgataatagcatcataggacaattagccattttagacttgaccatattttctctttttagcatatagccatcttgatatttaggtgggagactactccaatggagcaacagtttcattttacatgattggatttagaaatttacaaattttaaactcataagaattctaaataatttgaaaatggaaacatttgacccacagtctagcagcataaatacatttataaaatacttcattgttgatcttaggtcattgatttaaaacagaatttggtgactatgggcaggtggagggggccagtgaggaaggtataaaagagaaatctttatgaattgtgttcagattgattttgtataaacataatatattcatggntgnatctcttatttataatacccaactacatgaaggtggcccaagggaaggacaatattttaaataaatatttgcttaa

SEQ ID NO: 2952 - DNA, 554 bp, Homo sapiens
  misc_feature 457, 484: n = A,T,C or G
acagcatcgtagggttcccctaaacttgccctgtttttgtttttttagtttgttatccccttactgagcggcctctactaggtggctgtgattaaatgtcccaagcaaggatagggaaggggaatggttgagcctctggagatcattgtaaccaatcctgccagacctgtttggggcagtggggagcaaacctagataaggacctgtttggggcagcagggagcaaaatctcctttaacaaccaagcagttcctcattcacatcaacagagcgaggctgtgataacttaggaggcagcaatcctaatagtccttcagtgcattttagtctgtctccaactggacaccagtaggtagtgtcaagccagagattcggggcagtagataaatgttcattttactgatgcactttagtttttggtctgttacctgttttccagaaatttgtggccttttangcggggagttaggcgaccaaaccagtnagaacccccaatccctgcagtttttggcttcaagtgtgggtggacaggcctaatggggatctcaacttcc

SEQ ID NO: 2953 - DNA, 552 bp, Homo sapiens
  misc_feature 520: n = A,T,C or G
ggtacccagtaaaaaccagaatgacccattgccaggacgcatcaaagttgactttgtgatccctaaagaacttccctttggagacaaagatacgaaatccaaggtgaccctgctggaaggtgaccatgttaggtttaatatttcaacagaccgacgtgacaaattagagcgagcaaccaatatagaagttctgtcaaatacatttcagttcactaatgaagcccgagaaatgggtgtgattgctgccatgagagatggttttggtttcatcaagtgtgtggatcgtgatgttcgtatgttcttccacttcagtgaaattctggatgggaaccagctccatattgcagatgaagtagagtttactgtggtcctgatatgctctctgctcaaagaaatcatgctattaggattaaaaaacttcccaagggccggtttcatttcattcccattcagatcaccgttttctgggcacggtagaaaaaagaagccacttttccaatcctaaaccctacccaataangcaaagagaaggagctgaggatggcttattgc

SEQ ID NO: 2954 - DNA, 583 bp, Homo sapiens
  misc_feature 119, 167, 220, 240, 301, 329, 379, 400, 409, 416, 423, 433,436, 437, 451, 458, 465, 471, 472, 476, 480, 481, 495, 499,502, 507, 516, 517, 529, 530, 534, 536, 544, 551, 556, 557,559, 561, 572, 577, 580: n = A,T,C or G
gtacgcggggagttctcttcggggactaactgcaacggagagactcaagatgattccctttttacccatgttttctctactattgctgcttattgttaaccctataaacgccaacaatnattatgacaagatcttggctcatagtcgtatcaggggtcgggaccaangcccaaatgtctgtgcccttcaacagattttgggcaccaaaaagaaatacttnagcacttgtaagaactggtntaaaaagtccatctgtggacagaaaacgactgtgttatatgaatgttgccctggttatatnagaatggaaggaatgaaaggctgcccancagttttgcccattgaccatgtttatggcactctgggcatcgtgggagcnaccacaacccagcgcttattntgacgcctnaaaactngagggangaaatcaganggnnaggggatccctttncctttanttttggnacctgnnttantganngctttggggacaancttnganttctnatatccgtnngaaggtttgggnnagcnancttggaantggttgnaattnngnangctttaacatnttccncantaa

SEQ ID NO: 2955 - DNA, 501 bp, Homo sapiens
  misc_feature 250, 252, 296, 307, 309, 317, 321, 338, 370, 379, 392, 399,405, 406, 407, 408, 425, 428, 429, 437, 441, 478, 485: n = A,T,C or G
acgcgggggacccgacccttttttgcagtctcaggacgggcgctttggagccggccccaggcagcgtgtgtcggtcgcctagtctggagaactagtcctcgactcacgtgcaaggatgatgctgaaaggaataacaaggcttatctctaggatccataagttggaccctgggcgttttttacacatggggacccaggctcgccaaagcattgctgctcacctagataaccaggttccagttgagagtccnanagctattttccgcaccaatgagaatgacccggccaagcatgggngatcagcacgnanggttatanactncaacatcttcccccagngattttggagactgtatttccccaatggcctncctactcgntttgttaatgcanggtgaanacattnnnntgaagctttgcctgatnggnnatggaaanccancccctataactcctgcattaccttgaaaaaacaccantttttgnttaatccagcttttac

SEQ ID NO: 2956 - DNA, 560 bp, Homo sapiens
  misc_feature 380, 491, 521, 539, 545, 552: n = A,T,C or G
accaccgcaaagccctgtgagcgtctacagacagctcaccatttttgtcctgtatctgtaaacactttttgttcttagtctttttcttgtaaaattgatgttctttaaaatcgttaatgtataacagggcttatgtttcagtttgttttccgttctgttttaaacagaaaataaaaggagtgtaagctccttttctcatttcaaagttgctaccagtgtatgcagtaattagaacaaagaagaaacattcagtagaacattttattgcctagttgacaacattgcttgaatgctggtggttcctatccctttgacactacacaattttctaatatgtgttaatgctatgtgacaaaacgccctgattcctaatgccaaangttcaacttaatgtatatacctgaaaacccatgcatttgtgctctttttttttttatggtgctttgaagtaaaacagcccatcctctgcaaatccatctatgttgtcttangcaattctatctttgctcaaaattggttgnaaggatgggggatttggnttcatnggttttngatttgaa

SEQ ID NO: 2957 - DNA, 558 bp, Homo sapiens
  misc_feature 537, 553: n = A,T,C or G
ggtcggccgaggtacttttttttttttttttttttttgaaaggtaattgtttattactggagaagagaaaaatgtatacaagaaagtctagattctttctccacatgcactacttttggaataaagttccaaatatcaactttgaagatacttacaaggataaatttttcttaacaagtgaccaattactgtgttgtggacattttttcatagaatccatatactgtaagctaaatatattcttatagtttacaggaagcttggagcaattatgtattaacagagaagatggtattatattttactgcaaaatattataaaagtgatacaattttgtggctcttaaatgtttaattacttgatttcaacaggacaatgaaaaaaaaccaaaaatcatcaagacaggcctggctttaaggttttttgtattcgattcgttctactttcacatcatctccaattagctgatacacataggtgaccactgtagaagcctggattccatcaacacaaatgatggaataatgtttggttccnagcattatatccccantggca

SEQ ID NO: 2958 - DNA, 571 bp, Homo sapiens
  misc_feature 9, 128, 221, 234, 251, 279, 307, 309, 317, 323, 347, 355,364, 367, 369, 373, 376, 378, 391, 400, 432, 435, 441, 454,458, 465, 469, 477, 485, 486, 498, 501, 516, 518, 525, 533,546, 561, 562, 566, 570: n = A,T,C or G
actttcatntattgacactgagagaggggcagtgaccaggcagcctggagatgcctattaggaaggaagagtaggagaaagttgtttctgtccccacccctctacccctacaggggaaaggaatctcntagtgatgagggtgagagacttgaaatacatcagcactgcagtgagcaggacaggtttcattactgcttttttacttctgaataaattatttntgtggctgttaanggatggggaggctgaanttggttgtgtgggttgctgggcttcaangttcatggtagaaaaaattaacttcatncntcttgttnggcggntcattggaatggtcctgagctgcncggtcttnccagaaatncananaacntgncngggcttcttgctntcaaaaacnaccagggccctctactttcatatcacaatgcncancaatgntccccacggtganaggnctttatntttntggtagancatttatnntttactttcatnatnattggggtcgctttngntctttantgtattgntttgaagacctanacctataccgtctannttcnttcnt

SEQ ID NO: 2959 - DNA, 562 bp, Homo sapiens
  misc_feature 466, 500, 505: n = A,T,C or G
accaaaggatagctgttctgtttaagtagggacctctcatggcctacaggctttgacatctgagaatcaaactggagaacattccgaagccgttcttataagtgtctccatctctacctgggctgaaatggaatgtgcaaatgtagcccagcctggtccttgggtgttgccagttgattgatgactgggagccaaagtggcatctcctttgacctaaacgggcgatgatgaaataaaactcaacagcctttctctcatcttgcattgtgagatgcgaaatagagcgtgtctctctgcctctcattttaggctgaggccgtccaaagcggccatgccccatgtttccactagatggcgctgacacttcaggcatcaaccctcatggcctctcagccttgcaaaggcagccactttaaagtcggtgtcctgtgtggggcaccaaactgaagctgcagacacccagtangcgccagggcaaatgcgtcccattttaaagaagntttgnatttatgagctctttgcttccttccttcccactaactttaaagaaatgctcttccat

SEQ ID NO: 2960 - DNA, 559 bp, Homo sapiens
  misc_feature 207, 455, 515, 522, 524, 528, 539, 559: n = A,T,C or G
ggtacttttttttttttttttttttttggagtttctaagtcattactttttattttgaaagatttgtgaaactcttcacatcatggtgagagtttgtatgattaataagaagcagctttttcatgaaatgcttggaggtgaacgagttctcagcctgtgagatccgaccatcccattaactttgaagtttctcttgattaatagaanaaaaaaggggagggtgaagaaaaggaggaacatgctaaaaaccttatgacaatcatccaaatgtgaggaaagaacaaccgattcaccaactccactttttctattttacaactttctacatctcactcttgattttggccttcctggctgaaacagcctggcagtccctagagcccctgagaagagccctggttctccaaaagacagaggaggagaagccctgcaggatgcgctgaccacttccaganaactgacagtcccgtgctcccaaaagtttgaccaacagcctaatgtgaaaagaaactgcnctgaaangnaaangagggaatggngatgaacctgggcttatgtn

SEQ ID NO: 2961 - DNA, 445 bp, Homo sapiens
  misc_feature 157, 257, 435: n = A,T,C or G
acacgaacatgatcaagggtgttacactgggcttctgttacaagatgaggtctgtgtatgctcacttccccatcaacgttgttatccaggagaatgggtctcttgttgaaatccgaaatttcttgggtgaaaaatacatccgcagggttcggatganaccaggtgttgcttgttcagtatctcaagcccagaaagatgaattaatccttgaaggaaatgacattgagcttgtttcaaattcagcggctttgattcancaagccacaacagttaaaaacaaggatatcaggaaatttttggatggtatctatgtctctgaaaaggaactgttcacaggctgatgaataagatctaagagttaccttgctacagaagaagatgccagatgacacttaaacctcttgtgatatttaaatgatcataaaagactattgntttggaaaat

SEQ ID NO: 2962 - DNA, 529 bp, Homo sapiens
  misc_feature 390, 424, 443, 469, 480, 495, 505, 519: n = A,T,C or G
actttaatagtttttcttagaaaaaaaatttccagacacttaacatttcacaacatttcaacagcaaagtattagttgagagaggggttttcaggagttggagattatagaatattaggaagaaatgttggtatcctccattatagatggatggcataggtcacaaatgggagactggcagctaagccaatatcaaaacccagtggaatgacacttctatggagtttacttttcttcctgctatcttccctatcccacggaaatgtctgtcaccatgtaaagcccagtagcaggcagcttaggctccagtcttcccccttgggtaggaaaaggagtgaagggaatgtcactcctgagtttccatgctttcttctttcctctccttgaggnggtcttctgaattctcctcttcttcctctccttncttcttctctggggggctntcataagcctttctgaaggtgttctntcactcctccnaggtagatatttcanaagcaagatngctggcatcccctnctggccaagg

SEQ ID NO: 2963 - DNA, 438 bp, Homo sapiens
  misc_feature 20, 278, 324, 343, 385, 400, 405, 408: n = A,T,C or G
acaaattgtatcagaagttntttttagaaatgataggtaaccaggtccaatcagtaaaaataagctgcttataactggaaatggccattgagctgtttcctcacaattggcgagatcccatggatgagtaaactgtttctcaggcacttgaggctttcagtgatatctttctcattaccagtgactaattttgccacagggtaccatttccaaactaactatcctagcagcgtcagctgccagctaacagcaagagctctgagggcatcactgaacanatagcaccttatgagttattatgattcaaaaatctcccttgctgtnggatttaccaacaccgtangcttttatttcttcccattacatctgtttagccacaaaaagnatcgtggccatctcnctgcnaanataagacttcctcaaaatcttatttgttag

SEQ ID NO: 2964 - DNA, 442 bp, Homo sapiens
  misc_feature 116, 202, 216, 242, 252, 289, 291, 309, 310, 339, 342, 356,362, 366, 369, 380, 390, 394, 409, 410, 413, 423: n = A,T,C or G
actgaaatgtgtgttgaaatcagttaccgtgctcaggctgagcagcagcacaatcctgctgccaatcccaccatgatccgagccaagtgctatcacaacctggatgcctttgttcnactcattgcactgctcgtgaaacactcaggggaggccaccaacactgtcacaaagattaatctgctgaacaaggtccttggtatantagtgggagttctncttcaggatcatgacgttcgtcagantgaattacancaacttccctaccatcgaatttttatcatgcttcttntnggaactcaatgcaccttnngcatgtgtttggaaaccattaattttccnganacttacagcttttntgcaantacnttncaacatctggngggcctaccnaaanctgactgggctttannatntggcctggcnttagaactgaatttcccat

SEQ ID NO: 2965 - DNA, 348 bp, Homo sapiens
  misc_feature 131, 165, 241, 273, 314, 328, 331, 344: n = A,T,C or G
acaagactcttgacagttgtgcttctctaggaggttgggtttttttaaaaaaagaattatctgtgaaccatacgtgattaataaagatttcctttaaggcagaggctggtcgagatgctgctgttatcttntgcctcagacagacagtataaatggtcttgtttntaagattcctaccaccagttactttgggccaagtatccacatccccttgcgtatgggaggtgggtgaagagtgttnggatgcatagtggttattatgggaagtagctnaatggtaaaaggacaaacacctatctttctttgagcttaancctggttgtgcttnttnccaagggagatantagg

SEQ ID NO: 2966 - DNA, 456 bp, Homo sapiens
  misc_feature 7, 56, 75, 330, 353, 369, 408, 424, 427, 428: n = A,T,C or G
gtggttncctctattttgaatttttgatcaaaaaactgattagcagaatatagttnggagtttggcttcatcttnctggggttcccctcactcccttttttgtcaaccccatctgtagcctcttcctctactcaggcagtcaacccgccacgatgagaagtgggaccagcagagggcagccaacttcaggagtccgctttcccaccaggcttcattcacccagtggacctgaactgtttggtagagccacccggcccttccttcctcattggtgtttggtatgcgcacagttcctgtgggactgggccgtgagttttccattggaaagangttcagtggcccattgttaactnagccttaaaatctcanctgcaggccctacaaagaaaatggagagcctcttctggnggatggttgctcctcnganntgccaagctggtctggcaaaacaccttt

SEQ ID NO: 2967 - DNA, 590 bp, Homo sapiens
  misc_feature 228, 249, 267, 284, 316, 336, 353, 357, 381, 389, 399, 414,430, 439, 460, 467, 468, 471, 481, 488, 506, 517, 519, 526,536, 550, 558, 562, 577: n = A,T,C or G
actcaagtcacttaatgaggaagctgtgaagaaagacaactctgtccattgggagcgccctcagaaacccaaggcaccagtggggcatttttacgaaccccaggctccctctgctgaggtggagatgacatcctatgtgctcctcgcttatctcacggcccagccagccccaacctcggaggacctgacctctgcaaccaacatcgtgaagtggatcacgaagcagcngaatgcccagggcggtttctnctccacccaggacacagnggtggctttccatgctntgtccaaatatggagcagccacatttaccagnactgggaaggctgaccaggngactatttcagtcttangganatttttcagcaaattccaagtggncaacacancccgcttgtnctgtagcaaggtttnatttgcagaacttgcntggggaatncacattgaaagttgacaaganaaggatnngtntacctccaanattcttnaatacaatattctcccanaaaaggaaaantnccctttnctttatgagngctgactttgtctnaactgtgntganccaagcccacaccancttccaaatctcc

SEQ ID NO: 2968 - DNA, 685 bp, Homo sapiens
  misc_feature 195, 327, 368, 382, 524, 525, 538, 559, 563, 565, 603, 610,614, 624, 634, 647, 660, 673: n = A,T,C or G
acagcatcgtagggttcccctaaacttgccctgtttttgtttttttagtttgttatccccttactgagcggcctctactaggtggctgtgattaaatgtcccaagcaaggatagggaaggggaatggttgagcctctggagatcattgtaaccaatcctgccagacctgtttggggcagtggggagcaaacctanataaggacctgtttggggcagcagggagcaaaatctcctttaacaaccaagcagttcctcattcacatcaacagagcgaggctgtgataacttaggaggcagcaatcctaatagtccttcagtgcattttantctgtcttcaactggacaccagtaggtagtgtcaaccaganattcggggcagtanataaatgtcattttactgatgcactttagttttggtctgttactgttttccagaaatttgtggccttttaggccgggagttaggcgaccaaccagtgagagccccaatcctgcagttttgtggcttaagtgtgggtggacanncctaatggggatntcactccttctgtgggctgcncagnanctaccccaaaaggtaatggtgggagtggttgtggtctnaactgtnacanagcttcagtnggagaggatnagcctttgaagcncttactgaaggantaatttttggttncctttttcaaac

SEQ ID NO: 2969 - DNA, 715 bp, Homo sapiens
  misc_feature 384, 443, 451, 510, 531, 541, 558, 563, 595, 611, 625, 642,646, 649, 661, 686, 708: n = A,T,C or G
acgcggggagcggatagaggacacgaccaagatggcggcggtgtctggcttggtgcggagaccccttcgggaggtgacagttcgtgatgctataaatcagggtatggatgaggagctggaaagagatgagaaggtatttctgcttggagaagaagttgcccagtatgatggggcatacaaggttagtcgagggctgtggaagaaatatggagacaagaggattattgacactcccatatcagagatgggctttgctggaattgctgtaggtgcagctatggctgggttgcggcccatttgtgaatttatgaccttcaatttctccatgcaagccattgaccaggttataaactcagctgccaagactactacatgtctggtggncttaacctgtcctatagtcttcagggggcccaatggtcctcagcagtgtagctgcccancactccantgctttgctgctggtatggcactgccaagcttaaagtggcagtccctggaattataggntctaaaggacttattaattcnccattcgggntacaatccaatggtggngctanagaatgaattgatgaatggggttccttttgantttcctcggaacttantcaaagaattttgntccttttgaaaagccanatanaangcaagaacaatntaactgtggtttccttcaaaactgnggccaatgttaaaacttcacantgctttt

SEQ ID NO: 2970 - DNA, 268 bp, Homo sapiens
  misc_feature 57, 73, 89, 92, 93, 96, 107, 140, 168, 179, 185, 221, 226,245, 258, 262: n = A,T,C or G
acaatgactcattatttctttataaaaatctgttgttctgaaaatcaacaaccttanaaggattttgtcttanaaaatttccttggctntannttnatttcatattnagaaaaaaataatgaaaagcatccccaaaattncaatgatgtgaatttttaaattaccttnatttctttaanctaatnccattgattgttactttaaatttttcacctggaatnatggntttaaaatttccccacctnatggggaaaaaantaanccagaa

SEQ ID NO: 2971 - DNA, 638 bp, Homo sapiens
  misc_feature 6, 24, 82, 113, 131, 169, 171, 222, 268, 309, 342, 352, 365,377, 382, 388, 397, 400, 433, 444, 454, 460, 463, 476, 484,502, 509, 514, 532, 540, 551, 554, 555, 557, 558, 559, 560,564, 575, 592, 602, 606, 624, 625: n = A,T,C or G
actttntttttttttttttttttntttatatcacaacatcgtttattatgtgaattttttacaatacaaacaaaaaatacanaaatgcaatatatgaatacagctaaatgcanaatggtgacttttttctnttcaaaaggccatgattcccatttctagtaaaataaananactgcatataggtagaaacaggttggtcattaacttcacaattttgcctanaaatgatctataaatgcatttccccccctgctacttaccataaagngtaaaaagggagttaaaggaaagtttccttgttggttcctnccatatgaaagatgcttattctattttagcagngccaaatatntggaaaatatctnaattaaatggtnttacnaaaaantgaagccantantgatattttggctaaagagggccctaattgagnaataatatttntttaaagaantcaaancanacaaaccaaaaangacgtttntttaaaaaaactctaggngcacaantaagnaatatagggttttttttnttccatgnggattttaaanaanngnnnnggtncaaaaaaaaangggcaactggtttaaanctaaattacnttantgtttttgcctggccctnnattggacccttgt

SEQ ID NO: 2972 - DNA, 626 bp, Homo sapiens
  misc_feature 181, 208, 306, 313, 334, 345, 356, 366, 368, 369, 375, 383,389, 420, 424, 441, 452, 461, 463, 469, 472, 473, 477, 479,497, 520, 533, 558, 568, 570, 571, 575, 577, 589, 591, 612,619, 620: n = A,T,C or G
actttttttttttttttttgagcagtaaggtattatttattaagatcttaagcctcacccctgaactcaaatgggatgggataaggagtaaggaaagaggttagaggagacagaaaacaaagcccagctcttccaagctcaccacctagccaaggtcttcgaattcctgagggaacccagnactggaggctgggctgaaggaaggcancattcctgggaggttccaagttctgggcaggggtactgggattatataggcatgagccacttgagcctggcccagaagcgtttttctcaaaggccctnagtgaanataaaattaaaatttggcatnttcctgtcctnggccagggatntctttacaanannccctgnccctttgnttgggnggccacagtttttaaaattaaggaggagggngggngaaaaaaaaaatgtaangggagggaaantttttcccnangccggnacnntttntngcactccatggacccaanaaaaaagaatggccaaacccttnaaaccccttgatnttttgaaaagttccaagttgaaggnaaacaaaaantnntttnantggtccaaaaanangggctgcttctccaaaaaagntaaaatnnaatttc

SEQ ID NO: 2973 - DNA, 291 bp, Homo sapiens
  misc_feature 16, 45, 78, 93, 112, 156, 166, 174, 179, 190, 202, 209, 220,222, 232, 236, 242, 250, 255, 279: n = A,T,C or G
acaaagcagactgccngcaaatcgaccggtggtaaagcacccagnaagcaactggctacaaaagccgctcgcatgagngcgccctctactggnggggtgaagaaacctcatngttcaggcctggtactgtggcgctccttgaaattagacgttatnataagtccantgaacttnctgantcgcaaacttnccttccagcgtntggtgcnagaaattgctnangactttaaanacanatttgngcttcaanagcgnaactatcggtgctttgcaggaggntatttgaggcct

SEQ ID NO: 2974 - DNA, 469 bp, Homo sapiens
  misc_feature 26, 58, 65, 80, 123, 163, 219, 230, 251, 320, 337, 341, 360,366, 375, 378, 393, 401, 406, 412, 422, 428, 437, 448, 463: n = A,T,C or G
actttttttttttttttttttttggngctttaaaatatatttaatttttttaacaagnggaaaanaatgtttcttaaaanacatttaattttttagtggaaattaatattaccaaaaacattntgtgcataacaatttgaataacaatttttttatcttcaanaaatgggatttttatataaaatacacatgtagcactgaatgccaaagtgatgggtntccatggtcanaattcaaaattagattcgctnttaaacctgtctggtttgtgcctgagtgaagaatgatctcgagctggggagggaggtgcattgggtaancaagtgctttttaaggngaanttccttgctggaaaaaggnttgggntactgggcnggncaccattcatactgncgggcccntggantttcanggttttttgncagggncagggatgnggtttgacatnattatcctcaaacangcaaaa

SEQ ID NO: 2975 - DNA, 570 bp, Homo sapiens
  misc_feature 343, 380, 469, 472, 504, 517, 537, 557: n = A,T,C or G
accagaaaacttacatggacatatgcagcaaatgttggggaacatgatctgttaaaggatggatgtggacagtttccatatgatgcaaacatccagatacactgggtatcatttctggatgggcgccagagagttttgcttttcaccgatgatgttgccttggtttccaaagcactgcaggcagaagaaatggaacaggctgattatgaaataaccttgtctctccacagtcttgggctttcactggttaacaatgaaagcaagcaggaagtttcctatattgggataaccagttctggtgttgttgggaggtgaaaccaaagcagaaatggaagccatttantcaaaagcagataattcttattggaacaattctatcngaaacatcaaattatcaagagaccatggctgggattaagctagatataatttttgaggtcaattttgataaagatccaatggaaatgcnctnctattcgtagccctattaaacgagactttttntcaggaattctanatggaatttaagccgtcttntccctaaaagttaagggccnggttgtccttcgg

SEQ ID NO: 2976 - DNA, 458 bp, Homo sapiens
  misc_feature 46, 79, 83, 108, 122, 136, 142, 162, 182, 192, 204, 217,241, 244, 260, 262, 268, 289, 290, 323, 324, 327, 331, 336,345, 357, 363, 366, 368, 372, 377, 385, 387, 391, 396, 403,412, 419, 427, 436, 438, 448, 450: n = A,T,C or G
acttgatttttttttttttttttttttttttttttttttagaattncaacaggatctgctggcagggtttttttgtttnattngtttgcttatttttaaattaactgntttgagctttgaanacttaaggctttanaggganaacccaattttcaattatgntggctttttataaagcttgngttatgtaanatttaaataaangtttgctaccaanatgattgccttattgaataggtcnctnttaaattcctttaaangntgatanctgccatttggggaaacaacnnaaattctcttaagggtaaacaaggcaaccctcnnccnccantaaanttctccttngggataaacaanattttngcngntaancaaanttgcaaantntttnttttnccctttnacaagttgnataaaanaaaaaggnattttttantnaatgtgtccntnatttggct

SEQ ID NO: 2977 - DNA, 570 bp, Homo sapiens
  misc_feature 342, 372, 374, 379, 396, 414, 418, 421, 424, 425, 433, 438,449, 455, 463, 471, 493, 506, 528, 554, 566: n = A,T,C or G
acagctattggaatcagatgcaaagatggtgttgtctttggggtagaaaaattagtcctttctaaactttatgaagaaggttccaacaaaagactttttaatgttgatcggcatgttggaatggcagtagcaggtttgttggcagatgctcgttctttagcagacatagcaagagaagaagcttccaacttcagatctaactttggctacaacattccactaaaacatcttgcagacagagtggccatgtatgtgcatgcatatacactctacagtgctgttagaccttttggctgcagtttcatgttaggggtcttacagtgtgaatgacggtcgcaactntacatgattgcccatcaggtgtttcatacngntattnggggctgtgccatcggnaaagccagctaagctgcnaagnacnganntagagaancttcngatgaaagaantgaccngccgtggntatcgttnaaaaagttgcaaaatatttacnttgtacctcggcngcaaccactcttagggcgaatnccacacacttgcgggcgttactaggngatcctagctcnggcc

SEQ ID NO: 2978 - DNA, 584 bp, Homo sapiens
  misc_feature 304, 342, 406, 415, 421, 429, 441, 447, 470, 495, 502, 509,513, 525, 526, 545, 546, 552, 576: n = A,T,C or G
accaactgccagcatttctgtggagggtaatcctgctcttaatcgtgtgagatggacccattctggcagagagattgctgtgggtgattctgaaggacagattgttatatacgatgtgggagagcagattgctgttccccgcaatgatgaatgggcacggtttggccgaacacttgcagaaattaatgcaaaccgagctgatgcagaggaggaagcagctacccgaatacctgcttagttcctgaaaaggggagtgtaactagtggatttgggaaaggttcttaagtagatcctgagactattngcatgcttctgtctaaatgataattaaaaggaaatttnatggattaaaccatgggtttaattgcatcaaggaaacttacaattgtccccttatatattacangcatcttgntttggntttgtggnatttttaatatnctgatnacttcacagaaagcacttttttnaattctaatacataggtgtatattnggattanttatttngagntcttttcacttnnaacactgttacagtttttnntaaacncatatgaaataaggtctcatattntaaataat

SEQ ID NO: 2979 - DNA, 687 bp, Homo sapiens
  misc_feature 258, 347, 352, 364, 375, 388, 400, 413, 430, 453, 460, 463,491, 516, 532, 551, 552, 582, 591, 599, 600, 603, 606, 607,614, 617, 619, 641, 644, 649, 680: n = A,T,C or G
acaggctgacagagaagattcccgagagtaaatcatctttccaatccagaggaacaagcatgtctctctgccaagatccatctaaactggagtgatgttagcagacccagcttagagttcttctttctttcttaagccctttgctctggaggaagttctccagcttcagctcaactcacagcttctccaagcatcaccctgggagtttcctgagggttttctcataaatgagggctgcacattgcctgttctgcttcnaagtattcaataccgctcagtattttaaatgaaggtgattctaagattttggtttgggatcaataggaaaacatatgcagccaaccaanatgcnaatgttttgaantgatatgaccnaaattttaagtanggaaagtcaccnaacctttgctttncttaagggctggcccgnatactgtagaacaagctgatctngtactgnganattttaaaaatccagtcctcggccgcgncacgctagggcgaattccaccactngcggcgtactattggntccgactcggtccaactgnnaaacatgggtatagctgttctgggtaaatngttcggtcncaattccnntanttnngccggancananggttaacctgggggcctatganggnccaanccataagtcgttggctactgccgttttcatncggaaac

SEQ ID NO: 2980 - DNA, 296 bp, Homo sapiens
  misc_feature 55, 56, 79, 92, 130, 136, 140, 152, 169, 175, 180, 217, 218,222, 235, 236, 246, 248, 250, 256, 266, 274, 289: n = A,T,C or G
acagctattggaatcagatgcaaagatggtgttgtctttggggtagaaaaattanncctttctaaactttatgaagaangttccaacaaaanactttttaatgttgatcggcatgttggaatggcagtancaggtntgtnggcaaatgctcnttctttaccaaacatancatganaagangctttcaacttcagatctaactttggctacaacattnnactnaaacatctttgcnnacaggagtgncnangtaatnttcaaacttnttacactntacagtgcatggtcnatctttt

SEQ ID NO: 2981 - DNA, 424 bp, Homo sapiens
  misc_feature 294: n = A,T,C or G
acagtttcagggcaagaaaacgaaatttgctagtgatgatgaacatgatgaacatgatgaaaatggtgcaactggacctgtgaaaagagcaagagaagaaacagacaaagaagaacctgcatccaaacaacagaaaacagaaaatggtgctggagaccagtagtttagtaaaccaattttttattcattttaaataggttttaaacgacttttgtttgcggggcttttaaaaggaaaaccgaattaggtccacttcaatgtccacctgtgagaaaggaaaaatttttttgttgnttaacttgtctttttgttatgcaaatgagatttctttgaatgtattgttctgttgtgttatttcagatgattcaaatatcaaaaggaagattcttccttaaattgcctttgtaatatgagaatgttttat

SEQ ID NO: 2982 - DNA, 622 bp, Homo sapiens
  misc_feature 532, 614: n = A,T,C or G
acgcggggtccttgatccagggccctggagacaaaggggacgtgtttgacgaagaagcagacgagtcgctcctggcgcagcgggaatggcagagtaacatgcaaagacgagtcaaagaaggttatagagatggaatagatgctggcaaagcagttactcttcaacagggcttcaatcaaggttataagaaaggtgcagaagtcattttaaactatggacgactccgaggaacattgagtgctttgctctcctggtgtcaccttcataataataattcaactttgatcaataaaataaacaatcttcttggatgcagttggccagtgtgaagagtatgtgctcaaacatctgaaatcaatcctccccgtcccatgttgtagatttattggactccattgaggatatggacctttgtcatgtagttccagctgagaaaaagattgatgaagctaaagatgaaagactctgtgaaaataatgctgatttaacaaaaactgtagcaagaccatagtgggatagattgtcatatgtngaatgttgtagaacacaggagcatgccattcagaaaacccaaccccacatggattttggaacagacaccatttattaaacantgggctat

SEQ ID NO: 2983 - DNA, 661 bp, Homo sapiens
  misc_feature 595, 621, 636, 647: n = A,T,C or G
acagccaacggtttcccttgggggctttgaaataacaccaccagtggtcttaaggttgaagtgtggttcagggccagtgcatattagtggacagcacttagtagctgtggaggaagatgcagagtcagaagatgaagaggaggagggtgtgaaactcttaagtatatctggaaagcggtctgcccctggaggtggtagcaaggttccacagaaaaaagtaaaacttgctgctgatgaagatgatgacgatgatgatgaagaggatgatgatgaagatgatgatgatgatgattttgatgatgaggaagctgaagaaaaagcgccagtgaagaaatctatacgagatactccagccaaaaatgcacaaaagtcaaatcagaatggaaaagactcaaaaccatcatcaacaccaagatcaaaaggacaagatccttcaagaaacaggaaaaaactctaaaacaccaaaaggacctagttctgtagaagacattaaagcaaaaatgcaagcaagtatagaaaaaggtggttctcttccaaagtggaagccaaattcatcaattatgtgaagaattgcttccggttgactgaccaagangctattcaagatctctggcagtggangaaagtctctttaanaaaatagtttnaacaattttgttaa

SEQ ID NO: 2984 - DNA, 611 bp, Homo sapiens
  misc_feature 305, 307, 309, 315, 317, 325, 328, 350, 369, 372, 392, 394,407, 411, 434, 449, 472, 485, 493, 506, 514, 516, 520, 530,537, 539, 543, 546, 550, 555, 559, 560, 563, 565, 567, 568,576, 584, 588, 590, 611: n = A,T,C or G
caccaactgcaaaaattatttccagagaagtatctgatggtataattgccccaggatatgaagaagaagccttgacaatactttccaaaaagaaaaatggaaactattgtgtccttcagatggaccaatcttacaaaccagatgaaaatgaagttcgaactctctttggtcttcatttaagccagaagagaaataatggtgtcgtcgacaagtcattatttagcaatgttgttaccaaaaataaagatttgccagagtctgccctccgagacctcatcgtagccaccattgctgtcaagtacttnantntgtttntntttttttntcnttactattcagacaatgctgcngggagctccttgcttatcngcntatttggggtcactttctgnangataaattcttanaaanagactgttgggacaaaaagtttntgcctttttaaacanacattgcaaactgccctcctaanaaattggctccantttccctnccaccaaccccgngtaccttngncggnaccacgcttnggggaantncacncantggnggcgntatnntgntncnnctggtccnagcttggngttntntgggtataactgttcctgtgn

SEQ ID NO: 2985 - DNA, 462 bp, Homo sapiens
  misc_feature 3, 24, 32, 33, 40, 47, 111, 137, 146, 151, 170, 175, 179,194, 195, 230, 251, 253, 271, 301, 306, 307, 320, 348, 410,422, 434, 436, 450, 456: n = A,T,C or G
gtncgcggggaggcattgaggcanccagcgcnngggcttntgctganggggcccagcggagcttgcggaaaccgcagataatgtttttttctctttgaaagatggagattnatacaactacttaaaaaatatagtcnatacagttnctaanatattgcttagcgttaagnttttnacgnaattttaatagctcnngattttaagagaaaatatgaagactttaaagagtntcttgaggaacgaaaagatananggtttctaaaacatgacngaggttgacatgaagctccttcatggagtnaaaanngtattcaaaatanaatctgggagaaaggactaccgggcccnccattaataccaataataagggcactgcttttagattaaaatgacggtgacttatacaggcntataagtttacntttaaaagttgngngtgattaaaaaaanttgaangcgatc

SEQ ID NO: 2986 - DNA, 659 bp, Homo sapiens
  misc_feature 599, 614, 619, 653, 657: n = A,T,C or G
acgcggggattgcagcctcggcgtttgtagaagaggagcatctgctccagatggaaaatgggtaaggaacaatcaaattcaattcgggaagaatatagaggtggtaataattggtaaaagtctgcagggttttttttaaccaaaggaaactggtttgagaaaattgtgaaatcagcattgaaatttgttacctactccaatcaagatttgcaaactacaaaaaaatcattctgaagctttcacctataaatatataccaagataatttcagataagaatgtccagcaaggaagtgaagactgctctaaaaagtgctagagatgcaatcagaaacaaagaatacaaagaagctttgaaacactgtaagacagtgttaaagcaagagaaaaataactataatgcctgggtttttattggcgttgctgcagctgaactagaacaacctgatcaggcccagagtgcctataaaaaactgctgaattagagccagaccaattctagcttggcaggggttagcaaacttgtatgagaaatataatcacataaatgctaaggatgacttgcctggtgttaccaaaagctcctggatctttatgaanagtgttgacaagcanaaatnggtgtgatgtctgcaagaaacttgtggatctttntttncc

SEQ ID NO: 2987 - DNA, 663 bp, Homo sapiens
  misc_feature 480, 483, 532, 573, 633, 662: n = A,T,C or G
acagaaatacgtcggtgagggggctcgaatggttcgtgaactctttgaaatggccagaacaaaaaagcctgccttatcttctttgatgaaattgatgctattggaggggctcgttttgatgatggtgctggaggtgacaatgaagtgcagagaacaatgttggaactgatcaatcagcttgatggttttgatcctcgaggcaatattaaagtgctgatggccactaacagacctgatactttggatccagcactgatgaggccagggagattggatagaaaaattgaatttagcttgcccgatctagagggtcggacccacatatttaagattcacgctcgttcaatgagtgttgaaagagatatcagatttgaactgttaacacgactgtgtccaaatagcactggtgctgagattaaaaaccgtctgccagaggctggtatgtttgccatcagaacacggcgaaaaattgctacccanaangatttcttggaagctgtaaataaggcattaagtcttatgccaaattcantgctactcctcgttcatgacatacaactgaacccttgaagntttcaagtgaaaactttaaattggaatcctaccttatataacttggtaataaccaattcntaacccaaaaaaaaaaaaaaaaaaaaaang

SEQ ID NO: 2988 - DNA, 589 bp, Homo sapiens
actgtttcctcagcagaggagaaaaactcaacctagttatgagaccaaccacacaacacaatgaaaagctgcactaactagttcagaatgttagttaagatgatgctggtgtgaataactcgttttttctagagcccttataaataaaatcccccagttagtgtttgcattatcagctagagggttaacatgtggtagaatgaggacttatgcaaggtataaatgcgcatagcattttactactatgagaacaagtgcagtcagaagaaaaccaactggactctaaattacacacaccttaatgacaagactccccaccacttgtgaatgtaaaacatttaatttaaaaatgttgatactacaatatataaaatagctattataaatgcacatagtgtattctatagctgccaggtttactttttttttttttaaaggaaactgtaagttacactgtggttaagacttgtatcttcacccttgaaaaagcccacattctatcacagtgatgtatggtcagacttaacagccccaattgttaaacacttgggatcaagtcataaccagttttattgcaaaaggaccctgt

SEQ ID NO: 2989 - DNA, 665 bp, Homo sapiens
actaccacagcctttaagtgacattgatttataacttggtcacaattcactgcatttaggaaaaccagcattcttatctggtcagtgctcgcttcttagcaacccctaattaaatttaattcatctctaaatcttagcttcaactttattcaattacatttggctgacggctgttttctaaaacccttaagtgttgaccataaatgcaaaacttccagtatctgttgggttttattagcagatgctgcttttatttaaaaaaaaccgacagtataactgtcataattatggaaggcactgcttccgataattatattctattaaaaaaacaccatttatagtgaactctgtcactgataaataaacaataaatatctcagtgccaaaaggacagaaagctctcccctaagattaacactttggccaaaatttggcagcatattattctttaaagtcttgacaactgagtctgcaactaaacacctgaaactggttctctttcaatgtgctttggaagaacaaaaataacaaagactaaatggaggcttatgggggaagggacagaggaaaagaaaatatactaaggctttggcttctggtcccctctttcataaatgcacttgaggtaacatattaaggccttattcctgcatcacagttgaact

SEQ ID NO: 2990 - DNA, 205 bp, Homo sapiens
accaagaaaaataaagaagaggctgcagaatatgctaaacttttggccaagagaatgaaggaggctaaggagaagcgccaggaacaaattgcgaagagacgcagactttcctctctgcgagcttctacttctaagtctgaatccagtcagaaataagattttttgagtaacaaataaataagatcagactctgaaaaaaaaaaaa

SEQ ID NO: 2991 - DNA, 562 bp, Homo sapiens
  misc_feature 368, 398, 410, 427, 495, 496, 515, 530, 540, 547: n = A,T,C or G
acatcaataaccggggatttttcttttttgctatactattttcacaaccacgggtgtgcttgctaggcaatataaccatcacagaagcaaacgttaggcagaatactggtaagaaaaaacaaagcaagaaaagagctaccagatatacagacaggcttggttccacattcactactgcattttcaagcgccaagtattaactgcacatttttgttcagctagaaaggagggattttttttttgtttttttcttttttttggtttgttttaaatcagtgcataaatttttcttttctcatttcagcagatggacaaacagatggactctacagctaagtggaatatcaaaggtagaggggtgattctgngagactgataggcctgactattctcaattntccccactgcantgttcacgcaacttccntgaatatagggtctccttaaactcatctgacactgacctggatgagtgcacttgggagacctggtgcnngcacaaaaagcatgatcanggctagcctaatacngggagaaatnatggatnttaaaaatacttttt

SEQ ID NO: 2992 - DNA, 663 bp, Homo sapiens
  misc_feature 26, 79, 174, 177, 196, 348, 510, 565, 567, 578, 587, 627,659: n = A,T,C or G
actttttttttttttttttttttttngaaggatttgtgaaactcttcacatcatggtgagagtttgtatgattaataanaagcagctttttcatgaaatgcttggaggtgaacgagttctcagcctgtgagatccgaccatcccattaactttgaagtttctcttgattaatanaanaaaaaaggggagggtgaanaaaaggaggaacatgctaaaaaccttatgacaatcatccaaatgtgaggaaagaacaaccgattcaccaactccactttttctattttacaactttctacatctcactcttgattttggccttcctggctgaaacagcctggcagtccctanagcccctgagaagagccctggttctccaaaagacagaggaggagaagccctgcaggatgcgctgaccacttcccagagaactgacagtccgtgctcccaaaagtttgaaccaacagcctaatgtgaaaagaaactgcactgaaaggtaaaggaggaaatggngatgaactgggcttatgtgagaatgtctatattttcattaacacagccccaaaantntttctctcaanttcagcctnaggcaaaccccgttctggttggtgggttctgcagggatcnctcccaccctgaccctttatcccaaaaccatncttt

SEQ ID NO: 2993 - DNA, 638 bp, Homo sapiens
acatcagtgaatttttaaatgctaaaaatttatgataaaagaatactgaatcaaaacatcaaagaaagaaaatagaggctcagcagcatgatttcaatatattttcctggaaaaagttttttttttttttttaaagtgtatgactttttatccaagaacaaaagctttctaaatgcaatgtttagacttgattttttttttaaactaagcccagaaaactggggctcataaaataaaggcacaatgtgggcagcaagagaaaaaaggagaaaaaatggggaaaaaattggttttaatctcacgtgtaacataggttgactggttttgtttttgttttagacaatttaaggcagaattatctccctgcaacactgcagataaatcctagtgttttagctataagtttcaagagttcagatatacagataaagcaatttaaaaaaagcttttcttattctaaggcttttgatgcattatataaatctttaaaattcctatccccacattttaaagacatacatctatactttaataaggcactcttaagatataaaacagttttaaaaacaatgcattctacattagggctaacccattcctctgccttaggggatgggagtgaattcccgcgtacctgc

SEQ ID NO: 2994 - DNA, 526 bp, Homo sapiens
acagtttaactatgtaactatgtttcaggaataaacaaaatccatgatattttagtaactcatagtgtatttatagaatgaaaagttctctatcaaaatacacttttcactgggaaaaataaataaaatagacaaatggatctacacaaagtaaacattaactttggtagatttcagtgtagttcataacaagcatatttgcccttattcccccagagctgctcaactaccaagaatttttaaaatatttttaactgagattttattatgttgacatttgtttctcattccacatcatcttcagccaagctctgagcacttacaattctctgactaattgttgggagcttagtcagaagcatctggaacactggtggtggaagagtttgctgtaagacctgcagtaactgctgtggctgccacacacagcaattgcatttgcagatggctacgcccttctcatattcaccttgagctagtaactcttcaccaagctgtatttcttcaaggaagaacttctgaacag

SEQ ID NO: 2995 - DNA, 665 bp, Homo sapiens
  misc_feature 352, 527, 575, 601, 617, 639, 642, 656: n = A,T,C or G
actacttggttcccgatatggatgatgaagaaggagaaggagaagaagatgatgatgatgatgaagaggaggaaggattagaagatattgacgaagaaggggatgaggatgaaggtgaagaagatgaagatgatgatgaaggggaggaaggagaggaggatgaaggagaagatgactaaatagaacactgatggattccaaccttccttttttttaaattttctccagtccctgggagcaagttgcagtctttttttttttttttttccctcttgtgctcagtcgccctgttcttgaggtctcttttctctactccatggttctcaatttatttggggggaaataccttgancagaatacaatgggaaaagagtctctacccctttctgttcgaagttcatttttatcccttcctgtctgaacaaaaactgtatggaatcaacaccaccgagctctgtgggaaaaaagaaaaacctgctcccttcgctctgctggaagctggagggtgctaggcccctgtgtagtantgcataaaattctagctttttcctcctttctctgtatattgggctcanagagtacctgccgggccggccgctcnaaaggccgaattccancacactgccggcccgttctatnggntccgagcctcggtnccatcttgg

SEQ ID NO: 2996 - DNA, 660 bp, Homo sapiens
  misc_feature 644, 651: n = A,T,C or G
acctttggagataatgataaaattcaacaggttgaaccgtctaacaacagactttaatgtaattgtggaagcattgagcaaatccaaggcagaactcatggaaatcagtgaagataaaactaaaatcagaaggtctccaagcaaacccctacctgaagtgactgatgagtataaaaatgatgtaaaaaacagatctgtttatattaaaggcttcccaactgatgcaactcttgatgacataaaagaatggttagaagataaaggtcaagtacgcgggggaaaacaatgaaaaggcccccaaggtagttatccttaaaaaagccacagcatacatcctgtccgtccaagcagaggagcaaaagctcatttctgaagagaacttgttgcggaaacgacgagaacagttgaaacacaaacttgaacagctacggactcttgtgcgtaaggaaaagtaaggaaaacgattccttctaacagaaatgtcctgagcaatcacctatgaacttgtttcaaatgcatgatcaaatgcacctcacaccttgctgagtcttgagactgaaagattagccatatgtaactgcctcaaattgactttgggctaaaagacttttttatgcttccatctttttttttttacagatttnatttaanaatggtttt

SEQ ID NO: 2997 - DNA, 580 bp, Homo sapiens
  misc_feature 433, 542, 547: n = A,T,C or G
acagctaacatgagataagtgaaaagttcctatggtttaaatgaactcctaagactatgatcgtttttttttttaaatctgggtattggtgttttttcttttttcctctttccttcttaactcaagacttgtagtgttgtaaacctgcctcacaaaatacatggtaataacttttctttaaaaaaaaaaaaaaaaaaagacagcctttacaccatttctagtggcacactattttggcaatgttatgcaccacttcaatttccccattgtgacccctatcacttcatttgatatccctttttgacccacccatctccttcatatatgggcatgtccatagattgacaaagaaagtttacacttttgaataaagatgcaaagtatgcaaaaacattaatactgatgcgaaaaaataaaaaataaaagagaacanggcagaggaagaaggtgtttaagctctcctcgacctgttggaatggtggttaacagaatgatttgagatgggatctgtggggaggggagaaaaaaaaaaaacaacaaanttggngcttaaaaaaaagtaaaataaaaaaaagaaggt

SEQ ID NO: 2998 - DNA, 581 bp, Homo sapiens
  misc_feature 51, 111, 115, 272: n = A,T,C or G
acttttttttttttttttttttttttggaacagacgataactttattgganatttacttggctacaattattacaaaaaaaacaactaaaggtaattgtgatccataaggngcanactgcaaatttctgcagcatgattactgtatgaatgaatgacatcatgttccttaaaaaacagctgcagcatgtgatggtaaatattttattgtcaatcaaataatatgcattagttttacttgattttagtaattttccttcactatttacagcanaaaagccagaaatttacttcctgttcacctttgcatttttgctatgtaacctgctgctgcagtgaattcttagtgcatctataaaatttaaattgtctgtggttgatgtccaaataaaaatggactagaaaaaaagaagtaatgattaaaatatatttacaagttagttgtgaaaaatcattttcactgctagtggaaaatcaatggtctcaatgcaaatttcctagatattgctattggcgtctccaacaactttaaaaatcattttaatagtcttggtcttaaacatatctttaaaacttttcatgt

SEQ ID NO: 2999 - DNA, 625 bp, Homo sapiens
  misc_feature 31, 37, 499, 607: n = A,T,C or G
actttttttttttttttttttttttgggaanaatcanaatttatttcactatgtgaacattaagaatttacctacatagttgaaaatattcacaaaggacttgatcattcacactcatacacagagaaagtctgctgaataaaaaaatgctcctttacccattcgacctcctctcaggggctgcagtgggtttgccaattccactgtggggcttcagtcttcatgaatgttgaatagtttggctacttcattgagatcttcatgctgctcaccgtccttaatgatcttccctgctattggcattcggttaaagatgttccatagcacaatccccacgaccactttgtccctgaggtagaagatgacacctttgccgtatcctccccctggacgggagcctgtggaactgccggggtgctgggaggaatagtaatttctgaggcctcggactcttgctcactctctgatcggataccagttcctgactgctctgtggcanatttggggttgtcttgtgcagttgcttttgcaaaaacaccactgtgggcaaactactgtccacaaagaccaatacttcatagccaacatcggggcccaaatactccanacattgactgatgccagt

SEQ ID NO: 3000 - DNA, 498 bp, Homo sapiens
  misc_feature 30, 38, 41, 43, 45, 53, 55, 56, 57, 60, 62, 63, 65, 66, 67,68, 70, 71, 78, 91, 153, 239, 321: n = A,T,C or G
acttttttttttttttttttttttttttanatgctaanttnantntttatttnannnttnannannnncnnacaaacntatacaaagggcntttcatttttaatcactcaaaaatgaaaaaggtttggacaatgtcaaattccctcaccatantgctatagttatacattaaatataattactatctatacatatgcaaaaatataaagttctatttcatacaataaaaccctttatanaaaccattttaaaattaagcagaacttctcaacattaatatgtgaggtctaagtccttctaaaggtttctttaaaggttttnaaacaaaatgctaaacctaaaaacattgtcctgtcagttcccaaattaaatctacttagaacaaaaacaaaaatttatagctgggtcacatactacttaaataatattgttcaggcatctctaaaatcctccatgttttcaagtatggaaatagaactcaaatattccacaatacag

SEQ ID NO: 3001 - DNA, 529 bp, Homo sapiens
actacagcagtcaaagagatctccactagagatcagaaagaagcaccactattttcttctatgacgtgtatgtgttggtcatgagcatgctagtatgaataaggcaatgtgttaagcactggcatacaaatgcagctaaaggtgctgaaggaaggcagtggggtggtgcaggcacacagcagggagctcttccccgtgacacgttagtcatcttctccacagagcagcagaagagctttcttatagtccccagatgtatctcccttaatcatggaataaagagaggtggcaaaattcttcctaaactccttcctgatgttaaacagatcaatctcactcctggaaaccatgactctgatgagggtatgatcatctgtcccagctcccttcatagcataatagagggtctctgcaaggtaggcaggtatacttcgaatagatttcacaacagcaaggagtagttgctctaaattgccagaagtctcgcggtcaatggtttcctcaatttgaaatcctgatatagtcatgt

SEQ ID NO: 3002 - DNA, 621 bp, Homo sapiens
actggcattctcccaggacatcccccagggtgtcaaaatttagccaaagcaaacttcaaatgaacacaaagtccttattttctcaaagaaaacaaaacaaaacagaacaaaaaaccccccagatttatttagcttaaacatttcccctgatctaaagagaaagatggcaaaagatacctagcatatatgcacaagcacccactccaatgaactcagataacctgaaagaaaaaaggacaaagttctgttcaacttagaaaattatcttcgcttttgaaagatgtttccacgtcccattccacgtcctcttcctcttgcggccacttgggccttgagaatggcagcttttcctcggcagcccctgagccttggtttttatttttcatgctctttaacatgggtgcgttcttcagcatgtcaggcaaaatcagaaagcggattttgctgccacggatgtatacctgctccagctgtgccactcggccatctctgtatgtgactgtgatgttggacatctggcagttcatgttgtcctctgcttcaatgagcttccccgatatacctcaccggtgttcgtctcacatgtcacaatgtggccctcggcctcatgcagtacctgcc

SEQ ID NO: 3003 - DNA, 390 bp, Homo sapiens
  misc_feature 27, 87, 240, 361: n = A,T,C or G
acttttttttttttttttttttttttnggttttatagatttattttcaaagagtaaaacacatacaatttaaatacaagtccatcanaatcactctgtcagagtcagcaagaatgccaaaatgtgtcctcactgccagacattcgtcactatcatctgagtcctctctcagcaaagccaaagggtctgatactttattcatatacatccttcttatctgcaatgtaatccacaatttctngtggacacattaacttttcagcatctatatcaggaatttcaaacccaaattcgcttccatggccatgataatctccacttggtccaaactgtctaagcccaggtctttcataaaatgaganttactgaaagctttctgggtcaatcttgt

SEQ ID NO: 3004 - DNA, 590 bp, Homo sapiens
  misc_feature 544, 578: n = A,T,C or G
actgaatggaaagatgagcattcctagttctacacttcttttttccccctcatgtgtaaaatgaaaagaaaactaaatttgccctaataccaaggcgctacgtttattgcctcgtcttattcactgacctttgtaatgatacacagtgaattctttttgacaaagagaagtgcagtgtagtatgcagagctgctgttttaatgcctatgcatttactctttcctgatttaggcagaggtggcattttctttattgcatttctctatttttttaatgtacccttccgcttacctatgcccatgtgcctgcccttccggcgggccaaggtgtttttccggcatcgagcccgggaatggaccgtcacaggcttgcggatgatcagcccatctttgatgagcttccggatctgctgacgggagttggcattggcgatttcattggtctcattggggtctaaccagaccttcttcttgccacagcggaggacactagaggcgagcctcttctgaagcctgagcatactcatggctgcggccgcagcaancgaaaggaaagccccgcgtacctgccccggcggncgtcgaaaggcg

SEQ ID NO: 3005 - DNA, 662 bp, Homo sapiens
  misc_feature 652: n = A,T,C or G
acaatcaataagtcttaaatctctcttccatggatttcccccatctccccacttagcagtaaaaggcatttttaggtttatataaacacattctttacaactgccttcttaacagaaaattactgtagtatataaatagcactgagcatttagtaaataagttacaggccaataagttcaattgtgcagttgtgaaatctaatgtcaaagagtttttgaaaccttaagactgggtgatctgcaatgtttccaacatgtcttcgacagccttaagagaatatttggtttccttcttacttcgacctgcaaactgataagctctgtttatttgactagctgcccaactagcatatttcatgttgtcctttttcgtttttgcacttgcttttggattagaagcaatatgacttgccgacatataaagtccaaacaaagctctcatatttctgttgttcagtttcaatgcctgtgcaaaatactttcttgaaagttcgaggttttcaagtccaccttgggtatacttaacttcagcatactgctgacagtataagtgggttgtgtggattagtcatcattagttcctctaaacaaaaggctgctttgcataagcatgttcattggatgtaaagttctgcagttcatgccaggcttntttggctcca

SEQ ID NO: 3006 - DNA, 604 bp, Homo sapiens
  misc_feature 532, 594: n = A,T,C or G
acagctcatcagcgtggccaggatggcatcagtggcaaacacattcccctgagtttttgccagcttgcggatgacagggtcgtctgtggtggtgacagtgtggaagatgcgcttgatgctccgcagtggcttctcactcctcgtggtgatgcggtcaaaggctttgtcgtagtattctagggccccacaacactcaatgtcctgtggctctgatacttccaagtagcgcatcttcatcaactgaggaaaatccatttcctctttcacttcccaatcactacgaacttcaactgaagagtctcggggtttctgtgatttctgatcccatttctgcctaaccccaaattgtttctggaactttttctgcagtcgaatgcgttctctctctttctgtttggcactcttaggcaggatctgcaggttgaactgcaacatgttccgacgatctttgtctcttgcggaggttcctctgggcaaatctcattcgattccgctggtaggccgtcttctgtgtgcgcgctgtatccaccanctggaagctactttcatcctcctcatggaaataagcatattgacttccaccaccaaactganaggagtacct

SEQ ID NO: 3007 - DNA, 575 bp, Homo sapiens
  misc_feature 451, 461, 510, 523, 558, 564, 568: n = A,T,C or G
acgcggggcgctaccctcccgccgcccgcggtcctccgtcggttctctcgttagtccacggtctggtcttcagctacccgccttcgtctccgagtttgcgactcgcggaccggcgtccccggcgcgaagaggctggactcggattcgttgcctgagtaatggctgccatccggaagaaactggtgattgttggtgatggagcctgtggaaagacatgcttgctcatagtcttcagcaaggaccagttcccagaggtgtatgtgcccacagtgtttgagaactatgtggcagatatcgaggtggatggaaagcaggtagagttggctttgtgggacacagctgggcaggaagattatgatcgcctgaggcccctctcctacccagataccgatgttatactgatgtgttttccatcgacagccctgatagtttataaaacatcccagaaaantggaccccanaaagtcaagcattttctgtccaaacgtgcccatcatcctgtttgggaanaagaaggatcttnggaatgatgagcacacaaggcgggagctagccaanatgaancagnagccggt

SEQ ID NO: 3008 - DNA, 659 bp, Homo sapiens
  misc_feature 585: n = A,T,C or G
acatggcaattagaagttgtcatggcaaaagaaaaccacagctggcctgccacagccaacacaagaaccagaaaatggtagatgaaatgaaggaataaaggtggggtttattccttattataaaagaaaaaaataattcttcagcagtcttaacaaagacatcaagatacaaaattacaagtgttttgactccagccctgtccccatctcctccaagagcagaggtaggagacagttgaagcaaacaagcaattctgtaaaaattacctagaaaccctacaaatttgattaaaatctaaacttctataattttgctttttaaaaaatttaatatcaaaaggcctgctttagtgacatgctattcctaccagaaaataaccccaataccccctctgtcagtaacatgctcaagttgaccagccaactcttatctctaaacctatgtggacaagtgtgtcttttaaaccaaagccacggagatcaagtgactgctagtaacgtgttgtctgttaactaatccagtgcccccttctccagagggtgggcagggcagaaacccaaaagggcttgagggcctaatcccanatcaccatctaagaaccacttcccttgctctctactcaaaatgagatgctttatttctaatccgctatttgctt

SEQ ID NO: 3009 - DNA, 662 bp, Homo sapiens
  misc_feature 629: n = A,T,C or G
acgcgggagtccagtcccaagatggcggccaccatgaagaaggcggctgcagaagatgtcaatgttactttcgaagatcaacaaaagataaacaaatttgcacggaatacaagtagaatcacagagctgaaggaagaaatagaagtaaaaaagaaacaactccaaaacctagaagatgcttgtgatgacatcatgcttgcagatgatgattgcttaatgataccttatcaaattggtgatgtcttcattagccattctcaagaagaaacgcaagaaatgttagaagaagcaaagaaaaatttgcaagaagaaattgacgccttagaatccagagtggaatcaattcagcgagtgttagcagatttgaaagttcagttgtatgcaaaattcgggagcaacataaaccttgaagctgatgaaagttaaacattttataatactttttttatttgtttaataaacttgaatattgtttaaaatgataattttccttcttcaaatgacatggaaagcaaaactttcttttttaaaaattttcatttatttaatggaaacttgcccattttcacatgtctgcttatttattttatatttttaaaagaagacagtattcacctatgtatttttgnataaccgattatatcaaagtctaggggcttcat

SEQ ID NO: 3010 - DNA, 665 bp, Homo sapiens
acatggagtgttcagcaaagaccaaagatggagtgagagaggtttttgaaatggctacgagagctgctctgcaagctagacgtgggaagaaaaaatctgggtgccttgtcttgtgaaaccttgctgcaagcacagcccttatgcggttaattttgaagtgctgtttattaatcttagtgtatgattactggcctttttcatttatctataatttacctaagattacaaatcagaagtcatcttgctaccagtatttagaagccaactatgattattaacgatgtccaacccgtctggcccaccagggtccttttgacactgctctaacagccctcctctgcactcccacctgacacaccaggcgctaattcaaggaatttcttaacttcttgcttctttctagaaagagaaacagttggtaacttttgtgaattaggctgtaactactttataactaacatgtcctgcctattatctgtcagctgcaaggtaccccagatcaccactcccaagagatgcttccaggtagaaatggttttttgcttggacgaataaaattgggaaacactgcaggctgtattcctgcccttcttaagaaccacaatgcacatttgcatatcaaaggctctgagaagttctgctttaaagatctattggcttttgtt

SEQ ID NO: 3011 - DNA, 583 bp, Homo sapiens
acgcgggtgaacaaactgctgagccctgtcgtcccccagatcagtgccccgcaatccaacaaggagaggctgaagaacatggcactctccattgccgaacggtatagggctcaaggaataagcgcaaataaatttgtggactccacgttctatcttcttttggacttgatcaccttttttgacgagtatcatagtggtcatattgatagagcttttgatatcattgagcgcttgaagctggtgcccctgaatcaggaaagtgtggaagagagagtggctgctttcagaaatttcagtgatgaaatcaggcacaacctctcagaagtgcttcttgccaccatgaacatcttgttcacacagtttaagaggctcaaggggacaagtccatcctcgtcatccaggccccagcgagtcatcgaggaccgcgactctcaactccgaagtcaagcccgcactctgattacctttgctggaatgataccataccgaacgtctggggacaccaatgcgaggctggtgcagatggaggtcctcatgaattaagtgccatgctttgtgggagtctgggtcggccactgtcagt

SEQ ID NO: 3012 - DNA, 662 bp, Homo sapiens
  misc_feature 491, 602, 624, 627, 634, 646, 650, 652, 653, 657: n = A,T,C or G
accatttatttgtctgccgcttttaaaaaatacccattggctatgccacttgaaaacaatttgagaagtttttttgaagtttttctcactaaaatatggggcaattgttagccttacatgttgtgtagacttactttaagtttgcacccttgaaatgtgtcatatcaatttctggattcataatagcaagattagcaaaggataaatgccgaaggtcacttcattctggacacagttggatcaatactgattaagtagaaaatccaagctttgcttgagaacttttgtaacgtggagagtaaaaagtatcggttttattctttgctgatgtcctttctgcttgaaataacagtcaccatacagctaaaggagaggagtttctttccttctaagtaggcagaaatggtatcattatgttgccgctctccaatctcccagagctcgctctctagagaatcaccttctttcgcttttttttttttttgaggtanaagtctcactatgttgcccagactagccttgaactcttgggctcaagtgattctccctctcacctcccgagtagctggaacgaactatagttgcccactgcacttggcaanaatcacctttttataaagcgtnagnctgcttncacaagaagcancatnanncatnggttt

SEQ ID NO: 3013 - DNA, 623 bp, Homo sapiens
  misc_feature 509, 607, 612: n = A,T,C or G
accacagtatcttcctccttctgcggtctctctgtttttgtcttgcttatgcttcttcaactctgcgcctggataactttcatgttaatccattctgagtcatttgttcttcttggcctgtcaagacacccaaaaaaggccaagctgttcacccagggagccatactggcacattccttctgcgcttgatactatctgttaattcccttcagccagggaccagtcactttaggctattagcctgcaggtcatttagaagatttaagtaaatatctgatttgaggaacctgggataagagtccttttccataagagtatatatgactttttgtgcttcatcaaaacaagtgggggttggtgctttaatcttcttggctgtagattctcgagtgcggaagtcaatattgatttgtttagcagcatctgaatgcacaaatgctttatatatctcttctgctttacagggcaaaagatcaagactctgttttcttatagtcttcacaagccanccagaactcaatattctcctcactgaattcagactttaggaacttccaaagacattttgaccaagtttggttggcaagaaagttttccagagattganaaccnttgcattactt

SEQ ID NO: 3014 - DNA, 662 bp, Homo sapiens
acgcggggcttgtccagtgaaacaccctcggctgggaagtcagttcgttctctcctctcctctcttcttgtttgaacatggtgcggactaaagcagacagtgttccaggcacttacagaaaagtggtggctgctcgagcccccagaaaggtgcttggttcttccacctctgccactaattcgacatcagtttcatcgaggaaagctgaaaataaatatgcaggagggaaccccgtttgcgtgcgcccaactcccaagtggcaaaaaggaattggagaattctttaggttgtcccctaaagattctgaaaaagagaatcagattcctgaagaggcaggaagcagtggcttaggaaaagcaaagagaaaagcatgtcctttgcaacctgatcacacaaatgatgaaaaagaatagaactttctcattcatctttgaataacgtctccttgtttaccctggtattctagaatgtaaatttacataaatgtgtttgttccaattagctttgttgaacaggcatttaattaaaaaatttaggtttaaatttagatgttcaaaagtagttgtgaaatttgagaatttgtaagactaattatggtaacttagcttaatattcaatataatgcattggttggtttcttttaccaaattaagtgtctagtt

SEQ ID NO: 3015 - DNA, 663 bp, Homo sapiens
acaggttgtgtctgccagttcagtccacagctcagagtatcaccttgtcctcattccatggtataagctgttgcgggggggcaggtctgcgggtcgtggattcactggactggatgggacatgatccagaactccgctccgtttggcttcccaaggatcccaccaactcattctaatcagtgatcactgaggaaatgcattgtattcctattcactatttcaaagatcaggcctacctcattggcatattaagaaagttttctcaagtatatttagtgtttatcattttactatagttcttcaaatgtctgacattcatcttttccctacctctaaattcctttctttttcacattatctttcttgattgctttttaatagaaaaacaaacaaagacatggatttactgtgcatattagcagatccatactggaaaatgcatggaggtttcatatacaccacttacagtaagtaataactcagagtataaagtcgaaaagaaagaatctgaaatattaagacttgttctgaaataagcttacctaggatgataccactttcgcttaatcaagaatttcccctttccaactatttaacaagtggcaaatataaaaaatctggtagttaaaatacacagcaatcacttcatattactgcctccct

SEQ ID NO: 3016 - DNA, 633 bp, Homo sapiens
  misc_feature 501, 569, 599, 619, 625, 629: n = A,T,C or G
acagatggggtcttgctatgttgcccaagctggtcttaaactcctggcctcaagcaatccttctgccttggccccccaaagtgctgggattgtgggcatgagctgctgtgcccagcctccatgttttaatatcaactctcactcctgaattcagttgctttgcccaagataggagttctctgatgcagaaattattgggctcttttagggtaagaagtttgtgtctttgtctggccacatcttgactaggtattgtctactctgaagacctttaatggcttccctctttcatctcctgagtatgtaacttgcaatgggcagctatccagtgacttgttctgagtaagtgtgttcattaatgtttatttagctctgaagcaagagtgatatactccaggacttagaatagtgcttaaagtgctgcagccaaagacagagcggaactatgaaaagtgggctttgagatggcaggagagcttgtcattgagcctggcaatttancaaactgatgctgaggatgattgaggtgggtctacctcatctctgaaaatctggaaggaatggaggantctcacatgtgtttctgacacaagatccgnggtttgtacctgcccgggcnggccgntaanggcc

SEQ ID NO: 3017 - DNA, 565 bp, Homo sapiens
actcaaaggtgatatttgcttttttcaatgcttcaggggaaaaatccttttctttacaaacttccatcagtttaggagtcagtctgtatgcctttagtgagagagatccttgggcagtttttatgggatcataaatgagaacgacagattcttcaatggcatgctggtaactaaactgagagtccaggagtgcccgggtaacgaatgagccatagtatgtggactgataccagcccacgtgaagatgatcaatgtttacatggcgaaggctccgcatcatttccatctgatattggacttcatcaaagtcagcatcatcctctgtgtgctgagggaaaggaaagcagttggtaatttcaagccgatcttctacaaccagacccaaaagcactccttgaacaacttcagttccttgtccttcttcttgataatgtttgattatctttaataccacaaggccatctatctgcacttgcttcacggctgaatctcccgagccgcctttgcctttgcctttccctgctgcgccggcggtggagctggaagaagtggcagtagagccggt

SEQ ID NO: 3018 - DNA, 663 bp, Homo sapiens
  misc_feature 448, 597, 600, 659: n = A,T,C or G
actactgctgcaagaaggacctgtgtaactttaacgaacagcttgaaaatggtgggacatccttatcagagaaaacagttcttctgctggtgactccatttctggcagcagcctggagccttcatccctaagtcaacaccaggagagcttctcccaaactccccgttcctgcgtagtccgctttctcttgctgccacattctaaaggcttgatattttccaaatggatcctgttgggaaagaataaaattagcttgagcaacctggctaagatagaggggctctgggagactttgaagaccagtcctgtttgcagggaagccccacttgaaggaagaagtctaagagtgaagtaggtgtgacttgaactagattgcatgcttcctcctttgctcttgggaagaccagctttgcagtgacagcttgagtgggttctctgcagccctcanattatttttcctctggctccttggatgtaagtcagttagcatcattagtacctcaccatccacagtgaccatgagggtggcaatgtaaagtgcccataccagccatttggtgggcagtccctttcccgacccttacctgtcctttgcancanccatgaacgggcttggcagggcctctccatggactgcaaatcaaggaagtgcttgtctngcta

SEQ ID NO: 3019 - DNA, 586 bp, Homo sapiens
  misc_feature 553: n = A,T,C or G
acgcggactgtggacaggaaaagaggaacacttttaatatggcagatcatgtttttatttccatggagcagctcattttttcctgaatctcttctgttataaaggagagaaatgcatggactttttggtcttggtccttctgtgtgtgggcgtgacactagtaggtaagcaggtggtgctgatacttttaagggaattttctcaagatgcaggtgttacttgtccagagaattttatctgaaaaggatttccagagaaggaggagaaagaggaataatggcttcttttcagctaaacatgtctcatatcaagagctgtgtccactctgcctcctggagtgccatgtggtcattttagtatgtgagtcaaagcagaataatagggaaacattaaatctctcctttacagtttaagaggttgaaagcaaaaggaaagtctgaaaaaagaacaggggaggtttgggttggtaatgtttttggtagaactggttatccttgttcgtatttagtaggtgccttttaagtcttacgagagtagcacccacagatggccnagttcaaatatcaaagaatcaagaatgcaaagt

SEQ ID NO: 3020 - DNA, 661 bp, Homo sapiens
  misc_feature 585, 636: n = A,T,C or G
acagagatttaaatgaaatcttcgaaagaataaatttgcttttcagtccactgtattttcaaaattgattatcaccaagcttggatgaaagctgtgaaccacaaaccatttgtttatttaatagaaaaaagaatgtgtagattattagcaaagtaatgccttaaaatgtatcttcacacagttgaaattttagtataaacttgtatatcaagttgctttccattatttattctactttaaaaatatatacaactatgatgttcaaatatgtattctgagccattatgttcaaacataaatatctgggaaattcaaactgctgcaacaagttaggaaaggattaaggaaaaatgatgagctacaaattatgtagttggaggaagaaaaaaatgttacttagcatttatgtctggataggtatgtattttctaatttacatacacatatccagttgagtatagacaaccatcaaaatgtaaccagttacacagagactagactaagccaacactattttctataacaggtaacagtagtgattcaaaaattttaatatctcaatagtttcaccaaaaaattatttgnggtaatatgctaatattctgaagtttgagaggcgcagattaaatgagtgcnctatctatgccaaactcagcaagtc

SEQ ID NO: 3021 - DNA, 661 bp, Homo sapiens
  misc_feature 616, 640, 648, 660: n = A,T,C or G
accttttggtgccagcgtttcaaggagccctcaccatgaaacaagtcaaccccagcaagcgtctagatcatttgcagcgggctcgagaacactttataaactacttaactcagtgccattgctatcatgtggcagagtttgagctgcccaaaaccatgaacaactctgctgaaaatcacactgccaattcctccatggcttatcctagtctcgttgctatggcatctcaaagacaggctaaaatacagagatacaagcagaagaaggagttggagcataggttgtctgcaatgaaatctgctgtggaaagtggtcaagcagatgatgagcgtgttcgtgaatattatcttcttcaccttcagaggtggattgatatcagcttagaagagattgagaacattgaccaggaaataaagatcctgagagaaagagactcttcaagagaggcatcaacttctaactcatctcgccaggagaggcctccagtgaaacccttcattctcactcggaacatggctcaagccaaagtatttggagctggttatccaagtctgccactatgacggtgaagtgactggtatgagcacatcggaaatatggagcattaccggatcanggaatagccaaggcagcaccagangaattcanaaaacagctcanc

SEQ ID NO: 3022 - DNA, 364 bp, Homo sapiens
actgtttattaaccaaccagcttagaaaaataatcatggtagacaccttagttcattcttctaataagcctgttgatctggtcctccctgttgccagcatctccaccttctacaaaatgggtggtctttttcttcattccacctcgtggagaagacaatttgaagggccacaggaagttatttgcctctttgaagcgttttccaacagtatagatctcatgaatcaaatcctccatgcagatgatgccgtatttaccaagagatcgagcaatcaaagcgttatctgtcaaagcaattcgcttcttattgattttgccataaccacgcttgtagattagttcatttactgacttcagattggggt

SEQ ID NO: 3023 - DNA, 642 bp, Homo sapiens
acttgttttgcttgttggtgatgtttgcttatttaatacattccgtcagggacagaaattacatgcttttttttctttctaggaagtgtgttgagttccccccttccccgacatttttttcttttttgggtggtggtgatggtagtggttatgtctgtttaaatgaagttgcttttacagcaccaaagacttaatcatccatttcctatataaaggtagctttttgcatagacctcaagtatattgtaagtgtaaaggtggaatttaaggaaaggtattaaattgaggctgtgttttagcttacaggcaagtaataaattgtatcatttatcttgaatgtatcatagataagctgctatataacgattgccacttcagatagctgtgaaattaggtgattaactagttgttatttagccttctaatttctgtataagtctaattacatgaatagaaattggggttttgattttttactttgcttttctgtttggagtgtcattgtaactactgtattgtaaatggtggaaaataattgcatttgttactttggggtgtgttatttgcatcagtatttaatctctattaatggttggggctcatcactgcatattaaaaaaacttggatgtatcagtgtaaaa

SEQ ID NO: 3024 - DNA, 661 bp, Homo sapiens
  misc_feature 608, 630, 641, 643, 648, 653: n = A,T,C or G
acccagaacatcttcccctggaagtgttagaagctgggattaaatctggacgctatatccagggaattctgaatgtcaacaaacacagagcccaaatagaagcttttgttcgacttcaaggagccagcagtaaagattcagatttagtcagtgacatcctaatccacgggatgaaggctcgaaaccgctcaattcatggagatgtggtagttgtggagctgcttcctaaaaatgaatggaaaggaagaaccgtagccctgtgtgagaatgactgtgacgacaaggcttcgggcgagtccccaagtgagcccatgcctacaggtcgagtggtgggcatacttcagaagaactggcgggattatgtggtgacatttccgtccaaagaagaggtccaatctcagggcaaaaatgctcagaaaatcctggttacaccttgggattacagaattcccaaaattcgaattagcactcagcaagcagaaaccctccaggacttcagggtggtccgtgcgcatcgattcctgggagtcaacatctgtgtatccaaatggacattttgtgcgtgttttaggaagaatcggagatctggaaggggaaattgcaccatnctggtggaaaacagtatttcanttattcctttntnaaaanctaanatgtgtga

SEQ ID NO: 3025 - DNA, 662 bp, Homo sapiens
  misc_feature 421: n = A,T,C or G
acaactctttgaagatcccactgttgacaaggaggttgagatcaggaaaaaagtgctaaagatatacaataaaagggaagaagattttcctagtctaagagaatacaatgatttcttggaagaagtggaagaaattgttttcaacttgaccaacaatgtggatttggacaacaccaaaaagaaaatggagatataccaaaaggaaaacaaagatgttattcagaaaaataaattaaagctgactcgagaacaggaagaactggaagaagctttagaagtggaacgacaggaaaatgaacaaagaagattatttatacaaaaagaagaacaactgcagcagattctaaaaaggaagaataagcaggcttttttagatgagctggagagttctgatctccctgttgctctgcttttggctcancataaagatagatctacccaattagaaatgcacttgagaaacccaaacctgtaaaaccagtgacgttttccacaggcatcaaaatgggtcaacatatttcactggcacctattcacaagcttgaagaagctctgtatgaataccagccactgcagatagagacatatggacccatgttcctgagcttgagatgctagaaaacttgggtatttaaaccatgtcagagctgcctcccacagga

SEQ ID NO: 3026 - DNA, 561 bp, Homo sapiens
  misc_feature 468, 491: n = A,T,C or G
accaatggctctggagcttggaggaagactaaaggaatgtgtagtgattctgagtaagatgtagacctacgcagcagagctatgggggagaagattaacaaagtcctttcttccaatatcaggatagtcatgagttgcagtcccatccaaaaggtcattagggctaaaaggccctctgtgtctctgaactatgagattcttgctccctccgggggagccaaggagcttgcaactgggagtttgcagtgaatgagcaccatgacacagtcatttctgatccctctatccagctgttgtgaaaagatgaagcaaaggaggcaagaaaatgcttaatttagcagacaagagaatggacagtgtgatccttgtttgtgctaccattgggtgatgcaccacttttcagctccatgatgctacttgtttcccttcatatcctgtttccatttatgcccttcagttatggtctanaatcaaacaattctaaacctcantgtcttatgaagctgacacttcaaacctgcagaagcaggttgcctttgaggtatttagtcacaccaaagt

SEQ ID NO: 3027 - DNA, 663 bp, Homo sapiens
  misc_feature 568, 570, 575, 612, 622: n = A,T,C or G
accggagcctaggcgacctggagaaggatgtcatgcttctctgtcacaacgctcagacgttcaacctggagggatcccagatctatgaagactccatcgtcttacagtcagtgtttaagagtgcccggcagaaaattgccaaagaggaagagagtgaggatgaaagcaatgaagaggaggaagaggaagatgaagaagagtcagagtccgaggcaaaatcagtcaaggtgaaaattaagctcaataaaaaagatgacaaaggccgggacaaagggaaaggcaagaaaaggccaaatcgaggaaaagccaaacctgtagtgagcgattttgacagcgatgaggagcaggatgaacgtgaacagtcagaaggaagtgggacggatgatgagtgatcagtatggacctttttccttggtagaactgaattccttcctcccctgtctcatttctacccagtgagttcatttgtcatataggcactgggttgtttctatatcatcatcgtctataaactagctttaggatagtgcccagacaaacatatgatatcatggtgtaaaaaaccccncnttacncaaatattttgtacatattgtgaccaaatgggccttnaaagattcanattgaacaaacaaaaagcttttgatggaaaatatgtggggt

SEQ ID NO: 3028 - DNA, 633 bp, Homo sapiens
  misc_feature 579, 589, 598, 601, 612: n = A,T,C or G
acgcggggggaactgctttcttgggaagatggcggctgtgtcggtgtatgctccaccagttggaggcttctcttttgataactgccgcaggaatgccgtcttggaagccgattttgcaaagaggggatacaagcttccaaaggtccggaaaactggcacgaccatcgctggggtggtctataaggatggcatagttcttggagcagatacaagagcaactgaagggatggttgttgctgacaagaactgttcaaaaatacacttcatatctcctaatatttattgttgtggtgctgggacagctgcagacacagacatgacaacccagctcatttcttccaacctggagctccactccctctccactggccgtcttcccagagttgtgacagccaatcggatgccgaagcagatgcttttcaggtatcaaggttacattggtgcagccctagttttagggggagtagatgttactggacctcacctctacagcatctatcctcatggatcaactgataagttgcttatgtcaccatgggttctggctccttggcagcaatggctgtatttgaagataanttaaggccanacattggangangaggaaccaanaatctggtgagcgaaaccatc

SEQ ID NO: 3029 - DNA, 663 bp, Homo sapiens
  misc_feature 576, 591, 652: n = A,T,C or G
acttgattggtcatttgaaaacactgcaacagtgaacttttgcatctcaagaaaacattgaaaaattctatgaattgttgtagccggtgaattgagtcgtattctgtcacataatattttgaagaaaacttggctgtcgaaacatttttctctctgactgctgcttgaatgttcttggaggctgtttcttatgtatgggttttttttaatgtgatcccttcatttgaatattaatggctttttccattaaagaataaaatattttggacaatgccgataaatgtatgaagttagtatccacatcataaattcagagtgatgtttagcagtaaatcaatattttgaagtgatacacagatgtctttcctccccacaaacttttttaaacaaaaaacaagacctcttttctttagatggtgccacctatgcccaccacaacagagattttacatggaaaccggctcagtgagaactgatttcctgcccaatatttgctttgggctgtctctagtgctaattattaaggaatctagctggttatacagttcaaggctttctatgttgttaatgaacctnaaaatagccgttaanacatgaaatacagcagcaggtaccaatgcgaacaggtagtcgcatttatgtaaaacttcanaaaatgaaagt

SEQ ID NO: 3030 - DNA, 664 bp, Homo sapiens
  misc_feature 618, 663: n = A,T,C or G
accattctgaacgatgttaaagcaagtgtggtttatttatgacatgaaccatgtaacttgaaatatgaacttacaaggaggggcactcattaggtaacaagttcttacaccaaacttccttgatgaaataagccaaaataatcctaaaattcattagaagaacttgataaaagactcaaataaatgttagaaagagcccataattttaggactcctataaaattcttccttgtttgttaatgctattaaaactcagattcaagggaaataccagcttccacttgagtcactttgaaatagttaattcaacagcaccatgttagaaatatattggcagccaggactctgaactctgcagaaacatttgtttcacccagacttcaaactctagccctgactatgatgcccctgtgtgcatttacaataaagactccaacggagggagcctgttggtgttaaattgtttacatttctttatacaaataatgtgctttcagtgccttagttacagctccctttctgtttcttgtccaaggattctgtagtatgtagtgtgtttcttaagtaaagctctttttgctactgaaagggaaatggctctaacactggtcactgtancaggtaaacactactctaacgtggagaaatgagcttcatgctgang

SEQ ID NO: 3031 - DNA, 662 bp, Homo sapiens
  misc_feature 567: n = A,T,C or G
acagagagcatagaataaaagcaaagatgtgaatgtctctaccagacagaggatgacctagtcagcagtttggagggaaatcatctgagggtgctggctcagcacgttcccagatgaaggtctgtcatctaaaggagagaggcaggctcagctcctgaaggtcgcagagcctcagtagtcctcctgagtgtgtctagctgactgttatcgagggacacgtaaaagcagcatcacaaaactggactgcaagccatcaccacggcaccaagtctatgcttgggctcttccctgctctgctcttggagtcatgaccaacactctaaaagccaacaaagtcccttcaacatgagtaaaggaaacagtttcaagcactgacagtttttacgagtgactattcaaagaatgcacaggagccagagagccagactccacagagaggccaaaggctctgaacacacgagtcaatgttcatggaggtatagacaaaggattctacctcacagagtttgaagacaacctgcctttcacccacaactactgctttctatgtcaccctagaaagatcangtctgcgccctgccacgagcctacttctgaagccatctggaaaaatgaaaccacttggataaatggaaaagtatgcctgaatttttaaatctggt

SEQ ID NO: 3032 - DNA, 556 bp, Homo sapiens
  misc_feature 445, 471, 472, 480, 532, 535, 554: n = A,T,C or G
acttttggattagagcccttcataacatctttggaaaaacttcttttgcttccttttttaacttcccattccacttctaaatactctcttaaaattttgacaacatttgaccgagaagggcctcggagtgagtccataagtaggatacaaggttgtttacagatagtaggctttaaatgccactgtcctatttctgaactgcagttgtcatcagcgaggaatccatcggtcactgctatcatcctggttatcctgatcttctgagaagtcgacgagttcatcttcaagcattttaccagcttcaggtgattcatcgctatagtttagtctgattttgcttaagccatctgtatgatgtgtggaacttaaactttcattctgtaggccattctcacttttagtcctatcagcaactttctgggatgtagattctcctttattgatncttcattttcactcgcagtatgattnntttttttnacactgtatttacactggatatgtttctcttataacgagggtcactttcttnctncccaggattggactcaatntc

SEQ ID NO: 3033 - DNA, 583 bp, Homo sapiens
  misc_feature 239, 258, 302, 355, 460, 487, 508, 510, 547, 551, 576: n = A,T,C or G
acgcgggcccacaagagaaaggaggaaagacctaaaattgactccctaacaccacaattaaaagaactagagaagcaagagcaaacaaattcaaaacctagcagaaggcaagaaataactaagatcagagcagaactgaaggagatagagacacaaaaaaacccttcaaaaaatcaatgaatccaggagctggttttttgaaaagatcaacaaaatagatagattgctagcaagactantaaagaaaaaaaagatgantcaaagagacacataaaaaatgataaaggggatatcaccactgntcccacagaaatacaaactaccatcagagaatctataaacactcctacacaantaaactagaacttctagaagaaatggataaattcctggacatgtacgcggggtatggttaaacagccaatttaggggaaggagggatttaaacttatttccagcnaagcatgggtgtgtccgggcctgttanaagaattgtaaaaaggccgtngnagcttggggagaaagcatcagggaaaacttaggctgnttanaaattgtaagctacaaattcattgntgtcatc

SEQ ID NO: 3034 - DNA, 654 bp, Homo sapiens
  misc_feature 291, 317, 327, 340, 377, 394, 396, 420, 444, 454, 456, 463,466, 469, 472, 591, 619, 623: n = A,T,C or G
acaaaacatcagaaaccaaatataatctggcaatctttttaggaaggggtgtctttaagatggacaacgactcagtaatgcaatccactatttcttcagcagcttcagcattattaagacagaaaaccattgcatctccaatatcatttttccttggagttaatccccgcaagatttcttccaatttatccctctgttcttccttaagtgctccctttttactaggttcctctacaaaagcttctgtttcttgctcttctgacattccatgccaagtacccctcaccaagncgaaccgccacatttatttggagggnagagttaaanaaccctttggaanccgtcggattccttaggggacggcaagtcattgcttntcagcggccctcagaananacatttttgattaatatcagaccnatctgactcatcctattaaagccngaaggaaggntnctctcanatntanaanatatgccttggattaatcattctaccctatggccattccaagcattaccaactatgtagcacctctagaaagagagagccttcgaattctaggaagacccacttactaaatccccaggngctcatgaccgtttttaactcgccccgntganaaaacccaattttgaccggggatgggggggg

SEQ ID NO: 3035 - DNA, 624 bp, Homo sapiens
  misc_feature 309, 348, 421, 423, 436, 472, 499, 508, 522, 523, 524, 530,543, 554, 556, 558, 561, 571, 578, 583, 586, 588, 591, 592,593, 594, 618: n = A,T,C or G
cgcggcgaggtactgtttgtgtgtaaattgaacccagtgaccacagatgaggatctggaaataatattctctagatttgggccaataagaagttgtgaagttatccgagactggaagacaggagagtccctctgttacgcttttattgaatttgaaaaggaagaagattgtgagaaagcattcttcaaaatggacaatgtgcttatagatgacagaagaatacatgtggattttagccagtcggttgcaaaggttaaatggaaaggaaaaggtgggaaatacaccaagagtgatttcaaggagtatganaaaagaacaggataaaccacctaatttgggtctgaaagntaaagtaagccccaacaggatacaaatccgatcttttttagatgaacagcccgaaactcaaatcagttacttncncccagtaaaaacncagaagaaaaccattcctggtctgaaaaaaagaaangagcttcttccatcaaaattctattcnggttttttnagaatggggttggnnntagaanaaaaaaagttgtnggaaaacaaanangnaanaagaacgacnttaaccnagttnccncntannnngggggctttttttttctttataancccccc

SEQ ID NO: 3036 - DNA, 591 bp, Homo sapiens
  misc_feature 364, 367, 374, 404, 406, 418, 432, 438, 450, 457, 461, 466,487, 497, 498, 499, 517, 528, 533, 536, 541, 553, 589: n = A,T,C or G
acatagtgtcgcgaactcaaatcggcatttagatagatccagtggtttaaacggcacgtttttgcttataaaaaaagtgcaaaaaagatgtggtttacaagttaaagctacagaatccctttttgctgtaattgcaccagttttaaagcctctggacagagcagtatttcgtttaaaactttgtttttcttaaaagcttacagtgtttggctaattctcctcccctttttacaagacgggggcccggagggtggacactggtggcaggttaaagggatactgtcactttaagaagcctgcagattgaagtgtaaacatggagaaattaggggctgatttttaaactggtgagatattaaccagncgncctgtantaaataagaaatccaacagcgattacacgntnacaccccctttntttatattttttanaaaatnactgaaaaatantcaacgnttcnatctntggcttttttggtttttaaangggcaaaggnnnctttaatttaaaaattanaattaactttnccctncangaagnaaataaaatggngggtacacacttcaaaaaaaaaaaaaaaaaaaaacntg

SEQ ID NO: 3037 - DNA, 661 bp, Homo sapiens
  misc_feature 606, 607, 628, 636, 638, 639, 642, 643, 646, 652, 657, 658: n = A,T,C or G
acgagtcaagcacaaactgctgcgccaggaaaagacaaggctaattgggcccaactgccctggagtcatcaatcctggagaatgtaaaattggcatcatgcctggccatattcacaaaaaaggaaggattggcattgtgtccagatctggcaccctgacttatgaagcagttcaccaaacaacgcaagttggattggggcagtctttgtgcgttggcattggaggtgatccttttaatggaacagattttattgactgcctcgaaatctttttgaacgattctgccacagaaggcatcatattgattggtgaaattggtggtaatgcagaagagaatgctgcagaatttttgaagcaacataattcaggtccaaattccaagcctgtagtgtccttcattgctggtttaactgctcctcctgggagaagaatgggtcatgccgggcaattattgctggaggaaaaggtggagctaaagagaagatctctgcccttcaaagtgcaggagttgtggtcagtatgtctcctgccagctgggaaccacgatctacaaggaatttgaaaagaggaagatgctttgaaagaaaaaaaaaattcctaaaactnnggaatggatcacgtaactttnacccacancnnttnnttntgttgnccctnntta

SEQ ID NO: 3038 - DNA, 452 bp, Homo sapiens
  misc_feature 315, 434, 444: n = A,T,C or G
cgcggcgaggtacaccaatcaaacgtagatttggtcttttcacatagtctcatattttttggagactttgttcattccttttcattcttttttctctaatcttgtcttcatgctttatttcattaaattcatcttcagtctctgatatcctttcttcagctttatcaattcagctactgatacttgtgtatgcttcatgaagttctcatgctgtgtttttcagttccatcaggtcatttatgtttttctctaaactggttattctagttagcaattcccccaaccttttttcaaggttcttagcttcctggtatngggtaagaacatgctcctttagctcagaggagcttgttattacccaccttctgaagcctacttctgcaattcatcaacctcattatctgccagtttgtgcccttgctggacaggagtgngacaattaanggagaaga

SEQ ID NO: 3039 - DNA, 506 bp, Homo sapiens
  misc_feature 429, 473, 482, 483: n = A,T,C or G
gttcgcggcgaggtacaaggtgaatatcttaaccagacttgccgcagaattgaacaaatttatgctggaaaaagtgactgaggacacaagcagtgttctgcgttccccgatgcccggagtggtggtggccgtctctgtcaagcctggagacgcggtagcagaaggtcaagaaatttgtgtgattgaagccatgaaaatgcagaatagtatgacagctgggaaaactggcacggtgaaatctgtgcactgtcaagctggagacacagttggagaaggggatctgctcgtggagctggaatgaaggatttataacctttcagtcatcacccaatttaattagccatttgcatgatgctttcacacacaattgattcaagcattatacaggacaccctgtgcagctacgtttacgtcgtatttattccacanagtcagaccatttctgccaaaaataccatggaaatttcattgtntaatactgnnctgcccggcggccgttgaaaggc

SEQ ID NO: 3040 - DNA, 488 bp, Homo sapiens
  misc_feature 307, 418, 420, 447, 461, 482: n = A,T,C or G
accttgttggagatgccacctcagaagttcacactgtgcaggaaaaaggttttattctctcctggcatacattagaatgtcagatgcttgcatccatgtggaccacgatgggcctctaaaaattggtgggcagggggtttgcttatgagttttctctggaaaccgattttactcctggatgtattgaatgccccttgagctttatgagatacgagtccacatggataaaatgttagagagtggagttctacagaggattccaggaagaggccatgtctgtgcagtcctagttccagacaggtgagangctccaggaactactggctaccttgacaagctgggtaaatagttatcattctgggtaactggttgaaactctgctttggacaagtaattcctggggttctgcttttggtancntcaccagggttttttggtggacaacanaaacacacagtgcntgtctctcttgcatcatgttngcccat

SEQ ID NO: 3041 - DNA, 567 bp, Homo sapiens
  misc_feature 43, 158, 169, 239, 412, 414, 421, 422, 437, 457, 468, 470,474, 483, 489, 502, 509, 514, 519, 525, 540, 551: n = A,T,C or G
cgcggcgaggtactttttttttttttttttttttttcgatagngaaaatatactttattttttaatacaatagctgccagcaatatactggtgctgatgttccaaagataaaagaaaatacatgcattctataataagctttcatttgcctgttcaanaaattataaanaaaatactccaattctgttcaacattacggcttgaggagttgaaatttttccatgataaaaatatacttngtgtggcccaaaccttgactatttataaaggatggagtttttaaaagcccacatgtatcaataatggatgctcccctctctttgaattaaatgcttaaattcaaattaatgcaagaaatgggtgaatcattaaatgatgaatttgtatcaaaatgtcatgaaaaaatcattcntntttcccnnattttacttgaggtntttctaaagggtttaaggcncaaaataaagncntttnatgtaactntggganttcaaacccacanagttacnagccnaatcnaaatgnccctttagggaaaanaatggcaaaancttaattggtccattg

SEQ ID NO: 3042 - DNA, 533 bp, Homo sapiens
  misc_feature 377, 386, 391, 415, 424, 430, 432, 455, 461, 483, 525: n = A,T,C or G
agtccgcggcgaggtacctgcatgacgagagcggcttgaacaggcggcacatcattgataatagggtgcattgttgcttttactttatttcaccttttggacatggacttaagcccttagatgtggcgtttatgaaggcaatacacaacaaggtgaatattgtgcctgtcattgcaaaagctgacactctcaccctgaaggaacgggagcggctgaagaaaaggattctggatgaaattgaagaacataacatcaaaatctatcacttacctgatgcagaatcagatgaagatgaagattttaaagagcagactagacttctcaaggctagcatccattctctgtggttggatccaatcagttgattgaagccaaanggaaaaagncagangccgcctctcccctggggtgttgnggagtgganaaccananccaatgctttctgaactgaaacnttctantcccccatgcagactcagaggngacccagaccttattagaaactccgtttgaaactaaaaaagngggcggaa

SEQ ID NO: 3043 - DNA, 439 bp, Homo sapiens
  misc_feature 375, 415, 418, 424, 435, 439: n = A,T,C or G
acaagggcatatttaacggattctcagttacacttaaagaggatggtgttcgtggtttggctaaaggatgggctccgactttccttggctactccatgcagggactctgcaagtttggcttttatgaagtctttaaagtcttgtatagcaatatgcttggagaggagaatacttatctctggcgcacatcactatatttggctgcctctgccagtgctgaattctttgctgacattgccctggctcctatggaagctgctaaggttcgaattcaaacccaccaggttatgccaacactttgagggatgcagctccaaaatgtataaggaagaaggcctaaaagcattctacaaggggttgctcctcttggatgancagatccatacacatgatgaagttcgctgtttgaacgtanctnggccgnaccacgctaanggcn

SEQ ID NO: 3044 - DNA, 519 bp, Homo sapiens
  misc_feature 274, 275, 290, 293, 294, 303, 308, 315, 324, 336, 373, 376,377, 387, 417, 429, 435, 438, 440, 447, 460, 472, 475, 480,490, 492, 494, 495, 519: n = A,T,C or G
cgcggcgaggtacgccttcttcgtgcagacctgccgggaagagcacaagaagaaacacccggactcttccgtcaatttcgcggaattctccaagaagtgttcggagagatggaagaccatgtctgcaaaggagaagtcgaagtttgaagatatggcaaaaagtgacaaagctcgctatgacagggagatgaaaaattacgttcctcccaaaggtgataagaaggggaagaaaaaggaccccaatgctcctaaaaggcaccatctgccttttccnngtttggtctagacantcnncccaaaatnaaaanttaaccnccttggctntccatttggggntactgcaaagaaattgggtgaaatgtgggctgagcantcnncaaaagatanacaaccatatgaccagaagcacttagcttngggaaaaaatanaaaatnaananaaatgtnctgccggcggctnttcaaaggcaanttncacanctgcgccgtncntnngattccgactgggaccaacttggn

SEQ ID NO: 3045 - DNA, 567 bp, Homo sapiens
  misc_feature 394, 403, 414, 420, 424, 472, 476, 502, 513, 521, 566: n = A,T,C or G
acaacaaagcaatgttaccttaccataggccttaattcaaactttgatccatttcactccaatgacgggagtcaatgctacctgggacacttgtatttgtaaattctgatttagcttattgtagacttgtgcctactttgtcatgagggtttgacttctgcattcttcgtggctttccttcctttggcttaggtttgctaaagctagaagattcaattgctctttacagacttatgaggaagatagactttgtaacgcagatgtcacttctcatgccagccctgcctgttagctcttttggaggaatactgcagataagaaaatagttatttgggaggctccctcagtgtggtaggaattgagactaacacaattttggttaagtccactgagnatgagttantagactcactngatgtntcantatactagaacatttgccagaccttgaggactttttcatttctactgngaanataaaactagaggcttataataagtntggattggggngaaaaacntgagtaaaaaactggggaaaggaaacttgtgaagtacttatttgna

SEQ ID NO: 3046 - DNA, 473 bp, Homo sapiens
  misc_feature 248, 276, 295, 309, 319, 353, 364, 369, 384, 391, 408, 410,414, 440, 443, 445, 449, 450, 464, 466: n = A,T,C or G
acaattcgtatttgctttcctctttcctttcttcagacaaacaccaaataaaatgcaggtgaaagagatgaaccacgactagaggctgacttagaaatttatgctgactcgatctaaaaaaaattatgttggttaatgttaatctatctaaaatagagcattttgggaatgcttttcaaagaaggtcaagtaacagtcatacagctagaaaagtccctgaaaaaaagaattgttaagaagtataatanccttttcaaaacccacaatgcagcttanttttcctttatttatttgnggcatgaaagactntccccatttntccataaaatctccctcatctgctgcattatggnacaaaaaactnttagntgccccaaacagaangccaaantttctgattttaaccangngctnggtatggttaatgaaacattggtatngtngncaannaaagaatccaaatntntccgcgt

SEQ ID NO: 3047 - DNA, 507 bp, Homo sapiens
  misc_feature 356, 384, 400, 464, 474, 500: n = A,T,C or G
acttgagctgtgaggtcatcggaatcccgacacctgtcctcatctggaacaaggtaaaaaggggtcactatggagttcaaaggacagaactcctgcctggtgaccgggacaacctggccattcagacccggggtggcccagaaaagcatgaagtaactggctgggtgctggtatctcctctaagtaaggaagatgctggagaatatgagtgccatgcatccaattcccaaggacaggcttcagcatcagcaaaaattacagtggttgatgccttacatgaaataccagttgaaaaaaggtgaaggtgccgagctataaacctccagaatattattagtctgcatggttaaaagtantcatggataactacattacctgttcttnctaataagttcttttnatccaatccactacactttatttttattcactggtttacacagagaattccaaattaagatacncttaagactnttacaaaaattttattttttacaganaaaactt

SEQ ID NO: 3048 - DNA, 460 bp, Homo sapiens
  misc_feature 28, 44, 375, 422, 445, 450: n = A,T,C or G
acttttttttttttttttttttttggtnatatttttattttcanaaaaacagagttcacttgaatacaattctcactagttaaatcacaattcaccttatagttaattaacttatgttcaaagatagtcctttcctgctatataatttcattttcttaaaaagcaaaacactttcagtagaaaaaatttacatatgaaagtcaaaaacaattatttcagcaaaaatggaaatcaaccaccgtatcttttcttgagttcttcgacagaactatccttcaatcctgacttgtctatgtgattaaataatgcaccgtgcaatctttttctctgtttctgacataaacatcactgccatatcaaacctttttagttcanaaatctttgtaagattcaaagatgagaatggctttctttctcaatgnaaaagcctgcagaattttacgantggtngataatctgg

SEQ ID NO: 3049 - DNA, 380 bp, Homo sapiens
  misc_feature 35, 113, 116, 120, 127, 129, 188, 212, 214, 219, 227, 301,353, 373: n = A,T,C or G
acttttttttttttttttttttttttttttacctnaaaaagtgacatttattcaaagaaaaaaaatgacaagatgtccatcccttggctcccttccctcccccctcctgctgntcntcancccccananattgaaccctggctggggctgggtggcaggacagcccctcatatgagggcagcaacatngaggggcatttcctcaatggaggngntgaanaaggtctnaatgcctcgaagagtccttttgtctttttctgtcaccatgttaatagccacacctttacggccaaaccgtcacntataccgattttgaggatatagttttccctgttggtgggaaggtcaatagtngattgactaaagaaacctgntgaacat

SEQ ID NO: 3050 - DNA, 277 bp, Homo sapiens
  misc_feature 138, 197: n = A,T,C or G
acttttttctttttttttttttttttttttgagacagagttttgctctgtcacccaggctggagtgcagtggcatgatctcggcttactgcaacttctacttcctgagtttaagccattcttgtgcctcagcctccanagtagctgggataacaggcatgcaccaccacgcccgactaatttttgcatttttagtanagatggggtttctccatgttggccaagttggtctcaaattcctggccttgagtgatcctcccacctaggcctcccaaagt

SEQ ID NO: 3051 - DNA, 534 bp, Homo sapiens
  misc_feature 483, 498, 524, 526: n = A,T,C or G
cgcggcgaggtacgcggggaaattcagaagaggaaaatgtgcccagcctgcctggagaaaagcgtctgctcctagccaagatctcctcatcacaaaagtaatgtgggccatggagtcaggccacctcctctgggctctgctgttcatgcagtccttgtggcctcaactgactgatggagccactcgagtctactacctgggcatccgggatgtgcagtggaactatgctcccaagggaagaaatgtcatcacgaaccagcctctggacagtgacatagtggcttccagcttcttaaagtctgacaagaaccggatagggggaacctacaagaagaccatctataaagaatacaaggatgactcatacacagatgaagtggccagcctgctggttgggcttcctggggccagtgttgcaggctgaagtgggggatgtcattcttattcacctgaagaattttgcctcgtcctatccatcacctnatggggtttttacanaagactttaaggtcccttacccaaangntcttgggc

SEQ ID NO: 3052 - DNA, 589 bp, Homo sapiens
  misc_feature 458, 490, 495, 498, 516, 518, 520, 526, 539, 540, 547, 551,555, 560, 562, 565, 566, 568, 580: n = A,T,C or G
accttgctcacctagagcagctaaaggaggaagagctgaaccctgatttcatagaacaagttgcagaattttgttcctacatcctcagccattccaatgtcaagattctttcaggtggcattccagtcaatgggcctcgtctagagagcctggtgctgacctacgtcaatgccatcagcagtggggatctaccctgcatggagaacgcagtcctggccttggcccagatagagaactcagccgcagtggaaaaggctattgcccactatgaacagcagatgggccagaaggtgcagctgcccacggaaaccctccaggagctgctggacctgcacagggacagtgagagagaggccattgaagtcttcatgaagaactcttcaaggatgtggaccaaatgttccagaggaaattaggggccagttggaacaaggcgagatgattttgtagcagaattncaaagcatcattagatgttcatggtttcttangattnttnggcctttaaaaaaatgtnancngggganatttttaaccggnngtacggntttnattnaaacngnggnntnaaaaaaatcctngcggaccct

SEQ ID NO: 3053 - DNA, 380 bp, Homo sapiens
  misc_feature 173, 219, 243, 272, 283, 289, 373: n = A,T,C or G
cgcggcgaggtactttttttcttttttttttttttttggacttagcctccctctgtggccaggctggagtgcagtggcatgatttcagcccactgcaacctccacctcccaggttcagatgattctcatgcctcagcctcctgaataggtgggattacaggcacccgccaccntgcccagctaatttttgtgttgtttgtttgtttgtttgtttttganacggagccttgctctgtcaccaangctggagtgcaatggtgggatctcggttnactgcaacctncgcctnccgggttcaagcaattctcctgcctcagcctccgaagtagctgggactacaggcgcgtgccactactcccagctaatattttgnattttta

SEQ ID NO: 3054 - DNA, 603 bp, Homo sapiens
  misc_feature 62, 233, 252, 261, 332, 463, 471, 484, 489, 497, 499, 501,517, 518, 520, 521, 523, 531, 534, 538, 547, 551, 552, 560,562, 566, 567, 594: n = A,T,C or G
actttttttttttttttttttttttttttgccatacaaatggctggttttaattttttttanaggaaatactataatttaaaaaaaaagagttccaaaatatttaacagaatctccagcaatgattatttccaaaatgtaaagatttgaaacataatttatacaaaactaaaaaccacaaggattcattcttgctttttccttttttaaaaaatccagacaatttgtcacaanaaagttcggcatgtgatanaagctgtancctcagtcaccctcggaatcgctgtccctcttcatgaggacagagcgccgcactgaggacagcaacacgtnttcaatcggcttcttagggttttcctccaggtctgtcataattgctccagattcagacagttccattccaactcatctcttgcaggttcatgccgccaaacaccagagaccaataaactgagtcttgtatnttcttcangaaacaaattcgnggcanattccatnangnaatgggttcaggtggnnanngntttttaanttncttngaacttctngganncccggggncntttnngggccaaggggatctttttgtaagggnaaaaaaccc

SEQ ID NO: 3055 - DNA, 349 bp, Homo sapiens
  misc_feature 6, 42, 71, 78, 80, 88, 96, 142, 193, 212, 214, 223, 224,231, 241, 249, 262, 289, 306, 327: n = A,T,C or G
actcanattgtgaacaggcatatttcactgatttagacttantatacttgatgagaatgctcaggttgaanagatagntntggcagcnatccaacntctatagcaatgtggaaaaagtaatcaactcatatttcacgaattngatgtatgttgtgatttagagggcatgagataaagtttatatttgaactgngtggggtagggggaagaanangttgcttanncaaatancggggtgatngaggaacnagatgtttctaanatgagaagttattctcttgcatcatanaagcactctttttaccnagaagtgattgagtaactatnaatcatttatatctgtacctgc

SEQ ID NO: 3056 - DNA, 517 bp, Homo sapiens
  misc_feature 165, 428, 465, 485, 489, 496, 516: n = A,T,C or G
actttttttttttttttttttcttgatggctacttataatttatttataaaacattttaccagtgagtgatgtctcaagtgagaggtggtaacagatacacaaagcagtttatagcatgcaatatttcaatgcctctgagaggtagaaacagcttgtgctctcanatggccctcagtccttccccttgtcatctttctgtcctagactgtgtcctaactgctcacaagggttcagcggcatgcaaacagtctttaattggttttcttcaaagaggcattgttgactggaaagactggcttgtatttaaactctgctctttttgcaaatgacagactttctcaacagtatttcagaggaaattttgttctgaacagttaactgaatctgaccagacagcaccacccatattactcaatgctaaacacancatctttgattttgtatgtcataacatctgagcttgngttaccgatggaccattttnaacnccctccncctaaagatctgtttccttna

SEQ ID NO: 3057 - DNA, 525 bp, Homo sapiens
  misc_feature 390, 420, 449, 487, 519: n = A,T,C or G
actgaaagaaaatgtcatgctgcagtcacaaaaggcgggctctcctccttcaattgtcttgggccctgcccaggttcagcaggtccttactagcaatgttcagaccatttgcaatggaaccgtcagtgtggcttcctctccatccttcagtgctactgcacctgtggtgaccttttctcctcgcagttcacagctggttgctcacccacctggcactgtaatcacttcagttatcaaaactcaagaaacaaaaactcttacacaggaagtagagaaaaaggaatctgaagatcatttgaaagagaacactgagaaaacggagcagcagccacagccttatgtgatggtagtgtccagttccaatggatttacttctcaggtagctatganacaaaacgaactgctggacccaactctttntattaatatccaaagcttatgataattgnttgtaattgacatttcaatatatgctgactgcagattntagataaatttaaggaggttctattttgattngtaaaa

SEQ ID NO: 3058 - DNA, 492 bp, Homo sapiens
  misc_feature 298, 349, 405, 410, 416, 419, 424, 427, 431, 434, 442, 464,487: n = A,T,C or G
accaagtgggatgtttcaacaaccaaagctcgagtggcacctgagaaaaagcaagatgttgggaaatttgttgagcttccaggtgcggagatgggaaaggttaccgtcagatttcctccagaggccagtggttacttacacattgggcatgcaaaagctgctcttctgaaccagcactaccaggttaactttaaagggaaactgatcatgagatttgatgacacaaatcctgaaaaagaaaaggaagattttgagaaggttatcttggaagatgttgcaatgttgcatatcaaaccanatcaatttacttatacttcggatcattttgaaactataatgaagtatgcanagaagctaattcaagaagggaaggcttatgtggatgatactcctctgacagatganagcanacgtgngcngaggntanaatntancatagaanaaccctatgagaagaatctccnatggggaagaatgaaaaaagganccttt

SEQ ID NO: 3059 - DNA, 609 bp, Homo sapiens
  misc_feature 392, 497, 504, 505, 513, 524, 537, 549, 550, 554, 563, 567,570, 572, 574, 575, 581, 583, 589, 593: n = A,T,C or G
actaaatattgctgagagcatccaccccaggaaggactttaccttccaggagctccaaactggcaccacccccagtgctcacatggctgactttatcctccgtgttccatttggcacagcaagtggcagtgtctccaccacctatgatggtgatgcagcccctagaagtggctttcaccacctcatccatgagagctttggttccccgggcaaaagcttcccattcaaatacccccacaggaccattccacacaatctgcttagcccgagtgacagcctcagcatacttcttgctgctttcaggaccacagtccaagcccatccagccagcaggtatgccagaagccacagtggcttgccagtcttggcattctcatcaaacttgcagcagngacaaagtcaacaggcaaggtaatcttcacaccattcttctcagctttggacattaggtctttgacaatcttggctcctctcatcaacagaaaagtgcaatttcntggtgtnncactttangaaggaaaagncattcccccccanatttttaattgnntttnccacttttnttgngancngnncttgtngnctttantccnccagagggcagaaggt

SEQ ID NO: 3060 - DNA, 444 bp, Homo sapiens
  misc_feature 177, 221, 233, 253, 258, 272, 285, 323, 329, 341, 358, 370,411, 412, 414, 420, 421, 423, 439: n = A,T,C or G
acatggagtgttcagcaaagaccaaagatggagtgagagaggtttttgaaatggctacgagagctgctctgcaagctagacgtgggaagaaaaaatctgggtgccttgtcttgtgaaaccttgctgcaagcacagcccttatgcggttaattttgaagtgctgtttattaatcttantgtatgattactggcctttttcatttatctataatttacctaanattacaaatcanaagtcatcttgctaccagtntttanaagccaactatgantattaacgatgtncaccctgctggcccaccagggtccttttgacactgctntaacanccctcctctgcnctccccctgacacaccnggcgctaattcnaggaatttcttaacttcatgctctgttaaaagagaaacagnngnaacttnngngaataatgttgcactncttat

SEQ ID NO: 3061 - DNA, 492 bp, Homo sapiens
  misc_feature 325, 416, 419, 429, 455, 464, 469, 483: n = A,T,C or G
acgtctgcatcgattatcttacgtggggcaaatgatttcatgtgtgatgagatggagcgctctttacatgatgcactttgtgtagtgaagagagttttggagtcaaaatctgtggttcccggtgggggtgctgtagaagcagccctttccatataccttgaaaactatgcaaccagcatggggtctcgggaacagcttgcgattgcagagtttgcaagatcacttcttgttattcccaatacactagcagttaatgctgcccaggactccacagatctggttgcaaaattaagagcttttcataatgaggcccaggttaacccanaacgtaaaaatctaaaatggattggtcttgatttgagcaatggtaaacctcgagacaacaaacaagcaggggtgtttgaaccaaccatagntanagtaagattngaaatttgcacagaagctgcaatcancattttcgnattgngattttttaaatcnttcagaaga

SEQ ID NO: 3062 - DNA, 354 bp, Homo sapiens
  misc_feature 29, 60, 68, 74, 125, 215, 218, 223, 228, 240, 241, 242, 250,271, 275, 277, 278, 300, 309, 331, 332, 346: n = A,T,C or G
acgcgggggaggtgaggtttgttaccgcnattctgagaggtgggcttttagtccctccanacctcggntttagngctgtctccgcttttctttcaccttcacagaggttcgggtcttcctaaaanaaggttttattgggaggtaaaggtcaatgcgtaggggtagagtaatgatgtcttatggtgaaattgaaggtaaattcttgggacctaganaanaagtnacgantgagccacgctnnnaaaaattnaagtcatccacagagtcgtangttntnnacaatcatagaaatgctgattntcacagaanccaggagaaaactgtaaatganngggtcctgtgaccntatttggt

SEQ ID NO: 3063 - DNA, 645 bp, Homo sapiens
  misc_feature 351, 397, 443, 474, 499, 508, 512, 538, 564, 568, 574, 585,593, 600, 604, 605, 608, 609, 610, 615, 622, 636: n = A,T,C or G
acacctgtagttcttctgacctgtatgtatcttgaggtgggtccgcaggttgctgggatcactaaaagccttgctacagaaatcacacttgtggggcttcatacccatgtgacccataaagtggacatgaagtttggaaggagagataaaagcttgggggcacattgagcacttccacttcctttctttgctgtgacttggcccatggctgccgctatgtccctgggtaggaagatggttatggatgtggctggtcagatgggctttgaactctgtgtaagaattgcactccttgccacagttacagagatgcacatctgggtgttcaggacaccaatctgttgagcatantctcggctataataaaaaacagttcatttcaaggagggatatcttngaaggggcagaaaagatttttccatcatgaggataaccaccaaatntgtcttccggtcctgctttgcgcacaacatnatcaatacatcatttcatcagttgnaatgatcanaatntaggaccctttggggttatcttcaanatgggaactgctggtggccattcgcnctcntgaggnttggtgcaatnaagccaancagtccncatnntgnnnttttnctaacanaatgttccaaaatngggagaaaa

SEQ ID NO: 3064 - DNA, 275 bp, Homo sapiens
  misc_feature 89, 198, 210, 250, 266: n = A,T,C or G
actttttttttttttttttttttttggctgccctaaattgtttattaagtatgaattttacaaactttacttatattagcggtaacggnggagctggagagtattgcgccttctccaagctgcccggcgagagccaccaatagtgtggtggaacttgtggccctttccaaggccacggctctttcggcctgcaaatgnagcccacgcatntccctgtgcttgtggactggattggagaccactgggtgtnaggatttcttccgatngctttatgg

SEQ ID NO: 3065 - DNA, 599 bp, Homo sapiens
  misc_feature 345, 360, 425, 438, 445, 450, 452, 465, 466, 472, 473, 485,507, 512, 534, 546, 548, 550, 551, 555, 559, 563, 595: n = A,T,C or G
tcgcggcgaggtacttcgcttttttgtgcacttctatgacatggaaattattgaagaagaagctttcttggcttggaaagaagatataacccaagagtttccgggaaaaggcaaggctttgttccaggtgaatcagtggctaacctggttagaaactgctgaagaagaagaatcagaggaagaagctgactaaagaaccagccaaagccttaaattgtgcaaaacatactgttgctatgatgtaactgcatttgacctaaccactgcgaaaattcattccgctgtaatgttttcacaatatttaaagcagaagcacgtcagttaggatttccttctgcataaggnttttttgtagtgtantgtcttaatcatagtctaccatcaaatattttaggagtatctttaatgtttagatagtatattancagcatgcaatanttacatnataantntcaagcagagcannctttgnnaggacttttttnctggagtattataggtggtttnagtanaactggattcacctgatcttgnaatgcctttgtnanannctgnttgngaanattgatatccttggttgtcagaaaatttactnattg

SEQ ID NO: 3066 - DNA, 587 bp, Homo sapiens
  misc_feature 212, 370, 386, 393, 407, 408, 413, 436, 449, 450, 459, 476,499, 525, 526, 531, 542, 543, 562, 567, 580: n = A,T,C or G
actgcgccttcctgcactgaagcacccctgcagggctcagtgaccaaggaagaatcagagaaagagcaaaccgccgtggagacaaagaagcagctgtgcccctatgctgcagtgggagagtgccgatacggggagaactgtgtgtatctccacggagattcttgtgacatgtgtgggctgcagctcctgcatccaatggatgctgcccaganatcgcagcatatcaaatcgtgcattgaggcccatgagaaggacatgggctctcatttgcccgtgcagcgcaacaaggacatggtgtgtgggatctgcatggaggtggtctatgaaaaaccaacccccagtgagctccgtttgggatctctccaactgnaacacacctatgtctnaagtgcntccaaagtggaganngctancaatttgagagcaaacataaagngagctcctcccanncttctttgngcttttttttggggaanaattagaacttggggcaactttnaccagaatggacggattaaatgatgnnttttntttaactggannttttatggggattcttttngtttnactactctaggtngtgggca

SEQ ID NO: 3067 - DNA, 576 bp, Homo sapiens
  misc_feature 301, 302, 349, 385, 386, 389, 421, 429, 431, 452, 472, 501,505, 509, 516, 522, 526, 532, 540, 545, 554, 573: n = A,T,C or G
accaacctatgcagccaagcaacctcagcagttcccatcaaggccacctccaccacaaccgaaagtatcatctcagggaaacttaattcctgcccgtcctgctcctgcacctcctttatatagttccctcacttgatttttttaaccttctttttgcaaatgtcttcagggaactgagctaatacttttttttttcttgatgttttcttgaaaagcctttctgttgcaactatgattgaaaacaaaacaccacaaaaacagacttcactaacacagaaaaaacagaaactgagtgtgaaannttggtgaaatacaagggaaatgcagtaaagccagggaatttacatancatttccgtttcattattgaataagtcttattcagnntcngggaggtaatggactaatatgatttttggacntgtattgnantgatctaaaatactggttggngtaagaatttggcattaggngttaagtgtatttggattttttcctaatnttantaangagttcntttganaggnaaatcnaaaccggnaaacngataaacangggcaatatattatttttntta

SEQ ID NO: 3068 - DNA, 612 bp, Homo sapiens
  misc_feature 154, 200, 227, 258, 262, 305, 322, 329, 331, 335, 339, 356,371, 373, 377, 380, 388, 407, 410, 421, 428, 438, 440, 448,450, 459, 463, 472, 480, 482, 512, 519, 523, 526, 529, 540,545, 557, 558, 561, 567, 573, 581, 586, 602: n = A,T,C or G
cgcggcgaggtacttttttttttttttttttttttttttttttagttcaagtttaatacaaactacaaaagattaatgggttgctctactaatacatcatacaaaccagtagcctgcccacaacgccaactcaggccattcctaccaaaggaanaaaggctggtctctccaccccctgtaggaaaggcctgccttgtaanacaccacaattcggctgaatctgaagncttgtgttttactaatggaaaaaaaaaatcngaanaggttttgttcttatggctgccaccgcagcctggcacttaaanagcccagcgctcacttntggttgnanaaanattntttggttctttggaatnaggcttgatggtatnanttgncangttttcancagctgggccacttccccntgntttgtcaaggnactgaanggcttgactnanttaaaatntnatcccaaangcgnccacagggnggtatttnanggatttgccgaaaaatccctttatttaaanaaaaaangccntgnacnaaagctttttnctttnaaacccatatcnnganaagggngccttngtttaatncaagnaagtcttggccccccncttttttaag

SEQ ID NO: 3069 - DNA, 529 bp, Homo sapiens
  misc_feature 230, 286, 353, 355, 367, 377, 397, 428, 479, 497, 505, 507,522: n = A,T,C or G
acagcaatgaaacaccaaagggacgttttcctccaaattgtgtataagcttgtttgatatcacacagcgctgtaaccaactgctcacaaggtattggctcctgatactgtaataaatacctttgagcaatgagccttagttcattagtcagaacattagcatcagaagttatgcctgccacactgcaagccatgtcctcattgagtttataaattttttcagaaaaaaanacttcatcaagaagcttgtggatgttgcgtctctctgctgcaagcaaacaccatcntttgctaaaattcccaaacaggtcctgcatgtccaatagcttccatggcatattcaacttggtatancngaccttttgganaaaatatagnggtcctggagtcatatcttngaacattgtttctgactttatatagttccanatggaaaccctgaagacctgagatgtcacggagccttacttcacggaagantaaacaccaccgttaccnataccgtngntatttcccgggactnggcggac

SEQ ID NO: 3070 - DNA, 522 bp, Homo sapiens
  misc_feature 380, 394, 441, 509: n = A,T,C or G
acctctgttctggatctgggcagtcagcactctttttagatctttgtgtggctcctatttttatagaagtggagggatgcactatttcacaaggtccaagatttgttttcagatatttttgatgactgtattgtaaatactacagggatagcactatagtattgtagtcatgagacttaaagtggaaataagactatttttgacaaaagatgccattaaatttcagactgtagagccacatttacaatacctcaggctaattactgttaattttggggttgaacttttttttgacagtgagggtggattattggattgtcattagaggaaggtctagatttcctgctcttaataaaattacattgaattgatttttagangtaatgaaaacttnctttctgagaagtagtgttaaggcttggaatgtgaacacattgttgnagtgctatccattccttcccagattttacttactactggaaatcctaccatataaagcttttttcttntttaaaatgattc

SEQ ID NO: 3071 - DNA, 381 bp, Homo sapiens
  misc_feature 219, 242, 257, 280, 285, 328, 331, 332, 338, 341, 352, 375: n = A,T,C or G
gtccgcggcgaggtacagttccagttatttacactcacagatattacacctgtgtaatacgtagaactagatcactcactggaaatcagaaagcattcagtcagtctgataatgatcacagtttaccattgttatcactttaactgaagtgtgaaataacaaaagaatgcatatagtccgttatttaaaaatccctgttacacagaaaaaaaaaaaaangaaacttgtttgaatttttaatnggtcctaaatctggngaaatcggtcgtaaatgttttgnacacnctggcacatttgtaagccacagaagaaatgttttttttaaaanaanngatganganttattggtccntatattttaaagggatgaaaggnggtatg

SEQ ID NO: 3072 - DNA, 459 bp, Homo sapiens
  misc_feature 436, 459: n = A,T,C or G
actttctttttttttttctttttttaatggcagctaaagatatacagattactgttaaattgcagtccttttttttttaaagatattttcttgagttatttagaacatggtaagcctggtattttttaatcaaacaaaatatttatgaaatgggttttctcttaattctggattcatcatggctttctaataccaattgtaatatttacaatattcaccaaaacttagaattttgcaaatgctggaattctgccagtgtttctttgctaagccttgcatgcaaaatttgaaattttaacattggcacccaaaacctacatggaatgtatgtctggagtatttcaaactttacattgaaacataattccttggaaaacaaaccataacctgaggaggttttatcaactggaatgcttatattagttggtttcactgncctcggccggaccacctaaggcn

SEQ ID NO: 3073 - DNA, 460 bp, Homo sapiens
  misc_feature 326, 366, 384, 397, 406, 427, 444, 449, 457: n = A,T,C or G
acaacaccgaggtgggagacaagtggatctggctgaagtgaacgggccgccttctgctccagctgcatcacagtgatggccaagctgcatcagccgcactctcctggacgccatatagctttaagatcgggggagggtaaataatgcaaaaattgcacagtggaagaaggggtctcacaaaaagcaatccatcctgtagtataggtaatggagttgggggaagcagcttccattctggatgtttggaaccctttagctttgttttggaatggcccaccattctcactggaaaacagtggtcttgctgtgaaaggccagctctcggnagcccctgtggtttcagcgctgccgctctgtgtcattcangttgtgcacattgttttnttctgacttccanaaataaaantgtttccatgggaaaaaaaanaaatataaaaatataantcctnggcgggancac

SEQ ID NO: 3074 - DNA, 651 bp, Homo sapiens
  misc_feature 455, 463, 492, 509, 510, 533, 558, 567, 574, 578, 581, 583,595, 597, 624, 628, 633: n = A,T,C or G
acaacccttgtcaccatctcaggggcagagcactcacgtgcatgatgcccaatgtgagaacacaccagagaaagaattgcctgtaagtcctggtcatcggaaaaccccattcacaaaagacaaacattcaagccgcttggaggctcatctcacaagagatgaacttagggcaaaagctctccatatcccattccctgtagaaaaaatcattaacctccctgttgttgacttcaacgaaatgatgtccaaagagcagttcaatgaagctcaacttgcattaattcgggatatacgtaggaggggtaagaataaagtggctgctcagaattgcagaaaaagaaaactggaaaatatagtagaactagagcaagatttagatcatttgaaagatgaaaaagaaaaatgctcaaagaaaaaggaaaaatgacaaaagccttcactactgaaaacaactnaccctttntctcaagttttaacttgctacgtgatganatggaaacctttttctnntggatctcctgacaacagaatgnattgtttccttgtccaaagtaaaanccgtgtaanaaactantttnggngnttggctttttgncnttttttgccttggccggacccttgggnattnacccntgggggcgttataggtcc

SEQ ID NO: 3075 - DNA, 599 bp, Homo sapiens
  misc_feature 316, 328, 343, 359, 371, 378, 387, 402, 412, 424, 428, 431,435, 438, 441, 457, 462, 475, 477, 487, 488, 501, 516, 519,521, 539, 541, 544, 549, 553, 561, 568, 569, 574, 584: n = A,T,C or G
acagcagcagttgtattctttattagcttggtagatcattttctctcgctcttttttttaatactagcaactttcatcctttgaaacgtgtgctgaaaaagaagaatcagcaaatactactgaaagtgcaatatttgagtatcactgcgagatgatgttgaatttgaagtatcatcggaccgacggactgggaaacccattgctgttaaactggtgaagataaaacaagaaatcctccctgaagaacgaatgaatggacaagaagtgttttatctgacttacacccctgaagatggccaagggaaccgttcagctngaaactggagantaaataaactttggnattgattacaataaanctctggtgccgnaagggcncccaccttntgcctggtgaaaaanaaacaacccntgcagggatagnttgngcntganggnggntttggtttattggaanagggnatggtggaaaaananttctttcctnnagggattaagggnacttaaaaccttcanccngngatatggggattcccatnanggncgaangggnaataagtncaccaanntcaantttgcctcangaacgctttttgaaa

SEQ ID NO: 3076 - DNA, 529 bp, Homo sapiens
  misc_feature 331, 349, 352, 395, 408, 413, 417, 421, 430, 434, 443, 450,471, 473, 475, 484, 486, 489, 492, 528: n = A,T,C or G
acttggtgaatatgaggagtatattactaaacttttcaactaccacaaagttcttcctatgaatacaggagtggaggctggagagactgcctgtaaactagctcgtaagtggggctataccgtgaagggcattcagaaatacaaagcaaagattgtttttgcagctgggaacttctggggtaggacgttgtctgctatctccagttccacagacccaaccagttacgatggttttggaccatttatgccgggattcgacatcattccctataatgatctgccgcactggagcgtgctcttcaggatccaaatgtggctgcgttcatggtanaaccaattcagggtgaancangcgttgttgtcccggatccaggttcctaatgggagtgcggganctttggccaagcnccagntctntttnttgttgtgnatanaacaggatngcccaantgggagatggttggctgtgantntnaaatggcancntgnttnagcctcctgggaaggcctttttggggctatcctggnt

SEQ ID NO: 3077 - DNA, 620 bp, Homo sapiens
acccttaaactggcaggacatttttgaaatcacaaatttgcacataaagaatgtcacgaacagccatgtatccatatacagcaatcaaataaggaacttatgacctaaagcaaaggtaaactttcttgaaacttaacattctataccaactaggcaacctctgcccaggatgagagttggatttttcaaaaacctctaatttaatagtgcagcatttcgttttccctgatggcctgtgtttcacagcagtttttaaaaactgcttgttcaactatagctgcagcctatatcccagctatggaaaaaaaagtaaatcttagttcaatttttgccagttgtttctgtatttaaatttaaaaaaaaacacacttccgctgggcaggtttagaggtttattatcagtctgtgcataactaaaagttcaaagcaaattcaattttgcttaagggaacattgtaaagtaacaattcttggtattacatgcctcgtatgatccatttcaaaccatagagaattacacctttgtgtcactgtttcaagagacaaacagatttgaacagctaaaacatcttaaaaatgcaccaagcttatgaagtctcaaacaaacttgaattttctgt

SEQ ID NO: 3078 - DNA, 662 bp, Homo sapiens
  misc_feature 443, 568, 586, 596, 613, 624, 634: n = A,T,C or G
acgcggggagcagcaggaggaggcagagcacagcatcgtcgggaccagactcgtctcaggccagttgcagccttctcagccaaacgccgaccaaggaaaactcactaccatgagaattgcagtgatttgcttttgcctcctaggcatcacctgtgccataccagttaaacaggctgattctggaagttctgaggaaaagcagctttacaacaaatacccagatgctgtggccacatggctaaaccctgacccatctcagaagcagaatctcctagccccacagaatgctgtgtcctctgaagaaaccaatgactttaaacaagagacccttccaagtaagtccaacgaaagccatgaccacatggatgatatggatgatgaagatgatgatgaccatgtggacagccaggactccattgactcgaacgactctgatgatgtanatgacactgatgattctcaccagtctgatgagtctcaccattctgatgaatctgatgaactggtcactgattttcccacggacctgccacaaccgaagttttcactccagttgtccccacagtanacacatatgatggccgangtgatagtgngggttatggactgaggncaaaatctaanaagttcgcanacctgacatccagaccctcggccggaac

SEQ ID NO: 3079 - DNA, 661 bp, Homo sapiens
  misc_feature 20, 350, 424, 485, 517, 542, 570, 590, 612, 630, 639, 660: n = A,T,C or G
accacgctggtctaatgcanaaatggagattgctacaaaggaccctttaaaccctattaaacaagatgtgaaaaaaggaaaacttcgctatgttgcgaatttgttcccgtataaaggatatatctggaactatggtgccatccctcagacttgggaagacccagggcacaatgataaacatactggctgttgtggtgacaatgacccaattgatgtgtgtgaaattggaagcaaggtatgtgcaagaggtgaaataattggcgtgaaagttctaggcatattggctatgattgacgaaggggaaaccgactggaaagtcattgccattaatgtggatgatcctgatgcanccaattataatgatatcaatgatgtcaaacggctgaaacctggctcttagaagctctgtggactggtttagaangtataaggtcctgatggaaaaccaaaaatgatttgcgtttaatgcaaaatttaaagataangactttgccattgatattattaaaagcactcntgaccattgggaaagcattaatgcntaaaaaaacgaatgggaaaaggaatcanttgcattaattccacttttntctgaaaacccccttcaaattngatccctgatgctgccanaaccattgnggatgctttaccaccaccctnt

SEQ ID NO: 3080 - DNA, 660 bp, Homo sapiens
  misc_feature 179, 199, 263, 291, 309, 311, 319, 342, 343, 346, 354, 363,366, 374, 380, 406, 416, 442, 452, 467, 527, 532, 550, 563,564, 565, 567, 574, 601, 607, 623, 626, 629, 653, 654: n = A,T,C or G
acaagtgccagagaacacatttatgatttacgatcccaggaaaattaccactttgtagatgagcatggtaaggatcaaggtataaatattcgacagaaggtgaaggaattggttgaatttgcccaggatgacgacaggcttcgtgaagagcgaaagaaagcaaagaagaacaaagacangtttgttggggtttcctcanacagtgttggaggatcaaatacagtgaaagatatgatcctgagcccaaatcaaaatgggatgangagtgggataaaaacaagagtgcttttncattcagtgataaattangngaactgantgattaaattggaagcccaattnnttnccccttcncattcccgnagnaaaaatanaaaacntccaaaaaaatccccccccccttttnggaaaaaaanccgaaaaagggcaattcccaaagggnaattcaaaantaaaagggaaactgnaccaacaaccttttttttttcaccgggccaaagagaccccacacccagacacaggccccngaaanttcttccaaaaccttttnttttggaccaccnnncntttcacnggggacaaagcaagtccaaatcaaaantgtttnaccccaccccccttangtnttnagttaaaacttcaagggcctacannaaagtc

SEQ ID NO: 3081 - DNA, 612 bp, Homo sapiens
  misc_feature 242, 456, 589, 603: n = A,T,C or G
aataaagaacctctatcagtgagacttctcattttatagcaaatacatttttgcagcttaaattttcttgaattccatatacgcttctgtcatttaaacaaacttccagagaaaactggtctctatatatttaagtaacaaatttgacaaaatacatatttatacatatatagatctctaatataaatattaaatttgaaaaaatcaaatgtgaagcagaaactgctatacaagtatattgnataatatttattttatacattaaagtatttggttgaatatacttcaattaggtttctaaaaaacaccattatctgcttcttagtaattgcgacattcttgaaaagcatgtgaaacgggtataaacttcaactctgtgcttaattcagaattcctgtttgttctcctcaaacttttatcttcctaaagcatcttgccagagactacaaagggaanggaccattacagagcactataacatgtctttggacagtaaaaaagatttattcttctacactcttggattttccaatcatatcttcctcaaggcatgttcttttggcccatttggggcaactaaccataaaanttccaaaccacacnttttacaag

SEQ ID NO: 3082 - DNA, 665 bp, Homo sapiens
  misc_feature 318, 456, 476, 487, 498, 539, 546, 566, 571, 579, 601, 609,623, 625, 627, 640, 660: n = A,T,C or G
acaagatgtgttactatcgctttggacaggtttacacagaagccaagcgtcctccaggctttgaccgtgtccgaaatgctgagattgggaataaagactttgagcttgatgtcctggaggaagcatataccacagaacattggctggtcaggatatacaaggtaaaggacctggataatcgaggcttgtcaaggacataaatgtcacgtccagctctgatatgcttcgcactgagcacatcacatttaggacgttgaagattttttttttttttttttttaatatgcagtttgtaagaacaaaactggatggcatcanaattgtctggaagttttgtcttgggccagtatgggctgggccaaatgaaatgatttttataattctaacaggttaccaaatgaaatgtcatggctttactttggtcaattaaaggggggaatttttttaaaaaaatgngccttatttgttttgctttntacctgttggnggaggcaaaanctttcttggttccaaaaggaaataaccaaccttggccattntttaacnccctaaattaaccaaaaaanaaacntttttttntaattggggaaattttttaaanaccctttntaatcccctttttncnanagttttggaaaancctttggtttggaaaccctntacct

SEQ ID NO: 3083 - DNA, 520 bp, Homo sapiens
  misc_feature 12, 23, 31, 297, 301, 307, 313, 331, 341, 352, 357, 394,400, 404, 439, 445, 455, 456, 473, 474, 476, 479, 490, 498,500, 511: n = A,T,C or G
cccggggtattnattcccgcccnacccgganttgggtcgcggttcttgtttgtggatcgctgtgatcgtcacttgacaatgcagatcttcgtgaagactctgactggtaagaccatcaccctcgaggttgacccagtgacaccatcgagaatgtcaaggcaaagatccaagataaggaaggcattccttctgaccagcagaagctgatctttgtggaaaacagctggaagatgggcgcaccctgttgactacaacattcagaaagaagtccccctgcacctggtgcttccgtcttanaagngggatncaaatnttcgtgaaaaccctcctngcaaaacatnacccttgaggngggancccagtgacccttcgaaaacgttaaaccaaaaacccnggacangganggctttctctgaccacaaaaggttattttttccgnaaaacncttggaaaanngggccccctttttttanntnaancccaaaaaaanatttcccntncccgggggccnccctcaaaa

SEQ ID NO: 3084 - DNA, 433 bp, Homo sapiens
  misc_feature 54, 64, 85, 149, 265, 292, 295, 297, 346, 362, 363, 367,370, 384, 385, 395, 402, 405, 428: n = A,T,C or G
cacttttgttacagttcatatatgaatagttagcagagggagaaactcctccgntggtcctacnccaagggaaaaaatgtaaggnctggatagctcatgaataatattaacatttttctatcacaaaatattggataaattggaattgnatcaattcatggtatggaacctaacattttaacccgaatattaaaataatataaataaggcttttaacttcatatcaagacctatttgaacacttctagaaaagaacattaaaagntttttcctcatttatgggttgatttantgnantgcctcaactggtcttaaatgggggcttaatataatgcataattattanaatataattattaggnntttncanaattttatgggggnnccttgcaaanaattttnagnccaaacttcaaattaaccccccnaattt

SEQ ID NO: 3085 - DNA, 382 bp, Homo sapiens
  misc_feature 301, 320, 333, 361, 378: n = A,T,C or G
actcacacaagttgtttcaaagatgatatttctgtgaacagagaggccatgggaagatttgaaaattattaaagaaaaattcctacagattttcaatgcagagaccataatcaaaaagtaaactttctttagtagtatgttcaatacatcatttaattttttaagttatcctgaagaaggaaaggccttaattattatagtctaaacaaatttataagattactgtttgaagtaaataatacgagtgaatattttcaaatgtgataaaatagcacaagtggctggtgataaaatttgaaantatggttaacctcaactgngatcttatgtatntaaagggaaattttaaatatgattattntaggttgattacaaaanccca

SEQ ID NO: 3086 - DNA, 628 bp, Homo sapiens
  misc_feature 426, 493, 498, 508, 516, 517, 539, 548, 554, 565, 570, 579,585, 587, 590, 595, 616, 620: n = A,T,C or G
acatgtttggaaatgagttagatacttgaaaagtctaaacacactgatttaggagtgcgtatgttgctgtctcaatgaacaatgggtcaatagttcatatggactaaattaatctctgggtagcacgtatgtgtgtaaatataaaattatattagacattagcaccagtgcagaacatgctcagcatcataagatccaaaacaccagcacaagtttatccatcattaaaaacaattacctccttcctaaaatgtcagaatagtaggtaactgagattaataaatcttatccaaaaagtaactcttataacataaaagtttcttttagaagtatatgtgagaaccaatcagctaaatagaaatgtttaagattgaagatgccaatatttttaaaactggcattaccatatcaggtagaacatttctnaaaatgacgtgacaaacaattcttaaaaattttttaaaaaattccttcactggttatcaataaatgnggcanaataaaaganaatccctnnaaaactttttaattcatcattntatgggggntttaanaaagggggggnagccnccatttttnggaatncnttntttanccaattttttaatggggggangaanaaaaaata

SEQ ID NO: 3087 - DNA, 600 bp, Homo sapiens
acttgccccttccccagaaaagcgggacttgctgctaagggtgaaggaccaaggcagttgtccctgcgtggtctgacacccttgaaacgtgggtgtataatcagagaggcatccctgcaatgattaaacaccaagggaaggctgccttcccagtctgtgaccagcgccggagttttgggtccacggataaaacgtgtctcttttgtctctaccagaaaatgaaaggaattgaaattaagagaagggagagattgaagtgtagtgccaagattgaaaggagaaagtggttgagggatagtgagggaagttggagaagagagtaaaaagaggctgcttaccagatttgaaattggtgagatgtttcttgggctcgtcggtctgaggacctgaggtcgtaggtggatctttctcagggagcaaagagcaggaggacggaggattgatctcccaagggaggtcccccgatccgagtcatggcaccaaatttcatgtgcgtccatgtgaagagaccaccaaacaggctttgtgtgagcaacatggcttgtttatttcacctgggtgcaggcgggctgagtcccaaaagagagtcagcccccgcgt

SEQ ID NO: 3088 - DNA, 622 bp, Homo sapiens
  misc_feature 76, 91, 120, 153, 165, 172, 183, 187, 193, 228, 264, 349,376, 398, 497, 506, 537, 549, 555, 562, 587, 594, 607, 619: n = A,T,C or G
acagatgtcagtggaagagagtcttactgacactcagttggtttcttttcaggtcagcactcttgtatacatccancaaaggcgaaagaanaattcgtgttcatactttgggtttgccantagtttcgactctgaatgatgtctttcttgganctgatgttcaancaatttnagggttattgnccantatggntgttgacagatctatgactgccagtctgagtgacnctcgggatgctctagtgaatgcagccattgactccntttcagctaccgttcttcagtcttaagtaaccagcagcctgactcatggttcctttttctttgcggctttcccactttttgtgtngctctccttaaacagaaatcattccanactgggacaaatgcacgtctanatgaacgcatttttgctatgtgtcaagtgaaaaaccagcccttggttaccttatgctcacaactcatcccagtttggataaaagttgacaatctctcanatgaggganccctcaacatcaggggatagaaccatacctnagccccccattnttaagntttcagngggaaaaactgaacaaaaaatggancttcctnatggatgcaggcntttgaccttggncgg

SEQ ID NO: 3089 - DNA, 663 bp, Homo sapiens
  misc_feature 6, 168, 181, 207, 242, 253, 257, 295, 301, 310, 389, 419,422, 427, 444, 448, 462, 466, 476, 533, 536, 545, 555, 568,584, 599, 608, 620, 621, 626, 636, 638, 660: n = A,T,C or G
actttntttttttttttttttttttgggattagtgggctattttctgctagggggtggaagcggatgagtaagaagattcctgctacaactatagtgcttgagtggagtagggctgaaactggggtggggccttctatggctgaggggagtcaggggtggaaacctanttgggctgatttncctgctgctgctaggaggaggcctantaggggggtgaggtttgaattaccgttaaaaaggnctttttgttgngggnctcatgagttggagtgtaggataaatcatgctaaggcnaggatnaaacccatntccccatacggttgtataggattgcttgaatggctgctgggttggcatttgctcggcgtttcatcaactggtgaaccanaaggatttaattcctacccccttttaaccnatnaacanttggaataagttgttancggnaactaaaattagtntggnaattaggaanatgaattaattttttaaaaactgattaatggttgggtctgaaattttttttccaagnggnaattttttnatggaccctnttaccaacaatgntcacgggattaatttntgggaaaattttctnttttaaacntaagggaaaacnnggttnttttgggttngncccaaggtcaattccaaaaaanaaa

SEQ ID NO: 3090 - DNA, 495 bp, Homo sapiens
  misc_feature 31, 36, 65, 66, 74, 125, 176, 193, 231, 233, 239, 268, 282,284, 298, 319, 322, 350, 358, 365, 369, 376, 379, 387, 392,395, 403, 409, 419, 428, 435, 454, 463, 469, 479, 485, 489: n = A,T,C or G
actttttttttttttttgggttttgtttganacagnctcgctctgtcaccaaggctggagtgcanngggacgancttggcttactgcaccctctgcctcccaggttcaagcgattctcctgcctnagtcttttgagtagctgggactacaggcatgcaccaccacacttggctaantttttttttgtattttnactagagacagggttttaccatactggtcaggctggtntnaatctnctgacctcaaatgatccatccgcctgagnctcccaaagtgctngnattacaggcatganccaccgtcccagccgatcttnttnataggaattataattacaaatttttaantgtccaanaagggtngctnaatacancanaaattaanccatnaancaagaaanccatanaaggattctntttaaattnatgaccncaatacaattaaaaatacntttttattnccttanataaattagnaataanacantttctt

SEQ ID NO: 3091 - DNA, 592 bp, Homo sapiens
  misc_feature 26, 51, 121, 136, 139, 142, 167, 180, 212, 217, 235, 245,277, 281, 291, 296, 320, 346, 354, 362, 364, 369, 370, 381,397, 406, 433, 489, 491, 497, 499, 500, 503, 510, 519, 522,532, 540, 545, 546, 552, 556, 557, 558, 562, 563, 565: n = A,T,C or G
  misc_feature 572, 577, 587: n = A,T,C or G
actgttggcttttccggagcagagtnggagaatcttgtgaaccaggctgcnttaaaagcagctgttgatggaaaagaaatggttaccatgaaggagctggagttttccaaagacaaaattntaatggggcctgaangangangtgtggaaattgataacaaaaacanaaccatcacagcntatcatgaatctggtcatgccattattgcatnttacncaaaagatgcaatgcctntcaacaaagntacaatcatgccacgggggccaacccttgganatgngtccctgttncctgnaaatgacagatggaatgaaactanaacccagctgcttgcacaaatggatnttagtatnggaggaanantggcnnaggaacttatntttggaaccgaccatnttacaacangggcttccagggatttttataatgccnctaaaatagcaaagcggatggttccaaatttggaatgagttaaaagcttggagttntnacctanannggnaccgggnaactaagtncanaaacccaatntgccatcnaaccnnaaaaangatnnnaaanntngaaagtnccttnggccggaccnccctt

SEQ ID NO: 3092 - DNA, 663 bp, Homo sapiens
  misc_feature 484, 513, 527, 537, 580, 638, 639, 655: n = A,T,C or G
acgcgggattttaatcattatttttgcctgtcataagaaaactcttagctgaaatggccgaaaactgtgagacatgctatggaagctgaatgccggacgctagcacagtttactttttccctttctaattggctgatgttactctcacttgatgtggttaaaccattttagaggtagagaagacagacagtttgaatatttgtaaacttgtttttctttggtatatttaggacttagtggtcctctgttgctattgtcttctataagtggagtttcatgacttactgcttaacgaataactaactactatgatattctggacattttaggaaatggtaatttgccttgctacacattaagagggctattaagactacattttttctaacctcagataagtgcagtgtctttgcaatgccaacataagggggaaatcttggccaacgtgaaataaaattactcattcaaaacctctggctaaggngattttggaagttcttaacagttctccanagcatcttgaacangaatattaanaataaattgtgaatctgcaaatggctgaaaaaaagttggggancttttttattcattgataaaccttataggaatagtataaaaaaatcctgggggaaagnntactattacctgcccngggcggcg

SEQ ID NO: 3093 - DNA, 487 bp, Homo sapiens
actggattcttgatctttctgcatcatcaagaatggaaacagactgtaatcccatggagctaagcagtatgtcaggatttgaagaaggttcagagctgaacggttttgaaggaactgacatgaaagacatgaggctcgaagctgaagcagttgtaaatgatgttctctttgctgttaacaacatgtttgtctcgaaaagcctgcggtgtgcggatgatgtggcctatatcaatgtggaaacaaaggaaagaaacagatattgcctagaactcactgaagcagggctcaaggtggtaggctatgcttttgaccaggtagatgatcatttacagactccctaccatgaaacagtctactccttgttggatacactcagccccgcctaccgagaagcatttggaaacgcactgcttcaaagactggaagctttgaaaagagatggacagtcatgactacactttttcctttcagaggggctggtgctggt

SEQ ID NO: 3094 - DNA, 591 bp, Homo sapiens
  misc_feature 59, 75, 77, 79, 81, 92, 117, 130, 137, 139, 142, 147, 156,158, 189, 219, 222, 245, 250, 278, 281, 325, 367, 383, 393,402, 406, 447, 454, 481, 533, 564, 570: n = A,T,C or G
actttttttttttttttttttttttttttcttttttttttttttttttttttttttttnaaggattttaaaaatntntntnttttgaaaatnttctgaaagtaattaaaatcacctnttgggaaggaaanaaatcancncantgaantttaggaananaaatgcaaaagcagctgcaaaatcctgcccnttccaccccaaggggcacagcccggaaatnaancttattttaggatcacaagtgcnccctntggtaaacggaggatgactttgtcagtnttntggctgaagggccttgtccaaagtcaggatcaaaaataggtcanctcatcatgcttggctttgttggtctggtagttaaataaggncaagggcttgttttcntgagggaaanattggaacnctcncaggtgtccacataatgttaaagaaaatgtcttcctttggnatatttnggtttatctttttaacttgagtgtganaaactgacaaaatctggaatgcattgagtttttttttaaacatcactaatgngtgttataaaataattcaacaaatacgttanaatatntttcctcaaagagctgatggt

SEQ ID NO: 3095 - DNA, 333 bp, Homo sapiens
  misc_feature 6, 7, 9, 16, 18, 19, 28, 33, 35, 40, 44, 57, 64, 67, 72,73, 76, 77, 79, 84, 86, 109, 113, 135, 159, 169, 241: n = A,T,C or G
actctnnangtgacantnnatgcatcantgagngngtgtnatanatgatgaatccanagaaaanaanggctnntgnngnggctnanaccaactccattatctcactatnaaanaaaaacttcaagaatcctgacnggcacaatatccacaaaagagcanacagccctgntccaaatttgctgaaatccttctagattgtagagtatacacaggtcaaaccaaaaaatactgtagtagtcantatgaaagcttgcagaataatatatacatcatagaaagtaacaacaactgccacagtcagagcttccaacagcgtaaatccaaaaagtaggt

SEQ ID NO: 3096 - DNA, 624 bp, Homo sapiens
  misc_feature 61, 91, 236, 423, 453, 513, 524, 527, 530, 559, 576, 595,597, 604, 607, 615: n = A,T,C or G
acagaagtatctgggtgagggcccccgcatggtccgggatgtgttccgcctggccaagganaatgcacctgccatcatcttcatagacganattgatgccatcgccaccaagagattcgatgctcagacaggggccgacagggaggttcagaggatcctgctggagctgctgaatcagatggatggatttgatcagaatgtcaatgtcaaggtaatcatggccacaaacagagcanacaccctggatccggccctgctacggccaggacggctggaccgtaaaattgaatttccacttcctgaccgccgccagaagagattgattttctccactatcactagcaagatgaacctctctgaggaggttgacttggaagactatgtggcccggccagataagatttcaggagctgatattaactncatctgtcaggagagtggaatgttggctgnccgtgaaaaccgctacattgcctgccaaggacttcgagaaagcatacaagactgtcatcnagaaggactancangancattgagttttacaagtgacccttccttnccttcaccacaaccacntaggggctggggctttgtntngcacccncancacctctntcccaaaaa

SEQ ID NO: 3097 - DNA, 662 bp, Homo sapiens
accaccaatcaatgccaggaagagagtaaatgcacttagactcatttttggcaaatggtttgaatccttactgtcttgacactgctttcgttaattcttaaagcagatgcactatggacaagaatccaccaatatatgctgtgaactctgtcaggacccccgcgtacttggcagtcaccccagactatgtccctcctcttggaaactttgatgtggaaactttagatataacacctcatactgttactgctatttcagcaaaaatcagaaagaaaggaaaaatagaaaggaaacaaaaaacagatggcagcaagacatcctcctctgacacactttcagaagagaaaaattcagaatgtgaccctacgccatctcatagaggccagctaaacaaggagttcacagggaaggaagaaaagacatcattgttactacataattcccatgcttttttccgagagctggacattgaggtcttctctattctacattgtggacttgtgacgaagttcatcttagatactgaaatgccactgaagctacagaagttgtgcacttggaccccctgagctgcttttcttgctggaagatctctccagagctggagagtatgctgaacctcctattgccaggagagtccctttctcaagaacaaaggaagc

SEQ ID NO: 3098 - DNA, 507 bp, Homo sapiens
  misc_feature 250, 342, 352, 356, 362, 384, 406, 424, 428, 449, 463: n = A,T,C or G
accttaacagctctgaaagcttcttccgattttgagagtcttcgtgtattccaagctttatgtttttagagaactgctcatagaatttcttgtagttctctttatcttccgccagttcagtaaagagttctaagcattttttgaccaaattcttcctgataactttcaaaattttgctttggtgcaacatctcacgggatatgtttagagggagatcctccgagtctaccacccctctaatgaagttcanatattcagggattagctcctcacagttatccatgatgaaaactctgcgtactgtgccaatgtcctttcttttttttttttttttccttgganacagagtttntctnttgtcncccaggctggagtgcaatggcncaatctcggctactgcaacctncacctcctgggttcaagngatnctcctgcctcagcctcccaangtgctgggattacnggcgcgagccaccatgcccggccagtgtcctttcttatacacgt

SEQ ID NO: 3099 - DNA, 389 bp, Homo sapiens
acgcgggtagcattgaacttctaaatacaagatttgcttttgaacagcagagtgattacaagtgagtctcatctgttcattagaagaccattcagaagttctgtgtcacttgtaatctttttgcatttggaagttaatatggatgcatttcttgtttttgtttttgtttttgtttttgtttttgtttttttgagacggagtctcactccagcctgggcgacagagtgagactctgtctctaaaaagaaaaaagacaggtgaattttatggtatgtgaattataactccatagaaataaaaaagtgacaaaaccaaaataacttgccagccttctggttagaaataacttctttgggccgggcacggtggcacacgcctgtaatcccagt

SEQ ID NO: 3100 - DNA, 665 bp, Homo sapiens
  misc_feature 50, 83, 98, 644: n = A,T,C or G
acacagatatttacatttattatccctttatatatacgtttatgtatttntgtagtatgaaatacttcattaaaaaaaagagngaaaatgtaagactncaaaaatgaagactaccatttatgtataacaataaaattagtgtaaaaaagtatacaaagaaaatgttcaattctttatctttccgtgctctatataatcagtattaatctaaagaccataatcctagtatgaaaaaaataacaagctttgacacaaaatctaagcatctgctttcctggcactcttaagttagacaagagtaaatatgttagcctctcaattctgcctcttcatctttcatctatacttagatttttctttatctttggacttctttggacttctgcttcggtctctctttttactcctttctctttcataaagatctgtttggtattttgatttatgactattactataatggccatccctctctcgagatcggctacgacttcggttctgagttcggtctctcttttcactcttttgtttctcccaacagctttcttcttcttcatagtgaccaaaccccatttctctatagatatcctgattagtatttttgattggcatgtaagcctcatcttctttctcttcagaacagngatgggttttcttcttgggtt

SEQ ID NO: 3101 - DNA, 665 bp, Homo sapiens
  misc_feature 130, 208, 333, 484, 604, 621: n = A,T,C or G
gtaccgctgagggaaaggagcgggactccggacctccaggagtgcaaggatgatgctgaaaggaataacaaggcttatctctaggatccataagttggaccctgggcgttttttacacatggggacccangctcgccaaagcattgctgctcacctagataaccaggttccagttgagagtccgagagctatttcccgcaccaatganaatgacccggccaagcatggggatcagcacgagggtcagcactacaacatctccccccaggatttggagactgtatttccccatggccttcctcctcgctttgtgatgcaggtgaagacattcantgaagcttgcctgatggtaaggaaaccagccctagaacttctgcattacctgaaaaacaccagttttgcttatccagctatacgatatcttctgtatggagagaagggaacaggaaaaaccctaagtctttgccatgttattcatttctgngcaaaacaggactggctgatactacatattccagatgctcatctttgggtgaaaaattgtcgggatcttctgcagtccagctacaacaaacagcgctttgatcaacctttagaggcttcnacctgctgaagaatttnaaaactacaaatgagcgcttcctgaaccagataaaagttcaaga

SEQ ID NO: 3102 - DNA, 662 bp, Homo sapiens
  misc_feature 545, 647: n = A,T,C or G
acgcggggacagacgagatctcgatcgaaggcgagatggcggacgtgctagatcttcacgaggctgggggcgaagatttcgccatggatgaggatggggacgagagcattcacaaactgaaagaaaaagcgaagaaacggaagggtcgcggctttggctccgaagaggggtcccgagcgcggatgcgtgaggattatgacagcgtggagcaggatggcgatgaacccggaccacaacgctctgttgaaggctggattctctttgtaactggagtccatgaggaagccaccgaagaagacatacacgacaaattcgcagaatatggggaaattaaaaacattcatctcaacctcgacaggcgaacaggatatctgaaggggtatactctagttgaatatgaaacatacaaggaagcccaggctgctatggagggactcaatggccaggatttgatgggacagcccatcagccgttgactggtgttttgttcggggtccaccaaaaggcaagaggagaggtggcccgaagacgcagcaaaagtccanaccggagacgtcgctgcaggtcctctgttgtccaggtgttctcttcaagattccatttgccatgcagccttggacaaataggactggggtggaacttgctgngtttatatttaatct

SEQ ID NO: 3103 - DNA, 456 bp, Homo sapiens
  misc_feature 127: n = A,T,C or G
acacaatgggttttggttcttcaaaattgctgcccttattggaatcatggttggctctttctacatccctgggggctatttcagctcagtctggtttgttgttggcatgataggggccgccctcttnatcctcattcagctggtgctgctggtagattttgctcattcttggaatgaatcatgggtaaatcgaatggaagaaggaaacccaaggttgtggtatgctgctttactgtctttcacaagcgccttttatatcctgtcaatcatctgtgtcgggctgctctatacatattacaccaaaccagatggctgcacagaaaacaagttcttcatcagtattaacctgatcctttgcgttgtggcttctattatatcgatccacccaaaaattcaggaacaccaagcctcgctccggcctcttgcagtcctccctcatcaccctctacactatgt

SEQ ID NO: 3104 - DNA, 665 bp, Homo sapiens
  misc_feature 643: n = A,T,C or G
acagacatgttgcaaactgacttttaaaacaattttttaaaatatatacaaactttttttcttctattcttctcaaaggcatttgaaagggatacttttatgaatattcttgctgtagaacaatgtagaaataacttctgggtataaaacagtaaaaataaaaatattctacctgagtgtgttaaatcaagtgatttgtaaaacaaaaccttcacaagtgtgggctttctacatgtaacttgccaggctgaaggcttacaccctcatgttctacaacacagatcactaatgatgataacatgagttaaattgggattcttgcccttctgtgtggcttttggcttctaggttctatgaccaaactattgacatatttgaagtctgtatgcagtcattgtgtgataaatctactttacagctttgcttctacctgcagcttacatgataaccatgctgtgaagtgctacatatgcttcatacaatatgttgccccatctgataataaaaatacaaaggtgctctttaagctaaaccataaaccttattagagaattctagttaagtgttttgtttttcccatacatgtaaataccttaagatcaataggatcaataagggataatattaagttatcaaaatttantcttcatacttggaagaatttg

SEQ ID NO: 3105 - DNA, 598 bp, Homo sapiens
  misc_feature 4, 25, 83, 124, 139, 152, 158, 196, 228, 278, 279, 290, 291,342, 347, 350, 352, 379, 414, 423, 449, 456, 460, 508, 518,527, 539, 543, 558, 559, 562, 583: n = A,T,C or G
acanccagtgtggggatgtgatganggccctgggccagaaccctaccaacgccgaggtgctcaaggtcctggggaaccccaanagtgatgagatgaatgtgaaggtgctggactttgagcactntctgcccatgctgcngacagtggccaanaacaangaccagggcacctatgaggattatgtcgaaggacttcnggtgtttgacaaggaaggaaatggcaccgtcntgggtgctgaaatccggcatgttcttgtcacactgggtgagaagatgacnnaggaagaagtnnagatgctggtggcagggcatgaggacagcaatggttgtatcaactatgaanagctngtncncatggtgctgaatggctgaggaccttnccaagtctccccagagtccgtgcctttccctgtgngaattttgnatctagcctaaagtttccctaggctntcttgtntcancaactttcccatcttgtctctcttggatgatgtttgccgtcaacattnaccaaataancttgctctntgggcaaccatnactncatggaaaaaattgnngtncctgcccgggctggccgcttnaaagggcaaattcaa

SEQ ID NO: 3106 - DNA, 532 bp, Homo sapiens
acgcggggagtcagacccagtcaggacacagcatggacatgagggtccccgctcagctcctggggctcctgctgctctggctcccaggtgccaaatgtgacatccagatgacccagtctccttccaccctgtctgcatctgtaggagacagagtcaccatcacttgccgggccagtcagagtattattagctggttggcctggtatcagcagaagccagggaaagcccctaaactcctgatctataaggcgtctaatttagaaactggggtcccatcaaggttcatcggcagtggctctgggacagaattcactctcaccatcagcagcctgcagcctgatgattttgcaacttattactgccaacagttttatctttattcgacgttcggccaagggaccaaggtggaaatcaaacgaactgtgactgcaccatctgtcttcatcttcccgccatctgatgagcagttgaaatctggaactgcctctgttgtgtgcctgctgaataacttctatcccagagaggccaaagt

SEQ ID NO: 3107 - DNA, 509 bp, Homo sapiens
acacctttccagtttcgagcttcttctccagttgaagagctgcttactatggaagatgaaggaaattctgacatgttagtggtgaccacaaaagcaggccttcttgagttgaaaattgagaaaaccatgaaagaaaaagaagaactgttaaagttaattgccgttctggaaaaagaaacagcacaacttcgagaacaagttgggagaatggaaagagaacttaaccatgagaaagaaagatgtgaccaactgcaagcagaacaaaagggtcttactgaagtaacacaaagcttaaaaatggaaaatgaagagtttaagaagaggttcagtgatgctacatccaaagcccatcagcttgaggaagatattgtgtcagtaacacataaagcaattgaaaaagaaaccgaattagacagtttaaaggacaaactcaagaaggcacaacatgaaagagaacaacttgaatgtcagttgaagacagagaaggatgaaaaggaactttataaggt

SEQ ID NO: 3108 - DNA, 481 bp, Homo sapiens
  misc_feature 473: n = A,T,C or G
acgcgggggagtttcatgttatgcctgttgcaggcaaatgtaaagtctagaaaataatgcaaatgtcacggctactctatatacttttgcttggttcattttttttcccttttagttaagcatgactttagatgggaagcctgtgtatcgtggagaaacaagagaccaactttttcattccctgcccccaatttcccagactagatttcaagctaattttctttttctgaagcctctaacaaatgatctagttcagaaggaagcaaaatcccttaatctatgtgcaccgttgggaccaatgccttaattaaagaatttaaaaaagttgtaatagagaatatttttggcattcctctaatgttgtgtgttttttttttgtgtgctggagggaggggatttaattttaattttaaaatgtttaggaaatttatacaaagaaactttttaataaagtatattgaaagttttaaaanaaaaaaaa

SEQ ID NO: 3109 - DNA, 662 bp, Homo sapiens
acaacatgacttaaaactttttttttttctattaaaacttaaaggggaacaaaacttgaaaaagccctgttcttcagaaggtgagtgggttgagggaggcagtaatatgaagtgactgctgtgtattttaactaccagattttttatatttgccactgttaaatagttggaaaggggaaattctgattaagcgaaagtggtatcatcctaggtaagcttatttcagaacaagtctaatatttcagattctttcttttcgactttatactctgagttattacttactgtaagtggtgtatatgaaacctccatgcattttccagtatggatctgctaatatgcacagtaaatccatgtctttgtttgtttttctattaaaaagcaatcaagaaagataatgtgaaaaagaaaggaatttagaggtagggaaaagatgaatgtcagacatttgaagaactatagtaaaatgataaacactaaatatacttgagaaaactttcttaatatgccaatgaggtaggcctgatctttgaaatagtgaataggaatacaatgcatttcctcagtgatcactgattagaatgagttgggtgggaccttgggaagccaaacggagcggagttctggatcatgtcccatccagtccagtgaatccacgaccc

SEQ ID NO: 3110 - DNA, 505 bp, Homo sapiens
caagtggcagcgctggtgctcccaggattaccgcctaattcatcataaatatgtttccactgacggcgggctgctattgtttcatatcctcccagtttttgagcagcttgaaacatagtccaaaggttaatctgtttaaaacctaaatagggtattcgttctatcggcgttttcctttctttcatgtatttataaagtgccaccaagaaggcttgttcatctgccctgcactcttcaccaatggcaacctttggtttttcttcatttgagacttttttacagttatggttattcttcggcttggtcaaggctgacctgcctcacatttcaccttggcaacggctttgccatcggaattgttgttggaatccttaacaccactgaatgaatctcttctttgtgggcatggtttctttttgcgtggtctgcctttaagatttggcgcaaactcatcgcatatactctcgttttctatgaagtcgggtggcaaaggtgtcccgacagt

SEQ ID NO: 3111 - DNA, 490 bp, Homo sapiens
actgcacaccaggaaggccaagacaaacacaaatcaaggaatgaagttttcccaaagctgcagtgtgaaaagactataaacagttgattccatacacatgaatgggtttctttgctataggaaatccaagtggaataaggaatggagatgtgtaaaaaggtttcttgaaggaaagaaggatgacaccctgtatggatttagttttcagccccttctgccgcatcacattcttctcctgcactgtctgatgtccaaagtgttaggttgtctctaagcaactgcatgatgagggtgctgtctttgtatgagtcttcattcagtgtatcaagttcagcaatggcctcatcaaaagccgttttagccagcgtgcaggcaagctctgggttattaagaatctcatagtaaaatacagaaaagttaagagcaagccccaggcggattgggtgtgtgggttgcatctctttcttgcttatatcaaatgcccccgcgt

SEQ ID NO: 3112 - DNA, 366 bp, Homo sapiens
acttttttttttttttttttttttggagtttttagtttattaatgttcttgcgaaaaatacacagtggccacagctaacctttactccttcggctgtgatccaatctccagctcacttctttttgccagcaccaacattggcctttgcagtccccctgactttcttcattctgttcttgcgttcctttcgttgctttcttgaggtctttttcttctcatacaggccatgtcttgcaagtctatgtttgggttcatttttctttgcataatccagggaatcataaatcatgccaaagccagttgtcttgccaccaccaaaatgagttctgaatccaaatacaaagatgacatccggtgtggtcttgt

SEQ ID NO: 3113 - DNA, 660 bp, Homo sapiens
  misc_feature 622, 639, 651, 655, 657: n = A,T,C or G
accataaggagacacaagaagaaaggtgacactaaggctacagtgcacagaaaacagaccaggtgtggcttcgactgtgcggacctgcccactagcctatgctacagatttgaaatgtctttcactttgacatgacacacggtttatattacacaaaatgaatgaaacgacaatggctaaaaataaatgagacagcctgcacacaaaaagatgatgactgctactttcctcccatcagaaaattactcaaaaagggagtatttaaaggaaactcaaatggagaacccggtaggcatcagaggttcagggcaccaaggccttagggcgggaacacttttcaacccaagccaggcttcaggggcaagcccaccaacagaccccaatttccacaggggaggcagatcttctatacctacagtgacagaaaatacactaaagtgcagtataaaatataaaaaggtttgattctgaatagaccaactgctaattttccttaaaaaaatttttaatttggttgagtaaaaaccaaattagttcactgaatctcattttgtaggtaagagtcttatttgcaatacgaaaactggagcttatggctgttttgattttctctgtagcacangataaccagtattagtnggagaacctacnaaangnggc

SEQ ID NO: 3114 - DNA, 663 bp, Homo sapiens
  misc_feature 558, 626: n = A,T,C or G
acttgtgcctagtttttcaaggtattggctgttctatagatgcagtgattgtcccagctagctctgttaccagccttttggtgtgtctttatgttcatttggagagtcagggcgaaagacaggtgatgtagcacttctgtttttaataattattgcttaaaatacctattaatagttttgggtcatttaaagggacttgaggaagctacccaggattacagaagagtgtccacctaacaagatggtctggcagtttcctagttttgtatctggttcaatagaaatatgtgaaagtggtaatgtcatcatttgatgcagagtccgggtttctctataataaatccctttgccaaatgcatgagttgcagacttgctactggcaagagtgaagcaagtgggtgagtaaaactattttgacgtgggagccgttttcagataggagtttagtcttgacgaaagtgtccgtgcaggaattggactccgaggagggttacaagtatctcctgacgggacctgccctcgcatctgggcaatgttgacatttgaggtggcaagcangatgcctgccttctaatatatttgggtgagtaactgagccaccaagggaaggtgaatgattaaatcanaaatgggatcttggtaaactgaaaactttatttggaa

SEQ ID NO: 3115 - DNA, 663 bp, Homo sapiens
  misc_feature 651: n = A,T,C or G
acagagtcgcatccattctttttgaacaacatgtagcatgtctgcaacagtggatgattcacaaaccatatacagtccccataatcctgtatctgtgtaggaagtgttgaaagactgaaagctatggcaaagattgccatgacaagtgagctgggccagcttgctagataaattcattcctcccccaaaagagcgatcccagttgccaatcagcgtgtttgcaaccatgagacagattgtatctggatgtgcccaaccaacagcttcaacagctattgcaaggtgcgccaaaggcatcttgtcatccctcacacgaatctcacttcctgtgaatttgcagggaggcagagctggtatttctcctttgtgtgtgcataaagagtcaccgaaatgaaactttgctaagtcaagcaattcatcatgggaaacacctccagcagcagcaagcactgttcttggccccttataatgtgtggttatataatccactaagtccttacgacttatagatttgatattttcagtttggtcccaaaattgccgtccaagtgcagtattttgataagctgtggcatgaagataatcaaaaacaacttcttgtaaattggtttcaacttcctgcatctctctaaggattacttcacctcacgnttcattctctgc

SEQ ID NO: 3116 - DNA, 630 bp, Homo sapiens
  misc_feature 21: n = A,T,C or G
acgcggggaggcattgaggcngccagcgcaggggcttctgctgagggggcaggcggagcttgaggaaaccgcagataagtttttttctctttgaaagatagagattaatacaactacttaaaaaatatagtcaataggttactaagatattgcttagcgttaagtttttaacgtaattttaatagcttaagattttaagagaaaatatgaagacttagaagagtagcatgaggaaggaaaagataaaaggtttctaaaacatgacggaggttgagatgaagcttcttcatggagtaaaaaatgtatttaaaagaaaattgagagaaaggactacagagccccgaattaataccaatagaagggcaatgcttttagattaaaatgaaggtgacttaaacagcttaaagtttagtttaaaagttgtaggtgattaaaataatttgaaggcgatcttttaaaaagagattaaacccgaaggtgattaaaagaccttgaaatccatgacgcagggagaattgcgtcatttaaagcctagttaacgcatttactaaacgcagacgaaaatggaaagattaattgggagtggtaggatgaaacaatttggagaagatagaagtttgaagtgaaaaa

SEQ ID NO: 3117 - DNA, 536 bp, Homo sapiens
  misc_feature 23: n = A,T,C or G
acacacaggaccgcctggggttnaaggaaatggacaatgcaggacagctagtgtttctggctacagaaggggaccatcttcagttgtctgaagaatggttttatgcccacatcataccattccttggatgaaacccgtatagttcacaatagagctcagggagcccctaactcttccaaaccacatgggagacagtttccttcatgcccaagcctgagctcagatccagcttgcaactaatccttctatcatctaacatgccctacttggaaagatctaagatctgaatcttatcctttgccatcttctgttaccatatggtgttgaatgcaagtttaattaccatggagattgttttacaaacttttgatgtggtcaagttcagttttagaaaagggagtctgttccagatcagtgccagaactgtgcccaggcccaaaggagacaactaactaaagtagtgagatagattctaagggcaaacatttttccaagtcttgccatatttcaagcaaagaggtgcccaggcctgaggt

SEQ ID NO: 3118 - DNA, 663 bp, Homo sapiens
  misc_feature 470, 494, 582, 604, 608, 611, 641, 645, 657: n = A,T,C or G
acgcgggggggacaagatggtttacatctcgaacggacaagtgttggacagccggagtcagtctccatggagattatctttgataacagatttcttctggggaatagctgagtttgtggttttgtttttcaaaactctgcttcagcaagatgtgaaaaaaagaagaagctatggaaactcatctgattccagatatgatgatggaagagggccaccaggaaaccctccccgaagaatgggtagaatcaatcatctgcgtggccctagtccccctccaatggctggtggatgaggaaggtaaatgtctgctctaagaagcagacaaccggacatgcgcattcatagcagaaggaaaccatcaagaagtggaaggctgaccatgatgagcagtagatgaatgtgtatgtctaaacaaggactgctctgtgtcctccagatgaatgaggtcatgctggggaatccctctgcanggaactgcctgactgacatgcagntccttaatgcagatgtttgctcattaccctttgtatagtttattaaagtattaatatagttttaataagtaaatatttttaggttgcnaaaatggactcctatttttatnttcnccnaaaaagccatttgaagaaaccaaataaagnctgngttttttaaaanaaaaaa

SEQ ID NO: 3119 - DNA, 472 bp, Homo sapiens
  misc_feature 28, 206, 253, 282, 287, 292, 391: n = A,T,C or G
actttttttttttttttttttttttttnggtaacttaatggatcatcaattttgtctcactacctacaaatggaatttcatcttgtttccatgctgagtagtgaaacagtgacaaagctaatcataataacctacatcaaaagagaactaagctaacactgctcactttctttttaacaggcaaaatataaatatatgcactctanaatgcacaatggtttagtcactaaaaaattcaaatgggatcttgaanaatgtatgcaaatccagggtgcagtgaanatganctganatgctgtgcaactgtttaagggttcctggcactgcatctcttggccactagctgaatcttgacatggaaggttttagctaatgccaagtggagatgcanaaaatgctaagttgacttaggggctgtgcacaggaactaaaaggcaggaaagtacctgcccggcggccgtcgaaaagggcg

SEQ ID NO: 3120 - DNA, 664 bp, Homo sapiens
  misc_feature 158, 239, 334, 349, 357, 370, 408, 422, 423, 462, 474, 501,505, 511, 513, 537, 541, 547, 587, 591, 592, 594, 602, 611,613, 618, 621, 632, 649, 653, 657: n = A,T,C or G
acttttgatctcaaatacttttgtgaattgcgccccggattgattggatgggtggttattaacttggtgatgcttttggctgaaatgaaaatacaggaccgcgctgttccatccttggccatgattttagttaatagtttccagcttctctatgtggnggatgctctctggaatgaggaagcgttgttgacgaccatggacatcatccacgatggatttggattcatgctggcttttgnaacttggtgtgggttccctttattacagcttccaagccttttatttagtcagtcatccaaatgaagtgtcttggccaatggcttctctaattatngttctgaacctttgnggttatgnaatcttccgaggngcaaatctcagaaaaatgcgttccggaaaaatcccagngatccaaagctgcnnattaaaaaacctttcttacttcaccgggaaaaaatctcntagtttctgganggggggctttgtccccccccaatactngggngacccnanaatggccttgggggggcccctccnatgnggtttnacccatctgccttattttacataaattaattcccatgtgncttnncncccgaaanctcggacananacctnccngggcggccttnaaaagggcaaaatccanccanttgnggccgtt

SEQ ID NO: 3121 - DNA, 661 bp, Homo sapiens
  misc_feature 289, 303, 318, 363, 393, 413, 441, 454, 467, 469, 488, 498,499, 507, 511, 519, 527, 540, 546, 553, 554, 555, 559, 567,577, 578, 594, 599, 603, 604, 608, 616, 634, 642: n = A,T,C or G
acgcgggggggcaggcggagcttgaggaaaccgcagataagtttttttctctttgaaagatagagattaatacaactacttaaaaaatatagtcaataggttactaagatattgcttagcgttaagtttttaacgtaattttaatagcttaagattttaagagaaaatatgaagacttagaagagtagcatgaggaaggaaaagataaaaggtttctaaaacatgacggaggttgagatgaagcttcttcatggagtaaaaaaatgtatttaaaagaaaaattgagagnaagggactccaganccccgatttattccnattagaaggccatgcttttaaaattaaatggaagggacttaaacnaggttaaaggttaatttaaaaggtttaagngaataaaattatttgaaagncaactttttaaaagaaaattaacccgangggattaaaaaancttggaattcctngnccaaggggaattggcttantttaaggctnnttaccccnttcntaaccccnccaaaatnggaagaataattnggaggnggtgggnnnaacnattttganaaaaataaannttggaaaggggaaacnggganaaannaatncttcggcnggaacccccttaagggcnatttcccncacctggcggccgttctta

SEQ ID NO: 3122 - DNA, 662 bp, Homo sapiens
  misc_feature 271, 298, 305, 333, 347, 369, 371, 394, 398, 422, 429, 438,478, 492, 498, 501, 504, 506, 534, 550, 566, 572, 582, 586,588, 596, 600, 623, 626, 630, 636, 640, 647, 659: n = A,T,C or G
acaaaccacggatcttgtgtcagaaacacatgttgagactcctccattccttccagaattttcagagatgaggtagacccacctcaatcatcctcagcatcagtttgctaaattgccaggctcaatgacagctctcctggcattcttccaacccactttttattagttccgcttctggctttggctgcagcactttaggcactattctaagtcctggagtatatcactcttgcttcagagcttaataaacattaatgaacacccttactcnaacaagtcactggatagctgccattgnaagttanatacttaagaaatgaaagaaggaagccntttaagggctttanagtaaccatacctagtcaagangnggccagaccaagacacgaacttntttnccttaaagacccaataatttctgnattaaanaactcctancttgggccaagcaactgaattcaagagtgagaggtgatanttaaacatgggagntgggcncanaantnatgccacaatccaacctttgggggggcnaaggcaaaaggttggntgggggccagaatttnaaacancttgggccanaaancnagaacccntttngactggcccggcgggccggttcnaanggcnaattcnaccnctggggnccggttcctaanggt

SEQ ID NO: 3123 - DNA, 474 bp, Homo sapiens
  misc_feature 236, 240, 244, 250, 263, 280, 289, 296, 304, 310, 316, 317,319, 325, 329, 336, 337, 344, 347, 348, 350, 362, 375, 382,405, 417, 421, 422, 448, 451, 465, 468: n = A,T,C or G
acatattttggttgaagacaccagactgaagtaaacagctgtgcatccaatttattatagttttgtaagtaacaatatgtaatcaaacttctaggtgacttgagagtggaacctcctatatcattatttagcaccgtttgtgacagtaaccatttcagtgtattggttattataccacttatatcaacttatttttcccaaggtaaaaatttaatttctaccaaataacattctgnatcnagcncactgnatgttcagtaggntgaactatgaacactgncatcaatgntcaattnaaaagccngaaagnttaaanntnaaagcntggnaaaatgnncatttcnatnncntttagggaaccnttggtggcttccntaatccntttaacactttttaaaataagcncccccaggtatntgannaatataacctgaaaattttttattcnganggggtgggggaganacncttggg

SEQ ID NO: 3124 - DNA, 661 bp, Homo sapiens
  misc_feature 253, 273, 280, 285, 306, 317, 328, 332, 343, 346, 357, 381,386, 389, 393, 412, 413, 420, 429, 435, 464, 473, 499, 505,509, 522, 531, 532, 533, 535, 537, 542, 549, 551, 557, 561,563, 566, 570, 581, 586, 587, 589, 597, 598, 610, 619: n = A,T,C or G
  misc_feature 621, 638, 643, 646, 652, 654, 657, 658: n = A,T,C or G
acctattctttgcagtctcaggaattgttgacatgctcacctatctggtcagccacgttcccttgggggtggacagactggttatggctgtggcagtactcatggaaggtttcctcttctactaccacgtccacaatcggcctccgctggaccagcacatccactcactcctgctgtatgctctgttcggagggtggtgttagtatctccctagaggtgatcttccggacaacattgtgctggaacttttccnaaccaatctcatcattcttnaaggaanctggntcttggcaaaatggggtttgngctgttcccancttttggaacncccnaatgggaccanaangattatccaanctcatgttcattaccatgtgcttntggtngcnctanctggctgcctcaaaatttnngcccgcnactattctnttgttncctgcctttgactcggatgaaaaaaaccngaagggganaaatcattggaattcaaaaactgaantcaaangaancttaccaaaaccnccctttgannngntnaaaanaagaatnanacccanatangnganggcncaaatatcccncttcnnancttggaannaaatgggagttntcccctccncngaaagccctctgggggntaaanttnagggcnantannttt

SEQ ID NO: 3125 - DNA, 662 bp, Homo sapiens
  misc_feature 273, 302, 346, 382, 394, 397, 430, 465, 479, 481, 482, 508,509, 524, 543, 549, 566, 571, 577, 585, 588, 589, 603, 615,650, 660: n = A,T,C or G
acaaccatagaaaacatcgagattactattaagtctccagagaaaatcgaagaagtcctgtcacctgaaggctccccttcaaaatcgccatccaagaaaaagaagaaattccgcactccttcttttctgaaaaaggaccaaaaaaaagggagaaagttggggcctaaataaagctttttataattattattataacaatgtgacattgcacatctaaataccacatttaagttgatcattaatatgcaatggtagatcagattgggggatgtngcaaactggactttaagaactggaaagangttttacaaaaagaaaaactttcagattcatctctcattttatntgtccagaaatggctttgaattttaagcaattactnagttttaattanctntgccctcatgaagttttattataattcaccatnaacagctttctgtgtgaattacttcaggccttctncataatattttgtntnnaaagaaattgcccgtgagcaagtgannaatttttatttctcnaatacccgcttcacctgantaaacntattataatttttatcngattntttgcnatattttnggnnccccttgtttcagnggggcctttaanagaaagctttaaaactttttaaacaagaattttancctttagttncc

SEQ ID NO: 3126 - DNA, 453 bp, Homo sapiens
  misc_feature 203, 210, 278, 324, 336, 366, 373, 383, 406, 418, 435: n = A,T,C or G
acaggattcactaactgtttcgaatgaagcccaaactgccaaggagtttattaaaatcatagagaatgcagaaaatgagtatcagacagcaattagtgaaaactatcaaacaatgtcagataccacattcaaggccttgcgccggcagcttccatttacccgcaccaaaatcgactggaacaagatactcagctccaagaatngccaaanaatgcaaatgctaaaaggctgatgtaggattcttcaatatgtggaaagacaaggattcaacgtgtggncatatgataaataagtgatttataaaccagagtgatattttgcttnggctttcaaagntaaccggttttctagcctcatggaatctgntgaaccnatacggtgcntgattcttttgggttctctgccntgaattttctgntactgctatatctccgngaaaaccttttttccctt

SEQ ID NO: 3127 - DNA, 662 bp, Homo sapiens
  misc_feature 226, 276, 290, 339, 354, 358, 370, 388, 399, 410, 411, 413,418, 420, 426, 428, 432, 436, 444, 453, 459, 463, 469, 470,473, 491, 495, 507, 517, 523, 552, 563, 575, 576, 594, 599,600, 607, 609, 619, 647, 650, 653, 659: n = A,T,C or G
accacatatcccatttgacttctatttgtgtgaaatggcctttccccgggtcaagccagcacctgatgaaacttccttcagtgaggccttgctgaagaggaatcaggacctggctcccaattctgctgaacaggcatctatcctttctctggtgacaaaaataaacaatgtgattgataatctgattgggggctccagggacatttgaaagtgcaaattgaaaaantcgacaggggggatcctattaaaaggggacaatgactccaggacacatgnggctgactggtggngatctcaaaaatctgccacgttggaacctgtgctgccttgggaaccaantcctggaaagctaanaacncaaggatccttnttaaagtttaccatgccnacaacaaactngctttgaaatnnantcttntnattctncnatgnaaanttttattnacagtgccnccaatntttnaaaacnnganccaaaacttcatttggantttnaagtttggaaantgcttaacancattcnaaattccccttggttcaagaaaatggctnttaatcccaantaaagttttatnnaataccggaaggctttgnggatnntttcctngnttgacccctncacctggattcttgactataaggccttntcnttnattaanaac

SEQ ID NO: 3128 - DNA, 503 bp, Homo sapiens
  misc_feature 40, 171, 228, 258, 267, 273, 315, 317, 338, 348, 372, 397,404, 409, 413, 436, 439, 477, 479, 486, 493: n = A,T,C or G
actttttttttttttttttttttttttttggatgaaaaanagcctaaacgcttctgatttgggataaagaaaaaggagcattaaccttgactatgtctttagctccagccacctttttaagagtaaattgctgggcaggtgggggaggctagtcacggaacgaaactgtangccggaccaggtgtgaggaggggaggtgataaaaaattacagggtggaggagtgganctgaggaaaaattgggacctaccttggccntgaaaggangggaanagtcaaatgggttttttaaaaaggaaaattagacccccctcncnacccctggggttgggactgangggacaggtnggaagggaaaagaaaggaaatttnggacaaatttcactggcccaaaaanttagaanggacngatntgaaaaaaatgcctggaccttangcncctaaaacatttcccattttttgaaaaaaattatttangncttgtangatgganaaatccaaag

SEQ ID NO: 3129 - DNA, 434 bp, Homo sapiens
  misc_feature 245, 265, 335, 336, 342, 372, 375, 379, 416: n = A,T,C or G
acttttgtgtatgaggggagacaagtgttaaaaaacaaaacaaaagaaccaaacactgtgacaccatgatctcctaaaaggagattttcttaaggaaaaaaatccatatggtggggttcaaattaaaacaaggggtaaagaatgtagttctaatcaatggtttccgttttgaacatgcaaagaattcacttgacaaggtccagggataaaatattcaggagaaaccttttgatatcaaattgtantgtgttggtttaccaatcangcaaacagcagttcactttcaaccactcaatatttcaacctttctgtacaaaacttataaaattcccttnnctcttnctttttctaaagaaaaatgtcaaaaatctngtnaatntactccacctgaacaaaccaatttttgaaaattcttnatacctgcccggcgggcg

SEQ ID NO: 3130 - DNA, 617 bp, Homo sapiens
  misc_feature 266, 281, 325, 373, 460, 462, 471, 506, 511, 535, 544, 548,558, 565, 570, 571, 590, 593, 596, 601: n = A,T,C or G
acacgttcttgttgtctggctcggcaacaaacaccacttcctggccagtcttctggttatggagtcggacaaatgtctggtgaggagtgagttcagcaccagtgttcacatctaccagctggaagaacaaggcgaagttctggtggctgtctgcgatgaatgtgcccttggctttgctgggtatgtcacccgggtaagttttgggtgcaatgctctgatcttatcacggtggaaagatcaacatttgtgatgcaacttcaatgganatctttgactctganctctacggtatttgcaatataccggttgtcaccttcaacttcancaggaagtcataataaccactggaaaatttgacgttcatgaaatttanttcaaaaacatccctacagggtgaaaggatgtcttctggaagacagtggctctggaaacaacaaatttaacatgtctaatttaacantngccctaatnaaaagctgaaaaaaaacatttgttaacttgcaccncaaantacccttttattaatgttcgaaancaaaccctnagcncaaccacaanttgcacntggtnncgattattccaagacccancanctnaaaanccacccttaaagcttt

SEQ ID NO: 3131 - DNA, 662 bp, Homo sapiens
  misc_feature 263, 492, 501, 598, 607, 625: n = A,T,C or G
actggttcttaaacagcccataaaaacccattggcctgaagcttatatctcaggcctatgcccatcttatagtcttggaagacaaaaggctggtagagacagtcttcagtggcttcagtgatgctctgtagaggccagggtgtcttgagtgctgtaactcccaagcactgggctagcctgacttctgtatctccctaccccacccccttaaaaaataagggtaacagccaatctatagtaaaaccatgtcttgcatagaacgnggtcaaaatcctctgttttcattaaatgtaaaaagatgctgtctccattaagttgaatattttggaattgggagaagccatttgattattattttgagtttctgtaatgtttttattagaaaagtaagatgcttattcaaatttaagaatgaaggcaactgaaatatgcattgttgtagttatttatatttcaaactaaaataagcaaaaaaaaaaggcttggtttganaaaaatcanggttaaatttgatgaaaccgatggtggggttctctttccatcatctggtttttacccatttcactcaataggtatttttagaaccacttattttgangaaagaaanatctatgcacaattttanattttataaaggaacaaattggggaaaacttgaaact

SEQ ID NO: 3132 - DNA, 662 bp, Homo sapiens
  misc_feature 31, 257, 268, 280, 311, 357, 364, 379, 405, 417, 448, 457,469, 473, 483, 491, 493, 498, 512, 541, 547, 563, 584, 586,592, 596, 619, 620, 625: n = A,T,C or G
acttttttttttttttttttttttttttttnagggctgaccatttattgggacttgactgaccagggcttgtaaggatggacacaaaacttcaagtctttcgtaatgaaaggattgattcaaaataaatattctaaaaattatgtcaaacactaatgaataagtgacatttacaaatagtttataagagaatcatttgggtgaaacaattttcatttcacaaaaataaaatagctcatatccaaaaaaagacccctntccttaaccangggaaaaaaaancccacaaaaataaagcatgccccgggcacanccctatgttagttttagggggggaaacccccacccctggaaacttncaaaagntttggggagaatttnattgtttttaatttggcctaaacccnggggggagtcangggaaagaaacagcttggttttttaaaaaangtttaattnaaaactttcccnttanaaccaaattntccttttntnttaanaaaacccattaacnccccccaacctttctttttaaggtttcancaaatntttttttcaaattatnccactggccccccaaatccancngccacnttgncattaaggggccaccaggtccanntggcnttctccctggccccctttggtgctttcaaacccatta

SEQ ID NO: 3133 - DNA, 509 bp, Homo sapiens
  misc_feature 262, 308, 328, 339, 348, 371, 389, 395, 404, 407, 417, 425,486, 497, 503: n = A,T,C or G
acttttttttttttttttttttgggaatgcaacaactttattgaaaggaaagtgcaatgaaatttgttgaaaccttaaaaggggaaacttagacaccccccctcaagcgcaggaccaagtgcagagtggactctttctggatgttgtagtcagacagggtgcgtccatcttccactgtttcccagaaagatcacctctgctgatcaggagggatgccttccttatcttggatctttgcttgacattctcgatggtgtcactnggctccacctcgagggtgatggtcttaccagtcaggggccttcacnaaaactgatccacctctganacggagcacangtgcagggnggactttttggatgttgaagcanaaaggggccttcattttncacttntttccaacnaanataacctttngttgtcangaaggatccctccctgcttggatctttgccttgacattctcaatgggggcacctcggtccncttcgaaaagngatggncttaac

SEQ ID NO: 3134 - DNA, 660 bp, Homo sapiens
  misc_feature 122, 289, 326, 335, 337, 380, 385, 389, 402, 424, 429, 480,487, 491, 493, 526, 527, 529, 537, 538, 554, 557, 558, 575,576, 578, 590, 601, 610, 612, 626, 636, 650, 652, 653, 654: n = A,T,C or G
accaggtcccccttcaccatcctgggagaaggatggaggacagaggaaagggagatgcagccagttcagatcttcccgggaaacgtgccttcacccgttgctcatcccagtctgtgacccangatgtggggcagagggactggtacccatgcacagcagctgtggggtgtgggcatcttcaggtggtgttctggtaaaatcgttaaaatagctgtatgaaggaaaccagtgggaggaaatgaagttttcaggatggtgggatgtgatttaacagtgcacatgctgttanggcttgtacttgggagtggccttatgggagggtggtnacagccctnantcccagccaaaatgtttaaaaaactcagtctttggtcccaaangaatngttnttaagggattgcncaagtttaaaggcccttcttgnaaaanaaatgaaaaaacttgccctttttcaaaaactcttttgctttgggagggtcncaaagcncgantntaaaaaaccttggttttattttttgcccaattnntnaaaattgnnccccaaaaccctgganttnnggggactttttccccannanattaaaacccanaagttgcccancctttttananttttggggaacaanaaaaaacctntaaccctttggganannntgggtt

SEQ ID NO: 3135 - DNA, 661 bp, Homo sapiens
  misc_feature 213, 261, 384, 389, 420, 428, 520, 523, 567, 594, 598, 610,614, 630, 654: n = A,T,C or G
acgcgggggaccgaccttcagcagggctgtggctaccatgttctctcgcgcgggtgtcgctgggctgtcggcctggaccttgcagccgcaatggattcaagttcgaaatatggcaactttgaaagatatcaccaggagactaaagtccatcaaaaacatccagaaaattaccaagtctatgaaaatggtagccggcagcaaaatatcccgaanctgagagagagctgaaccagctcgaatatattggattgggatcttaanctctgtatgaaaaaactgatatcaaggggcctgaaacaagaagaacacctcttatggtgtgtcctcagatcgaggactgtggtgggctatcatttcttcctttgctaaacagatgaaagcganggttnttaccttaacagcagctgggaaaagaagttntccttgtngaattggtgacaaatcggaggcatctttataggactcattctgaccagtttttggggcttcaaagaagtggaagaaacccccacttttgganatncgcagtcattgccttgaattactaaatctggttttaatttgatnaaggctcatcttctttataaattaagnctgncatctcctttanacanaaaaaacccatttttncttatacccttgcaagtcctgacngcatgat

SEQ ID NO: 3136 - DNA, 662 bp, Homo sapiens
  misc_feature 378, 396, 404, 417, 444, 468, 481, 490, 500, 516, 573, 574,577, 594, 596, 600, 641, 647: n = A,T,C or G
acccattcacctaagaagcagaacttttttcacagcattgtaataggaatggcagggcagagggaaaggaaagtagtgggagaacaacttgcttttaagataccctgggtgacaggtatcaaagccttgggcaaaacctgtcacagtaaagctgtgactctccaacttccttcacaaatgacaatatacataatagcagctttctattaaagaactacatgaactgaaaagaaatgtttatggaaaggggccagatacccaggcagcaaggcaatgagggatactaaacaagagttaagtgcttcaacctctctgctctacagatcagggttaaaacctctaaacccttcaactttaggtcaaagaacagggcaattncaatttatgccttgcttnaaatgcancaaccagatgganctgcaagaaatttaacccctcttatanactttcacttggaagcacagcctnttgacctccttanttacagatncacccattgntcaaagatgtacacanttcaacctcaccaaacaaaaaaagtagtggaggtgccaccaacacaacccttttttnntanaagaagacttgtaaccncncaanagggtgatggacctgccccaacactggattgttcctgaacncattanccctgaaggaacttc

SEQ ID NO: 3137 - DNA, 658 bp, Homo sapiens
  misc_feature 385, 402, 414, 436, 445, 463, 474, 492, 504, 506, 510, 529,537, 544, 560, 625, 636, 651: n = A,T,C or G
accggccaagcctggtccccttcttgttgggcactgtgtatgggcggagaaaatccagcttgttcttgctgatgacgcagaggtcaatgttgcttccggagcccaggtcgttgaagatgccagctgcgatggcttcgctcaccagattcttggcttcctcctcctccatgtctgacctaaacttatcttcaaatacagccattgctgccaagggagccagaacccatggtgacataaggcaacttatcagttgatccatgaagatagatgctgaaaagtgaaggccagtacatctactccccttaaactaggctgcccaatgtaccttgattccctgaaaacatctgctttaacattccattggctggcacaacttttggaaaancggcaatggaaaaggantggacttcaagnttgaaaaaatgaacctggttgncatgtctgngctgcactgtccaccccncaccattaatnttaggaaaatttaaatgnatttttgacaantnttgncaacaacaaccattccatnaattgctnttgtatntgctcaaaaactatgncttccttttaaacaccccacgatggtcctgccaattttccggacctttggaacttggatcccctntttgcaaaatnggtttcaaaaaaggntttctgg

SEQ ID NO: 3138 - DNA, 660 bp, Homo sapiens
  misc_feature 291, 297, 322, 341, 354, 372, 380, 412, 414, 416, 425, 429,432, 433, 452, 493, 510, 516, 517, 527, 530, 541, 572, 595,600, 601, 608, 621, 627, 628, 632: n = A,T,C or G
actgtgtagtggtatcagtgttaaaaatggaagatcattatgaagaaacaatttgtcatttgggtatatctgtttctataggacaaggatttgtgtctaaatattccttacttgtatctcagaggactatctgttaaataattgatcttaatgccagcataagaaatcaaggggaactatttctcaagacatttctttctctaaaattaagtaggggttcagggtccaaggttacattgagaagactatgttacctgggaagaaaatgtaaatttttctaattccccaacnaaaccnctaatttctaagaaacatttattgnttatatgccgatcctaaanacttctatttcantgcggatcaacaacctcnaaaatatncagccttctatttatttacaataatatttacntncnaatgaagtntttnctnnataagccccagctgcatanattcttcctttaaaaacgtaaatttgacctgtttacagatnggcccgtttcatccccntccttnnataaaacctnaanaaagaaaatgngctgcccctgggaactttcatattttgcaanaactttctcttttgagaattaangatannttttaantggtaaccccccnccttanntttngcctcgggcgcgaccccctaagggcgaa

SEQ ID NO: 3139 - DNA, 656 bp, Homo sapiens
  misc_feature 35, 39, 57, 58, 61, 71, 77, 83, 84, 85, 87, 99, 113, 119,120, 122, 125, 127, 140, 142, 158, 166, 169, 175, 176, 179,181, 194, 200, 216, 237, 265, 324, 337, 354, 372, 401, 416,418, 423, 429, 457, 485, 494, 498, 520, 522, 529, 542: n = A,T,C or G
  misc_feature 554, 564, 582, 591, 596, 601, 609, 625, 631: n = A,T,C or G
ccccggggctctcgccaggcgttcctcgtgggaantganattcgtcttttaaccctnnctngcaattcctngccccnccgccnnnantcccaagggaanaacaggggccaacntgaaanncnaantnctttccttaaaancntccaactttgggattnattatccnaantgtttnnttngngggaaccaaacantgtggnctccaagcagatgcancaaatccccattgtcccttcncgggaaggctgtggtgctgatgggcaanaacaccatgatgcccaaggcccttccgagggcccctggaaaacaacccaacttttgganaaactgctgcctnatatcccggggaatgtnggctttgtgttcaccaangaggacctcacttgagatcaagggacatnttgctggccaataangngccanctgctnccgtgctggtgccattgcccatgtgaantccttgtgccacccaaaacactggtctntggcccganaaanaccttcttttttcaagctttangnttacccncttaaatctccangggcaccattgnaaatcctgantgatgtgcacttatcaanacttggaanaaaanggganccacgaancccccttttgaaaatnctcaanattttccccttttcctttgggctgg

SEQ ID NO: 3140 - DNA, 661 bp, Homo sapiens
  misc_feature 151, 261, 331, 359, 378, 380, 381, 383, 385, 420, 424, 442,444, 458, 460, 462, 481, 496, 518, 522, 524, 534, 539, 542,545, 547, 552, 575, 576, 591, 596, 606, 616, 618, 633, 645,655: n = A,T,C or G
acaaagtccaaattcttactttatggatgtaaaatgtccaggttgctacaagatcaccacggttttcagccatgctcagacagtggttctttgtgtaggttgttcaacagtgttgttccagcctacaggaggaaaggccagactcacagangggtgttcatttataagaaagcaacactaatgattcaaacagcttcctgaattttaattttgtgttgtctcacagaaaggccttatcataattccataattctaattaanttaccaagatatgtaattacattttggttttgtaaggtatacaagcagtaatctctattttggtgtcagnttttcaataaaattttgattatgggccntataaaaaaaaaataaaanannangnggggccttttttttttttttttttttttgcttaanaacnactggctctttgggtatntnaatcctatcctttnantnttccctaatggaagtgaanttaaaatcattaaanaatttttttttaggccaaattnaggncntgggaaaaantcccnttnaantnatccncgttaaaccaaaaactttgccanncttgaaaaacctgcnccaanccctttaaancgcaaatggnanaaatttttttttttnattaaaactgantttaaaaccngggaac

SEQ ID NO: 3141 - DNA, 509 bp, Homo sapiens
  misc_feature 153, 269, 280, 314, 371, 377, 378, 381, 408, 409, 415, 431,434, 451, 452, 467, 471, 481, 504: n = A,T,C or G
acgcgggttggggcagagttttcatcggaggcatgcagagagttaggcttttctagcaacttgctttgcagctcttgtgatcttctcggacagttcaacctgcttcagctggatcctgattgcagaggatgctgtcaggaggaagcacaattngaaaccaaaaagctgtatgcaggagctattcttgaagtttgggggatgaaaattgggaaaggttccctcaagtcccaagcttttgttaggaagtgataaacccaaactgttcagangactgcaaatnaagtatgtcccgtggttcaaaccctgtattaaancttttggaccacaatgggaacattgctgaagaactgagcattctcaatggacacagncgtgtnnaanaattcctgagtaaaagttggaaccgcnntaaatntttgcttaaaatttgnccnatccttttggtaccttnncaatgaaattttacngctncctagaaaanaatttaagttttgcttgcttccnattga

SEQ ID NO: 3142 - DNA, 381 bp, Homo sapiens
  misc_feature 200, 204, 230, 249, 251, 256, 259, 285, 287, 298, 300, 313,319, 341, 351, 355, 358, 372: n = A,T,C or G
acgcgggggtcaccctgaagtttatattcttatcctaccaggcttcggaataatctcccatattgtaacttactactccggaaaaaaagaaccatttggatacataggtatggtctgagctatgatatcaattggcttcctagggtttatcgtgtgagcacaccatatatttacagtaggaatagacgtagacacacgancatntttcacctccgctccataatcatcgntatccccaccggcgtaaantntttanctnactcgccacactccacggaagcaatntnaaatgatctgntncagtgcctctganccctangattcatctttcttttcaccgnaagtggcctnactngcnttgttttagcaaantcattacta

SEQ ID NO: 3143 - DNA, 314 bp, Homo sapiens
acaccgggtggcattaaggggtgaagatgtcccccttacggagcagaccgtgtctcaggtgctgcagtcagccaaagaacagatcaagtggtcactccttcggtgaagacctcactgttcctggctcttcatcctcttcaaaaaatttgcatgtctgctgtgaattttcatctagttccccaatcgatgctctcagggtcatctcgggggatcacagggatccttaaatctccattctgtttgtggttgccccctcaactccttacacccttctattctttttcattcttcttgcagttctgggaagtaaagct

SEQ ID NO: 3144 - DNA, 261 bp, Homo sapiens
acctcttttttcattaagaattctgcctggaagtttaggtcaaagaggctgcttggagcaaaatacagtggtgtctcatcccaaatattctccaggcgtttcttccatccttccaggatttgaattcgggcgtctgctggagtgtgcccaatgctatatgtcagttgaggttctaagacttggaagccacagaaatgcagaatgccctctgaattggccagagaatgacattcatgtccccgtggatccctttcaaagagt

SEQ ID NO: 3145 - DNA, 393 bp, Homo sapiens
  misc_feature 328, 336, 357: n = A,T,C or G
acccctgctgtttgcttttggtaatgtgatgttgatgttctccccctacccacaaccatgcccttgagggtagcagggcagcagcataccaaagagatgtgctgcaggactccggaggcggcctgggtgggtgagccatggggcagttgacctgggtcttgaaagagtcgggagtgacaagctcagagaacatgaactgatgctggcatgaaggattccaggaaagatcatggagacctggctggtagctgtaacagaaatggtggagtccaaggaaacagcctgtctctggtgaatgggactttctttggtggacacttggcaccanctctgaancccttccctgtgtcctgccancatgtgggtcaaatgtaccttggccgcgacaccctt

SEQ ID NO: 3146 - DNA, 661 bp, Homo sapiens
  misc_feature 156, 411, 420, 462, 468, 474, 492, 498, 515, 516, 526, 530,537, 538, 549, 553, 581, 582, 585, 598, 599, 606, 614, 619,621, 623, 635, 641, 642, 649: n = A,T,C or G
acagaatggcacagggaatgcatatgaagaggaagccaacaagcagtcatgacatgaaatagtccttttatttttatttcgagctacacacatgcttgtatataggttttatctctggttgaatccctcgaacaatagacagtacgcggggagcancaggaggaggcagagcacagcatcgtcgggaccagactcgtctcaggccagttgcagccttctcagccaaacgccgaccaaggaaaactcactaccatgagaattgcaagtgatttgcttttgcctcctagcatacctgtgccataccagttaaacaggctgattctggaagttctgaggaaagcagctttacacaaatacccagatgctgtggccaatggcttaacccctgaccatcttaaaaagcagaatctnctaccccanaaaatgctgtgtcctttgaaaaacccattactttaacaaaanaccttncagtanttcaacaaagccatgccncctggntgatttggtgatgaaannatgatgaccntttngaccgcnngacttcattgnttcnaccaactttgatgatgtaaatgaccttnntgntcttaacaatctnntgagctnaacattcntgatnantntgataaactggncatttnnttttccnaggaccttgcca

SEQ ID NO: 3147 - DNA, 394 bp, Homo sapiens
  misc_feature 266, 324, 329, 351, 352, 359, 365, 366, 368, 377: n = A,T,C or G
acaaatctaggcaataaaccgttcacctgggatcagttcagatgagacagtaaacagataatccaaaagacaaaaaattataagaattaatacctgcaaagaggattttccctggaaattcttttcttggtgtttccttctacaatataattttaattctgctttgtaatttccagtgaaaatgtcttctattgtagttcctgctacattactatgcttacttatctgacattgggctctcatctggggttctgaaaaagaagctnccttagctatttcaacttattgcccttaatattttaaaacataaagattggttgaggntgaancttgctttttgcttactctaanngctaaancccttnntntcctttttnttttgagaattaaccac

SEQ ID NO: 3148 - DNA, 660 bp, Homo sapiens
  misc_feature 230, 270, 339, 415, 422, 429, 440, 443, 446, 511, 522, 524,526, 534, 538, 560, 599, 605, 608, 622, 651: n = A,T,C or G
acggagagggtcaccaagcgtggatcgttggcattgtggaaaagggaaaccgaacggcccggatcattgacaagccgcgagttattgaagtcctgcctcgtggggccacagctgctgttcttgctcctgacagttcaaatgcctcctctgagcctagctcgtgagatgaaagaacagaagttgtttggaccttagagccattgtccacaatcacggatggttctcaaganttgattgtaagaaatttccaaagaaagctgcctgcatagntggttccggctgcccttctaggtgattggaatcacccatctaaaagccagtctttatattcattcccangccaaagtaacatttttgaaccttgggggggatattttgtcatcacttgggtagaaaaaggaccaaaaataccctntgttttntcttgcnaaataaagatnaanctnttccaggtttgaaggatttttctttgcaccggggttgattaatttctgcccagggaagtgaattnttaaagtaacncncncccaaagntaantgccaaatgaaaaaattaaaancaatgagttttggaccaattttggtataaatctaattgntaaganaancttattatgccaanatcaattctttattcaatttactgaaganctgccccgg

SEQ ID NO: 3149 - DNA, 495 bp, Homo sapiens
  misc_feature 164, 252, 270, 327, 346, 370, 394, 469, 473, 475, 478: n = A,T,C or G
acccgagtctatgcttgggggtcttcctcactctgctcttggagtcacaaccaagactccaaaaaaccaacgaagtcccttcaatgtgagtaaaggaaacagcttcaagcactgacaatttttacaagtgattattcaaggaatgcacagtagccacagttcanacaaatcaactacaaaaatcattaaaaagaagagtagggagggtcactgcttattaaaaacaaaagactgggacaaagaaaagtgaanataacagtgggcagaaanctctgcctcctctgtcctgtgtgactcataggggcatggggggcatgggggccgcanggatgtgcgatctgacacngctcgttccacaagatcgtggaanttcaaggatgcctcgctctttttnctacaacaagaaactggatttctaaaagctttgctagataagaatctttggggtgagtgggggtctgatcttggnagancnttntgttcccaattaaagaa

SEQ ID NO: 3150 - DNA, 121 bp, Homo sapiens
  misc_feature 24, 28, 32, 59, 67, 77, 87, 90, 91, 110, 116: n = A,T,C or G
acgcgggggagcagagaagagggngaangcancatcttgcctggatgatccaggggacncataatanaagcccactntctcatttanatnnttacaacttctcttgcaangttccntggtt

SEQ ID NO: 3151 - DNA, 660 bp, Homo sapiens
  misc_feature 272, 316, 381, 411, 451, 470, 487, 541, 561, 564, 572, 579,581, 632, 638, 645, 646: n = A,T,C or G
acaaaaaacacaaggaatacaacccaatagaaaatagtcctgggaatgtggtcagaagcaaaggcctgagtgtctttctcaaccgtgcaaaagccgtgttcttcccgggaaaccaggaaaaggatccgctactcaaaaaccaagaatttaaaggagtttcttaaatttcgaccttgtttctgaagctcacttttcagtgccattgatgtgagatgtgctggagtggctattaaccttttttttcctaaagattattgttaaatagatattgnggtttggggaaagttgaatttttatagggtaaatgtcattttanagatggggagagggattatactgcaggcagcttcaccatgttgggaacttgataaaaccacttancaggcttcttttcattattttttatgtttncttataaagtcttaggtaactagtaggatagaaacactgngtcccgagagtaaggaganaaactactattgattanaacctacccaggttactgcaaaaagaagcgggatacttcactttcattgaactngatgcataagcccatgtagncanttctaaancatgttncnagctactgaatcccctttaataccactctgaactcctgatgaacaatacangcccancctgtgnntgatgtgcccactt

SEQ ID NO: 3152 - DNA, 662 bp, Homo sapiens
  misc_feature 266, 385, 434, 487, 495, 500, 520, 531, 533, 534, 545, 553,554, 560, 578, 582, 586, 594, 599, 627, 639, 641, 644, 649,659: n = A,T,C or G
acgcgggtcttgttctaatcttgtcaaccagtgcaagtgaccgacaaaattccagttatttatttccaaaatgtttggaaacagtataatttgacaaagaaaaatgatacttctctttttttgctgttccaccaaatacaattcaaatgctttttgttttatttttttaccaattccaatttcaaaatgtctcaatgggtgctataataaataaacttcaacactctttatgataacaacactgggttatattctttgaatcctancccatctgcagagcaattgactgtgctcccagtaaaagatacctttctttctgaatagtaaatccaaattagaaaagccctcctattttaactcctcactggtcagaaacacagattgnattctatgagtcccaaaagatgaaaaaaattttatacgttgataaaacntataaatttcatttgattaatctcccggaagaatggttaaaaaaaaaagggtnatgcaagnatttnaaggaatatttttaaagccncaattattttnannttgggatatcnactgcttnnaaaagngctcctcttttttcttgncatnggtngtcaagantaccnatatttggggaagcttaaaagacccatnttatggggctantntantgccnggccggccgntcg

SEQ ID NO: 3153 - DNA, 312 bp, Homo sapiens
  misc_feature 229, 258, 292, 301, 304: n = A,T,C or G
acagtcatcaaatgttgtgccatcaaatactagatcttagatcttattcttttttttttgagacagggtcttgctctgtcacccaggctggaatgaagtggtatgatctcagttgaatgcaacctccacctcctaggttcaagcgattctcatgcctcacctcctgagcaggtgggactataggcgcatgctaccatgccaggctaattttatattttttatttagaancgggggtgttgccatgtttggccaggcangtctcgaaactcctggccttcagatgattctggncaaccgtanccntccaaaag

SEQ ID NO: 3154 - DNA, 662 bp, Homo sapiens
  misc_feature 455, 460, 540, 543, 546, 555, 558, 572, 580, 589, 593, 596,610, 661: n = A,T,C or G
acaaagcagcaactgcaatactcaaggttaaaacattagaaaagcatttgtgtgacaggtatattacagtattatcaaaatattacattttcagacttacttagcagataatcatccccagagcttaaatctttaaattatttccatagtcttaaaaaatatgtaatgtcagaaatgcatataaaaagaatggtaaaagggaaccctaaaatccaaatgggataatggaaccaaataaatattttggatttcaagtaacctggttaatatcagctcaccccccccattctctcttaactcaatttaattcttatagggataatggaactggccaatgcctggcttattatttattttccagctatcatcaatgattagaactaaaaaaatttggcataaaaaatcacattcacattaattaagcttttttagcttcacactagctacatctctanaatgntgaaattaagtacgctgggctgtcccaccaatacagcccttcttttcaggatcctcctccgcctgccttcgtctgtcctntgnggnagcagcttncangcaaacaagccatnactgccgncccggggtncttnggncgggaccccgctanggcgaattccacccactgggcggccgttctagtggttccgacctcggtacna

SEQ ID NO: 3155 - DNA, 596 bp, Homo sapiens
  misc_feature 302, 337, 350, 354, 395, 403, 447, 470, 486, 488, 505, 523,530, 551, 568, 570, 582, 585: n = A,T,C or G
acataaagttttattaatattctgattctcgtgtcatagcttttatggcaggaaaggatgaggacatgccccacctgtaacgtagagcaagcaaaccaccaagtagaatcttgagattctctctcaactgttctctagaaacacgcttgtgcttttaatctgccttttaaaaggggacacagaacaaaaaatgggttgttgcaaataaacatctgaaagaaaagtaacagctgacctgggctgaggcatccaaacaaagcagtcattgtggaagggagacaatgcaaacccactggggcaanaaaccggggcataaaacgtgcggcattttggcgtnggtatttctacancccnaaggcccatctggacaagttcaaccaagaagggctctttgnttgattantaactactaaaaaaaatcactggcccaacgcactgtcagtttantaacattcaagtccatacatttngtaagatgggacaaantnggattggaaagtgacantttcacctttaacagttnaaagaancctacttcttttttcacaatntgtttcaaaaacccatnantccttggccggnacnaccctaaggcg

SEQ ID NO: 3156 - DNA, 662 bp, Homo sapiens
  misc_feature 227, 252, 253, 281, 332, 334, 341, 355, 356, 381, 383, 387,389, 397, 398, 399, 404, 411, 416, 461, 472, 476, 483, 486,489, 492, 498, 502, 541, 574, 593, 599, 604, 613, 621, 625,643, 644, 649: n = A,T,C or G
accaaagggcaaacccaccactatggcttgtgatggcttacaaagaaaaactgaagcatagccttaagaaaaatgctgcaagatgtgtctatgaagagcacttgcagtgagttgttagggcaaaggggcacatggccttacataggcttgtccaagcaatgcccaacctcatcctgtaaggaagtcggaaagtctccctttggaaactattaactcaccttttttcngggttggtcttttctgggcctctanntttaatggtcttcttgggactggctggnttgggaaccaggaagctttccctttggtttggggggattactacgactggngnccccggntggtttcttcttgnnctgaactggtcttccgtggttctgnancccntnttccactnnntggancttttanttaantgaactctcatttttcaaactaaccaatttttaaaaaacattatnccttgacgcanttcntaacacnatnaanaanaacatnttgntgggggcaggatgtgtggaacctggccaaaaaaatttgnattgaccgggacttgaattccaaggatgggtgnttaaggacttgaaaatctnttttanatccnccaccgtgngaccttanttgnagccactcttttggaaannttttnttttgcatgaata

SEQ ID NO: 3157 - DNA, 661 bp, Homo sapiens
  misc_feature 215, 226, 255, 289, 294, 297, 377, 378, 379, 382, 385, 405,412, 449, 450, 463, 474, 487, 500, 505, 506, 509, 512, 518,523, 524, 528, 540, 541, 547, 571, 574, 575, 577, 587, 598,601, 607, 608, 623, 639, 660: n = A,T,C or G
acttgttgtgaaccaaaccagtgatactttgcagaattgcacattagaactagctacactaggggatctgaaacttgtggaaaagccgtctcctttgactcttgctcctcatgacttcgcaaatattaaagctaacgtcaaagtagcatcaacagaaaatggaataatttttgggtaatatagttatgatgtctctgggagcagcaagtgacaanaattgtgtggntctcagtgatattcacatcgacatcattngactatatccaacctgcaacttgcactgatgcanaattncgncagatgtgggcccaatttgaatgggaaaacaaagtgacagttaacacccacatggttgatttaaattgactacttacagnnnatnttnaagtcaaccaattgaaatgnctgactncagaaaaaggccttctggttacctggggctttattgnnccaaccctttatnctccgtccttnttttggtgaaaangcacttgcaaatngtaannttnganaaaccnattcnncaanggaccaaatctnnttgtanctgccatattaaaaattctgcaanganncnaggaattggncttaaatcttnganaaaaanncaacttgccaataanaaaacttgttttttantaattaaccataatgtccctng

SEQ ID NO: 3158 - DNA, 362 bp, Homo sapiens
  misc_feature 238, 332, 351: n = A,T,C or G
acgcgggttagcctataaatcaataacagaaagacaactggaaaacccaaaaataaatgtggatttaaaaacacacttctaaataacacattggtcaaagaagaaatcacaggagagataaaaaatgttttaaactaaatgaaaatgagaacacaatttgttaaaattattgggatgagtgaaggtagtgcagtgacaattcaacacatgaaatttataccatggacatatacatcanaaaaaaagaagtgtctaaaatgaatatgctaagtttacacttaggaaacaaaaaaagagcatcaaattaagtccaaaattagcagaagaaaatncattattagaattagagcngaaatcaatga

SEQ ID NO: 3159 - DNA, 661 bp, Homo sapiens
  misc_feature 210, 324, 364, 369, 389, 393, 441, 449, 460, 482, 492, 504,528, 533, 537, 554, 567, 571, 573, 578, 579, 582, 598, 605,607, 612, 614, 624, 625, 634, 640, 648, 654: n = A,T,C or G
acgcggggctcctcttcctttctccgccatcgtggtgtgttcttgactccgctgctcgccatgtcttctcacaagactttcaggattaagcgattcctggccatgaaacaaaagcaaaatcgtcccattccccagtggattcggatgaaaactggaaattaaatcagggacagtgccttggaaatgatagtatggaaataaaatgggaantattttaatattatatatattatggattcctggttattaagtgtaaaatttctaatgaagtataattttgattttataccttcttttttacaagctgtttcttaatatttttcnttggatgggatgaccctaaggttgaaaagttttttcatcnctatnattttattaaacaatttttntctntgaaccctttacttacttggactggattgggactaaaagcctgatcanaagccacnacattaaaatncaatccctttggccttccccgngcctccaaanggttcttttaanacctttataatatttcttaaatantttanaganaaaaaatttaaagactntctgtttgaaaantaancnatttnnttnatgaaattattgctantttaagntncaaangngaatcttttnnaattaaaanattacnaactcctntttaantgtaacc

SEQ ID NO: 3160 - DNA, 472 bp, Homo sapiens
  misc_feature 194, 214, 255, 313, 322, 357, 392, 403, 417, 430, 442, 446,454, 456: n = A,T,C or G
acaaagcagcaactgcaatactcaaggttaaaacattagaaaagcatttgtgtgacaggtatattacagtattatcaaaatattcattttcagacttcttagcagataatcatcccaccagagcttaaaatcttttaattatttcccatagtcctaaaaaatatggtatggtcagaatgcatataaaaggatgntaaagggaacctaaaatacnaatgggataatgtacaaataatatttgatttcagtaactgntaataatcagctcaacaccaccattctctctaaactcaatttaattcttataggaatnatgaactgncaaatgccatggcataattatttatttccaagctntcatcaatgattagaactaaaaaaaatttggcatnaaaaaatcacnattcagcataaatnaagctatttttancttcaacacttnctancatctctnanaattgttgaaataagt

SEQ ID NO: 3161 - DNA, 661 bp, Homo sapiens
  misc_feature 107, 109, 165, 201, 212, 262, 310, 313, 318, 381, 391, 392,395, 398, 412, 423, 433, 436, 441, 451, 455, 458, 463, 472,487, 502, 505, 507, 512, 518, 524, 530, 537, 539, 545, 555,578, 585, 595, 602, 604, 607, 609, 616, 617, 618, 621: n = A,T,C or G
  misc_feature 630, 637, 639, 649, 652, 655: n = A,T,C or G
acttgccccttccccagaaaagcgggacttgctgctaagggtgaaggaccaaggcagttgtccctgcgtggtctgacacccttgaaacgtgggtgtataatcaaganangcatccctgcaatgattaaacaccaagggaaggctgccttcccagtctgtgaccanccccggaattttgggtccacggataaaacgtgtctnttttgtctctncagaaaatgaaaggaattgaaattaaaaaaaaggagagattgaaatgtantgccaagattgaaaggagaaaagtggttgagggatttgagggaagttnganaaaanagtaaaaaaaagctgcttaccaaatttgaaattggtgagatgtttcttgggctcgtcggtctnaagacctganntcntangtggatcttttcanggagcaaatancaggaggacngangattnatctcccaanggangtnccccnatcccagtnatggcaccaaatttnatgtgccgtcatgtnaananacacnaaacangctttntgtgancacattntntgtttnttttacctgntgcagcgggcttattcccaaaanaagattnatcccccccntctttgncngcnancaccctnnnggngaaatttancacactngngggccgtttntantgnattcca

SEQ ID NO: 3162 - DNA, 660 bp, Homo sapiens
  misc_feature 16, 90, 104, 198, 220, 228, 242, 247, 251, 255, 258, 259,273, 290, 296, 300, 319, 361, 409, 418, 422, 445, 447, 451,460, 466, 471, 476, 483, 488, 490, 505, 518, 552, 559, 568,575, 577, 581, 589, 590, 600, 602, 609, 615, 617, 620: n = A,T,C or G
  misc_feature 624, 630, 635, 643, 660: n = A,T,C or G
acccagtaaaaaccanaatgacccattgccaggacgcatcaaagttgactttgtgatccctaaagaaacttccctttggagacaaagatncgaaaatccaaggngaccctgctggaaggtggcccttgttagggttaatatttcaacagaaccgacggtgacaaattaaagcgagccacccatattgaagttctgtcnaatacatttcaattcacttatnaacccganaaatggggtgtgantgctncatnaaanaannggttttggtttcancaagtgtgggggatacnggatanttcntatgttcttccactttaantgaaattctggatggggaacccctccatattgcacataaaantataagtttactgtgggtcctgatatgctctcttgctcaaagaaatcntgctatttnggantaaaaaaacttcccaaggggccngntttnttttttttncatttnaatanccggntttttgngcccngntgaaaaaaaaaaccncttttttcaatcntataaaaactatcccaataaaggcaaaaaaaaangaggccncagatggcnttatttntnattnataactgnnggggggaaananattattntttttnancancgantgtggnaagangatactcntcctcaaaaaggaagan

SEQ ID NO: 3163 - DNA, 568 bp, Homo sapiens
  misc_feature 11, 183, 254, 274, 279, 285, 315, 415, 430, 441, 444, 459,469, 482, 491, 497, 521, 539, 547, 549: n = A,T,C or G
accctcacccnctccgccctcccctctcctagatggtcaccatagggcagtaaagtttaatcagttgagcacggagcttcagggcgctggcacccagactatgatggagagaaggaaagagcaacaaacaaacaggcacgttggtagttggctacagcctgggtataagcccatggcatcttnttcccccgagactggggatgtcccggcaactgagtaagggatgggcctcctgctgctgacttctccatagngaactcaatctccttgcctnacaanaacatnaaagaggtcctctgttccttccagttttanattcttttcattggctaaatgtaggaaacaggcaaaagccagaggtattggagaggttttgagccatgacagggggcaggctcctctgcaggtccttcgngagcccgctaacatntttttcgttanccncttttggcaagggcncgtttttttncaacttcccctgnggttgcctnttcatntgcctcctttccggagagcgcttncttcaagatccacatgcncttgcttnanttttttcatgtccatcttt

SEQ ID NO: 3164 - DNA, 501 bp, Homo sapiens
ggtacaagatttaccagaaagagagtggtgtgttgacatgcctggagcagacaccttggagccgctgacagaaggtgaagcagtccaagaaaatgtggaaacttttccgctgctctacacagtccacaaacctgtccattttatttcgttgaagctttgtctgagagataaccaaatagacagtcaaagtaagttatctcagccacatatggggagtggatgctgctgaattgtgattaattgggggagccatataggtacttcaggcacgctgcctcctggtaacagctatgcagggagggaggacccacactgctacacttctgatcccctttggttttactacccaaatctaaatagatacttttgataatagataactgctcttttactaagacatagtctctacctatagaaatgtattttgaaaacacttattttacacagcaattttgtatccatttaaactaaccttttatcaataaagccctttggttagat

SEQ ID NO: 3165 - DNA, 576 bp, Homo sapiens
  misc_feature 419, 434, 457, 468, 487, 509, 538, 545, 557, 571: n = A,T,C or G
acctctgtgataaacaatgaaaagctgttctccatgtcctgccattgacaccacaggtccagcaaggctgaatacctctttttgaacccctccaatagtaaacaatcgaagaagcagggcactagtagcggcagcagcccatccttgaccgagacatatggcttcaatatcctcattctgaggcaagtctattatccactctttgcttgaatcccaagaactaaagtgcaggcagtgaagcttgcttgctagttcatcagtgctttcacatgccaacaaaatagcttcgtgggaaagatctgctattgtataattcaaagtgtttgataagtgtgttgcatggtgtatggaggtatcatggaactccacatctatggcattgtcttgctcatcattatagcagcgaataattccaatanagttcccacaccttnaatctgggagtgagagcaacggngtaagaacctngactgaaatggctttttgncgggggagttgggcatggggtncatcataaaatgggcttttgggaatggtncaaagtngggagaaatggngaaatgctgccttnttgac

SEQ ID NO: 3166 - DNA, 585 bp, Homo sapiens
  misc_feature 32, 308, 339, 369, 374, 387, 392, 439, 454, 460, 467, 471,482, 492, 505, 508, 517, 519, 527, 537, 545, 557, 558, 561,563, 567, 572, 578, 583, 584: n = A,T,C or G
ggtactctgtaaaagttttgcagacaaaatanaaagtatgataatccgtcagaagtatgatgtaaaactggaatcctctgtattttttaaatgttctaaaaattttatcgctgttaaggtattaatcattcagtattactaatggaatagaaattcatacttttgtatggacaacaattcaaattgatattgcatttatagcactgtaagaaactttcatcttgagcaactttgtagatgatgggtgtttttattttcaatcgccatattttgatcactcattgaaaattggccccagtgctgtttgntcatctctgtatgtaaaaacctgacagtganacacaacgttcctgaacctgtgagggtgtncccangaaaaaagaaaanacagngaatactttaacacattaaatagaaaaaaaatgtttttttgttttgncatgggactcagggnaaatanaaaagcntttntctttttttangacaaaatcncaaaaaaaaaaanaanaaaaaaaantncctgcccngggcggggcnctttaatnggctaaatatcnncanantggnggccntactantaggnnc

SEQ ID NO: 3167 - DNA, 575 bp, Homo sapiens
  misc_feature 275, 376, 465, 481, 492, 495, 497, 512, 527, 529, 537, 543,549: n = A,T,C or G
acgcgggggactttgttcaatacaaactggcagagaaatttgtgaaacaaggcgaggaggaagtggcctctcaccatgaagcagcattccccattgcagttgtggcatccgggatctgggagctccaccccagagtgggggacctcattcttgctcatctacataagaagtgtccttactctgttcctttctatcccactttcaaggagggaatggctttggaagactatcagaggatgcttggttaccaagtaaaggattccaaagtggagcancaagacaacttttctaaaacgcatgtcagggatgatccgtctctacgctgctatcatccagctccggtggccatatggaaaccgacaggagattcaccctnatggcttaaatcatggatggcgctggtttggcaaaaatcttaaaaatggagcccttgtcagatgtgacagccaccccttcttctttganttcctggaggggtgtngggaatgcccnttntnaaacaataaccaagnttaatttcttggaananctttattnttttcnaaaaanggactacttttcccaaaaatttaaag

SEQ ID NO: 3168 - DNA, 561 bp, Homo sapiens
  misc_feature 220, 323, 349, 367, 460, 483, 502, 511, 523, 528, 534, 537: n = A,T,C or G
ggtacgcggggctgaacgggaagctcactggcatggccttccgtgtccccactgccaacgtgtcagtggtggacctgacctgccgtctagaaaaacctgccaaatatgatgacatcaagaaggtggtgaagcaggcgtcggagggccccctcaagggcatcctgggctacactgagcaccaggtggtctcctctgacttcaacagcgacacccactcctncacctttgacgctggggctggcattgccctcaacgaccactttgtcaagctcatttcctggtatgacaacgaatttggctacagcaacagggtggtggacctnatggcccacatggcctccaaggagtnagacccctggaccaccanccccagcaagagcacaagaggaagagagagaccctcactgctggggaagtccctgccacactcagtcccccaccacactgaatctcccttctncagttgccatgttagaccccttnaagaaggggagggggctanggagcccancttgttatttancttgncccggnggncgctctaaagggggaattccacac

SEQ ID NO: 3169 - DNA, 562 bp, Homo sapiens
  misc_feature 272, 371, 445, 458, 484, 491, 498, 508, 513, 514, 516, 528,535, 551: n = A,T,C or G
acgcggggatcacagtttagaggcacagtggaccaagtggaaggcgatgcacaacagattatacggcatgaatgaagaaggatggaggagagcagtgtgggagaagaacatgaagatgattgaactgcacaatcaggaatacagggaagggaaacacagcttcacaatggccatgaacgcctttggagacatgaccagtgaagaattcaggcaggtgatgaatggctttcaaaaccgtaagcccaggaaggggaaagtgttccaggaacctntgttttatgaggcccccagatctgtggattggagagagaaaggctacgtgactcctgtgaagaatcagggtcaagtgtggttcttgttgggctttttangtgctactggtgctcttgaaggacagatgttccggaaaactgggaggcttatctcactgagtgagcagaatctngtagactgctctnggcctcaaggcaatgaaaggctgcantggtggncctaatnggattattcntttcnngnttgttcaggatnattggangccctggacctcttgnggaatcctatt

SEQ ID NO: 3170 - DNA, 577 bp, Homo sapiens
  misc_feature 123, 338, 386, 425, 442, 467, 479, 480, 493, 501, 506, 509,522, 524, 526, 546, 547, 552, 562, 576: n = A,T,C or G
ggtacatcatggctcggacttgggtcaagctcttggcaccaatgtcctggcatgagtgttggatgccagcaatcaggtaagggacaaatttgtggattgaccctttgtcctgcacagcaccanacactccctgggccactttgattttgtcagcttcactgaaatatctgttctggctgctgaggtgcttgtccatggcatcgagagaacccataccgcgatatttctttagccggatcccatcggaaaagaagtattcaccaggggcctcagtggtggcagccaggagagagcccatcatgactgtggaggccccccgcgtaccagaaacattatcntttattgttacttgctttttaaactttgtttagccacttaaaatctgnttatggcacaatttgcctcaaaatccattccaaagttgnatattttggtttccaanttaaaaaaattactatttacccaanattttatattanntataaaaattgtnccttcccnggccnggncggttttaatggncnantttcaatcccacttggccgnnccggntcttattggnttcgaactccggcnc

SEQ ID NO: 3171 - DNA, 560 bp, Homo sapiens
  misc_feature 557: n = A,T,C or G
acacttgaaaccaaatttctaaaacttgtttttcttaaaaaatagttgttgtaacattaaaccataacctaatcagtgtgttcactatgcttccacactagccagtcttctcacacttcttctggtttcaagtctcaaggcctgacagacagaagggcttggagattttttttctttacaattcagtcttcagcaacttgagagctttcttcatgttgtcaagcaacagagctgtatctgcaggttcgtaagcatagagacggtttgaatatcttccagtgatatcggctctaactgtcagagatgggtcaacaaacataatcctggggacatactggccatcaggagaaaggtgtttgtcagttgtttcataaaccagattgaggaggacaaactgctctgccaatttctggatttctttattttcagcaaacactttctttaaagcttgactgtgtgggcactcatccaagtggatgaaataatcatcaagggtttggtggcttgtcttggatttatatagaagcttcttcatatgtctgagtccagatgaagtnggt

SEQ ID NO: 3172 - DNA, 407 bp, Homo sapiens
  misc_feature 378, 380, 400: n = A,T,C or G
acgcgggctttttcgtccttttccccggttgctgcttgctgtgagtgtctctagggtgatacgtgggtgagaaaggtcctggtccgcgccagagcccagcgcgcctcgtcgccatgcctcggaaaattgaggaaatcaaggacttcctgctcacagcccgacgaaaggatgccaaatctgtcaagatcaagaaaaataaggacaacgtgaagtttaaagttcgatgcagcagatacctttacaccctggtcatcactgacaaagagaaggcagagaaactgaagcagtccctgtcccccggtttggcaagtgaaggaactgaaatgaaccagacacactgattggaactgtattatattaaaatactaaaaatcctantnaaaaaataaaaattaaatanaggttcc

SEQ ID NO: 3173 - DNA, 676 bp, Homo sapiens
  misc_feature 454, 502, 570, 583, 606, 612, 616, 624, 648, 656, 657, 660,666: n = A,T,C or G
actgaaaaccatagctagccaacagaacttaaaaaaaatacctttccaatgcataatacatgcattgcccaaaagagtaggatagccacattagacttacaagacttacagcaactccaccagaaaaaaactgctacacagcaagtctgttaagtatgctgttggtaaaaaaaactgctgtgactgttacccacacttctgtaaaaaaaagaatttgcaatttgatgagtatcttatccctcatataatctgtataaaattacaacaaaaccaataaatttcaagcaccaattcaataatctaaacttactgtatttatatttctcctattactgagggaacaaattatgatgaaggcttagctgaaattagccaggtaattattacagtttagttttaaaggcatgtggttttccttcattcacttgaatctcaaacatttgagaatgtttangctagtaaaggactccttggaggaatccatcatttctgagtattgaanggtttaatatcattgaaagctctttacaaaccaatgctctcttaattctaggataaaacagaggtgcncacaagaaattangggctgttcttattttgacttanaaaagnagcncctttttntaactaagacatgtttggacatcnctggtagnnaanaaacgngttttttaat

SEQ ID NO: 3174 - DNA, 203 bp, Homo sapiens
acttttttttttttttttttttttggatgactaaaccggatgatggtagagatggtaagccggcatttactcagccccgccctgctcagcctcgggagcggacgaattctcagctggtggatcggctgcttttgtctctttgccatcttgtggtttagggttttctgggcgtctgcgtcggtaattgaagttgcggcggtacc

SEQ ID NO: 3175 - DNA, 670 bp, Homo sapiens
  misc_feature 486, 494, 498, 552, 582, 587, 604, 622, 651: n = A,T,C or G
acagacaatctttgaaggtggaaaagcaacttgttttgcatatggccagacaggaagtggcaagacacatactatgggcggagacctctctgggaaagcccagaatgcatccaaagggatctatgccatggcctcccgggacgtcttcctcctgaagaatcaaccctgctaccggaagttgggcctggaagtctatgtgacattcttcgagatctacaatgggaagctgtttgacctgctcaacaagaaggccaagctgcgcgtgctggaggacggcaagcaacaggtgcaagtggtggggctgcaggagcatctggttaactctgctgatgatgtcatcaagatgatcgacatgggcagcgcctgcagaacctctgggcagacatttgccaactccaattcctcccgctcccacgcgtgcttccaaattattcttcgagctaaagggagaatgcatggcaagttctctttggtagatcttggcanggaatgancgangcgcggacactttcagtgcttgacccggcagacccgcatggagggccaaaaaanaacaagagtctttaccctgaagagtgcatnaaggncctgggacaaaacaagnttacaccccgttcggganacaactgacacagtgctgagggactcttnattgggagaacttaggact

SEQ ID NO: 3176 - DNA, 667 bp, Homo sapiens
  misc_feature 551, 563, 653: n = A,T,C or G
ggtacgcggggcttcccatcggcgaagatggccctggagacggtgccgaaggacctgcggcatctgcgggcctgtttgctgtgttcgctggtcaagactatagaccagtttgaatatgatggttgtgacaattgtgatgcatatctacaaatgaagggtaaccgagagatggtatatgactgcactagctcttcctttgatggaatcattgcgatgatgagtccagaggacagctgggtctccaagtggcagcgagtcagtaactttaagccaggtgtatatgcggtgtcagtcactggtcgcctgccccaaggaatcgtgcgggagctgaaaagtcgaggagtggcctacaaatccagagacacagctataaagacctagcaagatgcaaggctgccagcatctttgctctccacctcctgcctctgcttatttcttgttctggaactaaatgaacagaacttcaaatacttcctaccctccaattcagactcaactgactgttgagagagcagcacatcattttatcatttatcttctttggactacangtggggtggganggatttgggttggtggattaacagatggaattgaggagagagtaggatctgattttctacccggggccaggtctgtgccttcccatccanggctttagtcaatg

SEQ ID NO: 3177 - DNA, 665 bp, Homo sapiens
  misc_feature 521, 575, 589, 637, 647, 664: n = A,T,C or G
ggtactcatttgggacatcttctaaatcccggagacctggtgttagggtttgatttggccaactgtaacttaaatgatgagcatgtcaacaaaatgaactcagatagagttccagatgtggtattaatcaagaagagctatgaccggaccaaacgtcagcgtcgtagaaactggaaattgaaagagcttgcaagagagagagaaaacatggatacagatgatgaaaggcaataccaagattttcttgaagatcttgaagaagatgaggcaattcgaaaaaatgtcaacatttacagagattcagccatccctgtggaaagtgacaccgatgatgaaggagcacctcgaattagtctggctgagatgcttgaagaccttcatatttcccaagatgccctggtgaagaaggtgcatcaatgctgcataatgagatgttgtagactgtttccatacatgggcttaagaagttggacagagttaccttaagtgtctctactatctttgcctccagatttcaagangagaaatttagttttaaacctgaataaacatgtttttttcagtgctcactcaancacttaaacagatngatagcttttgaggtttagataaggaaagatatgggaatgagttggtnttgattttgnaatttcatttgaatttnt

SEQ ID NO: 3178 - DNA, 663 bp, Homo sapiens
  misc_feature 32, 261, 390, 448, 473, 519, 530, 549, 560, 575, 581, 592,596, 620, 622, 636, 649: n = A,T,C or G
actttttttttttttttttttttttttggggngggctgttctgaattgtagataatctttcagtgtttgtggctaagccggtttgctgtgcctgccctgggttatttttcataagatgtctggaggagagactttccaaaacatgcaactcttccttagacgtggtttttgccaaatcttgtttcaaaagtaaccctggatctgacaactctgaagctggcaaaaccctgacagctttgcttttttccactattatttctntcgggactaatcgatcacttccaagagaaactctcccgtggtggtcgaagtcttccgcagagctgcagttcctgcgtttctgttgggttttggccactcgtggactttgttttggacatggtgatgctnactcacaagctacaaacggggctcctgcttaaaaaccctgtctttaaccgctccccangatgaggtttttgctggcccctaantgtcttctggctgggtcctgattaactttttccagcttttgaacangaaacccctantggctttcactggctttantggaatccttngttggcccatggatnctgatnggggactggangaancctgaccatcattcctcctcttgntntctttgaatactgngcacttaatgttnccaaggtttttttg

SEQ ID NO: 3179 - DNA, 657 bp, Homo sapiens
  misc_feature 556, 580, 589, 609, 631, 642, 653: n = A,T,C or G
ggtacagtctttcattaaataagaatacttacacatacattttcagatatttctaccttcctgtatgtgtttggaattgtatgtaggtagccactgaaagaatttgggccccttgggaggatggcagtggaagtccatgaagtaaagagcattctttaaaaagcagatttgattgcataccttttagttatttgagattctgagaattctgataaaccccaaagcagaaagattccttatacccttggaagatgggaaaggtgagggaaatatttgaagcagggtcagaacatccactaagaacatagcacctcagtagagcttacattatagtgccagggtagagttattactgaatagcttaggatgatgaacattaaccttcctacaggagtagtagcagctgatttggtgaccatcattggtcaccttttagtgtaactgcaaactaagaacaattatggcttggcatatactccatgtagggaaagtgatgggagaggcagccttgtgtggccatccttggaagcactgcatcgattttgctccctctggnttaaggagatctttagacctttcntgctactgntttcaataaatcttgatggncttcgatctggatcaaactctnttctcaccttnttttcatggancaat

SEQ ID NO: 3180 - DNA, 555 bp, Homo sapiens
  misc_feature 383, 461, 470, 527, 541, 545: n = A,T,C or G
ggtaccagaaaggacaggagacgtccaccaatcccattgcttccatttttgcctggaccagagggttagcccacagagcaaagcttgataacaataaagagcttgccttctttgcaaatgctttggaagaagtctctattgagacaattgaggctggcttcatgaccaaggacttggctgcttgcattaaaggtttacccaatgtgcaacgttctgactacttgaatacatttgagttcatggataaacttggagaaaacttgaagatcaaactagctcaggccaaactttaagttcatacctgagctaagaaggataattgtcttttggtaactaggtctacaggtttacatttttctgtgttacactcaaggataaaggcnaaatcaattttgtaattttgtttaaaagccagagtttatcttttctataaggtttacagccttttcttatatatacanttattgccncctttgtgaacatggcaagggactttttacaatttttattttatttctagtacctgnccggcgggcgctcnaaanggcgaattca

SEQ ID NO: 3181 - DNA, 657 bp, Homo sapiens
  misc_feature 507, 586, 599, 605, 607, 609, 618, 621, 643, 651: n = A,T,C or G
ggtacacttgaaaccaaatttctaaaacttgtttttcttaaaaaatagttgttgtaacattaaaccataacctaatcagtgtgttcactatgcttccacactagccagtcttctcacacttcttctggtttcaagtctcaaggcctgacagacagaagggcttggagatttttttctttacaattcagtcttcagcaacttgagagctttcttcatgttgtcaagcaacagagctgtatctgcaggttcgtaagcatagagacggtttgaatatcttccagtgatatcggctctaactgtcagagatgggtcaacaaacataatcctggggacatactggccatcaggagaaaggtgtttgtcagttgtttcataaaccagattgaggaggacaaactgctctgccaatttctggatttctttattttcagcaaacactttctttaaagcttgactgtgtgggcactcatccaagtgatgaataatcatcaaggggttggtgcttgncttggattatatagagcttcttcatatgtctgagtccaaagagttgggtcaccccacctctggagaaggtctggggcanttgggtcgagagnccttgngncntttggctcnagntgactggggatctctggccaantgtagganaggccc

SEQ ID NO: 3182 - DNA, 658 bp, Homo sapiens
  misc_feature 384, 391, 492, 516, 533, 560, 589, 613, 619, 634, 646, 650,652, 656: n = A,T,C or G
ggtacgcgggggcgctgggatggccgccacagctgtaggtgctgctagtgtttagcgctggtctttgccgggcgttgggggcagctcagcctccttgtttgtccggttcgcctgtgcgtggtacctggtgggtctgttcgaagataccaacctgtgtgccatccacgctaagagagtcaccatcatgcccaaagacatccagttggctcgccggatacggggagagagagcttaagtgaaggcagtttttatggcgttttgtagtaaattctgtaaaatactttggtttaatttgtgactttttttgtaagaaattgtttataatatgttgcatttgtactatttgttttaccactgattgcactattttgtttttttaacagntgcaaangctttttaatgcataaaagtataattgaaatctgtggtatttatttacaaacatgtctacaaaaatagattacagcttaatttatttttaagttaaatctnttaatacacagagaactcccaatnttgctcatctaaataangaaaaacttgggttttagtgtgatggnttaatcttaaggattaaaacatttttgtnctgcccggcggccgtctaaaggcnatttcncccactggcggcgtnctatggatcccncttntncaanct

SEQ ID NO: 3183 - DNA, 665 bp, Homo sapiens
  misc_feature 570, 586, 611, 618, 625, 655, 656: n = A,T,C or G
ggtacgcggggagtggaagaaacgcggaaccatggccgctgtggttgctgtttgcggtggtctagggaggaagaagttgacacacttggtaacggctgctgtcagccttacacatcccgggactcacacggtgctttggagaagaggttgttcacaacaggtatccagcaatgaggacctgcccatttcaatggaaaatccttataaagaacctcttaagaaatgtatcttgtgtggaaagcatgtagattataagaatgcacagcttttgtcccagtttgtttctccatttactggatgcatttatggaaggcacattacaggtctttgtgggaagaaacagaaagaaatcacaaaagcaattaagagagctcaaataatggggtttatgccagttacatacaaggatcctgcatatctcaaggaccctaaaagtttgtaacatcagatatcgggaataaattctatcacgttaccactaataaacttattttacagtaagtggttgtatgatgccaatactgctcaaaccaacctttggataaaaagtgtttgaggagtgaggtaaanaatgacctttcccttnataccaatgtccattaagcagatgnttatttnaaatgtnaccctcatacatttatcttgttgaataaannggtttgtgg

SEQ ID NO: 3184 - DNA, 651 bp, Homo sapiens
  misc_feature 121, 124, 177, 256, 270, 278, 289, 325, 330, 339, 370, 375,390, 404, 408, 412, 436, 444, 447, 457, 476, 513, 551, 572,598, 605, 621, 630: n = A,T,C or G
acacaaaccatcggaggagagagtaagagaaataattatcaatgctgttcggatagaacaggagttcctcactgaggccttgccagtgaagctcattgggatgaattgcactctaatgaancantacattgagtttgtggcagacagacttatgctggaactgggttttagcaaggntttcagagtagagaacccatttgactttatggagaatatttcactggaaggaaagactaacttctttgagaagagagtnggcgagtatcacangatgggantgatgtcaagnccaacagagaattcttttaccttggatgctgacttntaaangaactgaanatgtgcccttacttggctgattttttttttncatcncataagaaaaatcanctgaagtgttaccnactngccncaccatgaattgttcgtaatgttnatttcccnatntttaaactgngtactaccttacaaccagncctgtgtgttataaagctggtagtataccttttccanaaggctgctggctgtgacttccatacagagacatggcngtgttgggtttaagtgggggngccctttttgacctagcccgcgggantaacagntttttaccgcacaccngtaaaatcngctcctggtcaccaaatttat

SEQ ID NO: 3185 - DNA, 127 bp, Homo sapiens
acagttgtttggcctacctgatgctatctctaaactacttttaaaatgaagacatttgggtgtttcatgtcagtgaattatcttttctcttggacttaacaaacatactgttcccatacatagtacc

SEQ ID NO: 3186 - DNA, 225 bp, Homo sapiens
cgaggtacttttgtgcatagagtgcggcattatcacaaatctgggattttaagagctccaataagccggcttcctcttcatcatcagtttgtaaaagcttattatccaatgttaagagagtatgaaaattattcatccaagtttccatattatcttcaaaaaattcagggagatcctgaaagtttaaactatagaacaattttgagatcaggatcaggcccgcgt

SEQ ID NO: 3187 - DNA, 657 bp, Homo sapiens
  misc_feature 80, 144, 177, 191, 233, 364, 491, 494, 643, 651, 653: n = A,T,C or G
acagataaaagatgtaaatctggaggttacggccaagccagttccattaaattcaggagtcagattccaggtttatgtanaagtttctaaaatgaaaatcaatgttactgaaattcctgacacattgcgtgaagatcaaatganagacaaactagagctgagcttttcaaagtcccnaaatggaggcgganaggtggaccgcgtggactatgacagacagtccgggagtgcantcatcacgtttgtggagattggagtggctgacaagattttgaaaaagaaagaataccctctttatataaatcaaacctgccatagagttactgtttctccatacacagaaatacacttgaaaaagtatcanatattttcaggaacatctaagaggacagtgcttctgacaggaatggaaggcattcaaatggatgaagaaattgtggaggatttaattaacattcactttcaacgggccaagaatggaggtggagaantanatgtggcaagtgttctctaggtcaaccctacatagcatctttgaagaatagacttaacagaatcatgaaaactattctttttaccccgattctgtaatgttgacaaaaataatatcttttccttaaaaagaaacttaattttacctccnttttttanancaaa

SEQ ID NO: 3188 - DNA, 440 bp, Homo sapiens
  misc_feature 419: n = A,T,C or G
ggtacaaaaccaaatgtttgttactataacttctgcatcacaattaaaatccaaacagttttttaaaaacagtcaactcaatcaaaacccactacttcagaatcaatagcttctttgaagccacagtaacacttaaatatggttaagactcgaatgcagaaatttggttggttggaaagctaattaaacttccaacttgctcaaatagaattacaaaaaggcaaaattgtgtttttcacagagatacagtccactggaatcaccaacactggacagctgttagagtatttagagtcctgagataacaaggaatccaggcatcctttagacagtcttctgttgtcctttcttccaatcagagatttgtggatgtgtggaatgacaccaccaccagcaattgtagccttgatgagagaatncaattcttcatctccccgcgt

SEQ ID NO: 3189 - DNA, 653 bp, Homo sapiens
  misc_feature 448, 509, 568, 570, 579, 584, 590, 607, 624, 629, 631, 640,644, 652: n = A,T,C or G
actacttggttcccgatatggatgatgaagaaggagaaggagaagaagatgatgatgatgatgaagaggaggaaggattagaagatattgacgaagaaggggatgaggatgaaggtgaagaagatgaagatgatgatgaaggggaggaaggagaggaggatgaaggagaagatgactaaatagaacactgatggattccaaccttcctttttttaaattttctccagtccctgggagcaagttgcagtcttttttttttttttccctcttgtgctcagtcgccctgttcttgaggtctcttttctctactccatggttctcaatttatttggggggaaataccttgagcagaatacaatgggaaaagagtctctacccctttctgttcgaagttcatttttatcccttcctgtctgaacaaaaactgtatggaatcaacaccaccganctctgtgggaaaaaagaaaaacctgctcccttcctctgctggaaactggagggtgctaggnccctgtgtagtagtgcataaaattctagcttttttcctccttcttggatatgggctcananagtacctcnccccnaccacnctaaggcgaattccacnccctgcggccgtactantggtncnagctcggtnccancttgggtnt

SEQ ID NO: 3190 - DNA, 217 bp, Homo sapiens
  misc_feature 207, 209: n = A,T,C or G
ggtacgaggacattttgccccgcggcttgttggggtctcctttacccatgttgacagatccgcgtccacctggtgcgagcttttcctcagagtcccgcagagcggccggacccaacggagacgcttccctcacggggctccggcgtgaactggtttatgtctaacgcaatcctcagcctcttgttttgcagagttctccgcgccacngnccccgcgt

SEQ ID NO: 3191 - DNA, 319 bp, Homo sapiens
  misc_feature 286, 310: n = A,T,C or G
acataaagtaactggtatatgtgcacaagcatattgcattttttttttttaactaaacagccaatggtatgttttgattgacatcaagtggagacgggatggggaaaaatactgattctgtgaaaataccccctttctccattagtggcatgctcattcaactcttatctttatattccagtaagttattttgctctcactgttttaacaaaaaaaaacaacaacataaaaatccttgcataccttgttcaattggagaattttaatggttttcatttatcattgnaaaacccaaggacaattttatacntttttgtcc

SEQ ID NO: 3192 - DNA, 658 bp, Homo sapiens
  misc_feature 511, 515, 582, 587, 603, 614, 625, 634, 644, 649, 655: n = A,T,C or G
acgcggggggggatggcttggtagtggactttctggggtttgcctgttacgccagactcggacttctaagctttaagtgtggcccaggaggtttcttctccctgggagggcttggctcccaagaagtcccagggcagccgaggccagccctgcctgggttggagaaactgactttgtgccttaagtctactcagtgcctggtgaagccaccctcagcccttcacaggcctgaaccagtaggggccagtgggccaggtaagccctagagccttgaaccaggaatatccaggaagaggaaattccctttgagcccccagatggtattgcagcttcgctgcctgcgttcctgggagcgtctggagctcacagtgatcagtgaccacatcattctctctgagcagaggagcaggaatccctcaagcagcaacctggtcttggctggtgggcagatgcaaatagtttttgctgttattaatgaaagtaattactaaatgcacttaaaccaaggcangaangaatggaaaggatggagctagaaagctcaaaatgggccaaacaagggtgtgacacttgcaaagacanggctnttactttatcctccanggagcttcganaccatccactncaacacaanaactggttanggaanaatttnttt

SEQ ID NO: 3193 - DNA, 313 bp, Homo sapiens
acgcgggggagtcagaggaggggcccgatgtgctccggtggctggaccgacaactcatccgactgtgtcaaaagtttggacagtataacaaagaagaccccacttcttttaggttatcagattccttttctctatatcctcagtttatgttccatctgagaagatctccatttcttcaagtgtttaacaacagtcctgatgagtcgtcatattacagacatcattttgcccggcaggacctgacccagtccctcatcatgatccagcccattctctactcttactcctttcatgggccaccagagccagtacc

SEQ ID NO: 3194 - DNA, 537 bp, Homo sapiens
  misc_feature 387, 468: n = A,T,C or G
acaatgtatgaagctaggtgggattaaaactgtctccagtatttacccaataccagatacacaaaagacattaatcaatagatcctaccaactgtaacccctccaaaaaaaaaaaaaaaaaaaaaaggtcccaggaaggatgtgggaaacactttgcatcacccagcaagctgaaacgacatgccaaggcccacgagggctatgtatgtcaaaaaggatgttcctttgtggcaaaaacatggacggaacttctgaaacatgtgagagaaacccataaagaggaaatactatgtgaagtatgccggaaaacatttaaacgcaaagattaccttaagcaacacatgaaaactcatgccccaaaaagggatgtatgtcgctgtccaaganaaggctgtggaagaacctatcaactgtgtttaatctccaaagccatatcctctccttccatgaggaaagcccgcctttttngtgtgaacatgctggctgtggcaaaacattttgcaatgaaacaaagtctcactaggcatgctgttgtcc

SEQ ID NO: 3195 - DNA, 667 bp, Homo sapiens
  misc_feature 502, 561, 636, 640: n = A,T,C or G
cgaggtacagatttcttacatgcatatattgcatcgtggtgaagtgggggcagttccttttgattgctgagtagtattccatggtatggatgtacaggtccagggtatagcttcccacactatggatttcctacttatggtgggattactttccatcctggaactactaaatctaatgctgggatgaagcatggaaccatggacactgaatctaaaaaggaccctgaaggttgtgacaaaagtgatgacaaaaacactgtaaacctctttgggaaagttattgaaaccacagagcaagatcaggagcccagcgaggccaccgttgggaatggtgaggtcactctaacgtatgcaacaggaacaaaagaagagagtgctggagttcaggataacctctttctagagaaggctatgcagcttgcaaagaggcatgccaatgcccttttcgactacgcggtgacaggagacgtgaaagatgctgctggccgtccagcgccatctnactgctgtgcaggatgagaatggggacagtgtcttacacttaacaatcatccccttcantctcacttgtgagggatctactagaagtcacattggtttgattctgatgacatatcacatgagaaatgatctgtnctgnccggcggccgttcgaaaggcgaattct

SEQ ID NO: 3196 - DNA, 292 bp, Homo sapiens
ggtacctgcacgtctcatcgttttctgccgaagcaaacactctacgaaatcatcatattctatcttgcactctttctctgcccgagtataaccgattccatgtgcacattctatccattctttttcaaaagcatggcatcgaccagccatcttgtagggctgttcaccactctggattgtcaaccatcgatctatgttaaggccgaaccttttctggatgtccaagaaaggcatggccgatgctcgtgcccttgactcttctctggccgccgcttcagaacgactcccgcgt

SEQ ID NO: 3197 - DNA, 673 bp, Homo sapiens
  misc_feature 655, 666: n = A,T,C or G
ggtaccccttaagccgtggaaggagagtttctggatcaattagagtgagttttcctagacattcagcaacaacatttctggttccttcctctgcacactcacagtgctttagtaataaggcccagatgttttcaacatatggtttaaggcccaccactgatgcagagctaataatttccttcaaggaatgaagtaaaagatactgccttttgggttgactagttatttcttgcaggacaaacggcagatattcaggaaggttgcccacactaatgctgcctaatgcataggatgcagctgatttgacttcttcactaggagatgagaaagcttctagtattacagattttagttccaactgtccacttaagtcaatatgatgcccaacttctccaagagaaagtagagctaagagacgaatggaatctgtagaccttgagttcttgacatcttgaataaactgacctactacagctggtccctctttagggcatgctcgagtaaggggcagctacacatttggcaatggaataataagactgcttatgagtaagagctgtgctcttgagagtaaactggaccagtcagcatgcgcaacaaatcatgtatcctaaattattggtccagtgacaaccagagcttggaaaaagttacntggcactaaanccccccc

SEQ ID NO: 3198 - DNA, 661 bp, Homo sapiens
  misc_feature 548, 616, 631, 657: n = A,T,C or G
acacgagaagctccgaggatggctgaagtccaacgtctctgatgcggtggctcagagcacccgtatcatttatggaggctctgtgactggggcaacctgcaaggagctggccagccagcctgatgtggatggcttccttgtgggtggtgcttccctcaagcccgaattcgtggacatcatcaatgccaaacaatgagccccatccatcttccctacccttcctgccaagccagggactaagcagcccagaagcccagtaactgccctttccctgcatatgcttctgatggtgtcatctgctccttcctgtggcctcatccaaactgtatcttcctttactgtttatatcttcaccctgtaatggttgggaccaggccaatcccttctccacttactataatggttggaactaaacgtcaccaaggtggcttctccttggctgagagatggaaggcgtggtgggatttgctcctgggttccctaggccctagtgagggcagaagagaaaccatcctctccttcttacaccgtgaggccaagatcctcanaaggcaggagtgctgcctcttccatggtgccgtgcctctgtgctgtgtatgtgaaccacccatgtganggaataaccttggcnaaaaaaaaaaaaaaaaaaaaaaaatncctg

SEQ ID NO: 3199 - DNA, 666 bp, Homo sapiens
  misc_feature 607: n = A,T,C or G
cgaggtaccattgttttgcgtggtgccactcaacaaattttagatgaagcagaaagatcattgcatgatgctctttgtgttcttgcgcaaactgtaaaggactctagaacagtttatggaggaggctgttctgagatgttgatggctcatgctgtgacacagcttgccaatagaacaccaggcaaagaagctgttgcaatggagtcttatgctaaagcactgagaatgttgccaaccatcatagctgacaatgcaggctatgacagtgcagacctggtggcacagctcagggctgctcacagtgaaggcaataccactgctggattggatatgagggaaggcaccattggagatatggctatcctgggtataacagaaagttttcaagtgaagcgacaggttcttctgagtgcagctgaagcagcagaggtgattctgcgtgtggacaacatcatcaaagcggcacccaggaaacgtgtccctgatcaccacccctgttaagcattcccacgtgctgtcgatctttggaccagtttctagcaaagttgtgtttgaaagatctctattaaaagaaactgtggaatctgttatcggtgcccattatatncttaagttggatattaactgaccttcctttacataggtctaattattgccggccatttc

SEQ ID NO: 3200 - DNA, 653 bp, Homo sapiens
  misc_feature 550, 609, 612, 625, 648: n = A,T,C or G
acgcggggtctgccgttgggtgaggcgcggagcgaagtgaagggtggcccaggtggggccaggctgactgaagagagccaaaggaaatcaacatttgaattgactacccaatgtcctgcccctgtttctgtcctgtagcacttaggaaagatggatactatgatgctgaatgtgcggaatctgtttgagcagcttgtgcgccgggtggagattctcagtgaaggaaatgaagtccaatttatccagttggcgaaggactttgaggatttccgtaaaaagtggcagaggactgaccatgagctggggaaatacaaggatcttttgatgaaagcagagactgagcgaagtgctctggatgttaagctgaagcatgcacgtaatcaggtggatgtagagatcaaacggagacagagagctgaggctgactgcgaaaagctggaacgacagattcagctgattcgagagatgctcatgtgtgacacatctggcagcattcaactaagcgaggagcaaaaatcaactctggcttttttaacagaagccaaccatncagcagcaatgctgggaacaaaaactatcaaccattgtgaatcttggttcatttatcanatntactttgacaaantgataatactggatgggactttntttgg

SEQ ID NO: 3201 - DNA, 560 bp, Homo sapiens
  misc_feature 545, 549: n = A,T,C or G
ggtacttgtcatcaaaggcccaggcagtcctctggaataggctttccagctgctcatccttggtgtattctaacacctcagcaacatgacgaagaatgctataaacagttttggattttgtgaatttgtcttcacatttgattgcttcctctggagaaactcttctttttgacaaatcaatatatcctttttctttgtccaccctaatgacaaccacacactcattcctgccaattcggatgagtttgttgatagaacggatacgccttctggataattcactaagaagaatcatgccttcaatgttgttgtattccagcaagctgacataagcccccatttcagcaatggatctgacattcaccatcactacatcttccacctcaggaaatttgtgttgataaaatctacaacttagacccggcattctgaggtatgtgtgtgattcccgcactggagcccagagccgacttcttcaatcacagagaccagacttgcttcccctcaccggccggcgatcctcttagcgtcccgcgtacctgccnggcnggcgctcgaaa

SEQ ID NO: 3202 - DNA, 660 bp, Homo sapiens
  misc_feature 507, 554, 599, 656: n = A,T,C or G
ggtacgtccaggcaccgccagccactgtcttcatgcaggaaccacagtgccagatccccacagctcgtctcttcatcttggttttgccacagaaagagcaagtgtacttcctgctgttcttccacaggaaaaatgcttacttcttctacaattacctgtgaatcttctacaggattatcctcagggggagcagttacttctgtgatttctatcccttcattttctagaggttcatatactgcttgttcctcatagacttggtatgttacatcatctgtatcatggtgcaatctttcatcttctactactggttcactggaatctggattttcctgctcagacatcatctcttccatatcctgattacagtcttgtgaaactgtctcttccacgtggtaactatgctcggtttcttcatgagatacttcaggttccagggtctcaaatctatcatctacatcaagtcgccataagaaactcatcatcctcttggtgtgggtctcctgngggtccatcttcttggtgcaagtcttctcctcaactgctcctgctgntggggcttccctggcccttctttcggccgtgaagacaccattgtncacttcacagctattttcttccttggccaatgctaattgccatgtttgctgtcctgncccg

SEQ ID NO: 3203 - DNA, 329 bp, Homo sapiens
acgcggggattcctgaagctgacagcattcgggccgagatgtctcgctccgtggccttagctgtgctcgcgctactctctctttctggcctggaggctatccagcgtacctctggtgctgtagaacctgtagcaaggtgctcttggcaggcacccggtatagttctgccctgtcctcatcctcaaagtagacctccaaattatcagggcaatatttttgctctaggtcccaagagggtgtttcaccaaacatcaccattagatgatcaataaacctggagtcctcatgaaaagcagagatgaagtccgactgggcatactctgggtacc

SEQ ID NO: 3204 - DNA, 348 bp, Homo sapiens
acttcataaaatcctcttatagagttactcttgccctagattgtaaattaagtttggcattattgtcagactggatggagggtgaagtaaaatagtatgaacaattaagaggctctccccctcttgtctttaagccatattctcctacatgtattttataagaaaatgttaagtcaaattttagtggctctttaattcctgacctcttcattctccttttcagtataacctcccctatgctcatgcccacacagacaaaaaaaacaaaacgaaatacacacagaaaaaagtctttccaaactgtttaagtatttaaacatctgagccaaaaaaaaaaaaaaaagtacc

SEQ ID NO: 3205 - DNA, 656 bp, Homo sapiens
  misc_feature 534, 625, 641: n = A,T,C or G
actctatgcattctatctatacagaaacacctatttattattacagttgatttatgcaggattaacatttttggtgttaaaattgttaaacatcatgcttactgcacatcaactctccataatgaatctgaacttcacaatgatttaccaaacactttacttaaattactaattaaataaatgaaaaatgcaccgagccaaacaaaacttaactgggctataaagaaaaaaacccttcaaaacagtccatatacacatctatttcaaaactacctttgctagctagcccctttcccaaagttttagcctgaaaaaacagtaaaatctacacaaaattttattgcaatcatacaagggttacattaggtcaacaaatactatgatgcaattttacatttattaaactacagttcaaagcacaaatttacacattctaaatacactaaacgttatctaatgaagtcacactggtcttctaacatttgatatatctgggtgaaagacatgaactttacaagactttaaacacaaatncttagtataaaactgggtctggatgttaacgattaatggggaacccaataatgggctcatctcactaagcatccttttggtgcatatttantttaacgcctaagggnagacaaactggtagg

SEQ ID NO: 3206 - DNA, 662 bp, Homo sapiens
  misc_feature 519, 556, 576, 586, 591, 634: n = A,T,C or G
ggtaccagtggaggaaggccttccggcggaacatggcagtgaactgctccgagatgcgcttgaagagctcctggatggctgtgctattgccaatgaaggtgactgccatcttgaggccacgaggtgggatgtcacagacggctgtcttgacattgttggggatccattccacaaagtagctgctgttcttgttctgcacgttaagcatctgctcatcgacctccttcatggacatccgaccacggaagacagcagccacggtgaggtatcggccgtggcgggggtcacaggcagccatcatgttcttggcatcgaagacctgctgggtgagttccggcactgtgagagctcgatactgctggcttccacggctggtgagaggggcaaagccaggcataaagaaatggagacgtgggaaggggaccatgttgactgccaacttgcggaggtcaacattgagctggccagggaaacggaggcaggtggtgacaccactcatggtggctgagacaaggtggntcaaatccccgtaggttggtgtggtcaactttcagantgcggaagcagatatcatanaaggcctcgntgtcnatgcaataggtctcataatattctctaccactgatggaccganagggtggcattgtagggctcgacacggg

SEQ ID NO: 3207 - DNA, 651 bp, Homo sapiens
  misc_feature 589, 603, 621: n = A,T,C or G
acagacaatgtttgtttcttttgtaaaaagcagtaagttatgcccagtaactaaatgaattcaaaatggccaagacaaagaaaactaagaaagattttgccttccctctcctaccagctatggagcacagcatgttgggagatgaacagggaaaagaccaaggtaaggagcctgggagggaaggtatcaacattttaaactgaactaaaaataaaagtataaatgagttggatttagggttagatcagtaagacatgattcttactgaacagaagtttttagtatctgtctgcattttgggtagattttcaacatcttgatgtaactaagacacacttccacaagagccactaggataaccccactgaagcgcttatggagtaaagtgatgtaagcgaccagcaagcagtccactgctcctatagattgggtcctcccttccttctttccttccttcctttcttcctgcctccctgagaagctacattttgtaatctctggagaagagcacgagatccaaccccctaaagtgtgggacggtggaggaacaatggtgggaatgggaagaagtctcacctaaatgcaacancccgggaattgagntggttatcttgtctttgngatgaggactaatttggagggagaaaaaaa

SEQ ID NO: 3208 - DNA, 669 bp, Homo sapiens
actttaatagctcaaactcagagtcatcgtgctcccaattccaaagagattcctaaaagaggcaacttcggccgtttgagaagccagcgctcacccacccggggtctctgtgcattgacctttgggtgctgacttggagaaaagcacaaacacgaccagtcccatcctggctcccgtggggcttcttctatctacgcattgtatcgactgcattagttggactaagatgatgactcagttaaaggaggagacaaatgctgactgtctaagcaagaatggcccaagctggcaagaaaaagcacactgcatacataggatacagaagggcagagcttctgcctgcggatctgcaacattacatttgttttgcctgcaaactatcaagaaggattctgttggccagggagtctccactgaacaaacaaaatggcagtcaaaagtcttgagtgtcctattccagcagcccagagtcctcatccgtcatccacgggagagtctttgagggaaacatgaagtccagctcatgcctctgcctatgggtcaatttcttcgggaatactgtgatcatgatatcttcattacccctgcggaccaccatgttcagggtgctttccttttaatgacgtcgctgacatcattggcggagaccacggctgtccattgatgctt

SEQ ID NO: 3209 - DNA, 306 bp, Homo sapiens
actggctcctcatctcactcgggcttatgccaaagatgtaaaatttggtgcagatgcccgagccttaatgcttcaaggtgtagaccttttagccgatgctgtggccgttacaatggggccaaagggaagaacagtgattattgagcagagttggggaagtcccaaagtaacaaaagatggtgtgactgttgcaaagtcaattgacttaaaagataaatacaaaaacattggagctaaacttgttcaagatgttgccaataacacaaatgaagaagctggggatggcactaccactgctactgtacc

SEQ ID NO: 3210 - DNA, 662 bp, Homo sapiens
  misc_feature 558, 624, 632, 655: n = A,T,C or G
atgcgggcatcaccatggctacagaaattggttctcctcctcgttttttccatatgccaaggttccagcaccaggcacctcgacagctgttttataagcgacctgattttgcacaacagcaagcaatgcaacagcttacttttgatggaaaacgaatgagaaaagctgtgaaccgaaaaaccatagactacaatccatctgtaattaagtatttggagaacagaatatggcaaagagaccagagagatatgcgggcaattcagcctgatgcaggttattacaatgatctggtcccacctataggaatgttgaataatcctatgaatgcagtaacaacaaaatttgttcggacatcaacaaataaagtaaagtgtcctgtatttgttgttaggtggactccaaaaggaagacgcttggtcactggagcttctagtggggagtttaccctgtggaatggactcactttcaattttgaaacaatattacaggctcacgacagcccaatgagggccatgacgtggtcacataatgacatgtggatgttgacagcagaccacngaggatatgtgaaatattggcagtccaacatgaacacgtcaagatgttcaagcccataaggaggcnatagaganggcaggttatacacaataaccanttttgga

SEQ ID NO: 3211 - DNA, 650 bp, Homo sapiens
  misc_feature 539, 560, 586, 587, 588, 591, 592, 594, 598, 599, 600, 607,609, 617, 645: n = A,T,C or G
acaaggaatcctttattggtaacatcttggtggctggctagctagtttctacagaacataatttgcctctatagaaggctattcttagatcatgtctcaatggaaacactcttctttcttagccttacttgaatcttgcctataataaagtagagcaacacacattgaaagcttctgatcaacggtcctgaaattttcatcttgaatgtctttgtattaaactgaattttcttttaagctaacaaagatcataattttccatgattagccgtgtaactcctgcaatgaatgtttatgtgattgaagcaaatgtgaatcgtattattttaaaaagtggcagagtgacttaactgatcatgcatgatccctcatccctgaaattgagtttatgtagtcattttacttattttattcattagctaactttgtctatgtatatttctagatattgattagtgtaatcgattataaaggatatttatcaaatccagggatgcattttgaaattataattattttcttgctgaagtattcattgnaaaacatacaaaataaacatntttaaaacatttgcatttaaaaaaannnctnntntaannnaaaaggncncgggaggngagcggcacatggcgtcagtctaacggntgccg

SEQ ID NO: 3212 - DNA, 536 bp, Homo sapiens
  misc_feature 431, 442, 530: n = A,T,C or G
accgaccatagagcaagaatcaagattctgctaactcctgcacagccccgtcctcttcctttctgctagcctggctaaatctgctcattatttcagaggggaaacctagcaaactaagagtgataagggccctactacactggcttttttaggcttagagacagaaactttagcattggcccagtagtggcttctagctctaaatgtttgccccgccatccctttccacagtatccttcttccctcctcccctgtctctggctgtctcgagcagtctagaagagtgcatctccagcctatgaaacagctgggtctttggccataagaagtaaagatttgaagacagaaggaagaaactcaggagtaagcttctagcccccttcagcttctacacccttctgccctctcttcattgcctgcccccaccccanccactcaactnctgcttgtttttctttggccatgggaaggttaccagtagaatcttgctagggtgatgtgggccatacattcctttaataaaccattgngtacct

SEQ ID NO: 3213 - DNA, 468 bp, Homo sapiens
acgcggacacacagtcaagctttaaagaaagtgtttgctgaaaataaagaaatccagaaattggcagagcagtttgtcctcctcaatctggtttatgaaacaactgacaaacacctttctcctgatggccagtatgtccccaggattatgtttgttgacccatctctgacagttagagccgatatcactggaagatattcaaaccgtctctatgcttacgaacctgcagatacagctctgttgcttgacaacatgaagaaagctctcaagttgctgaagactgaattgtaaagaaaaaaatctccaagcccttctgtctgtcaggccttgagacttgaaaccagaagaagtgtgagaagactggctagtgtggaagcatagtgaacacactgattaggttatggtttaatgttacaacaactattttttaagaaaaacaagttttagaaatttggtttcaagtgtacc

SEQ ID NO: 3214 - DNA, 443 bp, Homo sapiens
  misc_feature 29, 213, 324, 333, 340, 349, 369, 378, 420, 423, 440: n = A,T,C or G
ggtactgatacaccatgttggcaagcagnttggaggcagctgctacagagatgcgttccttatttcgaagctcatagattcgacattgtcgagccaacagccgttcccagaagctgcaatccgctgcgcccccagccatggtgcctagcaggtatgggttgatctctatcaccttcttcaccgtctgggaggcaatgtaagcacccgctgtanccctggagtcagctgcaactatgactccatggcggaacttgaaggccagggtggttgttccatgaagcatttcgattctggctcttctgggacaccccagcctggcgcggncaggctcanaccatcnctgagactncctggacctagatccagcanatctgcacnacccccaagtcgacccgcggacctgcccggggcggccgttcnaanggcgaatttcacacacntgc

SEQ ID NO: 3215 - DNA, 604 bp, Homo sapiens
  misc_feature 458, 485, 521, 541, 559, 567, 576, 578, 600: n = A,T,C or G
acacttgaaaccaaatttctaaaacatgtttttcttaaaaaatagttgttgtaacattaaaccataacctaatcagtgtgttcactatgcttccacactagccagtcttctcacacttcttctggtttcaagtctcaaggcctgacagacagaagggcttggagattttttttctttacaattcagtcttcagcaacttgagagctttcttcatgttgtcaagcaacagagctgtatctgcaggttcgtaagcatagagacgatttgaatatcttccagtgatatcggctctaactgtcagagatgggtcaacaaacataatcctggggacatactggccatcaggagaaaggtgtttgtcagttgtttcataaaccagattgaggaggacaaactgctctgccaatttctggatttctttattttcagcaaacactttctttaaagcttgactgggntgggcactcatccaagtggatgaatantcatcaagggtttgttgcttgtcttggtttatatanagcttcttcattatgtttgnagtccagatgaattggtnaccccaancttttggananggtctggggcagttttgggtcnggcg

SEQ ID NO: 3216 - DNA, 589 bp, Homo sapiens
  misc_feature 461, 540, 544: n = A,T,C or G
ggtactgctccccaccttagttcttcacaactaacatagaaaattgtcgaaaagtaggggcaagcatttgcaaaaacaaacaaaaaatccccagcttattataagcatgaatatgtatgatggaatttcttcccagcaatagacttccaaaccatcaagaaatcaccagaactaagtttgccaagttattttgcctatgtccaacaagagatgcacttatatgtccaacagaggagctgaaaattaaacttagtgtttagtttgggggtgggttgggaaattcagccaccattttaaaatgactgtcttaaaaaaaatgaccaccaaaaataggttcactaaatttattttaaaaatcataaaacgtttcttacaaaagagcattacattctgcacactgctctgaacagatgccagggacatgtggactattgttacttttcctcctgtcccacccccanatggtacagtgccacaaagcaaggtgttcacaataattcatggggggaatttttaaccaccacaattccgaaaataaantccnctcctctgctgctgttcaaaattcaatgttagttttcaccccttc

SEQ ID NO: 3217 - DNA, 596 bp, Homo sapiens
  misc_feature 437, 506, 512, 553, 555, 559, 569, 578, 584, 585, 589, 590: n = A,T,C or G
acgcgggaaccatcattgacattctaactaagcgaaacaatgcacagcgtcaacagatcaaagcagcatatctccaggaaacaggaaagcccctggatgaaacactgaagaaagcccttacaggtcaccttgaggaggttgttttagctctgctaaaaactccagcgcaatttgatgctgatgaacttcgtgctgccatgaagggccttggaactgatgaagatactctaattgagattttggcatcaagaactaacaaagaaatcagagacattaacagggtctacagagaggaactgaagagagatctggccaaagacataacctcagacacatctggagattttcggaacgctttgctttctcttgctaagggtgaccgatctgaggactttggtgtgaatgaagacttggctgattcagatgccacggccttntatgaagcaggagaaaggagaaaggggacagacgttaaacgtgttcaaatccattccttaccccagaangctttncacaacttcgcagagggtttctaaaaacaacaaataccttngncgcnaccaccttanggcgatttntcaaanntggnnggcggt

SEQ ID NO: 3218 - DNA, 604 bp, Homo sapiens
  misc_feature 484, 554, 584, 587, 603: n = A,T,C or G
ggtacgcgggccatccatccccaaggagaacttcagttgcttgactcgtttggatcacaaccgagctaaagctcaaattgctcttaaacttggtgtgactgctaatgatgtaaagaatgtcattatctggggaaaccattcctcgactcagtatccagatgtcaaccatgccaaggtgaaattgcaaggaaaggaagttggtgtttatgaagctctgaaagatgacagctggctcaagggagaatttgtcacgactgtgcagcagcgtggcgctgctgtcatcaaggctcgaaaactatccagtgccatgtctgctgcaaaagccatctgtgaccacgtcagggacatctggtttggaaccccagagggagaagtttgtgtccatgggtgttatctctgatggcaactcctatggtgtcctgatgatctgctctactcattccctgttgtaatcaagaataagacctggaaatttgttgaaagnctccctattaattgatttctcaccgtgagaagatggatctttactgcaaaggacttgacagaaagaaaangaaagtgcttttgaatttctttcctcggcntgntatacaatgatgttant

SEQ ID NO: 3219 - DNA, 308 bp, Homo sapiens
ggtacaacaccgggaatattgccagagttaacctgaccaccaacacgattgctgtgactcaaactctccctaatgctgcctataataaccgcttttcatatgctaatgttgcttggcaagatattgactttgctgtggatgagaatggattgtgggttatttattcaactgaagccagcactggtaacatggtgattagtaaactcaatgacaccacacttcaggtgctaaacacttggtataccaagcagtataaaccatctgcttctaacgccttcatggtatgtggggttctgtatgtcacccgt

SEQ ID NO: 3220 - DNA, 437 bp, Homo sapiens
acgcggggggccaatgtgccagcagatctgagctgagaatcatcctggtgggcaaaacaggaactggcaaaagtgctgcagggaacagcatcctcaggaagcaagcatttgaatcgaagctgggttcccagaccttgactaagacttgcagcaaaagtcagggaagctggggaaatagagagattgtcattattgacacaccagatatgttttcttggaaggaccactgtgaagctctgtaccaggtttttctttctttcttttttgccttaggagcttagctcaaagttcagctaacctttgacactactagtgtcatttagtaacagtaatctttgacactactaagtgtcatttaggagcttagctcaaagttcagctaacctttgacactgctagtgcattcaagaaagggtagggaatgaaagtacctcggc

SEQ ID NO: 3221 - DNA, 601 bp, Homo sapiens
  misc_feature 53, 135, 140, 180, 278, 336, 473, 506, 551, 562, 599: n = A,T,C or G
ggtactttttttttttttttttttttttttttttaggactcaactcatggaanaaaaactttaattgctgtttccaaaaacatcagtatgaagtagaaattggtttcaataacattagtaaagaatatgttctanaaagnggaggtaactggatgtaaaattctggcagcaatttaatanaacagtcctagagggttaggctgaggccaacacctaatgaggacgaaagccttgtctgtggggaattttggatgatacttggagaaatattacactgngcataaaccaaattgagttgctttcacaagtgttgtaaagtttcatatagtaaaaggntttttctacatgcacttcaatttcacagcaagagtggcagagaatacctaaacacagaagagagcattcatgcaagatatctaactccttgatataataatgcatacaattcaaaatgattacactatcattacatntagggcttttcttgcaactcccagtggtggttntgggaaagcactgcccccagcatcgacatttaaaaagcatccccnccttctacaanggggctctttttggggtttttccttctttttcctaanaa

SEQ ID NO: 3222 - DNA, 607 bp, Homo sapiens
  misc_feature 76, 167, 192, 199, 208, 268, 292, 322, 339, 356, 359, 361,382, 384, 385, 391, 408, 409, 415, 418, 446, 459, 462, 468,484, 509, 515, 520, 523, 525, 528, 533, 535, 537, 540, 541,544, 581, 586, 598, 599, 604: n = A,T,C or G
accctcaacttcaaaggaaaaaaggttatatttgggaatttaaatatctttttgttcagtgcaattacacactatnaaaacctagaattgcatacaacgccttggtcatcctgtgagtgcttgtttgatgatgatataagggcaattacatttaaagcaaaatttcnaaaaagtgcaccctcctttgtgaanatatcanacttagcancccacctagaggataagttgttcaggagtggttctgattaaagcccagatttcagagctngcattttctattacagcatctcanaagatagcgctaaatgctcacagttctctnaagagtatttttttttntcttcccaaccatccgnatntnctggttgtgcaaaatgtggantnnaactangaaacagatgagaacanngatctnctnactatgttttagctgcttccattttctnttgaagaaaatanttntatgcncatcgttaatgactgncattgacggaagacatgaacgtttngatccntcgtnaananaancctgnantngannaanatccttttaaacattttctgctatactgctcaacaanatganagtttcttcttnnaaaanacc

SEQ ID NO: 3223 - DNA, 400 bp, Homo sapiens
acaaggaccacttcttcagaagcagagctctcctctcagtctcctcaaaggtgagctccacctgaggccgctctcttgctttatccaagaactttagaggggtaataaaatcttcaataggaattagctcttgagtagccttttccagttttcggatcttccttttcaagcgctcctttgcttcttggtcttttttaggatctaccttcttcttttttcgaagaggttctgatctcatgggaatgagttcccagaaagacaacaatgacgctcgctggtgagtctctctaagctgcgtctgccaagttcccagaagcccgctagtcgggcgcagggctagcgagatacttcgcagcacggaggccgtcatggctaccctcgcccgcttcccccgcgtacc

SEQ ID NO: 3224 - DNA, 417 bp, Homo sapiens
acgcagttttcatgtccttgccttaaagagctctctagtctaacggtcttgtagttagagatctaaatgacattttatcatgttttcctgcagcaggtgcatagtcaaatccagaaatatcacagctgtgccagtaataaggatgctaacaattaattttatcaaacctaactgtgacagctgtgatttgacacgttttaattgctcaggttaaatgaaatagttttccggcgtcttcaaaaacaaattgcactgataaaacaaaaacaaaagtatgttttaaatgctttgaagactgatacactcaaccatctatattcatgagctctcaatttcatggcaggccatagttctacttatctgagaagcaaatccctgtggagactataccactattttttctgagattaatgtacc

SEQ ID NO: 3225 - DNA, 615 bp, Homo sapiens
  misc_feature 205, 251, 328, 428, 472, 482, 483, 493, 505, 523, 525, 542,559, 577, 578, 593, 599, 601, 606, 609: n = A,T,C or G
ggtacaaaggacggagcaccatcaacccgtccaaggccagcacaaacccagatcgagtgcagggagcaggaggccaaaacatgagggaccgggccaccatccggcgcctgaatatgtataggcaaaaggagcgcaggaacagtcgtggtaaaataattaaacccctgcaatatcaatcaacgggggcttctggcacagtggcaanagtagagccaaatattaaatggtttggaaacacacgtgtgattaancagtcatcattacaaaaatttcaagaggaaatggatacagttatgaaggatccatacaaagttgtcatgaagcaaancaagttaccaatgtctcttctccatgatcgaatccggcctcataacttgaaggtgcacattcttgatactgaaagtttttgaaactacatttggccctangtcacagaggaaaccgaccaaacttatttgccagtgatatgcantcttttatcnnaaatgcttgnaatgtcccttgnaagctatgaaccagggcnangattcgtgaatttggtnacctgaaaaaccttggngtgagaaatgaatctcannaaaaaatctttttanaggganangtcanagnaatttt

SEQ ID NO: 3226 - DNA, 433 bp, Homo sapiens
acacgagaagaaattcaggaagtaagaagtaagagtgaccctattatgcttctcaaggacaggatggtgaacagcaatcttgccagtgtggaagaactaaaggaaattgatgtggaagtgaggaaggagattgaggatgctgcccagtttgccacggccgatcctgagccacctttggaagagctgggctaccacatctactccagcgacccaccttttgaagttcgtggtgccaatcagtggatcaagtttaagtcagtcagttaaggggaggagaaggagaggttataccttcagggggctaccagacagtgttctcaacttggttaaggaggaagaaaacccagtcaatgaaattcaatgaaattcttggaaacttccattaagtgtgtagattgagcaggtagtaattgcatgcagtttgtacctcggc

SEQ ID NO: 3227 - DNA, 593 bp, Homo sapiens
  misc_feature 574, 582, 591: n = A,T,C or G
acttgagtcaaagacgacatttagattcttcagctttgaagcatttagtaacatcattgtctagtcaggcagaggaaagaaattcaaaagcactttctttttcttctgtcagttcctttgcagtaagatccatcttctcacgtgagaaatcattaatagggagaccttcaacaaacttccaggtcttattcttgattacaacagggaatgagtagagcagatcatcaggaacaccataggagttgccatcagagataacacccatggacacaaactctccctctggggttccaaaccagatgtccctgacgtggtcacagatggcttttgcagcagacatggcactggatagttttcgagccttgatgacagcagcgccacgctgctgcacagtcggtgacaaattctcccttgagccagctgtcatctttcagagcttcataaacaccaacttcctttccttgcaatttcaccttggcatggttgacatctggatactgagtcgaggaatggtttcccaaataatgacattctttacatcattagcaggcccaccaagtttaagaccaatttnagctttanctcgggtgngg

SEQ ID NO: 3228 - DNA, 594 bp, Homo sapiens
  misc_feature 440, 476, 560: n = A,T,C or G
acctagaagagaggcgggtcaaagaagtagtgaagaagcattctcagttcataggctatcccatcaccctttatttggagaaggaacgagagaaggaaattagtgatgatgaggcagaggaagagaaaggtgagaaagaagaggaagataaagatgatgaagaaaaacccaagatcgaagatgtgggttcagatgaggaggatgacagcggtaaggataagaagaagaaaactaagaagatcaaagagaaatacattgatcaggaagaactaaacaagaccaagcctatttggaccagaaaccctgatgacatcacccaagaggagtatggagaattctacaagagcctcactaatgactgggaagaccacttggcagtcaagcacttttctgtagaaggtcagttggaattcagggcattgcttatttattcctcgtcnggctccctttgacctttttgagaacaagaagaaaangaacaacatcaaactctatgtccgccgtgtgttctcgtggccagcttgtgatgagttgatccagagtatctcaattttatccgnggggtggttgacttttgaggatcttgccctgaac

SEQ ID NO: 3229 - DNA, 599 bp, Homo sapiens
  misc_feature 436, 469, 518, 531, 533, 547, 561, 566, 568, 576, 580, 584,592, 598: n = A,T,C or G
ggtacgcgggggccgtcggagcccttgcacgcctgctctcttgtagcttctctcagcctagcccagcatcactatggtggacgctttcctgggcacctggaagctagtggacagcaagaatttcgatgactacatgaagtcactcggtgtgggttttgctaccaggcaggtggccagcatgaccaagcctaccacaatcatcgaaaagaatggggacattctcaccctaagaacacacagcaccttcaagaacacagagatcagctttaagttgggggtggagttcgatgagacaacagcagatgacaggaaggtcaagtccattgtgacactggatggagggaaacttgttcacctgcagaaatgggacgggcaagagaccacacttgtgcgggagctaattgatggaaaaactcatcctgacctcacccacggnacttgcagtttgcactccacttatgaagaaaanagcatgacctgactgcacttgttgcttgactactactcttgccatcggnttcccctcgattnanaccacatttgcctnttttttcttttgantttgnancttgcccnggcnggcngttaaggncaattnc

SEQ ID NO: 3230 - DNA, 195 bp, Homo sapiens
acctacagaaaagcctcttctgtctacggggtgtcagtttgacaccctccccacgacagaggctctcgtaaacatccctctcaggcaggtagtccacaggcctctcatagatgccttctggggttgctagctcagcttctgtctgatttgttaacgttttttctctctcttcctccaataactgctcaaagtacc

SEQ ID NO: 3231 - DNA, 600 bp, Homo sapiens
  misc_feature 477, 494, 495, 514, 555, 559, 561, 562, 564, 566, 579, 584,588, 590, 593: n = A,T,C or G
acgcgggggggtcgactgacggtaacggggcagagaggctgttcgcagagctgcggaagatgaatgccagaggacttggatctgagctaaaggacagtattccagttactgaactttcagcaagtggaccttttgaaagtcatgatcttcttcggaaaggtttttcttgtgtgaaaaatgaacttttgcctagtcatccccttgaattatcagaaaaaaatttccagctcaaccaagataaaatgaatttttccacactgagaaacattcagggtctatttgctccgctaaaattacagatggaattcaaggcagtgcagcaggttcagccgtcttccatttctttcaagctcaaatctttcactggatgttttgaggggtaatgatgagactattggattttgaggatattcttaatgatccatcacaaagcgaagtcatggggagagccacacttgatggtggaatataaacttngtttacttgtaatagtnngctggtcatggaacccganggcctgcatcttggttatagtcatctttgtaccaaccaagntgangnngntnaaggaaaaaaacnttcanccananaanccccaat

SEQ ID NO: 3232 - DNA, 360 bp, Homo sapiens
ggtacgcggggggaaggtggcggtggtgaaggtgcaggccgttggggcggctcagaggcaggtgactatgaaaggcttatatttccaacagagttccacagatgaagaaataacatttgtatttcaagaaaaggaagatcttcctgttacagaggataactttgtgaaacttcaagttaaagcttgtgctctgagccagataaatacaaagcttctggcagaaatgaagatgaaaaaggatttatttcctgttgggagagaaattgctggaattgtattagatggtaagtatacagatgtgagtatatgtatttattttctaaggtaaaagagattaaatgtagctaattggttactggt

SEQ ID NO: 3233 - DNA, 599 bp, Homo sapiens
  misc_feature 318, 360, 481, 483, 488, 491, 494, 549, 550, 552, 554, 562,569, 571, 592: n = A,T,C or G
ggtacatggaggagaatgaccagctcaagaagggagctgctgttgacggaggcaagttggatgtcgggaatgctgaggtgaagttggaggaagagaacaggagcctgaaggctgacctgcagaagctaaaggacgagctggccagcactaagcaaaaactagagaaagctgaaaaccaggttctggccatgcggaagcagtctgagggcctcaccaaggagtactttttttttttttttttttttttccatcaacaagtgtttattgatcacctactgtgtgcctggcactgttacagatagtctgggggatacaganaggtctaggatatggcccccacccaccgaagggtttacaatntacttgtgagatcggacacacacacacaaataacgatcaatcaaaaattgtgaatgctaagcatcaagaacaatttatacattgagggttgggggagggaggggtaggaaaagggattggntnatcanaanaanggctcaatgaaggaggtgacccttatgaagttcttccaaccctgaggaggacttnntnangggagacngccttcnantttggaaaaccacttggaacnttggaag

SEQ ID NO: 3234 - DNA, 598 bp, Homo sapiens
  misc_feature 436, 458, 512, 520, 531, 537, 559, 577: n = A,T,C or G
cggtacaaagatgactataaacaagatgcagccctcggtttccatgaacagcacactattacagtaaaccaagtttatattccaccatcaagtgtggctctcccatgacttcgctttgtgatggatcattaagaatatcctcaaatccaatagtctcatcattacccctcaaaacatccagtgaaagatttgagcttgaaagaaatggaagacgctgaacctgctgcactgccttgaattccatctgtaattttagcggagcaaatagaccctgaatgtttctcagtgtggaaaaattcattttatcttggttgagctggaaatttttttctgataattcaaggggatgactaggcaaaagttcatttttcacacaagaaaaacctttccgaagaagatcatgactttcaaaaggtccacttgcttgaaagttcangtaactggaatactgtcctttngctcagatccaagtcctctggcattcatcttccgcagcttctgcgaacagcctntctgcccngttaccgtcangccgancccgccgttcactttccgtttncgacccccgtacctgccnggcgggcggtcgaaagggcaa

SEQ ID NO: 3235 - DNA, 603 bp, Homo sapiens
  misc_feature 492, 497, 506, 527, 542, 544, 573, 576, 597: n = A,T,C or G
atcaatttacagtcgcatcaataaataaccaaagagtcccatttcttcctcacattctttggcagtataggaaagtagagattaccctccaccctttattgttgcaaatttaatagggggagaagagaatggtgggttttttttcccccttaaaatgtaatattttttcccacatgtttactagtcatttgcttttcttctgtattttgaagttgtctaaatcattcaggagtctctaatacacacaatgtcttgtctttcttacaacatactctttgataggcaagggcatgaaagctgcatgtctttcccatatttttttcaagttaagcaggaattcccaaaatgactggaattagaatgtcttcttttctcctgggcagccatgctactttaatgtcttggtaataaaacagaaaactgggccatattcttcaaggttatggagggttctgaccatttctgggggacccctatcttgaaggtattggnaagtngagccaatnaagctttttggctttattaancgtttcttttaaggncnttaaaaacccgggccaccgaaactggttnctngggctccttccaccagtcatnatttgg

SEQ ID NO: 3236 - DNA, 596 bp, Homo sapiens
  misc_feature 567: n = A,T,C or G
ggtacaaaaatttgaaagtgtgacaatgacaattatgaaatcctgtgactgaaagtcccctcgagtgcactctgtggtgcacatgcgcccgcccacacaaactctggcatggaaacataaactaatgcaaaccagtgctacccagaagcaccaacacgtgtgttctccattccaccaatcacagaccagtatctactccaaacatccagtaacgaaaactatggcatcttcccaggaacagcaaggcaggcttcttactcacgatgaaccagcacgaataaacccagcaaaaagagaactgcatacttaaatttaggatagtcattcatgaggatcgtcacaattccaatataaggaacaaatcccctggctctccccacaacatcttttttctctagccaatgttgtccttgtttatagaggcctcggtcatcaaccgcattattatctcctttggtcaaaaactttgatatgcccattttgctttcatgaatcttcaaactcggtgaactataggaatctcttttcttctatctaaaacaacaatttctcccctcgtatgggatntttaaactcgatttggttagaaaaaaaag

SEQ ID NO: 3237 - DNA, 587 bp, Homo sapiens
  misc_feature 582: n = A,T,C or G
acacttgaaaccaaatttctaaaacttgtttttcttaaaaaatagttgttgtaacattaaaccataacctaatcagtgtgttcactatgcttccacactagccagtcttctcacacttcttctggtttcaagtctcaaggcctgacagacagaagggcttggagattttttttctttacaattcagtcttcagcaacttgagagctttcttcacgttgtcaagcaacagagctgtatctgcaggttcgtaagcatagagacgatttgaatatcttccagtgatatcggctctaactgtcagagatgggtcaacaaacataatcctggggacatactggccatcaggagaaaggtgtttgtcagttgtttcataaaccagattgaggaggacaaactgctctgccaatttctggatttctttattttcagcaaacactttctttaaagcttgactgtgtgggcactcatccaagtgatgaataatcatcaagggtttgttgcttgtcttggatttatatagagcttcttcatatgtctgagtccaaatgagttggtcaccccaccccgcgtaccttggccggnacacg

SEQ ID NO: 3238 - DNA, 614 bp, Homo sapiens
  misc_feature 380, 410, 438, 447, 468, 469, 472, 504, 512, 525, 555, 574,591, 593, 604, 605: n = A,T,C or G
gcgtgggtcgggccgaggtacgcgggggcttactcgagagctagctgagcgaatgggccggcgactgtggagttagcgtcctcaatgtggacgccctgagctcccattaggagccgctggctgcggcagcaggggactagcgtgagagtttcatgagggaggagcttttttttcgtccattttgttccctaatgaatctgaactgcccagaatggaacctagtatataaggcattcaagaaatacttgttcagtgaatgactacattgacttgagacatgggggaacatcttgcaatgacctggtgccctttgaaggcaaagttggctaaaaaaaagaaaagaacatggaggcagatataatcacaaatcttcgatgcangctcaaagaggctgaagaagagcgactaanagctgcacaatatggtttacaactagtngagagtcanaaatgaattacagaatcaatnnggntaaatgtcgtaatgaaatgatgaccatgactngagagttntgaacaataaaanttccccttcaagagaagttgaactcaagantcgaatgtttaaaagtttnagctgccaatgtaaacntntttaacctccnncaaaaattg

SEQ ID NO: 3239 - DNA, 329 bp, Homo sapiens
acatgatgtcagttcctttgcgccctgactgcatcatcatgcggcggcgaacagtgtcaaatggataggaagtcaacccggcaacagcagtgacagtctgtgcgatcatccagctgatgacgatgtgagtgttcttgggatccggaagcattccctttgcagtgtcatagataccgaagtaggcggctcggtagatgataataccctgcacagacacgttaaagccttggtacgcggggcttttcctgtggcagcagccgggctgagaggagcgtggctgtctcctctctccgccatggcgtgtgctcgcccactgatatcggtgtacc

SEQ ID NO: 3240 - DNA, 599 bp, Homo sapiens
  misc_feature 473, 536, 553, 561, 579, 585: n = A,T,C or G
ggtacttcactgcggacttgacttcttgagcaagaaggctggcactgttcattaagagaatcacagagatgaatctcacaatgcaggaaaactaggtcataatgtccagcaaacatgaacatctgaactgagaaccggctttccgaggactgcccattctcctccacgtggatggtggaatcacgctgatttgagcagctgtttctgatgatgaaatacttcacaaggtcagccttgtcttcagtgggggtggcatagcagttcctcaacaccaggttaaaccgggaggtgtccccttgttccaagatggcacccacatacagcacggactcaacagacagttcaactgcatccccttcgtaaggattcgtgtagttctggtcttggaagagggccatcctgacaatgaactctccattcccgtccacactgacgttcagggaacttacaatgggctgcaaggcagcttggangctgactttcatgtccagtgggtaggcacattggaagtttgatgttgaaggatggtgtctctnatgatgaaatctttggnccaagganagggtgtttttggagatnggcatnggtttggattctct

SEQ ID NO: 3241 - DNA, 599 bp, Homo sapiens
  misc_feature 471, 559, 575: n = A,T,C or G
ggtaccccttaaccccttctccttcacccttagcagcaagtcccacttttctagggggcaagaaaccccaaaccccttccctccgtgtctttacgctctcttttctctgggtttgcttccttcactatgggcaaccttccatcctccattcctccttctcccttagcctgtgtgctcaagaacttaaaacctcttcaactcacacctgacctaaaacctaaatgcctcattttcttctgcaacaccgcttggccccaatacaaacttgacaatggctctaaatggccagaaaatggcactttcgatttctccatcctacaagacctaaataatttttgtcaaaaaatgggcaaatggtctgaggtgcctgatgtccaggcattcttttacacatccgtcccttcctagtctctgtgcccaagtgcaactcgtcccaaatcttcttctttccctcccacctgtccccttcantcccaaccccaggcgttgctgagtgtgtctaaatcttccttttctacaaacccatctgaccttttcccttcttttcacgccaagctangtcccaattctttctnaggctcaattcctccaccctgtaa

SEQ ID NO: 3242 - DNA, 279 bp, Homo sapiens
  misc_feature 100: n = A,T,C or G
acgcgggggttccgaggcgccgccgggagctgccacgtccgagacctggagcagccaccgccgcaatcatggtgtcagtaattaacactgtggatacctnccatgaggacatgattcacgacgcccagatggactactatggcacccgcctggcaacctgctcatcagacaggtccgtcaaaatctttgatgtgcgcaatggagggcagatccttatcgccgacctcaggggtcatgagggtcctgtgtggcaagtggcctgggctcaccccatgtacc

SEQ ID NO: 3243 - DNA, 580 bp, Homo sapiens
  misc_feature 344, 347, 362, 364, 371, 374, 375, 389, 395, 398, 404, 407,412, 427, 428, 431, 434, 435, 438, 439, 443, 456, 468, 471,475, 479, 487, 512, 516, 518, 527, 528, 531, 538, 546, 549,554, 559, 565, 572, 576: n = A,T,C or G
actggagtgaaataaattcagccaacatgtgactaattggaagaagagcaaagggtggtgacgtgttgatgaggcagatggagatcagaggttactagggtttaggaaacgtgaaaggctgtggcatcagggtaggggagcattctgcctaacagaaattagaattgtgtgttaatgtcttcactctatacttaatctcacattcattaatatatggaattcctctactgcccagcccctcctgatttctttggcccctggactatggtgctgtatataatgctttgcagtatctgttgcttgtcttgattaacttttttggataaaaccttttttgaacaganttnaataattataatatnantaatttnttnnttaaaatatatcantaatanttnaattanttntatanttttttaaatttttnnttnaanntanntaanttctttggccggnaccccttagggnaantccnaccncctggggnccgttatttttggatccaaactcgncccntncttggcgtnnaanggaaaanttttcctnggngaaanttttnccctcnattcccncaanataa

SEQ ID NO: 3244 - DNA, 278 bp, Homo sapiens
  misc_feature 171, 249: n = A,T,C or G
acgcggggggagcgggcggcggcgttggcggcttgtgcagcaatggccaagataaaggctcgagatcttcgcgggaagaagaaggaggagctgctgaaacagctggacgacctgaaggtggagctgtcccagctgcgcgtcgccaaagtgacaggcggtgcggcctccaanctctctaagatccgagtcgtccggaaatccattgcccgtgttctcacagttattaaccagactcagaatgaaaacctnaggaaattctacaagggcaagaagtacct

SEQ ID NO: 3245 - DNA, 754 bp, Homo sapiens
  misc_feature 720, 730, 737, 746: n = A,T,C or G
acaaagaaagttttaagtcaaggcctcaccaattcctacagtattagtattgtgtctcaattctcaaaactaacttttaaaaagcttaaacttaacctaaaggattttaaatgaaaatataaactagaatgaacaaacatgagaaatatttctttgaatcagggagctagcacctttgagttttccaaaaaagcacgtctccccagtgtgttcactgtgatgtggtgtaaaagatccacatttaacatacttaaactacttaaacttagataacatcactctgaagtatactaccaaaatgttaattgagaaaagctgaaaatagttttagtttactcattatcacatgctagaagaaaattttgcatgagaaaacactgaagaggtaattttttaatccagatttttcacaaactcatggtgcaaaatgggtcccccagcttcctctattataactgctcttaattgcttgttggctgcctgtgaaaatgattgaagtaactcaaatgttcctaacaaaactagtcatagcccccatgctgttctgcccactgtagcccggccccgtaacagcccctcactgactggctcttcaggccactgtaagtggcctgggcagcagacacccccatgccttgcatcacctggctgctatacgccccattggtgggccctggtggtggaatcaagaagagtctttatatctggctgcatattggncctgtttttngacatanctggcccangttttttt

SEQ ID NO: 3246 - DNA, 1041 bp, Homo sapiens
  misc_feature 714, 731, 760, 807, 844, 856, 887, 898, 927, 933, 942, 954,959, 963, 972, 976, 978, 989, 1007, 1008, 1015, 1026, 1029,1030, 1031, 1037: n = A,T,C or G
ggtacatgtttggaaatgagttagatacttgaaaagtctaaacacactgatttaggagtgcgtatgttgctgtctcaatgaacaatgggtcaatagttcatatggactaaattaatctctgggtagcacgtatgtgtgtaaatataaaattatattagacattagcaccagtgcagaacatgctcagcatcataagatccaaaacaccagcacaagtttatccatcattaaaaacaattacctccttcctaaaatgtcagaatagtaggtaactgagattaataaatcttatccaaaaagtaactcttataacataaaagtttcttttagaagtatatgtgagaaccaatcagctaaatagaaatgtttaagattgaagatgtccaatatttttaaaactggacattaccatatacaggtagaacatttctaaaaatgacgtgacaaacaattcttaaaaattttttaaaaattccttcactgtttatcaataaatgtggcagaataaaagacaatcctagaaaacttttttaattcatcattctatgtgtgttttaataagggggtgatgctcccattataggaatccattatttacctaatttttctaatggggggaagagagaaagagataattaccactttctggggggaatactcaacttacaacccaaattaatagccaatctagggaaatttagaaaccaggtaaanggtttttgggtttatantttcatggtataggggctgctggtccaancctttacaaagtaaagctgtcttggtttccaaaattccaaaaatttnaaaatacttcccccacccttaccccttaaccaaacanggggcccctttngggtttttggtttttaaaaaacaaagggaanggggttaaaanggggggggctggaattattggggagttancctggncccgggggngggccggttttnaaaangggnggaaatttnccancncccccttgggngggggcgggttacttatnnggggtancccggaccttnggnnncccaanactg

SEQ ID NO: 3247 - DNA, 497 bp, Homo sapiens
acacgtcgtcctcccggctcaggccctcaaagaaggggatgaggtccagcagctccgtgtccgtcatgtcatcgaaccaggactgcacaggcactgcattctcaggatggaagatgtatgaggcaggggaattgtcaacaatgatcactttgctcagctcccgcccaaggcgactcaggtccttcacgtagttcccacgatgaaaaacacatgattctctgaagagccgggcccggaacacaccccagcggtctaggaggtcagccacagggtctgcatacttggccaagctggcagtaaagagcacacattcaaaaagctgccccatcctctggaggaactcgtccacatgtggccgcttcagcacatacacctgatgtatagttccatcgatttcaaccggaacaataaaatcagcattactaataggcttaaacgaactgtgcaccaatgtttcatctaaatcaatgaccacacatttctttcccccgcgtacc

SEQ ID NO: 3248 - DNA, 415 bp, Homo sapiens
ggtacgcgggggggaacgtcttctcatgctccgtgatgcatgaggctctgcacaaccactacacgcagaagagcctctccctgtccccgggtaaatgagtgcgacggccggcaagcccccgctccccgggctctcgcggtcgcacgaggatgcttggcacgtacttgtttattccacaccttccacacccacagtgacccttttgacgtggcgtcagtggcatggtggaggtggcagtcagggcttcagtggactgagattcgattggagggtgtctggggaagtgaagacttggactaaggttcctggaacttgagggtgtagcaaaggctcagaggaagggggaccttgggaggaaggaaggcttttcacaggacagggttgcgtggagactggctgtaaaattactttatgt

SEQ ID NO: 3249 - DNA, 810 bp, Homo sapiens
  misc_feature 417, 424, 430, 436, 442, 466, 471, 482, 504, 510, 512, 543,544, 550, 551, 552, 553, 554, 555, 556, 557, 558, 559, 560,561, 562, 563, 564, 565, 566, 567, 590, 595, 603, 609, 619,634, 640, 654, 665, 668, 717, 744, 755, 757, 761, 765: n = A,T,C or G
  misc_feature 773, 790, 792: n = A,T,C or G
acaaaaagtatatgccagataaacttgcaagattggatccaagactattttgtaaggctttgtttaaagctttgggcttaaatgaaaatgactacaagtttgggttaaccaaagtattttttagacctggcaagtttgcagaatttgatcagatcatgaagcctgaccctgaccacttagcagagttggttaaaagagtcaatcactggctcacatgcagtcgctggaagaaagttcagtggtgctcactctcagtcatcaaattgaaaaacaaaataaaatatcgagctgaagcctgcattaaaatgcaaaaaactattcgaatgtggctttgcaagaggagacacaaacctcgcattgatggtctgggtaaggggggcccactggaaaaacgacttggttaaattaatgaaggantcagtgnggttgnaagaanggaaancccggatggattaaccggtccagnatctnggaaattctantggatcctttgatggccaaaantaagtncncttttgatgaccccggaaccaattccggaannaaaaannnnnnnnnnnnnnnnnnggttcctttgggcgggaaccacncttangggcgaanttccancccactgggngggcggttacttagngggatnccgaacttcggganccaaacttggnggnaaacaatggggcataactggtttccctggggggaaaatggtttttccgntcccaaattccccccaaaaataccaanccgggaagccntnaaanggtnaaaacccngggggggccctaatggngnggggcctaaccccccatt

SEQ ID NO: 3250 - DNA, 542 bp, Homo sapiens
ggtactggctgaactgtggaaaacatacaattctgtgttcctcagtaaatgagattagcgtctaatgagtagcacccctttactaacttagtagtagtataaaatcatttttatttagttaattaccagagagatttagcataattttgttctggattcagtaaatcaagtcagcttggatcattcaccttaacttttcctttagcagccatttccactagtttccattaagtagtgttctataaactttgatccaaagcagaatcaatgtcttttccatctcgtgacttaaagttctgtgactgtgatgcatgtgagtgttccgacttcatctgttcctcttaactacggtgtttcccttaccatggcattcataggatgaaatgaatgactgcccagaatgagaatttgtccagattattcagataaacatcataaagcagaatacattataaataagtagaatatgaataaatagaataataaaattccaaaatactcaatgggaaatgactaagttatataggctttcaagagttggt

SEQ ID NO: 3251 - DNA, 486 bp, Homo sapiens
ggtacgcggggagagccggcgccggaggagacgcacgcagctgactttgtcttctccgcacgactgttacagaggtctccagagccttctctctcctgtgcaaaatggcaactcttaaggaaaaactcattgcaccagttgcggaagaagaggcaacagttccaaacaataagatcactgtagtgggtgttggacaagttggtatggcgtgtgctatcagcattctgggaaagtctctggctgatgaacttgctcttgtggatgttttggaagataagcttaaaggagaaatgatggatctgcagcatgggagcttatttcttcagacacctaaaattgtggcagataaagattattctgtgaccgccaattctaagattgtagtggtaactgcaggagtccgtcagcaagaaggggagagtcggctcaatctggtgcagagaaatgttaatgtcttcaaattcattattcctcagatcgtcaagt

SEQ ID NO: 3252 - DNA, 581 bp, Homo sapiens
  misc_feature 519, 522, 567: n = A,T,C or G
acgcggggcagcggctccagctaagaggacaagatgaggcccggcctctcatttctcctagcccttctgttcttccttggccaagctgcaggggatttgggggatgtgggacctccaattcccagccccggcttcagctctttcccaggtgttgactccagctccagcttcagctccagctccaggtcgggctccagctccagccgcagcttaggcagcggaggttctgtgtcccagttgttttccaatttcaccggctccgtggatgaccgtgggacctgccagtgctctgtttccctgccagacaccacctttcccgtggacagagtggaacgcttggaattcacaagctcatgttctttctcagaagtttgagaaagaactttctaaagtgagggaatatgtccaattaattaagtgtgtatgaaaagaaactgttaaacctaactgtccgaattgacatcatggagaaggataccatttcttacactgaactggacttcgagctgatcaaggtanaantgaaggaaatggaaaactggccttacacttgaaggaaagtttggnggaagctaaaaatg

SEQ ID NO: 3253 - DNA, 1017 bp, Homo sapiens
  misc_feature 628, 664, 674, 689, 694, 697, 698, 707, 715, 737, 744, 758,768, 776, 811, 822, 831, 864, 882, 901, 918, 921, 934, 938,954, 956, 957, 958, 971, 978, 981, 1000, 1004, 1016: n = A,T,C or G
ggtaccttctctatgtttccatatgtttcgatatacaaataccactgttactattgcctacagtattcagtaacatgctgtatatgtctgtagcctaggagcaacagtctataccatacacattaggtgtgtagtaggctatgccatctaggattttgtaaatacactctatgatgttggcacaaaaaaaattgactagcaatgcatttcccagaaaatatccccatattaagtgatgcataactatataatcatgggggatatggcttcaacataaaattttcagttcggtccataataccaccaattccttgctactataatgtgaaaaaattctcacctctgagtcacacatggaaacaaatcaatgtgaagagactttaatggcaaagtgcactggagagttaaaatggttacatgggtaatttaagaaaaaatttagtgggaaaaagggaaagggctgaactgccaaaataattttcttatccagttttacatttgctttctccatgtgctacaattatagacacctgatagttcctagccttagacataacttacagcatcagccactctgctgcactttagatcacattagtcagggctagagcccagccccatttacacnggcatctggatgaatgggtagctgtggcagttctanccataatggnccttttgcttccaanaaatncannttaaggggntggccatnggccccaatagtttcaaccttntgttggncccccaaaaaaacnttttgggaangggccaanggaacaacttggtccctggatgtggggcccatttnaaaaaaaaaanggggattanacctaatttttttttttaaggctttgggatggngtaccctgccccgggggngggcccgtttaaggggcgnaatttccaccccccctnggnggggccggtttcntatngggaatcccaacctcngnnncccaaacttgggnggaaaanaanggggcaaaaacctggtttnccgngggggaaaaatnt

SEQ ID NO: 3254 - DNA, 485 bp, Homo sapiens
ggtacgacaatagcaatcttttccttcgtagaggacaggggaggagtccctactcggctgcaaactctggatgagggctggggattgagagcttcccagagagcatcacaagaaggcgtcgcaccactctcgaaggcatccgaagcagtcccgggactgcttggcgttggcgccacaagtgtctttcagccattcccggaagaggtcttcatctttctttagcaccagaaactggccaaggacaacataggccttgtcaaaacccctttcctccagcttcttgcccaggacttcaccaatcccagccaggctccccactggcttctcccccatgggctctgccacgaagtctcggtgcttttgggaggttgtcatcttgatcaggcttaatccgcaacttcagttcccgtaacggttcctcccgccacccggccgctcctgcggatacctcaagccactagaactttcttccacttcccccgcgt

SEQ ID NO: 3255 - DNA, 810 bp, Homo sapiens
  misc_feature 558, 581, 628, 673, 676, 687, 708, 716, 753: n = A,T,C or G
acatggcaggaattgatggcgagaaggagcacgccaatgccaagaagatcctgctggagatgggggagttctttcagattcaggatgattaccttgacctctttggggaccccagtgtgaccggcaaaattggcactgacatccaggacaacaaatgcagctggctggtggttcagtgtctgcaacgggccactccagaacagtactcctcaacagtcacaatccatcctagtatcttaaatagtgatttttttttaatttacaaaagaggtttattggacttacagttctacgtggctgggaaggcctcacaatcatggcggaaggtgaaagccacatctcacatggcagcagataagagaaaaaaaggtagtgatcttttagtaaagaaacctgagactggtagtgggcttggagccagaggatcgcttaagtccgggagttcgagaccagccagggtaacaaattgagacccccccaactttaaaattaaaaaacgaaagaaaaaatagctgggtgtggtggctcacacctgtaatagcactttgggaggccaangcgggtggattgcctgagctcangagtttgagaccaacctgggcaacatggtttgaaaacccttgtcttntacttaaaacaaaaaaaaaaatcacccaggtggtgggtagccgtnccncctggtagttnccccagtttcctttggggganggcttganggccccaaaaaaattggctttggaaacctttgggganggtaaaaaggtttgcaaaaaaaatcattgccccttggcactttcccaaacccttggg

SEQ ID NO: 3256 - DNA, 690 bp, Homo sapiens
  misc_feature 572, 628, 638, 643, 651, 653: n = A,T,C or G
acataaaaggcttcagaaaattcaagtttaacaaaaaatggaagtgtaatcaaagaaagtgcacttaaagctgtttgccagcaattaaaaagtagcttctatacagcttctattagatgacttttcaatcacaaaaagagcatagtcataaaaacaattctttcaaaagtagcagtataaattttaaaataaaacaaaaataaccccaaatcatgaccctttgcattatcatctaccttattctcttagtagcttttgtaaaccctcactaggagtgaatgttctcttagatatgattgtggttgcaattccattttttaaaaattcacattaactccacagtagagagatgtgacatgcatgtgtgtacgcgggggtggatgctttggcaagatggcggggagcggcgtccgccaagctacttctaccgccagcaccttcgtgaagcccattttcagtcgggacatgaacgaggccaagcggagggtgcgcgagctctaccgcgcctggtatcgggaggtgccgaacactgtgcaccaattccagctggacatcactgtgaaaatgggacnggataaaagtcccgagaaatgtttatgaagaatgcccatgtcacagaccccaaggnggggtgatcnttctnggtcattnangggaaagaaccgaacctgggaagaaacaaattaaagg

SEQ ID NO: 3257 - DNA, 755 bp, Homo sapiens
  misc_feature 535, 549, 591, 621, 654, 680, 721, 727, 743: n = A,T,C or G
ggtaccggattctctctttaaccctccccttcgtgtttcccccaatgtttaaaatgtttggatggtttgttgttctgcctggagacaaggtgctaacatagatttaagtgaatacattaacggtgctaaaaatgaaaattctaacccaagacatgacattcttagctgtaacttaactattaaggccttttccacacgcattaatagtcccatttttctcttgccatttgtagctttgcccattgtcttattggcacatgggtggacacggatctgctgggctctgccttaaacacacattgcagcttcaacttttctctttagtgttctgtttgaaactaatacttaccgagtcagactttgtgttcatttcatttcagggtcttggctgcctgtgggcttccccaggtggcctggaggtgggcaaagggaagtaacagacacacgatgttgtcaaggatggttttgggactagaggctcagtggtgggagagatccctgcagaacccaccaaccagaacgtggtttgcctgangctgtaactgaganaaagattctggggctgtcttatgaaaatatagacattcttcncataagcccagttcatcaccatttccttcnttacctttcaagtgcagtttcttttcacattangctggtggggtcaaactttttggganccccggactgtcagttcttttgggaagtggtcaagcgcatnctgcangggcttctccctcctntggctttggaaa

SEQ ID NO: 3258 - DNA, 748 bp, Homo sapiens
  misc_feature 415, 566, 597, 638, 659, 661, 671, 685, 712, 727: n = A,T,C or G
acgcgggggggtcggagctcggtcctgctggaggccacgggtgccacacactcggtcccgacatgatggcgagcatgcgagtggtgaaggagctggaggatcttcagaagaagcctcccccatacctgcggaacctgtccagcgatgatgccaatgtcctggtgtggcacgctctcctcctacccgaccaacctccctaccacctgaaagccttcaacctgcgcatcagcttcccgccggagtatccgttcaagcctcccatgatcaaattcacaaccaagatctaccaccccaacgtggacgagaacggacagatttgcctgcccatcatcagcagtgagaactggaagccttgcaccaagacttgccaagtcctggaggccctcaatgtgctggtgaatagaccgaatatcanggagcccctgcggatggacctcgctgacctgctgacacagaatccggagctgttcaaaaagaatgccgaagagttcaccctccgattcggagtggaccggccctcctaactcatgttctgaccctctgtgcactggatcctcggcatagcngacggacacacctcatggactgaggccaganccccctgtggcccattccccattcattttttcccttcttanggtggttagtcattaattttntngtgtgtgtgngggcggaagggaanggaactatgaatggggtgtgttggggnatggactacttccangttacctgggccaaaggggcc

SEQ ID NO: 3259 - DNA, 512 bp, Homo sapiens
ggtacaagcgggagcacattaacctgggctgcgacatggatttcgacattgctgggccttccatccggggtgctctggtgctaggttacgagggctggctggccggctaccagatgaattttgagactgcaaaatcccgagtgacccagagcaactttgcagttggctacaagactgatgaattccagcttcacactaatgtgaatgacgggacagagtttggcggctccatttaccagaaagtgaacaagaagttggagaccgctgtcaatcttgcctggacagcaggaaacagtaacacgcgcttcggaatagcagccaagtatcagattgaccctgacgcctgcttctcggctaaagtgaacaactccagcctgataggtttaggatacactcagactctaaagccaggtattaaactgacactgtcagctcttctggatggcaagaacgtcaatgctggtggccacaagcttggtctaggactggaatttcaagcataaatgaatact

SEQ ID NO: 3260 - DNA, 627 bp, Homo sapiens
  misc_feature 32, 100, 150, 195, 366, 378, 586, 588, 625: n = A,T,C or G
ggtacttttttttttttttttttttttgctgncctaaattgtttattaagtatgaattttacaaactttacttatattagcggtaacggtggagctgganagtattgcgccttctccaagctgcccggcgagagccaccaatagtgtggnggaacttgtggccctttccaaggccacggctctttcggcctgcanatgtcagcccacgcatctccctgtgcttgtggactggtttggtgatccactgggtgtcaggatttcttctgatagctttatggaatggatcaatgaggataacctcaaaaaatttgtatgtggaatcttcaccaacccagtaagaattcaggactctcagagccccacagnggcgtccagctngctcctttgcaacggactgaaggcttcgagcaaactttagctggttaacaccatgatggacaggcttgccgtaagttgcacccttaggaactgggcgttttcggccccacggcgaacacgaatcctatatataaccgtaaccttgcttggccttgtagcccagtcggcgccctttattaagcccggtggggcggggaaccctgtgganancaaaaaaactggcggtacctgccccggcgggccgttnga

SEQ ID NO: 3261 - DNA, 191 bp, Homo sapiens
ggtacttgttacagtaaaagaggtataaagtcctgttcccaagtccaaaccactttttaacttaaatcttgagtttttctgaattactcaatttgaagtaattctctttatatctgaaaaatggttttattgaaacgtttgagattaaaaaatatgcattgcaagaagcatatgacaaacattctgagagt

SEQ ID NO: 3262 - DNA, 514 bp, Homo sapiens
acgcgggattcatcacttggatgagtgcccacacagtcaagctttaaagaaagtgtttgctgaaaataaagaaatccagaaattggcagagcagtttgtcctcctcaatctggtttatgaaacaactgacaaacacctttctcctgatggccagtatgtccccaggattatgtttgttgacccatctctgacagttagagccgatatcactggaagatattcaaatcgtctctatgcttacgaacctgcagatacagctctgttgcttgacaacatgaagaaagctctcaagttgctgaagactgaattgtaaagaaaaaaaatctccaagcccttctgtctgtcaggccttgagacttgaaaccagaagaagtgtgagaagactggctagtgtggaagcatagtgaacacactgattaggttatggtttaatgttacaacaactattttttaagaaaaacatgttttaaaaatttgggtttcaaggtgtaccctcgggcggcgaccaccctaa

SEQ ID NO: 3263 - DNA, 587 bp, Homo sapiens
  misc_feature 399, 438, 505, 508, 546, 551, 563: n = A,T,C or G
ggtacgcggggatttgtgaagagacgaagactgagcttgtggccgcgttgccgacctccagcagcagtcggcttctctacgcagaacccgggagtaggagactcagaatcgaatctcttctccctccccttcttgtgagatttttttgatcttcagctacattttcggctttgtgagaaaccttaccatcaaacacgatggccagcaacgttaccaacaagacagatcctcgctccatgaactcccgtgtattcattgggaatctcaacactcttgtggtcaagaaatctgatgtggaggcaatcttttcgaagtatggcaaaattgtgggctgctctgttcataagggctttgccttcgttcagtatgttaatgagagaaatgcccgggctgctgtancaggagaggatggcagaatgattgctggccaggttttanatattaacctggctgcagagcccaaaagtgaacccgaggaaaagcaggtgtgaaaccatctgcagcnganaatgtaccttgcccggcgggcgctcgaaaggggaattncaccncactggcggccntcttttggatccaactcggaccaa

SEQ ID NO: 3264 - DNA, 478 bp, Homo sapiens
actcttcagacatactgaaaccaaagatttaactggactatattctataatatactgcaaaactcaaatattagcattgttaaaataattatccatgcctgctggtggatatggtgataaaactaggttgtatttcacttactggaaggttctaagacaaaattaacacttcaaaatttgacactaccagcattaaaccaattattgcctgagcaataaaatgccacataatctaccgcttggaaattattatagatcatttaaatcttttgggctgcctgatcattaccaacagaggcacccgagatggaataccacaagtctcttcagttcccagcctaccaggcaagcactgtttaacttatggcccccaaccatactactaatgaaaccgtaacaatcttttgtgtttactaagagaattctccagaaaaagtgccccccttttaatccccgcgtacctcggccgggaccacgc

SEQ ID NO: 3265 - DNA, 563 bp, Homo sapiens
  misc_feature 244, 265, 312, 332, 335, 377, 387, 401, 461, 500, 502, 506,511, 526, 533: n = A,T,C or G
accgtgaatataatacacctactgaaaatcttcccatacatcatgaaaacttggaagtaatttgtatagcttgaaatgtcttcattttagaatattatgcacaaaagagcctcttcaggaacagaaaagtggcattttctgtgtttcaactacaatttagaacccaactggctttttatgttatattaagtatattatacttcaagttccagagtatgtggggcataaaatcctgattcaagtnttatatgacaaaaaattctantaaatactccttttaataaatggcttatcaatattctcagagtcagnctaatcatccaagaaaaagnagnttccactcttcttttgttctacatccttaattgaattaagtntgtttattcntggcctatagttgnttggatctcttctgaatgtagtttcaagctgagacaaaaatttattcatgcccccaaaanggttgaggactgtttgcactgtgttcttagatggaacancntcanaaacnattacccgatccgtngataggnggccatgatgaatcatggttcacaacaaag

SEQ ID NO: 3266 - DNA, 583 bp, Homo sapiens
  misc_feature 503, 512, 553, 565, 570, 577, 578: n = A,T,C or G
ggtacatgatgacaaaatagtctagctacactagaaaaatataactgcatagaaaaattacaaactaaagcaatccattcacagtttctacatatgttctcattatacattgaattagacctattctatgtggaaaaaatatctttggctggtaaggtagaagctatcaaatgttcaccttaaatactggcagaagaccagtgctgtcatgagatgacacacagcagggtgtttcctaaatgaattgcagcgaggcaaatattccctttagtgtcttctgaccctaggaggaggctttgaattactcgggctgcaagtcaagggaattgactcttggtgttcgaaattctatcctcacacccaaggagatggaaccagaaaggcagcctctctccagagtttcccaagcttgcatgaattcatgctaaattgctggaagctgcgtctctgctgtggggcaggtccggatgccccacatccccgatgaatatcacccggaaagntgaggcatnctgccatacctcgtgctcaagggagcatcaaagattaagcnccttgccttctnccagntttgggnncgttg

SEQ ID NO: 3267 - DNA, 593 bp, Homo sapiens
  misc_feature 441, 538, 559, 561: n = A,T,C or G
ggtacgtctttatcagcagcattaatacagactaatacagatgcttgaagcaagcccttgtccaataaggtatttaatagcacttagggactattagatgtcccatttctcttctctttcatttctcttatctcttctcaccccagtgtaacgaatcgctacaggtttttaccaaaatgctgcagcagtagttggaaatgagttattttgcattactaaagtgttcaatcacattatcacgggtcacatttgtatataaccaggagatggccaaataacatctactgcagtgattttgcaaattcagcatagtcaatgtatccatcattgttcttgtcatcatctctcaaaacaccatctattatgttaatcaagttcatcttcactcattagtggtgcctgttcactcccttcctccttatggacatgaatgatggctgnggagagttctaagccatcaagcaaattattgccatcataatcatgcattttggaagtaatggagctggcaattcttgtggcgacatcttccgccttnggttggtgatgacccctctanangctccatgatatgctctgggcgggcccgggtt

SEQ ID NO: 3268 - DNA, 579 bp, Homo sapiens
  misc_feature 560, 561, 566: n = A,T,C or G
acaattagcttcagagttgatattaatagaaattattccaaaattattcttgtcacaagtaactactatatcccacataaaaagggaaaaaatcccacccaatcacagaaaaggcatcctctgtatgtttccgtggcaatgcgttgtttatgtattctcaaattttgtctggctagttatccaccgcttctccaatggattcattcagtttcttggagaaccatatagactaatgacagcatctgggacacacggacgtatcaagttcatggtggacattcctattataaaaaatactcaggtcttgagaattcctgtgctgaaggatcccaaaatgctttctaaaaagcattagtcatgcctcaaaactgccctttgaggtaggtcagtattattatccccattttaacagaaggaaaactgaggcccttatagttaagtgacttgcccaggggcacacagcaagtcagtggccaatggttggagaaggcctggccttaaccacccagcataacatgggcacctcgcttttttaaccttcatgatgacctattggcctnnccttncagagaaacaccc

SEQ ID NO: 3269 - DNA, 584 bp, Homo sapiens
  misc_feature 473, 516, 520, 529, 560, 562, 574, 575, 581: n = A,T,C or G
accaccccatttatatatgaagtattcagagccccccaggagagacggatggacagacagacagccaggttctccagtggtatctgcctccattttcctgagatcaaaaagactgtttcgaaaccaacatctgatatgtaaactgctcttttgtttccaaccccttccttttgttatctccagtttgatgctatggcgctggacccagggccctcccaggccatctctgttcctctggggtggtccagttctagagtgggagaaagggagtcaggcgcattgggaatcgtggttccagtctggttgcagaatctgcacatttgccaagaaattttccctgtttggaaagtttgccccagctttcccgggcacaccaccttttgtcccaagtgtctgccggtcgaccaatctgcctgccacacattgaccaagccagacccggttcacccactcgaggatcccaggttgaaaantgggcccttgaggccctgggaaaagaccaatcactgggacttntttncttgagagncaaaggtccccccggaatcttgctgcccctntnattgatcttganngatttntgg

SEQ ID NO: 3270 - DNA, 594 bp, Homo sapiens
  misc_feature 38, 81, 266, 278, 281, 287, 309, 316, 332, 335, 340, 359,366, 368, 376, 384, 389, 398, 402, 405, 419, 421, 424, 426,437, 438, 439, 440, 444, 448, 466, 474, 487, 488, 491, 517,518, 520, 531, 532, 533, 537, 539, 542, 547, 556, 557: n = A,T,C or G
  misc_feature 559, 569, 571, 574, 575, 576, 579, 580, 585: n = A,T,C or G
acgcgggggcacaagtgaaagcaatgatcgagactaanacgggtataatccctgagacccagattgtgacttgcaatgganagagactggaagatgggaagatgatggcagattacggcatcagaaagggcaacttactcttcctggcatgttattgtattggagggtgaccaccctgggcatggggtgttggcaggggtcaaaaagcttatttcttttaatctcttactcaacgaacacatcatctgatgatttcccaaaattantgagaatgagangantagagnaagattttgggtgggatgggtnggataantatattagcccaactntangtttntttgaatcctgacacaatnaattaangngacatganttttactnatgtngttacttgngacnaanaaaaaaattttttntnggntntttgacacctnnnnattntganatgtccttggccaacccnggccgctnctctcctaagggnntantctcaacccactgggggggcattaannantggattcgagnnnggtncnaantttgnggaaattanngntctaaattgntnctnnntgnnaatcngtatcccct

SEQ ID NO: 3271 - DNA, 260 bp, Homo sapiens
  misc_feature 35, 66, 82, 85, 89, 109, 128, 157, 189, 231, 233, 239: n = A,T,C or G
ggtactttttttttttttttttttttttttttttnggggcttccataaccaatgttgggcatcaanatctggcccttgaatnttntacnaaccctgttgtcaatgcctntgggtttccgccagttacncttaattttgacatatcggtctgactggngccggatgaacttcttggttctctttttgacnatcttgggcttcacaaggggtctgagggcggccatgatgccnanaagganatggctgccacctccccgcgt

SEQ ID NO: 3272 - DNA, 575 bp, Homo sapiens
  misc_feature 29, 162, 465, 478, 488, 493, 508, 546, 550, 553, 559, 569: n = A,T,C or G
acttttttttttttttttttttttttttngggagatccatgctttatgaacacattattctcacacatccggggataggtttgatacacaagatccttaaagtcattttacatattctgaaaccaggttgttcaaaagatgaattctgaaaacatagttggngtagcaaatgaatatatcaaaacaaagaaaaacttcatccaaatatttacattttaaaaagacatttaaaaaataggctacttattaagtgtgcttgaacaaaccatgtgtggaattgaattccattcattacggagttagtttctgctaaatacttactgatgctagagcagacccctggcatctgaggatttaagagttcaactgttctcaatctatgctaaaaaaaaatgacaaataataaattctacatttccgaggcactaatttgaacttcagaagtgggaggggctgatatgtaangcaaggtatttangaatgagganggctnacagctgtactcatnggggttgcactgcctccttaatacctcggcgggacacnctanggngaattncacaactggnggcggt

SEQ ID NO: 3273 - DNA, 545 bp, Homo sapiens
  misc_feature 467, 470, 477, 506, 531, 535, 537: n = A,T,C or G
ggtacacaatggtttattaaaggaatgtatggcccacatcaacctagcaaggattctactggtaaaccttcccatggccaaaggaaaaacaagcaggagttgagtggctggggtggggtgcaggcaatggagagagggcagaagggtgtagaagctgaagggggctagaagcttactcctgagtttcttccttctgtcttcaaatctttacttcttatggccaaagacccagctgtttcataggctggagatgcactcttctagactgctcgagacagccagagacaggggaggagggaagaaggatactgtggaaagggatggcggggcaaacatttagagctagaagccactactgggccaatgctaaagtttctgtctctaagcctaaaaaagccagtgtagtagggcccttatcactcttagtttgctaggtttcccctctgaaataatgagccagatttacncangctacanaaatgaagaagaccgggcctgtgctggantttagcagaatccttgttcttgctntatngngcggtcct

SEQ ID NO: 3274 - DNA, 576 bp, Homo sapiens
  misc_feature 30, 107, 156, 164, 171, 174, 178, 183, 191, 193, 210, 212,213, 226, 228, 235, 238, 243, 250, 251, 252, 260, 262, 263,266, 272, 276, 280, 294, 328, 329, 336, 349, 355, 361, 383,425, 426, 433, 456, 461, 465, 467, 470, 471, 472, 477: n = A,T,C or G
  misc_feature 479, 483, 488, 491, 497, 506, 520, 528, 531, 564: n = A,T,C or G
ggtacttttttttttttttttttttttttnttttttcacacctttccctaatactttattggttacctctaggcctgtgtgcggctgggtgggcttgggggagggcntcactattcagcttctaggtggaggcatgaaaaggccttggcctatccntccagggncccatantgnggantttgnaggggcangnctggcctttcctgggtnannataaggcacccangngggggcncanggggncacccannncaggcacntnngcnggggcncaanctcnctatccgttagccngcctaattgggtttggagaaatatttcttgctgnnatccacnttgggcttaatcntgtcantgccangcttacaaccccgggacaaaanttccccatgctcgtctgtgtactgggagaaaccaaggcttanncagtcangttgaaacccaggcttttgcttnttgcngctntngannnttgananaaantcttnttnttcacncagctggantcaacggcccattntgggtcantgnaactccactaccaggttaagcaattttcttgcncggcctcttttt

SEQ ID NO: 3275 - DNA, 588 bp, Homo sapiens
  misc_feature 483, 550, 565, 575, 579: n = A,T,C or G
acgcggggacgctgaggaggatcggcggccggtgagggggaagcaagtctggtctctgtgattgaagaagtcggctctgggctccagtgcgggaatcacacacatacctcagaatgccgggtctaagttgtagattttatcaacacaaatttcctgaggtggaagatgtagtgatggtgaatgtcagatccattgctgaaatgggggcttatgtcagcttgctggaatacaacaacattgaaggcatgattcttcttagtgaattatccagaaggcgtatccgttctatcaacaaactcatccgaattggcaggaatgagtgtgtggttgtcattagggtggacaaagaaaaaggatatattgatttgtcaaaaagaagagtttctccagaggaagcaatcaaatgtgaagacaaattcacaaaatccaaaactgtttatagcattcttcgtcatgttgcttgaggtgttagaatacaccaanggatgaacagcttggaaaagccttttccaaaggactgcctgggtcttttgatgacaagtcccttggncgggaccacccttanggcgaaattnaacncactggggg

SEQ ID NO: 3276 - DNA, 589 bp, Homo sapiens
  misc_feature 455, 507, 529, 538, 544, 574: n = A,T,C or G
ggtacaaccaaatctttgtctgtataaatcagcagatcaaatgaacaagaaacttccaacagtggcagaaatgtcaccgtagctgtgatctgtctgatcactgaacggatttcatcctggatagctttctgagacttttctctgggtgcactgtcatcttttgcagtcttgtcacactcaatatcaaactgccatctttccaggacctcaccactttcaatatttgagataactacaaccagtttctgaactgaacacttgtataaccaatctttcagttgttccaccacattatttaggtattttatgagctcaagatcagtagttacaagcaaggtgagtccgtatttctgcactcgagtaaaggtttcagatggatatatgccacgctgatataaaatgctgttgatgccgaatgagaagaactcggccacgatttcggcgctcccgcgcanggtgattccctgctccgggagagctgcagcgccatggccagggacacaaacnaaaagcaccgctttcacttcgngggacaggnaaccanccccgcgttcttggcccgggcgggcggttnaaaagggggaatttc

SEQ ID NO: 3277 - DNA, 586 bp, Homo sapiens
  misc_feature 411, 502, 504, 514, 522, 525, 565, 567, 576, 581: n = A,T,C or G
actgggataaatgaagaagaaggcataaggacaataaacatggaactccactgcaaatggattttatgcagctgaggaaagtttgggcttattagtatttgctccagcgaacctccaagttttctccattgcggacaacgtaactaccagctccttggctcagtggttcgcctccactcagaagttcccagtaggttctgtcattattgttggcacataggccctgaatacaggtgatatagggcccccatgagcgctcctccattgtgaaaccaaatatagtatcattcattttctgggctttctccatcacactgaggaagacagaaccatttagcacagtgacattggtgaaatatgtttcattgattctcacagagtaattgacggagatatatgattgtgagtcangaggtgtcacagttataggctcatcaagcggagatgtttgaaagtacctgaagcagagacgcaagaaagagctttgttaatatccaagaangncttttccatnaagggcangtnaaaacctggctgcaacgtttggattgctgaatgcttcctnanaaattccgngagcnctggt

SEQ ID NO: 3278 - DNA, 580 bp, Homo sapiens
  misc_feature 78, 102, 109, 113, 121, 133, 136, 148, 165, 168, 170, 194,196, 204, 210, 225, 276, 326, 369, 372, 388, 401, 455, 457,462, 492, 515, 525, 527, 545, 550: n = A,T,C or G
ggtacttttttttttttttttttttttttttttccatggatttattccacagtcaaaataaatcaaaatttaaagctntaacatttttaaaagataaagganaatttgnggcncagctgcnttaacaaaacanacnccagtctaaagngcaacactaaacaggtnttntntgttcccacgggggaataaatacncncaattacncataanatttcactaaagatnggagatgaggcaaataaccctttgaaattacctgcccaacaaatagaggcnggctacattaatttaacattttactgcaaaatggaaaaaatccccgaggngactaactcaaactcctcatttcatgcacatgaccttggcttntgngttctttccatagccncatccaaatccanaaaggctcctgcaccccatgctcaaaaatgcaacctcaagtccctgagggcctnancacanactggcattaacaagcctgggttaaccttnttccaaaacctccagggaaatcngggcccaacncngacaagccccgttttttnaaaanggtttactggcgaagaacttggaaaccttt

SEQ ID NO: 3279 - DNA, 583 bp, Homo sapiens
  misc_feature 504, 532, 553, 569, 577, 578: n = A,T,C or G
actgggataaatgaagaagaaggcataaggacaataaacatggaactccactgcaaatggattttatgcagctgaggaaagtttgggcttattagtatttgctccagcgaacctccaagttttctccattgcggacaacgtaactaccagctccttggctcagtggttcgcctccactcagaagttcccagtaggttctgtcattattgttggcacataggccctgaatacaggtgatatagggcccccatgagcgctcctccattgtgaaaccaaatatagtatcattcattttctgggctttctccatcacactgaggaagacagaaccatttagcacagtgacattggtgaaatatgtttcattgattctcacagagtaattgacggagatatatgattgtgagtcaggaggtgtcacaagttataggctcatcagccggagatgttgaagttacctgaagcagaaaccgcaagaagaagtctttgttaatatccaagaangtctttccatcagggcaggtaaaacctnggcttgcaccgtttggattgnctgaatgctccttganaaattccnnggccc

SEQ ID NO: 3280 - DNA, 584 bp, Homo sapiens
  misc_feature 503, 535, 540, 567: n = A,T,C or G
ggtactcgtcaatgggctcggtcatatataccacctcgaagccccgtttccgcactcgctccacaaaagctgagttggccacctgctctttgctctcaccagtgatgtaatagatggacttctgtgtctccttcatgcgagaaacatactctgacagagatgtcatctcatctccagactgggaggtatgatagcgcagcagctcagacaggcggcggcggttagtggagtcttcgtggattccaagcttgagatttttagagaatgcctcatagaatttcttgtaattctccttgtcttctgccagctcagagaagagctcaaggcacttcttaacaatgtttttgcgaatgactttcaagattttgctctgctggagcatttctcgggagatgttcaggggcagatcctcagagtcaaccacaccacggataaaattgagatactctggtatcaactcatcacaagctgtccatgatgaacacacggcggacatagagttngaggtggtctttttcttcttgtctcaaaaagncaaanggggcccgcgaggaataaataccatgncctgaattccactgacc

SEQ ID NO: 3281 - DNA, 319 bp, Homo sapiens
ggtacgcggggggtgcggaggtcagggacaagatggtgccaccggtgcaggtctctccgctcatcaagctcggccgctactccgccctgttcctcggtgtggcctacggagccacgcgctacaattacctaaaacctcgggcagaagaggagaggaggatagcagcagaagagaagaagaagcaggatgaactgaaacggattgccagagaattggcagaagatgacagcatattaaagtgagtgaccctgcgacccactctttggaccagcagcggatgaataaagcttcctgtgttgtgtgaaaaaaaaaaaaaaaa

SEQ ID NO: 3282 - DNA, 584 bp, Homo sapiens
  misc_feature 551, 576: n = A,T,C or G
caggtacttaccctatcttttctttaattaacattcgattccatgagcttcttatgtgaaaaaataagatttttctttagagagcagaagcagaagagtaaaatttattgtatagctagcaatatttttttatgccatctgtctcaaatcaaagagtcatcatagtaggaaataacatgttagttgtcatttggcatgagtgtgcattccagtaattcttaattgatatttgattaattccatacctttgattaaaacatgctagttcaaaataagactgctcagtttccaagggttttcaagcctacttacctttataaaggttctctagtctctgattagccatgactgtattggactttgaacattttctgaactaaaaacctctattctaaactaatctcatttgggatgtgtaagtcttttgtaaaggcaagaataaataatatccaggacaatttattaagttttctcagtattttcccaaatattagaatatttacttcattattggttggctgccaatgaccccatatgtctgggagaatagnagccttatctttatataatccatancctccaaa

SEQ ID NO: 3283 - DNA, 585 bp, Homo sapiens
  misc_feature 550, 556, 572, 584: n = A,T,C or G
ggtaccgaccatagagcaagaatcaagattctgctaactcctgcacagccccgtcctcttcctttctgctagcctggctaaatctgctcattatttcagaggggaaacctagcaaactaagagtgataagggccctactacactggcttttttaggcttagagacagaaactttagcattggcccagtagtggcttctagctctaaatgtttgccccgccatccctttccacagtatccttcttccctcctcccctgtctctggctgtctcgagcagtctagaagagtgcatctccagcctatgaaacaagctgggtctttggccataagaagtaaagatttgaagacagaaggaagaaactcaggagtaagcttctagaccccttcagcttctacacccttctgccctctctccattgcctgcaccccaccccagccactcaacttctgcttgtttttcctttggccataggaaggtttaccagtaagaatccttgctaggttgatgtgggccatacattcctttaataaacatttgggtacctgcccnggcggncgttcgaaaggcgaanttccagcacacng

SEQ ID NO: 3284 - DNA, 580 bp, Homo sapiens
  misc_feature 465, 502, 518, 560, 563, 570, 579: n = A,T,C or G
actcggtcaagtctgcacgagacagcttcctgacattctcactgggtccctccacagcctgggctagaggtgtgccctggaatgctgtggcatgcaggtagttaaagaccacatctcgcatagatgcatcattctcctgcatctcccgcaggatcacatcacgttccttctcaatctgtgagtcttccagactacagttctgcacaatgtcacccaggagctccacagctttcggcagatcctttgggcagcgccttgatgtagtaagctgtgtgctcccgggtgctgtaggcattaagatgggcccccatgctctccacctccttctccagggcactgccaggccgattctttgttcccttgaaagccagatgctccaaaaagtagcctgccccattattcttctcagtctcaaaacggctgccaacatcaatccacactcccaccgtccaagtgggctgagangactgctcggagggcacacgcagccgttgtccaacangctaaccttcgtcttncggcacgaattgaacccctgaccaaaggtgccgtacctcggncgngaaccanccttaaggng

SEQ ID NO: 3285 - DNA, 578 bp, Homo sapiens
  misc_feature 421, 454, 468, 504, 518, 537, 564, 573: n = A,T,C or G
acatgtgactttatacattttacatttgtaataaaaaaatcatgaaaagtatgctttgaacctgttggtaaattctaaaaaggaactaatttgaaagatttataaatcaaatttgttaagtggccaaactattttttatttgaaaataacaaaattctaactcgagcaaagctggttggaaagaaggaataactgccttttctaagctttatcagctaggaagcagataggaattaataattccaagaagagaagaagttttatgaaaagaaattgtagtcgtcatgctgtagagtctgagcagctcatctcggaggtttaaacgggtccatctcccccacagcagccacaacactggcagtccccacagagggtccccaggaggccattgaccacctggatggcgcaagagaaccatctngattcctcctacgaccagcaggatggagaagangggtcagattccanggaaccacattgagaggctctcgccttgttccatanggcctatcattganataatccccgtcgtggaangggtagccccatgtcctcggccgcgancacgcttanggcaa

SEQ ID NO: 3286 - DNA, 581 bp, Homo sapiens
  misc_feature 532, 541, 553, 576: n = A,T,C or G
actttctccagaaggatcagctcaatttgctgctcagatatttgggttaagcaaccatttggtatggagcaaactgcgagcaagcattttgaacacatggatttccttgaagcaggctgacaagaaaatcagagaatgtaatttataagaaagaatgccattgaattttttaggggaaaaactacaaatttctaatttagctgaaggaaaatcaagcaagatgaaaaggtaattttaaattagagaacacaaataaaatgtattagtgaataaatgcttctctagatccatattaataaacatgagcatctaacccctcctttcttaggctagacaccaagatatttcagccagcctttatcattcctcttactttatcctttttccttaagtattgggtggtcactactattgagtttcttccttaacactggattaaatgatcttaactccctcagctaaaactggcattactgactcccagctatatttctccagacttgcattttttttttttgaaacagggtcttanttgacttcnaccttggcagcnaacaaggacttttgcttaaaaangggaa

SEQ ID NO: 3287 - DNA, 581 bp, Homo sapiens
  misc_feature 517, 552: n = A,T,C or G
ggtacctgcaggcctcctacacctacctctctctgggcttctatttcgaccgcgatgatgtggctctggaaggcgtgagccacttcttccgcgaactggccgaggagaagcgcgagggctacgagcgtctcctgaagatgcaaaaccagcgtggcggccgcgctctcttccaggacatcaagaagccagctgaagatgagtggggtaaaaccccagacgccatgaaagctgccatggccctggagaaaaagctgaaccaggcccttttggatcttcatgccctgggttctgcccgcacggacccccatctctgtgacttcctggagactcacttcctagatgaggaagtgaagcttatcaagaagatgggtgaccacctgaccaacctccacaggctgggtggcccggaggctgggctgggcgagtatctcttcgaaaggctcactctcaagcacgactaaaagccttctgacccaccgacttctgaaggccccttgcaaagtaatagggcttttgnctaagcctctccttcagccattaggcagttttttnactttcctaacaagccttggaccaaaggg

SEQ ID NO: 3288 - DNA, 579 bp, Homo sapiens
  misc_feature 522, 534, 537, 573, 576: n = A,T,C or G
ggtacaaagaaagttttaagtcaaggcctcaccaattcctacagtattagtattgtgtctcaattctcaaaactaacttttaaaaagcttaaacttaacctaaaggattttaaatgaaaatataaactagaatgaacaaacatgagaaatatttctttgaatcagggagctagcacctttgagttttccaaaaaagcacgtctccccagtgtgttcactgtgatgtggtgtaaaagatccacatttaacatacttaaactacttaaacttagataacatgactctgaagtatactaccaaaatgttaattgagaaaagctgaaaatagttttagtttactcattatcacatgctagaagaaaattttgcatgagaaaacactgaagaggtaattttttaatccagatttttcacaaactcatggtgcaaaatgggtcccccacttcctctattataactgctcttaatgcttgtggctgcctgtgaaaatgattgaagtactcaaatggttcctaacaaaancccgcgtcctgnccnggccggccgtcgaaaggcgaattccacacactggcnggncgt

SEQ ID NO: 3289 - DNA, 472 bp, Homo sapiens
  misc_feature 461: n = A,T,C or G
acactaatttacacaggacacactaccatttactatgtaacattaaagctttcagtttaagaaactggtcaccaacgaagtgagaggcaccagggaaaaaagccaacctgctgaggaagacaaaagaggggaatgacagaaggaagctggatcttttataatgtagtttagtcactatgctgatactggaaccatctacctctacatttcctgctatgagaaataatgtctttgtctttaaatgtcttttttaaaaaaaaaaacaaaagaaaagaaactgatcaaaaagttttgcataagattcattttaaaaatcttttttccttaaaacaaaaacgattaaaaacttgggttttctaaagaaacttatattaatatgaagttacgaagatacacaaagctgaagtatctggaaccatttggctgcctgtagtcttcagcagatcacaaagtacctcggncgcgacccccg

SEQ ID NO: 3290 - DNA, 579 bp, Homo sapiens
  misc_feature 542, 558: n = A,T,C or G
actgtgcgccaatatgtgaagtgttccacacaacagggcacttgagaggaacaggtttcggacatggtgtctgaagtccttagcaagcggtaaccctttctttacatcttaaaaacgtttaatttgctgttgccaaatgttagtttaaacttgaaggactcaatcattttgccagaagtcctttgtataacatggaaagagaggaggtgtgctgtcaagagaattttggcaaaagcactggagctcatagcttatcattaccagttgcctgagtccatgctggtcagtgagaacaactttaacaggaaccaaatgaaaagctttagcatacttcttggaagagatttttagcatgtgctgtcaaagtcaagagaaaaagaaggttctcttcatttctagcctccattacttgagtatgaaaaaaaaatccacaaattaccatgtgctgccaccagtggcatgtttgcattgtaaaggaaaatttgcttatgccttcctttgagtatggatccactaaacaaacttaaatgcttaaacagcanacctttgttcagccanaaatatagcttacttcgttcg

SEQ ID NO: 3291 - DNA, 579 bp, Homo sapiens
  misc_feature 426, 526, 537: n = A,T,C or G
acgcggggtgttgctcaggctcaagtgcagtggtgattcacaggcgtaatcatagcacagtataccctcgaactcctgggctcgagtgatcctcctgcctctgcctctcaagtcgctgggaccagaggcatgtgccactgcacctggcttaatcttcccttgttttttgtttgtttgttttgtagagacgagcttttgttatgttacccaggctggtctcaaactcccggcctcaagcagtcctcccacctcaggctcccaaagtcctaggattacaggcatgagccactgcacccagccaaaactttcttaaacacatctccaaacagagctaatctttcctttctgtgctcccaaggactcaaatcacaagtggacacaaagtctctgctttccagtttttctcaaaagagcatttttgagganggactgtgagcatttcgaagaggagaagtgatctttaatccacaagtggatccccattccccagcatagaccaacttctctgtaaaagtctgcaaatgantcaaaatcaancacaacttcacaatcgcagacttgtttctacattttaacttt

SEQ ID NO: 3292 - DNA, 586 bp, Homo sapiens
  misc_feature 175, 208, 423, 465, 486, 492, 515, 565, 571, 577, 580: n = A,T,C or G
ggtactaataaaaccatctttgcaggagtgtttaataagcatattttatttaaataaatcctccagtaggaaatggagaattcattgcctttacttagaaggctatgtaaatagctatctgtcaaatttatatatgcagctcaccaatattcccttactggaaacatcagtattnccacatcacatcacagttcccaaaacgactttnaagtctcaaaattccgtgtctcctttggcttgcttctctcttgattccacccaggctttattaatggttcgcttcatatcatcgtctccatcttcataaattttctttaagaacattcatcaatccctcactaggatctgtttcagtgtcataggagggtttctctttttctttgcactccttttcaacctggggtcaggtaatcccaccttgtngttttccactttctttctacacatataagaactgtatcaagncttggactttttttgaactgncttccncagagatgggtttcaagagattnggtcacaatcatggaggaactctttcccatttagattctttacaaaagancaaatnaccttntgngaaatg

SEQ ID NO: 3293 - DNA, 589 bp, Homo sapiens
  misc_feature 150, 188, 206, 380, 382, 394, 395, 453, 456, 489, 490, 492: n = A,T,C or G
ggtaccacatttttgtatatgttaaccaaacggtcaattgcattttccctaatctctaacgatggcaaatgagggaggaagtcatttcccacaaagaagcacatgaaaacccagtcatcaatgctcctctcaacatcaaatgtgaatggnaggctggccattgtgagttctctttccaaatactcacnaagaacattaagccgaangaagataaactctccttctgcacaaggaagactatcggcaagttcatcatgctttcccttcttttctcttggcaaaccttcacaatctttgacctcatgtccaaactgattacaaagaccacatggtttgggcttgtttggtttgaattcttctctaataatgggtaaagttcngntcatgtgtggcnnggccaagcataatgagatcacgcatctgctccacataaacaatgatgagtattttggngtnatggttaggctggggctctttgccttctaatgnnantccatgattttatgttcttccttcaccaggagcactagcatcagataaaatacctggcaaatttttcccccagggcattttttaaacgatcaggttt

SEQ ID NO: 3294 - DNA, 585 bp, Homo sapiens
  misc_feature 116, 127, 178, 188, 217, 264, 297, 321, 374, 392, 414, 434,443, 463, 465, 493, 495, 500, 503, 507, 510, 515, 518, 528,539, 554, 564, 570, 582: n = A,T,C or G
actttttttttttttttttttttttttcggaatgattaaagatgtctttataaagtttttttcaagacttcattctaaatacacagaataaaaaatggtgtcagctcacttgtaanacaccaaccanattttccttatactgtctcaaaatttaaagatcaatttccccagagggtgngcaatgcatnataaaatggcccttttttgaggatggganaggaagggttgggcaggatggaatattaaattgtaacatgataaacntgcaagactggtatccaatctagataatttatntacattttgatgacttaggaaaanaaagcaatcatttgtgacaagcctaaaaagcttgacatatttaacatacttangaactttttttgtgcggnggggaattctctaattgtgtcnggtgggccttttgaaatgtnacaaacagnaagcccgtctgttgcaaggntnctgctgaacttcacattccaccctaaananaaccnaanggtnggnttgcnttnagggtggatncctttccttancccaaaaaggaaaangtttccattnaaaatnttggctaactgnttt

SEQ ID NO: 3295 - DNA, 583 bp, Homo sapiens
  misc_feature 313, 459, 500, 508, 561, 565: n = A,T,C or G
ggtactggcagtattaagtttatccatcaagaatgcttagttcaatggctgaaacacagtcgaaaagaatactgtgaattatgcaagcacagatttgcttttacaccaatttattctccagatatgccttcacggcttccaattcaagacatatttgctggactggttacaagtattggcactgcaatacgatattggtttcattatacacttgtggcctttgcatggttgggagttgttcctcttacagcatgccgcatctacaagtgcttgtttactggctccgtgagctcactactgacgctgccattanatatgctgtcaacggaaaatttgttggcagattgtttgcagggttgttttgtggtgacgtgcacactgtgtgcattcatcaacctggtgtggttgagagagcagatagtccatgggggagcacccaatttggttggagcatgctgncccacccgttcaatgctgcgggcatcaccaaaatgaggctncaccagangaaatggtccaaaaaatgttgcttgctgatcagcctgttaacccaccactganaacncattgggggggggaaaat

SEQ ID NO: 3296 - DNA, 580 bp, Homo sapiens
  misc_feature 561, 570: n = A,T,C or G
ggtacaaaacagataaaattcttagaagatacatgcaaaaagctctactaagcagatggccacagaactagagcattgataattttactggcgatgtcaataggactccagatgtttccaaactcaacttgaactctcatcttaggctttgtattttgcttttccagtttcactaatgacacaaacatgattcaaatccctgaagtattcattatagtcaagggcatatcctacaacaaacttgtctggaatttcaaatccaacaaagtctggcttatatccaacacttcgtggggtccttttcaccagcaagcttgcgaccttgaccatctttggattatactgcctgaccaaggaaagcaaagtctgcattgttttgccagtgtcaattatatcttccacaatcaagacattctttccagttaaagttgagagatcatctccccaattacttttatgtcccctgttgactggtcattacaatagctcttcagtctgataaaatctacagtcataggaatggatctatcctatttctatcagtgcttggatgtaatccancagtcagcnaaaaaattat

SEQ ID NO: 3297 - DNA, 579 bp, Homo sapiens
  misc_feature 501, 557, 575, 578: n = A,T,C or G
ggtacacttgaaaccaaatttctaaaacttgtttttcttaaaaaatagttgttgtaacattaaaccataacctaatcagtgtgttcactatgcttccacactagccagtcttctcacacttcttctggtttcaagtctcaaggcctgacagacagaagggcttggagattttttttctttacaattcagtcttcagcaacttgagagctttcttcatgttgtcaagcaacagagctgtatctgcaggttcgtaagcatagagacggtttgaatatcttccagtgatatcggctctaactgtcagagatgggtcaacaaacataatcctggggacatactggccatcaggagaaaggtgtttgtcagttgtttcataaaccagattgaggaggacaaactgctctgccaatttctggatttctttattttcagcaaacactttctttaaagcttgactgtgtgggcactcatccaagtgatgaataatcatcaagggtttgntgcttgcttggattatatagacttcttcatatgtctgagtccagatgagttggtcncccaaccttggagaaggnctng

SEQ ID NO: 3298 - DNA, 575 bp, Homo sapiens
  misc_feature 524, 528, 550, 558, 564, 574: n = A,T,C or G
ggtacatctgacactatgccatctgtttttgtaaaagacactggcaccatgtttgactaataccattccacactgctgatttaagaatatctgtgatcagattactaccacaccagcaggccgatcatctacaggcaatatagaaaggttttgggccaagtgggtctatgaaaaacaaaattcagttaatgcttctgtcaagtgaagagagagaacagattttgttattctcccacagcattttagtagtttcctaaagcttactcattctgagcagtcttagtaagctactattgtcaaagactgtgcaatcaaacataggctgaccataagcaaagccccagtttttcctgagccttggctgcctctgtgatctggaacacagcaggcagcatggaagttattattacttatttggggggactaggggaagactgcagatcaaaaaccatctaaccatacatttaagtaaacaaaagcgagccaactgactaattaagtcgtcaaaatcctcttgtcaaaanggcntaaccttcaagaattgttgaanccaaacanggattntggttctcant

SEQ ID NO: 3299 - DNA, 197 bp, Homo sapiens
  misc_feature 130: n = A,T,C or G
ggtacagcagcaacaccatggccgccagaagcaacccaggaaagcgccaggaaggaaagggacactcgcggcggccgggaggctccatgcgcggcgcggaagacgctgttatttctccggaggaaagcanagaaaccgagagccagccgagcagggaagtcccttctgggtccagatatgggacgcaacccccgcgt

SEQ ID NO: 3300 - DNA, 440 bp, Homo sapiens
  misc_feature 61, 66, 73, 80, 105, 112, 126, 131, 150, 157, 179, 181, 182,200, 203, 210, 211, 220, 254, 264, 307, 311, 313, 406, 419,427, 429: n = A,T,C or G
acactgcctggagggccttcttggtgttagtccctgacttcaacttggggtcttcataatngattncattganctgcttngtgacccagactgcattactgctgnctgcttnacacactttgaccnaaatnttggggtatgtggcatatntcactanaccatatcttggcttcacaccntnncttgccaccttctcaatnaanttgactnnacactattntggctcctgtgaagttgcatggccccaatgctgnatgatccatntatcaccaattaaatgttcatggagcctgaagggtccaggacnatcntncgctactgctgatcccctgggccgtgcccatcctcagacatcgactccttctatggtctctgacagggaagacaggaaagcttcggccacctnttgaggggtgatngtacctcngncgcgaccacgc

SEQ ID NO: 3301 - DNA, 565 bp, Homo sapiens
  misc_feature 3, 17, 19, 37, 40, 46, 51, 80, 91, 103, 109, 119, 134, 135,148, 174, 192, 232, 244, 253, 260, 285, 290, 335, 377, 386,398, 404, 406, 416, 417, 418, 435, 442, 447, 467, 471, 476,479, 487, 488, 507, 508, 514, 539, 542, 550: n = A,T,C or G
gtnctgctcctcacacnanttcttctcttcataatgnacnggatgnaaagnttcttgggatcccagctctttggcatagnagctcacaganttacttcttccntattgntcttatgaancttagcaagtacgannagctttccgggcnagaatgaagcccatgatggcaggcantgacccatctggcttggngtcatccaacgtgtattgaaattggagcatcttcatcttnaatgatcatgcngccacagtnatccttnttctttcagaatgcctgcttgtaancatcntgcacttaatgacacctcccattggaagacgctgaattaactggnttctctctgctggaagctctgggctgaatagaatataggcantcaaggatngagggatcgcantaattncntatttgcacnnntaatggcatggctcagngcctctnatatnacgcggcacttgtactggtnaacntgagnganacgagtgnncattgttaacttggtatcnncgatgncatatttgttcccttacttgacccnaancactacanatttcccttcagggg

SEQ ID NO: 3302 - DNA, 563 bp, Homo sapiens
  misc_feature 490, 544, 546, 549, 557, 559: n = A,T,C or G
acgcgggggcggttctgaggactgggtttgggtgcagacgttgttgcttgggcgcttctccgctgcgtgtaggtgaagggggcttcctgaccgagacatggatttaggtgctattacaaaatactcagcattacacgccaagcccaatggactgatccttcaatacgggactgctggatttcgaacgaaggcagaacatcttgatcatgtcatgtttcgcatgggattattagctgtcctgaggtcaaaacagacaaaatccactataggagtcatggtaacagcgtcccacaatcctgaggaagacaatggtgtaaaattggttgatcctttgggtgaaatgttggcaccatcctgggaggaacatgccacctgtttagcaaatgctgaggaacaagatatgcagagagtgcttattgacatcagcgagaaagaagctgtgaatctgcaacaagatgcctttgtagttattggtaaaaatccacgcccnacagtgagaaactttcacaatctgtaataaatggggtgactgttctatgaggcnantcnttaatatngnttgt

SEQ ID NO: 3303 - DNA, 337 bp, Homo sapiens
  misc_feature 268, 310: n = A,T,C or G
acataggaaaatatgattgaagcattctcaaatacatggctctgagggtagattacttgttttttatcatttaatccatatacaatgcagcaaatagatacattaattataacattttccttcaattaatagtttattcactgtcatagaagctccatgaaggggcatcacttaagaagctctccaggttagagtcaagcaaattctgaacacttggtcaatggcacatgaaaatgccaggtcctggcacaatgagtaaataacccanaaggtgatatatgtcagatcaagacaatcttaagcaccatantaacttttgaggcaagtggcaccgtac

SEQ ID NO: 3304 - DNA, 321 bp, Homo sapiens
cccaagcatctagtctggaactgacagagataagtagagaaaatgttccaaagtctggcacgccccagcttagcctgccattcgctgcaaggttgaacacccccatgggccctggacgaactgtcgtcgttaaaggagaagtgaatgcaaatgccaaaagctttaatgttgacctactagcaggaaaatcaaaggatattgctctacacttgaacccacgcctgaatattaaagcatttgtaagaaattcttttcttcaggagtcctggggagaagaagagagaaatattacctctttcccatttagtcctgggatgtacc

SEQ ID NO: 3305 - DNA, 566 bp, Homo sapiens
  misc_feature 514, 565: n = A,T,C or G
acatttaaaattagtcccctttatgcattttactctacatgtgttatccttgcaaagaaaaagactgacatctttgagagcaagagtttttgtcttattcacctctgtataatttccaacatcgtgctttgcacattggacattcaaaaaatgttatacaagattgactgcatcaatactggagtgttgtgtgagggttaggtgctgaggctgagaagtgtatgagggagacctgagattaaacctgccacataaagtggagagaagtagcaaggtcagggctatgaaataatcccaaaaactttagaatttctacataatacagttgacactactattctcaatagagctgctttcagtctcaaagggctgtggtatgtgtgccgtgtgtgtgtggtaaaaaagggaagcagcaggtcaaggaagagaagtgttatttcacaagacttaagtaatcttgtcattgctgcttttcctgccagaaaatcattacctttcctttaaaaatcatttncatatcattttactaactcccatgtcaatttcacccttcctttctaaaaana

SEQ ID NO: 3306 - DNA, 561 bp, Homo sapiens
  misc_feature 373, 453, 470, 489, 506, 508, 531, 535, 538, 556: n = A,T,C or G
acatccatgtggccaaaatcatcaagcctgtcctgacacaggagtcgaccacctacattgcagaagagtattcacgcctgcgcagccaggatagcatgagctcagacaccgccaggacatctccagttacagcccgaacactggaaactctgattcgactggccacagcccatgcgaaggcccgcatgagcaagactgtggacctgcaggatgcagaggaagctgtggagttggtccagtatgcttactttaagaaggttctggagaaggagaagaaacgtaagaagcgaagtgaggatgaatcagagacagaagatgaagaggagaaaagccaagaggaccaggagcagaagaggaagagaaggaagactcnccagccagatgccaaagatggggattcatacgacccctatgacttcagtgacacagaggaggaaatgcctcaagtacctngggcgcgacccccttanggcgaattcaaccactggngggcggtctaatggatncnactcgggcccactttggggtaancatnggnataactggttctgtgggnaaatt

SEQ ID NO: 3307 - DNA, 561 bp, Homo sapiens
  misc_feature 389, 432, 438, 459, 481, 534, 539: n = A,T,C or G
ggtacaaaaaagaaaagaaaaaaaatcaacccacaaagcttctaaaaaaggaacccgcaggcacttcctcttgtggaatgtttaaaaagttagcctactaaagaaaacagtcgacttcttgtgaaggttttggagaaatatgtatcagttcgttttatttgggtattcaataatatccttggtgataatgctgactccatggcttctgaccccagaattgaccctgctgccactggttgtagccctgagattgatttttgtagccacgattgtttcctcgtcctctgaagttctggttgtagttccctctgttgggcattccacctctgttgtagttccctctgtttgagtaactaccacggccaggaaaaacaggggccccgagggtntggatagccgatttcaccactttcttcaccaccaccacctttntgtggnatgttgcccctctattatatncccacgaatccaagggctcctnctctggaaattccccccgcctattgaaactcccctctctttggcccccctttnttaantgggttttgccccttttttttt

SEQ ID NO: 3308 - DNA, 560 bp, Homo sapiens
  misc_feature 405, 458, 467, 476, 536: n = A,T,C or G
acacaatggtttattaaaggaatgtatggcccacatcaacctagcaaggattctactggtaaaccttcccatggccaaaggaaaaacaagcaggagttgagtggctggggtggggtgcaggcaatggagagagggcagaagggtgtagaagctgaagggggctagaagcttactcctgagtttcttccttctgtcttcaaatctttacttcttatggccaaagacccagctgtttcataggctggagatgcactcttctagactgctcgagacagccagagacaggggaggagggaagaaggatactgtggaaagggatggcggggcaaacatttagagctagaagccactactgggtcaatgctaaagtttctgtctctaagcctaaaaaagccagtgtagtanggcccttatcactcttagtttgctaggtttcccctcttgaaataatgagccanatttaaccncgctaccanaaaagaaaaggaccgggctgtcaagaattaccaaaacttgaatcttgcttattggcgggncttggcccgacccctaaggcgaat

SEQ ID NO: 3309 - DNA, 568 bp, Homo sapiens
  misc_feature 487, 492, 510, 511, 513, 530, 537, 551, 568: n = A,T,C or G
ggtacgcgggggctgatgtggcaaagatggtctccacatctccctcctgcagggccgcactctgcctccatctcccgaggcagccacagtcccatcacctttctgttctcttagaaaggagttcctcctgatggctgactttaaaagtcaaaagacatggagacaaccaggtatagacacaaacacctagaaacaagcagtcagacaaaaattggtacgcgggggccgtcggagcccttgcacgcctgctctcttgtagcttctctcagcctagcccagcatcactatggtggacgctttcctgggcacctggaagctagtggacagcaagaatttcgatgactacatgaagtcactcggtgtgggttttgctaccaggcaggtggccagcatgaccaagcctaccacaatcatcgaaaagaatggggacattctcaccctaaaaacacacagcaccttcaagaacacagagatcaactttaaattnggggnggagttcgatgagacacnncngatgacaggaaggcaantccattngacacttggatggngggaacttgttacctcn

SEQ ID NO: 3310 - DNA, 563 bp, Homo sapiens
  misc_feature 445, 557: n = A,T,C or G
ggtactatgactgaaagattcttcatggctaaaaagctctgcatcaaactcaattcaggaggccttccctccccaccaccatcaacctcttcaaaacctactccctccctctaagtatctctcaacacagtatgtctggggctagatttcaaaacccacgtaatgaaaaagtcagttttacaagcctaattttgttgtttttttttatatcaattaacgttaaaaattgcatcaactatttaattcatgaggatctttcatattaaaatttaaccttaagattcaaccgccatgtgcttttataaaggaaacattttttagagacgtctgagctcacttttacatggtggtgcctactgccgttaatgtttgtgattttaaatcttaaacagccctgaattttgaaatgtagcctaatttgggattctgcaactacaactttacngggatgcctcaaatcaaaactaaaaaaaacttaaccagcccttactttaaaacctttaaccagccatggcatttttgaactacagggtggggggtttttttttacccacctntttttt

SEQ ID NO: 3311 - DNA, 587 bp, Homo sapiens
  misc_feature 5, 6, 13, 16, 19, 23, 29, 35, 46, 54, 55, 70, 76, 77, 79,90, 97, 110, 121, 127, 135, 179, 234, 251, 302, 303, 311,314, 328, 349, 386, 388, 419, 458, 465, 491, 522, 533, 539,555, 557, 561, 576: n = A,T,C or G
gcggnngcccggncgnggncccngggcantcttangacgggcgctntggagccnnccccatgcagcgtgngtcggnngnctattctgganaactagncctcgactcacgngcaaggatgangctganaggaatancaaggcttatctctaggatccataaaagggaccctgggcgtttntacacatggggacccaggctcgccaaagcattgctgctcacactagataaccagnttccagttgagagtccnagagctatttcccgcaccaatgagaatgacccggccaagcatggggatcannacgagggncancactacaacatctncccccatgatttggagactgnatttccccatggccttactcctctctttgtgatgcangngaagacattcagtgaagcttgcctgatggtnaggaaaccagccctaaaacttgtgcattacctgaaaaanaccaatntacgcttatccactatccatatcttntgtatggagaagaagggaacaggaaaaaccntaacacctcancatggnattgatttcttgcgcnanaaanagactggggggagcnacatattcaca

SEQ ID NO: 3312 - DNA, 573 bp, Homo sapiens
  misc_feature 499, 568: n = A,T,C or G
ggtacacaggctgctacccaagttgttctgaatgttcctgaaacaagagtaacatgtttagaaagtggactcagagtagcttcggaagactctgggctctcaacatgcacagttggactctggattgatgctggaagtagatacgaaaatgagaagaacaatggaacagcacactttctggagcatatggctttcaagggcaccaagaagagatcccagttagatctggaacttgagattgaaaatatgggtgctcatctcaatgcctatacctccagagagcagactgtatactatgccaaagcattctctaaagacttgccaagagctgtagaaattcttgctgatataatacaaaacagcacattgggagaagcagagattgaacgtgagccgtggagtaatccttagagagatgccaggaagttgaaaccaatttaccaagaagttgtttttgattatcttcatgccacagcttatcaaaatactgccttggacngacaattttgggaccaactgaaaatatcaaatctattaagtcgtaagggcttaatggattatataaccncacat

SEQ ID NO: 3313 - DNA, 569 bp, Homo sapiens
ggtacatggccacagatcatcaaaccaacattttttgtgaaatcatgaacaagatgaagtaaagctggacgtgagtttggagcacctgtcataacaagacactgtggcctaaagtttttcacgtggtcttccactccagaaagacgaattgaatgctgcagtgcattcaggtaagtcagggcttgtgtagaggatccccaattcacatctggttttttgtaggtaacataaatatacagcccaaggactatcacatatgttagcaatgcagcccaccagttaatgacgaacattactatgcaacaaagaattgctccaagaagtgatatccacatgttgtagtatttgaatgcaggacgccatcctggagattttgcaagtgatgcatggaatactgaaaaattgatcaatgcatatgatgcaaggaagaagtttgagataattattttgggagcactcacttagggatgctaatgctgaagaaagagtggctgaaaatatacctgcagaaattagtggtgtaaatcctgacccctactcattactcgtaaatctaacaaaatcatccg

SEQ ID NO: 3314 - DNA, 196 bp, Homo sapiens
actaaaaatacaaaaattagctgggtgtggtggcgtgcccctgtagacccagctactagggaggctgagacaggagaattgcttgagcccgggaggtggaggttgtagtgagctgagatcgcactgctgcactctagcctgggcaacaaagtgagactccatctcaaaaaaaaaaaaaaaaaaaaaaaaaagtacc

SEQ ID NO: 3315 - DNA, 562 bp, Homo sapiens
  misc_feature 480, 494, 518, 535, 557, 559: n = A,T,C or G
acctgccaaatggatccacgaggccaaagctgtgcgagcacacatggaatctgacaagcacttagaggccctttgcttatttaaggctgagcactggaaccgctgccacaagctcatcatccgacacttagcttctgatgccatcattaatgagaactatgactacctgaaggggttcttggaagacctggcacctccagagcgcagcagcctaattcaggattgggaaacatctgggcttgtttacctggactatattagagtcattgaaatgctccgccatatacagcaggtggattgctcaggtaatgacctggagcagttacacatcaaagtgacttcactgtgcagtcggatagagcagattcagtgttacagtgctaaagatcgcctggctcagtcagacatggccaaacgtgtagccaacctgcttgcgcgtggtgctgagtctgcatcatctcctgatagaaccttcgactnaacaccagaccctnagcgagtcctttgcgcctcttggnttcccacattgggccgntttccatgcctgaggactattncntgg

SEQ ID NO: 3316 - DNA, 451 bp, Homo sapiens
  misc_feature 106, 137, 158, 183, 339, 411, 429, 437: n = A,T,C or G
actttttttttttttttttttttttttttaggttgcagggctttatatttcagcaacagtcatacagagccacacagcaggggcacccacagctgcctcaggaggnggcagcggcggcctcttttgcagcttttctntcttgcagcatcctctgcctntgtttggccaggcacttcctggcanaactgtaggcccccaggtcctgatagcggtcctggtaggccttggccacctgggtgaactgctccacttccttgatacagttctgctggtagttctgtccttccctctgctgacaggctttgagccgatcctgcataatgttgataatttcttggncgactttgtagtccctcttccactgcatttcggcttcatacatgcacatgatgtcctcctccttgcactcantgatgtctggcacgcggnggtacctnggccgcgaccaccc

SEQ ID NO: 3317 - DNA, 623 bp, Homo sapiens
  misc_feature 353, 427, 465, 470, 485, 493, 504, 521, 551, 575, 591: n = A,T,C or G
ggtaccgaccatagagcaagaatcaagattctgctaactcctgcacagccccgtcctcttcctttctgctagcctggctaaatctgctcattatttcagaggggaaacctagcaaactaagagtgataagggccctactacactggcttttttaggcttagagacagaaactttagcattggcccagtagtggcttctagctctaaatgtttgccccgccatccctttccacagtatccttcttccctcctcccctgtctctggctgtctcgagcagtctagaagagtgcatctccagcctatgaaacaagctgggtctttggccataagaagtaaagatttgaagacagaanggaagaaactcaggagtaaagccttctagcccccttaagcttctacacccttttggccctttttcatttgctgnacccacccaagcacttaaactctggtttgttttccttngcctnggaaggttaccaganaatcctgntaggtgatggnggccaacattccttaanaaccatggggcctttttttttttttttttngggtttatggttaaacatggaacnccatgagattcccttnaaactccccctgattcttcctttaagggaaat

SEQ ID NO: 3318 - DNA, 634 bp, Homo sapiens
  misc_feature 30, 51, 250, 305, 320, 396, 398, 412, 413, 414, 415, 472,481, 494, 519, 526, 529, 555, 592: n = A,T,C or G
acttttttttttttttttttttttttggangaaaaagagcctaaacgcttntgatttgggataaagaaaaaggagcattaaccttgactatgtctttagctccagccacctttttaagagtaaattgctgggcaggtgggggagggctagtcacggaacgaaactgtaagccggaccaggtgtgaggaggggaggtgataaaaagattacagggtggaggagtggagcctgaggaagaattgggacctancttggcgtggagaggaggggagaggtcaaatgggtttgtagaaaaggaagattanacccactcaccaacncctggggttgggactgaggggacaggtggggaggaaaaaaaggaaaatttggaacaagttgccttgggcccaaaancnaggaggggccggtnnnntaaaaaaatgcctggacttaaggcccctaaacatttgccctttttttgacaaaaatntttaaggtnttttgggatgganaatcaaaagtgcccttttttggccntttaaanccntggcaaatttttttggggccaccggnttccaaaaaaaatgaggcctttaggtttaaggccggngtaatttaaaaggtttaatttttgaccccccgcttaggggaa

SEQ ID NO: 3319 - DNA, 652 bp, Homo sapiens
  misc_feature 376, 379, 396, 411, 416, 420, 428, 438, 441, 447, 454, 461,462, 468, 478, 483, 487, 507, 509, 515, 519, 524, 546, 566,594, 597, 613, 631, 640, 651: n = A,T,C or G
ggtaccctttggatttcaaacagtaacatcggatgtaaacaaacttagttccttttactcactgaaactaatcaagcggctctacgtagacaaatctctgaatctttctacagagttcatcagctctacgaagagaccctatgcaaaggaattggaaactgttgacttcaaagataaattggaagaaacgaaaggtcagatcaacaactcaattaaggatctcacagatggccactttgagaacattttagctgacaacagtgtgaacgaccagaccaaaatccttgtggggtaatgctgcctactttgttggcaaggtgggatgaagaaaatttcctggaatcaaaaacaaaaaaatggtcctttcagaagtcancanaacagaaccccaacccntggcaaatgatgacnttggnggcnccgttttntttgggaacnatngccggnttcattngtaaaannaaaagncttccttttnaaaanaacnttttaacctggttcttctantnccccanggtngtggngggttaagtcccagccttgggnaaaattgaaaacccctcccncaaaccttgcccaggggattattccccnccntggccaaggccaaggnaaaatttcctttccaaantaagggggnaaaaaaatggnc

SEQ ID NO: 3320 - DNA, 632 bp, Homo sapiens
  misc_feature 330, 335, 344, 444, 451, 491, 494, 500, 520, 526, 531, 548,558, 563, 570, 587, 603: n = A,T,C or G
actccgtgaagtctagggataggaagatggttggcgacgtgaccggggcccaggcctatgcctccaccgccaagtgcctgaacatctgggccctgattttgggcatcttcatgaccattctgctcatcatcatcccagtgttggtcgtccaggcccagcgatagatcaggaggcatcattgaggccaggagctctgcccgtgacctgtatcccacgtacagaaagttttccaccaaagtcacgctgaatacagtggggcaccaccaccgccccccgcccatcaggcctccgtttctggaatccaagcagaattgctcacatttccaactnctctnctggcctanaagacagaaaagaagactggggtattcttccatcacttgcccaaaaaatgaaaaaggcccttttctaaaaactggttcaaatcaatccaccaaaacaaanaaggcanggtttttacacattactggccaagggctgaccaacccctngtnggggtnttttttttgaaaaaaaacangattgnttgangggacaaaacctttggntaaaaacccnttgcncattaanttttttttttaccttgntattccaccggaatgncttgaggatccatgggaatttgttcccgg

SEQ ID NO: 3321 - DNA, 643 bp, Homo sapiens
  misc_feature 353, 398, 435, 436, 447, 471, 473, 489, 497, 506, 508, 513,539, 543, 544, 548, 614: n = A,T,C or G
acgcgggggaaacggaagtgagcggcggggtcgactgacggtaacggggcagagaggctgttcgcagagctgcggaagatgaatgccagaggacttggatctgagctaaaggacagtattccagttactgaactttcggcaagtggaccttttgaaagtcatgatcttcttcggaaaggtttttcttgtgtgaaaaatgaacttttgcctagtcatccccttgaattatcagaaaaaaatttccagctcaaccaagataaaatgaatttttccacactgagaaacattcagggtctatttgctccgctaaaattacagatggaattcaaggcagtgcaccagggttcacggtnttccatttctttcaagcctcaaatcttttccttggatgtttgganggggtaatgatgaaaaactattggatttaaggatttnnttattgatccntcccaaaccgaatccttggaaaancncccttgtggggggaanataaactnggttacctngnaatangggcttgttattggaaaccaagggtngctnntggntattagcattttttgaccttggcccgaccccctaaggggaattccacccccttggggccgtctttnggatccacctcgttccaaccttggggtat

SEQ ID NO: 3322 - DNA, 625 bp, Homo sapiens
  misc_feature 283, 347, 354, 357, 388, 395, 405, 408, 410, 425, 429, 435,436, 439, 445, 446, 447, 450, 466, 467, 469, 472, 510, 516,518, 525, 545, 561, 582, 589, 596, 601, 607, 617: n = A,T,C or G
actgcagcctggattacagagaccttgtctcttaaaaaaacaaaaccaaacttgactcagactcccactctttgccattcccttctctccagagatatacagcctggataacctcaaaaacatgacaggtcgatccatctaaagctgcagcacagcctatagaatattcaattgtctgcaaactccccaaaactagtaatacaacttgggataggaaaaacaaaaaagaggccaggagctgtggctcacacacataatcccagcactttgggaggcaaaaggngggtggatcgcttgagcctgggcaacaacaaaaaaaattcgtaaaaataaaaaaaaataggcangtggggnggnttatgcctgtaatctcaacacttttggaagnttaaggnggaaaaatgnttnanccagaagggtgcttngggntcaganntcnaaaacnnnctnggccacataatgaganntnatnttttgccgaaaacaaaaaacaaaaaccatttcttggtngggggntnaaccctngagtcccctcttaaaaggtnaaattgaactggttanaaccaagggttaaactgaatntgccctngatcccncttgngaaaancaaaaccttnttaaaaaa

SEQ ID NO: 3323 - DNA, 628 bp, Homo sapiens
  misc_feature 354, 368, 370, 379, 385, 386, 387, 391, 401, 404, 407, 408,409, 417, 423, 424, 427, 432, 440, 445, 447, 452, 464, 483,487, 495, 499, 514, 515, 525, 528, 542, 550, 555, 557, 559,564, 580, 583, 591, 603, 604, 605, 622, 628: n = A,T,C or G
actgattcccacttcagctcccagtccaaagcggtaaccatcagaaaagcgagtgctggcattccagaacacacaggcactgtctacgtgctgcaggaagaactccgctgtgttttcgtcctctgtgacgatgacatccgtgtgggagctgccatacttgtggatgtggtcaatggcatcctgaacgttgtccactacttcaatgcataattccaggtccccatactcagttcggagtgacttcacttcggaggggctgaaggtcagataggaggcaaatttggggcctgcatgaatttttacctgttccactctcagcatatcaatgatctggcaaataatggtggtcctgancaaatcccgggggntnaacaaagtntccaannntttnaggcggttgnttnttnnntttaaagnttttgnntancctgnggaccttntaacnantggcntcggaatccacntacttgtgacaaatccttncgtngggccccntaantggaatcccctaacnnctttttggangtntttacacttggganaacccctnggaangncnaaatnttatttttgttaaggnggnaaaaattnacttttttttgnnntacaatggccggcctcnttattn

SEQ ID NO: 3324 - DNA, 641 bp, Homo sapiens
  misc_feature 402, 411, 413, 423, 436, 441, 444, 448, 470, 471, 488, 508,538, 541, 548, 561, 563, 573, 575, 578, 582, 586, 592, 594,604, 611, 630: n = A,T,C or G
ggtacctacatcagatctaaccttgatcccagcaatgtggattccctcttctacgctgcccaggccagccaggccctctcaggatgtgagatctctatttcaaatgagaccaaagatctgcttctggcagttgtcagtgaggactcatctgttacccagatctaccatgcagttgcagctctaagtggctttggccttcccttggcatcccaagaagcactcagtgcccttactgctcgtctcagcaaggaggagactgtgctggcaacagtccaggctctgcagacagcatcccacctgtcccagcaggctgacctgaggaacatcgtggaggagattgaggaccttgttgctccctggatgaaactcgggggcgtgtttttccagtttgaaaaaggactnggaaccacnancgttttttgngggttgccacttncaacntantggntcatgtggggactgacccttcnnttaagggggatcaggcntccacttgatgaacccaacnttaaccagaaaaaactttggtccttttccnaanccttaanggggcctttgaantngtggggcctngnatnaaancttncccctncncatttgggtnggcctgngggtttgtttcaacttttnaaaggtttttt

SEQ ID NO: 3325 - DNA, 653 bp, Homo sapiens
  misc_feature 251, 252, 350, 422, 432, 434, 441, 463, 489, 491, 507, 528,535, 544, 545, 555, 561, 576, 582, 584, 587, 626, 646: n = A,T,C or G
cgaggtactcagcgccagcatcgccccacttgattttggagggatctcgctcctggaagatggtgatgggatttccattgatgacaagcttcccgttctcagccttgacggtgccatggaatttgccatgggtggaatcatattggaacatgtaaaccatgtagttgaggtcaatgaaggggtcattgatggcaacaatatccactttaccagagttaaaagcagcccctggtgaccaggcgcccaatacnnaaccaattcgttgactccgaccttcaccttccccatggtgtctgagcgatgtggctcggctggcgacgcaaaagaagatgcggctgactgtcgaacangaggagcagagagccccgcgtcttttttttttttttttttttttttggcctatgaaatgggcctttcaaggncaaaaaaaancngaaaaancccaagcccctttgaatttttncaacaaacttgaggacttaccaatanantttgaggcggtttaanaaaaaaaatcccaaacttganaaaactntcctcaaanncctttaattnggagtnggccaaataaaatcncccaananccnaatttttggggtttggaacctctccccaggagtcaattncccgagaaatcaaaaaagtnccccctg

SEQ ID NO: 3326 - DNA, 630 bp, Homo sapiens
  misc_feature 411, 451, 464, 486, 493, 501, 511, 513, 529, 560, 576, 582,588, 625, 628: n = A,T,C or G
acagtctttcattaaataagaatacttacacatacattttcagatatttctaccttcctgtatgtgtttggaattgtatgtaggtagccactgaaagaatttgggccccttgggaggatggcagtggaagtccatgaagtaaagagcattctttaaaaagcagatttgattgcataccttttagttatttgagattctgagaattctgataaaccccaaagcagaaagattccttatacccttggaagatgggaaaggtgagggaaatatttgaagcagggtcagaacatccactaagaacatagcacctcagtagagcttacattatagtgccagggtagaagttattactgaatagcttaggatgatgaacattaaccttcctacaggagtagtaacaactgatttggngaccatgattgggcaccctttaatgtaactgcaactaaanaacaattattggntttgccatatactcctgtaggnagtgatnggagaagnacccttgggngnccttcttggagcctgnatcgaatttgctcctctggtttaaggaaacntttaaacctttcttgntactgntttaanaaaatcttgatggcctcattttggatcaacatttttntancc

SEQ ID NO: 3327 - DNA, 635 bp, Homo sapiens
  misc_feature 401, 403, 439, 441, 447, 462, 468, 486, 507, 537, 545, 551,574, 576, 578, 589, 602, 606, 615: n = A,T,C or G
acgcgggggcgtcttgttcttgcctggtgtcggtggttagtttctgcgacttgtgttgggactgctgataggaagatgtcttcaggaaatgctaaaattgggcaccctgcccccaacttcaaagccacagctgttatgccagatggtcagtttaaagatatcagcctgtctgactacaaaggaaaatatgttgtgttcttcttttaccctcttgacttcacctttgtgtgccccacggagatcattgctttcagtgatagggcagaagaatttaagaaactcactgccaagtgattggtgcttctgtggattctcacttctgtcatctagcatgggtcaatacacctaagaaacaaggaggactgggacccatgaacattcctttggtttcaaacccgaancncaccattgttcaggattatggggtcttaaaggctgntnaaggcntttcgttcaggggcnttttantcattgatgataagggtnttcttcggcaaacactgtaantaacctccttgttggccgtttttgggttanaactttanaattanttaggcccttccatttcattgananantgggaaagtgncccacttggttgnaacnctgcagggnaccttaaaccctgattccaa

SEQ ID NO: 3328 - DNA, 637 bp, Homo sapiens
  misc_feature 443, 457, 473, 487, 504, 513, 521, 533, 546, 556, 563, 584,602, 610, 613, 618, 629, 632: n = A,T,C or G
acgcggggagtggacaccatgcattctgcaagccaccctggggtgcagctgagctagacatgggacggcgagacgcccagctcctggcagcgctcctcgtcctggggctatgtgccctggcggggagtgagaaaccctagatggggtttcgacatgttgcccaggatggtcttgaactcctgagctcaagcaatctgcccgcctcggcttcctaaagtgctgggattatagccccctgccagtgctccaggctgagcccccataacaggacgaactgcggcttccctggaatcaccagtgaccagtgttttgacaatggatgctgtttcgactccagtgtcactggggtcccctggtgtttccacccctcccaaagcaagagtaggatcagtgcgtcatggaggtctcaaaaccgaaaaacttggggctaccccgggcatcanccccgaggaatgcncttttcgaagtgctgntttccaacttattntttaaatgccttgtgcntttttcccnaagcttgngaaaaactgccnttcttaaaaaagnttggttccanaagatgnttttggttcaccggggttccnaaaccaaaaaaaaacttncccttatnacnttatntttattgaaanctnggttt

SEQ ID NO: 3329 - DNA, 644 bp, Homo sapiens
  misc_feature 328, 368, 395, 400, 439, 445, 475, 478, 546, 615, 619, 644: n = A,T,C or G
caagacactacgggaacagtttgcctccctcccagcctcaaccacaattcttccatgctggggctgatgtgggctagtaagactccagttcttagaggcgctgtagtatttttttttttttggctcatccttaggatacttcttttaagtgggagtctcaggcaactcaagtttagacccttactctttttgtttgttttttgaaacaggatcttgctctgtcacccaggcttgagtgcagtggtgcgatcacagcccagtgcagcctcgaccacctgtgctcaagcaatcctcccatcttcatcttccaaagtgctgggatgaacangcgtgagccacaagcttccaacctaggcccttaatcttgntggtatttttcatggactaaaagggtnggcantttaacctaaccctgggttaaaaaagttttaggggccgnttcttntaacttaaaaggggggttttgggaaggttntgnggcccaaacaaaaacctgcttttttgaccaaaaaagcaaaaagcctttttaaccccctgggccgaatntacactggaagccaacttgtgggaccccggttcccaaccctttttggttgggggggaagggtaaaaaancccnaatacccctttttttagggggcccn

SEQ ID NO: 3330 - DNA, 638 bp, Homo sapiens
  misc_feature 410, 421, 425, 430, 464, 486, 493, 499, 512, 536, 574, 587,596, 630, 638: n = A,T,C or G
acgcggggggtggcggcggaggctttggcagctcgggactgagtgcaagaatcagcatgattcttcagaggctcttcaggttctcctctgtcattcggtcagccgtctcagtccatttgcggaggaacattggtgttacagcagtggcatttaataaggaacttgatcctatacagaaactctttgtggacaagattagagaatacaaatctaagcgacagacatctggaggacctgttgatgctagttcagagtatcagcaagagctggagagggagctttttaagctcaagcaaatgtttggtaatgcagacatgaatacatttcccaccttcaaatttgaagatcccaaatttgaagtcatcgaaaaaccccaggcctgaaaaaataaagtaaaataaatttggtanttggtcacggntaanttgtncctcggccgcaaccaccctaagggcgaattccanacacttggcggccgttattatnggatccnactcgnaccaaccttgggnaatatggcatacttgtttcttggngaaaatggtatccgttaccaattccccacaaatacaanccgaagcataaangtaaaaccngggggcctaatgaggggctacctccaattaatgngttggctn

SEQ ID NO: 3331 - DNA, 666 bp, Homo sapiens
  misc_feature 384, 424, 489, 508, 530, 580, 619, 661: n = A,T,C or G
ggtacccccacgattacacagctttgaacaagtgaaactatggttaccaaacagctatttttattatagcatctacagtgtctggaaaaggatgtaacaataaataactgtagatgcatcacgagacatccatttacttaatcacagaagtggatcttgctacatagttttctcaatgtcttcattcttcagattctccaggcttacgaatgtcatcaatcttcaaaatcattctaaccatttgtgttgcaagagatatctgttgctttttgccaatcaaggtttctatgacatgctgttgcttcatatcatttgtccccttgtgcaaacagtcgatgccaagagcagggttcatctccttcacctgtctggctcggacttcgncataagtctggatgggattcatgccactggttttcagaanagggccatgggggatgaacctccatgcgtcggcaaaccctcttatgggatactggttctaaaggnggggcacttaatccgcctntttggctaactggccagggccnaaggatattttaacaagccccttcttccttacaccacaccaaattttgcnggatgaaggttccgggttgacccccaaaccttttggaangggacggttcccctcccaaggaacatctaattcccccctaanaaaaa

SEQ ID NO: 3332 - DNA, 653 bp, Homo sapiens
  misc_feature 425, 430, 457, 465, 469, 482, 519, 530, 531, 532, 590, 634,653: n = A,T,C or G
cgaggtaccccaggtatctgctagaaagagaagagaactagggacacctgccaccctcttcctagatcaacctgataacattgctcacatgaaggccctcaatgtggacatcaggaccatgtcaagtacacttgaaaccaaatttctaaaacatgtttttcttaaaaatagttgttgtaacattaaaccataacctaatcagtgtgttcactatgcttccacactagccagtcttctcacacttcttctggtttcaagtctcaaggcctgacagacagaagggcttggagattttttttctttacaattcagtcttcagcaacttgagaagcttttttcatgttgtcaagcaccagagctgtttctgcaggttcgtaaccttagaaaacaattggaatatcttccagtggatatcggttttaccngtcanaagaatgggtcaccaaacttaatcctnggggacanactnggccttaaggganaaaaggggtttgtcagttgtttattaacccaaatggngggggccaacnnnttttccaatttttggatttttttttttaacaaaaacctttttttaaacttggatgggnggggcccctccaagggtgaaaaatatcaagggttgggctggctnggattataaaacctttctn

SEQ ID NO: 3333 - DNA, 626 bp, Homo sapiens
  misc_feature 389, 405, 415, 497, 499, 504, 509, 519, 541, 550, 551, 570,572, 575, 582, 606, 613, 614: n = A,T,C or G
acaggtttcactattacaaatatatgatgttaaactaacaaactcatgaccttcaaagatgtcttcgtcccacgcacacacatttgtaatttgtgtccatttgctatttcccttcttctataatcttcaaattatatagttatgcattgagttccctatgcatctcacccatctcctttatctcagccttctcatactttgccattctcttctttctggaaataaccagcacaacaattccagcaacaactgctatcaccacaaccacaataacagcaataacaccagcttttagaccctgcattgagaattcaggtgctttttcatcaacataataaattaaagttggaccaggatccagatccagttggttccccattactggtcanggtccattttcttaanaaggaacaanggatcaccctttacaatcttttcaaaaaataggcccattaggtttggtcccatattttgggttttttgggaagaatttggancnaaacnatagnggtacaatanttttatccaaaaactccggganaaatttggnnccgtgaaaacccgtgggancnccnttggaanggggccggaaactttctataaaanggtttcnntgcttggggtta

SEQ ID NO: 3334 - DNA, 648 bp, Homo sapiens
  misc_feature 379, 387, 392, 416, 421, 431, 440, 458, 479, 491, 500, 501,502, 505, 506, 512, 521, 529, 545, 552, 553, 569, 571, 598,604, 605, 611, 619, 632, 643: n = A,T,C or G
ggtacaaataaaatcaaaaagagcagtgttctgttgtattcatttctgcatgtatagctttattaattgctaatgaaaattagaacttttctgggatcttctgacaagatttttaaaaaatcttaaaatgccttttcttcagtgaagccatctttggagttagtcattactctcaccttatctgtcatcttgacttcaacctgatattcctcttcttttggtccagaccctcaaattttaaaagtagcttcaagttaaggaaaggtcatttttccacagttcaagtctctgaaaaaccttcctctccactggaaggtaccagcccaggaagtggaagtaatcccatgcctaaaccatcaggggccaattgggaaggcantaagaacncctgncttgggccgacctatttattaacnccagncttgaagggncatggcctngaaaaaggggcctttttnggcccccgtaatttttaaaanggaaagggtatnttaaagggnnnggnntggttnccaaaattngccccatngaaaccaaccattatngattatnngccctttaaatccaantncccatgttttcaaaaaaaaggggggcnggtttnnaattcngttttgcncccccttcccaanaactttttttnaaaaa

SEQ ID NO: 3335 - DNA, 652 bp, Homo sapiens
  misc_feature 162, 260, 319, 382, 400, 403, 433, 452, 456, 458, 460, 509,515, 522, 542, 545, 549, 554, 565, 578, 593, 594, 598, 603,605, 606, 607, 608, 609, 610, 611, 612, 613, 614, 615, 616,619, 621, 622, 623, 625, 626, 628, 631, 633, 634, 636: n = A,T,C or G
  misc_feature 638, 639, 640, 641, 642, 644, 645, 646, 647, 650: n = A,T,C or G
ggtacttttttttttttttttttttttggctgaaagagttgacaattttattttcacatttcccaatacaaaggaaaactgcatcttttttgtcccacttctcccctccaaaactattctctttcataggacaggggagcaagtcttccttatgctgtttanaaaactcagtatcacagcagcatgatctcctggtgaagcagaacaggtaatataaaaccgatacaataaggcctcccctctatccttatctgtctggncgagtcattccgggccgagtgggcaccatcatgggacgggcaggaggtctttatcattngggggcccaagcattaattggcatatggcctcccatgggcggcctcattccaggaaccaggtnccactggcattattccangangaggagggcccatcattggcatcatgggangggccccccatattggggngctngnantaatacccagggcgaaggaggaccccgaaaggttggggggaagggggtnttatcncccttcnggaggaggacccaaaatggngtngganggttntttctttttgnaaaagcacccgtntttttttcccccctnncttnccggngnnnnnnnnnnnnttncnnngnntnatntnntncnnnnngnnnnatntc

SEQ ID NO: 3336 - DNA, 628 bp, Homo sapiens
  misc_feature 398, 435, 479, 504, 506, 513, 514, 522, 524, 538, 544, 553,557, 573, 585, 610: n = A,T,C or G
ggtacgcgggactcagaagcttggaccgcatcctagccgccgactcacacaaggcaggtgggtgaggaaatccagagttgccatggagaaaattccagtgtcagcattcttgctccttgtgaccctctcctacactctggccagagataccacagtcaaacctggagccaaaaaggacacaaaggactctcgacccaaactgccccagaccctctccagaggttggggtgaccaactcatctggactcagacatatgaagaagctctatataaatccaagacaagcaacaaacccttgatgattattcatcacttggatgagtgcccacacagtcaagctttaaaagaaagtgtttgctgaaaataaagaaaatccagaaattggcagaacaagttgnccctcttaaactggttatgaaacaactggacaacccnttctctgatggccatatgtcccaagaatattgttggtgcccatnttttacaggtagagcccatttactngnagatttnnaatcgttntntgttaccaaacttnagaacnagtttttgnttgnacatgaaaaaagcttnaagtgttgaaanctgaatggaaaaaaaaaatttcaancctcttttggaggcttga

SEQ ID NO: 3337 - DNA, 647 bp, Homo sapiens
  misc_feature 396, 450, 535, 541, 548, 562, 573, 603, 617, 618, 635: n = A,T,C or G
ggacgcgggggactccggcagctttatcgccagagtccctgaactctcgctttctttttaatcccctgcatcggatcaccggcgtgccccaccatgtcagacgcagccgtagacaccagctccgaaatcaccaccaaggacttaaaggagaagaaggaagttgtggaagaggcagaaaatggaagagacgcccctgctaacgggaatgctgagaatgaggaaaatggggagcaggaggctgacaatgaggtagacgaagaagaggaagaaggtggggaggaagaggaggaggaagaagaaggtgatggtgaggaagaggatggagatgaagatgaggaactgagtcacttccgggccaaccggccacttgaaatgataaggatgacaatgtcgatnccaagaaccaaaaaaccgacgaggatgactagacagcaaaaaaaggaaaagttnaacttaaaaaaaaaaaggccgccgtgacctatttacccttcactttccgtcttaaaatctaaacgtggtccccttcaataaaaanggccgnccccccncctgggcagtgccncccgcaattanaccgcttttcaccaccaaccaaaccatganaatttcaccggggnnggaaaaaaaaccaaacnttcaaggcctgt

SEQ ID NO: 3338 - DNA, 624 bp, Homo sapiens
  misc_feature 336, 410, 449, 460, 462, 463, 464, 465, 467, 468, 469, 470,471, 472, 473, 474, 475, 476, 477, 478, 479, 480, 481, 482,483, 484, 485, 488, 518, 522, 525, 548, 551, 562: n = A,T,C or G
acaccgggtggcattaaggggtgaagatgtcccccttacggagcagaccgtgtctcaggtgctgcagtcagccaaagaacagatcaagtggtcactccttcggtgaagacctcactgttcctggctcttcatcctcttcaaaaaatttgcatgtctgctgtgaattttcatctagttccccaatcgatgctctcagggtcatctcggggatcacagggatccttaaatctccattctgtttgtggttgccccctcaacctcccctacacccttcctattctttttcattcttcttgcagttctgggagtaaagctcccagcatatttagataatangggcagggggaagcaccctctttctttctagaactggattatgctcacatgctcccttgccttgacattttggnaaatcttggcccttggtgtagctcacttaaaattaagtngggagaagccnannnnannnnnnnnnnnnnnnnnnnggncttggccggaacccctaaggcaattcaacnactngcngccgtacttatggatccaacttngancaaacttgggnaatcatggcatacttgttcctggggaaatggtttccgttcaaattccccaaaaacaaaccgg

SEQ ID NO: 3339 - DNA, 618 bp, Homo sapiens
  misc_feature 519, 528: n = A,T,C or G
ggtacgcgggcgtcatagaatggaatcgaatggattcattgaatggaatcagatggaatcatcgaatggactggaatggaatcattgaatggactcgaaagggatcattattgaatggaattgaatggaatcatcgaatggtctcgattggaatcattatcaaatggaatcgaatggaatcaccgaatagaatcgaatggaacaatcatcgaatggactcaaatggaattatcctcaaatggaatcgaatggaattatcgaatgcaatcgaatggaattatcgaatgcaatcgaatagaatcatcgaatggactcgaatggaatcatcgaatggaatggaatggaacagtcaatgaactcgaatggaatcatcattgaatggaatcgaatggaatcatcgagtggaaaaggaatggaattatgatccaatggaatcgaatgtaatcatcatcaatggaatcaaaataaccctcatcaatggttttgaatggaattgcatcaatggattcaaggatctcntcaatggancgatggatctctttgatggaatgaagggcaatctttatggatccctgaatctcttcaatggaacgatggatctatcaatggattatggat

SEQ ID NO: 3340 - DNA, 627 bp, Homo sapiens
  misc_feature 416, 430, 464, 475, 476, 486, 503, 538, 542, 549, 555, 558,575, 583, 596, 604, 613, 622: n = A,T,C or G
acagatacttagaggccagctggtctttaattatgtggttccgaagcaaattccttgtatgggcatcaattggaggggttccatctttgaatacagaattcaggggagccaggagggtcaaccgctcacttccagagagatgattgccgaggccggcttgtctgaaaaggtcaatggctgtggacacatcagactctgcagccaattcaaatagcgtcttggctgagtctgggatgagtagctcatcaatgtagtggatcaccccgttggtggctaggatgtctttattggagatgatcgccttcccgttgatagtgagcatgtccccgctgcagcccacctccagtgtcgtgccctccagggtctctacagacagccccgcaccgatggcttcagcacacatagttgacttcaanatgtggttgttcancaggtttttcagggtttttgggtcgcccagaatncggttcaaagnntaactagggntcttttcaaaggcctanttggtcggggccaaaaccgggccttggccggaacncccntaaggcnaattcnacnccttggggcggtcctanggaccaantgggcccaacctngggaaaangggaatatngtcctgggnaatgg

SEQ ID NO: 3341 - DNA, 629 bp, Homo sapiens
  misc_feature 347, 457, 519, 542, 567, 572, 575, 581, 584, 588, 594, 616,628, 629: n = A,T,C or G
ggtacacttgaaaccaaatttctaaaacttgtttttcttaaaaaatagttgttgtaacattaaaccataacctaatcagtgtgttcactatgcttccacactagccagtcttctcacacttcttctggtttcaagtctcaaggcctgacagacagaagggcttggagatttttttctttacaattcagtcttcagcaacttgagagctttcttcatgttgtcaagcaacagagctgtatctgcaggttcgtaagcatagagacggtttgaatatcttccagtgatatcggctctaactgtcagagatgggtcaacaaacataatcctggggacatactggccatcangagaaaggtgtttgcagttgtttcataaaccaggttgaggaggacaaactgctctgcccatttctggattctttattttcaacaaacgctttcttttaaagcttggctgngggggccctcatccaagtgatgaataatcatcaaggggttggtgcttgcttggattatatanactttttcatatgctgaatccanaagagttgggcccccaaccttgggnaaggnctngggcanttngggncaaaanccttgggccctttgggtccggntggctggggttnn

SEQ ID NO: 3342 - DNA, 632 bp, Homo sapiens
  misc_feature 373, 416, 464, 470, 473, 490, 496, 522, 526, 532, 549, 554,560, 566, 577, 586, 598, 606, 631: n = A,T,C or G
ggtaccttatactgtcaaggttgtttaaacatgataaggttaatcgccatctacttcaagttttagaaaaggaaacaagaagctaaaaacagctgctctgactttaatatctgactatatctttgatctgtttgcaggtcatccaagtgttttctaggaatatatttattttaggttgtctgaaactactattttttagactcctgaaagttgttcacatcaatgtgaagacaaattttaaatgaaaatgaagaatgaaattatgtcttgaatcatatattaagaagtaaaaataatagtgatcaggcagaaaagaaaaatggagcatctaaaaatgtatgtgctaactatatcatccagtgtgcagtggtgngtatttttctaaacatgacaacattgatgtgccttttcagtgnaacaacaaatactggtagtgaacattggcaatttatgtcattttggtnaaaaanatnactggagtgtgcaatgnggaagnctctaaactacttgaaaatcccgcantctnttatcntaaccaaaattccttanttcgntaactnaaatgnggtggggtacntcgcctcangggccaaaaacntttaacanatcccaacttgggcctttttttttnt

SEQ ID NO: 3343 - DNA, 636 bp, Homo sapiens
  misc_feature 316, 345, 393, 400, 409, 433, 435, 437, 441, 444, 481, 486,490, 491, 500, 501, 515, 528, 534, 556, 559, 575, 578, 580,584, 586, 587, 592, 594, 596, 598, 607, 609, 614, 615, 619,621, 622, 623, 624, 625, 633, 636: n = A,T,C or G
ggtactttttttttttttttttttttgatgaaaaagagcctaaacgcttctgatttgggataaagaaaaaggagcattaaccttgactatgtctttagctccagccacctttttaagagtaaattgctgggcaggtgggggagggctagtcacggaacgaaactgtaagccggaccaggtgtgaggaggggaggtgataaaaagattacagggtggaggagtggagcctgaggaagaattgggacctaacttggcgtggaaaagaagggggagaggtcaaatgggtttgtagaaaaaggaagattagacaccctcnccaccccctgggggttggacttgaggggncagggggaggggaaaaaaggaaaatttggaacaagttgccttggcccnaaaactnagaaagggncggttgtttaaaaaaatgcctggncntnagcnccnaaaacatttgcccttttttgccaaaaatattttaggnttggngggnngggaaaatnnaaggggcctttttnggccttttaaacnttggcnaattttttttggggccaccggnttncaaaaaaaaaaggggnttngntttngnncgggngngntnaaaaggttnanttttnncccncnnnnnggggaagnggn

SEQ ID NO: 3344 - DNA, 620 bp, Homo sapiens
  misc_feature 286, 287, 288, 369, 393, 412, 417, 436, 457, 461, 479, 498,512, 513, 514, 528, 530, 540, 550, 558, 577, 578, 582, 619: n = A,T,C or G
acgcggggcagcggaggttctgtgtcccagttgttttccaatttcaccggctccgtggatgaccgtgggacctgccagtgctctgtttccctgccagacaccacctttcccgtggacagagtggaacgcttggaattcacagctcatgttctttctcagaagtttgagaaagaactttctaaagtgagggaatatgtccaattaattagtgtgtatgaaaagaaactgttaaacctaactgtccgaattgacatcatggagaaggataccatttcttacactgaannnggacttcgagctgatcaaggtagaagtgaaggagatggaaaaactggtcatacagctgaaggagagttttggtggaaactnaaaaattggtgaccaacttgaggnggaaataaaaatattactnttttngtaaagaacttgggacctnaaccaaaaccatgtccttgcnttcnccaaaaatcggggttttnaaaacaacttgaaaaatgngaggcctttaaaannnaaaaacccttgtgncnccttcttccnttcaaggacnggggccangggggggggggaaaataannaacngttgggtaacttaatgggaagggtttttttatttggnt

SEQ ID NO: 3345 - DNA, 633 bp, Homo sapiens
  misc_feature 305, 384, 387, 393, 394, 401, 406, 408, 411, 422, 451, 459,461, 479, 491, 522, 536, 537, 539, 568, 574, 595, 598, 615,629: n = A,T,C or G
ggtactgccattctcatcagaatgtggttctggcctattcttatttttcaccttattaactgatgtcctttgactttctgctgtatttttattatttattttaggtatttttacttcttttttgctggaattttctttttcagctggttcatcttcttcaattaaggaagcttttgtatacttcgccaaattaagattttgaataaatgcttccaattcaccttgctgaaagggtcatcgattgctcctttttttgcctccatctatcacttcctcattctcatccaaagtagccaacataaggnaatcttgcttggtgcctccgagcccgtaacactttctccaaggagaacccattctcgggttcactaagattaatcttantcntcctgnnccgaacntttancngcntcctcgggccnccaaggccgtttgcatggaactccaaagnctcctggntngcggccttggcggccaancatacccccggnaaactaacccgcgtccccaaacaaaccggcncctgttaagcaaanncntgatttgactcctttcaaggcaaggcctngggctnaactttttgaaaagtccaaanccncccgaattctccagtcntggattccacgganaaac

SEQ ID NO: 3346 - DNA, 631 bp, Homo sapiens
  misc_feature 467, 477, 500, 507, 518, 539, 556, 573, 576, 581, 591, 604,609, 627, 631: n = A,T,C or G
acgcggggggggatgtgggacctccaattcccagccccggcttcagctctttcccaggtgttgactccagctccagcttcagctccagctccaggtcgggctccagctccagccgcagcttaggcagcggaggttctgtgtcccagttgttttccaatttcaccggctccgtggatgaccgtgggacctgccagtgctctgtttccctgccagacaccacctttcccgtggacagagtggaacgcttggaattcacagctcatgttctttctcagaagtttgagaaagaactttccaaagtgagggaatatgtccaattaattagtgtgtatgaaaagaaactgttaaacctaactgtccgaattgacatcatggagaaagatccatttcttacactgaactggacttcgagctgatcaaggtagaaatgaaaggagatggaaaaactggtcatacagcttaaaggnaagtttggtnggaacctaaaaaattggtgaccnacttgangtggagataanaaatatgactttctggtaganaactttgaaccttaacnaaaacatgtccttgccntcnccaanaatcgggctntgaaaaccaactnaaaantgtgaggcctttaaaatnaaan

SEQ ID NO: 3347 - DNA, 641 bp, Homo sapiens
  misc_feature 433, 443, 449, 514, 516, 524, 550, 562, 566, 576, 581, 585,599, 622: n = A,T,C or G
cgaggtaccagcggtttctctgttctgtgatcaatgtgattcacaggaactccttaagtaacaaacgaaatgagccaggggcgtggaaaatatgacttctatattggtctgggattggctatgagctccagcattttcattggaggaagtttcattttgaaaaaaaagggcctccttcgacttgccaggaaaggctctatgagagcaggtcaaggtggccatgcatatcttaaggaatggttgtggtgggctggactgctgtcaatgggagctggtgaggtggccaacttcgctgcgtatgcgtttgcaccagccactctagtgactccactaggagctctcagcgtgctagtaagtgccattctttcttcatactttctcaatgaaagacttaatcttcatgggaaaaatgggtggttgctaagtattctangatctacagntatggncattcatgctcccaaggaagaagagattgagactttaaatgaaatgtctcacaagctaggtgaancnaggtttgngggctttgtaacccctgtgggcttgnggcctgatattnatcntcgggggggncctcncctngacaacaaacattntttgtacttcccgccggccgtcnaaaggcgaatccaccccct

SEQ ID NO: 3348 - DNA, 592 bp, Homo sapiens
  misc_feature 303, 304, 306, 308, 310, 311, 312, 313, 314, 315, 316, 317,318, 319, 320, 321, 322, 323, 366, 368, 372, 388, 395, 396,404, 421, 423, 442, 443, 465, 469, 504, 523, 534, 541, 562,568, 569, 583, 592: n = A,T,C or G
ggtacgcgggggctacccgggcatcagccccgaggaatgcgcctctcggaagtgccgcttctccaacttcatctttgaagtgccctggtgcttcttcccgaagtctgtggaagactgccattactaagagaggctggttccagaggatgcatctggctcaccgggtgttccgaaaccaaagaagaaacttcgccttatcagcttcatatttcatgaaatcctgggttttcttaaccatcttttcctcattttcaatggtttaacatataatttctttaaataaaacccttaaaatctgcaaannananannnnnnnnnnnnnnaaaagtacctgcccggccggccgttcgaaagggcgaattccancnactnggcggccgtacctagnggatccnncctcgganccaaccttggcgtaatntnggcaatactggtttctggnngaaaatggtattcccttccaantccncccacatccaacccggaaaccttaaagtggtaaancctggggggcctaatgagngacctacctcncattaantggggtgggcttacttgccgntttcanncgggaaacttgctnccacttgcn

SEQ ID NO: 3349 - DNA, 640 bp, Homo sapiens
  misc_feature 324, 336, 337, 340, 348, 355, 357, 358, 370, 371, 372, 373,378, 380, 383, 384, 392, 397, 405, 409, 420, 421, 442, 492,514, 517, 527, 538, 544, 546, 567, 571, 572, 581, 583, 593,596, 601, 603, 612, 618, 626, 630, 631, 634: n = A,T,C or G
acgcggggggcgctgagaacgcgggtccacgcgtgtgatcgtccgtgcgtctagcctttgcccacgcagctttcagtcatggcctccggtaacgcgcgcatcggaaagccagcccctgacttcaaggccacagcggtggttgatggcgccttcaaagaggtgaagctgtcggactacaaagggaagtacgcggggggacaaacggaagtgtaggttacggtctgagacatcaccgccaagctgggcatcggggagatggccgagactgaccccaagaccgtgcaggacctcacctcggtggtgcagaccttcttgcacaaaatncaaaataatttnnaancatttttnacccaantnntgggaaaattgnnnnatttnantannccctttgntgatntggaaaanaatntcgcggacttnntgacacaggttggggtggaanaattggaaagtgaaacaaaaatacctgccggccaaaaaaattgaaggtgnttaataattattcttggaattngcntttttccaanccaaaaaaaantcaatngnttttttcaacttacttctttntgtnnaacggtttntntttttaaagntgncttcntnttacctaantattantaggttgnggannganttcccc

SEQ ID NO: 3350 - DNA, 632 bp, Homo sapiens
  misc_feature 366, 397, 430, 460, 494, 509, 522, 537, 539, 551, 575, 581,626, 632: n = A,T,C or G
actggtccaggagttatccaggatagattttcacccaccatgggacgtcatcgttcaaatcaactcttcaatggccatgggggacacatcatgcctcccacacaatcgcagtttggagagatgggaggcaagtttatgaaaagccagggactaagccagctctaccataaccagagtcagggactcttatcccagctgcaaggacagtcgaaggatatgccacctcggttttctaagaaaggacagcttaatgcagatgagattagcctgaggcctgctcagtcgttcctaatgaataaaaatcaagtgccaaagcttcagccccagataactatgattcctcctaaggccaacaccacgcccttnaaacaccacctttgggacagaacacctaacnttggcttcaaacttaatccaccacttatccagnaaaagcctggccagaaccagcaaaaagccnccacccgtcaaaggaagaactccttaacttactngaactggtgggactngatttttaatatnggaatgcaatgaagntntccatgggttanaaaaaataagggtcttaacccttnttcttngatggtaaccaagaatatctgtccttatttaaccgttaaataaanaaaaan

SEQ ID NO: 3351 - DNA, 638 bp, Homo sapiens
  misc_feature 185, 509, 550, 554, 571: n = A,T,C or G
ggtactatagaccagtttgaatatgatggttgtgacaattgtgatgcatatctacaaatgaagggtaaccgagagatggtatatgactgcactagctcttcctttgatggaatcattgcgatgatgagtccagaggacagctgggtctccaagtggcagcgagtcagtaactttaagccaggtgnaatatgcggtgtcagtcactggtcgcctgccccaaggaatcgtgcgggagctgaaaagtcgaggagtggcctacaaatccagagacacagctataaagacctagcaagatgcaaggctgccagcatctttgctctccacctcctgcctctgcttatttcttgttctggaactaaatgaacagaacttcaaatacttcctaccctccaattcagactcagctgactgttgagagagcagcacatcattttatcattttatcttctttggactacaggtggggtgggagggatttgggttggtggataacagatggaattgagganagagtaggatcctgattttctaccccggggccaggttgggncttnccctgcccaggacttanggcaaatgtcaataatttgaacctcaaaaagtttgaaggcccgaaaaaaaaaaaaaaaaaaaagtcc

SEQ ID NO: 3352 - DNA, 628 bp, Homo sapiens
  misc_feature 482, 494, 503, 510, 532, 540, 554, 561, 565, 567, 569, 607,622, 627: n = A,T,C or G
acgcggggggggaagaggggaacatggacatgaagaggaggatccacctggagctgaggaaccggaccccggcagctgttcgagaacttgtcttggacaattgcaaatcaaatgatggaaaaattgagggcttaacagctgaatttgtgaacttagagttcctcagtttaataaatgtaggcttgatctcagtttcaaatctccccaagctgcctaaattgaaaaagcttgaactcagtgaaaatagaatctttggaggtctgaacatgttagctgaaaaacttccaaatctcacacatctaaacttaagtggaaataaactgaaagatatcagcaccttggaacctttgaaaaagttagaatgtctgaaaagcctggacctctttaactgtgagggtaccaacctgaatgactacccgagagagtgtcttcaagcttctgcccacttacctactttggatggctatgacccgagaggccangaaccctgactnaaatcccangtggatngtgtggattaaaaagaggaggnccaaaaangagaagataggaanaccaggncatnangntggggaaaaaaagagtttgttgaaaaaatgttaaaatnaaattttaaaggggntaggnc

SEQ ID NO: 3353 - DNA, 459 bp, Homo sapiens
  misc_feature 359: n = A,T,C or G
ggtactgatacaattgaaggcccttccactataaataggatggaggatgggtcactgtgtccgtattaccaatgacagtcaccccaagaaacacaagcagctgcatccaccctctttcagggggtagagccactatacttctcatgtagatcagccacattgtcactggagactcggatccagccatcctcccgcacgtggtagaggttgactgcacctcctgagtaggcatctctgtaggtggcttggtagatggctcgacgggccagatcataggcctgctccacttccaggtcataggaatagccccgatccatgaccccatatgcatacacagagccagaacctacagagaaggnggcccctgaaatcggttccttcactgtccacgtagtaaaagccagggcctttttatcccaccacagatcatggtgcccatggacagccccatgcctttgt

SEQ ID NO: 3354 - DNA, 626 bp, Homo sapiens
  misc_feature 358, 371, 462, 468, 491, 494, 502, 505, 512, 519, 536, 565,574, 577, 578, 582, 600, 617: n = A,T,C or G
actgaacttcccggagcaaagagactgtctggacgtgatcttcctccgtctcaccacaaaagccagcaatgaaatcgctgctgaggctcacacctggaatagattctctaatatggtgaactaactccacataagcttctcttgaatatcccctccgcatggcctccaacacacggctgcttccactctgggctggcaggtggatctgtttacagatgttatctctctcatgaatcagctgcagaacctcatcaggaaaatccttggggtggggagaggtaaaacggatcctcatttcaggatctactctggagacctgatccagaagatgagcaaaacgaagtcctccttgcttggntttataagttggnggtaaagccacgactgagattggtaggcactgcctgttgaactggaccttcgaattgtcccaaaactattaacattctgacccagaagtgncacttntttcacccctggtaaaaagcttnttnactttctntanaatggangcaatanggcgactcttttcttgncccgggggaaaggacaatgcaatacttcncatgtggcncanncccncttgattgaacaaaagcnactggccttggccttgntggatggga

SEQ ID NO: 3355 - DNA, 626 bp, Homo sapiens
  misc_feature 3, 5, 411, 450, 481, 483, 484, 486, 493, 499, 503, 541, 555,573, 587, 599, 601, 605, 607, 614, 622, 625: n = A,T,C or G
tcncngggggttccggcgtggccattttcgttggtggtgttcagttgtggcggttgctggtcagtaacagccaagatgctgcggaatctgctggctcttcgtcagattgggcagaggacgataagcactgcttcccgcaggcattttaaaaataaagttccggagaagcaaaaactgttccaggaggatgatgaaattccactgtatctaaagggtggggtagctgatgccctcctgtatagagccaccatgattcttacagttggtggaacagcatatgccatatatgagctggctgtggcttcatttcccaagaagcaggagtgacttcagtcatcccagcaatcgcttggttcaagtttcattcagctctctatggaccagtaatcttgataaataaccgagctcttntttggggatcaatattattgacttgtagtaactggccancaataaagcagtctttaccacgattaattananncnattattnaaagtncttnggccgcgacaccctaagggcaattccacccactgcggncgttctaatggaanccacctcggtccaaactngcgaaacatggcanacttgttcctgngngaantnttttccntccaattnccnc

SEQ ID NO: 3356 - DNA, 610 bp, Homo sapiens
  misc_feature 312, 321, 397, 416, 430, 437, 471, 507, 509, 532, 542, 545,553, 576, 599: n = A,T,C or G
actgtggagaaagtagaaatatatccgtctttgagagtggactcaaaccttttaaatctgaatgcgatcacactgtagtgatatagtagaagcagtgatgatattcagattgttttattttgattcaaatgatgaatctgttgacaccttataactcccatctccctatctatatttttgtctctaagagatcaagtaagatacatgttgttcatattcataacaacttattagagctatgtaggaacatagaggtatctgtgatcaaatgacttgtcattggcactttcagtctttcctattctagcccgntgtttttgnttgtattttttattattaatgacatatttaagtcttcagatatattattttaaaggcaccccacatgtaaaacagntattaccaatattttatcntaaatctcttggtngatttcngaataatagagaattattccagaaaaggaatctngaatttggtgcattgtaggagcaaccaggcttctantnttttaaaagactgggaaatttantataaattcntantttatcanggcaactggcgtttttaccttgntttgactgactacgggtaaatantggaaccctta

SEQ ID NO: 3357 - DNA, 610 bp, Homo sapiens; identical to SEQ ID NO: 3356
  misc_feature 312, 321, 397, 416, 430, 437, 471, 507, 509, 532, 542, 545,553, 576, 599: n = A,T,C or G

SEQ ID NO: 3358 - DNA, 634 bp, Homo sapiens
  misc_feature 505, 508, 523, 588, 608, 612, 617: n = A,T,C or G
ggtaccgcttgtttatccaaattttcctctgcaagtggagcatctgctaggatcaatagcagcagtgttaagcaggaagctacattctgttcccaaagggatggcgatgcctctttgaataaagccctatcctcaagtgctgatgatgcgtctttggttaatgcctcaatttccagctctgtgaaagctacttctccagtgaaatctactacatctatcactgatgctaaaagttgtgagggacaaaatcctgagctacttccaaaaactcctattagtcctctgaaaacgggggtatcgaaaccaattgtgaagtcaactttatcccagacagttccatccaaggggagaattaagtagagaaatttgtctgcaatctcaatctaaagacaaatctacgacaccaggaggaacaggaattaagcctttctggaacgctttggaagagcgttgtcaagaacatagcaaaaaaagtccactcgtagccaccccacaaaacccccantantacttccaatacaangccattccagaaagaatattcaagccaagaccattttatttctaccattagccaacagctcagcnggaccgtcaaaaaaacttcntggnttctnggccaattgacaaggca

SEQ ID NO: 3359 - DNA, 621 bp, Homo sapiens
  misc_feature 389, 395, 405, 411, 424, 441, 444, 464, 465, 493, 500, 531,534, 542, 550, 572, 597, 614: n = A,T,C or G
ggtaccgaccatagagcaagaatcaagattctgctaactcctgcacagccccgtcctcttcctttctgctagcctggctaaatctgctcattatttcagaggggaaacctagcaaactaagagtgataagggccctactacactggcttttttaggcttagagacagaaactttagcattggcccagtagtggcttctagctctaaatgtttgccccgccatccctttccacagtatccttcttccctcctcccctgtctctggctgtctcgagcagtctagaagaagtgcatctccagcctatgaaacaagctgggtctttggccataagaagtaaagatttgaagacagaaaggaagaaactcaggagtaagcttctagcccccttnaacttntacacccttntgcctntttcattggctgnaccccacccaaccactnaanttctggtggtttcctttggnntgggaaggttacaagaaaatcctgctanggtgagngggccctacatttccttaaaaaacatgggtnctngcccggcnggcggttnaaaggggaattccaccactggnggcggtataatggaaccactcgggnccaacttggggaaaatnggataat

SEQ ID NO: 3360 - DNA, 629 bp, Homo sapiens
  misc_feature 73, 120, 178, 262, 462, 480, 531, 538, 555, 558, 570, 576,584, 590, 592, 594, 599, 608, 615, 621, 628: n = A,T,C or G
acttttttttttttttttttttttttcaggagccaaggaagtttatttactctactgggtgacaggagggcanagtgctccagaggagacccagatacatcaaccaaggacttccctganatttggctttgctcttccaggcctgcacatgctgcgtgatgaaatgaggcctgcctanacatctgtgagggcctcgagggctgctgcctcgactttctccctagctaagtccacccgtccagggacacagccagggcactgntctgtgctgacttccactgcagccaagggtcaaaatgaagcatctgcggaggccaggactccttggcatcggacacagtcaggggaaaagccccctgactctgcaggacaaagggtctagggtcatttggcaggaaaacactggtgtgccaagggaaacgagcatgatttttggagtggactacatgcatgggctggagntcaataaactggaaaagnttcacccccaagtcttaatttaataaaattggtgaacttttgtcaatcttnattggtnaaaagagctttaaactnggngaatttttaacnaatgtntacgaacnttttcntntnaattntttttgganggggatnggcttnaaacatnt

SEQ ID NO: 3361 - DNA, 568 bp, Homo sapiens
  misc_feature 343, 411, 471, 483, 506, 514, 519, 539, 562: n = A,T,C or G
cgaggtacacaatggtttattaaaggaatgtatggcccacatcaacctagcaaggattctactggtaaaccttcccatggccaaaggaaaaacaagcaggagttgagtggctggggtggggtgcaggcaatggagagagggcagaagggtgtagaagctgaagggggctagaagcttactcctgagtttcttccttctgtcttcaaatctttacttcttatggccaaagacccagctgtttcataggctggagatgcactcttctagactgctcgagacagccagagacaggggaggagggaagaaggatactgtggaaagggatggcggggcaaacatttanagctagaagccactactgggccaatgctaaagtttctgtctctaaacctaaaaaagccagtgtagtanggcccttatcactcttagtttgctagggttcccctctgaaataatgaaccagaattaccnggctacaaaaangaaaagaccgggctttgcaaganttaaccanaatcnttgattcttgctctatggcnggaccttgcccggcggccgttcnaaaggg

SEQ ID NO: 3362 - DNA, 568 bp, Homo sapiens
  misc_feature 371, 408, 425, 458, 484, 495, 507: n = A,T,C or G
actctgtagcatgacaatttttagagctgcaggttagctattatagctcaagcttttttgtttgtttttttcttcactttcttcacatctgaggtttctttctctaatccactgaaattattgtgtgctaaatttgggaaacagatctattctaactcattaacccagttgaaatttaggtctgtcatcttaatatatcatgcagtaaaaggaagaatctttttaaagtgacccacctttcatgctgctccagcattgtcctgcttgtgctgatggtgtgattaggtgtagagaatttgcttaaatttaacttcaaagttcatcacacagcttaatgagtcacattgaaatactcagtaattgaactgcanatcacttttagttacaaaaagagctaaagcatgtcantggcatgatgcttgccnagccagaatctaagcattctagggataattaanggattttagtatgcaatttactggcntaatatcaaanggcagtaacagnggtctttctttcttcagcctatgtatcctttaagatacctgcatgaatactttgatacttt

SEQ ID NO: 3363 - DNA, 642 bp, Homo sapiens
  misc_feature 10, 448, 488, 504, 549: n = A,T,C or G
ggtacgcggngtctgcgggttcctcccttcttccgagcctctcctctggccgccgcgcgggagagaggccgagatggcagatgagattgccaaggctcaggtcgctcggcctggtggcgacacgatctttgggaagatcatccgcaaggaaataccagccaaaatcatttttgaggatgaccggtgccttgctttccatgacatttcccctcaagcaccaacacattttctggtgatacccaagaaacatatatcccagatttctgtggcagaagatgatgatgaaagtcttcttggacacttaatgattgttggcaagaaatgtgctgctgatctgggcctgaataagggttatcgaatggtggtgaatgaaggttcaaatggtgggacaagtctgtctatcacgttcatctccatgttcttggagggcggcaaatgcattggcctnctggttaaacaccgttttggggataatttctcttctttangcaatgattaaagtangcaattttcaatatgttaagtaacacacttatttttgcctgtgtnttggagaagattcaagaaataattttaaaaccccatacataataaaaaacattgtgcccgaaaaaaaaaaaaaaaaaaaaaaagacctgcccg

SEQ ID NO: 3364 - DNA, 630 bp, Homo sapiens
  misc_feature 380, 389, 394, 436, 440, 492, 547, 555, 556, 563, 575, 592,602: n = A,T,C or G
actgcggccgtgtgggtgagttggctgccggggcgtgaatactttttctcccgaaggaagattatttcaagtggaatatgccattgaggctatcaagcttggttctacagccattgggatccagacatcagagggtgtgtgcctagctgtggagaagagaattacttccccactgatggagcccagcagcattgagaaaattgtagagattgatgctcacataggttgtgccatgagtgggctaattgctgatgctaagactttaattgataaagccagagtggagacacagaaccactggttcacctacaatgagacaatgacagtggaagagtgtgacccaagctgtgtccaatctggctttgcaagtttggaagaanaaaatgcanatcangtgccatgtcttgtcctttggagtaaccattattatttggangaantgatgaagaaaaggccccactgtttatatggacccatcttgggaccttgtancttcggccgcgaacacccctaaggcgaatttcaacacacttgcgggccgtactantggatccnnctcggtnccaacctggcgnaatcatggcatacttgnttcttggggnaaatgtttccgttacaattccccaaaaa

SEQ ID NO: 3365 - DNA, 616 bp, Homo sapiens
  misc_feature 10, 53, 182, 459, 468, 482, 488, 527, 560, 582, 615: n = A,T,C or G
actttgactnactagggtgattcaaagtttcaggaaaaagaaaattcccagtntcattttcttaatcttattaaacccaaacataagaatgccaaaaaatacagagctcacattttgctggcatacatttccaaatttttaatgcctccctgacaggtgaattttaaggataaaaaaagcanacactttcaaaacattccttgtgatgaagtagaaaaagccctggataagtggccagctacactggatttttgtctcaattcttccattaactttacagtcttcagcaaatcccttaactttgagcttctatatgtagtgacatcattataaagtgctgtggtattaaaatgtgataaacatagatgaaaagcattttgaaatgtttgaaatactacataaatacacataataactaaattccacaggttaggatctgagagagctatctgaccagtnttataaaanggagcttattacanaaagcncaccttattcattacaggttatgtcttcatatcttttgngcaaggatttaataaatgagtttttaagaaaanaataggaatgacttagggacanacctgggaaactcaaagcttcctaatgttttang

SEQ ID NO: 3366 - DNA, 626 bp, Homo sapiens
  misc_feature 420, 435, 486, 489, 491, 502, 518, 540, 545, 552, 564, 582: n = A,T,C or G
accgcgggggctgactctcttttcggactcagcccgcctgcacccaggtgaaataaacagccatgttgctcacacaaagcctgtttggtggtctcttcacatggacgcacatgaaatttggtgccatgactcggatcgggggacctcccttgggagatcaatcctccgtcctcctgctctttgctccctgagaaagatccacctacgacctcaggtcctcagaccgacgagcccaagaaacatctcaccaatttcaaatctggtaagcagcctctttttactctcttctccaacttccctcactatccctcaaccactttctcctttcaatcttggcactacacttcaatctctcctttcttaatttcaattcctttcattttctggtagaagacaaaaagaagacacgttttatcccgnggacccaaaacttcngcgctggtcaacaagactgggaaaggcagcctttccttggtggttaaacantgnanggatgcctttntgattatacaccacgnttcaaggtggtaagacacgcanggacnactggcntggtcctcaccntaacacaagtccgctttntgggaagggcaagtccttggcgggaacacctaaggggaattcaa

SEQ ID NO: 3367 - DNA, 630 bp, Homo sapiens
  misc_feature 454, 499, 520, 528, 532, 591, 612, 625: n = A,T,C or G
acgcgggggaaaataaagaattacatattgatgaggatgaaaagtcaggcttttattgagatggagacaagagaagatgcaatggcaatggttgaccattgtttgaaaaaagccctttggtttcaggggagatgtgtgaaggttgacctgtctgagaaatataaaaaactggttctgaggattccaaacagaggcattgatttactgaaaaaagataaatcccgaaaaagatcttactctccagatggcaaagaatctccaagtgataagaaatccaaaactgatggttcccagaagactgagagttcaacccgaaggtaaagaacaagaagagaagtccggtgaagatggtgagaaagacacaaaggatgaccagacagagcaggaacctaatatgcttcttgaatctgaagatgagctacttgtagatgaaagaaaaaacaaccagcactgntagaaagtggcagttcaatgggagacgaaaaccgatcttgcttanttaagtgatgtgcttctgatngggaaaanggancatcaataagcttgggaaaaagatggaagtgcttcaccgcaccaaaaaaaacttaaaanggggacagatcgaggacttgncaagaaaccaacngcgtg

SEQ ID NO: 3368 - DNA, 620 bp, Homo sapiens
  misc_feature 494, 498, 535, 570, 573, 620: n = A,T,C or G
ggtactattcgtgggaagacagcatcctgactccctctctacagaatattgggagtaaaaatgatgcatccccggtggaaatattattgggggttggaagacagagacaggaaaaataagtcagaaacagacactaagagtcactggcaggctgactgcaggtatcaactctccagccgtggtagaataaaagagctaggggctgaaggggattaacacaaaagctgttaacaattaagtgatatctctggaagattcgagagacaggaggcaactcttctatagttttgacttgcccagcacatttccacatacacaaatgtgtatatgcacgtgcgtgcatgcacatacacatacacaccaatgattgctttccccggaagcccgcctataaataaagagaaatagttcccaaaaggaaagcccacatgagcagcaacatctggacctcacacttgcaagaaaccttcaccccaactgaaaactggctgggnaaangcaccaggaatcaagctcttgcaataatgcccaaaanggctgatcagaaaggacagctttcccaacccttgnttntattttttgtttcacactacctggtcctgcccggcggcgttcaaggn

SEQ ID NO: 3369 - DNA, 630 bp, Homo sapiens
  misc_feature 508, 536, 618, 622, 630: n = A,T,C or G
acgcggggtgatggccgcggggctctccagaacatcatccctgcctctactggcgctgccaaggctgtgggcaaggtcatccctgagctgaacgggaagctcactggcatggccttccgtgtccccactgccaacgtgtcagtggtggacctgacctgccgtctagaaaaacctgccaaatatgatgacatcaagaaggtggtgaagcaggcgtcggagggccccctcaagggtatcctgggctacactgagcaccaggtggtctcctctgacttcaacagcgacacccactcctccacctttgacgctggggctggcattgccctcaacgaccactttgtcaagctcatttctggtatgacaacgaatttggctacagcaacaggggtggtggacctcatggccacatggcctccaaagagtaaagaccctggaccaccaaccccagcaagagtcaagaggaagaaagagacccttaattgttggggaagtccttgccacactcatnccccaacacactgaatcttcccttcttnacagttgccatgtaaaccctttgaaaaagggaagggcctaaggagcccgacctttgtatgtacttcggccggaacaccttanggcnattcaccn

SEQ ID NO: 3370 - DNA, 625 bp, Homo sapiens
  misc_feature 446, 491, 534, 582, 590, 606: n = A,T,C or G
acccagacaaaacccggccacgtgtaagccagatgctgattttgactccatttcaaggtcaaggccatggtgctcaacttcttgaaacagttcatagatactacactgaatttcctacagttcttgatattacagcggaagatccatccaaaagctatgtgaaattacgagactttgtgcttgtgaagctttgtcaagatttgccctgtttttcccgggaaaaattaatgcaaggattcaatgaagatatggcgatagaggcacaacagaagttcaaaataaataagcaacacgctagaagggtttatgaaattcttcgactactggtaactgacatgagtgatgcccgaacaatacagaagctacagactggatattaaaagaagactaattagcccatataagaaaaagcagagagatcttgctaagatgagaaaatgtctcanaccagaaagaactgaccaaccagatgaacccaatagaaataagcntgccacatgaacagctggaagagagtttcaggactatgggaanataccggcgtggtattggacgactgctcaagaataaagatatctggtnttgacctnggccgggacccgctanggcgaattcacccctgcgg

SEQ ID NO: 3371 - DNA, 627 bp, Homo sapiens
  misc_feature 458, 543, 568, 582, 592, 602, 615: n = A,T,C or G
ggtacacttgaaaccaaatttctaaaacttgtttttcttaaaaaatagttgttgtaacattaaaccataacctaatcagtgtgttcactatgcttccacactagccagtcttctcacacttcttctggtttcaagtctcaaggcctgacagacagaagggcttggagatttttttctttacaattcagtcttcagcaacttgagagctttcttcatgttgtcaagcaacagagctgtatctgcaggttcgtaagcatagagacggtttgaatatcttccagtgatatcggctctaactgtcagagatgggtcaacaaacataatcctggggacatactggccatcaggagaaaggtgtttgtcagttgtttcataaaccagattgaggaggacaaactgctctgccaatttctggatttctttattttcagcaaacactttctttaaagcttgactgngtgggcactcatccaagtgatgaataatcatcaagggttggtgcttggcttggattatatagacctctcatatgtctgagtccanatgagttggtcacccaaccttgganagggctggggccantttgggtcanaagtccttgngtccttttggctncccccgtacctg

SEQ ID NO: 3372 - DNA, 626 bp, Homo sapiens
  misc_feature 3, 523, 550, 577, 602, 616: n = A,T,C or G
acngcggggagaagcttggaccgcatcctagccgccgactcacacaaggcaggtgggtgaggaaatccagagttgccatggagaaaattccagtgtcagcattcttgctccttgtggccctctcctacactctggccagagataccacagtcaaacctggagccaaaaaggacacaaaggactctcgacccaaactgccccagaccctctccagaggttggggtgaccaactcatctggactcagacatatgaagaagctctatataaatccaagacaagcaacaaacccttggtgattattcatcacttggatgagtgcccacacagtcaagctttaaagaaagtgtttgctgaaaataaagaaatccagaaattggcagagcagtttgtcctctcaatctggtttatgaaacaactgacaaacacctttctcctgatggccagtatgtccccaggattatgtttgttgacccatctctgacagttagagccgatatcactggaagatattcaaaccgtctntatcttacgaacctgcagatacagctntgttgcttgacacattgaaaaaagctntaagttgttgaagctgaatttaaanaaaaaaatttcaancctttttttg

SEQ ID NO: 3373 - DNA, 443 bp, Homo sapiens
  misc_feature 32: n = A,T,C or G
acttttttttttttttttttttttttattggngtcccagatttattgaaaataatacagcactacagaaaaaattcaaacaggtccccgaggcgttttgaaattcatcccaactgtaggctgagtgacctgaaggttggacagactgccgaagtccaaaagcttcagcatttccttagtgtcaggatctacttcaataatctcctgatccaaggctgagacctcaggaacataattgtctctcctttctctctcctcctcctgcagcttgatggagatacctcttactgggcctctctgaattcgcttcatcagatgcgtgacgtaacctgctatcttgttgcggagctttttgctggggataatgggcgatctcctcgcacacgcccttgttcgtgtggaagtcgttgcccaagcgcgtgtagtacctcggcgcgaccacgc

SEQ ID NO: 3374 - DNA, 637 bp, Homo sapiens
  misc_feature 358, 386, 423, 440, 456, 488, 498, 517, 520, 557, 562, 567,569, 588, 595, 602, 610, 627, 629: n = A,T,C or G
ggtacacttgaaaccaaatttctaaaacttgtttttcttaaaaaatagttgttgtaacattaaaccataacctaatcagtgtgttcactatgcttccacactagccagtcttctcacacttcttctggtttcaagtctcaaggcctgacagacagaagggcttggagattttttttctttacaattcagtcttcagcaacttgagagctttcttcatgttgtcaagcaacagagctgtatctgcaggttcgtaagcatagagacggtttgaatatcttccagtgatatcggctctaactgtcaagagatgggtcaacaaacataatcctggggacatactggccatcaggagaaaggnggtttggcaagttggttcataaaccaanaattggagggagggacaaactggtctggccaattttnggattctttatttttangcaaccactttctttnaagccttggatggggggggacctggacagtcntacaggtganaattggtcctttcaactantgnttggggaaaaaaaccagactatgcactctttaaaagntggtnaaagngnccaggccggattaatattntggactncccggcnggcggtcnaaaggcaaatcaacaantnggggcggg

SEQ ID NO: 3375 - DNA, 615 bp, Homo sapiens
  misc_feature 28, 92, 95, 158, 407, 434, 469, 520, 530, 533, 539, 547,568, 572, 581, 584: n = A,T,C or G
ggtacttttttttttttttttttttttngctgaggagtgctttatttccaactatgtggtcaactttggaagaggtgtggtgtggtgctganaanaatgtatattctgttgatttggggtggagttctgtagatgtctattaggtccgcttggtgcanagctgagttcaattcctggatatccttgttaactttctgtcttgttgatctgtctaatgttgacagtgtggtgttaaagtctcccattattattgtgtgggagtctaagtcactttgtaggtcactaaggacttgctttatgaatctgggtgctcctgtattgggtgcatatatatttaggataagttaattcttcttgttgaattgatccctttaccattatgtaatgccctctttggctcttttganctttggtgggttaaaagctgttttatnccaaactagattgcacccccggccttttttgtttncattgcttgggaaaacttccccaccctttattttgaacccatgtgtggctntgcccatganaangggttnctgaatcnagatctgatggggtctggctnttantcatttgcnagnttgagctttaatgggcctttacccattcctt

SEQ ID NO: 3376 - DNA, 639 bp, Homo sapiens
  misc_feature 548, 593, 617: n = A,T,C or G
ggtacctcttcccgtcaataaagaaataacacaaattaaagctataaaatttaagcatgggcatatgtatttccaattctccttaataagtaattccaaactggaataatgtggggtttgtgactaagtagtaacaaattaaaagaaaatagactgtctctggcagtgatttccatattagtgcaatgttacttcccatatgctgaattatatttaaatgattttatgtattttaattcagtaggtgccaatttgagtttataaaatccttaattttattctttgtgcagaaaagtttcaatttgagatactctatgaagccaaaacaaaacaaaacaaaacaaaaacctgtattttgctactagtagtatgaataccaaataaagatacaaggattcaaagtttggtggaaagttcctgaagaaaaatctctgaggtgttctacgtatcttgatacttcaattatcaattaagttttggaacattctagtttaagaatatctcagaaaataattctctgtaatataacctctgactaaacagctgcncccaagcagaaacaatctgggtcattctgaacgagatcaacttgnggcctttctttttctattataatngggaggggtgagttttaagtta

SEQ ID NO: 3377 - DNA, 553 bp, Homo sapiens
  misc_feature 403, 482, 501, 532: n = A,T,C or G
cacaatggtttattaaaggaatgtatggcccacatcaacctagcaaggattctactggtaaaccttcctatggccaaaggaaaaacaagcaggagttgagtggctggggtggggtgcaggcaatggagagagggcagaagggtgtagaagctgaaggggtctagaagcttactcctgagtttcttccttctgtcttcaaatctttacttcttatggccaaagacccagctgtttcataggctggagatgcactcttctagactgctcgagacagccagagacaggggaggagggaagaaggatactgtggaaagggatggcggggcaaacatttagagctagaagccactactgggccaatgctaaagtttctgtctctaacctaaaaaaaccagtgtagtanggcccttatcactcttagtttgctagggttccctctgaaataatgagcagatttagccaagcttaccaaaaaggaagangacggggcttgtccagganttaacagaatctttgaatcttgctctatggnccggacctcggccgcgacacg

SEQ ID NO: 3378 - DNA, 620 bp, Homo sapiens
  misc_feature 321, 386, 389, 398, 409, 419, 441, 453, 462, 496, 507, 512,547, 563, 589, 604, 616: n = A,T,C or G
actgagcaggattaccatggcaacaacacatcatcagtagggtaaaactaacctgtctcacgacggtctaatcccagctcacgttccctattagtgggtgaacaatccaacgcttggtgaattctgcttcacaatgataggaagagccgacatcgaaggatcaaaaagcgacgtcgctatgaacgcttggccgccacaagccagttatccctgtggtaacttttctgacacctcctgcttaaaacccaaaaggtcagaagggtcgtgaggccccgctttcacggtctgtattcgtactttttttttttttttttttttttnttttcgtcactacctccccgggtcgggagtgggtaatttgcgcccctgctgccttccttggatgnggnagccgtttntaagctccctnttcggaatcnaaccctgattcccgtcacccgnggtcaccatggnaggcacggngactaccattcaaagttgatagggcaaaccttcnaatgggttgtngccgncaccccgggtccttgggcgggaacacccttagggngaaattcaccactggnggccgtattatggatccaactcggancaacttggggaaaanggcatactgttnctgg

SEQ ID NO: 3379 - DNA, 630 bp, Homo sapiens
  misc_feature 500, 507, 520, 524, 537, 573, 603: n = A,T,C or G
cgcactgaaggagacaagaaagcagcaaaggttcaaaagctgtctaagaatgaagtgctcatggtgaacataggatccctgtcaacaggagggagagttagtgctgtcaaggccgatttgggtaaaattgttttgaccaatccagtgtgcacagaggtaggagaaaaaattgcccttagccgaagagttgaaaaacactggcgtttaattggttggggtcagataagaagaggagtgacaatcaagccaacagtagatgatgactgaagaataccagttaaataatacattcggatggatttggaagttggaattcctcttaacaaccaaggggtttattttcaaagcaatattggggaattgatttcacaagttcgttaccttagtaggtaacggtaagggtattctctttttttttttttgggtatgaaaacttagggctaaaattaatataaaaattggcataatgttggattgaatctcattttggcagaaagttnaacattnccacataatgtcnaaantatacatcatgcnagtctgggtttttggttgggttaatttgggtttggntttgaagctggctttgtcacccagctggantgcagtggcgtgattaaacctttgccc

SEQ ID NO: 3380 - DNA, 628 bp, Homo sapiens
  misc_feature 458, 502, 544, 569, 576, 583, 593, 596, 622, 628: n = A,T,C or G
ggtacacttgaaaccaaatttctaaaacatgtttttcttaaaaatagttgttgtaacattaaaccataacctaatcagtgtgttcactatgcttccacactagccagtcttctcacacttcttctggtttcaagtctcaaggcctgacagacagaagggcttggagattttttttctttacaattcagtcttcagcaacttgagagctttcttcatgttgtcaagcaacagagctgtatctgcaggttcgtaagcatagagacgatttgaatatcttccagtgatatcggctctaactgtcagagatgggtcaacaaacataatcctggggacatactggccatcaggagaaaggtgtttgtcagttgtttcataaaccagattgaggaggacaaactgctctgccaatttctggatttctttattttcagcaaacactttctttaaagcttgactgngtgggcactcatccaagtgatgaataatcatcaagggttggtgnttggcttggattatatagaacttcttcatatgctgagtccanatgagttggcaccccaccttggganagggctnggggcanttggggccanagnccttgggccttttggctcaggttggntggggn

SEQ ID NO: 3381 - DNA, 629 bp, Homo sapiens
  misc_feature 447, 463, 465, 495, 527, 568, 582, 602, 604, 610, 618: n = A,T,C or G
ggtaccctttggatttcaaacagtaacatcggatgtaaacaaacttagttccttttactcactgaaactaatcaagcggctctacgtagacaaatctctgaatctttctacagagttcatcagctctacgaagagaccctatgcaaaggaattggaaactgttgacttcaaagataaattggaagaaacgaaaggtcagatcaacaactcaattaaggatctcacagatggccactttgagaacattttagctgacaacagtgtgaacgaccagaccaaaatccttgtggttaatgctgcctactttgttggcaagtggatgaagaaatttcctgaatcagaaacaaaagaatgtcctttcagagtcaacaagacagacaccaaaccagtgcagatgatgaacatggaggcccgttctgtatgggaaacattgacagtatcaattgnaagatcatagagcttncntttcaaaataagcatctcaacatgttcatnctactcccaaggatgtggaggatgagtcccangcttggagaagatgaaaaacaactcacctcaaagtcactgncacaggggctaatnccaccccatggccatgccangncaactntccttccnaaattagggga

SEQ ID NO: 3382 - DNA, 636 bp, Homo sapiens
  misc_feature 2, 369, 383, 425, 439, 448, 449, 451, 453, 455, 464, 468,484, 487, 496, 513, 533, 546, 552, 578, 579, 596, 597, 602,608, 614, 615, 622, 626, 634, 636: n = A,T,C or G
tngcgggaacttacggcaagcctgtccatcatggtgttaaccagctaaagtttgctcgaagccttcagtccgtcgcagaggagcgagctggacgccactgtggggctctgagagtcctgaattcttactgggttggtgaagattccacatacaaattttttgaggttatcctcattgatccattccataaagctatcagaagaaatcctgacacccagtggatcaccaaaccagtccacaagcacagggagatgcgtgggctgacatctgcaggccgaaagagcccgtggccttggaaagggccacaagttccaccacactattggtggctctcgccgggcagcttggagaaggcgcaatactctccanctccaccgttccgntaatataagtaaagttgcaaaattcatacttaataaacaatntaggacagcccttntaaacatgnntntntntaaaaagtncttnggccggacccccttanggngaatttcancacactggggggcgttntaatggattccaacttgggnccaactttggcgnaacatnggcattactggttcctgggggaaatnntttccgctacaaattcnncaaantccaanccggannttaatgntaancctggggncn

SEQ ID NO: 3383 - DNA, 632 bp, Homo sapiens
  misc_feature 7, 378, 468, 479, 494, 500, 527, 583, 620, 632: n = A,T,C or G
ggtactncaggaggcccgtgtatttaatgaaactcccatcaaccctcggaaatgtgcccacatcctcaccaagattctttatctcataaaccagggggagcacctggggaccacggaagcgaccgaggccttctttgccatgaccaagctctttcagtccaatgatcccacactccgtcggatgtgctacttgaccatcaaggagatgtcttgcattgcagaggatgtcatcattgtcaccagcagcctaacaaaagacatgactgggaaagaagacaactaccggggcccggccgtgcgagccctctgccagatcactgatagcaccatgctgcaggctattgagcgctacatgaaacaagccattgtggacaaagngcccaagtgtctccagctctgcctcgtgtcttccttgccctgctgaaatgcaactttgacgtgggcaaacgcttggtgaatgaagctcangaggcagcatncaatgatacatcatnggccantacctgcccggcgggcgtttgaaaggngaaatccacacactggggggcggtctaatgggatccaactcggaccaacttggggnatatggcataactggttctgggggaatggtttccgtncaatccccaaan

SEQ ID NO: 3384 - DNA, 632 bp, Homo sapiens
  misc_feature 99, 148, 176, 201, 224, 229, 240, 342, 380, 391, 415, 432,457, 472, 475, 479, 511, 515, 546, 571, 576, 594, 596, 600,619, 631: n = A,T,C or G
actttttttttttttttttttttttttgggcagattttaagggttttatttaaagaaattatatgttaaaccattgaaaatgaggaaaagatggttaanaaaacccaggatttcatgaaatatgaagctgataaggcgaagtttcttntttggtttcggaacacccggtgagccanatgcatcctctggaaccagcctctnttagtaatggcagtcttccacanacttngggaagaagcnccagggcacttcaaagatgaagttggagaagcagcacttccgagaggcgcattcctcggggctgatgcccgggtagccacagtttcttcggtctgagacctncatgacgcactgatccgactcttgctttgggagggggnggaaacaccangggaccccagtgacactggaagtngaaacagcatcattggnaaaacactggtcactggggattccnaggaaaccccagttnctnctgntattggggctcacctggaacactggcaggggnttgnggaaaaaccttcaacgggccccccctgggancttgggccggaccaccttaaggggnattcnaccactgggggcgttctnangganccacttggacccaactggngaattatgggtnt

SEQ ID NO: 3385 - DNA, 640 bp, Homo sapiens
  misc_feature 366, 454, 457, 470, 518, 530, 560, 578, 599, 603, 612: n = A,T,C or G
acggggggaaacgacaggggaaaggaggtctcactgagcaccgtcccagcatccggacaccacagcggcccttcgctccacgcagaaaaccacacttctcaaaccttcactcaacacttccttccccaaagccagaagatgcacaaggaggaacatgaggtggctgtgctgggggcaccccccagcaccatccttccaaggtccaccgtgatcaacatccacagcgagacctccgtgcccgaccatgtcgtctggtccctgttcaacaccctcttcttgaactggtgctgtctgggcttcatagcattcgcctactccgtgaagtctagggacaggaagatggttggcgacgtgaccggggcccangcctatgccttcaccgccaaatgcctgaacatctgggccctgattctgggcatcctcatgaccattggattcatcctggtactgggantcngctcttggacagnctacatattatggtacaagataatacaaggaaaaacggggtacttatnacccgccatagncttggaaccttggacttcactgggcaatgnttggccttgaccctgggntggtggccctggccccttggnctgncctaaaaanagaagttttaccccacacttgtttaagg

SEQ ID NO: 3386 - DNA, 638 bp, Homo sapiens
  misc_feature 300, 394, 430, 458, 483, 489, 505, 510, 516, 533, 534, 536,584, 585, 598, 612: n = A,T,C or G
ggtacacttgaaaccaaatttctaaaacatgtttttcttaaaaatagttgttgtaacattaaaccataacctaatcagtgtgttcactatgcttccacactagccagtcttctcacacttcttctggtttcaagtctcaaggcctgacagacagaagggcttggagattttttttctttacaattcagtcttcagcaacttgagagctttcttcatgttgtcaagcaacagagctgtatctgcaggttcgtaagcatagagacgatttgaatatcttccagtgatatcggctctaactgncagagatgggtaaccagattgaggaggacaaactgctctgccaatttctggatttctttattttcaacaaacactttctttaaagcttgactgngtgggcactcatccaaagggatgaataatcatcaangggttggtgcttggcttggattatatanaacttcttcatattgtctgaagccnaatgangtggtccccccacctntgganaagggnttgggcaattggggccnnangcccttggggccttttgggtccaggttgaccgggggtttttggccccnngtacctgcccggnggccgttaaaaggncaattccaaccattgggggccgtatt

SEQ ID NO: 3387 - DNA, 641 bp, Homo sapiens
  misc_feature 333, 370, 393, 463, 467, 480, 488, 502, 509, 533, 539, 543,575, 584, 586, 601, 620, 624: n = A,T,C or G
ggtaccttctggggcatacaacatggcagcagggcctcgggaagaggggtaggaggaccgagcagcattctctgtagaggaagacaggaaaggagaccctcttggcacacatttatggagggttgtccctgaagagaagggcaggtgggagaggttccctgttacttaagagaaggcaccagtggcaaagagcacaatgaagaggatgatgataaaaacaatcacgcagataaggacaatcatcttcacgttcttccaccagaattttcgagccaccttctgcgatgtcgtcttgaaagtgctcaaatgtggcttccagatcctctgtcttgntgcggaagaagtttccaagttttccccccgggcccangatcccgctccacatttctgggncataaatattcttaacttccttccccctcactttgcaaggttccgcacaccaacattttcttccctttanttgntttcttcattgtnttaaaacnacccaggccggcantaaatgnaattccttatcggtttcttcccangggggncctnccgcgtacttgcccggcgggcgtttaaaaggngatttcacncnttggggccgtattangatccaactcggaccaacntggngaaaatggcttactgtt

SEQ ID NO: 3388 - DNA, 633 bp, Homo sapiens
  misc_feature 346, 360, 362, 365, 404, 437, 457, 483, 497, 502, 523, 544,547, 550, 597, 599, 622, 630: n = A,T,C or G
acatttacattcaagttgataacactggtggtttcatttcaatacaaattatgctagagaactgacatttcagacatggtcatatatatgctatttgaattcctttatcttgatacagatcttgattgtgaatctcttgatgatagatgtgcagctaatttgtcccgaaactcatgaagataattgtattgcttgatggtctgtattgccccggatcctcttaggtctcgcaggctgtctatggcttgctctggtgatattgtgtcagacaggtatagtaggagacaagcagctacaagacaagatctcccaagtcctccatagcagtgtattaagggttttcggnaatttttaaggcangntgnaaagctcttccattatttcacaacagctggctatgtcangagtccttcatctgcgattggatgatgatgggngataattccccattgctggnaaaaaatccaaaaggttgggactctntattttgaccagtnccctntggggcaaaaaacaaaaatgncttggataccccaccctttantcntcnggatcttttggcaattcttttacatctttaaattccaaccggaaaancncttaaccgggaaacggaacattncttcgganaaa

SEQ ID NO: 3389 - DNA, 653 bp, Homo sapiens
  misc_feature 8, 344, 425, 439, 458, 471, 487, 513, 522, 540, 570, 583,598, 605, 616, 629: n = A,T,C or G
ggtactgngataaatgaagaagaaggcataaggacaataaacatggaactccactgcaaatggattttatgcagctgaggaaagtttgggcttattagtatttgctccagcgaacccccaagttttctccattgcggacaacgtaactaccagctccttggctcagtggttcgcctccactcagaagttcccagtaggttctgtcattattgttggcacataggccctgaatacaggtgatatagggcccccatgagcgctcctccattgtgaaactacccaaatatagtatcattcattttctgggctttctccatcacactgaggaagacagaaccatttangcacagtgacattggtgaaatatgtttcattgattctcacaagaataattgacggagatatatgattgtgagtcaagaggnggcacaagttatangctcttcaagcggagatgnttggaagtacctnctgagaactgggcttnccaaataaataggttttatttttcangagtgaaangggtggacaacttccggngggtgaataatttcctttgaaaaaaaccanggccaaaacgtcnagcctgactggtaantattagncagggaggccnatgggggctcccntttccatttttgttggtttttttt

SEQ ID NO: 3390 - DNA, 643 bp, Homo sapiens
  misc_feature 297, 304, 312, 415, 430, 438, 459, 467, 470, 473, 476, 482,483, 485, 492, 502, 517, 538, 552, 564, 570, 572, 578, 584,594, 600, 605, 621, 623, 628, 630: n = A,T,C or G
acagtctataatactccaacagtctcccatctgtattcaatggcgccacccaatacagtcctttgtttggatgctggggagagtaatccctaccccaagcaccatatagataagaaaaccctctccagttgagctgaaccacagacggtttgctgatgttcaccacaccaccatgaccacagctccctggagtgggaggagggtggacgacaggggtgttttgatctttagaggcctcacactctttcagcttggtcttcagaaccacgatttctcggcgaatggcaaggacattgntttttgnctaagtgncttaagcttctctaccaaagaagaagtcatatttcttattcttccccctccaactgggcaacaattttctgagctttcacccaaacttttctttaactggatnaacaagtttttcatnttctttanttttaccttggacaagctcgnaagcccanttnagnggnagaaanngnattcctnttcctgatgncaattcggccagtanggttaaaaagttcttttcttnccccctaattaatnggcctattcccnactttngnaaagtntttttnaacttttganaaaaanatgancgggaattcaacggtncntttgncncgggaaggggggg

SEQ ID NO: 3391 - DNA, 648 bp, Homo sapiens
  misc_feature 323, 325, 388, 417, 454, 460, 534, 535, 539, 547, 553, 562,579, 583, 584, 598, 602: n = A,T,C or G
ggtacttgccccttccccagaaaagcgggacttgctgctaagggtgaaggaccaaggcagttgtccctgcgtggtctgacacccttgaaacgtgggtgtataatcagagaggcatccctgcaatgattaaacaccaagggaaggctgccttcccagtctgtgaccagcgccggagttttgggtccacggataaaacgtgtctcttttgtctctaccagaaaatgaaaggaattgaaattaagagaagggagagattgaagtgtagtgccaagattgaaaggagaaagtggttgagggatatgtgagggaaagttggagaaaanantaaaaagaggctgcttaccagatttgaaattggtgagatgtttcttgggctcgtcggtctganggaccttaagtcgtaagtggatctttctnaaggagcaaaaaagcaggaagaccggaggatttaatntccaanggaggtcccccgattccaattatggcaccaaattcatgtccgtccttgtgaaaaaaccaccaacaaggctttgnntganccacatgnttgttntttaccctnggggccaggcggcttanttcnnaaaaaaaaaaagcncccnttcttgccttgcggccgttaaaaggggaattccccacttgggggcg

SEQ ID NO: 3392 - DNA, 644 bp, Homo sapiens
  misc_feature 3, 5, 299, 326, 369, 371, 376, 384, 394, 441, 450, 476, 482,521, 529, 539, 544, 556, 568, 569, 598, 599, 601, 613, 620,634: n = A,T,C or G
tcncnttacagtgagttactattggtgatctgctacagtttttatctgaccacgaagaacaatttttccatggtagttcactttgaaaagaagcaaacatgtagtaaagactataggcaattatgacattgtaatagattgtcacaaaaatggagatcaggaccattgtaattcccacaccttgaaacaatggaagaatcctccaaactgaaactggacctaagctagcaaattgtcccagtgaacactccagaaagaacaaaggtaaaccagccaatgctaacataattgcataaggnatcaagaaggcccttcaccattgctgnaggtcagatatggaaatctccacacattttctaatcccactgngnattcnatcatagnttgaagaatnatccgattttttggaccagataccacggggctgattctattattttnaccaacatnggaaaatttctgatgaagccgacacntttttncttttcctgcacttgaagaaactcgggctttcaacttgnccatgggntaattccctngggtnggatccggctancctctttttgcnnattgggtgaacttgattggacaaggggcnntncccctgtcctcntggcaangacccgcggccttnggcgaaaccc

SEQ ID NO: 3393 - DNA, 634 bp, Homo sapiens
  misc_feature 363, 470, 472, 516, 523, 531, 551, 567, 573, 588, 594, 613,623: n = A,T,C or G
ggtacatgttttctcagaagactcaagatttcgcccacatccctttgagctcccgctagatctgccgcccggctgcatttgtcccactcttcaggacagagttagctgccctctttctttacttcatagtctttgtaagggctcggccaagcgtgggcccgtgggatggagaattccttttggggaggctggttctgcagctgaaaatgtgtggaatagggggcatagagcgtgtcccctgtctcttcaaaaccttgagtgatttcctcttgagagtaggctctgttctccacaccatagctcttcttcacgagttgaggtttacagaaagcatcctcaacaggataatccatggggtttcgntgctttgtgagcagccaaaactcgggactaacataagccaacaggaacacccaccattggcagccaaggcggagctgaagatggtgtcattcccctgcggccaaagnangaaacatgagcagggggatccagcccccaatggcatggagaggncatccgngagggaantgtggcccatgttttttcancccggaaaggaacccnaaaggngaagaggcatgaggnagggcncgccttaaaaaaagacctngggaaccgangaaaagttttt

SEQ ID NO: 3394 - DNA, 654 bp, Homo sapiens
  misc_feature 7, 395, 424, 444, 459, 469, 491, 543, 545, 555, 558, 559,560, 561, 566, 567, 568, 572, 573, 574, 575, 576, 580, 582,583, 584, 592, 613, 614, 615, 616, 617, 618, 619, 620, 621,622, 627, 628, 629, 630, 631, 633, 642, 647: n = A,T,C or G
ggtacancagcttcttaactctacacacgcacttaaatttttttaaaggaaaaacgttatgtcttattacaccatgatcctggctaatagcttttcaaaactttgagaaaaatcttaaaaaaggtttcacatgtcacctgaaacttacaaatttaacattatcaaagaaggaatgcttctacactcttacaaagaccactagaaagaaacaacaattaaaaagctaagaaactgtctcaaaggcattttttttacaatccttcctcccagtagggtaatgttattaaataatccaatccattcacaaaatgggctctctgcatctgctctggtgtcttctgccatatcactgcatatttatgcatgactgagataagaagttttcttaacattgntatttcgataacctgaaactgttctgttncctctgggcttttattcctnttctatttatccagngaagcccatngcaaataggaaagaagctcagnattcgggtcttccaacataacccccaactttctttcactggcttccccgcgnancttttttttnggnnnnggggnnngggnnnnncctntnnnggttcttntttttttttttaaaaaagggnnnnnnnnnnggccnnnnntnaaaaggganaaatnttcaaaa

SEQ ID NO: 3395 - DNA, 633 bp, Homo sapiens
  misc_feature 354, 360, 398, 456, 458, 474, 537, 542, 545, 583, 607, 609,613, 622: n = A,T,C or G
acacttgaaaccaaatttctaaaacatgtttttcttaaaaaatagttgttgtaacattaaaccataacctaatcagtgtgttcactatgcttccacactagccagtcttctcacacttcttctggtttcaagtctcaaggcctgacagacagaagggcttggagattttttttctttacaattcagtcttcagcaacttgagagctttcttcatgttgtcaagcaacagagctgtatctgcaggttcgtaagcatagagacgatttgaatatcttccagtgatatcggctctaactgtcagagatgggtcaacaaacataatcctggggacatactggccatcaggagaaaggngtttgncagttgtttcataaaccagattgaggaggacaaactgntctgccaatttctggatttctttattttcaacaaacactttctttaaagcttggctgngngggcactcattccagngatgaataatctcaaggggttggtgctggcttggattatataaagcttttcatatgtctgagnccaangangtgggccccccaaccttggaaagggcttggggcaattngggcaaaaacccttgggccttttngntccngggtgactnggggtttttgg

SEQ ID NO: 3396 - DNA, 630 bp, Homo sapiens
  misc_feature 362, 390, 415, 434, 454, 479, 501, 520, 542, 548, 550, 556,564, 574, 590, 608, 627, 630: n = A,T,C or G
ggtacatcttaggtttttcttcctttagtgtgaagaggcgtttccaccaacccacagctctgcgtcgagtttttactagattgctgcaaatttcatggaatctttgctgttgttcagtggtccatttattggagccaaaaattctaggcgctagaatgggaacaaggtagtcagccaagcacaaaaacataacaaaacaggaaacgccggacagaacagatggatctagatagtagataatcagaaacaccaaagaaaccacacccatgatggcaggtggaaaccaggctctttcccatcggaggactttatcagccatcagcatccccgcgtacttcttgccttgtagaatttcctgaggntttctttctgagtctgggtaataactgngaagaacaccggcaatggatttccngaccactcggatcttaaanagcttggaaggccgacccgnctgtcactttggcgaacccccactnggacaagttcccctttaggcgnccactgttcacaactctcnttttttttccgcgaaaattcanccttgntntggccntggtgganaaccgcaacnccgccggccgttcgangaaaaaaccccggtactncccgggggccttcaaaggnaan

SEQ ID NO: 3397 - DNA, 634 bp, Homo sapiens
  misc_feature 78, 115, 162, 178, 227, 242, 253, 261, 264, 266, 292, 306,335, 388, 412, 434, 444, 451, 454, 471, 475, 481, 500, 501,511, 522, 529, 558, 587, 589, 590, 593, 600, 603, 605, 618,623: n = A,T,C or G
acttttttttttttttttttttttttttttttttactgataaacagacatgtttaatgatagcttgctcttcacaganatgtctacagagacttttaatctataatccaggagtntataaccatgcagcacagaccaattagccaaatgcaaaataaactanattcttaccacaactntcctataaacactgcaactattctttccaaaaggaccctaatcttatgngaaaacacctactgngggggaaccanaaacctanctntntggccaaaaggaaaaaatagcaattnaggggttaattggngaaagcaggaaatgtatgccctttactgngctgctgttgctgctgttggtgctgctggtgttgctgctgttgctgctgcggnaggggctgctgctgctgctgctgntgctgcttttgggcttcttaanttggtctttnggctctnttnttcacccttccatgttnactnttaagngggttgaataaaccctttnnaactttttcntttctttgganctcccanaggggtggatttttttttcccttcggggngtttttaaaaaaccttggtggttgggggntnnaanacctccnaanancttgggcggaacncctanggggaattccc

SEQ ID NO: 3398 - DNA, 635 bp, Homo sapiens
  misc_feature 355, 363, 397, 424, 426, 439, 488, 489, 490, 491, 498, 499,503, 504, 505, 521, 535, 564, 569, 578, 579, 580, 589, 601,613, 621, 623: n = A,T,C or G
ggtacgcgggggagacagactgacgcgagcagccaaggtgttggagcagctcacagggcagacccctgtgttttccaaagctagatacactgtcagatcctttggcatccggagaaatgaaaagattgctgtccactgcacagttcgaggggccaaggcagaagaaatcttggagaagggtctaaaggtgcgggagtatgagttaagaaaaaacaacttctcagatactggaaactttggttttgggatccaggaacacatcgatctgggtatcaaatatgacccaagcattggtatctacgacctggacttctatgtggtgctgggtaggccaggtttcaacatcgcagacaanaagcgcangacaaggcttgcattggggccaaacacagaatcngcaaagaggaggccatgccgctggttncncaaaagtatgatngggatcattcttctggcaaataaattccgttctttccaaagaccatttnnnnaaaaatnntttnnntagtaccttgccggcngccgttcaaaaggngaattccacccactggcgggcgttctttnggatnccacctcgnnnccaacttgnggatcatggcanaattgttcttgnggaaatgntntccctcccaatc

SEQ ID NO: 3399 - DNA, 642 bp, Homo sapiens
  misc_feature 431, 452, 456, 457, 459, 460, 461, 462, 463, 464, 465, 466,467, 468, 469, 470, 471, 472, 473, 474, 475, 476, 477, 478,479, 490, 512, 514, 546, 552, 568, 571, 582, 594, 602, 604,627, 632, 639: n = A,T,C or G
cgaggtacgcgggcaagaccggcgaggcggagaccatcaccagccactacttgtttgcgctaggcgtttaccgcacgctctatctcttcaactggatctggcgctaccatttcgagggcttcttcgacctcatcgccattgtggcaggcctggtccagacagtcctctactgcgatttcttctacctctatatcaccaaagtcctaaaggggaagaagttgagtttgccggcatagccccggtcctctccatctctctcctcggcagcagcgggaggcagaggaaggcggcagaagatgaagagctttcccatccaggggtgacttttttaaaaacccacctcttgtgctccccatccgccttctgccgggtttcaaggggacaagtggaggatccaggtcttggggaactcaagactttgggctggttgnaagtttttgccttttagaccngaannannnnnnnnnnnnnnnnnnnnngtccccggggnaaaaaaaaaacctggcgaagtntntgatgacaaaataccaaaggctccccatcccnaagatnaaaaaatatttgcatnggngcaaaaaaaanggttgccgtggngttttaananaagttaaacctttaacccatgcntttcngaaaggntca

SEQ ID NO: 3400 - DNA, 625 bp, Homo sapiens
  misc_feature 224, 312, 368, 370, 393, 398, 417, 418, 422, 426, 429, 441,451, 457, 465, 469, 471, 472, 485, 491, 499, 500, 506, 520,521, 524, 527, 530, 541, 542, 544, 550, 557, 559, 564, 568,570, 575, 576, 577, 582, 583, 590, 593, 599, 601, 606: n = A,T,C or G
  misc_feature 608, 609, 612, 613, 614, 616, 617, 618, 620, 621, 625: n = A,T,C or G
ggtacacgtctctgtctgggcctcggccagggtgccgagggccagcatggacaccaggaccagggcgcagatcaccttgttctccatggtggccattgcctcctctctgctccaaaggcgaccccgagtcagggatccccgcgtacttttttttttttttttttttttttctacctagtgccaggtttattccctcacatgggtggttcacatacacagcacanaggcacgggcaccatgggagagggcagcactcctgccttctgaggggatcttggcctcacggtgtaagaagggagaggatggtttctnttctgccctcactagggcctagggaacccaggagcaaatcccaccacgccttcatntntaaccaaggagaaccaccttggngacgnttaattccaaccattatannaagngganaanggattggctggnccaaccattncagggngaagattnaacngnnaaggaagatacanttggtnaaggcccnngaaggnccaatgaccccttnnaanctnttncgggaaagggnntnctgggntttgggntnttaancctngnttggnnnaaggnnggaaaantgnatgggntnttttngnnttnnnannncnnaatn

SEQ ID NO: 3401 - DNA, 460 bp, Homo sapiens
  misc_feature 445, 458: n = A,T,C or G
ggtaccactgtgccctgtcttctccacccgaagtatccgtcgaatccaggctaccacctcatgggaagaggggttagagggcttgtcaagattaatgaaacctgtcctgatatagtccccaatctctctcttcagaggatttgaaccacatgcaagaggtgtatagtgtgttgtccttacattcagcttatcaaaattctttagcaaaaggggccactgagacgtgtccaacttagcaactttggattcaggtttgataagaaattcttcagcgtgttgtatttcggctacatcttcttctggcaatgacttccgctcctttttcttcttatgtttctttggcaaaataattacttccgcatccgccatgttaccctgcaccgggtgcgtgccgcccggtccaaaccgagggaacgaccgccccgtacctgccgcgcggccgttnaaagggcaaattnca

SEQ ID NO: 3402 - DNA, 631 bp, Homo sapiens
  misc_feature 410, 436, 459, 502, 506, 534, 543, 545, 566, 575, 597, 598,599, 600, 601, 602, 603, 604, 605, 606, 607, 608, 609, 610,611, 612, 613, 614, 615, 616, 621, 622, 630, 631: n = A,T,C or G
acgcggggagggcggcagcggcgaccggagcggtaggagcagcaatttatccgtgtgcagccccaaactggaaagaagatgctaattaaagtgaagacgctgaccggaaaggagattgagattgacattgaacctacagacaaggtggagcgaatcaaggagcgtgtggaggagaaagagggaatccccccacaacagcagaggctcatctacagtggcaagcagatgaatgatgagaagacagcagctgattacaagattttaggtggttcagtccttcacctggtgttggctctgagaggaggaggtggtcttaggcagtgatggaccctccattttacctctttaccctgtcgctcataatgaggcatcatatatcctctcactctctgggacaccataaccactgnccccttccctggatgcccaagaatgnatgtctactggtgggaagactgngaggatcccagaattcaatatttcttggcccaaaaggcctttnttgnttctgggtggtaagttgcaagcctgtgngcttccttntntttgactggggcctggtgggnaaaaaaaanttcctggcctcttggaaaaaannnnnnnnnnnnnnnnnnnnggaannaaaaaaann

SEQ ID NO: 3403 - DNA, 641 bp, Homo sapiens
  misc_feature 486, 514, 539, 547, 562, 572, 601, 617, 639: n = A,T,C or G
acgcgggggagccgagcggtagctggtctggcgaggttttatacacctgaaagaagagaatgtcaagacgaagtagccgtttacaagctaagcagcagccccagcccagccagacggaatccccccaagaagcccagataatccaggccaagaagaggaaaactacccaggatgtcaaaaaaagaagagaggaggtcaccaagaaacatcagtatgaaattaggaattgttggccacctgtattatctggggggatcagtccttgcattatcattgaaacacctcacaaagaaataggaacaagtgatttctccagatttacaaattacagatttaaaaatctttttattaatccttcacctttgcctgatttaagctggggatgttcaaaagaagtctggctaaacatgttaaaaaaggagagcagatatgttcatgacaaacattttgaagttctgcattctgacttggaaccacagatgaagnccatacttttagactggcttttaaaagnattgggaagtatacacactttatanggaaacantttatcttgcacaanaattttttgntgattatgttgccccaaaagggtttaatnaaatttctttaactcnttggaattacctattttctttntt

SEQ ID NO: 3404 - DNA, 625 bp, Homo sapiens
  misc_feature 241, 257, 265, 309, 337, 339, 393, 430, 432, 438, 457, 471,484, 486, 509, 512, 513, 525, 543, 545, 550, 568, 572, 576,584, 589: n = A,T,C or G
caggccactgaataacacccaaaagagcaagcagcccctgccatcggcacctgaaaataatcctgaggaggaactggcatcaaaaaaaaaaaaaaaaaaaaaaaaaaggtactttttttttttttttttttttttttggcccctaaatagcatgcgttcatgacgctggctcactttatttttggccccaggtcaggtctcccaaagggtttcccagcagtcacttcaaagtctcctgcanagtcaccatcaagcanaccttttnctcgggaggccgtgtcgccaccccaacccttgacttctggtatnaccatctcctgtcacctgggctccagtntntgccgatggcctcaacaggacatcaaagcatagctccagtttgaaggggccctnaagcttggcaggaaccacgtggacaaaagttttgtanancacaancacccttgggcagcctggngatcaaatccccanccctccgggtttntnggatgaaggacgtaaccctcttnatnnaaggggactttncccttttcaagggataananatttnttttttccaaaccccatnggcncctngggggccnacggnaatgggctggttgcaataatgtccaacatgaacata

SEQ ID NO: 3405 - DNA, 624 bp, Homo sapiens
  misc_feature 370, 514, 532, 539, 544, 553, 573: n = A,T,C or G
actttcctggaagtaaagtgaggtcaagccacaggctgctccaggacctctgatgaaaaattcctttacaatctccttctgaacatggagctcctcctgacttaatttctggggatggaaagtgatgatagccattgtgtgcccttggctattggtgcggactgtgagctcacgccagtatccaccttcatgaaatacaaggcagggctccaatggagactgtcgaaggaatacttcatagtacccgttggaatagcgggttttgcagcaattgttgcatatggattatataaactgaagagcaggggaaatactaaaatgtccattcatctgatccacatgcgtgtggcagcccaaggctttgttgtangaacaatgactggtggtatgggctattccatgtatcgggaattctgggcaaaacctaaccttagaagaagaaatgctgcttggtcttggtggaagaacttgctttaattagatgcttattattaaagtacctattattggtggnaataaactaaattggatngggttanatggnaacatggcntttgaatattggcttctttntgcagctgattgcttgggaccgaatactagggctagttactactaggcatc

SEQ ID NO: 3406 - DNA, 631 bp, Homo sapiens
  misc_feature 375, 399, 409, 438, 453, 466, 471, 542, 543, 597, 609, 614,618: n = A,T,C or G
accgccagctctctgctctccacagggctccccgccccacccggcctgataaagcgcgccgactgggctacaaggccaagcaaggttacgttatatataggattcgtgttcgccgtggtggccgaaaacgcccagttcctaagggtgcaacttacggcaagcctgtccatcatggtgttaaccagctaaagtttgctcgaagccttcagtccgttgcagaggagcgagctggacgccactgtggggctctgagagtcctgaattcttactgggttggtgaagattccacatacaaattttttgaggttatcctcattgatccattccataaaagctatcagaaaaaatctgacacccaatggatcaccaaaccantccacaagcacaaggaaattcctnggctgacatntgcaggccgaaagaaccgggggctttggnaaaggccacaagttncaccacacttttnggggnttttcgccggcaacttggaaaaaggccaatacttttcagttcaacggtaccggttatataataaagtttgnnaaaattatccttaataaacaattaggacagggaaaaaaaaaaaaaaaaaaaatncttggccggacncctangggnattccaccctggg

SEQ ID NO: 3407 - DNA, 634 bp, Homo sapiens
  misc_feature 315, 346, 369, 373, 386, 397, 414, 430, 431, 447, 453, 463,477, 479, 489, 500, 521, 528, 536, 546, 551, 559, 560, 578,581, 582, 585, 602, 604, 633, 634: n = A,T,C or G
accagtggaggaaggccttccggcggaacatggcagtgaactgctccgagatgcgcttgaagagctcctggatggctgtgctattgccaatgaaggtgactgccatcttgaggccacgaggtgggatgtcacagacggctgtcttgacattgttggggatccattccacaaagtagctgctgttcttgttctgcacgttaagcatctgctcatcgacctccttcatggacatccgaccacggaagacagcaaccacggtgaggtatcggccgtggcgggggtcacaaggcagccatcatgttcttggcatcgaanacctgctgggtgagttccggcactgtgaganctcgatactgctggcttcacggntggngagaggggcaaancccgcattaanaaatggaacatgggaangggaccatgttgactnncacttgcggagggganacattnaactggcccnggaaaccgaggcangnggggacaccnctcattggggntgaaaaaaaggggggtaaaancccccanggtggggngggcaacttnaaaangcggaacnnattttataaaaggccttntgnnaangcaaaagggttattaananttttttccaccgatggggggaaagggggnn

SEQ ID NO: 3408 - DNA, 631 bp, Homo sapiens
  misc_feature 40, 61, 64, 73, 78, 134, 141, 307, 346, 354, 359, 361, 377,407, 410, 414, 418, 421, 427, 431, 433, 449, 450, 481, 485,493, 494, 495, 511, 522, 524, 554, 556, 559, 560, 569, 570,581, 590, 595, 606, 612, 616, 630: n = A,T,C or G
ccgggcaggtactttttttttttttttttttttttttttnggatttgtctgccaacttcanaanaacttccanataanaatttctgcctgcagctccagtatcaaggatatggggcagcacagccacaacacanagctggngctcctcacacgtcctcttggcaatgtcctcgttgataatctcaagcagctcaggaggtggggcgttatcagaaaacaaatcaagggcccgggacacgatgtcggatcttgtcccgcccaccgtcataatccacaggaaactccctttctgaaatatcttgattgnaagaaatcctttaatcccggattgggaggccaaaacctnattgactngaacntncacaactgccaagttnacttttctttcggctggtcttttacttttnaancttngggnaanccactntggntntaaggttttgcaaggnncccccccaggggcattaaacttaacccttcnaacnttttattnnncaaaaaattttttatnaaaatgggggntnggaaattaaatacaatccttttacttgaantntanntttgcctgnntttcaaaaatngtttttcgnttcgnccccaaggganctttanaatnggggcaaaattaang

SEQ ID NO: 3409 - DNA, 626 bp, Homo sapiens
  misc_feature 380, 422, 475, 483, 520, 535, 545, 553, 565, 590, 592, 611,622, 623: n = A,T,C or G
acagccaacggtttcccttgggggctttgaaataacaccaccagtggtcttaaggttgaagtgtggttcagggccagtgcatattagtggacagcacttagtagctgtggaggaagatgcagagtcagaagatgaagaggaggaggatgtgaaactcttaagtatatctggaaagcggtctgcccctggaggtggtagcaaggttccacagaaaaaagtaaaacttgctgctgatgaagatgatgacgatgatgatgaagaggatgatgatgaagatgatgatgatgatgattttgatgatgaggaagctgaagaaaaagcgccagtgaagaaatctataccaagatactccagccaaaaatgcacaaaagtcaaatcanaatggaaaagactcaaaaccatcatcacacccagatcaaaanggccaagaattcttcagaaacaagaaaaaacttctaaaccccaaaggacttantcttgtanaaactttaagccaaaatccagccagtgtagaaaaagnggtttttttccaaanggaagccaantcttaatntttgaaaaatgnttccggttaatgaccaaaggttttnanattttggcagggggaagtntttaaaaaatnntaa

SEQ ID NO: 3410 - DNA, 635 bp, Homo sapiens
  misc_feature 363, 402, 489, 493, 497, 549, 562, 564, 569, 607, 618, 621,624, 633, 635: n = A,T,C or G
ggtaccataaggagacacaagaagaaaggtgacactaaggctacagtgcacagaaaacagaccaggtgtggcttcgactgtgcggacctgcccactagcctatgctacagatttgaaatgtctttcactttgacatgacacacggtttatattacacaaaatgaatgaaacgacaatggctaaaaataaatgagacagcctgcacacaaaaagatgatgactgctactttcctcccatcagaaaattactcaaaaagggagtatttaaaggaaactcaaatcaggagaacccggtaggcatcagaggttcagggcaccaaggccttagggcgggaacacttttcaacccaagccaggcttcangggcaagcccaccaacagaccccaatttccacaggggangcagatcttctatcctcaggtggccagaaaatacacttaagtgcaggattaaatataaaaagggttgattctgaatagaccaactgntaantttncttaaaaaaattttaatttggtgaataaaaacccaattagttcctgaatctnatttggaggtaanantcttnttgcaatccaaaactggacttttgatggttgatttttntgggcccaggntanccntttaggggnan

SEQ ID NO: 3411 - DNA, 647 bp, Homo sapiens
  misc_feature 6, 7, 364, 413, 447, 461, 483, 510, 534, 553, 556, 567, 572,576, 582, 589, 596, 598, 633, 639, 642: n = A,T,C or G
ggtacnncaatataagcaaatctcaaatacaacatacttgtaattagaacacaatgcaatgacttgattttagcaagaactagacacttaatttggtaaaagaaaccaaacaatgcattatattgaatactaagctaagttaccataattagtcttacaaattctcaaatttcacaactacttttgaacatctaaatttaaacctaaattttttaattaaatgcctgttcaacaaagctaattggaacaaacacatttatgtaaatttacattctagaataccagggtaaacaaggagacgttattcaaagatgaatgagaaagttctattctttttcatcatttgtgtgatcaggttgcaaangacatgcttttctctttgcttttctaaccactgctttctgcctcttcangaatctgattctctttttcagaaactttaagggncacctaaagaattnttccattcctttttggcccttnggagttgggcgcacgccaaccggggtnccttcctgcatttttatttttaanttttcttcgatgaaaactnatngtcgaataatnggccnaagngggaanaaccaancactttntngggggctcgagcagccccacttttttggaagggcntggaanctngttgg

SEQ ID NO: 3412 - DNA, 648 bp, Homo sapiens
  misc_feature 5, 420, 485, 496, 502, 519, 528, 539, 546, 549, 562, 584,593, 604, 617, 618, 627, 638: n = A,T,C or G
acgcngggggggatgtgggacctccaattcccagccccggcttcagctctttcccaggtgttgactccagctccagcttcagctccagctccaggtcgggctccagctccagccgcagcttaggcagcggaggttctgtgtcccagttgttttccaatttcaccggctccgtggatgaccgtgggacctgccagtgctctgtttccctgccagacaccacctttcccgtggacagagtggaacgcttggaattcacagctcatgttctttctcagaagtttgagaaagaactttccaaagtgagggaatatgtccaattaattaagtgtgtatgaaaagaaactggtaaacctaactgtccgaattgacatcatgggagaaggataccatttcttacactgaactggacttcgaagctgntcaagggtaaaagtgaaaggaaaatggaaaaacttgggcattacactgaaaggaaaagttttggngggaagctcanaaattngtgacccagctggaggnggagataanaaatttgactnttttggnganaaacttggaaccntaaccaaaaacatggccttgcnttcgccganaaatcgggttntgaaaaccaactnnaaaaagggngggctttaaanaaaaaacccc

SEQ ID NO: 3413 - DNA, 642 bp, Homo sapiens
  misc_feature 287, 388, 499, 505, 508, 515, 518, 559, 580, 602, 631, 639,641, 642: n = A,T,C or G
ggtactttctgcagagctacattcactgcatagcgcataaactcattgctggacctgagaacagaaaggctttcttggtggctttggatactatccctgaaaagagcagtgagaagactggacacaaatttcatggacaaaagactatcacttgtcttgttggccattttagttttggctttacccgctttttcattaagaatgtcagagagttttttgtaacacataaataaagctcagaatgtcctcaaacctattcttactgaaactacttatggagaaattgnattctattaaaacctcacaaactcccatcacaagaaaagcacagatattattttttatgccaatactggtgctctgaaaaaaatctgctgatttatccagntcaaaggtcttccaactcactcttaatcattctattaagtaatggactccaatatatcatctaaggtctttcggagaatgcctcttcttcctctttttcttcttttcctgntggaanggnatgaatnganttcttataccaggccaaccatgctggatccaccccagcaantattccagggggttttgaaanagacttatttctttgggcaganacaagcttttaatttaaagaagcaccaancaggtttngnn

SEQ ID NO: 3414 - DNA, 640 bp, Homo sapiens
  misc_feature 382, 393, 419, 426, 444, 447, 464, 467, 480, 481, 491, 521,526, 537, 541, 543, 561, 580, 589, 595, 602, 606, 614, 619,623, 628, 632, 639: n = A,T,C or G
acgcgggtttttgtccctgtctgcctgcaagcatgcaggacttgactcaggaatttgctgtccaaacaggatgctgtggaagctgcactttttttttccccagggagtgggggctggcccttactgctttataagcaccagctcaagaaggaacctacagccttttggaaaggaatctcactaggggcttgactgcgtgggtctgtagccgctttcactgtaagaaagcaagatgcattttaaaaactttaactacagttttagctccctgattgcctgtgtggcaaacagtgatatcttcagccgaaagtgaaaccagggccaaatttgagtcctctttaagacgtatgacaaggacatcacctttcaatattttaaagancttcaaaccantcaaaataaacttcaagaaccccttnttcgcancaaaatgccaagcttcanctnataaaaattaatttctnggnaaaggaaatgaanntatattttgnttaaaacctttcacataaggaaactcacanctggnttcccgccaantcananaaacaagttttgattttnccttcccgcttttcggcanggggatggnaacaanggaaaanggancccagctnaaccntganccttnatgncctttcna

SEQ ID NO: 3415 - DNA, 632 bp, Homo sapiens
  misc_feature 366, 479, 493, 517, 532, 545, 556, 573, 576, 581, 616, 632: n = A,T,C or G
ggtacaccttgaaggcgaggttaattaaatcctgttgtggagtttgagggccggaatttaatttttggagttttatttaatatcgggagcagattgggtaataaaatgtatattgagaataagacggccttttgaccttttagggtctagggctgtaaagcgtctcagggttgctgccgaacgagccatgaactgggctgggtttttatatttgatgaaaaagagcctaaacgcttctgatttgggataaagaaaaaggagcattaaccttgactatgtctttagctccagccacctttttaagagtaaattgctgggcaggtgggggagggctagtcacggaacgaaactgtaagcccggaccangtgtgaggaggggaggtgataaaaagattcagggtggaggaatggagcctgaagaagaattgggacctaacttggcctggaagaggaagggaaaaggcaaaatgggtttgtanaaaaaggaaaattnacacactcacaacccctgggggtnggacttaagggacanggtggaaggaaanaaggaaaattnggaccaattgcctggcncanaactnggaaggacggtgggtaaaaaatgctggaattaggnctaaacatttcccttn

SEQ ID NO: 3416 - DNA, 639 bp, Homo sapiens
  misc_feature 323, 333, 404, 405, 412, 414, 427, 432, 447, 452, 461, 466,491, 507, 514, 515, 532, 534, 538, 569, 577, 583, 592, 601,604, 613, 625, 627, 628, 631: n = A,T,C or G
cgaggtacttttttttttttttttttttttttttgggagttttatttaatatcgggagcagattgggtaataaaatgtatattgagaataagacggccttttgaccttttagggtctagggctgtaaagtgtctcagggttgctgccgaacgagccatgaactgggctgggtttttatatttgatgaaaaagagcctaaacgcttctgatttgggataaagaaaaaggagcattaaccttgactatgtctttagctccagccacctttttaagagtaaattgctgggcaggtgggggagggctagtcacggaacgaaactgtnagccggaccngtgtgaggaggggaggtgataaaaagattacagggtggaggagtggaacctgaggaaaaaattgggacctnncttggcntngaaaggaaggganagggnaaatgggttttgttnaaaangaagatttnacccnctcaccacccctggggtttggactnaaggggaccaggtggnaggaaannaagaaaatttgggaccnanttcnctgggcccaaaacttgggaagggaccggtgntaaaaaantgcctngaattaggncctaaaccnttnccctttttnacaaatttttangnnttnagatggaa

SEQ ID NO: 3417 - DNA, 493 bp, Homo sapiens
  misc_feature 363, 404, 484: n = A,T,C or G
ggtacacttgaaaccaaatttctaaaacatgtttttcttaaaaaatagttgttgtaacattaaaccataacctaatcagtgtgttcactatgcttccacactagccagtcttctcacacttcttctggtttcaagtctcaaggcctgacagacagaagggcttggagattttttttctttacaattcagtcttcagcaacttgagtgctttcttcatgttgtcaagcaacagagctgtatctgcaggttcgtaagcatagagacgatttgaatatcttccagtgatatcggctctaactgtcagagatgggtcaacaaacataatcctggggacatactggccatcaggagaaaggtggttgncaagttggttcataaacccagattgagggaggacaaactgntctgccatttctggattctttattttcagcaaacctttctttaaagcttgactgggtggccccgcgtcctggccggcggncggtcgaaa

SEQ ID NO: 3418 - DNA, 643 bp, Homo sapiens
  misc_feature 32, 36, 40, 70, 76, 80, 97, 109, 111, 131, 173, 201, 206,279, 297, 350, 365, 419, 446, 448, 449, 457, 463, 479, 490,531, 537, 562, 578, 598, 609: n = A,T,C or G
ggtacgcgggactcaaaagcttggaccgcatnctanccgncgactcacacaaggcagagttgccatgganaaaatnccantgtcagcattcttgctncttgtggccctntnctacactctggccagagatnccacagtcaaacctggagccaaaaaggacacaaaggactctngacccaaactgccccagaccctctccanaggtnggggtgaccaactcatctggactcagacatatgaagaagctctatataaatccaagacaagcaacaaaccctngatgattattcatcactnggatgagtgcccacacagtcaagctttaaagaaagtgtttgctgaaaataaanaaatccagaaattgncagagcagtttgcctcctcaatctgggttatgaaacaactgacaaacacctttntcctgatgggcaatatgtccccaggantnngtttggtncccatntctgcaggtagagccnattcctggaanatattaaaccgttttatgcttaccaacctggagatcagctntgttgnttggcaacatgaagaaagctttcangtgctgaagaaatgantgtaaaaaaaaaaactcaanccctttttctngaaggcttgaaacttgaacccaaaaaagtgaaaa

SEQ ID NO: 3419 - DNA, 631 bp, Homo sapiens
  misc_feature 440, 450, 455, 462, 479, 528, 558, 616, 618, 620, 630: n = A,T,C or G
acctaatgaccgccccacctggcatatactggctggcctcttctctgtcacaggggtcttagtcgtgaccacatggctgttgtcaggtcgtgctgcggttgtcccattggggacttggcggcgactgtccctgtgctggtttgcagtgtgtgggttcattcacctggtgatcgagggctggttcgttctctactacgaagacctgcttggagaccaagccttcttatctcaactctggaaagagtatgccaagggagacagccgatacatcctgggtgacaacttcacagtgtgcatggaaaccatcacagcttgcctgtggggaccactcaacctgtgggtggtgatcgcctttcttcgcagcatcccttcgcttcattctacagcttgtggtctctgtgggccagatctatggggatgtgctctacttcctgacagancaccgcgacngattncaacacngagagctgggccacctntctacttctgggtttaccttgcttatgaatgccctgtggctggtgctgnctggagtccttggcttgatcttggaaacancttattatcccaaacacctggatgcaaggccccaaagccaaaaccaaaaaaactgggngngnggacagcttna

SEQ ID NO: 3420 - DNA, 646 bp, Homo sapiens
  misc_feature 402, 432, 470, 483, 485, 494, 496, 500, 519, 535, 536, 548,561, 579, 615, 618: n = A,T,C or G
acgcgggggctgactctcttttcggactcagcccgcctgcacccaggtgaaataaacagccatgttgctcacacaaagcctgtttggtggtctcttcacatggacgcacatgaaatttggtgccatgactcggatcgggggacctcccttgggagatcaatcctccgtcctcctgctctttgctccctgagaaagatccacctacgacctcaggtcctcagaccgacgagcccaagaaacatctcaccaatttcaaatctggtaagcagcctctttttactctcttctccaacttccctcactatccctcaaccactttctcctttcaatcttggcactacacttcaatctctcccttctcttaatttcaattcctttcattttctggtagagacaaaaganacacgttttatccgtggacccaaaacttcngcgctggtcacagactgggaaagcagccttcccttggnggttaatcattgnanggatgcctntntgantatacacccacgtttcaangggggtaaaacacgcnnggacaactggcntggtccttcaccntacaacaagtccgctttnttgggaaagggcaagaccttgggcgggacaccttanggngaattcaccatgggggcggtataatgga

SEQ ID NO: 3421 - DNA, 672 bp, Homo sapiens
  misc_feature 7, 9, 10, 19, 20, 56, 104, 133, 148, 163, 172, 202, 257,259, 281, 292, 293, 308, 323, 326, 327, 339, 348, 354, 382,392, 401, 402, 405, 432, 443, 447, 465, 468, 488, 491, 501,512, 521, 526, 527, 532, 536, 547, 548, 564, 567, 579: n = A,T,C or G
  misc_feature 600, 606, 610, 627, 645, 649, 654, 666: n = A,T,C or G
gcgtggncnnggccgacgnncactctataatactccaacagtctcccatctgtatncaatggcgccacccaatacagacctttgtttggatgctggggagagtnatccctaccccaagcaccatatacataanaaaaccctctccagntgagctgaaccacanacggtttgntgatgttcaccacaccaccatgaccacagntccctggagtgggaggagggtggacgacaggggtgttttgatctttataggcctnanactctttcagcttggtcttcanagccacgattnntcggcgaatggcaangacattgtttttggntanngtgtcaagcttntctaccaanagagtnatatttattatcttcaccttcagctggncaacaatttntgagctggnnccnaaactctccttgagctgtatgaccagnttttccatctncttnacttttaccttgaacagntanaaggtcaattcaagggaaanaanggtattcctnttcatggaggncaatccggnaaacnnggttnagangggtttttcannccccctcaatgaatgnacntctttccctacnttagaaagtttttcttgaacntttganaaanaaatgaactttgaattncaaccggcgctttgtcanaggnaaggnggtttggcaggnaacaaa

SEQ ID NO: 3422 - DNA, 645 bp, Homo sapiens
  misc_feature 503, 520, 525, 529, 539, 555, 581, 586, 607, 613, 615, 634: n = A,T,C or G
ggtacgcggggactcggtcccgacatgatggcgagcatgcgagtggtgaaggagctggaggatcttcagaagaagcctcccccatacctgcggaacctgtccagcgatgatgccaatgtcctggtgtggcacgctctcctcctacccgaccaacctccctaccacctgaaagccttcaacctgcgcatcagcttcccgccggagtatccgttcaagcctcccatgatcaaattcacaaccaagatctaccaccccaacgtggacgagaacggacagatttgcctgcccatcatcagcagtgagaactggaagccttgcaccaagacttgccaagtcctggaggccctcaatgtgctggtgaatagaccgaatatcagggagcccctgcggatggacctcgctgacctgctgacacagaatcggagctgttcaaaaagaatgccgaaaaagttcatccttcgattcggagtggacccggcccttctaactcatgttctgacctntgtgcctggatcctcgnatacngacnggcacacctnatggctgaggccaaanccctggggccattcccattatttttnccttnttaggtggtagcattaatttngtgttntntgggggaaggaaaggactntaatgttgttt

SEQ ID NO: 3423 - DNA, 651 bp, Homo sapiens
  misc_feature 514, 518, 528, 556, 580, 592, 606, 627, 641: n = A,T,C or G
ggtacgcgggggccagagataccacagtcaaacctggagccaaaaaggacacaaaggactctcgacccaaactgccccagaccctctccagaggttggggtgaccaactcatctggactcagacatatgaagaagctctatataaatccaagacaagcaacaaacccttgatgattattcatcacttggatgagtgcccacacagtcaagctttaaagaaagtgtttgctgaaaataaagaaatccagaaattggcagagcagtttgtcctcctcaatctggtttatgaaacaactgacaaacacctttctcctgatggccagtatgtccccaggattatgtttgttgacccatctctgacagttagagccgatatcactggaagatattcaaaccgtctctatgcttacgaacctgcagatacagctctgttgcttgacaacatgaagaaagctctcaagttgctgaagactgaattgtaagaaaaaaaatcttccagcccttctgtctgcangccntgagacttgnaaccagaaaaatgtgagaagactggctngtgtggaagcatatgacacctggntaggtatgggtnatggtccacaactntttttaagaaaacaagtttanaaattgggttaagngacctgcccg

SEQ ID NO: 3424 - DNA, 647 bp, Homo sapiens
  misc_feature 33, 186, 458, 463, 476, 492, 495, 509, 522, 526, 547, 555,583, 589, 595, 598, 627, 637, 640: n = A,T,C or G
cgaggtacttttttttttttttttttttttttnggggttaccaaacagctatttttattatagcatctacagtgtctggaaaaggatgtaacaataaataactgtagacgcatcacgagacatccatttacttaatcacagaagtggatcttgctacatagttttctcaatgtcttcattcttcanattctccaggcttacgaatgtcatcaatcttcaaaatcattctaaccatttgtgttgcaagagatatctgttgctttttgccaatcaaggtttctatgacatgctgttgcttcatatcatttgtccccttgtgcaaacagtcgatgccaagagcagggttcatctccttcacctgtctggctcggacttcggtcatagtctggatgggattcatgccactgttttcaaaaagggccatggggatgaccttcaatgcgtcggcaaacgctctnatggnatactggtctaanggggggccttatcccnctnttggctactggcanggcacaagatatntaanagcccctctcatacccacacnatattgcnggtgaggttcggatgacacccaaacatngggaanggacgntcnccccccaaagaaaactatttccccctaanaaaaaggtcnccntggggtt

SEQ ID NO: 3425 - DNA, 643 bp, Homo sapiens
  misc_feature 431, 440, 454, 473, 479, 489, 494, 524, 543, 550: n = A,T,C or G
acgcggggggaaactgtggcgtgatggccgcggggctctccagaacatcatccctgcctctactggcgctgccaaggctgtgggcaaggtcatccctgagctgaacgggaagctcactggcatggccttccgtgtccccactgccaacgtgtcagtggtggacctgacctgccgtctagaaaaacctgccaaatatgatgacatcaagaaggtggtgaagcaggcgtcggagggccccctcaagggcatcctgggctacactgagcaccaggtggtctcctctgacttcaacagcgacacccactcctccacctttgacgctggtgctggcattgccctcaacgaccactttgtcaagctcatttctggtatgacaacgaatttggctacagcaacagggtggtggacctcatggcccacatggcctcaangagtaaaanccctggaccaccanccccaccagaacccaagangaaganagagaccctnacttntggggagtcctgccacactcaatcccccancacactgaatctccctctnacagtgncatgtaaacccttgaaaaagggagggcctaaggagcccaccttgtatttactttggcggaacacctaaggggaattcacaaatggggggcgtt

SEQ ID NO: 3426 - DNA, 636 bp, Homo sapiens
  misc_feature 443, 457, 460, 462, 466, 480, 497, 500, 507, 510, 539, 543,548, 563, 582, 605, 611, 622, 626, 629: n = A,T,C or G
ggtacttttttttttttttttttttttttttgggagttttatttaatatcgggagcagattgggtaataaaatgtatattgagaataagacggccttttgaccttttagggtctagggctgtaaagcgtctcagggttgctgccgaacgagccatgaactgggctgggtttttatatttgatgaaaaagagcctaaacgcttctgatttgggataaagaaaaaggagcattaaccttgactatgtctttagctccagccacctttttaagagtaaattgctgggcaggtgggggagggctagtcacggaacgaaactgtaagccggaccaggtgtgaggaggggaggtgataaaaagattacagggtggaggagtggagcctgaggaaaaattgggacctaacttggcgtggaaaggaggggaaaggtcaaatgggtttgtanaaaaggaagattanacncnctcngcaacccctggggntgggactgaagggacangtnggaaggnaanaaggaaaatttggaccaattgcctgggcncaanacttngaaggacggattgtnaaaaatgccggaattaggnccttaaacatttgcctttttganaaaatnttaggttttgngatnganaaatcaa

SEQ ID NO: 3427 - DNA, 650 bp, Homo sapiens
  misc_feature 9, 32, 106, 109, 184, 340, 350, 373, 389, 410, 412, 501,507, 512, 518, 535, 552, 559, 564, 592, 599, 620, 621, 636,650: n = A,T,C or G
acagctacngcttcatcaaccttagaacggantgactctggagactcgagcatatgaagaagttctgaattatcaatctccagcaacatgccagtgattttaccancangagtagggtgcatggcttaaataagaggaaacagccgttcacccaacatttgcttttgctcttgaggaggggcanatgtcaacatggaagcagtcaaaggttcctgaccttgtacgggacccaggggcagcagcagtccaggtgccacaggcagccctgggacataagaagctgggagcaaggaaagggtcttagtcactgcctcccgaagttgcttgaaagcactcgganaattgtgcangtgtatttatctatgaccaatangaagagcaaccaagtnctatgagtgaaagggagccananaactgattggagggccctatcttgtgagtggggcatctgttggactttcacctggtcatatactcttcagctggtaaaatgtgcaaacncttggngacancatgancttgctgttgtacctcngccgcgaccacccttanggcgaanttcancccctggcggccgtctaatggatccganctcggancaacctggcggatcattggcnnacttgtttctgtttnaattgtatccctcn

SEQ ID NO: 3428 - DNA, 651 bp, Homo sapiens
  misc_feature 507, 524, 534, 547, 558, 594, 598, 605, 611, 616, 622, 638,643: n = A,T,C or G
ggtacgcgggagtcaccgtcaaggtgtattttgacctacgaattggagatgaagatgtaggccgggtgatctttggtctcttcggaaagactgttccaaaaacagtggataattttgtggccttagctacaggagagaaaggatttggctacaaaaacagcaaattccatcgtgtaatcaaggacttcatgatccagggcggagacttcaccaggggagatggcacaggaggaaggagcatctacggtgagcgcttccccgatgagaacttcaaactgaagcactacgggcctggctgggtgagcatggccaacgcaggcaaagacaccaacggctcccagttcttcatcacgacagtcaagacagcctggctagatggcaagcatgtggtgtttggcaaagttctagaaggcattgaagtggtgccgaaaggtggaaaacaccaagacagacagcccggataaacccctgaaggatgtgatcatcgcaaactgcggcaagatcgangtggagaaacccttttncatcgcccangagtagggcacanggacatctttntttagtgaccgtctttcaggcctttaatccccccanggtnttacttnactggncccgngcttgnatttggtggggccggnccctnccttcatt

SEQ ID NO: 3429 - DNA, 643 bp, Homo sapiens
  misc_feature 8, 492, 499, 502, 504, 511, 527, 541, 554, 604, 608, 612,614, 616, 618, 628, 639, 641, 643: n = A,T,C or G
ggtacagnctgtcctcccacccaggaacaccctctgcctaatgacaggaccttcctgggaagcatcttgacagcagtggcagatgaagagccagaatcaactcctgtgcccttgcttggaagtgacaagagtgctttcacccgagtagcatcaatggtttcccttcagcccgcagagaccccaggcatggaggagggcctggcagaaatgagtattatgactactgagcttcagagtctttgttccctgctacaagagtctaaagaagaagccatcaggactctgcagcgaaaaatttgtgagctgcaagctaggctgcaggcccaggaagaacagcatcaggaagtccagaaggcaaaagaagcagacatagagaagctgaaccaggccttgtgcttgcgctacaagaatgaaaaggagctccaggaagtgatcagcagcagaatgagaagatcctagaacagatagaccagagtggcgagctcataaccntagagangangngaccacntaccgctcactttggngtgcggagacaganaccaaatgttcangaaggcctggcaggcactggctcaactgcagctatggccccaatggatcngganaagngngntntttaggaggngggcaacttgnantn

SEQ ID NO: 3430 - DNA, 628 bp, Homo sapiens
  misc_feature 286, 355, 458, 462, 495, 503, 528, 567, 576, 582, 594, 600: n = A,T,C or G
tgaaggttctgggagctctggagttttttccttcttttctggagcaggggaaggactccggctcttggttctgtgacggggagatcgagaatgactgcgctttctctctctcctgacaggggaagatcgtcttctaggggaaggagatctggatttgcgtcttcttgggctacgagaccgctcccttttttctctgctgctttctttttcttccttatctcttttatctttgtcttcatcttgctttttcatagatgccagtttttcttgttcaatctgtctttgntttatttcttctttcttcagttctaggaaagcagaaagggattcccgcgatgttttcttgtgcacttancaacagggaccacagttctcccataaattctcgagcattttttccattcaaaaatcagtcagggtgatttgcatcattttggagtctggattcttcactttcnactnggtgaatataaactcaatcccacatcatcttcnaacccaangaatttccgtactctttttggtatncaaggctttataacctccaaattactttgctcatgtccnccttttttntaggcntttggaaaattnaactgntttccccgtacctggcccggcgggcgtt

SEQ ID NO: 3431 - DNA, 621 bp, Homo sapiens
  misc_feature 520, 547, 552, 573, 590, 609, 619: n = A,T,C or G
accccttaaccccttctccttcacccttagcagcaagtcccacttttctagggggcaagaaaccccaaaccccttccctccgtgtctttacgctctcttttctctgggtttgcttccttcactatgggcaaccttccatcctccattcctccttctcccttagcctgtgtgctcaagaacttaaaacctcttcaactcacacctgacctaaaacctaaatgcctcattttcttctgcaacaccgcttggccccaatacaaacttgacaatggctctaaatggccagaaaatggcactttcgatttctccatcctacaagacctaaataatttttgtcaaaaaatgggcaaatggtctgaggtgcctgatgtccaggcattcttttacacatccgcccttcctagtctctgtgcccagtgcaactcgtccaaatctttcttctttcctccacctgtccctcagtcccaacccaggcggtgctgagtgggctaatcttcctttctacaaaccattgactttncctctttcacccaagctaggtccaatnttctnaggctcactctcacctggatntttatacttcctcttanaccgggcgggtaaagttgntccgggatancc

SEQ ID NO: 3432 - DNA, 658 bp, Homo sapiens
  misc_feature 409, 433, 535, 551, 558, 564, 588, 610, 634, 642, 655: n = A,T,C or G
cgaggtacaggacacatttggagatcttttatcgtatcccctgaactagctgcagttttgtctccagcaagttcagtttctgccggtcaacatagcgagaaaagagggacactaggtttgtaggtatagagattggcttggccagggctgcttggggaatccgcagaagttctcgtgttgccatgaacatcacctccgtccactgattattttgtgttgattctgtagcagggtctgaactctgtaggtcttcaccacggctcaggaggatgaggagcagtgacaggccaaacttgttctggagcacagcagtgaggtgaggattggaaagtgctggtgtagctgcactttgaggtaagttcattaactgtcgcaaaaggctggtgatactcactgatggaagatgatngagaaggagaaagaagggactcantaagcatggcaacacctcatcttgtgcattcttcttgataaggaaaaggaggtcctggctggtgcattaaaatgtcaactgcttgctttttggagaagaaangaaaaaaaccggccancattctntttccnttttggatccccatgaactggacnttttttttttttttttttttcnaccatgtggaccaagcttggcttnaactttgncctggaacccccnctc

SEQ ID NO: 3433 - DNA, 638 bp, Homo sapiens
  misc_feature 325, 340, 403, 475, 491, 497, 500, 514, 521, 530, 540, 548,555, 558, 569, 574, 580, 614, 621, 630: n = A,T,C or G
acacgagaagctccgaggatggctgaagtccaacgtctctgatgcggtggctcagagcacccgtatcatttatggaggctctgtgactggggcaacctgcaaggagctggccagccagcctgatgtggatggcttccttgtgggtggtgcttccctcaagcccgaattcgtggacatcatcaatgccaaacaatgagccccatccatcttccctacccttcctgccaagccagggactaagcagcccaaaagcccagtaactgccctttccctgcatatgcttctgatggtgtcatctgctccttctgtggcctcatcaaactgnatcttcctttactgnttatatcttcaccctgtaatggttgggaccaaggccaatcccttcttcacttactataatggntggaactaaacgtcaccaaagtggcttcttctttgcttaaaaaatgaaagctggtgggaattgcttctgggntcctaggcctaatganggcaanaanaaaaaaccattctnttccttnttacaccgngaggccaaantcccttanaaaggangantgctacctttncatgnggccgnccttttgcttgttttgaacccccattgaaggaanaaccggnctaggcttnggttggtt

SEQ ID NO: 3434 - DNA, 651 bp, Homo sapiens
  misc_feature 412, 466, 472, 506, 539, 541, 544, 549, 584, 588, 593, 608,648, 651: n = A,T,C or G
ggtacgcggggagcagccctgacaagagagttcctggagcccaagctcttctccacagaggacaagcaggcagcagagaccatggggtccccttcagcctgtccatacagagtgtgcattccctggcaggggctcctgctcacagcctcgcttttaaccttctggaacctgccaaacagtgcccagaccaatattgatgtcgtgccgttcaatgtcgcagaagggaaggaggtccttctagtagtccataatgagtcccagaatctttatggctacaactggtaccttccgaaatacttcctctaggtggcagcaccaagaatatttctggaagcatgtgatgagttgtgtgatgaagatagagcccattgtgctgtctctccaggacacgttgtgtggcgttgaagagcanaaagcaatgaagtccttcttccacgtgggtcttgtaaacagcatcttccttcangttctnagatgactgtgaaaaggccctttcaaggatgctngagaagtcttttgacccaattcccacgggttgnanctnttganggctggacaatgataaccttgggttggccttcaantganggcanttgcggtgttgattntggaaaaggggcataaaacacccattggttttttttatcnaan

SEQ ID NO: 3435 - DNA, 301 bp, Homo sapiens
ggtacacttgaaaccaaatttctaaaacttgtttttcttaaaaaatagttgttgtaacattaaaccataacctaatcagtgtgttcactatgcttccacactagccagtcttctcacacttcttctggtttcaagtctcaaggcctgacagacagaagggcttggagattttttttctttacaattcagtcttcggcaacttgagagctttcttcatgttgtcaagcaacagagctgtatctgcaggttcgtaagcatagagacggtttgaatatcttcagtgatatcggctctcccgcgt

SEQ ID NO: 3436 - DNA, 633 bp, Homo sapiens
  misc_feature 488, 507, 515, 552, 571, 599, 600, 601, 602, 607, 608, 609,610, 611, 612, 613, 614, 615, 616, 617, 633: n = A,T,C or G
acgcgggactcagaagcttggaccgcatcctagccgccgactcacacaaggcaggtgggtgaggaaatccagagttgccatggagaaaattccagtgtcagcattcttgctccttgtggccctctcctacactctggccagagataccacagtcaaacctggagccaaaaaggacacaaaggactctcgacccaaactgccccagaccctctccagaggttggggtgaccaactcatctggactcagacatatgaagaagctctatataaatccaagacaagcaacaaacccttgatgattattcatcacttggatgagtgcccacacagtcaagctttaaagaaagtgtttgctgaaaataaagaaatccagaaattggcagagcagtttgtcctcctcaatctggtttatgaaacaactgacaaacacctttcttctgatggccagtatgtccccaggattatgtttgttgcccatctctgacagntagagcccgatatactggnagatattnaatcgtcttctatgcttacgaaccttgcaatcagctntgttgcttgacacttgaanaaagctctaagtgctgaagatgattgtnnnnaaaannnnnnnnnnnaaaagtcctggccggn

SEQ ID NO: 3437 - DNA, 473 bp, Homo sapiens
acgcgggggctaaatctgctcattatttcagaggggaaacctagcaaactaagagtgataagggccctactacactggcttttttaggcttagagacagaaactttagcattggcccagtagtggcttctagctctaaatgtttgccccgccatccctttccacagtatccttcttccctcctcccctgtctctggctgtctcgagcagtctagaagagtgcatctccagcctatgaaacagctgggtctttggccataagaagtaaagatttgaagacagaaggaagaaactcaggagtaagcttctagcccccttcagcttctacacccttctgcctctctccattgcctgcaccccaccccagccactcaactcctgcttgtttttcctttggccatgggaagggttaccagtagaatccttgctaggttgatgtgggccatacattcctttaataaaccattgtgtacc

SEQ ID NO: 3438 - DNA, 656 bp, Homo sapiens
  misc_feature 371, 424, 438, 441, 486, 502, 510, 531, 541, 543, 561, 570,580, 597, 604, 616, 619, 649, 654: n = A,T,C or G
acctggcctatttttaaactagtgtaatcaccctagtcataccattcagtatgtttgctttttaaaataagtaaccacaattaagttgttgtagcccttgcacttcaagagatctagtctttactttcagttgtctgttaggtccattctgtttactagacggatgttaataaaaactatgcgagcctgaatgaattctcagccaaatttaagtcttgtctctcatcttgattggattaattccaaattctaaaatgattcaagtccacaatagctctaggggatgaaaaatttgccttactttgcccaagttcctaaaactggtgaagttggcaaatcctaaactgtaaagctcttcaagggagcaaganggcgcattttcttcggtggcatgtaatttttctaaaggtggttggcaacactntggaccttcggccngancacccttaaggcgaatttcaacacacttgccggccgtactaagtngaatccaacctcgganccaacctnggggaatcattggcataactngtttcttggngnaaatggtattccgttacnattcccacnacattccaanccggaacattaaatgtnaaacctngggggcctaagnggnggcctacctacaattaatgggtggctcctngcccntt

SEQ ID NO: 3439 - DNA, 638 bp, Homo sapiens
  misc_feature 409, 421, 428, 439, 448, 462, 468, 473, 503, 518, 533, 599,614, 622, 626, 628, 635: n = A,T,C or G
accgaccatagagcaagaatcaagattctgctaactcctgcacagccccgtcctcttcctttctgctagcctggctaaatctgctcattatttcagaggggaaacctagcaaactaagagtgataagggccctactacactggcttttttaggcttagagacagaaactttagcattggcccagtagtggcttctagctctaaatgtttgccccgccatccctttccacagtatccttcttccctcctcccctgtctctggctgtctcgagcagtctaaaagagtgcatctccagcctatgaaacagctgggtctttggccataagaaagtaaagatttgaagacagaaggaaaaaactcaggagtaaagcttctaacccccttcaacttctacacccttctgcctttnttcattggctgnaccccancccaaccactnaacttctgnttggtttttctttngccatnggaanggttaccagtaaaatcctgctaggtgatgngggccatacatttcnttaataaaccattgngaccttgggccggacccccttaaggcgaaattcaccactggcggcggtctaatggatccagctcgnaccaacttggggaanaatggcanactngntcctggngaa

SEQ ID NO: 3440 - DNA, 639 bp, Homo sapiens
  misc_feature 459, 467, 512, 552, 567, 573: n = A,T,C or G
ggtacgcgggggcgcgctgttgggagttgcttggaggttggcggcgcggggctgaaggctagcaaaccgagcgatcatgtcgcacaaacaaatttactattcggacaaatacgacgacgaggagtttgagtatcgacatgtcatgctgcccaaggacatagccaagctggtccctaaaacccatctgatgtctgaatctgaacggaggaatcttggcgttcagcagagtcagggatgggtccattatatgatccatgaaccagaacctcacatcttgctgttccggcgcccactacccaagaaaccaaagaaatgaagctggcaagctacttttcaacctcaagctttacacagctgtccttacttcctaacatctttctgataacattattatggtgccttcttggttctcactttgatatttaaaaaaaggtcaatacactggtttgaatggtgctngtaactgntttgcttcttgagtagaaccaccaccaccttacccacccagatantgctttgtgaaccacagcctaacttaatgggacccaaaanccccaattgcttttntttcanaacccctggcaaatggaggaacatttaatttgaggcctggttgtcaagggatatttaacttcttgt

SEQ ID NO: 3441 - DNA, 335 bp, Homo sapiens
  misc_feature 9, 19, 100, 285, 332: n = A,T,C or G
actgtgcanactcatgtanaaaaccagtctgctaattgcttgaaaagttgcaatgagcaaatagaagaaagtgagaagcatactgcaaattatgatacanaggaaagagtaggatcttcatcttctgagtcttgtgctcaagatcttcctgtgctagttggtgaggaaggggaagttaaaaaactcgagaatacaggtatagaggctaatgttttgtgtttggaaagtgagatttctgaaaatattcttgaaaaaggaggtgatccattggaaaagcaagaccanatatctggactttcacaatcagaggtaaagacagatgtatgtacctnggc

SEQ ID NO: 3442 - DNA, 640 bp, Homo sapiens
  misc_feature 385, 445, 480, 514, 522, 531, 540, 554, 574, 610, 616, 636,638: n = A,T,C or G
ggtacgcggggagaagcttggaccgcatcctagccgccgactcacacaaggcaggtgggtgaggaaatccagagttgccatggagaaaattccagtgtcagcattcttgctccttgtggccctctcctacactctggccagagataccacagtcaaacctggagccaaaaaggacacaaaggactctcgacccaaactgccccagaccctctccagaggttggggtgaccaactcatctggactcagacatatgaagaagctctatataaatccaagacaagcaacaaacccttgatgattattcatcacttggatgagtgcccacacagtcaagctttaaagaaagtgtttgctgaaaataaagaaatccagaaattggcagancagtttgtcctcctcaatctgggttatgaaacaactgacaaacacctttcttctgatggncagtatgtcccaggattatgtttggtgcccatctntgacaggtagagccgatatcactggaagatattnaatcgttnttgcttacnaaccttganatcaacttttgtgnttgacacatgaaaaaagctntcaagttgttgaaaactgaattgtaaaaaaaaaatntccaancctttttttttaggccttgnantt

SEQ ID NO: 3443 - DNA, 635 bp, Homo sapiens
  misc_feature 467, 474, 510, 537, 563, 574, 596, 624: n = A,T,C or G
ggtacgcggggactcagaagcttggaccgcatcctagccgccgactcacacaaggcagagttgccatggagaaaattccagtgtcagcattcttgctccttgtggccctctcctacactctggccagagataccacagtcaaacctggagccaaaaaggacacaaaggactctcgacccaaactgccccagaccctctccagaggttggggtgaccaactcatctggactcagacatatgaagaagctctatataaatccaagacaagcaacaaacccttgatgattattcatcacttggatgagtgcccacacagtcaagctttaaagaaagtgtttgctgaaaataaagaaatccagaaattggcagagcagtttgtcctcctcaatctggtttatgaaacaactgacaaacacctttcttctgatggccagtatgtccccaagattatgtttggtgcccatctntgacagntagagccgatatcactggaagatattcaaaccgttntatgcttaccaacctgcagatcagctntgtgcttgacacatgaaaaagctttnagttctgaaantgaatggaaaaaaaaatttcanccttttgttgtaggcttggaattgaacnaaaaaagggga

SEQ ID NO: 3444 - DNA, 628 bp, Homo sapiens
  misc_feature 329, 400, 402, 418, 425, 453, 459, 463, 482, 494, 499, 510,528, 549, 555, 558, 564, 582, 586, 595, 605, 610, 614: n = A,T,C or G
acacatccagatgactggttcctgccttaactgatgacattccaccacaaaagaaatgaaaatggcctgttcctgccttaactgatgacattatcttctgaaattccttctcctggctcatcctgactcaaaagctcccctactgagcatcttgtgacctccactcctgcccgccagagaacaacccccctttgactgtaattttcctttacctacccaaatcttataaaaaggccccacccctatctcccttcactgactctcttttcggactcagcccgcctgcacccaggtgaaataaacagccatgttgctcacacaaagcctgnttggtggtctcttcacatggacgcacatgaaaattggtgccatgactccgatcgggggacctccttggganancaatcttcgcctctgntctttgnttcctgaaaaagatcactaccaccttangtcctnaaancgacaaccccagaaacatnttacccatttcnaattnggaaacagccntttttacttttttttcanttccttactttccttaacacnttttcnttnaatttnggctacacttcaactttncctntttaaattnaatccttcanttctngganaaaaaaaaaaaacg

SEQ ID NO: 3445 - DNA, 636 bp, Homo sapiens
  misc_feature 325, 352, 429, 517, 529, 550, 558, 588, 592, 604, 619, 626,636: n = A,T,C or G
ccgggcaggtacagcctcttctgtttcatgaatgagcatgctgaagggctatttactctcctatgaaaaaatgttgttacagtaaatgacaagtgttatgaacacaatgaacctggtgtgttagatgttaagtgtgctgccaccccatgtgaacctccgagtgaaactgctcacataactgtttttttgctgcatgcaaacctgctaatacaaagcgggctcctgacttaaggacagccaatccctactctagacaatgacccaaccagacctagtataaaaaggtagtctggcccagttaaattccttggcaattggagactancagcaggagctgaaggtcatcatgtanaaaagaacctcaaagggtgcaagttaaagttattacaaaggaacaaaaactgtaagtatgcaaaaagctgtgtaaanaaattggtgaatagaaagaatggagttacaatgcaaaaagaaacaagtcacatcctgcagacccaaccttaacatcacccttccctgnttgaggacaccnccaatttctacttttcttagnttggaagngattcttaatgggaaatggggtggtgaggnggtnctgattcctgcnctttcttgaaatatncccatgnttgactactn

SEQ ID NO: 3446 - DNA, 645 bp, Homo sapiens
  misc_feature 481, 484, 495, 497, 501, 545, 548, 561, 597, 623: n = A,T,C or G
ggtacgcgggggctgactctcttttcggactcagcccgcctgcacccaggtgaaataaacagccatgttgctcacacaaagcctgtttggtggtctcttcacatggacgcacatgaaatttggtgccatgactcggatcgggggacctcccttgggagatcaatcctccgtcctcctgctctttgctccctgagaaagatccacctacgacctcaggtcctcagaccgacgagcccaagaaacatctcaccaatttcaaatctggtaagcagcctctttttactctcttctccaacttcctcactatccctcaaccactttctcctttcaatcttggcactacacttcaatctctcccttctcttaatttcaattcctttcattttctggtagaaacaaaaaaaacacgttttatccgtggacccaaaacttcggcgctggtcacagactgggaaagcagccttccttggtggttaatcantgnaaggatgcctntntgantatcccccacgtttcaaaggtgtcaaaacacgcaaggaccactngcntggtccttcaccntacaacaagtccgcttttttggggaagggcaagtcnttttttttttttttttttttttttcnattcaaattttttaaaaaaaaa

SEQ ID NO: 3447 - DNA, 667 bp, Homo sapiens
  misc_feature 347, 416, 477, 493, 528, 552, 580, 591, 613, 641, 644, 653: n = A,T,C or G
ggtacgcgggggccccaggctacagagccatccactccctcggggccggagagtggccctacaccagccagcgctgagcagaatgagtagctaggtaggggcaggtgggtgatctctaagctgcaaaaactgtgctgtccttgtgaggtcactgcctggacctggtgccctggctgccttcctgtgcccagaaaggaaggggctattgcctcctcccagccacgttccctttcctcctctccctcctgtggattctcccatcagccatctggttctcctcttaaggccagttgaagatggtcccttacagcttccaagttaggttagtgatgtgaaatgctcctgtncctggccctacctccttcctgtcccacccctgcataaggcaggtgttggttttcttcccaattcttttncaagtaaggtttgtttaccctacttcccaaatcctgaaccaaaagtggggtgcttatactnccaaacctttgagtgntcaaccttccctgtggttttaagctcttgggctgngcctaatggcacctgggctgggangacactgccccgctaggttttataatgnctactaagtcnaactccacctggaataatgggnttttttgactggtaacaatttaagcttnggngggggaggnttatgggaaaactt

SEQ ID NO: 3448 - DNA, 652 bp, Homo sapiens
  misc_feature 12, 77, 275, 401, 416, 418, 454, 456, 461, 491, 504, 507,514, 518, 522, 535, 537, 550, 562, 569, 581, 607, 626, 630,651: n = A,T,C or G
cgaggtactttnttttttttttttttttttttttggagtttgctaaatgccctgtttattctgcaaacaaggcttanaaatgtatagacacaatttgtaggctgagaaatctctgtgtagttgtgacttccatacttccgcaaaagtagtaaggacagcgacttctgaacacattaacctaccactgttttgtttagagcgaacacagtgagaatggattcctaacggcctgtttctctaagtgatcgtcgcagttcgctgctctagtctttaanaacaagtggagccttcacttgagccgccacctccttgccattcagggcttcaacaattgcaagcgtaaactcgaagctggtcccaggcccccggcttgtaaaaatcaagcccgctttttccacacnattctcaaaagaggngnaatgacctcattcccaatttgtctttacaaaaaggngngtggnactttctttcaaacctttttatgacccacnaaaccataggacngcncaaaggnggtnttangccctccggtttncnggtcctcaaattncttacagaacanactaaanaatttggccccnataccctggggaacccccacaatggnccctttttgatttaagggnatangaaaagaccatacggtcctgnc

SEQ ID NO: 3449 - DNA, 655 bp, Homo sapiens
  misc_feature 268, 304, 380, 400, 405, 416, 418, 420, 434, 443, 465, 470,472, 473, 475, 499, 506, 508, 550, 562, 570, 588, 603, 612,633, 647, 654: n = A,T,C or G
cgaggtacttgccccttccccagaaaagcgggacttgctgctaagggtgaaggaccaaagcagttgtccctgcgtggtctgacacccttgaaacgtgggtgtataatcagagaggcatccctgcaatgattaaacaccaagggaaggctgccttcccagtctgtgaccagcgccggagttttgggtccacggataaaacgtgtctcttttgtctctaccagaaaatgaaaggaattgaaattaagagaagggagagattgaagtgtantgccaagattgaaaggagaaagtggttgagggatantgagggaaagttggaaaaaaaaataaaaaaaagctgcttaccacatttgaaaatggtgagatgtttcttgggctcntccgtctgaggaccttaagncgtangtggatctttntnanggagccaaaaacangaaggccgnggattgatcttcccaaggaggnccccnanncnaggattggcccaaattttttgcgncctttgnanaaacccccacaaggttttgggacacaaggtggtttttaaccngggcaggggctnatccaaanaaataacccccgtacttnccgggggcgtttaangggattcanccctgggcgtttttggtcacntggccactgggaanatggttnt

SEQ ID NO: 3450 - DNA, 655 bp, Homo sapiens
  misc_feature 452, 477, 506, 511, 546, 550, 600, 612, 620, 628, 632, 635,646: n = A,T,C or G
acgcgggggctgactctcttttcagactcagcccacttgcacccaagtgaattaacagccttgttgctcacacaaagcctgtttaggtggtcttctatacggacatgcttgacacttggtgccaaaatctgggccagggggactccttcgtgagaccggccccctgtcctggccctcattccgtgaagagatccacctgcgacctcgggtcctcagaccagcccaaggaacatctcaccaatttcaaatcggatctcctcggcttagtggctgaagactgatgctgcccgatcgcctcagaagccccttggaccatcacagatgccgagcttcgggtaactcttacggtggaggattcccagccatatgaagacaccctagctggacgatcaagtccttgtcaaaagtctgacccctcaaactctacagcctcaatggaccagaccctaccngtcatttatagacaccaactgccgnccatctgcaggacctttcattggggtcancattncagaataaagcatgccatcagacagcacttgactntctnttctctggagcccaagataggcgagagcgttaaacaacactaaaccttantttggaggccancaaggatnttcttcanaatnttnaaggatccacngttcaaagg

SEQ ID NO: 3451 - DNA, 670 bp, Homo sapiens
  misc_feature 488, 498, 513, 528, 574, 584, 603, 607, 621, 650, 660, 666,669: n = A,T,C or G
accccttaaccccttctccttcacccttagcagcaagtcccacttttctagggggcaagaaaccccaaaccacttccctccgtgtctttacgctctcttttctctgggtttcttccttcactaggggcaaccttccatcctccattcctccttctcccttagcctgtgtgctcaagaacttaaaacctcttcaactcacacctgacctaaaacctaaatgcctcattttcttctgcaacaccgcttggccccaatacaaacttgacaatggctctaaatggccagaaaatggcactttcgatttctccatcctacaagacctaaataatttttgtcaaaaaatgggcaaatggtctgaggtgcctgatgtccaggcattcttttacacatccgtcccctcctagtctctgtgcccagtgcaactcgtcccaaatcttccttctttcctccacctgtccctcagtcccaacccaggcgtgctgagtggnctaatcttcntttctacaaaccatntgacctttccctctntcacgccaagctaggtccaattcttctaggctcactcctcacctgnaatttttatnacttccctcttacactggncggntaaagttcgttcgngatagccctccccactgccagaattaatnttaaaggggntgggtnaana

SEQ ID NO: 3452 - DNA, 683 bp, Homo sapiens
  misc_feature 477, 481, 506, 510, 535, 614, 622, 627, 642, 647, 653, 671,681: n = A,T,C or G
ggtacacaatggtttattaaaggaatgtatggcccacatcaacctagcaaggattctactggtaaaccttcccatggccaaaggaaaaacaagcaggagttgagtggctggggtggggtgcaggcaatggagagagggcagaagggtgtagaagctgaagggggctagaagcttactcctgagtttcttccttctgtcttcaaatctttacttcttatggccaaagacccagctgtttcataggctggagatgcactcttctagactgctcgagacagccagagacaggggaggagggaagaaggatactgtggaaagggatggcggggcaaacatttagagctagaagccactactgggccaatgctaaagtttctgtctctaagcctaaaaaagccagtgtagtagggcccttatcactcttagtttgctaggtttcccctctgaaataatgagcagatttaaccaggctagcanaaangaagaggaccgggcttgtgcagganttancaaaatcttgatcttgctctatggncggacttttttttttttttttttttttggagatctaaatcttctggcgggaaaaataactggttcaaaaaaagaaaggntgtctggntattntaaaaaagacattgnttttntacctnccggcggccctcaaaggngaatccaccntg

SEQ ID NO: 3453 - DNA, 690 bp, Homo sapiens
  misc_feature 534, 559, 594, 638, 654, 659, 662: n = A,T,C or G
ggtactgagacctattggagcttgtggccagcatcccatctgcaccgttggtcaggtcactgtcacgtatggctccagagccttggggaccagacttctggccattttaaggtcttcggcagagcagctccccgactccagcccgcaagccatgcccatccgcttcagcacttctatgtcatcgtggatttcaaatgtgttgtcaaaattaaacagatactcaaatttgtcattggagatgctgcagtcgatgaccgtcttcttgctggtgttgacgatgatgaagggcaggtggatgactgagttgggtggcggtggccggctggtctgctgctccgcatgccggtttctctgcaccaggttcttgaaggcaatttgctgtagaataagttcttgaagttgagactgtttctgttttattctttcaagtctcctctgtctttccacctctaagttctgacattcctgagccgagttggtgggcagaccaatccacttgatctccttcttctccttggagatgatgttcatggncattaacacgtttaaggcatcgtanacgccccgcttatgtttttggcataaactgactcnttgggtaagatgtggttgcggcacactgaactccgaaccacttngttgccctttgttgangaagnggncctttctttgaccttttgaaacttatgg

SEQ ID NO: 3454 - DNA, 233 bp, Homo sapiens
acatggcctttctggaatacatggcagatcgggaatacctgccaactcctctgacaaggacagggttgcggctgcaatggggcttccccttcttgggctttttagctttgaggttaccctttttcaccttgccaccagcatcaaccttcttggcttcgggtttcttctctttagtatctggcttctcaactttttcacccgccatcttgcaagatgggaaagacccgcgtacc

SEQ ID NO: 3455 - DNA, 684 bp, Homo sapiens
  misc_feature 538, 562, 573, 590, 595, 621, 630, 640, 641, 647, 656, 678,681, 683: n = A,T,C or G
ggtacacggagctggtttgaaagaccttctttgtcctgtagtaaccttctttcagaattcttgagcttttccaatacattctttacctctgagagttccttattaggttctataactccctctgactgaccaaggaattctcctttatgatgtcccagagacttaacctttgtatttttgttggggatatcatgagttatagcagctttgggaactaatattcttacagctttaacttccattgctttttcagtgagcattttccctagctgaagaactcctgggctctctgatggaactgctttcttccatggactctgaagactatgatgctttctagattggactccggaggtaacttcaacagatttaggtggttcctcagtttccattccatctcctgctcctcggattggggatgaagtaacggtgactttggtttctaaattttagtaagcattttttcaccttaaccactgaaaatgcactccaagacttctgctgaacaacctctaaaatcttattctccgtatttcanggggctcacttgataggctctttngatcggtttancaggttaacttttacanacctnttccttttggaagccgaccgcccccncgtctgccnggcggcggtnnaaaggngaattcacncactgggggccgtctaatgganccncnt

SEQ ID NO: 3456 - DNA, 665 bp, Homo sapiens
  misc_feature 12, 105, 417, 436, 453, 462, 473, 476, 494, 516, 532, 555,569, 572, 611, 637, 640, 650, 660, 665: n = A,T,C or G
cgaggtactttnttttttttttttttttttttttggatatcttgtcattcttggcactgtttctaaagaaaaactccattatcccaagcaaaaagcacagaaggnggagtttggcttcaagagatgttaactcaaaatcttaggcctagcagagaatcaccaaatttatggagagttaacaggggtttaacaggaaggaagtgcctttagtaagttctcaagccagaggctggaggcagcagctaaatcagaggacagcatcctcagtgaaagtgagccattcggggtggcatgtcactccaggaataaacacaacttaaaaacaaatgatttcgtaggatagcacagtgacatggtgcactgtgaacctgaggccactgtgtcaaactgtgcactggttgtgaatagggagagccnaaaattatgtcctactggnaatgagctttcaatggntcgatcctntcacactgaanctntgtagaacacttaaaccncaccactccaacattgcccttnttgggggactttctgngcaccccaggaagggctgggaancccttaggctgtcnccnccttgaagcccaaatgcgggatgggcttactggttggcnctaactcccctaaagcccaattttgnaanagtacaaccnaaataatgcnttttn

SEQ ID NO: 3457 - DNA, 688 bp, Homo sapiens
  misc_feature 504, 575, 587, 595, 607, 627, 684, 688: n = A,T,C or G
cgaggtacgcgggggccaaacttgaccgcgcgttctgctgtaacgagcgggctcggaggtcctcccgctgctgtcatggttggttcgctaaactgcatcgtcgctgtgtcccagaacatgggcatcggcaagaacggggacctgccctggccaccgctcaggaatgaattcagatatttccagagaatgaccacaacctcttcagtagaaggtaaacagaatctggtgattatgggtaagaagacctggttctccattcctgagaagaatcgacctttaaagggtagaattaatttagttctcagcagagaactcaaggaacctccacaaggagctcattttctttccagaagtctagatgacgccttaaaacttactgaacaaccagaattagcaaataaagtagacatggtctggatagttggtggcagttctgtttataaggagccatgaatcacccagccatcttaaactatttgtgacaaggatcatccaagacttttnaagtgacacgtttttttcagaaattgatttggagaaatataaacttctgcccaaatacccaggtgttcttnttatgtccagangagaaagnattaatacctgncccggcggccgtccaaaggngaattccacacctgggggccgttctaatggatccactcggaccaacttggtatatgnctan

SEQ ID NO: 3458 - DNA, 658 bp, Homo sapiens
  misc_feature 483, 494, 509, 522, 543, 551, 552, 597, 600, 624, 632, 645: n = A,T,C or G
accacaaagcagacaacaaaaatgtctctttaaaaaatgaacaaattcaaatgtataaggaaatttcagctcattttttcttcatttcctaggggaacgcaattgttttcatgctaaagatggcgcttccttgaactaggggacacgtcaggcatggaccaccacgtggagagggaggctaacagcatctgcccacatcccagccgcctgtgacagaatcttccatacacatggctcccagatgagcaccaaagggagaccacagcagatacgattctgtggacttgagaaccaaatctatacaaatattttcaactctaagtccccaagagaacattaacatttttgtctatgaaataatttttccagcaatgaatttttttgatattcacgagctgggagggaacaaagcataccttgaagacatatgtatttggcatcaaatgtcacataaacacaccacagctgggaacacacatgctntgtatgtcccntgtgacaccaccccngcccatgtgaagngctccaatactctcaaacggnggaatggnnaagacttcttaaaaataaaaataccgtccttggcgggacacctanggngattcaccctggggcgtctatggnccactggncaactggggaaanggaaatgtcctgg

SEQ ID NO: 3459 - DNA, 669 bp, Homo sapiens
  misc_feature 348, 362, 392, 400, 434, 437, 447, 454, 467, 471, 497, 499,511, 524, 544, 547, 553, 573, 586, 598, 610, 620, 624, 627,633, 638: n = A,T,C or G
ggtacaagaacatcagcttcactgtgtgggacgtgggtggccaggacaagatccggcccctgtggcgccactacttccagaacacacaaggcctgatcttcgtggtggacagcaatgacagagagcgtgtgaacgaggcccgtgaggagctcatgaggatgctggccgaggacgagctccgggatgctgtcctcctggtgttcgccaacaagcaggacctccccaacgccatgaatgcggccgagatcacagacaagctggggctgcactcactacgccacaggaactggtacttttttttttttttttttttttttcgccaaaattcctttatgtaaagtaaccctntcaacagtgctaanaaagaaagtattgacattttcattttgcanatgaaaancatggattttgggacgtcaggtctatgggccatncangtcaaaactnttttganctcccctgcaacngggncttcaaggaccatgaccttgggggangngggaaccaagtntgattaactcctntgacaagtgcacacaatggnggntcaatntgggttggaattgaccccanaggaaatccaggncccaataagggnttgccccggggnaaaggggttnaaanacncctccngggtntttttggggggggggttcactgtggacccaa

SEQ ID NO: 3460 - DNA, 660 bp, Homo sapiens
  misc_feature 273, 303, 385, 414, 416, 425, 466, 483, 503, 513, 518, 531,546, 554, 562, 577, 594, 598, 601, 605, 606, 616, 619, 628,634, 653, 654, 660: n = A,T,C or G
acacgaaggtgctgctcaggaggacggccagggcgaagatccaggagtcattctggttgtcacccttctctacatctcccagaccctcggtgtccagcagaactaggatgtggcctggcttcttggggtggggcacacaccacatccagattcctttagtgtgagactgcaccgtggagcccagagagaagccctttttctttccagccagcttgttcatcaggtaggatttgcctgtgcggtagaggcccacaattgccaccaccaccatangctgtgtaatggcagaaaggatcttcaaancttctggattcgccatcagtcgcccattagtgttctcaatgaagcacattgggcctgtcatgtggatctctgatgccatgtncaagctggtccctggctggtctttttctncntaattcacnacactggcttttacactttttgtcccgcgtccccaaacttnaaaaaatggataattcntggtggacacttgcttgganaatgttactntcttnaaaaacctgtccnaaagcaaaaatcctnggcttaanttatgcantttaaacccttttgnaaataacccataacacntttnaangctnnatgctaaagnggnacccttganggatangccaaatgccccttccttnntgcttn

SEQ ID NO: 3461 - DNA, 387 bp, Homo sapiens
  misc_feature 355, 358, 360, 369, 370, 375, 376, 377: n = A,T,C or G
acagtggccccccgtgaaaggcagaattgtggttttcctggtgtcacgccctcccagtgtgcaaataagggctgctgtttcgacgacaccgttcgtggggtcccctggtgcttctatcctaataccatcgacgtccctccagaagaggagtgtgaattttagacacttctgcagggatctgcctgcatcctgacgcggtgccgtccccagcacggtgattagtcccagagctcggctgccacctccaccggacacctcagacacgcttctgcagctgtgcctcggctcacaacacagattgactgctctgactttgactactcaaaattggcctaaaaattaaaagagatcgatnccnanaaaaaaaannaaaannnaaaaagtacc

SEQ ID NO: 3462 - DNA, 663 bp, Homo sapiens
  misc_feature 495, 517, 549, 593, 595, 600, 602, 606, 635, 646: n = A,T,C or G
ggtacgcggggggccttggacgcgcatgcgccgcatgcttttttttccggtaggtcgccagctgaggcggtttgtaagttttgggtcgcagtatgctagaattttgaggctcccttctgatgaaaattgagctgtccatgcagccatggaacccgggttacagcagtgagggggccacggctcaagaaacttacacatgtccaaaaatgattgagatggagcaggcggaggcccagcttgctgagttagacctgctagccagtatgttccctggtgagaatgagctcatagtgaatgaccagctggctgtagcagaactgaaagattgtattgaaaagaagacaatggaggggcgatcttcaaaagtctactttactatcaatatgaacctggatgtatctgacgaaaaaatggcgatgttttctctggcctgtattcttcctttaaatacccgcagtctgcctgaaattactgcagatcagtattattgagtanatccagcaactcactgaaccanattgactgctttctgcaaaacattgtatgganatgttgtttctgaatgccccaaaatgggtaaaaaaaccctttgntntttananaaanctttttttaccccccaggaagcaatccancagttgacttntttacaaaattggttta

SEQ ID NO: 3463 - DNA, 657 bp, Homo sapiens
  misc_feature 40, 429, 443, 464, 519, 521, 525, 545, 558, 583, 597, 606,614, 621, 655, 656: n = A,T,C or G
ggtactttttttttttttttttttttttttttttataggntttttttattagaaaagaaattaagtgttgtcactagagattgaaggaaattaacaatcttacaattctagaacaggcaaacttcatgataagggattcttaagttttcaaagtgtaggagctctttcacagatacactcttggtgtagggggctgtaagttttatcagatgttttacatttcatgctttaatctttgctggtagtctaaataaaataaatacacagtgttcaggattatctggatagccatcttaaataacagagtgttccgcatgaccacagcctctgccttgtgcctctgatccatatgacaccaagaccaactatgcttttcatatgaattctccaattgggcctgggacccttccaagaaatggtgaacatttnctatgaaaactggnggtactgcaaactccatctgntttaacccgcgtcagcagtcccacttgtgcaaaaaaataaaccttgattccgctntncatnttaccgataaaactcaggcnccgtcttgtcccngacttgtgcaaaaatctggaactcntaggggggtggggntgggaatcnacaatccnaaacctnttgatggcaatgacgaggactttggccccctcannc

SEQ ID NO: 3464 - DNA, 697 bp, Homo sapiens
  misc_feature 388, 440, 446, 450, 471, 506, 509, 519, 533, 558, 566, 573,582, 594, 603, 618, 630, 632, 635, 640, 644, 659, 678, 691: n = A,T,C or G
acgcgggcagagagaggccatcaccctgcaatggcaggaaaatcagagtgttgcggcagaagtcggaccatggtgcctacagccaaagcccagccataaaaaaacagctggacagacatcttccttccccacctacgctggacagtataatcacagagtatcttagagaacaacatgctcgctgcaagaatccagttgccacctgcccacctttctccctctttactcctcaccaatgtcctgagccaaaacagaggcggcaagcgccaataaactttacgtcaaggctaaaccgcagggcatcatttccaaagtatggaggggtggatggcggatgctttgataggcaccttatctttagcagattccgtcctatttcaatgttccnggaagccaatgaagatgaaaagtggcttcacctgctgtgcattctcagcacnggagcnggtnctgatgcttggcacctgccanggcaactgaagcttttaatgtgtttagtgggacangangaggccactntaactgtacaactnaaccttacacattttgaaccttcanggatgggncttgtgntgacattgntattggagccanctttgctgnctttgggaagaatcnttttgattgaanantcnttcanaaanccttttgagtaaaancctccggacggtattggcnaaggaaatgcccntttaat

SEQ ID NO: 3465 - DNA, 677 bp, Homo sapiens
  misc_feature 406, 454, 471, 475, 548, 593, 595, 597, 623, 631, 637, 652,662, 665, 666: n = A,T,C or G
acagcttgtccaggttactcctggagaggctgtccagagcctggatgaagtgatctgtccctgagccatccttctcggggctctccatcaaagacatggtggcaaagaccacgtcgctggccagaaacttgtgcttgaacccaaaatgaatgctgaaagtctacacgcgcatgtccttcatcccaaatttatttgcagactcttcaatcatttcccgcaaattctccttcaaggagatgtccatggcctggaacttctgcttcacctgcttcaggggaagacccatgtctgcaaggaactcctggagccgcttctgtccatgcacagaccacaagcttgaacctgctgcggtatagctggtgttgcacaggctgtcatggagggaccagtgctggtagagcaccangcggaggtcatactcaaaggagatccgtgtgcagtccacggagagtgnggtctcctcatcctcgntccngtggttgtggcgggaaacgtggcgcttgcaggacaccaacatcaatcacgtatttcatttgaatgatcttgtntggacccctggtctggtagtccaacgatggccaccacacatgtantnangtccttggacagattcaagccacttnaacattancatggntgacaagtccatganttatctgtcnaannaaaagattttt

SEQ ID NO: 3466 - DNA, 655 bp, Homo sapiens
  misc_feature 339, 417, 425, 432, 449, 453, 465, 493, 512, 518, 521, 525,567, 575, 580, 596, 616, 624, 628, 630: n = A,T,C or G
ggtacactcccagtgtgtcactgggctggtgttctccccacacagtgttcccttcctggcctctctcagtgaagactgctcacttgctgtgctggactcaagcctttctgagttgtttagaagccaagcccacagagactttgtgagagatgcgacttggtccccgctcaatcactccctgcttaccacagtggactgggaccatcaggtcgtccaccacgttgtgcccacagaacctctcccagcccctggacctacaagtgttactgagtagattggatttaagacaaaaagcaagtcccccatgagtgtccacttctttgcctgcctctaacttgngagacaacacaggagccttctatagtatggtgatatgctagatctgtgccggtaataggcatcgtctctcaacctganggaggctngattctnggttcctgtagtcacanggangaaaaacttttntaaaaatggacatgtatttgcctgtgantgtgtgtgtaaattatagntttggnagnggcnggataaaaaaatcatctaaaaaaaaaaaaaaaaaaagtcctngcgggacncctanggcgaatcaaccatgnggcgtttaaggaccactcgnccacttgngaananggtaattttctgggaaagttcctca

SEQ ID NO: 3467 - DNA, 588 bp, Homo sapiens
  misc_feature 68, 91, 361, 369, 379, 393, 494, 505, 546, 586: n = A,T,C or G
acgcgggagaagcttggaccgcatcctagccgccgactcacacaaggcaggtgggtgaggaaatccanagttgccatggagaaaattccantgtcagcattcttgctccttgtggccctctcctacactctggccagagataccacagtcaaacctggagccaaaaaggacacaaaggactctctacccaaactgccccagaccctctccagaggttggggtgaccaactcatctggactcagacatatgaagaagctctatataaatccaagacaagcaacaaacccttgatgattattcatcacttggatgagtgcccacacagtcaagctttaaagaaagtgtttgctgaaaataaanaaatccanaaattggcanagcagtttgtcctnctcaatcttggtttatgaaacaactgacaaacaccctttctcctgatggccagtattgtccccaaggattattgtttgttgacccatctctggacagttanagccgtttcantggaaagatattcaaccgtcttttttgcttacgaacctgcngatacagctcttgttgctttgacaacattaaagaaagctncc

SEQ ID NO: 3468 - DNA, 435 bp, Homo sapiens
acgcggggaccagtgttttgacaatggatgctgtttcgactccagtgtcactggggtcccctggtgtttccaccccctcccaaagcaagagtcggatcagtgcgtcatggaggtctcagaccgaagaaactgtggctacccgggcatcagcctcgaggaatgcgcctctcggaagtgctgcttctccaacttcatctttgaagtgccctggtgcttcttcccgaagtctgtggaagactgccattactaagagaggctggttccagaggatgcatctggctcaccgggtgttccgaaaccaaagaagaaacttcgccttatcagcttcatatttcatgaaatcctgggttttcttaaccatcttttcctcattttcaatggtttaacatataatttctttaaataaaacccttaaaatctgctaaaaaaaaaaaa

SEQ ID NO: 3469 - DNA, 664 bp, Homo sapiens
  misc_feature 413, 453, 526, 553, 563, 567, 573, 591, 597, 607, 620, 647,663: n = A,T,C or G
ggtacttttttgtttgttttttgttttttaattcaagaagtaggctgggcccggtggctcatgcctgtaatcctggcactttgggaggctgcggcaggcggatcacttgaggtcaggagtccaagaccagcctggccaacatggtgaaaccccatctctaccaaaaaaaaaaaaaaaagtgcaactagctgtgcttggtgacttggccctgtagtcccagttgcttgggaggctgaggtgggagaattgcttgggcctgagagctggaggttatggtgagaaactgagattgcaccactgcactgtagcctgagtgacagagcgagaccctgtctcaagaaagaagtattgggaaggttatttaaagactctacttttaaatcaggcgtggcagctcacgcctgtaatcccancattttgggaggctgaggcaggcgaatcacttgaggtcangagttcaaaaacaacctggcccacatgtgaaacccattttactaaaaatccaaaactacccggcatggtggcnggcccctgtaatccaactctttggagnttaggagganaatntttganctggaggtgcatgacttnaatacncctgacttancctggtgacaacnaactcccctcaaaaaaaaaattctttnaaatcacttataattnt

SEQ ID NO: 3470 - DNA, 674 bp, Homo sapiens
  misc_feature 56, 60, 71, 77, 83, 106, 112, 119, 126, 168, 193, 219, 221,262, 274, 286, 288, 298, 311, 322, 397, 413, 415, 421, 447,450, 472, 477, 481, 498, 502, 514, 520, 530, 537, 547, 551,573, 580, 583, 607, 618, 644, 650, 659, 669: n = A,T,C or G
actttttttttttttttttttttttctttttttttttttttttttttttttttttngctngggcagaggcncaatcnttttanataaaaaaaaattgaacaaaganaccctnttgcganaggtganatgaggccctgccatgcaaaggagtcccagcagaggaggaanaattccatcctggagttcaagtttntgtgcaaagacaggacctggggacananaacggtcctccacccaatttcagctggtctgtcctcatcanctttgggctgancctggggtgatnanaggtggagtntcccctggatggngaccggacttntggccaaacttgcatttgcattttgcactcatgaccatgatgatgcccatggccacaaaaccccacgcaaatgancccccaacctggaggntntgccantcataataaaaaggactgtttttatnttntaggcattggcgtccaagacangaaancctnccaggaaccaaacaggnccanggtcaccttttncatttnaaacccttgnctttgtngttaacaagntganccccggttccttgggcgggacncccttanggngaattccaccactgggggccgttntttgggtccancttggaccaacttggggaaaaagggnaaactnttcctgggnaaatgttccntccaa

SEQ ID NO: 3471 - DNA, 665 bp, Homo sapiens
  misc_feature 290, 346, 397, 399, 402, 403, 409, 417, 421, 435, 436, 446,449, 486, 503, 506, 511, 526, 537, 538, 563, 572, 598, 607,623, 629: n = A,T,C or G
actttttttttttttttttttttttggaatacaactttattctgattctaaacgaaaaggaatgggaatgacagtaacaaacaagatttcaccactgaatattgtgatgtgactgcagcagtcttatatatgaaactcaaggaatcaactgcgttccaaaacagctaaatatgcaggtccaaacaatgaagttattttttaaactgccacattcactccgaagcccactcatctccttcagcatcccacagatgaagcacatgttccgcttagctagataataatgaggnggcacacacgctgcaccgctgacatcacaggacagctgcctataaaactagacttntgacgctgggctccagcttcattcttacaggtcatcatcctcattccgganancanntgtctnaacacccntaantcgtgctcatactnngctggccaanctnggtcatgacaactttttgtggggccaaagcagcatgncaccaaattccaagtanggncttcnaagacttctaccagnccaaggaaggnnttttaaaatgtagttacttttgganaaaagttgnaataccttggcgggacaccctaaggngaattcacnactggggcggtctatngatccncttgggccactggggggaaaatggcaaaatgttctt

SEQ ID NO: 3472 - DNA, 674 bp, Homo sapiens
  misc_feature 369, 507, 524, 525, 534, 536, 574, 591, 602, 619, 626, 639,647, 648, 649, 652, 670: n = A,T,C or G
ggtacaagaccagcaaagcccagcttctcggctgtgagctctgagaacctggggacgatccgccctcctgttgcgatggcaatcagctcaatttcaggtcctcctacccagcgaaccgcaggcaagttgttctgaagaagtaagtgatttgcttcatcatcaaagccccactgacaaattgctaggttagcaccagtctctttaatttgttgaatcatctcttcaaatttctccttttcgtatttctgaagggctttataatcttcgacagaggtcacatccagcttatgctttgtttttggtttgggtggttcaaatggacatgtgagaattgcaatcttcgcatcttccactttttttggcatctgngggtgactgaaatccttgtccacaatcacgcccttaatcaagtttaatgtcctccagcctgccgccactttgccttctactttgataaagctcaaagtcaacgtctctccgctccatatctgctacagtgaggacggnattcacagcaatctcanncatctggcngngacactggtgaccactttggagccacgtggttttgtgnctgaataaggggtcggngtccttatgtnacaaggacctttcctgncttggcnggggtcaaacacngagcagcnnntanaacctggtttttgatggngaag

SEQ ID NO: 3473 - DNA, 671 bp, Homo sapiens
  misc_feature 456, 485, 487, 513, 519, 543, 546, 588, 599, 628, 638, 643,644, 652, 664: n = A,T,C or G
acgcgggatggatggtggttttcagtttagctacggcaatcctgaacttcctgaagatgtccttgatgtgcagctggcattccttcgacttctctccagccgagcttcccagaacatcacatatcactgcaaaaatagcattgcatacatggatcaggccagtggaaatgtaaagaaggccctgaagctgatggggtcaaatgaaggtgaattcaaggctgaaggaaatagcaaattcacctacacagttctggaggatggttgcacgaaacacactggggaatggagcaaaacagtctttgaatatcgaatacgcaaggctgtgagactacctattgtagatattgcaccctatgacattggtggtcctgatcaagaatttggtgtggacgttggccctgtttgctttttataaaccaaactctatctgaaatcccaacaaaaaaaatttaactncatatgtgttcctcttggtctaatcttgncnaccagtgcaagtgaccgacaaaattncagttnttattttccaaatgtttggaaacngtntaatttgacaaaaaaaatgatactttctttttttgttgtccnccaatcaattnaaagcctttgtttttttttaccaatccanttaaaaggtnaaggnnttaataanaacttacctttntaaacaa

SEQ ID NO: 3474 - DNA, 300 bp, Homo sapiens
  misc_feature 272, 275: n = A,T,C or G
ggtacgcgggggggtcccctggtgcttctatcctaataccatcgacgtccctccagaagaggagtgtgaattttagacacttctgcagggatctgcctgcatcctgacgcggtgccgtccccagcacggtgattagtcccagagctcggctgccacctccaccggacacctcagacacgcttctgcagctgtgcctcggctcacaacacagattgactgctctgactttgactactcaaaattggcctaaaaattaaaagagatcgatacanaanaaaaaaaaaaaaaaaaaaagtaccc

SEQ ID NO: 3475 - DNA, 673 bp, Homo sapiens
  misc_feature 345, 419, 459, 500, 502, 505, 524, 527, 530, 534, 580, 584,594, 604, 609, 612, 624, 647, 667, 671, 673: n = A,T,C or G
cgaggtacttttttttttttttttttttttttttattggaagcttggacaaaaattccacagctgtaatcctcaggatcactttgcagtcttcaagattcagatacagaggaagcttcaattcaacctttcagagaagacattccagctcgcatgatctcatcaaccaagagaatgttggtggcaatcacagtgcaggagtgaagaagctgtttctttacacaatagttatcccatacgcctacttctgctgccaccattggctcacctgtgttcaggtccacacccacaagctgacctgattctgaatgttctgcttgaattttaactaatgtttcctgaaggncaaaaccagagttctgagcaagaaccttgggaataatgagcaatgcatcaacaaatgcttggactccaaactgngccctgcctttacactgggcttatgtttaatcaaggcttntggcattgccctttcacgggccagccctggaacaccaagcntnatnaatagcattttgaagcctnaancgncctnactggattttgactgagggaggggggcctatttgggccttgacaanaagngacaaaccangggtggtcanttttnaanaagggaaatttnttttccaaggtactaatacaaancttctttccaaccacagganttgntn

SEQ ID NO: 3476 - DNA, 683 bp, Homo sapiens
  misc_feature 466, 484, 511, 517, 524, 542, 546, 549, 582, 604, 611, 617,651, 660, 666, 680, 683: n = A,T,C or G
ggtactgttcgtgccgcagcaggaggcctgggtggtggagcgaatgggccgattccaccggatcctggagcctggtttgaacatcctcatccctgtgttagaccggatccgatatgtgcagagtctcaaggaaattgtcatcaacgtgcctgagcagtcggctgtgactctcgacaatgtaactctgcaaatcgatggagtcctttacctgcgcatcatggacccttacaaggcaagctacggtgtggaggaccctgagtatgccgtcacccagctagctcaaacaaccatgagatcagagctcggcaaactctctctggacaaagtcttccgggaacgggagtccctgaatgccagcattgtggatgccatcaaccaagctgctgactgctggggtatcccgctgcctccgttatgagatcaaaggatatccatgtgccaccccgggtgaaaagagtctatgcanatgcaggtggaggcagancggcggaaaccggccacaagtctagantcttangggaccnaaagtcggcattaatgtngcanaangggaaaaacaggccaaatctggccttcgaacanaaaaggttgacaaataatagcnccagganaggccntgcattttgcaaagccaggttaactgaacttttnaatctggtngagttnaacaaataaggaancan

SEQ ID NO: 3477 - DNA, 650 bp, Homo sapiens
  misc_feature 434, 557, 602, 609, 617, 642: n = A,T,C or G
acagctttgccactcaaatatgccttattgtggcattcagggagccagggtccagagctgcagggctgcggtccctggctcacttccacataggccatcacataacctgtcataaaggcatcaaaaccagcccggtgcaatccatccccaggcactgggttaggactggcttggctccctggcacttctgaggtagctctatcagctatttcaggccttgctgccttaatccccatctctaagtcatttttgttgccttgcttggagtgaggcaggttcctagtttcatcggcagccacctcctgctcggtttcttcaggcttgatgctatccccacagacctgcttcttgggaggaccatccttagcttcccagaggtctgtgtcccccggtaggttcaataaagccctcttccgtttttccctacgtcgtcncccgtcgcccgcttgccctctgccgcaacctcatcaagtgtcaatgataaggtcatatcgtgagactgaagacactggtggtcccagggggcaccagccataagcccgaaaagtttgtcacanatgcctggtgggatgaagaacggtgggttgctggggggcaagcancaacggnaatcaatntgggcccttattgctggaaggatanttgccaaa

SEQ ID NO: 3478 - DNA, 233 bp, Homo sapiens
  misc_feature 2, 4, 6, 20, 26, 51, 55, 58, 64, 74, 77, 166, 171, 176, 187,192, 203, 228: n = A,T,C or G
gncncngccgacgtacctgnagtganaaactgatttatgatcacttggaanattngtntagttntataaaactnagntaaaatgtctgtttcaatgacctgtattttgccatcacttaaatcacacgatgggtattaaacttgtcagaattcctttgtcattcaancctgngaatnataaccctgtntggcncttattatgangctattaaaagaatccaaatccaanctaat

SEQ ID NO: 3479 - DNA, 550 bp, Homo sapiens
  misc_feature 313, 357, 360, 364, 370, 377, 386, 406, 416, 427, 442, 445,447, 451, 458, 462, 488, 493, 495, 519, 548: n = A,T,C or G
acgcgggacctttttcctctcttcagcgtggggcgcccacaatttgcgcgctctctttctgctgctccccagctctcggatacagccgacaccatgggtttcggagacctgaaaagccctgccggcctccaggtgctcaacgattacctggcggacaagagctacatcgaggggtatgtgccatcacaagcagatgtggcagtatttgaagccgtgtccagcccaccgcctgccgacttgtgtcatgccctacgttggtataatcacatcaagtcttacgaaaaggaaaaggccagcctgccaggagtgaaanaaagctttgggcaaatatggtcctgccgatgtggaaagacactncangaanttgganctacaanatagtaaanatgatgatgacatttgaccncttttggatntgatgattganggaggaaagtgaaanaancnaaanagggctnaagnaaaaaacgtttgcacaatatgaattnaaaananaggcaaaaaaccttcactttgttnccaattttcaatcttactaaatgttaaanct

SEQ ID NO: 3480 - DNA, 319 bp, Homo sapiens
  misc_feature 44, 59, 185, 193, 202, 267, 292, 298, 310, 316: n = A,T,C or G
actttttttttttttttttttttttgaacttgaacgggaaccanaatgggatgatccanatgatgacctgtggcgtctgggtaaagtagtggtgttccgtaggggttggccctgggctcagggttgtttagtgttttcaccaatcacctttcgggtgaccgtgatcttgttcgtctttttttgcnatcaccanatgaagaanatctagaacgacttctctttctgttcctctcaggagaagatgatgaacttgaataaaatcttttncgtggggaaaaaaagcccctgtggnacctgnagctggatcttnatttcnacc

SEQ ID NO: 3481 - DNA, 533 bp, Homo sapiens
  misc_feature 283, 292, 361, 392, 402, 431, 433, 454, 490, 498, 514, 517,522, 524, 526: n = A,T,C or G
acaacacaggctacatgtaggcaagctaaagctatcatgaaaggaggatacagtaggcaaagatccgttctgtaggtatcattcactatcctccatgcaaggggaagcaacatgtcttcttggcccatgtcctgcacatactggagcaaaggtctataaggatgatacactatcaagcaacaatccattagttctaacagatagaattcacattctaatatatgattcatcctataaggaaattcctttggaaaggcatatgaaaatctagtttttaatacanaagtagcancagcaatcaatcttgtatttgaagctactccaaattcctctactttggatgccaaaaacacacatgtangagccattaatacaggatctatacttttcanagaatacctngcatagaatcttcttgaaatataccgtancnagtggcaataacttgtttgcntaattaaaaatgttcaccctaatgcttcggataacntttgtaanaaaatattttgcaacnttncaatntncntccctct

SEQ ID NO: 3482 - DNA, 278 bp, Homo sapiens
  misc_feature 26, 41, 44, 61, 104, 112, 149, 170, 178, 182, 191, 212, 215,237, 239, 258, 259, 262, 265: n = A,T,C or G
acgcggggatcggcatcccggggtcnctctggaagtcggtntanaagtcgctcaccctcanacaaaagaagtaaacgtggagatgacagacggtctagaagtanagataganataggaggagagagaggtctcgtagcagggataaaanaagatctcggtcaagggacangaagcgtntganacgttccanaagtagagagagagacagaanccnagagcgaaataagatcttgaantncagactaggagacgctcanngantanaatcctggtccgg

SEQ ID NO: 3483 - DNA, 211 bp, Homo sapiens
acatcccaactgagctggatcaagttagaaaatggatttctgactggaatctcaccactgaaaaaaagcacacccttttaagactactttatgaggcacttgtggattgtaagaagagtgatgctgcttcaaaagtcatggtggaattgctcggaagttacacagaggacaatgcttcccaggctcgagttgatgcccacaggtgtattgt

SEQ ID NO: 3484 - DNA, 517 bp, Homo sapiens
  misc_feature 15, 37, 43, 61, 135, 214, 324, 334, 386, 399, 400, 404, 414,442, 461, 476, 482, 491, 494, 508, 511: n = A,T,C or G
acgcggggagggacnggaggcgagcaagatggcgcanacgcanggcacccggaggaaagtntgttactactacgacggggatgttggaaattactattatggacaaggccacccaatgaagcctcaccgaatccncatgactcataatttgctgctcaactatggtctctaccgaaaaatggaaatctatcgccctcacaaagccaatgctgangagatgaccaagtacgaagtacgtccaaagttgttgaccgtatttacagtttctacaaacttacagctcataaacataaaatgaatactgaaagaatactttacaagcanaagaagaatncttctataagcattccttttattcccagaaacacctgtaaggaccaaaatantttcaagacttannccanattgggtttngaaaagagataacatgggaagaaatcanaatccccctgcagctattnaaatggtgatggatnccctgncattccctnttnaataaaatgtaaancanttttca

SEQ ID NO: 3485 - DNA, 651 bp, Homo sapiens
  misc_feature 356, 358, 371, 387, 388, 406, 411, 412, 442, 451, 460, 487,489, 497, 519, 523, 524, 530, 537, 540, 543, 547, 589, 594,611, 616, 617, 619, 621, 628, 638, 648: n = A,T,C or G
acgcgggggctgttgccttcaggtgaccacggattcgccatcgtgagttccagacagggtcagatgtgttactgggctggagtgtggtggcacaatcacgctcactgcatccttgacctcctgggctcaagtgatcttcccacctcagcctcccaagtagctgggactacaggattttcaaaatggctgcagctcctcaagcaccggggcggggatctctccgtaagacgagacctctggttgtgaagacgtcgttgaacaacccatacatcatccgctggagcgctctggaaagcgaggatatgcacttcatcctacagacgcttgaggacaggcttaaagctattggacttcanangattgaagataanaagaaaaagaacaaannccttttctgaaaaaaganagcanngagaaatgcagcattgctgttgatattagngagaatctnaaggacaanaaaacagatgctaatccaccaagtgtnanggtggacnctgccacacgtcatggaagcancttnncctttngcgtttnacnaanttancaaacccctggaaaggagggaactgctgtaattctggtatcnaaaanaatcaaccccccatatncctcnnantngatttanttaccttacncaaatttccntcc

SEQ ID NO: 3486 - DNA, 653 bp, Homo sapiens
  misc_feature 82, 168, 190, 200, 209, 214, 245, 256, 296, 319, 320, 327,334, 339, 349, 361, 407, 412, 416, 420, 445, 456, 480, 487,491, 504, 506, 535, 550, 558, 560, 563, 565, 569, 572, 574,577, 581, 592, 606, 611, 612, 629, 633, 646, 649, 650: n = A,T,C or G
  misc_feature 652: n = A,T,C or G
gtacgcgggggggaggtgggaacgctgtggccattcggatttggcgcgagcgcggctggagtttgctgctgccgctgtgcantttgttcaggggcttgtggtggtgagtccaagaggctgcttgtgagagacgtgagaaggatcctgcactgaggaggtggaaagaanaggattgctcgaggaggcctgnggtctgtaangcagcgganctggntgaaggctgccgggttccggcgaggcctganctgtgctgtcntcatgcctcaaacccgatcccaggcacaggctacaatcanttttccaaaaaggaagctgtctnnggcattnaacaaanctaanaactcctgtnatgccaaactanaaccaacaaatgtccaaaccgtaacctggttctcctcgtgtaaaanccctncctntcancccaatgaaaacgtcttgggcgatnacaacctaatncaacactccccatttacctccttnttctccncaancaaggctagaaananaatggttcccctcactcacatacacttangggactaaaaattgntatttgananatnantganaantnaantctnctaaccaaaanaaaactaaccaaantttcnnccaaaacaaaatccttnttcntttaaaaaatcanaanntnc

SEQ ID NO: 3487 - DNA, 362 bp, Homo sapiens
  misc_feature 6, 126, 152, 210, 293, 295, 304, 335: n = A,T,C or G
actttntttttttttttttttttttttaaaaaataaaaatgatttttatttagttttttggaaatataacaaaataattggcaaaaaccaaaccaaaacagaaccaaaaaaatgacatgttatatnagtgatcatctccaagcacaacagcntttattaatgaatataaaaaataaattttacttttttttttgaaacggagtcttgctntgtctcccaggctggagtgccgtggtgcgatctcggctcactgcaagctctgcctcctgggttttacaccattctcctgcctnancctccccantagctgggactacaggtgtgcaccacctacncccagctaatatttttttgtattttta

SEQ ID NO: 3488 - DNA, 544 bp, Homo sapiens
  misc_feature 130, 139, 319, 385, 420, 431, 443, 449, 461, 472, 474, 487,488, 504, 531: n = A,T,C or G
acttttttttttttttttttttttggataactcagtttcagataaaccatcttggttactgtgcttaatttggaccaaattttatttagcttaatatggacactgacacattttggggggtatacattanacatatcanagcagtgtatttctggatcattttttaaatgacctcttctaaaacataactgtcacttacctgaaatgctgcatcctaaaattccaaaattatattgagcaatcgccaaggcctaaagccaactgacttaaaggtaatcatttcaagctaagattaaatttaaagcctaagaatgtatanagctagtttttaaaataatgatctcagatttttaaaaaggatataggaacctgcattgtcattctntgaattaaaaactgatggtttctatcattatttanccccacctttntattttaaaatncttcanaatacatttatnaaccaatgcgnantggacttagccanncacaatggaaatttanacctttgactatttggtgttttccagntcacaaaaggtgg

SEQ ID NO: 3489 - DNA, 253 bp, Homo sapiens
  misc_feature 134, 211, 225, 251: n = A,T,C or G
acgcgggggaggcagccatgtcttatcccgctgatgattatgagtctgaggcggcttatgacccctacgcttatcccagcgactatgatatgcacacaggagatccaaagcaggaccttgcttatgaacgtcantatgaacagcaaacctatcaggtagatccctgaggtgatcaaaaacttcatccagtatttccacaaaactgtctcanatttgattgaccangaaagtgtatgagctacaggccattnat

SEQ ID NO: 3490 - DNA, 431 bp, Homo sapiens
  misc_feature 46, 118, 173, 184, 231, 286, 324, 333, 343, 346, 350, 377,394, 408, 410, 413, 427: n = A,T,C or G
accgaccatagagcaagaatcaagattctgctaactcctgcacagncccgtcctcttcctttctgctagcctggctaaatctgctcattatttcagaggggaaacctagcaaactaanagtgataagggccctactacactggcttttttaggcttaaagacagaaactttancattggcccantagtggcttctagctctaaatgtttgccccgccatccctttccacantatccttttccctctcccctgtctctggctgtctcgagcagtctagaagagtgcntctccagcctatgaaacagcttggggtctttggccatnagaagttanagatttgaanacngaangaacaaactcacggagtaagcttctanccccctttaacttttanacccttctgccctntntcnattgcatgcacccnaccc

SEQ ID NO: 3491 - DNA, 580 bp, Homo sapiens
  misc_feature 344: n = A,T,C or G
acacttgaaaccaaatttctaaaacttgtttttcttaaaaaatagttgttgtaacattaaaccataacctaatcagtgtgttcactatgcttccacactagccagtcttctcacacttcttctggtttcaagtctcaaggcctgacagacagaagggcttggagatttttttctttacaattcagtcttcagcaacttgagagctttcttcatgttgtcaagcaacagagctgtatctgcaggttcgtaagcatagagacggtttgaatatcttccagtgatatcggctctaactgtcagagatgggtcaacaaacataatcctggggacatactggccatcangagaaaggtgtttgtcagttgtttcataaaccagattgaggaggacaaactgctctgccaatttctggatttctttatttcagcaaacactttctttaaagcttgactgtgtggcactcatccaagtgatgaataatcatcaagggtttgttgcttgcttggatttatatagagcttcttcatatgtctgagtccaaatccccgcgttacctcggccgcgccacccctaaggggga

SEQ ID NO: 3492 - DNA, 302 bp, Homo sapiens
  misc_feature 24, 40, 60, 72, 77, 87, 105, 128, 136, 139, 144, 148, 153,162, 173, 175, 183, 190, 191, 205, 210, 224, 227, 230, 251,255, 257, 268, 274, 295: n = A,T,C or G
actttttctttattattacttttntttttctgcaagtcantaaaaggatttaagtttgcnctgacaaaaatnccaanataaaagtgnattcttaagttcccattngaaattgctggcgctgctggccngatgcatnttngagtncgtnttagntgataaatnaacagtaatancnagattgtntgaaccnnatggatgcttgcanttttnaatattgcggatantcngtncctggatcagaaacaacgctntggntnttacagattcnactgtnttagaaatcaaaccttgcccnaaacaaa

SEQ ID NO: 3493 - DNA, 652 bp, Homo sapiens
  misc_feature 456, 457, 487, 576, 635: n = A,T,C or G
actttgtaggctatacgttttaaactcctgtaaagaacattacaagctatttcatgtaatttaattttgtgctgaatattcttcaaatgactttataaataacacaatattttaaatgagtcttcaaattcacttgttgttataccatattgttgctttctccaactttatctacaaatgatctaattccaggtaaatttaggagggatccaaggactggcactcttctaataaagccaacaacgacaggaaagaagcccctgaacaagagaaaaaatccataaatttcgaagatcatgcctatcaaaggccaaccaataaggactacaaatacaccacccagaaaaaaacctgtagctttcattttatgtttttggaagaagaatctgaatgttctttctaaaccaattacaaaagccaagccggctcaaataaaacatttccaatagccagtanntgctttgcaaaaaaagagaatcattccaanagaacaggaaaaacactccaaaatcctgttaatccccattccaattttctggcgtgtcccgtaaaggagatcatggggctgcaggtggntggggacagccgccaaagccacctctgaaaagcccacggtgggaaacttaattcgaganaaatgaaacccgggaaa

SEQ ID NO: 3494 - DNA, 321 bp, Homo sapiens
  misc_feature 37, 57, 70, 97, 122, 129, 130, 133, 159, 166, 171, 172, 178,223, 240, 257, 259, 273, 285, 287, 297, 308: n = A,T,C or G
actttttttttttttttttttttttttttttttctgngtaaaacaaaaaattcctanaggtcaaataatntaccaaacttaaagcactattaagtcntgaaacaaagaaaattctgaggtanaagtcanncantataatccacagtttcaggttttccnaacaacnatcanntttcgnaagtaaaatctattttttttaaagtctcaacttccaaaaaatcantaatcctttctgtaaantcacgattgtaaaactntnaccaacaaaaaacncccaaacttttntnatggtaacanaataaatgctnttactaaaacctg

SEQ ID NO: 3495 - DNA, 650 bp, Homo sapiens
  misc_feature 537, 593, 634: n = A,T,C or G
accatttggaagaatggaagctgatgcatctgttgacatgttttccaaagtcctggagcatcagctgcttcagactaccaaactggtggaagaacatttggattctgaaattcaaaaactggatcagatggatgaggatgaattggaacgccttaaagaaaagagactccaggcactaaggaaagctcaacagcagaaacaagaatggctttctaaaggacatggggaatacagagaaatccctagtgaaagagacttttttcaagaagtcaaggagagtgaaaatgtggtttgccatttctacagagactccacattcaggtgtaaaatactagacagacatctggcaatattgtccaagaaacacctcgagaccaaatttttgaagctgaatgtggaaaaagcacctttcctttgtgagagactgcatatcaaagtcattcccacactagcactgctaaaagatgggaaaacacaagattatgttgttgggtttctgacctaggaaatacagatgacttcccccagaaactttanaatggaggctcggttcttctgacattcttaattacagtgggaaattaaatggaccnccttttcagaaccaaaagaattttggacaaacttcacaaancttgaaaagaaaactt

SEQ ID NO: 3496 - DNA, 538 bp, Homo sapiens
  misc_feature 172, 249, 327, 328, 330, 331, 362, 374, 388, 390, 401, 404,408, 422, 425, 437, 441, 442, 443, 448, 451, 459, 463, 464,468, 473, 476, 478, 484, 507, 511, 512, 514, 517, 531: n = A,T,C or G
acctctcaaattgctcatcaatataggagataattgtcttaaaacaatctctgcagttgatagcgtcaccatagccaggggtatctaccactgtcaggcgtagcttgacccctcgctcttcaatttcaacagttgaagcctcaatctggacagttctttcaattttttctanaaaagaaacaaacttaatagggaatataagcagcatgtgaagaggaaagctcacgttcttacgacaggtgacttcanagtctactgcctctctacagaggtaggttctccaaagataccatggggattaagaaaaaaaagatcccacagaagtcnnannggggaaggttaaagctaaaattattgtgctnctgggggaaggnaaaaacacaaatgntnaaaatataatntcngccntgggaaaaagaaancantttaccaaatcntttnnnactanatncataaatnttcnnaaanggccnctnantcttgnaccgcccaaaccttagctctcantatnngntcnctatttcatccaangtctttt

SEQ ID NO: 3497 - DNA, 175 bp, Homo sapiens
accttaacatctgttgagaaaatacaaataaatatgatgctaataaatggccactgataactcagtagccatctgaatagtcatgcggtttaagaatacatccttgtataatctgacatacaaatttgtcatttcctgcacatgcacaccattgttaaaaaaaaaaaaaaaaagt

SEQ ID NO: 3498 - DNA, 649 bp, Homo sapiens
  misc_feature 262, 542, 545, 555, 587, 595, 596, 623, 631, 637, 648: n = A,T,C or G
acacttgaaaccaaatttctaaaacatgtttttcttaaaaaatagttgttgtaacattaaaccataacctaatcagtgtgttcactatgcttccacactagccagtcttctcacacttcttctggtttcaagtctcaaggcctgacagacagaagggcttggagattttttttctttacaattcagtcttcagcaacttgagagctttcttcatgttgtcaagcaacagagctgtatctgcaggttcgtaagcatagagacnatttgaatatcttccagtgatatcggctctaactgtcagagatgggtcaacaaacataatcctggggacatactggccatcaggagaaaggtgtttgtcagttgtttcataaaccagattgaggaggacaaactgctctgccaatttctggatttctttattttcagcaaacactttctttaaagcttgactgtgtgggcactcatccaagtgatgaataatcatcaagggtttggtgcttgcttggatttatatagaacttccttcatatgtctgagtncanatgagttggncaccccaacctcttggagagggtcttgggcantttgggtnnagagtcctttgtgtcctttttggctcnaggttgantgtggnatcttctgccna

SEQ ID NO: 3499 - DNA, 558 bp, Homo sapiens
  misc_feature 9, 23, 24, 26, 39, 45, 97, 137, 158, 180, 202, 203, 207,210, 213, 278, 299, 300, 302, 324, 328, 337, 347, 357, 366,380, 383, 386, 388, 402, 413, 431, 439, 451, 452, 458, 466,467, 473, 481, 483, 501, 506, 515, 517, 519, 527, 552: n = A,T,C or G
acttttttntttttttttttttnntnttttttttaaaanttgcanatctttaataccattttcaatttcatttatgagctgctacattataaatganatgctctaaaataataatcgcttttgttgttgttgttatnaaacaatgaaaattcctgttnggaacacaagttgctgtttatntttgcttgttctcttaaatagnntganaanaantaagggggagctgttgggaaagcccatcgtggacctttggaaattatcttcttggttcagccatntccaccacagatttttaaaanngngatttcataatctccaaaagtntccnatttaattnctgaatatanggaatacccntaatgcttnttgaactctgatcnaanggncnaaaaggtcaattcntgatctggacnccatttttcggttcaaantaaactcnttaaattccaanncccttnaaggctcnntgcaantcttcggntnaaaaggggcggcggggtntcctnacacaaatnantntggccaanattaatttcttcaaaatgcccaaanaattct

SEQ ID NO: 3500 - DNA, 219 bp, Homo sapiens
  misc_feature 34, 48, 87, 88, 91, 106, 137, 144, 170, 185, 196, 204, 214: n = A,T,C or G
acccccatgcaatatatggctctacaatcctcancatgttaatcgaanccttgttgagcttcacaaaggttccattgaagatttgannaangcgaagaagctgcancacctttcgaacctttgggctcactccattnatacctntgattctgatgacagacgccaatttnggttctgcaggtacnattttcggtanatgctcantaacttattnttgtt

SEQ ID NO: 3501 - DNA, 419 bp, Homo sapiens
  misc_feature 251, 284, 295, 343, 373, 374, 416: n = A,T,C or G
acaaatatccattgcttcataggttcaagttacataaattaaagtcaaataattggaaactgattcaatagggaaaactatacatgaaatgaaggtcaaaaggagctatacagcaatatttcattgtttatagattatgagttactttcaggaccttaacaaagattctgaatatttagacttcctttgttgtattttatacttaaatatctccatacctatactgagtcaaactacttgaccaaaacatntgatttaggaaagcatctagctttatagcacangtttttccatntacatgtactatcttcaaaggaatatacatcacaatgttgacaaaaanacctcctggttccttttgaacaatgtgcannaaaatcatgatgttaactccatggtaagtcaaataggtcctnggc

SEQ ID NO: 3502 - DNA, 648 bp, Homo sapiens
  misc_feature 397, 549, 552, 587, 596, 603, 618, 625, 640, 648: n = A,T,C or G
actccagcctaagcagtaattctctaagtttcgcaaaaaactccttcctttggaaatgcagaaaagttaattcttgagttatcttcaacaactctaatggtttatagccatccaaatgtttatgcagaactgaagtaactcttttaatcagacatgagtttctgctttccatatctcccattgctcccaacactgccagggcttgctcgccagttaggtcctctgacatcaataacatagttgatttaagttgtttcttttcttcaggtcctgcaatgggtcccaatgctacaaacaattttacaaagctagcaggatgattacacagaggaatcatttcagttagcttctttttagccattataataaattcaaaactattaaattgtagaaattngtatacactaagtattttactgatggaatccaaatcaaggtgggtccacattacttaaaaaatccgttattacatctttctaatagtggttgataacgatatctaacatttcggaaaaacttttgctatgctttttgcaacgttgacctcanaanaaatctatgggtgtcaaaaaagaagttctgttttnttcaccagntgttgtnaaaatgtcggggatnttaaaanaagatatgttgaccntcaagacn

SEQ ID NO: 3503 - DNA, 375 bp, Homo sapiens
  misc_feature 46, 106, 137, 189, 222, 226, 230, 231, 259, 273, 281, 283,287, 325, 337, 353, 354, 363: n = A,T,C or G
gtacacttgaaaccaaatttctaaaacatgtttttcttaaaaatanttgttgtaacattaaaccataacctaatcagtgtgttcactatgcttccacactatccantcttctcacacttcttctggtttcaagtctnaaggcctgacagacagaagggcttggagattttttttctttacaatacagtnttcagcaacttgagagctttcttcatgttgtcnagcnacannagctgtatctgcaggttcgtaagcatanagacgatttgaatntcttccantngatntccggctctactgcagagatgggtcaacaaacatattnctggggacatantggccatcaggagaanngtgttttgncatttgtttccc

SEQ ID NO: 3504 - DNA, 453 bp, Homo sapiens
  misc_feature 101, 135, 173, 174, 188, 189, 287, 308, 322, 334, 360, 374,385, 400, 420, 427, 450, 451: n = A,T,C or G
gtacaacgcttcagcctactgcaaatccaaacacaggtttggtggaagatttggacaggacaggacctctttcaatgacaacgcagcatagtaattctcanagcttctctacatcacatgaaggcttggaagaanataaagaccatccaacaacttctactctgacatcaagnnatacgaatgatgtnncaggtggaagaagagacccaaatcattctgaaggctcaactactttactggaaggttatacctctcattacccacacacgaaggaaagcgggaccttnatcccagtgacctcagctaanactgggtcctttgnagttacctgcanatactgttggagattccactctaatntcaatcttccttancaggagaccancacacattccacccncaggggggggtcccataccnctcatgnatctgaatcatatggacactctnntg

SEQ ID NO: 3505 - DNA, 604 bp, Homo sapiens
  misc_feature 354, 368, 418, 469, 476, 485, 538, 568, 575, 581, 583, 593: n = A,T,C or G
actggaagcatgctccaaagacctgtaagaactttgctgagttggctcgtcgaggttactacaatggcacaaaattccacagaattatcaaagacttcatgatccaaggaggtgacccaacagggacaggtcgaggtggtgcatctatctatggcaaacagtttgaagatgaacttcatccagacttgaaattcacgggggctggaattctcgcaatggccaatgcggggccagataccaatggcagccagttctttgtgaccctcgcccccacccagtggcttgacggcaaacacaccatttttggccgagtgtgtcagggcataagaatggtgaatcgcgtgggaatggtanaaacaaactcccangaccgcctgtggacgacgtgaagatcattaaggcatacccttctgggtanacttgctaccctcttgagcagctcttcttgagatggccccaatggaaccancttctanatgacatanaatgacattgtaatgcttaaattcattttggttttgcaagtcatgaaacttangaggcctggctctttggtgagttagagatngaaagtnccttcngnccggaccacnctaaaggccga

SEQ ID NO: 3506 - DNA, 577 bp, Homo sapiens
  misc_feature 245, 337, 356, 370, 407, 431, 441, 462, 472, 476, 483, 491,507, 513, 516, 522, 530, 534, 543, 548, 549, 551, 565: n = A,T,C or G
accataataagtttgtagtagtataggctaggcttaaaactgcactcctcctgcctccccgcccccttccaaaaaaaagaaaaagtgaaaggaactctaaagagtgtcatatgcaggcacatctatataaaagctgggaaagaaattcatatccctgccattttcctttgtgtagttacccagtttaattcaactacctcaaaaaaaaaaaaaagaaaaaataaaaggaaccctaaagagtgtcntatgtaggcacatctatataaaagctgggaaagaaattcatagccctgccattttcctttgtgtagttactcaatttaattcaactacttcnacagaaatgtatgttaganaagagtatgctcanaaaggtattattgtgggtaagctaacttcttgctttnaacaatggctgtcttaaagttttngataacaaanggggtggtggtctacttttcnttcattaatnatcnggtatcncattaaancccattcacaaaggcnaagtcnatnggggtnggggaggntganatatttatnccaannantcttcaaattatcntttgtaaaattc

SEQ ID NO: 3507 - DNA, 598 bp, Homo sapiens
  misc_feature 296, 326, 365, 426, 440, 442, 449, 470, 490, 506, 507, 517,528, 530, 538, 551, 563, 569, 585: n = A,T,C or G
acgcggggaaaaacagagtagcagctcagactgccagagatcgaaagaaggctcgaatgagtgagctggaacagcaagtggtagatttagaagaagagaaccaaaaacttttgctagaaaatcagcttttacgagagaaaactcatggccttgtagttgagaaccaggagttaagacagcgcttggggatggatgccctggttgctgaagaggaggcggaagccaaggggaatgaagtgaggccagtggccgggtctgctgagtccgcagcactcagactacgtgcacctctgcancaggtgcaggcccagttgtcacccctccanaacatctccccatggattctggcggtattgactcttcanattcaaagtctgatatcctggtggggcattctggacaacttggacccagcatgttctttanatgcccttccccanancctgccngcctgtagggagcttccagangtctcccagaaggaccccantttcttaccatcctcnntttctttgtnagttggggacntnatcatccnagcctggaagccntttaatgaactnatttcnttttgaccacattatntaccaagcccctt

SEQ ID NO: 3508 - DNA, 234 bp, Homo sapiens
  misc_feature 71, 98, 101, 143, 208, 233: n = A,T,C or G
gtactcgggactgtgtcaggaatgatggaaaccaaatcagggagagtttctttggcaatttcattctgcanagaaagattccgggacagattcctcancancgagatggctgtctttttcacacttgggtcaccaacatgcancatctttcgggtgtgctgcaggccactttccttctggacaactgtctgagccactgatgtcggcnttggtccacttccggccgacccacnt

SEQ ID NO: 3509 - DNA, 358 bp, Homo sapiens
  misc_feature 187, 205, 231, 271, 338, 357: n = A,T,C or G
actcatgtattttttttccagatctctttccccaagttgctattgtaagagtattctgctgcgtgtggatgcagttatacacattaaagcagatctggagtctgaagtagctataaagcagctataaaacagaaatacatgcatagctgcagaaaccatgataggtagaggacttttcttttggttntgttttgttttgttttgntttgtttttggttttacagagaaganatttttattacaaagaaaaaaattccagtgaattgtgcanaaatgctggtttttacaccatcctaaagaaaaactttacaagggtgttttggagtacaaaaaaggtnataaagttggaatcttaant

SEQ ID NO: 3510 - DNA, 554 bp, Homo sapiens
  misc_feature 351, 371, 479, 502, 503, 507, 509, 513, 515, 545: n = A,T,C or G
acgcggggacatgtgtatgtgccagctcacacctaggggcgggctgcctctctgtgtgcatccatgccagcgcgtgcggctgcaaatctggtttccatcttctcccggtgctctgaggaacatttcgggagcctccagaactgaagagggggccaactctgtggagaaaaatgaatggatgtaggcccaaaggagccgaatgttttccttggctgaatggcaagcaagcaccaagtgtccacaggaagaaaatcagccagctttccaggcagataccaccctgactccccacaaaatatctgagtttccggagtgtggatatgaacagccgcttgggtcctgaggtggaanccatgtgtggaaagatgganggcatcggttaaaaggagtctagtcctgatggtcactgagctgcaaaccaacctgggctgcttcctgctggatgtcacttactaaagagcgaattaaatgtgcttcanctactgtactttgggttttctgnntttngnactnanataatcctaatcaatatgaaatatataaantaaacaaaa

SEQ ID NO: 3511 - DNA, 223 bp, Homo sapiens
ggacgcgggtgaatacatttctactttattttgaaacatttgccaaactaaatactgtaacactgtataacatttaaaaatgttaaagaactgcttagtattagaagcagatcatttcccaaaattctaagagcagcagcatatgttgttgcttgtataaagcctagcgataatttttagactaacttccatggtgccctgttggcattagcactaccattgt

SEQ ID NO: 3512 - DNA, 221 bp, Homo sapiens
acgcgggtgaatacatttctactttattttgaaacatttgccaaactaaatactgtaacactgtataacatttaaaaatgttaaagaactgcttagtattagaagcagatcatttcccaaaattctaagagcagcagcatatgttgttgcttgtataaagcctagcgataatttttagactaacttccatggtgccctgttggcattagcactaccattgt

SEQ ID NO: 3513 - DNA, 353 bp, Homo sapiens
  misc_feature 59, 69, 73, 98, 102, 105, 145, 148, 154, 185, 187, 192, 201,213, 229, 238, 239, 274, 275, 280, 285, 288, 292, 302, 305,311, 314, 315, 317, 321, 323, 341: n = A,T,C or G
acatttacattcaagttgataacaccggtggtttcatttcaatacaaattatgctaganaactgacatntcanacatggtcatatatatgctatttgnattnctntatcttgatacaaatcttgattgagaatctcttgatgatngangtgcanctaattcgtcccgaaactcatgaagatcatngntttgnttgatggtntgtattgccccngatcctctttggtctnacacgctgnntatggcttgctctggtgatatttgcgtcaaacacnnatagnacganacnagcnaactacaatnacnaagatntcnnangtancncttattaactgtatcaangtttttccgcat

SEQ ID NO: 3514 - DNA, 570 bp, Homo sapiens
  misc_feature 363, 394, 436, 438, 450, 460, 462, 497, 503, 523, 524, 534,539, 549, 562: n = A,T,C or G
accacaaaggagaagttgatagggaatctaattttagaatgtgccaaatggtctgtgctcaacaatataattgaactctctcaactctacctcaccatttctttatctcaaaattctgttggctttgtcaaacgttggattttatttctgcagcctagtatctccccattctaccacctatgccagatgttaaagacagcagatgttttgaggagaatggcattgtggagatgcagagatgcgttgctaagttgaggtggatccagtatagagatacctctatttcttctttatggctcaagagctaggacttggattttgttttaagagatgggcagctggccgggtgcagtggttcacgtntgtaatcccaacactttgggaggccgaagcngtggatcacgaggtcaggagttcaaagaccaggcctgccaananggtgaaaccccntctttacctnanaatacaaaaaaaaaattaacctgggtgttggtggncgggcncctgtattcccagctactcnngagggctatncaganaaatcatttnaaccccaggagancggacttt

SEQ ID NO: 3515 - DNA, 649 bp, Homo sapiens
  misc_feature 452, 620, 638, 647: n = A,T,C or G
acggatcacgctttccccaggatgacctctgccagtatatcacatcagatgacctcactcagatgctggacaacctagggcttaagtatgagtgctatgaccttttgtccaccatggatatatctgactgctttattgatggtaatgaaaatggagacctgctttgggattttttgactgaaacctgcaactttaatgccacagcaccacctgatctcagagcagagcttgggaaagatctacaagagcctgaatttagtgctaagaaagaggggaaggttctttttaataatactctgagtttcatagtgattgaggcataactatcaatcacaaaagtatattcaaaaattatattttgaacaactcgaatcactcatttatttccatattaaaatcacaaactcatccattaatgtagataaagcactgtttggatatgagatgtagcnaaattccaatacattattggacttccatttggaatccatatggggatactgctgggtcttatcctgtccctcctccaggtaagagagaccacaagcaggctcaacataacataaggctagaaaaaattagatgactgaatttctatgggcatattgataataaaaatnattccatttgctgattgnctgaatttntt

SEQ ID NO: 3516 - DNA, 278 bp, Homo sapiens
  misc_feature 2, 113, 140, 164, 180, 192, 198, 228, 239, 245, 274: n = A,T,C or G
gngtacgcgggggacggccgggggcattcgtattgcgccgctagaggtgaaattcttggaccggcgcaagacggaccagaagcgaaagcatttgccaagaatgttttcattantcaagaacgaaagtcggaggttcgaanacgatcagataccgcgtagttccnaccataaacgatgccnaccggcgatgcngcggcnttattcccatgacccgccgggcagcttccnggaaaccaaanctttgngttccggggggagtatggttgccaaaaanaaaa

SEQ ID NO: 3517 - DNA, 592 bp, Homo sapiens
  misc_feature 48, 64, 286, 297, 311, 347, 354, 358, 393, 407, 422, 466,467, 477, 482, 487, 490, 498, 511, 532, 537, 539, 540, 541,550, 559, 560, 569, 571, 581: n = A,T,C or G
gtactgcagcatgcactggcatactatagcttggtccagctcttccanagccccaaccactttncaaattgaatcctaaagtttttggtgcaggacccaatttaaatccatgtttcttcaactgatctgaaaccgcttttctattttcttcttttccccaaaaagtcatatgcagaggcatggtaaaagcattgtttgcaccaaaaggaactaccccttcaatttgtgccaatttgttgtccatgatataggccaaagcaccctgcaagctctttctttaaatggncaacttgattnccattcaacattgntaactttaattgcattcttatcataagggttattangatctcnttgnatgcaaccatttcattattataaactactcccgtntaatagcgtaattncaaccacatgacctntcaaacttccaaataaaacgggatctacttcttcatacctattnnaaaagtcatntgganggatnacntcttgganttcaaaaacgtgngaaagaaagttggatataaantggcngnnnaaaaatttncatgaactnnaaactgganancttgaaaaanctgcctggcag

SEQ ID NO: 3518 - DNA, 472 bp, Homo sapiens
  misc_feature 317, 429, 465: n = A,T,C or G
acgcgggataaccatgcacactactataaccaccctaaccctaacttccctaattccccccatccttaccaccctcgttaaccctaacaaaaaaaactcatacccccattatgtaaaatccattgtcgcatccacctttattatcagtctcttccccacaacaatattcatgtgcctagaccaagaagttattatctcgaactgacactgagccacaacccaaacaacccagctctccctaagcttcaaactagactacttctccataatattcatccctgtagcattgttcgttacatggccatcatagaattctnctgtgatatataaactcagacccaacattaatcagtcttcaaatatctactcatcttcctaattaccatactatcttagtaccgtaacacctatccaatgtcatcggtgaanggcgtaggaatattcctctgctatcagttgagatcnccgagca

SEQ ID NO: 3519 - DNA, 520 bp, Homo sapiens
  misc_feature 302, 362, 416, 450, 453, 454, 466, 469: n = A,T,C or G
actggcgtggattctgcataatggtgatcacacgttccacctcatcctcagtgagttctcccgccctcttggtgaggtcaatgtctgctttcctcaacaccacatgagcatatcttcggcccacacccttaatggcagtgatggcaaaggctattttccgccgcccatcgatgttggtgttgagtacattccgttcttttttttttttgagacagtctcgctctgtcgcccaggctggagtgcagtggcgcaatctcggctactgcaacctccacctccgggttcacccattctctgctcanctcccagtactggatacggcccgccaccacgcccgctaatttttgattttagtagaacangggttcaccgtgtaaccaagatggctcatctcctgacttggatcaccacctcgnctccaaatgctggatacaggctgagcactgcccngcnnattcattctatnaanaaataccagcttatcttgatgatcgatatccatataagtaaaaaataaaat

SEQ ID NO: 3520 - DNA, 527 bp, Homo sapiens
  misc_feature 334, 337, 341, 364, 390, 433, 463, 501, 520: n = A,T,C or G
acgagatccttatggaaatcgtcccttatgcattggtcgtcttattccagtgtctgatataaatgacaaagagaaaaaaacatcagaaacggaaggatgggtggtgtcttcagaatcttgtagcttcttatctattggtgcaagatattaccgtgaagtcttgcctggagaaattgtggaaatatccagacacaatgtccaaactcttgatattatatcaaggtctgaaggaaacccagtggctttttgtatctttgaatatgtttattttgcaagaccagacagtatgttcgaagaccaaatgggttatacagtaagataccgttgtggccancanctancgattgaacccctgtggatgcanatttggtagactgtccagatctgctnccctgtgtcttgctacccaggaagtgtgacttcatatgtgagngctggcaaaccgtttgtaggaaacctcatnaccaactgaggtaaacacctgtgtgaaaaaattggagnttgcaacacttaagcaaanattgtct

SEQ ID NO: 3521 - DNA, 543 bp, Homo sapiens
  misc_feature 455, 489, 493, 496, 501: n = A,T,C or G
acctgaagctcaggaggagatgaaagaagtagccaaacacccaaagaatcctgaggttggcttgaagcctgtgtggtatagtcccaaagttttcattgaaggtgctgatgcagagactttttcggagggtgagatggttacatttataaattggggcaacctcaacattacaaaaatacacaaaaatgcagatggaaaaatcatatctcttgatgcaaagttgaatttggaaaacaaagactacaagaaaaccctaaggtcacttggcttgcagagactacacatgctcttcctattccagtaatctgtgtcacttatgagcacttgatcacaaaccatgctaggaaaagacgagactttaagcagtatgtcaacagaacagtaagcatgaagagctaatgctaggggatccctgcttaaggattgaaaaaaggagatttatacactccagaaanagatcttctatgtgatcaaccttatgacctgtanccantantgcangagcccggtgtttgtatcattctgtggccacaaggaatccat

SEQ ID NO: 3522 - DNA, 539 bp, Homo sapiens
  misc_feature 210, 317, 322, 334, 350, 356, 380, 416, 469, 470, 482, 498,505, 515, 517, 535: n = A,T,C or G
acgcgggggagatggcagatgagattgccaaggctcaggtcgctcggcctggtggcgacacgatctttgggaagatcatccgcaaggaaataccagccaaaatcatttttgaggatgaccggtgccttgctttccatgacatttcccctcaagcaccaacacattttctggtgatacccaagaaacatatatcccagatttctgtggcanaagatgatgatgaaagtcttcttggacacttaatgattgttgcaagaaatgtgctgctgatctgggcctagattaagggttatcgaatggtggtgaatgaaggtcanatggnggacagtctgtntatcccgttcatctcntgtctngaggccgcaaatgcattggcctcntgttaacacgttttggggataatttctcttctttangcatgattaagtaggcattccagtatgttaagaacaccttatttttgcctgtnntggagaattcanaaatattttaaaccgntcatatnaagactgttntnactcaaaaaaaaaaaaanaaaa

SEQ ID NO: 3523 - DNA, 450 bp, Homo sapiens
  misc_feature 33, 61, 130, 228, 307, 326, 339, 344, 364, 390, 423, 424,429, 450: n = A,T,C or G
actttttttttttttttttttttttttaactanatttttgaaacttttttatttatatttnggtcttacaaatgatcacttttaaatggacttttctgtaagaatgtaaaactcaaaaatttgccaagtntgtatctgatccacacaaatccctagaaaggtttctgtgtagtcttcattaacgcaaatctttgagaatgtttcactcttactgtaggatcttgaatntgttttacaataatgaagctacaaagtttttatgcaagtgcattcattgtaaactataaataacatttgtatttaaaanaaagctgggaatacaaaantagagagactctngggancaggcaatctgttgaggctnagttatcttatttgcttggaggctgntgcattccttcaaagacacacagccatgagggnngtatntctgcttgtaaccttctaatn

SEQ ID NO: 3524 - DNA, 452 bp, Homo sapiens
  misc_feature 63, 204, 208, 210, 211, 218, 226, 231, 234, 236, 262, 277,292, 295, 316, 321, 329, 353, 354, 373, 374, 380, 385, 393,395, 412, 425, 426, 448: n = A,T,C or G
actttttttttttttttttttttttttttggataaatacatgctgatttattacagggataanatggtttcttgggggatagattcaagaggagttgagaatgttttattcatttacaatgtccctttcctggaagggtggacagcaagatttaggacaagctaaaatcatcccctatttaaaaaaaaaaaaaaaagtcaccancaantnntcccggntgggaggngggancanantaaaaaaaatctgcaatgattcctanttgttttcaatacanaaccttgggaagggnttnttccttttcatgaagaagccnaactncagttatnttggggaaggtttaaggtctttcnngcttgccttttccacaaanncaaaangattntctggcantnctcaacttttggctggncctcttgcctggnncaaacacaccgggacccaccangatt

SEQ ID NO: 3525 - DNA, 466 bp, Homo sapiens
  misc_feature 278, 323, 340, 360, 369, 370, 376, 384, 415, 432, 435, 462: n = A,T,C or G
acaaaatgtagatctatttatttagcactttgttcactcagataaatttatattgcatatctaatgagatatgcaatcatctccaaagattataactcctataattcaaaacaaaacaaccctttaaaggttattcactatatgaaaacagaaagggaacaattacaacaatgaaattgttttaactttttcaaatctgattctaatgtgtattgacatatatttaattatataaaagactgtgggaaaggggcattaacagtacgcggggactgganacactgaagaaggcaggggcccttaaagtcttggttgccaaacanatttgcagatcaagganacccaggagttcaaaaaacnctagtaagnntttganaccttgcnctcctacatcctcagggtaggaagaaaaggnttccaaacatgcggtgntcnattgttgactcctgccaaaacaggatnctgg

SEQ ID NO: 3526 - DNA, 526 bp, Homo sapiens
  misc_feature 335, 404, 439, 458, 483, 486, 501, 504, 525: n = A,T,C or G
acgcgggggctttccactatggcttccagcactgtcccggtgagcgctgctggctcggctaatgaaactcccgaaataccggacaacgtgggagattggcttcggggcgtctaccgctttgccactgataggaatgacttccggaggaacttgatactaaatttgggactctttgctgcgggagtttggctggccaggaacttgagtgacattgacctcatggcacctcagccaggggtgtagccaagtagacaaatggaatcctgtgctgaacccgaatcttccaaaaaacagcctacaatctgtgaccaccacaagatgtgccctgatggcanctgaagtttgattcaaatggccttttcttcccttccctgctagtttccttttgttcttgatccacgcanaattcattctctggtcacaacaggctaactaaagnttgctctattctgaaagtntgaccatgactgccccaagctacanganatctttatttggcanaantgttgaccttgaaaaatttant

SEQ ID NO: 3527 - DNA, 193 bp, Homo sapiens
acaattacccaccactggatttgactcagagaggacccccagagggtgtctccatcttccctatttattttcagcccttgagggcttcattgtagatcaaagccaaggcccccaggaaggtgacatactcctggaagttcacctcctggtccttgttccggtccaagtcttccatcagccttgcaacccgcgt

SEQ ID NO: 3528 - DNA, 531 bp, Homo sapiens
  misc_feature 269, 296, 303, 315, 318, 321, 402, 413, 415, 421, 426, 446,449, 456, 469, 503: n = A,T,C or G
acgataatcccacaccatatcttggatttcttggaaattgactcaactctccattctaataacatctccattctccaggaactgtacttttttttttttttttttttttggttttcttacaaaggttgacattttccataacaggtgtaagagtgttgaaaaaaaaattcaaatttttgggggagcgagggaaggagttaatgaaactgtattgcacaatgctctgatcaatccttctttttctcttttgcccacaatttaagcaagtngatgtgcaaaaaaaatggaagattcanctttcanttaaaaaaaaanaanaanaaatggccaagaaaaagtttttcaaattctttctttttaattaaaatgggttcattattgaaacaaactgggccatggcanaaaaattctgntnacaccnccgantccaaggtccattcaaggangcnagcggangctattgtttggntcaatgattgcttcccatctttgcttttaacacntctacaaacaggtaggacctgtgtgcct

SEQ ID NO: 3529 - DNA, 435 bp, Homo sapiens
  misc_feature 139, 219, 284, 290, 306, 330, 332, 338, 365, 370, 374, 377,378, 395, 412, 429: n = A,T,C or G
actttttttttttttttttttttttaccacatatttattaaagacaatcatttatagttcataaaaaaatactgccctgatatacacaaaattttctactcccacccaccccccatgtccacaccaatattcagtctanattggtttaatcttgaagtgtaatccaataagactgaagaccaaacacttcaggtcctggacaagataataaaatactcntaagccttctggatccttggattgattgacatcaataagggaaccaatttttgatgttgaaaaanaaatgngtcatctccaatgacnattcaagctctgccggcccactcngncaggangagggcacaatgcataatcctctttgnaattnactngtnncaatattctcttcagtncttcatccgctttatgncctgccggcggccgtcnaagggc

SEQ ID NO: 3530 - DNA, 532 bp, Homo sapiens
  misc_feature 432, 475, 490, 502, 507, 517: n = A,T,C or G
actctctcagctcaggtctcttagcttttagtgttggtgtcagcaagtcattttgaactgagaacatgtcagaatggatgtgaatggctttaacctgctcaaaagaatggagtccactttcttttcctaacctcaccatatcttccaaaatggctttcttcagatccttatttgtgcagagatctgcatatgttctttcaattcctctcttctgggcccaggagggcataacttcagggtcaggcccaacaatgcctaccaaaaaggcctttaagctgccccatggacatagatttgcgccacaggttgctccggatgtagatgtctcaatctctcggtgcaacatatctcctgagcaagtttaaatatatgctttttccgtcaataatttaagagttcctgccggcaccatttccgatgctccagtgtaancagccatcgtgccaggcctcttcgtctgctgatctttaagtanctttgacacattggncttaacatatcntcctntcttgaggcnatagttagtcctact

SEQ ID NO: 3531 - DNA, 424 bp, Homo sapiens
  misc_feature 420, 424: n = A,T,C or G
actgcttgttctctgtggaggagatgattaaaataaaaatcccagaaggacaggaggattctcaacactttgaatttttttaacttcatttttctacactgctattatcattatctcagaatgcttatttccaattaaaacgcctacagctgcctcctagaatatagactgtctgtattattattcacctataattagtcattatgatgctttaaagctgtacgcggggcctttcggccggaaccgccatcttccagtaattcgccaaaatgacgaacacaaagggaaagaggagaggccccgatatatgttctctagccttttagaaaacatggagttgttcctttgcccatatatgcaatctataagaaggtgatattgagacatcaaggaatgggtcctgcccggcggccgtcaaanggcn

SEQ ID NO: 3532 - DNA, 539 bp, Homo sapiens
  misc_feature 51, 318, 325, 367, 396, 397, 410, 416, 421, 452, 484, 539: n = A,T,C or G
acttgaactggagggcaagaagtggagagtggaaaatcaggaaaatgtttncaacctggtgattgaggacacagagctgaaacaggtggcttacatatacaagtgtgtcaacacgacattgcaaatcaagggcaaaattaactccattacagtagataactgtaagaaacttggcctggtattcgatgacgtggtgggcattgtggagataatcaacagtaaggatgtcaaagttcaggtaatgggtaaagtgccaaccatatccatcaacaaaacagatggttgccatgcttcctgagcaagaattccctggattgngaaatantcagtgccaaatcttccgaatgaatgtctattcctacaaaangcgtgactttatgaattccagttcctgannattcaagaccctntgaacnggcanaattggcacacagtgcagaaattgttgatanccaagtgccctgggtcttgcctcccttccacnatgggtaaatctgttaaacggtctttctaaattcttccttttgctttaactgttn

SEQ ID NO: 3533 - DNA, 215 bp, Homo sapiens
acttagcattgatcaaagaaatttcaaattacgatcaattgggtggggagaagaattttcattgtccaagcaccctcagggaacagaagtcaaagcaataacatattcagcaatgcaggtctataatgaagagaacccggaagtttttgtgatcattgacatttaagacaccaaaaaataaaagactcctacgaagaaatttcataaaaaaaaaa

SEQ ID NO: 3534 - DNA, 519 bp, Homo sapiens
  misc_feature 421, 433, 453, 459: n = A,T,C or G
acatgtttacaataccaaaaaagaaaaaatccacaaaagccactttattttaaaatatcatgtgacagatactttccagagctacaacatgccatctatagttgccagccctggtcagttttgattcttaaccccatggactcctttccctttcttctctgaaaaaaactaatttaaatttgcttttcttttttttaactgagttgaattgagattgatgtgttttcactggatttttatctctctcaacttcctgcacttaacaatatgaaatagaaacttttgctttactgagatgaggatatgtttgagatgcacagttggataatgtgggaaaatgacatctaagctttacctggcaccatgtgatgtgatcagatgcttgaatttaaccttttcacttggttcttatctgatgccnctctgctctggntagagatatgaatgggttgntactgnttgaacatatggaagtttaatttttgtataaagattgctgcagctgaaactaaaaaaaaa

SEQ ID NO: 3535 - DNA, 383 bp, Homo sapiens
  misc_feature 14, 28, 68, 70, 75, 106, 131, 172, 182, 208, 212, 253, 255,263, 267, 269, 296, 305, 315, 319, 325, 343, 352, 375: n = A,T,C or G
acgcggggtgtatnatgcctgttactantattcacatggaacaaattgctgccgtgggaggatgacananaagcntgagtcaccctgctggataaacttagacttnaggctttatcatttttcaatctgtnaatcataatcaggtcactgggatgttcaaccttaaactaanttttgaaagnaaggttatttaaaagattttcagtantatnctaaatgcaaacattttcatttaaatgtcaagcccatgttngntatttcantaananaatatatattcatggtcattcttaatnagcaggttntggcttgtanattntaatgntcataatcacctttgatncactggttnaattgcggctaaatacaatttcnattattat

SEQ ID NO: 3536 - DNA, 545 bp, Homo sapiens
  misc_feature 383, 412, 497, 517, 545: n = A,T,C or G
acaaaaaaattagctgggcatgatggcgtgtgcctataatcccacctactcgggaggctgaggcaggagaatcgcttgaacctgggaggcggaagttgcagtgagccgagatggcgctactgtagtccagtctgggcgacagagtgagattctgcctcaaaataaataaataaataaaaatttgtattccattgatttgggtagacaccaggaatgtgcatttctaacaggctttccaggcgatcctatagtaagtcatctgtggactactttaagaaactcttctatagagaatggagtttggattaataataggtgattttttacactggactgattcacaagaacctaaacagtagtccatgaagctgctcatctgtggnactatttgccccgctcactctgaaagcanaggagatgttgtttactttgttctatccctttgctgagataattttgaatgaaagttttctcttatgcttcctggtctttccaanctatacaagagataggcacntgcatcatacctttaaaagatgcatttn

SEQ ID NO: 3537 - DNA, 571 bp, Homo sapiens
  misc_feature 565: n = A,T,C or G
acacttgaaaccaaatttctaaaaccatgttttcttaaaaaatagttgttgtaacattaaaccataacctaatcagtgtgttcactatgcttccacactagccagtcttctcacacttcttctggtttcaagtctcaaggcccgacagacagaagggcttggagattttttttttttacaattcagtcttcagcaacttgagagctttcttcatgttgtcaagcaacagagctgtatctgcaggttcgtaagcatagagacgatttgaatatcttccagtgatatcggctctaactgtcagagatgggtcaacaaacataatcctggggacatactggccatcaggagaaaggtgtttgtcagttgtttcataaccagattgaggaggacaaactgctctgccaatttctggatttctttattttcagcaaacactttctttaaagcttgctggtgggcactcttcaagtgatgatatcatcaagggttgttgcttgtctggattatatagagctctcatatgtctgagtcagagattggcaccccaccctgagaggctgggcanttgggc

SEQ ID NO: 3538 - DNA, 152 bp, Homo sapiens
  misc_feature 128: n = A,T,C or G
acacttctcgaaatctaattgggggcgctgacatcattgtgatcaaatacaacgttaatgacaagttttcattccatgaagtaaaggataattatattccagtgataaaaagagcattaaattcagtnccagtaattattgctgctgttggt

SEQ ID NO: 3539 - DNA, 544 bp, Homo sapiens
  misc_feature 425, 431, 433, 444, 452, 456, 469, 471, 481, 503, 505, 523,539: n = A,T,C or G
accatggagaaggagtcgaaaaccacccgattctgtcttatctgtaactatgtcagtcgaataattgaacccctgacctctagatgttcaaaattccgcttcaagcctctgtcagataaaattcaacagcagcgattactagacattgccaagaaggaaaatgtcaaaattagtgatgagggaatagcttatcttgttaaagtgtcagaaggagacttaagaaaagccattacatttcttcaaagcgctactcgattaacaggtggaaaggagatcacagagaaagtgattacagacattgctggggtaataccagctgagaaaatttgatggagtatttgctgcctgtcagagtggctcttttgacaaactagaagctgtggcaaggattaatagatgagggtcatgcaacactcactcgtcantcactncntgatgtgggtntagaaatnactntctgttaacagantntatttcacanaaaactgccgaagtgcaatctngngatgtctgagaacattgnctatctcctttggcantggac

SEQ ID NO: 3540 - DNA, 396 bp, Homo sapiens
  misc_feature 38, 68, 94, 164, 204, 244, 272, 273, 280, 324, 358, 380: n = A,T,C or G
acttttttttttttttttttttttttttcgatttttanaaaaatcaaataatcttacttcaagttcgngtcatttttacatggcaattactttnaaataccttatctaatgttccataaatttccaaattcacgttttgcttgacactttgtatttctaaatgnattttaaatatcaaatattttatttcactgatttctattnaattttatgaatcctagcttttttaaaaacacaaaacatnccaactcagagtgactttctgaaattanngcaaagngaccgaggcacttggcaacactccttcctccacatcacttgcantagtgccttctgtcattcaatccttacaactcanggggaggaatccccccttcccngtttactggtatatta

SEQ ID NO: 3541 - DNA, 524 bp, Homo sapiens
  misc_feature 338, 392, 408, 462, 494, 516: n = A,T,C or G
acagacaaaacaaaatctgccttaggctgtgtgataaacctatcatacctccatcatcaaaaaaccttcagaataatttgggggatgcttacaaatgcattcatatacacaaggagctggaaatcttaaatatgttgcccagtcttccacaatccatgccatacatgggcttcagagcttctccttccttccattgcaggaagctccttctagaagccttgggtgggtaatttgattaatcaccccaagagattgatggtctgacaagtcttcaatgactcactggacagtctctgctgaaagtctgctctcatacaggcacagagcatggtgcacanattcatactgctcactggttacaccattccacctttatcctacgaagctggcanacaatgcttatgcatncacactccttcttttcagctgttgacagccatgatgtacaataaacaccctgtntactattctgcctgagtgacacccagcctcgncctgggaacaagctgctttttncatccact

SEQ ID NO: 3542 - DNA, 558 bp, Homo sapiens
  misc_feature 338, 383, 386, 391, 417, 420, 435, 437, 446, 457, 458, 469,479, 484, 485, 486, 492, 493, 502, 514, 530, 532, 534, 536,552: n = A,T,C or G
acattttcatgactggggaatggattttctgaagtcatcttcaatagggcaaaaacttagaaacaaaaaaaaaaaacaacctgaatgttgagttcagttctttatataacgtcccttgtaaaaatgaaagaataaaaacaaaccgaaaaagaggggcagggtaaaattttttaaaaaaaggaaaggaaagagaggaaaagaaaataaaataagacgatttattgcttctcctcagtatcctccttggtctcctccttcaccgagagagcttctagcttttccgccacttttttcggcatgatcatttttgcctgatcctgctttcttttctctctctncgaactctttcctgcattcttcaaacctttgttttgaatttctgngcnttctnagcattcaggaagcgggatggccaancancttttggcttggggnantcgtcagcnaatacaagcgnngggtgttccanacccaggcancgggnnntactgnnttgggcttnacctccatcttnggcgtgatgtaatggntngnanaaattttaaggtcttnccctcc

SEQ ID NO: 3543 - DNA, 514 bp, Homo sapiens
  misc_feature 30, 251, 279, 309, 370, 383, 407, 424, 439, 462, 472, 477,482, 486, 509: n = A,T,C or G
acgcggggagaagcttggaccgcatcctanccgccgactcacacaaggcaggtgggtgaggaaatccagagttgccatggagaaaattccagtgtcagcattcttgctccttgtggccctctcctacactctggccagagataccacagtcaaacctggagccaaaaaggacacaaaggactctcgacccaaactgccccagaccctctccagaggttggggtgaccaactcatctggactcagacatatnaagaagctctatataaatccaagacaancaactaacccttgatgattattcatcactnggatgagtgcccacacagtcaagctttaaaagaaagtgtttgctgaaaataagaaatccanaaattgcagagcnttttgccttctcaatctgtttatnaaacaacttgacaaacnctttctctgatggcntgaatgccccaggatattgtttntgacccactntacanttganccantttactggaagaattaatcgttntagct

SEQ ID NO: 3544 - DNA, 529 bp, Homo sapiens
  misc_feature 217, 310, 319, 338, 345, 401, 409, 447, 451, 455, 460, 463,483, 486, 494: n = A,T,C or G
acgcgggggtctggagctgcctgaggatgaggaggagaagaagaagatggaagagagcaaggcaaagtttgagaacctctgcaagctcatgaaagaaatcttagataagaaggttgagaaggtgacaatctccaatagacttgtgtcttcaccttgctgcattgtgaccagcacctacggctggacagccaatatggagcggatcatgaaagcccangcacttctggacaactccaccatgggctatatgatggccaaaaagcacctggagatcaaccctgaccaccccattgtggagacgctgcggcanaaggctgangcccgacaagaatgataangcagttnatgacctggtggtgctgcttgtttgaaaccgcctgcttcttcttgcttttccttgnggatcccnagaccactccaccgcattttcgcatgatcaagcttgtntagnttantgaanatnagtgcacaaaggacccattnttnattcctgngaatccctttcgaggcataagatcgttccatggaa

SEQ ID NO: 3545 - DNA, 516 bp, Homo sapiens
  misc_feature 438, 440, 445, 482, 485, 486, 503: n = A,T,C or G
acataatcgttttgtggagtcggcacagttcaggttatggaggcacgtaattcaccaaagtgcaaaaaaggcaaaggaaaacacgctgcattgtagaataaggcattcaaatgtgctgttaacgtttaaggcagctaatggccaaaacaggcaagtcaagaaaagtggtctggtttggaggtgattttgcatctagaaggcattctcttctcgtgacctcaaagactgagcactgtagagcatgtcttcttcctcaaggccaatgatacttcagataccagatggtttcatttttcaattgcggccaaagagagggttgagttgggccagaattgcaatcagccaaaagagatagcagcaaactgaacaggtcaccaacatggtaatgatactcccggttaggacccttagggatgaaccaaggcccaagatccgacnancccanaccgctctccatgagagccagtgaggccgtgatcccntgnncccgctgacgcccccgntctgccggcggcg

SEQ ID NO: 3546 - DNA, 507 bp, Homo sapiens
  misc_feature 86, 167, 229, 282, 346, 347, 350, 354, 355, 357, 362, 375,380, 395, 396, 406, 408, 411, 418, 419, 424, 425, 429, 431,433, 440, 452, 462, 467, 504: n = A,T,C or G
acagattgcctatttgaggaccttggccgctctgtaagcatctgactcatctcagaaatgtcaattcttaaacactgtggcaacangacctagaatggctgacgcattaaggttttcttcttgtgtcctgttctattattgttttaagacctcagtaaccatttcancctctttccagcaaacccttctccatagtatttcagtcatggaaggatcatttatgcaggtnggcattccaggagtttttggtcttttctgtctcaaggcataggtgtgtattgntccgggactggtttgggtgggacaaagttaaaattgcctgaagatcacacattcatactgttgnnctntggnngntttangattgggggggtnacctntctggtcttgcactnncatactatcnanttncattggnnttccnnaccntncncctggantttttgaaagcnagggtctggntgctnctgctttgcctatggttggcctttgtgcaggctcttncct

SEQ ID NO: 3547 - DNA, 534 bp, Homo sapiens
  misc_feature 295, 387, 389, 438, 453, 456, 461, 464, 468, 469, 491, 493,501, 504, 509, 525: n = A,T,C or G
acgcggggttgaggctttgcaatttcacttgtgttaaaggctctggcatttttccatttctatgcaaatttctttgaagcagaattgcttgcatatttcttctctgccgtcacagaaagcagagtttctttcaaacttcactgaggcatcagttgctctttggcaatgtcccttaaccatgattattaactaagtttgtggcttgagtttacaaattctacttgttgcattgatgttcccatgtagtaagtcatttttagtttgattgtgaaaaaaccctggggctgaagttggnatttcagttaaaagaaaaaaagaaactagtcccagatttgaaaacttgtaataaaattgaaactcactggttttctatgcttttagactctngnaatcgagttttgatcatatttctattaaagtggctacacccaaaaaaanaaaaaaaaaaaaatntantcggncgnaccnncctaggcgaatccactcatggngncgtactanggnccacntcggtcaagcttgctntatatggca

SEQ ID NO: 3548 - DNA, 538 bp, Homo sapiens
  misc_feature 357, 437, 470, 477, 497, 511, 538: n = A,T,C or G
acagccttgtggccagccttgacaacgttaggaatctctccactatcttgaaagctattcatttccgagaacatgccacgtgtttcgcaactaaaaatggtatcaaagtaacagtggaaaatgcaaagtgtgtgcaagcaaatgcttttattcaggctggaatatttcaggagtttaaagttcgggaagagtctgttacttttcgaattaatttaactgtccttttagactgtttatctatttttggatcaagtcctatgccagggactttaactgcacttcgaatgtgttaccaaggttatggttaccctttgatgctgttcctggaagaaggaggagtggtgacagtctgcaaantcaatacacaggaacctgaggagaccctggacttgatttctgcagaccaatgtattaataaaattattctgcagtcagangggctccgtgagcatttctgaattggatatacnagtgaancctacaataccatgctctgnagcctatttaggtnttactttggaatgcagagttccacttn

SEQ ID NO: 3549 - DNA, 524 bp, Homo sapiens
  misc_feature 226, 416, 433, 435, 471, 478, 484, 497, 519: n = A,T,C or G
acgcggggactgcgatagaaatcatgtctggtcgcggcaaaggcggaaaaggcttggggaagggtggtgctaagcgccatcgtaaggtgctccgggataacatccagggcattacaaaaccggctattcgccgtttggctcggcgcggtggcgtcaagcgcatttccggtcttatctatgaggagactcgaggtgtgcttaaggttttcttagagaacgttattcnagacgccgtcacctatacggagcacgccaagcgcaaaactgtcacagccatggatgtagtatatgccctaaaacgtcaggggcgcactctgtatggcttcggcggctgaatctaagaatcgcggtctcctgagaactccaaaaaaaaaaaaaaaaaaaaaaaagtccacttaaacctgccaggtcccagntctatttatggtgcttnancagggcactgcatccaaacaggttagtggagtggtntggacanatttantctatcatcacanattggacctaagatttgcaggntttct

SEQ ID NO: 3550 - DNA, 535 bp, Homo sapiens
  misc_feature 527: n = A,T,C or G
acgcggggactcagaagcttggaccgcatcctagccgccgactcacacaaggcaggtgggtgaggaaatccagagttgccatggagaaaattccagtgtcagcattcttgctccttgtgaccctctcctacactctggccagagataccacagtcaaacctggagccaaaaaggacacaaaggactctcgacccaaactgccccagaccctctccagaggttggggtgaccaactcatctggactcagacatatgaagaagctctatataaatccaagacaagcaacaaacccttgatgattattcatcacttggatgagtgcccacacagtcaagctttaaagaaagtgttgctgaaaataaagaaatccagaaattggcagagcagtttgcctcctaatctggttatgaacaactgacaacaccttctcctgatgccagttgtccaggattatgtttgttgacccatctctgcagttagaccgtatactggaaatttcaatcgcttttgctaccaacctgcaatnagcttgtg

SEQ ID NO: 3551 - DNA, 532 bp, Homo sapiens
  misc_feature 219, 254, 409, 435, 451, 467, 495, 503, 521: n = A,T,C or G
accacagttcacaagtgcaggagagaattttgataaattgttagctggaaagctgagagagactttgaacatatctggaccacctctgaaggcagggaagactcgaaccttttatggtctgcatcaggacttccccagcgtggtgctagttggcctcggcaaaaaggcagctggaatcgacgaacaggaaaactggcatgaaggcaaagaaaacatcanagctgctgttgcagcggggtgcaggcagattcaanacctggagctctcgtctgtggaggtggatccctgtggagacgctcaggctgctgcggagggagtggtgcttggtctctatgaatacgatgcctaaagcaaaaaaagaagatggctgtgtcgcaaactctatggaagtggggatcaggagcctgcnaaaaggagtcctgttgcttctggcanacttggcacccaattnttgaacccaccatganatacccaccaaattgctaattttgaaanatctcaanggctatagtaaaccgagncattaaaccca

SEQ ID NO: 3552 - DNA, 512 bp, Homo sapiens
  misc_feature 415, 417, 427, 438, 478, 511: n = A,T,C or G
accctttggatttcaaacagtaacatcggatgtaaacaaacttagttccttttactcactgaaactaatcaagcggctctacgtagacaaatctctgaatctttctacagagttcatcagctctacgaagagaccctatgcaaaggaattggaaactgttgacttcaaagataaattggaagaaacgaaaggtcagatcaacaactcaattaaggatctcacagatggccactttgagaacattttagctgacaacagtgtgaacgaccagaccaaaatccttgtggttaatgctgcctactttgttggcaagtggatgaagaaatttcctgaatcagaaacaaaaagaatgcctttcagagtcaacaagacagacccaaaccagtgcagatgatgacatggagccacgttctgntnggaaacttgncagataattgnagatcatagagcttcttttcaaatagctctcacatgtctnctctcccaggtgtggaggtgatcacagcttgana

SEQ ID NO: 3553 - DNA, 657 bp, Homo sapiens
  misc_feature 547, 578, 597, 638, 650: n = A,T,C or G
acttcagacaggatcccaacccccacccaaattcaatgtcgaccgtctgagcagccagcttcattggctgcaaacgcctctctcaggtgagtcaaaggagacacgacggggaaccagggggccctaggtgaggatgtcatgggcctggtgctccaccagcatctccatgctcttcacatccgtgcaccagaactccaggcggtccttcattcccttgatctgttgcaaatccaacactcggggctgcacccaggtcatgtggactcgtttgtccacctcgtctatactgcctttcaccagccccaccgaaagggccttcatcaccagaagctccacctcattcactgtgattttagcacttttggcaatttcttcaaaagtgagttgtctgtgattggcaggtcgtgtgaaagtcatctccatgaggcacaacaactgaattttcctcagaagctgggcttcattagctgctaaatcaggctgctggccccaggcaagtcttcagagtctggaaccgctctacgttgccactgttgaaggcataganggtgtcaatcagccactgccggtcagtattnctcagggactccagcacanggtgcatgaagagtctccaaagttaaaaactccctcccganaagtcctgctancccaacg

SEQ ID NO: 3554 - DNA, 449 bp, Homo sapiens
  misc_feature 77, 78, 93, 112, 199, 240, 269, 278, 279, 304, 330, 338,345, 356, 369, 373, 374, 377, 390, 395, 401, 424, 447: n = A,T,C or G
actttttcccctaattccaacactagtttatatatatagcgaataaatctagttgtataaatttttaaatgccgtcnntaaaaagcacacaangttatgatttttttaattnctggcttctgatttctttcacttctgatccttttcctttttctcagatgtagctgagtcttgatcattttaagacaacgatgggtangaattttgagattaatgttaattttccctttttgttaattncagtcccctctcactatgcttttgtccanaaggatcanngaattctaccatcccttgggtcttngttataaacaatgttaaataaaggtngactcagnctttaanatattagacantttttttaatccntggnntgnaaatattaacatnacttnctatanaatattttggcttcgaactatanctcaaatagtttttatttggatnca

SEQ ID NO: 3555 - DNA, 536 bp, Homo sapiens
  misc_feature 458, 468: n = A,T,C or G
acgcggggaggttggggtgaccaactcatctggactcagacatatgaagaagctctatataaatccaagacaagcaacaaacccttgatgattattcatcacttggatgagtgcccacacagtcaagctttaaagaaagtgtttgctgaaaataaagaaatccagaaattggcagagcagtttgtcctcctcaatctggtttatgaaacaactgacaaacacctttctcctgatggccagtatgtccccaggattatgtttgttgacccatctctgacagttagagccgatatcactggaagatattcaaatcgtctctatgcttacgaacctgcagatcagctctgttgcttgacaacatgaagaaagctctcaagttgctgaagactgattgtaaagaaaaaaatctcaagcccttctgctgtcaggccttgaacttgaaccagaagaagtgtganaaactgctangtggaacataggaacacactgattaggtatggttatgtacaacacttttttaaaaaacagtttaaaat

SEQ ID NO: 3556 - DNA, 519 bp, Homo sapiens
  misc_feature 61, 79, 84, 104, 145, 354, 356, 362, 375, 378, 423, 442,477, 484: n = A,T,C or G
actttttttttttttttttttttttttcaaaataacaaaaaatattttactaaaacataanatttacagaagtttccanacaanccatacaaaatggtcacaanctttttttgaaggggggaatctacacttgacagcaatgttnttagtgagggctgtgatgtttgtttaatgttcccattttggttccaacaatcaagcttgtccatctacagcgttaaataaagttagacttggctagagcatattctaaagacctggttagctgcttttaaccaatgcaattagatcccaaaaaagggggaaaggacccataaaattaaactacctcccccctcaaaataaaattaaatnanataaanaaaaacccccacnccntgcactacctgacactccttatcacagtgcttatcttaaccaggntgggggaaatgaataaacngggagggccctgttttaaacgttcacacatccaangaacttntaccttgtatgctttgacgggatcaggacaaacta

SEQ ID NO: 3557 - DNA, 518 bp, Homo sapiens
  misc_feature 58, 61, 86, 88, 90, 140, 182, 212, 331, 379, 424, 425, 447,453, 458, 468, 478, 518: n = A,T,C or G
acttttttttttttttttttttttttttcgacacctgccctttattggtctcttctancanagtggctccaggcccttcacgcctntnanacaccacccatgagggtttaggaaggtgccatcattctgtgaaggcccanagcttacccaagtcttggagcccaagttgaatcaccaaccanagggttgggagaggaaaaggaaacaggcanaggggaaaggcaaggctctgcagtgaaggggactgatatcaagggaatgctgaggtccaccagtgtctcctgaaggcatgctgcatcctaaggctcctcaggactggatggagtagganatctgtgtgttgagcagttcacatctatatggcaactttaaggaggcncttgattcaggctcaatgttatggttgggaaggtccgctgacctnngaagctctcctccgcccttgangaactntaagntcagcccatntgacggccanaggctccaatataactgggatcggctgaggaaatgggtcn

SEQ ID NO: 3558 - DNA, 497 bp, Homo sapiens
  misc_feature 345, 398, 431, 439, 450, 465, 472, 477, 485: n = A,T,C or G
acagcctgtcctcccacccaggaacaccctctgcctaatgacaggaccttcctgggaagcatcttgacagcagtggcagatgaagagccagaatcaactcctgtgcccttgcttggaagtgacaagagtgctttcacccgagtagcatcaatggtttcccttcagcccgcagagaccccaggcatggaggagagcctgcagaaatgagtattatgactactgagcttcagagtctttgttccctgctacaagagtctaaagaagaagccatcaggactctgcagcgaaaaatttgtgagctgcaaagctaggctgcaggcccaggaagaacagcatcaggaagtncagaaggcaaaagaagcagacatagagaagctgaccagccttgtgcttgcctncaagatgaaaaggactcagaaagtgatcagcanctaatganagatctagacnatagacaagatggcnactatancttanaaggaggnaccacttccgtt

SEQ ID NO: 3559 - DNA, 651 bp, Homo sapiens
  misc_feature 612: n = A,T,C or G
acgcgggctcattttaaaattggtgctttccacaacatgcatcgagaccatcttggagcatttacttttgaagcattttgtttaagaccccggataagaaaatgagggcaaaagaggtgaagtgacttgtccaagatcaacagtgaattattagttggaacgccagcctgatactcctagctatatctcactggaaaagcattggagaaaatgaaaccattttaatattctaagcttaaataatagttataataggattataggcgtgagccaccatgcccgaccagtttctgcttttattaaaattgttcacagttttatacattcatgttcattaaaaatgctatttagaaaagagtttgataaaataaatattatacaaaattcgaagaaaaaagaaaagagtttctgtttcagtcacaaattagggttattgtgatgtgtatttatgatgaccgttgaacaaatgtgaagaatactgtgaattctatgactttatcaaaaatcagtcacatccaggagcttgcagttgttgaccaaatgaatgatgacatagagtagttcagatctatcatgtgctcttctatctaatcaagcaatatttcctttggncctcagccaacattcattttttatgataaccttcttcat

SEQ ID NO: 3560 - DNA, 655 bp, Homo sapiens
  misc_feature 161, 502, 508, 524, 592, 597, 604, 634, 638, 642: n = A,T,C or G
acagtcattagatagccggagtgtaagtgaaatcaattcagatgatgaattgtcaggcaagggatatgctttagtgcctattatagttaattcttcaattccaaagtctaaaacagttgaatctgctgaaggaaaatctgaagaagtaaatgaaacattanttatacccactgaggaagcagaaatggaagaaagtggacgaagtgcaactcctgttaactgtgaacagcctgatatcttggtttcttctacaccaataaatgaaggacagactgtgttagacaaggtggctgagcagttgtgaacctgctgaaagtcagccagaagcactttctgagaaggaagatgtttgcaaggtaactctaacagttgaatttctgaatgaaaagctggaaaaaagggaggctcagttattatctcttattaaggaaaaacacttctagaagaagcttttgataacctgaaagatgaaaatgttcagagtgaaagaagaaagcattancatttnttccttgaaagatgantttactcaaagaattgcagaagcaggaaaagaaagttcactttcctgcaaagagagagatgctgcttnaaaangaaattnaaaaacataaaagaagaaccttgccactanattnaatngtaatgaaactgc

SEQ ID NO: 3561 - DNA, 242 bp, Homo sapiens
acaatgttgaacaaaagaccacagggggaccttttgttcaaagtagcaccaatccacacctgattgtgtttccaacattaaccttcctgttgactctatcattggcactttgaatggaacttctcctgctttagtgaggattcctacgctgactaagcacactgtgttgctaaactctctacaaagtgtggcagcatcaacccgggaaatggcacatttgaaccaggatcgccctcccgcgt

SEQ ID NO: 3562 - DNA, 413 bp, Homo sapiens
  misc_feature 144, 178, 180, 251, 311, 317, 322, 323, 331, 343, 353, 354,362, 379, 385, 387, 391, 393, 409: n = A,T,C or G
acactgaaacataaatccgcaagtcaccacacatacaacacccggcaggaaaaaacaaaaacagcaagtttacatgatccctgtaacagccatggtctcaaactcagatgcttcctccatctgccaagtgtgttctggatacanagcacatcgtggctactggggccacactcagctnangctgtgggtccacaagagcactcatctggctgggctatggtggtggtggctctactcaagaagcaaagcangttaccaacacattcaaactgtgttttgaacatcttttaatatcaaagtgaagaaacaanaaggcnacatnntaatgttntctaaaagatgntaggaagtanngacagctntgtaaaacttgaggctnaaaagntnttgncncttcaatttttggttnatgg

SEQ ID NO: 3563 - DNA, 451 bp, Homo sapiens
  misc_feature 114, 166, 244, 315, 322, 337, 345, 347, 356, 378, 392, 416,422, 431, 434: n = A,T,C or G
acatgacaaggtgcggctccctaggcccctcccctcttcaaggggtctacatggcaactgtgaggaggggagattcagtgtggtgggggactgagtgtggcagggactccccancagtgagggtctctctcttcctcttgtgctcttgctggggctggtggtccangggtcttactccttggaggccatgtgggccatgaggtccaccaccctgttgctgtagccaaattcgttgtcataccangaaatgagcttgacaaagtggtcgttgagggcaatgccagccccacgtcaaaggtggaggagtgggtgtcnctgtgangtcagaggaaccacntggtgctnantgtacccangatgcccttgaaggggcccttncgaccctagttacnacttcttgatgcatcatatttgcnagtttntatactcangtnagtccacactgcacgtt

SEQ ID NO: 3564 - DNA, 505 bp, Homo sapiens
  misc_feature 35, 42, 170, 175, 206, 217, 330, 359, 382, 394, 402, 430,437, 442, 443, 459, 464, 494: n = A,T,C or G
acttttttttttttttttttttttttttctagganaatttanctgttctttattgacatggaatttggggtggcgagggtagccacaccctccaggaggatgaggtaggttcagtgcttccagctcacacctttcctgggtcttccttcagtgtgacagttcggttaaanacaanctttccctgatggctgtctggatccacgganaaatatccaanacgctcaaactggaacttgtcgaagggttttgccagggccacagagcagtccactaatgctgcatccaccacgtgtagtgatgccaggttcaggtcacttaaaaatccccagncacctcagtaggatcttcagggctcttgngctggaatagtcctcatagagcnacctcacacatnaaggctgngaccccagtgaataaagccttggctttntcacatntgccnntgaggtacctcaactnttacnaaccctggggcccttgaaacatgctgactnaatgactacct

SEQ ID NO: 3565 - DNA, 653 bp, Homo sapiens
accataaggagacacaagaagaaaggtgacactaaggctacagtgcacagaaaacagaccaggtgtggcttcgactgtgcggacctgcccactagcctatgctacagatttgaaatgtctttcactttgacatgacacacggtttatattacacaaaatgaatgaaacgacaatggctaaaaataaatgagacagcctgcacacaaaaagatgatgactgctactttcctcccatcagaaaattactcaaaaagggagtatttaaaggaaactcaaatcaggagaacccggtaggcatcagaggttcagggcaccaaggccttagggcgggaacacttttcaacccaagccaggcttcaggggcaagcccaccaacagaccccaatttccacaggggaggcagatcttctatacctacagtgacagaaaatacactgaagtgcagtataaaatataaaaaggtttgattctgaatagaccaactgctaattttccttaaaaaaatttttaatttgggtttgagtaaaaaccaaattagttcacttgatctcattttgtaggtaagaatcttatttgcaataccaaaaactggagcttatgactgctttgattttctctgtagcacaggataccagtattagtgggagaacact

SEQ ID NO: 3566 - DNA, 652 bp, Homo sapiens
  misc_feature 81, 209, 231, 262, 288, 355, 505, 521, 541, 558, 561, 587,600, 604, 609, 612, 641: n = A,T,C or G
acagtctataatactccaacagtctcccatctgtattcaatggcgccacccaatacagtcctttgtttggatgctgggganagtaatccctaccccaagcaccatatagataagaaaaccctctccagttgagctgaaccacagacggtttgctgatgttcaccacaccaccatgaccacagctccctggagtgggaggagggtggacnacaggggtgttttgatctttanaggcctcacactctttcagcttggtcttcanagccacgatttctcggcgaatggcanggacattgtttttgtctagtgtctcaagcttctctaccaagagagtcatatttcttatctccacctncagctggtcaacaatttctgagcttccaccaaaactctccttcagctgtatgaccagtttttccatctccttcacttctaccttgatcagctcgaagtccagttcagtgtaagaaatggtatccttctccatgatgtcaattcggacagntaggtttaacagtttnttttcatacacactaattanttggacatattccctcnctntggaaagttcttctcaaacttctganaaagaacatgaanctgngaatnccnagcgttccactctgttcacgggaaaaggnggtgtctggca

SEQ ID NO: 3567 - DNA, 656 bp, Homo sapiens
  misc_feature 261, 416, 423, 448, 451, 454, 461, 496, 506, 508, 512, 519,528, 582, 588, 612, 613, 620, 633, 639, 646, 655: n = A,T,C or G
gtacgcggggttgaaaaatggcgactgtggcagagttgaaggctgttttaaaggacaccttggaaaaaaagggggtattagggcatttaaaagcaaggatccgagctgaagttttcaatgccctagatgatgaccgtgaaccccgaccatcattgtctcatgaaaaccttctaattaatgaattaattcgagagtatttagaattcaacaaatataagtatacagcatctgtcctcatagcagaatctggtcaacctgtanttccgttggacagacagtttctcatccatgaactaaatgcatttgaagaatcaaaggataatacaatacctcttttatatgggattttagcccatttcttgcgtggaactaaggatggcatccagaatgcatttctgaaagggccttcacttcanccttcanacccaagtcttggcagacaacctantanaanaaagccnatggatgaccacctatgaaaggaggaacataaaantacctgcccngncggncccccgngcaggtacncgggctgttcaactccagtgcacttgggtcccctggtgttccaccccctccaancaagantcggatcaagtgcgtcatggaagnntcacacngaaaaaactgtgnttcccnggccttnacccccgang

SEQ ID NO: 3568 - DNA, 653 bp, Homo sapiens
  misc_feature 355, 508, 538, 632: n = A,T,C or G
acccaccaccatgcctggctaattttttgtatttttagtagagacaaggcttcaccatgttgtccaggctggtctcatctcctgacctcattatccgcccgcctcagccttccaaagtgctgggtgggattataagcatgaaccaccacacccagcccctttttaaactcttaaacagacactggattctatgtatcaaaaggaaagttgatgaaaatattacaaccaacctggtttttgtttgttttaataaaggaactagaagatcttctgccatctagaccggaagttcctaacataattggagaaacagaggaggtagagcttcaggaatttgatagcactcgaggctcangaggtggtcaagaggcgtgaagcctataatgatagctctgatgaagaaagcagcagccatcatggacctggagtgcagtgtgcccatcagtaaactctgcaaacaaattgcacaggtggattttctttccacatttgcctgatttgttctcancaatccagctggagtgtcttatcaatccanatgaactgagggacatctgttggctatgtttaacttttaaaattggtatagtatctacagaagtgtataatttaaactaaccacaaagctttanatcttcattttggctgtccat

SEQ ID NO: 3569 - DNA, 227 bp, Homo sapiens
acgcggggacaacatgaagaaagctctcaagttgctgaagactgaattgtaaagaaaaaaaatctccaagcccttctgtctgtcaggccttgagacttgaaaccagaagaagtgtgagaagactggctagtgtggaagcatagtgaacacactgattaggttatggtttaatgttacaacaactattttttaagaaaaacaagttttagaaatttggtttcaagtgt

SEQ ID NO: 3570 - DNA, 530 bp, Homo sapiens
acgcggggatcccggagttggaaaacaatgaaaaggcccccaaggtagttatccttaaaaaagccacagcatacatcctgtccgtccaagcagaggagcaaaagctcatttctgaagaggacttgttgcggaaacgacgagaacagttgaaacacaaacttgaacagctacggaactcttgtgcgtaaggaaaagtaaggaaaacgattccttctaacagaaatgtcctgagcaatcacctatgaacttgtttcaaatgcatgatcaaatgcaacctcacaaccttggctgagtcttgagactgaaagatttagccataatgtaaactgcctcaaattggactttgggcataaaagaacttttttatgcttaccatctttttttttctttaacagatttgtatttaagaattgtttttaaaaaattttaagatttacacaatgtttctctgtaaatattgccattaaatgtaaataactttaataaaacgtttatagcagttcaaaaaaaaaaaaaaaaaaaaaaaaagt

SEQ ID NO: 3571 - DNA, 652 bp, Homo sapiens
  misc_feature 582, 589: n = A,T,C or G
acaggctgaacagaattgagaatgccttgaagacaatagaaagtgccaaccagcagacagacaaactgaaggagctttatggacaagtgttataccgtttggaacgctatgatgaatgcttagcagtgtatagagatctcgtccgaaactcccaagatgattatgatgaggagaggaaaacaaacctttcagcagttgttgcagctcaaagcaattgggaaaaagtggttccagagaacctgggcctccaagaaggcacacatgagctgtgctacaacactgcatgtgcactgataggccaaggccagctgaaccaggccatgaaaatcctacaaaaagctgaagatctttgccgccgttcattatcaagaagacactgatgggactgaggaagacccacaggcagaactggccatcattcatggtcagatggcttatattctgcagcttcaggggtcgaacagaggaggctttgcaactttacaatcaaataataaaactaaaaccaacagatgtgggattactagctgtaattgcaaataacatcattaccattaacaaggaccaaaatgtctttgactncaagaanaaagtgaaattaaccaatgcggaaggagtagagtttaagcttttcaagaaacaactacaagct

SEQ ID NO: 3572 - DNA, 653 bp, Homo sapiens
  misc_feature 500, 543, 552, 604, 618: n = A,T,C or G
acttctcagaggtatttgcagcttgatgcaaagtagtctctaatgagtaggcattcaggtggttcttcccagcaggtggagaagaaagggaggagatgaagaacactgagaggggagtggcaccttcccaggctgcccagctcagtctcttgccctgttcctgtgactcagctgcccactcccccaactttgtttccctccctcccagtctctgaaagtgtcaggtgtttctctcctcacagtctcttttgcagcaacagtaagacaaaattcaaggcagccttttaaagttaccgaacagttattagcatgtatttacagacctaagcagaatgagagtttatacattgtttttagttgcctgtatttatagccaaaagtatattaccttaaagttgagatctttctcttcttttcctaaattttggtaaagtgtgcttcatgaaacaaacatctggaaaactccaagtataagagaccctggactgatgatggcccanccaagtatatggagggacaagagttctctctgtcattaatgangacatcggntttcacaattgaacctcattgcactgtccacagcatctcacctaactcctgnatctcctgatctgntttaaaaatagttagttaggctgccttttacacca

SEQ ID NO: 3573 - DNA, 651 bp, Homo sapiens
acaaactatgcatatcataactaccagcttcatgaggtcaagactaaatcaaaaattctcaaggacttttctaaaaatttttttagcataaactgtttcctctaacttaaacttctcttaagtgaacctgtctttccactgggatgactgtctacatgctcaggaatcctgaattcatgactatgttcaactcccacgaccatttttaaatcatcaaaatggcagcaaatgtcattacctggaccaaaaagctgcaggttttgtggcaaatgggaaatgtgttatagaatatgactgggaaagagggatttcttagtgctgcccagaattaattcagcaaacactgaacattactacgtgccacatataggatcatactgcatttcaggtcaccatcaaaggtaaattacaaggctgggcgcagtggctcatgcctgtaatcccagcactttgggaggccagggcaggcggatcacctgaggtcaggagttcaagaccagcctgccaacatggcgaaacccccgctctactaaaaatacaaaaattagccagcatgctggcatgcgcctgtagtcccagctacttgggaggctaaggcaggaaaatcgcttgaacctgggaagtggaagttgcagttagctgaaatggccc

SEQ ID NO: 3574 - DNA, 432 bp, Homo sapiens
  misc_feature 374, 414: n = A,T,C or G
acgcggggcggccaaggtgccggccgacaccgaggtggtttgtgctccccctactgcctatatcgacttcgcccggcagaagctagatcccaagattgctgtggctgcgcagaactgctacaaagtgactaatggggcttttactggggagatcagccctggcatgatcaaagactgcggagccacgtgggtggtcctggggcactcagagagaaggcatgtctttggggagtcagatgagctgattgggcagaaagtggcccatgctctggcagagggactcggagtaatcgcctgcattggggagaagctagatgaaagggaagctggcatcactgagaaggttgttttcgagcagacaaaggtcatcgcanataacgtgaaggactggagcaaggtcgtcctgcctatgancctgtgtgggccattggt

SEQ ID NO: 3575 - DNA, 205 bp, Homo sapiens
actgaacactgtaggaaattgtaacaaaatgttaagtatttatgagtctaaacacagaaaatacacagagtaaacatgcagtataaaagataaaaaaggatgcacctgcataggacactccatgaacatagcttgcaagactagaagttgctctgggtgagtcagttgagtggtgagtgaatgcgaaggcccaggatgttactgt

SEQ ID NO: 3576 - DNA, 653 bp, Homo sapiens
  misc_feature 393, 491, 550, 555, 566, 573, 577, 586, 614, 634: n = A,T,C or G
acttgccatgaaaatgccctggggaccctctgacgacactgttgggatggctgaggcacctgttcccttttggtcccaccggtggcctaaagtgtggtctcagagtgcttgtcttctgctgctcactgggtggggcttgtgagcatctgttctctcttcctaggatcgcagaagaactgcagcttcctggggagcagtttcacctccacaggcatcgcttcatactcctcactgtcaatgctaaaagagccccctgctccctccgggataagcaaagtgcactggctggcttggagacactccgtgccctccacgtgcagcttggggtttctcacctttcgacttcctatagttataaagtctcctttgctgatggtgtcaggttcaatgcanatattcagaaaatcttctttgcttgtcgggtcaagctgattattccgtgttgtgatggacagttcaatggtggacagctgcacatctttccagacctncgggctcacctcttgggaaagggcatcctgtggttgtgcccagtaggacgcaagccttngtaanattctcctgcncaagaanatanaaagaccantccttgctgaaagacaagtctgaatgcnccactttttcaattctctcnccattcttcaataattcaa

SEQ ID NO: 3577 - DNA, 590 bp, Homo sapiens
  misc_feature 342, 570, 581: n = A,T,C or G
acgcgggacacttcctggtgggatccgagtgaggcgacggggtaggggttggcgctcaggcggcgaccatggcgtatcacggcctcactgtgcctctcattgtgatgagcgtgttctggggcttcgtcggcttcttggtgccttggttcatccctaagggtcctaaccggggagttatcattaccatgttggtgacctgttcagtttgctgctatctcttttggctgattgcaattctggcccaactcaaccctctctttggaccgcaattgaaaaatgaaaccatctggtatctgaagtatcattggccttgaggaagaagacatgctctacagtgctcantctttgaggtcacgagaagagaatgccttctagatgcaaaatcacctccaaaccagaccacttttcttgacttgcctgttttggccattagctgccttaaacgttaacagcacatttgaatgccttattctacaatgcagcgtgtttcctttgccttttttgcactttggtgaattacgtgccttcataacctgaactgtgccgactcacaaaacgattatgtacctngccggaacacnctaagggcg

SEQ ID NO: 3578 - DNA, 652 bp, Homo sapiens
  misc_feature 334, 438, 442, 508, 567, 569, 586, 614, 619, 620, 650: n = A,T,C or G
acgcggggtcccatggctggccagaggaggaacgctttgtgttctcatcggagctgcatgggaagtctgcatacagcaaagtgacctgcatgcctcaccttatggaaaggatggtgggctctggcctcctgtggctggccttggtctcctgcattctgacccaggcatctgcagtgcagcgagacccatccactgtggaggacaagtgtgagaaggcctgccgccccgaggaggagtgccttgccctcaacagcacctggggctgtttctgcagacaggacctcaatagttctgatgtccacagtttgcagcctcagctagactgtgggcccanggagatcaaggtgaaggtggacaaatgtttgcttgggaagcctgggtttgggggaggaggtcattgcctacctgcgagacccaaactgcagcacatctttgcanacanaaggaaaggaactgggtatcttgtgaccacccccgtccagctagtgcctgcaggaacattctgganaaaaatcaaacccatgccatcttacaaaaacccctctcttggtcaatgatttcatcatnanaaacccatcctaacatnaacttccaatgtcctaccactggacatnaaatnncctccaacttgccttcacccattataattncc

SEQ ID NO: 3579 - DNA, 652 bp, Homo sapiens
actgggtccaattcctgtgatctcttttttgatcagctgtaactccatatgttgtatttttattcttactaataagaagtaaatttttccaacaatcacatcctttaaatgatactttgatttattatattcaaattctatatgtagacaatcttcaatgcccacttccatcttaatagagttgttaacatcaggataggtggcaagctggtgaacaataagatcatactcttttaccaaatctgtcagtcttctcactattgtcactttaagaaaatacctcaagcggacattggcaccgatgtaagattcatatggcttttcaacttgcataaattcaaaatcataacttctgctctgagtcagttctccaggtaaggctagttctttcactaggtttacaaattcatgagtattactcttgtcattgaaaagttcaatttgacctacaaattcaattctaattccttggtgttctacctctttccaggttgcttaaaggctaggtttacctttcctgaaacggattctccgcatagaaagagatagtgtttttctactttgccatcttcagttttcatttctgccattttcctggtttccccatcattaagaacaatatcgatctcacaaattggaccaaaaaagcctc

SEQ ID NO: 3580 - DNA, 651 bp, Homo sapiens
  misc_feature 547, 588, 608, 613, 645, 650: n = A,T,C or G
acttatttcaaactgggacaattggaatcactggtcatctaagaggaatattaatatctaccatatttaacaataaaactaatagtttcctccatttagtgaaaaaattaggaactttttaaaaaacatagtaacgtcaatattttataaattatttcaatttccatttgtagacaatgtgctttgaaactctgggcaaacaatctccttggtggtcaggtttatttgttagtttacattcaaagttgaaatattcactagagactttggttaaattaaatagtatcactatgctctattagatctgatgttctcaaatatttatgagcctcaacattttaaaaattaaaaaggaaatgattgcacaattctttgatctaattgtacaaatatttaagagtgttgattgggagtaagggaatgtcaactgccaataaagtggaagatgaaagaataggactttcacagagcatatttagttatgggtctctgctcctcccccacagaaaaactcccagacattcatgacttcatccccctgctgcanataggccatatttcctgccccctggctcttcacctcaaaanggttatctttcccccactancaaanaaccctcaggacacacaactcatactggccanctaanc

SEQ ID NO: 3581 - DNA, 341 bp, Homo sapiens
acgcggggaagatggcggcgcacaagtcaggtccggcacatgtttccgcggagcggacccagcaatgacggatgatatcacctcttcttctctggtgagagtctgaggatagagacttttttctcaccatgaatgtcaccccagaggtcaagagtcgtgggatgaagtttgctgaggagcagctgctaaagcatggatggactcaaggcaaaggcctcggccggaaggagaatggtatcactcaggctctcagggtgacactgaagcaagacactcatggggtaggacatgaccctgccaaggagttcacaaaccactggtggaatgagctcttcaacaag

SEQ ID NO: 3582 - DNA, 651 bp, Homo sapiens
  misc_feature 265, 286, 445, 458, 461, 463, 475, 543, 549, 587, 588, 591,606, 608, 630, 639: n = A,T,C or G
acacatggaaaagacatgatcaccaagtgaaaacaatctaaccagaaagctttaacgtctgtcagttaagctgaagctgaaattctgggagcatgacatgctgcagggccaaaaggaatggataattagtattcctctccttcttcctcaccctctccttcaacagaatccacaccaacctcctcataatccttctcaagggcagccatatcttcacgggcctctgaaaactcgccttcctccatcccctcacccacgtactttnttttttttttttttttttttngcatcaaaaagctttatttccatttggtccaaggcttgttaggatagttaaaaaagctgcctattggctggagggagaggcttaggcaaaacccctattactttgcaaggggcccttcaaaagtccgctgggctcaaaaggctcttaatcgtgcttganagtgagcctttcnaananatactcgcccancccacctcgggccgccaacctggggaggttggcaggtggcacccatcttttgataagcttacttcctnatctangaagtgagtctccaggaagtcacaaaaatgggggtccnngcnggcaaaacccaggcntnaaaatccaaaagggcctggttnaactttttntccagggccatg

SEQ ID NO: 3583 - DNA, 652 bp, Homo sapiens
  misc_feature 385, 553, 566, 580, 588, 599, 600, 613, 626, 628: n = A,T,C or G
acagaaagtaaaaatgctgttacaatctcagtgtaactggtagccacagacggttgactcaccaatcacagctatccacgctacagcaagaatcttacacaaaaacctaacaacgcttacaattttgttggggtgaagtccacaagcttggtggtagattaccaagagggactacatggaaggaaggcggaatgtcacaggaactattctttggctctttgggtgggtgggtgtcctggggtttgtatcacagctacctttttttttttaaacagctacaaaatccatgagcagtccaaccaatactgaacagttctgtttctgcaggtcatctggggtcttaatcatcttctccttcatcatctgtttctctcttcctcttttnacctttcccaccttcttcctcctcttcatcctcatcctcatcttcatcttcttcatcaagtccaaattcttcttcctcctcactgacttatcgtcgtcctcatccccttctacatcttcatcttcatcatcttcttcatcaaactcctcttttcaccatcctcatcgncctcgtcttcctnatcttctcctcttnggcctctnctttttaatcnnaaccatccacctnggcttttgatcangngcttcctggtccctgtcggtcata

SEQ ID NO: 3584 - DNA, 537 bp, Homo sapiens
  misc_feature 497: n = A,T,C or G
accgaccatagagcaagaatcaagattctgctaactcctgcacagccccgtcctcttcctttctgctagcctggctaaatctgctcattatttcagaggggaaacctagcaaactaagagtgataagggccctactacactggcttttttaggcttagagacagaaactttagcattggcccagtagtggcttctagctctaaatgtttgccccgccatccctttccacagtatccttcttccctcctcccctgtctctggctgtctcgagcagtctagaagagtgcatctccagcctatgaaacagctgggtctttggccataagaagtaaagatttgaagacagaaggaagaaactcaggagtaagcttctagcccccttcagcttctacacccttctgccctctctccattgcctgcaccccaccccagccactcaactcctgcttgtttttcctttggccatgggaaggtttaccaagtagaatccttgctangttgatgtgggccatacattcctttaataaaccatttggt

SEQ ID NO: 3585 - DNA, 596 bp, Homo sapiens
  misc_feature 394, 548, 591, 592: n = A,T,C or G
acgcgggaacgtaacaatcaacttgccaatactgccttctcttccgatagctacgttctccgtcctattttaagaactcagttcttcataagacttgtgtggttttcgattttttcccaagtctggttgatccttgtgttgttatttttttaaatgtgtatcgtctgttcagctattttgcaggagtcgcattcttaaaaaaatcttaaccctatcaaaaattgtgtttgtttaaaggaggattattcagattggccagcttttactaggaagagtgtaaatgctgacgtatttaggtagctctaaatactgagcaactttattctaaccacaaaatagatagcctttcttttgtcttcactttcactatcattagcacagtgtttaataccgnttcttcatctataacacaattataatgatataggaagccactcaaataaggcagacatgttgcgttgcgcttaaaaaaaaaaaagaagtctctctgtggcacggaatgaggtgtggctcgaatctagaatctccagtgaaaaccaatgaaaganggtgaaaccccgtgtctatcaaaaaaaaaaaaaaaaaaaaaanncctt

SEQ ID NO: 3586 - DNA, 372 bp, Homo sapiens
  misc_feature 6, 176, 194, 208, 230, 237, 256, 265, 271, 273, 277, 279,301, 308, 315, 320, 327, 333, 335, 338, 371: n = A,T,C or G
gtacancctggcaaaagttaaaaggggtgtggcagctcccatcaggtctggaggtggtctataagcacagttgacagttgtgcattgggatgggtggagaaagacgacaagagagcagagaatctgctgatgtggctgcgcttacttttagtgactttatgtactttttttttttnttttttttttttttcganactacctccccggntcgggagtgggtaatttgcgcncctgctnccttccttggatgtggtanccagttttnaggctncntctncngaatcaaaccctgtttcccgtnacccgtngtcaccntggtnggcacgnagattncnttnaaaagtttatagggcaaaccttcatatggttcnt

SEQ ID NO: 3587 - DNA, 650 bp, Homo sapiens
  misc_feature 594, 624, 633: n = A,T,C or G
actgccaaggacaagttgatttctggccaggcaaagttaactcagttttttagactataaatttgtgtcttatatgctttaggtttatgtatctataaaccattcaccaaagacatgcttaatttttaagagatcaaggtgtaaattatgatgatttattattttggtctacagtgtatgtaaggttagtatgttaagcattgtttaaaaatactagtaagtcataattatgcagaattttcacaaagtttaatgcacagagaaagcatatcatttcagttactgatacatcttaacactactttcttttaaaacagacatttaacatacacaagttatagtagcagtatggacttctcctcccattggcaattaaatgcttttattttcttctgaaaagatgatgtggaccaacaggtatcagacttgccaacaaggtcggtagactcttcccagcatacatctgagcactgaaggaagaagaaagtttaaattgtttaaaggactataattatcacacaaaatttattaagaaaaaaagaatggatctagtataactaattctgagtaaaccaaaatgataataattaattngtgctatttaatccccattttttggcaggngtaattganccatgggcttatttgat

SEQ ID NO: 3588 - DNA, 422 bp, Homo sapiens
  misc_feature 364, 412, 418: n = A,T,C or G
gtactttttaaatcatgttccccctaaacatggctgttaacccactgcatgcagaaacttggatgtcactgcctgacattcacttccagagaggacctatcccaaatgtggaattgactgcctatgccaagtccctggaaaaggagcttcagtattgtggggctcataaaacatgaatcaagcaatccagcctcatgggaagtcctggcacagtttttgtaaagcccttgcacagctggagaaatggcatcattataagctatgagttgaaatgttctgtcaaatgtgtctcacatctacacgtggcttggaggcttttatggggccctgtccaggtagaaaagaaatggtatgtagagcttanatgtccctattgtgacagagccatggtgtgtttgtaataataaaaccnaagaancctt

SEQ ID NO: 3589 - DNA, 331 bp, Homo sapiens
acggggcaggattatgtttgttgacccatctctgacagttagagccgatatcactggaagatattcaaaccgtctctatgcttacgaacctgcagatacagctctgttgcttgacaacatgaagaaagctctcaagttgctgaagactgaattgtaaagaaaaaaatctccaagcccttctgtctgtcaggccttgagacttgaaaccagaagaagtgtgagaagactggctagtatggaagcatagtgaacacactgattaggttatggtttaatgttacaacaactattttttaagaaaaacaagttttagaaatttggtttcaagtgt

SEQ ID NO: 3590 - DNA, 651 bp, Homo sapiens
  misc_feature 376, 477, 500, 556, 604, 624, 627, 648, 650, 651: n = A,T,C or G
acgcgggggccggagaccgtcgtcgctcttgggaatccttggccgcccagacagaagggaagtaggcgccggagagcccgttctgcattttgattcatctcgggccctattagaatcccaagaaaatcaaatggcatccggggatttctgctcacctggagaagggatggaaatacttcaacaagtgtgcagcaaacaacttcctccttgtaacctgagtaaagaggacctgttacagaacccatacttcagcaagcttctcctgaatctctcacagcatgtggatgagagtggcttaagcctcaccctagcaaaggagcaggctcaggcatggaaggaagttcgactgcataagacaacatggttgaggtctganattttacacagagtcattcaagagttgcttgtggactactatgtgaagatacaagacacaaatgtaacttctgaggacaaaaaggattttgtgtggatganggctcggctacagcaagaagtanaggagcagctcaaaaagaaatgtttactctgctctgctactatgatcccaattcanatgctgacagtgaaacccgtgaaggcagcaaaggtgtggaaactccanaggtcctggtgggtgaacancancatgccaggatccaagaccancnn

SEQ ID NO: 3591 - DNA, 652 bp, Homo sapiens
  misc_feature 62, 222, 273, 449, 462, 524, 533, 538, 569, 583, 585, 614,639: n = A,T,C or G
actttttttttttttttttttttgcacaaatgatcatttatatagctgcctcaaaaaggaanattatctgggcaagtccagtgaaggcagacaaaccacaagacctagtgccaggtttattccctcacatgggtggttcacatacacagcacagaggcacgggcaccatgggagagggcagcactcctgccttctgaggggatcttggcctcacggtgtaanaagggagaggatggtttctcttctgccctcactagggcctagggaacccangagcaaatcccaccacgccttccatctctcagccaaggagaagccaccttggtgacgtttagttccaaccattatagtaagtggagaagggattggcctggtcccaaccattacagggtgaagatataaacagtaaaggaagatacagtttggatgaaggccacaggaaggagcanatgacaccatcanaagcatatgcagggaaagggcagttactgggcttctgggctgcttaatccctggcttggcangaagggtanggaanatggatggggctcattgtttggcatttgatnatgtccaccaattncngcttgagggaagcaccacccacaaggaanccatccccatcaggctggcttggcnacctccttgcagg

SEQ ID NO: 3592 - DNA, 653 bp, Homo sapiens
  misc_feature 503, 534, 593, 611, 627, 628, 639, 641: n = A,T,C or G
acctcacactgcaacacatgtagatagcgcttttgaaaaatacatatatttttactatagtatgagaggtcctggggctcaaactttaaacatttcctaactcagcttacactggtttaaaatgtccaggtctctgctgaattctcttgttgaattcatagctctccaacctcctctgtgttgattcctatgcccctaaccctgcggcctctttgttttatttttttccccatctctgttggtcccagggaaagcaaggaaattttcttttgaggacttataggttgattgcccacaggtcaaactgttggcattgaactcctctcatttcttgccattggattgtttcctaaacgttggataggagaattccgaaattgttgctatttttatgaagctgtgcccttgatcaaatctgtgctgtgggtctgagtcactttgccaatgtcgtcttcagtttcaacactctgatcagcatgcaggcgaaggggcatgtttaattncttcactaactgctatattctatagctttanacttcatatttcttatccacctttgtctaggctcacgatctttgggcaagggagctttntcaccgtggttgggctanaacaaatattggaaannttaccaacacnanatgttgagaagt

SEQ ID NO: 3593 - DNA, 554 bp, Homo sapiens
  misc_feature 425, 439, 454, 496, 521, 531, 544: n = A,T,C or G
acgcggggggggccttttttcctctcttcagcgtggggcgcccacaatttgcgcgctctctttctgctgctccccagctctcggatacagccgacaccatgggtttcggagacctgaaaagccctgccggcctccaggtgctcaacgattacctggcggacaagagctacatcgaggggtatgtgccatcacaagcagatgtggcagtatttgaagccgtgtccagcccaccgcctgccgacttgtgtcatgccctacgttggtataatcacatcaagtcttacgaaaaggaaaaggccagcctgccaggagtgaagaaagctttgggcaaatatggtcctgccgatgtggaagacactacaggaagtggagctacagatagtaaagatgatgatgacattgacctctttggatctgatgatgangaggaaagtgaaanaacaaagaggctaanggaagaacgtcttgcacaatatgaatcaaagaaagccaaaanaaccttgacttgttgccaagtcttnatcttactanaagtgaaaccttnggatgaatga

SEQ ID NO: 3594 - DNA, 364 bp, Homo sapiens
acaaagataatcaatgctgattcggaggacccaaaatacattatcaacgtaaagcagtttgccaagtttgtggtggaccttagtgatcaggtggcacctactgacattgaagaagggatgagagtgggcgtggatagaaataaatatcaaattcacattccattgcctcctaagattgacccaacagttaccatgatgcaggtggaagagaaacctgatgtcacatacagtgatgttggtggctgtaaggaacagattgagaaactgcgagaagtagttgaaaccccattacttcatccagagaggtttgtgaaccttggcattgagcctcccaagggccgtgctgctctttggtccacccggt

SEQ ID NO: 3595 - DNA, 651 bp, Homo sapiens
  misc_feature 630, 640: n = A,T,C or G
acacggccatgtaatatcagtatatcccaagttaatgaaagtgttcatttacataggtaatggagacctttgcattttgatccatagaacataggaggatgttcttagtctgtctcaaagctctatatgtttacatattatttctgtagattgttttcaggagaaagttttgcttctatggtaagagtgagcactttggcttatgtataagttagaaataattgttagtttttaatatgcacttcgtggggaaatttcttagacgtatgcaagcaagtgaaaacaattagggccagtggtattaactactttataaaattttatttttgtttgtaagaagtcatctacttaaggcccagttaatataagtggaatcatcatagtttaaggaatacccagagattgctgctgttctatttattttacagaaagggtagctagattgaaagctcttcagtggaccttgagctaatagatcttttaccactaaaagagcattattctcatgtcataatgagaataataattacatacttggcataataaatgcctaaaagacattttatttctgaatctatttttttcttgctataatggggatattggaaattatgcatttgtataaatggnattcttaaancaatctatgaa

SEQ ID NO: 3596 - DNA, 506 bp, Homo sapiens
  misc_feature 204, 214, 258, 285, 397, 399, 413, 416, 442, 452, 469, 485,487, 496, 498: n = A,T,C or G
acagctactatccagcccagtcaacaagcccagattgtcactcggtcagtgttgcaggcagcagcagctgctgctgctgctgcttctatgcaactgcctccaccccgactacagccccctccattacaacagatgccacagcccccgactcagcagcaagttaccattctgcagcagcctcctccactccaggccatgcaacancctccacctnagaaagttcgaatcaatttacagcaacagcctcctcctctgcanatcaagagtgtgcctctacccactttnaaaatgcagactaccttagtcccaccaactgtggaaagtaatcctgagcggcctatgaacaacagccctgaggcccatacagtggaggcaccttctcctgaaactatctgtnanatgatcacaagatntanttcctgaagttgaatctccttctcanatggatgttnaattggtgagtgggtcncctgtggcactctcancncagccttantntgtgaagt

SEQ ID NO: 3597 - DNA, 568 bp, Homo sapiens
  misc_feature 379, 437, 468, 476, 508, 527, 531, 535, 541, 546, 551, 558: n = A,T,C or G
acgcggggagcagcaggaggaggcagagcacagcatcgtcgggaccagactcgtctcaggccagttgcagccttctcagccaaacgccgaccaaggaaaactcactaccatgagaattgcagtgatttgcttttgtctcctaggcatcacctgtgccataccagttaaacaggctgattctggaagttctgaggaaaagcagctttacaacaaatacccagatgctgtggccacatggctaaaccctgacccatctcagaagcagaatctcctagccccacagacccttccaagtaagtccaacgaaagccatgaccacatggatgatatgggatgatgaagatgatgatgaccatgtggacagccaggactccattgnctcgaacgactctgatgatggtagatgacactgatgattctcaccaatctgatgaatntaccattcttgatgaatctgatgaactggtncttgattntcccacgggaccttgcaacaaccgaagttttnactccagttgtccccacantatnacanatatgnatggnccgangtgatantgtggattta

SEQ ID NO: 3598 - DNA, 539 bp, Homo sapiens
  misc_feature 433, 484, 534: n = A,T,C or G
gtaccgaccatagagcaagaatcaagattctgctaactcctgcacagccccgtcctcttcctttctgctagcctggctaaatctgctcattatttcagaggggaaacctagcaaactaagagtgataagggccctactacactggcttttttaggcttagagacagaaactttagcattggcccagtagtggcttctagctctaaatgtctgccccgccatccctttccacagtatccttcttccctcctcccctgtctctggctgtctcgagcagtctagaagagtgcatctccagcctatgaaacagctgggtctttggccataagaagtaaagatttgaagacagaaggaagaaactcaggagtaagcttctagaccccttcagcttttacacccttctgccctctctccattgcctgcccccaccccanccactcaactcctgcttgtttttcctttggccataggaaggttaccagtanaatccttgctaggttgatgtgggccatacatttcctttaataaaccattntgtac

SEQ ID NO: 3599 - DNA, 425 bp, Homo sapiens
accgttttttcaggcacaaggaaggtttcaccccgttgccgaaagactaagcgtcccgttggccagtgcaacgaagaacggaggaagcgacaagatttcagtttgtaagtagtgagagcaatgatcttggctttgcatggtgctcaggaagccttccccgctcccaaaccagaaaggaatccatccagattttcctccactgtctggatggccgctctgtggatgcttccatctgtatccattgccggcacctggtgagattccgtctctagagcctttgaggtcactcctgacgctgacatggctgtgaagagctgggtgccaggcattactgcctccaaggttgctttgcgaggaataggtggggcatcaggaagaagccagttgcaggcaaggcctctgctgatgctgcttttttctcctgt

SEQ ID NO: 3600 - DNA, 654 bp, Homo sapiens
  misc_feature 431, 507, 541, 561, 562, 576, 598, 645: n = A,T,C or G
acgcgggcgggaagggcctgtcccagtcggctttaccctatcgacgcagcgtccccacttggttgaagttgacatctgacgacgtgaaggagcagatttacaaactggccaagaagggccttactccttcacagatcggtgtaatcctgagagattcacatggtgttgcacaagtaccattggtggtggtatctttcaagcaatcaaaggttttcgcaattctccagtgggagtaaaccacagactacgagggagtttgacagctattaaaaccagggctccacagttaggaggtagctttgcagtttggggagggctgttttccatgattggctgtagtatggttcaagtcagaggaaaggaagatccctggaactccatcacaagtggtgccttaacgggagccatactggcagcaagaaatggaccantggccatggttgggtcaaccgcaatgggtggcattctcctagctttaattgaaggagctggtatcttgttgacaanatttgcctctgcacagtttcccaatggtcctcantttgcaaaaaacccctccanntgccttcaactcanttaccttcctcaccttttgganacttcgacaatattaagtaggacttcttttcttaggatttctttaanaaaaccaat

SEQ ID NO: 3601 - DNA, 448 bp, Homo sapiens
actgaactcccatcacaacatcatcttcctctaataactgtaacacaacaccttcaataaactttgcattgggctctgccatagctgctttccggagactcatgatgaatcttccgtgatggaaagctcttccactctgcacttgattgttttctgacagagggtaaggaatctgaacctctgatttgctttcctgatcatgaatcatgtaaccatttacaacctgggcatcaagaccttccactgtatctccaagaccaaggtctttgagaacatgataaccacccggctgcaggaattctccaactattctgtcaggctcttttaagtctctctcaatgactgtcacctttcttccatctctggaaagcacagctaccaaagcagagccaagcacgccagctcccacgatgataacttctgggtcattctgagaagatgttgatgt

SEQ ID NO: 3602 - DNA, 599 bp, Homo sapiens
  misc_feature 326, 454, 458, 471, 503, 523, 527, 536, 538, 542, 564, 566,568, 570, 599: n = A,T,C or G
actgtgtctcagctccagcagtctcaactgggaagacccaggactcctgctcttttctctaatccctgggagacgaggtccagctaaggtagagtaagcagtcagtgaccaggcaggctggtttgggaggtcactgcctggaggacgggatcttgtattcttcggaagatggctgggaaattcttccctccattacgtagaactttcttcccctcctcagttgaggtgcctagatgtcccacaacggggtcttcactcaggtcctccagaggcacacgctcaaacagtgggtgctcttcgaaatgagtgcacatccagtcgtgtanctccagcacatcggttatggtatacaccagccccccaactcttagcacgtaggcatattctgctagcagggtgggactgatgattcgccacttgtgctttgtcccttgaaatgtgggtcggggaagangaanaacatttttgtcnagctggcccttgtaaaaaaaattaggaagggntttatggcattgctacgganacangcgatgttntngaanccacctgcatggacctggcgcntnangncccaaatcccggttttgtaccttgggccn

SEQ ID NO: 3603 - DNA, 613 bp, Homo sapiens
  misc_feature 513, 537, 575: n = A,T,C or G
acgcgggactcttgaagaggaggccgcctcctcggggctccaggctggcttgcccgcgctctttcttccctcgtgacagtggtgtgtggtgtcgtctgtgaatgctaactccatcaccctttccagcacactgccaataaacagctattcaaggttggaggagggggggcggggagagaactacagccagtatccccaatgaacatagatacaaaatttctcaacaaaataccagcaaactaaatgcaacagcacatcaaaaagacaatataccgtgatcaagtgggatttatagcagggacgcaaggatgcttcgacacacacaaatccgtaaacatgacacatcacaccaacaaaatgaaggacaaaaaccatatgattatctcaataggcacagaaaaagcatttgataaaattcaacatcgctttatgataaaacactctcaacaaactagacatagaagggaacataactcaaaataacaaagaccatatacagccaacccacagctnaacatcatactgaatggagtaaanttgaacgcctttgctccaagaactgaaacaaagacaanggatttctcactttcaccaattccttattcaacatagt

SEQ ID NO: 3604 - DNA, 442 bp, Homo sapiens
  misc_feature 89, 220, 278, 287, 337, 350, 378, 391, 404, 406, 422, 432,434, 435, 442: n = A,T,C or G
acttttttttttttttttttttttgggtttatttttattaagcactacataacacattgcatgctacataatacactgtaaccttctancaggggtagatggccataactgagttatttttttcatcaatcaggaaaatgcttccttaatcaatgttctccaaaccctttgacacatagtaacgatcaactccagagatgtgcctatctctttccatcanactccagtgatcccaaaatgagcaacccttttttccttgcccccgttagtgaacctgnggatgtacncggggactttttgaaagccaggagggttcgaattgcaccggcagctgccngggcgtatgtgtnggtgctaaaggcagctgcaaggtctcgnttgggggccgctncggaccaattttngnaaaggtacctgccccnggcggccgcncnnaaaggcn

SEQ ID NO: 3605 - DNA, 653 bp, Homo sapiens
  misc_feature 405, 535, 553, 595, 606, 607, 644, 646: n = A,T,C or G
acgcgggggggcttgcacgtctgcagagcagggagcacaaacctgctctctcagcagccacttggcaagggctggttgtggatcccagccctcaccctctcctggcctttcctctgctctcctctgctcaagtccacttctaacctggtcttcggagctgggttggccccttctttgggctcaggaagcagccttagcacacgggcctctcctccctcactactgggtgctgccctgcgtggctgaccagctggcccaggatttcacagtcgaaaaggaagccaccactgatgcctcccactgtgacaggccctgtcaccaccaatatcttatttcaacctcacagttgacctgagaaatcgagattatcactccactttttcagacaaggaaactgaggctcanggaagccaagtgacaagtccaaggtcacgaagactttcttggagcccgaaacaccacctctgctcctcttctcctgtcctgcccaagcatcctaggggctgaaatcctggaaaccgtgggctggtgtganaaggttgcatgctcaaancaaaaaaagggctctccccattcttcgtgattccagggccanaaccatgccanncccaaaaacccccaacctaacctgggggcaggtccanantccaagc

SEQ ID NO: 3606 - DNA, 651 bp, Homo sapiens
  misc_feature 159, 163, 274, 481, 489, 500, 503, 552, 566, 567, 568, 575,603, 605, 608, 610, 611, 642: n = A,T,C or G
actttttttttttttttttttttgggaagtggacatttggagcgctttcaggcctacgttggaaaaggaaatatcttcccataacaactagacagaagcattctcagaaactagtttctgatgtgtgtcctcaactaacacagttgaacatttctttanacanaacagttttgaaacactctttttgtggaatctgcaagtggttatttggctagatttgaggatttcgttggaaacgggattacatataaaaagcagtcagcagcattctcanaaagttctttgtgatgattgcattcaagtcacagaattgaacattccctttcacagagcaggtttgaaacactctttttgtagtgtgtgtaagtggacatttggagcacttacggcctaaggtgaaaaaggaaatatcttcccataaaaactatacagaacattctcagaaacttactcgtgatgtgtgtcctcactaaaggagtanaacctttnttttcataaanaanttttgaaacgctcttttttggggaatctgcaagtggatatttggctagnttttgaaggatttnnnttggaanccgggattcataccaaattgcaaactgnancgntnntgaaaaacatcttttgtgatgtttggattcnaggacacaa

SEQ ID NO: 3607 - DNA, 483 bp, Homo sapiens
  misc_feature 319, 385, 392, 408: n = A,T,C or G
accgctgtgtccgggtgggtggtcagaatgccgtgctccaggtgttcacagctgcttcgtggaagaccatgtgctccgatgactggaagggtcactacgcaaatgttgcctgtgcccaactgggtttcccaagctatgtgagttcagataacctcagagtgagctcgctggaggggcagttccgggaggagtttgtgtccatcgatcacctcttgccagatgacaaggtgactgcattacaccactcagtatatgtgagggagggatgtgcctctggccacgtggttaccttgcagtgcacagcctgtggtcatagaangggctacagctcacgcatcgtgggtggaaacatgtccttgctctcgcagtggccctggcaggccanccttcanttccagggctaccacntgtgccgggggctctgtcatcacgccccttgtggatcgcactgctgcacactgttttatgaactttgtaccttcc

SEQ ID NO: 3608 - DNA, 654 bp, Homo sapiens
  misc_feature 562, 651: n = A,T,C or G
acccaaggaaacagcggtattatatttactgtcacagctagaccctatcaggtgaacagggctctccacctgcggctgttgcttcgcaaaatatccttcctctccacgtgaacaagtagctctagagtgcttttaggcagagtgacggtgatgtcatgggcaccacgccaatcttattcctggacaatgacttaagccccatcgtgagaatggttttttcctcttcaacacattttttaaaaatagacctctaagatgatgctacatgttctaaaagagtgccacagaaacccacccaggatcacaagaatgacaacaaaaggaaagtggctatttcttgtgtaagggatgacgactccccctcccatgggtcccatttctcccccagttgcaggtgttttaagggacagaaaggctgtggaaaggaccactggctgggagagttattgcacaacccggaagaatgagaaaaacgtgggcggcaaggggtaggggagagggttgctgcgactaaaacaaggtaacactgaattaggagctcgaacagttctgcaacagtcanacatgtatgtgtttatgtgttaacacttggagactggggaagtaaaagtaaaccctttatcatataaactttgggctgaatgggaagcnaaa

SEQ ID NO: 3609 - DNA, 651 bp, Homo sapiens
  misc_feature 455, 508, 514, 544, 556, 565, 573, 587, 598: n = A,T,C or G
acaagactcttgacagttgtgcttctctaggaggttgggtttttttaaaaaaagaattatctgtgaaccatacgtgattaataaagatttcctttaaggcagaggctggtcgagatgctgctgttatcttctgcctcagacagacagtataagtggtcttgtttctaagattcctaccaccagttactttgggccaagtatccacatccccttgcgtatgggaggtgggtgaagagtgttggatgcaaagtggttattatgggaagtagctcgatggtaaaaggacaaacacctatctatcttagagcttaagcctgtatgtgcttattcccaagggagatagaggtgtttaatcacaaggacagcatgagttagaggacactggcatcaacagctgccacagccgtgcacaccagggccagagcagcccactgacatctgtctttggtcttganatcaaatgcatcccattcttcatacattagaaggtcgacctccttgaaagcanaccaangtttagcaagcctctaaaaggactactganaaacagaatcanaaactctanaactctanttagggcccttcancagggctgcanagcctccctggatcccaggcctggggaaagcctgctggtcttgtcccccaggt

SEQ ID NO: 3610 - DNA, 627 bp, Homo sapiens
  misc_feature 346, 376, 523, 540, 551, 585, 619: n = A,T,C or G
acgcgggtgcttttgtcacctttgaaagcccagcagacgctaaggatgcagccagagacatgaatggaaagtcattagatggaaaagccatcaaggtggaacaagccaccaaaccatcatttgaaagtggtagacgtggaccgcctccacctccaagaagtagaggccctccaagaggtcttagaggtggaagaggaggaagtggaggaaccaggggacctccctcacggggaggacacatggatgacggtggatattccatgaattttaacatgagttcttccaggggaccactcccagtaaaaagaggaccaccaccaagaagtgggggtcctcctcctaaganatctgcaccttcaggaccagttcgcagtancagtggaatgggaggaagagctcctgtatcacgtggaagagatagttatggaggtccacctcgaagggaaccgctgcctctcgtagaaatgtttatttgtccccaagaagatgatgggtattctactaaagacagctattcaagcanagattacccaagttctngtgatctaganattttgcccccccacgagattttcttaccggatntggcattccagttcacgtgatgactatccttcanaagattta

SEQ ID NO: 3611 - DNA, 513 bp, Homo sapiens
  misc_feature 203, 221, 250, 293, 301, 305, 323, 340, 344, 356, 358, 360,361, 367, 370, 389, 402, 405, 421, 426, 428, 441, 442, 451,465, 467, 490, 511: n = A,T,C or G
acagaaatttcacaagaagtcaaacacagtgatgccatttgctatgttttattttgctagtagcttattaaacataacatgcaaataatcaaagagaaacatacatgacttagagtgaaaaataattctagaaaagtttcactaggtaagtatgcaaattcttattctaaaaatacttctttaagtgcatgaaacttcatgtnttttgcaatattcttggnctcaatatctaccacctattttttaaccngacaaattttgaattgtatcaaataatttggggcaagaaaagnaccttcanattnattttattcaagctttgnggaacatttaaaatttnaggntttttaaacctngntnnttttcnttncaccagttaaagggtttgncctcattttgacngtnaaattaaaaaacactnatttncnaataaagcattgnntcgatgtcnttcgcgttatgtgngngcctgggatgaaataggcctgcntttctttttcttaaaaaaaanat

SEQ ID NO: 3612 - DNA, 563 bp, Homo sapiens
  misc_feature 105, 241, 249, 253, 265, 299, 306, 312, 319, 322, 335, 339,349, 354, 370, 385, 394, 397, 398, 415, 419, 425, 435, 440,442, 445, 452, 455, 466, 467, 476, 492, 493, 502, 503, 507,513, 532, 534, 540, 541, 543, 553: n = A,T,C or G
acgcgggctcgctcagctcacccacgctgctggccctgtgagggggcagggaaggggaggcagccggcacccacaagtgccactgcccgagctggtgcattacanagaggagaaacacatcttccctagagggttcctgtagacctagggaggaccttatctgtgcgtgaaacacaccagctgtgggcctcaaggacttgaaagcttccatgtggtggactcaaagtccttactttttccngaaaatgntacnaaaacgcatggnagtgtgtattggttccaagtgacacttaaaaaantggtaanttaatnaccattntgnaccaagcctgggnctgnggctcctttnttttnttcttaagcttctcanaacattaactaatcnatttgggtnatnnttgaataaacctggggntggntattcnaattgttttnatggnanttnatttaanaanaactattgttnntggcataangggttctgattaaaannacattttannttanaaaaanacactttttttctggtaananaataannancttatcattncttggccgga

SEQ ID NO: 3613 - DNA, 516 bp, Homo sapiens
  misc_feature 267, 353, 357, 362, 363, 366, 411, 438, 443, 465, 466, 468,495, 510: n = A,T,C or G
acagcctgtcctcccacccaggaacaccctctgcctaatgacaggaccttcctgggaagcatcttgacagcagtggcagatgaagagccagaatcaactcctgtgcccttgcttggaagtgacaagagtgctttcacccgagtagcatcaatggtttcccttcagcccgcagagaccccaggcatggaggagagcctggcagaaatgagtattatgactactgagcttcagagtctttgttccctgctacaagagtctaaagaagangccatcaggactctgcagcgaaaaatttgtgagctgcaagctaggctgcaggcccaggaagaacagcatcaggaagtccagatgcnaaanaagcnnacntagagaagctgaaccaggccttgtgcttgcgctacatgaatgaanggagcttcaggaagtgatacagctctnatganaaattctataacagatagacannantggcgagctcataagccttatagaggnggtgacctccttccngtcctt

SEQ ID NO: 3614 - DNA, 232 bp, Homo sapiens
  misc_feature 136, 184, 211, 220, 223: n = A,T,C or G
actatttacagctaaaccagctatacaggatcataaaaagtgagaacatttttgtagccctgaatcaaagctttcataatcttttttttataatttcaacttttattttagattcaagggatacatgtgcaggttngttacattggtatatttgagtgatgcttgagattgggggatatgaatnatcctatcacagcaaatgctggcatantacctcggncgngaccacgct

SEQ ID NO: 3615 - DNA, 531 bp, Homo sapiens
  misc_feature 93, 173, 178, 204, 210, 226, 230, 232, 239, 260, 264, 288,328, 329, 337, 346, 363, 368, 378, 416, 418, 421, 425, 435,436, 440, 444, 457, 461, 467, 468, 471, 472, 477, 479, 491,501, 509, 530: n = A,T,C or G
acgcggggcagcaggactcggtctagcaaggccatcttgttgccggacctttctgaaccaaacaatgagcctttattttctccagcgtcagangttccaaggaaagcaaaagctaaaaaaatagaggttcctgcacagctgaaagaattagtttcggatttatcttctcagtnttgtnatctcacctcctgctttaaggagcanactaanaaacactttctataanaacnanctttgangatgaactgaaagatgatgcncaancagtagaaactctgggaaagccanaagcgaaacgaatcaggacgtcaaaaacaaaacaagcaanncaataacncaggaaaanaaagtgcttggtacctnctccntagaaattcnggtgatttccccttggcttgcccacctgactaatcaanancanaccnagaataactnntaangtgncaggacagtcttngaangaacannaannaactngnttctattcaaancaattttccntaaaatgntgttttcttgggagatttatng

SEQ ID NO: 3616 - DNA, 307 bp, Homo sapiens
  misc_feature 250, 262: n = A,T,C or G
cgcggcgaggtacgcggggtctcgcggccgactcgcaagatggcgccgcagaaagacaggaagcccaagaggtcaacctggaggtttaatttggaccttactcatccagtaaaagatggaatttttgattctggaaattttgagcaatttctacgggagaaggttaaagtcaatggcaaaactggaaatctcgggaatgttgttcacattgaacgcttcaagaataaaatcacagtttgtttctgagaancagttctctaanaggtatttgaaatccttactaagaaatccttaagaagaacaatct

SEQ ID NO: 3617 - DNA, 402 bp, Homo sapiens
  misc_feature 34, 56, 139, 177, 200, 202, 206, 220, 230, 233, 253, 263,275, 296, 307, 317, 325, 337, 343, 348, 352, 354, 374, 385,393: n = A,T,C or G
actttttttttttttttttttttttttttagcanattttaagggttttatttaaanaaattatatgttaaaccattgaaaatgaggaaaagatggttaaaaaaacccaggatttcatgaaatatgaagctgataaggcnaagtttcttctttggtttcggaacacccggtgagccanatgcatcctctggaaccagcctntnttanttaatggcagtttncacagacttnggngaagaagcaccaggcacttnaaaaatgaanttgggagaaacnacccttccgaaaggcgcattnctcggggctgntgccccgggntgccacanttatttcggtcntgaganctccntgancnactggtccgacttttctttnggagggggtgnaaacccanggggacccc

SEQ ID NO: 3618 - DNA, 563 bp, Homo sapiens
  misc_feature 169, 303, 333, 365, 403, 409, 411, 414, 420, 434, 448, 454,460, 461, 468, 484, 487, 493, 494, 504, 515, 532, 540, 556: n = A,T,C or G
acacaagatggtggccttggcggttactcttccaaccacttccacaattccagagatttcttcatcaaggggttccatcaactcgatggttccattttttccttctccatctgaaagaataaacatttttccggtgggatgaatcttttccagcctccctacgaagcanacaggcttgtcgatgaattgagctagcatgccggcgttgatgcgcgacctgggcaagtccatcatgtcaccatgattatggtccaaagactccccgcgtcaacatctacaatgttggctcaagtgctgcattanacgtggaactatctgatgattccttccctncaaaaaatttggcatttgtgtctggaatgctnaatgtcaaatgggaccggattgccctgctagcaatgtntcccanantgnggtctncccctctcaagctngttatttcacttancttggnacaatnnttacctngccagaaggatggccnttntatggnnttaccatggnactggaaaggnagaatcttgcttacggnattttaanggtaatttcctttttntgaatgg

SEQ ID NO: 3619 - DNA, 504 bp, Homo sapiens
  misc_feature 204, 205, 279, 377, 389, 399, 400, 403, 405, 421, 429, 440,449, 467, 476, 478, 496: n = A,T,C or G
cgcggcgaggtactggagatgtatttgataaccaaggttttaggtaaattttcaccagtattagttctatttgcaaactgaaaaatgttgtaggcttaatgtaaaataaccacattagtgaacattatatctcttagaagaaaggccatattttgctcctgcttctgtaaaaatattatttgtttgaaggggaaataatggtanntgtgacctttcacttaattcctactcccttaatgtgagagagacaaattgagctgaagaaggaaaattctgganttacactccacaaccttgaacatactgacggacatctctgtttgacaacgatttctccatgcccccatgctctaatgccttgtggatcacggacaccntctttgcacaanctacagcatnngcnangttattttgcatcaancactgctngataatgacangcttaactnctcctgggtttggcatcnttacaccantnccgctttgatttgaaatntccattat

SEQ ID NO: 3620 - DNA, 353 bp, Homo sapiens
  misc_feature 106, 117, 134, 172, 180, 184, 199, 206, 250, 259, 278, 285,286, 292, 303, 307, 310, 329, 332, 341: n = A,T,C or G
cgcggcgaggacgcggggagagaagtttgtcatgcaggaggagttctcgcgtgatgggaaggctctggagaggttcctgcaggattactttgatggcaatctgaanagatacctgangtctgaacctatcccanagagcaatgatgggcctgtgaaggtagtggtagcaganaattttgntganatattgaattatganaataaanatgtgctgattgaattttatgcccctaggtgtggtcattgtaanaacctggancccattataaagaacttgncgagaanntcagcnaaagacccaantatngtnatagccaagatggatgccncantcaatgatntgccttctccat

SEQ ID NO: 3621 - DNA, 544 bp, Homo sapiens
  misc_feature 305, 348, 410, 418, 426, 440, 449, 455, 456, 462, 463, 466,480, 481, 484, 496, 502, 504, 505, 506, 515, 540: n = A,T,C or G
accaaggctttaacgtgtctgtgcagggtattatcatctaccgagccgcctacttcggtatctatgacactgcaaagggaatgcttccggatcccaagaacactcacatcgtcatcagctggatgatcgcacagactgtcactgctgttgccgggttgacttcctatccatttgacaccgttcgccgccgcatgatgatgcagtcagggccgcaaaggaactgacatcatgtacaaggtgggaggagaatatgcctcattcattactcaatcaatttcttggccttgaagaagcgtcgcaggtanaagacctgccaggtagctagtccaatgagacagaacattgaanagatgctgaagtataggacccgagtgtttgttgactcgtggtatcacgcatctactcttctntcttcttnatgtagcnaaatcatttcatanattctaaanggcttnnagcgtnnaantctaccttaatggnntanctttcaaatttnggaatntnnnaaatttacnccccctcctgcttagtttaggaacnaaat

SEQ ID NO: 3622 - DNA, 448 bp, Homo sapiens
  misc_feature 222, 243, 273, 293, 300, 321, 352, 354, 363, 383, 386, 390,396, 422, 426, 440: n = A,T,C or G
acaatctatcgacaaaacaaactccaaaagaaggtgtgaaagttaacaaggtgatggttgctgaagccttggatatttccagagaaacctacctggcaattctgatggaccggtcctgcaatggccccgtgctggtgggcagcccccaggggggcgtcgacattgaagaggtggctgcttcaaacccggagctcatttttaaggagcaaatttacatttttnaaggaataaaggacaaccaanctcagctggatggccgaaaatctaggcttnagttgggcctttgaaaagcnaggctgnaaatcaaattactaagctgtntaatctcttctgaaaattgattgctactcangnggaagtgantccctttggtgaaactccanaangacnagtttnctgtttgatgccaaaataaattttgntganacgctgatatctanaaaaatac

SEQ ID NO: 3623 - DNA, 321 bp, Homo sapiens
  misc_feature 67, 102, 142, 146, 152, 168, 178, 187, 193, 196, 203, 214,221, 224, 237, 239, 246, 254, 260, 276, 284, 285, 291, 298,299, 305, 311, 313, 315: n = A,T,C or G
acgcggggagtgaggaggaacgcgaaaaggtaacgccactcatggtcaaaggctttcgggatgcggntgaagaaggagggacggcattgaccggtgggcaancggtggtcaacccttggattataatcggtggagttgccantgtnttattnccaaccaaatgagttnataatgcctnacagcgccntcattnggngatgtgntggtgttaacnatacctntangaacccaattttntncaaatgncctcattngctggnttaatccttgaaagangtaataanntttttnatgggtnntctacntacaanantnggtaac

SEQ ID NO: 3624 - DNA, 274 bp, Homo sapiens
  misc_feature 210, 213, 215, 222, 225, 235, 248, 266: n = A,T,C or G
acaaaaacccaaattgataaatctgcaaaatcttaaacttcttaatccattgataaatattaaggagtagctggtcttcaaacaccgtaaaaagttaaagggttgaaaacatgttcaccctttgctatacggtggcatctgaaattatcaggcatgacaacttgaatttgttttgctcttccatgcaagaaggtatatatatgcattctnaananagcttanaangttacagttnacttctattcagnattggtaaagttgactanggatggct

SEQ ID NO: 3625 - DNA, 554 bp, Homo sapiens
  misc_feature 432, 457, 459, 465, 467, 479, 487, 490, 491, 505, 509, 518,528, 529, 533, 547: n = A,T,C or G
cgcggcgggtacagatctcacagggacactccttatcccttgcagagttccagacactactgatggtcaccaaagcaacatttcatcagaaaacacagtgctgggcttgtgaagaaggtgtccagcagagcttccactgcccctgtaggctgcaggcagctgcttcagttgagagatacactgagctcctcaaagaattcctatttaagtttaggctatgagcatagatggaagaggtggctgctgtattggatcaaggatatgagcagagatggatgaggcagcggctgtaatggattaaggctatgagcatcttgtgaagtaggatgtaaaatctgtaaatgccagaatgaatccaaacttccaattcaaagctggattgtaaaacagctcaaaaaaagactgaaacacagctctcactttatgaggctnaggcaggcagatttgcttagttcananttggananaagttaagaaanttggaaanacnnttttaaaaaaaatntttntattagagntttgtggatnnaacntggggtccaatttnaggggtt

SEQ ID NO: 3626 - DNA, 455 bp, Homo sapiens
  misc_feature 302, 304, 354, 370, 381, 395, 399, 409, 411, 420, 434, 450: n = A,T,C or G
acgcggggcaggacagcatttcatatgtaaccatttgaatgtttttgctgtttttagaattcagagcccttgctggggggtgcctgggagatggggtaagaagagctttcatttgtctggtagatagatagcatgtaagggggtggttgtcccaggaggcagctgctgacaggtttgctacacacagccccggactgtgttgcctgggtgctcattcagagaggggctatcatctgggagcctgtgcccctgggtcctcgagggtcatggcttgtccctggtcagtcctgtctgactgcctnanggcctacctctctgccttccctgccggttcctactcacctgctagggccnagtgccattttcagcnctacccatttntcatttcaagaaancttngttacttgtngnaccaagcanaaatgctccactantcacttttttttggcngatta

SEQ ID NO: 3627 - DNA, 469 bp, Homo sapiens
  misc_feature 324, 346, 355, 365, 383, 386, 388, 411, 449, 467: n = A,T,C or G
acaaataaaatcaaaaagagcagtgttctgttgtattcatttctgcatgtatagctttattaattgctaatgaaaattagaacttttctgggatcttctgacaagatttttaaaaaatcttaaaatgccttttcttcagtgaagccatctttggagttagtcattactctcaccttatctgtcatcttgacttcaacctgatattcctcttcttttggtccagaccctcaaattttaaaagtagcttcaagttaaggaaaggtcatttttccacagttcagttctctgaaaaacttccatctcccactgaaagtcacagtccanggagtgaagtaatcacatgctngaacatcanggccaattgnaaagcattatgaacactngcntnggtcgacttatttatcaccacanccgtgaatatgcaatgttctgaaaaaagggaccttttntgcccacgttatttttanaa

SEQ ID NO: 3628 - DNA, 307 bp, Homo sapiens
  misc_feature 96, 110, 129, 146, 158, 167, 174, 179, 186, 211, 214, 224,244, 279, 281, 289: n = A,T,C or G
acgagacatgtcatgctgcccaaggacatagccaagctggtccctaaaacccatctgatgtctgaatctgaatggaggaatcttggcgttcagcanagtcagggatgggnccattatatgatccatganccataacctcacatctngctgttccggcncccactacncaagatnccaangaaatgnagctggcaagctacttttcaacctnaanctttacacangctgtccttacttcctaacntctttctgataacattattattatcccttcttgtntnttactttngatatttaaaagatgtaa

SEQ ID NO: 3629 - DNA, 519 bp, Homo sapiens
  misc_feature 352, 357, 404, 440, 442, 453, 456, 460, 462, 473, 486, 487,489, 492, 494, 516: n = A,T,C or G
accacagttcacaagtgcaggagagaattttgataaattgttagctggaaagctgagagagactttgaacatatctggaccacctctgaaggcagggaagactcgaaccttttatggtctgcatcaggacttccccagcgtggtgctagttggcctcggcaaaaaggcagctggaatcgacgaacaggaaaactggcatgaaggcaaagaaaacatcagagctgctgttgcagcggggtgcaggcagattcaagacctggagctctcgtctgtggaggtggatccctgtggagatgctcaggctgctgcggagggagtggtgcttggtctctatgaatacgatgacctaaancaaanaaagaagatggctgtgtcggcaaagctctatggaagtgggggatcangagcctggctgaaaggatcctgtttgctttgggcananttggaccccanttntggngnccctcccttgntatgaccccatcnntnttntnaatttttggaaaattccaaagnctg

SEQ ID NO: 3630 - DNA, 313 bp, Homo sapiens
  misc_feature 84, 201, 206, 234, 239, 256, 269, 279, 301: n = A,T,C or G
acagatacttatgaggccagctggtctttaattatgtgggtccgaagcaaattccttgtatgggcatcaattggaggggttccntctttgaatacagaattcaggggagccaggagggtcaaccgctcacttccaaatagatgattgccgaggccggcttgtctgaaaaggtcaatggctgtggacacatcagactctgcngccanttcaaatagcgtcttggctgagtctggnatgantagctcatcaatgtagntggatcaccccgntggtggctangatgtctttttggagatgatcnccttcccttgat

SEQ ID NO: 3631 - DNA, 275 bp, Homo sapiens
  misc_feature 40, 57, 135, 174, 199, 212, 220, 224, 228, 230, 233, 235,240, 245, 246, 271: n = A,T,C or G
acgcggggaactatggaataaaactactgatgcagtgaanacagttgaaaagatctnacaaatgcctatctatatttataatgaacaaattcaagaaaaaggactacggaaagttcaggacatcaaagaagtcangcaaaactcatcttgacccctgttgcatgctaaggaacncagcttggaagaaaagatgatatancagttaacagcgntgcatacntggnagangnttncntaatnatctnnttatcaataaccatttttattttanattg

SEQ ID NO: 3632 - DNA, 209 bp, Homo sapiens
  misc_feature 185, 197, 201: n = A,T,C or G
acctttccttttccaaatctagctgaaatttctcacttgttttccttttgatgaagctaaccaccggcatttctcctgatgttgatttaggatcggcaggggaagcaggatgccacactgagaacatctcctcagaatgtcataggctgctttatctcctctaggggagctggtcctgggctagngctctgacatcnaaantggatcca

SEQ ID NO: 3633 - DNA, 423 bp, Homo sapiens
  misc_feature 227, 230, 242, 265, 288, 312, 318, 330, 347, 351, 354, 394,397, 400, 403, 406, 415: n = A,T,C or G
gggtaccaaactgaccaatgggctgcaagaggtttagattattgctacccacaaaattctgagccaaattgataatggtcatcattagtgacatctcaccatgatgataagaagacatttcagccactgatccagctaattgggcaacctttacttctcgcttgtcattccgtttgaagcaagtaaacaaaacctttctctgacctggtttcaaaccatccaccatngangggatagatctntcgttatcagaatttgagaacanagataagttccttgttgatgaantcattatatgcagatatgtggtantttgtncatcaagtaatnctcaggaacccaagtancttntcnttgtctttatccttcatgaaataatttaaccattccttcnacntanatntgntttttgctnaaagccat

SEQ ID NO: 3634 - DNA, 524 bp, Homo sapiens
  misc_feature 392, 401, 419, 454, 463, 471, 475, 484, 492, 511: n = A,T,C or G
gggtacaggcggcaacttccagagcttcccctcagtgcttggtgactggcacagacacgatgccatttgctcatgttcccctaatacagactggtagagctgtggtggatccattgtcaggatgcaaggggcacagccaggtccctgagtgacccttctccttcccacagcccctccactcccatccctatcttcccactcacactcactggttcttctgctttggtttagcctccaatgatcacagaactcatcagtgaggcttttccatctgaggtagcttttctaatataaagaaagaaagatactgagaacattttaaggcttagcagccttctggcttagttgtttgtaaatgaaaatatgagtagaagaattaaacagccaaaaanataacccanaaaatgggagaaaatatngacaaatatatatcttgtaaaagattttgatctanaattaaaanaacttganactngcataaaanaacacctnttttaaaagggataaattntttgcctttttgg

SEQ ID NO: 3635 - DNA, 564 bp, Homo sapiens
  misc_feature 179, 205, 235, 304, 311, 319, 331, 333, 338, 343, 385, 386,396, 402, 420, 440, 441, 446, 449, 450, 473, 494, 497, 500,510, 516, 523, 532, 547: n = A,T,C or G
acagggaaaggaaaaattttcaccaacagaggcagtctctcatagagtataaagcagctgtcacacttcaaagagcagcgcttaaattcctagcgaagtgccgtaagaaaaagaaactatttgctccttggcgaggactccaagaactcactgatgcacgccgagttgaactgaagaancgagtggatgactatgtcagaagacntttgggctctccaatgtcagatgtggtcanttgggagctccatgcccaagctcatgaacgactgcaacactactttatgggcagggccctagaagagcnagcccancagcacanagaaagctctgntncacanatcancaccaaccgttgaacagctattgaaggcacctaagtctgganngaggaataanggaaanaccttgagctcttcctanattattccaggctgggacanncaagncanncaggcccatttacacccttgaanccatacaaccccctggtgaanaanctngaaaaaattngaaatnaaatganttccaaagntaacctattatgaantataaattttttcttgg

SEQ ID NO: 3636 - DNA, 261 bp, Homo sapiens
  misc_feature 133, 140, 151, 156, 162, 170, 190, 198, 200, 206, 228, 230,236, 237, 241: n = A,T,C or G
agcggcgaggtacctgcaggcctcctacacctacctctctctgggcttctatttcgaccgcgatgatgtggctctggaaggcgtgagccacttcttccgcgaattggccgaggagaagcgcgagggctacgancgtctcntgaagatgcanaaccngcttgncggccgtnctctcttccaggacatcaanaagccagntnaagatnattggggaagaaccccatgacncnatgaannctgncatggcctggtgaaaaagct

SEQ ID NO: 3637 - DNA, 286 bp, Homo sapiens
  misc_feature 36, 99, 104, 145, 217, 218, 221, 237, 248, 252, 261, 265,286: n = A,T,C or G
acgcgggtattcagagtgatagtttgtggcttgtanaattctatgctccatggtgtggtcactgtcaaagattaacaccagaatggaagaaagcagcanctgcnttaaaagatgttgtcaaagtttggtgcagttgatgcagatnagcatcattccctaggaggtcattatggtgttcagggatttcctaccattaaaattctttggatcctctaanncanacctgaatatcaccantggtacagatnatgncgaaacctntgtngatgctgctctgaattgcttn

SEQ ID NO: 3638 - DNA, 341 bp, Homo sapiens
  misc_feature 164, 170, 204, 212, 246, 259, 271, 275, 280, 286, 296, 299,301, 303, 314, 316, 320, 321, 325: n = A,T,C or G
actttttctttgaagttttagcggtcaatttgcctttttaatgaacatgtgaagttatactgtggctatgcaacagctctcacctacgcgagtcttactttgagttagtgccataacagaccactgtatagtttacttctcaccatttgagttgcccatcttgnttcacnctagtcacattcttgttttaagtgcctttagttntaacaggncactttttacagtgctattttactgaagttattnattaaatattgcntaaaattgcgtntaantatangattanggaataaatngtncntnggccggaaccncncctnnggcnaaattccaagacattg

SEQ ID NO: 3639 - DNA, 450 bp, Homo sapiens
  misc_feature 225, 247, 252, 274, 293, 297, 299, 300, 314, 316, 319, 327,330, 364, 384, 407, 411, 414, 415, 419, 421, 428, 433: n = A,T,C or G
gcggcgaggtacgcgggggctgtcggcggtggactcgtcggagccgcgggcggtcaggaatttgaccctctagggcatgaatactgtgctgttcagttctgagctgtgctagcaatacccttcaaaggaagagcaatggctgcagcagcagcttctcacctgaacctggatgccctccgggaagtgctagaatgccccatcttgcatggagtccttccagaagancatctgggtcccaagcttctgnactgnggccataccatctggcgccagntgcctggagaagctattgnccantnncattaatgggtgtncnctntccctttncancaagattacccccataaccacttggacccagctnacaaaaaatctgacattgcnaaaatcattgatccagcttgggntcancanngctntnggggttntaatntgttagtcttgtggcgg

SEQ ID NO: 3640 - DNA, 310 bp, Homo sapiens
  misc_feature 174, 191, 197, 204, 233, 244, 259, 265, 266, 272, 286, 288,305: n = A,T,C or G
cggtacccatgcacagcagctgtggggtgtgggcatcttcaggtggtgttctggtaaaatcgttagaatagctgtatgaaggaaaccagtgggaggaaatgaagttttcaggatggtgggatgtgatttagacagtgcacatgctgttatggctgtcactagggagtggccttnatggagggtggtaacancacctnagtccanccaaaatgtttagaaacacttcatttctntgtcccaaaangatggcttttcaggncatgcnncaagtnaaggggcaccttcntnaaagatgattgataaanctgcc

SEQ ID NO: 3641 - DNA, 335 bp, Homo sapiens
  misc_feature 82, 84, 222, 239, 253, 260, 285, 301, 316: n = A,T,C or G
ttacacattgcctcactttatattttaaatgagaatcttgtttattgtatttgagcaggagttggtagattggccctctatngnggtcagcggcgaggtacgcgggtctctccaagtagtaaatgatgacatttcttaataaatactgggcttgtgattaaagttcaacctggcacatgttaattctttgaagaatgggaagaaattacgtgaacggtcttnatatcacctctgggaancaggttatattgtnacggacnctttcaatctagaataaagcaggantaagttgctaacagtntataccctgtggcanattgatttttgtagcatat

SEQ ID NO: 3642 - DNA, 410 bp, Homo sapiens
  misc_feature 273, 280, 281, 344, 388, 397, 401, 407: n = A,T,C or G
acacttgaaaccaaatttctaaaacttgtttttcttaaaaaatagttgttgtaacattaaaccataacctaatcagtgtgttcactatgcttccacactagccagtcttctcacacttcttctggtttcaagtctcaaggcctgacagacagaagggcttggagattttttttctttacaattcagtcttcagcaacttgagagctttcttcatgttgtcaagcaacagagctgtatctgcaggttcgtaagcatagagacgatttgaatttnttccagnngatatcgggctctaactgtcagagatgggtcaacataacataatcctggggacatactggccntcatgagaaatgtgtttgtcagatgtttcataaaccagattgangaggacaanctgntctgcnatt

SEQ ID NO: 3643 - DNA, 354 bp, Homo sapiens
  misc_feature 85, 97, 106, 114, 117, 157, 172, 213, 217, 220, 229, 231,235, 237, 239, 240, 244, 247, 266, 268, 275, 286, 288, 291,292, 296, 312, 344: n = A,T,C or G
acgcgggggctgactctcttttcggactcagcccgcctgcacccaggtgaaataaacagccatgttgctcacacaaagcctgttnggtggtctcttnacatggacncacatganatntggtgccatgactcggatcgggggacctcccttgggagancaatcctccgtcctnctgctctttgctccctgagaaaagatccacctacgacctcntgtnctnataccgacnancccntnanncatnttnaccattatcaaatcatggnancaacctnttttactcatntnctnnaacntacctcactatccctnaaccactttctcctttaaatcttggcactacncatttaatct

SEQ ID NO: 3644 - DNA, 653 bp, Homo sapiens
  misc_feature 600, 609: n = A,T,C or G
acaaataaaatcaaaaagggcagtgttctgttgtattcatttctgcatgtatagctttattaattgctaatgaaaattagaacttttctgggatcttctgacaagatttttaaaaaatcttaaaatgccttttcttcagtgaagccatctttggagttagtcattactctcaccttatctgtcatcttgacttcaacctgatattcctcttcttttggtccagaccctcaaattttaaaagtagcttcaagttaaggaaaggtcatttttccacagttcagttctctgaaaaacttccatctcccactgaaagtcacagtccaggagtgaagtaatcacatgctagaacatcagggccaattggaaagtcattatgaacacttgcattggtcgatcttatttatcaccacaagcctgaaaatgcaatgtcctgaaaaaggtgacctctctgtgcacacgtaatttttaaaaaggagagggtaatatgaaggggactgaggcttgatcaccaaaaatcagcacaatgaaaacaaacaataatgaataatgagcactagaattcaaattacccagatgtttcaaagagatgggggtgccaantttcaattnccgttttgaacaccacattacaaaagaactattttaaaaaataa

SEQ ID NO: 3645 - DNA, 655 bp, Homo sapiens
  misc_feature 463, 579, 598, 608: n = A,T,C or G
acacatcttatagctgaacgcctatgtaagagtgaaaaatttttagcagcttgtgcggcaggaaagtggatactaaccaaggactatataattcatagtgccaaaagtggcagatggcttgatgaaacaacttatgaatggggatataaaattgaaaaagattcccgttattcacctcaaatgcaatctgcacctaaaagatggcgtgaagaactgaaacgcactggtgctccaggagccttccacagatggaaagttgtcctccttgttagaactgataagcgaagtgattctcttataagagttttggaggctggaaaggcaaatgttattttaccaaaaagttcaccaagtggaataactcatgtgattgccagtaatgcaagaattaaagctgagaaagaaaaagataactttaaggctccattttatccaattcagtatctaggggattttcttttanagaaagaaattcagaatgatgaagattcccaaaccaattctgtttggactgaaccatagcaatgaagaaacaaacaaagatttcaggaaagatcaggatttcttggaatgaaaggngccttaagaaaaacctgtntagaacccanaaagaaatgccaaatcatgaagatgttaatgttggtctattttgatt

SEQ ID NO: 3646 - DNA, 656 bp, Homo sapiens
actgtaaaagttctgacacaagacagtggcagtggttacttttcatcgactttagcatgtgatctcagggactcagacatacgtctaagttctattctgagttttggcaacagagcagtgacagatatttctgaatgaacaatttttaggtgttttcagccatttgaaaagtattgccaacacactatttggtgttagctcaacagtcacgttgtgccaagaattaaagaactctaaagtctacaaacatcttacttcaccaagactaactataattgaagggtttactatttgtttaataaaaaatcacacatcaacttttatccaaacagcaactactacaaaaggaatgacaagaaaaaaaatgacttcacagaaatacactaaaaaatctgacaatgttatgcaagaaccgcaaagttttagtgtttaataatgaatagcacaactgaccaaggtccaagatgtgaagataccatgttcaagaaactggggggaaatcactctacaaactaactatatactaggtgataaagaatgcatactttataatataaaacctgtctacacatagtagttagctgcaaaagccattcgatcttctcttgggcttggaaaaatgccagattccagtataaattatttaccacccttca

SEQ ID NO: 3647 - DNA, 334 bp, Homo sapiens
  misc_feature 45, 317: n = A,T,C or G
actttttttttttttttttttttttttttaccctcagtcttttanactctcagctgcacaacttgattgccttacaaatgacctgcttcaaggatgtggaaattcctaatttcttctgggaaccttctgtgacaccttcaccaggaacatcaacatgtatttccctgctgccgtatttggttttcttcccatctcggggacccttttctcttactgtaaaattgtttcctccattctgagggtttcatcatcaggtgggaagtataaaccttcaccacctgtgggtctcacctgtcagttgtttgctgattttatanaacaggcgttggagggt

SEQ ID NO: 3648 - DNA, 654 bp, Homo sapiens
  misc_feature 421, 507, 508, 530, 538, 594, 616, 638, 641, 645, 653: n = A,T,C or G
acgcggggggtggaggtggtaaccgtgatagtagcagctccggcggcagcaacagcgactacgagggatggcggcggctgcagcaggaactgcaacatcccagaggtttttccagagcttctcggatgccctaatcgacgaggacccccaggcggcgttagaggagctgactaaggctttggaacagaaaccagatgatgcacagtattattgtcaaagagcttattgtcacattcttcttgggaattactgtgttgctgttgctgatgcaaagaagtctctagaactcaatccaaataattccactgctatgctgagaaaaggaatatgtgaataccatgaaaaaaactatgctgctgccctagaaacttttacagaaggacaaaaattagataagacggggtttcatcgtgttggccangctggtctccaactcttgacctcaagtgatccacctgcttggactcccaaagtgctgggattacaggtgcaaatgctaatttcaanntctgggattaaaaggtgtcaanaagctcanaatggcttcagaatctgaggtgtggacttcatcagtcaaaaatcaaagtatgactnggtataaaacagaatctcaagnagttcattacactttatgatcnaanaatngttcaaang

SEQ ID NO: 3649 - DNA, 655 bp, Homo sapiens
  misc_feature 627, 632, 641, 644, 653: n = A,T,C or G
acactgttggagagatgagacagtcacaccagctgcccctagtggggctcttactgttttcttttattccaagccaactatgcgagatttgtgaggtaacttcaacatctccgctgatgagcctataactgtgacacctcctgactcacaatcatatatctccgtcaattactctgtgagaatcaatgaaacatatttcaccaatgtcactgtgctaaatggttctgtcttcctcagtgtgatggagaaagcccagaaaatgaatgatactatatttggtttcacaatggaggagcgctcatgggggccctatatcacctgtattcagggcctatgtgccaacaataatgacagaacctactgggaacttctgagtggaggcgaaccactgagccaaggagctggtagttacgttgtccgcaatggagaaaacttggaggttcgctggagcaaatactaataagcccaaactttcctcagctgcataaaatccatttgcagtggagttccatgtttattggccttatgccttcttcttcatttatcccagtactttttttttttttttttttttttcaaaaggcaaaaaaggaaggtttaatgaaccctgtccagggccccttaggnggggnacctccttnttnttgcccttntc

SEQ ID NO: 3650 - DNA, 450 bp, Homo sapiens
  misc_feature 25, 134, 290, 296, 311, 332, 350, 352, 355, 357, 372, 396,405, 434, 445: n = A,T,C or G
acttttttttttttttttttttttnggcccttatatcagttttattggtgggtttgtagctccctgggccgggcctggctgcttaggccagtctcttgctcacgcgctcataggtcacgcctccgatggtgganacctccaccagcttgtcacccacaatctctgaggtctggtgatagttggggaaattcaccaccagcttcccgccctccatctgcacagtggccttgaacatcttgccccccattgtctgtatgttactttccttgccaacagtgaacttgttgggncatggngtggcccccggagtnagtgctgggaccaagtgaaantcctgcccatcctgctgnanctncngtgacaatcttaaanttgcgggccttttccattacattnctggagatnccaagggacttctgaacccatcataattnattttactccncatct

SEQ ID NO: 3651 - DNA, 655 bp, Homo sapiens
  misc_feature 486, 578, 640, 649, 650: n = A,T,C or G
acagcataaagtctactttcctcttgaagaaaccataagctaccagctgttggggaggggctggagcagagcatatgaagcagctgcaaaaaaaaaaaaccaaatcaaactcatgacgcagctggccaagcaagccaagtgctgtcccgccatcccagcacagaactggaaggcaagtgactccctgtccctgttggtggaacccaggaaggaacctcagcagagccctccgtgtcctcctctcagcccagcccctgctttcccttctgctgacaggacaaccaggcctgtgtcacctactccatcacaaggcctggctccttcaggacctcataagcctttagaaccttggcaaattggattctatgcattcacttaaatagtaaaagtaaaatttgcaataatgaaaaggctgacacagtagcacaacatggttttggtttaacagcagcttaaaaaggaacaaaaaggaaacctctcatgcanacacatcaggtggcataaaacaataggcaattccacgcggagcatcattagccattctctctgtccgcacacaggactctggctgcaccttnaggggcagcaactgctttcaggtcaagtctctcaccctctaccccaagcaaaacccttcctntccggcctnngctga

SEQ ID NO: 3652 - DNA, 530 bp, Homo sapiens
  misc_feature 174, 203, 206, 231, 258, 267, 276, 304, 347, 348, 361, 416,422, 434, 447, 449, 456, 463, 477, 484, 487, 492, 499, 505,512, 519, 526: n = A,T,C or G
acgcgggggttgtgagttttgtggacctggaacaatttaaccagcaactttccaccaccattcaagaggagttctatagagtttacccttacctgtgtcgggccttgaaaacattcgtcaaaaccgtaaagagatcctcttgcaaggatttttatgttgcattccaagacctgnctacaaaccaagattcgaaagctcacctnatncaaaattggtttgctcactcgcatnaatgggcaagtggtgcggactccccanttcacccanacttgtgancggaacttttctgtgcttggactgtcanacagtgatcaaaggatgtaaaacaacagttcaaattcacacannccaacatttggcnaaattcaatttggcccacaggaggagattcttactggatacaaataaatcaaganttgttnatttttaaaaanggtcgtattcaananaaccaanctgagcnttctcgaaggaatnttccccncantttanaaataanttttanggctttnactttgngaattantcaa

SEQ ID NO: 3653 - DNA, 650 bp, Homo sapiens
  misc_feature 392, 396, 422, 479, 480, 517, 522, 544, 554, 583, 611, 634: n = A,T,C or G
acgcggggagcggtagctggtctggcgaggttttatacacctgaaagaagagaatgtcaagacgaagtagccgtttacaagctaagcagcagccccagcccagccagacggaatccccccaagaagcccagataatccaggccaagaagaggaaaactcccaggatgtcaaaaaaagaagagaggaggtcaccaagaaacatcagtatgaaattaggaattgttggcccctgtattatctggggggatcagtccttgcattatcattgaaacacctcacaaagaaataggaacaagtgatttctccagatttacaaattacagatttaaaaatctttttattaatccttcacctttgcctgatttaagctggggatgttcaaaagaagtctngctnaacatgttaaaaaaggagagcagatntgttcatgacaaacattttgaagttctgcattctgactttggaaccacagatgaagnncatacttctaactggcttttaaaggtttgtgaaagtntcccnctttataggggaaacatttttntttgcccaanaattttttgatagatttattgttgacccnaaaagggttttaattaaaattttgcttnaacttattggaattccctctttnttcttgcttccaactt

SEQ ID NO: 3654 - DNA, 652 bp, Homo sapiens
  misc_feature 372, 461, 514, 562, 589, 594, 606, 612, 647: n = A,T,C or G
acgcgggaccgaatagaatcgaatggaacaatcatcgaatggactcaaatggaattatcctcaaatggaatcgaatggaattatcgaatgcaatcgaatggaatcatcgaatgggctcgaatttaatcatcgaatggaatggaatggaacagtcaatgaactcgaatggaatcatcattgaatggaatcgaatggaatcatcgagtggaatcgaatggaattatgatcaaatggaatcgaatgtaatcatcatcaaatggaatcaaaaataaccatcatcaattggtattcaatggaattgtcatcaaatggaattcaaaggaatcatcatcaaatggaaccgaatggaatcctcattgaatggaattgaangggtcatcatctaatggaatcgatggaatcatcatcaaatagaatccaatggaatcatctcaaatggaatctaatggaatcttgacaanaatttgatggaatccgcatccaatgaattgaatgccatcatcgaatgggctcnaatggaatcatcttcttatggaatggaatggaaaaccggaatggaatntgggatggaatgaaaaatgttaggganaccgnaatgggaatgtnaaaatntatttggaatttggaatgccatggaaaatgaaaangaatt

SEQ ID NO: 3655 - DNA, 508 bp, Homo sapiens
  misc_feature 216, 238, 295, 309, 319, 322, 325, 331, 346, 366, 426, 446,453, 483, 485, 498, 499, 500: n = A,T,C or G
acgcggggaatctgccattttctgtccctgagtgagtctctggcgtcccaaattgcctgtttttctcgcaggctctattccgttcgctggttcgccacctcaggggaacgatggccatggagtccacagccactgccgccgtcgcccgcggactggtttctgcccgacaaaattgaaaatgttcctgctccttctacatctgcagataaagtgganagtctggatgtggatagtgaanctaaaaaactattgggtttaggacaaaaacatctggtgatgggggatattccagcanctgtcaatgcattncaagaagcanctngtnttttangtaaaaaacatgganagacactaatgagtgtgganaaaccttctttttctatgggaaaatcacttctggagttggcaaaaatggaaaatggggtnttgggaaacccctttggaangggtgcntttggaaaaggaaaaagggaaaaaaacccnanaatgattttttgnnnaaaaattt

SEQ ID NO: 3656 - DNA, 611 bp, Homo sapiens
  misc_feature 209, 221, 317, 319, 326, 327, 329, 332, 335, 337, 347, 440,475, 482, 494, 497, 506, 533, 548, 571, 579, 603: n = A,T,C or G
acgcgggggacacaaaggactctcgacccaaactgccccagaccctctccagaggttggggtgaccaactcatctggactcagacatatgaagaagctctatataaatccaagacaagcaacaaacccttgatgattattcatcacttggatgagtgcccacacagtcaagctttaaagaaagtgtttgctgaaaataaagaaatccanaaattggcagancagtttgcctcctcaatctggtttatgaaacaactgacaaacacctttctcctgatggccagtatgtccccaggattatgtttgttgacccatctntnacagttnnanccnatntnactggaagantttcaaatcgtctctatgcttacgaacctgcagatacagctctgttgcttgcaacatgaaaaaagctctcaagttgctgaagactgaattgtnaagaaaaaaaatctccaagcccttctgtctggcangccttgnacttgaaacccnaanaagtgtganaaactggctagtgtggaagcattgtgnacaccctgattaggntatgggttaatgttacaacactntttttaanaaaaacatgttttaaaaatttggntcaagttg

SEQ ID NO: 3657 - DNA, 653 bp, Homo sapiens
  misc_feature 361, 449, 462, 474, 478, 490, 495, 497, 503, 514, 521, 553,557, 563, 571, 577, 586, 595, 598, 604, 608, 617, 619, 626,630, 635, 638, 643, 644, 647: n = A,T,C or G
actcaaacaaaacaaaacaaaaccggagtaaaaattaccgttaaattttaacttataacacaaatgacaaatgaacagaaaactgtgaggctgaacttgccaatatctacaactgttgaacttctgacttctgctcagcttcatacatgagaaaatttgcttagccgtcctctgtattacacaacataaacaggcaaagaaaaacaaaacacgaatgagggtagcttgcaaatttggaatcaaattgtgattcttatgaacaaggccatttcagaacacgaggccacatacctggaaacatgaagacgaggagctgcaggtcaaaatagtatgaggaccaggttggtgggctgatgctcanacacagaagcaatgatggggatgttggtcttaacataagaaggatccacagtgagtagaaaccccccgtccaagggaatttttttctntcacatgaagganaacctccacggngaanaagacaaacctncaaananatgacnctccggaaaanaacttcnaattgggtggggaatcactttgctgcccaggnaatnccaaangctggatntggcanaaaacaaanaacccaaangcnggcctngctnttataaaangnccggctngaanccccnaanggaannttngcttta

SEQ ID NO: 3658 - DNA, 649 bp, Homo sapiens
  misc_feature 435, 453, 501, 508, 521, 546, 551, 583, 595: n = A,T,C or G
acaaacatgtggcaggttaaacatcaggcataaaaaggacaaatactgaaacgcaaagggccagagatcccaagtcgcttaacactatttaaaatgttattcaactgcaaacttcagcctctggaaccatcccagatagctactggttaagtgatatgaagtaggaaaaaagaaggttctggaaggtctcaaggaggctgtgcagaaaacagcaccagatggaagcaagagcagaaagaagtcacgtcccatctttatgacaagacacagaacaagatggtcacagttcttcatgggtaaacaaaagatgtggaagacacagccaaccttaagtaacttctactgacggatgctctggcacttctctatgtagagaaggagagagaaagagagcaccaagcaggaatgggggactctatatttattgtctgccanttcttttatatgcattgncttatttaaatccttatgacaccttatgaagaagccaatgatttattncctttgntgaaaccctaatnccgattaaagaaacttgagactcanaatangggagtttttccaaggtccattgactgcttantggggatggcanaaattcaaactcaactttgggaaaacccctgttggtcttctttccttaatcaaa

SEQ ID NO: 3659 - DNA, 466 bp, Homo sapiens
  misc_feature 370, 386, 399, 408, 442, 459: n = A,T,C or G
acgcgggggtgtcatggccggctcctaccctgaaggtgcacctgcagtcctcgccgataagaggcagcagttcggaagccggttcctgagagatccggcgcgcgtcttccaccacaatgcctgggacaatgtggagtggtcggaagagcaagccgcggcggcggagagaaaagtccaggagaacagtatccagcgggtgtgccaggaaaaacaagttgattatgagatcaatgcccacaaatactggaatgacttctacaaaatccacgaaaatgggtttttcaaggatagacattggctttttaccgaattcccttgagctggcaccctacccaaaatcaaaatcattttgaaggactggttcttgganaacaagaattgaagtncctgccgggccgnccgctcaanggcgaatttccaccacacttgcggcccgttactnattggatcccaaacttnggtccca

SEQ ID NO: 3660 - DNA, 650 bp, Homo sapiens
  misc_feature 450, 491, 515, 563, 564, 573, 577, 587, 594, 615, 626: n = A,T,C or G
actcggtgaagtcttttgaagagcttcggctgaaaccacagcttctccaaggagtctatgccatgggcttcaatcgtccatccaagatacaagagaacgcattgccactgatgcttgctgagcccccacagaacttaattgcccaatctcagtctggcactggtaaaacagctgcctttgtcttagccatgctcggccgagtggagccatcagacagatacccccagtgtctgtgcctctccccaacatatgagctggcgcttcaaacaggaaaagtgattgagcagatgggcaaattttacccagaactgaagcttgcctatgccgttcgaggcaataaattggaaagaggccagaagatcaagtgagcagattgtcattggcacccctgggaccgtgctggactggtgctccaagctcaaagttcattgatcccaaaaaaatcaaggngtttggtctggatgaaggctgatgtcatgatagccactcanggcccccaagaatcaaaacattcngattccaaaggatgctgccaagaactggccaaatgctgctttttttcnncaccttttnaaantcttggtggnaatttgnccaaaaaagtgggtcccaaanccaaaatgttnttaaactgaaaccgtgaaggaaaa

SEQ ID NO: 3661 - DNA, 650 bp, Homo sapiens
  misc_feature 504, 550, 555, 557, 565, 570, 590, 596, 598, 603, 630, 638,646: n = A,T,C or G
acagtctttcattaaataagaatacttacacatacattttcagatatttctaccttcctgtatgtgtttggaattgtatgtaggtagccactgaaagaatttgggccccttgggaggatggcagtggaagtccatgaagtaaagagcattctttaaaaagcagatttgattgcataccttttagttatttgagattctgagaattctgataaaccccaaagcagaaagattccttatacccttggaagatgggaaaggtgagggaaatatttgaagcagggtcagaacatccactaagaacatagcacctcagtagagcttacattatagtgccagggtagagttattactgaatagcttaggatgatgaacattaaccttcctacaggagtagtagcagctgattttggtgaccatcattggtcaccttttagtggaactgcaaactaaaaacaattatggcttgacatatactccatgtaggggaagtgatgggagaagcancctctgtgtgggccattccttgggaagcactggctcgattttgctnccctntnggtttaanggaancttttaaaacttttccttgntaaccngnttcantaaaatcttggatggccctccattctnggattcanacattttntttt

SEQ ID NO: 3662 - DNA, 372 bp, Homo sapiens
accaccctgagttcctgtccaggcctatcaagccctccccaccatactttggcctcctcctggcctctgtggggcggctctcacattacctccagaaaggctgcaggctctcacccagggacacctatagtgacaggagtggaagcagctcccctgactctgaaatcaccgaactgaagtttccatcaataaatcatgactgatcttgtagcggatgattcttcaagagacccttcaaacttgggtagagtttacagctctgactttacactcggctttggagactttctttaaattatgtttttattaagattattttattatgcggaaaggtatttgggaaacttgtcacttgcatgtcccatcacgtgt

SEQ ID NO: 3663 - DNA, 230 bp, Homo sapiens
  misc_feature 19, 50, 64, 73, 80, 83, 127, 154, 166, 183, 198, 210, 228: n = A,T,C or G
acttttttttttttttttntgggaatgagaaaataactttatttcattgnggggagcagggccngatgtccancctcaanaanttatggaactgcttcttggtgccgacagccttggtgaccttgancacgttgaagcgcactgtcttgctcanaggccggcactngcccactgtaacgattntcaccgatctggacntccctgaaacanggggacaggtgtactacntt

SEQ ID NO: 3664 - DNA, 468 bp, Homo sapiens
  misc_feature 300: n = A,T,C or G
acaaaatatccccacttcccttgagaaagagtatatctaaaatacactttgatgaacacagaatattaaaacattatatgctatagaagtgaacacaaatacattttctccaaaatttcaatagtctaaggaatatataagcattgataatatgaaggaaaatgtttggatttatttttaaattcaaaattctcctggttgtagaggtgaaaaagtaatcaggttaccaccaaaagaaatgtgtctggcatgttcttgatgtctcctctccagctgagtaaatggattactgcagtttanacctggtgaatcaagaaggtggcattcagtagtgagacttttattatcaaatagttctgactgagaaattttagtttccccttcttctaagatgctattttgtgaaactggatttttttcagggctactcatcaaaacattcctgtgatgtaattgaagaaatcaggt

SEQ ID NO: 3665 - DNA, 557 bp, Homo sapiens
  misc_feature 383, 407, 480, 530, 552, 556: n = A,T,C or G
accgaccatagagcaagaatcaagattctgctaactcctgcacagccccgtcctcttcctttctgctagcctggctaaatctgctcattatttcagaggggaaacctagcaaactaagagtgataagggccctactacactggcttttttaggcttagagacagaaactttagcattggcccagtagtggcttctagctctaaatgtttgccccgccatccctttccacagtatccttcttccctcctcccctgtctctggctgtctcgagcagtctagaagagtgcatctccagcctatgaaacagctgggtctttggccataagaagtaaagatttgaagacagaaggaagaaactcaggagtaagcttctagaccccttnagcttctacaccttctgccctttntcattgcctggaccccaccccaaccactcaactctgcttgttttcctttggccataggaaggtttaccagtanaatcctgctaggttgatggggggccatacattcctttaataaaccattgngtaccctgcccgggccggccgntccna

SEQ ID NO: 3666 - DNA, 507 bp, Homo sapiens
  misc_feature 164, 229, 294, 305, 445, 453, 460, 495, 498: n = A,T,C or G
ttcggccgaggtacgcgggggagggttccaacttttctgcttatctgggaggtgttgggcgcggacagtcgagatgtcagagaaaaagcagccggtagacttaggtctgttagaggaagacgacgagtttgaagagttccctgccgaagactgggctggcttanatgaagatgaagatgcacatgtctgggaggataattgggatgatgacaatgtagaggatgacttntctaatcagttacgagctgaactagaagaaacatggttataagatggagacttcatagcatccanaagaagtgttnaaagtacctaacttgaccctgcttaatacattctagggcagagaaccccaggatggggacactaaaaaaatgtggttatttcattatctgcttgggatttatttgggtttttgtaacacaaaaaaataaaatgtttttgnttcaaaanaaaaaanaaaaaaaaaaaagtacctgccccgggccggcccgntcnaaagggcca

SEQ ID NO: 3667 - DNA, 649 bp, Homo sapiens
  misc_feature 4, 44, 255, 353, 376, 377, 387, 395, 398, 438, 473, 477,490, 528, 556, 593, 602, 612, 626, 632: n = A,T,C or G
cgtncgcgggggacgctgaggggtccgaggagaccgtgaggctntggcctgcatctcgcgccgccatggacgctgccgaggtcgaattcctcgccgagaaggagctggttaccattatccccaacttcagtctggacaagatctacctcatcgggggggacctggggccttttaaccctggtttacccgtggaagtgcccctgtggctggcgattaacctgaaacaaagacagaaatgtcgcctgctccctccanagtggatggatgtagaaaagttggagaagatgagggatcatgaacgaaaggaagaaacttttaccccaatgcccagcccttactacatggaacttacnaagctcctgttaaatcatgcttnnacaacatccngaaggcanacnaaatccggaccctggtcaaggatatgtgggacacttcgtnttagccaaactccgagtgtctgcttgacagttttntganacaagcaggaggnacatgccaagcttggaatacttggacctttgatggganatcaacaccagcggggacttttcttaanacaagcccttcaaccaacttgtaccttgccccgggcnggccgttcnaaaaggggcnaattttccaacccnactggngggccgttaattagtgg

SEQ ID NO: 3668 - DNA, 648 bp, Homo sapiens
  misc_feature 256, 441, 508, 540, 583, 587, 623, 637: n = A,T,C or G
acaaataaaatcaaaaagggcagtgttctgttgtattcatttctgcatgtatagctttattaattgctaatgaaaattagaacttttctgggatcttctgacaagatttttaaaaaatcttaaaatgccttttcttcagtgaagccatctttggagttagtcattactctcaccttatctgtcatcttgacttcaacctgatattcctcttcttttggtccagaccctcaaattttaaaagtagcttcaagttaanggaaaggtcatttttccacagttcagttctctgaaaaacttccatctcccactgaaagtcacagtccaggagtgaagtaatcacatgctagaacatcagggccaattggaaagtcattatgaacacttgcattggtcgatcttatttatcacccaagcctgaaaatgcaatgtcctgaaaaaggngacctctctgtgcacacgtaatttttaaaaaggagagggtaatatgaaggggactgaggcttggtcnccaaaaatcagcccaatgaaaaccaaccattntgaataatgagccctaaaattcaattaccagatgtttcaaaanaaangggggccagtttttaaattccgtttggacccccccnttacaaaaaaactnttttttaaaaa

SEQ ID NO: 3669 - DNA, 649 bp, Homo sapiens
  misc_feature 561, 602, 613, 614, 620, 631: n = A,T,C or G
actcttgatgaaagaccgtgaaaccaacaaatcaagaggatttgcttttgtcacctttgaaagcccagcagacgctaaggatgcagccagagacatgaatggaaagtcattagatggaaaagccatcaaggtggaacaagccaccaaaccatcatttgaaagtggtagacgtggaccgcctccacctccaagaagtagaggccctccaagaggtcttagaggtggaagaggaggaagtggaggaaccaggggacctccctcacggggaggacacatggatgacggtggatattccatgaattttaacatgagttcttccaggggaccactcccagtaaaaagaggaccaccaccaagaagtggggggtcctcctcctaagagatctgcaccttcaggaccagttcgcagtagcagtggaatgggaggaagagctcctgttcacgtggaaagagatagttatggaggtccacctcgaagggaaccgcttgccctctcgtagagatgtttatttgtccccaaaagatgatgggtttttctactaaagacagctttttcaagcnagagattacccaagttctccgtgatactagagattattgcnccaccaccccnnagattntactttaccgnggattttttggtcattcc

SEQ ID NO: 3670 - DNA, 284 bp, Homo sapiens
acttcttgcccttgtagaatttcctgaggttttctttctgagtctggttaataactgtgagaacacgggcaatggatttccggacgactcggatcttagagagcttggaggccgcaccgcctgtcactttggcgacgcgcagctgggacagctccaccttcaggtcgtccagctgtttcagcagctcctccttcttcttcccgcgaagatctcgagccttgatcttggccattgctgcacaagccgcaacgccgccgcccgctccgagggaaagagccccgcgt

SEQ ID NO: 3671 - DNA, 525 bp, Homo sapiens
acccttggaagatgggaaaggtgagggaaatatttgaagcagggtcagaacatccactaagaacatagcacctcagtagagcttacattatagtgccagggtagagttattactgaatagcttaggatgatgaacattaaccttcctacaggagtagtagcagctgatttggtgaccatcattggtcaccttttagtgtaactgcaaactaagaacaattatggcttgacatatactccatgtagggaagtgatgggagaggcagcctctgtgtggtccatccttggaagcactgcatcgattttgctcccctctggttttaaggagatcttttagacctttccttgctaactgctttcagtaaattcttgatggccttcgattctggattcagacatctcttctcacccttctttttcattgtagcaatgatctcaacacgtggacaaaattggcttgcaggaataattcaagtttttctaaagaccttggattaacaggttgattactaatgctgatgcaggt

SEQ ID NO: 3672 - DNA, 653 bp, Homo sapiens
  misc_feature 641: n = A,T,C or G
acaatacagaaatgctgatgtctgagctgagtcctgaagaccagagagtattcaactttgacgtgcgccagttgaactggttggaatacattgaaaattatgttttgggagttaaaaaatacttattgaaagaggatatggctgggatcccaaaagcaaagcaacgcttaaaaaggctccgaaatattcactacctctttaatactgccctcttccttatcgcctggcgccttctcattgcaagatctcagatggctcggaatgtctggttcttcattgtaagcttctgttataaattcctctcctactttagagcatccagcacgctcaaagtttaagagcatttagccatcgccttttatctggaacctctcagatacctctaaaacagcaaactgtgattctcaagattagaaagtacaaggaatatgcccaaactgtcaaatgtcacctgttatgtattcgtccctattccttaactatgtatttttattttcagtgagaaaagggaaagttgtaaactagcccatagtcacctatattttaggggaaaaaaaatcccaaattggtttctaacattcttattttatgcccttggcgtattaaaacgtgaaaagtaccaatgggcccacaacaggctnataggccaggac

SEQ ID NO: 3673 - DNA, 650 bp, Homo sapiens
  misc_feature 523, 528, 615: n = A,T,C or G
acgcgggctggaggaatggcatcagacccatgcctctgtgattgctcccagcccatccaaccacagcatctatgttctgcctgggaccagggccagggagcatggtacactgagctgagtataaggagagtggagcaggccactgccagcccagaaaattttggtcaaagttgcctgaaatcttctcagccttcgattcacagctgctctctgctgctctggggccatgcagaccagttcagaaaagagttaatttgttggggcagttggaggcaggtggactgccagctttgacaccttcccagcccacaggctgctgcactggggctgaaggcgtggctaacccctgcacacctagagagtgacagagatgccagactgggcagcaggaaggcaagaggattaagagagagcttctggctgaaagccacactcggttaaccaggaaaaagcccttggcacgagaagactcagtgggcctgagggactgagccttggtttgttggggcatgtgctgcataanccatncatgtgtgacaatagaagtgtattccaacccacttgtgggaacattgggtgcctgaaagaccacattgggagaaggaacaagtgagntgcttgacaaagggcttacccttgatcacttttgg

SEQ ID NO: 3674 - DNA, 648 bp, Homo sapiens
  misc_feature 543, 551, 570, 572, 588, 596, 609, 635, 645: n = A,T,C or G
acacttgaaaccaaatttctaaaacttgtttttcttaaaaaatagttgttgtaacattaaaccataacctaatcagtgtgttcactatgcttccacactagccagtcttctcacacttcttctggtttcaagtctcaaggcctgacagacagaagggcttggagattttttttctttacaattcagtcttcagcaacttgagagctttcttcatgttgtcaagcaacagagctgtatctgcaggttcgtaagcatagagacgatttgaatatcttccagtgatatcggctctaactgtcagagatgggtcaacaaacataatcctggggacatactggccatcaggagaaaggtgtttgtcaagttgtttcataaaccagattgaggaggacaaactgctctgccaatttctggatttctttattttcagcaaacactttctttaaagcttgactgtgtgggcactcatccaaagtgatgaatatcatcaagggtttgtgcttgtcttggattatataaaactcttcatatgtctgaatccanatgagttnggtcaccccacctctggananggtctggggcaatttngggtcganaagtcctttgggnccctttttggctccaggtttgactgnggggattctnttg

SEQ ID NO: 3675 - DNA, 649 bp, Homo sapiens
  misc_feature 550, 552, 625, 647: n = A,T,C or G
actccctgtcgtcaaagtgcttccctctggtaaatacacgggtgccaacttaaaatcagtcattcgagtcctgcggggtttgctagatcaaggaattccttctaaggagctggagaatcttcaagaattaaaacctttggatcagtgtctaattgggcaaactaaggaaaacagaaggaagaacagatataaaaatatacttccctatgatgctacaagagtgcctcttggagatgaaggtggctatatcaatgccagcttcattaagataccagttgggaaagaagagttcgtttacattgcctgccaaggaccactgcctacaactgttggagacttctggcagatgatttgggagcaaaaatccacagtgatagccatgatgactcaagaagtagaaggagaaaaaatcaaatgccagcgctattggcccaacatcctaggcaaaacaacaatggtcagcaacagacttcgactggctcttgtgagaatgcagcagctgaagggctttgtggtgagggcaatgacccttgaagatattcaaccaganangtgcgccatatttcttcatctgaattcactgcctggccagaccatgatcaccttctcaacccaaatgatctgnttacttttatctcctacatganac

SEQ ID NO: 3676 - DNA, 650 bp, Homo sapiens
acttcatgaaattataaacatgtttttaaagcttggtttttaaaaaaggcgttttgatcaaacaaggccacctgagtgacatcttcaatgatggtaagcccaccattttaaaggaataacatctttatttaaaagcctaattattaatataaaaaggaaaagagtttattttaacaaaatgttttagtaagattgcaatgggacagccctttgatgaaaaatctaaggagggtaaagccaatgtaactgaattagaacaagagttccaattttgagctaccatccaccaaataatttcccttttgctttgcatattacacagtgaaaataaacagttatattaagagcacttcagtcccacaaggtaggatttaagctttgtgaataggtgtaaatggccctgtaacaatatgatgcctgcaaaaatacattcaactgaaaattaatgtctgttctttaactagtaaggaaacgggaagctaaagtggtcccacttaaacaataaaacaaaacataacaaaaaccactggtttatcctttctggaaagactaccaaagccaaagaacatccaattatattataaatttaaaactgcatacttttactcatctttaccaagtaggaaagaatgccatacaaactactcatg

SEQ ID NO: 3677 - DNA, 652 bp, Homo sapiens
  misc_feature 549, 616, 636, 641, 650: n = A,T,C or G
acgcggggcctttctaactccgctgccgccatggctcctgtgaaaaagcttgtggtgaaggggggcaaaaaaagaagcaagttctgaagttcactcttgattgcacccaccctgtagaagatggaatcatggatgctgccaattttgagcagtttttgcaagaaaggatcaaagtgaacggaaaagctgggaaccttggtggaggggtggtgaccatcgaaaggagcaagagcaagatcaccgtgacatccgaggtgcctttctccaaaaggtatttgaaatatctcaccaaaaaatatttgaagaagaataatctacgtgactggttgcgcgtagttgctaacagcaaagagagttacgaattacgttacttccagattaaccaggacgaagaagaggaggaagacgaggattaaatttcatttatctggaaaattttgtatgagttcttgaataaaacttgggaaccaaaatggtggtttatccttgtatctctgcagtgtggattgaacagaaaattggaaatcatagtcaaagggctttcccttnggtttcgcccactcatttaattttgtaacttgaccttcttttttttttctgctttaaaaatttcaanttctcgtgggtaatacccanaatanaaaggagangg

SEQ ID NO: 3678 - DNA, 536 bp, Homo sapiens
accgaccatagagcaagaatcaagattctgctaactcctacacagtcccgtcctcttcctttctgctagcctggctaaatctgctcattatttcagaggggaaacctagcaaactaagagtgataagggccctactacactggcttttttagacttagagacagaaactttagcattggcccagtagtggcttctagctctaaatgtttgccccgccatccctttccacagtatccttcttccctcctcccctgtctctggctgtctcgagcagtctagaagagtgcatctccagcctatgaaacagctgggtctttggccataagaagtaaagatttgaagacagaaggaagaaactcaggagtaagcttctagcccccttcagcttctacacccttctgccctctctccattgcctgcaccccaccccagccactcaactcctgcttgtttttcctttggccatgggaaggtttaccagtagaatccttgctaggttgatgtggaccatacattcctttaataaaccattgtgt

SEQ ID NO: 3679 - DNA, 646 bp, Homo sapiens
  misc_feature 645: n = A,T,C or G
acagcatcaaagtgaagtttatacttgacagaaagcagaaaacaaaagttccagacatgattctgtcatacagagttaataataagattgctttttaggactagattgactcagtgcaccctggagagcccatgggtctccttttgagcaaacataaacaaatccaaactctgtcctagagcaaatacttaacaaatggtggttgtctaaatgtatatgtaggacatatttaacatatactggatcatatgaaagataatgaaaagctatgggaaagataacttagaaacaaagaaggcatggatcctcagccctgggaacttcaaattcattccatctgctatataagaaacactaaaataaataaaaatagcaaagtacgcgggggacattttctcggccctgccagcccccaggaggaaggtgggtctgaatctagcaccatgacggaactagagacagccatgggcatgatcatagacgtcttttcccgatattcgggcagcgaggacagcacgccagaccctgaccaagggggagctcaagggtgctgatggagaaaggagctaccaggcttcctgcagagtggaaaagacaaggatgccgtggataaattgcttcaaggacctggacccccaatgggana

SEQ ID NO: 3680 - DNA, 650 bp, Homo sapiens
  misc_feature 451, 454, 492, 510, 541, 556, 573, 595, 605, 609, 617, 649: n = A,T,C or G
acctgtgaaccaagtgtttgggcaggatgagatgatcgacgtcatcggggtgaccaagggcaaaggctacaaaggggtcaccagtcgttggcacaccaagaagctgccccgcaagacccaccgaggcctgcgcaaggtggcctgtattggggcatggcatcctgctcgtgtagccttctctgtggcacgcgctgggcagaaaggctaccatcaccgcactgagatcaacaagaagatttataagattggccagggctaccttatcaaggacggcaagctgatcaagaacaatgcctccactgactatgacctatctgacaagagcatcaaccctctgggtggctttgtccactatggtgaagtgaccaatgactttttcatgctgaaaggctgtgtggtgggaaccaagaagcgggtgctcaccctccgcaagtccttgctggtgcaaacnaancggcgggctcttggagaagattgaccttaatttcattnacaccacctccaagtttnggccatggcccgtttcaaccattggaggaanaagaaaagcattcantgggacccacttgaatnaaagaccgaattggcaaatggnaagaaaggancttnattgccanacctgccctggccgggccagctataaaagggnc

SEQ ID NO: 3681 - DNA, 648 bp, Homo sapiens
  misc_feature 645, 646: n = A,T,C or G
acccaaaccctccaatccccaacgcggtctcaagttcagactgggctccagcttctgtccacagccacccccacattttctttttgtatttgtctgccaacttcagaagaacttccagataagaatttctgcctgcagctccagtatcaaggatatggggcagcacagccacaacacagagctggtgctcctcacacgtcctcttggcaatgtcctcgttgataatctcaagcagctcaggaggtggggcgttatcagaaaacaaatcaagggcccgggacacgatgtcggatcttgtccgcccaccgtcataatccacaggagactcgcctttctgaaatatcttgattgtaggaaatcctctaatcccgtatcgggaggccagaacctgattgactgtagcatccacagctgccagtttcactcttcctttcgtctgctcttttacttctgaagctgcggcagcccactctggctctaggtttttgcagtgtccacaccaaggagcatagaactcaaccatccaaacatcttcactgtccagaacattctttatcaaagctgtcgtctgtcaagctcaatcacatccttcttacttgaactatcacttctgccttgttttccagaactgtatcctccgctttnntc

SEQ ID NO: 3682 - DNA, 354 bp, Homo sapiens
acgcgggggtgattgagagaggggttagaggcgggtcccagcgctgccgcaccatggcggaccagctttatctggaaaatatagacgagttcgtcacggaccaaaacaagatcgtgacatacaaatggctgagctatacactaggggttcatgttaaccaggccaaacagatgctgtatgattatgttgaaaggaaacgaaaagaaaattcaggagcccaactgcatgttacctacttggtgtctggcagtctcattcagaatggacattcctgccacaaggttgcagtagtgagagaagataaattggaagcagtgaagtccaagctagctgtgactgccagcatccatgtgt

SEQ ID NO: 3683 - DNA, 506 bp, Homo sapiens
actatctagtgtctaaaacattattctccagaaaaatcaatcattttctagccctctccctcagtcctttattgtccattccaatacattgaacacatttcctttaccctccacacacttcttccaaaaggaagcacccgttgagtccttttgagggtgatttgtcttacaactgactgacttagcaggaatttaattaggtcatatttggtgatgagacttatggagtgtgcctctctctcccaactgctgcttaaaatgcaaggacaagcaattagaagccatcctaaggtgcttacctcacacgccacccatgaggcttgtggccacagtggcacttgggtgtggctcctctgttatttgtcctcatgtgagaaagcagatcatctccaaatcttgccatttgtatacttttggtggagacttggatgtcatatcttctttgtttgggttttcttccctagcttattttgtggcttttaaagaagtggattgtattgtgaaga

SEQ ID NO: 3684 - DNA, 258 bp, Homo sapiens
  misc_feature 3, 11, 33, 50, 52, 56, 62, 72, 79, 103, 111, 120, 125, 174,180, 182, 191, 220, 222, 230, 235, 251, 257: n = A,T,C or G
acncggggttntgaagcactttttaccaacggncagtttttacattttananctancgtgcnaaaggcttcnagatggnagacccatctctcttgtgctccanacttcatnacaggctgnttttnatcaaagaggggaaaactcatgcctttccttggtaaaaaatgctacttngtattngnccatacgtnactatacatctgagctttataagcgcccngnaggaacantagancttggtggacacattncatcgna

SEQ ID NO: 3685 - DNA, 359 bp, Homo sapiens
acgcggggggaaaactctgaggacatgaatagtcgccaggcttggcggctctttctctcccaaggcagaggagatcgttgggtttcaaggccccgcgggcatttctcgccggccctgcggagagagttcttcactaccacaaccaaggagggatatgataggcggccagtggatataactcctttagaacaaaggaaattaacttttgatacccatgcattggttcaggacttggaaactcatggatttgacaaaacacaagcagaaacaattgtatcagcgttaactgctttatcaaatgtcagcctggatactatctataaagagatggtcactcaagctcaacaggaaataacagt

SEQ ID NO: 3686 - DNA, 650 bp, Homo sapiens
  misc_feature 4, 6, 7, 10, 11, 16, 26, 31, 181, 257, 276, 408, 450, 532,534, 543, 546, 548, 549, 554, 556, 562, 580, 588, 601, 609,624, 626, 647: n = A,T,C or G
accntnngcnnaacanaaaaggcgtntgatnataaactacatcaacacggtaagtgaactgcactatgcccttgtggccagaaaattgcatttttttctaaaaggaaggcagtcttttattctttttggacttccaaagcttgatttatagtaactacaaacatcacgacttttggaaggntatagaaaaactcttagaaaaaataatttcaaacattagtcacactgttgaaatactcatccaatattaataattngttcttcaataagaaatanaattcttcataacaaatgccccagagttgcctcactcaaataccacaggccattaaaaaccaaactgttagcgaaataggcaaaatgtttttgtagtcttactgaacacctgtagctctatccgctattgtnccaataggcaccatgtttatctgaataagtaacagcaggtancatctgacagatactaacactaagcttacatactgtatgaaaaagcctaacactgctacgtgtgcttgctatagggtggctntntttttttanganannctttncncaaagncacattttaatcattttnttttaaanggggggagtaaanccatttanaactgccaaatcctntnaacttgggatttggaacgtcnaag

SEQ ID NO: 3687 - DNA, 603 bp, Homo sapiens
  misc_feature 396, 534, 560, 580, 584, 592: n = A,T,C or G
acgcgggggacgctgaggggcccgaggagaccgtgaggctctggcctgcagctcgcgccgccatggacgctgccgaggtcgaattcctcgccgagaaggagctggttaccattatccccaacttcagtctggacaagatctacctcatcgggggggacctggggccttttaaccctggtttacccgtggaagtgcccctgtggctggcgattaacctgaaacaaagacagaaatgtcgcctgctccctccagagtggatggatgtagaaaagttggagaagatgagggatcatgaacgaaaggaagaaacttttaccccaatgcccagcccttactacatggaacttacgaagctcctgttaaatcatgcttcagacaacatcccgaaggcagacnaaatccggaccctggtcaaggatatgtgggacactcgtatagccaaactccgacgtctgctgacagctttgtgagacagcaggaggcacatgccaagctggataaactttgaccttgatgggagatcaacaccaagcngggacttttccttcacacaagcgctnaaccaacatgtaccttcggnccgngaaccacncttaagggcga

SEQ ID NO: 3688 - DNA, 341 bp, Homo sapiens
acaacagctccaagacaacacttaattccagctatacgtggcaaaagatgttatggcagggaatagagaggtttaaatacagatgaaataaagggtcaccatctcctcaggcacaaggaacagcttactttttgccagatttcttaattccacctgtggccaagggccccttccccgcggccttcgcttttagctcctcgagtttcttctgctcctctttttgtttctgcttgaaagccttatcttcctcgtccatctccttggcctgcttcttgggctgtttcagtggcttcttcttgccaccttcgcggccggacatggcagcctgccgccccccgcgt

SEQ ID NO: 3689 - DNA, 649 bp, Homo sapiens
  misc_feature 470, 503, 566, 568, 570, 579, 582, 589, 603, 604, 649: n = A,T,C or G
accttctttctggcagtgaatggtctgtattcctctagtgatgatgtgatcgaattaactccatcaaatttcaaccgagaagttattcagagtgatagtttgtggcttgtagaattctatgctccatggtgtggtcactgtcaaagattaacaccagaatggaagaaagcagcaactgcattaaaagatgttgtcaaagttggtgcagttgatgcagataagcatcattccctaggaggtcagtatggtgttcagggatttcctaccattaagatttttggatccaacaaaaacagaccagaagattaccaaggtggcaagaactggtgaagccattgtagatgctgcgctgagtgctctgcgccagctcgtgaaggatcgcctcgggggacgaagcggaggatacagttctggaaaacaaggcagaagtgatagttcaagtaagaaggatgtgattgagctgacagacnacagctttgataaaaatgttctggacagtgaanatgtttggatggttgaattctatgctccttgggggtggacactgcaaaaaaccctaaaaccanantngggctgccncancttcaanaagtaaaaaaaccnnaccaaaagggaaaagtgaaaactggcagctgggggatgcctacan

SEQ ID NO: 3690 - DNA, 648 bp, Homo sapiens
  misc_feature 539: n = A,T,C or G
acaatttggtgtcatccttgaagcatactgccggggaagtgtggggcacatgaaagtgctttctaagcaggttgaagcactcaataagttaaaaactttaaatagtttaatcaaactgaatgccgtgaagttaaacagagccaaagggaaggaggccatgcatacctgtttaaaacagagtgcttaccgggaagccctctctgacctgcagtcacccctgaacccatgtgttatcctctcagaactctatgttgaaaagtgcaaatacatggattccaaaatgaagcctttgtggctggtatacaataacaaggtatttggtgaggattcagttggagtgatttttaaaaatggtgatgatttacgacaggatatgttgacactccaaatgttgcgcttgatggatttactctggaaagaagctggtttggatcttcggatgttgccttatggctgtttagcaacaggagatcgctctggcctcattgaaagtttgtgagcacctctgaaacaattgcttgcattcagctgaacagtancaatggtgggcttgcttgcacaaccttcaaacaaagatgcccttctgaactggcttaaaaaatacaactctgggggatgacctggacccgacccattgaggaatttaca

SEQ ID NO: 3691 - DNA, 649 bp, Homo sapiens
  misc_feature 563, 593, 604: n = A,T,C or G
actcatcttctgacttaaagcagattcccattaaatggacagcaccagaagctcttaattatgggagatatcattctgagagtgacgcacggagctttggcatcctcctctgggagactttcggcttagggggtctgtccatagccttgatggaaagtcttcattatctgtgcttgtccgaggacttatgatgtttcttctcttcctttcctcctgaactgtcccgtttctctttcttttctatcttttctttatcatgcctggactcctttttgccaccggaggagattttatccatcttctcaagatttaaatgaatcactgcctttttctttgcctgaagattttgacttatttttttccttgtctttctccccgcgtacgcgggggtaggcgggcgactcaaatcccagccagtggacttagcccctgtttgctcctccgataactggggtgaccttgggttaatattcaccagcagcctcccccgttgcccctctggatccactgcttaaatacggacgaaggacagggccctgtctcctcaactttcaggcaccacnatgacctgggacagtgaatcacaatgccgnttttggctcgnggggcatcctcctgcttggcaggccttgtgcctgctgggcccctg

SEQ ID NO: 3692 - DNA, 613 bp, Homo sapiens
  misc_feature 569, 574, 605: n = A,T,C or G
acacttgaaaccaaatttctaaaacatgtttttcttaaaaatagttgttgtaacattaaaccataacctaatcagtgtgttcactatgcttccacactagccagtcttctcacacttcttctggtttcaagtctcaaggcctgacagacagaagggcttggagattttttttctttacaattcagtcttcagcaacttgagagctttcttcatgttgtcaagcaacagagctgtatctgcaggttcgtaagcatagagacgatttgaatatcttccagtgatatcggctctaactgtcagagatgggtcaacaaacataatcctggggacatactggccatcaggagaaaggtgtttgtcagttgtttcataaaccagattgaggaggacaaactgctctgccaatttctggatttctttattttcagcaaacactttctttaaagcttgactgtgtgggcactcatccaaagtgatgaataatcatcaaggggtttgttgcttgtcttggatttatatagagcttcttcatatgtatgagtccagatgagttgggtcaccccaacctntgganccgcgtacctggcccggggcggcccgttcgnaaagggcg

SEQ ID NO: 3693 - DNA, 649 bp, Homo sapiens
  misc_feature 497, 614, 630: n = A,T,C or G
acgcggggaatgaagtgaggccagtggccgggtctgctgagtccgcagcactcagactacgtgcacctctgcagcaggtgcaggcccagttgtcacccctccagaacatctccccatggattctggcggtattgactcttcagattcagagtctgatatcctgttgggcattctggacaacttggacccagtcatgttcttcaaatgcccttccccagagcctgccagcctggaggagctcccagaggtctacccagaaggacccagttccttaccagcctccctttctctgtcagtggggacgtcatcagccaagctggaagccattaatgaactaattcgttttgaccacatatataccaagcccctagtcttagagataccctctgagacagagagccaagctaatgtggtagtgaaaatcgaggaagcacctctcagcccctcaaagaatgatcaccctgaattcattgtctcagtgaaggaagaacctgtanaagatgacctcgttccggagcttggtatctcaaaatctgctttcatccagccactgcccaaaagccatcttcctgcctactggatgcttacaagtgactgtggataccggggggttncctttccccattcagngacattgtcctttttgttg

SEQ ID NO: 3694 - DNA, 648 bp, Homo sapiens
  misc_feature 642: n = A,T,C or G
accatgatcctgaccaatttgacggcgctgcacagggaccccacagagtgggccacccctgacacattcaatccggaccattttctggagaatggacagtttaagaaaagggaagcctttatgcctttctcaataggaaagcgggcatgcctcggagaacagttggccaggactgagctgtttattttcttcacttcccttatgcaaaaatttaccttcaggcccccaaacaatgagaagctgagcctgaagtttagaatgggtatcaccatttccccagtcagtcaccgcctctgcgctgttcctcaggtgtaatattgttaagaaagaaaggggcaaggaaagtaagaagacatggcaccgtgttctgaaaccactggtgtctgctcagatgtgttgggacaaaatgaaagtgactttcaagaaagatcagaggaatttgactcagagaaaactagatccaaatcccagctctactgtctcgtccgaattagtcttgggaaaatcatttatatgctaaataatttacctttttatctaggagatgaaaagaggataatgtttccttccataaagaaagttcttgtaagaatcaaaagaaatgggtgagctttaagtggtttgtaaaccataaaacacatnattaaa

SEQ ID NO: 3695 - DNA, 318 bp, Homo sapiens
  misc_feature 305: n = A,T,C or G
acgcggagaagaaggccaagaagcctgcactggtggccaagtcctccatcctgctggatgtcaagccttgggatgatgagacggacatggctcagctggaggcctgtgtgcgctctatccagctggacgggctggtctggggggcttccaagctggtgcccgtgggctacggtatccggaagctacagattcagtgtgtggtggaggacgacaaggtggggacagacttgctggaggaggagatcaccaagtttgaggagcaccgtgcagagtgtcgatatcgcagctttcaacaagatctgaancctgagtgtgtgt

SEQ ID NO: 3696 - DNA, 557 bp, Homo sapiens
  misc_feature 517, 519, 557: n = A,T,C or G
acgcgggggtcagacccagtcaggacacagcatggacatgagggtccccgctcagctcctggggctcctgctgctctggctcccaggtgccaaatgtgacattcagatgacccagtctccttccaccctgtctgcatctgttggagacagagtcaccatcacttgccgggccagtcagaatattaccagctggttggcctggtatcagcagaaaccagggaaagcccctaacctcctgatctataaggcgtctagtctagaaagtggggtcccatctagattcagcggcagtggatctgggacagaattcactctcaccatcagctgcctgcagcctgatgatttcgcaacttattactgccaacaatatcacagttggacgttcggccaggggaccaaggtggaaatcaaacgaactgtggctgcaccatctgtcttcatcttcccgccatctgatgagcaagttgaaatctggaactgcctctgtttgtgtgcctgctgaataacttctatccananaggccaaagtaccttggccgggaccacgcttaagggcn

SEQ ID NO: 3697 - DNA, 490 bp, Homo sapiens
  misc_feature 379, 488: n = A,T,C or G
acacttgaaaccaaatttctaaaacttgtttttcttaaaaaatagttgttgtaacattaaaccataacctaatcagtgtgttcactatgcttccacactagccagtcttctcacacttcttctggtttcaagtctcaaggcctgacagacagaagggcttggagattttttttctttacaattcagtcttcagcaacttgagagctttcttcatgttgtcaagcaacagagctgtatctgcaggttcgtaagcatagagacggtttgaatatcttccagtgatatcggctctaactgtcagagatgggtcaacaaacataatcctggggacatactggccatcaggagaaaggtgtttgtcagttgtttcataaaccanattgaggaggacaaactgctctgccaatttctggatttctttattttcagcaaacactttcttttaaagcttgactgtgtgggcactcatccaagtgatgaatcccgcngt

SEQ ID NO: 3698 - DNA, 649 bp, Homo sapiens
  misc_feature 26, 95, 444, 446, 501, 508, 564, 585, 596, 598, 624: n = A,T,C or G
actttttttttttttttttttttttngcttaccatttgcttattaaatcttcctccatcttttttatttgagcctatgtgtgttgttgctgtganatgggtctcctgaatacagcacactgacgggttttgactctttatccaatttgccagtctgtgccttttaattggggcatttagcccttttacatataaatatatgtaacccatcacataaacaaaaccattgacaaaaaccacataattatctcaatagatgcagaaaaggcctttgatgaaattcaacaccccttcatgctaaaacctctcaataaaccaggtattgatggaacgtatctcaaaatagtaagagctatttatgacagacccacagccaatatcatactgaatgggcaaaagctggaagcattccctttgaaaactgacacaagacaaggactccctntntcaccactcctattcaacataatattggaagttctggccggggcaatcaggcaanaaaaaanaaataaaggggtagtcaaaataggaagagaggaagtcaaattgtgtctgtttgcanatgacatgattggttttttanaaaactccatngncttaacccacaatctccttaagctgntaaagcaacttaagcaatttctcaa

SEQ ID NO: 3699 - DNA, 651 bp, Homo sapiens
  misc_feature 574, 591, 607, 609, 636, 648: n = A,T,C or G
actaattgaaccgatgttgacagttgtggttctgaattcaccaagttctcttccatcaggacggcagttctctttcagaaatctcctgtaatactccagaggttccacggttttgaacccagccgccatcttcccgcccgcgcgtctccccgcgtacagaaagttatagagattatattgtgatgctggaacttggagtgagacacacatcatttggcatttgagttgaatggtaattcacagtaatgctgccgttgttcgggacttaaagacacttgacctgtttgggctgttgccacttaaaagttcatggccacaaatgtccacagtgtcttcctctgaggaaactcgaatcctgaaatggaaattctttgtggcagataactggcttatgacaccttgaaaagtcaagtgctcatataacacaccacactgaaccccttttcctacagcaatatgttcactatgttaccaatttgcaacttgtgcttcaatagtggaatctactttcattggttaacactgagctaaagaaaaaaaagccgtgtgttttatgaatgaccttatctgtttncctggataatacctttnaaaaaataatgtcctnanttcaggcgttggtgggtgcgtgccatntaattccaactnttt

SEQ ID NO: 3700 - DNA, 650 bp, Homo sapiens
  misc_feature 460, 490, 539, 572, 601, 616, 621, 636, 640, 641: n = A,T,C or G
acgcggggggcttcctcctcctgagcagtcagcccgcgcgccggccggctccgttatggcgacccgcagccctggcgtcgtgattagtgatgatgaaccaggttatgaccttgatttattttgcatacctaatcattatgctgaggatttggaaagggtgtttattcctcatggactaattatggacaggactgaacgtcttgctcgagatgtgatgaaggagatgggaggccatcacattgtagccctctgtgtgctcaaggggggctataaattctttgctgacctgctggattacatcaaagcactgaatagaaatagtgatagatccattcctatgactgtagattttatcagactgaagagctattgtaatgaccaagtcaacaggggacataaaagtaattggtggagatgatctctcaactttaactggaaagaaatgtcttgattgtggaanatataattgacactggcaaaaccaatgcanactttgctttccttggtcaggcagtataatccaaagatggtcaaggtcncaaagcttgctggtgaaaaaggaccccacgaantggttggatttaaagccaaaattttgttnggatttgaaaattcnagaanaagtttgtttggtangaanntgccccttg

SEQ ID NO: 3701 - DNA, 650 bp, Homo sapiens
  misc_feature 537, 585, 597, 607: n = A,T,C or G
acgcgggtcagcattcttgctccttgtggccctctcctacactctggccagagataccacagtcaaacctggagccaaaaaggacacaaaggactctcgacccaaactgccccagaccctctccagaggttggggtgaccaactcatctggactcagacatatgaagaagctctatataaatccaagacaagcaacaaacccttgatgattattcatcacttggatgagtgcccacacagtcaagctttaaagaaagtgtttgctgaaaataaagaaatccagaaattggcagagcagtttgtcctcctcaatctggtttatgaaacaactgacaaacacctttctcctgatggccagtatgtccccaggattatgtttgttgacccatctctgacagttagagccgatatcactggaagatattcaaatcgtctctatgcttacgaacctgcagatacagctctgttgcttgacaacatgaagaaagctctcaagttgctgaagactggaattgtaaagaaaaaaaaatctccaancccttctgtctgtcaggccttgagacttgaaaccagaagaagtgtganaaagactggctnagtgtggaancattagtgaacaccactgatttagggttattggtttaaatgtt

SEQ ID NO: 3702 - DNA, 651 bp, Homo sapiens
  misc_feature 400, 479, 480, 496, 539, 555, 578, 598, 603, 614, 636, 645: n = A,T,C or G
acgcgggggccaaacttgaccgcgcgttctgctgtaacgagcgggctcggaggtcctcccgctgctgtcatggttggttcgctaaactgcatcgtcgctgtgtcccagaacatgggcatcggcaagaacggggacctgccctggccaccgctcaggaatgaattcagatatttccagagaatgaccacaacctcttcagtagaaggtaaacagaatctggtgattatgggtaagaagacctggttctccattcctgagaagaatcgacctttaaagggtagaattaatttagttctcagcagagaactcaaggaacctccacaaggagctcattttctttccagaagtctagatgacgccttaaaacttactgaacaaccagaattagcaaataaagtanacatggtctggatagttggtggcagttctgtttataaggaaccatgaatcaccccaggccatcttaaactattttgtgnncaagggatcatgccanactttgaaagtgacacgtttttttccaaaaatttgatttgganaaaatataaaactttntgccaaaatacccaagtgttctntcttgatgtccaggaagganaaaanggcattaagtnccttgcccgggccggccgttcnaaaagggcnaattcc

SEQ ID NO: 3703 - DNA, 647 bp, Homo sapiens
  misc_feature 592: n = A,T,C or G
acaaagcatttctgcttccaagagaaatatcattgctacaaaaaactggcacattattctgtgaaaaaagacatgagtttttagttgtgttctacagctagttcccgacccaatgcttcacatatccacacgaaagtaaaaggcaggtaagacaaaaagggctgtagttttttctgaaataactcaagtcttcaaaatatagcttttatattctttgtaaagtgggattagcatattgcaactgaagggtgttctaacaaacaaaaattccagtctggataataattctatggtagacaaaagaattctcagcctcttgggtttcctggaattctttgcttcatgctctcctcttccactatgcagctaaggtagtttaggaattaagatgtcaccccttggccatccccctttagaacgtatcttaatgtgaacataaattgttcttcatgatgcttaaaagcttacatataattttcattcttagaaaaacgccacatttttggatcctgggatttttctgaatatcatgattggaaaaaacaaaacaaaaaatgaaccccaaatcaaagtgtggttaaacttatatganaaagaatttttcaaccagatgggtcattcaaaaaagtttggaacctgtaaagtgc

SEQ ID NO: 3704 - DNA, 411 bp, Homo sapiens
acgcggggacatatccactcctgctctccctcctgcaggtgaccccagccatgaggaccatcgccatccttgctgccattctcctggtggccctgcaggcccaggctgagtcactccaggaaagagctgatgaggctacaacccagaagcagtctggggaaggcaaccaggaccttgctatctcctttgcaggaaatggactctctgctcttagaacctcaggttctcaggcaagagccacctgctattgccgaaccggccgttgtgctacccgtgagtccctctccggggtgtgtgaaatcagtggccgcctctacagactctgctgtcgctgagcttcctagatagaaaccaaagcagtgcaagattcagttcaaggtcctgaaaaaagaaaaacattttactctgtgt

SEQ ID NO: 3705 - DNA, 650 bp, Homo sapiens
  misc_feature 12, 14, 528, 622: n = A,T,C or G
acgcacctgggntnaaaatgcaggcgattcctgaggacgccatccctgaggagagtggcgatgaggacgaagacgaccctgacaagcgcatctcgatctgctcctctgacaaacgaattgcctgtgaggaagagttctccgattctgaagaggagggagaggggggccgcaagaactcttccaacttcaaaaaagccaagagagtcaaaacagaggatgaaaaagagaaagacccagaggagaagaaagaagtcaccgaagaggagaaaaccaaggaggagaagccagaagccaaaggggtcaaggaggaggtcaagttggcctgaatggacctctccagctctggcttctgctgagtccctcacgtttcttccccaacccctcagattttatattttctatttttctgtgtatttatataaaaatttattaaatataaatatccccagggacagaaaccaaggccccgagctcagggcagctgtgctgggtgagctcttccaggagccaccttgccacccattcttncccgttcttaacttttgaaccataaagggtgccaggtcttgggttgaaaagggatacttttatgccaaccataaacaaactcctgaaattgccnaagtgccctgcttagtaacttttggaaa

SEQ ID NO: 3706 - DNA, 650 bp, Homo sapiens
  misc_feature 632: n = A,T,C or G
acctgtattggggaaacatagcatacaagcaagaagcttacagcctcagtggcgaaaattttttcatgtcagagaccgagaactcttgcagtcgtttatgtcatcccttcttctccagacagaagataccaaaaagttgcaatcaaagatctcttcatcttattgataaagccactaataagccaaaatgtctgtcaatgtcaaccgcagcgtgtcagaccagttctatcgctcaagatgccccgtctgattgccaaggttgagggcaaaggcaatggaatcaagacagttatagtcaacatggttgacgttgcaaaggcgcttaatcggcctccaacgtatcccaccaaatattttggttgtgagctgggagcacagacccagtttgatgttaagaatgaccgttacattgtcaatggatctcatgaggcgaataagctgcaagacatgttggatggattcattaaaaaatttgttctctgtcctgaatgtgagaatcctgaaacagatttgcatgtcaatccaaagaagcaaaacaataggtaattcttgtaaaagcctgtggctatcgaggcattgcttgacacacatcattaaactctgcacattctttctcaaaaacccacctgaanaatagtgacagtggtacc

SEQ ID NO: 3707 - DNA, 649 bp, Homo sapiens
  misc_feature 192, 193, 196, 197, 209, 218, 574, 633: n = A,T,C or G
acgcacctggggtccaaatgcaggcgattcctgaggacgccatccctgaggagagtggcgatgaggacgaagacgaccctgacaagcgcatctcgatctgctcctctgacaaacgaattgcctgtgaggaagagttctccgattctgaagaggagggagaggggggccgcaagaactcttccaacttcgaannacnnacaacattccantcatagatnggacctcattagaacagttgtagtcacaacttgcaataaccatttttgcgagctgtggatctagaggaaactctgccatcatggatcccaattcagtcagatctccatcatcatttaaagcagccaggtaattcaaaagttccagggctctcatcagagtttcaggagctggtggatccataaaatcaaaatgtacatcatttccagagcaggcactggcagcgagatagggttggaggagaagtagcgccgggacttccggatggcaaacttctctgtgggtagagatttccagcaatcttgagcttcaggcctggcacagctcgaaataattccacttcgtccgtccccgaacnggcttgtggtccttcttcccaaacatgctgaggtagccggcctttcattgtaaatgtanggtggcctttttaaag

SEQ ID NO: 3708 - DNA, 459 bp, Homo sapiens
acgcggggggagccagggccggaagtagagcggaggtggtggcggcggaggctttggcagctcgggactgagtgcaagaatcagcatgattcttcagaggctcttcaggttctcctctgtcattcggtcagccgtctcagtccatttgcggaggaacattggtgttacagcagtggcatttaataaggaacttgatcctatacagaaactctttgtggacaagattagagaatacaaatctaagcgacagacatctggaggacctgttgatgctagttcagagtatcagcaagagctggagagggagctttttaagctcaagcaaatgtttggtaatgcagacatgaatacatttcccaccttcaaatttgaagatcccaaatttgaagtcatcgaaaaaccccaggcctgaagaaataaagtaaaattaatctggtaattttgtcacggattaattgt

SEQ ID NO: 3709 - DNA, 295 bp, Homo sapiens
  misc_feature 119, 140, 285, 286, 291: n = A,T,C or G
actttttctttgaagttttagcggtcaatttgcctttttaatgaacatgtgaagttatactgtggctatgcaacagctctcacctacgcgagtcttactttgagttagtgccataacanaccactgtatgtttacttctnaccatttgagttgcccatcttgtttcacactagtcacattcttgttttaagtgcctttagttttaacagttcactttttacagtgctatttactgaagttatttattaaatatgcctaaaatacgtaaaaaaaaaaataaacaannaaaanaggt

SEQ ID NO: 3710 - DNA, 585 bp, Homo sapiens
  misc_feature 215, 222, 232, 274, 293, 296, 338, 371, 390, 417, 437, 464,474, 481, 485, 491, 497, 504, 517, 532, 533, 535, 538, 540,545, 553, 560, 561, 570, 583: n = A,T,C or G
accgaccatagagcaagaatcaagattctgctaactcctgcacagccccgtcctcttcctttctgctagcctggctaaatctgctcattatttcagaggggaaacctagcaaactaagagtgataagggccctactacactggcttttttaggcttagagacagaaactttagcattggcccagtagtggcttctagctctaaatgtttgccccnccatccntttccacagnatccttcttccctcctcccctgtctctggctgtctcgagcantctagaaagagtgcatctncancctatgaaacagctgggtctttggccataagaagtaaagatntgaagacagaaggaagaaactcaggagtaagcntctagcccccttcagcttntacacccttctgccctttctccattgnctgcaccccaaccccagccnctcaactcctgcttgtttttcctttgnccatgggganggtttanccantagatnccttgnaaggtanatgggggccatanattccttaaaaaaannantgngnacctnccccgggncgggctnnttgaaaggncgaatccatcccnct

SEQ ID NO: 3711 - DNA, 470 bp, Homo sapiens
  misc_feature 233, 349, 364, 405, 407, 411, 426, 430, 447, 470: n = A,T,C or G
acccaagggggtgaggatggcattgtgggcgatcagctcccatcttccctctggcttgcccctgtcttttttcccctacaaatcccctggttcctggtgcctctcgatggctgacccaaccttcctcagggcaggtagctcctcttctcagtcctggcctcccatccaagcccatgagggccccttccttgctggaaaaactctgtctgtgttagtcctggaggagggaacanatagttcccccagaaaagggccaagcctcccttggggagcaactccagcccttcttggtctgtcctatctgctcagccagatgtttggggccttccacctgaccagctgatggcangggtcctgtcacaanggccagggctatgggttgtgtcccccacttgtgttgttgtntngcanggcatgtagggggancaantttaaccaatggctttnaaaggggctggtgtcttactaan

SEQ ID NO: 3712 - DNA, 368 bp, Homo sapiens
  misc_feature 77, 152, 275, 324, 335, 336, 344, 359: n = A,T,C or G
acttgctggtctcaaatttccacaaggagatatcaatggtgataccacgttcacgctcagctttcagtttatccaanacccaggcatacttgaaggagccctttcccatctcagcagcctccttctcaaatttttcaatggttcttttgtcnatgccaccgcatttatagatcaagatggccagtagtggtggacttgcccgaatctacgtgtccaatgacgacaatgttgatatgagtcttttcctttcccattttggcttttagggggtagtnttcacgacacctgtgttctggcggcaaacccgttgcgaaaaaaaacaanacaaaaaaaanngtaccctngggccgctacccacncttagggcg

SEQ ID NO: 3713 - DNA, 656 bp, Homo sapiens
  misc_feature 261, 271, 293, 354, 356, 374, 427, 451, 486, 552, 557, 588,590, 598, 613, 619, 628, 636, 647: n = A,T,C or G
acacaatgtgcttccttgtttgtattataacacatttcaaatagggacctttgacagggcagaagcatgaaaggacaccaaccacgagtgacacactatactatggctgtcctgtgtcacatgctatttggcctggggatatagcaaagcctaatgtaactaaacaacaaaacccccaattatttcatgtcgtcaggaagcttactttaaaagaatagcttggcctgctggtggctcacgcctgtaatcccagcactttcngaggccaaangtggatcacctgaggtcagganttcgagaccagcctgaccaacatggggaaaaccccgtctctactaaaaatacaaaaaaatnanccaggccgttggttggcngggtgcctgcaatcccagctcttccggaggctgaggcaccgagaatccgcttngaacccaagaggcggaggttgcantgagccaagatcacaccaactacactccaacctangcaacagaacaagactctgtctcaaaaaaaacaaaaacaaaaaggaggcaccaaaccccaggcttnaagtntctgcagcctgctccaaattttgggcacaananggactcanacaggcactgtgtgngcaccnaggttttanagggggtnggtcagacctnaggcttaaa

SEQ ID NO: 3714 - DNA, 424 bp, Homo sapiens
  misc_feature 385: n = A,T,C or G
acatttcaccctgatcataaaagagggacaagggagcactgggctctactggatagcctttcttttagataagatgcttttaaaagttaaacattggcagggcctttcccctagctaacagcaagcagcacacaattccaagtcagcttgtaaagcttttgttatctttgttatctgttattatttggattttgaacgaaattgatggagtaccttaaatttgcatcttccctctcatacccaatctgtaaacaattgaaatattttgtcttaaatcacttggttcaatacatgcttatttgttttaaaacctgtatcatcaaactctctctctaaatttaaaatgctgttgaatatgatacttttgaggagagagtgtgctcanaacttagacgggatttggtaggccaagtatgctaagtgt

SEQ ID NO: 3715 - DNA, 441 bp, Homo sapiens
  misc_feature 264, 299, 317, 380, 427, 433: n = A,T,C or G
acgcggggactgcgggctggtccgggctcctcaggttcagacccgaccgttatccagtcggttcgtggagaggagaggtgcactttacaggtccccgatgaaccaagagaaccctccaccatatccaggccctggtccaacggccccatacccaccttatccaccacaaccaatgggtccaggacctatggggggaccctacccacctcctcaagggtacgttagtgttcgcgattttaaaggcaaagtgctaattgatattanagaatattggatggatccttgaaggtgaaatgaanaccaggaagaaaaaggtntttctttaaatccagaacaatggagccagcctgaaggaacagattctgacattgatgatgcantaagaaaactgtaaaattcgagccatttaaataaaaccctgtacctnggcccncgaccacg

SEQ ID NO: 3716 - DNA, 657 bp, Homo sapiens
  misc_feature 334, 349, 360, 449, 473, 476, 482, 493, 501, 503, 512, 524,526, 552, 573, 577, 586, 599, 600, 604, 608, 611, 615, 617,622, 637, 639, 640, 643: n = A,T,C or G
acgcgggggatgctgcgcctctccgaacgcaacatgaaggtgctccttgccgccgccctcatcgcggggtccgtcttcttcctgctgctgccgggaccttctgcggccgatgagaagaagaaggggctcaaagtcaccgtcaaggtgtattttgacctacgaattggagatgaagatgtacgccgggtgatctttggtctcttcggaaagactgttccaaaaacagtggataattttgtggccttagctacaggagagaaaggatttggctcaaaaacagcaaattccatcgtgtaatcaaaggacttcatgatccaagcgggaacttcaccanggggagatggcacanggaggaaagancatctacggtgagcccctcccgattaaaaacttcaacttgaagcacttacgggcctggcttgggtaaccatggcccaccgcaagcaaanacaccaaccggttcccagttcttnatnacaacnttcaaagacancctggctnanatgcaaacnttgtggtgtttngnaaaatttctaaaggccattgaagtgntcccgaaagtggaaaaccccnaaanaaacacccnggaataaaacccnngaangatnttnatcntncaaanttgcggcaaaacaangnnganaaaccccttttcct

SEQ ID NO: 3717 - DNA, 560 bp, Homo sapiens
  misc_feature 394, 484, 498, 506, 540, 544, 555, 558: n = A,T,C or G
acccttggaagatgggaaaggtgagggaaatatttgaagcagggtcagaacatccactaagaacatagcacctcagtagagcttacattatagtgccagggtagagttattactgaatagcttaggatgatgaacattaaccttcctacaggagtagtagcagctgatttggtgaccatcattggtcaccttttagtgtaactgcaaactaagaacaattatggcttgacatatactccatgtagggaagtgatgggagaggcagcctctgtgtggtccatccttggaagcactgcatcgattttgctcccctctggttttaaggagatcttttagacctttccttgctaactgctttcagtaaattcttgatggccttcgattctggattcanacatctcttctcacccttctttttcattgtagcaattgatctcaacaccgtggacaaaaattggcttgcaggaataattttcaagttttnctaaagacctttgnattaacangttgattacttaatgctgatgcaggtacctcggncgcnaccaccctaanggncg

SEQ ID NO: 3718 - DNA, 370 bp, Homo sapiens
  misc_feature 292, 295, 299, 357, 359: n = A,T,C or G
acagaaagtaaaaatgctgttacaatctcagtgtaactggtagccacagacggttgactcaccaatcacagctatccacgctacagcaagaatcttacacaaaaacctaacaacgcttacaattttgttggggtgaagtccacaagcttggtggtagattaccaagagggactacatggaaggaaggcggaatgtcacaggaactattctttggctctttgggtgggtgggtgtcctggggtttgtatcacagctaccttttttttttttaaacagctacaaaatccatgancantccnaaccaatactgaacagttctgtttctgcaggtcatctggggtcttaatcattcttctncntcatcatctgt

SEQ ID NO: 3719 - DNA, 355 bp, Homo sapiens
  misc_feature 167, 170, 176, 178, 182, 185, 186, 188, 212, 242, 245, 247,255, 272, 278, 309, 316, 317, 323, 330, 334, 342: n = A,T,C or G
actccaagctgcaggatttcataactggggcaattgtggttggatttcatcccttactggtctcaaccaaaatattcctgttggaatcatgatgataatcatagcagcacttttcacagcatcagcagtcatctcactagttatgttcaaaaaagtacttttttttnttntttttntnaacnttnncncggaaactgggtttcaccaccgtnggccaggatggtctcgatctcctgacctcnganancccgcccnccttggcctcccaaagngctggnattcaggtgtgagccacttgtgcctgcccanattcttnncctttntttcaanaaantgaatccnttgaaaataatta

SEQ ID NO: 3720 - DNA, 596 bp, Homo sapiens
  misc_feature 9, 44, 200, 208, 234, 310, 417, 428, 453, 464, 473, 489,495, 496, 511, 519, 520, 523, 532, 545, 553, 570, 583: n = A,T,C or G
acgacttanataaatatgatgaggaaggtgacccagatgctganactcttggtgaatctctcttgggtcttacggtctacgggagtaatgatcaagatccttacgttactctgaaagatacagaacaatatgaacgtgaagatttcttgattaagcccagtgataatcttatagtttgtggccgagctgaacaggaccantgcaattnataggcgcatgtttataatcaagaanaagactctttttattgtacatggcatttataatgggagcccttttattgggagagagggaagagaacacatgtganggtgaaggtgaaatatgaagaagctcacagcacaccttttgttcctctaccgtgtaatccatgccgtgccatgctccagccctcacaagagggggaccccatccccnccaccaggcangggagcatttaaagcattctccacnaacaaattttnaatgcatanttagaacctcttcccntgtaanntcattaatgaaaaantcctgctnngantagctaganctgtagctttaanctcacctntcaaaaacaaacttatncttgtataacacntaggttaacctta

SEQ ID NO: 3721 - DNA, 541 bp, Homo sapiens
  misc_feature 90, 145, 182, 215, 299, 300, 320, 359, 366, 373, 379, 388,395, 397, 403, 407, 412, 431, 443, 447, 452, 454, 463, 467,478, 495, 501, 502, 503, 529: n = A,T,C or G
accacgaagtcaatacttctcagtgagtagggaaggcaaaatacttcctcaatagcagggaaaaaaaaacaagagaaagactgaatttanaaaaaaaagacaactgttaaagaaaatgtttaagtcaacttttttttttttttanacaaggatattgcaactatcacttaaagtctggtggncattctttagtaggtccttaaggcaatatattnaaattaatttacaatttgatttgatgttaaagtttttttaaacatcacctcaaaataaatgctcaaaataatgccctcacaatnngcctttgtaaaatggattcnagatgtttagataaaaaataactggtgggctttatattnccagcancgctcanttagcnccactatanttaaggntntaccangttnccagnaaaaccacctgtttcttanggagtttcaccntaanagatncntttggcttnaccnattggggagcncacaaaaaaacaatttntatcannngctggggctttttttgtacctcgccngggccggccttt

SEQ ID NO: 3722 - DNA, 626 bp, Homo sapiens
  misc_feature 409, 412, 499, 503, 516, 517, 525, 544, 554, 559, 568, 582,589, 596, 599, 607, 608, 614, 619, 621, 624: n = A,T,C or G
actgggataaatgaagaagaaggcataaggacaataaacatggaactccactgcaaatggattttatgcagctgaggaaagtttgggcttattagtatttgctccagcgaacctccaagttttctccattgcggacaacgtaactaccagctccttggctcagtggttcgcctccactcagaagttcccagtaggttctgtcattattgttggcacataggccctgaatacaggtgatatagggcccccatgagcgctcctccattgtgaaaccaaatatagtatcattcattttctgggctttctccatcacctgaggaagacagaaccatttagcaccagtgacattggtgaaatatgtttcattgattctcacagagtaattgacggagatatatgattgtgaagncangagggtgtcacaagttataggctcatcaacgggagatgttgaaagttaccttgaagcaaaaacgcaagaaagagctttgttaatatncaanaaggtctttcccnncaggggcngtgtaacacctggggctgnaaccgtttgnattgntgatgctcnttgagaaatttccngtgagcnttgtatncangagcttgnnggcaantccancnatnta

SEQ ID NO: 3723 - DNA, 481 bp, Homo sapiens
  misc_feature 341, 407, 433, 446, 452, 471: n = A,T,C or G
accactgtcttggaaatacagctttgagacaccaaataagatgtcagaagccatcaatgtcttggcagaaggtgacaggaagagagaagaatgaaacaatatttattaacagcgggagcctcctcctgtcttcaagaacacctcctcccttgccatctgaatggggccattggcacgtgtcctggtgggcctggaattccccgagtagattggtccacacaaatggccccctaaacccataaacacaaatggcaaaacttcaaatgaaaacgaaaggaaaaatacagtttctatgtcatgtaaaattttcaggggttggctggaggaagaatggagctcanggccaaagttcagaagttacttcctctttttcttggggggtgcagagctgtgtctggaaccacggntagagccacggccgaactgtgcacanatccttcctcttncggctnatacttcactttgttcttntttcttcctc

SEQ ID NO: 3724 - DNA, 346 bp, Homo sapiens
  misc_feature 213, 291: n = A,T,C or G
actgagacctattggagcttgtggccagcatcccatctgcaccgttggtcaggtcactgtcacgtatggctccagagccttggggaccagacttctggccattttaaggtcttcggcagagcaactccccaactccagcccgcaagccatgcccatccgcttcagcacttctatgtcatcctggatttcaaatgtgttgtcaaaattaaacangatactcaaatttgcattggagatgctgcaagtccgatgaccgtcttcttgctggtgttgacgatgatgaaggggcangtggatgactgagttgggtggcgggtggccggcttggtctgctgctccacatgcc

SEQ ID NO: 3725 - DNA, 656 bp, Homo sapiens
  misc_feature 171, 387, 436, 442, 549, 556, 583, 596, 610, 611, 618, 619,623, 637, 638, 647: n = A,T,C or G
acgcggggttggcgatggatatgtggttcatctggcccctccaagtgaggtcgcaggagctggtgcagccagtgtcatgtccgccctgactgacaaggccatcgtgaagaaggaattgctgtatgatgtggccgggagtgacaagtacatcaaatgcccggagcacttcanggctcttgttgccagtctgaaatctcaagtcaacatctctctctctcaaaatctctcttctaccctcatacgttttggcataagggccttgctcagtggggcccattttggcccctataatggaaatcgggcatcacctgctccaccatcaggtctataatcaatttcctcctgccgtcttctatcccgtggccgaagttgcctggggaggttcgntctcaggacccgcctatatgtctcagcacatgaactgattttccagccnccatancaaaaactcaggattggctaaatgccataattatcagcactgggaatatgaacaaccgctggaatttccttcatagagtgctttaataaatccccagttcctttccnatatgcntcaatggcttcggtacaaatgtggtgnatggaaactgcangttgcctttttttnnagggaannaacnaaaaacggtttganntagtaaaancccataata

SEQ ID NO: 3726 - DNA, 467 bp, Homo sapiens
  misc_feature 73, 99, 212, 253, 310, 342, 349, 418, 430, 443, 456: n = A,T,C or G
actttttaatggaaacaacttgaccaaaaatttgtcacagaattttgagacccattaaaaaagttaaatgatnaaaaaaaaaaaaaaaaaaaaaaaaangtactgcaaaaagcctttgacttcaaactgcacaattcagatagcaacacctgggaaaggcaagaagtcaacaccaaaacccatccctattctagctgctggtttttgctcanacaaaatgtcgttgttgcttgtatatggcagttggtttcancctactattgagccgagtggctttaaactccaaagaacctcatatgtgtttagtaanagatatttcaaactgctgggcccccaaagtanaaacagntataacaaaggtgaggacaccagtgatgaattctgaagcaaaattctggtgcctgggattcctggtcancatgcagctatnaagcccgctcctncacaaaccgagtnaattagaaagc

SEQ ID NO: 3727 - DNA, 655 bp, Homo sapiens
  misc_feature 340, 422, 456, 525, 530, 537, 549, 563, 627, 630, 632, 633,647: n = A,T,C or G
acgcggggatattggagcagcaagaggctgggaagccatcacttaccttgcactgagaaagaaggcaaaggccagtatgcacagctttcctccactgctgctgctgctgttctggggtgtggtgtctcacagcttcccagcgactctagaaacacaagagcaagatgtggacttagtccagaaatacctggaaaaatactacaacctgaatgatgggaggcaagttgaaaagcggagaaatagtggcccagtggttgaaaaattgaagcaaatgcaggaattctttgggctgaaagtgactgggaaaccagatgctgaaaccctgaaggtgatgaagcancccagatgtggagtgcctgatgtggctcaatttgtcctcactgaggggaaccctcctgggagcaaacacatctgacctacangattgaaaattacacgccatatttgccaagacanatgtggaccatgcccattgataaagccttccaactctggagtaatgtcacacctctgacattcaccaangtctntgagggncaagcaaacatnatgatatcttttgncagggagatcatcgggacaactctccttttgatggacctggaggaaatcttgcctcatgctttnaancnnggcccaaggtattnggagggga

SEQ ID NO: 3728 - DNA, 594 bp, Homo sapiens
  misc_feature 136, 230, 342, 355, 361, 385, 386, 436, 448, 459, 462, 510,519, 522, 523, 543, 558, 561, 562, 566, 591: n = A,T,C or G
acttcctgttctggcttcccagaagtgacctcagcttcattcggtccttctggtgctgctcctccttttgcctcttcagaggtttcagttaaccaatctagagtcaagtcaactttttcctgtggctcctctgcanatttacttatatccatatcttctcttccacccttctccatttcactgtcctgttctttatcagtttcaggctttgccaaagacttgtcttctgnttttttggcttcttctttttctccatggcgtcataaacctgttctctcaactcttcccttgcttcctaatctatgttatcattattttctaccagagattcatcttctgatntttctccttcttnctcttncacatgcacaccttccaaggcgtnnccaacacaccattctccattcttggcaactccagaagtgatttccccatnagaaaaaagaangcttctcccanctnattagcctgactttccatactttcttacctaaaaagactagctgcttnctggaatgnatnnacaagctgcgtggaaatatnccccatcaccagatngtnnctgncctaaacccaataattttcttagcntta

SEQ ID NO: 3729 - DNA, 657 bp, Homo sapiens
  misc_feature 88, 316, 363, 425, 458, 514, 537, 539, 552, 564, 571, 584,585, 595, 607, 636, 643, 649, 651, 652, 655: n = A,T,C or G
acgcgggggtggtggagaaggacgtgccgtgccgctgggttctgagccggagtggtcggtgggtgggatggaggcgaccttggagcancacttggaagacacaatgaagaatccctccattgttggagtcctgtgcacagattcacaaggacttaatctgggttgccgcgggaccctgtcagatgagcatgctggagtgatatctgttctagcccagcaagcagctaagctaacctctgaccccactgatattcctgtggtgtgtctagaatcagataatgggaacattatgatccagaaacacgatggcatcacngtggcagtgcacaaaatggcctcttgatgctcatatctgttcttcancagcctgtcataggaactggatcctacctatgttaattaccttatagaactactaaaagttncagtagttaggccattcatttaatgtgcattangcactttttctgtttatttaagaaatcaattgctttctatgctctatggaccgacnatcaaagatatttattaaagaanangatcattgttttnaaacaccaggtncaagttnacttttatatatnnaatttgctgnattcaataaatntgttttgagtaaaaaaaaaaaaaaaaaanaaaagtnccttangnntcnac

SEQ ID NO: 3730 - DNA, 451 bp, Homo sapiens
  misc_feature 244, 392, 412, 439, 446: n = A,T,C or G
accacctcaggtgtttgctgtctttcttcaggttcctctacttcttcttcagactcctcctgaggctcagtgacaaacccaccaaagacctcatcttggtatctgaagatatcattgtgaacatagaatttatttgcaacagacccctcaggagcaaggacaaacgtttgcatgaatctcctcaaagcctggttgttgttagagagaagccccatcacctggactaccacaccatcatttaccngtggcatgagcatcaacatggcgaatcttggtgtggcagttggtgaaagttttgtgacatcactttcctgtggatttctttctgtccgtagactgcatctgctggcttccatttgaatccaatcccccatggacataagaagagttcntttccataaaatctatgcancatgtctggggcctggttcaacagtgngtaatantgtct

SEQ ID NO: 3731 - DNA, 468 bp, Homo sapiens
  misc_feature 276, 320, 405, 418, 425, 436, 445, 447, 452, 455: n = A,T,C or G
gtcggccgaggtaccaagaaaagggtgtccgttgctagagaaacttggtgtgactgttcgataaactccaaagcttgttcccatcatacccgtaatgctttcttttttcctttattgccaatctttgaactcattcaactccaggacatggaagaggcctctctctgccctttgactggaaaggtcaagttttattctggtgtctatggggaagctttgttaaatttttgttaatgtgggtaaatctgagtttaattcaactgcttccctacatanactagagggctaaggattctgtctgctgctttgtttcttctaantaggcatttagatcattccttgtaggcttcctattttaactttactgctctaatgctgctaagtcgtagtcttttatcacactangtggttgcctttnttagcanaaaaaaaaaanaaaaaaaantncctgnccnggcggccgttcta

SEQ ID NO: 3732 - DNA, 579 bp, Homo sapiens
  misc_feature 120, 157, 165, 241, 251, 302, 310, 311, 346, 349, 352, 401,402, 406, 433, 436, 438, 459, 462, 471, 504, 516, 518, 536,542, 555, 557, 562, 563, 578: n = A,T,C or G
acacaatggtttattaaaggaatgtatggcccacatcaacctagcaaggattctactggtaaaccttcctatggccaaaggaaaaacaagcaggagttgagtggctggggtggggtgcangcaatggagagagggcagaagggtgtagaagctgaangggtctanaagcttactcctgagtttcttccttctgtcttcaaaatctttacttcttatggccaaagacccagctgtttcatangctggagatncactcttctaactgctcgagacagccagagacaggggaggagggaaagaangatactgnnggaaagggattggcggggcaaacattatagctagnaanccnctactgggccaatgctaaagtttctgctcttaagcctaaaaaaagccanngtantaaggcccttatcactcttagttttgntangntttcccctttgaaatatgaancanatttacccntgctagcacaaaatgaagaaggacggggctgtncaggagttaacnanaatctttatttctagctntatggncggtcctgccccngncggcnnctttaaaagggcaant

SEQ ID NO: 3733 - DNA, 564 bp, Homo sapiens
  misc_feature 220, 396, 418, 441, 443, 460, 482, 485, 491, 493, 532, 533,542, 560: n = A,T,C or G
acatcatctggttctcccagacccttttaggactgaactgtgctttaaatagttacatgtctgcctgttacacagtggaaactagtttccttcagagggacacgaaaccacagatgaggccacaaagaaagcattctccttccacaagcaactggctgagaaaacagaaccaggaaaattctgccttgaggaaacaatgtcagcttcctgaatcatccanggagaaagggggagagaatagattttaaaatgcttaaaaaatggcctttcagagtgctctgttccaactgtttgtgtgtttgcaatcctgtgtcaataatacttgcctcttaacagaaacacctggcccccagccatcgtcaacacacattgggccccttctccaaaacacaagangctgattcctctcctgccctgntgagaagcgcctgccaccagagngnatggggagacagggaanggggaagttctttcctgagctnaanctctcnancttggaattgcctgttgcaacatggccagggaattgacnntgacccctngaaggcttttttccttgnaacc

SEQ ID NO: 3734 - DNA, 527 bp, Homo sapiens
  misc_feature 231, 309, 311, 406, 420, 465, 470, 488, 489, 504, 508, 509: n = A,T,C or G
acatagacaagtttcttgtaagacagaaaacagagaaatccacagtaactctaacacatcccttaaggaataagcatgtatttgtaggaagcaaacaaagctttccatagagaaaccactttccccgcgtactaaacgagcaggtgaaggaggctgaaggatcgtctgctgaatacaagaaagaaattgaggaactaaaggaactgctacccgaaattagagagaagatanaagatgcaaaggagtctcagcgtagtgggaatgtagctgaactggctctgaaagctctctggtggagagttctacttnangtttcactcctggtggaggaggctcttcagtctccatgattgccagttgaaagccaacagacggtgcttcctcatcaaattgtgtgactgatatntcccaccttgtcanaaagaagaggaaaccaagaggaagagagtccccggaaagatgatncatanaaagccatacatggaccnngaggtgaaacgggangcanngggggatgcctgtcccca

SEQ ID NO: 3735 - DNA, 421 bp, Homo sapiens
  misc_feature 27, 78, 111, 117, 120, 154, 156, 207, 218, 256, 272, 275,295, 296, 300, 305, 307, 308, 309, 318, 343, 345, 346, 348,351, 386, 401, 403, 409, 411: n = A,T,C or G
acttttttttttttttttttttttttnggatatcgatctcttttaatttttaggccaattttgagtagtcaaagtcanagcagtcaatctgtgttgtgagccgaggcacanctgcanaancgtgtcatgaggtgtccggtggaggtggcagccnanctctgggactaatcaccgtgctggggacggcaccgcttcaggatgcaggcngatccctgcanaagtgtctaaaattcacactccttttctggaggggacngtcgatggtattaggntanaagcaccaggggaccccacnnaacngtgtntnnnaaacaccancccttatttacacactgggagggcntnncnccntgaaaacacaatttctttcttttcacggggggccnactggtacctctggncntaaccncnctaatggcga

SEQ ID NO: 3736 - DNA, 376 bp, Homo sapiens
  misc_feature 255, 311, 324, 330, 348, 359, 363, 375: n = A,T,C or G
acgcgggatcccaagtccagcgtgaagggccacagcccctcttggctgccaagcacgcagatcccatggacatttggggaaagggctccttgggctgctggtgaacttctgtggccaccacctcctgctcctgacctccctgggagggtgctatcagttctgtcctggccctttcagttttataagttggtttccagcccccagtgtcctgacttctgtctgcacatgaggagggaggccctgcctgtgtgggangggtggttactgtgggtggaatattggaggccttcaacttgattaaacaaggcccnccacatcttgganggcatntgccttactgattaaaantgtcaatgcantaanaaaaaaataaana

SEQ ID NO: 3737 - DNA, 336 bp, Homo sapiens
  misc_feature 270, 273, 277, 291: n = A,T,C or G
acagcgggggcttttgtttgtgtccctggccatggcgctgcagctctcccgggagcagggaatcaccctgcgcgggagcgccgaaatcgtggccgagttcttctcattcggcatcaacagcattttatatcagcgtggcatatatccatctgaaacctttactcgagtgcagaaatacggactcaccttgcttgtaactactgatcttgagctcataaaatacctaaataatgtggtggaacaactgaaaaattggttatacaagtgttnagntcanaaacctggttgtanttatctcaaatattgaaagtaggtgaggtcctgaaaagattgcaa

SEQ ID NO: 3738 - DNA, 506 bp, Homo sapiens
  misc_feature 184, 258, 275, 313, 369, 370, 383, 393, 403, 424, 427, 428,431, 439, 462, 471, 472, 475, 487: n = A,T,C or G
accgaccatagagcaagaatcaagattctgctaactcctgcacagccccgtcctcttcctttctgctagcctggctaaatctgctcattatttcagaggggaaacctagcaaactaagagtgataagggccctactacactggcttttttaggcttagagacagaaactttagcattgacccantagtggcttctagctctaaatgtttgccccagccatccctttccacagtatccttctaccctcctccctgtctntgcctgtctcgaccagnctataaagagtgcatctccagcctatgaaacagctggntctttggccataagaagtaaagatttgaatgacatgatggaagaaactcaggagtnngcttctagacccnttcaagcttntacacccttntgccctctttcattggctgcnccnncancccagccntctcaactctggtttgttttttnctttggccnntangaaaggtttacnagtaaaatcccttgctagg

SEQ ID NO: 3739 - DNA, 535 bp, Homo sapiens
  misc_feature 208, 264, 271, 293, 305, 322, 354, 409, 415, 442, 450, 454,484, 499, 509, 514, 531: n = A,T,C or G
acgtcaagcaggagtgcaatcgcacccacaaccgcgtgtgcgaatgcaaggaagggcgctaccttgagatagagttctgcttgaaacataggagttgccctcctggatttggagtggtgcaagctggaaccccagagcgaaatacagtttgcaaaagatgtccagatgggttcttctcaaatgagacgtcatctaaagcaccctgtanaaaacacacaaatttgcagtgtctttggtctcctgctaactcagaaaggaaatgcnacacacnacaacatatgttccggaaacangtgaatcaactnaaaaaatgtggaatagnatgttaccctgtgttgaggaggcattcttcangtttgctgttcctacaaagtttacgcctaacctggcttaattgtctatggtaganaaattntgcctggcaccaaagttaacgcagaanagtgttanaganggatttaaacgggaactcagcttcacaagnaacagtactttccanctgcttgaanttatngaaaacatcaaactaangacc

SEQ ID NO: 3740 - DNA, 497 bp, Homo sapiens
  misc_feature 350, 369, 381, 405, 433, 442, 460, 465, 497: n = A,T,C or G
accattggtggtggtatctttcaagcaatcaaaggttttcgcaattctccagtgggagtaaaccacagactacgagggagtttgacagctattaaaaccagggctccacagttaggaggtagctttgcagtttggggagggctgttttccatgattgactgtagtatggttcaagtcagaggaaaggaagatccctggaactccatcacaagtggtgccttaacgggagccatactggcagcaagaaatggaccagtggccatggttgggtcagccgcaatgggtggcattcctcctagctttaattgaaggagctggtatcttgttgacaagattgccctctgcacaantttccccaatggtcctcantttgcaaaaaanccctcccagttgccttcaactcanttaccttcctcacccttttggaaactantcgacaatntcagtagggacttctttnctaangatttcttttaacaaaacaagttgtgggttcn

SEQ ID NO: 3741 - DNA, 362 bp, Homo sapiens
  misc_feature 104, 156, 165, 173, 194, 198, 201, 211, 229, 243, 244, 248,255, 257, 273, 274, 280, 286, 291, 297, 299, 324, 326, 327,328, 335, 339, 340, 359: n = A,T,C or G
acaattccttgttttcaagggtaagttccaagacttccagactcaggtttgaagtcaggtcctggtgaaggtcgtcatgctgttgtgatagcgtttaggtcctncattagtccttccaggtgggccatctctttggtcagctcatctggttcatanctactctcngagtcttncaacatcatgtggctcctgcncttnaangggcactggnaacaaccactggcatagnaggcccggctcctnnctanagtcccntntggatgcttgtcttannctaganctgaantgtgnatggancncaaccttgctgggacaacttatcgngnnnttcttgnctanngctagatcatcaagtaggnggt

SEQ ID NO: 3742 - DNA, 472 bp, Homo sapiens
  misc_feature 36, 39, 60, 68, 114, 125, 126, 168, 178, 197, 212, 254, 297,298, 301, 308, 324, 328, 331, 337, 345, 351, 354, 360, 361,362, 367, 369, 373, 375, 376, 377, 385, 387, 392, 399, 412,417, 418, 429, 432, 443, 452, 466: n = A,T,C or G
acttttttttttttttttttttttttttttttgggncanctatttaattaggttcttaanacatttanaacaccaatttgtgaggataaattccattcgtcaaagcaaacacangatcgcaggtnnccctggagctgaggaatacctttgatttttggtaaaatttgngagtccacanctttctgatcaatcttgcnctgctccagtaatcncatatttctctttttctgggtcaaaaatctcaccttcctggnggtctgggcttccgcagcttcttctttttgaagtaagcctcannaanatgtttngggatttttacattgntgantcnattttngttgaacnggcaantgnaaattnnnggtgngntctncnnnaaggaacncnattgnggcccanaggtcccgttccnaaggnntaagccacttnccngctgcttttanggaaaacanccccttttcccccngtggcg

SEQ ID NO: 3743 - DNA, 425 bp, Homo sapiens
  misc_feature 305, 311, 319, 321, 395, 415: n = A,T,C or G
actgtatttatttcttattttatacaactcttactctttacaaaaatggttatagtcatgcccataaaagtgtaacccatggcatttgaaagcaaacactctttgtaattatttaaaagggcctttttaaaaattataatacaaaggtctgtgctctataagcagtcctccactgtgcattgtaacaataaggcttacttttaatacaaagactaagcggtttgggagttatgaaccactggatttaacaaacatcattttataattgctttttgcatcttttttgtttttgggatcctccactncatcangggtgctnancaggcttggagttctacagcagattcttctttctctggactctgaatcgctttcagaatcatctggactttcangatcaggtgaatcatcatcngccatcatca

SEQ ID NO: 3744 - DNA, 544 bp, Homo sapiens
  misc_feature 251, 310, 324, 369, 403, 410, 419, 424, 435, 445, 448, 450,458, 477, 479, 480, 487, 490, 503, 509, 510, 520, 522, 524,538: n = A,T,C or G
actggagatgtatttgataaccaaggttttaggtaaattttcaccagtattagttctatttgcaaactgaaaaatgttgtaggcttaatgtaaaataaccacattagtgaacattatatctcttagaagaaaggccatattttgctcctgcttctgtaaaaatattatttgtttgaaggggaaataatggtagtgtgacctttcacttaattcctactcccttaatgtgagagagacaaaatgagctgaanaaggaaaaattctggaagttacactccacaacctttgaacatacctgacgggacatctntggttttgacaacnattttctccatgccacccatgctctaaatgccttgtgggatcacnggacaaccctctttgccaagctacaagcatcacngatgttnatcttgcancaaancactgcaagantaaatgacangcntnaactggtncctggggtttttgccatcntnncaccagntancgggctattgacntgaatnnccccataatnantncttctgcctccagnattgta

SEQ ID NO: 3745 - DNA, 655 bp, Homo sapiens
  misc_feature 55, 197, 241, 249, 252, 504, 510, 523, 538, 541, 543, 545,546, 555, 562, 573, 579, 584, 594, 599, 601, 607, 614, 621,625, 626, 638, 643, 652: n = A,T,C or G
acacgagaagctccgaggatggctgaagtccaacgtctctgatgcggtggctcanagcacccgtatcatttatggaggctctgtgactggggcaacctgcaaggagctggccagccagcctgatgtggatggcttccttgtgggtggtgcttccctcaagcccgaattcgtggacatcatcaatgccaaacaatganccccatccatcttccctacccttcctgccaagccagggactaancagcccanaancccagtaactgccctttccctgcatatgcttctgatggtgtcatctgctccttcctgtggcctcatccaaactgtatcttccctttactgttatatcttcaccctgtaatggttgggaccaggccaaatcccttctccacttactataatggttgggaactaaacggtcaccaaaggtggcttctccttgggctgaaaaaatggaaaggcgtgggtgggatttgctccctgggttccctaggccctattgangggcanaagaaaaaaccantcctcttcctttctnaancngnngaggccaanaatcccntaaaaaaggcnaggaantgctncccctttccnatggntncccctnccttttntcttttntttnngaaaccaccccnttggnaagggaaanaaa

SEQ ID NO: 3746 - DNA, 284 bp, Homo sapiens
  misc_feature 52, 107, 120, 123, 143, 157, 162, 183, 208, 215, 222, 223,228, 255, 258, 262, 277: n = A,T,C or G
actttgtttgctgatacaaggtgagccaaaggggtggtgaaaagaacacacnaaaaaggatctttgtctaacccacaaaggttgagaaatttgcactgatacttaanttctgaactccanaanggctgctaatcaaagctggngatcatttttgcangacanccttactttttccaaaagtantttatatttagttagttgataaccnaaaaaantgtccanngagtnaataccctactgtacaagtgaggttanaancaantccctgggtccttgngacctac

SEQ ID NO: 3747 - DNA, 502 bp, Homo sapiens
  misc_feature 135, 162, 168, 186, 187, 205, 233, 235, 257, 269, 272, 279,284, 286, 295, 305, 315, 321, 333, 335, 342, 346, 348, 353,360, 361, 368, 369, 372, 373, 376, 386, 399, 406, 413, 414,415, 419, 430, 431, 432, 433, 436, 443, 462, 465, 486: n = A,T,C or G
  misc_feature 493, 495: n = A,T,C or G
acttttcttttttttttttttttttgctgttgtcccagatttattgaaaataatacagcactacagaaaaaattcaaaaaggtcccccgaggcgttttgaaattcatccccaactgtaggctgagtgacctgaangttggacaagaactggccgaaaatccnaaaaancttcagcatttcccttanngtcagggatcttactttnaataatctcctgaatcccaaggcttgananccttaggaaacattaattggcntctcctttcttnttnctcctcntgcancnttgatgggnaaataccctnttaactgggncctttntgaattccgttnantcaaaantccntnacatnaacctgnnttttttnnttnnagnaacctttttnctgggggaatatngcgaatntccttcnnnaacnccccttgttcnnnntgnaatttanttgcccaagccccctgtantanccttgggcccggaaccccccntatgggngnaatttca

SEQ ID NO: 3748 - DNA, 124 bp, Homo sapiens
actggccaggaaggtggagtaggtttcaggccctggggatttcaagtgcagactgatggcctgggaggggccaaagagaccagatcctggcagcagctgaggaggtgcccaagggcactttcag

SEQ ID NO: 3749 - DNA, 654 bp, Homo sapiens
  misc_feature 186, 333, 337, 356, 407, 434, 442, 456, 472, 475, 500, 520,521, 529, 532, 554, 562, 573, 583, 592, 602, 604, 612, 622,626, 643: n = A,T,C or G
acgcgggggtgccaggcgatcttcctggagggtcattagcagcattgagcagaaaaccatggctgatggaaacgaaaagaaattggagaaagttaaagcttaccgggagaagattgagaaggagctggagacagtttgcaatgatgtcctgtctctgcttgacaagttcctgatcaagaactgcantgatttccagtatgagagcaaggtgttttacctgaaaatgaagggtgattactaccgctacttagcagaggtcgcttctggggagaagaaaaacagtgtggtccgaagcttctgaagctgcctacaaggaagcccttttgaaatcancaanagagcagatgcaacccacncatcccatccggctgggcctggccctcaacttctccgtgttctactatganatccaagaatgcacctgatcaagcctncctcttanccaaacaagccttnatgatgccatactganctngacacactaacgaggattcctatanggactccacgctgatctccnntttgctgnaanacaacctcaccctttggacgancgaccagnaggattaagangcaggataangcaactgangatccttcanantcccttgncctttctttncccncaaccccatcattaccntatctttcctt

SEQ ID NO: 3750 - DNA, 614 bp, Homo sapiens
  misc_feature 17, 38, 56, 231, 261, 318, 321, 329, 343, 391, 395, 399,409, 416, 419, 437, 456, 466, 483, 492, 495, 499, 527, 539,546, 551, 558, 562, 564, 572, 576, 586, 610: n = A,T,C or G
acgcgggggcatcctanccgccgactcacacaaggcangtgggtgaggaaatccanagttgccatggagaaaattccagtgtcagcattcttgctccttgtggccctctcctacactctggccagagataccacagtcaaacctggagccaaaaaggacacaaaggactctcgacccaaactgccccagaccctctccagaggttggggtgaccaactcatctggactcanacatatgaagaagctctatataaatcccangacaagcaacaaacccttgatgattattcatcacttggatgagtgcccacaccagtnaanctttaaanaaagtgttttgctngaaaaataaagaaatcccagaaattggccagagcagtttgtcctcctnaatnctgntttatgaaanaactgancanacaccctttctcctgatnggccaatatgtccccaggnattatgtttnttgacccttctctgacnagtttaganccnattnttcactggaagattttcaaaccgtcttntattgcttaccnaacctgnagatncaagctntgtngnttgacaanatgnaaaaaagctntcaactttgctgaagaattaattngtaa

SEQ ID NO: 3751 - DNA, 586 bp, Homo sapiens
  misc_feature 235, 292, 314, 328, 353, 381, 390, 396, 440, 444, 463, 467,480, 481, 487, 491, 509, 512, 515, 521, 544, 545, 553, 559,561, 571: n = A,T,C or G
acacttgaaaccaaatttctaaaacttgtttttcttaaaaaatagttgttgtaacattaaaccataacctaatcagtgtgttcactatgcttccacactagccagtcttctcacacttcttctggtttcaagtctcaaggcctgacagacagaagggcttggagatttttttctttacaattcagtcttcagcaacttgagagctttcttcatgttgtcaagcaacagagctgtntctgcaggttcgtaagcatagagacggtttgaatatcttccagtgatatcggctctnaactgtcagagatgggtcaacnaaacataatcctgnggacatactggccatcaggagaaangtgtttgtcagttgtttcataaaccaanattgaggangacaancctgctctgccaattttctggatttctttatttttcagcaaaanactntctttaaagcttgactgtntggncactcatccaatnngatgantaancatcaagggtttgttggnttnctntggatntatataaagcttctcatatgtcnngattccanatgaantnagtcagcccnaacctttggagaggg

SEQ ID NO: 3752 - DNA, 273 bp, Homo sapiens
  misc_feature 10, 123, 140, 186, 191, 202, 229, 235, 237, 245, 253, 258,267: n = A,T,C or G
actataagantaaagaaaattgtgttgtggataacatcaaagtgtgcagtaatgacactgggagtggaaaattcaagtgtgtttgcatcactatgagagtgcctcggaacccaactatcgganataaatttgccagtccncatgggcagaagggcattttaagcacattgtggccggctgaggacntgccnttttacttganagtgggatggttcccgactttctgttnaatccnantggttttncatcactngagtnaccattgcnatgtaa

SEQ ID NO: 3753 - DNA, 497 bp, Homo sapiens
  misc_feature 459: n = A,T,C or G
actcattcctcttcaagagcaccactggaaacatctttggaattgatgggacaaaacttatttgattatagtgaaggatatttctctacgaaaatggcttcaaaataggaaaaaagtagctaccacatcttccaggaaatccaataacaggtcaactctattggtaaacaagcaagtaaacaagcaagcaaacaaaccagcatgtgacagaaaactggctaatattctgggacgctttccagagaaacattaagccttttaagtgtgtatgagccactttaagaaacttcataagtgttgctaaattcaccacagtctgcttcactgaactgtgacattataatattcttctggtgtcacgatttttggtccaccaaagtagtccaggacccagatattggttatattcaacttagcaaagaaccaattatggctggaaggccaaggtttcatcttcanggtgtcgaatgaataacgaatgctttgcaatcccgcgt

SEQ ID NO: 3754 - DNA, 541 bp, Homo sapiens
  misc_feature 540: n = A,T,C or G
acgcgggggaatcatcgaatggaatggaatggaacagtcaatgaactcgaatggaatcatcattgaatggaatcgaatggaatcatcgagtggaatcgaatggaattatgatcaaatggaatcgaatgtaatcatcatcaaatggaatcaaaaataatcatcatcaattggtattgaatggaattgtcatcaaatggaattcaaaggaatcatcatcaaatggaaccgaatggaatcctcattgaatggaaatgaaaggggtcatcatctaatggaatcgcagggaatcatcatcaaatggaatcgaatggaatcatcatcaaatggaatctaatggaatcattgaacagaattgaatggaatcgtcatcgaatgaattgaatgcaatcatcgaatggtctcgaatggaatcatcttctaatggaaaggaatggaatcatcgcatagaatcgaatggaattatcatcgaatggaatccgaatggtatcaacaccaaaaaaaaaaaaaaaaaaaaaagtacctgccccggccggccgctcna

SEQ ID NO: 3755 - DNA, 562 bp, Homo sapiens
  misc_feature 334, 380, 397, 414, 498, 507, 544, 558: n = A,T,C or G
acagatgcagccgtgcaggagccgagccaattaatttcattagaggaagaaaaccagcgcaaggaatcctctagttttaagactgaagatggaaaaagtattttatctgccttagacaaaggctctacacatactgcatgctcaggacccatagatgaactattagacatgaaatctgaggaaggtgcttgcctgggaccagtggcagggaccccggaacctgaaggtgctgacaaagatgacctgctgctgttgagtgagatcttcaatgcttcctccttggaagagggcgagttcagcaaagagtgggccgctgtgtttggagacggccaantgaaggagccagtgcccactatggccctgggagagccagaccccanggcccagacaggctcangtttccttccttcgcancttttagaccaaaatatgaaagacttacaggcctcgctacaagaacctgctaaggctgcctcaaacctgacttgcctggttcancctcttcgnttgaccttcgacccactctcaaattcctgatgctggngggaaaacccggantcta

SEQ ID NO: 3756 - DNA, 647 bp, Homo sapiens
  misc_feature 63, 290, 315, 365, 395, 419, 424, 425, 493, 527, 532, 539,541, 543, 571, 587, 599, 607, 610, 616, 629, 633, 637, 646: n = A,T,C or G
acgctggcagggccagtggcaggaagggagggacaagtggacagtggtgtgtctgaattgtanagtgttagattccaggtcattcccatctgctcaattccatcagccgcagagttcaagctgtcatctaagcccagggaggtgtaaggaacaggccacatctggttcttggaagtatatgcccaggcatttaaagcggatctttcctctttgggccatgggtggatttcctgctcaagcaaccttcatctcttaaagctgtgttgctggaatctggactttccattcangctggggcccatcaatcactcggcngctcctctacatgacatcgaaacgcttcctgcagctcatctgggacggantggccattcactgtcccggcacatccaganccctggcatggactggctacttanagcanngaactctcccttctctgctccaggcctgaagacttgcagtctgctttaccatcatcctctttcttctntgtagaacacgtgcaaatggtcttgccagttcantcctnaatccancntntttccctgggaacaatactgttacctanttcaacaaacaatcantaaaaattttantgggcccnatncccgcnctttaacttcttnccanatcngaaccgggng

SEQ ID NO: 3757 - DNA, 313 bp, Homo sapiens
  misc_feature 48, 91, 108, 110, 185, 192, 198, 201, 217, 219, 223, 233,234, 242, 251, 252, 262, 269, 272, 273, 274, 278, 279, 290,299: n = A,T,C or G
acttcttgcccttgtagaatttcctgaggttttctttctgagtctggntaataactgtgagaacacgggcaatggatttccggacgactcngatcttacagagcttgnangccgcaccacctgtcaatttggcgacgcgcagctagggacagctccaccttcaggtcctccagctgtttcagcanctcctgnttcttnttncctgcgaaggatcttnancctngatcttagcnnttgctagntcaagcctnnatacgccacntgccggntannnctanntaccgtgccangggcggtcnatacgaatgggcta

SEQ ID NO: 3758 - DNA, 576 bp, Homo sapiens
  misc_feature 273, 335, 431, 496, 561, 562, 568: n = A,T,C or G
actaaaaattttaaacgtcaccttggtgtttttttcaagactaagtgtgataccacgtaaggcatttccatgtcataaattaattctaccatatttttatgtaaaaaatgctgcacgttgttgtgtctgcagctgtgctgtgattatgagacagatacaatgattcacactggctggaagctaagtctcacgtcccagggatcagggcagtccagcccggtgctgccacaaagggtggtggtatcaggtcacacctaggacctgccactttanactgaccttgtttgatccacggttgtgaccatgtattaccacaaatttaacaataaaaaatngttttaagagtatctgagaaaggactaagcagtcattccattttgtgtccttcccttgttttaaaataagcaacgtcctatacttccatcatttanagatcatcaagctgacttgttcaagtcttgggcccatgtcatccttccagaacaagccatcctangattttaaatgggtctacaaaataaagtgagaagattgaccccaagtcccgcgtacctcggccgnnaccacnctaagggc

SEQ ID NO: 3759 - DNA, 689 bp, Homo sapiens
  misc_feature 529, 570, 576, 593, 605, 611, 619, 626, 640, 644, 649, 663,678, 680, 683: n = A,T,C or G
acgctttgccagtgtggctgggtccacctgcatctagagaaaaagaaaacactatgagggtcagaccatgctgtctcctgtgtgcacaggtcttcacttgttgacgttaaaaagccagatggtaaacagtggttgagacaatggccccggtatctagaagacattcctggaaaggcacaggatttctgtgcaacattttcaattgtttttctttgacaattccaaattcttctcaagaagaaggcatttctcttaaggaaaatgcctgttgacacacagtttgtaagtgtggatgccatctgaaaccactgtttagttgataatgaactctggcatttgcccaccaagaaattctgtcagtcacctatagtgtatatggtgaggtgtatacatcttaattcaattgaaacagagaaaccgagagaaataaaatttccttttcagaggaaagaagacgactttaccatgtgaacccccgtggcttcctcagagactgtctgcctggcacatgctcctccaggtcttccangtcacctaggaaacagaagtcgttataagcacatgagctcnctgagntgaatccctcaggtggncttggagctgtngacccnggctggcnatgtgtngaaaaggtgtggtnacancacanaactcacttgctgnccggtccatcctccntngtngaaagg

SEQ ID NO: 3760 - DNA, 502 bp, Homo sapiens
  misc_feature 7, 20, 24, 37, 40, 43, 51, 55, 56, 60, 68, 71, 77, 82, 87,91, 210, 237, 253, 266, 291, 299, 302, 305, 309, 326, 363,394, 396, 414, 417, 419, 424, 443, 463, 470, 471, 477, 493,494: n = A,T,C or G
catcctnctattgatattanctantgtcattaagccntancanacagtaangctnntatnctcttctnaanaaacanaattngtctntgtntttaaatagccaatgtgaaagatgtaataaaatacacattttccccctaccagatccatgatggctaccttagaaagaggactgatataattgtatataaacttggctttgaactattncacaggtaaaccaatggaaaactgccngttacacttaaagcanagaaaacatgtangaattctcccacagaaatttaccgncctacgtnaancanttcntaaataaccactgatgnatccaacaacctataacatgttggcactgactttatngcataacatttgctagatgttgcttaacttntnctttcccaaaggaccctnatnantcgtnctgatactttgggtgtatntggatgttttttcctttggngaaaccnnctcttnaatagaatgcctttcnnttttacct

SEQ ID NO: 3761 - DNA, 410 bp, Homo sapiens
  misc_feature 64, 69, 168, 170, 185, 232, 258, 283, 285, 294, 298, 307,312, 315, 327, 331, 340, 342, 354, 364, 367, 378, 388, 396: n = A,T,C or G
actttttttttttttttttttttttttggaaaatcactcctttgtctttattaaagaaacttanaccanacctggcaatcaaggggtgaggtactggccaggaaggtggagtaggtttcaggccctggggatttcaagtgcaaactgatggcctgggaggggccaaananaccaaatcctggcancagctgaggaggtgcccaagggcactttcaggcactggggccatcanctggttctcattgacctctccatatncggtgactcattgtagtcattcatntngtccatgtnctgnatatcctcntcatnctntgagtcctcttnaatntcctcatgngnttcatcatcctntttttcctgnaantcatagagctntgaggctggnttgcccantaggaccatgttgt

SEQ ID NO: 3762 - DNA, 649 bp, Homo sapiens
  misc_feature 127, 196, 248, 331, 340, 349, 408, 475, 505, 519, 521, 527,533, 559, 560, 571, 574, 578, 583, 617, 618, 627: n = A,T,C or G
accctttggatttcaaacagtaacatcggatgtaaacaaacttagttccttttactcactgaaactaatcaagcggctctacgtagacaaatctctgaatctttctacagagttcatcagctctacnaagagaccctatgcaaaggaattggaaactgttgacttcaaagataaattggaagaaacgaaaggtcanatcaacaactcaattaaggatctcacagatggccactttgagaacattttanctgacaacatgtgtgaacgaccagaccaaaatccttgtggttaatgcttgcctactttgttggcaagtggatgaagaaatttnctgaatcanaaacaaaanaatgtcctttcagagtcaacaagacaaacaccaaacctgtgcagatgatgaaacatggnggccacgttctgtattgggaaacattgacagttcaaattgtaagatcattagagcttcctttcaaantaagcattctcagcatgttcattcctactncccaaggatgtggnangatgantccacnggctgggagaatattggaaaaacacnncaacttcagantcnctgncacantggactaatgcccagcaccatggcctatgcccanngtcaaactntcatttccaaattttaggtgga

SEQ ID NO: 3763 - DNA, 281 bp, Homo sapiens
  misc_feature 48, 52, 92, 126, 157, 160, 168, 170, 183, 193, 199, 213,214, 227, 233, 241, 242, 248, 253, 271: n = A,T,C or G
accttctggggcatacaacatggcagcagggccttgggaagaggggtnggangaccgagcagcattctctgtagaggaagacaggaaagganaccctcttggcacacatttatggagggttgtccntgaacagaagggcaggtgggagaggttcccntgntacttaananaaggcaccagttngcatagagcncaatgnacaggatgatgatnnataacaatccacngataanggacaatnntcttcncgttnttccaccagaattttctngcctcctttt

SEQ ID NO: 3764 - DNA, 566 bp, Homo sapiens
  misc_feature 5, 185, 284, 332, 372, 393, 402, 412, 417, 428, 460, 463,470, 497, 518, 541, 551, 552, 560: n = A,T,C or G
accanatacttgcatgtagaaggaggtaattttcatgccagttcacagcagtggggagccttttttattcatctcttggatgatgatgaatcagaaggagaagaattcacagtccgagatggctacatccattatggacaaacagtcaaacttgtgtgctcagttactggcatggcactcccaanattgataattaggaaagttgataagcagacccgcattattggatgcagatgatcctgtgtcacaactccataaatgtgcattttaccttaaggatacanaaagaatgtatttgtgcctttctcaagatagaataattcaaatttcangccactccatgtccaaaagaaccaaataaagagatgatanatgatggccgcttcctggacnatcatttancacagataangcatnagtatacatcntatgagggtaatgggccctgtccttgccccantcnctcctgngcctgtggtaagagagcctttagtttnaatggcgggtggggaccgtancattgcttgaacttacaggacanaatttcactnntaatttangagtgt

SEQ ID NO: 3765 - DNA, 646 bp, Homo sapiens
  misc_feature 383, 454, 469, 499, 515, 533, 534, 545, 593, 602, 608, 617,640, 643: n = A,T,C or G
actttaaaatctgagaaagaattcaagaaaaaaagattacatgtcatgtattttttcaaataaaaaaggaaaactaagtgaataaattttaggcatactaagtgtccctttgaggtagaatgctaaaaggacttttgatgaaatcacagcctaaaaacctctgcatcagaaactaacttctcataaattctctctaaaggtaactgtggagaatattaagtgtaacatattaacaagagccttccaagataatatacagtagacaagaatgttaatcctacaatgctgccttcttgtactggttggactgtggggcatgtggccgctgcagttccagtggttatttctaagtctatgacaggacaggcttgttcttgcttcanaaccttctctgacagacacggtaactaaatgtgaaaaaccaataagctggtgactcatgaatacacacgangaaaagcaggaggtntattttatctgccttttcaacatttctttncctctgtgaaatgatngggtcagatgtctttgannaagtgttaaanctaaattcacatgggtaagtgtagggccaacattacaacctaccatcntaatgtgtntagtanactttgggnaaaagcgattttttttcatgtantcnttc

SEQ ID NO: 3766 - DNA, 524 bp, Homo sapiens
  misc_feature 13, 101, 173, 200, 205, 257, 289, 316, 330, 349, 351, 358,373, 383, 389, 393, 430, 443, 447, 452, 467, 473, 489, 498,504, 509, 514, 517: n = A,T,C or G
acgcgggggcggncggcgtgtttgaaagcgaggccaaagtgggtgggagcgcgtgctgttgggagttgcttggaggttggcggcgcggggctgaaggctancaaaccgaccgatcatgtcgcacaaacaaatttactattcggacaaatacgacgacgaggagtttgagtatngacatgtcatgctgcccaaggacatanccaanctggtccctaaaacccatctgatgtctgaatctgaatggaggaatcttggcngttcagcaaagtcaaaggatgggtccattatntgatccatgaaccaagaacctcacatnttgcttgttccggncacccactacccatagaancnatatganaatgaagcctggcangctccttttnagcctnaatnctttacacaatctgtccttacttcctaacattctttnttgataaccattnttantgttngccttcttgtctctnactatnatatttaaaaaaatgncaatacacntgtttngaatntgctngtnaactgct

SEQ ID NO: 3767 - DNA, 642 bp, Homo sapiens
  misc_feature 46, 282, 300, 379, 403, 454, 461, 464, 470, 531, 563, 565,570, 571, 577, 589, 601, 602, 619, 623: n = A,T,C or G
acgcgggggctgactctcttttcggactcagcccgcctgcacccangtgaaataaacagccatgttgctcacacaaagcctgtttggtggtctcttcacatggacgcacatgaaatttggtgccatgactcggatcgggggacctcccttgggagatcaatcctccgtcctcctgctctttgctccctgagaaagatccacctacgacctcaggtcctcagaccgacgagcccaagaaacatctcaccaatttcaaatctggtaagcagcctctttttactntcttctccaacttccctnactatccctcaaccactttctcctttcaatcttggcactacacttcaatctctcccttctcttaatttcaatttctttnattttctggtagagacaaaaaganacactttttatcccgtggacccaaaaactccggcgctggtcacagactggnaaggcanccnttcctnggtgtttaatcattgcaggggatgcctctctgattatacacccacgtttcaaggggttgtnagaccacgcagggacaactgccttggtccttnanccttnngcagcnagtcccgctttnttggggaaaggnncaagtacctttggccgngaancacgcttaagggccaattt

SEQ ID NO: 3768 - DNA, 266 bp, Homo sapiens
  misc_feature 99, 127: n = A,T,C or G
acgcgggggaaaatggaggtatgaatttggggtaagaggaagtgagatctccgcttgcaggtcagcccctgccttgcagggcgggctggcttgactcangccctgtgagatatagggcccagcccanccccacccacagatcccctgctcctgttgtgttctgttgtaaatcatttggcgagactgtattttattaactgctgcctaacttccctgtgttctatttgagaggcgcctgtctggataaagttgtcttgaaatttcaa

SEQ ID NO: 3769 - DNA, 648 bp, Homo sapiens
  misc_feature 201, 294, 307, 321, 413, 429, 435, 440, 451, 452, 453, 491,503, 504, 510, 545, 548, 558, 562, 591, 597, 598, 599, 608,613, 618, 621, 623: n = A,T,C or G
acactcccgtaattttaataatattttaggcaagtcctatgacaattataccaacaagtttcttcaaccccaccaccaccccaccatctctatgctttgcttgcccagactcccttcaccctttcctctgctattaccgcttatggttgaaagtaaaaagcatctccagattacagcaaattcagtggccctgctccatancctggcctctgctgaaggaagaaaaggggtgaaacatgaacagccatcatgggttgtgatgaggcactaccagaagcccagcttgtgttttanaaacatgactctntggacactttccancagataactcttcactgggcttggagaacaaggaaggactatttcaccaaacaccactgtgtttgaatttctagaggctccccaggccaatnattacatttctgcaantgcttnaccanacactcatttnnngcagtattcattgtcccagtccttactcacaattgggnaggggttctcannaaccanaccttacacatcggaggctggggtgagaagtgccncangataaccccntcancaattgaacattcatttaaaaaggagacncaaccnnnggaacttcntctgngatcntcntnaaacattgcctaagaaaaggggcct

SEQ ID NO: 3770 - DNA, 468 bp, Homo sapiens
  misc_feature 127, 247, 275, 339, 356, 363, 368, 372, 379, 401, 412, 417,432, 436, 450, 454, 462, 465: n = A,T,C or G
acgcggggaggccccagccagctcaggctacactatcccaggatcagcatggccgtccgccagtgggtaatcgccctggccttgactgccctccttgttgtggatagggaagtgccagtggcagcangaaagctccctttctcaagaatgcccatctgtgaacacatggtatagtctccaacctgttcccagatgtccaacctggtctgcggcactgatgggctcacatatacagaatgaatgccanctctgcttggcccggataaaaaccaacnaggacatccaagatcatgaaagatggcaaatgctgatccccaagagccacctcaagccatgaantgtcagctggagaacantggtggngcatngganaggattntgacatgaaataaaagatccancccaacttgantgaantggtccagtgtcttntggngacacttggtttgnagangggatagngangtg

SEQ ID NO: 3771 - DNA, 646 bp, Homo sapiens
  misc_feature 476, 579, 590, 609, 611, 615, 619, 622, 629, 635, 641: n = A,T,C or G
accggcttcttctctggggtaggggtagcctcgcccggaagcaaggcctctggaaaaccgcggcccctgagttgcaaacaaatgtcagatcccagatattaaggctaagacatactgcatttgtaataccaaagaaaaacgttcctacctcaaaacgtgaaacttacacagaggattttattaaaaagcagattgaagagttcaacataggaaagagacatttagccaacatgatgggagaagatccagaaactttcactcaagaagatattgacagagctattgcttaccttttcccaagtggtttgtttgagaaacgagccaggccagttaatgaagcatcctgaacagatttttccaagacaaagagcaatccagtggggagaagatggccgtccattttcactatctcttctatactgcaaacagcatactattcattaatgcatggatgtatatggaatgttactcaattnagaaaaacatcaaagtcccttgcaagccaaaagtctgctcccagaaaaaactgtaaccagagacatgattggcaccatatggcttgattaaggaggactaganaaaatgttagnggaaaaactgcagatctanantatntgcnttnttcgggntgctanaaaagntattt

SEQ ID NO: 3772 - DNA, 294 bp, Homo sapiens
  misc_feature 15, 17, 21, 24, 35, 41, 45, 49, 169, 181, 193, 206, 225,226, 236, 243, 244, 249, 253, 266, 267, 284, 292: n = A,T,C or G
acctcatagtcaatntnattnttngccgcgtttanatgatntaangcangacataatacataatgcagttgatattaaatatcttgaggaatgtcaatagaactactttcactcttaggcattaactgatcacttataaatgttctgtttatccacttttccattttanattttctccttnaaaggactttantgttgtgaactantcatcattatctgctattnnttggtatacntgcatcnnaagtntttncaaaaataacttnntaaaggtctttccttanatattagntt

SEQ ID NO: 3773 - DNA, 534 bp, Homo sapiens
  misc_feature 188, 209, 216, 224, 258, 267, 268, 282, 291, 299, 309, 318,326, 333, 351, 366, 368, 371, 375, 377, 380, 387, 404, 405,414, 416, 422, 427, 428, 432, 442, 445, 448, 451, 465, 468,476, 484, 485, 490, 495, 498, 499, 502, 507, 510, 511: n = A,T,C or G
  misc_feature 513, 521, 529: n = A,T,C or G
acgcggggcttttgtctgcgggcacgcgccgctgcggtgctcaggaacagcccatggaagaatcatatgaagaggtggtgactgaggtcgtaagcaggagtggacatgtttggatttccaacagctaccctgctggactgtcatggaagatatgcccagaatgtagcgttcttcagtgagtgagtcanttgatggctggatgcgctcanctcacanatattcantgtccctgttctcagcactggtcggcagtctgangaagcaganngagaccttgctttnattgtgatnactgaatncccaccacanatatgaccnattctgangctacangatcctcaagctaggatntaccaaaattctttnanaanaganangcnggaaacnaaaatccccataattcnnaatacactncntgacgnattcnnctgnagtgagacanaanggnccnttcactgcccgaanttntggaaaanccttctcnnaaatnaggtnatnntanctttncanngngagtattnccacctgngcaaa

SEQ ID NO: 3774 - DNA, 375 bp, Homo sapiens
  misc_feature 41, 125, 154, 175, 177, 227, 268, 285, 288, 303, 313, 320,322, 331, 340, 347, 348, 363: n = A,T,C or G
accaggtgttagctgtgaccttcaatgacacaagtgatcanattatttctggtggaatagacaatgatatcaaggtctgggacctgcgccagaacaagctaacctacaccatgagaggccatgcngattcagtgactggcctgagtttaagttntgaaggctcttatcttttgtncnatgcaatggacaatacagttcggtgtctgggatgtccggccatttgcccncaaagagagatgtgtaaagatttttcaaggaaatgtgcacnactttaaaaagaacctnccngatatgttctaggcncctgatggangcataanancaccttggntcagcccgncaagttnngttatgtgtgggatnccacaagcagga

SEQ ID NO: 3775 - DNA, 405 bp, Homo sapiens
  misc_feature 312, 319, 320, 323, 329, 342, 353, 374, 381, 403: n = A,T,C or G
accaccctgagttcctgtccaggcctatcaagccctccccaccatactttggcctcctcctggcctctgtggggcggctctcacattacctccagaaaggctgcaggctctcacccagggacacctatagtgacaggagtggaagcagctcccctgactctgaaatcaccgaactgaagtttccatcaataaatcatgactgatcttgtagcggatgattcttcaagagacccttcaaacttgggtagagtttacagctctgactttacactcgggatttggagactttctttaaattatgtgtttattaanattattnntantatgcngaaaggtatttgngaaactttgtnacttgcatgtcccatcacgtngtacctnggccgctgaccactctaagggncg

SEQ ID NO: 3776 - DNA, 649 bp, Homo sapiens
  misc_feature 25, 91, 125, 148, 185, 230, 239, 252, 257, 278, 316, 323,324, 354, 359, 362, 378, 381, 383, 385, 401, 407, 416, 419,458, 460, 462, 467, 486, 506, 511, 517, 526, 532, 534, 539,545, 554, 557, 570, 574, 576, 584, 600, 601, 602, 608: n = A,T,C or G
  misc_feature 609, 616, 617, 618, 623, 626, 628, 635, 645, 646, 649: n = A,T,C or G
acgcggggcagcggctccagctaanaggacaggatgaggcccggcctctcatttctcctagcccttctgttcttccttggccaagctgcangggatttgggggatgtgggacctccaattcccanccccggcttcagctctttcccangtgttgactccagctccagcttcagctccagctccangtcgggctccagctccagccgcagcttaggcagcgagaggttctngtgtcccanttgttttcctatntcacncggctccgtggatgacccganggacctgccattgctcttgttttcctgccagacaccanctttccnnttggacaagagtgggatcgctttggaaatncacanctnatgttctttctcagangtntnanaaagaacttttccaanagtganggaatatgnccncattaattagcggtgtatgaaaaagaaaactgttaaccntncntgccnaaattgacattactggtanaaagattcacatttcttacnctganctggantttcgagcntgatcnanggtanaaactnaaggaaatnganaaaactggtttanagcntnaaggagantttggggggaagcccnnnaaattnntggaccnnnttcantgngnatataanaaattatgannctn

SEQ ID NO: 3777 - DNA, 360 bp, Homo sapiens
  misc_feature 97, 107, 154, 209, 240, 254, 294, 297, 302, 305, 311, 312,318, 319, 320, 321, 330, 340, 349: n = A,T,C or G
gcgcggggcgcatgcgcgggggccatattatcagcggttattcggtgagcggtggtggtttattcttccgtggagttaagggctccgtggacatctnaggtcttcanggtcttccatctggaactatataaagttcagaaaacatgtctcgaanatatgactccaggaccactatattttctccaaaaggtcgcttataccaagttgantatgccatggaagctattggacatgcaggcncctgtttgggaatnttagcaaatgatggtgttttcttgcagcaagaaacacccnacntccanaancctttnnatgaannnntttttttcngaaaaaattnataaaactnaaataatgaca

SEQ ID NO: 3778 - DNA, 644 bp, Homo sapiens
  misc_feature 449, 454, 456, 514, 521, 541, 553, 558, 559, 603, 612, 642: n = A,T,C or G
acaccaacagcaggtcacacattaacagttgtaactaagcactgtgacaaattagccagttcttcccacattagtccctattaaaacaaaaatggggggaagggagcaaaataagttgctacaaaatgggcaatataattttgccacaattgccaaggtttaaaaagcaaagcaattgtagctaaagacaactgaataaaatgtttgcaagtgttttaaggaaaatgtatataatcatttttaacccctgccttttagtataaggtcaatactgccaatttcatctgtgacaatagcacttggagtcataccattgcctccattattgatctgatcctcctcaatcctccttttgacaatcctaaaatgattgaaatgtgctccacaatccttaatccaaagcattcttaatccatctcttcagatatgtctacagaaagacacatganaagcnangataaacataagaacttcccccaggtaagataaccacaaaacacccccaacatcccanttcacanaaaccagggcaggatagacntttacaccattntcacnngtctgaagagtatggagttaactaaatttaaacattcctgtctntgacattcnctttaaaataccaatttatcaaaagacccnaa

SEQ ID NO: 3779 - DNA, 584 bp, Homo sapiens
  misc_feature 93, 101, 193, 199, 217, 238, 246, 248, 276, 321, 361, 364,418, 427, 429, 434, 457, 487, 490, 493, 503, 504, 511, 521,523, 527, 545, 551, 570: n = A,T,C or G
acacttgaaaccaaatttctaaaacatgtttttcttaaaaaatagttgttgtaacattaaaccataacctaatcagtgtgttcactatgcttncacactanccagtcttctcacacttcttctggtttcaagtctcaaggcctgacagacagaagggcttggagattttttttctttacaattcagtcttcancaactngagagctttcttcatgtngtcaagcaacagagctgtatntgcaggtncntaagcatagagacgatttgaatatcttncagtgatatcggctctaactgtcagagatgggtcaacaaacatantcctggggacatactggccatcaggagaaaggtgtttgtnagntgtttcataaaccagattgaggaggacaaactgctctgccaatttctggatttntttattttnancaaancactttctttaaagcttgactgngtgggcactcatccaagtgatgaattatcntcnagnggttgctgcnngtcttgnatttatatanancttnttatatgtctgattccanatgaanttggtcccccaacctctgnagagggtcctgggc

SEQ ID NO: 3780 - DNA, 373 bp, Homo sapiens
  misc_feature 19, 37, 48, 84, 91, 123, 138, 151, 160, 162, 216, 222, 232,238, 246, 260, 261, 290, 299, 303, 309, 313, 337, 340, 342,345, 347, 348, 352, 362, 366, 368: n = A,T,C or G
gtacacgcttttggccccnaccaatgaggccttcganaagatccctantgagactttgaaccgtatcctgggcgacccagcaanccctganagacctgctgaacaaccacatcttgaagtcanctatgtgtgctgaanccatcgttgcggngctgtctgnanagaccctggagggcacgacactggaggtgggctgcagcggggacatgctcattntcaacnggaaggcgancatctncaataaanacatctctagccannaacgggggtgatccactacattgatgganctactcatncganactcanccanaacacctatttagaattggctgancantntgntnngctncacaattcanttgncnctttc

SEQ ID NO: 3781 - DNA, 366 bp, Homo sapiens
  misc_feature 2, 6, 11, 17, 29, 58, 75, 98, 99, 104, 131, 186, 203, 256,283, 305, 306, 336, 342, 344, 363: n = A,T,C or G
antgantctcngcaaanaaaatcttgcanagtcctccaaaccaacagctggtggcaancagatcacaaaaggtcnaagttgctcagcggagcccagtnnattcnggcaccatcctccgagaacccaccacnaaatccgtcccagtcaataatcttcctgagagaagtccgactgacagccccaganagggcctgagggtcaancaaggccgacttgtcccagccccaaagctggactggagtccaagggtagtganaactgtaaggtcattgaaagcactttntgtgtcaatacctctggccgcnnaccacgctataaggcgaatttcatcacccntggcgngncttactagtgggatccganctt

SEQ ID NO: 3782 - DNA, 537 bp, Homo sapiens
  misc_feature 182, 368, 382, 388, 401, 430, 441, 442, 444, 445, 457, 459,487, 494, 500, 530: n = A,T,C or G
actccaatatctttgttacctccccaagccctgataacctccatactctgtttgaatttgtatttaaaggatttgatgctctgcaatatcaggaacatctggattatgagattatccagtctctaaatcctgaatttaacaaagcagtgatcagagtgaatgtatttcgagaacacaggcanactattcagtatatacatcctgcagatgctgtgaagctgggccaggctgaactagttgtgattgatgaagctgccgccatccccctcccttggtgaagagcctacttggcccctaccttgttttcatggcatccaccatcaatggctatgatggcactggccggtcactgtccctcaagctaattnatcagctcctgtcnacagancgcccatagccanggtcaggcacccactgctgataataagancactacgacanncnnattggcattcancncggacactgcattgaggtttccctccangattcantccganacacccctgtggatgcagtggaaaaatggntgaatga

SEQ ID NO: 3783 - DNA, 464 bp, Homo sapiens
  misc_feature 302, 303, 310, 432, 448: n = A,T,C or G
actgatttaatcagtataaaatcgaaagagctttagatctgtaataaaaatccaaatttggggaagggcaaactttaaaacagcagccaagtagagaagggttggggaagggagaggtgagtgaacaggcacattggaactgtggggacatgtaactgaccactgtcaaaccagtgtaagtttcttggtttctcatggaaaacattttatacacctatttttcttccttccatacttaagtccatcagtgtccaaatacgtctgttccatttttttgtctgatttttgttgggatattacanncacattnttgcatttactccagttcctgctccatgtgaaaaaaattagatgatttcaaatactttcttcagctccacaataagctgccagtcactcttctgcatttcatctctgaaccagtctttgagngcatcaatgggactgncggctgatcttactac

SEQ ID NO: 3784 - DNA, 339 bp, Homo sapiens
  misc_feature 142, 157, 179, 199, 201, 221, 226, 231, 253, 260, 300, 308,310, 319, 334: n = A,T,C or G
acttgtgacaggcagacgtgattgcagccacgaacacgatgaactcactgaagtccacctgggcatctccattggcgtccaggtccttgagcaatttatccacggcatccttgtcttttccactctgcaggaagcctggtanctccttctccatcancaccttgagctcccccttggtnagggtctgcgtgctgccctngntgccctaatatcgggaaaanacgtntatgntcatgcccatggctgtctctantatcgcntggtgctagattcagacccaccttcctcctgggggctggncagggccnanaaatatgtnccccgcgttacctcnggccg

SEQ ID NO: 3785 - DNA, 518 bp, Homo sapiens
  misc_feature 335, 397, 414, 422, 441, 445, 457, 466, 468, 475, 477, 478,493, 518: n = A,T,C or G
actccctgtcgtcaaagtgcttccctctggtaaatacacgggtgccaacttaaaatcagtcattcgagtcctgcggggtttgctagatcaaggaattccttctaaggagctggagaatcttcaagaattaaaacctttggatcagtgtctaattgggcaaactaaggaaaacagaaggaagaacagatataaaaatatacttccctatgatgctacaagagtgcctcttggagatgaaggtggctatatcaatgccagcttcattaagataccagttgggaaagaagagttcgtttacattgcctgccaaggaccactgcctacaactgttgganacttctggcagatgatttgggagcaaaaatccacagtgatagccctgatgactcaagatgtngaagggagaaaaaatcnaatgccancgctattggccccaacatnctangcataaacaacnatggtcagnancagactncnnactggctcttgtganaatgcagtcaactgaagggttttgn

SEQ ID NO: 3786 - DNA, 646 bp, Homo sapiens
  misc_feature 197, 283, 386, 427, 433, 435, 444, 445, 478, 490, 498, 523,526, 531, 533, 541, 543, 545, 550, 554, 561, 563, 569, 593,600, 610, 612, 619, 624, 625: n = A,T,C or G
accgaccatagagcaagaatcaagattctgctaactcctgcacagccccgtcctcttcctttctgctagcctggctaaatctgctcattatttcagaggggaaacctagcaaactaagagtgataagggccctactacactggcttttttaggcttagagacagaaactttagcattggcccagtagtggcttctanctctaaatgtttgccccgccatccctttccacagtatccttcttccctcctcccctgtctctggctgtgtcaagcaagtctagaanagtgcatgtccagcctatgaaacagctgggtctttggccataagaagtaaagatttgaagacagaaggaagaaactcaggagtaagcttctaaaccccttcangcttctacacccttctgccctctctccattgcctgcacccnaccccnanccactcaanntactgcttgtttttccctttaggccataggaangtttacccattnaaatcctntgttaggttgatgtgggccatacanttnctttnantaaaccantngngtacntggnccgggcngnccctcnaaaaggccgaaatccaaccacacngggcggncctttgcttntnggattcngagcnnggtaccaaactttgggggaat

SEQ ID NO: 3787 - DNA, 330 bp, Homo sapiens
  misc_feature 87, 89, 151, 153, 167, 205, 210, 212, 219, 233, 235, 257,280, 290, 294, 310, 326: n = A,T,C or G
actttttaaatcatgttccccctaaacatggctgttaacccactgcatgcagaaacttggatgtcactgcctgacattcacttccananaggacctatcccaaatgtggaattgacctgcctatgccaagtccctggaaaaggagctttantnttgtggggctcatnaaacatgaatcatgcaatccagccttatgggaagtccnggcanantttttgnaagcccttgcacangntggaaaaatggcatcattatancgctatgagttgaaatgtttgtnaaatggtgtntacntctacacgtggcttgnatgcttttttggggcnctgt

SEQ ID NO: 3788 - DNA, 418 bp, Homo sapiens
  misc_feature 2, 12, 20, 39, 51, 63, 77, 79, 95, 97, 100, 104, 111, 124,162, 168, 204, 238, 273, 279, 299, 314, 320, 326, 389, 397,413: n = A,T,C or G
gnacttggccangcgctcanatcggcaaggggcaccagncttgatctgccnagtgcacagccncacaaccaggtcancnatgaaggtatcttcantntcncccnaacgatnagacaccatgacnccccaaccattggcctgggccagcttgcacgcctgaanagactnggtcacggagccaatctggttgactttgagcaggangcagttgcaggacttctcgttcacggccttggcnatcctctttgggttggtcactgtgagatcatcccnactacntggattcctgcactggcttntgaacttcttgccantctccncagtcnatcctggtcaaagggatcttccataagacaccactggggtagtcctttgatgaaggacttggnacctgcgnccgccacccactctantgggc

SEQ ID NO: 3789 - DNA, 519 bp, Homo sapiens
  misc_feature 160, 303, 318, 348, 368, 374, 382, 383, 390, 417, 431, 463,482, 489, 491, 495, 498, 502: n = A,T,C or G
acgcggggagcggctccagctaagaggacaggatgaggcccggcctctcatttctcctagcccttctgttcttccttggccaagctgcaggggatttgggggatgtgggacctccaattcccagccccggcctcagctctttcccaggtgttgactccanctccagcttcagctccagctccaggtcgggctccagctccagccgcagcttaggcagcggaggttctgtgtcccagttgttttccaatttcaccggctccgtggatggccgtgggacctgccagtgctctgtttccctgccanacaccacctttcccntggacagagtggaacccttggaattcacanctcatgttctttctcacaanttcganaaagaacnntcctaantgaagggaatatgtccaattaatttantgtgtattgaaaanaaactgttctacctaactggcccgaattgacnatcatgggagaaagatccntttcttncnctgnatntggncttcagctggatcaagc

SEQ ID NO: 3790 - DNA, 497 bp, Homo sapiens
acagggttttatcagtccaccttccctccaaggagataaaataaatgaaatcagcatttcttccaactcccttggcataaattattacttaccctaagcaagatgactgatgatttttaaagctctttaattatatgctaaatggattagtggctgaagggaagtccttttagagcagtgaaccgggattattccacaaatacctgtatgttgaggtgggtactgtactctctgactccttacctaacaatgaatttgttacataatcttctacatgtatgatttgtgccactgatcttaaacctatgattcagtaacttcttaccatataaaaacgataattgctttatttggaaaagaatttaggaatactaaggacaattatttttatagacaaagtaaaaagacagatatttaagaggcataaccaaaaaagcaaaacttgtaaacagagtaaaaatctttaatatttctaaagacatactgtttatctgctt

SEQ ID NO: 3791 - DNA, 504 bp, Homo sapiens
  misc_feature 264, 344, 348, 489: n = A,T,C or G
ggtactaccacttttatgctagttggcatctgcctttctatacaaagctactattaatcgacattgacctatttccagaaatacaattttagatatcatgcaaatttcatgaccagtaaaggctgctgctacaatgtcctaactgaaagatgatcatttgtagttgccttaaaataatgaatacatttccaaaatggtctctaacatttccttacagaactacttcttacttctttgccctgccctctcccaaaaaactacttnttttttcaaaagaaagtcagccatatctccattgtgcctaagtccagtgtttcttttttttttttttgagacggagtctnactntgtcacccaggctggactgcaatgacgcgatcttggttcactgcaacctccgcatccgggggttaagccattctcctgcctcagcctcccaagtaactgggattacaggcatgtgtcaccatgcccagctaatttttttgnatttttagtagagat

SEQ ID NO: 3792 - DNA, 504 bp, Homo sapiens
ggtacgtttcatgaccaaaatttatcatcctaatgtagacaagttgggaagaatatgtttagatattttgaaagataagtggtccccagcactgcagatccgcacagttctgctatcgatccaggccttgttaagtgctcccaatccagatgatccattagcaaatgatgtagcggagcagtggaagaccaacgaagcccaagccatagaaacagctagagcatggactaggctatatgccatgaataatatttaaattgatacgatcatcaagtgtgcatcacttctcctgttctgccaagacttcctcctctttgtttgcatttaatggacacagtcttagaaacattacagaataaaaaagcccagacatcttcagtcctttggtgattaaatgcacattagcaaatctatgtcttgtcctgattcactgtcataaagcatgagcagaggctagaagtatcatctggattgttgtgaaacgtttaaaagcagtggcccctc

SEQ ID NO: 3793 - DNA, 497 bp, Homo sapiens
ggtacttagagctaattcgcatatatacaggaagggctcttagaatcagtttgtgggcacagagcctcaggagtaaatgaagttactagggctgttcttaccatctccttctggccaaatagcacaacatttcctcgttctgctctgacctcttagcttagaaggaagattcagaagtgaggggctaagaaggttgtccttgcctaatgctctgatctgtaagtgaatagggcagaacagttcagccttgaggttagaatttagcaggagctatcctgacttaatatccagttgtggggtttgcaaaacaaaacagctgtatgtaatcattgccactagttccatctagaactcctttctagtttgttatttttaaaatgtttatacataaaaccaccaaaatacatagcttcgacaagatggaagtttatttctctctcccataacagtgcagtgatagtcagctggtccaggccaggcaaggggctggtccatga

SEQ ID NO: 3794 - DNA, 498 bp, Homo sapiens
ggtacagctgactatccaacatgattcctatggaaacagaaggggcagagtcctggtttgctggcttattgagggcttggcagagaagctaaagctccaaagtgactacagattctctgcaaccggctttgacccatggaaacaggagccagattctcactctagagatagtgagggggccaaacctactcataccacatgcattagtcctggtcatcctccaggaccatgcgtatgatgggcaactcataccaggcaggggaagggagctgattagggaagaagggaccatttttcatcttttaaagtcttaatttatattttaacctcaaacatattatcagtgcctcagatataatttaatcttaagtctttaaaggccccctgaaacaaaagtatactttttatttaggcttcctcactttctggtagtcactttcacccagtctccagttttaccctgacttagagtccacaaacttcatcagaccctctgtg

SEQ ID NO: 3795 - DNA, 498 bp, Homo sapiens
ggtacgcggggagtgtgaaatcttcagagaagaatttctctttagttctttgcaagaaggtagagataaagacactttttcaaaaatggcaatggtatcagaattcctcaagcaggcctggtttattgaaaatgaagagcaggaatatgttcaaactgtgaagtcatccaaaggtggtcccggatcagcggtgagcccctatcctaccttcaatccatcctctgatgtcgctgccttgcataaggccataatggttaaaggtgtggatgaagcaaccatcattgacattctaactaagcgaaacaatgcacagcgtcaacagatcaaagcagcatatctccaggaaacaggaaagcccctggatgaaacactgaagaaagcccttacaggtcaccttgaggaggttgttttagctctgctaaaaactccagcgcaatttgatgctgatgaacttcgtgctgccatgaagggccttggaactgatgaagatctctaatt

SEQ ID NO: 3796 - DNA, 496 bp, Homo sapiens
  misc_feature 138, 167, 178, 239, 251, 285, 289, 305, 320, 336, 350, 355,357, 372, 402, 451, 452, 460, 475: n = A,T,C or G
acatccccagtcgtggccctctggacaagtggcgggccctgcactcatgagggcttccaatgtgctgcccccctcttaatactcaccaataaattctacttcctgtccacctcaaaaaaaaaaaaaaaaaaaaaagtnctttttttttttttttttttttttgcatnaaaaagctttntttccatttggtccaaggcttgttaggatagttaaaaaagctgcctattggctggaggganaggcttaggcanaagccctattactttgcaaggggcccttcaaaantcgntgggctcaaaaggctnttagtcgtgcttganagtgagcctttcgaanagatacttgcccancccancnttcgggccacccatnctgtggaggttggtcaggtggtcacccatnttcttgataagcttcacttccttaatttaggaagtgagtcttcaagganntcacaganatgggggttcgtgcnggcaaaacccaaggcatgaaa

SEQ ID NO: 3797 - DNA, 484 bp, Homo sapiens
acgcggggggtcttcgctggacaccatgaatcacactgtccaaaccttcttctctcctgtcaacagtggccagccccccaactatgagatgctcaaggaggagcacgaggtggctgtgctgggggcgccccacaaccctgctcccccgacgtccaccgtgatccacatccgcagcgagacctccgtgcccgaccatgtcgtctggtccctgttcaacaccctcttcatgaacccctgctgcctgggcttcatagcattcgcctactccgtgaagtctagggacaggaagatggttggcgacgtgaccggggcccaggcctatgcctccaccgccaagtgcctgaacatctgggccctgattctgggcatcctcatgaccattctgctcatcgtcatcccagtgctgatcttccaggcctatggatagatcaggagggcatcactgaggccaggagctctgcccatgacctgtatcccacgtacc

SEQ ID NO: 3798 - DNA, 505 bp, Homo sapiens
  misc_feature 446: n = A,T,C or G
ggtacgcggggagtgtttgggtttcttcgcggctgctcaagatgaaccgactcttcgggaaagcgaaacccaaggctccgccgcccagcctgactgactgcattggcacggtggacagtagagcagaatccattgacaagaaaatttctcgattggatgctgagctagtgaagtataaggatcagatcaagaagatgagagagggtcctgcaaagaatatggtcaagcagaaagccttgcgagttttaaagcaaaagaggatgtatgagcagcagcgggacaatcttgcccaacagtcattcaacatggaacaagccaattataccatccagtctttgaaggacaccaagaccacggttgatgctatgaaactgggagtaaaggaaatgaagaagcatacaagcaagtgaagatcgaccagattgaggatttacaagaccagctanaggatatgatggaagatgcaaatgaaatccaagaagcacttgagtcgcagttatggcac

SEQ ID NO: 3799 - DNA, 506 bp, Homo sapiens
ggtaccagaacacatcactgaagaagagctcaaaacccttatggaatgtgtttctaacacagcaaaaaaaaaatatttaaaatatttatatacgaaggaaaaagtgaaaaaagctaggcaaataaaaaaggaaatgaaagcagcagcaagggaagaagcaaaaaatatcaagctgctagaaaccactgaggaagataaacagaaaaactttctatttttacgactttgggataggaatatggacatagcaatgggctggaagggtgcccaggccatgcagttgacaacctttggtttttgacatggcttacgaaaattatatgaaacgaaaagaattgcagaatactgtttcccagcttttagaaagtgaaggatggaacagaagaaatgttgatcctttccatatttatttctgcaatctaaaaatagatggtgctttgcacagagagttagttaaacggtatcaagaaaaatgggacaaattgcttttaacatcaacagaaaag

SEQ ID NO: 3800 - DNA, 503 bp, Homo sapiens
ggtacaccacacttacagcccttgtcagatattatctccaggtgtgtcagagctccggaggaattccaaaaaatatggaaaagctggtgaagctgtctggttctcatctgacccccctgtgttattctttcatttcttacgtacgcggggacagacgagatctcgatcgaaggcgagatggcggacgtgctagatcttcacgaggctgggggcgaagatttcgccatggatgaggatggggacgagagcattcacaaactgaaagaaaaagcgaagaaacggaagggtcgcggctttggctccgaagaggggtcccgagcgcggatgcgtgaggattatgacagcgtggagcaggatggcgatgaacccggaccacaacgctctgttgaaggctggattctctttgtaactggagtccatgaggaagccacccgaagaagacatacacgacaaattcgcagaatatggggaaattaaaaacattcatctcaacctcgacaggc

SEQ ID NO: 3801 - DNA, 449 bp, Homo sapiens
  misc_feature 441: n = A,T,C or G
accacgagcaaagttgacaaaggagatctcatcgaagcggatgtgcacaggtggcttgtggacgtagatgaagccccgctccagcgggtagagcagtcctgagcttgccttgtaggaacaggtaatgcactgggcccctgagtgcccttggaagttgcctggcactgtgatcttgcggtttaccagtgctttcatgacccggctgaccatctcatagagggatcctgacatgttcttggtgagccgaccctcaaagcgcttctccacttcttcctcgttcatgttcagagtcaacgaaatgtcctcgtccttggagaagaggaggatcaggaagtggtagcgagtttggccatgcttgattgggggatccaggctgatcacaaagaacatctggcgctggtccttgtggggtaacaaaaacagacgcagtacctcggccgngaccacgc

SEQ ID NO: 3802 - DNA, 497 bp, Homo sapiens
  misc_feature 195, 393, 457: n = A,T,C or G
acgcggggctcttcctcggcgctgcctacggaggtggcagccatctccttctcggcatcatggccgccctcagaccccttgtgaagcccaagatcgtcaaaaagagaaccaagaagttcatccggcaccagtcagaccgatatgtcaaaattaagcgtaactggcggaaacccagaggcattgacaacagggttncgtagaagattcaagggccagatcttgatgcccaacattggttatggaagcaacaaaaaaacaaagcacatgctgcccagtggcttccggaagttcctggtccacaacgtcaaggagctggaagtgctgctgatgtgcaacaaatcttactgtgccgagatcgctcacaatgtttcctccaagaaccgcaaagccatngtggaaagagctgcccaactggccatcagagtcaccaaccccaatgccaggctgcgcagtgaanaaaatgagtaggcagctcatgtgcacgttttctgtttaaa

SEQ ID NO: 3803 - DNA, 499 bp, Homo sapiens
ggtacgcgggggctctctgctcctcctgttcgacagtcagccgcatcttcttttgcgtcgccagccgagccacatcgctcagacaccatggggaaggtgaaggtcggagtcaacggatttggtcgtattgggcgcctggtcaccagggctgcttttaactctggtaaagtggatattgttgccatcaatgaccccttcattgacctcaactacatggtttacatgttccaatatgattccacccatggcaaattccatggcaccgtcaaggctgagaacgggaagcttgtcatcaatggaaatcccatcaccatcttccaggagcgagatccctccaaaatcaagtggggcgatgctggcgctgagtacatctctctccctcctcccccacatgcacaaggctcacatctcattatggtgcggcccatgtacccacaaggacattcattagtgtttatggacatgaacatgtggaagcctcctgaataattactttttt

SEQ ID NO: 3804 - DNA, 497 bp, Homo sapiens
  misc_feature 413: n = A,T,C or G
acgcgggatgacagggaacaggttaagaaaactatgtaaatgtaggaaagatgggaggaaataaagccctgttctggatcccccatcccctccagaataagagcatgttctgcatgtattaatcttttatgctgtttatgaaacaggcaagataagtctgtttttccttctggaaccataagggtaaccagattttcatctacagacaagtggtagtcatttgtgtttatcatgcaacttacttacaaacaccaagatattaattgctgcaacttgatgtcaaatcacattactgggtaatttttaagactatgtactagacaacgtgtcttgcaaaggatccgtatcaaccaaatctgatacaaccaagtcaggatctaggatctcatgggtcccattagtggacagcctgnaggaacgtctcctcgataagtctttgtcagtgttttccgagtagttttttgacttttcctgggatgaatttttgtcaagccgag

SEQ ID NO: 3805 - DNA, 498 bp, Homo sapiens
accaagctgttggtgaactgccccaggccaacagggacacattagctttcctcatgattcacttgcagagagtggctcagagtccacatactaaaatggatgttgccaatctggctaaagtctttggccctacaatagtggcccatgctgtgcccaatccagacccagtgacaatgttacaggacatcaagcgtcaacccaaggtggttgagcgcctgctttccttgcctctggagtattggagtcagttcatgatggtggagcaagagaacattgaccccctacatgtcattgaaaactcaaatgccttttcaacaccacagacaccagatattaaagtgagtttactgggacctgtgaccactcctgaacatcagcttctcaagactccttcatctagttccctgtcactgagagtccgttccaccctcaccaagaacactcctagatttgggagcaaaagcaagtctgccactaacctaggacgacaaggcaact

SEQ ID NO: 3806 - DNA, 499 bp, Homo sapiens
accctatgaacctgactctgtggtcatggcagaagctcctcctggggtagagacagatcttattgatgttggattcacagatgatgtgaagaaaggaggccctggaagaggagggagtggtggcttcacagcaccagttggtggacctgatggaacggtgccaatgcccatgcccatgcccatgcctatgccatctgcaaatacgcctttctcatatccactgccaaagggaccatcagatttcaatggactgccaatggggacttatcaggcctttcccaatattcatccacctcagataccagcaactcccccatcgtatgaatctattgttggtcctggacccaagccagaagcctctgcaaagcttccttccagacctgcagataactatgacaactttgtcctaccagagttgccatctgtgccagacacactaccaactgcatcttgctggtgccagcacctcacatctgaagacattgactttgatgatctt

SEQ ID NO: 3807 - DNA, 400 bp, Homo sapiens
  misc_feature 166, 287, 301, 351: n = A,T,C or G
acaacacaaaactaattgaaaattctctccacctttcccaaatcaaccactgatatgagagtgttatgcatttacaacgtgctttctacgtgaagggttgattttttaaatcatctcaaagatgactttgaaaacaagtgtacttttttttttttttttttttttngagttcattgtagattctggatattagccctttgtcagatgagtaggttgtgaaaattttctcccattttgtaggttgcctgttcactctgatggtagtttcatttgcagtgcagcagctntttagttgaattanatcccatttgtcaattttggcttttgttgccattgcttttggtgttttanacgtgaagtccttgcccatgcctatgtcctgaatggtatcccgcgtacc

SEQ ID NO: 3808 - DNA, 500 bp, Homo sapiens
ggtacttgcttagggtggccaacaggctctttggggaaaagtcttgtgatttcctctcatcttttagagattcctgccaaaaattctaccaagcagagatggaggagcttgactttatcagcgccgtagagaagtccagaaaacacataaacacctgggtagctgaaaagacagaaggtaaaattgcggagttgctctctccgggctcagtgggatccattgacaaggctggttctggtgaatgctgtctatttcagaggaaactgggatgaacagtttgacaaggagaacaccgaggagagactgtttaaagtcagcaagaatgaggagaaacctgtgcaaatgatgtttaagcaatctacttttaagaagacctatataggagaaatatttacccaaatcttggtgcttcatatgttggcaaggaactgaatatgatcatcatgcttccggacgagaccactgacttgagaacggtggagaaagaactccttacgaga

SEQ ID NO: 3809 - DNA, 494 bp, Homo sapiens
acaagtatttatatcaatgaaaatttccattggtgattttttggcagaatattggtcttgactctgtggaataaatgacgacgtaaacgtagctgcacaggggtgttcccgtataatgcttgaatcaattgtgtgtgaaagcatcatgcaaatggctaattaaattgggtgatgactgaaaggttataaatccttcattccagctccacgagcagatccccttctccaactgtgtctccagcttgacagtgcacagatttcaccgtgccagttttcccagctgtcatactattctgcattttcatggcttcaatcacacaaatttcttgaccttctgctaccgcgtctccaggcttgacagagacggccaccccactccgggcatcggggaacgcagaacactgcttgtgtcctcagtcactttttccagcataaatttgttcaattctgcggcaagtctgggttaagatattcaccttgtacctcgcccgcga

SEQ ID NO: 3810 - DNA, 491 bp, Homo sapiens
acgcggggttttgaccaatccagtgtgcacagaggtaggagaaaaaattgcccttagccgaagagttgaaaaacactggcgtttaattggttggggtcagataagaagaggagtgacaatcaagccaacagtagatgatgactgaagaataccagttaaataacacattcggatggatttggaagttggaattcctcttaacaaccaaggggtttattttcaaagcaatattggggaattgatttcacagttcgttaccttagtaggtaacggtaaggttattcttttttttttttttttttttggttatgaaaacttagggactaaaattaatataaaaattggcataatgttggattgaatctacattttggcagaagttaaacattcccacataatgtcaaaattatacatcatgcagttctgtttttttgtttgttttattttgttttgtttttgagtctggctctgtcgcccaggctggagtgcag

SEQ ID NO: 3811 - DNA, 495 bp, Homo sapiens
ggtacacaagctttgaggaagtgcaaaggactgacctctaggccagaacaagatggaaaactaccaggcccatcaggcctataacccagacaccagcatggacaaaactcagttatactgaattcagagacaaaattcagtgacactcttctaccacttatttagggttctacagcatttcactgagcagacttagttttttgtttttgttttacaaaccttttaaacagaggggatttaaaaaatgcaaactaggactacgatgttaagacaaccactagcagacagctgcggacagttactgggtctgaaggtgaggcttcccaactcaaacagagaagtcattgggataaactctgcctctttcatctttcaccacccatatccttaaaacaggacaagatgggatgaccacaccaggtaacatcaccgaggtctcaaagtagcagctaaaatgtgccagaactcttcaccctgtctaggacctatgttcca

SEQ ID NO: 3812 - DNA, 491 bp, Homo sapiens
acgcggggctttcaaccttgtcaacccgtcggcgcggcctctggtgcagcggcggcggctcctgttcctgccgcagctctctccctttcttacctccccaccagatcccggagatcgcccgccatggctttacttactgcggccgcccggctcttgggaaccaagaatgcatcttgtcttgttcttgcagcccggcatgtcagtgcttcctccacgaatttgaaagacatattggctgacctgatacctaaggagcaggccagaattaagactttcaggcagcaacatggcaagacggtggtgggccaaatcactgtggacatgatgtatggtggcatgagaggcatgaagggattggtctatgaaacatcagttcttgatcctgatgagggcatccgtttccgaggctttagtatccctgaatgccagaaactgctacccaaggctaagggtggggaagaacccctgcctgagggcttattttggctgct

SEQ ID NO: 3813 - DNA, 495 bp, Homo sapiens
  misc_feature 170, 328: n = A,T,C or G
acgcgggccagaatctctgggacacatttaaagcagtgtggagagggaaatttatagcactagatgcccacaagagaaagcaggaaagatctaaaattgacaccctaacatcacaattaaaagaactagagaagcaagagcaaacacattcaaaagctagcagaaggcangaaataagtaagatcagagcagaactgaaggaaatagagacacaaaaaacccttcaaaaaaatcaatgaatccaggagctggttttttgaaaaggtcaacaatattgatagaccgctagcatgactaaaaaaaaaaaaaaaaaaaaaaaaaggtcatnttatgaagacccgtaaattaaagaattactggtttaaagttagtgattatgaaacaaaaacatattcatagtttcagcttcttttttcttcctcgaccatcaggtgcgccatccattttacgtttctgtgttgaaggctttggtcctcgtttctttttctctgcctt

SEQ ID NO: 3814 - DNA, 499 bp, Homo sapiens
acgcgggggagctcccagaggtctacccagaaggacccagttccttaccagcctccctttctctgtcagtggggacgtcatcagccaagctggaagccattaatgaactaattcgttttgaccacatatataccaagcccctagtcttagagataccctctgagacagagagccaagctaatgtggtagtgaaaatcgaggaagcacctctcagcccctcagagaatgatcaccctgaattcattgtctcagtgaaggaagaacctgtagaagatgacctcgttccggagctgggtatctcaaatctgctttcatccagccactgcccaaagccatcttcctgcctactggatgcttacagtgactgtggatacgggggttccctttccccattcagtgacatgtcctctctgcttggtgtaaaccattcttgggaggacacttttgccaatgaactctttccccagctgattagtgtctaaggaatgatccaatactg

SEQ ID NO: 3815 - DNA, 499 bp, Homo sapiens
ggtactggagttgaaagagaactgagatcacctagttcagagactaacgggaaacgttaggtcatttatggctctcagacacgttaagcctgcataacattttttaaaatcttgaaattagttcccaacacttaattgagagctttcacagaaaaatctagatatgtggcttatttttaaaaaacagaagatttgctgacttaaacactgcaaaattaaacatttatatctgaatccagcatctctttttgctttgtaaatgaggtcaaggatgaaatccagatgttcttcctttgtatttgtattgtcactgtatggaatctaggtatatccaaggaaaaataaacttaagataagcttattttccttatttcaaaaagcaaaacaaaaacccagaagatctaacaaccctggacctgtagagtggcagcaacagaccagaactcagcagtatagtccgagctggggcacctgctcgccagtgttactgtctccatca

SEQ ID NO: 3816 - DNA, 495 bp, Homo sapiens
acctgtggagcgaaggagaggttgtcatctgggcccctgtttcaccagtcaaaacctatggagcagtcagaagcccgaagcatccaagcccagtggccaggaagcttctgaaataaacggcactgggttgggaaggatgagaaagccaagacaggtgggccaggttctccgaacatggggcaacagtgacctgggcaaaagcctggaactgagcggctgataaggccacaattactgccaccacctctcagtatctacacgggggcagacgttaggcagtgggaactgaggactggagggcgtgtggcaaacacgggatggattttatcagaaaagagaggacacccaaacacgtgcctgccctatttatcttgcatgtcctgtgccaggtgaaggacgctggagcatgggtaaggttcctgagaacaactggtgggcagaaacgggctgggatgggcactgctccacaggcaacattaagcctctgagggggac

SEQ ID NO: 3817 - DNA, 492 bp, Homo sapiens
acccatgatttggacactttgtcgggcccatttacttatactgcaaagcgtccttcagatatcaaattcaagcctctaaataagaccaaggagtatacagcctgtgaactgatgaacatatacaagactgacaatcacctgaaacattatttacatatcattgaaaacaaacccctgtatccagttatctatgatagcaatggtgtcgtcctttcaatgcctcccatcatcaatggggatcattccagaataacagtaaatactagaaatatttttattgaatgcacgggaactgactttactaaggcaaaaatagttcttgatattattgtcaccatgttcagtgaatattgtgagaatcaatttacggtcgaagctgctgaagtggtttttcctaatggaaaatcacatacctttccagaattagcttaccgaaaggagatggtgagagctgacctaattaacaaaaaagttggaatcagagaaactcca

SEQ ID NO: 3818 - DNA, 497 bp, Homo sapiens
ggtacatgggtgtttcaatgcctccattcctaaacctgagcagttgtcagctgagcagtggcaaaccatggagataaacatgggtgatgaactagaatttgaagtatttcgtttagactcagatgctgctggagtattctgcattcggggaaaactaaatatcacaagtttacaattcaagcgctctgaagtttctgaagaagttacagaaaatggcactgaggaagctgctaaaaaacctaaaaagaagaaaaagaagaaagacccagagacatatgaagtggacagtggtacctaactcccagtgctggtcgtctcaggtaataagatggcatttccctgctgttaatttctaacctaaaaaaaggaacagtgactcctctgagttcagagtcctttccactaggtatacaaatgaggatccttgagcaggaaggatccagtttaccctaagtatcctcaagaggaaagagaaggctgggagccagccacaaaga

SEQ ID NO: 3819 - DNA, 494 bp, Homo sapiens
gcttttttttttttttttttttttttggtaactttcccttcaggattgtaatctggtgggtaaacaagctccttaaactcatccaccaaggagcccagtcttttattcattgcttcaaccttgggcaatgtcaggtccactgcttgttccggctccatcaaatccaaggccaaggcctccaggttcctgaagtgctgctgcagcacggggttctcaaagctgtcacttctgtatgtgaagcgaagcttctcaacgatagccttcatcttgcccacctgctctggagttgccatgattttttcagtaaagggcatcttccttttatcatcagcaaagggtaaaaagaccagctggaagcctggaggagtcacctgaattttctggtcatccaactcttcttcctgtggcaccaaagccacaaaataaggagggatgttcctgcggggtgtgtatctgcacaatgctgcaacctccttctccagacacttgatgag

SEQ ID NO: 3820 - DNA, 498 bp, Homo sapiens
ggtactacgatggaagatgcaaccccaatattagaaaggcagcttgatgagcaagatggcacacatgcagaaggaacaactgggcacccagtccaggaaaaccaacccaaaaggaagccaagtattaagaaatcacaaggcaggaagggacaagagggagaaagttgtctgagaacttttgactgtggccctggactttgctgtgctcgtcatttttggacgaaaatttgtaagccagtccttttggagggacaggtctgctccagaagagggcataaagacactgctcaagctccagaaatcttccagcgttgcgactgtggccctggactactgtgtcgaagccaattgaccagcaatcggcagcatgctcgattaagagtatgccaaaaaatagaaaagctataaatatttcaaaataaagaagaatccacattgcatttgagctcaatcttggacattaactttaaaatgcttccatacagatctcttcttaaa

SEQ ID NO: 3821 - DNA, 495 bp, Homo sapiens
ggtactcagcaattcacagacatgacataaacatgacatttttaagacataaacaaagactgcatgttggcagcataggggacagtcttgctcttcctcattttttgaagcagagatatttcatatttcatagtttctgaacttcctcaggagttctgagggagcatccttggaccaacggaaacgaaggtgccaaccattcacatctgcaaaacctgaagaatctgaattttgcggggagactgacttctctaggggcttgggttctttctgctccgttttctctgcggttgaagccagctcctctttctttctttctctttgctcattacattcctcattttccatcttggtggtatgagtcttgtcagattcttccagcatcaggtcttttttacctctgacaacccagtgcattgacgtcttcactgagtcattcaaagcttcccactgctggaatggcatcgacatctggctccttcgccagtggtcata

SEQ ID NO: 3822 - DNA, 495 bp, Homo sapiens
acactaacaaattggataactcggaaagatggattaattcctacaaacatataatctaccaagaatgaatcatgaagagatagaaagtctgaacagactgataattggtaaggagtttgaatgaatgaaaaaaaccttccaaaaaagaaaagcttaggaatatatggccttactggtgagttcaaccaaacataaataagaattaacaccaatccttctcaagttcttccaaaaaataaagaacagggaacactattgaactgattttatgaagccgacatgaccctgataccaaagaaaggcaagaagtctactaggaaagaaaattatgagccaatatccctgaagaacataaatgcaaaaacccacaacaaaaagctagcaaactaaattcaacaagataacaaaagggtcatacatcatgaccaagtggaattacccctagaatgcaaaaaaaaaaaaaaataatataggaagctatcagtcaatgtgatt

SEQ ID NO: 3823 - DNA, 496 bp, Homo sapiens
  misc_feature 97, 150, 255, 331, 336, 397: n = A,T,C or G
ggtacttttttttttttttttttttttttttttggataaacaaaatactttattattgagagagtaaaggcccaattacaaaatttttatacttaanatctgtttattaccatgccaatggtttataaggactgtagtttccataactgntaggctgaaccccatgaaactccttctttgtagataaaagccagcctaatattggcaatttcacgtggttcaacctcacatacaatgagccactgcctaggattnttttggcagcaagatgttcccagtcacatgtctgtttatattataaacagatgtccaagtgataaatacatccctnttganaaaaacatcctgtgcttatgtatactgggaatggtcttttgtgggtattgaggcagcgcanctctggctttgctcttcccagcttgcccggccacccgattcctcagtttcatcacaggaggattctttacagatgtcagcccccgtccaaggccacgca

SEQ ID NO: 3824 - DNA, 498 bp, Homo sapiens
ggtacagtatgggggttgtaaattggcatggaaatttaaagcaggttcttgttggtgcacagcacaaattagttatatatggggatggtagttttttcatcttcagttgtctctgatgcagcttatacgaaataattgttgttctgttaactgaataccactctgtaattgcaaaaaaaaaaaagttgcagctgttttgttgacattctgaatgcttctaagtaaatacaattttttttattagtattgttgtccttttcataggtctgaaatttttcttcttgaggggaagctagtcttttgcttttgcccattttgaatcacatgaattattacagtgtttatcctttcatatagttagctaataaaaagcttttgtctacacaccctgcatatcataatgggggtaaagttaagttgagatagttttcatccataactgaacatccaaaatcttgatcagttaagaaatttcacatagcccacttacatttacaa

SEQ ID NO: 3825 - DNA, 510 bp, Homo sapiens
  misc_feature 11, 53, 80, 88, 108, 111, 143, 149, 158, 171, 198, 209, 220,231, 315, 348, 352, 356, 361, 387, 398, 403, 408, 445, 447,471, 479, 490, 503, 505: n = A,T,C or G
ggtacacatantgcttctgccacatgataacgagcgcggtgaaaccgatgaanaacatggcaccgcccacaaccgtcttncactcgtncgagcccctgttcatctcancanagctctccttgaacttaatgcgatacaactcnactttntcatacatngagaggctgtttnaagaagggccttctccttctcctttantgccttctggntggcatgacangtgctttgacntgggccacctccggcaaggggtggtcacgcccgatccatataagctgggagcgaaaagttcttctcttcttcacaacacttttnatgagctcgttctgttggggactatgagctctncttnggangctgnggatcaaaacacgcttgcaggagttnctgaaactggnttgantcaanccttgtccagaagttcccctgctggactccattaccnanactcccccccatcctttaccttgnccattganggacctttgtnaccaaactccctngntattc

SEQ ID NO: 3826 - DNA, 488 bp, Homo sapiens
  misc_feature 172, 468: n = A,T,C or G
acgcggggacgtaacggagtggccaacggcctgcagagcaacatgcccaagttttattgtgactactgcgatacatacctcacccatgactctccatctgtgagaaagacacactgcagtggaaggaaacacaaagagaatgtgaaagactattatcagaaatgggatggantagcaggctcagagcctgattgacaaaacaacggctgcatttcaacaaggaaagatacctcctactccattctctgctcctcctcctgcaggggcgatgataccacctccccccagccttccgggtcctcctcgccctggtatgatgccagcaccccatatggggggccctcccatgatgccaatgatgggccctccttctcctgggatgatgccagtggggcctgctcctggaatgaggcctcccatggggaggccatatgccaatgatgcctgggcccccaatgatgagacctnctgcccgtcccatggatggt

SEQ ID NO: 3827 - DNA, 493 bp, Homo sapiens
  misc_feature 23, 93, 139, 147, 171, 174, 198, 232, 272, 306, 365, 379,394, 395, 419, 427, 439, 442, 447, 464: n = A,T,C or G
ggtacagcgtcctcgaaaccacnagcaagtgagcagatcctccgaggcaccagggactccagcccatgccatggcggattctgagcgcctctnggctcctggctgctgggccgcctgcaccaacttctcgcgcactcgnaagggaancctcctgtttgctgaaattataanatnccctggttgatcctgatctgcttnagttgcctccacaccaggctactcctccctgtcnggagatttgagatgatccttgctgctattatctttgttgnctacatgtgtgacctgcacaccaagataccattnatcaactggccctgtagtgatttttttccgaacccctcatagcggaaatcctctacctnatcaccttcattgnttgtcccttgtttgnngagaggaaaccactcccaaaattngttcgcangggtaccctgcnctnggccnggcccgtttcggaaaanggcgaaattccagctacacttgggcgggc

SEQ ID NO: 3828 - DNA, 503 bp, Homo sapiens
  misc_feature 385, 386, 412, 419, 438, 499: n = A,T,C or G
acccaaatgctaccactggagaaggaatgagagataaagaaagagacaggtgacatctaagggaaatgaagagtgcttagcatgtgtggaatgttttccatattatgtataaaaatattttttctaatcctccagttattcttttatttccctctgtataactgcatcttcaatacaagtatcagtatattaaatagggtattggtaaagaaacggtcaacattctaaagagatacagtctgacctttacttttctctagtttcagtccagaaagaacttcatatttagagctaaggccactgagggaaagagccattagcttaagtctctctgtagacagggatccattttaaagagctacttagagaaataattttccacagnntccaaaccgataggctcaaacactangagctgntagtaaaaagaagacccanatgctttacagaattatcatttttttcaactgggaataaaaacaccaggtttgttttgtanatgt

SEQ ID NO: 3829 - DNA, 293 bp, Homo sapiens
  misc_feature 145, 158, 161, 171, 176, 187, 244, 256: n = A,T,C or G
ggtacttcttgcccttgtagaatttcctgaggttttctttctgagtctggttaataactgtgagaacacgggcaatggatttccggacgactcggatcttagagagcttggaggccgcaccgcctgtcactttggcgacgcgcanctgggacaagctncanctttaaggtncgttncagctggtttnagcagcttcctccttcttcttcccgcgaagatctcgagccttgatcttggccattgntgcacaggccgncaacgccgccgcccgctccgagggaaagagcccgcgt

SEQ ID NO: 3830 - DNA, 496 bp, Homo sapiens
  misc_feature 90, 110, 115, 157, 164, 168, 223, 245, 250, 332, 395, 419,435, 436, 475, 481, 483, 486: n = A,T,C or G
acttttttttttttttttttttttttttttttatgtttctttggttttattattacaaacacaccatggctctgtcacaatagggacatntaagctctacataccatttnttttntacctggacagggccccataaaagcctccaaaccacgtgtanatgtganacanatttgaaaaaaacatttcaactcatagcttataatgatgccatttctccagctgngcaagggctttacaaaaactgngccangacttcccatgaggctggattgcttgattcatgttttatgagccccacaatactgaagctccttttccagggacttggcatntgcagtcaattccacatttgggataagtcctctctggaagtgaaatgtcaggcaagtgacatncaaagttttttgcatgcagtgggnttaacacccatgtttnngggggaacattaattaaaaaagtaccttggggcgggaancccctnanggngaaatttcca

SEQ ID NO: 3831 - DNA, 495 bp, Homo sapiens
acgcgggggaagaggccgggctacgtcgtgccctgcgcgtgagcagctgcagcggcagaggcagcatccagcggcggcgccagcagttccagtccgttgctttactttttgcttcaccgacatagtcattatgccgaagagaaagtctccagagaatacagagggcaaaagatggatccaaagtaactaaacaggagcccacaagacggtctgccagattgtcagcgaaacctgctccaccaaaacctgaacccaaaccaagaaaaacatctgctaagaaagaacctggagcaaagattagcagaggtgctaaagggaagaaggaggaaaagcaggaagctggaaaggaaggccaaaaactgaatctgtagataacgagggagaatgaattgtcattgaaaaattggggttgattttatgtatctcttgggacaacttttaaaaagctatttttaccaagtattttgtaaatgctaattttttaaggactcttct

SEQ ID NO: 3832 - DNA, 496 bp, Homo sapiens
  misc_feature 420, 430: n = A,T,C or G
actaacttgtagcaaccacgtgtccgtgcagtgccacaggagctagagcagtgacaatgctggtggcaacagggcagtgtagcaggtgcttcatgttcaccttttcaaccttttcatttaattgtcacaactcggaggtggattctgttagggacaggctgccccaggaccactccgcccccgctaactcaatgcagctgacccttaccctgaatactctgcagctgcattcctgaaccgttatctaggcgctatagcaaggtcaccagacttgctacaccgaagccctctgggtggcacgggggaggtcatgagaaacgtggattacacccccttgtaaattcctattttcacaagataatatattgtaagccggtcatgagattatatgtggtaaagttaattgactaacaaccccangggtctcttntccccatataaacccctcattttgtaaagctcaagggccgccaccctccgactggtggaaaaaccc

SEQ ID NO: 3833 - DNA, 505 bp, Homo sapiens
  misc_feature 188: n = A,T,C or G
gcgtggtcgggccgaggtacgcggggctctgcgagcgttatttcaaaagaagttgagaaccagagaaaccgacctaaggggattctcccatttggcccgtcctcccctgaagtcaccacctgctgcttttctggagcgcttaccagtgaccaagaggaacagaacacagagcagcctggcagtgtccnaagcaacaagcctccgctcctccttcctgcaccctggggctcctgaaactcacatgagaaggagggctgtctgagattcgagggaaacaagctctcaggacttccggtcgccatgatggctgtgggcggtaaacgcggttagtgcaagcatctgggccatcttcaatggtaaaaaagatacagtaaagacataaataccacatttgacaaatggaaaaaaaggagtgtccagaaaagagtagcagcagtgaggaagagctgccgagacgggacagtggatccagtaggaacatagatgcatccaaactcattagact

SEQ ID NO: 3834 - DNA, 502 bp, Homo sapiens
  misc_feature 411, 447, 460, 466, 471, 475, 493: n = A,T,C or G
ggtacaccatataaacagcagatgaagtcggagagatagtctaatacacttagatcatgttccaccacaatgatatatctatctggatttattagagatcgtatagtaatagcagcctttaaacgctgcttgacatctaggtaactagaaggctcatcaaacatgaaaatatcagctttctgtttgcaaacgacagcacaagcaaatctctgcaactctcctcctgaaagatcttcaacatttcgttcttttaggtgggttaaatcaagctgctgacatacaattgcctgtgtctttgtttcatcttttcggtccaaaatagatcccactgtcccctttgcagccttaggaatctggtctacatattgaggtttgatgatggcttttaagggcatcttctagaatctttgnaaaagtaattttgtaattcagaatcccccggaaatnaagtcaaaatctnccggcngtcangganggatcattcgtacctggncccggcggg

SEQ ID NO: 3835 - DNA, 489 bp, Homo sapiens
  misc_feature 182, 191, 302, 339, 364, 402, 456, 463, 475, 476: n = A,T,C or G
accgcgcttggcggtagctggccccagacttctgtcttttcagctgcagtgaaggctcggggctgcagaattgcaaccttgccaatggacctgatcggttttggttatgcacccctcgtgacatttggaagcatttttggatataagcggagaggtggtgttcccgtctttgaatggctggnctttttgtnggatgtttggccggctatggagcttaccgtgtctccaatgacaaacgagatgtaaaagtgtcactgtttacagctttcttcctggctaccataatgggtgtgagatttaanaggtccaagaaaataatgcctgctggtttggttgcangtttaagcctcatgatgatcctganactagtcttgttgctgctctgagcatctggaggaacangaaaactaagttcatgtcatcctgctgtaatgggcaaaacatatttttttttgnatttaanaagataaacctnnaattatgggaatg

SEQ ID NO: 3836 - DNA, 486 bp, Homo sapiens
  misc_feature 167: n = A,T,C or G
acttgttgactagagttcactctagggtgatctatctgtgtcatttgctggggcacccttcatgtcagcttctgattacttttcccttttctgaaaagggagagaggtcttttaatttcctgtctggtgggaggaggtctgtatgccacttctgtgagaaaagtganggaaagaagggcagtgaggatttcagtattcagtacgcggggactgcgataggaatcatgtctggtcgcggcaaaggcggaaaaggcttggggaagggtggtgctaagcgccatcgtaaggtgctccgggataacatccagggcattacaaaaccggctattcgcccgtttggctcggcgcggtggcgtcaagcgcatttccggtcttatctatgaggagactcgaggtgtgcttaaggttttcttagagaacgttattcgaaacgcccgcacctatacggagcacgccaacgcaaaacttgtcacaacccatggatgt

SEQ ID NO: 3837 - DNA, 493 bp, Homo sapiens
ggtactacttctccaaactcatagaatttatggacactttcttcttcatcctgcgcaagaacaaccaccagatcacggtcctgcacgtctaccaccatgcctcgatgctgaacatctggtggtttgtgatgaactgggtcccctgcggccactcttcagtttgtgctgacaatcatccaagaaccagcttgcgggggtcatctggccgtgcacattccctcttggttggttgtatttccagattggatacatgatttccctgattgctctcttcacaaacttctacattcagacctacaacaagaaaggggcctcccgaaggaaagaccacctgaaggaccaccagaatgggtccatggctgctgtgaatgggacacaccaacagcttttcacccctggaaaacaatgtgaaagccaaggaagctgcggaaaggattgaagtcaaagaattgaaaccctccaaccacgtcatctgattgtaagcccaatatga

SEQ ID NO: 3838 - DNA, 489 bp, Homo sapiens
  misc_feature 420, 430, 462, 470, 480: n = A,T,C or G
actccttcctgaactgcctccaggtcagcccctgccacggctggatgtcttccaacaagacgttgcggactctcacttcagagagagcagagcaactctccaacacactgaaaaaaattgcagccagtgagaaatttacaaacttcaatcttttctacatggattttgccttccatgaaatcatacaggagtggcagaagagaggcggacagccctggcagctcatcgagcccgtggatggattccaccccaacgaggtggctttgctgttgttggcggatcatttctggaaaaaggtgcagctccagtggccccaaatcctgggaaaggagaatccgttcaacccccagattaaacaggtgtttggagaccaaggcgggcactgagcctctcaagagcatgcacccctggggagcacanggaggcagangctttgggtaaactcattccacaaaccctatnggggctgncacgttacangcccaaagg

SEQ ID NO: 3839 - DNA, 494 bp, Homo sapiens
  misc_feature 446, 464, 480: n = A,T,C or G
ggtacatgtcacatatatagtcaatgtaaagcaattctactttgcatcccttagccacaggcataaggcagaacacagatatttctgtgttctgtgaatatctgtggaatgatacttgaatatgtggatcttgagtaaagctgaattcatccagaattaaactttttgcattatttaggtgacactagacatcatcttgattaaacaagatatttgcttccacaagtgtagactgacaacatatacccatacctgaacacaccatgtcagaattatggctaatcccaaacttgtaatagagggatatctgtgtattcgggatacagggtcacttgcagtattctctagccatctgccaagaactactttgaaattatacccatttttcttggtgtttctgcttaaaaactaatgtacgccgggggaagccaactcaaactcagccnacagagatggttgatttngcctcttaaccaaganattcattggcagct

SEQ ID NO: 3840 - DNA, 493 bp, Homo sapiens
  misc_feature 438: n = A,T,C or G
acactggctgtccacaaggccgcacctcacaaatccgggtttctttcacaaggcggcactcagggttgtcattggtaactcgtgtggagataccagttccacaggtctttgagcactgggaccatgaagttgtttgaacaatacatttctggccttgtaaagggttgtataggatgcgaggctccattccaaaaacagggagccgcttcagtgagctgccttttccaactgcaatcaattcattgtttctcgtcaactccacctcggaggcatcgaatcccagctccttgccaaggaggccgtcctggtcctccatggggtccttgatactatcctcgtcacagacccactcctcgcagcactgcccggtaactttgaccagcccgagggttgggacaagcccaagttggggaagagatagttcttggggacacagangaatgcagcccacggcgccatcaaatacatgtgcacttgatgtttacaagttggg

SEQ ID NO: 3841 - DNA, 500 bp, Homo sapiens
  misc_feature 36, 99, 144, 154, 313, 413, 457, 463, 475, 488, 499: n = A,T,C or G
ggtacttttttttttttttttttttttttttttggnatataaactatttattaacagacaaggcctacagacttatttcttcttggacacacccacggngcggccacggcggccagtggtcttggtgtgctggcctcggacacnaaggccccanaagtgacgcagccctctatgggcccgaatcttcttcagtcgctccaggtcttcacggagcttgttgtccaaaccattggctaggacctggctgtattttccatcctttacatccttctgtctgttcaagaaccagtctgggatcttgtacaaaggctgngattttcttgccattcttgatcagctggacccttacacacttcctaatgggcagaatttgggctgtttggcttcaactcctaatttttccagcacgattncttttgcattgaaaagcacccttcaaaaagggttggccctttanggctgngccccaaaaganccttcttatactngtttattaatnc

SEQ ID NO: 3842 - DNA, 487 bp, Homo sapiens
  misc_feature 31, 255, 425, 467: n = A,T,C or G
actttttttttttttttttttttttttgaanaatcagaatttatttcactatgtgaacattaagaatttacctacatagttgaaaatattcacaaaggacttgatcattcacactcatacacagagaaagtctgctgaataaaaaaatgctcctttacccattcgacctcctctcaggggctgcagtgggtttgccaattccactgtggggcttcagtcttcatgaatgttgaatagtttggctacttcattganatcttcatgctgctcaccgtccttaatgatcttccttgctattggcattcggttaaagatgttccatagcacaatccccacgaccactttgtccctgaggtagaagatgacacctttgccgtagtcctccccctggacgggagcctgtggaactgccggggtgctgggangaaatagtaatttttggaggcctcggactttggctcactctntgaacggatccagttcctga

SEQ ID NO: 3843 - DNA, 486 bp, Homo sapiens
  misc_feature 166: n = A,T,C or G
ggtcggccgaggtacttttttttttttttttaatgttgcacttgtagtttcattacaaaagatcagatcatgaaaggcagtaactctccaggactggaatatctgattgctcagtgttaatagtagttcatgctgtggtgagattgttaaaagggtgcaagactgntgcttctcttttttttagatatttttctatctctcacttctcagggatgaaattctttttcaaagttttgaagttccttgcaacttagccatgatgtgagtggttatccctagataaaattaaaaggatttttaaaaagtaattactgcacataaaatgataaataggtaatttgaataattttattttaagctcctgggttaattattttgtctattgtctcagctataaattcaaatttatacatactattgagtattaatattctctgatttcagggagaattctgtcagtcacatgatgattatgtttttgtttaa

SEQ ID NO: 3844 - DNA, 482 bp, Homo sapiens
actctgccaggcatttaacatacattatttcacttgttttcatgattaaattcaggcaggttcaatcacagaaaccatgcagtggacaaaagagagaaaaagttcaccatgaggagattctaaaaacctgccttttgacttgtctatttttatctcttatttctcactttggcttctcctcccgcttggaccctttgtctgactgtttgaaattaagttgcaggtgaaccctccattacccatgtccagaacaaatagacataagcacagaacctcactaactccccaaatttttatttttccatttttatcaccacaaatttcttggtaacaatgtagaatttaattttgtaattaaaacaaaaactctcccctaggaggaatctgatgacataaggataacaccaagttatgtgcacaaacgacaaaaaatgccaaactaactggaatgatcatccttcctgaaattctcttaaaaagca

SEQ ID NO: 3845 - DNA, 495 bp, Homo sapiens
  misc_feature 176, 489: n = A,T,C or G
ggtacgcggggcttgcggtgctgggcagcagaccgtccaaaccgacacgcgtggtatcctcgcggtgtccggcaagagactaccaagacagacgctatgactgaggctgatgtgaatccaaaggcctatccccttgccgatgcccacctcaccaagaagctactggacctcgttcnagcagtcatgtaactataagcagcttcggaaaggagccaatgaggccaccaaaaccctcaacaggggcatctctgagttcatcgtgatggctgcagacgccgagccactggagatcattctgcacctgccgctgctgtgtgaagacaagaatgtgccctacgtgtttgtgcgctccaagcaggccctggggagagcctgtggggtctccaggcctgtcatcgcctgttctgtcaccattcaaaagaaaggctcgcagcttgaaacaagcagatccaatccatttcaacagtccattgaaaggctcttagtctnaacctg

SEQ ID NO: 3846 - DNA, 497 bp, Homo sapiens
  misc_feature 447, 479: n = A,T,C or G
ggtacttgcacaggaagtgttggcgcttgttgcattcgttgctgctccaagttaaaaagttgttattggagctcatctcagcacagtgcttgttcccacccatggacttgccagaccaggatctgtacacaatgaattgcttttatttcggtatgcatccacatttcagcatttaagtgggtcctggaacagcaagtgggaaagacgcagcaatttgccaggaggtcaagcccaccaatttcggggatctgctgtgcacaccgggttccttcttaatccctgctgaggatcttgggaagcagcagcagcaccaaaaccaaggcatgcaccggattcaaggttctttttgttccagttgtcagattccaaactagaccccaatggattgcaaggatgaccaaatgaaagccctgtttaaaacttcttcaatttttaaaagcaaaagcnggttaccagggaaaagtaaaaacaattcaganggatcatgtgtgcttaca

SEQ ID NO: 3847 - DNA, 489 bp, Homo sapiens
  misc_feature 174, 476: n = A,T,C or G
acataatcgttttgtggagtcggcacagttcaggttatggaggcacgtaattcaccaaagtgcaaaaaaggcaaaggaaaacacgctgcattgtagaataaggcattcaaatgtgctgttaacgtttaaggcagctaatggccaaaacaggcaagtcaagaaaagtggtctggnttgggagggtgatttttgcatctagaaggcattctcttctcgtgacctcaaagactgagcactgtagagcatgtcttcttcctcaaggccaatgatacttcagataccagatggtttcatttttcaattgcggtccaaagagagggttgagttgggccagaattgcaatcagccaaaagagatagcagcaaactgaacaggtcaccaacatggtaatgataactccccggttaggacccttaagggatgaaccaaggcccaagaagcccgcgaagccccaaacacgctcatcacaatgagangcccagtggaggc

SEQ ID NO: 3848 - DNA, 493 bp, Homo sapiens
  misc_feature 479: n = A,T,C or G
ggtactctgtgaagaacagaaatgatcatattcttatgcatctatctgtatgggtctgaaggtgtatatacaaactgagatgagtccttatgactcttgataagcctgagtttaacaacaacaaaaatgccaagttgtcctgagcccttctgcgttgttatgccacttccctactgctcatatgcacgctggctcccctgggcacgcaaggatgagtatgggccatgggcccctgtagagctgcttacctggtgatgaccatgcaccttacaatttctgaacagttaaccctatagaagcatgctttatatgagtgtcttctgggaagaggaaccttcttaatctcttctgtgggattttcaaaatgctaaagactcacactgcagcaatcatcccagatgattaaattcaaagaaataggttcacaaacaggaatatactgaagaactagagtgtcactgctggtgaactgtggcacnggtgctcaacacat

SEQ ID NO: 3849 - DNA, 497 bp, Homo sapiens
  misc_feature 482: n = A,T,C or G
ggtaccaggtatgtcaccttttgggttccgtcacttggtgtgtaggttatctctacttttccaggcccaggaacaacaaaatcagttgctctgtattgatccccataagcatgacgacctatgatgataggttttacccatccactcacaagccgggggatatttttgcagataatgggcttctctgaagaccgtgccacccagaatatttcgtatggtgccatttggtgatttccacatttgtttcaacttgaactcctcaaccctcttctcatcaggagtgatagtggcacatttgacgccaacattatgcttctttatagcttctgcagcatccttggtgacttggtcgttggtggcatcacgattctctatgcctaaatcatagctatgtagatccaattccacgtagggaaaaaatgaagtttctcttttaatcaattcccaaatgattcgtgtcatttcatcttccttgcattctntacccacaagaaccg

SEQ ID NO: 3850 - DNA, 504 bp, Homo sapiens
  misc_feature 200, 201, 207, 219, 241, 247, 261, 262, 277, 284, 288, 319,327, 356, 370, 376, 388, 414, 418, 434, 455, 480, 488: n = A,T,C or G
ggtactcccaatatacgatagggttcatgttataggattcaattgtaacattagttggtgtaggcactgaggacggccccagatccgcggtgcccatctcagccctgctcacaccctgcatgacaaggggtaggagaaagaggagagccatgctgctaccgacggtcgctggctccaaccccgagcccccgcgtactttnntttttntatttttttttnttttttggctgaaaggactttntttganatgaggaaacaaannttgatggcaattgtntaggacncacnacagtttccttctaggtcataaagtaaaatnattgaatntattttcttctctggtcttaatccctcanaggcagcagaaatntgtggnttaatacccatnacagtgcaggtcccataggaatattntgtngaataacaggaccttnttgcaatggcaagttgaaacnccttgttgagccccaaagctcttanaactttanccttgcatcctttttg

SEQ ID NO: 3851 - DNA, 491 bp, Homo sapiens
  misc_feature 425, 485: n = A,T,C or G
actgttgtccatttcatgagagtaggcttgaggacaccatgggcaaggatctgatggttgccagcctaagcgttttagacttttgacccagagattttttgttttgggtgtggaaaaaattttagaggatagggtctcaagatataatcctttttataggcggcaggtctttaagagatgagggtccagaggaacggatgaagcctgcttggaagcatgctgggatggccatttggaaggagtgttgcaaggaagcatggccttggctgggcgctgccaggagcttaagggttgtaggttgtttgtctgatcggctctcggcctaatcttgtggcttccaggaggaagaagagagatcaagctggctgtctgatgggcatggctttattctggaatggtgaacccaatggaaaaggtcctgcaanatggaccgcagttggtgtgctataaatgacccggtaggggctggtccattgaggctgtanagtttg

SEQ ID NO: 3852 - DNA, 427 bp, Homo sapiens
  misc_feature 166, 387: n = A,T,C or G
actggcacgctctatagccaaggaaggcttcgagaagattagcaaaggtgctaatccagtggaaatcaggagaggtgtgatgttagctgttgatgctgtaattgctgaacttaaaaagcagtctaaacctgtgaccacccctgaagaaattgcacaggttgctccnaatttcttgcaaacggagacaaagaaattggcaatatcatctctgatgcaatgaaaaaagttggaagaaagggtgtcatcacagtaaaggatggaaaaacactgaatgatgaattagaaattattgaaggcatgaagtttgatcgaggctatatttctccatactttattaatacatcaaaaggtcagaaatgtgaattccaggatgcctatgttctgttnagtgaaaagaaaatttctagtatccaagtccatttggacc

SEQ ID NO: 3853 - DNA, 497 bp, Homo sapiens
  misc_feature 171: n = A,T,C or G
acatccaaaaccataaggaaatattctgatgcccagatgatgaagactggggtgaattaagtccacacatttatttcaagttgttaaagagtttgtgggccacgcaatggtccctcgcatgcaagaagtcaaagagctcctccgtgcaatcctcttctgtatgggaaccgnagaggatacacgctcatcacagagctctagccgctcccgggcctttacacatttctccaactgctcgcattgctctctcactgttgttaggggatccactaattcctcctcttcctcttcctcctcctcaggatctccggattcggtaagcatcttttgctcgtcctccagtcccatgtctggctacggttctagattcaacacgagcagcaacagcggcaccttccgcgtactttgcaagaatcaagaatcaagtccacaaatagagtttaacaacacacccaagaaaagacagggaagctctattgggacaagaagatcagctt

SEQ ID NO: 3854 - DNA, 502 bp, Homo sapiens
  misc_feature 179, 489: n = A,T,C or G
ggtacctgctacttttatgcttgtgtctttagatgaaggtccaggtcctccaatcaaataccagtatgctgaattaggcaaattatactcagtagtgtcacagctgatccgctgttgcaatgtctcttcaagaatgcagtcttcaatcaatggtaatcctcctcttcccaaaccctttnggtgatcctaatttatcacaacctataatgccaattcagcagaatgtggcagacattttatttgtgagaacaagttatgtgaagaaaatcattgaagactgcagtaattcagaggaaaccgtcaaattgcttcgtttttgctgctgggagaatcctcagttctcatctactgtcctcagtgaacttctctggcaggttgcatattcctatacctatgaactgcggccctatttggatctgcttttgcaaatcttactgattgaggactcctggcaaactcacagaattcataatgcactgaaaggaattncagatgaccgaga

SEQ ID NO: 3855 - DNA, 493 bp, Homo sapiens
  misc_feature 406, 481, 487: n = A,T,C or G
acacctgtgaattcagaggattcagataccagacaaacttcccatttacaagcaagatctctttctgagataaataagccaaatttctataataatgactttgatgatgatttctcccacagaagttcagaaaatatattaacagtgcacgaacaggccaatggtggaatcttttaaagaaacaaaacagaattgtaaggatttggatgaagatgccaatggaataacagatgaggggaaagaaattaatgagaaaagttctcagctgaagaatctttctgaacttcaggacactagccttcaacagttagtttctcagagacattcaaccccccaaaaaaaaaaaaaaaaaaaaaaagtacttgaagctgagacctcatatgacgtggccttcgtgttgtcaganagtgtctggaactgctgttgccatcttgacactcaccaccttcacccagagccccatggagagaggacatttggnctctgnttcttt

SEQ ID NO: 3856 - DNA, 507 bp, Homo sapiens
  misc_feature 160, 431: n = A,T,C or G
ggtacttgccccttccccagaaaagcgggacttgctgctaagggtgaaggaccaaggcagttgtccctgcgtggtctgacacccttgaaacgtgggtgtataatcagagaggcatccctgcaatgattaaacaccaagggaaggctgccttcccagtctntgaccaaccgccggagttttgggtccacggataaaacgtgtctcttttgtctctaccagaaaatgaaaggaattgaaattaagagaagggagagattgaagtgtagtgccaagattgaaaggagaaagtggttgagggatagtgagggaagttggagaagagagtaaaaagaggctgcttaccagatttgaaattggtgagatgtttcttgggctcgtcggtctgaggacctgaggtcgtaggtggatctttctcagggagcaaagagcangaggacggaggattgatctcccaagggaggtcccccgatccgagtcatggcccaaatttcatgtgcgtccatgtga

SEQ ID NO: 3857 - DNA, 497 bp, Homo sapiens
  misc_feature 168, 493: n = A,T,C or G
acgcggggctctctgcggggctcactctgcgcttcaccatggctttcattgccaagtccttctatgacctcagtgccatcagcctggatggggagaaggtagatttcaatacgttccggggcagggccgtgctgattgagaatgtggcttcgctctgaggcacaaccnacccgggacttacccagctcaacgagctgcaatgccgctttcccaggcgcctggtggtccttggcttcccttgcaaccaatttggacatcaggagaactgtcagaatgaggagatcctgaacagtctcaagtatgtccgtcctgggggtggataccagcccaccttacccttgtccaaaaatgtgaggtgaatgggcagaacgagcatcctgccttcgcctacctgaaggacaagctcccctacccttatgatgacccattttccctcatgaccgatcccaagctcataattggaagcctgtgcgccgttcaaatgtggcctggnaact

SEQ ID NO: 3858 - DNA, 426 bp, Homo sapiens
acgcggggtcttcctgcggctgaaccgcccggctgagccgacattgccggcgtcttggcgattcggcccgacgagctccgctttcgctacagcatggtggcctactggagacaggctggactcagctacatccgatactcccagatctgtgcaaaagcagtgagagatgccactgaagacagaattcaaagcaaatgctgagaagacttctggcagcaacgtaaaaattgtgaaagtaaagaaggaataatctaccctgactaaagcttgaaatgctacatttccaaggtgaagatgtgtgggcacatgttatggcagattgaaaaggatctcattccatgggaaaaaaaaaatcctgtcttgttcataaattgacaatgtcaataaattgaaatatggttcactggtactcttggaaaaaaaaaa

SEQ ID NO: 3859 - DNA, 502 bp, Homo sapiens
  misc_feature 182, 372, 443, 448, 491, 495: n = A,T,C or G
ggtacaggggattggaaacatgctccgcgcctccagagaaaagttgctcccgaggtccatgcccctggaacgtgttcctatcactctggctggttgggctggtccttagactgggtgcttatgattaaagggtcttggttagcccactttccctctccatgtggagatggaaagggtagaanaaggatacagtgtctatcctcaagttgctacggttcagtgagagaggcagacatctgaacaggcaggtaggattcagtgtgctcagtgcactggggatttggagagagatgggcttgctctctctgtgcacccaggagggccacgcacttaaaactgtgtttgtggatcaaagaaagctttatagcacanggggcattcagatgagtcttaagaggaaagaaaaaaaacatggcaagccagattacatctgagcccgttgnattgngtttttctttcttcccatggttatttctaagaactacctgacntaanaaactca

SEQ ID NO: 3860 - DNA, 493 bp, Homo sapiens
  misc_feature 75, 127, 380, 443, 445, 455, 465, 487, 490: n = A,T,C or G
actttttttttttttttttttttttgggcattactttttattttgaaagatttgtgaaactcttcacatcatggngagagtttgtatgattaataagaagcagctttttcatgaaatgcttggaggngaacgagttctcagcctgtgagatccgaccatcccattaacttttgaagtttctcttgattaatagaagaaaaaaggggagggtgaagaaaaggaggaacatgctaaaaaccttatgacaatcatccaaatgtgaggaaagaacaaccgattcaccaactccactttttctattttacaactttctacatctcactcttgattttggccttcctggctgaaacagcctggcagtccctaaagcccctgagaanagccctggttcttcaaaagacagaggaggagaaaccctgcaggatgcgctgccactttcccananaactgacagnccgtgctccnaaagtttgacccacacctaatntgnaaa

SEQ ID NO: 3861 - DNA, 464 bp, Homo sapiens
  misc_feature 176, 386, 423: n = A,T,C or G
ggtacttgcttttgtagctgtttttttgtaggacatgtgatcatcttagatgttccttcttccaaaacttcagttttattagatgttactcctgccacgcattcagtctttacagatgtttctttttcctcccatgtggtctttgtaggtctttcttgtggccatgcaaaattctnaaaatggtttctttcacaggccttgtaattttcctaggtgtttctcctgctgactcttcaatctttccagatattgttttccccaaacattgaacttcgtcagatgttccctccaccaagggtgcagcttcgtgttggaaataactttttggtgccacaaagaagagttagcactccaacaacaagttaacactccagcaaggcaaattncttctatagaagggtgagtcttgcagatggagcaatngcaaaggccccccgcgtacctgccccggcgggcgctcgaaa

SEQ ID NO: 3862 - DNA, 501 bp, Homo sapiens
  misc_feature 165, 289, 474, 486, 492, 500: n = A,T,C or G
acaccgtgggcaccaaataccgcagcgagtcctatacgtggttcctcttcatcttctgcttcattgtgcctctctccctcatctgcttctcctacactcagctgctgagggccctgaaagctgtgagtggcatttgatagtcagggaagaaggggttcggggctncaaattgagaaggaagagtgctctgaaacataagatgcctggaaatgtccatagccagagagggtatctaaaagcagcaaaggaagtaggaggagggagaatgatggagatccaaaggaactangccaggagatgggacagaaaagaggcaatcagagtggatgccccctcccccatcccacagaaaagcatccagagaccgggcgcagtggctcacgcctataatcccagcactttgggaggccgaagcagacggatcacctgaggtcaatagttccagaccaacctggcctacatggcaaaatgctnaaatgcgaaaantagctnggcatggng

SEQ ID NO: 3863 - DNA, 507 bp, Homo sapiens
  misc_feature 172, 502, 504: n = A,T,C or G
ggtactgggggtggaggggtcccctcttgcagtgtggggttactgtttgggtaaagcgaagtcccaggcagtttcctgtgcacatttccacatggcctgcatgaggcgagtgaaacccatgtctttgggcttttccaggcctctcatcagccgttgcttcatgatggaaacnaaattccttattgctcagttcgccattgccatcacaagtcaaagagtgcaaacaccacatcacacacgtggtctgagagctccactttagccactgtcctggccacctgctgcatggtcactttatcaagagatgctccagccatatggtaaaaactcaatgcagtgtccacatcattaatgttctttaggaaagtaaagaagttctccacctcctgaaatgtcagaccctttccttctttgaagtgcttcttgagctgcctctgcatggcggtcagcttcttggactgcaccccactgtaggcaaagtagcatgccaccaaactggctntnaag

SEQ ID NO: 3864 - DNA, 494 bp, Homo sapiens
  misc_feature 352, 378, 390, 460, 473: n = A,T,C or G
acgcgggggccccatccatggactcttgcctcggtgcagtttccactcttgacccccacctcctactgtcttgtctgtgggacagttgcctccccctcatctccagtgactcagcctacacaagggaggggaacattccatccccagtggagtctcttcctatgtgggtctttttctacccctctaccccacattggccaagtggactcatccattctttggaacaaatcccccccactccaaagtccatggattcaatggactcatccatttgtgaaggaggacttctcgccctctggctggaagctgatacctgaagcactcccaggctcatcctgggagctttcctcancaccttcaccttccttcccagtgtancctctgtcaatngggggctggaccctttaattcaaaggtttaatgcctgcccttgcccaaatgcccaagggtcggtgccctnttttggataccanttaatctcacatttttgggtt

SEQ ID NO: 3865 - DNA, 509 bp, Homo sapiens
  misc_feature 168: n = A,T,C or G
ggtacaaccagccagattccaagcggcgccagaccaataatcagaactggggctcccaacccattgctcagcaaccgctccaaggtggtgatcattctggtaactatggttacaaatctgaaaaccaggagttttatcaggatacttttgggcaacagtggaaggtanaaacagtagggcctctgtaaaattggagactgataggttgatcagaaactcaccctaaatctgaacgggtgccgctataatttgtgacatctggcaagatttccctttatgtatatattttaacaatccgcttggacacgaacaaagccacacttctaactgcttctggcgaactgattttatttttaatttttttcaataaagatattcttagatactgaaagaaatagttaatgagtttgcatttgtgcttgagaaaatttggctcaagtccatttggctgtagtgtcaacgatgtttccagtagtgtttagatttggtgtcttcaaaggtagttgatt

SEQ ID NO: 3866 - DNA, 469 bp, Homo sapiens
  misc_feature 172: n = A,T,C or G
ggtactgatacaattgaaggcccttccactataaataggatggaggatgggtcactgtgtccgtattaccaatgacagtcaccccaagaaacacaagcagctgcatccaccctctttcagggggtagagccactatacttctcatgtagatcagccacattgtcactggaanaactcggatccagccatcctcccgcacgtggtagaggttgactacacctcctgagtaggcatctctgtaggtggcttggtagatggctcgacgggccagatcataggcctgctccacttccaggtcataggaatagccccgatccatgaccccatatgcatacacagagccagaacctacagagaaggtggcccctgaaatccggttcccttcactgtccacgtagtagaaggccagggcctctcttatcccagcccagatcatggtgcccatggacagcccatgcctttggacttt

SEQ ID NO: 3867 - DNA, 539 bp, Homo sapiens
  misc_feature 514, 532: n = A,T,C or G
acggcagccacgaggatgcgatgtatgggacaaaactggagaccatccggaagatccacgagcaggggctgattgcaatactggacgtggagcctcaggcactgaaggtcctgagaactgcagagtttgctccttttgttgttttcattgctgcaccaactattactccaggtttaaatgaggatgaatctcttcagcgtctgcagaagggatcttgacatctttacagagaacatatgcacactacttcgatctcacaattatcaacaatgaaattgatgagacaatcagacatctggagggaagcttttgagctcgtgtgcacagccccacagtgggtccctgtctcctgggtctattaggcctctcccagatatctgagcatactggggaacacctcatttgtggaaaagcctttttgttatcggccttgtgtcacaaggtcatggtccctaaaaactacctatttgtagtggtgacctacattataattattgtcatgtccgaatagatnggaggagaaaaacaattncccctta

SEQ ID NO: 3868 - DNA, 503 bp, Homo sapiens
  misc_feature 468, 484: n = A,T,C or G
ggtacatcacaaacatcggacaatgcaacaaaatcaccaaatgaagacatcctatcagcccctcttgctcttgcatatgccgctgagatgggtgtgagggttttatagagatcataaaccatgcagactttggcctcatcttcactgagtggaattccaacagcagcacctgctgggctgacatgtttgaaagaggcagcggctggaatacctaaagcctccttgagttccttcaccagctgccgggcgttcaaagcatcgcacaagtttataaatccaggggctccatttagaactgtgatgggaagcttgggctgcagtgtgtacatactaagcatggaaattcaccagtaaaatcttatttgtcattttacccccactaccttgacattattcttccatttcataatcaacaaggttctactttctgggtcaccctggataaatgccttgcattcctggagcttnacattttaagtccaantattggccacaaagaacca

SEQ ID NO: 3869 - DNA, 493 bp, Homo sapiens
  misc_feature 456: n = A,T,C or G
acatgtcattacagttggtttagatggttaatataggaataaataaaataactacagttcaaacaaaggaaattaaaatgagattaaagagccccgatcaaaaaaaaaatacttacaactttcagctgaaaaactgtaaaagttacatacatacatacctaatggcacttaggaatgtctaggaaatatttaaccctatactaaacactaacctaacactgatgaaccttaaaagactattatattagtccattttcatgctactgatacaaatatacatgaaactgggcaacttacaatagaaggaggttaaattggactcacagttccatgtggctgaggaggcctcgcaatcatggtggaaggcaaggaggagcaagtcacatcttacatggatggcagcagacaaaaagagagagcttgtgcaggggaaactaccccttgtaatacagtgtngatctcatgagtctcattccctatccaagaacaacag

SEQ ID NO: 3870 - DNA, 501 bp, Homo sapiens
ggtacgcgggaacttatctataaactataacctctccttcatgacagcctccaccccacaacccaaaaggtttaagaaatagaattataactgtaaagatgtttatttcaggcattggatattttttactttagaagcctgcataatgtttctggatttcatactgtaacattccaggaattcttggagaaaatgggtttattcactgaactctagtgcggtttactcactgctgcaaatactgtatattcaggacttgaaagaaatggtgaatgcctatggtggatccaaactgatccagtataagactactgaatctgctaccaaaacagttaatcagtgagtcgatgttctattttttgttttgtttcctcccctatctgtattcccaaaaattactttggggctaatttaacaagaactttaaattgtgttttaattgtaaaaaatggcagggggtggaattattactctatacattcaacagagactgaatagatt

SEQ ID NO: 3871 - DNA, 499 bp, Homo sapiens
accagggcggcgcgtggtctacgccgagtgacagagacgctcaggctgtgttctcaggatgaccgagtgggagacagcagcaccagcggtggcagagaccccagacatcaagctctttgggaagtggagcaccgatgatgtgcagatcaatgacatttcccttgcaggattacattgcagtgaaggagaagtatgccaagtacgatttcgttctctgattccagcagagggaacgctatccaaaaagttggcagcaataaaacgtaaaattcatcctgatcagaaaaatattaatgcctatgttgtgtttaaggaggagagtgctgccacgcaagcattgaaaagaaatggggcccagattgcagatggatttcgtattagagttgatctcgcatctgagacctcatctagagacaagagatcggtttttgtggggaatctcccttataaagttgaagaatctgccattgagaacactttctggactgtggaagtatca

SEQ ID NO: 3872 - DNA, 504 bp, Homo sapiens
  misc_feature 174, 488: n = A,T,C or G
acgcggggaagtcagttttcaaagggctgacccttggcctattatgtttctgatacatctgtttaagcaagcggctcctaagactacactaaggtttcttccatcccctagcagctcacagttgacaattcccagttctctcagcaccagtgatgcctgcccttaaagaacacnttgctgttgatcagtgcttgaatactgacggctaattctgataaatttctcaggcttatttccttaatctacattggctcacattgtcccctaacacatccctgttaactgaaatgcattgccaccataaatcctcacgttttcataggtaacatcacttgctaatgtaattgtctacttggctattttatttgtaatttaaaaagttctgtcctagtagtccatattatataagtatacatatgcaatttgtattaattgtataagatagttatacatagcaccatatgggaaactgcagtatggagtttctnccatggggagggtata

SEQ ID NO: 3873 - DNA, 525 bp, Homo sapiens
  misc_feature 178, 467, 470, 477, 478, 486, 494, 501, 511, 522: n = A,T,C or G
acatgaaattttgcaatactacattcactttattgttcttgtgttttgcatttatattcttgatatcagtcacaatatgtgtgtataaagtctttcgcagaagtttatcatggcaacgaaaaagttcaaagaagagttctagcaggcttgatggattgatgagattcttatttctcancaaagatcaaagctttgcaaaatgtcattcgcagatctggatccaatacggtatgattgtagggagagaagatctttcacctcttgaggaaaattacttaggtacatacttgtttcaaggcagcctttctttaatgttttcagttggttttgtattctgtagcctcaagtagcctgcttaataaaagttaaagaatccttgtgtccctgctttctctacttgtttgggtcagatgatgaaagttttaaattctcgggattttaagtgggagaatttttttaacccaaantgnatccatnnttaaaccncccccttnatttttnagggatttcnttggaaccatnccc

SEQ ID NO: 3874 - DNA, 501 bp, Homo sapiens
  misc_feature 39, 64, 86, 88, 159, 181, 201, 258, 263, 468, 479, 482, 485,489: n = A,T,C or G
ggtactttttttttttttttttttttttttttcatgttngatgttccaagatgactatttgtanatcttccattctcttttgattnanaggccgccttcttacacataaagtcatcttcttcatctgtttctgaaatgtatgtaacaggatcctgccgngaaattttaccaggtttaaaanaaactggcagtttttctggnggctttttggcattttttacctgcaacgtctcctctgactctgaatctgaatcatanatgancctctttttcttgcttggttgcttttgtttgaagtcatcctctttacgggagctatttaccttgatttcctttattcctttctttgcttttaaagtttcttcatcaaactttggtttctcattcttcttttactggttcacttacaaagttttctttccacttggggattactccaaaaaaattttccgaatgtcccatccgcanccccaagaatnaangcncctngctggctggccg

SEQ ID NO: 3875 - DNA, 490 bp, Homo sapiens
  misc_feature 317, 470, 477: n = A,T,C or G
acgcggggtctcgcgagatccctactggctataaaggcagcgccccggagagctcttgcgcgtcttgttcttgcctggtgtcggtggttagtttctgcgacttgtgttgggactgctgataggaagatgtcttcaggaaatgctaaaattgggcaccctgcccccaactttcaaagccacagctgttatgccagatggtcagtttaaagatatcagcctgtctgactacaaaggaaaatatgttgtgttcttcttttaccctcttgacttcacctttgtgtgccccacggagatcattgctttcagtgatagggcanaagaatttaagaaactcaactgccaagtgattggtgcttctgtggattctcacttctgtcatctagcatgggtcaatacacctaagaaacaaggaggactgggacccatgaacattccttttggtatcaaacccgaagcgcaccattgctcangattatnggggtcttaaaag

SEQ ID NO: 3876 - DNA, 499 bp, Homo sapiens
  misc_feature 289, 385, 402, 409, 428, 474, 476, 491, 494: n = A,T,C or G
acgcgggtataggattcgtgttcgccgtggtggccgaaaacgcccagttcctaagggtgcaacttacggcaagcctgtccatcatggtgttaaccagctaaagtttgctcgaagccttcagtccgttgcagaggagcgagctggacgccactgtggggctctgaagaagtcctgaattcttactgggttggtgaagattccacatacaaattttttgaggttatcctcattgatccattccataaagctatcagaagaaatcctgacacccagtggatcaccaaaccantccacaagcacagggagatgccgtgggctgacatctgcaggcccgaaagaagcccgtggccttggaaagggccacaagtttcaccacactatttgntggctctcgccgggcancttgganaaggcgcaatacttttcanctccacccgttccgctaatattaagtaaaagttgtaaaatttattncntaataaacaatttanganagtcg

SEQ ID NO: 3877 - DNA, 490 bp, Homo sapiens
  misc_feature 437, 463, 466, 477, 485: n = A,T,C or G
acaataccaattgatggaaatttttttacatatacaagacatgaacctattggtgtatgtggccaaatcattccttggaatttcccgttggttatgctcatttggaagatagggcctgcactgagctgtggaaacacagtggttgtcaaaccagcagaacaaactccttctactgctctccacgtggcatctttaataaaagaggcagggtttcctcctggagtagtgaatattgttcctggttatgggcctacagcaggggcagccatttcttctcacatggatatagacaaagtagccttcacaggatcaacagaggttggcaagttgatcaaagaagctgccgggaaaagcaatctgaagagggtgaccctggagcttggaggaaagaacccttgcattgtgttagctaatgccgacttggacaatgctgttgnaatttgcacaccatggggtattctancancaaggccagtngtgtatancccat

SEQ ID NO: 3878 - DNA, 591 bp, Homo sapiens
  misc_feature 438, 446, 481, 484, 496, 517, 540, 554, 556, 582, 586, 590: n = A,T,C or G
acaggcctttatgtgtggcatccccttggctattgtaatactgcataggtggctgggtcctatcgtattcagagcgagggtctctgattcctaacagtgctggtgaggaagaggtgctgccgactgactgaatgatgggtgacatctgttggttggtggtaggcaaggaaggatgtgatttgaatcggtctcgctccaatgtcgacacaggtgtaataaaatggttctgattccacccatcctttttataaatgctccggaggtcccgatattgccataatgtattcaagacctgggctgctgccttcaccactttcagagatgatctgtcgcccctgcctttggttatgttcaccagcttctctatgcctcctgagtcggccaaggcttttgccgttctccatgtttttgctggtgacctcgtgcagaacacaacanatggctgncatgggctcatcaaaacaagacactggggccattnccnccgggaacccgntgaccaaggtcttccattggngtatttgcctataacctcttgtncgaacatttagtgncntattcctcaagggtgtgccccggaanaaanaaant

SEQ ID NO: 3879 - DNA, 604 bp, Homo sapiens
  misc_feature 392, 490, 515, 516, 518, 547, 564, 566, 567, 573, 588, 601: n = A,T,C or G
ggttccttttctatgtttagatacacaaataccattgttaaaattacctactgtagcccaggcgtggtggctcgtgcctctaatcccagtacacaatggtttattaaaggaatgtatggcccacatcaacctagcaaggattctactggtaaaccttcccatggccaaaggaaaaacaagcaggagttgagtggctggggtggggtgcaggcaatggagagagggcagaagggtgtagaagctgaagggggctagaagcttactcctgagtttcttccttctgtcttcaaatctttacttcttatggccaaagacccagctgtttcataggctggagatgcactcttctagactgctcgagacagccagagacaggggaggagggaagaaangatactgtggaaagggatggcggggcaaacatttagagctagaaaccactactgggccaatgctaaaagtttctgtctcttaacctaaaaaagccagnggaataaggcccttatcactcttanntngctagggtttccctttgaaataatgagcngatttacccccgctttncnnaaaagnaaaagaccggggctntgcaagaaatatnaaa

SEQ ID NO: 3880 - DNA, 504 bp, Homo sapiens
  misc_feature 129, 160, 165, 177, 179, 181, 395, 403, 420, 438, 461, 462,466, 476, 477, 489, 494: n = A,T,C or G
ggtacctgcaggcctcctacacctacctctctctgggcttctatttcgaccgcgatgatgtggctctggaaggcgtgagccacttcttccgcgaattggccgaggagaagcgcgagggctacgagcgtntcctgaagatgcaaaaccagcgtggcggccncgctnttttttcagacntnangaagccagctgaaagatgagtggggtaaaaccccagacgccatgaaagctgccatggccctggagaaaaagctgaaccaggcccttttggatcttcatgccctgggttctgcccgcacggacccccatctctgtgacttcctggagactcacttcctacatgaggaagtgaagcttatcaagaatatgggtgaccacctgaccaaccttcacangctgggtngcccggaagctggcctngggcgaagtttctcttcnaaaggctcactcttaagcacgannttantacccttttnnagcccaaccacnttctngaagggcccc

SEQ ID NO: 3881 - DNA, 496 bp, Homo sapiens
  misc_feature 170, 171, 241, 312, 342, 438, 441, 484: n = A,T,C or G
accaatgtctaaataaggtttagaatagatatagctttcattttactgctcctcaaatcaattcaaaagtttaacttaatcaatataaaatttacttatgaacacatataaagaacattttataggtgactatataaattagagcttcaaatcatcttcataggtctttnnaaattattccattcaaaattaaaattgatttttacacagtggtttcttcaggaaaaatatgaacatttanatttaaaaagatacaatattcgaagcaaaaaagtttccacatataggaaataatgaatttccctgatcatnaaattcttcccagctatttccttctagcanatatattcactgagaagaaaagctttaatctttacttaaaagttactttgaggggtcaagctaatgaaattttagatctatgtattcttaaagatngcngaaaaaaaagaagagtatctgttccaaccaaagaaaaatttcntctcaatttatt

SEQ ID NO: 3882 - DNA, 503 bp, Homo sapiens
  misc_feature 165, 170, 477: n = A,T,C or G
acgcgggggtcggtagaggcagaaggagaaggtcgggttgtagaagctggggtggccggcagctcgctcatcggtgttcgtgggctttgtcggtccgtgcctcgtctctccctggaaagggagggaggcttcgacgtcgagagggagccgctgccgcgttagttnccaancttgaagtcactaggacttctctcaaacttgtgtgctgaggagactcagatgttggcctcagctcctaggctgaactcagcagatcggcccatgaaaacttctgtattgagacaaaggaagggatctgtcagaaagcaacacttgttatcttgggcttggcagcaaggaagaggacaggtagtggagatcctgcaatctgaaaagcagactgaaaggtgacaaagaagctgaagatgggtggtggagagaggtataacattccacccctcaatctagaaatgttagtaagaaccaacaacagcttancagacagaagaccaaggaacagaatt

SEQ ID NO: 3883 - DNA, 577 bp, Homo sapiens
  misc_feature 419, 461, 475, 499, 508, 513, 521, 525, 534, 537, 558: n = A,T,C or G
ctcggtcaagtctgcacgagacagcttcctgacattctcactgggcccctccacagcctgggctagaggtgtgccctggaatgctgtggcatgcaggtagttaaagaccacatctcgcatagatgcatcattctcctgcatctcccgcaggatcacatcacgttccttctcaatctgtgagtcttccagactacagttctgcacaatgtcacccaggagctccacagctttcggcagatccttggacagcgccttgatgtagtaagctgtgtgctcccgggtgctgtaggcattaagatgggcccccatgctctccacctccttctccagggcactgccaggccgattctttgttcccttgaaagccagatgctccaaaaagtagcctgccccattattcttctcagtctcaaaacggntgccaacatcaatccacacttccaccgtgccaatgggcttanaggactgctcggangccacacccaggccgtgtccacangctaacttngtttncggacaantggncgcctgacnaangtgccgacttggccggacacntaaggggaattccccccct

SEQ ID NO: 3884 - DNA, 591 bp, Homo sapiens
  misc_feature 413, 477, 488, 501, 510, 518, 522, 524, 543, 558, 591: n = A,T,C or G
cccggatgttgcggacagtatgaggcaagcgcagggggacggggaccagcagctgtcgccgccgctctcagggtgaagagggaacagaaatctttgccccctgactttggaaatctcgtttaaccttcaaactggcgatgtcaagggttccaagtcctccacctccggcagaaatgtcgagtggccccgtagctgagagttggtgctacacacagatcaaggtagtgaaattctcctacatgtggaccatcaataactttagcttttgccgggaggaaatgggtgaagtcattaaaagttctacattttcatcaggagcaaatgataaactgaaatggtgtttgcgagtaaaccccaaaggggttagatgaagaaagcaaagattacctgtcactttacctgttactggtcanctgtccaaagagtgaagttcgggcaaaattcaaattcttccatcctgaatgccaagggagaaanaaaccaaactnttgagaagtcacnggcatatangttttgtncaangncaaaactgggggattcaanaaattattcgtaganaatttttttggtgaggccaccggctttttcctn

SEQ ID NO: 3885 - DNA, 585 bp, Homo sapiens
  misc_feature 357, 365, 422, 423, 447, 449, 489, 500, 511, 531, 547, 561,576, 582, 584: n = A,T,C or G
acgcgggggataaattcatgaaagaagccacgacgaatgcaccattcagatcgaataagaaagacagaaaaactgtgaaaatgatgtatcagaagaaaaaatttgcatatggctacatcgaggaccttaagtgccgtgtgctggaactgccttaccaaggcgaggagctcagcatggtcatcctgctgccggatgacattgaggacgagtccacgggcctgaagaagattgaggaacagttgactttggaaaagttgcatgagtggactaaacctgagaatctcgatttcattgaagttaatgtcagcttgcccaggttcaaactggaagagagttacactctcaactccgacctcncccgctangtgtgcaaggatcttttaacagtagccaggctgatctgtctggcatgtcaaggaccnnagatatttttatatcaaaattgtncncaagtcctttttggaagtgaatgaaaaggaaccaaaggcnggagcttgccncacagcaattnaacttttttcattttgatgncccaaaaaatttactngcgaccatcattcnttttttttttggganaatccncng

SEQ ID NO: 3886 - DNA, 597 bp, Homo sapiens
  misc_feature 406, 432, 444, 481, 499, 502, 519, 522, 538, 544, 571, 577,586, 590, 593: n = A,T,C or G
ggtactacactgaagacaggttgctcacatactctaaagcacattcttgatacaggaagaagggcttgtggggaaagcggcgatttggtattgggcaagagccacgttaagccttcatgagggcagccaccacagccttggcattgaggctgcgtaggtcacagtaggtctggccggtgcccacaaagacgatgggtttgcttgtgatgtactaggtcttattcatcctttctaactattcttttttacccattagccatccccaactccacccctcaaagttatactttctaaataactagctctgaaagcatctctttaccgaggcttaactgtgtgtgttatggagaaaattgtgctattgctctgactttatatattgtagtcctaccccctagcatttaantaatatgaccatattttggagaaganggtctttaaaantgataattaaaactaaaatgaggtcataaggggtggntcttaatccatatgaaanctntcttttaaggaaagganatntaacccagacttcccnaggganaaatttttttaaacccaaaaaatggtntttaanaacccaggngaanagntttt

SEQ ID NO: 3887 - DNA, 610 bp, Homo sapiens
  misc_feature 7, 9, 17, 21, 22, 24, 32, 41, 49, 54, 73, 76, 115, 141, 164,233, 240, 253, 259, 266, 267, 279, 286, 287, 298, 303, 334,360, 363, 365, 386, 413, 416, 461, 468, 497, 527, 530, 533,537, 541, 553, 559, 573, 590, 603: n = A,T,C or G
gcgtggncncggccgangttnncnggatcganatgaaggtncaagaccngacanacagcctgagtttactcanatngacatatagatgtcatttgtagaccagactgggatccanagtttaattgagggtttgctccagtnttcctggcccaatgacaaagatnctgtggttgttccttttcctactatgacttttgctgaggtgctggccacctatggaactgataaacctnacactcnctttggaatgaanattatngatatcnntgatgtgtttanaaacacnnagattggattncttcnagatgcacttatgtaagccccatggaactgngaaagccatatgtatcctgaaggagnaantncttaaaaaggaaagacattgnatccattaaaaactttgtagctgaccnttntaatcaaggaaatttacctgtatttccttaacccaatagaaactnggaattntccacctgcttaatttcataatggagtcncaaacccctggaatttatcccactaatggnganccnacangganaagggggcccantactgnttggaaacacaaanaaaaattctctttttanggaaaaaccactnggatgtc

SEQ ID NO: 3888 - DNA, 588 bp, Homo sapiens
  misc_feature 61, 86, 90, 140, 252, 272, 331, 458, 465, 471, 504, 513,534, 568, 575, 583, 585: n = A,T,C or G
acttttttttttttttttttttttttgaccacacctgccctttattggtctcttctagcanagtggctccaggcccttcacgcctntcanacaccacccatgagggtttaggaaggtgccatcattctgtgaaggcccanagcttacccaagtcttggagcccaagttgaatcaccaaccagagggttgggagaggaaaaggaaacaggcagaggggaaaggcaaggctctgcagtgaaggggactgatatnaagggaatgctgaggtccancagtgtctcctgaaggcatgctgcatcctaaggctcctcaggactggatggagtagganatctgtgtgttgagcagttcacatctatatggcaactttaaggaggcgcttgatgtcaggctcaatgttgatggtttgggaaagtgccgctgtaacgttcgaaagggctctccctccgccctatgangaacttntcaaanttccagccacatttgagcggggcccaaggctcnaatgatganctttggaaccggcattaaggnaaaatgggtcatattaagggggggggacttttcnttatgtngcgaaaanangat

SEQ ID NO: 3889 - DNA, 594 bp, Homo sapiens
  misc_feature 459, 461, 486, 540, 548, 582, 590: n = A,T,C or G
ggacttttaatcacttactgagaatatttcaaatttatattctcatcaggaaaatgtaaaaaagatactgatatatattctatgatttttatgccacaaacacccctgttatgagatcatttaataggaaaacaattatactgacatctcttgttccattttcccattagatatatacatacaacttcaagatagtttaaaaataatcattcaggttattctaaaattttgccataaaattagcaaagtatgccttctgttaattgctaaaaccaatatttcacatataaaagcatgtgatctcattctacatgcagctccatttctgaaaattaaaaacctatcatttcatgggctaaattatagaactttctatattcgaagaactacttcataagactgttatgacaaatgctttttattacataatatttaagtaggtcatgctcaatcaacaangncaacagaaacttgtgaatattctgnttaaataatctagcacactaatactaccccgtttttagggcagtaccatggaanaatcctgnatccttattcaaacaggtttggaaacttgggatnaataaganacca

SEQ ID NO: 3890 - DNA, 584 bp, Homo sapiens
  misc_feature 358, 382, 405, 413, 458, 514, 515, 525, 531, 540, 545, 551,557, 558, 560, 562, 564, 569: n = A,T,C or G
acttggggaagccatctctatcatttttcttgtaaaatcttttcgggtccatgctggctctcatcttcagtgctttgagatcatttttcagttcatttgtcatttctggagctttcataccaaaccagccatcccctgctgttttttgtcgttcttttctgcgttttttctgaagttgatactttgattcactatatggtggaacacagtggtttttttcaaaatcaggtgtaatgacggctttctgcagaagctcatttttctttttctccttgatctgtgttagggttctcttgttagactgtagtttatctgcattaaaattaatatacaaaccacccaactgcttgatactcanaccagggtctatgctgctgcttgncaacttcagaagtttaacctttngctattangaagtcttctttcatcactaaactcatcttcattttcgcattggnctgatgaaacttcttcacttttttcaaccccttccctttcttttcttctcaaaggnnacctccttgncttggnttccctttncaagnaaaaantttttnncncncnttccnagagggtgggctaat

SEQ ID NO: 3891 - DNA, 612 bp, Homo sapiens
  misc_feature 4, 339, 436, 467, 474, 485, 548, 549, 551, 580, 586, 587,593, 601, 605: n = A,T,C or G
ggtncaaccaagttacttttcctcttactgaatttcattatgtttcacatatttgcagtttttattcagcagagaataattcttaaaatcttttctgtaagaattctaagtatttaaatgtgtagcttcacattatactaccatgtttcacccttcgtttcccaaatacacaaaaaacatatacattttttcaaaaatgaaataagatgcccacattaaaaaaataaagcctacaaaaagttccagagctaaaaaagattattcatatggcacaaagtgatctcctactagtccaaagttcaaaaacattttaatgaagtccatttatatatattttgnttgcttttcaatgaaatgctacatttattgaggcgaaatcacattatttttaagtctttggagtcaacaagtggtcaccagaaagcctccaaggatngcttgaagtcccaccgtctctggatgccggnggctcanaaccccccgtntcattttatgggaggctctggggactgggggcaccctgcaaggagctggccagccagcccggnngnggatgggttccttgggggggggggggttncctcanncccganttctgggnaatnattaatg

SEQ ID NO: 3892 - DNA, 604 bp, Homo sapiens
  misc_feature 333, 376, 469, 470, 523, 560, 589, 601: n = A,T,C or G
actgtgcatttcctctacttgcatggccaataaatacagctacgacctgtttgaaaaacaaaacagatgtgaacctctggcatgtgctagctagtgaaaggttcttttttaaaaacctgtagcaatgataaaacagattagaaagatacaaaattatcctaaaggcataaatgcaaataaattttttatggcaaatacagatgaaaatataatgggctaatttattaatgattaagaatatattcactaagcgttttcatggatttgggaagtcttgttcctatattagctttcattctagacaattaatatttatatagggaaaggcaatangcaagttttttccagtcattaagtgtgacttttatgcctagtnagactgatgcaagacatcttttcctaaagtttagtaaaacaactttaataagcctcctttttccccctacaagaagctttggtaatattaatnnacctggtatttccacctgtctctttaaggggaaaagggcacttttcaaaagtntttcactaaaaaataataaaagtcctttttttaaagnccgttgccaaaacaatgtgcagggatccnaaatgtttcatntgt

SEQ ID NO: 3893 - DNA, 587 bp, Homo sapiens
  misc_feature 207, 243, 278, 307, 479, 488, 507, 513, 517, 520, 522, 524,530, 533, 560, 572, 576, 583, 584: n = A,T,C or G
gtacgcgggattggcacatgggtggacacggatctgctgggctctgccttaaacacacattgcagcttcaacttttctctttagtgttctgtttgaaactaatacttaccgagtcagactttgtgttcatttcatttcagggtcttggctgcctgtgggcttccccaggtggcctggaggtgggcaaagggaagtaacagacacacnatgttgtcaaggatggttttgggactagaggctcantggtgggagagatccctgcagaacccaccaaccanaacgtggtttgcctgaggctgtaactganagaaagattctggggctgtgttatgaaaatatagacattctcacataagcccagttcatcaccatttactgctttacctttcagtgcagttcttttcacattaagctgttggttcaaacttttgggagcacggactgtcagttctctgggaaagtggcaacgcatcctgcanggctttgtnctactgtgctttttggaanaaccangctnttntnangggctntanggacttgccagctgtttaaccaggaanggccaaatcatnaaanagttttnnaat

SEQ ID NO: 3894 - DNA, 374 bp, Homo sapiens
ggtaccccaatctgaagtcagtaaatgaactaatctacaagcgtggttatggcaaaatcaataagaagcgaattgctttgacagataacgctttgattgctcgatctcttggtaaatacggcatcatctgcatggaggatttgattcatgagatctatactgttggaaaacgcttcaaagaggcaaataacttcctgtggcccttcaaattgtcttctccacgaggtggaatgaagaaaaagaccacccattttgtagaaggtggagatgctggcaacagggaggaccagatcaacaggcttattagaagaatgaactaaggtgtctaccatgattatttttctaagctggttggttaataaacagtacttttt

SEQ ID NO: 3895 - DNA, 479 bp, Homo sapiens
  misc_feature 48, 55, 81, 100, 126, 141, 146, 188, 196, 209, 223, 235,239, 246, 247, 248, 252, 256, 284, 293, 321, 333, 336, 338,340, 352, 373, 393, 397, 408, 421, 425, 438, 444, 455, 460: n = A,T,C or G
ggtactttttttttttttttttttttttttttttttttttttttattnggaaatnggttatttatcaagaggaactatttnttagcccacatattcatgngtcatagttcaggaacacaagtcagngacaaacttctaggnaattnaacctgaaaaaattctttatattccaagattactttacactntgaaaganaccagccttcctnatttcctcaaaatntttcatgacatnatantttctgnnnaaanctgngtatgccttttttctttgatcagccacncgaaacttntacaaagctgcaacccccagggatagcncgaatgctacanccntntnatttctcaaacncctggcaaaaggccacccatncggggttttggcaaaacttngggngccatgggaantactgggcttganaccnttgccaaccttanaccaangtttttctgantaaanggaaaacgaaccgtccccc

SEQ ID NO: 3896 - DNA, 602 bp, Homo sapiens
  misc_feature 497, 514, 542, 544, 580, 598: n = A,T,C or G
ggtactgtctgtcttcacattcatattccagatttatattttctggagttaaatttggatgatttctaaattatcacaaagtgggacctcagcagtagtgatgtgtgtgtctcatgagcagtgagcacagtctgcattcatcatgaaacactatcttctaccaggaggaggttaatgtaaatcaccaaatcccaatgccttgtgactttcataggattcctgatcatgcatgttgatgtacaattagcttcagagttgatattaatagaaattattccaaaattattcttgtcacaagtaactactatatcccacataaaaagggaaaaaatcccacccaatcacagaaaaggcatcctctgtatgtttccgtggcaatgcgttgtttatgtattctcaaattttgtctggctagttatccaccgcttctcaatggattcattcagtttctttggagaaccatatagactaatgacagcatcttgggacacaccggncgtatcaagttcatggnggacattcctattataaaaaaaactcangncttggagaaattcctgggctggaaggatcccaaatncttttttaaaaacatttntctt

SEQ ID NO: 3897 - DNA, 583 bp, Homo sapiens
  misc_feature 29, 160, 283, 454, 480, 509, 526, 541, 552, 570, 574: n = A,T,C or G
acttttttttttttttttttttttttttngatatttcatttggttctttttattagaaactgagaatacagcaagtagggaaatcccacatcaatggaaccatcacacagatgcctttctggaaccccaaccttctatgatccccaaaaatgtgctttgnggctttagcataatttataaaggggaagagggaaaatactgaaaaaggccactatttaatggtgaaagaatgaagctgtagaggtcccaaccagcctagggccaaaaaagaaaattaaaaatntgcacagagcaagcaagcctctgactgctgagagtaaggcattcaggcgccaacctggtgagagttctcagcgagcactgtcaggtcaagtgcacatgaggctgttggtagtgagctgcccgtagacacacacatagaaaatgggcacatgccccataccacccgaaaaanggagatttactggattacacatcagngatggtaattcatttttcctaagggttgngctatgttgaaccaaancttccacttttgggnggggggactgnacccaaaggttgttcttntgtnggggtggga

SEQ ID NO: 3898 - DNA, 592 bp, Homo sapiens
  misc_feature 30, 204, 275, 289, 418, 446, 451, 459, 480, 482, 493, 497,528, 532, 555, 561, 576: n = A,T,C or G
actttttttttttttttttttttttttttngaaaatgtttatggtttttatttttcaatttttattttggttttcttacaaaggttgacattttccataacaggtgtaagagtgttgaaaaaaaaattcaaatttttgggggagcgagggaaggagttaatgaaactgtattgcacaatgctctgatcaatccttctttttctnttttgcccacaatttaagcaagtagatgtgcagaaaaaatggaaggattcagctttcagttaaaaaagaanaagaagaaatggcnaagagaaagttttttcaaatttctttcttttttaatttagattgagttcatttatttgaaacagactgggccaatgtccacaaaaaattcctggcagcaccacccgatgtccaaaggtgcaatatcaangaagggcaggcgtgaatggcttatttgntttgnattccaangatggctttcccattcattgncnttttagagcancccntttccaaaacaagtgtaaggtgaacctgctnttgnccttcaacaccaagttcaacatnatttanaacccttttaaattnacccctttttaggtcg

SEQ ID NO: 3899 - DNA, 587 bp, Homo sapiens
  misc_feature 432, 480, 484, 492, 516, 527, 531, 535, 550: n = A,T,C or G
tacaaatatttaagagtgttgattgggagtaagggaatgtcaactgccaataaagtggaagatgaaagaataggactttacacagagcatatttagttatgggtctctgtctcctccccacacagaaaaactcccagacattcatgacttcatccaccctgcctggcagataggccatatttcctgaccccctggctcttcacctcaaaaggtttatctttccaccacactagcaaagaccctcaggacacacaactcatactgccagctaagcatctaccccgagggacaaggcaagcacacactagggcagctgggccatcctggccctaatccctccagcggtgtccacactgagcattgcagcacttgtagaaggtggtcatcggctcatctgcagaacgggtctgaactgcatgaagtaagcacgangatgttcgcatttgggacaccactctgcagtaaaagtcaacatttttnccangcagctgntccaccaacacattattccacttntttcaattttnggtncctncccggaaaagctccntttcaatcgcatatttggggccaaggccccccctcat

SEQ ID NO: 3900 - DNA, 602 bp, Homo sapiens
  misc_feature 37, 232, 265, 366, 399, 419, 435, 443, 449, 468, 486, 489,502, 522, 528, 546, 549, 550, 554, 573, 587, 598: n = A,T,C or G
ggtacttttttttttttttttttttttttttgggaanaatgtcattggtatttttacaggggttgcattgaatcagcagattgttttggtatatagatattttaataatattatttcttccaatccatgagctggaatagcttttcttttactttttatttttggttccctctttaatttatttcatcagtgttttatcattttctttgtagaaattacaaataaaaagatntgttgacttcagtttttgaaacagtttgagtanaattagttagttttagttctttcttaaatttatggtagaattcagcagagaatccatcagatcctatgctttcctttgaggggagacttattattactggnatcaatttggtattcattattagactctcaggnttttctgtttcctccatggnttaaatcttggtaggntgtatggntcccanaaacatcccatttcttctngggttttccaatttattnggngtataggttgttncacaataagtcaaccatatntttttnttttgcaaattttttacnttnnaatntattaaaatatacctttantaaccccataatgngaaaaaataantttt

SEQ ID NO: 3901 - DNA, 593 bp, Homo sapiens
  misc_feature 367, 368, 369, 371, 373, 419, 498, 535, 571, 577, 584, 586,588: n = A,T,C or G
acatggccgccgtcctggaatacctgacagcggagattctggagctggctggcaatgcagcgagagacaacaagaagggacgggtcacaccccggcacatcctgctggctgtggccaatgatgaagagctgaatcagctgctaaaaggagtcaccatagccagtgggggtgtgttacccaacatccaccccgagttgctagcgaagaagcggggatccaaaggaaagttggaagccatcatcacaccacccccagccaaaaaggccaagtctccatcccagaagaagcctgtatctaaaaaagcaggaggcaagaaaggggcccggaaatccaagaagaaacagggtgaagtcagtaaggcagccannncntnctgcacaacccgagggcacacctgccgacggcttcacagtcctttncaccaagacctcttccttggccagaactgaaccttattcacagtgaaatcagtaatttaacccggcttttgaggtgganggccttaatcaatcctaccaatgctgacattgccttnaagaataacttaggaaaccccctggaaaaaaaaggnggcaangagtttntngnaactt

SEQ ID NO: 3902 - DNA, 581 bp, Homo sapiens
  misc_feature 4, 447, 448, 449, 450, 451, 452, 453, 454, 455, 456, 493,496, 510, 523, 538, 540, 548, 574: n = A,T,C or G
ggtnctttcctgccttttagttcctgtgcacagcccctaagtcaacttagcattttctgcatctccacttggcattagctaaaaccttccatgtcaagattcagctagtggccaagagatgcagtgccaggaacccttaaacagttgcacagcatctcagctcatcttcactgcaccctggatttgcatacattcttcaagatcccatttgaattttttagtgactaaaccattgtgcattctagagtgcatatatttatattttgcctgttaaaaagaaagtgagcagtgttagcttagttctcttttgatgtaggttattatgattagctttgtcactgtttcactactcagcatggaaacaagatgaaattccatttgtaggtagtgagacaaaattgatgatccattaagtaaacaataaaagtgtcccaaaaaaaaaaaaannnnnnnnnngtcctttttttttttttttttttttttaattcttcanctnaaacaggggaagangggattatttttnggtggtaccctcggncnaaataacncaaaatttccaaatgttcaaggtccnggcaagg

SEQ ID NO: 3903 - DNA, 583 bp, Homo sapiens
  misc_feature 3, 42, 172, 219, 248, 327, 439, 461, 470, 488, 520, 530,532, 558, 566, 568, 575: n = A,T,C or G
ggnacagtgatttggctatagactctcgccccttcagggcanactgtcctcagttcatccttattgagagagaaaagttgtgcaccatttaatactccaagactattgacagtcacagggttgaatccctttgactgtaaccacgtcttcacatcctctggtgtggagtcgnaagtgatattgataactggcacgttctgccgtggcacatggaatttnttctgagcggcactccgaccaatggtcantctgtggatgagttcatcttgcacttctccatctgagatttccttcggtccaccggaagttgtttgtgtctctggctgnctcgcacgatactgccaccactgtcactggagctgctgttttgacgtgttatatttgctgggacctttgacacatgaacaggtgctggagtggaaagggggaaggggaacangaacaggaactggtgtttggangaagtgatngagcaaggggagtatcanctggtcttggccatactcatccttggttctgnataggatgantntaagggggataaggcccccaatccanattttggngnctaaaanatcaaaag

SEQ ID NO: 3904 - DNA, 591 bp, Homo sapiens
  misc_feature 78, 79, 87, 126, 158, 164, 174, 181, 183, 201, 203, 213,226, 230, 233, 242, 249, 256, 262, 268, 270, 295, 306, 321,397, 460, 467, 477, 482, 490, 500, 507, 511, 535, 536, 547,549, 552, 554, 560, 580, 585: n = A,T,C or G
ggtacttctttttttttttttttttttttttggtttttttttttttttttttttttttttttttttttttaaaaaccnntgcaattnttagtttattagtatcatccaggactcaaatgttcagtnttcctcctgaaattacataaacaaatgcaaanggaaanaatccaagtntaaattntntaacaaaacagccctccntnacaaaagcgngtaaaattacaanaacnctnttttaaaanactggcnctttaanaaaacnataatntngaaaaccacaaaattgccaaattgntccctaaactnctaagccgataaacntgactaatgaatgagtttgttttgtaaaaaaaaatcattcaaataaattgaataattcatactgagatgcaaaggnttggcttctttcttcctatctacttggatttataaaggggcaaacccgtaatataagaaaaantaccctnttttgaaagnggctntttgttgnaaaagctggncccaatnaatnaaaatccttggtaatgaaagtttnntttcctgggcngnccntnttaaanaaaggggaaaaacatttttnccccntttttt

SEQ ID NO: 3905 - DNA, 591 bp, Homo sapiens
  misc_feature 540, 546, 566, 572, 582: n = A,T,C or G
ggtacactgcccaggcaaagcgtccgggcagcgtaggcgggcgacttagatcccagccagtggacttagcccctgtttgctcctccgataactggggtgaccttggttaatattcaccagcagcctcccccgttgcccctctggatccactgcttaaatacggacgaggacagggccctgtctcctcagcttcaggcaccaccactgacctgggacagtgaatcgacaatgccgtcttctgtctcgtggggcatcctcctgctggcaggcctgtgctgcctggtccctgtctccctggctgaggatccccagggagatgctgcccagaagacagatacatcccaccatgatcaggatcacccaaccttcaacaagatcacccccaacctggctgagttcgccttcagcctataccgccagctggcacaccagtccaacagcaccaatatcttcttctccccagtgagcatcgctacagcctttgcaatgctctcctggggacaaggctgacacttacgatgaaatctggagggcctgaanttcaanctccggagaattccggaggntcaaantcatgaaggnttcaggaac

SEQ ID NO: 3906 - DNA, 589 bp, Homo sapiens
  misc_feature 31, 112, 170, 265, 288, 543, 568, 573, 576, 587: n = A,T,C or G
actttttttttttttttttttttttttcagncttgatgtgtgatctttattttgtatttctctgtgtaaaaccagtgaatataactaaagtgttagtggattggattaaaanaaacttattaggcaagaacaggtaatgtagttatccatgactacttttaaccatgcanactaataatattctggaggtttatagctcggcaccttcaccttttttcactggtatttcatgtaaggcatcaaccccgcgtacaagtccttgtanatctcctgcaggagcgggtgaanactcatgtctgtctccgtcttcttgatcacctgcagtagctgcacatgttccgtgacaatctgtctgaggtctgtcattttctggagcagcttggcaaacagctgtgaggactcagggtggttcagcttcagctggagctccagggcttgtagcaggttgtcttgaatgtcttcaatgggcttcacattcagcaaacctgggcggtcttcactgagaataatgacagcaataaatattgccaagtccctgtcatntaattccaggcatttgaactttaanaaaanttnaacttgggctnca

SEQ ID NO: 3907 - DNA, 586 bp, Homo sapiens
  misc_feature 328, 391, 429, 458, 503, 505, 506, 532, 568, 576: n = A,T,C or G
acacagagtaaaatgtttttcttttttcaggaccttgaactgaatcttgcactgctttggtttctatctaggaagctcagcgacagcagagtctgtagaggcggccactgatttcacacaccccggagagggactcacgggtagcacaacggccggttcggcaatagcaggtggctcttgcctgagaacctgaggttctaagagcagagagtccatttcctgcaaaggagatagcaaggtcctggttgtcttccccagactgcttctgggttgtagcctcatcagctctttcctggagtgactcaacctgggcctgcagggccaccangagaatggcagcaaggatggcgatggtcctcatggctggggtcacctgcaggagggagagcangagtggatatatgtcccgcgttccacaatggtttattnaaaggaatgtatggcccacatcaacctancaaggattctactggtaaacctttccatggccaaaggaaaacaancnngaattgattgcttggggtggggtgcncgcaatggaaaaagggcaaaaggggtataacttaanggggcttnaacttactct

SEQ ID NO: 3908 - DNA, 588 bp, Homo sapiens
  misc_feature 34, 75, 116, 215, 267, 273, 452, 486, 513, 527, 537, 551,564, 567, 569, 583: n = A,T,C or G
ggtactttttttttttttttttttttttccatanaaaggaggaaaatatttattccaaaagatggcagaaagaanaaattcatcctgaaagtatagtttggtgcgattctgttganatggctcttccctctgaacgtgctctcctactgaccaccccactggagtcttgtttgtcttgcagcagtttctaaacacttcactgattcccacgtganaaggcaggagccatcttcaaatccacagattccaaggagagagtaacgtatntctcanaagaacagcatcttctatctcagaagagtacaaaaggtgaggagtgaggagatagggagttcttccttggctggctggcttcataatccctgggccccgcagataattaaatcgactttttctgtctcaggcatttgtatgacctcttttggaggttccctgctgggtagtatccttgnatctgatggacccatctcaatttaaaaactctgncaggttcgggaggtcatgcttgtcatnccacccttttggangctcaaaggngcccttggcttgancccaaaatttganacncncctggccacctggngaaac

SEQ ID NO: 3909 - DNA, 510 bp, Homo sapiens
acgcgggggcagagctgcggaagatgaatgccagaggacttggatctgagctaaaggacagtattccagttactgaactttcagcaagtggaccttttgaaagtcatgatcttcttcggaaaggtttttcttgtgtgaaaaatgaacttttgcctagtcatccccttgaattatcagaaaaaaatttccagctcaaccaagataaaatgaatttttccacactgagaaacattcagggtctatttgctccgctaaaattacagatggaattcaaggcagtgcagcaggttcagcgtcttccatttctttcaagctcaaatctttcactggatgttttgaggggtaatgatgagactattggatttgaggatattcttaatgatccatcacaaagcgaagtcatgggagagccacacttgatggtggaatataaacttggtttactgtaatagtgtgctgttcatggaaaccgagggctgcatcttggttatagtcatctttggacctcgc

SEQ ID NO: 3910 - DNA, 588 bp, Homo sapiens
  misc_feature 4, 501, 515, 524, 571, 573, 581, 588: n = A,T,C or G
ggtnccatctgcgccatcctggagaactaccagacagagaagggcatcactgtgcctgagaaattgaaggagttcatgccgccaggactgcaagaactgatcccctttgtgaagcctgcgcccattgagcaggagccatcaaagaagcagaagaagcaacatgagggcagcaaaaagaaagcagcagcaagagacgtcaccctagaaaacaggctgcagaacatggaggtcaccgatgcttgaacattcctgcctccctatttgccaggctttcatttctgtctgctgagatctcagagcctgcccaacagcagggaagccaagcacccattcatccccctgcccccatctgactgcgtagctgagaggggaacagtgccatgtactatttacttaaaaaaaaattcaaccaattagagaatttctttatagcagcagttctgaagtgtttcaaaaaagagacttccccaaccccccaagaaggggctttgtacctgcccnggcgccgctcgaanggcgaattncagccactggcgggcgtactatggatccagcttcgggccaacttggngnaatatggnctactgn

SEQ ID NO: 3911 - DNA, 589 bp, Homo sapiens
  misc_feature 478, 498, 510, 549, 556, 559, 577: n = A,T,C or G
acacaaagagggggtgggtgtcggatgcagagtgtgtggcctgatgctccacggcgtgcaggacggggggctaatagtaggtttccttctccacccagccgccagggcgtcgcctgatgatgagttttctgacttcgtcatatacgaagatgagaagagagtaggggaaggcacagaaccaccaggtaggtttgaggggatacatcctaagagcaacacccattccagggcagtaggaaaggaaagcagccagggctgtctcttcaaagaggccaaatatcaagatcttgttcttcatcccctgctggaagaccgaattcctcctggtcttacagatgaccaagtcggcccactgcaccaccacgatactgacgaaagaaggctgtgtgggcaggtgaactccacgattttcctctgctcataggtccactgctgcccgtaactgtcttccacatcgttgatccagcggtcattccantccactcggaggcccaacangtgaattgggangaagccgtctcagccagaatcacaaagtaagtaaagaancttccanggnctggatcattcaatctgncctaggcctgct

SEQ ID NO: 3912 - DNA, 452 bp, Homo sapiens
acctttggggcatgggggcattacatgggatgcttgtgtaatcgaccacctagccttctctctcccctcccgtcctcccccagaatcacttcctaggacacccgagctgcttgcccagggtcctgtttccctgctaactccagagaagcatcccagggctttgtgacagtctctaattcccttcccttctcgttaagaatcatattgtatagtagctttcagaccatacagtattcattgggttactcctattattatcaagtagctggaattgtgaaggtcggagtagttagatctttagcttttttccttatttttttgtattactctccatgtgtataaattattgatcatgttgctggcttttataaactctaagcgaaggaggagcactgcctcagcctttgcacatggtaatgaacactggttttaaataaaagagagaaacactg

SEQ ID NO: 3913 - DNA, 554 bp, Homo sapiens
  misc_feature 424, 433, 454, 457, 466, 516, 519, 524, 532: n = A,T,C or G
ggtactatggaattccatttatggaaagttcaacaactggcaaaactcaccttcggttacagaattccagacagttgtaacacttggcagtagaagatgactgaaagggaacatgaaggaggcatctggagttccacaaatattgtatttctggatttgtgggctggttagatctatatgtgtggtttgcaaaaattcattgaactgtaccgaccatagagcaagaatcaagattctgctaactcctgcacagccccgtcctcttcctttctgctagcctggctaaatctgctcattatttcagaggggaaacctagcaaactaagagtgataagggccctactacactggcttttttaggcttagagacagaaactttagcattggcccagtagtggcttctagctctaaatgtttggcccgncatcctttncacaagtatccttctttcctnctnccctgtctntggctggctcgagccagctaaaaaaagtgcatcttccgcctattaaaaanctnggtcntttgggcnttaaaaaagtaaaaaatttgaa

SEQ ID NO: 3914 - DNA, 542 bp, Homo sapiens
  misc_feature 450, 460, 462, 470, 473, 480, 487, 491, 500, 518: n = A,T,C or G
ggtacaaaattcaaataccaacaaaactgatctgtgatgatagaaagcatatcacgttcagggagaggtgggacaactggaaaggggctgaagggagatttccgctgggaaataaatattcttaacttgttttgagtctataaattctcaaaactcaattcaagtgcttaagacttacacattttattgcatgcttattaaacaaaataacagagtttttattctgaaacaagaaaagaatatagactcttggaatttttagattatgtctccctttctctacttgcaaaacccagaactgggaaaacaataggctcttaataaatgctttttgaatgaacagatacatgcaaaactaaaagcatatttagatataatgtgagcagaaccagccttttctgtgtagtgggagtatctttatcacctccagatttgtttgtccccgggctnctcttccttntncgcctcgnggnggggtcntgactcnctgntcgcctgtntttttacaagacttttangattaaccgattcttggccaaaaa

SEQ ID NO: 3915 - DNA, 517 bp, Homo sapiens
  misc_feature 458, 477, 511: n = A,T,C or G
acagtgttccagccatcctgcttgttttttccctccaatacctcccagaacagaaacacttgcatcgagtctgttcctaagaactagttttgaaaaagaagcgatgtactgttggggctatgtagcgtgtggcctcatcagtctccccaccaaaagctatcttttgtccttcaagcaaacttagtatcctcttaaaatgacgaagattgatgatcctttcataatcaggagactcttttatattttctccataaaattccttcactgtttccttaatcttccatacaatttgattttggagggatgcttcacagagaatatagtcgggtgcaatgcaggtttggccacaattcatgtattttccccaggttatgcgtctgcaaacaatgtccaggtcacaatctttatcaatataacatggactttttccttccagtcaagaagtcacaagggtcaanatgcttggcagcagctttncatgacaatttgccaaccgcagtggtttcccccncggacc

SEQ ID NO: 3916 - DNA, 549 bp, Homo sapiens
  misc_feature 232, 238, 264, 301, 374, 385, 404, 416, 434, 435, 436, 460,476, 486, 495, 500, 508, 515, 521, 529, 531, 545: n = A,T,C or G
ggtacttgggatcccccagttccaaagtgtcttaaagtgtcgacttcttccactacaaaatctccagcgtccagtgcctcaggtcctaggcctacttacaagcctccagtctcaaattatccaggatatcctaaacctgaggaaggaatacttgacagtttggatgtttgggtcattgctgtgattgttattgccatagttgttggagttgcagtaatttgtgttgtcccgnactttntttttttttttttttttttttcatcnctgaatttaggatttacttttctgaaaaactttgganagctgggcaggggcccgggttaggaaaggaaaaacttttacccccaacccactgcccaaggcctgtcctcagnccctacctagnttttagggaaactattacncagtcctaaaangatgcctggaaacactgnnngatttggcaaaacttccccacctnaaaagtcttgccctanaactgggggnaaaaatttnctccntttattanggcccantttcanctaacttnangagcttttcctttntttt

SEQ ID NO: 3917 - DNA, 545 bp, Homo sapiens
  misc_feature 453, 459, 463, 468, 503, 523: n = A,T,C or G
ggtacaaaggcaaagtagaataacaaaaaatattttactaaaacataagatttacagaagtttccagacaagccatacaaaatggtcacaagctttttttgaaggggggaatctacacttgacagcaatgttattagtgagggctgtgatgtttgtttaatgttcccattttggttccaacaatcaagcttgtccatctacagcgtctaaataaagttagacttggctagagcatattctaaagacctggttagctgcttttaaccaatgcaattagatcaccaaaaaagggggaaaggagcccataaaattaaactacctcccccctcaaaaataaaataaaataaaataaaataaaaacacccacacccctgcagctaacctgacaactaccttcattcacagtgctttatacttaaaccaggatggggggaaatgaataaaagcagggangggccnctgnttttnaacgtttccaacaatccaatgatcttctaccttgntatgctttatgacggggatnagggcagaattaattttgttat

SEQ ID NO: 3918 - DNA, 552 bp, Homo sapiens
  misc_feature 415, 438, 468, 491, 505, 507, 509, 515, 518, 521, 527, 529,531, 535: n = A,T,C or G
ggtacttggattatggagaagagaattggaagaaacagacatctcagtgcttgaagaacctggaaacattctgtgaggagaccaggaggaattttgaagccaccttaggttggctacaagaacatgcttgctcaagaacttatggtctaggcactcacttgccttgggatgagcagtggctgattgaatcactttctgactccactatttacatggcattttacacagttgcacacctattgcaggggggtaacttgcatggacaggcagagtctccgctgggcattagaccgcaacagatgaccaaggaagtttgggattatgttttcttcaaggaggctccatttcctaagactcagattgcaaaggaaaaattagatcagttaaagcaggagtttgaattctggtatcctgntgatcttcgccgtctctggcaangatcttgttccaaatcatctttcatattanctttataatcatgtggctatgtnggccggaccaaagngntnaatggnctncanttgganancnaatnggcattttcttcttgaa

SEQ ID NO: 3919 - DNA, 546 bp, Homo sapiens
  misc_feature 389, 409, 424, 500, 503, 504, 536, 540: n = A,T,C or G
acatcttccagaacgtaatggtcatgatcctggtcgtggacaccaagatcttgatcctgataatgaaggtgaacttcgacatactagaaagagagaagcaccacatgttaaaaataatgcaataatttctttgggaaaagatctaaatgaagatgaccatcatcatgaatgtttgaacgtcactcagttattaaaatactatggtcatggtgccaactctcccatctcaactgatttatttacatacctttgccctgcattgttatatcaaatcgacagcagactttgtattgagcattttgacaaacttttagttgaagatataaataaggataaaaacctggttcctgaagatgaggcaaatataggggcatcaagcctggatttgnggtatcatttctatcactgncattagcctgctttncttgctaggcgtgacttggttcctatcattaaccaagggtgcttcaaattccttcttacattccttggtgcattanctnnaggaacaaatgagtggggaaccccttttttanttanttgccc

SEQ ID NO: 3920 - DNA, 373 bp, Homo sapiens
ggacctctggacccactcctgcttggggtcgccacagaactgctggcccttcttggtggtgaagatcactcctgccttgaggcatgtgctcctgctggacagctggtagctgaccactcggttctcaggaattctcttggaaacaaagaacatgcagcagggagaggggatgaccacagagcccgtagggatgatgtggtgggcacagacaccaaggaacagaaggctggttactatggtcatcaggcctgccatgtctcagagagcagaagcaccagctcggggctcaaagctgacgtgcaggaggaaaggacccggaggtaacagggtgacagccttggtgccaagtgcagagcagaaatgatccccgcgt

SEQ ID NO: 3921 - DNA, 550 bp, Homo sapiens
  misc_feature 156, 216, 320, 329, 357, 399, 404, 417, 422, 425, 455, 473,481, 484, 488, 504, 515, 521, 540: n = A,T,C or G
acttttttttttttttttttttttggggaaaccattgatttttattaatttcataactgggaaattccatgtgaaagtgaaacaagcatgagtcaagtcaaccagggaaggaatctggggacaggccaaggagcgggaggtggggcagcgaggcantcctgctggtaggagccctgaggatttcccagcttgtgtgcgctgcctctggcatcctanagacccggatttactcagctaggagagaggatggatcacagggtctaagggtggccattcagaggtagaagatggaggggcggcagattctggcagggcagcanagggctcantggccatggcttgaggggtaaaaaattnaggacatcccccagtgctgcctcaccaaggcttcttccgaanaaatnatttgaaaatttngtggnggngggacctttcttccaaggggcctttttgcnggagtttttttcaaccanaacccaancangggnttttaaaaaaccccanctttcccaaancccctnaaaaaaccttgattttccnttcaaaggaa

SEQ ID NO: 3922 - DNA, 568 bp, Homo sapiens
  misc_feature 7, 21, 25, 37, 39, 47, 89, 375, 442, 444, 479, 492, 512,563, 566: n = A,T,C or G
cttagcntggtgcgcggccgngggncgcgggtatcananccatgcgnagagtccggaagacagacaataatcgcattgctagagcctgnggggcccggatagtcagccgaccagaggaactgagagaagatgatgttggaacaggagcaggcctgttggaaatcaagaaaattggagatgaatactttactttcatcactgactgcaaagaccccaaggcctgcaccattctcctccggggggctagcaaagagattctctcggaagtagaacgcaacctccaggatgccatgcaagtgtgtcgcaatgttctcctggaccctcagctggtgccagggggtggggcctccgagatggctgtggcccatgccttgncagaaaaatccaaggccatgactggtgtggaacaatggccatacaagggctgttgcccaagccctanangtcattcctcgtaccttgcttatggcaagcatttngtctattttgcanaatgttccatgtgtaaatanaaaaatgtaaatccttgaaatgctaaataaaatgtttttaaattttattanggnat

SEQ ID NO: 3923 - DNA, 139 bp, Homo sapiens
ggtacgcgaaggatatcggtttcattaagttggactaaatgctcttccttcagaggattatccggggcatctactcaatgaaaaaccatgataattctttgtatataaaataaacatttgaaaaaacccataaaaaaaa

SEQ ID NO: 3924 - DNA, 536 bp, Homo sapiens
  misc_feature 271, 274, 398, 441, 479, 487, 497, 509, 531, 534: n = A,T,C or G
acaaagctaaagaaaaattgtggtcattgatgatggaatatatgacttgcaggctttgaagtctgcagaattcaagaaaagagctgcaaatgcatttttgtatctttattcaggactcacatgctttaccctaaagaaacctggggctaggggaaatgaaaggaagcctgaagactgactaccaaaacatgcaatatacttattcactgtctaagtctgtagtataacatgaactggagtctctatccttttctaaaatcgcattttgtanccnaaaaaaaaaaaaaaaaaaaaaaggtcagtctataatactccaacagtctcccatctgtattcaatggcgcccccaatacagtcctttgtttggatgctggggagagtaatccctaccccaagcnccatatagataagaaaaccctctccagttgagctgaaccacanacggttggctgatgttcccccaccccatgacacagttncttgaatnggaagaaggnggacaacagggngttttgaactttaagggctccnctntt

SEQ ID NO: 3925 - DNA, 549 bp, Homo sapiens
  misc_feature 140, 223, 243, 255, 354, 361, 374, 394, 401, 405, 432, 481,512, 514, 515, 522, 525, 532, 534, 536: n = A,T,C or G
ggtacagacagctggtgtcattttgacacctggggccacacacaaagaaagcagcccagctgatgctgccaagagaaactgctgaagggccagacacattccagcaaggaggggtgtggggtctttcacgtagattgcanagagtccacctggtatacattctggttggaaggggtggtaaaatacagctgctgtgctggaaccctgttgtcacatgggctgntgagtcccagcgtcctctcnaagtccagcagntgacccatgaagttgaagttaggggatatgttggattttttcattttgacaatgtcataggcatcgttcatcgacagattgagcttctgcataaggtangccacantccagtgactgancggctaatgccagccaaccnttgtacntagntaaccaaaagtatatagcttatttggngaatcttcatccttattacgttttctggacaccccacacggattcggtntggcacattccttattccttttggcccaaanannttttttnacnttgtttnantnccccaattttggg

SEQ ID NO: 3926 - DNA, 557 bp, Homo sapiens
  misc_feature 483, 505, 530, 544, 548, 556: n = A,T,C or G
acttacttggagagacatatgtctgaatttatggagtgtaatttaaatgaactagttaaacatggtctgcgtgccttaagagagacgcttcctgcagaacaggacctgactacaaagaatgtttccattggaattgttggtaaagacttggagtttacaatctatgatgatgatgatgtgtctccattcctggaaggtcttgaagaaagaccacagagaaaggcacagcctgctcaacctgctgatgaacctgcagaaaaggctgatgaaccaatggaacattaagtgataagccagtctatatatgtattatcaaatatgtaagaatacaggcaccacatactgatgacaataatctatactttgaaccaaaagttgcagaagtggtggaatgctatgttttaagaatcaagccagatgtgagtttttttcaagcacctcctggaaacctatataatgggaataccattttttctttgaaanggggctggtataatcatttttntaaaaaggatgggggttctaaaccnaaaggttttttttntaanaaaaatang

SEQ ID NO: 3927 - DNA, 553 bp, Homo sapiens
  misc_feature 364, 414, 423, 445, 446, 447, 475, 480, 493, 502, 508, 516,517, 532, 552: n = A,T,C or G
actggatgtcaggtctgcgaaacttcttagattttgacctcagtccataaaccacactatcacctcggccatcatatgtgtctactgtggggacaactggagtgaaaacttcggttgctggcaggtccgtgggaaaatcagtgaccagttcatcagattcatcagaatggtgagactcatcagactggtgagaatcatcagtgtcatctacatcatcagagtcgttcgagtcaatggagtcctggctgtccacatggtcatcatcatcttcatcatccatatcatccatgtggtcatggctttcgttggacttacttggaagggtctcttgtttaaaagtcattggtttcttcagaggacacancattctgtggggcttaggagattctgcttctgagatggggcaagggttanccatgtggnccccacatctgggtatttgttnnnaaagctgctttttcctcaaaactttcanaaaanacctgtttaactnggtttggcncacggnaatgcctnngaggcaaaacccaantacctggcaatttttatggng

SEQ ID NO: 3928 - DNA, 496 bp, Homo sapiens
ggtactgaggagaaacttcatgatgctgccagcaagctgcttaacacagttgaagaaactacaaaagatgtatctggtctccattccaaactggatcgtaagaaggcagttgaccaacacaatgcagaagctcaggatatttttggcaaaaacctgaatagtctgtttaataatatggaagaattaattaaggatggcagctcaaagcaaaaggccatgctagaagtacacataagttatttcctaggatttttccccctgtgaacaggcatgttgtattatataacatatcttgagcattcttgacagactcctggctgtcattttctcagtggcaactatttactggttgaaaatgggaagcaataatattcatctgaccaggtttctcttaaagccctttcatgatgatgatgatgggactcaattgtttttttatttccgtcactccctgataaaaaacaaaatttggagaaataaaaatattccaaaaaaa

SEQ ID NO: 3929 - DNA, 561 bp, Homo sapiens
  misc_feature 409, 482, 484, 510, 534, 541, 549, 555: n = A,T,C or G
ggtactgggaaaagatctaatctgccgtgggcctgtcgtgccagtcctgggggcgagatgggggtagaaatgcattttattctttaagttcacgtaagatacaagtttcagacagggtctgaaggactggattggccaaacatcagacctgtcttccaaggagaccaagtcctggctacatcccagcctgtggttacagtgcagacaggccatgtgagccaccgctgccagcacagagcgtccttccccctgtagactagtgccgtagggagtacattatttccaacaagcttaagacttaccatgaatgggctcattcatacaaaaacacactcacactaattcttttaaaacagtagtgcatacattatactcctcctataaagccaactttgattaaaaaccactngttttcaaagctcaagtctttgattttgaagaagaaccaagatatccccctatgatcctaccatctattttangnctttttggaccattcttgacagcttncagggcaaatggttgcagcccaanattaacnccccactnattggnttttgg

SEQ ID NO: 3930 - DNA, 548 bp, Homo sapiens
  misc_feature 49, 132, 158, 222, 375, 402, 404, 415, 433, 435, 464, 484,485, 490, 493, 504, 506, 513, 519, 524, 528, 532: n = A,T,C or G
acatctccgctgcagatcgtttcacacctgcttttcctcggttcacttntggctctgcagccaggttaatatctaaaacctggccagcaatcattctgccatcctctcctgctacagcagcccgggcatttntctcattaacatactgaacgaaggcnaagcccttatgaacagagcagcccacaattttgccatacttcgaaaagattgcctccacatcanatttcttgaccacaagagtgttgagattcccaatgaatacacgggagttcatggagcgaggatctgtcttgttggtaacgttgctggccatcgtgtttgatggtaaggtttctcacaaagcccgaaaatgtaactgaagatcaaaaaaatctnacaagaaggggaggggagaagagattngnttctgagtctnctactccccgggtctgcntnaaaaaaccctctgctggttggaggccggnaacgcggcccaaacggttannttttngcnttttaaaaaantncccgggncctttnttttntttntttnctttttaaaaaacagg

SEQ ID NO: 3931 - DNA, 551 bp, Homo sapiens
  misc_feature 183, 338, 362, 421, 425, 481, 489, 521, 523, 526, 529, 542: n = A,T,C or G
ggtacttttttttttttttttttttttggtcactaaatttattttaaaaatcataaaacgtttcttacaaaagagcattacattctgcacactgctctgaacagatgccagggacatgtggactattgttacttttcctccctgtcccaccccccaaatgttacagtgaccacaaagcaaggngttcacaataattacatggggggaattttttaaaccaccaacaataacgaaaaataaaatccactcactctgctgctgtttcaaaatttcaatgttagtttttgcacgcccttcccccccccaaccctgtttgtaaggaactaaaacattacatntggtgaacagcaaagatttcactncacctcaaatgcagaacacctatgaagccagaggaatgttggctttttaaacagaagcngatnaaaaaaaagattcaggactccttcagttcttcacttgtcttaaaaaaactttccanaatactgnttcacactttaaaaaaagaaaaaaaatttttnantanaancttcaaaaatttngttctggtt

SEQ ID NO: 3932 - DNA, 553 bp, Homo sapiens
  misc_feature 412, 493, 508, 526, 537, 539, 550: n = A,T,C or G
ggtacaccccaacccccaacctcagtggaaaacaatgcccagggattaggctatggaagggcaaaatggacccattcaaatttcctcccagggaccaggccctattaaccctgggaaatgtccttagctggtgggggaaaggttggcgatcaggaatacatatgtgtagtttttgttagaagccatccatagcacacccgagggatgaaaggcctccaagtgggaactggaacgatcaaattcttgctgattattaattgggccctaatttcagaaagcaatgctgtttttacaaattggacctgactttaaagaacaaaacacaaaaaacaaaaagagtagaaaattttatgctaaaaaagattcgcaatgaaacaatcagtagcacattgcatctgttaagtgtcccaanctccctgtaatggttatgtttccaacggttggttctttccaagataatggtgtaggtgttacacccccaatctttcatgtncacattctgcaaggntccttgcttaataacttntcattaaaccngncttggagtttntga

SEQ ID NO: 3933 - DNA, 566 bp, Homo sapiens
  misc_feature 416, 432, 451, 463, 515, 535, 536, 541, 543, 544, 549: n = A,T,C or G
ggacagactgttttccggatggactggtttgggaacactgtgctgggggaagctgcccaggaagcgctcccgctgccggctttccggaggtctctgcccagtgcactgcagggggacctggagggcccatttctaccaccctagcatgtctgacagaaagccctgctggactctggggtccagatgtcaactctacattggaggaggcaaaacacaatctagaggcactgtctgaactttcccctggcccagggagatttctccactgcacacagcacaagtgtcctatacatgtgtcctggtggagcagagggagcgggagaggaccacgggtcaggatcctgtcaccaccagcctgaacagacagtcccatctttgtgatccaggtgacaaataatcaattcccttgtccccancaattgaccttaccanatggttttgggggagcttnttcaccctaaanaatttaagtctggtttgctaattgacttatttttttattttgaaagtcttgnggaaggaaagaaccaaaaanngggtncnntttanaaggggttaaccaaccg

SEQ ID NO: 3934 - DNA, 550 bp, Homo sapiens
  misc_feature 78, 131, 152, 180, 240, 265, 270, 278, 293, 296, 320, 334,354, 374, 386, 402, 451, 464, 484, 500, 503, 513, 517, 520,521, 522, 529, 541, 542: n = A,T,C or G
ggtactttttttttttttttttttttttttaatctttcaatcttttatttaaatgccatgatccaggatggattttanatcttgttgaaagcagccacatccatggactgcacatagtcctcaaaagcagngatctgctcctccagcatatntgttccaactttatcatcttcaactacncactgtatttgaagtttcttaattccgtatcccactggaactagtttaaatgagccccanactaagccgtctgcttgaatgcttntgacncactcctntaatttcgccatatntgnctcatcatcccaaggtttcacatntagtaagatggaanacttggcaacaagggcaggntttttggctttctttgattnaaatttgggcanaacgttcttcccttanccctcttgcttcttcactttcctcctcatcatcaagacccaaagagggncaaatgggcatcntcaatttttactattctggnagcttccactttctgnagngggcttccanattnggnnnggaccantttttcccaaannttttttta

SEQ ID NO: 3935 - DNA, 555 bp, Homo sapiens
  misc_feature 447, 453, 457, 460, 476, 484, 519, 546: n = A,T,C or G
acctgtgaaccaagtgtttgggcaggatgagatgatcgacgtcatcggggtgaccaagggcaaaggctacaaaggggtcaccagtcgttggcacaccaagaagctgccccgcaagacccaccgaggcctgcgcaaggtggcctgtattggggcatgacatcctgctcgtgtagccttctctgtggcacgcgctgggcagaaaggctaccatcaccgcactgagatcaacaagaagatttataagattggccagggctaccttatcaaggacggcaagctgatcaagaacaatgcctccactgactatgacctatctgacaagaacatcaaccctctgggtggctttgtccactatggtgaagtgaccaaatgacttttgtcatgctgaaaggctgtgtggtgggaaccaaagaaacgggtgctcaccctccgcaaagtcctttcttngtgcanaacnaancggcgggcttctgganaaaaattnaccttaaattcatttgacaccaccttccaaatttnggccatgggccgtttcaaaacatggangaaaaaaaa

SEQ ID NO: 3936 - DNA, 553 bp, Homo sapiens
  misc_feature 171, 201, 251, 317, 346, 354, 370, 419, 456, 473, 484, 491,508, 516, 539, 546, 547: n = A,T,C or G
acaagctgagtatcccttatccaaaatgctagggaccagaagtgttttggatttcaggtttggaatatctgcatatacacaacgggacccgactctaattacataattcatgtttcacatccaccttatacatatagcctgaaagtaatttatacaaaaattttgtgcaanaaacaaaatctgtttaaactgaaccatcanaaagcaaaggtgtcgggtggggaattttccacttgtggggtcaagtcagngctcaaaaagattcaaattttgaagcttctggatttcaaatttttgaattaagagatgctcaactngtagtatcattcactctggcttatgtatngaccttgnactggtttttcataangggtaaaaatgaaaccagctgtggatttcaaaacacagtgtattctaanatcatctaaaatccatgccggatttttattgcacaanaattaaggttggaactntttgagctggnacctcancaaactaaaagtatatnttggtcantattttttttggaaacattttanttaatgnnccgggg

SEQ ID NO: 3937 - DNA, 556 bp, Homo sapiens
  misc_feature 168, 196, 226, 254, 269, 284, 294, 321, 398, 402, 403, 422,429, 430, 441, 470, 488, 497, 510, 520, 532, 541, 543, 545: n = A,T,C or G
ggtacagatatcttcaaaggaggaagaagaaagggaaagcagatggtggagctgaatatgccacttaccagactaaatcaaccactccagcagagcagagaggctgaatagattccacaacctggtttgccagttcatcttttgactctattaaaatcttcaatagtngttattctgtagtttcactctcatgagngcaactgtggcttacctaatattgcaatgnggtttgaatgtaggtagcatcctttgangcttctttgaaactngtatgaatttgggtntgaacagatngcctgctttcccttaaataacacttanatttattggaccagtcagcacagcatgcctggttgtattaaagcaggggatatgctgtttttataaaaattggcaanttannaaaaatatagttcacaatnaaaattnntttttcttttngaaaaaaaaggggcttgaaattttttttngtcaaaaaattaatgccnccttttaanaatatttttttcncccactttanaaagggtttttntatattcgntncntttgaaaaacc

SEQ ID NO: 3938 - DNA, 554 bp, Homo sapiens
  misc_feature 122, 133, 312, 426, 435, 449, 473, 475, 505, 512, 514, 525,542: n = A,T,C or G
ggtacatttaagaataaacttttgtaaaaaaagaaaaatcttacagtggctcatcatctctttagttgttttcactaagtcattcctaccataactgtgaatttaaagtaaaaccagctcanaatcttgccanagtctgttctttggtccttgttctaccctaaactttgtatcacctgaaattaaaccaactcattcgaaaaaaaaaaaaaaaaaaaaaagtccaagcctggaacattgaaggactcaaacattatttcagcagtatattccctgttttctggagtattcaatgggaggttcagtcaaaanaaaataatggtcttcaggttctgcccttaaatatttaaagatcacttgctccataaacctttccattaagtcccaatcttcaactataccatggcggattggccacttttgttncatatgtanggttttcttattgnttcatcccaatgaaaaaagtctangncatcaacaccttttatcacccctccttgancctggtnancccactttttngtgacctcctttattgncatcccgggagg

SEQ ID NO: 3939 - DNA, 560 bp, Homo sapiens
  misc_feature 232, 331, 403, 441, 461, 475, 503, 520, 547, 552, 559: n = A,T,C or G
acatcagcagcaaactcctgtgcatcccggtaatcacggttctccatcttccgcttgacagtgctgaggtccatggggtgcttaatgatgtcatggtagtcatgcaggccaagtgcagaagcatccactggtttatagaaaggccaagcataggcagcatgcttcttagagagtaactccttcaaaatgccattgcaatgttttaactgttctgaaagctttcctttcttanagctctggtgttgttgctgagagtcaggcaagtctttgcgtgggggcttgatggggcgaccactctctctacgcatagggggaagccgtgctgccttangctcaagactcccaagagggctagctggagaaccaagagccaagatggctgtaggtgtaaggggtgggtaantatctgcttttccctttacgccttttttctttggcaanggggcttggcctggaaggancctccagtaaccanccaaggagccgggggtcccaccaaaatncaaaggactttgaaaantgggaaaggaaaataacttgatggggnggggnaattttna

SEQ ID NO: 3940 - DNA, 550 bp, Homo sapiens
  misc_feature 445, 532, 538, 542: n = A,T,C or G
acttgtctatattgcaaaagtcttgattgaggtggtggcatttcagctagttcccgtgtttcactttgatcacgatgagacagttctctgattaagtcttgaaaccttgagtatgtggtctccacttcatcttcggcactgctggtgagcttccagtctgccctcactggcggctgatgtaatcccaggggcggctgaggaagatgctggaggtgaggatggtgatggtgtgggtatggaacgctgccctgactgagaaaggcatgatgctcgctccactgctggaaccgtgcctgctgctgccttaatgtttccagagcgacactcccatgtatacgatctaaagcctcccctataagtaatcccgaggggttctcatcaatgaaagctattcaaaatgtgaaaggaagaatggggcccgggttgtgcaagtggctctcaaaangactgtggcccttctttgcaccatgggaaggggcttcttctccggaattacaagctttttgcaagaaggaaacttgggcccattaancaactncctnttaaaaaa

SEQ ID NO: 3941 - DNA, 552 bp, Homo sapiens
  misc_feature 62, 194, 437, 440, 442, 457, 501, 511, 530, 532, 533, 549: n = A,T,C or G
actgcatgttctgttgtggtgagggaaagaaacatgctttgaaggttttcccttgtcaacanaatgtgtgtctgtagctgtgtattgcgcatgtattcatatatttttaagttttctcctaaggtttttgctgacagtgttgggaacctcacatgcttctgaagcattaaatattgaacctgtgaacctttcanaaatcctcaggttgggaaagaccccacaccttctttaaggatcatttgtctcgccatcacaggatcttggaaatgtttcctagggtgtgtaaaaattaaccaggggggaatgaagcacatttttctggcaaccaaacttgagttcctcagagaacagatgcagaaagacctgctcctgcttgcccggctacaggggccactgtggaagtcacactgaggctgtgacccggcccttaaccccanganancccgtggcatctgtncccgaaggcgcccagaccttttaaccggaaactttcccaactanggaatggganccaaccctgcaatgaaatngnntcccccaagcttattnttt

SEQ ID NO: 3942 - DNA, 577 bp, Homo sapiens
  misc_feature 125, 128, 170, 205, 219, 226, 257, 261, 263, 265, 299, 303,318, 323, 331, 346, 365, 367, 395, 406, 409, 412, 418, 420,426, 427, 432, 470, 473, 476, 481, 482, 494, 504, 513, 523,528, 529, 533, 542, 544, 545, 546, 553, 558, 571: n = A,T,C or G
tgtacgcggggcttttttctaactccgctgccgccatggctcctgtgaaaaagcttgtggtgaaggggggcaaaaaaaaaagaagcaagttctgaagttcactcttgattgcacccaccctgtanaanatggaatcatggatgctgccaattttgagcagtttttgcaanaaaggatcaaagtgaacggaaaagctgggaacctnggtggagggggggngaccatngaaaggagcaagagcaagatcaccggtgacntccnangntgtctttctccaaaaggtatttagaaatatctcnccanaaaattttgaaaaanaatantttactgngactggtttgccccntatttgctaacagctaaangngagtttcagaattactttacctttccanattaacccggnacntanaaatangnggaaanncgagnatttaaatttcttttctctgggaaaaattttgtatganatnctntgaannaaaactttgggnaacaaaaatngggggattntccttttganattcnnctgngggggatcnannnaaaaatntgatnattcttagcctanatgtgt

SEQ ID NO: 3943 - DNA, 670 bp, Homo sapiens
  misc_feature 188, 217, 266, 297, 324, 332, 349, 356, 382, 395, 397, 412,426, 430, 440, 443, 450, 454, 455, 459, 461, 495, 509, 513,518, 530, 533, 535, 547, 557, 563, 565, 570, 575, 589, 604,605, 608, 609, 617, 618, 619, 621, 631, 635, 639, 645: n = A,T,C or G
  misc_feature 648, 652, 656, 664: n = A,T,C or G
ggtacagagaagcacctattgacaaaaaggggaatttcaattacatcgagttcacacgcatcctgaaacatggagccaaagacaaagatgactgaaagaactttagctaaaatcttccagttacattgtcttactctcttttacttctcagacacttcccccaccctcatagaacctgttgcatgcancttagtttcacagctttgcctcttctttntgatgtatttattccagacctttctgccacttagcacttgtataatcanactggaaatggggatgatggtgtaaattgtnttgaaaaagatcgcgaataaaaatcancaaatgtnaaagcccagaaaaaatntattcgnatttctggttttgctggatttttacntatttttataatnanaatggtatttggaanaaaagattatgctngctnaaaaaaaaanttnaataaanaatnngtcnanaccctcccgaatggtattttttgtattgggttcnaaactcattttggngggngctanaacactggcttnggntngattaatgaatnccctggtttngcccananaatangaacnccatactttatttncctgatatgggctgnntgnnatataaannncnttatatagcnccanaggnaccctngtnctgnaatnaaattgtngggggc

SEQ ID NO: 3944 - DNA, 667 bp, Homo sapiens
  misc_feature 175, 288, 290, 300, 310, 385, 396, 400, 414, 433, 457, 481,498, 502, 511, 520, 529, 548, 552, 555, 560, 573, 575, 580,582, 589, 597, 599, 607, 619, 625, 632, 633, 638, 639, 648,649, 651, 657: n = A,T,C or G
ggtactttttttttttttttttttttttttttctggaaaagtgactgctttaatgtattaggcaaaattttacataaaatcagaaatctatgatctgtccctgctccaatttgtaaaaaacgcaagattcatcagaagccacgtgcagtcagatcccagctggccggcggtgcanatctggagtccagcctcagggatgcgctactttccattctctgcattgaacattcgttctgtcagcatccgctccagcttcactgcatcagcggcaaacttgcggatcccgtnanagagcttctncacagccatntggtccttcgttgtgcaaccaacggaaaagacttctcatccagggtggattttttccaggttactggcttgggcncgcctttggcntganagcacaagcaccanctttggcgtttgccttcanaacttttccaggagcttgggtganatggtgaggaagtcacaaccggcnagggcttttatctcccncgtntgccggaanggaggcccnatgacaatnggtttgaacttaacttttngtanaantgganattttagtgacantnttacnanggtttcnagggctanangattcttncgggttggcacntccaanaaggagnncccannaatgggaannangttaanctcctggtag

SEQ ID NO: 3945 - DNA, 384 bp, Homo sapiens
ggtacgtgcagacggtggtagttctggagtcctggaagccacgaggtgctcatccatcacaaggccatcacagccgggtagaaatgcctgaggaaagcagcggagctgaccgtgccagcatttacacagggaacacttcttgggcagccaggtgtcatggggcacagacccacagttctctttgcgcacatcgtgctcacagttccgtccgtagaaggagggagggcaggcacaaaaggaccccagcatgcaggttcccccattcaggcagcaggttctgtttagctccttactgtgctgtatccccatgggcggcacacgctgggaagaccgaggccgaattgcaggctcctcctggggccaaatgctgcatctctcccgcgt

SEQ ID NO: 3946 - DNA, 668 bp, Homo sapiens
  misc_feature 367, 408, 413, 418, 424, 435, 441, 451, 461, 465, 472, 477,494, 496, 500, 502, 503, 507, 511, 521, 530, 532, 538, 540,552, 566, 570, 578, 590, 591, 593, 597, 605, 608, 619, 621,626, 631, 633, 636, 642, 644, 647, 664, 665, 666: n = A,T,C or G
ggtacaaaacacaacaaaggttcaaacatcgagatgttcccttagcaaggctgaaaatttcagtctctggtatttggaatttaggctgcagtccttgtttttggatggatcactgggtgtgtggcacagtccatgcttttaaccagatttgaacagaagaatggccacttggcccaggtagaagtagatgaagtgtttggtttcatgtgtcacataactaccgaagttcctccccacgatgcaatgccaggtgggattgtacgcgggggaggcgctgttccagccttccttcctgggtatggaatctttgcggcatccacgagaccaccttcaactccatcatgaagtgtgacgtggacatttcgcnaagacctggacttttttttttttttttttttatcttcgganttttnattcngatttnattactgaaantatggnggctactcantcccccccanaatnaaaaatntgccncagccccccattttttncnttantnncttnttcnccaaacattnctgaacaantnctccananttcctgcccctngccttttgggaggngtcnttgggtancattgggaaacnncnggcnctttgggnaanaatggaggggntngggantcctngnggnttattntnggntttcccttgttttaggnnntt

SEQ ID NO: 3947 - DNA, 669 bp, Homo sapiens
  misc_feature 425, 429, 508, 511, 560, 568, 586, 588, 591, 596, 597, 603,609, 611, 620, 639, 642, 654, 660, 663: n = A,T,C or G
accaaatgtcacactggctgtaatcaaatcgcccaagaatagtcacattagattcactgggtttaattttatctatatcatcttccatcttgccaggtttccagcacacaatggcattttcacaagacttagaaagtatcaaatcgcctaaccatcgcacacaatcaacataattcctatgtatgtctctggtagaaaaatcaggaaaatggattttctgagaaataaatggcctgttagttttatttggattataatcataagattccttaattgcattcatcattctctttgaattgatcctccaaagtttaagagaatgatccataccacaggacattattttttcacccaaaagatcataatcagccttagaacttcatcttgtgcccttctacgcctccaaatattgccacccagagtgnccgnctggatattccataatcggaaagcatgactttacttacttaccagaagaaagatttggatcttttggatggaatttcanctnattggtagcattttcattggccacataagggcttatccctggattggtntaggattntatcctaatatgcctttnanccnctccnnccgcanagggangnttgtattgntttataaggccctgccaanggnaaaagtttttancttacntcncgtaga

SEQ ID NO: 3948 - DNA, 686 bp, Homo sapiens
  misc_feature 101, 110, 119, 125, 254, 266, 269, 271, 277, 283, 311, 335,351, 361, 399, 408, 419, 427, 428, 445, 448, 467, 469, 472,494, 496, 503, 505, 516, 519, 527, 537, 538, 547, 556, 558,564, 572, 589, 592, 595, 599, 611, 615, 619, 621, 626: n = A,T,C or G
  misc_feature 628, 629, 630, 639, 640, 645, 646, 648, 660, 662, 667, 669,672, 673, 684: n = A,T,C or G
ggtaccttcagtctacactttaatcccactgagttaacttgcagctcacagctccagaaaagtataaggagaaagctgaaatcagaggaatcgtgccctcnactgccagnttgcagctnaaagcncacccaagctataattaagattaccttctgacgattacataggacttgcacgttttacctattgaaataaaactgttttcgcaactaatcatgatgaaaatactttttgttatctgtgagtaatctaanaaatacatgggncangncaagtnttcatnctggggcaccagggtatactcccaccgnataaagacacaaacataaaaatcnttgttgtgatctgaantccaatccanacacgatgcttattctacatactcgcgtaccttgcccnggcggccgntcaataagggnaaatccannacactggtggtcgttantanaggaatccgaacctcgtancnaancttggcgtaatcattgggcatngntagattncnggggagaattngtntgctggtnattattcccnnacatccaancccggaagntnaaatgntaagcctngggggccttatgattanccnacntacntaattgcggtgngctnattncnggttncnnncgggaaatnngctgnncnctagataatgantntgctncnccnngaaagctggtnct

SEQ ID NO: 3949 - DNA, 668 bp, Homo sapiens
  misc_feature 408, 410, 415, 470, 484, 492, 523, 536, 537, 548, 552, 556,560, 576, 588, 592, 596, 606, 607, 612, 622, 658, 659, 660,661: n = A,T,C or G
ggtactccggcagggagggtgacaagcacaccctgagcaagaaggagctgaaggagctgatccagaaggagctcaccattggctcgaagctgcaggatgctgaaattgcaaggctgatggaagacttggaccggaacaaggaccaggaggtgaacttccaggagtatgtcaccttcctgggggccttggctttgatctacaatgaagccctcaagggctgaaaataaatagggaagatggagacaccctctgggggtcctctctgagtcaaatccagtggtgggtaattgtacttaggaaagaagcagggtccacattttgtgcagccacacatgatgactcattttgactaacatataaagagaagttaaagctatcaattttgtctcctaatgcaaataaggttgntnagctnttgctcaatgcagcgaaatattttaaatcatcatttggcggatcatatctttttnaaaatgaaacaggnaggggtgnccacaattatgttgccgggataatgttcctncttcaggtctttnnttcaagcatanttcnagcnttcntttgatggttcttganttggaaaattantatnaagnccgttttgcnnactanggctccagtnattatacttgcccggcggcgttaaaggggaattcannnntggggct

SEQ ID NO: 3950 - DNA, 670 bp, Homo sapiens
  misc_feature 409, 426, 474, 475, 499, 511, 514, 535, 551, 555, 558, 563,579, 580, 587, 590, 594, 604, 611, 623, 635, 640, 643, 645,661: n = A,T,C or G
acaatagagttagagccaaggtcctagaggcggataggtggattcctgagggaggaggaaggggctgaggttgctggagcctggcagcttcttccggagccattggcaggactgatgcaaacagctctgggtgggaagagggaaccaggatatcctcctgtgtccttccttttctgcagtcatcctgggtggctgccagatggaattccttggatatcattgcttggaggtcccctgcatgccagaaatggctttctggacacattgggtgggggacatggtgcagaaggtgcatttggctctcaccagaaatggtttgctggctccatgtggcaaagtcggtcaggattaacgtggggggatgagttttctcggagctgggatctttgttaaggagctggggttcttntaaagcttggggctggntgccttctaaaatgccatctctcttggaatcaatgaatcttcgatttnnctgggtttctgggacacctggaanccttgggaaagnttnggacacaacaacttccaacanaattccccgcgtcctngggncgnacacnctaaggcgaattcacnnacttgcngcngttntaatggatcnacctcgnaccaacttggcnaaatattggcanaattnttntnggtgaaattgtatccnttaaattcg

SEQ ID NO: 3951 - DNA, 679 bp, Homo sapiens
  misc_feature 384, 446, 478, 508, 552, 562, 563, 568, 575, 593, 629, 630,631, 633, 634, 638, 644, 647, 648, 654, 657, 659, 660, 663,666, 667, 674, 677: n = A,T,C or G
cgaggtacgcggggcttgcaggcaagagtgctggagggcggcagcggcgaccggagcggtaggagcagcaatttatccgtgtgcagccccaaactggaaagaagatgctaattaaagtgaagacgctgaccggaaaggagattgagattgacattgaacctacagacaaggtggagcgaatcaaggagcgtgtggaggagaaagagggaatccccccacaacagcagaggctcatctacagtggcaagcagatgaatgatgagaagacagcagctgattacaagattttaggtggttcaagtccttcacctggtgttggctctgagaggaggaggtgggtcttaggcaagtgatggaccctccattttacctctttaccctggncgctcataatgaggcatcatatatcctctcactctctgggacaccataacccctgccccttncctggatgccccagtaatgtatgtctactggnggggagactgggaaggatcccaagattcantatttcctggccaaaaggccctttgctggcttcttggggtggtnagttggcaanncctgngggcttnccttttttatgactgggnccctgggtgcaataaaattttctgacaaaattgaannntnntttnattttnatnnaaggtnctncnngcngcnntaaaagngantt

SEQ ID NO: 3952 - DNA, 692 bp, Homo sapiens
  misc_feature 427, 431, 492, 499, 506, 517, 518, 521, 584, 595, 615, 616,622, 634, 656, 677: n = A,T,C or G
ggtacgaaaagcggcagaactagctctgaaaactctgagcaaggtctgtgtgaaaatgtgtgaccctgccaaaggagcagctggccagagaaccatcgctgcccttctgccttgccttctggacaaaggaatgatgagcaccgtgacggaagttcgagccctcagcattaacacccttgtgaagatcagcaaaagtgcaggagccatgttgaaaccgcatgcaccaaaactcattccagctctgctagagtccttaagtgtattggagccccaagttctcaattatttgagcctccgggcgacagagcaagaaaaggctgcgatggataagtgctcggcttagtgctgccaaatcttctccaatgatggaaacaatcaacatgtgcctgcaataccttgatgtgtcaagtgcttggcgagctagttnctangttgtgtgaactgatcaagaagtggtgtaggtcttggaacttaagggtggctggggccagnggcattnggggcantaactactcannggncctcaggcctaacaccttaacttaaggtaaacttatgagtgcttttgttaaggggcctgacanatcggaccagngggattaaaaaattttggcnnttgctnttgggccattanttcggccttacggggatacacncttgaaaactcttcaaaactnatggggggtatggga

SEQ ID NO: 3953 - DNA, 694 bp, Homo sapiens
  misc_feature 395, 410, 445, 446, 461, 481, 502, 508, 512, 528, 537, 547,562, 564, 575, 593, 594, 600, 605, 614, 615, 624, 653, 659,666, 682, 691, 693: n = A,T,C or G
ggtacgagatggcagccctccagagccccttctatggagataagatgaatctcttctccctgtgccagaagatcgagcagtgtgactaccccccactccccggggagcactactccgagaagttacgagaactggtcagcatgtgcatctgccctgacccccaccagagacctgacatcggatacgtgcaccaggtggccaagcagatgcacatctggatgtccagcacctgagcgtggatgcaccgtgccttatcaaagccagcaccactttgccttacttgagtcgtcttctcttcgagtggccacctggtagcctagaacaagctaagaccacaggggttcaacaaggttccccaaaaaggctgcccaccttacaagcaagatgcttgaaanggcagaccacttgangggaggggcgcttggcccattgtcaactgattggnnaagaattccaaaagnccttttttattactggtggnggaccaatcttaacttggttnaataanggcnaggtgggttaaccgangccccggangcccctggantttggattggaatgngnaattttaaggnaatttcttcaatggactnncaaggnttatntaacaggannttgcagganaccggggattggggtgggagccttgaaanggtaanacttgcngggcggccttcaaagngaattcaancnt

SEQ ID NO: 3954 - DNA, 665 bp, Homo sapiens
  misc_feature 374, 427, 456, 482, 512, 516, 561, 570, 572, 583, 603, 624,637, 638, 655: n = A,T,C or G
acgcgggagctcatgtaggtcttgattggacacagtgagtttcagatgacagcctcctgtctcatggggtagccccaaagccacaggagtctggtgatttccctcttccccaccagacatctatgccatcggggtgggcaagctggatgtggactggagagaactgaatgagctagggtccaagaaggatggtgagaggcatgccttcattctgcaggacacaaaggctctgcaccaggtctttgaacatatgctggatgtctccaagctcacagacaccatctgcggggtggggaacatgtcagcaaacgcctctgaccaggagaggacaccctgcatgtcactattaagcccaaagagccaaagaaacctgncggggggccctcatctccgaccaatgggtcctgacagcaactcattgcttccngcgatggcaacgaccacttccttgtggangggcaatgtgggaaaccccaaattcnaatggggcaaaaaattcttattgagaaagncggngatctcccaaggtttgatgtctttgcaaaaaaaacaagggatctngagtttatngngatacatactntgtgaacttgcccaaaaagnaaaatgtcaccctgcaggccntttctttctgacnnggaggcaattggtttgngaacttaggg

SEQ ID NO: 3955 - DNA, 694 bp, Homo sapiens
  misc_feature 349, 366, 379, 407, 421, 434, 440, 451, 491, 494, 501, 529,531, 534, 546, 549, 552, 557, 559, 563, 564, 578, 583, 587,610, 613, 617, 618, 625, 627, 637, 649, 653, 660, 662, 666,671, 678, 681, 693: n = A,T,C or G
acagacaggcttctctgctatcctccaggcagtgtaatagtcaaggaaaagggcaacagtattggatcattccttagacactaatcagctggggaaagagttcattggcaaaagtgtcctcccaagaatggtttacaccaagcagagaggacatgtcactgaatggggaaagggaacccccgtatccacagtcactgtaagcatccagtaggcaggaagatggctttgggcaagtggctggatgaaagcagatttgagatcccagctccggaacgaggtcatcttctacaggttcttcttcactgagacaatgaattcagggtgatcattctctgaagggctgagaggngcttccttcgattttcnctaccacattaanttgggttcttttgtctcaaaaagggtantctttaaaacttangggctttggtttntatggnggtcaaaacgnaaataagttcattaaatggctttccaccttggctggatgnacnttccccnttgaccaaaaaaaaggaagcttggtaangnacntgggtccttttnggntanacctntnggannctcttcaagcttgncaggntttngggaaaggcttttaaaaacattnctngggnncaagtgncnaaatgcccancggtttcaactntganttgaaananattnccccnaatctgnggnaattttgggggnt

SEQ ID NO: 3956 - DNA, 326 bp, Homo sapiens
  misc_feature 3, 4, 11, 77, 135, 173, 245, 290, 292, 306, 313, 315, 320: n = A,T,C or G
acnngggggcngccgaggcgtgcacatgctcgcccagccacccccaggacgccttctgcaactccgacatcgtgatncgggccaaggtggtggggaagaagctggtaaaggaggggcccttcggcaccgctggtntacaccatcaagcagatgaagatgtacataaaagaatntttttgtctttaaatagatacaaatgtctatcaactttaatcaagttggaacttatattgaagacaatttgntacataattaaaaattatgacaatgttaaaaaaaaaaaaaaaaananaaaaagttctcggnccgtgancnttctnagggct

SEQ ID NO: 3957 - DNA, 678 bp, Homo sapiens
  misc_feature 58, 74, 118, 121, 136, 150, 181, 183, 224, 319, 340, 367,371, 376, 381, 410, 415, 418, 422, 449, 451, 471, 482, 493,498, 505, 523, 524, 531, 532, 537, 540, 558, 585, 588, 594,596, 620, 627, 630, 637, 647, 649, 655, 661, 663, 674: n = A,T,C or G
  misc_feature 675: n = A,T,C or G
acttttttttttttttttttttttttttttgcaaagtgctttatttacacagagcatntccagtgaattctcanaacaaccttatgaggtaggtatgatttcaactttcattttccanaanaaaaaactgttccanagaggtaaagtggnttgcctgaagtcacacagcaagaaggagcananatgggatttgaagttggctacatgatgatttcataaaactntggagtgtgccctttgtgctactcccaggagatttttatttgttcatttctggcacaaagatgattctttcggtggcactggagaagatgatggncctcccttggaccttggttgngtggggccagctgattatgggcagggngctngccangactncattgaggataacagtcattgtaaccccnaaccnaancggnactttccaccattaatacatggaggangntttcgcacacttttttgatnaatggggaggnaaggcctattnggaanatcaccnaccccccattattggcannacttgcnnttgcntcnccctggattggacactgnttttccttggcccaccctttgggggcncancccaanantgagggaaattttttgaaggccanaggagcnccntccaggncttacaagtnanccttcnggcaantnggatattcttnngga

SEQ ID NO: 3958 - DNA, 670 bp, Homo sapiens
  misc_feature 149, 163, 224, 260, 281, 287, 332, 385, 399, 401, 404, 405,446, 448, 467, 468, 496, 498, 507, 529, 537, 542, 545, 569,571, 581, 583, 597, 615, 627, 632, 642, 651, 652, 654, 659,664: n = A,T,C or G
acgcgggggctgactctcttttcagactcagcccacttgcacccaagtgaattaacagccttgttgctcacacaaagcctgtttaggtggtcttctatacggacatgcttgacacttggtgccaaaatctgggccagggggactccttngtgagaccggcccnctgtcctggccctcattccgtgaagagatccacctgcgacctcgggtcctcagaccagccnaaggaacatctcaccaatttcaaatcggatctcctnggcttagtggctgaagactgntgctgnccgatcgcctcagaaagccccttggaccatcacagatgccgagcnttgggtaaattcttaccgggggaggattcccaaccatatgaaagacaccctanctggacgattagtncntgnnaaaagtctgaacccttaaactctacagcctcaatgggacanancctaccccggcatttattnnacaccaactggcggccatttgcaggacntntccattggnttaacatttcaaaataagcctnctcataanaaggnaanttggattttcttttcctctgggancnacaagaatangncgagagccgattanaaaataacttaaaacctnaatttggcatgncctancaaggtatgntttttgganntnttttnatggntcccct

SEQ ID NO: 3959 - DNA, 669 bp, Homo sapiens
  misc_feature 5, 193, 256, 284, 286, 298, 313, 319, 324, 350, 356, 362,367, 368, 372, 373, 384, 392, 420, 430, 460, 467, 470, 477,482, 485, 495, 502, 509, 517, 518, 526, 529, 536, 547, 550,553, 559, 560, 570, 582, 583, 590, 593, 596, 602, 603: n = A,T,C or G
  misc_feature 617, 634, 635, 642, 646, 652, 654, 655, 656, 658, 666: n = A,T,C or G
actgntttacaaccacagctactcttctcaaaatagtcctttttctttcttgaggttttgttgcttccatcgaggcggagcagagaaggcagctggagtcatcccaaaggcctgagtgaaatcttcaatggacaggtgttccttcttcctgctggggtccacaccctcggggagctcctctacaggcttgttnactagctgctccagggggaagatgggcagaggcccagaactgaggttgctgttagcattgaanacgtccactttggggcttgtgacctcancngtgatctggctncagtccctagagttngcaagntccgnttcaggtcctcataggattgggggtnctccanttgaanggatnncaanncaggaaccatnctgtgaanggtggggggcttcgtgtccttgtttaancacaattgangggggtctcaaggtcacgccttttgggatnggtcttngangattctntgtgnaanggttgctgtngcctttntttcttnctcgtggnntgtttacnaantcacaanaagatctggtnctnganatttanntggacacaanaatcttttccannattttgnatnaantaaggnntttgtgcccgaaanccccaatctatgtggannttaaaancggnggtganannntnttttttcnaaa

SEQ ID NO: 3960 - DNA, 683 bp, Homo sapiens
  misc_feature 369, 381, 400, 415, 426, 436, 437, 453, 458, 460, 465, 475,476, 491, 498, 521, 543, 544, 549, 554, 564, 568, 571, 579,586, 608, 625, 629, 640, 641, 647, 654, 660, 661, 668, 669,676, 679, 681: n = A,T,C or G
acggcacttggcgtaaagccgcttccctcaagagtaactacaatcttcccatgcacaagatgattaatacagatcttagcagaatcttgaaaagcccagagatccaaagagcccttcgagcaccacgcaagaagatccatcgcagagtcctaaagaagaacccactgaaaaacttgagaatcatgttgaagctaaacccatatgcaaagaccatgcgccggaacaccattcttcgccaggccaggaatcacaagctccgggtggataaggcagctgctgcagcagcggcactacaagccaaatcagatgagaaagcgggggttgcaggcaaaaaacctgtggtaggtaaagaaaaggaaaaaagggttnttggtggtggtnaaaaacaagaaaaaacctnttggtgggaaaaaangcagcagcttncaaagaaacnnaccccttgaaaagaancctgntnagaanaaaccttctnntgaaggagaaaaaanctggtgnattaactcttaaattgattattncttaaagggcaatcattttggnngcttnttttngattaaaaanctgnttnttccggcnaaaaacncaaaaaaaaaaaaaaaaaaagntctttggccgggacccnttanggggaattcannactggnggcggtntatggnncccctgnnccaactnggnantt

SEQ ID NO: 3961 - DNA, 661 bp, Homo sapiens
  misc_feature 387, 417, 448, 449, 469, 473, 479, 481, 482, 487, 495, 501,502, 507, 514, 518, 559, 565, 570, 592, 593, 652, 657: n = A,T,C or G
acgcggggattacgagattggcttggattctgtcggatggacttggggctagctgcggcggggctggaggaggccagataaccatgtcagccacagttgtagatgcagttaatgctgcacccctatcggggtccaaagaaatgagtttggaagaaccaaagaagatgaccagagaggactggagaaagaagaaggagctagaagaacagcgaaaattgggcaatgctcctgcagaagttgatgaagaaggaaaagacatcaacccccatattcctcagtatatttcttcagtgccatggtatattgatccttcaaaaagacctactttaaaacaccagagaccacaaccagaaaaacaaaagcagttcagctcatctggagaatggnactttttttttttttttttttttttttganaaaaaaggcccaattaatagggcttttattnnatcatttaaaaatccaaggngggnttaagngnnatttngcattttntttttnnagccnggaactnttanacttattcttaacctggtgaacaagttcttttaaaaccttnattccnttccnaaattcctgaatcctggtttannggggggggtggtgaataaaccctgaattggaaaactcaaggctttcttaaggttaatanttttnggtt

SEQ ID NO: 3962 - DNA, 681 bp, Homo sapiens
  misc_feature 350, 407, 409, 415, 433, 434, 439, 440, 475, 478, 494, 507,522, 525, 527, 551, 567, 586, 602, 603, 608, 617, 644, 646,648, 665, 669, 672, 679: n = A,T,C or G
actttttttttttttttttttgccgtttccacacctgccctttattggtctcttctagcagagtggctccaggcccttcacgcctctcagacaccacccatgagggtttaggaaggtgccatcattctgtgaaggcccagagcttacccaagtcttggagcccaagttgaatcaccaaccagagggttgggagaggaaaaggaaacaggcagaggggaaaggcaaggctctgcagtgaaggggactgatatcaagggaatgctgaggtccaacaagtgtctcctgaaggcatgctgcatcctaaggctcctcaggactggatggaataagaaatctgtgtgttgaacaantcacaatctatatggcaacttttaaaggagggcccttggatgtcaagcttaatggtnantgggtngggaaaggtgccggctgnnacctnngaaagggttttccttccggccttttaaaggaattnttnaaagttccagccccanttgaaccgggcanaaggcttccaatgangancntgggaaccggcattaagggaaaanggttattttaagggtnggggactttgtctttaagnaagccaaaaaaagaanncgtcntgccattanctcaaattttggcaaggggaaaggggntngnttcccccagacggaatnttanatntaagatntc

SEQ ID NO: 3963 - DNA, 680 bp, Homo sapiens
  misc_feature 337, 380, 439, 451, 465, 466, 477, 499, 506, 530, 533, 540,546, 552, 553, 567, 573, 594, 595, 613, 634, 657, 669, 670,672, 679: n = A,T,C or G
ggtacttcccaggaactggggacctacgggatatcggggctggcaaaggcaagtattatgctgttaactacccgctccgagacgggattgatgacgagtcctatgaggccattttcaagccggtcatgtccaaagtaatggagatgttccagcctagtgcggtggtcttacagtgtggctcagactccctatctggggatcggttaggttgcttcaatctaactatcaaaggacacgccaagtgtgtggaatttgtcaagagctttaacctgcctatgctgatgctgggaggcgggggttacaccattcgtaacgttgcccgggctggacatatganacactgtggccctggataccgagatccctaatgagcttcatcnaatgactactttgaatactttggaccagaattcaaagctccacatcagtcctttcaatntgactaacccanacaccaatgagtcnnctttcttatantcttaataaaaaaacaaaggtnttaattnttaatgttacacattaccacattnacncccttanggacgncgaatnntaggctccttaaanagggtnaatttgaacaaaatgatggtnntaaaccaaaaactcacancttttttattaataaaacagnttttcccgttggattacctccanccaaaataccanntnggggctng

SEQ ID NO: 3964 - DNA, 193 bp, Homo sapiens
cgaggtacatttccccgggagaactcgtccattcggtggtggcggccgttattggtggtgaagacccgtagcaacagtgggcatgtcttctcgcggtcgatcggtttctctggctccttcttaatttcctcctgggtaacgcgcgactccaccgccatcttcctcctacggcctgcgagacgctcccccgcgt

SEQ ID NO: 3965 - DNA, 685 bp, Homo sapiens
  misc_feature 404, 476, 483, 486, 495, 504, 522, 559, 564, 596, 607, 615,616, 617, 631, 644, 657: n = A,T,C or G
acttgttgacattagaggagaaatgccaaggaatttaagagaatacatggttgaaaaaatttacccacaaatacctgatcacctgaaagaaccattcttagaagccactgacaattctcatctgaggtccatgccagcaagcttccttcctccttcatcagtgaagaaacgaggtgttcttcttttgggagacgcatataatatgaggcatccacttactggtggaggaatgactgttgcttttaaagatataaaactatggagaaaactgctaaagggtatccctgacctttatgatgatgcagctattttcgaggccaaaaaatcattttactggcaagaaaaacatctcattcctttgtcgggaatatccttgctcaggctctttatgaattattttctgnccagatgattccctggattaactaaaaaaagcctggtttttttatttcaaacttgggtggcgaatgtgttgncggggtntgntggacctgncttctggantggctcctaaccctctangttttaaatggacactttttggtggtgcaatctatgncgggnattttttgctttaagtagaaccttggattacnaaacttcgagncctttttnnnaggggggcggaatngacttctctgaanttttggtttaaanatttgcagcttggtattactggatattg

SEQ ID NO: 3966 - DNA, 583 bp, Homo sapiens
  misc_feature 370, 382, 443, 489, 495, 499, 507, 511, 523, 555: n = A,T,C or G
ggtacatgacaaggtgcggctccctaggcccctcccctcttcaaggggtctacatggcaactgtgaggaggggagattcagtgtggtgggggactgagtgtggcagggactccccagcagtgagggtctctctcttcctcttgtgctcttgctggggctggtggtccaggggtcttactccttggaggccatgtgggccatgaggtccaccaccctgttgctgtagccaaattcgttgtcataccaggaaatgagcttgacaaagtggtcgttgagggcaatgccagccccagcgtcaaaggtggaggagtgggtgtcgctgttgaagtcagaggaaaccacctggtgctcagtgtaacccaagatgccnttgagggggccnttcgacgcctgcttcaccaccttcttgatgtcatcatatttggcaaggtttttctaagaanggcaggtcaaggtccaccacttacacgttggcagtggggacaccgnaaggcnatgncaatgaancttnccgttcactcanggataaccttgcccaaaactttggcaaccccnataaaagcaaggattatttttttgaaaa

SEQ ID NO: 3967 - DNA, 593 bp, Homo sapiens
  misc_feature 380, 387, 407, 415, 424, 433, 436, 442, 467, 472, 493, 496,520, 524, 533, 545, 548, 556, 558, 559, 563: n = A,T,C or G
ggtacttttttttttttttttttttgcaagcacgtgcactttattgaatgacactgtagacaggtgtgtgggtataaactgctgtatctaggggcaggaccaagggggcaggggcaacagccccagcgtgcagggccagcattgcacagtggagtgcaaaggttgcaggctatgggcggctactagtaaccccgtttttcctgtattatctgtaacataatatggtagactgtcacagagccgaataccagtaacaggatgaatccaatggtcatgaggatgcccagaatcagggcccagatgttcaggcacttggcggtggaggcataggcctgggccccggcacgttcgccaaccattttcctgtccctaaacttcanggagtangcgaatgctatgaaacccanacaagcancagttcaanaaaaagggngtnaaacangggaccaaaacgacatggtcgggcncgganggtttccttgggattgttgantcnccgggggacctttggaaaggattngtgnttggggggnttcccccaaaanaancaccttantnntccnctttgggcaatttttgggttttggggaaag

SEQ ID NO: 3968 - DNA, 593 bp, Homo sapiens
  misc_feature 503, 510, 517, 549, 567, 587: n = A,T,C or G
ggtactgcaagtcaaggggactctttgcaggcgtgtctttagaagggagctgtttgattgaaaggaaagaaactaatagaaaattttattgtcaagatatccgagcttatgacattttatttggagatacaccgcggcctgctcaagccgaagatctttatgaaattcttgattcctttactgaaaagtatgaaaatgaaggacaacgaatcaatgcaagaaaagcagcaagggagcagaggaagtcttctgctaaagaattacctccaaagccattgtcaagaccacagcagtcatctgcaccagtccagctgaactctggctctcaaagtaacagaaatgaatataagctctatcctggactttccagctatcatgaagaaaagtggcaatttgaatcaacccatagaaagtgacagcgctgtattcattttgaaggaaacagcctgggggatttgaatttttcaagctggagaccagaatcccagtttttttcaaaaacnagattcnctttttngatttgggggggaaaggaaactttcgagggcnaacctggcatttttccanccacttccgtacccttgaantaaacg

SEQ ID NO: 3969 - DNA, 414 bp, Homo sapiens
  misc_feature 210, 212, 213, 214, 215, 216, 217, 218, 225, 226, 252, 254,275, 278, 280, 289, 295, 309, 332, 343, 352, 357, 360, 382: n = A,T,C or G
ggtacactgtaaatgctcaataaatattgatgatgggaggcagtgagtcttgatgataagggtgagaaactgaaatcccaaacactgttttgttgcttgttttattatgacctcagattaaattgggaaatattggcccttttgaataattgtcccaaatattacattcaaataaaagtgcaatggaggaaaaaaaaaaaaaaaaaaaanannnnnnnggtcttnntttttttttttttttttttttttgcncncctgctgccttccttggatgnggnanacgtttttnaggctncctttccggaatcnaaccctgattccccgtcacccgnggcaccatggnaggcacggngactnccntcgaaagttgatagggcaaacnttccaatgggtccgtcgcccgccaccccgcgt

SEQ ID NO: 3970 - DNA, 581 bp, Homo sapiens
  misc_feature 500, 508, 537, 560, 561, 562, 567, 573, 574: n = A,T,C or G
acgcgggggaaacgacaggggaaaggaggtctcactgagcaccgtcccagcatccggacaccacagcggcccttcgctccacgcagaaaaccacacttctcaaaccttcactcaacacttccttccccaaagccagaagatgcacaaggaggaacatgaggtggctgtgctgggggcaccccccagcaccatccttccaaggtccaccgtgatcaacatccacagcgagacctccgtgcccgaccatgtcgtctggtccctgttcaacaccctcttcttgaactggtgctgtctgggcttcatagcattcgcctactccgtgaagtctagggacaggaagatggttggcgacgtgaccggggcccaagcctatgcctccaccgccaagtgcctgaacatctgggccctgattctgggcattctcatgaccattggattcatccttgttactgggattcggttctgggacaggctaaccatattatggtacagataatcanggaaaacnggggttctagtaaccggccataaccttgnaacctttggattcactgggcaannnttggnccttgnncttgggt

SEQ ID NO: 3971 - DNA, 591 bp, Homo sapiens
  misc_feature 433, 444, 474, 497, 507, 526, 530, 542, 556, 569, 581: n = A,T,C or G
acactgcccaggcaaagcgtccgggcagcgtaggcgggcgactcagatcccagccagtggacttagcccctgtttgctcctccgataactggggtgaccttggttaatattcaccagcagcctcccccgttgcccctctggatccactgcttaaatacggacgaggacagggccctgtctcctcagcttcaggcaccaccactgacctgggacagtgaatcgacaatgccgtcttctgtctcgtggggcatcctcctgctggcaggcctgtgctgcctggtccctgtctccctggctgaggatccccagggagatgctgcccagaagacagatacatcccaccatgatcaggatcacccaaccttcaacaagatcacccccaacctggctgaattcgccttcagcctataccggcagctggcacaccaagtcnaacaagcaccnatatcttttttttcccaatgaagcaatcgnttcaagcctttgcaatgcttttncttggggacncaagggttgacacttaccnaagnaaatccttggangggcctgaaatttnaaccttaccgggnaattccggaggnttaaaatctt

SEQ ID NO: 3972 - DNA, 583 bp, Homo sapiens
  misc_feature 426, 428, 437, 439, 459, 461, 467, 472, 495, 497, 553, 583: n = A,T,C or G
acctgcaggcctcctacacctacctctctctgggcttctatttcgaccgcgatgatgtggctctggaaggcgtgagccacttcttccgcgaattggccgaggagaagcgcgagggctacgagcgtctcctgaagatgcaaaaccagcgtggcggccgcgctctcttccaggacatcaagaagccagctgaagatgagtggggtaaaaccccagacgccatgaaagctgccatggccctggagaaaaagctgaaccaggcccttttggatcttcatgccctgggttctgcccgcacggacccccatctctgtgacttcctggagactcacttcctagatgaggaagtgaagcttatcaagaagatgggtgaccacctgaccaaccttcacaggctgggtggccccgaagctgggctgggccaatatntntttcgaaangnttacttttaacacgactaanancctttntgaancccaccgactttttgaaagggcncnttgcaaagtaataagggcttttggcttaaaccttttccttcaacccaaaagggaantttttttaaatttcttaaaaagctttggan

SEQ ID NO: 3973 - DNA, 562 bp, Homo sapiens
  misc_feature 354, 374, 415, 427, 430, 444, 482, 493, 503, 505, 512, 532,547, 552, 560: n = A,T,C or G
gcctgtgcagtgggactgattgccgtgggtgtcggggcacagcttgtcctgagtcagaccataatccagggggctacccctggctctctgttgccagtggtcatcatcgcagtgggtgtcttcctcttcctggtggcttttgtgggctgctgcggggcctgcaaggagaactattgtcttatgatcacgtttgccatctttctgtctcttatcatgttggtggaggtggccgcagccattgctggctatgtgtttagagataaggtgatgtcagagtttaataacaacttccggcagcagatggagaattacccgaaaaacaaccacactgcttcgatcctggacaggatgcangcaaaattttaaagtgctgnggggctgctaactacacaagattgggaagaaaaatcctttncattgtcgaaanaancgagtccccgactnctgctggattaaatggtactgggggctgggggaattantttcaacgaanaaaggcgatncntaaggangggttttgtggaaaaaaatnggggcttgcttaagnaaaantgcttggngg

SEQ ID NO: 3974 - DNA, 587 bp, Homo sapiens
  misc_feature 433, 438, 448, 454, 463, 489, 519, 533, 548, 578, 586: n = A,T,C or G
acgcggggagaggacgaaaaaaataaccgtccgcgacgccgagacaaaccggacccgcaaccaccatgaacagcaaaggtcaatatccaacacagccaacctaccctgtgcagcctcctgggaatccagtataccctcagaccttgcatcttcctcaggctccaccctataccgatgctccacctgcctactcagagctctatcgtccgagctttgtgcacccaggggctgccacagtccccaccatgtcagccgcatttcctggagcctctctgtatcttcccatggcccaatctgtggctgttgggcctttaggttccacaatccccatggcttattatccaagtcgggcccatctatccacctggctccacagtgctggtggaaaggagggtatgatgcaagtgccagattttggagcttgggctactgntggcnaaaattcctncttcancttctgganggccctcccaatgctggttaacttgnaagcattgcaggggagccaacgtccttggnaacttaaacggaangggaacttttttatngggggggtaaaaaggggggttccccatttnggggaggna

SEQ ID NO: 3975 - DNA, 587 bp, Homo sapiens
  misc_feature 290, 292, 456, 461, 468, 508, 514, 530, 544, 558, 566, 585: n = A,T,C or G
accgaccatagagcaagaatcaagattctgctaactcctgcacagccccgtcctcttcctttctgctagcctggctaaatctgctcattatttcagaggggaaacctagcaaactaagagtgataagggccctactacactggcttttttaggcttagagacagaaactttagcattggcccagtagtggcttctagctctaaatgtttgccccgccatccctttccacagtatccttcttccctcctcccctgtctctggctgtctcgagcagtctagaagagtgcatntncagcctatgaaacagctgggtctttggccataagaagtaaagatttgaagacagaaggaagaaactcaggagtaagcttctagcccccttcagcttctacacccttctggcctctcttcattggctggaccccaacccagccactcaactcctggttgggtttnctttnggccatngggaagggttaccaagaaaaatctttgttagggtggatgnggggcnatacatttcctttaanaaaaccattggggnctttgggccggacnaccttaanggggaaattcaaccaactngg

SEQ ID NO: 3976 - DNA, 589 bp, Homo sapiens
  misc_feature 32, 84, 121, 175, 179, 190, 206, 208, 225, 241, 306, 326,328, 364, 383, 518, 539, 549, 560, 568, 571, 575, 579: n = A,T,C or G
ggtacttttttttttttttttttttttttttngcatcaaaaagctttatttccatttggtccaaggcttgttaggatagttaanaaagctgcctattggctggagggagaggcttaggcanaagccctattactttgcaaggggcccttcaaaagtcgctgggctcaaaaggctnttantcgtgcttganagtgagcctttcgaananatactcgcccagcccancctccgggccacccancctgtggaggttggtcaggtggtcacccatcttcttgataagcttcacttcctcatctaggaagngagtctccaggaagtcacananatgggggtccgtgcgggcagaacccagggcatgaanatccaaaagggcctggttnaactttttctccagggccatggcagctttcatggcgtctgggggtttaccccactcatctttaactggctttttgatgtcctggaaaaaaaccccggccccccccctggttttgcatttttaaggaaaaccttgnaaacccttgcgctttttcttnggccaaattncgggaaaaaangggttaanccnttcnaaancccattattg

SEQ ID NO: 3977 - DNA, 571 bp, Homo sapiens
  misc_feature 340, 447, 480, 486, 501, 511, 522, 527, 528, 534, 556, 560,566: n = A,T,C or G
cgaggtacgcgggggagatggcagatgagattgccaaggctcaggtcgctcggcctggtggcgacacgatctttgggaagatcatccgcaaggaaataccagccaaaatcatttttgaggatgaccggtgccttgctttccatgacatttcccctcaagcaccaacacattttctggtgatacccaagaaacatatatcccagatttctgtggcagaagatgatgatgaaagtcttcttggacacttaatgattgttggcaagaaatgtgctgctgatctgggcctgaataagggttatcgaatggtggtgaatgaaggttcagatggtggacagtctgnctatcacgttcatctccatgttcttggaaggtcggcaaatgcattggcctcctggttaaacacgttttggggataattttctcttctttaagccatgattaagttangccaatttccagtattggtaaagaacacacttnattttngcctggggatggganagattccaanaaataattttnaaaanngcttcnttaaataaaaaaaatttgtgcntggntttttnaaaaa

SEQ ID NO: 3978 - DNA, 584 bp, Homo sapiens
  misc_feature 89, 117, 126, 158, 194, 217, 241, 273, 299, 363, 408, 429,435, 446, 449, 466, 468, 499, 501, 518, 520, 550, 559, 577,584: n = A,T,C or G
acttttttttttttttttttttttttttagtatcgatctcttttaatttttaggccaattttgagtagtcaaagtcagagcagtcaatntgtgttgtgagccgaggcacagctgcanaagcgtgtntgaggtgtccggtggaggtggcagccgagctntgggactaatcaccgtgctggggacggcaccgcgtnaggatgcaggcagatccctgcanaagtgtctaaaattcacactcctnttctggagggaccgtcgatggtattaggatanaagcaccaggggaccccacgaacggngtcgtcgaaacagcagcccttatttgcacactgggagggcgtgacaccaggaaaaccacaattntgtctttcacggggggccactgtccttggccgcgaccacgctaanggcgaatttcagccactggcnggccgnactaatggatncancttcgggaccaaacttngnggaaatatgggcataacttgttttcttgggngnaaaatggtattccgttnanaaattcccacaaaaaaaccaaacccggaanccttaaaangttaaaaccttggggggncttaatn

SEQ ID NO: 3979 - DNA, 568 bp, Homo sapiens
  misc_feature 280, 283, 312, 314, 323, 336, 377, 415, 426, 442, 468, 470,483, 542, 567: n = A,T,C or G
ggtacgcgggccttgctcctgtgtgctgtctaaaccactggtggatgaatacttttaacaattcttaatatatattagtgcagtgctgaagttatcaaagtgggtccgaagaataaatatatcaaatagcagtaataggccaggtgtgttggtcacacctgtaatcccggcagtttgggaggctgagataggcagattgcttgaacccaggacttcaagaccagcttgggcaatagagtgagaccttatctctacaaaaaaaaaaaaaaaaaaaaaaaangtncgcgggggaggcctgcctgaccgaccttnancagggctgnggctaccatgttntctccgcgggtgtcgctgggctgtcggcctggaccttgcanccccaatggattcaaagttcgaaatatgggaactttgnaagatatcccnggaaacttaaggtccntcaaaacatccaaaaattaccaagtntntgaaaatggggcngggccaaaatttgcccactgaaaaaaacttgaacccctcgaaattttgggttggggacnttactttgttgaaaaactgttttang

SEQ ID NO: 3980 - DNA, 569 bp, Homo sapiens
  misc_feature 294, 301, 305, 331, 368, 391, 398, 400, 412, 487, 493, 503,523, 534, 548: n = A,T,C or G
actgttgtccatttcatgagagtaggcttgaggacaccatgggcaaggatctgatggttgccagcctaagcgttttagacttttgacccagagattttttgttttgggtgtggaaaaaattttagaggatagggtctcaagatataatcctttttataggcggcaggtcttaagagatgagggtccagaggaacggatgaagcctgcttggaagcatgctgggatggccatttggaaggagtgttgcaaggaagcatggccttggctgggcgctgccaggagcttaagggttgnaagttgnttgnctgatcggctcttggcctaatcttgnggcttccaggaggaaaaagaaaaatcaaactggcttnctgatgggccttgctttattctngaatggngnaccccatggaanaagggtcctcaaaatggccggcagttggggtgctataaatgacccggtaggggctggtccattgaaggttgaaantttganggggtaaaanttttgaaaaggactgatcgnccacttggggngttttatttggttnggaatccaaacttgggttttt

SEQ ID NO: 3981 - DNA, 585 bp, Homo sapiens
  misc_feature 546, 548, 549, 563, 571: n = A,T,C or G
gcgtgtcgcggccgaggtacaaagaaagttttaagtcaaggcctcaccaattcctacagtattagtattgtgtctcaattctcaaaactaacttttaaaaagcttaaacttaacctaaaggattttaaatgaaaatataaactagaatgaacaaacatgagaaatatttctttgaatcagggagctagcacctttgagttttccaaaaaagcacgtctccccagtgtgttcactgtgatgtggtgtaaaagatccacatttaacatacttaaactacttaaacttagataacatcactctgaagtatactaccaaaatgttaattgagaaaagctgaaaatagttttagtttactcattatcacatgctagaagaaaattttgcatgagaaaacactgaagaagtaattttttaatccagatttttcacaaactcatggtgcaaaatgggtcccccacttcctctattataactgctcttaattgctggtggctggctgtgaaaatggatggaagtacctcaatggtcctaccaaactaggcttancnnccatgctggtctgnccctgganccggcccgaacaac

SEQ ID NO: 3982 - DNA, 582 bp, Homo sapiens
  misc_feature 465, 494, 496, 509, 526, 536, 549, 550, 572, 574: n = A,T,C or G
ggtacgcgggggtggcagcttcggataaacgcaggactccgcccggcagcccgatttctcccggaacctctgctcagcctggtgaaccacacaggccagcgctctgacatgcagaaggtgaccctgggcctgcttgtgttcctggcaggctttcctgtcctggacgccaatgacctagaagataaaaacagtcctttctactatgactggcacagcctccaggttggcgggctcatctgcgctggggttctgtgcgccatgggcatcatcatcgtcatgagtgcaaaatacaaatgcaagtttggccagaagtccggtcaccatccaggggagactccacctctcatcaccccaggctcagcccaaagctgatgaggacagaccagctgaaattgggtggaggaccgttctctgtccccaggtcctgtctctgcacagaaacttgaactcaagatggaattcttncttcttttgctgggactcctttgcatggnangggcttattttanctttttgcaagaagggntttttggtcnaattttttttaanntaaaaagaattgggcctttgananaaaaaaaa

SEQ ID NO: 3983 - DNA, 594 bp, Homo sapiens
  misc_feature 351, 428, 439, 453, 470, 483, 492, 497, 530, 532, 534, 560,572, 585, 590, 593: n = A,T,C or G
gcgtgggtcgcggccgaggtactgtttattaaccaaccagcttagaaaaataatcatggtagacaccttagttcattcttctaataagcctgttgatctggtcctccctgttgccagcatctccaccttctacaaaatgggtggtctttttcttcattccacctcgtggagaagacaatttgaagggccacaggaagttatttgcctctttgaagcgttttccaacagtatagatctcatgaatcaaatcctccatgcagatgatgccgtatttaccaagagatcgagcaatcaaagcgttatctgtcaaagcaattcgcttcttattgattttgccataaccacgcttgnagattaagttcatttactgacttcagattggggtaccagcatccccagcgtctggcattccatgtttctgctcctgnggcctcacggngcaacaagctagcnggttacttggaccttgnctcatcttctttnttttgcgcnttaancctgcgcattcgcttttttccttcacttggttntntngggccaaaggtttccaaaaaaatggngcttaaggccanaagcccccggtancttgnccng

SEQ ID NO: 3984 - DNA, 564 bp, Homo sapiens
  misc_feature 2, 351, 387, 411, 435, 439, 447, 454, 459, 466, 471, 475,481, 494, 496, 498, 500, 502, 512, 548, 549, 558, 563: n = A,T,C or G
anttgtgacaggcagacgtgattgcagccacgaacacgatgaactcactgaagtccacctgggcatctccattggcgtccaggtccttgagcaatttatccacggcatccttgtcttttccgctctgcaggaagcctggtagctccttctccatcagcaccttgagctcccccttggtcagggtctgcgtgctgccctcgctgcccgaatatcgggaaaagacgtctatgatcatgcccatggctgtctctagttccgtcatggtgctagattcagacccaccttcctcctgggggctggcagggccgagaaaatgtcccgcgtacttttttttttttttttttttttttnggcatgcaacgaaacctttattaacattttgaacangttcaactattaactgaaacttgnaatttctaaacttaaattggggcnaatnggtatagngcaaaanaatgncttaatnggcantggnaatgcntgattgaaaaatnanancncnccttaaggcncagaacagggcagggccaatttttttggatttgaannaaaaaaaanggggnt

SEQ ID NO: 3985 - DNA, 329 bp, Homo sapiens
acttgtgacaggcagacgtgattgcagccacgaacacgatgaactcactgaagtccacctgggcatctccattggcgtccaggtccttgagcaatttatccacggcatccttgtcttttccactctgcaggaagcctggtagctccttctccatcagcaccttgagctcccccttggtcagggtctgcgtgctgccctcgctgcccgaatatcgggaaaagacgtctatgatcatgcccatggctgtctctagttccgtcatggtgctagattcagacccaccttcctcctgggggctggcagggccgagaaaatgtcccccgcgtacc

SEQ ID NO: 3986 - DNA, 451 bp, Homo sapiens
  misc_feature 418, 420: n = A,T,C or G
accgacgttgaggtggctgctgaccttgggtctcatctccttgattttctttatcttcttcattgccgtcctctctaggctgtctttggcgaggagggcccctgcggaatcgtggtctatatccccgatacatattctgcctcactggtctaccttgttctcctgcaccctggttgtcagcaccctccatcacttctccctgcacaggagggttggaatactgtggtcgacgcccatagggtctccgcatgtagtaaggtgggaaccttcgcctgcggtagggccggcgttgttgggcctggccttcgggagcactctccgatccctcgttcttttccccactctcactattctggtaattttgctggtaattgcgtggaggacccctacgacgtggatagcgtctataatggttacngnctgctgcatatttaatggcttgaacccgcgt

SEQ ID NO: 3987 - DNA, 587 bp, Homo sapiens
  misc_feature 6, 19, 41, 64, 79, 128, 147, 156, 169, 178, 179, 181, 191,196, 210, 226, 230, 235, 250, 255, 274, 278, 280, 283, 284,288, 299, 313, 319, 320, 324, 329, 334, 339, 343, 369, 372,392, 393, 400, 406, 409, 425, 434, 458, 460, 467, 478: n = A,T,C or G
  misc_feature 494, 499, 513, 522, 523, 526, 549, 552, 562, 583: n = A,T,C or G
ggacgnggggtcctctctncggtccgtgcctccaagatganaaagaaaagaaggaacaatggtngtgccaaaaagggcngcggccacgtgcagcctattcgctgcactaactgggcccgatgcgtgcncaaggacaaggccattaanaaattcgtnattcgaaacatantggaggccnnancagtcagggncattnttgaagcgagcgtnttcgatgcctatgtgnttcncaagntgcatgtgaagctanattantgcgtgagttgtgcaattnacancnaannagtnaggaatcgatntcgtggaagtctgnaagganngaanacccncaccncgatnttangacctgcgggtgcttccccacgtccntcnaccaaaacccatgtaagganntgagttntgtaangantgaagacaggcttttntcaagtatntattagaaaggttattttttgttntntcttggnggctttttaanggccaatttctattanttggntgtttgggaattanagaatcttnnttncggtaaaccaattttgttaaatnaanggcaaacttntttctttggtaaatggttttngttt

SEQ ID NO: 3988 - DNA, 360 bp, Homo sapiens
  misc_feature 86, 162, 307, 334, 357: n = A,T,C or G
ggtacttttttttttttttttttttttttttacttcttatggccaaagacccagctgtttcataggctggagatgcactcttctanactgctcgagacagccagagacaggggaggagggaagaaggatactgtggaaagggatggcggggcaaacatttanagctagaagccactactgggccaatgctaaagtttctgtctctaagcctaaaaaagccagtgtagtagggcccttatcactcttagtttgctaggtttcccctctgaaataatgagcagatttagcaaggctagcaaaaaggaanaggacggggctgtgcaggagttaacanaatcttgattcttgctctatggncgg

SEQ ID NO: 3989 - DNA, 685 bp, Homo sapiens
  misc_feature 378, 382, 387, 425, 435, 436, 484, 485, 495, 509, 549, 562,574, 579, 580, 586, 596, 617, 620, 624, 631, 647, 654, 673: n = A,T,C or G
actttaagggaactacccaactatgttgtgatagaagaaagagaaaccttcactttggcattttttttaatcactgtttatttttctgtttgcggcccaggaagcagtgggaggtggtggcagatatgctttgcatatggattgttatgtttttatttgggcaagtttaatcatggaaaactcaaaaagaaggggggaaatggtcagtttaagccaaaagaaactttctaaacaatgtataggtacacacctttgtccactgggtaaattatattcattatgcccactgctgcagcacgcataaaccaacacccctgcatggctgaacagggcctaatctaagactgatgggagaaaggcttgcaaaccaaaatcaangggnttctncctaatactgctaccaagctgatccctacaaaaatgcnttttaaaacnngccagtttacttctgtgtgcaagaaaaacccagaccttggtaaaaaannctctccttancattattctttcangggagctttaaaaaaaaccacccccaaccacccttgggtngcccctcttaatncacaaaccttanggggnntttaanggaaaagaantttggggggaaaatcccttanggngganaaagggnccaattaatggcccgngcctttnttcttttccaaacctcttnttttaaaccttt

SEQ ID NO: 3990 - DNA, 580 bp, Homo sapiens
  misc_feature 42, 44, 133, 183, 242, 254, 265, 285, 293, 331, 334, 337,349, 361, 367, 369, 379, 387, 405, 414, 422, 429, 442, 451,452, 454, 462, 463, 490, 497, 515, 565, 566, 580: n = A,T,C or G
ggtactttttttttttttttttttttcggtatcataaagagngntgaagtttatttattatagcaccattgagacattttgaaattggaattggtaaaaaaataaaacaaaaagcatttgaattgtatttggnggaacagcaaaaaaagagaagtatcatttttctttggcaaattatactgnttccaaacattttggaaataaataactggaattttgtcggcacttgcactggttgacangattagaacaanaggaacacatntggagttaaattttttttgntgggattncagataaaagttttggtttataaaaagcaaacagggcnacngtncacaccaaattnttgatcaggacnccaatntnatagggtgcnaatttttncaatagggagtctcacanccttgcctngtccaatnttcaaanactggtttggctncattcccanngngtttgggnnaaccattcttttaaaactggggaaggngaatttnggtatttctttaagcctnggatttacctttatttggacccattagctttaagggcttttttaatttcnntgggccggacctgn

SEQ ID NO: 3991 - DNA, 592 bp, Homo sapiens
  misc_feature 383, 386, 411, 424, 425, 429, 445, 451, 458, 499, 504, 507,510, 523, 531, 542, 544, 549, 551, 553, 577, 581, 587: n = A,T,C or G
ggtacatttttctcaagttaatgtataaagaaactgcattgatgtagataaattcccagaactctcagttctttagggatggactaaatagctggtatcatcacttacaaaagtgtcttgaatgctatagagctaatgttcaaaaatatagtttatattttttatcttttaaccatttttccacaaactttttgaagtctccttgaatatgtacccattaaactgctaaaaaacaaattgagtggtgagaatacaacagaagtccaatttagattctgagtgttgtcaccatgtgattacaatcacacagacacttccaagcttatagctggagctcctggaagctatttcatactctggtgcaaggggcaaaaaaaaacacnacncaagaagggaataaggtacacacanacacacacacacnncccncacaggcctctctctnaatctnttctctntcttggtcaagccatccaacaccccttcaaggatgataggnttccnagnggngggagcttaccanttttaatncaaatcaaaantnccccnantntggcttcgcccaaaagggccgttnaaanatttanccctt

SEQ ID NO: 3992 - DNA, 578 bp, Homo sapiens
  misc_feature 238, 239, 263, 317, 322, 345, 347, 351, 360, 362, 366, 374,377, 391, 421, 428, 440, 445, 458, 476, 499, 503, 506, 527,531, 543, 544, 553, 554, 564: n = A,T,C or G
ggtacaggtgccctctgtgcctattcagcaattccctactgaagactggagcgctcagcctgccacggaagactggtctgcagctcccactgctcaggccactgaatgggtaggagcaaccactgactggtcttaagctgttcttgcataggctcttaagcagcatggaaaaatggttgatggaaaataaacatcagtttctaaaagtcaaaaaaaaaaaaaaaaaaaaagtactttnnttttttttttttttttttactganacagggcttaactcctgtcactcaagctggagtgcagtggcacgatctcaactnactgnaacctccgcctttcgggctcaananattnttctgcttnancctnttaagtanctnggatgacaggcccntgacaggatgcccagtaattggatttttgnagaaatnggggcttacganattgnccaagctgggctnaaacttctgacttcaagngatccccttgccttggccttccnaaanggntgggctttcaggctttaaccncccnccccggcccaannaaaattttnntttaaggaanaaaggccttttttt

SEQ ID NO: 3993 - DNA, 694 bp, Homo sapiens
  misc_feature 214, 218, 252, 298, 306, 325, 340, 344, 346, 352, 389, 392,401, 408, 414, 419, 423, 444, 445, 457, 463, 464, 477, 481,484, 486, 488, 489, 492, 495, 503, 517, 523, 538, 543, 547,590, 591, 592, 593, 595, 601, 603, 606, 611, 612, 615: n = A,T,C or G
  misc_feature 619, 622, 626, 635, 646, 648, 649, 651, 659, 669, 683, 693: n = A,T,C or G
acgaaaacagaaccaatctaaaaatggctgatgttactttaggagcctgaaaaaaacaggagatccttgaagacccagccaccccttctagaatgttcaataagggcacctttccaaagctactaagcaggcacttggcattttaggagtttgtcttatggttgcataaaagtatccctttcacccagacctggcaccctttatggttcaaagntaanaacgggaagaatgggtggcaaggtggctcctggnagagctcacccagcacagcatgccctgagctcggggccttggtttntgtccctngggatatttatatttaatnaatttttattaaatncacngngaaatnaaaatattaaacttaaggggttgggggaaaaacgtgnggnactcagtangaagccnaaactngagangtcntcaaggccaatttgacttctnnttaccctttggnttttgnnttttctcctttgntttntcntntnnggngantttcttanttatttcttggggntttccnggtacttctgccgcnacacncctnaggggaatttcaaccccattgccggcggtatctagtggatccnnnntnggatcnanttngggannaanggcntantcgntccttgtgnaattggattcncnntntaatttcnacaaatttanccgaatcaaaaggntaaaccgggng

SEQ ID NO: 3994 - DNA, 681 bp, Homo sapiens
  misc_feature 401, 429, 436, 459, 475, 477, 495, 521, 524, 529, 533, 535,538, 553, 558, 586, 594, 641, 642, 657, 658, 680, 681: n = A,T,C or G
acatggcaattagaagttgtcatggcaaaagaaaaccacagctggcctgccacagccaacacaagaaccagaaaatggtagatgaaatgaaggaataaaggtggggtttattccttattataaaagaaaaaaaataattcttcagcagtcttaacaaagacatcaagatacaaaattacaagtgttttgactccagccctgtccccatctcctccaagagcagaggtaggagacagttgaagcaaacaagcaattctgtaaaaattacctagaaaccctacaaatttgattaaaatctaaacttctataattttgctttttaaaaaatttaatatcaaaaggcctgctttagtgacatgctattcctaccagaaaataaccccaataccccctctgtcagnaacatgctcaagttgaccaagcccactnttatctnttaacctatgtggacaagtgggnctttaaaccaaagccncngagatcaagtgactgttntaccgtgtcgctggtactaatccagngcnccttntccnanggngggccgggcaaaacncaaanggttttgagggctaatccaaaatacctnttaaaacncttccttgttttttttaaaatgaaatctttttttaatccacttttgnntaaattgggcccggnncgaagggtttctttaccaaacnn

SEQ ID NO: 3995 - DNA, 675 bp, Homo sapiens
  misc_feature 159, 274, 411, 421, 476, 477, 482, 491, 493, 499, 532, 545,573, 589, 597, 599, 604, 611, 622, 658, 667: n = A,T,C or G
acgggctcatgaaagtgttgtgaagagcgaagacttttcgctcccagcttatatggatcggcgtgaccaccccttgccggaggtggcccatgtcaagcacctgtctgccagccagaaggcactgaaggagaaggagaagacctcctggagcagcctctncatggatgagaaagtcgagttgtatcgcattaagttcaaggagagctttgctgagatgaacaggggctcgaacgagtggaagacggttgtgggcggtgccatgttcttcatcggnttcacccgcgctcgttatcatgtggcagaagcactatgtgtacactgagaaaaatgttactgcttcaaaacaaccaaaaatgggaaaataactgaggctaaaaacaaatttctctttctaaattccagcgggctcgncagcagttcntattaaaatcaatgtgctataatcaactctagttggccacagttcacccaatgcnngatcntttagactncncaatcnaaccttaaatggtccccccaaaattccttaaantggtcccaatacntgcaatcaaaaatataattaacattttngtttatttctaattangcaaaacncnccccntgattgncaacaaaatgntaattggtgaaccaatttaatactgcctccagtttnttttccacnggggtgct

SEQ ID NO: 3996 - DNA, 704 bp, Homo sapiens
  misc_feature 14, 21, 379, 413, 549, 581, 584, 588, 590, 598, 599, 615,628, 630, 653, 662, 668, 670, 688: n = A,T,C or G
gccgtgggcgccgnccgaggnccagacattttcaaagttgccagtgttactttaattggactgccttcgtaattcattgcctctgcttcaacaatgtgcaactcatcctttgcaccagcccctaaactgaccgttcttaaagataactgggctcattttcatcattatccaccttaaagtgataatctttgtcggcctttagttcacaaccgaaaagatagttctggggcctcagggggctcatgtccatgtccatcgaatcttccatcgggtggcggcacgcacttaggtaggagagaaggcggacggagataaaagaacgctgctccagagaacaacccgcgcaggacggaatcacaccagggaccccgcgtactgnaaagctcttgctatagcccatatattcagtttgntcaacaatctcactcatgacagaaaaagtcagcaaataagacttgggcaaaattattttctatcagctcacatggaaagaccacagctttaatgaattatacaatccttaaaataatccttggcaggatagaattncgaatcaaattagcatgaactggttacaatanctntctncncttagaannctaacattttctttcnagatgtttctaanangggaaaaataggggaagtttatnttgctttangggttntnaaagcttttactacacanggtttttggaaataaa

SEQ ID NO: 3997 - DNA, 659 bp, Homo sapiens
  misc_feature 21, 124, 151, 260, 307, 368, 371, 391, 404, 408, 411, 424,431, 463, 472, 501, 517, 525, 598, 605, 622, 627, 640, 641,643: n = A,T,C or G
ttttttttttttttttttttntactttttctttagtttattgaaagaaatgtttacaacatgacaccaacagaagggatcaaagtgtgtcgtgaaattgcgagtcttcattcctttttcttggntctttgtattcaaagatgctatttagngggttctggcttcatcttctctcttgttcgttttccaggtctcttatttgaccctttcttgccaggcctcttgaggcctctgccatgagctgcttggcccggaagctanatacatcatcatagctctcccgagtgttccactttgagcctttcttntttccaccaaaaccaaactttgggtttttataccgcgttaacactgggccccttcctcatntgntggccttggctcctgccttnttgcctgggccanaagnttntgacttcctcaangaaaacnagttattaaaaaaaccttttgaaattcttaanaacatcatnaaagggctttctccgctgcctttttgaanaacctcgttgcccttntttccganttctaaagctcccaagtgctaactttttaaacctttcatgggacctgttaaattgcactttggcaaatttttntttgganaaaaaattggcctttcncaaanaaaaggggccttnnanggatttactatgaggg

SEQ ID NO: 3998 - DNA, 697 bp, Homo sapiens
  misc_feature 6, 108, 179, 186, 203, 330, 374, 387, 412, 421, 449, 487,512, 515, 517, 537, 539, 557, 560, 561, 562, 564, 597, 600,605, 614, 631, 632, 637, 656, 696: n = A,T,C or G
actttnttttttttttttttttttttttttggagaggcagaccagctttatttttgaacccaatcaccgggtgcccaactatgactctgctatcttcgaaatgatganatggggcacactcccctaacagtatttagctagaccaacaaggatcctggctcctcccagggctgtagcanagggacnaggcccttcgaagcttntagtgggcacagggtatttgaaatccatcctttttaaagcccagtttcacttggcctacttgatttattgctggtagcaagatcattagaattttagttaattaatatgtgccaactctgcaccggngaggactctggagtctcttgttactgcaagcataaaaagtgcancccacaaggcttnctggccatggaaaggaccaaatgcncctgcaggnggaaacaaacatgacctcgggccactgngcaaccccttccatgtccccctggaaccgacacgcctnacattaaaaagggccccccacttgnagntnggcaagacagctttttgacncnaaacttttgaaagaaccnccnnngngccctttaagggccaaaaggacctgcttcgggnaantaaanaaccttttnggcaagaaccgggggannccgcnttaaaaaaaaaagaatgtnggggaccaaggggaaattttctttgagcgctgggggggtng

SEQ ID NO: 3999 - DNA, 694 bp, Homo sapiens
  misc_feature 12, 174, 250, 288, 299, 306, 367, 392, 401, 413, 425, 426,428, 445, 449, 452, 469, 473, 484, 489, 491, 496, 516, 524,526, 528, 530, 540, 542, 554, 574, 584, 589, 590, 615, 618,620, 628, 629, 637, 639, 652, 653, 661, 669, 671, 673: n = A,T,C or G
  misc_feature 678, 685, 689: n = A,T,C or G
cgaggtactttntttttttttttttttttttttggctaactgctgccaccaccatgaaagagtggccaccacatctttattgcatactcaggtgaataacttattatacaatgaacactcctccattaggagaccatgcccacttacagaatgcagccgtaaatgcggtaaatntatttacagaggttggggtgcaagatgagagaagtatcagccccaggaatttgaagtgagaatgatctacaaattntcctgacaaggagcaaccgggcttgtgctagtgaggtntgaaagaattnctggcanagcgtagggggagattagatctcggaattgacagcaagtttggggacagggcaaaaaaaanaggggtgacctgggaattggtgctngggagctgntgagcccaatgngaggcagcactnnanagatgaggtaaatttangggnatntttaaccttttctaacncagncaaaaaggttngggancnggggntcccaccaagttggcttcantgtaattnangncnatgggcttananaagcttttggcntttttctcaaaattcaaggnttttttggcncaaanntttaaaaccctgggagttaaagacnggncnttaaactnngagccccngngccaaaaacccannttttcctnggaaaaancnanattanggctttntggncttgg

SEQ ID NO: 4000 - DNA, 262 bp, Homo sapiens
  misc_feature 257: n = A,T,C or G
acgcggggaattcatggacgacacgagccgatccatcatccgcaatgtaaaaggccccgtgcgcgagggcgacgtgctcacccttttggagtcagagcgagaagcccggaggttgcgctgagcttggctgctcgctgggtcttggatgtcgggttcgaccacttggccgatgggaatggtctgtcacagtctgctccttttttttgtccgccacacgtaactgagatgctcctttaaataaagcgtttgtgtttcangttta

SEQ ID NO: 4001 - DNA, 690 bp, Homo sapiens
  misc_feature 398, 431, 441, 488, 489, 495, 504, 512, 527, 537, 546, 560,569, 599, 608, 623, 626, 635, 641, 656, 657, 659, 673: n = A,T,C or G
cgaggtacacacctttgtccactgggtaaattatattcattatgcccactgctgcagcacgcataaaccaacacccctgcatggctgaacagggcctaatctaggactgatgggagaagggcttgcaaaccaagatcaaggtgtttctccgctaatactgtctaccaagctgatccctacaaaaatgcatataaaagcaggcaagtttagctactgtgttgcaagagaaaccaggaccttgttaaatagttctctccattaccatttattctctcaagggaagcttaaaaaaaaacaacaacaaaacaacacattggtctggccacctcatgaatccaacaagcattagtgtggcatttcagtggagaaggaaacttggggggaaaaatcccatcaanggtgtaagaaaggttccaatttaactggcctgncctatttatncatcatccagaccatcattatttagaccctctgatcaataaaagggnnccagcnttcagagcnggccaggngaacccaaagacatnaagaaaccgnttgcttganaaaagcagcgattnttcttttanaattttcttgggtaaaaaatgccaaaaatntggttgggnttaaaacttgttttnggnggtaaaatnctgaanacttaaaagccatanngnttaatttttttcanggttataaaggggtttt

SEQ ID NO: 4002 - DNA, 681 bp, Homo sapiens
  misc_feature 349, 362, 396, 454, 476, 482, 487, 507, 535, 546, 565, 575,584, 598, 620, 633, 640, 670, 678: n = A,T,C or G
ggtacgcgggggctgactctcttttcagactcagcccacttgcacccaagtgaattaacagccttgttgctcacacaaagcctgtttaggtggtcttctatacggacatgcttgacacttggtgccaaaatctgggccagggggactccttcgtgagaccggccccctgtcctggccctcattccgtgaagagatccacctgcgacctcgggtcctcagaccagcccaaggaacatctcaccaatttcaaatcggatctcctcggcttagtggctgaagactgatgctgcccgatcgcctcagaagccccttggaccatacagatgccgagcttcgggtaactcttacngtggaggattccnaaccatatgaagacaccctactggacgatcaagncttggcaaaagtcttgaccccttaaactctacagcttaatggacaaaacctacccggnatttattagacaccactggcgncattgnaggancctttcattgggttaccatncaaaataaagcctgccttaaacagccanttggattttcntttcttctggaagcccaanaatagggcgnagccgatanaaaacaacttcaanccttaaaattctggaaggccanccaggcatgtttnttgaaanttttttcaaaggcttccaattgttcaaaangtttttcnttt

SEQ ID NO: 4003 - DNA, 689 bp, Homo sapiens
  misc_feature 333, 419, 469, 509, 530, 537, 542, 569, 572, 581, 586, 597,604, 647, 676: n = A,T,C or G
ggtacgcgggggaaacgacaggggaaaggaggtctcactgagcaccgtcccagcatccggacaccacagcggcccttcgctccacgcagaaaaccacacttctcaaaccttcactcaacacttccttccccaaaaccagaagatgcacaaggaggaacatgaggtggctgtgctgggggcaccccccagcaccatccttccaaggtccaccgtgatcaacatccacagcgagacctccgtgcccgaccatgtcgtctggtccctgttcaacaccctcttcttgaactggtgctgtctgggcttcatagcattcgcctactccgtgaagtctanggacaggaaagatgggtggcgacgtgacccgggcccaagcctatccttcacccggcaagtgcctgaacatctgggccctgattctnggcatcctcatgaccattggattcatcctggtactgggattcggctctgngaaagctacatattatgttacaaaataatacaaggaaaangggttctagtaaccgccatancttgaancttgnactcaattggcaatgctggccttgacnctngggctgtgncctgncccctgggctnccctaanacaacaagttatacccccccctggctacagggattcaataaangcccggcttccaaaaaaaaaaaaaaaaanacctgcccggggc

SEQ ID NO: 4004 - DNA, 691 bp, Homo sapiens
  misc_feature 392, 443, 474, 491, 495, 516, 523, 537, 538, 542, 543, 565,598, 618, 630, 657, 662, 667, 678: n = A,T,C or G
acgcggggaagaacccccctatcaacaccaagagtcaggcagtgaaggaccgggcaggcagcattgtcttgaaggtgctcatctcttttaaagctaatgatatagaaaaggcagttcaatctctggacaagaatggtgtggatctcctaatgaagtatatttataaaggatttgagagcccgtctgacaatagcagtgctatgttactgcaatggcatgaaaaggcacttgctgctggaggagtagggtccattgttcgtgtcttgactgcaagaaaaactgtgtagtctggcaggaagtggattatctgcctcgggagtgggaattgctggtccaaaattcattcaagaagaaaatagataccacctgacaacatggcaaaatcccatctnttccaaacatcaaaaaaaaaaaattggtccggcatggggcttcccaccacncccgctaatttttgatttttagtagaaacanggtttcacctattaacnaggnggggcttggactccgacttgngatccanccgcctcggcttcnnaagnnttggaataccaggcgtaacccncttgcttggcccaaaatttaaaaatttttaaantggtttaattggtccctcanaaatttgaaacncttccctttttttttttcccttttggnccttncccancccccattggngggggaaggtgcc

SEQ ID NO: 4005 - DNA, 662 bp, Homo sapiens
  misc_feature 316, 326, 330, 350, 461, 473, 486, 517, 533, 537, 593, 611,612, 615, 629, 642, 649, 650: n = A,T,C or G
actgctatgaagcatcccttccacatcagatcaaagacatcttaaagccagaaataatggaggagattgtgatggaaacacgccagaggcttttggaacaggagggataaggaggtgctccagaagcacgggactgtggaccttgcaggagtgaagactgtgatgtgtggtccccatatgtggctcagcaaagactcgagagatcatccctttgtctgcattgacggccctgtgacggccttcagcccacaggcctgctttctcctgtctaacaccaaacctgggtggcagatgaacaagtgctttcttgggttgnaacttaattnccgnattaaggaatagtttaactntttcaaagtgcacagggtacaagccaatggcttccatcctggaataatatggaaaatccttggcttccctcctggcattacaaggacaggccccatgaaattgccccatanaaaaatggcatncctacctccaaangggtggttgggctccatccttatccttaaanactgaaaagcactggnaaantggaaaataaagtaccaccaaggggaaccccttttttttaaaaacaaaaataaccngggggggggggcccttgnnccnctttttgggggtgnggggggaatattnacctggnnggggggtggggg

SEQ ID NO: 4006 - DNA, 307 bp, Homo sapiens
  misc_feature 304: n = A,T,C or G
actttttttttttttttttttttgctgtaggcccgggtggttgctgccgaaatgggcaagttcatgaaacctgggaaggtggtgcttgtcctggctggacgctactccggacgcaaagctgtcatcgtgaagaacattgatgatggcacctcagatcgcccctacagccatgctctggtggctggaattgaccgctacccccgcaaagtgacagctgccatgggcaagaagaagatcgccaagagatcaaagataaaatcttttgtgaaagtgtataactacaatcacctaatgcccacaaggnacc

SEQ ID NO: 4007 - DNA, 676 bp, Homo sapiens
  misc_feature 330, 377, 451, 458, 497, 565, 576, 598, 635, 667, 672: n = A,T,C or G
acgcgggggaaacgacaggggaaaggaggtctcactgagcaccgtcccagcatccggacaccacagcggcccttcgctccacgcagaaaaccacacttctcaaaccttcactcaacacttccttccccaaagccagaagatgcacaaggaggaacatgaggtggctgtgctgggggcaccccccagcaccatccttccaaggtccaccgtgatcaacatccacagcgagacctccgtgcccgaccatgtcgtctggtccctgttcaacaccctcttcttgaactggtgctgtctgggcttcatagcattcgcctactccgtgaagtctanggacaggaagatggttggcgacgtgaccgggcccaagcctatgcctncaccgccaagtgcctgaacatctgggccctgattctgggcatcctcatgaccattggattcatcctgtactggnattccgntttgggacaggctaccatattatgttacagataatacangaaaaacggggtactagaacccgccatagctggaacctttgcactcactgggcatgctggccctgacnttgggctgtgncctgccccttggcctgcctaancagaagttatacccccccctggctaaagggcattaanaaaggccggcttggaaaaaaaaaaaaaaaaanacttngccg

SEQ ID NO: 4008 - DNA, 747 bp, Homo sapiens
  misc_feature 6, 164, 313, 478, 510, 545, 553, 559, 580, 622, 625, 646,651, 655, 662, 668, 679, 681, 682, 704, 706, 713, 717, 732,743, 744, 745, 747: n = A,T,C or G
actttnttttttttttttttttttcttttaactgaaagagttgacaattttattttcacatttcccaatacaaaggaaaactgcatcttttttgtcccacttctcccctccaaaactattctctttcataggacaggggagcaagtcttccttatgctgtttanaaaactcagtatcacagcagcatgatctcctggtgaagcagaacaggtaatataaaaccgatacaataaggcctcccctctatccttatctgtctggtcgagtcattccgggccgagtgggcaccatcatgggacgggcaggaggtctnatcattgggggcccaggcatcattggcatatggcctcccatgggcggcctcattccaggagcaggtcccactgacatcatcccaggaggaggagggcccatcattggcatcatgggagggccccccatatggggtgctggcatcataccaaggcgaggaggaccncgaaagctggggggaggtggtattatcgcccnttcaggaggaggagcaaaaaatgggagtaggaggnatttttcnttgttnaatgccacccgttgttttgtnaatcaaggctctgaacctgcttttcattcatttttgataaanagnctttacattttctttgggttncttcnctgnaaggggntttttnaccaaatggananntatgggggaggatgttttcaanancacaatnaaanttgggcttctgtttnaaggcgttggnnntn

SEQ ID NO: 4009 - DNA, 666 bp, Homo sapiens
  misc_feature 358, 387, 406, 440, 455, 481, 490, 492, 525, 547, 555, 560,580, 595, 616, 635, 642, 643, 645, 656, 658, 663, 666: n = A,T,C or G
accatcctttaatagatctcatacaccagaattcagatcatgaatgactgacagaatattttgttgggcagtcctgatttaaaactaagactggcttgtggttaaatgaatatgttcagttcttgaattttaatagtaactccaattcagtaaatggtatcactgtttaccccttttaaagatatgattagacttcgttagtaatgttcaacttttcacaaagatggtgagtgccatcttaaaacttactggagattggttttatatttagatttatataactggttatgtgaatatatttaaatactggggaaattgcttcactgcttagaaccaagcaagattcacccgtgtttgngttcatgtcatttgcctcttaaaggcaanggttgaagataaataaagnagcaatgctatagttttggccttactatgccaantaattatattcctgntttaaaagggtctttacttattgaangcatttaangngggtatgtgtatattaaaaatattcaacccttnccatcttacaaactataaggcncttctttnaaatngtagccaggtaaacctcctnttgaatctttacaantaaggcaactaagtttaattnggatggtttaccgcttccnaacaaanngnaacggttttgntnggaanggn

SEQ ID NO: 4010 - DNA, 705 bp, Homo sapiens
  misc_feature 337, 447, 461, 471, 495, 513, 524, 534, 543, 550, 558, 574,584, 599, 605, 607, 613, 630, 636, 649, 654, 664, 672, 675,680, 696, 700, 704: n = A,T,C or G
acactgcccaggcaaagcgtccgggcagcgtaggcgggcgactcagatcccagccagtggacttagcccctgtttgctcctccgataactggggtgaccttggttaatattcaccagcagcctcccccgttgcccctctggatccactgcttaaatacggacgaggacagggccctgtctcctcagcttcaggcaccaccactgacctgggacagtgaatcgacaatgccgtcttctgtctcgtggggcatcctcctgctggcaggcctgtgctgcctggccctgtctcctggctgaggatcccaaggagatgctgcccaaaaagacagatacatcncaccatgatcaggatcacccaaccttcaacaaagaatcaccccaacttgctgaattcgctttaagcctattaccggcagctgggacaaccaagtccaacagcaccaattnttttttttcccaangaacaattgnttcaagcttttggaaatggctttncttgggggaacaaaggtnacacttacgangaaaatcctngaagggctngatttcnaaccttanggaaaattccggaggnttaaaatcantaagggttcaagaanttcttntnaccttnaacaagcaaaaaggcangttcanttacaccgggaanggctnttcttaagangggctganctnagggnaaattttggggaagtnaaanttgnt

SEQ ID NO: 4011 - DNA, 693 bp, Homo sapiens
  misc_feature 406, 447, 452, 455, 458, 463, 471, 510, 530, 531, 536, 541,543, 549, 552, 555, 567, 569, 571, 580, 591, 595, 599, 610,617, 622, 638, 646, 665, 672, 690, 691: n = A,T,C or G
ggtacgcggggctccagaagtttcccccttgggcggtggtggaggtggtaaccgtgatagtagcagctccggcggcagcaacatcgactacgagggatggcggcggctgcagcaggaactgcaacatcccagaggtttttccagagcttctcggatgccctaatcgacgaggacccccaggcggcgttagaggagctgactaaggctttggaacagaaaccagatgatgcacagtattattgtcaaagagcttattgcacattcttcttgggaattactgtgttgctgttgctgatgcaaagaagtctctagaactcaatccaaataattccactgctatgctgagaaaaggaatattgtgaatcccatgaaaaaaactatgctgctggcctagaaacctttacanaaagacaaaaaattgataagacggggtttatcgggtggccnagctngcnttnaactnttgactcnagggaaccacttgctttgactccaaagtgcttgggatanaagtgccaaatgcttatttnnatggntgggntnaaaagnggnaanaaacttaaaatngntntaaattgangggggggactncttngtcnaaattaagttnactgggnttaantaaatttagtggcatntccttttntcaaaaattccaaaaattntgaatgnggaatttaaaaaaaattnntt

SEQ ID NO: 4012 - DNA, 689 bp, Homo sapiens
  misc_feature 42, 74, 77, 136, 317, 320, 341, 361, 397, 416, 424, 446,486, 488, 493, 518, 527, 534, 541, 550, 554, 558, 561, 565,566, 568, 569, 573, 577, 578, 599, 608, 630, 632, 641, 645,654, 655, 657, 673, 677, 678, 681, 688: n = A,T,C or G
cgaggtacttttttttttttttttttttttttttttttaagntaggaagaagaatgaggaggaggaagagtganaanattggtgggaacaggaggagggaagaagaggggaagaggaaagagaaaaaaatattttntgtaagggccaaataggtgtcagccgaactagacctaatctgcctggaactaaatccagatctaggctctacttttatttattccattcttgcaatgattgaatgaccttctcttttgtaaaaaattgagctatagtttacataccatcaaattccccctttttgatgtatacaactcagnggnttttaagtatattcacaaagntgggctagcatcaccactgncttattttggaccttttcatgcccccaccatgaaanaccatgtccctggcaaccnttcccatnacctttccttgggaggtctccnttttactttggtaaaactgatgaaattgcctttcttgganantcttnggtctttcaaaaaaccagttggccnaaaaacatnaaccggntttactngggcaaacnttanaagngtngggnntnnacanttannctgttgctggaaccccagganggaatctanttctggattccaggaatcctcntnccggggttnttgntttgaaaannantaacctaaggcttgtngaanntanaagggant

SEQ ID NO: 4013 - DNA, 690 bp, Homo sapiens
  misc_feature 444, 482, 492, 523, 528, 560, 593, 620, 623, 635, 642, 662,665, 667, 683, 689: n = A,T,C or G
ggtacaaaagcttttctgatgcttttcattatcacagaacacaccacctgtaatgtgtgcaaaaaggaaatgaggggtggaaggagaggaagtctaattgggaaaggctggatggtcacttcatttcttctctttcttcttatccttttcattcatggccaggatcatcatgagttttctgaagacagtaatgaaatctaagaagagatcaatgcagtgccagatataatcttgatctccatgttcggccttttcaataatgagttgagtatcaaaaaggacgaagcccacatgaccaccagtcccacatacaggtttgcctggaaaagccaaatggatccaaagaaaacattccccagggaagacaaaagcaacaagctcagggctgacatcaagataccttccagaaagaggtactacggccctggcataaagtgcacttanggtggagcaggtaaagatcattgccgtgcccatgaaancaatgggaangatgctggggttgacacaatacaaacttcanggcanggcccagcccacttctgtaaggatgcaaatcnaccagaagcccagcttttttggtcaattcttgntttgaggggtgccctcacccaatcttnatntagggagcccangcaacanaggccccctgatgaaagagngcntntggcctaggccctccncccccna

SEQ ID NO: 4014 - DNA, 610 bp, Homo sapiens
  misc_feature 514, 570, 589, 590, 595, 606: n = A,T,C or G
acgtaaagttaaccttccaattgtctgagctgtcgtcactgacttcatgacagtctggccctccagacaagagcagcgctggcatcgggcaggtgattcctgacacctgctgcctgcaggcattcactgaccaggcctttcctggaggaaacacccagggccgggcggctgctgtttccacacgtggactcggatctgctgtgacaccgtcagcccgacagtctctccatatgcagcctttcctctgtacgtgcacctcctgtttcaaaaacgcaagcagaaaataggtctggacaagggcaagctgcaactcaatttctgctgcaaccctagctcaggtaagttatgtttattccttcactttgctgatatagtcagtgagtctgttgatgccttcttcctgctgttctagggcatccaggacaatgcccatcggtgtcctcttcaaacctattccttccattttattctcaatttgttcttgaggttccgaagtcttaacgatgcatggatnaacatcaacagcaaaggaaaaagtaatggccaacacaaagaacattgacttcttcnaacatggagaaaagggaannctccnccacctgaccnccta

SEQ ID NO: 4015 - DNA, 598 bp, Homo sapiens
  misc_feature 209, 219, 251, 252, 303, 315, 318, 324, 327, 337, 350, 354,364, 375, 381, 383, 411, 426, 433, 447, 451, 452, 455, 457,464, 465, 484, 486, 490, 498, 503, 507, 509, 510, 513, 519,520, 521, 523, 524, 532, 533, 541, 546, 548, 557, 559: n = A,T,C or G
  misc_feature 566, 569, 574, 576, 578, 582, 585, 586, 588, 589, 595: n = A,T,C or G
acgcggggaaacgacaggggaaaggaggtctcactgagcaccgtcccagcatccggacaccacagcggcccttcgctccacgcagaaaaccacacttctcaaaccttcactcaacacttccttccccaaagccagaagatgcacaaggaggaacatggggtggctgtgctgggggcaccccccagcaccatccttccaaggtccaccgngatcaacatncacagcgagacctccgtgcccgaccatgtcgnntggtccctgttcaacaccctcttcttgaactggtgctgtctgggcttatancattcgctactncgngaagtntanggacaggaanatggttggcgacntgancggggcccangcctatgcctncaccgncnagtgccttgaacattttgggcctgattntgggcattctatgancatggantcatctgtactggnattnnggntntggacanntaccatattatgtacaaanantcangaaaaaangggtncttntnncgnccatannntnnaactttgnnttcacttngcaangntggccttgncnctggggntgntgccntncncctnggnntnncccttnatc

SEQ ID NO: 4016 - DNA, 422 bp, Homo sapiens
  misc_feature 377, 411: n = A,T,C or G
ggtaccattccgacgttacaatggtggagttggcaggtgtgcgcaggccaagcaatggggctggacacaaggtcggtggcccaaaaagagtgctgaatttttgctgcacatgcttaaaaacgcagagagtaatgctgaacttaagggtttagatgtagattctctggtcattgagcatatccaagtgaacaaagcacctaagatgcgccgccggacctacagagctcatggtcggattaacccatacatgagctctccctgccacattgagatgatccttacggaaaaggaacagattgttcctaaaccagaagaggaggttgcccagaagaaaaagatatcccaaaaaaaactgaagaaacaaaaacttatggccnggagtaaattcagcattaaaataaatgtaatttnttgggaaaaaa

SEQ ID NO: 4017 - DNA, 666 bp, Homo sapiens
  misc_feature 273, 285, 359, 402, 425, 434, 440, 473, 475, 476, 485, 495,517, 551, 555, 597, 601, 613, 623, 625, 635, 637, 664: n = A,T,C or G
acgcagcccctcacacactgcttcattttgtgatttctgcatttccagctgccgtagcaacttttgtagtgttgcaatattctccaaagacaaacaaaaggcatcttcgtcttcacacaccacatctctttcaaagcttgtgtctggggtgtggtctaattcttccatacacagtatgatctgtctctttatactgacaaactcctcacgcctagaagcctttgtttccctcaaagttgcacatgttgcctgaactgggtcaactcttctaanctgggcactgangcactgcaatatcataatggggcatgcaaaaaatttcgcacaggtcttgatcttgctcttgaagaacttcaagncctggttctctccttttctggttcgcatcaattccacttgggngccaaatcttttttaattgcaanaaggcgctntccttnttctgaaatggttaacatgtaactcgctgccanannggtcaactntttttgacanaaggaaatgcttttgatgaagntttctttaggtttctttttaacaatattaaatcnagangtccttggattctttttaccacttaatctttggaaccgtggncttnggaaaccaatanctccattttncnaagggattangnttttggaaaatatatggatctcccccncc

SEQ ID NO: 4018 - DNA, 617 bp, Homo sapiens
  misc_feature 154, 191, 237, 258, 324, 330, 363, 485, 489, 520, 525, 540,564, 565, 569, 573, 591: n = A,T,C or G
ggtacttttttttttttttttttttttttttttactggctaacagaattttattgttaaatcacagaaactttagtgcaaaacaaaaatcacgaagtccatttaatagcaacttcatgtcctgctggctttgcttgctgtctcctggcaaccanaagtggacagaagcgtgggtgcccaagtgggccacanacagcttccaacccccacaccccagcatccaatccacacccagcanacccttcggcatgccgccctntaccaggaagccagaggcctaggagctcgccatccatatttatttgaaaaggtcaaaaggagcatntatganacaagggaggggtgcaggctgaagcagcgcctnaacagccagggacatgtaggcaacacgagcaggcacagcgcggccaccactgtccacacgctcacacaagccaggcccgcagggccttcggagagctagcaggttacattcaggcagatggncctnttccacccaaacccacagaaccccaaacaangggtnaccaggaaagacacnggaaacccaattacaatttgaacnngggnaganaaaccttgggccccttgntgttccaagcaccaaaagttgtttca

SEQ ID NO: 4019 - DNA, 541 bp, Homo sapiens
  misc_feature 171, 173, 284, 333, 407, 424, 427, 430, 457, 460, 465, 466,468, 469, 472, 479, 485, 489, 495, 502, 511, 516, 540: n = A,T,C or G
acaatatcatatatctggtatacaaaaaaaatcgctcattattttagccctaccctccatttgtctctcttctttctgggactcctattgattgcatgaccttctgaaggtcttgtgtgtgtcttacctttttttcataacttctcttaattttttttttttttttttttnanagtctttctctgtcacccaggctggagtgcaatggcgtgatctcagctcactgcaacctctgcctcctgggttcaggtgattctcgtgtctcagcctcctgagtggctganactacaggtgtgcaccagtgttcccagctgatttttgtattttatgtanagatggggttatgccattttggccgggctaatctcgaactcctgagctcaggggatacacacacctcagcaaancttttaaaattatacantcnggngatatttccttgacttttcttaaccanccncttgnntnngantattttncattgngganaatggnggggttnttaaaaacnccttnattgatggaaaaattccaaccttnc

SEQ ID NO: 4020 - DNA, 434 bp, Homo sapiens
  misc_feature 30, 185, 211, 320, 362, 371, 402, 409, 411, 429: n = A,T,C or G
actttttttttttttttttttttttttttnggccatatcattcatgaccaaaaaaaaccaaaaagcaaaaaacaaaaacaagtcccatgtcctactgactctagttcttccagtcgttatcctctgctgtctctctggcatcctatgaatcaaatcaagcccatgctgttgttggtttttaaggnttctttcaataataggctaaggaaanacatgtttttctcttttaaatctctgcaactccaaagtaaactccttcgaacgtatttaatttggccttttcagctttcttcttgcccagctctgtcgaattcatgggngtgtgtgcacatgttggtttcactcacccaaagtaattttgngagcatgcntgggctttttaatttctgcttgaatgtttgncctgctngngttgcagcttctaaaganattgc

SEQ ID NO: 4021 - DNA, 395 bp, Homo sapiens
  misc_feature 286, 287, 292, 294, 302, 312, 316, 322, 328, 332, 335, 336,350, 360, 366, 367, 376, 382, 386: n = A,T,C or G
acggaggagttcctggaagccttcatggatctgagcctccggaatctccgtgaggttgaaattcaggccctccaggatttcatcgtgagtgtcagccttggtccccagggagagcattgcaaaggctgtagcgatgctcactggggagaagaagatattggtgctgttggactggtgtgccagctggcggtataggctgaaggcgaactcagccaggttgggggtgatcttgttgaaggttgggtgatcctgatcatggtgggatgtatcttgtcttcttgggcannatctncntggggatncttcatccangganacatgnaccaantagnctnngcctgcctactaanaggatgcccnccaganngatatcggntttgtngttntctttctca

SEQ ID NO: 4022 - DNA, 371 bp, Homo sapiens
  misc_feature 206, 228, 236, 253, 265, 274, 277, 291, 296, 304, 311, 318,341, 350, 368: n = A,T,C or G
actgattcatcactgtcagattctgttccagaccctgtctcagcctggggctgcggcaactcctgctctgtagcagggacggtttctgtggcttcgccgggcattttgtgcagggaacgcggaaccaagatggcggcccccgcgtactctgatttaaaactttggacatcctgtgatctgttttaaagttggggggtgggaaattnagctgactagggacaaacatgnaacctatnttcctatgaaaaaagtnttaaatgtcccncttgaatancantaattcttcatagnttttntaatcaanggaaaantggaaanctaattatttgtaatgaattatnttataacanttcttagcccttgctttnggg

SEQ ID NO: 4023 - DNA, 242 bp, Homo sapiens
  misc_feature 36, 153: n = A,T,C or G
acagacatggcggcggcttttcggaaggcggctaantcccggcagcgggaacacagagagcgaagccagcctggctttcgaaaacatctgggcctgctggagaaaaagaaagattacaaacttcgtgcagatgactaccgtaaaaaacaagantacctcaaagctcttcggaagaaggctcttgaaaaaaatccagatgaattctactacaaaatgactcgggttaaactccaggatggagt

SEQ ID NO: 4024 - DNA, 637 bp, Homo sapiens
  misc_feature 355, 368, 375, 469, 490, 513, 525, 544, 560, 567, 602, 610,624: n = A,T,C or G
acgcgggggagtcactgctgctctttgaggcaatgcgcaagggcaagttttcagagggcgaggccacactacggatgaagctggtgatggaggatggcaagatggaccctgtagcctatcgagtcaagtatacaccacaccaccgcacaggggacaaatggtgcatctatcccacctacgactacacacactgcctctgtgactccatcgagcacatcactcactcactctgcaccaaggaattccaggcccgacgctcttcctacttctggctttgcaatgcactggacgtctattgccctgtgcagtgggagtatggccgcctcaacctgcactatgctgttgtctctaagangaagatcctccancttgtancaactggtgctgtgcgggactggggatgacccacggctttttaactcacggccctgcgacggcggggcttccacctgatggccatcaacacttntgtgcccgggtgggaagtgantgtggcacaaaccaacaatgganccccatcttctnaaaagcctgtgtgcgttantgtgctaaatacacanccccccnaccatggcttggctggaagtaattacgggtaattnataccaantttctgttgccaantccttgggaattc

SEQ ID NO: 4025 - DNA, 430 bp, Homo sapiens
  misc_feature 130, 298, 332, 364, 382, 409: n = A,T,C or G
acaggcagagcaaccatcctcttcgtcacccagacgcaagacagtaaaggaaaaggatgacactggccctaagaagcacagcagcaagaactcagagagagctcagaagtcagagcccagggaggggcanaagctccccaaatccaggacggcctactctggtggagcataggacctagagagggagctgaagaaggagaaacccaatcacgagcacaagtcctcaagcaggagggaggcaagagaagaaaagaccaaggattagggacagagggcggagctcagatgcacattctanctggtataatgggcgttttaagggcgtattttanaagtagaagtaggagccgaataaatcccatangcataaaagggcccgacnctcccgggagcgggagtcttcgaatcncagtgaccgttggccgtcact

SEQ ID NO: 4026 - DNA, 345 bp, Homo sapiens
  misc_feature 297, 318, 327: n = A,T,C or G
acaagtatttatatcaatgaaaatttccattggtgattttttggcagaatattggtcttgactctgtggaataaatgacgacgtaaacgtagctgcacaggggtgttcctgtataatgcttgaatcaattgtgtgtgaaagcatcatgcaaatggctaattaaattgggtgatgactgaaaggttataaatccttcattccagctccacgagcagatccccttctccaactgtgtctccagcttgacagtcacagatttcacccgtgccagttttcccagctgtcaatactattctngcattatcatggcttaaatcncacaaattncttgaccttctgctaccc

SEQ ID NO: 4027 - DNA, 338 bp, Homo sapiens
  misc_feature 90, 118, 255, 300, 304, 306, 308, 314, 327, 331, 332: n = A,T,C or G
acctaaataatgtccttcattttgtcttagcttgcaaagcctctaatatttgctacctgcccttttcaaaaaaaaaaaaaaaaaaaaaanaaaggcttgtccacctctctactaaaanaaactcaagggtctatgtctgtcctgtttgctatttcatctgcattgccaaatgcagtggctcctctgggtaggcaacctgaggtggaatcaaattatgaatgcatatgttatctcatgtctataaaataaatgagntaaaatttataaataaagggataggaaaaatgctgattattctgngtgncngngctttnaatataaggccanttcnnacatgc

SEQ ID NO: 4028 - DNA, 427 bp, Homo sapiens
  misc_feature 236, 291, 350, 368, 376, 379, 385, 400, 401: n = A,T,C or G
gggtactctggtgagtcaccacttcagggctttactccgtaacagattttgttggcatagctctggggtgggcagttttttgaaaatgggctcaaccagaaaagcccaagttcatgcagctgtggcagagttacagttctgtggtttcatgttagttaccttatagttactgtgtaattagtgccacttaatgtatgttaccaaaaataaatatatctaccccagactagatgtangtattttttgtataattggatttcctaatactgtcatcctcaaagaaagtgtatnggttttttaaaaaagaaagtgtatttggaaataaaagtcatgatggaaaaattcatttntttaaattccccggtttntcactttnttngattanaagatgggccatatnnccccctttttggccccatggatttaa

SEQ ID NO: 4029 - DNA, 243 bp, Homo sapiens
  misc_feature 13, 27, 80, 110, 115, 122, 149, 174, 191, 204, 209, 219,222, 227, 232: n = A,T,C or G
acttttttttttntttttttttttttngcaagccatatctgaaaagccatctctgcccttcccctgcctgcatcccccanaccatgagccgggcaccggccaatgcattnagggnggggacncatttcctgccgtggctgtcctttganagacccacatgttatttcatggaanacggagttggtgacttnaggaaactccttntgganaacatgggangcnccttnataantcttgaaagtt

SEQ ID NO: 4030 - DNA, 488 bp, Homo sapiens
  misc_feature 480: n = A,T,C or G
acgcgggggcgtcttgttcttgcctggtgtcggtggttagtttctgcgacttgtgttgggactgctgataggaagatgtcttcaggaaatgctaaaattgggcaccctgcccccaacttcaaagccacagctgttatgccagatggtcagtttaaagatatcagcctgtctgactacaaaggaaaatatgttgtgttcttcttttaccctcttgacttcacctttgtgtgccccacggagatcattgctttcagtgatagggcagaagaatttaagaaactcaactgccaaagtgattggtgcttctgtggattctcacttcttgcatctagcatgggtcaatacacctaagaaacaaggaggactgggacccatgaacattcctttggtatcaaacccgaagcgcaccattgctcatgattattggggtcttaaaaggctgatgaaagcatctcgttcaggggccttttttatcattgnatgataaa

SEQ ID NO: 4031 - DNA, 544 bp, Homo sapiens
  misc_feature 183, 253, 256, 294, 344, 379, 380, 392, 415, 422, 432, 453,458, 463, 481, 494, 507, 511, 521, 533: n = A,T,C or G
accctccagaaattggtgactttgcttttgtgactgacaacacttatactaagcaccaaatcagacagatggaaatgaagattctaagagctttaaactttggtctgggtcggcctctacctttgcacttccttcggagagcatctaagattggagaggttgatgtcgagcaacatactttanccaaatacctgatggaactaactatgttggactatgacatggtgcactttcctccttctcaaattgcaancangagctttttgcttagcactgaaaattctggataatggngaatggacaccaactctacaacattacctgtcatatactgaagaatcttnttcttccagttatgcagcacctggctaaaaatgtnntcatggtaaatnaaggacttacaaaggcacatgantggcaanacaagtatgnccacatccgaagcatgctaanatcanctctnttaccactagctgaattntggcacttatttnaagatttaccaangctngggcaaatgngtaacttgtaancttgagttgga

SEQ ID NO: 4032 - DNA, 303 bp, Homo sapiens
  misc_feature 148, 167, 194, 198, 256, 269, 270, 291: n = A,T,C or G
acacaatggtttattaaaggaatgtatggcccacatcaacctagcaaggattctactggtaaaccttcccatggccaaaggaaaaacaagcaggagttgagtggctggggtggggtgcaggcaatggagagagggcagaagggtgtanaagctgaagggggctagangcttactcctgagtttcttccttctgncttnaaatctttacttcttatggccaaaaacccagctgttttcataggctggagatgcactnttctatactgctnnagacagccagaaacaggggangagggaagattg

SEQ ID NO: 4033 - DNA, 498 bp, Homo sapiens
  misc_feature 365, 397, 416, 448, 464: n = A,T,C or G
actgcagctaaaccagcggcttcaataacaagtaagcctgctacacttacaacaactagtgcaaccagtaagttgatccatccagatgaggatatatccctggaagagagaagggcacagttacctaagtatcaacgtaatcttcctcggccaggacaggcccccatcggtaatccaccagttggaccaattggaggtatgatgccaccacagccaggcatcccacagcaacaaggaatgagacccccaatgccacctcatggtcagtatggtggtcatcatcaaggcatgccaggataccttcctggtgctatgcccccgttgggcagggaccgcaatggtgcccccttaccagggtgggcctnctcgacctccgatgggaatgagacctcctgtnatgtcgcaaggtgggccgntactggatcttacttcatccagtctaataggntttggagattaaaccntttcttaacttgtgctgttatatagccaagcttc

SEQ ID NO: 4034 - DNA, 290 bp, Homo sapiens
  misc_feature 26, 140, 176, 206, 209, 218, 231, 233, 240, 241, 251, 269,282, 286: n = A,T,C or G
acctggggggagttgtaacactccanaaggtccaactcctctcttggcatggccaaggctgagatccaccgaagcttttcactttgagtctccgtgcggaagaggaactcggcctgggcgccctgagtgttctgccgcanaaagagtcggaacaggtttttgtaaggtccatgtancttcatttcacactttccccccaaatgganganaagggagcntggtcaaattacnangaatcgnntaccctctcngggccggatacaattacnatacaagtcattnaaanaggt

SEQ ID NO: 4035 - DNA, 555 bp, Homo sapiens
  misc_feature 83, 254, 298, 306, 315, 350, 410, 418, 425, 466, 468, 481,505, 519, 526, 533, 537, 546: n = A,T,C or G
acgcgggggagccagcgcggagcacctgcgcccgcggctgacaccttcgctcgcagtttgttcgcagtttactcgcacaccantttcccccaccgcgctttggattagtgtgatctcagctcaaggcaaaggtgggatatcatggcatctatctgggttggacaccgaggaacagtaagagattatccagactttagcccatcagtggatgctgaagctattcagaaagcaatcatgaggaattggaactgatnagaaaatgctcatcagcattctgactgagaggtcaaatgcacantcggctgntgattgttnaggaatatcaagcagcattatggaaaggagcttgnaaagatgacttgaaggggtgatctctctggccactttgagcatctcatgggtggccctantgactccncatcagnctttgatgcaaagcaactaaaagaaattcattgaagggccncngggaacaaactgnaagatgccttgattgaaatcttanttacctggacaagncaagctnatgaaangatnttttttcanccttattat

SEQ ID NO: 4036 - DNA, 478 bp, Homo sapiens
  misc_feature 300, 388, 411, 412, 429, 444, 454, 463: n = A,T,C or G
ccgggggtagacggaacttcgcctttctctcggccttagcgccatttttttggaaacctctgcgccatgagagccaaggtgggcggttcctggtagtaagcttgggaggtaggagttggcgagtagtagcgaggagacgaagtggaggaagaagcgaatgcgcaggctgaagcgcaaaagaagaaagatgaggcagaggtccaagtaaaccgctagcttgttgcacccgtggaggccacaggagcagaaacatggaatgccaaacgctggggatgctggtacgcggggccttttcgctgntgcggccgcatccatgattatgctcatggcttcagaagaggcttcgcctctaggtgtcctccgctgtggcaagaataaggtctggttngaccccatgaaccaatgaaattnncaatgccactccccgtnaacaaatcccggaancttatcaaanatgggctgntcttcctcaagcctt

SEQ ID NO: 4037 - DNA, 490 bp, Homo sapiens
  misc_feature 382, 383, 387, 389, 415, 454, 457, 462, 465, 467, 487: n = A,T,C or G
actactgctgttttctgaagacgcgagggcaagtgcagccagccgtttcttttccttctttaagcgtttcttctcctgtttctccagcttcctagtaatctcagcagccgcttcctctgcctgaaccattgcttccttcatgacatccagattctttcgtggtatctctccagtctcatagaaggacagtcgctcttcaacttgttctcgaagcttctccccgaatacactcgtgggcacctcagagaagcaatcgattcgtgaggcaatactgcatttgtttgccaggtatcgggagatgcggccttttgttcttggcagctgctcggccaatgaaggtggaagtggaaaatgagtccatattttggggtggttacccctnngctntnaggggctctgaacagggccttttcanccccaaggatctgcactggggatgctggatacttgccangtntgtgnagntngcaacattgtgcaatgaganatg

SEQ ID NO: 4038 - DNA, 482 bp, Homo sapiens
  misc_feature 404, 410, 416, 432, 440, 473: n = A,T,C or G
acctagaagagaggcgggtcaaagaagtagtgaagaagcattctcagttcataggctatcccatcaccctttatttggagaaggaacgagagaaggaaattagtgatgatgaggcagaggaagagaaaggtgagaaagaagaggaagataaagatgatgaagaaaaacccaagatcgaagatgtggattcagatgaggaggatgacagcggtaaggataagaagaagaaaactaagaagatcaaagagaaatacattgatcaggaagaactaaacaagaccaagcctatttggaccagaaaccctgatgacatcacccaagaggagtatggagaattctacaagagcctcctaatgactggggaagaccacttggcagtcaagcacttttctgtagaaggtcanttgggntttcangggcattgcttttttnttcctcgncgggctcctttgacctttttgagaacaaggaanaataagaac

SEQ ID NO: 4039 - DNA, 409 bp, Homo sapiens
  misc_feature 363, 399: n = A,T,C or G
acacatgagagaaaaatctttccaatgtaatgagagtggcaaagcctttaattatagctcagtcttaaggaaacatcagataatccatttaggagcgaaacaatataaatgtgatgtgtgtggcaaggtctttaatcaaaagcgatatcttgcatgtcatcgtagatgtcacactggcaagaaaccttacaagtgtaatgattgtggcaagaccttcagtcaggagttaacccttacatgccatcatagacttcatactggagagaaacattacaagtgcagtgagtgtggcaagaccttcagtcgaaattcagcccttgtaattcataaggcaattcatactggagagaaatcttacaagtngtaatgaatgtggcaagaccttcagtcaaacggtcntaccttgggt

SEQ ID NO: 4040 - DNA, 414 bp, Homo sapiens
  misc_feature 343, 349, 390, 411: n = A,T,C or G
acgcggggtccgccgctagtctccagctccaaaatggcggctgccactgtggggcttctgccggccggtagtccctggcgctgctgacccagcatcggcttttctacgtcttgaacctggattcgcctaggggttgggaagggcttgtggacggcgttgggggaggcctgacgagattaataaagaactcttcagaattcctggtgtttcatcatatatacgactaagatatcaactcttctagcttgctgtttctggaccaaaaaaaatgacgtctattatcaaattaactaccctttctggggtccaagaagaatctgccctttgctatcttctccaagtngatgantttagattttttattggactgtggctgggatgaacactttnctatggatattattgattccntga

SEQ ID NO: 4041 - DNA, 563 bp, Homo sapiens
  misc_feature 282, 362, 363, 377, 442, 454, 475, 486, 494, 502, 504, 505,520, 522, 523, 540, 541, 553: n = A,T,C or G
acttgcagccctcggccaaacggccagacgccgacgtcgaccagcagagactagtaagaagtttgatagctgtaggactgggtgttgcagctcttgcatttgcaggtcgctaccatttcggatctggaaacctctagaacaagttatcacagaaactgcaaagaagatttcaactcctagcttttcatcctactataaaggaggatttgaacagaaaatgagtaggcgagaagctggtcttattttaggtgtaagcccatctgctggcaaggctaagattanaacagctcataggagagtcatgatttttgaatcacccaaataaaggtggatctccttacgtaaccaccaaaataaatganncaaaagacttgctnataaacaaccaccaaacattgatgcttaaggaccacactggaaggaaaaaaaaagaggggacttngaaaaataaaanaaaaaaaaaaagtcctttttntctcatttaangaaaaatnaacaagtntnnaggggaaattgtttntnngtggcagggggtttgannaagtcccccttncggttgaaaa

SEQ ID NO: 4042 - DNA, 544 bp, Homo sapiens
  misc_feature 334, 371, 381, 434, 437, 446, 485, 495, 503, 515, 522, 543: n = A,T,C or G
acatgacaaggtgcggctccctaggcccctcccctcttcaaggggtctacatggcaactgtgaggaggggagattcagtgtggtgggggactgagtgtggcagggactccccagcagtgagggtctctctcttcctcttgtgctcttgctggggctggtggtccaggggtcttactccttggaggccatgtgggccatgaggtccaccaccctgttgctgtagccaaattcgttgtcataccaggaaatgagcttgacaaagtggtcgttgagggcaatgccagccccagcgtcaaaggtggaggagtgggtgtcgctgttgaagtcagagganaccacctggtgctcagtgtacccaagatgcccttganggggccctcnacgcctgcttaccaaccttcttgatgtcatcatatttggcaaggtttttctanacngcaggtcangtccacccactgacacatttggcattggggacacggaangccatgccantgaacttncccgtttaactnagggatnaccttgcccacaccttggcanc

SEQ ID NO: 4043 - DNA, 357 bp, Homo sapiens
  misc_feature 3, 248, 298, 338, 342, 346: n = A,T,C or G
acncgggagaagaagagtaagaaggacaagaaggccaaagctggtctggagagcggggccgagcctggagatggggacagtgataccaccaagaagaagaagaagaagaaagcaaaagaggtagaattggtttctgagtagtgaaggccacttgaagctggaggagaaactaaagccttattgagaaaacatgttatagatccttttgttgctgagagagtggaacataggtcctagacagggtgaanagttctggcacattttagctgctctttgagacctcggtgatgttacctgntgtggtcatcccatcttgtcctgttttaaggatttgggcngggnatanatgaaagaggc

SEQ ID NO: 4044 - DNA, 640 bp, Homo sapiens
  misc_feature 7, 10, 72, 88, 94, 120, 129, 152, 166, 181, 182, 326, 416,498, 530, 547, 562, 581, 627, 635, 638: n = A,T,C or G
gtttttnttntttttttggcccaaatttatttttattttgcacacataggaaacaggatcctatcaaaaganaacaaaaagagaaacnagccanttgttgcagaggaaaagcatgcacanatctgcttnaagtttactctgaaccacggacnctccgggaattctncacaccaggagctgnntcactccaggaagtgggcacaacccaccatccacacaatggaaacaagaatggccaggaaatgtcaccgaagtgagacttccatatgcaggatcagcgttcacagtagcacaattctaaccaagttcaagggaaaacaaacttntgtctcacacaaacatgggaatcaaaattgttgaccctagccatcactgctcttaacataatttgcttcaaaaagacaaacgaaatttantccggacttttgggtgcctattcaactgcacccgattccaggggcagcttagtgtgctttttcattacaaaaaataaagacntttaaaaatgcaaacaaattacctggaggaanaagagtgttggaccacncattgtcttggttgnaacaagggaacattgggcnttggtggcccattaaatggaggcttcagcattggaaggacctgccnggcgggcnttnaa

SEQ ID NO: 4045 - DNA, 608 bp, Homo sapiens
accaaacgggcaaggacatctctacaaattactatgcgagtcagaagaaaacatttgaaattaatcccagacacccgctgatcagagacatgcttcgacgaattaaggaagatgaagatgataaaacagttttggatcttgctgtggttttgtttgaaacagcaacgcttcggtcagggtatcttttatcagacactaaagcatatggagatagaatagaaagaatgcttcgcctcagtttgaacattgaccctgatgcaaaggtggaagaagagcctgaagaagaacctgaagagacagcagaagacacaacagaagacacagagcaagacgaagatgaagaaatggatgtgggaacagatgaagaagaagaaacagcaaaggaatcaacagctgaaaaagatgaattgtaaattatactctcaccatttggatcctgtgtggagagggaatgtgaaatttacatcatttctttttgggagagacttgttttggatgccccctaatccccttctcccctgcctgtaaaatgtgggattatgggtcacaggaaaaagtggggtttttagttgaattttttttaacattcctcatgaatgtaaatttgt

SEQ ID NO: 4046 - DNA, 648 bp, Homo sapiens
  misc_feature 23, 75, 143, 159, 181, 194, 197, 509, 541, 561, 634, 646: n = A,T,C or G
acttttttttttttttttttttngcatcaaaaagctttatttccatttggtccaaggcttgttaggatagttaanaaagctgcctattggctggagggagaggcttaggcagaagccctattactttgcaaggggcccttcanaagtcgctgggctcanaaggctcttagtcgtgcttganagtgagcctttcnaanagatactcgcccagcccagcctccgggccacccagcctgtggaggttggtcaggtgatcacccatcttcttgataagcttcacttcctcatctaggaagtgagtctccaggaagtcacagagatgggggtccgtgcgggcagaacccagggcatgaagatccaaaagggcctggttcagctttttctccagggccatggcagctttcatggcgtctggggttttaccccactcatcttcagctggcttcttgatgtcctggaagagagcgcggccgccacgctggttttgcatcttcaggagacgctcgtanccctcgcgctttcctcggccagttcgcggaanaagtggctcacgccttccanagccacatcatcgcggtcgaaaataaaaccccaaaaaagaggtaggtgtaggaggcctgcaggtacaacacanccaaagactgtnaa

SEQ ID NO: 4047 - DNA, 650 bp, Homo sapiens
  misc_feature 30, 92, 150, 156, 209, 212, 438, 543, 561, 580, 583, 586,615, 618, 624, 648: n = A,T,C or G
actttttttttttttttttttttttttttnggttatttttagttaaagaaaaacagctttctccaagggcgacaaagtgaactgaaggtcanaaggaagctgggtgcgggcttcctgcaagctcttgctccaaaacctggaagtgagganagggcnctccggagctctggggaaggttggtgcacacaggggttccgttggtggggganaanagccgccagcccacacacggtcactggattggtgtgagtgggttccaagcgactgccatgtgctagtccactgacatgattgacattaacattcttggggggcattaaattaaggaatgacacagggagccaagagagtggcttattcggttggattctgaatcacaatcaggaaatagtctttatctggtgcaaccataatttcatttttcttggagcgaattcnaaggaaggtgagatcgttctgggggtcgatgtcacgcacggtgctccgtgccttcaggatgaagctgtgcatgaggctggcatactgggtggtggtggggttgtncatggtgctcttgatggnaatgccttctgtgttcacnacnatnaatccctgcactcccttctggctctgcantcncttcantgtttcttcaccttttgccatttnca

SEQ ID NO: 4048 - DNA, 651 bp, Homo sapiens
  misc_feature 288, 307, 311, 323, 537, 546, 615: n = A,T,C or G
actctgccacaaactgatcacactgcttctggtaagggtctggcaggaagctgcagcctttctcaagagcagccaggatctcctgcttggtgctgtttttctccaggttgcgatccaaataacccaccagcttcttgcacacttcgcagaagccaccgtcctttggctgagtcacgtgaacggtcagtgcaggcagccgcgtgccagagcagaggtgcagcatgctgcacaccagctcagggctgacctcctccagcaggatggacaggatggagctgccgtactttnttttttttttttttttttntttnggaatgggcaanatatttattgtgttaacatgtgaaacatacaatttgctcagtaaaaatagcacatgaaaaaatattataagcttatattcataaagaaatgggtatgttattacctctttttcttgcttgctcaggactattaatttgacaaggttggaatgtgcacagcacagctgagacaccaccattttaacactgaatcactataccattgaactggcanaaccctgcntgaaggatgaaaaactcatacccaaagtcaagaatcacacagcagcatggagggggaaaatgaactatntgatgctaaccgcatttaatttcaaaggggggggga

SEQ ID NO: 4049 - DNA, 536 bp, Homo sapiens
accgaccatagagcaagaatcaagattctgctaactcctgcacagccccgtcctcttcctttctgctagcctggctaaatctgctcattatttcagaggggaaacctagcaaactaagagtgataagggccctactacactggcttttttaggcttagagacagaaactttagcattggcccagtagtggcttctagctctaaatgtttgccccgccatccctttccacagtatccttcttccctcctcccctgtctctggctgtctcgagcagtctagaagagtgcatctccagcctatgaaacagctgggtctttggccataagaagtaaagatttgaagacagaaggaagaaactcaggagtaagcttctagcccccttcagcttctacacccttctgccctctctccattgcctgcaccccaccccagccactcaactcctgcttgtttttcctttggccatgggaaggtttaccagtagaatccttgctaggttgatgtgggccatacattcctttaataaaccattgtgt

SEQ ID NO: 4050 - DNA, 652 bp, Homo sapiens
  misc_feature 411, 483, 498, 524, 572, 583, 619, 623, 625, 630, 634, 638,641, 642, 645: n = A,T,C or G
actgttgtccatttcatgagagtaggcttgaggacaccatgggcaaggatctgatggttgccagcctaagcgttttagacttttgacccagagattttttgttttgggtgtggaaaaaattttagaggatagggtctcaagatataatcctttttataggcggcaggtcttaagagatgagggtccagaggaacggatgaagcctgcttggaagcatgctgggatggccatttggaaggagtgttgcaaggaagcatggccttggctgggcgctgccaggagcttaagggttgtaggttgtttgtctgatcggctctcggcctaatcttgtggcttccaggaggaagaggagagatcaagctggctgtctgatgggcatggctttattctggaatggtgaacccaatgganagggtcctgcagatggacggcagttggtgtgctataaatgaccgggtagggtctggtccattgaggctgtanagtttgaggggtcanacttttgacaaggactgatcgtccanctagggtgtcttcatatggctgggaatcctccgccgtaagattacccnaactcggcatntgtgatggtccaagggggctctgaggcaacggccancatnantcttnaccnctanccnnganatccatt

SEQ ID NO: 4051 - DNA, 411 bp, Homo sapiens
actgaggacaaatcagttctctgtgaccagacatgagaaggttgccaatgggctgttgggcgaccaaggccttcccggagtcttcgtcctctatgagctctcgcccatgatggtgaagctgacggagaagcacaggtccttcacccacttcctgacaggtgtgtgcgccatcattgggggcatgttcacagtggctggactcatcgattcgctcatctaccactcagcacgagccatccagaagaaaattgatctagggaagacaacgtagtcaccctcggtgcttcctctgtctcctctttctccctggcctgtggttgtcccccagcctctgccaccctccacctcctcggccagccccagccccaggttgataaatctattgattgattgtgatagaaaaaaaaaaaa

SEQ ID NO: 4052 - DNA, 190 bp, Homo sapiens
  misc_feature 24, 128, 164: n = A,T,C or G
acttcccacttttcataacgagtnggagcctagagttgatcgactccagcgactttttcgtcttctttgcggccaccatcttcctgccttaggagcgggacggcccccaaccaacagcagccgctaanatggccggggaacgagaaaggaaagacttcccacantgcaaagctcttcacggcccccgcgt

SEQ ID NO: 4053 - DNA, 650 bp, Homo sapiens
accagaagtataagtttatggaactcaaccttgctcaaaagaaaagaaggctaaaaggtcagattcctgaaattaaacagactttggaaattctaaaatacatgcagaagaaaaaagagtccaccaactcaatggagaccagattcttgctggcagataacctgtattgcaaagcttcagttcctcctaccgataaagtgtgtctgtggttgggggctaatgtaatgcttgaatatgatattgatgaagctcaggcattgttggaaaagaatttatcgactgccacaaagaatcttgattccctggaggaagaccttgactttcttcgagatcaatttactaccacagaagtcaatatggccagggtttataattgggatgtaaaaagaagaaacaaggatgactctaccaagaacaaagcataatgctggcaattaaaaatgtggtttagttttccaaacatgttatcttaaatacccctttatccttacaggttgacataactttgaatgttttaacagcaagaattttaagaaaagataaacaccattttatttatttataaaaacaaaattagtttcaaatatttttgacattgtgatttttttttcccattctcaccaagctaatggtatttaatcattattttt

SEQ ID NO: 4054 - DNA, 651 bp, Homo sapiens
  misc_feature 636, 643, 651: n = A,T,C or G
acgcggggaaggggagagtttaaaaacccaaaccgttgtggttttaaggtgtttcatttttaaaagggagagagaatctatttaaagctatttcagatcagggattgtcatccttttttgtccaatgtattccttgttctttaaaaaaattttttttagaggaaactaatattagtctttgtgttcactaactcttctggtcacttgtatttatttattcattcattcatcagatatttgttgccatctgaaagaactggcccagtgggtctgaaagctcgcttgagaataggaaacttgagacctgccccctgtgggtaggagaacaaggaccacctgggttctccagtcttgaacgagaatctcactcttatcagaatgtttttcttaacctcagcgtatgatgaggaaatttacttatctctagctaggatttgacaaattccaacatcaaatgatcaaaacatttgccactgaggcttcactggtgagatccgttctccgtcctcgggtgcagtcccttgggggctgctcctcggactgcgccccgcacacctgttatcgagggtgtgagaagcgcctaacctggtgacatgtgatctgggacgccttcatttctcgggccaggagtaccanctgctangacagcan

SEQ ID NO: 4055 - DNA, 576 bp, Homo sapiens
acaaaaaaattaaatttgctttagttataaaagagctctgtcaatatacacaaactatatacttcagacattcacaaaaatgtgagcagaaggcttatcaaaagacatttaatacaattagttttcaacaaccccttggtggtccacatctacaaagatatccagcccaacccaaccccccttccaaatcccacccccacagaaaagcacatacttaccagaatttttagcaagtatggtttgggaatttttgtggtttttgttttttaaaaaaaggcccccagggcaagttatttacagtttaattgccactgtcaactgatctggaccttgatcgggaccgggacctctggcgatccacagatgctggagacttagatctacttgaagaaccacgtttctggctcttctcaggcacgggagacctactaacagaacgggacttgctccggctccggctcctgctcctgcttcttgaccggctgtaagatttgcgactacgggaacgggatcggctcgagacctagaggaacttctggtccgggatcgagacctgcttcttgacctaccccgcgc

SEQ ID NO: 4056 - DNA, 651 bp, Homo sapiens
acccctgatgccgttgacaagtatctcgagacacctggggatgagaatgaacatgcccatttccagaaagccaaagagaggcttgaggccaagcaccgagagagaatgtcccaggtcatgagagaatgggaagaggcagaacgtcaagcaaagaacttgcctaaagctgataagaaggcagttatccagcatttccaggagaaagtggaatctttggaacaggaagcagccaacgagagacagcagctggtggagacacacatggccagagtggaagccatgctcaatgaccgccgccgcctggccctggagaactacatcaccgctctgcaggctgttcctcctcggcctcgtcacgtgttcaatatgctaaagaagtatgtccgcgcagaacagaaggacagacagcacaccctaaagcatttcgagcatgtgcgcatggtggatcccaagaaagccgctcagatccggtcccaggttatgacacacctccgtgtgatttatgagcgcatgaatcagtctctctcctgctctacaacgtgcctgcagtggccgaggagattcaggatgaagttgatgagctgcttcagaaagagcaaaactattcagatgacgtcttggccaacatgattagtgaaccaaggatcagtt

SEQ ID NO: 4057 - DNA, 653 bp, Homo sapiens
  misc_feature 485, 632: n = A,T,C or G
acagccaacggtttcccttgggggctttgaaataacaccaccagtggtcttaaggttgaagtgtggttcagggccagtgcatattagtggacagcacttagtagctgtggaggaagatgcagagtcagaagatgaagaggaggaggatgtgaaactcttaagtatatctggaaagcggtctgcccctggaggtggtagcaaggttccacagaaaaaagtaaaacttgctgctgatgaagatgatgacgatgatgatgaagaggatgatgatgaagatgatgatgatgatgattttgatgatgaggaagctgaagaaaaagcgccagtgaagaaatctatacgagatactccagccaaaaatgcacaaaagtcaaatcagaatggaaaagactcaaaaccatcatcaacaccaagatcaaaaggacaagaatccttcaagaaacaggaaaaaactcctaaaacaccaaaaggacctagttctgtanaagacattaaagcaaaaatgcaagcaagtatagaaaaaggtggttctcttcccaaagtggaaccaaattcatcaattatgtgaagaattgcttccggatgactgaccaagaggctattcaagatctcttggcagtggaggaagtctnttttaagaaaatagtttaaca

SEQ ID NO: 4058 - DNA, 649 bp, Homo sapiens
  misc_feature 515, 631, 644: n = A,T,C or G
acggtttggcctgcaatgctaatggtctcacaagcagtcaaggtattttgctacagtggttgtgcttcatcttctgttgcctggtgtgtctggtgatatgaaatgttgtcacaaatgagctgctttggcttcgatctacgttataaaggatctaatgacattcatgtcttttaaattattgattacactgcccattcagctctgtgtggctttctttaaaatcatcaggtgtgtatcagctggatgactggcagaaaaccaaaggaaacatctcttgtatctattggatttttaaaaagcacctctaaaaaaaatagctcaaatttataaatctaaagaaaaacaagtgagtttccctttttgtttacatagtttgttcatttctccatatattactgcattaaaaataaataaacatctatatttttttaattagcaactatagcaaaatacccaaagtgttacagactgctaacaggaaaaaaaaaaagctcacattatttttgtgcatttantgccatatgctgattcttgaacatttaggtttcttttaatatattttaaaatgaagttatataaaaaatacagtaaccacggttgcctttgtgctcaaaatctttggccataccanagtctaaattatncctcc

SEQ ID NO: 4059 - DNA, 472 bp, Homo sapiens
acagaacatgatcaagggtgttacactgggcttccgttacaagatgaggtctgtgtatgctcacttccccatcaacgttgttatccaggagaatgggtctcttgttgaaatccgaaatttcttgggtgaaaaatacatccgcagggttcggatgagaccaggtgttgcttgttcagtatctcaagcccagaaagatgaattaatccttgaaggaaatgacattgagcttgtttcaaattcagcggctttgattcagcaagccacaacagttaaaaacaaggatatcaggaaatttttggatggtatctatgtctctgaaaaaggaactgttcagcaggctgatgaataagatctaagagttacctggctacagaaagaagatgccagatgacacttaagacctacttgtgatatttaaatgatgcaataaaagacctattgatttggaaaaaaaaaaaaaaaaaaaaaaagt

SEQ ID NO: 4060 - DNA, 652 bp, Homo sapiens
  misc_feature 541, 611, 624, 648: n = A,T,C or G
accacaaagaatagtctcatttgcacgagagactcaaatattggactctagcacaggaaatgtctcttggggcttagtaatatacaaactgatagaaaagaaaattgccttaagaaaaatttcacaattgactaaacatctgaaacatttttatcacagctttcatatattaaaaaagtttcctccagagatgaagcttattgatgaaataaaacctagtcactatcatctgacccatgttctgagcctctatctgaggcctcattgttggatccctctggttccgattcatttccagagccttggccagaaccctcattatcagatcctctctccgattcgtgatctgattcggcacttggagaagctgggcgagagtcgttctcagaaactcctgagtggcttctccctgactgcacagattcattgtcagactgctcagaaccggagggccttctctttctggatggctggtcactgtctgagtcctgatctgaccgctgtcttcgtggcctccggggactgccggcctcgctgccanacttgttctggttctcatcggaatcactctctgatgaggccatttctttcgttgttcgtcctcgtctgantcactggtgctgntgctgtcctgggatgtccttcatnacca

SEQ ID NO: 4061 - DNA, 490 bp, Homo sapiens
  misc_feature 108, 145, 195, 289, 406, 421, 472: n = A,T,C or G
acttttttttttttttttttttttttttccaagcagtatgtctcaatagtggccttaaaatattcagcaaaatattccgtaaaaatattcagtaaatctaaatgacanatgtgctgtcattttggctttgttgttccatttctanagtgccccgcgtaccaccacacccaactaacttttgtatttttagtaaanatgaggtttcaccatgttggccaggctggtctcaaactcctggcctcaagtgatctacctgcctcggcctcccaaagtgctgggattacaggcntgagccaccacacccagcctactcaaacttttatgttgaaaaaaaaaatcataatttttttttttttaaaggaaatgaacgtggaggactggggtgaagggccaccctgggtagttnaatctttttgggaanacatgactttaaggagattccctgctttgtgacaggttgctccatgctgtnttggggacaagggcctgt

SEQ ID NO: 4062 - DNA, 649 bp, Homo sapiens
acacacacgggaaagaaactctgcgagtctgatgtgtgtcagagttccagtcttacaggacataagaaagtcctctctagagagaaaggtcatcagtgtcatgagtgtgggaaagcctttcagaggagttcacacctcgtcagacatcagaaaatccatcttggtgagaagccttatcagtgcaatgagtgtggcaaagtctttagccagaatgcaggccttttggaacatctcagaattcatactggagagaaaccttatctatgtatccattgtggaaaaaattttaggcgcagctctcaccttaatcgacatcagagaattcacagtcaggaggagccctgtgagtgcaaggagtgtggaaaaacctttagtcaggccttactcctcacccaccatcagagaatccatagtcactccaaaagccatcaatgtaacgagtgtggaaaagctttcagtttgacctcagaccttattcgacaccacagaattcatactggagaaaaacctttcaagtgtaacatatgccagaaagccttccgactaaactcacaccttgctcaacatgtaagaatccacaatgaagaaaaaccctatcagtgtatgaatgtggagaagcctcaggcaaaggtcaggtctttttcaacat

SEQ ID NO: 4063 - DNA, 571 bp, Homo sapiens
acccaaagcctccccaaggccacagtagtcatgctcccgggcagtatctgccatcccagccacttacattcccatcgtggtttgggcaagagagaggctttcccgcagccacagcagtgactgtctccaggatggaagactcctcagcgttgctgcctggagttcgctgcagcacgtccatcaggtttgtgatgaagaaattgttctggagcgcggccacccctttctcgggcaggatggaggtctggcggcacactgggcaggagagggttaaactgtgggcaggaatgtagttctgcaggcacctctcgcagaaagtgtgcagacaggggagaaccttgggattcttgtaccaggcagtgacagccaccctggaggagaagaggaaagagaaagccaagatccactaccggaagaagaaacagctcatgaggctacggaaacaggccgagaagaacgtggagaagaaaattgacaaatacacagaggtcctcaagacccacggactcctggtctgagcccaataaagactgttaattccccaaaaaaaaaaaaaaaaaaaaaaaaaagt

SEQ ID NO: 4064 - DNA, 573 bp, Homo sapiens
acagtttgcagaatatattcagaaaaacgtgcaactttataagatgcgaaatggatatgaattgtctcccacggcagcagctaacttcacacgccgaaacctggctgactgtcttcggagtcggaccccatatcatgtgaacctcctcctggctggctatgatgagcatgaagggccagcgctgtattacatggactacctggcagccttggccaaggccccttttgcagcccacggctatggtgccttcctgactctcagtatcctcgaccgatactacacaccgactatctcacgtgagagggcagtggaactccttaggaaatgtctggaggagctccagaaacgcttcatcctgaatctgccaaccttcagtgttcgaatcattgacaaaaatggcatccatgacctggataacatttccttccccaaacagggctcctaacatcatgtcctccctcccacttgccagggaactttttttgatgggctcctttatttttttctactcttttcaggcgcactcttgataaatggttaattcagaataaaggtgactatggatataattca

SEQ ID NO: 4065 - DNA, 564 bp, Homo sapiens
acgacctcattgccgtgtccaatcattatggagccatgggggttggccactacactgcatatgcgaagaacaaactgaatggtaaatggtattactttgatgatagcaacgtgtccctggcctctgaggatcagatagtgactaaagcagcttatgtgctattttaccaacgtcgagatgatgaattttataagacaccttcacttagcagttctggttcctctgatggagggacacgaccaagcagctctcagcagggctttggggatgatgaggcttgcagcatggacaccaactaatgctgactccacgatcctgccaccctgtagcgccagtgtaatcccccaggagaacatctttgacactctgcagactgctagtgttctgtctaaaaaccagacaaggaaatacccttcttttatgagcagaaggaaacaaaaaaaaaaaagaagaccgtttacctagaagaagctatgtcaagaggctgaattatttttatttttaaacaggtggtgagaaatttctgtgaaacctgtgaagctgaaaagggggtgggatgggggt

SEQ ID NO: 4066 - DNA, 651 bp, Homo sapiens
  misc_feature 618, 644: n = A,T,C or G
acaggtttcactattacaaatatatgatgttaaactaacaaactcatgaccttcaaagatgtcttcgtcccacgcacacacatttgtaatttgtgtccatttgctatttcccttcttctataatcttcaaattatatagttatacattgagttccctatgcatctcacccatctcctttatctcagccttctcatactttgccattctcttctttctggaaataaccagcacaacaattccagcaacaactgctatcaccacaaccacaataacagcaataacaccagcttttagaccctgcattgagaattcaggtgctttttcatcaacataataaattaaagtttgaccaggatccagatccagttgttccccatttactgtcaggtccattttcttagaatgaaacaaggattcacctttaacatctttttcaaaataataagccacatcagctatgtccacatcattctgagtttttttgagaagaattttgaaccagatcaatagtgataacattattctcatacaaaatactcgtgataaattttggatccagttgataacgcgttgtgatctccttctgaatgcagtccgcaaacttttactatcataangtttttctcttgctttgtgttttaanttcaatg

SEQ ID NO: 4067 - DNA, 653 bp, Homo sapiens
  misc_feature 553, 563, 619, 626: n = A,T,C or G
acagcctaccaagaggccagaaggcagaacttatgctgactacgaatctgtgaatgaatgcatggaaggtgtttgtaaaatgtatgaagaacatctgaaaagaatgaatcccaacagtccctctatcacatatgacatcagtcagttgtttgatttcatcgatgatctggcagacctcagctgcctggtttaccgagctgatacccagacataccagccttataacaaagactggattaaagagaagatctacgtgctccttcgtcggcaggcccaacaggctgggaaataattgtgttggaagcactgggggggttggggtgggcttggaacacaggtgtgtacttctctgcaagtaaattttatggatataatctttattctgattaaataaatgattaccctaatcagctattatttattattttctatttaacattcatttttgaagtgccagagacctgcctatgtcgcataaagtttggtcagatatatgcaaatgcagtgttggtgaagatcatctgaataatgatcactttccatgccatattanttatatttantatcactgctcattgggcttcctctctttaataaagtttaatcaagcaattaaaanctgtgtngccatcgcggtggctcacgcctgtaat

SEQ ID NO: 4068 - DNA, 345 bp, Homo sapiens
  misc_feature 336: n = A,T,C or G
acaggtgcatcgtgcacataagcctcgttatcccatgtgtcgaagaagataggctcttcttcaaagatgaagggaaagaaggtgctcaggtcattctcctggaaggtctgtgggcagggaaccagcatcttcctcagcttgtccatggccacaacaactgacgcggcctgcctgaagcccttgctgtagtggtggtcggagattcgtagctggatgccgccatccagagggcagaggtccaggtcctggaaggagcacttcatctgtttagggccatcagcttcaaagaacaagtcatcctcattgccactgtaataagccatcatttcactggcnagctcaggt

SEQ ID NO: 4069 - DNA, 653 bp, Homo sapiens
acatttactggattgtttttcagtttgcagctgccctcttgacatcccaaataaggaattcccgttaagtaaaacctgcagtgcaattcactcagtggttagtttcaggccaagcctccccctaccattatgcttgttcttccccaccgcccccaaatcctgcagtggcaccatattattaaaaacactaagtacctgttactgctgctacttcctcgtttgacaccttcctggaatctctcttgatttttgaggaaatacctagtaacaaacatgactgagttctggcttatatctgctcctggggagaaaacctgtcagcaaacatgggagaaattgcatgcggcaacttcaaagaacaataatcttgctgtcacttccaagttcaatattcctgacttaaaggttggcacgttggatgtcttggttggcttgtcagatgaactggctaaactggatgcatttgtagaaggagtggttaagaaagtagctcaatacatggctgatgtattggaagatagcaaagacaaagttcaagagaatctgttggctaatggagtggacttggttacttatataacaaggttccagtgggacatggccaaatatccaatcaagcagtccctgaaaaatatttctgaaataattgccaa

SEQ ID NO: 4070 - DNA, 650 bp, Homo sapiens
  misc_feature 26, 347, 614: n = A,T,C or G
actttttttttttttttttttttttngcagtaagagtagccaggtgttagccactttaatagaaaatatgatcaaaactcgattacaagagttcaaaaagacatagaaaaccagtgagtttcaattttattacaagttttcaaatctgggactagtttctttttttcttttaactgaaatgccaacttcagcccagggttttttcacaaccaaactaaaaatgacttactacatgggaacatcaatgcaacaagtagaatttgtaaactcaagccacaaacttagttaataatcatggttaagggacattgccaaagagcaattgatgcctcagtgaagtttgaaanaaactctgctttctgtgacggcagagaagaaatatgcaagcaattctgcttcaaagaaatttgcatagaaatggaaaaatgccagagcctttaacacaagtgaaattgcaaagcctcaacacgttcaactcaatccacagagcaccaaatgtttaatgggagccaaggtaggactgagcattgaacttccagctatgcaactcgcagggcacaatttcaagtgtggaaaccatctgtaggcaagctcttttaaaaacatgaatttanacaccgtaaattctaatgcaacacttttgcatttct

SEQ ID NO: 4071 - DNA, 651 bp, Homo sapiens
  misc_feature 510, 512, 534, 542, 595, 617, 629, 638: n = A,T,C or G
acattgaagctcgggtgacaaaaggtgagacactcacctagaacagtgccgtgctgctgctgggaagttgctttacacaacacaggccacatgggaaaggccccagcagccttcagctccttcctttctccttaaagagcaacagggcttattcttgtttttcttttttcaaaagtgtggcctttgggctctgccatctggggtgtggtgtggtatgtgggaagaagttcagaggaaccgttggaaacgacgttaggcattttaccttttcagtaacattttatacatctacttgtcaatgtatttgagacattcacagccaaaagcctgggactctttgtgaaggtcctcctcacctctatctttctttctctctctctcaaactttccttaaagttctcattgcctttgcactgcttctgtgaacagtctttgtctcctccccacctttggtgggaagtgcggggcagtcctggtcaagacactcatgccctgcaatgtggctgccananaatgttgttgctaacccaccantttcttgntgatttggagaggtcaaggccaggccccacttggcttgaagggacattttcanacttttttttctgcacttggantggctatgcctntcatatttncctaataaactcc

SEQ ID NO: 4072 - DNA, 652 bp, Homo sapiens
acgcgggagccaagaggcggataagtgccccaccttagaacagtatgccatgagagcgtttgccgacgcactggaggtcatccccatggccctctctgaaaacagtggcatgaatcccatccagactatgaccgaagtccgagccagacaggtgaaggagatgaaccctgctcttggcatcgactgtttgcacaaggggacaaatgatatgaagcaacagcatgtcatagaaaccttgattggcaaaaagcaacagatatctcttgcaacacaaatggttagaatgattttgaagattgatgacattcgtaagcctggagaatctgaagaatgaagacattgagaaaactatgtagcaagatccacttctgtgattaagtaaatggatgtctcgtgatgcgtctacagttatttattgttacatccttttccagacactgtagatgctataataaaaatagctgtttggtaaccatagtttcacttgttcaaagctgtgtaatcgtgggggtaccgattatcccagcaaaacaaaaataagcttttattttattaacaatttcgttcctcttgtgcccaatcaaatcttttaggaacaaactgcaagaaaagctaagaatgttttaaaagtgaactaaatacagacattgct

SEQ ID NO: 4073 - DNA, 651 bp, Homo sapiens
  misc_feature 35, 61, 74, 77, 95, 101, 109, 133, 137, 144, 156, 167, 188,210, 238, 318, 350, 373, 379, 393, 396, 410, 413, 446, 461,468, 472, 473, 480, 481, 487, 496, 499, 512, 517, 528, 537,541, 551, 555, 570, 578, 581, 584, 589, 593, 619, 634: n = A,T,C or G
  misc_feature 646, 649: n = A,T,C or G
acttttttttttttttttttttttttttttccaanattttgttttattttattatggctanaaagacactgttntanccaaaatcggcaatgacnctaaanaaatcctntgtgcttttcaatatgcaaatatntttnttccaanagttgccctggngtgacttcaanagttcatgttaacttcttttntggaaacttccttttcttagtngttgtattcttgaaaagcctgggccatnaaaagcttgcctaagttttgggcagtgaactccttgatgttctggcagtaagtgttttatctggcctgcaatgagcagcnagtccatcctggcaggcggttgtggtggtttnaaaagtttggacaggtcctcctnagggancgggggttctcctnggntctggccctgcatnttntcctgctggcaacgctgctgatactgatgtttntgctgctgtttgttnactaatnttcnnatgtatnngttganttaacaatnttntggctcatttcanccctntgtccataacnaaactgganattnttccccaaangatngctgctggcaagctnaccaattnatnttnttttnaaanactgacttttttcaatttccccattnggacttgtatcaaantgtggaattttnaanta

SEQ ID NO: 4074 - DNA, 651 bp, Homo sapiens
  misc_feature 571, 580, 627, 634: n = A,T,C or G
acgcgggggggcgactgagcggacaaacggaagtgtaggttacggtctgagacatcaccgccaagctgggcatcggggagatggccgagactgaccccaagaccgtgcaggacctcacctcggtggtgcagacactcctgcagcagatgcaagataaatttcagaccatgtctgaccagatcattgggagaattgatgatatgagtagtcgcattgatgatctggaaaagaatatcgcggacctcatgacacaggctggggtggaagaactggaaagtgaaaacaagatacctgccacgcaaaagagttgaaggttgctaataatttatactggaatctggcatttttccaagccaagagaagatcgaatggctttttgcagctaactactatgtgtagacaggttttatattataaagtatgcattcttatcacctagtatatagttagtttgtagagtgatttccccccagtttcttgaacatggtatcttcacatcttggaccttggtcagttgtgctattcattattaaacactaaaactttggcggttcttgcataacattgtcanattttttantgtatttctgtgaagtcattttttttcttgcattccttttgtaatanttgctgnttggataaaagttgatg

SEQ ID NO: 4075 - DNA, 650 bp, Homo sapiens
  misc_feature 278, 289, 488, 526, 546, 603, 621, 624, 629, 647: n = A,T,C or G
acaaatcatatgttaggtcacagaacaggtcttactaaatttttaaaaatcaaaataatatcaagcatcatttctgattacaatggaaaaacctaaaaatcaataacaaaaggaatattggaaactgtacttttttttttttttttttttttttggatcaactgaggagctgctggaggagtctcgtcactttcactctcactctctcgcttccgcttcgcagtttttgctgcttcggcaactacctgcggggcttttaccacttcagcaaccacctnttttttggcanactcactgtagtcaacatactcctgcttccaggtggcaggtgtgctgtctgtgggcttcccatgcttgtccaaaaggccctgcttgatcatcagcttcttctgacttgcctttggacctaaaccccacttccgagggtaagtgtctctctccatgatcactctcttgatcttggctactataccatggtccgcaggtanagatgaccgctgtggtcattaatgcaatagccatgcanattgcttctcctttggtggngataacccaatctcctgattgacctaatgccgcctcatatcgaaaaacacctggaancataatcttggcccatancanatggnatttactgccctgctttnata

SEQ ID NO: 4076 - DNA, 625 bp, Homo sapiens
  misc_feature 554, 591: n = A,T,C or G
ccctaatgataaccatttttagaattcaatcatcactgtagaatcagagtctgtaattcttttcttgattagagtggtaggacactgtaatactgttcctccatgtttccatgcatacaatgttatgtgttactctacactgtaaatgcagtattcaaattcacttgagccgtgggcctggaagttagagactagcttttaccttattactttcaatgattttatctgagttaagctgataaatctcttcgcggctgaatccaaattcttcaagtatctcctcagtgtgttctcctatgaaaggatcccttttgaaagaagggatggctggggtgtttaacagcagaggtgcagggcgggggctcacgtcctgctcctcactggtgataaacgagccccgttccttgttgtgatcatgatgaacaacctcctcaaaagtcagaacccgtgtacgatatttgataattatatttatatttcaccacctaaatgtaatgttgattcctcaagaatgaaatgaaggcctacattgaaatatgttttgtataaattgncatgttgaacagcattttagcatggtaagtcccttanctatatgaatttttggcatgtttcaaaagagatc

SEQ ID NO: 4077 - DNA, 650 bp, Homo sapiens
  misc_feature 153, 251, 517, 522, 527, 539, 561, 563, 580, 586, 592, 593,601, 615, 623, 628: n = A,T,C or G
acttttttttttttttttttttttttttttggccatatcattcatgaccaaaaaaaaccaaaaagcaaaaaacaaaaacaagtcccatgtcctactgactctagttcttccagtcgttatcctctgctgtctctctggcatcctatgaatcanatcaagcccatgctgttgttggtttttaaggtttctttcaataataggctaaggaaagacatgtttttctcttttaaatctctgcaactccaaagtanactccttcgaacgtatttaatttggccttttcagctttcttcttgcccagctctgtcgaattcatgggtgtgtgtgcacatgttggtttcactcacccagagtaattttgtgagcatgcatgtgctttttaatttctgcttgaatgtttgcctgctgtgttgcagcttctaaagacattgtcaccgaatgtgtgtgactcaaagatcaagagtgaggctaaactgcgaccccaacatcacttcttcatggaaaggtgttggcgctnatgtncctcntggaaggatcanactgggaaccacagaggaaggntnaggtgggatgtgggagntcaaancatttnnctaaagtnccttaggcttttgnaacactanattcnaaatatgagcctatcggttccc

SEQ ID NO: 4078 - DNA, 519 bp, Homo sapiens
  misc_feature 62, 183, 189, 231, 241, 351, 453, 516: n = A,T,C or G
actttttttttttttttttttttttttctcaagcacgtgcactttattgaatgacactgtanacaggtgtgtgggtataaactgctgtatctaggggcaggaccaagggggcaggggcaacagccccagcgtgcagggccagcattgcacagtggagtgcaaaggttgcaggctatgggcggntactantaaccccgtttttcctgtattatctgtaacataatatggtanactgtcacanagccgaataccagtaacaggatgaatccaatggtcatgaggatgcccaaaatcagggcccaaatgttcaggcacttggcggtggaggcataggcctgggccccggtcacntcgccaaccatcttcctgtccctagacttcacggagtaggcaaatgctatgaagcccaaacagcaccagttcaagaagagggtgttgaacagggaccaaacnacatggtcggcacggaggtctcgcttgtggatgttgatcaccggtggaccttggaaggatggngct

SEQ ID NO: 4079 - DNA, 328 bp, Homo sapiens
  misc_feature 23, 78, 97, 201, 209, 238, 240, 242, 279, 287, 290, 293,303, 308, 317: n = A,T,C or G
acaaatgttttttattcaaaaangcaaaataaattatctgtaggcatggacaatgacagcagtaaaccattatatatnttgtcaactgaaaccagtnactgatggttatagtgattttcagccagcctttttcttcattttctccaactgacttctctgaagttattggtgaggaacactgccttgggcttcctgtcacanttcattantaaaggttaagcactagtctaggagttanancntgccacctcccataccacctaccattccacccattgnacccattncanggnccttcttttntttangaatatttntgactacaact

SEQ ID NO: 4080 - DNA, 536 bp, Homo sapiens
  misc_feature 474, 482, 484, 488: n = A,T,C or G
acacaatggtttattaaaggaatgtatggcccacatcaacctagcaaggattctactggtaaaccttcccatggccaaaggaaaaacaagcaggagttgagtggctggggtggggtgcaggcaatggagagagggcagaaggatgtagaagctgaagggggctagaagcttactcctgagtttcttccttctgtcttcaaatctttacttcttatggccaaagacccagctgtttcataggctggagatgcactcttctagactgctcgagacagccagagacaggggaggagggaagaaggatactgtggaaagggatggcggggcaaacatttagagctagaagccactactgggccaatgctaaagtttctgtctctaagcctaaaaaagccagtgtagtagggcccttatcactcttagtttgctaggtttcccctctgaaataatgagcagatttagccaggctagcanaaaggaanangacngggctgtgcaggaattagcaaaatcttgattcttgctctatggtcggt

SEQ ID NO: 4081 - DNA, 593 bp, Homo sapiens
  misc_feature 576: n = A,T,C or G
acttgcaatggggccaccatgttttctcccattagccagccccattcatcatggatgctatgagtcagccagggggcaggcttgccatgggttttgtgacacccccatccaaagctcaccatgttgcatcccgcccattgtctgtgggaccccaagtttctagccatgtccagttcttcacaaaagctggatgcacatgccaaggcaagccatccacagctgctgctggaagggtggtgcagatctaacagttggagacattggccacctcagcataggtgtgagcccagtccacaatgttgttggagcatgccaacctgtggctgagcaaataactcccaagaatttggcagacaattccggcccttggaccttggatttattgatggcccaactgcacactgcaaatgctgtcacaagaggggcaccaccacttctaaatctcatcctgatgactacaccaattatcaggttcaagccccagctgaggtctgaggagagtgggttgatgaaggggcagggagctggaagaacacttgggagacagcaggtagatgagacacggctttattcaanaacccccgcgtaccttg

SEQ ID NO: 4082 - DNA, 650 bp, Homo sapiens
  misc_feature 644: n = A,T,C or G
actagagcgcagagtttcagacttggatttataaatgctttcaacgtgtggtgtttggaaaaggagaagacatcatctgattttcaaaacctgaagtttttctcaggactgaagtcaaaatcgtaactgccacagagggaaaagggaagcttttccccttaattgttcatctgcgtcagaaagtccagtatccctgagataggaaccactgtaattagaagattggaatgaacaggtttctcccaaaggaagattgtttgttgctgaattatgcctactgccctgatcatcaggtataaactttgcatcttccaacctaatgcttggcagcaccaagacgtttcagtaatggttcatcataaacccagcattctccatcttcatgaaataaccttgtctcccactgaatttccttctccttcctttctcgggcttctgctctttgtctttcttcaagcctgtgctttgcttcagttgctgcatcaatgtctctgatttttaagttgaaagtgacatccttccaaaggctgcgggattcatactcgttctgatcttccaacttcctcactttcttcttgattataggcaacttcttggtatctacaaagactgtattttcccctgttgcatattttgcatacatnacacca

SEQ ID NO: 4083 - DNA, 650 bp, Homo sapiens
  misc_feature 53, 136, 166, 293, 312, 355, 369, 413, 454, 457, 498, 522,524, 532, 545, 554, 555, 574, 590, 595, 611, 614, 627, 633,638: n = A,T,C or G
actttttttttttttttttttttttttttttatataggtcccatttttactgngcatacacatatatacaatgtattttaaaaatgggctttacaatatgtagtttgatcacttggtttacaactaaatatattgngaacattttgtcttctacaacagttaaaanaattgaatagcttggaggaaacacaatttattaagcaatcttgttggggacattgaggtataattttttttctaaggaggcttcattctttttataatgcctttgggaaaaaaaggggagttcttgncttatatagctttctatanatgatggaaacttgcccttccatttagcctttttacttgcttntctaccaccacctnatcaccaatcaagtaacccattttgtttttcaacctctctcttntatttgcttcctctttcctacccagtctccctgcacacacncanatgggacttccattccttcagcactctgggttcctcccctnaaagatgttttctttcctttaaananactatttnaattgatttgatnaactctacnnaaaactgtattcttaaggncccattaaaattaagntcaantaatctgaacatatanttnattctttaaaaanaacatntttanaaaaccttgggt

SEQ ID NO: 4084 - DNA, 363 bp, Homo sapiens
acgcgggcggggaggctttggagggcgaggaggcttccgaggaggcagaggaggaggaggtgaccacaagccacaaggaaagaagacgaagtttgaatagcttctgtccctctgctttcccttttccatttgaaagaaaggactctggggtttttactgttacctgatcaatgacagagccttctgaggacattccaagacagtatacagtcctgtggtctccttggaaatccgtctagttaacatttcaagggcaataccgtgttggttttgactggatattcatataaactttttaaagagttgagtgatagagctaacccttatctgtaagttttgaatttatattgtttcatcccatgt

SEQ ID NO: 4085 - DNA, 517 bp, Homo sapiens
  misc_feature 353, 480: n = A,T,C or G
acaatgaactgcttttcctcaagcaataattgtttccaacttgtctgggaattgtgtgtctggtaactggaaggccttccactgtggcaaatggaggcttttcactgcctgtagagacaatacagtaagcatagttaaggggtgggtcagaacatgttaagataacttactgtatatgtattcccttgtattttgttaaagctggaacatttgatatttttccatttatttatgaaaaaatatgaacctattttcatttgtacaaaactttggatgaaaagatacgtcaaatttcatttaatcacttggaggaaaatccaccaactccatcaataccacccaaagtgttttangcagtgaataaaatcaaaataatgcatcttaataaattccagctgttaaaagaacaaacttagcaatatataacagtttgctaacaggatttttgactattcactttgggagttatttttaaaaatncacttttttactgatcttactacataccaggcactgt

SEQ ID NO: 4086 - DNA, 654 bp, Homo sapiens
  misc_feature 542, 593, 601: n = A,T,C or G
acggggggcgcgtcttgttcttgcctggtgtcggtggttagtttctgcgacttgtgttgggactgctgataggaagatgtcttcaggaaatgctaaaattgggcaccctgcccccaacttcaaagccacagctgttatgccagatggtcagtttaaagatatcagcctgtctgactacaaaggaaaatatgttgtgttcttcttttaccctcttgacttcacctttgtgtgccccacggagatcattgctttcagtgatagggcagaagaatttaagaaactcaactgccaagtgattggtgcttctgtggattctcacttctgtcatctagcatgggtcaatacacctaagaaacaaggaggactgggacccatgaacattcctttggtatcagacccgaagcgcaccattgctcaggattatggggtcttaaaggctgatgaaggcatctcgttcaggggcctttttatcattgatgataagggtattcttcggcagatcactgtaaaatgacctccctgttggccgctctgtggatganactttgaaactagttcaggccttccagttcacttgacaaacatgggggaantgtcccancctggctggaaacctgccagtgataccatcaagcccttgatgtccaaaaaaaa

SEQ ID NO: 4087 - DNA, 656 bp, Homo sapiens
  misc_feature 177, 178, 254, 296, 305, 327, 335, 444, 449, 545, 569, 578,585, 591, 617, 625, 627, 639, 644, 648: n = A,T,C or G
acaaatgatgaaacggaaagacgaaggaaattttccatttttgaagaaaaagtgttcagtgttaatggagccaggggaaaccacatggactttggtcagctctatcagttcttaaacaccaaaggatgtggggatgttttccagatgttctttggtgtagaaggacaatgacatcannagtagttgaaagtatcttgccactgttggtctttcgatttttttttcccactttttcttgaaagattaagtaattntattttagttccattctaaaatgttggggagtggggcacaanaaaaaatantataagctgaaatgcatctgtnaaaaatgncatgattgaaagcagaactgagtttcaaattacaaccttaaaattgttgttagatatttcttcacatatcagctgcccattttgaaaaagaaattatccataaagggtnatgtnggtgctccaatttgccagccattcccaacccccttctcccttacctgccttcactaaagaacccagaaaagctaatttgctccccctttcaccctnttgttgcaactaacaactctcagnggcctcaangacacancttttngccttgggaaattttgggaaaacttntacttccngntaaagatacatntgcanttanggccacct

SEQ ID NO: 4088 - DNA, 657 bp, Homo sapiens
  misc_feature 367, 415, 447, 451, 459, 490, 497, 547, 550, 576, 579, 600,609, 619, 631, 653: n = A,T,C or G
actcttttaatgtgtttatattggaggtgagggtagaatgttttataaaaggaaaatggggatttgcttttgattgtaggtctttgcagatccgctggttcctgagtgataatacacagtgctggctgtcaggagacagtctccttgtttattagcaatgaccagcttggatgacagatgacatctgctggatggcaagtgggagatggggaaatcggatcttggaagacaagaaaaaattaaaaaaaaaaaatttttgctttaacagccttctcttcatgattatttttaaaagcaaatgttgcctgagaagaattttactttgcacagcctggtaaagctcttctggacagaaaaataaaaacangaaataacccaaacccacacactttgtgattaaacccctccccacaanaataacaaaaaacaccctcaaaggcggtcccngttnaaaactantctggataaactggaatttaccctaaaattnatacccnagatttaaaaacaccgctgcaataatcacattacctttcataccattctnatnaccttatttacaaagatactaaagcnacnatccctttccaattcataaantggtttacnttgaaatggntccccaattggncttatctttggaacagagaatncctt

SEQ ID NO: 4089 - DNA, 454 bp, Homo sapiens
  misc_feature 14, 454: n = A,T,C or G
acgcggggactgcncaggcgcttacagtgcaccaagatggccgcccccgtggatctagagctgaagaaggccttcacagagcttcaagccaaagttattgacactcaacagaaggtgaagctcgcagacatacagattgaacagctaaacagaacgaaaaagcatgcacatcttacagatacagagatcatgactttggtagatgagactaacatgtatgaaggtgtaggaagaatgtttattcttcagtccaaggaagcaattcacagtcagctgttagagaagcagaaaatagcagaagaaaaaattaaagaactagaacagaaaaagtcctacctggagcgaacgttaaggaagctgaggacaacatccgggagatgctgatggcacgaagggcccagtagggagcctctctgggaagctcttctctgcccctccattcctggtgggggcn

SEQ ID NO: 4090 - DNA, 651 bp, Homo sapiens
  misc_feature 559, 572, 628, 630, 631, 646: n = A,T,C or G
acaaaatcaaccaggtctgaactgattggtgataagagcacacagatcagtccttccttaaggaaacagtttcctccctgatgccctctttggtcactatgcagatccggagtgcgtccccagtgtactagaacaggttgacaacaggagttggtctcagcaggagccctgctttctgctcctctacctccagactaagctccttcatggcaagatggagatagagcaaatcaaaggccagatgtttggaatatctgctgaatgatcttatgataacctaacttccagtgtgtccggaattggtgggtccttggtctcactgacttcaagaatgaagctggggaccctcgcggtgactgttacagttcttaaaggcggcgtgtctggagtttgttccttctgaagttcggacgtattcggagtttctgctttctggtgggttccgtggtctccctgctcaggagtgaagctcagaccttccagtgagtgttacagctcttaaggcagtgggtctggagttgttctttcctccggtgggctcgtggtctcgctgcttaanaatgaagctgcanacttcaaggtgagtgttacagctcataaaggaagtgtggacccaaagaatgagcantnncaaaatttattgcanaggga

SEQ ID NO: 4091 - DNA, 657 bp, Homo sapiens
  misc_feature 648, 654: n = A,T,C or G
actgctatctcgcattcttctcaggttgccaggaaatgtttctctaaccctttcaaaagtgtttgtaaaccaagttcaaaggaaaatagacagaatgatttccaaaattgcaaaccacgccatgacccatatacgccaaattccctcgttatgccacgaccagataagaatcaccagtgggtattcaataagaactgtttccctcttgtggatgtagtgattgatccttaccttgtatatcatcttcgaccacatcagaaagaaggaatcatattcctttatgaatgtgtaatgggaatgagaatgaatggcagatgtggagctattcttgctgatgaaatgggtttagggaagacattgcaatgtatttcgctcatctggaccctgcagtgtcagggaccctatggaggcaagccagtaataaagaagacactaattgtcacacctggaagcttggtgaataattggaagaaagaatttcaaaaatggctaggaagtgaaaggatcaagatatttactgttgatcaggaccacaaagttgaagaattcatcaagtctatattttattctggtcttattatcagttatgaaatgttacttcgttccctggatcaaattaagaatataaaatttgatcttctaatctgngacganggg

SEQ ID NO: 4092 - DNA, 654 bp, Homo sapiens
  misc_feature 572, 604, 616, 625, 633, 643: n = A,T,C or G
acagcacttccgaagagtttagttggccctttgctggttgggctgagttttttatttttaagtgtttgtttttcagtgcaataatttttgtgtgtgtgtgattcttatcagaaagttgaattgttttctgcctacaccgttcatcagccccataacccaggaaggaacaggcattgttagcatcagattatacctcattattaaaaggaggcatggccacacatgaagaaatggtcattctacttcaaagaaattgagccagcactatctgtacgagtctgaggcggagggagtaatggcaggacaagcgtttagaaagtttcttccactctttgaccgagtattggttgaaaggagtgctgctgaaactgtaaccaaaggaggcattatgcttccagaaaaatctcaaggaaaagtattgcaagcaacagtagtcgctgttggatcgggttctaaaggaaagggtggagagattcaaccagttagcgtgaaagttggagataaaagttcttctcccagaatatggaggcaccaaaagtagttctagatgacaaggattatttcctatttanaaaatggtgacattcttggaaagtacctcggnccgcgaacaccnctaagggcnaattccancacactggcnggccgtactag

SEQ ID NO: 4093 - DNA, 299 bp, Homo sapiens
  misc_feature 176: n = A,T,C or G
acgcggggttgctttattttccatcaaagccctctgagaagtgagacctcagcaattccgggagccacatagagacagacttggcaagggaccccctggttctgagccagtagctgccatctggaaattcctcttttagcctctccttagaggtgaatgtgaatgaagcctcccangcacccgctgaatttctgaggccttgcttaaagctcagaagtggtttaggcatttggaaaatctggttcacatcataaagaacttgatttgaaatgttttctatagaaacaagtgctaagtgt

SEQ ID NO: 4094 - DNA, 585 bp, Homo sapiens
  misc_feature 23, 24, 449, 454, 531, 573, 583: n = A,T,C or G
acattcgtgttcatgtttacaanntctctccatatatttacaaatttcacgataaaattgtgggggaacaaaattactagaaaaaaataatgagaaaatatacaccacatattattcaaaaacaaatgtacattggtgattctgaagcttatatcggagcagacattaaagacaaattaaaatgttatgactttgatgtgcatacaatgaagacactaaaaaacattatttcacctccgtgggatttcagggaatttgaagtagaaaaacagactgcagaagaaacggggcttacgccattggaaacctcaaggaaaactccagattccagaccttccttggaagaaacctttgaaattgaaatgaatgaaagtgacatgatgttagagacatctatgtcagaccacagcacgtgactccagtcagtggtcctggtcccactgtcccantgtangttagtattccttcacatcctctccatggcttaagaatgtcccacttcctaaccgtgactccaactgcatctctacntttaggaacagagacccgccttaagagactggatcgcacacntttgcaacanat

SEQ ID NO: 4095 - DNA, 430 bp, Homo sapiens
  misc_feature 343, 358: n = A,T,C or G
acgcgggggtcgcgcgcgtggatctgccgccgggttgctgtgcgactattctccgggagccgtccgtgtcaccgccggaacctggcgcaggttaattatagaaaatgccaagtaggaaatttgccggtggtgaagtggtaagaggtcgatggcctgggagttcactttattatgaagtagaaattctgagccacgacagcacctcccagctttacactgtaaagtataaagatggaacagagcttgaattgaaagagaatgatattaagcctttaacttcctttaggcaaaggaaaggtggctcaacttccagttccccttccagacgccgagggagtcgatnaaggtcacgctcccnatcccccggtcgaccacctaaaagtgcccccgatctgcttctgcttcccaccaggccgacattaaggaagca

SEQ ID NO: 4096 - DNA, 534 bp, Homo sapiens
  misc_feature 411, 439, 443, 493, 513: n = A,T,C or G
acaggagttgttgcatattccatgaggctggtgtcgggaagcagggacccacagttgccaggttgtccatctctgagccaatttccctccacaacccaggggtttcagtctcatatcaactatcatgtttgaaacagaaaacaggcaaaatgtttggctaaaataaaatgaaaacactgcagggaagagaactgagtgtgctggtggacaggagccctgctcacctgtgggaagggcagggccagcaagggcagcagagctccctgggggcagctaggctgtgtgtgcatgtggccctacagctggtcccaggggagatgcggggacaggggacagtccaggcagacaggtacttttttttttttttttttttggccgtttccacacctgccctttattggtctcttctancaaagtggctccaggcccttcacgcctntcanacaccacccatgagggtttaggaaggtgccatcattctgtgaaggcccanaacttacccaagtcttggancccaagttgaatcaccaacca

SEQ ID NO: 4097 - DNA, 656 bp, Homo sapiens
  misc_feature 22, 23, 24, 261, 465, 470, 505, 513, 522, 544, 545, 554,555, 588, 595, 605, 606, 647, 652: n = A,T,C or G
actttttttttttttttttttnnnttggggtataaatactatgctttaatgagccccttaaatagaaattccactacaaaaatacagaggagatagggtgtttcctgtatccgcctcattcccatagaaaactataagggaagaaatagaacttggaattaaagcagcagcaaggcgaggtgagaatgcgatttctaggccatcttgttgggactgatgaacagcatctctgatctcatgatttaacatctggttatccanaagggatgggattggcctaaaaaaaccgatcaatttctggattgtttttgtttcttaatccttcaaatgacaagaagcaaaaatatttgtagaaactaagcaagacaagagttggagcagttaacaccactatctgcagcagaaactcagaccttcttagtgaacttaagggctgaagtgtgaaagctgaggctgcaagtgcanatccnaaaaaaaaaaaaaaagattagacagaaccctcctntaccccanatccccctntgccctgcctttgaaaatgccnncaatttcanngggattgaaaatggtattgtgggatctcttttnttgggantgatcctcanngaaatattcttgggggcccattttcccttaataaactcctnaaaanggga

SEQ ID NO: 4098 - DNA, 541 bp, Homo sapiens
  misc_feature 509: n = A,T,C or G
acttgaggtaacagtcatggagatcgagataacgaccatatccctcttcatctgtgaactccaccaagttttgtgcctcttcacttggattctctcgagccttcaggagttcctcaaattccactgacattggcacacagatctcatttgggtgcttccggtggaattcctttatttgcttgagtctattatagaattcagcaaactcattgggtcctgaaatggcattgagctcctcctttcgtaatccatccttatcatcatacaaatccctcaggttcccactgacctccatatacctatcttgcatggcccgagtgcggtgatcagaattgatctggtcccggagcgtggacttcttggtgagcatctctttagccacgacgtccatgagccgttccttctcctcatgatagcgccgctgctgctccagtattgtctccatcttcccttagtcgcggcttctcaattcagaccaccaacacggccggaacaactcctgccgccancgcgcctgaatccccacgttgcgcccccgcgt

SEQ ID NO: 4099 - DNA, 151 bp, Homo sapiens
acatgatcagctctttctatttttactcgtaaaaattatggaaatgaataattttgctaacaactttgaaatttcaaacttctggaaaatatgaaaatattcattgttcattatgaatttaaattgtaaggtatgaatgtgatttgtctgt

SEQ ID NO: 4100 - DNA, 655 bp, Homo sapiens
  misc_feature 650: n = A,T,C or G
actgcgagcagttcttccaattcgatgaatataatcctctgaggagttagggtagtcataattgatgacaaatttcacatcttccacatctagccctctggaggccacatctgtagcaatcagaataggagcttttccatgtttgaattcatttagaacccagtcacgctcttgttgactcttgtcaccatggatacccatggcaggccacccatctctcctcatttttctggtaagctcatcacatcttcttttggtttccacaaaaacaatggttttattctccttctcactcatgatctcttccattagacgaataagtttttcatccttttctacgtcatgacacacatccacaatctgaagaatgttgtggtttgcactcagttcaagtgcaccaatgtttatatgaatatagtctttcaggaaatcttcagcaagctgtcttacttcttttggccaagtcgcactccacattagaagtttgcctatcaggtcttatttgatccacaatcttccttatttggggttcaaagcccatatcaagcattctatctgcttcatcaaggacaaggtaggttgttcttctcaagattggtttttccacactctaaaaagtcaatcaagtcttccaggtgttgcaatacaanatttc

SEQ ID NO: 4101 - DNA, 655 bp, Homo sapiens
  misc_feature 650: n = A,T,C or G
actggcctttatgtgtctattcatagcagtggactgggctgctcgcaccagaccctccaattcagcaccactgaaattcttggtctccacggccagttctttaatgtctacatcagcagagagtaactgatgccctctcattcttgctgtgtggatgtgaagaatctgtagtcggcctttctcatctggcaagcctatctccattttaacttccagtcttccaggtctaagaagagcctcatctatcagatctggtctattggtcattccaatgactaggatgttgtttagctgctccacgccatcaattttggacagcaactggttgacaacagtgtcatgaactcccgtgctaccagccatgctccctctctgcttgcagatggcatcaatttcatcaaagatgatgatgtgcaaaccactgttagcaccaagcctcctttgctcctcttcagcatcagcaaaaagtttgcgaatgttagcctctgattctcccacatatttgttaaggatttctggcccattgaccactttgggctctcttgcattcaacatcttgccaatctgtcgagccaagagagtcttaccacaacctggggggtccatataacaaggatgcctttaacatgtttacaacccatctgctcaanaatct

SEQ ID NO: 4102 - DNA, 654 bp, Homo sapiens
  misc_feature 383, 384, 512, 517, 553, 554, 555, 565, 588, 608, 612, 641,643: n = A,T,C or G
acctataaatgttgttgagacactgagaacacgtggggcccccacccggatagtgagaaaagtagcccggaacctgggcaaggccacttcaggtgtcctcgttgtgctggatgtagtcaaccttgtgcaagactcactggacttgcacaagggggaaaaatccgagtctgctgagttgctgaggcagtgggctcaggagctggaggagaatctcaatgagctcacccatatccatcaagagtctaaaagcaggctaggcccaattgttgcgggaagtcagggaccccaaacggagggactggctgaagccatggcagaagaacgtggattgtgaagatttcatggacatttattagttccccaaattaatacttttataattnnctatgcctgtctttaccggaatctctaaacacaaattgtgaagatttcatggacacttatcacttccccaatcaatacccttgtgatttcttatgcctgtctttactttaatctcctaatcctgtcanctgangaggatgtttgtcacctcaggaccatgtgataattnnnttaactgcanaaaattgtaaacatgtgtgtttnaacaatatgaaatctgggcncctngaaaaaaagaacaggatacagcatttttnanggaataaaaaa

SEQ ID NO: 4103 - DNA, 655 bp, Homo sapiens
  misc_feature 592: n = A,T,C or G
acaacaaaaagattaggaagcaaaatgtgaataagcttgtattcagaatatacctatatgtgtgtgcaaagacaatacactcatcatatacctcacttaggttcctttatgatgcataattccttaatcattcatttgtgaaacaagaatgaatattaagaaacatgaaatccaaattgcacttattttcacaatatcaatgctaaactcaaaatagcaacttcattgactctcaatggtaaatttcaaacatggaaagcaatcttaatttttttaaccctttgactagggtctgtaaaaaacggtggattattttactgtacagcattctggaataaagcaagagtgttcattcacacacacagtagcttcaaaactgttcgatctgtttgttcccatgtagttttctaaagatggaaaaaaaggacttttggtcatcaagactactgtggccatattagattactggaacatctaagcatcagtgtgtgaccatgcgaacaaaagacttcggggagtgtctatttttaaaaaggtttatgtgtgtcgaggcagttgtaaaagatttactgcagaatcaagccccttttangcttaggaccaggttctaactatctaaaaatattgactgataacaaaaagtggtcttaaatgt

SEQ ID NO: 4104 - DNA, 654 bp, Homo sapiens
  misc_feature 413, 477, 536, 552, 556, 589, 609, 620, 632, 652, 654: n = A,T,C or G
acgcggggtaagagctttcgagtatactgtattatccttgtaaaacccaaagatgtgagtctttgggctgcagtaaaggagacttggaccaaacactgtgacaaagcagagttcttcagttctgaaaatgttaaagtgtttgagtcaattaatatggacacaaatgacatgtggttaatgatgagaaaagcttacaaatacgcctttgataagtatagagaccaatacaactggttcttccttgcacgccccactacgtttgctatcattgaaaacctaaagtattttttgttaaaaaaggatccatcacagcctttctatctaggccacactataaaatctggagaccttgaatatgtgggtatggaaggaggaattgtcttaagtgtagaatcaatgaaaagacttaacanccttctcaatatcccagaaaagtgtcctgaacaggggagggatgatttggaagatatctgaaanataaacagctagcagtttgcctgaaatatgctggaagtttttgcagaaaatgccaaaanatgcttgatggaaaanaatntattttaataccaaatctgttgggctttctttnaaaaaagcaatgacttattncccccaaccangttagtagaaanggctgttgttcaaatatggntn

SEQ ID NO: 4105 - DNA, 655 bp, Homo sapiens
  misc_feature 384, 385, 397, 455, 513, 638, 644, 651: n = A,T,C or G
acctggccatcctgggcagtgtgacgtttctggctggcaatcggatgctggcccagcaggcagtcaagagaacagcacattagttccagaagaaagatggaaattctgaaaactgaatgtcaagaaaaggagtcaagaacaattcacagtatgagaagaaaaatggaaaaaaaactttatttaaaaaagaaaaaagtccagattgtagttatacttttgcttgtttttcagtttccccaacacacagcagatacctggtgagctcagatagtctctttctctgacactgtgtaagaagctgtgaatattcctaacttacccagatgttgcttttgaaaagttgaaatgtgtaattgttttggaataaagagggtaacaatagtnnaaaaaaaaaaanaaaaaaaaaaaaaaggtccctgcctattttagaatcctagagaacatttcattgtaanaaactagtccattatttaagtgtcccagtatttttcatttcagtgggtccaagatgcnaaggtttccagacacaatcttggtctctaatactgctccagggtgggatatcaattctgtcaccatgatttgcaatgatgataaccgttccctttaatgaaacattttttccaaatgtccacatntcctgnaaactgnggag

SEQ ID NO: 4106 - DNA, 330 bp, Homo sapiens
acaaacatgacattacagagtatcttataaaatacaaagacaaatataaaaggactatgatgctttaagtctgaaaactattggccaaatatttaggtttaaatttacagttcctgggtatgagaatcatattactatatacatctcccaaaccagtaggtagtattttccaattaaccatgtgtggtatcatcttctacaaagtctttggccatctctgctgtgatcacatcaatatgactaaccttatttctgaactttacaccatagaatttgtcagctgactcaagcagttcaggcctaaaagtagttgtaataaactgagcatgt

SEQ ID NO: 4107 - DNA, 380 bp, Homo sapiens
  misc_feature 141, 185, 219, 223, 263, 276, 277, 280, 283, 302, 304, 306,339, 345, 351, 355, 364, 366, 375: n = A,T,C or G
acgcggggacggttcgtttttgctttagtcaggaaggacgttggtgttgaggttagcatacgtatcaaggacagtaactaccatggctcctgaagttttgccaaaacctcggatgcgtggccttctggccaggcgtctgcnaaatcatatggctgtagcattcgtgctatccctgggggttgcangctttgtataaagtttcttgtggctgatcaaaanaaanaaggcatactcagatttctacagaaactacaattgttatngaaagattttgannganatnaggaaggctggtatctttnanantgtagaagtaatctttggaatataaaagaattnctccangttgantaanctaaaaatnantaaactganctagt

SEQ ID NO: 4108 - DNA, 657 bp, Homo sapiens
  misc_feature 526, 604, 627, 632: n = A,T,C or G
actggcctgctgctggcccgcaggcttctcaataggtttggcatggacaagatctatgaaggccaagtggaggtgactggtgatgaatacaatgtggaaagcattgatggtcagccaggtgccttcacctgctatttggatgcaggccttgccagaactaccactggcaataaagtttttggtgccctgaagggagctgtggatggaggcttgtctatccctcacagtacatccaaaaccataaggaaatattctgatgcccagatgatgaagactggggtgaattaagtccacacatttatttcaagttgttaaagagtttgtgggccacgcaatggtccctcgcatgcaagaagtcaaagagctcctccgtgcaatcctcttctgtatgtgatcgagaggatacacgctcatcacagagctctagccgctcccgggcctttacacatttctccaactgctcgcattgctctctcactgttgttaggggatccactaattcctcctcttcctcttcctcctcctnaggatctccggattcggtaagcatcttttgctcgtcctcatcccatgtcttggctacggttctagattcaacacgaancagcaacagcggcacctacccanttcangatcaaaaaaggacttgtaagggtc

SEQ ID NO: 4109 - DNA, 415 bp, Homo sapiens
acgcgggggcggccaacatggcggaacgcaggagacacaagaagcggatccaggaagttggtgaaccatctaaagaagagaaggctgtggccaagtatcttcgattcaactgtccaacaaagtccaccaatatgatgggtcaccgggttgattattttattgcttcaaaagcagtggactgtcttttggattcaaagtgggcaaaggccaagaaaggagaggaagctttatttacaaccagggagtctgtggttgactactgcaacaggcttttaaagaagcagttttttcaccgagccctaaaagtaatgaaaatgaaatatgataaagacataaagaaagaaaaagataaaggaaaagctgaaagtggaaaagaagaagataaaaagagcaagaaagaaaatataaaggacga

SEQ ID NO: 4110 - DNA, 655 bp, Homo sapiens
  misc_feature 593, 605: n = A,T,C or G
acagtaaggcagtaattccattagcatcctgctgtggttttcttttcaagttagtctttagggaatttttttttaactaaggaaagactaaggtgtataataaattatctatcatgctgaaatgaaggaggaaaacatcctaaagggattcacatgaaattcatttgccccttgtgtaagaacatttttatttccaaactatattttatagaagctttagagtagaatttagggggaaaatccatgcttaacatatctaaactattttaagaaaaaattggaggcattatttcttacttgcatatcagcaatgtgtcagtaaggtataggaacttatgtaaacaatttgttctggaatgcattctttctttaaatggttatatttgggtaatcctaataaaatggacgaggagtgtaaaggttatgcagttgtttttcaaaagcaattttcatggcattttcctatgtggaaaattttcttttgtcatctttctatggtaaacaattttgacaatttcatttccgtctgtcccatgccaaatcatgaaagccttttccagaggatatacctattgggcatttgtccctcaaanaatactaagccngtggtgccttttatttcattgaacacattagtttttattaacttaacagc

SEQ ID NO: 4111 - DNA, 573 bp, Homo sapiens
  misc_feature 495: n = A,T,C or G
acgcggggagccgggtgctgatgcgagtcggtggcagcgaggacattttctgactccctggcccctgacacggctgcactttccatcccgtcgcggggccggccgctactccggccccaggatgcagaatgtgattaatactgtgaagggaaaggcactggaagtggctgagtacaaaatcccctttgttgaaaaataaggggctttctaaactaataaaaaaggaagttttcaaaaattatagtttattaaaacaacttttttggcaaacaaagttacttcaggtgaggaaattttatactgtgaataaaattccaaatgaatcttttcttaaaactttttaaaaaattatgtgccagtgtatactaatgctatagattcttgtcttagaagtttttaaagcattctgttaaatgcccactgaaacaatgggactccaaaaatatagtcaataatcatgataaaaaattataatatgattatcaagtgaagcangtattgaagaaataaaaattctcacttgctcactggcaatttcttttctaacagatattattggagaaggcctgaagt

SEQ ID NO: 4112 - DNA, 277 bp, Homo sapiens
accataccacttataaagtggaaactcttggaccaagatttggattaatttgtttttgaagttttttgtatataaatatgtaaatacatgctttaatttgcaatttaaaatgaaggggttaaataagttagacatttaaaagaaatgattgttaccataaattagtgctaatgctgaggagaactacagtttttcttttgaatttagtatttgagatgagttgttgggacatgcaaataaaatgaagaatgaaaaaaaaaaaaaaaaaaaaaaaaaa

SEQ ID NO: 4113 - DNA, 654 bp, Homo sapiens
  misc_feature 477, 592, 593, 613, 614, 617, 618, 621, 634, 637, 642: n = A,T,C or G
acgcggggaggcattgaggcagccagcgcaggggcttctgctgagggggcaggcggagcttgaggaaaccgcagataagtttttttctctttgaaagatagagattaatacaactacttaaaaaatatagtcaataggttactaagatattgcttagcgttaagtttttaacgtaattttaatagcttaagattttaagagaaaatatgaagacttagaagagtagcatgaggaaggaaaagataaaaggtttctaaaacatgacggaggttgagatgaagcttcttcatggagtaaaaaatgtatttaaaagaaaattgagagaaaggactacagagccccgaattaataccaatagaagggcaatgcttttagattaaaatgaaggtgacttaaacagcttaaagtttagtttaaaagttgtaggtgattaaaataatttgaaggcgatcttttaaaaagagattaaacccgaangtgattaaaagaccttgaaatccatgacgcagggagaattgccgtcatttaaagcctagttaacgcattttctaaacgccagacgaaaattggaaaagattaatttgggagtggnnaggatgaaacaaattttggnnaannatnagaaattttgaantgngaaanactgggaagaac

SEQ ID NO: 4114 - DNA, 656 bp, Homo sapiens
  misc_feature 475, 581, 597, 603, 612, 619, 627, 641, 653: n = A,T,C or G
acgcgggggctgtcgctcactcagattgtccgtttgctatgccgaatgcagccaaaattcctttttacaatttgtgatgccttaccgatttgatcttaatcctgtatttaaagttttctaacactgccttatactgtgtttctctttttgggggagcttaactgcttgttgctccctgtcgtctgcaccatagtaaatgccacaagggtagtcgaacacctctctggcccctagacctatctggggacaggctggctcagcctgtctccagggctgctgcggcccagccccgagcctgcctccctcttggcctctcatccattggctctgcagggcaggggtgaggcaggtttctgctcataagtgcttttggaagtcacctacctttttaacacagccgaactagtcccaacgcgtttgcaaatattcccctggtagcctacttccttacccccgaatattggtaaagatcgancaatggcttcaggacatgggttctcttctcctgtgatcattcaagtgcttactgcatgaaagactggcttgtctcaagtgtttcaaccctcaccaggggctggctnttgggtccaaaccttnggttcnctggttaantgccgtnttgaacancccccaatcaaaantgaccctttggnccc

SEQ ID NO: 4115 - DNA, 653 bp, Homo sapiens
  misc_feature 610, 646: n = A,T,C or G
actaagagaaaagcacgaagctgtggatcatagttcccagcatgaggaaaatgaagaaagggtgtcagcccagaaggagaactcacttcagcagaatgatgatgatgaaaacaaaatagcagagaaacctgactgggaggcagaaaagaccactgaatctagaaatgagagacatctgaatgggacagatacttctttctctctggaagacttattccagttgctttcatcacagcctgaaaattcactggagggcatctcattgggagatattcctcttccaggcagtatcagtgatggcatgaattcttcagcacattatcatgtaaacttcagccaggctataagtcaggatgtgaatcttcatgaggccatcttgctttgtcccaacaatacatttagaagagatccaacagcaaggacttcacagtcacaagaaccatttctgcagttaaattctcataccaccaatcctgagcaaacccttcctggaactaatttgacaggatttctttcaccggttgacaatcatatgaggaatctaacaagccaagacctactgtatgaccttgacataaatatatttgatgagataaacttaatgtcattnggccacagaagacacttgatccaatccgatgttttntcagctt

SEQ ID NO: 4116 - DNA, 527 bp, Homo sapiens
  misc_feature 64, 191, 292, 365, 407, 412, 511: n = A,T,C or G
acttttttttttttttttttttttttttgcacaagcacgtgcactttattgaatgacactgtanacaggtgtgtgggtataaactgctgtatctaggggcaggaccaagggggcaggggcaacagccccagcgtgcagggccagcattgcacagtggagtgcaaaggttgcaggctatgggcggctactantaaccccgtttttcctgtattatctgtaacataatatggtagactgtcacagagccgaataccagtaacaggatgaatccaatggtcatgaggatgcccanaatcagggcccaaatgttcaggcacttggcggtggaggcataggcctgggccccggtcacgtcgccaaccatnttcctgtccctagacttcacggagtaggcgaatgctatgaancccanacagcaccagttcaagaagagggtgttgaacagggaccaaacgacatggtcgggcacggaggtctcgctgtggatgttgatcacggtggaccttggaangatggggcttgggggg

SEQ ID NO: 4117 - DNA, 390 bp, Homo sapiens
acgcgggtataaaactatggagaaaactgctaaagggtatccctgacctttatgatgatgcagctattttcgaggccaaaaaatcattttactgggcaagaaaaacatctcattcctttgtcgtgaatatccttgctcaggctctttatgaattattttctgccacagatgattccctgcatcaactaagaaaagcctgttttctttatttcaaacttggtggcgaatgtgttgcgggtcctgttgggctgctttctgtattgtctcctaaccctctagttttaattggacacttctttgctgttgcaatctatgccgtgtatttttgctttaagtcagaaccttggattacaaaacctcgagcccttctcagtagtggtgctgtattgt

SEQ ID NO: 4118 - DNA, 655 bp, Homo sapiens
  misc_feature 632, 654: n = A,T,C or G
acaaagacaaacacctaaaacacactgcgtcaagtgcagcaccgactttggtcaaataaaaaaaataaaagaaaaattaataattgctaagcttttctacatgatataagcaggtattgcatattttcatatatctgggggaaaataaaggaagactccaaataaattgtaaaatgcagcaacatccaaaatactgatattctaagcatctacagatctcagaatagcactgccaccgaccgtactttgtgatggatctcctgaagggcctgccaggcctgccagggctcttcattgcctgcctcttcagcggctctctcagcactatatcctctgcttttaattcattggcaactgttacgatggaagacctgattcgaccttggttccctgagttctctgaagcccgggccatcatgctttccagaggccttgcctttggctatgggctgctttgtctaggaatggcctatatttcctcccagatgggacctgtgctgcaggcagcaatcagcatctttggcatggttgggggaccgctgctgggactcttctgccttggaatgttctttccatgtgctaccctcctggtgctgttgtgggcctgttggcttgggctcgtcatggccttntggattggcatcgggagcatcnt

SEQ ID NO: 4119 - DNA, 632 bp, Homo sapiens
  misc_feature 439, 477, 492, 512, 537, 551, 555, 580, 596, 608, 609, 611,630: n = A,T,C or G
acttgcagccctcggccaaacggccagacgccgacgtcgaccagcagagactagtaagaagtttgatagctgtaggactgggtgttgcagctcttgcatttgcaggtcgctaccatttcggatctggaaacctctagaacaagttatcacagaaactgcaaagaagatttcaactcctagcttttcatcctactataaaggaggatttgaacagaaaatgagtaggcgagaagctggtcttattttaggtgtaagcccatctgctggcaaggctaagattagaacagctcataggagagtcatgattttgaatcacccagataaaggtggatctccttacgtagcagccaaaataaatgaagcaaaagacttgctagaaacaaccaccaaacattgatgcttaaggaccacactgaaggaaaaaaaaagaggggacttngaaaaaaaaaaaaaaaaaaaaaagtactttgttctcanttaaagaagatgaanaagtcttcaggggagattgnctactgtgggcaggtgtttgaaaantcccccctgcgggngaanaacttccgggatctggcttgcgctntgacttcccgggaacnggcacccaaaanntnttccttgccccggcggggncc

SEQ ID NO: 4120 - DNA, 647 bp, Homo sapiens
  misc_feature 560, 602, 606, 615, 639: n = A,T,C or G
acttgatatggaaagaagctttttttcttctcaagttggatgcagaactgagtttaaaagatacaaggaaagcagggtttcattagtgggagctgatttagggttcagttctttatcactgcaatcttaggcaggccccttaactcctagtctctataaaataaggaagggggttgtcccagttttcagtctaatgtccccattctatgacagacccatgtcttctttatgtagaccaaggaagaggaattttagcaaaactacctgattatgcccatgtttcccaaataccttgatttttcttatattgacatttcatctgcacatgtctgggtgataattcattaatcaatgtaaaacgtagggaccctttattagctccataatgaaaaaaatccctccaccagccaagtgctgggacccaggtggccaccattgttattgacaggtaaggaagcactggaaatgcaccatcctctccatccccacactttccagagtaaagcaaggatgaggacacccaggcattgtgccaaggctgccattgcaggagggcacanagagaggatgggataagaaaaaagcatggattaagccaagangccnctgaaaacncaaaggctaaactgcaaactgcantgggggtt

SEQ ID NO: 4121 - DNA, 652 bp, Homo sapiens
  misc_feature 555, 564, 572, 587, 644: n = A,T,C or G
acctatatggctcccccaattaatcacaattcagcagcatccactccccatatgtggctgagataacttactttgactgtctatttggttatctctcagacaaagcttcaacgaaataaaatggacaggtttgtggactgtgtagagcagcggaaaagtttccacattttcttggactgcttcaccttctgtcagcggctccaaggtgtctgctccaggcatgtctacacaccactctctttctggtaaatcttgtacagactctcattttatgatgtatcctactgcatcaggacatttgtgtcaatgtcaggtgatgaggggaaatgaaagtgatgagacgatgagaggagtgaaataccaaggacgcgatactaggaaacccaggtctatttgttatcagagtaaggatcaagccagatagcctgttatgtaatttctccgataaaagattttgaaagcaggtgctgtgggcatctgtatggggaatcgcactcatagaattattttcatttggtaaatatttgggtatcaggcccaagcaagggaaagaanctttactgnatttaccntctttcctggaaaanaattggatttttcctctcttcccttaaggggatatgaggtattgatacctgcaaccnaaataagc

SEQ ID NO: 4122 - DNA, 654 bp, Homo sapiens
  misc_feature 91, 102, 104, 153, 243, 271, 278, 316, 387, 392, 403, 425,432, 444, 446, 452, 459, 468, 493, 503, 513, 536, 544, 548,560, 562, 574, 577, 588, 591, 594, 601, 609, 610, 617, 621,623, 627, 634, 643, 644: n = A,T,C or G
actttttttttttttttttttttttttttgagacggagtctcgctctattggcaggttggagttcaatggcacgatctcggctcactccancctggtgacanancaagactctgtctcaaaaataaaataaaataaataaataaataaatgtnttaaatccattgctttaacattttgaaatttattttggtttctgttcaacaaaaccaaaccacattgggatggcatttacagaagctcanaaaaacattatgcactgaaaaatacttntcattanaccacaacaagctttaaaaaaataaaattaagtaattntagttaagttacaaaaagctgaaagtataaaacattgtggaaacagtgaccatctattaactgggaaaacncaaangaagagaaacnattttcaaccattaatcatttntcaaacntgaagtctgggncnttaaangaatatnttatcaaanggtgaggggctgggcttactggcanttttgacatnctatacaggntcaaaccccaaacccttcacagnaaaaaacncttnaagttgtacctngncccgggccggcncgntttaggggcgnaanttnccagccncacctggnnggcccgnttantnaatngggaatnccgagcccnnggtacccaaa

SEQ ID NO: 4123 - DNA, 649 bp, Homo sapiens
  misc_feature 25, 441, 466, 487, 489, 545, 553, 560, 569, 630, 641: n = A,T,C or G
acttttttttttttttttttttttngacagtgctttctactttattaaacatcaaagcccaaatagatgttccctgtggaggaggacttaaggacactaggggaggagaatgggacacctgggaagagaatcaccacagagaccaatcttcacaaaaagggtccaatattgatttctagggaggagcagggcatggtcagctcaaatttggtgataacgtcaggatgaaggaccccaagcttcccgacgctttgacccctggcaaagatctctgcacatcgcccggggaagaaagcaggcccttctgatgctttgatcacatatccccccttgtcttcaccaggaggcacatcgagcaactgcataattctgtccagcagcccatgaatgatctcaaacccaggattcttgttgtaataaacagcacaaaaatgtctgtanttttttgcacctacatctgtattanaatcttttattacaatgtcananatttcaaacagtttcagtggaaggggcatcttacgatttgctgctatggtcttcangaggccangaaaaanggtagtgcntgcccctgaaaattaacctgttttaggattacttatgtggactgcctttgttgcaaaaatntccacccctantttatcac

SEQ ID NO: 4124 - DNA, 653 bp, Homo sapiens
  misc_feature 544, 605, 625: n = A,T,C or G
acgcgggatctgaagaaaaccaagaagaactaagcattgataactgcattgtaacttggccagatgctccagcatacgcacgttcactgcaaagcaccctactggttttgaaaatctgaccttgtcatttcaatagttattaacatgactaaatattatcttaattaagaggaaaatagaagttgcttttaggggtttctgacatatattctggatactatccgaggtaattttgaagtttaatataaatgctcatatcaaatgaatatagaactaatattgtcgggaacacctaatagaaaggaatactattatagcaaatcacagaatgatagactcaagcataaaacttggcagttttatctgcttcaaaatgccattgatcattattcctgtattttctctgaaactgattataaaaaccaatgtccagctctcttttgtttttgacacttgaagaaatggagatcgatttgatttgtttataagcagaccactgcaatttacaaagatctctttacggttttataaaattatcttccantttgtacatttatttttgccaaattgacctaccattaaataacacaccacccatttttganggacctcctaaccagttagnttccaaaagcatttattatttgctaatt

SEQ ID NO: 4125 - DNA, 346 bp, Homo sapiens
acaagtatttatatcaatgaaaatttccattggtgattttttggcagaatattggtcttgactctgtggaataaatgacgacgtaaacgtagctgcacaggggtgttcctgtataatgcttgaatcaattgtgtgtgaaagcatcatgcaaatggctaattaaattgggtgatgactgaaaggttataaatccttcattccagctccacgagcagatccccttctccaactgtgtctccagcttgacagtgcacagatttcaccgtgccagttttcccagctgtcatactattctgcattttcatggcttcaatcacacaaatttcttgaccttctgctaccgcgt

SEQ ID NO: 4126 - DNA, 651 bp, Homo sapiens
  misc_feature 535, 548, 645: n = A,T,C or G
actggtgtccctgggtgccagtgagaaactatccttgctctctctggggaatcagtcactgccacacagcagtcctaggcctgcctctgccaaacactgcaggaaactcattcacctcctgaggccagcccatagcatgtgattccagattcctgcggtccagcctccaactttggttgccagctctttcttattctactacacaagccgccaactcaactgagagctaaagagactagaaaagagataagctgccaactcaactgagaacaagaaactagaagagatttatatataaagcttcttccttctcccagatgcaggatgttttcaaccagtaaattttattgctgttggtgccagagaagagtcctttcttctctacatccaggggccttttctccaataatgtgcctttaactctagggacctgcctcacggaccttagggaaaaacctcaacctgaaagatctcttcctttctggactcctttaatcttcccagcaggtttttgccttaaacgtgctggccccangacagtgatgaanacagaacctgtctcaacctctaggctggggggggatcaatgccattcagtccctgttattgaggggattatccccttaaccaaacattcctatcttntgggtg

SEQ ID NO: 4127 - DNA, 531 bp, Homo sapiens
  misc_feature 275, 291, 293, 296, 352, 361, 372, 407, 435, 448, 456, 471,474, 516, 528: n = A,T,C or G
acccatgatcacaggcctttggagcacttttactctctgagaagaactggagctagagatgtaaaatggacagtcttgatggggttgagaaccttctggggagccagatgaccctctctttgcacaatagataaaagtctttatatgaatatatataaatttatttattttttccttcctgtgggatttctggagaatgagaattgtccaaatgctcagtctacctgagatagtaaattcatggcttatgcttctggtccttagaaaaaaaaaanaaaataaaaaaaaaanangtncagttttcatgaggaagttttaaaagaccatgttcctaagcttccaagaaggtttnggatactanaagtattaatntatggcttttctcccagtaaaaccataggcctgangttcacattgggtctttaaatcttttanatatatacctggncatttcanaaaaattctcatagnggnattggccttatatttaacttttttttttatttttttttttgnaaacaaagccancct

SEQ ID NO: 4128 - DNA, 655 bp, Homo sapiens
  misc_feature 186, 194, 211, 213, 224, 226, 236, 240, 243, 262, 276, 291,334, 365, 392, 407, 427, 430, 510, 536, 550, 597, 605, 632,633: n = A,T,C or G
acagtgtgatgctcgagcaattggctctgcttcagagggtgcccagagctccttgcaagaagtttaccacaagtctatgactttgaaagaagccgtcaagtcttcactcatcatcctcaaacaagtaatggaggagaagctgaatgcaacaaacattgagctagccacagtgcagcctggccagantttccacntgttcacaaaggaaaancntgaaaaggttntnaaggactttnaggnatnctgatccttaaaacttctntgggacaatttcanttctaataatggccntaaattttatttcccctcctgttccttggaaaatctccattgngtgtgccttttttaaatgatgtctggcaaanatttaccaaaaagaaagtggtgtgtanacatgcctggagcanacaccttggagccctgacanaangtgaagcagtccaagaaaatgtggaaacttttccgctgctctacacagtccacaaacctgtccattttatttcgttgaancctttgtctgagagataaccaaattngaccggtcaaagtnaagttttcttcaacccccatattgggggaagtgggatgccttgcttnaaattggngaattaatttggggggaacccattatnnggtaccctggccccggggcggg

SEQ ID NO: 4129 - DNA, 654 bp, Homo sapiens
  misc_feature 83, 85, 95, 144, 173, 184, 192, 474, 501, 552, 555, 557,579, 581, 593, 605, 606, 624, 638, 639, 646: n = A,T,C or G
actatcatgttgttgaaactgggtccatgggagcaagattagtggctgctaaacttgaaccgaaaagcttcaaacatacccantntagataaacnaaactgctcagggccccccatggacataagtaacaaggcttctgggganataaaaattgcctatacttactctgttancttcgaggaanatgataanatcagatgggcgtctagatgggactatattctggagtctatgcctcatacccacattcagtggtttagcattatgaattccctggtcattgttctcttcttatctggaatggtagctatgattatgttacggacactgcacaaagatattgctagatataatcagatggactctacggaagatgcccaggaagaatttggctggaaacttgttcatggtgatatattccgtcctccgagaaaagggatgctgctatcaatctttctaggatccgggacacanattttaattatgacctttgggactctnttttcccttgcctggggatttttgtcacctgccaaccgaggaaccctaatnacntntgctggggcctgtgggtgctgntngggcccccttgnaggcttttgttnntgcccaaatttttataantcctttgggagggnnaaaaagngaaaaaac

SEQ ID NO: 4130 - DNA, 592 bp, Homo sapiens
  misc_feature 403, 519, 529, 532, 544, 555, 589: n = A,T,C or G
accgtgtcccgttcttagtgctcgaatgtcccaacctgaagctgaagaagccgccctggttgcacatgccgtcggccatgactgtgtatgctctggtggtggtgtcttacttcctcatcaccggaggaataatttatgacgttattgttgaacctccaagtgtcggttctatgactgatgaacatgggcatcagaggccagtagctttcttggcctacagagtaaatggacaatatattatggaaggacttgcatccagcttcctatttacaatgggaggtttaggtttcataatcctggaccgatcgaatgcaccaaatatcccaaaactcaatagattccttcttctgttcattggattcgtctgtgtcctattgaagtttttttcatggctagagtattnatgagaatgaaactgcctattgaaacgggagtctcgctctgttgcccaaggctggatgcagtggcgtgatcttggctactacaaactctgcctcccaagggctatctgatgggtanaattgccttnganaaaaaaataagnggatactggantttgcccctgtcaatgaaatttttaaagggttgnact

SEQ ID NO: 4131 - DNA, 432 bp, Homo sapiens
  misc_feature 289, 295, 319, 346, 353, 378, 384, 399, 408, 411, 420, 423: n = A,T,C or G
accagagcttgaagaacaggattccacccaggcaaccacacaacaagcccagctggcggcagcagctgaaattgatgaagaaccagtcagtaaagcaaaacagagtcggagtgaaaagaaggcacggaaggctatgtccaaactgggtcttcggcaggttacaggagttactagagtcactatccggaaatctaagaatatcctctttgtcatcacaaaaccagatgtctacaagagccctgcttcagatacttacatagtttttggggaagccaagatcgaagatttntcccancaagcacaactagcagctgctganaaattcaaagttcaaggtgaagctgtntcaaccnttcaaaaaaccacccagactccaantgtacntgcccggggcgggcngtttaaaanggncaatttccnacncactttggg

SEQ ID NO: 4132 - DNA, 718 bp, Homo sapiens
  misc_feature 4, 15, 33, 38, 44, 53, 58, 76, 85, 91, 118, 127, 138, 142,156, 160, 197, 201, 205, 209, 219, 234, 244, 283, 430, 693: n = A,T,C or G
atgncattgcttcgnagccgggcccgcccagtngtggnatgggnattattctngcagnaaatttcggccccctttnagccgggtnggggtnccgcgggccccggaggggttacctttnaaaccaagnaatttatttanccanccaaggaaaaccantttnccccaccccccaaaccaaacccccaaccaaggaaaanttanttanccanttttccttanttccccaaaccaagnccaaagggtnggaaaaacctttttcttccccaaaggaatagggacccantattggaataggggcccaccaaaaaccggagccctcaattaaaatttaaagaaaatttggaattaatgtcaaggcactctctcagaccacaggggaataaactggaaattactccaaaaggaccttgaacctcaatcatggaaattnataacctgtcctgatgtcattgggtcaaaaatgaaatcaagatagaaatcaaaaaattcttctaactgaatgcaatagtaacacaacctatcaaaacctctgtgatcagcaaaggcagtgctaagaggaaaggttcatagccctaaacacctacattaataaggtctgaaagagcacaagacaatataagggtcacacctcaaggggaagtaaaaaaacaagaacaaatcaaacccaaacccagcagaagaaagggaaataangaaaggatattgagcaggaattaaa

SEQ ID NO: 4133 - DNA, 399 bp, Homo sapiens
  misc_feature 30, 33, 42, 98, 130, 134, 140, 149, 155, 157, 213, 227, 237,239, 247, 263, 273, 295, 297, 303, 342, 347, 360, 373, 383,385, 395: n = A,T,C or G
actttttttttttttttttttttttttttnctnccctattcnatttgagtttcctgattcagttcccaaagctgggcttctcttcctctccctttctnatgtctcttcctctgccctttctccatccctnactnttcctnttcctcctntgcttnanccctgtcttggccggtggtccccgggcccgcggtcttgttctcctttttccacttnatgcgccggttctnaaaccaaatntngatctgtntttccgtgaggcaaancgtgtgcgcnatctctatgcgccgccgccgcntnaggtancgattgtagtgaaaattctttctccagctccagggtctnggtancgggtgtaaggtnttggcggccctcntttgcgggtnanttcctggagnttaa

SEQ ID NO: 4134 - DNA, 619 bp, Homo sapiens
  misc_feature 399, 480, 524, 531, 597: n = A,T,C or G
acgcggggaaacgacaggggaaaggaggtctcactgagcatcgtcccagcatccggacaccacagcggcccttcgctccacgcagaaaaccacacttctcaaaccttcactcaacacttccttccccaaagccagaagatgcacaaggaggaacatgaggtggctgtgctgggggcaccccccagcaccatccttccaaggtccaccgtgatcaacatccacagcgagacctccgtgcccgaccatgtcgtctggtccctgttcaacaccctcttcttgaactggtgctgtctgggcttcatagcattcgcctactccgtgaagtctagggacaggaagatggttggcgacgtgaccggggcccaagcctatgcctccaccgccaagtgcctgaacatntgggccctgattctggacatcctcatgaccattggattcatcctgttactgggtattcggctcttgtgacagtctaccatnttatgttacagataatacaggaaaaacggggttactagtggccngccatanctgcaacctttgcacttcactgtgcaatgctggccctgcacgcttgggactgttgcccttgccccnttggtcctgcccttaattacaa

SEQ ID NO: 4135 - DNA, 653 bp, Homo sapiens
  misc_feature 588, 597, 618, 626, 645: n = A,T,C or G
actatttcatggtccaaacctgttgccatagttggtaaggctttcctttaagtgtgaaatatttagatgaaattttctcttttaaagttctttatagggttagggtgtgggaaaatgctatattaataaatctgtagtgttttgtgtttatatgttcagaaccagagtagactggattgaaagatggactgggtctaatttatcatgactgatagatctggttaagttgtgtagtaaagcattaggagggtcattcttgtcacaaaagtgccactaaaacagcctcaggagaataaatgacttgcttttctaaatctcaggtttatctgggctctatcatatagacaggcttctgatagtttgcaactgtaagcagaaacctacatatagttaaaatcctggctttcttggtaaacagatttaaaatgtctgatataaaacatgccacgagaattcggggatttgagtttctctgaatagcatatatatgatgcatcggatagggtcattatgattttttaccattttcgacttacattaatggaaacccaatttcatttttaaatattcaaaattattatttttggnaaggttggngggaaaaaagcctaaattggnagtttttncatttaatgaaagtttttncccaaata

SEQ ID NO: 4136 - DNA, 448 bp, Homo sapiens
  misc_feature 344, 367, 386, 393, 403, 410, 442: n = A,T,C or G
actagccggacttggattttctggaaagatttcagttgaggaacgggaacaaagattatgatagctttccgaccaccaccaacttcaatttccttagctgccgtaatattcagctccctgagctgagccttgaggtccgagttcatctccagctccagaagagcctgggagatgccggactcgaactcgtccggcttctcgccattgggcttcacgatcttggcgctcgaaatgaacatggctttctcctgggagaacttgccgagcgccggcttaggaagagacccaaatctcgcgagagcccccgcgtactctgctatggtgctggcttcctttaaactcangatagatccaggtggggctccgnttcctaaaactgacactcnagctcgnatcagaccanttcctancttcctgaagtaaccataagaattggacttgnggtaaa

SEQ ID NO: 4137 - DNA, 528 bp, Homo sapiens
  misc_feature 337, 426, 445, 475, 506: n = A,T,C or G
acgcggggaatgaaggtgatagaaaaccgggccatgaaggatgaggagaagatggagattcaggagatgcagctcaaagaggccaagcacatcgcggaagaggctgaccgcaaatacgaggaggtagctcgtaagctggtcatcctggagggtgagctggagagggcagaggagcgtgcggaggtgtctgaactaaaatgtggtgacctggaagaagaactcaagaatgttactaacaatctgaaatctctggaggctgcatctgaaaagtattctgaaaaggaggacaaatatgaagaagaaattaacttctgtctgacaaactgaaagagctganacccgtgctgaatttgcagagagaacggttgcaaaacttggaaaagacaattgatgacctggaagagaaacttgcccaggccaaagaanaaaacgtggcttacatcanaccttggatcagacctaacaacttactgtntttaaccaaaacagaaaatcttgttccacanaactctggacttcttgggtctt

SEQ ID NO: 4138 - DNA, 234 bp, Homo sapiens
  misc_feature 44, 120, 131, 148, 183, 197, 205, 223, 229: n = A,T,C or G
acacaatggtttattaaaggaatgtgtggcccacatcaacctancaaggattctactggtaaaccttcccatggccaaaggaaaaacaagcaggagttgagtggctggggtggggtgcangcaatggaganagggcagaagggtgttntaagctgaagggggctagaagcttactcctgagtntcttcccttctgtnttcaaatntttacttctttatgggcncaaaanaccca

SEQ ID NO: 4139 - DNA, 214 bp, Homo sapiens
  misc_feature 172: n = A,T,C or G
actgtatgtgtttcttgaaaaagtcttgtatgcatctgcgaatttcttccttttgtttagaaatatgatcatagtattgtgtgtagtctctttgagaaataccaataagcttgttttccttgacaaaacatcgaaactcagccccaggaatcaattcacaccattttcgganaacgagctcatattctatacatggatctggagaatcatcagt

SEQ ID NO: 4140 - DNA, 497 bp, Homo sapiens
  misc_feature 494: n = A,T,C or G
acgcggggagacattcacagccaaaagcctgggactctttgtgaaggtcctcctcacctctatctttctttctctctctctcaaactttccttaaagttctcattgcctttgcactgcttctgtgaacagtctttgtctcctccccacctttggtgggaagtgcggggcagtcctggtcaagacactcatgccctggcaatgtggctgccagagaatgttgttgctaacccaccagtttcttgttgatttggagaggtcaaggccaggcccccacttggcttgaagggacattttcagacttttctttctgtcacttggagtgtctatgcctctcatatttccctaataaactcctcaactttggaaaaaaaaaaaaaaaaaaaaaagtacataggaatctagcaaattcaggaaccaaggggaaatgttgtgagataacatttacattgtcaacctttattgactttgtttttacaataaaaaatattttacnctt

SEQ ID NO: 4141 - DNA, 589 bp, Homo sapiens
  misc_feature 83, 141, 193, 218, 234, 241, 263, 269, 272, 278, 287, 290,334, 337, 351, 356, 366, 377, 399, 406, 409, 411, 416, 435,445, 458, 477, 521, 547, 581: n = A,T,C or G
acttttttttttttttttttttttttttacacaaaaacactttaattgacagtatacaattttccaaaatatatttttgtaanaaaatgcaataattattaactatagtttttacaaacaagtttctcagtaaattccagngtactttttttttttttttttttttttttttaacaggggaaaataacttttnttgaaaccccaccaactgcaaaatntgttcctggcattaanctccttnttcctttgcaattcggtctttnttcagnggncccatnaatgctttnttntcctccatggtctggaagcggccatggccaaacttggagggggngtnaatgaacttaaggncaatnttctccaaancccgccgtttngtttgcaccaacaaggacttgnggagggngancncccgntttttggttcccaccacanagcctttcancatgacaaagtcnttggtcacttcaccatagnggacaaagcccccagagggttgatgctcttgcaaataggcatantcaggggaggcattgttcttgatcancttgcccgccttgataaggtacccctggccaatnttataaat

SEQ ID NO: 4142 - DNA, 507 bp, Homo sapiens
  misc_feature 444, 464, 476, 478, 481, 487, 490: n = A,T,C or G
acttggccaagcgctcagatcggcaaggggcaccagtcttgatctgcccagtgcacagccccacaaccaggtcagcgatgaaggtatcttcagtctcccccgaacgatgagacaccatgacgccccaaccattggcctgggccagcttgcacgcctgaagagactcggtcacggagccaatctggttgactttgagcaggaggcagttgcaggacttctcgttcacggccttggcgatcctctttgggttggtcactgtgagatcatcccccactacctggattcctgcactggctgtgaacttctgccaagctccccagtcatcctggtcaaagggatcttcgatagacaccactgggtagtccttgatgaaggacttgtacaaattcttagatgaagactttgtgttcgatatatacagagacagtaggtggaaggtgtggntcattgactttaatcatttnggtgaagtcacnanatncactgntgntcacctgggaagaactg

SEQ ID NO: 4143 - DNA, 651 bp, Homo sapiens
  misc_feature 603: n = A,T,C or G
acgacgtgatcgtgctgggcaccggcctgacggaatgtatcctgtcaggtataatgtcagtgaatggcaagaaagttcttcatatggatcgaaacccttactacggaggagagagtgcatctataacaccattggaagatttatacaaaagatttaaaataccaggatcaccacccgagtcaatggggagaggaagagactggaatgttgacttgattcccaagttccttatggctaatggtcagctggttaagatgctgctttatacagaggtaactcgctatctggattttaaagtgactgaagggagctttgtctataagggtggaaaaatctacaaggttccttccactgaagcagaagccctggcatctagcctaatgggattgtttgaaaaacgtcgcttcaggaaattcctagtttatgttgccaacttcgatgaaaaagatccaagaacttttgaaggcattgatcctaagaagaccacaatgcgagatgtgtataagaaatttgatttgggtcaagacgttatagattttactggtcatgctcttgcactttacagaactgatgattacttaaatcaaccgtgttatgaaaccnttaatagaattaaactttacagtgaatcttggccaagatttggcaaaa

SEQ ID NO: 4144 - DNA, 473 bp, Homo sapiens
acttatttcaacaattcttagagatgctagctagtgttgaagctaaaaatagctttatttatgctgaattgtgatttttttatgccaaaatttttttagttctaatcattgatgatagcttggaaataaataattatgccatggcatttgacagttcattattcctataagaattaaattgagtttagagagaatggtggtgttgagctgattattaacagttactgaaatcaaatatttatttgttacattattccatttgtattttaggtttccttttacattctttttatatgcattctgacattacatattttttaagactatggaaataatttaaagatttaagctctggtggatgattatctgctaagtaagtctgaaaatgtaatattttgataatactgtaatatacctgtcacacaaatgcttttctaatgttttaaccttgagtattgcagttgctgctttgt

SEQ ID NO: 4145 - DNA, 352 bp, Homo sapiens
actgctacttctataaacggacagccgtaagactaggcgatcctcacttctaccaggactctttgtggctgcgcaaggagttcatgcaagttcgaaggtgacctcttgtcacactgatggatacttttccttcctgatagaagccacatttgctgctttgcagggagagttggccctatgcatgggcaaacagctggactttccaaggaaggttcagactagctatgttcagcattcaagaaggaagatcctccctcttgcacaattagagtgtccccatcggtctccagtgcggcatcccttccttgccttctacctctgttccaccccctttccttcctttcctctctgt

SEQ ID NO: 4146 - DNA, 547 bp, Homo sapiens
  misc_feature 350, 415, 420, 449, 466, 477, 491, 493, 495, 498, 509, 517,520, 526, 538: n = A,T,C or G
actgtttcttacatgcgaatctacaattatctcaaaataaaaagtctaatttaaaaatatgtgttctggccaggcacggtggctcacatctgtaatcccagcactttggaaggccgagatgggcggatcacctgaggtcaggagatcgagaccagcctggccaacagggtgaaaccctgtctctactaaaatatacaaaaatttgccaggcgtagtggcgggtgcctgtaattccagctacttgggaggctgaggcaggagaattgcttgaatctgcaaggtggaggttgcagtgagccaagattgcgccactgcactgcagcttgggtggccaagtgagactctgtttnaaaaaaaaaaaaaaaaaaaaagtgttctatgtcccaggcttggagtatttagaaagataaaattnatacntgcacagataagccacacacatgttcacnacagttgcagggttcancccaccacagngagtaccacttttntnancangtcacctttgnggttaatnagnctatcnggcctacaggtntgacttaaa

SEQ ID NO: 4147 - DNA, 461 bp, Homo sapiens
  misc_feature 24, 88, 91, 139, 228, 279, 282, 308, 323, 331, 346, 355,389, 397, 400, 402, 408, 439, 457: n = A,T,C or G
actttttttttttttttttttttncttttttttttttttttaggtccaatggtagtttttattccccaggaacaaatataatgtgganaanaaactccaaaaggaaacagagcacggatgacagaaatgacaccacggnagcctggctcaggagtcaggtaaatagatggctgctccacagtggacctggtcatggccctggtttcttggatccacatttgccccgtntcttaagtgtccatctcaaaggtggaggatggaaacagtgaggtggaaaangtncttgctctacacaagagacaaatggntctttttattcccanaggaccanggacaccaaaacctncctcttcanaatggaggtatgacaagataaaaatgagaggggnttgattgncananacaatntgaaagtaataataggggctcactgaggctngcaaaactggtcctgccngggc

SEQ ID NO: 4148 - DNA, 606 bp, Homo sapiens
  misc_feature 462, 472, 476, 484, 506, 587, 595, 606: n = A,T,C or G
acctatttgacttaccatggagttaacatcatgaatttattgcacattgttcaaaaggaaccaggaggtttttttgtcaacattgtgatgtatattcctttgaagatagtaactgtagatggaaaaacttgtgctataaagctagatgctttcctaaatcagatgttttggtcaagtagtttgactcagtataggtagggagatatttaagtataaaatacaacaaaggaagtctaaatattcagaatctttgttaaggtcctgaaagtaactcataatctataaacaatgaaatattgctgtatagctccttttgaccttcatttcatgtatagttttccctattgaatcagtttccaattatttgactttaatttatgtaacttgaacctatgaagcaatggatatttgtacatttgggcacagtatgatatttgacacgaaaaatagttgtatcagaantgagcatcanaaanatagcacntcatcttacacataataactanaaaatattatttctgtctgatcatttaagtgttacaatatcccgagatgttatacattggaacaaattatggtacctgccnaggccggncgttaagggcn

SEQ ID NO: 4149 - DNA, 653 bp, Homo sapiens
  misc_feature 617, 634: n = A,T,C or G
actgccattccttaaattcatttagattacagtgtgtaatcataacttttgatccatcagctccctttgtcaaacactggtcatactgcatgagttgatttgcttcattgattctgaaaagctgattccctcccatcctgtggcagggtcctagttcaacaaagcctccatttgtttttcccatgctatcaatgcagtaagcagtttcgaagcctctgatttctccccagtcaacatttttgggtggcaaagggtagtgtgaggtgatatcataagctatttcttccatgaaccacttaaaacttttgcagttgtgatcttctcgaaattttttcagctccgatatatccccatatggtaatgcctgcgattcaggacgactagcatagaagtagtctttatattcatcccaccaaacctccacaactctaacataattcttcagagttggagaagacccaacataaatgggcggaggatttccttgccagccctcaagacggtagatatgtccaacacgagaacaaggaacaaaataataatttgccccacactgccatatcttgtatgagatctcaaaagttttcaccccccaaatctggagacctggatcatanagaccaattcaaagaanactctcgttcaatgggcaa

SEQ ID NO: 4150 - DNA, 652 bp, Homo sapiens
acttcttcagatcgccaggattcaagaagccatagttcaagaagaagttctccagagtcagatcgacaggtccattcaagatctgggtcatttgatagcagagacaggcttcaagaacgagatcgatatgaacacgacagagagggaacgtgaacgggatcgggaaagagaaaaagagagagaactagaaagagagcgtgctagggaacgggagagagaaagagaaaaagagagagatcgtgaaagggatagagaccgagaccacgatcgagagcgggaaagagagagggaacgagacagggaaaaagaacgggaacgagaaagagaagagagagagagggagagagagcgagaacgggagagagagcgagagcgagaacgggaacgagaaagagcgagagaaagggataaagaacgagaacgccaaagggattgggaagacaaagacaaaggacgagatgaccgcagagaaaagcgagaagagatcccgagaagataggaatccaagagatggcatgatgaaagaaaatcaaagaagcgctatagaaatgaagggagtcccaccctaacagtccccgaagcgccgcgtgaacattctccggacagtgatgccttacaacagtggagatgataaaaattgaaaaacacagac

SEQ ID NO: 4151 - DNA, 376 bp, Homo sapiens
  misc_feature 222: n = A,T,C or G
accagtaaatcaaaaaaagagggagtatgtccatttaacttttattgaagtgtatgtaggaggtcttcagaaatcaaatgtgagcatgaagatatggccaaacataaaatctatcaaattcagtgaaaagttgctgactttaaatagtagttgtaagaatgaccaatatatattctttgttaacaacccctcactctatagtaaaaaaaaaaaaaaaaaaantaaaataaacattcagtaaacattctttcctaaggtagtttcccttatatagcagtgatttatccatttctttgtatacacaaatttgttgaacataccaatcagtggttctcacaattgaaaaataaaagcacaaaaaagtttacactcctgt

SEQ ID NO: 4152 - DNA, 225 bp, Homo sapiens
accagcgccggaagttggtctcgacacctggactagccgggttgtatttggaaacgcggagtgagtttttccgtgctgtgtaggggctaacaatggacacccagaaggacgttcaacctccaaagcagcaaccaatgatatatatctgtggagagtgtcacacagaaaatgaaataaaatctagggatccaatcagatgcagagaatgtggatacagaataatgt

SEQ ID NO: 4153 - DNA, 372 bp, Homo sapiens
  misc_feature 346, 367: n = A,T,C or G
accttttcatcttctctgtggccaacatgaggaacagcaagctgaaggacatccggaacgcctggaagcacagccggatgttctttggcaaaaacaaggtgatgatggtggccttgggtcggagcccatctgatgaatacaaagacaacctgcaccaggtcagcaaaaggttgaggggtgaggtgggtctcctgttcaccaaccgcacaaaggaggaggtgaatgagtggttcacgaaatacacagaaatggactacgcccgagctggtaacaaagcagctttcactgtgagcctggatccagggcccctggagcagttcccccactccatggagccacagctcangcagctgggcctgcccaccgncctaa

SEQ ID NO: 4154 - DNA, 654 bp, Homo sapiens
  misc_feature 165, 198, 535, 606, 619, 622, 645, 647: n = A,T,C or G
actttttttttttttttttttttttttggcttttctcctctctctctctctttgtccttctcttcttttttctttttttttcactatgcccatctgtgtggaggccaggaagtggcaggggaggtgctgctgctccagcgtatgggatgctgggaggagggccanatgtcactgtgacctctcccactggcacggcanaaagtcctaaacttctcttggacttggagtgtcgcttctctttatgcttctccttgtctttcttctttttgctcttctttgacttctttttcttcttgatttctcggtaagaatcatctatcactaactccccagcctctagttccccaccagaggatgagtctgattctaccagaataggttcaagccctgaaagatcaaggttagcactgtgggactctgcgaactgggaggcgtcagacccacagccttcagggccaggagatgaatgtgcgtctgaggatgacttgtgctttttccgggctgttttcaaaaagctctgtaactcatgtcctangagtaaacaccctgctcatcccgagctgatttctttgaggattttttcacaagcccttgttgggagggatnttgaaaaagactnctnatcaaaaaaccttgtttcccttntnctttggt

SEQ ID NO: 4155 - DNA, 504 bp, Homo sapiens
acaaatgttttttattcaaaaatacaaaataaattatctgtaggcatggacaatgacagcagtaaaccattatatattttgtcaactgaaaccagtaactgatggttatagtgattttcagccagcctttttcttcattttctccaactgacttctctgaagttattggtgaggaacactgccttgggcttcctgtcacagttcattaataaaggtaaagcactagtctaggagttagaacatgccacctcccataccacctcccattccacccattgcacccattccagggtccttctcttctttaggaatttctgtgactacaacttctgctgtagttaacagagaggccacaccagcagcatccaataaagcagttctcacaacctttgttgggtcaatgattcctttttccaccatattcacaaaatctccagccatagcatcataaccaacttctgaggaactttgcataattttctcaactatcaaagatccccgcgt

SEQ ID NO: 4156 - DNA, 549 bp, Homo sapiens
  misc_feature 481, 543: n = A,T,C or G
acgcggggaggaggggctgctgagatatcctgtgccctggcagttagccaagaggcggataagtgccccaccttagaacagtatgccatgagagcgtttgccgacgcactggaggtcatccccatggccctctctgaaaacagtggcatgaatcccatccagactatgaccgaagtccgagccagacaggtgaaggagatgaaccctgctcttggcatcgactgtttgcacaaggggacaaatgatatgaagcaacagcatgtcatagaaaccttgattggcaaaaagcaacagatatctcttgcaacacaaatggttagaatgattttgaagattgatgacattcgtaagcctggagaatctgaagaatgaagacattgagaaaactatgtagcaagatccacttctgtgattaagtaaatggatgtctcgtgatgcgtctacagttatttattgttacatccttttccagacactgtanatgctataataaaaatagctgtttggtaaccatagtttcacttgttcaaagctgttaatcgngggggt

SEQ ID NO: 4157 - DNA, 657 bp, Homo sapiens
  misc_feature 164, 186, 202, 463, 525, 570, 576, 579, 635, 647, 656: n = A,T,C or G
acttttttttttttttttttttttttttgcatcaaaaagctttatttccatttggtccaaggcttgttaggatagttaagaaagctgcctattggctggagggagaggcttaggcagaagccctattactttgcaaggggcccttcaaaagtcgctgggctcanaaggctcttagtcgtgcttganagtgagcctttcgaanagatactcgcccagcccagcctccgggccacccagcctgtggaggttggtcaggtggtcacccatcttcttgataagcttcacttcctcatctaggaagtgagtctccaggaagtcacagagatgggggtccgtgcgggcagaacccagggcatgaagatccaaaagggcctggttcagctttttctccagggccatggcagctttcatggcgtctggggttttaccccactcatcttcagctggcttcttgatgtcctgnaagagagcgcggccgccacgctggttttgcatcttcaggagacgctcgtaaccctccgcttntctcggccaattcgcggaagaagtggctcacgccttcatagccanattatngcngtcgaaataaaagcccaaaaaagaggtaggtgtaggaagcctgcaagtactttgtnaacaagcctganaatgggcang

SEQ ID NO: 4158 - DNA, 653 bp, Homo sapiens
  misc_feature 571, 609: n = A,T,C or G
acgcggggcccagtaacaggcatcgaacggtgcagactgaagacgccctccgtcagcgacgccgtcgcaatggccatttgtcaattcttccttcaaggccggtgccgctttggagatcggtgctggaacgaacatcccggtgctaggggtgcaggaggaggacggcagcaaccgcagcagcagccttcaggtaataatagacgtggatggaatacaactagccagagatattccaatgtcatccagccatccagtttctccaaatccacaccatgggggggcagcagagatcaagaaaagccatatttcagttcttttgattctggagcttcaactaacaggaaggaaggctttggattgtctgagaacccatttgcttcacttagtcctgatgagcagaaagatgaaaagaaacttctggaaggaattgtaaaagatatggaggtttgggaatcatcagggcagtggatgtttttctgtttattcaccagtgaaaaagaaacctaatatttcaggttttacagacatttcaccagaggaattgaggcttgaataccataacttcttaacnagcaataacttacagagtatctaaattctgtccaaccnttaataaatcaatgggaggaacagggtaaatgaactgaaaaagt

SEQ ID NO: 4159 - DNA, 653 bp, Homo sapiens
accctggccactcctttccttttggctggccaatgtctcctctgtaggctccagaaggctctcagggatgcaggcggcctcctgcagggttgagttgcaatgggaacaaagacagctgtggtcccatagcaccctcatctggtgacatcctgctactgacagtcaaaagaagccttcccagatgaaattttagtcctctgcgcagccatgctcttcttccagcaaaagagccatgtgcagtcgggtctgctccccatgggggctttgatgtgggcccagcagtggatcagccttccagacacgctcaactctgcacactcttcctgccgcctcaggctttccaggaccctcccgagccttatcagagtccttaccctcagggctactgataccttgctgggtgaccttggacagattcacttacctggactcagtttcataatatgaaaatgatagggttgggctacgtgattttcacgttgtgcttcagattgttagaagttaggggctgaaaggcattacctgtccctctctcaatttcactcatgctactttgtttttttaatctaccttttatatggggcttaaaaaaaaagggttctgggacaaaacctgaaattactgggctccaggagctttcttttaacactaac

SEQ ID NO: 4160 - DNA, 652 bp, Homo sapiens
  misc_feature 457, 520, 558, 566, 575, 583, 608, 634, 636, 649: n = A,T,C or G
accagtggaggaaggccttccggcggaacatggcagtgaactgctccgagatgcgcttgaagagctcctggatggctgtgctattgccaatgaaggtgactgccatcttgaggccacgaggtgggatgtcacagacggctgtcttgacattgttggggatccattccacaaagtagctgctgttcttgttctgcacgttaagcatctgctcatcgacctccttcatggacatccgaccacggaagacagcagccacggtgaggtatcggccgtggcgggggtcacaggcagccatcatgttcttggcatcgaagacctgctgggtgagttccggcactgtgagagctcgatactgctggcttccacggctggtgagaggggcaaagccaggcataaagaaatggagacgtgggaaggggaccatgttgactgccaacttgcggaggtcagcattganctggccagggaaacggaggcaggtggtgacaccactcatggtggctgagacaaggtggttcanatccccgtaaggttgggtgtggtcagcttcagaatgcnggaagcanatatcatanagggcctnttgtcaatgcaataggtctcatcantattctctaccaactgatggacggananggtggcattgtanggg

SEQ ID NO: 4161 - DNA, 655 bp, Homo sapiens
  misc_feature 352, 437, 565, 643, 644: n = A,T,C or G
acttttttttttttttttttttacaggattccttcaactttaattgtgggggtaaaatcaggcagccactgaagataaaatacggtccctgggagtaatcacaatgctgttttcttttgtaaagtggacataagagtagttttttttttttattagcgcaagtggtcaaaagttgtcaaaattgtcctcattcctcgattgtctcttttttaccagtctcttgcccttcaaacagaggatacctggcctccacatcagcccatgtgatgttgccattggctaggtcttggactatgctgggcagctcagagatctctgctcttatctgccgcattgagtcacggtccctcanagttgcagtgtggggggtcttgttcactgtgtcaaagtcaatggtgacaccaaaagccacgccaatctcatcagtcctggcatancgccttccgattgacccaaaggaatcgtctactttgtgagatactccatgcctggtcaagggcttccgataattccttgacaaaatggcatgaactcctggttttggctcaatgggaggacgggaacntttgaatggagcaactacagcagggaaactgaagaatgttctctgttcatctccttctcgtaccacttttgagctganncaatggacgtg

SEQ ID NO: 4162 - DNA, 654 bp, Homo sapiens
  misc_feature 652: n = A,T,C or G
accactcaatcttttaaaaaaatgaaaaagaaaaaaaaagcggctccaaagatagtcttataccattctttaaaaaaggaaactgttccttttaactttacacccaccccacaccccaatttcaaaacatcatttaattgtcttggtcatggacatttccaagatgagattttatatttcgctcccacagcttctggttatcagaaaacccatgctttcctttattgaaggagtttggtccagctgatgttggtgtatcccttccaatattcttcatcctcatctttgcttctggaggcatttcctctggttcactatcttcatcttcattaaaagctgctgctactgaaagagtttttggagcaagagttggaacagtttctttaggcttacttgatccaagtttgatggatatggctgatgctttctttgtcgtctgactacctatggcaaatccaaacttggagatctttgtaggctttgttgggaggtcggcagcttcttcttcagctgatcgcttctcagcgctgcgactggaactttcccctcattactggaaagaaacagtcttagttttcacaggtttttctgcttcttcttcaggtcctccggcggctccagctcgcttgcgacttttcaggcttctcgtctncc

SEQ ID NO: 4163 - DNA, 242 bp, Homo sapiens
acgcgggggggaaaggaggtctcactgagcaccgtcccagcatccggacaccacagcggcccttcgctccacgcagaaaaccacacttctcaaaccttcactcaacacttccttccccaaagccagaagatgcacaaggaggaacatgaggtggctgtgctgggggcaccccccagcaccatccttccaaggtccaccgtgatcaacatccacagcgagacctccttgcccgaccatgtctt

SEQ ID NO: 4164 - DNA, 502 bp, Homo sapiens
  misc_feature 502: n = A,T,C or G
acgcgggactcctcagcaaatgcaaaagaactaaaatcataacagtctctagggccacagcacaatcaaattagaattcaagattaagaaactcactcaaaactatacaactacatggaaactgaacaacctgctcctttatgactcctgggtaaataatgaaattaagacagaaatcaagaagttctttgaaaccaatgagaacaaagatatttgatataatgtactctgacagctgtgcacgatgccatccttgaggacttggtcttcccaagcgaaattgtgggcaagagaatccgcgtcaaactagatggcagccggctcataaaggttcatttggacaaagcacagcagaacaatgtggaacacaaggttgaaactttttctggtgtctataagaagctcacgggcaaggatgttaattttgaattcccagagtttcaattgtaaacaaaaatgactaaataaaaagtatatattcacactaaaaaaaaaaaaaaan

SEQ ID NO: 4165 - DNA, 448 bp, Homo sapiens
  misc_feature 440, 443: n = A,T,C or G
acttgcagccctcggccaaacggccagacgccgacgtcgaccagcagagactggtaagaagtttgatagctgtaggactgggtgttgcagctcttgcatttgcaggtcgctacgcatttcggatctggaaacctctagaacaagttatcacagaaactgcaaagaagatttcaactcctagcttttcatcctactataaaggaggatttgaacagaaaatgagtaggcgagaagctggtcttattttaggtgtaagcccatctgctggcaaggctaagattagaacagctcataggagagtcatgattttgaatcacccagataaaggtggatctccttacgtagcagccaaaataaatgaagcaaaagacttgctagaaacaaccaccaaacattgatgcttaaggaccacactgaaggaaaaaaaaaaaaaaaaaaanaanaaagt

SEQ ID NO: 4166 - DNA, 650 bp, Homo sapiens
  misc_feature 578, 601, 637: n = A,T,C or G
acgcggggagctggaggcggcggagcggaagccccaccatggctgcaatccgaaagaagctggtgatcgttggggatggtgcctgtgggaagacctgcctcctcatcgtcttcagcaaggatcagtttccggaggtctacgtccctactgtctttgagaactatattgcggacattgaggtggacggcaagcaggtggagctgactctgtgggacacagcagggcaggaagactatgatcgactgcggcctctctcctacccggacactgatgtcatcctcatgtgcttctccatcgacagccctgacagcctggaaaacattcctgagaagtggaccccagaggtgaagcacttctgccccaacgtgcccatcatcctggtggggaataagaaggacctgaggcaagacgagcacaccaggagagagctggccaagatgaagcaggagcccgttcggtctgaggaaggccgggacatggcgaaccggatcagtgcctttggctaccttgagtgctcagccaagaccaaggagggagtgcgggaggtgtttgaaatggccactcgggctggcctccangtccgcaagaacaagcgtcggangggctgtcccattctctgagatccccaaggcctttnctacatgcccctt

SEQ ID NO: 4167 - DNA, 497 bp, Homo sapiens
  misc_feature 299: n = A,T,C or G
actttttttttttttttttttttttagaataacctgcaagagctgcctgtatttagcaatttgttcttcatcatccttctgacttttctttgttttcccatcttcttctacattgactccatcatcaccttgtagctcctcttctgtctcctcttcatcttcactagaggaagctaagtaggcttgaaaatccatgtccaaaagctcttcctttttaaacttcctgttgagcattgtaattctttcatgatcagtctcatcccaagtgatttccaccgttgatgttcccattgcagcanaagtgaaatattttggtttatatgctgttaaattcacttctgaggctacatccttaggctcatcatcaaaagtaatatcatctggtataaaccttagatctatgaaagaacaactactttcaaattccaggccatcacaatcctcataaattttactagctgtttccggagaatcacagtctactactgcataatagt

SEQ ID NO: 4168 - DNA, 653 bp, Homo sapiens
  misc_feature 621, 638: n = A,T,C or G
acagccttggcttccccaaactccacagtctcagtgcagaaagatcatcttccagcagtcagctcagaccagggtcaaaggatgtgacatcaacagtttctggtttcagaacaggttctactactgtcaaatgaccccccatacttcctcaaaggctgtggtaagttttgcacaggtgagggcagcagaaagggggtagttactgatggacaccatcttctctgtatactccacactgaccttgccatgggcaaaggcccctaccacaaaaacaataggatcactgctgggcaccagctcacgcacatcactgacaaccgggatggaaaaagaagtgccaactttcatacatccaactggaaagtgatctgatactggattcttaattaccttcaaaagcttctgggggccatcagctgctcgaacactgagcttgtgtaaaagttgaaccatgaggccacaaaagcggtcaaaggttctgggaattcgggtctggggattcacttaatcagaacattcttctgtgtatggatataaacctgtacaagccagctcggttcaggggactatccatcagcatcaccaaactctggtgggtgatatctggccgcgcttccccanggtcccgtccattcttnaacaatataaacttg

SEQ ID NO: 4169 - DNA, 560 bp, Homo sapiens
  misc_feature 279, 504, 512: n = A,T,C or G
acaaaaagacagccagaggtgtgcggagagggtgaggtggccgcgtggacgtgggtagataatcgcatgcagcactggaactcctgatgaggggtggggtccccacttctcctcaaggtttgagggattgcggggagggggtcagctgactcagagaagtaggatctctgcactggaacttgaggcttcctgtctcctccatgggccccaccagtcacagggacatgaaatccgtggcctggaggagggagagggagagcaggagcagcagcagccacnaggtgttctgagccagcaggctgatgccctcacacttgaccagtttgtctctgagcactgtgacgttctgggaggagatgggtggggaatggccagagtggtggagtgcacacgtgtaggtgccctcgtccttgctagtgaaggcggataagtagaggaccttcatgttgtatttgctggtgaagttggttcgggagcggtatgtgtgctcaggcacccccacantgccaaanagcacgtgcttctttgtctcacgggtcaggctgaactcgtacctcggc

SEQ ID NO: 4170 - DNA, 311 bp, Homo sapiens
acgcggggctctcagaaccttcctgccgtcgcgtttgcacctcgctgctccagcctctggggcgcattccaaccttccagcctgcgacctgcggagaaaaaaaattacttattttcttgccccatacataccttgaggcgagcaaaaaaattaaattttaaccatgagggaaatcgtgcacatccaggctggtcagtgtggcaaccagatcggtgccaagttctgggaggtgatcagtgatgaacatggcatcgaccccaccggcacctaccacggggacagcgacctgcagctggaccgcatctctgtgt

SEQ ID NO: 4171 - DNA, 652 bp, Homo sapiens
  misc_feature 644: n = A,T,C or G
acttgcagccctcggccaaacggccagacgccgacgtcgaccagcagagactggtaagaagtttgatagctgtaggactgggtgttgcagctcttgcatttgcaggtcgctacgcatttcggatctggaaacctctagaacaagttatcacagaaactgcaaagaagatttcaactcctagcttttcatcctactataaaggaggatttgaacagaaaatgagtaggcgagaagctggtcttattttaggtgtaagcccatctgctggcaaggctaagattagaacagctcataggagagtcatgattttgaatcacccagataaaggtggatctccttacgtagcagccaaaataaatgaagcaaaagacttgctagaaacaaccaccaaacattgatgcttaaggaccacactgaaggaaaaaaaagaggggacttcgaaaaaaaaaaagccctgcaaaatattctaaacatggtcttcttaattttctatatggattgaccacagtcttatcttccaccattaagctgtataaacaataaaatgttaatagtcttgctttttattatcttttaaagatctccttaaaattctataactggatcttttttcttattttggtttgggacattcatacattttnaagatttt

SEQ ID NO: 4172 - DNA, 652 bp, Homo sapiens
acgcggggggagttaggcgaccaaaccagtgagagccccaatccctgcagttttgtggcttcaagtgtgggtggacagtcctaatggggatctccagctccttcctgtgggctgccacagacagctacccccagaagggtcaatgttgggagtggttgtggctctgagctgctctacagagcttcagtgtgagaggatcgagccattgaaagctcattaccagtaggacataatttttggctctccctattcacaaccagtgcacagtttgacacagtggcctcaggttcacagtgcaccatgtcactgtgctatcctacgaaatcatttgtttctaagttgtgtttattcctggagtgacatgccaccccgaatggctcactttcactgaggatgctgtcctctgatttagctgctgcctccagcctctggcttgagaacttactaaaggcacttccttcctgttaaacccctgttaactctccataaatttggtgattctctgctaggcctaagattttgagttaacatctcttgaagccaaactccaccttctgtgctttttgcttgggataatggagtttttctttaaaaacagtgccaagaatgacaagatattaaaaaaaaaaaaaaaaaaaaaaaaaaagtcctt

SEQ ID NO: 4173 - DNA, 442 bp, Homo sapiens
  misc_feature 376, 392, 394, 402, 416, 421, 423, 427, 431, 435: n = A,T,C or G
accaacagacgtggataagtggttccatcaccagaaaaactaatgagatttctctggaatacaagctgatattgctacatcgtgttcatctggatgtattagaagtaaaagtagtagcttttcaaagctttaaatttgtagaactcatctaactaaagtaaattctgctgtgactaatccaatatactcagaatgttatccatctaaagcatttttcatatctcaactaagataacttttagcacatgcttaaatatcaaagcagttgtcatttggaagtcacttgtgaatagatgtgcaaggggagcacatattggatgtatatgttaccatatgttaggaaataaaattattttgctgaaaaaaaaataaatanaaataaacagataaananaaaccctntcaaaaaaaataanaaaananatanttgnttcntgggccg

SEQ ID NO: 4174 - DNA, 562 bp, Homo sapiens
  misc_feature 522, 545: n = A,T,C or G
acgtgcaaccttgttgctacggccactattcttcattttggtagagccgaacttggtggcagcaaaagtggcagtggtaaaggttaaaggctgagtggaccggggcatgaaggtagggcttacagcagcagagtgaccaaaaggaggcgatggagagctggacactgatgaggctgggtcacttatgggcataaaaacctgggcctctgggttaaagctgtttttgatctccttatccaactcacatccattttcattattatcatccacgtaaagcaccttcactggtcccttttcaccaatttggtaagaaacctcaaatgggtcgatccaaacactaagatcctgtggcagattgccacgaacatcatcaatgtccaaaccactctctttggatgcttgttcaatcactgggtccactttctcccctatgtgtatacatctaaaccccaatcctttgtatggcttttcaggataccagtgcccttcatatttcttcttaagaagtctttcaagttcttnaccaaaaatgttgacaccgtctnctgggaagcttattggt

SEQ ID NO: 4175 - DNA, 535 bp, Homo sapiens
  misc_feature 184, 189, 195, 203, 220, 275, 306, 335, 357, 427: n = A,T,C or G
acgcggggagacgcgcgggcgggaagatggcggctgggttcaaaaccgtggaacctctggagtattacaggagatttctgaaagagaactgccgtcctgatggaagagaacttggtgaattcagaaccacaactgtcaacatcggttcaattagtacttttttttttttttttttttttttttnggcanaatganaaaatatntttgcaaaccaaacatntgacaaggggttaatatccaaaatatataaggaattgaaacaactcaatagtaanaaagcaaataacctaattaaaaactggccanacgacttgaatagaatttctcaaatgaanacatacaaatggctagtaggtntatgaaaaaaatattcaacatcacaaatcatcagggaaatgcaaattaaaaccacaatgagatatcactncatgcctattagaatgactactatcaaaaacacagaagataatatgtgttggcaaggaccgtgcaaaaaatggaacccttattcctgtgggtgggagtgtaaattagt

SEQ ID NO: 4176 - DNA, 650 bp, Homo sapiens
acgcgggggctgactctcttttcagactcagcccacttgcacccaagtgaattaacagccttgttgctcacacaaagcctgtttaggtggtcttctatacggacatgcttgacacttggtgccaaaatctgggccagggggactccttcgtgagaccggccccctgtcctggccctcattccgtgaagaaatccacctgcgacctcgggtcctcagaccagcccaaggaacatctcaccaatttcaaatcggatctcctcggcttagtggctgaagactgatgctgcccgatcgcctcagaagccccttggaccatcacagatgccgagcttcgggtaactcttacggtggaggattcccagccatatgaagacaccctagctggacgatcagtccttgtcaaaagtctgacccctcaaactctacagcctcaatggaccagaccctacccggtcatttatagcacaccaactgccgtccatctgcaggaccctctccattgggttcaccattccagaataaagccatgcccatcagacagccagcttgatctctcctcttcctcctggaaccacaagattaggccgagagccgatcaagacaaacaacctacaacccttaactcctggcagcgcccaccaaggccatgc

SEQ ID NO: 4177 - DNA, 654 bp, Homo sapiens
  misc_feature 498, 597, 600: n = A,T,C or G
actaatgtgatcacagaaaaatagcaaactgaagtcaaaaagcacaggctgcccatcatagagtccccagtctatttaatattttcgacctgctctgaggatggagtgtgtcaacaccttagaataccatgatgggctttaaaactgggtaaagaatcatccctagggttagggcaaatgtaacttcacttattgcttacacacaggaaaaaatctgtttccttttccaagatattcttttaaggattacttgacagtggttcttttaaaggtatcaaaagatgtcctaaaaaaaaaaaaaaaaaaaccctctttggaattctctcggaattccagaaagattatctggcaattcattcctccaccccatcaaaatttttcctttgaaaaattacaactggcaactcacataagatttaatcaacttacttaaaataagggagggcttctcaataatgtttccccactagaaaactaagaaattcagtgatactcagngccagtaattaagtgggtacggagaattctataaagagcttgaccaatgactgggaagatcacttgggcaggggaagcatttttcagtttgaaggacanttngaattcagaaccctttcttttgtcccacaacgtgctcctttttgatctgtttga

SEQ ID NO: 4178 - DNA, 474 bp, Homo sapiens
acttatttcaacaattcttagagatgctagctagtgttgaagctaaaaatagctttatttatgctgaattgtgatttttttatgccaaaatttttttagttctaatcattgatgatagcttggaaataaataattatgccatggcatttgacagttcattattcctataagaattaaattgagtttagagagaatggtggtgttgagctgattattaacagttactgaaatcaaatatttatttgttacattattccatttgtattttaggtttccttttacattctttttatatgcattctgacattacatattttttaagactatggaaataatttaaagatttaagctctggtggatgattatctgctaagtaaagtctgaaaatgtaatattttgataatactgtaatatacctgtcacacaaatgcttttctaatgttttaaccttgagtattgcagttgctgctttgt

SEQ ID NO: 4179 - DNA, 652 bp, Homo sapiens
  misc_feature 199, 516, 587, 611: n = A,T,C or G
accttttttctgagctctggtttgcctttcttgactgtggccatcaccatgtcacccacaccagcagcgggaagtctgttcagccgtcccttgatccccttcacggagatgatatacaggtttttggctcctgtgttgtcagcacaattgattacagctcctaccggaagacccaaggaaatccggaatttcgcaccanaggacccaccacgtcctcgcttcgacatcttgaacgccggaaaaaaaaaaaagcaaaaaaaaaaaaaaagtacagaatgatacttagttttcttatacctcaatacacaatatatgcttagcaacaaaatatatgtttttgaaaagacatgagttttagaataatcaatgctcctttttagtctgtatattattaaaaataatatccagtgtatttttaacactactgaaagaagttttaagtaactttgaatcctgtaagtcacagacttacaggatatttctcacagattttgctaaggcagaaataagctcatntgctatttattgagtaaaataaaacaacattaaaaacaataataccaagtgttatttattcttgcttctgngtttttctatgaaaaattgattanaacatagagtcatttcatttcttatttttaaatagatagac

SEQ ID NO: 4180 - DNA, 654 bp, Homo sapiens
  misc_feature 547, 634: n = A,T,C or G
acatcccagtggggacataatcattgccgattatggtaataaatgggtcagcattttctcctccgatgggaaatttaagacaaaaattggatcaggaaagctgatgggacccaaaggagtttctgtggaccgcaatgggcacattattgttgtggacaacaaggcgtgctgcgtgtttatcttccagccaaacgggaaaatagtcaccaggtttggtagccgaggaaatggggacaggcagtttgcaggtccccattttgcagctgtaaatagcaataatgagattattattacagatttccataatcattctgtcaaggtgtttaatcaggaaggagaattcatgttgaagtttggctcaaatggagaaggaaatgggcagtttaatgctccaacaggtgtagcagtggattcaaatggaaacatcattgtggccgactggggaaacagcaggatccaggtttttgatgggagtggatcatttttgtcctacattaacacatctgctgacccactctatggcccccaaggcctgccctaacttcanatggtcatgttgtggttgcagactctggaaatcactgtttcaaagtctatcgatacttacaagtaatggtgggcaggtggatacccncttcatggtcttgcactata

SEQ ID NO: 4181 - DNA, 655 bp, Homo sapiens
  misc_feature 155, 575: n = A,T,C or G
acttttttttttttttttttttttttttttaagatttttgaaactttttatttatattttggtcttacaaatgatcacttttaaatggacttttctgtaagaatgtaaaactcaaaaatttgccaagtatgtatctgatccacacaaatccttanaaaggttttctgtgtagtcttcattaacgcaaatctttgtgaatgtttcactcttactgtaggatcttgaatatgttttacaataatgaagctacaaagtttttatgcagtgcattcattgtaaactataaataacatttgtattaaaaagaaagctgggtaatacaaaaataggagagactctgaggagcaggcaatctgttgaggctcagtatatcttatttgctttgtagtctgctgtcattcctttcaaagagcacacagcacatgaggcatagtaatcatctgtcttgttaacctctctaatttaaaaatctgttgtcgtaaaactggaccaattatcacaaactatcatttgcataattaacccgcaagtctgttacaaagcattttgttagtgggtatcaacaaatgcaggangatggacatttataaaaaaatgggttttgttaagcttgccaactccttaaatatcatggactatactgcctttcacgatt

SEQ ID NO: 4182 - DNA, 652 bp, Homo sapiens
  misc_feature 502, 547, 635: n = A,T,C or G
acaaatttaataaagcctttgatcacatctcaatccataagttagctacaaaaacaaaaaatcctacaactttttagagccatcaagagccatcaaggtgtcagtgaacaccagttacaaaaggagattcagtgtttcagatagtgcaatatttccagctgctgaaaagaatttaaatgaaattacaaactacccctccttgtcaaaaatccacatgaagttgatattggtgtttataaatcactctctcccagtccctcactggttccaaccttcaggtgataaaaattaggatgggatccatcctccctgtgctgacagtctggggtccccgcatgtatgcacaaacccgcccagcgtgcgcacacacgttcagaagaaatcttcaaaggaaccgagcgtttggagaaagtggcaagtccacagaatcagaggttacgaacacaccttcaataatattaatacattcctgtctttaaattccttgccatgtttccatcanagtagagcacacattgttttccaaaagcctgggggctcgacctgngtgggacaccaggatgcagctgaaactctgaaggactgtggaaaccgggtgggcccctgcttttgctgccactgggacaagctctttnttggaaaatgtttgcgt

SEQ ID NO: 4183 - DNA, 654 bp, Homo sapiens
  misc_feature 29, 72, 75, 353, 355, 392, 560, 604, 607, 645: n = A,T,C or G
actttttttttttttttttttttttttcnaatctgaagtcttgtgttttactaatggaaaaaaaaaatacanaanaggttttgttctcatggctgcccaccgcagcctggcactaaaacagcccagcgctcacttctgcttggaaaaatattctttgctcttttggacatcaggcttgatggtatcactgccaggtttccagccagctgggcacacttccccatgtttgtcagtgaactggaaggcctgaactagtctcaaagtctcatccacagagcggccaacagggaggtcatttacagtgatctgccgaaaaatacccttatcatcaatgataaaaaggcccctgaacnanatgccttcatcagcctttaaaaccccataatcctgancaatggtgcgcttcgggtctgataccaaaggaatgttcatgggtcccagtcctccttgtttcttaggtgtattgacccatgctagatgacagaagtgagaatcccagaagcaccaatcacttggcaagttgagtttcttaaattcttctgccctatcactgaaagcantgatctccgtggggcacacaaaggtgaagtcaaaagggtaaaanaanaacacaacatttttccttttagtcaaacaggctgattntttaaactg

SEQ ID NO: 4184 - DNA, 488 bp, Homo sapiens
acctgggtgttccccaccttgggcatcatgcaccacaacaaacaggccactgagaatgcaaaggaggaagtgaggcgaattctggggctgctggatgcttacttgaagacgaggacttttctggtgggcgaacgagtgacattggctgacatcacagttgtctgcaccctgttgtggctctataagcaggttctagagccttctttccgccaggcctttcccaataccaaccgctggttcctcacctgcattaaccagccccagttccgggctgtcttgggggaagtgaaactgtgtgagaagatggcccagtttgatgctaaaaagtttgcagagacccaacctaaaaaggacacaccacggaaagagaagggttcacgggaagagaagcagaagccccaggctgagcggaaggaggagaaaaaggcggctgcccctgctcctgaggaggagatgggggtcattaaaggaaactgaacattggataa

SEQ ID NO: 4185 - DNA, 505 bp, Homo sapiens
  misc_feature 482, 485, 503: n = A,T,C or G
acaagtaactgtttagagcaagtaagtagtttggtccaatattatcttaatgtaatggtttttcgctccctcccttttatgtgacgacatactatgacatacaaaacatgcacaatcattcacttataaacaaagaagtaagacaccactcagactgacatttgtataccccaagggtcaaccacacaactaataaggctataatacagctatgcagcataaatggtcaacactgctgatcctaaagtgagcaccatatatacatctgaatataaaaaaccattgaaaccaaacacatatgggttagttaaaaggtgccattccaaggctatacataatcacaggaaaaagtatttacactgcttggaaaacagctgcacaaagagttattgccaatgcccttataaacttctctcctatgttaatacagatgttacgctcatatctatgtgaaccacacatctattctggcccttataaanccnctaagattcagcaaattntt

SEQ ID NO: 4186 - DNA, 383 bp, Homo sapiens
acgtgcagacggtggtagttctggagtcctggaagccacgaggtgctcatccatcacaaggccatcacagccgggtagaaatgcctgaggaaagcagcggagctgaccgtgccagcatttacacagggaacacttcttgggcagccaggtgtcatggggcacagacccacagttctctttgcgcacatcgtgctcacagttccgtccgtagaaggagggagggcaggcacaaaaggaccccagcatgcaggttcccccattcaggcagcaggttctgtttagctccttactgtgctgtatccccatgggcggcacacgctgggaagaccgaggccgaattgcaggctcctcctggggccaaatgctgtcatctctccccgcgt

SEQ ID NO: 4187 - DNA, 508 bp, Homo sapiens
  misc_feature 389, 432, 445, 447, 462, 475, 478, 480, 482, 494: n = A,T,C or G
actttaggggctgccattgggtattcttctggaaggaatagttcaagtttaaaagtccctccctcaaagggggaatcctgagggccagcaatgaccacatgaaaataacgggcgttgctctcatctggttcggctttgatgccaggaactggttctgccagcaaacgctgggtttccttgatgatcctgcggggcagcccggccatcttgtcagaacccgagttcccccgcgtactcttattaaaaataaaataggacaagcaaagaagcaaatgaactacatgtgttgaccctactatttcctaaatctactgatatctgctcatctacactgtaaagaatgctctaaatttcatggtcaattttttttctcatttatttttagctanttcttgtccatatccaccaccaatgtgctaaaattttgtatanattcactgattantnagtgtctccatggancaaatcattaggntcncntnccccttgttacntaaaattatttaag

SEQ ID NO: 4188 - DNA, 566 bp, Homo sapiens
  misc_feature 423, 538, 543, 544, 556, 560: n = A,T,C or G
acgcggggggatggttccatcatggcgtcaatgcagaaacgactacagaaagaactgttggctttgcaaaatgacccacctcctggaatgaccttaaatgagaagagtgttcaaaattcaattacacagtcatgtttactggtgaaaatattcctgttcatcctcatgtttatagcaatggtcatatctgtttatccattctaacagaagactggtccccagcgctctcagtccaatcagtttgtcttagcattattagcatgctttccagctgcaaggaaaagagacgaccaccggataattctttttatgtgcgaacatgtaacaagaatccaaagaaaacaaaatggtggtatcatgatgatacttgttgatgccctgttatcatcctcctagcagaagatagtcctactgagaaatganactttgatcattcagtctttgaactttaccttgctggaatgaccttagcaatgaaactcttcctttactgatttttactctgtcatcttggcgctgtgatcgtggttcatccagncactnnatgctttttatntcantttatg

SEQ ID NO: 4189 - DNA, 351 bp, Homo sapiens
  misc_feature 54, 55, 178, 215, 241, 244, 280, 285, 298, 311, 316, 324,329, 348: n = A,T,C or G
acatgatctaaatgtttaatgctaaaggtatatcgtaagggtagtgtttgtttnngaacgataattcagaagttctcatagaaagcgtataacataggtcttcagaaactataaaagaattttcatatagtattaaaatccatagactaaaatctgagaattttttaacatatgcaantcagccaaacataagctaccaaaataaagagcaatgngttctggctgttttatacttcaacanttnttccctaagtggtaagctattactataaaacatatntttanaaacattggtatngggagctgctgtnctacngccagttntcctngcacacaatgaggctaggnttt

SEQ ID NO: 4190 - DNA, 606 bp, Homo sapiens
  misc_feature 412, 451, 459, 493, 554, 562, 567: n = A,T,C or G
acttcgtcttctaatttcaaaaatataacttaaaaatgtaaatattctatatgaatttaaatataattctgtaaatgtgtgtaggtctcactgtaacaactatttgttactataataaaactataatattgatgtcaggaatcaggaaaaaatttgagttggcttaaatcatctcagtccttatggcagttttattttcctgtagttggaactactaaaatttaggaaaatgctaagttcaagtttcgtaatgctttgaagtatttttatgctctgaatgtttaaatgttctcatcagtttcttgccatgttgttaactatacaacctggctaaagatgaatatttttctactggtattttaattttgcctaaatgtttaagcattcggatgagaaaactatacagattganaaatgatgctaaattatagtttcagtacttaaaagctanatgagacntgccaaaattgctaagctacaagatcaaggctgnccgcacagggaaacagtttgaaattatgacttctatttaggaggttggaaactttgctagnaatctatncttgncaagaataccgagggtgctatctggttcaattgattaaa

SEQ ID NO: 4191 - DNA, 567 bp, Homo sapiens
  misc_feature 503, 504, 515, 526, 561: n = A,T,C or G
acttgtctagctcctctcggttcttccgagccagctcgtcatattgggcccggatgtctgccatgatcttggcgaggtcctgagatttgggggcatctacctccacggtcaacccagagctggcaatctgggcttgtaggccttttacttcctcttcgtggttcttcttcatgaagagcagctcctccttgagagcctcgatctctgtctccagctgcagtcgtgtgatattggtgtcatcaatgaccttgcggagcccatggatgtcgttctccacagactggcgcatggcagctctgtctcatacttgactctaaagtcatcagcagcaagacgggcattgtcaatctgcagaacgatgcggcattgccacagtatttgcgaagatctgagccctcaggtcctcgatgatcttgaaataatggctccagtctctgcctggggtccttcttttcaaatgctccggatttgtctcaacctccggtctcgtctcaagctccccnntacttggccgnacacctagggnaatcacaactggcgccgttctatggaccactcgtncactgg

SEQ ID NO: 4192 - DNA, 400 bp, Homo sapiens
  misc_feature 288, 291, 335, 338, 339, 365, 368, 375, 377, 395: n = A,T,C or G
tcggccgccgggcaggtacatttcagaagacaacaaataaaattactctcagaaagctgcaaagatggacacatataatctaagaatgtggtaatggccagagggagtacattcatttgaaagactaaaattaggtataagaacatgatttgaaaggatatttatagcctggatatacatgaaaaagtaagtaactatataaatgaagagtcataagtttacataaatataagaaacattaaattctaaaatattttctctatggtattcatgaatttttcactaatnaanaactctgtaataaaatatcttagggtccatataacaagtattancannattaaagattccactggattccaaantgnagtcttngntggatcaaatgctgcatnatcat

SEQ ID NO: 4193 - DNA, 450 bp, Homo sapiens
  misc_feature 331, 417, 420, 438, 447: n = A,T,C or G
acatgatctaaatgtttaatgctaaaggtatatcgtaagggtagtgtttgtttttgaacgataatttagaagttctcatagaaagcgtataacataggtcttcagaaactataaaagaattttcatatagtattaaaatccatagactaaaatctgagaattttttaacatatgcaagtcagccaaacataagctaccaaaataaagagcaatgtgttctggctgttttatacttcaacaattttttccctaagtggtaagcaattactttaaaacatatttttaaaaacatcggtatcgggagctgcggtggctccggccggttgcctgncacacaaggaggcgaggctatgcgttcgaggccaacctaggcaaaaaaaaaaaaaaaaaaaaaaagtacgcggggtggcggcgacnccnattcaaacgtctgccctntaactttcntgg

SEQ ID NO: 4194 - DNA, 592 bp, Homo sapiens
  misc_feature 395, 407, 466, 499, 514, 552, 589: n = A,T,C or G
cggccgccgggcaggacgcggggacaaaatggatacataaagactaagtagcccataaggggtcaaattttgctgccaaatgcgtatgccaccaacttacaaaaacacttcgttcgcagagcttttcagattgtggaatgttggataaggaattatagacctctagtagctgaaatgcaagaccccaagaggaagttcagatcttaatataaattcactttcatttttgatagctgtcccatctggtcatttggttggcactagactggtggcaggggcttctagctgactcgcacagggattctcacaatagccgagatcagaatttgtgttgaaggaacttgtctcttcatctaatatgatagcgggaaaaggagaggaactactgcctttanaaaatataagtnaagtgattaaagtgctcacgttccttgacacatagtttcagctatgggttagttcttanatggcaagcatgtacttatattaatagtattgnaaagttggtggatancttcctgtgcaggtcatggttcttcttataaaattgtnttacaaaaatttgggaatcttttcctttttcttgaangtt

SEQ ID NO: 4195 - DNA, 273 bp, Homo sapiens
acctaagtatatgattgcgagtggaaaaataggggacagaaatcaggtattggcagtttttccattttcatttgtgtgtgaatttttaatataaatgcggagacgtaaagcattaatgcaagttaaaatgtttcagtgaacaagtttcagcggttcaactttataataattataaataaacctgttaaatttttctggacaatgccagcatttggatttttttaaaacaagtaaatttcttattgatgtcaaaaaaaaaaaaaaaaaaaaagt

SEQ ID NO: 4196 - DNA, 328 bp, Homo sapiens
  misc_feature 150, 160, 240, 244, 245, 258, 268, 311, 326: n = A,T,C or G
acttttttttttttttttttttttttttatgtttctttggttttattattacaaacacaccatggctctgtcacaatagggacatctaagctctacataccatttcttttctacctggacagggccccataaaagcctccaagccacgtntagatgtganacacattttacagaacatttcaactcatagcttataatgatgccatttctccaactgtgcaagggctttacaaaaactgngccnngacttcccatgangctggattgnttgattcatgttttatgagccccaaaattctgaacttcttttnagggactttgcatanca

SEQ ID NO: 4197 - DNA, 482 bp, Homo sapiens
  misc_feature 73, 158, 194, 209, 238, 245, 260, 264, 271, 274, 280, 313,329, 332, 338, 350, 355, 356, 363, 371, 372, 396, 400, 422,426, 432, 447, 453, 460, 467, 469, 475: n = A,T,C or G
actttttttttttttttttttttttttttgcacaatggtttattaaaggaatgtatggcccacatcaacctancaaggattctactggtaaaccttcccatggccaaaggaaaaacaagcaggagttgagtggctggggtggggtgcaggcaatgganagagggcaaaagggtgtaaaagctgaagggggctanaagcttactcctgantttcttccttctgtctcaaatcttacttntatggcnaaaacccactgtttnatangctgganatnactctnataactgcttagacagccagaaacaggggaganggaaaaaggatactgnggnaagggntggcggggcaanatttnnaacttanaaaccctnntggccaattctaaagttttgtctntaanctaaaaaacagttattaggccntttnactctngtttgttggtttccnctgaanttgacanattaacnanctttcnaaaagga

SEQ ID NO: 4198 - DNA, 100 bp, Homo sapiens
  misc_feature 3, 23, 64, 90: n = A,T,C or G
acnaagggctgaggcaaaactgntttttaagttggtagatatgctcatgagcaaaggttccctncatgtaatcatagcctttccagctgncaagttacac

SEQ ID NO: 4199 - DNA, 181 bp, Homo sapiens
acagggaaaaggggaagggagaaggaaacaaaaccctttacaaatcctgctaatactgtcttacccaaaaagaccataatgctttgtcccatattcagtcacttatataataaaccacaaataaaatcttctctggaagatacattgctcctctttgagatggcagggaaaagggaccgga

SEQ ID NO: 4200 - DNA, 613 bp, Homo sapiens
  misc_feature 342, 424, 466, 476, 484, 495, 501, 511, 520, 530, 533, 541,544, 549, 559, 567, 571, 577, 593, 601: n = A,T,C or G
acagccaacggtttcccttgggggctttgaaataacaccaccagtggtcttaaggttgaagtgtggttcagggccagtgcatattagtggacagcacttagtagctgtggaggaagatgcagagtcagaagatgaagaggaggaggatgtgaaactcttaagtatatctggaaagcggtctgcccctggaggtggtagcaaggttccacagaaaaaagtaaaacttgctgctgatgaagatgatgacgatgatgatgaagaggatgatgatgaagatgatgatgatgatgattttgatgatgaggaagctgaagaaaaagcgccagtgaagaaatctatacnagatactccaccaaaaatgcacaaaagtcaaatcagaatggaaaagactcaaaaccatcttcacccaagatcaaaaggcaanaatccttcaagaacaggaaaaactctaaacccaaaaggcctntttttttaanctttaagnaaaatgcatcnagttanaaaagtggtnttttccaantggaaccaanttntcattttnganaattnttcggtattnacaaaagntttnaatttncttggggattttctanacaccccnccccccccccct

SEQ ID NO: 4201 - DNA, 431 bp, Homo sapiens
  misc_feature 260, 291, 306, 362, 373, 388, 393, 404, 425: n = A,T,C or G
acgtgggcctgtaatgcaccttctgaggcacctccagctgcccccggccgggggatgcgaggctcggagcacccttgcccggctgtgattgctgccaggcactgttcatctcagcttttctgtccctttgctcccggcaagcgcttctgctgaaagttcatatctggagcctgatgtcttaacgaataaaggtcccatgctccacccgaggacagttcttcgtgccagaaaaaaaaaaaaaaaaaaaaaaaaaaaagtcncgggaaatgggttctagttcaatttgtttantataaattgtcatanctggtttactgaaaacaaacacatttaaaattggtttacctcaggatgacgtgcanaaaaatgggtnaaggataaaccgttnagacnttgccccactngtaggatggccttttttactnggccga

SEQ ID NO: 4202 - DNA, 611 bp, Homo sapiens
  misc_feature 427, 452, 462, 471, 479, 505, 518, 519, 526, 531, 540, 548,550, 558, 567, 575, 580, 593: n = A,T,C or G
acgcgggcatcactgagtgcaaggaggaggacatcatgtgcatgtatgaagccgaaatgcagtggaagagggactacaaagtcgaccaagaaattatcaacattatgcaggatcggctcaaagcctgtcagcagagggaaggacagaactactagcagaactgtatcaaggaagtggagcagttcacccaggtggccaaggcctaccaggaccgctatcaggacctgggggcctacagttctgccaggaagtgcctggccaaacagaggcagaggatgctgcaagagagaaaagctgcaaaagaggccgcgctgccacctcctgaggcagctgtgggtgcccctgctgtgtggctctgtatgactgttgctgaaatataaagccctgcacctaaaaaaaaaaaaaaaaaaaaaaaaagtactttcancaccttgatgattttcaaaccttcnttttaaaatnttcgtattnttacttanccataatgaatcctttcaaaatctgntgaacttcctgannctgagancttantcctttctntgtcatcncncctttatntggcctgantgaaaatntttantgatgtcaaccanctatatctttgaaacctt

SEQ ID NO: 4203 - DNA, 479 bp, Homo sapiens
  misc_feature 442, 476: n = A,T,C or G
acgcgggcacagtcaagctttaaagaaagtgtttgctgaaaataaagaaatccagaaattggcagagcagtttgtccccctcaatctggtttatgaaacaactgacaaacacctttctcctgatggccagtatgtccccaggattatgtttgttgacccatctctgacagttagagccgatatcactggaagatattcaaaccgtctctatgcttacgaacctgcagatacagctctgttgcttgacaacatgaagaaagctctcaagttgctgaagactgaattgtaaagaaaaaaaatctccaagcccttctgtctgtcaggccttgagacttgaaaccagaagaagtgtgagaagactgctagtgtggaagcatagtgaacacactgattgggttatggtttaatgtacaacaactatttttaagaaaagcaagtttanaatttggtttaaggtcctcggcccgacaccctanggc

SEQ ID NO: 4204 - DNA, 597 bp, Homo sapiens
  misc_feature 438, 473, 482, 526, 542, 556, 573, 574, 586: n = A,T,C or G
actactcgtaaagagcttcaagaactttcttcatccattaaagaccttgttctcaaatctaggaaatcatctgtgacggaagagtaatgatcttaatttacatttgtcatatagtaagcattttcccccaaggttgaaggtgagtggtcacaaaaaagtagtcactatacaactcccctctccctgcaaaaaccacctcatacacacacaattcagttaaaacagtagtattgtattaaatgtaaatcttaaaaagatgtgaatttttgtaaattgggttcttcatggaagtttttttccacctgattttcacacaaatactatatgaaatttttcacattattttcacataattttaaaaattacatatttcaggtttgttctctttccaaatgttgaatgaaaaacaaattttcaatccatttatccctggggaangattcatttgtgcgagtgccagtatactaaatgtnacttatatnattaagcagaaattaaatggggcttttttttaaagaacctttgngcagaaataaataatntgtttattttaatngaagcctcaaactaatnngaatttcaaaanaaaattttcta

SEQ ID NO: 4205 - DNA, 264 bp, Homo sapiens
  misc_feature 167, 207, 234, 255, 257: n = A,T,C or G
acttttttttttttttttttttgccaggaaatattttattgacaaccagggacacagtcataagagagggaagcacacaggactgcaaactaacacccagtagccagcaagggccctctgggccaggaatactgaatcctgggatcctcacagtctcccaccagtanacatacattactgggcatccaggggagggggcagtggctntggtgtcccatagagtgagaggatatntgatgcctcattatgagcgananggttatg

SEQ ID NO: 4206 - DNA, 519 bp, Homo sapiens
  misc_feature 434, 498, 499, 507: n = A,T,C or G
actttgccctcagcatctcccttcatgtctgggtcatgaacttacgctggaaaaactccaacagcttcatatggacagatggacttcaaatgctgtttgtattccagagactagttacagggctttgattcctgggtctaagaaggacagcaagtcctgctaaatgttaaacactgacggcaattaaagccccatcttcacgcccggtagaagatgccaatcaaaataaacttcattcctgaagcacggggctggaaaatcaaagctattcaactcctcaaggcccagggactatcaagaaagaggcggacagatgagattgtaaaggctgattttgagagataaaataagttcagtttccctataaattaatcattaatgtcaaaggcacactgaagcaagaccagcatatgggcctctgtgtcagataacangtttcttgaacagtaactgctccttataaaggttttaaagcaaaaaaaaaaaaaaaaaaaaagnnctgggcgngacacctaggca

SEQ ID NO: 4207 - DNA, 199 bp, Homo sapiens
  misc_feature 77, 93, 111, 164, 170, 175, 188: n = A,T,C or G
acatgtttggaaatgagttagatacttgaaaagtctaaacacactgatttaggagtgcgtatgttgctgtctcaatnaacaatgggtcaatangttcatatggactaaatnaatctctgggtagcaccgtatgtgtgtaaatataaaattatattagacattancaccantgcanaacatgctcagcntcataagatcc

SEQ ID NO: 4208 - DNA, 221 bp, Homo sapiens
acgcggggctctttttccggctggaaccatggagggtgtagaagagaagaagaaggaggttcctgctgtgccagaaacccttaagaaaaagcgaaggaatttcgcagagctgaagatcaagcgcctgagaaagaagtttgcccaaaagatgcttcgaaaggcaaggaggaagcttatctatgaaaaagcaaagcactatcacaaggaatataggcagatgt

SEQ ID NO: 4209 - DNA, 346 bp, Homo sapiens
  misc_feature 221, 225, 267, 270, 277, 286, 289, 292, 299, 305, 312, 326,339: n = A,T,C or G
acgcgggtatgcgggccaatatcacagccatccgcagagtccggaagacagacaataatcgcattgctagagcctgtggggcccggatagtcagccgaccagaggaactgagagaagatgatgttggaacaggagcaggcctgttggaaatcaagaaaattggagatgaatactttactttcatcactgactgcaaagaccccaaggcctgcaccattctnctcngggggctagcaaagagattctctctggagtagaactcaaccncangatgccnttgcaagtntgncgnaatgttntcctgnacccttnctggttgctagggnggtggggtctccnagattgt

SEQ ID NO: 4210 - DNA, 552 bp, Homo sapiens
  misc_feature 100, 102, 156, 210, 259, 308, 402, 460, 462, 464, 500, 517,522, 523, 529, 536: n = A,T,C or G
acttttttttttttttttttttttttgtttttttttttttttttttttttttaggttcactaaatttattttaaaaatcataaaacgtttcttacaaaanancattacattctgcacactgctctgaacaaatgccagggacatgtggactattgntacttttcctccctgtcccaccccccaaatgttacagtgaccacaaagcaaggngttcacaataattacatggggggaattttttaaaccaccaacaataacnaaaaataaaatccactcactctgctgctgtttcaaaatttcaatgttantttttgcacgcccttcccccccccaaccctgtttgtaaggaactaaaacattacatcttggtgaacagcaaagattcactcaccttaaatgcanaaccctatgaagcaaaggaatgttggctttttaacagaagcagataaaaaaaaaaatncngnctcttcagttttactagtcttaaaaaacttccaaanctgttccctttaaaaanaaaannttttcntaaaaanttaaatttgatcaatt

SEQ ID NO: 4211 - DNA, 553 bp, Homo sapiens
  misc_feature 350, 386, 431, 477, 484, 553: n = A,T,C or G
actcaggctcatcatctaaccagccttcgggttttgtggcctcttcatctggaatcttagcaggggcatcttcatcccagtcatctggcttgacagcttctggatctgggatttttggtctttcatcccaatcctcgggcttccggtcttctgggtcctcaatttcacgtgaaggatttacaggaggagtcatgtcattgagcagatttccactattcaccacagattggtcaaccagtatttcaaaactattatctggattcaagattagtgtgtaaagatgtgttttcttatcagtaaaataggtcttcagatctgcatctggcctcttagcatgtttttcttcatanatacccgttttggggtttttgtgtcggaagatgaantgcagtttatagtcctctccacatttatctggacaaacataatcntataaggggcttgcatggactgatccaggttgagtctggtgtttanaaagcanttcaatagcacaccacatctattcattttggaattaacctatctgaacaatgagagcttgggtaaacan

SEQ ID NO: 4212 - DNA, 379 bp, Homo sapiens
  misc_feature 256: n = A,T,C or G
acgcggggccctggagctgtctctggaaagtagctggcgaggttaccttaactatcactgaagaaagaaattttctgacacactgatggcatgtgacttgtctcctaagtcagtgaggcatcactttgtttgcataaagtatacggtttgttaaggcctttgttcttgtgagatgcaaaacagctgctagtctgcaacctagttttccctctcacctttaactgacgttttcctcaataattacacaaggacctanagtacccttcaaacctcacaagatgaaactcagaagagataatggatttggaagcattttgcgtggcttatattatgccacgccagtgttactgttgaagttctgtttgttctgtgtttctgt

SEQ ID NO: 4213 - DNA, 487 bp, Homo sapiens
  misc_feature 361, 391, 399, 403, 436, 445, 452, 461, 463: n = A,T,C or G
actggaagggtagtggaacgagtaaaggccttaccacattgtttacacttatatggtttcacaccagtgtgaattcgttcatggataagacataaattgagaaaatagaaggctttcccacaaaacttacatttataaggtccatctccactgtgcattaccctgtgtctttgaatgcatgaatgggaaatgaaggtttctgtaccacatatcccatttgacttctatttgtgtgaaatggcctttccccgggtcaagccagcacctgatgaaacttccttcagtgaggccttgctgaagaggaatcaggacctgctcccaattctgctgaacaggcatctatcctttctctggtgcaaanataaacaatgtgatttgataatctgattgngctccagngacntttgaagtgcaaattgataagtcgcaggtgggntcctttaanaaggggncaatgattnangacacatgtggctgactgtggtga

SEQ ID NO: 4214 - DNA, 427 bp, Homo sapiens
  misc_feature 346, 354, 373, 380, 391, 422: n = A,T,C or G
acgcggggtcagaagcttggaccgcatcctagccgccgactcacacaaggcagagttgccatggagaaaattccagtgtcagcattcttgctccttgtggccctctcctacactctggccagagataccacagtcaaacctggagccaaaaaggacacaaaggactctcgacccaaactgccccagaccctctccagaggttggggtgaccaactcatctggactcagacatatgaagaagctctatataaatccaagacaagcaacaaacccttgatgattattcatcacttggatgagtgcccacacagtcaagctttaaagaaagtgtttgctgaaaataaanaaatccanaaattgcagagcagtttgncctcctnatctggttttnaaacaactgacaaaccctttctcctgtggcnatatg

SEQ ID NO: 4215 - DNA, 448 bp, Homo sapiens
  misc_feature 241, 277, 288, 295, 299, 300, 304, 310, 316, 343, 346, 356,364, 370, 396, 397, 406, 410, 415, 424, 437: n = A,T,C or G
acctatgggcttccttgccactgtcccttcaaagaaggaacctactcactgcccaagagcgaattcgttgtgcctgacctggagctgcccagttggctcaccaccgggaactaccgcatagagagcgtcctgagcagcagtgggaagcgtctgggctgcatcaagatcgctgcctctctaaagggcatataacatggcatctgccacagcagaatggagcggtgtgaggaaggtccctttncctctgtttttgtgtttgccaaggccaaactcccantctcttgcccnctttaantccnntttntacagnagagtncactacccttacttaaaatcatttggnccntgccggggcngctctctnaaaggnaatttcaacaactgcggccgttcttnntggatcaantcgnacaancttgcgtantaaggcattactntttctggggaa

SEQ ID NO: 4216 - DNA, 571 bp, Homo sapiens
  misc_feature 396, 471, 529, 530, 543, 568: n = A,T,C or G
accgcctattcattttcttgaacttctcataatgatagtcatcagttgccttctcgttagcaggacgcttgcggttaggaggggaccgctcaggctctggcttctccgtgtcacctactctcaagggccgggccttgggctcttctttgtttctccgtatgggcgcgttgagctcctcatgataaaatctgttgtgctgcacataattcacagccatgttggtaggcacgaaggaggtctcgctgtctttcttcttgttctgctgctctgccaacagacgggccttggcatcctccgtggaaatgatattttttattttagcatcgatgcccaggtccacctcaggaatgccactcagcatctggtggaaagcatctctcggtcttctttgctgangaaacacggatgtttctggaagttcataaaacagcctctgcattctttgctaactttctgttctatgttcacgancccttcctttttttactctgctcaatgacggaataaggatgagccaaatgatctcganngaattaaaatacnatggccgaatagggggagggtccgntac

SEQ ID NO: 4217 - DNA, 571 bp, Homo sapiens
  misc_feature 376, 377, 430, 449, 458, 461, 502, 503, 509, 512, 517, 521,524, 530, 535, 548, 569: n = A,T,C or G
acgcgggaccaaacggaaaaaaacggaattatcgaatggaatcgaagagaatcttcgaacggacccgaatggaatcacctaatggaatggaatggaataatccatggactcgaatgcaatcatcatcgaatggaatggaatggaatcatcgaatggactcgaatggaataatcattgaacggaatcgaatggaatcatcatcggatggaaacgaatggaatcatcatcgaatggaaatgaaaggagtcatcatctaatggaattgcatggaatcatcataaaatggaatcgaatggaatcaacatcaaatggaatcaaatggaatcattggacgaaattgaatggaatcgtcatcgaatgattgactgcaatcatnnaatggctcgaatggaatcatctcaaatggatggaatggaatcatcgcatagantcgattggaatatcatcgntggattcgntgnatcaaatcaaccggaaaaaaacgaattttcgaatgaattcnnaaaacntcnatggncaantgnatcttnattgnaaggatggatatnctggacttaatcaatttaatnat

SEQ ID NO: 4218 - DNA, 280 bp, Homo sapiens
  misc_feature 236, 278: n = A,T,C or G
acgcggggggagcgggcggcggcgttggcggcttgtgcagcaatggccaagatcaaggctcgagatcttcgcgggaagaagaaggaggagctgctgaaacagctggacgacctgaaggtggagctgtcccagctgcgcgtcgccaaagtgacaggcggtgcggcctccaagctctctaagatccgagtcgtccggaaatccattgccgtgttctcacagttattaaccagactcanaaagaaaacctcaggaaattctacaagggcaagaagtcctcngc

SEQ ID NO: 4219 - DNA, 239 bp, Homo sapiens
  misc_feature 37, 53, 62, 161, 207, 224, 236: n = A,T,C or G
tcgaagccggccgccgggcaggtacgcggggacaganggaggaaggacagcanggccaacantcacagcagccctgaccagagcattcctggagctcaagctcctctacaaagaggtggacagagaagacagcattagaccatgggacccccctcagcccntccctgcagattgcatgtcccctggaaggaggtcctgctcacatantcacttctaaccttctngaacccatccancac

SEQ ID NO: 4220 - DNA, 706 bp, Homo sapiens
  misc_feature 94, 466, 544, 584, 602, 638, 664, 682, 684, 690, 700, 704: n = A,T,C or G
actaaagcattcatggaggctcttcaggctggtgcagacatctccatgattgggcagtttggtgttggcttttattctgcctacttggtggcanagaaagtggttgtgatcacaaagcacaacgatgatgaacagtatgcttgggagtcttctgctggaggttccttcactgtgcgtgctgaccatggtgagcccattggcaggggtacaacagctccaagacaacacttaattccagctatacgtggcaaaagatgttatggcagggaatagagaggtttaaatacagatgaaataaagggtcaccatctcctcaggcacaaggaacagcttactttttgccagatttcttaattccacctgtggccaagggccccttccccgcggccttcgcttttagctcctcgagtttcttctgctcctctttttgtttctgcttgaaagccttatcttcctcgtccatctncttggcctgcttcttgggctgtttcagtggcttcttcttgccaccttcgcggccggacatggcgcctgccgccgcttncccccccgtgtacttttcaggaagactgacttaaatattncggggtgagtaaaataanttggggtataaaaatctgaacttttacatctggcanaaggcaaaaaaaatatttgacattgntaacttgactggggaaanangatggntgcattgttntaantt

SEQ ID NO: 4221 - DNA, 703 bp, Homo sapiens
  misc_feature 511, 603, 668: n = A,T,C or G
acatcaaagattacatgaaatcaatcaaagggaaacttgaagaacagagaccagaaagagtaaaaccttttatgacaggggctgcagaacaaatcaagcacatccttgctaatttcaaaaactaccagttctttattggtgaaaacatgaatccagatggcatggttgctctattggactaccgtgaggatggtgtgaccccatatatgattttctttaaggatggtttagaaatggaaaaatgttaacaaatgtggcaattattttggatctatcacctgtcatcataactggcttctgcttgtcatccacacaacaccaggacttaagacaaatgggactgatgtcatcttgagctcttcatttattttgactgtgatttatttggagtggaggcattgtttttaagaaaaacatgtcatgtaggttgtctaaaaataaaatgcatttaaactcatttgagagaatgccttttagtttaatgcatatttaaactaaattgatcctgtantgttcctggagaagctagagcctgattgtaggctctactcatcaattaacttctacagtggagactacttctgggactggaatataaaaaanaatcaaaggtctgattttgagttgcaataaagggaaagaccatgctcatagcagtggccaacttntgaagtgtggagccttacccttttattaacctaca

SEQ ID NO: 4222 - DNA, 403 bp, Homo sapiens
actatggtagaaatggcgccatcttccttttcatgcttaaaaaccaccacctgagtatctccaacttctgagaggtaaacactgtcacagtgtcccatttcttcaaggacaggaggtgtcaatctaggaagagctgtagcaccaacagttttacaaagtcttcggagatcccattttgagtttagcctcactaacatgatattatatttatttgcataatgaagagccatgtctgccactttgccacctgttactacgacatttgcaccagtatcagcaatagctttgacttgtgcatccatgaggttttcttctcccttactaaaattcatcaattcttcagcagtctttatcaacactgttcccttagtttctgttatcatgccatcaaaaggacaagagt

SEQ ID NO: 4223 - DNA, 418 bp, Homo sapiens
acacaatggtttattaaaggaatgtatggcccacatcaacctagcaaggattctactggtaaaccttcccatggccaaaggaaaaacaagcaggagttgagtggctggggtggggtgcaggcaatggagagagggcagaagggtgtagaagctgaagggggctagaagcttactcctgagtttcttccttctgtcttcaaatctttacttcttatggccaaagacccagctgtttcataggctggagatgcactcttctagactgctcgagacagccagtgtagtagggcccttatcactcttagtttgctaggtttcccctctgaaataatgagcagatttagccaggctagcagaaaggaagaggacggggctgtgcaggagttagcagaatcttgattcttgctctatggtcggt

SEQ ID NO: 4224 - DNA, 674 bp, Homo sapiens
  misc_feature 340, 491, 581, 592, 603, 620, 644, 670: n = A,T,C or G
acgcggggctcactgagcaccgtcccagcatccggacaccacagcggcccttcgctccacgcagaaaaccacacttctcaaaccttcactcaacacttccttccccaaagccagaagatgcacaaggaggaacatgaggtggctgtgctgggggcaccccccagcaccatccttccaaggtccaccgtgatcaacatccacagcgagacctccgtgcccgaccatgtcgtctggtccctgttcaacaccctcttcttgaactggtgctgtctgggcttcatagcattcgcctactccgtgaagggacaggaagatggttggcgacgtgaccggggcccangcctatgcctccaccgcaagtgcctgaacatctgggccctgattctgggcatcctatgaccattggattcatcctgttactggtattcggctctgtgacagtctaccatattatgttacagataatacaggaaaaacggggttactagtancccgcccatagcctgcaacctttgcactccactgtgcaatgctggccctgacgcttggggctgttgcccctgcccccttggtcctgcccntaaatcagcantttatacccanacacctgtctaagtgtntttcaataaagtgcacgtgcttgngaaaaaaaaaaaaaaaaaaaaaaagncctt

SEQ ID NO: 4225 - DNA, 386 bp, Homo sapiens
  misc_feature 4, 386: n = A,T,C or G
acanaatggattttggaagagggagtcaccactggacctccaaggaagccacgtgcagacatctacaaccttcgatctcctgacgagtttattgttggccaaaaccaggctttgattgaaccaggatgaatgcgggtgttggaagtagaatatatatatacatataaaattgaaactggcgatggaatatgagaggagccctctggaaagaaaaggacagaccctgtgctttcatgaaagtgaagatctggctgaaccagttccacaaggttactgtatacatagcctgagtttaaaaggctgtgcccacttcaagaatgtcattgttagactttgaaatttctaactgcctacctgcataaagaaaataaaatcttttaaatcan

SEQ ID NO: 4226 - DNA, 384 bp, Homo sapiens
actgtgtggaaaagtggtgtcgtgattacttcctcaactgttcagcactcagaatggcagatgttattcgagctgaactcttagaaattatcaagcgaatcgagcttccctatgcagaacctgcttttggctccaaggaaaacactctaaacataaagaaagctcttctgtccggttactttatgcagattgctcgggatgttgatggatcaggtaactacttaatgctgacacataagcaggttgctcagctgcatcccctgtctggttactcaatcaccaagaagatgccagagtgggtcctcttccataaattcagcatttctgagaacaactacatcaggattacctcagaaatctctctgaactatttatgcagctggt

SEQ ID NO: 4227 - DNA, 622 bp, Homo sapiens
  misc_feature 464, 527: n = A,T,C or G
acagattttgaatatggtgactaggcaaggggcactttgggctaatactctaggttctctggctttgctctatagtgcatttggtgtcatcattgagaaaacacgaggtgcagaagatgaccttaacacagtagcagctggaaccatgacaggcatgttgtataaatgtacgtgcctcgcgccagcatgcccttgggagcctcctcaactggagtgaggaactcatactcctcaggccgaggtccatagctgccaaccataaatgttgctttatccactttcaccccagtcctgtaggtgtgctgaacgtatttcaggcctgacacaatatccctgttcactttgaagtgaattttgactctatattcagaaccttcctttaacacaatggtttcctttttgagggcttccagatctccagtaaggtccatggtgattggtcccggggcactctcacaaaccanggtgagccgggcgacaacgacattgggggctttcggatctgtcaccacaggaccatctcccancagccgttttcttgtacgcagagcccacctgaatgaccttgaaaatattattccatttcttggaattggcctcctgtatttccttgagtggtccc

SEQ ID NO: 4228 - DNA, 643 bp, Homo sapiens
  misc_feature 559, 615: n = A,T,C or G
acgggggaggcattgaggcagccagcgcaggggcttctgctgagggggcaggcggagcttgaggaaaccgcagataagtttttttctctttgaaagatagagattaatacaactacttaaaaaatatagtcaataggttactaagatattgcttagcgttaagtttttaacgtaattttaatagcttaagattttaagagaaaatatgaagacttagaagagtagcatgaggaaggaaaagataaaaggtttctaaaacatgacggaggttgagatgaagcttcttcatggagtaaaaaatgtatttaaaagaaaattgagagaaaggactacagagccccgaattaataccaatagaagggcaatgcttttagattaaaatgaaggtgacttaaacagcttaaagtttagtttaaaagttgtaggtgattaaaataatttgaaggcgatcttttaaaaagagattaaacccgaaggtgattaaaagaccttgaaatccatgacgcagggagaattgcgtcatttaaagcctagttaacgcatttactaaacgcagacnaaaatggaaagattaattgggagtggtaggatgaaacaatttggagaaaatagaantttgagggtggaaaactggaaaacagaa

SEQ ID NO: 4229 - DNA, 663 bp, Homo sapiens
  misc_feature 313, 515, 643, 656: n = A,T,C or G
actttttttttttttttttttttttttaagtttaaatgcattttatttttagacaacctacatgacatgtttttcttaaaaacaatgcctccactccaaataaatcacagtcaaaataaatgaagagctcaagatgacatcagtcccatttgtcttaagtcctggtgttgtgtggatgacaagcagaagccagttatgatgacaggtgatagatccaaaataattgccacatttgttaacatttttccatttctaaaccatccttaaagaaaatcatatatggggtcacaccatcctcacggtagtccaatanagcaaccatgccatctggattcatgttttcaccaataaagaactggtagtttttgaaattagcaaggatgtgcttgatttgttctgcagcccctgtcataaaaggttttactctttctggctctgttcttcaagtttccctttgattgatttcatgtaatctttgatgtcccccatgcaatatatggctctacaatcctcancatgttaatcgaaccttgttgagcttcacaaagggttccattgaagatttgacgaaggcgaaaaacctgcaacacctttcgaacctttgggctcactccattgatacctctgattctgatgacaaacnccaatttgggttnttcaggt

SEQ ID NO: 4230 - DNA, 440 bp, Homo sapiens
  misc_feature 412, 434: n = A,T,C or G
accaacagaattatttgtgagaagaatgaacaaattttgataaagtatgaatttgttttattttaaaaagcaaacatactaaatttttttattttattgcttataatttattaagaatgtttacacctgtataaggatttcatatatacattgtatgtgtgtatatataaatacatatatgactgcctaaattgtttataaatttaatttttctttaataggtttcattccttcagagctccattaatgtaatcaaaatgaaatatagattagtttaaatgtgaattcagtgactctagggccaaagaatattaggtatgtttggaaagaatttttgtatttattcctgttacagttttgactttcaacttctctccccgtgcatggaagtcctggtaaaggatctaacatntttattcccttctttcctcttncactga

SEQ ID NO: 4231 - DNA, 704 bp, Homo sapiens
  misc_feature 512, 530, 658: n = A,T,C or G
acatggccacagatcatcaaaccaacattttttgtgaaatcatgaacaagatgaagtaaagctggacgtgagtttggagcacctgtcataacaagacactgtggcctaaagtttttcacgtggtcttccactccagaaagacgaattgaatgctgcagtgcattcaggtaagtcagggcttgtgtagaggatccccaattcacatctggttttttgtaggtaacataaatatacagcccaaggactatcacatatgttagcaatgcagcccaccagttaatgacgaacattactatgcaacaaagaattgctccaagaagtgatatccacatgttgtagtatttgaatgcaggacgccatcctggagattttgcaagtgatgcatggaatactgaaaaattgatcaatgcatatgatgcaaggaagaagtttgagataattggtgcaataacattcagttcagcaattaagatgaatccaagtgcaattaagaatgttaagatgtagccacnaaagaggttcattatttntcccataacctttagcaaacatctggaaagctgggtagatgttgccttacatagagcctgaaatattttgggagcactcactagggatgctaatgctgaaaaaagaatggcttgaaatatacctgcanaattaatggggtaaatcctgacccatactcattacctggaagtgtt

SEQ ID NO: 4232 - DNA, 705 bp, Homo sapiens
  misc_feature 460, 493, 521, 526, 542, 556, 563, 594, 600, 612, 635, 638,647, 652, 661, 664, 694: n = A,T,C or G
actgctaccattacatggttccttattaaatttgaaaagtgcctgaaagtttgggcaccagaaagacaccccaacaacatgtgtctaaactgcaacttcaggttaatatgactaaagcagttacattgtgagaagtgctgaaggtatgtgatgtctttcccggcacaaaggtggccttggttcctcaccagatggtgtagccaccatctgaaccacccatgaagaagttccccttccgctgagttacgaggacgttggctccctgcatgactgcaagctgagcagcattgggagggcatccaggaggtggaggaggaatgttgccagcagtaccccactccaaatctggccctgcatcatacccttcttccaccagcactgtggaaccaggtggatagatgggaccgactggataataagccatggggattggtggaacctaaaggccaacagcccacanactgggccatgggaagatacagaaaggctccangaaatgccgctgacatggtggggactgnggcanccctgggtgcacaaanctcggaccataganctctgantaggcaggtggagcatcggtatagggtggancctgangaaaatccaggncttaaggtatactggattcccangangctgcacanggtanggtggctgngtngatattgacctttgctgtcatggggggtgngggtccggttt

SEQ ID NO: 4233 - DNA, 316 bp, Homo sapiens
  misc_feature 232, 288: n = A,T,C or G
actccttactcaggttctccatatatttctgtagtgctttatgcttccagagcatcttggtgtcttgatggcaatatctcctggaccaattcttacttaacagatgaagaatgcaattcctgttttgtctaaaaacttgcagccttgtatcaagatgtatctgtctaaattgatgagaatggagctggatgtgacactggaggtaaccattaagagatggatgtctaaaaanccaaacacacaggtgaccgattcatctcagcataaacttaaaggcggttcataaangtcattttctaaaagtttgaagaaaata

SEQ ID NO: 4234 - DNA, 366 bp, Homo sapiens
  misc_feature 190, 207, 230, 265, 281, 292, 296, 301, 308, 311, 361: n = A,T,C or G
acccagcatcaggtcaaaaacctgaatcgttgcagtgtgccagtagatcaggcctctgagtcactgctgaaaagcaaagcctgctttggagctgaaaacctcatgagggttctggggaactattgccgccttggtgaagtgcgcacccacattcgtgtgggtgttgtggggttttcccaatgttgggaanagcagcctgatcaatancctgaaacgcaaccgcccatcancgtgggaacttttcctggatttccaaatttttgcngggaggtttcctgganaagtttatccnggtnttggntctccangcnttttcccagggcccaacttaaaaggggggcccattcttggttaaattggntccac

SEQ ID NO: 4235 - DNA, 704 bp, Homo sapiens
  misc_feature 503, 562, 570, 583, 594, 614, 642, 681, 691, 699: n = A,T,C or G
acgcgggggtctgcaggttgtgcttccggtgcggaggtcagggacaagatggtgccaccggtgcaggtctctccgctcatcaagctcggccgctactccgccctgttcctcggtgtggcctacggagccacgcgctacaattacctaaaacctcgggcagaagaggagaggaggatagcagcagaagagaagaagaagcaggatgaactgaaacggattgccagagaattggcagaagatgacagcatattaaagtgagtgaccctgcgacccactctttggaccagcagcggatgaataaagcttcctgtgttgtgtaaaaaaaaaaaaaaaaaaaaaaaagtactgtgagggatagacaagcctccatccacagctcccttcagggcaccaaaaactttattgccagtggtagttctggcaaggcctgcatccaaatagcaggtgaaggcacctgctgaccatcaatgctttccacatttgtattcatcaccagtcacctncacttggccttcatagatcttgtccatgccaaacctattgaaaaacctcgggccaccancaggccantacaaaatacctnagccaaaatanaaactgacattcaaaaagtntgtgttgtttaaaaaaatgttgaaaacnatttgattattaacccaggttataaaaatacaatttttnttttttaccnttaacaanaaaaa

SEQ ID NO: 4236 - DNA, 705 bp, Homo sapiens
  misc_feature 574, 635, 649, 670, 679, 684: n = A,T,C or G
actgctccccaccttagttcttcacaactaacatagaaaattgttgaaaagtaggggcaagcatttgcaaaaacaaacaaaaaatccccagcttattataagcatgaatatgtatgatggaatttcttcccagcaatagacttccaaaccatcaagaaatcaccagaactaagtttgccaagttattttgcctatgtccaacaagagatgcacttatatgtccaacagaggagctgaaaattaaacttagtgtttagtttgggggtgggttgggaaattcagccaccattttaaaatgactgtcttaaaaaaaaaatgaccaccaaaaataggttcactaaatttattttaaaaatcataaaacgtttcttacaaaagagcattacattctgcacactgctctgaacagatgccagggacatgtggactattgttacttttcctccctgtcccaccccccaaatgttacagtgacccaaagcaaggtgttcacaataattacatggggggaattttttaaaccccaacaataacgaaaaataaaatccctcactctgctgctgtttcaaaattnaatggtagtttttgccgcccttccccccccaaccctgtttgtaaggactaaacattccatntggtgacagcaaanatttcactacccctaaatgcnaaccctttnagcanaggaatgttggctttttaaac

SEQ ID NO: 4237 - DNA, 582 bp, Homo sapiens
  misc_feature 420, 510, 577: n = A,T,C or G
acgcgggggtcatagcgacttttgggatagtttgctatcgacaaagggagacaaagtcaaggggtcaagggaaaggagggccaagtagaccctccacgaccctcggcttcctcctcaccagctccccctccctccaagtccagtaagaagttgggccaagctggaagggattgaccgggttgcttgtctggagatggagccactacaggcgggcctgggcgcctggagtcgggcatgaaagaaaatagcgcctcatcgctcttatctaagcccagaggtagacttcgcttgaaaagatcgagaatggaggaggggatcggcactcacttgcagacatcaacagtttccagaaaattcggttcaattccttcaccacggacccaccaaccaaggagctggcaaaacccactaaccaaccangagaacacagacccggttttgtcttttgacaacccgagtggaactgacggggcccggccctgccctgcgggtccccttcctttggctganaagaaaaccaaataaacctttgaacagccttgaaaaaaaaaaaaaaaaaaaaagtaccttggccgcnacccc

SEQ ID NO: 4238 - DNA, 584 bp, Homo sapiens
  misc_feature 427, 430, 448, 469, 476, 561, 569, 578: n = A,T,C or G
accgggggttagaggtatatgaaaagatgagaagctcacactgggcttcttcagttacaaaaccccgttgggatcacacccactcttcttcgtgccctctttatggtgacattggtttggggtgcagatctttaggtgctaaagggcaactagacttgccgatggaggggtttggggaaaattaagggcaacctgcactgagttttcaaggctatataacttcagtagcagttgtatgcccatatgaaaccatgaccactaggagaggggcatggaatgacaagtcctagtgtgatgggagtgggacatttggttaagtgttggttcaatgatctagactcaatgagacactctgaaagctacaaactgcatccactctgccctacagcacgaagccacgtttattactgaactcctaaccagcctncantgcccaagaacggtcaanaagattccttgctgttcacanagaccanacagatgatatcggtcccggaaatgcttttctcaaaagcagtgtcacagaaggcttccttccatccgtttttcttggaggggaantgatgganaatgctganataaga

SEQ ID NO: 4239 - DNA, 706 bp, Homo sapiens
  misc_feature 397, 610, 638, 639, 671, 683: n = A,T,C or G
acgcggggcacaaaatacatgcagaagatggtggcagatctggtggaaaatagctattcaatttctgttccgatcttcaaacagtttcacaagaatatcattgggaaaggaggcgcaaacattaaaaagattcgtgaagaaagcaacaccaaaatcgaccttccagcagagaatagcaattcagagaccattatcatcacaggcaagcgagccaactgcgaagctgcccggagcaggattctgtctattcagaaagacctggccaacatagccgaggtagaggtctccatccctgccaagctgcacaactccctcattggcaccaagggccgtctgatccgctccatcatggaggagtgcggcggggtccacattcactttcccgtggaaggttcangaagcgacaccgttgttatcaggggcccttcctcggatgtggagaaggccaagaagcagctcctgcatctggcggaggagaagcaaaccaagagtttcactgttgacatccgcgccaagccagaatccacaaattcctcatcggcaaggggggcggcaaaattccaaggtgcgcgacagcacttggacacgtgtcatcttccctgcggctgangacaaggaccaggacctggatcaccatnnttggaaaggaggaccccgtccgaaaggcacanaaggacctggangccttgatccaaaacctggataa

SEQ ID NO: 4240 - DNA, 598 bp, Homo sapiens
  misc_feature 32, 189, 193, 262, 264, 281, 305, 357, 385, 476, 495, 537,562, 573, 597: n = A,T,C or G
actttttttttttttttttttttttttttttngctaggaaatatttttatattaattctgaaaagctacaaaagtgcatttttacaaacttaggggaagttgaggttcctggggtgagtcctcggttctcccagctttgctctgtaatgcaggtctctgcaagggtccctgtttgtcccctaagggganagcncaggttggcctgtgcctccaccccactcccgattcaagctcacagcccaccttttccctgccccatctnantgcaacaggtgatcganaaccacatcctcaagctcttccanagcaacctggtgcccgctgaccctgagtgaaggccgcctgccggggactcanacactcagggaacaaaatggtcacccanagctggggaaacccaaaactgacttcaaaggcagcttctggacaggtggtgggaggggacccttcccaaaaaggaaccaataaaccttctntgcaaaatgagggactttncttgtgcttccggagggctttctggaaggaaacaacccctanaggtttacacctttctccccaaacncccgcagggtngtaaatgaccacaccggccaaaant

SEQ ID NO: 4241 - DNA, 468 bp, Homo sapiens
  misc_feature 30, 119, 122, 188, 201, 206, 362, 383, 395, 406, 443: n = A,T,C or G
actttttttttttttttttttttttttttngcatcaaaaagctttatttccatttggtccaaggcttgttaggatagttaaaaaagctgcctattggctggagggagaggcttaggcanaanccctattactttgcaaggggcccttcaaaagtcgctgggctcaaaaggctcttagtcgtgcttganagtgagcctttcnaaaanatactcgcccagcccagcctccgggccacccagcctgtggaggttggtcaggtggtcacccatcttcttgataagcttcacttcctcatctaggaagtgagtctccaggaagtcacaaagatgggggtccgtgcgggcagaacccagggcatgaanatccaaaagggtctggttcanctttttctccanggccatggcanctttcatggcgtctggggttttaccccactcatcttnagctggcttctttgatgtcctggaa

SEQ ID NO: 4242 - DNA, 404 bp, Homo sapiens
  misc_feature 258, 269, 279, 305, 308, 333, 336, 375, 386, 389: n = A,T,C or G
acgcgggggaggagcctgaggaagagggcggcgacggtggtggtgactgagcggagcccggtgacaggatgttggtgttggtattaggagatctgcacatcccacaccggtgcaacagtttgccagctaaattcaaaaaactcctggtgccaggaaaaattcagcacattctctgcacaggaaacctttgcaccaaagagagttatgactatctcaagactctggctggtgatgttcatattgtgagaggagacttcnatgaaaatctnaattatccanaacagaaagttgtgactgttggacanttnaaaattggtctgatccatggacatnaanttattccatggggagatatggccagcttaccctgttgcntaggcaatttnatntggacattctttctt

SEQ ID NO: 4243 - DNA, 705 bp, Homo sapiens
  misc_feature 553, 559, 569, 618, 630, 649, 654, 659, 673, 680, 685, 693,698, 702: n = A,T,C or G
acgcggggctgttcaggatcaaatacaaaattaatatactaggccgagcgcattgcctcaggcctgtaatctgagcacgctgagaagccgacgtgggtggatcacttgagttcaggagtttgaggccagcgtggtcaacatggtaaagccgtctctactaaaaatacaaaatttggcctggcatagcggcacacgccagtagtcccagctacttgggaggctaaggcccgagaatcgcttgaaccagggaggtggaggttgcagtgagctgagatcacaccactgcactccagcctgggtgacagagtgagactccatctcaaaaaataaacaaacaaataaataaataaaagaaattaaggtgctggcatgcacctgtagtcccagctctcaggaggctgaagtgggagaatcacttgagcccaggaaagcggaggtttgcagtgagccaagatcataccactgtgctccagcaggtgacagaacaacactcttgtctcaaaaaaaaaaaaaaaaaagtggagggataccaagttttgacaaggacatggancactanaactgtatanaaaaaatttttaaattctgtcttgaaagaaaacattttcatcaaaggangcatgtaccttnggcccggaacaaccctaangggcnaattncaaccacactggcnggccgtncttantggatccnacctnggtncca

SEQ ID NO: 4244 - DNA, 636 bp, Homo sapiens
actctctctgaaacagctacaaacatcttgtttttgcaaaatatacaatgtttctcaatctttctgtccttatctcaatttgcaaaaatattttgaaacaatctcctttaaatgttattcttgttaatgagggcaaatcttttaaaatccacatgctagatcttgaaaacgcttgagaagaaaataaactgtgaaaggagtggttatttaaatacttcaaactgcacatgtgaaacagacccactatttaatcagaattctatgcaagttttcatccagtattatgatgtcatttaatctctgcataaattgagctgcacaaatatctatttccataaattcattcatggatactatacaaatagattcacagcagtatttggcacccacccataaaatttatttactctatcagggttgcaaagctctaatatcagctgatagcaacttaaattattggcctttgaatgacagattcaaacaagagataaattacatcaaaatcactatcatttttacatgaattaacttgaaaatgtaacaggtaaaccttactcttcaagaagaaaaatcaaatagcatagtttagtgttatttatcttccttccagctttcaccaagggccaattacaagtc

SEQ ID NO: 4245 - DNA, 706 bp, Homo sapiens
  misc_feature 529, 541, 552, 633, 647, 656, 666, 670, 675, 685, 699, 702: n = A,T,C or G
acttataccccctaaatatataaaacatttttaaaagaaaaaaaggaagaaactattcatacatgcaacaacttggatggatttcaagggaattatgctgaatgaaaaaagatcagcctcgtaagattacattctgtatgattccattcatacaacattcttgaaatgacaaaattacagagatggaggacagaacagtggtagccacaggttggggtgagggtataagaaagggatgtggctgcggctgtaaaagggcagtgcaagggatccatgtgacagaactgttctgtctcttgtgatggtggtcacatgaatctacacatgtgataatattgcatagaattaaatacacatacacgaaaaaagttcaagcagttgagcacaaatattttaattgtctaaaatgacattttctttaagagttatctacagttcaaagctcacttttatgaggtgtcacatccatcaccattttaagagatataaaatcatgaaaagattcccagaagctatgtaaacatttcanctaagggtaaanagaaagttaangggggtttttacagggaaattgaaagaaggcaatcccaatgaagtcaacattggtccacaaaatcttggtaaaagaactanaatgggagccccancttgttgancaagtggganaaanaaagnaaaccttttnccaaccggatcccncanggga

SEQ ID NO: 4246 - DNA, 524 bp, Homo sapiens
  misc_feature 295, 452, 460, 486, 489, 518: n = A,T,C or G
acataagcataatcagttatggacagcttcttgtataaattgctattcagcaatacataaactgcctcaaagatttatgcttacaggtagacattcaatttaccaataaaacagcatgttctgaaaatatgggcacattttaaaacatattaagacagttctgttaaccataatagtcccacagtatgactgagtaataagaatctacttcaaaagaaaaaaaaaaattaatcagtatagtgcatgattgattcaacatagttcccagggaacagaccagtcactccgattgcanactccttcataccagccatcatcattcttctttataacataaatgattgcccctccataaatgacagctcatcatccttgtcttttgtataatcatatattgcaacaactttctcaatataattcttgggggcccaagcaaggatccccatctggantatgggancattatacttgaactactgcagcctnctnatcttcataatccactggtgggtggtggnggggga

SEQ ID NO: 4247 - DNA, 625 bp, Homo sapiens
  misc_feature 432, 614: n = A,T,C or G
accagggcggcgcgtggtctacgccgagtgacagagacgctcaggctgtgttctcaggatgaccgagtgggagacagcagcaccagcggtggcagagaccccagacatcaagctctttgggaagtggagcaccgatgatgtgcagatcaatgacatttccctgcaggattacattgcagtgaaggagaagtatgccaagtacctgcaggcctcctacacctacctctctctgggcttctatttcgaccgcgatgatgtggctctggaaggcgtgagccacttcttccgcgaattggccgaggagaagcgcgagggctacgagccgtctcctgaagatgcaaaaccagcgtggcggccgcgctctcttccaggacatcaagaagccagcttgaaagatgagtggggtaaaaccccagacgccattgaaagctncatggcccttggaaaaaaagctgaaccaggcccttttggatcttcatgccctggggttctgcccgcacggacccccatctctgtgacttcctggaactcacttcctagatgaagaaagtgaagcttatcaagaagatgggtgaccccttgacaaccttcacaggctgggtgggcccggaggntgggcttgggc

SEQ ID NO: 4248 - DNA, 705 bp, Homo sapiens
  misc_feature 639, 647, 689, 701: n = A,T,C or G
acagccgccacagctacactccaaccacgtcccgctctccccagcatttccacagacctgatcaaggaatcaacatttaccgaaagccacccatctacaaacagcatgctgccttggcagcccagagcaagtcctcagaagatatcatcaagttttccaagttcccagcagcccaggcaccagaccccagcgagacaccaaagattgagacggaccactggcctggtcccccctcatttgctgtcgtaggacctgacatgaaacgcagatctagtggcagagaggaagatgatgaggaacttctgagacgtcggcagcttcaagaagagcaattaatgaagcttaactcaggcctgggacagttgatcttgaaagaagagatggagaaagagagccgggaaaggtcatctctgttagccagtcgctacgattctcccatcaactcagcttcacatattccatcatctaaaactgcatctctcctggctatggaagaaaatgggcttcaccggcctgtttctaccgactttcgctcagtatacagctattggggatgtcaacgggggagtgcgagattaccagacactcccagatggcccattgcctgcaatgaaaatggacccgaggagtggtttatgncccaactnttggaaccaaagaaatttcatttgaaatgctcatggggaccnaccgaaggggcnaaca

SEQ ID NO: 4249 - DNA, 381 bp, Homo sapiens
  misc_feature 34, 132, 200, 216, 266, 272, 288, 306, 347, 354, 367: n = A,T,C or G
acttttttttttttttttttttttttttttgganatggagtttctccttgtaagccaggctggagtgcaatggtgtgagctcggctcactgcaacttccacctcccaggttcaagtgagtctcatgcctcancttcccaagtagctgagtttacaggcatgtgccaccacacccagctaatttttgtatttttagtgganacgggatttcgccatnttggccaaggctggtctcgaactcctgacctcaggtgatccacccacctnggcctnccaaatgctgggattncaggcatgagccaccgcncgcagtctattatttattaaatactaacgtttacatctttnattctanaagggcaaacccngaaaaaaatggtga

SEQ ID NO: 4250 - DNA, 579 bp, Homo sapiens
  misc_feature 400, 426, 480, 512, 559: n = A,T,C or G
accatatcaatgccaaccttttattataaatgaataaccaaaaaaataagtgaaaaatgagggcacgatctcttcttacacctcttcaactctccagcatctaaacctttcctgtcagaagtctgctctggagacttttttcatctgcaaggacagtgctttattccatgactaactctccatggtgcctctggataatggttggtactataaccttgaaaattttcgacctggtgtctagtgttaagtgaaagtaatgcattttttttaagtgaaaagcttcttacattatttcacagacagtattacccaccccacattatgaatagttagatatattttatgtactttttttttttttttttttttttttgaatgagtctctttttattctcttggnaatctcttccagttaactacttccgntggaggtgatgaaatgggtaaggctcccacttcaaatgttggcactgctatgancatggtcttccctttattgcactcaaaatcanaacctttgattcttttttatattccagcccaaaagtagctcactggnaaaagtaaattgatgaagta

SEQ ID NO: 4251 - DNA, 319 bp, Homo sapiens
accagctgtaaccaatacgattctggggcaggttgtgggcgagtagaagaacctccttcccctctgcgacattgaacggcgtggattcaatagtgagcttggcagtggtgggtgggttccagaaggttagaagtgaggctgtgagcaggacctccttccaggggacatgcaatctgcagggaggggctgaggggggtcccatggtctctgctgtcttctctgtccacctctttgtagaggagcctgagctccaggaatgctctggtcagggctgctgtgactgttggccctgctgtccttcctccttctgtccccacgt

SEQ ID NO: 4252 - DNA, 650 bp, Homo sapiens
acgcggggcctttccggcggtgacgacctacgcacacgagaacatgcctctcgcaaaggatctccttcatccctctccagaagaggagaagaggaaacacaagaagaaacgcctggtgcagagccccaattcctacttcatggatgtgaaatgcccaggatgctataaaatcaccacggtctttagccatgcacaaacggtagttttgtgtgttggctgctccactgtcctctgctagcctacaggaggaaaagcaaggcttacagaaggatgttccttcaggaggaagcagcactaaaagcactctgagtcaagatgagcgggaaaccatctcaataaacacattttggataaaaaaaaaaaaaaaagtacgcgggggaacccaaagagccctccttagccaacacgctaactccgaagcctcccttaccccccaaccaccaaggcggcgacacctgattcagcgcacaaacacaggtcccttctgtcccggatacaattacgcgggaaaacacacttaacttgcgccggggcaccaaaaacagctatgagtcttacactccatatttaattctcctgggaatggctgttggggatacaaggctgcaaaatcatcatcgtgccgccaattttttttaaagccatttttt

SEQ ID NO: 4253 - DNA, 617 bp, Homo sapiens
  misc_feature 517, 586: n = A,T,C or G
actctcctacttctgggcatggggtgacttgaggaatgttgaagccattctgaccaccatcccgatcggccatgctgtcaaagaagagccaggcagaatcgtccttcccatacttcacaaaagcaacatagtggcttgtttctatgcagagaacagcaaataactccatattctggcaagggatgcagccgtgtctccagtcccagtcgggtaagtctttgggaagtgacactgggttatatttatgattcagcctcttcggatgaaggtggacttgagtgttgcaggttttacaaaactgcttgatttttccagctgagatgtccggatcgtcgtagcattctctacactcatacattgcaagccctccacatatccggcactgtctgggagtgtcttcaagtaaatctgttatatttaattccagagaaggaaaaatttttttaaatagtttaaagtcttttccaaatcgaggcatctgaataatcagacatgatggtgcctctgcaaatttcangttactgttgataaaaagaccattctaacaactgctgaattgtgggaacgccaactttctcattttttncataaaaatttgatagaaataacaatcttgg

SEQ ID NO: 4254 - DNA, 557 bp, Homo sapiens
  misc_feature 429, 468, 523: n = A,T,C or G
actctcctacttctgggcatggggtgacttgaggaatgttgaagccattctgaccaccatcccgatcggccatgctgtcaaagaagagccaggcagaatcgtccttcccatacttcacaaaagcaacatagtggcttgtttctatgcagagaacagcaaataactccatattctggcaagggatgcagccgtgtctccagtcccagtcgggtaagtctttgggaagtgacactgggttatatttatgattcagcctcttcggatgaaggtggacttgagtgttgcaggttttacaaaactgcttgatttttccagctgagatgtccggatcggtcgtaacattctctacactcatacattgcaaagccctccacatatccggcactgtctgggagtgtcttcaagtaaatctgttatatttaattccanaaaaggaaaaatttttttaaatagttaaaagtcttttcnaatcgaggcatctgaataatcaaacattgatgggtgccttttgcaaaattttcangttaactgttgataaaaaaccattctaacaactg

SEQ ID NO: 4255 - DNA, 414 bp, Homo sapiens
  misc_feature 400, 411: n = A,T,C or G
acgcggggataagataagggacctgttagatgtttcaaagaccaacctttcagttcatgaagacaaaaaccgagttccctatgtaaaggggtgcacagagcgttttgtatgtagtccagatgaagttatggataccatagatgaaggaaaatccaacagacatgtagcagttacaaatatgaatgaacatagctctaggagtcacagtatatttcttattaatgtcaaacaagagaacacacaaacggaacaaaagctgagtggaaaactttatctggttgatttagctggtagtgaaaaggttagtaaaactggagctgaaggtgctgtgctggatgaagctaaaaacatcaacaagtcactttctgctcttggaaatgttatttctgctttggctganggtagtacctnggc

SEQ ID NO: 4256 - DNA, 573 bp, Homo sapiens
acgaatacacagagtggtcttttcaacactcctccccctactccaccggacctcaaccaggacttcagtggatttcagcttctagtggatgttgcactcaaacgggctgcagagatggagcttcaggcaaaacttacagcttaacccattttcaagcaaaacagttctcagaaatgtcatgattgccggggtgaaggcaagagatgaattgcattattttatatattttttattaatatttgcacatgggattgctaaaacagcttcctgttactgagatgtcttcaatggaatacagtcattccaagaactataaacttaaagctactgtagaaacaaagggttttcttttttaaatgtttcttggtagattattcataatgtgagatggttcccgatatcatgtgatttttttttcctccccttccctttttttgttattttttcagactgtgcaatacttagagaacctatagcatcttctcattcccatgtggaacaggatgcccacatactgtctaattaataaattttccatttttttcaaacaaaaaaaaaaaaaaaaaaaaaagt

SEQ ID NO: 4257 - DNA, 309 bp, Homo sapiens
  misc_feature 264, 265: n = A,T,C or G
acgcggggggatcgctgctcctctctggggtcctggcggccgaccgagaacgcagcatccacgaaatgccacgggtgacctggccaccagcaggaatgcagcggattcctctgtcccaagtgctcccagaaggcaggattctgaagaccactccagcgatatgttcaactatgaagaatactgcaccgccaacgcagtcactgggccttgccgtgcatccttcccacgctggtactttttttttttttttttttttttttgggnntttttttttttttttttttttttttttgggctctaaagggggta

SEQ ID NO: 4258 - DNA, 519 bp, Homo sapiens
  misc_feature 369, 384, 508, 515: n = A,T,C or G
accacatcatccatgctgacatctaccgctggtttaacatttcgtttgatatttttggtcgcaccaccactccacagcagaccaaaatcacccaggacattttccagcagttgctgaaacgaggttttgtgctgcaagatactgtggagcaactgcgatgtgagcactgtgctcgcttcctggctgaccgcttcgtggagggcgtgtgtcccttctgtggctatgaggaggctcggggtgaccaagtgtgacaagtgtggcaagctcatcaatgctgtcgagcttaagaagcctcagtgtaaagtctgccgatcatgccctgtggtgcagtcgagccagcacctgtttctggacctgcctaagctgganaagcgactggaggantggttggggaggacattgcctgcagtgactggacacccaatgcccagtttatcacccgttcttggcttcgggatggcctcaaccacgctgatacccgagacttaaatggggaacccctgtcctnggccgcnacaa

SEQ ID NO: 4259 - DNA, 509 bp, Homo sapiens
acagatcagcagagcaggacagttggcagcagtgacctcagtagggaacatgtccgtctaccctctcgcactcatgacacctccccctaccagccctcctcttcctcctcctcctcctcctgtgggaggtggtcagtgggacttagggatctttcacctgctgtgcccagtagttctgaagtctgcttgtggagcagtgttttatgtttatccctgtttactgaagaccaaatactggtttggagacaacttccatgtcttgctcttctacctccctagttagtggaaatttggataagggaactgtagggcccagattctggaggttttatgtcattggccacagaataactgtctctaagctatccatggtccagtggtccctgccaattctgtagacttcagaaagcacttctctcttatggggttcatgggaacaggggtgggtgtgacttgcttggtggcctcattccatgtgtgcctgtgccttggggcatggactttgttaa

SEQ ID NO: 4260 - DNA, 543 bp, Homo sapiens
  misc_feature 398, 488, 493, 500, 525: n = A,T,C or G
acataccctttcactagtgtttgagtggcacaagccacatttaccatgagaaagaagagatttattcataaaaatgaatttaggctgaatggcttattattggaggtaagggatttcaaatctctgttcgtcactgtccactgacaagaaaaatcaccctgaatggttttacatccaattttttaaaagtccattgctggtacttttttttttttttttttttgccaatataagtttccatttttactgtgcatacacatatatacaatgtattttaaaaatgggctttacaatatgtagtttgatcacttggtttacaactaaatatattgtgaacattttgtcttctacaacagttaaaagaattgaatagcttggaggaaacacaatttattaancaatcttgttggggacattgaggtataattttttttctaaggaggcttcattctttttataatgcctttgggaaaaaaagggggagttcntggcntatatanctttctataatgatggaaaccttgnccttcctttaccctttta

SEQ ID NO: 4261 - DNA, 642 bp, Homo sapiens
  misc_feature 219, 282, 481, 487, 527, 536, 575, 589, 598, 605, 608, 614,616, 619, 630: n = A,T,C or G
accgccagctctctgctctccacagggctccccgccccacccggcctgataaagcgcgccgactgggctacaaggccaagcaaggttacgttatatataggattcgtgttcgccgtggtggccgaaaacgcccagttcctaagggtgcaacttacggcaagcctgtccatcatggtgttaaccagctaaagtttgctcgaagccttcagtccgttgcanaggagcgagctggacgccactgtggggctctgagagtcctgaattcttactgggttggtgaanattccacatacaaattttttgaggttatcctcattgatccattccataaagctatcagaagaaatcctgacacccagtggatcaccaaaccagtccacaagcacagggagatgcgtgggctgacatctgcaggccgaaagagccgtggccttggaaaggccacaagttccaccacactattggtggttttcgcggcagnttgganaaggccaatactctcaacttcaccgttccgctaatataantaaagttgnaaaattatacttaataaaaaatttaggacagtcattgtntgcttacaggtgtnatttgtctntaaaacnatntgcaangnttnttgaatgtttntaaattaaaaaa

SEQ ID NO: 4262 - DNA, 549 bp, Homo sapiens
  misc_feature 33, 43, 46, 66, 71, 166, 262, 268, 301, 372, 401, 462, 468,492, 495, 500: n = A,T,C or G
acgcgggggaggtgacttcctggtctatcctgntgaccccctncgnttccacgcccattatatcgntcagngctgggcccctgaggacaccatcccactccaagacctggttgctgctgggcgccttggaaccagcgtcagaaagaccctgctcctctgttctccncagtctgatggtaaggtggtctacacctccctgcaatgggccaacctgcagagaactccacagacctaggggatgtggctgtgtcggcagcaatancctttntggatgttccccagctcttctctgggagtctanaacatcctcctacctttctccgcggttagtttttgattccaggttttccaacactacatcttttttatgtncttccttgttcaaagcacttattggctgngtttttgtagttacctattttcacactgtgagcttccgagaatggggcctgggtttgattnatctgntttctacagggtttaaagtctcangangtctnaataaacttggtatataaatgtcaaaaaaaaaaaaaaaaaaaaaaaaaa

SEQ ID NO: 4263 - DNA, 337 bp, Homo sapiens
  misc_feature 38, 147, 171, 250, 261, 266, 291, 295, 297, 324: n = A,T,C or G
actttttttttttttttttttttttttttgggatttanctgttctttattgacatggaatttggggtggcgagggtagccacaccctccaggaggatgaggtaggttcagtgcttccagctcacacctttcctgggtcttccttcantgtgacagttcggttaaagacaanctttccctgatggctgtctggatccacggaaaaatatccaagacgctcaaactggaaacttgtcgaagggttttgccangggccacaaancattncctaaatgcttgcatccaccacgtntaantnatgccaggttaaggtcacttaaaaatncaccaaggcacct

SEQ ID NO: 4264 - DNA, 590 bp, Homo sapiens
  misc_feature 451, 514, 523: n = A,T,C or G
acactaaagggtgtttcccaagaatagaggtgaagatattttcattttgtttaacccacaaactatttggtcaaaggaatatgtaaagctaaataaaagcacatctggtagaaattcatggcaatgcatgttgacaagatgtgcttggacctcgcttgcagcatctggcagtgggtagcagaacaaaggtaggaatctcacaggctctcctgtgtcttttctggaagaggctccgtggtggtggcactagcatttgcagccgaattcaagacttctccaaaatcaccaccagcaggcttggttccccctactttagactttaagttttcgaccttttcttcaaatgatttaaaagttggggagttttttacatcttccactttttggtgatgactgaccaacagacgaaaaagcagctgaggccttctgtccacctgggataaggtttcanatgtcttcttgtaacagatgttgctgtcacgtcttgccaccctttggcaatgttctgttttanttcctgtanaaaattgattccaagtttcccgtttgatctctgcttaaatgcttctcttttgctgctaacacttgaa

SEQ ID NO: 4265 - DNA, 483 bp, Homo sapiens
  misc_feature 27, 187, 189, 374: n = A,T,C or G
acttttttttttttttttttttttganacagggtctagctctatggcccaggctggagtgcagtggcacaatcatagctcactgcagcctcaactttctgtgctcgagtgattctcctgcctcagtctcctgagtagctgggaccacagacgtgcactaccacacttggctaattttattttttcananatcacatgtggtttgagggaggatagagaggacagggtgtcaagaacagcatttttaccaagttgatataaaaatgaaacaggatccaggcatgggtctttacactgatagttacagtaagttttaaaatctgagcagcaatttgaatcacttcttgaaaaacacacaaaatatattttttgtanaggtgggggtcttgctctgttgcccaggctggtcttgaactcgagattctcctgctttggcctcccacaagtgctgggattacaggcgtgagctactgcacccggcctg

SEQ ID NO: 4266 - DNA, 559 bp, Homo sapiens
  misc_feature 472: n = A,T,C or G
acgtgcaaccttgttgctacggccactattcttcattttggtagagccgaacttggtggcagcaaaagtggcagtggtaaaggttaaaggctgagtggaccggggcatgaaggtagggcttacagcagcagagtgaccaaaaggaggcgatggagagctggacactgatgaggctgggtcacttatgggcataaaaacctgggcctctgggttaaagctgtttttgatctccttatccaactcacatccattttcattattatcatccacgtaaagcaccttcactggtcccttttcaccaatttggtaagaaacctcaaatgggtcgatccaaacactaagatcctgtggcagattgccacgaacatcatcaatgtccaaaccactctctttggatgcttgttcaatcactgggtccactttctccctatgtgtatacatctaaaccccaatcctttgtatggcttttcangataccagtgcccttcatatttcttcttaagaagtctttcaagttcttcaccaaaaatgttgacacgtctcctgggaagcttattgt

SEQ ID NO: 4267 - DNA, 650 bp, Homo sapiens
  misc_feature 612: n = A,T,C or G
actatggcctcttcaatacactgtagccagtgcactgggcccttggggatgcccagtgatatacacgttgaagcagtaatgtaagtctgtgagccactgttcctgaacacttccactcttcaatgtcgtgatattcttgatgatctgctgcaccaagatcgcattggtcaacatatgagtcctgaggggtgcatgctgaagcagcagtcgaagcagctggcccacaacaggcagctcctcaggcccaactctgttcacccgcaggctctgcagcatcaacctgaggactcgaggcaagagagccaggatggagacacagaccccccacagcttgtccctctttcttagatgttctgcttcccctttctctatagtgagcagaaaataaagaagactgtagcaacaagaagccagaaatggcagtaagagtctcactaactacacaagtatgatccaggagcttacagataacaccaaaaacacagccagccgtgctgtcaggaattacagtcaacccaaccaaatgcttactgatggcactttgcaagatgtcaaagttctgacttcgggcaggaataaccaataaactgtgaaaaactgctctgttacatnccagtggtgtaaaaattgatccaaatctgtaaggtaaa

SEQ ID NO: 4268 - DNA, 650 bp, Homo sapiens
  misc_feature 502, 542, 604, 607, 628: n = A,T,C or G
actgttctgctctataagaaggtcgtttagtggaataaaagtctacataatttgtggtcgatttcagtccatactgtgttgagtaatcagtagaagctggaaagtgaactcggtcatcaaaataaggatcttcatagctatgaggagactgcaaatacaatctgtatgcatcaaagttctttctgttggagtcatcttgactataatacagctgttgatgctgtagccgtctattttgttctcttgctggtgaggaataggaactgatgtaaattggtgaaggtttgctggagcctgactgaatgatgggtgacatctgttggttggtggtagacaaggaaggatgtgatttgaatcggtctcgctccaatgtcgacacaggtgtaataaaatggttctgattccacccatcctttttataaatgctccggaggtcccgatattgccataatgtattcaagacctgggctgctgccttcaccactttcagagatgatctgcncccctgcctttggttatgttcaccagcttctctatgcctnctgagtcggccagggcttttgcgttctccatgtttttgctggtgacctcgtgcagaacacancanatgctgccatggtctcatcanacaaacactggggccatttgcc

SEQ ID NO: 4269 - DNA, 650 bp, Homo sapiens
  misc_feature 473, 622: n = A,T,C or G
accaaaagaaaaagaaaaggaaaaggtttctactgctgtattatctataactgccaaggctaaaaagaaggaaaaagaaaaggaaaaaaaggaggaggagaaaatggaagtggatgaggcagagaaaaaggaggaaaaagagaagaaaaaagaacctgagccaaacttccagttattggataacccagcccgagttatgcctgcccagcttaaggtcctaaccatgccggagacctgtagataccagcctttcaaaccactctctattggaggcatcatcattctgaaggataccagtgaagacattgaggagctggtggaacctgtggcagcacatggcccaaaaatcgaggaggaggaacaagagccagaacccccagaaccatttgagtatattgatgattaagggccagaggatctcacttgcttatctgaagaagattgtccaggctcatattgggaatgcttatgangaaattcatgccgagacctgctattcaatgcatgtatcgttgcctctgcactgcctgaagaaccctgtctccaagtctttggttgaagagaagatatatgactgttgagtgtgctctttcacagacttggttttcaaataaatattaanatctccagatggccaaaaaaaaaaaaaa

SEQ ID NO: 4270 - DNA, 362 bp, Homo sapiens
acgcggggtttcaactgacctctggacgcagaacttcagccatgaaggtaacaggcatctttcttctcagtgccttggccctgttgagtctatctggtaacactggagctgactccctgggaagagaggccaaatgttacaatgaacttaatggatgcaccaagatatatgaccctgtctgtgggactgatggaaatacttatcccaatgaatgcgtgttatgttttgaaaatcggaaacgccagacttctatcctcattcaaaaatctgggctttgctgagaaccaaggttttgaaatcccatcaggtcaccgcgaggcctgactggccttattgttgaataaatgtatctgaatatcaaa

SEQ ID NO: 4271 - DNA, 649 bp, Homo sapiens
  misc_feature 594: n = A,T,C or G
actgtcacctactcatgcacaaaactgcctcccaaagacttttcccaggtccctcgtatcaaaacattaagagtataatggaagatagcacgatcttgtcagattggacaaacagcaacaaacaaaaaatgaagtatgacttttcctgtgaactctacagaatgtctacatattcaactttccccgccggggtgcctgtctcagaaaggagtcttgctcgtgctggtttttattatactggtgtgaatgacaaggtcaaatgcttctgttgtggcctgatgctggataactggaaactaggagacagtcctattcaaaagcataaacagctatatcctagctgtagctttattcaagaatctggtttcagctagtctgggatccacctctaagaatacgtctccaatgagaaacagttttgcacattcattatctcccaccttggaacatagtagcttgttcagtggttcttgctccacctttctccaaaccctcttaattctagagcagttgaagacatctcttcatcgaggactaacccctacagttatgcaatgagtacttttttttttttttttttttttttttggatanttttatttctccaaattgttatttatcaggagtgactgaaataaaaaatacaatt

SEQ ID NO: 4272 - DNA, 283 bp, Homo sapiens
  misc_feature 118, 172, 192, 207, 220, 252, 260, 276: n = A,T,C or G
acgcggggaggccccagccagctcaggctacactatcccaggatcagcatggccgtccgccagtgggtaatcgccctggccttggctgccctccttgttgtggacagggaagtgccantggcagcaggaaagctccctttctcaagaatgcccatctgtgaacacatggtanagtctccaacctgttcccanatgtccaacctggtntgcggcactgatnggctcacatatacaaatgaatgccagctctgnttggccgnataaaaaccaaacagnacatcca

SEQ ID NO: 4273 - DNA, 654 bp, Homo sapiens
  misc_feature 580, 593: n = A,T,C or G
atacgcggggagtcacgggggagcgaggcctgctgggcttggcaacgagggactcggcctcggaggcgacccagaccacacagacactgggtcaaggagtaagcagaggataaacaactggaaggagagcaagcacaaagtcatcatggcttcagcgtctgctcgtggaaaccaagataaagatgcccattttccaccaccaagcaagcagagcctgttgttttgtccaaaatcaaaactgcacatccacagagcagagatctcaaagattatgcgagaatgtcaggaagaaagtttctggaagagagctctgcctttttctcttgtaagcatgcttgtcacccagggactagtctaccaaggttatttggcagctaattctagatttggatcattgcccaaagttgcacttgctggtctcttgggatttggccttggaaaggtatcatacataggagtatgccagagtaaattccatttttttgaagatcagctccgtggggctggttttggtccacagcataacaggcactgcctccttacctgtgaggaatgcaaaataaagcatggattaagtganaagggagactctnaccttcaacttcctaaattctgtgtctgtgactttcgaagttttttaaacctctgaatttg

SEQ ID NO: 4274 - DNA, 229 bp, Homo sapiens
acctctctaagttttcatgccctgctatctggaacacttccccacttccctgccagaagtcctctagctctgcattaaggatcttgttgtccctgactgacacccacatatggaacatttggcatgcctccatggcaacacgggatccctgaagtttatgaaagcgttccatgtgagagaggatgctcatatactcctgccccaccctccaaagatgtacttttttttt

SEQ ID NO: 4275 - DNA, 652 bp, Homo sapiens
accagctgtgggatttcgtcttcggattcatttgttgctttaacttgggcttttcctctgccacgttttttcttcccatgctctggggtctgttccttctttgattcaggtttcttcactgtagtatcaccactttcaggtgccacatcatctttactaagaactgatgcagtcttcctagcctgctgcctcttcttcttcctctccttttgtttttcaaaatttctttctcttcgttttctccttgcctcttttttcttcttattaagcaaagatcttttggtggcttcatcccaattgctgacaaacgaggaaaagatgggaagtgcagccgatttctcagttttcacaaacaggagtttcacgctctcccacttctctggcaatttttctgaaagtcctttggtgacagcaacaatgttttcaatgatgtgctcaatttgcattccaacgtgaccaatacgtatagcactgcaagaaccacttttagaaatgtttaagaccgttccacctatacagtcattgatctctcttgataaattcttggacagagggttacagatactggaactttctttctttgatagaaatgtctcccaatgagtgagggtaaagagccgctaattctggcatcagtaaggaagaaatcaaa

SEQ ID NO: 4276 - DNA, 501 bp, Homo sapiens
acaccagatcacgagacatcgtttcatacttcccaaatagttttatattttagctttgaaggtcagttaccagagccaaacttgttcttaacaagcagaattttatgtccattcaaagagtctcttacacctttctgggcctattcacttgcagagaggagtcgaaactgtaaccaggctcttcatatcgtgcattcatatgtgatgtcctgtcttcatatgctgtccaatttctttaagataaatggagtgactcgcaggagggccacgtagatgagaaagttccgtatggaggagatcacatcctcgcgcatcttccgtttcatctcctccgggtccagcttcggcgcgaggccctcaatccggaacatcgcggctctccccgcgtacccagaatacttattgttcattttgaaaagactttgttcttttcatttttatttgggagtctttgtgaccagagaagttagggaggaggttatttttgtgttttggggttgg

SEQ ID NO: 4277 - DNA, 547 bp, Homo sapiens
  misc_feature 390, 396, 437, 441, 456, 476, 494, 518, 537: n = A,T,C or G
actaccagagcgaggagcaggcagaggaggagctcctggacatggcggtgctaaaggactacattgcctacgcgcacagcaccatcatgccgcggctaagtgaggaagccagccaggctctcatcgaggcttatgtagacatgaggaagattggcagtagccggggaatggtttctgcataccctcgacagctagagtcattaatccgcttagcagaagcccatgctaaagtaagattgtctaacaaagttgaagccattgatgtggaagaggccaaacgcctccatcgggaagctctgaagcagtctgcaactgatccccggactggcatcgtggacatatctattcttactacggggatgagtgccacctctcgtaaacggaaagaanaattanctgaagcattgaaaaagcttattttatctaagggcaaaacnccanctctaaaaataccancaactttttgaagatattcnggggacaatctgacatancaattactaaagatatgtttgaanaagcactgcttccctgcanatgatgaatt

SEQ ID NO: 4278 - DNA, 652 bp, Homo sapiens
  misc_feature 333, 599, 628, 639: n = A,T,C or G
acctaatgaagaaggttatgaaatattaggtggttcgagtttcttaaatctggcaccagaccatgactttgaaggtgttaatgttgaagtgtcgatgcaaaaatgtctattaacaaaactgcttaacactgtttgagaaacaggacaaaataattgtttttctttcacagacacttttctgaatcaattctctacagactctctcccattcagaatcagttgggtggactgatgaggcaaaaaataaattccttttaaaaaacaaaactggagcctatttacaaaacatgcaaagggagaattttaagcaggtgttactgcagaactgctcanacgtgaatacagctgagtgacagaatatacctttacttctacaaatataggtccttcctccagactttctggaagaaatacattttcagggtgtggactataaaatggcatacaatgcagagacagaaacaaagaagtttgcaaatcttttatatttccagctgttgagacagtatttttgagggctgatgttacctctagcggcgaaaccagagccagctattaagcagccagaagctacagtaattgaatacatgaccattttntttttagcacgttctttgttctcctcttncagaagtttgnagaacgtctattt

SEQ ID NO: 4279 - DNA, 485 bp, Homo sapiens
  misc_feature 31, 62, 68, 134, 160, 193, 225, 229, 292, 314, 322, 342,365, 433, 450, 475: n = A,T,C or G
acttttttttttttttttttttttttttttngatccgtatcttttgctttctaaaggtctanaattanatctgttttctaaatatgctgtttctgaacctgaatcttcatttctcaaaatgtccctcagcaaanaagcacaaccatcaagcccgtgtacntcaagcaggagtgcaatcgcacccacaaccgcntgtgcgaatgcaaggaagggcgctaccttganatanagttctgcttgaaacataggagctgccctcctggatttggagtggtgcaagctggaaccccanagcgaaatacagtttgcaaaanatgtccanatgggttcttctcaaatganacgtcatctaaagcaccctgtanaaaacacacaaattgcagtgtctttggtctcctgctaactcataaaggaaatgcaacacacgacaacntatgttccggaaacagngaatcaactcaaaaatgtggaatanatgttaccct

SEQ ID NO: 4280 - DNA, 649 bp, Homo sapiens
  misc_feature 628, 633: n = A,T,C or G
acccctcaaccccttctccttcacccttagcggcaagtcccgctttcctaggggcaagaacctcccaatcgcttatttccgcaccccaacctcttatctctgtgccccaatcccttatttccgtgccccaaccctttctctgcttttctggagggcaagaactccccaccccttctccatgtctctactcttttctctgggcttgcctccttcactatgggtaggcttccaccttccattcctccttgttctcccttagcctgtgttctcaaaaacttaaaacctcttcaactcacacctgacctaaaacctaaatgccttattttcttctgcaatgccgcttgaccccaatacaaactcgacagtagttccaaatagctggaaaacggcgctttcaatttttccatcctacaagatctaaataattcttgtcgtaaaatgggcaaatggtctgaggtgcctgacgtccaggcattcttttacacatcaagtcccttcctagtctctgtgccccgtgcaactcgtcccaaatcttccttctttccctcctcctgtcccctcagtcccaaccccaaagcggcgctgagtctttctaatcttcctcttctacagacccatctgacctctnccctncgcgccaggccaaagc

SEQ ID NO: 4281 - DNA, 653 bp, Homo sapiens
  misc_feature 652: n = A,T,C or G
actggtattacttgaaaaaataaaaattaaaaatatattgtcaatcatgcattccacaatttcaagaactaagatataactcataaatactgttatgtctttgcaggttatctcaatttccatcaggcctcagctgaaagctcatctgccaaaacacatcagcactcatgtaaaataaaaggagtagggaggtgactttctacacaatactgtacgcggggagagggaggaaggacagcagaccagacagtcacagcagccttgacaaaacgttcctggaactcaagctcttctccacagaggaggacagagcagacagcagagaccatggagtctccctcggcccctccccacagatggtgcatcccctggcagaggctcctgctcacagcctcacttctaaccttctggaacccgcccaccactgccaagctcactattgaatccacgccgttcaatgtcgcagaggggaaggaggtgcttctacttgtccacaatctgccccagcatctttttggctacagctggtacactcacgtgccttacaggatattaaaccaaaaagctagaattaacaaacatgccaaatgttttcactttgaatcgtaaacacagctcctatatttgagttttacagaaaggcatgtttctna

SEQ ID NO: 4282 - DNA, 440 bp, Homo sapiens
  misc_feature 188, 290, 322, 334, 336, 354, 361, 393, 402, 425: n = A,T,C or G
ttatcatcctaatgtagacaagttgggaagaatatgtttagatattttgaaagataagtggtccccagcactgcagatccgcacagttctgctatcgatccaggccttgttaagtgctcccaatccagatgatccattagcaaatgatgtagcggagcagtggaagaccaacgaagcccaagccatanaaacagctagagcatggactaggctatatgccatgaataatatttaaaattgatacgatcatcaagtgtgcatcacttctcctgttctgccaagacttcctnctttttgtttgcatttaatggaccagtcttanaaacattacagnantaaaaagcccaagacatntttcagnccctttggtgattaaatgcacatttagcaaantctaatgtnttgcctgattcctgcctaaaagnatgagcagaggctta

SEQ ID NO: 4283 - DNA, 496 bp, Homo sapiens
  misc_feature 394, 459, 483: n = A,T,C or G
accgggatgttccaacactacatccgacatcagaagagctaacaattgctggaatgacctttacaacttttgatcttggtgggcacgagcaagcacgtcgcgtttggaaaaattatctcccagcaattaatgggattgtctttctggtggactgtgcagatcattctcgcctcgtggaatccaaagttgagcttaatgctttaatgactgatgaaacaatatccaatgtgccaatccttatcttgggtaacaaaattgacagaacagatgcaatcagtgaagaaaaactccgtgagatatttgggctttatggacagaccacaggaaaggggaatgtgaccctgaaggagctgaatgctcgcccatggaagtgttcatgtgcagtgtgctcaanaggcaaggttacggcgaagggtttccgctggctcttccaatatatttgactgatgtttggacggnggaaaataaaaaaagttttacttntctggctgatcct

SEQ ID NO: 4284 - DNA, 652 bp, Homo sapiens
  misc_feature 376, 540, 583, 613, 650: n = A,T,C or G
acttttttttttttttttttttttttgcagaaagagtagccaggtgttagccactttaatagaaaatatgatcaaaactcgattacaagagttcaaaaagacatagaaaaccagtgagtttcaattttattacaagttttcaaatctgggactagtttctttttttcttttaactgaaatgccaacttcagcccagggttttttcacaaccaaactaaaaatgacttactacatgggaacatcaatgcaacaagtagaatttgtaaactcaagccacaaacttagttaataatcatggttaagggacattgccaaagagcaattgatgcctcagtgaagtttgaaagaaactctgctttctgtgacggcagagaanaaatatgcaagcaattctgcttcaaagaaatttgcatagaaatggaaaaatgccagagcctttaacacaagtgaaattgcaaagcctcaacacgttcaactcaatcccagacaccaaatgtttaatgggagccaaggtaggactgagcattgaacttccagctntgcaactcgcagggcacaatttcaagtgtggaaaccatctgtnggcaagctctttaaaaaattgaatttttanacaccgtaaatttctaatgcagacacttttgcattantg

SEQ ID NO: 4285 - DNA, 650 bp, Homo sapiens
  misc_feature 492, 543, 590, 606, 613, 643: n = A,T,C or G
acacttggatgagaagattaagctttacaaccagaagtatccaggactactgaaaataatacggcatcctgaaaggaaaggtcttgctcaagcccgcaacactggctgggaagctgccacagcagacgtggtcgccatcttggatgctcacattgaagtcaatgttgggtgggcagagccaatcttggctcggattcaggaggaccgcactgtgattgtgtctcctgtgtttgacaacattcgttttgacaccttcaaactggataagtatgaactggcagttgatgggtttaactgggaactctggtgccgctacgatgcactgccacaagcctggattgatctgcatgatgtcactgccccagtgaagagtccttcaatcatgggcatcctggctgctaacaggcacttctgggagagatcgggtctctggatggtggaatgctcatctatggaggagagaacgtggagcttaacctgagggtgtggcantgtggagggaaggtcgagattttgccctgttcccggattgcccacctaaanaaacaccacaagccctaccccttggatctcaccgcttgccttgaaancgcaatgctctgcgantggcccnaaatttggatgggatgaaccccaaacaccntggtctt

SEQ ID NO: 4286 - DNA, 203 bp, Homo sapiens
actgcagaagaaaaagcaatcgttcagcagtggttagaatacagggtcactcaagtagatggacactccagtaaaaatgacatccacacactgttgaaggatcttaattcatatcttgaagataaagtctaccttacagggtataactttacattagcagatatactattgtacttggatttttttttttttttttttttttt

SEQ ID NO: 4287 - DNA, 653 bp, Homo sapiens
  misc_feature 472, 643, 650: n = A,T,C or G
acgagccggtagaggaatcctgtttgatctggaaattttccgtggagagcccaaaaggtcggagaaccaagttcccaagatcttttaatttacctaacatctcttcttttagtctttcattacgttcttcaatttgcttaggtaatctcatacaagcttctcttgcttgatgtattgatggatctttttctaatatagatttatagtcttccagggcttcatctagcttgtccgtcttctcatacaactctgctctcctcaatattgccctgatatagctggggtttaattgaattgctttgctgcagtcattgatggccatttctttcttgtcctgtttcatccttgctgcagctctatttgaaaataagaatcgacctctccttttggaagcaggatgggcacatttcgagggctcgactataagaactttcagcttctatataatctcctttcttaaactgttcatttncctcctcctttaagtctaatgctctcttctctcttttctgtttctcttcatccgacatgttttttccagttctattaggtattcttcatctagttcagaggaattcacatcttcttagattgttcctaaactttgtccgctcctggctcctcctcaaaatgaggcactgcngtcatgnaaa

SEQ ID NO: 4288 - DNA, 652 bp, Homo sapiens
  misc_feature 515, 528, 644: n = A,T,C or G
acactgaaacataaatccgcaagtcaccacacatacaacacccggcaggaaaaaacaaaaacagcaagtttacatgatccctgtaacagccatggtctcaaactcagatgcttcctccatctgccaagtgtgttctggatacagagcacatcgtggcttctggggtcacactcagcttaggctgtgggtccacagagcactcatctggctgggctatggtggtggtggctctactcaagaagcaaagcagttaccagcacattcaaacagtgtattgaacatcttttaaatatcaaagtgagaaacaagaaggcaacataataatgttatcagaaagatgttaggaagtaaggacagctatgtaaagcttgaggctgaaaagtaagcttgccagcttcatttctttggtttcttgggtagtgggcgccggaacagcaagatgtgaggttctggttcatggatcatataatggacccatccctgactctgctgaacgccaagattcctccattcanattcaaacatcanatgggttttagggaccacttggctatgtccttgggcacatgacatgtcgatctcaaactcctcgtcgtcgtatttgtccgaatagtaaatttggttgtgccacatgatccttcggnttggttag

SEQ ID NO: 4289 - DNA, 609 bp, Homo sapiens
  misc_feature 584: n = A,T,C or G
acaaatgttttttattcaaaaatacaaaataaattatctgtaggcatggacaatgacagcagtaaaccattatatattttgtcaactgaaaccagtaactgatggttatagtgattttcagccagcctttttcttcattttctccaactgacttctctgaagttattggtgaggaacactgccttgggcttcctgtcacagttcattaataaaggtaaagcactagtctaggagttagaacatgccacctcccataccacctcccattccacccattgcacccattccagggtccttctcttctttaggaatttctgtgactacaacttctgcttgtagttaacagagaggccacacgagcagcatccaataaagcagttctcacaacctttgttgggtcaatgattcctttttccaccatattcataaaatctcagccatagcatcataaccaacttctgaggaactttgcataatttctcaactatcaaagatccttcacacctgcattcttagcaatggtcattgctggaattttgagtgttcttttaataatttctataccaatttttgatcttcataanctgggagtcaatgcccgcgtccttg

SEQ ID NO: 4290 - DNA, 405 bp, Homo sapiens
  misc_feature 159, 217, 275, 280, 319, 402: n = A,T,C or G
acataagtggctatcagagaagccagccgatatggattggcctgcacgacccacagaagaggcagcagtggcagtggattgatggggccatgtatctgtacttttttttttttttttttttttttttaactgaaaactttttattgctcttttggatanaaacgggaatttatttgccaggaaggatgatcccatcatacttctgctggaaccagcncatggcctcctctttgctgattctgtgtttggccccaatgcagcctgtcctgcgcttnttgtntgcgatgctgaaacctggcctacccagcaccacatagangtccaggccgtatataccaatgcttgggtcatatttgatacccaaatcgaatgtgttcctggatcccaaaccaaaggtttcanttt

SEQ ID NO: 4291 - DNA, 649 bp, Homo sapiens
  misc_feature 571: n = A,T,C or G
actgttcaaaaaggaatgccccacaagtgttaccatggcaaaactggaagagtctacaatgttacccagcatgctgttggcattgttgtaaacaaacaagttaagggcaagattcttgccaagagaattaatgtgcgtattgagcacattaagcactctaagagccgagatagcttcctgaaacgtgtgaaggaaaatgatcagaaaaagaaagaagccaaagagaaaggtacttttttttttttttttttggaatacctggtttattgggaaaacttcataatgaaaactacaattagctttttccacaacttacaaaataataatctgatatttaaaatgaattggttttcattatgtaagtcgaaatggtaaaaaatcataatgacctatccgatgcatcatatatatgctattcagagaaactcaaatccccgaattctcctgtggcatgttttatatcaaacatttaaaatctgtttaccaaagaaagaccaggattttaactatatgtaggtttctgcttacagttgcaaactatcaaaagcctgtctatatgatagagcccaanataaacctgaaatttaaaaaagcaagtcatttattctcctgaggctgttaagtggcacttttgtgacaagaatgacct

SEQ ID NO: 4292 - DNA, 651 bp, Homo sapiens
  misc_feature 489, 591, 619: n = A,T,C or G
actttatgtgtcatttccatgactactaaccacatatatagagactaggggatacttagtgaagacagctttccaggaagtttacaaaattgaagaaaaaaaagtatgtccaaatatggcataagtagcaatggggccctgaatttactttggaaagattgcctaaggcaccactataatgaacagttgtaaatctctgatcagacttcaaatttttctggtcttaaagttgcaattctaaccacaaggttaggtgactagattagctggtatattatttcctctgtgccagcatctgtaagaaatattacatctatcctgggcaccgtcactccgatatatatttgtaatagatctgattatatgaggtgtgaaagtcaatatgggtaatttttcttttaaatgcattttaagaacaaacagcacttaaatgaatggtggcacaacagggaaaaggactattttaatgtaaaacaatattaaaatcancgtatgatgaggttgagttgctgaaactgggaaaactgataatttaagaaattgtaaatgcttttattcaaaactgtaaaaaaggcaccaattccctagttnctggaatcacagttcttatgaataatanccttctactgatgaacatggacatgaaattaa

SEQ ID NO: 4293 - DNA, 427 bp, Homo sapiens
  misc_feature 380, 400, 420: n = A,T,C or G
acgcggggtttttatataccctgtaagctaagaatggtttccgcatttttaaatggttgggaaaagaaatcaaagactaataattcatgacgtgaaaattatcagaattcacaaataaagctttattggaactagctatactcatctgtttatatattatctgtggctgctttgaaatgagtagttgcaatagagatggtaaagcctacaaagcctaattatttactgtctggtttttgtcagaaaaaagtttgtcaatccttgttttagaagatggaaaaatgtgaagatctttggagattctcttgagtggtatatctaattgaaatgggatcttcgttttggcttgtatgttgatgaaatcaacttaggtatacaantataaaaaaattaaagaccntgaaaattgtttttgaaaanaaaaata

SEQ ID NO: 4294 - DNA, 534 bp, Homo sapiens
  misc_feature 401, 417, 459: n = A,T,C or G
actgacgaagtccaacacaaaggtataatacagcctgttgtctcaagccaaggagtcataaaaccatgagaaataaataggaatcaatagttagtagtgacattggtgctctctagaaatctcagcatgagctgctatagaataccctcccagcaacaaaacctaatcagtaaggccagctagacccaatggctcatgcctgtaatcccaacactttgggaggccaaggtgggaggatggcttgtgtccagaagttcgagaccagcctggacaacatagtgagatcctatctctataaaaaatcaaaaattagccaggcatggtggtgcatacctatagtcctggctatttgggaggctgaggcaggaggattgctttagtcctggaggtcgaggctgcantaaagccatgattgcnccacttgactcacccgggtgacaaagcaagcccctgtctcanaaaaaaaagaaaattcaaggccagttaagacaaatgctatgactttgaaatttacagaaagaaattacaagttta

SEQ ID NO: 4295 - DNA, 547 bp, Homo sapiens
  misc_feature 374, 394, 468, 479, 493, 525, 528: n = A,T,C or G
acgcggggggtgaatgctgctgcccctgctggcagccaccttgagacctcaccgggcctgtgatatttgctctcctgaactctcactcaatcctcttcctctcctctgtggcttttcctgttattgtcccctaatgataggatattccctgctgcctacctggagattcagtaggatcttttgagtggaggtgggtagagagagcaaggagggcaggacacttagcaggcactgagcaagcaggcccccacctgcccttagtgatgtttggagtcgttttaccctcttctattgaattgccttgggatttccttctcctttcctgccaccctgtcccctaaatttgtgcttctgaattgaggagccttcacctntgttgctgaagaaatggtanaatgctgcctatcaccttcagcacaatcccagtgaaaaaggtgtgaagcacccaccatgttcttgaacaatcangtttctaaatnaacaactggaccancaaaaaaaaaaaaaaaaaaaaaaaaagtcctnggncgcgaccacccttagggcg

SEQ ID NO: 4296 - DNA, 290 bp, Homo sapiens
  misc_feature 125, 128, 133, 218, 235, 243, 250, 259, 274, 282: n = A,T,C or G
acgcgggaaggacttaaaggagaagaaggaagttgtggaagaggcagaaaatggaagagacgcccctgctaacgggaatgctaatgaggaaaatggggagcaggaggctgacaatgaggtagacnaanaagangaagaaggtggggaggaagaggaggaggaataagaaggtgatggtgaggaagatgatggagatgaagatgaggaatctgattcanctacgggcaagcgggcnatcttgangatgatnaggattacnatgtcgatacccaanaagcttantacccgac

SEQ ID NO: 4297 - DNA, 332 bp, Homo sapiens
  misc_feature 32, 38, 45, 51, 53, 78, 98, 103, 120, 147, 154, 171, 190,192, 203, 248, 253, 277, 290, 312, 322, 327: n = A,T,C or G
actttttttttttttttttttgttttttttanaacaanacaggtntttttntnttaaactacctgatacaaaaaatantgtggtttggatggatagtntgaangacaaataatacaaatntattttattgaaataaacaaaaatgcntacacanctcaatgggtcacctgnaacaaactttgcttgactntnttactgagcanaaacaaaactgaagcacaaacacctttctttttttgacatgtatntgganataggtaagaaaacactacttggnttttttaaaaaantgacctttccttaaggcctggncatttaaatntaaanaatgt

SEQ ID NO: 4298 - DNA, 564 bp, Homo sapiens
  misc_feature 300, 304, 311, 338, 360, 427, 476, 530, 543, 554, 556: n = A,T,C or G
actttttttttttttttttttttttttttggcaggttataaccattggccctttaattgaagagtctaaaaactagaggtctgtaacagaatactaatcctgcagaacaagggacagaaaagtcaggcgaggcaagcttgtcttcgtaacctgggctctcaattggggtgctctcttacatttcaattgaatatctgtttttaaacctcccttcaacagtcagggtgtctgtctattttgtggcttccaaaattctaactgcaaaataaatgaccatcttatcatgttttcccatggctntcangaggatntagcaattttatagattactacatggncaaaaatctacccatcggatgnattcttttcttcttctttacttgatgcattcaaaagcaaccactggatttttttcaatgtaaaaaanaaaaatagatacccatgccaaaattcatgggtgtaaacagccaacaaanccaaacttacaaagaaaatgaaaaaacttgtttctggacagtggttttattggnaaaaaattaaaanatattgggctntnttaaaaac

SEQ ID NO: 4299 - DNA, 293 bp, Homo sapiens
  misc_feature 240, 253: n = A,T,C or G
acttggatgagtccaatgccctggggaagaagttcatcattcaagacattgatgacactcacgtctttgtaatagcagaattggttaatgtcctccaggagcgagtgggtgaattaatggaccaaaatgctttttcccttacccagaaatgaaaatactcaatatggaccatttaggaattataagcagcaactgtgaaagacttgccactcaatatcttaggtgactgattagacatanagggttgttttangagcatgccacgggaaaactgagggatcttgatcttttgt

SEQ ID NO: 4300 - DNA, 665 bp, Homo sapiens
  misc_feature 38, 40, 61, 78, 219, 226, 333, 371, 377, 425, 433, 476, 508,521, 566, 629, 656: n = A,T,C or G
cttttcgagccgccgccccgggccagggtccccaaccntngctttcatttccagggaacanggaacaagggagaaccngttgcccctcccaggaatgaacttaggggcagaaccctgcccagccaataaagaatggcaggggccaaactcatacttaattgttggtaggggatcaaaggggttataaaagtcttgtgacaatctgatgggccataccangagcaangctaccaagggcgggcaagaccttgccacgatgaaaattatgcctccacccatggctatacggggccttcttcactttgtcgtctcccccacaagcgcgtgcacttnatgcccatcgtggccacaaacatggccaggaagcccancaccangggagaccaccattagggctcgagtggcctgcaagggccgcgggacangggcgaancaccgagtcgtacttgcttttacttgtatcccatacgttttantatattacatttccattatcatttgctttaanaaaaatgttcaanttttcttcttaattttaccatttggcccactgatcattcaggaangatattaatttccatggtgtttggtataagttttcaaaaattcctcttcttattgatttctanctttttttttccatttgggggcaaaanaaaaatact

SEQ ID NO: 4301 - DNA, 507 bp, Homo sapiens
  misc_feature 412, 486, 503: n = A,T,C or G
acgcctccaccgcctcctgctctgacgtgtcagcctgctgcgaagtggagtcccgaggtcatgatgagtgactatgagagcggggacgacggccacttcgaagaggtgacgatcccgcccctggattcccagcagcacacggaagtctgactctcaactccccccaaagtgcctgactttagtgaacctagaggtgatgtgagtaatcccgcgctgttctttgcagcagtgcttccaagctttttttggtgagccgaatgggcatggctgcgctggatcctgcgcctctggacgtgctaccatttccagtgtcccaactactgtcatcgtgaggttttcatcggctgtgccatttccaacgtcttttgggatttacatctgtctgtgttaaaataatcaaacgaaaaatcantcctgtgttggcagcatgattcatgtatttatataagatttgattattttaattttcctggctcttttttttgnaaattttatgtaccttnggcg

SEQ ID NO: 4302 - DNA, 636 bp, Homo sapiens
  misc_feature 400, 426, 430, 569, 582, 604, 607, 630: n = A,T,C or G
actatgtcataggaacttaaagttagatgtatctaaatcccttcacttttctaagacttctctgtgctcccacccctgaagtcttcaaatcatttttcatctgtgaagtcactgaggtacaaagatgactataaacaagatgcagccctcggtttccatgaacagcacactattacagtaaaccaagtttatattccaccatcaagtgtggctctcccatgacttcgctttgtgatggatcattaagaatatcctcaaatccaatagtctcatcattacccctcaaaacatccagtgaaagatttgagcttgaaagaaatggaagacgctgaacctgctgcactgccttgaattccatctgtaattttagcggagcaaatagaccctgaatgtttctcantgtggaaaaattcattttatcttggntganctggaaatttttttctgataattcaaggggatgactaggcaaaagttcatttttcacacaagaaaaacctttccgaagaagatcatgactttcaaaagtccacttgctgaaagttcagtaactggaatctgtcctttanctcaaaatccaantctctggcattcatcttccganctntgcgaacagccttttttccccgngtacct

SEQ ID NO: 4303 - DNA, 433 bp, Homo sapiens
  misc_feature 306: n = A,T,C or G
acaggtttcactattacaaatgtatgatgttaaactaacaaactcatgaccttcaaagatgtcttcgtcccacgcacacacatttgtaatttgtgtccatttgctatttcccttcttctataatcttcaaattatatagttatgcattgagttccctatgcatctcacccatctcctttatctcagccttctcatacttgccattctcttctttctggaaataaccagcacaacaattccagcaacaactgctatcaccacaaccacaataacagcaataacaccagctttaaaccctgcattganaattcaggtgctttttcatcaacataataaattaaagttgaccaggatccagatccagttgtccccattactgtcaggtccatttcttagaatcccgcgtcctgcccgggccggcgtcgaaagggcg

SEQ ID NO: 4304 - DNA, 614 bp, Homo sapiens
  misc_feature 225, 481, 514, 524, 599: n = A,T,C or G
acactgccttatattagtccatttgtcccatgttttcatcactgaataaacttgttaaatgacttttggtctggatctcacacctatattacttcatttccttctgtgagcactctataatgataacatcatttttatatcctagggcatgtagttccgagccccacagaaagtaatcaccattcaagtaagccaatagttcattcctatctgtatagaactgangcttgtaaatctacacatagatctctgttgtagttcaataatgataataaatgtttgtgcccccagttgttatctctaaggataagagtaatcaatgatcattcagcagatatagcttatatatgggtggcagtttacaaattataaattgatttaccacattttcttctgctcccaagacacaataaagatggtttatctttgcattccccaatgcctaccaatgagattggcacacaatagatactactatagnggcattctttaaacaccaatccttgcgtatgcntattcaaaanataatcattggtattcaaattttcctacttttatttgcacaatataataactttcattccatttttataacctantaccccgggcatttt

SEQ ID NO: 4305 - DNA, 478 bp, Homo sapiens
  misc_feature 141, 150, 222, 288, 293, 300, 388, 426, 430, 441, 465, 468: n = A,T,C or G
acttttcttttggttttgttttgttttgttttgttttgtttttggttttacagagaagagatttttattacaaagaaaaaaattccagtgaattgtgcagaaatgctggtttttacaccatcctaaagaaaactttacaangggtgtttnggagtagaaaaaaggttataaagttggaatcttaaaatggtaaaataaccattgagtgtcaaagtctaaaancagacctcattttgtgcatgaacataaggaaagactactgatagggttttttttttttctcctttnaaatnaaaaaancttgcttaaagggtgcatacttttattgaagtaaatctgaatgacctactcctttggagtaaaactagtgctaccagtttccattgtntttacctctggttggaatttgaaaaaaaaggaaaaaangaancgaaaccctantaaaataggggaaagtccctgctntcnggtgattccc

SEQ ID NO: 4306 - DNA, 338 bp, Homo sapiens
  misc_feature 296, 317, 326: n = A,T,C or G
acgcgggggaccttcagcagggctgtggctaccatgttctctcgcgcgggtgtcgctgggctgtcggcctggaccttgcagccgcaatggattcaagttcgaaatatggcaactttgaaagatatcaccaggagactaaagtccatcaaaaacatccagaaaattaccaagtctatgaaaatggtagcggcagcaaaatatgcccgagctgagagagagctgaaaccagctcgaatatatggattgggatctttagctctgatgaaaaagctgatatcaaggggcctgaagacaanaagaaacacctcttattggtngtgtctcanaacaaaggactg

SEQ ID NO: 4307 - DNA, 346 bp, Homo sapiens
actgaaatagatgtatagaccaatggaacagaacagaggcctcagaaataacaccatacatctgcaaccatctgatatttgacaaacctgacaaatacaaggaattgggaaaggattccctatttaataagtggtgctgggaaaactggctagccatatgtagaaagctgaaactggatcccttccttacaacttatacaaaaattaattcaagatgaattaatgacttaaatgttagaccaaaaccttaaaaaccccagaagaaaacctaggcaatatcattcaggacataggcatggacaagggcttcatgactaaccaccaaaagcaatggcaacaaaagcca

SEQ ID NO: 4308 - DNA, 265 bp, Homo sapiens
  misc_feature 238, 245: n = A,T,C or G
acttgctggtctcaaatttccacaaggagatatcaatggtgataccacgttcacgctcagctttcagtttatccaagacccaggcatacttgaaggagccctttcccatctcagcagcctccttctcaaatttttcaatggttcttttgtcgatgccaccgcatttatagatcagatggccagtagttggtggacttgcccgaatctacgtgtccaatgacgacaatgttgatatgantcttttnctttcccattttggctttta

SEQ ID NO: 4309 - DNA, 245 bp, Homo sapiens
  misc_feature 234: n = A,T,C or G
accacattatagtaaaagtattagaaaagtgaccctcaaggtgtatcaattataaagcagatgaaaacttgaatgacaaatatctagtaaaattctctagtaaaaaagtcgatgcaacccatgctacaaaataaaagtgagaaagccatataaataaagcagaataatgttctaggctttaaggtaatgaagttagtcaagttgaaaaaataaaaataaaaaaagaaaatcctnaattggaatta

SEQ ID NO: 4310 - DNA, 377 bp, Homo sapiens
  misc_feature 272, 330, 337, 354, 368: n = A,T,C or G
acctgtgaaccaagtgtttgggcaggatgagatgatcgacgtcatcggggtgaccaagggcaaaggctacaaaggggtcaccagtcgttggcacaccaagaagctgcctcgcaagacccaccgaggcctgcgcaaggtggcctgtattggggcatggcatcctgctcgtgtagccttctctgtggcacgcgctgggcagaaaggctaccatcaccgcactgagatcaacaagaagatttataagatttgccagggctaccttatcaaggacnggaaagctgatcaagaacaaatgcctccactgactatgacctatctgacaagagcatnaaccctntgggtggcttttgtccntatggtgaaggacnaatgacttt

SEQ ID NO: 4311 - DNA, 509 bp, Homo sapiens
  misc_feature 360, 363, 369, 390, 440, 470, 478, 482, 492: n = A,T,C or G
actcgaagatctagatttcattctccatctacaacttggtcacccaacaaagacactccacaagaaaagaagcggccccagtctccatctcccagaagagaaactgggaaagaaagcaggaagtctcaatcaccatctcctaagaatgagtcagccagaggccggaaaaaatcccgttctcagtccccaaaaaaggatattgcaagagaaaggaggcaatctcaagtctcggtctccaaaaagggatactactagggaaagcagaagatctgaatcactgtccccaagaagagaaacttctagagagaacaaaagatctcaccaagagtgaaagattcttccccaaggagaaaaatccangtnccagancagagaacgaagaaagtgatngatatgggcagaaggagaaaagagaaaggagaaccagaaaagtggtctangtccaagatcttatttctaaggtccccttnagatgtanaacnaaaaagtaangagttcatcatttggta

SEQ ID NO: 4312 - DNA, 455 bp, Homo sapiens
actaaaattgtgttgggagcagggatttggaaatttctgagagatgtgtagttaatttagtaattctgtttcatgagatatgatctgttatgctagtggtttaataggcttgctatgtaagtagaacgtggctcaactagatatctttatatgtatgggcattactcttagtgatatttgtttcctgtcctttgttgctcatgctgtttaagtgcaggctgagacccacctctttgtaaagtacgcgggggaaggcaatccggccctttccggtggaggacccttccccctgggtttgatcttgaggaacttaagaacggtgttttgactcgactctttcccctttttcctccgcagaacttgctgaaactccaacctctggaaattactggaaccctgcattctaaacttgctggaaacccaccctctggaattggcctgcttaaagtgcctga

SEQ ID NO: 4313 - DNA, 349 bp, Homo sapiens
acttagcatcggaactgcaatgttaggagcagggttgtgtgttggatttgacatagatgaagacgcattggaaatatttaataggaatgcagaagagtttgagttaacaaatattgacatggttcaatgtgatgtgtgcttattatctaacagaatgtccaagtcattcgatacagtaattatgaatcctccctttgggaccaaaaataataaagggacagatatggcttttctaaagactgctttggaaatggcaagaacagcagtatattccttacacaaatcctcaactagagaacatgttcaaaagaaagctgcagaatggaaaatcaagatagatattatagca

SEQ ID NO: 4314 - DNA, 629 bp, Homo sapiens
  misc_feature 461, 474, 478, 480, 491, 558, 568, 575, 591, 628: n = A,T,C or G
accagttttctgaggaccatgatgtggaatattttcttcggctggctcatgagctgggactgctggttatcctgaggcccgggccctacatctgtgcagagtgggaaatgggaggattacctgcttggctgctagagaaagagtctattcttctccgctcctccgacccagattacctggcagctgtggacaagtggttgggagtccttctgcccaagatgaagcctctcctctatcagaatggagggccagttataacagtgcaggttgaaaatgaatatggcagctactttgcctgtgattttgactacctgcgcttctgcagaagcgctttcgccaccatctgggggatgatgtggttcttgtttaccactgatggacacataaaacattcctgaaatgtggggccctgcagggcctctacaccacggtggactttggaacaggcagcaacatcacanatgctttcctaanccanangaaagtgtgancccaaaggacccttgatcaattctgaattctatactggctggctaaatcactggggccacctcactncacaatcaanaccgaancagtggcttcctcctntatgatatacttgccccgtggggcgagtgtgaacttnt

SEQ ID NO: 4315 - DNA, 373 bp, Homo sapiens
  misc_feature 314, 328: n = A,T,C or G
acaagtctggctagggctaaaatgtgaagaatgagaagatgttacctgggaaaagggaggcagggggtagaagtggcctggaagagcaggtgcaaaggtcccaaggagggaggggtggcatgcctgggcacagagggctgttgataagtggtctgagatgcggctggaggtgtaggccaggggacaagtggtactgcatgttctgttgtggtgagggaaagaaacatgctttgaaggtttcccttgtcaacagaatgtgtgtctgtatctgtgtattgcgcatgtattcatatattttaaagttttctcctaangtttttgctgacantgttgggaacctcacatgcttctgaagcattaatattgaacctgt

SEQ ID NO: 4316 - DNA, 185 bp, Homo sapiens
  misc_feature 129: n = A,T,C or G
acttcaagaacctgcacagatttactcatattccttcaggaaagtgtttagatcgctcagaggtcctgcatcaagtattcatctccaattgtgactccagtaaaacgactcaaaaatgggaaatgaatnacatccatagtgtttagagagaaaaaaataaaccaataacctacctactgacaagt

SEQ ID NO: 4317 - DNA, 199 bp, Homo sapiens
  misc_feature 74, 112, 146, 149: n = A,T,C or G
actttttttttttttttttttttttttttttacaggaaatctgcctattttatttccattaaaaaaatattatntatataacattttgttccactatcttctccttgatctnaaatttaaacactttaattttactcaagtaaaancanaatcacataacggacatcaaaactaaatagttcacatcattagtttaaat

SEQ ID NO: 4318 - DNA, 193 bp, Homo sapiens
  misc_feature 23, 70, 99, 102, 117, 152, 162: n = A,T,C or G
gtacgcggggacttctgagaaantgaaacgacaggggaaaggaggtctcactgagcaccgtcccagcatncggacaccacagcggcccttcgctccacncanaaaaccacacttctnaaaccttcactcaacacttccttccccaaagccanaagatgcacnaggaggaacatgaggtggctgtgcttggggg

SEQ ID NO: 4319 - DNA, 345 bp, Homo sapiens
  misc_feature 303, 307, 320, 327: n = A,T,C or G
acgcggggggccttgcaaattctcttgcaattgaaggcaggaaaagcaacattcattgtaacaccattgctcttaatgcgggatcacggatgactcagacagttatgcctgaagatcttgtggaagccctgaagccagagtatgtggcacctcttgtcctttggctttgtcacgagagttgtgaggagaatggtggcttgtttgaggttggagcaggatggattggaaaattacgctgggagcggactcttggagctattgtaagacaaaaaaaatcacccaatgactcctgaggcagtcaangctnactggaagaaaanctgtganttttgagaatgccagcta

SEQ ID NO: 4320 - DNA, 386 bp, Homo sapiens
  misc_feature 345, 358, 370, 380, 382: n = A,T,C or G
actgcattcttgaaggaaaaaaactgcagccaaggcaagaactctgaagtttgcactcagagtttaaaagacagacccctactctgcaaactgaagactgccactctgcttcaataactccagcctgccacattttacttcaattggtaaagcactctgctgagaatataaaaagttataaaaaggcaatcataaaagattaaatattggtaggcatgtaagcttccttttaataaaaacaaaaatagtcaatgtcatctatttaaataagtatcctttgttatagagtgttccagttttttgaaaaagggcccttaaaaaacccaactgtctacatctttaaancctaccccttttnccccatagtacntttggccgcnancacg

SEQ ID NO: 4321 - DNA, 339 bp, Homo sapiens
  misc_feature 196, 224, 260: n = A,T,C or G
acatttcaagtgaaataagtaattctagataggacaatttaaattggataattttaaagtgtctataattgcagtggtttatttgcaaaattcctaaaaggaaaaattttatcactgccatcacagcaggtttcctcatccagatgaggaaactagacaaatgctagtgtgttttaactagctaaacaaaactaanttaaatgaacatttaaaagtttccctancgggccattccttatcaaaatgttggaatccctgtngctacattgactaaaaggtcattatgaatggaatatgtaagacttggctcatataaacctaatcagatggttagaggtg

SEQ ID NO: 4322 - DNA, 572 bp, Homo sapiens
  misc_feature 429, 490: n = A,T,C or G
acctcccatagtttgtcccctgtctccacttcagcaatgtcaataaaatgatcttccgatgctgacgccagcattttcccatcatggctgaaactgagggttcttacaggccaatccagcctggaaaagcaccgaacacacactaactcatccacatcccagaggctgaccaaagcatctgcacttcctgtggcaaagtacctctataatttgggtgaccagtatgcactgaagatgaggtttgtggaccatgtgtttgatgaacaagtgatagattctctgactgtgaagatcatcctgcctgaaggagccaagaacattgaaattgatagtccctatgaaatcagccgtgccccagatgagctgcactacacctatctggacacatttggccgcctgtgattgttgcctacaagaaaaatctggtanaacagcacattcaggacattgtggtccactcacgttcaacaaggtgctcatgctgcagganccctgctggtggtggcggccttctacatcctgtctcaccgttatcatctatggtcggtggacttcttcatcccaaggatcca

SEQ ID NO: 4323 - DNA, 254 bp, Homo sapiens
  misc_feature 204: n = A,T,C or G
actctctgcagatggtccaaaattgtaatggagtctgtattagaagaaaataagggtaaaatcaggctgaactgcatgtatatggctccactgtggcttgtgacacttttaaaatcatccgtatgtcagtgtatctggatacacgaggaaaaggaaagagtctcagagtggaacaaagagtgggaagaggtgatctgtaatgtnacaaattgtgctattactccaaggtccaacttttccagtgcattacatgg

SEQ ID NO: 4324 - DNA, 219 bp, Homo sapiens
accaggtggggagaagtgtagcaaatctcagtgccaatttgaggggaagccagtcattccaggagaagagctgaggggaaagagctgttgactttcataatgcagtcttaattatccagtcaccctcctgccacatggcagaagccaggtggcagtgatggtggtgggggaaacaaaacacacagtctctggcaagccccaccgggaaaggagggctca

SEQ ID NO: 4325 - DNA, 237 bp, Homo sapiens
actatccctgtaactgccaagagctcaggagccaggctagtgatcacaccaggggttagagttcactgctgaactccctgatggcaggtctgtgtttattactacattaaaacaaagtctctgacttataaagcgaggtcgtaaaaattacaagttgcatgactgaaaaaatgctttagggggaaaatcagtcatatctttaacaccaacaagcaatttcccaccaacgaatgtagt

SEQ ID NO: 4326 - DNA, 292 bp, Homo sapiens
  misc_feature 167, 215, 239, 247: n = A,T,C or G
acagagtcttttgcttcctcccacccctagggggaaaaactgctttgtgctttgggaagttgtctctgaaacccggggacagaggacgcaggacagactaggagggagccgggaggatgggctgcagctgtggaggagggtttcagaggagagaggtcggagagcanaggcctgagaagccagaggcaggtggagagagggtggaaagtgagcancgggctgggctggagccgcacacnctctcctnccatgttaaatagcacctttagaaaaattcacaagtccccatcca

SEQ ID NO: 4327 - DNA, 523 bp, Homo sapiens
  misc_feature 287, 521: n = A,T,C or G
acataagcataatcagttatggacagcttcttgtataaattgctattcagcaatacataaactgcctcaaagatttatgcttacaggtagacattcaatttaccaataaaacagcatgttctgaaaatatgggcacattttaaaacatattaagacagttctgttaaccataatagtcccacagtatgactgagtaataagaatctacttcaaaagaaaaaaaaaaattaatcagtatagtgcatgattgattcaacatagttcccagggaacagaccagtcactcnattgcagactccttcataccagccatcatcattcttcttttataacataaatgattgcaccctccataaatgacagctcatcatccttgtcttttgtataatcatatattgcacaactttctcaatataattcttgggggcccaagcaggatccccatctgcatatggatcattatactgaactactgcagcctcctcatcttcataatccactggtggtggtggtggggggangt

SEQ ID NO: 4328 - DNA, 350 bp, Homo sapiens
  misc_feature 136, 291, 294, 330, 344: n = A,T,C or G
actggcacagctcatctggagccgagccttaggcttccctctagaaaggcccaagtccatgagcacagagggtctgatgaagtttgtggactctaagtcagggtaaaactggagactgggtgaaagtgactaccanaaagtgaggaagcctaaataaaaagtatacttttgtttcagggggcctttaaagacttaagattaaattatatctgaggcactgataatatgtttgaggttaaaatataaattaagactttaaaagatgaaaaatggtcccttcttcctaatcanctnccttcccctgcctggtatgagttggcccatcatacncattggtcctggangatgac

SEQ ID NO: 4329 - DNA, 239 bp, Homo sapiens
  misc_feature 228, 232: n = A,T,C or G
acgcggggaaaggagagacaattatgttcctgaggtctcagccttggatcaggagattattgaagtagatcctgacactaaggaaatgctgaagcttttggacttcggcagtctgtccaaccctcaggtcactcagcctacagttgggatgaatttcaaaacgcctcggggacctgtttgaattttttctgtagtgctgtattattttcaataaatctgggacaacanatanaaaaaat

SEQ ID NO: 4330 - DNA, 469 bp, Homo sapiens
  misc_feature 312, 424, 427, 430: n = A,T,C or G
acatctttagaaacatcacttttagctctgtgatcagtctttgaacaatcatccaaatgtggagatctagatttaagatcttttgttttaactgtatcaaatgtccttgcagttttatgattatttcgaaaatgtggaaactcagacaatctttggtgaagattacttatttcttcatccttgcggtttatttccactctggcagttttgataagtgctgaaatattcttcttaagagactggttttcgtttattaagctgaaattctgtgtctgtatttctttaaattttttcatcagctctttcatttgnagttgacattttccatattctacttgcaaatcattatatgttgcctcctttgcagttccttcttcagtcaggatctcttcatattaagtccaaacaatttctttgatggtcnganganttcctggaagccttcatgggatctgagcctccggaatct

SEQ ID NO: 4331 - DNA, 369 bp, Homo sapiens
  misc_feature 358: n = A,T,C or G
acgcggggctttttcgcaacgggtttgccgccagaacacaggtgtcgtgaaaactacccctaaaagccaaaatgggaaaggaaaagactcatatcaacattgtcgtcattggacacgtagattcgggcaagtccaccactactggccatctgatctataaatgcggtggcatcgacaaaagaaccattgaaaaatttgagaaggaggctgctgagatgggaaagggctccttcaagtatgcctgggtcttggataaactgaaagctgagcgtgaacgtggtatcaccattgatatctccttgtggaaatttgaaaccagcaagtctgggattacaggtgtcttacatttttttatctntctgctacgta

SEQ ID NO: 4332 - DNA, 313 bp, Homo sapiens
  misc_feature 43, 80, 116, 119, 190, 198, 200, 226, 297: n = A,T,C or G
actttttttttttttttttttttttttttttttgaaaacacantcttgctctgttgcccaggctggagtgcagtgacacnatctcggctcactgcaaactccgcctcccaggtttnacnccattatcctgcctcagccttccgagtagctgggactacaggcgcccgccaccacgcctggctaattgttngtattttnantaaaaacggggtttcacccgtgttanccaggatggtctcaatctcctgacctggtgatctgccctcctcggccacccaaagtgctgggattacaggngtgagccactgtactt

SEQ ID NO: 4333 - DNA, 107 bp, Homo sapiens
  misc_feature 20, 35, 38, 41, 49, 54, 63: n = A,T,C or G
acgcgggggatgaggttttnaagattatgccattncanaancagacccntgccngccatttcnccaagttcaaggcatttgttgctatcgtggactacaaattgcca

SEQ ID NO: 4334 - DNA, 366 bp, Homo sapiens
  misc_feature 278, 321, 341, 360: n = A,T,C or G
acttgggtcgctgtctactgctccttcatcagctttgccaactctcggagctcggaggacacgaagcaaatgatgagtatcttcatgctgtccatctctgccgtggtgatgtcctatctgcagaatcctcagcccatgacgcccccatggtgatatcagcctagaagggtcacattttggaccctgtctatccactaggcctgggctttggctgctaaacctgctgccttcagctgccatcctggactccctgaatgaggccgtatcggtgcccccanctggatagaggggaaccttgccctttcctagggaacaccctangcttacccctcctgcctccnttccccttgccttgctgtnggggga

SEQ ID NO: 4335 - DNA, 421 bp, Homo sapiens
  misc_feature 394, 396, 415: n = A,T,C or G
actgctacttgaataactcagttaacgctgttttgaagcttacatggacaaatgtttaggacttcaagatcacacttgtgggcaatctgggggagccacaacttttcatgaagtgcattgtatacaaaattcatagttatgtccaaagaataggttaacatgaaaacccagtaagactttccatcttggcagccatcctttttaagagtaagttggttacttcaaaaagagcaaacactggggatcaaaattattttaagaggtatttcagttttaaatgcaaaatagccttattttcattaagttggtagcactatagtgagctttcaaacactatttaatctttattttaacttattaatttgcttctatggaaataaatttggatttggantnaaaaataactttccctttntccgga

SEQ ID NO: 4336 - DNA, 653 bp, Homo sapiens
  misc_feature 354, 474, 484, 502, 530, 541, 552, 561, 566, 569, 581, 609,620, 649: n = A,T,C or G
acagagggtgcccagcagggtcttctacagtggctgttgaagaggctgaaggcaaagatgccttttgatgccaacaaactgtattgcagtgaagtgctggccatattgctccaggacaatgatgaaaacagggaattgcttggggagctggatggaatcgatgtgcttcttcagcagttatccgtgtttaaaagacacaatcccagcacggctgaggagcaggagatgatggagaatctgtttgattccctctgctcctgtctaatgcttagttccaatcgtgagcgcttcctgaagggcgaagggtcttcagctgatgaatctcatgctcagggaaaagaagatctcccggancagtgccctgaaagtgctggaccatgccatgattggccccgaaggcacaaacaactgccataagtttgttgacattcttggcttaccaaccatctttccccttttattgaaatctcccangaagatcaanaaagtgggaaccactganaaggaacattaagaacatgtcttgttcnatcctggcttncctcctggcgnacctgaaanggcancancggacccgcttntgaataattcactgaaaatgacagtganaaaggttgacngactatgggagttgcattttaaatatctngggg

SEQ ID NO: 4337 - DNA, 276 bp, Homo sapiens
  misc_feature 204, 213, 220, 256, 274: n = A,T,C or G
actaccagagcgaggagcaggcagaggaggagctcctggacatggcggtgctaaaggactacattgcctacgcgcacagcaccatcatgccgcggctaagtgaggaagccagccaggctctcatcgaggcttatgtagacatgaggaagattggcagtatccggggaatggtttctgcataccctcaacagctagagtcattantccgcttancaagaancccatgctaaagtagattgtctaacaaaagttgaangccattgatgtggaagangt

SEQ ID NO: 4338 - DNA, 516 bp, Homo sapiens
actgaactggaaggaagaggaaaaaaagaaatattacgatgctaaaactgaagacaaagttcgggtcatggcagactctatgcaagagaagcaacgtatggcaggacaaatgcttcttcaaaccttttttaacatagaccaaatatcccccaataaaaaagctcatccgaatatggaggctggaccacctgagtcaggagaatctacagatgccctcaagctttgtcctcatgaagaattcctgagactatgtaaagaaagagctgaagagatctatccaataaaggagagaaacaaccgcacacgcctggctctcatcatatgcaatacagagtttgaccatctgcctccgaggaatggagctgactttgacatcacagggatgaaggagctacttgagggtctggactatagtgtagatgtagaagagaatctgacagccagggatatggagtcagcgctgagggcatttgctaccagaccagagcacaagtcctctgacagcacattcttggt

SEQ ID NO: 4339 - DNA, 294 bp, Homo sapiens
acttgcatgtaggacaactcagttagaaaagtatagtgaatggatggaatctactgtatgataaaaatgctacaaacaccatttagttgccatcaataagaaatttacttgttttaaaaaaatccaaatgctggcattgtccagaaaaatttaacaggtttatttataattattataaagttgaaccgctgaaacttgttcactgaaacattttaacttgcattaatgctttacgtctccgcatttatattaaaaattcacacacaaatgaaaatggaaaaactgcccccgcgt

SEQ ID NO: 4340 - DNA, 372 bp, Homo sapiens
  misc_feature 268, 302: n = A,T,C or G
acgaaaaagatatgactctgcaagcaaaacagtgtaagctgctttttttcttaagacctggacattttaagacagaagctttgcaaaacattacacaattttttattattaaatgagaaagtctcatttgttacatcgtcacattgctagtcagagaaatgttgcagtgatgaagaaagtcaatgttggaccaacccaagtcctcattcctacaacattcatttacaaagaaataatgttcaacacagcccaacaaaacattcttggntttcttcatattgaagccccccaaaaatcccttntaatgggggtttcctcataaattataggtcttcatttttcaaatccccccaactgtgtgagaaatgtttc

SEQ ID NO: 4341 - DNA, 357 bp, Homo sapiens
  misc_feature 26, 41, 45, 50, 52, 75, 138, 209, 295: n = A,T,C or G
actgaagagctattacaatccaaatnttgccgtttcataantgtnataantnatactaattcacaaagtattgtnaatggtggatgacaaaagaaaatctgctctgtggaaagaaagaactgtctctaccagggtcangagcatgaacgcatcaatagaaagaactcggggaaacatcccatcaacaggactacacacttgtatatacnttcttgagaacactgcaatgtgaaaatcacgtttgctatttataaacttgtccttagattaatgtgtctggacagattgcgggagnaagtgattcttttaagaattagatacttgtcactgcctatacctgcagctgaactgaatggt

SEQ ID NO: 4342 - DNA, 649 bp, Homo sapiens
  misc_feature 126, 163, 181, 190, 218, 220, 225, 279, 314, 617, 632, 640: n = A,T,C or G
acacacacggaatcatcctattcatctccaagccacagaaggatgtatcagccctgtagctaaaaggatgtgtggcggaatcgtttggtaatggcagttttgaagatgaagtctgaaaaatgtaanatgattttgccatcttcttgaaatctttaaacagggnggaaaacttaaaattatncatggcagntccagccttacaacatcttccacaaagngngggtntgtggccagtgagcttcatccccaggtgggtagttgacaaaattcctccaccantgataatactctgatgctctcataatctgaatagntactccctgttaacaaggtccctgagaccttgccgattttgttgatccatgtgccaaaaaagccgagctacgtagatcactagagtcacaccagggtgccgactcaaaaactctctaatagcctgggagcattcccagcagggactccaggacaagaaccaggtgatggagcagctgatggatgggtgaaaatctctttctgacgtaaatttttttataaaattaacttccacgtgattggtggtgttttgcctgagcttcgccagatcttccggtcatgccccactcgatttcgtaaagcanacaggcctctttacnaagttctntgggtcata

SEQ ID NO: 4343 - DNA, 328 bp, Homo sapiens
acctctcaacattaccaaaatcatttctttagagggaaggaataatcattcaaatgaactttaaaaaagcaaatttcatgcactgattaaaataggattattttaaatacaaaaggcattttatatgaattataaactgaagagcttaaagatagttacaaaatacaaaagttcaacctcttacaataagctaaacgcaatgtcatttttaaaaagaaggacttagggtgtccgttttcacatatgacaatgttgcatttatgatgcagtttcaagtacttcttcatgctgctgaagtccttctccagctgcttcttgccacccgcgt

SEQ ID NO: 4344 - DNA, 651 bp, Homo sapiens
  misc_feature 328, 614, 617, 621, 623, 634: n = A,T,C or G
acaaagccctaagtttattgtaagtgaaaactgagggaattcctgtcttctttaggaataatgattcatagatctagataggtggaaatatcattcaaaatagtcacttgagctcacaaaaaaagcaaggaagaattctcatgtcctttgtcttccttctgtagccattaactgctgaatccatgtgaggaagacaggcttcccttccttccccctccttagtgattttttctttaacagcataagtaaagaggactttctggttcatttttgtttgttttgttttgttttgttttgtttacagatgaggtcttgctgtgttgcccangctggagtgcggtggctattcacagatgctatcatagcacactacagcctccaactcttgggctcaagcatcacgcccagcagtttctggttcctttaacagcaaaaggaaagagaggttctgattcttacctcagggttttttggttgttcattgtttttatttttgtttttgttttgacactgcagagcacaaggctaaaggttacagctgagatctttggaaccaaaggcagagcaagcagagcccgttgtctggccccacaccactgcaggcaggtggatanaantgcngnccctctcatantatgcccataagtcagg

SEQ ID NO: 4345 - DNA, 579 bp, Homo sapiens
acgcggggctcactgagcaccgtcccagcatccggacaccacagcggcccttcgctccacgcagaaaaccacacttctcaaaccttcactcaacacttccttccccaaagccagaagatgcacaaggaggaacatgaggtggctgtgctgggggcaccccccagcaccatccttccaaggtccaccgtgatcaacatccacagcgagacctccgtgcccgaccatgtcgtctggtccctgttcaacaccctcttcttgaactggtgctgtctgggcttcatagcattcgcctactccgtgaagggacaggaagatggttggcgacgtgaccggggcccaggcctatgcctccaccgccaagtgcctgaacatctgggccctgattctgggcatcctcatgaccattggattcatcctgttactggtattcggctctgtgacagtctaccatattatgttacagataatacaggaaaaacggggttactagtagccgccatagcctgcaacctttgcactccactgtgcaatgctggccctgcacgctgggctgttgccctgccccttggtcctgcccta

SEQ ID NO: 4346 - DNA, 585 bp, Homo sapiens
  misc_feature 556: n = A,T,C or G
actacattttataacaatagagagtagctgaaaatactacatgctaacacagataatatgatacacaacctcaggggggaagctggcagggagcacgtggcagaggccacaggtttagactaagagcctttcaatggactgctgaatggattggatctgctgtttcagctgcgagccttctttgatggtgacagaacaggcgatgacaggcctggagaccccacaggctctccccagggcctgcttggagcgcacaaacacgtagggcacattcttgtcttcacacagcagcggcaggtgcagaatgatctccagtggctcggcgtctgcagccatcacgatgaactcagagatgcccctgttgagggttttggtggcctcattggctcctttccgaagctgcttatagttacatgactgctgaacgaggtccagtagcttcttggtgaggtgggcatcggcaaggggataggcctttggattcacatcacctcagtcatggctgcggttccgcgggctcagcactcctaggggagcgcagctgacgtttcaaaancactcgcgtgcccccccgcgtaccttggc

SEQ ID NO: 4347 - DNA, 651 bp, Homo sapiens
  misc_feature 528, 643: n = A,T,C or G
acgcgggcgctcctaatttcaatattgttgcgtttcagggaatagggaagccagaggagagggagagagataggggaagagccattcagtgaagcagtcagaacacacacaacatttagtgattaagttccccaccttatatgggtgcaattcatggtgtgccaaaacaacataataatagcatcaaacgtcactcatcacagatcaccaaaacagatataataataataaaaaagtttgaaacattgcaaggattaccaatatgtaacacagagactcaaaatgagcacaagtcattggaaaaatggagccagaagacttgctcgttacagggttgcaacaaaccttcaatttgtaaaaacacaattatctacaaaacacaataaagcaaatcacaataaaatgatgtatacctgtatacgacttactggtatttatctgctgactactatcagcaacatccttagatattgtttctaattccagagttgaaccatctagaatgaatcccattgcagtgaaactcanttgaattattccacttaatttgctttctaaatgaaactactgttttgaaactcaccagtgtgtgatttggttgtaatcatataaaagagtaaatttatctctttgctcattttangactattg

SEQ ID NO: 4348 - DNA, 652 bp, Homo sapiens
accagaagaccttagaaaaaggaggaaaggaggagaggcagataatttggatgaattcctcaaagaatttgaaaatccagaggttcctagagaggaccagcaacagcagcatcagcagcgtgatgttatcgatgagcccattattgaagagccaagccgcctccaggagtcagtgatggaggccagcagaacaaacatagatgagtcagctatgcctccaccaccacctcagggagttaagcgaaaagctggacaaattgacccagagcctgtgatgcctcctcagcaggtagagcggatggaaataccacctgtagagcttccccagaagaacctccaaatatctgtcagctaataccagagttagaacttctgccagaaaaagagaaggagaaagagaaggaaaaagaagatgatgaagaggaagaggatgaagatgcatcagggggcgatcaagatcaggaagaaagaagatggaacaaaaggactcagcagatgcttcatggtcttcagcgtgctcttgctaaaactggagctgaatctatcagtttgcttgagttatgtcgaaatacgaacagaaaacaagctgccgcaaagttctacagcttcttggttcttaaaaagcagcaagctattgagctgcacaggaaga

SEQ ID NO: 4349 - DNA, 652 bp, Homo sapiens
  misc_feature 533, 556, 573: n = A,T,C or G
actgttatgtgtgggtgagctgacctggatgtagatgttttcctctctcttgctgacccctccgccagttttgtcttgtgatgccattaacacatctctccctttctgacctggctcctgcccattggtgtcccaagaaatcgtgagaatagttagcccccctctccccagcctgttgctttctcgtgtagttgttcacagtagttgagaagttgaagagcttttgcctattgaaggtgcactgagaataaactctttcctgccaccagaattgcagtggttcacggcctgcactcattcccatgaatgcagttaatagccacagaaatgtcacattaagcaaagcagccagggtctcatcgtgttgagactcgagtctctcaaaccttggattcattccctggtgtctttgagcctcagtttcctcattggtaaaagagaagtgaagcagtgtctcacagggtcattacagagattaaatgaaataaatgaaataacatagaccaggagggcgtggtgtttaaaagtcacanatggggcaccctcggccatccancccagtgttttctttancccctatgatgttcatttttggtatatcccattaggtgcccatatttaaaattgggagatttcacataaaataaaaggc

SEQ ID NO: 4350 - DNA, 653 bp, Homo sapiens
  misc_feature 625, 648: n = A,T,C or G
accaagtaaaaatgcagtcattttggatgaaaaatgtataacatggtcacatagttcccagatttcttaaacagaacataatgaacaaatctaattagccttgccttgatgatcaggccgtgagctttcaagaggcaaactgttatgatgtcgaagaagcacaatgcttcaaatattgctgttaagtattaactcactgaatgaacaactatacaaagcagacataagaactcaatacattacaatctgggatcatttactaatgggaaaagagatataagagatataagtgggccctgatgacataactgtttgcctcaagatgctcagtctagtgttagagtcagacaagaaaaatcagtggttataatttcaaaatgtgttgtggtaggagtaggcaacacaaagtgccatggaaaaatttcagaggcacactcaagttcagccttattacataagacatactttgaaaaggtgacacttgagctgagattttaagaatgaataggaattaatgatgcaagtaatgggggaagggcattccaggtataagaaatagcacagacaaaaatatggagagtaaaaagacatagcacttcaagggaacccaagcaggttggcaganctagaacaatggatcaaaaggtnttttt

SEQ ID NO: 4351 - DNA, 270 bp, Homo sapiens
  misc_feature 254: n = A,T,C or G
acgcgggggaaggttcaagtggagctctcctaaccgacgcgcgtctgtggagaagcggcttggtcgggggtggtctcgtggggtcctgcctgtttagtcgctttcagggttcttgagccccttcacgaccgtcaccatggaagtgtcaccactgcagcctgtaaatgaaaatatgcaagtcaacaaaataaagaaaaatgaagatgctaagaaaagactgtctgttgaaagaatctatcaaaaaaaaaaaaaanaaaaaaaaaaaaggtc

SEQ ID NO: 4352 - DNA, 651 bp, Homo sapiens
  misc_feature 643: n = A,T,C or G
acgcggggtgactgctcaggaaattttccaagacaaccatgaagatggacctacagctaaaaaattaaagactgagcaagggggagcccacttcagcgtctccagtctggctgaaggcagtgtcacctctgttggaagtgtgaatcctgctgaaaacttccgtgttctagtgaaacagaagaaggccagctttgaggaagcgagtaaccagctcataaatcacatcgaacagtttttggatactaatgaaacaccgtattttatgaagagcatagactgcatccgagccttccgggaagaagccattaagttttcagaagagcagcgctttaacaacttcctgaaagcccttcaagagaaagtggaaattaaacaattaaatcatttctgggaaattgttgtccaggatggaattactctgatcaccaaagaggaagcctctggaagttctgtcacagctgaggaagccaaaaagtttctggcccccaaagacaaaccaagtggagacacagcagctgtatttgaagaaggtgggtgatgtggacgatttattggacatgatataggtccgtggatgtatggggaatctaagagagctgccatcgctgtgatgctgggagttctacaaaacaagttggatgcngccattca

SEQ ID NO: 4353 - DNA, 600 bp, Homo sapiens
  misc_feature 161, 219, 229, 361, 450, 470, 526, 538, 586: n = A,T,C or G
tgtatgtatcctgttgacttttccagaaattttttaagagtttgagttactattgaatttaatcagactttctgattaaagggttttctttcttttttaataaaacacatctgtctggtgtggtatgaatttctgaaaaaaaaaaaaaaaaaaaaaaaaangtcgcgggcacatgtgtcaacaatgcatggacaatcatgtgtaggctgtaaaaggcanaaatcttaanccacttgaatatttgggatgagtctaagttttccaggcgaaggaagaggggagatttctgtccaaattgtttccgttaatgaatccactgaaaatccccatactgacttttgaaaagtcaagcttacatcanaaagtcagcagttagaaagatggaaggaaaagaagttcatgatagcttcacgtcaaggagagatgagttgaatctgccaaagaccgaangagaagaaaaaaaagaagtnaaggtatcctattatttaaactccaaaggcattgtttaaaatcaaaattgggaganaaaggaggtganaaggaacggaggtgaatcttcctttctagagaaactcaacatataggnctaaaattgataaa

SEQ ID NO: 4354 - DNA, 595 bp, Homo sapiens
  misc_feature 570: n = A,T,C or G
acttttttacatttaatttttttttaagacagtttaaagagcaaacgttttttaagtgtattctagttgcaaagtatgcacacatatcttgaatggctttatttttattgtgcaaaactgttgaacacatgactgtgatgcacaaattctttacgtgtaaggagtctatgcattttacagtaacttattttatgatcgggtgatgagacagttatactttcaactgccattatttttattaagtgctttcattttctttacagttattataaaattgtatttattttatacagatgggttttcattttcctgatgctgtaatgtttacttcagcttgttgacctttctttgtgttatctgcatgttgtaacgtgtgataagaatgaatgtaaaggctgtggcaactgtaattaatttttgtaatgggctggtcacacgtggatctggtttatgaatgcatttgggatgattttggtaaccagatcaccttttcagaaatttagatgtgaacaccaaaagaacattttctcaacaaaaattaatagctggttctattttttttaaacctanaaaaaataaagttgattttttcaaa

SEQ ID NO: 4355 - DNA, 653 bp, Homo sapiens
  misc_feature 528, 581, 638, 643: n = A,T,C or G
acttaaatgaagcatattcatgtaatgtgcttttttttttttggccagcttttctaagcaaatagattgtctgaattagtcacagaataattttgtgaaaattcatgtttaagtagcaactaccctttctttttttatatatttttaaggtattagtttatcttcttctaactggtgcagtcacttaatgttttcattaatcttcgacctggagagtgaaatactgatatttctagaaaaaaattctactcctctgattatttgaaatgctgaggaaaatgtcccccccattaaaacttgtaaataaggaactatatcatattcagtagctgtgttctgttccatcttttttttttttgagatggagttttgcttgttgcccaggctggagtgcagcggcacgatcttggttcactgcaacctccgcctcccaggttcaagcgattctcttgcctcagcctcccgagtagctggggactacaggtgtgcgacaccatgcctggctaatttttttgtatttttaagtanaaatggggtttcaccatgttggccaggctggtctcaaactcctgacctcaaangatccacccgccttgcctccaaaggctgggatcacaggcgtgagccccatgcccggnccatntttttttttt

SEQ ID NO: 4356 - DNA, 583 bp, Homo sapiens
  misc_feature 564, 574: n = A,T,C or G
acgcgggggaaacggaagtgagcggcggggtcgactgacggtaacggggcagagaggctgttcgcagagctgcggaagatgaatgccagaggacttggatctgagctaaaggacagtattccagttactgaactttcagcaagtggaccttttgaaagtcatgatcttcttcggaaaggtttttcttgtgtgaaaaatgaacttttgcctagtcatccccttgaattatcagaaaaaaatttccagctcaaccaagataaaatgaatttttccacactgagaaacattcagggtctatttgctccgctaaaattacagatggaattcaaggcagtgcagcaggttcagcgtcttccatttctttcaagctcaaatctttcactggatgttttgaggggtaatgatgaaactattggatttgaggatattcttaatgatccatcacaaagcgaagtcatgggagagccacacttgatggtggaatataaacttggtttactgtaatagtgtgctgtcatggaaaccgagggctgcatcttgtttatagtcatctttgtcctcggncgcgaccacnctaagggcg

SEQ ID NO: 4357 - DNA, 404 bp, Homo sapiens
actgaggatacttgcaaaggtcaactcacgggacacaaaaaacgattgtttacattccagttcaacaacttaggcaatactgatatcaactacatcaaagatgataccaggcatataagatttgatgataggcagcttaggctagatgaaagatcttttcttgctttggattgggatcctgatttgaaaaaaagatattttgatgaaaatgctgctgaggactttgaaaaacatgaaagtgtggagtataaacctcctaaaaaaccctttgtgaaattaaaagattgcattgaactttttacaacaaaagaaaagctaggtgctgaagatccctggtattgtccgaattgtaaagaacatcagcaagccacaaagaaattggatttatggtccctgcctccagt

SEQ ID NO: 4358 - DNA, 594 bp, Homo sapiens
  misc_feature 469, 544: n = A,T,C or G
accggccaagcctggtccccttcttgttgggcactgtgtatgggcggagaaaatccagcttgttcttgctgatgacgcagaggtcaatgttgcttccggagcccaggtcgttgaagatgccagctgcgatggcttcgctcaccagattcttggcttcctcctcctccatgtctggcctaaacttatcttcaaatacagccattgctgccaaggagccagaacccatggtgacataaggcaacttatcagttgatccatgaggatagatgctgtagaggtgaggtccagtaacatctactccccctaaaactagggctgcaccaatgtaaccttgatacctgaaaagcatctgcttcagcatccgattggctgtcacaactctgggaagacggccagtggagagggagtggagctccaggttggaagaaatgagctgggttgtcatgtcttgtgtctgcagctgtcccancaccacaacaataaatattaggagatatgaagtgtatttttgaacagttcttgtcagcaacaaccatcccttcanttgctcttgtatctgctccaagaactatgccatccttatagaccccgcgt

SEQ ID NO: 4359 - DNA, 652 bp, Homo sapiens
  misc_feature 515: n = A,T,C or G
accagcagctgcaggatgcttccatgcagtgtgtgttgacctttgagggcctgaccaacagcaaggacagtcaggccaaaaagataaagatggacctccagaaggctgctaccatcccagtgagccaaatctctaccattgcaggctcaaaactgaaggagatctttgacaagatccacagcctgctctctggaaaacctgttcaatctggtgggcgctctgtgtctgtcacacttaacccacaggggctggactttgttcaatacaaactggcagagaaatttaaacaaggcgaggaggaagtggcctctcaccatgaagcagcattccccattgcagttgtggcatccgggatctgggagctccaccccagagtgggggacctcattcttgctcatctacataagaagtgtccttactctgttcctttctatcccactttcaaggagggaatggctttggaagactatcagaggatgcttggttaccaagtaaaggattccaaagtggagcancaagacaactttctaaaacgcatgtcagggatgatccgtctctacgctgctatcatccagctccggtggccatatggaaaccgacaggagattcaccctcatggcttaaatcatggatggcgctggttggcacaaat

SEQ ID NO: 4360 - DNA, 628 bp, Homo sapiens
  misc_feature 483, 498: n = A,T,C or G
actgttgtccatttcatgagagtaggcttgaggacaccatgggcaaggatctgatggttgccagcctaagcgttttagacttttgacccagagattttttgttttgggtgtggaaaaaattttagaggatagggtctcaagatataatcctttttataggcggcaggtcttaagagatgagggtccagaggaacggatgaagcctgcttggaagcatgctgggatggccatttggaaggagtgttgcaaggaagcatggccttggctgggcgctgccaggagcttaagggttgtaggttgtttgtctgatcggctctcggcctaatcttgtggcttccaggaggaagaggagagatcaagctggctgtctgatgggcatggctttattctggaatggtgaacccaatggagagggtcctgcagatggacggcagttggtgtgctataaatgaccgggtagggtctggtccattgaggctgtanagtttgaggggtcanacttttgacaaaggactgatcgtccagctaggggtgtcttcatatggctgggaatctcccccgtaagagttacccgaacctcggcatcttgtgatggtccaaggggcttctgaggcgatcgggcacatca

SEQ ID NO: 4361 - DNA, 651 bp, Homo sapiens
  misc_feature 487, 534: n = A,T,C or G
actaccagatagaaattctgaaattggaaattggaggccaaagccttaatctggactgcagagagtataacgcagacaaggccatcgtggacagtggcaccacgctgctgcgcctgccccagaaggtgtttgatgcggtggtggaagctgtggcccgcgcatctctgattccagaattctctgatggtttctggactgggtcccagctggcgtgctggacgaattcggaaacaccttggtcttacttccctaaaatctccatctacctgagagacgagaactccagcaggtcattccgtatcacaatcctgcctcagctttacattcagcccatgatgggggccggcctgaattatgaatgttaccaattcggcatttccccatccacaaatgcgctggtgatcggtgccacggtgatggagggcttctacgtcatcttcgacagagcccagaagagggtgggcttcgcagccgagcccctgtgcanaaattgcaggtgctgcagtgtctgaaatttccgggcctttctcacanaggatgtagccagcaactgtgtccccgctcaatctttgaacgagcccattttgtggattgtgtcctatgcgctcatgaacgtctgtggaaccatcctccttgtcttaatcgtcctgc

SEQ ID NO: 4362 - DNA, 652 bp, Homo sapiens
  misc_feature 591, 594, 614, 641, 650: n = A,T,C or G
acgcgggattgttgcaagatggccgcgcccagtgatggattcaagcctcgtgaacgaagcggtggggagcaggcacaggactgggatgctctgccacccaagcggccccgactaggggcaggaaacaagatcggaggccgtaggcttattgtggtgctggaaggggccagtctggagacagtcaaggtagggaagacatatgagctactcaactgtgacaagcacaagtctatattgttgaagaatggacgggaccctggggaagcgcggccagatatcacccaccagagtttgctgatgctgatggatagtcccctgaaccgagctggcttgctacaggtttatatccatacacagaagaatgttctgattgaagtgaatccccagacccgaattcccagaacctttgaccgcttttgtggcctcatggttcaacttttacacaagctcagtgttcgagcagctgatggcccccagaagcttttgaaggtaattaagaatccagtatcagatcactttccagttggatgtatgaaagttggcacttctttttcatcccggttgtcagtgatgtgcgtgagctgtgcccancantgatcctattgttttgtggnaggggcctttgcccatggcaaggtcantgtggaatnta

SEQ ID NO: 4363 - DNA, 651 bp, Homo sapiens
  misc_feature 588, 593, 610, 637: n = A,T,C or G
acccctttatggctcttcccaggttacatgagaactggtgatctcggtggggtctcaagtagaagccctgaattagtgttcattaacaaacttaatcctttgtcctaaaccaggctctagctcaattcaaagataaaggggggttaaacattaagaaaaatggcattttttttccacatcactgataccccaagagaagttaataggtctaccttgtagatgcagggaaatcaaaaggtcaaactataattttttataaaaactaatttttttttacgcttaatttttttctttttttttttgagacaaggtcttgctttgttgcccaggctggagtgtagtggcacgatcttggctcactacaacctccacctcccaggctcaagtgaaccttccacctcagccttaccaatagcaggtacatggccacagatcatcaaaccaacattttttgtgaaatcatgaacaagatgaagtaaagctggacgtgagtttggagcacctgtcataacaagacactgtggcctaaagtttttcacgtggtcttccactccaaaaaagacgaattgaatgctgcagtgcattcangtaantcagggcttgtgtagangatccccaattcacatctggtttttgnaggtaacataaata

SEQ ID NO: 4364 - DNA, 643 bp, Homo sapiens
  misc_feature 613, 616, 620, 638: n = A,T,C or G
acgcggggaaacgacagggtaaaggaggtctcactgagcaccgtcccagcatccggacatcacagcggcccttcgctccacgcagaaaaccacacttctcaaaccttcactcaacacttccttccccaaagccagaagatgcacaaggaggaacatgaggtggctgtgctgggggcaccccccagcaccatccttccaaggtccaccgtgatcaacatccacagcgagacctccgtgcccgaccatgtcgtctggtccctgttcaacaccctcttcttgaactggtgctgtctgggcttcatagcattcgcctactccgtgaagtctagggacaggaagatggttggcgacgtgaccggggcccaggcctatgcctccaccgccaagtgcctgaacatctgggccctgattctgggcatcctcatgaccattggattcatcctgttactggtattcggctctgtgacagtctaccatattatgttacagataatacaggaaaaacggggttactagtacccgccatacctgcaacctttgcactccactgtgcaatgctggcctgcacgctggggcttgttgcccctgccccttggtcctgcccctaaatcancantttntacccaccacctgtctanagtgt

SEQ ID NO: 4365 - DNA, 407 bp, Homo sapiens
acgtctactgtaaaacccatccgaggcacaagcagagacagatgtagaccctttccctccagagtcacgcacatactcgtcatcgcatcacttgggagaatggttgtatcttatggaaggaattatcacatcaaggagtcaggggaaagtgactggaagcaaacgccctaaaagttacccatcacgtttcagtgtaaatgagtaactatagaagacattgcgttatcttatttccaaaacgttccaactaaaaaacattttcctattaaaatagaccttccaaaaaaaaaaaaaaaaaaaaaaaaaagtacagtgtgaccgtggtgcccacgggcagcttctgcagaacatcctcatccttcagggacttgcccttggggtccaggcggagggactggcggcggggt

SEQ ID NO: 4366 - DNA, 652 bp, Homo sapiens
  misc_feature 27, 52, 116, 224, 272, 306, 591, 613, 641: n = A,T,C or G
acttttttttttttttttttttttttnggcatttacaaatagtttataaganaatcatttgggtgaacaattttcatttcacaaaataaatagctcatatccaaaaaagacacctntccttaagcagggaaaaaaaagcccaacaaaaataaagtcatgcccgtggcacagccctaatgttagttttagggaggaaaacaccaacactgagacatacaaaagtntttgaggagaattacatgttattaaatttgtcctaaaacctggggganagttcagggaaagagaacagctggtatatttaanaaagatttaaatagaaaacattacacatgagagcaaaatagtccatttctcttaagaaaaccaataaacactcacaaactttcatttttaggttttcagcaatgtttttttcacattagtccaactgccaccccaaaatccaaccagccagcatgacaattaaggtgacaacaggtccagttggccatactccctgtgcacccttggatgcttttcaagccaatgagggtaacatttgtggtggcaggagccagagtcaagggagaatcacttctcttcactcangaggaaacctcctcttgagctnttcggaatttttcatgggaaggcgtctnaatgttggggt

SEQ ID NO: 4367 - DNA, 152 bp, Homo sapiens
acagtagtctgacgtatttccccttctgtcccctagtaagcccagttgctgtatctgaacagtttgagctctttttgtaatatactctaaacctgttatttctgtgctaataaacgagatgcagaacccttgaaaaaaaaaaaaaaaaaaaa

SEQ ID NO: 4368 - DNA, 651 bp, Homo sapiens
  misc_feature 631: n = A,T,C or G
acaaaaaaaaaaaaaaaagcctcagcattttatcattccatggaaggagaatcttttgaaagaaagcattgcctcctaccagaactagacagtgaattagatcggtattatggaaatgcatacaagtaatgtcgctagggcttaataagcagccgtttgctaatgtgcttcctttcaaagggttggacctttaaattgctgcaaaaggtaaattgtatttttttttaagtattggtgttctttactctagctaggctaaaatttgctaaatgccttggtttcttttaaaagttcatgtaatatttctgatttttcagaatatttgcaataagagtctggattttaaaaaacacatgcatacacacaattaagagctcatgtcttagcaagatctgggaaaccaacattgcgagagtagctattttgaaagaataattctccagaagttaacatctaatatctagtatcaccaaacagtatcgctgttctcttttattcatttgaaatgaatataattatataactaacaattgccaaatagatgagagagcaaatcatgtgagaaaattcagaataccatctgtttcatagtcgcacagattttggactttcacaaacattgggaactaanttaaaattggcaaaagtcta

SEQ ID NO: 4369 - DNA, 586 bp, Homo sapiens
  misc_feature 534, 539: n = A,T,C or G
tccggatttctaacagtccttgctttggggggtgtgctgacaacttagctcaggtgccttacatcttttctaatcacagtgttgcatatgagcctgccctcactccctctgcagaatccctttgcacctgagaccctactgaagtggctggtagaaaaaggggcctgagtggaggattatcaagtatcacgatttgcaggattcccttctgggcttcattctggaaacttttgttagggctgcttttcttaagtgcccacatttgatggagggtggaaataatttgaatgtatttgatttataagttttttttttttgggttaaaagatggttgtagcatttaaaatggaaaattttctccttggtttgctagtatcttgggtgtattctctgtaagtgtagctcaaataggtcatcatgaaaggttaaaaaagcgaggtggccatgttatgctggtggttaaggccagggcctctccaaccactgtgccactgacttgctgtgtgaccctgggcaagtccttaactataaggngcctnattttccttctgttaaaatggggataataatactgacctacctcaaa

SEQ ID NO: 4370 - DNA, 541 bp, Homo sapiens
  misc_feature 436, 477: n = A,T,C or G
acgcggggaaaagccggggcagaagtgctggtctcggtcgggattccgggcttggtcccaccgaggcggcgactgcggtaggagggaagaggttttggacgcgctggcctcccgccgctgtgcattgcagcattatttcagttcaaaatgaactatatgcctggcaccgccagcctcatcgaggacattgacaaaaagcacttggttctgcttcgagatggaaggacacttataggctttttaagaagcattgatcaatttgcaaacttagtgctacatcagactgtggagcgtattcatgtgggcaaaaaatacggtgatattcctcgagggatttttgtggtcagaggagaaaatgtggtcctactaggagaaatagacttggaaaaggagagtgacacacccctccagcaagtatccattgaagaaattctanaagaacaaagggtggaacagcagaccaagctggaagcaganaattgaaagtgcaggccctgaaggaccgaggtctttcattcctcgagcagatctcttgatgagt

SEQ ID NO: 4371 - DNA, 603 bp, Homo sapiens
  misc_feature 412, 419, 437, 439, 495, 502, 514, 527, 563, 601: n = A,T,C or G
acatctctggcacagatgctattggtccttaatgtcctgtgattttaggaaatagtttggatttagttcaatttattcagaaaccaaatgtgtttaattagcttcactactctggcagagtaagggtatgctggtttagtatctttataaaatatatataatgtataggtaaatcatagtcttaaatcatacctaaaatactgtatcatttaaaccaatatctattttaacaaaatgtttataactaaaaacagctgatgaaacactaaatccaaaggtatgacaaagaggactcagtctgtgttgcttaaagaacttttaaaaggcatgtgcccataacgtcattcgaggagagggaaggagccccccttctcctcctccttactatagaattcctgttgggggtggccanaaattancacttctaaatatttcananaagtccaaagtgttaaaaaaaagtcttttatgcaaaagaacgtctttctgcatcantgaatanaatgctcatcanaatttcctaatancacaaaaaacaaagccaagtctatacatttgatcanatatcaaagtaatgggaggtggctattatgtcacctanca

SEQ ID NO: 4372 - DNA, 651 bp, Homo sapiens
  misc_feature 534, 561: n = A,T,C or G
accctcagaaaaccgacgaccaccaatagcatctatttcatccataaaaatgatgcatggttgatgatctctagcataattaaacatttctctgatcaaacgagcactttcaccaatgtacttgctctttgtaaaaaaaaataaaattattttgaattattctacctttgtaaacaattggctaaaagaatcatctttaagaaattaagccatttacatgtttgtgtttttctatagcagagcattatattttgcattatatgtttcaacctagtctaagtgggtcttttttacatttttcaagaacggatttcctggaatacagcgatataattttggttgtcaaattcctaatgcaaccatttagtctaaacttagtcatttatttgtgacaataagatgtgttcaggggctccctgtttttaagagactcttttaaaaaaaaaaacctaatgtttttatcttgagtcaatatgattaggtattttggatttacttttaatcttaaaatactgcatttttatagcttctcanaacatgtggatgggatgggattttcgntattttgctgggtcagcttatctttaatatatggactattcctataaccaaagtctctgacaaggtgcacctaatttatattggatttta

SEQ ID NO: 4373 - DNA, 654 bp, Homo sapiens
actttgagcaggataataacataaatttcatttaaaaagttgtatttatagccccagtaaccggaaagaattataagtaattatggaagtattatattctgaccataccaagagttaaaaacaaagagttcctactaaagaggaatattttcaagatgatctggtcacatcatgtgcatagttaagattgtttgttttaataaagattcttttgcaaataaagaaataaaatttagtaaagttattcttctcttgatgaaaaaatcttaaaaatgaaccactggtggtttaagaaggggggaaaaaaaagagtaagctacatattgaagttctagaatgcagcacctcaacttcacatcttccataagcatttaagattaagaaatccaagtgatgtcttgacgatcgaatcacactttatagttcttccaattccaatgtctgactttagcatctcatgtcaattaaaagttccctaatacaaaatattgtgctaaagagtgctaagattctgcatgctgctgccattccctggcccgttcatgcttgtagctgccccatgagacagcaaaaggtgtctggctcaaactcccactgtatactttcctaactccatgcttctcaataaagtccacattccttttaagttggttt

SEQ ID NO: 4374 - DNA, 652 bp, Homo sapiens
  misc_feature 266, 301, 545, 588, 592, 603, 606, 651: n = A,T,C or G
acagctttgtagtatttttaaatctatccaggatcttttactgccccaaattacctgtatcttgtggtagagagaaacagaagtccaacctactatacacaggataagtatctcttatctgaaacacttaggacgagatgtgttctgatgttggagttaagtgcatatacatgacactttggggatgggacctaggtctatacaggaaattcatttatgcttcatatacatgtactttttttttttttttttttttttttgggctnccaaaagctttattggcaaatatgctctataaaanaatgatcaatcctgttgcctctaagtcaatggaatgaagagctgtgtccagggacacaccacgccgtgctgaaggagactgctgttgtgtccacctcttattcatagacccagtcatgagcacaagacttgtatgtcaaccagttcttcaggcttaaaccataggctgatttctttttcagcactttttactgaatcactgccatgaatgatgttcctgccaacctgaatgcaaaaagtccccncgaatggtgcctgctttgaatctgtgggattggtctccccaancatnactcggcctgnttnaccacgttcagcccctccaaaccatggccacaaccggcccttgant

SEQ ID NO: 4375 - DNA, 651 bp, Homo sapiens
  misc_feature 587, 591, 618: n = A,T,C or G
acttgaactggagggcaagaagtggagagtggaaaatcaggaaaatgtttccaacctggtgattgaggacacagagctgaaacaggtggcttacatatacaagtgtgtcaacacgacattgcaaatcaagggcaaaattaactccattacagtagataactgtaagaaacttggcctggtattcgatgacgtggtgggcattgtggagataatcaacagtaaggatgtcaaagttcaggtaatgggtaaagtgccaaccatatccatcaacaaaacagatggctgccatgcttacctgagcaagaattccctggattgtgaaatagtcagtgccaaatcttccgagatgaatgtcctcattcctacagaaggcggtgactttaatgaattcccagttcctgagcagttcaagaccctatggaacgggcagaagttggtcaccacagtgacagaaattgctggataagcgaagtgccactgggttctttgccctcccttcacaccatgggataaatctgtatcaagacggtcttttctagatttcctctacctttttgctcttaaaactgcttctctgctctgaaaanacanctacctgccttcactgaaatatacctnagctgaaatttggggtgggatagcagtcaattg

SEQ ID NO: 4376 - DNA, 122 bp, Homo sapiens
  misc_feature 75: n = A,T,C or G
actttttttttttttttggagggtattttttatttgtgggttcaaaaaatctgtatatacagtctatgtgtttanaatttgtgttgtaagtaaactacagctttgagttggaaagaaaaaaa

SEQ ID NO: 4377 - DNA, 650 bp, Homo sapiens
accacatcctgctatgactcccgggcctgggttatccaggtcccattgagtggttttcctcttggcagattctcaaacagtcgcagctctttggaggtgactcgtgttccaggtggatccctctctgggagagccgctgttcccttcctgtagcagcagcatttatgaatggggtgaatggggctattgtcgacggcacagctaatgcccgaacccagcccctgtcggcagagacagagccccacattattatgtgaataacaatgttttctgttttaagggtgtcaggagtttcgctttttaaaaaaatgtctgttcctgcagtagtaactcttctttctcttgagagtaaaaaatgaaataaaataaatccacgccaaaaaaaaaaaaaaaaaaaaaaagtacacaataaacattaaattaatatagctgttcttatttatcaagtattaatatatttattttcatataagcatataaataataagcttaagcatattattcaaagagagccaattattctcttttggactgctgtaaaacattttcaagattcctttgagccacattatattactttcacctgtttaaattgactcttccttctattattagcctttaaatcctcaggaacaagtaagtattttttt

SEQ ID NO: 4378 - DNA, 654 bp, Homo sapiens
  misc_feature 570, 584, 591, 615, 619, 631: n = A,T,C or G
acactttgagacgcaggaagcagctgaaagagctattgaaaaaatgaatggaatgctcctaaatgatcgcaaagtatttgttggacgatttaagtctcgtaaagaacgagaagctgaacttggagctagggcaaaagaattcaccaatgtttacatcaagaattttggagaagacatggatgatgagcgccttaaggatctctttggcaagtttgggcctgccttaagtgtgaaagtaatgactgatgaaagtggaaaatccaaaggatttggatttgtaagctttgaaaggcatgaagatgcacagaaagctgtggatgagatgaacggaaaggagctcaatggaaaacaaatttatgttggtcgagctcagaaaaaggtggaacggcagacggaacttaagcgcaaatttgaacagatgaaacaagataggatcaccagataccagggtgttaatctttatgtgaaaaatcttgatgatggtattgatgatgaacgtctccggaaagagttttctccatttggtacagttcacaagcttcaggcaaggggcagcctgaactatccgantgatgttgaggcantccagcncagcaggtcattcaccctttttcnctgnttcccaggggcntatcggattgactcctggaggga

SEQ ID NO: 4379 - DNA, 447 bp, Homo sapiens
acagtttaaacaacagctgaaagaactaaagaagcaatgtggtcttcaagctgacagagaagctgacggaacagaaggagtggatgaagatataattgtgacccaaagtcagaccaacttcacctgccccattacaaaggaggaaatgaagaagccagtgaaaaataaagtgtgtggccacacctatgaagaggacgccattgttcgcatgattgagtccaggcaaaagcggaagaaaaaggcctattgccctcaaattggctgtagccacacggatataagaaagtcagatcttatccaggatgaagcacttagaagggcaattgagaaccataacaagaaaagacatcgtcattccgagtaggaaaagccacctgcctgcagggacaccagcagcctacctcctaccccagctgtctgttgagagcagtgctgaccccagcagtt

SEQ ID NO: 4380 - DNA, 652 bp, Homo sapiens
  misc_feature 542, 565, 604: n = A,T,C or G
actaccagatagaaattctgaaattggaaattggaggccaaagccttaatctggactgcagagagtataacgcagacaaggccatcgtggacagtggcaccacgctgctgcgcctgccccagaaggtgtttgatgcggtggtggaagctgtggcccgcgcatctctgattccagaattctctgatggtttctggactgggtcccagctggcgtgctggacgaattcggaaacaccttggtcttacttccctaaaatctccatctacctgagagacgagaactccagcaggtcattccgtatcacaatcctgcctcagctttacattcagcccatgatgggggccggcctgaattatgaatgttaccaattcggcatttccccatccacaaatgcgctggtgatcggtgccacggtgatggagggcttctacgtcatcttcgacagagcccagaagagggtgggcttcgcagcgagcccctgtgcagaaattgcaggtgctgcaatgtctgaaatttccggcctttctcaacagaggatgtanccagcaactgtgtccccgctcantctttgagcgagcccattttgtggattgtgtcctatgcnctcatgaaccgtctgtggagccatcctccttgcttaatcgtcctgctg

SEQ ID NO: 4381 - DNA, 651 bp, Homo sapiens
accatataatccaactatcatggtaaggccagaaatcttctaacctaccagagcctagatgagacaccgaattaacattaaaatttcagtaactgactgtccctcatgtccatggcctaccatcccttctgaccctggcttccagggacctatgtcttttaatactcactgtcacattgggcaaagttgcttctaatccttatttcccatgtgcacaagtctttttgtattccagcttcctgataacactgcttactgtggaatattcatttgacatctgtctcttttcatttcttttaactaccatgcccttgatatatcttttgcacctgctgaacttcatttctgtatcacctgacctctggatgccaaaacgtttattctgctttgtctgttgtagaattttagataaagctattaatggcaatatttttttgctaaacgtttttgttttttactgtcactagggcaataaaatttatactcaaccatataataacattttttaactactaaaggagtagtttttattttaaagtcttagcaatttctattacaacttttcttagacttaacacttatgataaatgactaacatagtaacagaatctttatgaaatatgaccttttctgaaaatacatacttttaca

SEQ ID NO: 4382 - DNA, 649 bp, Homo sapiens
  misc_feature 604: n = A,T,C or G
actgggagtcagaacgtctgggttctagtcttgactgccattaactagcgagatccggaaaatgaggcccataggaaacaagtgacttgctgagtccagataacactgactgtcagagagaaacatgaaccagaagctactgaagttggagaacttgctacgatttcacactatttataggcaactgcacagtctgtgtcaaagaagagcattaagacagtggaggcatgggttttcatctgcttaccctgtgtggacagctcaactgtgtgcctggccctggccaacagatgtgctcactggggctgctttatctcagtataggcttctggtaacaaaaaaggaagaaggaccatggaaatctcagttatcttcaacaaaatctaaaaaggtggtagaagtatggattggaatgactattgaggaactggccagggcaatggaaaaaaacacagattatgtatatgaagctttattgaacactgatattgacatagattcactggaagcagactcacatttagatgaaagtctggatcaaagaagtgataacgaaggcagggatgaagttaaaagtggagtaaattaaaacaggacaaagtcngaaaaaaataaagatgctgtaaaaaggccccaggcagatccactt

SEQ ID NO: 4383 - DNA, 440 bp, Homo sapiens
  misc_feature 270: n = A,T,C or G
acgcggggcctgctccgcttgaggagaagcgccaagtgcgcatggggacgctatagcaattcgtttgctgtccttcctctccttcgaagatgacaaggcctaccatcgtttcttcctgcctttgggccgtcaggcagttggttgggacccgctccaaccctcggttcttcctgcaatacagtggatacaatttgtcatggctactctgagataagaccacttttttatctgagcttctgtgacctgctcctgggactttgctggctcacngagacacttctctatggagcttcagtagcaaataaggacatcatctgctataacctacaagcagttggacagatattctacatttcctcattttctctacacccgtcaattacatctggtatttgtaccatggaataactttttgaaacccagaattatctggctactta

SEQ ID NO: 4384 - DNA, 497 bp, Homo sapiens
  misc_feature 210, 332, 407, 417, 426, 453, 461, 463, 470, 482: n = A,T,C or G
actaggtgctgcaatgcaaagggttatgacaaaactgtctgtaaatgtaggatctgaattggtctttgatagttttcctgatttgagaaagaagtctctatttggctaatttagggagctaagagaatggacaaggtctgcttatgtccttctggcagcctagcatagcttttgcctccctcaaatcagttataagtcaaaacaaataangcacattttttaaaaaaaattcccccctttaattgaccaaagtaaagccatgacatttcatttggtaacctgtttaagaattataaaaatcatttcatttggcccagcccatactgcccaanacaaaacttccagacaattctgatgccatccagtttttgttcttacaaactgcatattaaaaaaaaaaaaaaaanaaaaaaaatnttcaccgtnctaaatgtgatggtgctcagtgcgaancatattananctggacntgacattttgtnccttgacaaaccctc

SEQ ID NO: 4385 - DNA, 599 bp, Homo sapiens
  misc_feature 22, 417: n = A,T,C or G
acacaagctttgaggaagtgcnaaggactgacctctaggccagaacaagatggaaaactaccaggcccatcaggcctataacccagacaccagcatggacaaaactcagttatactgaattcagagacaaaattcagtgacactcttctaccacttatttagggttctacagcatttcactgaacagacttagtttttttgtttttgttttacaaaccttttaaacagaggggatttaaaaaatgcaaactaggactacgatgttaagacaaccactagcagacagctgcggacagttactgggtctgaaggtgaggcttcccaactcaaacagagaagtcattgggataaactctgctctttcatctttcaccacccatatccttaaaacaggacaagatgggatgaccacaccangtaacatcaccgaggtctcaaagtagcagctaaaatgtgccataactcttaccctgtctaggacctatgttccactctctcagcaacaaaaggatctatacatgttttctcaataagggctttagtttctcctccagccttcaagtgggccttcaactctcagaaaccaattctacctcttt

SEQ ID NO: 4386 - DNA, 197 bp, Homo sapiens
  misc_feature 23, 28, 90, 113, 126, 155, 163, 192: n = A,T,C or G
acgcggggccctgttttttgtgnttttncgagctcagctgttcgtccgggttttttacgtcttaatttccaggacttgaactgccatgtnctctgaagaaggaaagctcttcntgggagggctcanctttaacaccgactagcaggcactggaanaccacttnagcagtttcggacctatctctgaggtggncttgt

SEQ ID NO: 4387 - DNA, 278 bp, Homo sapiens
  misc_feature 24, 45, 64, 66, 111, 133, 136, 146, 155, 218, 229: n = A,T,C or G
actcgggcaagccatgatcttttnccatactcgcaaaacagctanttggctggcagcagagctntnaaaagaaggccgccaggtggctctgctgagtggggagatgatggnggagcagagggctgcggtgatngancgcttcccanagggcaaanagaaggttttggtgaccaccaacgtgtgtgcccgcggcattgatgttgaacaagtgtctgtcntcatcaacttngatcttcccgtggacaaggacgggaatcctgacaatgacacctacctgc

SEQ ID NO: 4388 - DNA, 517 bp, Homo sapiens
  misc_feature 24, 25, 150, 415, 433, 470: n = A,T,C or G
acatttgttaaaattggtgagccnntattgatacattattaagtccatagtttacattagggttcactctttgtgcagttttattggttgttatattttattggttttgacaaaggtatgacatgtatccaccattacagtatcattcanaatagtttcactgccttaaaaatcctctgtgctccacctattcatccaacccttcccatggaccactggtaaccactaccttttcactgtctccatggttttgccttttccagattaccatatagttggactcatacaatatgtaatcctttcagattggcttttccttagcaatatgcatttaaggttcctccattatccagagatggttttagttgtcacaacttgggtagagagatcaggggtcaatgctactggcatctantgggtggtagaaactgangtagctcatgacatactacaatgcccaggacaacccncctacaaaaaagattatttcagcccccaatgccaacccattgctcga

SEQ ID NO: 4389 - DNA, 660 bp, Homo sapiens
  misc_feature 26, 408, 448, 608, 640: n = A,T,C or G
cgtacctctataatttgggtgaccantatgcactgaagatgaggtttgtggaccatgtgtttgatgaacaagtgatagattctctgactgtgaagatcatcctgcctgaaggagccaagaacattgaaattgatagtccctatgaaatcagccgtgccccagatgagctgcactacacctatctggatacatttggccgccctgtgattgttgcctacaagaaaaatctggtagaacagcacattcaggacattgtggtccactacacgttcaacaaggtgctcatgctgcaggagcccctgctggtggtggcggccttctacatcctgttcttcaccgttatcatctatgttcggctggacttctccatcaccaaggatccagccgcagaagccaggatgaaggtancctgcatcacagagcaggtcttgaccctggtcaacaaganaataggcctttacccgtcactttgacgagaccgtcaatatgtacacatgatgggacccaaactctcctggagagttccattcacttctgaaaacgtgcacctgtttcaaggtgcatgtttattcagtgtgcattggatatttaagatttgcttggagcangctgggcaagggtggcttcatccctcggcctnccaaaatgcttgggattaca

SEQ ID NO: 4390 - DNA, 578 bp, Homo sapiens
  misc_feature 434, 488, 529, 541, 552, 563, 570: n = A,T,C or G
acttttctcagtgacctctggaataaaagaactgacttttgatagttttaaaattaatctttgcatgaaggttggtttcgctttttttcctttaagtttgtttttaaatgtattagtccaggggattttgccttatgctgaggtcaaactaaggataagcaagcttttgtccttcattttaactgttatgtcatactgttatgttgacatatttctttataagagaatagaggcaaaagtatagaactgaggatcatttgtatttttgagttggaaattatgaaacttcaccatattatgatcatacatattttgaagaacagactgaccaaagctcacctgttttttgtgttaggtgctttggctgaacttgattccagcccccttttccctttggtgttgtgtatgtctcttcatttcctctcaaaatcttnaactcttgtcccatgtctccttggcagcagggatgctggcatctgtgtatcctnatactgtttactgataacccacaaattcattttcatggcanacctaagctcanaccctgccttntcctggcaatncataagnttttccca

SEQ ID NO: 4391 - DNA, 346 bp, Homo sapiens
  misc_feature 2, 3, 18, 20, 49, 53, 65, 89, 164, 166, 176, 197, 204, 235,239, 243, 244, 264, 317, 328: n = A,T,C or G
anncttaagcggccgccntncaggtacgcggggggcgcttctagggctntttnccgtcatcttcnggagccgtggagctctcggatcanccgacaccatgggtttcggagaccctgaaaagccctgccggcctccaggtgctcaacgattacctggcggacaananctacatcgangggtgtgtgccatcacaagcngaatgtngcaatatttgaagccgtgtccagcccaccgnttgncgannttgtgttatgccctacagtnggtataatcacatcaagtcttaacgaaaaaggaaaaaggcccaaaacatgtanaacaatggacngcatcaaattaaactttt

SEQ ID NO: 4392 - DNA, 551 bp, Homo sapiens
  misc_feature 272, 377, 419, 425, 443, 449, 461, 468, 476, 490, 510, 517,521, 545: n = A,T,C or G
acatcaataaccggggatttttatttttttgctatactattttcacaaccacgggtgtgcttgctaggcaatataaccatcacagaagcaaacgttaggcagaatactggtaagaaaaaacaaagcaagaaaagagctaccagatatacagacaggcttggttccacattcactactgcattttcaagcgccaagtattaactgcacatttttgttcagctagaaaggagggatttttttttttttgtttttttcttttttttttggtttgntttaaatcagtgcataaatttttcttttctcatttcagcagatggacaaacagatggactctacagctaagtggaatatcaaaggtagaggggtgattctgtganactgataggccttgactattctcaattctccccactgcaagngtcacncaacttccctgaatatanggtctncttaaacacatntgagcantgacctgnatgaatgccccttnggagacctggtgacaggcancaaaaancatnatcagggctagcctcattcagggnagaaat

SEQ ID NO: 4393 - DNA, 305 bp, Homo sapiens
  misc_feature 23, 25, 46, 49, 60, 112, 125, 130, 176, 199, 209, 267, 278: n = A,T,C or G
acccccaagatatcaggccagantnttttgagtcagttgctgtgcngcnttacttctttntctccacatcttctgaggctttagaaatgtggacaagctagttatcaaattntgtgtgcgtctgnaagtncttaaagaaccagcttcttagaatgttcagttctcaatgtgctgcngctttcccttctcctaaacattntaaaactctnccctttcacctccaattcccgtgatcccaaaagaagaggaagactccaggaggggtanagattgcgccngacatagctttacaggtggttttaaag

SEQ ID NO: 4394 - DNA, 419 bp, Homo sapiens
  misc_feature 21, 325, 377, 387: n = A,T,C or G
accaaggcttgttttgcaganggagaagcacttccattatctgaaaagaggccttcgacaactgacagatgcctatgagtgtctggatgccagccgcccatggctctgctattggatcctgcacagcttggaactgctagatgaacccatcccccaaatagtggctacagatgtgtgtcagttcctggagctgtgtcagagcccagaaggtggctttggaggaggacccggtcagtatccacaccttgcacccacatatgcagcagtcaatgcattgtgcatcattggcaccgaggaggcctatgacatcattaacagagagaancttcttcagtatttgtacgcggggtctctctttactgcaaggcggcagcaangagaggttgnggtgctagtttctctaagccatccagtgccat

SEQ ID NO: 4395 - DNA, 667 bp, Homo sapiens
  misc_feature 542, 593, 614, 637, 649: n = A,T,C or G
accattccagagaaaacacaaaccttcccaaattaaggagggcagaataattttgagatgcaattagacaaatctctatgaaaaaaaaattaaggctcctataattaacagtctgtttatggagtaaaattaatttgtatcttaattcttcaggacccagaaacattagaaagtgcacttgggatatactgtgttagggtcctctatacctaagatctggcagaacactttactttttcaagtacgcgggagaaaaagaagatggagaatgagtcggccacggagggggaagactctgccatgacagacatgcctccgacagaggaggtgacagacatcgtggaaatgagagaggagaatgaataaggcacgggacgccatgggcactgcagggacagtcagtcaggatgacacttcggcatcatctcttccctctcccatcgtattttgttccctttttttgttttgttttggtaatgaaagagccttgtttaaaggtttcgtgtcaattctctagcatactgggtatgctcacactgacngggggacctagtgaatggtctttactgttgctatgtaaaaacaaaccaaanaactgcttatacccctgcctnacgaaaacccaaaaagacccacntgcttacggtgncgttgtgtcctcctccct

SEQ ID NO: 4396 - DNA, 473 bp, Homo sapiens
  misc_feature 22, 301, 307: n = A,T,C or G
acaattgaaaattcactgctgnagcaaacatggacagggctctggacgatgaaagatggccttcataaaatgcaaagtgaacacgtttcactctcatgtcaacctgtaaatgattatttttcaccaaaccaagacttcaaagttacttggtccagaatgaaaagtgggactttctctgtcctggcttactatctgagctcctcacaaaatacaattatcaatgaatcccgattctcatggaacaaagagctgataaaccagagtgacttctctatgaatttgatggatcttaatctttcangacagnggggaatatttatgcaatatttcttcggatgaatatactttactttaccatccacacagtgcatgtagaacccgagccaagaaacagcttcccataacaaaggcttatggattttggtgccctctgcgattttggcagctttctgctgatttggaaagtaaaatgt

SEQ ID NO: 4397 - DNA, 330 bp, Homo sapiens
  misc_feature 24, 257, 273, 305: n = A,T,C or G
acaaaaagtcaagccctgaagtantttttcccccaaaagttctgatgttaaaactttaaaaaaaaaaaagagagagaggtagtgtgtaaaaatatttttacttaaaatgttgaacccctgcaccacttatattataaatgaaagttaaccttctacatactaacattattttgccattcaagagtcaaatttgtaagactcacagaatgttaaagccggaatgccattaaaaatagtatataaatggaagaacttcngtgaattcaacaaaangtaccgcggggtaattccaacactttgggaancttgatggggaggatcacttgagcc

SEQ ID NO: 4398 - DNA, 457 bp, Homo sapiens
  misc_feature 269, 311, 419: n = A,T,C or G
acgtgatacagcgaggtgctcagtcccctctgatctttctctatgtggttgacacatgcctggaggaagatgaccttcaagcactcaaagagtccctgcagatgtccctgagtcttcttcctccagatgctctggtgggtctgatcacatttggaaggatggtgcaggttcatgagctaagctgtgaaggaatctccaaaagttatgtcttccgagggaccaaggatttaactgcaaagcaaatacaggatatgttgggcctgaccaanccagccatgcccatgcagcaagcacgacctgcacaaccacangagcacccttttgcttcaagcagatttctgcagcctgttcacaagattgatatgaacctcactgatcttcttggggagctacagagggacccatgtccagtaactcangggaagagacctttgcgatccactggtgtggcttttgt

SEQ ID NO: 4399 - DNA, 527 bp, Homo sapiens
  misc_feature 359, 504: n = A,T,C or G
actgtgtgcagcagctcaaggaatttgatgggaagagcctggtctcagttaccaaggagggtctggagctgcctgaggatgaggaggagaagaagatggaagagagcaaggcaaagtttgagaacctctgcaagctcatgaaagaaatcttagataagaaggttgagaaggtgacaatctccaatagacttgtgtcttcaccttgctgcattgtgaccagcacctacggctggacagccaatatggagcggatcatgaaagcccaggcacttcgggacaactccaccatgggctatatgatggccaaaaagcacctggagatcaaccctgaccaccccattgtggagacgctgcggcanaaggctgaggccgacaagaatgataaggcagttaaggacctggtggtgctgctgtttgaaaccgccctgctatcttctggcttttcccttgaggatccccagacccactccacccgcatctatcgcatgatcaagctaggtctangtattgatgaaaatgaaagtggc

SEQ ID NO: 4400 - DNA, 644 bp, Homo sapiens
  misc_feature 483, 490, 576: n = A,T,C or G
accgccagctctctgctctccacagggctccccgccccacccggcctgataaagcgcgccgactgggctacaaggccaagcaaggttacgttatatataggattcgtgttcgccgtggtggccgaaaacgcccagttcctaagggtgcaacttacggcaagcctgtccatcatggtgttaaccagctaaagtttgctcgaagccttcagtccgttgcagaggagcgagctggacgccactgtggggctctgagagtcctgaattcttactgggttggtgaagattccacatacaaattttttgaggttatcctcattgatccattccataaagctatcagaagaaatcctgacacccagtggatcaccaaaccagtccacaagcacagggagatgcgtgggctgacatctgcaggccgaaagaaccgtggccttggaaagggccacaagttccaccacactattggtggctctcgccgggcancttgganaaggcgcaatactctccactccaccgttaccgctaatataagtaaagtttgtaaaaattcatacttaataaacaatttaaggacantcatgtctgcttacaggtgttattttgtctgttaaaactaatctgaaaatgtttcttgaatgctttgt

SEQ ID NO: 4401 - DNA, 508 bp, Homo sapiens
  misc_feature 25, 406, 463, 477: n = A,T,C or G
acgcggggaggataggccgaagctngacccggaggagatgaaacggaaggtgcgcgaggatgtgatctcctccatacggaactttctcatctacgtggccctcctgcgagtcactccatttatcttaaagaaattggacagcatatgaagacaggacatcacatatgaatgcacgatatgaagagcctggttacagtttcgactcctctctgcaagtgaattggcccagaaaggtgtaagagactctttgaatggacataaaattctgcttgttaagaacaagtttggctctggtaactgaccttcaaagctaaaatataaaactatttgggaagtatgaaacgatgtctcgtgatctggtgtacgtggaggctgctggacctggtcagagactgatgtgccttancggcaatggttagagcttttcagtgcatcccacctccctgtcgcccccatgctcggnttcctcacattcanggagccttgactttggatcagacttggggct

SEQ ID NO: 4402 - DNA, 399 bp, Homo sapiens
  misc_feature 285, 378: n = A,T,C or G
actgctaccattacatggttccttattaaatttgaaaagtgcctgaaagtttgggcaccagaaagacaccccaacaacatgtgtctaaactgcaacttcaggttaatatgactaaagcagttacattgtgagaagtgctgaaggtatgtgatgtctttcccggcacaaaggtggccttggttcctcaccagatggtgtagccaccatctgaaccacccatgaagaagttccccttccgctgagttacgaggacgttggctccctgcatgactgcaagctgagcancattgggagggcatccaggaggtggaggaggaatgttgccagcagtagccccagctccaaatctggcacccgcatcataccctccttcaccancactgtggagccaggtggata

SEQ ID NO: 4403 - DNA, 536 bp, Homo sapiens
  misc_feature 465: n = A,T,C or G
acgcgggtatcaagaattggtttgttcattaaagcaggcagtagatatgaggacttcagcaatttaggaaccacccatttgctgcgtcttacatccagtctgacgacaaaaggagcttcatctttcaagataacccgtggaattgaagcagttggtggcaaattaagtgtgaccgcaacaagggaaaacatggcttatactgtggaatgcctgcggggtgatgttgatattctaatggagttcctgctcaatgtcaccacagcaccagaatttcgtcgttgggaagtagctgaccttcagcctcagctaaagattgacaaagctgtgacctttcagaatccgcagactcatgtcattgaaaatttgcatgcagcagcttacccggaatgccttggctaatcccttgtattgtcctgactataggattggaaaagtgacatcagaggagttcattacttcgttcanaaccattttcacaagtgcaagaatggctttgattggacttggtgtgagtcatcctgttctaaaagcaagtt

SEQ ID NO: 4404 - DNA, 341 bp, Homo sapiens
  misc_feature 24, 47, 93, 175, 189, 203, 283, 306, 313, 315: n = A,T,C or G
attgttgtccatttcatgagattntgcttgaggacaccatgggcaangatctgatggttgccatcctaagcgttttagacttttgacccaganattttttgtttctgggtgtggaaaaaattttagaggatagggtctcaagatataatcctttttataggcggcaggtcttaanagatgagggtccanaggaacggatgaancctgcttggaagcatgctgggatggccatttggaaggagtgttgcaaggaagcatggccttggctgggcgctgccaagancttaagggttgtaggttgtttgnctgatcngntctcggcctaatcttgtggcttccaa

SEQ ID NO: 4405 - DNA, 576 bp, Homo sapiens
  misc_feature 323, 536: n = A,T,C or G
acagttttatgtggggaacaattcatgcaggctactggaaaattaaatcttattaccaactccttgtgatatctttgccatcaccatcacatgagcaagatgatgttttgcagcattccccattgctgatacaaatggagagggcagagaagactttatacaaccagtttttccattgcagagtcttaagaaagattattagatgacttacctatatgactaatgccatcaggaactcagaggtatgaatagggggttgtccatccctcttccatactgaggtggagatgctcatgcaatacttttaaggatgcatggtccanccttcagttattcttcactgctcttggtgaaggtatgtgggagaaaaactaattataatacgtttcccagcctctgatggagaaggaacaccattctgataccagaacatggtttataaggaaaatagaaaaatccccaaccaatcttaattgaaccaaagtctgaaccaatggaaaaaaaaaaatgggtagtgtatattttgcaggtttaanacaactcaaggacaattaaaaacaatggactttacatgtt

SEQ ID NO: 4406 - DNA, 585 bp, Homo sapiens
  misc_feature 488, 534: n = A,T,C or G
acgcggggaggcttgagggaagcatggaggtccatggcaagcccaaggctagcccgagttgttcgtcgcccacccgggattcctcaggagtcccagtgtccaaggagctgctgacggcgggaagcgacggccgcggaggtatatgggacaggttgctcatcaactcccaacctaagtccagaaagacctccactcttcaaacagttcggatagagaggagtcccttattggaccaggtacatctgcccaatttcgggcgatggtggtcacgcggatgcgtctctgggtgctggactgctgataatgcgtgacaaactggatggctcctctgcctccttgggggatcggggtgttgtgctgattgacaacttcaaaatagatgccaagtgtagatgtaggatctaggccacagattttccactgactcgtgccaccaacaccaagctcattttctgacacacacggtcctttcacattcagagataccncatggaccaatggctcctgcaatcttcatttcccgagaagtctttnccttcaaagtacaccaaaatgccattcggaaatctccattaaaatctttaa

SEQ ID NO: 4407 - DNA, 457 bp, Homo sapiens
  misc_feature 106, 303, 319, 323, 340, 345, 364, 367, 382, 405, 430, 433,454: n = A,T,C or G
acttttttttttttttttttttttttaaaaggatgagaagagattttagttattcagtgttttcagagtttcaacaagggatacagatacaagcagcttcttacanagtttacaatctggggagagaacatgaaagacactgtttaacaggcaaataattccaggaataaatatacatgaatgtgtttttcaaaatacaggttcttatacaaatgtataactaaatactgattccatagtggggtggttgtaactgaaagggctttgagaaaaggctttgaataaaactagtcatccacctanccaaagatcctttccngcancacaaaaggaatttgtnagganaacagaaattaactgtcanatntctttctaatctgtnaaattatccaaagtttgaaaatnccatgaagaatcttaggaattccantanccacggaatgggatatttgcntat

SEQ ID NO: 4408 - DNA, 220 bp, Homo sapiens
  misc_feature 50, 130: n = A,T,C or G
acttttttttttttttttttttttttttttaatgacatcctaaaattcanaggaggggccagcgggacctctgggctcagcggctgtgaaggagggacccgcaacacccgctaaggcaggtaattgcaanaaggcactcgcgagggggacttcaagcccctcttctatttcttcatataaaatcagggggatggggaaagctccaagggcgagggaagca

SEQ ID NO: 4409 - DNA, 294 bp, Homo sapiens
  misc_feature 21, 34, 47, 53, 54, 76, 231, 248: n = A,T,C or G
acgcgggggtattgggtttgnctggcctcgattnaaagagacagaanctgtcnnggtcctggaagacggtccccantaccctccccccaagtccttgggaccgcttgggtccccagagctggggagatggtttgtggcggctttgcctgctccaagaatgcgctttgcgctctcaacgtggtctacatgctggtgagcttgttgctcattggagtggctgcttggggcaanggcctgggtctggtgtncagcatccacatcatcgggctgagtcattgctgtgggatcttcctt

SEQ ID NO: 4410 - DNA, 586 bp, Homo sapiens
  misc_feature 340, 431, 465, 491, 492, 497, 507, 516, 545, 582: n = A,T,C or G
accgccagctctctgctctccacagggctccccgccccacccggcctgataaagcgcgccgactgggctacaaggccaagcaaggttacgttatatataggattcgtgttcgccgtggtggccgaaaacgcccagttcctaagggtgcaacttacggcaagcctgtccatcatggtgttaaccagctaaagtttgctcgaagccttcagtccgttgcagaggagcgagctggacgccactgtggggctctgagagtcctgaattcttactgggttggtgaagattccacatacaaattttttgaggttatcctcattgatccattccataaagctatcanaagaaatcctgacacccagtggatcaccaaaccagtccacaagcacagggagatgcgtgggctgacatctgcaggccgaaagacccgtggncttggaaagggccacaagttccaccacactattngtggctctcgccgggcagctttggannaagcncaatactctncaactccanccgttccggctaatataagtaaagtttgntaaattcatacttaataaacaatttaggacagtcatntctg

SEQ ID NO: 4411 - DNA, 445 bp, Homo sapiens
  misc_feature 134, 386, 415, 422: n = A,T,C or G
accaatccttttgacgctattccattaagatagagaaagagaatcctccctaaatcattctatgaagcctgtaataccctaagaccaaaaccaggaaaggatataaccaaaaaagaaaactacagaccaacatncctgatgaacacagatgcaaagattcttaacaaaatacatctaaccaaattcaacaacatatcaaaaagataatccaccatgatcaaatgggtttcataccaaggatgcagggatggtttaacatacacaagtcaataaatgtgatacactacataaacagaattaaaaacaaaaatcacatgatcatctcaatagatgttgaaaaagcatctgacaacatctagatccctctatgattcaaactctcagcnaaattggcagacaaggagacatacctaantgctatncaaagtcatctattgacaaaccc

SEQ ID NO: 4412 - DNA, 503 bp, Homo sapiens
  misc_feature 266: n = A,T,C or G
actgtgtgcagcagctcaaggaatttgatgggaagagcctggtctcagttaccaaggagggtctggagctgcctgaggatgaggaggagaagaagatggaagagagcaaggcaaagtttgagaacctctgcaagctcatgaaagaaatcttagataagaaggttgagaaggtgacaatctccaatagacttgtgtcttcaccttgctgcattgtgaccagcacctacggctggacagccaatatggagcggatcatgaaagcccangcacttcgggacaactccaccatgggctatatgatggccaaaaagcacctggagatcaaccctgaccaccccattgtggagacgctgcggcagaaggctgaggccgacaagaatgataaggcagttaaggacctggtggtgctgctgtttgaaaccgccctgctatcttctggcttttcccttgaggatccccagacccactccaaccgcatctatcgcatgatcaagctaggtcta

SEQ ID NO: 4413 - DNA, 304 bp, Homo sapiens
  misc_feature 23, 24, 26, 171, 174, 201: n = A,T,C or G
accgctccaggccagctgtgtcnnanatctgagccttgacagcagcggtgcccaacatcacagtgcgggtggagaactcaaccccgatggtggtgcggctgtcgtggctgaactcattgcgcgtgaatcgggagagtagattggtcttccccacacctgattcgccgatcngcnccaccttgaagacaaaagttataatcntcctcagttccattccacatcttggctcccgcatggagggtgcatgtgtctttctgggacagaggcgacaaatctgtgtgtttgctcatgccctcaaccctca

SEQ ID NO: 4414 - DNA, 567 bp, Homo sapiens
  misc_feature 104, 112, 127, 131, 136, 170, 174, 199, 204, 208, 211, 213,222, 229, 237, 245, 250, 255, 259, 265, 275, 284, 298, 299,303, 307, 315, 321, 323, 327, 334, 341, 343, 345, 352, 355,361, 366, 373, 374, 377, 385, 395, 412, 416, 420, 426: n = A,T,C or G
  misc_feature 429, 430, 439, 441, 444, 447, 448, 449, 453, 472, 478, 484,488, 493, 499, 501, 511, 514, 515, 524, 537, 538, 544, 547,553, 554, 555, 557, 558, 560, 566: n = A,T,C or G
ggtactcaacaccaacatcgatgggcggcggaaaatagcctttgccatcactgccattaagggtgtgggccgaagatatgctcatgtggtgttgaggaaagcanacattganctcaccaagagggcngganaactnactgaggatgaggtggaacgtgtgatcaccattntgcngaatccacgccagtacttttttttnttttntttnatntnttattgctntcatgtntattaaanaacgatcnctaangatantagnctatanaatgcctgtntgcttattncaatcaccaattgnnactncttnattatcanggaatntnttgnttctttnaaggaantngntcaattnaanttttcnaaggngaaccannttnttcgtganttcttccttnttggttacattttctgntttnaaangggatnttnntatggcttnanatnttnnnattngaaattatgaaaattactngtttcntaactnatgngtaanattttntnaaaatggatnttnntttgttcanttgtcctaatatnnttctcntgnataagnnntnnancttatng

SEQ ID NO: 4415 - DNA, 565 bp, Homo sapiens
  misc_feature 51, 74, 116, 139, 145, 150, 172, 189, 214, 219, 220, 224,225, 228, 237, 239, 243, 244, 247, 249, 252, 254, 258, 263,267, 271, 272, 274, 300, 306, 307, 314, 315, 316, 319, 321,328, 329, 331, 332, 347, 351, 357, 364, 371, 381, 383: n = A,T,C or G
  misc_feature 385, 391, 394, 400, 401, 406, 414, 417, 429, 442, 444, 447,452, 466, 467, 470, 471, 472, 477, 479, 483, 495, 496, 501,506, 514, 518, 531, 535, 537, 541, 544, 556, 557, 564: n = A,T,C or G
ggtactcttgatgaaagaccgtgaaaccaacaaatcaagaggatttgcttntgtcacctttgaaagcccagcanacgctaaggatgcagccagagacatgaatggaaagtcattanatggaaaagccatcaaggtggancaagcntccanaccatcatttgaaagtggtatnacgtggaccgtctttanctccaagaagtataggccctccaanaggtnntatnngtngaataagangntgtnnagnanccngngganttttncttnctgnnangtctctttgtaattaccttttctatntttatnntttttannnttntntattttnntnntggatttactttctntttnatagtntgtctcntttattntttatatgtntntntagatntcntggtannttttntttttttntgntttcgttctttnttctttttttctntngtnatatnttttattctttttnnatnnnttttntnattntactatattttnntaatnttttnttactttntttngttcttttttttnttantntatnttntttttttttttnnttttttng

SEQ ID NO: 4416 - DNA, 656 bp, Homo sapiens
  misc_feature 81, 88, 150, 186, 204, 206, 218, 220, 223, 224, 233, 238,248, 254, 260, 263, 264, 266, 280, 281, 289, 291, 306, 307,315, 316, 322, 327, 334, 338, 341, 342, 343, 348, 356, 362,364, 368, 371, 375, 376, 383, 396, 399, 400, 402, 409: n = A,T,C or G
  misc_feature 414, 418, 422, 423, 430, 431, 435, 436, 444, 445, 453, 456,458, 462, 465, 467, 468, 475, 478, 482, 486, 487, 499, 516,521, 527, 529, 531, 539, 542, 544, 550, 556, 559, 567, 573,582, 592, 602, 605, 619, 622, 625, 627, 630, 631, 632: n = A,T,C or G
  misc_feature 635, 641, 642, 644, 645, 646, 647, 648, 650, 653, 654, 656: n = A,T,C or G
gcgtggtggcggccgaggtacttttttttttttttttttttttttggagcagaaggaactctttattggaaagtggatganagaggcncctccagccgtgggcatcctgaatgggaggaagaatggacagtgtgggaaggggaagggcancagggacttaggaccagatggggcctgtagctctgnggacggcacaggttcatnanggaccggctccntntcnntggggaacnaatcnggccatcccnctaganccttcncannanttcttgattcctgnncagtttantnttttttcattcattnnttaggggnnattcanccttngcttcanctgnttnnntgttnatgttgcnattgancnaggnttnttgnncatctgnaccttttatcttngcnntntttcctnacttntttntttnncttttcnncttnntctttttnnttatttgnatntntttntantnnttctttnttnttantttnnttttttttctcnttgtttttttatgtatntctcnttattntntnctttattntantngttatnattttnctntcttttanttaatnttccttatntgttttgtancttttatttntcnttctatttatctgnatnttntntannntantttatnntnnnnntntannan

SEQ ID NO: 4417 - DNA, 508 bp, Homo sapiens
  misc_feature 42, 43, 49, 62, 71, 74, 86, 90, 105, 110, 115, 122, 127,132, 134, 143, 146, 151, 159, 161, 167, 172, 174, 186, 194,198, 204, 208, 216, 220, 235, 246, 251, 258, 263, 268, 271,274, 284, 292, 298, 309, 315, 324, 334, 345, 351, 353: n = A,T,C or G
  misc_feature 357, 363, 417, 421, 455, 473, 474, 476, 482, 483, 498, 503: n = A,T,C or G
ggtacttttttttttttttttttttttttttttttttttttnnaaaatnaaattttatttcncattgatanaanccatgaaaaacntttnccctttcccatgttncagcncaatntttcaanggaanatttntngccataaanaanatctngctgattngnaaaagngaaanancagtttatgttnttcagggnaaanaaaaangacntagtaaangatngtttaatttttaaanccaaacataancatanggcttcnttatnaacanccngtntagcccattnctaaattntttccnttatcaattancccccntttataaanaggcattctnaatattggttnggccancnggantccccnaaaaaattacccccgttgaaaaatttcagccaacctttttgcacaaaaaaaacngggnggggaccaccctttatgggataggggtttggacnaccctttatacccaaaanntnggtttnnaaaaatttttacccnaattngggaa

SEQ ID NO: 4418 - DNA, 511 bp, Homo sapiens
  misc_feature 32, 73, 75, 82, 84, 96, 99, 105, 111, 118, 122, 142, 153,163, 166, 179, 199, 201, 202, 206, 215, 217, 218, 240, 249,261, 263, 274, 290, 305, 313, 329, 331, 334, 339, 342, 346,376, 380, 387, 389, 390, 392, 396, 401, 402, 422, 423: n = A,T,C or G
  misc_feature 435, 441, 448, 466, 477, 481, 492, 496, 501, 504, 509, 511: n = A,T,C or G
ggtacttttttttttttttttttttttttttngcttttttttttttttttttttttttttttttttttttttnanccaaaangngtttattgaaanggnttcccnctcatnttgactnaaanggcttttagggctgcttccncctgaaggaanatccttttgnaanccttgcttttccncctgtaggctggcaaagganannggancacccaacncnnaaaactaccgtttgggcatggntaaaaaccngggggattttanancatcctgggcntttcacatccatgaantaggaattggggctntgcaccangcgtttctttttgggntnccncttcnccncttntggagagggatgaaggaaatcctttgcganaagnatttttncnngngccnagggnncaccccccgaaaaggccccnnttcttgcccggngggccntttaaanggggaaattccacccctngggggcggttntaanggatccaaccngggnccaanttngggtnan

SEQ ID NO: 4419 - DNA, 566 bp, Homo sapiens
  misc_feature 7, 9, 20, 24, 39, 45, 49, 50, 51, 56, 62, 72, 102, 104, 119,125, 151, 152, 168, 169, 181, 192, 193, 198, 217, 227, 228,233, 234, 240, 242, 244, 247, 251, 255, 257, 258, 259, 260,262, 275, 281, 283, 284, 290, 292, 321, 322, 329: n = A,T,C or G
  misc_feature 332, 335, 336, 338, 347, 349, 363, 368, 369, 375, 380, 382,384, 388, 393, 397, 402, 410, 416, 419, 420, 421, 424, 426,437, 442, 443, 448, 450, 457, 460, 463, 464, 472, 475, 481,485, 487, 488, 489, 491, 493, 494, 495, 498, 508, 516: n = A,T,C or G
  misc_feature 523, 525, 528, 531, 532, 534, 546, 550, 552, 553, 557, 559,562, 563: n = A,T,C or G
gcgtggncncggccgacgtncgcnggtaagatagttaancgtgcntaannnaactnccaatntacatactcngcttaaaatttgggggaaaatttagaaatntnattgacaggattatnggaaanttggtataatgaatgaaacattttgnnatataagattcatatnnacttcttatacntttgataaagnnaggcntggttgtggttaatctggnttatttttgnnccacnngttaantntntcntatnactngnnnnancctcatgacttangaaaanannggaaananctttgtgacctaaagacgatgccatgctnntaaaagnaanagnngncaaggctcnanatttgaaaaacgtnttccnnaaattnttttncncntttngatgnatcnaactngtcgtttngtcatnggnnnatntngaatgaaaccngtttnnaaacntntcctatnganttnnctttctcntanagtttntagngnnntntnnnctngttaaaatgnttttattntttgttngngtntanngnttcccttttctnctancnnagcngntgnngtc

SEQ ID NO: 4420 - DNA, 531 bp, Homo sapiens
  misc_feature 52, 97, 98, 103, 107, 115, 117, 122, 129, 132, 140, 141,143, 147, 149, 167, 185, 192, 197, 200, 203, 213, 216, 232,234, 248, 255, 257, 268, 273, 285, 292, 300, 306, 308, 311,313, 319, 321, 324, 331, 332, 340, 347, 349, 351, 353: n = A,T,C or G
  misc_feature 359, 365, 366, 376, 381, 383, 386, 390, 395, 401, 402, 413,414, 424, 426, 429, 431, 439, 441, 444, 445, 446, 453, 456,457, 459, 463, 465, 490, 494, 503, 505, 509, 523: n = A,T,C or G
actttttttttttttttttttttttttatttttttttttttttttttttttntttttttttttttttttagggtttcattatttatttatgacaaannttccncatntgggattntntccantcaaaanttntttgaaannangccntnggccttggccaatcgganaatggaatcatttgactnacccatnctacnaanggncccccaaatngcntaagttttaaactggncnttaaacctgcctgngaccttntnaacctcggccncgttnatttggaaggangcctggnccttggcncccatnangcnantggttncnganatttccnngggacgtnccttggncngnancacccnaagggnnaattccagcncactngnggnccgntactnatggannccaacttcggnncccaactttngnggnancaaggggnanaannngttcccnggnngnaaantngtttcccctcacaatttcccacaanatancaacccggnancttnaagggtaaaacccnggggggcc

SEQ ID NO: 4421 - DNA, 550 bp, Homo sapiens
  misc_feature 1, 13, 15, 17, 19, 23, 53, 54, 56, 57, 61, 63, 64, 65, 70,71, 78, 85, 95, 96, 104, 109, 110, 113, 116, 126, 129, 139,142, 144, 162, 201, 217, 219, 222, 228, 259, 279, 280, 284,290, 292, 311, 317, 327, 332, 338, 340, 350, 376, 383: n = A,T,C or G
  misc_feature 431, 433, 434, 452, 465, 479, 482, 489, 504, 510, 532, 548: n = A,T,C or G
nccagcggccgcncngncnggcncttttttttttttttttttttttggttggnncnntatngnnnacatnnctactgngcatacncatatatacnntgtatttnaaaannggnctntacaatatgnacnttgatcactnggntnacaacgtaaatatattgngaacattgtgctgtctacaacagttaaaagaattgaatncttggaggaaacacantntantaaacnatcttgtgtggggacattgaggcataatttnttttctaaggaggcttaatnntttnaacaangnctttgggaaaaaaaggggngttctngtcttatatngcttnctatanangatggaaacntgcccttccatttagcctttttactngcttctntaccacgacctaatcaccaatcaagttacccattttggttttaaaccncnntctctatttggcttccgntttctacccaatnttcctggggaaacnccnaaggggncttcattcctttggnactttnggttcctacccttaaagaaggnacctttccttttaaanaa

SEQ ID NO: 4422 - DNA, 443 bp, Homo sapiens
  misc_feature 7, 10, 12, 17, 26, 27, 34, 35, 40, 41, 47, 48, 66, 71, 77,80, 81, 82, 84, 89, 92, 102, 105, 112, 114, 123, 130, 134,145, 159, 197, 218, 219, 235, 242, 244, 273, 289, 293, 317,319, 343, 361, 363, 408, 426, 436: n = A,T,C or G
ggtactntcntnttctnctttttttnntttttgnnttttnnaacttnncacttttttttttttttnatggntgtggnttnnntntaaantcntgttctggtnttntttggantncatgcctanctctttnattntgaaaccaaanctggattctggacnctttgcattgattgctaaagcaagtttttgattggtancataacctgggtaaggttacnngagtgaaggtattgangaagatncncaattgatcttctgtgaatttggtgcaantgcacctatgatttgntgcnaccatcttgtgggaagagggggcntnaactatgcaaaaaagagagttctngaaggcctgaactactgncngggagactgcttacacctcattttttaaaaaagaaaggtcacatnttatacaatataaaaatncacaaagctnaagctta

SEQ ID NO: 4423 - DNA, 454 bp, Homo sapiens
  misc_feature 118, 154, 158, 168, 173, 179, 181, 183, 188, 192, 195, 199,206, 221, 223, 240, 252, 260, 262, 270, 271, 273, 293, 294,298, 300, 308, 317, 322, 324, 331, 332, 338, 345, 350, 364,373, 374, 375, 378, 383, 389, 390, 391, 392, 394, 415: n = A,T,C or G
  misc_feature 416, 419, 421, 427, 432, 446: n = A,T,C or G
acaggagagaatcaataaggagatagttaattcaccactacagctttgtgcattaaagacaagtttgcagaaagctatgtcttacaatcctcttttagttgcatcaaacactggcagntcaatgactttctacttcttataggcattttatgcntttnttcccactgnaatgntttttnanangatcnaacnccnaccnagatgcngcaaaccaaatcatncnaactgaaagatgaatgntattagtgaatnacattggntntttaatgnngnattggttcaaacaaaacatnnaatncntcatattnaactgaaantttgncnaggcgcnntgactnccccctntgatnccacactttttggngggcgaggnnngcngatcncaaagnnnngngatctatacccttttttcttnnatngngggaangctgnttttcttaaaaaanaaaaaatt

SEQ ID NO: 4424 - DNA, 559 bp, Homo sapiens
  misc_feature 44, 82, 109, 110, 112, 116, 123, 125, 146, 152, 158, 171,180, 189, 196, 223, 227, 230, 245, 250, 258, 259, 296, 308,310, 313, 320, 325, 326, 334, 337, 350, 365, 388, 390, 394,397, 398, 401, 416, 421, 422, 432, 450, 451, 458, 469: n = A,T,C or G
  misc_feature 486, 499, 504, 516, 517, 523, 536, 538, 551: n = A,T,C or G
acttttttttttttttttttttttttttttattaatatttgggncttacaaatgatcacttttaaatggacttttctgtaanaatgtaaaactcaaaaatttgccaagnntntatntgatccncncaaatccccaaaaagggtttntgggtngtcttnattaacgcaaatntttgggaangtttcactnttactgnaggatcttgaatatgttttacaataangaanctncaaagtttttatgcngggcnttcattgnnaactataaataacatttgtattaaaaagaaactgggnaatacaaaaatngnganactctgngggcnngcaattgngangccagaatatttntttgctttgggagcnggtgcatccttcaaaagcacccncnatgnggnntgnaatcatctggctggnacccnntatttaaaantggtgtccgaaaactggnnatttcanaacttttttgntattaccgaagtttgtnaaacttttgttgnggttnacaatgcggagnngctttnaaaaatggtttgnanctgcacccttaantttgggct

SEQ ID NO: 4425 - DNA, 651 bp, Homo sapiens
  misc_feature 129, 165, 185, 204, 207, 217, 228, 229, 231, 234, 283, 295,320, 323, 326, 349, 353, 358, 360, 369, 405, 406, 421, 431,445, 448, 462, 465, 466, 475, 476, 478, 483, 488, 490, 493,503, 505, 510, 520, 523, 524, 533, 537, 538, 548, 549: n = A,T,C or G
  misc_feature 557, 559, 563, 565, 568, 572, 573, 583, 585, 587, 590, 591,594, 596, 598, 600, 603, 605, 607, 612, 613, 618, 623, 629,631, 646: n = A,T,C or G
acgcggggtattgaactgggggttggtctggcctactgggctgacattaactacaattatgggaaatgcaaaagttgtttggatatggtaagtgtgtggttctcttttggaaattttttcaggtgattnaataataattaaaaactactatagaaaactgcaaancaaagggaatttcttctgangggaaccttttgatttatnaantaaaatcctnttttaagttgnngnaanccaagttttttttaagtggaagaaaaaaacctttccatttgttaactgnaaaacaaaaagntaagggattcctcaaaaattttggnaanttnttattttaaaacttatctgtttnaaanttggnancggttaaanaatttgggatagtccaccttgattgctttaaaaggnnggccttttgttaatnaaggaagggnaaactttttttttnctntaaactttttaaanaannatttttaannantaccnacccngnaantttattgccntnaagcnaaaaaaaaanctnncttggaaantggnnaataaaaggnnaaaaaaantntttncnatncctnnatgggggaanancntannccntnananttntncntctannaaaancattntctgcntntgccaaaaatttaancataa

SEQ ID NO: 4426 - DNA, 305 bp, Homo sapiens
  misc_feature 112, 124, 148, 154, 161, 164, 172, 184, 193, 199, 211, 212,221, 223, 224, 228, 231, 237, 244, 246, 257, 264, 266, 269,272, 277, 288, 290, 292, 297, 299: n = A,T,C or G
acacaagctttgaggaagtgcaaaggactgacctctaggccagaacaagatggaaaactaccaggcccatcaggcctataacccagacaccagcatggacaaaactcagttntactgaattcanagacaaaattcagtgacactcttntaccantttttanggnttttacancatttgactgancaaacttantttttngtcttggtgtannaacctttantnnaaanggntattanttaattnantactttgattnaattttntnttnctnatttnttatttatttncnanctttnantggctt

SEQ ID NO: 4427 - DNA, 651 bp, Homo sapiens
  misc_feature 92, 135, 143, 154, 169, 174, 185, 189, 217, 219, 227, 238,243, 250, 251, 253, 256, 261, 274, 275, 281, 286, 291, 296,297, 300, 302, 303, 332, 333, 334, 342, 344, 350, 360, 364,370, 372, 381, 386, 392, 403, 405, 414, 415, 431, 439: n = A,T,C or G
  misc_feature 449, 455, 456, 459, 461, 466, 467, 471, 475, 476, 478, 485,488, 496, 504, 512, 516, 517, 523, 528, 529, 530, 532, 549,552, 558, 565, 587, 599, 605, 612, 615, 616, 618, 621, 628,646: n = A,T,C or G
actttccagccactaattgagatgtagttatgaaagattagaattgccttaaaaaggggtcatgatacagctatcaaagcaatattcaagcntgatttcaaggatgctttcagggttaaaattaaccttccttgncaaaaatntgcacaacttnatcaaaaacttcatnaacanatttaaaagcntttnttttcttgactttccccatttcttcatntnaagcaatnattggctttgntgacngaagggnngnctnaattnttttttcccagcnntttttngtggnattanttctnncantnntttttccccttttaagaacttggtcaatnnnaatcttantnttccgnccaaaaaganaacnaaagancntttggcttnccatncatggncttggtccatncntgaagggtnnttgaattcttggaaanccatcatnaaaaaatttnttcttnngancnttggnncgcnttgnntnagaccanttncctctttnaataaccngatgggtntttnnactggnacctnnncnggcgggccctttaaaanggncaattncaccccntgggggggcggttctttgggantccagctcgggncccacntgggggnatnntnggnatatacnggttcccgtgggaaatgntgttt

SEQ ID NO: 4428 - DNA, 651 bp, Homo sapiens
  misc_feature 94, 118, 128, 146, 150, 158, 168, 173, 185, 186, 190, 194,198, 204, 225, 235, 242, 249, 250, 255, 257, 261, 269, 279,282, 289, 290, 295, 306, 310, 320, 329, 331, 340, 361, 362,363, 383, 395, 397, 400, 402, 403, 429, 435, 437, 448: n = A,T,C or G
  misc_feature 451, 458, 467, 472, 488, 491, 494, 501, 510, 516, 519, 521,523, 533, 557, 558, 565, 567, 576, 578, 589, 602, 605, 611,614, 621, 623, 632, 637, 644, 645, 647, 650: n = A,T,C or G
acaagtcattttaggaactaatagaaataggaatgtgggaaggccaggtggttctgtagaattttgaacaaggcttttccaagaaactcctccntccgcccccatcctccatatgganagttggtganctgaagtggattgacagntgantccttctntttgcagggntttanccgccagtcttnnctcntgtncaanattttntccagggtccggattcatcanatcacctcanatttggntcacctnntgttncnactngattttancaattccttnccnaggctgnngaacntttggcaggtnggancacccttggntaactaagnanacttttaangggggctttttaatgagtggnnnaattttaaacctggaaaaanactttatccaantnccntnnttttttaagtaaggcttaaaaaatanaggggngnccttcttttantanttttaanggggggttnttttntagtaaaaagtcttcntcntcntaaaatnctaaaaaancctgcnggngnanatagggggtnaagccctttggctagggttatggnnttggctntnctgggaggnanggggcccttcnactcccaattttnatntgaaantantttggcnanccgggggcnccccnccttggnngnccnc

SEQ ID NO: 4429 - DNA, 517 bp, Homo sapiens
  misc_feature 47, 114, 115, 135, 149, 162, 165, 172, 183, 185, 234, 238,265, 275, 276, 280, 292, 294, 305, 319, 325, 327, 336, 338,348, 362, 363, 366, 370, 371, 378, 380, 389, 397, 417, 421,422, 424, 427, 431, 432, 434, 439, 444, 457, 458, 462: n = A,T,C or G
  misc_feature 469, 472, 474, 475, 481, 497, 512: n = A,T,C or G
actctggatgccagcaccaagatctatgctgtgcgcgtggatgccgnccatgccgatgtatacagagtccttggggggctgggcaaagatgcaccgtctttggaagaagtaganngccatgttgctgatggaagngctactgaaatggnaacaaccaaaaanggntgtaaanccaaagaagangnacttacacagacctattgagcagaacataaacaacctcaatgctccaangcanatcggaattgtgagattgtccttgttncataagacannagcntcatttgatgantncactacagcangggtgttcatgtcncttctncnctgccatancntacataagtnaactgttgtttccnnctnaggnncaaactntntccaagggngaaacctntagggttgcaacagtaaggntggnnanaangttnncnatttnaaatngcctttggccccnntttngcaagantancnnaaaatnttgcctttacttgganggggttaaaacctancagga

SEQ ID NO: 4430 - DNA, 270 bp, Homo sapiens
  misc_feature 8, 9, 16, 18, 20, 42, 52, 58, 60, 71, 88, 92, 102, 121, 155,165, 166, 175, 180, 203, 218, 221, 222, 228, 235, 237, 240,242, 246, 248, 263: n = A,T,C or G
cgtgcccnnacgattncncngctttgaaagtgaaactatggntaccaaacanctattntnattatagcatntacagtgtctggaaaangatntaacaataantaactgtggacgcatcacnagacatccatttacttaatcacagaagtggatcntgctacatanntttctgaangtctncattctacaaattctccaggctnacgaatgtcatcaanctnnaaaatnattctancnatntntgtngnaagagatatcttgcngcttttt

SEQ ID NO: 4431 - DNA, 464 bp, Homo sapiens
  misc_feature 27, 29, 41, 44, 99, 171, 184, 205, 207, 214, 235, 239, 252,269, 271, 272, 276, 279, 281, 298, 300, 310, 311, 312, 324,328, 330, 338, 341, 344, 347, 353, 360, 362, 372, 377, 378,387, 389, 393, 395, 396, 410, 416, 418, 425, 435, 438: n = A,T,C or G
  misc_feature 452: n = A,T,C or G
acttttttttttttttttttttttgtntntaacccctgaancanttgattccagttcacgagcgctctcggtagctcaggaaagcgacatagtctctancacttagccctctcctacaatgcaaagcaaaaaagactgtggctccaggactctctgtgggcggaatcggcnctaaggagttggngcaattattttgttgcaaggnangaagccnaaaagcctgcatgcaacaaantggnatgaataaatttntgtttcccccctccttntnnaaanaangnagctggtaatggcaaananttccttcagnnnaactttttaaanagcngncaaaaacnaanaanccngacagngaaacangnccttttcccntaaannaagtttttntngtgnannttaaaaaccccccntccttncngggcggnccgttaaaanggncaaattcctaacancttgccggcctt

SEQ ID NO: 4432 - DNA, 486 bp, Homo sapiens
  misc_feature 2, 7, 15, 16, 17, 23, 30, 36, 38, 39, 42, 44, 59, 73, 98,99, 154, 156, 205, 214, 220, 248, 260, 273, 302, 327, 352,362, 371, 382, 385, 391, 394, 399, 400, 406, 410, 413, 415,417, 420, 427, 429, 430, 431, 432, 433, 437, 444, 445: n = A,T,C or G
  misc_feature 450, 455, 456, 458, 459, 463, 466, 473: n = A,T,C or G
gnctcgncgcctttnnngtctcncaccaancccatngnngcncngtaactctaacacanttccttaaggaatnagcatgggttcgtaggaagcaaacnnagctctccatagagaaaccactttcacaggatgattaggtggacctgcaatgaananaatacatttcaaaagatgggttctgacttacaccaagttttcactgatntacttaaanaaaaancgacccttctctgtatcaaaagaattanaaaaaattcatnacggataaaatanatctcaggaaaaggtccaagtcctctcanagacatacatttgctaattaatatnaatttaaagtttgacaacaaaattnctattggganctaccttanaataggccatnctnagttcntgnttctnntttacntgcnttncntnganatgaatncnnnnntctnctataannatttntcttnntnntatnatncaacatnggttgttctctta

SEQ ID NO: 4433 - DNA, 648 bp, Homo sapiens
  misc_feature 120, 165, 228, 264, 273, 275, 284, 291, 292, 300, 323, 324,328, 368, 378, 390, 393, 403, 409, 415, 417, 419, 432, 434,448, 451, 459, 460, 462, 476, 478, 483, 484, 485, 491, 494,505, 510, 513, 522, 526, 527, 532, 533, 541, 546, 549: n = A,T,C or G
  misc_feature 561, 572, 578, 582, 590, 592, 596, 597, 606, 609, 619, 622,625, 628, 632, 634, 641, 643: n = A,T,C or G
acgcgggggcgtcttgttcttgcctggtgtcggtggttagtttctgcgacttgtgttgggactgctgataggaagatgtcttcaggaaatgctaaaattgggcaccctgcccccaacttnaaagccacagcttgttttgccagatggtcagtttaaagatatcancctgtctgactacaaaggaaaatatgttgggttcttctttacccttttgacttcacctttgtngcccacggaaatcattgtttcaattgataggggcanaaaaatttnanaaactcaanttgccanntgatggtnccttcttgggaatcttacttttnncaantaaccatgggtaattacacctaaaaaaaaagggaggactngggacccatnaacattcctttngtntcaaaacccnaacccnccattngntnaagatttttgggntnttaaaaggctgatnaangcattctnntnaaggggcctttttntnattannnaataanggntttccttcggnaaaanaantttaaaatnaccnnccctnntgggcccnttttntgnattaaaactttnaaaactatttnaaggcnttcnatttactnanaaanntggggaatnttncccacttggnttnganacntggnantataccntnaaccc

SEQ ID NO: 4434 - DNA, 648 bp, Homo sapiens
  misc_feature 61, 64, 85, 143, 172, 217, 225, 235, 256, 274, 276, 277,283, 291, 295, 304, 310, 326, 338, 340, 341, 349, 355, 374,376, 381, 385, 396, 400, 409, 419, 425, 426, 436, 444, 445,453, 454, 462, 463, 467, 472, 476, 478, 487, 493, 503: n = A,T,C or G
  misc_feature 504, 510, 512, 515, 519, 520, 527, 535, 537, 540, 542, 548,550, 553, 555, 559, 562, 564, 567, 570, 572, 577, 578, 579,580, 583, 588, 592, 594, 596, 597, 598, 623, 636: n = A,T,C or G
acgcgggggctgcgcgccgcctaggtgtctgggcgatctatgggcaagagcaagggccacnatnacagattacggcgaggagcanctcaacgagctggaggccctggagtccatctaccctgactccttcacagaattatcanaaaatccacccagcttcaccattactgtnacgtctgaggctggaaaaaatgatgaaactgtccagactaccctnaagtttanatacagtganaaatcccagatgaaactcccntttatgaaatattctccnannaaaatnttaaaaanatantgatgtctnatgacnttattaaaattactancatttcatgctnannaaaatctnggtatnatgatgatttatactatantnactcnggancaataaaaaantaanggatataanttttaaatanaatttnntatttataanatattaannattataanntgaatctnnaaantttanttanantttattacntttttnatctaataannaacatnanaantatnnataaaantaataatngnagnanttattnanatnanctanatnantancantnaaatnnnntantagtnaaanantnnntgaaatgtgaattcagatgtaattnggttattattttnttaaaaaataaa

SEQ ID NO: 4435 - DNA, 373 bp, Homo sapiens
  misc_feature 92, 98, 127, 133, 151, 161, 171, 187, 196, 201, 207, 209,210, 217, 223, 228, 229, 235, 238, 244, 247, 248, 252, 253,261, 263, 265, 266, 268, 274, 275, 279, 282, 298, 299, 306,318, 319, 326, 327, 330, 332, 343, 344, 353, 354, 364: n = A,T,C or G
acgcgggggcagtcagcgagcccacgtgcttgtgttgactggacaacttcctggtggaaaaccgcgactcttgcaagtgggcaaacttgacnttttcnctatgggcaaacgcgggagccggagccanagccanctactcaacacctctaantaaaaagcanaaaaaacatntttcgatatttcggtnaggagcatncctantataanannggttttnataatnggatnnttatcnatnagattngtnncctnnaaaaatantntnnancatctnnaaantanaacatctgcttataannttcaacntaaacttatttnnggttatnnatnanaactacttatnntattatctnntattagattnatactaaat

SEQ ID NO: 4436 - DNA, 538 bp, Homo sapiens
  misc_feature 139, 145, 212, 213, 233, 237, 245, 248, 253, 257, 260, 261,263, 267, 269, 280, 282, 287, 293, 294, 302, 307, 310, 312,313, 318, 321, 333, 338, 342, 349, 364, 372, 380, 381, 383,389, 391, 392, 397, 398, 399, 403, 407, 409, 410, 413: n = A,T,C or G
  misc_feature 423, 424, 426, 427, 432, 433, 437, 440, 446, 447, 449, 452,456, 460, 464, 469, 470, 473, 477, 486, 496, 501, 503, 504,506, 509, 518, 528: n = A,T,C or G
accgccgggttgaaaaagaaacaaaggaatactttgagagttggggagaaagtggagaaaaaaatgtgtttgaagctctttctgagctcataattttaacagctagccattgtttgcatggaaaggaaatcagaagtcnactcantgaaaaggtaccacagctgtatgcatatttggatggaggtttcacccatccagcctgtctcttaccnngtggctgcctttcctagttncaancgcatggncanacctnctcngcnnancccngntcttttccctnangccanccccgnncctccccngcctnccnanntcttngtngacattctcctnctgtncttnttgctcnttaatgggattgccncccctttnactcttgnntntcctcngnnccgtnnntctngatncnnccnctggccgccnncnnttctnnactnctnaccctnncnctncctntccntttnccccnntcncctnccctctccnacctcctttncctcncnncntcnctccgccangaccctactnttctcctctt

SEQ ID NO: 4437 - DNA, 215 bp, Homo sapiens
  misc_feature 26, 28, 51, 57, 89, 102, 104, 125, 137, 143, 149, 152, 155,159, 160, 165, 174, 176, 180, 193, 207, 210, 212: n = A,T,C or G
acttttttttttttttttttttcagngnaaaataacttttattgaaacccnaccaantgcaaaatctgttcctggcattaagctccttnttcctttgcaatncngtctttcttaatggtcccatnaatgctttcttntcctcnatggtntgnaancggnnatggncaaacttgnangtgntgtcaataaactnaaggtaaatttttnaananacc

SEQ ID NO: 4438 - DNA, 383 bp, Homo sapiens
  misc_feature 6, 11, 12, 15, 19, 21, 27, 69, 72, 78, 122, 149, 170, 173,186, 190, 200, 206, 218, 240, 243, 251, 257, 261, 265, 271,276, 295, 297, 311, 315, 320, 340, 345, 347, 349, 357, 363,364, 369: n = A,T,C or G
accctncagannatngtgntntttacnccattttctacaactctggattgcttgatacctttatagganaangcaaanattatatttttgtgtctaacatatataatctgggtgccacagtngatctgtatattcttaatcatctaatnaacccacccaatttgaaaacnctnttaatttgtcatngaantcacaaatanaacacntcatatgtaaanggctggacactcactcaatatnaangcaaactnatactngttnaaanttgctnaagtnccaaaatgcacatttaaancnattttcaaattctngttncaaanttcaaaaaattttaatacanacaancnanttgatttntttttnnacatnttaaaaaacttcaa

SEQ ID NO: 4439 - DNA, 520 bp, Homo sapiens
  misc_feature 4, 6, 16, 20, 38, 63, 76, 107, 113, 169, 171, 173, 178, 206,232, 240, 254, 255, 274, 275, 281, 290, 294, 305, 308, 311,312, 314, 321, 324, 326, 327, 332, 335, 345, 347, 353, 364,366, 374, 381, 396, 404, 406, 413, 414, 416, 419: n = A,T,C or G
  misc_feature 435, 439, 444, 449, 453, 458, 465, 469, 470, 472, 476, 480,482, 488, 490, 493, 495, 518: n = A,T,C or G
acangnggaacaatcnggtntttttaatcaaagaaggnggtgttcagttgctgctcacaatanttgataccccacnatttggaaatgcattggataatattaattgntggcancctgttatcaactacattgatagtaaatttgaggactacctaaatgcaaaatcacnantnaacanacttcatatgcctgataacagggtgcantgttgtttatacttcattgctccttnaggacatngacttaaaccattnngaatattgatttattgaanngtttgnataaaaaantgantatcattccanttnttnncnaagtaanatncnnttacnccnaaatgaaatncnatcatnttaaaaatcantnttttaatnaatttcnagaacattatattanaattattncnaatttcnnanaancgtattaataatcatnattntacancttcnttanaaaantaacggncccnntnactntatncntggagnangcnanttaatgttatcttctaaaataantg

SEQ ID NO: 4440 - DNA, 550 bp, Homo sapiens
  misc_feature 86, 394, 397, 402, 407, 408, 413, 419, 434, 439, 440, 442,443, 444, 445, 446, 447, 448, 449, 450, 451, 452, 453, 454,455, 456, 457, 458, 459, 460, 461, 462, 463, 464, 465, 466,467, 476, 478, 479, 480, 483, 485, 490, 493, 497, 500: n = A,T,C or G
  misc_feature 501, 504, 513, 516, 518, 521, 525, 527, 531, 534, 536, 541,542, 544, 547, 548, 549: n = A,T,C or G
accatagccaaatctgggacaagcgagtgtttaaacaaaatgactgaagcacaggaagatggccagtcaacttctgaattgattgnccagtttggtgtcggtttctattccgccttccttgtagcagataaggttattgtcacttcaaaacacaacaacgatacccagcacatctgggagtctgactccaatgaattttctgtaattgctgacccaagaggaaacactctaggacggggaacgacaattacccttgtcttaaaagaagaagcatctgattaccttgaattggatacaattaaaaatctcgtcaaaaaatattcacagttcataaactttcctatttatgtatggagcacaagactgaaactggttgagggacccatggaggaanaanaaccnccccnngaaanaagaanaattttgtgattaanctgcnntnnnnnnnnnnnnnnnnnnnnnnnnnngtccttggncnnnacncncttanggngaantcnnccnctggggggncgntnttnttgnanccanttngncccanntnggnnnt

SEQ ID NO: 4441 - DNA, 558 bp, Homo sapiens
  misc_feature 31, 33, 315, 359, 380, 385, 413, 414, 417, 423, 426, 428,429, 433, 438, 446, 448, 451, 453, 454, 461, 463, 464, 466,467, 470, 471, 474, 476, 479, 481, 482, 485, 487, 493, 494,495, 499, 504, 505, 509, 510, 511, 512, 513, 514, 515: n = A,T,C or G
  misc_feature 519, 520, 521, 522, 529, 530, 533, 535, 538, 539, 541, 542,543, 544, 545, 548, 549, 550, 552, 553, 554, 555, 556: n = A,T,C or G
ggtactggatccaggtgaggttgtgggctgngncccgaaggtgcttggctcctttatggcgcatgacaaactcaatccagaagactgctcgatccaggggcttcaccggttgatcatgatgaattcttgataatttcatgatattctctttatagatagggtcattaatgactgacttcaatgcattgagcaaatctctacttgacatggtcctgatgtccacactgagggctgctcccttggctttcatgtgagcaatgttatcatgttgatccgcaaacaagggaatgcccaccataagggatcccatggtanatcgcctcataaatgcccattggttccccatgaagttataaaanggttggtttgggatgaccaanaaggncattctggggtaaccccccgcgtacctnnccnggcggncgntnnaaangggcnaattcacncnctngnnggccgtnannannggnnccnanctngnnccnancttggnnnaatnatggnntaannnnnnncctnnnnaaaattnnttncnttnnannnnnccnnnannnnncc

SEQ ID NO: 4442 - DNA, 571 bp, Homo sapiens
  misc_feature 332, 357, 362, 363, 365, 366, 375, 378, 379, 380, 387, 391,393, 394, 395, 397, 402, 403, 404, 405, 407, 408, 409, 411,419, 423, 424, 425, 427, 428, 430, 431, 433, 434, 435, 436,437, 438, 439, 440, 441, 442, 443, 444, 445, 449, 455: n = A,T,C or G
  misc_feature 458, 460, 464, 478, 479, 480, 481, 482, 493, 518, 519, 523,529, 530, 531, 532, 533, 535, 543, 546, 552, 557, 565, 568,570, 571: n = A,T,C or G
ggtacgcggggaggagatcgccattatccccagcaaaaagctccgcaacaagatagcaggttatgtcacgcatctgatgaagcgaattcagagaggcccagtaagaggtatctccatcaagctgcaggaggaggagagagaaaggagagacaattatgttcctgaggtctcagccttggatcaggagattattgaagtagatcctgacactaaggaaatgctgaagcttttggacttcggcagtctgtccaaccttcaggtcactcagcctacagttgggatgaatttcaaaacgcctcggggacctgtttgaattttttctgtagtgctgnattattttcaataaatctgggacanccccnntnnaaaaaaatnttnnnatttacncccntnnntngcctnnnncnnncnccattttntaannntnnanntnnnnnnnnnnnnntttnccggtnggncnttcnaaaggggggaattnnnnncctcccccggnccctttttaaaggggttttttcccnncttngggggnnnnntntaaaaaanccncctggncaaanttttgttnccntnn

SEQ ID NO: 4443 - DNA, 370 bp, Homo sapiens
  misc_feature 306, 350: n = A,T,C or G
acctattagtagtcaccgccttttcccttcctcccagcccctaacaaccactaatctacttcctgtctctacggatttgcctactctggacatttcatataaataggttaatacgatgcgtccttttatacacaaatgttcatagcagcattactcataaaagccccaaagcgaaacacctcaagtgtccatcaaccgatgaatggataaacaaaatgtaatatatccacacaatagaatcttattcgtcaataaaaaggaatgaagtactttttttttttttttttttgggattttttaggtagngggtgttgagcttgaacgctttcttaattgggggctgcttttangcctactatgggtggtaaat

SEQ ID NO: 4444 - DNA, 633 bp, Homo sapiens
  misc_feature 12, 40, 85, 96, 105, 106, 115, 121, 129, 141, 178, 222, 232,243, 247, 269, 319, 321, 341, 351, 367, 372, 374, 384, 387,392, 400, 405, 406, 432, 435, 438, 440, 442, 453, 454, 467,470, 477, 480, 488, 491, 494, 496, 502, 510, 511: n = A,T,C or G
  misc_feature 518, 524, 525, 529, 540, 546, 547, 549, 550, 554, 562, 568,572, 576, 580, 588, 589, 595, 622, 623, 627, 629: n = A,T,C or G
ggtacgagtgtntagtgatgagtttgctaatacaatgccngtcaggccacctacggtgaaaagaatgatgaatcctagggctcanagcactgcagnagatcattnnatatcgctnccgtgnagtgtggngagccagctaantactttgacgccggtggggatagcgatgattatggtngcggaggtgaaatatgctcgtgtgtctacgtctattcctctgtnaatatatggngtgctcacacnatanaaccctatgaagccaattgatntcatagctcagaccattcctatgtatccaaatggttctttttttccggantntaatgttacaatatgggganattattccgnaagcctggtagggatnagaantntaactttcanggngaccnaaaaatcntaatnngtgtctggttaaagaatgggggtctnctnccncngncggggtcctannaaagggggtcgtnagnggttgcngcntgttgtantanttntnattccnccatcttnncactggngaaaannttgnataattctggnctctcnncnntatngaccggcncaaccnatanggtntttngtttgggnnttggcngggggttttattttaaattttgggggnnaaantntgcg

SEQ ID NO: 4445 - DNA, 890 bp, Homo sapiens
  misc_feature 3, 27, 28, 29, 35, 37, 39, 57, 84, 90, 118, 134, 146, 260,278, 289, 296, 305, 311, 315, 350, 407, 417, 418, 421, 425,440, 445, 451, 492, 511, 516, 520, 531, 538, 541, 546, 565,568, 594, 601, 625, 638, 646, 662, 663, 664, 679, 680: n = A,T,C or G
  misc_feature 683, 685, 699, 705, 711, 715, 733, 738, 739, 750, 765, 768,769, 783, 785, 791, 792, 804, 809, 815, 816, 817, 819, 822,827, 829, 830, 831, 838, 843, 846, 849, 850, 853, 858, 860,865, 871, 876, 877, 880: n = A,T,C or G
acncgggtgcaagagtctcgctcagcnnnaaatangntngctttcttttaattacantgcccattttgaaattgcctatacagncttagngaccatttaaaccggacgaactacgtgnttaattttcactcttnatgttcaattancagttcaaattaaagaagatggttattggagaacttttttgaatggttttgtattaaattgctttgaaatagatttcatttcttgtgcacacagccaagatttcttcaatgggncgtgagctagttgagggntaaccttgtangttgcanagtgcattngcttgnttgnttgatcttctctgtgatgaggtcagtgctctgatnttgaaggaggatattcactgaagctcatagtttataaacaaggaaatcactgataanaatgggaatnngtnctgngttctgggaaaaacntaaanagagcnactgatttcagccagcctttgccactacccctataattaantgccagtcttatgttatanaaganaganagtttaactantatttgnggnccaanaaaatattcacgagtttgntanagattaccctgtgcatgtgcagagcncttttantgccaccagcttttcaagaaaaangccctatctaagnaccttggnccgcgaaccacgcttnnngggcggaattccaannaananttgggcggccgttnactaancggaantccngcctcggggttcccaaanccttnngggggaatccnatggggccataggcntgnnttccctgggggggnanaaatgnntttcccgtctcncaatncccccnnnancantatcncnnncccgggnaaatnttnaanntgngtaananccccngggggnccccnnagnagggcgagcc

SEQ ID NO: 4446 - DNA, 603 bp, Homo sapiens
  misc_feature 79, 144, 147, 148, 157, 162, 171, 184, 186, 197, 203, 204,207, 209, 226, 231, 232, 236, 238, 239, 242, 245, 246, 248,256, 257, 260, 261, 262, 272, 296, 349, 358, 362, 365, 395,405, 427, 453, 461, 463, 464, 465, 468, 477, 482, 486: n = A,T,C or G
  misc_feature 494, 497, 498, 502, 510, 556, 558, 561, 564, 569, 571, 573,586, 589, 591, 592: n = A,T,C or G
acaaatgttttttattcaaaaatacaaaataaattatctgtaggcatggacaatgacagcagtaaaccattatatattntggcaactgaaaccagtaactgatggttatagtgattttcagccagcctttttcttcattttctncanntgacttgtntgaanttatatggngaggaacactgcntngggcttcctgncacagnncantnctagtagggccagctgnattanngaantnnggnaanncncggggagnntannncctcccattncacccattgcacccattccagggnccttctcttctttaggaatttctgtgactacaactttctgctgtagttaacanaagaggccncacnaancagcaatccaataaagcagggtcttcacanacctttgttngggcccaatggattcccttttntccaccataattcacaaaatctccanccattagnannntancccactttntgaangaanctttggcntanntttnttcaactnttcaaaagatccttccacaacctgcatttcttaaccaatgggccantnggnggnatttnangngtcctttaataanttntnnacccaattttt

SEQ ID NO: 4447 - DNA, 647 bp, Homo sapiens
  misc_feature 199, 249, 250, 257, 264, 266, 268, 270, 275, 276, 281, 284,321, 336, 344, 345, 346, 361, 362, 372, 387, 392, 408, 411,430, 433, 436, 445, 446, 454, 458, 464, 472, 481, 483, 484,485, 488, 499, 508, 511, 517, 520, 523, 527, 532, 542: n = A,T,C or G
  misc_feature 543, 544, 548, 553, 554, 556, 558, 565, 579, 584, 590, 595,596, 599, 600, 611, 617, 620, 621, 632, 644: n = A,T,C or G
actttgggagaatcgtggtgtcctggatggcctgatcaatgtattaaaatcaagcagtatgtcttcttaaaatactcttaaatccatacaaatgttgcttgggttgtggagctgagatttctcctactggcatgataaaatttgaacatgtgttatgaaaagttcacaccaattttggttttggtccttcttcattaancccggtgggcttcccttttccattttcttcctttggtggtccggctggtnnttttttntttggcngncnanttccnngtggnctnaaaaatttttttttggtttgcaagggctggatttttnttttttttttccatngcatgggnnntttcccgcccagggnnttttaagtcncccaatttcaaaaancttgngggaattaaagggcanaanttgggggaccggcaaatcnacnaanaaaaacccnngccccccnttgngggaangccaaaantaaaggggntnnnttnttattaaaaancaattttcnggntttttncanaanaggnggggngcgggggccnnnaaanatagnngngncccaagngggtccaaaaaaanttttngggggnggggnncannttcccattccntctttngannttttaaacagngggggggggggnttt

SEQ ID NO: 4448 - DNA, 649 bp, Homo sapiens
  misc_feature 207, 225, 228, 238, 243, 245, 251, 275, 277, 284, 295, 301,304, 309, 315, 318, 319, 331, 335, 342, 348, 350, 354, 371,372, 373, 385, 389, 390, 391, 396, 413, 428, 433, 436, 455,463, 473, 476, 478, 485, 487, 491, 507, 515, 522, 539: n = A,T,C or G
  misc_feature 542, 543, 544, 545, 547, 548, 550, 578, 586, 598, 599, 602,611, 614, 631, 636, 639, 641, 644: n = A,T,C or G
acctactggtagttgggttcagggaaatgggattgacttggccttcaggctcctttggtcataattttaaaatatgggagtagaaaacaacaaagaatggaatggactcttaaaacaatgaaagagcatttatcgtttgtcccttgaatgtagaatttgttttttgatttcataattctgctggtaaaatgtgacagttaaaatggngcattaatggtttttatnttntaattttaanaaatncntttttntaattttacctttcccagggggancntaaggcntttaaaatttngggganttnggggnggagtnttnntgtttaacctgnagtngccaagntataantncctncaggaaaaaaaaaaatnnnggtttaaaaaancaannnttttntttaacctttggaaccnttgggttctttaaanttccnaanaatttaaaaattttaaaanttttttantttaaaaatngcnantcctttncntttnggaaaggggttttttnaaaaaatncttttanaaaggcccccaaacctnttnnnntnncnttaaactcttttttttaaaacagggttngggggggntaacttcaccannttntaaaccccnccngggggggccctttaaangggcnaantnccnacccc

(The sequence listing continues in the following parts.)
